United States Patent Application Publication US 2007/0048756 A1 - sequence listing, part 9

SEQ ID NO: 290133 - DNA, 33 bp, Homo sapien
tgatcctggagtctcacgttttctatcagcatc

SEQ ID NO: 290134 - DNA, 33 bp, Homo sapien
tgatcctggagtctcatgttttctatcagcatc

SEQ ID NO: 290135 - DNA, 33 bp, Homo sapien
agcacaaataatcaaacgtttgtcctatcttct

SEQ ID NO: 290136 - DNA, 33 bp, Homo sapien
agcacaaataatcaaatgtttgtcctatcttct

SEQ ID NO: 290137 - DNA, 33 bp, Homo sapien
gcttacaaagtacacacgtcatgacctacttga

SEQ ID NO: 290138 - DNA, 33 bp, Homo sapien
gcttacaaagtacacatgtcatgacctacttga

SEQ ID NO: 290139 - DNA, 33 bp, Homo sapien
gtggagagcaatttgaggggacaaaaccagttc

SEQ ID NO: 290140 - DNA, 33 bp, Homo sapien
gtggagagcaatttgatgggacaaaaccagttc

SEQ ID NO: 290141 - DNA, 33 bp, Homo sapien
aaaaccttcttcaccactctagatgctattaag

SEQ ID NO: 290142 - DNA, 33 bp, Homo sapien
aaaaccttcttcaccattctagatgctattaag

SEQ ID NO: 290143 - DNA, 33 bp, Homo sapien
tatatattttctaggacgttattgtctcttctc

SEQ ID NO: 290144 - DNA, 33 bp, Homo sapien
tatatattttctaggatgttattgtctcttctc

SEQ ID NO: 290145 - DNA, 33 bp, Homo sapien
acttctgctaatttcaaactagtgacttggaaa

SEQ ID NO: 290146 - DNA, 33 bp, Homo sapien
acttctgctaatttcatactagtgacttggaaa

SEQ ID NO: 290147 - DNA, 33 bp, Homo sapien
tccatgttgaaattgaacgcagatagcacaacc

SEQ ID NO: 290148 - DNA, 33 bp, Homo sapien
tccatgttgaaattgagcgcagatagcacaacc

SEQ ID NO: 290149 - DNA, 33 bp, Homo sapien
taattaaaaggtcccaacgcagcatttcctatg

SEQ ID NO: 290150 - DNA, 33 bp, Homo sapien
taattaaaaggtcccatcgcagcatttcctatg

SEQ ID NO: 290151 - DNA, 33 bp, Homo sapien
atattgtaaaatgtcaagtgttgcaaataacat

SEQ ID NO: 290152 - DNA, 33 bp, Homo sapien
atattgtaaaatgtcaggtgttgcaaataacat

SEQ ID NO: 290153 - DNA, 33 bp, Homo sapien
ccaagccacaaaactaggggcgtgtgcagtcaa

SEQ ID NO: 290154 - DNA, 33 bp, Homo sapien
ccaagccacaaaactatgggcgtgtgcagtcaa

SEQ ID NO: 290155 - DNA, 33 bp, Homo sapien
atcagcagagtaatagccaagactgtagtagga

SEQ ID NO: 290156 - DNA, 33 bp, Homo sapien
atcagcagagtaataggcaagactgtagtagga

SEQ ID NO: 290157 - DNA, 33 bp, Homo sapien
tttttggaggtgctagcattttattggccacag

SEQ ID NO: 290158 - DNA, 33 bp, Homo sapien
tttttggaggtgctagtattttattggccacag

SEQ ID NO: 290159 - DNA, 33 bp, Homo sapien
aattcttctgccatgaaaaattagcaacatagt

SEQ ID NO: 290160 - DNA, 33 bp, Homo sapien
aattcttctgccatgagaaattagcaacatagt

SEQ ID NO: 290161 - DNA, 33 bp, Homo sapien
tcacgctgactctctccactggaagtgtcctct

SEQ ID NO: 290162 - DNA, 33 bp, Homo sapien
tcacgctgactctctctactggaagtgtcctct

SEQ ID NO: 290163 - DNA, 33 bp, Homo sapien
gactccagatcctaaacggtaaaccactactct

SEQ ID NO: 290164 - DNA, 33 bp, Homo sapien
gactccagatcctaaatggtaaaccactactct

SEQ ID NO: 290165 - DNA, 33 bp, Homo sapien
atgaggtgttatctaaggactgaatgacggaaa

SEQ ID NO: 290166 - DNA, 33 bp, Homo sapien
atgaggtgttatctaatgactgaatgacggaaa

SEQ ID NO: 290167 - DNA, 33 bp, Homo sapien
ctgccctaaatatgcccgattgtttgagagcca

SEQ ID NO: 290168 - DNA, 33 bp, Homo sapien
ctgccctaaatatgcctgattgtttgagagcca

SEQ ID NO: 290169 - DNA, 33 bp, Homo sapien
gactctaatggatataagctgccaattttccag

SEQ ID NO: 290170 - DNA, 33 bp, Homo sapien
gactctaatggatataggctgccaattttccag

SEQ ID NO: 290171 - DNA, 33 bp, Homo sapien
cggcactcattaagcaagagtcggccttgcccc

SEQ ID NO: 290172 - DNA, 33 bp, Homo sapien
cggcactcattaagcaggagtcggccttgcccc

SEQ ID NO: 290173 - DNA, 33 bp, Homo sapien
cttctgaggcattggacgaatatggccacagtg

SEQ ID NO: 290174 - DNA, 33 bp, Homo sapien
cttctgaggcattggatgaatatggccacagtg

SEQ ID NO: 290175 - DNA, 33 bp, Homo sapien
tttgagtcactttcacacaaatcacttctgtct

SEQ ID NO: 290176 - DNA, 33 bp, Homo sapien
tttgagtcactttcacgcaaatcacttctgtct

SEQ ID NO: 290177 - DNA, 33 bp, Homo sapien
attcatcaggtgctcacgcctgcacagtcggca

SEQ ID NO: 290178 - DNA, 33 bp, Homo sapien
attcatcaggtgctcatgcctgcacagtcggca

SEQ ID NO: 290179 - DNA, 33 bp, Homo sapien
tatagccagaaaccgccgacaaaagccaggcca

SEQ ID NO: 290180 - DNA, 33 bp, Homo sapien
tatagccagaaaccgctgacaaaagccaggcca

SEQ ID NO: 290181 - DNA, 33 bp, Homo sapien
ttaggttgaagcttgcaaggtaggcaaggtaag

SEQ ID NO: 290182 - DNA, 33 bp, Homo sapien
ttaggttgaagcttgcgaggtaggcaaggtaag

SEQ ID NO: 290183 - DNA, 33 bp, Homo sapien
acaactaagctcggtgaagggctaagacttgat

SEQ ID NO: 290184 - DNA, 33 bp, Homo sapien
acaactaagctcggtggagggctaagacttgat

SEQ ID NO: 290185 - DNA, 33 bp, Homo sapien
aaagtcactcttgttacgctttatcaaagagac

SEQ ID NO: 290186 - DNA, 33 bp, Homo sapien
aaagtcactcttgttatgctttatcaaagagac

SEQ ID NO: 290187 - DNA, 33 bp, Homo sapien; identical to SEQ ID NO: 290185

SEQ ID NO: 290188 - DNA, 33 bp, Homo sapien; identical to SEQ ID NO: 290186

SEQ ID NO: 290189 - DNA, 33 bp, Homo sapien
ttaagcctaagattccacgtttttgggtatcct

SEQ ID NO: 290190 - DNA, 33 bp, Homo sapien
ttaagcctaagattccgcgtttttgggtatcct

SEQ ID NO: 290191 - DNA, 33 bp, Homo sapien
tgtcactctctccatagctgtaccattcctacc

SEQ ID NO: 290192 - DNA, 33 bp, Homo sapien
tgtcactctctccatatctgtaccattcctacc

SEQ ID NO: 290193 - DNA, 33 bp, Homo sapien
ggtacatcctcaaaagacgatggttttcaaact

SEQ ID NO: 290194 - DNA, 33 bp, Homo sapien
ggtacatcctcaaaaggcgatggttttcaaact

SEQ ID NO: 290195 - DNA, 33 bp, Homo sapien
tcatagagataaaactcacaaagtgcctcaagg

SEQ ID NO: 290196 - DNA, 33 bp, Homo sapien
tcatagagataaaactgacaaagtgcctcaagg

SEQ ID NO: 290197 - DNA, 33 bp, Homo sapien
tgtatgttttatcagaaagttctagaaatgagc

SEQ ID NO: 290198 - DNA, 33 bp, Homo sapien
tgtatgttttatcagatagttctagaaatgagc

SEQ ID NO: 290199 - DNA, 33 bp, Homo sapien
caagagggtaggaataaggcacgttactcagaa

SEQ ID NO: 290200 - DNA, 33 bp, Homo sapien
caagagggtaggaatacggcacgttactcagaa

SEQ ID NO: 290201 - DNA, 33 bp, Homo sapien
agtccctttacgtggacgagtaatgcttgtgtt

SEQ ID NO: 290202 - DNA, 33 bp, Homo sapien
agtccctttacgtggatgagtaatgcttgtgtt

SEQ ID NO: 290203 - DNA, 33 bp, Homo sapien
agagtgtcaagaacaaatggtaggttcccaaca

SEQ ID NO: 290204 - DNA, 33 bp, Homo sapien
agagtgtcaagaacaagtggtaggttcccaaca

SEQ ID NO: 290205 - DNA, 33 bp, Homo sapien
ttttgaggtactaacacggatagttttatgtta

SEQ ID NO: 290206 - DNA, 33 bp, Homo sapien
ttttgaggtactaacatggatagttttatgtta

SEQ ID NO: 290207 - DNA, 33 bp, Homo sapien
aggtgcctttcataaccgatactctcactttct

SEQ ID NO: 290208 - DNA, 33 bp, Homo sapien
aggtgcctttcataactgatactctcactttct

SEQ ID NO: 290209 - DNA, 33 bp, Homo sapien
atgtggataaggcacaaaaatattcctctggca

SEQ ID NO: 290210 - DNA, 33 bp, Homo sapien
atgtggataaggcacagaaatattcctctggca

SEQ ID NO: 290211 - DNA, 33 bp, Homo sapien
ccctgactgaaatttacggtggtgatgtagcaa

SEQ ID NO: 290212 - DNA, 33 bp, Homo sapien
ccctgactgaaatttatggtggtgatgtagcaa

SEQ ID NO: 290213 - DNA, 33 bp, Homo sapien
gttttcctggaaaaaaactgtacctcggcttcc

SEQ ID NO: 290214 - DNA, 33 bp, Homo sapien
gttttcctggaaaaaacctgtacctcggcttcc

SEQ ID NO: 290215 - DNA, 33 bp, Homo sapien
gcattagcaaacatcaatagtttacgatccaga

SEQ ID NO: 290216 - DNA, 33 bp, Homo sapien
gcattagcaaacatcagtagtttacgatccaga

SEQ ID NO: 290217 - DNA, 33 bp, Homo sapien
gctgttaggcaccgctcaccactgggcgttaag

SEQ ID NO: 290218 - DNA, 33 bp, Homo sapien
gctgttaggcaccgctgaccactgggcgttaag

SEQ ID NO: 290219 - DNA, 33 bp, Homo sapien
tttccaaactgttccactatgtacgttaacagt

SEQ ID NO: 290220 - DNA, 33 bp, Homo sapien
tttccaaactgttccagtatgtacgttaacagt

SEQ ID NO: 290221 - DNA, 33 bp, Homo sapien
tagtctttctaagaataaatttcctcactggca

SEQ ID NO: 290222 - DNA, 33 bp, Homo sapien
tagtctttctaagaatcaatttcctcactggca

SEQ ID NO: 290223 - DNA, 33 bp, Homo sapien
cctcactggcacaacacagtaccaccaccactt

SEQ ID NO: 290224 - DNA, 33 bp, Homo sapien
cctcactggcacaacatagtaccaccaccactt

SEQ ID NO: 290225 - DNA, 33 bp, Homo sapien
tcctgactgtaaaaaacggtggaggccgggcac

SEQ ID NO: 290226 - DNA, 33 bp, Homo sapien
tcctgactgtaaaaaatggtggaggccgggcac

SEQ ID NO: 290227 - DNA, 33 bp, Homo sapien
gagggctctattcatgaaaattacagtgcacct

SEQ ID NO: 290228 - DNA, 33 bp, Homo sapien
gagggctctattcatgcaaattacagtgcacct

SEQ ID NO: 290229 - DNA, 33 bp, Homo sapien
agagtttatttacccaatgcctatacctacact

SEQ ID NO: 290230 - DNA, 33 bp, Homo sapien
agagtttatttacccagtgcctatacctacact

SEQ ID NO: 290231 - DNA, 33 bp, Homo sapien
gatacagctgtgtaaaaagaaaagggaatggta

SEQ ID NO: 290232 - DNA, 33 bp, Homo sapien
gatacagctgtgtaaagagaaaagggaatggta

SEQ ID NO: 290233 - DNA, 33 bp, Homo sapien
tatatcttccttccaaccttctgccaccagaag

SEQ ID NO: 290234 - DNA, 33 bp, Homo sapien
tatatcttccttccaagcttctgccaccagaag

SEQ ID NO: 290235 - DNA, 33 bp, Homo sapien
aatgtggcatctgtcagaacactctcctgtggc

SEQ ID NO: 290236 - DNA, 33 bp, Homo sapien
aatgtggcatctgtcataacactctcctgtggc

SEQ ID NO: 290237 - DNA, 33 bp, Homo sapien
gtaagtcacctgcacacgaatcgtcatctcagg

SEQ ID NO: 290238 - DNA, 33 bp, Homo sapien
gtaagtcacctgcacatgaatcgtcatctcagg

SEQ ID NO: 290239 - DNA, 33 bp, Homo sapien
attatcctaagtaaacacaggaacagaagacca

SEQ ID NO: 290240 - DNA, 33 bp, Homo sapien
attatcctaagtaaacgcaggaacagaagacca

SEQ ID NO: 290241 - DNA, 33 bp, Homo sapien
attgcgggtttatttcaagacctatctggagct

SEQ ID NO: 290242 - DNA, 33 bp, Homo sapien
attgcgggtttatttcgagacctatctggagct

SEQ ID NO: 290243 - DNA, 33 bp, Homo sapien
ctgccggtattccacaagtatgaaagtgagaaa

SEQ ID NO: 290244 - DNA, 33 bp, Homo sapien
ctgccggtattccacacgtatgaaagtgagaaa

SEQ ID NO: 290245 - DNA, 33 bp, Homo sapien
tgctactctcgatgcacggcctatggggtagcc

SEQ ID NO: 290246 - DNA, 33 bp, Homo sapien
tgctactctcgatgcatggcctatggggtagcc

SEQ ID NO: 290247 - DNA, 33 bp, Homo sapien
tgaagacgaaaaatgaggtacagtgaccacttc

SEQ ID NO: 290248 - DNA, 33 bp, Homo sapien
tgaagacgaaaaatgatgtacagtgaccacttc

SEQ ID NO: 290249 - DNA, 33 bp, Homo sapien
atcaacttgaggatgacgagtgatcttgataga

SEQ ID NO: 290250 - DNA, 33 bp, Homo sapien
atcaacttgaggatgatgagtgatcttgataga

SEQ ID NO: 290251 - DNA, 33 bp, Homo sapien
tttctgaaatatgctacggtttcagccactaca

SEQ ID NO: 290252 - DNA, 33 bp, Homo sapien
tttctgaaatatgctatggtttcagccactaca

SEQ ID NO: 290253 - DNA, 33 bp, Homo sapien
aaatttctgggtcagcaacaaaggagagttttt

SEQ ID NO: 290254 - DNA, 33 bp, Homo sapien
aaatttctgggtcagctacaaaggagagttttt

SEQ ID NO: 290255 - DNA, 33 bp, Homo sapien
tcctagcaccatcagacagagcgtagccctgct

SEQ ID NO: 290256 - DNA, 33 bp, Homo sapien
tcctagcaccatcagagagagcgtagccctgct

SEQ ID NO: 290257 - DNA, 33 bp, Homo sapien
cataaatctaaagttccctatcccattgtaaag

SEQ ID NO: 290258 - DNA, 33 bp, Homo sapien
cataaatctaaagttctctatcccattgtaaag

SEQ ID NO: 290259 - DNA, 33 bp, Homo sapien
aaggggctattttctccagtggccacaggattg

SEQ ID NO: 290260 - DNA, 33 bp, Homo sapien
aaggggctattttctcgagtggccacaggattg

SEQ ID NO: 290261 - DNA, 33 bp, Homo sapien
cacggtttaagtcctacattcatacctcaccct

SEQ ID NO: 290262 - DNA, 33 bp, Homo sapien
cacggtttaagtcctatattcatacctcaccct

SEQ ID NO: 290263 - DNA, 33 bp, Homo sapien
tatcacgtgaatagacagtaacctttaataacc

SEQ ID NO: 290264 - DNA, 33 bp, Homo sapien
tatcacgtgaatagacggtaacctttaataacc

SEQ ID NO: 290265 - DNA, 33 bp, Homo sapien
ggtaaagaacccttccaagtctatcattgttgg

SEQ ID NO: 290266 - DNA, 33 bp, Homo sapien
ggtaaagaacccttcccagtctatcattgttgg

SEQ ID NO: 290267 - DNA, 33 bp, Homo sapien
gtgtgactctgaaaaaattgcttgtgtcaatct

SEQ ID NO: 290268 - DNA, 33 bp, Homo sapien
gtgtgactctgaaaaagttgcttgtgtcaatct

SEQ ID NO: 290269 - DNA, 33 bp, Homo sapien
ggtcatagctttctcccgattgcaattatcctt

SEQ ID NO: 290270 - DNA, 33 bp, Homo sapien
ggtcatagctttctcctgattgcaattatcctt

SEQ ID NO: 290271 - DNA, 33 bp, Homo sapien
cccgtccttgagatcgaacctgtctttggggat

SEQ ID NO: 290272 - DNA, 33 bp, Homo sapien
cccgtccttgagatcggacctgtctttggggat

SEQ ID NO: 290273 - DNA, 33 bp, Homo sapien
gccctttggtatcacaaaaaacctctaagccct

SEQ ID NO: 290274 - DNA, 33 bp, Homo sapien
gccctttggtatcacagaaaacctctaagccct

SEQ ID NO: 290275 - DNA, 33 bp, Homo sapien
gacaaattttagagtaagcaacggaagctgcag

SEQ ID NO: 290276 - DNA, 33 bp, Homo sapien
gacaaattttagagtaggcaacggaagctgcag

SEQ ID NO: 290277 - DNA, 33 bp, Homo sapien
tattctaggaagaaacagccaagctacacaccc

SEQ ID NO: 290278 - DNA, 33 bp, Homo sapien
tattctaggaagaaacggccaagctacacaccc

SEQ ID NO: 290279 - DNA, 33 bp, Homo sapien
tagctttggtgttgtccctggtgtggactggtg

SEQ ID NO: 290280 - DNA, 33 bp, Homo sapien
tagctttggtgttgtctctggtgtggactggtg

SEQ ID NO: 290281 - DNA, 33 bp, Homo sapien
tgaagatgaagtgtcactccccttagaaatttt

SEQ ID NO: 290282 - DNA, 33 bp, Homo sapien
tgaagatgaagtgtcattccccttagaaatttt

SEQ ID NO: 290283 - DNA, 33 bp, Homo sapien
aatcagactctttagcggactgctcagtgtatg

SEQ ID NO: 290284 - DNA, 33 bp, Homo sapien
aatcagactctttagctgactgctcagtgtatg

SEQ ID NO: 290285 - DNA, 33 bp, Homo sapien
cacatggagaagaggacgttggtgtctcccaac

SEQ ID NO: 290286 - DNA, 33 bp, Homo sapien
cacatggagaagaggatgttggtgtctcccaac

SEQ ID NO: 290287 - DNA, 33 bp, Homo sapien
cccatacttaggtagacggctgtttccatgagt

SEQ ID NO: 290288 - DNA, 33 bp, Homo sapien
cccatacttaggtagatggctgtttccatgagt

SEQ ID NO: 290289 - DNA, 33 bp, Homo sapien
tgagactgacccatccacatcagaagggccaag

SEQ ID NO: 290290 - DNA, 33 bp, Homo sapien
tgagactgacccatccgcatcagaagggccaag

SEQ ID NO: 290291 - DNA, 33 bp, Homo sapien
gaaaaggagctgacacccttccctgcccttcca

SEQ ID NO: 290292 - DNA, 33 bp, Homo sapien
gaaaaggagctgacactcttccctgcccttcca

SEQ ID NO: 290293 - DNA, 33 bp, Homo sapien
ctgtaactgctccagacagcattgaaattgcag

SEQ ID NO: 290294 - DNA, 33 bp, Homo sapien
ctgtaactgctccagatagcattgaaattgcag

SEQ ID NO: 290295 - DNA, 33 bp, Homo sapien
gcgcaaggtgttaagactctgagactctggggc

SEQ ID NO: 290296 - DNA, 33 bp, Homo sapien
gcgcaaggtgttaagattctgagactctggggc

SEQ ID NO: 290297 - DNA, 33 bp, Homo sapien
ttttggagaaatagcacataaatgtctgtatta

SEQ ID NO: 290298 - DNA, 33 bp, Homo sapien
ttttggagaaatagcagataaatgtctgtatta

SEQ ID NO: 290299 - DNA, 33 bp, Homo sapien
taaaatcttactttcaaagagtggaacaagaag

SEQ ID NO: 290300 - DNA, 33 bp, Homo sapien
taaaatcttactttcagagagtggaacaagaag

SEQ ID NO: 290301 - DNA, 33 bp, Homo sapien
tgaaagtaagattttacggaaagccaacatttt

SEQ ID NO: 290302 - DNA, 33 bp, Homo sapien
tgaaagtaagattttatggaaagccaacatttt

SEQ ID NO: 290303 - DNA, 33 bp, Homo sapien
gactttttgctttgtgaaaaagtgaaaagagat

SEQ ID NO: 290304 - DNA, 33 bp, Homo sapien
gactttttgctttgtggaaaagtgaaaagagat

SEQ ID NO: 290305 - DNA, 33 bp, Homo sapien
caggtatatctaaatcaatcaaaagttgtcttt

SEQ ID NO: 290306 - DNA, 33 bp, Homo sapien
caggtatatctaaatccatcaaaagttgtcttt

SEQ ID NO: 290307 - DNA, 33 bp, Homo sapien
ggaaagcattgatggaaagcaggtagaatacat

SEQ ID NO: 290308 - DNA, 33 bp, Homo sapien
ggaaagcattgatggagagcaggtagaatacat

SEQ ID NO: 290309 - DNA, 33 bp, Homo sapien
atccgataacaagttaaaaatgctatggtgtga

SEQ ID NO: 290310 - DNA, 33 bp, Homo sapien
atccgataacaagttagaaatgctatggtgtga

SEQ ID NO: 290311 - DNA, 33 bp, Homo sapien
ctaaagaacctgatcacgtccagagtagagaga

SEQ ID NO: 290312 - DNA, 33 bp, Homo sapien
ctaaagaacctgatcatgtccagagtagagaga

SEQ ID NO: 290313 - DNA, 33 bp, Homo sapien
ttggtagtaactgaaacgacttccttctggcac

SEQ ID NO: 290314 - DNA, 33 bp, Homo sapien
ttggtagtaactgaaatgacttccttctggcac

SEQ ID NO: 290315 - DNA, 33 bp, Homo sapien
gcctcttaatgacacaatggggttgagaaagga

SEQ ID NO: 290316 - DNA, 33 bp, Homo sapien
gcctcttaatgacacagtggggttgagaaagga

SEQ ID NO: 290317 - DNA, 33 bp, Homo sapien
gagtcttgtttctacaaagggaggccaagtctt

SEQ ID NO: 290318 - DNA, 33 bp, Homo sapien
gagtcttgtttctacatagggaggccaagtctt

SEQ ID NO: 290319 - DNA, 33 bp, Homo sapien
ggcttctacttactgcaataaccttgtatccta

SEQ ID NO: 290320 - DNA, 33 bp, Homo sapien
ggcttctacttactgcgataaccttgtatccta

SEQ ID NO: 290321 - DNA, 33 bp, Homo sapien
tgtcagtccagaggagcctacaaagatatgaca

SEQ ID NO: 290322 - DNA, 33 bp, Homo sapien
tgtcagtccagaggagtctacaaagatatgaca

SEQ ID NO: 290323 - DNA, 33 bp, Homo sapien
gtctctgcgagcctaagctttcatgaccgtatg

SEQ ID NO: 290324 - DNA, 33 bp, Homo sapien
gtctctgcgagcctaatctttcatgaccgtatg

SEQ ID NO: 290325 - DNA, 33 bp, Homo sapien
ttgatccttaaatgtacgcacatgctatcatca

SEQ ID NO: 290326 - DNA, 33 bp, Homo sapien
ttgatccttaaatgtatgcacatgctatcatca

SEQ ID NO: 290327 - DNA, 33 bp, Homo sapien
aatatcatagctagtaacattgcagacaacttg

SEQ ID NO: 290328 - DNA, 33 bp, Homo sapien
aatatcatagctagtagcattgcagacaacttg

SEQ ID NO: 290329 - DNA, 33 bp, Homo sapien
cttgttttgtagtaagaactcagagcttaaggg

SEQ ID NO: 290330 - DNA, 33 bp, Homo sapien
cttgttttgtagtaaggactcagagcttaaggg

SEQ ID NO: 290331 - DNA, 33 bp, Homo sapien
agtagcaactacaaaacagaatgcagtgtaaga

SEQ ID NO: 290332 - DNA, 33 bp, Homo sapien
agtagcaactacaaaatagaatgcagtgtaaga

SEQ ID NO: 290333 - DNA, 33 bp, Homo sapien
tgtgatttcgttgttacgtcattcatttgtata

SEQ ID NO: 290334 - DNA, 33 bp, Homo sapien
tgtgatttcgttgttatgtcattcatttgtata

SEQ ID NO: 290335 - DNA, 33 bp, Homo sapien
gaaaaggaaagaaaagaacaatgaaatcataca

SEQ ID NO: 290336 - DNA, 33 bp, Homo sapien
gaaaaggaaagaaaaggacaatgaaatcataca

SEQ ID NO: 290337 - DNA, 33 bp, Homo sapien
tgtttttgccacaaaactaaatttatgcattgt

SEQ ID NO: 290338 - DNA, 33 bp, Homo sapien
tgtttttgccacaaaagtaaatttatgcattgt

SEQ ID NO: 290339 - DNA, 33 bp, Homo sapien
actgtggtagaaagtacaattgggaggagggga

SEQ ID NO: 290340 - DNA, 33 bp, Homo sapien
actgtggtagaaagtagaattgggaggagggga

SEQ ID NO: 290341 - DNA, 33 bp, Homo sapien
cctttaaacgttagtaaagacacattgaacaca

SEQ ID NO: 290342 - DNA, 33 bp, Homo sapien
cctttaaacgttagtagagacacattgaacaca

SEQ ID NO: 290343 - DNA, 33 bp, Homo sapien
catgctgtcttctgtaacctgagtaatgaagtc

SEQ ID NO: 290344 - DNA, 33 bp, Homo sapien
catgctgtcttctgtatcctgagtaatgaagtc

SEQ ID NO: 290345 - DNA, 33 bp, Homo sapien
gctgcctccaataccacatcctggctcccgtgg

SEQ ID NO: 290346 - DNA, 33 bp, Homo sapien
gctgcctccaataccatatcctggctcccgtgg

SEQ ID NO: 290347 - DNA, 33 bp, Homo sapien
tttatgttaacgttcacctcttccatgctgaaa

SEQ ID NO: 290348 - DNA, 33 bp, Homo sapien
tttatgttaacgttcatctcttccatgctgaaa

SEQ ID NO: 290349 - DNA, 33 bp, Homo sapien
tttcagagttaagtacaaccaaagttaaattcc

SEQ ID NO: 290350 - DNA, 33 bp, Homo sapien
tttcagagttaagtaccaccaaagttaaattcc

SEQ ID NO: 290351 - DNA, 33 bp, Homo sapien
gagagactggcgaaaaccaaatgaatgtctgct

SEQ ID NO: 290352 - DNA, 33 bp, Homo sapien
gagagactggcgaaaagcaaatgaatgtctgct

SEQ ID NO: 290353 - DNA, 33 bp, Homo sapien
tggtttatgagcttaaacccaagtacatcaaca

SEQ ID NO: 290354 - DNA, 33 bp, Homo sapien
tggtttatgagcttaagcccaagtacatcaaca

SEQ ID NO: 290355 - DNA, 33 bp, Homo sapien
caaataatctttaagccgcattgaaaaaataaa

SEQ ID NO: 290356 - DNA, 33 bp, Homo sapien
caaataatctttaagctgcattgaaaaaataaa

SEQ ID NO: 290357 - DNA, 33 bp, Homo sapien
caaagggacttgtcagcatttgattacgataag

SEQ ID NO: 290358 - DNA, 33 bp, Homo sapien
caaagggacttgtcaggatttgattacgataag

SEQ ID NO: 290359 - DNA, 33 bp, Homo sapien
agcctcattgtggtggaataaatcctggaaatc

SEQ ID NO: 290360 - DNA, 33 bp, Homo sapien
agcctcattgtggtgggataaatcctggaaatc

SEQ ID NO: 290361 - DNA, 33 bp, Homo sapien
ctgagtaagaggtagacgtgaatattttggata

SEQ ID NO: 290362 - DNA, 33 bp, Homo sapien
ctgagtaagaggtagatgtgaatattttggata

SEQ ID NO: 290363 - DNA, 33 bp, Homo sapien
cttgggatggataatgcagcccaaatttgaact

SEQ ID NO: 290364 - DNA, 33 bp, Homo sapien
cttgggatggataatgtagcccaaatttgaact

SEQ ID NO: 290365 - DNA, 33 bp, Homo sapien
tggtgtaggatttccaagagcagccggcttctt

SEQ ID NO: 290366 - DNA, 33 bp, Homo sapien
tggtgtaggatttccaggagcagccggcttctt

SEQ ID NO: 290367 - DNA, 33 bp, Homo sapien
catattaactggtagcccactaacctcacaccc

SEQ ID NO: 290368 - DNA, 33 bp, Homo sapien
catattaactggtagctcactaacctcacaccc

SEQ ID NO: 290369 - DNA, 33 bp, Homo sapien
gccctcacagccccgccaggttatccatacaaa

SEQ ID NO: 290370 - DNA, 33 bp, Homo sapien
gccctcacagccccgctaggttatccatacaaa

SEQ ID NO: 290371 - DNA, 33 bp, Homo sapien
ttcaaaaacagtctgcaactttacacaaacgtt

SEQ ID NO: 290372 - DNA, 33 bp, Homo sapien
ttcaaaaacagtctgccactttacacaaacgtt

SEQ ID NO: 290373 - DNA, 33 bp, Homo sapien
ctcctgttttcactcaaaaggcaccttgatctt

SEQ ID NO: 290374 - DNA, 33 bp, Homo sapien
ctcctgttttcactcagaaggcaccttgatctt

SEQ ID NO: 290375 - DNA, 33 bp, Homo sapien
ttctgggctcattttgaagcacttgaggcaatc

SEQ ID NO: 290376 - DNA, 33 bp, Homo sapien
ttctgggctcattttgcagcacttgaggcaatc

SEQ ID NO: 290377 - DNA, 33 bp, Homo sapien
agcaatgtgaagaaggcagtcctcagatgcagg

SEQ ID NO: 290378 - DNA, 33 bp, Homo sapien
agcaatgtgaagaagggagtcctcagatgcagg

SEQ ID NO: 290379 - DNA, 33 bp, Homo sapien
gctcttgaggtagtgaaggtcttgaagctaagg

SEQ ID NO: 290380 - DNA, 33 bp, Homo sapien
gctcttgaggtagtgagggtcttgaagctaagg

SEQ ID NO: 290381 - DNA, 33 bp, Homo sapien
aaaaaaagacagacaccgtatgagtccacttgg

SEQ ID NO: 290382 - DNA, 33 bp, Homo sapien
aaaaaaagacagacactgtatgagtccacttgg

SEQ ID NO: 290383 - DNA, 33 bp, Homo sapien
gaaaggtttcaagcaacagtgtgacataacgat

SEQ ID NO: 290384 - DNA, 33 bp, Homo sapien
gaaaggtttcaagcaagagtgtgacataacgat

SEQ ID NO: 290385 - DNA, 33 bp, Homo sapien
tcaccaaccacagtgaagctttaataaaatcgt

SEQ ID NO: 290386 - DNA, 33 bp, Homo sapien
tcaccaaccacagtgatgctttaataaaatcgt

SEQ ID NO: 290387 - DNA, 33 bp, Homo sapien
caagtgatcagatagaacaaaaaatgtctaagc

SEQ ID NO: 290388 - DNA, 33 bp, Homo sapien
caagtgatcagatagaccaaaaaatgtctaagc

SEQ ID NO: 290389 - DNA, 33 bp, Homo sapien
atactatgctattgaaagtgtgggtagacatga

SEQ ID NO: 290390 - DNA, 33 bp, Homo sapien
atactatgctattgaacgtgtgggtagacatga

SEQ ID NO: 290391 - DNA, 33 bp, Homo sapien
tgtatgtccattccgtgaagttccccttcaacc

SEQ ID NO: 290392 - DNA, 33 bp, Homo sapien
tgtatgtccattccgttaagttccccttcaacc

SEQ ID NO: 290393 - DNA, 33 bp, Homo sapien
taaatacactgtcagagatgctctttttatttt

SEQ ID NO: 290394 - DNA, 33 bp, Homo sapien
taaatacactgtcagatatgctctttttatttt

SEQ ID NO: 290395 - DNA, 33 bp, Homo sapien
ttagcttcctgggttaccactagagatagcaga

SEQ ID NO: 290396 - DNA, 33 bp, Homo sapien
ttagcttcctgggttatcactagagatagcaga

SEQ ID NO: 290397 - DNA, 33 bp, Homo sapien
gctttttaaataaaaaatggatctgtccaaaag

SEQ ID NO: 290398 - DNA, 33 bp, Homo sapien
gctttttaaataaaaagtggatctgtccaaaag

SEQ ID NO: 290399 - DNA, 33 bp, Homo sapien
ccaaaggtttctagggccaagcaaagagatcta

SEQ ID NO: 290400 - DNA, 33 bp, Homo sapien
ccaaaggtttctagggtcaagcaaagagatcta

SEQ ID NO: 290401 - DNA, 33 bp, Homo sapien
agaaaatgcagatagaaactgggaagaatttca

SEQ ID NO: 290402 - DNA, 33 bp, Homo sapien
agaaaatgcagatagagactgggaagaatttca

SEQ ID NO: 290403 - DNA, 33 bp, Homo sapien
gcacctgaagctcttgaatttctgggtaatgat

SEQ ID NO: 290404 - DNA, 33 bp, Homo sapien
gcacctgaagctcttgtatttctgggtaatgat

SEQ ID NO: 290405 - DNA, 33 bp, Homo sapien
gtgcatacagccccaacgttcctgatttttctc

SEQ ID NO: 290406 - DNA, 33 bp, Homo sapien
gtgcatacagccccaaggttcctgatttttctc

SEQ ID NO: 290407 - DNA, 33 bp, Homo sapien
acaacacacaaaacaccaggaggaactgtttcg

SEQ ID NO: 290408 - DNA, 33 bp, Homo sapien
acaacacacaaaacacgaggaggaactgtttcg

SEQ ID NO: 290409 - DNA, 33 bp, Homo sapien
gatgtctccttttcagcccgatggctctactga

SEQ ID NO: 290410 - DNA, 33 bp, Homo sapien
gatgtctccttttcaggccgatggctctactga

SEQ ID NO: 290411 - DNA, 33 bp, Homo sapien
ataattttatgggaccgccatcatttatgcagt

SEQ ID NO: 290412 - DNA, 33 bp, Homo sapien
ataattttatgggacctccatcatttatgcagt

SEQ ID NO: 290413 - DNA, 33 bp, Homo sapien
cagttaccaaaagtgacaatgtgcttggccttt

SEQ ID NO: 290414 - DNA, 33 bp, Homo sapien
cagttaccaaaagtgataatgtgcttggccttt

SEQ ID NO: 290415 - DNA, 33 bp, Homo sapien
gcaactccactaagtaacatgtactaggatgaa

SEQ ID NO: 290416 - DNA, 33 bp, Homo sapien
gcaactccactaagtagcatgtactaggatgaa

SEQ ID NO: 290417 - DNA, 33 bp, Homo sapien
cactcacttcagtagacgctggaaacctccaca

SEQ ID NO: 290418 - DNA, 33 bp, Homo sapien
cactcacttcagtagaggctggaaacctccaca

SEQ ID NO: 290419 - DNA, 33 bp, Homo sapien
tgagccaactactacacgaaagcatcaagggga

SEQ ID NO: 290420 - DNA, 33 bp, Homo sapien
tgagccaactactacatgaaagcatcaagggga

SEQ ID NO: 290421 - DNA, 33 bp, Homo sapien
ttccacctgtgccacacatcactctaccacagg

SEQ ID NO: 290422 - DNA, 33 bp, Homo sapien
ttccacctgtgccacatatcactctaccacagg

SEQ ID NO: 290423 - DNA, 33 bp, Homo sapien
acttgatagaatgttcaccagttccatccatgt

SEQ ID NO: 290424 - DNA, 33 bp, Homo sapien
acttgatagaatgttcgccagttccatccatgt

SEQ ID NO: 290425 - DNA, 33 bp, Homo sapien
ctaatgctcccaagacccataagacagaggagg

SEQ ID NO: 290426 - DNA, 33 bp, Homo sapien
ctaatgctcccaagactcataagacagaggagg

SEQ ID NO: 290427 - DNA, 33 bp, Homo sapien
acctacgagaaataacagtggctttagccagca

SEQ ID NO: 290428 - DNA, 33 bp, Homo sapien
acctacgagaaataaccgtggctttagccagca

SEQ ID NO: 290429 - DNA, 33 bp, Homo sapien
tccctctcttgctttacatctttcctccttact

SEQ ID NO: 290430 - DNA, 33 bp, Homo sapien
tccctctcttgctttagatctttcctccttact

SEQ ID NO: 290431 - DNA, 33 bp, Homo sapien
ctgtcagcaaatagcaacttttgtgggaagcac

SEQ ID NO: 290432 - DNA, 33 bp, Homo sapien
ctgtcagcaaatagcaccttttgtgggaagcac

SEQ ID NO: 290433 - DNA, 33 bp, Homo sapien
agatcgactattgtccaatgaatgaatcatcag

SEQ ID NO: 290434 - DNA, 33 bp, Homo sapien
agatcgactattgtccgatgaatgaatcatcag

SEQ ID NO: 290435 - DNA, 33 bp, Homo sapien
cacactgtaattgcctcagatcgactattgtcc

SEQ ID NO: 290436 - DNA, 33 bp, Homo sapien
cacactgtaattgcctgagatcgactattgtcc

SEQ ID NO: 290437 - DNA, 33 bp, Homo sapien
gaggtggggaagtgcacatgagaaagctgttag

SEQ ID NO: 290438 - DNA, 33 bp, Homo sapien
gaggtggggaagtgcatatgagaaagctgttag

SEQ ID NO: 290439 - DNA, 33 bp, Homo sapien
acttataagcctataaaattctctaactcataa

SEQ ID NO: 290440 - DNA, 33 bp, Homo sapien
acttataagcctataagattctctaactcataa

SEQ ID NO: 290441 - DNA, 33 bp, Homo sapien
agcttcccatgcctcactccaaatgctgcaatg

SEQ ID NO: 290442 - DNA, 33 bp, Homo sapien
agcttcccatgcctcattccaaatgctgcaatg

SEQ ID NO: 290443 - DNA, 33 bp, Homo sapien
tggattctatcacctaaatcataagccaaattt

SEQ ID NO: 290444 - DNA, 33 bp, Homo sapien
tggattctatcacctatatcataagccaaattt

SEQ ID NO: 290445 - DNA, 33 bp, Homo sapien
atgtgcctgcacatagaaaattcacattcaaat

SEQ ID NO: 290446 - DNA, 33 bp, Homo sapien
atgtgcctgcacatagcaaattcacattcaaat

SEQ ID NO: 290447 - DNA, 33 bp, Homo sapien
tacaggctctataaaacgccgacacctctgaga

SEQ ID NO: 290448 - DNA, 33 bp, Homo sapien
tacaggctctataaaatgccgacacctctgaga

SEQ ID NO: 290449 - DNA, 33 bp, Homo sapien
actagctccatgcagcaatgtaaatttaaattt

SEQ ID NO: 290450 - DNA, 33 bp, Homo sapien
actagctccatgcagcgatgtaaatttaaattt

SEQ ID NO: 290451 - DNA, 33 bp, Homo sapien
tgccaacattgtgttgcaagagtttcatgctga

SEQ ID NO: 290452 - DNA, 33 bp, Homo sapien
tgccaacattgtgttgtaagagtttcatgctga

SEQ ID NO: 290453 - DNA, 33 bp, Homo sapien
ccttctttcacttggacgatgctataaaaggtg

SEQ ID NO: 290454 - DNA, 33 bp, Homo sapien
ccttctttcacttggatgatgctataaaaggtg

SEQ ID NO: 290455 - DNA, 33 bp, Homo sapien
ctggaaaatggtggaaactagactaggacccat

SEQ ID NO: 290456 - DNA, 33 bp, Homo sapien
ctggaaaatggtggaacctagactaggacccat

SEQ ID NO: 290457 - DNA, 33 bp, Homo sapien
aatgaaacagtggaagaacttgagaatcacatt

SEQ ID NO: 290458 - DNA, 33 bp, Homo sapien
aatgaaacagtggaagcacttgagaatcacatt

SEQ ID NO: 290459 - DNA, 33 bp, Homo sapien
ccctcaaagacctagacgatgcaagctagaaag

SEQ ID NO: 290460 - DNA, 33 bp, Homo sapien
ccctcaaagacctagatgatgcaagctagaaag

SEQ ID NO: 290461 - DNA, 33 bp, Homo sapien
tagtaatctagttgtacggaaagtatactgttc

SEQ ID NO: 290462 - DNA, 33 bp, Homo sapien
tagtaatctagttgtatggaaagtatactgttc

SEQ ID NO: 290463 - DNA, 33 bp, Homo sapien
gctttccaaagagcaaaaaccaaaacaaatttc

SEQ ID NO: 290464 - DNA, 33 bp, Homo sapien
gctttccaaagagcaataaccaaaacaaatttc

SEQ ID NO: 290465 - DNA, 33 bp, Homo sapien
ggcttataaggtgtgacaaacagggccagaatt

SEQ ID NO: 290466 - DNA, 33 bp, Homo sapien
ggcttataaggtgtgataaacagggccagaatt

SEQ ID NO: 290467 - DNA, 33 bp, Homo sapien
tatgggtaacaaaaacagcactaggaatggtgc

SEQ ID NO: 290468 - DNA, 33 bp, Homo sapien
tatgggtaacaaaaactgcactaggaatggtgc

SEQ ID NO: 290469 - DNA, 33 bp, Homo sapien
caaatcactgccaaagaccaaacaaaattgaga

SEQ ID NO: 290470 - DNA, 33 bp, Homo sapien
caaatcactgccaaagcccaaacaaaattgaga

SEQ ID NO: 290471 - DNA, 33 bp, Homo sapien
gtgtctgctatcattcagaataagtgaaaaagt

SEQ ID NO: 290472 - DNA, 33 bp, Homo sapien
gtgtctgctatcattccgaataagtgaaaaagt

SEQ ID NO: 290473 - DNA, 33 bp, Homo sapien
gcactgagactattcaaatagggcctttgctgt

SEQ ID NO: 290474 - DNA, 33 bp, Homo sapien
gcactgagactattcagatagggcctttgctgt

SEQ ID NO: 290475 - DNA, 33 bp, Homo sapien
ctgccttaaaaagactaagcctaacgagcagca

SEQ ID NO: 290476 - DNA, 33 bp, Homo sapien
ctgccttaaaaagactcagcctaacgagcagca

SEQ ID NO: 290477 - DNA, 33 bp, Homo sapien
tttattttctgcctacaatgaagttctggtcgc

SEQ ID NO: 290478 - DNA, 33 bp, Homo sapien
tttattttctgcctacgatgaagttctggtcgc

SEQ ID NO: 290479 - DNA, 33 bp, Homo sapien
ccaagaggttcctcgccagggaggtaagtaaca

SEQ ID NO: 290480 - DNA, 33 bp, Homo sapien
ccaagaggttcctcgctagggaggtaagtaaca

SEQ ID NO: 290481 - DNA, 33 bp, Homo sapien
cttggataagactaaaaacaataattctatgaa

SEQ ID NO: 290482 - DNA, 33 bp, Homo sapien
cttggataagactaaagacaataattctatgaa

SEQ ID NO: 290483 - DNA, 33 bp, Homo sapien
ccacctttcctcatgagggggaaatcaccagta

SEQ ID NO: 290484 - DNA, 33 bp, Homo sapien
ccacctttcctcatgatggggaaatcaccagta

SEQ ID NO: 290485 - DNA, 33 bp, Homo sapien
ctggcattagttataaaaacagttctcaagtac

SEQ ID NO: 290486 - DNA, 33 bp, Homo sapien
ctggcattagttataataacagttctcaagtac

SEQ ID NO: 290487 - DNA, 33 bp, Homo sapien
aatctgcattttctcaggtgcggaataaagggc

SEQ ID NO: 290488 - DNA, 33 bp, Homo sapien
aatctgcattttctcatgtgcggaataaagggc

SEQ ID NO: 290489 - DNA, 33 bp, Homo sapien
ggttattcgaaacagcagatcttactttttggt

SEQ ID NO: 290490 - DNA, 33 bp, Homo sapien
ggttattcgaaacagcggatcttactttttggt

SEQ ID NO: 290491 - DNA, 33 bp, Homo sapien
attcctcacaaagataccatatggcatttaagt

SEQ ID NO: 290492 - DNA, 33 bp, Homo sapien
attcctcacaaagatatcatatggcatttaagt

SEQ ID NO: 290493 - DNA, 33 bp, Homo sapien
actcatctgaaatcggaagacttgcttgtgctg

SEQ ID NO: 290494 - DNA, 33 bp, Homo sapien
actcatctgaaatcggcagacttgcttgtgctg

SEQ ID NO: 290495 - DNA, 33 bp, Homo sapien
ggttgagccagaaaccaggccaaagacagggac

SEQ ID NO: 290496 - DNA, 33 bp, Homo sapien
ggttgagccagaaaccgggccaaagacagggac

SEQ ID NO: 290497 - DNA, 33 bp, Homo sapien
tcaatgaacagaacagacaaaaatgactgcctc

SEQ ID NO: 290498 - DNA, 33 bp, Homo sapien
tcaatgaacagaacaggcaaaaatgactgcctc

SEQ ID NO: 290499 - DNA, 33 bp, Homo sapien
ttcaagatgtctgaacagagatgcctaatagtt

SEQ ID NO: 290500 - DNA, 33 bp, Homo sapien
ttcaagatgtctgaacggagatgcctaatagtt

SEQ ID NO: 290501 - DNA, 33 bp, Homo sapien
ggtggtcaggggtgaggatgaagaaagttacag

SEQ ID NO: 290502 - DNA, 33 bp, Homo sapien
ggtggtcaggggtgagtatgaagaaagttacag

SEQ ID NO: 290503 - DNA, 33 bp, Homo sapien
gtctgtggcttcatcaacacacagtgctctctc

SEQ ID NO: 290504 - DNA, 33 bp, Homo sapien
gtctgtggcttcatcatcacacagtgctctctc

SEQ ID NO: 290505 - DNA, 33 bp, Homo sapien
gagatccttgttcaacaatctcaaagacttcag

SEQ ID NO: 290506 - DNA, 33 bp, Homo sapien
gagatccttgttcaacgatctcaaagacttcag

SEQ ID NO: 290507 - DNA, 33 bp, Homo sapien
cacttgcctcaagaacagattcttccatctcca

SEQ ID NO: 290508 - DNA, 33 bp, Homo sapien
cacttgcctcaagaacggattcttccatctcca

SEQ ID NO: 290509 - DNA, 33 bp, Homo sapien
cctgcttgtgagaaaacgtccctgatttcacag

SEQ ID NO: 290510 - DNA, 33 bp, Homo sapien
cctgcttgtgagaaaatgtccctgatttcacag

SEQ ID NO: 290511 - DNA, 33 bp, Homo sapien
tctgaccctaaaccaaagtccttgctgaaaaag

SEQ ID NO: 290512 - DNA, 33 bp, Homo sapien
tctgaccctaaaccaatgtccttgctgaaaaag

SEQ ID NO: 290513 - DNA, 33 bp, Homo sapien
gtagttcccttccacactgaatatgtctggcct

SEQ ID NO: 290514 - DNA, 33 bp, Homo sapien
gtagttcccttccacattgaatatgtctggcct

SEQ ID NO: 290515 - DNA, 33 bp, Homo sapien
gctctccaagtctaaaggcttcaaaatggtaca

SEQ ID NO: 290516 - DNA, 33 bp, Homo sapien
gctctccaagtctaaatgcttcaaaatggtaca

SEQ ID NO: 290517 - DNA, 33 bp, Homo sapien
ttgtctcacaatcttcaataagtagtgttcgga

SEQ ID NO: 290518 - DNA, 33 bp, Homo sapien
ttgtctcacaatcttcgataagtagtgttcgga

SEQ ID NO: 290519 - DNA, 33 bp, Homo sapien
gtattttcctacaaacccagtgcaatgtggatt

SEQ ID NO: 290520 - DNA, 33 bp, Homo sapien
gtattttcctacaaactcagtgcaatgtggatt

SEQ ID NO: 290521 - DNA, 33 bp, Homo sapien
ctaatattctttatgacgctcctctttctctaa

SEQ ID NO: 290522 - DNA, 33 bp, Homo sapien
ctaatattctttatgatgctcctctttctctaa

SEQ ID NO: 290523 - DNA, 33 bp, Homo sapien
aaataaatattctaaaccttgcagtttctcata

SEQ ID NO: 290524 - DNA, 33 bp, Homo sapien
aaataaatattctaaatcttgcagtttctcata

SEQ ID NO: 290525 - DNA, 33 bp, Homo sapien
caaactggaagacaaaatactgcctaagagagg

SEQ ID NO: 290526 - DNA, 33 bp, Homo sapien
caaactggaagacaaactactgcctaagagagg

SEQ ID NO: 290527 - DNA, 33 bp, Homo sapien
tcagaaatcagatatcaagtgaccagcagagct

SEQ ID NO: 290528 - DNA, 33 bp, Homo sapien
tcagaaatcagatatcgagtgaccagcagagct

SEQ ID NO: 290529 - DNA, 33 bp, Homo sapien
tgctttattaggaaaacgattaggttgattact

SEQ ID NO: 290530 - DNA, 33 bp, Homo sapien
tgctttattaggaaaatgattaggttgattact

SEQ ID NO: 290531 - DNA, 33 bp, Homo sapien
atatttttgcaaagatcagttttaaatttcagt

SEQ ID NO: 290532 - DNA, 33 bp, Homo sapien
atatttttgcaaagatgagttttaaatttcagt

SEQ ID NO: 290533 - DNA, 33 bp, Homo sapien
tttgcgactttccagaaaaatgcaaaaggtaaa

SEQ ID NO: 290534 - DNA, 33 bp, Homo sapien
tttgcgactttccagacaaatgcaaaaggtaaa

SEQ ID NO: 290535 - DNA, 33 bp, Homo sapien
caacattaaaaaccaaagtctagcagagatcgg

SEQ ID NO: 290536 - DNA, 33 bp, Homo sapien
caacattaaaaaccaatgtctagcagagatcgg

SEQ ID NO: 290537 - DNA, 33 bp, Homo sapien
atattacaccatgcccacattctgaccttcaaa

SEQ ID NO: 290538 - DNA, 33 bp, Homo sapien
atattacaccatgcccgcattctgaccttcaaa

SEQ ID NO: 290539 - DNA, 33 bp, Homo sapien
ccacagtctttctgtaacaaaaacaaattgcat

SEQ ID NO: 290540 - DNA, 33 bp, Homo sapien
ccacagtctttctgtatcaaaaacaaattgcat

SEQ ID NO: 290541 - DNA, 33 bp, Homo sapien
tattggcttgagatgacaaagttgttttattaa

SEQ ID NO: 290542 - DNA, 33 bp, Homo sapien
tattggcttgagatgataaagttgttttattaa

SEQ ID NO: 290543 - DNA, 33 bp, Homo sapien
accgcataaaaagaacaagcctttgtcataatg

SEQ ID NO: 290544 - DNA, 33 bp, Homo sapien
accgcataaaaagaacgagcctttgtcataatg

SEQ ID NO: 290545 - DNA, 33 bp, Homo sapien
gagaaggcagtatccacagcaagaggacaaaga

SEQ ID NO: 290546 - DNA, 33 bp, Homo sapien
gagaaggcagtatccatagcaagaggacaaaga

SEQ ID NO: 290547 - DNA, 33 bp, Homo sapien
gctttccctgcatactcaccaactgctgcagag

SEQ ID NO: 290548 - DNA, 33 bp, Homo sapien
gctttccctgcatacttaccaactgctgcagag

SEQ ID NO: 290549 - DNA, 33 bp, Homo sapien
taactttgtgaatctacagagcagtgcacaaga

SEQ ID NO: 290550 - DNA, 33 bp, Homo sapien
taactttgtgaatctagagagcagtgcacaaga

SEQ ID NO: 290551 - DNA, 33 bp, Homo sapien
aggatataactcaacaaatgaggagagatttac

SEQ ID NO: 290552 - DNA, 33 bp, Homo sapien
aggatataactcaacacatgaggagagatttac

SEQ ID NO: 290553 - DNA, 33 bp, Homo sapien
gaatgcatttgaaacacaccaactagaacacag

SEQ ID NO: 290554 - DNA, 33 bp, Homo sapien
gaatgcatttgaaacataccaactagaacacag

SEQ ID NO: 290555 - DNA, 33 bp, Homo sapien
acattaacatgaaatacctgagaaacgtgggca

SEQ ID NO: 290556 - DNA, 33 bp, Homo sapien
acattaacatgaaatatctgagaaacgtgggca

SEQ ID NO: 290557 - DNA, 33 bp, Homo sapien
tctcaaatccatgccaatatcagtgtaatcaaa

SEQ ID NO: 290558 - DNA, 33 bp, Homo sapien
tctcaaatccatgccagtatcagtgtaatcaaa

SEQ ID NO: 290559 - DNA, 33 bp, Homo sapien
ggttatttggtctacaaggcaatctgcattata

SEQ ID NO: 290560 - DNA, 33 bp, Homo sapien
ggttatttggtctacatggcaatctgcattata

SEQ ID NO: 290561 - DNA, 33 bp, Homo sapien
caagatattttatggaatatagactagtgacaa

SEQ ID NO: 290562 - DNA, 33 bp, Homo sapien
caagatattttatggactatagactagtgacaa

SEQ ID NO: 290563 - DNA, 33 bp, Homo sapien
cttttagtttggttgacactaacagtttctaat

SEQ ID NO: 290564 - DNA, 33 bp, Homo sapien
cttttagtttggttgatactaacagtttctaat

SEQ ID NO: 290565 - DNA, 33 bp, Homo sapien
gagcaagaatagcaagaccaagaacagataaaa

SEQ ID NO: 290566 - DNA, 33 bp, Homo sapien
gagcaagaatagcaaggccaagaacagataaaa

SEQ ID NO: 290567 - DNA, 33 bp, Homo sapien
agccaagattttagcacgtttattcttaatttt

SEQ ID NO: 290568 - DNA, 33 bp, Homo sapien
agccaagattttagcatgtttattcttaatttt

SEQ ID NO: 290569 - DNA, 33 bp, Homo sapien
gcaatcacaagagtgacgtgggttttgaaagaa

SEQ ID NO: 290570 - DNA, 33 bp, Homo sapien
gcaatcacaagagtgatgtgggttttgaaagaa

SEQ ID NO: 290571 - DNA, 33 bp, Homo sapien
gcaattaacctgctcaacagaaattttatgtac

SEQ ID NO: 290572 - DNA, 33 bp, Homo sapien
gcaattaacctgctcagcagaaattttatgtac

SEQ ID NO: 290573 - DNA, 33 bp, Homo sapien
tcctttgggtttccataaacattcttagaatat

SEQ ID NO: 290574 - DNA, 33 bp, Homo sapien
tcctttgggtttccatcaacattcttagaatat

SEQ ID NO: 290575 - DNA, 33 bp, Homo sapien
cttatttcaaaagtcaactgtgactcagtctgt

SEQ ID NO: 290576 - DNA, 33 bp, Homo sapien
cttatttcaaaagtcagctgtgactcagtctgt

SEQ ID NO: 290577 - DNA, 33 bp, Homo sapien
ccccatcacaattcagcctctctctgtgctaat

SEQ ID NO: 290578 - DNA, 33 bp, Homo sapien
ccccatcacaattcagtctctctctgtgctaat

SEQ ID NO: 290579 - DNA, 33 bp, Homo sapien
aaaacggtcattcacgaaatatggttcaagtac

SEQ ID NO: 290580 - DNA, 33 bp, Homo sapien
aaaacggtcattcacggaatatggttcaagtac

SEQ ID NO: 290581 - DNA, 33 bp, Homo sapien
gaatacagaaaaatcacccctggaaacactagc

SEQ ID NO: 290582 - DNA, 33 bp, Homo sapien
gaatacagaaaaatcatccctggaaacactagc

SEQ ID NO: 290583 - DNA, 33 bp, Homo sapien
tttgtctattggcaaagaattcctaagacagtc

SEQ ID NO: 290584 - DNA, 33 bp, Homo sapien
tttgtctattggcaaataattcctaagacagtc

SEQ ID NO: 290585 - DNA, 33 bp, Homo sapien
aggccaacaggtcttgaatgaagctatggagaa

SEQ ID NO: 290586 - DNA, 33 bp, Homo sapien
aggccaacaggtcttggatgaagctatggagaa

SEQ ID NO: 290587 - DNA, 33 bp, Homo sapien
ttgacacttattactacgtagcatgctatttat

SEQ ID NO: 290588 - DNA, 33 bp, Homo sapien
ttgacacttattactatgtagcatgctatttat

SEQ ID NO: 290589 - DNA, 33 bp, Homo sapien
ctttggtagaatttgtaaactccatgaaagcaa

SEQ ID NO: 290590 - DNA, 33 bp, Homo sapien
ctttggtagaatttgtcaactccatgaaagcaa

SEQ ID NO: 290591 - DNA, 33 bp, Homo sapien
aaggaaaagggttaacaatggagagaggcttta

SEQ ID NO: 290592 - DNA, 33 bp, Homo sapien
aaggaaaagggttaacgatggagagaggcttta

SEQ ID NO: 290593 - DNA, 33 bp, Homo sapien
ttttgaccaatttttccctagcattacagttcg

SEQ ID NO: 290594 - DNA, 33 bp, Homo sapien
ttttgaccaatttttctctagcattacagttcg

SEQ ID NO: 290595 - DNA, 33 bp, Homo sapien
cagaggccatcctgagaagtacaataggaaatt

SEQ ID NO: 290596 - DNA, 33 bp, Homo sapien
cagaggccatcctgagcagtacaataggaaatt

SEQ ID NO: 290597 - DNA, 33 bp, Homo sapien
acaggagtcgctaaagcagtagtttaattggtt

SEQ ID NO: 290598 - DNA, 33 bp, Homo sapien
acaggagtcgctaaaggagtagtttaattggtt

SEQ ID NO: 290599 - DNA, 33 bp, Homo sapien
gctggtagtgaaagtcaaatgctgcctgccagg

SEQ ID NO: 290600 - DNA, 33 bp, Homo sapien
gctggtagtgaaagtcgaatgctgcctgccagg

SEQ ID NO: 290601 - DNA, 33 bp, Homo sapien
gagtttcaaagtcaaaaatgtcatacattaaac

SEQ ID NO: 290602 - DNA, 33 bp, Homo sapien
gagtttcaaagtcaaagatgtcatacattaaac

SEQ ID NO: 290603 - DNA, 33 bp, Homo sapien
tcacatgacattaacactcagaaaatatgcatt

SEQ ID NO: 290604 - DNA, 33 bp, Homo sapien
tcacatgacattaacattcagaaaatatgcatt

SEQ ID NO: 290605 - DNA, 33 bp, Homo sapien
atgtgtccagagaagcaacgattcttactctac

SEQ ID NO: 290606 - DNA, 33 bp, Homo sapien
atgtgtccagagaagcgacgattcttactctac

SEQ ID NO: 290607 - DNA, 33 bp, Homo sapien
tttagtcttcctatgacactctgtgatatgtac

SEQ ID NO: 290608 - DNA, 33 bp, Homo sapien
tttagtcttcctatgatactctgtgatatgtac

SEQ ID NO: 290609 - DNA, 33 bp, Homo sapien
ggattctggaatcataaaagcaaaatattctaa

SEQ ID NO: 290610 - DNA, 33 bp, Homo sapien
ggattctggaatcatagaagcaaaatattctaa

SEQ ID NO: 290611 - DNA, 33 bp, Homo sapien
actgctttgttgctgccgatctgggttggctag

SEQ ID NO: 290612 - DNA, 33 bp, Homo sapien
actgctttgttgctgctgatctgggttggctag

SEQ ID NO: 290613 - DNA, 33 bp, Homo sapien
gcatcacaaggcagagaccctcatttctgcagg

SEQ ID NO: 290614 - DNA, 33 bp, Homo sapien
gcatcacaaggcagaggccctcatttctgcagg

SEQ ID NO: 290615 - DNA, 33 bp, Homo sapien
gaagttttctgttagacgcccagtcctgtgatg

SEQ ID NO: 290616 - DNA, 33 bp, Homo sapien
gaagttttctgttagatgcccagtcctgtgatg

SEQ ID NO: 290617 - DNA, 33 bp, Homo sapien
tgtaggtaccaaatcactgatgacaagcatcgt

SEQ ID NO: 290618 - DNA, 33 bp, Homo sapien
tgtaggtaccaaatcattgatgacaagcatcgt

SEQ ID NO: 290619 - DNA, 33 bp, Homo sapien
aagtactgtactcaaacaatgcttgatctaaat

SEQ ID NO: 290620 - DNA, 33 bp, Homo sapien
aagtactgtactcaaataatgcttgatctaaat

SEQ ID NO: 290621 - DNA, 33 bp, Homo sapien
atcactcaactgttaaggattatgattttttaa

SEQ ID NO: 290622 - DNA, 33 bp, Homo sapien
atcactcaactgttaatgattatgattttttaa

SEQ ID NO: 290623 - DNA, 33 bp, Homo sapien
gcatttcttactcacagatttcttgaataaagt

SEQ ID NO: 290624 - DNA, 33 bp, Homo sapien
gcatttcttactcacatatttcttgaataaagt

SEQ ID NO: 290625 - DNA, 33 bp, Homo sapien
gaataaaaggaataaaatggactcagggacttt

SEQ ID NO: 290626 - DNA, 33 bp, Homo sapien
gaataaaaggaataaagtggactcagggacttt

SEQ ID NO: 290627 - DNA, 33 bp, Homo sapien
caaacaggctaaggatgacttcttggtatcgaa

SEQ ID NO: 290628 - DNA, 33 bp, Homo sapien
caaacaggctaaggattacttcttggtatcgaa

SEQ ID NO: 290629 - DNA, 33 bp, Homo sapien
ctactgatttatcaaacgcttaggtcttattta

SEQ ID NO: 290630 - DNA, 33 bp, Homo sapien
ctactgatttatcaaatgcttaggtcttattta

SEQ ID NO: 290631 - DNA, 33 bp, Homo sapien
tcctggtctgaaaacacgtggaaacaaaatctc

SEQ ID NO: 290632 - DNA, 33 bp, Homo sapien
tcctggtctgaaaacaggtggaaacaaaatctc

SEQ ID NO: 290633 - DNA, 33 bp, Homo sapien
ttgtcataaagagatacgtaaacacgcttacat

SEQ ID NO: 290634 - DNA, 33 bp, Homo sapien
ttgtcataaagagatatgtaaacacgcttacat

SEQ ID NO: 290635 - DNA, 33 bp, Homo sapien
tttatgcaaactcataaaataaagtgttggaat

SEQ ID NO: 290636 - DNA, 33 bp, Homo sapien
tttatgcaaactcatacaataaagtgttggaat

SEQ ID NO: 290637 - DNA, 33 bp, Homo sapien
gcctaaatttgattaacacccaagaaggtaata

SEQ ID NO: 290638 - DNA, 33 bp, Homo sapien
gcctaaatttgattaatacccaagaaggtaata

SEQ ID NO: 290639 - DNA, 33 bp, Homo sapien
catgagccaaaaagtaatacatgaaacttatgc

SEQ ID NO: 290640 - DNA, 33 bp, Homo sapien
catgagccaaaaagtagtacatgaaacttatgc

SEQ ID NO: 290641 - DNA, 33 bp, Homo sapien
atgccttgaaggatgaataagtgtggtctgtgg

SEQ ID NO: 290642 - DNA, 33 bp, Homo sapien
atgccttgaaggatgagtaagtgtggtctgtgg

SEQ ID NO: 290643 - DNA, 33 bp, Homo sapien
tccaggggagtactgtaaataacagagatgtta

SEQ ID NO: 290644 - DNA, 33 bp, Homo sapien
tccaggggagtactgtgaataacagagatgtta

SEQ ID NO: 290645 - DNA, 33 bp, Homo sapien
cacaaacaaagccaatcacaatggcaaactggg

SEQ ID NO: 290646 - DNA, 33 bp, Homo sapien
cacaaacaaagccaatgacaatggcaaactggg

SEQ ID NO: 290647 - DNA, 33 bp, Homo sapien
agcagttcagaggacaaggagtacacagaaact

SEQ ID NO: 290648 - DNA, 33 bp, Homo sapien
agcagttcagaggacatggagtacacagaaact

SEQ ID NO: 290649 - DNA, 33 bp, Homo sapien
tccttcccccaaccataatacacacatgatctg

SEQ ID NO: 290650 - DNA, 33 bp, Homo sapien
tccttcccccaaccatgatacacacatgatctg

SEQ ID NO: 290651 - DNA, 33 bp, Homo sapien
agctttggatcagcctaagaagtggtatcatct

SEQ ID NO: 290652 - DNA, 33 bp, Homo sapien
agctttggatcagcctgagaagtggtatcatct

SEQ ID NO: 290653 - DNA, 33 bp, Homo sapien
ctcaatacaggcaatcagattcggagctgcttt

SEQ ID NO: 290654 - DNA, 33 bp, Homo sapien
ctcaatacaggcaatcggattcggagctgcttt

SEQ ID NO: 290655 - DNA, 33 bp, Homo sapien
cagaccctactgctctaaactcttcaggttccc

SEQ ID NO: 290656 - DNA, 33 bp, Homo sapien
cagaccctactgctctgaactcttcaggttccc

SEQ ID NO: 290657 - DNA, 33 bp, Homo sapien
ttagcctcacacttaagaaaccctcagcaaatg

SEQ ID NO: 290658 - DNA, 33 bp, Homo sapien
ttagcctcacacttaataaaccctcagcaaatg

SEQ ID NO: 290659 - DNA, 33 bp, Homo sapien
taaactagtatttagaacaagcaattgaaagcc

SEQ ID NO: 290660 - DNA, 33 bp, Homo sapien
taaactagtatttagatcaagcaattgaaagcc

SEQ ID NO: 290661 - DNA, 33 bp, Homo sapien
tagtcttcagcatagaaatggtgtttaaatcct

SEQ ID NO: 290662 - DNA, 33 bp, Homo sapien
tagtcttcagcatagagatggtgtttaaatcct

SEQ ID NO: 290663 - DNA, 33 bp, Homo sapien
actggtggacaggcaaaacatgataatgcaaag

SEQ ID NO: 290664 - DNA, 33 bp, Homo sapien
actggtggacaggcaagacatgataatgcaaag

SEQ ID NO: 290665 - DNA, 33 bp, Homo sapien
gtcaactagaagaatggaggagaagctggattg

SEQ ID NO: 290666 - DNA, 33 bp, Homo sapien
gtcaactagaagaatgtaggagaagctggattg

SEQ ID NO: 290667 - DNA, 33 bp, Homo sapien
ggagaaagaagtaactaaagtggaaaacagatg

SEQ ID NO: 290668 - DNA, 33 bp, Homo sapien
ggagaaagaagtaactgaagtggaaaacagatg

SEQ ID NO: 290669 - DNA, 33 bp, Homo sapien
tcttgcaagttcctgacaccagttttgcagatt

SEQ ID NO: 290670 - DNA, 33 bp, Homo sapien
tcttgcaagttcctgataccagttttgcagatt

SEQ ID NO: 290671 - DNA, 33 bp, Homo sapien
tagcatcaactagaacggccgaaatattcagaa

SEQ ID NO: 290672 - DNA, 33 bp, Homo sapien
tagcatcaactagaactgccgaaatattcagaa

SEQ ID NO: 290673 - DNA, 33 bp, Homo sapien
cgtaagtactatcaataaaatgggataaagcgt

SEQ ID NO: 290674 - DNA, 33 bp, Homo sapien
cgtaagtactatcaatcaaatgggataaagcgt

SEQ ID NO: 290675 - DNA, 33 bp, Homo sapien
gccgtgctctgaccatcactatccttggaaaag

SEQ ID NO: 290676 - DNA, 33 bp, Homo sapien
gccgtgctctgaccattactatccttggaaaag

SEQ ID NO: 290677 - DNA, 33 bp, Homo sapien
atttgtcacaaggaaaatgagcctcagacctga

SEQ ID NO: 290678 - DNA, 33 bp, Homo sapien
atttgtcacaaggaaagtgagcctcagacctga

SEQ ID NO: 290679 - DNA, 33 bp, Homo sapien
gcagtggggatgtttgaacaatgagtttattaa

SEQ ID NO: 290680 - DNA, 33 bp, Homo sapien
gcagtggggatgtttgcacaatgagtttattaa

SEQ ID NO: 290681 - DNA, 33 bp, Homo sapien
ggaaagtgaatctgacaacactcacaactttca

SEQ ID NO: 290682 - DNA, 33 bp, Homo sapien
ggaaagtgaatctgacgacactcacaactttca

SEQ ID NO: 290683 - DNA, 33 bp, Homo sapien
tccttccttcttgatacgaaatgcaggactgag

SEQ ID NO: 290684 - DNA, 33 bp, Homo sapien
tccttccttcttgatatgaaatgcaggactgag

SEQ ID NO: 290685 - DNA, 33 bp, Homo sapien
atatattatgtttgtacaggcaatcaaaatata

SEQ ID NO: 290686 - DNA, 33 bp, Homo sapien
atatattatgtttgtataggcaatcaaaatata

SEQ ID NO: 290687 - DNA, 33 bp, Homo sapien
ccaggtttggaagctaaatttcccaaaggacaa

SEQ ID NO: 290688 - DNA, 33 bp, Homo sapien
ccaggtttggaagctagatttcccaaaggacaa

SEQ ID NO: 290689 - DNA, 33 bp, Homo sapien
gccaactcaagtcacaacagaacagtgcactaa

SEQ ID NO: 290690 - DNA, 33 bp, Homo sapien
gccaactcaagtcacagcagaacagtgcactaa

SEQ ID NO: 290691 - DNA, 33 bp, Homo sapien
gcacatattcacggtacgcaaagtgatatttca

SEQ ID NO: 290692 - DNA, 33 bp, Homo sapien
gcacatattcacggtaggcaaagtgatatttca

SEQ ID NO: 290693 - DNA, 33 bp, Homo sapien
ctgtatacagaggaacaaaaataaggatgatag

SEQ ID NO: 290694 - DNA, 33 bp, Homo sapien
ctgtatacagaggaacgaaaataaggatgatag

SEQ ID NO: 290695 - DNA, 33 bp, Homo sapien
cactttttgatgcaaacttctctttaaaagaca

SEQ ID NO: 290696 - DNA, 33 bp, Homo sapien
cactttttgatgcaaatttctctttaaaagaca

SEQ ID NO: 290697 - DNA, 33 bp, Homo sapien
tatcctgtgacctaaaataataccaaacttgcc

SEQ ID NO: 290698 - DNA, 33 bp, Homo sapien
tatcctgtgacctaaagtaataccaaacttgcc

SEQ ID NO: 290699 - DNA, 33 bp, Homo sapien
ctcttttgaattcccaaagccgaatattaactc

SEQ ID NO: 290700 - DNA, 33 bp, Homo sapien
ctcttttgaattcccagagccgaatattaactc

SEQ ID NO: 290701 - DNA, 33 bp, Homo sapien
aaagggccagctgaaccgtatgagtttcttact

SEQ ID NO: 290702 - DNA, 33 bp, Homo sapien
aaagggccagctgaactgtatgagtttcttact

SEQ ID NO: 290703 - DNA, 33 bp, Homo sapien
gtttcttctttggggaactttcagaatttcaag

SEQ ID NO: 290704 - DNA, 33 bp, Homo sapien
gtttcttctttggggacctttcagaatttcaag

SEQ ID NO: 290705 - DNA, 33 bp, Homo sapien
gtttgtcctttcaataacatttatcagaatact

SEQ ID NO: 290706 - DNA, 33 bp, Homo sapien
gtttgtcctttcaatatcatttatcagaatact

SEQ ID NO: 290707 - DNA, 33 bp, Homo sapien
gagactttaagtaagccgcataattgctctgag

SEQ ID NO: 290708 - DNA, 33 bp, Homo sapien
gagactttaagtaagctgcataattgctctgag

SEQ ID NO: 290709 - DNA, 33 bp, Homo sapien
tagggaggtaaaattaagattgaggcaaaagga

SEQ ID NO: 290710 - DNA, 33 bp, Homo sapien
tagggaggtaaaattaggattgaggcaaaagga

SEQ ID NO: 290711 - DNA, 33 bp, Homo sapien
ctttacaaaaggccaaaattaacagtgagtgca

SEQ ID NO: 290712 - DNA, 33 bp, Homo sapien
ctttacaaaaggccaacattaacagtgagtgca

SEQ ID NO: 290713 - DNA, 33 bp, Homo sapien
ttgcagttcttcacaacgctgtcttgtcaccca

SEQ ID NO: 290714 - DNA, 33 bp, Homo sapien
ttgcagttcttcacaatgctgtcttgtcaccca

SEQ ID NO: 290715 - DNA, 33 bp, Homo sapien
cctccgtgtctgattccagagtgaacagaaatg

SEQ ID NO: 290716 - DNA, 33 bp, Homo sapien
cctccgtgtctgattctagagtgaacagaaatg

SEQ ID NO: 290717 - DNA, 33 bp, Homo sapien
tgtagatagcaaaaccgcattaatttgacattc

SEQ ID NO: 290718 - DNA, 33 bp, Homo sapien
tgtagatagcaaaacctcattaatttgacattc

SEQ ID NO: 290719 - DNA, 33 bp, Homo sapien
ggattagcattactccagagcagaaggttcact

SEQ ID NO: 290720 - DNA, 33 bp, Homo sapien
ggattagcattactccggagcagaaggttcact

SEQ ID NO: 290721 - DNA, 33 bp, Homo sapien
gagtaatgctaatccaagactgctggtttttca

SEQ ID NO: 290722 - DNA, 33 bp, Homo sapien
gagtaatgctaatccaggactgctggtttttca

SEQ ID NO: 290723 - DNA, 33 bp, Homo sapien
aattggcttgtgtgcaaccatttgaagttcgaa

SEQ ID NO: 290724 - DNA, 33 bp, Homo sapien
aattggcttgtgtgcatccatttgaagttcgaa

SEQ ID NO: 290725 - DNA, 33 bp, Homo sapien
ctattaagcagaacaactaggaatttgatgatt

SEQ ID NO: 290726 - DNA, 33 bp, Homo sapien
ctattaagcagaacaattaggaatttgatgatt

SEQ ID NO: 290727 - DNA, 33 bp, Homo sapien
caaccaggctataaaaattgaaactaatattag

SEQ ID NO: 290728 - DNA, 33 bp, Homo sapien
caaccaggctataaaagttgaaactaatattag

SEQ ID NO: 290729 - DNA, 33 bp, Homo sapien
ttgaagagcttaagaacatctccgaacaagttg

SEQ ID NO: 290730 - DNA, 33 bp, Homo sapien
ttgaagagcttaagaatatctccgaacaagttg

SEQ ID NO: 290731 - DNA, 33 bp, Homo sapien
cattctttatcttgaaggtgcaaaggaaatatt

SEQ ID NO: 290732 - DNA, 33 bp, Homo sapien
cattctttatcttgaatgtgcaaaggaaatatt

SEQ ID NO: 290733 - DNA, 33 bp, Homo sapien
taggtttcattccaagactcaccttttatttac

SEQ ID NO: 290734 - DNA, 33 bp, Homo sapien
taggtttcattccaagtctcaccttttatttac

SEQ ID NO: 290735 - DNA, 33 bp, Homo sapien
gtctccatgccaaatgcagatgtttttgtgata

SEQ ID NO: 290736 - DNA, 33 bp, Homo sapien
gtctccatgccaaatgtagatgtttttgtgata

SEQ ID NO: 290737 - DNA, 33 bp, Homo sapien
cacaaagctgacaaatcatgcctgaggagaaga

SEQ ID NO: 290738 - DNA, 33 bp, Homo sapien
cacaaagctgacaaattatgcctgaggagaaga

SEQ ID NO: 290739 - DNA, 33 bp, Homo sapien
caatgtggattttccccggagtcaagacaataa

SEQ ID NO: 290740 - DNA, 33 bp, Homo sapien
caatgtggattttccctggagtcaagacaataa

SEQ ID NO: 290741 - DNA, 33 bp, Homo sapien
ataggtcctcttcagacagcaaccttcctttga

SEQ ID NO: 290742 - DNA, 33 bp, Homo sapien
ataggtcctcttcagatagcaaccttcctttga

SEQ ID NO: 290743 - DNA, 33 bp, Homo sapien
atggaataagtcagtacgcacaaagcacttaga

SEQ ID NO: 290744 - DNA, 33 bp, Homo sapien
atggaataagtcagtatgcacaaagcacttaga

SEQ ID NO: 290745 - DNA, 33 bp, Homo sapien
taaatagttgcctaaagttacatagtgagcaag

SEQ ID NO: 290746 - DNA, 33 bp, Homo sapien
taaatagttgcctaaatttacatagtgagcaag

SEQ ID NO: 290747 - DNA, 33 bp, Homo sapien
aatattggctattcaaatcatctatttcttttt

SEQ ID NO: 290748 - DNA, 33 bp, Homo sapien
aatattggctattcaagtcatctatttcttttt

SEQ ID NO: 290749 - DNA, 33 bp, Homo sapien
gtaaggcagaagaccaatcctagaggctgagtt

SEQ ID NO: 290750 - DNA, 33 bp, Homo sapien
gtaaggcagaagaccagtcctagaggctgagtt

SEQ ID NO: 290751 - DNA, 33 bp, Homo sapien
gttaactggcaaccacaagagagaagctgtgtg

SEQ ID NO: 290752 - DNA, 33 bp, Homo sapien
gttaactggcaaccacgagagagaagctgtgtg

SEQ ID NO: 290753 - DNA, 33 bp, Homo sapien
agagctactccacataaagccatccaaccaatg

SEQ ID NO: 290754 - DNA, 33 bp, Homo sapien
agagctactccacatatagccatccaaccaatg

SEQ ID NO: 290755 - DNA, 33 bp, Homo sapien
atagagaatgcatagacgatgaaacagaagaaa

SEQ ID NO: 290756 - DNA, 33 bp, Homo sapien
atagagaatgcatagatgatgaaacagaagaaa

SEQ ID NO: 290757 - DNA, 33 bp, Homo sapien
aattgatatttaattacagactacattgcagaa

SEQ ID NO: 290758 - DNA, 33 bp, Homo sapien
aattgatatttaattagagactacattgcagaa

SEQ ID NO: 290759 - DNA, 33 bp, Homo sapien
aagaaagcagtcagaaatctatctgaaaaggta

SEQ ID NO: 290760 - DNA, 33 bp, Homo sapien
aagaaagcagtcagaagtctatctgaaaaggta

SEQ ID NO: 290761 - DNA, 33 bp, Homo sapien
gaggcagtcaagcttaacaagatgtatatgtgt

SEQ ID NO: 290762 - DNA, 33 bp, Homo sapien
gaggcagtcaagcttagcaagatgtatatgtgt

SEQ ID NO: 290763 - DNA, 33 bp, Homo sapien
ctcctgcaattcatgagccctacatcaccacca

SEQ ID NO: 290764 - DNA, 33 bp, Homo sapien
ctcctgcaattcatgatccctacatcaccacca

SEQ ID NO: 290765 - DNA, 33 bp, Homo sapien
ctgagaaccttaataactcctgccttcccagca

SEQ ID NO: 290766 - DNA, 33 bp, Homo sapien
ctgagaaccttaataattcctgccttcccagca

SEQ ID NO: 290767 - DNA, 33 bp, Homo sapien
gctctctaaagatctccctgtatgtacacacac

SEQ ID NO: 290768 - DNA, 33 bp, Homo sapien
gctctctaaagatctctctgtatgtacacacac

SEQ ID NO: 290769 - DNA, 33 bp, Homo sapien
aattttctgtcttatccgaaaagcccaatacct

SEQ ID NO: 290770 - DNA, 33 bp, Homo sapien
aattttctgtcttatctgaaaagcccaatacct

SEQ ID NO: 290771 - DNA, 33 bp, Homo sapien
atataggcatttccaacgtagatctgtttgcaa

SEQ ID NO: 290772 - DNA, 33 bp, Homo sapien
atataggcatttccaatgtagatctgtttgcaa

SEQ ID NO: 290773 - DNA, 33 bp, Homo sapien
agtgtttttttgtctacgtctggcttattttac

SEQ ID NO: 290774 - DNA, 33 bp, Homo sapien
agtgtttttttgtctatgtctggcttattttac

SEQ ID NO: 290775 - DNA, 33 bp, Homo sapien
tgataagttcaggtaactgtttcatccagctta

SEQ ID NO: 290776 - DNA, 33 bp, Homo sapien
tgataagttcaggtaattgtttcatccagctta

SEQ ID NO: 290777 - DNA, 33 bp, Homo sapien
tgaatctacttatctacgttagacaaagacatg

SEQ ID NO: 290778 - DNA, 33 bp, Homo sapien
tgaatctacttatctatgttagacaaagacatg

SEQ ID NO: 290779 - DNA, 33 bp, Homo sapien
tttctccaccccctacaaaaatgaaggtaaatg

SEQ ID NO: 290780 - DNA, 33 bp, Homo sapien
tttctccaccccctacgaaaatgaaggtaaatg

SEQ ID NO: 290781 - DNA, 33 bp, Homo sapien
tccaatctaggagttacgggtcttctctaagaa

SEQ ID NO: 290782 - DNA, 33 bp, Homo sapien
tccaatctaggagttatgggtcttctctaagaa

SEQ ID NO: 290783 - DNA, 33 bp, Homo sapien
agatacagcaggatcaatattagaaactttaga

SEQ ID NO: 290784 - DNA, 33 bp, Homo sapien
agatacagcaggatcagtattagaaactttaga

SEQ ID NO: 290785 - DNA, 33 bp, Homo sapien
atgtcattatacacaactgcagagttttttgag

SEQ ID NO: 290786 - DNA, 33 bp, Homo sapien
atgtcattatacacaattgcagagttttttgag

SEQ ID NO: 290787 - DNA, 33 bp, Homo sapien
aacatgaccaaaatcaatcaacaaaagtcagtc

SEQ ID NO: 290788 - DNA, 33 bp, Homo sapien
aacatgaccaaaatcagtcaacaaaagtcagtc

SEQ ID NO: 290789 - DNA, 33 bp, Homo sapien
aaatctgcctgttcctcagcactgctttgaccc

SEQ ID NO: 290790 - DNA, 33 bp, Homo sapien
aaatctgcctgttcctgagcactgctttgaccc

SEQ ID NO: 290791 - DNA, 33 bp, Homo sapien
gatttcagttagagcaaaaagataaaagcaatg

SEQ ID NO: 290792 - DNA, 33 bp, Homo sapien
gatttcagttagagcagaaagataaaagcaatg

SEQ ID NO: 290793 - DNA, 33 bp, Homo sapien
tcacagacattaggaaaggagtgcagaggagaa

SEQ ID NO: 290794 - DNA, 33 bp, Homo sapien
tcacagacattaggaagggagtgcagaggagaa

SEQ ID NO: 290795 - DNA, 33 bp, Homo sapien
ggttgttctcaattccaatgctgtggttcccct

SEQ ID NO: 290796 - DNA, 33 bp, Homo sapien
ggttgttctcaattccgatgctgtggttcccct

SEQ ID NO: 290797 - DNA, 33 bp, Homo sapien
tgctagctttaggtaaacggtctgatgttaaca

SEQ ID NO: 290798 - DNA, 33 bp, Homo sapien
tgctagctttaggtaagcggtctgatgttaaca

SEQ ID NO: 290799 - DNA, 33 bp, Homo sapien
attagctaaatatgcccaaactctaatggtgtt

SEQ ID NO: 290800 - DNA, 33 bp, Homo sapien
attagctaaatatgcctaaactctaatggtgtt

SEQ ID NO: 290801 - DNA, 33 bp, Homo sapien
ttctttgacctgtgacaaagtttccttcattgt

SEQ ID NO: 290802 - DNA, 33 bp, Homo sapien
ttctttgacctgtgaccaagtttccttcattgt

SEQ ID NO: 290803 - DNA, 33 bp, Homo sapien
ggaaggagatgtcaaaatctaaggcttgagata

SEQ ID NO: 290804 - DNA, 33 bp, Homo sapien
ggaaggagatgtcaaagtctaaggcttgagata

SEQ ID NO: 290805 - DNA, 33 bp, Homo sapien
aatacaataaaattaactatgcttcttatgtgt

SEQ ID NO: 290806 - DNA, 33 bp, Homo sapien
aatacaataaaattaagtatgcttcttatgtgt

SEQ ID NO: 290807 - DNA, 33 bp, Homo sapien
atctatatcaatcatccatatgcctgttctctc

SEQ ID NO: 290808 - DNA, 33 bp, Homo sapien
atctatatcaatcatctatatgcctgttctctc

SEQ ID NO: 290809 - DNA, 33 bp, Homo sapien
gtctaacctcagtcataaacaggttaaaagggc

SEQ ID NO: 290810 - DNA, 33 bp, Homo sapien
gtctaacctcagtcattaacaggttaaaagggc

SEQ ID NO: 290811 - DNA, 33 bp, Homo sapien
acacagggacactctcaatacaacttcatcaca

SEQ ID NO: 290812 - DNA, 33 bp, Homo sapien
acacagggacactctcgatacaacttcatcaca

SEQ ID NO: 290813 - DNA, 33 bp, Homo sapien
ataaacaaatagtttacacaaatatgctttcaa

SEQ ID NO: 290814 - DNA, 33 bp, Homo sapien
ataaacaaatagtttagacaaatatgctttcaa

SEQ ID NO: 290815 - DNA, 33 bp, Homo sapien
tgatgaatggtatccaagacagaagttctctca

SEQ ID NO: 290816 - DNA, 33 bp, Homo sapien
tgatgaatggtatccaggacagaagttctctca

SEQ ID NO: 290817 - DNA, 33 bp, Homo sapien
ctattcgagatggaaacctttagttataaggtg

SEQ ID NO: 290818 - DNA, 33 bp, Homo sapien
ctattcgagatggaaatctttagttataaggtg

SEQ ID NO: 290819 - DNA, 33 bp, Homo sapien
gcatttgttctgctgaagagtggtatatttctg

SEQ ID NO: 290820 - DNA, 33 bp, Homo sapien
gcatttgttctgctgaggagtggtatatttctg

SEQ ID NO: 290821 - DNA, 33 bp, Homo sapien
cttggctaaacaaatgaatttataaccaattat

SEQ ID NO: 290822 - DNA, 33 bp, Homo sapien
cttggctaaacaaatggatttataaccaattat

SEQ ID NO: 290823 - DNA, 33 bp, Homo sapien
ggtctaacttaatgacacacaaagagtcatctt

SEQ ID NO: 290824 - DNA, 33 bp, Homo sapien
ggtctaacttaatgacgcacaaagagtcatctt

SEQ ID NO: 290825 - DNA, 33 bp, Homo sapien
cgtaagactctcttcacggattacttggcctgc

SEQ ID NO: 290826 - DNA, 33 bp, Homo sapien
cgtaagactctcttcatggattacttggcctgc

SEQ ID NO: 290827 - DNA, 33 bp, Homo sapien
ttaaataggtccaacactgtgctattctatatg

SEQ ID NO: 290828 - DNA, 33 bp, Homo sapien
ttaaataggtccaacagtgtgctattctatatg

SEQ ID NO: 290829 - DNA, 33 bp, Homo sapien
tcatcactgagatacaagctttgtgggacagaa

SEQ ID NO: 290830 - DNA, 33 bp, Homo sapien
tcatcactgagatacacgctttgtgggacagaa

SEQ ID NO: 290831 - DNA, 33 bp, Homo sapien
gtaagatctagagctgaaaaacaaaaacaaacg

SEQ ID NO: 290832 - DNA, 33 bp, Homo sapien
gtaagatctagagctgcaaaacaaaaacaaacg

SEQ ID NO: 290833 - DNA, 33 bp, Homo sapien
tctatgtggttggcaacaaatcgaaaaagtcca

SEQ ID NO: 290834 - DNA, 33 bp, Homo sapien
tctatgtggttggcaagaaatcgaaaaagtcca

SEQ ID NO: 290835 - DNA, 33 bp, Homo sapien
gacaggaaccagctaactccagccctttttgat

SEQ ID NO: 290836 - DNA, 33 bp, Homo sapien
gacaggaaccagctaattccagccctttttgat

SEQ ID NO: 290837 - DNA, 33 bp, Homo sapien
ttataaaattgtagatcaggattaatgattatt

SEQ ID NO: 290838 - DNA, 33 bp, Homo sapien
ttataaaattgtagatgaggattaatgattatt

SEQ ID NO: 290839 - DNA, 33 bp, Homo sapien
attttgcctgttttgcccccttctgtcataatg

SEQ ID NO: 290840 - DNA, 33 bp, Homo sapien
attttgcctgttttgctcccttctgtcataatg

SEQ ID NO: 290841 - DNA, 33 bp, Homo sapien
atgactttatgtggaaatgtggtctttgcagat

SEQ ID NO: 290842 - DNA, 33 bp, Homo sapien
atgactttatgtggaagtgtggtctttgcagat

SEQ ID NO: 290843 - DNA, 33 bp, Homo sapien
aagatatgtgatatgtaaaggcctacgataatt

SEQ ID NO: 290844 - DNA, 33 bp, Homo sapien
aagatatgtgatatgtgaaggcctacgataatt

SEQ ID NO: 290845 - DNA, 33 bp, Homo sapien
gcatttttcacattgacgattaaagccttgtaa

SEQ ID NO: 290846 - DNA, 33 bp, Homo sapien
gcatttttcacattgatgattaaagccttgtaa

SEQ ID NO: 290847 - DNA, 33 bp, Homo sapien
tagaaagaaaatggcaaaatacaattttataga

SEQ ID NO: 290848 - DNA, 33 bp, Homo sapien
tagaaagaaaatggcagaatacaattttataga

SEQ ID NO: 290849 - DNA, 33 bp, Homo sapien
tcccaaccaggtgtgactattatctgggtatca

SEQ ID NO: 290850 - DNA, 33 bp, Homo sapien
tcccaaccaggtgtgagtattatctgggtatca

SEQ ID NO: 290851 - DNA, 33 bp, Homo sapien
ctactgtatgcttggcacagcgcaaaatcctag

SEQ ID NO: 290852 - DNA, 33 bp, Homo sapien
ctactgtatgcttggcgcagcgcaaaatcctag

SEQ ID NO: 290853 - DNA, 33 bp, Homo sapien
cacaagaatcagatgaactggaaaaagaaaagc

SEQ ID NO: 290854 - DNA, 33 bp, Homo sapien
cacaagaatcagatgatctggaaaaagaaaagc

SEQ ID NO: 290855 - DNA, 33 bp, Homo sapien
tgttgctgacaattaaaccacatagcatttata

SEQ ID NO: 290856 - DNA, 33 bp, Homo sapien
tgttgctgacaattaagccacatagcatttata

SEQ ID NO: 290857 - DNA, 33 bp, Homo sapien
ccacactggattttctcaacacacaagccaggg

SEQ ID NO: 290858 - DNA, 33 bp, Homo sapien
ccacactggattttctgaacacacaagccaggg

SEQ ID NO: 290859 - DNA, 33 bp, Homo sapien
cccctgactcatatcacagaatagtggcagtaa

SEQ ID NO: 290860 - DNA, 33 bp, Homo sapien
cccctgactcatatcatagaatagtggcagtaa

SEQ ID NO: 290861 - DNA, 33 bp, Homo sapien
tctgatggttcaggaacatgaaggcaagataaa

SEQ ID NO: 290862 - DNA, 33 bp, Homo sapien
tctgatggttcaggaatatgaaggcaagataaa

SEQ ID NO: 290863 - DNA, 33 bp, Homo sapien
tcacgtcttaggatgcacacacaatcacggtac

SEQ ID NO: 290864 - DNA, 33 bp, Homo sapien
tcacgtcttaggatgcgcacacaatcacggtac

SEQ ID NO: 290865 - DNA, 33 bp, Homo sapien
gctcaacattatagcaaagtagacacagaacag

SEQ ID NO: 290866 - DNA, 33 bp, Homo sapien
gctcaacattatagcagagtagacacagaacag

SEQ ID NO: 290867 - DNA, 33 bp, Homo sapien
gatagaaaaacatagcaattcaagtcagctttt

SEQ ID NO: 290868 - DNA, 33 bp, Homo sapien
gatagaaaaacatagcgattcaagtcagctttt

SEQ ID NO: 290869 - DNA, 33 bp, Homo sapien
tgaacgattatgaccaactcagggaggcgagaa

SEQ ID NO: 290870 - DNA, 33 bp, Homo sapien
tgaacgattatgaccagctcagggaggcgagaa

SEQ ID NO: 290871 - DNA, 33 bp, Homo sapien; identical to SEQ ID NO: 290869

SEQ ID NO: 290872 - DNA, 33 bp, Homo sapien; identical to SEQ ID NO: 290870

SEQ ID NO: 290873 - DNA, 33 bp, Homo sapien
aaacctagtgagggcaatagacacttctcaaat

SEQ ID NO: 290874 - DNA, 33 bp, Homo sapien
aaacctagtgagggcagtagacacttctcaaat

SEQ ID NO: 290875 - DNA, 33 bp, Homo sapien
ctttgctgacaatgaacagttctgcagtttgtt

SEQ ID NO: 290876 - DNA, 33 bp, Homo sapien
ctttgctgacaatgaatagttctgcagtttgtt

SEQ ID NO: 290877 - DNA, 33 bp, Homo sapien
tcattatgaatccaacagttacaaatgcagttt

SEQ ID NO: 290878 - DNA, 33 bp, Homo sapien
tcattatgaatccaacggttacaaatgcagttt

SEQ ID NO: 290879 - DNA, 33 bp, Homo sapien
caaagggacagtctcaaatgtttgctgtataaa

SEQ ID NO: 290880 - DNA, 33 bp, Homo sapien
caaagggacagtctcagatgtttgctgtataaa

SEQ ID NO: 290881 - DNA, 33 bp, Homo sapien
ctctgtggtttgtgtccaggaggtacaatatat

SEQ ID NO: 290882 - DNA, 33 bp, Homo sapien
ctctgtggtttgtgtctaggaggtacaatatat

SEQ ID NO: 290883 - DNA, 33 bp, Homo sapien
ttgtaaatctgactgccaattaatacttttcaa

SEQ ID NO: 290884 - DNA, 33 bp, Homo sapien
ttgtaaatctgactgctaattaatacttttcaa

SEQ ID NO: 290885 - DNA, 33 bp, Homo sapien
acctatcactaaatacccacattgacattaatc

SEQ ID NO: 290886 - DNA, 33 bp, Homo sapien
acctatcactaaatactcacattgacattaatc

SEQ ID NO: 290887 - DNA, 33 bp, Homo sapien
catattggcgtctgcaaattgacttgtaatagg

SEQ ID NO: 290888 - DNA, 33 bp, Homo sapien
catattggcgtctgcagattgacttgtaatagg

SEQ ID NO: 290889 - DNA, 33 bp, Homo sapien
cagtgctagccgtgtgcatatgtggaactcagt

SEQ ID NO: 290890 - DNA, 33 bp, Homo sapien
cagtgctagccgtgtggatatgtggaactcagt

SEQ ID NO: 290891 - DNA, 33 bp, Homo sapien
ggccaccgattgaactaaaaaaagtaatctcta

SEQ ID NO: 290892 - DNA, 33 bp, Homo sapien
ggccaccgattgaactgaaaaaagtaatctcta

SEQ ID NO: 290893 - DNA, 33 bp, Homo sapien
ggacaggtcatattacaataaaaatgtggccaa

SEQ ID NO: 290894 - DNA, 33 bp, Homo sapien
ggacaggtcatattaccataaaaatgtggccaa

SEQ ID NO: 290895 - DNA, 33 bp, Homo sapien
catgaagccactcgagaaataaattaataaaat

SEQ ID NO: 290896 - DNA, 33 bp, Homo sapien
catgaagccactcgaggaataaattaataaaat

SEQ ID NO: 290897 - DNA, 33 bp, Homo sapien
acaaagtagattcacaataaatgcctcctaaag

SEQ ID NO: 290898 - DNA, 33 bp, Homo sapien
acaaagtagattcacagtaaatgcctcctaaag

SEQ ID NO: 290899 - DNA, 33 bp, Homo sapien
gaggctttcacattcacgccatcatttcctttt

SEQ ID NO: 290900 - DNA, 33 bp, Homo sapien
gaggctttcacattcatgccatcatttcctttt

SEQ ID NO: 290901 - DNA, 33 bp, Homo sapien
ttgtggggctgtcacaaaaacagggaatggaat

SEQ ID NO: 290902 - DNA, 33 bp, Homo sapien
ttgtggggctgtcacagaaacagggaatggaat

SEQ ID NO: 290903 - DNA, 33 bp, Homo sapien
gtcctctgaagtgaagccggttttgtctctaaa

SEQ ID NO: 290904 - DNA, 33 bp, Homo sapien
gtcctctgaagtgaaggcggttttgtctctaaa

SEQ ID NO: 290905 - DNA, 33 bp, Homo sapien
aaaatgaatttgcagaaaacaaggaggtagttt

SEQ ID NO: 290906 - DNA, 33 bp, Homo sapien
aaaatgaatttgcagagaacaaggaggtagttt

SEQ ID NO: 290907 - DNA, 33 bp, Homo sapien
atggagttcaggcaaacgcaatgcaaaagccac

SEQ ID NO: 290908 - DNA, 33 bp, Homo sapien
atggagttcaggcaaatgcaatgcaaaagccac

SEQ ID NO: 290909 - DNA, 33 bp, Homo sapien
ttggtttcatacctgacgaattaaaggaaagtg

SEQ ID NO: 290910 - DNA, 33 bp, Homo sapien
ttggtttcatacctgatgaattaaaggaaagtg

SEQ ID NO: 290911 - DNA, 33 bp, Homo sapien
tacccatccatcattgaagagtttcctgagaaa

SEQ ID NO: 290912 - DNA, 33 bp, Homo sapien
tacccatccatcattggagagtttcctgagaaa

SEQ ID NO: 290913 - DNA, 33 bp, Homo sapien
tagttattattaactacatttgtgaactgagtc

SEQ ID NO: 290914 - DNA, 33 bp, Homo sapien
tagttattattaactagatttgtgaactgagtc

SEQ ID NO: 290915 - DNA, 33 bp, Homo sapien
agcaagaataagaacccaaaactgtagaggagg

SEQ ID NO: 290916 - DNA, 33 bp, Homo sapien
agcaagaataagaaccgaaaactgtagaggagg

SEQ ID NO: 290917 - DNA, 33 bp, Homo sapien
agcaatatgaaacttacactgtaggttactgag

SEQ ID NO: 290918 - DNA, 33 bp, Homo sapien
agcaatatgaaacttatactgtaggttactgag

SEQ ID NO: 290919 - DNA, 33 bp, Homo sapien
ctatttatatcaaaagccttgcatttctaattc

SEQ ID NO: 290920 - DNA, 33 bp, Homo sapien
ctatttatatcaaaaggcttgcatttctaattc

SEQ ID NO: 290921 - DNA, 33 bp, Homo sapien
ctaaaaagaaaatcgcggaatgattgtgtaacc

SEQ ID NO: 290922 - DNA, 33 bp, Homo sapien
ctaaaaagaaaatcgctgaatgattgtgtaacc

SEQ ID NO: 290923 - DNA, 33 bp, Homo sapien
tgttttccacttagacagtccaacaagttagag

SEQ ID NO: 290924 - DNA, 33 bp, Homo sapien
tgttttccacttagacggtccaacaagttagag

SEQ ID NO: 290925 - DNA, 33 bp, Homo sapien
tgctaaaaaggatggcactttaatttgtcacag

SEQ ID NO: 290926 - DNA, 33 bp, Homo sapien
tgctaaaaaggatggcgctttaatttgtcacag

SEQ ID NO: 290927 - DNA, 33 bp, Homo sapien
gtgagactggttcagacggataatgcaggtata

SEQ ID NO: 290928 - DNA, 33 bp, Homo sapien
gtgagactggttcagatggataatgcaggtata

SEQ ID NO: 290929 - DNA, 33 bp, Homo sapien
tcagaaggattcaatacggacattctttgtatt

SEQ ID NO: 290930 - DNA, 33 bp, Homo sapien
tcagaaggattcaatatggacattctttgtatt

SEQ ID NO: 290931 - DNA, 33 bp, Homo sapien
aatccccactttctgccctgcacagcagggggc

SEQ ID NO: 290932 - DNA, 33 bp, Homo sapien
aatccccactttctgcgctgcacagcagggggc

SEQ ID NO: 290933 - DNA, 33 bp, Homo sapien
cagaaacaagcctccactgaatttatctaatgt

SEQ ID NO: 290934 - DNA, 33 bp, Homo sapien
cagaaacaagcctccattgaatttatctaatgt

SEQ ID NO: 290935 - DNA, 33 bp, Homo sapien
acctaccagatgcccaataagaacagaaaagcc

SEQ ID NO: 290936 - DNA, 33 bp, Homo sapien
acctaccagatgcccagtaagaacagaaaagcc

SEQ ID NO: 290937 - DNA, 33 bp, Homo sapien
ttagaggcctcagtacaggtggcagctttgttc

SEQ ID NO: 290938 - DNA, 33 bp, Homo sapien
ttagaggcctcagtaccggtggcagctttgttc

SEQ ID NO: 290939 - DNA, 33 bp, Homo sapien
tcactgcagcctgaacactttcattttagttgt

SEQ ID NO: 290940 - DNA, 33 bp, Homo sapien
tcactgcagcctgaacgctttcattttagttgt

SEQ ID NO: 290941 - DNA, 33 bp, Homo sapien
gctgcctcgtgttacccagacaaagcagagggg

SEQ ID NO: 290942 - DNA, 33 bp, Homo sapien
gctgcctcgtgttacctagacaaagcagagggg

SEQ ID NO: 290943 - DNA, 33 bp, Homo sapien
tttagaagccagcctcacactcagatattctct

SEQ ID NO: 290944 - DNA, 33 bp, Homo sapien
tttagaagccagcctcgcactcagatattctct

SEQ ID NO: 290945 - DNA, 33 bp, Homo sapien
acccaaagaccaccaggaatatacctgtagtta

SEQ ID NO: 290946 - DNA, 33 bp, Homo sapien
acccaaagaccaccagtaatatacctgtagtta

SEQ ID NO: 290947 - DNA, 33 bp, Homo sapien
ttcaaagctcaggttaaattccacaagcaaatt

SEQ ID NO: 290948 - DNA, 33 bp, Homo sapien
ttcaaagctcaggttacattccacaagcaaatt

SEQ ID NO: 290949 - DNA, 33 bp, Homo sapien
tctggtcaaagcctatcactttcttctgagtgt

SEQ ID NO: 290950 - DNA, 33 bp, Homo sapien
tctggtcaaagcctattactttcttctgagtgt

SEQ ID NO: 290951 - DNA, 33 bp, Homo sapien
aatgtcaaatagagtaagaacaaaacactcaga

SEQ ID NO: 290952 - DNA, 33 bp, Homo sapien
aatgtcaaatagagtatgaacaaaacactcaga

SEQ ID NO: 290953 - DNA, 33 bp, Homo sapien
tctggagatgaagtctaaaactgctcagttaaa

SEQ ID NO: 290954 - DNA, 33 bp, Homo sapien
tctggagatgaagtctcaaactgctcagttaaa

SEQ ID NO: 290955 - DNA, 33 bp, Homo sapien
ttgttgactaacacaaatcagtttcacttgcct

SEQ ID NO: 290956 - DNA, 33 bp, Homo sapien
ttgttgactaacacaactcagtttcacttgcct

SEQ ID NO: 290957 - DNA, 33 bp, Homo sapien
tcatgacagttgtatgcaacatgtttattttta

SEQ ID NO: 290958 - DNA, 33 bp, Homo sapien
tcatgacagttgtatgtaacatgtttattttta

SEQ ID NO: 290959 - DNA, 33 bp, Homo sapien
gcacaataatttagagaactgcatccagcttgc

SEQ ID NO: 290960 - DNA, 33 bp, Homo sapien
gcacaataatttagagtactgcatccagcttgc

SEQ ID NO: 290961 - DNA, 33 bp, Homo sapien
agctatggcagttctacggaagatgaaatatag

SEQ ID NO: 290962 - DNA, 33 bp, Homo sapien
agctatggcagttctatggaagatgaaatatag

SEQ ID NO: 290963 - DNA, 33 bp, Homo sapien
cttctttctttgttcaaatttcagttgttttgg

SEQ ID NO: 290964 - DNA, 33 bp, Homo sapien
cttctttctttgttcacatttcagttgttttgg

SEQ ID NO: 290965 - DNA, 33 bp, Homo sapien
tgcagccaatacataaatgtttgaaatttcaca

SEQ ID NO: 290966 - DNA, 33 bp, Homo sapien
tgcagccaatacataactgtttgaaatttcaca

SEQ ID NO: 290967 - DNA, 33 bp, Homo sapien
tgccatgtagaatacacgtgtgaaatttcaaac

SEQ ID NO: 290968 - DNA, 33 bp, Homo sapien
tgccatgtagaatacaggtgtgaaatttcaaac

SEQ ID NO: 290969 - DNA, 33 bp, Homo sapien
tgcctgaagtaccctacgaagatagttgacctc

SEQ ID NO: 290970 - DNA, 33 bp, Homo sapien
tgcctgaagtaccctatgaagatagttgacctc

SEQ ID NO: 290971 - DNA, 33 bp, Homo sapien
gctagtggctatgcagacaacagtgtttcctaa

SEQ ID NO: 290972 - DNA, 33 bp, Homo sapien
gctagtggctatgcaggcaacagtgtttcctaa

SEQ ID NO: 290973 - DNA, 33 bp, Homo sapien
taagactactaaaaccaattatatgtgcatttt

SEQ ID NO: 290974 - DNA, 33 bp, Homo sapien
taagactactaaaaccgattatatgtgcatttt

SEQ ID NO: 290975 - DNA, 33 bp, Homo sapien
caagcctgtgtccccaaaaatatcacttttctt

SEQ ID NO: 290976 - DNA, 33 bp, Homo sapien
caagcctgtgtccccacaaatatcacttttctt

SEQ ID NO: 290977 - DNA, 33 bp, Homo sapien
ggcagttgaagtggtaagaagaaattaagttat

SEQ ID NO: 290978 - DNA, 33 bp, Homo sapien
ggcagttgaagtggtaggaagaaattaagttat

SEQ ID NO: 290979 - DNA, 33 bp, Homo sapien
aagagtggaataagggaaaccagttagcagact

SEQ ID NO: 290980 - DNA, 33 bp, Homo sapien
aagagtggaataagggcaaccagttagcagact

SEQ ID NO: 290981 - DNA, 33 bp, Homo sapien
tttgtaaatttgaagaacaggtattatcaagat

SEQ ID NO: 290982 - DNA, 33 bp, Homo sapien
tttgtaaatttgaagagcaggtattatcaagat

SEQ ID NO: 290983 - DNA, 33 bp, Homo sapien
ctttattctgttgacaaatccattggtttctaa

SEQ ID NO: 290984 - DNA, 33 bp, Homo sapien
ctttattctgttgacatatccattggtttctaa

SEQ ID NO: 290985 - DNA, 33 bp, Homo sapien
attcattcaggctttaccatgtacatttgtcct

SEQ ID NO: 290986 - DNA, 33 bp, Homo sapien
attcattcaggctttatcatgtacatttgtcct

SEQ ID NO: 290987 - DNA, 33 bp, Homo sapien
tgttcacatggaaagaagtttatagtgtattac

SEQ ID NO: 290988 - DNA, 33 bp, Homo sapien
tgttcacatggaaagatgtttatagtgtattac

SEQ ID NO: 290989 - DNA, 33 bp, Homo sapien
aaaataactaaatagggcccagaggtagcagca

SEQ ID NO: 290990 - DNA, 33 bp, Homo sapien
aaaataactaaataggtcccagaggtagcagca

SEQ ID NO: 290991 - DNA, 33 bp, Homo sapien
gtggctgtcactctgacatactgccccattgtt

SEQ ID NO: 290992 - DNA, 33 bp, Homo sapien
gtggctgtcactctgatatactgccccattgtt

SEQ ID NO: 290993 - DNA, 33 bp, Homo sapien
tgtgccctttatgagacgatgagagtcccatct

SEQ ID NO: 290994 - DNA, 33 bp, Homo sapien
tgtgccctttatgagaggatgagagtcccatct

SEQ ID NO: 290995 - DNA, 33 bp, Homo sapien
tgagagcttgatgaccagagactttgcacttct

SEQ ID NO: 290996 - DNA, 33 bp, Homo sapien
tgagagcttgatgaccggagactttgcacttct

SEQ ID NO: 290997 - DNA, 33 bp, Homo sapien
actaaaatgacccccaaatgacaagctttggca

SEQ ID NO: 290998 - DNA, 33 bp, Homo sapien
actaaaatgacccccagatgacaagctttggca

SEQ ID NO: 290999 - DNA, 33 bp, Homo sapien
cttccaggcaaccttacgcttctgagattggga

SEQ ID NO: 291000 - DNA, 33 bp, Homo sapien
cttccaggcaaccttatgcttctgagattggga

SEQ ID NO: 291001 - DNA, 33 bp, Homo sapien
tgtcatctctccacccaaagatatccttggttt

SEQ ID NO: 291002 - DNA, 33 bp, Homo sapien
tgtcatctctccaccctaagatatccttggttt

SEQ ID NO: 291003 - DNA, 33 bp, Homo sapien
gaaagagcacaaaggacgtcaaatgctaatgtt

SEQ ID NO: 291004 - DNA, 33 bp, Homo sapien
gaaagagcacaaaggaggtcaaatgctaatgtt

SEQ ID NO: 291005 - DNA, 33 bp, Homo sapien
actattgtggactgagaaaaaagttgaatgtaa

SEQ ID NO: 291006 - DNA, 33 bp, Homo sapien
actattgtggactgaggaaaaagttgaatgtaa

SEQ ID NO: 291007 - DNA, 33 bp, Homo sapien
tttaaattcattcttccactatggatcttttga

SEQ ID NO: 291008 - DNA, 33 bp, Homo sapien
tttaaattcattcttctactatggatcttttga

SEQ ID NO: 291009 - DNA, 33 bp, Homo sapien
ccctctttcttggcaacaatacgagtccaattc

SEQ ID NO: 291010 - DNA, 33 bp, Homo sapien
ccctctttcttggcaataatacgagtccaattc

SEQ ID NO: 291011 - DNA, 33 bp, Homo sapien
ctttggtgtcacaacaataatagtcatcgagag

SEQ ID NO: 291012 - DNA, 33 bp, Homo sapien
ctttggtgtcacaacagtaatagtcatcgagag

SEQ ID NO: 291013 - DNA, 33 bp, Homo sapien
gaaggctcaaaaattcaatgtcaagatgccagc

SEQ ID NO: 291014 - DNA, 33 bp, Homo sapien
gaaggctcaaaaattcgatgtcaagatgccagc

SEQ ID NO: 291015 - DNA, 33 bp, Homo sapien
tgttccttctcaggtacgcttcatgaagaaagc

SEQ ID NO: 291016 - DNA, 33 bp, Homo sapien
tgttccttctcaggtaggcttcatgaagaaagc

SEQ ID NO: 291017 - DNA, 33 bp, Homo sapien
tagaatttggaaaggacgccactctgaaaatat

SEQ ID NO: 291018 - DNA, 33 bp, Homo sapien
tagaatttggaaaggatgccactctgaaaatat

SEQ ID NO: 291019 - DNA, 33 bp, Homo sapien
agaggagcaagagagacatttttagagtaatgg

SEQ ID NO: 291020 - DNA, 33 bp, Homo sapien
agaggagcaagagagatatttttagagtaatgg

SEQ ID NO: 291021 - DNA, 33 bp, Homo sapien
agaattgggaaattaacacattgacagccaaca

SEQ ID NO: 291022 - DNA, 33 bp, Homo sapien
agaattgggaaattaagacattgacagccaaca

SEQ ID NO: 291023 - DNA, 33 bp, Homo sapien
acaacaatccagttgcgaggtaggatgtggtag

SEQ ID NO: 291024 - DNA, 33 bp, Homo sapien
acaacaatccagttgctaggtaggatgtggtag

SEQ ID NO: 291025 - DNA, 33 bp, Homo sapien
tccttcatgttcaacccaatgggcatcctaggg

SEQ ID NO: 291026 - DNA, 33 bp, Homo sapien
tccttcatgttcaacctaatgggcatcctaggg

SEQ ID NO: 291027 - DNA, 33 bp, Homo sapien
atttccaaacccatgagctctcaaagccattta

SEQ ID NO: 291028 - DNA, 33 bp, Homo sapien
atttccaaacccatgatctctcaaagccattta

SEQ ID NO: 291029 - DNA, 33 bp, Homo sapien
catcgtcagtcccccacaactttccaacatcaa

SEQ ID NO: 291030 - DNA, 33 bp, Homo sapien
catcgtcagtcccccagaactttccaacatcaa

SEQ ID NO: 291031 - DNA, 33 bp, Homo sapien
gaagtgggagttagaacagatcttgacattgac

SEQ ID NO: 291032 - DNA, 33 bp, Homo sapien
gaagtgggagttagaatagatcttgacattgac

SEQ ID NO: 291033 - DNA, 33 bp, Homo sapien
gtgagtagctatctgcactttttctttttgtgt

SEQ ID NO: 291034 - DNA, 33 bp, Homo sapien
gtgagtagctatctgcgctttttctttttgtgt

SEQ ID NO: 291035 - DNA, 33 bp, Homo sapien
tttgcaaaaataggcaagctgggtctggcccaa

SEQ ID NO: 291036 - DNA, 33 bp, Homo sapien
tttgcaaaaataggcaggctgggtctggcccaa

SEQ ID NO: 291037 - DNA, 33 bp, Homo sapien
tattggggatgacacactaagaggtaatagtga

SEQ ID NO: 291038 - DNA, 33 bp, Homo sapien
tattggggatgacacagtaagaggtaatagtga

SEQ ID NO: 291039 - DNA, 33 bp, Homo sapien
tgaaaaaagatgactacgtggtcacaagtatat

SEQ ID NO: 291040 - DNA, 33 bp, Homo sapien
tgaaaaaagatgactatgtggtcacaagtatat

SEQ ID NO: 291041 - DNA, 33 bp, Homo sapien
gcacgcacacaagtagccagatgtcaagaagaa

SEQ ID NO: 291042 - DNA, 33 bp, Homo sapien
gcacgcacacaagtagtcagatgtcaagaagaa

SEQ ID NO: 291043 - DNA, 33 bp, Homo sapien
cttgttttcacactaaatggatctttttttttg

SEQ ID NO: 291044 - DNA, 33 bp, Homo sapien
cttgttttcacactaagtggatctttttttttg

SEQ ID NO: 291045 - DNA, 33 bp, Homo sapien
acttatggtggttactcaactttgcatcagttc

SEQ ID NO: 291046 - DNA, 33 bp, Homo sapien
acttatggtggttacttaactttgcatcagttc

SEQ ID NO: 291047 - DNA, 33 bp, Homo sapien
taattctctctgcttagcacagttaccattttt

SEQ ID NO: 291048 - DNA, 33 bp, Homo sapien
taattctctctgcttatcacagttaccattttt

SEQ ID NO: 291049 - DNA, 33 bp, Homo sapien
taacattcactgaaaacttaatatgcgctatga

SEQ ID NO: 291050 - DNA, 33 bp, Homo sapien
taacattcactgaaaagttaatatgcgctatga

SEQ ID NO: 291051 - DNA, 33 bp, Homo sapien
agcatttggtcagagacagcgttagaaatatac

SEQ ID NO: 291052 - DNA, 33 bp, Homo sapien
agcatttggtcagagagagcgttagaaatatac

SEQ ID NO: 291053 - DNA, 33 bp, Homo sapien
ttatcttcagtaacccagaggactaaggatcct

SEQ ID NO: 291054 - DNA, 33 bp, Homo sapien
ttatcttcagtaaccccgaggactaaggatcct

SEQ ID NO: 291055 - DNA, 33 bp, Homo sapien
aagaagcaggctttaactctaaggaaagacagc

SEQ ID NO: 291056 - DNA, 33 bp, Homo sapien
aagaagcaggctttaattctaaggaaagacagc

SEQ ID NO: 291057 - DNA, 33 bp, Homo sapien
ggtaagttagtctacacatctagcatcatagct

SEQ ID NO: 291058 - DNA, 33 bp, Homo sapien
ggtaagttagtctacatatctagcatcatagct

SEQ ID NO: 291059 - DNA, 33 bp, Homo sapien
tctagcatcatagctcaaataaagtctaacata

SEQ ID NO: 291060 - DNA, 33 bp, Homo sapien
tctagcatcatagctcgaataaagtctaacata

SEQ ID NO: 291061 - DNA, 33 bp, Homo sapien
cctcatctctaaaaataatacctcgctcagagt

SEQ ID NO: 291062 - DNA, 33 bp, Homo sapien
cctcatctctaaaaatgatacctcgctcagagt

SEQ ID NO: 291063 - DNA, 33 bp, Homo sapien
catgaacagacacttactaaaagaagccctaca

SEQ ID NO: 291064 - DNA, 33 bp, Homo sapien
catgaacagacacttattaaaagaagccctaca

SEQ ID NO: 291065 - DNA, 33 bp, Homo sapien
ttacccatgtaacaaacgaaccaaaaataaagt

SEQ ID NO: 291066 - DNA, 33 bp, Homo sapien
ttacccatgtaacaaatgaaccaaaaataaagt

SEQ ID NO: 291067 - DNA, 33 bp, Homo sapien
atgtagcttcttctcaatctagtaggaaacatt

SEQ ID NO: 291068 - DNA, 33 bp, Homo sapien
atgtagcttcttctcagtctagtaggaaacatt

SEQ ID NO: 291069 - DNA, 33 bp, Homo sapien
agctttagagttcttaagatatgacagagcttt

SEQ ID NO: 291070 - DNA, 33 bp, Homo sapien
agctttagagttcttatgatatgacagagcttt

SEQ ID NO: 291071 - DNA, 33 bp, Homo sapien
agttcaacatggagtgaaaaaaaatccttaaag

SEQ ID NO: 291072 - DNA, 33 bp, Homo sapien
agttcaacatggagtggaaaaaaatccttaaag

SEQ ID NO: 291073 - DNA, 33 bp, Homo sapien
ggttgaacctttcacgcatcacatccctctaag

SEQ ID NO: 291074 - DNA, 33 bp, Homo sapien
ggttgaacctttcacgtatcacatccctctaag

SEQ ID NO: 291075 - DNA, 33 bp, Homo sapien
ttgtacatgtcaaaaacgtcatcaaaatgccac

SEQ ID NO: 291076 - DNA, 33 bp, Homo sapien
ttgtacatgtcaaaaatgtcatcaaaatgccac

SEQ ID NO: 291077 - DNA, 33 bp, Homo sapien
agcctccaaggctataagagataatgtgtcaac

SEQ ID NO: 291078 - DNA, 33 bp, Homo sapien
agcctccaaggctataggagataatgtgtcaac

SEQ ID NO: 291079 - DNA, 33 bp, Homo sapien
caacggtccctgcatcaaaaatgaaagtttcat

SEQ ID NO: 291080 - DNA, 33 bp, Homo sapien
caacggtccctgcatcgaaaatgaaagtttcat

SEQ ID NO: 291081 - DNA, 33 bp, Homo sapien
cacagagtacaccttgaaaaacattaatacaaa

SEQ ID NO: 291082 - DNA, 33 bp, Homo sapien
cacagagtacaccttggaaaacattaatacaaa

SEQ ID NO: 291083 - DNA, 33 bp, Homo sapien
cataaaggagattagacgtgacatttgtttgaa

SEQ ID NO: 291084 - DNA, 33 bp, Homo sapien
cataaaggagattagatgtgacatttgtttgaa

SEQ ID NO: 291085 - DNA, 33 bp, Homo sapien
gcttgtcaacaaattcaaagacaaaaatcatta

SEQ ID NO: 291086 - DNA, 33 bp, Homo sapien
gcttgtcaacaaattcgaagacaaaaatcatta

SEQ ID NO: 291087 - DNA, 33 bp, Homo sapien
ttttctttctctctcaacagaacaacagagcag

SEQ ID NO: 291088 - DNA, 33 bp, Homo sapien
ttttctttctctctcagcagaacaacagagcag

SEQ ID NO: 291089 - DNA, 33 bp, Homo sapien
aatagttggcaaatagcaagtctgaaaagtaag

SEQ ID NO: 291090 - DNA, 33 bp, Homo sapien
aatagttggcaaataggaagtctgaaaagtaag

SEQ ID NO: 291091 - DNA, 33 bp, Homo sapien
gtggggaattggaaacagcgtggaaatcgagag

SEQ ID NO: 291092 - DNA, 33 bp, Homo sapien
gtggggaattggaaaccgcgtggaaatcgagag

SEQ ID NO: 291093 - DNA, 33 bp, Homo sapien
aaaccaatcaaaggacaaatacagcatgatttc

SEQ ID NO: 291094 - DNA, 33 bp, Homo sapien
aaaccaatcaaaggacgaatacagcatgatttc

SEQ ID NO: 291095 - DNA, 33 bp, Homo sapien
ttctccactctgaatgaatgagagaaaaatcag

SEQ ID NO: 291096 - DNA, 33 bp, Homo sapien
ttctccactctgaatggatgagagaaaaatcag

SEQ ID NO: 291097 - DNA, 33 bp, Homo sapien
tctatatggcagggacaatctggcagtacttat

SEQ ID NO: 291098 - DNA, 33 bp, Homo sapien
tctatatggcagggacgatctggcagtacttat

SEQ ID NO: 291099 - DNA, 33 bp, Homo sapien
ctcgtggtccagtcccggaatctatctagactc

SEQ ID NO: 291100 - DNA, 33 bp, Homo sapien
ctcgtggtccagtccctgaatctatctagactc

SEQ ID NO: 291101 - DNA, 33 bp, Homo sapien
tagttctgaggccttacgttcatgagaagaaag

SEQ ID NO: 291102 - DNA, 33 bp, Homo sapien
tagttctgaggccttatgttcatgagaagaaag

SEQ ID NO: 291103 - DNA, 33 bp, Homo sapien
attgccacttataagcacagcatttccctaggt

SEQ ID NO: 291104 - DNA, 33 bp, Homo sapien
attgccacttataagcgcagcatttccctaggt

SEQ ID NO: 291105 - DNA, 33 bp, Homo sapien
ggggacacacaagcaacgcctcggttacatatg

SEQ ID NO: 291106 - DNA, 33 bp, Homo sapien
ggggacacacaagcaatgcctcggttacatatg

SEQ ID NO: 291107 - DNA, 33 bp, Homo sapien
ttgcatgattaaactgcattaggaggcccagat

SEQ ID NO: 291108 - DNA, 33 bp, Homo sapien
ttgcatgattaaactgtattaggaggcccagat

SEQ ID NO: 291109 - DNA, 33 bp, Homo sapien
tgtcagctcttctgggaaaaatagcaaatgaat

SEQ ID NO: 291110 - DNA, 33 bp, Homo sapien
tgtcagctcttctgggtaaaatagcaaatgaat

SEQ ID NO: 291111 - DNA, 33 bp, Homo sapien
tggagccagaaacccaatctttgacactagact

SEQ ID NO: 291112 - DNA, 33 bp, Homo sapien
tggagccagaaacccagtctttgacactagact

SEQ ID NO: 291113 - DNA, 33 bp, Homo sapien
tttttctgaaggattgaattacatgagtgaata

SEQ ID NO: 291114 - DNA, 33 bp, Homo sapien
tttttctgaaggattggattacatgagtgaata

SEQ ID NO: 291115 - DNA, 33 bp, Homo sapien
gaactctacatgttcacggatagattttacaaa

SEQ ID NO: 291116 - DNA, 33 bp, Homo sapien
gaactctacatgttcatggatagattttacaaa

SEQ ID NO: 291117 - DNA, 33 bp, Homo sapien
ggattggctgaaaaaaatctctgaggtgtgatt

SEQ ID NO: 291118 - DNA, 33 bp, Homo sapien
ggattggctgaaaaaattctctgaggtgtgatt

SEQ ID NO: 291119 - DNA, 33 bp, Homo sapien
tccagaaactgaatgacgagctactgagcatga

SEQ ID NO: 291120 - DNA, 33 bp, Homo sapien
tccagaaactgaatgatgagctactgagcatga

SEQ ID NO: 291121 - DNA, 33 bp, Homo sapien
ctacctcctaagtttacctgggtcctgtaaaac

SEQ ID NO: 291122 - DNA, 33 bp, Homo sapien
ctacctcctaagtttatctgggtcctgtaaaac

SEQ ID NO: 291123 - DNA, 33 bp, Homo sapien
tagcaacacaaccaacacaaatgctcctgaaca

SEQ ID NO: 291124 - DNA, 33 bp, Homo sapien
tagcaacacaaccaacgcaaatgctcctgaaca

SEQ ID NO: 291125 - DNA, 33 bp, Homo sapien
tcttgggaacagactcagagatgaaaacagcta

SEQ ID NO: 291126 - DNA, 33 bp, Homo sapien
tcttgggaacagactcggagatgaaaacagcta

SEQ ID NO: 291127 - DNA, 33 bp, Homo sapien
cctaaggcttctgttgcaaccattgagctttcc

SEQ ID NO: 291128 - DNA, 33 bp, Homo sapien
cctaaggcttctgttggaaccattgagctttcc

SEQ ID NO: 291129 - DNA, 33 bp, Homo sapien
aaggagaaggagaagacagatatggttcctcac

SEQ ID NO: 291130 - DNA, 33 bp, Homo sapien
aaggagaaggagaagagagatatggttcctcac

SEQ ID NO: 291131 - DNA, 33 bp, Homo sapien
taagtgaaatcagccacgtttaggaaagcaaat

SEQ ID NO: 291132 - DNA, 33 bp, Homo sapien
taagtgaaatcagccaggtttaggaaagcaaat

SEQ ID NO: 291133 - DNA, 33 bp, Homo sapien
agtctcactctgaacacagaatatagcaaaatg

SEQ ID NO: 291134 - DNA, 33 bp, Homo sapien
agtctcactctgaacatagaatatagcaaaatg

SEQ ID NO: 291135 - DNA, 33 bp, Homo sapien
caaggacaattctaaaacagttaacagcatagg

SEQ ID NO: 291136 - DNA, 33 bp, Homo sapien
caaggacaattctaaatcagttaacagcatagg

SEQ ID NO: 291137 - DNA, 33 bp, Homo sapien
aagcctctcttccagtcaaaattaatgacaaag

SEQ ID NO: 291138 - DNA, 33 bp, Homo sapien
aagcctctcttccagttaaaattaatgacaaag

SEQ ID NO: 291139 - DNA, 33 bp, Homo sapien
acaactgcctctacctcaacatgggctgctctc

SEQ ID NO: 291140 - DNA, 33 bp, Homo sapien
acaactgcctctacctgaacatgggctgctctc

SEQ ID NO: 291141 - DNA, 33 bp, Homo sapien
tggcttctccatacacagaaagtaaatggaatt

SEQ ID NO: 291142 - DNA, 33 bp, Homo sapien
tggcttctccatacacggaaagtaaatggaatt

SEQ ID NO: 291143 - DNA, 33 bp, Homo sapien
gggattcagtttccaacatatgcttttggggga

SEQ ID NO: 291144 - DNA, 33 bp, Homo sapien
gggattcagtttccaatatatgcttttggggga

SEQ ID NO: 291145 - DNA, 33 bp, Homo sapien
tccaccacatgatgttaaaataagtgtttagcc

SEQ ID NO: 291146 - DNA, 33 bp, Homo sapien
tccaccacatgatgttgaaataagtgtttagcc

SEQ ID NO: 291147 - DNA, 33 bp, Homo sapien
accagtttaaattttacaggacacatggagaat

SEQ ID NO: 291148 - DNA, 33 bp, Homo sapien
accagtttaaattttataggacacatggagaat

SEQ ID NO: 291149 - DNA, 33 bp, Homo sapien
ctgatgaactgggccagaaagggacatgggtta

SEQ ID NO: 291150 - DNA, 33 bp, Homo sapien
ctgatgaactgggccataaagggacatgggtta

SEQ ID NO: 291151 - DNA, 33 bp, Homo sapien
actagcccaagatgccacatagctagtctgtga

SEQ ID NO: 291152 - DNA, 33 bp, Homo sapien
actagcccaagatgccgcatagctagtctgtga

SEQ ID NO: 291153 - DNA, 33 bp, Homo sapien
agcaatgggtgtcatacaaacagtactggaatc

SEQ ID NO: 291154 - DNA, 33 bp, Homo sapien
agcaatgggtgtcatagaaacagtactggaatc

SEQ ID NO: 291155 - DNA, 33 bp, Homo sapien
attgggtgtttggctaagtgactcttcctggaa

SEQ ID NO: 291156 - DNA, 33 bp, Homo sapien
attgggtgtttggctacgtgactcttcctggaa

SEQ ID NO: 291157 - DNA, 33 bp, Homo sapien
cattaaattatcagcccggcaatctttatttta

SEQ ID NO: 291158 - DNA, 33 bp, Homo sapien
cattaaattatcagcctggcaatctttatttta

SEQ ID NO: 291159 - DNA, 33 bp, Homo sapien
tgcctttgaacagcaactccactcgggcgtggt

SEQ ID NO: 291160 - DNA, 33 bp, Homo sapien
tgcctttgaacagcaattccactcgggcgtggt

SEQ ID NO: 291161 - DNA, 33 bp, Homo sapien
atattaactccagtgaacctaaatagatggaac

SEQ ID NO: 291162 - DNA, 33 bp, Homo sapien
atattaactccagtgagcctaaatagatggaac

SEQ ID NO: 291163 - DNA, 33 bp, Homo sapien
tatacctctgagtgtcagaaagattttgatttt

SEQ ID NO: 291164 - DNA, 33 bp, Homo sapien
tatacctctgagtgtcggaaagattttgatttt

SEQ ID NO: 291165 - DNA, 33 bp, Homo sapien
ggaagttggtgctaaagagttagtgctcataat

SEQ ID NO: 291166 - DNA, 33 bp, Homo sapien
ggaagttggtgctaaatagttagtgctcataat

SEQ ID NO: 291167 - DNA, 33 bp, Homo sapien
tagtgatagcgattagaaagaaggctagtaact

SEQ ID NO: 291168 - DNA, 33 bp, Homo sapien
tagtgatagcgattaggaagaaggctagtaact

SEQ ID NO: 291169 - DNA, 33 bp, Homo sapien
atgccaaggttagccaatgaaagcctgggcatt

SEQ ID NO: 291170 - DNA, 33 bp, Homo sapien
atgccaaggttagccagtgaaagcctgggcatt

SEQ ID NO: 291171 - DNA, 33 bp, Homo sapien
gtgacatctggacctcgctattagcctgaagtc

SEQ ID NO: 291172 - DNA, 33 bp, Homo sapien
gtgacatctggacctctctattagcctgaagtc

SEQ ID NO: 291173 - DNA, 33 bp, Homo sapien
aacaaatgaaattcaacggttatttacaaattc

SEQ ID NO: 291174 - DNA, 33 bp, Homo sapien
aacaaatgaaattcaatggttatttacaaattc

SEQ ID NO: 291175 - DNA, 33 bp, Homo sapien
tttgaattctccttaagctggtaagaaagcaaa

SEQ ID NO: 291176 - DNA, 33 bp, Homo sapien
tttgaattctccttaatctggtaagaaagcaaa

SEQ ID NO: 291177 - DNA, 33 bp, Homo sapien
ccaatctgccctcacacaagagagtggttacag

SEQ ID NO: 291178 - DNA, 33 bp, Homo sapien
ccaatctgccctcacagaagagagtggttacag

SEQ ID NO: 291179 - DNA, 33 bp, Homo sapien
gaaagatgccagcattaaatatcagtaatcatg

SEQ ID NO: 291180 - DNA, 33 bp, Homo sapien
gaaagatgccagcatttaatatcagtaatcatg

SEQ ID NO: 291181 - DNA, 33 bp, Homo sapien
cttattttgtcatacaatcttaaaggaaaggga

SEQ ID NO: 291182 - DNA, 33 bp, Homo sapien
cttattttgtcatacagtcttaaaggaaaggga

SEQ ID NO: 291183 - DNA, 33 bp, Homo sapien
tgaagcatctttaaacagaaacatcctttacta

SEQ ID NO: 291184 - DNA, 33 bp, Homo sapien
tgaagcatctttaaacggaaacatcctttacta

SEQ ID NO: 291185 - DNA, 33 bp, Homo sapien
atttatttaccaatcactaatatgtcccaagaa

SEQ ID NO: 291186 - DNA, 33 bp, Homo sapien
atttatttaccaatcattaatatgtcccaagaa

SEQ ID NO: 291187 - DNA, 33 bp, Homo sapien
tacgatcatgaaaacacaggagatcagctgggt

SEQ ID NO: 291188 - DNA, 33 bp, Homo sapien
tacgatcatgaaaacagaggagatcagctgggt

SEQ ID NO: 291189 - DNA, 33 bp, Homo sapien
tcctctttgtactaaacggcagagtcagtaggg

SEQ ID NO: 291190 - DNA, 33 bp, Homo sapien
tcctctttgtactaaatggcagagtcagtaggg

SEQ ID NO: 291191 - DNA, 33 bp, Homo sapien
gttcctactttaccgaaagcccaggggcctctt

SEQ ID NO: 291192 - DNA, 33 bp, Homo sapien
gttcctactttaccgatagcccaggggcctctt

SEQ ID NO: 291193 - DNA, 33 bp, Homo sapien
aagagacaagagtgaacatggactatggtgacc

SEQ ID NO: 291194 - DNA, 33 bp, Homo sapien
aagagacaagagtgaatatggactatggtgacc

SEQ ID NO: 291195 - DNA, 33 bp, Homo sapien
aagtaggcttcccataactatcaaaatgaactt

SEQ ID NO: 291196 - DNA, 33 bp, Homo sapien
aagtaggcttcccatagctatcaaaatgaactt

SEQ ID NO: 291197 - DNA, 33 bp, Homo sapien
ccatgtctgttgtatacactttttgaaaggcaa

SEQ ID NO: 291198 - DNA, 33 bp, Homo sapien
ccatgtctgttgtatagactttttgaaaggcaa

SEQ ID NO: 291199 - DNA, 33 bp, Homo sapien
gaaatatgaatcattaacaaaaatgtgtttcat

SEQ ID NO: 291200 - DNA, 33 bp, Homo sapien
gaaatatgaatcattagcaaaaatgtgtttcat

SEQ ID NO: 291201 - DNA, 33 bp, Homo sapien
gcaatgacacaaatccactgtgagcaagcatcc

SEQ ID NO: 291202 - DNA, 33 bp, Homo sapien
gcaatgacacaaatccgctgtgagcaagcatcc

SEQ ID NO: 291203 - DNA, 33 bp, Homo sapien
gaatctattatgccaaacaatgtgttagttgct

SEQ ID NO: 291204 - DNA, 33 bp, Homo sapien
gaatctattatgccaagcaatgtgttagttgct

SEQ ID NO: 291205 - DNA, 33 bp, Homo sapien
taggccacaatcaataaatttcaaacttcgtac

SEQ ID NO: 291206 - DNA, 33 bp, Homo sapien
taggccacaatcaatacatttcaaacttcgtac

SEQ ID NO: 291207 - DNA, 33 bp, Homo sapien
accaatctgtctttgacgggtattgaagttgat

SEQ ID NO: 291208 - DNA, 33 bp, Homo sapien
accaatctgtctttgatgggtattgaagttgat

SEQ ID NO: 291209 - DNA, 33 bp, Homo sapien; identical to SEQ ID NO: 291207

SEQ ID NO: 291210 - DNA, 33 bp, Homo sapien; identical to SEQ ID NO: 291208

SEQ ID NO: 291211 - DNA, 33 bp, Homo sapien
cagcattcaaagggcaatgagattatacaaccc

SEQ ID NO: 291212 - DNA, 33 bp, Homo sapien
cagcattcaaagggcattgagattatacaaccc

SEQ ID NO: 291213 - DNA, 33 bp, Homo sapien
attaaaaggtcataaactattgtgaagaacagc

SEQ ID NO: 291214 - DNA, 33 bp, Homo sapien
attaaaaggtcataaattattgtgaagaacagc

SEQ ID NO: 291215 - DNA, 33 bp, Homo sapien
gagttgttagttgatgcagatattagagatgtt

SEQ ID NO: 291216 - DNA, 33 bp, Homo sapien
gagttgttagttgatgtagatattagagatgtt

SEQ ID NO: 291217 - DNA, 33 bp, Homo sapien
cattccacatggatgaataaaccagctctccac

SEQ ID NO: 291218 - DNA, 33 bp, Homo sapien
cattccacatggatgagtaaaccagctctccac

SEQ ID NO: 291219 - DNA, 33 bp, Homo sapien
gttttcttacccctggaattttacttctatcaa

SEQ ID NO: 291220 - DNA, 33 bp, Homo sapien
gttttcttacccctggcattttacttctatcaa

SEQ ID NO: 291221 - DNA, 33 bp, Homo sapien
tgctgttactttcaaccgactctttcccaagat

SEQ ID NO: 291222 - DNA, 33 bp, Homo sapien
tgctgttactttcaactgactctttcccaagat

SEQ ID NO: 291223 - DNA, 33 bp, Homo sapien
cttttgctttgtcatcacagcagctgataagta

SEQ ID NO: 291224 - DNA, 33 bp, Homo sapien
cttttgctttgtcatcgcagcagctgataagta

SEQ ID NO: 291225 - DNA, 33 bp, Homo sapien
taggccattgaaatgacgcagactaggacactg

SEQ ID NO: 291226 - DNA, 33 bp, Homo sapien
taggccattgaaatgatgcagactaggacactg

SEQ ID NO: 291227 - DNA, 33 bp, Homo sapien
acagaaagtagtgtgaagtttggctgataaaac

SEQ ID NO: 291228 - DNA, 33 bp, Homo sapien
acagaaagtagtgtgaggtttggctgataaaac

SEQ ID NO: 291229 - DNA, 33 bp, Homo sapien
agatagagcaaatagaactgcaaccatcctgac

SEQ ID NO: 291230 - DNA, 33 bp, Homo sapien
agatagagcaaatagacctgcaaccatcctgac

SEQ ID NO: 291231 - DNA, 33 bp, Homo sapien
gattttcagattcagagggaattgcaaggggat

SEQ ID NO: 291232 - DNA, 33 bp, Homo sapien
gattttcagattcagatggaattgcaaggggat

SEQ ID NO: 291233 - DNA, 33 bp, Homo sapien
caatggcaagtatagtcaagacagttttaaaga

SEQ ID NO: 291234 - DNA, 33 bp, Homo sapien
caatggcaagtatagttaagacagttttaaaga

SEQ ID NO: 291235 - DNA, 33 bp, Homo sapien
tagatattgagattacacacctgatggagagtt

SEQ ID NO: 291236 - DNA, 33 bp, Homo sapien
tagatattgagattacgcacctgatggagagtt

SEQ ID NO: 291237 - DNA, 33 bp, Homo sapien
ataatggcattgcgtgaaacatttctctctgcc

SEQ ID NO: 291238 - DNA, 33 bp, Homo sapien
ataatggcattgcgtgcaacatttctctctgcc

SEQ ID NO: 291239 - DNA, 33 bp, Homo sapien
tccactggtcttggggaaatattacctataacc

SEQ ID NO: 291240 - DNA, 33 bp, Homo sapien
tccactggtcttgggggaatattacctataacc

SEQ ID NO: 291241 - DNA, 33 bp, Homo sapien
aaagtcaatttgtactcactttaacagtctatc

SEQ ID NO: 291242 - DNA, 33 bp, Homo sapien
aaagtcaatttgtacttactttaacagtctatc

SEQ ID NO: 291243 - DNA, 33 bp, Homo sapien
accttattattgtgaactcagaaatggttaaac

SEQ ID NO: 291244 - DNA, 33 bp, Homo sapien
accttattattgtgaattcagaaatggttaaac

SEQ ID NO: 291245 - DNA, 33 bp, Homo sapien
acagagaaacatgataataacttcacagcctta

SEQ ID NO: 291246 - DNA, 33 bp, Homo sapien
acagagaaacatgatattaacttcacagcctta

SEQ ID NO: 291247 - DNA, 33 bp, Homo sapien
ttgaggaaagagaatcaccataactggcatatt

SEQ ID NO: 291248 - DNA, 33 bp, Homo sapien
ttgaggaaagagaatctccataactggcatatt

SEQ ID NO: 291249 - DNA, 33 bp, Homo sapien
aacattttgaatcaaaagcagatcttttcccat

SEQ ID NO: 291250 - DNA, 33 bp, Homo sapien
aacattttgaatcaaatgcagatcttttcccat

SEQ ID NO: 291251 - DNA, 33 bp, Homo sapien
tcatgtcataatctacaaagcagagtgaggcta

SEQ ID NO: 291252 - DNA, 33 bp, Homo sapien
tcatgtcataatctaccaagcagagtgaggcta

SEQ ID NO: 291253 - DNA, 33 bp, Homo sapien
tttatcaggttatagacaggagcaaggatgaga

SEQ ID NO: 291254 - DNA, 33 bp, Homo sapien
tttatcaggttatagagaggagcaaggatgaga

SEQ ID NO: 291255 - DNA, 33 bp, Homo sapien
atgagagcagacatagacaagataagagtctgt

SEQ ID NO: 291256 - DNA, 33 bp, Homo sapien
atgagagcagacataggcaagataagagtctgt

SEQ ID NO: 291257 - DNA, 33 bp, Homo sapien
tttggaccatattctaagtctgttatggtcctt

SEQ ID NO: 291258 - DNA, 33 bp, Homo sapien
tttggaccatattctaggtctgttatggtcctt

SEQ ID NO: 291259 - DNA, 33 bp, Homo sapien
tcctccttaatctctaaacttcacgggtataca

SEQ ID NO: 291260 - DNA, 33 bp, Homo sapien
tcctccttaatctctacacttcacgggtataca

SEQ ID NO: 291261 - DNA, 33 bp, Homo sapien
cttgttcttaccaaaactcaaagtgcataatag

SEQ ID NO: 291262 - DNA, 33 bp, Homo sapien
cttgttcttaccaaaattcaaagtgcataatag

SEQ ID NO: 291263 - DNA, 33 bp, Homo sapien
agcaggccagctactcaaaggaaggggaagcac

SEQ ID NO: 291264 - DNA, 33 bp, Homo sapien
agcaggccagctactcgaaggaaggggaagcac

SEQ ID NO: 291265 - DNA, 33 bp, Homo sapien
cagtggtgcctcggaccattcctgatttccctg

SEQ ID NO: 291266 - DNA, 33 bp, Homo sapien
cagtggtgcctcggactattcctgatttccctg

SEQ ID NO: 291267 - DNA, 33 bp, Homo sapien
agtttctgcatgtccacgtttttaaatgtccct

SEQ ID NO: 291268 - DNA, 33 bp, Homo sapien
agtttctgcatgtccatgtttttaaatgtccct

SEQ ID NO: 291269 - DNA, 33 bp, Homo sapien
tatgtagatttgcagtcaactatcaattgtggc

SEQ ID NO: 291270 - DNA, 33 bp, Homo sapien
tatgtagatttgcagttaactatcaattgtggc

SEQ ID NO: 291271 - DNA, 33 bp, Homo sapien
ttactactgcagtgtgaaacctctgaaagttag

SEQ ID NO: 291272 - DNA, 33 bp, Homo sapien
ttactactgcagtgtgcaacctctgaaagttag

SEQ ID NO: 291273 - DNA, 33 bp, Homo sapien
ctgtcctgtcctgtcaaggtagccaaggaaggg

SEQ ID NO: 291274 - DNA, 33 bp, Homo sapien
ctgtcctgtcctgtcagggtagccaaggaaggg

SEQ ID NO: 291275 - DNA, 33 bp, Homo sapien
aggttgatgaaaacacgggatttgtcttctcac

SEQ ID NO: 291276 - DNA, 33 bp, Homo sapien
aggttgatgaaaacactggatttgtcttctcac

SEQ ID NO: 291277 - DNA, 33 bp, Homo sapien
tggctcccagtttcaaatgaaccatagtccaat

SEQ ID NO: 291278 - DNA, 33 bp, Homo sapien
tggctcccagtttcaagtgaaccatagtccaat

SEQ ID NO: 291279 - DNA, 33 bp, Homo sapien
gcttatagtgatagaacagaatggctcccagtt

SEQ ID NO: 291280 - DNA, 33 bp, Homo sapien
gcttatagtgatagaatagaatggctcccagtt

SEQ ID NO: 291281 - DNA, 33 bp, Homo sapien
agaaaagaatttcaaagtaacacagacgaaaac

SEQ ID NO: 291282 - DNA, 33 bp, Homo sapien
agaaaagaatttcaaattaacacagacgaaaac

SEQ ID NO: 291283 - DNA, 33 bp, Homo sapien
gcttgtgtaagacttacggactgaataaatgat

SEQ ID NO: 291284 - DNA, 33 bp, Homo sapien
gcttgtgtaagacttatggactgaataaatgat

SEQ ID NO: 291285 - DNA, 33 bp, Homo sapien
gtggtagtgaaaatgcaatggatttgagctctc

SEQ ID NO: 291286 - DNA, 33 bp, Homo sapien
gtggtagtgaaaatgcgatggatttgagctctc

SEQ ID NO: 291287 - DNA, 33 bp, Homo sapien
ttacttaaaagacaagacctaagaacaattcag

SEQ ID NO: 291288 - DNA, 33 bp, Homo sapien
ttacttaaaagacaaggcctaagaacaattcag

SEQ ID NO: 291289 - DNA, 33 bp, Homo sapien
tcttactggccttgaacaagcaagctatcatga

SEQ ID NO: 291290 - DNA, 33 bp, Homo sapien
tcttactggccttgaagaagcaagctatcatga

SEQ ID NO: 291291 - DNA, 33 bp, Homo sapien
gttacctgaatacctacggccagacttcttgct

SEQ ID NO: 291292 - DNA, 33 bp, Homo sapien
gttacctgaatacctatggccagacttcttgct

SEQ ID NO: 291293 - DNA, 33 bp, Homo sapien
cagatcaagataaagaatattgccgtacatcag

SEQ ID NO: 291294 - DNA, 33 bp, Homo sapien
cagatcaagataaagagtattgccgtacatcag

SEQ ID NO: 291295 - DNA, 33 bp, Homo sapien
tcacggtaactcccaacgcagctaaaggaacag

SEQ ID NO: 291296 - DNA, 33 bp, Homo sapien
tcacggtaactcccaatgcagctaaaggaacag

SEQ ID NO: 291297 - DNA, 33 bp, Homo sapien
actgaagataaaggttaaaaccaatttcagtga

SEQ ID NO: 291298 - DNA, 33 bp, Homo sapien
actgaagataaaggttgaaaccaatttcagtga

SEQ ID NO: 291299 - DNA, 33 bp, Homo sapien
ccatacaaaattgggaaatgccataagcctagt

SEQ ID NO: 291300 - DNA, 33 bp, Homo sapien
ccatacaaaattgggagatgccataagcctagt

SEQ ID NO: 291301 - DNA, 33 bp, Homo sapien
ctagtcctttagctacaatctctagcttaaaat

SEQ ID NO: 291302 - DNA, 33 bp, Homo sapien
ctagtcctttagctacgatctctagcttaaaat

SEQ ID NO: 291303 - DNA, 33 bp, Homo sapien
atgactgtatttcacaataagaataacacacag

SEQ ID NO: 291304 - DNA, 33 bp, Homo sapien
atgactgtatttcacagtaagaataacacacag

SEQ ID NO: 291305 - DNA, 33 bp, Homo sapien
aacagattagccagtaaaataagggcatatata

SEQ ID NO: 291306 - DNA, 33 bp, Homo sapien
aacagattagccagtacaataagggcatatata

SEQ ID NO: 291307 - DNA, 33 bp, Homo sapien
agtctactatgtaccagacattttactaagaac

SEQ ID NO: 291308 - DNA, 33 bp, Homo sapien
agtctactatgtaccatacattttactaagaac

SEQ ID NO: 291309 - DNA, 33 bp, Homo sapien
tttaataaggaaacaacgaaagtctactatgta

SEQ ID NO: 291310 - DNA, 33 bp, Homo sapien
tttaataaggaaacaaggaaagtctactatgta

SEQ ID NO: 291311 - DNA, 33 bp, Homo sapien
acccacagctcttgtaaaaaagaatgacatgag

SEQ ID NO: 291312 - DNA, 33 bp, Homo sapien
acccacagctcttgtataaaagaatgacatgag

SEQ ID NO: 291313 - DNA, 33 bp, Homo sapien
taaagtaagttttctaataatcagtgatttaaa

SEQ ID NO: 291314 - DNA, 33 bp, Homo sapien
taaagtaagttttctagtaatcagtgatttaaa

SEQ ID NO: 291315 - DNA, 33 bp, Homo sapien
ttaaaaagtaaccaaaataatagcactgcagta

SEQ ID NO: 291316 - DNA, 33 bp, Homo sapien
ttaaaaagtaaccaaagtaatagcactgcagta

SEQ ID NO: 291317 - DNA, 33 bp, Homo sapien
ccactattgaaccaaaagccatttatttactgt

SEQ ID NO: 291318 - DNA, 33 bp, Homo sapien
ccactattgaaccaaaggccatttatttactgt

SEQ ID NO: 291319 - DNA, 33 bp, Homo sapien
ttctgagttttcttcaacatctcccaggtaatg

SEQ ID NO: 291320 - DNA, 33 bp, Homo sapien
ttctgagttttcttcagcatctcccaggtaatg

SEQ ID NO: 291321 - DNA, 33 bp, Homo sapien
gcaggtctagagataaaggcaagactgctttga

SEQ ID NO: 291322 - DNA, 33 bp, Homo sapien
gcaggtctagagataagggcaagactgctttga

SEQ ID NO: 291323 - DNA, 33 bp, Homo sapien
gtcttattgacttaaacgactgcttttatacta

SEQ ID NO: 291324 - DNA, 33 bp, Homo sapien
gtcttattgacttaaatgactgcttttatacta

SEQ ID NO: 291325 - DNA, 33 bp, Homo sapien
attgtcgaccccccaaatagaaagcagtcctgc

SEQ ID NO: 291326 - DNA, 33 bp, Homo sapien
attgtcgaccccccaagtagaaagcagtcctgc

SEQ ID NO: 291327 - DNA, 33 bp, Homo sapien
cttgtgaatgatcagaagttgggttttggggac

SEQ ID NO: 291328 - DNA, 33 bp, Homo sapien
cttgtgaatgatcagaggttgggttttggggac

SEQ ID NO: 291329 - DNA, 33 bp, Homo sapien
agagggcaattaccaaccccaatacatttgcaa

SEQ ID NO: 291330 - DNA, 33 bp, Homo sapien
agagggcaattaccaatcccaatacatttgcaa

SEQ ID NO: 291331 - DNA, 33 bp, Homo sapien
tctaagcttagcagtagaaatctgtaatctgtg

SEQ ID NO: 291332 - DNA, 33 bp, Homo sapien
tctaagcttagcagtataaatctgtaatctgtg

SEQ ID NO: 291333 - DNA, 33 bp, Homo sapien
aatttgttcaaggtccgccagttaggaagtggc

SEQ ID NO: 291334 - DNA, 33 bp, Homo sapien
aatttgttcaaggtcctccagttaggaagtggc

SEQ ID NO: 291335 - DNA, 33 bp, Homo sapien
ctcttaatcaggtaaacgacttttgagttttca

SEQ ID NO: 291336 - DNA, 33 bp, Homo sapien
ctcttaatcaggtaaatgacttttgagttttca

SEQ ID NO: 291337 - DNA, 33 bp, Homo sapien
ttaaccagcaatggggcacaagagaggtctgtg

SEQ ID NO: 291338 - DNA, 33 bp, Homo sapien
ttaaccagcaatggggtacaagagaggtctgtg

SEQ ID NO: 291339 - DNA, 33 bp, Homo sapien
aatggaaagaatctacactgggctctgaatatg

SEQ ID NO: 291340 - DNA, 33 bp, Homo sapien
aatggaaagaatctacgctgggctctgaatatg

SEQ ID NO: 291341 - DNA, 33 bp, Homo sapien
ctgtgtttactgtgtccatggcaacaattgtta

SEQ ID NO: 291342 - DNA, 33 bp, Homo sapien
ctgtgtttactgtgtctatggcaacaattgtta

SEQ ID NO: 291343 - DNA, 33 bp, Homo sapien
ttatgtttctcataaacgctctaacacttcatg

SEQ ID NO: 291344 - DNA, 33 bp, Homo sapien
ttatgtttctcataaatgctctaacacttcatg

SEQ ID NO: 291345 - DNA, 33 bp, Homo sapien
atcttagaaattagaaagtttctgcagtattgt

SEQ ID NO: 291346 - DNA, 33 bp, Homo sapien
atcttagaaattagaacgtttctgcagtattgt

SEQ ID NO: 291347 - DNA, 33 bp, Homo sapien
atccatgagaagggacaggagtcaaaggcttaa

SEQ ID NO: 291348 - DNA, 33 bp, Homo sapien
atccatgagaagggacgggagtcaaaggcttaa

SEQ ID NO: 291349 - DNA, 33 bp, Homo sapien
ttttgtagaattgtaccgatgactatctttttg

SEQ ID NO: 291350 - DNA, 33 bp, Homo sapien
ttttgtagaattgtactgatgactatctttttg

SEQ ID NO: 291351 - DNA, 33 bp, Homo sapien
gcctgttctctgacgcacttccttgttgttgtt

SEQ ID NO: 291352 - DNA, 33 bp, Homo sapien
gcctgttctctgacgcgcttccttgttgttgtt

SEQ ID NO: 291353 - DNA, 33 bp, Homo sapien
gtatgtctattctccaaagtgcatataagtcta

SEQ ID NO: 291354 - DNA, 33 bp, Homo sapien
gtatgtctattctccagagtgcatataagtcta

SEQ ID NO: 291355 - DNA, 33 bp, Homo sapien
tgcaattcagggtttcaacttgcacagacttga

SEQ ID NO: 291356 - DNA, 33 bp, Homo sapien
tgcaattcagggtttccacttgcacagacttga

SEQ ID NO: 291357 - DNA, 33 bp, Homo sapien
aggtgtgcagtttcaactagaggacaagaccaa

SEQ ID NO: 291358 - DNA, 33 bp, Homo sapien
aggtgtgcagtttcaattagaggacaagaccaa

SEQ ID NO: 291359 - DNA, 33 bp, Homo sapien
aggtaagtatggaaaactcgagaactgttgaat

SEQ ID NO: 291360 - DNA, 33 bp, Homo sapien
aggtaagtatggaaaagtcgagaactgttgaat

SEQ ID NO: 291361 - DNA, 33 bp, Homo sapien
gcagtcttttcttgggacatttcttttgtcagc

SEQ ID NO: 291362 - DNA, 33 bp, Homo sapien
gcagtcttttcttggggcatttcttttgtcagc

SEQ ID NO: 291363 - DNA, 33 bp, Homo sapien
tctccagtagactctacgttgtgaaattcaatg

SEQ ID NO: 291364 - DNA, 33 bp, Homo sapien
tctccagtagactctatgttgtgaaattcaatg

SEQ ID NO: 291365 - DNA, 33 bp, Homo sapien
aactcaaactttggaagtggatggaacaccaaa

SEQ ID NO: 291366 - DNA, 33 bp, Homo sapien
aactcaaactttggaattggatggaacaccaaa

SEQ ID NO: 291367 - DNA, 33 bp, Homo sapien
tcatttttaagtcagaagttcccacattttctc

SEQ ID NO: 291368 - DNA, 33 bp, Homo sapien
tcatttttaagtcagaggttcccacattttctc

SEQ ID NO: 291369 - DNA, 33 bp, Homo sapien
ttcttgctcctggcaaatcttctgttgagaagt

SEQ ID NO: 291370 - DNA, 33 bp, Homo sapien
ttcttgctcctggcaagtcttctgttgagaagt

SEQ ID NO: 291371 - DNA, 33 bp, Homo sapien
ttgatgtgtactgaaacggaggtgttgactata

SEQ ID NO: 291372 - DNA, 33 bp, Homo sapien
ttgatgtgtactgaaatggaggtgttgactata

SEQ ID NO: 291373 - DNA, 33 bp, Homo sapien
aatttatgttttttcaccataatatgctgctgc

SEQ ID NO: 291374 - DNA, 33 bp, Homo sapien
aatttatgttttttcatcataatatgctgctgc

SEQ ID NO: 291375 - DNA, 33 bp, Homo sapien
gaggtgggagaagttagcacaaaattgagcgaa

SEQ ID NO: 291376 - DNA, 33 bp, Homo sapien
gaggtgggagaagttatcacaaaattgagcgaa

SEQ ID NO: 291377 - DNA, 33 bp, Homo sapien
tggctataatcaaaaaggttggtgaggacgtgg

SEQ ID NO: 291378 - DNA, 33 bp, Homo sapien
tggctataatcaaaaatgttggtgaggacgtgg

SEQ ID NO: 291379 - DNA, 33 bp, Homo sapien
tgtcttgttctatcaactaccaaaagaagggtg

SEQ ID NO: 291380 - DNA, 33 bp, Homo sapien
tgtcttgttctatcaattaccaaaagaagggtg

SEQ ID NO: 291381 - DNA, 33 bp, Homo sapien
aactgctacgttattgccaacatatattacata

SEQ ID NO: 291382 - DNA, 33 bp, Homo sapien
aactgctacgttattgtcaacatatattacata

SEQ ID NO: 291383 - DNA, 33 bp, Homo sapien
ctcaatagatttgacaataaggtgttgaagaca

SEQ ID NO: 291384 - DNA, 33 bp, Homo sapien
ctcaatagatttgacagtaaggtgttgaagaca

SEQ ID NO: 291385 - DNA, 33 bp, Homo sapien
ggatgtgcagctttataacatagataaatgtgt

SEQ ID NO: 291386 - DNA, 33 bp, Homo sapien
ggatgtgcagctttattacatagataaatgtgt

SEQ ID NO: 291387 - DNA, 33 bp, Homo sapien
gaaacaaagaaacaagacctatcatcactaaga

SEQ ID NO: 291388 - DNA, 33 bp, Homo sapien
gaaacaaagaaacaagccctatcatcactaaga

SEQ ID NO: 291389 - DNA, 33 bp, Homo sapien
tgaactgcttacatgactatttgcaacttcaga

SEQ ID NO: 291390 - DNA, 33 bp, Homo sapien
tgaactgcttacatgattatttgcaacttcaga

SEQ ID NO: 291391 - DNA, 33 bp, Homo sapien
tttgggggtactgataaattgacatacttactt

SEQ ID NO: 291392 - DNA, 33 bp, Homo sapien
tttgggggtactgatacattgacatacttactt

SEQ ID NO: 291393 - DNA, 33 bp, Homo sapien
catattaacattgagacaggctgtatttgcgta

SEQ ID NO: 291394 - DNA, 33 bp, Homo sapien
catattaacattgagataggctgtatttgcgta

SEQ ID NO: 291395 - DNA, 33 bp, Homo sapien
gatttgttcatggcaacaattctacaacaaaga

SEQ ID NO: 291396 - DNA, 33 bp, Homo sapien
gatttgttcatggcaataattctacaacaaaga

SEQ ID NO: 291397 - DNA, 33 bp, Homo sapien
ggattcatgctaaaacgggacacagaagtctaa

SEQ ID NO: 291398 - DNA, 33 bp, Homo sapien
ggattcatgctaaaactggacacagaagtctaa

SEQ ID NO: 291399 - DNA, 33 bp, Homo sapien
gccaatgacattttgcaccctgtaaactgaata

SEQ ID NO: 291400 - DNA, 33 bp, Homo sapien
gccaatgacattttgcgccctgtaaactgaata

SEQ ID NO: 291401 - DNA, 33 bp, Homo sapien
tccatcctggacttcaacgtaacaaatggatat

SEQ ID NO: 291402 - DNA, 33 bp, Homo sapien
tccatcctggacttcagcgtaacaaatggatat

SEQ ID NO: 291403 - DNA, 33 bp, Homo sapien
tgccagctttggaatgaacaacaaaattctctc

SEQ ID NO: 291404 - DNA, 33 bp, Homo sapien
tgccagctttggaatggacaacaaaattctctc

SEQ ID NO: 291405 - DNA, 33 bp, Homo sapien
ataattaatctgcgtacgcctcctggaatattt

SEQ ID NO: 291406 - DNA, 33 bp, Homo sapien
ataattaatctgcgtatgcctcctggaatattt

SEQ ID NO: 291407 - DNA, 33 bp, Homo sapien
actcacacatcgcttcaccatgattgttgttac

SEQ ID NO: 291408 - DNA, 33 bp, Homo sapien
actcacacatcgcttcgccatgattgttgttac

SEQ ID NO: 291409 - DNA, 33 bp, Homo sapien
ccaaagtggttgtaaaacttctgatgaacagaa

SEQ ID NO: 291410 - DNA, 33 bp, Homo sapien
ccaaagtggttgtaaaccttctgatgaacagaa

SEQ ID NO: 291411 - DNA, 33 bp, Homo sapien
aaaacaataatagaaagggatcagaaatctaaa

SEQ ID NO: 291412 - DNA, 33 bp, Homo sapien
aaaacaataatagaaatggatcagaaatctaaa

SEQ ID NO: 291413 - DNA, 33 bp, Homo sapien
tggttcttcctacctacgtcttctctgaaatat

SEQ ID NO: 291414 - DNA, 33 bp, Homo sapien
tggttcttcctacctatgtcttctctgaaatat

SEQ ID NO: 291415 - DNA, 33 bp, Homo sapien
atcagaaactcgtatgcagccttttgtctctca

SEQ ID NO: 291416 - DNA, 33 bp, Homo sapien
atcagaaactcgtatgtagccttttgtctctca

SEQ ID NO: 291417 - DNA, 33 bp, Homo sapien
gttgcccaggctgggaactattttctacacgct

SEQ ID NO: 291418 - DNA, 33 bp, Homo sapien
gttgcccaggctgggagctattttctacacgct

SEQ ID NO: 291419 - DNA, 33 bp, Homo sapien
ctcccggaagaaagacaggtccagagaatggcc

SEQ ID NO: 291420 - DNA, 33 bp, Homo sapien
ctcccggaagaaagacgggtccagagaatggcc

SEQ ID NO: 291421 - DNA, 33 bp, Homo sapien
ccaaaagaaagagtgacaccgcgctctgctggt

SEQ ID NO: 291422 - DNA, 33 bp, Homo sapien
ccaaaagaaagagtgataccgcgctctgctggt

SEQ ID NO: 291423 - DNA, 33 bp, Homo sapien
gtgtcctgaatgttgccgattcatttccttttg

SEQ ID NO: 291424 - DNA, 33 bp, Homo sapien
gtgtcctgaatgttgctgattcatttccttttg

SEQ ID NO: 291425 - DNA, 33 bp, Homo sapien
aaatgtcacttgttcacgtggggactgaagcct

SEQ ID NO: 291426 - DNA, 33 bp, Homo sapien
aaatgtcacttgttcatgtggggactgaagcct

SEQ ID NO: 291427 - DNA, 33 bp, Homo sapien
tgacacagaatttgtacaagttggagatgccgg

SEQ ID NO: 291428 - DNA, 33 bp, Homo sapien
tgacacagaatttgtagaagttggagatgccgg

SEQ ID NO: 291429 - DNA, 33 bp, Homo sapien
agtggaagaggaagaactatttcttagtcacag

SEQ ID NO: 291430 - DNA, 33 bp, Homo sapien
agtggaagaggaagaattatttcttagtcacag

SEQ ID NO: 291431 - DNA, 33 bp, Homo sapien
ataccgataattctccgctactttacttgcaga

SEQ ID NO: 291432 - DNA, 33 bp, Homo sapien
ataccgataattctcctctactttacttgcaga

SEQ ID NO: 291433 - DNA, 33 bp, Homo sapien
gccacggagtcttagaataactcttggcatcca

SEQ ID NO: 291434 - DNA, 33 bp, Homo sapien
gccacggagtcttagagtaactcttggcatcca

SEQ ID NO: 291435 - DNA, 33 bp, Homo sapien
cctgaatgtgaatgcacactgttgtttaaggtg

SEQ ID NO: 291436 - DNA, 33 bp, Homo sapien
cctgaatgtgaatgcatactgttgtttaaggtg

SEQ ID NO: 291437 - DNA, 33 bp, Homo sapien
tcacagagatcatggcaagatgttttattccaa

SEQ ID NO: 291438 - DNA, 33 bp, Homo sapien
tcacagagatcatggcgagatgttttattccaa

SEQ ID NO: 291439 - DNA, 33 bp, Homo sapien
ggacttgcaggtaataccctagacttaatttca

SEQ ID NO: 291440 - DNA, 33 bp, Homo sapien
ggacttgcaggtaatatcctagacttaatttca

SEQ ID NO: 291441 - DNA, 33 bp, Homo sapien
tttttagagatttccaatatagcatctcactga

SEQ ID NO: 291442 - DNA, 33 bp, Homo sapien
tttttagagatttccagtatagcatctcactga

SEQ ID NO: 291443 - DNA, 33 bp, Homo sapien
atagttatagtctatgaagtgaagacgaagtga

SEQ ID NO: 291444 - DNA, 33 bp, Homo sapien
atagttatagtctatggagtgaagacgaagtga

SEQ ID NO: 291445 - DNA, 33 bp, Homo sapien
gagctattacacactgcagcaataaaattaaac

SEQ ID NO: 291446 - DNA, 33 bp, Homo sapien
gagctattacacactgtagcaataaaattaaac

SEQ ID NO: 291447 - DNA, 33 bp, Homo sapien
ctctacttagcaattacgtgcaatgagaaaact

SEQ ID NO: 291448 - DNA, 33 bp, Homo sapien
ctctacttagcaattatgtgcaatgagaaaact

SEQ ID NO: 291449 - DNA, 33 bp, Homo sapien
gctgagaagtcgtcggcacccacctgaatttgg

SEQ ID NO: 291450 - DNA, 33 bp, Homo sapien
gctgagaagtcgtcggtacccacctgaatttgg

SEQ ID NO: 291451 - DNA, 33 bp, Homo sapien
agcattgcctgcatgacagtaacagtatcaact

SEQ ID NO: 291452 - DNA, 33 bp, Homo sapien
agcattgcctgcatgatagtaacagtatcaact

SEQ ID NO: 291453 - DNA, 33 bp, Homo sapien
cgggtgcacagggtaccaattagtgctaattgc

SEQ ID NO: 291454 - DNA, 33 bp, Homo sapien
cgggtgcacagggtactaattagtgctaattgc

SEQ ID NO: 291455 - DNA, 33 bp, Homo sapien
tgcatatttgttgtaaatggcagctaaacattg

SEQ ID NO: 291456 - DNA, 33 bp, Homo sapien
tgcatatttgttgtaagtggcagctaaacattg

SEQ ID NO: 291457 - DNA, 33 bp, Homo sapien
gtaacaattcaagaaacaagtgcgatagacaca

SEQ ID NO: 291458 - DNA, 33 bp, Homo sapien
gtaacaattcaagaaataagtgcgatagacaca

SEQ ID NO: 291459 - DNA, 33 bp, Homo sapien
catttctgagacttaccaaagcttaaggagact

SEQ ID NO: 291460 - DNA, 33 bp, Homo sapien
catttctgagacttactaaagcttaaggagact

SEQ ID NO: 291461 - DNA, 33 bp, Homo sapien
agtctgtttttcattccatctctttgcctgtgt

SEQ ID NO: 291462 - DNA, 33 bp, Homo sapien
agtctgtttttcattctatctctttgcctgtgt

SEQ ID NO: 291463 - DNA, 33 bp, Homo sapien
actgctaggttgagaaagactcaagacaaaggc

SEQ ID NO: 291464 - DNA, 33 bp, Homo sapien
actgctaggttgagaaggactcaagacaaaggc

SEQ ID NO: 291465 - DNA, 33 bp, Homo sapien
agcgtccttgttggaaccttggactctttcatt

SEQ ID NO: 291466 - DNA, 33 bp, Homo sapien
agcgtccttgttggaatcttggactctttcatt

SEQ ID NO: 291467 - DNA, 33 bp, Homo sapien
ttagactgggcttataagtttttgggacaaaga

SEQ ID NO: 291468 - DNA, 33 bp, Homo sapien
ttagactgggcttataggtttttgggacaaaga

SEQ ID NO: 291469 - DNA, 33 bp, Homo sapien
agccctgtaccttgtgaatgaggtgctcaataa

SEQ ID NO: 291470 - DNA, 33 bp, Homo sapien
agccctgtaccttgtgcatgaggtgctcaataa

SEQ ID NO: 291471 - DNA, 33 bp, Homo sapien
ggaagaggatgaagtgaaaagtttcagtgatct

SEQ ID NO: 291472 - DNA, 33 bp, Homo sapien
ggaagaggatgaagtggaaagtttcagtgatct

SEQ ID NO: 291473 - DNA, 33 bp, Homo sapien
agaggtgacaccaggcactggatttaagttaga

SEQ ID NO: 291474 - DNA, 33 bp, Homo sapien
agaggtgacaccaggcgctggatttaagttaga

SEQ ID NO: 291475 - DNA, 33 bp, Homo sapien
gattaagtgactggtccaatgtcaatcagcgag

SEQ ID NO: 291476 - DNA, 33 bp, Homo sapien
gattaagtgactggtcgaatgtcaatcagcgag

SEQ ID NO: 291477 - DNA, 33 bp, Homo sapien
aacacatgcattctaccgaactccaggataaaa

SEQ ID NO: 291478 - DNA, 33 bp, Homo sapien
aacacatgcattctactgaactccaggataaaa

SEQ ID NO: 291479 - DNA, 33 bp, Homo sapien
aatgatgagtagaatcaagacaagaatacaggt

SEQ ID NO: 291480 - DNA, 33 bp, Homo sapien
aatgatgagtagaatcgagacaagaatacaggt

SEQ ID NO: 291481 - DNA, 33 bp, Homo sapien
caaatccagtaaacagaagctctgtgactattt

SEQ ID NO: 291482 - DNA, 33 bp, Homo sapien
caaatccagtaaacaggagctctgtgactattt

SEQ ID NO: 291483 - DNA, 33 bp, Homo sapien
tggtatggcacatagcaactttttgttgtgaat

SEQ ID NO: 291484 - DNA, 33 bp, Homo sapien
tggtatggcacatagccactttttgttgtgaat

SEQ ID NO: 291485 - DNA, 33 bp, Homo sapien
tagtgctttgtaaaaactgcccatgaagaaaat

SEQ ID NO: 291486 - DNA, 33 bp, Homo sapien
tagtgctttgtaaaaattgcccatgaagaaaat

SEQ ID NO: 291487 - DNA, 33 bp, Homo sapien
gaaggaggggcaatttcaaatggcctgaggtaa

SEQ ID NO: 291488 - DNA, 33 bp, Homo sapien
gaaggaggggcaatttgaaatggcctgaggtaa

SEQ ID NO: 291489 - DNA, 33 bp, Homo sapien
gaaaacattgtagaaacgtgtgtggtaggaggc

SEQ ID NO: 291490 - DNA, 33 bp, Homo sapien
gaaaacattgtagaaatgtgtgtggtaggaggc

SEQ ID NO: 291491 - DNA, 33 bp, Homo sapien
tctcaaaagaaagataccagagaattcatggac

SEQ ID NO: 291492 - DNA, 33 bp, Homo sapien
tctcaaaagaaagatagcagagaattcatggac

SEQ ID NO: 291493 - DNA, 33 bp, Homo sapien
tctgaaaactgaattacccagcacatcctgcac

SEQ ID NO: 291494 - DNA, 33 bp, Homo sapien
tctgaaaactgaattatccagcacatcctgcac

SEQ ID NO: 291495 - DNA, 33 bp, Homo sapien
agtacacagaggattgcagatggctatactgcc

SEQ ID NO: 291496 - DNA, 33 bp, Homo sapien
agtacacagaggattggagatggctatactgcc

SEQ ID NO: 291497 - DNA, 33 bp, Homo sapien
aagttttgaactgatcaatgacctagctacata

SEQ ID NO: 291498 - DNA, 33 bp, Homo sapien
aagttttgaactgatcgatgacctagctacata

SEQ ID NO: 291499 - DNA, 33 bp, Homo sapien
gctattaaccatactcgcatgatagaccaatcc

SEQ ID NO: 291500 - DNA, 33 bp, Homo sapien
gctattaaccatactctcatgatagaccaatcc

SEQ ID NO: 291501 - DNA, 33 bp, Homo sapien
gcgacgctgggttatacaccatcagtgtccagc

SEQ ID NO: 291502 - DNA, 33 bp, Homo sapien
gcgacgctgggttatataccatcagtgtccagc

SEQ ID NO: 291503 - DNA, 33 bp, Homo sapien
tgaaatttctatgaagacctttaattgcatgag

SEQ ID NO: 291504 - DNA, 33 bp, Homo sapien
tgaaatttctatgaaggcctttaattgcatgag

SEQ ID NO: 291505 - DNA, 33 bp, Homo sapien
gtgcactgctttgtaaaatagaatgtcctcaaa

SEQ ID NO: 291506 - DNA, 33 bp, Homo sapien
gtgcactgctttgtaagatagaatgtcctcaaa

SEQ ID NO: 291507 - DNA, 33 bp, Homo sapien
ggcatctaatgatgttaaaaacgttccttgtat

SEQ ID NO: 291508 - DNA, 33 bp, Homo sapien
ggcatctaatgatgttgaaaacgttccttgtat

SEQ ID NO: 291509 - DNA, 33 bp, Homo sapien
ctatggtgatccgatagatttcagggtcagtgt

SEQ ID NO: 291510 - DNA, 33 bp, Homo sapien
ctatggtgatccgatatatttcagggtcagtgt

SEQ ID NO: 291511 - DNA, 33 bp, Homo sapien
attcagtgaagtaaaaatcctccacttcagcac

SEQ ID NO: 291512 - DNA, 33 bp, Homo sapien
attcagtgaagtaaaagtcctccacttcagcac

SEQ ID NO: 291513 - DNA, 33 bp, Homo sapien
gcttccttcctcttgaaatagtcactttttggg

SEQ ID NO: 291514 - DNA, 33 bp, Homo sapien
gcttccttcctcttgagatagtcactttttggg

SEQ ID NO: 291515 - DNA, 33 bp, Homo sapien
aagcttccccaggaaagacatcctgaagtgaat

SEQ ID NO: 291516 - DNA, 33 bp, Homo sapien
aagcttccccaggaaatacatcctgaagtgaat

SEQ ID NO: 291517 - DNA, 33 bp, Homo sapien
ttaatgtctagcaaggaagagggaaaaattaat

SEQ ID NO: 291518 - DNA, 33 bp, Homo sapien
ttaatgtctagcaagggagagggaaaaattaat

SEQ ID NO: 291519 - DNA, 33 bp, Homo sapien
agctttctttaactcccactatgtgccaggtaa

SEQ ID NO: 291520 - DNA, 33 bp, Homo sapien
agctttctttaactcctactatgtgccaggtaa

SEQ ID NO: 291521 - DNA, 33 bp, Homo sapien
aaaaccaaatctgaaactgaagcccagagacaa

SEQ ID NO: 291522 - DNA, 33 bp, Homo sapien
aaaaccaaatctgaaattgaagcccagagacaa

SEQ ID NO: 291523 - DNA, 33 bp, Homo sapien
aaatacagaaggtgaaatggtccctccgagagc

SEQ ID NO: 291524 - DNA, 33 bp, Homo sapien
aaatacagaaggtgaactggtccctccgagagc

SEQ ID NO: 291525 - DNA, 33 bp, Homo sapien
gagtctgtgtgggctacgtggggaagatctgcc

SEQ ID NO: 291526 - DNA, 33 bp, Homo sapien
gagtctgtgtgggctaggtggggaagatctgcc

SEQ ID NO: 291527 - DNA, 33 bp, Homo sapien
ttgttgacttcctagccatggtctttaaagctt

SEQ ID NO: 291528 - DNA, 33 bp, Homo sapien
ttgttgacttcctagctatggtctttaaagctt

SEQ ID NO: 291529 - DNA, 33 bp, Homo sapien
tttgccatttcctagccatagtgatgtaacctt

SEQ ID NO: 291530 - DNA, 33 bp, Homo sapien
tttgccatttcctagctatagtgatgtaacctt

SEQ ID NO: 291531 - DNA, 33 bp, Homo sapien
atcaggatcctgtttacactagttagacacatg

SEQ ID NO: 291532 - DNA, 33 bp, Homo sapien
atcaggatcctgtttatactagttagacacatg

SEQ ID NO: 291533 - DNA, 33 bp, Homo sapien
ctcaaaaacgaaggcaaaacttctcatttttta

SEQ ID NO: 291534 - DNA, 33 bp, Homo sapien
ctcaaaaacgaaggcagaacttctcatttttta

SEQ ID NO: 291535 - DNA, 33 bp, Homo sapien
gtaaccagaagtgaaagggtgacagaaagccaa

SEQ ID NO: 291536 - DNA, 33 bp, Homo sapien
gtaaccagaagtgaaatggtgacagaaagccaa

SEQ ID NO: 291537 - DNA, 33 bp, Homo sapien
acataattctttcaaacggtgtgtatttggcaa

SEQ ID NO: 291538 - DNA, 33 bp, Homo sapien
acataattctttcaaatggtgtgtatttggcaa

SEQ ID NO: 291539 - DNA, 33 bp, Homo sapien
aagtgaaggcacgcaacaaaactaatgtaaatg

SEQ ID NO: 291540 - DNA, 33 bp, Homo sapien
aagtgaaggcacgcaagaaaactaatgtaaatg

SEQ ID NO: 291541 - DNA, 33 bp, Homo sapien
aaagacaacccatttcaatgacagcctggaaga

SEQ ID NO: 291542 - DNA, 33 bp, Homo sapien
aaagacaacccatttcgatgacagcctggaaga

SEQ ID NO: 291543 - DNA, 33 bp, Homo sapien
ggaagatttggcttccagattcaactactccta

SEQ ID NO: 291544 - DNA, 33 bp, Homo sapien
ggaagatttggcttccggattcaactactccta

SEQ ID NO: 291545 - DNA, 33 bp, Homo sapien
gacagaatagagtaaaaccaagaggtgatagtt

SEQ ID NO: 291546 - DNA, 33 bp, Homo sapien
gacagaatagagtaaacccaagaggtgatagtt

SEQ ID NO: 291547 - DNA, 33 bp, Homo sapien
agaaggacattctaaaagagaagactgcatggc

SEQ ID NO: 291548 - DNA, 33 bp, Homo sapien
agaaggacattctaaaggagaagactgcatggc

SEQ ID NO: 291549 - DNA, 33 bp, Homo sapien
acaggaacaacgagagaaaccagagatgtacct

SEQ ID NO: 291550 - DNA, 33 bp, Homo sapien
acaggaacaacgagagcaaccagagatgtacct

SEQ ID NO: 291551 - DNA, 33 bp, Homo sapien
gacaaattaaaactaacgtatgctggcaaaata

SEQ ID NO: 291552 - DNA, 33 bp, Homo sapien
gacaaattaaaactaatgtatgctggcaaaata

SEQ ID NO: 291553 - DNA, 33 bp, Homo sapien
gagtggcgttgacacacgtactgctgagatgcc

SEQ ID NO: 291554 - DNA, 33 bp, Homo sapien
gagtggcgttgacacatgtactgctgagatgcc

SEQ ID NO: 291555 - DNA, 33 bp, Homo sapien
tgctgcttatgtgttaacccgttggcttgggct

SEQ ID NO: 291556 - DNA, 33 bp, Homo sapien
tgctgcttatgtgttatcccgttggcttgggct

SEQ ID NO: 291557 - DNA, 33 bp, Homo sapien
tgtagatgaaaaagcaaccactcatggttacac

SEQ ID NO: 291558 - DNA, 33 bp, Homo sapien
tgtagatgaaaaagcatccactcatggttacac

SEQ ID NO: 291559 - DNA, 33 bp, Homo sapien
ccaatgagctgcctcaaaaaggtgtgggtttcc

SEQ ID NO: 291560 - DNA, 33 bp, Homo sapien
ccaatgagctgcctcagaaaggtgtgggtttcc

SEQ ID NO: 291561 - DNA, 33 bp, Homo sapien
gaacacacatttgccaaattgccaataacttac

SEQ ID NO: 291562 - DNA, 33 bp, Homo sapien
gaacacacatttgccagattgccaataacttac

SEQ ID NO: 291563 - DNA, 33 bp, Homo sapien
cttccgggtcctcttcaaagggatctgtacaca

SEQ ID NO: 291564 - DNA, 33 bp, Homo sapien
cttccgggtcctcttcgaagggatctgtacaca

SEQ ID NO: 291565 - DNA, 33 bp, Homo sapien
aaggatagaatgagccaatggtgtccggcactt

SEQ ID NO: 291566 - DNA, 33 bp, Homo sapien
aaggatagaatgagccgatggtgtccggcactt

SEQ ID NO: 291567 - DNA, 33 bp, Homo sapien
gggagggccagctcccaacagaagtaggccaga

SEQ ID NO: 291568 - DNA, 33 bp, Homo sapien
gggagggccagctcccgacagaagtaggccaga

SEQ ID NO: 291569 - DNA, 33 bp, Homo sapien
tcactttttgggtttcgattactcaggaagtgg

SEQ ID NO: 291570 - DNA, 33 bp, Homo sapien
tcactttttgggtttctattactcaggaagtgg

SEQ ID NO: 291571 - DNA, 33 bp, Homo sapien
ccgttactgccaccaaccttctttagagtctta

SEQ ID NO: 291572 - DNA, 33 bp, Homo sapien
ccgttactgccaccaatcttctttagagtctta

SEQ ID NO: 291573 - DNA, 33 bp, Homo sapien
gagtgtttctgcttaactatcttcttcccatac

SEQ ID NO: 291574 - DNA, 33 bp, Homo sapien
gagtgtttctgcttaattatcttcttcccatac

SEQ ID NO: 291575 - DNA, 33 bp, Homo sapien
atgatttctgtgttgaagaaggctgataagtga

SEQ ID NO: 291576 - DNA, 33 bp, Homo sapien
atgatttctgtgttgatgaaggctgataagtga

SEQ ID NO: 291577 - DNA, 33 bp, Homo sapien
caagattcttcttgctaaagtaggagttcttta

SEQ ID NO: 291578 - DNA, 33 bp, Homo sapien
caagattcttcttgctgaagtaggagttcttta

SEQ ID NO: 291579 - DNA, 33 bp, Homo sapien
tgagaacacagccaaaccatattggtgcaaaag

SEQ ID NO: 291580 - DNA, 33 bp, Homo sapien
tgagaacacagccaaatcatattggtgcaaaag

SEQ ID NO: 291581 - DNA, 33 bp, Homo sapien
gcaggaaacatctcaaataacattaagcaaaat

SEQ ID NO: 291582 - DNA, 33 bp, Homo sapien
gcaggaaacatctcaattaacattaagcaaaat

SEQ ID NO: 291583 - DNA, 33 bp, Homo sapien
tgttctgaaccctgatcaaggccatcaccaagt

SEQ ID NO: 291584 - DNA, 33 bp, Homo sapien
tgttctgaaccctgatgaaggccatcaccaagt

SEQ ID NO: 291585 - DNA, 33 bp, Homo sapien
gatatgaggcaggtctcaagggagtctcggttg

SEQ ID NO: 291586 - DNA, 33 bp, Homo sapien
gatatgaggcaggtctgaagggagtctcggttg

SEQ ID NO: 291587 - DNA, 33 bp, Homo sapien
gtgtctatagccctcaaaacaatcacttgcaaa

SEQ ID NO: 291588 - DNA, 33 bp, Homo sapien
gtgtctatagccctcagaacaatcacttgcaaa

SEQ ID NO: 291589 - DNA, 33 bp, Homo sapien
tctcagatccccagaccctccatgggcagcttt

SEQ ID NO: 291590 - DNA, 33 bp, Homo sapien
tctcagatccccagactctccatgggcagcttt

SEQ ID NO: 291591 - DNA, 33 bp, Homo sapien
agtatgtttgaatgaacgtagaggggatttaag

SEQ ID NO: 291592 - DNA, 33 bp, Homo sapien
agtatgtttgaatgaatgtagaggggatttaag

SEQ ID NO: 291593 - DNA, 33 bp, Homo sapien
cggctgttgatcacacaggtgctaatccctgga

SEQ ID NO: 291594 - DNA, 33 bp, Homo sapien
cggctgttgatcacacgggtgctaatccctgga

SEQ ID NO: 291595 - DNA, 33 bp, Homo sapien
tgtgatcaacagccgacggtcctcacaccacat

SEQ ID NO: 291596 - DNA, 33 bp, Homo sapien
tgtgatcaacagccgatggtcctcacaccacat

SEQ ID NO: 291597 - DNA, 33 bp, Homo sapien
gaagcagatttctcaaaatgtggtgtgaggacc

SEQ ID NO: 291598 - DNA, 33 bp, Homo sapien
gaagcagatttctcaagatgtggtgtgaggacc

SEQ ID NO: 291599 - DNA, 33 bp, Homo sapien
ggggttcccaaagaacagcatcaacatcacctg

SEQ ID NO: 291600 - DNA, 33 bp, Homo sapien
ggggttcccaaagaacggcatcaacatcacctg

SEQ ID NO: 291601 - DNA, 33 bp, Homo sapien
tttggtatttgtcaaaatctgactcttaaccag

SEQ ID NO: 291602 - DNA, 33 bp, Homo sapien
tttggtatttgtcaaagtctgactcttaaccag

SEQ ID NO: 291603 - DNA, 33 bp, Homo sapien
taagaactgaaacaccaaactggaaaacacagg

SEQ ID NO: 291604 - DNA, 33 bp, Homo sapien
taagaactgaaacaccgaactggaaaacacagg

SEQ ID NO: 291605 - DNA, 33 bp, Homo sapien
tcctgcagctgtgaccccagaaatagaatttta

SEQ ID NO: 291606 - DNA, 33 bp, Homo sapien
tcctgcagctgtgacctcagaaatagaatttta

SEQ ID NO: 291607 - DNA, 33 bp, Homo sapien
gctaaagggatggccaaatgaagatgcttatag

SEQ ID NO: 291608 - DNA, 33 bp, Homo sapien
gctaaagggatggccagatgaagatgcttatag

SEQ ID NO: 291609 - DNA, 33 bp, Homo sapien
cctgccccaactcttagccctagaaagctgggc

SEQ ID NO: 291610 - DNA, 33 bp, Homo sapien
cctgccccaactcttatccctagaaagctgggc

SEQ ID NO: 291611 - DNA, 33 bp, Homo sapien
atttgtggctaaatgcgatcatttcattttctt

SEQ ID NO: 291612 - DNA, 33 bp, Homo sapien
atttgtggctaaatgctatcatttcattttctt

SEQ ID NO: 291613 - DNA, 33 bp, Homo sapien
acacacacatacacacaagctaaagtcacgtaa

SEQ ID NO: 291614 - DNA, 33 bp, Homo sapien
acacacacatacacacgagctaaagtcacgtaa

SEQ ID NO: 291615 - DNA, 33 bp, Homo sapien
ggaaagaaattagagccaggaatattatggtta

SEQ ID NO: 291616 - DNA, 33 bp, Homo sapien
ggaaagaaattagagctaggaatattatggtta

SEQ ID NO: 291617 - DNA, 33 bp, Homo sapien
gctcatcttgtattaaagttttttgaacctccc

SEQ ID NO: 291618 - DNA, 33 bp, Homo sapien
gctcatcttgtattaaggttttttgaacctccc

SEQ ID NO: 291619 - DNA, 33 bp, Homo sapien
gctggaagataataaacttgtactctcttgagc

SEQ ID NO: 291620 - DNA, 33 bp, Homo sapien
gctggaagataataaagttgtactctcttgagc

SEQ ID NO: 291621 - DNA, 33 bp, Homo sapien
aaggtaataaattgatgagttgccaggagaaca

SEQ ID NO: 291622 - DNA, 33 bp, Homo sapien
aaggtaataaattgattagttgccaggagaaca

SEQ ID NO: 291623 - DNA, 33 bp, Homo sapien
tctaaaatgcagaaaagagtcttgattaaaatg

SEQ ID NO: 291624 - DNA, 33 bp, Homo sapien
tctaaaatgcagaaaatagtcttgattaaaatg

SEQ ID NO: 291625 - DNA, 33 bp, Homo sapien
catggaatagtatgtacgaccaagaaaggtttc

SEQ ID NO: 291626 - DNA, 33 bp, Homo sapien
catggaatagtatgtatgaccaagaaaggtttc

SEQ ID NO: 291627 - DNA, 33 bp, Homo sapien
actattaaggtccacaaaaggatttatcttaat

SEQ ID NO: 291628 - DNA, 33 bp, Homo sapien
actattaaggtccacataaggatttatcttaat

SEQ ID NO: 291629 - DNA, 33 bp, Homo sapien
aagagaaagctgggaaaattgcttatgaagcaa

SEQ ID NO: 291630 - DNA, 33 bp, Homo sapien
aagagaaagctgggaagattgcttatgaagcaa

SEQ ID NO: 291631 - DNA, 33 bp, Homo sapien
ctaataatgtgtttgaaatagatcctccaatat

SEQ ID NO: 291632 - DNA, 33 bp, Homo sapien
ctaataatgtgtttgagatagatcctccaatat

SEQ ID NO: 291633 - DNA, 33 bp, Homo sapien
caacaattgctgaacacaatgcaccgcgtacga

SEQ ID NO: 291634 - DNA, 33 bp, Homo sapien
caacaattgctgaacataatgcaccgcgtacga

SEQ ID NO: 291635 - DNA, 33 bp, Homo sapien
ttaggatgagggaaatgagtgcatatagggcct

SEQ ID NO: 291636 - DNA, 33 bp, Homo sapien
ttaggatgagggaaattagtgcatatagggcct

SEQ ID NO: 291637 - DNA, 33 bp, Homo sapien
ggaatcctaaattgagacgtttggagagaattt

SEQ ID NO: 291638 - DNA, 33 bp, Homo sapien
ggaatcctaaattgaggcgtttggagagaattt

SEQ ID NO: 291639 - DNA, 33 bp, Homo sapien
tgctcattaaatgcacactgatttagtaaatca

SEQ ID NO: 291640 - DNA, 33 bp, Homo sapien
tgctcattaaatgcacgctgatttagtaaatca

SEQ ID NO: 291641 - DNA, 33 bp, Homo sapien
aacagaaaattcaaaacgagcgagagaaaaggg

SEQ ID NO: 291642 - DNA, 33 bp, Homo sapien
aacagaaaattcaaaatgagcgagagaaaaggg

SEQ ID NO: 291643 - DNA, 33 bp, Homo sapien
gagacatatataaacccatctgaccagcaaacc

SEQ ID NO: 291644 - DNA, 33 bp, Homo sapien
gagacatatataaacctatctgaccagcaaacc

SEQ ID NO: 291645 - DNA, 33 bp, Homo sapien
agaattcaaggttcagcccagattgcaggtaaa

SEQ ID NO: 291646 - DNA, 33 bp, Homo sapien
agaattcaaggttcagtccagattgcaggtaaa

SEQ ID NO: 291647 - DNA, 33 bp, Homo sapien
gggcagtggggataacagccagactgtggcacc

SEQ ID NO: 291648 - DNA, 33 bp, Homo sapien
gggcagtggggataacggccagactgtggcacc

SEQ ID NO: 291649 - DNA, 33 bp, Homo sapien
tggtttaggaactttacactgctgggtctcatt

SEQ ID NO: 291650 - DNA, 33 bp, Homo sapien
tggtttaggaactttatactgctgggtctcatt

SEQ ID NO: 291651 - DNA, 33 bp, Homo sapien
tcttgtagaaacaagagaaatgtgatgattagc

SEQ ID NO: 291652 - DNA, 33 bp, Homo sapien
tcttgtagaaacaagataaatgtgatgattagc

SEQ ID NO: 291653 - DNA, 33 bp, Homo sapien
ttttccttcagtgtgagaagatacgtgattttc

SEQ ID NO: 291654 - DNA, 33 bp, Homo sapien
ttttccttcagtgtgataagatacgtgattttc

SEQ ID NO: 291655 - DNA, 33 bp, Homo sapien
aggcaaacattgaagcaattagtcattatagac

SEQ ID NO: 291656 - DNA, 33 bp, Homo sapien
aggcaaacattgaagccattagtcattatagac

SEQ ID NO: 291657 - DNA, 33 bp, Homo sapien
ccagacctttgctgacagtataggattggtgca

SEQ ID NO: 291658 - DNA, 33 bp, Homo sapien
ccagacctttgctgacggtataggattggtgca

SEQ ID NO: 291659 - DNA, 33 bp, Homo sapien
actctcccaaatttaaaggtaagcaggatggga

SEQ ID NO: 291660 - DNA, 33 bp, Homo sapien
actctcccaaatttaagggtaagcaggatggga

SEQ ID NO: 291661 - DNA, 33 bp, Homo sapien
cagactctgaatcacaccaccagcttttccagg

SEQ ID NO: 291662 - DNA, 33 bp, Homo sapien
cagactctgaatcacatcaccagcttttccagg

SEQ ID NO: 291663 - DNA, 33 bp, Homo sapien
cttgaggacctcaatacaacaaaggtgaaggaa

SEQ ID NO: 291664 - DNA, 33 bp, Homo sapien
cttgaggacctcaatagaacaaaggtgaaggaa

SEQ ID NO: 291665 - DNA, 33 bp, Homo sapien
gtgacttaggtactgtcaaaggcattccgtttt

SEQ ID NO: 291666 - DNA, 33 bp, Homo sapien
gtgacttaggtactgttaaaggcattccgtttt

SEQ ID NO: 291667 - DNA, 33 bp, Homo sapien
aaaaccctagtcaagacgacacatcaaaaaccc

SEQ ID NO: 291668 - DNA, 33 bp, Homo sapien
aaaaccctagtcaagatgacacatcaaaaaccc

SEQ ID NO: 291669 - DNA, 33 bp, Homo sapien
caccctaaccagaacacgtgagaaaaggaattc

SEQ ID NO: 291670 - DNA, 33 bp, Homo sapien
caccctaaccagaacaggtgagaaaaggaattc

SEQ ID NO: 291671 - DNA, 33 bp, Homo sapien
ctgctttcaaatccccaatgatcttaaagtccc

SEQ ID NO: 291672 - DNA, 33 bp, Homo sapien
ctgctttcaaatcccccatgatcttaaagtccc

SEQ ID NO: 291673 - DNA, 33 bp, Homo sapien
cagaaatgtgccgtcacgcagcaccagcacagt

SEQ ID NO: 291674 - DNA, 33 bp, Homo sapien
cagaaatgtgccgtcatgcagcaccagcacagt

SEQ ID NO: 291675 - DNA, 33 bp, Homo sapien
tttatatctcacataaaactccaatttcaatat

SEQ ID NO: 291676 - DNA, 33 bp, Homo sapien
tttatatctcacataagactccaatttcaatat

SEQ ID NO: 291677 - DNA, 33 bp, Homo sapien
ggtaagcagacacaatcattaggaaacagtaag

SEQ ID NO: 291678 - DNA, 33 bp, Homo sapien
ggtaagcagacacaatgattaggaaacagtaag

SEQ ID NO: 291679 - DNA, 33 bp, Homo sapien
tcttgatgtggtagaaagtaggttttcagtaaa

SEQ ID NO: 291680 - DNA, 33 bp, Homo sapien
tcttgatgtggtagaaggtaggttttcagtaaa

SEQ ID NO: 291681 - DNA, 33 bp, Homo sapien
aatactcaagtatcaacgtcattttaattgact

SEQ ID NO: 291682 - DNA, 33 bp, Homo sapien
aatactcaagtatcaaggtcattttaattgact

SEQ ID NO: 291683 - DNA, 33 bp, Homo sapien
tgatacttgagtattacaaaagatgtgtcaata

SEQ ID NO: 291684 - DNA, 33 bp, Homo sapien
tgatacttgagtattataaaagatgtgtcaata

SEQ ID NO: 291685 - DNA, 33 bp, Homo sapien
caggcagatggctaagaagactagaagccaaga

SEQ ID NO: 291686 - DNA, 33 bp, Homo sapien
caggcagatggctaagcagactagaagccaaga

SEQ ID NO: 291687 - DNA, 33 bp, Homo sapien
atgcatattaagtgtacgagaaatagatccctt

SEQ ID NO: 291688 - DNA, 33 bp, Homo sapien
atgcatattaagtgtatgagaaatagatccctt

SEQ ID NO: 291689 - DNA, 33 bp, Homo sapien
gactgtcagatgataaccagagagacagtgcag

SEQ ID NO: 291690 - DNA, 33 bp, Homo sapien
gactgtcagatgataagcagagagacagtgcag

SEQ ID NO: 291691 - DNA, 33 bp, Homo sapien
aattttggtgttctatcataaccataaccacag

SEQ ID NO: 291692 - DNA, 33 bp, Homo sapien
aattttggtgttctattataaccataaccacag

SEQ ID NO: 291693 - DNA, 33 bp, Homo sapien
aaaatgtttccaaagaccatagcagtcattaat

SEQ ID NO: 291694 - DNA, 33 bp, Homo sapien
aaaatgtttccaaagatcatagcagtcattaat

SEQ ID NO: 291695 - DNA, 33 bp, Homo sapien
gactgcagtttatagacaaagagtcacaaaaca

SEQ ID NO: 291696 - DNA, 33 bp, Homo sapien
gactgcagtttatagataaagagtcacaaaaca

SEQ ID NO: 291697 - DNA, 33 bp, Homo sapien
ctttcctcacagatacaagagaaaattggatta

SEQ ID NO: 291698 - DNA, 33 bp, Homo sapien
ctttcctcacagatacgagagaaaattggatta

SEQ ID NO: 291699 - DNA, 33 bp, Homo sapien
taattccatttttgccaagctggaaatgtgcac

SEQ ID NO: 291700 - DNA, 33 bp, Homo sapien
taattccatttttgccgagctggaaatgtgcac

SEQ ID NO: 291701 - DNA, 33 bp, Homo sapien
atggagtccaaatcaccgctatcaattacctga

SEQ ID NO: 291702 - DNA, 33 bp, Homo sapien
atggagtccaaatcactgctatcaattacctga

SEQ ID NO: 291703 - DNA, 33 bp, Homo sapien
atatacttgtaacaacagagtgaatggtgctgt

SEQ ID NO: 291704 - DNA, 33 bp, Homo sapien
atatacttgtaacaacggagtgaatggtgctgt

SEQ ID NO: 291705 - DNA, 33 bp, Homo sapien
gaaagaaatctcagcaaatttaagatcatgcac

SEQ ID NO: 291706 - DNA, 33 bp, Homo sapien
gaaagaaatctcagcacatttaagatcatgcac

SEQ ID NO: 291707 - DNA, 33 bp, Homo sapien
agcaagacagtgcaaaaagaaaccaacacaaaa

SEQ ID NO: 291708 - DNA, 33 bp, Homo sapien
agcaagacagtgcaaagagaaaccaacacaaaa

SEQ ID NO: 291709 - DNA, 33 bp, Homo sapien
acattgagctttaacacaggatgaaataggagc

SEQ ID NO: 291710 - DNA, 33 bp, Homo sapien
acattgagctttaacataggatgaaataggagc

SEQ ID NO: 291711 - DNA, 33 bp, Homo sapien
aatctttaccttcaaacatatccggacatttta

SEQ ID NO: 291712 - DNA, 33 bp, Homo sapien
aatctttaccttcaaatatatccggacatttta

SEQ ID NO: 291713 - DNA, 33 bp, Homo sapien
aagaaccacgagtgccaatgtctgaggatggaa

SEQ ID NO: 291714 - DNA, 33 bp, Homo sapien
aagaaccacgagtgccgatgtctgaggatggaa

SEQ ID NO: 291715 - DNA, 33 bp, Homo sapien
aacaatgggagatacacagaaaacagagaaaga

SEQ ID NO: 291716 - DNA, 33 bp, Homo sapien
aacaatgggagatacagagaaaacagagaaaga

SEQ ID NO: 291717 - DNA, 33 bp, Homo sapien
atcttaccaccagaccacaaatgtaaatcattt

SEQ ID NO: 291718 - DNA, 33 bp, Homo sapien
atcttaccaccagaccccaaatgtaaatcattt

SEQ ID NO: 291719 - DNA, 33 bp, Homo sapien
tcacttagtaactctaagtgaaacaaagaattt

SEQ ID NO: 291720 - DNA, 33 bp, Homo sapien
tcacttagtaactctaggtgaaacaaagaattt

SEQ ID NO: 291721 - DNA, 33 bp, Homo sapien
gaagtgagaaaaccaagacatctgtctcatgga

SEQ ID NO: 291722 - DNA, 33 bp, Homo sapien
gaagtgagaaaaccaatacatctgtctcatgga

SEQ ID NO: 291723 - DNA, 33 bp, Homo sapien
ctagattcttaaggccactgttcttttcagcat

SEQ ID NO: 291724 - DNA, 33 bp, Homo sapien
ctagattcttaaggccgctgttcttttcagcat

SEQ ID NO: 291725 - DNA, 33 bp, Homo sapien
taaaacaatgacataaaagaacaagcattaatc

SEQ ID NO: 291726 - DNA, 33 bp, Homo sapien
taaaacaatgacataacagaacaagcattaatc

SEQ ID NO: 291727 - DNA, 33 bp, Homo sapien
gggatccaggatatcaactttttgttttcatcc

SEQ ID NO: 291728 - DNA, 33 bp, Homo sapien
gggatccaggatatcacctttttgttttcatcc

SEQ ID NO: 291729 - DNA, 33 bp, Homo sapien
aagcagtgagctaacagtaatgacctggtaggt

SEQ ID NO: 291730 - DNA, 33 bp, Homo sapien
aagcagtgagctaacattaatgacctggtaggt

SEQ ID NO: 291731 - DNA, 33 bp, Homo sapien
aggatctgacacaaagaaagattattatttcct

SEQ ID NO: 291732 - DNA, 33 bp, Homo sapien
aggatctgacacaaagtaagattattatttcct

SEQ ID NO: 291733 - DNA, 33 bp, Homo sapien
aattgatgcagttaaactggaatttctcttcct

SEQ ID NO: 291734 - DNA, 33 bp, Homo sapien
aattgatgcagttaaattggaatttctcttcct

SEQ ID NO: 291735 - DNA, 33 bp, Homo sapien
caagaagagtctcacactttctttcagggtata

SEQ ID NO: 291736 - DNA, 33 bp, Homo sapien
caagaagagtctcacattttctttcagggtata

SEQ ID NO: 291737 - DNA, 33 bp, Homo sapien
ataaataagcttctgaaattgcacagtggccct

SEQ ID NO: 291738 - DNA, 33 bp, Homo sapien
ataaataagcttctgagattgcacagtggccct

SEQ ID NO: 291739 - DNA, 33 bp, Homo sapien
tggttctacatgttcacagtaagtccctggttt

SEQ ID NO: 291740 - DNA, 33 bp, Homo sapien
tggttctacatgttcagagtaagtccctggttt

SEQ ID NO: 291741 - DNA, 33 bp, Homo sapien
ggtttgggtatatgtacaaagtgtttgttgcat

SEQ ID NO: 291742 - DNA, 33 bp, Homo sapien
ggtttgggtatatgtagaaagtgtttgttgcat

SEQ ID NO: 291743 - DNA, 33 bp, Homo sapien
ccatcttatctgacccacagttggaaccaactt

SEQ ID NO: 291744 - DNA, 33 bp, Homo sapien
ccatcttatctgacccgcagttggaaccaactt

SEQ ID NO: 291745 - DNA, 33 bp, Homo sapien
tgacaatagtgagtcacgggataaggtaatatt

SEQ ID NO: 291746 - DNA, 33 bp, Homo sapien
tgacaatagtgagtcatgggataaggtaatatt

SEQ ID NO: 291747 - DNA, 33 bp, Homo sapien
tgcacttggctcatcaataaacatctcaacttt

SEQ ID NO: 291748 - DNA, 33 bp, Homo sapien
tgcacttggctcatcagtaaacatctcaacttt

SEQ ID NO: 291749 - DNA, 33 bp, Homo sapien
tgtgcctggagagctaggagcttggagagatgg

SEQ ID NO: 291750 - DNA, 33 bp, Homo sapien
tgtgcctggagagctatgagcttggagagatgg

SEQ ID NO: 291751 - DNA, 33 bp, Homo sapien
aaacacaacagcaatgacatgaacataattatt

SEQ ID NO: 291752 - DNA, 33 bp, Homo sapien
aaacacaacagcaatggcatgaacataattatt

SEQ ID NO: 291753 - DNA, 33 bp, Homo sapien
atgattcgagacccaacagaaatgtcacatagg

SEQ ID NO: 291754 - DNA, 33 bp, Homo sapien
atgattcgagacccaatagaaatgtcacatagg

SEQ ID NO: 291755 - DNA, 33 bp, Homo sapien
atcttagttacacgataaaaaggagcaggggag

SEQ ID NO: 291756 - DNA, 33 bp, Homo sapien
atcttagttacacgatgaaaaggagcaggggag

SEQ ID NO: 291757 - DNA, 33 bp, Homo sapien
cttgatgtcagacacactctcttaattatattt

SEQ ID NO: 291758 - DNA, 33 bp, Homo sapien
cttgatgtcagacacattctcttaattatattt

SEQ ID NO: 291759 - DNA, 33 bp, Homo sapien
aatagaaacttttggacgttaacatgaaaataa

SEQ ID NO: 291760 - DNA, 33 bp, Homo sapien
aatagaaacttttggaggttaacatgaaaataa

SEQ ID NO: 291761 - DNA, 33 bp, Homo sapien
ttgcaagacagctaacaaagcaagtacctccat

SEQ ID NO: 291762 - DNA, 33 bp, Homo sapien
ttgcaagacagctaacgaagcaagtacctccat

SEQ ID NO: 291763 - DNA, 33 bp, Homo sapien
ggtgtaaaagggagaaagcaagtagctcccgta

SEQ ID NO: 291764 - DNA, 33 bp, Homo sapien
ggtgtaaaagggagaaggcaagtagctcccgta

SEQ ID NO: 291765 - DNA, 33 bp, Homo sapien
aatctttgaaactgaaatgtctaagacccaaat

SEQ ID NO: 291766 - DNA, 33 bp, Homo sapien
aatctttgaaactgaattgtctaagacccaaat

SEQ ID NO: 291767 - DNA, 33 bp, Homo sapien
tcatttacaagttagaagtattgacagaataga

SEQ ID NO: 291768 - DNA, 33 bp, Homo sapien
tcatttacaagttagacgtattgacagaataga

SEQ ID NO: 291769 - DNA, 33 bp, Homo sapien
ctgggtttttgatatacgtttgggaattcttat

SEQ ID NO: 291770 - DNA, 33 bp, Homo sapien
ctgggtttttgatatatgtttgggaattcttat

SEQ ID NO: 291771 - DNA, 33 bp, Homo sapien
cagtgatccctttaagaatcttgttcagtagtg

SEQ ID NO: 291772 - DNA, 33 bp, Homo sapien
cagtgatccctttaagtatcttgttcagtagtg

SEQ ID NO: 291773 - DNA, 33 bp, Homo sapien
aatctgctggggagtgaaaaacaacttctggtt

SEQ ID NO: 291774 - DNA, 33 bp, Homo sapien
aatctgctggggagtggaaaacaacttctggtt

SEQ ID NO: 291775 - DNA, 33 bp, Homo sapien
tttgtaaagctattcaacatgaaattataacat

SEQ ID NO: 291776 - DNA, 33 bp, Homo sapien
tttgtaaagctattcatcatgaaattataacat

SEQ ID NO: 291777 - DNA, 33 bp, Homo sapien
tccacagtttatcccaactataattttcaaatc

SEQ ID NO: 291778 - DNA, 33 bp, Homo sapien
tccacagtttatcccatctataattttcaaatc

SEQ ID NO: 291779 - DNA, 33 bp, Homo sapien
ttcaacaaccacggtgcagcaagagctgaacca

SEQ ID NO: 291780 - DNA, 33 bp, Homo sapien
ttcaacaaccacggtgtagcaagagctgaacca

SEQ ID NO: 291781 - DNA, 33 bp, Homo sapien
gaaaagctatgacgtgcaatttttggcactaga

SEQ ID NO: 291782 - DNA, 33 bp, Homo sapien
gaaaagctatgacgtgtaatttttggcactaga

SEQ ID NO: 291783 - DNA, 33 bp, Homo sapien
aatttttggcactagacaatatcttcacagcag

SEQ ID NO: 291784 - DNA, 33 bp, Homo sapien
aatttttggcactagagaatatcttcacagcag

SEQ ID NO: 291785 - DNA, 33 bp, Homo sapien
acaaaagagataacaaaatatcgacatatcaag

SEQ ID NO: 291786 - DNA, 33 bp, Homo sapien
acaaaagagataacaacatatcgacatatcaag

SEQ ID NO: 291787 - DNA, 33 bp, Homo sapien
tatgttacaaataaccactagtttttcagcgat

SEQ ID NO: 291788 - DNA, 33 bp, Homo sapien
tatgttacaaataaccgctagtttttcagcgat

SEQ ID NO: 291789 - DNA, 33 bp, Homo sapien
agcccttgaccttcaaaagagcatcagggggaa

SEQ ID NO: 291790 - DNA, 33 bp, Homo sapien
agcccttgaccttcaagagagcatcagggggaa

SEQ ID NO: 291791 - DNA, 33 bp, Homo sapien
ggaggcacattgatccaacagatgtatcaaatc

SEQ ID NO: 291792 - DNA, 33 bp, Homo sapien
ggaggcacattgatccgacagatgtatcaaatc

SEQ ID NO: 291793 - DNA, 33 bp, Homo sapien
aaaaatctagatgaaaaagactatgacttaaaa

SEQ ID NO: 291794 - DNA, 33 bp, Homo sapien
aaaaatctagatgaaagagactatgacttaaaa

SEQ ID NO: 291795 - DNA, 33 bp, Homo sapien
atggttttagtttgaacggaaagaatggttatc

SEQ ID NO: 291796 - DNA, 33 bp, Homo sapien
atggttttagtttgaatggaaagaatggttatc

SEQ ID NO: 291797 - DNA, 33 bp, Homo sapien
cctgaaatttcaaccaatggttcagtgagtttt

SEQ ID NO: 291798 - DNA, 33 bp, Homo sapien
cctgaaatttcaaccagtggttcagtgagtttt

SEQ ID NO: 291799 - DNA, 33 bp, Homo sapien
gagatttttagtagtcacatatttcctcctacc

SEQ ID NO: 291800 - DNA, 33 bp, Homo sapien
gagatttttagtagtcgcatatttcctcctacc

SEQ ID NO: 291801 - DNA, 33 bp, Homo sapien
ggaggaggaaagtgaggaagaaagaagaaaaag

SEQ ID NO: 291802 - DNA, 33 bp, Homo sapien
ggaggaggaaagtgagtaagaaagaagaaaaag

SEQ ID NO: 291803 - DNA, 33 bp, Homo sapien
ccttccttttcttaaaatgtcattcataacatt

SEQ ID NO: 291804 - DNA, 33 bp, Homo sapien
ccttccttttcttaaagtgtcattcataacatt

SEQ ID NO: 291805 - DNA, 33 bp, Homo sapien
gcaaggatttgagggaaatttgtcttcaggtgg

SEQ ID NO: 291806 - DNA, 33 bp, Homo sapien
gcaaggatttgagggagatttgtcttcaggtgg

SEQ ID NO: 291807 - DNA, 33 bp, Homo sapien
cacaacctaaatattaactcagatgacctgacc

SEQ ID NO: 291808 - DNA, 33 bp, Homo sapien
cacaacctaaatattagctcagatgacctgacc

SEQ ID NO: 291809 - DNA, 33 bp, Homo sapien
ttaataatttgtttgaagtgaatttacagagaa

SEQ ID NO: 291810 - DNA, 33 bp, Homo sapien
ttaataatttgtttgaggtgaatttacagagaa

SEQ ID NO: 291811 - DNA, 33 bp, Homo sapien
tcctggaacactgataagcataggtgttcagtg

SEQ ID NO: 291812 - DNA, 33 bp, Homo sapien
tcctggaacactgataggcataggtgttcagtg

SEQ ID NO: 291813 - DNA, 33 bp, Homo sapien
aaatttaaaacatttacaatctggctctctctt

SEQ ID NO: 291814 - DNA, 33 bp, Homo sapien
aaatttaaaacatttataatctggctctctctt

SEQ ID NO: 291815 - DNA, 33 bp, Homo sapien
cttctagacatcctgacagactatcatgaagtt

SEQ ID NO: 291816 - DNA, 33 bp, Homo sapien
cttctagacatcctgagagactatcatgaagtt

SEQ ID NO: 291817 - DNA, 33 bp, Homo sapien
tggaccttacctcaataagcttcagttctctaa

SEQ ID NO: 291818 - DNA, 33 bp, Homo sapien
tggaccttacctcaatgagcttcagttctctaa

SEQ ID NO: 291819 - DNA, 33 bp, Homo sapien
tctaaatacttctcaaatgttatcactcaggat

SEQ ID NO: 291820 - DNA, 33 bp, Homo sapien
tctaaatacttctcaactgttatcactcaggat

SEQ ID NO: 291821 - DNA, 33 bp, Homo sapien
acaaattgcacggctacaaactgtaaagcacaa

SEQ ID NO: 291822 - DNA, 33 bp, Homo sapien
acaaattgcacggctataaactgtaaagcacaa

SEQ ID NO: 291823 - DNA, 33 bp, Homo sapien
taacgtagagatctaaatatttccacagactgt

SEQ ID NO: 291824 - DNA, 33 bp, Homo sapien
taacgtagagatctaagtatttccacagactgt

SEQ ID NO: 291825 - DNA, 33 bp, Homo sapien
aaaacatctttgaaaacgccatcagaagaggca

SEQ ID NO: 291826 - DNA, 33 bp, Homo sapien
aaaacatctttgaaaatgccatcagaagaggca

SEQ ID NO: 291827 - DNA, 33 bp, Homo sapien
attaaaggtgacaacagaattaatattgctgct

SEQ ID NO: 291828 - DNA, 33 bp, Homo sapien
attaaaggtgacaacataattaatattgctgct

SEQ ID NO: 291829 - DNA, 33 bp, Homo sapien
catatttatctacaaaagccttaattgctttaa

SEQ ID NO: 291830 - DNA, 33 bp, Homo sapien
catatttatctacaaaggccttaattgctttaa

SEQ ID NO: 291831 - DNA, 33 bp, Homo sapien
ttcagaaagaagaacacagcttgtgaaaaacta

SEQ ID NO: 291832 - DNA, 33 bp, Homo sapien
ttcagaaagaagaacagagcttgtgaaaaacta

SEQ ID NO: 291833 - DNA, 33 bp, Homo sapien
tctggttccacaagccagcataattcattcatg

SEQ ID NO: 291834 - DNA, 33 bp, Homo sapien
tctggttccacaagcctgcataattcattcatg

SEQ ID NO: 291835 - DNA, 33 bp, Homo sapien
atttagaatctctaagcatgcggccagaacact

SEQ ID NO: 291836 - DNA, 33 bp, Homo sapien
atttagaatctctaagtatgcggccagaacact

SEQ ID NO: 291837 - DNA, 33 bp, Homo sapien
cttagcattttttagacggccagatttggagtt

SEQ ID NO: 291838 - DNA, 33 bp, Homo sapien
cttagcattttttagatggccagatttggagtt

SEQ ID NO: 291839 - DNA, 33 bp, Homo sapien
tttgctcttgaagccacgaaattggtcagagca

SEQ ID NO: 291840 - DNA, 33 bp, Homo sapien
tttgctcttgaagccatgaaattggtcagagca

SEQ ID NO: 291841 - DNA, 33 bp, Homo sapien
atgcaggagattacaacaatagctacagtacct

SEQ ID NO: 291842 - DNA, 33 bp, Homo sapien
atgcaggagattacaataatagctacagtacct

SEQ ID NO: 291843 - DNA, 33 bp, Homo sapien
tgcatcaaatgttaccaataaaacaataataat

SEQ ID NO: 291844 - DNA, 33 bp, Homo sapien
tgcatcaaatgttaccgataaaacaataataat

SEQ ID NO: 291845 - DNA, 33 bp, Homo sapien
aacttctagaccataacactgtgagatagtaaa

SEQ ID NO: 291846 - DNA, 33 bp, Homo sapien
aacttctagaccataatactgtgagatagtaaa

SEQ ID NO: 291847 - DNA, 33 bp, Homo sapien
aaaaatggagaaaaaagactcaaggtgaggtct

SEQ ID NO: 291848 - DNA, 33 bp, Homo sapien
aaaaatggagaaaaaatactcaaggtgaggtct

SEQ ID NO: 291849 - DNA, 33 bp, Homo sapien
cagaaataagcagttaaacagaggaaaactcag

SEQ ID NO: 291850 - DNA, 33 bp, Homo sapien
cagaaataagcagttatacagaggaaaactcag

SEQ ID NO: 291851 - DNA, 33 bp, Homo sapien
ggaggagaggaaagtaaatgcaggctctgttgc

SEQ ID NO: 291852 - DNA, 33 bp, Homo sapien
ggaggagaggaaagtacatgcaggctctgttgc

SEQ ID NO: 291853 - DNA, 33 bp, Homo sapien
cggaaggcagttcttccccattccaatagttga

SEQ ID NO: 291854 - DNA, 33 bp, Homo sapien
cggaaggcagttcttctccattccaatagttga

SEQ ID NO: 291855 - DNA, 33 bp, Homo sapien
agatcatattgtcaataaggccaattaacattc

SEQ ID NO: 291856 - DNA, 33 bp, Homo sapien
agatcatattgtcaatgaggccaattaacattc

SEQ ID NO: 291857 - DNA, 33 bp, Homo sapien
attcacatttctacataaaggccagcaatgaat

SEQ ID NO: 291858 - DNA, 33 bp, Homo sapien
attcacatttctacattaaggccagcaatgaat

SEQ ID NO: 291859 - DNA, 33 bp, Homo sapien
tagtatacatgccctgaagaattcctggaattg

SEQ ID NO: 291860 - DNA, 33 bp, Homo sapien
tagtatacatgccctgcagaattcctggaattg

SEQ ID NO: 291861 - DNA, 33 bp, Homo sapien
tcatgtgacctttaaaacattttccacaaattc

SEQ ID NO: 291862 - DNA, 33 bp, Homo sapien
tcatgtgacctttaaagcattttccacaaattc

SEQ ID NO: 291863 - DNA, 33 bp, Homo sapien
tttatgtcactagggcactatagtctgcattct

SEQ ID NO: 291864 - DNA, 33 bp, Homo sapien
tttatgtcactagggccctatagtctgcattct

SEQ ID NO: 291865 - DNA, 33 bp, Homo sapien
ttcatgcctgcggctcaaaaacatttctgcatc

SEQ ID NO: 291866 - DNA, 33 bp, Homo sapien
ttcatgcctgcggctcgaaaacatttctgcatc

SEQ ID NO: 291867 - DNA, 33 bp, Homo sapien
agaagtatcctaatccagaaagagacgaaatga

SEQ ID NO: 291868 - DNA, 33 bp, Homo sapien
agaagtatcctaatccggaaagagacgaaatga

SEQ ID NO: 291869 - DNA, 33 bp, Homo sapien
caatgtgtttaatgggccatttagataaagggg

SEQ ID NO: 291870 - DNA, 33 bp, Homo sapien
caatgtgtttaatgggtcatttagataaagggg

SEQ ID NO: 291871 - DNA, 33 bp, Homo sapien
taagttcattcctccaccgtagaagccaacagt

SEQ ID NO: 291872 - DNA, 33 bp, Homo sapien
taagttcattcctccatcgtagaagccaacagt

SEQ ID NO: 291873 - DNA, 33 bp, Homo sapien
ttctattgcagatgtaacaaacatagtgtctta

SEQ ID NO: 291874 - DNA, 33 bp, Homo sapien
ttctattgcagatgtaccaaacatagtgtctta

SEQ ID NO: 291875 - DNA, 33 bp, Homo sapien
gttgtttgaaactgcaatcctgttgaaaatctt

SEQ ID NO: 291876 - DNA, 33 bp, Homo sapien
gttgtttgaaactgcagtcctgttgaaaatctt

SEQ ID NO: 291877 - DNA, 33 bp, Homo sapien
aagagcggccttaatcaatgtttagatccagca

SEQ ID NO: 291878 - DNA, 33 bp, Homo sapien
aagagcggccttaatccatgtttagatccagca

SEQ ID NO: 291879 - DNA, 33 bp, Homo sapien
agggtttgtgttaatgaagtcaggagttgggca

SEQ ID NO: 291880 - DNA, 33 bp, Homo sapien
agggtttgtgttaatgtagtcaggagttgggca

SEQ ID NO: 291881 - DNA, 33 bp, Homo sapien
aaagctcagctaacatcatcacaagacaccagc

SEQ ID NO: 291882 - DNA, 33 bp, Homo sapien
aaagctcagctaacatgatcacaagacaccagc

SEQ ID NO: 291883 - DNA, 33 bp, Homo sapien
aaagtataacagttagaatggacagaaaataaa

SEQ ID NO: 291884 - DNA, 33 bp, Homo sapien
aaagtataacagttaggatggacagaaaataaa

SEQ ID NO: 291885 - DNA, 33 bp, Homo sapien
tcctgtaacctgacttaaagtaattctgaaaat

SEQ ID NO: 291886 - DNA, 33 bp, Homo sapien
tcctgtaacctgacttgaagtaattctgaaaat

SEQ ID NO: 291887 - DNA, 33 bp, Homo sapien
catttgccactcatgagataatggcctatttaa

SEQ ID NO: 291888 - DNA, 33 bp, Homo sapien
catttgccactcatgatataatggcctatttaa

SEQ ID NO: 291889 - DNA, 33 bp, Homo sapien
tcgaaaaaacaaatgaaacaggtgaagtaaata

SEQ ID NO: 291890 - DNA, 33 bp, Homo sapien
tcgaaaaaacaaatgagacaggtgaagtaaata

SEQ ID NO: 291891 - DNA, 33 bp, Homo sapien
taatttttcaactagacggaagcacaaagatgg

SEQ ID NO: 291892 - DNA, 33 bp, Homo sapien
taatttttcaactagatggaagcacaaagatgg

SEQ ID NO: 291893 - DNA, 33 bp, Homo sapien
gacaggcactgcgggaactttagttatgaacaa

SEQ ID NO: 291894 - DNA, 33 bp, Homo sapien
gacaggcactgcgggagctttagttatgaacaa

SEQ ID NO: 291895 - DNA, 33 bp, Homo sapien
caaaatagtaacagccaagacttatatagtgtt

SEQ ID NO: 291896 - DNA, 33 bp, Homo sapien
caaaatagtaacagccgagacttatatagtgtt

SEQ ID NO: 291897 - DNA, 33 bp, Homo sapien
ttttctgaacatatccactttttccagcaccat

SEQ ID NO: 291898 - DNA, 33 bp, Homo sapien
ttttctgaacatatccgctttttccagcaccat

SEQ ID NO: 291899 - DNA, 33 bp, Homo sapien
catgtagagatgaaaacacaccctatccataga

SEQ ID NO: 291900 - DNA, 33 bp, Homo sapien
catgtagagatgaaaatacaccctatccataga

SEQ ID NO: 291901 - DNA, 33 bp, Homo sapien
tggaatgggagagggcaaagatcctgttatgaa

SEQ ID NO: 291902 - DNA, 33 bp, Homo sapien
tggaatgggagagggccaagatcctgttatgaa

SEQ ID NO: 291903 - DNA, 33 bp, Homo sapien
atattctttttgaagccccagtcattaatcaaa

SEQ ID NO: 291904 - DNA, 33 bp, Homo sapien
atattctttttgaagcgccagtcattaatcaaa

SEQ ID NO: 291905 - DNA, 33 bp, Homo sapien
tcacaatctaacttccagaaactgaaggcaagg

SEQ ID NO: 291906 - DNA, 33 bp, Homo sapien
tcacaatctaacttccggaaactgaaggcaagg

SEQ ID NO: 291907 - DNA, 33 bp, Homo sapien
ttgtgatgtgtcttggaatagatttttcgagtt

SEQ ID NO: 291908 - DNA, 33 bp, Homo sapien
ttgtgatgtgtcttggcatagatttttcgagtt

SEQ ID NO: 291909 - DNA, 33 bp, Homo sapien
gaagtggaagtgacacaaatgttagatggtttt

SEQ ID NO: 291910 - DNA, 33 bp, Homo sapien
gaagtggaagtgacacgaatgttagatggtttt

SEQ ID NO: 291911 - DNA, 33 bp, Homo sapien
aaaagatacaaacatacgtaagctataagaaat

SEQ ID NO: 291912 - DNA, 33 bp, Homo sapien
aaaagatacaaacatatgtaagctataagaaat

SEQ ID NO: 291913 - DNA, 33 bp, Homo sapien
ttgcgggcggtagcaaccacactgaagccctgt

SEQ ID NO: 291914 - DNA, 33 bp, Homo sapien
ttgcgggcggtagcaatcacactgaagccctgt

SEQ ID NO: 291915 - DNA, 33 bp, Homo sapien
tgaaatattgaactagcataagcactaagaatt

SEQ ID NO: 291916 - DNA, 33 bp, Homo sapien
tgaaatattgaactaggataagcactaagaatt

SEQ ID NO: 291917 - DNA, 33 bp, Homo sapien
ctctaattgccctggaataaggtgtgccacatt

SEQ ID NO: 291918 - DNA, 33 bp, Homo sapien
ctctaattgccctggattaaggtgtgccacatt

SEQ ID NO: 291919 - DNA, 33 bp, Homo sapien
tttgccatgcttgacaagatactttggggttga

SEQ ID NO: 291920 - DNA, 33 bp, Homo sapien
tttgccatgcttgacaggatactttggggttga

SEQ ID NO: 291921 - DNA, 33 bp, Homo sapien
acactctcagctaatactacctcaaagccaggc

SEQ ID NO: 291922 - DNA, 33 bp, Homo sapien
acactctcagctaatattacctcaaagccaggc

SEQ ID NO: 291923 - DNA, 33 bp, Homo sapien
ttttcccagtgaatacccttaagattatatttc

SEQ ID NO: 291924 - DNA, 33 bp, Homo sapien
ttttcccagtgaatacgcttaagattatatttc

SEQ ID NO: 291925 - DNA, 33 bp, Homo sapien
gatatcatgaagctcaatctctaatcctgttgc

SEQ ID NO: 291926 - DNA, 33 bp, Homo sapien
gatatcatgaagctcagtctctaatcctgttgc

SEQ ID NO: 291927 - DNA, 33 bp, Homo sapien
actcctaaggcacagacagcacaattatatcat

SEQ ID NO: 291928 - DNA, 33 bp, Homo sapien
actcctaaggcacagagagcacaattatatcat

SEQ ID NO: 291929 - DNA, 33 bp, Homo sapien
agttcagtgtccaagaacttttgattatgccca

SEQ ID NO: 291930 - DNA, 33 bp, Homo sapien
agttcagtgtccaagagcttttgattatgccca

SEQ ID NO: 291931 - DNA, 33 bp, Homo sapien
ggtgtggaaaaggcaaactcctctgtcggtgca

SEQ ID NO: 291932 - DNA, 33 bp, Homo sapien
ggtgtggaaaaggcaatctcctctgtcggtgca

SEQ ID NO: 291933 - DNA, 33 bp, Homo sapien
agtgactttgagaggtaaatgataccgatgatt

SEQ ID NO: 291934 - DNA, 33 bp, Homo sapien
agtgactttgagaggtgaatgataccgatgatt

SEQ ID NO: 291935 - DNA, 33 bp, Homo sapien
atgtgttatgtctttcaaacatctgtcagtcag

SEQ ID NO: 291936 - DNA, 33 bp, Homo sapien
atgtgttatgtctttcgaacatctgtcagtcag

SEQ ID NO: 291937 - DNA, 33 bp, Homo sapien
tttgtaaatcttaaacccatttgataacctttt

SEQ ID NO: 291938 - DNA, 33 bp, Homo sapien
tttgtaaatcttaaactcatttgataacctttt

SEQ ID NO: 291939 - DNA, 33 bp, Homo sapien
aatagtcaagtgaaggaaagttttcagtgaaga

SEQ ID NO: 291940 - DNA, 33 bp, Homo sapien
aatagtcaagtgaagggaagttttcagtgaaga

SEQ ID NO: 291941 - DNA, 33 bp, Homo sapien
ttatttgtgagtgatcaacgtgaaggaagaaaa

SEQ ID NO: 291942 - DNA, 33 bp, Homo sapien
ttatttgtgagtgatcgacgtgaaggaagaaaa

SEQ ID NO: 291943 - DNA, 33 bp, Homo sapien
gtcatactcttttgaaattagatgtgaccaagt

SEQ ID NO: 291944 - DNA, 33 bp, Homo sapien
gtcatactcttttgaagttagatgtgaccaagt

SEQ ID NO: 291945 - DNA, 33 bp, Homo sapien
caggtccaacagacaaaggttcaaattatggtt

SEQ ID NO: 291946 - DNA, 33 bp, Homo sapien
caggtccaacagacaagggttcaaattatggtt

SEQ ID NO: 291947 - DNA, 33 bp, Homo sapien
gcgttgaagatcaatcaattttagaaccttgtt

SEQ ID NO: 291948 - DNA, 33 bp, Homo sapien
gcgttgaagatcaatcgattttagaaccttgtt

SEQ ID NO: 291949 - DNA, 33 bp, Homo sapien
tatccaagtgatgtgccacttacaatggtttta

SEQ ID NO: 291950 - DNA, 33 bp, Homo sapien
tatccaagtgatgtgctacttacaatggtttta

SEQ ID NO: 291951 - DNA, 33 bp, Homo sapien
ctgctgatggtgcacaactgccatgacaactct

SEQ ID NO: 291952 - DNA, 33 bp, Homo sapien
ctgctgatggtgcacagctgccatgacaactct

SEQ ID NO: 291953 - DNA, 33 bp, Homo sapien
tcacagagaaattggaagcactaaagtcaatca

SEQ ID NO: 291954 - DNA, 33 bp, Homo sapien
tcacagagaaattggaggcactaaagtcaatca

SEQ ID NO: 291955 - DNA, 33 bp, Homo sapien
tccaggctgagtcatccccactctttatttatt

SEQ ID NO: 291956 - DNA, 33 bp, Homo sapien
tccaggctgagtcatctccactctttatttatt

SEQ ID NO: 291957 - DNA, 33 bp, Homo sapien
acattcacacaatttaaaggatccatattagtt

SEQ ID NO: 291958 - DNA, 33 bp, Homo sapien
acattcacacaatttagaggatccatattagtt

SEQ ID NO: 291959 - DNA, 33 bp, Homo sapien
caagcaatgggactgacgaagtaaggagccagt

SEQ ID NO: 291960 - DNA, 33 bp, Homo sapien
caagcaatgggactgaggaagtaaggagccagt

SEQ ID NO: 291961 - DNA, 33 bp, Homo sapien
ttcttgggttaaaaaagtgccaatgacatttgt

SEQ ID NO: 291962 - DNA, 33 bp, Homo sapien
ttcttgggttaaaaaattgccaatgacatttgt

SEQ ID NO: 291963 - DNA, 33 bp, Homo sapien
cttcagccaactaagccaattttcaatctcaaa

SEQ ID NO: 291964 - DNA, 33 bp, Homo sapien
cttcagccaactaagctaattttcaatctcaaa

SEQ ID NO: 291965 - DNA, 33 bp, Homo sapien
tccttcaacacttatccaggccccttaaaactc

SEQ ID NO: 291966 - DNA, 33 bp, Homo sapien
tccttcaacacttatcgaggccccttaaaactc

SEQ ID NO: 291967 - DNA, 33 bp, Homo sapien
ttataacaaaaaggtgaactcgatgggataata

SEQ ID NO: 291968 - DNA, 33 bp, Homo sapien
ttataacaaaaaggtggactcgatgggataata

SEQ ID NO: 291969 - DNA, 33 bp, Homo sapien
taattttcagctttccactacagtacctgtgca

SEQ ID NO: 291970 - DNA, 33 bp, Homo sapien
taattttcagctttccgctacagtacctgtgca

SEQ ID NO: 291971 - DNA, 33 bp, Homo sapien
atactgacttctttcaaagtgatgttcgaaatt

SEQ ID NO: 291972 - DNA, 33 bp, Homo sapien
atactgacttctttcatagtgatgttcgaaatt

SEQ ID NO: 291973 - DNA, 33 bp, Homo sapien
ctatattaccaggacaaataccaagtataaagt

SEQ ID NO: 291974 - DNA, 33 bp, Homo sapien
ctatattaccaggacagataccaagtataaagt

SEQ ID NO: 291975 - DNA, 33 bp, Homo sapien
tattttttctgtcaagccttccatttgttagat

SEQ ID NO: 291976 - DNA, 33 bp, Homo sapien
tattttttctgtcaagtcttccatttgttagat

SEQ ID NO: 291977 - DNA, 33 bp, Homo sapien
cagaagaggctgtaagaaatgtaggcatttgct

SEQ ID NO: 291978 - DNA, 33 bp, Homo sapien
cagaagaggctgtaaggaatgtaggcatttgct

SEQ ID NO: 291979 - DNA, 33 bp, Homo sapien
tgacagacttaaattcacatactgtaagtgttg

SEQ ID NO: 291980 - DNA, 33 bp, Homo sapien
tgacagacttaaattctcatactgtaagtgttg

SEQ ID NO: 291981 - DNA, 33 bp, Homo sapien
tcagatgggacgatgtgaagtattttctataac

SEQ ID NO: 291982 - DNA, 33 bp, Homo sapien
tcagatgggacgatgttaagtattttctataac

SEQ ID NO: 291983 - DNA, 33 bp, Homo sapien
tgtttaacctctctgcacatgattttctcgcca

SEQ ID NO: 291984 - DNA, 33 bp, Homo sapien
tgtttaacctctctgcgcatgattttctcgcca

SEQ ID NO: 291985 - DNA, 33 bp, Homo sapien
gaagctgtagcatcaaagtggccatagacaata

SEQ ID NO: 291986 - DNA, 33 bp, Homo sapien
gaagctgtagcatcaacgtggccatagacaata

SEQ ID NO: 291987 - DNA, 33 bp, Homo sapien
tatcacaaatccactgaaagaaaatgctaaagc

SEQ ID NO: 291988 - DNA, 33 bp, Homo sapien
tatcacaaatccactggaagaaaatgctaaagc

SEQ ID NO: 291989 - DNA, 33 bp, Homo sapien
gtttgatcatggaaacaataccacttacctaat

SEQ ID NO: 291990 - DNA, 33 bp, Homo sapien
gtttgatcatggaaacgataccacttacctaat

SEQ ID NO: 291991 - DNA, 33 bp, Homo sapien
tgttttgctttgtttacacagcaacatttctga

SEQ ID NO: 291992 - DNA, 33 bp, Homo sapien
tgttttgctttgtttatacagcaacatttctga

SEQ ID NO: 291993 - DNA, 33 bp, Homo sapien
ctcaaaatatgaccaccgtatttgttagaggag

SEQ ID NO: 291994 - DNA, 33 bp, Homo sapien
ctcaaaatatgaccactgtatttgttagaggag

SEQ ID NO: 291995 - DNA, 33 bp, Homo sapien
tctattccatccaaaaacctcagtgaaaaacgc

SEQ ID NO: 291996 - DNA, 33 bp, Homo sapien
tctattccatccaaaagcctcagtgaaaaacgc

SEQ ID NO: 291997 - DNA, 33 bp, Homo sapien
ttcctgtgtaactggaccaaaaaattatcatta

SEQ ID NO: 291998 - DNA, 33 bp, Homo sapien
ttcctgtgtaactggatcaaaaaattatcatta

SEQ ID NO: 291999 - DNA, 33 bp, Homo sapien
ttcaaatgtctgatgaccttaggatttttaact

SEQ ID NO: 292000 - DNA, 33 bp, Homo sapien
ttcaaatgtctgatgatcttaggatttttaact

SEQ ID NO: 292001 - DNA, 33 bp, Homo sapien
acactcatgttcaaaagtctttcttcatgtcag

SEQ ID NO: 292002 - DNA, 33 bp, Homo sapien
acactcatgttcaaaattctttcttcatgtcag

SEQ ID NO: 292003 - DNA, 33 bp, Homo sapien
cagcaccacagatatactaaacgttcagaaaac

SEQ ID NO: 292004 - DNA, 33 bp, Homo sapien
cagcaccacagatatagtaaacgttcagaaaac

SEQ ID NO: 292005 - DNA, 33 bp, Homo sapien
tggggatggtgatgtaaggcatgagggaatctt

SEQ ID NO: 292006 - DNA, 33 bp, Homo sapien
tggggatggtgatgtagggcatgagggaatctt

SEQ ID NO: 292007 - DNA, 33 bp, Homo sapien
tgatagtcaagacaataagaaaaatgctttaaa

SEQ ID NO: 292008 - DNA, 33 bp, Homo sapien
tgatagtcaagacaatgagaaaaatgctttaaa

SEQ ID NO: 292009 - DNA, 33 bp, Homo sapien
tttgatagaaaagaaaaactccctttcaggtga

SEQ ID NO: 292010 - DNA, 33 bp, Homo sapien
tttgatagaaaagaaacactccctttcaggtga

SEQ ID NO: 292011 - DNA, 33 bp, Homo sapien
attgccaattaattgaccttagctgttgtaaaa

SEQ ID NO: 292012 - DNA, 33 bp, Homo sapien
attgccaattaattgatcttagctgttgtaaaa

SEQ ID NO: 292013 - DNA, 33 bp, Homo sapien
ccatcagattttccacggagttcgttcaaaagt

SEQ ID NO: 292014 - DNA, 33 bp, Homo sapien
ccatcagattttccactgagttcgttcaaaagt

SEQ ID NO: 292015 - DNA, 33 bp, Homo sapien
gttaacgaccacataaatatttgcttcagtgag

SEQ ID NO: 292016 - DNA, 33 bp, Homo sapien
gttaacgaccacataactatttgcttcagtgag

SEQ ID NO: 292017 - DNA, 33 bp, Homo sapien
aaatccacagtaaaacagaaagaggctacagtt

SEQ ID NO: 292018 - DNA, 33 bp, Homo sapien
aaatccacagtaaaactgaaagaggctacagtt

SEQ ID NO: 292019 - DNA, 33 bp, Homo sapien
ggcactatttgaatctaaactattctatgtgct

SEQ ID NO: 292020 - DNA, 33 bp, Homo sapien
ggcactatttgaatctgaactattctatgtgct

SEQ ID NO: 292021 - DNA, 33 bp, Homo sapien
tgaaatgtttaagaaacgttgaaactggatatc

SEQ ID NO: 292022 - DNA, 33 bp, Homo sapien
tgaaatgtttaagaaatgttgaaactggatatc

SEQ ID NO: 292023 - DNA, 33 bp, Homo sapien
aaggacagctaaggaaactggaaatggactctt

SEQ ID NO: 292024 - DNA, 33 bp, Homo sapien
aaggacagctaaggaagctggaaatggactctt

SEQ ID NO: 292025 - DNA, 33 bp, Homo sapien
cagtggtcttgtttctcacccgctgacactatg

SEQ ID NO: 292026 - DNA, 33 bp, Homo sapien
cagtggtcttgtttcttacccgctgacactatg

SEQ ID NO: 292027 - DNA, 33 bp, Homo sapien
tatcaaatccagaaaaccataagccatctgcag

SEQ ID NO: 292028 - DNA, 33 bp, Homo sapien
tatcaaatccagaaaatcataagccatctgcag

SEQ ID NO: 292029 - DNA, 33 bp, Homo sapien
atcaatgtgacagataaacttgccttgagcaca

SEQ ID NO: 292030 - DNA, 33 bp, Homo sapien
atcaatgtgacagatacacttgccttgagcaca

SEQ ID NO: 292031 - DNA, 33 bp, Homo sapien
cttatccaaaaagcagcaagttctcactttagt

SEQ ID NO: 292032 - DNA, 33 bp, Homo sapien
cttatccaaaaagcaggaagttctcactttagt

SEQ ID NO: 292033 - DNA, 33 bp, Homo sapien
gattgatatctgtttgaaactattcattagctc

SEQ ID NO: 292034 - DNA, 33 bp, Homo sapien
gattgatatctgtttggaactattcattagctc

SEQ ID NO: 292035 - DNA, 33 bp, Homo sapien
aaattaacttacattcaaatctgaaagtcaatg

SEQ ID NO: 292036 - DNA, 33 bp, Homo sapien
aaattaacttacattcgaatctgaaagtcaatg

SEQ ID NO: 292037 - DNA, 33 bp, Homo sapien
aactagtagcattcggaaccccatatttttgta

SEQ ID NO: 292038 - DNA, 33 bp, Homo sapien
aactagtagcattcgggaccccatatttttgta

SEQ ID NO: 292039 - DNA, 33 bp, Homo sapien
ggttgcaaactttgaaatcatttgtgtataaga

SEQ ID NO: 292040 - DNA, 33 bp, Homo sapien
ggttgcaaactttgaattcatttgtgtataaga

SEQ ID NO: 292041 - DNA, 33 bp, Homo sapien
ggttctacatgagaaacgtggtatataaatgta

SEQ ID NO: 292042 - DNA, 33 bp, Homo sapien
ggttctacatgagaaatgtggtatataaatgta

SEQ ID NO: 292043 - DNA, 33 bp, Homo sapien
atctaactacttaggaaattagtggtaagtgcc

SEQ ID NO: 292044 - DNA, 33 bp, Homo sapien
atctaactacttaggacattagtggtaagtgcc

SEQ ID NO: 292045 - DNA, 33 bp, Homo sapien
tatcgagcatctgaaaatataatccatgacatc

SEQ ID NO: 292046 - DNA, 33 bp, Homo sapien
tatcgagcatctgaaagtataatccatgacatc

SEQ ID NO: 292047 - DNA, 33 bp, Homo sapien
gcagtaaatcattttccatttgggtgagtgaca

SEQ ID NO: 292048 - DNA, 33 bp, Homo sapien
gcagtaaatcattttctatttgggtgagtgaca

SEQ ID NO: 292049 - DNA, 33 bp, Homo sapien
atgatgctatttgaaacactaagtggaaagaaa

SEQ ID NO: 292050 - DNA, 33 bp, Homo sapien
atgatgctatttgaaatactaagtggaaagaaa

SEQ ID NO: 292051 - DNA, 33 bp, Homo sapien
cttacatgggggaataataacatcctggaacaa

SEQ ID NO: 292052 - DNA, 33 bp, Homo sapien
cttacatgggggaatactaacatcctggaacaa

SEQ ID NO: 292053 - DNA, 33 bp, Homo sapien
aatttagactgtggcaaactctatgggataaat

SEQ ID NO: 292054 - DNA, 33 bp, Homo sapien
aatttagactgtggcagactctatgggataaat

SEQ ID NO: 292055 - DNA, 33 bp, Homo sapien
agaaaggtaaactctaaatggctgctatgaagc

SEQ ID NO: 292056 - DNA, 33 bp, Homo sapien
agaaaggtaaactctagatggctgctatgaagc

SEQ ID NO: 292057 - DNA, 33 bp, Homo sapien
tctcaaggccagataactctagcctggcttcta

SEQ ID NO: 292058 - DNA, 33 bp, Homo sapien
tctcaaggccagataattctagcctggcttcta

SEQ ID NO: 292059 - DNA, 33 bp, Homo sapien
ttatctggccttgagactctaagaaggattttg

SEQ ID NO: 292060 - DNA, 33 bp, Homo sapien
ttatctggccttgagattctaagaaggattttg

SEQ ID NO: 292061 - DNA, 33 bp, Homo sapien
aagctgaaacagaggaaatcttcaagttagcgt

SEQ ID NO: 292062 - DNA, 33 bp, Homo sapien
aagctgaaacagaggagatcttcaagttagcgt

SEQ ID NO: 292063 - DNA, 33 bp, Homo sapien
caactaaggatcctcccaagttttgctttagtt

SEQ ID NO: 292064 - DNA, 33 bp, Homo sapien
caactaaggatcctccgaagttttgctttagtt

SEQ ID NO: 292065 - DNA, 33 bp, Homo sapien
cattctggaatattacacacttgttcttagatg

SEQ ID NO: 292066 - DNA, 33 bp, Homo sapien
cattctggaatattacgcacttgttcttagatg

SEQ ID NO: 292067 - DNA, 33 bp, Homo sapien
gaaatgcagcaaaaaaattcatagacaagggaa

SEQ ID NO: 292068 - DNA, 33 bp, Homo sapien
gaaatgcagcaaaaaacttcatagacaagggaa

SEQ ID NO: 292069 - DNA, 33 bp, Homo sapien
ttgttcaggttagtgaactgcagaacttttccc

SEQ ID NO: 292070 - DNA, 33 bp, Homo sapien
ttgttcaggttagtgacctgcagaacttttccc

SEQ ID NO: 292071 - DNA, 33 bp, Homo sapien
agaggagggaaggagacagggggtcatgatctg

SEQ ID NO: 292072 - DNA, 33 bp, Homo sapien
agaggagggaaggagagagggggtcatgatctg

SEQ ID NO: 292073 - DNA, 33 bp, Homo sapien
gggatatcttggccaacttcttttgtatttcaa

SEQ ID NO: 292074 - DNA, 33 bp, Homo sapien
gggatatcttggccaatttcttttgtatttcaa

SEQ ID NO: 292075 - DNA, 33 bp, Homo sapien
tgttcagataatcatcaaagggaaagtgcttga

SEQ ID NO: 292076 - DNA, 33 bp, Homo sapien
tgttcagataatcatcgaagggaaagtgcttga

SEQ ID NO: 292077 - DNA, 33 bp, Homo sapien
gcttacatgaatacaagaaagaaggtcagagaa

SEQ ID NO: 292078 - DNA, 33 bp, Homo sapien
gcttacatgaatacaataaagaaggtcagagaa

SEQ ID NO: 292079 - DNA, 33 bp, Homo sapien
atggatgcttaccatacagttagctctcctgtg

SEQ ID NO: 292080 - DNA, 33 bp, Homo sapien
atggatgcttaccatatagttagctctcctgtg

SEQ ID NO: 292081 - DNA, 33 bp, Homo sapien
gaatgggaacaccagcaaatattggaggtcaag

SEQ ID NO: 292082 - DNA, 33 bp, Homo sapien
gaatgggaacaccagcgaatattggaggtcaag

SEQ ID NO: 292083 - DNA, 33 bp, Homo sapien
tttcaccgtttataaaacagagccattttttcc

SEQ ID NO: 292084 - DNA, 33 bp, Homo sapien
tttcaccgtttataaagcagagccattttttcc

SEQ ID NO: 292085 - DNA, 33 bp, Homo sapien
tattccaatcattgaaaaatagctggctttgaa

SEQ ID NO: 292086 - DNA, 33 bp, Homo sapien
tattccaatcattgaagaatagctggctttgaa

SEQ ID NO: 292087 - DNA, 33 bp, Homo sapien
gtcataaatttgaagcaagtccatccagaaaga

SEQ ID NO: 292088 - DNA, 33 bp, Homo sapien
gtcataaatttgaagcgagtccatccagaaaga

SEQ ID NO: 292089 - DNA, 33 bp, Homo sapien
atgtaatgcaaggacaaaaaattgaccttcagc

SEQ ID NO: 292090 - DNA, 33 bp, Homo sapien
atgtaatgcaaggacagaaaattgaccttcagc

SEQ ID NO: 292091 - DNA, 33 bp, Homo sapien
tctgccggtaatgaaacaaggctttgctattgc

SEQ ID NO: 292092 - DNA, 33 bp, Homo sapien
tctgccggtaatgaaataaggctttgctattgc

SEQ ID NO: 292093 - DNA, 33 bp, Homo sapien
catagtaatggcaagaccaacacaacctctccc

SEQ ID NO: 292094 - DNA, 33 bp, Homo sapien
catagtaatggcaagatcaacacaacctctccc

SEQ ID NO: 292095 - DNA, 33 bp, Homo sapien
atttgtagtagcacctcaagtaaattggcttct

SEQ ID NO: 292096 - DNA, 33 bp, Homo sapien
atttgtagtagcacctgaagtaaattggcttct

SEQ ID NO: 292097 - DNA, 33 bp, Homo sapien
aaggataggacacaagactaaatacctttttct

SEQ ID NO: 292098 - DNA, 33 bp, Homo sapien
aaggataggacacaaggctaaatacctttttct

SEQ ID NO: 292099 - DNA, 33 bp, Homo sapien
acaaatgtattaaaacaatgactctcccttcta

SEQ ID NO: 292100 - DNA, 33 bp, Homo sapien
acaaatgtattaaaacgatgactctcccttcta

SEQ ID NO: 292101 - DNA, 33 bp, Homo sapien
tatttttatgttttaacgacacgaaaagcaaag

SEQ ID NO: 292102 - DNA, 33 bp, Homo sapien
tatttttatgttttaatgacacgaaaagcaaag

SEQ ID NO: 292103 - DNA, 33 bp, Homo sapien
ctctctcggacctcaaaattctggttcttaaac

SEQ ID NO: 292104 - DNA, 33 bp, Homo sapien
ctctctcggacctcaacattctggttcttaaac

SEQ ID NO: 292105 - DNA, 33 bp, Homo sapien
agaacagaaaactgaaaactgtatggtcccact

SEQ ID NO: 292106 - DNA, 33 bp, Homo sapien
agaacagaaaactgaatactgtatggtcccact

SEQ ID NO: 292107 - DNA, 33 bp, Homo sapien
actttcttcagcataaagtctgaaatgtaagtt

SEQ ID NO: 292108 - DNA, 33 bp, Homo sapien
actttcttcagcataaggtctgaaatgtaagtt

SEQ ID NO: 292109 - DNA, 33 bp, Homo sapien
tcacaaacacatgaaaagattaacaaactgtta

SEQ ID NO: 292110 - DNA, 33 bp, Homo sapien
tcacaaacacatgaaaggattaacaaactgtta

SEQ ID NO: 292111 - DNA, 33 bp, Homo sapien
cagaggtggacacaaaattcagagagaaaggag

SEQ ID NO: 292112 - DNA, 33 bp, Homo sapien
cagaggtggacacaaagttcagagagaaaggag

SEQ ID NO: 292113 - DNA, 33 bp, Homo sapien
caatatcctgaaaatcagaatagacaggaaaca

SEQ ID NO: 292114 - DNA, 33 bp, Homo sapien
caatatcctgaaaatcggaatagacaggaaaca

SEQ ID NO: 292115 - DNA, 33 bp, Homo sapien
cttgaaaagtggacaccgtaaataatacaatat

SEQ ID NO: 292116 - DNA, 33 bp, Homo sapien
cttgaaaagtggacactgtaaataatacaatat

SEQ ID NO: 292117 - DNA, 33 bp, Homo sapien
agttatcctctttacaatacagagatcatttgc

SEQ ID NO: 292118 - DNA, 33 bp, Homo sapien
agttatcctctttacagtacagagatcatttgc

SEQ ID NO: 292119 - DNA, 33 bp, Homo sapien
aattgcatcattaatacgaccgacatgagttac

SEQ ID NO: 292120 - DNA, 33 bp, Homo sapien
aattgcatcattaatatgaccgacatgagttac

SEQ ID NO: 292121 - DNA, 33 bp, Homo sapien
gaacttttagatggcaactttcataactacagg

SEQ ID NO: 292122 - DNA, 33 bp, Homo sapien
gaacttttagatggcacctttcataactacagg

SEQ ID NO: 292123 - DNA, 33 bp, Homo sapien
tcttaaaaagcagcaacgtcttgttttagaatt

SEQ ID NO: 292124 - DNA, 33 bp, Homo sapien
tcttaaaaagcagcaaggtcttgttttagaatt

SEQ ID NO: 292125 - DNA, 33 bp, Homo sapien
tatttcatctgcaaagaccatttagtgtaaaca

SEQ ID NO: 292126 - DNA, 33 bp, Homo sapien
tatttcatctgcaaaggccatttagtgtaaaca

SEQ ID NO: 292127 - DNA, 33 bp, Homo sapien
aagtgtatattcgcatgactttcactttgcttg

SEQ ID NO: 292128 - DNA, 33 bp, Homo sapien
aagtgtatattcgcattactttcactttgcttg

SEQ ID NO: 292129 - DNA, 33 bp, Homo sapien
aaggaagataggagaacagtggtagaggaatat

SEQ ID NO: 292130 - DNA, 33 bp, Homo sapien
aaggaagataggagaatagtggtagaggaatat

SEQ ID NO: 292131 - DNA, 33 bp, Homo sapien
cagggaaagaacaagaaaagaacagataaacaa

SEQ ID NO: 292132 - DNA, 33 bp, Homo sapien
cagggaaagaacaagagaagaacagataaacaa

SEQ ID NO: 292133 - DNA, 33 bp, Homo sapien
gtttgaatctggactcccaattattgtctattt

SEQ ID NO: 292134 - DNA, 33 bp, Homo sapien
gtttgaatctggactctcaattattgtctattt

SEQ ID NO: 292135 - DNA, 33 bp, Homo sapien
aaatattcacagaaaaatatatcgtcaaaattt

SEQ ID NO: 292136 - DNA, 33 bp, Homo sapien
aaatattcacagaaaattatatcgtcaaaattt

SEQ ID NO: 292137 - DNA, 33 bp, Homo sapien
gcaagatgaaacgacaatgaagaagctcagata

SEQ ID NO: 292138 - DNA, 33 bp, Homo sapien
gcaagatgaaacgacagtgaagaagctcagata

SEQ ID NO: 292139 - DNA, 33 bp, Homo sapien
cagtaaattgtacataacaagatactttctcct

SEQ ID NO: 292140 - DNA, 33 bp, Homo sapien
cagtaaattgtacataccaagatactttctcct

SEQ ID NO: 292141 - DNA, 33 bp, Homo sapien
gtttaaaatggcaatcgcacactgacaattacc

SEQ ID NO: 292142 - DNA, 33 bp, Homo sapien
gtttaaaatggcaatctcacactgacaattacc

SEQ ID NO: 292143 - DNA, 33 bp, Homo sapien
gaatcccaagttagaaatggctccagtagtgat

SEQ ID NO: 292144 - DNA, 33 bp, Homo sapien
gaatcccaagttagaagtggctccagtagtgat

SEQ ID NO: 292145 - DNA, 33 bp, Homo sapien
aactctataagaacagaaatgtttgactcttgt

SEQ ID NO: 292146 - DNA, 33 bp, Homo sapien
aactctataagaacaggaatgtttgactcttgt

SEQ ID NO: 292147 - DNA, 33 bp, Homo sapien
ggcacattgtcaagacgcaaaaaagtatttgtt

SEQ ID NO: 292148 - DNA, 33 bp, Homo sapien
ggcacattgtcaagactcaaaaaagtatttgtt

SEQ ID NO: 292149 - DNA, 33 bp, Homo sapien
tggtgtgggaatatgaaatttttatataaactt

SEQ ID NO: 292150 - DNA, 33 bp, Homo sapien
tggtgtgggaatatgacatttttatataaactt

SEQ ID NO: 292151 - DNA, 33 bp, Homo sapien
aaaaacaatatctagccgaccctggaacaacac

SEQ ID NO: 292152 - DNA, 33 bp, Homo sapien
aaaaacaatatctagctgaccctggaacaacac

SEQ ID NO: 292153 - DNA, 33 bp, Homo sapien
agtacgtgcttcctccccatattttctgttaag

SEQ ID NO: 292154 - DNA, 33 bp, Homo sapien
agtacgtgcttcctcctcatattttctgttaag

SEQ ID NO: 292155 - DNA, 33 bp, Homo sapien
caagaagtgcacacaaacaagaataatgcacag

SEQ ID NO: 292156 - DNA, 33 bp, Homo sapien
caagaagtgcacacaagcaagaataatgcacag

SEQ ID NO: 292157 - DNA, 33 bp, Homo sapien
ggtcacgaaaatatccacctatgcttacatcta

SEQ ID NO: 292158 - DNA, 33 bp, Homo sapien
ggtcacgaaaatatccgcctatgcttacatcta

SEQ ID NO: 292159 - DNA, 33 bp, Homo sapien
gacatgttattccacacagtgaagggtctgtga

SEQ ID NO: 292160 - DNA, 33 bp, Homo sapien
gacatgttattccacagagtgaagggtctgtga

SEQ ID NO: 292161 - DNA, 33 bp, Homo sapien
catacagttgttgagacaatcttacacacttag

SEQ ID NO: 292162 - DNA, 33 bp, Homo sapien
catacagttgttgagataatcttacacacttag

SEQ ID NO: 292163 - DNA, 33 bp, Homo sapien
gaattgatgtggatcagtgaagtggtattcaac

SEQ ID NO: 292164 - DNA, 33 bp, Homo sapien
gaattgatgtggatcattgaagtggtattcaac

SEQ ID NO: 292165 - DNA, 33 bp, Homo sapien
cagcttggatactctcaaatatttatagtaaaa

SEQ ID NO: 292166 - DNA, 33 bp, Homo sapien
cagcttggatactctcgaatatttatagtaaaa

SEQ ID NO: 292167 - DNA, 33 bp, Homo sapien
ccactggctagcctggaatctcaaaatcagtta

SEQ ID NO: 292168 - DNA, 33 bp, Homo sapien
ccactggctagcctggtatctcaaaatcagtta

SEQ ID NO: 292169 - DNA, 33 bp, Homo sapien
ctcaacggttagtaaactatttgttacatgaga

SEQ ID NO: 292170 - DNA, 33 bp, Homo sapien
ctcaacggttagtaaattatttgttacatgaga

SEQ ID NO: 292171 - DNA, 33 bp, Homo sapien
acacactcttcgagggaatagaaataaagtcaa

SEQ ID NO: 292172 - DNA, 33 bp, Homo sapien
acacactcttcgaggggatagaaataaagtcaa

SEQ ID NO: 292173 - DNA, 33 bp, Homo sapien
catgcctttttaagaccacttttgtaagattat

SEQ ID NO: 292174 - DNA, 33 bp, Homo sapien
catgcctttttaagactacttttgtaagattat

SEQ ID NO: 292175 - DNA, 33 bp, Homo sapien
aaaacattcctgtgtccaaatcctttgataata

SEQ ID NO: 292176 - DNA, 33 bp, Homo sapien
aaaacattcctgtgtcgaaatcctttgataata

SEQ ID NO: 292177 - DNA, 33 bp, Homo sapien
agcatgagtccttgcaataatctttccaatata

SEQ ID NO: 292178 - DNA, 33 bp, Homo sapien
agcatgagtccttgcagtaatctttccaatata

SEQ ID NO: 292179 - DNA, 33 bp, Homo sapien
tacctcatagtgttaaaagttaatgcactgatg

SEQ ID NO: 292180 - DNA, 33 bp, Homo sapien
tacctcatagtgttaagagttaatgcactgatg

SEQ ID NO: 292181 - DNA, 33 bp, Homo sapien
catttgaaaatgagtgaaagctttgaaagccac

SEQ ID NO: 292182 - DNA, 33 bp, Homo sapien
catttgaaaatgagtggaagctttgaaagccac

SEQ ID NO: 292183 - DNA, 33 bp, Homo sapien
tatagaagctatcacaaaacacattgactttaa

SEQ ID NO: 292184 - DNA, 33 bp, Homo sapien
tatagaagctatcacagaacacattgactttaa

SEQ ID NO: 292185 - DNA, 33 bp, Homo sapien
ttaatgcatgagaaggcataaaagatagcactg

SEQ ID NO: 292186 - DNA, 33 bp, Homo sapien
ttaatgcatgagaaggtataaaagatagcactg

SEQ ID NO: 292187 - DNA, 33 bp, Homo sapien
tatcttcgcaagaacaacgtgacaaataatgaa

SEQ ID NO: 292188 - DNA, 33 bp, Homo sapien
tatcttcgcaagaacatcgtgacaaataatgaa

SEQ ID NO: 292189 - DNA, 33 bp, Homo sapien
aaatgcagggtaaaaaacaagcttcgagcttca

SEQ ID NO: 292190 - DNA, 33 bp, Homo sapien
aaatgcagggtaaaaagcaagcttcgagcttca

SEQ ID NO: 292191 - DNA, 33 bp, Homo sapien
taaaaagtcaagcatcagatagagctggagcag

SEQ ID NO: 292192 - DNA, 33 bp, Homo sapien
taaaaagtcaagcatcggatagagctggagcag

SEQ ID NO: 292193 - DNA, 33 bp, Homo sapien
agaggtagacaagaacaggagtgatatagcacc

SEQ ID NO: 292194 - DNA, 33 bp, Homo sapien
agaggtagacaagaacgggagtgatatagcacc

SEQ ID NO: 292195 - DNA, 33 bp, Homo sapien
aaatccttttcatgccactatggaatgtcccat

SEQ ID NO: 292196 - DNA, 33 bp, Homo sapien
aaatccttttcatgcctctatggaatgtcccat

SEQ ID NO: 292197 - DNA, 33 bp, Homo sapien
ctgctctgatccagtacgctgttgcaatgtggt

SEQ ID NO: 292198 - DNA, 33 bp, Homo sapien
ctgctctgatccagtatgctgttgcaatgtggt

SEQ ID NO: 292199 - DNA, 33 bp, Homo sapien
tctcagcagaggtcacaaaataggcctcagcca

SEQ ID NO: 292200 - DNA, 33 bp, Homo sapien
tctcagcagaggtcaccaaataggcctcagcca

SEQ ID NO: 292201 - DNA, 33 bp, Homo sapien
tgaatattgattttgcaccatgtacatacacac

SEQ ID NO: 292202 - DNA, 33 bp, Homo sapien
tgaatattgattttgcgccatgtacatacacac

SEQ ID NO: 292203 - DNA, 33 bp, Homo sapien
tatgtaatagtttaccacattatttcagccttc

SEQ ID NO: 292204 - DNA, 33 bp, Homo sapien
tatgtaatagtttaccgcattatttcagccttc

SEQ ID NO: 292205 - DNA, 33 bp, Homo sapien
ttgtttttaaatgaaacttcttgtgcttgtcca

SEQ ID NO: 292206 - DNA, 33 bp, Homo sapien
ttgtttttaaatgaaatttcttgtgcttgtcca

SEQ ID NO: 292207 - DNA, 33 bp, Homo sapien
aagggttgatataaccaaaacatgtacttttta

SEQ ID NO: 292208 - DNA, 33 bp, Homo sapien
aagggttgatataaccgaaacatgtacttttta

SEQ ID NO: 292209 - DNA, 33 bp, Homo sapien
atcctaattcaatcaacccctatgcaataacct

SEQ ID NO: 292210 - DNA, 33 bp, Homo sapien
atcctaattcaatcaatccctatgcaataacct

SEQ ID NO: 292211 - DNA, 33 bp, Homo sapien
tagacttcggactcggaaatcacactatacatg

SEQ ID NO: 292212 - DNA, 33 bp, Homo sapien
tagacttcggactcgggaatcacactatacatg

SEQ ID NO: 292213 - DNA, 33 bp, Homo sapien
cactactgtgagattgacaatacctaactctta

SEQ ID NO: 292214 - DNA, 33 bp, Homo sapien
cactactgtgagattggcaatacctaactctta

SEQ ID NO: 292215 - DNA, 33 bp, Homo sapien
tagtctatagatgtaaaaagaccacgtggttca

SEQ ID NO: 292216 - DNA, 33 bp, Homo sapien
tagtctatagatgtaacaagaccacgtggttca

SEQ ID NO: 292217 - DNA, 33 bp, Homo sapien
aatggtagaaagttgcgaatttaacaatatggg

SEQ ID NO: 292218 - DNA, 33 bp, Homo sapien
aatggtagaaagttgctaatttaacaatatggg

SEQ ID NO: 292219 - DNA, 33 bp, Homo sapien
tttatgaatgacatcccgatttgaataaaggaa

SEQ ID NO: 292220 - DNA, 33 bp, Homo sapien
tttatgaatgacatcctgatttgaataaaggaa

SEQ ID NO: 292221 - DNA, 33 bp, Homo sapien
gccagaatgtcttccacgtttcaaaggttttca

SEQ ID NO: 292222 - DNA, 33 bp, Homo sapien
gccagaatgtcttccatgtttcaaaggttttca

SEQ ID NO: 292223 - DNA, 33 bp, Homo sapien
tcactctgttgtgataagaacagcagcactgca

SEQ ID NO: 292224 - DNA, 33 bp, Homo sapien
tcactctgttgtgatacgaacagcagcactgca

SEQ ID NO: 292225 - DNA, 33 bp, Homo sapien
tggaagaacaagtagaagttctgtctctgtgtg

SEQ ID NO: 292226 - DNA, 33 bp, Homo sapien
tggaagaacaagtagaggttctgtctctgtgtg

SEQ ID NO: 292227 - DNA, 33 bp, Homo sapien
acctttttgatgcaatcacaatgatgtcacaac

SEQ ID NO: 292228 - DNA, 33 bp, Homo sapien
acctttttgatgcaattacaatgatgtcacaac

SEQ ID NO: 292229 - DNA, 33 bp, Homo sapien
gacgtgcatggaagtaataagatcaagggaatc

SEQ ID NO: 292230 - DNA, 33 bp, Homo sapien
gacgtgcatggaagtagtaagatcaagggaatc

SEQ ID NO: 292231 - DNA, 33 bp, Homo sapien
ttggtggtgggaacaacggggagactgatgtgt

SEQ ID NO: 292232 - DNA, 33 bp, Homo sapien
ttggtggtgggaacaatggggagactgatgtgt

SEQ ID NO: 292233 - DNA, 33 bp, Homo sapien
gaagtctcattgattgaaagattcttccactat

SEQ ID NO: 292234 - DNA, 33 bp, Homo sapien
gaagtctcattgattgcaagattcttccactat

SEQ ID NO: 292235 - DNA, 33 bp, Homo sapien
tgtatacaatgttaaaagcttcattttatatgg

SEQ ID NO: 292236 - DNA, 33 bp, Homo sapien
tgtatacaatgttaaatgcttcattttatatgg

SEQ ID NO: 292237 - DNA, 33 bp, Homo sapien
agaaagggccacaccccatgtacatttgaaata

SEQ ID NO: 292238 - DNA, 33 bp, Homo sapien
agaaagggccacaccctatgtacatttgaaata

SEQ ID NO: 292239 - DNA, 33 bp, Homo sapien
tttctttccaggcccagtcgtcatttggttata

SEQ ID NO: 292240 - DNA, 33 bp, Homo sapien
tttctttccaggcccattcgtcatttggttata

SEQ ID NO: 292241 - DNA, 33 bp, Homo sapien
cactacacacggataacagggatctgaggtaaa

SEQ ID NO: 292242 - DNA, 33 bp, Homo sapien
cactacacacggataatagggatctgaggtaaa

SEQ ID NO: 292243 - DNA, 33 bp, Homo sapien
gaaagaaaatggaagcaagaactgagtgggagg

SEQ ID NO: 292244 - DNA, 33 bp, Homo sapien
gaaagaaaatggaagcgagaactgagtgggagg

SEQ ID NO: 292245 - DNA, 33 bp, Homo sapien
ttctcaggcaaggttaaggaggaaacgtggtca

SEQ ID NO: 292246 - DNA, 33 bp, Homo sapien
ttctcaggcaaggttagggaggaaacgtggtca

SEQ ID NO: 292247 - DNA, 33 bp, Homo sapien
gaagcaaactcaccaaaccgagacagccaagaa

SEQ ID NO: 292248 - DNA, 33 bp, Homo sapien
gaagcaaactcaccaacccgagacagccaagaa

SEQ ID NO: 292249 - DNA, 33 bp, Homo sapien
tacaccttctccagaacgtatcttaagtgaaac

SEQ ID NO: 292250 - DNA, 33 bp, Homo sapien
tacaccttctccagaatgtatcttaagtgaaac

SEQ ID NO: 292251 - DNA, 33 bp, Homo sapien
tggcaaggcaatcagacccagaggaaggagctg

SEQ ID NO: 292252 - DNA, 33 bp, Homo sapien
tggcaaggcaatcagatccagaggaaggagctg

SEQ ID NO: 292253 - DNA, 33 bp, Homo sapien
gtcctccatttaagaacatcatgagtactcacc

SEQ ID NO: 292254 - DNA, 33 bp, Homo sapien
gtcctccatttaagaagatcatgagtactcacc

SEQ ID NO: 292255 - DNA, 33 bp, Homo sapien
aaaggcattttcaaaccgtcctaagcacaggga

SEQ ID NO: 292256 - DNA, 33 bp, Homo sapien
aaaggcattttcaaactgtcctaagcacaggga

SEQ ID NO: 292257 - DNA, 33 bp, Homo sapien
agcataactctatttccctttaccaatccacag

SEQ ID NO: 292258 - DNA, 33 bp, Homo sapien
agcataactctatttctctttaccaatccacag

SEQ ID NO: 292259 - DNA, 33 bp, Homo sapien
acaggtgcattttaatgacatgaaaccactaat

SEQ ID NO: 292260 - DNA, 33 bp, Homo sapien
acaggtgcattttaattacatgaaaccactaat

SEQ ID NO: 292261 - DNA, 33 bp, Homo sapien
gggaggcagacagataccaacttggcaatttaa

SEQ ID NO: 292262 - DNA, 33 bp, Homo sapien
gggaggcagacagatagcaacttggcaatttaa

SEQ ID NO: 292263 - DNA, 33 bp, Homo sapien
aaactggcttatcaagaataatctcatgcctaa

SEQ ID NO: 292264 - DNA, 33 bp, Homo sapien
aaactggcttatcaaggataatctcatgcctaa

SEQ ID NO: 292265 - DNA, 33 bp, Homo sapien
tttgaaatcttgataaagcaaatagatatactt

SEQ ID NO: 292266 - DNA, 33 bp, Homo sapien
tttgaaatcttgataaggcaaatagatatactt

SEQ ID NO: 292267 - DNA, 33 bp, Homo sapien
tattattataaagtaacgtaagaggctgaaata

SEQ ID NO: 292268 - DNA, 33 bp, Homo sapien
tattattataaagtaatgtaagaggctgaaata

SEQ ID NO: 292269 - DNA, 33 bp, Homo sapien
cgtgtaggtgtgtctcacaaaatctgaagtcta

SEQ ID NO: 292270 - DNA, 33 bp, Homo sapien
cgtgtaggtgtgtctcgcaaaatctgaagtcta

SEQ ID NO: 292271 - DNA, 33 bp, Homo sapien
tcataattcatgcaaaattggggtgtaacttta

SEQ ID NO: 292272 - DNA, 33 bp, Homo sapien
tcataattcatgcaaatttggggtgtaacttta

SEQ ID NO: 292273 - DNA, 33 bp, Homo sapien
ctctagactttctccccctatgctcctccctgg

SEQ ID NO: 292274 - DNA, 33 bp, Homo sapien
ctctagactttctccctctatgctcctccctgg

SEQ ID NO: 292275 - DNA, 33 bp, Homo sapien
tgcactgagtcctgccaaaagctatttcttacc

SEQ ID NO: 292276 - DNA, 33 bp, Homo sapien
tgcactgagtcctgccgaaagctatttcttacc

SEQ ID NO: 292277 - DNA, 33 bp, Homo sapien
acccttattatctcccaactgtgactttcacag

SEQ ID NO: 292278 - DNA, 33 bp, Homo sapien
acccttattatctcccgactgtgactttcacag

SEQ ID NO: 292279 - DNA, 33 bp, Homo sapien
tagttattatgtctgaccttcaggtgacagtgt

SEQ ID NO: 292280 - DNA, 33 bp, Homo sapien
tagttattatgtctgatcttcaggtgacagtgt

SEQ ID NO: 292281 - DNA, 33 bp, Homo sapien
taaacaagagaaatgacataaaatgatgttgga

SEQ ID NO: 292282 - DNA, 33 bp, Homo sapien
taaacaagagaaatgagataaaatgatgttgga

SEQ ID NO: 292283 - DNA, 33 bp, Homo sapien
aacatttataatggcacggctcataaaaatcaa

SEQ ID NO: 292284 - DNA, 33 bp, Homo sapien
aacatttataatggcatggctcataaaaatcaa

SEQ ID NO: 292285 - DNA, 33 bp, Homo sapien
tagaaatcgtggaaaacactggacttgtgtata

SEQ ID NO: 292286 - DNA, 33 bp, Homo sapien
tagaaatcgtggaaaatactggacttgtgtata

SEQ ID NO: 292287 - DNA, 33 bp, Homo sapien
gtctgcctttattgtcacattttgttgattttc

SEQ ID NO: 292288 - DNA, 33 bp, Homo sapien
gtctgcctttattgtcgcattttgttgattttc

SEQ ID NO: 292289 - DNA, 33 bp, Homo sapien
tgtgtccacttctttcaaaatttgtgaccaacc

SEQ ID NO: 292290 - DNA, 33 bp, Homo sapien
tgtgtccacttctttccaaatttgtgaccaacc

SEQ ID NO: 292291 - DNA, 33 bp, Homo sapien
aaaaataatccaattagagttttacagcacaaa

SEQ ID NO: 292292 - DNA, 33 bp, Homo sapien
aaaaataatccaattatagttttacagcacaaa

SEQ ID NO: 292293 - DNA, 33 bp, Homo sapien
gcagtctggtcacaacaacttaggtatcactaa

SEQ ID NO: 292294 - DNA, 33 bp, Homo sapien
gcagtctggtcacaaccacttaggtatcactaa

SEQ ID NO: 292295 - DNA, 33 bp, Homo sapien
attgagattccagaaacatagctaacccaaatt

SEQ ID NO: 292296 - DNA, 33 bp, Homo sapien
attgagattccagaaatatagctaacccaaatt

SEQ ID NO: 292297 - DNA, 33 bp, Homo sapien
tcctgtgttttattaaaatcgccagtgctgtct

SEQ ID NO: 292298 - DNA, 33 bp, Homo sapien
tcctgtgttttattaacatcgccagtgctgtct

SEQ ID NO: 292299 - DNA, 33 bp, Homo sapien
agtagttgctctataactatttgtgtccacaga

SEQ ID NO: 292300 - DNA, 33 bp, Homo sapien
agtagttgctctataattatttgtgtccacaga

SEQ ID NO: 292301 - DNA, 33 bp, Homo sapien
attctggttcattcacaaatcagtttttatttt

SEQ ID NO: 292302 - DNA, 33 bp, Homo sapien
attctggttcattcacgaatcagtttttatttt

SEQ ID NO: 292303 - DNA, 33 bp, Homo sapien
ctcctagaggatgttgaaatctttacttaggtc

SEQ ID NO: 292304 - DNA, 33 bp, Homo sapien
ctcctagaggatgttgcaatctttacttaggtc

SEQ ID NO: 292305 - DNA, 33 bp, Homo sapien
gctttggtggcacaaactttaccctcgccatga

SEQ ID NO: 292306 - DNA, 33 bp, Homo sapien
gctttggtggcacaaattttaccctcgccatga

SEQ ID NO: 292307 - DNA, 33 bp, Homo sapien
agaatacctacaagacagacacagagatgtcag

SEQ ID NO: 292308 - DNA, 33 bp, Homo sapien
agaatacctacaagacggacacagagatgtcag

SEQ ID NO: 292309 - DNA, 33 bp, Homo sapien
ggccatttgaatgaaccatccaactattccttt

SEQ ID NO: 292310 - DNA, 33 bp, Homo sapien
ggccatttgaatgaactatccaactattccttt

SEQ ID NO: 292311 - DNA, 33 bp, Homo sapien
tgctgaaagcaatttacggactcaaagctattt

SEQ ID NO: 292312 - DNA, 33 bp, Homo sapien
tgctgaaagcaatttatggactcaaagctattt

SEQ ID NO: 292313 - DNA, 33 bp, Homo sapien
atggtgaatttttgtaacatctggttgtttaaa

SEQ ID NO: 292314 - DNA, 33 bp, Homo sapien
atggtgaatttttgtaccatctggttgtttaaa

SEQ ID NO: 292315 - DNA, 33 bp, Homo sapien
aatgtcaccaatattacgccttagcaaagaact

SEQ ID NO: 292316 - DNA, 33 bp, Homo sapien
aatgtcaccaatattatgccttagcaaagaact

SEQ ID NO: 292317 - DNA, 33 bp, Homo sapien
ataccccacttgtggcaccgattttctgtatta

SEQ ID NO: 292318 - DNA, 33 bp, Homo sapien
ataccccacttgtggcgccgattttctgtatta

SEQ ID NO: 292319 - DNA, 33 bp, Homo sapien
ttctttgaattttatccaaatcctatcaaacac

SEQ ID NO: 292320 - DNA, 33 bp, Homo sapien
ttctttgaattttatcgaaatcctatcaaacac

SEQ ID NO: 292321 - DNA, 33 bp, Homo sapien
atttgccacttccaaaagattgctaagatttta

SEQ ID NO: 292322 - DNA, 33 bp, Homo sapien
atttgccacttccaaaggattgctaagatttta

SEQ ID NO: 292323 - DNA, 33 bp, Homo sapien
taaagatgaatccaaccgctataagatttttct

SEQ ID NO: 292324 - DNA, 33 bp, Homo sapien
taaagatgaatccaactgctataagatttttct

SEQ ID NO: 292325 - DNA, 33 bp, Homo sapien
tatcacagtgcaatgaacatttccatattaggt

SEQ ID NO: 292326 - DNA, 33 bp, Homo sapien
tatcacagtgcaatgagcatttccatattaggt

SEQ ID NO: 292327 - DNA, 33 bp, Homo sapien
gattcttactgttagggcattagtgcattaagc

SEQ ID NO: 292328 - DNA, 33 bp, Homo sapien
gattcttactgttaggtcattagtgcattaagc

SEQ ID NO: 292329 - DNA, 33 bp, Homo sapien
tgataggtaaacaagagcattggtgtgttagga

SEQ ID NO: 292330 - DNA, 33 bp, Homo sapien
tgataggtaaacaagatcattggtgtgttagga

SEQ ID NO: 292331 - DNA, 33 bp, Homo sapien
cagaactgtgagataacgtattggttaaatcag

SEQ ID NO: 292332 - DNA, 33 bp, Homo sapien
cagaactgtgagataatgtattggttaaatcag

SEQ ID NO: 292333 - DNA, 33 bp, Homo sapien
taactaacccaaatggaactctctttgatagta

SEQ ID NO: 292334 - DNA, 33 bp, Homo sapien
taactaacccaaatggtactctctttgatagta

SEQ ID NO: 292335 - DNA, 33 bp, Homo sapien
aactatcaattcggctaaataattggtcaagaa

SEQ ID NO: 292336 - DNA, 33 bp, Homo sapien
aactatcaattcggctgaataattggtcaagaa

SEQ ID NO: 292337 - DNA, 33 bp, Homo sapien
gtaatggaagtcaaataaaattggttctttggt

SEQ ID NO: 292338 - DNA, 33 bp, Homo sapien
gtaatggaagtcaaatcaaattggttctttggt

SEQ ID NO: 292339 - DNA, 33 bp, Homo sapien
gcctttccacactactaagatatccctgtagga

SEQ ID NO: 292340 - DNA, 33 bp, Homo sapien
gcctttccacactactgagatatccctgtagga

SEQ ID NO: 292341 - DNA, 33 bp, Homo sapien
aaatcacggaaagcatcacacgttccccaaagg

SEQ ID NO: 292342 - DNA, 33 bp, Homo sapien
aaatcacggaaagcattacacgttccccaaagg

SEQ ID NO: 292343 - DNA, 33 bp, Homo sapien
acatctttattaagtgccaagtgtttatcttac

SEQ ID NO: 292344 - DNA, 33 bp, Homo sapien
acatctttattaagtgtcaagtgtttatcttac

SEQ ID NO: 292345 - DNA, 33 bp, Homo sapien
gacttaactgagcaaactgcctacttctcaaaa

SEQ ID NO: 292346 - DNA, 33 bp, Homo sapien
gacttaactgagcaaattgcctacttctcaaaa

SEQ ID NO: 292347 - DNA, 33 bp, Homo sapien
gttaactaaattctaacgcaaaacatgacaaaa

SEQ ID NO: 292348 - DNA, 33 bp, Homo sapien
gttaactaaattctaatgcaaaacatgacaaaa

SEQ ID NO: 292349 - DNA, 33 bp, Homo sapien
actccaagactatgtacgcaaatattcctacaa

SEQ ID NO: 292350 - DNA, 33 bp, Homo sapien
actccaagactatgtatgcaaatattcctacaa

SEQ ID NO: 292351 - DNA, 33 bp, Homo sapien
tttcttgagaggacaaatgctgtatccttacac

SEQ ID NO: 292352 - DNA, 33 bp, Homo sapien
tttcttgagaggacaagtgctgtatccttacac

SEQ ID NO: 292353 - DNA, 33 bp, Homo sapien
gaaaatgcagaaggaagtaatggcatagtgttg

SEQ ID NO: 292354 - DNA, 33 bp, Homo sapien
gaaaatgcagaaggaattaatggcatagtgttg

SEQ ID NO: 292355 - DNA, 33 bp, Homo sapien
gcttggtgtcacttgcagaaccagtgttagaag

SEQ ID NO: 292356 - DNA, 33 bp, Homo sapien
gcttggtgtcacttgccgaaccagtgttagaag

SEQ ID NO: 292357 - DNA, 33 bp, Homo sapien
aatcacatcaaagtaaacattcactgacctcac

SEQ ID NO: 292358 - DNA, 33 bp, Homo sapien
aatcacatcaaagtaaccattcactgacctcac

SEQ ID NO: 292359 - DNA, 33 bp, Homo sapien
tgagcacttgtagctacctttgaaaatagcatg

SEQ ID NO: 292360 - DNA, 33 bp, Homo sapien
tgagcacttgtagctatctttgaaaatagcatg

SEQ ID NO: 292361 - DNA, 33 bp, Homo sapien
aggagtagcaaaatccaattgaaaaaattctat

SEQ ID NO: 292362 - DNA, 33 bp, Homo sapien
aggagtagcaaaatccgattgaaaaaattctat

SEQ ID NO: 292363 - DNA, 33 bp, Homo sapien
cagcatgcctttgtcaggtatctggccatgtgc

SEQ ID NO: 292364 - DNA, 33 bp, Homo sapien
cagcatgcctttgtcatgtatctggccatgtgc

SEQ ID NO: 292365 - DNA, 33 bp, Homo sapien
cttcttgtggaagtcaatacattcagtacatac

SEQ ID NO: 292366 - DNA, 33 bp, Homo sapien
cttcttgtggaagtcagtacattcagtacatac

SEQ ID NO: 292367 - DNA, 33 bp, Homo sapien
ggagagcaacatccaaaggctggaaggcataac

SEQ ID NO: 292368 - DNA, 33 bp, Homo sapien
ggagagcaacatccaacggctggaaggcataac

SEQ ID NO: 292369 - DNA, 33 bp, Homo sapien
gacagtttgagggttccagcgtattattttgga

SEQ ID NO: 292370 - DNA, 33 bp, Homo sapien
gacagtttgagggttctagcgtattattttgga

SEQ ID NO: 292371 - DNA, 33 bp, Homo sapien
agggcttaactcccccaggaactgctggaagct

SEQ ID NO: 292372 - DNA, 33 bp, Homo sapien
agggcttaactcccccgggaactgctggaagct

SEQ ID NO: 292373 - DNA, 33 bp, Homo sapien
ccatagttagggaaccacttccaaacatactaa

SEQ ID NO: 292374 - DNA, 33 bp, Homo sapien
ccatagttagggaaccgcttccaaacatactaa

SEQ ID NO: 292375 - DNA, 33 bp, Homo sapien
agtatcatcctgacaccaaaacctgacagagat

SEQ ID NO: 292376 - DNA, 33 bp, Homo sapien
agtatcatcctgacacgaaaacctgacagagat

SEQ ID NO: 292377 - DNA, 33 bp, Homo sapien
gtggggtctcagagtacaccagtgggggcagcc

SEQ ID NO: 292378 - DNA, 33 bp, Homo sapien
gtggggtctcagagtagaccagtgggggcagcc

SEQ ID NO: 292379 - DNA, 33 bp, Homo sapien
gatacagacaatttctcaagcatttacagagaa

SEQ ID NO: 292380 - DNA, 33 bp, Homo sapien
gatacagacaatttctgaagcatttacagagaa

SEQ ID NO: 292381 - DNA, 33 bp, Homo sapien
aaaaaaaaacaagtacaatgaacagtcactata

SEQ ID NO: 292382 - DNA, 33 bp, Homo sapien
aaaaaaaaacaagtacgatgaacagtcactata

SEQ ID NO: 292383 - DNA, 33 bp, Homo sapien
aaatgtagctaagtcaaaaatatggtgccaact

SEQ ID NO: 292384 - DNA, 33 bp, Homo sapien
aaatgtagctaagtcagaaatatggtgccaact

SEQ ID NO: 292385 - DNA, 33 bp, Homo sapien
tcaccaagtgatgtaactgcaaataatgaaaaa

SEQ ID NO: 292386 - DNA, 33 bp, Homo sapien
tcaccaagtgatgtaagtgcaaataatgaaaaa

SEQ ID NO: 292387 - DNA, 33 bp, Homo sapien
ttaaacaaggcacttacgttacttaaaagcaac

SEQ ID NO: 292388 - DNA, 33 bp, Homo sapien
ttaaacaaggcacttaggttacttaaaagcaac

SEQ ID NO: 292389 - DNA, 33 bp, Homo sapien
tgccattctgtcttctaaatgtaaactaggtag

SEQ ID NO: 292390 - DNA, 33 bp, Homo sapien
tgccattctgtcttctcaatgtaaactaggtag

SEQ ID NO: 292391 - DNA, 33 bp, Homo sapien
tgaaacgacttgtaaccatgctgtatgagagaa

SEQ ID NO: 292392 - DNA, 33 bp, Homo sapien
tgaaacgacttgtaactatgctgtatgagagaa

SEQ ID NO: 292393 - DNA, 33 bp, Homo sapien
actgtattattaggcaaacttaaataacacttg

SEQ ID NO: 292394 - DNA, 33 bp, Homo sapien
actgtattattaggcagacttaaataacacttg

SEQ ID NO: 292395 - DNA, 33 bp, Homo sapien
agttgcttatcatgtccatacctaattaaacat

SEQ ID NO: 292396 - DNA, 33 bp, Homo sapien
agttgcttatcatgtctatacctaattaaacat

SEQ ID NO: 292397 - DNA, 33 bp, Homo sapien
gcaaatactgtctgtaaccattgcaacagctag

SEQ ID NO: 292398 - DNA, 33 bp, Homo sapien
gcaaatactgtctgtatccattgcaacagctag

SEQ ID NO: 292399 - DNA, 33 bp, Homo sapien
cactttgaaaactgtcacgtgccatgaagactt

SEQ ID NO: 292400 - DNA, 33 bp, Homo sapien
cactttgaaaactgtcgcgtgccatgaagactt

SEQ ID NO: 292401 - DNA, 33 bp, Homo sapien
catctgagtgtagacccgagaaagagcaaagca

SEQ ID NO: 292402 - DNA, 33 bp, Homo sapien
catctgagtgtagacctgagaaagagcaaagca

SEQ ID NO: 292403 - DNA, 33 bp, Homo sapien
ctctgagtcgatgacacataggctttattgaag

SEQ ID NO: 292404 - DNA, 33 bp, Homo sapien
ctctgagtcgatgacagataggctttattgaag

SEQ ID NO: 292405 - DNA, 33 bp, Homo sapien
cacccaggagttgagccgagtacccaatagtta

SEQ ID NO: 292406 - DNA, 33 bp, Homo sapien
cacccaggagttgagctgagtacccaatagtta

SEQ ID NO: 292407 - DNA, 33 bp, Homo sapien
attgggttcagatttgcatagtgcttcaatgca

SEQ ID NO: 292408 - DNA, 33 bp, Homo sapien
attgggttcagatttggatagtgcttcaatgca

SEQ ID NO: 292409 - DNA, 33 bp, Homo sapien
tcacgattcatctagaacatgaaactttgagat

SEQ ID NO: 292410 - DNA, 33 bp, Homo sapien
tcacgattcatctagagcatgaaactttgagat

SEQ ID NO: 292411 - DNA, 33 bp, Homo sapien
ttaaaatcatgtatgcacaaatctgtgtgactg

SEQ ID NO: 292412 - DNA, 33 bp, Homo sapien
ttaaaatcatgtatgcgcaaatctgtgtgactg

SEQ ID NO: 292413 - DNA, 33 bp, Homo sapien
aaagactaccgctagaccagtgaaattctcctc

SEQ ID NO: 292414 - DNA, 33 bp, Homo sapien
aaagactaccgctagatcagtgaaattctcctc

SEQ ID NO: 292415 - DNA, 33 bp, Homo sapien
catgtttaccaatgagaaattcatcataatttt

SEQ ID NO: 292416 - DNA, 33 bp, Homo sapien
catgtttaccaatgaggaattcatcataatttt

SEQ ID NO: 292417 - DNA, 33 bp, Homo sapien
acgtaattgtaaatataggattaaagtgcaagt

SEQ ID NO: 292418 - DNA, 33 bp, Homo sapien
acgtaattgtaaatatgggattaaagtgcaagt

SEQ ID NO: 292419 - DNA, 33 bp, Homo sapien
gcaaaatcaccgagccccatcctttttatctga

SEQ ID NO: 292420 - DNA, 33 bp, Homo sapien
gcaaaatcaccgagcctcatcctttttatctga

SEQ ID NO: 292421 - DNA, 33 bp, Homo sapien
cccagttcttccgcgacgatgggcaagagctca

SEQ ID NO: 292422 - DNA, 33 bp, Homo sapien
cccagttcttccgcgatgatgggcaagagctca

SEQ ID NO: 292423 - DNA, 33 bp, Homo sapien
caaaactgttatgaagcattattttctcaattc

SEQ ID NO: 292424 - DNA, 33 bp, Homo sapien
caaaactgttatgaaggattattttctcaattc

SEQ ID NO: 292425 - DNA, 33 bp, Homo sapien
aattgatcctgagtaccgctgttagattacttt

SEQ ID NO: 292426 - DNA, 33 bp, Homo sapien
aattgatcctgagtactgctgttagattacttt

SEQ ID NO: 292427 - DNA, 33 bp, Homo sapien
tatgtattgccattgtcaagcagaaagatttct

SEQ ID NO: 292428 - DNA, 33 bp, Homo sapien
tatgtattgccattgtgaagcagaaagatttct

SEQ ID NO: 292429 - DNA, 33 bp, Homo sapien
tagcaataaagtcaaactggaaatgctatacta

SEQ ID NO: 292430 - DNA, 33 bp, Homo sapien
tagcaataaagtcaaagtggaaatgctatacta

SEQ ID NO: 292431 - DNA, 33 bp, Homo sapien
gggctgagggccacaggcctacgatggcaggat

SEQ ID NO: 292432 - DNA, 33 bp, Homo sapien
gggctgagggccacagtcctacgatggcaggat

SEQ ID NO: 292433 - DNA, 33 bp, Homo sapien
gtgagaccctcaacacagaatctagctgaacca

SEQ ID NO: 292434 - DNA, 33 bp, Homo sapien
gtgagaccctcaacacggaatctagctgaacca

SEQ ID NO: 292435 - DNA, 33 bp, Homo sapien
aaagggtctaaaaaacacttccaagctgaattg

SEQ ID NO: 292436 - DNA, 33 bp, Homo sapien
aaagggtctaaaaaacgcttccaagctgaattg

SEQ ID NO: 292437 - DNA, 33 bp, Homo sapien
tggctgtgccgcattacagcagccgtgggtgta

SEQ ID NO: 292438 - DNA, 33 bp, Homo sapien
tggctgtgccgcattatagcagccgtgggtgta

SEQ ID NO: 292439 - DNA, 33 bp, Homo sapien
ctgagctggaaaaaaaactgttccctgtgccgt

SEQ ID NO: 292440 - DNA, 33 bp, Homo sapien
ctgagctggaaaaaaagctgttccctgtgccgt

SEQ ID NO: 292441 - DNA, 33 bp, Homo sapien
actttaccttccttcaatacatagagaatgcaa

SEQ ID NO: 292442 - DNA, 33 bp, Homo sapien
actttaccttccttcattacatagagaatgcaa

SEQ ID NO: 292443 - DNA, 33 bp, Homo sapien
tcagcattttgaatgaagttgaatatgagaagc

SEQ ID NO: 292444 - DNA, 33 bp, Homo sapien
tcagcattttgaatgaggttgaatatgagaagc

SEQ ID NO: 292445 - DNA, 33 bp, Homo sapien
ttgaatgctggaaagacggaaagagactattaa

SEQ ID NO: 292446 - DNA, 33 bp, Homo sapien
ttgaatgctggaaagatggaaagagactattaa

SEQ ID NO: 292447 - DNA, 33 bp, Homo sapien
agtttgcaatgttaaacgcagtttggaccacat

SEQ ID NO: 292448 - DNA, 33 bp, Homo sapien
agtttgcaatgttaaatgcagtttggaccacat

SEQ ID NO: 292449 - DNA, 33 bp, Homo sapien
ccatttttcttattcacaatcacatacagtcct

SEQ ID NO: 292450 - DNA, 33 bp, Homo sapien
ccatttttcttattcataatcacatacagtcct

SEQ ID NO: 292451 - DNA, 33 bp, Homo sapien
gcggggactgcaatcaaatcacaaggactgtat

SEQ ID NO: 292452 - DNA, 33 bp, Homo sapien
gcggggactgcaatcacatcacaaggactgtat

SEQ ID NO: 292453 - DNA, 33 bp, Homo sapien
aagagactggagcattaaacaattgctttagca

SEQ ID NO: 292454 - DNA, 33 bp, Homo sapien
aagagactggagcattgaacaattgctttagca

SEQ ID NO: 292455 - DNA, 33 bp, Homo sapien
cacaggactccagtacaggtgagaaaatgagac

SEQ ID NO: 292456 - DNA, 33 bp, Homo sapien
cacaggactccagtaccggtgagaaaatgagac

SEQ ID NO: 292457 - DNA, 33 bp, Homo sapien
ggatttgtttcttgcacacctagaagcataatc

SEQ ID NO: 292458 - DNA, 33 bp, Homo sapien
ggatttgtttcttgcatacctagaagcataatc

SEQ ID NO: 292459 - DNA, 33 bp, Homo sapien
cttataggttaggcataataaacatatatgtat

SEQ ID NO: 292460 - DNA, 33 bp, Homo sapien
cttataggttaggcattataaacatatatgtat

SEQ ID NO: 292461 - DNA, 33 bp, Homo sapien
ttgtagcagagaaggaagtttaatcgtagggcc

SEQ ID NO: 292462 - DNA, 33 bp, Homo sapien
ttgtagcagagaaggaggtttaatcgtagggcc

SEQ ID NO: 292463 - DNA, 33 bp, Homo sapien
tcacctgaaatcccctcaaacagggacagctat

SEQ ID NO: 292464 - DNA, 33 bp, Homo sapien
tcacctgaaatccccttaaacagggacagctat

SEQ ID NO: 292465 - DNA, 33 bp, Homo sapien
ggaagaccaggatcagaatttgaggaatacaat

SEQ ID NO: 292466 - DNA, 33 bp, Homo sapien
ggaagaccaggatcaggatttgaggaatacaat

SEQ ID NO: 292467 - DNA, 33 bp, Homo sapien
aaccaccacaaagtcaacttaaataatggaaag

SEQ ID NO: 292468 - DNA, 33 bp, Homo sapien
aaccaccacaaagtcagcttaaataatggaaag

SEQ ID NO: 292469 - DNA, 33 bp, Homo sapien
ggtggtttgctctgacaattttgaggagggctg

SEQ ID NO: 292470 - DNA, 33 bp, Homo sapien
ggtggtttgctctgaccattttgaggagggctg

SEQ ID NO: 292471 - DNA, 33 bp, Homo sapien
taagaataattagaaacgagcatatggcagaag

SEQ ID NO: 292472 - DNA, 33 bp, Homo sapien
taagaataattagaaatgagcatatggcagaag

SEQ ID NO: 292473 - DNA, 33 bp, Homo sapien
tgtctttaggtgcacaatactctttttctggag

SEQ ID NO: 292474 - DNA, 33 bp, Homo sapien
tgtctttaggtgcacagtactctttttctggag

SEQ ID NO: 292475 - DNA, 33 bp, Homo sapien
tattaaaatagttttacccaacattttgcaaag

SEQ ID NO: 292476 - DNA, 33 bp, Homo sapien
tattaaaatagttttatccaacattttgcaaag

SEQ ID NO: 292477 - DNA, 33 bp, Homo sapien
atttttgtcactgaataagcaaaatttatgtag

SEQ ID NO: 292478 - DNA, 33 bp, Homo sapien
atttttgtcactgaatgagcaaaatttatgtag

SEQ ID NO: 292479 - DNA, 33 bp, Homo sapien
agagaacattccaacaagtaagatcttaatatt

SEQ ID NO: 292480 - DNA, 33 bp, Homo sapien
agagaacattccaacaggtaagatcttaatatt

SEQ ID NO: 292481 - DNA, 33 bp, Homo sapien
atgttctcaaaaagctcacataaatctgaatga

SEQ ID NO: 292482 - DNA, 33 bp, Homo sapien
atgttctcaaaaagctgacataaatctgaatga

SEQ ID NO: 292483 - DNA, 33 bp, Homo sapien
attatgtctataggaaccagaaattctgaaatt

SEQ ID NO: 292484 - DNA, 33 bp, Homo sapien
attatgtctataggaatcagaaattctgaaatt

SEQ ID NO: 292485 - DNA, 33 bp, Homo sapien
atattcactgtaataaatagcagatttgtaagc

SEQ ID NO: 292486 - DNA, 33 bp, Homo sapien
atattcactgtaataagtagcagatttgtaagc

SEQ ID NO: 292487 - DNA, 33 bp, Homo sapien
tttgtgtaaagcttgcactggagatgtctaaga

SEQ ID NO: 292488 - DNA, 33 bp, Homo sapien
tttgtgtaaagcttgcgctggagatgtctaaga

SEQ ID NO: 292489 - DNA, 33 bp, Homo sapien
ggcaagattctaggaactgattttgaaatgaca

SEQ ID NO: 292490 - DNA, 33 bp, Homo sapien
ggcaagattctaggaattgattttgaaatgaca

SEQ ID NO: 292491 - DNA, 33 bp, Homo sapien
agtctaatttgaaagcaattccagtaatggcac

SEQ ID NO: 292492 - DNA, 33 bp, Homo sapien
agtctaatttgaaagcgattccagtaatggcac

SEQ ID NO: 292493 - DNA, 33 bp, Homo sapien
ttgagggaataggtaaatctagtcagaaaggaa

SEQ ID NO: 292494 - DNA, 33 bp, Homo sapien
ttgagggaataggtaagtctagtcagaaaggaa

SEQ ID NO: 292495 - DNA, 33 bp, Homo sapien
attcataaaagtcataataacttgatttgggtg

SEQ ID NO: 292496 - DNA, 33 bp, Homo sapien
attcataaaagtcatagtaacttgatttgggtg

SEQ ID NO: 292497 - DNA, 33 bp, Homo sapien
ttatatatgttttcagacattacaaaaaatatg

SEQ ID NO: 292498 - DNA, 33 bp, Homo sapien
ttatatatgttttcaggcattacaaaaaatatg

SEQ ID NO: 292499 - DNA, 33 bp, Homo sapien
gaacatctgacagctacagaactagatcatatg

SEQ ID NO: 292500 - DNA, 33 bp, Homo sapien
gaacatctgacagctatagaactagatcatatg

SEQ ID NO: 292501 - DNA, 33 bp, Homo sapien
aggctatgagtcctgaatagttattgcttaata

SEQ ID NO: 292502 - DNA, 33 bp, Homo sapien
aggctatgagtcctgactagttattgcttaata

SEQ ID NO: 292503 - DNA, 33 bp, Homo sapien
cttgcctttagcttacaatgtaatttgccaact

SEQ ID NO: 292504 - DNA, 33 bp, Homo sapien
cttgcctttagcttaccatgtaatttgccaact

SEQ ID NO: 292505 - DNA, 33 bp, Homo sapien
gaaaaatgtcttacaaagtgaaaatgtcaaagt

SEQ ID NO: 292506 - DNA, 33 bp, Homo sapien
gaaaaatgtcttacaacgtgaaaatgtcaaagt

SEQ ID NO: 292507 - DNA, 33 bp, Homo sapien
attagggcggttcttaaaattgcattttgtata

SEQ ID NO: 292508 - DNA, 33 bp, Homo sapien
attagggcggttcttataattgcattttgtata

SEQ ID NO: 292509 - DNA, 33 bp, Homo sapien
aaaaaatctgtatgtggattttctccaaattgc

SEQ ID NO: 292510 - DNA, 33 bp, Homo sapien
aaaaaatctgtatgtgtattttctccaaattgc

SEQ ID NO: 292511 - DNA, 33 bp, Homo sapien
ctttaaaatacagcaacgtacttctcctaaacc

SEQ ID NO: 292512 - DNA, 33 bp, Homo sapien
ctttaaaatacagcaatgtacttctcctaaacc

SEQ ID NO: 292513 - DNA, 33 bp, Homo sapien
atgaagaaaatgcagacgctgagaagaggtgac

SEQ ID NO: 292514 - DNA, 33 bp, Homo sapien
atgaagaaaatgcagatgctgagaagaggtgac

SEQ ID NO: 292515 - DNA, 33 bp, Homo sapien
tctagcatgaacttgacgctgttggcctgcacc

SEQ ID NO: 292516 - DNA, 33 bp, Homo sapien
tctagcatgaacttgatgctgttggcctgcacc

SEQ ID NO: 292517 - DNA, 33 bp, Homo sapien
taacttgggctcaatacgtgaagttcatccttc

SEQ ID NO: 292518 - DNA, 33 bp, Homo sapien
taacttgggctcaatatgtgaagttcatccttc

SEQ ID NO: 292519 - DNA, 33 bp, Homo sapien
tctaaatccaaattgaaggattctagcacacat

SEQ ID NO: 292520 - DNA, 33 bp, Homo sapien
tctaaatccaaattgagggattctagcacacat

SEQ ID NO: 292521 - DNA, 33 bp, Homo sapien
gaatttcttacaattgaacctcaggttaagtaa

SEQ ID NO: 292522 - DNA, 33 bp, Homo sapien
gaatttcttacaattggacctcaggttaagtaa

SEQ ID NO: 292523 - DNA, 33 bp, Homo sapien
taactagacacttttacattgtttctagcattt

SEQ ID NO: 292524 - DNA, 33 bp, Homo sapien
taactagacacttttatattgtttctagcattt

SEQ ID NO: 292525 - DNA, 33 bp, Homo sapien
taaagaagatcgacataaattattccataaaat

SEQ ID NO: 292526 - DNA, 33 bp, Homo sapien
taaagaagatcgacatgaattattccataaaat

SEQ ID NO: 292527 - DNA, 33 bp, Homo sapien
tatagcttttactagaaaacaatcacaagacat

SEQ ID NO: 292528 - DNA, 33 bp, Homo sapien
tatagcttttactagagaacaatcacaagacat

SEQ ID NO: 292529 - DNA, 33 bp, Homo sapien
atatcttacactgaaacaaaacacagtggttct

SEQ ID NO: 292530 - DNA, 33 bp, Homo sapien
atatcttacactgaaataaaacacagtggttct

SEQ ID NO: 292531 - DNA, 33 bp, Homo sapien
gttgggtacctgcaaaatttatatgctgacatc

SEQ ID NO: 292532 - DNA, 33 bp, Homo sapien
gttgggtacctgcaaagtttatatgctgacatc

SEQ ID NO: 292533 - DNA, 33 bp, Homo sapien
acacagaatctcttaaagtcttcagatcttaaa

SEQ ID NO: 292534 - DNA, 33 bp, Homo sapien
acacagaatctcttaacgtcttcagatcttaaa

SEQ ID NO: 292535 - DNA, 33 bp, Homo sapien
agaatagagattacttaaacttactgggaaatt

SEQ ID NO: 292536 - DNA, 33 bp, Homo sapien
agaatagagattacttgaacttactgggaaatt

SEQ ID NO: 292537 - DNA, 33 bp, Homo sapien
gcttgtgtagagaacaggatttactcccccttt

SEQ ID NO: 292538 - DNA, 33 bp, Homo sapien
gcttgtgtagagaacatgatttactcccccttt

SEQ ID NO: 292539 - DNA, 33 bp, Homo sapien
aagtcagtttagacaaagtggtcctgaagttct

SEQ ID NO: 292540 - DNA, 33 bp, Homo sapien
aagtcagtttagacaaggtggtcctgaagttct

SEQ ID NO: 292541 - DNA, 33 bp, Homo sapien
tatggtttatacctgaaaaagtcgagatggaca

SEQ ID NO: 292542 - DNA, 33 bp, Homo sapien
tatggtttatacctgagaaagtcgagatggaca

SEQ ID NO: 292543 - DNA, 33 bp, Homo sapien
ttcattccttgtccataagtaactctatttgga

SEQ ID NO: 292544 - DNA, 33 bp, Homo sapien
ttcattccttgtccatcagtaactctatttgga

SEQ ID NO: 292545 - DNA, 33 bp, Homo sapien
ctgaatgataagaatcacaaaataatgtcatat

SEQ ID NO: 292546 - DNA, 33 bp, Homo sapien
ctgaatgataagaatcgcaaaataatgtcatat

SEQ ID NO: 292547 - DNA, 33 bp, Homo sapien
atttgcaatttatcgacgtaagtagtatgacaa

SEQ ID NO: 292548 - DNA, 33 bp, Homo sapien
atttgcaatttatcgatgtaagtagtatgacaa

SEQ ID NO: 292549 - DNA, 33 bp, Homo sapien
acatactttagcaaaaatctggatcctgcatta

SEQ ID NO: 292550 - DNA, 33 bp, Homo sapien
acatactttagcaaaactctggatcctgcatta

SEQ ID NO: 292551 - DNA, 33 bp, Homo sapien
tctaaccctaatattgcactgatcaaactcagt

SEQ ID NO: 292552 - DNA, 33 bp, Homo sapien
tctaaccctaatattgtactgatcaaactcagt

SEQ ID NO: 292553 - DNA, 33 bp, Homo sapien
tgacctgctgaaggtaccactaaaacattcagt

SEQ ID NO: 292554 - DNA, 33 bp, Homo sapien
tgacctgctgaaggtagcactaaaacattcagt

SEQ ID NO: 292555 - DNA, 33 bp, Homo sapien
gcataaggggcacatacacaaagtggccacagg

SEQ ID NO: 292556 - DNA, 33 bp, Homo sapien
gcataaggggcacatatacaaagtggccacagg

SEQ ID NO: 292557 - DNA, 33 bp, Homo sapien
agatttggaaggaaaaatgtttttggtcagagg

SEQ ID NO: 292558 - DNA, 33 bp, Homo sapien
agatttggaaggaaaagtgtttttggtcagagg

SEQ ID NO: 292559 - DNA, 33 bp, Homo sapien
aaccctaacacttcaacggcgcaggggcaaaat

SEQ ID NO: 292560 - DNA, 33 bp, Homo sapien
aaccctaacacttcaatggcgcaggggcaaaat

SEQ ID NO: 292561 - DNA, 33 bp, Homo sapien
gaactgacaaaacacccaagaaaatattatgtg

SEQ ID NO: 292562 - DNA, 33 bp, Homo sapien
gaactgacaaaacaccgaagaaaatattatgtg

SEQ ID NO: 292563 - DNA, 33 bp, Homo sapien
attttacatagcacgacctcaggttgtaaagga

SEQ ID NO: 292564 - DNA, 33 bp, Homo sapien
attttacatagcacgatctcaggttgtaaagga

SEQ ID NO: 292565 - DNA, 33 bp, Homo sapien
aaactgtgactaagtagccaccatttgacaaaa

SEQ ID NO: 292566 - DNA, 33 bp, Homo sapien
aaactgtgactaagtatccaccatttgacaaaa

SEQ ID NO: 292567 - DNA, 33 bp, Homo sapien
gaaaacaacccgcatgaaactaggatgggatta

SEQ ID NO: 292568 - DNA, 33 bp, Homo sapien
gaaaacaacccgcatggaactaggatgggatta

SEQ ID NO: 292569 - DNA, 33 bp, Homo sapien
ttaatacagcgttgtcactaaccttcaattcgt

SEQ ID NO: 292570 - DNA, 33 bp, Homo sapien
ttaatacagcgttgtcgctaaccttcaattcgt

SEQ ID NO: 292571 - DNA, 33 bp, Homo sapien
taagtaaaatatatcaaaagtatcccagaaaca

SEQ ID NO: 292572 - DNA, 33 bp, Homo sapien
taagtaaaatatatcagaagtatcccagaaaca

SEQ ID NO: 292573 - DNA, 33 bp, Homo sapien
atgactcttccttgaaaacaaaccaaatatgaa

SEQ ID NO: 292574 - DNA, 33 bp, Homo sapien
atgactcttccttgaacacaaaccaaatatgaa

SEQ ID NO: 292575 - DNA, 33 bp, Homo sapien
ggataggaaacctgtaactgtaactgatgaatc

SEQ ID NO: 292576 - DNA, 33 bp, Homo sapien
ggataggaaacctgtatctgtaactgatgaatc

SEQ ID NO: 292577 - DNA, 33 bp, Homo sapien
taaattctgaaaaaaaattctatctatatgtat

SEQ ID NO: 292578 - DNA, 33 bp, Homo sapien
taaattctgaaaaaaagttctatctatatgtat

SEQ ID NO: 292579 - DNA, 33 bp, Homo sapien
gtattgtatcagcaatcaaaaaatttatgagag

SEQ ID NO: 292580 - DNA, 33 bp, Homo sapien
gtattgtatcagcaatgaaaaaatttatgagag

SEQ ID NO: 292581 - DNA, 33 bp, Homo sapien
tcagctgttaatcgtccagtcaatgagctagtt

SEQ ID NO: 292582 - DNA, 33 bp, Homo sapien
tcagctgttaatcgtctagtcaatgagctagtt

SEQ ID NO: 292583 - DNA, 33 bp, Homo sapien
attaactctatggaaacctaataagccatgttt

SEQ ID NO: 292584 - DNA, 33 bp, Homo sapien
attaactctatggaaatctaataagccatgttt

SEQ ID NO: 292585 - DNA, 33 bp, Homo sapien
ttcttccattgaaatcaaacagccaaattccac

SEQ ID NO: 292586 - DNA, 33 bp, Homo sapien
ttcttccattgaaatcgaacagccaaattccac

SEQ ID NO: 292587 - DNA, 33 bp, Homo sapien
gagacatagaaataataaaagcattgtgaaatt

SEQ ID NO: 292588 - DNA, 33 bp, Homo sapien
gagacatagaaataatgaaagcattgtgaaatt

SEQ ID NO: 292589 - DNA, 33 bp, Homo sapien
catagaatatggcaaactggacaagtgcttcac

SEQ ID NO: 292590 - DNA, 33 bp, Homo sapien
catagaatatggcaaattggacaagtgcttcac

SEQ ID NO: 292591 - DNA, 33 bp, Homo sapien
tctccttgagtgatgaccctcttccattcctaa

SEQ ID NO: 292592 - DNA, 33 bp, Homo sapien
tctccttgagtgatgatcctcttccattcctaa

SEQ ID NO: 292593 - DNA, 33 bp, Homo sapien
ttgtatttttctgcaacgttttcattaattata

SEQ ID NO: 292594 - DNA, 33 bp, Homo sapien
ttgtatttttctgcaatgttttcattaattata

SEQ ID NO: 292595 - DNA, 33 bp, Homo sapien
aggagacgtgcacaaagatcgaagaacaatcaa

SEQ ID NO: 292596 - DNA, 33 bp, Homo sapien
aggagacgtgcacaaatatcgaagaacaatcaa

SEQ ID NO: 292597 - DNA, 33 bp, Homo sapien
gaattcttacaggtcccgaaatatctttattct

SEQ ID NO: 292598 - DNA, 33 bp, Homo sapien
gaattcttacaggtcctgaaatatctttattct

SEQ ID NO: 292599 - DNA, 33 bp, Homo sapien
ggttaccaactatatcaatcactggtttgcaac

SEQ ID NO: 292600 - DNA, 33 bp, Homo sapien
ggttaccaactatatcgatcactggtttgcaac

SEQ ID NO: 292601 - DNA, 33 bp, Homo sapien
tttcctaaaatcttccagaaagtcattcagctt

SEQ ID NO: 292602 - DNA, 33 bp, Homo sapien
tttcctaaaatcttccggaaagtcattcagctt

SEQ ID NO: 292603 - DNA, 33 bp, Homo sapien
ttagtttctccggatacgaaattattggctgat

SEQ ID NO: 292604 - DNA, 33 bp, Homo sapien
ttagtttctccggatatgaaattattggctgat

SEQ ID NO: 292605 - DNA, 33 bp, Homo sapien
actaacattgaatactaacactgaatgtaaatg

SEQ ID NO: 292606 - DNA, 33 bp, Homo sapien
actaacattgaatactgacactgaatgtaaatg

SEQ ID NO: 292607 - DNA, 33 bp, Homo sapien
cctaaacatatttgcacctaacactggagctcc

SEQ ID NO: 292608 - DNA, 33 bp, Homo sapien
cctaaacatatttgcatctaacactggagctcc

SEQ ID NO: 292609 - DNA, 33 bp, Homo sapien
gtgccataattacacacacctagatggtacagc

SEQ ID NO: 292610 - DNA, 33 bp, Homo sapien
gtgccataattacacatacctagatggtacagc

SEQ ID NO: 292611 - DNA, 33 bp, Homo sapien
aaccaatacattgttcaaaaaccaaaggtccat

SEQ ID NO: 292612 - DNA, 33 bp, Homo sapien
aaccaatacattgttcgaaaaccaaaggtccat

SEQ ID NO: 292613 - DNA, 33 bp, Homo sapien
acatagaaataatctaaagcaaatcaggatatc

SEQ ID NO: 292614 - DNA, 33 bp, Homo sapien
acatagaaataatctagagcaaatcaggatatc

SEQ ID NO: 292615 - DNA, 33 bp, Homo sapien
ggggttaatccatcaactcaacagtcttatcaa

SEQ ID NO: 292616 - DNA, 33 bp, Homo sapien
ggggttaatccatcaattcaacagtcttatcaa

SEQ ID NO: 292617 - DNA, 33 bp, Homo sapien
acactgtgggttatgacgtcaatagtggaacat

SEQ ID NO: 292618 - DNA, 33 bp, Homo sapien
acactgtgggttatgatgtcaatagtggaacat

SEQ ID NO: 292619 - DNA, 33 bp, Homo sapien
tctggatggtattcaaaaggaaaagacttcaga

SEQ ID NO: 292620 - DNA, 33 bp, Homo sapien
tctggatggtattcaacaggaaaagacttcaga

SEQ ID NO: 292621 - DNA, 33 bp, Homo sapien
atatatctcagggactcagtagtttaaagataa

SEQ ID NO: 292622 - DNA, 33 bp, Homo sapien
atatatctcagggacttagtagtttaaagataa

SEQ ID NO: 292623 - DNA, 33 bp, Homo sapien
tccacatttggtaaaagaaatactgacatcatt

SEQ ID NO: 292624 - DNA, 33 bp, Homo sapien
tccacatttggtaaaataaatactgacatcatt

SEQ ID NO: 292625 - DNA, 33 bp, Homo sapien
atttttcagaagacatgatgctattgtgcttcc

SEQ ID NO: 292626 - DNA, 33 bp, Homo sapien
atttttcagaagacattatgctattgtgcttcc

SEQ ID NO: 292627 - DNA, 33 bp, Homo sapien
tgtgtatcagagtttacaaaaaccacaaggcaa

SEQ ID NO: 292628 - DNA, 33 bp, Homo sapien
tgtgtatcagagtttataaaaaccacaaggcaa

SEQ ID NO: 292629 - DNA, 33 bp, Homo sapien
atctagtttacaaatacagccgtggagtccttt

SEQ ID NO: 292630 - DNA, 33 bp, Homo sapien
atctagtttacaaatatagccgtggagtccttt

SEQ ID NO: 292631 - DNA, 33 bp, Homo sapien
caaatgagttaaagcagcagaagtcacccaaat

SEQ ID NO: 292632 - DNA, 33 bp, Homo sapien
caaatgagttaaagcatcagaagtcacccaaat

SEQ ID NO: 292633 - DNA, 33 bp, Homo sapien
taggtgttctgggccacagtttcctttcgtgtt

SEQ ID NO: 292634 - DNA, 33 bp, Homo sapien
taggtgttctgggccatagtttcctttcgtgtt

SEQ ID NO: 292635 - DNA, 33 bp, Homo sapien
tctatagcataaaagaaaatgatgtgaattaac

SEQ ID NO: 292636 - DNA, 33 bp, Homo sapien
tctatagcataaaagacaatgatgtgaattaac

SEQ ID NO: 292637 - DNA, 33 bp, Homo sapien
ctcgacttagtcaaataacaattttgaatttta

SEQ ID NO: 292638 - DNA, 33 bp, Homo sapien
ctcgacttagtcaaatgacaattttgaatttta

SEQ ID NO: 292639 - DNA, 33 bp, Homo sapien
tttgaaagctttaatgaaaatatgggtagtcca

SEQ ID NO: 292640 - DNA, 33 bp, Homo sapien
tttgaaagctttaatggaaatatgggtagtcca

SEQ ID NO: 292641 - DNA, 33 bp, Homo sapien
acagcacttacactgaacaaattatgtgaggcc

SEQ ID NO: 292642 - DNA, 33 bp, Homo sapien
acagcacttacactgagcaaattatgtgaggcc

SEQ ID NO: 292643 - DNA, 33 bp, Homo sapien
tctgtctttctttaagccctcaagttcactcac

SEQ ID NO: 292644 - DNA, 33 bp, Homo sapien
tctgtctttctttaagtcctcaagttcactcac

SEQ ID NO: 292645 - DNA, 33 bp, Homo sapien
ttgttattgtcctacacagtcctgagcctctgt

SEQ ID NO: 292646 - DNA, 33 bp, Homo sapien
ttgttattgtcctacatagtcctgagcctctgt

SEQ ID NO: 292647 - DNA, 33 bp, Homo sapien
ggcattccttctttgcccattagagtcttggaa

SEQ ID NO: 292648 - DNA, 33 bp, Homo sapien
ggcattccttctttgcgcattagagtcttggaa

SEQ ID NO: 292649 - DNA, 33 bp, Homo sapien
cagaaagacagagatgaatgccatattcaatga

SEQ ID NO: 292650 - DNA, 33 bp, Homo sapien
cagaaagacagagatggatgccatattcaatga

SEQ ID NO: 292651 - DNA, 33 bp, Homo sapien
ctctttagctggaaaactatctgtggagtaaaa

SEQ ID NO: 292652 - DNA, 33 bp, Homo sapien
ctctttagctggaaaagtatctgtggagtaaaa

SEQ ID NO: 292653 - DNA, 33 bp, Homo sapien
atctggtctctttgaaaaaacatccaatcccaa

SEQ ID NO: 292654 - DNA, 33 bp, Homo sapien
atctggtctctttgaagaaacatccaatcccaa

SEQ ID NO: 292655 - DNA, 33 bp, Homo sapien
cgtggactccttcaaactggctcttgctttatt

SEQ ID NO: 292656 - DNA, 33 bp, Homo sapien
cgtggactccttcaaattggctcttgctttatt

SEQ ID NO: 292657 - DNA, 33 bp, Homo sapien
catacttatggggtgcagagtgatattttgata

SEQ ID NO: 292658 - DNA, 33 bp, Homo sapien
catacttatggggtgcggagtgatattttgata

SEQ ID NO: 292659 - DNA, 33 bp, Homo sapien
ctctgctatttttttacgtcatcgaaaatatcc

SEQ ID NO: 292660 - DNA, 33 bp, Homo sapien
ctctgctatttttttatgtcatcgaaaatatcc

SEQ ID NO: 292661 - DNA, 33 bp, Homo sapien
taatgacttcagagtaaggtaaaatgtgctaca

SEQ ID NO: 292662 - DNA, 33 bp, Homo sapien
taatgacttcagagtatggtaaaatgtgctaca

SEQ ID NO: 292663 - DNA, 33 bp, Homo sapien
ttcttgagctttgacaactgtatacattcacgg

SEQ ID NO: 292664 - DNA, 33 bp, Homo sapien
ttcttgagctttgacagctgtatacattcacgg

SEQ ID NO: 292665 - DNA, 33 bp, Homo sapien
acacacacagagagtaaaaaacagagcttgtat

SEQ ID NO: 292666 - DNA, 33 bp, Homo sapien
acacacacagagagtataaaacagagcttgtat

SEQ ID NO: 292667 - DNA, 33 bp, Homo sapien
ccttacaaaactgcacagtaaagtgtaggagaa

SEQ ID NO: 292668 - DNA, 33 bp, Homo sapien
ccttacaaaactgcacggtaaagtgtaggagaa

SEQ ID NO: 292669 - DNA, 33 bp, Homo sapien
atagagacgggagtggaaatcaatttgaggtca

SEQ ID NO: 292670 - DNA, 33 bp, Homo sapien
atagagacgggagtgggaatcaatttgaggtca

SEQ ID NO: 292671 - DNA, 33 bp, Homo sapien
tctgattaaagagacacctacatctcatgtggt

SEQ ID NO: 292672 - DNA, 33 bp, Homo sapien
tctgattaaagagacatctacatctcatgtggt

SEQ ID NO: 292673 - DNA, 33 bp, Homo sapien
ggaaagcactttcaaacgctacatccccatgaa

SEQ ID NO: 292674 - DNA, 33 bp, Homo sapien
ggaaagcactttcaaatgctacatccccatgaa

SEQ ID NO: 292675 - DNA, 33 bp, Homo sapien
aagatttgtatgcaaactaaatgagagaaccat

SEQ ID NO: 292676 - DNA, 33 bp, Homo sapien
aagatttgtatgcaaagtaaatgagagaaccat

SEQ ID NO: 292677 - DNA, 33 bp, Homo sapien
ttcgaaaaaccttgataaaacactgatatttga

SEQ ID NO: 292678 - DNA, 33 bp, Homo sapien
ttcgaaaaaccttgatgaaacactgatatttga

SEQ ID NO: 292679 - DNA, 33 bp, Homo sapien
tctgtgctacaaaaaaagtggtcctgaaaccag

SEQ ID NO: 292680 - DNA, 33 bp, Homo sapien
tctgtgctacaaaaaatgtggtcctgaaaccag

SEQ ID NO: 292681 - DNA, 33 bp, Homo sapien
tgaccagtgcattaaaatggcaaagtgctaatt

SEQ ID NO: 292682 - DNA, 33 bp, Homo sapien
tgaccagtgcattaaattggcaaagtgctaatt

SEQ ID NO: 292683 - DNA, 33 bp, Homo sapien
cagaaatttttccaaactctgccccacataata

SEQ ID NO: 292684 - DNA, 33 bp, Homo sapien
cagaaatttttccaaagtctgccccacataata

SEQ ID NO: 292685 - DNA, 33 bp, Homo sapien
tttgaatgtgaatggccacagctacataaagca

SEQ ID NO: 292686 - DNA, 33 bp, Homo sapien
tttgaatgtgaatggctacagctacataaagca

SEQ ID NO: 292687 - DNA, 33 bp, Homo sapien
agaccctaaagaacaaaagtcaattacacgtgt

SEQ ID NO: 292688 - DNA, 33 bp, Homo sapien
agaccctaaagaacaagagtcaattacacgtgt

SEQ ID NO: 292689 - DNA, 33 bp, Homo sapien
ttaatgacaaaaatcacaattacatttgtatca

SEQ ID NO: 292690 - DNA, 33 bp, Homo sapien
ttaatgacaaaaatcagaattacatttgtatca

SEQ ID NO: 292691 - DNA, 33 bp, Homo sapien
gtagaatctggaagagaaatgtggaatcccaag

SEQ ID NO: 292692 - DNA, 33 bp, Homo sapien
gtagaatctggaagaggaatgtggaatcccaag

SEQ ID NO: 292693 - DNA, 33 bp, Homo sapien
tttctttggcattggtaacacacactttcatgg

SEQ ID NO: 292694 - DNA, 33 bp, Homo sapien
tttctttggcattggtgacacacactttcatgg

SEQ ID NO: 292695 - DNA, 33 bp, Homo sapien
tgaaggaagcgcaacaaacctcaggtaagtatc

SEQ ID NO: 292696 - DNA, 33 bp, Homo sapien
tgaaggaagcgcaacacacctcaggtaagtatc

SEQ ID NO: 292697 - DNA, 33 bp, Homo sapien
ccaagaatggccaaaacaaattggaagaactaa

SEQ ID NO: 292698 - DNA, 33 bp, Homo sapien
ccaagaatggccaaaagaaattggaagaactaa

SEQ ID NO: 292699 - DNA, 33 bp, Homo sapien
tttctattgatttgtcagaaaaccttggaggtt

SEQ ID NO: 292700 - DNA, 33 bp, Homo sapien
tttctattgatttgtctgaaaaccttggaggtt

SEQ ID NO: 292701 - DNA, 33 bp, Homo sapien
taattttcatgagcaactgtccatttgtaaata

SEQ ID NO: 292702 - DNA, 33 bp, Homo sapien
taattttcatgagcaagtgtccatttgtaaata

SEQ ID NO: 292703 - DNA, 33 bp, Homo sapien
gacaacgtgtgcctgaaacttcattatttcatt

SEQ ID NO: 292704 - DNA, 33 bp, Homo sapien
gacaacgtgtgcctgagacttcattatttcatt

SEQ ID NO: 292705 - DNA, 33 bp, Homo sapien
cttgagactggaaaagaaaaccatttaaataga

SEQ ID NO: 292706 - DNA, 33 bp, Homo sapien
cttgagactggaaaagtaaaccatttaaataga

SEQ ID NO: 292707 - DNA, 33 bp, Homo sapien
tatgatgccactttaagtcaaataattatgcat

SEQ ID NO: 292708 - DNA, 33 bp, Homo sapien
tatgatgccactttaattcaaataattatgcat

SEQ ID NO: 292709 - DNA, 33 bp, Homo sapien
atacatcacaaaaagacatgctaaagtaagtct

SEQ ID NO: 292710 - DNA, 33 bp, Homo sapien
atacatcacaaaaagatatgctaaagtaagtct

SEQ ID NO: 292711 - DNA, 33 bp, Homo sapien
aggtatgatcttataaggatttctctaagccct

SEQ ID NO: 292712 - DNA, 33 bp, Homo sapien
aggtatgatcttataatgatttctctaagccct

SEQ ID NO: 292713 - DNA, 33 bp, Homo sapien
gtcactttcacaaagaggcagataatttcctct

SEQ ID NO: 292714 - DNA, 33 bp, Homo sapien
gtcactttcacaaagatgcagataatttcctct

SEQ ID NO: 292715 - DNA, 33 bp, Homo sapien
ttgaaaatttaaactaccaggttcatctagctc

SEQ ID NO: 292716 - DNA, 33 bp, Homo sapien
ttgaaaatttaaactatcaggttcatctagctc

SEQ ID NO: 292717 - DNA, 33 bp, Homo sapien
gcgtgcagcgagaagacggtgattgaggaagtg

SEQ ID NO: 292718 - DNA, 33 bp, Homo sapien
gcgtgcagcgagaagagggtgattgaggaagtg

SEQ ID NO: 292719 - DNA, 33 bp, Homo sapien
atgagatggctgaaccaaacagaatccagaccg

SEQ ID NO: 292720 - DNA, 33 bp, Homo sapien
atgagatggctgaaccgaacagaatccagaccg

SEQ ID NO: 292721 - DNA, 33 bp, Homo sapien
gtgttactgggaactgaaattttgacatgagag

SEQ ID NO: 292722 - DNA, 33 bp, Homo sapien
gtgttactgggaactggaattttgacatgagag

SEQ ID NO: 292723 - DNA, 33 bp, Homo sapien
gacaagccatttttcagcaaccaatttacaaaa

SEQ ID NO: 292724 - DNA, 33 bp, Homo sapien
gacaagccatttttcatcaaccaatttacaaaa

SEQ ID NO: 292725 - DNA, 33 bp, Homo sapien
tggagatgaaatattacgttgtctgggattgtt

SEQ ID NO: 292726 - DNA, 33 bp, Homo sapien
tggagatgaaatattatgttgtctgggattgtt

SEQ ID NO: 292727 - DNA, 33 bp, Homo sapien
ttgggatgagggcacaatacatgagaaatgtgg

SEQ ID NO: 292728 - DNA, 33 bp, Homo sapien
ttgggatgagggcacactacatgagaaatgtgg

SEQ ID NO: 292729 - DNA, 33 bp, Homo sapien
cagtaaattggtagtgccaataaaaaaaggaaa

SEQ ID NO: 292730 - DNA, 33 bp, Homo sapien
cagtaaattggtagtgtcaataaaaaaaggaaa

SEQ ID NO: 292731 - DNA, 33 bp, Homo sapien
ctgaaaactaagccacaatcaattttttttcct

SEQ ID NO: 292732 - DNA, 33 bp, Homo sapien
ctgaaaactaagccacgatcaattttttttcct

SEQ ID NO: 292733 - DNA, 33 bp, Homo sapien
aatttgggataactcaactagtgactagaagaa

SEQ ID NO: 292734 - DNA, 33 bp, Homo sapien
aatttgggataactcagctagtgactagaagaa

SEQ ID NO: 292735 - DNA, 33 bp, Homo sapien
ttgtccttggaaactaacttatatcataggctt

SEQ ID NO: 292736 - DNA, 33 bp, Homo sapien
ttgtccttggaaactagcttatatcataggctt

SEQ ID NO: 292737 - DNA, 33 bp, Homo sapien
cccactctttttggaactaaaatgtgtaggtca

SEQ ID NO: 292738 - DNA, 33 bp, Homo sapien
cccactctttttggaattaaaatgtgtaggtca

SEQ ID NO: 292739 - DNA, 33 bp, Homo sapien
actgtatttatctatcccaagaacaaacatcaa

SEQ ID NO: 292740 - DNA, 33 bp, Homo sapien
actgtatttatctatctcaagaacaaacatcaa

SEQ ID NO: 292741 - DNA, 33 bp, Homo sapien
atgggtagatgctccactgcttcatgatgggta

SEQ ID NO: 292742 - DNA, 33 bp, Homo sapien
atgggtagatgctccattgcttcatgatgggta

SEQ ID NO: 292743 - DNA, 33 bp, Homo sapien
ttggtccatctctgagaaatgtcaagatttaag

SEQ ID NO: 292744 - DNA, 33 bp, Homo sapien
ttggtccatctctgaggaatgtcaagatttaag

SEQ ID NO: 292745 - DNA, 33 bp, Homo sapien
gctgataaccagctctcaacacatacaacctaa

SEQ ID NO: 292746 - DNA, 33 bp, Homo sapien
gctgataaccagctcttaacacatacaacctaa

SEQ ID NO: 292747 - DNA, 33 bp, Homo sapien
gcctgtctgacacatcaatttccttttgcccaa

SEQ ID NO: 292748 - DNA, 33 bp, Homo sapien
gcctgtctgacacatcgatttccttttgcccaa

SEQ ID NO: 292749 - DNA, 33 bp, Homo sapien
ttgacttttcatgccaggctttgtttctgcaat

SEQ ID NO: 292750 - DNA, 33 bp, Homo sapien
ttgacttttcatgccatgctttgtttctgcaat

SEQ ID NO: 292751 - DNA, 33 bp, Homo sapien
agtgatgtagaagttacggcttagagaggatag

SEQ ID NO: 292752 - DNA, 33 bp, Homo sapien
agtgatgtagaagttatggcttagagaggatag

SEQ ID NO: 292753 - DNA, 33 bp, Homo sapien
attttcaactttcttcaatcaaatggaatacac

SEQ ID NO: 292754 - DNA, 33 bp, Homo sapien
attttcaactttcttccatcaaatggaatacac

SEQ ID NO: 292755 - DNA, 33 bp, Homo sapien
aatagaactagttagcaacctattgaaatggag

SEQ ID NO: 292756 - DNA, 33 bp, Homo sapien
aatagaactagttagccacctattgaaatggag

SEQ ID NO: 292757 - DNA, 33 bp, Homo sapien
tcaaaaggaccatacagcatcttgttagggcag

SEQ ID NO: 292758 - DNA, 33 bp, Homo sapien
tcaaaaggaccatacatcatcttgttagggcag

SEQ ID NO: 292759 - DNA, 33 bp, Homo sapien
ggcaggaagtaccacacagggtttagtctgcag

SEQ ID NO: 292760 - DNA, 33 bp, Homo sapien
ggcaggaagtaccacagagggtttagtctgcag

SEQ ID NO: 292761 - DNA, 33 bp, Homo sapien
gtgacaagagcagaaacaaggagttaaagttgg

SEQ ID NO: 292762 - DNA, 33 bp, Homo sapien
gtgacaagagcagaaataaggagttaaagttgg

SEQ ID NO: 292763 - DNA, 33 bp, Homo sapien
tttgatcaatatgagacggcttgacagttagta

SEQ ID NO: 292764 - DNA, 33 bp, Homo sapien
tttgatcaatatgagatggcttgacagttagta

SEQ ID NO: 292765 - DNA, 33 bp, Homo sapien
aggctaatttcagaaaaaatctactacccatac

SEQ ID NO: 292766 - DNA, 33 bp, Homo sapien
aggctaatttcagaaagaatctactacccatac

SEQ ID NO: 292767 - DNA, 33 bp, Homo sapien
aatgagttacagtcaaaggtttttaatagaaaa

SEQ ID NO: 292768 - DNA, 33 bp, Homo sapien
aatgagttacagtcaatggtttttaatagaaaa

SEQ ID NO: 292769 - DNA, 33 bp, Homo sapien
ctcattcgggtaaaaactatggacagtcagtga

SEQ ID NO: 292770 - DNA, 33 bp, Homo sapien
ctcattcgggtaaaaattatggacagtcagtga

SEQ ID NO: 292771 - DNA, 33 bp, Homo sapien
tccatttcttcaccgaacctctttgctctcttt

SEQ ID NO: 292772 - DNA, 33 bp, Homo sapien
tccatttcttcaccgagcctctttgctctcttt

SEQ ID NO: 292773 - DNA, 33 bp, Homo sapien
gatatcaggttttatgcatcaaaaatatatatt

SEQ ID NO: 292774 - DNA, 33 bp, Homo sapien
gatatcaggttttatggatcaaaaatatatatt

SEQ ID NO: 292775 - DNA, 33 bp, Homo sapien
gtttatgatacctatggaaaatttggttgtata

SEQ ID NO: 292776 - DNA, 33 bp, Homo sapien
gtttatgatacctatgtaaaatttggttgtata

SEQ ID NO: 292777 - DNA, 33 bp, Homo sapien
aatgcagatatccttcactgaattcaggactca

SEQ ID NO: 292778 - DNA, 33 bp, Homo sapien
aatgcagatatccttctctgaattcaggactca

SEQ ID NO: 292779 - DNA, 33 bp, Homo sapien
agaaactgcatattaccggctagatacagttga

SEQ ID NO: 292780 - DNA, 33 bp, Homo sapien
agaaactgcatattactggctagatacagttga

SEQ ID NO: 292781 - DNA, 33 bp, Homo sapien
agcacctcataaaaggacatagaatttcatatc

SEQ ID NO: 292782 - DNA, 33 bp, Homo sapien
agcacctcataaaagggcatagaatttcatatc

SEQ ID NO: 292783 - DNA, 33 bp, Homo sapien
tttcccctcatactcactctgtcattttgatgg

SEQ ID NO: 292784 - DNA, 33 bp, Homo sapien
tttcccctcatactcattctgtcattttgatgg

SEQ ID NO: 292785 - DNA, 33 bp, Homo sapien
acactgattctgcagagagttggcaatttcttc

SEQ ID NO: 292786 - DNA, 33 bp, Homo sapien
acactgattctgcagatagttggcaatttcttc

SEQ ID NO: 292787 - DNA, 33 bp, Homo sapien
ctgtggtccagctctacacgccaaaaggagaga

SEQ ID NO: 292788 - DNA, 33 bp, Homo sapien
ctgtggtccagctctagacgccaaaaggagaga

SEQ ID NO: 292789 - DNA, 33 bp, Homo sapien
agctgttctggagcaaaaatactgtaaaattag

SEQ ID NO: 292790 - DNA, 33 bp, Homo sapien
agctgttctggagcaacaatactgtaaaattag

SEQ ID NO: 292791 - DNA, 33 bp, Homo sapien
ctttagatccactttaaaataccctgttcagaa

SEQ ID NO: 292792 - DNA, 33 bp, Homo sapien
ctttagatccactttagaataccctgttcagaa

SEQ ID NO: 292793 - DNA, 33 bp, Homo sapien
agtgaggcctaagataccactcacatgtccaac

SEQ ID NO: 292794 - DNA, 33 bp, Homo sapien
agtgaggcctaagatatcactcacatgtccaac

SEQ ID NO: 292795 - DNA, 33 bp, Homo sapien
tctcattgattcttccaaagagctctgagcagg

SEQ ID NO: 292796 - DNA, 33 bp, Homo sapien
tctcattgattcttccgaagagctctgagcagg

SEQ ID NO: 292797 - DNA, 33 bp, Homo sapien
gctaatgattctctgaataagtgttttcttcaa

SEQ ID NO: 292798 - DNA, 33 bp, Homo sapien
gctaatgattctctgagtaagtgttttcttcaa

SEQ ID NO: 292799 - DNA, 33 bp, Homo sapien
aaatacatggaagataaagagatatagagacat

SEQ ID NO: 292800 - DNA, 33 bp, Homo sapien
aaatacatggaagatagagagatatagagacat

SEQ ID NO: 292801 - DNA, 33 bp, Homo sapien
aaaaattatatctgcaacaattaatttggaggt

SEQ ID NO: 292802 - DNA, 33 bp, Homo sapien
aaaaattatatctgcagcaattaatttggaggt

SEQ ID NO: 292803 - DNA, 33 bp, Homo sapien
taagcaactagtctgacagaaacattttattgg

SEQ ID NO: 292804 - DNA, 33 bp, Homo sapien
taagcaactagtctgagagaaacattttattgg

SEQ ID NO: 292805 - DNA, 33 bp, Homo sapien
tatccttttctctaacacttgcaaaatctttca

SEQ ID NO: 292806 - DNA, 33 bp, Homo sapien
tatccttttctctaacgcttgcaaaatctttca

SEQ ID NO: 292807 - DNA, 33 bp, Homo sapien
tagcttctagtccttgaaaagacatattgtttc

SEQ ID NO: 292808 - DNA, 33 bp, Homo sapien
tagcttctagtccttggaaagacatattgtttc

SEQ ID NO: 292809 - DNA, 33 bp, Homo sapien
ttctctgaaactgcaaacatctcgagtgtagaa

SEQ ID NO: 292810 - DNA, 33 bp, Homo sapien
ttctctgaaactgcaagcatctcgagtgtagaa

SEQ ID NO: 292811 - DNA, 33 bp, Homo sapien
tctgttcaatagtaaacggctaaaatggacctt

SEQ ID NO: 292812 - DNA, 33 bp, Homo sapien
tctgttcaatagtaaatggctaaaatggacctt

SEQ ID NO: 292813 - DNA, 33 bp, Homo sapien
tgcagtgaacagacaaaaaatgacctctgttat

SEQ ID NO: 292814 - DNA, 33 bp, Homo sapien
tgcagtgaacagacaacaaatgacctctgttat

SEQ ID NO: 292815 - DNA, 33 bp, Homo sapien
gtacctcttttatcggacagtggtgaaggcata

SEQ ID NO: 292816 - DNA, 33 bp, Homo sapien
gtacctcttttatcgggcagtggtgaaggcata

SEQ ID NO: 292817 - DNA, 33 bp, Homo sapien
agtacaattgatcaagcctatagtcagctgcta

SEQ ID NO: 292818 - DNA, 33 bp, Homo sapien
agtacaattgatcaagtctatagtcagctgcta

SEQ ID NO: 292819 - DNA, 33 bp, Homo sapien
ggagtccagactaaaaagtatgagtatgagttc

SEQ ID NO: 292820 - DNA, 33 bp, Homo sapien
ggagtccagactaaaatgtatgagtatgagttc

SEQ ID NO: 292821 - DNA, 33 bp, Homo sapien
agcatatttgacaccaacgtagatcactcctta

SEQ ID NO: 292822 - DNA, 33 bp, Homo sapien
agcatatttgacaccaccgtagatcactcctta

SEQ ID NO: 292823 - DNA, 33 bp, Homo sapien
tccagctgcgtgtgaaaatgtgtaccgtgtggt

SEQ ID NO: 292824 - DNA, 33 bp, Homo sapien
tccagctgcgtgtgaatatgtgtaccgtgtggt

SEQ ID NO: 292825 - DNA, 33 bp, Homo sapien
acgtctagaatagtgcaaatatagaagggaaga

SEQ ID NO: 292826 - DNA, 33 bp, Homo sapien
acgtctagaatagtgctaatatagaagggaaga

SEQ ID NO: 292827 - DNA, 33 bp, Homo sapien
aaagtgcattttgagaatatttgtgctatccat

SEQ ID NO: 292828 - DNA, 33 bp, Homo sapien
aaagtgcattttgagagtatttgtgctatccat

SEQ ID NO: 292829 - DNA, 33 bp, Homo sapien
caggcattaggtatgacggagtttgctctatct

SEQ ID NO: 292830 - DNA, 33 bp, Homo sapien
caggcattaggtatgatggagtttgctctatct

SEQ ID NO: 292831 - DNA, 33 bp, Homo sapien
cccaaaccatttttcaatcttttcaacattgta

SEQ ID NO: 292832 - DNA, 33 bp, Homo sapien
cccaaaccatttttcagtcttttcaacattgta

SEQ ID NO: 292833 - DNA, 33 bp, Homo sapien
taggcaatcactctcaacccttctattcaacat

SEQ ID NO: 292834 - DNA, 33 bp, Homo sapien
taggcaatcactctcaccccttctattcaacat

SEQ ID NO: 292835 - DNA, 33 bp, Homo sapien
gtttcttagatccacaaactcgacacagacttt

SEQ ID NO: 292836 - DNA, 33 bp, Homo sapien
gtttcttagatccacagactcgacacagacttt

SEQ ID NO: 292837 - DNA, 33 bp, Homo sapien
ttcattctgagagttacagccacatgtctcttc

SEQ ID NO: 292838 - DNA, 33 bp, Homo sapien
ttcattctgagagttatagccacatgtctcttc

SEQ ID NO: 292839 - DNA, 33 bp, Homo sapien
cacacagtggccaggaaaagagatatttcatca

SEQ ID NO: 292840 - DNA, 33 bp, Homo sapien
cacacagtggccaggagaagagatatttcatca

SEQ ID NO: 292841 - DNA, 33 bp, Homo sapien
ggagaccctgaacaaaggaatgattcatcccga

SEQ ID NO: 292842 - DNA, 33 bp, Homo sapien
ggagaccctgaacaaatgaatgattcatcccga

SEQ ID NO: 292843 - DNA, 33 bp, Homo sapien
ctcttacgtttttgagaattgggcccaatgggg

SEQ ID NO: 292844 - DNA, 33 bp, Homo sapien
ctcttacgtttttgagtattgggcccaatgggg

SEQ ID NO: 292845 - DNA, 33 bp, Homo sapien
tgctttcatgtcataacggatcccaaaatacca

SEQ ID NO: 292846 - DNA, 33 bp, Homo sapien
tgctttcatgtcataatggatcccaaaatacca

SEQ ID NO: 292847 - DNA, 33 bp, Homo sapien
ctttgtaggtcaaaaccggccctgggaattatt

SEQ ID NO: 292848 - DNA, 33 bp, Homo sapien
ctttgtaggtcaaaactggccctgggaattatt

SEQ ID NO: 292849 - DNA, 33 bp, Homo sapien
cttttaaagttggctacggacagcaaagacaag

SEQ ID NO: 292850 - DNA, 33 bp, Homo sapien
cttttaaagttggctatggacagcaaagacaag

SEQ ID NO: 292851 - DNA, 33 bp, Homo sapien
aattgataagcactataacctaacaaggacagt

SEQ ID NO: 292852 - DNA, 33 bp, Homo sapien
aattgataagcactatgacctaacaaggacagt

SEQ ID NO: 292853 - DNA, 33 bp, Homo sapien
aatattatggcaataaatatagttttggctcca

SEQ ID NO: 292854 - DNA, 33 bp, Homo sapien
aatattatggcaataagtatagttttggctcca

SEQ ID NO: 292855 - DNA, 33 bp, Homo sapien
cttcatctgcactttcaccattgatgcgccact

SEQ ID NO: 292856 - DNA, 33 bp, Homo sapien
cttcatctgcactttcgccattgatgcgccact

SEQ ID NO: 292857 - DNA, 33 bp, Homo sapien
atttttgcttcaatcaagcaggtagaattgttt

SEQ ID NO: 292858 - DNA, 33 bp, Homo sapien
atttttgcttcaatcaggcaggtagaattgttt

SEQ ID NO: 292859 - DNA, 33 bp, Homo sapien
ataagagcccgaaaaaaagcaattctatgcaat

SEQ ID NO: 292860 - DNA, 33 bp, Homo sapien
ataagagcccgaaaaagagcaattctatgcaat

SEQ ID NO: 292861 - DNA, 33 bp, Homo sapien
tatagtttccaaaacaacgtggtaccagtatac

SEQ ID NO: 292862 - DNA, 33 bp, Homo sapien
tatagtttccaaaacagcgtggtaccagtatac

SEQ ID NO: 292863 - DNA, 33 bp, Homo sapien
actaatcagccataaaaataatgtcttttgcag

SEQ ID NO: 292864 - DNA, 33 bp, Homo sapien
actaatcagccataaacataatgtcttttgcag

SEQ ID NO: 292865 - DNA, 33 bp, Homo sapien
tttattgactacaaacaataatttttgatggtc

SEQ ID NO: 292866 - DNA, 33 bp, Homo sapien
tttattgactacaaaccataatttttgatggtc

SEQ ID NO: 292867 - DNA, 33 bp, Homo sapien
tggaccagaataatcaatgacaatttgagaata

SEQ ID NO: 292868 - DNA, 33 bp, Homo sapien
tggaccagaataatcattgacaatttgagaata

SEQ ID NO: 292869 - DNA, 33 bp, Homo sapien
gcttctagattctgtaataacaaaagacacttt

SEQ ID NO: 292870 - DNA, 33 bp, Homo sapien
gcttctagattctgtattaacaaaagacacttt

SEQ ID NO: 292871 - DNA, 33 bp, Homo sapien
ctttctgttccaggctcacaatggggagcaggc

SEQ ID NO: 292872 - DNA, 33 bp, Homo sapien
ctttctgttccaggctgacaatggggagcaggc

SEQ ID NO: 292873 - DNA, 33 bp, Homo sapien
tatctggcctcatcacagaaatactaaggtatg

SEQ ID NO: 292874 - DNA, 33 bp, Homo sapien
tatctggcctcatcacggaaatactaaggtatg

SEQ ID NO: 292875 - DNA, 33 bp, Homo sapien
attagatcttgacctaaacaaaatgtggctagc

SEQ ID NO: 292876 - DNA, 33 bp, Homo sapien
attagatcttgacctacacaaaatgtggctagc

SEQ ID NO: 292877 - DNA, 33 bp, Homo sapien
cctctactttgtgccacgatataagcaaggtgc

SEQ ID NO: 292878 - DNA, 33 bp, Homo sapien
cctctactttgtgccatgatataagcaaggtgc

SEQ ID NO: 292879 - DNA, 33 bp, Homo sapien
caagcttgagttaataccaatgttatgttgcta

SEQ ID NO: 292880 - DNA, 33 bp, Homo sapien
caagcttgagttaatatcaatgttatgttgcta

SEQ ID NO: 292881 - DNA, 33 bp, Homo sapien
aggctgtggatattcaaattgtgattttggagt

SEQ ID NO: 292882 - DNA, 33 bp, Homo sapien
aggctgtggatattcagattgtgattttggagt

SEQ ID NO: 292883 - DNA, 33 bp, Homo sapien
ttcataggttttcaaaagagcattcttctgagc

SEQ ID NO: 292884 - DNA, 33 bp, Homo sapien
ttcataggttttcaaaggagcattcttctgagc

SEQ ID NO: 292885 - DNA, 33 bp, Homo sapien
tctcaaattattccacaaggcattgattagact

SEQ ID NO: 292886 - DNA, 33 bp, Homo sapien
tctcaaattattccaccaggcattgattagact

SEQ ID NO: 292887 - DNA, 33 bp, Homo sapien
ttacgaatttgtagcactatctgactttatttt

SEQ ID NO: 292888 - DNA, 33 bp, Homo sapien
ttacgaatttgtagcattatctgactttatttt

SEQ ID NO: 292889 - DNA, 33 bp, Homo sapien
gactaaagccagcaaacgtgcatctaaaacaaa

SEQ ID NO: 292890 - DNA, 33 bp, Homo sapien
gactaaagccagcaaatgtgcatctaaaacaaa

SEQ ID NO: 292891 - DNA, 33 bp, Homo sapien
ggtgctaaaatggttcccttgtcagaggagtta

SEQ ID NO: 292892 - DNA, 33 bp, Homo sapien
ggtgctaaaatggttctcttgtcagaggagtta

SEQ ID NO: 292893 - DNA, 33 bp, Homo sapien
caaagtcctactgtcaaggaacatagactcttg

SEQ ID NO: 292894 - DNA, 33 bp, Homo sapien
caaagtcctactgtcagggaacatagactcttg

SEQ ID NO: 292895 - DNA, 33 bp, Homo sapien
gagaccgaaagagcaaaaaacattacagaagtg

SEQ ID NO: 292896 - DNA, 33 bp, Homo sapien
gagaccgaaagagcaacaaacattacagaagtg

SEQ ID NO: 292897 - DNA, 33 bp, Homo sapien
tgaagagtaagttccagccctaagaaggagaga

SEQ ID NO: 292898 - DNA, 33 bp, Homo sapien
tgaagagtaagttccatccctaagaaggagaga

SEQ ID NO: 292899 - DNA, 33 bp, Homo sapien
agaggctctaagtaaacgtgtgtgatttggatt

SEQ ID NO: 292900 - DNA, 33 bp, Homo sapien
agaggctctaagtaaatgtgtgtgatttggatt

SEQ ID NO: 292901 - DNA, 33 bp, Homo sapien
accagaaagagaaatgcagtgcccagagaaggg

SEQ ID NO: 292902 - DNA, 33 bp, Homo sapien
accagaaagagaaatgtagtgcccagagaaggg

SEQ ID NO: 292903 - DNA, 33 bp, Homo sapien
cagtccagttactccaatggagaggctacctgc

SEQ ID NO: 292904 - DNA, 33 bp, Homo sapien
cagtccagttactccagtggagaggctacctgc

SEQ ID NO: 292905 - DNA, 33 bp, Homo sapien
ccgtggctccattaaacgtttttctgcaggtag

SEQ ID NO: 292906 - DNA, 33 bp, Homo sapien
ccgtggctccattaaatgtttttctgcaggtag

SEQ ID NO: 292907 - DNA, 33 bp, Homo sapien
ggttttacttaaagtaccatccatctcatcttt

SEQ ID NO: 292908 - DNA, 33 bp, Homo sapien
ggttttacttaaagtagcatccatctcatcttt

SEQ ID NO: 292909 - DNA, 33 bp, Homo sapien
aacaaattcttacttcaaatgactagaatcatt

SEQ ID NO: 292910 - DNA, 33 bp, Homo sapien
aacaaattcttacttcgaatgactagaatcatt

SEQ ID NO: 292911 - DNA, 33 bp, Homo sapien
ttacggtaaacatcacagtctgaaagggaacta

SEQ ID NO: 292912 - DNA, 33 bp, Homo sapien
ttacggtaaacatcacggtctgaaagggaacta

SEQ ID NO: 292913 - DNA, 33 bp, Homo sapien
aagcaattaccatgtgacaattatgaatttaaa

SEQ ID NO: 292914 - DNA, 33 bp, Homo sapien
aagcaattaccatgtggcaattatgaatttaaa

SEQ ID NO: 292915 - DNA, 33 bp, Homo sapien
ctgtggctgcatctgaacgtgcaaaaataatag

SEQ ID NO: 292916 - DNA, 33 bp, Homo sapien
ctgtggctgcatctgagcgtgcaaaaataatag

SEQ ID NO: 292917 - DNA, 33 bp, Homo sapien
agtcacaggtgacagcgctattatttttgcacg

SEQ ID NO: 292918 - DNA, 33 bp, Homo sapien
agtcacaggtgacagctctattatttttgcacg

SEQ ID NO: 292919 - DNA, 33 bp, Homo sapien
tgcagtagcctgataaaggacatttacaaaaaa

SEQ ID NO: 292920 - DNA, 33 bp, Homo sapien
tgcagtagcctgataagggacatttacaaaaaa

SEQ ID NO: 292921 - DNA, 33 bp, Homo sapien
aaggtacggctagagacgggtagagagaacagg

SEQ ID NO: 292922 - DNA, 33 bp, Homo sapien
aaggtacggctagagatgggtagagagaacagg

SEQ ID NO: 292923 - DNA, 33 bp, Homo sapien
tgccatcaatcatagcacaagaaaactgtttaa

SEQ ID NO: 292924 - DNA, 33 bp, Homo sapien
tgccatcaatcatagcgcaagaaaactgtttaa

SEQ ID NO: 292925 - DNA, 33 bp, Homo sapien
tttgctgtagctcaaacgtgatggagccttgaa

SEQ ID NO: 292926 - DNA, 33 bp, Homo sapien
tttgctgtagctcaaatgtgatggagccttgaa

SEQ ID NO: 292927 - DNA, 33 bp, Homo sapien
gtgtaaacttggtgtcaagaattaaaatttgct

SEQ ID NO: 292928 - DNA, 33 bp, Homo sapien
gtgtaaacttggtgtcgagaattaaaatttgct

SEQ ID NO: 292929 - DNA, 33 bp, Homo sapien
aggtgtttgtatactccattgactcaaagtgtt

SEQ ID NO: 292930 - DNA, 33 bp, Homo sapien
aggtgtttgtatactctattgactcaaagtgtt

SEQ ID NO: 292931 - DNA, 33 bp, Homo sapien
tacccactgtatcaaactccttctctattacat

SEQ ID NO: 292932 - DNA, 33 bp, Homo sapien
tacccactgtatcaaattccttctctattacat

SEQ ID NO: 292933 - DNA, 33 bp, Homo sapien
attttctagagtctgacatcctttaaggtatga

SEQ ID NO: 292934 - DNA, 33 bp, Homo sapien
attttctagagtctgatatcctttaaggtatga

SEQ ID NO: 292935 - DNA, 33 bp, Homo sapien
ttgcttatatgctgagaagacatcatgttagga

SEQ ID NO: 292936 - DNA, 33 bp, Homo sapien
ttgcttatatgctgaggagacatcatgttagga

SEQ ID NO: 292937 - DNA, 33 bp, Homo sapien
ggctgctctgacacacactacaaagttggaacc

SEQ ID NO: 292938 - DNA, 33 bp, Homo sapien
ggctgctctgacacacgctacaaagttggaacc

SEQ ID NO: 292939 - DNA, 33 bp, Homo sapien
gggtggatagtttcacagaacagaggagagtat

SEQ ID NO: 292940 - DNA, 33 bp, Homo sapien
gggtggatagtttcaccgaacagaggagagtat

SEQ ID NO: 292941 - DNA, 33 bp, Homo sapien
ggagtcagcaatctaccggccaccattgggcca

SEQ ID NO: 292942 - DNA, 33 bp, Homo sapien
ggagtcagcaatctactggccaccattgggcca

SEQ ID NO: 292943 - DNA, 33 bp, Homo sapien
ctctatcacaagacaacactaaggagatggtgc

SEQ ID NO: 292944 - DNA, 33 bp, Homo sapien
ctctatcacaagacaatactaaggagatggtgc

SEQ ID NO: 292945 - DNA, 33 bp, Homo sapien
ttaagaaccatcatataactcctacttttttct

SEQ ID NO: 292946 - DNA, 33 bp, Homo sapien
ttaagaaccatcatatgactcctacttttttct

SEQ ID NO: 292947 - DNA, 33 bp, Homo sapien
aggcaattatcaagtacgaactccgaatttcca

SEQ ID NO: 292948 - DNA, 33 bp, Homo sapien
aggcaattatcaagtatgaactccgaatttcca

SEQ ID NO: 292949 - DNA, 33 bp, Homo sapien
ggaggacttcatgtaaagaggtgtatgtgctct

SEQ ID NO: 292950 - DNA, 33 bp, Homo sapien
ggaggacttcatgtaaggaggtgtatgtgctct

SEQ ID NO: 292951 - DNA, 33 bp, Homo sapien
tctatgtcagccaaccgggaacaagaataatgc

SEQ ID NO: 292952 - DNA, 33 bp, Homo sapien
tctatgtcagccaacctggaacaagaataatgc

SEQ ID NO: 292953 - DNA, 33 bp, Homo sapien
atttatctacccagaaagtcaaaggcagagccc

SEQ ID NO: 292954 - DNA, 33 bp, Homo sapien
atttatctacccagaaggtcaaaggcagagccc

SEQ ID NO: 292955 - DNA, 33 bp, Homo sapien
attctatcagttacacactgtcatggagcaggc

SEQ ID NO: 292956 - DNA, 33 bp, Homo sapien
attctatcagttacaccctgtcatggagcaggc

SEQ ID NO: 292957 - DNA, 33 bp, Homo sapien
tgtctcatctgtgtcaccatattgctgggtgac

SEQ ID NO: 292958 - DNA, 33 bp, Homo sapien
tgtctcatctgtgtcatcatattgctgggtgac

SEQ ID NO: 292959 - DNA, 33 bp, Homo sapien
cataaatgaagaagaccgagatccagaaagata

SEQ ID NO: 292960 - DNA, 33 bp, Homo sapien
cataaatgaagaagactgagatccagaaagata

SEQ ID NO: 292961 - DNA, 33 bp, Homo sapien
gtagtcgatggtatgaccctgttacaattgtgc

SEQ ID NO: 292962 - DNA, 33 bp, Homo sapien
gtagtcgatggtatgatcctgttacaattgtgc

SEQ ID NO: 292963 - DNA, 33 bp, Homo sapien
gcttaaggacttggtaactgcttagttagaagc

SEQ ID NO: 292964 - DNA, 33 bp, Homo sapien
gcttaaggacttggtagctgcttagttagaagc

SEQ ID NO: 292965 - DNA, 33 bp, Homo sapien
ttgggtagtaagaacaccagtatggagacccct

SEQ ID NO: 292966 - DNA, 33 bp, Homo sapien
ttgggtagtaagaacatcagtatggagacccct

SEQ ID NO: 292967 - DNA, 33 bp, Homo sapien
ggaagagaagaagccaatcttgaatcagttaga

SEQ ID NO: 292968 - DNA, 33 bp, Homo sapien
ggaagagaagaagccagtcttgaatcagttaga

SEQ ID NO: 292969 - DNA, 33 bp, Homo sapien
gtaaagttatgttgtaactacctcatagttttg

SEQ ID NO: 292970 - DNA, 33 bp, Homo sapien
gtaaagttatgttgtatctacctcatagttttg

SEQ ID NO: 292971 - DNA, 33 bp, Homo sapien
aatatcttagcctacaaaagtgaagtgaaccaa

SEQ ID NO: 292972 - DNA, 33 bp, Homo sapien
aatatcttagcctacagaagtgaagtgaaccaa

SEQ ID NO: 292973 - DNA, 33 bp, Homo sapien
tggattcaactgaagaacttacactctaaatca

SEQ ID NO: 292974 - DNA, 33 bp, Homo sapien
tggattcaactgaagaccttacactctaaatca

SEQ ID NO: 292975 - DNA, 33 bp, Homo sapien
ctgtggttaatgtgcccgatgggtaagttgtcc

SEQ ID NO: 292976 - DNA, 33 bp, Homo sapien
ctgtggttaatgtgcctgatgggtaagttgtcc

SEQ ID NO: 292977 - DNA, 33 bp, Homo sapien
ttcgggaagtctggtaagattgttcactaaaat

SEQ ID NO: 292978 - DNA, 33 bp, Homo sapien
ttcgggaagtctggtatgattgttcactaaaat

SEQ ID NO: 292979 - DNA, 33 bp, Homo sapien
aaaaatagtagctcagcccagcatagtaccaat

SEQ ID NO: 292980 - DNA, 33 bp, Homo sapien
aaaaatagtagctcagtccagcatagtaccaat

SEQ ID NO: 292981 - DNA, 33 bp, Homo sapien
gaaatcacgaaaatgacattatggaaaaagatc

SEQ ID NO: 292982 - DNA, 33 bp, Homo sapien
gaaatcacgaaaatgagattatggaaaaagatc

SEQ ID NO: 292983 - DNA, 33 bp, Homo sapien
taagtcatttcggccacagccttaaaaccctcc

SEQ ID NO: 292984 - DNA, 33 bp, Homo sapien
taagtcatttcggccatagccttaaaaccctcc

SEQ ID NO: 292985 - DNA, 33 bp, Homo sapien
tactttaggaggccaaatcaaaacttcacagca

SEQ ID NO: 292986 - DNA, 33 bp, Homo sapien
tactttaggaggccaactcaaaacttcacagca

SEQ ID NO: 292987 - DNA, 33 bp, Homo sapien
ggaaggtgaaactgaaagacatagagccattcc

SEQ ID NO: 292988 - DNA, 33 bp, Homo sapien
ggaaggtgaaactgaaggacatagagccattcc

SEQ ID NO: 292989 - DNA, 33 bp, Homo sapien
gataattttacaacaaccggttacttctatttg

SEQ ID NO: 292990 - DNA, 33 bp, Homo sapien
gataattttacaacaatcggttacttctatttg

SEQ ID NO: 292991 - DNA, 33 bp, Homo sapien
caactgtagagttgaaatgtttgaagtgactgt

SEQ ID NO: 292992 - DNA, 33 bp, Homo sapien
caactgtagagttgaactgtttgaagtgactgt

SEQ ID NO: 292993 - DNA, 33 bp, Homo sapien
gttgaatgaaagattaagttttccactagtgtt

SEQ ID NO: 292994 - DNA, 33 bp, Homo sapien
gttgaatgaaagattatgttttccactagtgtt

SEQ ID NO: 292995 - DNA, 33 bp, Homo sapien
tatcagggagattggcaaatgctacaaataagg

SEQ ID NO: 292996 - DNA, 33 bp, Homo sapien
tatcagggagattggcgaatgctacaaataagg

SEQ ID NO: 292997 - DNA, 33 bp, Homo sapien
tcatgtaagtactagtcaagtctaaggtataag

SEQ ID NO: 292998 - DNA, 33 bp, Homo sapien
tcatgtaagtactagtgaagtctaaggtataag

SEQ ID NO: 292999 - DNA, 33 bp, Homo sapien
cctcagccatctccgaccatgtgaaaaacagac

SEQ ID NO: 293000 - DNA, 33 bp, Homo sapien
cctcagccatctccgatcatgtgaaaaacagac

SEQ ID NO: 293001 - DNA, 33 bp, Homo sapien
aaacgctaacttcccaatcccctgtaccctcag

SEQ ID NO: 293002 - DNA, 33 bp, Homo sapien
aaacgctaacttcccactcccctgtaccctcag

SEQ ID NO: 293003 - DNA, 33 bp, Homo sapien
tattagtaacaattacagcaaagttagcttcct

SEQ ID NO: 293004 - DNA, 33 bp, Homo sapien
tattagtaacaattacggcaaagttagcttcct

SEQ ID NO: 293005 - DNA, 33 bp, Homo sapien
tcctctaggttaactgaagtgaatcaaactatt

SEQ ID NO: 293006 - DNA, 33 bp, Homo sapien
tcctctaggttaactgcagtgaatcaaactatt

SEQ ID NO: 293007 - DNA, 33 bp, Homo sapien
attttcagagcttgaacatacaaacaggcacat

SEQ ID NO: 293008 - DNA, 33 bp, Homo sapien
attttcagagcttgaatatacaaacaggcacat

SEQ ID NO: 293009 - DNA, 33 bp, Homo sapien
tcattgcaggatctatgaaaaaggcttttacct

SEQ ID NO: 293010 - DNA, 33 bp, Homo sapien
tcattgcaggatctattaaaaaggcttttacct

SEQ ID NO: 293011 - DNA, 33 bp, Homo sapien
atgtttaccccttaaaactgatactgactgccc

SEQ ID NO: 293012 - DNA, 33 bp, Homo sapien
atgtttaccccttaaagctgatactgactgccc

SEQ ID NO: 293013 - DNA, 33 bp, Homo sapien
tttgttgttgttgttcaacttatttcattcaga

SEQ ID NO: 293014 - DNA, 33 bp, Homo sapien
tttgttgttgttgttcgacttatttcattcaga

SEQ ID NO: 293015 - DNA, 33 bp, Homo sapien
agtcacaaagagaaaaaaacagtgcttagtgtc

SEQ ID NO: 293016 - DNA, 33 bp, Homo sapien
agtcacaaagagaaaagaacagtgcttagtgtc

SEQ ID NO: 293017 - DNA, 33 bp, Homo sapien
gagttgttgtctgaaaataccttgatgtttgga

SEQ ID NO: 293018 - DNA, 33 bp, Homo sapien
gagttgttgtctgaaagtaccttgatgtttgga

SEQ ID NO: 293019 - DNA, 33 bp, Homo sapien
gagcacaaagaacagacattgcatcctagttca

SEQ ID NO: 293020 - DNA, 33 bp, Homo sapien
gagcacaaagaacagatattgcatcctagttca

SEQ ID NO: 293021 - DNA, 33 bp, Homo sapien
ccgtgtaatatcttcagtaaaactcatcacagt

SEQ ID NO: 293022 - DNA, 33 bp, Homo sapien
ccgtgtaatatcttcattaaaactcatcacagt

SEQ ID NO: 293023 - DNA, 33 bp, Homo sapien
gaaaaagaacaaattgaagcaaataagatgaaa

SEQ ID NO: 293024 - DNA, 33 bp, Homo sapien
gaaaaagaacaaattggagcaaataagatgaaa

SEQ ID NO: 293025 - DNA, 33 bp, Homo sapien
ggaagcaggaaagaccacagaactcttgtttca

SEQ ID NO: 293026 - DNA, 33 bp, Homo sapien
ggaagcaggaaagaccgcagaactcttgtttca

SEQ ID NO: 293027 - DNA, 33 bp, Homo sapien
ctaggtttagtagaagcctgtgaaatagaagca

SEQ ID NO: 293028 - DNA, 33 bp, Homo sapien
ctaggtttagtagaaggctgtgaaatagaagca

SEQ ID NO: 293029 - DNA, 33 bp, Homo sapien
taaaacagatttctgaaggttctatcatttttt

SEQ ID NO: 293030 - DNA, 33 bp, Homo sapien
taaaacagatttctgatggttctatcatttttt

SEQ ID NO: 293031 - DNA, 33 bp, Homo sapien
tcacaggtattgtgcaaagggccattcagagtg

SEQ ID NO: 293032 - DNA, 33 bp, Homo sapien
tcacaggtattgtgcatagggccattcagagtg

SEQ ID NO: 293033 - DNA, 33 bp, Homo sapien
cttctattcaccacacaatctaccatcccattt

SEQ ID NO: 293034 - DNA, 33 bp, Homo sapien
cttctattcaccacacgatctaccatcccattt

SEQ ID NO: 293035 - DNA, 33 bp, Homo sapien
tttccaaagatgcaataagtaagaaaaaaaagc

SEQ ID NO: 293036 - DNA, 33 bp, Homo sapien
tttccaaagatgcaattagtaagaaaaaaaagc

SEQ ID NO: 293037 - DNA, 33 bp, Homo sapien
aaaatatgaagacttcaaagttatttatccaaa

SEQ ID NO: 293038 - DNA, 33 bp, Homo sapien
aaaatatgaagacttcgaagttatttatccaaa

SEQ ID NO: 293039 - DNA, 33 bp, Homo sapien
atagtctggatgatgagaccaagattaatttgt

SEQ ID NO: 293040 - DNA, 33 bp, Homo sapien
atagtctggatgatgataccaagattaatttgt

SEQ ID NO: 293041 - DNA, 33 bp, Homo sapien
ggaaatggaggaactacaggtcagtaattagcc

SEQ ID NO: 293042 - DNA, 33 bp, Homo sapien
ggaaatggaggaactagaggtcagtaattagcc

SEQ ID NO: 293043 - DNA, 33 bp, Homo sapien
ctttatccaagcatgacgccatctagaaatatg

SEQ ID NO: 293044 - DNA, 33 bp, Homo sapien
ctttatccaagcatgatgccatctagaaatatg

SEQ ID NO: 293045 - DNA, 33 bp, Homo sapien
tagaggttcaataatgcaccaaggatgtgggat

SEQ ID NO: 293046 - DNA, 33 bp, Homo sapien
tagaggttcaataatgtaccaaggatgtgggat

SEQ ID NO: 293047 - DNA, 33 bp, Homo sapien
gttccttgctaaaacaaaaatctattcaaaaag

SEQ ID NO: 293048 - DNA, 33 bp, Homo sapien
gttccttgctaaaacacaaatctattcaaaaag

SEQ ID NO: 293049 - DNA, 33 bp, Homo sapien
tttaagtaagatttcaatattgtgtcacaggca

SEQ ID NO: 293050 - DNA, 33 bp, Homo sapien
tttaagtaagatttcactattgtgtcacaggca

SEQ ID NO: 293051 - DNA, 33 bp, Homo sapien
tttgttgttgttcaaactattaactcttagctc

SEQ ID NO: 293052 - DNA, 33 bp, Homo sapien
tttgttgttgttcaaattattaactcttagctc

SEQ ID NO: 293053 - DNA, 33 bp, Homo sapien
ttcctttctgaatctacacatcctaaaatattc

SEQ ID NO: 293054 - DNA, 33 bp, Homo sapien
ttcctttctgaatctatacatcctaaaatattc

SEQ ID NO: 293055 - DNA, 33 bp, Homo sapien
tgaatttagcacagaaaatatgcaaagacagaa

SEQ ID NO: 293056 - DNA, 33 bp, Homo sapien
tgaatttagcacagaagatatgcaaagacagaa

SEQ ID NO: 293057 - DNA, 33 bp, Homo sapien
agacccacaccattcaaactcatgctgttcaag

SEQ ID NO: 293058 - DNA, 33 bp, Homo sapien
agacccacaccattcagactcatgctgttcaag

SEQ ID NO: 293059 - DNA, 33 bp, Homo sapien
tagtagatggagttgcacttgaatctatattgc

SEQ ID NO: 293060 - DNA, 33 bp, Homo sapien
tagtagatggagttgctcttgaatctatattgc

SEQ ID NO: 293061 - DNA, 33 bp, Homo sapien
gagcacaacagcacaacgagaagcaagaaagtc

SEQ ID NO: 293062 - DNA, 33 bp, Homo sapien
gagcacaacagcacaatgagaagcaagaaagtc

SEQ ID NO: 293063 - DNA, 33 bp, Homo sapien
gcatgcagggtaacaccgattatcatgaattct

SEQ ID NO: 293064 - DNA, 33 bp, Homo sapien
gcatgcagggtaacactgattatcatgaattct

SEQ ID NO: 293065 - DNA, 33 bp, Homo sapien
aaagtgtcatgtggtaccctagatgtgaaggca

SEQ ID NO: 293066 - DNA, 33 bp, Homo sapien
aaagtgtcatgtggtatcctagatgtgaaggca

SEQ ID NO: 293067 - DNA, 33 bp, Homo sapien
tttccttcatgctgtagagacaagttagcaaat

SEQ ID NO: 293068 - DNA, 33 bp, Homo sapien
tttccttcatgctgtatagacaagttagcaaat

SEQ ID NO: 293069 - DNA, 33 bp, Homo sapien
atctaacatttggacactaatagctagactgct

SEQ ID NO: 293070 - DNA, 33 bp, Homo sapien
atctaacatttggacattaatagctagactgct

SEQ ID NO: 293071 - DNA, 33 bp, Homo sapien
atcatttcctttattacgtcgatgtgcttggtt

SEQ ID NO: 293072 - DNA, 33 bp, Homo sapien
atcatttcctttattatgtcgatgtgcttggtt

SEQ ID NO: 293073 - DNA, 33 bp, Homo sapien
tcatcacagaggtagacgtatattcattcatat

SEQ ID NO: 293074 - DNA, 33 bp, Homo sapien
tcatcacagaggtagaggtatattcattcatat

SEQ ID NO: 293075 - DNA, 33 bp, Homo sapien
ttgccttccgccatgaatatgtttcctgaggcc

SEQ ID NO: 293076 - DNA, 33 bp, Homo sapien
ttgccttccgccatgactatgtttcctgaggcc

SEQ ID NO: 293077 - DNA, 33 bp, Homo sapien
atcattatgaccaaaaattatgtatgttgttat

SEQ ID NO: 293078 - DNA, 33 bp, Homo sapien
atcattatgaccaaaagttatgtatgttgttat

SEQ ID NO: 293079 - DNA, 33 bp, Homo sapien
ctgtgtagaggatatacgtaatgcattttctta

SEQ ID NO: 293080 - DNA, 33 bp, Homo sapien
ctgtgtagaggatatatgtaatgcattttctta

SEQ ID NO: 293081 - DNA, 33 bp, Homo sapien
caccaaaggttctttgaaacataagccatagct

SEQ ID NO: 293082 - DNA, 33 bp, Homo sapien
caccaaaggttctttgtaacataagccatagct

SEQ ID NO: 293083 - DNA, 33 bp, Homo sapien
ctgcagcctttgggtacacagcttcatagctat

SEQ ID NO: 293084 - DNA, 33 bp, Homo sapien
ctgcagcctttgggtatacagcttcatagctat

SEQ ID NO: 293085 - DNA, 33 bp, Homo sapien
gcagtgcatgcacctaaacacatagtacacaca

SEQ ID NO: 293086 - DNA, 33 bp, Homo sapien
gcagtgcatgcacctacacacatagtacacaca

SEQ ID NO: 293087 - DNA, 33 bp, Homo sapien
actgatgccatcatgtcacaaagaataaagctc

SEQ ID NO: 293088 - DNA, 33 bp, Homo sapien
actgatgccatcatgttacaaagaataaagctc

SEQ ID NO: 293089 - DNA, 33 bp, Homo sapien
tgttattccatcacaaagggcaatttattttca

SEQ ID NO: 293090 - DNA, 33 bp, Homo sapien
tgttattccatcacaacgggcaatttattttca

SEQ ID NO: 293091 - DNA, 33 bp, Homo sapien
tacagccattttccataaaatctgttagtagac

SEQ ID NO: 293092 - DNA, 33 bp, Homo sapien
tacagccattttccatcaaatctgttagtagac

SEQ ID NO: 293093 - DNA, 33 bp, Homo sapien
ctggtataaatatgtcccaaacattgcataaga

SEQ ID NO: 293094 - DNA, 33 bp, Homo sapien
ctggtataaatatgtctcaaacattgcataaga

SEQ ID NO: 293095 - DNA, 33 bp, Homo sapien
gaaaaagccaaaaccaaagaaagcaagtgagat

SEQ ID NO: 293096 - DNA, 33 bp, Homo sapien
gaaaaagccaaaaccagagaaagcaagtgagat

SEQ ID NO: 293097 - DNA, 33 bp, Homo sapien
cctcagcatattctgaaccactttttatccatt

SEQ ID NO: 293098 - DNA, 33 bp, Homo sapien
cctcagcatattctgagccactttttatccatt

SEQ ID NO: 293099 - DNA, 33 bp, Homo sapien
ttttatgctgatcgtcccagtaagacactttaa

SEQ ID NO: 293100 - DNA, 33 bp, Homo sapien
ttttatgctgatcgtctcagtaagacactttaa

SEQ ID NO: 293101 - DNA, 33 bp, Homo sapien
catttatgttacactaaagaactcaagttgtgg

SEQ ID NO: 293102 - DNA, 33 bp, Homo sapien
catttatgttacactatagaactcaagttgtgg

SEQ ID NO: 293103 - DNA, 33 bp, Homo sapien
gggaaagagttacaaaatcagaagccacaaaca

SEQ ID NO: 293104 - DNA, 33 bp, Homo sapien
gggaaagagttacaaagtcagaagccacaaaca

SEQ ID NO: 293105 - DNA, 33 bp, Homo sapien
ggagatctgtttcacaataatgggaatatactt

SEQ ID NO: 293106 - DNA, 33 bp, Homo sapien
ggagatctgtttcacagtaatgggaatatactt

SEQ ID NO: 293107 - DNA, 33 bp, Homo sapien
taagtgatagcaagaaagtgcaaaatgtaaacc

SEQ ID NO: 293108 - DNA, 33 bp, Homo sapien
taagtgatagcaagaatgtgcaaaatgtaaacc

SEQ ID NO: 293109 - DNA, 33 bp, Homo sapien
gttttgtttttcatagaagccaccttaattggt

SEQ ID NO: 293110 - DNA, 33 bp, Homo sapien
gttttgtttttcatagtagccaccttaattggt

SEQ ID NO: 293111 - DNA, 33 bp, Homo sapien
ggttgccttatcactcaattgattgtgattttt

SEQ ID NO: 293112 - DNA, 33 bp, Homo sapien
ggttgccttatcactctattgattgtgattttt

SEQ ID NO: 293113 - DNA, 33 bp, Homo sapien
gacttactcattattacaggaatagcacaggaa

SEQ ID NO: 293114 - DNA, 33 bp, Homo sapien
gacttactcattattataggaatagcacaggaa

SEQ ID NO: 293115 - DNA, 33 bp, Homo sapien
caatttctttacagtaaaaagatgctgaggaaa

SEQ ID NO: 293116 - DNA, 33 bp, Homo sapien
caatttctttacagtagaaagatgctgaggaaa

SEQ ID NO: 293117 - DNA, 33 bp, Homo sapien
atggatttttactgggacaagtttctgattcca

SEQ ID NO: 293118 - DNA, 33 bp, Homo sapien
atggatttttactggggcaagtttctgattcca

SEQ ID NO: 293119 - DNA, 33 bp, Homo sapien
acgattttgaaagttacgtgttgctttttagag

SEQ ID NO: 293120 - DNA, 33 bp, Homo sapien
acgattttgaaagttaggtgttgctttttagag

SEQ ID NO: 293121 - DNA, 33 bp, Homo sapien
atcatagggttctgtacagtcattgtggccaag

SEQ ID NO: 293122 - DNA, 33 bp, Homo sapien
atcatagggttctgtatagtcattgtggccaag

SEQ ID NO: 293123 - DNA, 33 bp, Homo sapien
tcttccctgaagacaacgattgttctttctgag

SEQ ID NO: 293124 - DNA, 33 bp, Homo sapien
tcttccctgaagacaatgattgttctttctgag

SEQ ID NO: 293125 - DNA, 33 bp, Homo sapien
tggaaatcatgtttccaatctgaccccaggcct

SEQ ID NO: 293126 - DNA, 33 bp, Homo sapien
tggaaatcatgtttccgatctgaccccaggcct

SEQ ID NO: 293127 - DNA, 33 bp, Homo sapien
tcaaatatctccaaatcaaattcatggtaattt

SEQ ID NO: 293128 - DNA, 33 bp, Homo sapien
tcaaatatctccaaatgaaattcatggtaattt

SEQ ID NO: 293129 - DNA, 33 bp, Homo sapien
gaaacaagaaaacaaccataacaacaaccataa

SEQ ID NO: 293130 - DNA, 33 bp, Homo sapien
gaaacaagaaaacaacgataacaacaaccataa

SEQ ID NO: 293131 - DNA, 33 bp, Homo sapien
gtgcctcagcgccaaacaggatccaggcctccg

SEQ ID NO: 293132 - DNA, 33 bp, Homo sapien
gtgcctcagcgccaaataggatccaggcctccg

SEQ ID NO: 293133 - DNA, 33 bp, Homo sapien
aaataaaccattcagacgcagttcagaaaaaga

SEQ ID NO: 293134 - DNA, 33 bp, Homo sapien
aaataaaccattcagatgcagttcagaaaaaga

SEQ ID NO: 293135 - DNA, 33 bp, Homo sapien
taacacactagcactgaaagaatgcaaatgata

SEQ ID NO: 293136 - DNA, 33 bp, Homo sapien
taacacactagcactgcaagaatgcaaatgata

SEQ ID NO: 293137 - DNA, 33 bp, Homo sapien
tggtgagcaagttggaaaggggtttggctttgt

SEQ ID NO: 293138 - DNA, 33 bp, Homo sapien
tggtgagcaagttggagaggggtttggctttgt

SEQ ID NO: 293139 - DNA, 33 bp, Homo sapien
tgtctgactgctatcaccgaatatattcttgaa

SEQ ID NO: 293140 - DNA, 33 bp, Homo sapien
tgtctgactgctatcatcgaatatattcttgaa

SEQ ID NO: 293141 - DNA, 33 bp, Homo sapien
gctcaggaagacaaaccggtgacacgaaaaaga

SEQ ID NO: 293142 - DNA, 33 bp, Homo sapien
gctcaggaagacaaactggtgacacgaaaaaga

SEQ ID NO: 293143 - DNA, 33 bp, Homo sapien
gctttcaggaaccatgcaatttctgttctctga

SEQ ID NO: 293144 - DNA, 33 bp, Homo sapien
gctttcaggaaccatgtaatttctgttctctga

SEQ ID NO: 293145 - DNA, 33 bp, Homo sapien
gtggtaactctgacagaacgtggctatacattc

SEQ ID NO: 293146 - DNA, 33 bp, Homo sapien
gtggtaactctgacagcacgtggctatacattc

SEQ ID NO: 293147 - DNA, 33 bp, Homo sapien
ttgacaggaaggagacaaatctcggacttgatc

SEQ ID NO: 293148 - DNA, 33 bp, Homo sapien
ttgacaggaaggagacgaatctcggacttgatc

SEQ ID NO: 293149 - DNA, 33 bp, Homo sapien
tgctctatcttttacactaaatctggagaataa

SEQ ID NO: 293150 - DNA, 33 bp, Homo sapien
tgctctatcttttacattaaatctggagaataa

SEQ ID NO: 293151 - DNA, 33 bp, Homo sapien
actaagaaataatgaaaaagaaccacgtaggaa

SEQ ID NO: 293152 - DNA, 33 bp, Homo sapien
actaagaaataatgaacaagaaccacgtaggaa

SEQ ID NO: 293153 - DNA, 33 bp, Homo sapien
tggaaaaaaacataagaatgcatacatgggtgc

SEQ ID NO: 293154 - DNA, 33 bp, Homo sapien
tggaaaaaaacataagcatgcatacatgggtgc

SEQ ID NO: 293155 - DNA, 33 bp, Homo sapien
ttagaggccataaaacaatcataaaggtgtgaa

SEQ ID NO: 293156 - DNA, 33 bp, Homo sapien
ttagaggccataaaaccatcataaaggtgtgaa

SEQ ID NO: 293157 - DNA, 33 bp, Homo sapien
tactgtagtggctacaccatagtcgcagatttg

SEQ ID NO: 293158 - DNA, 33 bp, Homo sapien
tactgtagtggctacatcatagtcgcagatttg

SEQ ID NO: 293159 - DNA, 33 bp, Homo sapien
gtataaattagtctcaaaggaaataatcagatg

SEQ ID NO: 293160 - DNA, 33 bp, Homo sapien
gtataaattagtctcacaggaaataatcagatg

SEQ ID NO: 293161 - DNA, 33 bp, Homo sapien
agatatcccaaatgaccgaaattaccacaactg

SEQ ID NO: 293162 - DNA, 33 bp, Homo sapien
agatatcccaaatgactgaaattaccacaactg

SEQ ID NO: 293163 - DNA, 33 bp, Homo sapien
ggcatttagaaagtaactgtgtagaagtcactc

SEQ ID NO: 293164 - DNA, 33 bp, Homo sapien
ggcatttagaaagtaattgtgtagaagtcactc

SEQ ID NO: 293165 - DNA, 33 bp, Homo sapien
tattttctgtatcaccagagtacatcaacatac

SEQ ID NO: 293166 - DNA, 33 bp, Homo sapien
tattttctgtatcaccggagtacatcaacatac

SEQ ID NO: 293167 - DNA, 33 bp, Homo sapien
gagaaagatattcccaaacaagatgatgagccc

SEQ ID NO: 293168 - DNA, 33 bp, Homo sapien
gagaaagatattcccagacaagatgatgagccc

SEQ ID NO: 293169 - DNA, 33 bp, Homo sapien
agtctctctcatgtgaacaaacagatattgcaa

SEQ ID NO: 293170 - DNA, 33 bp, Homo sapien
agtctctctcatgtgaccaaacagatattgcaa

SEQ ID NO: 293171 - DNA, 33 bp, Homo sapien
cactgaggcttggcaccatttgagagatgccaa

SEQ ID NO: 293172 - DNA, 33 bp, Homo sapien
cactgaggcttggcactatttgagagatgccaa

SEQ ID NO: 293173 - DNA, 33 bp, Homo sapien
atctaaaaatatgcaccggtcttggaaaacatg

SEQ ID NO: 293174 - DNA, 33 bp, Homo sapien
atctaaaaatatgcactggtcttggaaaacatg

SEQ ID NO: 293175 - DNA, 33 bp, Homo sapien
tcttttatttgcccagacatctgcatgacatgg

SEQ ID NO: 293176 - DNA, 33 bp, Homo sapien
tcttttatttgcccagccatctgcatgacatgg

SEQ ID NO: 293177 - DNA, 33 bp, Homo sapien
gtatcaaacgataatgaagtaagaactgatccc

SEQ ID NO: 293178 - DNA, 33 bp, Homo sapien
gtatcaaacgataatgcagtaagaactgatccc

SEQ ID NO: 293179 - DNA, 33 bp, Homo sapien
aaatcacttagccataacatcttccaattgaga

SEQ ID NO: 293180 - DNA, 33 bp, Homo sapien
aaatcacttagccatagcatcttccaattgaga

SEQ ID NO: 293181 - DNA, 33 bp, Homo sapien
ttatgaaaatgcactcaactgttttctgtagtg

SEQ ID NO: 293182 - DNA, 33 bp, Homo sapien
ttatgaaaatgcactcgactgttttctgtagtg

SEQ ID NO: 293183 - DNA, 33 bp, Homo sapien
tttttatcttattggcccatctcggttttggtt

SEQ ID NO: 293184 - DNA, 33 bp, Homo sapien
tttttatcttattggctcatctcggttttggtt

SEQ ID NO: 293185 - DNA, 33 bp, Homo sapien
aagagccaaacagaaacgagagcccaaccactc

SEQ ID NO: 293186 - DNA, 33 bp, Homo sapien
aagagccaaacagaaatgagagcccaaccactc

SEQ ID NO: 293187 - DNA, 33 bp, Homo sapien
ttcagaaaatggaataagttagtacttgcatta

SEQ ID NO: 293188 - DNA, 33 bp, Homo sapien
ttcagaaaatggaatatgttagtacttgcatta

SEQ ID NO: 293189 - DNA, 33 bp, Homo sapien
aaagtgaatgagaacaatactgataataatagc

SEQ ID NO: 293190 - DNA, 33 bp, Homo sapien
aaagtgaatgagaacagtactgataataatagc

SEQ ID NO: 293191 - DNA, 33 bp, Homo sapien
aactgtagttgaaggcagaatgatttttattca

SEQ ID NO: 293192 - DNA, 33 bp, Homo sapien
aactgtagttgaaggcggaatgatttttattca

SEQ ID NO: 293193 - DNA, 33 bp, Homo sapien
ctcaggagtggcaaaaattttctgagccaattc

SEQ ID NO: 293194 - DNA, 33 bp, Homo sapien
ctcaggagtggcaaaatttttctgagccaattc

SEQ ID NO: 293195 - DNA, 33 bp, Homo sapien
atggatggttcctagacggccatttagtaaatt

SEQ ID NO: 293196 - DNA, 33 bp, Homo sapien
atggatggttcctagatggccatttagtaaatt

SEQ ID NO: 293197 - DNA, 33 bp, Homo sapien
ctcatgttagttgaaaggcctacctgtgcacca

SEQ ID NO: 293198 - DNA, 33 bp, Homo sapien
ctcatgttagttgaaatgcctacctgtgcacca

SEQ ID NO: 293199 - DNA, 33 bp, Homo sapien
tctttcaagctcctgccgcaatttttacttctt

SEQ ID NO: 293200 - DNA, 33 bp, Homo sapien
tctttcaagctcctgctgcaatttttacttctt

SEQ ID NO: 293201 - DNA, 33 bp, Homo sapien
attacttcctaagacactcattatttccacctc

SEQ ID NO: 293202 - DNA, 33 bp, Homo sapien
attacttcctaagacagtcattatttccacctc

SEQ ID NO: 293203 - DNA, 33 bp, Homo sapien
aattatgagatgtggaaggactaaggagtctgc

SEQ ID NO: 293204 - DNA, 33 bp, Homo sapien
aattatgagatgtggagggactaaggagtctgc

SEQ ID NO: 293205 - DNA, 33 bp, Homo sapien
ccagtctcttgtaaataacccggactcaaataa

SEQ ID NO: 293206 - DNA, 33 bp, Homo sapien
ccagtctcttgtaaattacccggactcaaataa

SEQ ID NO: 293207 - DNA, 33 bp, Homo sapien
cattttgctttacgggcattctattgtctggac

SEQ ID NO: 293208 - DNA, 33 bp, Homo sapien
cattttgctttacgggtattctattgtctggac

SEQ ID NO: 293209 - DNA, 33 bp, Homo sapien
atagaagttagtgctggagttgcttggtagatt

SEQ ID NO: 293210 - DNA, 33 bp, Homo sapien
atagaagttagtgctgtagttgcttggtagatt

SEQ ID NO: 293211 - DNA, 33 bp, Homo sapien
tttcttattccaattcactccctacccactgtg

SEQ ID NO: 293212 - DNA, 33 bp, Homo sapien
tttcttattccaattcgctccctacccactgtg

SEQ ID NO: 293213 - DNA, 33 bp, Homo sapien
ctattcatttgttcttaaaaaatatgcctgggt

SEQ ID NO: 293214 - DNA, 33 bp, Homo sapien
ctattcatttgttctttaaaaatatgcctgggt

SEQ ID NO: 293215 - DNA, 33 bp, Homo sapien
aagtatttgtggaaagaaacagaggaagagtag

SEQ ID NO: 293216 - DNA, 33 bp, Homo sapien
aagtatttgtggaaagcaacagaggaagagtag

SEQ ID NO: 293217 - DNA, 33 bp, Homo sapien
tttgacgatgataggaaactcccatctgaataa

SEQ ID NO: 293218 - DNA, 33 bp, Homo sapien
tttgacgatgataggacactcccatctgaataa

SEQ ID NO: 293219 - DNA, 33 bp, Homo sapien
gatgacctaaaacaacaagattgcagcacctat

SEQ ID NO: 293220 - DNA, 33 bp, Homo sapien
gatgacctaaaacaacgagattgcagcacctat

SEQ ID NO: 293221 - DNA, 33 bp, Homo sapien
ccatacacaggcagccacagtctggaagcagga

SEQ ID NO: 293222 - DNA, 33 bp, Homo sapien
ccatacacaggcagccgcagtctggaagcagga

SEQ ID NO: 293223 - DNA, 33 bp, Homo sapien
tgtgaccatgctgagacggggtgtgggcatggc

SEQ ID NO: 293224 - DNA, 33 bp, Homo sapien
tgtgaccatgctgagatggggtgtgggcatggc

SEQ ID NO: 293225 - DNA, 33 bp, Homo sapien
gtccataagcaaaacaaatatccatgtcatcct

SEQ ID NO: 293226 - DNA, 33 bp, Homo sapien
gtccataagcaaaacacatatccatgtcatcct

SEQ ID NO: 293227 - DNA, 33 bp, Homo sapien
atcactgcccatttccacgatggcctcgtgggc

SEQ ID NO: 293228 - DNA, 33 bp, Homo sapien
atcactgcccatttccgcgatggcctcgtgggc

SEQ ID NO: 293229 - DNA, 33 bp, Homo sapien
tcctcttttgacaactcaactatacttgccaac

SEQ ID NO: 293230 - DNA, 33 bp, Homo sapien
tcctcttttgacaactgaactatacttgccaac

SEQ ID NO: 293231 - DNA, 33 bp, Homo sapien
tattttggctctgaagcctcttatgtcaaagct

SEQ ID NO: 293232 - DNA, 33 bp, Homo sapien
tattttggctctgaagtctcttatgtcaaagct

SEQ ID NO: 293233 - DNA, 33 bp, Homo sapien
tttggaaccattgcaccgcgatttatgatttca

SEQ ID NO: 293234 - DNA, 33 bp, Homo sapien
tttggaaccattgcactgcgatttatgatttca

SEQ ID NO: 293235 - DNA, 33 bp, Homo sapien
tttcacctaacaatgacaaatggtggcagaaat

SEQ ID NO: 293236 - DNA, 33 bp, Homo sapien
tttcacctaacaatgataaatggtggcagaaat

SEQ ID NO: 293237 - DNA, 33 bp, Homo sapien
agatgagatagacaacaagtgagagtatattag

SEQ ID NO: 293238 - DNA, 33 bp, Homo sapien
agatgagatagacaacgagtgagagtatattag

SEQ ID NO: 293239 - DNA, 33 bp, Homo sapien
gcatgaccatgtaaagcaaccctaatcctcaca

SEQ ID NO: 293240 - DNA, 33 bp, Homo sapien
gcatgaccatgtaaagtaaccctaatcctcaca

SEQ ID NO: 293241 - DNA, 33 bp, Homo sapien
agaaatgatacttaagacagtcgagattttgga

SEQ ID NO: 293242 - DNA, 33 bp, Homo sapien
agaaatgatacttaaggcagtcgagattttgga

SEQ ID NO: 293243 - DNA, 33 bp, Homo sapien
tcttgaaaatgttcatcaggtaaatagatttta

SEQ ID NO: 293244 - DNA, 33 bp, Homo sapien
tcttgaaaatgttcatgaggtaaatagatttta

SEQ ID NO: 293245 - DNA, 33 bp, Homo sapien
aacaataaagcaaaaacgtttgtcatccataaa

SEQ ID NO: 293246 - DNA, 33 bp, Homo sapien
aacaataaagcaaaaatgtttgtcatccataaa

SEQ ID NO: 293247 - DNA, 33 bp, Homo sapien
agggtttggtgtgcaccgcgacgggcagctgtc

SEQ ID NO: 293248 - DNA, 33 bp, Homo sapien
agggtttggtgtgcactgcgacgggcagctgtc

SEQ ID NO: 293249 - DNA, 33 bp, Homo sapien
tctcagatttctctcgcacagtggttgaactta

SEQ ID NO: 293250 - DNA, 33 bp, Homo sapien
tctcagatttctctcggacagtggttgaactta

SEQ ID NO: 293251 - DNA, 33 bp, Homo sapien
tcaaaacttaaagacagagtccctacatttgca

SEQ ID NO: 293252 - DNA, 33 bp, Homo sapien
tcaaaacttaaagacatagtccctacatttgca

SEQ ID NO: 293253 - DNA, 33 bp, Homo sapien
cctaatgacctaagaaaccctaagatctgagtc

SEQ ID NO: 293254 - DNA, 33 bp, Homo sapien
cctaatgacctaagaacccctaagatctgagtc

SEQ ID NO: 293255 - DNA, 33 bp, Homo sapien
tggagagcagtaaacaataagttccaccttcac

SEQ ID NO: 293256 - DNA, 33 bp, Homo sapien
tggagagcagtaaacagtaagttccaccttcac

SEQ ID NO: 293257 - DNA, 33 bp, Homo sapien
aggcaatttgacaaagactcacttatcctaaat

SEQ ID NO: 293258 - DNA, 33 bp, Homo sapien
aggcaatttgacaaaggctcacttatcctaaat

SEQ ID NO: 293259 - DNA, 33 bp, Homo sapien
aaattggcacaactacaaggcctttcttatctt

SEQ ID NO: 293260 - DNA, 33 bp, Homo sapien
aaattggcacaactacgaggcctttcttatctt

SEQ ID NO: 293261 - DNA, 33 bp, Homo sapien
ttctccaagcatatacccaaatcacatccaaaa

SEQ ID NO: 293262 - DNA, 33 bp, Homo sapien
ttctccaagcatatactcaaatcacatccaaaa

SEQ ID NO: 293263 - DNA, 33 bp, Homo sapien
cttagtccaagacaaacgtgtaggcaagttgaa

SEQ ID NO: 293264 - DNA, 33 bp, Homo sapien
cttagtccaagacaaatgtgtaggcaagttgaa

SEQ ID NO: 293265 - DNA, 33 bp, Homo sapien
caaggcatacaatccgcacaaagtaaaccatca

SEQ ID NO: 293266 - DNA, 33 bp, Homo sapien
caaggcatacaatccggacaaagtaaaccatca

SEQ ID NO: 293267 - DNA, 33 bp, Homo sapien
aagtgacaagcatagtaacagatccattacatt

SEQ ID NO: 293268 - DNA, 33 bp, Homo sapien
aagtgacaagcatagtgacagatccattacatt

SEQ ID NO: 293269 - DNA, 33 bp, Homo sapien
aaacattttaaaagcaaggcatcaggtttgata

SEQ ID NO: 293270 - DNA, 33 bp, Homo sapien
aaacattttaaaagcatggcatcaggtttgata

SEQ ID NO: 293271 - DNA, 33 bp, Homo sapien
gccatctacccatcaaagttccttacactgtgg

SEQ ID NO: 293272 - DNA, 33 bp, Homo sapien
gccatctacccatcaacgttccttacactgtgg

SEQ ID NO: 293273 - DNA, 33 bp, Homo sapien
tcattctcatccttacagcacaatcttttgaaa

SEQ ID NO: 293274 - DNA, 33 bp, Homo sapien
tcattctcatccttacggcacaatcttttgaaa

SEQ ID NO: 293275 - DNA, 33 bp, Homo sapien
ccaactccaacattcaacaatggtaagggaacc

SEQ ID NO: 293276 - DNA, 33 bp, Homo sapien
ccaactccaacattcagcaatggtaagggaacc

SEQ ID NO: 293277 - DNA, 33 bp, Homo sapien
tatcgtcctgacgagactccaagctccttaaag

SEQ ID NO: 293278 - DNA, 33 bp, Homo sapien
tatcgtcctgacgagattccaagctccttaaag

SEQ ID NO: 293279 - DNA, 33 bp, Homo sapien
tggctcagctaaccaacgctctttcaaatgctc

SEQ ID NO: 293280 - DNA, 33 bp, Homo sapien
tggctcagctaaccaatgctctttcaaatgctc

SEQ ID NO: 293281 - DNA, 33 bp, Homo sapien
acatagttctcacattaaagccttttgcttgga

SEQ ID NO: 293282 - DNA, 33 bp, Homo sapien
acatagttctcacattgaagccttttgcttgga

SEQ ID NO: 293283 - DNA, 33 bp, Homo sapien
agggcaaatctggcaacaatgaatgagagtatc

SEQ ID NO: 293284 - DNA, 33 bp, Homo sapien
agggcaaatctggcaataatgaatgagagtatc

SEQ ID NO: 293285 - DNA, 33 bp, Homo sapien
ggtgtttctagcttcaaatcttctagctaagca

SEQ ID NO: 293286 - DNA, 33 bp, Homo sapien
ggtgtttctagcttcagatcttctagctaagca

SEQ ID NO: 293287 - DNA, 33 bp, Homo sapien
aaagcgccgagcacaacggctggctcactaaat

SEQ ID NO: 293288 - DNA, 33 bp, Homo sapien
aaagcgccgagcacaatggctggctcactaaat

SEQ ID NO: 293289 - DNA, 33 bp, Homo sapien
aacacaccaagccatcaataaagtattgctaga

SEQ ID NO: 293290 - DNA, 33 bp, Homo sapien
aacacaccaagccatcgataaagtattgctaga

SEQ ID NO: 293291 - DNA, 33 bp, Homo sapien
cacaaagataacctaaacaaccaatcaaggcaa

SEQ ID NO: 293292 - DNA, 33 bp, Homo sapien
cacaaagataacctaagcaaccaatcaaggcaa

SEQ ID NO: 293293 - DNA, 33 bp, Homo sapien
gctcaggagacaggtaaaaataatagactctcc

SEQ ID NO: 293294 - DNA, 33 bp, Homo sapien
gctcaggagacaggtacaaataatagactctcc

SEQ ID NO: 293295 - DNA, 33 bp, Homo sapien
acgtgggagcagtgaaaggaaccaattttcaaa

SEQ ID NO: 293296 - DNA, 33 bp, Homo sapien
acgtgggagcagtgaagggaaccaattttcaaa

SEQ ID NO: 293297 - DNA, 33 bp, Homo sapien
aatgggtgaatcgctcactggctagtatttttg

SEQ ID NO: 293298 - DNA, 33 bp, Homo sapien
aatgggtgaatcgctcgctggctagtatttttg

SEQ ID NO: 293299 - DNA, 33 bp, Homo sapien
aagatgtggcagctccaatatcgccaatctggc

SEQ ID NO: 293300 - DNA, 33 bp, Homo sapien
aagatgtggcagctccgatatcgccaatctggc

SEQ ID NO: 293301 - DNA, 33 bp, Homo sapien
ccagttaatgcatttacagagtgattttaatag

SEQ ID NO: 293302 - DNA, 33 bp, Homo sapien
ccagttaatgcatttatagagtgattttaatag

SEQ ID NO: 293303 - DNA, 33 bp, Homo sapien
actttgagcttttgacaattcaaatagtgtcag

SEQ ID NO: 293304 - DNA, 33 bp, Homo sapien
actttgagcttttgacgattcaaatagtgtcag

SEQ ID NO: 293305 - DNA, 33 bp, Homo sapien
aatggatagtatgtacaaagggaagatcaaaaa

SEQ ID NO: 293306 - DNA, 33 bp, Homo sapien
aatggatagtatgtacgaagggaagatcaaaaa

SEQ ID NO: 293307 - DNA, 33 bp, Homo sapien
atctaatgctgaggccaacaaggaagacaacaa

SEQ ID NO: 293308 - DNA, 33 bp, Homo sapien
atctaatgctgaggccgacaaggaagacaacaa

SEQ ID NO: 293309 - DNA, 33 bp, Homo sapien
gtagcaagaccacttacggatggctaaaatgtg

SEQ ID NO: 293310 - DNA, 33 bp, Homo sapien
gtagcaagaccacttatggatggctaaaatgtg

SEQ ID NO: 293311 - DNA, 33 bp, Homo sapien
tacaaccatttgcaaccgcttatctatggggaa

SEQ ID NO: 293312 - DNA, 33 bp, Homo sapien
tacaaccatttgcaacggcttatctatggggaa

SEQ ID NO: 293313 - DNA, 33 bp, Homo sapien
cgtttagagcaggaaacgtaaaaagaggaatgg

SEQ ID NO: 293314 - DNA, 33 bp, Homo sapien
cgtttagagcaggaaatgtaaaaagaggaatgg

SEQ ID NO: 293315 - DNA, 33 bp, Homo sapien
cgtgctatgtccttgcaccattcataggtgact

SEQ ID NO: 293316 - DNA, 33 bp, Homo sapien
cgtgctatgtccttgcgccattcataggtgact

SEQ ID NO: 293317 - DNA, 33 bp, Homo sapien
attacggatgttgtaaaaggcaatatggataac

SEQ ID NO: 293318 - DNA, 33 bp, Homo sapien
attacggatgttgtaagaggcaatatggataac

SEQ ID NO: 293319 - DNA, 33 bp, Homo sapien
cgaggacgtgtgataacgaaggaataaaagtta

SEQ ID NO: 293320 - DNA, 33 bp, Homo sapien
cgaggacgtgtgataatgaaggaataaaagtta

SEQ ID NO: 293321 - DNA, 33 bp, Homo sapien
ttgcacggagtatacactattttaaagcaatgc

SEQ ID NO: 293322 - DNA, 33 bp, Homo sapien
ttgcacggagtatacattattttaaagcaatgc

SEQ ID NO: 293323 - DNA, 33 bp, Homo sapien
catgaaaattggaaacagcacgcgcaccggacg

SEQ ID NO: 293324 - DNA, 33 bp, Homo sapien
catgaaaattggaaacggcacgcgcaccggacg

SEQ ID NO: 293325 - DNA, 33 bp, Homo sapien
ccaacccaagtcatgaaaatcacaaatatcttg

SEQ ID NO: 293326 - DNA, 33 bp, Homo sapien
ccaacccaagtcatgacaatcacaaatatcttg

SEQ ID NO: 293327 - DNA, 33 bp, Homo sapien
ctgttaggtcatctgacgcgtattggacctaag

SEQ ID NO: 293328 - DNA, 33 bp, Homo sapien
ctgttaggtcatctgatgcgtattggacctaag

SEQ ID NO: 293329 - DNA, 33 bp, Homo sapien
agaaaattaatacacacgaagaacgtattgaaa

SEQ ID NO: 293330 - DNA, 33 bp, Homo sapien
agaaaattaatacacaggaagaacgtattgaaa

SEQ ID NO: 293331 - DNA, 33 bp, Homo sapien
ttattacagctgtagaaccaaacattacaagtg

SEQ ID NO: 293332 - DNA, 33 bp, Homo sapien
ttattacagctgtagagccaaacattacaagtg

SEQ ID NO: 293333 - DNA, 33 bp, Homo sapien
tgatattaactaacacacaatttatttcataat

SEQ ID NO: 293334 - DNA, 33 bp, Homo sapien
tgatattaactaacacgcaatttatttcataat

SEQ ID NO: 293335 - DNA, 33 bp, Homo sapien
tgtgacctatttgagcagccacctaaggatcaa

SEQ ID NO: 293336 - DNA, 33 bp, Homo sapien
tgtgacctatttgagccgccacctaaggatcaa

SEQ ID NO: 293337 - DNA, 33 bp, Homo sapien
aagcagtgccaaggaggcagcagtggtgaaata

SEQ ID NO: 293338 - DNA, 33 bp, Homo sapien
aagcagtgccaaggagtcagcagtggtgaaata

SEQ ID NO: 293339 - DNA, 33 bp, Homo sapien
aaccgctcagtgtcaacgaagggagtaagattt

SEQ ID NO: 293340 - DNA, 33 bp, Homo sapien
aaccgctcagtgtcaatgaagggagtaagattt

SEQ ID NO: 293341 - DNA, 33 bp, Homo sapien
ttactaatgaatttccaaaagatttttcaacct

SEQ ID NO: 293342 - DNA, 33 bp, Homo sapien
ttactaatgaatttccgaaagatttttcaacct

SEQ ID NO: 293343 - DNA, 33 bp, Homo sapien
acagcttatattttacagaaacagaaagatgac

SEQ ID NO: 293344 - DNA, 33 bp, Homo sapien
acagcttatattttacggaaacagaaagatgac

SEQ ID NO: 293345 - DNA, 33 bp, Homo sapien
ccataatgcacattcaagaagtaattgctgcag

SEQ ID NO: 293346 - DNA, 33 bp, Homo sapien
ccataatgcacattcaggaagtaattgctgcag

SEQ ID NO: 293347 - DNA, 33 bp, Homo sapien
tcaccttctagggacaccttcttgtgaagatct

SEQ ID NO: 293348 - DNA, 33 bp, Homo sapien
tcaccttctagggacagcttcttgtgaagatct

SEQ ID NO: 293349 - DNA, 33 bp, Homo sapien
ccaggaagagagaagcaagactggaggcacagc

SEQ ID NO: 293350 - DNA, 33 bp, Homo sapien
ccaggaagagagaagcgagactggaggcacagc

SEQ ID NO: 293351 - DNA, 33 bp, Homo sapien
agctctacatggccatgaacctaagaacaaaac

SEQ ID NO: 293352 - DNA, 33 bp, Homo sapien
agctctacatggccattaacctaagaacaaaac

SEQ ID NO: 293353 - DNA, 33 bp, Homo sapien
tagaggcaaaagccacaagaaagtagacagagg

SEQ ID NO: 293354 - DNA, 33 bp, Homo sapien
tagaggcaaaagccacgagaaagtagacagagg

SEQ ID NO: 293355 - DNA, 33 bp, Homo sapien
gggtagatgtccaaaagaatgaaatcagtatgt

SEQ ID NO: 293356 - DNA, 33 bp, Homo sapien
gggtagatgtccaaaataatgaaatcagtatgt

SEQ ID NO: 293357 - DNA, 33 bp, Homo sapien
tatggaatcaatccaaatatcccgaaaatggat

SEQ ID NO: 293358 - DNA, 33 bp, Homo sapien
tatggaatcaatccaagtatcccgaaaatggat

SEQ ID NO: 293359 - DNA, 33 bp, Homo sapien
ttccgagtctcatacaatgtaactgacactaga

SEQ ID NO: 293360 - DNA, 33 bp, Homo sapien
ttccgagtctcatacattgtaactgacactaga

SEQ ID NO: 293361 - DNA, 33 bp, Homo sapien
aaattagtcaaaccaacttaagtactgcgtcaa

SEQ ID NO: 293362 - DNA, 33 bp, Homo sapien
aaattagtcaaaccaatttaagtactgcgtcaa

SEQ ID NO: 293363 - DNA, 33 bp, Homo sapien
ataatcaagtattcaaagagaggccagaaacta

SEQ ID NO: 293364 - DNA, 33 bp, Homo sapien
ataatcaagtattcaaggagaggccagaaacta

SEQ ID NO: 293365 - DNA, 33 bp, Homo sapien
caatatatagtttgtaaatttcaacgctttccc

SEQ ID NO: 293366 - DNA, 33 bp, Homo sapien
caatatatagtttgtatatttcaacgctttccc

SEQ ID NO: 293367 - DNA, 33 bp, Homo sapien
tttaaaagtagatacgcagaccaatgaaacaga

SEQ ID NO: 293368 - DNA, 33 bp, Homo sapien
tttaaaagtagatacgtagaccaatgaaacaga

SEQ ID NO: 293369 - DNA, 33 bp, Homo sapien
aatttgcagacaaggcaaaaactcattttaaga

SEQ ID NO: 293370 - DNA, 33 bp, Homo sapien
aatttgcagacaaggcgaaaactcattttaaga

SEQ ID NO: 293371 - DNA, 33 bp, Homo sapien
ggagaccaactcagtccaccagctaaatcggtt

SEQ ID NO: 293372 - DNA, 33 bp, Homo sapien
ggagaccaactcagtctaccagctaaatcggtt

SEQ ID NO: 293373 - DNA, 33 bp, Homo sapien
tggaattcagctttccagcaaaggtaaatgaaa

SEQ ID NO: 293374 - DNA, 33 bp, Homo sapien
tggaattcagctttcctgcaaaggtaaatgaaa

SEQ ID NO: 293375 - DNA, 33 bp, Homo sapien
gtaataagcctggctaagcagaatcctgtgtct

SEQ ID NO: 293376 - DNA, 33 bp, Homo sapien
gtaataagcctggctaggcagaatcctgtgtct

SEQ ID NO: 293377 - DNA, 33 bp, Homo sapien
tcaaacaaaactcacacctgcttcaaaaacaca

SEQ ID NO: 293378 - DNA, 33 bp, Homo sapien
tcaaacaaaactcacatctgcttcaaaaacaca

SEQ ID NO: 293379 - DNA, 33 bp, Homo sapien
aaattgtctgtgaaacccataacaccaaaaact

SEQ ID NO: 293380 - DNA, 33 bp, Homo sapien
aaattgtctgtgaaacgcataacaccaaaaact

SEQ ID NO: 293381 - DNA, 33 bp, Homo sapien
agtgctgttttcagaaataaaaagatattattc

SEQ ID NO: 293382 - DNA, 33 bp, Homo sapien
agtgctgttttcagaagtaaaaagatattattc

SEQ ID NO: 293383 - DNA, 33 bp, Homo sapien
tattactgtttttgaaatgaatgttacgctcat

SEQ ID NO: 293384 - DNA, 33 bp, Homo sapien
tattactgtttttgaagtgaatgttacgctcat

SEQ ID NO: 293385 - DNA, 33 bp, Homo sapien
aaacctaaaatatgtacccaagatcatccagcc

SEQ ID NO: 293386 - DNA, 33 bp, Homo sapien
aaacctaaaatatgtagccaagatcatccagcc

SEQ ID NO: 293387 - DNA, 33 bp, Homo sapien
taaggacacactcacccagatagactcacaagg

SEQ ID NO: 293388 - DNA, 33 bp, Homo sapien
taaggacacactcacctagatagactcacaagg

SEQ ID NO: 293389 - DNA, 33 bp, Homo sapien
tcaaatgctattttaacaagtcgctcttctctg

SEQ ID NO: 293390 - DNA, 33 bp, Homo sapien
tcaaatgctattttaagaagtcgctcttctctg

SEQ ID NO: 293391 - DNA, 33 bp, Homo sapien
ggacaccaccctgcaggaagaagacgcatacca

SEQ ID NO: 293392 - DNA, 33 bp, Homo sapien
ggacaccaccctgcagtaagaagacgcatacca

SEQ ID NO: 293393 - DNA, 33 bp, Homo sapien
aaagactcagcttgtacggattgtattttctgc

SEQ ID NO: 293394 - DNA, 33 bp, Homo sapien
aaagactcagcttgtagggattgtattttctgc

SEQ ID NO: 293395 - DNA, 33 bp, Homo sapien
tttctgaagaccttcaagtcagtgatcagtggt

SEQ ID NO: 293396 - DNA, 33 bp, Homo sapien
tttctgaagaccttcacgtcagtgatcagtggt

SEQ ID NO: 293397 - DNA, 33 bp, Homo sapien
tctgagaatccaatagcaaatgaaacccagccc

SEQ ID NO: 293398 - DNA, 33 bp, Homo sapien
tctgagaatccaatagtaaatgaaacccagccc

SEQ ID NO: 293399 - DNA, 33 bp, Homo sapien
tccatttgaatcaccacgatgttttgtcttcac

SEQ ID NO: 293400 - DNA, 33 bp, Homo sapien
tccatttgaatcaccatgatgttttgtcttcac

SEQ ID NO: 293401 - DNA, 33 bp, Homo sapien
tgtaggcccatgggcaagccacaggataacaag

SEQ ID NO: 293402 - DNA, 33 bp, Homo sapien
tgtaggcccatgggcacgccacaggataacaag

SEQ ID NO: 293403 - DNA, 33 bp, Homo sapien
aacctaagtattcatcaatggataaatggtgaa

SEQ ID NO: 293404 - DNA, 33 bp, Homo sapien
aacctaagtattcatcgatggataaatggtgaa

SEQ ID NO: 293405 - DNA, 33 bp, Homo sapien
aggagccatttctaccaaaccaatttgattact

SEQ ID NO: 293406 - DNA, 33 bp, Homo sapien
aggagccatttctacccaaccaatttgattact

SEQ ID NO: 293407 - DNA, 33 bp, Homo sapien
ctttgccatcagggaactgttagtctataggaa

SEQ ID NO: 293408 - DNA, 33 bp, Homo sapien
ctttgccatcagggaattgttagtctataggaa

SEQ ID NO: 293409 - DNA, 33 bp, Homo sapien
aagaataggctttcaaaatagaaatgtaatgca

SEQ ID NO: 293410 - DNA, 33 bp, Homo sapien
aagaataggctttcaagatagaaatgtaatgca

SEQ ID NO: 293411 - DNA, 33 bp, Homo sapien
agaatattgtgcttaaaaggaatgtgatacatg

SEQ ID NO: 293412 - DNA, 33 bp, Homo sapien
agaatattgtgcttaataggaatgtgatacatg

SEQ ID NO: 293413 - DNA, 33 bp, Homo sapien
ttacaattacaactacaatggcaccatgtgaat

SEQ ID NO: 293414 - DNA, 33 bp, Homo sapien
ttacaattacaactacgatggcaccatgtgaat

SEQ ID NO: 293415 - DNA, 33 bp, Homo sapien
agacctcattatacttcaactacctcttaagat

SEQ ID NO: 293416 - DNA, 33 bp, Homo sapien
agacctcattatactttaactacctcttaagat

SEQ ID NO: 293417 - DNA, 33 bp, Homo sapien
tcctgtcggtaaacaaacgtggtgacagcaatc

SEQ ID NO: 293418 - DNA, 33 bp, Homo sapien
tcctgtcggtaaacaatcgtggtgacagcaatc

SEQ ID NO: 293419 - DNA, 33 bp, Homo sapien
aggccaaagaattacaactcaaagagactgcat

SEQ ID NO: 293420 - DNA, 33 bp, Homo sapien
aggccaaagaattacacctcaaagagactgcat

SEQ ID NO: 293421 - DNA, 33 bp, Homo sapien
aagtcataaaagaagcaattgattagactcaac

SEQ ID NO: 293422 - DNA, 33 bp, Homo sapien
aagtcataaaagaagcgattgattagactcaac

SEQ ID NO: 293423 - DNA, 33 bp, Homo sapien
actgttttccaaataaatgctgggaagttccct

SEQ ID NO: 293424 - DNA, 33 bp, Homo sapien
actgttttccaaataagtgctgggaagttccct

SEQ ID NO: 293425 - DNA, 33 bp, Homo sapien
agactaagacgctcttaaactcactcctcacaa

SEQ ID NO: 293426 - DNA, 33 bp, Homo sapien
agactaagacgctcttcaactcactcctcacaa

SEQ ID NO: 293427 - DNA, 33 bp, Homo sapien
ttttactgaatctttacgaccaagctatgagat

SEQ ID NO: 293428 - DNA, 33 bp, Homo sapien
ttttactgaatctttatgaccaagctatgagat

SEQ ID NO: 293429 - DNA, 33 bp, Homo sapien
agacaacttacttctaactttctcattttcaag

SEQ ID NO: 293430 - DNA, 33 bp, Homo sapien
agacaacttacttctacctttctcattttcaag

SEQ ID NO: 293431 - DNA, 33 bp, Homo sapien
aaacctcgccaaccaaggtatcttgagcacatc

SEQ ID NO: 293432 - DNA, 33 bp, Homo sapien
aaacctcgccaaccaatgtatcttgagcacatc

SEQ ID NO: 293433 - DNA, 33 bp, Homo sapien
cttagaagccagtcaccatgcaagaagcctgcc

SEQ ID NO: 293434 - DNA, 33 bp, Homo sapien
cttagaagccagtcacgatgcaagaagcctgcc

SEQ ID NO: 293435 - DNA, 33 bp, Homo sapien
tttcgtgcgctaaagaaatgtttggctttccca

SEQ ID NO: 293436 - DNA, 33 bp, Homo sapien
tttcgtgcgctaaagagatgtttggctttccca

SEQ ID NO: 293437 - DNA, 33 bp, Homo sapien
accttccccgtgtggacacgagagaacacgagc

SEQ ID NO: 293438 - DNA, 33 bp, Homo sapien
accttccccgtgtggatacgagagaacacgagc

SEQ ID NO: 293439 - DNA, 33 bp, Homo sapien
atcccttaatgcaatcaagttgacacctaatat

SEQ ID NO: 293440 - DNA, 33 bp, Homo sapien
atcccttaatgcaatccagttgacacctaatat

SEQ ID NO: 293441 - DNA, 33 bp, Homo sapien
ctgcattccttttacactatagaaggtgcttac

SEQ ID NO: 293442 - DNA, 33 bp, Homo sapien
ctgcattccttttacattatagaaggtgcttac

SEQ ID NO: 293443 - DNA, 33 bp, Homo sapien
cagaggctcagatacaaccatgaaagaatgagt

SEQ ID NO: 293444 - DNA, 33 bp, Homo sapien
cagaggctcagatacagccatgaaagaatgagt

SEQ ID NO: 293445 - DNA, 33 bp, Homo sapien
cagcttcaactccataagtttgtgaaatacatg

SEQ ID NO: 293446 - DNA, 33 bp, Homo sapien
cagcttcaactccatacgtttgtgaaatacatg

SEQ ID NO: 293447 - DNA, 33 bp, Homo sapien
ggtgctagatgaaaacgcaagcaggatccgctt

SEQ ID NO: 293448 - DNA, 33 bp, Homo sapien
ggtgctagatgaaaactcaagcaggatccgctt

SEQ ID NO: 293449 - DNA, 33 bp, Homo sapien
catttcttaattcccacgtgacgttagtgcagc

SEQ ID NO: 293450 - DNA, 33 bp, Homo sapien
catttcttaattcccatgtgacgttagtgcagc

SEQ ID NO: 293451 - DNA, 33 bp, Homo sapien
cagaatccacatccaccatcctcaaatttatta

SEQ ID NO: 293452 - DNA, 33 bp, Homo sapien
cagaatccacatccacgatcctcaaatttatta

SEQ ID NO: 293453 - DNA, 33 bp, Homo sapien
gctcttcttaattacaagtattcagttcacccc

SEQ ID NO: 293454 - DNA, 33 bp, Homo sapien
gctcttcttaattacaggtattcagttcacccc

SEQ ID NO: 293455 - DNA, 33 bp, Homo sapien
tcatgacgctctaataaggtattttgttttgtt

SEQ ID NO: 293456 - DNA, 33 bp, Homo sapien
tcatgacgctctaatatggtattttgttttgtt

SEQ ID NO: 293457 - DNA, 33 bp, Homo sapien
cagagaaagctccccaatcatgctgattttttg

SEQ ID NO: 293458 - DNA, 33 bp, Homo sapien
cagagaaagctccccattcatgctgattttttg

SEQ ID NO: 293459 - DNA, 33 bp, Homo sapien
cattgttgtatgaaaaatgactcaactcttctg

SEQ ID NO: 293460 - DNA, 33 bp, Homo sapien
cattgttgtatgaaaattgactcaactcttctg

SEQ ID NO: 293461 - DNA, 33 bp, Homo sapien
taataaatcctattccacacggttgttatgaac

SEQ ID NO: 293462 - DNA, 33 bp, Homo sapien
taataaatcctattccgcacggttgttatgaac

SEQ ID NO: 293463 - DNA, 33 bp, Homo sapien
gggcaatagcagaatccatcttgcaaattaaat

SEQ ID NO: 293464 - DNA, 33 bp, Homo sapien
gggcaatagcagaatctatcttgcaaattaaat

SEQ ID NO: 293465 - DNA, 33 bp, Homo sapien
gactgtctctggagatcaatctattttaagttt

SEQ ID NO: 293466 - DNA, 33 bp, Homo sapien
gactgtctctggagattaatctattttaagttt

SEQ ID NO: 293467 - DNA, 33 bp, Homo sapien
ctctgaggcacataacagctattcttttcctaa

SEQ ID NO: 293468 - DNA, 33 bp, Homo sapien
ctctgaggcacataacggctattcttttcctaa

SEQ ID NO: 293469 - DNA, 33 bp, Homo sapien
cataatcacttccaacgaacttataatttagat

SEQ ID NO: 293470 - DNA, 33 bp, Homo sapien
cataatcacttccaactaacttataatttagat

SEQ ID NO: 293471 - DNA, 33 bp, Homo sapien
agcctgagtctccctacagaaaaggtgtatgag

SEQ ID NO: 293472 - DNA, 33 bp, Homo sapien
agcctgagtctccctatagaaaaggtgtatgag

SEQ ID NO: 293473 - DNA, 33 bp, Homo sapien
ggacagcttcagctacagctttatatcagttat

SEQ ID NO: 293474 - DNA, 33 bp, Homo sapien
ggacagcttcagctacggctttatatcagttat

SEQ ID NO: 293475 - DNA, 33 bp, Homo sapien
cataacacagaacccaaaaacgtagcaccctac

SEQ ID NO: 293476 - DNA, 33 bp, Homo sapien
cataacacagaacccagaaacgtagcaccctac

SEQ ID NO: 293477 - DNA, 33 bp, Homo sapien
tgatttttgtttttaacgcagaagatcagtaac

SEQ ID NO: 293478 - DNA, 33 bp, Homo sapien
tgatttttgtttttaatgcagaagatcagtaac

SEQ ID NO: 293479 - DNA, 33 bp, Homo sapien
aatcacgagaatttgacgataaattggatatgg

SEQ ID NO: 293480 - DNA, 33 bp, Homo sapien
aatcacgagaatttgatgataaattggatatgg

SEQ ID NO: 293481 - DNA, 33 bp, Homo sapien
tttccttccttctcacaatttctactcaccacc

SEQ ID NO: 293482 - DNA, 33 bp, Homo sapien
tttccttccttctcactatttctactcaccacc

SEQ ID NO: 293483 - DNA, 33 bp, Homo sapien
agttcttgctggttaccggaatgcatgcagaga

SEQ ID NO: 293484 - DNA, 33 bp, Homo sapien
agttcttgctggttactggaatgcatgcagaga

SEQ ID NO: 293485 - DNA, 33 bp, Homo sapien
ctgctttttattaacgcacaatggaggaggcag

SEQ ID NO: 293486 - DNA, 33 bp, Homo sapien
ctgctttttattaacgtacaatggaggaggcag

SEQ ID NO: 293487 - DNA, 33 bp, Homo sapien
acacctttcatgtgccaatgaggacaaatccct

SEQ ID NO: 293488 - DNA, 33 bp, Homo sapien
acacctttcatgtgccgatgaggacaaatccct

SEQ ID NO: 293489 - DNA, 33 bp, Homo sapien
ggcttccatgctgttacgaacagtagcagttgc

SEQ ID NO: 293490 - DNA, 33 bp, Homo sapien
ggcttccatgctgttatgaacagtagcagttgc

SEQ ID NO: 293491 - DNA, 33 bp, Homo sapien
tcttcagactgttagcaaaatggagagctgagg

SEQ ID NO: 293492 - DNA, 33 bp, Homo sapien
tcttcagactgttagcgaaatggagagctgagg

SEQ ID NO: 293493 - DNA, 33 bp, Homo sapien
actgagttacaactgaaaacagttccaaataat

SEQ ID NO: 293494 - DNA, 33 bp, Homo sapien
actgagttacaactgacaacagttccaaataat

SEQ ID NO: 293495 - DNA, 33 bp, Homo sapien
tggcttagtcaatcacaaagtggttttcacgtc

SEQ ID NO: 293496 - DNA, 33 bp, Homo sapien
tggcttagtcaatcacgaagtggttttcacgtc

SEQ ID NO: 293497 - DNA, 33 bp, Homo sapien
aaatcagatattgatacccaaaaccaagaagca

SEQ ID NO: 293498 - DNA, 33 bp, Homo sapien
aaatcagatattgatatccaaaaccaagaagca

SEQ ID NO: 293499 - DNA, 33 bp, Homo sapien
tctacaactggccagaaactgtgctgctataat

SEQ ID NO: 293500 - DNA, 33 bp, Homo sapien
tctacaactggccagacactgtgctgctataat

SEQ ID NO: 293501 - DNA, 33 bp, Homo sapien
gagatctgagtgctaacatctttacattatctc

SEQ ID NO: 293502 - DNA, 33 bp, Homo sapien
gagatctgagtgctaagatctttacattatctc

SEQ ID NO: 293503 - DNA, 33 bp, Homo sapien
gtattaagactgatcactatacttcctgggtag

SEQ ID NO: 293504 - DNA, 33 bp, Homo sapien
gtattaagactgatcattatacttcctgggtag

SEQ ID NO: 293505 - DNA, 33 bp, Homo sapien
aaaaacgttgcccttacatacagctgcactgga

SEQ ID NO: 293506 - DNA, 33 bp, Homo sapien
aaaaacgttgcccttagatacagctgcactgga

SEQ ID NO: 293507 - DNA, 33 bp, Homo sapien
gagcttttataacactcaaagaagacaaagaga

SEQ ID NO: 293508 - DNA, 33 bp, Homo sapien
gagcttttataacactgaaagaagacaaagaga

SEQ ID NO: 293509 - DNA, 33 bp, Homo sapien
cccctcttcccgtaccacgaccttctttctccc

SEQ ID NO: 293510 - DNA, 33 bp, Homo sapien
cccctcttcccgtaccgcgaccttctttctccc

SEQ ID NO: 293511 - DNA, 33 bp, Homo sapien
gcggctcataggttgaaatgcaagagtttcagt

SEQ ID NO: 293512 - DNA, 33 bp, Homo sapien
gcggctcataggttgagatgcaagagtttcagt

SEQ ID NO: 293513 - DNA, 33 bp, Homo sapien
aagtcagcctcagatacgacccaagggatacgt

SEQ ID NO: 293514 - DNA, 33 bp, Homo sapien
aagtcagcctcagatatgacccaagggatacgt

SEQ ID NO: 293515 - DNA, 33 bp, Homo sapien
tgcccataatcccaaactacacattttcagatt

SEQ ID NO: 293516 - DNA, 33 bp, Homo sapien
tgcccataatcccaaagtacacattttcagatt

SEQ ID NO: 293517 - DNA, 33 bp, Homo sapien
gaggggataccacagaaaggctcccactgtgat

SEQ ID NO: 293518 - DNA, 33 bp, Homo sapien
gaggggataccacagagaggctcccactgtgat

SEQ ID NO: 293519 - DNA, 33 bp, Homo sapien
agactgccaatacttacaactttttccagagag

SEQ ID NO: 293520 - DNA, 33 bp, Homo sapien
agactgccaatacttagaactttttccagagag

SEQ ID NO: 293521 - DNA, 33 bp, Homo sapien
cccaaatcgagacagacacgatgacagtgcttg

SEQ ID NO: 293522 - DNA, 33 bp, Homo sapien
cccaaatcgagacagatacgatgacagtgcttg

SEQ ID NO: 293523 - DNA, 33 bp, Homo sapien
cctagctccgtatagacgtggcaggcccaaagt

SEQ ID NO: 293524 - DNA, 33 bp, Homo sapien
cctagctccgtatagatgtggcaggcccaaagt

SEQ ID NO: 293525 - DNA, 33 bp, Homo sapien
ataggtggctgtgtaactaaagaatgaacaaat

SEQ ID NO: 293526 - DNA, 33 bp, Homo sapien
ataggtggctgtgtaattaaagaatgaacaaat

SEQ ID NO: 293527 - DNA, 33 bp, Homo sapien
cagtcacgctgggatcgcgaatagtttcccatt

SEQ ID NO: 293528 - DNA, 33 bp, Homo sapien
cagtcacgctgggatctcgaatagtttcccatt

SEQ ID NO: 293529 - DNA, 33 bp, Homo sapien
tatcatgtgactcaaaactggagcctctaccca

SEQ ID NO: 293530 - DNA, 33 bp, Homo sapien
tatcatgtgactcaaagctggagcctctaccca

SEQ ID NO: 293531 - DNA, 33 bp, Homo sapien
tcaaatggaggaaaaccgatatgttagttatct

SEQ ID NO: 293532 - DNA, 33 bp, Homo sapien
tcaaatggaggaaaactgatatgttagttatct

SEQ ID NO: 293533 - DNA, 33 bp, Homo sapien
gagggggaaagcgtgacgaatgaagatggtgct

SEQ ID NO: 293534 - DNA, 33 bp, Homo sapien
gagggggaaagcgtgatgaatgaagatggtgct

SEQ ID NO: 293535 - DNA, 33 bp, Homo sapien
caggtacagggatccaaagtatagatgccactg

SEQ ID NO: 293536 - DNA, 33 bp, Homo sapien
caggtacagggatccagagtatagatgccactg

SEQ ID NO: 293537 - DNA, 33 bp, Homo sapien
gctgggaggcattgcacctaaggagtcaggggc

SEQ ID NO: 293538 - DNA, 33 bp, Homo sapien
gctgggaggcattgcatctaaggagtcaggggc

SEQ ID NO: 293539 - DNA, 33 bp, Homo sapien
cattatagcttatgccaacggtatgtctccttg

SEQ ID NO: 293540 - DNA, 33 bp, Homo sapien
cattatagcttatgccgacggtatgtctccttg

SEQ ID NO: 293541 - DNA, 33 bp, Homo sapien
caactctacaaatccgaactcaggggaatgttc

SEQ ID NO: 293542 - DNA, 33 bp, Homo sapien
caactctacaaatccggactcaggggaatgttc

SEQ ID NO: 293543 - DNA, 33 bp, Homo sapien
ctcagaggctttgtgcacttctctgaccaccag

SEQ ID NO: 293544 - DNA, 33 bp, Homo sapien
ctcagaggctttgtgcgcttctctgaccaccag

SEQ ID NO: 293545 - DNA, 33 bp, Homo sapien
cttcagacgtcaatcacgcagctgaatctttaa

SEQ ID NO: 293546 - DNA, 33 bp, Homo sapien
cttcagacgtcaatcatgcagctgaatctttaa

SEQ ID NO: 293547 - DNA, 33 bp, Homo sapien
aacagttttcgtgagaacagttttggatctctt

SEQ ID NO: 293548 - DNA, 33 bp, Homo sapien
aacagttttcgtgagagcagttttggatctctt

SEQ ID NO: 293549 - DNA, 33 bp, Homo sapien
agactgaaaatgtacaatcttataaggcagcaa

SEQ ID NO: 293550 - DNA, 33 bp, Homo sapien
agactgaaaatgtacactcttataaggcagcaa

SEQ ID NO: 293551 - DNA, 33 bp, Homo sapien
aatctgattatactaaagttatcaagcaggtca

SEQ ID NO: 293552 - DNA, 33 bp, Homo sapien
aatctgattatactaaggttatcaagcaggtca

SEQ ID NO: 293553 - DNA, 33 bp, Homo sapien
ctttcctattcttgtaccattatgccttctaat

SEQ ID NO: 293554 - DNA, 33 bp, Homo sapien
ctttcctattcttgtatcattatgccttctaat

SEQ ID NO: 293555 - DNA, 33 bp, Homo sapien
gagacaggaaagagaaatccttgagaagccaga

SEQ ID NO: 293556 - DNA, 33 bp, Homo sapien
gagacaggaaagagaagtccttgagaagccaga

SEQ ID NO: 293557 - DNA, 33 bp, Homo sapien; identical to SEQ ID NO: 293555

SEQ ID NO: 293558 - DNA, 33 bp, Homo sapien; identical to SEQ ID NO: 293556

SEQ ID NO: 293559 - DNA, 33 bp, Homo sapien
gcattgcaagacaacacagtgctcctcaggacc

SEQ ID NO: 293560 - DNA, 33 bp, Homo sapien
gcattgcaagacaacatagtgctcctcaggacc

SEQ ID NO: 293561 - DNA, 33 bp, Homo sapien
tgcatctacttcctaccacagatgctgtgccct

SEQ ID NO: 293562 - DNA, 33 bp, Homo sapien
tgcatctacttcctactacagatgctgtgccct

SEQ ID NO: 293563 - DNA, 33 bp, Homo sapien
atgggagtcttttgtgccaagcgagtctgaact

SEQ ID NO: 293564 - DNA, 33 bp, Homo sapien
atgggagtcttttgtgtcaagcgagtctgaact

SEQ ID NO: 293565 - DNA, 33 bp, Homo sapien
tgtaacctactgataaagtgcttggtttcattt

SEQ ID NO: 293566 - DNA, 33 bp, Homo sapien
tgtaacctactgataacgtgcttggtttcattt

SEQ ID NO: 293567 - DNA, 33 bp, Homo sapien
aacaaaaccaactccaggactgaaacacaaact

SEQ ID NO: 293568 - DNA, 33 bp, Homo sapien
aacaaaaccaactccatgactgaaacacaaact

SEQ ID NO: 293569 - DNA, 33 bp, Homo sapien
agagagctcagactcactcttgttttagtgact

SEQ ID NO: 293570 - DNA, 33 bp, Homo sapien
agagagctcagactcattcttgttttagtgact

SEQ ID NO: 293571 - DNA, 33 bp, Homo sapien
tcatcagtctcaagagcagtaccacttggcagg

SEQ ID NO: 293572 - DNA, 33 bp, Homo sapien
tcatcagtctcaagagtagtaccacttggcagg

SEQ ID NO: 293573 - DNA, 33 bp, Homo sapien
aaatgggtcaataagacggttagaaaacccagc

SEQ ID NO: 293574 - DNA, 33 bp, Homo sapien
aaatgggtcaataagatggttagaaaacccagc

SEQ ID NO: 293575 - DNA, 33 bp, Homo sapien
gatttgcattcctaacgcatttctagctgctac

SEQ ID NO: 293576 - DNA, 33 bp, Homo sapien
gatttgcattcctaactcatttctagctgctac

SEQ ID NO: 293577 - DNA, 33 bp, Homo sapien
tttatcaaacctgatacgtcattcagattttaa

SEQ ID NO: 293578 - DNA, 33 bp, Homo sapien
tttatcaaacctgatatgtcattcagattttaa

SEQ ID NO: 293579 - DNA, 33 bp, Homo sapien
gtttatctcaccttctaagaaatcaggggagag

SEQ ID NO: 293580 - DNA, 33 bp, Homo sapien
gtttatctcaccttctgagaaatcaggggagag

SEQ ID NO: 293581 - DNA, 33 bp, Homo sapien
ccaagtaagctaccagcaaaggtcagtatcact

SEQ ID NO: 293582 - DNA, 33 bp, Homo sapien
ccaagtaagctaccaggaaaggtcagtatcact

SEQ ID NO: 293583 - DNA, 33 bp, Homo sapien
attcaagaaagttcaccgaggcatttcaggacc

SEQ ID NO: 293584 - DNA, 33 bp, Homo sapien
attcaagaaagttcactgaggcatttcaggacc

SEQ ID NO: 293585 - DNA, 33 bp, Homo sapien
aggacttgtttttatcagagcagagctccaggc

SEQ ID NO: 293586 - DNA, 33 bp, Homo sapien
aggacttgtttttatcggagcagagctccaggc

SEQ ID NO: 293587 - DNA, 33 bp, Homo sapien
ttccattctagacttcaatgctttgtttgcagg

SEQ ID NO: 293588 - DNA, 33 bp, Homo sapien
ttccattctagacttcgatgctttgtttgcagg

SEQ ID NO: 293589 - DNA, 33 bp, Homo sapien
atttgaccttgagaaaataaatcttcatgccat

SEQ ID NO: 293590 - DNA, 33 bp, Homo sapien
atttgaccttgagaaattaaatcttcatgccat

SEQ ID NO: 293591 - DNA, 33 bp, Homo sapien
gacttctccatggccagattcctggggctcttc

SEQ ID NO: 293592 - DNA, 33 bp, Homo sapien
gacttctccatggccatattcctggggctcttc

SEQ ID NO: 293593 - DNA, 33 bp, Homo sapien
gcagggtgtccttgccgccaatactaagtgggt

SEQ ID NO: 293594 - DNA, 33 bp, Homo sapien
gcagggtgtccttgcctccaatactaagtgggt

SEQ ID NO: 293595 - DNA, 33 bp, Homo sapien
tcgccaaacagatgaccctggatcccagaaaag

SEQ ID NO: 293596 - DNA, 33 bp, Homo sapien
tcgccaaacagatgacgctggatcccagaaaag

SEQ ID NO: 293597 - DNA, 33 bp, Homo sapien
aagagcgtgccagaaaatcatggctcagtctct

SEQ ID NO: 293598 - DNA, 33 bp, Homo sapien
aagagcgtgccagaaagtcatggctcagtctct

SEQ ID NO: 293599 - DNA, 33 bp, Homo sapien
ttcatgtcctcctctcaaagaagtcactcatta

SEQ ID NO: 293600 - DNA, 33 bp, Homo sapien
ttcatgtcctcctctcgaagaagtcactcatta

SEQ ID NO: 293601 - DNA, 33 bp, Homo sapien
gtgtgctgttagaagcaaatgactgcttagagg

SEQ ID NO: 293602 - DNA, 33 bp, Homo sapien
gtgtgctgttagaagccaatgactgcttagagg

SEQ ID NO: 293603 - DNA, 33 bp, Homo sapien
ctactgagtatgtaaaatgtgaaagaaataaaa

SEQ ID NO: 293604 - DNA, 33 bp, Homo sapien
ctactgagtatgtaaagtgtgaaagaaataaaa

SEQ ID NO: 293605 - DNA, 33 bp, Homo sapien
gataactgtctacccaagcatcggttcacacac

SEQ ID NO: 293606 - DNA, 33 bp, Homo sapien
gataactgtctacccacgcatcggttcacacac

SEQ ID NO: 293607 - DNA, 33 bp, Homo sapien
tatgtttccttcctcaaagttcccatgagagtt

SEQ ID NO: 293608 - DNA, 33 bp, Homo sapien
tatgtttccttcctcagagttcccatgagagtt

SEQ ID NO: 293609 - DNA, 33 bp, Homo sapien
aaaatgctaaataaaccgagagatgcttgtcaa

SEQ ID NO: 293610 - DNA, 33 bp, Homo sapien
aaaatgctaaataaactgagagatgcttgtcaa

SEQ ID NO: 293611 - DNA, 33 bp, Homo sapien
tgctaaagagaaaggagaaagctggttttttgt

SEQ ID NO: 293612 - DNA, 33 bp, Homo sapien
tgctaaagagaaaggataaagctggttttttgt

SEQ ID NO: 293613 - DNA, 33 bp, Homo sapien
gacttcctgttactccagaaaccacttataagc

SEQ ID NO: 293614 - DNA, 33 bp, Homo sapien
gacttcctgttactccggaaaccacttataagc

SEQ ID NO: 293615 - DNA, 33 bp, Homo sapien
tcatagccatcggcataaagagcctagaggtag

SEQ ID NO: 293616 - DNA, 33 bp, Homo sapien
tcatagccatcggcattaagagcctagaggtag

SEQ ID NO: 293617 - DNA, 33 bp, Homo sapien
acaaatgatattaacacagagagcgagggtgaa

SEQ ID NO: 293618 - DNA, 33 bp, Homo sapien
acaaatgatattaacatagagagcgagggtgaa

SEQ ID NO: 293619 - DNA, 33 bp, Homo sapien
tactgtcaaataaagacgagccttgcaagccag

SEQ ID NO: 293620 - DNA, 33 bp, Homo sapien
tactgtcaaataaagatgagccttgcaagccag

SEQ ID NO: 293621 - DNA, 33 bp, Homo sapien
atgtttatttaataacaacagctgaatcttgaa

SEQ ID NO: 293622 - DNA, 33 bp, Homo sapien
atgtttatttaataacgacagctgaatcttgaa

SEQ ID NO: 293623 - DNA, 33 bp, Homo sapien
tctcccattgtaagtacgtctcaagatataaaa

SEQ ID NO: 293624 - DNA, 33 bp, Homo sapien
tctcccattgtaagtatgtctcaagatataaaa

SEQ ID NO: 293625 - DNA, 33 bp, Homo sapien
aaaaaatgtgattcaacagcaggttggtccctc

SEQ ID NO: 293626 - DNA, 33 bp, Homo sapien
aaaaaatgtgattcaagagcaggttggtccctc

SEQ ID NO: 293627 - DNA, 33 bp, Homo sapien
gaatattcagtgtgtacaagtcagctctttcat

SEQ ID NO: 293628 - DNA, 33 bp, Homo sapien
gaatattcagtgtgtataagtcagctctttcat

SEQ ID NO: 293629 - DNA, 33 bp, Homo sapien
tgtctcctgttagctacgtccaattctttctca

SEQ ID NO: 293630 - DNA, 33 bp, Homo sapien
tgtctcctgttagctatgtccaattctttctca

SEQ ID NO: 293631 - DNA, 33 bp, Homo sapien
gtgtggaccaatttagcattgccttgcttccaa

SEQ ID NO: 293632 - DNA, 33 bp, Homo sapien
gtgtggaccaatttagtattgccttgcttccaa

SEQ ID NO: 293633 - DNA, 33 bp, Homo sapien
ctagtgtaaagtggaacggtgatgaaaaggata

SEQ ID NO: 293634 - DNA, 33 bp, Homo sapien
ctagtgtaaagtggaatggtgatgaaaaggata

SEQ ID NO: 293635 - DNA, 33 bp, Homo sapien
cacatttgaccacactcactatcgtcaaatgtg

SEQ ID NO: 293636 - DNA, 33 bp, Homo sapien
cacatttgaccacacttactatcgtcaaatgtg

SEQ ID NO: 293637 - DNA, 33 bp, Homo sapien
tacggtctgcacacagaagtggggcataggctt

SEQ ID NO: 293638 - DNA, 33 bp, Homo sapien
tacggtctgcacacaggagtggggcataggctt

SEQ ID NO: 293639 - DNA, 33 bp, Homo sapien
gccaagaagatatacgacctgtgcaaattgacg

SEQ ID NO: 293640 - DNA, 33 bp, Homo sapien
gccaagaagatatacgccctgtgcaaattgacg

SEQ ID NO: 293641 - DNA, 33 bp, Homo sapien
gtgtagaggcttatgcaaggcagggtttctggt

SEQ ID NO: 293642 - DNA, 33 bp, Homo sapien
gtgtagaggcttatgcgaggcagggtttctggt

SEQ ID NO: 293643 - DNA, 33 bp, Homo sapien
gggtagtgccaagacaaggtgctaaggctgtct

SEQ ID NO: 293644 - DNA, 33 bp, Homo sapien
gggtagtgccaagacatggtgctaaggctgtct

SEQ ID NO: 293645 - DNA, 33 bp, Homo sapien
ggctaggtcatgggataagaggctaaaaatgag

SEQ ID NO: 293646 - DNA, 33 bp, Homo sapien
ggctaggtcatgggatgagaggctaaaaatgag

SEQ ID NO: 293647 - DNA, 33 bp, Homo sapien
cattttcaagagcctacacagtttaataacttc

SEQ ID NO: 293648 - DNA, 33 bp, Homo sapien
cattttcaagagcctatacagtttaataacttc

SEQ ID NO: 293649 - DNA, 33 bp, Homo sapien
actctaattttccaccagagtgagcttgtgttt

SEQ ID NO: 293650 - DNA, 33 bp, Homo sapien
actctaattttccaccggagtgagcttgtgttt

SEQ ID NO: 293651 - DNA, 33 bp, Homo sapien
aattatagaaagtttacggagcctctccttttg

SEQ ID NO: 293652 - DNA, 33 bp, Homo sapien
aattatagaaagtttatggagcctctccttttg

SEQ ID NO: 293653 - DNA, 33 bp, Homo sapien
gcttgatggtgtctaaaaatcacttccaacttt

SEQ ID NO: 293654 - DNA, 33 bp, Homo sapien
gcttgatggtgtctaagaatcacttccaacttt

SEQ ID NO: 293655 - DNA, 33 bp, Homo sapien
cctgttgctcttcaaccgtggctgaacctgttg

SEQ ID NO: 293656 - DNA, 33 bp, Homo sapien
cctgttgctcttcaactgtggctgaacctgttg

SEQ ID NO: 293657 - DNA, 33 bp, Homo sapien
tggagtatgtcgaagaagtcatccttcagcaca

SEQ ID NO: 293658 - DNA, 33 bp, Homo sapien
tggagtatgtcgaagaggtcatccttcagcaca

SEQ ID NO: 293659 - DNA, 33 bp, Homo sapien
tgcatttaaaacatggaaagacaaaccaatatc

SEQ ID NO: 293660 - DNA, 33 bp, Homo sapien
tgcatttaaaacatgggaagacaaaccaatatc

SEQ ID NO: 293661 - DNA, 33 bp, Homo sapien
agcaaagtccaggtcccattagtttttggatat

SEQ ID NO: 293662 - DNA, 33 bp, Homo sapien
agcaaagtccaggtccgattagtttttggatat

SEQ ID NO: 293663 - DNA, 33 bp, Homo sapien
gcaaacaggaacaataacaggcaatgcctacat

SEQ ID NO: 293664 - DNA, 33 bp, Homo sapien
gcaaacaggaacaatagcaggcaatgcctacat

SEQ ID NO: 293665 - DNA, 33 bp, Homo sapien
gattgaaaaccatagacgcctcactgtgcttca

SEQ ID NO: 293666 - DNA, 33 bp, Homo sapien
gattgaaaaccatagatgcctcactgtgcttca

SEQ ID NO: 293667 - DNA, 33 bp, Homo sapien
tcatgtaagctatcacaactgcagcaagatcct

SEQ ID NO: 293668 - DNA, 33 bp, Homo sapien
tcatgtaagctatcacgactgcagcaagatcct

SEQ ID NO: 293669 - DNA, 33 bp, Homo sapien
cccagagcataaccaccaatgtagttgacgatg

SEQ ID NO: 293670 - DNA, 33 bp, Homo sapien
cccagagcataaccactaatgtagttgacgatg

SEQ ID NO: 293671 - DNA, 33 bp, Homo sapien
tttcccacttcccccaataactaggcttaaatt

SEQ ID NO: 293672 - DNA, 33 bp, Homo sapien
tttcccacttcccccagtaactaggcttaaatt

SEQ ID NO: 293673 - DNA, 33 bp, Homo sapien
tctcaaaataagaccccggccaaataagaatgg

SEQ ID NO: 293674 - DNA, 33 bp, Homo sapien
tctcaaaataagaccctggccaaataagaatgg

SEQ ID NO: 293675 - DNA, 33 bp, Homo sapien
cgtgctataagctgaggaacagatgattgaagg

SEQ ID NO: 293676 - DNA, 33 bp, Homo sapien
cgtgctataagctgagtaacagatgattgaagg

SEQ ID NO: 293677 - DNA, 33 bp, Homo sapien
acttgtttcccctttcaatgtaaacattcattt

SEQ ID NO: 293678 - DNA, 33 bp, Homo sapien
acttgtttcccctttcgatgtaaacattcattt

SEQ ID NO: 293679 - DNA, 33 bp, Homo sapien
ataaccttgtcaatggaaattgtgaatgctaag

SEQ ID NO: 293680 - DNA, 33 bp, Homo sapien
ataaccttgtcaatgggaattgtgaatgctaag

SEQ ID NO: 293681 - DNA, 33 bp, Homo sapien
gagttgaaagaaaggacagcaatatatattcac

SEQ ID NO: 293682 - DNA, 33 bp, Homo sapien
gagttgaaagaaaggagagcaatatatattcac

SEQ ID NO: 293683 - DNA, 33 bp, Homo sapien
taattgctatggaccactgattcctgagtgtct

SEQ ID NO: 293684 - DNA, 33 bp, Homo sapien
taattgctatggaccagtgattcctgagtgtct

SEQ ID NO: 293685 - DNA, 33 bp, Homo sapien
ctcagctcctcactgaatattggcaggaaaact

SEQ ID NO: 293686 - DNA, 33 bp, Homo sapien
ctcagctcctcactgactattggcaggaaaact

SEQ ID NO: 293687 - DNA, 33 bp, Homo sapien
gtacagatctaagatacgatttctcaccctcag

SEQ ID NO: 293688 - DNA, 33 bp, Homo sapien
gtacagatctaagataggatttctcaccctcag

SEQ ID NO: 293689 - DNA, 33 bp, Homo sapien
tgccagcatttaggagaaaaacctggaaatcag

SEQ ID NO: 293690 - DNA, 33 bp, Homo sapien
tgccagcatttaggaggaaaacctggaaatcag

SEQ ID NO: 293691 - DNA, 33 bp, Homo sapien
taagacaatcagtcaaacaaatgctattgagta

SEQ ID NO: 293692 - DNA, 33 bp, Homo sapien
taagacaatcagtcaatcaaatgctattgagta

SEQ ID NO: 293693 - DNA, 33 bp, Homo sapien
atggcctccacaataaccatgcgttctttcacc

SEQ ID NO: 293694 - DNA, 33 bp, Homo sapien
atggcctccacaataatcatgcgttctttcacc

SEQ ID NO: 293695 - DNA, 33 bp, Homo sapien
ttcaggtgtacacttaaatgactggtcaaatct

SEQ ID NO: 293696 - DNA, 33 bp, Homo sapien
ttcaggtgtacacttacatgactggtcaaatct

SEQ ID NO: 293697 - DNA, 33 bp, Homo sapien
gagggggacatctgaagacagcaggacaaaaca

SEQ ID NO: 293698 - DNA, 33 bp, Homo sapien
gagggggacatctgaatacagcaggacaaaaca

SEQ ID NO: 293699 - DNA, 33 bp, Homo sapien
acatgtaacttcattactaatcaagatattggc

SEQ ID NO: 293700 - DNA, 33 bp, Homo sapien
acatgtaacttcattattaatcaagatattggc

SEQ ID NO: 293701 - DNA, 33 bp, Homo sapien
catcatgggaaactaacatggggccttcaagta

SEQ ID NO: 293702 - DNA, 33 bp, Homo sapien
catcatgggaaactaatatggggccttcaagta

SEQ ID NO: 293703 - DNA, 33 bp, Homo sapien
actgcttttgtgctacaatgacagaactgaata

SEQ ID NO: 293704 - DNA, 33 bp, Homo sapien
actgcttttgtgctacgatgacagaactgaata

SEQ ID NO: 293705 - DNA, 33 bp, Homo sapien
tcagctgtacagagaaaagttgcatatgaatta

SEQ ID NO: 293706 - DNA, 33 bp, Homo sapien
tcagctgtacagagaacagttgcatatgaatta

SEQ ID NO: 293707 - DNA, 33 bp, Homo sapien
aaaagagaacttaagaagaaagatgcaccctga

SEQ ID NO: 293708 - DNA, 33 bp, Homo sapien
aaaagagaacttaagatgaaagatgcaccctga

SEQ ID NO: 293709 - DNA, 33 bp, Homo sapien
atttaaaaagtgcgacgatgtaacagagaaaag

SEQ ID NO: 293710 - DNA, 33 bp, Homo sapien
atttaaaaagtgcgactatgtaacagagaaaag

SEQ ID NO: 293711 - DNA, 33 bp, Homo sapien
cttcattgattctaaacgaggggtaaaatagcc

SEQ ID NO: 293712 - DNA, 33 bp, Homo sapien
cttcattgattctaaatgaggggtaaaatagcc

SEQ ID NO: 293713 - DNA, 33 bp, Homo sapien
tttgactgaatcctaaaacaggaatttgaccaa

SEQ ID NO: 293714 - DNA, 33 bp, Homo sapien
tttgactgaatcctaagacaggaatttgaccaa

SEQ ID NO: 293715 - DNA, 33 bp, Homo sapien
gggagagtaaatgcgacatctccacagtaaaat

SEQ ID NO: 293716 - DNA, 33 bp, Homo sapien
gggagagtaaatgcgatatctccacagtaaaat

SEQ ID NO: 293717 - DNA, 33 bp, Homo sapien
aggcattccagataaacggaagcgtggctgcaa

SEQ ID NO: 293718 - DNA, 33 bp, Homo sapien
aggcattccagataaatggaagcgtggctgcaa

SEQ ID NO: 293719 - DNA, 33 bp, Homo sapien
gagcctccgcttacccaagtcatctcagctcac

SEQ ID NO: 293720 - DNA, 33 bp, Homo sapien
gagcctccgcttacccgagtcatctcagctcac

SEQ ID NO: 293721 - DNA, 33 bp, Homo sapien
taatataatgacagaactgattttttcccattt

SEQ ID NO: 293722 - DNA, 33 bp, Homo sapien
taatataatgacagaattgattttttcccattt

SEQ ID NO: 293723 - DNA, 33 bp, Homo sapien
attaggttggtcctgacaggttaatggaaatct

SEQ ID NO: 293724 - DNA, 33 bp, Homo sapien
attaggttggtcctgagaggttaatggaaatct

SEQ ID NO: 293725 - DNA, 33 bp, Homo sapien
tttggattatctcacactgggttcactgagtat

SEQ ID NO: 293726 - DNA, 33 bp, Homo sapien
tttggattatctcacattgggttcactgagtat

SEQ ID NO: 293727 - DNA, 33 bp, Homo sapien
gtaaaaatgtgcccaactattttgtctctttgt

SEQ ID NO: 293728 - DNA, 33 bp, Homo sapien
gtaaaaatgtgcccaattattttgtctctttgt

SEQ ID NO: 293729 - DNA, 33 bp, Homo sapien
catttggcaataaataccttgtgtcccaattct

SEQ ID NO: 293730 - DNA, 33 bp, Homo sapien
catttggcaataaatatcttgtgtcccaattct

SEQ ID NO: 293731 - DNA, 33 bp, Homo sapien
aagaaataaataaaaaacaagatcacacacatg

SEQ ID NO: 293732 - DNA, 33 bp, Homo sapien
aagaaataaataaaaagcaagatcacacacatg

SEQ ID NO: 293733 - DNA, 33 bp, Homo sapien
tacctagaaacaaaaccatggatggcctctgtt

SEQ ID NO: 293734 - DNA, 33 bp, Homo sapien
tacctagaaacaaaactatggatggcctctgtt

SEQ ID NO: 293735 - DNA, 33 bp, Homo sapien
accaagatatttcagacgcctagaagagttacc

SEQ ID NO: 293736 - DNA, 33 bp, Homo sapien
accaagatatttcagatgcctagaagagttacc

SEQ ID NO: 293737 - DNA, 33 bp, Homo sapien
attaatctagaaatggcaaagaactcttcaacc

SEQ ID NO: 293738 - DNA, 33 bp, Homo sapien
attaatctagaaatggtaaagaactcttcaacc

SEQ ID NO: 293739 - DNA, 33 bp, Homo sapien
gaatattttaacaaggaagtttactgagttaag

SEQ ID NO: 293740 - DNA, 33 bp, Homo sapien
gaatattttaacaaggcagtttactgagttaag

SEQ ID NO: 293741 - DNA, 33 bp, Homo sapien
ttctctatggaaggtcacgtttctcactctaaa

SEQ ID NO: 293742 - DNA, 33 bp, Homo sapien
ttctctatggaaggtcgcgtttctcactctaaa

SEQ ID NO: 293743 - DNA, 33 bp, Homo sapien
tgcactgtagtttgcactgaaggaaatatccca

SEQ ID NO: 293744 - DNA, 33 bp, Homo sapien
tgcactgtagtttgcattgaaggaaatatccca

SEQ ID NO: 293745 - DNA, 33 bp, Homo sapien
gagtgaaagaaatctaccactctatgtgcacat

SEQ ID NO: 293746 - DNA, 33 bp, Homo sapien
gagtgaaagaaatctagcactctatgtgcacat

SEQ ID NO: 293747 - DNA, 33 bp, Homo sapien
atggaattccttgtcacgggctgtcctgtgcaa

SEQ ID NO: 293748 - DNA, 33 bp, Homo sapien
atggaattccttgtcatgggctgtcctgtgcaa

SEQ ID NO: 293749 - DNA, 33 bp, Homo sapien
cttaaattcttcagtgcagtggtatgtaatgtg

SEQ ID NO: 293750 - DNA, 33 bp, Homo sapien
cttaaattcttcagtggagtggtatgtaatgtg

SEQ ID NO: 293751 - DNA, 33 bp, Homo sapien
aagcaggtgttggatcacttctatcctgaacaa

SEQ ID NO: 293752 - DNA, 33 bp, Homo sapien
aagcaggtgttggatcgcttctatcctgaacaa

SEQ ID NO: 293753 - DNA, 33 bp, Homo sapien
acaggtcaaacaaatagggctatcccagttaat

SEQ ID NO: 293754 - DNA, 33 bp, Homo sapien
acaggtcaaacaaatatggctatcccagttaat

SEQ ID NO: 293755 - DNA, 33 bp, Homo sapien
cagaggcaatggttcactaactttccctggtgt

SEQ ID NO: 293756 - DNA, 33 bp, Homo sapien
cagaggcaatggttcattaactttccctggtgt

SEQ ID NO: 293757 - DNA, 33 bp, Homo sapien
ttataatcatcctacactgatccaatattaaat

SEQ ID NO: 293758 - DNA, 33 bp, Homo sapien
ttataatcatcctacagtgatccaatattaaat

SEQ ID NO: 293759 - DNA, 33 bp, Homo sapien
atgcgtccttagaaacggtgtctcttctggtgt

SEQ ID NO: 293760 - DNA, 33 bp, Homo sapien
atgcgtccttagaaactgtgtctcttctggtgt

SEQ ID NO: 293761 - DNA, 33 bp, Homo sapien
tcagcagccaatgtaacaaaacgaatttgaaat

SEQ ID NO: 293762 - DNA, 33 bp, Homo sapien
tcagcagccaatgtaataaaacgaatttgaaat

SEQ ID NO: 293763 - DNA, 33 bp, Homo sapien
gagaaaaccctagtgcaagaggaaatacaaact

SEQ ID NO: 293764 - DNA, 33 bp, Homo sapien
gagaaaaccctagtgcgagaggaaatacaaact

SEQ ID NO: 293765 - DNA, 33 bp, Homo sapien
aatcaaatgttacctcactaattttacattata

SEQ ID NO: 293766 - DNA, 33 bp, Homo sapien
aatcaaatgttacctcgctaattttacattata

SEQ ID NO: 293767 - DNA, 33 bp, Homo sapien
cgctccagcatttttgaagaatccacagcaatt

SEQ ID NO: 293768 - DNA, 33 bp, Homo sapien
cgctccagcatttttggagaatccacagcaatt

SEQ ID NO: 293769 - DNA, 33 bp, Homo sapien
tttaaaatttcactcacgtatgactagacttct

SEQ ID NO: 293770 - DNA, 33 bp, Homo sapien
tttaaaatttcactcatgtatgactagacttct

SEQ ID NO: 293771 - DNA, 33 bp, Homo sapien
tttaactttgtgttaaatgccgcatggaataat

SEQ ID NO: 293772 - DNA, 33 bp, Homo sapien
tttaactttgtgttaagtgccgcatggaataat

SEQ ID NO: 293773 - DNA, 33 bp, Homo sapien
aacaaaggtcttaaaacaacatgattgaaggtt

SEQ ID NO: 293774 - DNA, 33 bp, Homo sapien
aacaaaggtcttaaaataacatgattgaaggtt

SEQ ID NO: 293775 - DNA, 33 bp, Homo sapien
ccatgaacaggcttgaacagtctcgatttgtct

SEQ ID NO: 293776 - DNA, 33 bp, Homo sapien
ccatgaacaggcttgagcagtctcgatttgtct

SEQ ID NO: 293777 - DNA, 33 bp, Homo sapien
gttctaaaagaaggcacggtacagaccaaaata

SEQ ID NO: 293778 - DNA, 33 bp, Homo sapien
gttctaaaagaaggcatggtacagaccaaaata

SEQ ID NO: 293779 - DNA, 33 bp, Homo sapien
tacttttacatttgaaataattcagatagatca

SEQ ID NO: 293780 - DNA, 33 bp, Homo sapien
tacttttacatttgaagtaattcagatagatca

SEQ ID NO: 293781 - DNA, 33 bp, Homo sapien
tgttttcctggggtaacaataacaggatctctg

SEQ ID NO: 293782 - DNA, 33 bp, Homo sapien
tgttttcctggggtaataataacaggatctctg

SEQ ID NO: 293783 - DNA, 33 bp, Homo sapien
caactacactgtggaaacatttcacatgcatct

SEQ ID NO: 293784 - DNA, 33 bp, Homo sapien
caactacactgtggaagcatttcacatgcatct

SEQ ID NO: 293785 - DNA, 33 bp, Homo sapien
ttccgaaatgtgtcagcataacagaggggttaa

SEQ ID NO: 293786 - DNA, 33 bp, Homo sapien
ttccgaaatgtgtcagtataacagaggggttaa

SEQ ID NO: 293787 - DNA, 33 bp, Homo sapien
ccaacgttcccggggcacactgtcaacatgtta

SEQ ID NO: 293788 - DNA, 33 bp, Homo sapien
ccaacgttcccggggcgcactgtcaacatgtta

SEQ ID NO: 293789 - DNA, 33 bp, Homo sapien
ttagtacagacgcaacaaatcatcttttttttt

SEQ ID NO: 293790 - DNA, 33 bp, Homo sapien
ttagtacagacgcaaccaatcatcttttttttt

SEQ ID NO: 293791 - DNA, 33 bp, Homo sapien
atgacaagtttcaacacccaggccatttccaaa

SEQ ID NO: 293792 - DNA, 33 bp, Homo sapien
atgacaagtttcaacatccaggccatttccaaa

SEQ ID NO: 293793 - DNA, 33 bp, Homo sapien
cacaggctgcttattcaaagccaccacatcaat

SEQ ID NO: 293794 - DNA, 33 bp, Homo sapien
cacaggctgcttattcgaagccaccacatcaat

SEQ ID NO: 293795 - DNA, 33 bp, Homo sapien
tagggcattactatccactatagcagactttaa

SEQ ID NO: 293796 - DNA, 33 bp, Homo sapien
tagggcattactatccgctatagcagactttaa

SEQ ID NO: 293797 - DNA, 33 bp, Homo sapien
gctaaacacatacgcaatcatgtcctagcttag

SEQ ID NO: 293798 - DNA, 33 bp, Homo sapien
gctaaacacatacgcagtcatgtcctagcttag

SEQ ID NO: 293799 - DNA, 33 bp, Homo sapien
ttctcctctcacctacacattgtattaattaac

SEQ ID NO: 293800 - DNA, 33 bp, Homo sapien
ttctcctctcacctacgcattgtattaattaac

SEQ ID NO: 293801 - DNA, 33 bp, Homo sapien
atgatagcacaagtgggagacaaagcttggaaa

SEQ ID NO: 293802 - DNA, 33 bp, Homo sapien
atgatagcacaagtggtagacaaagcttggaaa

SEQ ID NO: 293803 - DNA, 33 bp, Homo sapien
tcagaccaaatagttaagttgcatagtaaagca

SEQ ID NO: 293804 - DNA, 33 bp, Homo sapien
tcagaccaaatagttaggttgcatagtaaagca

SEQ ID NO: 293805 - DNA, 33 bp, Homo sapien
tatatgaaaatagatcaatgtaatacaccacat

SEQ ID NO: 293806 - DNA, 33 bp, Homo sapien
tatatgaaaatagatccatgtaatacaccacat

SEQ ID NO: 293807 - DNA, 33 bp, Homo sapien
aatatcttggagtatgaagaaaatccattcaac

SEQ ID NO: 293808 - DNA, 33 bp, Homo sapien
aatatcttggagtatggagaaaatccattcaac

SEQ ID NO: 293809 - DNA, 33 bp, Homo sapien
ttttagcgtttgtttgaagataatgccaaccaa

SEQ ID NO: 293810 - DNA, 33 bp, Homo sapien
ttttagcgtttgtttggagataatgccaaccaa

SEQ ID NO: 293811 - DNA, 33 bp, Homo sapien
tcttgcaggaaaatgacaatgcaagtgcaaatt

SEQ ID NO: 293812 - DNA, 33 bp, Homo sapien
tcttgcaggaaaatgataatgcaagtgcaaatt

SEQ ID NO: 293813 - DNA, 33 bp, Homo sapien
ccatatccgccatacagcagggaagactggaat

SEQ ID NO: 293814 - DNA, 33 bp, Homo sapien
ccatatccgccatacatcagggaagactggaat

SEQ ID NO: 293815 - DNA, 33 bp, Homo sapien
cagctggcagtgcacacgttggtctactctcct

SEQ ID NO: 293816 - DNA, 33 bp, Homo sapien
cagctggcagtgcacatgttggtctactctcct

SEQ ID NO: 293817 - DNA, 33 bp, Homo sapien
tttaattttgcctgaacggagaaaaccatttta

SEQ ID NO: 293818 - DNA, 33 bp, Homo sapien
tttaattttgcctgaatggagaaaaccatttta

SEQ ID NO: 293819 - DNA, 33 bp, Homo sapien
gaatataaaaatgatcagagggaatgtaataaa

SEQ ID NO: 293820 - DNA, 33 bp, Homo sapien
gaatataaaaatgatcggagggaatgtaataaa

SEQ ID NO: 293821 - DNA, 33 bp, Homo sapien
ggtctttgtactctaaatacattgatggatcaa

SEQ ID NO: 293822 - DNA, 33 bp, Homo sapien
ggtctttgtactctaattacattgatggatcaa

SEQ ID NO: 293823 - DNA, 33 bp, Homo sapien
aaacttaaatgagtaaacctctggctctgaaga

SEQ ID NO: 293824 - DNA, 33 bp, Homo sapien
aaacttaaatgagtaatcctctggctctgaaga

SEQ ID NO: 293825 - DNA, 33 bp, Homo sapien
ctgtatcgccttttcaagtctgtaagtttgtga

SEQ ID NO: 293826 - DNA, 33 bp, Homo sapien
ctgtatcgccttttcacgtctgtaagtttgtga

SEQ ID NO: 293827 - DNA, 33 bp, Homo sapien
tcttgaaatttactcagtcaacaaacatttact

SEQ ID NO: 293828 - DNA, 33 bp, Homo sapien
tcttgaaatttactcattcaacaaacatttact

SEQ ID NO: 293829 - DNA, 33 bp, Homo sapien
aaggcattgctcagcgcattcctctgctagggg

SEQ ID NO: 293830 - DNA, 33 bp, Homo sapien
aaggcattgctcagcgtattcctctgctagggg

SEQ ID NO: 293831 - DNA, 33 bp, Homo sapien
tttacagtaaaattcacaagctgtggtaaatga

SEQ ID NO: 293832 - DNA, 33 bp, Homo sapien
tttacagtaaaattcataagctgtggtaaatga

SEQ ID NO: 293833 - DNA, 33 bp, Homo sapien
gaagatgtcactcgctaaccttgcacagaagtg

SEQ ID NO: 293834 - DNA, 33 bp, Homo sapien
gaagatgtcactcgctgaccttgcacagaagtg

SEQ ID NO: 293835 - DNA, 33 bp, Homo sapien
ctttgcttcctgattacggggagtgatgtgaag

SEQ ID NO: 293836 - DNA, 33 bp, Homo sapien
ctttgcttcctgattatggggagtgatgtgaag

SEQ ID NO: 293837 - DNA, 33 bp, Homo sapien
cttccggaaatgccaccgggacttgttttatcc

SEQ ID NO: 293838 - DNA, 33 bp, Homo sapien
cttccggaaatgccactgggacttgttttatcc

SEQ ID NO: 293839 - DNA, 33 bp, Homo sapien
gaggactaagagggacaccaggataaaacaagt

SEQ ID NO: 293840 - DNA, 33 bp, Homo sapien
gaggactaagagggacgccaggataaaacaagt

SEQ ID NO: 293841 - DNA, 33 bp, Homo sapien
tatgcaagcccaaaggccatgttactagtttcc

SEQ ID NO: 293842 - DNA, 33 bp, Homo sapien
tatgcaagcccaaaggtcatgttactagtttcc

SEQ ID NO: 293843 - DNA, 33 bp, Homo sapien
gccttccatgagctcaaaacaataaaccacacc

SEQ ID NO: 293844 - DNA, 33 bp, Homo sapien
gccttccatgagctcagaacaataaaccacacc

SEQ ID NO: 293845 - DNA, 33 bp, Homo sapien
agccttatctagagtcagaatgggcccgtagta

SEQ ID NO: 293846 - DNA, 33 bp, Homo sapien
agccttatctagagtcggaatgggcccgtagta

SEQ ID NO: 293847 - DNA, 33 bp, Homo sapien
tttatatctctaaaaacgcagcaagtgaacact

SEQ ID NO: 293848 - DNA, 33 bp, Homo sapien
tttatatctctaaaaaggcagcaagtgaacact

SEQ ID NO: 293849 - DNA, 33 bp, Homo sapien
tccatgaaatcttatacgagttctggaaaagaa

SEQ ID NO: 293850 - DNA, 33 bp, Homo sapien
tccatgaaatcttatatgagttctggaaaagaa

SEQ ID NO: 293851 - DNA, 33 bp, Homo sapien
tcatttattaatcatcaagtgctccatgaaatc

SEQ ID NO: 293852 - DNA, 33 bp, Homo sapien
tcatttattaatcatcgagtgctccatgaaatc

SEQ ID NO: 293853 - DNA, 33 bp, Homo sapien
gacaatatggccaagaagtaaaacttttagata

SEQ ID NO: 293854 - DNA, 33 bp, Homo sapien
gacaatatggccaagatgtaaaacttttagata

SEQ ID NO: 293855 - DNA, 33 bp, Homo sapien
cagattttctttgagcaaaagcagattattctt

SEQ ID NO: 293856 - DNA, 33 bp, Homo sapien
cagattttctttgagcgaaagcagattattctt

SEQ ID NO: 293857 - DNA, 33 bp, Homo sapien
cttaccctggctcctcaaattttacagcactat

SEQ ID NO: 293858 - DNA, 33 bp, Homo sapien
cttaccctggctcctcgaattttacagcactat

SEQ ID NO: 293859 - DNA, 33 bp, Homo sapien
tgcaagccacaaacaactctacacttacagtat

SEQ ID NO: 293860 - DNA, 33 bp, Homo sapien
tgcaagccacaaacaattctacacttacagtat

SEQ ID NO: 293861 - DNA, 33 bp, Homo sapien
tctcaccaatgcaacacatttacaaaagcagaa

SEQ ID NO: 293862 - DNA, 33 bp, Homo sapien
tctcaccaatgcaacatatttacaaaagcagaa

SEQ ID NO: 293863 - DNA, 33 bp, Homo sapien
tattagaagtgccctaactttcatagtaattcc

SEQ ID NO: 293864 - DNA, 33 bp, Homo sapien
tattagaagtgccctagctttcatagtaattcc

SEQ ID NO: 293865 - DNA, 33 bp, Homo sapien
tgtttcagagcgcttacgtaatggcgactgcaa

SEQ ID NO: 293866 - DNA, 33 bp, Homo sapien
tgtttcagagcgcttatgtaatggcgactgcaa

SEQ ID NO: 293867 - DNA, 33 bp, Homo sapien
gcattttcttcacttgaaaacactattgtagaa

SEQ ID NO: 293868 - DNA, 33 bp, Homo sapien
gcattttcttcacttgtaaacactattgtagaa

SEQ ID NO: 293869 - DNA, 33 bp, Homo sapien
gcaggccatagggaccacagtctgcctacgcca

SEQ ID NO: 293870 - DNA, 33 bp, Homo sapien
gcaggccatagggaccgcagtctgcctacgcca

SEQ ID NO: 293871 - DNA, 33 bp, Homo sapien
tgatttgtctaagaccccatgctgggtgagcag

SEQ ID NO: 293872 - DNA, 33 bp, Homo sapien
tgatttgtctaagaccgcatgctgggtgagcag

SEQ ID NO: 293873 - DNA, 33 bp, Homo sapien
tgttgattataagcaacccagtttctggtagat

SEQ ID NO: 293874 - DNA, 33 bp, Homo sapien
tgttgattataagcaatccagtttctggtagat

SEQ ID NO: 293875 - DNA, 33 bp, Homo sapien
atggaagctaaaaaaaatagtaggcaaatattg

SEQ ID NO: 293876 - DNA, 33 bp, Homo sapien
atggaagctaaaaaaattagtaggcaaatattg

SEQ ID NO: 293877 - DNA, 33 bp, Homo sapien
aggctttaagggacacacagtcaattagtatac

SEQ ID NO: 293878 - DNA, 33 bp, Homo sapien
aggctttaagggacacgcagtcaattagtatac

SEQ ID NO: 293879 - DNA, 33 bp, Homo sapien
gtatacaattagtacaaatcactcattctcaac

SEQ ID NO: 293880 - DNA, 33 bp, Homo sapien
gtatacaattagtacacatcactcattctcaac

SEQ ID NO: 293881 - DNA, 33 bp, Homo sapien
ttattttaaaactcatcaagtgatactaaggaa

SEQ ID NO: 293882 - DNA, 33 bp, Homo sapien
ttattttaaaactcatgaagtgatactaaggaa

SEQ ID NO: 293883 - DNA, 33 bp, Homo sapien
tgctgtggccgggaaccgtgactctttgccaac

SEQ ID NO: 293884 - DNA, 33 bp, Homo sapien
tgctgtggccgggaactgtgactctttgccaac

SEQ ID NO: 293885 - DNA, 33 bp, Homo sapien
atggagaggctcacaacgtggagagttgcttct

SEQ ID NO: 293886 - DNA, 33 bp, Homo sapien
atggagaggctcacaatgtggagagttgcttct

SEQ ID NO: 293887 - DNA, 33 bp, Homo sapien
caaagacagtgaacataagggaaggtatagtag

SEQ ID NO: 293888 - DNA, 33 bp, Homo sapien
caaagacagtgaacatcagggaaggtatagtag

SEQ ID NO: 293889 - DNA, 33 bp, Homo sapien
tggctggagaaacaaagacaaggtagagaggaa

SEQ ID NO: 293890 - DNA, 33 bp, Homo sapien
tggctggagaaacaaatacaaggtagagaggaa

SEQ ID NO: 293891 - DNA, 33 bp, Homo sapien
catcctgtttcatcatgagcatacttcaagtat

SEQ ID NO: 293892 - DNA, 33 bp, Homo sapien
catcctgtttcatcattagcatacttcaagtat

SEQ ID NO: 293893 - DNA, 33 bp, Homo sapien
tttgatgtatttgtataaacagtgcttattctt

SEQ ID NO: 293894 - DNA, 33 bp, Homo sapien
tttgatgtatttgtattaacagtgcttattctt

SEQ ID NO: 293895 - DNA, 33 bp, Homo sapien
cagtgtgagaatgaggccattatttttgtgtta

SEQ ID NO: 293896 - DNA, 33 bp, Homo sapien
cagtgtgagaatgaggtcattatttttgtgtta

SEQ ID NO: 293897 - DNA, 33 bp, Homo sapien
cataaaattggaccaaagaggtacagtcaagca

SEQ ID NO: 293898 - DNA, 33 bp, Homo sapien
cataaaattggaccaacgaggtacagtcaagca

SEQ ID NO: 293899 - DNA, 33 bp, Homo sapien
ggggggactactgtgcccaaagctacctatgtg

SEQ ID NO: 293900 - DNA, 33 bp, Homo sapien
ggggggactactgtgctcaaagctacctatgtg

SEQ ID NO: 293901 - DNA, 33 bp, Homo sapien
catatttaagctaagaaccagaattagaagtta

SEQ ID NO: 293902 - DNA, 33 bp, Homo sapien
catatttaagctaagacccagaattagaagtta

SEQ ID NO: 293903 - DNA, 33 bp, Homo sapien
tagggacatctgagaaactacattcactgaggt

SEQ ID NO: 293904 - DNA, 33 bp, Homo sapien
tagggacatctgagaacctacattcactgaggt

SEQ ID NO: 293905 - DNA, 33 bp, Homo sapien
gtcaaagtataatcacgggttctgcacttgaca

SEQ ID NO: 293906 - DNA, 33 bp, Homo sapien
gtcaaagtataatcactggttctgcacttgaca

SEQ ID NO: 293907 - DNA, 33 bp, Homo sapien
ccagcattttcatgcaacatcataagtaaggtg

SEQ ID NO: 293908 - DNA, 33 bp, Homo sapien
ccagcattttcatgcaccatcataagtaaggtg

SEQ ID NO: 293909 - DNA, 33 bp, Homo sapien
aggtcagaagtaatgacgattggcttcaaagaa

SEQ ID NO: 293910 - DNA, 33 bp, Homo sapien
aggtcagaagtaatgatgattggcttcaaagaa

SEQ ID NO: 293911 - DNA, 33 bp, Homo sapien
gtatcattcagtcaatcaggaaatacataatgg

SEQ ID NO: 293912 - DNA, 33 bp, Homo sapien
gtatcattcagtcaatgaggaaatacataatgg

SEQ ID NO: 293913 - DNA, 33 bp, Homo sapien
tcagctctaattaaacagcaaatagtctcgaaa

SEQ ID NO: 293914 - DNA, 33 bp, Homo sapien
tcagctctaattaaacggcaaatagtctcgaaa

SEQ ID NO: 293915 - DNA, 33 bp, Homo sapien
gaaccacattggccgcactgagattatgatcat

SEQ ID NO: 293916 - DNA, 33 bp, Homo sapien
gaaccacattggccgcgctgagattatgatcat

SEQ ID NO: 293917 - DNA, 33 bp, Homo sapien
tctaagtgctttcaaacgcctgattttccaaag

SEQ ID NO: 293918 - DNA, 33 bp, Homo sapien
tctaagtgctttcaaatgcctgattttccaaag

SEQ ID NO: 293919 - DNA, 33 bp, Homo sapien
aagtgcaacatgagaacgtgaaaaaatgcatta

SEQ ID NO: 293920 - DNA, 33 bp, Homo sapien
aagtgcaacatgagaaggtgaaaaaatgcatta

SEQ ID NO: 293921 - DNA, 33 bp, Homo sapien
caaacttctttacagccgccgaaccattttata

SEQ ID NO: 293922 - DNA, 33 bp, Homo sapien
caaacttctttacagctgccgaaccattttata

SEQ ID NO: 293923 - DNA, 33 bp, Homo sapien
ctgtaaagaagtttgaaaattcctgcaaagtta

SEQ ID NO: 293924 - DNA, 33 bp, Homo sapien
ctgtaaagaagtttgacaattcctgcaaagtta

SEQ ID NO: 293925 - DNA, 33 bp, Homo sapien
tcagcctggaaacagaacgacatattgatacat

SEQ ID NO: 293926 - DNA, 33 bp, Homo sapien
tcagcctggaaacagagcgacatattgatacat

SEQ ID NO: 293927 - DNA, 33 bp, Homo sapien
cctacaaaatcaaagacgtaacattacctattt

SEQ ID NO: 293928 - DNA, 33 bp, Homo sapien
cctacaaaatcaaagatgtaacattacctattt

SEQ ID NO: 293929 - DNA, 33 bp, Homo sapien
gaaaaaaatggtaaaacttggagagactctcag

SEQ ID NO: 293930 - DNA, 33 bp, Homo sapien
gaaaaaaatggtaaaatttggagagactctcag

SEQ ID NO: 293931 - DNA, 33 bp, Homo sapien
gatgtgcccattcttccaatcaaagccatgcta

SEQ ID NO: 293932 - DNA, 33 bp, Homo sapien
gatgtgcccattcttctaatcaaagccatgcta

SEQ ID NO: 293933 - DNA, 33 bp, Homo sapien
actttggtgtgtcacaagtacttcaaatttcag

SEQ ID NO: 293934 - DNA, 33 bp, Homo sapien
actttggtgtgtcacaggtacttcaaatttcag

SEQ ID NO: 293935 - DNA, 33 bp, Homo sapien
gcatagagctgtttaaagtttatcctagaaaat

SEQ ID NO: 293936 - DNA, 33 bp, Homo sapien
gcatagagctgtttaaggtttatcctagaaaat

SEQ ID NO: 293937 - DNA, 33 bp, Homo sapien
tttcgcctttctcaacaaaaaaatagtgtcaat

SEQ ID NO: 293938 - DNA, 33 bp, Homo sapien
tttcgcctttctcaaccaaaaaatagtgtcaat

SEQ ID NO: 293939 - DNA, 33 bp, Homo sapien
aaatataagaataagaatcactgaaagctgcta

SEQ ID NO: 293940 - DNA, 33 bp, Homo sapien
aaatataagaataagagtcactgaaagctgcta

SEQ ID NO: 293941 - DNA, 33 bp, Homo sapien
aaggttctgaaaatataaatactgctctaattc

SEQ ID NO: 293942 - DNA, 33 bp, Homo sapien
aaggttctgaaaatatgaatactgctctaattc

SEQ ID NO: 293943 - DNA, 33 bp, Homo sapien
aaacttacatttcaacagttccagggaatggtt

SEQ ID NO: 293944 - DNA, 33 bp, Homo sapien
aaacttacatttcaacggttccagggaatggtt

SEQ ID NO: 293945 - DNA, 33 bp, Homo sapien
atggactgtttacatcaaagtagagagatcctc

SEQ ID NO: 293946 - DNA, 33 bp, Homo sapien
atggactgtttacatctaagtagagagatcctc

SEQ ID NO: 293947 - DNA, 33 bp, Homo sapien
agggcttctagtcatacgccattggccagaact

SEQ ID NO: 293948 - DNA, 33 bp, Homo sapien
agggcttctagtcatatgccattggccagaact

SEQ ID NO: 293949 - DNA, 33 bp, Homo sapien
acaactagtcccttgcacaaggatgaaaacaaa

SEQ ID NO: 293950 - DNA, 33 bp, Homo sapien
acaactagtcccttgctcaaggatgaaaacaaa

SEQ ID NO: 293951 - DNA, 33 bp, Homo sapien
aggattaaaacgctcaaattattcacatgaaag

SEQ ID NO: 293952 - DNA, 33 bp, Homo sapien
aggattaaaacgctcagattattcacatgaaag

SEQ ID NO: 293953 - DNA, 33 bp, Homo sapien
aaattatgactgtttaagaatgtacctaaaaat

SEQ ID NO: 293954 - DNA, 33 bp, Homo sapien
aaattatgactgtttaggaatgtacctaaaaat

SEQ ID NO: 293955 - DNA, 33 bp, Homo sapien
gaatagttgtggactaagagagtaaaatgatgt

SEQ ID NO: 293956 - DNA, 33 bp, Homo sapien
gaatagttgtggactatgagagtaaaatgatgt

SEQ ID NO: 293957 - DNA, 33 bp, Homo sapien
catctggtattcaaaaccttcgatctccagaga

SEQ ID NO: 293958 - DNA, 33 bp, Homo sapien
catctggtattcaaaatcttcgatctccagaga

SEQ ID NO: 293959 - DNA, 33 bp, Homo sapien
gcatttaatgccaaccaatttctctgtcccttc

SEQ ID NO: 293960 - DNA, 33 bp, Homo sapien
gcatttaatgccaaccgatttctctgtcccttc

SEQ ID NO: 293961 - DNA, 33 bp, Homo sapien
agctattatttcttcaaggtacaataaatagtg

SEQ ID NO: 293962 - DNA, 33 bp, Homo sapien
agctattatttcttcagggtacaataaatagtg

SEQ ID NO: 293963 - DNA, 33 bp, Homo sapien
caccccatgtcctttgcactgaaaaagagtgtg

SEQ ID NO: 293964 - DNA, 33 bp, Homo sapien
caccccatgtcctttgtactgaaaaagagtgtg

SEQ ID NO: 293965 - DNA, 33 bp, Homo sapien
cattttaccaaacgaccaatcagcactctctaa

SEQ ID NO: 293966 - DNA, 33 bp, Homo sapien
cattttaccaaacgacgaatcagcactctctaa

SEQ ID NO: 293967 - DNA, 33 bp, Homo sapien
tagataacaataatcaatcacataataccttca

SEQ ID NO: 293968 - DNA, 33 bp, Homo sapien
tagataacaataatcagtcacataataccttca

SEQ ID NO: 293969 - DNA, 33 bp, Homo sapien
ggtggacgtactagaaagaaatagctcagataa

SEQ ID NO: 293970 - DNA, 33 bp, Homo sapien
ggtggacgtactagaatgaaatagctcagataa

SEQ ID NO: 293971 - DNA, 33 bp, Homo sapien
ttgttggttgatagtacatgtaattcatgggca

SEQ ID NO: 293972 - DNA, 33 bp, Homo sapien
ttgttggttgatagtatatgtaattcatgggca

SEQ ID NO: 293973 - DNA, 33 bp, Homo sapien
acaatatggtacacagaatgctataattatgtg

SEQ ID NO: 293974 - DNA, 33 bp, Homo sapien
acaatatggtacacagtatgctataattatgtg

SEQ ID NO: 293975 - DNA, 33 bp, Homo sapien
attacaaacaatcagaaaagactatggtgtata

SEQ ID NO: 293976 - DNA, 33 bp, Homo sapien
attacaaacaatcagacaagactatggtgtata

SEQ ID NO: 293977 - DNA, 33 bp, Homo sapien
accctgatgcatgaaaatacaggttaaaaacat

SEQ ID NO: 293978 - DNA, 33 bp, Homo sapien
accctgatgcatgaaagtacaggttaaaaacat

SEQ ID NO: 293979 - DNA, 33 bp, Homo sapien
tcagagaaatgccaatcaaaactactgtgagat

SEQ ID NO: 293980 - DNA, 33 bp, Homo sapien
tcagagaaatgccaatgaaaactactgtgagat

SEQ ID NO: 293981 - DNA, 33 bp, Homo sapien
ggattggcctatgaaaccaagaatccgtacctt

SEQ ID NO: 293982 - DNA, 33 bp, Homo sapien
ggattggcctatgaaagcaagaatccgtacctt

SEQ ID NO: 293983 - DNA, 33 bp, Homo sapien
taggctgcatatttagaatgtggaaataatacg

SEQ ID NO: 293984 - DNA, 33 bp, Homo sapien
taggctgcatatttaggatgtggaaataatacg

SEQ ID NO: 293985 - DNA, 33 bp, Homo sapien
attcgaaagaaagaaccgttatgccaacccact

SEQ ID NO: 293986 - DNA, 33 bp, Homo sapien
attcgaaagaaagaactgttatgccaacccact

SEQ ID NO: 293987 - DNA, 33 bp, Homo sapien
gtgtaagttcatgcagcctaaaattcattactt

SEQ ID NO: 293988 - DNA, 33 bp, Homo sapien
gtgtaagttcatgcagtctaaaattcattactt

SEQ ID NO: 293989 - DNA, 33 bp, Homo sapien
gaattccattttgaatcggtgctactttgaatt

SEQ ID NO: 293990 - DNA, 33 bp, Homo sapien
gaattccattttgaattggtgctactttgaatt

SEQ ID NO: 293991 - DNA, 33 bp, Homo sapien
gcttaactttcctatacaagagctgatagatca

SEQ ID NO: 293992 - DNA, 33 bp, Homo sapien
gcttaactttcctatataagagctgatagatca

SEQ ID NO: 293993 - DNA, 33 bp, Homo sapien
actggctcataccttcaattcctggctgagggt

SEQ ID NO: 293994 - DNA, 33 bp, Homo sapien
actggctcataccttcgattcctggctgagggt

SEQ ID NO: 293995 - DNA, 33 bp, Homo sapien
ccaactctttgctaaaatagaatgacgtggtcc

SEQ ID NO: 293996 - DNA, 33 bp, Homo sapien
ccaactctttgctaaagtagaatgacgtggtcc

SEQ ID NO: 293997 - DNA, 33 bp, Homo sapien
aggagtcaccaagaagaatgtgggaaaacaaga

SEQ ID NO: 293998 - DNA, 33 bp, Homo sapien
aggagtcaccaagaagtatgtgggaaaacaaga

SEQ ID NO: 293999 - DNA, 33 bp, Homo sapien
cccctctccctgcatcaaaaactcttctgtctc

SEQ ID NO: 294000 - DNA, 33 bp, Homo sapien
cccctctccctgcatcgaaaactcttctgtctc

SEQ ID NO: 294001 - DNA, 33 bp, Homo sapien
ctgcttatcctagctaactttaacatcacacgg

SEQ ID NO: 294002 - DNA, 33 bp, Homo sapien
ctgcttatcctagctatctttaacatcacacgg

SEQ ID NO: 294003 - DNA, 33 bp, Homo sapien
caaagagggtgcaaaactggatagagcgatgtg

SEQ ID NO: 294004 - DNA, 33 bp, Homo sapien
caaagagggtgcaaaattggatagagcgatgtg

SEQ ID NO: 294005 - DNA, 33 bp, Homo sapien
tggacttcaccaccaccgggaaaatcataaaga

SEQ ID NO: 294006 - DNA, 33 bp, Homo sapien
tggacttcaccaccactgggaaaatcataaaga

SEQ ID NO: 294007 - DNA, 33 bp, Homo sapien
gatgcttcttatagacaatgcctcaagttttat

SEQ ID NO: 294008 - DNA, 33 bp, Homo sapien
gatgcttcttatagacgatgcctcaagttttat

SEQ ID NO: 294009 - DNA, 33 bp, Homo sapien
ttttgtctccaaatcacgagtaagtgatcccct

SEQ ID NO: 294010 - DNA, 33 bp, Homo sapien
ttttgtctccaaatcatgagtaagtgatcccct

SEQ ID NO: 294011 - DNA, 33 bp, Homo sapien
aagtctaaagctcgaacgaagcaataatatttg

SEQ ID NO: 294012 - DNA, 33 bp, Homo sapien
aagtctaaagctcgaatgaagcaataatatttg

SEQ ID NO: 294013 - DNA, 33 bp, Homo sapien
cttgagcagtggaacacaatgggatatcaaatt

SEQ ID NO: 294014 - DNA, 33 bp, Homo sapien
cttgagcagtggaacataatgggatatcaaatt

SEQ ID NO: 294015 - DNA, 33 bp, Homo sapien
tgtgaggttataaacacaagcagaatttgatat

SEQ ID NO: 294016 - DNA, 33 bp, Homo sapien
tgtgaggttataaacataagcagaatttgatat

SEQ ID NO: 294017 - DNA, 33 bp, Homo sapien
aagatgggagttacaaatgcagccctgcttcat

SEQ ID NO: 294018 - DNA, 33 bp, Homo sapien
aagatgggagttacaagtgcagccctgcttcat

SEQ ID NO: 294019 - DNA, 33 bp, Homo sapien
gaccagctgtttgtcagtcaggtcctttgcatc

SEQ ID NO: 294020 - DNA, 33 bp, Homo sapien
gaccagctgtttgtcattcaggtcctttgcatc

SEQ ID NO: 294021 - DNA, 33 bp, Homo sapien
tcatctattacagaaactccaaggtcagaagcc

SEQ ID NO: 294022 - DNA, 33 bp, Homo sapien
tcatctattacagaaagtccaaggtcagaagcc

SEQ ID NO: 294023 - DNA, 33 bp, Homo sapien
ttaaatacaaaacaacgaaatcacaaattagca

SEQ ID NO: 294024 - DNA, 33 bp, Homo sapien
ttaaatacaaaacaactaaatcacaaattagca

SEQ ID NO: 294025 - DNA, 33 bp, Homo sapien
cacacccctatgcttaaaattgtgtgaggacat

SEQ ID NO: 294026 - DNA, 33 bp, Homo sapien
cacacccctatgcttacaattgtgtgaggacat

SEQ ID NO: 294027 - DNA, 33 bp, Homo sapien
ttattctacgcactaaactcagccccaaaaatc

SEQ ID NO: 294028 - DNA, 33 bp, Homo sapien
ttattctacgcactaacctcagccccaaaaatc

SEQ ID NO: 294029 - DNA, 33 bp, Homo sapien
gccatccttccttccacataaatcagcctctag

SEQ ID NO: 294030 - DNA, 33 bp, Homo sapien
gccatccttccttccatataaatcagcctctag

SEQ ID NO: 294031 - DNA, 33 bp, Homo sapien
tgcatttatctgtcacaaggcaaaccactctgc

SEQ ID NO: 294032 - DNA, 33 bp, Homo sapien
tgcatttatctgtcacgaggcaaaccactctgc

SEQ ID NO: 294033 - DNA, 33 bp, Homo sapien
ccatttatctttatccacttatcacttgctgga

SEQ ID NO: 294034 - DNA, 33 bp, Homo sapien
ccatttatctttatccgcttatcacttgctgga

SEQ ID NO: 294035 - DNA, 33 bp, Homo sapien
tttaaaggatgcacaaaaagattagacacctaa

SEQ ID NO: 294036 - DNA, 33 bp, Homo sapien
tttaaaggatgcacaataagattagacacctaa

SEQ ID NO: 294037 - DNA, 33 bp, Homo sapien
ccaactggtttatccactcatatagtaacaatt

SEQ ID NO: 294038 - DNA, 33 bp, Homo sapien
ccaactggtttatccattcatatagtaacaatt

SEQ ID NO: 294039 - DNA, 33 bp, Homo sapien
gggaatagcaaatgtgcagaacaatggctctga

SEQ ID NO: 294040 - DNA, 33 bp, Homo sapien
gggaatagcaaatgtggagaacaatggctctga

SEQ ID NO: 294041 - DNA, 33 bp, Homo sapien
atagtttaatgttcacaggtattttagaatctc

SEQ ID NO: 294042 - DNA, 33 bp, Homo sapien
atagtttaatgttcacgggtattttagaatctc

SEQ ID NO: 294043 - DNA, 33 bp, Homo sapien
tttagaatctcagtagaaaaagtgcccttgtgc

SEQ ID NO: 294044 - DNA, 33 bp, Homo sapien
tttagaatctcagtagcaaaagtgcccttgtgc

SEQ ID NO: 294045 - DNA, 33 bp, Homo sapien
cactgatacagagttccagttgtcaagtctagt

SEQ ID NO: 294046 - DNA, 33 bp, Homo sapien
cactgatacagagttctagttgtcaagtctagt

SEQ ID NO: 294047 - DNA, 33 bp, Homo sapien
caagtatagtctaacccagttttgacacaattg

SEQ ID NO: 294048 - DNA, 33 bp, Homo sapien
caagtatagtctaacctagttttgacacaattg

SEQ ID NO: 294049 - DNA, 33 bp, Homo sapien
gcttccacacatcaaactgatctaatgacagcg

SEQ ID NO: 294050 - DNA, 33 bp, Homo sapien
gcttccacacatcaaagtgatctaatgacagcg

SEQ ID NO: 294051 - DNA, 33 bp, Homo sapien
aaacactagcaatgaacgatttttcttcataga

SEQ ID NO: 294052 - DNA, 33 bp, Homo sapien
aaacactagcaatgaatgatttttcttcataga

SEQ ID NO: 294053 - DNA, 33 bp, Homo sapien
ttgttccatgtttatagtagaagactatcatgt

SEQ ID NO: 294054 - DNA, 33 bp, Homo sapien
ttgttccatgtttatattagaagactatcatgt

SEQ ID NO: 294055 - DNA, 33 bp, Homo sapien
gctgagtagccatatgaaattatcagcatatat

SEQ ID NO: 294056 - DNA, 33 bp, Homo sapien
gctgagtagccatatggaattatcagcatatat

SEQ ID NO: 294057 - DNA, 33 bp, Homo sapien
tgtggagtaggggtgaggtttacagtcggaaca

SEQ ID NO: 294058 - DNA, 33 bp, Homo sapien
tgtggagtaggggtgatgtttacagtcggaaca

SEQ ID NO: 294059 - DNA, 33 bp, Homo sapien
tccttttataataaaggccgaatcattatgaat

SEQ ID NO: 294060 - DNA, 33 bp, Homo sapien
tccttttataataaagtccgaatcattatgaat

SEQ ID NO: 294061 - DNA, 33 bp, Homo sapien
gctcttttaaagacgacgtggactttgccaggc

SEQ ID NO: 294062 - DNA, 33 bp, Homo sapien
gctcttttaaagacgatgtggactttgccaggc

SEQ ID NO: 294063 - DNA, 33 bp, Homo sapien
ggtccccgggctgcacaggttcttgaggactgg

SEQ ID NO: 294064 - DNA, 33 bp, Homo sapien
ggtccccgggctgcacgggttcttgaggactgg

SEQ ID NO: 294065 - DNA, 33 bp, Homo sapien
actttcatacagaggacatggtaatcttaaaaa

SEQ ID NO: 294066 - DNA, 33 bp, Homo sapien
actttcatacagaggagatggtaatcttaaaaa

SEQ ID NO: 294067 - DNA, 33 bp, Homo sapien
tttaaacagaaatttcaatgatggagatgtttt

SEQ ID NO: 294068 - DNA, 33 bp, Homo sapien
tttaaacagaaatttcgatgatggagatgtttt

SEQ ID NO: 294069 - DNA, 33 bp, Homo sapien
agaattgctacaaaaacattcatccacaatgat

SEQ ID NO: 294070 - DNA, 33 bp, Homo sapien
agaattgctacaaaaatattcatccacaatgat

SEQ ID NO: 294071 - DNA, 33 bp, Homo sapien
ggttcgcacggtaacaacagattcacgttgtgg

SEQ ID NO: 294072 - DNA, 33 bp, Homo sapien
ggttcgcacggtaacaccagattcacgttgtgg

SEQ ID NO: 294073 - DNA, 33 bp, Homo sapien
tgttctcggaacttcaaaagtgccatttgtctc

SEQ ID NO: 294074 - DNA, 33 bp, Homo sapien
tgttctcggaacttcacaagtgccatttgtctc

SEQ ID NO: 294075 - DNA, 33 bp, Homo sapien
ctctataccttagcaaaataagaattataagga

SEQ ID NO: 294076 - DNA, 33 bp, Homo sapien
ctctataccttagcaacataagaattataagga

SEQ ID NO: 294077 - DNA, 33 bp, Homo sapien
gtaggtatttgccccaatcatcaattatgtgcc

SEQ ID NO: 294078 - DNA, 33 bp, Homo sapien
gtaggtatttgccccagtcatcaattatgtgcc

SEQ ID NO: 294079 - DNA, 33 bp, Homo sapien
ctgcagaataataggaaccttgagccttttatg

SEQ ID NO: 294080 - DNA, 33 bp, Homo sapien
ctgcagaataataggacccttgagccttttatg

SEQ ID NO: 294081 - DNA, 33 bp, Homo sapien
agagaaaggatcccgaggaatgcaaagggagtg

SEQ ID NO: 294082 - DNA, 33 bp, Homo sapien
agagaaaggatcccgatgaatgcaaagggagtg

SEQ ID NO: 294083 - DNA, 33 bp, Homo sapien
atgttacagatgaaaaataaaatcaccttagat

SEQ ID NO: 294084 - DNA, 33 bp, Homo sapien
atgttacagatgaaaagtaaaatcaccttagat

SEQ ID NO: 294085 - DNA, 33 bp, Homo sapien
aaatgaagtgcaaagacgtatgtttgggaagag

SEQ ID NO: 294086 - DNA, 33 bp, Homo sapien
aaatgaagtgcaaagatgtatgtttgggaagag

SEQ ID NO: 294087 - DNA, 33 bp, Homo sapien
aagactatggtagagcacatttcctgaactcaa

SEQ ID NO: 294088 - DNA, 33 bp, Homo sapien
aagactatggtagagcgcatttcctgaactcaa

SEQ ID NO: 294089 - DNA, 33 bp, Homo sapien
tctaccgaatttcacaaagtccagatcatgaag

SEQ ID NO: 294090 - DNA, 33 bp, Homo sapien
tctaccgaatttcacagagtccagatcatgaag

SEQ ID NO: 294091 - DNA, 33 bp, Homo sapien
tgctttcatgctaacactccataatcacctctc

SEQ ID NO: 294092 - DNA, 33 bp, Homo sapien
tgctttcatgctaacattccataatcacctctc

SEQ ID NO: 294093 - DNA, 33 bp, Homo sapien
atcattcatgtgtcaaacccaatggcacctctc

SEQ ID NO: 294094 - DNA, 33 bp, Homo sapien
atcattcatgtgtcaagcccaatggcacctctc

SEQ ID NO: 294095 - DNA, 33 bp, Homo sapien
ggtacaaattttcaaaacaatatgtgtctccaa

SEQ ID NO: 294096 - DNA, 33 bp, Homo sapien
ggtacaaattttcaaagcaatatgtgtctccaa

SEQ ID NO: 294097 - DNA, 33 bp, Homo sapien
agaaagttaatgaggaaaagagagaaacagggc

SEQ ID NO: 294098 - DNA, 33 bp, Homo sapien
agaaagttaatgaggagaagagagaaacagggc

SEQ ID NO: 294099 - DNA, 33 bp, Homo sapien
ggtatgtggtaatggcagaaaaaataaacacaa

SEQ ID NO: 294100 - DNA, 33 bp, Homo sapien
ggtatgtggtaatggccgaaaaaataaacacaa

SEQ ID NO: 294101 - DNA, 33 bp, Homo sapien
agatcctggcagtcaacgcagcttgaagacata

SEQ ID NO: 294102 - DNA, 33 bp, Homo sapien
agatcctggcagtcaatgcagcttgaagacata

SEQ ID NO: 294103 - DNA, 33 bp, Homo sapien
cccctgttgccatacacacatttcagctgagaa

SEQ ID NO: 294104 - DNA, 33 bp, Homo sapien
cccctgttgccatacatacatttcagctgagaa

SEQ ID NO: 294105 - DNA, 33 bp, Homo sapien
gcacataataggcttccatcattcagcattgag

SEQ ID NO: 294106 - DNA, 33 bp, Homo sapien
gcacataataggcttcgatcattcagcattgag

SEQ ID NO: 294107 - DNA, 33 bp, Homo sapien
taaaagataaactatgaatctgaaagtgtacag

SEQ ID NO: 294108 - DNA, 33 bp, Homo sapien
taaaagataaactatggatctgaaagtgtacag

SEQ ID NO: 294109 - DNA, 33 bp, Homo sapien
ctctgggaccgtggtcactgtcttgtctgttca

SEQ ID NO: 294110 - DNA, 33 bp, Homo sapien
ctctgggaccgtggtcgctgtcttgtctgttca

SEQ ID NO: 294111 - DNA, 33 bp, Homo sapien
ggatgaaaatcttaagccattctaactctaaaa

SEQ ID NO: 294112 - DNA, 33 bp, Homo sapien
ggatgaaaatcttaagtcattctaactctaaaa

SEQ ID NO: 294113 - DNA, 33 bp, Homo sapien
atcccacaaggaaagacgccaattgtacagaaa

SEQ ID NO: 294114 - DNA, 33 bp, Homo sapien
atcccacaaggaaagatgccaattgtacagaaa

SEQ ID NO: 294115 - DNA, 33 bp, Homo sapien
gtcctgcaaggctatcaatggcgttggcaaggt

SEQ ID NO: 294116 - DNA, 33 bp, Homo sapien
gtcctgcaaggctatcgatggcgttggcaaggt

SEQ ID NO: 294117 - DNA, 33 bp, Homo sapien
catgttagccatgagaccgtgataatactacag

SEQ ID NO: 294118 - DNA, 33 bp, Homo sapien
catgttagccatgagatcgtgataatactacag

SEQ ID NO: 294119 - DNA, 33 bp, Homo sapien
gattcatggaatgacaactggaatatgcccaca

SEQ ID NO: 294120 - DNA, 33 bp, Homo sapien
gattcatggaatgacatctggaatatgcccaca

SEQ ID NO: 294121 - DNA, 33 bp, Homo sapien
atctataactccctcacaattttgcatggtaaa

SEQ ID NO: 294122 - DNA, 33 bp, Homo sapien
atctataactccctcataattttgcatggtaaa

SEQ ID NO: 294123 - DNA, 33 bp, Homo sapien
ttgcccaaatcatatgcagaaacgcaaagattt

SEQ ID NO: 294124 - DNA, 33 bp, Homo sapien
ttgcccaaatcatatgtagaaacgcaaagattt

SEQ ID NO: 294125 - DNA, 33 bp, Homo sapien
tgaagcatttcagggacaaaaaatagttcagaa

SEQ ID NO: 294126 - DNA, 33 bp, Homo sapien
tgaagcatttcagggagaaaaaatagttcagaa

SEQ ID NO: 294127 - DNA, 33 bp, Homo sapien
agtcaaattagccttaaaaacgtcaccatggtg

SEQ ID NO: 294128 - DNA, 33 bp, Homo sapien
agtcaaattagccttagaaacgtcaccatggtg

SEQ ID NO: 294129 - DNA, 33 bp, Homo sapien
gacaatcacaaagtgaacttattgctgaataag

SEQ ID NO: 294130 - DNA, 33 bp, Homo sapien
gacaatcacaaagtgagcttattgctgaataag

SEQ ID NO: 294131 - DNA, 33 bp, Homo sapien
ctaataacagtacaaacagcaatgaggcaagag

SEQ ID NO: 294132 - DNA, 33 bp, Homo sapien
ctaataacagtacaaagagcaatgaggcaagag

SEQ ID NO: 294133 - DNA, 33 bp, Homo sapien
ccaatttaagagcagaacacaatagccagctct

SEQ ID NO: 294134 - DNA, 33 bp, Homo sapien
ccaatttaagagcagagcacaatagccagctct

SEQ ID NO: 294135 - DNA, 33 bp, Homo sapien
gaaattagggcaaggcagaaactccaatgcgat

SEQ ID NO: 294136 - DNA, 33 bp, Homo sapien
gaaattagggcaaggcggaaactccaatgcgat

SEQ ID NO: 294137 - DNA, 33 bp, Homo sapien
tgttttaatctacagaggtatgactcaagatgt

SEQ ID NO: 294138 - DNA, 33 bp, Homo sapien
tgttttaatctacagatgtatgactcaagatgt

SEQ ID NO: 294139 - DNA, 33 bp, Homo sapien
ctaattacacaacgtcaaaatgtcaggccacaa

SEQ ID NO: 294140 - DNA, 33 bp, Homo sapien
ctaattacacaacgtcgaaatgtcaggccacaa

SEQ ID NO: 294141 - DNA, 33 bp, Homo sapien
ttgggagttctctgaaataagcaaaactatgtt

SEQ ID NO: 294142 - DNA, 33 bp, Homo sapien
ttgggagttctctgaagtaagcaaaactatgtt

SEQ ID NO: 294143 - DNA, 33 bp, Homo sapien
taatgcctggcgttgacatttcagttgttagca

SEQ ID NO: 294144 - DNA, 33 bp, Homo sapien
taatgcctggcgttgatatttcagttgttagca

SEQ ID NO: 294145 - DNA, 33 bp, Homo sapien
gttgagattgctcacccatttacattttcctgg

SEQ ID NO: 294146 - DNA, 33 bp, Homo sapien
gttgagattgctcacctatttacattttcctgg

SEQ ID NO: 294147 - DNA, 33 bp, Homo sapien
catattttaagcctgacacttaacacctgctat

SEQ ID NO: 294148 - DNA, 33 bp, Homo sapien
catattttaagcctgatacttaacacctgctat

SEQ ID NO: 294149 - DNA, 33 bp, Homo sapien
tccgtatcttgatgagaccccaaactcaggtag

SEQ ID NO: 294150 - DNA, 33 bp, Homo sapien
tccgtatcttgatgaggccccaaactcaggtag

SEQ ID NO: 294151 - DNA, 33 bp, Homo sapien
attatctgaggtaaaaaattttccaaggtcact

SEQ ID NO: 294152 - DNA, 33 bp, Homo sapien
attatctgaggtaaaacattttccaaggtcact

SEQ ID NO: 294153 - DNA, 33 bp, Homo sapien
ctccctttgttccttcacatggagatgtattta

SEQ ID NO: 294154 - DNA, 33 bp, Homo sapien
ctccctttgttccttcgcatggagatgtattta

SEQ ID NO: 294155 - DNA, 33 bp, Homo sapien
tgctcacttctaactcaagagtgtcaacagcaa

SEQ ID NO: 294156 - DNA, 33 bp, Homo sapien
tgctcacttctaactcgagagtgtcaacagcaa

SEQ ID NO: 294157 - DNA, 33 bp, Homo sapien
tttctttgatatcatgctggcattaactaggct

SEQ ID NO: 294158 - DNA, 33 bp, Homo sapien
tttctttgatatcatgttggcattaactaggct

SEQ ID NO: 294159 - DNA, 33 bp, Homo sapien
taccaagtcactattacagagccaatccagatg

SEQ ID NO: 294160 - DNA, 33 bp, Homo sapien
taccaagtcactattatagagccaatccagatg

SEQ ID NO: 294161 - DNA, 33 bp, Homo sapien
atcaaatcttcacacaagaattcccagaatgct

SEQ ID NO: 294162 - DNA, 33 bp, Homo sapien
atcaaatcttcacacaggaattcccagaatgct

SEQ ID NO: 294163 - DNA, 33 bp, Homo sapien
gaatacctagactctccaaagatcaaatcttca

SEQ ID NO: 294164 - DNA, 33 bp, Homo sapien
gaatacctagactctctaaagatcaaatcttca

SEQ ID NO: 294165 - DNA, 33 bp, Homo sapien
ttttgttgtaagcctacaaaactatttgacttt

SEQ ID NO: 294166 - DNA, 33 bp, Homo sapien
ttttgttgtaagcctataaaactatttgacttt

SEQ ID NO: 294167 - DNA, 33 bp, Homo sapien
acaccctacagatttacggctttgatgagacac

SEQ ID NO: 294168 - DNA, 33 bp, Homo sapien
acaccctacagatttatggctttgatgagacac

SEQ ID NO: 294169 - DNA, 33 bp, Homo sapien
acacagttcatccctcccgttcaccatgtcctc

SEQ ID NO: 294170 - DNA, 33 bp, Homo sapien
acacagttcatccctcgcgttcaccatgtcctc

SEQ ID NO: 294171 - DNA, 33 bp, Homo sapien
tgttgtaaaaatggagacaccagggaaggccag

SEQ ID NO: 294172 - DNA, 33 bp, Homo sapien
tgttgtaaaaatggaggcaccagggaaggccag

SEQ ID NO: 294173 - DNA, 33 bp, Homo sapien
cctcttgaaagcaatgcagagcctgtgtgggca

SEQ ID NO: 294174 - DNA, 33 bp, Homo sapien
cctcttgaaagcaatgtagagcctgtgtgggca

SEQ ID NO: 294175 - DNA, 33 bp, Homo sapien
gctcatctcttcccacaatttgccatttgactt

SEQ ID NO: 294176 - DNA, 33 bp, Homo sapien
gctcatctcttcccacgatttgccatttgactt

SEQ ID NO: 294177 - DNA, 33 bp, Homo sapien
acacacagtcacataccctcattcacacacatt

SEQ ID NO: 294178 - DNA, 33 bp, Homo sapien
acacacagtcacatacgctcattcacacacatt

SEQ ID NO: 294179 - DNA, 33 bp, Homo sapien
agtcagatgaaatgaccggagcgggctgtccat

SEQ ID NO: 294180 - DNA, 33 bp, Homo sapien
agtcagatgaaatgactggagcgggctgtccat

SEQ ID NO: 294181 - DNA, 33 bp, Homo sapien
ctcagaaatgctaagacataactcagatttgga

SEQ ID NO: 294182 - DNA, 33 bp, Homo sapien
ctcagaaatgctaagatataactcagatttgga

SEQ ID NO: 294183 - DNA, 33 bp, Homo sapien
ggctcagtgtcacttagatctagattcacaggt

SEQ ID NO: 294184 - DNA, 33 bp, Homo sapien
ggctcagtgtcacttatatctagattcacaggt

SEQ ID NO: 294185 - DNA, 33 bp, Homo sapien
acattgatatggttgcaatctagactatctcct

SEQ ID NO: 294186 - DNA, 33 bp, Homo sapien
acattgatatggttgcgatctagactatctcct

SEQ ID NO: 294187 - DNA, 33 bp, Homo sapien
gcaattaggatctaaaaacattgtcctaattga

SEQ ID NO: 294188 - DNA, 33 bp, Homo sapien
gcaattaggatctaaacacattgtcctaattga

SEQ ID NO: 294189 - DNA, 33 bp, Homo sapien
aggaagaatataggcactgaggtctctccaaat

SEQ ID NO: 294190 - DNA, 33 bp, Homo sapien
aggaagaatataggcattgaggtctctccaaat

SEQ ID NO: 294191 - DNA, 33 bp, Homo sapien
acaggcagtaatcaccacaataaaacagaggac

SEQ ID NO: 294192 - DNA, 33 bp, Homo sapien
acaggcagtaatcaccgcaataaaacagaggac

SEQ ID NO: 294193 - DNA, 33 bp, Homo sapien
cttcccttgctacgaacagtaactcattgttaa

SEQ ID NO: 294194 - DNA, 33 bp, Homo sapien
cttcccttgctacgaatagtaactcattgttaa

SEQ ID NO: 294195 - DNA, 33 bp, Homo sapien
ggcacggaggcctctcacgtctttacacttgcc

SEQ ID NO: 294196 - DNA, 33 bp, Homo sapien
ggcacggaggcctctcgcgtctttacacttgcc

SEQ ID NO: 294197 - DNA, 33 bp, Homo sapien
tcttcttcctcaataagcaccgttccctctgct

SEQ ID NO: 294198 - DNA, 33 bp, Homo sapien
tcttcttcctcaataatcaccgttccctctgct

SEQ ID NO: 294199 - DNA, 33 bp, Homo sapien
tttatgttactctgcaagcttatctatcatagc

SEQ ID NO: 294200 - DNA, 33 bp, Homo sapien
tttatgttactctgcatgcttatctatcatagc

SEQ ID NO: 294201 - DNA, 33 bp, Homo sapien
cggcaccattgtgggtaaacatattgtgctaat

SEQ ID NO: 294202 - DNA, 33 bp, Homo sapien
cggcaccattgtgggtgaacatattgtgctaat

SEQ ID NO: 294203 - DNA, 33 bp, Homo sapien
gttggaaattgctgcactgaaatcagtataact

SEQ ID NO: 294204 - DNA, 33 bp, Homo sapien
gttggaaattgctgcattgaaatcagtataact

SEQ ID NO: 294205 - DNA, 33 bp, Homo sapien
aatatgtctgggttcaacaagagcacatttgac

SEQ ID NO: 294206 - DNA, 33 bp, Homo sapien
aatatgtctgggttcatcaagagcacatttgac

SEQ ID NO: 294207 - DNA, 33 bp, Homo sapien
tgggagaactttcttaaagcacataaaactcat

SEQ ID NO: 294208 - DNA, 33 bp, Homo sapien
tgggagaactttcttacagcacataaaactcat

SEQ ID NO: 294209 - DNA, 33 bp, Homo sapien
ttttattcacgtcaaggcaaaaagaaatgaaat

SEQ ID NO: 294210 - DNA, 33 bp, Homo sapien
ttttattcacgtcaagtcaaaaagaaatgaaat

SEQ ID NO: 294211 - DNA, 33 bp, Homo sapien
ctaaatcaaatcaaataaaaggtttgtggattt

SEQ ID NO: 294212 - DNA, 33 bp, Homo sapien
ctaaatcaaatcaaatgaaaggtttgtggattt

SEQ ID NO: 294213 - DNA, 33 bp, Homo sapien
gagttgtggcagttgaaaagataaatatataac

SEQ ID NO: 294214 - DNA, 33 bp, Homo sapien
gagttgtggcagttgagaagataaatatataac

SEQ ID NO: 294215 - DNA, 33 bp, Homo sapien
ttgcttcctaggttaccaaagacattgtgtcta

SEQ ID NO: 294216 - DNA, 33 bp, Homo sapien
ttgcttcctaggttactaaagacattgtgtcta

SEQ ID NO: 294217 - DNA, 33 bp, Homo sapien
aatgacagtcgtaacaatacgaaagctgtgtca

SEQ ID NO: 294218 - DNA, 33 bp, Homo sapien
aatgacagtcgtaacagtacgaaagctgtgtca

SEQ ID NO: 294219 - DNA, 33 bp, Homo sapien
tatcctttattaaacacgcatgctaaatacctc

SEQ ID NO: 294220 - DNA, 33 bp, Homo sapien
tatcctttattaaacatgcatgctaaatacctc

SEQ ID NO: 294221 - DNA, 33 bp, Homo sapien
gtgttgttaactggaacgtgaagctctccataa

SEQ ID NO: 294222 - DNA, 33 bp, Homo sapien
gtgttgttaactggaatgtgaagctctccataa

SEQ ID NO: 294223 - DNA, 33 bp, Homo sapien
tgacaggaagtgacaagccaattatgcatccag

SEQ ID NO: 294224 - DNA, 33 bp, Homo sapien
tgacaggaagtgacaatccaattatgcatccag

SEQ ID NO: 294225 - DNA, 33 bp, Homo sapien
aaagggaagagaaaaaggtaagtcaggtcatta

SEQ ID NO: 294226 - DNA, 33 bp, Homo sapien
aaagggaagagaaaaatgtaagtcaggtcatta

SEQ ID NO: 294227 - DNA, 33 bp, Homo sapien
tagtactagcaaatgtaaaactatcttgataca

SEQ ID NO: 294228 - DNA, 33 bp, Homo sapien
tagtactagcaaatgtgaaactatcttgataca

SEQ ID NO: 294229 - DNA, 33 bp, Homo sapien
ataagataaagctttcaattcctaacaatgaat

SEQ ID NO: 294230 - DNA, 33 bp, Homo sapien
ataagataaagctttccattcctaacaatgaat

SEQ ID NO: 294231 - DNA, 33 bp, Homo sapien
cgctgactttgagagagtcaagggacaattcat

SEQ ID NO: 294232 - DNA, 33 bp, Homo sapien
cgctgactttgagagattcaagggacaattcat

SEQ ID NO: 294233 - DNA, 33 bp, Homo sapien
acaggattcaaacaaggaggatgaagaagattt

SEQ ID NO: 294234 - DNA, 33 bp, Homo sapien
acaggattcaaacaagtaggatgaagaagattt

SEQ ID NO: 294235 - DNA, 33 bp, Homo sapien
ccttcaaatgcttgcaatctgaaactgttacaa

SEQ ID NO: 294236 - DNA, 33 bp, Homo sapien
ccttcaaatgcttgcagtctgaaactgttacaa

SEQ ID NO: 294237 - DNA, 33 bp, Homo sapien
tgtgaatatccaagaacaggtttttgtgtgaac

SEQ ID NO: 294238 - DNA, 33 bp, Homo sapien
tgtgaatatccaagaataggtttttgtgtgaac

SEQ ID NO: 294239 - DNA, 33 bp, Homo sapien
ctaactaaactcagcaaagatctacagaacacc

SEQ ID NO: 294240 - DNA, 33 bp, Homo sapien
ctaactaaactcagcagagatctacagaacacc

SEQ ID NO: 294241 - DNA, 33 bp, Homo sapien
ttcatgatctagtccacaatccatattagaaac

SEQ ID NO: 294242 - DNA, 33 bp, Homo sapien
ttcatgatctagtccataatccatattagaaac

SEQ ID NO: 294243 - DNA, 33 bp, Homo sapien
actacctgcattctcacatatgtggacaaaatg

SEQ ID NO: 294244 - DNA, 33 bp, Homo sapien
actacctgcattctcatatatgtggacaaaatg

SEQ ID NO: 294245 - DNA, 33 bp, Homo sapien
aattctttcttcatcaatacaaagcctggggaa

SEQ ID NO: 294246 - DNA, 33 bp, Homo sapien
aattctttcttcatcagtacaaagcctggggaa

SEQ ID NO: 294247 - DNA, 33 bp, Homo sapien
agttattcaaattcctcaatctggattagtaca

SEQ ID NO: 294248 - DNA, 33 bp, Homo sapien
agttattcaaattccttaatctggattagtaca

SEQ ID NO: 294249 - DNA, 33 bp, Homo sapien
attatttaaaagcagacggaacgaaattgatct

SEQ ID NO: 294250 - DNA, 33 bp, Homo sapien
attatttaaaagcagatggaacgaaattgatct

SEQ ID NO: 294251 - DNA, 33 bp, Homo sapien
caagcaaaggtcagaaagaaaggcatatgaaat

SEQ ID NO: 294252 - DNA, 33 bp, Homo sapien
caagcaaaggtcagaatgaaaggcatatgaaat

SEQ ID NO: 294253 - DNA, 33 bp, Homo sapien
ggttcagttcatgtcacagttttggtttcagta

SEQ ID NO: 294254 - DNA, 33 bp, Homo sapien
ggttcagttcatgtcatagttttggtttcagta

SEQ ID NO: 294255 - DNA, 33 bp, Homo sapien
gcatcttcttaagagcactcagtagtttcccaa

SEQ ID NO: 294256 - DNA, 33 bp, Homo sapien
gcatcttcttaagagcgctcagtagtttcccaa

SEQ ID NO: 294257 - DNA, 33 bp, Homo sapien
ccctgcgcctcctttaacataccactttgaaca

SEQ ID NO: 294258 - DNA, 33 bp, Homo sapien
ccctgcgcctcctttagcataccactttgaaca

SEQ ID NO: 294259 - DNA, 33 bp, Homo sapien
ctggaaactgcagaagaattgtgatctatttga

SEQ ID NO: 294260 - DNA, 33 bp, Homo sapien
ctggaaactgcagaaggattgtgatctatttga

SEQ ID NO: 294261 - DNA, 33 bp, Homo sapien
tttagggggatcatctcaaatggaaggcacatt

SEQ ID NO: 294262 - DNA, 33 bp, Homo sapien
tttagggggatcatcttaaatggaaggcacatt

SEQ ID NO: 294263 - DNA, 33 bp, Homo sapien
gatgtgcagagaagcaagattgttataacctcc

SEQ ID NO: 294264 - DNA, 33 bp, Homo sapien
gatgtgcagagaagcaggattgttataacctcc

SEQ ID NO: 294265 - DNA, 33 bp, Homo sapien
gttgttcagtcataaaattatcaaacactatat

SEQ ID NO: 294266 - DNA, 33 bp, Homo sapien
gttgttcagtcataaagttatcaaacactatat

SEQ ID NO: 294267 - DNA, 33 bp, Homo sapien
attttagaagagaaacaacgaccctttcttaag

SEQ ID NO: 294268 - DNA, 33 bp, Homo sapien
attttagaagagaaacgacgaccctttcttaag

SEQ ID NO: 294269 - DNA, 33 bp, Homo sapien
aactgtcaggttgaaactgctgcactgtcttaa

SEQ ID NO: 294270 - DNA, 33 bp, Homo sapien
aactgtcaggttgaaattgctgcactgtcttaa

SEQ ID NO: 294271 - DNA, 33 bp, Homo sapien
catgaaaacgaacattaaagtcacaatctaaat

SEQ ID NO: 294272 - DNA, 33 bp, Homo sapien
catgaaaacgaacattgaagtcacaatctaaat

SEQ ID NO: 294273 - DNA, 33 bp, Homo sapien
atcatgaggtacctgaaggctctagttagttac

SEQ ID NO: 294274 - DNA, 33 bp, Homo sapien
atcatgaggtacctgagggctctagttagttac

SEQ ID NO: 294275 - DNA, 33 bp, Homo sapien
tgtttataggaatttaaccatctcttgtaggtg

SEQ ID NO: 294276 - DNA, 33 bp, Homo sapien
tgtttataggaatttatccatctcttgtaggtg

SEQ ID NO: 294277 - DNA, 33 bp, Homo sapien
aaccactaagtatgaaatagatgtcttgttctc

SEQ ID NO: 294278 - DNA, 33 bp, Homo sapien
aaccactaagtatgaagtagatgtcttgttctc

SEQ ID NO: 294279 - DNA, 33 bp, Homo sapien
cctctaatagttgggacatttgcatggttagaa

SEQ ID NO: 294280 - DNA, 33 bp, Homo sapien
cctctaatagttgggatatttgcatggttagaa

SEQ ID NO: 294281 - DNA, 33 bp, Homo sapien
agtatgtgtgtatagaagttcactatgaaacac

SEQ ID NO: 294282 - DNA, 33 bp, Homo sapien
agtatgtgtgtatagacgttcactatgaaacac

SEQ ID NO: 294283 - DNA, 33 bp, Homo sapien
atggactaggaggcataatagtagtaagagtcc

SEQ ID NO: 294284 - DNA, 33 bp, Homo sapien
atggactaggaggcatcatagtagtaagagtcc

SEQ ID NO: 294285 - DNA, 33 bp, Homo sapien
atggtcactgggtaataaaactagtacatagct

SEQ ID NO: 294286 - DNA, 33 bp, Homo sapien
atggtcactgggtaatgaaactagtacatagct

SEQ ID NO: 294287 - DNA, 33 bp, Homo sapien
ggaactgatcgaagaactcctaggaactgaggt

SEQ ID NO: 294288 - DNA, 33 bp, Homo sapien
ggaactgatcgaagaagtcctaggaactgaggt

SEQ ID NO: 294289 - DNA, 33 bp, Homo sapien
ggatggcacagtgttacggaatgttcccaaatg

SEQ ID NO: 294290 - DNA, 33 bp, Homo sapien
ggatggcacagtgttatggaatgttcccaaatg

SEQ ID NO: 294291 - DNA, 33 bp, Homo sapien
ctcgatgatcgatgaaaaggggagttacgttgg

SEQ ID NO: 294292 - DNA, 33 bp, Homo sapien
ctcgatgatcgatgaagaggggagttacgttgg

SEQ ID NO: 294293 - DNA, 33 bp, Homo sapien
ttacaaatgtacacaacgtctcagaataaaata

SEQ ID NO: 294294 - DNA, 33 bp, Homo sapien
ttacaaatgtacacaatgtctcagaataaaata

SEQ ID NO: 294295 - DNA, 33 bp, Homo sapien
cattcttgtcttggtcacagaaggaacggcaca

SEQ ID NO: 294296 - DNA, 33 bp, Homo sapien
cattcttgtcttggtcgcagaaggaacggcaca

SEQ ID NO: 294297 - DNA, 33 bp, Homo sapien
atgatcagtgttattaaatctgcagaagcccaa

SEQ ID NO: 294298 - DNA, 33 bp, Homo sapien
atgatcagtgttattagatctgcagaagcccaa

SEQ ID NO: 294299 - DNA, 33 bp, Homo sapien
agcttagtggttaagcacacgagttctagattc

SEQ ID NO: 294300 - DNA, 33 bp, Homo sapien
agcttagtggttaagcgcacgagttctagattc

SEQ ID NO: 294301 - DNA, 33 bp, Homo sapien
tgactcacagatcacaaaaacatctgcagtttt

SEQ ID NO: 294302 - DNA, 33 bp, Homo sapien
tgactcacagatcacagaaacatctgcagtttt

SEQ ID NO: 294303 - DNA, 33 bp, Homo sapien
cttatataaactagaaaagtgtaattgccatta

SEQ ID NO: 294304 - DNA, 33 bp, Homo sapien
cttatataaactagaatagtgtaattgccatta

SEQ ID NO: 294305 - DNA, 33 bp, Homo sapien
agagactgtgaccacaatgaagggttaaaaatg

SEQ ID NO: 294306 - DNA, 33 bp, Homo sapien
agagactgtgaccacagtgaagggttaaaaatg

SEQ ID NO: 294307 - DNA, 33 bp, Homo sapien
ctttacttcctgctcaccaggttcaattaacgt

SEQ ID NO: 294308 - DNA, 33 bp, Homo sapien
ctttacttcctgctcatcaggttcaattaacgt

SEQ ID NO: 294309 - DNA, 33 bp, Homo sapien
atgccacctatgaatcagaaaccaagccctaat

SEQ ID NO: 294310 - DNA, 33 bp, Homo sapien
atgccacctatgaatcggaaaccaagccctaat

SEQ ID NO: 294311 - DNA, 33 bp, Homo sapien
agaaaatggagtacaacatgacgatgaaaatag

SEQ ID NO: 294312 - DNA, 33 bp, Homo sapien
agaaaatggagtacaatatgacgatgaaaatag

SEQ ID NO: 294313 - DNA, 33 bp, Homo sapien
aaaacagtcccacttacggttttgcatttattc

SEQ ID NO: 294314 - DNA, 33 bp, Homo sapien
aaaacagtcccacttatggttttgcatttattc

SEQ ID NO: 294315 - DNA, 33 bp, Homo sapien
cgaagtcacatccagaatccagaggaaggcaca

SEQ ID NO: 294316 - DNA, 33 bp, Homo sapien
cgaagtcacatccagagtccagaggaaggcaca

SEQ ID NO: 294317 - DNA, 33 bp, Homo sapien
aaaatgggaataaagacgaatcatgaagtacac

SEQ ID NO: 294318 - DNA, 33 bp, Homo sapien
aaaatgggaataaagaggaatcatgaagtacac

SEQ ID NO: 294319 - DNA, 33 bp, Homo sapien
atagccctgctgcacaatgatctatgtggtggc

SEQ ID NO: 294320 - DNA, 33 bp, Homo sapien
atagccctgctgcacagtgatctatgtggtggc

SEQ ID NO: 294321 - DNA, 33 bp, Homo sapien
tataaatctgttcacaatgatatcattcctgga

SEQ ID NO: 294322 - DNA, 33 bp, Homo sapien
tataaatctgttcacagtgatatcattcctgga

SEQ ID NO: 294323 - DNA, 33 bp, Homo sapien
atggatcagattactgcatcctcagccttacca

SEQ ID NO: 294324 - DNA, 33 bp, Homo sapien
atggatcagattactgtatcctcagccttacca

SEQ ID NO: 294325 - DNA, 33 bp, Homo sapien
tattactttacaatcactgaattggcaaaactt

SEQ ID NO: 294326 - DNA, 33 bp, Homo sapien
tattactttacaatcattgaattggcaaaactt

SEQ ID NO: 294327 - DNA, 33 bp, Homo sapien
tctgtgtagaaaggcacagatgtgtcaaaacat

SEQ ID NO: 294328 - DNA, 33 bp, Homo sapien
tctgtgtagaaaggcatagatgtgtcaaaacat

SEQ ID NO: 294329 - DNA, 33 bp, Homo sapien
tgctgattttttactgcatcccagaagttgtga

SEQ ID NO: 294330 - DNA, 33 bp, Homo sapien
tgctgattttttactggatcccagaagttgtga

SEQ ID NO: 294331 - DNA, 33 bp, Homo sapien
aaaatatggctcataaaggagggaaaatctctc

SEQ ID NO: 294332 - DNA, 33 bp, Homo sapien
aaaatatggctcataatggagggaaaatctctc

SEQ ID NO: 294333 - DNA, 33 bp, Homo sapien
ttggtagtgaatctaggacttgagcttatctaa

SEQ ID NO: 294334 - DNA, 33 bp, Homo sapien
ttggtagtgaatctagtacttgagcttatctaa

SEQ ID NO: 294335 - DNA, 33 bp, Homo sapien
ggaatagggaatatcacagggctcagtttaatt

SEQ ID NO: 294336 - DNA, 33 bp, Homo sapien
ggaatagggaatatcatagggctcagtttaatt

SEQ ID NO: 294337 - DNA, 33 bp, Homo sapien
tcctttcacagtaatacagattcgtttcaatga

SEQ ID NO: 294338 - DNA, 33 bp, Homo sapien
tcctttcacagtaatatagattcgtttcaatga

SEQ ID NO: 294339 - DNA, 33 bp, Homo sapien
actcacagagtgagaactaactcacctcaccct

SEQ ID NO: 294340 - DNA, 33 bp, Homo sapien
actcacagagtgagaattaactcacctcaccct

SEQ ID NO: 294341 - DNA, 33 bp, Homo sapien
ccaaacatgacagtcaaaaaatgtgctcaactg

SEQ ID NO: 294342 - DNA, 33 bp, Homo sapien
ccaaacatgacagtcagaaaatgtgctcaactg

SEQ ID NO: 294343 - DNA, 33 bp, Homo sapien
tgactatacgtttataggcaaacacaaaagtca

SEQ ID NO: 294344 - DNA, 33 bp, Homo sapien
tgactatacgtttatatgcaaacacaaaagtca

SEQ ID NO: 294345 - DNA, 33 bp, Homo sapien
caaaaccgttgctgagccatcctggtcacatta

SEQ ID NO: 294346 - DNA, 33 bp, Homo sapien
caaaaccgttgctgagtcatcctggtcacatta

SEQ ID NO: 294347 - DNA, 33 bp, Homo sapien
atcaaataaatgtgagaagagtctggcttgtta

SEQ ID NO: 294348 - DNA, 33 bp, Homo sapien
atcaaataaatgtgagcagagtctggcttgtta

SEQ ID NO: 294349 - DNA, 33 bp, Homo sapien
aatacgaaggtagtaaagtaaagactgcaagta

SEQ ID NO: 294350 - DNA, 33 bp, Homo sapien
aatacgaaggtagtaatgtaaagactgcaagta

SEQ ID NO: 294351 - DNA, 33 bp, Homo sapien
agaagtagctcaaaaacagatagaaacacagaa

SEQ ID NO: 294352 - DNA, 33 bp, Homo sapien
agaagtagctcaaaaatagatagaaacacagaa

SEQ ID NO: 294353 - DNA, 33 bp, Homo sapien
caatacctaggaagcaatcaaccaaacatcaat

SEQ ID NO: 294354 - DNA, 33 bp, Homo sapien
caatacctaggaagcactcaaccaaacatcaat

SEQ ID NO: 294355 - DNA, 33 bp, Homo sapien
aagatgggccaagaaaccaccaagagatcttta

SEQ ID NO: 294356 - DNA, 33 bp, Homo sapien
aagatgggccaagaaagcaccaagagatcttta

SEQ ID NO: 294357 - DNA, 33 bp, Homo sapien
ataatgatgacttagacaaaatgactaaacatt

SEQ ID NO: 294358 - DNA, 33 bp, Homo sapien
ataatgatgacttagataaaatgactaaacatt

SEQ ID NO: 294359 - DNA, 33 bp, Homo sapien
gagagggacagagggaaacaatattgatctatc

SEQ ID NO: 294360 - DNA, 33 bp, Homo sapien
gagagggacagagggagacaatattgatctatc

SEQ ID NO: 294361 - DNA, 33 bp, Homo sapien
aatcaaaatgctccgaagtcattgctggaacca

SEQ ID NO: 294362 - DNA, 33 bp, Homo sapien
aatcaaaatgctccgaggtcattgctggaacca

SEQ ID NO: 294363 - DNA, 33 bp, Homo sapien
atgtgttaggttcagaaagttgattcaaaggct

SEQ ID NO: 294364 - DNA, 33 bp, Homo sapien
atgtgttaggttcagagagttgattcaaaggct

SEQ ID NO: 294365 - DNA, 33 bp, Homo sapien
tctgttcataagatagcctagacctactgtaca

SEQ ID NO: 294366 - DNA, 33 bp, Homo sapien
tctgttcataagataggctagacctactgtaca

SEQ ID NO: 294367 - DNA, 33 bp, Homo sapien
accggatgctttttccccaataatctttaggag

SEQ ID NO: 294368 - DNA, 33 bp, Homo sapien
accggatgctttttcctcaataatctttaggag

SEQ ID NO: 294369 - DNA, 33 bp, Homo sapien
agatgggccgtactaaatcaccgaggtaaacta

SEQ ID NO: 294370 - DNA, 33 bp, Homo sapien
agatgggccgtactaactcaccgaggtaaacta

SEQ ID NO: 294371 - DNA, 33 bp, Homo sapien
gtcaagtgccatgttcacagtgaatctgccatg

SEQ ID NO: 294372 - DNA, 33 bp, Homo sapien
gtcaagtgccatgttcgcagtgaatctgccatg

SEQ ID NO: 294373 - DNA, 33 bp, Homo sapien
agggaaaccaagcttgcagcaaggttcggttaa

SEQ ID NO: 294374 - DNA, 33 bp, Homo sapien
agggaaaccaagcttggagcaaggttcggttaa

SEQ ID NO: 294375 - DNA, 33 bp, Homo sapien
ccccagagagaaacgcaattgccttcaatccct

SEQ ID NO: 294376 - DNA, 33 bp, Homo sapien
ccccagagagaaacgcgattgccttcaatccct

SEQ ID NO: 294377 - DNA, 33 bp, Homo sapien
aaggtacatctaaatcccaatctctctctatta

SEQ ID NO: 294378 - DNA, 33 bp, Homo sapien
aaggtacatctaaatctcaatctctctctatta

SEQ ID NO: 294379 - DNA, 33 bp, Homo sapien
tctctagctggcttctcactagattccaataaa

SEQ ID NO: 294380 - DNA, 33 bp, Homo sapien
tctctagctggcttcttactagattccaataaa

SEQ ID NO: 294381 - DNA, 33 bp, Homo sapien
ctgatttctcccttccggctactttccattctc

SEQ ID NO: 294382 - DNA, 33 bp, Homo sapien
ctgatttctcccttcctgctactttccattctc

SEQ ID NO: 294383 - DNA, 33 bp, Homo sapien
tatttttcagatcacagaaaagctggttacttt

SEQ ID NO: 294384 - DNA, 33 bp, Homo sapien
tatttttcagatcacataaaagctggttacttt

SEQ ID NO: 294385 - DNA, 33 bp, Homo sapien
tggtactattgagtcaccaaatgcattggttct

SEQ ID NO: 294386 - DNA, 33 bp, Homo sapien
tggtactattgagtcatcaaatgcattggttct

SEQ ID NO: 294387 - DNA, 33 bp, Homo sapien
aaagattcatctaaccaggagtttcttacacaa

SEQ ID NO: 294388 - DNA, 33 bp, Homo sapien
aaagattcatctaaccgggagtttcttacacaa

SEQ ID NO: 294389 - DNA, 33 bp, Homo sapien
tttgcaataattcgagaaaagtggtggaggaat

SEQ ID NO: 294390 - DNA, 33 bp, Homo sapien
tttgcaataattcgagcaaagtggtggaggaat

SEQ ID NO: 294391 - DNA, 33 bp, Homo sapien
actatgcccatgtacaagaactatgtagatgaa

SEQ ID NO: 294392 - DNA, 33 bp, Homo sapien
actatgcccatgtacacgaactatgtagatgaa

SEQ ID NO: 294393 - DNA, 33 bp, Homo sapien
agggcctagaatctagcagacattcaataatat

SEQ ID NO: 294394 - DNA, 33 bp, Homo sapien
agggcctagaatctagtagacattcaataatat

SEQ ID NO: 294395 - DNA, 33 bp, Homo sapien
tcctctatatcaaacactggacttccaggaaat

SEQ ID NO: 294396 - DNA, 33 bp, Homo sapien
tcctctatatcaaacattggacttccaggaaat

SEQ ID NO: 294397 - DNA, 33 bp, Homo sapien
ttttgtctgacagatacctctagagtgccacat

SEQ ID NO: 294398 - DNA, 33 bp, Homo sapien
ttttgtctgacagatatctctagagtgccacat

SEQ ID NO: 294399 - DNA, 33 bp, Homo sapien
gctctggtgtggataagcataatgaatctgtgt

SEQ ID NO: 294400 - DNA, 33 bp, Homo sapien
gctctggtgtggataatcataatgaatctgtgt

SEQ ID NO: 294401 - DNA, 33 bp, Homo sapien
aagaacaagattgatagagcgataacttcatgg

SEQ ID NO: 294402 - DNA, 33 bp, Homo sapien
aagaacaagattgatatagcgataacttcatgg

SEQ ID NO: 294403 - DNA, 33 bp, Homo sapien
tggagattcaccagaaatcatcatacacattat

SEQ ID NO: 294404 - DNA, 33 bp, Homo sapien
tggagattcaccagaagtcatcatacacattat

SEQ ID NO: 294405 - DNA, 33 bp, Homo sapien
tattgaaatgtgtcacggcctgtgagaacaaca

SEQ ID NO: 294406 - DNA, 33 bp, Homo sapien
tattgaaatgtgtcactgcctgtgagaacaaca

SEQ ID NO: 294407 - DNA, 33 bp, Homo sapien
gagtgccaattccatcacttacctgctatgtga

SEQ ID NO: 294408 - DNA, 33 bp, Homo sapien
gagtgccaattccatcgcttacctgctatgtga

SEQ ID NO: 294409 - DNA, 33 bp, Homo sapien
gatgatgtgtccacgggaagcttgttttgcctt

SEQ ID NO: 294410 - DNA, 33 bp, Homo sapien
gatgatgtgtccacggtaagcttgttttgcctt

SEQ ID NO: 294411 - DNA, 33 bp, Homo sapien
gcatctctacattgtcacagatacagatataaa

SEQ ID NO: 294412 - DNA, 33 bp, Homo sapien
gcatctctacattgtcccagatacagatataaa

SEQ ID NO: 294413 - DNA, 33 bp, Homo sapien
ctataggtttataagaacagtctatccattttg

SEQ ID NO: 294414 - DNA, 33 bp, Homo sapien
ctataggtttataagagcagtctatccattttg

SEQ ID NO: 294415 - DNA, 33 bp, Homo sapien
atttatttgtaatacacctagattttcttgttg

SEQ ID NO: 294416 - DNA, 33 bp, Homo sapien
atttatttgtaatacatctagattttcttgttg

SEQ ID NO: 294417 - DNA, 33 bp, Homo sapien
ctccctgtcccctttcaatattggtcactggac

SEQ ID NO: 294418 - DNA, 33 bp, Homo sapien
ctccctgtcccctttctatattggtcactggac

SEQ ID NO: 294419 - DNA, 33 bp, Homo sapien
ctgaggactaattccacacttccattctaagta

SEQ ID NO: 294420 - DNA, 33 bp, Homo sapien
ctgaggactaattccatacttccattctaagta

SEQ ID NO: 294421 - DNA, 33 bp, Homo sapien
ttagttatcagacttacgtttcagagtgtggga

SEQ ID NO: 294422 - DNA, 33 bp, Homo sapien
ttagttatcagacttatgtttcagagtgtggga

SEQ ID NO: 294423 - DNA, 33 bp, Homo sapien
tcatccagcttctcaactgccaagaccgtgtgt

SEQ ID NO: 294424 - DNA, 33 bp, Homo sapien
tcatccagcttctcaattgccaagaccgtgtgt

SEQ ID NO: 294425 - DNA, 33 bp, Homo sapien
gggcactaatgcagtagctttgtataatgcaaa

SEQ ID NO: 294426 - DNA, 33 bp, Homo sapien
gggcactaatgcagtatctttgtataatgcaaa

SEQ ID NO: 294427 - DNA, 33 bp, Homo sapien
tgtgtcatacactttacggcattcctaaaaatg

SEQ ID NO: 294428 - DNA, 33 bp, Homo sapien
tgtgtcatacactttatggcattcctaaaaatg

SEQ ID NO: 294429 - DNA, 33 bp, Homo sapien
ccttttcatgtaaccacctctccaatactttaa

SEQ ID NO: 294430 - DNA, 33 bp, Homo sapien
ccttttcatgtaaccatctctccaatactttaa

SEQ ID NO: 294431 - DNA, 33 bp, Homo sapien
ctgatgacttccggagaagaataggaatactga

SEQ ID NO: 294432 - DNA, 33 bp, Homo sapien
ctgatgacttccggaggagaataggaatactga

SEQ ID NO: 294433 - DNA, 33 bp, Homo sapien
caggtaaatatgttccagcaggatttgacaaag

SEQ ID NO: 294434 - DNA, 33 bp, Homo sapien
caggtaaatatgttccggcaggatttgacaaag

SEQ ID NO: 294435 - DNA, 33 bp, Homo sapien
ttccactcagtgcaaacagactgggcactgtgg

SEQ ID NO: 294436 - DNA, 33 bp, Homo sapien
ttccactcagtgcaaagagactgggcactgtgg

SEQ ID NO: 294437 - DNA, 33 bp, Homo sapien
agccaagccttacttacgtaactctggcagagg

SEQ ID NO: 294438 - DNA, 33 bp, Homo sapien
agccaagccttacttatgtaactctggcagagg

SEQ ID NO: 294439 - DNA, 33 bp, Homo sapien
ttaagtttccaatagcacatagattttttttct

SEQ ID NO: 294440 - DNA, 33 bp, Homo sapien
ttaagtttccaatagcgcatagattttttttct

SEQ ID NO: 294441 - DNA, 33 bp, Homo sapien
aatacaagatgtgaaaaaacaacattttatttc

SEQ ID NO: 294442 - DNA, 33 bp, Homo sapien
aatacaagatgtgaaagaacaacattttatttc

SEQ ID NO: 294443 - DNA, 33 bp, Homo sapien
gccaacattttaggaaacaaaccattatggttc

SEQ ID NO: 294444 - DNA, 33 bp, Homo sapien
gccaacattttaggaagcaaaccattatggttc

SEQ ID NO: 294445 - DNA, 33 bp, Homo sapien
aagcattagtgattctgactgatagacatcatg

SEQ ID NO: 294446 - DNA, 33 bp, Homo sapien
aagcattagtgattcttactgatagacatcatg

SEQ ID NO: 294447 - DNA, 33 bp, Homo sapien
ctcccttgagggagcaaattttgggagataggg

SEQ ID NO: 294448 - DNA, 33 bp, Homo sapien
ctcccttgagggagcacattttgggagataggg

SEQ ID NO: 294449 - DNA, 33 bp, Homo sapien
agatttcttgattgcccatttagtgttaatgtc

SEQ ID NO: 294450 - DNA, 33 bp, Homo sapien
agatttcttgattgccgatttagtgttaatgtc

SEQ ID NO: 294451 - DNA, 33 bp, Homo sapien
cttaacagaccatgacccaaaacactgtctcct

SEQ ID NO: 294452 - DNA, 33 bp, Homo sapien
cttaacagaccatgactcaaaacactgtctcct

SEQ ID NO: 294453 - DNA, 33 bp, Homo sapien
ctgatgcacagtacggaccactatggtatactg

SEQ ID NO: 294454 - DNA, 33 bp, Homo sapien
ctgatgcacagtacggtccactatggtatactg

SEQ ID NO: 294455 - DNA, 33 bp, Homo sapien
attgagactggaaataagtgataaatagttatt

SEQ ID NO: 294456 - DNA, 33 bp, Homo sapien
attgagactggaaataggtgataaatagttatt

SEQ ID NO: 294457 - DNA, 33 bp, Homo sapien
aactgaacctttttgaacataaaccaacatttt

SEQ ID NO: 294458 - DNA, 33 bp, Homo sapien
aactgaacctttttgagcataaaccaacatttt

SEQ ID NO: 294459 - DNA, 33 bp, Homo sapien
gggccttatatttgaaaatactcaaaaaatttc

SEQ ID NO: 294460 - DNA, 33 bp, Homo sapien
gggccttatatttgaagatactcaaaaaatttc

SEQ ID NO: 294461 - DNA, 33 bp, Homo sapien
aataaacgacaaaaaggagtcagaacaatactt

SEQ ID NO: 294462 - DNA, 33 bp, Homo sapien
aataaacgacaaaaagtagtcagaacaatactt

SEQ ID NO: 294463 - DNA, 33 bp, Homo sapien
gtagatctgttggataagacaagaagaaccaga

SEQ ID NO: 294464 - DNA, 33 bp, Homo sapien
gtagatctgttggataggacaagaagaaccaga

SEQ ID NO: 294465 - DNA, 33 bp, Homo sapien
atgttatttagcaatgaaaatggagtaatgata

SEQ ID NO: 294466 - DNA, 33 bp, Homo sapien
atgttatttagcaatggaaatggagtaatgata

SEQ ID NO: 294467 - DNA, 33 bp, Homo sapien
gctgcaacatgcatgaacattcaaaacatgcca

SEQ ID NO: 294468 - DNA, 33 bp, Homo sapien
gctgcaacatgcatgaccattcaaaacatgcca

SEQ ID NO: 294469 - DNA, 33 bp, Homo sapien
ttttagttcctaaaaaatttcttcagttgaatc

SEQ ID NO: 294470 - DNA, 33 bp, Homo sapien
ttttagttcctaaaaagtttcttcagttgaatc

SEQ ID NO: 294471 - DNA, 33 bp, Homo sapien
gggtagggtggaagtacggaagatatgtacaga

SEQ ID NO: 294472 - DNA, 33 bp, Homo sapien
gggtagggtggaagtagggaagatatgtacaga

SEQ ID NO: 294473 - DNA, 33 bp, Homo sapien; identical to SEQ ID NO: 294471

SEQ ID NO: 294474 - DNA, 33 bp, Homo sapien; identical to SEQ ID NO: 294472

SEQ ID NO: 294475 - DNA, 33 bp, Homo sapien
cgtccttgtgttacagacaacttttttgggaat

SEQ ID NO: 294476 - DNA, 33 bp, Homo sapien
cgtccttgtgttacaggcaacttttttgggaat

SEQ ID NO: 294477 - DNA, 33 bp, Homo sapien
ggaaaagcatcctaacaggaagaatggtagtga

SEQ ID NO: 294478 - DNA, 33 bp, Homo sapien
ggaaaagcatcctaacgggaagaatggtagtga

SEQ ID NO: 294479 - DNA, 33 bp, Homo sapien
ggagggcatttcattaccaagaatttcagtaac

SEQ ID NO: 294480 - DNA, 33 bp, Homo sapien
ggagggcatttcattagcaagaatttcagtaac

SEQ ID NO: 294481 - DNA, 33 bp, Homo sapien
actcccataaaaaaaaacgcagccagggcatag

SEQ ID NO: 294482 - DNA, 33 bp, Homo sapien
actcccataaaaaaaagcgcagccagggcatag

SEQ ID NO: 294483 - DNA, 33 bp, Homo sapien
tatgtgtgtggctacaatggaagtcagggaatt

SEQ ID NO: 294484 - DNA, 33 bp, Homo sapien
tatgtgtgtggctacagtggaagtcagggaatt

SEQ ID NO: 294485 - DNA, 33 bp, Homo sapien
gataaccattatctgcaatatattcaacagaag

SEQ ID NO: 294486 - DNA, 33 bp, Homo sapien
gataaccattatctgcgatatattcaacagaag

SEQ ID NO: 294487 - DNA, 33 bp, Homo sapien
aaggaaagagtgttacaacaaggaaaaatagaa

SEQ ID NO: 294488 - DNA, 33 bp, Homo sapien
aaggaaagagtgttacgacaaggaaaaatagaa

SEQ ID NO: 294489 - DNA, 33 bp, Homo sapien
gatgagtgagattaagccctgcatccaggctac

SEQ ID NO: 294490 - DNA, 33 bp, Homo sapien
gatgagtgagattaagtcctgcatccaggctac

SEQ ID NO: 294491 - DNA, 33 bp, Homo sapien
aaattactttcttggccatgaagattttgcaca

SEQ ID NO: 294492 - DNA, 33 bp, Homo sapien
aaattactttcttggcgatgaagattttgcaca

SEQ ID NO: 294493 - DNA, 33 bp, Homo sapien
tctggtagagatctagccgattttagtagacac

SEQ ID NO: 294494 - DNA, 33 bp, Homo sapien
tctggtagagatctagtcgattttagtagacac

SEQ ID NO: 294495 - DNA, 33 bp, Homo sapien
gacatgaacaaaagccacaaccaggatgccctg

SEQ ID NO: 294496 - DNA, 33 bp, Homo sapien
gacatgaacaaaagccgcaaccaggatgccctg

SEQ ID NO: 294497 - DNA, 33 bp, Homo sapien
ataaatccacataccaaaactgtagatgctttt

SEQ ID NO: 294498 - DNA, 33 bp, Homo sapien
ataaatccacataccagaactgtagatgctttt

SEQ ID NO: 294499 - DNA, 33 bp, Homo sapien
ctgataagtgtataacgcctgttgagtgagcag

SEQ ID NO: 294500 - DNA, 33 bp, Homo sapien
ctgataagtgtataactcctgttgagtgagcag

SEQ ID NO: 294501 - DNA, 33 bp, Homo sapien
agttcttagtcatagcaaaagcaaggcaaagtc

SEQ ID NO: 294502 - DNA, 33 bp, Homo sapien
agttcttagtcatagcgaaagcaaggcaaagtc

SEQ ID NO: 294503 - DNA, 33 bp, Homo sapien
acttcctgggccgcaacagtctgaaaaaaaaat

SEQ ID NO: 294504 - DNA, 33 bp, Homo sapien
acttcctgggccgcaagagtctgaaaaaaaaat

SEQ ID NO: 294505 - DNA, 33 bp, Homo sapien
atgtttagtaagtttacagtagtctacactttc

SEQ ID NO: 294506 - DNA, 33 bp, Homo sapien
atgtttagtaagtttatagtagtctacactttc

SEQ ID NO: 294507 - DNA, 33 bp, Homo sapien
ttgctttcagaaataaaaatcagatttgatgta

SEQ ID NO: 294508 - DNA, 33 bp, Homo sapien
ttgctttcagaaataacaatcagatttgatgta

SEQ ID NO: 294509 - DNA, 33 bp, Homo sapien
ctggaatagcatcatacctggtgctggagtaat

SEQ ID NO: 294510 - DNA, 33 bp, Homo sapien
ctggaatagcatcatagctggtgctggagtaat

SEQ ID NO: 294511 - DNA, 33 bp, Homo sapien
ctttctcactatgtgaacctttggcagtattta

SEQ ID NO: 294512 - DNA, 33 bp, Homo sapien
ctttctcactatgtgaccctttggcagtattta

SEQ ID NO: 294513 - DNA, 33 bp, Homo sapien
cttcactcctgcctgaaattttaaatattcccc

SEQ ID NO: 294514 - DNA, 33 bp, Homo sapien
cttcactcctgcctgagattttaaatattcccc

SEQ ID NO: 294515 - DNA, 33 bp, Homo sapien
atgtcttcacgttacacgaggatttctgtttta

SEQ ID NO: 294516 - DNA, 33 bp, Homo sapien
atgtcttcacgttacatgaggatttctgtttta

SEQ ID NO: 294517 - DNA, 33 bp, Homo sapien
tgccttgctgcccagaccgcaatctttgaagac

SEQ ID NO: 294518 - DNA, 33 bp, Homo sapien
tgccttgctgcccagatcgcaatctttgaagac

SEQ ID NO: 294519 - DNA, 33 bp, Homo sapien
tggcttctctgtagtacattctcaacacagcag

SEQ ID NO: 294520 - DNA, 33 bp, Homo sapien
tggcttctctgtagtatattctcaacacagcag

SEQ ID NO: 294521 - DNA, 33 bp, Homo sapien
tgtcttcctcattctgaaattccccacgcagcc

SEQ ID NO: 294522 - DNA, 33 bp, Homo sapien
tgtcttcctcattctgcaattccccacgcagcc

SEQ ID NO: 294523 - DNA, 33 bp, Homo sapien
tcctttgactcgtgtaaaaaagtttgtaatctc

SEQ ID NO: 294524 - DNA, 33 bp, Homo sapien
tcctttgactcgtgtataaaagtttgtaatctc

SEQ ID NO: 294525 - DNA, 33 bp, Homo sapien
tgatttgtcattgagaccactggaccctagaag

SEQ ID NO: 294526 - DNA, 33 bp, Homo sapien
tgatttgtcattgagatcactggaccctagaag

SEQ ID NO: 294527 - DNA, 33 bp, Homo sapien
tatgattgctaagacacaggaaaaagcagttgc

SEQ ID NO: 294528 - DNA, 33 bp, Homo sapien
tatgattgctaagacataggaaaaagcagttgc

SEQ ID NO: 294529 - DNA, 33 bp, Homo sapien
tatttaactgcatacaactttaatatgcttctg

SEQ ID NO: 294530 - DNA, 33 bp, Homo sapien
tatttaactgcatacatctttaatatgcttctg

SEQ ID NO: 294531 - DNA, 33 bp, Homo sapien
tagtcaattttcacgccgataaagacataccca

SEQ ID NO: 294532 - DNA, 33 bp, Homo sapien
tagtcaattttcacgctgataaagacataccca

SEQ ID NO: 294533 - DNA, 33 bp, Homo sapien
acatatgaaattgataagttgcaaataaacaaa

SEQ ID NO: 294534 - DNA, 33 bp, Homo sapien
acatatgaaattgataggttgcaaataaacaaa

SEQ ID NO: 294535 - DNA, 33 bp, Homo sapien
tgaccaacaatatgtcgaaacaacagtatgtct

SEQ ID NO: 294536 - DNA, 33 bp, Homo sapien
tgaccaacaatatgtctaaacaacagtatgtct

SEQ ID NO: 294537 - DNA, 33 bp, Homo sapien
atgtgaccaagatcataaagctctgattgacaa

SEQ ID NO: 294538 - DNA, 33 bp, Homo sapien
atgtgaccaagatcatgaagctctgattgacaa

SEQ ID NO: 294539 - DNA, 33 bp, Homo sapien
ttgtttatcttgaaggcccgttgcagtaggttt

SEQ ID NO: 294540 - DNA, 33 bp, Homo sapien
ttgtttatcttgaaggtccgttgcagtaggttt

SEQ ID NO: 294541 - DNA, 33 bp, Homo sapien
ctcaaaatagcctatgaatgttccctgattaac

SEQ ID NO: 294542 - DNA, 33 bp, Homo sapien
ctcaaaatagcctatggatgttccctgattaac

SEQ ID NO: 294543 - DNA, 33 bp, Homo sapien
gctcttttccttacaccgtcttcatctctggtt

SEQ ID NO: 294544 - DNA, 33 bp, Homo sapien
gctcttttccttacactgtcttcatctctggtt

SEQ ID NO: 294545 - DNA, 33 bp, Homo sapien
atagcaatgctagagacgaaaaattgttccgcc

SEQ ID NO: 294546 - DNA, 33 bp, Homo sapien
atagcaatgctagagatgaaaaattgttccgcc

SEQ ID NO: 294547 - DNA, 33 bp, Homo sapien
ttcgacttctcgttcccaacaaaaatcagtgtc

SEQ ID NO: 294548 - DNA, 33 bp, Homo sapien
ttcgacttctcgttcctaacaaaaatcagtgtc

SEQ ID NO: 294549 - DNA, 33 bp, Homo sapien
ctgtatgaatattctagcctcatgctttatgtg

SEQ ID NO: 294550 - DNA, 33 bp, Homo sapien
ctgtatgaatattctatcctcatgctttatgtg

SEQ ID NO: 294551 - DNA, 33 bp, Homo sapien
actgattctgcctgtacgtctttgaatcaaccc

SEQ ID NO: 294552 - DNA, 33 bp, Homo sapien
actgattctgcctgtatgtctttgaatcaaccc

SEQ ID NO: 294553 - DNA, 33 bp, Homo sapien
tgtcgccatttctgaacttcaaactgattctgc

SEQ ID NO: 294554 - DNA, 33 bp, Homo sapien
tgtcgccatttctgaatttcaaactgattctgc

SEQ ID NO: 294555 - DNA, 33 bp, Homo sapien
atttcattatatgcaacgtttccattaggttgg

SEQ ID NO: 294556 - DNA, 33 bp, Homo sapien
atttcattatatgcaaggtttccattaggttgg

SEQ ID NO: 294557 - DNA, 33 bp, Homo sapien
ctaatgttgtgattcacattggttaatatattt

SEQ ID NO: 294558 - DNA, 33 bp, Homo sapien
ctaatgttgtgattcagattggttaatatattt

SEQ ID NO: 294559 - DNA, 33 bp, Homo sapien
ccatgtgagtaatctacgtagtcctcatttcct

SEQ ID NO: 294560 - DNA, 33 bp, Homo sapien
ccatgtgagtaatctatgtagtcctcatttcct

SEQ ID NO: 294561 - DNA, 33 bp, Homo sapien
tcacctatgtggaaaaacatataacgaaataat

SEQ ID NO: 294562 - DNA, 33 bp, Homo sapien
tcacctatgtggaaaagcatataacgaaataat

SEQ ID NO: 294563 - DNA, 33 bp, Homo sapien
actataaagactatacagcttccaaatgtcatc

SEQ ID NO: 294564 - DNA, 33 bp, Homo sapien
actataaagactatacggcttccaaatgtcatc

SEQ ID NO: 294565 - DNA, 33 bp, Homo sapien
ggtctgttgaacatcaagtaaaataagcagaaa

SEQ ID NO: 294566 - DNA, 33 bp, Homo sapien
ggtctgttgaacatcacgtaaaataagcagaaa

SEQ ID NO: 294567 - DNA, 33 bp, Homo sapien
catggtggaacagaaaagagccaccttcatcac

SEQ ID NO: 294568 - DNA, 33 bp, Homo sapien
catggtggaacagaaaggagccaccttcatcac

SEQ ID NO: 294569 - DNA, 33 bp, Homo sapien
gctttggcagccatatcaggtatattctggtaa

SEQ ID NO: 294570 - DNA, 33 bp, Homo sapien
gctttggcagccatatgaggtatattctggtaa

SEQ ID NO: 294571 - DNA, 33 bp, Homo sapien
agaatgtaacggaaaaactagaatgcaaacatg

SEQ ID NO: 294572 - DNA, 33 bp, Homo sapien
agaatgtaacggaaaagctagaatgcaaacatg

SEQ ID NO: 294573 - DNA, 33 bp, Homo sapien
tcatgtgttcttgggactatttctgacgctcct

SEQ ID NO: 294574 - DNA, 33 bp, Homo sapien
tcatgtgttcttgggagtatttctgacgctcct

SEQ ID NO: 294575 - DNA, 33 bp, Homo sapien
aaaaaaaattacctaactcttctggacctcttc

SEQ ID NO: 294576 - DNA, 33 bp, Homo sapien
aaaaaaaattacctaagtcttctggacctcttc

SEQ ID NO: 294577 - DNA, 33 bp, Homo sapien
caatgagttatttctagtacagagcagaatgta

SEQ ID NO: 294578 - DNA, 33 bp, Homo sapien
caatgagttatttctattacagagcagaatgta

SEQ ID NO: 294579 - DNA, 33 bp, Homo sapien
tgttttgtgtgattgtgaactttatgtgaatag

SEQ ID NO: 294580 - DNA, 33 bp, Homo sapien
tgttttgtgtgattgttaactttatgtgaatag

SEQ ID NO: 294581 - DNA, 33 bp, Homo sapien
ctcgttaaaattgtcccaatgaggtaatctaga

SEQ ID NO: 294582 - DNA, 33 bp, Homo sapien
ctcgttaaaattgtcctaatgaggtaatctaga

SEQ ID NO: 294583 - DNA, 33 bp, Homo sapien
agtttaatcttgcatcacagatggctccaggtc

SEQ ID NO: 294584 - DNA, 33 bp, Homo sapien
agtttaatcttgcatcgcagatggctccaggtc

SEQ ID NO: 294585 - DNA, 33 bp, Homo sapien
gaattatttttgagtgcattttcgctgagaaaa

SEQ ID NO: 294586 - DNA, 33 bp, Homo sapien
gaattatttttgagtgtattttcgctgagaaaa

SEQ ID NO: 294587 - DNA, 33 bp, Homo sapien
ttcaatccataacaaaaaatgccatagaaaagc

SEQ ID NO: 294588 - DNA, 33 bp, Homo sapien
ttcaatccataacaaagaatgccatagaaaagc

SEQ ID NO: 294589 - DNA, 33 bp, Homo sapien
tccctttctcatgtcaacattcagtaaagttaa

SEQ ID NO: 294590 - DNA, 33 bp, Homo sapien
tccctttctcatgtcagcattcagtaaagttaa

SEQ ID NO: 294591 - DNA, 33 bp, Homo sapien
agtcatgtcagaaactcagcctccaagtagtgt

SEQ ID NO: 294592 - DNA, 33 bp, Homo sapien
agtcatgtcagaaactgagcctccaagtagtgt

SEQ ID NO: 294593 - DNA, 33 bp, Homo sapien
tcttcctttgtttttacgataccgaaacaacat

SEQ ID NO: 294594 - DNA, 33 bp, Homo sapien
tcttcctttgtttttatgataccgaaacaacat

SEQ ID NO: 294595 - DNA, 33 bp, Homo sapien
gactttgtagcaagagaatttatttgatttact

SEQ ID NO: 294596 - DNA, 33 bp, Homo sapien
gactttgtagcaagaggatttatttgatttact

SEQ ID NO: 294597 - DNA, 33 bp, Homo sapien
gagatgacattgaggaagtggttggctgcagcc

SEQ ID NO: 294598 - DNA, 33 bp, Homo sapien
gagatgacattgaggaggtggttggctgcagcc

SEQ ID NO: 294599 - DNA, 33 bp, Homo sapien
atctctctacagaaccactaaacagcatagcat

SEQ ID NO: 294600 - DNA, 33 bp, Homo sapien
atctctctacagaaccgctaaacagcatagcat

SEQ ID NO: 294601 - DNA, 33 bp, Homo sapien
gatgccctctatcctacgatgacctttgaatcc

SEQ ID NO: 294602 - DNA, 33 bp, Homo sapien
gatgccctctatcctatgatgacctttgaatcc

SEQ ID NO: 294603 - DNA, 33 bp, Homo sapien
ggcaactgagggcctacgagataatgtttaata

SEQ ID NO: 294604 - DNA, 33 bp, Homo sapien
ggcaactgagggcctatgagataatgtttaata

SEQ ID NO: 294605 - DNA, 33 bp, Homo sapien
tcttttaaacacaggccctgtacatccctggag

SEQ ID NO: 294606 - DNA, 33 bp, Homo sapien
tcttttaaacacaggctctgtacatccctggag

SEQ ID NO: 294607 - DNA, 33 bp, Homo sapien
ttacattttgtgtgtcaaataaataacaatgct

SEQ ID NO: 294608 - DNA, 33 bp, Homo sapien
ttacattttgtgtgtcgaataaataacaatgct

SEQ ID NO: 294609 - DNA, 33 bp, Homo sapien
tttcactaacttttaacagctatacaaaaatga

SEQ ID NO: 294610 - DNA, 33 bp, Homo sapien
tttcactaacttttaagagctatacaaaaatga

SEQ ID NO: 294611 - DNA, 33 bp, Homo sapien
taaataaacagataaactgagtgcacaaagaca

SEQ ID NO: 294612 - DNA, 33 bp, Homo sapien
taaataaacagataaattgagtgcacaaagaca

SEQ ID NO: 294613 - DNA, 33 bp, Homo sapien
atatgggtaattctggaaggggatttcaatgca

SEQ ID NO: 294614 - DNA, 33 bp, Homo sapien
atatgggtaattctgggaggggatttcaatgca

SEQ ID NO: 294615 - DNA, 33 bp, Homo sapien
cgaagtgctggaatgacgaatgataataatttg

SEQ ID NO: 294616 - DNA, 33 bp, Homo sapien
cgaagtgctggaatgatgaatgataataatttg

SEQ ID NO: 294617 - DNA, 33 bp, Homo sapien
gacctgttagtgataacggtcttgccttaaatg

SEQ ID NO: 294618 - DNA, 33 bp, Homo sapien
gacctgttagtgataatggtcttgccttaaatg

SEQ ID NO: 294619 - DNA, 33 bp, Homo sapien
acttttccacatcttccagtatttttctgagcc

SEQ ID NO: 294620 - DNA, 33 bp, Homo sapien
acttttccacatcttcgagtatttttctgagcc

SEQ ID NO: 294621 - DNA, 33 bp, Homo sapien
tttagctgtggggtgcaaggaagggttctggct

SEQ ID NO: 294622 - DNA, 33 bp, Homo sapien
tttagctgtggggtgcgaggaagggttctggct

SEQ ID NO: 294623 - DNA, 33 bp, Homo sapien
tgtgcatatttgtagaaacttgaatcgcttgtt

SEQ ID NO: 294624 - DNA, 33 bp, Homo sapien
tgtgcatatttgtagagacttgaatcgcttgtt

SEQ ID NO: 294625 - DNA, 33 bp, Homo sapien
attcaggacagaagagcacctgcaaaaaagagg

SEQ ID NO: 294626 - DNA, 33 bp, Homo sapien
attcaggacagaagagtacctgcaaaaaagagg

SEQ ID NO: 294627 - DNA, 33 bp, Homo sapien
ttgtttttcaatatcccccatgaaggcgccatt

SEQ ID NO: 294628 - DNA, 33 bp, Homo sapien
ttgtttttcaatatcctccatgaaggcgccatt

SEQ ID NO: 294629 - DNA, 33 bp, Homo sapien
gcctgtgaaaccactaactctcggattcaggac

SEQ ID NO: 294630 - DNA, 33 bp, Homo sapien
gcctgtgaaaccactagctctcggattcaggac

SEQ ID NO: 294631 - DNA, 33 bp, Homo sapien
gttttcatttaaaacccatttggacaatgtaaa

SEQ ID NO: 294632 - DNA, 33 bp, Homo sapien
gttttcatttaaaacctatttggacaatgtaaa

SEQ ID NO: 294633 - DNA, 33 bp, Homo sapien
atgagtatgtggtttcaaagacaaaaagataaa

SEQ ID NO: 294634 - DNA, 33 bp, Homo sapien
atgagtatgtggtttcgaagacaaaaagataaa

SEQ ID NO: 294635 - DNA, 33 bp, Homo sapien
gtgtttatttttcatcaactcatgtattccata

SEQ ID NO: 294636 - DNA, 33 bp, Homo sapien
gtgtttatttttcatcgactcatgtattccata

SEQ ID NO: 294637 - DNA, 33 bp, Homo sapien
taagttattgaaaaaactagggctcaaatcaat

SEQ ID NO: 294638 - DNA, 33 bp, Homo sapien
taagttattgaaaaaagtagggctcaaatcaat

SEQ ID NO: 294639 - DNA, 33 bp, Homo sapien
taaaacagagcctttacataccaggaatctata

SEQ ID NO: 294640 - DNA, 33 bp, Homo sapien
taaaacagagcctttatataccaggaatctata

SEQ ID NO: 294641 - DNA, 33 bp, Homo sapien
gctgttctgtgcgaaaacttcaacttattattt

SEQ ID NO: 294642 - DNA, 33 bp, Homo sapien
gctgttctgtgcgaaatcttcaacttattattt

SEQ ID NO: 294643 - DNA, 33 bp, Homo sapien
gtggtataccaggagaactgccttaattttggc

SEQ ID NO: 294644 - DNA, 33 bp, Homo sapien
gtggtataccaggagacctgccttaattttggc

SEQ ID NO: 294645 - DNA, 33 bp, Homo sapien
atttagtttgtcaccaggttctcttttgggctt

SEQ ID NO: 294646 - DNA, 33 bp, Homo sapien
atttagtttgtcaccatgttctcttttgggctt

SEQ ID NO: 294647 - DNA, 33 bp, Homo sapien
gcctaccgtagaaacaagacgagggtacaggag

SEQ ID NO: 294648 - DNA, 33 bp, Homo sapien
gcctaccgtagaaacatgacgagggtacaggag

SEQ ID NO: 294649 - DNA, 33 bp, Homo sapien
taactcctcagcctggaagattggagttagaag

SEQ ID NO: 294650 - DNA, 33 bp, Homo sapien
taactcctcagcctgggagattggagttagaag

SEQ ID NO: 294651 - DNA, 33 bp, Homo sapien
gttccaggaaaatctaccaggctgtgcccttca

SEQ ID NO: 294652 - DNA, 33 bp, Homo sapien
gttccaggaaaatctatcaggctgtgcccttca

SEQ ID NO: 294653 - DNA, 33 bp, Homo sapien
ccttaaggccttgggacgacttcggcattgtgg

SEQ ID NO: 294654 - DNA, 33 bp, Homo sapien
ccttaaggccttgggatgacttcggcattgtgg

SEQ ID NO: 294655 - DNA, 33 bp, Homo sapien
gctcttcccatctgaaacttagtaacaccatac

SEQ ID NO: 294656 - DNA, 33 bp, Homo sapien
gctcttcccatctgaagcttagtaacaccatac

SEQ ID NO: 294657 - DNA, 33 bp, Homo sapien
gcatactggtttcattaaagccacaggaggaaa

SEQ ID NO: 294658 - DNA, 33 bp, Homo sapien
gcatactggtttcatttaagccacaggaggaaa

SEQ ID NO: 294659 - DNA, 33 bp, Homo sapien
aaagcttcatactgtgaagtccattgaaataat

SEQ ID NO: 294660 - DNA, 33 bp, Homo sapien
aaagcttcatactgtggagtccattgaaataat

SEQ ID NO: 294661 - DNA, 33 bp, Homo sapien
ttattggacgcttctcaatactttaaaacaaga

SEQ ID NO: 294662 - DNA, 33 bp, Homo sapien
ttattggacgcttctcgatactttaaaacaaga

SEQ ID NO: 294663 - DNA, 33 bp, Homo sapien
gtttaggattccctaacaatggaaaaggtgaag

SEQ ID NO: 294664 - DNA, 33 bp, Homo sapien
gtttaggattccctaagaatggaaaaggtgaag

SEQ ID NO: 294665 - DNA, 33 bp, Homo sapien
cagctacctaggaaataaattgggatggtatca

SEQ ID NO: 294666 - DNA, 33 bp, Homo sapien
cagctacctaggaaatgaattgggatggtatca

SEQ ID NO: 294667 - DNA, 33 bp, Homo sapien
cacagtgtgtgcacccaattcactagtttgtgg

SEQ ID NO: 294668 - DNA, 33 bp, Homo sapien
cacagtgtgtgcaccccattcactagtttgtgg

SEQ ID NO: 294669 - DNA, 33 bp, Homo sapien
aggaagcagacaaaaacaatcacccacacacaa

SEQ ID NO: 294670 - DNA, 33 bp, Homo sapien
aggaagcagacaaaaataatcacccacacacaa

SEQ ID NO: 294671 - DNA, 33 bp, Homo sapien
gcatcactttaggcacagagtcacatgcagggt

SEQ ID NO: 294672 - DNA, 33 bp, Homo sapien
gcatcactttaggcaccgagtcacatgcagggt

SEQ ID NO: 294673 - DNA, 33 bp, Homo sapien
caacattggaaatgaagagtaggcaatggagaa

SEQ ID NO: 294674 - DNA, 33 bp, Homo sapien
caacattggaaatgaatagtaggcaatggagaa

SEQ ID NO: 294675 - DNA, 33 bp, Homo sapien
ttgttttcagataacaaggattcacatataatg

SEQ ID NO: 294676 - DNA, 33 bp, Homo sapien
ttgttttcagataacacggattcacatataatg

SEQ ID NO: 294677 - DNA, 33 bp, Homo sapien
aatgagtggtttaaaacgaatgcagagcagaac

SEQ ID NO: 294678 - DNA, 33 bp, Homo sapien
aatgagtggtttaaaatgaatgcagagcagaac

SEQ ID NO: 294679 - DNA, 33 bp, Homo sapien
ctctgcctcttcctcacgtaatatggttttagg

SEQ ID NO: 294680 - DNA, 33 bp, Homo sapien
ctctgcctcttcctcatgtaatatggttttagg

SEQ ID NO: 294681 - DNA, 33 bp, Homo sapien
aaaataatgaaggtgggatgttacctcacaaca

SEQ ID NO: 294682 - DNA, 33 bp, Homo sapien
aaaataatgaaggtggtatgttacctcacaaca

SEQ ID NO: 294683 - DNA, 33 bp, Homo sapien
tcaacagattttcaacaagggttccaagatcat

SEQ ID NO: 294684 - DNA, 33 bp, Homo sapien
tcaacagattttcaacgagggttccaagatcat

SEQ ID NO: 294685 - DNA, 33 bp, Homo sapien
catttcaaattgggaacggaaatcacatctcaa

SEQ ID NO: 294686 - DNA, 33 bp, Homo sapien
catttcaaattgggaatggaaatcacatctcaa

SEQ ID NO: 294687 - DNA, 33 bp, Homo sapien
tagctcttgatgtagaagtagtaaatccaggat

SEQ ID NO: 294688 - DNA, 33 bp, Homo sapien
tagctcttgatgtagacgtagtaaatccaggat

SEQ ID NO: 294689 - DNA, 33 bp, Homo sapien
gaaatagcaaagggaaactttcaggctgaaatg

SEQ ID NO: 294690 - DNA, 33 bp, Homo sapien
gaaatagcaaagggaatctttcaggctgaaatg

SEQ ID NO: 294691 - DNA, 33 bp, Homo sapien
atgtcaatggttagataacaagagcagacgatg

SEQ ID NO: 294692 - DNA, 33 bp, Homo sapien
atgtcaatggttagatgacaagagcagacgatg

SEQ ID NO: 294693 - DNA, 33 bp, Homo sapien
atatgaacaggaaggaatacagcctaacacact

SEQ ID NO: 294694 - DNA, 33 bp, Homo sapien
atatgaacaggaaggagtacagcctaacacact

SEQ ID NO: 294695 - DNA, 33 bp, Homo sapien
gtttctcttgatcttagatttcagtatgcctgt

SEQ ID NO: 294696 - DNA, 33 bp, Homo sapien
gtttctcttgatcttatatttcagtatgcctgt

SEQ ID NO: 294697 - DNA, 33 bp, Homo sapien
tcaagagaaaccatagaaaattgaaactgactc

SEQ ID NO: 294698 - DNA, 33 bp, Homo sapien
tcaagagaaaccatagtaaattgaaactgactc

SEQ ID NO: 294699 - DNA, 33 bp, Homo sapien
agagaaagcaaagaaaggcctaagagatataag

SEQ ID NO: 294700 - DNA, 33 bp, Homo sapien
agagaaagcaaagaaatgcctaagagatataag

SEQ ID NO: 294701 - DNA, 33 bp, Homo sapien
tccctatgttccttgacgtcattgattgatccc

SEQ ID NO: 294702 - DNA, 33 bp, Homo sapien
tccctatgttccttgatgtcattgattgatccc

SEQ ID NO: 294703 - DNA, 33 bp, Homo sapien
gtttgggtaaggatctaaagcatagtgagggtc

SEQ ID NO: 294704 - DNA, 33 bp, Homo sapien
gtttgggtaaggatcttaagcatagtgagggtc

SEQ ID NO: 294705 - DNA, 33 bp, Homo sapien
gggaggcctgcaatcaaagactgagtctgggca

SEQ ID NO: 294706 - DNA, 33 bp, Homo sapien
gggaggcctgcaatcagagactgagtctgggca

SEQ ID NO: 294707 - DNA, 33 bp, Homo sapien
ggagattgtgtgagaggaggtatagattgctat

SEQ ID NO: 294708 - DNA, 33 bp, Homo sapien
ggagattgtgtgagagtaggtatagattgctat

SEQ ID NO: 294709 - DNA, 33 bp, Homo sapien
aaagcaaaatgatagaaattacttcactaggtt

SEQ ID NO: 294710 - DNA, 33 bp, Homo sapien
aaagcaaaatgatagagattacttcactaggtt

SEQ ID NO: 294711 - DNA, 33 bp, Homo sapien
tgttctacaatggatgaatacacaagacacttt

SEQ ID NO: 294712 - DNA, 33 bp, Homo sapien
tgttctacaatggatgcatacacaagacacttt

SEQ ID NO: 294713 - DNA, 33 bp, Homo sapien
tagcagagagaaaaagccacatattccattaat

SEQ ID NO: 294714 - DNA, 33 bp, Homo sapien
tagcagagagaaaaagtcacatattccattaat

SEQ ID NO: 294715 - DNA, 33 bp, Homo sapien
tcacatccataactggaaagtccctagttcaga

SEQ ID NO: 294716 - DNA, 33 bp, Homo sapien
tcacatccataactggcaagtccctagttcaga

SEQ ID NO: 294717 - DNA, 33 bp, Homo sapien
gggacttttcaaaattaaacattcaagatggta

SEQ ID NO: 294718 - DNA, 33 bp, Homo sapien
gggacttttcaaaattgaacattcaagatggta

SEQ ID NO: 294719 - DNA, 33 bp, Homo sapien
caagttcattgtcagaagtccattttttgtcac

SEQ ID NO: 294720 - DNA, 33 bp, Homo sapien
caagttcattgtcagacgtccattttttgtcac

SEQ ID NO: 294721 - DNA, 33 bp, Homo sapien
ctcagcagctgagatgaaattctgagtgccctg

SEQ ID NO: 294722 - DNA, 33 bp, Homo sapien
ctcagcagctgagatggaattctgagtgccctg

SEQ ID NO: 294723 - DNA, 33 bp, Homo sapien
agagccaagatgtatagagagagaaagcatctt

SEQ ID NO: 294724 - DNA, 33 bp, Homo sapien
agagccaagatgtatatagagagaaagcatctt

SEQ ID NO: 294725 - DNA, 33 bp, Homo sapien
atgtttctagcataaaaaaaaggcgacatttat

SEQ ID NO: 294726 - DNA, 33 bp, Homo sapien
atgtttctagcataaagaaaaggcgacatttat

SEQ ID NO: 294727 - DNA, 33 bp, Homo sapien
gtgttgtcaatgtgaccataaggttagtggtag

SEQ ID NO: 294728 - DNA, 33 bp, Homo sapien
gtgttgtcaatgtgactataaggttagtggtag

SEQ ID NO: 294729 - DNA, 33 bp, Homo sapien
tacctgttaatcaatcactttttatcttctctc

SEQ ID NO: 294730 - DNA, 33 bp, Homo sapien
tacctgttaatcaatcgctttttatcttctctc

SEQ ID NO: 294731 - DNA, 33 bp, Homo sapien
agaacacgctgccacacgaaataacaaaactaa

SEQ ID NO: 294732 - DNA, 33 bp, Homo sapien
agaacacgctgccacatgaaataacaaaactaa

SEQ ID NO: 294733 - DNA, 33 bp, Homo sapien
tttctttaccagttccaattagtggcttaaatt

SEQ ID NO: 294734 - DNA, 33 bp, Homo sapien
tttctttaccagttccgattagtggcttaaatt

SEQ ID NO: 294735 - DNA, 33 bp, Homo sapien
ccaaagagctgttaaaacttcaaatgaatcagg

SEQ ID NO: 294736 - DNA, 33 bp, Homo sapien
ccaaagagctgttaaaccttcaaatgaatcagg

SEQ ID NO: 294737 - DNA, 33 bp, Homo sapien
cattatgttttcctcaaatatgctcatcaaatg

SEQ ID NO: 294738 - DNA, 33 bp, Homo sapien
cattatgttttcctcatatatgctcatcaaatg

SEQ ID NO: 294739 - DNA, 33 bp, Homo sapien
cccaagctgtttggaacggctgagtgttcagac

SEQ ID NO: 294740 - DNA, 33 bp, Homo sapien
cccaagctgtttggaatggctgagtgttcagac

SEQ ID NO: 294741 - DNA, 33 bp, Homo sapien
ttatgaaagaagaaatcaaatggccatgaacat

SEQ ID NO: 294742 - DNA, 33 bp, Homo sapien
ttatgaaagaagaaatgaaatggccatgaacat

SEQ ID NO: 294743 - DNA, 33 bp, Homo sapien
actttgagctttaagaaatgaactggaaaaggc

SEQ ID NO: 294744 - DNA, 33 bp, Homo sapien
actttgagctttaagatatgaactggaaaaggc

SEQ ID NO: 294745 - DNA, 33 bp, Homo sapien
acatggtagaaaaggcaagggagccgtttaggg

SEQ ID NO: 294746 - DNA, 33 bp, Homo sapien
acatggtagaaaaggcgagggagccgtttaggg

SEQ ID NO: 294747 - DNA, 33 bp, Homo sapien
ggcctttggaagatggacaagtcatgagggtga

SEQ ID NO: 294748 - DNA, 33 bp, Homo sapien
ggcctttggaagatggtcaagtcatgagggtga

SEQ ID NO: 294749 - DNA, 33 bp, Homo sapien
ttttagaggaatcacaatgctgacatcttgatt

SEQ ID NO: 294750 - DNA, 33 bp, Homo sapien
ttttagaggaatcacagtgctgacatcttgatt

SEQ ID NO: 294751 - DNA, 33 bp, Homo sapien
agagagaaatttgaaaatggacacacacgcaga

SEQ ID NO: 294752 - DNA, 33 bp, Homo sapien
agagagaaatttgaaagtggacacacacgcaga

SEQ ID NO: 294753 - DNA, 33 bp, Homo sapien
agtaatgcaaagaacccctatgtacctgttatg

SEQ ID NO: 294754 - DNA, 33 bp, Homo sapien
agtaatgcaaagaaccgctatgtacctgttatg

SEQ ID NO: 294755 - DNA, 33 bp, Homo sapien
ttgattccttgagtaaatggatcaatattttct

SEQ ID NO: 294756 - DNA, 33 bp, Homo sapien
ttgattccttgagtaagtggatcaatattttct

SEQ ID NO: 294757 - DNA, 33 bp, Homo sapien
tttcctgatattaaaactcaggagggcattgta

SEQ ID NO: 294758 - DNA, 33 bp, Homo sapien
tttcctgatattaaaattcaggagggcattgta

SEQ ID NO: 294759 - DNA, 33 bp, Homo sapien
ttaagttttgagcagaaatttgaactggatttg

SEQ ID NO: 294760 - DNA, 33 bp, Homo sapien
ttaagttttgagcagagatttgaactggatttg

SEQ ID NO: 294761 - DNA, 33 bp, Homo sapien
gatttgtgtccttaaacgctcagctatgctgcc

SEQ ID NO: 294762 - DNA, 33 bp, Homo sapien
gatttgtgtccttaaatgctcagctatgctgcc

SEQ ID NO: 294763 - DNA, 33 bp, Homo sapien
acaaaatttaatgtaactgtgtaggttgctgaa

SEQ ID NO: 294764 - DNA, 33 bp, Homo sapien
acaaaatttaatgtaattgtgtaggttgctgaa

SEQ ID NO: 294765 - DNA, 33 bp, Homo sapien
ccagccccaggatcaacaaaacagagcaaaaca

SEQ ID NO: 294766 - DNA, 33 bp, Homo sapien
ccagccccaggatcaagaaaacagagcaaaaca

SEQ ID NO: 294767 - DNA, 33 bp, Homo sapien
aatgaaccaatacagcacctgtacagtgtcagc

SEQ ID NO: 294768 - DNA, 33 bp, Homo sapien
aatgaaccaatacagcgcctgtacagtgtcagc

SEQ ID NO: 294769 - DNA, 33 bp, Homo sapien
aggcatgggccagagcaactgcagtgacaaatg

SEQ ID NO: 294770 - DNA, 33 bp, Homo sapien
aggcatgggccagagcgactgcagtgacaaatg

SEQ ID NO: 294771 - DNA, 33 bp, Homo sapien
ttcccgtgtctgtccaaattgctaaatgttggt

SEQ ID NO: 294772 - DNA, 33 bp, Homo sapien
ttcccgtgtctgtccagattgctaaatgttggt

SEQ ID NO: 294773 - DNA, 33 bp, Homo sapien
cagaccttcactcctgcatacgcagttttatta

SEQ ID NO: 294774 - DNA, 33 bp, Homo sapien
cagaccttcactcctgtatacgcagttttatta

SEQ ID NO: 294775 - DNA, 33 bp, Homo sapien
ttttattaagtatctcaacttgagtgtcagata

SEQ ID NO: 294776 - DNA, 33 bp, Homo sapien
ttttattaagtatctcgacttgagtgtcagata

SEQ ID NO: 294777 - DNA, 33 bp, Homo sapien
aaaataacacattcaaatggcaaaagcattcta

SEQ ID NO: 294778 - DNA, 33 bp, Homo sapien
aaaataacacattcaagtggcaaaagcattcta

SEQ ID NO: 294779 - DNA, 33 bp, Homo sapien
ggtgatccttttaaaacggagcaggctcatgcc

SEQ ID NO: 294780 - DNA, 33 bp, Homo sapien
ggtgatccttttaaaatggagcaggctcatgcc

SEQ ID NO: 294781 - DNA, 33 bp, Homo sapien
tgagtgagcataaaggaccatttggaagagcgc

SEQ ID NO: 294782 - DNA, 33 bp, Homo sapien
tgagtgagcataaagggccatttggaagagcgc

SEQ ID NO: 294783 - DNA, 33 bp, Homo sapien
tattaaaattttgggaaacctgttgcaaatatt

SEQ ID NO: 294784 - DNA, 33 bp, Homo sapien
tattaaaattttgggagacctgttgcaaatatt

SEQ ID NO: 294785 - DNA, 33 bp, Homo sapien
ctaagggtctgtgcaaatacattctttcataca

SEQ ID NO: 294786 - DNA, 33 bp, Homo sapien
ctaagggtctgtgcaattacattctttcataca

SEQ ID NO: 294787 - DNA, 33 bp, Homo sapien
tgcaatagacactttacaatagaacagttgcag

SEQ ID NO: 294788 - DNA, 33 bp, Homo sapien
tgcaatagacactttataatagaacagttgcag

SEQ ID NO: 294789 - DNA, 33 bp, Homo sapien
tggaagcagtaatgacaaaggcagaaaaaatta

SEQ ID NO: 294790 - DNA, 33 bp, Homo sapien
tggaagcagtaatgaccaaggcagaaaaaatta

SEQ ID NO: 294791 - DNA, 33 bp, Homo sapien
cggaatttgcatatgacggttcctctcctgtcc

SEQ ID NO: 294792 - DNA, 33 bp, Homo sapien
cggaatttgcatatgatggttcctctcctgtcc

SEQ ID NO: 294793 - DNA, 33 bp, Homo sapien
acactgtgctgtccaactaacagccggcatgag

SEQ ID NO: 294794 - DNA, 33 bp, Homo sapien
acactgtgctgtccaagtaacagccggcatgag

SEQ ID NO: 294795 - DNA, 33 bp, Homo sapien
cctatgtacgatgatacaggcgatgtgaatagc

SEQ ID NO: 294796 - DNA, 33 bp, Homo sapien
cctatgtacgatgatataggcgatgtgaatagc

SEQ ID NO: 294797 - DNA, 33 bp, Homo sapien
ttaaagtacgttacaccgaatgaatcactatcc

SEQ ID NO: 294798 - DNA, 33 bp, Homo sapien
ttaaagtacgttacactgaatgaatcactatcc

SEQ ID NO: 294799 - DNA, 33 bp, Homo sapien
atatcaacagaatagaactgagaatccaaaaag

SEQ ID NO: 294800 - DNA, 33 bp, Homo sapien
atatcaacagaatagagctgagaatccaaaaag

SEQ ID NO: 294801 - DNA, 33 bp, Homo sapien
gccaggcgtgtgctaaatctgttattgtttcag

SEQ ID NO: 294802 - DNA, 33 bp, Homo sapien
gccaggcgtgtgctaactctgttattgtttcag

SEQ ID NO: 294803 - DNA, 33 bp, Homo sapien
agctccgtggagactccgaattggtgagcacat

SEQ ID NO: 294804 - DNA, 33 bp, Homo sapien
agctccgtggagactctgaattggtgagcacat

SEQ ID NO: 294805 - DNA, 33 bp, Homo sapien
acataactcacccaaactggtagaaccagacat

SEQ ID NO: 294806 - DNA, 33 bp, Homo sapien
acataactcacccaaattggtagaaccagacat

SEQ ID NO: 294807 - DNA, 33 bp, Homo sapien
atctgaataaaaccaccgtcatagtccaactat

SEQ ID NO: 294808 - DNA, 33 bp, Homo sapien
atctgaataaaaccactgtcatagtccaactat

SEQ ID NO: 294809 - DNA, 33 bp, Homo sapien
atccctgaaaaccccacgatgagcggttccacc

SEQ ID NO: 294810 - DNA, 33 bp, Homo sapien
atccctgaaaaccccatgatgagcggttccacc

SEQ ID NO: 294811 - DNA, 33 bp, Homo sapien
agggcaaaactacacacgactgtccaggcatgg

SEQ ID NO: 294812 - DNA, 33 bp, Homo sapien
agggcaaaactacacaggactgtccaggcatgg

SEQ ID NO: 294813 - DNA, 33 bp, Homo sapien
tggacgctgttttgagcaccatgggctttacca

SEQ ID NO: 294814 - DNA, 33 bp, Homo sapien
tggacgctgttttgagtaccatgggctttacca

SEQ ID NO: 294815 - DNA, 33 bp, Homo sapien
ctacttgtcagctgtcacaatgcttttgaaatc

SEQ ID NO: 294816 - DNA, 33 bp, Homo sapien
ctacttgtcagctgtctcaatgcttttgaaatc

SEQ ID NO: 294817 - DNA, 33 bp, Homo sapien
ctcctttgatagcctcgcttaagattgattatc

SEQ ID NO: 294818 - DNA, 33 bp, Homo sapien
ctcctttgatagcctctcttaagattgattatc

SEQ ID NO: 294819 - DNA, 33 bp, Homo sapien
cagattggataaagaaagaatggtacatgtgca

SEQ ID NO: 294820 - DNA, 33 bp, Homo sapien
cagattggataaagaacgaatggtacatgtgca

SEQ ID NO: 294821 - DNA, 33 bp, Homo sapien
atctgctttctagctcaatttttcttctctgga

SEQ ID NO: 294822 - DNA, 33 bp, Homo sapien
atctgctttctagctccatttttcttctctgga

SEQ ID NO: 294823 - DNA, 33 bp, Homo sapien
attttaagaacaacacacaaaattgacattaga

SEQ ID NO: 294824 - DNA, 33 bp, Homo sapien
attttaagaacaacacgcaaaattgacattaga

SEQ ID NO: 294825 - DNA, 33 bp, Homo sapien
accttagtacaaccacgcagaaaattgtcgata

SEQ ID NO: 294826 - DNA, 33 bp, Homo sapien
accttagtacaaccactcagaaaattgtcgata

SEQ ID NO: 294827 - DNA, 33 bp, Homo sapien
gtacaaacacaggtaaacaatccttgctgttag

SEQ ID NO: 294828 - DNA, 33 bp, Homo sapien
gtacaaacacaggtaaccaatccttgctgttag

SEQ ID NO: 294829 - DNA, 33 bp, Homo sapien
tataataataaaaaaaaggttgatgttaaaagt

SEQ ID NO: 294830 - DNA, 33 bp, Homo sapien
tataataataaaaaaacggttgatgttaaaagt

SEQ ID NO: 294831 - DNA, 33 bp, Homo sapien
aagagtccgttccttaacacacgtgcagcaagg

SEQ ID NO: 294832 - DNA, 33 bp, Homo sapien
aagagtccgttccttagcacacgtgcagcaagg

SEQ ID NO: 294833 - DNA, 33 bp, Homo sapien
cagaacgagcacttacaaagggtaatttaagat

SEQ ID NO: 294834 - DNA, 33 bp, Homo sapien
cagaacgagcacttacgaagggtaatttaagat

SEQ ID NO: 294835 - DNA, 33 bp, Homo sapien
agaactgaaagcaagcggaaaaggaaacctaag

SEQ ID NO: 294836 - DNA, 33 bp, Homo sapien
agaactgaaagcaagctgaaaaggaaacctaag

SEQ ID NO: 294837 - DNA, 33 bp, Homo sapien
agtttttgtagctaggcactttatgttcatttc

SEQ ID NO: 294838 - DNA, 33 bp, Homo sapien
agtttttgtagctaggtactttatgttcatttc

SEQ ID NO: 294839 - DNA, 33 bp, Homo sapien
catgggccttacaggaaagacgttacctcttct

SEQ ID NO: 294840 - DNA, 33 bp, Homo sapien
catgggccttacaggagagacgttacctcttct

SEQ ID NO: 294841 - DNA, 33 bp, Homo sapien
acagtatttatttgaaaccaagctcaataattt

SEQ ID NO: 294842 - DNA, 33 bp, Homo sapien
acagtatttatttgaacccaagctcaataattt

SEQ ID NO: 294843 - DNA, 33 bp, Homo sapien
atttcctggacatgccacagtgtactgcaaaca

SEQ ID NO: 294844 - DNA, 33 bp, Homo sapien
atttcctggacatgccgcagtgtactgcaaaca

SEQ ID NO: 294845 - DNA, 33 bp, Homo sapien
ttctgttgtgtctgaaatgaaacggtaaaaatg

SEQ ID NO: 294846 - DNA, 33 bp, Homo sapien
ttctgttgtgtctgaagtgaaacggtaaaaatg

SEQ ID NO: 294847 - DNA, 33 bp, Homo sapien
aaattcaaattgccataaaactctaatattctt

SEQ ID NO: 294848 - DNA, 33 bp, Homo sapien
aaattcaaattgccatgaaactctaatattctt

SEQ ID NO: 294849 - DNA, 33 bp, Homo sapien
attaacttacactgttcaaaaagtgccccacta

SEQ ID NO: 294850 - DNA, 33 bp, Homo sapien
attaacttacactgttgaaaaagtgccccacta

SEQ ID NO: 294851 - DNA, 33 bp, Homo sapien
tccttgctaacttacacaggtagtctaacactc

SEQ ID NO: 294852 - DNA, 33 bp, Homo sapien
tccttgctaacttacataggtagtctaacactc

SEQ ID NO: 294853 - DNA, 33 bp, Homo sapien
taacactaccaatcaaaaagttccaatgaacag

SEQ ID NO: 294854 - DNA, 33 bp, Homo sapien
taacactaccaatcaagaagttccaatgaacag

SEQ ID NO: 294855 - DNA, 33 bp, Homo sapien
tgcttgaactgttaaaagcagcaggcttattag

SEQ ID NO: 294856 - DNA, 33 bp, Homo sapien
tgcttgaactgttaaatgcagcaggcttattag

SEQ ID NO: 294857 - DNA, 33 bp, Homo sapien
ggagatgtagatcctgaattaagtaaactctgt

SEQ ID NO: 294858 - DNA, 33 bp, Homo sapien
ggagatgtagatcctggattaagtaaactctgt

SEQ ID NO: 294859 - DNA, 33 bp, Homo sapien
gtatgtctggtttgaacctgataggctccacct

SEQ ID NO: 294860 - DNA, 33 bp, Homo sapien
gtatgtctggtttgaatctgataggctccacct

SEQ ID NO: 294861 - DNA, 33 bp, Homo sapien
tgaaaatgaatccaataaagacactcccagaga

SEQ ID NO: 294862 - DNA, 33 bp, Homo sapien
tgaaaatgaatccaatgaagacactcccagaga

SEQ ID NO: 294863 - DNA, 33 bp, Homo sapien
ctcagaagtggactaaacaagttgttctttcct

SEQ ID NO: 294864 - DNA, 33 bp, Homo sapien
ctcagaagtggactaagcaagttgttctttcct

SEQ ID NO: 294865 - DNA, 33 bp, Homo sapien
tttaggtctctgatcaccttgattttttccata

SEQ ID NO: 294866 - DNA, 33 bp, Homo sapien
tttaggtctctgatcatcttgattttttccata

SEQ ID NO: 294867 - DNA, 33 bp, Homo sapien
tgaataagacataagaaatggtctaagacttga

SEQ ID NO: 294868 - DNA, 33 bp, Homo sapien
tgaataagacataagacatggtctaagacttga

SEQ ID NO: 294869 - DNA, 33 bp, Homo sapien
tcaaagatcttgccaaaaatctctctctttgaa

SEQ ID NO: 294870 - DNA, 33 bp, Homo sapien
tcaaagatcttgccaacaatctctctctttgaa

SEQ ID NO: 294871 - DNA, 33 bp, Homo sapien
tctggatctctaggaaatctcacattggcttaa

SEQ ID NO: 294872 - DNA, 33 bp, Homo sapien
tctggatctctaggaagtctcacattggcttaa

SEQ ID NO: 294873 - DNA, 33 bp, Homo sapien
ttaattatcttccagcccaaacgctcctttttt

SEQ ID NO: 294874 - DNA, 33 bp, Homo sapien
ttaattatcttccagctcaaacgctcctttttt

SEQ ID NO: 294875 - DNA, 33 bp, Homo sapien
tatgcttttattagtacagttccttttctccct

SEQ ID NO: 294876 - DNA, 33 bp, Homo sapien
tatgcttttattagtagagttccttttctccct

SEQ ID NO: 294877 - DNA, 33 bp, Homo sapien
aattttattcttctaaatgactcctagttgctt

SEQ ID NO: 294878 - DNA, 33 bp, Homo sapien
aattttattcttctaagtgactcctagttgctt

SEQ ID NO: 294879 - DNA, 33 bp, Homo sapien
ctcatcttatgataagcacaaatctcatctttt

SEQ ID NO: 294880 - DNA, 33 bp, Homo sapien
ctcatcttatgataagtacaaatctcatctttt

SEQ ID NO: 294881 - DNA, 33 bp, Homo sapien
agcttccatcaatcgcaaatctagagggtgaca

SEQ ID NO: 294882 - DNA, 33 bp, Homo sapien
agcttccatcaatcgcgaatctagagggtgaca

SEQ ID NO: 294883 - DNA, 33 bp, Homo sapien
cccaaatcagtataaaagagatagacattcaga

SEQ ID NO: 294884 - DNA, 33 bp, Homo sapien
cccaaatcagtataaaggagatagacattcaga

SEQ ID NO: 294885 - DNA, 33 bp, Homo sapien
tgacagactgtaccagcaaaatcggggtactcc

SEQ ID NO: 294886 - DNA, 33 bp, Homo sapien
tgacagactgtaccaggaaaatcggggtactcc

SEQ ID NO: 294887 - DNA, 33 bp, Homo sapien
gttcttggcctgatctaaatttccttgatctca

SEQ ID NO: 294888 - DNA, 33 bp, Homo sapien
gttcttggcctgatctgaatttccttgatctca

SEQ ID NO: 294889 - DNA, 33 bp, Homo sapien
gaagccgtctgagctgaaaaatgagtattgtgc

SEQ ID NO: 294890 - DNA, 33 bp, Homo sapien
gaagccgtctgagctgcaaaatgagtattgtgc

SEQ ID NO: 294891 - DNA, 33 bp, Homo sapien
tgcacagcactgtttaagactcctaaagaaaga

SEQ ID NO: 294892 - DNA, 33 bp, Homo sapien
tgcacagcactgtttaggactcctaaagaaaga

SEQ ID NO: 294893 - DNA, 33 bp, Homo sapien
atttttaaaaggttagcccctgctgttttcctt

SEQ ID NO: 294894 - DNA, 33 bp, Homo sapien
atttttaaaaggttagtccctgctgttttcctt

SEQ ID NO: 294895 - DNA, 33 bp, Homo sapien
tatctccaaagccaccaagagacacacagagag

SEQ ID NO: 294896 - DNA, 33 bp, Homo sapien
tatctccaaagccaccgagagacacacagagag

SEQ ID NO: 294897 - DNA, 33 bp, Homo sapien
tttactgcttcctacagagccttcataaattgg

SEQ ID NO: 294898 - DNA, 33 bp, Homo sapien
tttactgcttcctacatagccttcataaattgg

SEQ ID NO: 294899 - DNA, 33 bp, Homo sapien
tatgaaaaaatgtataagctatttgcatagtct

SEQ ID NO: 294900 - DNA, 33 bp, Homo sapien
tatgaaaaaatgtataggctatttgcatagtct

SEQ ID NO: 294901 - DNA, 33 bp, Homo sapien
gatcaaggaggaattacgtaagaatagattctc

SEQ ID NO: 294902 - DNA, 33 bp, Homo sapien
gatcaaggaggaattatgtaagaatagattctc

SEQ ID NO: 294903 - DNA, 33 bp, Homo sapien
ttagacctttgtgagacggatggattgcaaaaa

SEQ ID NO: 294904 - DNA, 33 bp, Homo sapien
ttagacctttgtgagatggatggattgcaaaaa

SEQ ID NO: 294905 - DNA, 33 bp, Homo sapien
atgagatttgaggaaacaaactgtctccgtaac

SEQ ID NO: 294906 - DNA, 33 bp, Homo sapien
atgagatttgaggaaagaaactgtctccgtaac

SEQ ID NO: 294907 - DNA, 33 bp, Homo sapien
attccctcactatacgcactgctaattttcagg

SEQ ID NO: 294908 - DNA, 33 bp, Homo sapien
attccctcactatacggactgctaattttcagg

SEQ ID NO: 294909 - DNA, 33 bp, Homo sapien
tttattggcagcataaccatagtacaataaaga

SEQ ID NO: 294910 - DNA, 33 bp, Homo sapien
tttattggcagcataatcatagtacaataaaga

SEQ ID NO: 294911 - DNA, 33 bp, Homo sapien
agctgttttgagatgaaccttcaatcaaggtct

SEQ ID NO: 294912 - DNA, 33 bp, Homo sapien
agctgttttgagatgagccttcaatcaaggtct

SEQ ID NO: 294913 - DNA, 33 bp, Homo sapien
aattataggagtagaagggctaaggcatagcgt

SEQ ID NO: 294914 - DNA, 33 bp, Homo sapien
aattataggagtagaatggctaaggcatagcgt

SEQ ID NO: 294915 - DNA, 33 bp, Homo sapien
gcatggaagaatgtagaaaataagaaatggtat

SEQ ID NO: 294916 - DNA, 33 bp, Homo sapien
gcatggaagaatgtaggaaataagaaatggtat

SEQ ID NO: 294917 - DNA, 33 bp, Homo sapien
ctcctggtgctgtacactctcacgtcatttgtg

SEQ ID NO: 294918 - DNA, 33 bp, Homo sapien
ctcctggtgctgtacattctcacgtcatttgtg

SEQ ID NO: 294919 - DNA, 33 bp, Homo sapien
tgtcttcttctcgcgcaatgcggaagggcagcc

SEQ ID NO: 294920 - DNA, 33 bp, Homo sapien
tgtcttcttctcgcgcgatgcggaagggcagcc

SEQ ID NO: 294921 - DNA, 33 bp, Homo sapien
tttctggtgaatggatcaacgtggctacgacag

SEQ ID NO: 294922 - DNA, 33 bp, Homo sapien
tttctggtgaatggatgaacgtggctacgacag

SEQ ID NO: 294923 - DNA, 33 bp, Homo sapien
accactcagacattatcaaacctaacccatgtt

SEQ ID NO: 294924 - DNA, 33 bp, Homo sapien
accactcagacattatgaaacctaacccatgtt

SEQ ID NO: 294925 - DNA, 33 bp, Homo sapien
tttacttgctttcctcagagcaagtagtgggag

SEQ ID NO: 294926 - DNA, 33 bp, Homo sapien
tttacttgctttcctcggagcaagtagtgggag

SEQ ID NO: 294927 - DNA, 33 bp, Homo sapien
tcataagcttctgtcacgttgtaaagggagcct

SEQ ID NO: 294928 - DNA, 33 bp, Homo sapien
tcataagcttctgtcatgttgtaaagggagcct

SEQ ID NO: 294929 - DNA, 33 bp, Homo sapien
gtcccactggttccgaaccatttagctctaaac

SEQ ID NO: 294930 - DNA, 33 bp, Homo sapien
gtcccactggttccgacccatttagctctaaac

SEQ ID NO: 294931 - DNA, 33 bp, Homo sapien
agattctaaatgaaacagctgggtagaactcgc

SEQ ID NO: 294932 - DNA, 33 bp, Homo sapien
agattctaaatgaaacggctgggtagaactcgc

SEQ ID NO: 294933 - DNA, 33 bp, Homo sapien
ccatctgaattgattcacagctttatttgtaaa

SEQ ID NO: 294934 - DNA, 33 bp, Homo sapien
ccatctgaattgattcgcagctttatttgtaaa

SEQ ID NO: 294935 - DNA, 33 bp, Homo sapien
tataacaaagttgcgacatatgacagctcagta

SEQ ID NO: 294936 - DNA, 33 bp, Homo sapien
tataacaaagttgcgatatatgacagctcagta

SEQ ID NO: 294937 - DNA, 33 bp, Homo sapien
agggctattctacagaagaaagatacttagctt

SEQ ID NO: 294938 - DNA, 33 bp, Homo sapien
agggctattctacagatgaaagatacttagctt

SEQ ID NO: 294939 - DNA, 33 bp, Homo sapien
atcatccctttgtgaacgcttgcagaaatatat

SEQ ID NO: 294940 - DNA, 33 bp, Homo sapien
atcatccctttgtgaatgcttgcagaaatatat

SEQ ID NO: 294941 - DNA, 33 bp, Homo sapien
ctctcataagttaacaagcttaggtagaaaaca

SEQ ID NO: 294942 - DNA, 33 bp, Homo sapien
ctctcataagttaacaggcttaggtagaaaaca

SEQ ID NO: 294943 - DNA, 33 bp, Homo sapien
actagcacaagacaaccgaattttttgtatcaa

SEQ ID NO: 294944 - DNA, 33 bp, Homo sapien
actagcacaagacaactgaattttttgtatcaa

SEQ ID NO: 294945 - DNA, 33 bp, Homo sapien
tggtggcaataaacgaatcctctaaggcacttg

SEQ ID NO: 294946 - DNA, 33 bp, Homo sapien
tggtggcaataaacgactcctctaaggcacttg

SEQ ID NO: 294947 - DNA, 33 bp, Homo sapien
ttgagaggtacgaacacgaaagccactgtccaa

SEQ ID NO: 294948 - DNA, 33 bp, Homo sapien
ttgagaggtacgaacatgaaagccactgtccaa

SEQ ID NO: 294949 - DNA, 33 bp, Homo sapien
tactgaacttcaatacccgacttccgcattctg

SEQ ID NO: 294950 - DNA, 33 bp, Homo sapien
tactgaacttcaatactcgacttccgcattctg

SEQ ID NO: 294951 - DNA, 33 bp, Homo sapien
acacttttagtgtccaagttggaatactgaact

SEQ ID NO: 294952 - DNA, 33 bp, Homo sapien
acacttttagtgtccatgttggaatactgaact

SEQ ID NO: 294953 - DNA, 33 bp, Homo sapien
ctaaattacaccataaccaatccaacgtttgta

SEQ ID NO: 294954 - DNA, 33 bp, Homo sapien
ctaaattacaccataatcaatccaacgtttgta

SEQ ID NO: 294955 - DNA, 33 bp, Homo sapien
gttaataagcatcagaagtgagcttcaaaccca

SEQ ID NO: 294956 - DNA, 33 bp, Homo sapien
gttaataagcatcagaggtgagcttcaaaccca

SEQ ID NO: 294957 - DNA, 33 bp, Homo sapien
tgaaatttagcagaaaattaatactcaagaaat

SEQ ID NO: 294958 - DNA, 33 bp, Homo sapien
tgaaatttagcagaaagttaatactcaagaaat

SEQ ID NO: 294959 - DNA, 33 bp, Homo sapien
aaacccagtgaagagaaaggtgcacattagtca

SEQ ID NO: 294960 - DNA, 33 bp, Homo sapien
aaacccagtgaagagagaggtgcacattagtca

SEQ ID NO: 294961 - DNA, 33 bp, Homo sapien
tagtacaatcaggtacacttttccaaaacagca

SEQ ID NO: 294962 - DNA, 33 bp, Homo sapien
tagtacaatcaggtacccttttccaaaacagca

SEQ ID NO: 294963 - DNA, 33 bp, Homo sapien
cttgtttccaaaataaagaataatgtccaaaac

SEQ ID NO: 294964 - DNA, 33 bp, Homo sapien
cttgtttccaaaataaggaataatgtccaaaac

SEQ ID NO: 294965 - DNA, 33 bp, Homo sapien
tgggcatgaataaaaccggctgtgagatacgac

SEQ ID NO: 294966 - DNA, 33 bp, Homo sapien
tgggcatgaataaaactggctgtgagatacgac

SEQ ID NO: 294967 - DNA, 33 bp, Homo sapien
tgtcactagatgttcaagtggggttgaaattac

SEQ ID NO: 294968 - DNA, 33 bp, Homo sapien
tgtcactagatgttcaggtggggttgaaattac

SEQ ID NO: 294969 - DNA, 33 bp, Homo sapien
tctgacttccacccccacgaagaagcaatggaa

SEQ ID NO: 294970 - DNA, 33 bp, Homo sapien
tctgacttccacccccgcgaagaagcaatggaa

SEQ ID NO: 294971 - DNA, 33 bp, Homo sapien
ccatgctatggacataataggcacttaatgatc

SEQ ID NO: 294972 - DNA, 33 bp, Homo sapien
ccatgctatggacatagtaggcacttaatgatc

SEQ ID NO: 294973 - DNA, 33 bp, Homo sapien
tcctatgctgaaacgcagatccccagtatgatg

SEQ ID NO: 294974 - DNA, 33 bp, Homo sapien
tcctatgctgaaacgctgatccccagtatgatg

SEQ ID NO: 294975 - DNA, 33 bp, Homo sapien
aaattaaaatggcatgaacattggaatcataaa

SEQ ID NO: 294976 - DNA, 33 bp, Homo sapien
aaattaaaatggcatggacattggaatcataaa

SEQ ID NO: 294977 - DNA, 33 bp, Homo sapien
gtacgggataaaaacacgtcagtaatgagacag

SEQ ID NO: 294978 - DNA, 33 bp, Homo sapien
gtacgggataaaaacatgtcagtaatgagacag

SEQ ID NO: 294979 - DNA, 33 bp, Homo sapien
agaaggaggacaaagactcctcctgatgtccac

SEQ ID NO: 294980 - DNA, 33 bp, Homo sapien
agaaggaggacaaagattcctcctgatgtccac

SEQ ID NO: 294981 - DNA, 33 bp, Homo sapien
tcttcagtctctcccaaacacagtactctgtgc

SEQ ID NO: 294982 - DNA, 33 bp, Homo sapien
tcttcagtctctcccacacacagtactctgtgc

SEQ ID NO: 294983 - DNA, 33 bp, Homo sapien
gttatccttggctgaacgtctctatctacagct

SEQ ID NO: 294984 - DNA, 33 bp, Homo sapien
gttatccttggctgaatgtctctatctacagct

SEQ ID NO: 294985 - DNA, 33 bp, Homo sapien
tgaaagggggaccagacaagtaatctatcttct

SEQ ID NO: 294986 - DNA, 33 bp, Homo sapien
tgaaagggggaccagagaagtaatctatcttct

SEQ ID NO: 294987 - DNA, 33 bp, Homo sapien
gaaagcatccaaaaaggaaacgtgggtctgata

SEQ ID NO: 294988 - DNA, 33 bp, Homo sapien
gaaagcatccaaaaagtaaacgtgggtctgata

SEQ ID NO: 294989 - DNA, 33 bp, Homo sapien
ttctaagttctcaaaaatcctctgcatacacct

SEQ ID NO: 294990 - DNA, 33 bp, Homo sapien
ttctaagttctcaaaactcctctgcatacacct

SEQ ID NO: 294991 - DNA, 33 bp, Homo sapien
agggatctttccatcacgctcagtctggagact

SEQ ID NO: 294992 - DNA, 33 bp, Homo sapien
agggatctttccatcaggctcagtctggagact

SEQ ID NO: 294993 - DNA, 33 bp, Homo sapien
tcccacaagcacaggggataatttaagtatctc

SEQ ID NO: 294994 - DNA, 33 bp, Homo sapien
tcccacaagcacagggtataatttaagtatctc

SEQ ID NO: 294995 - DNA, 33 bp, Homo sapien
ttcttctttggtgtcccgcatacacagttttaa

SEQ ID NO: 294996 - DNA, 33 bp, Homo sapien
ttcttctttggtgtcctgcatacacagttttaa

SEQ ID NO: 294997 - DNA, 33 bp, Homo sapien
taaaactttacaagtgaaacaaggaatgtgtga

SEQ ID NO: 294998 - DNA, 33 bp, Homo sapien
taaaactttacaagtggaacaaggaatgtgtga

SEQ ID NO: 294999 - DNA, 33 bp, Homo sapien
gcttcctttccattcccaatgccactggatttg

SEQ ID NO: 295000 - DNA, 33 bp, Homo sapien
gcttcctttccattcctaatgccactggatttg

SEQ ID NO: 295001 - DNA, 33 bp, Homo sapien
aagaattcttctggaacatgatcccttttgctt

SEQ ID NO: 295002 - DNA, 33 bp, Homo sapien
aagaattcttctggaatatgatcccttttgctt

SEQ ID NO: 295003 - DNA, 33 bp, Homo sapien
ttggattattgatgaacgacattcagaaaacca

SEQ ID NO: 295004 - DNA, 33 bp, Homo sapien
ttggattattgatgaaggacattcagaaaacca

SEQ ID NO: 295005 - DNA, 33 bp, Homo sapien
tggaatatgtcttacaaaatggcttttagacgc

SEQ ID NO: 295006 - DNA, 33 bp, Homo sapien
tggaatatgtcttacagaatggcttttagacgc

SEQ ID NO: 295007 - DNA, 33 bp, Homo sapien
tgtctggaaaagccgacggtgggcctgacacta

SEQ ID NO: 295008 - DNA, 33 bp, Homo sapien
tgtctggaaaagccgatggtgggcctgacacta

SEQ ID NO: 295009 - DNA, 33 bp, Homo sapien
gtctagatacagaatagccatgttgtgcagagc

SEQ ID NO: 295010 - DNA, 33 bp, Homo sapien
gtctagatacagaatatccatgttgtgcagagc

SEQ ID NO: 295011 - DNA, 33 bp, Homo sapien
ttatttagtaattttcccatgatcctagtgata

SEQ ID NO: 295012 - DNA, 33 bp, Homo sapien
ttatttagtaattttctcatgatcctagtgata

SEQ ID NO: 295013 - DNA, 33 bp, Homo sapien
ggacttacttcaacaacccagggtagatcagtg

SEQ ID NO: 295014 - DNA, 33 bp, Homo sapien
ggacttacttcaacaatccagggtagatcagtg

SEQ ID NO: 295015 - DNA, 33 bp, Homo sapien
aggacattgcaggaagcaaaagaggcatcatcc

SEQ ID NO: 295016 - DNA, 33 bp, Homo sapien
aggacattgcaggaagtaaaagaggcatcatcc

SEQ ID NO: 295017 - DNA, 33 bp, Homo sapien
actcacctcttagggacccagtcgttagctcac

SEQ ID NO: 295018 - DNA, 33 bp, Homo sapien
actcacctcttagggatccagtcgttagctcac

SEQ ID NO: 295019 - DNA, 33 bp, Homo sapien
atctagaactaagttacgctttgaggaggtctg

SEQ ID NO: 295020 - DNA, 33 bp, Homo sapien
atctagaactaagttatgctttgaggaggtctg

SEQ ID NO: 295021 - DNA, 33 bp, Homo sapien
aaacagcgcaacttcccctgataaggtaaatat

SEQ ID NO: 295022 - DNA, 33 bp, Homo sapien
aaacagcgcaacttcctctgataaggtaaatat

SEQ ID NO: 295023 - DNA, 33 bp, Homo sapien
ctaggaagtgtctggaacactaaggatactaaa

SEQ ID NO: 295024 - DNA, 33 bp, Homo sapien
ctaggaagtgtctggatcactaaggatactaaa

SEQ ID NO: 295025 - DNA, 33 bp, Homo sapien
ttccaggagagtgtagaatttgactgtgtagac

SEQ ID NO: 295026 - DNA, 33 bp, Homo sapien
ttccaggagagtgtagcatttgactgtgtagac

SEQ ID NO: 295027 - DNA, 33 bp, Homo sapien
cttgctgagattaaagaaatatgaactgggtat

SEQ ID NO: 295028 - DNA, 33 bp, Homo sapien
cttgctgagattaaaggaatatgaactgggtat

SEQ ID NO: 295029 - DNA, 33 bp, Homo sapien
ggaggcagttttgttaggtctatgaggacttgc

SEQ ID NO: 295030 - DNA, 33 bp, Homo sapien
ggaggcagttttgttatgtctatgaggacttgc

SEQ ID NO: 295031 - DNA, 33 bp, Homo sapien
caaagcttggagagaaggatactagtagtaact

SEQ ID NO: 295032 - DNA, 33 bp, Homo sapien
caaagcttggagagaatgatactagtagtaact

SEQ ID NO: 295033 - DNA, 33 bp, Homo sapien
acttgatgcattgacaaaaacacttcttcctcc

SEQ ID NO: 295034 - DNA, 33 bp, Homo sapien
acttgatgcattgacagaaacacttcttcctcc

SEQ ID NO: 295035 - DNA, 33 bp, Homo sapien
cttttgcagacctttaacatcaaaggccaccaa

SEQ ID NO: 295036 - DNA, 33 bp, Homo sapien
cttttgcagacctttatcatcaaaggccaccaa

SEQ ID NO: 295037 - DNA, 33 bp, Homo sapien
tcctaacatcagtggaatattcaatccgataag

SEQ ID NO: 295038 - DNA, 33 bp, Homo sapien
tcctaacatcagtggactattcaatccgataag

SEQ ID NO: 295039 - DNA, 33 bp, Homo sapien
gtgaagtggttctcaaagtctagtccctggata

SEQ ID NO: 295040 - DNA, 33 bp, Homo sapien
gtgaagtggttctcaacgtctagtccctggata

SEQ ID NO: 295041 - DNA, 33 bp, Homo sapien
tgggtgcaattagaaacatctggagcatttatt

SEQ ID NO: 295042 - DNA, 33 bp, Homo sapien
tgggtgcaattagaaatatctggagcatttatt

SEQ ID NO: 295043 - DNA, 33 bp, Homo sapien
tttctattcactcccccacaaacctccacccct

SEQ ID NO: 295044 - DNA, 33 bp, Homo sapien
tttctattcactccccgacaaacctccacccct

SEQ ID NO: 295045 - DNA, 33 bp, Homo sapien
gaaccaggtgaaagtactaacatgagccacttg

SEQ ID NO: 295046 - DNA, 33 bp, Homo sapien
gaaccaggtgaaagtattaacatgagccacttg

SEQ ID NO: 295047 - DNA, 33 bp, Homo sapien
aaaggaggaatgacgcacttgccacttcaaaca

SEQ ID NO: 295048 - DNA, 33 bp, Homo sapien
aaaggaggaatgacgcgcttgccacttcaaaca

SEQ ID NO: 295049 - DNA, 33 bp, Homo sapien
cataaccctacttacacgagggacagttattgt

SEQ ID NO: 295050 - DNA, 33 bp, Homo sapien
cataaccctacttacatgagggacagttattgt

SEQ ID NO: 295051 - DNA, 33 bp, Homo sapien
cttgcttaaactcatcagacatttctcagtttt

SEQ ID NO: 295052 - DNA, 33 bp, Homo sapien
cttgcttaaactcatcggacatttctcagtttt

SEQ ID NO: 295053 - DNA, 33 bp, Homo sapien
ttcaccacaaaacctacgtgagatgatacatat

SEQ ID NO: 295054 - DNA, 33 bp, Homo sapien
ttcaccacaaaacctatgtgagatgatacatat

SEQ ID NO: 295055 - DNA, 33 bp, Homo sapien
taagtcagaggcttccactgatttcactgggag

SEQ ID NO: 295056 - DNA, 33 bp, Homo sapien
taagtcagaggcttccgctgatttcactgggag

SEQ ID NO: 295057 - DNA, 33 bp, Homo sapien
ggggatttgggctgcacaccacggtggccatct

SEQ ID NO: 295058 - DNA, 33 bp, Homo sapien
ggggatttgggctgcataccacggtggccatct

SEQ ID NO: 295059 - DNA, 33 bp, Homo sapien
ttttctgtctttctcactgaactctgtgctcct

SEQ ID NO: 295060 - DNA, 33 bp, Homo sapien
ttttctgtctttctcagtgaactctgtgctcct

SEQ ID NO: 295061 - DNA, 33 bp, Homo sapien
agagggacctggcttccaagttgctgagggcaa

SEQ ID NO: 295062 - DNA, 33 bp, Homo sapien
agagggacctggcttctaagttgctgagggcaa

SEQ ID NO: 295063 - DNA, 33 bp, Homo sapien
agactgagaatattcaaaagtgacagtatcggt

SEQ ID NO: 295064 - DNA, 33 bp, Homo sapien
agactgagaatattcagaagtgacagtatcggt

SEQ ID NO: 295065 - DNA, 33 bp, Homo sapien
tgccaatgccgcagcaagtttcatcagatccct

SEQ ID NO: 295066 - DNA, 33 bp, Homo sapien
tgccaatgccgcagcaggtttcatcagatccct

SEQ ID NO: 295067 - DNA, 33 bp, Homo sapien
acgacatttcaactcacgagctgttggttaaaa

SEQ ID NO: 295068 - DNA, 33 bp, Homo sapien
acgacatttcaactcatgagctgttggttaaaa

SEQ ID NO: 295069 - DNA, 33 bp, Homo sapien
tccagtagtaactccaatctcttcatcccacta

SEQ ID NO: 295070 - DNA, 33 bp, Homo sapien
tccagtagtaactccagtctcttcatcccacta

SEQ ID NO: 295071 - DNA, 33 bp, Homo sapien
ccctcatggcctaatcactttccacaggtgcca

SEQ ID NO: 295072 - DNA, 33 bp, Homo sapien
ccctcatggcctaatcgctttccacaggtgcca

SEQ ID NO: 295073 - DNA, 33 bp, Homo sapien
caattaatgtagatcaacttgctcctgtcatgt

SEQ ID NO: 295074 - DNA, 33 bp, Homo sapien
caattaatgtagatcaccttgctcctgtcatgt

SEQ ID NO: 295075 - DNA, 33 bp, Homo sapien
aagcagtagctggtgaaggaaacgcgcagcaga

SEQ ID NO: 295076 - DNA, 33 bp, Homo sapien
aagcagtagctggtgagggaaacgcgcagcaga

SEQ ID NO: 295077 - DNA, 33 bp, Homo sapien
gagaccagggctacgcaatgaggaagaagtggc

SEQ ID NO: 295078 - DNA, 33 bp, Homo sapien
gagaccagggctacgcgatgaggaagaagtggc

SEQ ID NO: 295079 - DNA, 33 bp, Homo sapien
gtactgggcagagtaggcaccctgtaatgatag

SEQ ID NO: 295080 - DNA, 33 bp, Homo sapien
gtactgggcagagtagtcaccctgtaatgatag

SEQ ID NO: 295081 - DNA, 33 bp, Homo sapien
ccaaacctactttctccaagactatcacttgca

SEQ ID NO: 295082 - DNA, 33 bp, Homo sapien
ccaaacctactttctctaagactatcacttgca

SEQ ID NO: 295083 - DNA, 33 bp, Homo sapien
agaaagaatatttaacaacaactgcagcccagg

SEQ ID NO: 295084 - DNA, 33 bp, Homo sapien
agaaagaatatttaaccacaactgcagcccagg

SEQ ID NO: 295085 - DNA, 33 bp, Homo sapien
tatttgacgggaattaacgcagagacccagaag

SEQ ID NO: 295086 - DNA, 33 bp, Homo sapien
tatttgacgggaattagcgcagagacccagaag

SEQ ID NO: 295087 - DNA, 33 bp, Homo sapien
caaggtaaaccattccaagtagacatgtgtagt

SEQ ID NO: 295088 - DNA, 33 bp, Homo sapien
caaggtaaaccattccgagtagacatgtgtagt

SEQ ID NO: 295089 - DNA, 33 bp, Homo sapien
agaggcttatactggagggtaaatgtaccttct

SEQ ID NO: 295090 - DNA, 33 bp, Homo sapien
agaggcttatactggatggtaaatgtaccttct

SEQ ID NO: 295091 - DNA, 33 bp, Homo sapien
gatccaagatttgtccaattatgaagttcccaa

SEQ ID NO: 295092 - DNA, 33 bp, Homo sapien
gatccaagatttgtccgattatgaagttcccaa

SEQ ID NO: 295093 - DNA, 33 bp, Homo sapien
acaacacctgggctgccattggtttctgcttct

SEQ ID NO: 295094 - DNA, 33 bp, Homo sapien
acaacacctgggctgctattggtttctgcttct

SEQ ID NO: 295095 - DNA, 33 bp, Homo sapien
caacctcacagggaaccgagatgtagatggcat

SEQ ID NO: 295096 - DNA, 33 bp, Homo sapien
caacctcacagggaacggagatgtagatggcat

SEQ ID NO: 295097 - DNA, 33 bp, Homo sapien
cagggaagcagggaagcccattgagtctgccca

SEQ ID NO: 295098 - DNA, 33 bp, Homo sapien
cagggaagcagggaaggccattgagtctgccca

SEQ ID NO: 295099 - DNA, 33 bp, Homo sapien
acacgtaattaaaatacagcatgtacttgtcca

SEQ ID NO: 295100 - DNA, 33 bp, Homo sapien
acacgtaattaaaatatagcatgtacttgtcca

SEQ ID NO: 295101 - DNA, 33 bp, Homo sapien
tgtgctgcagaaatgacagttcaaaaaaaatta

SEQ ID NO: 295102 - DNA, 33 bp, Homo sapien
tgtgctgcagaaatgatagttcaaaaaaaatta

SEQ ID NO: 295103 - DNA, 33 bp, Homo sapien
tgtttctaatgaccttcaaatctacagggatgc

SEQ ID NO: 295104 - DNA, 33 bp, Homo sapien
tgtttctaatgaccttgaaatctacagggatgc

SEQ ID NO: 295105 - DNA, 33 bp, Homo sapien
ttagttgttggctgggaacagcttgtgaggagc

SEQ ID NO: 295106 - DNA, 33 bp, Homo sapien
ttagttgttggctgggtacagcttgtgaggagc

SEQ ID NO: 295107 - DNA, 33 bp, Homo sapien
gcctatacctatgaaacgagagaagaaaggaaa

SEQ ID NO: 295108 - DNA, 33 bp, Homo sapien
gcctatacctatgaaaggagagaagaaaggaaa

SEQ ID NO: 295109 - DNA, 33 bp, Homo sapien
ggcctccttatccaaaatatttcatgctgagat

SEQ ID NO: 295110 - DNA, 33 bp, Homo sapien
ggcctccttatccaaagtatttcatgctgagat

SEQ ID NO: 295111 - DNA, 33 bp, Homo sapien
cacctctgttcggtcgcatttcatctggcttta

SEQ ID NO: 295112 - DNA, 33 bp, Homo sapien
cacctctgttcggtcgtatttcatctggcttta

SEQ ID NO: 295113 - DNA, 33 bp, Homo sapien
ctgggtttttaattgaaattgtgatccatgaaa

SEQ ID NO: 295114 - DNA, 33 bp, Homo sapien
ctgggtttttaattgagattgtgatccatgaaa

SEQ ID NO: 295115 - DNA, 33 bp, Homo sapien
agcacatagaatattaaagcaggtccttagaga

SEQ ID NO: 295116 - DNA, 33 bp, Homo sapien
agcacatagaatattagagcaggtccttagaga

SEQ ID NO: 295117 - DNA, 33 bp, Homo sapien
tctttatctgttttaaatgtttgtcactttcat

SEQ ID NO: 295118 - DNA, 33 bp, Homo sapien
tctttatctgttttaagtgtttgtcactttcat

SEQ ID NO: 295119 - DNA, 33 bp, Homo sapien
atcaggcaaatcttgcagaaactacttttttta

SEQ ID NO: 295120 - DNA, 33 bp, Homo sapien
atcaggcaaatcttgcggaaactacttttttta

SEQ ID NO: 295121 - DNA, 33 bp, Homo sapien
tcatataggaggaaagaaacaaatctatattaa

SEQ ID NO: 295122 - DNA, 33 bp, Homo sapien
tcatataggaggaaaggaacaaatctatattaa

SEQ ID NO: 295123 - DNA, 33 bp, Homo sapien
catcagtggaaaatgcactttgttgaagacaca

SEQ ID NO: 295124 - DNA, 33 bp, Homo sapien
catcagtggaaaatgcgctttgttgaagacaca

SEQ ID NO: 295125 - DNA, 33 bp, Homo sapien
taaaaaaggactaacaccaatgtgtcaaacatt

SEQ ID NO: 295126 - DNA, 33 bp, Homo sapien
taaaaaaggactaacatcaatgtgtcaaacatt

SEQ ID NO: 295127 - DNA, 33 bp, Homo sapien
acctacagttttcctaacatttcagagaagcca

SEQ ID NO: 295128 - DNA, 33 bp, Homo sapien
acctacagttttcctagcatttcagagaagcca

SEQ ID NO: 295129 - DNA, 33 bp, Homo sapien
ttttctattttgacacaataactagagtgaacc

SEQ ID NO: 295130 - DNA, 33 bp, Homo sapien
ttttctattttgacacgataactagagtgaacc

SEQ ID NO: 295131 - DNA, 33 bp, Homo sapien
ggagatcctggaatcaatcttctgaaaatactg

SEQ ID NO: 295132 - DNA, 33 bp, Homo sapien
ggagatcctggaatcagtcttctgaaaatactg

SEQ ID NO: 295133 - DNA, 33 bp, Homo sapien
cacacactgcgtcaaggaccgagactcatgagg

SEQ ID NO: 295134 - DNA, 33 bp, Homo sapien
cacacactgcgtcaagtaccgagactcatgagg

SEQ ID NO: 295135 - DNA, 33 bp, Homo sapien
gctgagccaggtcttgaagtataggtataagca

SEQ ID NO: 295136 - DNA, 33 bp, Homo sapien
gctgagccaggtcttggagtataggtataagca

SEQ ID NO: 295137 - DNA, 33 bp, Homo sapien
caacgcagtagcagaaaagctgcctgcaccctg

SEQ ID NO: 295138 - DNA, 33 bp, Homo sapien
caacgcagtagcagaagagctgcctgcaccctg

SEQ ID NO: 295139 - DNA, 33 bp, Homo sapien
cagcttctggtaacaaccattttactgtttcta

SEQ ID NO: 295140 - DNA, 33 bp, Homo sapien
cagcttctggtaacaagcattttactgtttcta

SEQ ID NO: 295141 - DNA, 33 bp, Homo sapien
aactctgtgaggaaagaacttcgtactattcag

SEQ ID NO: 295142 - DNA, 33 bp, Homo sapien
aactctgtgaggaaaggacttcgtactattcag

SEQ ID NO: 295143 - DNA, 33 bp, Homo sapien
gcgtgcgaaaaatgccactgttgactgaatctc

SEQ ID NO: 295144 - DNA, 33 bp, Homo sapien
gcgtgcgaaaaatgccgctgttgactgaatctc

SEQ ID NO: 295145 - DNA, 33 bp, Homo sapien
atttggcacaaaaagaagaggggggttacataa

SEQ ID NO: 295146 - DNA, 33 bp, Homo sapien
atttggcacaaaaagaggaggggggttacataa

SEQ ID NO: 295147 - DNA, 33 bp, Homo sapien
ttgtttcctcagagcacagcctagagcaggagc

SEQ ID NO: 295148 - DNA, 33 bp, Homo sapien
ttgtttcctcagagcatagcctagagcaggagc

SEQ ID NO: 295149 - DNA, 33 bp, Homo sapien
cctgaaaaatgaccaaatgcattaaaagttctt

SEQ ID NO: 295150 - DNA, 33 bp, Homo sapien
cctgaaaaatgaccaactgcattaaaagttctt

SEQ ID NO: 295151 - DNA, 33 bp, Homo sapien
gcttttcctacgctcacagagaggttgtgtgac

SEQ ID NO: 295152 - DNA, 33 bp, Homo sapien
gcttttcctacgctcatagagaggttgtgtgac

SEQ ID NO: 295153 - DNA, 33 bp, Homo sapien
atagttaaaatggaaccatgtgttgtttcacgt

SEQ ID NO: 295154 - DNA, 33 bp, Homo sapien
atagttaaaatggaactatgtgttgtttcacgt

SEQ ID NO: 295155 - DNA, 33 bp, Homo sapien
acgtatcaatgacaaaagtactattctggtaag

SEQ ID NO: 295156 - DNA, 33 bp, Homo sapien
acgtatcaatgacaaaggtactattctggtaag

SEQ ID NO: 295157 - DNA, 33 bp, Homo sapien
gacattctttcctccacgatatcctgtcttatc

SEQ ID NO: 295158 - DNA, 33 bp, Homo sapien
gacattctttcctccatgatatcctgtcttatc

SEQ ID NO: 295159 - DNA, 33 bp, Homo sapien
taggcccacggatcatcaacattttacaaatga

SEQ ID NO: 295160 - DNA, 33 bp, Homo sapien
taggcccacggatcatgaacattttacaaatga

SEQ ID NO: 295161 - DNA, 33 bp, Homo sapien
gattctagatgtagccactgcaatcctacaaaa

SEQ ID NO: 295162 - DNA, 33 bp, Homo sapien
gattctagatgtagccgctgcaatcctacaaaa

SEQ ID NO: 295163 - DNA, 33 bp, Homo sapien
aaatgggcccaggtaacgacagtgctttcaagc

SEQ ID NO: 295164 - DNA, 33 bp, Homo sapien
aaatgggcccaggtaatgacagtgctttcaagc

SEQ ID NO: 295165 - DNA, 33 bp, Homo sapien
attctggttggtccacagatttccttattgcaa

SEQ ID NO: 295166 - DNA, 33 bp, Homo sapien
attctggttggtccacggatttccttattgcaa

SEQ ID NO: 295167 - DNA, 33 bp, Homo sapien
cagcgattttctaagacggttttctagatttag

SEQ ID NO: 295168 - DNA, 33 bp, Homo sapien
cagcgattttctaagatggttttctagatttag

SEQ ID NO: 295169 - DNA, 33 bp, Homo sapien
ggctagttgctgaatcacacgaatgaagagaga

SEQ ID NO: 295170 - DNA, 33 bp, Homo sapien
ggctagttgctgaatcgcacgaatgaagagaga

SEQ ID NO: 295171 - DNA, 33 bp, Homo sapien
tctttcccatattacaaaagtgcaagagatgga

SEQ ID NO: 295172 - DNA, 33 bp, Homo sapien
tctttcccatattacagaagtgcaagagatgga

SEQ ID NO: 295173 - DNA, 33 bp, Homo sapien
tgaagcacttttagcacggccccgagtacttgg

SEQ ID NO: 295174 - DNA, 33 bp, Homo sapien
tgaagcacttttagcatggccccgagtacttgg

SEQ ID NO: 295175 - DNA, 33 bp, Homo sapien
attgtgcttgaaggccactggccaaatgtttat

SEQ ID NO: 295176 - DNA, 33 bp, Homo sapien
attgtgcttgaaggccgctggccaaatgtttat

SEQ ID NO: 295177 - DNA, 33 bp, Homo sapien
agattctgagcagctaacaaacttgatttcttt

SEQ ID NO: 295178 - DNA, 33 bp, Homo sapien
agattctgagcagctatcaaacttgatttcttt

SEQ ID NO: 295179 - DNA, 33 bp, Homo sapien
tcttgcaagattgtcaagtgcattatcaacaat

SEQ ID NO: 295180 - DNA, 33 bp, Homo sapien
tcttgcaagattgtcaggtgcattatcaacaat

SEQ ID NO: 295181 - DNA, 33 bp, Homo sapien
tttatggacatgaaagaaggaatctgaaacttc

SEQ ID NO: 295182 - DNA, 33 bp, Homo sapien
tttatggacatgaaaggaggaatctgaaacttc

SEQ ID NO: 295183 - DNA, 33 bp, Homo sapien
cagaattttttatacaaactagctgatgtccat

SEQ ID NO: 295184 - DNA, 33 bp, Homo sapien
cagaattttttatacatactagctgatgtccat

SEQ ID NO: 295185 - DNA, 33 bp, Homo sapien
actgtctgtagttgcaagtcaaatttgacaaaa

SEQ ID NO: 295186 - DNA, 33 bp, Homo sapien
actgtctgtagttgcacgtcaaatttgacaaaa

SEQ ID NO: 295187 - DNA, 33 bp, Homo sapien
gcagttgctgtcttcacggtaggaactttgagt

SEQ ID NO: 295188 - DNA, 33 bp, Homo sapien
gcagttgctgtcttcagggtaggaactttgagt

SEQ ID NO: 295189 - DNA, 33 bp, Homo sapien
cagggtttgatgtatgcacaaaggaggcggtat

SEQ ID NO: 295190 - DNA, 33 bp, Homo sapien
cagggtttgatgtatggacaaaggaggcggtat

SEQ ID NO: 295191 - DNA, 33 bp, Homo sapien
gtatgggatatacttaggcttcaattgttcact

SEQ ID NO: 295192 - DNA, 33 bp, Homo sapien
gtatgggatatacttatgcttcaattgttcact

SEQ ID NO: 295193 - DNA, 33 bp, Homo sapien
agcttccctgcatgagcatgagccactggtatg

SEQ ID NO: 295194 - DNA, 33 bp, Homo sapien
agcttccctgcatgaggatgagccactggtatg

SEQ ID NO: 295195 - DNA, 33 bp, Homo sapien
gaacagttaaatattacggaacacatgaatact

SEQ ID NO: 295196 - DNA, 33 bp, Homo sapien
gaacagttaaatattatggaacacatgaatact

SEQ ID NO: 295197 - DNA, 33 bp, Homo sapien
caacatattatttgtcgctccactatagtaaga

SEQ ID NO: 295198 - DNA, 33 bp, Homo sapien
caacatattatttgtctctccactatagtaaga

SEQ ID NO: 295199 - DNA, 33 bp, Homo sapien
gaccagcagcttctaagaatcttacaagacagc

SEQ ID NO: 295200 - DNA, 33 bp, Homo sapien
gaccagcagcttctaataatcttacaagacagc

SEQ ID NO: 295201 - DNA, 33 bp, Homo sapien
caatgagatataagcacatgcattgaccagcag

SEQ ID NO: 295202 - DNA, 33 bp, Homo sapien
caatgagatataagcagatgcattgaccagcag

SEQ ID NO: 295203 - DNA, 33 bp, Homo sapien
cgtttgagtggaagaacagagatggtgaccatc

SEQ ID NO: 295204 - DNA, 33 bp, Homo sapien
cgtttgagtggaagaagagagatggtgaccatc

SEQ ID NO: 295205 - DNA, 33 bp, Homo sapien
tagccttttctccatgcatgatagctcctggtg

SEQ ID NO: 295206 - DNA, 33 bp, Homo sapien
tagccttttctccatgtatgatagctcctggtg

SEQ ID NO: 295207 - DNA, 33 bp, Homo sapien
atcccatgttaaatacggacattatagatcaag

SEQ ID NO: 295208 - DNA, 33 bp, Homo sapien
atcccatgttaaatactgacattatagatcaag

SEQ ID NO: 295209 - DNA, 33 bp, Homo sapien
aggtgataggaagacaaagaagacacagagtag

SEQ ID NO: 295210 - DNA, 33 bp, Homo sapien
aggtgataggaagacagagaagacacagagtag

SEQ ID NO: 295211 - DNA, 33 bp, Homo sapien
caagttgataaccttgaacttccaagtgtgtcc

SEQ ID NO: 295212 - DNA, 33 bp, Homo sapien
caagttgataaccttgcacttccaagtgtgtcc

SEQ ID NO: 295213 - DNA, 33 bp, Homo sapien
gataagttcaagacaacgggcagacaattatct

SEQ ID NO: 295214 - DNA, 33 bp, Homo sapien
gataagttcaagacaatgggcagacaattatct

SEQ ID NO: 295215 - DNA, 33 bp, Homo sapien
ctcattcacatgttcaagatgggtgaatttcta

SEQ ID NO: 295216 - DNA, 33 bp, Homo sapien
ctcattcacatgttcaggatgggtgaatttcta

SEQ ID NO: 295217 - DNA, 33 bp, Homo sapien
atcatgcattcttcaaaggtgtgctattatccc

SEQ ID NO: 295218 - DNA, 33 bp, Homo sapien
atcatgcattcttcaagggtgtgctattatccc

SEQ ID NO: 295219 - DNA, 33 bp, Homo sapien
ttgccaggagatagggcagatcacggaatccac

SEQ ID NO: 295220 - DNA, 33 bp, Homo sapien
ttgccaggagatagggtagatcacggaatccac

SEQ ID NO: 295221 - DNA, 33 bp, Homo sapien
acaaatgggtaaaatacgacaagtcaccatcat

SEQ ID NO: 295222 - DNA, 33 bp, Homo sapien
acaaatgggtaaaatatgacaagtcaccatcat

SEQ ID NO: 295223 - DNA, 33 bp, Homo sapien
aagaagtctttaaaccaaaaactgtggctctta

SEQ ID NO: 295224 - DNA, 33 bp, Homo sapien
aagaagtctttaaacccaaaactgtggctctta

SEQ ID NO: 295225 - DNA, 33 bp, Homo sapien
ttaagtcaatgagaccagagttaaagagattca

SEQ ID NO: 295226 - DNA, 33 bp, Homo sapien
ttaagtcaatgagaccggagttaaagagattca

SEQ ID NO: 295227 - DNA, 33 bp, Homo sapien
ttactttgccagtgccacaacatcttgatcata

SEQ ID NO: 295228 - DNA, 33 bp, Homo sapien
ttactttgccagtgccgcaacatcttgatcata

SEQ ID NO: 295229 - DNA, 33 bp, Homo sapien
attgtgaggttcctcccacttgcagattatcca

SEQ ID NO: 295230 - DNA, 33 bp, Homo sapien
attgtgaggttcctcctacttgcagattatcca

SEQ ID NO: 295231 - DNA, 33 bp, Homo sapien
attcggaaatcctaaaagcaaatcttaatagaa

SEQ ID NO: 295232 - DNA, 33 bp, Homo sapien
attcggaaatcctaaaggcaaatcttaatagaa

SEQ ID NO: 295233 - DNA, 33 bp, Homo sapien
acgcacctcctccgtagccatggtaatatttcc

SEQ ID NO: 295234 - DNA, 33 bp, Homo sapien
acgcacctcctccgtatccatggtaatatttcc

SEQ ID NO: 295235 - DNA, 33 bp, Homo sapien
ttcaagaggacctagtcaactcagtttcctggc

SEQ ID NO: 295236 - DNA, 33 bp, Homo sapien
ttcaagaggacctagttaactcagtttcctggc

SEQ ID NO: 295237 - DNA, 33 bp, Homo sapien
tccgtacattcctatacagctttccatgtgata

SEQ ID NO: 295238 - DNA, 33 bp, Homo sapien
tccgtacattcctatatagctttccatgtgata

SEQ ID NO: 295239 - DNA, 33 bp, Homo sapien
acaaggttttgccccagctactcatcatctgaa

SEQ ID NO: 295240 - DNA, 33 bp, Homo sapien
acaaggttttgccccatctactcatcatctgaa

SEQ ID NO: 295241 - DNA, 33 bp, Homo sapien
cacatctctttttaataatgtctgctgaggtct

SEQ ID NO: 295242 - DNA, 33 bp, Homo sapien
cacatctctttttaatcatgtctgctgaggtct

SEQ ID NO: 295243 - DNA, 33 bp, Homo sapien
attttcaaaagtgtgccagctgtctgtccaact

SEQ ID NO: 295244 - DNA, 33 bp, Homo sapien
attttcaaaagtgtgcgagctgtctgtccaact

SEQ ID NO: 295245 - DNA, 33 bp, Homo sapien
agcaaagagaaaaataagagtggcttcattctt

SEQ ID NO: 295246 - DNA, 33 bp, Homo sapien
agcaaagagaaaaatatgagtggcttcattctt

SEQ ID NO: 295247 - DNA, 33 bp, Homo sapien
tcaggatagcgggaagaaaggtcctgccacaag

SEQ ID NO: 295248 - DNA, 33 bp, Homo sapien
tcaggatagcgggaaggaaggtcctgccacaag

SEQ ID NO: 295249 - DNA, 33 bp, Homo sapien
gaagtatattattcaacattgatttttccttcc

SEQ ID NO: 295250 - DNA, 33 bp, Homo sapien
gaagtatattattcaagattgatttttccttcc

SEQ ID NO: 295251 - DNA, 33 bp, Homo sapien
ataatgtgtagtcacaaaggagtgcttcagaaa

SEQ ID NO: 295252 - DNA, 33 bp, Homo sapien
ataatgtgtagtcacagaggagtgcttcagaaa

SEQ ID NO: 295253 - DNA, 33 bp, Homo sapien
ctgtgtgctttctatccaagggcactgttctct

SEQ ID NO: 295254 - DNA, 33 bp, Homo sapien
ctgtgtgctttctatctaagggcactgttctct

SEQ ID NO: 295255 - DNA, 33 bp, Homo sapien
gctctgtgttcagatacacattagcaacttgga

SEQ ID NO: 295256 - DNA, 33 bp, Homo sapien
gctctgtgttcagatatacattagcaacttgga

SEQ ID NO: 295257 - DNA, 33 bp, Homo sapien
ccaaaccgtcaatcccagccactttgaagaccc

SEQ ID NO: 295258 - DNA, 33 bp, Homo sapien
ccaaaccgtcaatcccggccactttgaagaccc

SEQ ID NO: 295259 - DNA, 33 bp, Homo sapien
tgctgctaaataagccaactgaatgatacattt

SEQ ID NO: 295260 - DNA, 33 bp, Homo sapien
tgctgctaaataagccgactgaatgatacattt

SEQ ID NO: 295261 - DNA, 33 bp, Homo sapien
acacacaaaaaggggcaatagatctcaacttct

SEQ ID NO: 295262 - DNA, 33 bp, Homo sapien
acacacaaaaaggggcgatagatctcaacttct

SEQ ID NO: 295263 - DNA, 33 bp, Homo sapien
ctaggtctgctaggagaaaaagatcttcaattg

SEQ ID NO: 295264 - DNA, 33 bp, Homo sapien
ctaggtctgctaggaggaaaagatcttcaattg

SEQ ID NO: 295265 - DNA, 33 bp, Homo sapien
ttagcggaggcatttagctcacacagccttagt

SEQ ID NO: 295266 - DNA, 33 bp, Homo sapien
ttagcggaggcatttatctcacacagccttagt

SEQ ID NO: 295267 - DNA, 33 bp, Homo sapien
ttttcagaaaatggaccggacgggaggaaagag

SEQ ID NO: 295268 - DNA, 33 bp, Homo sapien
ttttcagaaaatggactggacgggaggaaagag

SEQ ID NO: 295269 - DNA, 33 bp, Homo sapien
ctacttttgaaaatcaactgtattgggtagtgg

SEQ ID NO: 295270 - DNA, 33 bp, Homo sapien
ctacttttgaaaatcagctgtattgggtagtgg

SEQ ID NO: 295271 - DNA, 33 bp, Homo sapien
gctcagttaaaggctacgtggtgattcttagga

SEQ ID NO: 295272 - DNA, 33 bp, Homo sapien
gctcagttaaaggctatgtggtgattcttagga

SEQ ID NO: 295273 - DNA, 33 bp, Homo sapien
cgtggtatcattcacgaatacaattttgaacga

SEQ ID NO: 295274 - DNA, 33 bp, Homo sapien
cgtggtatcattcacggatacaattttgaacga

SEQ ID NO: 295275 - DNA, 33 bp, Homo sapien
cccaacctcaatggtacctcagcgtcttcattc

SEQ ID NO: 295276 - DNA, 33 bp, Homo sapien
cccaacctcaatggtatctcagcgtcttcattc

SEQ ID NO: 295277 - DNA, 33 bp, Homo sapien
tgctactgatgttagcccacatgtcacagtgtg

SEQ ID NO: 295278 - DNA, 33 bp, Homo sapien
tgctactgatgttagctcacatgtcacagtgtg

SEQ ID NO: 295279 - DNA, 33 bp, Homo sapien
aataccaaacattacccacataaccccaaaatt

SEQ ID NO: 295280 - DNA, 33 bp, Homo sapien
aataccaaacattacctacataaccccaaaatt

SEQ ID NO: 295281 - DNA, 33 bp, Homo sapien
agctcttcctgttctgcatgggaagacctcgtt

SEQ ID NO: 295282 - DNA, 33 bp, Homo sapien
agctcttcctgttctgtatgggaagacctcgtt

SEQ ID NO: 295283 - DNA, 33 bp, Homo sapien
gctgtatctgtcaaaacgacaaatgtctcatgt

SEQ ID NO: 295284 - DNA, 33 bp, Homo sapien
gctgtatctgtcaaaatgacaaatgtctcatgt

SEQ ID NO: 295285 - DNA, 33 bp, Homo sapien
aatctagcagagaaaacgcaatgaaagggcaca

SEQ ID NO: 295286 - DNA, 33 bp, Homo sapien
aatctagcagagaaaatgcaatgaaagggcaca

SEQ ID NO: 295287 - DNA, 33 bp, Homo sapien
ctttccttaactagcagatttcagtaatgtgac

SEQ ID NO: 295288 - DNA, 33 bp, Homo sapien
ctttccttaactagcatatttcagtaatgtgac

SEQ ID NO: 295289 - DNA, 33 bp, Homo sapien
atttgtggcaattttaaatgttctttcaaaggt

SEQ ID NO: 295290 - DNA, 33 bp, Homo sapien
atttgtggcaattttatatgttctttcaaaggt

SEQ ID NO: 295291 - DNA, 33 bp, Homo sapien
tggcgggcaactgggacgagcaagtttctttgc

SEQ ID NO: 295292 - DNA, 33 bp, Homo sapien
tggcgggcaactgggatgagcaagtttctttgc

SEQ ID NO: 295293 - DNA, 33 bp, Homo sapien
caaagagtagccaaaaccatttctaagatcctt

SEQ ID NO: 295294 - DNA, 33 bp, Homo sapien
caaagagtagccaaaatcatttctaagatcctt

SEQ ID NO: 295295 - DNA, 33 bp, Homo sapien
gatacttctctctgtaactctggatctctcagg

SEQ ID NO: 295296 - DNA, 33 bp, Homo sapien
gatacttctctctgtacctctggatctctcagg

SEQ ID NO: 295297 - DNA, 33 bp, Homo sapien
gccgcttactgaggacaagtgaaagcacagaca

SEQ ID NO: 295298 - DNA, 33 bp, Homo sapien
gccgcttactgaggaccagtgaaagcacagaca

SEQ ID NO: 295299 - DNA, 33 bp, Homo sapien
tctttaaaaaaatgcaggaagccaaaaaatgaa

SEQ ID NO: 295300 - DNA, 33 bp, Homo sapien
tctttaaaaaaatgcatgaagccaaaaaatgaa

SEQ ID NO: 295301 - DNA, 33 bp, Homo sapien
aaaacaaatgcatgagaaactcgaacaacaaaa

SEQ ID NO: 295302 - DNA, 33 bp, Homo sapien
aaaacaaatgcatgagcaactcgaacaacaaaa

SEQ ID NO: 295303 - DNA, 33 bp, Homo sapien
ccttcctggaatcctccatcatcagaacacaca

SEQ ID NO: 295304 - DNA, 33 bp, Homo sapien
ccttcctggaatcctctatcatcagaacacaca

SEQ ID NO: 295305 - DNA, 33 bp, Homo sapien
gggaggtggccctgcccggcaagactccaccat

SEQ ID NO: 295306 - DNA, 33 bp, Homo sapien
gggaggtggccctgcctggcaagactccaccat

SEQ ID NO: 295307 - DNA, 33 bp, Homo sapien
tgtgttcactgatctcaaaatcactcatgtaat

SEQ ID NO: 295308 - DNA, 33 bp, Homo sapien
tgtgttcactgatctcgaaatcactcatgtaat

SEQ ID NO: 295309 - DNA, 33 bp, Homo sapien
atagatcttattaccacagtggatctaacatat

SEQ ID NO: 295310 - DNA, 33 bp, Homo sapien
atagatcttattaccatagtggatctaacatat

SEQ ID NO: 295311 - DNA, 33 bp, Homo sapien
agagttcaataccaccactaatcagctaagaaa

SEQ ID NO: 295312 - DNA, 33 bp, Homo sapien
agagttcaataccaccgctaatcagctaagaaa

SEQ ID NO: 295313 - DNA, 33 bp, Homo sapien
taatttcagatatgtccagtagtgaaggtgctc

SEQ ID NO: 295314 - DNA, 33 bp, Homo sapien
taatttcagatatgtctagtagtgaaggtgctc

SEQ ID NO: 295315 - DNA, 33 bp, Homo sapien
cctatggttctatactcaggaaaacacattctc

SEQ ID NO: 295316 - DNA, 33 bp, Homo sapien
cctatggttctatacttaggaaaacacattctc

SEQ ID NO: 295317 - DNA, 33 bp, Homo sapien
aggagggaggaaagacagataaagttgattata

SEQ ID NO: 295318 - DNA, 33 bp, Homo sapien
aggagggaggaaagacggataaagttgattata

SEQ ID NO: 295319 - DNA, 33 bp, Homo sapien
tgattctatttgcaaaaactctatctcagaatg

SEQ ID NO: 295320 - DNA, 33 bp, Homo sapien
tgattctatttgcaaacactctatctcagaatg

SEQ ID NO: 295321 - DNA, 33 bp, Homo sapien
cttgcaaaaacaattccattctccaattgttga

SEQ ID NO: 295322 - DNA, 33 bp, Homo sapien
cttgcaaaaacaattctattctccaattgttga

SEQ ID NO: 295323 - DNA, 33 bp, Homo sapien
cgagcttcttggatgcaaatgaaaacctcgtga

SEQ ID NO: 295324 - DNA, 33 bp, Homo sapien
cgagcttcttggatgcgaatgaaaacctcgtga

SEQ ID NO: 295325 - DNA, 33 bp, Homo sapien
acaattccaacgcagcaaaacagatcaccaacg

SEQ ID NO: 295326 - DNA, 33 bp, Homo sapien
acaattccaacgcagcgaaacagatcaccaacg

SEQ ID NO: 295327 - DNA, 33 bp, Homo sapien
ggctagaccaattacaccataatcatgggagta

SEQ ID NO: 295328 - DNA, 33 bp, Homo sapien
ggctagaccaattacatcataatcatgggagta

SEQ ID NO: 295329 - DNA, 33 bp, Homo sapien
ggaatgctgaagaccacgaatgctaagggccat

SEQ ID NO: 295330 - DNA, 33 bp, Homo sapien
ggaatgctgaagaccatgaatgctaagggccat

SEQ ID NO: 295331 - DNA, 33 bp, Homo sapien
ggcaggatgacacggtaaactaattcacacaac

SEQ ID NO: 295332 - DNA, 33 bp, Homo sapien
ggcaggatgacacggtcaactaattcacacaac

SEQ ID NO: 295333 - DNA, 33 bp, Homo sapien
aagtgtgccaaaaccagggggctaaagcagatc

SEQ ID NO: 295334 - DNA, 33 bp, Homo sapien
aagtgtgccaaaaccatggggctaaagcagatc

SEQ ID NO: 295335 - DNA, 33 bp, Homo sapien
atgcactcacaaaaaacacttgggaatcacgtg

SEQ ID NO: 295336 - DNA, 33 bp, Homo sapien
atgcactcacaaaaaatacttgggaatcacgtg

SEQ ID NO: 295337 - DNA, 33 bp, Homo sapien
atgttcaagagaagagacacgttagaggatcac

SEQ ID NO: 295338 - DNA, 33 bp, Homo sapien
atgttcaagagaagaggcacgttagaggatcac

SEQ ID NO: 295339 - DNA, 33 bp, Homo sapien
cgttagaggatcactacggcagtgtttacagca

SEQ ID NO: 295340 - DNA, 33 bp, Homo sapien
cgttagaggatcactatggcagtgtttacagca

SEQ ID NO: 295341 - DNA, 33 bp, Homo sapien
ttaacatttcttcacagtagtccagcatattct

SEQ ID NO: 295342 - DNA, 33 bp, Homo sapien
ttaacatttcttcacattagtccagcatattct

SEQ ID NO: 295343 - DNA, 33 bp, Homo sapien
ggaggcctcttggagaactgagaagaatttcaa

SEQ ID NO: 295344 - DNA, 33 bp, Homo sapien
ggaggcctcttggagacctgagaagaatttcaa

SEQ ID NO: 295345 - DNA, 33 bp, Homo sapien
tggactctgaagatggaattgcattttaataca

SEQ ID NO: 295346 - DNA, 33 bp, Homo sapien
tggactctgaagatgggattgcattttaataca

SEQ ID NO: 295347 - DNA, 33 bp, Homo sapien
agtgttacacgaggaaccaatgcttatgaagca

SEQ ID NO: 295348 - DNA, 33 bp, Homo sapien
agtgttacacgaggaatcaatgcttatgaagca

SEQ ID NO: 295349 - DNA, 33 bp, Homo sapien
tgtccaaagggatgaccagagaaagtctagctc

SEQ ID NO: 295350 - DNA, 33 bp, Homo sapien
tgtccaaagggatgacgagagaaagtctagctc

SEQ ID NO: 295351 - DNA, 33 bp, Homo sapien
catccctgtatatggaacttttgaactcaaaat

SEQ ID NO: 295352 - DNA, 33 bp, Homo sapien
catccctgtatatggagcttttgaactcaaaat

SEQ ID NO: 295353 - DNA, 33 bp, Homo sapien
taaaagatatttctccaaagaggacatacaaat

SEQ ID NO: 295354 - DNA, 33 bp, Homo sapien
taaaagatatttctccgaagaggacatacaaat

SEQ ID NO: 295355 - DNA, 33 bp, Homo sapien
aattattcacaagacactggtgcagacggcttt

SEQ ID NO: 295356 - DNA, 33 bp, Homo sapien
aattattcacaagacagtggtgcagacggcttt

SEQ ID NO: 295357 - DNA, 33 bp, Homo sapien
cttggctttaggcaccaagtgtggtagattaca

SEQ ID NO: 295358 - DNA, 33 bp, Homo sapien
cttggctttaggcaccgagtgtggtagattaca

SEQ ID NO: 295359 - DNA, 33 bp, Homo sapien
taagttttctccaggaagccaaagcatccaagt

SEQ ID NO: 295360 - DNA, 33 bp, Homo sapien
taagttttctccaggaggccaaagcatccaagt

SEQ ID NO: 295361 - DNA, 33 bp, Homo sapien
tcccttgattcagcagaccagtggctccatgaa

SEQ ID NO: 295362 - DNA, 33 bp, Homo sapien
tcccttgattcagcaggccagtggctccatgaa

SEQ ID NO: 295363 - DNA, 33 bp, Homo sapien
ccagtacagaaaatacggaagtgggtaagcatt

SEQ ID NO: 295364 - DNA, 33 bp, Homo sapien
ccagtacagaaaatactgaagtgggtaagcatt

SEQ ID NO: 295365 - DNA, 33 bp, Homo sapien
tcagtttgattacatgaatattcagagtttcaa

SEQ ID NO: 295366 - DNA, 33 bp, Homo sapien
tcagtttgattacatggatattcagagtttcaa

SEQ ID NO: 295367 - DNA, 33 bp, Homo sapien
ttcatgttaaccttcacctgtgatagactttac

SEQ ID NO: 295368 - DNA, 33 bp, Homo sapien
ttcatgttaaccttcatctgtgatagactttac

SEQ ID NO: 295369 - DNA, 33 bp, Homo sapien
agcctacagaacccggaagccgtaggggaattc

SEQ ID NO: 295370 - DNA, 33 bp, Homo sapien
agcctacagaacccggcagccgtaggggaattc

SEQ ID NO: 295371 - DNA, 33 bp, Homo sapien
tcaccacacagttcacactctcatgagaattta

SEQ ID NO: 295372 - DNA, 33 bp, Homo sapien
tcaccacacagttcacgctctcatgagaattta

SEQ ID NO: 295373 - DNA, 33 bp, Homo sapien
agatttgaagttgccacagacatacttttaagg

SEQ ID NO: 295374 - DNA, 33 bp, Homo sapien
agatttgaagttgccatagacatacttttaagg

SEQ ID NO: 295375 - DNA, 33 bp, Homo sapien
gagggctggcaagtctaaaattcacaggatagg

SEQ ID NO: 295376 - DNA, 33 bp, Homo sapien
gagggctggcaagtctgaaattcacaggatagg

SEQ ID NO: 295377 - DNA, 33 bp, Homo sapien
aagacagtcactcaccagcacttgggccagcct

SEQ ID NO: 295378 - DNA, 33 bp, Homo sapien
aagacagtcactcaccggcacttgggccagcct

SEQ ID NO: 295379 - DNA, 33 bp, Homo sapien
gttcaccatcatctccacttttgacactcagtg

SEQ ID NO: 295380 - DNA, 33 bp, Homo sapien
gttcaccatcatctcctcttttgacactcagtg

SEQ ID NO: 295381 - DNA, 33 bp, Homo sapien
tagggctataatttggcagataatcttcataag

SEQ ID NO: 295382 - DNA, 33 bp, Homo sapien
tagggctataatttgggagataatcttcataag

SEQ ID NO: 295383 - DNA, 33 bp, Homo sapien
tgccaagtttgaaataaccttctctggcctgat

SEQ ID NO: 295384 - DNA, 33 bp, Homo sapien
tgccaagtttgaaatatccttctctggcctgat

SEQ ID NO: 295385 - DNA, 33 bp, Homo sapien
atgaatgaataaacgaagtctgccctccagagt

SEQ ID NO: 295386 - DNA, 33 bp, Homo sapien
atgaatgaataaacgatgtctgccctccagagt

SEQ ID NO: 295387 - DNA, 33 bp, Homo sapien
gacctcatttcacattaaagcaacgaggtatgt

SEQ ID NO: 295388 - DNA, 33 bp, Homo sapien
gacctcatttcacattgaagcaacgaggtatgt

SEQ ID NO: 295389 - DNA, 33 bp, Homo sapien
tcattatgataaaccacgctgtaatggaaatat

SEQ ID NO: 295390 - DNA, 33 bp, Homo sapien
tcattatgataaaccatgctgtaatggaaatat

SEQ ID NO: 295391 - DNA, 33 bp, Homo sapien
tttgtggtatgctgacgacatggcctaagctat

SEQ ID NO: 295392 - DNA, 33 bp, Homo sapien
tttgtggtatgctgactacatggcctaagctat

SEQ ID NO: 295393 - DNA, 33 bp, Homo sapien
gaattcaggacaattcacagacggagagcattt

SEQ ID NO: 295394 - DNA, 33 bp, Homo sapien
gaattcaggacaattcgcagacggagagcattt

SEQ ID NO: 295395 - DNA, 33 bp, Homo sapien
atcatttgacattgacactttggggatattaat

SEQ ID NO: 295396 - DNA, 33 bp, Homo sapien
atcatttgacattgactctttggggatattaat

SEQ ID NO: 295397 - DNA, 33 bp, Homo sapien
ttcctgcaagttcccacgatgccgacactgctg

SEQ ID NO: 295398 - DNA, 33 bp, Homo sapien
ttcctgcaagttcccatgatgccgacactgctg

SEQ ID NO: 295399 - DNA, 33 bp, Homo sapien
tagaggtcagaagttcaacgtgggtcccactgg

SEQ ID NO: 295400 - DNA, 33 bp, Homo sapien
tagaggtcagaagttcgacgtgggtcccactgg

SEQ ID NO: 295401 - DNA, 33 bp, Homo sapien
taaatttcctgtgtaacgggggtatagatctaa

SEQ ID NO: 295402 - DNA, 33 bp, Homo sapien
taaatttcctgtgtaatgggggtatagatctaa

SEQ ID NO: 295403 - DNA, 33 bp, Homo sapien
ttggatgtcatgatgacgtcagattactggaaa

SEQ ID NO: 295404 - DNA, 33 bp, Homo sapien
ttggatgtcatgatgatgtcagattactggaaa

SEQ ID NO: 295405 - DNA, 33 bp, Homo sapien
atttgagatgttgtaaaaaattgccacagactg

SEQ ID NO: 295406 - DNA, 33 bp, Homo sapien
atttgagatgttgtaacaaattgccacagactg

SEQ ID NO: 295407 - DNA, 33 bp, Homo sapien
gcattgcactcgaaccagatcgcctccatgaag

SEQ ID NO: 295408 - DNA, 33 bp, Homo sapien
gcattgcactcgaacctgatcgcctccatgaag

SEQ ID NO: 295409 - DNA, 33 bp, Homo sapien
aacattcctccaaaaaagggggcagcctacaaa

SEQ ID NO: 295410 - DNA, 33 bp, Homo sapien
aacattcctccaaaaaggggggcagcctacaaa

SEQ ID NO: 295411 - DNA, 33 bp, Homo sapien
aatcctcactgatgtcaatttcacgtatatgga

SEQ ID NO: 295412 - DNA, 33 bp, Homo sapien
aatcctcactgatgtcgatttcacgtatatgga

SEQ ID NO: 295413 - DNA, 33 bp, Homo sapien
tttttcaacatttcccaggagcgctctgtttct

SEQ ID NO: 295414 - DNA, 33 bp, Homo sapien
tttttcaacatttcccgggagcgctctgtttct

SEQ ID NO: 295415 - DNA, 33 bp, Homo sapien
tggcagctctcttcagaatatgcggcgctgtgg

SEQ ID NO: 295416 - DNA, 33 bp, Homo sapien
tggcagctctcttcagtatatgcggcgctgtgg

SEQ ID NO: 295417 - DNA, 33 bp, Homo sapien
agagtgaaaaagtgcacggaaagagccagcata

SEQ ID NO: 295418 - DNA, 33 bp, Homo sapien
agagtgaaaaagtgcatggaaagagccagcata

SEQ ID NO: 295419 - DNA, 33 bp, Homo sapien
aagttcacaattcatagaaatgtacatccaaat

SEQ ID NO: 295420 - DNA, 33 bp, Homo sapien
aagttcacaattcatataaatgtacatccaaat

SEQ ID NO: 295421 - DNA, 33 bp, Homo sapien
tgttttaatactgagacaggcttataaaaccaa

SEQ ID NO: 295422 - DNA, 33 bp, Homo sapien
tgttttaatactgagataggcttataaaaccaa

SEQ ID NO: 295423 - DNA, 33 bp, Homo sapien
caacagtttgaagctactaataatctttagtat

SEQ ID NO: 295424 - DNA, 33 bp, Homo sapien
caacagtttgaagctattaataatctttagtat

SEQ ID NO: 295425 - DNA, 33 bp, Homo sapien
aaactgaaattattaccactgaaaataacatga

SEQ ID NO: 295426 - DNA, 33 bp, Homo sapien
aaactgaaattattactactgaaaataacatga

SEQ ID NO: 295427 - DNA, 33 bp, Homo sapien
catcatctcaaaagggaatggtttaagcacagt

SEQ ID NO: 295428 - DNA, 33 bp, Homo sapien
catcatctcaaaagggtatggtttaagcacagt

SEQ ID NO: 295429 - DNA, 33 bp, Homo sapien
gtgatcaaggcgatcaaggcgtcccgggagcta

SEQ ID NO: 295430 - DNA, 33 bp, Homo sapien
gtgatcaaggcgatcacggcgtcccgggagcta

SEQ ID NO: 295431 - DNA, 33 bp, Homo sapien
gcgacctgttttattcacctttcacgtgtatct

SEQ ID NO: 295432 - DNA, 33 bp, Homo sapien
gcgacctgttttattcgcctttcacgtgtatct

SEQ ID NO: 295433 - DNA, 33 bp, Homo sapien
gggctgccacacagaaatgccatttttaatttg

SEQ ID NO: 295434 - DNA, 33 bp, Homo sapien
gggctgccacacagaagtgccatttttaatttg

SEQ ID NO: 295435 - DNA, 33 bp, Homo sapien
ccaataccctagacacacaaagaggaggttggg

SEQ ID NO: 295436 - DNA, 33 bp, Homo sapien
ccaataccctagacacgcaaagaggaggttggg

SEQ ID NO: 295437 - DNA, 33 bp, Homo sapien
ttaatcctcaagtgcaatcagttttctttagaa

SEQ ID NO: 295438 - DNA, 33 bp, Homo sapien
ttaatcctcaagtgcagtcagttttctttagaa

SEQ ID NO: 295439 - DNA, 33 bp, Homo sapien
atatcaggggagatcaggaataggagggatttg

SEQ ID NO: 295440 - DNA, 33 bp, Homo sapien
atatcaggggagatcatgaataggagggatttg

SEQ ID NO: 295441 - DNA, 33 bp, Homo sapien
cctctcccccaaggaacaatctagagactggtg

SEQ ID NO: 295442 - DNA, 33 bp, Homo sapien
cctctcccccaaggaagaatctagagactggtg

SEQ ID NO: 295443 - DNA, 33 bp, Homo sapien
caatagacactgatggcaaagcattaaggctag

SEQ ID NO: 295444 - DNA, 33 bp, Homo sapien
caatagacactgatggtaaagcattaaggctag

SEQ ID NO: 295445 - DNA, 33 bp, Homo sapien
ccaccactgccttgtcacagtacttaggactag

SEQ ID NO: 295446 - DNA, 33 bp, Homo sapien
ccaccactgccttgtcgcagtacttaggactag

SEQ ID NO: 295447 - DNA, 33 bp, Homo sapien
caacaaatacatatcaaatatactcggtagggg

SEQ ID NO: 295448 - DNA, 33 bp, Homo sapien
caacaaatacatatcagatatactcggtagggg

SEQ ID NO: 295449 - DNA, 33 bp, Homo sapien
taacagatactgccaacgcatttagtaagaata

SEQ ID NO: 295450 - DNA, 33 bp, Homo sapien
taacagatactgccaatgcatttagtaagaata

SEQ ID NO: 295451 - DNA, 33 bp, Homo sapien
atttcccaccaaacgaacgtaatttaggtcaat

SEQ ID NO: 295452 - DNA, 33 bp, Homo sapien
atttcccaccaaacgaccgtaatttaggtcaat

SEQ ID NO: 295453 - DNA, 33 bp, Homo sapien
cctcctccatcaaacccggtatcccctacctct

SEQ ID NO: 295454 - DNA, 33 bp, Homo sapien
cctcctccatcaaacctggtatcccctacctct

SEQ ID NO: 295455 - DNA, 33 bp, Homo sapien
tatttgaaatacccaacaataaccacgttggag

SEQ ID NO: 295456 - DNA, 33 bp, Homo sapien
tatttgaaatacccaataataaccacgttggag

SEQ ID NO: 295457 - DNA, 33 bp, Homo sapien
aaattactcatttctcaatgctttgcagatcca

SEQ ID NO: 295458 - DNA, 33 bp, Homo sapien
aaattactcatttctcgatgctttgcagatcca

SEQ ID NO: 295459 - DNA, 33 bp, Homo sapien
ctgggaatgatcaagacggcctcataaagattt

SEQ ID NO: 295460 - DNA, 33 bp, Homo sapien
ctgggaatgatcaagatggcctcataaagattt

SEQ ID NO: 295461 - DNA, 33 bp, Homo sapien
cctggaagtggggcccaacattcttctgattat

SEQ ID NO: 295462 - DNA, 33 bp, Homo sapien
cctggaagtggggcccgacattcttctgattat

SEQ ID NO: 295463 - DNA, 33 bp, Homo sapien
gcagccaatcctaaagcataatcagaagaatgt

SEQ ID NO: 295464 - DNA, 33 bp, Homo sapien
gcagccaatcctaaagtataatcagaagaatgt

SEQ ID NO: 295465 - DNA, 33 bp, Homo sapien
ctttaggattggctgccgaaaatcaggccttct

SEQ ID NO: 295466 - DNA, 33 bp, Homo sapien
ctttaggattggctgctgaaaatcaggccttct

SEQ ID NO: 295467 - DNA, 33 bp, Homo sapien
ccctgcccaggcataaccctaacactcatgcac

SEQ ID NO: 295468 - DNA, 33 bp, Homo sapien
ccctgcccaggcataatcctaacactcatgcac

SEQ ID NO: 295469 - DNA, 33 bp, Homo sapien
ctggcaccatcgtcttaaacaaagtggactcca

SEQ ID NO: 295470 - DNA, 33 bp, Homo sapien
ctggcaccatcgtcttgaacaaagtggactcca

SEQ ID NO: 295471 - DNA, 33 bp, Homo sapien
aaagctggcttttctgaactttactaatgtaat

SEQ ID NO: 295472 - DNA, 33 bp, Homo sapien
aaagctggcttttctggactttactaatgtaat

SEQ ID NO: 295473 - DNA, 33 bp, Homo sapien
cttagcaactacagcacaaactcattctcctaa

SEQ ID NO: 295474 - DNA, 33 bp, Homo sapien
cttagcaactacagcataaactcattctcctaa

SEQ ID NO: 295475 - DNA, 33 bp, Homo sapien
ggctactctgacttcaaacccttttacagaacc

SEQ ID NO: 295476 - DNA, 33 bp, Homo sapien
ggctactctgacttcagacccttttacagaacc

SEQ ID NO: 295477 - DNA, 33 bp, Homo sapien
aaggcattttaggtaaccccagaataagacaac

SEQ ID NO: 295478 - DNA, 33 bp, Homo sapien
aaggcattttaggtaatcccagaataagacaac

SEQ ID NO: 295479 - DNA, 33 bp, Homo sapien
ttatgaaaagactgggccaaaatcttgggtggc

SEQ ID NO: 295480 - DNA, 33 bp, Homo sapien
ttatgaaaagactgggtcaaaatcttgggtggc

SEQ ID NO: 295481 - DNA, 33 bp, Homo sapien
atttaggacttgaccactagatgagtaaccctg

SEQ ID NO: 295482 - DNA, 33 bp, Homo sapien
atttaggacttgaccattagatgagtaaccctg

SEQ ID NO: 295483 - DNA, 33 bp, Homo sapien
gagggatcaaaaactacgtaacaggtagagcgt

SEQ ID NO: 295484 - DNA, 33 bp, Homo sapien
gagggatcaaaaactatgtaacaggtagagcgt

SEQ ID NO: 295485 - DNA, 33 bp, Homo sapien
ataataaatctaagcagcatccagccttgcgca

SEQ ID NO: 295486 - DNA, 33 bp, Homo sapien
ataataaatctaagcatcatccagccttgcgca

SEQ ID NO: 295487 - DNA, 33 bp, Homo sapien
gttccattgattgagcaaaattataaccagttc

SEQ ID NO: 295488 - DNA, 33 bp, Homo sapien
gttccattgattgagcgaaattataaccagttc

SEQ ID NO: 295489 - DNA, 33 bp, Homo sapien
gtgtttaaaaagcagtaaagtcagaccagtttc

SEQ ID NO: 295490 - DNA, 33 bp, Homo sapien
gtgtttaaaaagcagtgaagtcagaccagtttc

SEQ ID NO: 295491 - DNA, 33 bp, Homo sapien
ttaataaatatctctggaattcaggcagttcaa

SEQ ID NO: 295492 - DNA, 33 bp, Homo sapien
ttaataaatatctctgtaattcaggcagttcaa

SEQ ID NO: 295493 - DNA, 33 bp, Homo sapien
ctgacctgacagaataaatggaatgttctatgc

SEQ ID NO: 295494 - DNA, 33 bp, Homo sapien
ctgacctgacagaatagatggaatgttctatgc

SEQ ID NO: 295495 - DNA, 33 bp, Homo sapien
tcattaatttgaaaaaacagtagtgagatcaat

SEQ ID NO: 295496 - DNA, 33 bp, Homo sapien
tcattaatttgaaaaagcagtagtgagatcaat

SEQ ID NO: 295497 - DNA, 33 bp, Homo sapien
tgtcttaattaagcaccggtattttgcattgag

SEQ ID NO: 295498 - DNA, 33 bp, Homo sapien
tgtcttaattaagcactggtattttgcattgag

SEQ ID NO: 295499 - DNA, 33 bp, Homo sapien
atcttagtttctagccaaagatctcaatatttt

SEQ ID NO: 295500 - DNA, 33 bp, Homo sapien
atcttagtttctagccgaagatctcaatatttt

SEQ ID NO: 295501 - DNA, 33 bp, Homo sapien
tgtcctcctctagagaaaattgaccagatgcca

SEQ ID NO: 295502 - DNA, 33 bp, Homo sapien
tgtcctcctctagagacaattgaccagatgcca

SEQ ID NO: 295503 - DNA, 33 bp, Homo sapien
ccatttccctgtttgacgtcaggtttttcccga

SEQ ID NO: 295504 - DNA, 33 bp, Homo sapien
ccatttccctgtttgatgtcaggtttttcccga

SEQ ID NO: 295505 - DNA, 33 bp, Homo sapien
gtgtcagctccaggcaaatatgtagacttgaga

SEQ ID NO: 295506 - DNA, 33 bp, Homo sapien
gtgtcagctccaggcagatatgtagacttgaga

SEQ ID NO: 295507 - DNA, 33 bp, Homo sapien
ggcccatgcaggcgtgcagtagatgggaagtga

SEQ ID NO: 295508 - DNA, 33 bp, Homo sapien
ggcccatgcaggcgtgtagtagatgggaagtga

SEQ ID NO: 295509 - DNA, 33 bp, Homo sapien
aggatctaaccacgcactcactatgcattcaac

SEQ ID NO: 295510 - DNA, 33 bp, Homo sapien
aggatctaaccacgcattcactatgcattcaac

SEQ ID NO: 295511 - DNA, 33 bp, Homo sapien
tctctcaatgacatacactggtatttgaacagt

SEQ ID NO: 295512 - DNA, 33 bp, Homo sapien
tctctcaatgacatacgctggtatttgaacagt

SEQ ID NO: 295513 - DNA, 33 bp, Homo sapien
gatttgtagaaatagaaatatggttcctaaaga

SEQ ID NO: 295514 - DNA, 33 bp, Homo sapien
gatttgtagaaatagacatatggttcctaaaga

SEQ ID NO: 295515 - DNA, 33 bp, Homo sapien
gtctcaagagttgcgacggttttataaatggga

SEQ ID NO: 295516 - DNA, 33 bp, Homo sapien
gtctcaagagttgcgatggttttataaatggga

SEQ ID NO: 295517 - DNA, 33 bp, Homo sapien
tgatctgcttcacttcaatgtgttccccaatgg

SEQ ID NO: 295518 - DNA, 33 bp, Homo sapien
tgatctgcttcacttcgatgtgttccccaatgg

SEQ ID NO: 295519 - DNA, 33 bp, Homo sapien
caggttttcagtgacacgagtgtaagaagcact

SEQ ID NO: 295520 - DNA, 33 bp, Homo sapien
caggttttcagtgacatgagtgtaagaagcact

SEQ ID NO: 295521 - DNA, 33 bp, Homo sapien
tgagatatatagagacaacactgctggatggag

SEQ ID NO: 295522 - DNA, 33 bp, Homo sapien
tgagatatatagagacgacactgctggatggag

SEQ ID NO: 295523 - DNA, 33 bp, Homo sapien
ggctgtgcactgatagacacagtatccgctcat

SEQ ID NO: 295524 - DNA, 33 bp, Homo sapien
ggctgtgcactgatagccacagtatccgctcat

SEQ ID NO: 295525 - DNA, 33 bp, Homo sapien
tggcggtacaacgagaatcagtcttgaaggcca

SEQ ID NO: 295526 - DNA, 33 bp, Homo sapien
tggcggtacaacgagagtcagtcttgaaggcca

SEQ ID NO: 295527 - DNA, 33 bp, Homo sapien
tctgttccaaagttaaagcacccggtatcttta

SEQ ID NO: 295528 - DNA, 33 bp, Homo sapien
tctgttccaaagttaaggcacccggtatcttta

SEQ ID NO: 295529 - DNA, 33 bp, Homo sapien
actcttctcccagccacgcctcttgacaggatc

SEQ ID NO: 295530 - DNA, 33 bp, Homo sapien
actcttctcccagccatgcctcttgacaggatc

SEQ ID NO: 295531 - DNA, 33 bp, Homo sapien
taatctaggactatgacgaaaccctcaggccca

SEQ ID NO: 295532 - DNA, 33 bp, Homo sapien
taatctaggactatgatgaaaccctcaggccca

SEQ ID NO: 295533 - DNA, 33 bp, Homo sapien
tgcctctctcccccacacaatctgaatgccaca

SEQ ID NO: 295534 - DNA, 33 bp, Homo sapien
tgcctctctcccccacgcaatctgaatgccaca

SEQ ID NO: 295535 - DNA, 33 bp, Homo sapien
ggactaacaaaaataaccacctccagattggaa

SEQ ID NO: 295536 - DNA, 33 bp, Homo sapien
ggactaacaaaaataatcacctccagattggaa

SEQ ID NO: 295537 - DNA, 33 bp, Homo sapien
tcagctggtgtttccaatatgttcaaacagcat

SEQ ID NO: 295538 - DNA, 33 bp, Homo sapien
tcagctggtgtttccagtatgttcaaacagcat

SEQ ID NO: 295539 - DNA, 33 bp, Homo sapien
ttgtgtctctgtacaaactccgtctcaaaaaaa

SEQ ID NO: 295540 - DNA, 33 bp, Homo sapien
ttgtgtctctgtacaatctccgtctcaaaaaaa

SEQ ID NO: 295541 - DNA, 33 bp, Homo sapien
ggtatgatagatgttacgttgaaaatttagcac

SEQ ID NO: 295542 - DNA, 33 bp, Homo sapien
ggtatgatagatgttatgttgaaaatttagcac

SEQ ID NO: 295543 - DNA, 33 bp, Homo sapien
gaacaatgctctaacactattttaggcattcta

SEQ ID NO: 295544 - DNA, 33 bp, Homo sapien
gaacaatgctctaacattattttaggcattcta

SEQ ID NO: 295545 - DNA, 33 bp, Homo sapien
gtaaaatcatctccaaatcaacattaatgcgtt

SEQ ID NO: 295546 - DNA, 33 bp, Homo sapien
gtaaaatcatctccaactcaacattaatgcgtt

SEQ ID NO: 295547 - DNA, 33 bp, Homo sapien
tcggcctttcacgggaactgggaacttaaaatg

SEQ ID NO: 295548 - DNA, 33 bp, Homo sapien
tcggcctttcacgggagctgggaacttaaaatg

SEQ ID NO: 295549 - DNA, 33 bp, Homo sapien
gggcgaggaggcgaacaagacaaccttagtatt

SEQ ID NO: 295550 - DNA, 33 bp, Homo sapien
gggcgaggaggcgaacgagacaaccttagtatt

SEQ ID NO: 295551 - DNA, 33 bp, Homo sapien
atgaagaggtttggtacgtgaattcggtgcagg

SEQ ID NO: 295552 - DNA, 33 bp, Homo sapien
atgaagaggtttggtaggtgaattcggtgcagg

SEQ ID NO: 295553 - DNA, 33 bp, Homo sapien
gatgtaaaaacaacagaattcaaatgaaatcat

SEQ ID NO: 295554 - DNA, 33 bp, Homo sapien
gatgtaaaaacaacaggattcaaatgaaatcat

SEQ ID NO: 295555 - DNA, 33 bp, Homo sapien
cacgcacgcacactcaaagaagggggcgatccc

SEQ ID NO: 295556 - DNA, 33 bp, Homo sapien
cacgcacgcacactcagagaagggggcgatccc

SEQ ID NO: 295557 - DNA, 33 bp, Homo sapien
tcctgaactgacctacacaggaaagagtccttg

SEQ ID NO: 295558 - DNA, 33 bp, Homo sapien
tcctgaactgacctacgcaggaaagagtccttg

SEQ ID NO: 295559 - DNA, 33 bp, Homo sapien
atcctagctgcttccgaaacaaaacaagccaaa

SEQ ID NO: 295560 - DNA, 33 bp, Homo sapien
atcctagctgcttccggaacaaaacaagccaaa

SEQ ID NO: 295561 - DNA, 33 bp, Homo sapien
ctccactgttagtccaaggtcaagaccaagaag

SEQ ID NO: 295562 - DNA, 33 bp, Homo sapien
ctccactgttagtccacggtcaagaccaagaag

SEQ ID NO: 295563 - DNA, 33 bp, Homo sapien
gtaggaagggtaaaccaaaaagcgcaggagagg

SEQ ID NO: 295564 - DNA, 33 bp, Homo sapien
gtaggaagggtaaaccgaaaagcgcaggagagg

SEQ ID NO: 295565 - DNA, 33 bp, Homo sapien
gcttttttgtaaaaccggctcctttgaagtgca

SEQ ID NO: 295566 - DNA, 33 bp, Homo sapien
gcttttttgtaaaacctgctcctttgaagtgca

SEQ ID NO: 295567 - DNA, 33 bp, Homo sapien
tcatgaactctgaaaaataaaggctaagatgac

SEQ ID NO: 295568 - DNA, 33 bp, Homo sapien
tcatgaactctgaaaagtaaaggctaagatgac

SEQ ID NO: 295569 - DNA, 33 bp, Homo sapien
tgctgctgcagctatgcaaaggggaaaaggagg

SEQ ID NO: 295570 - DNA, 33 bp, Homo sapien
tgctgctgcagctatgtaaaggggaaaaggagg

SEQ ID NO: 295571 - DNA, 33 bp, Homo sapien
cagaggagcaagaagaaattggctgtagagagt

SEQ ID NO: 295572 - DNA, 33 bp, Homo sapien
cagaggagcaagaagacattggctgtagagagt

SEQ ID NO: 295573 - DNA, 33 bp, Homo sapien
gatcaacactagttcacatctacctggctttag

SEQ ID NO: 295574 - DNA, 33 bp, Homo sapien
gatcaacactagttcatatctacctggctttag

SEQ ID NO: 295575 - DNA, 33 bp, Homo sapien
tctgagaagtagttgcactgctaggaaatggta

SEQ ID NO: 295576 - DNA, 33 bp, Homo sapien
tctgagaagtagttgcgctgctaggaaatggta

SEQ ID NO: 295577 - DNA, 33 bp, Homo sapien
caagtagacaaagatagggatccactgattcta

SEQ ID NO: 295578 - DNA, 33 bp, Homo sapien
caagtagacaaagatatggatccactgattcta

SEQ ID NO: 295579 - DNA, 33 bp, Homo sapien
aacaccgactcaaaacaaccaacaaaagaatgt

SEQ ID NO: 295580 - DNA, 33 bp, Homo sapien
aacaccgactcaaaaccaccaacaaaagaatgt

SEQ ID NO: 295581 - DNA, 33 bp, Homo sapien
tttgaaatgcatattgaaacctacataagggct

SEQ ID NO: 295582 - DNA, 33 bp, Homo sapien
tttgaaatgcatattggaacctacataagggct

SEQ ID NO: 295583 - DNA, 33 bp, Homo sapien
tctgaccgaaacctaactaaagatgaggaggac

SEQ ID NO: 295584 - DNA, 33 bp, Homo sapien
tctgaccgaaacctaattaaagatgaggaggac

SEQ ID NO: 295585 - DNA, 33 bp, Homo sapien
ggcagatagagagaaacgttgggcccacggaaa

SEQ ID NO: 295586 - DNA, 33 bp, Homo sapien
ggcagatagagagaaatgttgggcccacggaaa

SEQ ID NO: 295587 - DNA, 33 bp, Homo sapien
atcacagaaggaccaccgcttactctttgttaa

SEQ ID NO: 295588 - DNA, 33 bp, Homo sapien
atcacagaaggaccactgcttactctttgttaa

SEQ ID NO: 295589 - DNA, 33 bp, Homo sapien
atgttttccaagaataggaaggtggaagcatct

SEQ ID NO: 295590 - DNA, 33 bp, Homo sapien
atgttttccaagaatatgaaggtggaagcatct

SEQ ID NO: 295591 - DNA, 33 bp, Homo sapien
ttggaagtgcctgcacaatgccctaaggattct

SEQ ID NO: 295592 - DNA, 33 bp, Homo sapien
ttggaagtgcctgcacgatgccctaaggattct

SEQ ID NO: 295593 - DNA, 33 bp, Homo sapien
tgagacttactctaccacaagaatagtatgggg

SEQ ID NO: 295594 - DNA, 33 bp, Homo sapien
tgagacttactctaccgcaagaatagtatgggg

SEQ ID NO: 295595 - DNA, 33 bp, Homo sapien
cttttatggggcatacaactcttccaaacattg

SEQ ID NO: 295596 - DNA, 33 bp, Homo sapien
cttttatggggcatacgactcttccaaacattg

SEQ ID NO: 295597 - DNA, 33 bp, Homo sapien
agacagagctggaaacaaggagaaactgataaa

SEQ ID NO: 295598 - DNA, 33 bp, Homo sapien
agacagagctggaaacgaggagaaactgataaa

SEQ ID NO: 295599 - DNA, 33 bp, Homo sapien
aatctccttgaacaataacagtgttgacacctg

SEQ ID NO: 295600 - DNA, 33 bp, Homo sapien
aatctccttgaacaatgacagtgttgacacctg

SEQ ID NO: 295601 - DNA, 33 bp, Homo sapien
acaagaattaaaatcccaacaacctagtgaggg

SEQ ID NO: 295602 - DNA, 33 bp, Homo sapien
acaagaattaaaatccgaacaacctagtgaggg

SEQ ID NO: 295603 - DNA, 33 bp, Homo sapien
ggaggccatgaaagaacggggaagactggctct

SEQ ID NO: 295604 - DNA, 33 bp, Homo sapien
ggaggccatgaaagaatggggaagactggctct

SEQ ID NO: 295605 - DNA, 33 bp, Homo sapien
atctctagcccaggacaaggcatttccaaggca

SEQ ID NO: 295606 - DNA, 33 bp, Homo sapien
atctctagcccaggacgaggcatttccaaggca

SEQ ID NO: 295607 - DNA, 33 bp, Homo sapien
gaactgctgagaacccaggatgctgaagagcag

SEQ ID NO: 295608 - DNA, 33 bp, Homo sapien
gaactgctgagaacccgggatgctgaagagcag

SEQ ID NO: 295609 - DNA, 33 bp, Homo sapien
gtgcaggtcacagttgcaccacccagcacaaat

SEQ ID NO: 295610 - DNA, 33 bp, Homo sapien
gtgcaggtcacagttgtaccacccagcacaaat

SEQ ID NO: 295611 - DNA, 33 bp, Homo sapien
acgccaagtgacaaacaagatcaacattaccta

SEQ ID NO: 295612 - DNA, 33 bp, Homo sapien
acgccaagtgacaaacgagatcaacattaccta

SEQ ID NO: 295613 - DNA, 33 bp, Homo sapien
atatgtttacttttacaccataaactccagctg

SEQ ID NO: 295614 - DNA, 33 bp, Homo sapien
atatgtttacttttactccataaactccagctg

SEQ ID NO: 295615 - DNA, 33 bp, Homo sapien
gtcaggagaacattccaagaatctggattccat

SEQ ID NO: 295616 - DNA, 33 bp, Homo sapien
gtcaggagaacattccgagaatctggattccat

SEQ ID NO: 295617 - DNA, 33 bp, Homo sapien
ctgcttacttgagcgaacttgtcaatcgcaacc

SEQ ID NO: 295618 - DNA, 33 bp, Homo sapien
ctgcttacttgagcgagcttgtcaatcgcaacc

SEQ ID NO: 295619 - DNA, 33 bp, Homo sapien
ggttggaggcagataacgagaaggcaagaaaat

SEQ ID NO: 295620 - DNA, 33 bp, Homo sapien
ggttggaggcagataatgagaaggcaagaaaat

SEQ ID NO: 295621 - DNA, 33 bp, Homo sapien
accacaatttattaaaagtcccacttcaagaga

SEQ ID NO: 295622 - DNA, 33 bp, Homo sapien
accacaatttattaaacgtcccacttcaagaga

SEQ ID NO: 295623 - DNA, 33 bp, Homo sapien
tcttggagagccaaggccattgcgtggagaaag

SEQ ID NO: 295624 - DNA, 33 bp, Homo sapien
tcttggagagccaagggcattgcgtggagaaag

SEQ ID NO: 295625 - DNA, 33 bp, Homo sapien
cctctaaaggaccgctcagataaacccaactgg

SEQ ID NO: 295626 - DNA, 33 bp, Homo sapien
cctctaaaggaccgctgagataaacccaactgg

SEQ ID NO: 295627 - DNA, 33 bp, Homo sapien
aaacactgttggggtgaataactcttagaggtt

SEQ ID NO: 295628 - DNA, 33 bp, Homo sapien
aaacactgttggggtggataactcttagaggtt

SEQ ID NO: 295629 - DNA, 33 bp, Homo sapien
ttggatttttggattacgaatggtcaacctgaa

SEQ ID NO: 295630 - DNA, 33 bp, Homo sapien
ttggatttttggattaggaatggtcaacctgaa

SEQ ID NO: 295631 - DNA, 33 bp, Homo sapien
gctcaaccagtaagtacgtgcagatatttgaaa

SEQ ID NO: 295632 - DNA, 33 bp, Homo sapien
gctcaaccagtaagtatgtgcagatatttgaaa

SEQ ID NO: 295633 - DNA, 33 bp, Homo sapien
gtcttctaggcacacaatgaattatctatctgc

SEQ ID NO: 295634 - DNA, 33 bp, Homo sapien
gtcttctaggcacacattgaattatctatctgc

SEQ ID NO: 295635 - DNA, 33 bp, Homo sapien
tttattcaaggtcttcactggcaaccttaagta

SEQ ID NO: 295636 - DNA, 33 bp, Homo sapien
tttattcaaggtcttcgctggcaaccttaagta

SEQ ID NO: 295637 - DNA, 33 bp, Homo sapien
cagacagcatttgaaccatacttaggaagcaaa

SEQ ID NO: 295638 - DNA, 33 bp, Homo sapien
cagacagcatttgaacgatacttaggaagcaaa

SEQ ID NO: 295639 - DNA, 33 bp, Homo sapien
ggagaaggaaatacaccgcgggaccgaattcct

SEQ ID NO: 295640 - DNA, 33 bp, Homo sapien
ggagaaggaaatacactgcgggaccgaattcct

SEQ ID NO: 295641 - DNA, 33 bp, Homo sapien
atgattttatagaggacattttcacaagaggaa

SEQ ID NO: 295642 - DNA, 33 bp, Homo sapien
atgattttatagaggagattttcacaagaggaa

SEQ ID NO: 295643 - DNA, 33 bp, Homo sapien
tttactcgttgaacgaaaaagagaatgagccct

SEQ ID NO: 295644 - DNA, 33 bp, Homo sapien
tttactcgttgaacgacaaagagaatgagccct

SEQ ID NO: 295645 - DNA, 33 bp, Homo sapien
aaaacagtgtctggcacaaagtaagcactacat

SEQ ID NO: 295646 - DNA, 33 bp, Homo sapien
aaaacagtgtctggcagaaagtaagcactacat

SEQ ID NO: 295647 - DNA, 33 bp, Homo sapien
atcgttctcaatctgcaagattcagtcacacaa

SEQ ID NO: 295648 - DNA, 33 bp, Homo sapien
atcgttctcaatctgcgagattcagtcacacaa

SEQ ID NO: 295649 - DNA, 33 bp, Homo sapien
aatctggccatcaagacgttctgtgaaatgggg

SEQ ID NO: 295650 - DNA, 33 bp, Homo sapien
aatctggccatcaagatgttctgtgaaatgggg

SEQ ID NO: 295651 - DNA, 33 bp, Homo sapien
tgcataccatctgacacgttcaacagtttaaaa

SEQ ID NO: 295652 - DNA, 33 bp, Homo sapien
tgcataccatctgacatgttcaacagtttaaaa

SEQ ID NO: 295653 - DNA, 33 bp, Homo sapien
gctcagcacagtcagcgcaagataagttaacca

SEQ ID NO: 295654 - DNA, 33 bp, Homo sapien
gctcagcacagtcagctcaagataagttaacca

SEQ ID NO: 295655 - DNA, 33 bp, Homo sapien
ttctcactgttctagaagctggtaagtccaaga

SEQ ID NO: 295656 - DNA, 33 bp, Homo sapien
ttctcactgttctagaggctggtaagtccaaga

SEQ ID NO: 295657 - DNA, 33 bp, Homo sapien
gtgcctggtcacagaacttctccagggcatccc

SEQ ID NO: 295658 - DNA, 33 bp, Homo sapien
gtgcctggtcacagaagttctccagggcatccc

SEQ ID NO: 295659 - DNA, 33 bp, Homo sapien
gttatagcatggactacgaatggactgagacag

SEQ ID NO: 295660 - DNA, 33 bp, Homo sapien
gttatagcatggactatgaatggactgagacag

SEQ ID NO: 295661 - DNA, 33 bp, Homo sapien
tgcccatatcacagaacccttcacgcagtaggt

SEQ ID NO: 295662 - DNA, 33 bp, Homo sapien
tgcccatatcacagaatccttcacgcagtaggt

SEQ ID NO: 295663 - DNA, 33 bp, Homo sapien
ctcactcttgcatgaccggctccaatagaagca

SEQ ID NO: 295664 - DNA, 33 bp, Homo sapien
ctcactcttgcatgactggctccaatagaagca

SEQ ID NO: 295665 - DNA, 33 bp, Homo sapien
gtgaagaataggtgacagagaaaaaacatgaga

SEQ ID NO: 295666 - DNA, 33 bp, Homo sapien
gtgaagaataggtgacggagaaaaaacatgaga

SEQ ID NO: 295667 - DNA, 33 bp, Homo sapien
gggccttgcaattcaccgagttaaggagcagag

SEQ ID NO: 295668 - DNA, 33 bp, Homo sapien
gggccttgcaattcactgagttaaggagcagag

SEQ ID NO: 295669 - DNA, 33 bp, Homo sapien
tcacagtgagacaaacacaggtcataatgagag

SEQ ID NO: 295670 - DNA, 33 bp, Homo sapien
tcacagtgagacaaacccaggtcataatgagag

SEQ ID NO: 295671 - DNA, 33 bp, Homo sapien
aatgctggtcaaaaggcatgcagaggaggcccc

SEQ ID NO: 295672 - DNA, 33 bp, Homo sapien
aatgctggtcaaaaggtatgcagaggaggcccc

SEQ ID NO: 295673 - DNA, 33 bp, Homo sapien
attgcagagggtccacaagagagtgtttcaggt

SEQ ID NO: 295674 - DNA, 33 bp, Homo sapien
attgcagagggtccacgagagagtgtttcaggt

SEQ ID NO: 295675 - DNA, 33 bp, Homo sapien
aactgaccatcctcaaaatcaacgaatatttct

SEQ ID NO: 295676 - DNA, 33 bp, Homo sapien
aactgaccatcctcaagatcaacgaatatttct

SEQ ID NO: 295677 - DNA, 33 bp, Homo sapien
aaagatagaagcagttaaacgatactgttcatt

SEQ ID NO: 295678 - DNA, 33 bp, Homo sapien
aaagatagaagcagttcaacgatactgttcatt

SEQ ID NO: 295679 - DNA, 33 bp, Homo sapien
tcctgtttcttaggaaatagtacctctacatgg

SEQ ID NO: 295680 - DNA, 33 bp, Homo sapien
tcctgtttcttaggaagtagtacctctacatgg

SEQ ID NO: 295681 - DNA, 33 bp, Homo sapien
gaatggctatagcccaaaaaatggaaaatcaca

SEQ ID NO: 295682 - DNA, 33 bp, Homo sapien
gaatggctatagcccagaaaatggaaaatcaca

SEQ ID NO: 295683 - DNA, 33 bp, Homo sapien
gacttaggaggcctgaaattaggctgcccgagg

SEQ ID NO: 295684 - DNA, 33 bp, Homo sapien
gacttaggaggcctgagattaggctgcccgagg

SEQ ID NO: 295685 - DNA, 33 bp, Homo sapien
ctcaaaaggtaatttcaatgttatgcatttatt

SEQ ID NO: 295686 - DNA, 33 bp, Homo sapien
ctcaaaaggtaatttcgatgttatgcatttatt

SEQ ID NO: 295687 - DNA, 33 bp, Homo sapien
atagagtagaagatgacgtagtttattgaaaaa

SEQ ID NO: 295688 - DNA, 33 bp, Homo sapien
atagagtagaagatgatgtagtttattgaaaaa

SEQ ID NO: 295689 - DNA, 33 bp, Homo sapien
aatgttcagtcatccaaattaccatagctgcac

SEQ ID NO: 295690 - DNA, 33 bp, Homo sapien
aatgttcagtcatccacattaccatagctgcac

SEQ ID NO: 295691 - DNA, 33 bp, Homo sapien
catgtaacggagcaacaaaagaaatgtgtctgt

SEQ ID NO: 295692 - DNA, 33 bp, Homo sapien
catgtaacggagcaacgaaagaaatgtgtctgt

SEQ ID NO: 295693 - DNA, 33 bp, Homo sapien
gaacaaatgaaagtcacggagtgatggccacct

SEQ ID NO: 295694 - DNA, 33 bp, Homo sapien
gaacaaatgaaagtcatggagtgatggccacct

SEQ ID NO: 295695 - DNA, 33 bp, Homo sapien
cacaggctgcagtgtcaatgacttggactcacc

SEQ ID NO: 295696 - DNA, 33 bp, Homo sapien
cacaggctgcagtgtcgatgacttggactcacc

SEQ ID NO: 295697 - DNA, 33 bp, Homo sapien
taaaattgcataatcacaacttcctatgaatca

SEQ ID NO: 295698 - DNA, 33 bp, Homo sapien
taaaattgcataatcagaacttcctatgaatca

SEQ ID NO: 295699 - DNA, 33 bp, Homo sapien
tgttgtttagactgaactgagacgggcttcact

SEQ ID NO: 295700 - DNA, 33 bp, Homo sapien
tgttgtttagactgaattgagacgggcttcact

SEQ ID NO: 295701 - DNA, 33 bp, Homo sapien
tctacaaggttcagagacaagtgctctagttgc

SEQ ID NO: 295702 - DNA, 33 bp, Homo sapien
tctacaaggttcagagccaagtgctctagttgc

SEQ ID NO: 295703 - DNA, 33 bp, Homo sapien
acagcagtgaacaagacgggctgaaatgtctgt

SEQ ID NO: 295704 - DNA, 33 bp, Homo sapien
acagcagtgaacaagatgggctgaaatgtctgt

SEQ ID NO: 295705 - DNA, 33 bp, Homo sapien
catgcaaagccattatcaaactgacagagggct

SEQ ID NO: 295706 - DNA, 33 bp, Homo sapien
catgcaaagccattattaaactgacagagggct

SEQ ID NO: 295707 - DNA, 33 bp, Homo sapien
cacgggctgagaaggcagattatcaaggtggct

SEQ ID NO: 295708 - DNA, 33 bp, Homo sapien
cacgggctgagaaggccgattatcaaggtggct

SEQ ID NO: 295709 - DNA, 33 bp, Homo sapien
acacgtgagtgggggacggatttcaccttctgt

SEQ ID NO: 295710 - DNA, 33 bp, Homo sapien
acacgtgagtgggggatggatttcaccttctgt

SEQ ID NO: 295711 - DNA, 33 bp, Homo sapien
aggcggactttctacacgtccactggtgagact

SEQ ID NO: 295712 - DNA, 33 bp, Homo sapien
aggcggactttctacatgtccactggtgagact

SEQ ID NO: 295713 - DNA, 33 bp, Homo sapien
acagcatctataccacagaatagccctgacctt

SEQ ID NO: 295714 - DNA, 33 bp, Homo sapien
acagcatctataccacggaatagccctgacctt

SEQ ID NO: 295715 - DNA, 33 bp, Homo sapien
ccacactgtggatgaaactggaacatgttatgc

SEQ ID NO: 295716 - DNA, 33 bp, Homo sapien
ccacactgtggatgaacctggaacatgttatgc

SEQ ID NO: 295717 - DNA, 33 bp, Homo sapien
cgcctgaattctattcacagcttatttgcctca

SEQ ID NO: 295718 - DNA, 33 bp, Homo sapien
cgcctgaattctattcgcagcttatttgcctca

SEQ ID NO: 295719 - DNA, 33 bp, Homo sapien
catagctcagaattccaggaaatgggaaaggaa

SEQ ID NO: 295720 - DNA, 33 bp, Homo sapien
catagctcagaattccgggaaatgggaaaggaa

SEQ ID NO: 295721 - DNA, 33 bp, Homo sapien
tcccttttacctttcacagtcctgagacattcc

SEQ ID NO: 295722 - DNA, 33 bp, Homo sapien
tcccttttacctttcatagtcctgagacattcc

SEQ ID NO: 295723 - DNA, 33 bp, Homo sapien
agagacatttaaccaaacccctcttgtcagaaa

SEQ ID NO: 295724 - DNA, 33 bp, Homo sapien
agagacatttaaccaatcccctcttgtcagaaa

SEQ ID NO: 295725 - DNA, 33 bp, Homo sapien
acaaaagaaaagcatccacactgacttgcaggg

SEQ ID NO: 295726 - DNA, 33 bp, Homo sapien
acaaaagaaaagcatcgacactgacttgcaggg

SEQ ID NO: 295727 - DNA, 33 bp, Homo sapien
ttgcagggtagcagccagattaactcggtttgc

SEQ ID NO: 295728 - DNA, 33 bp, Homo sapien
ttgcagggtagcagccggattaactcggtttgc

SEQ ID NO: 295729 - DNA, 33 bp, Homo sapien
ccactgtcatttgccactatagaaaaaggagtc

SEQ ID NO: 295730 - DNA, 33 bp, Homo sapien
ccactgtcatttgccattatagaaaaaggagtc

SEQ ID NO: 295731 - DNA, 33 bp, Homo sapien
aagtccccacctatgcaagatgaatagtgcaga

SEQ ID NO: 295732 - DNA, 33 bp, Homo sapien
aagtccccacctatgctagatgaatagtgcaga

SEQ ID NO: 295733 - DNA, 33 bp, Homo sapien
ctaacgacaatgccataaacagataaacagtga

SEQ ID NO: 295734 - DNA, 33 bp, Homo sapien
ctaacgacaatgccatcaacagataaacagtga

SEQ ID NO: 295735 - DNA, 33 bp, Homo sapien
ctttttcttttttcccaatgagaccttccctag

SEQ ID NO: 295736 - DNA, 33 bp, Homo sapien
ctttttcttttttcccgatgagaccttccctag

SEQ ID NO: 295737 - DNA, 33 bp, Homo sapien
ttcttactgaacactcaatgccgtaaaagcaga

SEQ ID NO: 295738 - DNA, 33 bp, Homo sapien
ttcttactgaacactcgatgccgtaaaagcaga

SEQ ID NO: 295739 - DNA, 33 bp, Homo sapien
acactcttagtcattaagtttttagagaccact

SEQ ID NO: 295740 - DNA, 33 bp, Homo sapien
acactcttagtcattacgtttttagagaccact

SEQ ID NO: 295741 - DNA, 33 bp, Homo sapien
ctagcaaattccagaccaaagcatgtccattca

SEQ ID NO: 295742 - DNA, 33 bp, Homo sapien
ctagcaaattccagactaaagcatgtccattca

SEQ ID NO: 295743 - DNA, 33 bp, Homo sapien
cccagaacaaaggcggccaacattgtcaatttc

SEQ ID NO: 295744 - DNA, 33 bp, Homo sapien
cccagaacaaaggcggtcaacattgtcaatttc

SEQ ID NO: 295745 - DNA, 33 bp, Homo sapien
gtgctgatggcatggacagaaacaaccacctgg

SEQ ID NO: 295746 - DNA, 33 bp, Homo sapien
gtgctgatggcatggagagaaacaaccacctgg

SEQ ID NO: 295747 - DNA, 33 bp, Homo sapien
aacatacagcagtggccaggcgtcaagaagagg

SEQ ID NO: 295748 - DNA, 33 bp, Homo sapien
aacatacagcagtggcgaggcgtcaagaagagg

SEQ ID NO: 295749 - DNA, 33 bp, Homo sapien
accgctggcttccttaggccaacaaaatgaaag

SEQ ID NO: 295750 - DNA, 33 bp, Homo sapien
accgctggcttccttatgccaacaaaatgaaag

SEQ ID NO: 295751 - DNA, 33 bp, Homo sapien
aatcttttttgtggtcaagtacagggcctgaac

SEQ ID NO: 295752 - DNA, 33 bp, Homo sapien
aatcttttttgtggtcgagtacagggcctgaac

SEQ ID NO: 295753 - DNA, 33 bp, Homo sapien
cgaccttccatgatgacgttcacacactgatca

SEQ ID NO: 295754 - DNA, 33 bp, Homo sapien
cgaccttccatgatgatgttcacacactgatca

SEQ ID NO: 295755 - DNA, 33 bp, Homo sapien
actgatcataatgtcactcaggacacacactct

SEQ ID NO: 295756 - DNA, 33 bp, Homo sapien
actgatcataatgtcattcaggacacacactct

SEQ ID NO: 295757 - DNA, 33 bp, Homo sapien
gagatgcaactcatgcaaaggaagatgacggat

SEQ ID NO: 295758 - DNA, 33 bp, Homo sapien
gagatgcaactcatgcgaaggaagatgacggat

SEQ ID NO: 295759 - DNA, 33 bp, Homo sapien
taggtgaggttgcagactctagcttcagtgagc

SEQ ID NO: 295760 - DNA, 33 bp, Homo sapien
taggtgaggttgcagattctagcttcagtgagc

SEQ ID NO: 295761 - DNA, 33 bp, Homo sapien
tctgcagctgacattcaagcatcagttcctgat

SEQ ID NO: 295762 - DNA, 33 bp, Homo sapien
tctgcagctgacattcgagcatcagttcctgat

SEQ ID NO: 295763 - DNA, 33 bp, Homo sapien
tgttaatgagaacactcagcaaacatgagtcag

SEQ ID NO: 295764 - DNA, 33 bp, Homo sapien
tgttaatgagaacacttagcaaacatgagtcag

SEQ ID NO: 295765 - DNA, 33 bp, Homo sapien
gatccagtgcaatccgaagactggcagattccc

SEQ ID NO: 295766 - DNA, 33 bp, Homo sapien
gatccagtgcaatccgcagactggcagattccc

SEQ ID NO: 295767 - DNA, 33 bp, Homo sapien
ctgaccactgtccacacatatcaggatcagagt

SEQ ID NO: 295768 - DNA, 33 bp, Homo sapien
ctgaccactgtccacagatatcaggatcagagt

SEQ ID NO: 295769 - DNA, 33 bp, Homo sapien
ggtgttctgctgggcacaggagtgtagctgcta

SEQ ID NO: 295770 - DNA, 33 bp, Homo sapien
ggtgttctgctgggcataggagtgtagctgcta

SEQ ID NO: 295771 - DNA, 33 bp, Homo sapien
aaaatgtacaagagccacactgcgaagccctgt

SEQ ID NO: 295772 - DNA, 33 bp, Homo sapien
aaaatgtacaagagccgcactgcgaagccctgt

SEQ ID NO: 295773 - DNA, 33 bp, Homo sapien
ttcctactgatatctcagactctaaccattgtg

SEQ ID NO: 295774 - DNA, 33 bp, Homo sapien
ttcctactgatatctcggactctaaccattgtg

SEQ ID NO: 295775 - DNA, 33 bp, Homo sapien
tctatatttcctgcccccgtctcggaatcagcc

SEQ ID NO: 295776 - DNA, 33 bp, Homo sapien
tctatatttcctgcccgcgtctcggaatcagcc

SEQ ID NO: 295777 - DNA, 33 bp, Homo sapien
tatttttaggacaacacatataggatgaaatgc

SEQ ID NO: 295778 - DNA, 33 bp, Homo sapien
tatttttaggacaacatatataggatgaaatgc

SEQ ID NO: 295779 - DNA, 33 bp, Homo sapien
ccgttcttcctgaacagtcttggattcgatttc

SEQ ID NO: 295780 - DNA, 33 bp, Homo sapien
ccgttcttcctgaacattcttggattcgatttc

SEQ ID NO: 295781 - DNA, 33 bp, Homo sapien
tgttccccacgatggcaaagaggcagtctttgc

SEQ ID NO: 295782 - DNA, 33 bp, Homo sapien
tgttccccacgatggcgaagaggcagtctttgc

SEQ ID NO: 295783 - DNA, 33 bp, Homo sapien
accagccacactgcaagggaacgtcccacaggg

SEQ ID NO: 295784 - DNA, 33 bp, Homo sapien
accagccacactgcaatggaacgtcccacaggg

SEQ ID NO: 295785 - DNA, 33 bp, Homo sapien
agattaaaaggtccccagctctgtgtactttta

SEQ ID NO: 295786 - DNA, 33 bp, Homo sapien
agattaaaaggtccccggctctgtgtactttta

SEQ ID NO: 295787 - DNA, 33 bp, Homo sapien
caacgatgaaaagcacaccaaggctgggaggac

SEQ ID NO: 295788 - DNA, 33 bp, Homo sapien
caacgatgaaaagcacgccaaggctgggaggac

SEQ ID NO: 295789 - DNA, 33 bp, Homo sapien
ccaagtgagatcttccaaccacaaagcacctgc

SEQ ID NO: 295790 - DNA, 33 bp, Homo sapien
ccaagtgagatcttccgaccacaaagcacctgc

SEQ ID NO: 295791 - DNA, 33 bp, Homo sapien
ggactcactttaggaaccggaatgtcatacatc

SEQ ID NO: 295792 - DNA, 33 bp, Homo sapien
ggactcactttaggaagcggaatgtcatacatc

SEQ ID NO: 295793 - DNA, 33 bp, Homo sapien
aacactccgatattaacagaaacaggcaagtcc

SEQ ID NO: 295794 - DNA, 33 bp, Homo sapien
aacactccgatattaagagaaacaggcaagtcc

SEQ ID NO: 295795 - DNA, 33 bp, Homo sapien
catgagagttatttaccaccacaagagtagcac

SEQ ID NO: 295796 - DNA, 33 bp, Homo sapien
catgagagttatttactaccacaagagtagcac

SEQ ID NO: 295797 - DNA, 33 bp, Homo sapien; identical to SEQ ID NO: 295795

SEQ ID NO: 295798 - DNA, 33 bp, Homo sapien; identical to SEQ ID NO: 295796

SEQ ID NO: 295799 - DNA, 33 bp, Homo sapien
gaactgtgggtctgggacattaattatatggta

SEQ ID NO: 295800 - DNA, 33 bp, Homo sapien
gaactgtgggtctggggcattaattatatggta

SEQ ID NO: 295801 - DNA, 33 bp, Homo sapien
ttttgaaagcagtgggaaaaattcacagactga

SEQ ID NO: 295802 - DNA, 33 bp, Homo sapien
ttttgaaagcagtggggaaaattcacagactga

SEQ ID NO: 295803 - DNA, 33 bp, Homo sapien
tttccatagaatgtaacgttttgctctgtgata

SEQ ID NO: 295804 - DNA, 33 bp, Homo sapien
tttccatagaatgtaatgttttgctctgtgata

SEQ ID NO: 295805 - DNA, 33 bp, Homo sapien
aagcacctgtgagaacagagcaaagacagggca

SEQ ID NO: 295806 - DNA, 33 bp, Homo sapien
aagcacctgtgagaaccgagcaaagacagggca

SEQ ID NO: 295807 - DNA, 33 bp, Homo sapien
gtcacacaaacactaactgtcaggctgagggtc

SEQ ID NO: 295808 - DNA, 33 bp, Homo sapien
gtcacacaaacactaattgtcaggctgagggtc

SEQ ID NO: 295809 - DNA, 33 bp, Homo sapien
gaccaagctgtgaagccgagcggccctggcacc

SEQ ID NO: 295810 - DNA, 33 bp, Homo sapien
gaccaagctgtgaagctgagcggccctggcacc

SEQ ID NO: 295811 - DNA, 33 bp, Homo sapien
cctccaactactctaacgcgccggaatagaact

SEQ ID NO: 295812 - DNA, 33 bp, Homo sapien
cctccaactactctaatgcgccggaatagaact

SEQ ID NO: 295813 - DNA, 33 bp, Homo sapien
ttgaattcctcttccacgtgacaaccttccaac

SEQ ID NO: 295814 - DNA, 33 bp, Homo sapien
ttgaattcctcttccatgtgacaaccttccaac

SEQ ID NO: 295815 - DNA, 33 bp, Homo sapien
tttagcaaaactcacagggtacttcctcattct

SEQ ID NO: 295816 - DNA, 33 bp, Homo sapien
tttagcaaaactcacatggtacttcctcattct

SEQ ID NO: 295817 - DNA, 33 bp, Homo sapien
gtgtgcctgggctgcacctcatggaatccctga

SEQ ID NO: 295818 - DNA, 33 bp, Homo sapien
gtgtgcctgggctgcatctcatggaatccctga

SEQ ID NO: 295819 - DNA, 33 bp, Homo sapien
ctataaacattcataccgaggcttttgtacttg

SEQ ID NO: 295820 - DNA, 33 bp, Homo sapien
ctataaacattcatactgaggcttttgtacttg

SEQ ID NO: 295821 - DNA, 33 bp, Homo sapien
tgagacttttgtgcagaaaaatgaaatcactgg

SEQ ID NO: 295822 - DNA, 33 bp, Homo sapien
tgagacttttgtgcagtaaaatgaaatcactgg

SEQ ID NO: 295823 - DNA, 33 bp, Homo sapien
ctgatgaagtttctaacgtggaccatcgtgata

SEQ ID NO: 295824 - DNA, 33 bp, Homo sapien
ctgatgaagtttctaatgtggaccatcgtgata

SEQ ID NO: 295825 - DNA, 33 bp, Homo sapien
tatgccacatgaatcacgaagtaaaaattcaaa

SEQ ID NO: 295826 - DNA, 33 bp, Homo sapien
tatgccacatgaatcaggaagtaaaaattcaaa

SEQ ID NO: 295827 - DNA, 33 bp, Homo sapien
caacatcatcactgacaatggagatggcaccag

SEQ ID NO: 295828 - DNA, 33 bp, Homo sapien
caacatcatcactgacgatggagatggcaccag

SEQ ID NO: 295829 - DNA, 33 bp, Homo sapien
cttcatgcttactcaacgtttggtttcttttct

SEQ ID NO: 295830 - DNA, 33 bp, Homo sapien
cttcatgcttactcaatgtttggtttcttttct

SEQ ID NO: 295831 - DNA, 33 bp, Homo sapien
aggctgtgggaaagtacagagacaaactcctga

SEQ ID NO: 295832 - DNA, 33 bp, Homo sapien
aggctgtgggaaagtatagagacaaactcctga

SEQ ID NO: 295833 - DNA, 33 bp, Homo sapien
aagtggaggtcacataaactaaagattagccat

SEQ ID NO: 295834 - DNA, 33 bp, Homo sapien
aagtggaggtcacatagactaaagattagccat

SEQ ID NO: 295835 - DNA, 33 bp, Homo sapien
cataaaatgtgttaaacccagagtcccattccc

SEQ ID NO: 295836 - DNA, 33 bp, Homo sapien
cataaaatgtgttaaatccagagtcccattccc

SEQ ID NO: 295837 - DNA, 33 bp, Homo sapien
gctattattaggctacccatgttgagataaaac

SEQ ID NO: 295838 - DNA, 33 bp, Homo sapien
gctattattaggctactcatgttgagataaaac

SEQ ID NO: 295839 - DNA, 33 bp, Homo sapien
ctctccaaagttattacgaatgctatagatttt

SEQ ID NO: 295840 - DNA, 33 bp, Homo sapien
ctctccaaagttattatgaatgctatagatttt

SEQ ID NO: 295841 - DNA, 33 bp, Homo sapien
atctcaatcatgccacaaagaggcacacggaac

SEQ ID NO: 295842 - DNA, 33 bp, Homo sapien
atctcaatcatgccacgaagaggcacacggaac

SEQ ID NO: 295843 - DNA, 33 bp, Homo sapien
ggcccggagagaagcacatctcagcacagttcc

SEQ ID NO: 295844 - DNA, 33 bp, Homo sapien
ggcccggagagaagcagatctcagcacagttcc

SEQ ID NO: 295845 - DNA, 33 bp, Homo sapien
cttttcccaagagtgaaagaaaattgagcagac

SEQ ID NO: 295846 - DNA, 33 bp, Homo sapien
cttttcccaagagtgacagaaaattgagcagac

SEQ ID NO: 295847 - DNA, 33 bp, Homo sapien
ggagcaggccgagaaactctgttgagctgctaa

SEQ ID NO: 295848 - DNA, 33 bp, Homo sapien
ggagcaggccgagaaattctgttgagctgctaa

SEQ ID NO: 295849 - DNA, 33 bp, Homo sapien
ccttgctgtggaaagacgctactgaaagtataa

SEQ ID NO: 295850 - DNA, 33 bp, Homo sapien
ccttgctgtggaaagatgctactgaaagtataa

SEQ ID NO: 295851 - DNA, 33 bp, Homo sapien
gggagcatgtctccaccgccaccttgttctccc

SEQ ID NO: 295852 - DNA, 33 bp, Homo sapien
gggagcatgtctccactgccaccttgttctccc

SEQ ID NO: 295853 - DNA, 33 bp, Homo sapien
tctggacacatatgctcaaaattacatctcaac

SEQ ID NO: 295854 - DNA, 33 bp, Homo sapien
tctggacacatatgctgaaaattacatctcaac

SEQ ID NO: 295855 - DNA, 33 bp, Homo sapien
tggagcaagagagctaagtaggagggacaagaa

SEQ ID NO: 295856 - DNA, 33 bp, Homo sapien
tggagcaagagagctacgtaggagggacaagaa

SEQ ID NO: 295857 - DNA, 33 bp, Homo sapien
gctccacccagattcaatagttgtgatgatttt

SEQ ID NO: 295858 - DNA, 33 bp, Homo sapien
gctccacccagattcagtagttgtgatgatttt

SEQ ID NO: 295859 - DNA, 33 bp, Homo sapien
tgcatggctcctagtgaattgcttaaaaccttg

SEQ ID NO: 295860 - DNA, 33 bp, Homo sapien
tgcatggctcctagtgcattgcttaaaaccttg

SEQ ID NO: 295861 - DNA, 33 bp, Homo sapien
gtccaccatgttgaaaagatgctcttcatggct

SEQ ID NO: 295862 - DNA, 33 bp, Homo sapien
gtccaccatgttgaaacgatgctcttcatggct

SEQ ID NO: 295863 - DNA, 33 bp, Homo sapien
agtcccttgtctctagaaagtcaatgtttattg

SEQ ID NO: 295864 - DNA, 33 bp, Homo sapien
agtcccttgtctctaggaagtcaatgtttattg

SEQ ID NO: 295865 - DNA, 33 bp, Homo sapien
ccttcacatggaaaaaacaacaatgcagatgga

SEQ ID NO: 295866 - DNA, 33 bp, Homo sapien
ccttcacatggaaaaatcaacaatgcagatgga

SEQ ID NO: 295867 - DNA, 33 bp, Homo sapien
atgcatttcaaagagaagagcattttgctaatt

SEQ ID NO: 295868 - DNA, 33 bp, Homo sapien
atgcatttcaaagagaggagcattttgctaatt

SEQ ID NO: 295869 - DNA, 33 bp, Homo sapien
aggaataaatgtaggaacaatggggttagaaaa

SEQ ID NO: 295870 - DNA, 33 bp, Homo sapien
aggaataaatgtaggagcaatggggttagaaaa

SEQ ID NO: 295871 - DNA, 33 bp, Homo sapien
actctctgtggagcacaactagaaaagctggca

SEQ ID NO: 295872 - DNA, 33 bp, Homo sapien
actctctgtggagcactactagaaaagctggca

SEQ ID NO: 295873 - DNA, 33 bp, Homo sapien
ctgagaaagccacagaagctcaacaccagctca

SEQ ID NO: 295874 - DNA, 33 bp, Homo sapien
ctgagaaagccacagatgctcaacaccagctca

SEQ ID NO: 295875 - DNA, 33 bp, Homo sapien
gagcacgtggacaacacgttgatggtggcagga

SEQ ID NO: 295876 - DNA, 33 bp, Homo sapien
gagcacgtggacaacatgttgatggtggcagga

SEQ ID NO: 295877 - DNA, 33 bp, Homo sapien
tgactagtcaggacaaccagcctgtggaaagga

SEQ ID NO: 295878 - DNA, 33 bp, Homo sapien
tgactagtcaggacaagcagcctgtggaaagga

SEQ ID NO: 295879 - DNA, 33 bp, Homo sapien
ctgaaactggaccagacgtaccacaggcagctt

SEQ ID NO: 295880 - DNA, 33 bp, Homo sapien
ctgaaactggaccagatgtaccacaggcagctt

SEQ ID NO: 295881 - DNA, 33 bp, Homo sapien
tagtggcttttatcggaatctcataaatagctg

SEQ ID NO: 295882 - DNA, 33 bp, Homo sapien
tagtggcttttatcgggatctcataaatagctg

SEQ ID NO: 295883 - DNA, 33 bp, Homo sapien
gatgaaattgaaacataagtaacacgattcaat

SEQ ID NO: 295884 - DNA, 33 bp, Homo sapien
gatgaaattgaaacatgagtaacacgattcaat

SEQ ID NO: 295885 - DNA, 33 bp, Homo sapien
tattatctatttatgccgaagtattatttaacc

SEQ ID NO: 295886 - DNA, 33 bp, Homo sapien
tattatctatttatgctgaagtattatttaacc

SEQ ID NO: 295887 - DNA, 33 bp, Homo sapien
tccttaaacagatatgcaaattttatgtactct

SEQ ID NO: 295888 - DNA, 33 bp, Homo sapien
tccttaaacagatatggaaattttatgtactct

SEQ ID NO: 295889 - DNA, 33 bp, Homo sapien
aatgactgtaataatgaaaagctcttcctacag

SEQ ID NO: 295890 - DNA, 33 bp, Homo sapien
aatgactgtaataatggaaagctcttcctacag

SEQ ID NO: 295891 - DNA, 33 bp, Homo sapien
gtattttaacacgttccctttgcatttttggtg

SEQ ID NO: 295892 - DNA, 33 bp, Homo sapien
gtattttaacacgttctctttgcatttttggtg

SEQ ID NO: 295893 - DNA, 33 bp, Homo sapien
cagattaaaccacaccaaggtatcactttacac

SEQ ID NO: 295894 - DNA, 33 bp, Homo sapien
cagattaaaccacaccgaggtatcactttacac

SEQ ID NO: 295895 - DNA, 33 bp, Homo sapien
atcacccaggtattaaacgcagtacccaatagt

SEQ ID NO: 295896 - DNA, 33 bp, Homo sapien
atcacccaggtattaagcgcagtacccaatagt

SEQ ID NO: 295897 - DNA, 33 bp, Homo sapien
acgctgaccttccggaaacatggcgtccctgag

SEQ ID NO: 295898 - DNA, 33 bp, Homo sapien
acgctgaccttccggagacatggcgtccctgag

SEQ ID NO: 295899 - DNA, 33 bp, Homo sapien
tttaatctgcatatacagacatctatcaggagg

SEQ ID NO: 295900 - DNA, 33 bp, Homo sapien
tttaatctgcatatacggacatctatcaggagg

SEQ ID NO: 295901 - DNA, 33 bp, Homo sapien
agccaagagcgggtcaacgtttgctcctcccac

SEQ ID NO: 295902 - DNA, 33 bp, Homo sapien
agccaagagcgggtcagcgtttgctcctcccac

SEQ ID NO: 295903 - DNA, 33 bp, Homo sapien
aacaattaatcctgtaactataaggctcacagt

SEQ ID NO: 295904 - DNA, 33 bp, Homo sapien
aacaattaatcctgtagctataaggctcacagt

SEQ ID NO: 295905 - DNA, 33 bp, Homo sapien
gtactgtacttatgtgaaaggtaaaaaagatct

SEQ ID NO: 295906 - DNA, 33 bp, Homo sapien
gtactgtacttatgtggaaggtaaaaaagatct

SEQ ID NO: 295907 - DNA, 33 bp, Homo sapien
tttagcttgctagcctaaaaatctgatcatgct

SEQ ID NO: 295908 - DNA, 33 bp, Homo sapien
tttagcttgctagcctgaaaatctgatcatgct

SEQ ID NO: 295909 - DNA, 33 bp, Homo sapien
gggttttatttcctccaaagtctaaatgttcac

SEQ ID NO: 295910 - DNA, 33 bp, Homo sapien
gggttttatttcctccgaagtctaaatgttcac

SEQ ID NO: 295911 - DNA, 33 bp, Homo sapien
ccattttgcgaaaggacgtgagtgtatcttgtc

SEQ ID NO: 295912 - DNA, 33 bp, Homo sapien
ccattttgcgaaaggatgtgagtgtatcttgtc

SEQ ID NO: 295913 - DNA, 33 bp, Homo sapien
agggagagaatgtaaccagcaccacaaactcac

SEQ ID NO: 295914 - DNA, 33 bp, Homo sapien
agggagagaatgtaactagcaccacaaactcac

SEQ ID NO: 295915 - DNA, 33 bp, Homo sapien
gccatagaaatgtccaaacttgcctataagtaa

SEQ ID NO: 295916 - DNA, 33 bp, Homo sapien
gccatagaaatgtccagacttgcctataagtaa

SEQ ID NO: 295917 - DNA, 33 bp, Homo sapien
ttcgcattcagcatataaaaagaacttctacat

SEQ ID NO: 295918 - DNA, 33 bp, Homo sapien
ttcgcattcagcatattaaaagaacttctacat

SEQ ID NO: 295919 - DNA, 33 bp, Homo sapien
ccgggtagtcttggcaatgagaagacactccat

SEQ ID NO: 295920 - DNA, 33 bp, Homo sapien
ccgggtagtcttggcagtgagaagacactccat

SEQ ID NO: 295921 - DNA, 33 bp, Homo sapien
cccgagtacccagctcaatagttcgtctttaat

SEQ ID NO: 295922 - DNA, 33 bp, Homo sapien
cccgagtacccagctcgatagttcgtctttaat

SEQ ID NO: 295923 - DNA, 33 bp, Homo sapien
ggtggggtgtgagatcaaccttcagatgccctt

SEQ ID NO: 295924 - DNA, 33 bp, Homo sapien
ggtggggtgtgagatcgaccttcagatgccctt

SEQ ID NO: 295925 - DNA, 33 bp, Homo sapien
gggttccaaattcgccaacacatgtccccataa

SEQ ID NO: 295926 - DNA, 33 bp, Homo sapien
gggttccaaattcgccgacacatgtccccataa

SEQ ID NO: 295927 - DNA, 33 bp, Homo sapien
gacttactggaagggcaaacaaaggactgaggg

SEQ ID NO: 295928 - DNA, 33 bp, Homo sapien
gacttactggaagggcgaacaaaggactgaggg

SEQ ID NO: 295929 - DNA, 33 bp, Homo sapien
tttctaaccgcctttgaaatggtgttttggaaa

SEQ ID NO: 295930 - DNA, 33 bp, Homo sapien
tttctaaccgcctttggaatggtgttttggaaa

SEQ ID NO: 295931 - DNA, 33 bp, Homo sapien
caagatgtatgggtaacgtaaaagtctaaatca

SEQ ID NO: 295932 - DNA, 33 bp, Homo sapien
caagatgtatgggtaatgtaaaagtctaaatca

SEQ ID NO: 295933 - DNA, 33 bp, Homo sapien
gagtacaatggcaatacgttttacaacagtaaa

SEQ ID NO: 295934 - DNA, 33 bp, Homo sapien
gagtacaatggcaatatgttttacaacagtaaa

SEQ ID NO: 295935 - DNA, 33 bp, Homo sapien
aaacatagtgactccacggtgaacaggagcgct

SEQ ID NO: 295936 - DNA, 33 bp, Homo sapien
aaacatagtgactccatggtgaacaggagcgct

SEQ ID NO: 295937 - DNA, 33 bp, Homo sapien
ccttagaaagaactccgcttaactttgctctat

SEQ ID NO: 295938 - DNA, 33 bp, Homo sapien
ccttagaaagaactcctcttaactttgctctat

SEQ ID NO: 295939 - DNA, 33 bp, Homo sapien
attcattcatttaccacgtcttcctgtgagctc

SEQ ID NO: 295940 - DNA, 33 bp, Homo sapien
attcattcatttaccatgtcttcctgtgagctc

SEQ ID NO: 295941 - DNA, 33 bp, Homo sapien
atatagacatttcaatcaaaacaatgatcacgt

SEQ ID NO: 295942 - DNA, 33 bp, Homo sapien
atatagacatttcaatgaaaacaatgatcacgt

SEQ ID NO: 295943 - DNA, 33 bp, Homo sapien
tttctattctgaaatacaggtgaacacactcgt

SEQ ID NO: 295944 - DNA, 33 bp, Homo sapien
tttctattctgaaatataggtgaacacactcgt

SEQ ID NO: 295945 - DNA, 33 bp, Homo sapien
ttattacattttcttaaaaccagacatcttttg

SEQ ID NO: 295946 - DNA, 33 bp, Homo sapien
ttattacattttcttagaaccagacatcttttg

SEQ ID NO: 295947 - DNA, 33 bp, Homo sapien
gtatgtgctaaatcaacgcttgtttattatgca

SEQ ID NO: 295948 - DNA, 33 bp, Homo sapien
gtatgtgctaaatcaatgcttgtttattatgca

SEQ ID NO: 295949 - DNA, 33 bp, Homo sapien
ttgactactctagataacttacattaatggaat

SEQ ID NO: 295950 - DNA, 33 bp, Homo sapien
ttgactactctagataccttacattaatggaat

SEQ ID NO: 295951 - DNA, 33 bp, Homo sapien
tgccgggagactccacaaagaagcctcaccgtg

SEQ ID NO: 295952 - DNA, 33 bp, Homo sapien
tgccgggagactccacgaagaagcctcaccgtg

SEQ ID NO: 295953 - DNA, 33 bp, Homo sapien
ctcaaggaacattgaactgacaaaacagtcttg

SEQ ID NO: 295954 - DNA, 33 bp, Homo sapien
ctcaaggaacattgaattgacaaaacagtcttg

SEQ ID NO: 295955 - DNA, 33 bp, Homo sapien
caagactcctttttcccgcattgaatgatcttg

SEQ ID NO: 295956 - DNA, 33 bp, Homo sapien
caagactcctttttcctgcattgaatgatcttg

SEQ ID NO: 295957 - DNA, 33 bp, Homo sapien
tgcattttgtgttacactattgagcaagatttc

SEQ ID NO: 295958 - DNA, 33 bp, Homo sapien
tgcattttgtgttacagtattgagcaagatttc

SEQ ID NO: 295959 - DNA, 33 bp, Homo sapien
gcataccgactgcctcaaaaccacccactcagg

SEQ ID NO: 295960 - DNA, 33 bp, Homo sapien
gcataccgactgcctcgaaaccacccactcagg

SEQ ID NO: 295961 - DNA, 33 bp, Homo sapien
ctatgatctgtaagccaccacttcaagatatct

SEQ ID NO: 295962 - DNA, 33 bp, Homo sapien
ctatgatctgtaagccgccacttcaagatatct

SEQ ID NO: 295963 - DNA, 33 bp, Homo sapien
cacactgtataatttaacaatgggcgcaacagt

SEQ ID NO: 295964 - DNA, 33 bp, Homo sapien
cacactgtataatttagcaatgggcgcaacagt

SEQ ID NO: 295965 - DNA, 33 bp, Homo sapien
attcgtggaagcacaccggcttacccaagtacc

SEQ ID NO: 295966 - DNA, 33 bp, Homo sapien
attcgtggaagcacactggcttacccaagtacc

SEQ ID NO: 295967 - DNA, 33 bp, Homo sapien
tccacaggctggtgacaagaaacaggtaaggaa

SEQ ID NO: 295968 - DNA, 33 bp, Homo sapien
tccacaggctggtgacgagaaacaggtaaggaa

SEQ ID NO: 295969 - DNA, 33 bp, Homo sapien
taggttactgtagaccccgatagacctatttct

SEQ ID NO: 295970 - DNA, 33 bp, Homo sapien
taggttactgtagacctcgatagacctatttct

SEQ ID NO: 295971 - DNA, 33 bp, Homo sapien
attgaaagtattgtcacctaaatcttgaccaag

SEQ ID NO: 295972 - DNA, 33 bp, Homo sapien
attgaaagtattgtcatctaaatcttgaccaag

SEQ ID NO: 295973 - DNA, 33 bp, Homo sapien
cacagagtccatgtcacgtgaagacccatgttc

SEQ ID NO: 295974 - DNA, 33 bp, Homo sapien
cacagagtccatgtcatgtgaagacccatgttc

SEQ ID NO: 295975 - DNA, 33 bp, Homo sapien
tatgtacaggaaaataacaattcattgtcaaaa

SEQ ID NO: 295976 - DNA, 33 bp, Homo sapien
tatgtacaggaaaataccaattcattgtcaaaa

SEQ ID NO: 295977 - DNA, 33 bp, Homo sapien
caagacgacctgcaacaccatttgttccataga

SEQ ID NO: 295978 - DNA, 33 bp, Homo sapien
caagacgacctgcaactccatttgttccataga

SEQ ID NO: 295979 - DNA, 33 bp, Homo sapien
aagtctgaaaataacaggtggccaagaggagat

SEQ ID NO: 295980 - DNA, 33 bp, Homo sapien
aagtctgaaaataacatgtggccaagaggagat

SEQ ID NO: 295981 - DNA, 33 bp, Homo sapien
actagttttgagactaaaacctgtaactggaag

SEQ ID NO: 295982 - DNA, 33 bp, Homo sapien
actagttttgagactagaacctgtaactggaag

SEQ ID NO: 295983 - DNA, 33 bp, Homo sapien
gtggtacagcaaggtccaaggcaaaaagatggc

SEQ ID NO: 295984 - DNA, 33 bp, Homo sapien
gtggtacagcaaggtctaaggcaaaaagatggc

SEQ ID NO: 295985 - DNA, 33 bp, Homo sapien
cccactctttgatccacaggtgttggagcctgt

SEQ ID NO: 295986 - DNA, 33 bp, Homo sapien
cccactctttgatccagaggtgttggagcctgt

SEQ ID NO: 295987 - DNA, 33 bp, Homo sapien
tctcttctctttttccagaagtgttggctgcag

SEQ ID NO: 295988 - DNA, 33 bp, Homo sapien
tctcttctctttttccggaagtgttggctgcag

SEQ ID NO: 295989 - DNA, 33 bp, Homo sapien
aaccttgtctccaataacatttaaaaatcatga

SEQ ID NO: 295990 - DNA, 33 bp, Homo sapien
aaccttgtctccaatagcatttaaaaatcatga

SEQ ID NO: 295991 - DNA, 33 bp, Homo sapien
aattcaggtatagttcacatatagcaaagttca

SEQ ID NO: 295992 - DNA, 33 bp, Homo sapien
aattcaggtatagttcccatatagcaaagttca

SEQ ID NO: 295993 - DNA, 33 bp, Homo sapien
cggtcctcttataagacgaggaagagagaggga

SEQ ID NO: 295994 - DNA, 33 bp, Homo sapien
cggtcctcttataagatgaggaagagagaggga

SEQ ID NO: 295995 - DNA, 33 bp, Homo sapien
atacttctaaactgaaaagaaattgagtcagga

SEQ ID NO: 295996 - DNA, 33 bp, Homo sapien
atacttctaaactgaagagaaattgagtcagga

SEQ ID NO: 295997 - DNA, 33 bp, Homo sapien
gcccaaagtctgggatcaaggtacctgcagggc

SEQ ID NO: 295998 - DNA, 33 bp, Homo sapien
gcccaaagtctgggattaaggtacctgcagggc

SEQ ID NO: 295999 - DNA, 33 bp, Homo sapien
tattcagaaatgaagtcaatgcagatgtaatcg

SEQ ID NO: 296000 - DNA, 33 bp, Homo sapien
tattcagaaatgaagttaatgcagatgtaatcg

SEQ ID NO: 296001 - DNA, 33 bp, Homo sapien
tctcatccatatctgacattacgactcttgact

SEQ ID NO: 296002 - DNA, 33 bp, Homo sapien
tctcatccatatctgatattacgactcttgact

SEQ ID NO: 296003 - DNA, 33 bp, Homo sapien
caaagccatctagattcaaaaggaagaagtaaa

SEQ ID NO: 296004 - DNA, 33 bp, Homo sapien
caaagccatctagattgaaaaggaagaagtaaa

SEQ ID NO: 296005 - DNA, 33 bp, Homo sapien
atgttttattaggggaagtgatttattgacagt

SEQ ID NO: 296006 - DNA, 33 bp, Homo sapien
atgttttattaggggatgtgatttattgacagt

SEQ ID NO: 296007 - DNA, 33 bp, Homo sapien
tctgttctccacgctacggctagagtattgttt

SEQ ID NO: 296008 - DNA, 33 bp, Homo sapien
tctgttctccacgctatggctagagtattgttt

SEQ ID NO: 296009 - DNA, 33 bp, Homo sapien
ggcagtctcacatacaaccaaatttacaaacca

SEQ ID NO: 296010 - DNA, 33 bp, Homo sapien
ggcagtctcacatacacccaaatttacaaacca

SEQ ID NO: 296011 - DNA, 33 bp, Homo sapien
tagacaaagtgagagacaaatgaaagattgtct

SEQ ID NO: 296012 - DNA, 33 bp, Homo sapien
tagacaaagtgagagataaatgaaagattgtct

SEQ ID NO: 296013 - DNA, 33 bp, Homo sapien
ggtggaggcaaacaaacgcagggccgccataaa

SEQ ID NO: 296014 - DNA, 33 bp, Homo sapien
ggtggaggcaaacaaaggcagggccgccataaa

SEQ ID NO: 296015 - DNA, 33 bp, Homo sapien
ttggtcaagaataggacattgggttattggtga

SEQ ID NO: 296016 - DNA, 33 bp, Homo sapien
ttggtcaagaataggatattgggttattggtga

SEQ ID NO: 296017 - DNA, 33 bp, Homo sapien
caagtgtggccacggaaatgtagactcagcact

SEQ ID NO: 296018 - DNA, 33 bp, Homo sapien
caagtgtggccacggagatgtagactcagcact

SEQ ID NO: 296019 - DNA, 33 bp, Homo sapien
aaggttggctgaatacacgggtgggtaaccttg

SEQ ID NO: 296020 - DNA, 33 bp, Homo sapien
aaggttggctgaatacgcgggtgggtaaccttg

SEQ ID NO: 296021 - DNA, 33 bp, Homo sapien
atgctatatcctataacgttatcgcttatgcaa

SEQ ID NO: 296022 - DNA, 33 bp, Homo sapien
atgctatatcctataatgttatcgcttatgcaa

SEQ ID NO: 296023 - DNA, 33 bp, Homo sapien
tgcgcctctcttgaagcatttacagctgctgcc

SEQ ID NO: 296024 - DNA, 33 bp, Homo sapien
tgcgcctctcttgaaggatttacagctgctgcc

SEQ ID NO: 296025 - DNA, 33 bp, Homo sapien
ccagagctaagggacaccactgtagcactaggg

SEQ ID NO: 296026 - DNA, 33 bp, Homo sapien
ccagagctaagggacatcactgtagcactaggg

SEQ ID NO: 296027 - DNA, 33 bp, Homo sapien
tggtgttgagacatcaatactaaccttgtcatg

SEQ ID NO: 296028 - DNA, 33 bp, Homo sapien
tggtgttgagacatcattactaaccttgtcatg

SEQ ID NO: 296029 - DNA, 33 bp, Homo sapien
cccatggtctaacactaaaccgcacaacacaat

SEQ ID NO: 296030 - DNA, 33 bp, Homo sapien
cccatggtctaacactgaaccgcacaacacaat

SEQ ID NO: 296031 - DNA, 33 bp, Homo sapien
attactctaataagacaaaaaaagcaactaaaa

SEQ ID NO: 296032 - DNA, 33 bp, Homo sapien
attactctaataagaccaaaaaagcaactaaaa

SEQ ID NO: 296033 - DNA, 33 bp, Homo sapien
tctcagagtttggggacggcgtttgtgaggtga

SEQ ID NO: 296034 - DNA, 33 bp, Homo sapien
tctcagagtttggggatggcgtttgtgaggtga

SEQ ID NO: 296035 - DNA, 33 bp, Homo sapien
gctgttttaaaacatcagaatccttgctggagt

SEQ ID NO: 296036 - DNA, 33 bp, Homo sapien
gctgttttaaaacatcggaatccttgctggagt

SEQ ID NO: 296037 - DNA, 33 bp, Homo sapien
gttttccatcattctgcatgaaagagttggctg

SEQ ID NO: 296038 - DNA, 33 bp, Homo sapien
gttttccatcattctgtatgaaagagttggctg

SEQ ID NO: 296039 - DNA, 33 bp, Homo sapien
ataaattttcaagttcgagaagtcagaaaacca

SEQ ID NO: 296040 - DNA, 33 bp, Homo sapien
ataaattttcaagttctagaagtcagaaaacca

SEQ ID NO: 296041 - DNA, 33 bp, Homo sapien
gggaagatcactgagcactgaggggtaaatggg

SEQ ID NO: 296042 - DNA, 33 bp, Homo sapien
gggaagatcactgagcgctgaggggtaaatggg

SEQ ID NO: 296043 - DNA, 33 bp, Homo sapien
cggctcacatacagtaactaaaatggcagagct

SEQ ID NO: 296044 - DNA, 33 bp, Homo sapien
cggctcacatacagtatctaaaatggcagagct

SEQ ID NO: 296045 - DNA, 33 bp, Homo sapien
gctatggaatgaaccaagctggaaacagaggaa

SEQ ID NO: 296046 - DNA, 33 bp, Homo sapien
gctatggaatgaaccaggctggaaacagaggaa

SEQ ID NO: 296047 - DNA, 33 bp, Homo sapien
ggaatatcttataggcaagagggagaaccagaa

SEQ ID NO: 296048 - DNA, 33 bp, Homo sapien
ggaatatcttataggcgagagggagaaccagaa

SEQ ID NO: 296049 - DNA, 33 bp, Homo sapien
gtgggtgctacccacacgagaacacagcaggtc

SEQ ID NO: 296050 - DNA, 33 bp, Homo sapien
gtgggtgctacccacaggagaacacagcaggtc

SEQ ID NO: 296051 - DNA, 33 bp, Homo sapien
cacaggagaaatggaaatacagaatacaggcaa

SEQ ID NO: 296052 - DNA, 33 bp, Homo sapien
cacaggagaaatggaagtacagaatacaggcaa

SEQ ID NO: 296053 - DNA, 33 bp, Homo sapien
tcagctggctctttgccaagaccataaacctga

SEQ ID NO: 296054 - DNA, 33 bp, Homo sapien
tcagctggctctttgctaagaccataaacctga

SEQ ID NO: 296055 - DNA, 33 bp, Homo sapien
catgatggttctagcacagtcaagatctgtgtt

SEQ ID NO: 296056 - DNA, 33 bp, Homo sapien
catgatggttctagcatagtcaagatctgtgtt

SEQ ID NO: 296057 - DNA, 33 bp, Homo sapien
ttcttatgtcacagaacgtgtcgcttcgtcttc

SEQ ID NO: 296058 - DNA, 33 bp, Homo sapien
ttcttatgtcacagaatgtgtcgcttcgtcttc

SEQ ID NO: 296059 - DNA, 33 bp, Homo sapien
tattgtaggagctcaaaagaagtcaggatctac

SEQ ID NO: 296060 - DNA, 33 bp, Homo sapien
tattgtaggagctcaagagaagtcaggatctac

SEQ ID NO: 296061 - DNA, 33 bp, Homo sapien
aaccctgtcctagtcacggatcccaggggtgac

SEQ ID NO: 296062 - DNA, 33 bp, Homo sapien
aaccctgtcctagtcatggatcccaggggtgac

SEQ ID NO: 296063 - DNA, 33 bp, Homo sapien
agtgggatattattcaatcgtgagaaggaatga

SEQ ID NO: 296064 - DNA, 33 bp, Homo sapien
agtgggatattattcagtcgtgagaaggaatga

SEQ ID NO: 296065 - DNA, 33 bp, Homo sapien
cgagactggggttaaaccaatcaatctaaaatg

SEQ ID NO: 296066 - DNA, 33 bp, Homo sapien
cgagactggggttaaatcaatcaatctaaaatg

SEQ ID NO: 296067 - DNA, 33 bp, Homo sapien
aacagtgcagcccttaacggtggagatgatgga

SEQ ID NO: 296068 - DNA, 33 bp, Homo sapien
aacagtgcagcccttaccggtggagatgatgga

SEQ ID NO: 296069 - DNA, 33 bp, Homo sapien
gaacttgtaagtaagcccataattaaataccag

SEQ ID NO: 296070 - DNA, 33 bp, Homo sapien
gaacttgtaagtaagctcataattaaataccag

SEQ ID NO: 296071 - DNA, 33 bp, Homo sapien
aaatcagtcaagaaagaaagtgctgatgggatt

SEQ ID NO: 296072 - DNA, 33 bp, Homo sapien
aaatcagtcaagaaaggaagtgctgatgggatt

SEQ ID NO: 296073 - DNA, 33 bp, Homo sapien
cgctgtgatcttcctggagtgatgcatttacac

SEQ ID NO: 296074 - DNA, 33 bp, Homo sapien
cgctgtgatcttcctgtagtgatgcatttacac

SEQ ID NO: 296075 - DNA, 33 bp, Homo sapien
cagcggagggaccttacggaactgaaagcctga

SEQ ID NO: 296076 - DNA, 33 bp, Homo sapien
cagcggagggaccttatggaactgaaagcctga

SEQ ID NO: 296077 - DNA, 33 bp, Homo sapien
cccgcatttataatacaatggtgttaatgattt

SEQ ID NO: 296078 - DNA, 33 bp, Homo sapien
cccgcatttataatacgatggtgttaatgattt

SEQ ID NO: 296079 - DNA, 33 bp, Homo sapien
gggtttgcaaggccaacgatgcaattcaatctt

SEQ ID NO: 296080 - DNA, 33 bp, Homo sapien
gggtttgcaaggccaatgatgcaattcaatctt

SEQ ID NO: 296081 - DNA, 33 bp, Homo sapien
tttttatagcatagagaattttttagaaggaga

SEQ ID NO: 296082 - DNA, 33 bp, Homo sapien
tttttatagcatagaggattttttagaaggaga

SEQ ID NO: 296083 - DNA, 33 bp, Homo sapien
gactgtggaggaaatgcagaggaatgcagcgat

SEQ ID NO: 296084 - DNA, 33 bp, Homo sapien
gactgtggaggaaatgtagaggaatgcagcgat

SEQ ID NO: 296085 - DNA, 33 bp, Homo sapien
aggtttataagtttccaagttcaaatttcaaat

SEQ ID NO: 296086 - DNA, 33 bp, Homo sapien
aggtttataagtttccgagttcaaatttcaaat

SEQ ID NO: 296087 - DNA, 33 bp, Homo sapien
atgcataacatacaaagctgataaaccaagaac

SEQ ID NO: 296088 - DNA, 33 bp, Homo sapien
atgcataacatacaaatctgataaaccaagaac

SEQ ID NO: 296089 - DNA, 33 bp, Homo sapien
cgcacctgcactccagaatgttgactggggtct

SEQ ID NO: 296090 - DNA, 33 bp, Homo sapien
cgcacctgcactccaggatgttgactggggtct

SEQ ID NO: 296091 - DNA, 33 bp, Homo sapien
ttaatgccatatcaaactgataccacaaccaca

SEQ ID NO: 296092 - DNA, 33 bp, Homo sapien
ttaatgccatatcaaattgataccacaaccaca

SEQ ID NO: 296093 - DNA, 33 bp, Homo sapien
caggaggatgcaccagaaacaaaaaaagtgtta

SEQ ID NO: 296094 - DNA, 33 bp, Homo sapien
caggaggatgcaccagtaacaaaaaaagtgtta

SEQ ID NO: 296095 - DNA, 33 bp, Homo sapien
acctccttgtgtatgcaaaaggtagaatactac

SEQ ID NO: 296096 - DNA, 33 bp, Homo sapien
acctccttgtgtatgcgaaaggtagaatactac

SEQ ID NO: 296097 - DNA, 33 bp, Homo sapien
gtcctacttccacagacagaatacagaaagtta

SEQ ID NO: 296098 - DNA, 33 bp, Homo sapien
gtcctacttccacagagagaatacagaaagtta

SEQ ID NO: 296099 - DNA, 33 bp, Homo sapien
aaaagaaagtggcatgaaaatgtgtgggactgg

SEQ ID NO: 296100 - DNA, 33 bp, Homo sapien
aaaagaaagtggcatggaaatgtgtgggactgg

SEQ ID NO: 296101 - DNA, 33 bp, Homo sapien
tgagagaaccaagcaacgccaaagtaaccacac

SEQ ID NO: 296102 - DNA, 33 bp, Homo sapien
tgagagaaccaagcaatgccaaagtaaccacac

SEQ ID NO: 296103 - DNA, 33 bp, Homo sapien
tgtgtagaaactaagacagaaaagtttatctac

SEQ ID NO: 296104 - DNA, 33 bp, Homo sapien
tgtgtagaaactaagagagaaaagtttatctac

SEQ ID NO: 296105 - DNA, 33 bp, Homo sapien
ctaaagcacagagcacaatctcttcagttctga

SEQ ID NO: 296106 - DNA, 33 bp, Homo sapien
ctaaagcacagagcacgatctcttcagttctga

SEQ ID NO: 296107 - DNA, 33 bp, Homo sapien
tgtcaatgccaaagacaaggagggggactgagt

SEQ ID NO: 296108 - DNA, 33 bp, Homo sapien
tgtcaatgccaaagacgaggagggggactgagt

SEQ ID NO: 296109 - DNA, 33 bp, Homo sapien
attttcacacttctaaactcttagctggttggg

SEQ ID NO: 296110 - DNA, 33 bp, Homo sapien
attttcacacttctaatctcttagctggttggg

SEQ ID NO: 296111 - DNA, 33 bp, Homo sapien
gttccagcttggccacaagaagatacccatgaa

SEQ ID NO: 296112 - DNA, 33 bp, Homo sapien
gttccagcttggccacgagaagatacccatgaa

SEQ ID NO: 296113 - DNA, 33 bp, Homo sapien
tgcagaaacaatgaaacggcagccttttcacac

SEQ ID NO: 296114 - DNA, 33 bp, Homo sapien
tgcagaaacaatgaaatggcagccttttcacac

SEQ ID NO: 296115 - DNA, 33 bp, Homo sapien
gcagactctatcctaacgcacaaaccagaggtc

SEQ ID NO: 296116 - DNA, 33 bp, Homo sapien
gcagactctatcctaatgcacaaaccagaggtc

SEQ ID NO: 296117 - DNA, 33 bp, Homo sapien
agctctggccacatccaggaggaaaacgggcag

SEQ ID NO: 296118 - DNA, 33 bp, Homo sapien
agctctggccacatccgggaggaaaacgggcag

SEQ ID NO: 296119 - DNA, 33 bp, Homo sapien
atttcaagaagcaggtaaaactgtcattcactt

SEQ ID NO: 296120 - DNA, 33 bp, Homo sapien
atttcaagaagcaggtgaaactgtcattcactt

SEQ ID NO: 296121 - DNA, 33 bp, Homo sapien
gaagctgcctacaggagaaggtattttcttgtt

SEQ ID NO: 296122 - DNA, 33 bp, Homo sapien
gaagctgcctacaggataaggtattttcttgtt

SEQ ID NO: 296123 - DNA, 33 bp, Homo sapien
gagtgtcatattatacgctgactgcagctgaat

SEQ ID NO: 296124 - DNA, 33 bp, Homo sapien
gagtgtcatattatactctgactgcagctgaat

SEQ ID NO: 296125 - DNA, 33 bp, Homo sapien
actggctagagaactcagaaagaggaaatcctg

SEQ ID NO: 296126 - DNA, 33 bp, Homo sapien
actggctagagaactcggaaagaggaaatcctg

SEQ ID NO: 296127 - DNA, 33 bp, Homo sapien
aaaaaggatatcaaaagcagactgggtgttcct

SEQ ID NO: 296128 - DNA, 33 bp, Homo sapien
aaaaaggatatcaaaatcagactgggtgttcct

SEQ ID NO: 296129 - DNA, 33 bp, Homo sapien
ccactcagattgggcccccccatgacataccat

SEQ ID NO: 296130 - DNA, 33 bp, Homo sapien
ccactcagattgggcctccccatgacataccat

SEQ ID NO: 296131 - DNA, 33 bp, Homo sapien
cataatgctgcccagaaagagcggacacctggt

SEQ ID NO: 296132 - DNA, 33 bp, Homo sapien
cataatgctgcccagagagagcggacacctggt

SEQ ID NO: 296133 - DNA, 33 bp, Homo sapien
aagttctaggacgcccaaagtctgttctgttgg

SEQ ID NO: 296134 - DNA, 33 bp, Homo sapien
aagttctaggacgcccgaagtctgttctgttgg

SEQ ID NO: 296135 - DNA, 33 bp, Homo sapien
cagtgtggatttctacaactggtccctggtgaa

SEQ ID NO: 296136 - DNA, 33 bp, Homo sapien
cagtgtggatttctacgactggtccctggtgaa

SEQ ID NO: 296137 - DNA, 33 bp, Homo sapien
agggcttctggcctccacttgctggtagagcat

SEQ ID NO: 296138 - DNA, 33 bp, Homo sapien
agggcttctggcctccgcttgctggtagagcat

SEQ ID NO: 296139 - DNA, 33 bp, Homo sapien
catggagcataacaccgagtacataaatgttta

SEQ ID NO: 296140 - DNA, 33 bp, Homo sapien
catggagcataacacctagtacataaatgttta

SEQ ID NO: 296141 - DNA, 33 bp, Homo sapien
cataacaggttgtgctaagacctagatggagtg

SEQ ID NO: 296142 - DNA, 33 bp, Homo sapien
cataacaggttgtgctgagacctagatggagtg

SEQ ID NO: 296143 - DNA, 33 bp, Homo sapien
tttcaactttgctgtaaatcagccccagaggcc

SEQ ID NO: 296144 - DNA, 33 bp, Homo sapien
tttcaactttgctgtatatcagccccagaggcc

SEQ ID NO: 296145 - DNA, 33 bp, Homo sapien
gagaaatatgaatccacggagaatgtgtttata

SEQ ID NO: 296146 - DNA, 33 bp, Homo sapien
gagaaatatgaatccatggagaatgtgtttata

SEQ ID NO: 296147 - DNA, 33 bp, Homo sapien
gattaacatttaaatcaattgacttagagtaaa

SEQ ID NO: 296148 - DNA, 33 bp, Homo sapien
gattaacatttaaatctattgacttagagtaaa

SEQ ID NO: 296149 - DNA, 33 bp, Homo sapien
agttctgctctgagccaaagagaccatgcggcc

SEQ ID NO: 296150 - DNA, 33 bp, Homo sapien
agttctgctctgagccgaagagaccatgcggcc

SEQ ID NO: 296151 - DNA, 33 bp, Homo sapien
acaccttcacaaagagcctcccacactcaactg

SEQ ID NO: 296152 - DNA, 33 bp, Homo sapien
acaccttcacaaagagtctcccacactcaactg

SEQ ID NO: 296153 - DNA, 33 bp, Homo sapien
cttcctattgttgcatcagaaacaacaaaggtc

SEQ ID NO: 296154 - DNA, 33 bp, Homo sapien
cttcctattgttgcatgagaaacaacaaaggtc

SEQ ID NO: 296155 - DNA, 33 bp, Homo sapien
agagtgaatgttgacactggaataaggtttaaa

SEQ ID NO: 296156 - DNA, 33 bp, Homo sapien
agagtgaatgttgacattggaataaggtttaaa

SEQ ID NO: 296157 - DNA, 33 bp, Homo sapien
acagtttttacaagtcaactggacaggtgaata

SEQ ID NO: 296158 - DNA, 33 bp, Homo sapien
acagtttttacaagtcgactggacaggtgaata

SEQ ID NO: 296159 - DNA, 33 bp, Homo sapien
catattccactgacccacatttgcacaaatagc

SEQ ID NO: 296160 - DNA, 33 bp, Homo sapien
catattccactgacccgcatttgcacaaatagc

SEQ ID NO: 296161 - DNA, 33 bp, Homo sapien
aggaggttggcaaacaatcttccatctgctcct

SEQ ID NO: 296162 - DNA, 33 bp, Homo sapien
aggaggttggcaaacagtcttccatctgctcct

SEQ ID NO: 296163 - DNA, 33 bp, Homo sapien
tgaaataagaaaactaactgcctaattcgaagg

SEQ ID NO: 296164 - DNA, 33 bp, Homo sapien
tgaaataagaaaactagctgcctaattcgaagg

SEQ ID NO: 296165 - DNA, 33 bp, Homo sapien
tgaatcatttgaagaacggccacttagttctat

SEQ ID NO: 296166 - DNA, 33 bp, Homo sapien
tgaatcatttgaagaatggccacttagttctat

SEQ ID NO: 296167 - DNA, 33 bp, Homo sapien
ctggttcttcttcaaaacttcccgtaccttctt

SEQ ID NO: 296168 - DNA, 33 bp, Homo sapien
ctggttcttcttcaaagcttcccgtaccttctt

SEQ ID NO: 296169 - DNA, 33 bp, Homo sapien
aggagggggcaaaataccagaaaggtgcccaca

SEQ ID NO: 296170 - DNA, 33 bp, Homo sapien
aggagggggcaaaatatcagaaaggtgcccaca

SEQ ID NO: 296171 - DNA, 33 bp, Homo sapien
tagaaaatgggcccaacgtgaacagctgtgctt

SEQ ID NO: 296172 - DNA, 33 bp, Homo sapien
tagaaaatgggcccaatgtgaacagctgtgctt

SEQ ID NO: 296173 - DNA, 33 bp, Homo sapien
ggtctgtgatgggtgcaaacttgtgcagcctgg

SEQ ID NO: 296174 - DNA, 33 bp, Homo sapien
ggtctgtgatgggtgcgaacttgtgcagcctgg

SEQ ID NO: 296175 - DNA, 33 bp, Homo sapien
tcctcatcttccctgcacttctgtggacacaat

SEQ ID NO: 296176 - DNA, 33 bp, Homo sapien
tcctcatcttccctgcgcttctgtggacacaat

SEQ ID NO: 296177 - DNA, 33 bp, Homo sapien
aagcttcctgaagagacgcagaaagccaagagc

SEQ ID NO: 296178 - DNA, 33 bp, Homo sapien
aagcttcctgaagagatgcagaaagccaagagc

SEQ ID NO: 296179 - DNA, 33 bp, Homo sapien
gggctgcacagtctaacaggatgaccacttgac

SEQ ID NO: 296180 - DNA, 33 bp, Homo sapien
gggctgcacagtctaataggatgaccacttgac

SEQ ID NO: 296181 - DNA, 33 bp, Homo sapien
agacacattttagaaactccagggacctcaggt

SEQ ID NO: 296182 - DNA, 33 bp, Homo sapien
agacacattttagaaattccagggacctcaggt

SEQ ID NO: 296183 - DNA, 33 bp, Homo sapien
agtgccctcaagaagcggctgtgtttccttcca

SEQ ID NO: 296184 - DNA, 33 bp, Homo sapien
agtgccctcaagaagctgctgtgtttccttcca

SEQ ID NO: 296185 - DNA, 33 bp, Homo sapien
ccgggggtgctcaaggcatcagtcacaacagga

SEQ ID NO: 296186 - DNA, 33 bp, Homo sapien
ccgggggtgctcaaggtatcagtcacaacagga

SEQ ID NO: 296187 - DNA, 33 bp, Homo sapien
tatggggccagaaaaaactgaagtcaagagatg

SEQ ID NO: 296188 - DNA, 33 bp, Homo sapien
tatggggccagaaaaacctgaagtcaagagatg

SEQ ID NO: 296189 - DNA, 33 bp, Homo sapien
ctccagcaacgtctaaccaaatccagtctttga

SEQ ID NO: 296190 - DNA, 33 bp, Homo sapien
ctccagcaacgtctaatcaaatccagtctttga

SEQ ID NO: 296191 - DNA, 33 bp, Homo sapien
tcccctgtatttcctcaagattggtagttggat

SEQ ID NO: 296192 - DNA, 33 bp, Homo sapien
tcccctgtatttcctccagattggtagttggat

SEQ ID NO: 296193 - DNA, 33 bp, Homo sapien
tattccagacacaaaaaggaaacagtatagaca

SEQ ID NO: 296194 - DNA, 33 bp, Homo sapien
tattccagacacaaaagggaaacagtatagaca

SEQ ID NO: 296195 - DNA, 33 bp, Homo sapien
ctcaatgatcctcttcgccgcaaaggcaaagaa

SEQ ID NO: 296196 - DNA, 33 bp, Homo sapien
ctcaatgatcctcttctccgcaaaggcaaagaa

SEQ ID NO: 296197 - DNA, 33 bp, Homo sapien
ccagagaaggatacaacgcaaccatccgtggag

SEQ ID NO: 296198 - DNA, 33 bp, Homo sapien
ccagagaaggatacaatgcaaccatccgtggag

SEQ ID NO: 296199 - DNA, 33 bp, Homo sapien
aagaaacaagcacattaaactcatttctcgcat

SEQ ID NO: 296200 - DNA, 33 bp, Homo sapien
aagaaacaagcacattcaactcatttctcgcat

SEQ ID NO: 296201 - DNA, 33 bp, Homo sapien
gtgaatatgctcaaccaacgtgtgctaattaca

SEQ ID NO: 296202 - DNA, 33 bp, Homo sapien
gtgaatatgctcaaccgacgtgtgctaattaca

SEQ ID NO: 296203 - DNA, 33 bp, Homo sapien
gacacacctggtagaaggtggcaattggaaaaa

SEQ ID NO: 296204 - DNA, 33 bp, Homo sapien
gacacacctggtagaatgtggcaattggaaaaa

SEQ ID NO: 296205 - DNA, 33 bp, Homo sapien
ggggatggaaattgagaaaagctcagtgacttg

SEQ ID NO: 296206 - DNA, 33 bp, Homo sapien
ggggatggaaattgagtaaagctcagtgacttg

SEQ ID NO: 296207 - DNA, 33 bp, Homo sapien
acctaaaccatgccaccgacagggctgacacta

SEQ ID NO: 296208 - DNA, 33 bp, Homo sapien
acctaaaccatgccacggacagggctgacacta

SEQ ID NO: 296209 - DNA, 33 bp, Homo sapien
cccatttggaagaacactgtctgcagacttgct

SEQ ID NO: 296210 - DNA, 33 bp, Homo sapien
cccatttggaagaacagtgtctgcagacttgct

SEQ ID NO: 296211 - DNA, 33 bp, Homo sapien
acacaaagctattcaccgtagcactgttgaatg

SEQ ID NO: 296212 - DNA, 33 bp, Homo sapien
acacaaagctattcactgtagcactgttgaatg

SEQ ID NO: 296213 - DNA, 33 bp, Homo sapien
atgagacatctttccactatcagaggcacccag

SEQ ID NO: 296214 - DNA, 33 bp, Homo sapien
atgagacatctttccattatcagaggcacccag

SEQ ID NO: 296215 - DNA, 33 bp, Homo sapien
ccggcgatcactcctccatttgtaggtggtgga

SEQ ID NO: 296216 - DNA, 33 bp, Homo sapien
ccggcgatcactcctctatttgtaggtggtgga

SEQ ID NO: 296217 - DNA, 33 bp, Homo sapien
tctgagcaagacctgcagaagaaccgcccactg

SEQ ID NO: 296218 - DNA, 33 bp, Homo sapien
tctgagcaagacctgcggaagaaccgcccactg

SEQ ID NO: 296219 - DNA, 33 bp, Homo sapien
cagataaatccagcaccaggcaccttatgattg

SEQ ID NO: 296220 - DNA, 33 bp, Homo sapien
cagataaatccagcactaggcaccttatgattg

SEQ ID NO: 296221 - DNA, 33 bp, Homo sapien
aaagaaatgtaaccaaagaggaattagggaggg

SEQ ID NO: 296222 - DNA, 33 bp, Homo sapien
aaagaaatgtaaccaaggaggaattagggaggg

SEQ ID NO: 296223 - DNA, 33 bp, Homo sapien
atgaagatctggaataagtgagttgaacctggc

SEQ ID NO: 296224 - DNA, 33 bp, Homo sapien
atgaagatctggaataggtgagttgaacctggc

SEQ ID NO: 296225 - DNA, 33 bp, Homo sapien
gtgatagcaggagtgaaggcccgattcgcatga

SEQ ID NO: 296226 - DNA, 33 bp, Homo sapien
gtgatagcaggagtgagggcccgattcgcatga

SEQ ID NO: 296227 - DNA, 33 bp, Homo sapien
ctcctgctatcacctaacctactgcttctctct

SEQ ID NO: 296228 - DNA, 33 bp, Homo sapien
ctcctgctatcacctaccctactgcttctctct

SEQ ID NO: 296229 - DNA, 33 bp, Homo sapien
ctgcgagtgaaaataacccccgtcaactccagc

SEQ ID NO: 296230 - DNA, 33 bp, Homo sapien
ctgcgagtgaaaataatccccgtcaactccagc

SEQ ID NO: 296231 - DNA, 33 bp, Homo sapien
atcatctcacatgataactcttgtcttaaaaat

SEQ ID NO: 296232 - DNA, 33 bp, Homo sapien
atcatctcacatgatatctcttgtcttaaaaat

SEQ ID NO: 296233 - DNA, 33 bp, Homo sapien
tctgtgttgtgtcctggaagtctgggaacatgt

SEQ ID NO: 296234 - DNA, 33 bp, Homo sapien
tctgtgttgtgtcctgtaagtctgggaacatgt

SEQ ID NO: 296235 - DNA, 33 bp, Homo sapien
gacacaacacagagccacggtcctctttccctg

SEQ ID NO: 296236 - DNA, 33 bp, Homo sapien
gacacaacacagagccgcggtcctctttccctg

SEQ ID NO: 296237 - DNA, 33 bp, Homo sapien
gcaacaacagctggctcaacgcaccactgccgc

SEQ ID NO: 296238 - DNA, 33 bp, Homo sapien
gcaacaacagctggctgaacgcaccactgccgc

SEQ ID NO: 296239 - DNA, 33 bp, Homo sapien
ccccagactgatggtcaacacctggtacttggc

SEQ ID NO: 296240 - DNA, 33 bp, Homo sapien
ccccagactgatggtcgacacctggtacttggc

SEQ ID NO: 296241 - DNA, 33 bp, Homo sapien
tgcacgacgttttctccatcttaaatgcatatg

SEQ ID NO: 296242 - DNA, 33 bp, Homo sapien
tgcacgacgttttctctatcttaaatgcatatg

SEQ ID NO: 296243 - DNA, 33 bp, Homo sapien
ggacagtcatacccccaccacagtgagcgagtg

SEQ ID NO: 296244 - DNA, 33 bp, Homo sapien
ggacagtcatacccccgccacagtgagcgagtg

SEQ ID NO: 296245 - DNA, 33 bp, Homo sapien
ggcgtgaagctgggccgcgagcagttgtctggt

SEQ ID NO: 296246 - DNA, 33 bp, Homo sapien
ggcgtgaagctgggcctcgagcagttgtctggt

SEQ ID NO: 296247 - DNA, 33 bp, Homo sapien
gtgtggaagaaagagcaaagaggaaaacagaag

SEQ ID NO: 296248 - DNA, 33 bp, Homo sapien
gtgtggaagaaagagcgaagaggaaaacagaag

SEQ ID NO: 296249 - DNA, 33 bp, Homo sapien
tcagttgacactcagacggaccaggtgggtgag

SEQ ID NO: 296250 - DNA, 33 bp, Homo sapien
tcagttgacactcagatggaccaggtgggtgag

SEQ ID NO: 296251 - DNA, 33 bp, Homo sapien
ctcggtcaaccgtggaatagaaaaagctgcatt

SEQ ID NO: 296252 - DNA, 33 bp, Homo sapien
ctcggtcaaccgtggactagaaaaagctgcatt

SEQ ID NO: 296253 - DNA, 33 bp, Homo sapien
gaataggagtgagaggaaatcagagtctatgga

SEQ ID NO: 296254 - DNA, 33 bp, Homo sapien
gaataggagtgagagggaatcagagtctatgga

SEQ ID NO: 296255 - DNA, 33 bp, Homo sapien
tgacttgagaatgtgaaggcacaccgggcaagt

SEQ ID NO: 296256 - DNA, 33 bp, Homo sapien
tgacttgagaatgtgagggcacaccgggcaagt

SEQ ID NO: 296257 - DNA, 33 bp, Homo sapien
acaaatttatgttgaaaaaagagtgacaggagt

SEQ ID NO: 296258 - DNA, 33 bp, Homo sapien
acaaatttatgttgaacaaagagtgacaggagt

SEQ ID NO: 296259 - DNA, 33 bp, Homo sapien
acatagacattgatgacagtcgtaggggaggaa

SEQ ID NO: 296260 - DNA, 33 bp, Homo sapien
acatagacattgatgagagtcgtaggggaggaa

SEQ ID NO: 296261 - DNA, 33 bp, Homo sapien
tccctaaatgcagcaacctgagactggaacctc

SEQ ID NO: 296262 - DNA, 33 bp, Homo sapien
tccctaaatgcagcaatctgagactggaacctc

SEQ ID NO: 296263 - DNA, 33 bp, Homo sapien
gctgccgatgagaaaacggctaagggcacacag

SEQ ID NO: 296264 - DNA, 33 bp, Homo sapien
gctgccgatgagaaaatggctaagggcacacag

SEQ ID NO: 296265 - DNA, 33 bp, Homo sapien
gagtcagagttccccacgccgtcctatcccacc

SEQ ID NO: 296266 - DNA, 33 bp, Homo sapien
gagtcagagttccccatgccgtcctatcccacc

SEQ ID NO: 296267 - DNA, 33 bp, Homo sapien
tttgggtaaatgcaggaaggtcaccgaaggctg

SEQ ID NO: 296268 - DNA, 33 bp, Homo sapien
tttgggtaaatgcaggcaggtcaccgaaggctg

SEQ ID NO: 296269 - DNA, 33 bp, Homo sapien
ttaaaagaaatcataaatcattgtggccataca

SEQ ID NO: 296270 - DNA, 33 bp, Homo sapien
ttaaaagaaatcataagtcattgtggccataca

SEQ ID NO: 296271 - DNA, 33 bp, Homo sapien
aaagggaggtaagacacaggagtgaaaagtttc

SEQ ID NO: 296272 - DNA, 33 bp, Homo sapien
aaagggaggtaagacataggagtgaaaagtttc

SEQ ID NO: 296273 - DNA, 33 bp, Homo sapien
ttcatttggttttctaacctctgtttaatccag

SEQ ID NO: 296274 - DNA, 33 bp, Homo sapien
ttcatttggttttctaccctctgtttaatccag

SEQ ID NO: 296275 - DNA, 33 bp, Homo sapien
caaaatgaaggcattgcatgtattgttcctaaa

SEQ ID NO: 296276 - DNA, 33 bp, Homo sapien
caaaatgaaggcattgtatgtattgttcctaaa

SEQ ID NO: 296277 - DNA, 33 bp, Homo sapien
gagatttgtgtagacaaataaaccttctccata

SEQ ID NO: 296278 - DNA, 33 bp, Homo sapien
gagatttgtgtagacagataaaccttctccata

SEQ ID NO: 296279 - DNA, 33 bp, Homo sapien
actgtgctttagtggacggcggtatttatggcg

SEQ ID NO: 296280 - DNA, 33 bp, Homo sapien
actgtgctttagtggatggcggtatttatggcg

SEQ ID NO: 296281 - DNA, 33 bp, Homo sapien
gaaagacctgcaataaatggctgacggaaattc

SEQ ID NO: 296282 - DNA, 33 bp, Homo sapien
gaaagacctgcaataagtggctgacggaaattc

SEQ ID NO: 296283 - DNA, 33 bp, Homo sapien
tctatccctccccgtcacacagttctcctgcct

SEQ ID NO: 296284 - DNA, 33 bp, Homo sapien
tctatccctccccgtcgcacagttctcctgcct

SEQ ID NO: 296285 - DNA, 33 bp, Homo sapien
gccacctctgggtaaacagatcaacaaacattt

SEQ ID NO: 296286 - DNA, 33 bp, Homo sapien
gccacctctgggtaaagagatcaacaaacattt

SEQ ID NO: 296287 - DNA, 33 bp, Homo sapien
agtaaccaacgctcccactactgagaaaacaaa

SEQ ID NO: 296288 - DNA, 33 bp, Homo sapien
agtaaccaacgctcccgctactgagaaaacaaa

SEQ ID NO: 296289 - DNA, 33 bp, Homo sapien
catctcaacacgcggccgaggctcctcgcaagg

SEQ ID NO: 296290 - DNA, 33 bp, Homo sapien
catctcaacacgcggctgaggctcctcgcaagg

SEQ ID NO: 296291 - DNA, 33 bp, Homo sapien
acctgcttaggcccacactggttctcaacctgg

SEQ ID NO: 296292 - DNA, 33 bp, Homo sapien
acctgcttaggcccacgctggttctcaacctgg

SEQ ID NO: 296293 - DNA, 33 bp, Homo sapien
agcagaaggccagggaaacaaaagaaatagcgc

SEQ ID NO: 296294 - DNA, 33 bp, Homo sapien
agcagaaggccagggagacaaaagaaatagcgc

SEQ ID NO: 296295 - DNA, 33 bp, Homo sapien
gtgaagcgtttagcacaaactcgggcacgcaga

SEQ ID NO: 296296 - DNA, 33 bp, Homo sapien
gtgaagcgtttagcactaactcgggcacgcaga

SEQ ID NO: 296297 - DNA, 33 bp, Homo sapien
aaaatgaattctggaccaccacaagggttaaag

SEQ ID NO: 296298 - DNA, 33 bp, Homo sapien
aaaatgaattctggacgaccacaagggttaaag

SEQ ID NO: 296299 - DNA, 33 bp, Homo sapien
tattttggggtgtaaagtctgataatctgagac

SEQ ID NO: 296300 - DNA, 33 bp, Homo sapien
tattttggggtgtaaattctgataatctgagac

SEQ ID NO: 296301 - DNA, 33 bp, Homo sapien
ccctcttcccatgcaacgtataggggatatgag

SEQ ID NO: 296302 - DNA, 33 bp, Homo sapien
ccctcttcccatgcaatgtataggggatatgag

SEQ ID NO: 296303 - DNA, 33 bp, Homo sapien
ttaagttacaaatgacactttaatgccgtggag

SEQ ID NO: 296304 - DNA, 33 bp, Homo sapien
ttaagttacaaatgaccctttaatgccgtggag

SEQ ID NO: 296305 - DNA, 33 bp, Homo sapien
agaagtagggacaaaagttacaaaggccgacta

SEQ ID NO: 296306 - DNA, 33 bp, Homo sapien
agaagtagggacaaaatttacaaaggccgacta

SEQ ID NO: 296307 - DNA, 33 bp, Homo sapien
tcactctctagaaccaaaatccaaaaattagag

SEQ ID NO: 296308 - DNA, 33 bp, Homo sapien
tcactctctagaaccagaatccaaaaattagag

SEQ ID NO: 296309 - DNA, 33 bp, Homo sapien
atgtgtgctcattgtcgcgtttttacaatggca

SEQ ID NO: 296310 - DNA, 33 bp, Homo sapien
atgtgtgctcattgtctcgtttttacaatggca

SEQ ID NO: 296311 - DNA, 33 bp, Homo sapien
atggttgatcaattgaacatatgagattaggaa

SEQ ID NO: 296312 - DNA, 33 bp, Homo sapien
atggttgatcaattgagcatatgagattaggaa

SEQ ID NO: 296313 - DNA, 33 bp, Homo sapien
tgggcatggatgagccacacagggtccacccga

SEQ ID NO: 296314 - DNA, 33 bp, Homo sapien
tgggcatggatgagccgcacagggtccacccga

SEQ ID NO: 296315 - DNA, 33 bp, Homo sapien
acagaaaccaggcatcactaacacaggaagtgt

SEQ ID NO: 296316 - DNA, 33 bp, Homo sapien
acagaaaccaggcatcgctaacacaggaagtgt

SEQ ID NO: 296317 - DNA, 33 bp, Homo sapien
ttggcaaaagcccagactcacttttctgtgtcc

SEQ ID NO: 296318 - DNA, 33 bp, Homo sapien
ttggcaaaagcccagattcacttttctgtgtcc

SEQ ID NO: 296319 - DNA, 33 bp, Homo sapien
atgacggtgataatgacgacggagatggtgtga

SEQ ID NO: 296320 - DNA, 33 bp, Homo sapien
atgacggtgataatgatgacggagatggtgtga

SEQ ID NO: 296321 - DNA, 33 bp, Homo sapien
agttctcaccagatccaatggttttatacagtt

SEQ ID NO: 296322 - DNA, 33 bp, Homo sapien
agttctcaccagatccgatggttttatacagtt

SEQ ID NO: 296323 - DNA, 33 bp, Homo sapien
taccttactttgctgaagctgcaataacaaaac

SEQ ID NO: 296324 - DNA, 33 bp, Homo sapien
taccttactttgctgacgctgcaataacaaaac

SEQ ID NO: 296325 - DNA, 33 bp, Homo sapien
cttgattttgttatcaatcatgtttatgttagt

SEQ ID NO: 296326 - DNA, 33 bp, Homo sapien
cttgattttgttatcagtcatgtttatgttagt

SEQ ID NO: 296327 - DNA, 33 bp, Homo sapien
gtgtcagaatgaaatgaaggtttgctgactgga

SEQ ID NO: 296328 - DNA, 33 bp, Homo sapien
gtgtcagaatgaaatggaggtttgctgactgga

SEQ ID NO: 296329 - DNA, 33 bp, Homo sapien
tgtgtgaataaaggcaagagagggtccgaaaga

SEQ ID NO: 296330 - DNA, 33 bp, Homo sapien
tgtgtgaataaaggcatgagagggtccgaaaga

SEQ ID NO: 296331 - DNA, 33 bp, Homo sapien
agtgacaaagcccaggaacaggacacgttgcag

SEQ ID NO: 296332 - DNA, 33 bp, Homo sapien
agtgacaaagcccagggacaggacacgttgcag

SEQ ID NO: 296333 - DNA, 33 bp, Homo sapien
acagtggacgaagctcacgtattcaacctggcc

SEQ ID NO: 296334 - DNA, 33 bp, Homo sapien
acagtggacgaagctcgcgtattcaacctggcc

SEQ ID NO: 296335 - DNA, 33 bp, Homo sapien
ttccagatcctggatgaacggactccctgtccc

SEQ ID NO: 296336 - DNA, 33 bp, Homo sapien
ttccagatcctggatggacggactccctgtccc

SEQ ID NO: 296337 - DNA, 33 bp, Homo sapien
agggccgggtctttgcaatcagacgggcttagg

SEQ ID NO: 296338 - DNA, 33 bp, Homo sapien
agggccgggtctttgcgatcagacgggcttagg

SEQ ID NO: 296339 - DNA, 33 bp, Homo sapien
acatctgtttctagagcaaaaatgtcctcacac

SEQ ID NO: 296340 - DNA, 33 bp, Homo sapien
acatctgtttctagagtaaaaatgtcctcacac

SEQ ID NO: 296341 - DNA, 33 bp, Homo sapien
tgcacagctccagtccacgttctcaggggccac

SEQ ID NO: 296342 - DNA, 33 bp, Homo sapien
tgcacagctccagtccgcgttctcaggggccac

SEQ ID NO: 296343 - DNA, 33 bp, Homo sapien
gtcccactgtgttcacagacagacagtgtggca

SEQ ID NO: 296344 - DNA, 33 bp, Homo sapien
gtcccactgtgttcacggacagacagtgtggca

SEQ ID NO: 296345 - DNA, 33 bp, Homo sapien
atcctcagcacctggggactctgcaaagcggtg

SEQ ID NO: 296346 - DNA, 33 bp, Homo sapien
atcctcagcacctgggtactctgcaaagcggtg

SEQ ID NO: 296347 - DNA, 33 bp, Homo sapien
tggcccttttgatgaaatattctctcagtgaag

SEQ ID NO: 296348 - DNA, 33 bp, Homo sapien
tggcccttttgatgaagtattctctcagtgaag

SEQ ID NO: 296349 - DNA, 33 bp, Homo sapien
gggaggacgggcagacagcaggcacctttccaa

SEQ ID NO: 296350 - DNA, 33 bp, Homo sapien
gggaggacgggcagacggcaggcacctttccaa

SEQ ID NO: 296351 - DNA, 33 bp, Homo sapien
cagaagccctatgcgcagaacacagaatggcag

SEQ ID NO: 296352 - DNA, 33 bp, Homo sapien
cagaagccctatgcgcggaacacagaatggcag

SEQ ID NO: 296353 - DNA, 33 bp, Homo sapien
cagccacctttccttacggatttgatacttcag

SEQ ID NO: 296354 - DNA, 33 bp, Homo sapien
cagccacctttccttatggatttgatacttcag

SEQ ID NO: 296355 - DNA, 33 bp, Homo sapien
ctgtgtggcttgaatacgtgtgaaaactacatt

SEQ ID NO: 296356 - DNA, 33 bp, Homo sapien
ctgtgtggcttgaatatgtgtgaaaactacatt

SEQ ID NO: 296357 - DNA, 33 bp, Homo sapien
atttccctgaggtgaacaccatccaatttttta

SEQ ID NO: 296358 - DNA, 33 bp, Homo sapien
atttccctgaggtgaataccatccaatttttta

SEQ ID NO: 296359 - DNA, 33 bp, Homo sapien
tccaatccaacaaagacgaagaaggaagaataa

SEQ ID NO: 296360 - DNA, 33 bp, Homo sapien
tccaatccaacaaagatgaagaaggaagaataa

SEQ ID NO: 296361 - DNA, 33 bp, Homo sapien
gatacagaatgacacacagaatcatctgcttat

SEQ ID NO: 296362 - DNA, 33 bp, Homo sapien
gatacagaatgacacatagaatcatctgcttat

SEQ ID NO: 296363 - DNA, 33 bp, Homo sapien
ggtttaagaataaagcacaactgtgatacgagg

SEQ ID NO: 296364 - DNA, 33 bp, Homo sapien
ggtttaagaataaagcgcaactgtgatacgagg

SEQ ID NO: 296365 - DNA, 33 bp, Homo sapien
tgatcatctgctttgaacctgtttctgcctagg

SEQ ID NO: 296366 - DNA, 33 bp, Homo sapien
tgatcatctgctttgaccctgtttctgcctagg

SEQ ID NO: 296367 - DNA, 33 bp, Homo sapien
atgttagccttgtaaacagagaaaatttggata

SEQ ID NO: 296368 - DNA, 33 bp, Homo sapien
atgttagccttgtaaatagagaaaatttggata

SEQ ID NO: 296369 - DNA, 33 bp, Homo sapien
cacccaccggtacgtcagaagcacgtggccatg

SEQ ID NO: 296370 - DNA, 33 bp, Homo sapien
cacccaccggtacgtcggaagcacgtggccatg

SEQ ID NO: 296371 - DNA, 33 bp, Homo sapien
cagcagaaacaggaaacgtcatgagaggcttca

SEQ ID NO: 296372 - DNA, 33 bp, Homo sapien
cagcagaaacaggaaatgtcatgagaggcttca

SEQ ID NO: 296373 - DNA, 33 bp, Homo sapien
gttaagtgaaaaggagaaaaatcacagagtatt

SEQ ID NO: 296374 - DNA, 33 bp, Homo sapien
gttaagtgaaaaggaggaaaatcacagagtatt

SEQ ID NO: 296375 - DNA, 33 bp, Homo sapien
gttaattggctcagcacatatttatggggtgca

SEQ ID NO: 296376 - DNA, 33 bp, Homo sapien
gttaattggctcagcatatatttatggggtgca

SEQ ID NO: 296377 - DNA, 33 bp, Homo sapien
agctccctttttttaactgtgcaaaatacacat

SEQ ID NO: 296378 - DNA, 33 bp, Homo sapien
agctccctttttttaattgtgcaaaatacacat

SEQ ID NO: 296379 - DNA, 33 bp, Homo sapien
atgggcagaagcaaaaagaattagcacacgtct

SEQ ID NO: 296380 - DNA, 33 bp, Homo sapien
atgggcagaagcaaaacgaattagcacacgtct

SEQ ID NO: 296381 - DNA, 33 bp, Homo sapien
tgtggtctattggaaacggcagccgaaatacga

SEQ ID NO: 296382 - DNA, 33 bp, Homo sapien
tgtggtctattggaaatggcagccgaaatacga

SEQ ID NO: 296383 - DNA, 33 bp, Homo sapien
gtttaagttgtccccaataggaagcgaggttgg

SEQ ID NO: 296384 - DNA, 33 bp, Homo sapien
gtttaagttgtccccagtaggaagcgaggttgg

SEQ ID NO: 296385 - DNA, 33 bp, Homo sapien
ttcctgcatgaggtaacgcccgacagggttagt

SEQ ID NO: 296386 - DNA, 33 bp, Homo sapien
ttcctgcatgaggtaatgcccgacagggttagt

SEQ ID NO: 296387 - DNA, 33 bp, Homo sapien
ggtccctaagccgccacggccatttcaaagctg

SEQ ID NO: 296388 - DNA, 33 bp, Homo sapien
ggtccctaagccgccatggccatttcaaagctg

SEQ ID NO: 296389 - DNA, 33 bp, Homo sapien
ttaagaaatgtttttgaaaaatcagtgtgcagg

SEQ ID NO: 296390 - DNA, 33 bp, Homo sapien
ttaagaaatgtttttgtaaaatcagtgtgcagg

SEQ ID NO: 296391 - DNA, 33 bp, Homo sapien
gttttgaagaaggaaaagtgctaggaaatttca

SEQ ID NO: 296392 - DNA, 33 bp, Homo sapien
gttttgaagaaggaaaggtgctaggaaatttca

SEQ ID NO: 296393 - DNA, 33 bp, Homo sapien
tttttcacgtcatcaagggcatagctccttaga

SEQ ID NO: 296394 - DNA, 33 bp, Homo sapien
tttttcacgtcatcaatggcatagctccttaga

SEQ ID NO: 296395 - DNA, 33 bp, Homo sapien
taaacacagtattttaacagaaaaccatcaata

SEQ ID NO: 296396 - DNA, 33 bp, Homo sapien
taaacacagtattttatcagaaaaccatcaata

SEQ ID NO: 296397 - DNA, 33 bp, Homo sapien
aaatgattattacattaaaccaacggatgaatc

SEQ ID NO: 296398 - DNA, 33 bp, Homo sapien
aaatgattattacattcaaccaacggatgaatc

SEQ ID NO: 296399 - DNA, 33 bp, Homo sapien
ctcccagctgctctacagaatcctcaaatgggc

SEQ ID NO: 296400 - DNA, 33 bp, Homo sapien
ctcccagctgctctacggaatcctcaaatgggc

SEQ ID NO: 296401 - DNA, 33 bp, Homo sapien
gtttcctgctttctgaactccataaaccttgag

SEQ ID NO: 296402 - DNA, 33 bp, Homo sapien
gtttcctgctttctgagctccataaaccttgag

SEQ ID NO: 296403 - DNA, 33 bp, Homo sapien
gcagggccccgggctacgtatgggtagttgcag

SEQ ID NO: 296404 - DNA, 33 bp, Homo sapien
gcagggccccgggctatgtatgggtagttgcag

SEQ ID NO: 296405 - DNA, 33 bp, Homo sapien
tgatttgttacatgcactacctacaaatatcag

SEQ ID NO: 296406 - DNA, 33 bp, Homo sapien
tgatttgttacatgcattacctacaaatatcag

SEQ ID NO: 296407 - DNA, 33 bp, Homo sapien
cagaacagaaggaaagccaggtgagcaatattt

SEQ ID NO: 296408 - DNA, 33 bp, Homo sapien
cagaacagaaggaaagtcaggtgagcaatattt

SEQ ID NO: 296409 - DNA, 33 bp, Homo sapien
agctactgaatttctcaatagtatcatctgtaa

SEQ ID NO: 296410 - DNA, 33 bp, Homo sapien
agctactgaatttctcgatagtatcatctgtaa

SEQ ID NO: 296411 - DNA, 33 bp, Homo sapien
atcaagatgattgccactagccccctgtgacga

SEQ ID NO: 296412 - DNA, 33 bp, Homo sapien
atcaagatgattgccagtagccccctgtgacga

SEQ ID NO: 296413 - DNA, 33 bp, Homo sapien
agttggtggaagttcccagcatgttcattgtgt

SEQ ID NO: 296414 - DNA, 33 bp, Homo sapien
agttggtggaagttcctagcatgttcattgtgt

SEQ ID NO: 296415 - DNA, 33 bp, Homo sapien
tcgtttagcacattcactctctgcaatctgtct

SEQ ID NO: 296416 - DNA, 33 bp, Homo sapien
tcgtttagcacattcattctctgcaatctgtct

SEQ ID NO: 296417 - DNA, 33 bp, Homo sapien
gacttttctcaagggccgattctcatggaccaa

SEQ ID NO: 296418 - DNA, 33 bp, Homo sapien
gacttttctcaagggctgattctcatggaccaa

SEQ ID NO: 296419 - DNA, 33 bp, Homo sapien
gtggagacattgtggaaggtcatacaggcaggc

SEQ ID NO: 296420 - DNA, 33 bp, Homo sapien
gtggagacattgtggagggtcatacaggcaggc

SEQ ID NO: 296421 - DNA, 33 bp, Homo sapien
tgattcttacccaatgcagcaaaccttcttctg

SEQ ID NO: 296422 - DNA, 33 bp, Homo sapien
tgattcttacccaatgtagcaaaccttcttctg

SEQ ID NO: 296423 - DNA, 33 bp, Homo sapien
atccttggagctggaccctttattggctctagt

SEQ ID NO: 296424 - DNA, 33 bp, Homo sapien
atccttggagctggactctttattggctctagt

SEQ ID NO: 296425 - DNA, 33 bp, Homo sapien
tgcttctgcagggacaaatcgctgggaaaccaa

SEQ ID NO: 296426 - DNA, 33 bp, Homo sapien
tgcttctgcagggacagatcgctgggaaaccaa

SEQ ID NO: 296427 - DNA, 33 bp, Homo sapien
gaagcagtttccagaacgcagaggtcatccggg

SEQ ID NO: 296428 - DNA, 33 bp, Homo sapien
gaagcagtttccagaatgcagaggtcatccggg

SEQ ID NO: 296429 - DNA, 33 bp, Homo sapien
ttctaagatcctataactgaacttgggtgtgac

SEQ ID NO: 296430 - DNA, 33 bp, Homo sapien
ttctaagatcctataattgaacttgggtgtgac

SEQ ID NO: 296431 - DNA, 33 bp, Homo sapien
tgcatccaaatctgtacctagtgatcctagctc

SEQ ID NO: 296432 - DNA, 33 bp, Homo sapien
tgcatccaaatctgtatctagtgatcctagctc

SEQ ID NO: 296433 - DNA, 33 bp, Homo sapien
gtgtgtcttgaacagaagtgggagaaaacagag

SEQ ID NO: 296434 - DNA, 33 bp, Homo sapien
gtgtgtcttgaacagacgtgggagaaaacagag

SEQ ID NO: 296435 - DNA, 33 bp, Homo sapien
agatagagaataaagtcaagcgtatcacttagt

SEQ ID NO: 296436 - DNA, 33 bp, Homo sapien
agatagagaataaagttaagcgtatcacttagt

SEQ ID NO: 296437 - DNA, 33 bp, Homo sapien
tgaatgacaacatgaaggaaatcacagtatatt

SEQ ID NO: 296438 - DNA, 33 bp, Homo sapien
tgaatgacaacatgaatgaaatcacagtatatt

SEQ ID NO: 296439 - DNA, 33 bp, Homo sapien
aggcagaggaaagtcacgaaaaggtggtcgctg

SEQ ID NO: 296440 - DNA, 33 bp, Homo sapien
aggcagaggaaagtcatgaaaaggtggtcgctg

SEQ ID NO: 296441 - DNA, 33 bp, Homo sapien
tggcataaatggtctcaacaaagtagatacaaa

SEQ ID NO: 296442 - DNA, 33 bp, Homo sapien
tggcataaatggtctcgacaaagtagatacaaa

SEQ ID NO: 296443 - DNA, 33 bp, Homo sapien
ctctgatctgttccaactcattgacacatgagc

SEQ ID NO: 296444 - DNA, 33 bp, Homo sapien
ctctgatctgttccaattcattgacacatgagc

SEQ ID NO: 296445 - DNA, 33 bp, Homo sapien
gtcttcatcgggaacccgggctcatgcatttgg

SEQ ID NO: 296446 - DNA, 33 bp, Homo sapien
gtcttcatcgggaacctgggctcatgcatttgg

SEQ ID NO: 296447 - DNA, 33 bp, Homo sapien
cttcagccagaggagaagagatgtccattttcc

SEQ ID NO: 296448 - DNA, 33 bp, Homo sapien
cttcagccagaggagaggagatgtccattttcc

SEQ ID NO: 296449 - DNA, 33 bp, Homo sapien
ccactacacagcagaacgagaaacacagcagag

SEQ ID NO: 296450 - DNA, 33 bp, Homo sapien
ccactacacagcagaatgagaaacacagcagag

SEQ ID NO: 296451 - DNA, 33 bp, Homo sapien
tggtgagtctttgatccagtctgtgagaaagct

SEQ ID NO: 296452 - DNA, 33 bp, Homo sapien
tggtgagtctttgatctagtctgtgagaaagct

SEQ ID NO: 296453 - DNA, 33 bp, Homo sapien
catgctgacagtttcaatagaaatttggtaagg

SEQ ID NO: 296454 - DNA, 33 bp, Homo sapien
catgctgacagtttcagtagaaatttggtaagg

SEQ ID NO: 296455 - DNA, 33 bp, Homo sapien
agcatctgttttgtaccaggcgcgagtaacctg

SEQ ID NO: 296456 - DNA, 33 bp, Homo sapien
agcatctgttttgtactaggcgcgagtaacctg

SEQ ID NO: 296457 - DNA, 33 bp, Homo sapien
ggtagccagctggttacactggaccacttccat

SEQ ID NO: 296458 - DNA, 33 bp, Homo sapien
ggtagccagctggttagactggaccacttccat

SEQ ID NO: 296459 - DNA, 33 bp, Homo sapien
acggtaaaacacctggaactcaggattgggtgt

SEQ ID NO: 296460 - DNA, 33 bp, Homo sapien
acggtaaaacacctgggactcaggattgggtgt

SEQ ID NO: 296461 - DNA, 33 bp, Homo sapien
cctagtctatagcaacactcttacccaatccat

SEQ ID NO: 296462 - DNA, 33 bp, Homo sapien
cctagtctatagcaacgctcttacccaatccat

SEQ ID NO: 296463 - DNA, 33 bp, Homo sapien
ctgcaaatcaaaaagaaataaacacgatagaaa

SEQ ID NO: 296464 - DNA, 33 bp, Homo sapien
ctgcaaatcaaaaagatataaacacgatagaaa

SEQ ID NO: 296465 - DNA, 33 bp, Homo sapien
catccagaacctgtacagagaaagaatgaggat

SEQ ID NO: 296466 - DNA, 33 bp, Homo sapien
catccagaacctgtacggagaaagaatgaggat

SEQ ID NO: 296467 - DNA, 33 bp, Homo sapien
ctgggcttcctttgtcacacctggtcaaagctg

SEQ ID NO: 296468 - DNA, 33 bp, Homo sapien
ctgggcttcctttgtcccacctggtcaaagctg

SEQ ID NO: 296469 - DNA, 33 bp, Homo sapien
gggtgtgaggcagagacatttacgccgtgtgag

SEQ ID NO: 296470 - DNA, 33 bp, Homo sapien
gggtgtgaggcagagatatttacgccgtgtgag

SEQ ID NO: 296471 - DNA, 33 bp, Homo sapien
gaagtttccatgactccagagttctctttagga

SEQ ID NO: 296472 - DNA, 33 bp, Homo sapien
gaagtttccatgactcgagagttctctttagga

SEQ ID NO: 296473 - DNA, 33 bp, Homo sapien
tgatcttggacacaaaatgctcagcacagcacc

SEQ ID NO: 296474 - DNA, 33 bp, Homo sapien
tgatcttggacacaaagtgctcagcacagcacc

SEQ ID NO: 296475 - DNA, 33 bp, Homo sapien
acccaggcgaactccaaccgatgtggccccagg

SEQ ID NO: 296476 - DNA, 33 bp, Homo sapien
acccaggcgaactccagccgatgtggccccagg

SEQ ID NO: 296477 - DNA, 33 bp, Homo sapien
acatatgtacctccccaacagtctttgatcctg

SEQ ID NO: 296478 - DNA, 33 bp, Homo sapien
acatatgtacctcccccacagtctttgatcctg

SEQ ID NO: 296479 - DNA, 33 bp, Homo sapien
agtctttgatcctgaacgcacagctctccccta

SEQ ID NO: 296480 - DNA, 33 bp, Homo sapien
agtctttgatcctgaatgcacagctctccccta

SEQ ID NO: 296481 - DNA, 33 bp, Homo sapien
cacagactcagaagtcactaaagcatctagaac

SEQ ID NO: 296482 - DNA, 33 bp, Homo sapien
cacagactcagaagtcgctaaagcatctagaac

SEQ ID NO: 296483 - DNA, 33 bp, Homo sapien
attttggggttgatgaagcttgtagagttattg

SEQ ID NO: 296484 - DNA, 33 bp, Homo sapien
attttggggttgatgacgcttgtagagttattg

SEQ ID NO: 296485 - DNA, 33 bp, Homo sapien
gggcaggctgtgcacgcatgatgcctgcatcta

SEQ ID NO: 296486 - DNA, 33 bp, Homo sapien
gggcaggctgtgcacgtatgatgcctgcatcta

SEQ ID NO: 296487 - DNA, 33 bp, Homo sapien
ctttatcaattactcagtctcaggtcctccttc

SEQ ID NO: 296488 - DNA, 33 bp, Homo sapien
ctttatcaattactcattctcaggtcctccttc

SEQ ID NO: 296489 - DNA, 33 bp, Homo sapien
actaggaagacctacaaagtcgctgagcatgca

SEQ ID NO: 296490 - DNA, 33 bp, Homo sapien
actaggaagacctacagagtcgctgagcatgca

SEQ ID NO: 296491 - DNA, 33 bp, Homo sapien
gaaccaaccagaagaacgaaactacgaacacgt

SEQ ID NO: 296492 - DNA, 33 bp, Homo sapien
gaaccaaccagaagaatgaaactacgaacacgt

SEQ ID NO: 296493 - DNA, 33 bp, Homo sapien
gacacatcatctttaaaaactataacactcacc

SEQ ID NO: 296494 - DNA, 33 bp, Homo sapien
gacacatcatctttaagaactataacactcacc

SEQ ID NO: 296495 - DNA, 33 bp, Homo sapien
tggaacaggaattctacaaggcagtggaaagag

SEQ ID NO: 296496 - DNA, 33 bp, Homo sapien
tggaacaggaattctataaggcagtggaaagag

SEQ ID NO: 296497 - DNA, 33 bp, Homo sapien
tgcacggggagtgaaacgtacgtcccatcttac

SEQ ID NO: 296498 - DNA, 33 bp, Homo sapien
tgcacggggagtgaaatgtacgtcccatcttac

SEQ ID NO: 296499 - DNA, 33 bp, Homo sapien
cagatctgactgtatacggtaaagcgactgtga

SEQ ID NO: 296500 - DNA, 33 bp, Homo sapien
cagatctgactgtatatggtaaagcgactgtga

SEQ ID NO: 296501 - DNA, 33 bp, Homo sapien
tactgagaccagggacgggggttggctctgccg

SEQ ID NO: 296502 - DNA, 33 bp, Homo sapien
tactgagaccagggactggggttggctctgccg

SEQ ID NO: 296503 - DNA, 33 bp, Homo sapien
caagcacagagaacacaggtgacagctctgtga

SEQ ID NO: 296504 - DNA, 33 bp, Homo sapien
caagcacagagaacacgggtgacagctctgtga

SEQ ID NO: 296505 - DNA, 33 bp, Homo sapien
acaggctcggctctcaaccctcaattcaggatg

SEQ ID NO: 296506 - DNA, 33 bp, Homo sapien
acaggctcggctctcacccctcaattcaggatg

SEQ ID NO: 296507 - DNA, 33 bp, Homo sapien
ttgtcaatatctacaacatctatctctatctat

SEQ ID NO: 296508 - DNA, 33 bp, Homo sapien
ttgtcaatatctacaatatctatctctatctat

SEQ ID NO: 296509 - DNA, 33 bp, Homo sapien
gaaggcaaacatatgaataaatatatcaagcta

SEQ ID NO: 296510 - DNA, 33 bp, Homo sapien
gaaggcaaacatatgagtaaatatatcaagcta

SEQ ID NO: 296511 - DNA, 33 bp, Homo sapien
tggtctggcctcagagccggtgtgtgccatcat

SEQ ID NO: 296512 - DNA, 33 bp, Homo sapien
tggtctggcctcagagtcggtgtgtgccatcat

SEQ ID NO: 296513 - DNA, 33 bp, Homo sapien
cggctcacggtgcccgaagatccacctggcacc

SEQ ID NO: 296514 - DNA, 33 bp, Homo sapien
cggctcacggtgcccggagatccacctggcacc

SEQ ID NO: 296515 - DNA, 33 bp, Homo sapien
taatctcatgcttacaaaagagttgcaaaaata

SEQ ID NO: 296516 - DNA, 33 bp, Homo sapien
taatctcatgcttacagaagagttgcaaaaata

SEQ ID NO: 296517 - DNA, 33 bp, Homo sapien
ggaggtgattggatcgcacaggcagttccccca

SEQ ID NO: 296518 - DNA, 33 bp, Homo sapien
ggaggtgattggatcgtacaggcagttccccca

SEQ ID NO: 296519 - DNA, 33 bp, Homo sapien
ggacacagagccaaacaatatcgcaagggaaaa

SEQ ID NO: 296520 - DNA, 33 bp, Homo sapien
ggacacagagccaaaccatatcgcaagggaaaa

SEQ ID NO: 296521 - DNA, 33 bp, Homo sapien
aagcgggctcacagaagagacggtgattgtgat

SEQ ID NO: 296522 - DNA, 33 bp, Homo sapien
aagcgggctcacagaatagacggtgattgtgat

SEQ ID NO: 296523 - DNA, 33 bp, Homo sapien
tctgctactaggaaaaagttctgggatagttcg

SEQ ID NO: 296524 - DNA, 33 bp, Homo sapien
tctgctactaggaaaaggttctgggatagttcg

SEQ ID NO: 296525 - DNA, 33 bp, Homo sapien
tgtcacaaatcttcaacctgtaaaaaacaaata

SEQ ID NO: 296526 - DNA, 33 bp, Homo sapien
tgtcacaaatcttcaatctgtaaaaaacaaata

SEQ ID NO: 296527 - DNA, 33 bp, Homo sapien
gcatttcttagcctcacgttagaaaaagcacaa

SEQ ID NO: 296528 - DNA, 33 bp, Homo sapien
gcatttcttagcctcaggttagaaaaagcacaa

SEQ ID NO: 296529 - DNA, 33 bp, Homo sapien
ggaagatcatcagactaaaggtgtaactcgaat

SEQ ID NO: 296530 - DNA, 33 bp, Homo sapien
ggaagatcatcagactgaaggtgtaactcgaat

SEQ ID NO: 296531 - DNA, 33 bp, Homo sapien
cttaaaccatctcccaagtactgttcaccatga

SEQ ID NO: 296532 - DNA, 33 bp, Homo sapien
cttaaaccatctcccaggtactgttcaccatga

SEQ ID NO: 296533 - DNA, 33 bp, Homo sapien
gccatgtgcaaccatgcatattcacagctattc

SEQ ID NO: 296534 - DNA, 33 bp, Homo sapien
gccatgtgcaaccatgtatattcacagctattc

SEQ ID NO: 296535 - DNA, 33 bp, Homo sapien
atgataaacaacactcaataatgttctgacaaa

SEQ ID NO: 296536 - DNA, 33 bp, Homo sapien
atgataaacaacactcgataatgttctgacaaa

SEQ ID NO: 296537 - DNA, 33 bp, Homo sapien
tcatagacgccagtaaagacaggattttcctgt

SEQ ID NO: 296538 - DNA, 33 bp, Homo sapien
tcatagacgccagtaatgacaggattttcctgt

SEQ ID NO: 296539 - DNA, 33 bp, Homo sapien
tcactctctgggctgccaaaaaggcgtccggtg

SEQ ID NO: 296540 - DNA, 33 bp, Homo sapien
tcactctctgggctgctaaaaaggcgtccggtg

SEQ ID NO: 296541 - DNA, 33 bp, Homo sapien
gatttgatttgaataaaaacacctgcggcttct

SEQ ID NO: 296542 - DNA, 33 bp, Homo sapien
gatttgatttgaataagaacacctgcggcttct

SEQ ID NO: 296543 - DNA, 33 bp, Homo sapien
ttttattccgagatcgaagtcgtgccaagcgct

SEQ ID NO: 296544 - DNA, 33 bp, Homo sapien
ttttattccgagatcgtagtcgtgccaagcgct

SEQ ID NO: 296545 - DNA, 33 bp, Homo sapien
ctgcaagagatactgcactggcaagcatctcct

SEQ ID NO: 296546 - DNA, 33 bp, Homo sapien
ctgcaagagatactgcgctggcaagcatctcct

SEQ ID NO: 296547 - DNA, 33 bp, Homo sapien
tctacatcttatctggaacctcggagttctgga

SEQ ID NO: 296548 - DNA, 33 bp, Homo sapien
tctacatcttatctgggacctcggagttctgga

SEQ ID NO: 296549 - DNA, 33 bp, Homo sapien
ggctcatgacaaagaaaagaaaactggtgcgac

SEQ ID NO: 296550 - DNA, 33 bp, Homo sapien
ggctcatgacaaagaagagaaaactggtgcgac

SEQ ID NO: 296551 - DNA, 33 bp, Homo sapien
ctctttttttgttccacgtgaattctagaatag

SEQ ID NO: 296552 - DNA, 33 bp, Homo sapien
ctctttttttgttccatgtgaattctagaatag

SEQ ID NO: 296553 - DNA, 33 bp, Homo sapien
agcacacagggagcaacaagggagctggacagg

SEQ ID NO: 296554 - DNA, 33 bp, Homo sapien
agcacacagggagcaagaagggagctggacagg

SEQ ID NO: 296555 - DNA, 33 bp, Homo sapien
ggcatagctgcaccacactttgcttatctgttc

SEQ ID NO: 296556 - DNA, 33 bp, Homo sapien
ggcatagctgcaccacgctttgcttatctgttc

SEQ ID NO: 296557 - DNA, 33 bp, Homo sapien
gtgtgagaatattatccagaagggtgatttctc

SEQ ID NO: 296558 - DNA, 33 bp, Homo sapien
gtgtgagaatattatctagaagggtgatttctc

SEQ ID NO: 296559 - DNA, 33 bp, Homo sapien
attggtatatgacagaaacaatctctcaactga

SEQ ID NO: 296560 - DNA, 33 bp, Homo sapien
attggtatatgacagagacaatctctcaactga

SEQ ID NO: 296561 - DNA, 33 bp, Homo sapien
ttagcaaatgtggtgcaagaaaaggcttgtttg

SEQ ID NO: 296562 - DNA, 33 bp, Homo sapien
ttagcaaatgtggtgcgagaaaaggcttgtttg

SEQ ID NO: 296563 - DNA, 33 bp, Homo sapien
cacaaagttgtaagcaatcacacatgggctgta

SEQ ID NO: 296564 - DNA, 33 bp, Homo sapien
cacaaagttgtaagcagtcacacatgggctgta

SEQ ID NO: 296565 - DNA, 33 bp, Homo sapien
atgggaacccacagcacatttttgctcaggttt

SEQ ID NO: 296566 - DNA, 33 bp, Homo sapien
atgggaacccacagcagatttttgctcaggttt

SEQ ID NO: 296567 - DNA, 33 bp, Homo sapien
gtctttaggtaccacacgtgaagtctgatggtg

SEQ ID NO: 296568 - DNA, 33 bp, Homo sapien
gtctttaggtaccacatgtgaagtctgatggtg

SEQ ID NO: 296569 - DNA, 33 bp, Homo sapien
ctcttccgaaggtctccaggttcccaaagttcc

SEQ ID NO: 296570 - DNA, 33 bp, Homo sapien
ctcttccgaaggtctcgaggttcccaaagttcc

SEQ ID NO: 296571 - DNA, 33 bp, Homo sapien
tttcaggaccatacaactgtttgcgtaagttta

SEQ ID NO: 296572 - DNA, 33 bp, Homo sapien
tttcaggaccatacaattgtttgcgtaagttta

SEQ ID NO: 296573 - DNA, 33 bp, Homo sapien
ctgatttcctcatccaaacagttgaaacaggtg

SEQ ID NO: 296574 - DNA, 33 bp, Homo sapien
ctgatttcctcatccagacagttgaaacaggtg

SEQ ID NO: 296575 - DNA, 33 bp, Homo sapien
tcagtctttccatcacactggctctccacagtt

SEQ ID NO: 296576 - DNA, 33 bp, Homo sapien
tcagtctttccatcacgctggctctccacagtt

SEQ ID NO: 296577 - DNA, 33 bp, Homo sapien
gaagatgtcaccaatacgaccgataaaaaagct

SEQ ID NO: 296578 - DNA, 33 bp, Homo sapien
gaagatgtcaccaatatgaccgataaaaaagct

SEQ ID NO: 296579 - DNA, 33 bp, Homo sapien
ttgttttattcagatccaaaatctcctggacca

SEQ ID NO: 296580 - DNA, 33 bp, Homo sapien
ttgttttattcagatctaaaatctcctggacca

SEQ ID NO: 296581 - DNA, 33 bp, Homo sapien
gttcaggcacgttctcaccctcgggagccactg

SEQ ID NO: 296582 - DNA, 33 bp, Homo sapien
gttcaggcacgttctcgccctcgggagccactg

SEQ ID NO: 296583 - DNA, 33 bp, Homo sapien; identical to SEQ ID NO: 296581

SEQ ID NO: 296584 - DNA, 33 bp, Homo sapien; identical to SEQ ID NO: 296582

SEQ ID NO: 296585 - DNA, 33 bp, Homo sapien
tctcctggcattgaggacaaaatttccaatgat

SEQ ID NO: 296586 - DNA, 33 bp, Homo sapien
tctcctggcattgaggtcaaaatttccaatgat

SEQ ID NO: 296587 - DNA, 33 bp, Homo sapien; identical to SEQ ID NO: 296585

SEQ ID NO: 296588 - DNA, 33 bp, Homo sapien; identical to SEQ ID NO: 296586

SEQ ID NO: 296589 - DNA, 33 bp, Homo sapien
aaggagaagtgacttaactgaagctttgggaga

SEQ ID NO: 296590 - DNA, 33 bp, Homo sapien
aaggagaagtgacttagctgaagctttgggaga

SEQ ID NO: 296591 - DNA, 33 bp, Homo sapien
gtctgctgggaaaaaaatcagtgtgcaaaggct

SEQ ID NO: 296592 - DNA, 33 bp, Homo sapien
gtctgctgggaaaaaagtcagtgtgcaaaggct

SEQ ID NO: 296593 - DNA, 33 bp, Homo sapien
tgccattgaacttagcaagcatccagttcttgg

SEQ ID NO: 296594 - DNA, 33 bp, Homo sapien
tgccattgaacttagcgagcatccagttcttgg

SEQ ID NO: 296595 - DNA, 33 bp, Homo sapien
tggatccaagagctaacgtagcagatgaagtcc

SEQ ID NO: 296596 - DNA, 33 bp, Homo sapien
tggatccaagagctaatgtagcagatgaagtcc

SEQ ID NO: 296597 - DNA, 33 bp, Homo sapien
tgtggtaaaaagggaacgcttctccactgctgg

SEQ ID NO: 296598 - DNA, 33 bp, Homo sapien
tgtggtaaaaagggaatgcttctccactgctgg

SEQ ID NO: 296599 - DNA, 33 bp, Homo sapien
tgtgaaaaacaggcaaagttgtccaataccaaa

SEQ ID NO: 296600 - DNA, 33 bp, Homo sapien
tgtgaaaaacaggcaaggttgtccaataccaaa

SEQ ID NO: 296601 - DNA, 33 bp, Homo sapien
ttcttttaatgaaaagcaccaagccccccaaca

SEQ ID NO: 296602 - DNA, 33 bp, Homo sapien
ttcttttaatgaaaaggaccaagccccccaaca

SEQ ID NO: 296603 - DNA, 33 bp, Homo sapien
cactccttcaatgacacgggccttgactccttg

SEQ ID NO: 296604 - DNA, 33 bp, Homo sapien
cactccttcaatgacatgggccttgactccttg

SEQ ID NO: 296605 - DNA, 33 bp, Homo sapien
agacacaggttagcaccgggcatcagaaataac

SEQ ID NO: 296606 - DNA, 33 bp, Homo sapien
agacacaggttagcactgggcatcagaaataac

SEQ ID NO: 296607 - DNA, 33 bp, Homo sapien
tgtgtctactaaaccacgctgcagcctctctat

SEQ ID NO: 296608 - DNA, 33 bp, Homo sapien
tgtgtctactaaaccatgctgcagcctctctat

SEQ ID NO: 296609 - DNA, 33 bp, Homo sapien
ttaacaaacttgacccaattgactctgtgggat

SEQ ID NO: 296610 - DNA, 33 bp, Homo sapien
ttaacaaacttgacccgattgactctgtgggat

SEQ ID NO: 296611 - DNA, 33 bp, Homo sapien
gactggatttctaaaaatgtactcctatatatt

SEQ ID NO: 296612 - DNA, 33 bp, Homo sapien
gactggatttctaaaagtgtactcctatatatt

SEQ ID NO: 296613 - DNA, 33 bp, Homo sapien
ggagttccagggttcaagtctcaaagtcagggg

SEQ ID NO: 296614 - DNA, 33 bp, Homo sapien
ggagttccagggttcacgtctcaaagtcagggg

SEQ ID NO: 296615 - DNA, 33 bp, Homo sapien
ctgaacttcccggacgaaggaggctgctattcc

SEQ ID NO: 296616 - DNA, 33 bp, Homo sapien
ctgaacttcccggacgcaggaggctgctattcc

SEQ ID NO: 296617 - DNA, 33 bp, Homo sapien
caatactaaacaagaaaggctcgtttattcact

SEQ ID NO: 296618 - DNA, 33 bp, Homo sapien
caatactaaacaagaacggctcgtttattcact

SEQ ID NO: 296619 - DNA, 33 bp, Homo sapien
aacccgcatttctgagcccccgagatcctgaca

SEQ ID NO: 296620 - DNA, 33 bp, Homo sapien
aacccgcatttctgagtccccgagatcctgaca

SEQ ID NO: 296621 - DNA, 33 bp, Homo sapien
ggaaggcgtgcctcggcaagggtatagccctga

SEQ ID NO: 296622 - DNA, 33 bp, Homo sapien
ggaaggcgtgcctcggtaagggtatagccctga

SEQ ID NO: 296623 - DNA, 33 bp, Homo sapien
ccccttcaaggtagaaactcgctaataatgttt

SEQ ID NO: 296624 - DNA, 33 bp, Homo sapien
ccccttcaaggtagaacctcgctaataatgttt

SEQ ID NO: 296625 - DNA, 33 bp, Homo sapien
gcttgctgcacaaaaacgagacaaggaagttcc

SEQ ID NO: 296626 - DNA, 33 bp, Homo sapien
gcttgctgcacaaaaatgagacaaggaagttcc

SEQ ID NO: 296627 - DNA, 33 bp, Homo sapien
ccaaagattcagactcccgcaccctaagagtga

SEQ ID NO: 296628 - DNA, 33 bp, Homo sapien
ccaaagattcagactctcgcaccctaagagtga

SEQ ID NO: 296629 - DNA, 33 bp, Homo sapien
ataatacttattctacggatctatgaacatagt

SEQ ID NO: 296630 - DNA, 33 bp, Homo sapien
ataatacttattctactgatctatgaacatagt

SEQ ID NO: 296631 - DNA, 33 bp, Homo sapien
atgtgagatttctccaacaatatttacaaccca

SEQ ID NO: 296632 - DNA, 33 bp, Homo sapien
atgtgagatttctccatcaatatttacaaccca

SEQ ID NO: 296633 - DNA, 33 bp, Homo sapien
tgcataggccaagtccacgctgattcaggatat

SEQ ID NO: 296634 - DNA, 33 bp, Homo sapien
tgcataggccaagtcctcgctgattcaggatat

SEQ ID NO: 296635 - DNA, 33 bp, Homo sapien
aattactaaactgtctaaaaatcgaccaaaatc

SEQ ID NO: 296636 - DNA, 33 bp, Homo sapien
aattactaaactgtctcaaaatcgaccaaaatc

SEQ ID NO: 296637 - DNA, 33 bp, Homo sapien
ttaaagtactaccagcaaatacagttttccttc

SEQ ID NO: 296638 - DNA, 33 bp, Homo sapien
ttaaagtactaccagcgaatacagttttccttc

SEQ ID NO: 296639 - DNA, 33 bp, Homo sapien
ctgaggacgctgctaccgaaaagaaacctcgta

SEQ ID NO: 296640 - DNA, 33 bp, Homo sapien
ctgaggacgctgctactgaaaagaaacctcgta

SEQ ID NO: 296641 - DNA, 33 bp, Homo sapien
ttttatggctgacccaaaagtaactatataatt

SEQ ID NO: 296642 - DNA, 33 bp, Homo sapien
ttttatggctgacccacaagtaactatataatt

SEQ ID NO: 296643 - DNA, 33 bp, Homo sapien
tccctgagcagctaccagagatccagaatagtg

SEQ ID NO: 296644 - DNA, 33 bp, Homo sapien
tccctgagcagctaccggagatccagaatagtg

SEQ ID NO: 296645 - DNA, 33 bp, Homo sapien
ttaaaaaaagattgagacctgtactgagaggat

SEQ ID NO: 296646 - DNA, 33 bp, Homo sapien
ttaaaaaaagattgaggcctgtactgagaggat

SEQ ID NO: 296647 - DNA, 33 bp, Homo sapien
ctcaagctaaagttaagtgtgatttgaccaact

SEQ ID NO: 296648 - DNA, 33 bp, Homo sapien
ctcaagctaaagttaattgtgatttgaccaact

SEQ ID NO: 296649 - DNA, 33 bp, Homo sapien
tatagtctccacctgcaatttcttctcaataga

SEQ ID NO: 296650 - DNA, 33 bp, Homo sapien
tatagtctccacctgcgatttcttctcaataga

SEQ ID NO: 296651 - DNA, 33 bp, Homo sapien
tattatacttctaatacgctatgctaaatgtct

SEQ ID NO: 296652 - DNA, 33 bp, Homo sapien
tattatacttctaatatgctatgctaaatgtct

SEQ ID NO: 296653 - DNA, 33 bp, Homo sapien
gtgccaacatttttatcaccatagggaagaggc

SEQ ID NO: 296654 - DNA, 33 bp, Homo sapien
gtgccaacatttttatgaccatagggaagaggc

SEQ ID NO: 296655 - DNA, 33 bp, Homo sapien
ccgcgcccggccgcaggagttttaatgtggatt

SEQ ID NO: 296656 - DNA, 33 bp, Homo sapien
ccgcgcccggccgcagtagttttaatgtggatt

SEQ ID NO: 296657 - DNA, 33 bp, Homo sapien
atgtcatcaaaagcaccagcagtgagaacaagt

SEQ ID NO: 296658 - DNA, 33 bp, Homo sapien
atgtcatcaaaagcacgagcagtgagaacaagt

SEQ ID NO: 296659 - DNA, 33 bp, Homo sapien
acgtgctagtaaactcagacgagtgattccacc

SEQ ID NO: 296660 - DNA, 33 bp, Homo sapien
acgtgctagtaaactcggacgagtgattccacc

SEQ ID NO: 296661 - DNA, 33 bp, Homo sapien
gaggcactgtgtaaaacgtatatggtattcaat

SEQ ID NO: 296662 - DNA, 33 bp, Homo sapien
gaggcactgtgtaaaatgtatatggtattcaat

SEQ ID NO: 296663 - DNA, 33 bp, Homo sapien
tttagattgtgtagccagcaattttttgctact

SEQ ID NO: 296664 - DNA, 33 bp, Homo sapien
tttagattgtgtagccggcaattttttgctact

SEQ ID NO: 296665 - DNA, 33 bp, Homo sapien
taatcaaatcattatccaacgtgtagaatctaa

SEQ ID NO: 296666 - DNA, 33 bp, Homo sapien
taatcaaatcattatctaacgtgtagaatctaa

SEQ ID NO: 296667 - DNA, 33 bp, Homo sapien
ccccccagtattgcaccagtactaaatccaagc

SEQ ID NO: 296668 - DNA, 33 bp, Homo sapien
ccccccagtattgcacgagtactaaatccaagc

SEQ ID NO: 296669 - DNA, 33 bp, Homo sapien
ttgaaacaaattgcaaaagtcatcatgtgtgac

SEQ ID NO: 296670 - DNA, 33 bp, Homo sapien
ttgaaacaaattgcaagagtcatcatgtgtgac

SEQ ID NO: 296671 - DNA, 33 bp, Homo sapien
aggggagtgggaggaacaaatgtcaagaagaaa

SEQ ID NO: 296672 - DNA, 33 bp, Homo sapien
aggggagtgggaggaataaatgtcaagaagaaa

SEQ ID NO: 296673 - DNA, 33 bp, Homo sapien
tggctgcaagtttggacggaaacagactcctgg

SEQ ID NO: 296674 - DNA, 33 bp, Homo sapien
tggctgcaagtttggatggaaacagactcctgg

SEQ ID NO: 296675 - DNA, 33 bp, Homo sapien
tcatccatcatggctgaaatcactttcttccaa

SEQ ID NO: 296676 - DNA, 33 bp, Homo sapien
tcatccatcatggctggaatcactttcttccaa

SEQ ID NO: 296677 - DNA, 33 bp, Homo sapien
atctttttctgagcagcagaccttaataggagg

SEQ ID NO: 296678 - DNA, 33 bp, Homo sapien
atctttttctgagcagtagaccttaataggagg

SEQ ID NO: 296679 - DNA, 33 bp, Homo sapien
ggtaaaatggataaacgggttcatcatacaatg

SEQ ID NO: 296680 - DNA, 33 bp, Homo sapien
ggtaaaatggataaactggttcatcatacaatg

SEQ ID NO: 296681 - DNA, 33 bp, Homo sapien
caaattcaacacttaaaagccggggtgaattaa

SEQ ID NO: 296682 - DNA, 33 bp, Homo sapien
caaattcaacacttaagagccggggtgaattaa

SEQ ID NO: 296683 - DNA, 33 bp, Homo sapien
tgtcttccaggagcaaacatctcaacaagcaaa

SEQ ID NO: 296684 - DNA, 33 bp, Homo sapien
tgtcttccaggagcaatcatctcaacaagcaaa

SEQ ID NO: 296685 - DNA, 33 bp, Homo sapien
tcccactctgactttgcattcagcacttttcca

SEQ ID NO: 296686 - DNA, 33 bp, Homo sapien
tcccactctgactttgtattcagcacttttcca

SEQ ID NO: 296687 - DNA, 33 bp, Homo sapien
tttctttctaatgcaacgatcaaaacttagcag

SEQ ID NO: 296688 - DNA, 33 bp, Homo sapien
tttctttctaatgcaatgatcaaaacttagcag

SEQ ID NO: 296689 - DNA, 33 bp, Homo sapien
ttagataaaatggacaaattcctaaagagacat

SEQ ID NO: 296690 - DNA, 33 bp, Homo sapien
ttagataaaatggacagattcctaaagagacat

SEQ ID NO: 296691 - DNA, 33 bp, Homo sapien
attcaacctgcctaaactggaagctgtatgatt

SEQ ID NO: 296692 - DNA, 33 bp, Homo sapien
attcaacctgcctaaagtggaagctgtatgatt

SEQ ID NO: 296693 - DNA, 33 bp, Homo sapien
caacggattgaaacttcaaccaggctttgaaaa

SEQ ID NO: 296694 - DNA, 33 bp, Homo sapien
caacggattgaaacttgaaccaggctttgaaaa

SEQ ID NO: 296695 - DNA, 33 bp, Homo sapien
atgggccatatgaggaagagcaagatgagagaa

SEQ ID NO: 296696 - DNA, 33 bp, Homo sapien
atgggccatatgaggacgagcaagatgagagaa

SEQ ID NO: 296697 - DNA, 33 bp, Homo sapien
ccttttcaggcctataaaaccttctcaaagcct

SEQ ID NO: 296698 - DNA, 33 bp, Homo sapien
ccttttcaggcctatacaaccttctcaaagcct

SEQ ID NO: 296699 - DNA, 33 bp, Homo sapien
cctctttccggattcaccttgctctaaaatatt

SEQ ID NO: 296700 - DNA, 33 bp, Homo sapien
cctctttccggattcatcttgctctaaaatatt

SEQ ID NO: 296701 - DNA, 33 bp, Homo sapien
ctctcctattctagaaccaagagctagaacaga

SEQ ID NO: 296702 - DNA, 33 bp, Homo sapien
ctctcctattctagaagcaagagctagaacaga

SEQ ID NO: 296703 - DNA, 33 bp, Homo sapien
cattcccaggtagcaacagtttgtgggcatgag

SEQ ID NO: 296704 - DNA, 33 bp, Homo sapien
cattcccaggtagcaatagtttgtgggcatgag

SEQ ID NO: 296705 - DNA, 33 bp, Homo sapien
ggtctctgttagcaccactttattgcatcccac

SEQ ID NO: 296706 - DNA, 33 bp, Homo sapien
ggtctctgttagcaccgctttattgcatcccac

SEQ ID NO: 296707 - DNA, 33 bp, Homo sapien
ggttcttcctcagtgcaacatgattcagagatc

SEQ ID NO: 296708 - DNA, 33 bp, Homo sapien
ggttcttcctcagtgcgacatgattcagagatc

SEQ ID NO: 296709 - DNA, 33 bp, Homo sapien
ctgattccttttcttcccttcaggcaggaccca

SEQ ID NO: 296710 - DNA, 33 bp, Homo sapien
ctgattccttttcttctcttcaggcaggaccca

SEQ ID NO: 296711 - DNA, 33 bp, Homo sapien
aaggcctgagttaacacggagtaggagctcaga

SEQ ID NO: 296712 - DNA, 33 bp, Homo sapien
aaggcctgagttaacatggagtaggagctcaga

SEQ ID NO: 296713 - DNA, 33 bp, Homo sapien
aaaagcgcagatttacggaagcaaaagtacttc

SEQ ID NO: 296714 - DNA, 33 bp, Homo sapien
aaaagcgcagatttactgaagcaaaagtacttc

SEQ ID NO: 296715 - DNA, 33 bp, Homo sapien
gtgctaatttgaaaaaactcagtgcaccgtggg

SEQ ID NO: 296716 - DNA, 33 bp, Homo sapien
gtgctaatttgaaaaacctcagtgcaccgtggg

SEQ ID NO: 296717 - DNA, 33 bp, Homo sapien
tttcatctaagatgtcaaagtacttacataaaa

SEQ ID NO: 296718 - DNA, 33 bp, Homo sapien
tttcatctaagatgtcgaagtacttacataaaa

SEQ ID NO: 296719 - DNA, 33 bp, Homo sapien
ttaagaatagcaaacaagctgggcgcggtgact

SEQ ID NO: 296720 - DNA, 33 bp, Homo sapien
ttaagaatagcaaacaggctgggcgcggtgact

SEQ ID NO: 296721 - DNA, 33 bp, Homo sapien
tttatcagatttttagcccctggagaggcagat

SEQ ID NO: 296722 - DNA, 33 bp, Homo sapien
tttatcagatttttagtccctggagaggcagat

SEQ ID NO: 296723 - DNA, 33 bp, Homo sapien
ggccatagtacctccacgttgaaagcatgaaga

SEQ ID NO: 296724 - DNA, 33 bp, Homo sapien
ggccatagtacctccatgttgaaagcatgaaga

SEQ ID NO: 296725 - DNA, 33 bp, Homo sapien
atcgagcagcacaggaaacgtttacccttgaga

SEQ ID NO: 296726 - DNA, 33 bp, Homo sapien
atcgagcagcacaggagacgtttacccttgaga

SEQ ID NO: 296727 - DNA, 33 bp, Homo sapien
gaaaagagagcgactcaccaaaaccagcacact

SEQ ID NO: 296728 - DNA, 33 bp, Homo sapien
gaaaagagagcgactcgccaaaaccagcacact

SEQ ID NO: 296729 - DNA, 33 bp, Homo sapien
gcttcatctgaccaggacagctggtaaactgca

SEQ ID NO: 296730 - DNA, 33 bp, Homo sapien
gcttcatctgaccagggcagctggtaaactgca

SEQ ID NO: 296731 - DNA, 33 bp, Homo sapien
gcacccatttgcaaacccacaatttcaagtctt

SEQ ID NO: 296732 - DNA, 33 bp, Homo sapien
gcacccatttgcaaacgcacaatttcaagtctt

SEQ ID NO: 296733 - DNA, 33 bp, Homo sapien
gttcctaataagcagacattcaacagggttcca

SEQ ID NO: 296734 - DNA, 33 bp, Homo sapien
gttcctaataagcagatattcaacagggttcca

SEQ ID NO: 296735 - DNA, 33 bp, Homo sapien
tctgagttgtgcgtacaacaactgggccagtac

SEQ ID NO: 296736 - DNA, 33 bp, Homo sapien
tctgagttgtgcgtacgacaactgggccagtac

SEQ ID NO: 296737 - DNA, 33 bp, Homo sapien
gtgtgatgagacccccaagcagtgatgagactc

SEQ ID NO: 296738 - DNA, 33 bp, Homo sapien
gtgtgatgagacccccgagcagtgatgagactc

SEQ ID NO: 296739 - DNA, 33 bp, Homo sapien
gcttttctcgtgtgtaataatgaaatagctcag

SEQ ID NO: 296740 - DNA, 33 bp, Homo sapien
gcttttctcgtgtgtagtaatgaaatagctcag

SEQ ID NO: 296741 - DNA, 33 bp, Homo sapien
ctgaaattaatgctaacgaacatccagactacg

SEQ ID NO: 296742 - DNA, 33 bp, Homo sapien
ctgaaattaatgctaatgaacatccagactacg

SEQ ID NO: 296743 - DNA, 33 bp, Homo sapien
atgcagcgccattcccaaagtctcctgggttcc

SEQ ID NO: 296744 - DNA, 33 bp, Homo sapien
atgcagcgccattcccgaagtctcctgggttcc

SEQ ID NO: 296745 - DNA, 33 bp, Homo sapien
gaaagcagaagacacgaaaacccagcgacctct

SEQ ID NO: 296746 - DNA, 33 bp, Homo sapien
gaaagcagaagacacggaaacccagcgacctct

SEQ ID NO: 296747 - DNA, 33 bp, Homo sapien
attgttgaaagagcacacaggttaggaagtctt

SEQ ID NO: 296748 - DNA, 33 bp, Homo sapien
attgttgaaagagcacgcaggttaggaagtctt

SEQ ID NO: 296749 - DNA, 33 bp, Homo sapien
tataacgtgtacctggcatttgctataatcagg

SEQ ID NO: 296750 - DNA, 33 bp, Homo sapien
tataacgtgtacctgggatttgctataatcagg

SEQ ID NO: 296751 - DNA, 33 bp, Homo sapien
tgtttgaagctatacacggacggcagaacaaga

SEQ ID NO: 296752 - DNA, 33 bp, Homo sapien
tgtttgaagctatacatggacggcagaacaaga

SEQ ID NO: 296753 - DNA, 33 bp, Homo sapien
gagaggctcaaggggcaagacgctgcgtttcag

SEQ ID NO: 296754 - DNA, 33 bp, Homo sapien
gagaggctcaaggggcgagacgctgcgtttcag

SEQ ID NO: 296755 - DNA, 33 bp, Homo sapien
aaaacaactcagatacagcccaacagtgtagcg

SEQ ID NO: 296756 - DNA, 33 bp, Homo sapien
aaaacaactcagataccgcccaacagtgtagcg

SEQ ID NO: 296757 - DNA, 33 bp, Homo sapien
ctccccgtggaaacaccggttgatagtctcagc

SEQ ID NO: 296758 - DNA, 33 bp, Homo sapien
ctccccgtggaaacactggttgatagtctcagc

SEQ ID NO: 296759 - DNA, 33 bp, Homo sapien
agttcatgacaactacagccatattttcagttc

SEQ ID NO: 296760 - DNA, 33 bp, Homo sapien
agttcatgacaactacggccatattttcagttc

SEQ ID NO: 296761 - DNA, 33 bp, Homo sapien
cttattaatggtcacaactggagaaagctcgca

SEQ ID NO: 296762 - DNA, 33 bp, Homo sapien
cttattaatggtcacagctggagaaagctcgca

SEQ ID NO: 296763 - DNA, 33 bp, Homo sapien
ctcagcaacactccccaagagacctctagagca

SEQ ID NO: 296764 - DNA, 33 bp, Homo sapien
ctcagcaacactccccgagagacctctagagca

SEQ ID NO: 296765 - DNA, 33 bp, Homo sapien
ctccctccctaaacaccgctgaacagagactca

SEQ ID NO: 296766 - DNA, 33 bp, Homo sapien
ctccctccctaaacactgctgaacagagactca

SEQ ID NO: 296767 - DNA, 33 bp, Homo sapien
tcctgggattctccacagtggaattttgaggaa

SEQ ID NO: 296768 - DNA, 33 bp, Homo sapien
tcctgggattctccacggtggaattttgaggaa

SEQ ID NO: 296769 - DNA, 33 bp, Homo sapien
atccgcaggatcccccaaaagagagatttcaca

SEQ ID NO: 296770 - DNA, 33 bp, Homo sapien
atccgcaggatcccccgaaagagagatttcaca

SEQ ID NO: 296771 - DNA, 33 bp, Homo sapien
aagcaagcagaaaagacgaaagagaaggaaagt

SEQ ID NO: 296772 - DNA, 33 bp, Homo sapien
aagcaagcagaaaagatgaaagagaaggaaagt

SEQ ID NO: 296773 - DNA, 33 bp, Homo sapien
cttgatgccctttttccagccatttcggggaca

SEQ ID NO: 296774 - DNA, 33 bp, Homo sapien
cttgatgccctttttctagccatttcggggaca

SEQ ID NO: 296775 - DNA, 33 bp, Homo sapien
catggtttccagccaacgctgttgtttcatcag

SEQ ID NO: 296776 - DNA, 33 bp, Homo sapien
catggtttccagccaatgctgttgtttcatcag

SEQ ID NO: 296777 - DNA, 33 bp, Homo sapien
gttgagagtaaagaccaaccaagatcttagacc

SEQ ID NO: 296778 - DNA, 33 bp, Homo sapien
gttgagagtaaagaccgaccaagatcttagacc

SEQ ID NO: 296779 - DNA, 33 bp, Homo sapien
ccagggtcctcagaatgacgagcctagagcatt

SEQ ID NO: 296780 - DNA, 33 bp, Homo sapien
ccagggtcctcagaattacgagcctagagcatt

SEQ ID NO: 296781 - DNA, 33 bp, Homo sapien
aagagatggggggaaacgtgggtgccttcttgt

SEQ ID NO: 296782 - DNA, 33 bp, Homo sapien
aagagatggggggaaatgtgggtgccttcttgt

SEQ ID NO: 296783 - DNA, 33 bp, Homo sapien
agaatgtcgtaaattacctctaagtagttaatt

SEQ ID NO: 296784 - DNA, 33 bp, Homo sapien
agaatgtcgtaaattagctctaagtagttaatt

SEQ ID NO: 296785 - DNA, 33 bp, Homo sapien
tttgtagttttctagcagacattcactctctgg

SEQ ID NO: 296786 - DNA, 33 bp, Homo sapien
tttgtagttttctagcggacattcactctctgg

SEQ ID NO: 296787 - DNA, 33 bp, Homo sapien
actcgcagaacgttcccgccgctgttcttcaac

SEQ ID NO: 296788 - DNA, 33 bp, Homo sapien
actcgcagaacgttccggccgctgttcttcaac

SEQ ID NO: 296789 - DNA, 33 bp, Homo sapien
agttcgccttttgttcaagggtctctgggtacc

SEQ ID NO: 296790 - DNA, 33 bp, Homo sapien
agttcgccttttgttcgagggtctctgggtacc

SEQ ID NO: 296791 - DNA, 33 bp, Homo sapien
accccaccagagaagccatatggaggcgagggg

SEQ ID NO: 296792 - DNA, 33 bp, Homo sapien
accccaccagagaagcgatatggaggcgagggg

SEQ ID NO: 296793 - DNA, 33 bp, Homo sapien
cgttctctcagcagaacgggtgcgcacagcctc

SEQ ID NO: 296794 - DNA, 33 bp, Homo sapien
cgttctctcagcagaatgggtgcgcacagcctc

SEQ ID NO: 296795 - DNA, 33 bp, Homo sapien
cagcaaaggccaatgacggcaggtgggtgaaga

SEQ ID NO: 296796 - DNA, 33 bp, Homo sapien
cagcaaaggccaatgatggcaggtgggtgaaga

SEQ ID NO: 296797 - DNA, 33 bp, Homo sapien
atgctgagaatccaggaaacgagaggaaagcat

SEQ ID NO: 296798 - DNA, 33 bp, Homo sapien
atgctgagaatccagggaacgagaggaaagcat

SEQ ID NO: 296799 - DNA, 33 bp, Homo sapien
gaggttcactttaggaagccaggagcgaccctc

SEQ ID NO: 296800 - DNA, 33 bp, Homo sapien
gaggttcactttaggacgccaggagcgaccctc

SEQ ID NO: 296801 - DNA, 33 bp, Homo sapien
gtgtggcccctgcttaaaggttcctccttcctc

SEQ ID NO: 296802 - DNA, 33 bp, Homo sapien
gtgtggcccctgcttagaggttcctccttcctc

SEQ ID NO: 296803 - DNA, 33 bp, Homo sapien
tacagtggaaattgaccggagaagaatgaattt

SEQ ID NO: 296804 - DNA, 33 bp, Homo sapien
tacagtggaaattgactggagaagaatgaattt

SEQ ID NO: 296805 - DNA, 33 bp, Homo sapien
ccagacatttgggaacaagttgtgttactggtt

SEQ ID NO: 296806 - DNA, 33 bp, Homo sapien
ccagacatttgggaacgagttgtgttactggtt

SEQ ID NO: 296807 - DNA, 33 bp, Homo sapien
gtatctgctcgtgtccaatgccaagggtgtggg

SEQ ID NO: 296808 - DNA, 33 bp, Homo sapien
gtatctgctcgtgtccgatgccaagggtgtggg

SEQ ID NO: 296809 - DNA, 33 bp, Homo sapien
taaaatggatgtggcggattacctgaaaccagg

SEQ ID NO: 296810 - DNA, 33 bp, Homo sapien
taaaatggatgtggcgtattacctgaaaccagg

SEQ ID NO: 296811 - DNA, 33 bp, Homo sapien
ccatcagatccttcaaagagattcatcctcttg

SEQ ID NO: 296812 - DNA, 33 bp, Homo sapien
ccatcagatccttcaaggagattcatcctcttg

SEQ ID NO: 296813 - DNA, 33 bp, Homo sapien
aagtgaacattgctgacgaaaactaaaaatatt

SEQ ID NO: 296814 - DNA, 33 bp, Homo sapien
aagtgaacattgctgatgaaaactaaaaatatt

SEQ ID NO: 296815 - DNA, 33 bp, Homo sapien
tgctagacaagttgatcataaaacccacttaga

SEQ ID NO: 296816 - DNA, 33 bp, Homo sapien
tgctagacaagttgattataaaacccacttaga

SEQ ID NO: 296817 - DNA, 33 bp, Homo sapien
aggaatgtttactgaactctgcacgtgttaaca

SEQ ID NO: 296818 - DNA, 33 bp, Homo sapien
aggaatgtttactgaattctgcacgtgttaaca

SEQ ID NO: 296819 - DNA, 33 bp, Homo sapien
taaagccacgggatacacatcctcacagtgcct

SEQ ID NO: 296820 - DNA, 33 bp, Homo sapien
taaagccacgggatacgcatcctcacagtgcct

SEQ ID NO: 296821 - DNA, 33 bp, Homo sapien
tttgaaaattagtcaacgtaatctaccatatta

SEQ ID NO: 296822 - DNA, 33 bp, Homo sapien
tttgaaaattagtcaaggtaatctaccatatta

SEQ ID NO: 296823 - DNA, 33 bp, Homo sapien
gctgtttgggactggagtcatgtggagcaggaa

SEQ ID NO: 296824 - DNA, 33 bp, Homo sapien
gctgtttgggactggattcatgtggagcaggaa

SEQ ID NO: 296825 - DNA, 33 bp, Homo sapien
atttatccgcaataccactaccaggcatttggg

SEQ ID NO: 296826 - DNA, 33 bp, Homo sapien
atttatccgcaataccgctaccaggcatttggg

SEQ ID NO: 296827 - DNA, 33 bp, Homo sapien
agagggatgtcaaaacccaaaagtgaattattg

SEQ ID NO: 296828 - DNA, 33 bp, Homo sapien
agagggatgtcaaaacgcaaaagtgaattattg

SEQ ID NO: 296829 - DNA, 33 bp, Homo sapien
atgtctcgtggaatctaaagttgcttttgaagg

SEQ ID NO: 296830 - DNA, 33 bp, Homo sapien
atgtctcgtggaatcttaagttgcttttgaagg

SEQ ID NO: 296831 - DNA, 33 bp, Homo sapien
ggaaacaccacgcgaaatgcgccatctgtttcc

SEQ ID NO: 296832 - DNA, 33 bp, Homo sapien
ggaaacaccacgcgaagtgcgccatctgtttcc

SEQ ID NO: 296833 - DNA, 33 bp, Homo sapien
atgttttcttttgtcccagctcaaatataatgt

SEQ ID NO: 296834 - DNA, 33 bp, Homo sapien
atgttttcttttgtcctagctcaaatataatgt

SEQ ID NO: 296835 - DNA, 33 bp, Homo sapien
agtaccacgtctgagaaggatcagtgtcggctg

SEQ ID NO: 296836 - DNA, 33 bp, Homo sapien
agtaccacgtctgagatggatcagtgtcggctg

SEQ ID NO: 296837 - DNA, 33 bp, Homo sapien
ccctctagttttctgacatttgaggaacaagga

SEQ ID NO: 296838 - DNA, 33 bp, Homo sapien
ccctctagttttctgatatttgaggaacaagga

SEQ ID NO: 296839 - DNA, 33 bp, Homo sapien
ccaacctgggaggaccaatccgatcctgcgctc

SEQ ID NO: 296840 - DNA, 33 bp, Homo sapien
ccaacctgggaggaccgatccgatcctgcgctc

SEQ ID NO: 296841 - DNA, 33 bp, Homo sapien
gcctcggcccaaacacagctttagaaactcacc

SEQ ID NO: 296842 - DNA, 33 bp, Homo sapien
gcctcggcccaaacacggctttagaaactcacc

SEQ ID NO: 296843 - DNA, 33 bp, Homo sapien
tcagcagcactgctcacggctgaatgaagctgg

SEQ ID NO: 296844 - DNA, 33 bp, Homo sapien
tcagcagcactgctcatggctgaatgaagctgg

SEQ ID NO: 296845 - DNA, 33 bp, Homo sapien
ttctgatcagggcacacgggcgtcctcccaaat

SEQ ID NO: 296846 - DNA, 33 bp, Homo sapien
ttctgatcagggcacatgggcgtcctcccaaat

SEQ ID NO: 296847 - DNA, 33 bp, Homo sapien
gagcaaccagaagtcacgtgcatttctggcagg

SEQ ID NO: 296848 - DNA, 33 bp, Homo sapien
gagcaaccagaagtcatgtgcatttctggcagg

SEQ ID NO: 296849 - DNA, 33 bp, Homo sapien
gcaggttgacgtttgaaaagcaaagacaccaag

SEQ ID NO: 296850 - DNA, 33 bp, Homo sapien
gcaggttgacgtttgagaagcaaagacaccaag

SEQ ID NO: 296851 - DNA, 33 bp, Homo sapien
tgtgagttttcccagacgaaggaactcttaggg

SEQ ID NO: 296852 - DNA, 33 bp, Homo sapien
tgtgagttttcccagatgaaggaactcttaggg

SEQ ID NO: 296853 - DNA, 33 bp, Homo sapien
aggaaaccagatgaaaagatattccataaagca

SEQ ID NO: 296854 - DNA, 33 bp, Homo sapien
aggaaaccagatgaaaggatattccataaagca

SEQ ID NO: 296855 - DNA, 33 bp, Homo sapien
aaaaacgacagtgaaacgtagaagagcgtgatt

SEQ ID NO: 296856 - DNA, 33 bp, Homo sapien
aaaaacgacagtgaaatgtagaagagcgtgatt

SEQ ID NO: 296857 - DNA, 33 bp, Homo sapien
ccatattcttgggctgcaaaacaaatctcaaca

SEQ ID NO: 296858 - DNA, 33 bp, Homo sapien
ccatattcttgggctgtaaaacaaatctcaaca

SEQ ID NO: 296859 - DNA, 33 bp, Homo sapien
atatgtataaaacttcacctaacaatagcagaa

SEQ ID NO: 296860 - DNA, 33 bp, Homo sapien
atatgtataaaacttcgcctaacaatagcagaa

SEQ ID NO: 296861 - DNA, 33 bp, Homo sapien
gtgtagacgggtgtccaaatcaccgagtgttca

SEQ ID NO: 296862 - DNA, 33 bp, Homo sapien
gtgtagacgggtgtccgaatcaccgagtgttca

SEQ ID NO: 296863 - DNA, 33 bp, Homo sapien
ggctttccttcgggaaaatgaaggcgagctttt

SEQ ID NO: 296864 - DNA, 33 bp, Homo sapien
ggctttccttcgggaagatgaaggcgagctttt

SEQ ID NO: 296865 - DNA, 33 bp, Homo sapien
ccctggaaaccccgaccgctgagacgttctgtg

SEQ ID NO: 296866 - DNA, 33 bp, Homo sapien
ccctggaaaccccgactgctgagacgttctgtg

SEQ ID NO: 296867 - DNA, 33 bp, Homo sapien
acctgcccgtagattcaaattccttatgggtgt

SEQ ID NO: 296868 - DNA, 33 bp, Homo sapien
acctgcccgtagattccaattccttatgggtgt

SEQ ID NO: 296869 - DNA, 33 bp, Homo sapien
tgtagcagctatttgacgaccctaaaaagtaaa

SEQ ID NO: 296870 - DNA, 33 bp, Homo sapien
tgtagcagctatttgaggaccctaaaaagtaaa

SEQ ID NO: 296871 - DNA, 33 bp, Homo sapien
aaggctttgtattgaaagaaaagctagtttcac

SEQ ID NO: 296872 - DNA, 33 bp, Homo sapien
aaggctttgtattgaatgaaaagctagtttcac

SEQ ID NO: 296873 - DNA, 33 bp, Homo sapien
tctgcagcctggacaacggggactgtgaccagt

SEQ ID NO: 296874 - DNA, 33 bp, Homo sapien
tctgcagcctggacaatggggactgtgaccagt

SEQ ID NO: 296875 - DNA, 33 bp, Homo sapien
tgaagggtctcctacccgccaggacttggaaca

SEQ ID NO: 296876 - DNA, 33 bp, Homo sapien
tgaagggtctcctacctgccaggacttggaaca

SEQ ID NO: 296877 - DNA, 33 bp, Homo sapien
gtttctgtggtggaaccattctgagcgagttct

SEQ ID NO: 296878 - DNA, 33 bp, Homo sapien
gtttctgtggtggaactattctgagcgagttct

SEQ ID NO: 296879 - DNA, 33 bp, Homo sapien
cattaaatatttatccacattccactatatatg

SEQ ID NO: 296880 - DNA, 33 bp, Homo sapien
cattaaatatttatccgcattccactatatatg

SEQ ID NO: 296881 - DNA, 33 bp, Homo sapien
cttgctgctttgtgtaaatccaggcctccctct

SEQ ID NO: 296882 - DNA, 33 bp, Homo sapien
cttgctgctttgtgtagatccaggcctccctct

SEQ ID NO: 296883 - DNA, 33 bp, Homo sapien
acccaagagtgtgagacggacctgtgctagaca

SEQ ID NO: 296884 - DNA, 33 bp, Homo sapien
acccaagagtgtgagagggacctgtgctagaca

SEQ ID NO: 296885 - DNA, 33 bp, Homo sapien
ggttccggggcccgaaatcagggctgagcactg

SEQ ID NO: 296886 - DNA, 33 bp, Homo sapien
ggttccggggcccgaagtcagggctgagcactg

SEQ ID NO: 296887 - DNA, 33 bp, Homo sapien
agtgattattactccacgtttatagatcctggt

SEQ ID NO: 296888 - DNA, 33 bp, Homo sapien
agtgattattactccatgtttatagatcctggt

SEQ ID NO: 296889 - DNA, 33 bp, Homo sapien
acaaatgggtgcaagacgatttgggcccaagta

SEQ ID NO: 296890 - DNA, 33 bp, Homo sapien
acaaatgggtgcaagatgatttgggcccaagta

SEQ ID NO: 296891 - DNA, 33 bp, Homo sapien
tataggaacataagtgccaatgtcactgtatct

SEQ ID NO: 296892 - DNA, 33 bp, Homo sapien
tataggaacataagtgtcaatgtcactgtatct

SEQ ID NO: 296893 - DNA, 33 bp, Homo sapien
aggcttcactctaatacatcgcaagcttttgcc

SEQ ID NO: 296894 - DNA, 33 bp, Homo sapien
aggcttcactctaatatatcgcaagcttttgcc

SEQ ID NO: 296895 - DNA, 33 bp, Homo sapien
ccttttaaaaacatacaacttagcttatagaga

SEQ ID NO: 296896 - DNA, 33 bp, Homo sapien
ccttttaaaaacataccacttagcttatagaga

SEQ ID NO: 296897 - DNA, 33 bp, Homo sapien
aaaatgttaagtctgcaaagattaggccaaaac

SEQ ID NO: 296898 - DNA, 33 bp, Homo sapien
aaaatgttaagtctgctaagattaggccaaaac

SEQ ID NO: 296899 - DNA, 33 bp, Homo sapien
gggaaaagagactgaaaaactggacatttgcag

SEQ ID NO: 296900 - DNA, 33 bp, Homo sapien
gggaaaagagactgaacaactggacatttgcag

SEQ ID NO: 296901 - DNA, 33 bp, Homo sapien
gtaggttcctggaagcacattgctgagccgtgg

SEQ ID NO: 296902 - DNA, 33 bp, Homo sapien
gtaggttcctggaagcgcattgctgagccgtgg

SEQ ID NO: 296903 - DNA, 33 bp, Homo sapien
ttgtgcagtgagtgaactgatggcacattagtc

SEQ ID NO: 296904 - DNA, 33 bp, Homo sapien
ttgtgcagtgagtgaattgatggcacattagtc

SEQ ID NO: 296905 - DNA, 33 bp, Homo sapien
tatacacctaagaaacaagcagagttactgacc

SEQ ID NO: 296906 - DNA, 33 bp, Homo sapien
tatacacctaagaaacgagcagagttactgacc

SEQ ID NO: 296907 - DNA, 33 bp, Homo sapien
cgaaacttggtggtgcacagggacgaaagagaa

SEQ ID NO: 296908 - DNA, 33 bp, Homo sapien
cgaaacttggtggtgcgcagggacgaaagagaa

SEQ ID NO: 296909 - DNA, 33 bp, Homo sapien
tcaatcctgagaaagacaaagacatggtccaag

SEQ ID NO: 296910 - DNA, 33 bp, Homo sapien
tcaatcctgagaaagataaagacatggtccaag

SEQ ID NO: 296911 - DNA, 33 bp, Homo sapien
acaccaaatcccaggcacgatatcatcgatttc

SEQ ID NO: 296912 - DNA, 33 bp, Homo sapien
acaccaaatcccaggcgcgatatcatcgatttc

SEQ ID NO: 296913 - DNA, 33 bp, Homo sapien
aagtttaatcatctgtcaagcataggagaacaa

SEQ ID NO: 296914 - DNA, 33 bp, Homo sapien
aagtttaatcatctgttaagcataggagaacaa

SEQ ID NO: 296915 - DNA, 33 bp, Homo sapien
atttctgattctttacagcatctttctaccact

SEQ ID NO: 296916 - DNA, 33 bp, Homo sapien
atttctgattctttacggcatctttctaccact

SEQ ID NO: 296917 - DNA, 33 bp, Homo sapien
tcatttctgcagtggcaatgagcaacacctgga

SEQ ID NO: 296918 - DNA, 33 bp, Homo sapien
tcatttctgcagtggcgatgagcaacacctgga

SEQ ID NO: 296919 - DNA, 33 bp, Homo sapien
cccagggatggtgcgcacttgttcatattttca

SEQ ID NO: 296920 - DNA, 33 bp, Homo sapien
cccagggatggtgcgcgcttgttcatattttca

SEQ ID NO: 296921 - DNA, 33 bp, Homo sapien
tgactttcataagcaacagcaacagtagactat

SEQ ID NO: 296922 - DNA, 33 bp, Homo sapien
tgactttcataagcaatagcaacagtagactat

SEQ ID NO: 296923 - DNA, 33 bp, Homo sapien
aacaaaataaaatacactacttaggcagaagca

SEQ ID NO: 296924 - DNA, 33 bp, Homo sapien
aacaaaataaaatacagtacttaggcagaagca

SEQ ID NO: 296925 - DNA, 33 bp, Homo sapien
cgggaggcttcaaggcaatgcaaatacgtttct

SEQ ID NO: 296926 - DNA, 33 bp, Homo sapien
cgggaggcttcaaggcgatgcaaatacgtttct

SEQ ID NO: 296927 - DNA, 33 bp, Homo sapien
atttccaccgtcataacgattgctgtaggctgt

SEQ ID NO: 296928 - DNA, 33 bp, Homo sapien
atttccaccgtcataaggattgctgtaggctgt

SEQ ID NO: 296929 - DNA, 33 bp, Homo sapien
agaactgtcccgtcacactggaatgctggggcc

SEQ ID NO: 296930 - DNA, 33 bp, Homo sapien
agaactgtcccgtcacgctggaatgctggggcc

SEQ ID NO: 296931 - DNA, 33 bp, Homo sapien
cgttccacacggactacgtcacggggtcgtcgt

SEQ ID NO: 296932 - DNA, 33 bp, Homo sapien
cgttccacacggactatgtcacggggtcgtcgt

SEQ ID NO: 296933 - DNA, 33 bp, Homo sapien
tatctgccaccactggaatccgtgcagaaatga

SEQ ID NO: 296934 - DNA, 33 bp, Homo sapien
tatctgccaccactgggatccgtgcagaaatga

SEQ ID NO: 296935 - DNA, 33 bp, Homo sapien
gtaaatacttgacatcactacactttagttgtg

SEQ ID NO: 296936 - DNA, 33 bp, Homo sapien
gtaaatacttgacatcgctacactttagttgtg

SEQ ID NO: 296937 - DNA, 33 bp, Homo sapien
cgctcagccctagaacggtaccaaccatccctc

SEQ ID NO: 296938 - DNA, 33 bp, Homo sapien
cgctcagccctagaactgtaccaaccatccctc

SEQ ID NO: 296939 - DNA, 33 bp, Homo sapien
gctgttacatttcacaagtaaaaagctaacaga

SEQ ID NO: 296940 - DNA, 33 bp, Homo sapien
gctgttacatttcacaggtaaaaagctaacaga

SEQ ID NO: 296941 - DNA, 33 bp, Homo sapien
cacacaagctgacaacgcgaggtttattcagtt

SEQ ID NO: 296942 - DNA, 33 bp, Homo sapien
cacacaagctgacaactcgaggtttattcagtt

SEQ ID NO: 296943 - DNA, 33 bp, Homo sapien
aattgctcactaaatacgtgacgaattatacaa

SEQ ID NO: 296944 - DNA, 33 bp, Homo sapien
aattgctcactaaatatgtgacgaattatacaa

SEQ ID NO: 296945 - DNA, 33 bp, Homo sapien
tattcacactgcttacaggaacatgaaaaacat

SEQ ID NO: 296946 - DNA, 33 bp, Homo sapien
tattcacactgcttacgggaacatgaaaaacat

SEQ ID NO: 296947 - DNA, 33 bp, Homo sapien
gtatttttaaagccaactccagacttcatatca

SEQ ID NO: 296948 - DNA, 33 bp, Homo sapien
gtatttttaaagccaattccagacttcatatca

SEQ ID NO: 296949 - DNA, 33 bp, Homo sapien
aagaatccagaggcgacccctcctctccatctg

SEQ ID NO: 296950 - DNA, 33 bp, Homo sapien
aagaatccagaggcgatccctcctctccatctg

SEQ ID NO: 296951 - DNA, 33 bp, Homo sapien
gaaagaagggagtacgcatctggaaggcttaat

SEQ ID NO: 296952 - DNA, 33 bp, Homo sapien
gaaagaagggagtacgtatctggaaggcttaat

SEQ ID NO: 296953 - DNA, 33 bp, Homo sapien
cggccaccctctcagaagacacagaaacagagc

SEQ ID NO: 296954 - DNA, 33 bp, Homo sapien
cggccaccctctcagaggacacagaaacagagc

SEQ ID NO: 296955 - DNA, 33 bp, Homo sapien
gattttcagcgtgaaccgatgcagcctgtcgcc

SEQ ID NO: 296956 - DNA, 33 bp, Homo sapien
gattttcagcgtgaactgatgcagcctgtcgcc

SEQ ID NO: 296957 - DNA, 33 bp, Homo sapien
tgtgtgcgtccccttcaatctgcaggatgctgg

SEQ ID NO: 296958 - DNA, 33 bp, Homo sapien
tgtgtgcgtccccttcgatctgcaggatgctgg

SEQ ID NO: 296959 - DNA, 33 bp, Homo sapien
cagaactaaactgggcacgtccatggcagatga

SEQ ID NO: 296960 - DNA, 33 bp, Homo sapien
cagaactaaactgggcgcgtccatggcagatga

SEQ ID NO: 296961 - DNA, 33 bp, Homo sapien
cccttcgttcaaactcccacctgttttaggcac

SEQ ID NO: 296962 - DNA, 33 bp, Homo sapien
cccttcgttcaaactctcacctgttttaggcac

SEQ ID NO: 296963 - DNA, 33 bp, Homo sapien
ccacgcccgagaaaaaacaatttaatgcttctg

SEQ ID NO: 296964 - DNA, 33 bp, Homo sapien
ccacgcccgagaaaaaccaatttaatgcttctg

SEQ ID NO: 296965 - DNA, 33 bp, Homo sapien
tgaagcctggaagatacgctcacgtttttgagg

SEQ ID NO: 296966 - DNA, 33 bp, Homo sapien
tgaagcctggaagatatgctcacgtttttgagg

SEQ ID NO: 296967 - DNA, 33 bp, Homo sapien
acccaggaactgactgaaatctccttgcaggat

SEQ ID NO: 296968 - DNA, 33 bp, Homo sapien
acccaggaactgactgcaatctccttgcaggat

SEQ ID NO: 296969 - DNA, 33 bp, Homo sapien
gtagtttgccgaccccaatctagattctagagg

SEQ ID NO: 296970 - DNA, 33 bp, Homo sapien
gtagtttgccgaccccgatctagattctagagg

SEQ ID NO: 296971 - DNA, 33 bp, Homo sapien
atacacataacaatgcagatgtatctcaaggct

SEQ ID NO: 296972 - DNA, 33 bp, Homo sapien
atacacataacaatgcggatgtatctcaaggct

SEQ ID NO: 296973 - DNA, 33 bp, Homo sapien
tttagatagtagctccacattcaggtctcacat

SEQ ID NO: 296974 - DNA, 33 bp, Homo sapien
tttagatagtagctccgcattcaggtctcacat

SEQ ID NO: 296975 - DNA, 33 bp, Homo sapien
taacaaatgtttcttacgtgtgttgatgtacgt

SEQ ID NO: 296976 - DNA, 33 bp, Homo sapien
taacaaatgtttcttatgtgtgttgatgtacgt

SEQ ID NO: 296977 - DNA, 33 bp, Homo sapien
gtttatccatgcttgacgagattcttgaagatg

SEQ ID NO: 296978 - DNA, 33 bp, Homo sapien
gtttatccatgcttgatgagattcttgaagatg

SEQ ID NO: 296979 - DNA, 33 bp, Homo sapien
atttttggagaatgaacgctaaacagaagaatg

SEQ ID NO: 296980 - DNA, 33 bp, Homo sapien
atttttggagaatgaatgctaaacagaagaatg

SEQ ID NO: 296981 - DNA, 33 bp, Homo sapien
tgaactgaccgttagacgctcaggactggttcc

SEQ ID NO: 296982 - DNA, 33 bp, Homo sapien
tgaactgaccgttagatgctcaggactggttcc

SEQ ID NO: 296983 - DNA, 33 bp, Homo sapien
ctgtgaaactccttgccgacatctgattgagtg

SEQ ID NO: 296984 - DNA, 33 bp, Homo sapien
ctgtgaaactccttgctgacatctgattgagtg

SEQ ID NO: 296985 - DNA, 33 bp, Homo sapien
tgtcccttgagggttaagaagacccagaattag

SEQ ID NO: 296986 - DNA, 33 bp, Homo sapien
tgtcccttgagggttaggaagacccagaattag

SEQ ID NO: 296987 - DNA, 33 bp, Homo sapien
ctgtgataaccatcacaattgccaagcatagga

SEQ ID NO: 296988 - DNA, 33 bp, Homo sapien
ctgtgataaccatcacgattgccaagcatagga

SEQ ID NO: 296989 - DNA, 33 bp, Homo sapien
caccctgagctcaagacgaccattttccccact

SEQ ID NO: 296990 - DNA, 33 bp, Homo sapien
caccctgagctcaagatgaccattttccccact

SEQ ID NO: 296991 - DNA, 33 bp, Homo sapien
agtcctaagaggggaaataagactttgcaattt

SEQ ID NO: 296992 - DNA, 33 bp, Homo sapien
agtcctaagaggggaagtaagactttgcaattt

SEQ ID NO: 296993 - DNA, 33 bp, Homo sapien
aggagctgagttcacaaggacaccatttccttg

SEQ ID NO: 296994 - DNA, 33 bp, Homo sapien
aggagctgagttcacagggacaccatttccttg

SEQ ID NO: 296995 - DNA, 33 bp, Homo sapien
actgtttagtggaagccgacttgctcagagcct

SEQ ID NO: 296996 - DNA, 33 bp, Homo sapien
actgtttagtggaagctgacttgctcagagcct

SEQ ID NO: 296997 - DNA, 33 bp, Homo sapien
atgaagtagaagggaacgtctgaacacttggca

SEQ ID NO: 296998 - DNA, 33 bp, Homo sapien
atgaagtagaagggaatgtctgaacacttggca

SEQ ID NO: 296999 - DNA, 33 bp, Homo sapien
ggtctagaaggtgataaatttagtcagttatga

SEQ ID NO: 297000 - DNA, 33 bp, Homo sapien
ggtctagaaggtgatacatttagtcagttatga

SEQ ID NO: 297001 - DNA, 33 bp, Homo sapien
tgagagtcggcatgacagccatgaagagcccga

SEQ ID NO: 297002 - DNA, 33 bp, Homo sapien
tgagagtcggcatgacggccatgaagagcccga

SEQ ID NO: 297003 - DNA, 33 bp, Homo sapien
cgaaagacggaagactcagatgacagcgccaag

SEQ ID NO: 297004 - DNA, 33 bp, Homo sapien
cgaaagacggaagactgagatgacagcgccaag

SEQ ID NO: 297005 - DNA, 33 bp, Homo sapien
aatcataatgtaaagaaggaagattacctatgg

SEQ ID NO: 297006 - DNA, 33 bp, Homo sapien
aatcataatgtaaagatggaagattacctatgg

SEQ ID NO: 297007 - DNA, 33 bp, Homo sapien
acgtaaacatattacaaaaccactctgcatacg

SEQ ID NO: 297008 - DNA, 33 bp, Homo sapien
acgtaaacatattacagaaccactctgcatacg

SEQ ID NO: 297009 - DNA, 33 bp, Homo sapien
tgttcctttgggcgcaaactcagcagtgggatt

SEQ ID NO: 297010 - DNA, 33 bp, Homo sapien
tgttcctttgggcgcagactcagcagtgggatt

SEQ ID NO: 297011 - DNA, 33 bp, Homo sapien
aacttaaatgtaaagccgaaccctgtaaaatcc

SEQ ID NO: 297012 - DNA, 33 bp, Homo sapien
aacttaaatgtaaagctgaaccctgtaaaatcc

SEQ ID NO: 297013 - DNA, 33 bp, Homo sapien
aacacacagaggcggcactcggtctggcactcc

SEQ ID NO: 297014 - DNA, 33 bp, Homo sapien
aacacacagaggcggcgctcggtctggcactcc

SEQ ID NO: 297015 - DNA, 33 bp, Homo sapien
ttatactactgcaatccataatttatgtgtgca

SEQ ID NO: 297016 - DNA, 33 bp, Homo sapien
ttatactactgcaatcgataatttatgtgtgca

SEQ ID NO: 297017 - DNA, 33 bp, Homo sapien
ccaacacctgtgaccacctttttaattttgtta

SEQ ID NO: 297018 - DNA, 33 bp, Homo sapien
ccaacacctgtgaccatctttttaattttgtta

SEQ ID NO: 297019 - DNA, 33 bp, Homo sapien
acccacttcttagtcccgcagtgtgtgaaacag

SEQ ID NO: 297020 - DNA, 33 bp, Homo sapien
acccacttcttagtcctgcagtgtgtgaaacag

SEQ ID NO: 297021 - DNA, 33 bp, Homo sapien
gagggcttctcaaaacacagttgatgggcaaac

SEQ ID NO: 297022 - DNA, 33 bp, Homo sapien
gagggcttctcaaaacccagttgatgggcaaac

SEQ ID NO: 297023 - DNA, 33 bp, Homo sapien
gaaatgtgaagttacacaataagaggtcaaagg

SEQ ID NO: 297024 - DNA, 33 bp, Homo sapien
gaaatgtgaagttacagaataagaggtcaaagg

SEQ ID NO: 297025 - DNA, 33 bp, Homo sapien
taggtttctgtatgaacgactgggtggatgtct

SEQ ID NO: 297026 - DNA, 33 bp, Homo sapien
taggtttctgtatgaaggactgggtggatgtct

SEQ ID NO: 297027 - DNA, 33 bp, Homo sapien
ttttactagaagtgaacgtgtccttcccaggaa

SEQ ID NO: 297028 - DNA, 33 bp, Homo sapien
ttttactagaagtgaatgtgtccttcccaggaa

SEQ ID NO: 297029 - DNA, 33 bp, Homo sapien
tgtccagtgtcatgaaagtttgtaagtgggaag

SEQ ID NO: 297030 - DNA, 33 bp, Homo sapien
tgtccagtgtcatgaaggtttgtaagtgggaag

SEQ ID NO: 297031 - DNA, 33 bp, Homo sapien
tgcgacaacttaaaagccatagtccctgtcctc

SEQ ID NO: 297032 - DNA, 33 bp, Homo sapien
tgcgacaacttaaaagtcatagtccctgtcctc

SEQ ID NO: 297033 - DNA, 33 bp, Homo sapien
ttcctgtaaagcaccaagctgacaggactctct

SEQ ID NO: 297034 - DNA, 33 bp, Homo sapien
ttcctgtaaagcaccaggctgacaggactctct

SEQ ID NO: 297035 - DNA, 33 bp, Homo sapien
agcatggcgtgttttacgaacgtgtgttttgct

SEQ ID NO: 297036 - DNA, 33 bp, Homo sapien
agcatggcgtgttttaggaacgtgtgttttgct

SEQ ID NO: 297037 - DNA, 33 bp, Homo sapien
accacagacgatgccacgcttgtgtcagcagtg

SEQ ID NO: 297038 - DNA, 33 bp, Homo sapien
accacagacgatgccatgcttgtgtcagcagtg

SEQ ID NO: 297039 - DNA, 33 bp, Homo sapien
tccaaccgggtccaaccgcactttctgagtcta

SEQ ID NO: 297040 - DNA, 33 bp, Homo sapien
tccaaccgggtccaactgcactttctgagtcta

SEQ ID NO: 297041 - DNA, 33 bp, Homo sapien
acacatgacagtatagccacacagcaggggcac

SEQ ID NO: 297042 - DNA, 33 bp, Homo sapien
acacatgacagtatagtcacacagcaggggcac

SEQ ID NO: 297043 - DNA, 33 bp, Homo sapien
attagaccggcctgcgaaaagcaacaaaacaat

SEQ ID NO: 297044 - DNA, 33 bp, Homo sapien
attagaccggcctgcggaaagcaacaaaacaat

SEQ ID NO: 297045 - DNA, 33 bp, Homo sapien
gtctaattgaagccaacggagaactcaaggtct

SEQ ID NO: 297046 - DNA, 33 bp, Homo sapien
gtctaattgaagccaatggagaactcaaggtct

SEQ ID NO: 297047 - DNA, 33 bp, Homo sapien
gctagtaaaatacacacgcgaagcgttaaaggt

SEQ ID NO: 297048 - DNA, 33 bp, Homo sapien
gctagtaaaatacacatgcgaagcgttaaaggt

SEQ ID NO: 297049 - DNA, 33 bp, Homo sapien
agctcataaataatcccaaaagggctgcgtaga

SEQ ID NO: 297050 - DNA, 33 bp, Homo sapien
agctcataaataatcctaaaagggctgcgtaga

SEQ ID NO: 297051 - DNA, 33 bp, Homo sapien
atgttgccgttataaaactaaattagtaaaata

SEQ ID NO: 297052 - DNA, 33 bp, Homo sapien
atgttgccgttataaagctaaattagtaaaata

SEQ ID NO: 297053 - DNA, 33 bp, Homo sapien
cgcgttctgaaaaatacgtgcgctgtgattgca

SEQ ID NO: 297054 - DNA, 33 bp, Homo sapien
cgcgttctgaaaaatatgtgcgctgtgattgca

SEQ ID NO: 297055 - DNA, 33 bp, Homo sapien
gtttcccatactgtcaactctaggccgtccctc

SEQ ID NO: 297056 - DNA, 33 bp, Homo sapien
gtttcccatactgtcacctctaggccgtccctc

SEQ ID NO: 297057 - DNA, 33 bp, Homo sapien
ctctggggtaaatgcccaaaagtgtcgtaattg

SEQ ID NO: 297058 - DNA, 33 bp, Homo sapien
ctctggggtaaatgcctaaaagtgtcgtaattg

SEQ ID NO: 297059 - DNA, 33 bp, Homo sapien
tttttaagtagaaaaacgcgagaatgtggagtg

SEQ ID NO: 297060 - DNA, 33 bp, Homo sapien
tttttaagtagaaaaatgcgagaatgtggagtg

SEQ ID NO: 297061 - DNA, 33 bp, Homo sapien
cttgtgatgatgtaaaatgctgtaaaatgccac

SEQ ID NO: 297062 - DNA, 33 bp, Homo sapien
cttgtgatgatgtaaagtgctgtaaaatgccac

SEQ ID NO: 297063 - DNA, 33 bp, Homo sapien
ccgggtttgtggattcacagcttccatctctgc

SEQ ID NO: 297064 - DNA, 33 bp, Homo sapien
ccgggtttgtggattcgcagcttccatctctgc

SEQ ID NO: 297065 - DNA, 33 bp, Homo sapien
caaccatttatggcaccgaaacacacaaaatca

SEQ ID NO: 297066 - DNA, 33 bp, Homo sapien
caaccatttatggcactgaaacacacaaaatca

SEQ ID NO: 297067 - DNA, 33 bp, Homo sapien
ggggctgtgtacgcctcaaacccacatcgcctg

SEQ ID NO: 297068 - DNA, 33 bp, Homo sapien
ggggctgtgtacgcctgaaacccacatcgcctg

SEQ ID NO: 297069 - DNA, 33 bp, Homo sapien
cagcctctttccttaacgccttcagtggagagg

SEQ ID NO: 297070 - DNA, 33 bp, Homo sapien
cagcctctttccttaatgccttcagtggagagg

SEQ ID NO: 297071 - DNA, 33 bp, Homo sapien
ttgacgaccttctgacagtaacatggtggctgc

SEQ ID NO: 297072 - DNA, 33 bp, Homo sapien
ttgacgaccttctgaccgtaacatggtggctgc

SEQ ID NO: 297073 - DNA, 33 bp, Homo sapien
ttatgcagcagtttcaccaggaaaataggaagg

SEQ ID NO: 297074 - DNA, 33 bp, Homo sapien
ttatgcagcagtttcatcaggaaaataggaagg

SEQ ID NO: 297075 - DNA, 33 bp, Homo sapien
gtgcggattagaaggaagggtcgagcgaaagaa

SEQ ID NO: 297076 - DNA, 33 bp, Homo sapien
gtgcggattagaaggatgggtcgagcgaaagaa

SEQ ID NO: 297077 - DNA, 33 bp, Homo sapien
ctgctgcacgcatttacggtgagagacccagca

SEQ ID NO: 297078 - DNA, 33 bp, Homo sapien
ctgctgcacgcatttatggtgagagacccagca

SEQ ID NO: 297079 - DNA, 33 bp, Homo sapien
tcactccattcgccaacgtaataaaccatcggc

SEQ ID NO: 297080 - DNA, 33 bp, Homo sapien
tcactccattcgccaatgtaataaaccatcggc

SEQ ID NO: 297081 - DNA, 33 bp, Homo sapien
gatgacatcagacacgcaattgaggagatttct

SEQ ID NO: 297082 - DNA, 33 bp, Homo sapien
gatgacatcagacacgtaattgaggagatttct

SEQ ID NO: 297083 - DNA, 33 bp, Homo sapien
acagatgggcagctgcacggacacccagggcgt

SEQ ID NO: 297084 - DNA, 33 bp, Homo sapien
acagatgggcagctgcgcggacacccagggcgt

SEQ ID NO: 297085 - DNA, 33 bp, Homo sapien
tccccatgtggtctaactgggcttatctggatt

SEQ ID NO: 297086 - DNA, 33 bp, Homo sapien
tccccatgtggtctaattgggcttatctggatt

SEQ ID NO: 297087 - DNA, 33 bp, Homo sapien
tatctgtgacattgaactgctttacagaattag

SEQ ID NO: 297088 - DNA, 33 bp, Homo sapien
tatctgtgacattgaattgctttacagaattag

SEQ ID NO: 297089 - DNA, 33 bp, Homo sapien
gggtctgtgaaagaaaacctgaatcaacatggt

SEQ ID NO: 297090 - DNA, 33 bp, Homo sapien
gggtctgtgaaagaaagcctgaatcaacatggt

SEQ ID NO: 297091 - DNA, 33 bp, Homo sapien
gatgcgaatttacacacataaatccatactagg

SEQ ID NO: 297092 - DNA, 33 bp, Homo sapien
gatgcgaatttacacatataaatccatactagg

SEQ ID NO: 297093 - DNA, 33 bp, Homo sapien
gtgaatattaaaatgcacgtctggtgtcccttt

SEQ ID NO: 297094 - DNA, 33 bp, Homo sapien
gtgaatattaaaatgcgcgtctggtgtcccttt

SEQ ID NO: 297095 - DNA, 33 bp, Homo sapien
agccgtggtgtttgaacgtgtgaaagcagcctg

SEQ ID NO: 297096 - DNA, 33 bp, Homo sapien
agccgtggtgtttgaatgtgtgaaagcagcctg

SEQ ID NO: 297097 - DNA, 33 bp, Homo sapien
agaggaagaaacctccaagccaggcagtggtgt

SEQ ID NO: 297098 - DNA, 33 bp, Homo sapien
agaggaagaaacctccgagccaggcagtggtgt

SEQ ID NO: 297099 - DNA, 33 bp, Homo sapien
ccttggtttttttgccaccacaagtcaaaatgt

SEQ ID NO: 297100 - DNA, 33 bp, Homo sapien
ccttggtttttttgcccccacaagtcaaaatgt

SEQ ID NO: 297101 - DNA, 33 bp, Homo sapien
ccccatgtgtactgccaaaaggcgagggacatg

SEQ ID NO: 297102 - DNA, 33 bp, Homo sapien
ccccatgtgtactgccgaaaggcgagggacatg

SEQ ID NO: 297103 - DNA, 33 bp, Homo sapien
agttccaggctgccagaatcagaggaagcagaa

SEQ ID NO: 297104 - DNA, 33 bp, Homo sapien
agttccaggctgccaggatcagaggaagcagaa

SEQ ID NO: 297105 - DNA, 33 bp, Homo sapien
agctttgctgtagatacgagtttcagagtcacc

SEQ ID NO: 297106 - DNA, 33 bp, Homo sapien
agctttgctgtagatatgagtttcagagtcacc

SEQ ID NO: 297107 - DNA, 33 bp, Homo sapien
ccacatgcatttcccacacagcacattgtcttg

SEQ ID NO: 297108 - DNA, 33 bp, Homo sapien
ccacatgcatttcccatacagcacattgtcttg

SEQ ID NO: 297109 - DNA, 33 bp, Homo sapien
taaggcacagagttgaaaagacaggtaagaagc

SEQ ID NO: 297110 - DNA, 33 bp, Homo sapien
taaggcacagagttgagaagacaggtaagaagc

SEQ ID NO: 297111 - DNA, 33 bp, Homo sapien
cagttctcattgggatcacattttcttctctgt

SEQ ID NO: 297112 - DNA, 33 bp, Homo sapien
cagttctcattgggatgacattttcttctctgt

SEQ ID NO: 297113 - DNA, 33 bp, Homo sapien
caatccagaaggggaagtggttctgtatgttga

SEQ ID NO: 297114 - DNA, 33 bp, Homo sapien
caatccagaaggggaattggttctgtatgttga

SEQ ID NO: 297115 - DNA, 33 bp, Homo sapien
agttccgaggtgaaccaacagaacagatcaccc

SEQ ID NO: 297116 - DNA, 33 bp, Homo sapien
agttccgaggtgaaccgacagaacagatcaccc

SEQ ID NO: 297117 - DNA, 33 bp, Homo sapien
ttctctttggggctacacgtttctccttggact

SEQ ID NO: 297118 - DNA, 33 bp, Homo sapien
ttctctttggggctacgcgtttctccttggact

SEQ ID NO: 297119 - DNA, 33 bp, Homo sapien
ctggcggcctcgctaacacgccaaacctctgtc

SEQ ID NO: 297120 - DNA, 33 bp, Homo sapien
ctggcggcctcgctaatacgccaaacctctgtc

SEQ ID NO: 297121 - DNA, 33 bp, Homo sapien
tgagctaagttcgtgacgcttgtttctctcagg

SEQ ID NO: 297122 - DNA, 33 bp, Homo sapien
tgagctaagttcgtgatgcttgtttctctcagg

SEQ ID NO: 297123 - DNA, 33 bp, Homo sapien
ctgtgtcacaagaggcgaataagaccagaggta

SEQ ID NO: 297124 - DNA, 33 bp, Homo sapien
ctgtgtcacaagaggctaataagaccagaggta

SEQ ID NO: 297125 - DNA, 33 bp, Homo sapien
cataagcccactgttcaagatgcaaattggtca

SEQ ID NO: 297126 - DNA, 33 bp, Homo sapien
cataagcccactgttcgagatgcaaattggtca

SEQ ID NO: 297127 - DNA, 33 bp, Homo sapien
tcccaggcctaatgtacaagccagaaggaactc

SEQ ID NO: 297128 - DNA, 33 bp, Homo sapien
tcccaggcctaatgtataagccagaaggaactc

SEQ ID NO: 297129 - DNA, 33 bp, Homo sapien
ccgaaaagactctagcacggccatgtagtggaa

SEQ ID NO: 297130 - DNA, 33 bp, Homo sapien
ccgaaaagactctagcgcggccatgtagtggaa

SEQ ID NO: 297131 - DNA, 33 bp, Homo sapien
gattcacttaggtctcaatcccactctggaaat

SEQ ID NO: 297132 - DNA, 33 bp, Homo sapien
gattcacttaggtctcgatcccactctggaaat

SEQ ID NO: 297133 - DNA, 33 bp, Homo sapien
ttaagtgagaatagcacgggattgcatgctatg

SEQ ID NO: 297134 - DNA, 33 bp, Homo sapien
ttaagtgagaatagcaggggattgcatgctatg

SEQ ID NO: 297135 - DNA, 33 bp, Homo sapien
tcctcagctacagaggaaggagataatcacaca

SEQ ID NO: 297136 - DNA, 33 bp, Homo sapien
tcctcagctacagagggaggagataatcacaca

SEQ ID NO: 297137 - DNA, 33 bp, Homo sapien
tccggttccaatatcacctccctggagtcttct

SEQ ID NO: 297138 - DNA, 33 bp, Homo sapien
tccggttccaatatcatctccctggagtcttct

SEQ ID NO: 297139 - DNA, 33 bp, Homo sapien
aaacgtgagcaaaagaatctatgtcgtaattaa

SEQ ID NO: 297140 - DNA, 33 bp, Homo sapien
aaacgtgagcaaaagagtctatgtcgtaattaa

SEQ ID NO: 297141 - DNA, 33 bp, Homo sapien
acacaaacattcgaggcatagcaaccttcaaaa

SEQ ID NO: 297142 - DNA, 33 bp, Homo sapien
acacaaacattcgagggatagcaaccttcaaaa

SEQ ID NO: 297143 - DNA, 33 bp, Homo sapien
actttttcctggttaccggctggaggaggtgag

SEQ ID NO: 297144 - DNA, 33 bp, Homo sapien
actttttcctggttactggctggaggaggtgag

SEQ ID NO: 297145 - DNA, 33 bp, Homo sapien
aatgtttaaattaaacaagaagcaacatcagat

SEQ ID NO: 297146 - DNA, 33 bp, Homo sapien
aatgtttaaattaaacgagaagcaacatcagat

SEQ ID NO: 297147 - DNA, 33 bp, Homo sapien
ttttgtcatggttaaaaaattattttgataacg

SEQ ID NO: 297148 - DNA, 33 bp, Homo sapien
ttttgtcatggttaaagaattattttgataacg

SEQ ID NO: 297149 - DNA, 33 bp, Homo sapien
tctgtcaccaatgaaacgaaatatgcacaggac

SEQ ID NO: 297150 - DNA, 33 bp, Homo sapien
tctgtcaccaatgaaatgaaatatgcacaggac

SEQ ID NO: 297151 - DNA, 33 bp, Homo sapien
agtttttcctcagcaaatgtcaagacagtgctt

SEQ ID NO: 297152 - DNA, 33 bp, Homo sapien
agtttttcctcagcaagtgtcaagacagtgctt

SEQ ID NO: 297153 - DNA, 33 bp, Homo sapien
gtctctcgaatatagacctaggagtggagttgc

SEQ ID NO: 297154 - DNA, 33 bp, Homo sapien
gtctctcgaatatagatctaggagtggagttgc

SEQ ID NO: 297155 - DNA, 33 bp, Homo sapien
ttgagatggatgggataacaggcacatgcacca

SEQ ID NO: 297156 - DNA, 33 bp, Homo sapien
ttgagatggatgggattacaggcacatgcacca

SEQ ID NO: 297157 - DNA, 33 bp, Homo sapien
ggaaccacaaattgcactgaccctcaaaacagt

SEQ ID NO: 297158 - DNA, 33 bp, Homo sapien
ggaaccacaaattgcattgaccctcaaaacagt

SEQ ID NO: 297159 - DNA, 33 bp, Homo sapien
aacatacgaaagaaagcccaacttaattcataa

SEQ ID NO: 297160 - DNA, 33 bp, Homo sapien
aacatacgaaagaaagtccaacttaattcataa

SEQ ID NO: 297161 - DNA, 33 bp, Homo sapien
ccttgttttctctccactctgcgtctaatccac

SEQ ID NO: 297162 - DNA, 33 bp, Homo sapien
ccttgttttctctccagtctgcgtctaatccac

SEQ ID NO: 297163 - DNA, 33 bp, Homo sapien
tggaacagagcagttgaagcccagggaaggtga

SEQ ID NO: 297164 - DNA, 33 bp, Homo sapien
tggaacagagcagttggagcccagggaaggtga

SEQ ID NO: 297165 - DNA, 33 bp, Homo sapien
cttctgttgtatgaacaatcccgtgaattggtg

SEQ ID NO: 297166 - DNA, 33 bp, Homo sapien
cttctgttgtatgaacgatcccgtgaattggtg

SEQ ID NO: 297167 - DNA, 33 bp, Homo sapien
aatctcttctgcgagggcaaggagacatccctc

SEQ ID NO: 297168 - DNA, 33 bp, Homo sapien
aatctcttctgcgaggtcaaggagacatccctc

SEQ ID NO: 297169 - DNA, 33 bp, Homo sapien
ttagcaaaggtgaagagaaggcagttgaactta

SEQ ID NO: 297170 - DNA, 33 bp, Homo sapien
ttagcaaaggtgaagataaggcagttgaactta

SEQ ID NO: 297171 - DNA, 33 bp, Homo sapien
tatgaacaaacagaaaatgtcaacagagataga

SEQ ID NO: 297172 - DNA, 33 bp, Homo sapien
tatgaacaaacagaaactgtcaacagagataga

SEQ ID NO: 297173 - DNA, 33 bp, Homo sapien
tattgcaaagttctgaaaaatgattttgaaaaa

SEQ ID NO: 297174 - DNA, 33 bp, Homo sapien
tattgcaaagttctgagaaatgattttgaaaaa

SEQ ID NO: 297175 - DNA, 33 bp, Homo sapien
ctaggttaggataataaaaaggactgtgaactt

SEQ ID NO: 297176 - DNA, 33 bp, Homo sapien
ctaggttaggataatacaaaggactgtgaactt

SEQ ID NO: 297177 - DNA, 33 bp, Homo sapien
gtaggctttgtcagtacgagtatgcctatttca

SEQ ID NO: 297178 - DNA, 33 bp, Homo sapien
gtaggctttgtcagtatgagtatgcctatttca

SEQ ID NO: 297179 - DNA, 33 bp, Homo sapien
aatcatactttaagcccatccccttacctgttt

SEQ ID NO: 297180 - DNA, 33 bp, Homo sapien
aatcatactttaagcctatccccttacctgttt

SEQ ID NO: 297181 - DNA, 33 bp, Homo sapien
gtaaggcactggcaacactagagacctacagct

SEQ ID NO: 297182 - DNA, 33 bp, Homo sapien
gtaaggcactggcaacgctagagacctacagct

SEQ ID NO: 297183 - DNA, 33 bp, Homo sapien
ctaagccgcagaaacacaggagtatcaaaagac

SEQ ID NO: 297184 - DNA, 33 bp, Homo sapien
ctaagccgcagaaacagaggagtatcaaaagac

SEQ ID NO: 297185 - DNA, 33 bp, Homo sapien; identical to SEQ ID NO: 297183

SEQ ID NO: 297186 - DNA, 33 bp, Homo sapien; identical to SEQ ID NO: 297184

SEQ ID NO: 297187 - DNA, 33 bp, Homo sapien
agagccaggttaaatcccatcttcaatctcaac

SEQ ID NO: 297188 - DNA, 33 bp, Homo sapien
agagccaggttaaatcgcatcttcaatctcaac

SEQ ID NO: 297189 - DNA, 33 bp, Homo sapien
ggaaaggctcatgccacgttgctcccacaatgg

SEQ ID NO: 297190 - DNA, 33 bp, Homo sapien
ggaaaggctcatgccatgttgctcccacaatgg

SEQ ID NO: 297191 - DNA, 33 bp, Homo sapien
tcaggcagagtataaagtggttccttcccatcc

SEQ ID NO: 297192 - DNA, 33 bp, Homo sapien
tcaggcagagtataaattggttccttcccatcc

SEQ ID NO: 297193 - DNA, 33 bp, Homo sapien
agagacacaataaaagccattatgtattttgtg

SEQ ID NO: 297194 - DNA, 33 bp, Homo sapien
agagacacaataaaagtcattatgtattttgtg

SEQ ID NO: 297195 - DNA, 33 bp, Homo sapien
ggcacacttcctcatagcatatagtgtatgcag

SEQ ID NO: 297196 - DNA, 33 bp, Homo sapien
ggcacacttcctcatatcatatagtgtatgcag

SEQ ID NO: 297197 - DNA, 33 bp, Homo sapien
gatttacagaaatgtcaaatatcacagaatata

SEQ ID NO: 297198 - DNA, 33 bp, Homo sapien
gatttacagaaatgtcgaatatcacagaatata

SEQ ID NO: 297199 - DNA, 33 bp, Homo sapien
aggcctgcccatgaaccagtcagcacacattcc

SEQ ID NO: 297200 - DNA, 33 bp, Homo sapien
aggcctgcccatgaactagtcagcacacattcc

SEQ ID NO: 297201 - DNA, 33 bp, Homo sapien
tccggaatccactgaaaagtgggtgcgaaaaga

SEQ ID NO: 297202 - DNA, 33 bp, Homo sapien
tccggaatccactgaacagtgggtgcgaaaaga

SEQ ID NO: 297203 - DNA, 33 bp, Homo sapien
actgcaatcgatggacagcagaaaggggccagg

SEQ ID NO: 297204 - DNA, 33 bp, Homo sapien
actgcaatcgatggaccgcagaaaggggccagg

SEQ ID NO: 297205 - DNA, 33 bp, Homo sapien
tttttgtggttatatgaatttgtagactgtgca

SEQ ID NO: 297206 - DNA, 33 bp, Homo sapien
tttttgtggttatatggatttgtagactgtgca

SEQ ID NO: 297207 - DNA, 33 bp, Homo sapien
tacttgacttcttgatcaactttcttccctgtc

SEQ ID NO: 297208 - DNA, 33 bp, Homo sapien
tacttgacttcttgatgaactttcttccctgtc

SEQ ID NO: 297209 - DNA, 33 bp, Homo sapien; identical to SEQ ID NO: 297207

SEQ ID NO: 297210 - DNA, 33 bp, Homo sapien; identical to SEQ ID NO: 297208

SEQ ID NO: 297211 - DNA, 33 bp, Homo sapien
gaagacaacaacgatacgaactttatgatgatg

SEQ ID NO: 297212 - DNA, 33 bp, Homo sapien
gaagacaacaacgatatgaactttatgatgatg

SEQ ID NO: 297213 - DNA, 33 bp, Homo sapien
atggagtaccttagacaaatagtgtaaaaatta

SEQ ID NO: 297214 - DNA, 33 bp, Homo sapien
atggagtaccttagacgaatagtgtaaaaatta

SEQ ID NO: 297215 - DNA, 33 bp, Homo sapien; identical to SEQ ID NO: 297213

SEQ ID NO: 297216 - DNA, 33 bp, Homo sapien; identical to SEQ ID NO: 297214

SEQ ID NO: 297217 - DNA, 33 bp, Homo sapien
tgctgttcagaaataaccagtgtgttttaatat

SEQ ID NO: 297218 - DNA, 33 bp, Homo sapien
tgctgttcagaaataatcagtgtgttttaatat

SEQ ID NO: 297219 - DNA, 33 bp, Homo sapien
tgataaccaaaaggcagacttgtaacctacaag

SEQ ID NO: 297220 - DNA, 33 bp, Homo sapien
tgataaccaaaaggcatacttgtaacctacaag

SEQ ID NO: 297221 - DNA, 33 bp, Homo sapien
gaactagtgtttcaaaattaaaatgtggttttc

SEQ ID NO: 297222 - DNA, 33 bp, Homo sapien
gaactagtgtttcaaatttaaaatgtggttttc

SEQ ID NO: 297223 - DNA, 33 bp, Homo sapien
gttgtaattcgatctaaaagctcagctccaact

SEQ ID NO: 297224 - DNA, 33 bp, Homo sapien
gttgtaattcgatctacaagctcagctccaact

SEQ ID NO: 297225 - DNA, 33 bp, Homo sapien
tttggccctttttacaaatcagaatctgtgaga

SEQ ID NO: 297226 - DNA, 33 bp, Homo sapien
tttggccctttttacatatcagaatctgtgaga

SEQ ID NO: 297227 - DNA, 33 bp, Homo sapien
tcagccaaccatcgaacattgactaaaacaaaa

SEQ ID NO: 297228 - DNA, 33 bp, Homo sapien
tcagccaaccatcgaatattgactaaaacaaaa

SEQ ID NO: 297229 - DNA, 33 bp, Homo sapien
caccttcattcccctacgtactttctgctgggc

SEQ ID NO: 297230 - DNA, 33 bp, Homo sapien
caccttcattcccctatgtactttctgctgggc

SEQ ID NO: 297231 - DNA, 33 bp, Homo sapien
tgattctgcacattaccagttttgtttgtttgt

SEQ ID NO: 297232 - DNA, 33 bp, Homo sapien
tgattctgcacattacgagttttgtttgtttgt

SEQ ID NO: 297233 - DNA, 33 bp, Homo sapien
agggtattttggcaaacgttcttgagttttaga

SEQ ID NO: 297234 - DNA, 33 bp, Homo sapien
agggtattttggcaaatgttcttgagttttaga

SEQ ID NO: 297235 - DNA, 33 bp, Homo sapien
ttggattgatagtaaaattctgtggctgataat

SEQ ID NO: 297236 - DNA, 33 bp, Homo sapien
ttggattgatagtaaagttctgtggctgataat

SEQ ID NO: 297237 - DNA, 33 bp, Homo sapien
catggactcgttaagcaatagtaaggatggtgc

SEQ ID NO: 297238 - DNA, 33 bp, Homo sapien
catggactcgttaagccatagtaaggatggtgc

SEQ ID NO: 297239 - DNA, 33 bp, Homo sapien
tgaagcttgacaacaactgaatgcagatggaaa

SEQ ID NO: 297240 - DNA, 33 bp, Homo sapien
tgaagcttgacaacaattgaatgcagatggaaa

SEQ ID NO: 297241 - DNA, 33 bp, Homo sapien
cgtttttcaattgacacatacatccaaaaatca

SEQ ID NO: 297242 - DNA, 33 bp, Homo sapien
cgtttttcaattgacatatacatccaaaaatca

SEQ ID NO: 297243 - DNA, 33 bp, Homo sapien
actcttgaaggtggtgaatagtcactggacaca

SEQ ID NO: 297244 - DNA, 33 bp, Homo sapien
actcttgaaggtggtggatagtcactggacaca

SEQ ID NO: 297245 - DNA, 33 bp, Homo sapien
ctattttgtgacttgaaatgtgattataatggt

SEQ ID NO: 297246 - DNA, 33 bp, Homo sapien
ctattttgtgacttgagatgtgattataatggt

SEQ ID NO: 297247 - DNA, 33 bp, Homo sapien
aaggttttcggatctgaaaattaaggttcatca

SEQ ID NO: 297248 - DNA, 33 bp, Homo sapien
aaggttttcggatctgtaaattaaggttcatca

SEQ ID NO: 297249 - DNA, 33 bp, Homo sapien
gaaactggcacacttacgagatatttactagag

SEQ ID NO: 297250 - DNA, 33 bp, Homo sapien
gaaactggcacacttatgagatatttactagag

SEQ ID NO: 297251 - DNA, 33 bp, Homo sapien
gagaatacagacaaaaggttatccactggtaag

SEQ ID NO: 297252 - DNA, 33 bp, Homo sapien
gagaatacagacaaaatgttatccactggtaag

SEQ ID NO: 297253 - DNA, 33 bp, Homo sapien
ctctctctcataggaccagatttgttgaattga

SEQ ID NO: 297254 - DNA, 33 bp, Homo sapien
ctctctctcataggactagatttgttgaattga

SEQ ID NO: 297255 - DNA, 33 bp, Homo sapien
tggaactgcagtggtgaacatataactctatgc

SEQ ID NO: 297256 - DNA, 33 bp, Homo sapien
tggaactgcagtggtggacatataactctatgc

SEQ ID NO: 297257 - DNA, 33 bp, Homo sapien
aaagttatagaaataacgagatgctttaagaag

SEQ ID NO: 297258 - DNA, 33 bp, Homo sapien
aaagttatagaaataatgagatgctttaagaag

SEQ ID NO: 297259 - DNA, 33 bp, Homo sapien
gatctgaatataaaacccatgccattgacacta

SEQ ID NO: 297260 - DNA, 33 bp, Homo sapien
gatctgaatataaaactcatgccattgacacta

SEQ ID NO: 297261 - DNA, 33 bp, Homo sapien
atgtcactagtagtgaaaacttcctttcattaa

SEQ ID NO: 297262 - DNA, 33 bp, Homo sapien
atgtcactagtagtgagaacttcctttcattaa

SEQ ID NO: 297263 - DNA, 33 bp, Homo sapien
ttcacttgatacctagaaaaagacttgttaata

SEQ ID NO: 297264 - DNA, 33 bp, Homo sapien
ttcacttgatacctagcaaaagacttgttaata

SEQ ID NO: 297265 - DNA, 33 bp, Homo sapien
cattcaatgatcttgaaagaactgtgcctcttt

SEQ ID NO: 297266 - DNA, 33 bp, Homo sapien
cattcaatgatcttgagagaactgtgcctcttt

SEQ ID NO: 297267 - DNA, 33 bp, Homo sapien
actttttctgtttatcaaagtgatagattagct

SEQ ID NO: 297268 - DNA, 33 bp, Homo sapien
actttttctgtttatcgaagtgatagattagct

SEQ ID NO: 297269 - DNA, 33 bp, Homo sapien
ataaagatggaagaaacctgggttgctcaatct

SEQ ID NO: 297270 - DNA, 33 bp, Homo sapien
ataaagatggaagaaagctgggttgctcaatct

SEQ ID NO: 297271 - DNA, 33 bp, Homo sapien
cttctctttaattttcacagtcatttcaattct

SEQ ID NO: 297272 - DNA, 33 bp, Homo sapien
cttctctttaattttcgcagtcatttcaattct

SEQ ID NO: 297273 - DNA, 33 bp, Homo sapien
tcttaccatcttgatacgggggagaagcaacca

SEQ ID NO: 297274 - DNA, 33 bp, Homo sapien
tcttaccatcttgatatgggggagaagcaacca

SEQ ID NO: 297275 - DNA, 33 bp, Homo sapien
ccaaaagtctcagataaccaatcccatgaattg

SEQ ID NO: 297276 - DNA, 33 bp, Homo sapien
ccaaaagtctcagatagccaatcccatgaattg

SEQ ID NO: 297277 - DNA, 33 bp, Homo sapien
cctctaagataacaaaatagtgcccaattatat

SEQ ID NO: 297278 - DNA, 33 bp, Homo sapien
cctctaagataacaaagtagtgcccaattatat

SEQ ID NO: 297279 - DNA, 33 bp, Homo sapien; identical to SEQ ID NO: 297277

SEQ ID NO: 297280 - DNA, 33 bp, Homo sapien; identical to SEQ ID NO: 297278

SEQ ID NO: 297281 - DNA, 33 bp, Homo sapien
aacatatgttctttgcacattcaaatcttcaga

SEQ ID NO: 297282 - DNA, 33 bp, Homo sapien
aacatatgttctttgcgcattcaaatcttcaga

SEQ ID NO: 297283 - DNA, 33 bp, Homo sapien
atttatgggaagaaaccggcttcttactatgta

SEQ ID NO: 297284 - DNA, 33 bp, Homo sapien
atttatgggaagaaactggcttcttactatgta

SEQ ID NO: 297285 - DNA, 33 bp, Homo sapien
tccagggtctataaaactgtgtggtgcagaaaa

SEQ ID NO: 297286 - DNA, 33 bp, Homo sapien
tccagggtctataaaattgtgtggtgcagaaaa

SEQ ID NO: 297287 - DNA, 33 bp, Homo sapien
cctccctaaagctgcaactacaagtattaaaac

SEQ ID NO: 297288 - DNA, 33 bp, Homo sapien
cctccctaaagctgcatctacaagtattaaaac

SEQ ID NO: 297289 - DNA, 33 bp, Homo sapien
ctcttattctttccaacgtttgatgagcaattt

SEQ ID NO: 297290 - DNA, 33 bp, Homo sapien
ctcttattctttccaatgtttgatgagcaattt

SEQ ID NO: 297291 - DNA, 33 bp, Homo sapien
cttgtagaagtgattgcatattaaagagcagaa

SEQ ID NO: 297292 - DNA, 33 bp, Homo sapien
cttgtagaagtgattgtatattaaagagcagaa

SEQ ID NO: 297293 - DNA, 33 bp, Homo sapien
tatgtttgctggtataccgttttaattatctca

SEQ ID NO: 297294 - DNA, 33 bp, Homo sapien
tatgtttgctggtatatcgttttaattatctca

SEQ ID NO: 297295 - DNA, 33 bp, Homo sapien
atgtttaacatgaaagaagactataataagaaa

SEQ ID NO: 297296 - DNA, 33 bp, Homo sapien
atgtttaacatgaaaggagactataataagaaa

SEQ ID NO: 297297 - DNA, 33 bp, Homo sapien
aaagatacaagacatacagaaacaaataacaga

SEQ ID NO: 297298 - DNA, 33 bp, Homo sapien
aaagatacaagacatatagaaacaaataacaga

SEQ ID NO: 297299 - DNA, 33 bp, Homo sapien
tcatatagataagtcaagctttcaatccattct

SEQ ID NO: 297300 - DNA, 33 bp, Homo sapien
tcatatagataagtcatgctttcaatccattct

SEQ ID NO: 297301 - DNA, 33 bp, Homo sapien
gaatcgtctgacaaccaatttgtatgtttgaat

SEQ ID NO: 297302 - DNA, 33 bp, Homo sapien
gaatcgtctgacaacctatttgtatgtttgaat

SEQ ID NO: 297303 - DNA, 33 bp, Homo sapien; identical to SEQ ID NO: 297301

SEQ ID NO: 297304 - DNA, 33 bp, Homo sapien; identical to SEQ ID NO: 297302

SEQ ID NO: 297305 - DNA, 33 bp, Homo sapien
aggtgatttctgctatcacaattctcctctggg

SEQ ID NO: 297306 - DNA, 33 bp, Homo sapien
aggtgatttctgctatgacaattctcctctggg

SEQ ID NO: 297307 - DNA, 33 bp, Homo sapien; identical to SEQ ID NO: 297305

SEQ ID NO: 297308 - DNA, 33 bp, Homo sapien; identical to SEQ ID NO: 297306

SEQ ID NO: 297309 - DNA, 33 bp, Homo sapien
acatatatgtgaatagaataggagataattgat

SEQ ID NO: 297310 - DNA, 33 bp, Homo sapien
acatatatgtgaataggataggagataattgat

SEQ ID NO: 297311 - DNA, 33 bp, Homo sapien
caaaggaagctagagaaaagggccaaattaccc

SEQ ID NO: 297312 - DNA, 33 bp, Homo sapien
caaaggaagctagagacaagggccaaattaccc

SEQ ID NO: 297313 - DNA, 33 bp, Homo sapien
tggtggacatctcagcagaaaccttataagcca

SEQ ID NO: 297314 - DNA, 33 bp, Homo sapien
tggtggacatctcagcggaaaccttataagcca

SEQ ID NO: 297315 - DNA, 33 bp, Homo sapien
gtggaggacttccacacaccactgacaatatta

SEQ ID NO: 297316 - DNA, 33 bp, Homo sapien
gtggaggacttccacagaccactgacaatatta

SEQ ID NO: 297317 - DNA, 33 bp, Homo sapien
ttgcattgaccaaatgaattataccaataagtt

SEQ ID NO: 297318 - DNA, 33 bp, Homo sapien
ttgcattgaccaaatgtattataccaataagtt

SEQ ID NO: 297319 - DNA, 33 bp, Homo sapien
gaaaaaattcaagtgacctattgtacatcattg

SEQ ID NO: 297320 - DNA, 33 bp, Homo sapien
gaaaaaattcaagtgatctattgtacatcattg

SEQ ID NO: 297321 - DNA, 33 bp, Homo sapien
aaatactgtattattacgtcttagctagcttct

SEQ ID NO: 297322 - DNA, 33 bp, Homo sapien
aaatactgtattattatgtcttagctagcttct

SEQ ID NO: 297323 - DNA, 33 bp, Homo sapien
ctttctacactcaaaaatcatgaggaacatgca

SEQ ID NO: 297324 - DNA, 33 bp, Homo sapien
ctttctacactcaaaagtcatgaggaacatgca

SEQ ID NO: 297325 - DNA, 33 bp, Homo sapien
tgacaaagggttgaagccttactggcacaagaa

SEQ ID NO: 297326 - DNA, 33 bp, Homo sapien
tgacaaagggttgaaggcttactggcacaagaa

SEQ ID NO: 297327 - DNA, 33 bp, Homo sapien
tttgaataacttgctaacaagggatgttgtgaa

SEQ ID NO: 297328 - DNA, 33 bp, Homo sapien
tttgaataacttgctatcaagggatgttgtgaa

SEQ ID NO: 297329 - DNA, 33 bp, Homo sapien
attttttgattaggtaacttgctttgagatatt

SEQ ID NO: 297330 - DNA, 33 bp, Homo sapien
attttttgattaggtaccttgctttgagatatt

SEQ ID NO: 297331 - DNA, 33 bp, Homo sapien
acagaaagtagaatgcagaatcatatatggggc

SEQ ID NO: 297332 - DNA, 33 bp, Homo sapien
acagaaagtagaatgcggaatcatatatggggc

SEQ ID NO: 297333 - DNA, 33 bp, Homo sapien
aaacaggtaagtaaaaatattgtagcgagctga

SEQ ID NO: 297334 - DNA, 33 bp, Homo sapien
aaacaggtaagtaaaactattgtagcgagctga

SEQ ID NO: 297335 - DNA, 33 bp, Homo sapien
acccctcttatgaaaggaattaaccgagactca

SEQ ID NO: 297336 - DNA, 33 bp, Homo sapien
acccctcttatgaaagtaattaaccgagactca

SEQ ID NO: 297337 - DNA, 33 bp, Homo sapien
gcagaaccacccccaaaaggtcatgagtattag

SEQ ID NO: 297338 - DNA, 33 bp, Homo sapien
gcagaaccacccccaagaggtcatgagtattag

SEQ ID NO: 297339 - DNA, 33 bp, Homo sapien
aatactttggctgtaaatatatagcaatttaat

SEQ ID NO: 297340 - DNA, 33 bp, Homo sapien
aatactttggctgtaagtatatagcaatttaat

SEQ ID NO: 297341 - DNA, 33 bp, Homo sapien
atcagcacacacgaaaacagcattaattggatt

SEQ ID NO: 297342 - DNA, 33 bp, Homo sapien
atcagcacacacgaaagcagcattaattggatt

SEQ ID NO: 297343 - DNA, 33 bp, Homo sapien
atcatactcttatcaacggatcttgactttctt

SEQ ID NO: 297344 - DNA, 33 bp, Homo sapien
atcatactcttatcaatggatcttgactttctt

SEQ ID NO: 297345 - DNA, 33 bp, Homo sapien
ctgagttgagtaaatgaatcttaaaaatggatc

SEQ ID NO: 297346 - DNA, 33 bp, Homo sapien
ctgagttgagtaaatggatcttaaaaatggatc

SEQ ID NO: 297347 - DNA, 33 bp, Homo sapien
tacacactgtatgctaaatgtgctaatattcct

SEQ ID NO: 297348 - DNA, 33 bp, Homo sapien
tacacactgtatgctagatgtgctaatattcct

SEQ ID NO: 297349 - DNA, 33 bp, Homo sapien
aaatgaaaactttgcaacggaagaaaaacgagc

SEQ ID NO: 297350 - DNA, 33 bp, Homo sapien
aaatgaaaactttgcatcggaagaaaaacgagc

SEQ ID NO: 297351 - DNA, 33 bp, Homo sapien
aaattatgtaatttgcaacaatatgaatgtagc

SEQ ID NO: 297352 - DNA, 33 bp, Homo sapien
aaattatgtaatttgccacaatatgaatgtagc

SEQ ID NO: 297353 - DNA, 33 bp, Homo sapien
ttaactgtgccttaagaagatctgttttctttt

SEQ ID NO: 297354 - DNA, 33 bp, Homo sapien
ttaactgtgccttaaggagatctgttttctttt

SEQ ID NO: 297355 - DNA, 33 bp, Homo sapien
cattttgaatttgatgccaaacaggtcatagaa

SEQ ID NO: 297356 - DNA, 33 bp, Homo sapien
cattttgaatttgatgtcaaacaggtcatagaa

SEQ ID NO: 297357 - DNA, 33 bp, Homo sapien
aaatagccagttcatacatagtttcctatatac

SEQ ID NO: 297358 - DNA, 33 bp, Homo sapien
aaatagccagttcatagatagtttcctatatac

SEQ ID NO: 297359 - DNA, 33 bp, Homo sapien
agtctgtctttgtctacgtgtatcaactttcca

SEQ ID NO: 297360 - DNA, 33 bp, Homo sapien
agtctgtctttgtctatgtgtatcaactttcca

SEQ ID NO: 297361 - DNA, 33 bp, Homo sapien
agatgggaacaaaggacgctgggaattaataga

SEQ ID NO: 297362 - DNA, 33 bp, Homo sapien
agatgggaacaaaggatgctgggaattaataga

SEQ ID NO: 297363 - DNA, 33 bp, Homo sapien
aaacggtgccctttacagaaacatggatgcagc

SEQ ID NO: 297364 - DNA, 33 bp, Homo sapien
aaacggtgccctttacggaaacatggatgcagc

SEQ ID NO: 297365 - DNA, 33 bp, Homo sapien
ctgattggagctacaacgtaagatgagttttgg

SEQ ID NO: 297366 - DNA, 33 bp, Homo sapien
ctgattggagctacaatgtaagatgagttttgg

SEQ ID NO: 297367 - DNA, 33 bp, Homo sapien
tttattccaacgcctcaaaaaagtagtggcttc

SEQ ID NO: 297368 - DNA, 33 bp, Homo sapien
tttattccaacgcctcgaaaaagtagtggcttc

SEQ ID NO: 297369 - DNA, 33 bp, Homo sapien
agtatggatataagccacaaatactgtgttact

SEQ ID NO: 297370 - DNA, 33 bp, Homo sapien
agtatggatataagccgcaaatactgtgttact

SEQ ID NO: 297371 - DNA, 33 bp, Homo sapien
gtcaaagaagaattgaccatctttgggaggtta

SEQ ID NO: 297372 - DNA, 33 bp, Homo sapien
gtcaaagaagaattgatcatctttgggaggtta

SEQ ID NO: 297373 - DNA, 33 bp, Homo sapien
ttaaggttaagctagaataggcatgaagtagcc

SEQ ID NO: 297374 - DNA, 33 bp, Homo sapien
ttaaggttaagctagactaggcatgaagtagcc

SEQ ID NO: 297375 - DNA, 33 bp, Homo sapien
cctcccaaaatgctgacattaccgtcctgaacc

SEQ ID NO: 297376 - DNA, 33 bp, Homo sapien
cctcccaaaatgctgagattaccgtcctgaacc

SEQ ID NO: 297377 - DNA, 33 bp, Homo sapien
ggggtttggacttcaaagtttcttcatccccaa

SEQ ID NO: 297378 - DNA, 33 bp, Homo sapien
ggggtttggacttcaaggtttcttcatccccaa

SEQ ID NO: 297379 - DNA, 33 bp, Homo sapien
gtccttctatctccaaatatggaagaagtttta

SEQ ID NO: 297380 - DNA, 33 bp, Homo sapien
gtccttctatctccaactatggaagaagtttta

SEQ ID NO: 297381 - DNA, 33 bp, Homo sapien
ttgctggaggatggagacattatgaacagagcc

SEQ ID NO: 297382 - DNA, 33 bp, Homo sapien
ttgctggaggatggaggcattatgaacagagcc

SEQ ID NO: 297383 - DNA, 33 bp, Homo sapien
ggctaacatagaaaagactacctctcctctcca

SEQ ID NO: 297384 - DNA, 33 bp, Homo sapien
ggctaacatagaaaaggctacctctcctctcca

SEQ ID NO: 297385 - DNA, 33 bp, Homo sapien
taggctttaccaatcccggaaactttgtccatt

SEQ ID NO: 297386 - DNA, 33 bp, Homo sapien
taggctttaccaatcctggaaactttgtccatt

SEQ ID NO: 297387 - DNA, 33 bp, Homo sapien
agtacaagagcaaaaaacctgagtcctgaaagt

SEQ ID NO: 297388 - DNA, 33 bp, Homo sapien
agtacaagagcaaaaatcctgagtcctgaaagt

SEQ ID NO: 297389 - DNA, 33 bp, Homo sapien
tgcctgaaaattataagggctttacacctagta

SEQ ID NO: 297390 - DNA, 33 bp, Homo sapien
tgcctgaaaattataatggctttacacctagta

SEQ ID NO: 297391 - DNA, 33 bp, Homo sapien
catttttaccataggcccaagaaaacttttgac

SEQ ID NO: 297392 - DNA, 33 bp, Homo sapien
catttttaccataggctcaagaaaacttttgac

SEQ ID NO: 297393 - DNA, 33 bp, Homo sapien
ttcatatataaaactcacctgttgacctttctc

SEQ ID NO: 297394 - DNA, 33 bp, Homo sapien
ttcatatataaaactcgcctgttgacctttctc

SEQ ID NO: 297395 - DNA, 33 bp, Homo sapien
ccaattgtctcatccaccagagaaaggtcaaca

SEQ ID NO: 297396 - DNA, 33 bp, Homo sapien
ccaattgtctcatccagcagagaaaggtcaaca

SEQ ID NO: 297397 - DNA, 33 bp, Homo sapien
gtgaaagtattgttgaagtacagtttcctagta

SEQ ID NO: 297398 - DNA, 33 bp, Homo sapien
gtgaaagtattgttgacgtacagtttcctagta

SEQ ID NO: 297399 - DNA, 33 bp, Homo sapien
taggtttcgacatctcaactgtaatctctactt

SEQ ID NO: 297400 - DNA, 33 bp, Homo sapien
taggtttcgacatctcgactgtaatctctactt

SEQ ID NO: 297401 - DNA, 33 bp, Homo sapien
tacaaatcaacaatgccaatgatcccaaatttc

SEQ ID NO: 297402 - DNA, 33 bp, Homo sapien
tacaaatcaacaatgctaatgatcccaaatttc

SEQ ID NO: 297403 - DNA, 33 bp, Homo sapien
tgtgagattggacaaacggcttcataccccaat

SEQ ID NO: 297404 - DNA, 33 bp, Homo sapien
tgtgagattggacaaatggcttcataccccaat

SEQ ID NO: 297405 - DNA, 33 bp, Homo sapien
aatatcctctctgagactaaaaccatctccttc

SEQ ID NO: 297406 - DNA, 33 bp, Homo sapien
aatatcctctctgagattaaaaccatctccttc

SEQ ID NO: 297407 - DNA, 33 bp, Homo sapien
ggggtagtgtaatggacgacagatggccaggta

SEQ ID NO: 297408 - DNA, 33 bp, Homo sapien
ggggtagtgtaatggatgacagatggccaggta

SEQ ID NO: 297409 - DNA, 33 bp, Homo sapien
gctgaagaaggaacctaaagcacagttctgagc

SEQ ID NO: 297410 - DNA, 33 bp, Homo sapien
gctgaagaaggaacctgaagcacagttctgagc

SEQ ID NO: 297411 - DNA, 33 bp, Homo sapien
agaacagagacacaacaaccaagtgtgacccac

SEQ ID NO: 297412 - DNA, 33 bp, Homo sapien
agaacagagacacaaccaccaagtgtgacccac

SEQ ID NO: 297413 - DNA, 33 bp, Homo sapien
gtccttattacgaagactatagatcagaggatt

SEQ ID NO: 297414 - DNA, 33 bp, Homo sapien
gtccttattacgaagagtatagatcagaggatt

SEQ ID NO: 297415 - DNA, 33 bp, Homo sapien
cacaatacccagcaaacggtaaggcctcagaca

SEQ ID NO: 297416 - DNA, 33 bp, Homo sapien
cacaatacccagcaaatggtaaggcctcagaca

SEQ ID NO: 297417 - DNA, 33 bp, Homo sapien
ttatgcttccatggtacgcctaagaatgcaaca

SEQ ID NO: 297418 - DNA, 33 bp, Homo sapien
ttatgcttccatggtatgcctaagaatgcaaca

SEQ ID NO: 297419 - DNA, 33 bp, Homo sapien
gaaaatagtaactttacagtggcgaaacatggc

SEQ ID NO: 297420 - DNA, 33 bp, Homo sapien
gaaaatagtaactttagagtggcgaaacatggc

SEQ ID NO: 297421 - DNA, 33 bp, Homo sapien
atgaataacatcagaacgaccacactacccaaa

SEQ ID NO: 297422 - DNA, 33 bp, Homo sapien
atgaataacatcagaatgaccacactacccaaa

SEQ ID NO: 297423 - DNA, 33 bp, Homo sapien
acaaaaaaaagagacaatgaagaagactgactt

SEQ ID NO: 297424 - DNA, 33 bp, Homo sapien
acaaaaaaaagagacagtgaagaagactgactt

SEQ ID NO: 297425 - DNA, 33 bp, Homo sapien
ttgccacagtggcatcgcgaccacagtgtgaat

SEQ ID NO: 297426 - DNA, 33 bp, Homo sapien
ttgccacagtggcatctcgaccacagtgtgaat

SEQ ID NO: 297427 - DNA, 33 bp, Homo sapien
tggtgggaaagagacaaaagataatagaaagag

SEQ ID NO: 297428 - DNA, 33 bp, Homo sapien
tggtgggaaagagacagaagataatagaaagag

SEQ ID NO: 297429 - DNA, 33 bp, Homo sapien
cttattggaacccagaagcagatggttatagga

SEQ ID NO: 297430 - DNA, 33 bp, Homo sapien
cttattggaacccagaggcagatggttatagga

SEQ ID NO: 297431 - DNA, 33 bp, Homo sapien
atatacttataattggaatacacttcttgtaca

SEQ ID NO: 297432 - DNA, 33 bp, Homo sapien
atatacttataattgggatacacttcttgtaca

SEQ ID NO: 297433 - DNA, 33 bp, Homo sapien
atgggctaggaatctacagaaataaactgtttt

SEQ ID NO: 297434 - DNA, 33 bp, Homo sapien
atgggctaggaatctagagaaataaactgtttt

SEQ ID NO: 297435 - DNA, 33 bp, Homo sapien
cctgcactgcaaatagaaagggcacatactcaa

SEQ ID NO: 297436 - DNA, 33 bp, Homo sapien
cctgcactgcaaataggaagggcacatactcaa

SEQ ID NO: 297437 - DNA, 33 bp, Homo sapien
ataattttggtgcacactaagaataatttttaa

SEQ ID NO: 297438 - DNA, 33 bp, Homo sapien
ataattttggtgcacattaagaataatttttaa

SEQ ID NO: 297439 - DNA, 33 bp, Homo sapien
ttgagagtattcttccagactttttttctatgc

SEQ ID NO: 297440 - DNA, 33 bp, Homo sapien
ttgagagtattcttccggactttttttctatgc

SEQ ID NO: 297441 - DNA, 33 bp, Homo sapien
agctaatgtccaacacaatctctggtcgcagtc

SEQ ID NO: 297442 - DNA, 33 bp, Homo sapien
agctaatgtccaacacgatctctggtcgcagtc

SEQ ID NO: 297443 - DNA, 33 bp, Homo sapien
tgcctgcaaagatgaactgcgtatctagtatgt

SEQ ID NO: 297444 - DNA, 33 bp, Homo sapien
tgcctgcaaagatgaattgcgtatctagtatgt

SEQ ID NO: 297445 - DNA, 33 bp, Homo sapien
tgctatgtgtcaaaacaaaaagaccaggcctct

SEQ ID NO: 297446 - DNA, 33 bp, Homo sapien
tgctatgtgtcaaaacgaaaagaccaggcctct

SEQ ID NO: 297447 - DNA, 33 bp, Homo sapien
ccctccagttaaagtacaggttcttactctgtt

SEQ ID NO: 297448 - DNA, 33 bp, Homo sapien
ccctccagttaaagtataggttcttactctgtt

SEQ ID NO: 297449 - DNA, 33 bp, Homo sapien
aaagattcaagttatacggagaaatgatacaac

SEQ ID NO: 297450 - DNA, 33 bp, Homo sapien
aaagattcaagttatatggagaaatgatacaac

SEQ ID NO: 297451 - DNA, 33 bp, Homo sapien
gtttcaatttagaggggagaagagaaaagtagg

SEQ ID NO: 297452 - DNA, 33 bp, Homo sapien
gtttcaatttagagggtagaagagaaaagtagg

SEQ ID NO: 297453 - DNA, 33 bp, Homo sapien
gagattaggacatagacgcacagagaggaaaga

SEQ ID NO: 297454 - DNA, 33 bp, Homo sapien
gagattaggacatagatgcacagagaggaaaga

SEQ ID NO: 297455 - DNA, 33 bp, Homo sapien
tctacaccaggattccacatgactttgggtaag

SEQ ID NO: 297456 - DNA, 33 bp, Homo sapien
tctacaccaggattccgcatgactttgggtaag

SEQ ID NO: 297457 - DNA, 33 bp, Homo sapien
tacctattcaagacgaccattttcttaggaata

SEQ ID NO: 297458 - DNA, 33 bp, Homo sapien
tacctattcaagacgatcattttcttaggaata

SEQ ID NO: 297459 - DNA, 33 bp, Homo sapien
tctctggtttatttaagatcaacattcaccaca

SEQ ID NO: 297460 - DNA, 33 bp, Homo sapien
tctctggtttatttaatatcaacattcaccaca

SEQ ID NO: 297461 - DNA, 33 bp, Homo sapien
tttacctgtttaattcaatttttctgcaaactg

SEQ ID NO: 297462 - DNA, 33 bp, Homo sapien
tttacctgtttaattccatttttctgcaaactg

SEQ ID NO: 297463 - DNA, 33 bp, Homo sapien
gtgatcaaggttaacaacaccagttataagtta

SEQ ID NO: 297464 - DNA, 33 bp, Homo sapien
gtgatcaaggttaacaccaccagttataagtta

SEQ ID NO: 297465 - DNA, 33 bp, Homo sapien
agaaccaagggtacaccgactcacctgtgctgt

SEQ ID NO: 297466 - DNA, 33 bp, Homo sapien
agaaccaagggtacactgactcacctgtgctgt

SEQ ID NO: 297467 - DNA, 33 bp, Homo sapien
catgtgtcatctggagaagaaaggacgtgtttc

SEQ ID NO: 297468 - DNA, 33 bp, Homo sapien
catgtgtcatctggaggagaaaggacgtgtttc

SEQ ID NO: 297469 - DNA, 33 bp, Homo sapien
gccccatctagcccgacggttaccaccagaagc

SEQ ID NO: 297470 - DNA, 33 bp, Homo sapien
gccccatctagcccgatggttaccaccagaagc

SEQ ID NO: 297471 - DNA, 33 bp, Homo sapien
gagactttgctgtgaaaagggataggtttccct

SEQ ID NO: 297472 - DNA, 33 bp, Homo sapien
gagactttgctgtgaagagggataggtttccct

SEQ ID NO: 297473 - DNA, 33 bp, Homo sapien
aagtggttcatcagtaccttacacttattttta

SEQ ID NO: 297474 - DNA, 33 bp, Homo sapien
aagtggttcatcagtatcttacacttattttta

SEQ ID NO: 297475 - DNA, 33 bp, Homo sapien
tgacaggtaaatttccaagttaggcagcttcta

SEQ ID NO: 297476 - DNA, 33 bp, Homo sapien
tgacaggtaaatttccgagttaggcagcttcta

SEQ ID NO: 297477 - DNA, 33 bp, Homo sapien
tggacttaatttcttaccgaaaatgatctagaa

SEQ ID NO: 297478 - DNA, 33 bp, Homo sapien
tggacttaatttcttatcgaaaatgatctagaa

SEQ ID NO: 297479 - DNA, 33 bp, Homo sapien
ttttaggtaatttgcccacattgatacagaaaa

SEQ ID NO: 297480 - DNA, 33 bp, Homo sapien
ttttaggtaatttgcctacattgatacagaaaa

SEQ ID NO: 297481 - DNA, 33 bp, Homo sapien
tttcaaaaaaagggaaatggctgtccttgaaga

SEQ ID NO: 297482 - DNA, 33 bp, Homo sapien
tttcaaaaaaagggaactggctgtccttgaaga

SEQ ID NO: 297483 - DNA, 33 bp, Homo sapien
cctgtctgggcaccaacgctgaggaaagctgag

SEQ ID NO: 297484 - DNA, 33 bp, Homo sapien
cctgtctgggcaccaatgctgaggaaagctgag

SEQ ID NO: 297485 - DNA, 33 bp, Homo sapien
gaaggaatgaagtgaaagcccaagctcagggaa

SEQ ID NO: 297486 - DNA, 33 bp, Homo sapien
gaaggaatgaagtgaaggcccaagctcagggaa

SEQ ID NO: 297487 - DNA, 33 bp, Homo sapien
agatcctaattaaaacaagttttcagctacatg

SEQ ID NO: 297488 - DNA, 33 bp, Homo sapien
agatcctaattaaaacgagttttcagctacatg

SEQ ID NO: 297489 - DNA, 33 bp, Homo sapien
tgacacatgaaacagaagaatcatctagtggaa

SEQ ID NO: 297490 - DNA, 33 bp, Homo sapien
tgacacatgaaacagacgaatcatctagtggaa

SEQ ID NO: 297491 - DNA, 33 bp, Homo sapien
atccttttcgggatcaagtgtactgtttttgtc

SEQ ID NO: 297492 - DNA, 33 bp, Homo sapien
atccttttcgggatcaggtgtactgtttttgtc

SEQ ID NO: 297493 - DNA, 33 bp, Homo sapien
acttttcaaacggagaacctagcctgacccctt

SEQ ID NO: 297494 - DNA, 33 bp, Homo sapien
acttttcaaacggagagcctagcctgacccctt

SEQ ID NO: 297495 - DNA, 33 bp, Homo sapien
caaaggaggcgtgaaacgtcttacatggcagga

SEQ ID NO: 297496 - DNA, 33 bp, Homo sapien
caaaggaggcgtgaaatgtcttacatggcagga

SEQ ID NO: 297497 - DNA, 33 bp, Homo sapien
ccctcagttttaaagacaaataatgaaagtcag

SEQ ID NO: 297498 - DNA, 33 bp, Homo sapien
ccctcagttttaaagataaataatgaaagtcag

SEQ ID NO: 297499 - DNA, 33 bp, Homo sapien
accaccatttcctcaacggagatcatacgtaca

SEQ ID NO: 297500 - DNA, 33 bp, Homo sapien
accaccatttcctcaatggagatcatacgtaca

SEQ ID NO: 297501 - DNA, 33 bp, Homo sapien
ctgctgcgatgtgtccactttggccgcatgtcc

SEQ ID NO: 297502 - DNA, 33 bp, Homo sapien
ctgctgcgatgtgtccgctttggccgcatgtcc

SEQ ID NO: 297503 - DNA, 33 bp, Homo sapien
cctatcggtcttgcaacactttgagtcctcctc

SEQ ID NO: 297504 - DNA, 33 bp, Homo sapien
cctatcggtcttgcaatactttgagtcctcctc

SEQ ID NO: 297505 - DNA, 33 bp, Homo sapien
cagagaaaagctgggacgcacggaaaacattaa

SEQ ID NO: 297506 - DNA, 33 bp, Homo sapien
cagagaaaagctgggatgcacggaaaacattaa

SEQ ID NO: 297507 - DNA, 33 bp, Homo sapien
aaaaccactccaaaagcctattttcatttatga

SEQ ID NO: 297508 - DNA, 33 bp, Homo sapien
aaaaccactccaaaagtctattttcatttatga

SEQ ID NO: 297509 - DNA, 33 bp, Homo sapien
catggcctagtggaagcagactggactagtgat

SEQ ID NO: 297510 - DNA, 33 bp, Homo sapien
catggcctagtggaaggagactggactagtgat

SEQ ID NO: 297511 - DNA, 33 bp, Homo sapien
ccctaaaagccaggcaatcactttgtgccgcag

SEQ ID NO: 297512 - DNA, 33 bp, Homo sapien
ccctaaaagccaggcagtcactttgtgccgcag

SEQ ID NO: 297513 - DNA, 33 bp, Homo sapien
tttcagtattcaggtaaatcatactaacacccg

SEQ ID NO: 297514 - DNA, 33 bp, Homo sapien
tttcagtattcaggtagatcatactaacacccg

SEQ ID NO: 297515 - DNA, 33 bp, Homo sapien
ctaagggtgatgaggaagtccatgaaaccccaa

SEQ ID NO: 297516 - DNA, 33 bp, Homo sapien
ctaagggtgatgaggatgtccatgaaaccccaa

SEQ ID NO: 297517 - DNA, 33 bp, Homo sapien
ttcaggcagaaataaactgtcatttcaaataca

SEQ ID NO: 297518 - DNA, 33 bp, Homo sapien
ttcaggcagaaataaattgtcatttcaaataca

SEQ ID NO: 297519 - DNA, 33 bp, Homo sapien
cttgatagtaggtaaccggcttttctgcttgga

SEQ ID NO: 297520 - DNA, 33 bp, Homo sapien
cttgatagtaggtaactggcttttctgcttgga

SEQ ID NO: 297521 - DNA, 33 bp, Homo sapien
acaccttttggacttacatgatgaatgctcgat

SEQ ID NO: 297522 - DNA, 33 bp, Homo sapien
acaccttttggacttatatgatgaatgctcgat

SEQ ID NO: 297523 - DNA, 33 bp, Homo sapien
gtatttgtataattatgagtaatgcctggctct

SEQ ID NO: 297524 - DNA, 33 bp, Homo sapien
gtatttgtataattattagtaatgcctggctct

SEQ ID NO: 297525 - DNA, 33 bp, Homo sapien
ggcacagaaggtagataaatggctgtttggggc

SEQ ID NO: 297526 - DNA, 33 bp, Homo sapien
ggcacagaaggtagatcaatggctgtttggggc

SEQ ID NO: 297527 - DNA, 33 bp, Homo sapien
tttgacccgaaaacaacagagcaaattcagatt

SEQ ID NO: 297528 - DNA, 33 bp, Homo sapien
tttgacccgaaaacaagagagcaaattcagatt

SEQ ID NO: 297529 - DNA, 33 bp, Homo sapien
aagtaaaagctttctacaatgaacaaacaaact

SEQ ID NO: 297530 - DNA, 33 bp, Homo sapien
aagtaaaagctttctagaatgaacaaacaaact

SEQ ID NO: 297531 - DNA, 33 bp, Homo sapien
gattaatactgtgaaccggaattgatcttaaac

SEQ ID NO: 297532 - DNA, 33 bp, Homo sapien
gattaatactgtgaactggaattgatcttaaac

SEQ ID NO: 297533 - DNA, 33 bp, Homo sapien
aattatttaattgcagcaagggataagtagttg

SEQ ID NO: 297534 - DNA, 33 bp, Homo sapien
aattatttaattgcagtaagggataagtagttg

SEQ ID NO: 297535 - DNA, 33 bp, Homo sapien
ttgacaacttataaaccgtcatctgcccatgca

SEQ ID NO: 297536 - DNA, 33 bp, Homo sapien
ttgacaacttataaactgtcatctgcccatgca

SEQ ID NO: 297537 - DNA, 33 bp, Homo sapien
tgttacgttacattcccgaaatgttgaaatagg

SEQ ID NO: 297538 - DNA, 33 bp, Homo sapien
tgttacgttacattcctgaaatgttgaaatagg

SEQ ID NO: 297539 - DNA, 33 bp, Homo sapien
gaggaatatttgacaaagctgtagagagaaata

SEQ ID NO: 297540 - DNA, 33 bp, Homo sapien
gaggaatatttgacaacgctgtagagagaaata

SEQ ID NO: 297541 - DNA, 33 bp, Homo sapien
tagaggtcataaggtcaactatttctctctaca

SEQ ID NO: 297542 - DNA, 33 bp, Homo sapien
tagaggtcataaggtccactatttctctctaca

SEQ ID NO: 297543 - DNA, 33 bp, Homo sapien
cactgcttcatccatcacggaagggcaactctt

SEQ ID NO: 297544 - DNA, 33 bp, Homo sapien
cactgcttcatccatcgcggaagggcaactctt

SEQ ID NO: 297545 - DNA, 33 bp, Homo sapien
tgtcatctttgaaggtaaaacctcgactgcata

SEQ ID NO: 297546 - DNA, 33 bp, Homo sapien
tgtcatctttgaaggtgaaacctcgactgcata

SEQ ID NO: 297547 - DNA, 33 bp, Homo sapien
aatattagtgatccaaagagcagaggctttttc

SEQ ID NO: 297548 - DNA, 33 bp, Homo sapien
aatattagtgatccaaggagcagaggctttttc

SEQ ID NO: 297549 - DNA, 33 bp, Homo sapien
catgggaggagcaactaagttaaaatttcagga

SEQ ID NO: 297550 - DNA, 33 bp, Homo sapien
catgggaggagcaactgagttaaaatttcagga

SEQ ID NO: 297551 - DNA, 33 bp, Homo sapien
ttttgacgcgtagaaacaatcttgaaaggacag

SEQ ID NO: 297552 - DNA, 33 bp, Homo sapien
ttttgacgcgtagaaataatcttgaaaggacag

SEQ ID NO: 297553 - DNA, 33 bp, Homo sapien
ttttagcctcgatacaatgatggcataatcaat

SEQ ID NO: 297554 - DNA, 33 bp, Homo sapien
ttttagcctcgatacagtgatggcataatcaat

SEQ ID NO: 297555 - DNA, 33 bp, Homo sapien
gatggcataatcaatcaagttgtatcctgcctc

SEQ ID NO: 297556 - DNA, 33 bp, Homo sapien
gatggcataatcaatcgagttgtatcctgcctc

SEQ ID NO: 297557 - DNA, 33 bp, Homo sapien
ggcagaaaattaactcactgtagctcaaattct

SEQ ID NO: 297558 - DNA, 33 bp, Homo sapien
ggcagaaaattaactcgctgtagctcaaattct

SEQ ID NO: 297559 - DNA, 33 bp, Homo sapien
caattcttgggataaacgtgagaatatctcagc

SEQ ID NO: 297560 - DNA, 33 bp, Homo sapien
caattcttgggataaatgtgagaatatctcagc

SEQ ID NO: 297561 - DNA, 33 bp, Homo sapien
ggggtcaactaggtgccgcaaaagagttctggg

SEQ ID NO: 297562 - DNA, 33 bp, Homo sapien
ggggtcaactaggtgctgcaaaagagttctggg

SEQ ID NO: 297563 - DNA, 33 bp, Homo sapien
ctattaaacaagaggacgatgagccattggacc

SEQ ID NO: 297564 - DNA, 33 bp, Homo sapien
ctattaaacaagaggatgatgagccattggacc

SEQ ID NO: 297565 - DNA, 33 bp, Homo sapien
gttagctctgaatcagaaccaagtggcaaaagc

SEQ ID NO: 297566 - DNA, 33 bp, Homo sapien
gttagctctgaatcaggaccaagtggcaaaagc

SEQ ID NO: 297567 - DNA, 33 bp, Homo sapien
ctaacgccacaaagaaacgggatgctctcctgg

SEQ ID NO: 297568 - DNA, 33 bp, Homo sapien
ctaacgccacaaagaagcgggatgctctcctgg

SEQ ID NO: 297569 - DNA, 33 bp, Homo sapien
catgtggagctggctaaaaatgtcatttacagg

SEQ ID NO: 297570 - DNA, 33 bp, Homo sapien
catgtggagctggctacaaatgtcatttacagg

SEQ ID NO: 297571 - DNA, 33 bp, Homo sapien
catcttgtaggagcagaactagactaccgcatt

SEQ ID NO: 297572 - DNA, 33 bp, Homo sapien
catcttgtaggagcaggactagactaccgcatt

SEQ ID NO: 297573 - DNA, 33 bp, Homo sapien
ttttctggctccttctcactcctaagatatagc

SEQ ID NO: 297574 - DNA, 33 bp, Homo sapien
ttttctggctccttctgactcctaagatatagc

SEQ ID NO: 297575 - DNA, 33 bp, Homo sapien
ttattccgccatgccaaaagctgcagtagtaga

SEQ ID NO: 297576 - DNA, 33 bp, Homo sapien
ttattccgccatgccagaagctgcagtagtaga

SEQ ID NO: 297577 - DNA, 33 bp, Homo sapien
ttctatatgatggtagaatggctatagttaata

SEQ ID NO: 297578 - DNA, 33 bp, Homo sapien
ttctatatgatggtaggatggctatagttaata

SEQ ID NO: 297579 - DNA, 33 bp, Homo sapien
ttctcacagtaagaacacaaattatgaaagtaa

SEQ ID NO: 297580 - DNA, 33 bp, Homo sapien
ttctcacagtaagaacccaaattatgaaagtaa

SEQ ID NO: 297581 - DNA, 33 bp, Homo sapien
ccgtcagtaaggtccaaagccatcattgtatgc

SEQ ID NO: 297582 - DNA, 33 bp, Homo sapien
ccgtcagtaaggtccatagccatcattgtatgc

SEQ ID NO: 297583 - DNA, 33 bp, Homo sapien
ctaattaatacacacaagaattagagagatggt

SEQ ID NO: 297584 - DNA, 33 bp, Homo sapien
ctaattaatacacacaggaattagagagatggt

SEQ ID NO: 297585 - DNA, 33 bp, Homo sapien
tccaattttacctgagcacgtagcgatccaaaa

SEQ ID NO: 297586 - DNA, 33 bp, Homo sapien
tccaattttacctgagtacgtagcgatccaaaa

SEQ ID NO: 297587 - DNA, 33 bp, Homo sapien
ctcgatgccactaatcattagggaaatgcaagt

SEQ ID NO: 297588 - DNA, 33 bp, Homo sapien
ctcgatgccactaatcgttagggaaatgcaagt

SEQ ID NO: 297589 - DNA, 33 bp, Homo sapien
gttacccaatgtctgcactttcatacctcctgc

SEQ ID NO: 297590 - DNA, 33 bp, Homo sapien
gttacccaatgtctgccctttcatacctcctgc

SEQ ID NO: 297591 - DNA, 33 bp, Homo sapien
aaaaaacgttttaccaagtatctgagcatccct

SEQ ID NO: 297592 - DNA, 33 bp, Homo sapien
aaaaaacgttttaccaggtatctgagcatccct

SEQ ID NO: 297593 - DNA, 33 bp, Homo sapien
tggtgtctttgtcataccgccctagcagagcgt

SEQ ID NO: 297594 - DNA, 33 bp, Homo sapien
tggtgtctttgtcatatcgccctagcagagcgt

SEQ ID NO: 297595 - DNA, 33 bp, Homo sapien
acacgctggtatttcaaatgcttctgttaaatt

SEQ ID NO: 297596 - DNA, 33 bp, Homo sapien
acacgctggtatttcagatgcttctgttaaatt

SEQ ID NO: 297597 - DNA, 33 bp, Homo sapien
tccggagttaattatcaaccactactacccaga

SEQ ID NO: 297598 - DNA, 33 bp, Homo sapien
tccggagttaattatcgaccactactacccaga

SEQ ID NO: 297599 - DNA, 33 bp, Homo sapien
caaaaatctcagcaagccccaagaacaaaacat

SEQ ID NO: 297600 - DNA, 33 bp, Homo sapien
caaaaatctcagcaagtcccaagaacaaaacat

SEQ ID NO: 297601 - DNA, 33 bp, Homo sapien
actttcatttaaaggccgatattcaatgtgtct

SEQ ID NO: 297602 - DNA, 33 bp, Homo sapien
actttcatttaaaggctgatattcaatgtgtct

SEQ ID NO: 297603 - DNA, 33 bp, Homo sapien
tgaataacttctttccgacagtagatttccagc

SEQ ID NO: 297604 - DNA, 33 bp, Homo sapien
tgaataacttctttcctacagtagatttccagc

SEQ ID NO: 297605 - DNA, 33 bp, Homo sapien
aaaaatgttgctgtaacgctgcaaattggttga

SEQ ID NO: 297606 - DNA, 33 bp, Homo sapien
aaaaatgttgctgtaatgctgcaaattggttga

SEQ ID NO: 297607 - DNA, 33 bp, Homo sapien
aaactcccaggaaacaaacacgatttcactttt

SEQ ID NO: 297608 - DNA, 33 bp, Homo sapien
aaactcccaggaaacagacacgatttcactttt

SEQ ID NO: 297609 - DNA, 33 bp, Homo sapien
ccaggattgacctcaactaaaggattttatata

SEQ ID NO: 297610 - DNA, 33 bp, Homo sapien
ccaggattgacctcaagtaaaggattttatata

SEQ ID NO: 297611 - DNA, 33 bp, Homo sapien
tggggcaatgccttgaacggaaggggaagccac

SEQ ID NO: 297612 - DNA, 33 bp, Homo sapien
tggggcaatgccttgagcggaaggggaagccac

SEQ ID NO: 297613 - DNA, 33 bp, Homo sapien
tccatttgcccgttccgatatcaactaactggg

SEQ ID NO: 297614 - DNA, 33 bp, Homo sapien
tccatttgcccgttcctatatcaactaactggg

SEQ ID NO: 297615 - DNA, 33 bp, Homo sapien
ctagataattttttaccctgcgattattttctt

SEQ ID NO: 297616 - DNA, 33 bp, Homo sapien
ctagataattttttacgctgcgattattttctt

SEQ ID NO: 297617 - DNA, 33 bp, Homo sapien
tttgaaggcttctccacgattctgtttttccta

SEQ ID NO: 297618 - DNA, 33 bp, Homo sapien
tttgaaggcttctccaggattctgtttttccta

SEQ ID NO: 297619 - DNA, 33 bp, Homo sapien
tcattttcacaatttgaaattttgctttcgttt

SEQ ID NO: 297620 - DNA, 33 bp, Homo sapien
tcattttcacaatttgcaattttgctttcgttt

SEQ ID NO: 297621 - DNA, 33 bp, Homo sapien
tgcttaatttttgacacgattttcaattaacaa

SEQ ID NO: 297622 - DNA, 33 bp, Homo sapien
tgcttaatttttgacatgattttcaattaacaa

SEQ ID NO: 297623 - DNA, 33 bp, Homo sapien
cagagataaccaagacaattaagaagttagagg

SEQ ID NO: 297624 - DNA, 33 bp, Homo sapien
cagagataaccaagacgattaagaagttagagg

SEQ ID NO: 297625 - DNA, 33 bp, Homo sapien
ttcctgtcaagctctcacaggcctgaacagcag

SEQ ID NO: 297626 - DNA, 33 bp, Homo sapien
ttcctgtcaagctctcgcaggcctgaacagcag

SEQ ID NO: 297627 - DNA, 33 bp, Homo sapien
tttcacttccgagtgacccgaagatgctgttgg

SEQ ID NO: 297628 - DNA, 33 bp, Homo sapien
tttcacttccgagtgagccgaagatgctgttgg

SEQ ID NO: 297629 - DNA, 33 bp, Homo sapien
aaaacttcacgactgcactttgctgtccctgta

SEQ ID NO: 297630 - DNA, 33 bp, Homo sapien
aaaacttcacgactgcgctttgctgtccctgta

SEQ ID NO: 297631 - DNA, 33 bp, Homo sapien
aatgcgtacttatttgaatagtagaggtaaacc

SEQ ID NO: 297632 - DNA, 33 bp, Homo sapien
aatgcgtacttatttgcatagtagaggtaaacc

SEQ ID NO: 297633 - DNA, 33 bp, Homo sapien
aggtaatttttaaggcaatatttcatctcctct

SEQ ID NO: 297634 - DNA, 33 bp, Homo sapien
aggtaatttttaaggcgatatttcatctcctct

SEQ ID NO: 297635 - DNA, 33 bp, Homo sapien
gctaaaaactgattgcaagtctaagtagagcct

SEQ ID NO: 297636 - DNA, 33 bp, Homo sapien
gctaaaaactgattgcgagtctaagtagagcct

SEQ ID NO: 297637 - DNA, 33 bp, Homo sapien
tcttcattatggatatcaccaaaagactgaatt

SEQ ID NO: 297638 - DNA, 33 bp, Homo sapien
tcttcattatggatattaccaaaagactgaatt

SEQ ID NO: 297639 - DNA, 33 bp, Homo sapien
aaagattccctaaaacacctgccactaccttcc

SEQ ID NO: 297640 - DNA, 33 bp, Homo sapien
aaagattccctaaaacgcctgccactaccttcc

SEQ ID NO: 297641 - DNA, 33 bp, Homo sapien
tatctcctgaatctgacaggcaatgtgttgatt

SEQ ID NO: 297642 - DNA, 33 bp, Homo sapien
tatctcctgaatctgataggcaatgtgttgatt

SEQ ID NO: 297643 - DNA, 33 bp, Homo sapien
tgttgttggacaggtgaaaaagacaatgagtcc

SEQ ID NO: 297644 - DNA, 33 bp, Homo sapien
tgttgttggacaggtggaaaagacaatgagtcc

SEQ ID NO: 297645 - DNA, 33 bp, Homo sapien
ttctcagcaagcattacactctttacttacaat

SEQ ID NO: 297646 - DNA, 33 bp, Homo sapien
ttctcagcaagcattagactctttacttacaat

SEQ ID NO: 297647 - DNA, 33 bp, Homo sapien
cttgtgctggccaccaaagcccattcactggct

SEQ ID NO: 297648 - DNA, 33 bp, Homo sapien
cttgtgctggccaccagagcccattcactggct

SEQ ID NO: 297649 - DNA, 33 bp, Homo sapien
tgttcgttggagaaaacctaagtccatttccta

SEQ ID NO: 297650 - DNA, 33 bp, Homo sapien
tgttcgttggagaaaatctaagtccatttccta

SEQ ID NO: 297651 - DNA, 33 bp, Homo sapien
atgaacattttctttacgcctgtataggtctat

SEQ ID NO: 297652 - DNA, 33 bp, Homo sapien
atgaacattttctttatgcctgtataggtctat

SEQ ID NO: 297653 - DNA, 33 bp, Homo sapien
ctatcgaagggtgcacactgcaagagctggatc

SEQ ID NO: 297654 - DNA, 33 bp, Homo sapien
ctatcgaagggtgcacgctgcaagagctggatc

SEQ ID NO: 297655 - DNA, 33 bp, Homo sapien
ggatttcggacttgcacgggctctgtaactcct

SEQ ID NO: 297656 - DNA, 33 bp, Homo sapien
ggatttcggacttgcatgggctctgtaactcct

SEQ ID NO: 297657 - DNA, 33 bp, Homo sapien
tgtctttgaaggatacagcctctctccaagctg

SEQ ID NO: 297658 - DNA, 33 bp, Homo sapien
tgtctttgaaggatacggcctctctccaagctg

SEQ ID NO: 297659 - DNA, 33 bp, Homo sapien
agctgtgacatcaaaaatgtctctagccactgc

SEQ ID NO: 297660 - DNA, 33 bp, Homo sapien
agctgtgacatcaaaattgtctctagccactgc

SEQ ID NO: 297661 - DNA, 33 bp, Homo sapien
ggccttagttttttgcaagcgtaactaacattt

SEQ ID NO: 297662 - DNA, 33 bp, Homo sapien
ggccttagttttttgccagcgtaactaacattt

SEQ ID NO: 297663 - DNA, 33 bp, Homo sapien
ggaaagcttccaggcccgcgaatgcaatgagtt

SEQ ID NO: 297664 - DNA, 33 bp, Homo sapien
ggaaagcttccaggccggcgaatgcaatgagtt

SEQ ID NO: 297665 - DNA, 33 bp, Homo sapien
tttgtattaaaattaccgacaaagatgtgatgt

SEQ ID NO: 297666 - DNA, 33 bp, Homo sapien
tttgtattaaaattactgacaaagatgtgatgt

SEQ ID NO: 297667 - DNA, 33 bp, Homo sapien
ctggctgtatgaaatcaatggaataacgtgctt

SEQ ID NO: 297668 - DNA, 33 bp, Homo sapien
ctggctgtatgaaatcgatggaataacgtgctt

SEQ ID NO: 297669 - DNA, 33 bp, Homo sapien
gtggatgaacaatgaactatttacttgttagtg

SEQ ID NO: 297670 - DNA, 33 bp, Homo sapien
gtggatgaacaatgaagtatttacttgttagtg

SEQ ID NO: 297671 - DNA, 33 bp, Homo sapien
ttcttcacatttacatcatgcttttcagtctcc

SEQ ID NO: 297672 - DNA, 33 bp, Homo sapien
ttcttcacatttacattatgcttttcagtctcc

SEQ ID NO: 297673 - DNA, 33 bp, Homo sapien
cttagtacttggattacagcttcagcagatcaa

SEQ ID NO: 297674 - DNA, 33 bp, Homo sapien
cttagtacttggattatagcttcagcagatcaa

SEQ ID NO: 297675 - DNA, 33 bp, Homo sapien
gaggcagtagatagtgaaaagagcacagggtgt

SEQ ID NO: 297676 - DNA, 33 bp, Homo sapien
gaggcagtagatagtggaaagagcacagggtgt

SEQ ID NO: 297677 - DNA, 33 bp, Homo sapien
tttctttaatctgtcaatgaaagcaatgaatgt

SEQ ID NO: 297678 - DNA, 33 bp, Homo sapien
tttctttaatctgtcagtgaaagcaatgaatgt

SEQ ID NO: 297679 - DNA, 33 bp, Homo sapien
aaatagtctttgaggcactagtccaccatctcc

SEQ ID NO: 297680 - DNA, 33 bp, Homo sapien
aaatagtctttgaggcgctagtccaccatctcc

SEQ ID NO: 297681 - DNA, 33 bp, Homo sapien
ggtccctggccaagaacttcagaagggtctccc

SEQ ID NO: 297682 - DNA, 33 bp, Homo sapien
ggtccctggccaagaagttcagaagggtctccc

SEQ ID NO: 297683 - DNA, 33 bp, Homo sapien
cttaatactccatttaaacttgtcagaatttaa

SEQ ID NO: 297684 - DNA, 33 bp, Homo sapien
cttaatactccatttagacttgtcagaatttaa

SEQ ID NO: 297685 - DNA, 33 bp, Homo sapien
gcccaatggccacttaaatggaatggaagtcaa

SEQ ID NO: 297686 - DNA, 33 bp, Homo sapien
gcccaatggccacttagatggaatggaagtcaa

SEQ ID NO: 297687 - DNA, 33 bp, Homo sapien
gaaacattttccttcacgcggtacacacagttg

SEQ ID NO: 297688 - DNA, 33 bp, Homo sapien
gaaacattttccttcaggcggtacacacagttg

SEQ ID NO: 297689 - DNA, 33 bp, Homo sapien
tcgttctctgccatgacgttcaacctgtgtcct

SEQ ID NO: 297690 - DNA, 33 bp, Homo sapien
tcgttctctgccatgatgttcaacctgtgtcct

SEQ ID NO: 297691 - DNA, 33 bp, Homo sapien
atataggaacattgtgcaaactatggctaggct

SEQ ID NO: 297692 - DNA, 33 bp, Homo sapien
atataggaacattgtggaaactatggctaggct

SEQ ID NO: 297693 - DNA, 33 bp, Homo sapien
ctcagaagatgctgacaaagacccagacaggaa

SEQ ID NO: 297694 - DNA, 33 bp, Homo sapien
ctcagaagatgctgacgaagacccagacaggaa

SEQ ID NO: 297695 - DNA, 33 bp, Homo sapien
tttccacttcgcagacaaaaagcttaaaatgcc

SEQ ID NO: 297696 - DNA, 33 bp, Homo sapien
tttccacttcgcagacgaaaagcttaaaatgcc

SEQ ID NO: 297697 - DNA, 33 bp, Homo sapien
gagaaacaacacaggcaaggttatggtatcaag

SEQ ID NO: 297698 - DNA, 33 bp, Homo sapien
gagaaacaacacaggcgaggttatggtatcaag

SEQ ID NO: 297699 - DNA, 33 bp, Homo sapien
aagtcatgaggttgggcacaaatctgtaactaa

SEQ ID NO: 297700 - DNA, 33 bp, Homo sapien
aagtcatgaggttggggacaaatctgtaactaa

SEQ ID NO: 297701 - DNA, 33 bp, Homo sapien
ctgcctttacccaagaaactgagtggaactaag

SEQ ID NO: 297702 - DNA, 33 bp, Homo sapien
ctgcctttacccaagatactgagtggaactaag

SEQ ID NO: 297703 - DNA, 33 bp, Homo sapien
agaaatgcttgcttcacataattttgtccaggt

SEQ ID NO: 297704 - DNA, 33 bp, Homo sapien
agaaatgcttgcttcatataattttgtccaggt

SEQ ID NO: 297705 - DNA, 33 bp, Homo sapien
attcaacattgcaggacgctgaagaacacaagt

SEQ ID NO: 297706 - DNA, 33 bp, Homo sapien
attcaacattgcaggaggctgaagaacacaagt

SEQ ID NO: 297707 - DNA, 33 bp, Homo sapien
actatattttgaagagcatttatcaaatgagaa

SEQ ID NO: 297708 - DNA, 33 bp, Homo sapien
actatattttgaagagtatttatcaaatgagaa

SEQ ID NO: 297709 - DNA, 33 bp, Homo sapien
tatttggatagctgcacattaatttccttaggg

SEQ ID NO: 297710 - DNA, 33 bp, Homo sapien
tatttggatagctgcatattaatttccttaggg

SEQ ID NO: 297711 - DNA, 33 bp, Homo sapien
gtgacaggacctctaaaaaggccagcagatcag

SEQ ID NO: 297712 - DNA, 33 bp, Homo sapien
gtgacaggacctctaagaaggccagcagatcag

SEQ ID NO: 297713 - DNA, 33 bp, Homo sapien
aaggtattcaggcatacgtaagaagtgacgctt

SEQ ID NO: 297714 - DNA, 33 bp, Homo sapien
aaggtattcaggcatatgtaagaagtgacgctt

SEQ ID NO: 297715 - DNA, 33 bp, Homo sapien
aaggctgagccctgggcacaaaatgattgcaag

SEQ ID NO: 297716 - DNA, 33 bp, Homo sapien
aaggctgagccctgggtacaaaatgattgcaag

SEQ ID NO: 297717 - DNA, 33 bp, Homo sapien
aggtggtgatggggaaaagccttattatgtgaa

SEQ ID NO: 297718 - DNA, 33 bp, Homo sapien
aggtggtgatggggaacagccttattatgtgaa

SEQ ID NO: 297719 - DNA, 33 bp, Homo sapien
gtggagaaaggaatagcagggggagctgcaggg

SEQ ID NO: 297720 - DNA, 33 bp, Homo sapien
gtggagaaaggaatagtagggggagctgcaggg

SEQ ID NO: 297721 - DNA, 33 bp, Homo sapien
cctgaactcagagtccaagtagggtaagaaggg

SEQ ID NO: 297722 - DNA, 33 bp, Homo sapien
cctgaactcagagtccgagtagggtaagaaggg

SEQ ID NO: 297723 - DNA, 33 bp, Homo sapien
agataactttttcaaacgaccatacatcctatg

SEQ ID NO: 297724 - DNA, 33 bp, Homo sapien
agataactttttcaaatgaccatacatcctatg

SEQ ID NO: 297725 - DNA, 33 bp, Homo sapien
gagatcatgtgtccaacagaaaaatgacatttt

SEQ ID NO: 297726 - DNA, 33 bp, Homo sapien
gagatcatgtgtccaatagaaaaatgacatttt

SEQ ID NO: 297727 - DNA, 33 bp, Homo sapien
tgcacgttaaacaggccaaggcattacatttcc

SEQ ID NO: 297728 - DNA, 33 bp, Homo sapien
tgcacgttaaacaggctaaggcattacatttcc

SEQ ID NO: 297729 - DNA, 33 bp, Homo sapien
agagctactggtttaacactagtctcttctgag

SEQ ID NO: 297730 - DNA, 33 bp, Homo sapien
agagctactggtttaatactagtctcttctgag

SEQ ID NO: 297731 - DNA, 33 bp, Homo sapien
actgggtttccatgcccagttctgcctgaaaat

SEQ ID NO: 297732 - DNA, 33 bp, Homo sapien
actgggtttccatgcctagttctgcctgaaaat

SEQ ID NO: 297733 - DNA, 33 bp, Homo sapien
tttagatccaacactgaaaaccatctgtagttt

SEQ ID NO: 297734 - DNA, 33 bp, Homo sapien
tttagatccaacactgcaaaccatctgtagttt

SEQ ID NO: 297735 - DNA, 33 bp, Homo sapien
tgatggggcacaaagacagtgacctgctgtccc

SEQ ID NO: 297736 - DNA, 33 bp, Homo sapien
tgatggggcacaaagagagtgacctgctgtccc

SEQ ID NO: 297737 - DNA, 33 bp, Homo sapien
cctcttggatgactcaaatatcaccttgcaaac

SEQ ID NO: 297738 - DNA, 33 bp, Homo sapien
cctcttggatgactcagatatcaccttgcaaac

SEQ ID NO: 297739 - DNA, 33 bp, Homo sapien
cagccaataagactgcaaaacaggctgcttggg

SEQ ID NO: 297740 - DNA, 33 bp, Homo sapien
cagccaataagactgcgaaacaggctgcttggg

SEQ ID NO: 297741 - DNA, 33 bp, Homo sapien
ttgggaagcaaaaacactggaggccttaatatc

SEQ ID NO: 297742 - DNA, 33 bp, Homo sapien
ttgggaagcaaaaacattggaggccttaatatc

SEQ ID NO: 297743 - DNA, 33 bp, Homo sapien
ccaccgtttgtaatgcactaggtcagcgagagc

SEQ ID NO: 297744 - DNA, 33 bp, Homo sapien
ccaccgtttgtaatgcgctaggtcagcgagagc

SEQ ID NO: 297745 - DNA, 33 bp, Homo sapien
acatctggaatttccaccacgtttcataccaac

SEQ ID NO: 297746 - DNA, 33 bp, Homo sapien
acatctggaatttccagcacgtttcataccaac

SEQ ID NO: 297747 - DNA, 33 bp, Homo sapien
ttactaaggcagtaagcactacagcgtcagcaa

SEQ ID NO: 297748 - DNA, 33 bp, Homo sapien
ttactaaggcagtaaggactacagcgtcagcaa

SEQ ID NO: 297749 - DNA, 33 bp, Homo sapien
agatggtagagaccaactctttcgaagtcttat

SEQ ID NO: 297750 - DNA, 33 bp, Homo sapien
agatggtagagaccaattctttcgaagtcttat

SEQ ID NO: 297751 - DNA, 33 bp, Homo sapien
taccaatacctgaggacgtgcatagactttcta

SEQ ID NO: 297752 - DNA, 33 bp, Homo sapien
taccaatacctgaggatgtgcatagactttcta

SEQ ID NO: 297753 - DNA, 33 bp, Homo sapien
ggggctgctacttagaaagcactgaatactcta

SEQ ID NO: 297754 - DNA, 33 bp, Homo sapien
ggggctgctacttagagagcactgaatactcta

SEQ ID NO: 297755 - DNA, 33 bp, Homo sapien
aagtatttggaaaacactgacaaataaatgcaa

SEQ ID NO: 297756 - DNA, 33 bp, Homo sapien
aagtatttggaaaacattgacaaataaatgcaa

SEQ ID NO: 297757 - DNA, 33 bp, Homo sapien
tatgaaaatgtatgaaatctaacctatgaaaag

SEQ ID NO: 297758 - DNA, 33 bp, Homo sapien
tatgaaaatgtatgaagtctaacctatgaaaag

SEQ ID NO: 297759 - DNA, 33 bp, Homo sapien
ctggtggcagttgtgccgacgatttttgcagac

SEQ ID NO: 297760 - DNA, 33 bp, Homo sapien
ctggtggcagttgtgctgacgatttttgcagac

SEQ ID NO: 297761 - DNA, 33 bp, Homo sapien
cgcgcccggctgagaaaagttaagaagaattac

SEQ ID NO: 297762 - DNA, 33 bp, Homo sapien
cgcgcccggctgagaagagttaagaagaattac

SEQ ID NO: 297763 - DNA, 33 bp, Homo sapien
actcatactcaaggaaagggaacatagagccta

SEQ ID NO: 297764 - DNA, 33 bp, Homo sapien
actcatactcaaggaatgggaacatagagccta

SEQ ID NO: 297765 - DNA, 33 bp, Homo sapien
ataataactgccttgaaatggtattgattcttc

SEQ ID NO: 297766 - DNA, 33 bp, Homo sapien
ataataactgccttgacatggtattgattcttc

SEQ ID NO: 297767 - DNA, 33 bp, Homo sapien
aagatcaggcagagacagtagaaaggcctaaac

SEQ ID NO: 297768 - DNA, 33 bp, Homo sapien
aagatcaggcagagacggtagaaaggcctaaac

SEQ ID NO: 297769 - DNA, 33 bp, Homo sapien
aaagctattactcttaaaatcaagaatcataca

SEQ ID NO: 297770 - DNA, 33 bp, Homo sapien
aaagctattactcttagaatcaagaatcataca

SEQ ID NO: 297771 - DNA, 33 bp, Homo sapien
ccaaaagtgtcacagcagccttttgttctcact

SEQ ID NO: 297772 - DNA, 33 bp, Homo sapien
ccaaaagtgtcacagcggccttttgttctcact

SEQ ID NO: 297773 - DNA, 33 bp, Homo sapien
cctgacagccactgaaagactacctttggcatc

SEQ ID NO: 297774 - DNA, 33 bp, Homo sapien
cctgacagccactgaaggactacctttggcatc

SEQ ID NO: 297775 - DNA, 33 bp, Homo sapien
ctgtgagtccactccactcttggcaacccttcc

SEQ ID NO: 297776 - DNA, 33 bp, Homo sapien
ctgtgagtccactccattcttggcaacccttcc

SEQ ID NO: 297777 - DNA, 33 bp, Homo sapien
aaaatctaggctgatcaaactatagctatcgcc

SEQ ID NO: 297778 - DNA, 33 bp, Homo sapien
aaaatctaggctgatctaactatagctatcgcc

SEQ ID NO: 297779 - DNA, 33 bp, Homo sapien
gtatccccaggtcttcaaagtgagatgccaaac

SEQ ID NO: 297780 - DNA, 33 bp, Homo sapien
gtatccccaggtcttccaagtgagatgccaaac

SEQ ID NO: 297781 - DNA, 33 bp, Homo sapien
gacaatagattgcaaacgtttcttattagactt

SEQ ID NO: 297782 - DNA, 33 bp, Homo sapien
gacaatagattgcaaatgtttcttattagactt

SEQ ID NO: 297783 - DNA, 33 bp, Homo sapien
aagtacttggaaaccacaatcacttcaagagac

SEQ ID NO: 297784 - DNA, 33 bp, Homo sapien
aagtacttggaaaccataatcacttcaagagac

SEQ ID NO: 297785 - DNA, 33 bp, Homo sapien
ggagttcaaatccaaccggggaaattagcaaga

SEQ ID NO: 297786 - DNA, 33 bp, Homo sapien
ggagttcaaatccaactggggaaattagcaaga

SEQ ID NO: 297787 - DNA, 33 bp, Homo sapien
gaagtcctgagaaagcagaaaggatagcatatc

SEQ ID NO: 297788 - DNA, 33 bp, Homo sapien
gaagtcctgagaaagcggaaaggatagcatatc

SEQ ID NO: 297789 - DNA, 33 bp, Homo sapien
tctggggttgtgaagacgggtatttttacaaaa

SEQ ID NO: 297790 - DNA, 33 bp, Homo sapien
tctggggttgtgaagatgggtatttttacaaaa

SEQ ID NO: 297791 - DNA, 33 bp, Homo sapien
atccctcagaggcaaactcctcccacaacacct

SEQ ID NO: 297792 - DNA, 33 bp, Homo sapien
atccctcagaggcaaattcctcccacaacacct

SEQ ID NO: 297793 - DNA, 33 bp, Homo sapien
tgactagtgtgtgttaccaagcagccttctgaa

SEQ ID NO: 297794 - DNA, 33 bp, Homo sapien
tgactagtgtgtgttatcaagcagccttctgaa

SEQ ID NO: 297795 - DNA, 33 bp, Homo sapien
aactccacatcttccactctctcaagatgaagt

SEQ ID NO: 297796 - DNA, 33 bp, Homo sapien
aactccacatcttccagtctctcaagatgaagt

SEQ ID NO: 297797 - DNA, 33 bp, Homo sapien
ttattaaggctcacaaaaggactgtcttgtagg

SEQ ID NO: 297798 - DNA, 33 bp, Homo sapien
ttattaaggctcacaacaggactgtcttgtagg

SEQ ID NO: 297799 - DNA, 33 bp, Homo sapien
tttaatgagaaaacgacaggctttgtctttcaa

SEQ ID NO: 297800 - DNA, 33 bp, Homo sapien
tttaatgagaaaacgataggctttgtctttcaa

SEQ ID NO: 297801 - DNA, 33 bp, Homo sapien
attccgaatgaaagacaaacaccgaaccccata

SEQ ID NO: 297802 - DNA, 33 bp, Homo sapien
attccgaatgaaagaccaacaccgaaccccata

SEQ ID NO: 297803 - DNA, 33 bp, Homo sapien
aagaactaatacagggacaaacttctcatgaat

SEQ ID NO: 297804 - DNA, 33 bp, Homo sapien
aagaactaatacaggggcaaacttctcatgaat

SEQ ID NO: 297805 - DNA, 33 bp, Homo sapien
gaactctggggccttaagggaacactggcatca

SEQ ID NO: 297806 - DNA, 33 bp, Homo sapien
gaactctggggccttatgggaacactggcatca

SEQ ID NO: 297807 - DNA, 33 bp, Homo sapien
cctgaagatttgatatgaagagaattttataaa

SEQ ID NO: 297808 - DNA, 33 bp, Homo sapien
cctgaagatttgatattaagagaattttataaa

SEQ ID NO: 297809 - DNA, 33 bp, Homo sapien; identical to SEQ ID NO: 297807

SEQ ID NO: 297810 - DNA, 33 bp, Homo sapien; identical to SEQ ID NO: 297808

SEQ ID NO: 297811 - DNA, 33 bp, Homo sapien
ttacagaatggccccaatcattaatgcctccta

SEQ ID NO: 297812 - DNA, 33 bp, Homo sapien
ttacagaatggccccagtcattaatgcctccta

SEQ ID NO: 297813 - DNA, 33 bp, Homo sapien
gagcttatcaccttaacagtctgtgtaatttac

SEQ ID NO: 297814 - DNA, 33 bp, Homo sapien
gagcttatcaccttaatagtctgtgtaatttac

SEQ ID NO: 297815 - DNA, 33 bp, Homo sapien
cctgaagagctccacaacttacacacagacaca

SEQ ID NO: 297816 - DNA, 33 bp, Homo sapien
cctgaagagctccacagcttacacacagacaca

SEQ ID NO: 297817 - DNA, 33 bp, Homo sapien
gttgtggaagaaaaaaagggcaatactgcagca

SEQ ID NO: 297818 - DNA, 33 bp, Homo sapien
gttgtggaagaaaaaaggggcaatactgcagca

SEQ ID NO: 297819 - DNA, 33 bp, Homo sapien
tcattttacagacagcagaaactgtatcttgct

SEQ ID NO: 297820 - DNA, 33 bp, Homo sapien
tcattttacagacagcggaaactgtatcttgct

SEQ ID NO: 297821 - DNA, 33 bp, Homo sapien
gaagataaatccaatgcatatggagcagtggaa

SEQ ID NO: 297822 - DNA, 33 bp, Homo sapien
gaagataaatccaatggatatggagcagtggaa

SEQ ID NO: 297823 - DNA, 33 bp, Homo sapien
tactaaaacccaagcacagaataagacagacac

SEQ ID NO: 297824 - DNA, 33 bp, Homo sapien
tactaaaacccaagcatagaataagacagacac

SEQ ID NO: 297825 - DNA, 33 bp, Homo sapien
cacagctcgtgttggacggccctgtctagtttc

SEQ ID NO: 297826 - DNA, 33 bp, Homo sapien
cacagctcgtgttggatggccctgtctagtttc

SEQ ID NO: 297827 - DNA, 33 bp, Homo sapien
agtgaaacacacataaatgagccatgcagagag

SEQ ID NO: 297828 - DNA, 33 bp, Homo sapien
agtgaaacacacataagtgagccatgcagagag

SEQ ID NO: 297829 - DNA, 33 bp, Homo sapien
tagaataagatcagtacgcttgggaagttagaa

SEQ ID NO: 297830 - DNA, 33 bp, Homo sapien
tagaataagatcagtaggcttgggaagttagaa

SEQ ID NO: 297831 - DNA, 33 bp, Homo sapien
gaagtgcaaccatggaatacttgagtgggagtg

SEQ ID NO: 297832 - DNA, 33 bp, Homo sapien
gaagtgcaaccatggagtacttgagtgggagtg

SEQ ID NO: 297833 - DNA, 33 bp, Homo sapien
ccaggcacagagagagcatgaaggacagtttgg

SEQ ID NO: 297834 - DNA, 33 bp, Homo sapien
ccaggcacagagagagtatgaaggacagtttgg

SEQ ID NO: 297835 - DNA, 33 bp, Homo sapien
gctatcctttgtcttcaagacactcactgattg

SEQ ID NO: 297836 - DNA, 33 bp, Homo sapien
gctatcctttgtcttcgagacactcactgattg

SEQ ID NO: 297837 - DNA, 33 bp, Homo sapien
gacactcactgattgacaggacaaaagaggcca

SEQ ID NO: 297838 - DNA, 33 bp, Homo sapien
gacactcactgattgataggacaaaagaggcca

SEQ ID NO: 297839 - DNA, 33 bp, Homo sapien
ggatagtcaatgcttaaggtatagaagttcctg

SEQ ID NO: 297840 - DNA, 33 bp, Homo sapien
ggatagtcaatgcttagggtatagaagttcctg

SEQ ID NO: 297841 - DNA, 33 bp, Homo sapien
agttccaggtaccaaccaaggccacatggcttt

SEQ ID NO: 297842 - DNA, 33 bp, Homo sapien
agttccaggtaccaacgaaggccacatggcttt

SEQ ID NO: 297843 - DNA, 33 bp, Homo sapien
cctgacccaggtgtcaactgaaatcaatttcag

SEQ ID NO: 297844 - DNA, 33 bp, Homo sapien
cctgacccaggtgtcatctgaaatcaatttcag

SEQ ID NO: 297845 - DNA, 33 bp, Homo sapien
gctcacctcagggaagcatccgaactgcaggta

SEQ ID NO: 297846 - DNA, 33 bp, Homo sapien
gctcacctcagggaagtatccgaactgcaggta

SEQ ID NO: 297847 - DNA, 33 bp, Homo sapien
tgagctgagctctagaaggatggcttttcatct

SEQ ID NO: 297848 - DNA, 33 bp, Homo sapien
tgagctgagctctagagggatggcttttcatct

SEQ ID NO: 297849 - DNA, 33 bp, Homo sapien
tccttactttctctccccatcatctcagacaac

SEQ ID NO: 297850 - DNA, 33 bp, Homo sapien
tccttactttctctcctcatcatctcagacaac

SEQ ID NO: 297851 - DNA, 33 bp, Homo sapien
ctgagtgtaaaaacaaatgttacctgaaaacag

SEQ ID NO: 297852 - DNA, 33 bp, Homo sapien
ctgagtgtaaaaacaactgttacctgaaaacag

SEQ ID NO: 297853 - DNA, 33 bp, Homo sapien
acgctccaaacgatgaaagaagagggcagattc

SEQ ID NO: 297854 - DNA, 33 bp, Homo sapien
acgctccaaacgatgagagaagagggcagattc

SEQ ID NO: 297855 - DNA, 33 bp, Homo sapien
gttaattttcccgttgcatatttctggcacagc

SEQ ID NO: 297856 - DNA, 33 bp, Homo sapien
gttaattttcccgttggatatttctggcacagc

SEQ ID NO: 297857 - DNA, 33 bp, Homo sapien
cagctcttctgtggtcccagcttcaccactgag

SEQ ID NO: 297858 - DNA, 33 bp, Homo sapien
cagctcttctgtggtctcagcttcaccactgag

SEQ ID NO: 297859 - DNA, 33 bp, Homo sapien
tttataaaggtttttaagtattcaggaatgttt

SEQ ID NO: 297860 - DNA, 33 bp, Homo sapien
tttataaaggtttttaggtattcaggaatgttt

SEQ ID NO: 297861 - DNA, 33 bp, Homo sapien
agccgggtgttagaaaaagctccaactccacgg

SEQ ID NO: 297862 - DNA, 33 bp, Homo sapien
agccgggtgttagaaagagctccaactccacgg

SEQ ID NO: 297863 - DNA, 33 bp, Homo sapien
ttgaaacaaggggatgaatcctatacggtattt

SEQ ID NO: 297864 - DNA, 33 bp, Homo sapien
ttgaaacaaggggatggatcctatacggtattt

SEQ ID NO: 297865 - DNA, 33 bp, Homo sapien
tccctctcaccttccaaaggcggggtgctctgc

SEQ ID NO: 297866 - DNA, 33 bp, Homo sapien
tccctctcaccttccagaggcggggtgctctgc

SEQ ID NO: 297867 - DNA, 33 bp, Homo sapien
ctggaactagaatgcaatatctaatctgatcac

SEQ ID NO: 297868 - DNA, 33 bp, Homo sapien
ctggaactagaatgcagtatctaatctgatcac

SEQ ID NO: 297869 - DNA, 33 bp, Homo sapien
ccagttgtcccagtacaatttgcagaaaataat

SEQ ID NO: 297870 - DNA, 33 bp, Homo sapien
ccagttgtcccagtacgatttgcagaaaataat

SEQ ID NO: 297871 - DNA, 33 bp, Homo sapien
cagcagtagataacaaaaaatgaattagtcact

SEQ ID NO: 297872 - DNA, 33 bp, Homo sapien
cagcagtagataacaagaaatgaattagtcact

SEQ ID NO: 297873 - DNA, 33 bp, Homo sapien
ccatcaaagtgccagacgtatgggtgaccagct

SEQ ID NO: 297874 - DNA, 33 bp, Homo sapien
ccatcaaagtgccagatgtatgggtgaccagct

SEQ ID NO: 297875 - DNA, 33 bp, Homo sapien
atgccgctatttgtaaccccctgctctactcaa

SEQ ID NO: 297876 - DNA, 33 bp, Homo sapien
atgccgctatttgtaatcccctgctctactcaa

SEQ ID NO: 297877 - DNA, 33 bp, Homo sapien
aaatccaagaaggagaagctcttcaggagggag

SEQ ID NO: 297878 - DNA, 33 bp, Homo sapien
aaatccaagaaggagaggctcttcaggagggag

SEQ ID NO: 297879 - DNA, 33 bp, Homo sapien
gcaccaccataaatgaagttgaacacctggggc

SEQ ID NO: 297880 - DNA, 33 bp, Homo sapien
gcaccaccataaatgaggttgaacacctggggc

SEQ ID NO: 297881 - DNA, 33 bp, Homo sapien
gtagaggagccaatggaacagaggagagtgtgg

SEQ ID NO: 297882 - DNA, 33 bp, Homo sapien
gtagaggagccaatgggacagaggagagtgtgg

SEQ ID NO: 297883 - DNA, 33 bp, Homo sapien
gaaggacatctgaagcaactttgaaggaagaaa

SEQ ID NO: 297884 - DNA, 33 bp, Homo sapien
gaaggacatctgaagctactttgaaggaagaaa

SEQ ID NO: 297885 - DNA, 33 bp, Homo sapien; identical to SEQ ID NO: 297883

SEQ ID NO: 297886 - DNA, 33 bp, Homo sapien; identical to SEQ ID NO: 297884

SEQ ID NO: 297887 - DNA, 33 bp, Homo sapien
gtcagatagccaaagagaattttaagtacaata

SEQ ID NO: 297888 - DNA, 33 bp, Homo sapien
gtcagatagccaaagataattttaagtacaata

SEQ ID NO: 297889 - DNA, 33 bp, Homo sapien
tgccaaattgcttttaaggctttattgtactta

SEQ ID NO: 297890 - DNA, 33 bp, Homo sapien
tgccaaattgcttttatggctttattgtactta

SEQ ID NO: 297891 - DNA, 33 bp, Homo sapien
ataagcttggagctccacttggggatcgggagt

SEQ ID NO: 297892 - DNA, 33 bp, Homo sapien
ataagcttggagctccgcttggggatcgggagt

SEQ ID NO: 297893 - DNA, 33 bp, Homo sapien
acccacaattaaggtaaaatctggtcacataac

SEQ ID NO: 297894 - DNA, 33 bp, Homo sapien
acccacaattaaggtacaatctggtcacataac

SEQ ID NO: 297895 - DNA, 33 bp, Homo sapien
ttatcaacgcatgttacagtgagctgttaaagc

SEQ ID NO: 297896 - DNA, 33 bp, Homo sapien
ttatcaacgcatgttatagtgagctgttaaagc

SEQ ID NO: 297897 - DNA, 33 bp, Homo sapien
gggtagtatttttgaccgaattaacatacaaaa

SEQ ID NO: 297898 - DNA, 33 bp, Homo sapien
gggtagtatttttgactgaattaacatacaaaa

SEQ ID NO: 297899 - DNA, 33 bp, Homo sapien
ttgcctagcaatcatacctgttccttaaaagga

SEQ ID NO: 297900 - DNA, 33 bp, Homo sapien
ttgcctagcaatcatatctgttccttaaaagga

SEQ ID NO: 297901 - DNA, 33 bp, Homo sapien
aaatggaatcaagaccactcaactcagtcatac

SEQ ID NO: 297902 - DNA, 33 bp, Homo sapien
aaatggaatcaagaccgctcaactcagtcatac

SEQ ID NO: 297903 - DNA, 33 bp, Homo sapien
aaaaaagactaataacagatttgttccaaaagt

SEQ ID NO: 297904 - DNA, 33 bp, Homo sapien
aaaaaagactaataactgatttgttccaaaagt

SEQ ID NO: 297905 - DNA, 33 bp, Homo sapien
tatactatttgtcttagaatgccagtattccag

SEQ ID NO: 297906 - DNA, 33 bp, Homo sapien
tatactatttgtcttataatgccagtattccag

SEQ ID NO: 297907 - DNA, 33 bp, Homo sapien
ccattgcttgcagtagacactgtaattaaaaat

SEQ ID NO: 297908 - DNA, 33 bp, Homo sapien
ccattgcttgcagtaggcactgtaattaaaaat

SEQ ID NO: 297909 - DNA, 33 bp, Homo sapien
ggtggactttttggcaagagtggtttttgatgt

SEQ ID NO: 297910 - DNA, 33 bp, Homo sapien
ggtggactttttggcaggagtggtttttgatgt

SEQ ID NO: 297911 - DNA, 33 bp, Homo sapien
ggttaaaaaagaaccacggagacggatgcatta

SEQ ID NO: 297912 - DNA, 33 bp, Homo sapien
ggttaaaaaagaaccatggagacggatgcatta

SEQ ID NO: 297913 - DNA, 33 bp, Homo sapien
tgtagtgcattggcataatcccggatgattaca

SEQ ID NO: 297914 - DNA, 33 bp, Homo sapien
tgtagtgcattggcatgatcccggatgattaca

SEQ ID NO: 297915 - DNA, 33 bp, Homo sapien
gagagcatctttccaacgtcatagtcttaaata

SEQ ID NO: 297916 - DNA, 33 bp, Homo sapien
gagagcatctttccaatgtcatagtcttaaata

SEQ ID NO: 297917 - DNA, 33 bp, Homo sapien
cctatttccataaatgccactgtctggctctgt

SEQ ID NO: 297918 - DNA, 33 bp, Homo sapien
cctatttccataaatgtcactgtctggctctgt

SEQ ID NO: 297919 - DNA, 33 bp, Homo sapien
tctgtggactgaaatagtatcacccaagctctt

SEQ ID NO: 297920 - DNA, 33 bp, Homo sapien
tctgtggactgaaatattatcacccaagctctt

SEQ ID NO: 297921 - DNA, 33 bp, Homo sapien
taaaagtggaaaacaaacgtctctctgttctct

SEQ ID NO: 297922 - DNA, 33 bp, Homo sapien
taaaagtggaaaacaagcgtctctctgttctct

SEQ ID NO: 297923 - DNA, 33 bp, Homo sapien
atagttgggattacacagtatgtggccttttca

SEQ ID NO: 297924 - DNA, 33 bp, Homo sapien
atagttgggattacacggtatgtggccttttca

SEQ ID NO: 297925 - DNA, 33 bp, Homo sapien
caaagtctcacgctgaagtgccgtatcgggatc

SEQ ID NO: 297926 - DNA, 33 bp, Homo sapien
caaagtctcacgctgaggtgccgtatcgggatc

SEQ ID NO: 297927 - DNA, 33 bp, Homo sapien
ggagatgctgaaactgaataataaagacgtcat

SEQ ID NO: 297928 - DNA, 33 bp, Homo sapien
ggagatgctgaaactggataataaagacgtcat

SEQ ID NO: 297929 - DNA, 33 bp, Homo sapien
aaagaaattcactttcaatactttcagccaggt

SEQ ID NO: 297930 - DNA, 33 bp, Homo sapien
aaagaaattcactttcgatactttcagccaggt

SEQ ID NO: 297931 - DNA, 33 bp, Homo sapien
aatttgaacccagaagccttacgcttgccattg

SEQ ID NO: 297932 - DNA, 33 bp, Homo sapien
aatttgaacccagaagtcttacgcttgccattg

SEQ ID NO: 297933 - DNA, 33 bp, Homo sapien
cgcaggaagccaacggcacttaccaatcagtgt

SEQ ID NO: 297934 - DNA, 33 bp, Homo sapien
cgcaggaagccaacggtacttaccaatcagtgt

SEQ ID NO: 297935 - DNA, 33 bp, Homo sapien
tgtattattttaatgcaatatcgatcagcagtt

SEQ ID NO: 297936 - DNA, 33 bp, Homo sapien
tgtattattttaatgcgatatcgatcagcagtt

SEQ ID NO: 297937 - DNA, 33 bp, Homo sapien
aaggagtcaacatttagatctggaagggacaag

SEQ ID NO: 297938 - DNA, 33 bp, Homo sapien
aaggagtcaacatttatatctggaagggacaag

SEQ ID NO: 297939 - DNA, 33 bp, Homo sapien; identical to SEQ ID NO: 297937

SEQ ID NO: 297940 - DNA, 33 bp, Homo sapien; identical to SEQ ID NO: 297938

SEQ ID NO: 297941 - DNA, 33 bp, Homo sapien
ggtgacccttaattacccgtatcatggttcttg

SEQ ID NO: 297942 - DNA, 33 bp, Homo sapien
ggtgacccttaattacgcgtatcatggttcttg

SEQ ID NO: 297943 - DNA, 33 bp, Homo sapien
agatagggtattacaagagtttaggcttaggtt

SEQ ID NO: 297944 - DNA, 33 bp, Homo sapien
agatagggtattacaatagtttaggcttaggtt

SEQ ID NO: 297945 - DNA, 33 bp, Homo sapien
ttcttcttgcttagggcattgtaaaacaagact

SEQ ID NO: 297946 - DNA, 33 bp, Homo sapien
ttcttcttgcttaggggattgtaaaacaagact

SEQ ID NO: 297947 - DNA, 33 bp, Homo sapien; identical to SEQ ID NO: 297945

SEQ ID NO: 297948 - DNA, 33 bp, Homo sapien; identical to SEQ ID NO: 297946

SEQ ID NO: 297949 - DNA, 33 bp, Homo sapien
ccctggcctgaaaaagaaatgtctataaatgct

SEQ ID NO: 297950 - DNA, 33 bp, Homo sapien
ccctggcctgaaaaaggaatgtctataaatgct

SEQ ID NO: 297951 - DNA, 33 bp, Homo sapien
ctaaggatttgctaaacatctgagcagttgatg

SEQ ID NO: 297952 - DNA, 33 bp, Homo sapien
ctaaggatttgctaaatatctgagcagttgatg

SEQ ID NO: 297953 - DNA, 33 bp, Homo sapien
ccacaaacgtgcctcacaagttagttcatgaag

SEQ ID NO: 297954 - DNA, 33 bp, Homo sapien
ccacaaacgtgcctcagaagttagttcatgaag

SEQ ID NO: 297955 - DNA, 33 bp, Homo sapien
aagttgcaaatgtgcacggagagaggagatata

SEQ ID NO: 297956 - DNA, 33 bp, Homo sapien
aagttgcaaatgtgcatggagagaggagatata

SEQ ID NO: 297957 - DNA, 33 bp, Homo sapien
attgtactcaaggacacagagattaaaatgttc

SEQ ID NO: 297958 - DNA, 33 bp, Homo sapien
attgtactcaaggacatagagattaaaatgttc

SEQ ID NO: 297959 - DNA, 33 bp, Homo sapien
agtcaaggtccactcaaatcagaatgtcccaac

SEQ ID NO: 297960 - DNA, 33 bp, Homo sapien
agtcaaggtccactcatatcagaatgtcccaac

SEQ ID NO: 297961 - DNA, 33 bp, Homo sapien
gaaatacagtgtaacagtatatccggggaaaaa

SEQ ID NO: 297962 - DNA, 33 bp, Homo sapien
gaaatacagtgtaacattatatccggggaaaaa

SEQ ID NO: 297963 - DNA, 33 bp, Homo sapien
ggtcagttcctattaacgactcaaagataatag

SEQ ID NO: 297964 - DNA, 33 bp, Homo sapien
ggtcagttcctattaatgactcaaagataatag

SEQ ID NO: 297965 - DNA, 33 bp, Homo sapien
tattatttcatttgtagggttcacgcttttttg

SEQ ID NO: 297966 - DNA, 33 bp, Homo sapien
tattatttcatttgtatggttcacgcttttttg

SEQ ID NO: 297967 - DNA, 33 bp, Homo sapien
tgatttcttcatgagaaaattataacggaggga

SEQ ID NO: 297968 - DNA, 33 bp, Homo sapien
tgatttcttcatgagacaattataacggaggga

SEQ ID NO: 297969 - DNA, 33 bp, Homo sapien
ctgtctgaaattttgggattagtcagaagcaga

SEQ ID NO: 297970 - DNA, 33 bp, Homo sapien
ctgtctgaaattttggtattagtcagaagcaga

SEQ ID NO: 297971 - DNA, 33 bp, Homo sapien
ttacttcctttcactacgctcctgaaagtcatt

SEQ ID NO: 297972 - DNA, 33 bp, Homo sapien
ttacttcctttcactatgctcctgaaagtcatt

SEQ ID NO: 297973 - DNA, 33 bp, Homo sapien
tgagaagaaggctactaaacagctataaggtct

SEQ ID NO: 297974 - DNA, 33 bp, Homo sapien
tgagaagaaggctactgaacagctataaggtct

SEQ ID NO: 297975 - DNA, 33 bp, Homo sapien
atagatcctctgcctcagaatttcattgagttt

SEQ ID NO: 297976 - DNA, 33 bp, Homo sapien
atagatcctctgcctcggaatttcattgagttt

SEQ ID NO: 297977 - DNA, 33 bp, Homo sapien
tagaagaaaatggcaactaagagtgcaaagcac

SEQ ID NO: 297978 - DNA, 33 bp, Homo sapien
tagaagaaaatggcaattaagagtgcaaagcac

SEQ ID NO: 297979 - DNA, 33 bp, Homo sapien
ttatgattaaggacagaacttagtagagcttca

SEQ ID NO: 297980 - DNA, 33 bp, Homo sapien
ttatgattaaggacagcacttagtagagcttca

SEQ ID NO: 297981 - DNA, 33 bp, Homo sapien
tgtcttatagatcaaactggctcttagaccaac

SEQ ID NO: 297982 - DNA, 33 bp, Homo sapien
tgtcttatagatcaaattggctcttagaccaac

SEQ ID NO: 297983 - DNA, 33 bp, Homo sapien
atctgagggacctccaaatgtgctgccgcggct

SEQ ID NO: 297984 - DNA, 33 bp, Homo sapien
atctgagggacctccagatgtgctgccgcggct

SEQ ID NO: 297985 - DNA, 33 bp, Homo sapien
aatgtagacacataataatcctttgcaacccag

SEQ ID NO: 297986 - DNA, 33 bp, Homo sapien
aatgtagacacataattatcctttgcaacccag

SEQ ID NO: 297987 - DNA, 33 bp, Homo sapien
aggtactgtgctaggccctttttgcatttcctc

SEQ ID NO: 297988 - DNA, 33 bp, Homo sapien
aggtactgtgctaggctctttttgcatttcctc

SEQ ID NO: 297989 - DNA, 33 bp, Homo sapien
tactctctattccaaaatgtgttttttctgatc

SEQ ID NO: 297990 - DNA, 33 bp, Homo sapien
tactctctattccaaagtgtgttttttctgatc

SEQ ID NO: 297991 - DNA, 33 bp, Homo sapien
tttacatttggaagtaaagagcctcatctctca

SEQ ID NO: 297992 - DNA, 33 bp, Homo sapien
tttacatttggaagtagagagcctcatctctca

SEQ ID NO: 297993 - DNA, 33 bp, Homo sapien
cctctgttaagatctaccgtaagaaagcctaag

SEQ ID NO: 297994 - DNA, 33 bp, Homo sapien
cctctgttaagatctatcgtaagaaagcctaag

SEQ ID NO: 297995 - DNA, 33 bp, Homo sapien
tggcaaaaagttttccagactccctcatgacta

SEQ ID NO: 297996 - DNA, 33 bp, Homo sapien
tggcaaaaagttttccggactccctcatgacta

SEQ ID NO: 297997 - DNA, 33 bp, Homo sapien
tgcaccctgccctttgaacacataatctcatta

SEQ ID NO: 297998 - DNA, 33 bp, Homo sapien
tgcaccctgccctttggacacataatctcatta

SEQ ID NO: 297999 - DNA, 33 bp, Homo sapien
taatgtagtcattaagcccttcccctacaatcc

SEQ ID NO: 298000 - DNA, 33 bp, Homo sapien
taatgtagtcattaagtccttcccctacaatcc

SEQ ID NO: 298001 - DNA, 33 bp, Homo sapien
ttcgaaaagataaagacgatacaacatgagaaa

SEQ ID NO: 298002 - DNA, 33 bp, Homo sapien
ttcgaaaagataaagatgatacaacatgagaaa

SEQ ID NO: 298003 - DNA, 33 bp, Homo sapien
agtgcttcctctacacactaatggcctatgaca

SEQ ID NO: 298004 - DNA, 33 bp, Homo sapien
agtgcttcctctacaccctaatggcctatgaca

SEQ ID NO: 298005 - DNA, 33 bp, Homo sapien
atgatggaggagatgcccatatcaatgactgag

SEQ ID NO: 298006 - DNA, 33 bp, Homo sapien
atgatggaggagatgctcatatcaatgactgag

SEQ ID NO: 298007 - DNA, 33 bp, Homo sapien
agatctgaagatttcaacgagacctgttaagcc

SEQ ID NO: 298008 - DNA, 33 bp, Homo sapien
agatctgaagatttcagcgagacctgttaagcc

SEQ ID NO: 298009 - DNA, 33 bp, Homo sapien
aaggtgctaacatagaccttcacagactagaag

SEQ ID NO: 298010 - DNA, 33 bp, Homo sapien
aaggtgctaacatagatcttcacagactagaag

SEQ ID NO: 298011 - DNA, 33 bp, Homo sapien
tggttggcaatcaatcaaactcattataccacg

SEQ ID NO: 298012 - DNA, 33 bp, Homo sapien
tggttggcaatcaatcgaactcattataccacg

SEQ ID NO: 298013 - DNA, 33 bp, Homo sapien
ctgaaatcttttctcaaccaggtttgctaatcc

SEQ ID NO: 298014 - DNA, 33 bp, Homo sapien
ctgaaatcttttctcatccaggtttgctaatcc

SEQ ID NO: 298015 - DNA, 33 bp, Homo sapien
aataaataattttccaccgatattggacatgag

SEQ ID NO: 298016 - DNA, 33 bp, Homo sapien
aataaataattttccatcgatattggacatgag

SEQ ID NO: 298017 - DNA, 33 bp, Homo sapien
aggagtgaaggaaactcagatgtatcaattaaa

SEQ ID NO: 298018 - DNA, 33 bp, Homo sapien
aggagtgaaggaaacttagatgtatcaattaaa

SEQ ID NO: 298019 - DNA, 33 bp, Homo sapien
acaaaaaaagcccagaaatcttcagccttaggt

SEQ ID NO: 298020 - DNA, 33 bp, Homo sapien
acaaaaaaagcccagatatcttcagccttaggt

SEQ ID NO: 298021 - DNA, 33 bp, Homo sapien
catacaccgtggaataccactcagacataaaaa

SEQ ID NO: 298022 - DNA, 33 bp, Homo sapien
catacaccgtggaatatcactcagacataaaaa

SEQ ID NO: 298023 - DNA, 33 bp, Homo sapien
aatgtgaaaatgaaaactctctttgtctgtgct

SEQ ID NO: 298024 - DNA, 33 bp, Homo sapien
aatgtgaaaatgaaaagtctctttgtctgtgct

SEQ ID NO: 298025 - DNA, 33 bp, Homo sapien
tttgagctggtttcaccggtttgactcacagtt

SEQ ID NO: 298026 - DNA, 33 bp, Homo sapien
tttgagctggtttcactggtttgactcacagtt

SEQ ID NO: 298027 - DNA, 33 bp, Homo sapien
gtgagttcctgctaacaactctgtaccacacac

SEQ ID NO: 298028 - DNA, 33 bp, Homo sapien
gtgagttcctgctaacgactctgtaccacacac

SEQ ID NO: 298029 - DNA, 33 bp, Homo sapien
attcttgactgtaatacgtgacagactggggca

SEQ ID NO: 298030 - DNA, 33 bp, Homo sapien
attcttgactgtaatatgtgacagactggggca

SEQ ID NO: 298031 - DNA, 33 bp, Homo sapien
actggggcaaggtctacactaaagaagccatgg

SEQ ID NO: 298032 - DNA, 33 bp, Homo sapien
actggggcaaggtctatactaaagaagccatgg

SEQ ID NO: 298033 - DNA, 33 bp, Homo sapien
tattcattctaccttcaccgaagagtcctacag

SEQ ID NO: 298034 - DNA, 33 bp, Homo sapien
tattcattctaccttcgccgaagagtcctacag

SEQ ID NO: 298035 - DNA, 33 bp, Homo sapien
gaggaagaactagtcaagaattaagagagacag

SEQ ID NO: 298036 - DNA, 33 bp, Homo sapien
gaggaagaactagtcaggaattaagagagacag

SEQ ID NO: 298037 - DNA, 33 bp, Homo sapien
tttatctgtgacatccccgcagtattgagactg

SEQ ID NO: 298038 - DNA, 33 bp, Homo sapien
tttatctgtgacatccgcgcagtattgagactg

SEQ ID NO: 298039 - DNA, 33 bp, Homo sapien
aaaatccaaaataagcagaggaacggtgactga

SEQ ID NO: 298040 - DNA, 33 bp, Homo sapien
aaaatccaaaataagccgaggaacggtgactga

SEQ ID NO: 298041 - DNA, 33 bp, Homo sapien
tctaacttgggacttacgcacacactatctttt

SEQ ID NO: 298042 - DNA, 33 bp, Homo sapien
tctaacttgggacttatgcacacactatctttt

SEQ ID NO: 298043 - DNA, 33 bp, Homo sapien
gggaaaggagagagtcaacagaaacctctctga

SEQ ID NO: 298044 - DNA, 33 bp, Homo sapien
gggaaaggagagagtcgacagaaacctctctga

SEQ ID NO: 298045 - DNA, 33 bp, Homo sapien
gctcttatgaccttgcacttagacttcaagtta

SEQ ID NO: 298046 - DNA, 33 bp, Homo sapien
gctcttatgaccttgcgcttagacttcaagtta

SEQ ID NO: 298047 - DNA, 33 bp, Homo sapien
cgcccggccgaggaataaatcttaattggcctc

SEQ ID NO: 298048 - DNA, 33 bp, Homo sapien
cgcccggccgaggaatgaatcttaattggcctc

SEQ ID NO: 298049 - DNA, 33 bp, Homo sapien
attcatttttctatccacagagcaaagtaactg

SEQ ID NO: 298050 - DNA, 33 bp, Homo sapien
attcatttttctatccgcagagcaaagtaactg

SEQ ID NO: 298051 - DNA, 33 bp, Homo sapien
ccatcagctccattaaagttgatattgtatggt

SEQ ID NO: 298052 - DNA, 33 bp, Homo sapien
ccatcagctccattaacgttgatattgtatggt

SEQ ID NO: 298053 - DNA, 33 bp, Homo sapien
cctgcacaagcagttccatttgggctcattgga

SEQ ID NO: 298054 - DNA, 33 bp, Homo sapien
cctgcacaagcagttcgatttgggctcattgga

SEQ ID NO: 298055 - DNA, 33 bp, Homo sapien
gaatggaatgtggtgaatcaactgggatatgaa

SEQ ID NO: 298056 - DNA, 33 bp, Homo sapien
gaatggaatgtggtgagtcaactgggatatgaa

SEQ ID NO: 298057 - DNA, 33 bp, Homo sapien
ttcatttcttcattccgaagggtatagataatg

SEQ ID NO: 298058 - DNA, 33 bp, Homo sapien
ttcatttcttcattcctaagggtatagataatg

SEQ ID NO: 298059 - DNA, 33 bp, Homo sapien
agtaattctatagttgcatatcttgataattct

SEQ ID NO: 298060 - DNA, 33 bp, Homo sapien
agtaattctatagttggatatcttgataattct

SEQ ID NO: 298061 - DNA, 33 bp, Homo sapien
aagagaggactatgaaagagaaaagctacccct

SEQ ID NO: 298062 - DNA, 33 bp, Homo sapien
aagagaggactatgaaggagaaaagctacccct

SEQ ID NO: 298063 - DNA, 33 bp, Homo sapien
ctttctttcattttgacctgccactaatctaac

SEQ ID NO: 298064 - DNA, 33 bp, Homo sapien
ctttctttcattttgatctgccactaatctaac

SEQ ID NO: 298065 - DNA, 33 bp, Homo sapien
gtcatcagcttgtagagaatttttaagaatcct

SEQ ID NO: 298066 - DNA, 33 bp, Homo sapien
gtcatcagcttgtagataatttttaagaatcct

SEQ ID NO: 298067 - DNA, 33 bp, Homo sapien
aaccaacatggtggaacaattttaggaatattg

SEQ ID NO: 298068 - DNA, 33 bp, Homo sapien
aaccaacatggtggaagaattttaggaatattg

SEQ ID NO: 298069 - DNA, 33 bp, Homo sapien
cctagagactcccttaaatattcttgattcaat

SEQ ID NO: 298070 - DNA, 33 bp, Homo sapien
cctagagactcccttagatattcttgattcaat

SEQ ID NO: 298071 - DNA, 33 bp, Homo sapien
agctacaatgtctccaatattgaagcttccttt

SEQ ID NO: 298072 - DNA, 33 bp, Homo sapien
agctacaatgtctccattattgaagcttccttt

SEQ ID NO: 298073 - DNA, 33 bp, Homo sapien
ttattcatcaaatgtcaccgtgagcataacatt

SEQ ID NO: 298074 - DNA, 33 bp, Homo sapien
ttattcatcaaatgtcgccgtgagcataacatt

SEQ ID NO: 298075 - DNA, 33 bp, Homo sapien
cacccaaagaattccaagggcctagactgaaat

SEQ ID NO: 298076 - DNA, 33 bp, Homo sapien
cacccaaagaattccatgggcctagactgaaat

SEQ ID NO: 298077 - DNA, 33 bp, Homo sapien
gattcagggacctccacataatgcactgcacac

SEQ ID NO: 298078 - DNA, 33 bp, Homo sapien
gattcagggacctccatataatgcactgcacac

SEQ ID NO: 298079 - DNA, 33 bp, Homo sapien
taattttagatcacataagtgaaatacctattt

SEQ ID NO: 298080 - DNA, 33 bp, Homo sapien
taattttagatcacatcagtgaaatacctattt

SEQ ID NO: 298081 - DNA, 33 bp, Homo sapien
cctaatagctctgaaactctgggatccaattta

SEQ ID NO: 298082 - DNA, 33 bp, Homo sapien
cctaatagctctgaaattctgggatccaattta

SEQ ID NO: 298083 - DNA, 33 bp, Homo sapien
tctgggctttttaagacgctgctaaggtctgta

SEQ ID NO: 298084 - DNA, 33 bp, Homo sapien
tctgggctttttaagatgctgctaaggtctgta

SEQ ID NO: 298085 - DNA, 33 bp, Homo sapien
ccgttattattgcctgaattgccatttctatca

SEQ ID NO: 298086 - DNA, 33 bp, Homo sapien
ccgttattattgcctgcattgccatttctatca

SEQ ID NO: 298087 - DNA, 33 bp, Homo sapien
aggagaaagtcatgataatcacattatagaggc

SEQ ID NO: 298088 - DNA, 33 bp, Homo sapien
aggagaaagtcatgatgatcacattatagaggc

SEQ ID NO: 298089 - DNA, 33 bp, Homo sapien
catggtggcataggaacagtttacaatagggag

SEQ ID NO: 298090 - DNA, 33 bp, Homo sapien
catggtggcataggaagagtttacaatagggag

SEQ ID NO: 298091 - DNA, 33 bp, Homo sapien
atgatagagccattcaaggtgtctcaatagctc

SEQ ID NO: 298092 - DNA, 33 bp, Homo sapien
atgatagagccattcatggtgtctcaatagctc

SEQ ID NO: 298093 - DNA, 33 bp, Homo sapien
ttaccaagttgaaagaacagtaagtatgcaaga

SEQ ID NO: 298094 - DNA, 33 bp, Homo sapien
ttaccaagttgaaagagcagtaagtatgcaaga

SEQ ID NO: 298095 - DNA, 33 bp, Homo sapien
ttcttatctgtttaacactgccataattaagtg

SEQ ID NO: 298096 - DNA, 33 bp, Homo sapien
ttcttatctgtttaactctgccataattaagtg

SEQ ID NO: 298097 - DNA, 33 bp, Homo sapien
cagtggttataatatgaaaatgtctcctaagca

SEQ ID NO: 298098 - DNA, 33 bp, Homo sapien
cagtggttataatatgcaaatgtctcctaagca

SEQ ID NO: 298099 - DNA, 33 bp, Homo sapien
ggcgtttgctttctaccattttttaaaagaaca

SEQ ID NO: 298100 - DNA, 33 bp, Homo sapien
ggcgtttgctttctacgattttttaaaagaaca

SEQ ID NO: 298101 - DNA, 33 bp, Homo sapien
tgatttctctctttggatatcaaggtctggtag

SEQ ID NO: 298102 - DNA, 33 bp, Homo sapien
tgatttctctctttgggtatcaaggtctggtag

SEQ ID NO: 298103 - DNA, 33 bp, Homo sapien
agtcgagaggcagtccagcaaacagaaatgctg

SEQ ID NO: 298104 - DNA, 33 bp, Homo sapien
agtcgagaggcagtccggcaaacagaaatgctg

SEQ ID NO: 298105 - DNA, 33 bp, Homo sapien
tagccttgattatataacccctacatatgtcca

SEQ ID NO: 298106 - DNA, 33 bp, Homo sapien
tagccttgattatataccccctacatatgtcca

SEQ ID NO: 298107 - DNA, 33 bp, Homo sapien
acaaaactaaacataccattgccatacagtcca

SEQ ID NO: 298108 - DNA, 33 bp, Homo sapien
acaaaactaaacatactattgccatacagtcca

SEQ ID NO: 298109 - DNA, 33 bp, Homo sapien
aactatcatagctctccgagaatgttgttgaaa

SEQ ID NO: 298110 - DNA, 33 bp, Homo sapien
aactatcatagctctctgagaatgttgttgaaa

SEQ ID NO: 298111 - DNA, 33 bp, Homo sapien
tgcccctaatttaagccgaatgagtatggacag

SEQ ID NO: 298112 - DNA, 33 bp, Homo sapien
tgcccctaatttaagcggaatgagtatggacag

SEQ ID NO: 298113 - DNA, 33 bp, Homo sapien
ctttgaaggatagaatcacacggttggtctgtt

SEQ ID NO: 298114 - DNA, 33 bp, Homo sapien
ctttgaaggatagaatgacacggttggtctgtt

SEQ ID NO: 298115 - DNA, 33 bp, Homo sapien
tgtaatctgaatgaaccgagcaaactctaaaca

SEQ ID NO: 298116 - DNA, 33 bp, Homo sapien
tgtaatctgaatgaactgagcaaactctaaaca

SEQ ID NO: 298117 - DNA, 33 bp, Homo sapien
ttacgtagctcttctccatgtcaggccatacat

SEQ ID NO: 298118 - DNA, 33 bp, Homo sapien
ttacgtagctcttctctatgtcaggccatacat

SEQ ID NO: 298119 - DNA, 33 bp, Homo sapien
ccataagacaaaagtaaatgggatcacagtgaa

SEQ ID NO: 298120 - DNA, 33 bp, Homo sapien
ccataagacaaaagtagatgggatcacagtgaa

SEQ ID NO: 298121 - DNA, 33 bp, Homo sapien
gttttttgtgtagaaaaagtatggctgacattt

SEQ ID NO: 298122 - DNA, 33 bp, Homo sapien
gttttttgtgtagaaagagtatggctgacattt

SEQ ID NO: 298123 - DNA, 33 bp, Homo sapien
gttcctggaaaaacaacgtactatcagtgaaag

SEQ ID NO: 298124 - DNA, 33 bp, Homo sapien
gttcctggaaaaacaatgtactatcagtgaaag

SEQ ID NO: 298125 - DNA, 33 bp, Homo sapien
agaaaccacagaatatcaagcatgagctggtta

SEQ ID NO: 298126 - DNA, 33 bp, Homo sapien
agaaaccacagaatatgaagcatgagctggtta

SEQ ID NO: 298127 - DNA, 33 bp, Homo sapien
cttaatttggcaattccctttttgtactcttca

SEQ ID NO: 298128 - DNA, 33 bp, Homo sapien
cttaatttggcaattctctttttgtactcttca

SEQ ID NO: 298129 - DNA, 33 bp, Homo sapien
ggattaagaatgaaccaattaccactttaaaat

SEQ ID NO: 298130 - DNA, 33 bp, Homo sapien
ggattaagaatgaaccgattaccactttaaaat

SEQ ID NO: 298131 - DNA, 33 bp, Homo sapien
aatggaggtggtcagaaaacaatacaactgcct

SEQ ID NO: 298132 - DNA, 33 bp, Homo sapien
aatggaggtggtcagagaacaatacaactgcct

SEQ ID NO: 298133 - DNA, 33 bp, Homo sapien
catgtgagtcagtcaaatcacagataacaagga

SEQ ID NO: 298134 - DNA, 33 bp, Homo sapien
catgtgagtcagtcaagtcacagataacaagga

SEQ ID NO: 298135 - DNA, 33 bp, Homo sapien
ctgttacgatcagaccacatactgctggccaaa

SEQ ID NO: 298136 - DNA, 33 bp, Homo sapien
ctgttacgatcagacctcatactgctggccaaa

SEQ ID NO: 298137 - DNA, 33 bp, Homo sapien
agctttgatatggaaccactggagcaactttta

SEQ ID NO: 298138 - DNA, 33 bp, Homo sapien
agctttgatatggaactactggagcaactttta

SEQ ID NO: 298139 - DNA, 33 bp, Homo sapien
atgtgctcacatacatcactggcaaatatatcc

SEQ ID NO: 298140 - DNA, 33 bp, Homo sapien
atgtgctcacatacattactggcaaatatatcc

SEQ ID NO: 298141 - DNA, 33 bp, Homo sapien
agtaatgcaaggaagaaaaatggattttaatgt

SEQ ID NO: 298142 - DNA, 33 bp, Homo sapien
agtaatgcaaggaagacaaatggattttaatgt

SEQ ID NO: 298143 - DNA, 33 bp, Homo sapien
aggtctgttatatgaacgtaagagaatggacta

SEQ ID NO: 298144 - DNA, 33 bp, Homo sapien
aggtctgttatatgaatgtaagagaatggacta

SEQ ID NO: 298145 - DNA, 33 bp, Homo sapien
tttcatgttttgactgaattaaacattactacc

SEQ ID NO: 298146 - DNA, 33 bp, Homo sapien
tttcatgttttgactggattaaacattactacc

SEQ ID NO: 298147 - DNA, 33 bp, Homo sapien
aataccaactcatccaagcttaggtcatgtaaa

SEQ ID NO: 298148 - DNA, 33 bp, Homo sapien
aataccaactcatccaggcttaggtcatgtaaa

SEQ ID NO: 298149 - DNA, 33 bp, Homo sapien
aagtgtaatggagttaaacgctatgaggagaaa

SEQ ID NO: 298150 - DNA, 33 bp, Homo sapien
aagtgtaatggagttagacgctatgaggagaaa

SEQ ID NO: 298151 - DNA, 33 bp, Homo sapien
ctgaaatcaccattaaatcttatgatgccacat

SEQ ID NO: 298152 - DNA, 33 bp, Homo sapien
ctgaaatcaccattaagtcttatgatgccacat

SEQ ID NO: 298153 - DNA, 33 bp, Homo sapien
ggaaattgataattcgaccaattgctatgttca

SEQ ID NO: 298154 - DNA, 33 bp, Homo sapien
ggaaattgataattcggccaattgctatgttca

SEQ ID NO: 298155 - DNA, 33 bp, Homo sapien
tgcagtgctcttaccccaaatcttggtgagcct

SEQ ID NO: 298156 - DNA, 33 bp, Homo sapien
tgcagtgctcttaccctaaatcttggtgagcct

SEQ ID NO: 298157 - DNA, 33 bp, Homo sapien
ctaaacaaacaatacccctgacctcgtaaagcc

SEQ ID NO: 298158 - DNA, 33 bp, Homo sapien
ctaaacaaacaatacctctgacctcgtaaagcc

SEQ ID NO: 298159 - DNA, 33 bp, Homo sapien
tgttctctctgcttcactatgtggggcagctca

SEQ ID NO: 298160 - DNA, 33 bp, Homo sapien
tgttctctctgcttcattatgtggggcagctca

SEQ ID NO: 298161 - DNA, 33 bp, Homo sapien
ttactgtaagagtaaaagcccctcaggaaacaa

SEQ ID NO: 298162 - DNA, 33 bp, Homo sapien
ttactgtaagagtaaatgcccctcaggaaacaa

SEQ ID NO: 298163 - DNA, 33 bp, Homo sapien
ctattgcaggttggtcccctcttcatgcttaga

SEQ ID NO: 298164 - DNA, 33 bp, Homo sapien
ctattgcaggttggtctcctcttcatgcttaga

SEQ ID NO: 298165 - DNA, 33 bp, Homo sapien
tcatctagcatacaaaaagagcattaatcctca

SEQ ID NO: 298166 - DNA, 33 bp, Homo sapien
tcatctagcatacaaagagagcattaatcctca

SEQ ID NO: 298167 - DNA, 33 bp, Homo sapien
ggaaaatcttggaccactggaggtgaagcgagt

SEQ ID NO: 298168 - DNA, 33 bp, Homo sapien
ggaaaatcttggaccattggaggtgaagcgagt

SEQ ID NO: 298169 - DNA, 33 bp, Homo sapien
aattgcctttgaataaaatcttgctttccaata

SEQ ID NO: 298170 - DNA, 33 bp, Homo sapien
aattgcctttgaataagatcttgctttccaata

SEQ ID NO: 298171 - DNA, 33 bp, Homo sapien
ctcccttttctagcctgacccacagaggcagaa

SEQ ID NO: 298172 - DNA, 33 bp, Homo sapien
ctcccttttctagccttacccacagaggcagaa

SEQ ID NO: 298173 - DNA, 33 bp, Homo sapien
gttttgacttcctacaccattatcatattgctg

SEQ ID NO: 298174 - DNA, 33 bp, Homo sapien
gttttgacttcctacatcattatcatattgctg

SEQ ID NO: 298175 - DNA, 33 bp, Homo sapien
gtcaaaaattggagaaacaacctgcacaagggt

SEQ ID NO: 298176 - DNA, 33 bp, Homo sapien
gtcaaaaattggagaagcaacctgcacaagggt

SEQ ID NO: 298177 - DNA, 33 bp, Homo sapien
tacctctatttaggagaaattatgagaaattgt

SEQ ID NO: 298178 - DNA, 33 bp, Homo sapien
tacctctatttaggaggaattatgagaaattgt

SEQ ID NO: 298179 - DNA, 33 bp, Homo sapien
tttacttgttgctttcactctgttgttacatgg

SEQ ID NO: 298180 - DNA, 33 bp, Homo sapien
tttacttgttgctttcgctctgttgttacatgg

SEQ ID NO: 298181 - DNA, 33 bp, Homo sapien
catgttctagagggtgaatttctagcaagttct

SEQ ID NO: 298182 - DNA, 33 bp, Homo sapien
catgttctagagggtggatttctagcaagttct

SEQ ID NO: 298183 - DNA, 33 bp, Homo sapien
agctacccacagcttgaataatacccaaagctt

SEQ ID NO: 298184 - DNA, 33 bp, Homo sapien
agctacccacagcttggataatacccaaagctt

SEQ ID NO: 298185 - DNA, 33 bp, Homo sapien
aggacacaatgaaaaggcaacatgatctgcaaa

SEQ ID NO: 298186 - DNA, 33 bp, Homo sapien
aggacacaatgaaaagtcaacatgatctgcaaa

SEQ ID NO: 298187 - DNA, 33 bp, Homo sapien
ctgtcttgtttgtgaacgtaatatttacttgga

SEQ ID NO: 298188 - DNA, 33 bp, Homo sapien
ctgtcttgtttgtgaatgtaatatttacttgga

SEQ ID NO: 298189 - DNA, 33 bp, Homo sapien
acctttctttgtgcaacgctttactaacttctc

SEQ ID NO: 298190 - DNA, 33 bp, Homo sapien
acctttctttgtgcaatgctttactaacttctc

SEQ ID NO: 298191 - DNA, 33 bp, Homo sapien
catgcagacagaaaacagaatggggaaagaaag

SEQ ID NO: 298192 - DNA, 33 bp, Homo sapien
catgcagacagaaaacggaatggggaaagaaag

SEQ ID NO: 298193 - DNA, 33 bp, Homo sapien
aaaaaagaaaagcatccgacacaataattgcaa

SEQ ID NO: 298194 - DNA, 33 bp, Homo sapien
aaaaaagaaaagcatctgacacaataattgcaa

SEQ ID NO: 298195 - DNA, 33 bp, Homo sapien
caagttagttccttgccaccttggcattaccag

SEQ ID NO: 298196 - DNA, 33 bp, Homo sapien
caagttagttccttgctaccttggcattaccag

SEQ ID NO: 298197 - DNA, 33 bp, Homo sapien
gggagaattagggtaacgagtgatgaaagaatc

SEQ ID NO: 298198 - DNA, 33 bp, Homo sapien
gggagaattagggtaatgagtgatgaaagaatc

SEQ ID NO: 298199 - DNA, 33 bp, Homo sapien
gcaccaacttaactccccagtagtcacacacac

SEQ ID NO: 298200 - DNA, 33 bp, Homo sapien
gcaccaacttaactcctcagtagtcacacacac

SEQ ID NO: 298201 - DNA, 33 bp, Homo sapien
gacagtaccaacagtcaaaatgtggaatctttc

SEQ ID NO: 298202 - DNA, 33 bp, Homo sapien
gacagtaccaacagtcgaaatgtggaatctttc

SEQ ID NO: 298203 - DNA, 33 bp, Homo sapien
ccagtcttggagaagcagagcctgagataatat

SEQ ID NO: 298204 - DNA, 33 bp, Homo sapien
ccagtcttggagaagccgagcctgagataatat

SEQ ID NO: 298205 - DNA, 33 bp, Homo sapien
gctgtatctttatgacaggtgagtgcttcaacc

SEQ ID NO: 298206 - DNA, 33 bp, Homo sapien
gctgtatctttatgacgggtgagtgcttcaacc

SEQ ID NO: 298207 - DNA, 33 bp, Homo sapien
acagtattccagttcagattccacttttacagt

SEQ ID NO: 298208 - DNA, 33 bp, Homo sapien
acagtattccagttcatattccacttttacagt

SEQ ID NO: 298209 - DNA, 33 bp, Homo sapien
tcaggggtcttatgaccagcaaaatgcaacaga

SEQ ID NO: 298210 - DNA, 33 bp, Homo sapien
tcaggggtcttatgacgagcaaaatgcaacaga

SEQ ID NO: 298211 - DNA, 33 bp, Homo sapien
ctctcattgcacagaaatacattgctgagtccc

SEQ ID NO: 298212 - DNA, 33 bp, Homo sapien
ctctcattgcacagaagtacattgctgagtccc

SEQ ID NO: 298213 - DNA, 33 bp, Homo sapien
caatttgccatttggccactaaattgaactgga

SEQ ID NO: 298214 - DNA, 33 bp, Homo sapien
caatttgccatttggctactaaattgaactgga

SEQ ID NO: 298215 - DNA, 33 bp, Homo sapien
gcctgtttagactgtacgttgtaacaagtgtga

SEQ ID NO: 298216 - DNA, 33 bp, Homo sapien
gcctgtttagactgtatgttgtaacaagtgtga

SEQ ID NO: 298217 - DNA, 33 bp, Homo sapien
cataaaaattaactgcaccaaagtaaagtgaac

SEQ ID NO: 298218 - DNA, 33 bp, Homo sapien
cataaaaattaactgcgccaaagtaaagtgaac

SEQ ID NO: 298219 - DNA, 33 bp, Homo sapien
aaactaactcacttaaagacttgttgttagaaa

SEQ ID NO: 298220 - DNA, 33 bp, Homo sapien
aaactaactcacttaaggacttgttgttagaaa

SEQ ID NO: 298221 - DNA, 33 bp, Homo sapien
tagccgatagacacagactcattaaaagactga

SEQ ID NO: 298222 - DNA, 33 bp, Homo sapien
tagccgatagacacaggctcattaaaagactga

SEQ ID NO: 298223 - DNA, 33 bp, Homo sapien
acttggtaaaaggaaccgctgtaaataggctgt

SEQ ID NO: 298224 - DNA, 33 bp, Homo sapien
acttggtaaaaggaacggctgtaaataggctgt

SEQ ID NO: 298225 - DNA, 33 bp, Homo sapien
aaggtagcttggaccaaagcagtatttttcaca

SEQ ID NO: 298226 - DNA, 33 bp, Homo sapien
aaggtagcttggaccagagcagtatttttcaca

SEQ ID NO: 298227 - DNA, 33 bp, Homo sapien
ctttattccaggagcaatagaaagccattgaag

SEQ ID NO: 298228 - DNA, 33 bp, Homo sapien
ctttattccaggagcagtagaaagccattgaag

SEQ ID NO: 298229 - DNA, 33 bp, Homo sapien
gaagttttgctgcacaaagagccaggaaaagag

SEQ ID NO: 298230 - DNA, 33 bp, Homo sapien
gaagttttgctgcacagagagccaggaaaagag

SEQ ID NO: 298231 - DNA, 33 bp, Homo sapien
agatacctaaaataggaattacaaaacacagct

SEQ ID NO: 298232 - DNA, 33 bp, Homo sapien
agatacctaaaatagggattacaaaacacagct

SEQ ID NO: 298233 - DNA, 33 bp, Homo sapien
aagagaaaaagctcctaaagaaacaaattcaaa

SEQ ID NO: 298234 - DNA, 33 bp, Homo sapien
aagagaaaaagctcctcaagaaacaaattcaaa

SEQ ID NO: 298235 - DNA, 33 bp, Homo sapien
ttgttggcctcttcaaagacatgaaacacgttg

SEQ ID NO: 298236 - DNA, 33 bp, Homo sapien
ttgttggcctcttcaaggacatgaaacacgttg

SEQ ID NO: 298237 - DNA, 33 bp, Homo sapien
taaattcaaaaataccaaaatcataccaagcat

SEQ ID NO: 298238 - DNA, 33 bp, Homo sapien
taaattcaaaaataccgaaatcataccaagcat

SEQ ID NO: 298239 - DNA, 33 bp, Homo sapien
attttgattatgttcaaattttacaggccaaga

SEQ ID NO: 298240 - DNA, 33 bp, Homo sapien
attttgattatgttcagattttacaggccaaga

SEQ ID NO: 298241 - DNA, 33 bp, Homo sapien
agtatgtattcatccacgtgttctgcaataatt

SEQ ID NO: 298242 - DNA, 33 bp, Homo sapien
agtatgtattcatccatgtgttctgcaataatt

SEQ ID NO: 298243 - DNA, 33 bp, Homo sapien
tacatctttgtagaaaaaggctccaactccaat

SEQ ID NO: 298244 - DNA, 33 bp, Homo sapien
tacatctttgtagaaataggctccaactccaat

SEQ ID NO: 298245 - DNA, 33 bp, Homo sapien
ttttcatatatatcaaataacacctcaaaaagt

SEQ ID NO: 298246 - DNA, 33 bp, Homo sapien
ttttcatatatatcaagtaacacctcaaaaagt

SEQ ID NO: 298247 - DNA, 33 bp, Homo sapien
agctattttctggaggccttttctggaaacgat

SEQ ID NO: 298248 - DNA, 33 bp, Homo sapien
agctattttctggaggtcttttctggaaacgat

SEQ ID NO: 298249 - DNA, 33 bp, Homo sapien
tggtacaatgatgtgccgaaggtcttgaggtga

SEQ ID NO: 298250 - DNA, 33 bp, Homo sapien
tggtacaatgatgtgctgaaggtcttgaggtga

SEQ ID NO: 298251 - DNA, 33 bp, Homo sapien
caatgagcccaaaatactacttaatccctaatt

SEQ ID NO: 298252 - DNA, 33 bp, Homo sapien
caatgagcccaaaatattacttaatccctaatt

SEQ ID NO: 298253 - DNA, 33 bp, Homo sapien
catgaggtggctcttacgttcctctaattcttg

SEQ ID NO: 298254 - DNA, 33 bp, Homo sapien
catgaggtggctcttaggttcctctaattcttg

SEQ ID NO: 298255 - DNA, 33 bp, Homo sapien
tctaagcctcattagaataaaaagatctgcctc

SEQ ID NO: 298256 - DNA, 33 bp, Homo sapien
tctaagcctcattagactaaaaagatctgcctc

SEQ ID NO: 298257 - DNA, 33 bp, Homo sapien
tcacaagtcgtggactaagcagtatacttctgt

SEQ ID NO: 298258 - DNA, 33 bp, Homo sapien
tcacaagtcgtggactcagcagtatacttctgt

SEQ ID NO: 298259 - DNA, 33 bp, Homo sapien
ttccaaccccagatggaagcattaggagccttt

SEQ ID NO: 298260 - DNA, 33 bp, Homo sapien
ttccaaccccagatggtagcattaggagccttt

SEQ ID NO: 298261 - DNA, 33 bp, Homo sapien
tgctgagttccaggaaaaaatggcaacaggcaa

SEQ ID NO: 298262 - DNA, 33 bp, Homo sapien
tgctgagttccaggaagaaatggcaacaggcaa

SEQ ID NO: 298263 - DNA, 33 bp, Homo sapien
agcctctctttaaacaacaaacttgtccttgta

SEQ ID NO: 298264 - DNA, 33 bp, Homo sapien
agcctctctttaaacagcaaacttgtccttgta

SEQ ID NO: 298265 - DNA, 33 bp, Homo sapien
gtggatgttctcaaacagctacagcaattttag

SEQ ID NO: 298266 - DNA, 33 bp, Homo sapien
gtggatgttctcaaactgctacagcaattttag

SEQ ID NO: 298267 - DNA, 33 bp, Homo sapien
gtaatacattttgagagagcttaggaatcagta

SEQ ID NO: 298268 - DNA, 33 bp, Homo sapien
gtaatacattttgagatagcttaggaatcagta

SEQ ID NO: 298269 - DNA, 33 bp, Homo sapien
gctgttgcaatatcacagcattggtaactctgg

SEQ ID NO: 298270 - DNA, 33 bp, Homo sapien
gctgttgcaatatcacggcattggtaactctgg

SEQ ID NO: 298271 - DNA, 33 bp, Homo sapien
gaagtatgttctcaaaatttagtcaatgggatg

SEQ ID NO: 298272 - DNA, 33 bp, Homo sapien
gaagtatgttctcaaattttagtcaatgggatg

SEQ ID NO: 298273 - DNA, 33 bp, Homo sapien
tttgttcttctctctccgaaacttacatatctc

SEQ ID NO: 298274 - DNA, 33 bp, Homo sapien
tttgttcttctctctctgaaacttacatatctc

SEQ ID NO: 298275 - DNA, 33 bp, Homo sapien
ttttaaagatccattccattttacctgacccac

SEQ ID NO: 298276 - DNA, 33 bp, Homo sapien
ttttaaagatccattctattttacctgacccac

SEQ ID NO: 298277 - DNA, 33 bp, Homo sapien
aattatctatcacttacacgaattctctttgga

SEQ ID NO: 298278 - DNA, 33 bp, Homo sapien
aattatctatcacttatacgaattctctttgga

SEQ ID NO: 298279 - DNA, 33 bp, Homo sapien
tgcctattctgattaaactatatcctatcataa

SEQ ID NO: 298280 - DNA, 33 bp, Homo sapien
tgcctattctgattaagctatatcctatcataa

SEQ ID NO: 298281 - DNA, 33 bp, Homo sapien
tttacatctacttaagaagaagacgaggaaact

SEQ ID NO: 298282 - DNA, 33 bp, Homo sapien
tttacatctacttaagcagaagacgaggaaact

SEQ ID NO: 298283 - DNA, 33 bp, Homo sapien
ccccagaccctcaaataaaggcagatttttcag

SEQ ID NO: 298284 - DNA, 33 bp, Homo sapien
ccccagaccctcaaatcaaggcagatttttcag

SEQ ID NO: 298285 - DNA, 33 bp, Homo sapien
ttcacttcttgtttcaacactgccctacttttg

SEQ ID NO: 298286 - DNA, 33 bp, Homo sapien
ttcacttcttgtttcagcactgccctacttttg

SEQ ID NO: 298287 - DNA, 33 bp, Homo sapien
gacagaagcttttgcaactcagaaagtttaacc

SEQ ID NO: 298288 - DNA, 33 bp, Homo sapien
gacagaagcttttgcatctcagaaagtttaacc

SEQ ID NO: 298289 - DNA, 33 bp, Homo sapien
aatgctcagtcagaaaagacacctctttaacct

SEQ ID NO: 298290 - DNA, 33 bp, Homo sapien
aatgctcagtcagaaaggacacctctttaacct

SEQ ID NO: 298291 - DNA, 33 bp, Homo sapien
gttttcattcttcttaaattcagcctcaaaacc

SEQ ID NO: 298292 - DNA, 33 bp, Homo sapien
gttttcattcttcttacattcagcctcaaaacc

SEQ ID NO: 298293 - DNA, 33 bp, Homo sapien
gtgggttgacatgaaaaaacagaagtgtccaca

SEQ ID NO: 298294 - DNA, 33 bp, Homo sapien
gtgggttgacatgaaacaacagaagtgtccaca

SEQ ID NO: 298295 - DNA, 33 bp, Homo sapien
tgcaaaccaaccgatacagagcccatactccaa

SEQ ID NO: 298296 - DNA, 33 bp, Homo sapien
tgcaaaccaaccgatatagagcccatactccaa

SEQ ID NO: 298297 - DNA, 33 bp, Homo sapien
ctactgtcaatagtaacggcaaaggcctattat

SEQ ID NO: 298298 - DNA, 33 bp, Homo sapien
ctactgtcaatagtaatggcaaaggcctattat

SEQ ID NO: 298299 - DNA, 33 bp, Homo sapien
tgagtgctgagaggtagccatgctctggtttgc

SEQ ID NO: 298300 - DNA, 33 bp, Homo sapien
tgagtgctgagaggtatccatgctctggtttgc

SEQ ID NO: 298301 - DNA, 33 bp, Homo sapien
catttcaaaatctgacactaagttttatttact

SEQ ID NO: 298302 - DNA, 33 bp, Homo sapien
catttcaaaatctgacgctaagttttatttact

SEQ ID NO: 298303 - DNA, 33 bp, Homo sapien
gattctaaatgtacccaccctgatagtgaaggg

SEQ ID NO: 298304 - DNA, 33 bp, Homo sapien
gattctaaatgtacccgccctgatagtgaaggg

SEQ ID NO: 298305 - DNA, 33 bp, Homo sapien
ctgcaaggtatagccacacatttgacctgaagt

SEQ ID NO: 298306 - DNA, 33 bp, Homo sapien
ctgcaaggtatagccatacatttgacctgaagt

SEQ ID NO: 298307 - DNA, 33 bp, Homo sapien
aagcagttacttcgacccctctttgtgaaccac

SEQ ID NO: 298308 - DNA, 33 bp, Homo sapien
aagcagttacttcgactcctctttgtgaaccac

SEQ ID NO: 298309 - DNA, 33 bp, Homo sapien
gctaatgaagcataacacatgacctggtaactg

SEQ ID NO: 298310 - DNA, 33 bp, Homo sapien
gctaatgaagcataacgcatgacctggtaactg

SEQ ID NO: 298311 - DNA, 33 bp, Homo sapien
cattgatctttatgccaataatggagagctggt

SEQ ID NO: 298312 - DNA, 33 bp, Homo sapien
cattgatctttatgccgataatggagagctggt

SEQ ID NO: 298313 - DNA, 33 bp, Homo sapien
ggggccctgcaatcaacagagatctgtgtttct

SEQ ID NO: 298314 - DNA, 33 bp, Homo sapien
ggggccctgcaatcaatagagatctgtgtttct

SEQ ID NO: 298315 - DNA, 33 bp, Homo sapien
tttttcattgaactccagagcttttgtggcttg

SEQ ID NO: 298316 - DNA, 33 bp, Homo sapien
tttttcattgaactccggagcttttgtggcttg

SEQ ID NO: 298317 - DNA, 33 bp, Homo sapien
atgtacaagaaggagaagacttcaccacgtact

SEQ ID NO: 298318 - DNA, 33 bp, Homo sapien
atgtacaagaaggagaggacttcaccacgtact

SEQ ID NO: 298319 - DNA, 33 bp, Homo sapien
atcggtggattttaacaaattgtgatacagata

SEQ ID NO: 298320 - DNA, 33 bp, Homo sapien
atcggtggattttaacgaattgtgatacagata

SEQ ID NO: 298321 - DNA, 33 bp, Homo sapien
gacaacagtcaacacacgattccagggacctct

SEQ ID NO: 298322 - DNA, 33 bp, Homo sapien
gacaacagtcaacacatgattccagggacctct

SEQ ID NO: 298323 - DNA, 33 bp, Homo sapien
tctacattctagaaaacggaagtgaagttcaaa

SEQ ID NO: 298324 - DNA, 33 bp, Homo sapien
tctacattctagaaaatggaagtgaagttcaaa

SEQ ID NO: 298325 - DNA, 33 bp, Homo sapien
tctttggtctttataactaacagcaatgatatt

SEQ ID NO: 298326 - DNA, 33 bp, Homo sapien
tctttggtctttataattaacagcaatgatatt

SEQ ID NO: 298327 - DNA, 33 bp, Homo sapien
taaaaataaatttaaacttgatgctcacttatt

SEQ ID NO: 298328 - DNA, 33 bp, Homo sapien
taaaaataaatttaaagttgatgctcacttatt

SEQ ID NO: 298329 - DNA, 33 bp, Homo sapien
aaaaatcagtagttcaatagcacagtatggtga

SEQ ID NO: 298330 - DNA, 33 bp, Homo sapien
aaaaatcagtagttcagtagcacagtatggtga

SEQ ID NO: 298331 - DNA, 33 bp, Homo sapien
tagatgcaattttaccaagacaaatgcttagag

SEQ ID NO: 298332 - DNA, 33 bp, Homo sapien
tagatgcaattttaccgagacaaatgcttagag

SEQ ID NO: 298333 - DNA, 33 bp, Homo sapien
atctatactgaacagacgggaaatcaagtcctt

SEQ ID NO: 298334 - DNA, 33 bp, Homo sapien
atctatactgaacagatgggaaatcaagtcctt

SEQ ID NO: 298335 - DNA, 33 bp, Homo sapien
cctgaattctataccaataaaaatatcacaaag

SEQ ID NO: 298336 - DNA, 33 bp, Homo sapien
cctgaattctataccagtaaaaatatcacaaag

SEQ ID NO: 298337 - DNA, 33 bp, Homo sapien
gcagacctgctataaacgaagtcctaaaggaag

SEQ ID NO: 298338 - DNA, 33 bp, Homo sapien
gcagacctgctataaatgaagtcctaaaggaag

SEQ ID NO: 298339 - DNA, 33 bp, Homo sapien
taattggaacaactgccgacaggatgatcatga

SEQ ID NO: 298340 - DNA, 33 bp, Homo sapien
taattggaacaactgctgacaggatgatcatga

SEQ ID NO: 298341 - DNA, 33 bp, Homo sapien
ttcttcattcaacacacaggtgcttcagagata

SEQ ID NO: 298342 - DNA, 33 bp, Homo sapien
ttcttcattcaacacagaggtgcttcagagata

SEQ ID NO: 298343 - DNA, 33 bp, Homo sapien
tcatagggctatcacaaggtagcagcctcattt

SEQ ID NO: 298344 - DNA, 33 bp, Homo sapien
tcatagggctatcacacggtagcagcctcattt

SEQ ID NO: 298345 - DNA, 33 bp, Homo sapien
agccagttgaaggaaacatacataaaacacact

SEQ ID NO: 298346 - DNA, 33 bp, Homo sapien
agccagttgaaggaaagatacataaaacacact

SEQ ID NO: 298347 - DNA, 33 bp, Homo sapien
aaacaggtgaaggaagaagaaacacacggagga

SEQ ID NO: 298348 - DNA, 33 bp, Homo sapien
aaacaggtgaaggaaggagaaacacacggagga

SEQ ID NO: 298349 - DNA, 33 bp, Homo sapien
tatactcttagtctgcaagagaaagtgctcctg

SEQ ID NO: 298350 - DNA, 33 bp, Homo sapien
tatactcttagtctgccagagaaagtgctcctg

SEQ ID NO: 298351 - DNA, 33 bp, Homo sapien
aaaaaattctcatcagaaagaaattacttataa

SEQ ID NO: 298352 - DNA, 33 bp, Homo sapien
aaaaaattctcatcaggaagaaattacttataa

SEQ ID NO: 298353 - DNA, 33 bp, Homo sapien
agggacttgtcataaaaactgaataaggccaag

SEQ ID NO: 298354 - DNA, 33 bp, Homo sapien
agggacttgtcataaatactgaataaggccaag

SEQ ID NO: 298355 - DNA, 33 bp, Homo sapien
actcagaaaagttaaaatgcctctattaaaagt

SEQ ID NO: 298356 - DNA, 33 bp, Homo sapien
actcagaaaagttaaactgcctctattaaaagt

SEQ ID NO: 298357 - DNA, 33 bp, Homo sapien
ggtgatatataggttgacttagctttgttcatc

SEQ ID NO: 298358 - DNA, 33 bp, Homo sapien
ggtgatatataggttggcttagctttgttcatc

SEQ ID NO: 298359 - DNA, 33 bp, Homo sapien
gacagggatgagattgaatgtagtattcctttt

SEQ ID NO: 298360 - DNA, 33 bp, Homo sapien
gacagggatgagattggatgtagtattcctttt

SEQ ID NO: 298361 - DNA, 33 bp, Homo sapien
tgaaggtcctgatataaaatgttaagaagttga

SEQ ID NO: 298362 - DNA, 33 bp, Homo sapien
tgaaggtcctgatatacaatgttaagaagttga

SEQ ID NO: 298363 - DNA, 33 bp, Homo sapien
tgcatctattgttttcaagtctaagacacatat

SEQ ID NO: 298364 - DNA, 33 bp, Homo sapien
tgcatctattgttttcgagtctaagacacatat

SEQ ID NO: 298365 - DNA, 33 bp, Homo sapien
aacagaagggtcatgaaaaaatatctgcttcat

SEQ ID NO: 298366 - DNA, 33 bp, Homo sapien
aacagaagggtcatgacaaaatatctgcttcat

SEQ ID NO: 298367 - DNA, 33 bp, Homo sapien
actgtgtctctgtgccacagaagtaggttcctg

SEQ ID NO: 298368 - DNA, 33 bp, Homo sapien
actgtgtctctgtgccgcagaagtaggttcctg

SEQ ID NO: 298369 - DNA, 33 bp, Homo sapien
ttcatttgcttcaacacataacacaaaaagcaa

SEQ ID NO: 298370 - DNA, 33 bp, Homo sapien
ttcatttgcttcaacatataacacaaaaagcaa

SEQ ID NO: 298371 - DNA, 33 bp, Homo sapien
ttaaatcatatcctgcccatacttgcacagact

SEQ ID NO: 298372 - DNA, 33 bp, Homo sapien
ttaaatcatatcctgctcatacttgcacagact

SEQ ID NO: 298373 - DNA, 33 bp, Homo sapien
tgtgagcttccagaaaacaactaaaactattca

SEQ ID NO: 298374 - DNA, 33 bp, Homo sapien
tgtgagcttccagaaagcaactaaaactattca

SEQ ID NO: 298375 - DNA, 33 bp, Homo sapien
gttaggttgtgagtcacggtagtaaatttggac

SEQ ID NO: 298376 - DNA, 33 bp, Homo sapien
gttaggttgtgagtcatggtagtaaatttggac

SEQ ID NO: 298377 - DNA, 33 bp, Homo sapien
ataattgaaatacctccctcctattcagtctga

SEQ ID NO: 298378 - DNA, 33 bp, Homo sapien
ataattgaaatacctctctcctattcagtctga

SEQ ID NO: 298379 - DNA, 33 bp, Homo sapien
gagattacagggcaaacaagtaggctggactcc

SEQ ID NO: 298380 - DNA, 33 bp, Homo sapien
gagattacagggcaaataagtaggctggactcc

SEQ ID NO: 298381 - DNA, 33 bp, Homo sapien
taattggacgaattggcatgcagacttaatatt

SEQ ID NO: 298382 - DNA, 33 bp, Homo sapien
taattggacgaattggtatgcagacttaatatt

SEQ ID NO: 298383 - DNA, 33 bp, Homo sapien
ggccaacatagccaaactcttctaagccatgag

SEQ ID NO: 298384 - DNA, 33 bp, Homo sapien
ggccaacatagccaaattcttctaagccatgag

SEQ ID NO: 298385 - DNA, 33 bp, Homo sapien
agaaataattcaaagccccatctgtataactgt

SEQ ID NO: 298386 - DNA, 33 bp, Homo sapien
agaaataattcaaagctccatctgtataactgt

SEQ ID NO: 298387 - DNA, 33 bp, Homo sapien
agtggagtttaacagacagagacaaagatagag

SEQ ID NO: 298388 - DNA, 33 bp, Homo sapien
agtggagtttaacagatagagacaaagatagag

SEQ ID NO: 298389 - DNA, 33 bp, Homo sapien
aatggcttgaatgacccctatttctatgccact

SEQ ID NO: 298390 - DNA, 33 bp, Homo sapien
aatggcttgaatgacctctatttctatgccact

SEQ ID NO: 298391 - DNA, 33 bp, Homo sapien
agaaaatgtttggcaacgtgataagaggaaaag

SEQ ID NO: 298392 - DNA, 33 bp, Homo sapien
agaaaatgtttggcaatgtgataagaggaaaag

SEQ ID NO: 298393 - DNA, 33 bp, Homo sapien
ttgtggggacgaagggaaagaaactgaaaataa

SEQ ID NO: 298394 - DNA, 33 bp, Homo sapien
ttgtggggacgaaggggaagaaactgaaaataa

SEQ ID NO: 298395 - DNA, 33 bp, Homo sapien
ctggaagtttaaaatcaagatatcacatggcct

SEQ ID NO: 298396 - DNA, 33 bp, Homo sapien
ctggaagtttaaaatcgagatatcacatggcct

SEQ ID NO: 298397 - DNA, 33 bp, Homo sapien
actgctcagtttggtacaaccagaaaggacagc

SEQ ID NO: 298398 - DNA, 33 bp, Homo sapien
actgctcagtttggtataaccagaaaggacagc

SEQ ID NO: 298399 - DNA, 33 bp, Homo sapien
tcaatgtttagctcccacatagaagtgagaaca

SEQ ID NO: 298400 - DNA, 33 bp, Homo sapien
tcaatgtttagctcccgcatagaagtgagaaca

SEQ ID NO: 298401 - DNA, 33 bp, Homo sapien
tgtgagcaaagcctagcatctttgtttggactg

SEQ ID NO: 298402 - DNA, 33 bp, Homo sapien
tgtgagcaaagcctaggatctttgtttggactg

SEQ ID NO: 298403 - DNA, 33 bp, Homo sapien
aaaggataccatgctacgtgctataaacaaaat

SEQ ID NO: 298404 - DNA, 33 bp, Homo sapien
aaaggataccatgctaggtgctataaacaaaat

SEQ ID NO: 298405 - DNA, 33 bp, Homo sapien
atgtttggatactggtaaagttcttaatatgga

SEQ ID NO: 298406 - DNA, 33 bp, Homo sapien
atgtttggatactggtgaagttcttaatatgga

SEQ ID NO: 298407 - DNA, 33 bp, Homo sapien
aattcacataaggaaacagcatctgagcaacca

SEQ ID NO: 298408 - DNA, 33 bp, Homo sapien
aattcacataaggaaagagcatctgagcaacca

SEQ ID NO: 298409 - DNA, 33 bp, Homo sapien
ttccaaagtagttacaatcagaatgccatttgt

SEQ ID NO: 298410 - DNA, 33 bp, Homo sapien
ttccaaagtagttacagtcagaatgccatttgt

SEQ ID NO: 298411 - DNA, 33 bp, Homo sapien
taagaaaccagatttgcaatacagacttttctg

SEQ ID NO: 298412 - DNA, 33 bp, Homo sapien
taagaaaccagatttgtaatacagacttttctg

SEQ ID NO: 298413 - DNA, 33 bp, Homo sapien
aggtcccagggtaagtaaaatctcgcatcaatt

SEQ ID NO: 298414 - DNA, 33 bp, Homo sapien
aggtcccagggtaagtgaaatctcgcatcaatt

SEQ ID NO: 298415 - DNA, 33 bp, Homo sapien
gcatattgctgcctgaagaaccattctgtttta

SEQ ID NO: 298416 - DNA, 33 bp, Homo sapien
gcatattgctgcctgaggaaccattctgtttta

SEQ ID NO: 298417 - DNA, 33 bp, Homo sapien
gaacaacaaggaagagaaatctattttgttgaa

SEQ ID NO: 298418 - DNA, 33 bp, Homo sapien
gaacaacaaggaagaggaatctattttgttgaa

SEQ ID NO: 298419 - DNA, 33 bp, Homo sapien
ctttcactgaataatactaccaaaagctgtttt

SEQ ID NO: 298420 - DNA, 33 bp, Homo sapien
ctttcactgaataatattaccaaaagctgtttt

SEQ ID NO: 298421 - DNA, 33 bp, Homo sapien
gacaaagaacaatttacgagaaagaaaggagaa

SEQ ID NO: 298422 - DNA, 33 bp, Homo sapien
gacaaagaacaatttaggagaaagaaaggagaa

SEQ ID NO: 298423 - DNA, 33 bp, Homo sapien
tagcctcttttccacaatggtttttagttttga

SEQ ID NO: 298424 - DNA, 33 bp, Homo sapien
tagcctcttttccacagtggtttttagttttga

SEQ ID NO: 298425 - DNA, 33 bp, Homo sapien
tcaactggcgacagccacaatgcaaggttcctt

SEQ ID NO: 298426 - DNA, 33 bp, Homo sapien
tcaactggcgacagcctcaatgcaaggttcctt

SEQ ID NO: 298427 - DNA, 33 bp, Homo sapien
ggcctaaatgggacagaatcacaatcacatttg

SEQ ID NO: 298428 - DNA, 33 bp, Homo sapien
ggcctaaatgggacaggatcacaatcacatttg

SEQ ID NO: 298429 - DNA, 33 bp, Homo sapien
actgttctaacaggaacaacttgtatgcctcct

SEQ ID NO: 298430 - DNA, 33 bp, Homo sapien
actgttctaacaggaataacttgtatgcctcct

SEQ ID NO: 298431 - DNA, 33 bp, Homo sapien
actgcattagcaagtagcttcaacacaatctta

SEQ ID NO: 298432 - DNA, 33 bp, Homo sapien
actgcattagcaagtatcttcaacacaatctta

SEQ ID NO: 298433 - DNA, 33 bp, Homo sapien
gatagatttgctagggccagggctttacccaag

SEQ ID NO: 298434 - DNA, 33 bp, Homo sapien
gatagatttgctagggtcagggctttacccaag

SEQ ID NO: 298435 - DNA, 33 bp, Homo sapien
gaacagtgaattttggaaaaaactgttttgatc

SEQ ID NO: 298436 - DNA, 33 bp, Homo sapien
gaacagtgaattttggcaaaaactgttttgatc

SEQ ID NO: 298437 - DNA, 33 bp, Homo sapien
taactgccgaacaatcacctgatgactcctggt

SEQ ID NO: 298438 - DNA, 33 bp, Homo sapien
taactgccgaacaatcgcctgatgactcctggt

SEQ ID NO: 298439 - DNA, 33 bp, Homo sapien
tcctaagattttatacactgacctacctccagc

SEQ ID NO: 298440 - DNA, 33 bp, Homo sapien
tcctaagattttatacgctgacctacctccagc

SEQ ID NO: 298441 - DNA, 33 bp, Homo sapien
cactcctgttctgaaacttgccttggtctttca

SEQ ID NO: 298442 - DNA, 33 bp, Homo sapien
cactcctgttctgaaatttgccttggtctttca

SEQ ID NO: 298443 - DNA, 33 bp, Homo sapien
ttaaatctacttataaactggaagctcctcact

SEQ ID NO: 298444 - DNA, 33 bp, Homo sapien
ttaaatctacttataagctggaagctcctcact

SEQ ID NO: 298445 - DNA, 33 bp, Homo sapien
tggaattaataggaaacgtctgtattgcgataa

SEQ ID NO: 298446 - DNA, 33 bp, Homo sapien
tggaattaataggaaatgtctgtattgcgataa

SEQ ID NO: 298447 - DNA, 33 bp, Homo sapien
actatcacaccatccacgaaggaaagatgtttt

SEQ ID NO: 298448 - DNA, 33 bp, Homo sapien
actatcacaccatccatgaaggaaagatgtttt

SEQ ID NO: 298449 - DNA, 33 bp, Homo sapien
tggagcttcctatacaaactagagagtggtggc

SEQ ID NO: 298450 - DNA, 33 bp, Homo sapien
tggagcttcctatacagactagagagtggtggc

SEQ ID NO: 298451 - DNA, 33 bp, Homo sapien
ttctaccagtgcaaaacggtcaggacaaggatt

SEQ ID NO: 298452 - DNA, 33 bp, Homo sapien
ttctaccagtgcaaaagggtcaggacaaggatt

SEQ ID NO: 298453 - DNA, 33 bp, Homo sapien
ttcccctggtctgctaagggcggacactgattg

SEQ ID NO: 298454 - DNA, 33 bp, Homo sapien
ttcccctggtctgctatgggcggacactgattg

SEQ ID NO: 298455 - DNA, 33 bp, Homo sapien
aaatttggatctttgactacttaacaagagaac

SEQ ID NO: 298456 - DNA, 33 bp, Homo sapien
aaatttggatctttgattacttaacaagagaac

SEQ ID NO: 298457 - DNA, 33 bp, Homo sapien
ttccttttgccaattacaggtaaacgcagtccc

SEQ ID NO: 298458 - DNA, 33 bp, Homo sapien
ttccttttgccaattagaggtaaacgcagtccc

SEQ ID NO: 298459 - DNA, 33 bp, Homo sapien
atcatttgtgccccaactgtcagcatcatgcaa

SEQ ID NO: 298460 - DNA, 33 bp, Homo sapien
atcatttgtgccccaattgtcagcatcatgcaa

SEQ ID NO: 298461 - DNA, 33 bp, Homo sapien
tgtagccaccaaagaaatactgaggatcctttc

SEQ ID NO: 298462 - DNA, 33 bp, Homo sapien
tgtagccaccaaagaagtactgaggatcctttc

SEQ ID NO: 298463 - DNA, 33 bp, Homo sapien
aaaagatgctgttttaccttcttaactgtggaa

SEQ ID NO: 298464 - DNA, 33 bp, Homo sapien
aaaagatgctgttttatcttcttaactgtggaa

SEQ ID NO: 298465 - DNA, 33 bp, Homo sapien
aagattcctaaccatgcatttcctgagaatatg

SEQ ID NO: 298466 - DNA, 33 bp, Homo sapien
aagattcctaaccatgtatttcctgagaatatg

SEQ ID NO: 298467 - DNA, 33 bp, Homo sapien
aagagactagttcacaccaaaacagatgagaca

SEQ ID NO: 298468 - DNA, 33 bp, Homo sapien
aagagactagttcacatcaaaacagatgagaca

SEQ ID NO: 298469 - DNA, 33 bp, Homo sapien
ccagtaggatccaagggagtaaatcatctggtg

SEQ ID NO: 298470 - DNA, 33 bp, Homo sapien
ccagtaggatccaaggtagtaaatcatctggtg

SEQ ID NO: 298471 - DNA, 33 bp, Homo sapien
gttgtttcaagtggaacggtaaatctggtccct

SEQ ID NO: 298472 - DNA, 33 bp, Homo sapien
gttgtttcaagtggaatggtaaatctggtccct

SEQ ID NO: 298473 - DNA, 33 bp, Homo sapien
tcataagacagaatacacgagaggagagagggg

SEQ ID NO: 298474 - DNA, 33 bp, Homo sapien
tcataagacagaatacgcgagaggagagagggg

SEQ ID NO: 298475 - DNA, 33 bp, Homo sapien
tgactggagaggattgaaaacatatgaagcagt

SEQ ID NO: 298476 - DNA, 33 bp, Homo sapien
tgactggagaggattggaaacatatgaagcagt

SEQ ID NO: 298477 - DNA, 33 bp, Homo sapien
gtaatatactgtcatcaaggtcccctaacagag

SEQ ID NO: 298478 - DNA, 33 bp, Homo sapien
gtaatatactgtcatcgaggtcccctaacagag

SEQ ID NO: 298479 - DNA, 33 bp, Homo sapien
ccctcacccacgaacaagttaaaagccagagct

SEQ ID NO: 298480 - DNA, 33 bp, Homo sapien
ccctcacccacgaacaggttaaaagccagagct

SEQ ID NO: 298481 - DNA, 33 bp, Homo sapien
ttttgtcatcaaaccaagcagttgatattctct

SEQ ID NO: 298482 - DNA, 33 bp, Homo sapien
ttttgtcatcaaaccaggcagttgatattctct

SEQ ID NO: 298483 - DNA, 33 bp, Homo sapien
cagttctttccaaaagccaaggtgaatcctctg

SEQ ID NO: 298484 - DNA, 33 bp, Homo sapien
cagttctttccaaaaggcaaggtgaatcctctg

SEQ ID NO: 298485 - DNA, 33 bp, Homo sapien
ctgggtgtgggagtgaaggcatccctgttttat

SEQ ID NO: 298486 - DNA, 33 bp, Homo sapien
ctgggtgtgggagtgagggcatccctgttttat

SEQ ID NO: 298487 - DNA, 33 bp, Homo sapien
agacaggagactgaaaacatttaagtcccagga

SEQ ID NO: 298488 - DNA, 33 bp, Homo sapien
agacaggagactgaaaccatttaagtcccagga

SEQ ID NO: 298489 - DNA, 33 bp, Homo sapien
ggcatcaggccttaggcattatccactcaccga

SEQ ID NO: 298490 - DNA, 33 bp, Homo sapien
ggcatcaggccttaggtattatccactcaccga

SEQ ID NO: 298491 - DNA, 33 bp, Homo sapien
agtgttcaacaaagtaacgtaatgtgatcattt

SEQ ID NO: 298492 - DNA, 33 bp, Homo sapien
agtgttcaacaaagtagcgtaatgtgatcattt

SEQ ID NO: 298493 - DNA, 33 bp, Homo sapien
gaaagttttctggttggataatttctggtgaat

SEQ ID NO: 298494 - DNA, 33 bp, Homo sapien
gaaagttttctggttgtataatttctggtgaat

SEQ ID NO: 298495 - DNA, 33 bp, Homo sapien
tcatctgaatcctgtaggcaaactgctggactt

SEQ ID NO: 298496 - DNA, 33 bp, Homo sapien
tcatctgaatcctgtatgcaaactgctggactt

SEQ ID NO: 298497 - DNA, 33 bp, Homo sapien
aacctatcttttagaaatggaccttcacaaagc

SEQ ID NO: 298498 - DNA, 33 bp, Homo sapien
aacctatcttttagaagtggaccttcacaaagc

SEQ ID NO: 298499 - DNA, 33 bp, Homo sapien
agaggaaatgtgcttcaaagagtgcttggaaag

SEQ ID NO: 298500 - DNA, 33 bp, Homo sapien
agaggaaatgtgcttcgaagagtgcttggaaag

SEQ ID NO: 298501 - DNA, 33 bp, Homo sapien
acattcccccaacagcaaagacagccttcctgg

SEQ ID NO: 298502 - DNA, 33 bp, Homo sapien
acattcccccaacagcgaagacagccttcctgg

SEQ ID NO: 298503 - DNA, 33 bp, Homo sapien
gcagcttaggatggaaaacacataaaagttaga

SEQ ID NO: 298504 - DNA, 33 bp, Homo sapien
gcagcttaggatggaagacacataaaagttaga

SEQ ID NO: 298505 - DNA, 33 bp, Homo sapien
cagctaaaggctcaaccggaataagatacactt

SEQ ID NO: 298506 - DNA, 33 bp, Homo sapien
cagctaaaggctcaactggaataagatacactt

SEQ ID NO: 298507 - DNA, 33 bp, Homo sapien
agagaaaggagcaaacaaaacacagagaaggaa

SEQ ID NO: 298508 - DNA, 33 bp, Homo sapien
agagaaaggagcaaaccaaacacagagaaggaa

SEQ ID NO: 298509 - DNA, 33 bp, Homo sapien
gagtgtttagtgtctacagagagcttaaatttt

SEQ ID NO: 298510 - DNA, 33 bp, Homo sapien
gagtgtttagtgtctatagagagcttaaatttt

SEQ ID NO: 298511 - DNA, 33 bp, Homo sapien
ctatagctctttgaaaattgccaaggtcaatct

SEQ ID NO: 298512 - DNA, 33 bp, Homo sapien
ctatagctctttgaaagttgccaaggtcaatct

SEQ ID NO: 298513 - DNA, 33 bp, Homo sapien
aatgtgaccaccttgaatacttgctaatagtcc

SEQ ID NO: 298514 - DNA, 33 bp, Homo sapien
aatgtgaccaccttgagtacttgctaatagtcc

SEQ ID NO: 298515 - DNA, 33 bp, Homo sapien
taggaaatagggaccaaagaaagctagtgtttc

SEQ ID NO: 298516 - DNA, 33 bp, Homo sapien
taggaaatagggaccagagaaagctagtgtttc

SEQ ID NO: 298517 - DNA, 33 bp, Homo sapien
ttcctaaatggatgcaagaattaaatgtgtcct

SEQ ID NO: 298518 - DNA, 33 bp, Homo sapien
ttcctaaatggatgcacgaattaaatgtgtcct

SEQ ID NO: 298519 - DNA, 33 bp, Homo sapien
gatgctatgaaaattccgaaaagggtgagcact

SEQ ID NO: 298520 - DNA, 33 bp, Homo sapien
gatgctatgaaaattctgaaaagggtgagcact

SEQ ID NO: 298521 - DNA, 33 bp, Homo sapien
catggatttggataagactccagggaaagtgtg

SEQ ID NO: 298522 - DNA, 33 bp, Homo sapien
catggatttggataaggctccagggaaagtgtg

SEQ ID NO: 298523 - DNA, 33 bp, Homo sapien
atttaaaattgtgtcccctccattgacctcctc

SEQ ID NO: 298524 - DNA, 33 bp, Homo sapien
atttaaaattgtgtcctctccattgacctcctc

SEQ ID NO: 298525 - DNA, 33 bp, Homo sapien
aaagtgaggcacaaaaaaagagaaggccaggag

SEQ ID NO: 298526 - DNA, 33 bp, Homo sapien
aaagtgaggcacaaaagaagagaaggccaggag

SEQ ID NO: 298527 - DNA, 33 bp, Homo sapien
tgtctttgaagaaaaagtggtttggctagcagc

SEQ ID NO: 298528 - DNA, 33 bp, Homo sapien
tgtctttgaagaaaaattggtttggctagcagc

SEQ ID NO: 298529 - DNA, 33 bp, Homo sapien
agatttattctggtaccggataaggccagatta

SEQ ID NO: 298530 - DNA, 33 bp, Homo sapien
agatttattctggtactggataaggccagatta

SEQ ID NO: 298531 - DNA, 33 bp, Homo sapien
aatgtaaacaaatgaaactacttacagaaaaac

SEQ ID NO: 298532 - DNA, 33 bp, Homo sapien
aatgtaaacaaatgaatctacttacagaaaaac

SEQ ID NO: 298533 - DNA, 33 bp, Homo sapien
ctcatattaatatcaaacccagacaacatcttt

SEQ ID NO: 298534 - DNA, 33 bp, Homo sapien
ctcatattaatatcaagcccagacaacatcttt

SEQ ID NO: 298535 - DNA, 33 bp, Homo sapien
gcagagggcgctacaaggtcaaaaacaaagccg

SEQ ID NO: 298536 - DNA, 33 bp, Homo sapien
gcagagggcgctacaatgtcaaaaacaaagccg

SEQ ID NO: 298537 - DNA, 33 bp, Homo sapien
tgtagcaattccatccaagatccctgggacaga

SEQ ID NO: 298538 - DNA, 33 bp, Homo sapien
tgtagcaattccatccgagatccctgggacaga

SEQ ID NO: 298539 - DNA, 33 bp, Homo sapien
tagaacactacctataagttctgtagagctaat

SEQ ID NO: 298540 - DNA, 33 bp, Homo sapien
tagaacactacctatatgttctgtagagctaat

SEQ ID NO: 298541 - DNA, 33 bp, Homo sapien
ctttcatcttgtgtgacaattttagctttgagt

SEQ ID NO: 298542 - DNA, 33 bp, Homo sapien
ctttcatcttgtgtgataattttagctttgagt

SEQ ID NO: 298543 - DNA, 33 bp, Homo sapien
tcctcctgaatacacactctgggccaacccttt

SEQ ID NO: 298544 - DNA, 33 bp, Homo sapien
tcctcctgaatacacagtctgggccaacccttt

SEQ ID NO: 298545 - DNA, 33 bp, Homo sapien
tcaaattccgggtatgaactcaacttcggcaaa

SEQ ID NO: 298546 - DNA, 33 bp, Homo sapien
tcaaattccgggtatgcactcaacttcggcaaa

SEQ ID NO: 298547 - DNA, 33 bp, Homo sapien
actggtgttaggaatgcagcactccaaagggaa

SEQ ID NO: 298548 - DNA, 33 bp, Homo sapien
actggtgttaggaatggagcactccaaagggaa

SEQ ID NO: 298549 - DNA, 33 bp, Homo sapien
aggtatctcacagaaaatctgagcccgaaactc

SEQ ID NO: 298550 - DNA, 33 bp, Homo sapien
aggtatctcacagaaagtctgagcccgaaactc

SEQ ID NO: 298551 - DNA, 33 bp, Homo sapien
aaaacaccagtggatacgctacaattttggcat

SEQ ID NO: 298552 - DNA, 33 bp, Homo sapien
aaaacaccagtggatatgctacaattttggcat

SEQ ID NO: 298553 - DNA, 33 bp, Homo sapien
agcttccatgtgttaaactgataaaactctcta

SEQ ID NO: 298554 - DNA, 33 bp, Homo sapien
agcttccatgtgttaacctgataaaactctcta

SEQ ID NO: 298555 - DNA, 33 bp, Homo sapien
cccacagaaatgagaaaagatatacttacgtgg

SEQ ID NO: 298556 - DNA, 33 bp, Homo sapien
cccacagaaatgagaacagatatacttacgtgg

SEQ ID NO: 298557 - DNA, 33 bp, Homo sapien
tgttctatatgatttacggacataacagcccac

SEQ ID NO: 298558 - DNA, 33 bp, Homo sapien
tgttctatatgatttatggacataacagcccac

SEQ ID NO: 298559 - DNA, 33 bp, Homo sapien
ttttaaatgtatccccaaatctcctttgctatt

SEQ ID NO: 298560 - DNA, 33 bp, Homo sapien
ttttaaatgtatcccctaatctcctttgctatt

SEQ ID NO: 298561 - DNA, 33 bp, Homo sapien
actgagtaaaatcttaccagcagtgaaaagaag

SEQ ID NO: 298562 - DNA, 33 bp, Homo sapien
actgagtaaaatcttatcagcagtgaaaagaag

SEQ ID NO: 298563 - DNA, 33 bp, Homo sapien
gtcataatgcatctgaagctctagtgccttctt

SEQ ID NO: 298564 - DNA, 33 bp, Homo sapien
gtcataatgcatctgacgctctagtgccttctt

SEQ ID NO: 298565 - DNA, 33 bp, Homo sapien
gcttgtttgtagcaccaccataattcacacagt

SEQ ID NO: 298566 - DNA, 33 bp, Homo sapien
gcttgtttgtagcaccgccataattcacacagt

SEQ ID NO: 298567 - DNA, 33 bp, Homo sapien
acagcctgctatatcacggcagataagagatga

SEQ ID NO: 298568 - DNA, 33 bp, Homo sapien
acagcctgctatatcatggcagataagagatga

SEQ ID NO: 298569 - DNA, 33 bp, Homo sapien
ctttaagaggtgtggacgggaagaaacccacca

SEQ ID NO: 298570 - DNA, 33 bp, Homo sapien
ctttaagaggtgtggaggggaagaaacccacca

SEQ ID NO: 298571 - DNA, 33 bp, Homo sapien
tcgtgaactcaaaacaccaagttatttaaatga

SEQ ID NO: 298572 - DNA, 33 bp, Homo sapien
tcgtgaactcaaaacatcaagttatttaaatga

SEQ ID NO: 298573 - DNA, 33 bp, Homo sapien
agggggctgccagctgaaagagaaagtgttcgc

SEQ ID NO: 298574 - DNA, 33 bp, Homo sapien
agggggctgccagctgcaagagaaagtgttcgc

SEQ ID NO: 298575 - DNA, 33 bp, Homo sapien
aaagttacctttggaactggaacaaagctccaa

SEQ ID NO: 298576 - DNA, 33 bp, Homo sapien
aaagttacctttggaattggaacaaagctccaa

SEQ ID NO: 298577 - DNA, 33 bp, Homo sapien
ctaaattccaccctaaagaaagcatgcttatat

SEQ ID NO: 298578 - DNA, 33 bp, Homo sapien
ctaaattccaccctaacgaaagcatgcttatat

SEQ ID NO: 298579 - DNA, 33 bp, Homo sapien
ataaaaagtctaacaaaaatttatatgtgtatg

SEQ ID NO: 298580 - DNA, 33 bp, Homo sapien
ataaaaagtctaacaacaatttatatgtgtatg

SEQ ID NO: 298581 - DNA, 33 bp, Homo sapien
tcggcttcaagcagggaagggacacctaatttg

SEQ ID NO: 298582 - DNA, 33 bp, Homo sapien
tcggcttcaagcaggggagggacacctaatttg

SEQ ID NO: 298583 - DNA, 33 bp, Homo sapien
acccgaggtattgtgaagataaattctgagcac

SEQ ID NO: 298584 - DNA, 33 bp, Homo sapien
acccgaggtattgtgatgataaattctgagcac

SEQ ID NO: 298585 - DNA, 33 bp, Homo sapien
tcagccgcctcagttgaacttctcccctatgag

SEQ ID NO: 298586 - DNA, 33 bp, Homo sapien
tcagccgcctcagttgcacttctcccctatgag

SEQ ID NO: 298587 - DNA, 33 bp, Homo sapien
accaactggatcctacacgaatttatgattaag

SEQ ID NO: 298588 - DNA, 33 bp, Homo sapien
accaactggatcctacccgaatttatgattaag

SEQ ID NO: 298589 - DNA, 33 bp, Homo sapien
gggttttcctggccctcagcatagcctgctaag

SEQ ID NO: 298590 - DNA, 33 bp, Homo sapien
gggttttcctggcccttagcatagcctgctaag

SEQ ID NO: 298591 - DNA, 33 bp, Homo sapien
tgagccttaaattccagtagggaagagagccaa

SEQ ID NO: 298592 - DNA, 33 bp, Homo sapien
tgagccttaaattccattagggaagagagccaa

SEQ ID NO: 298593 - DNA, 33 bp, Homo sapien
tttctgtagcacttaactcatggtaagcaaaaa

SEQ ID NO: 298594 - DNA, 33 bp, Homo sapien
tttctgtagcacttaattcatggtaagcaaaaa

SEQ ID NO: 298595 - DNA, 33 bp, Homo sapien
ctgactcagtgtgttaccagttaggcagagagc

SEQ ID NO: 298596 - DNA, 33 bp, Homo sapien
ctgactcagtgtgttatcagttaggcagagagc

SEQ ID NO: 298597 - DNA, 33 bp, Homo sapien
gctacccaggtgattccagagcacagcaaattg

SEQ ID NO: 298598 - DNA, 33 bp, Homo sapien
gctacccaggtgattctagagcacagcaaattg

SEQ ID NO: 298599 - DNA, 33 bp, Homo sapien
gcagacctacattccacccaagctttgtcatga

SEQ ID NO: 298600 - DNA, 33 bp, Homo sapien
gcagacctacattccatccaagctttgtcatga

SEQ ID NO: 298601 - DNA, 33 bp, Homo sapien
gtatcttataagtcaaaacatacataaccccca

SEQ ID NO: 298602 - DNA, 33 bp, Homo sapien
gtatcttataagtcaacacatacataaccccca

SEQ ID NO: 298603 - DNA, 33 bp, Homo sapien
gatgcagttccaggaacgcactgtcataagagt

SEQ ID NO: 298604 - DNA, 33 bp, Homo sapien
gatgcagttccaggaatgcactgtcataagagt

SEQ ID NO: 298605 - DNA, 33 bp, Homo sapien
gttctttaatttggaaagcaaaaggttacattt

SEQ ID NO: 298606 - DNA, 33 bp, Homo sapien
gttctttaatttggaaggcaaaaggttacattt

SEQ ID NO: 298607 - DNA, 33 bp, Homo sapien
aaatccatgtgtccaacaagctgccatctccag

SEQ ID NO: 298608 - DNA, 33 bp, Homo sapien
aaatccatgtgtccaataagctgccatctccag

SEQ ID NO: 298609 - DNA, 33 bp, Homo sapien
cacatcaaagcaaaaccaactaggaactgtgag

SEQ ID NO: 298610 - DNA, 33 bp, Homo sapien
cacatcaaagcaaaacgaactaggaactgtgag

SEQ ID NO: 298611 - DNA, 33 bp, Homo sapien
tttataggaggcagaaagttaaatgattataac

SEQ ID NO: 298612 - DNA, 33 bp, Homo sapien
tttataggaggcagaacgttaaatgattataac

SEQ ID NO: 298613 - DNA, 33 bp, Homo sapien
agcccaaatgaggatcaacaaaaacagtacaat

SEQ ID NO: 298614 - DNA, 33 bp, Homo sapien
agcccaaatgaggatccacaaaaacagtacaat

SEQ ID NO: 298615 - DNA, 33 bp, Homo sapien
tgatactgcctcaaaaacagttctgttagttca

SEQ ID NO: 298616 - DNA, 33 bp, Homo sapien
tgatactgcctcaaaaccagttctgttagttca

SEQ ID NO: 298617 - DNA, 33 bp, Homo sapien
caaaggaaaggatttaggtaacatattataagt

SEQ ID NO: 298618 - DNA, 33 bp, Homo sapien
caaaggaaaggatttatgtaacatattataagt

SEQ ID NO: 298619 - DNA, 33 bp, Homo sapien
cagcagaaatctagtacaagagttagagcatct

SEQ ID NO: 298620 - DNA, 33 bp, Homo sapien
cagcagaaatctagtataagagttagagcatct

SEQ ID NO: 298621 - DNA, 33 bp, Homo sapien
tgcatatatacatcaaagggcatacacagaaat

SEQ ID NO: 298622 - DNA, 33 bp, Homo sapien
tgcatatatacatcaaggggcatacacagaaat

SEQ ID NO: 298623 - DNA, 33 bp, Homo sapien
gtattggtctgtcctcactacttcactgaatta

SEQ ID NO: 298624 - DNA, 33 bp, Homo sapien
gtattggtctgtcctcgctacttcactgaatta

SEQ ID NO: 298625 - DNA, 33 bp, Homo sapien
gcagttcgcaatctgacaggagtaagaaaaagt

SEQ ID NO: 298626 - DNA, 33 bp, Homo sapien
gcagttcgcaatctgataggagtaagaaaaagt

SEQ ID NO: 298627 - DNA, 33 bp, Homo sapien
tgttatcattgatgagcagaatggttttggccc

SEQ ID NO: 298628 - DNA, 33 bp, Homo sapien
tgttatcattgatgagtagaatggttttggccc

SEQ ID NO: 298629 - DNA, 33 bp, Homo sapien
gtatgaaggagaaaacaggatgagttatctgtg

SEQ ID NO: 298630 - DNA, 33 bp, Homo sapien
gtatgaaggagaaaacgggatgagttatctgtg

SEQ ID NO: 298631 - DNA, 33 bp, Homo sapien
aactagaccacctcccaacagcgctctcatttt

SEQ ID NO: 298632 - DNA, 33 bp, Homo sapien
aactagaccacctcccgacagcgctctcatttt

SEQ ID NO: 298633 - DNA, 33 bp, Homo sapien
agtcagctcattaccaaagaatttagagacaat

SEQ ID NO: 298634 - DNA, 33 bp, Homo sapien
agtcagctcattaccagagaatttagagacaat

SEQ ID NO: 298635 - DNA, 33 bp, Homo sapien
acaggctaaatccccaatctgtgttttcatagc

SEQ ID NO: 298636 - DNA, 33 bp, Homo sapien
acaggctaaatccccagtctgtgttttcatagc

SEQ ID NO: 298637 - DNA, 33 bp, Homo sapien
ccactgctataatatacggttttgcagttacat

SEQ ID NO: 298638 - DNA, 33 bp, Homo sapien
ccactgctataatatatggttttgcagttacat

SEQ ID NO: 298639 - DNA, 33 bp, Homo sapien
gaccgtggaaagataacgctgttcagaggaagt

SEQ ID NO: 298640 - DNA, 33 bp, Homo sapien
gaccgtggaaagataatgctgttcagaggaagt

SEQ ID NO: 298641 - DNA, 33 bp, Homo sapien
tttattctttaatatacctgtggcatccacagc

SEQ ID NO: 298642 - DNA, 33 bp, Homo sapien
tttattctttaatatatctgtggcatccacagc

SEQ ID NO: 298643 - DNA, 33 bp, Homo sapien
ctcacagaaatctccaaagaagactgagcctca

SEQ ID NO: 298644 - DNA, 33 bp, Homo sapien
ctcacagaaatctccatagaagactgagcctca

SEQ ID NO: 298645 - DNA, 33 bp, Homo sapien
acttgttcgtgactgcccactttcctgttttct

SEQ ID NO: 298646 - DNA, 33 bp, Homo sapien
acttgttcgtgactgctcactttcctgttttct

SEQ ID NO: 298647 - DNA, 33 bp, Homo sapien
aatcctccagtcagggaatactcgggcctttcc

SEQ ID NO: 298648 - DNA, 33 bp, Homo sapien
aatcctccagtcaggggatactcgggcctttcc

SEQ ID NO: 298649 - DNA, 33 bp, Homo sapien
ggacataaatgaagaccacttaaatgagcacag

SEQ ID NO: 298650 - DNA, 33 bp, Homo sapien
ggacataaatgaagactacttaaatgagcacag

SEQ ID NO: 298651 - DNA, 33 bp, Homo sapien
atattattaaataacacagatgacatgcaccca

SEQ ID NO: 298652 - DNA, 33 bp, Homo sapien
atattattaaataacatagatgacatgcaccca

SEQ ID NO: 298653 - DNA, 33 bp, Homo sapien
ggctgcatggcccttcaattcttacaatattca

SEQ ID NO: 298654 - DNA, 33 bp, Homo sapien
ggctgcatggcccttccattcttacaatattca

SEQ ID NO: 298655 - DNA, 33 bp, Homo sapien
ccctcatcctcttttcaaaaactcctcgaaccc

SEQ ID NO: 298656 - DNA, 33 bp, Homo sapien
ccctcatcctcttttcgaaaactcctcgaaccc

SEQ ID NO: 298657 - DNA, 33 bp, Homo sapien
caaactgctcagaaccaaagggatcttgttgat

SEQ ID NO: 298658 - DNA, 33 bp, Homo sapien
caaactgctcagaaccgaagggatcttgttgat

SEQ ID NO: 298659 - DNA, 33 bp, Homo sapien
acagtgatgccactagaaatgatgactatggtc

SEQ ID NO: 298660 - DNA, 33 bp, Homo sapien
acagtgatgccactaggaatgatgactatggtc

SEQ ID NO: 298661 - DNA, 33 bp, Homo sapien
atcttgaccatagtgcacattccttctgcaagt

SEQ ID NO: 298662 - DNA, 33 bp, Homo sapien
atcttgaccatagtgcgcattccttctgcaagt

SEQ ID NO: 298663 - DNA, 33 bp, Homo sapien
gtgactaagaagaatacggattggactaggaaa

SEQ ID NO: 298664 - DNA, 33 bp, Homo sapien
gtgactaagaagaatatggattggactaggaaa

SEQ ID NO: 298665 - DNA, 33 bp, Homo sapien
ggtagcaggagaggagaataaagcaccatccag

SEQ ID NO: 298666 - DNA, 33 bp, Homo sapien
ggtagcaggagaggagtataaagcaccatccag

SEQ ID NO: 298667 - DNA, 33 bp, Homo sapien
gtgccccatgtttggaggtttctcagaaagtgc

SEQ ID NO: 298668 - DNA, 33 bp, Homo sapien
gtgccccatgtttggatgtttctcagaaagtgc

SEQ ID NO: 298669 - DNA, 33 bp, Homo sapien
tggtggtggcagagacacatgaggtgaccaaaa

SEQ ID NO: 298670 - DNA, 33 bp, Homo sapien
tggtggtggcagagacccatgaggtgaccaaaa

SEQ ID NO: 298671 - DNA, 33 bp, Homo sapien
accaaagatgctcaataaaagcagcacagctga

SEQ ID NO: 298672 - DNA, 33 bp, Homo sapien
accaaagatgctcaattaaagcagcacagctga

SEQ ID NO: 298673 - DNA, 33 bp, Homo sapien
ggaacatctgggatacagggattagtgttccga

SEQ ID NO: 298674 - DNA, 33 bp, Homo sapien
ggaacatctgggatacggggattagtgttccga

SEQ ID NO: 298675 - DNA, 33 bp, Homo sapien
tcatatggagaaggacaggacaagatggcagaa

SEQ ID NO: 298676 - DNA, 33 bp, Homo sapien
tcatatggagaaggacgggacaagatggcagaa

SEQ ID NO: 298677 - DNA, 33 bp, Homo sapien
gcagaaacgcaagttacaaccactggaatcggt

SEQ ID NO: 298678 - DNA, 33 bp, Homo sapien
gcagaaacgcaagttataaccactggaatcggt

SEQ ID NO: 298679 - DNA, 33 bp, Homo sapien
cattgggagaaacataagaacagagattaaggt

SEQ ID NO: 298680 - DNA, 33 bp, Homo sapien
cattgggagaaacataggaacagagattaaggt

SEQ ID NO: 298681 - DNA, 33 bp, Homo sapien
gaaacatcatcaggaactaataggatgagtatt

SEQ ID NO: 298682 - DNA, 33 bp, Homo sapien
gaaacatcatcaggaagtaataggatgagtatt

SEQ ID NO: 298683 - DNA, 33 bp, Homo sapien
gaaatgctacataaatcacatgtcctcaaccac

SEQ ID NO: 298684 - DNA, 33 bp, Homo sapien
gaaatgctacataaattacatgtcctcaaccac

SEQ ID NO: 298685 - DNA, 33 bp, Homo sapien
tgtgtcaaacacccaccgaatccatctctcaga

SEQ ID NO: 298686 - DNA, 33 bp, Homo sapien
tgtgtcaaacacccactgaatccatctctcaga

SEQ ID NO: 298687 - DNA, 33 bp, Homo sapien
aagaaacttgttctaagtactacagaaaataca

SEQ ID NO: 298688 - DNA, 33 bp, Homo sapien
aagaaacttgttctaattactacagaaaataca

SEQ ID NO: 298689 - DNA, 33 bp, Homo sapien
tcattaatgtcttctcactctgcagggctgcct

SEQ ID NO: 298690 - DNA, 33 bp, Homo sapien
tcattaatgtcttctctctctgcagggctgcct

SEQ ID NO: 298691 - DNA, 33 bp, Homo sapien
accccagaagtatgccaacatataaaatcccaa

SEQ ID NO: 298692 - DNA, 33 bp, Homo sapien
accccagaagtatgccgacatataaaatcccaa

SEQ ID NO: 298693 - DNA, 33 bp, Homo sapien
gggtcttttccaagtgcactgtcttttctttcc

SEQ ID NO: 298694 - DNA, 33 bp, Homo sapien
gggtcttttccaagtgtactgtcttttctttcc

SEQ ID NO: 298695 - DNA, 33 bp, Homo sapien
tgaagaatgaattgcacccgtgttgggtttaga

SEQ ID NO: 298696 - DNA, 33 bp, Homo sapien
tgaagaatgaattgcatccgtgttgggtttaga

SEQ ID NO: 298697 - DNA, 33 bp, Homo sapien
taatagagccagggcaataggtgaccacaacac

SEQ ID NO: 298698 - DNA, 33 bp, Homo sapien
taatagagccagggcagtaggtgaccacaacac

SEQ ID NO: 298699 - DNA, 33 bp, Homo sapien
gaaataatggtgtcaccgaaaactgattgctgc

SEQ ID NO: 298700 - DNA, 33 bp, Homo sapien
gaaataatggtgtcactgaaaactgattgctgc

SEQ ID NO: 298701 - DNA, 33 bp, Homo sapien
aataccattaagtagaccaacatatgcattacg

SEQ ID NO: 298702 - DNA, 33 bp, Homo sapien
aataccattaagtagatcaacatatgcattacg

SEQ ID NO: 298703 - DNA, 33 bp, Homo sapien
ccaggtcatgtacaacacgctgggggattttaa

SEQ ID NO: 298704 - DNA, 33 bp, Homo sapien
ccaggtcatgtacaactcgctgggggattttaa

SEQ ID NO: 298705 - DNA, 33 bp, Homo sapien
tattgaacagggaaatcagtgtgcacttcagaa

SEQ ID NO: 298706 - DNA, 33 bp, Homo sapien
tattgaacagggaaatgagtgtgcacttcagaa

SEQ ID NO: 298707 - DNA, 33 bp, Homo sapien
actggtactggaaaaactgcttgggagtctaag

SEQ ID NO: 298708 - DNA, 33 bp, Homo sapien
actggtactggaaaaattgcttgggagtctaag

SEQ ID NO: 298709 - DNA, 33 bp, Homo sapien
tacatccaaatgtccaatcacagcagtgggagg

SEQ ID NO: 298710 - DNA, 33 bp, Homo sapien
tacatccaaatgtccagtcacagcagtgggagg

SEQ ID NO: 298711 - DNA, 33 bp, Homo sapien
tcactattctgacttccagtagcattgattagt

SEQ ID NO: 298712 - DNA, 33 bp, Homo sapien
tcactattctgacttctagtagcattgattagt

SEQ ID NO: 298713 - DNA, 33 bp, Homo sapien
ggtttacactcaaaaacagcctttctggaggag

SEQ ID NO: 298714 - DNA, 33 bp, Homo sapien
ggtttacactcaaaaatagcctttctggaggag

SEQ ID NO: 298715 - DNA, 33 bp, Homo sapien
aatgcagtgtagttaactggggaggtgagagca

SEQ ID NO: 298716 - DNA, 33 bp, Homo sapien
aatgcagtgtagttaattggggaggtgagagca

SEQ ID NO: 298717 - DNA, 33 bp, Homo sapien
actcaatctttacctaccttgacctcttagcag

SEQ ID NO: 298718 - DNA, 33 bp, Homo sapien
actcaatctttacctagcttgacctcttagcag

SEQ ID NO: 298719 - DNA, 33 bp, Homo sapien
gatagaacaaagtccaaatattatctatgcagt

SEQ ID NO: 298720 - DNA, 33 bp, Homo sapien
gatagaacaaagtccagatattatctatgcagt

SEQ ID NO: 298721 - DNA, 33 bp, Homo sapien
tagagagggggtttcacgatccgcccatcttag

SEQ ID NO: 298722 - DNA, 33 bp, Homo sapien
tagagagggggtttcatgatccgcccatcttag

SEQ ID NO: 298723 - DNA, 33 bp, Homo sapien
agattagctgctggtaaggtcagttcctaatgt

SEQ ID NO: 298724 - DNA, 33 bp, Homo sapien
agattagctgctggtagggtcagttcctaatgt

SEQ ID NO: 298725 - DNA, 33 bp, Homo sapien
taagcctcctgctatcaatccctcacatcagca

SEQ ID NO: 298726 - DNA, 33 bp, Homo sapien
taagcctcctgctatcgatccctcacatcagca

SEQ ID NO: 298727 - DNA, 33 bp, Homo sapien
tcctttgcaggccataagactagcccaactatg

SEQ ID NO: 298728 - DNA, 33 bp, Homo sapien
tcctttgcaggccataggactagcccaactatg

SEQ ID NO: 298729 - DNA, 33 bp, Homo sapien
aatacttatgtaatcacaactaccactggtaat

SEQ ID NO: 298730 - DNA, 33 bp, Homo sapien
aatacttatgtaatcagaactaccactggtaat

SEQ ID NO: 298731 - DNA, 33 bp, Homo sapien
ctatctgtttcaatacaagctggtagcatttct

SEQ ID NO: 298732 - DNA, 33 bp, Homo sapien
ctatctgtttcaatacgagctggtagcatttct

SEQ ID NO: 298733 - DNA, 33 bp, Homo sapien
tgatctgggctcagggaatgctccaaaaatgag

SEQ ID NO: 298734 - DNA, 33 bp, Homo sapien
tgatctgggctcagggtatgctccaaaaatgag

SEQ ID NO: 298735 - DNA, 33 bp, Homo sapien
aaggtgagtggagggaaaattcacaaacattca

SEQ ID NO: 298736 - DNA, 33 bp, Homo sapien
aaggtgagtggagggagaattcacaaacattca

SEQ ID NO: 298737 - DNA, 33 bp, Homo sapien
tgagaaacccaggccacgttagtcacctactca

SEQ ID NO: 298738 - DNA, 33 bp, Homo sapien
tgagaaacccaggccatgttagtcacctactca

SEQ ID NO: 298739 - DNA, 33 bp, Homo sapien
aaaggaccttttccaacggactcaatggcagtc

SEQ ID NO: 298740 - DNA, 33 bp, Homo sapien
aaaggaccttttccaatggactcaatggcagtc

SEQ ID NO: 298741 - DNA, 33 bp, Homo sapien
gaaccagttataggaactggcaaccattttgtt

SEQ ID NO: 298742 - DNA, 33 bp, Homo sapien
gaaccagttataggaattggcaaccattttgtt

SEQ ID NO: 298743 - DNA, 33 bp, Homo sapien
ttccctctggtgctaccccatttgaagcaattt

SEQ ID NO: 298744 - DNA, 33 bp, Homo sapien
ttccctctggtgctacgccatttgaagcaattt

SEQ ID NO: 298745 - DNA, 33 bp, Homo sapien
tatgacgtatgcagcaagttaatcacggccagg

SEQ ID NO: 298746 - DNA, 33 bp, Homo sapien
tatgacgtatgcagcaggttaatcacggccagg

SEQ ID NO: 298747 - DNA, 33 bp, Homo sapien
gtgagttccgatctgaaatgatacgtacatcgc

SEQ ID NO: 298748 - DNA, 33 bp, Homo sapien
gtgagttccgatctgagatgatacgtacatcgc

SEQ ID NO: 298749 - DNA, 33 bp, Homo sapien
atgtttcctagcatcacgaaaagataaacattt

SEQ ID NO: 298750 - DNA, 33 bp, Homo sapien
atgtttcctagcatcatgaaaagataaacattt

SEQ ID NO: 298751 - DNA, 33 bp, Homo sapien
tccaaatcttactaaaactcagaaagcagtgga

SEQ ID NO: 298752 - DNA, 33 bp, Homo sapien
tccaaatcttactaaagctcagaaagcagtgga

SEQ ID NO: 298753 - DNA, 33 bp, Homo sapien
gggtctggagtgcactgagaggaggaaggtggg

SEQ ID NO: 298754 - DNA, 33 bp, Homo sapien
gggtctggagtgcacttagaggaggaaggtggg

SEQ ID NO: 298755 - DNA, 33 bp, Homo sapien
agcgtctgtcccaataccaacaaaggcagcatg

SEQ ID NO: 298756 - DNA, 33 bp, Homo sapien
agcgtctgtcccaatatcaacaaaggcagcatg

SEQ ID NO: 298757 - DNA, 33 bp, Homo sapien
atgtgcagaatgaatgcaccaagagaaacagct

SEQ ID NO: 298758 - DNA, 33 bp, Homo sapien
atgtgcagaatgaatggaccaagagaaacagct

SEQ ID NO: 298759 - DNA, 33 bp, Homo sapien
agtaggcctgatagaaaattttagagctcaaag

SEQ ID NO: 298760 - DNA, 33 bp, Homo sapien
agtaggcctgatagaatattttagagctcaaag

SEQ ID NO: 298761 - DNA, 33 bp, Homo sapien
ccatgttaaaggatgactcaccaaaatgcattg

SEQ ID NO: 298762 - DNA, 33 bp, Homo sapien
ccatgttaaaggatgattcaccaaaatgcattg

SEQ ID NO: 298763 - DNA, 33 bp, Homo sapien
gacctggcctaagagaagtgacagggagacaca

SEQ ID NO: 298764 - DNA, 33 bp, Homo sapien
gacctggcctaagagaggtgacagggagacaca

SEQ ID NO: 298765 - DNA, 33 bp, Homo sapien
agaaaaaatttactaaatcctgtcttagttttc

SEQ ID NO: 298766 - DNA, 33 bp, Homo sapien
agaaaaaatttactaactcctgtcttagttttc

SEQ ID NO: 298767 - DNA, 33 bp, Homo sapien
tttgttagaatgttgaacaacccatgtgatagg

SEQ ID NO: 298768 - DNA, 33 bp, Homo sapien
tttgttagaatgttgagcaacccatgtgatagg

SEQ ID NO: 298769 - DNA, 33 bp, Homo sapien
ttctgtgggtttatgagatcctagcaacagaaa

SEQ ID NO: 298770 - DNA, 33 bp, Homo sapien
ttctgtgggtttatgatatcctagcaacagaaa

SEQ ID NO: 298771 - DNA, 33 bp, Homo sapien
acatacaaactcaaaaaaagtctgaagaagaga

SEQ ID NO: 298772 - DNA, 33 bp, Homo sapien
acatacaaactcaaaacaagtctgaagaagaga

SEQ ID NO: 298773 - DNA, 33 bp, Homo sapien
cagggatgtacaaatacgaagtgtacttatttc

SEQ ID NO: 298774 - DNA, 33 bp, Homo sapien
cagggatgtacaaatatgaagtgtacttatttc

SEQ ID NO: 298775 - DNA, 33 bp, Homo sapien
cactattgctttaacaaagacttggatttttcc

SEQ ID NO: 298776 - DNA, 33 bp, Homo sapien
cactattgctttaacacagacttggatttttcc

SEQ ID NO: 298777 - DNA, 33 bp, Homo sapien
gttctgggcaacatcacacctcccttattcctc

SEQ ID NO: 298778 - DNA, 33 bp, Homo sapien
gttctgggcaacatcatacctcccttattcctc

SEQ ID NO: 298779 - DNA, 33 bp, Homo sapien
gtctggaaggcagtcaacttcaaaggcatcaga

SEQ ID NO: 298780 - DNA, 33 bp, Homo sapien
gtctggaaggcagtcatcttcaaaggcatcaga

SEQ ID NO: 298781 - DNA, 33 bp, Homo sapien
aaattagaaggaaggacgttatgagatagtgaa

SEQ ID NO: 298782 - DNA, 33 bp, Homo sapien
aaattagaaggaaggaggttatgagatagtgaa

SEQ ID NO: 298783 - DNA, 33 bp, Homo sapien
gtatttgtaaatttgacgaagtgccccagtttt

SEQ ID NO: 298784 - DNA, 33 bp, Homo sapien
gtatttgtaaatttgatgaagtgccccagtttt

SEQ ID NO: 298785 - DNA, 33 bp, Homo sapien
aatgtggctcaccctaccttgctggtctgaggg

SEQ ID NO: 298786 - DNA, 33 bp, Homo sapien
aatgtggctcaccctatcttgctggtctgaggg

SEQ ID NO: 298787 - DNA, 33 bp, Homo sapien
gactgaggctttggaaatggagagaagagatgg

SEQ ID NO: 298788 - DNA, 33 bp, Homo sapien
gactgaggctttggaactggagagaagagatgg

SEQ ID NO: 298789 - DNA, 33 bp, Homo sapien
ggtttctgcaatctgaacctttctcaatatgtt

SEQ ID NO: 298790 - DNA, 33 bp, Homo sapien
ggtttctgcaatctgagcctttctcaatatgtt

SEQ ID NO: 298791 - DNA, 33 bp, Homo sapien
aatcaaaggctctccaaatctctcagttcctca

SEQ ID NO: 298792 - DNA, 33 bp, Homo sapien
aatcaaaggctctccacatctctcagttcctca

SEQ ID NO: 298793 - DNA, 33 bp, Homo sapien
atctagtcactgtttccagaataggattgttca

SEQ ID NO: 298794 - DNA, 33 bp, Homo sapien
atctagtcactgtttctagaataggattgttca

SEQ ID NO: 298795 - DNA, 33 bp, Homo sapien
aagtctgggagaggaaacaaggagataagcaaa

SEQ ID NO: 298796 - DNA, 33 bp, Homo sapien
aagtctgggagaggaaccaaggagataagcaaa

SEQ ID NO: 298797 - DNA, 33 bp, Homo sapien
gggagacagaggctcaaaaatcataaactttgc

SEQ ID NO: 298798 - DNA, 33 bp, Homo sapien
gggagacagaggctcagaaatcataaactttgc

SEQ ID NO: 298799 - DNA, 33 bp, Homo sapien
ttaaggaaatcactgcactatcttgtcaaaaat

SEQ ID NO: 298800 - DNA, 33 bp, Homo sapien
ttaaggaaatcactgcgctatcttgtcaaaaat

SEQ ID NO: 298801 - DNA, 33 bp, Homo sapien
atgttctcagcatcaaataaggttgggaaatac

SEQ ID NO: 298802 - DNA, 33 bp, Homo sapien
atgttctcagcatcaagtaaggttgggaaatac

SEQ ID NO: 298803 - DNA, 33 bp, Homo sapien
tgttttctttgcctatcagcgccttttggcagc

SEQ ID NO: 298804 - DNA, 33 bp, Homo sapien
tgttttctttgcctatgagcgccttttggcagc

SEQ ID NO: 298805 - DNA, 33 bp, Homo sapien
cttctgattggaagaacagtgaatgagattgag

SEQ ID NO: 298806 - DNA, 33 bp, Homo sapien
cttctgattggaagaatagtgaatgagattgag

SEQ ID NO: 298807 - DNA, 33 bp, Homo sapien
gaagcaaggaccccataatgaaaagcctcatgg

SEQ ID NO: 298808 - DNA, 33 bp, Homo sapien
gaagcaaggaccccatcatgaaaagcctcatgg

SEQ ID NO: 298809 - DNA, 33 bp, Homo sapien
aaggaaataaggaagaatacgcttgggaataag

SEQ ID NO: 298810 - DNA, 33 bp, Homo sapien
aaggaaataaggaagactacgcttgggaataag

SEQ ID NO: 298811 - DNA, 33 bp, Homo sapien
ctcacctagacactgcaaggaccaagccaagga

SEQ ID NO: 298812 - DNA, 33 bp, Homo sapien
ctcacctagacactgctaggaccaagccaagga

SEQ ID NO: 298813 - DNA, 33 bp, Homo sapien
tcagagagtcttgaagcccttgtcactttgggt

SEQ ID NO: 298814 - DNA, 33 bp, Homo sapien
tcagagagtcttgaaggccttgtcactttgggt

SEQ ID NO: 298815 - DNA, 33 bp, Homo sapien
gtcttggggtatgaccacaatctgtccaaaaaa

SEQ ID NO: 298816 - DNA, 33 bp, Homo sapien
gtcttggggtatgaccgcaatctgtccaaaaaa

SEQ ID NO: 298817 - DNA, 33 bp, Homo sapien
cccaaactacagaaaacaagagccattcaggaa

SEQ ID NO: 298818 - DNA, 33 bp, Homo sapien
cccaaactacagaaaataagagccattcaggaa

SEQ ID NO: 298819 - DNA, 33 bp, Homo sapien
ggtctcttgctaaaaccagtgcaaactgataac

SEQ ID NO: 298820 - DNA, 33 bp, Homo sapien
ggtctcttgctaaaactagtgcaaactgataac

SEQ ID NO: 298821 - DNA, 33 bp, Homo sapien
agatcaaattgggaaaaattgacttcttaacaa

SEQ ID NO: 298822 - DNA, 33 bp, Homo sapien
agatcaaattgggaaacattgacttcttaacaa

SEQ ID NO: 298823 - DNA, 33 bp, Homo sapien
aatacttcttctttccacctcatgactcctggt

SEQ ID NO: 298824 - DNA, 33 bp, Homo sapien
aatacttcttctttccgcctcatgactcctggt

SEQ ID NO: 298825 - DNA, 33 bp, Homo sapien
aaaagatgctcctatcactcaggaaatgccaaa

SEQ ID NO: 298826 - DNA, 33 bp, Homo sapien
aaaagatgctcctatcgctcaggaaatgccaaa

SEQ ID NO: 298827 - DNA, 33 bp, Homo sapien
aggggtttaatcataaaacagctgaacaaggag

SEQ ID NO: 298828 - DNA, 33 bp, Homo sapien
aggggtttaatcataagacagctgaacaaggag

SEQ ID NO: 298829 - DNA, 33 bp, Homo sapien
aggagtattaaagaagaagtgattttgcctgat

SEQ ID NO: 298830 - DNA, 33 bp, Homo sapien
aggagtattaaagaagcagtgattttgcctgat

SEQ ID NO: 298831 - DNA, 33 bp, Homo sapien
ttgccaggcctaagcaaacctactttgtctact

SEQ ID NO: 298832 - DNA, 33 bp, Homo sapien
ttgccaggcctaagcagacctactttgtctact

SEQ ID NO: 298833 - DNA, 33 bp, Homo sapien
gttaccattttcaaggacattagccagtaccta

SEQ ID NO: 298834 - DNA, 33 bp, Homo sapien
gttaccattttcaagggcattagccagtaccta

SEQ ID NO: 298835 - DNA, 33 bp, Homo sapien
tctcttccagaagacactggtagctcccctcat

SEQ ID NO: 298836 - DNA, 33 bp, Homo sapien
tctcttccagaagacattggtagctcccctcat

SEQ ID NO: 298837 - DNA, 33 bp, Homo sapien
gattggtttgactctcaattacctcagccagct

SEQ ID NO: 298838 - DNA, 33 bp, Homo sapien
gattggtttgactctcgattacctcagccagct

SEQ ID NO: 298839 - DNA, 33 bp, Homo sapien
tccttgaggaatcccaccaccaccagatttgcc

SEQ ID NO: 298840 - DNA, 33 bp, Homo sapien
tccttgaggaatcccatcaccaccagatttgcc

SEQ ID NO: 298841 - DNA, 33 bp, Homo sapien
ccctctaccacaggacacatatccctgttagca

SEQ ID NO: 298842 - DNA, 33 bp, Homo sapien
ccctctaccacaggacgcatatccctgttagca

SEQ ID NO: 298843 - DNA, 33 bp, Homo sapien
tcaagtgtcctaaaaccgaccccatgatcccag

SEQ ID NO: 298844 - DNA, 33 bp, Homo sapien
tcaagtgtcctaaaactgaccccatgatcccag

SEQ ID NO: 298845 - DNA, 33 bp, Homo sapien
attatttcttggctacaataatcctctgaagag

SEQ ID NO: 298846 - DNA, 33 bp, Homo sapien
attatttcttggctacgataatcctctgaagag

SEQ ID NO: 298847 - DNA, 33 bp, Homo sapien
gagcctctggtcattgcaaaaggggcaccaatc

SEQ ID NO: 298848 - DNA, 33 bp, Homo sapien
gagcctctggtcattggaaaaggggcaccaatc

SEQ ID NO: 298849 - DNA, 33 bp, Homo sapien
cataatctgtattttaaccagatctccaggcat

SEQ ID NO: 298850 - DNA, 33 bp, Homo sapien
cataatctgtattttatccagatctccaggcat

SEQ ID NO: 298851 - DNA, 33 bp, Homo sapien
aaaagagtttcccatacgtggaaaatttctgaa

SEQ ID NO: 298852 - DNA, 33 bp, Homo sapien
aaaagagtttcccatatgtggaaaatttctgaa

SEQ ID NO: 298853 - DNA, 33 bp, Homo sapien
gtttccactgaaaggacggtgctcctagccccc

SEQ ID NO: 298854 - DNA, 33 bp, Homo sapien
gtttccactgaaaggatggtgctcctagccccc

SEQ ID NO: 298855 - DNA, 33 bp, Homo sapien
ttccattcacagccaactaggggtaggcacggt

SEQ ID NO: 298856 - DNA, 33 bp, Homo sapien
ttccattcacagccaagtaggggtaggcacggt

SEQ ID NO: 298857 - DNA, 33 bp, Homo sapien
tttcattgtcgggataaaatgagatgatgcatg

SEQ ID NO: 298858 - DNA, 33 bp, Homo sapien
tttcattgtcgggatagaatgagatgatgcatg

SEQ ID NO: 298859 - DNA, 33 bp, Homo sapien
atttgtgcaatggggacactcacccacagcttc

SEQ ID NO: 298860 - DNA, 33 bp, Homo sapien
atttgtgcaatggggatactcacccacagcttc

SEQ ID NO: 298861 - DNA, 33 bp, Homo sapien
aggactcaaatacagaacttgtctaactcccaa

SEQ ID NO: 298862 - DNA, 33 bp, Homo sapien
aggactcaaatacagaccttgtctaactcccaa

SEQ ID NO: 298863 - DNA, 33 bp, Homo sapien
ttgtgggaccattccccacacagacaagccctg

SEQ ID NO: 298864 - DNA, 33 bp, Homo sapien
ttgtgggaccattccctacacagacaagccctg

SEQ ID NO: 298865 - DNA, 33 bp, Homo sapien
accgggccggactttaagtggtgtttctattat

SEQ ID NO: 298866 - DNA, 33 bp, Homo sapien
accgggccggactttaggtggtgtttctattat

SEQ ID NO: 298867 - DNA, 33 bp, Homo sapien
ccaagatgctacgagacagaattttggtgccga

SEQ ID NO: 298868 - DNA, 33 bp, Homo sapien
ccaagatgctacgagatagaattttggtgccga

SEQ ID NO: 298869 - DNA, 33 bp, Homo sapien
aggtctgcagtattacactggagctctttagca

SEQ ID NO: 298870 - DNA, 33 bp, Homo sapien
aggtctgcagtattaccctggagctctttagca

SEQ ID NO: 298871 - DNA, 33 bp, Homo sapien
gattggaagtcaaaccaacagagaaatcctgca

SEQ ID NO: 298872 - DNA, 33 bp, Homo sapien
gattggaagtcaaaccgacagagaaatcctgca

SEQ ID NO: 298873 - DNA, 33 bp, Homo sapien
aagagagaatcactgaacacactcccaggcttc

SEQ ID NO: 298874 - DNA, 33 bp, Homo sapien
aagagagaatcactgagcacactcccaggcttc

SEQ ID NO: 298875 - DNA, 33 bp, Homo sapien
cgtttttctggagagacagtctttagcttcaac

SEQ ID NO: 298876 - DNA, 33 bp, Homo sapien
cgtttttctggagagagagtctttagcttcaac

SEQ ID NO: 298877 - DNA, 33 bp, Homo sapien
ttctggaaatgtaaacaacctctttggtgtctc

SEQ ID NO: 298878 - DNA, 33 bp, Homo sapien
ttctggaaatgtaaacgacctctttggtgtctc

SEQ ID NO: 298879 - DNA, 33 bp, Homo sapien
cactgaactctcttcacataaacattttaccca

SEQ ID NO: 298880 - DNA, 33 bp, Homo sapien
cactgaactctcttcatataaacattttaccca

SEQ ID NO: 298881 - DNA, 33 bp, Homo sapien
tggagttggagggacacgcctctttgcccagac

SEQ ID NO: 298882 - DNA, 33 bp, Homo sapien
tggagttggagggacatgcctctttgcccagac

SEQ ID NO: 298883 - DNA, 33 bp, Homo sapien
actggagaaagaaattaaactggagcctattcc

SEQ ID NO: 298884 - DNA, 33 bp, Homo sapien
actggagaaagaaattcaactggagcctattcc

SEQ ID NO: 298885 - DNA, 33 bp, Homo sapien
tgccgaccaagaatcccatctcctttagggtca

SEQ ID NO: 298886 - DNA, 33 bp, Homo sapien
tgccgaccaagaatcctatctcctttagggtca

SEQ ID NO: 298887 - DNA, 33 bp, Homo sapien
ctgctctctggatgccaagtggctagcctgggt

SEQ ID NO: 298888 - DNA, 33 bp, Homo sapien
ctgctctctggatgccgagtggctagcctgggt

SEQ ID NO: 298889 - DNA, 33 bp, Homo sapien
tttcccaggggcttgaaagtggacacatggagg

SEQ ID NO: 298890 - DNA, 33 bp, Homo sapien
tttcccaggggcttgagagtggacacatggagg

SEQ ID NO: 298891 - DNA, 33 bp, Homo sapien
aagtcactgccgagaccgagtatggcaaggtgg

SEQ ID NO: 298892 - DNA, 33 bp, Homo sapien
aagtcactgccgagactgagtatggcaaggtgg

SEQ ID NO: 298893 - DNA, 33 bp, Homo sapien
ttactagattttcaacactctagcttcagcttt

SEQ ID NO: 298894 - DNA, 33 bp, Homo sapien
ttactagattttcaacgctctagcttcagcttt

SEQ ID NO: 298895 - DNA, 33 bp, Homo sapien
gcatacaggatgagcactctggtcagctttgga

SEQ ID NO: 298896 - DNA, 33 bp, Homo sapien
gcatacaggatgagcagtctggtcagctttgga

SEQ ID NO: 298897 - DNA, 33 bp, Homo sapien
tccataaaacacaattaaagtgacacacaattg

SEQ ID NO: 298898 - DNA, 33 bp, Homo sapien
tccataaaacacaatttaagtgacacacaattg

SEQ ID NO: 298899 - DNA, 33 bp, Homo sapien
atcctggaatcattaaggacttgagaagcttcc

SEQ ID NO: 298900 - DNA, 33 bp, Homo sapien
atcctggaatcattaatgacttgagaagcttcc

SEQ ID NO: 298901 - DNA, 33 bp, Homo sapien
tttgagaatctctgtacgtattatgccattctt

SEQ ID NO: 298902 - DNA, 33 bp, Homo sapien
tttgagaatctctgtatgtattatgccattctt

SEQ ID NO: 298903 - DNA, 33 bp, Homo sapien
tttccttaagttgatggcaccagaatatgaggt

SEQ ID NO: 298904 - DNA, 33 bp, Homo sapien
tttccttaagttgatgtcaccagaatatgaggt

SEQ ID NO: 298905 - DNA, 33 bp, Homo sapien
aaaaggaattagcagaacgaacttagcgcgtat

SEQ ID NO: 298906 - DNA, 33 bp, Homo sapien
aaaaggaattagcagagcgaacttagcgcgtat

SEQ ID NO: 298907 - DNA, 33 bp, Homo sapien
gaaaaggttttgattacatcattttactctaag

SEQ ID NO: 298908 - DNA, 33 bp, Homo sapien
gaaaaggttttgattatatcattttactctaag

SEQ ID NO: 298909 - DNA, 33 bp, Homo sapien
ttccattgtatgggggaaaattggtaattactt

SEQ ID NO: 298910 - DNA, 33 bp, Homo sapien
ttccattgtatggggggaaattggtaattactt

SEQ ID NO: 298911 - DNA, 33 bp, Homo sapien
atatggtctgaataataagataactgaatctat

SEQ ID NO: 298912 - DNA, 33 bp, Homo sapien
atatggtctgaataatcagataactgaatctat

SEQ ID NO: 298913 - DNA, 33 bp, Homo sapien
gtggtggatgctggaactctggacgctccattc

SEQ ID NO: 298914 - DNA, 33 bp, Homo sapien
gtggtggatgctggaattctggacgctccattc

SEQ ID NO: 298915 - DNA, 33 bp, Homo sapien
ctcaaagtggtacatacaaatgctttctaagcc

SEQ ID NO: 298916 - DNA, 33 bp, Homo sapien
ctcaaagtggtacatataaatgctttctaagcc

SEQ ID NO: 298917 - DNA, 33 bp, Homo sapien
tgactctctcttgggacgaacaaggtctcttgg

SEQ ID NO: 298918 - DNA, 33 bp, Homo sapien
tgactctctcttgggatgaacaaggtctcttgg

SEQ ID NO: 298919 - DNA, 33 bp, Homo sapien
tctttctcttgttttcactttctgtctctcccc

SEQ ID NO: 298920 - DNA, 33 bp, Homo sapien
tctttctcttgttttcgctttctgtctctcccc

SEQ ID NO: 298921 - DNA, 33 bp, Homo sapien
atcagcttatagattacgatccagctctaggta

SEQ ID NO: 298922 - DNA, 33 bp, Homo sapien
atcagcttatagattatgatccagctctaggta

SEQ ID NO: 298923 - DNA, 33 bp, Homo sapien
aaagcttaaagtagaacgtgctcttaaccacaa

SEQ ID NO: 298924 - DNA, 33 bp, Homo sapien
aaagcttaaagtagaatgtgctcttaaccacaa

SEQ ID NO: 298925 - DNA, 33 bp, Homo sapien
tagtattccatgtaccacagtttgtttatctag

SEQ ID NO: 298926 - DNA, 33 bp, Homo sapien
tagtattccatgtaccgcagtttgtttatctag

SEQ ID NO: 298927 - DNA, 33 bp, Homo sapien
aaagatctgcccagtcactgggaaagccaaacc

SEQ ID NO: 298928 - DNA, 33 bp, Homo sapien
aaagatctgcccagtcgctgggaaagccaaacc

SEQ ID NO: 298929 - DNA, 33 bp, Homo sapien
cagtcattcatccctgaaaagatatgtaaatct

SEQ ID NO: 298930 - DNA, 33 bp, Homo sapien
cagtcattcatccctggaaagatatgtaaatct

SEQ ID NO: 298931 - DNA, 33 bp, Homo sapien
atagagcaacagcctgaaggggagagaggatgg

SEQ ID NO: 298932 - DNA, 33 bp, Homo sapien
atagagcaacagcctggaggggagagaggatgg

SEQ ID NO: 298933 - DNA, 33 bp, Homo sapien
tcccccaagagcctgacgcaaaggaaggccaca

SEQ ID NO: 298934 - DNA, 33 bp, Homo sapien
tcccccaagagcctgatgcaaaggaaggccaca

SEQ ID NO: 298935 - DNA, 33 bp, Homo sapien
tgggcagggaagtccaacagaggcatcactccc

SEQ ID NO: 298936 - DNA, 33 bp, Homo sapien
tgggcagggaagtccaccagaggcatcactccc

SEQ ID NO: 298937 - DNA, 33 bp, Homo sapien
aggaaaaaatgtcttccatttctccacaccttt

SEQ ID NO: 298938 - DNA, 33 bp, Homo sapien
aggaaaaaatgtcttctatttctccacaccttt

SEQ ID NO: 298939 - DNA, 33 bp, Homo sapien
aggacagtctggctataataagcaaggccaggg

SEQ ID NO: 298940 - DNA, 33 bp, Homo sapien
aggacagtctggctatcataagcaaggccaggg

SEQ ID NO: 298941 - DNA, 33 bp, Homo sapien
ctggagtctttcaacaatggagagtcagatgtc

SEQ ID NO: 298942 - DNA, 33 bp, Homo sapien
ctggagtctttcaacagtggagagtcagatgtc

SEQ ID NO: 298943 - DNA, 33 bp, Homo sapien
acagcgtgactgatgcaaagagagcgagagcac

SEQ ID NO: 298944 - DNA, 33 bp, Homo sapien
acagcgtgactgatgcgaagagagcgagagcac

SEQ ID NO: 298945 - DNA, 33 bp, Homo sapien
catggctcgcacattgaagctatttaccagagc

SEQ ID NO: 298946 - DNA, 33 bp, Homo sapien
catggctcgcacattggagctatttaccagagc

SEQ ID NO: 298947 - DNA, 33 bp, Homo sapien
tgtgaggatggaatgaagtcatacagattgcgc

SEQ ID NO: 298948 - DNA, 33 bp, Homo sapien
tgtgaggatggaatgaggtcatacagattgcgc

SEQ ID NO: 298949 - DNA, 33 bp, Homo sapien
ggggaaaactcaaaagccagacaaccctgggat

SEQ ID NO: 298950 - DNA, 33 bp, Homo sapien
ggggaaaactcaaaaggcagacaaccctgggat

SEQ ID NO: 298951 - DNA, 33 bp, Homo sapien
atagctgaactgtgtacattttttatgaaacac

SEQ ID NO: 298952 - DNA, 33 bp, Homo sapien
atagctgaactgtgtatattttttatgaaacac

SEQ ID NO: 298953 - DNA, 33 bp, Homo sapien
taattcaacttctgaaatgttggttgtgcaatg

SEQ ID NO: 298954 - DNA, 33 bp, Homo sapien
taattcaacttctgaagtgttggttgtgcaatg

SEQ ID NO: 298955 - DNA, 33 bp, Homo sapien
gctgcttgtggaaagaagtcaaaataataatag

SEQ ID NO: 298956 - DNA, 33 bp, Homo sapien
gctgcttgtggaaagacgtcaaaataataatag

SEQ ID NO: 298957 - DNA, 33 bp, Homo sapien
attctatctgaacaacacaaagattcctggaat

SEQ ID NO: 298958 - DNA, 33 bp, Homo sapien
attctatctgaacaactcaaagattcctggaat

SEQ ID NO: 298959 - DNA, 33 bp, Homo sapien
agtctgcagctgagtacgaggatgtgagtaagc

SEQ ID NO: 298960 - DNA, 33 bp, Homo sapien
agtctgcagctgagtatgaggatgtgagtaagc

SEQ ID NO: 298961 - DNA, 33 bp, Homo sapien
cttgttccttagcaacccttgcataactcagtt

SEQ ID NO: 298962 - DNA, 33 bp, Homo sapien
cttgttccttagcaactcttgcataactcagtt

SEQ ID NO: 298963 - DNA, 33 bp, Homo sapien
cctgcttcccctccatcaggctgtcttcagtct

SEQ ID NO: 298964 - DNA, 33 bp, Homo sapien
cctgcttcccctccattaggctgtcttcagtct

SEQ ID NO: 298965 - DNA, 33 bp, Homo sapien
tcctcaagacatgggaagtaatattatagtaat

SEQ ID NO: 298966 - DNA, 33 bp, Homo sapien
tcctcaagacatgggaggtaatattatagtaat

SEQ ID NO: 298967 - DNA, 33 bp, Homo sapien
ccaggaaccagcaacaatcattcctagcctgaa

SEQ ID NO: 298968 - DNA, 33 bp, Homo sapien
ccaggaaccagcaacagtcattcctagcctgaa

SEQ ID NO: 298969 - DNA, 33 bp, Homo sapien
ccactttttacagctccccaatgtccctacttc

SEQ ID NO: 298970 - DNA, 33 bp, Homo sapien
ccactttttacagctctccaatgtccctacttc

SEQ ID NO: 298971 - DNA, 33 bp, Homo sapien
aggaggaaagaaagaacttagtgggaagagaag

SEQ ID NO: 298972 - DNA, 33 bp, Homo sapien
aggaggaaagaaagaatttagtgggaagagaag

SEQ ID NO: 298973 - DNA, 33 bp, Homo sapien
caaatgagtgtgaatccctcctatggcagtgtg

SEQ ID NO: 298974 - DNA, 33 bp, Homo sapien
caaatgagtgtgaatctctcctatggcagtgtg

SEQ ID NO: 298975 - DNA, 33 bp, Homo sapien
ggtggaaccgcagttcaaaagcagggcagggga

SEQ ID NO: 298976 - DNA, 33 bp, Homo sapien
ggtggaaccgcagttcgaaagcagggcagggga

SEQ ID NO: 298977 - DNA, 33 bp, Homo sapien
tatatagtgggggtaaacactggctgactgaca

SEQ ID NO: 298978 - DNA, 33 bp, Homo sapien
tatatagtgggggtaagcactggctgactgaca

SEQ ID NO: 298979 - DNA, 33 bp, Homo sapien
tttctggagaccattgacaaaggatgctcatgg

SEQ ID NO: 298980 - DNA, 33 bp, Homo sapien
tttctggagaccattggcaaaggatgctcatgg

SEQ ID NO: 298981 - DNA, 33 bp, Homo sapien
acttgtgagaaccacaatgtcttccggtccctg

SEQ ID NO: 298982 - DNA, 33 bp, Homo sapien
acttgtgagaaccacagtgtcttccggtccctg

SEQ ID NO: 298983 - DNA, 33 bp, Homo sapien
agagaggcttggtgccagaaatctttacaggca

SEQ ID NO: 298984 - DNA, 33 bp, Homo sapien
agagaggcttggtgccggaaatctttacaggca

SEQ ID NO: 298985 - DNA, 33 bp, Homo sapien
agcataaataagtgcaagtacctcaacctgcaa

SEQ ID NO: 298986 - DNA, 33 bp, Homo sapien
agcataaataagtgcatgtacctcaacctgcaa

SEQ ID NO: 298987 - DNA, 33 bp, Homo sapien
cgtggtattccacaacagaaatgcaatagaata

SEQ ID NO: 298988 - DNA, 33 bp, Homo sapien
cgtggtattccacaacggaaatgcaatagaata

SEQ ID NO: 298989 - DNA, 33 bp, Homo sapien
tctgtcatgtgaggacacagccagaagatggca

SEQ ID NO: 298990 - DNA, 33 bp, Homo sapien
tctgtcatgtgaggacgcagccagaagatggca

SEQ ID NO: 298991 - DNA, 33 bp, Homo sapien
ctggaaagatgctgtaataagtttattcacgtc

SEQ ID NO: 298992 - DNA, 33 bp, Homo sapien
ctggaaagatgctgtactaagtttattcacgtc

SEQ ID NO: 298993 - DNA, 33 bp, Homo sapien
tggatacttaacatctaaactgaggcagttaat

SEQ ID NO: 298994 - DNA, 33 bp, Homo sapien
tggatacttaacatcttaactgaggcagttaat

SEQ ID NO: 298995 - DNA, 33 bp, Homo sapien
tgctctttgacctggcagatgtctaaaacagac

SEQ ID NO: 298996 - DNA, 33 bp, Homo sapien
tgctctttgacctggccgatgtctaaaacagac

SEQ ID NO: 298997 - DNA, 33 bp, Homo sapien
tgcctaatcaataaagactacatccaaccagat

SEQ ID NO: 298998 - DNA, 33 bp, Homo sapien
tgcctaatcaataaaggctacatccaaccagat

SEQ ID NO: 298999 - DNA, 33 bp, Homo sapien
gccattaaaagagcagaacctcagcagcttgaa

SEQ ID NO: 299000 - DNA, 33 bp, Homo sapien
gccattaaaagagcaggacctcagcagcttgaa

SEQ ID NO: 299001 - DNA, 33 bp, Homo sapien
aaatattccaccacaaacaaagtaacatttatc

SEQ ID NO: 299002 - DNA, 33 bp, Homo sapien
aaatattccaccacaatcaaagtaacatttatc

SEQ ID NO: 299003 - DNA, 33 bp, Homo sapien
cttgtttcactgaaccgcattcctgaattctcc

SEQ ID NO: 299004 - DNA, 33 bp, Homo sapien
cttgtttcactgaacctcattcctgaattctcc

SEQ ID NO: 299005 - DNA, 33 bp, Homo sapien
tccacttaggatgtaccaagccacaagagaaca

SEQ ID NO: 299006 - DNA, 33 bp, Homo sapien
tccacttaggatgtacgaagccacaagagaaca

SEQ ID NO: 299007 - DNA, 33 bp, Homo sapien
taccatttattagaccaaccactctcaaattgc

SEQ ID NO: 299008 - DNA, 33 bp, Homo sapien
taccatttattagaccgaccactctcaaattgc

SEQ ID NO: 299009 - DNA, 33 bp, Homo sapien
agctggcgtgtacctaaaatgaacaatccttct

SEQ ID NO: 299010 - DNA, 33 bp, Homo sapien
agctggcgtgtacctacaatgaacaatccttct

SEQ ID NO: 299011 - DNA, 33 bp, Homo sapien
ttgaggcagccctggacagagagtttggaggtc

SEQ ID NO: 299012 - DNA, 33 bp, Homo sapien
ttgaggcagccctggatagagagtttggaggtc

SEQ ID NO: 299013 - DNA, 33 bp, Homo sapien
ctctgtcttgtctctacagcctcagaactttgc

SEQ ID NO: 299014 - DNA, 33 bp, Homo sapien
ctctgtcttgtctctatagcctcagaactttgc

SEQ ID NO: 299015 - DNA, 33 bp, Homo sapien
agggtgtgtttgcagcagaaagacaatagattt

SEQ ID NO: 299016 - DNA, 33 bp, Homo sapien
agggtgtgtttgcagccgaaagacaatagattt

SEQ ID NO: 299017 - DNA, 33 bp, Homo sapien
acttagattgacatcaaaccccttgtcagcaat

SEQ ID NO: 299018 - DNA, 33 bp, Homo sapien
acttagattgacatcagaccccttgtcagcaat

SEQ ID NO: 299019 - DNA, 33 bp, Homo sapien
cgttatcaactgaaacaggtaattatggtcatt

SEQ ID NO: 299020 - DNA, 33 bp, Homo sapien
cgttatcaactgaaactggtaattatggtcatt

SEQ ID NO: 299021 - DNA, 33 bp, Homo sapien
taaaaaaccaaatctccattgggctgcagaagc

SEQ ID NO: 299022 - DNA, 33 bp, Homo sapien
taaaaaaccaaatctctattgggctgcagaagc

SEQ ID NO: 299023 - DNA, 33 bp, Homo sapien
ataaggccacttgatacagttgtgttatctata

SEQ ID NO: 299024 - DNA, 33 bp, Homo sapien
ataaggccacttgatatagttgtgttatctata

SEQ ID NO: 299025 - DNA, 33 bp, Homo sapien
gacaaagataggaatcaaggatgactccaagtc

SEQ ID NO: 299026 - DNA, 33 bp, Homo sapien
gacaaagataggaatcgaggatgactccaagtc

SEQ ID NO: 299027 - DNA, 33 bp, Homo sapien
tctgcaccctaagcaagtctctctgggctaagc

SEQ ID NO: 299028 - DNA, 33 bp, Homo sapien
tctgcaccctaagcaattctctctgggctaagc

SEQ ID NO: 299029 - DNA, 33 bp, Homo sapien
agaattctaagacagacccagtgtagggcatga

SEQ ID NO: 299030 - DNA, 33 bp, Homo sapien
agaattctaagacagatccagtgtagggcatga

SEQ ID NO: 299031 - DNA, 33 bp, Homo sapien
aaacttgaatccttaacgtatactgtactctag

SEQ ID NO: 299032 - DNA, 33 bp, Homo sapien
aaacttgaatccttaatgtatactgtactctag

SEQ ID NO: 299033 - DNA, 33 bp, Homo sapien
ttacagaaattagatacggaaagagtgaattga

SEQ ID NO: 299034 - DNA, 33 bp, Homo sapien
ttacagaaattagatatggaaagagtgaattga

SEQ ID NO: 299035 - DNA, 33 bp, Homo sapien
gccagtaatataccaccgagtcttagtcctacc

SEQ ID NO: 299036 - DNA, 33 bp, Homo sapien
gccagtaatataccactgagtcttagtcctacc

SEQ ID NO: 299037 - DNA, 33 bp, Homo sapien
ctggtaagatgagttacgactgagattattgat

SEQ ID NO: 299038 - DNA, 33 bp, Homo sapien
ctggtaagatgagttaggactgagattattgat

SEQ ID NO: 299039 - DNA, 33 bp, Homo sapien
tctaaattattgctttcaaactcattttcaggc

SEQ ID NO: 299040 - DNA, 33 bp, Homo sapien
tctaaattattgcttttaaactcattttcaggc

SEQ ID NO: 299041 - DNA, 33 bp, Homo sapien
gctttttcagagttcaaaacttcaactggagtg

SEQ ID NO: 299042 - DNA, 33 bp, Homo sapien
gctttttcagagttcataacttcaactggagtg

SEQ ID NO: 299043 - DNA, 33 bp, Homo sapien
cacttgtttagaaagacgcatttctccatatga

SEQ ID NO: 299044 - DNA, 33 bp, Homo sapien
cacttgtttagaaagatgcatttctccatatga

SEQ ID NO: 299045 - DNA, 33 bp, Homo sapien
ttccagttccgttccacaaggaccacctcagac

SEQ ID NO: 299046 - DNA, 33 bp, Homo sapien
ttccagttccgttccagaaggaccacctcagac

SEQ ID NO: 299047 - DNA, 33 bp, Homo sapien
aatagccaatcctaaactgcttactctgccctt

SEQ ID NO: 299048 - DNA, 33 bp, Homo sapien
aatagccaatcctaaagtgcttactctgccctt

SEQ ID NO: 299049 - DNA, 33 bp, Homo sapien
ttttgggatacagaaactagtatttgagtcact

SEQ ID NO: 299050 - DNA, 33 bp, Homo sapien
ttttgggatacagaaagtagtatttgagtcact

SEQ ID NO: 299051 - DNA, 33 bp, Homo sapien
taaaagcaagagtttgaaaacaatatgaatgtc

SEQ ID NO: 299052 - DNA, 33 bp, Homo sapien
taaaagcaagagtttggaaacaatatgaatgtc

SEQ ID NO: 299053 - DNA, 33 bp, Homo sapien
gaggtctcacagctaactcaaagcagagataga

SEQ ID NO: 299054 - DNA, 33 bp, Homo sapien
gaggtctcacagctaagtcaaagcagagataga

SEQ ID NO: 299055 - DNA, 33 bp, Homo sapien
tgcttctaatttggaaatcctggaacccaaatc

SEQ ID NO: 299056 - DNA, 33 bp, Homo sapien
tgcttctaatttggaagtcctggaacccaaatc

SEQ ID NO: 299057 - DNA, 33 bp, Homo sapien
aacaagactactaaaagagtgatgtagatatga

SEQ ID NO: 299058 - DNA, 33 bp, Homo sapien
aacaagactactaaaatagtgatgtagatatga

SEQ ID NO: 299059 - DNA, 33 bp, Homo sapien
gactaaaagcacaataccaaatgacaaatcata

SEQ ID NO: 299060 - DNA, 33 bp, Homo sapien
gactaaaagcacaatatcaaatgacaaatcata

SEQ ID NO: 299061 - DNA, 33 bp, Homo sapien
gagagagtctagaaacaaaccctgtgtatatgt

SEQ ID NO: 299062 - DNA, 33 bp, Homo sapien
gagagagtctagaaacgaaccctgtgtatatgt

SEQ ID NO: 299063 - DNA, 33 bp, Homo sapien
gtatatgtgaatccaacacattattaaggtggc

SEQ ID NO: 299064 - DNA, 33 bp, Homo sapien
gtatatgtgaatccaatacattattaaggtggc

SEQ ID NO: 299065 - DNA, 33 bp, Homo sapien
aattgcaattttgccactagttgcactaaccta

SEQ ID NO: 299066 - DNA, 33 bp, Homo sapien
aattgcaattttgccattagttgcactaaccta

SEQ ID NO: 299067 - DNA, 33 bp, Homo sapien
tggaaaggcattaaaacagaaaaatggaagaac

SEQ ID NO: 299068 - DNA, 33 bp, Homo sapien
tggaaaggcattaaaatagaaaaatggaagaac

SEQ ID NO: 299069 - DNA, 33 bp, Homo sapien
tggctatttctagaacggagcatgaggagacca

SEQ ID NO: 299070 - DNA, 33 bp, Homo sapien
tggctatttctagaactgagcatgaggagacca

SEQ ID NO: 299071 - DNA, 33 bp, Homo sapien
gttatgaacgaccttcaccataccaacactttc

SEQ ID NO: 299072 - DNA, 33 bp, Homo sapien
gttatgaacgaccttcgccataccaacactttc

SEQ ID NO: 299073 - DNA, 33 bp, Homo sapien
acttaagtcacacgaaataaaaggcattacact

SEQ ID NO: 299074 - DNA, 33 bp, Homo sapien
acttaagtcacacgaactaaaaggcattacact

SEQ ID NO: 299075 - DNA, 33 bp, Homo sapien
gaaatgtggacaatgcaacgaagaaactatatt

SEQ ID NO: 299076 - DNA, 33 bp, Homo sapien
gaaatgtggacaatgcgacgaagaaactatatt

SEQ ID NO: 299077 - DNA, 33 bp, Homo sapien
tagtttttctgcttaacagagtaattagaactg

SEQ ID NO: 299078 - DNA, 33 bp, Homo sapien
tagtttttctgcttaatagagtaattagaactg

SEQ ID NO: 299079 - DNA, 33 bp, Homo sapien
aggggaaacattgaaacttggtttggagagaca

SEQ ID NO: 299080 - DNA, 33 bp, Homo sapien
aggggaaacattgaaatttggtttggagagaca

SEQ ID NO: 299081 - DNA, 33 bp, Homo sapien
ataaattctcttcctgaagatagaatcaactgg

SEQ ID NO: 299082 - DNA, 33 bp, Homo sapien
ataaattctcttcctgtagatagaatcaactgg

SEQ ID NO: 299083 - DNA, 33 bp, Homo sapien
atttctttttgtgcaccggatgtcctataatgt

SEQ ID NO: 299084 - DNA, 33 bp, Homo sapien
atttctttttgtgcactggatgtcctataatgt

SEQ ID NO: 299085 - DNA, 33 bp, Homo sapien
gagatgagctttaggacatttggcaactaaata

SEQ ID NO: 299086 - DNA, 33 bp, Homo sapien
gagatgagctttaggatatttggcaactaaata

SEQ ID NO: 299087 - DNA, 33 bp, Homo sapien
tgtcaagggtggaaggcacacaggatactatca

SEQ ID NO: 299088 - DNA, 33 bp, Homo sapien
tgtcaagggtggaaggtacacaggatactatca

SEQ ID NO: 299089 - DNA, 33 bp, Homo sapien
tgtatcatgtggatgacaccacaggctctggag

SEQ ID NO: 299090 - DNA, 33 bp, Homo sapien
tgtatcatgtggatgagaccacaggctctggag

SEQ ID NO: 299091 - DNA, 33 bp, Homo sapien
ggttttagttgtgccaacaaaagatggttaggg

SEQ ID NO: 299092 - DNA, 33 bp, Homo sapien
ggttttagttgtgccaccaaaagatggttaggg

SEQ ID NO: 299093 - DNA, 33 bp, Homo sapien
tgtgcttgccggtgaactattgtcagctctttg

SEQ ID NO: 299094 - DNA, 33 bp, Homo sapien
tgtgcttgccggtgaattattgtcagctctttg

SEQ ID NO: 299095 - DNA, 33 bp, Homo sapien
ttctttatgacaatcaacactttcaacacttcc

SEQ ID NO: 299096 - DNA, 33 bp, Homo sapien
ttctttatgacaatcagcactttcaacacttcc

SEQ ID NO: 299097 - DNA, 33 bp, Homo sapien
ggcacatagaatatacgccaaaaaaatggacta

SEQ ID NO: 299098 - DNA, 33 bp, Homo sapien
ggcacatagaatatactccaaaaaaatggacta

SEQ ID NO: 299099 - DNA, 33 bp, Homo sapien
gtacttttagccaggaacacctagaatctacct

SEQ ID NO: 299100 - DNA, 33 bp, Homo sapien
gtacttttagccaggagcacctagaatctacct

SEQ ID NO: 299101 - DNA, 33 bp, Homo sapien
gagcttcctgggatagacagaaggagataggac

SEQ ID NO: 299102 - DNA, 33 bp, Homo sapien
gagcttcctgggataggcagaaggagataggac

SEQ ID NO: 299103 - DNA, 33 bp, Homo sapien
tagtatcaggtatccaacttctttatggtgatc

SEQ ID NO: 299104 - DNA, 33 bp, Homo sapien
tagtatcaggtatccagcttctttatggtgatc

SEQ ID NO: 299105 - DNA, 33 bp, Homo sapien
caaggggtagaagcagaagtggctctgtttacc

SEQ ID NO: 299106 - DNA, 33 bp, Homo sapien
caaggggtagaagcaggagtggctctgtttacc

SEQ ID NO: 299107 - DNA, 33 bp, Homo sapien
tctccttctgctttgcactgaggtatttatacg

SEQ ID NO: 299108 - DNA, 33 bp, Homo sapien
tctccttctgctttgccctgaggtatttatacg

SEQ ID NO: 299109 - DNA, 33 bp, Homo sapien
ccacagagaaggaaaacaggtggcaagcagatg

SEQ ID NO: 299110 - DNA, 33 bp, Homo sapien
ccacagagaaggaaaagaggtggcaagcagatg

SEQ ID NO: 299111 - DNA, 33 bp, Homo sapien
aatggaagaatatcaaagggtggagtttccgtg

SEQ ID NO: 299112 - DNA, 33 bp, Homo sapien
aatggaagaatatcaaggggtggagtttccgtg

SEQ ID NO: 299113 - DNA, 33 bp, Homo sapien
actgcaattattggtcccctcaaagattcaaga

SEQ ID NO: 299114 - DNA, 33 bp, Homo sapien
actgcaattattggtctcctcaaagattcaaga

SEQ ID NO: 299115 - DNA, 33 bp, Homo sapien
ttgtgttttagatttcaaggtccttgacagcgg

SEQ ID NO: 299116 - DNA, 33 bp, Homo sapien
ttgtgttttagatttcgaggtccttgacagcgg

SEQ ID NO: 299117 - DNA, 33 bp, Homo sapien
tctgtgggtctttagcccttgttctaattaaca

SEQ ID NO: 299118 - DNA, 33 bp, Homo sapien
tctgtgggtctttagctcttgttctaattaaca

SEQ ID NO: 299119 - DNA, 33 bp, Homo sapien
ttcttctcttaaacaacgagtagcatggaaaga

SEQ ID NO: 299120 - DNA, 33 bp, Homo sapien
ttcttctcttaaacaatgagtagcatggaaaga

SEQ ID NO: 299121 - DNA, 33 bp, Homo sapien
cttagaatgcctaaacaattataactccacata

SEQ ID NO: 299122 - DNA, 33 bp, Homo sapien
cttagaatgcctaaaccattataactccacata

SEQ ID NO: 299123 - DNA, 33 bp, Homo sapien
agtttgaagtgaggtaccatcatgcgtccagct

SEQ ID NO: 299124 - DNA, 33 bp, Homo sapien
agtttgaagtgaggtagcatcatgcgtccagct

SEQ ID NO: 299125 - DNA, 33 bp, Homo sapien
atataagtcgatgtcagaattagtagtggacac

SEQ ID NO: 299126 - DNA, 33 bp, Homo sapien
atataagtcgatgtcataattagtagtggacac

SEQ ID NO: 299127 - DNA, 33 bp, Homo sapien
gggtgagacttgaaatcatgagaatgaaggagc

SEQ ID NO: 299128 - DNA, 33 bp, Homo sapien
gggtgagacttgaaattatgagaatgaaggagc

SEQ ID NO: 299129 - DNA, 33 bp, Homo sapien
tcctttttactgaaataatgacaataataatca

SEQ ID NO: 299130 - DNA, 33 bp, Homo sapien
tcctttttactgaaatgatgacaataataatca

SEQ ID NO: 299131 - DNA, 33 bp, Homo sapien
acatacgactcagatcacagtcacgtctcaagg

SEQ ID NO: 299132 - DNA, 33 bp, Homo sapien
acatacgactcagatcccagtcacgtctcaagg

SEQ ID NO: 299133 - DNA, 33 bp, Homo sapien
agggtgggctgctccaatcttgaggacccaaag

SEQ ID NO: 299134 - DNA, 33 bp, Homo sapien
agggtgggctgctccagtcttgaggacccaaag

SEQ ID NO: 299135 - DNA, 33 bp, Homo sapien
caggctccagggggcacagtctcagggcccgca

SEQ ID NO: 299136 - DNA, 33 bp, Homo sapien
caggctccagggggcatagtctcagggcccgca

SEQ ID NO: 299137 - DNA, 33 bp, Homo sapien
gcataaaaagggtttagcacactgacaaataca

SEQ ID NO: 299138 - DNA, 33 bp, Homo sapien
gcataaaaagggtttatcacactgacaaataca

SEQ ID NO: 299139 - DNA, 33 bp, Homo sapien
tagtattctctgtgtcaatggaaatggagagtg

SEQ ID NO: 299140 - DNA, 33 bp, Homo sapien
tagtattctctgtgtcgatggaaatggagagtg

SEQ ID NO: 299141 - DNA, 33 bp, Homo sapien
attttatgttatcgaaataatgtaaaatgtttg

SEQ ID NO: 299142 - DNA, 33 bp, Homo sapien
attttatgttatcgaagtaatgtaaaatgtttg

SEQ ID NO: 299143 - DNA, 33 bp, Homo sapien
atttgctccacagggaaatcagaggtcatggag

SEQ ID NO: 299144 - DNA, 33 bp, Homo sapien
atttgctccacagggatatcagaggtcatggag

SEQ ID NO: 299145 - DNA, 33 bp, Homo sapien
acggcaaggagagaaccagtgatgatgtgtagg

SEQ ID NO: 299146 - DNA, 33 bp, Homo sapien
acggcaaggagagaacgagtgatgatgtgtagg

SEQ ID NO: 299147 - DNA, 33 bp, Homo sapien
ccatagttctcccagtgaaaccttattctcctt

SEQ ID NO: 299148 - DNA, 33 bp, Homo sapien
ccatagttctcccagttaaaccttattctcctt

SEQ ID NO: 299149 - DNA, 33 bp, Homo sapien
accccttatggcctggaagactggaatttttaa

SEQ ID NO: 299150 - DNA, 33 bp, Homo sapien
accccttatggcctgggagactggaatttttaa

SEQ ID NO: 299151 - DNA, 33 bp, Homo sapien
catatcccaagtgttacatcacaagctttattt

SEQ ID NO: 299152 - DNA, 33 bp, Homo sapien
catatcccaagtgttatatcacaagctttattt

SEQ ID NO: 299153 - DNA, 33 bp, Homo sapien
ttttcccacctcagccagacttactgtggcagc

SEQ ID NO: 299154 - DNA, 33 bp, Homo sapien
ttttcccacctcagccggacttactgtggcagc

SEQ ID NO: 299155 - DNA, 33 bp, Homo sapien
accagcccttaacttacggaagaagacaagagc

SEQ ID NO: 299156 - DNA, 33 bp, Homo sapien
accagcccttaacttatggaagaagacaagagc

SEQ ID NO: 299157 - DNA, 33 bp, Homo sapien
tgccattgcactccagcaatgtataaaacctcc

SEQ ID NO: 299158 - DNA, 33 bp, Homo sapien
tgccattgcactccagtaatgtataaaacctcc

SEQ ID NO: 299159 - DNA, 33 bp, Homo sapien
tgctaactgccagagaactgactgggcatgggg

SEQ ID NO: 299160 - DNA, 33 bp, Homo sapien
tgctaactgccagagagctgactgggcatgggg

SEQ ID NO: 299161 - DNA, 33 bp, Homo sapien
ctttgaatctcactaactcagatggccttttga

SEQ ID NO: 299162 - DNA, 33 bp, Homo sapien
ctttgaatctcactaattcagatggccttttga

SEQ ID NO: 299163 - DNA, 33 bp, Homo sapien
aatcaaatgaccagacaatgatggtaaaaacag

SEQ ID NO: 299164 - DNA, 33 bp, Homo sapien
aatcaaatgaccagacgatgatggtaaaaacag

SEQ ID NO: 299165 - DNA, 33 bp, Homo sapien
cggagctgcacagagacggaggacacactgtag

SEQ ID NO: 299166 - DNA, 33 bp, Homo sapien
cggagctgcacagagatggaggacacactgtag

SEQ ID NO: 299167 - DNA, 33 bp, Homo sapien
aggagcaactttgctgcaccaagtgtaactggg

SEQ ID NO: 299168 - DNA, 33 bp, Homo sapien
aggagcaactttgctgtaccaagtgtaactggg

SEQ ID NO: 299169 - DNA, 33 bp, Homo sapien
tgttggactgcggcacggccctaacatgtgggc

SEQ ID NO: 299170 - DNA, 33 bp, Homo sapien
tgttggactgcggcactgccctaacatgtgggc

SEQ ID NO: 299171 - DNA, 33 bp, Homo sapien
tttttaaagtatgaaacttcctgattttcaaaa

SEQ ID NO: 299172 - DNA, 33 bp, Homo sapien
tttttaaagtatgaaagttcctgattttcaaaa

SEQ ID NO: 299173 - DNA, 33 bp, Homo sapien
caggaagacttctgccaatcttgtgggcagcct

SEQ ID NO: 299174 - DNA, 33 bp, Homo sapien
caggaagacttctgccgatcttgtgggcagcct

SEQ ID NO: 299175 - DNA, 33 bp, Homo sapien
ttcactgagacaggacaaaccaccaagtccaaa

SEQ ID NO: 299176 - DNA, 33 bp, Homo sapien
ttcactgagacaggacgaaccaccaagtccaaa

SEQ ID NO: 299177 - DNA, 33 bp, Homo sapien
gccaggacccatgttccctcactcacttagcca

SEQ ID NO: 299178 - DNA, 33 bp, Homo sapien
gccaggacccatgttctctcactcacttagcca

SEQ ID NO: 299179 - DNA, 33 bp, Homo sapien
actttttgtttgagagcagagattttggaattg

SEQ ID NO: 299180 - DNA, 33 bp, Homo sapien
actttttgtttgagagtagagattttggaattg

SEQ ID NO: 299181 - DNA, 33 bp, Homo sapien
tcctgttcgtggacaaagctagggcctgagtct

SEQ ID NO: 299182 - DNA, 33 bp, Homo sapien
tcctgttcgtggacaacgctagggcctgagtct

SEQ ID NO: 299183 - DNA, 33 bp, Homo sapien
cctaaaggagaagacaaaatatgatgaacctga

SEQ ID NO: 299184 - DNA, 33 bp, Homo sapien
cctaaaggagaagacagaatatgatgaacctga

SEQ ID NO: 299185 - DNA, 33 bp, Homo sapien
ggagagttcgagggacagaattcagaagctagt

SEQ ID NO: 299186 - DNA, 33 bp, Homo sapien
ggagagttcgagggacggaattcagaagctagt

SEQ ID NO: 299187 - DNA, 33 bp, Homo sapien
ttgttcattttccaccgagtgagcttttctatg

SEQ ID NO: 299188 - DNA, 33 bp, Homo sapien
ttgttcattttccacctagtgagcttttctatg

SEQ ID NO: 299189 - DNA, 33 bp, Homo sapien
gaatgagtcatcaatacctcaagacccatatac

SEQ ID NO: 299190 - DNA, 33 bp, Homo sapien
gaatgagtcatcaatatctcaagacccatatac

SEQ ID NO: 299191 - DNA, 33 bp, Homo sapien
cagacaccccagagtccctttattgaggttctt

SEQ ID NO: 299192 - DNA, 33 bp, Homo sapien
cagacaccccagagtctctttattgaggttctt

SEQ ID NO: 299193 - DNA, 33 bp, Homo sapien
aagatgttgtgaaaacaaagacgcttgacaagc

SEQ ID NO: 299194 - DNA, 33 bp, Homo sapien
aagatgttgtgaaaacgaagacgcttgacaagc

SEQ ID NO: 299195 - DNA, 33 bp, Homo sapien
cccagcaacctgcttaaactccagggatgcctc

SEQ ID NO: 299196 - DNA, 33 bp, Homo sapien
cccagcaacctgcttagactccagggatgcctc

SEQ ID NO: 299197 - DNA, 33 bp, Homo sapien
gagctgtgactccaaggcaaggtgcaacgctgg

SEQ ID NO: 299198 - DNA, 33 bp, Homo sapien
gagctgtgactccaagtcaaggtgcaacgctgg

SEQ ID NO: 299199 - DNA, 33 bp, Homo sapien
gtgtgaagcatccaacaatgtagtgaaggatcc

SEQ ID NO: 299200 - DNA, 33 bp, Homo sapien
gtgtgaagcatccaacgatgtagtgaaggatcc

SEQ ID NO: 299201 - DNA, 33 bp, Homo sapien
tttcttcagattgtgacgagaccctgagaatga

SEQ ID NO: 299202 - DNA, 33 bp, Homo sapien
tttcttcagattgtgatgagaccctgagaatga

SEQ ID NO: 299203 - DNA, 33 bp, Homo sapien
gaccacagatgtcccacgcttttggagcctact

SEQ ID NO: 299204 - DNA, 33 bp, Homo sapien
gaccacagatgtcccatgcttttggagcctact

SEQ ID NO: 299205 - DNA, 33 bp, Homo sapien
agatgaaaggttctaaagatgtagtaatggtta

SEQ ID NO: 299206 - DNA, 33 bp, Homo sapien
agatgaaaggttctaacgatgtagtaatggtta

SEQ ID NO: 299207 - DNA, 33 bp, Homo sapien
ctttgaatattccttccctctcatccccaggtt

SEQ ID NO: 299208 - DNA, 33 bp, Homo sapien
ctttgaatattccttctctctcatccccaggtt

SEQ ID NO: 299209 - DNA, 33 bp, Homo sapien
gcaggagatagtgcctaagaggtaggaggctga

SEQ ID NO: 299210 - DNA, 33 bp, Homo sapien
gcaggagatagtgcctgagaggtaggaggctga

SEQ ID NO: 299211 - DNA, 33 bp, Homo sapien
agggaactagtcagcaagacctgatgcacagcc

SEQ ID NO: 299212 - DNA, 33 bp, Homo sapien
agggaactagtcagcaggacctgatgcacagcc

SEQ ID NO: 299213 - DNA, 33 bp, Homo sapien
tccaacgccaggccgaacatttcagaagtcata

SEQ ID NO: 299214 - DNA, 33 bp, Homo sapien
tccaacgccaggccgagcatttcagaagtcata

SEQ ID NO: 299215 - DNA, 33 bp, Homo sapien
aggaactggtactgaccggctccaacttcctgc

SEQ ID NO: 299216 - DNA, 33 bp, Homo sapien
aggaactggtactgactggctccaacttcctgc

SEQ ID NO: 299217 - DNA, 33 bp, Homo sapien
acaacttttttctttccctgcttgctcgttcat

SEQ ID NO: 299218 - DNA, 33 bp, Homo sapien
acaacttttttctttctctgcttgctcgttcat

SEQ ID NO: 299219 - DNA, 33 bp, Homo sapien
tcccaaacttacttaaccatgatgctcttttct

SEQ ID NO: 299220 - DNA, 33 bp, Homo sapien
tcccaaacttacttaatcatgatgctcttttct

SEQ ID NO: 299221 - DNA, 33 bp, Homo sapien
ccccagtccctagcatcaaaggtttttccaaga

SEQ ID NO: 299222 - DNA, 33 bp, Homo sapien
ccccagtccctagcatgaaaggtttttccaaga

SEQ ID NO: 299223 - DNA, 33 bp, Homo sapien
gcctcatggtagtaaacataggtaagtgttgga

SEQ ID NO: 299224 - DNA, 33 bp, Homo sapien
gcctcatggtagtaaatataggtaagtgttgga

SEQ ID NO: 299225 - DNA, 33 bp, Homo sapien
taaaataaaatattcacacctaacaccacacag

SEQ ID NO: 299226 - DNA, 33 bp, Homo sapien
taaaataaaatattcatacctaacaccacacag

SEQ ID NO: 299227 - DNA, 33 bp, Homo sapien
agacaggccggactccacctgacacaccagcca

SEQ ID NO: 299228 - DNA, 33 bp, Homo sapien
agacaggccggactcctcctgacacaccagcca

SEQ ID NO: 299229 - DNA, 33 bp, Homo sapien
tcaagcctctggggaccatcttaccgatctttg

SEQ ID NO: 299230 - DNA, 33 bp, Homo sapien
tcaagcctctggggacgatcttaccgatctttg

SEQ ID NO: 299231 - DNA, 33 bp, Homo sapien
caatcatttttctggacagggttaacagctaga

SEQ ID NO: 299232 - DNA, 33 bp, Homo sapien
caatcatttttctggatagggttaacagctaga

SEQ ID NO: 299233 - DNA, 33 bp, Homo sapien
tataaatagaataacactgggagaacgtaaact

SEQ ID NO: 299234 - DNA, 33 bp, Homo sapien
tataaatagaataacattgggagaacgtaaact

SEQ ID NO: 299235 - DNA, 33 bp, Homo sapien
tgtagagaaaccaaaccgggaaatcttacaagg

SEQ ID NO: 299236 - DNA, 33 bp, Homo sapien
tgtagagaaaccaaactgggaaatcttacaagg

SEQ ID NO: 299237 - DNA, 33 bp, Homo sapien
cctcaggcccttgccacgacctacttaggctac

SEQ ID NO: 299238 - DNA, 33 bp, Homo sapien
cctcaggcccttgccatgacctacttaggctac

SEQ ID NO: 299239 - DNA, 33 bp, Homo sapien
cagaaggtgatcccacagcgaacactggccact

SEQ ID NO: 299240 - DNA, 33 bp, Homo sapien
cagaaggtgatcccacggcgaacactggccact

SEQ ID NO: 299241 - DNA, 33 bp, Homo sapien
gatgatgttgaagatacagatagtggcagacta

SEQ ID NO: 299242 - DNA, 33 bp, Homo sapien
gatgatgttgaagatatagatagtggcagacta

SEQ ID NO: 299243 - DNA, 33 bp, Homo sapien
gtaatttttttgacaaccaatcctagacaagag

SEQ ID NO: 299244 - DNA, 33 bp, Homo sapien
gtaatttttttgacaatcaatcctagacaagag

SEQ ID NO: 299245 - DNA, 33 bp, Homo sapien
gcaagatccaaaggccaaaggagatgagaccct

SEQ ID NO: 299246 - DNA, 33 bp, Homo sapien
gcaagatccaaaggccgaaggagatgagaccct

SEQ ID NO: 299247 - DNA, 33 bp, Homo sapien
tgaatacttgattagacagagaaggagatgatg

SEQ ID NO: 299248 - DNA, 33 bp, Homo sapien
tgaatacttgattagatagagaaggagatgatg

SEQ ID NO: 299249 - DNA, 33 bp, Homo sapien
ccttcaagccactagtcacatcctcaacttcag

SEQ ID NO: 299250 - DNA, 33 bp, Homo sapien
ccttcaagccactagttacatcctcaacttcag

SEQ ID NO: 299251 - DNA, 33 bp, Homo sapien
agcatggcttagtgccgctcatccattctgttg

SEQ ID NO: 299252 - DNA, 33 bp, Homo sapien
agcatggcttagtgcctctcatccattctgttg

SEQ ID NO: 299253 - DNA, 33 bp, Homo sapien
caaggatcttctcccactctacggtttgccttt

SEQ ID NO: 299254 - DNA, 33 bp, Homo sapien
caaggatcttctcccattctacggtttgccttt

SEQ ID NO: 299255 - DNA, 33 bp, Homo sapien
ttttgggagatcctctaaaaagctgacagcagc

SEQ ID NO: 299256 - DNA, 33 bp, Homo sapien
ttttgggagatcctctgaaaagctgacagcagc

SEQ ID NO: 299257 - DNA, 33 bp, Homo sapien
agtctgaacatcagaacagacaaactgtggaca

SEQ ID NO: 299258 - DNA, 33 bp, Homo sapien
agtctgaacatcagaagagacaaactgtggaca

SEQ ID NO: 299259 - DNA, 33 bp, Homo sapien
atctgaccttcagaaaatattgttccaatcctt

SEQ ID NO: 299260 - DNA, 33 bp, Homo sapien
atctgaccttcagaaagtattgttccaatcctt

SEQ ID NO: 299261 - DNA, 33 bp, Homo sapien
ctcagaatcaaatctccactcctggatgctcta

SEQ ID NO: 299262 - DNA, 33 bp, Homo sapien
ctcagaatcaaatctctactcctggatgctcta

SEQ ID NO: 299263 - DNA, 33 bp, Homo sapien
cagggtccagggttgacgctttcctgggacagg

SEQ ID NO: 299264 - DNA, 33 bp, Homo sapien
cagggtccagggttgatgctttcctgggacagg

SEQ ID NO: 299265 - DNA, 33 bp, Homo sapien
gatcaccaggtgaagacgaggtagcagaattta

SEQ ID NO: 299266 - DNA, 33 bp, Homo sapien
gatcaccaggtgaagatgaggtagcagaattta

SEQ ID NO: 299267 - DNA, 33 bp, Homo sapien
atttactcatgtaccaccctaacccattgctta

SEQ ID NO: 299268 - DNA, 33 bp, Homo sapien
atttactcatgtaccatcctaacccattgctta

SEQ ID NO: 299269 - DNA, 33 bp, Homo sapien
taatccaaaatcctaactgtatgagtaggaccc

SEQ ID NO: 299270 - DNA, 33 bp, Homo sapien
taatccaaaatcctaattgtatgagtaggaccc

SEQ ID NO: 299271 - DNA, 33 bp, Homo sapien
gcgagtactgaaccagccgtattcacctttgaa

SEQ ID NO: 299272 - DNA, 33 bp, Homo sapien
gcgagtactgaaccaggcgtattcacctttgaa

SEQ ID NO: 299273 - DNA, 33 bp, Homo sapien
gggaaggtgaagaaagaccagtttagcttggag

SEQ ID NO: 299274 - DNA, 33 bp, Homo sapien
gggaaggtgaagaaagtccagtttagcttggag

SEQ ID NO: 299275 - DNA, 33 bp, Homo sapien
tcttggcacttgtgggaaaagtctaattctaga

SEQ ID NO: 299276 - DNA, 33 bp, Homo sapien
tcttggcacttgtgggtaaagtctaattctaga

SEQ ID NO: 299277 - DNA, 33 bp, Homo sapien
cttccaaaataccttcaaatgctagacctgatc

SEQ ID NO: 299278 - DNA, 33 bp, Homo sapien
cttccaaaataccttcgaatgctagacctgatc

SEQ ID NO: 299279 - DNA, 33 bp, Homo sapien
tggacctaattatgtaggtaaatgtcatctatt

SEQ ID NO: 299280 - DNA, 33 bp, Homo sapien
tggacctaattatgtatgtaaatgtcatctatt

SEQ ID NO: 299281 - DNA, 33 bp, Homo sapien
ttccttcttcctcacaacaggtctataacagtc

SEQ ID NO: 299282 - DNA, 33 bp, Homo sapien
ttccttcttcctcacagcaggtctataacagtc

SEQ ID NO: 299283 - DNA, 33 bp, Homo sapien
acagtaggaaaccccaacctctctggagcaaac

SEQ ID NO: 299284 - DNA, 33 bp, Homo sapien
acagtaggaaaccccagcctctctggagcaaac

SEQ ID NO: 299285 - DNA, 33 bp, Homo sapien
tggcttattatgtctgcattctttcaccaaaaa

SEQ ID NO: 299286 - DNA, 33 bp, Homo sapien
tggcttattatgtctggattctttcaccaaaaa

SEQ ID NO: 299287 - DNA, 33 bp, Homo sapien
aaaggaaactgtctaaatcatatcaattatatc

SEQ ID NO: 299288 - DNA, 33 bp, Homo sapien
aaaggaaactgtctaagtcatatcaattatatc

SEQ ID NO: 299289 - DNA, 33 bp, Homo sapien
tacaagaaaacattgcagaaattatccaggaca

SEQ ID NO: 299290 - DNA, 33 bp, Homo sapien
tacaagaaaacattgcggaaattatccaggaca

SEQ ID NO: 299291 - DNA, 33 bp, Homo sapien
gaggagatactttacacgctccacattaccaga

SEQ ID NO: 299292 - DNA, 33 bp, Homo sapien
gaggagatactttacatgctccacattaccaga

SEQ ID NO: 299293 - DNA, 33 bp, Homo sapien
tttcttattcaagcccagatggtgggtagcttg

SEQ ID NO: 299294 - DNA, 33 bp, Homo sapien
tttcttattcaagcccggatggtgggtagcttg

SEQ ID NO: 299295 - DNA, 33 bp, Homo sapien
ttgcccacaaactgccagagatgtgggtgagac

SEQ ID NO: 299296 - DNA, 33 bp, Homo sapien
ttgcccacaaactgccggagatgtgggtgagac

SEQ ID NO: 299297 - DNA, 33 bp, Homo sapien
tgtccagaaccctcaacccatcaaattccagaa

SEQ ID NO: 299298 - DNA, 33 bp, Homo sapien
tgtccagaaccctcaatccatcaaattccagaa

SEQ ID NO: 299299 - DNA, 33 bp, Homo sapien
ttataattttcaccaaagaggtctttcacatat

SEQ ID NO: 299300 - DNA, 33 bp, Homo sapien
ttataattttcaccaaggaggtctttcacatat

SEQ ID NO: 299301 - DNA, 33 bp, Homo sapien
catccatcataaatcaatccatccatgtgtatg

SEQ ID NO: 299302 - DNA, 33 bp, Homo sapien
catccatcataaatcagtccatccatgtgtatg

SEQ ID NO: 299303 - DNA, 33 bp, Homo sapien
tcaataaacatgaaaaagtgttactctgactag

SEQ ID NO: 299304 - DNA, 33 bp, Homo sapien
tcaataaacatgaaaaggtgttactctgactag

SEQ ID NO: 299305 - DNA, 33 bp, Homo sapien
ttagtctattgataaccggcatagtgttacttc

SEQ ID NO: 299306 - DNA, 33 bp, Homo sapien
ttagtctattgataactggcatagtgttacttc

SEQ ID NO: 299307 - DNA, 33 bp, Homo sapien
ggctggcttcagaacaaggtgatctagaaggga

SEQ ID NO: 299308 - DNA, 33 bp, Homo sapien
ggctggcttcagaacagggtgatctagaaggga

SEQ ID NO: 299309 - DNA, 33 bp, Homo sapien
ttgcttcactgcatgggattgtttctcaccact

SEQ ID NO: 299310 - DNA, 33 bp, Homo sapien
ttgcttcactgcatggtattgtttctcaccact

SEQ ID NO: 299311 - DNA, 33 bp, Homo sapien
cacagcttctcagagacggtataacacccaccc

SEQ ID NO: 299312 - DNA, 33 bp, Homo sapien
cacagcttctcagagatggtataacacccaccc

SEQ ID NO: 299313 - DNA, 33 bp, Homo sapien
aataataaatatacaaagttggttctttcatag

SEQ ID NO: 299314 - DNA, 33 bp, Homo sapien
aataataaatatacaatgttggttctttcatag

SEQ ID NO: 299315 - DNA, 33 bp, Homo sapien
ctctgcaaacttaccaagaggcttatggtggat

SEQ ID NO: 299316 - DNA, 33 bp, Homo sapien
ctctgcaaacttaccaggaggcttatggtggat

SEQ ID NO: 299317 - DNA, 33 bp, Homo sapien
ctctctggaaagagaaaaggggactagactgag

SEQ ID NO: 299318 - DNA, 33 bp, Homo sapien
ctctctggaaagagaagaggggactagactgag

SEQ ID NO: 299319 - DNA, 33 bp, Homo sapien
ctaagaacttctccaacgacatcatgctactgc

SEQ ID NO: 299320 - DNA, 33 bp, Homo sapien
ctaagaacttctccaatgacatcatgctactgc

SEQ ID NO: 299321 - DNA, 33 bp, Homo sapien
gggcccacaatatcaaagaacaggagccgaccc

SEQ ID NO: 299322 - DNA, 33 bp, Homo sapien
gggcccacaatatcaaggaacaggagccgaccc

SEQ ID NO: 299323 - DNA, 33 bp, Homo sapien
tctctgggctgtatacactgtgactccaccccc

SEQ ID NO: 299324 - DNA, 33 bp, Homo sapien
tctctgggctgtataccctgtgactccaccccc

SEQ ID NO: 299325 - DNA, 33 bp, Homo sapien
ggtggcttcctgatacaagacgacttcgtgctg

SEQ ID NO: 299326 - DNA, 33 bp, Homo sapien
ggtggcttcctgatacgagacgacttcgtgctg

SEQ ID NO: 299327 - DNA, 33 bp, Homo sapien
agcacataacaggctcacagtaaacatttgcta

SEQ ID NO: 299328 - DNA, 33 bp, Homo sapien
agcacataacaggctcgcagtaaacatttgcta

SEQ ID NO: 299329 - DNA, 33 bp, Homo sapien
caaaaatgttgggagaagataaatgaggtttaa

SEQ ID NO: 299330 - DNA, 33 bp, Homo sapien
caaaaatgttgggagatgataaatgaggtttaa

SEQ ID NO: 299331 - DNA, 33 bp, Homo sapien
ctgatgcctttttctccctgctcttaaaaatat

SEQ ID NO: 299332 - DNA, 33 bp, Homo sapien
ctgatgcctttttctcgctgctcttaaaaatat

SEQ ID NO: 299333 - DNA, 33 bp, Homo sapien
ttcctacaaaagactccgagatttggtaaatga

SEQ ID NO: 299334 - DNA, 33 bp, Homo sapien
ttcctacaaaagactctgagatttggtaaatga

SEQ ID NO: 299335 - DNA, 33 bp, Homo sapien
gagtactgttataaaaataggtacatagagcaa

SEQ ID NO: 299336 - DNA, 33 bp, Homo sapien
gagtactgttataaaagtaggtacatagagcaa

SEQ ID NO: 299337 - DNA, 33 bp, Homo sapien
ctggacccactacataacagtaatttgcaggtt

SEQ ID NO: 299338 - DNA, 33 bp, Homo sapien
ctggacccactacatagcagtaatttgcaggtt

SEQ ID NO: 299339 - DNA, 33 bp, Homo sapien
aagaactgatcttatacgggattcgggaaatgt

SEQ ID NO: 299340 - DNA, 33 bp, Homo sapien
aagaactgatcttatatgggattcgggaaatgt

SEQ ID NO: 299341 - DNA, 33 bp, Homo sapien
acagatttcagtgtgcaatacttaaagtagcat

SEQ ID NO: 299342 - DNA, 33 bp, Homo sapien
acagatttcagtgtgccatacttaaagtagcat

SEQ ID NO: 299343 - DNA, 33 bp, Homo sapien
tggagcaggatgtcgagggagttttcttagaac

SEQ ID NO: 299344 - DNA, 33 bp, Homo sapien
tggagcaggatgtcgatggagttttcttagaac

SEQ ID NO: 299345 - DNA, 33 bp, Homo sapien
caataaaaggtaaacaaaagtctgagatcattt

SEQ ID NO: 299346 - DNA, 33 bp, Homo sapien
caataaaaggtaaacagaagtctgagatcattt

SEQ ID NO: 299347 - DNA, 33 bp, Homo sapien
aggtgcgggaaagagaaaggtcaagaatgactc

SEQ ID NO: 299348 - DNA, 33 bp, Homo sapien
aggtgcgggaaagagagaggtcaagaatgactc

SEQ ID NO: 299349 - DNA, 33 bp, Homo sapien
tagtgcaaagaaagaacaattgcaccagaatcc

SEQ ID NO: 299350 - DNA, 33 bp, Homo sapien
tagtgcaaagaaagaataattgcaccagaatcc

SEQ ID NO: 299351 - DNA, 33 bp, Homo sapien
agacccaggctgaagaagtcaacattttattcc

SEQ ID NO: 299352 - DNA, 33 bp, Homo sapien
agacccaggctgaagatgtcaacattttattcc

SEQ ID NO: 299353 - DNA, 33 bp, Homo sapien
gattgagtgttattaaacttggtctttgaatta

SEQ ID NO: 299354 - DNA, 33 bp, Homo sapien
gattgagtgttattaagcttggtctttgaatta

SEQ ID NO: 299355 - DNA, 33 bp, Homo sapien
tatttggttaactgcaaaatcaaaagtaaactc

SEQ ID NO: 299356 - DNA, 33 bp, Homo sapien
tatttggttaactgcataatcaaaagtaaactc

SEQ ID NO: 299357 - DNA, 33 bp, Homo sapien
atgggaaaaattaccgacgcttgggagattttg

SEQ ID NO: 299358 - DNA, 33 bp, Homo sapien
atgggaaaaattaccggcgcttgggagattttg

SEQ ID NO: 299359 - DNA, 33 bp, Homo sapien
cgagatgagagcgaaaacttccctgagaggcag

SEQ ID NO: 299360 - DNA, 33 bp, Homo sapien
cgagatgagagcgaaaccttccctgagaggcag

SEQ ID NO: 299361 - DNA, 33 bp, Homo sapien
acatgcagaacatggaaatacaaataaccaagc

SEQ ID NO: 299362 - DNA, 33 bp, Homo sapien
acatgcagaacatggagatacaaataaccaagc

SEQ ID NO: 299363 - DNA, 33 bp, Homo sapien
catacaatcagcttgcacaggtgctgccaaaag

SEQ ID NO: 299364 - DNA, 33 bp, Homo sapien
catacaatcagcttgcgcaggtgctgccaaaag

SEQ ID NO: 299365 - DNA, 33 bp, Homo sapien
gtcatatcgtggcctacgttttcaggtaacagg

SEQ ID NO: 299366 - DNA, 33 bp, Homo sapien
gtcatatcgtggcctaggttttcaggtaacagg

SEQ ID NO: 299367 - DNA, 33 bp, Homo sapien
ctttttttttcttgagcccttgaagcaagaatg

SEQ ID NO: 299368 - DNA, 33 bp, Homo sapien
ctttttttttcttgagtccttgaagcaagaatg

SEQ ID NO: 299369 - DNA, 33 bp, Homo sapien
gagtcatgtgaagatgcaagagtgacaacatac

SEQ ID NO: 299370 - DNA, 33 bp, Homo sapien
gagtcatgtgaagatgtaagagtgacaacatac

SEQ ID NO: 299371 - DNA, 33 bp, Homo sapien
acacttcacttccagacgtttccctgaagtact

SEQ ID NO: 299372 - DNA, 33 bp, Homo sapien
acacttcacttccagatgtttccctgaagtact

SEQ ID NO: 299373 - DNA, 33 bp, Homo sapien
gatatggcatagacaacttcctaatgtcatttg

SEQ ID NO: 299374 - DNA, 33 bp, Homo sapien
gatatggcatagacaatttcctaatgtcatttg

SEQ ID NO: 299375 - DNA, 33 bp, Homo sapien
agtgacacacatcaccactattcatgttccttt

SEQ ID NO: 299376 - DNA, 33 bp, Homo sapien
agtgacacacatcaccgctattcatgttccttt

SEQ ID NO: 299377 - DNA, 33 bp, Homo sapien
gttagtcatcatgggggcaatgtcaaggtgatg

SEQ ID NO: 299378 - DNA, 33 bp, Homo sapien
gttagtcatcatggggtcaatgtcaaggtgatg

SEQ ID NO: 299379 - DNA, 33 bp, Homo sapien
ccaaatcaatgaaccacgttaacaaaacagcat

SEQ ID NO: 299380 - DNA, 33 bp, Homo sapien
ccaaatcaatgaaccatgttaacaaaacagcat

SEQ ID NO: 299381 - DNA, 33 bp, Homo sapien
tcagtggattcctcaaataaacctttcaactac

SEQ ID NO: 299382 - DNA, 33 bp, Homo sapien
tcagtggattcctcaagtaaacctttcaactac

SEQ ID NO: 299383 - DNA, 33 bp, Homo sapien
aatattatcagctttacggaattttgtgatgat

SEQ ID NO: 299384 - DNA, 33 bp, Homo sapien
aatattatcagctttatggaattttgtgatgat

SEQ ID NO: 299385 - DNA, 33 bp, Homo sapien
tccgtccatgcaggtacgtacacgagttgttgc

SEQ ID NO: 299386 - DNA, 33 bp, Homo sapien
tccgtccatgcaggtaggtacacgagttgttgc

SEQ ID NO: 299387 - DNA, 33 bp, Homo sapien
aggaaaactgttaaaaatgctcaaacaatcagg

SEQ ID NO: 299388 - DNA, 33 bp, Homo sapien
aggaaaactgttaaaagtgctcaaacaatcagg

SEQ ID NO: 299389 - DNA, 33 bp, Homo sapien
cttatctgaccacaaagttatgattcagaaaga

SEQ ID NO: 299390 - DNA, 33 bp, Homo sapien
cttatctgaccacaaatttatgattcagaaaga

SEQ ID NO: 299391 - DNA, 33 bp, Homo sapien
attgcccattggtacccaacgcttccctctggt

SEQ ID NO: 299392 - DNA, 33 bp, Homo sapien
attgcccattggtaccgaacgcttccctctggt

SEQ ID NO: 299393 - DNA, 33 bp, Homo sapien
tcactagtgaaactagaaacaccagagggaagc

SEQ ID NO: 299394 - DNA, 33 bp, Homo sapien
tcactagtgaaactaggaacaccagagggaagc

SEQ ID NO: 299395 - DNA, 33 bp, Homo sapien
agcacatccaaagctccctgagagaggctgtaa

SEQ ID NO: 299396 - DNA, 33 bp, Homo sapien
agcacatccaaagctcgctgagagaggctgtaa

SEQ ID NO: 299397 - DNA, 33 bp, Homo sapien
gacatcgttaaaagtgacaattcagaaacagtt

SEQ ID NO: 299398 - DNA, 33 bp, Homo sapien
gacatcgttaaaagtgtcaattcagaaacagtt

SEQ ID NO: 299399 - DNA, 33 bp, Homo sapien
cccgcagattatgagcaagttctcctgaatgct

SEQ ID NO: 299400 - DNA, 33 bp, Homo sapien
cccgcagattatgagcgagttctcctgaatgct

SEQ ID NO: 299401 - DNA, 33 bp, Homo sapien
tgcatgaataggttatcaaaagtaccatcaagt

SEQ ID NO: 299402 - DNA, 33 bp, Homo sapien
tgcatgaataggttatgaaaagtaccatcaagt

SEQ ID NO: 299403 - DNA, 33 bp, Homo sapien
gtagttgcaagcctgtcaattctatttcttagc

SEQ ID NO: 299404 - DNA, 33 bp, Homo sapien
gtagttgcaagcctgttaattctatttcttagc

SEQ ID NO: 299405 - DNA, 33 bp, Homo sapien
agtatgttaagagacgaaaaatagtcctgtgac

SEQ ID NO: 299406 - DNA, 33 bp, Homo sapien
agtatgttaagagacggaaaatagtcctgtgac

SEQ ID NO: 299407 - DNA, 33 bp, Homo sapien
gtctgtcaacagatgacggcttctagcgcttcc

SEQ ID NO: 299408 - DNA, 33 bp, Homo sapien
gtctgtcaacagatgatggcttctagcgcttcc

SEQ ID NO: 299409 - DNA, 33 bp, Homo sapien
cctcagcagagaggaactgaacaaagagagaag

SEQ ID NO: 299410 - DNA, 33 bp, Homo sapien
cctcagcagagaggaattgaacaaagagagaag

SEQ ID NO: 299411 - DNA, 33 bp, Homo sapien
tgaggggagacagttacgccttcttcccgtcct

SEQ ID NO: 299412 - DNA, 33 bp, Homo sapien
tgaggggagacagttatgccttcttcccgtcct

SEQ ID NO: 299413 - DNA, 33 bp, Homo sapien
atagatgcccattgtcgaaattaaggttagctc

SEQ ID NO: 299414 - DNA, 33 bp, Homo sapien
atagatgcccattgtctaaattaaggttagctc

SEQ ID NO: 299415 - DNA, 33 bp, Homo sapien
atttactggcatctcacgaagtattaaaaatca

SEQ ID NO: 299416 - DNA, 33 bp, Homo sapien
atttactggcatctcatgaagtattaaaaatca

SEQ ID NO: 299417 - DNA, 33 bp, Homo sapien
gagattagtgtccttacaaagtggctgaagcga

SEQ ID NO: 299418 - DNA, 33 bp, Homo sapien
gagattagtgtccttataaagtggctgaagcga

SEQ ID NO: 299419 - DNA, 33 bp, Homo sapien
gtattctatctgtggaagctcaaaaggatgggg

SEQ ID NO: 299420 - DNA, 33 bp, Homo sapien
gtattctatctgtggaggctcaaaaggatgggg

SEQ ID NO: 299421 - DNA, 33 bp, Homo sapien
caattgagcaacaggacattataccctacgtct

SEQ ID NO: 299422 - DNA, 33 bp, Homo sapien
caattgagcaacaggatattataccctacgtct

SEQ ID NO: 299423 - DNA, 33 bp, Homo sapien
cccagcatatttatcaaaagccttttcttctga

SEQ ID NO: 299424 - DNA, 33 bp, Homo sapien
cccagcatatttatcagaagccttttcttctga

SEQ ID NO: 299425 - DNA, 33 bp, Homo sapien
ccttcagatgatagtaaaaagcccagacttcag

SEQ ID NO: 299426 - DNA, 33 bp, Homo sapien
ccttcagatgatagtataaagcccagacttcag

SEQ ID NO: 299427 - DNA, 33 bp, Homo sapien
tcatggcaatgtttcacgtctatttacatctga

SEQ ID NO: 299428 - DNA, 33 bp, Homo sapien
tcatggcaatgtttcatgtctatttacatctga

SEQ ID NO: 299429 - DNA, 33 bp, Homo sapien
tatttcacctgttgtaggtcatccttcagtgat

SEQ ID NO: 299430 - DNA, 33 bp, Homo sapien
tatttcacctgttgtatgtcatccttcagtgat

SEQ ID NO: 299431 - DNA, 33 bp, Homo sapien
caggtcattgtgactacgtattaagccttacat

SEQ ID NO: 299432 - DNA, 33 bp, Homo sapien
caggtcattgtgactatgtattaagccttacat

SEQ ID NO: 299433 - DNA, 33 bp, Homo sapien
gcacctaattttgaaggctcagaagtgtgatag

SEQ ID NO: 299434 - DNA, 33 bp, Homo sapien
gcacctaattttgaagtctcagaagtgtgatag

SEQ ID NO: 299435 - DNA, 33 bp, Homo sapien
tgtgctacgtattggacatagagaataattcta

SEQ ID NO: 299436 - DNA, 33 bp, Homo sapien
tgtgctacgtattggatatagagaataattcta

SEQ ID NO: 299437 - DNA, 33 bp, Homo sapien
gagaaagactcccctcaagcattgcacttcttc

SEQ ID NO: 299438 - DNA, 33 bp, Homo sapien
gagaaagactcccctcgagcattgcacttcttc

SEQ ID NO: 299439 - DNA, 33 bp, Homo sapien
cctgtgaatgttgaagccataacggaaatcccc

SEQ ID NO: 299440 - DNA, 33 bp, Homo sapien
cctgtgaatgttgaaggcataacggaaatcccc

SEQ ID NO: 299441 - DNA, 33 bp, Homo sapien
gtcatacgtggtagaaattcaatgcatatttta

SEQ ID NO: 299442 - DNA, 33 bp, Homo sapien
gtcatacgtggtagaacttcaatgcatatttta

SEQ ID NO: 299443 - DNA, 33 bp, Homo sapien
agacttgttgtaaaaccaagtgtaatatggttg

SEQ ID NO: 299444 - DNA, 33 bp, Homo sapien
agacttgttgtaaaactaagtgtaatatggttg

SEQ ID NO: 299445 - DNA, 33 bp, Homo sapien
ttgtgcctaaatcgcaacataattgggggataa

SEQ ID NO: 299446 - DNA, 33 bp, Homo sapien
ttgtgcctaaatcgcatcataattgggggataa

SEQ ID NO: 299447 - DNA, 33 bp, Homo sapien
aattcagctgcagggcaaggttcacttaatttt

SEQ ID NO: 299448 - DNA, 33 bp, Homo sapien
aattcagctgcagggcgaggttcacttaatttt

SEQ ID NO: 299449 - DNA, 33 bp, Homo sapien
ccagaaaattttttaaagcagattctttggtgt

SEQ ID NO: 299450 - DNA, 33 bp, Homo sapien
ccagaaaattttttaaggcagattctttggtgt

SEQ ID NO: 299451 - DNA, 33 bp, Homo sapien
acagctcactggaggtaacattacctgcaaagt

SEQ ID NO: 299452 - DNA, 33 bp, Homo sapien
acagctcactggaggtgacattacctgcaaagt

SEQ ID NO: 299453 - DNA, 33 bp, Homo sapien
agacagtgctcatgaacggtagaagcctcaaat

SEQ ID NO: 299454 - DNA, 33 bp, Homo sapien
agacagtgctcatgaatggtagaagcctcaaat

SEQ ID NO: 299455 - DNA, 33 bp, Homo sapien
agatctcagaaccaaaacttcacagtggaaact

SEQ ID NO: 299456 - DNA, 33 bp, Homo sapien
agatctcagaaccaaatcttcacagtggaaact

SEQ ID NO: 299457 - DNA, 33 bp, Homo sapien
ctctggtacagttgggaagttgtactgaaagct

SEQ ID NO: 299458 - DNA, 33 bp, Homo sapien
ctctggtacagttggggagttgtactgaaagct

SEQ ID NO: 299459 - DNA, 33 bp, Homo sapien
tgcaccaggataatcagatggaagaagccttac

SEQ ID NO: 299460 - DNA, 33 bp, Homo sapien
tgcaccaggataatcatatggaagaagccttac

SEQ ID NO: 299461 - DNA, 33 bp, Homo sapien
gacagcactgcttggcaaataagaacacagacc

SEQ ID NO: 299462 - DNA, 33 bp, Homo sapien
gacagcactgcttggcgaataagaacacagacc

SEQ ID NO: 299463 - DNA, 33 bp, Homo sapien
ggacaaaaagacaaagaccaatttggaaagtat

SEQ ID NO: 299464 - DNA, 33 bp, Homo sapien
ggacaaaaagacaaaggccaatttggaaagtat

SEQ ID NO: 299465 - DNA, 33 bp, Homo sapien
aaataaaccagtgtaaaatgatgaggacttagg

SEQ ID NO: 299466 - DNA, 33 bp, Homo sapien
aaataaaccagtgtaacatgatgaggacttagg

SEQ ID NO: 299467 - DNA, 33 bp, Homo sapien
cctgtctgggggacacggacctttcctggttct

SEQ ID NO: 299468 - DNA, 33 bp, Homo sapien
cctgtctgggggacactgacctttcctggttct

SEQ ID NO: 299469 - DNA, 33 bp, Homo sapien
caaactctcaggtgataaatatagccaaaagaa

SEQ ID NO: 299470 - DNA, 33 bp, Homo sapien
caaactctcaggtgatgaatatagccaaaagaa

SEQ ID NO: 299471 - DNA, 33 bp, Homo sapien
ctttgtacacaatgcaagagttccttaggctgg

SEQ ID NO: 299472 - DNA, 33 bp, Homo sapien
ctttgtacacaatgcaggagttccttaggctgg

SEQ ID NO: 299473 - DNA, 33 bp, Homo sapien
gcaattgggaagccacagtctccatgagccttt

SEQ ID NO: 299474 - DNA, 33 bp, Homo sapien
gcaattgggaagccacggtctccatgagccttt

SEQ ID NO: 299475 - DNA, 33 bp, Homo sapien
agagagagagaaataaagagaagagttagaatg

SEQ ID NO: 299476 - DNA, 33 bp, Homo sapien
agagagagagaaataaggagaagagttagaatg

SEQ ID NO: 299477 - DNA, 33 bp, Homo sapien
atgtgtgtatcctctactaaattatgagccctt

SEQ ID NO: 299478 - DNA, 33 bp, Homo sapien
atgtgtgtatcctctagtaaattatgagccctt

SEQ ID NO: 299479 - DNA, 33 bp, Homo sapien
acttggaaggtggttaagattaacagcagaaaa

SEQ ID NO: 299480 - DNA, 33 bp, Homo sapien
acttggaaggtggttaggattaacagcagaaaa

SEQ ID NO: 299481 - DNA, 33 bp, Homo sapien
tttgctagagacctcaactcggaagctttcaca

SEQ ID NO: 299482 - DNA, 33 bp, Homo sapien
tttgctagagacctcagctcggaagctttcaca

SEQ ID NO: 299483 - DNA, 33 bp, Homo sapien
tttatatgtaaattgaaaagtaacacataatat

SEQ ID NO: 299484 - DNA, 33 bp, Homo sapien
tttatatgtaaattgagaagtaacacataatat

SEQ ID NO: 299485 - DNA, 33 bp, Homo sapien
ttaattagaaatatgtcaacctcagctgctagg

SEQ ID NO: 299486 - DNA, 33 bp, Homo sapien
ttaattagaaatatgtgaacctcagctgctagg

SEQ ID NO: 299487 - DNA, 33 bp, Homo sapien
aatcatctgtcatcccaagactatcttccaagt

SEQ ID NO: 299488 - DNA, 33 bp, Homo sapien
aatcatctgtcatcccgagactatcttccaagt

SEQ ID NO: 299489 - DNA, 33 bp, Homo sapien
ttagcagaaatgtcaacgatatatgttcagatg

SEQ ID NO: 299490 - DNA, 33 bp, Homo sapien
ttagcagaaatgtcaatgatatatgttcagatg

SEQ ID NO: 299491 - DNA, 33 bp, Homo sapien
attaatcttagtttaccacacagacagcctttg

SEQ ID NO: 299492 - DNA, 33 bp, Homo sapien
attaatcttagtttacgacacagacagcctttg

SEQ ID NO: 299493 - DNA, 33 bp, Homo sapien
gtggaggaagggatgaagagaaaatagaaagct

SEQ ID NO: 299494 - DNA, 33 bp, Homo sapien
gtggaggaagggatgaggagaaaatagaaagct

SEQ ID NO: 299495 - DNA, 33 bp, Homo sapien
tcagtataagtgtacacagttttcaatttccag

SEQ ID NO: 299496 - DNA, 33 bp, Homo sapien
tcagtataagtgtacatagttttcaatttccag

SEQ ID NO: 299497 - DNA, 33 bp, Homo sapien
cataggcatttcagataaacctgttctaaaatc

SEQ ID NO: 299498 - DNA, 33 bp, Homo sapien
cataggcatttcagatgaacctgttctaaaatc

SEQ ID NO: 299499 - DNA, 33 bp, Homo sapien
tattcgtttagtgctgaaagtctaaataggaaa

SEQ ID NO: 299500 - DNA, 33 bp, Homo sapien
tattcgtttagtgctggaagtctaaataggaaa

SEQ ID NO: 299501 - DNA, 33 bp, Homo sapien
gggatgagccatctgaacaatatgttaccactt

SEQ ID NO: 299502 - DNA, 33 bp, Homo sapien
gggatgagccatctgagcaatatgttaccactt

SEQ ID NO: 299503 - DNA, 33 bp, Homo sapien
ggaggctaacaaaataaacaaggacaaacaaat

SEQ ID NO: 299504 - DNA, 33 bp, Homo sapien
ggaggctaacaaaatacacaaggacaaacaaat

SEQ ID NO: 299505 - DNA, 33 bp, Homo sapien
aagtagagacaacacaatgtgatgaagcttgat

SEQ ID NO: 299506 - DNA, 33 bp, Homo sapien
aagtagagacaacacagtgtgatgaagcttgat

SEQ ID NO: 299507 - DNA, 33 bp, Homo sapien
gttttggtgcatccaacgacagtagggtttttt

SEQ ID NO: 299508 - DNA, 33 bp, Homo sapien
gttttggtgcatccaatgacagtagggtttttt

SEQ ID NO: 299509 - DNA, 33 bp, Homo sapien
taaataggcaaatctaaactgtggtgctaaaga

SEQ ID NO: 299510 - DNA, 33 bp, Homo sapien
taaataggcaaatctacactgtggtgctaaaga

SEQ ID NO: 299511 - DNA, 33 bp, Homo sapien
taaggcagtaaaatagacaaccaaaattagcaa

SEQ ID NO: 299512 - DNA, 33 bp, Homo sapien
taaggcagtaaaatagtcaaccaaaattagcaa

SEQ ID NO: 299513 - DNA, 33 bp, Homo sapien
gctgtctgtccttatcaaaaggaaggcaggcag

SEQ ID NO: 299514 - DNA, 33 bp, Homo sapien
gctgtctgtccttatccaaaggaaggcaggcag

SEQ ID NO: 299515 - DNA, 33 bp, Homo sapien
ggaaataagtagccaacagctgcaaaatgcagt

SEQ ID NO: 299516 - DNA, 33 bp, Homo sapien
ggaaataagtagccaatagctgcaaaatgcagt

SEQ ID NO: 299517 - DNA, 33 bp, Homo sapien
tccatacatacccaaaagcacaagagagtcaaa

SEQ ID NO: 299518 - DNA, 33 bp, Homo sapien
tccatacatacccaaaggcacaagagagtcaaa

SEQ ID NO: 299519 - DNA, 33 bp, Homo sapien
ctggacctgacatttacggattcatccaaggga

SEQ ID NO: 299520 - DNA, 33 bp, Homo sapien
ctggacctgacatttatggattcatccaaggga

SEQ ID NO: 299521 - DNA, 33 bp, Homo sapien
actaacccagttctaactccctgtgaagcagga

SEQ ID NO: 299522 - DNA, 33 bp, Homo sapien
actaacccagttctaattccctgtgaagcagga

SEQ ID NO: 299523 - DNA, 33 bp, Homo sapien
tgtagttagcagtcaactcctggagaactggga

SEQ ID NO: 299524 - DNA, 33 bp, Homo sapien
tgtagttagcagtcaattcctggagaactggga

SEQ ID NO: 299525 - DNA, 33 bp, Homo sapien
tactgaatattttgcaacttctatcagtaccca

SEQ ID NO: 299526 - DNA, 33 bp, Homo sapien
tactgaatattttgcaccttctatcagtaccca

SEQ ID NO: 299527 - DNA, 33 bp, Homo sapien
atgctgaacttacaataaagttatggtccaata

SEQ ID NO: 299528 - DNA, 33 bp, Homo sapien
atgctgaacttacaatgaagttatggtccaata

SEQ ID NO: 299529 - DNA, 33 bp, Homo sapien
aagtagaaattggaacacattttaattgcctga

SEQ ID NO: 299530 - DNA, 33 bp, Homo sapien
aagtagaaattggaacgcattttaattgcctga

SEQ ID NO: 299531 - DNA, 33 bp, Homo sapien
gcaggatttggttcagccaactacaggatgaaa

SEQ ID NO: 299532 - DNA, 33 bp, Homo sapien
gcaggatttggttcagtcaactacaggatgaaa

SEQ ID NO: 299533 - DNA, 33 bp, Homo sapien
gagtcatgaatgttggcatagcaggaaaaacct

SEQ ID NO: 299534 - DNA, 33 bp, Homo sapien
gagtcatgaatgttggtatagcaggaaaaacct

SEQ ID NO: 299535 - DNA, 33 bp, Homo sapien
ctaggcatagtaaaaaatgtggaagatgaggta

SEQ ID NO: 299536 - DNA, 33 bp, Homo sapien
ctaggcatagtaaaaagtgtggaagatgaggta

SEQ ID NO: 299537 - DNA, 33 bp, Homo sapien
atgtcgaaagccaggacaggctgaaagctaggc

SEQ ID NO: 299538 - DNA, 33 bp, Homo sapien
atgtcgaaagccaggataggctgaaagctaggc

SEQ ID NO: 299539 - DNA, 33 bp, Homo sapien
ccccatttgacagaggcccggagagctcctggg

SEQ ID NO: 299540 - DNA, 33 bp, Homo sapien
ccccatttgacagaggtccggagagctcctggg

SEQ ID NO: 299541 - DNA, 33 bp, Homo sapien
aatctcattcttcaaactcatcaggcgttaaag

SEQ ID NO: 299542 - DNA, 33 bp, Homo sapien
aatctcattcttcaaagtcatcaggcgttaaag

SEQ ID NO: 299543 - DNA, 33 bp, Homo sapien
ccagggtcctggggtcgcccggaaggcaatctt

SEQ ID NO: 299544 - DNA, 33 bp, Homo sapien
ccagggtcctggggtctcccggaaggcaatctt

SEQ ID NO: 299545 - DNA, 33 bp, Homo sapien
gatgtttaaacaagaaaccttccagaagtcatg

SEQ ID NO: 299546 - DNA, 33 bp, Homo sapien
gatgtttaaacaagaagccttccagaagtcatg

SEQ ID NO: 299547 - DNA, 33 bp, Homo sapien
aaaagctcagtacaagaaaaagcaagtttccct

SEQ ID NO: 299548 - DNA, 33 bp, Homo sapien
aaaagctcagtacaaggaaaagcaagtttccct

SEQ ID NO: 299549 - DNA, 33 bp, Homo sapien
aagcgatcttccctgtgtcataagtaagctcat

SEQ ID NO: 299550 - DNA, 33 bp, Homo sapien
aagcgatcttccctgtttcataagtaagctcat

SEQ ID NO: 299551 - DNA, 33 bp, Homo sapien
cccatcttggaaacataaggcctagaatgttgt

SEQ ID NO: 299552 - DNA, 33 bp, Homo sapien
cccatcttggaaacatgaggcctagaatgttgt

SEQ ID NO: 299553 - DNA, 33 bp, Homo sapien
taatagctcaatttcagcaggatatatttattt

SEQ ID NO: 299554 - DNA, 33 bp, Homo sapien
taatagctcaatttcatcaggatatatttattt

SEQ ID NO: 299555 - DNA, 33 bp, Homo sapien
aaattgatatgacttacccccttccttcttgaa

SEQ ID NO: 299556 - DNA, 33 bp, Homo sapien
aaattgatatgacttagccccttccttcttgaa

SEQ ID NO: 299557 - DNA, 33 bp, Homo sapien
tcttgtgaattagagaatactgggagatttcaa

SEQ ID NO: 299558 - DNA, 33 bp, Homo sapien
tcttgtgaattagagactactgggagatttcaa

SEQ ID NO: 299559 - DNA, 33 bp, Homo sapien
caatgtgacctctcccaaatatatttaagtcca

SEQ ID NO: 299560 - DNA, 33 bp, Homo sapien
caatgtgacctctcccgaatatatttaagtcca

SEQ ID NO: 299561 - DNA, 33 bp, Homo sapien
caaagtaagtccacaccgataaggcacctagaa

SEQ ID NO: 299562 - DNA, 33 bp, Homo sapien
caaagtaagtccacactgataaggcacctagaa

SEQ ID NO: 299563 - DNA, 33 bp, Homo sapien
ctttcttattccaccagtcacgaaggtgctcta

SEQ ID NO: 299564 - DNA, 33 bp, Homo sapien
ctttcttattccaccattcacgaaggtgctcta

SEQ ID NO: 299565 - DNA, 33 bp, Homo sapien
gaagaagctcatagaccgaacagagagataaat

SEQ ID NO: 299566 - DNA, 33 bp, Homo sapien
gaagaagctcatagactgaacagagagataaat

SEQ ID NO: 299567 - DNA, 33 bp, Homo sapien
ggcagtggcaaatgtaccagagaagctgagaag

SEQ ID NO: 299568 - DNA, 33 bp, Homo sapien
ggcagtggcaaatgtatcagagaagctgagaag

SEQ ID NO: 299569 - DNA, 33 bp, Homo sapien
taactattccaaacacgataattacaattctaa

SEQ ID NO: 299570 - DNA, 33 bp, Homo sapien
taactattccaaacactataattacaattctaa

SEQ ID NO: 299571 - DNA, 33 bp, Homo sapien
gtacttgttctcactacggagtaatcctgatct

SEQ ID NO: 299572 - DNA, 33 bp, Homo sapien
gtacttgttctcactatggagtaatcctgatct

SEQ ID NO: 299573 - DNA, 33 bp, Homo sapien
tttccatttgggtgaaagtaacataataatttg

SEQ ID NO: 299574 - DNA, 33 bp, Homo sapien
tttccatttgggtgaacgtaacataataatttg

SEQ ID NO: 299575 - DNA, 33 bp, Homo sapien
agtgcttgttgaacatcaattctgtggaaggtg

SEQ ID NO: 299576 - DNA, 33 bp, Homo sapien
agtgcttgttgaacattaattctgtggaaggtg

SEQ ID NO: 299577 - DNA, 33 bp, Homo sapien
gtgtaagttagttctaccactgtggaagacaat

SEQ ID NO: 299578 - DNA, 33 bp, Homo sapien
gtgtaagttagttctatcactgtggaagacaat

SEQ ID NO: 299579 - DNA, 33 bp, Homo sapien
aattaggtataatcacacaaacaacagtaggac

SEQ ID NO: 299580 - DNA, 33 bp, Homo sapien
aattaggtataatcactcaaacaacagtaggac

SEQ ID NO: 299581 - DNA, 33 bp, Homo sapien
taaatgttcattcaacaaggctgtctattgtgg

SEQ ID NO: 299582 - DNA, 33 bp, Homo sapien
taaatgttcattcaacgaggctgtctattgtgg

SEQ ID NO: 299583 - DNA, 33 bp, Homo sapien
gagtgagtcactgtcacggttattggtccaatc

SEQ ID NO: 299584 - DNA, 33 bp, Homo sapien
gagtgagtcactgtcatggttattggtccaatc

SEQ ID NO: 299585 - DNA, 33 bp, Homo sapien
ctcaaaagtcttgcacaatgagtggtaacagca

SEQ ID NO: 299586 - DNA, 33 bp, Homo sapien
ctcaaaagtcttgcacgatgagtggtaacagca

SEQ ID NO: 299587 - DNA, 33 bp, Homo sapien
acataagacctaacaccataaacaccctagaag

SEQ ID NO: 299588 - DNA, 33 bp, Homo sapien
acataagacctaacactataaacaccctagaag

SEQ ID NO: 299589 - DNA, 33 bp, Homo sapien
ggcacttctacattgcgaaaaataggttctcaa

SEQ ID NO: 299590 - DNA, 33 bp, Homo sapien
ggcacttctacattgctaaaaataggttctcaa

SEQ ID NO: 299591 - DNA, 33 bp, Homo sapien
gcattgttccagaaaccggatttatgtgctgat

SEQ ID NO: 299592 - DNA, 33 bp, Homo sapien
gcattgttccagaaactggatttatgtgctgat

SEQ ID NO: 299593 - DNA, 33 bp, Homo sapien
atgtgctgattataaaattcaagtgcaaatcct

SEQ ID NO: 299594 - DNA, 33 bp, Homo sapien
atgtgctgattataaagttcaagtgcaaatcct

SEQ ID NO: 299595 - DNA, 33 bp, Homo sapien
agccttctcaatatacaggtcaaatgtaatttc

SEQ ID NO: 299596 - DNA, 33 bp, Homo sapien
agccttctcaatatacgggtcaaatgtaatttc

SEQ ID NO: 299597 - DNA, 33 bp, Homo sapien
actctgctatattccccacatacgcagcctgaa

SEQ ID NO: 299598 - DNA, 33 bp, Homo sapien
actctgctatattcccgacatacgcagcctgaa

SEQ ID NO: 299599 - DNA, 33 bp, Homo sapien
gttagtttacaggcgacactaccaaggttcata

SEQ ID NO: 299600 - DNA, 33 bp, Homo sapien
gttagtttacaggcgatactaccaaggttcata

SEQ ID NO: 299601 - DNA, 33 bp, Homo sapien
aggttcatagaactcaatgacctactccaagtt

SEQ ID NO: 299602 - DNA, 33 bp, Homo sapien
aggttcatagaactcagtgacctactccaagtt

SEQ ID NO: 299603 - DNA, 33 bp, Homo sapien
ggttgaataactattggatgctcactatttgat

SEQ ID NO: 299604 - DNA, 33 bp, Homo sapien
ggttgaataactattgtatgctcactatttgat

SEQ ID NO: 299605 - DNA, 33 bp, Homo sapien
ttctgcatatggttaacgacctatctctgcacc

SEQ ID NO: 299606 - DNA, 33 bp, Homo sapien
ttctgcatatggttaatgacctatctctgcacc

SEQ ID NO: 299607 - DNA, 33 bp, Homo sapien
tagaattatcaggaagcagaaatgattaaagcc

SEQ ID NO: 299608 - DNA, 33 bp, Homo sapien
tagaattatcaggaaggagaaatgattaaagcc

SEQ ID NO: 299609 - DNA, 33 bp, Homo sapien
ctggagaggtatgttacgactagagaaaatagt

SEQ ID NO: 299610 - DNA, 33 bp, Homo sapien
ctggagaggtatgttatgactagagaaaatagt

SEQ ID NO: 299611 - DNA, 33 bp, Homo sapien
atgcacagcctgacagcagagcagcccagtcat

SEQ ID NO: 299612 - DNA, 33 bp, Homo sapien
atgcacagcctgacagtagagcagcccagtcat

SEQ ID NO: 299613 - DNA, 33 bp, Homo sapien
gtcaggctgtgcatagcattaagtgagattgtg

SEQ ID NO: 299614 - DNA, 33 bp, Homo sapien
gtcaggctgtgcatagtattaagtgagattgtg

SEQ ID NO: 299615 - DNA, 33 bp, Homo sapien
gtacctgtggagtaaaaggtataaactcagtgt

SEQ ID NO: 299616 - DNA, 33 bp, Homo sapien
gtacctgtggagtaaagggtataaactcagtgt

SEQ ID NO: 299617 - DNA, 33 bp, Homo sapien
acacaattttgcattcaataatgtggttttagt

SEQ ID NO: 299618 - DNA, 33 bp, Homo sapien
acacaattttgcattcgataatgtggttttagt

SEQ ID NO: 299619 - DNA, 33 bp, Homo sapien
tacaatgagtatttaactagctgcattaccata

SEQ ID NO: 299620 - DNA, 33 bp, Homo sapien
tacaatgagtatttaattagctgcattaccata

SEQ ID NO: 299621 - DNA, 33 bp, Homo sapien
atatccatttctgcaggctcctttttggctgga

SEQ ID NO: 299622 - DNA, 33 bp, Homo sapien
atatccatttctgcagtctcctttttggctgga

SEQ ID NO: 299623 - DNA, 33 bp, Homo sapien
ctttatatatgtgagacgtgcatactctttaac

SEQ ID NO: 299624 - DNA, 33 bp, Homo sapien
ctttatatatgtgagatgtgcatactctttaac

SEQ ID NO: 299625 - DNA, 33 bp, Homo sapien
ataaaataaccagaatgagtaatcatagaaacg

SEQ ID NO: 299626 - DNA, 33 bp, Homo sapien
ataaaataaccagaattagtaatcatagaaacg

SEQ ID NO: 299627 - DNA, 33 bp, Homo sapien
ggtggacccaaatccaatctgatgtaagaagag

SEQ ID NO: 299628 - DNA, 33 bp, Homo sapien
ggtggacccaaatccagtctgatgtaagaagag

SEQ ID NO: 299629 - DNA, 33 bp, Homo sapien
aagggggagagatctaacaggcagttggacaca

SEQ ID NO: 299630 - DNA, 33 bp, Homo sapien
aagggggagagatctagcaggcagttggacaca

SEQ ID NO: 299631 - DNA, 33 bp, Homo sapien
cttaaggagaaattgacataagattgaggaggt

SEQ ID NO: 299632 - DNA, 33 bp, Homo sapien
cttaaggagaaattgatataagattgaggaggt

SEQ ID NO: 299633 - DNA, 33 bp, Homo sapien
tggagcgagcaatcaaacattttttgagcacct

SEQ ID NO: 299634 - DNA, 33 bp, Homo sapien
tggagcgagcaatcaatcattttttgagcacct

SEQ ID NO: 299635 - DNA, 33 bp, Homo sapien
gagggttttgcaggaagaatatgatctgaattc

SEQ ID NO: 299636 - DNA, 33 bp, Homo sapien
gagggttttgcaggaataatatgatctgaattc

SEQ ID NO: 299637 - DNA, 33 bp, Homo sapien
gcacatttataatcaaacacagtctgaatgagc

SEQ ID NO: 299638 - DNA, 33 bp, Homo sapien
gcacatttataatcaagcacagtctgaatgagc

SEQ ID NO: 299639 - DNA, 33 bp, Homo sapien
gtatatggcaaaaatcagactaggtggaatctc

SEQ ID NO: 299640 - DNA, 33 bp, Homo sapien
gtatatggcaaaaatcggactaggtggaatctc

SEQ ID NO: 299641 - DNA, 33 bp, Homo sapien
tgagctcgggtgcccaaaggaaatggctaaagt

SEQ ID NO: 299642 - DNA, 33 bp, Homo sapien
tgagctcgggtgcccacaggaaatggctaaagt

SEQ ID NO: 299643 - DNA, 33 bp, Homo sapien
ctctgctccaaatctacgctactgagggctcct

SEQ ID NO: 299644 - DNA, 33 bp, Homo sapien
ctctgctccaaatctatgctactgagggctcct

SEQ ID NO: 299645 - DNA, 33 bp, Homo sapien
tggttactattaagggccaataagggccaatga

SEQ ID NO: 299646 - DNA, 33 bp, Homo sapien
tggttactattaagggtcaataagggccaatga

SEQ ID NO: 299647 - DNA, 33 bp, Homo sapien
aagatgttttagtataaatcttgcatagcctgg

SEQ ID NO: 299648 - DNA, 33 bp, Homo sapien
aagatgttttagtatacatcttgcatagcctgg

SEQ ID NO: 299649 - DNA, 33 bp, Homo sapien
caagacactgaaggaaacgtcttcaaaataact

SEQ ID NO: 299650 - DNA, 33 bp, Homo sapien
caagacactgaaggaatcgtcttcaaaataact

SEQ ID NO: 299651 - DNA, 33 bp, Homo sapien
tggaaatagcagataaggcaccttaatgcacct

SEQ ID NO: 299652 - DNA, 33 bp, Homo sapien
tggaaatagcagataatgcaccttaatgcacct

SEQ ID NO: 299653 - DNA, 33 bp, Homo sapien
gagccttcgggtcctccacaacttcagtgccaa

SEQ ID NO: 299654 - DNA, 33 bp, Homo sapien
gagccttcgggtcctctacaacttcagtgccaa

SEQ ID NO: 299655 - DNA, 33 bp, Homo sapien
tgcttggattaaaagcaagagcctacagtgctc

SEQ ID NO: 299656 - DNA, 33 bp, Homo sapien
tgcttggattaaaagcgagagcctacagtgctc

SEQ ID NO: 299657 - DNA, 33 bp, Homo sapien
taaggaaagaaaaccaaatcatcctaagtgaaa

SEQ ID NO: 299658 - DNA, 33 bp, Homo sapien
taaggaaagaaaaccatatcatcctaagtgaaa

SEQ ID NO: 299659 - DNA, 33 bp, Homo sapien
aaagagaagcatataaagtatttggaaggaaag

SEQ ID NO: 299660 - DNA, 33 bp, Homo sapien
aaagagaagcatataaggtatttggaaggaaag

SEQ ID NO: 299661 - DNA, 33 bp, Homo sapien
tctgtgcctagataaaattgcttcctgtgtagt

SEQ ID NO: 299662 - DNA, 33 bp, Homo sapien
tctgtgcctagataaagttgcttcctgtgtagt

SEQ ID NO: 299663 - DNA, 33 bp, Homo sapien
ggctgcattgaaaatactacctgcagtcctgtg

SEQ ID NO: 299664 - DNA, 33 bp, Homo sapien
ggctgcattgaaaatattacctgcagtcctgtg

SEQ ID NO: 299665 - DNA, 33 bp, Homo sapien
tttggcttcagtatcaagttttcatatggctgg

SEQ ID NO: 299666 - DNA, 33 bp, Homo sapien
tttggcttcagtatcaggttttcatatggctgg

SEQ ID NO: 299667 - DNA, 33 bp, Homo sapien
agtaggcttaagaccaatcgtaaggttggagcc

SEQ ID NO: 299668 - DNA, 33 bp, Homo sapien
agtaggcttaagaccagtcgtaaggttggagcc

SEQ ID NO: 299669 - DNA, 33 bp, Homo sapien
taagctgagacctggaagattaaaaggggttaa

SEQ ID NO: 299670 - DNA, 33 bp, Homo sapien
taagctgagacctggaggattaaaaggggttaa

SEQ ID NO: 299671 - DNA, 33 bp, Homo sapien
gaataagttcaggaaaatttagtcgttaccaaa

SEQ ID NO: 299672 - DNA, 33 bp, Homo sapien
gaataagttcaggaaagtttagtcgttaccaaa

SEQ ID NO: 299673 - DNA, 33 bp, Homo sapien
tctgtaatacatctgaaaagaatacaaattaag

SEQ ID NO: 299674 - DNA, 33 bp, Homo sapien
tctgtaatacatctgagaagaatacaaattaag

SEQ ID NO: 299675 - DNA, 33 bp, Homo sapien
acttgcattttctctcactaaacaagagatttt

SEQ ID NO: 299676 - DNA, 33 bp, Homo sapien
acttgcattttctctcgctaaacaagagatttt

SEQ ID NO: 299677 - DNA, 33 bp, Homo sapien
atagccagaagagagacgacagtcctagatcta

SEQ ID NO: 299678 - DNA, 33 bp, Homo sapien
atagccagaagagagatgacagtcctagatcta

SEQ ID NO: 299679 - DNA, 33 bp, Homo sapien
agaaagtgccattaacaagcacatgcattagag

SEQ ID NO: 299680 - DNA, 33 bp, Homo sapien
agaaagtgccattaacgagcacatgcattagag

SEQ ID NO: 299681 - DNA, 33 bp, Homo sapien
gactcttaactgttcacccttcatgcttatcaa

SEQ ID NO: 299682 - DNA, 33 bp, Homo sapien
gactcttaactgttcatccttcatgcttatcaa

SEQ ID NO: 299683 - DNA, 33 bp, Homo sapien
atgacaatgatttcaacatacagttaagaaaaa

SEQ ID NO: 299684 - DNA, 33 bp, Homo sapien
atgacaatgatttcaatatacagttaagaaaaa

SEQ ID NO: 299685 - DNA, 33 bp, Homo sapien
cagaagaataatagcaatcactgaagtctggct

SEQ ID NO: 299686 - DNA, 33 bp, Homo sapien
cagaagaataatagcagtcactgaagtctggct

SEQ ID NO: 299687 - DNA, 33 bp, Homo sapien
tcaggtgggaccatgaaagaagatgccggatag

SEQ ID NO: 299688 - DNA, 33 bp, Homo sapien
tcaggtgggaccatgagagaagatgccggatag

SEQ ID NO: 299689 - DNA, 33 bp, Homo sapien
cctgggtcagtctggaagcagaagggatacgca

SEQ ID NO: 299690 - DNA, 33 bp, Homo sapien
cctgggtcagtctggaggcagaagggatacgca

SEQ ID NO: 299691 - DNA, 33 bp, Homo sapien
agttacttgaatactaggcaggatctgtcccta

SEQ ID NO: 299692 - DNA, 33 bp, Homo sapien
agttacttgaatactatgcaggatctgtcccta

SEQ ID NO: 299693 - DNA, 33 bp, Homo sapien
atactgaaacacactacagctgttgaaagacaa

SEQ ID NO: 299694 - DNA, 33 bp, Homo sapien
atactgaaacacactatagctgttgaaagacaa

SEQ ID NO: 299695 - DNA, 33 bp, Homo sapien
aatggccaagaagggactcagacccaggcttta

SEQ ID NO: 299696 - DNA, 33 bp, Homo sapien
aatggccaagaagggattcagacccaggcttta

SEQ ID NO: 299697 - DNA, 33 bp, Homo sapien
tgtttccatttagaagcagctgcaagataaaat

SEQ ID NO: 299698 - DNA, 33 bp, Homo sapien
tgtttccatttagaagtagctgcaagataaaat

SEQ ID NO: 299699 - DNA, 33 bp, Homo sapien
agggtgaactctagaccgtctaactccacattc

SEQ ID NO: 299700 - DNA, 33 bp, Homo sapien
agggtgaactctagactgtctaactccacattc

SEQ ID NO: 299701 - DNA, 33 bp, Homo sapien
tttcaattccagaataacaacagagagagcacc

SEQ ID NO: 299702 - DNA, 33 bp, Homo sapien
tttcaattccagaatagcaacagagagagcacc

SEQ ID NO: 299703 - DNA, 33 bp, Homo sapien
aggtgtaatagaagagaccttgtataagataat

SEQ ID NO: 299704 - DNA, 33 bp, Homo sapien
aggtgtaatagaagaggccttgtataagataat

SEQ ID NO: 299705 - DNA, 33 bp, Homo sapien
gcttccattcaaaggaccttagttcttccatcc

SEQ ID NO: 299706 - DNA, 33 bp, Homo sapien
gcttccattcaaaggagcttagttcttccatcc

SEQ ID NO: 299707 - DNA, 33 bp, Homo sapien
taatatttaggaaccactggattagataatcta

SEQ ID NO: 299708 - DNA, 33 bp, Homo sapien
taatatttaggaaccattggattagataatcta

SEQ ID NO: 299709 - DNA, 33 bp, Homo sapien
ctggtttattatgttcaaatcactcttcttcag

SEQ ID NO: 299710 - DNA, 33 bp, Homo sapien
ctggtttattatgttcgaatcactcttcttcag

SEQ ID NO: 299711 - DNA, 33 bp, Homo sapien
aaatgtagaaggatcacgtgtaattatatataa

SEQ ID NO: 299712 - DNA, 33 bp, Homo sapien
aaatgtagaaggatcatgtgtaattatatataa

SEQ ID NO: 299713 - DNA, 33 bp, Homo sapien
tggtctttgtggcaataaggtaatcagtaaagc

SEQ ID NO: 299714 - DNA, 33 bp, Homo sapien
tggtctttgtggcaattaggtaatcagtaaagc

SEQ ID NO: 299715 - DNA, 33 bp, Homo sapien
tttcttttgctgtgccaaaacgctttagtttat

SEQ ID NO: 299716 - DNA, 33 bp, Homo sapien
tttcttttgctgtgccgaaacgctttagtttat

SEQ ID NO: 299717 - DNA, 33 bp, Homo sapien
tagtcctcaacttactcactactgaaaaagaaa

SEQ ID NO: 299718 - DNA, 33 bp, Homo sapien
tagtcctcaacttacttactactgaaaaagaaa

SEQ ID NO: 299719 - DNA, 33 bp, Homo sapien
ccatcagtctcagcaacttaacccgggctgtac

SEQ ID NO: 299720 - DNA, 33 bp, Homo sapien
ccatcagtctcagcaatttaacccgggctgtac

SEQ ID NO: 299721 - DNA, 33 bp, Homo sapien
tttcctgatatatgaccactaaaaccttaaaat

SEQ ID NO: 299722 - DNA, 33 bp, Homo sapien
tttcctgatatatgactactaaaaccttaaaat

SEQ ID NO: 299723 - DNA, 33 bp, Homo sapien
attaaggtccaaactcccccagcaaccacacaa

SEQ ID NO: 299724 - DNA, 33 bp, Homo sapien
attaaggtccaaactctcccagcaaccacacaa

SEQ ID NO: 299725 - DNA, 33 bp, Homo sapien
agaagcagccagatgaaaacgatgctcctcttc

SEQ ID NO: 299726 - DNA, 33 bp, Homo sapien
agaagcagccagatgacaacgatgctcctcttc

SEQ ID NO: 299727 - DNA, 33 bp, Homo sapien
ggtagagtcacacagacgaggagccacaaaaca

SEQ ID NO: 299728 - DNA, 33 bp, Homo sapien
ggtagagtcacacagatgaggagccacaaaaca

SEQ ID NO: 299729 - DNA, 33 bp, Homo sapien
agcctgtggtcacagagggtcaatcccagaaat

SEQ ID NO: 299730 - DNA, 33 bp, Homo sapien
agcctgtggtcacagatggtcaatcccagaaat

SEQ ID NO: 299731 - DNA, 33 bp, Homo sapien
catgtgatttcaagaacggaaggagtaatgggc

SEQ ID NO: 299732 - DNA, 33 bp, Homo sapien
catgtgatttcaagaatggaaggagtaatgggc

SEQ ID NO: 299733 - DNA, 33 bp, Homo sapien
cttttcggcatagtaaacttttaagtaacttca

SEQ ID NO: 299734 - DNA, 33 bp, Homo sapien
cttttcggcatagtaaccttttaagtaacttca

SEQ ID NO: 299735 - DNA, 33 bp, Homo sapien
tgttttcacgggcaaactaaataaacccaggca

SEQ ID NO: 299736 - DNA, 33 bp, Homo sapien
tgttttcacgggcaaagtaaataaacccaggca

SEQ ID NO: 299737 - DNA, 33 bp, Homo sapien
cccacacaggactgacaaatcaggaagaacaaa

SEQ ID NO: 299738 - DNA, 33 bp, Homo sapien
cccacacaggactgacgaatcaggaagaacaaa

SEQ ID NO: 299739 - DNA, 33 bp, Homo sapien
tatctcttatctactacagaacaggagcgaagg

SEQ ID NO: 299740 - DNA, 33 bp, Homo sapien
tatctcttatctactatagaacaggagcgaagg

SEQ ID NO: 299741 - DNA, 33 bp, Homo sapien
cagaactatggaatgaagtgaaacctttggatg

SEQ ID NO: 299742 - DNA, 33 bp, Homo sapien
cagaactatggaatgaggtgaaacctttggatg

SEQ ID NO: 299743 - DNA, 33 bp, Homo sapien
tgactgaagatagttacgatgttggcacaccca

SEQ ID NO: 299744 - DNA, 33 bp, Homo sapien
tgactgaagatagttatgatgttggcacaccca

SEQ ID NO: 299745 - DNA, 33 bp, Homo sapien
agccagtacagtgaatcacctccttgaggggcc

SEQ ID NO: 299746 - DNA, 33 bp, Homo sapien
agccagtacagtgaatgacctccttgaggggcc

SEQ ID NO: 299747 - DNA, 33 bp, Homo sapien
tgtataataccctatgaaattcagcaataaata

SEQ ID NO: 299748 - DNA, 33 bp, Homo sapien
tgtataataccctatgcaattcagcaataaata

SEQ ID NO: 299749 - DNA, 33 bp, Homo sapien
aacaatgtgtttgcaacctaaaggagtgaatag

SEQ ID NO: 299750 - DNA, 33 bp, Homo sapien
aacaatgtgtttgcaagctaaaggagtgaatag

SEQ ID NO: 299751 - DNA, 33 bp, Homo sapien
attgtatttagacggaatcatctacaagcataa

SEQ ID NO: 299752 - DNA, 33 bp, Homo sapien
attgtatttagacggactcatctacaagcataa

SEQ ID NO: 299753 - DNA, 33 bp, Homo sapien
aaattatgtttcaagacgtcaattaaaggagca

SEQ ID NO: 299754 - DNA, 33 bp, Homo sapien
aaattatgtttcaagatgtcaattaaaggagca

SEQ ID NO: 299755 - DNA, 33 bp, Homo sapien
ctgatttcctggctctaacttcaaacctttatt

SEQ ID NO: 299756 - DNA, 33 bp, Homo sapien
ctgatttcctggctcttacttcaaacctttatt

SEQ ID NO: 299757 - DNA, 33 bp, Homo sapien
tgcgttacaccatatagctaacacacaccctag

SEQ ID NO: 299758 - DNA, 33 bp, Homo sapien
tgcgttacaccatatatctaacacacaccctag

SEQ ID NO: 299759 - DNA, 33 bp, Homo sapien
ctggtggtaggattaaagggaaaatatttaatt

SEQ ID NO: 299760 - DNA, 33 bp, Homo sapien
ctggtggtaggattaaggggaaaatatttaatt

SEQ ID NO: 299761 - DNA, 33 bp, Homo sapien
tccccagagttatggcaagatggagagggagta

SEQ ID NO: 299762 - DNA, 33 bp, Homo sapien
tccccagagttatggcgagatggagagggagta

SEQ ID NO: 299763 - DNA, 33 bp, Homo sapien
ggctctgtctaagaagcatggaagctaatgttc

SEQ ID NO: 299764 - DNA, 33 bp, Homo sapien
ggctctgtctaagaagtatggaagctaatgttc

SEQ ID NO: 299765 - DNA, 33 bp, Homo sapien
tggggcagggtgaacacggctgcttgaagagac

SEQ ID NO: 299766 - DNA, 33 bp, Homo sapien
tggggcagggtgaacatggctgcttgaagagac

SEQ ID NO: 299767 - DNA, 33 bp, Homo sapien
tattgccaggtataaacatatgcattacataac

SEQ ID NO: 299768 - DNA, 33 bp, Homo sapien
tattgccaggtataaagatatgcattacataac

SEQ ID NO: 299769 - DNA, 33 bp, Homo sapien
ttagtcaaaaagctaacggatgaattaaaaagg

SEQ ID NO: 299770 - DNA, 33 bp, Homo sapien
ttagtcaaaaagctaatggatgaattaaaaagg

SEQ ID NO: 299771 - DNA, 33 bp, Homo sapien
tcttggttttccttaacctcagaatgtttttat

SEQ ID NO: 299772 - DNA, 33 bp, Homo sapien
tcttggttttccttaatctcagaatgtttttat

SEQ ID NO: 299773 - DNA, 33 bp, Homo sapien
aatacaagacacttacaccactcagagattctt

SEQ ID NO: 299774 - DNA, 33 bp, Homo sapien
aatacaagacacttaccccactcagagattctt

SEQ ID NO: 299775 - DNA, 33 bp, Homo sapien
atggacactgaatcaacaaaataaaacattttt

SEQ ID NO: 299776 - DNA, 33 bp, Homo sapien
atggacactgaatcaagaaaataaaacattttt

SEQ ID NO: 299777 - DNA, 33 bp, Homo sapien
accttttagtctttaacattctttgttcctttt

SEQ ID NO: 299778 - DNA, 33 bp, Homo sapien
accttttagtctttaagattctttgttcctttt

SEQ ID NO: 299779 - DNA, 33 bp, Homo sapien
ggttgtgtgatgctgaaaaactactctcactac

SEQ ID NO: 299780 - DNA, 33 bp, Homo sapien
ggttgtgtgatgctgacaaactactctcactac

SEQ ID NO: 299781 - DNA, 33 bp, Homo sapien
atgttacagtaaatagcaagactatataaaggt

SEQ ID NO: 299782 - DNA, 33 bp, Homo sapien
atgttacagtaaataggaagactatataaaggt

SEQ ID NO: 299783 - DNA, 33 bp, Homo sapien
ttcaatgcctatcatacgttgggcactttgcta

SEQ ID NO: 299784 - DNA, 33 bp, Homo sapien
ttcaatgcctatcatatgttgggcactttgcta

SEQ ID NO: 299785 - DNA, 33 bp, Homo sapien
attgtgtatttggtacccaatcctacatggaag

SEQ ID NO: 299786 - DNA, 33 bp, Homo sapien
attgtgtatttggtactcaatcctacatggaag

SEQ ID NO: 299787 - DNA, 33 bp, Homo sapien
catgaccttaattgatcacaatagcttccaacc

SEQ ID NO: 299788 - DNA, 33 bp, Homo sapien
catgaccttaattgattacaatagcttccaacc

SEQ ID NO: 299789 - DNA, 33 bp, Homo sapien
ccccacctaaacctgaaataaactggcttattt

SEQ ID NO: 299790 - DNA, 33 bp, Homo sapien
ccccacctaaacctgagataaactggcttattt

SEQ ID NO: 299791 - DNA, 33 bp, Homo sapien
agatcaaggatttaaaattgtgctctgaggaga

SEQ ID NO: 299792 - DNA, 33 bp, Homo sapien
agatcaaggatttaaagttgtgctctgaggaga

SEQ ID NO: 299793 - DNA, 33 bp, Homo sapien
agcatccataacccaaagcgaagctaagtaaaa

SEQ ID NO: 299794 - DNA, 33 bp, Homo sapien
agcatccataacccaaggcgaagctaagtaaaa

SEQ ID NO: 299795 - DNA, 33 bp, Homo sapien
tcatgcaaccttaatgacaaggctcaagtggga

SEQ ID NO: 299796 - DNA, 33 bp, Homo sapien
tcatgcaaccttaatgtcaaggctcaagtggga

SEQ ID NO: 299797 - DNA, 33 bp, Homo sapien
acctctcttttattgaactactgtgctatatat

SEQ ID NO: 299798 - DNA, 33 bp, Homo sapien
acctctcttttattgatctactgtgctatatat

SEQ ID NO: 299799 - DNA, 33 bp, Homo sapien
caaattactaaggcagacactcttgttgattcc

SEQ ID NO: 299800 - DNA, 33 bp, Homo sapien
caaattactaaggcaggcactcttgttgattcc

SEQ ID NO: 299801 - DNA, 33 bp, Homo sapien
accaccatgagaagaacgtgacctgattgctgc

SEQ ID NO: 299802 - DNA, 33 bp, Homo sapien
accaccatgagaagaatgtgacctgattgctgc

SEQ ID NO: 299803 - DNA, 33 bp, Homo sapien
gaggaaggaacaataaatcattgatgaacacac

SEQ ID NO: 299804 - DNA, 33 bp, Homo sapien
gaggaaggaacaataagtcattgatgaacacac

SEQ ID NO: 299805 - DNA, 33 bp, Homo sapien
caacaccttgcagttacatatggtcatttgatt

SEQ ID NO: 299806 - DNA, 33 bp, Homo sapien
caacaccttgcagttatatatggtcatttgatt

SEQ ID NO: 299807 - DNA, 33 bp, Homo sapien
caacgtacacatgatcacagctggacaatctga

SEQ ID NO: 299808 - DNA, 33 bp, Homo sapien
caacgtacacatgatcgcagctggacaatctga

SEQ ID NO: 299809 - DNA, 33 bp, Homo sapien
cagaagtccaagttagcaagtagtggagctgag

SEQ ID NO: 299810 - DNA, 33 bp, Homo sapien
cagaagtccaagttagtaagtagtggagctgag

SEQ ID NO: 299811 - DNA, 33 bp, Homo sapien
gtacatctatattcaccgtaaagtcccccagca

SEQ ID NO: 299812 - DNA, 33 bp, Homo sapien
gtacatctatattcactgtaaagtcccccagca

SEQ ID NO: 299813 - DNA, 33 bp, Homo sapien
gctattcaaaatactaactaccattcaagtcct

SEQ ID NO: 299814 - DNA, 33 bp, Homo sapien
gctattcaaaatactatctaccattcaagtcct

SEQ ID NO: 299815 - DNA, 33 bp, Homo sapien
gcaagtaatgagagtgacacatagaagacgctg

SEQ ID NO: 299816 - DNA, 33 bp, Homo sapien
gcaagtaatgagagtggcacatagaagacgctg

SEQ ID NO: 299817 - DNA, 33 bp, Homo sapien
ggtcacctttgcccaacgaccagttgctctgaa

SEQ ID NO: 299818 - DNA, 33 bp, Homo sapien
ggtcacctttgcccaatgaccagttgctctgaa

SEQ ID NO: 299819 - DNA, 33 bp, Homo sapien
taactttcagtcacacagagaatatctgggaaa

SEQ ID NO: 299820 - DNA, 33 bp, Homo sapien
taactttcagtcacacggagaatatctgggaaa

SEQ ID NO: 299821 - DNA, 33 bp, Homo sapien
gctattgtattgcgtaccgccatattgatttag

SEQ ID NO: 299822 - DNA, 33 bp, Homo sapien
gctattgtattgcgtatcgccatattgatttag

SEQ ID NO: 299823 - DNA, 33 bp, Homo sapien
agtctctgctaagctgccaaccccactgctctc

SEQ ID NO: 299824 - DNA, 33 bp, Homo sapien
agtctctgctaagctgtcaaccccactgctctc

SEQ ID NO: 299825 - DNA, 33 bp, Homo sapien
tcatgatgtctaactccctcgctcacatgcaaa

SEQ ID NO: 299826 - DNA, 33 bp, Homo sapien
tcatgatgtctaactctctcgctcacatgcaaa

SEQ ID NO: 299827 - DNA, 33 bp, Homo sapien
ctcaggaaagttttacacatggcaaaaggtgaa

SEQ ID NO: 299828 - DNA, 33 bp, Homo sapien
ctcaggaaagttttactcatggcaaaaggtgaa

SEQ ID NO: 299829 - DNA, 33 bp, Homo sapien
catttcccatcctcaaacaaatgcaaatcaatt

SEQ ID NO: 299830 - DNA, 33 bp, Homo sapien
catttcccatcctcaagcaaatgcaaatcaatt

SEQ ID NO: 299831 - DNA, 33 bp, Homo sapien
tgtctagtcttctctaaaaagggacttgttaag

SEQ ID NO: 299832 - DNA, 33 bp, Homo sapien
tgtctagtcttctctataaagggacttgttaag

SEQ ID NO: 299833 - DNA, 33 bp, Homo sapien
gttaagcaaggtcttaaagattttctgtgcact

SEQ ID NO: 299834 - DNA, 33 bp, Homo sapien
gttaagcaaggtcttacagattttctgtgcact

SEQ ID NO: 299835 - DNA, 33 bp, Homo sapien
aaagtttttctactcaatgaactgtaaactcat

SEQ ID NO: 299836 - DNA, 33 bp, Homo sapien
aaagtttttctactcagtgaactgtaaactcat

SEQ ID NO: 299837 - DNA, 33 bp, Homo sapien
tgcaggtcagatataacgtaggctaaatgcttt

SEQ ID NO: 299838 - DNA, 33 bp, Homo sapien
tgcaggtcagatataaggtaggctaaatgcttt

SEQ ID NO: 299839 - DNA, 33 bp, Homo sapien
ataagtgtcaattagcaaactcagatggtttta

SEQ ID NO: 299840 - DNA, 33 bp, Homo sapien
ataagtgtcaattagcgaactcagatggtttta

SEQ ID NO: 299841 - DNA, 33 bp, Homo sapien
tataggaactacaccaacttggcttttatcctt

SEQ ID NO: 299842 - DNA, 33 bp, Homo sapien
tataggaactacaccagcttggcttttatcctt

SEQ ID NO: 299843 - DNA, 33 bp, Homo sapien
tgctgatgccatatcactgaaaaacaaagaaaa

SEQ ID NO: 299844 - DNA, 33 bp, Homo sapien
tgctgatgccatatcattgaaaaacaaagaaaa

SEQ ID NO: 299845 - DNA, 33 bp, Homo sapien
cttgacctactatcaaagataaaaatcattctt

SEQ ID NO: 299846 - DNA, 33 bp, Homo sapien
cttgacctactatcaatgataaaaatcattctt

SEQ ID NO: 299847 - DNA, 33 bp, Homo sapien
aagccattttagtttacacgcagtttccatttt

SEQ ID NO: 299848 - DNA, 33 bp, Homo sapien
aagccattttagtttatacgcagtttccatttt

SEQ ID NO: 299849 - DNA, 33 bp, Homo sapien
ataactgagcctctaaacaagccattttagttt

SEQ ID NO: 299850 - DNA, 33 bp, Homo sapien
ataactgagcctctaaccaagccattttagttt

SEQ ID NO: 299851 - DNA, 33 bp, Homo sapien
gtatattgcatagcgaacaagtgcttcagaaga

SEQ ID NO: 299852 - DNA, 33 bp, Homo sapien
gtatattgcatagcgagcaagtgcttcagaaga

SEQ ID NO: 299853 - DNA, 33 bp, Homo sapien
cttgaagtgctgacatcagctttctagggaaca

SEQ ID NO: 299854 - DNA, 33 bp, Homo sapien
cttgaagtgctgacattagctttctagggaaca

SEQ ID NO: 299855 - DNA, 33 bp, Homo sapien
aataagatacgctttacaactttgggctaattt

SEQ ID NO: 299856 - DNA, 33 bp, Homo sapien
aataagatacgctttagaactttgggctaattt

SEQ ID NO: 299857 - DNA, 33 bp, Homo sapien
ctgtcatttaattcaacgtcatttggttataac

SEQ ID NO: 299858 - DNA, 33 bp, Homo sapien
ctgtcatttaattcaatgtcatttggttataac

SEQ ID NO: 299859 - DNA, 33 bp, Homo sapien
gaaaatttgtaacgtacataatcaaatgcatca

SEQ ID NO: 299860 - DNA, 33 bp, Homo sapien
gaaaatttgtaacgtatataatcaaatgcatca

SEQ ID NO: 299861 - DNA, 33 bp, Homo sapien
agcgtctggggagtaactgtgaagatggagagc

SEQ ID NO: 299862 - DNA, 33 bp, Homo sapien
agcgtctggggagtaattgtgaagatggagagc

SEQ ID NO: 299863 - DNA, 33 bp, Homo sapien
cagtggctataggcaaagaaatatctaatgata

SEQ ID NO: 299864 - DNA, 33 bp, Homo sapien
cagtggctataggcaaggaaatatctaatgata

SEQ ID NO: 299865 - DNA, 33 bp, Homo sapien
gtgacaaacagcatcaaggtcttctcaacagtt

SEQ ID NO: 299866 - DNA, 33 bp, Homo sapien
gtgacaaacagcatcagggtcttctcaacagtt

SEQ ID NO: 299867 - DNA, 33 bp, Homo sapien
aataagaattgcactccgaattagggacctgag

SEQ ID NO: 299868 - DNA, 33 bp, Homo sapien
aataagaattgcactctgaattagggacctgag

SEQ ID NO: 299869 - DNA, 33 bp, Homo sapien
cttaaatgtacaagagaaatttgcaatgcattt

SEQ ID NO: 299870 - DNA, 33 bp, Homo sapien
cttaaatgtacaagaggaatttgcaatgcattt

SEQ ID NO: 299871 - DNA, 33 bp, Homo sapien
ggatgttcattaaataatagtatgtgcaaaatc

SEQ ID NO: 299872 - DNA, 33 bp, Homo sapien
ggatgttcattaaatattagtatgtgcaaaatc

SEQ ID NO: 299873 - DNA, 33 bp, Homo sapien
atcaacaacaaggcaagggtttcactcttatca

SEQ ID NO: 299874 - DNA, 33 bp, Homo sapien
atcaacaacaaggcaatggtttcactcttatca

SEQ ID NO: 299875 - DNA, 33 bp, Homo sapien
ttttcatgctactaaacggcttactaatgttat

SEQ ID NO: 299876 - DNA, 33 bp, Homo sapien
ttttcatgctactaaatggcttactaatgttat

SEQ ID NO: 299877 - DNA, 33 bp, Homo sapien
atcaaaacaaaaagaaatggtaatggtcaaaac

SEQ ID NO: 299878 - DNA, 33 bp, Homo sapien
atcaaaacaaaaagaagtggtaatggtcaaaac

SEQ ID NO: 299879 - DNA, 33 bp, Homo sapien
gtagcagtggttccaactggtcaagttagactg

SEQ ID NO: 299880 - DNA, 33 bp, Homo sapien
gtagcagtggttccaattggtcaagttagactg

SEQ ID NO: 299881 - DNA, 33 bp, Homo sapien
ctcacaattatggctgaacgcaaagggtaagca

SEQ ID NO: 299882 - DNA, 33 bp, Homo sapien
ctcacaattatggctggacgcaaagggtaagca

SEQ ID NO: 299883 - DNA, 33 bp, Homo sapien
atggaatagttccatcaccttaaatattcccgt

SEQ ID NO: 299884 - DNA, 33 bp, Homo sapien
atggaatagttccatcgccttaaatattcccgt

SEQ ID NO: 299885 - DNA, 33 bp, Homo sapien
agggcaaggaataaatgaactcaagtaagtaat

SEQ ID NO: 299886 - DNA, 33 bp, Homo sapien
agggcaaggaataaattaactcaagtaagtaat

SEQ ID NO: 299887 - DNA, 33 bp, Homo sapien
tattgagaaaagattacataccaagcgctaaat

SEQ ID NO: 299888 - DNA, 33 bp, Homo sapien
tattgagaaaagattatataccaagcgctaaat

SEQ ID NO: 299889 - DNA, 33 bp, Homo sapien
atttgtattttccttacatttgccatttatata

SEQ ID NO: 299890 - DNA, 33 bp, Homo sapien
atttgtattttccttatatttgccatttatata

SEQ ID NO: 299891 - DNA, 33 bp, Homo sapien
aggtatttctttttaaacagagtatctttgaaa

SEQ ID NO: 299892 - DNA, 33 bp, Homo sapien
aggtatttctttttaatcagagtatctttgaaa

SEQ ID NO: 299893 - DNA, 33 bp, Homo sapien
tgttggggtggggaacaaagagaggttagttag

SEQ ID NO: 299894 - DNA, 33 bp, Homo sapien
tgttggggtggggaacgaagagaggttagttag

SEQ ID NO: 299895 - DNA, 33 bp, Homo sapien
ctcaaagcagttttaactcttggaaccatcact

SEQ ID NO: 299896 - DNA, 33 bp, Homo sapien
ctcaaagcagttttaattcttggaaccatcact

SEQ ID NO: 299897 - DNA, 33 bp, Homo sapien
tctaacaatgataaacacttcttgaaatgagca

SEQ ID NO: 299898 - DNA, 33 bp, Homo sapien
tctaacaatgataaactcttcttgaaatgagca

SEQ ID NO: 299899 - DNA, 33 bp, Homo sapien
accctcataattttacactttgaattgatgtgt

SEQ ID NO: 299900 - DNA, 33 bp, Homo sapien
accctcataattttaccctttgaattgatgtgt

SEQ ID NO: 299901 - DNA, 33 bp, Homo sapien
atttgctgagatcccacggtgtaaaatggaaac

SEQ ID NO: 299902 - DNA, 33 bp, Homo sapien
atttgctgagatcccatggtgtaaaatggaaac

SEQ ID NO: 299903 - DNA, 33 bp, Homo sapien
ttatcaactggttaaaaagcaataaggattaac

SEQ ID NO: 299904 - DNA, 33 bp, Homo sapien
ttatcaactggttaaatagcaataaggattaac

SEQ ID NO: 299905 - DNA, 33 bp, Homo sapien
gaaagtattttgagtacgtttgaatgaattaaa

SEQ ID NO: 299906 - DNA, 33 bp, Homo sapien
gaaagtattttgagtatgtttgaatgaattaaa

SEQ ID NO: 299907 - DNA, 33 bp, Homo sapien
aagatagtttatgtgaaagttaatcgcagtgag

SEQ ID NO: 299908 - DNA, 33 bp, Homo sapien
aagatagtttatgtgagagttaatcgcagtgag

SEQ ID NO: 299909 - DNA, 33 bp, Homo sapien
aaagttttagtggaaaaagttctgacgtagtaa

SEQ ID NO: 299910 - DNA, 33 bp, Homo sapien
aaagttttagtggaaagagttctgacgtagtaa

SEQ ID NO: 299911 - DNA, 33 bp, Homo sapien
tggctcaaaacagcaaagaaaaatactactatg

SEQ ID NO: 299912 - DNA, 33 bp, Homo sapien
tggctcaaaacagcaatgaaaaatactactatg

SEQ ID NO: 299913 - DNA, 33 bp, Homo sapien
aggagccataccctaaatctacaaggacaaaga

SEQ ID NO: 299914 - DNA, 33 bp, Homo sapien
aggagccataccctaagtctacaaggacaaaga

SEQ ID NO: 299915 - DNA, 33 bp, Homo sapien
catgtacagtgaacacaagaagagataatacaa

SEQ ID NO: 299916 - DNA, 33 bp, Homo sapien
catgtacagtgaacacgagaagagataatacaa

SEQ ID NO: 299917 - DNA, 33 bp, Homo sapien
tgggaggtaagatccaagtaatcaggaaaagct

SEQ ID NO: 299918 - DNA, 33 bp, Homo sapien
tgggaggtaagatccaggtaatcaggaaaagct

SEQ ID NO: 299919 - DNA, 33 bp, Homo sapien
ttttagcttctgaagacacttgagaagaccggt

SEQ ID NO: 299920 - DNA, 33 bp, Homo sapien
ttttagcttctgaagagacttgagaagaccggt

SEQ ID NO: 299921 - DNA, 33 bp, Homo sapien
tttgtgtaacagagtaccattttcttcaatgaa

SEQ ID NO: 299922 - DNA, 33 bp, Homo sapien
tttgtgtaacagagtatcattttcttcaatgaa

SEQ ID NO: 299923 - DNA, 33 bp, Homo sapien
aacatgagaaaagagagagaatgccattagaca

SEQ ID NO: 299924 - DNA, 33 bp, Homo sapien
aacatgagaaaagagatagaatgccattagaca

SEQ ID NO: 299925 - DNA, 33 bp, Homo sapien
tcctacacaaaggaacagtccatctgaaatctg

SEQ ID NO: 299926 - DNA, 33 bp, Homo sapien
tcctacacaaaggaaccgtccatctgaaatctg

SEQ ID NO: 299927 - DNA, 33 bp, Homo sapien
aaagagccaatgataacgtcctaaattcaataa

SEQ ID NO: 299928 - DNA, 33 bp, Homo sapien
aaagagccaatgataatgtcctaaattcaataa

SEQ ID NO: 299929 - DNA, 33 bp, Homo sapien
cagaaagattcgttaaacttgccaaatgcagta

SEQ ID NO: 299930 - DNA, 33 bp, Homo sapien
cagaaagattcgttaagcttgccaaatgcagta

SEQ ID NO: 299931 - DNA, 33 bp, Homo sapien
gaatttctgtgactaaactgggagccaaaaggt

SEQ ID NO: 299932 - DNA, 33 bp, Homo sapien
gaatttctgtgactaatctgggagccaaaaggt

SEQ ID NO: 299933 - DNA, 33 bp, Homo sapien
actttctgagtagattaaaaaaaattcagtaat

SEQ ID NO: 299934 - DNA, 33 bp, Homo sapien
actttctgagtagatttaaaaaaattcagtaat

SEQ ID NO: 299935 - DNA, 33 bp, Homo sapien
tctgggcaagaccaaacgtggcaatgaagactg

SEQ ID NO: 299936 - DNA, 33 bp, Homo sapien
tctgggcaagaccaaatgtggcaatgaagactg

SEQ ID NO: 299937 - DNA, 33 bp, Homo sapien
cctgggacatccataaacttggttcaaaagcag

SEQ ID NO: 299938 - DNA, 33 bp, Homo sapien
cctgggacatccataagcttggttcaaaagcag

SEQ ID NO: 299939 - DNA, 33 bp, Homo sapien
gcagactggatacgtaagcatactctcatggat

SEQ ID NO: 299940 - DNA, 33 bp, Homo sapien
gcagactggatacgtaggcatactctcatggat

SEQ ID NO: 299941 - DNA, 33 bp, Homo sapien
ctctcatggattaaacaatgagtttcatagcct

SEQ ID NO: 299942 - DNA, 33 bp, Homo sapien
ctctcatggattaaacgatgagtttcatagcct

SEQ ID NO: 299943 - DNA, 33 bp, Homo sapien
ctactcctacaaccagaaaataccctggctcac

SEQ ID NO: 299944 - DNA, 33 bp, Homo sapien
ctactcctacaaccaggaaataccctggctcac

SEQ ID NO: 299945 - DNA, 33 bp, Homo sapien
atatgagcttttaggaatccaaagggcagatca

SEQ ID NO: 299946 - DNA, 33 bp, Homo sapien
atatgagcttttaggagtccaaagggcagatca

SEQ ID NO: 299947 - DNA, 33 bp, Homo sapien
gataatgtaatccacaaaacaaacttaacagca

SEQ ID NO: 299948 - DNA, 33 bp, Homo sapien
gataatgtaatccacacaacaaacttaacagca

SEQ ID NO: 299949 - DNA, 33 bp, Homo sapien
cttatcattttgccacaatagccagatgatgct

SEQ ID NO: 299950 - DNA, 33 bp, Homo sapien
cttatcattttgccacgatagccagatgatgct

SEQ ID NO: 299951 - DNA, 33 bp, Homo sapien
tatatttattagagagacaactgaagtggtgag

SEQ ID NO: 299952 - DNA, 33 bp, Homo sapien
tatatttattagagaggcaactgaagtggtgag

SEQ ID NO: 299953 - DNA, 33 bp, Homo sapien
tctgagtctagcaaaaataacttccacgatgta

SEQ ID NO: 299954 - DNA, 33 bp, Homo sapien
tctgagtctagcaaaagtaacttccacgatgta

SEQ ID NO: 299955 - DNA, 33 bp, Homo sapien
gctaagccttagtagtcaattttgcgttttgat

SEQ ID NO: 299956 - DNA, 33 bp, Homo sapien
gctaagccttagtagtgaattttgcgttttgat

SEQ ID NO: 299957 - DNA, 33 bp, Homo sapien
caatggtgcagtgataacagctcaccacagcct

SEQ ID NO: 299958 - DNA, 33 bp, Homo sapien
caatggtgcagtgatagcagctcaccacagcct

SEQ ID NO: 299959 - DNA, 33 bp, Homo sapien
tgtggcatataccacactctgaataaatacttg

SEQ ID NO: 299960 - DNA, 33 bp, Homo sapien
tgtggcatataccacattctgaataaatacttg

SEQ ID NO: 299961 - DNA, 33 bp, Homo sapien
agggagtattgtactaaaaacaacagtagcctt

SEQ ID NO: 299962 - DNA, 33 bp, Homo sapien
agggagtattgtactagaaacaacagtagcctt

SEQ ID NO: 299963 - DNA, 33 bp, Homo sapien
ttattacttgaaagtccataggatgtaagaaac

SEQ ID NO: 299964 - DNA, 33 bp, Homo sapien
ttattacttgaaagtcgataggatgtaagaaac

SEQ ID NO: 299965 - DNA, 33 bp, Homo sapien
acaacaccaggagaaactccttttgcttttgga

SEQ ID NO: 299966 - DNA, 33 bp, Homo sapien
acaacaccaggagaaattccttttgcttttgga

SEQ ID NO: 299967 - DNA, 33 bp, Homo sapien
attgcaaattggttaccagtttagccacagtaa

SEQ ID NO: 299968 - DNA, 33 bp, Homo sapien
attgcaaattggttactagtttagccacagtaa

SEQ ID NO: 299969 - DNA, 33 bp, Homo sapien
ttgtagccaatttagacaagcaaaactaagctc

SEQ ID NO: 299970 - DNA, 33 bp, Homo sapien
ttgtagccaatttagataagcaaaactaagctc

SEQ ID NO: 299971 - DNA, 33 bp, Homo sapien
catgtacatcccaataaattttcacaaaatcaa

SEQ ID NO: 299972 - DNA, 33 bp, Homo sapien
catgtacatcccaatacattttcacaaaatcaa

SEQ ID NO: 299973 - DNA, 33 bp, Homo sapien
ggggatttcactaccaaatgcctagcttgaaag

SEQ ID NO: 299974 - DNA, 33 bp, Homo sapien
ggggatttcactaccagatgcctagcttgaaag

SEQ ID NO: 299975 - DNA, 33 bp, Homo sapien
ggtggccgttgctgtaaaattgctcgtatattg

SEQ ID NO: 299976 - DNA, 33 bp, Homo sapien
ggtggccgttgctgtataattgctcgtatattg

SEQ ID NO: 299977 - DNA, 33 bp, Homo sapien
agttagaaagaggccaacttcccaaatgaggct

SEQ ID NO: 299978 - DNA, 33 bp, Homo sapien
agttagaaagaggccagcttcccaaatgaggct

SEQ ID NO: 299979 - DNA, 33 bp, Homo sapien
ggccccaagctgaatacactggaagatgggaca

SEQ ID NO: 299980 - DNA, 33 bp, Homo sapien
ggccccaagctgaatagactggaagatgggaca

SEQ ID NO: 299981 - DNA, 33 bp, Homo sapien
ccgaataattactgagaaagactgagatattca

SEQ ID NO: 299982 - DNA, 33 bp, Homo sapien
ccgaataattactgaggaagactgagatattca

SEQ ID NO: 299983 - DNA, 33 bp, Homo sapien
accatccaacttcaaagaaatctcagtttgtca

SEQ ID NO: 299984 - DNA, 33 bp, Homo sapien
accatccaacttcaaataaatctcagtttgtca

SEQ ID NO: 299985 - DNA, 33 bp, Homo sapien
ggcaggagtgtgttctaaacagagaaaacaagg

SEQ ID NO: 299986 - DNA, 33 bp, Homo sapien
ggcaggagtgtgttctgaacagagaaaacaagg

SEQ ID NO: 299987 - DNA, 33 bp, Homo sapien
tttttccttccatgaaccttgacacagaaacac

SEQ ID NO: 299988 - DNA, 33 bp, Homo sapien
tttttccttccatgaatcttgacacagaaacac

SEQ ID NO: 299989 - DNA, 33 bp, Homo sapien
aaagatcctggggggaaatgtagtcacttcaga

SEQ ID NO: 299990 - DNA, 33 bp, Homo sapien
aaagatcctggggggatatgtagtcacttcaga

SEQ ID NO: 299991 - DNA, 33 bp, Homo sapien
actattactactatgaataataagcctgatgag

SEQ ID NO: 299992 - DNA, 33 bp, Homo sapien
actattactactatgagtaataagcctgatgag

SEQ ID NO: 299993 - DNA, 33 bp, Homo sapien
tggaaagactgatctacccagtttctcactatg

SEQ ID NO: 299994 - DNA, 33 bp, Homo sapien
tggaaagactgatctatccagtttctcactatg

SEQ ID NO: 299995 - DNA, 33 bp, Homo sapien
gcagaaatcaaaggacaaaagaagcaagcgatc

SEQ ID NO: 299996 - DNA, 33 bp, Homo sapien
gcagaaatcaaaggacgaaagaagcaagcgatc

SEQ ID NO: 299997 - DNA, 33 bp, Homo sapien
aggtaagtgttactgacatatttttggtgtgag

SEQ ID NO: 299998 - DNA, 33 bp, Homo sapien
aggtaagtgttactgatatatttttggtgtgag

SEQ ID NO: 299999 - DNA, 33 bp, Homo sapien
ggggtaccatcctgtaggactcattacctgttc

SEQ ID NO: 300000 - DNA, 33 bp, Homo sapien
ggggtaccatcctgtatgactcattacctgttc

SEQ ID NO: 300001 - DNA, 33 bp, Homo sapien
aatgtttatttgtcacagtagaagctcaaagta

SEQ ID NO: 300002 - DNA, 33 bp, Homo sapien
aatgtttatttgtcacggtagaagctcaaagta

SEQ ID NO: 300003 - DNA, 33 bp, Homo sapien
ctctgctgtgaaatcaataaagaatagtgataa

SEQ ID NO: 300004 - DNA, 33 bp, Homo sapien
ctctgctgtgaaatcagtaaagaatagtgataa

SEQ ID NO: 300005 - DNA, 33 bp, Homo sapien
gaacttaaaagtttacaaaaggccatattaatg

SEQ ID NO: 300006 - DNA, 33 bp, Homo sapien
gaacttaaaagtttacgaaaggccatattaatg

SEQ ID NO: 300007 - DNA, 33 bp, Homo sapien
aaaaatttctgactgacgtgttattagctcatt

SEQ ID NO: 300008 - DNA, 33 bp, Homo sapien
aaaaatttctgactgatgtgttattagctcatt

SEQ ID NO: 300009 - DNA, 33 bp, Homo sapien
agcttctcgaagcataagataccaggaagtaca

SEQ ID NO: 300010 - DNA, 33 bp, Homo sapien
agcttctcgaagcataggataccaggaagtaca

SEQ ID NO: 300011 - DNA, 33 bp, Homo sapien
atttcacagtgctattcaaaagaaatgtttgta

SEQ ID NO: 300012 - DNA, 33 bp, Homo sapien
atttcacagtgctattgaaaagaaatgtttgta

SEQ ID NO: 300013 - DNA, 33 bp, Homo sapien
tatacgatctgaggaaccaagaggttaaaaatg

SEQ ID NO: 300014 - DNA, 33 bp, Homo sapien
tatacgatctgaggaatcaagaggttaaaaatg

SEQ ID NO: 300015 - DNA, 33 bp, Homo sapien
gctgaatatgtgataacgtaattagtattcctg

SEQ ID NO: 300016 - DNA, 33 bp, Homo sapien
gctgaatatgtgataatgtaattagtattcctg

SEQ ID NO: 300017 - DNA, 33 bp, Homo sapien
acaactctacgcctaagtatctgtatgtaccat

SEQ ID NO: 300018 - DNA, 33 bp, Homo sapien
acaactctacgcctaattatctgtatgtaccat

SEQ ID NO: 300019 - DNA, 33 bp, Homo sapien
agtcagcttttcaacaactctagagggattagg

SEQ ID NO: 300020 - DNA, 33 bp, Homo sapien
agtcagcttttcaacagctctagagggattagg

SEQ ID NO: 300021 - DNA, 33 bp, Homo sapien
actataggaacattcacctatcccatgacaggt

SEQ ID NO: 300022 - DNA, 33 bp, Homo sapien
actataggaacattcatctatcccatgacaggt

SEQ ID NO: 300023 - DNA, 33 bp, Homo sapien
catcctagagagaaaagctgtaacaactgtccc

SEQ ID NO: 300024 - DNA, 33 bp, Homo sapien
catcctagagagaaaatctgtaacaactgtccc

SEQ ID NO: 300025 - DNA, 33 bp, Homo sapien
ttaaagagatcattaaagtagaaaatcaacaaa

SEQ ID NO: 300026 - DNA, 33 bp, Homo sapien
ttaaagagatcattaaggtagaaaatcaacaaa

SEQ ID NO: 300027 - DNA, 33 bp, Homo sapien
aaacattgtctaatagaattttctgcactaaca

SEQ ID NO: 300028 - DNA, 33 bp, Homo sapien
aaacattgtctaatagcattttctgcactaaca

SEQ ID NO: 300029 - DNA, 33 bp, Homo sapien
tgaacgacagggttaccaagtagagagaatctg

SEQ ID NO: 300030 - DNA, 33 bp, Homo sapien
tgaacgacagggttactaagtagagagaatctg

SEQ ID NO: 300031 - DNA, 33 bp, Homo sapien
agattttccctggccccaacacttggatcgtgg

SEQ ID NO: 300032 - DNA, 33 bp, Homo sapien
agattttccctggcccgaacacttggatcgtgg

SEQ ID NO: 300033 - DNA, 33 bp, Homo sapien
gtctcatggctgacaccgatcaaaacaaaggaa

SEQ ID NO: 300034 - DNA, 33 bp, Homo sapien
gtctcatggctgacactgatcaaaacaaaggaa

SEQ ID NO: 300035 - DNA, 33 bp, Homo sapien
catgcattgcaaagtgaagtattttattttcca

SEQ ID NO: 300036 - DNA, 33 bp, Homo sapien
catgcattgcaaagtggagtattttattttcca

SEQ ID NO: 300037 - DNA, 33 bp, Homo sapien
aaatgttaagcattgacgtattcattttctgaa

SEQ ID NO: 300038 - DNA, 33 bp, Homo sapien
aaatgttaagcattgatgtattcattttctgaa

SEQ ID NO: 300039 - DNA, 33 bp, Homo sapien
gttgttgtcgttgttaagatgcaagtttatttt

SEQ ID NO: 300040 - DNA, 33 bp, Homo sapien
gttgttgtcgttgttaggatgcaagtttatttt

SEQ ID NO: 300041 - DNA, 33 bp, Homo sapien
gtatagagaattcccacatattccgtacttaca

SEQ ID NO: 300042 - DNA, 33 bp, Homo sapien
gtatagagaattcccatatattccgtacttaca

SEQ ID NO: 300043 - DNA, 33 bp, Homo sapien
atctcctttgagtaagccattgtttatattatt

SEQ ID NO: 300044 - DNA, 33 bp, Homo sapien
atctcctttgagtaagtcattgtttatattatt

SEQ ID NO: 300045 - DNA, 33 bp, Homo sapien
attcactccactgtggaactagaccagtttttg

SEQ ID NO: 300046 - DNA, 33 bp, Homo sapien
attcactccactgtgggactagaccagtttttg

SEQ ID NO: 300047 - DNA, 33 bp, Homo sapien
agtcactagataaataggttcactgctctacta

SEQ ID NO: 300048 - DNA, 33 bp, Homo sapien
agtcactagataaatatgttcactgctctacta

SEQ ID NO: 300049 - DNA, 33 bp, Homo sapien
ttctctcctttcctaacgctctataaacactac

SEQ ID NO: 300050 - DNA, 33 bp, Homo sapien
ttctctcctttcctaatgctctataaacactac

SEQ ID NO: 300051 - DNA, 33 bp, Homo sapien
tgagtacttccgagaacggctgtctatagagtc

SEQ ID NO: 300052 - DNA, 33 bp, Homo sapien
tgagtacttccgagaatggctgtctatagagtc

SEQ ID NO: 300053 - DNA, 33 bp, Homo sapien
atcttctttgccagtgaaattaattgccctaca

SEQ ID NO: 300054 - DNA, 33 bp, Homo sapien
atcttctttgccagtgtaattaattgccctaca

SEQ ID NO: 300055 - DNA, 33 bp, Homo sapien
gccctgtgataatcccacctgggtcagatatat

SEQ ID NO: 300056 - DNA, 33 bp, Homo sapien
gccctgtgataatcccgcctgggtcagatatat

SEQ ID NO: 300057 - DNA, 33 bp, Homo sapien
aacctcaaggtcaataagtagtgtgcaaactta

SEQ ID NO: 300058 - DNA, 33 bp, Homo sapien
aacctcaaggtcaataggtagtgtgcaaactta

SEQ ID NO: 300059 - DNA, 33 bp, Homo sapien
tgaccactttgtttaacgatgacaaggatagac

SEQ ID NO: 300060 - DNA, 33 bp, Homo sapien
tgaccactttgtttaatgatgacaaggatagac

SEQ ID NO: 300061 - DNA, 33 bp, Homo sapien
attttaaatatagatgaaactgcattgtgtcat

SEQ ID NO: 300062 - DNA, 33 bp, Homo sapien
attttaaatatagatggaactgcattgtgtcat

SEQ ID NO: 300063 - DNA, 33 bp, Homo sapien
aaagattacagtctccagagatatagctgcatt

SEQ ID NO: 300064 - DNA, 33 bp, Homo sapien
aaagattacagtctcctgagatatagctgcatt

SEQ ID NO: 300065 - DNA, 33 bp, Homo sapien
tggaactcctatgtaactgttttgagggtgagt

SEQ ID NO: 300066 - DNA, 33 bp, Homo sapien
tggaactcctatgtaattgttttgagggtgagt

SEQ ID NO: 300067 - DNA, 33 bp, Homo sapien
acagtaacatctgacacacaggcattgatctca

SEQ ID NO: 300068 - DNA, 33 bp, Homo sapien
acagtaacatctgacagacaggcattgatctca

SEQ ID NO: 300069 - DNA, 33 bp, Homo sapien
atgtagtacaaagcaaaccaaagagtctgaatt

SEQ ID NO: 300070 - DNA, 33 bp, Homo sapien
atgtagtacaaagcaagccaaagagtctgaatt

SEQ ID NO: 300071 - DNA, 33 bp, Homo sapien
gccatacaattgataccgaaattaaccagacaa

SEQ ID NO: 300072 - DNA, 33 bp, Homo sapien
gccatacaattgatactgaaattaaccagacaa

SEQ ID NO: 300073 - DNA, 33 bp, Homo sapien
atattacctgatgccactcatgcaaaagtagga

SEQ ID NO: 300074 - DNA, 33 bp, Homo sapien
atattacctgatgccattcatgcaaaagtagga

SEQ ID NO: 300075 - DNA, 33 bp, Homo sapien
gttaaatttggtgataaagaaatgaaggcattt

SEQ ID NO: 300076 - DNA, 33 bp, Homo sapien
gttaaatttggtgatagagaaatgaaggcattt

SEQ ID NO: 300077 - DNA, 33 bp, Homo sapien
gaacatcacttgtcacagaaacatgacagggtc

SEQ ID NO: 300078 - DNA, 33 bp, Homo sapien
gaacatcacttgtcacggaaacatgacagggtc

SEQ ID NO: 300079 - DNA, 33 bp, Homo sapien
atctagaagaggaaaaactagaaggatatctgg

SEQ ID NO: 300080 - DNA, 33 bp, Homo sapien
atctagaagaggaaaatctagaaggatatctgg

SEQ ID NO: 300081 - DNA, 33 bp, Homo sapien
catagttccatacataaaaaccatctgaaatac

SEQ ID NO: 300082 - DNA, 33 bp, Homo sapien
catagttccatacatacaaaccatctgaaatac

SEQ ID NO: 300083 - DNA, 33 bp, Homo sapien
cgttccttgattcacaaaatatttatggaacac

SEQ ID NO: 300084 - DNA, 33 bp, Homo sapien
cgttccttgattcacagaatatttatggaacac

SEQ ID NO: 300085 - DNA, 33 bp, Homo sapien
ttagggctgcaaaaaagtttgtgaaagactgat

SEQ ID NO: 300086 - DNA, 33 bp, Homo sapien
ttagggctgcaaaaaattttgtgaaagactgat

SEQ ID NO: 300087 - DNA, 33 bp, Homo sapien
atccatataatgaccaaatggctctaaggttta

SEQ ID NO: 300088 - DNA, 33 bp, Homo sapien
atccatataatgaccagatggctctaaggttta

SEQ ID NO: 300089 - DNA, 33 bp, Homo sapien
atccagctattaatctaacatctcctcttggat

SEQ ID NO: 300090 - DNA, 33 bp, Homo sapien
atccagctattaatctcacatctcctcttggat

SEQ ID NO: 300091 - DNA, 33 bp, Homo sapien
tatggagcagatattcacaaccactgatgtgcc

SEQ ID NO: 300092 - DNA, 33 bp, Homo sapien
tatggagcagatattcgcaaccactgatgtgcc

SEQ ID NO: 300093 - DNA, 33 bp, Homo sapien
ttttttccgtccaccacgtgaagacacccagtg

SEQ ID NO: 300094 - DNA, 33 bp, Homo sapien
ttttttccgtccaccatgtgaagacacccagtg

SEQ ID NO: 300095 - DNA, 33 bp, Homo sapien
attattccaatttcaaacctaccctttaagaag

SEQ ID NO: 300096 - DNA, 33 bp, Homo sapien
attattccaatttcaagcctaccctttaagaag

SEQ ID NO: 300097 - DNA, 33 bp, Homo sapien
cattgccatttgttccaatagctaaggctacct

SEQ ID NO: 300098 - DNA, 33 bp, Homo sapien
cattgccatttgttccgatagctaaggctacct

SEQ ID NO: 300099 - DNA, 33 bp, Homo sapien
atctgcaagaaatggtcaaataatctgaggaaa

SEQ ID NO: 300100 - DNA, 33 bp, Homo sapien
atctgcaagaaatggttaaataatctgaggaaa

SEQ ID NO: 300101 - DNA, 33 bp, Homo sapien
aaagtagagctcaaaacttaatggacgaaatag

SEQ ID NO: 300102 - DNA, 33 bp, Homo sapien
aaagtagagctcaaaatttaatggacgaaatag

SEQ ID NO: 300103 - DNA, 33 bp, Homo sapien
gaaaaagttggaacaacatgatctatggagatg

SEQ ID NO: 300104 - DNA, 33 bp, Homo sapien
gaaaaagttggaacaatatgatctatggagatg

SEQ ID NO: 300105 - DNA, 33 bp, Homo sapien
ctgaatgaaacaaagaactctatcattgtcaat

SEQ ID NO: 300106 - DNA, 33 bp, Homo sapien
ctgaatgaaacaaagacctctatcattgtcaat

SEQ ID NO: 300107 - DNA, 33 bp, Homo sapien
tctagcactggcttcacaatacttgctccgtgg

SEQ ID NO: 300108 - DNA, 33 bp, Homo sapien
tctagcactggcttcataatacttgctccgtgg

SEQ ID NO: 300109 - DNA, 33 bp, Homo sapien
caagattggattcttaaagtgagttgctgagct

SEQ ID NO: 300110 - DNA, 33 bp, Homo sapien
caagattggattcttagagtgagttgctgagct

SEQ ID NO: 300111 - DNA, 33 bp, Homo sapien
tgtattcgtgagaggaaaaccaacatcattgga

SEQ ID NO: 300112 - DNA, 33 bp, Homo sapien
tgtattcgtgagaggagaaccaacatcattgga

SEQ ID NO: 300113 - DNA, 33 bp, Homo sapien
atgtacctgtcaccagaatttcttaccataaat

SEQ ID NO: 300114 - DNA, 33 bp, Homo sapien
atgtacctgtcaccagcatttcttaccataaat

SEQ ID NO: 300115 - DNA, 33 bp, Homo sapien
aacgtgaagtgagttaccacaacagactgaatg

SEQ ID NO: 300116 - DNA, 33 bp, Homo sapien
aacgtgaagtgagttatcacaacagactgaatg

SEQ ID NO: 300117 - DNA, 33 bp, Homo sapien
gaagaaaggacacactaaaattttctagagtac

SEQ ID NO: 300118 - DNA, 33 bp, Homo sapien
gaagaaaggacacacttaaattttctagagtac

SEQ ID NO: 300119 - DNA, 33 bp, Homo sapien
agtctgaaatactaccactttaccacattattt

SEQ ID NO: 300120 - DNA, 33 bp, Homo sapien
agtctgaaatactaccgctttaccacattattt

SEQ ID NO: 300121 - DNA, 33 bp, Homo sapien
ccttcagtaacaaaacccacttgaatagagcca

SEQ ID NO: 300122 - DNA, 33 bp, Homo sapien
ccttcagtaacaaaactcacttgaatagagcca

SEQ ID NO: 300123 - DNA, 33 bp, Homo sapien
cagaggcaatgacagcacacattattttattcc

SEQ ID NO: 300124 - DNA, 33 bp, Homo sapien
cagaggcaatgacagcgcacattattttattcc

SEQ ID NO: 300125 - DNA, 33 bp, Homo sapien
aaacaataaagtctgcagaaaatgtactacctt

SEQ ID NO: 300126 - DNA, 33 bp, Homo sapien
aaacaataaagtctgccgaaaatgtactacctt

SEQ ID NO: 300127 - DNA, 33 bp, Homo sapien
attgattaacttcatactaaagctacatgacat

SEQ ID NO: 300128 - DNA, 33 bp, Homo sapien
attgattaacttcatattaaagctacatgacat

SEQ ID NO: 300129 - DNA, 33 bp, Homo sapien
caaaattgtctacaaggatgcctattgaagtgc

SEQ ID NO: 300130 - DNA, 33 bp, Homo sapien
caaaattgtctacaagtatgcctattgaagtgc

SEQ ID NO: 300131 - DNA, 33 bp, Homo sapien
aatccctcaatttgcactgacctgttccttaat

SEQ ID NO: 300132 - DNA, 33 bp, Homo sapien
aatccctcaatttgcattgacctgttccttaat

SEQ ID NO: 300133 - DNA, 33 bp, Homo sapien
aaagggggcaatgagacgctttacattgtcttt

SEQ ID NO: 300134 - DNA, 33 bp, Homo sapien
aaagggggcaatgagaggctttacattgtcttt

SEQ ID NO: 300135 - DNA, 33 bp, Homo sapien
attaatgtttccatggcaatccgatacttgaca

SEQ ID NO: 300136 - DNA, 33 bp, Homo sapien
attaatgtttccatggtaatccgatacttgaca

SEQ ID NO: 300137 - DNA, 33 bp, Homo sapien
ttgtaatgtaatgtaacgtagtcggaattcaaa

SEQ ID NO: 300138 - DNA, 33 bp, Homo sapien
ttgtaatgtaatgtaatgtagtcggaattcaaa

SEQ ID NO: 300139 - DNA, 33 bp, Homo sapien
tggttagaggaaatggaccaatcaaggctgaca

SEQ ID NO: 300140 - DNA, 33 bp, Homo sapien
tggttagaggaaatgggccaatcaaggctgaca

SEQ ID NO: 300141 - DNA, 33 bp, Homo sapien
gcctaaattagcatgacggtcttggaatataaa

SEQ ID NO: 300142 - DNA, 33 bp, Homo sapien
gcctaaattagcatgatggtcttggaatataaa

SEQ ID NO: 300143 - DNA, 33 bp, Homo sapien
aatggatagattgaataagcgtctgaaattcta

SEQ ID NO: 300144 - DNA, 33 bp, Homo sapien
aatggatagattgaatgagcgtctgaaattcta

SEQ ID NO: 300145 - DNA, 33 bp, Homo sapien
gccacattctggaagcagaaagcactgtccttt

SEQ ID NO: 300146 - DNA, 33 bp, Homo sapien
gccacattctggaagcggaaagcactgtccttt

SEQ ID NO: 300147 - DNA, 33 bp, Homo sapien
aaattattcattcctccagattatccagttttt

SEQ ID NO: 300148 - DNA, 33 bp, Homo sapien
aaattattcattcctctagattatccagttttt

SEQ ID NO: 300149 - DNA, 33 bp, Homo sapien
atcatgtaggccagaactcagcgtctggacgca

SEQ ID NO: 300150 - DNA, 33 bp, Homo sapien
atcatgtaggccagaattcagcgtctggacgca

SEQ ID NO: 300151 - DNA, 33 bp, Homo sapien
gacttagggaacctgaactaagggaggcaaata

SEQ ID NO: 300152 - DNA, 33 bp, Homo sapien
gacttagggaacctgacctaagggaggcaaata

SEQ ID NO: 300153 - DNA, 33 bp, Homo sapien
atattgatttgattacactgtgaaggtctcatt

SEQ ID NO: 300154 - DNA, 33 bp, Homo sapien
atattgatttgattaccctgtgaaggtctcatt

SEQ ID NO: 300155 - DNA, 33 bp, Homo sapien
taactgacctgcccccaaccaaaaaaatcacaa

SEQ ID NO: 300156 - DNA, 33 bp, Homo sapien
taactgacctgccccccaccaaaaaaatcacaa

SEQ ID NO: 300157 - DNA, 33 bp, Homo sapien
taaaaacatttaaaaaatctcattgacctcata

SEQ ID NO: 300158 - DNA, 33 bp, Homo sapien
taaaaacatttaaaaattctcattgacctcata

SEQ ID NO: 300159 - DNA, 33 bp, Homo sapien
aaaatagtcatgctgaactacctcaaatgagca

SEQ ID NO: 300160 - DNA, 33 bp, Homo sapien
aaaatagtcatgctgagctacctcaaatgagca

SEQ ID NO: 300161 - DNA, 33 bp, Homo sapien
atgtgagacttgtacaacctgcaactataacgc

SEQ ID NO: 300162 - DNA, 33 bp, Homo sapien
atgtgagacttgtacagcctgcaactataacgc

SEQ ID NO: 300163 - DNA, 33 bp, Homo sapien
aactctctgagaacaaggtaaattatcaaaatt

SEQ ID NO: 300164 - DNA, 33 bp, Homo sapien
aactctctgagaacaatgtaaattatcaaaatt

SEQ ID NO: 300165 - DNA, 33 bp, Homo sapien
agtaagtatatttctacgtttcctgcaaccatt

SEQ ID NO: 300166 - DNA, 33 bp, Homo sapien
agtaagtatatttctatgtttcctgcaaccatt

SEQ ID NO: 300167 - DNA, 33 bp, Homo sapien
aggcaggaaaaaattacctgggaattcataacc

SEQ ID NO: 300168 - DNA, 33 bp, Homo sapien
aggcaggaaaaaattatctgggaattcataacc

SEQ ID NO: 300169 - DNA, 33 bp, Homo sapien
gctcccactggtctaccgataaatgttaaaaca

SEQ ID NO: 300170 - DNA, 33 bp, Homo sapien
gctcccactggtctactgataaatgttaaaaca

SEQ ID NO: 300171 - DNA, 33 bp, Homo sapien
actctccggcgccccaatcattcgcaatccgct

SEQ ID NO: 300172 - DNA, 33 bp, Homo sapien
actctccggcgccccagtcattcgcaatccgct

SEQ ID NO: 300173 - DNA, 33 bp, Homo sapien
ataagaccatcaaggaaatttaaatacagatca

SEQ ID NO: 300174 - DNA, 33 bp, Homo sapien
ataagaccatcaaggacatttaaatacagatca

SEQ ID NO: 300175 - DNA, 33 bp, Homo sapien
aagtagttcaaattgaaataagacctcatgtgt

SEQ ID NO: 300176 - DNA, 33 bp, Homo sapien
aagtagttcaaattgagataagacctcatgtgt

SEQ ID NO: 300177 - DNA, 33 bp, Homo sapien
attatctgacctgtacaatatacaagagtggaa

SEQ ID NO: 300178 - DNA, 33 bp, Homo sapien
attatctgacctgtacgatatacaagagtggaa

SEQ ID NO: 300179 - DNA, 33 bp, Homo sapien
acatgaaatacacaccaaggaacactacaaagc

SEQ ID NO: 300180 - DNA, 33 bp, Homo sapien
acatgaaatacacaccgaggaacactacaaagc

SEQ ID NO: 300181 - DNA, 33 bp, Homo sapien
agatgcattcaaagtacaagtaaaagtttgtat

SEQ ID NO: 300182 - DNA, 33 bp, Homo sapien
agatgcattcaaagtagaagtaaaagtttgtat

SEQ ID NO: 300183 - DNA, 33 bp, Homo sapien
tatgtatatcacagtaacctcaacatcaacatt

SEQ ID NO: 300184 - DNA, 33 bp, Homo sapien
tatgtatatcacagtagcctcaacatcaacatt

SEQ ID NO: 300185 - DNA, 33 bp, Homo sapien
catcaatagatccaaaggggaaagacaaaacta

SEQ ID NO: 300186 - DNA, 33 bp, Homo sapien
catcaatagatccaaatgggaaagacaaaacta

SEQ ID NO: 300187 - DNA, 33 bp, Homo sapien
tttctaccaattgcccacgaaatctcaagggaa

SEQ ID NO: 300188 - DNA, 33 bp, Homo sapien
tttctaccaattgcccgcgaaatctcaagggaa

SEQ ID NO: 300189 - DNA, 33 bp, Homo sapien
gatatctcacaggctaaggaaaattatttgatg

SEQ ID NO: 300190 - DNA, 33 bp, Homo sapien
gatatctcacaggctagggaaaattatttgatg

SEQ ID NO: 300191 - DNA, 33 bp, Homo sapien
actgatcagaaaactgaaaagagtgaataaagc

SEQ ID NO: 300192 - DNA, 33 bp, Homo sapien
actgatcagaaaactgcaaagagtgaataaagc

SEQ ID NO: 300193 - DNA, 33 bp, Homo sapien
aacctgggagaaagaaggctttactatattggc

SEQ ID NO: 300194 - DNA, 33 bp, Homo sapien
aacctgggagaaagaatgctttactatattggc

SEQ ID NO: 300195 - DNA, 33 bp, Homo sapien
acacattatggcaggaagctcatttttgtcatg

SEQ ID NO: 300196 - DNA, 33 bp, Homo sapien
acacattatggcaggaggctcatttttgtcatg

SEQ ID NO: 300197 - DNA, 33 bp, Homo sapien
gcaacaagtagttttcaagagcttgttcttcct

SEQ ID NO: 300198 - DNA, 33 bp, Homo sapien
gcaacaagtagttttcgagagcttgttcttcct

SEQ ID NO: 300199 - DNA, 33 bp, Homo sapien
gtttctagttactcaaatagccattcatctcca

SEQ ID NO: 300200 - DNA, 33 bp, Homo sapien
gtttctagttactcaagtagccattcatctcca

SEQ ID NO: 300201 - DNA, 33 bp, Homo sapien
gttaggattaaagaacaatctcactaatacatt

SEQ ID NO: 300202 - DNA, 33 bp, Homo sapien
gttaggattaaagaacgatctcactaatacatt

SEQ ID NO: 300203 - DNA, 33 bp, Homo sapien
caaattacattacacaaatcagaattgctaaca

SEQ ID NO: 300204 - DNA, 33 bp, Homo sapien
caaattacattacacatatcagaattgctaaca

SEQ ID NO: 300205 - DNA, 33 bp, Homo sapien
gttatggtagccctagcaaacaaatatgcttac

SEQ ID NO: 300206 - DNA, 33 bp, Homo sapien
gttatggtagccctagtaaacaaatatgcttac

SEQ ID NO: 300207 - DNA, 33 bp, Homo sapien
tgcttaccatttggtaaaaatgatactccagaa

SEQ ID NO: 300208 - DNA, 33 bp, Homo sapien
tgcttaccatttggtagaaatgatactccagaa

SEQ ID NO: 300209 - DNA, 33 bp, Homo sapien
tatcagatagtttccactgaagaaaaggttagc

SEQ ID NO: 300210 - DNA, 33 bp, Homo sapien
tatcagatagtttccattgaagaaaaggttagc

SEQ ID NO: 300211 - DNA, 33 bp, Homo sapien
aaagatgcaatgagtgccacaaacagcttggga

SEQ ID NO: 300212 - DNA, 33 bp, Homo sapien
aaagatgcaatgagtgtcacaaacagcttggga

SEQ ID NO: 300213 - DNA, 33 bp, Homo sapien
gaattcaactttgaagaaaatcttgagaaccct

SEQ ID NO: 300214 - DNA, 33 bp, Homo sapien
gaattcaactttgaaggaaatcttgagaaccct

SEQ ID NO: 300215 - DNA, 33 bp, Homo sapien
ataactatattgggaacgacacaagaaaagaaa

SEQ ID NO: 300216 - DNA, 33 bp, Homo sapien
ataactatattgggaatgacacaagaaaagaaa

SEQ ID NO: 300217 - DNA, 33 bp, Homo sapien
ttttccagagtcattgcaccagcttacaataca

SEQ ID NO: 300218 - DNA, 33 bp, Homo sapien
ttttccagagtcattggaccagcttacaataca

SEQ ID NO: 300219 - DNA, 33 bp, Homo sapien
aaagacgaccagtatcagaaaaagaaaacataa

SEQ ID NO: 300220 - DNA, 33 bp, Homo sapien
aaagacgaccagtatcggaaaaagaaaacataa

SEQ ID NO: 300221 - DNA, 33 bp, Homo sapien
aggtcagctgcttccaaccttttcagcactagg

SEQ ID NO: 300222 - DNA, 33 bp, Homo sapien
aggtcagctgcttccagccttttcagcactagg

SEQ ID NO: 300223 - DNA, 33 bp, Homo sapien
agtatgacgtatggtaaatcattcactcacatt

SEQ ID NO: 300224 - DNA, 33 bp, Homo sapien
agtatgacgtatggtagatcattcactcacatt

SEQ ID NO: 300225 - DNA, 33 bp, Homo sapien
aacatggactctgtaaacatatttgagctgctg

SEQ ID NO: 300226 - DNA, 33 bp, Homo sapien
aacatggactctgtaatcatatttgagctgctg

SEQ ID NO: 300227 - DNA, 33 bp, Homo sapien
tgctaggaagcaggcactcatttcaggacttca

SEQ ID NO: 300228 - DNA, 33 bp, Homo sapien
tgctaggaagcaggcattcatttcaggacttca

SEQ ID NO: 300229 - DNA, 33 bp, Homo sapien
aataaagtagggaagaagatttagagaagggga

SEQ ID NO: 300230 - DNA, 33 bp, Homo sapien
aataaagtagggaagacgatttagagaagggga

SEQ ID NO: 300231 - DNA, 33 bp, Homo sapien
gagtctgaggttataacaagctatgatcacacc

SEQ ID NO: 300232 - DNA, 33 bp, Homo sapien
gagtctgaggttataataagctatgatcacacc

SEQ ID NO: 300233 - DNA, 33 bp, Homo sapien
tcataatacattggaccaccagtttttttttct

SEQ ID NO: 300234 - DNA, 33 bp, Homo sapien
tcataatacattggactaccagtttttttttct

SEQ ID NO: 300235 - DNA, 33 bp, Homo sapien
tggttagcctctgataaaaattgtctcttagca

SEQ ID NO: 300236 - DNA, 33 bp, Homo sapien
tggttagcctctgatacaaattgtctcttagca

SEQ ID NO: 300237 - DNA, 33 bp, Homo sapien
caaattatctatcagaaagagcctaacaccttt

SEQ ID NO: 300238 - DNA, 33 bp, Homo sapien
caaattatctatcagagagagcctaacaccttt

SEQ ID NO: 300239 - DNA, 33 bp, Homo sapien
gagaaagcagaaagtaaaaatgcgtgttcacgt

SEQ ID NO: 300240 - DNA, 33 bp, Homo sapien
gagaaagcagaaagtagaaatgcgtgttcacgt

SEQ ID NO: 300241 - DNA, 33 bp, Homo sapien
gttcacctatttcctacgcaaaagtaaccttat

SEQ ID NO: 300242 - DNA, 33 bp, Homo sapien
gttcacctatttcctatgcaaaagtaaccttat

SEQ ID NO: 300243 - DNA, 33 bp, Homo sapien
atgaatgctaaatgaactatctctgattaacat

SEQ ID NO: 300244 - DNA, 33 bp, Homo sapien
atgaatgctaaatgaattatctctgattaacat

SEQ ID NO: 300245 - DNA, 33 bp, Homo sapien
tttctacacagtttaaatcaatattcatcacat

SEQ ID NO: 300246 - DNA, 33 bp, Homo sapien
tttctacacagtttaagtcaatattcatcacat

SEQ ID NO: 300247 - DNA, 33 bp, Homo sapien
atggctaaccaagatacggagttagaataagct

SEQ ID NO: 300248 - DNA, 33 bp, Homo sapien
atggctaaccaagatatggagttagaataagct

SEQ ID NO: 300249 - DNA, 33 bp, Homo sapien
agtaaaatataggaacagaaagcacattagtgt

SEQ ID NO: 300250 - DNA, 33 bp, Homo sapien
agtaaaatataggaacggaaagcacattagtgt

SEQ ID NO: 300251 - DNA, 33 bp, Homo sapien
ccaaacaaaagtctctgaaaagccacaagtatt

SEQ ID NO: 300252 - DNA, 33 bp, Homo sapien
ccaaacaaaagtctcttaaaagccacaagtatt

SEQ ID NO: 300253 - DNA, 33 bp, Homo sapien
gtttaatatttggtaggacaatttctctgtcaa

SEQ ID NO: 300254 - DNA, 33 bp, Homo sapien
gtttaatatttggtagtacaatttctctgtcaa

SEQ ID NO: 300255 - DNA, 33 bp, Homo sapien
tcttttcccccatatcacatgacagaaattgtg

SEQ ID NO: 300256 - DNA, 33 bp, Homo sapien
tcttttcccccatatcgcatgacagaaattgtg

SEQ ID NO: 300257 - DNA, 33 bp, Homo sapien
gaggtactaactcttacgggctattcacccctt

SEQ ID NO: 300258 - DNA, 33 bp, Homo sapien
gaggtactaactcttatgggctattcacccctt

SEQ ID NO: 300259 - DNA, 33 bp, Homo sapien
tctcgaagcataaggacgttttgcaagtttcca

SEQ ID NO: 300260 - DNA, 33 bp, Homo sapien
tctcgaagcataaggatgttttgcaagtttcca

SEQ ID NO: 300261 - DNA, 33 bp, Homo sapien
ggatacctataaaaaccgtagaacattgatcat

SEQ ID NO: 300262 - DNA, 33 bp, Homo sapien
ggatacctataaaaactgtagaacattgatcat

SEQ ID NO: 300263 - DNA, 33 bp, Homo sapien
ggttgctttgggatcaccttagccaacaagagg

SEQ ID NO: 300264 - DNA, 33 bp, Homo sapien
ggttgctttgggatcatcttagccaacaagagg

SEQ ID NO: 300265 - DNA, 33 bp, Homo sapien
ctgtacaatgaagtaactggacattttttgttt

SEQ ID NO: 300266 - DNA, 33 bp, Homo sapien
ctgtacaatgaagtaattggacattttttgttt

SEQ ID NO: 300267 - DNA, 33 bp, Homo sapien
ttcagaaaagtatttaactctgtctcggtgcag

SEQ ID NO: 300268 - DNA, 33 bp, Homo sapien
ttcagaaaagtatttacctctgtctcggtgcag

SEQ ID NO: 300269 - DNA, 33 bp, Homo sapien
tgattctttccacggacgtactgtattcttcca

SEQ ID NO: 300270 - DNA, 33 bp, Homo sapien
tgattctttccacggatgtactgtattcttcca

SEQ ID NO: 300271 - DNA, 33 bp, Homo sapien
tgacaaggaggaacataagaaccagtctaacag

SEQ ID NO: 300272 - DNA, 33 bp, Homo sapien
tgacaaggaggaacatgagaaccagtctaacag

SEQ ID NO: 300273 - DNA, 33 bp, Homo sapien
cttcagcaaattttccaaagtttcacgatactc

SEQ ID NO: 300274 - DNA, 33 bp, Homo sapien
cttcagcaaattttccgaagtttcacgatactc

SEQ ID NO: 300275 - DNA, 33 bp, Homo sapien
gctccgaaaagctgcaaaatcttagtatcttct

SEQ ID NO: 300276 - DNA, 33 bp, Homo sapien
gctccgaaaagctgcacaatcttagtatcttct

SEQ ID NO: 300277 - DNA, 33 bp, Homo sapien
ggaatgcagtagtgaaaaaaaattctctcctgc

SEQ ID NO: 300278 - DNA, 33 bp, Homo sapien
ggaatgcagtagtgaacaaaaattctctcctgc

SEQ ID NO: 300279 - DNA, 33 bp, Homo sapien
cttgtgtaaaattcacagaaacaaaccaatcca

SEQ ID NO: 300280 - DNA, 33 bp, Homo sapien
cttgtgtaaaattcacggaaacaaaccaatcca

SEQ ID NO: 300281 - DNA, 33 bp, Homo sapien
atggagatggagcttaagtagaaaaaaaaagca

SEQ ID NO: 300282 - DNA, 33 bp, Homo sapien
atggagatggagcttatgtagaaaaaaaaagca

SEQ ID NO: 300283 - DNA, 33 bp, Homo sapien
aatggattgcagaaagaacaaatgccaaaacct

SEQ ID NO: 300284 - DNA, 33 bp, Homo sapien
aatggattgcagaaagtacaaatgccaaaacct

SEQ ID NO: 300285 - DNA, 33 bp, Homo sapien
cactgagaagctgtgaatatttggaaattgact

SEQ ID NO: 300286 - DNA, 33 bp, Homo sapien
cactgagaagctgtgagtatttggaaattgact

SEQ ID NO: 300287 - DNA, 33 bp, Homo sapien
atcagagtcacacttaaaaagatttctctgaca

SEQ ID NO: 300288 - DNA, 33 bp, Homo sapien
atcagagtcacacttagaaagatttctctgaca

SEQ ID NO: 300289 - DNA, 33 bp, Homo sapien
tgaatgagtgaaatgcactactttcaaatatcc

SEQ ID NO: 300290 - DNA, 33 bp, Homo sapien
tgaatgagtgaaatgcgctactttcaaatatcc

SEQ ID NO: 300291 - DNA, 33 bp, Homo sapien
tggaagtgctatgtacacaatcaggcctgagca

SEQ ID NO: 300292 - DNA, 33 bp, Homo sapien
tggaagtgctatgtacgcaatcaggcctgagca

SEQ ID NO: 300293 - DNA, 33 bp, Homo sapien
ataagagaaggaggaaaacgaaaaggaggagaa

SEQ ID NO: 300294 - DNA, 33 bp, Homo sapien
ataagagaaggaggaagacgaaaaggaggagaa

SEQ ID NO: 300295 - DNA, 33 bp, Homo sapien
catggctatttcagcacggagataaggttaggc

SEQ ID NO: 300296 - DNA, 33 bp, Homo sapien
catggctatttcagcatggagataaggttaggc

SEQ ID NO: 300297 - DNA, 33 bp, Homo sapien
aaatttgattagacgaacccattgtttcttgag

SEQ ID NO: 300298 - DNA, 33 bp, Homo sapien
aaatttgattagacgagcccattgtttcttgag

SEQ ID NO: 300299 - DNA, 33 bp, Homo sapien
taaattttagagtacaccatcatatcttctttt

SEQ ID NO: 300300 - DNA, 33 bp, Homo sapien
taaattttagagtacatcatcatatcttctttt

SEQ ID NO: 300301 - DNA, 33 bp, Homo sapien
ggtactgactttgaacaatagacaatactttca

SEQ ID NO: 300302 - DNA, 33 bp, Homo sapien
ggtactgactttgaacgatagacaatactttca

SEQ ID NO: 300303 - DNA, 33 bp, Homo sapien
ctgcatagtaagtgcacattttctacttagagt

SEQ ID NO: 300304 - DNA, 33 bp, Homo sapien
ctgcatagtaagtgcatattttctacttagagt

SEQ ID NO: 300305 - DNA, 33 bp, Homo sapien
gaaactgaaagaaaaaagttgttctgattattt

SEQ ID NO: 300306 - DNA, 33 bp, Homo sapien
gaaactgaaagaaaaatgttgttctgattattt

SEQ ID NO: 300307 - DNA, 33 bp, Homo sapien
ggatacagcgacagatgaaaaacagcatttgag

SEQ ID NO: 300308 - DNA, 33 bp, Homo sapien
ggatacagcgacagattaaaaacagcatttgag

SEQ ID NO: 300309 - DNA, 33 bp, Homo sapien
tgactttgtatttttaacggagatgagatttct

SEQ ID NO: 300310 - DNA, 33 bp, Homo sapien
tgactttgtatttttagcggagatgagatttct

SEQ ID NO: 300311 - DNA, 33 bp, Homo sapien
acagagctaagaaaggaatgtgagaaacagacc

SEQ ID NO: 300312 - DNA, 33 bp, Homo sapien
acagagctaagaaagggatgtgagaaacagacc

SEQ ID NO: 300313 - DNA, 33 bp, Homo sapien
tagctccttatgaaaaactctttgctatggcct

SEQ ID NO: 300314 - DNA, 33 bp, Homo sapien
tagctccttatgaaaagctctttgctatggcct

SEQ ID NO: 300315 - DNA, 33 bp, Homo sapien
tggaatacaaccaatacgaatccaacaatgacc

SEQ ID NO: 300316 - DNA, 33 bp, Homo sapien
tggaatacaaccaatatgaatccaacaatgacc

SEQ ID NO: 300317 - DNA, 33 bp, Homo sapien
tgcctttctctgaagacgaatttctcatttgct

SEQ ID NO: 300318 - DNA, 33 bp, Homo sapien
tgcctttctctgaagatgaatttctcatttgct

SEQ ID NO: 300319 - DNA, 33 bp, Homo sapien
tgaaagagtaaggagaagatgttactggaaatt

SEQ ID NO: 300320 - DNA, 33 bp, Homo sapien
tgaaagagtaaggagaggatgttactggaaatt

SEQ ID NO: 300321 - DNA, 33 bp, Homo sapien
tgtcagaaacagtgataagaaatttttattcag

SEQ ID NO: 300322 - DNA, 33 bp, Homo sapien
tgtcagaaacagtgattagaaatttttattcag

SEQ ID NO: 300323 - DNA, 33 bp, Homo sapien
atatgcagaaaatataagatgagtgctggttca

SEQ ID NO: 300324 - DNA, 33 bp, Homo sapien
atatgcagaaaatatatgatgagtgctggttca

SEQ ID NO: 300325 - DNA, 33 bp, Homo sapien
ctgtagaatgattatacagtcagttatagtaat

SEQ ID NO: 300326 - DNA, 33 bp, Homo sapien
ctgtagaatgattatatagtcagttatagtaat

SEQ ID NO: 300327 - DNA, 33 bp, Homo sapien
gatcatttgtcaaatacagttttcaaccatcag

SEQ ID NO: 300328 - DNA, 33 bp, Homo sapien
gatcatttgtcaaatatagttttcaaccatcag

SEQ ID NO: 300329 - DNA, 33 bp, Homo sapien
tgggacaaagtaggaaatcagatgaagagtcga

SEQ ID NO: 300330 - DNA, 33 bp, Homo sapien
tgggacaaagtaggaagtcagatgaagagtcga

SEQ ID NO: 300331 - DNA, 33 bp, Homo sapien
tcccagtgtacaggaccgcccctcacaaaaaat

SEQ ID NO: 300332 - DNA, 33 bp, Homo sapien
tcccagtgtacaggactgcccctcacaaaaaat

SEQ ID NO: 300333 - DNA, 33 bp, Homo sapien
ggtcacctgcagttgaaaccactgatttagtct

SEQ ID NO: 300334 - DNA, 33 bp, Homo sapien
ggtcacctgcagttgagaccactgatttagtct

SEQ ID NO: 300335 - DNA, 33 bp, Homo sapien
tttttctaaaaaagtaaacttctgcagcatctc

SEQ ID NO: 300336 - DNA, 33 bp, Homo sapien
tttttctaaaaaagtagacttctgcagcatctc

SEQ ID NO: 300337 - DNA, 33 bp, Homo sapien
ttcactgtgttcttgacaatgccgctctgcagt

SEQ ID NO: 300338 - DNA, 33 bp, Homo sapien
ttcactgtgttcttgagaatgccgctctgcagt

SEQ ID NO: 300339 - DNA, 33 bp, Homo sapien
ttgaaaagatgaaaccactctcttgataaactg

SEQ ID NO: 300340 - DNA, 33 bp, Homo sapien
ttgaaaagatgaaaccgctctcttgataaactg

SEQ ID NO: 300341 - DNA, 33 bp, Homo sapien
aatccctacagcagaacggacttgaagagagac

SEQ ID NO: 300342 - DNA, 33 bp, Homo sapien
aatccctacagcagaatggacttgaagagagac

SEQ ID NO: 300343 - DNA, 33 bp, Homo sapien
catagggctggaaaaccgaactactctgagccc

SEQ ID NO: 300344 - DNA, 33 bp, Homo sapien
catagggctggaaaactgaactactctgagccc

SEQ ID NO: 300345 - DNA, 33 bp, Homo sapien
agttacttctatgctccaataaatgctgccaaa

SEQ ID NO: 300346 - DNA, 33 bp, Homo sapien
agttacttctatgctctaataaatgctgccaaa

SEQ ID NO: 300347 - DNA, 33 bp, Homo sapien
taatgaagatgacataagattttatctaaggat

SEQ ID NO: 300348 - DNA, 33 bp, Homo sapien
taatgaagatgacataggattttatctaaggat

SEQ ID NO: 300349 - DNA, 33 bp, Homo sapien
aacaacaactacaaaaattatcatcttttctat

SEQ ID NO: 300350 - DNA, 33 bp, Homo sapien
aacaacaactacaaaatttatcatcttttctat

SEQ ID NO: 300351 - DNA, 33 bp, Homo sapien
agaagtgagggagttcagaaacaaaactatctg

SEQ ID NO: 300352 - DNA, 33 bp, Homo sapien
agaagtgagggagttccgaaacaaaactatctg

SEQ ID NO: 300353 - DNA, 33 bp, Homo sapien
gcattcttaccagcaacgtacgaaatttctggc

SEQ ID NO: 300354 - DNA, 33 bp, Homo sapien
gcattcttaccagcaatgtacgaaatttctggc

SEQ ID NO: 300355 - DNA, 33 bp, Homo sapien
taacaatagacacctactagattggtaaacaac

SEQ ID NO: 300356 - DNA, 33 bp, Homo sapien
taacaatagacacctattagattggtaaacaac

SEQ ID NO: 300357 - DNA, 33 bp, Homo sapien
ttaatttgtattatcccaatgactaatcatatc

SEQ ID NO: 300358 - DNA, 33 bp, Homo sapien
ttaatttgtattatcctaatgactaatcatatc

SEQ ID NO: 300359 - DNA, 33 bp, Homo sapien
cataggtcaaagacaacgttattactgggtaca

SEQ ID NO: 300360 - DNA, 33 bp, Homo sapien
cataggtcaaagacaatgttattactgggtaca

SEQ ID NO: 300361 - DNA, 33 bp, Homo sapien
taaatacaagctggtcactctgatatgggaggt

SEQ ID NO: 300362 - DNA, 33 bp, Homo sapien
taaatacaagctggtcgctctgatatgggaggt

SEQ ID NO: 300363 - DNA, 33 bp, Homo sapien
atcaagatccctacacaggaaggatgaggcaac

SEQ ID NO: 300364 - DNA, 33 bp, Homo sapien
atcaagatccctacacgggaaggatgaggcaac

SEQ ID NO: 300365 - DNA, 33 bp, Homo sapien
gctgttgatccagttaaagaaggaatgctatga

SEQ ID NO: 300366 - DNA, 33 bp, Homo sapien
gctgttgatccagttagagaaggaatgctatga

SEQ ID NO: 300367 - DNA, 33 bp, Homo sapien
agacaagtttcaggtcactaagctggttgctag

SEQ ID NO: 300368 - DNA, 33 bp, Homo sapien
agacaagtttcaggtcgctaagctggttgctag

SEQ ID NO: 300369 - DNA, 33 bp, Homo sapien
tgttcaattggaaagacgttttgccttagagtg

SEQ ID NO: 300370 - DNA, 33 bp, Homo sapien
tgttcaattggaaagatgttttgccttagagtg

SEQ ID NO: 300371 - DNA, 33 bp, Homo sapien
tttttgatgaaaactcagactcaattatacttt

SEQ ID NO: 300372 - DNA, 33 bp, Homo sapien
tttttgatgaaaactcggactcaattatacttt

SEQ ID NO: 300373 - DNA, 33 bp, Homo sapien
gcatgagctcagccaaaggaagactatttttag

SEQ ID NO: 300374 - DNA, 33 bp, Homo sapien
gcatgagctcagccaatggaagactatttttag

SEQ ID NO: 300375 - DNA, 33 bp, Homo sapien
agagagtagtcaacaaacctaaaaggaaaataa

SEQ ID NO: 300376 - DNA, 33 bp, Homo sapien
agagagtagtcaacaaccctaaaaggaaaataa

SEQ ID NO: 300377 - DNA, 33 bp, Homo sapien
tcctcttgacatcaccagcaaagcctcaaaacc

SEQ ID NO: 300378 - DNA, 33 bp, Homo sapien
tcctcttgacatcaccggcaaagcctcaaaacc

SEQ ID NO: 300379 - DNA, 33 bp, Homo sapien
tagcttctgcgaaataactcctactttccttat

SEQ ID NO: 300380 - DNA, 33 bp, Homo sapien
tagcttctgcgaaatagctcctactttccttat

SEQ ID NO: 300381 - DNA, 33 bp, Homo sapien
ttatttttgtgagtgacgcaagtgattcagtca

SEQ ID NO: 300382 - DNA, 33 bp, Homo sapien
ttatttttgtgagtgatgcaagtgattcagtca

SEQ ID NO: 300383 - DNA, 33 bp, Homo sapien
agatcagtgtctgactcaaatgtgacttgctga

SEQ ID NO: 300384 - DNA, 33 bp, Homo sapien
agatcagtgtctgacttaaatgtgacttgctga

SEQ ID NO: 300385 - DNA, 33 bp, Homo sapien
acttttcatagattggaagacggtaagtaataa

SEQ ID NO: 300386 - DNA, 33 bp, Homo sapien
acttttcatagattggcagacggtaagtaataa

SEQ ID NO: 300387 - DNA, 33 bp, Homo sapien
agaatgtttaacatacagaaaggctgatgtcaa

SEQ ID NO: 300388 - DNA, 33 bp, Homo sapien
agaatgtttaacatacggaaaggctgatgtcaa

SEQ ID NO: 300389 - DNA, 33 bp, Homo sapien
cacctctattcatcacacgggttaaggtctgaa

SEQ ID NO: 300390 - DNA, 33 bp, Homo sapien
cacctctattcatcacgcgggttaaggtctgaa

SEQ ID NO: 300391 - DNA, 33 bp, Homo sapien
cacaaaagaagcttcaatctgtcagagctgcta

SEQ ID NO: 300392 - DNA, 33 bp, Homo sapien
cacaaaagaagcttcagtctgtcagagctgcta

SEQ ID NO: 300393 - DNA, 33 bp, Homo sapien
atctagtacagatttcaaatcttcagcaccaaa

SEQ ID NO: 300394 - DNA, 33 bp, Homo sapien
atctagtacagatttcgaatcttcagcaccaaa

SEQ ID NO: 300395 - DNA, 33 bp, Homo sapien
aatagcttggtgaacacatttcccggggttcga

SEQ ID NO: 300396 - DNA, 33 bp, Homo sapien
aatagcttggtgaacatatttcccggggttcga

SEQ ID NO: 300397 - DNA, 33 bp, Homo sapien
gaagtaagtggagaacaatcttgtgggaattct

SEQ ID NO: 300398 - DNA, 33 bp, Homo sapien
gaagtaagtggagaacgatcttgtgggaattct

SEQ ID NO: 300399 - DNA, 33 bp, Homo sapien
ttgcttcttgcaacaaataactggtgatcctca

SEQ ID NO: 300400 - DNA, 33 bp, Homo sapien
ttgcttcttgcaacaagtaactggtgatcctca

SEQ ID NO: 300401 - DNA, 33 bp, Homo sapien
ctgagaagccttagacaacaaaaacaagattgt

SEQ ID NO: 300402 - DNA, 33 bp, Homo sapien
ctgagaagccttagacgacaaaaacaagattgt

SEQ ID NO: 300403 - DNA, 33 bp, Homo sapien
ctttatatagtacaggaactctcataataactt

SEQ ID NO: 300404 - DNA, 33 bp, Homo sapien
ctttatatagtacagggactctcataataactt

SEQ ID NO: 300405 - DNA, 33 bp, Homo sapien
gttagtacttctcaatcatgatcaacttcagat

SEQ ID NO: 300406 - DNA, 33 bp, Homo sapien
gttagtacttctcaattatgatcaacttcagat

SEQ ID NO: 300407 - DNA, 33 bp, Homo sapien
tgagagagataagtacagaaccaccaggtcatg

SEQ ID NO: 300408 - DNA, 33 bp, Homo sapien
tgagagagataagtacggaaccaccaggtcatg

SEQ ID NO: 300409 - DNA, 33 bp, Homo sapien
tctgtatgtggtgacaatgcaaagaagagatca

SEQ ID NO: 300410 - DNA, 33 bp, Homo sapien
tctgtatgtggtgacagtgcaaagaagagatca

SEQ ID NO: 300411 - DNA, 33 bp, Homo sapien
ggaacctataaaggaagaagcagagtgatgtct

SEQ ID NO: 300412 - DNA, 33 bp, Homo sapien
ggaacctataaaggaataagcagagtgatgtct

SEQ ID NO: 300413 - DNA, 33 bp, Homo sapien
aaaatgaagcctgttaagttgactcattccttt

SEQ ID NO: 300414 - DNA, 33 bp, Homo sapien
aaaatgaagcctgttaggttgactcattccttt

SEQ ID NO: 300415 - DNA, 33 bp, Homo sapien
taatggttgccagtaactctcttctccctccat

SEQ ID NO: 300416 - DNA, 33 bp, Homo sapien
taatggttgccagtaattctcttctccctccat

SEQ ID NO: 300417 - DNA, 33 bp, Homo sapien
gagccccaaagcctgactaatgatgatgtatgt

SEQ ID NO: 300418 - DNA, 33 bp, Homo sapien
gagccccaaagcctgattaatgatgatgtatgt

SEQ ID NO: 300419 - DNA, 33 bp, Homo sapien
gtattgacttgatgctcacagggaatgctcatt

SEQ ID NO: 300420 - DNA, 33 bp, Homo sapien
gtattgacttgatgcttacagggaatgctcatt

SEQ ID NO: 300421 - DNA, 33 bp, Homo sapien
gatcctaagcttgtgaatacaggaagaatgcca

SEQ ID NO: 300422 - DNA, 33 bp, Homo sapien
gatcctaagcttgtgagtacaggaagaatgcca

SEQ ID NO: 300423 - DNA, 33 bp, Homo sapien
aagtatacataacatacaatgaggcactatcaa

SEQ ID NO: 300424 - DNA, 33 bp, Homo sapien
aagtatacataacatataatgaggcactatcaa

SEQ ID NO: 300425 - DNA, 33 bp, Homo sapien
atgttttctgggcaaccgtagccattgcagtag

SEQ ID NO: 300426 - DNA, 33 bp, Homo sapien
atgttttctgggcaactgtagccattgcagtag

SEQ ID NO: 300427 - DNA, 33 bp, Homo sapien
cagagagccaatgactgagatggccagtattgc

SEQ ID NO: 300428 - DNA, 33 bp, Homo sapien
cagagagccaatgacttagatggccagtattgc

SEQ ID NO: 300429 - DNA, 33 bp, Homo sapien
tttctttctttgccacagggctagactgcagat

SEQ ID NO: 300430 - DNA, 33 bp, Homo sapien
tttctttctttgccacggggctagactgcagat

SEQ ID NO: 300431 - DNA, 33 bp, Homo sapien
atcttgataaagaatcagagacatttggcttct

SEQ ID NO: 300432 - DNA, 33 bp, Homo sapien
atcttgataaagaatcggagacatttggcttct

SEQ ID NO: 300433 - DNA, 33 bp, Homo sapien
gccagccatacacatgaataaccttatactttg

SEQ ID NO: 300434 - DNA, 33 bp, Homo sapien
gccagccatacacatggataaccttatactttg

SEQ ID NO: 300435 - DNA, 33 bp, Homo sapien; identical to SEQ ID NO: 300433

SEQ ID NO: 300436 - DNA, 33 bp, Homo sapien; identical to SEQ ID NO: 300434

SEQ ID NO: 300437 - DNA, 33 bp, Homo sapien
caaccattttaaacaactgcagacctgcttacc

SEQ ID NO: 300438 - DNA, 33 bp, Homo sapien
caaccattttaaacaagtgcagacctgcttacc

SEQ ID NO: 300439 - DNA, 33 bp, Homo sapien
gaaatatgaagatcagaaaggtagatccagcta

SEQ ID NO: 300440 - DNA, 33 bp, Homo sapien
gaaatatgaagatcaggaaggtagatccagcta

SEQ ID NO: 300441 - DNA, 33 bp, Homo sapien
cttcctcattcaaacaagtatcatctttccaac

SEQ ID NO: 300442 - DNA, 33 bp, Homo sapien
cttcctcattcaaacaggtatcatctttccaac

SEQ ID NO: 300443 - DNA, 33 bp, Homo sapien
ctgcccaacagattaactgagtgcatggatgac

SEQ ID NO: 300444 - DNA, 33 bp, Homo sapien
ctgcccaacagattaagtgagtgcatggatgac

SEQ ID NO: 300445 - DNA, 33 bp, Homo sapien
ctaggtgactatggtaagaggtagaagtcacaa

SEQ ID NO: 300446 - DNA, 33 bp, Homo sapien
ctaggtgactatggtaggaggtagaagtcacaa

SEQ ID NO: 300447 - DNA, 33 bp, Homo sapien
aaatgtgtcccaaaagaagaggttatttctaag

SEQ ID NO: 300448 - DNA, 33 bp, Homo sapien
aaatgtgtcccaaaagtagaggttatttctaag

SEQ ID NO: 300449 - DNA, 33 bp, Homo sapien
catatgtcctaaaactcaaattctgcagtttag

SEQ ID NO: 300450 - DNA, 33 bp, Homo sapien
catatgtcctaaaacttaaattctgcagtttag

SEQ ID NO: 300451 - DNA, 33 bp, Homo sapien
tttttcagtgttgaaaggtagataagcatttgt

SEQ ID NO: 300452 - DNA, 33 bp, Homo sapien
tttttcagtgttgaaatgtagataagcatttgt

SEQ ID NO: 300453 - DNA, 33 bp, Homo sapien
atactatacagccataatacaaaatgaaatcat

SEQ ID NO: 300454 - DNA, 33 bp, Homo sapien
atactatacagccatattacaaaatgaaatcat

SEQ ID NO: 300455 - DNA, 33 bp, Homo sapien
atgcacacatatgagcaaaattgatagtcatat

SEQ ID NO: 300456 - DNA, 33 bp, Homo sapien
atgcacacatatgagccaaattgatagtcatat

SEQ ID NO: 300457 - DNA, 33 bp, Homo sapien
gagatgaggatttccaatatctccacttatact

SEQ ID NO: 300458 - DNA, 33 bp, Homo sapien
gagatgaggatttccagtatctccacttatact

SEQ ID NO: 300459 - DNA, 33 bp, Homo sapien
tagtagacagtaaaaggctgaactaaatgatat

SEQ ID NO: 300460 - DNA, 33 bp, Homo sapien
tagtagacagtaaaagtctgaactaaatgatat

SEQ ID NO: 300461 - DNA, 33 bp, Homo sapien
cctgttttcctagaagactgatgataacggcat

SEQ ID NO: 300462 - DNA, 33 bp, Homo sapien
cctgttttcctagaagcctgatgataacggcat

SEQ ID NO: 300463 - DNA, 33 bp, Homo sapien
gtacatgtacattatgaaatgactaaatccagc

SEQ ID NO: 300464 - DNA, 33 bp, Homo sapien
gtacatgtacattatggaatgactaaatccagc

SEQ ID NO: 300465 - DNA, 33 bp, Homo sapien
gtgctagtcatagtgaagaattaccatattagc

SEQ ID NO: 300466 - DNA, 33 bp, Homo sapien
gtgctagtcatagtgaggaattaccatattagc

SEQ ID NO: 300467 - DNA, 33 bp, Homo sapien
ttgtattttatggaccaagtgtatgatatgctg

SEQ ID NO: 300468 - DNA, 33 bp, Homo sapien
ttgtattttatggacccagtgtatgatatgctg

SEQ ID NO: 300469 - DNA, 33 bp, Homo sapien
aattgagcagggaaaccagattaaaggtagaat

SEQ ID NO: 300470 - DNA, 33 bp, Homo sapien
aattgagcagggaaactagattaaaggtagaat

SEQ ID NO: 300471 - DNA, 33 bp, Homo sapien
tttttaaggtttctaacgtacaatgtttctctt

SEQ ID NO: 300472 - DNA, 33 bp, Homo sapien
tttttaaggtttctaatgtacaatgtttctctt

SEQ ID NO: 300473 - DNA, 33 bp, Homo sapien
gacaccgatgtcagaaaaaaaacactctctaat

SEQ ID NO: 300474 - DNA, 33 bp, Homo sapien
gacaccgatgtcagaagaaaaacactctctaat

SEQ ID NO: 300475 - DNA, 33 bp, Homo sapien
ctaatcagtttccatacccaccctgattcatct

SEQ ID NO: 300476 - DNA, 33 bp, Homo sapien
ctaatcagtttccatatccaccctgattcatct

SEQ ID NO: 300477 - DNA, 33 bp, Homo sapien
aactgactggactcaacgaaatcataagcttag

SEQ ID NO: 300478 - DNA, 33 bp, Homo sapien
aactgactggactcaatgaaatcataagcttag

SEQ ID NO: 300479 - DNA, 33 bp, Homo sapien
gttaagatttgaactaataggatgaaaggagct

SEQ ID NO: 300480 - DNA, 33 bp, Homo sapien
gttaagatttgaactagtaggatgaaaggagct

SEQ ID NO: 300481 - DNA, 33 bp, Homo sapien
tgtatacattctttcaaaatcttgatcgcatat

SEQ ID NO: 300482 - DNA, 33 bp, Homo sapien
tgtatacattctttcagaatcttgatcgcatat

SEQ ID NO: 300483 - DNA, 33 bp, Homo sapien
caacatagagaatctgaagacactaaacttcaa

SEQ ID NO: 300484 - DNA, 33 bp, Homo sapien
caacatagagaatctgcagacactaaacttcaa

SEQ ID NO: 300485 - DNA, 33 bp, Homo sapien
gaaagcgttactacttaaaaatttcttctacca

SEQ ID NO: 300486 - DNA, 33 bp, Homo sapien
gaaagcgttactacttcaaaatttcttctacca

SEQ ID NO: 300487 - DNA, 33 bp, Homo sapien
tcaagttctttggatacgacctcttcgttaaaa

SEQ ID NO: 300488 - DNA, 33 bp, Homo sapien
tcaagttctttggatatgacctcttcgttaaaa

SEQ ID NO: 300489 - DNA, 33 bp, Homo sapien
caaccaaactttgaagaaactcaacggagtcat

SEQ ID NO: 300490 - DNA, 33 bp, Homo sapien
caaccaaactttgaagtaactcaacggagtcat

SEQ ID NO: 300491 - DNA, 33 bp, Homo sapien
taatctactgttttgacagatttgaactctgat

SEQ ID NO: 300492 - DNA, 33 bp, Homo sapien
taatctactgttttgatagatttgaactctgat

SEQ ID NO: 300493 - DNA, 33 bp, Homo sapien
gagaaaaattataaatcatgctggagtaacaga

SEQ ID NO: 300494 - DNA, 33 bp, Homo sapien
gagaaaaattataaattatgctggagtaacaga

SEQ ID NO: 300495 - DNA, 33 bp, Homo sapien
ggaaaattgtagaaatcagcaaatagatgcaat

SEQ ID NO: 300496 - DNA, 33 bp, Homo sapien
ggaaaattgtagaaatgagcaaatagatgcaat

SEQ ID NO: 300497 - DNA, 33 bp, Homo sapien
cagtgttaaagatcaaatagggcagcaaaaggg

SEQ ID NO: 300498 - DNA, 33 bp, Homo sapien
cagtgttaaagatcaagtagggcagcaaaaggg

SEQ ID NO: 300499 - DNA, 33 bp, Homo sapien
tggaacatggtagccaaattatatttcaaaggg

SEQ ID NO: 300500 - DNA, 33 bp, Homo sapien
tggaacatggtagccacattatatttcaaaggg

SEQ ID NO: 300501 - DNA, 33 bp, Homo sapien
atttacgttcaaactgaatacaaaggttcacca

SEQ ID NO: 300502 - DNA, 33 bp, Homo sapien
atttacgttcaaactgcatacaaaggttcacca

SEQ ID NO: 300503 - DNA, 33 bp, Homo sapien
atatgtaacttggatacggagagttgtctaaat

SEQ ID NO: 300504 - DNA, 33 bp, Homo sapien
atatgtaacttggatatggagagttgtctaaat

SEQ ID NO: 300505 - DNA, 33 bp, Homo sapien
ctaaccctcaacgtgagagtgtttagcaatgac

SEQ ID NO: 300506 - DNA, 33 bp, Homo sapien
ctaaccctcaacgtgatagtgtttagcaatgac

SEQ ID NO: 300507 - DNA, 33 bp, Homo sapien
ttgtatatattttgcagtattgcctaattcctt

SEQ ID NO: 300508 - DNA, 33 bp, Homo sapien
ttgtatatattttgcattattgcctaattcctt

SEQ ID NO: 300509 - DNA, 33 bp, Homo sapien
tatttagtttcataaaaggaagtgatatgaagt

SEQ ID NO: 300510 - DNA, 33 bp, Homo sapien
tatttagtttcataaagggaagtgatatgaagt

SEQ ID NO: 300511 - DNA, 33 bp, Homo sapien
ccttgatttaaaaaaacttctctccaggtctat

SEQ ID NO: 300512 - DNA, 33 bp, Homo sapien
ccttgatttaaaaaaatttctctccaggtctat

SEQ ID NO: 300513 - DNA, 33 bp, Homo sapien
gtgctggaattgggcaatatgcctgttccaaaa

SEQ ID NO: 300514 - DNA, 33 bp, Homo sapien
gtgctggaattgggcagtatgcctgttccaaaa

SEQ ID NO: 300515 - DNA, 33 bp, Homo sapien
ttatcttttatgtcaacgtccatcagtaaagat

SEQ ID NO: 300516 - DNA, 33 bp, Homo sapien
ttatcttttatgtcaatgtccatcagtaaagat

SEQ ID NO: 300517 - DNA, 33 bp, Homo sapien
ataattattacattccaaacagtaacatttaag

SEQ ID NO: 300518 - DNA, 33 bp, Homo sapien
ataattattacattcccaacagtaacatttaag

SEQ ID NO: 300519 - DNA, 33 bp, Homo sapien
cattttatatgctaaacactgttcaagatatgt

SEQ ID NO: 300520 - DNA, 33 bp, Homo sapien
cattttatatgctaaatactgttcaagatatgt

SEQ ID NO: 300521 - DNA, 33 bp, Homo sapien
acaatttaaaccagtcaagaatttgaagttgta

SEQ ID NO: 300522 - DNA, 33 bp, Homo sapien
acaatttaaaccagtctagaatttgaagttgta

SEQ ID NO: 300523 - DNA, 33 bp, Homo sapien
aatttcatttagcaaggatgtgcttataatcac

SEQ ID NO: 300524 - DNA, 33 bp, Homo sapien
aatttcatttagcaagtatgtgcttataatcac

SEQ ID NO: 300525 - DNA, 33 bp, Homo sapien
aatcctgtactttgacaatttatatcagctaca

SEQ ID NO: 300526 - DNA, 33 bp, Homo sapien
aatcctgtactttgacgatttatatcagctaca

SEQ ID NO: 300527 - DNA, 33 bp, Homo sapien
aataaatacagtgaaaataatccagtgaacacc

SEQ ID NO: 300528 - DNA, 33 bp, Homo sapien
aataaatacagtgaaactaatccagtgaacacc

SEQ ID NO: 300529 - DNA, 33 bp, Homo sapien
ccagaaatagatcttcactacaaggaattctca

SEQ ID NO: 300530 - DNA, 33 bp, Homo sapien
ccagaaatagatcttctctacaaggaattctca

SEQ ID NO: 300531 - DNA, 33 bp, Homo sapien
aggaattcaagttacagcttttgttcaccaagt

SEQ ID NO: 300532 - DNA, 33 bp, Homo sapien
aggaattcaagttacatcttttgttcaccaagt

SEQ ID NO: 300533 - DNA, 33 bp, Homo sapien
agccttgaaagatgcaaatatctgttctcctaa

SEQ ID NO: 300534 - DNA, 33 bp, Homo sapien
agccttgaaagatgcacatatctgttctcctaa

SEQ ID NO: 300535 - DNA, 33 bp, Homo sapien
ctcataaattttcgtacaggcctatgaaaagac

SEQ ID NO: 300536 - DNA, 33 bp, Homo sapien
ctcataaattttcgtagaggcctatgaaaagac

SEQ ID NO: 300537 - DNA, 33 bp, Homo sapien
agatgttgtctcccaccattattgttttgctat

SEQ ID NO: 300538 - DNA, 33 bp, Homo sapien
agatgttgtctcccactattattgttttgctat

SEQ ID NO: 300539 - DNA, 33 bp, Homo sapien
atattctgttgttggggagagtatttatagatg

SEQ ID NO: 300540 - DNA, 33 bp, Homo sapien
atattctgttgttgggtagagtatttatagatg

SEQ ID NO: 300541 - DNA, 33 bp, Homo sapien
atagaataatcaaagagaactatggaatgaaga

SEQ ID NO: 300542 - DNA, 33 bp, Homo sapien
atagaataatcaaagataactatggaatgaaga

SEQ ID NO: 300543 - DNA, 33 bp, Homo sapien
tacactgctgcccagaataacaacaaagacaaa

SEQ ID NO: 300544 - DNA, 33 bp, Homo sapien
tacactgctgcccagagtaacaacaaagacaaa

SEQ ID NO: 300545 - DNA, 33 bp, Homo sapien
gctaaatatccaggttaaaactaagaagaatga

SEQ ID NO: 300546 - DNA, 33 bp, Homo sapien
gctaaatatccaggtttaaactaagaagaatga

SEQ ID NO: 300547 - DNA, 33 bp, Homo sapien
ggtagtgcatacccacacagtgctatactctat

SEQ ID NO: 300548 - DNA, 33 bp, Homo sapien
ggtagtgcatacccacgcagtgctatactctat

SEQ ID NO: 300549 - DNA, 33 bp, Homo sapien
gcaatctagccttaagaagttttgtatatgaaa

SEQ ID NO: 300550 - DNA, 33 bp, Homo sapien
gcaatctagccttaagtagttttgtatatgaaa

SEQ ID NO: 300551 - DNA, 33 bp, Homo sapien
aaatttggttactcctaaagcaaatattgaaac

SEQ ID NO: 300552 - DNA, 33 bp, Homo sapien
aaatttggttactcctcaagcaaatattgaaac

SEQ ID NO: 300553 - DNA, 33 bp, Homo sapien
gccatggccagaaacaactagaggaataagata

SEQ ID NO: 300554 - DNA, 33 bp, Homo sapien
gccatggccagaaacagctagaggaataagata

SEQ ID NO: 300555 - DNA, 33 bp, Homo sapien
aagaaggcttgtcataacactacttgtttagca

SEQ ID NO: 300556 - DNA, 33 bp, Homo sapien
aagaaggcttgtcatagcactacttgtttagca

SEQ ID NO: 300557 - DNA, 33 bp, Homo sapien
atgtggtaataacggaccaaaatttaaagtgtt

SEQ ID NO: 300558 - DNA, 33 bp, Homo sapien
atgtggtaataacggagcaaaatttaaagtgtt

SEQ ID NO: 300559 - DNA, 33 bp, Homo sapien
cacacaaagttggcaaatactaacaattctata

SEQ ID NO: 300560 - DNA, 33 bp, Homo sapien
cacacaaagttggcaagtactaacaattctata

SEQ ID NO: 300561 - DNA, 33 bp, Homo sapien
atttgtctatttcttcactcagttttatcaatg

SEQ ID NO: 300562 - DNA, 33 bp, Homo sapien
atttgtctatttcttcgctcagttttatcaatg

SEQ ID NO: 300563 - DNA, 33 bp, Homo sapien
gccaaatcactgcagaaaactttcactgtactt

SEQ ID NO: 300564 - DNA, 33 bp, Homo sapien
gccaaatcactgcagataactttcactgtactt

SEQ ID NO: 300565 - DNA, 33 bp, Homo sapien
tctctcaccctactgccgcacaccaaaaagcaa

SEQ ID NO: 300566 - DNA, 33 bp, Homo sapien
tctctcaccctactgctgcacaccaaaaagcaa

SEQ ID NO: 300567 - DNA, 33 bp, Homo sapien
tggtttccaaaacagaacatcttccctaaaaag

SEQ ID NO: 300568 - DNA, 33 bp, Homo sapien
tggtttccaaaacagagcatcttccctaaaaag

SEQ ID NO: 300569 - DNA, 33 bp, Homo sapien
accaaattatttggtacgccatcattgaagtta

SEQ ID NO: 300570 - DNA, 33 bp, Homo sapien
accaaattatttggtatgccatcattgaagtta

SEQ ID NO: 300571 - DNA, 33 bp, Homo sapien
taaatatatagtttcaaagttaccagttattaa

SEQ ID NO: 300572 - DNA, 33 bp, Homo sapien
taaatatatagtttcagagttaccagttattaa

SEQ ID NO: 300573 - DNA, 33 bp, Homo sapien
atcatgctcaaaagtacgaaattcatgggaatt

SEQ ID NO: 300574 - DNA, 33 bp, Homo sapien
atcatgctcaaaagtatgaaattcatgggaatt

SEQ ID NO: 300575 - DNA, 33 bp, Homo sapien
ttgggaagaaattcacaaccttttagtcaatgt

SEQ ID NO: 300576 - DNA, 33 bp, Homo sapien
ttgggaagaaattcacgaccttttagtcaatgt

SEQ ID NO: 300577 - DNA, 33 bp, Homo sapien
gagtctgtgaattccacccatggcctcttgagt

SEQ ID NO: 300578 - DNA, 33 bp, Homo sapien
gagtctgtgaattccatccatggcctcttgagt

SEQ ID NO: 300579 - DNA, 33 bp, Homo sapien
tagaaatttgcttgaaagaaaaagcgttcaaag

SEQ ID NO: 300580 - DNA, 33 bp, Homo sapien
tagaaatttgcttgaatgaaaaagcgttcaaag

SEQ ID NO: 300581 - DNA, 33 bp, Homo sapien
ttgcaccattgtgagccatgattcttccagaca

SEQ ID NO: 300582 - DNA, 33 bp, Homo sapien
ttgcaccattgtgagctatgattcttccagaca

SEQ ID NO: 300583 - DNA, 33 bp, Homo sapien; identical to SEQ ID NO: 300581

SEQ ID NO: 300584 - DNA, 33 bp, Homo sapien; identical to SEQ ID NO: 300582

SEQ ID NO: 300585 - DNA, 33 bp, Homo sapien
aagcaagaaagaaagaacttcccattcaataaa

SEQ ID NO: 300586 - DNA, 33 bp, Homo sapien
aagcaagaaagaaagaccttcccattcaataaa

SEQ ID NO: 300587 - DNA, 33 bp, Homo sapien; identical to SEQ ID NO: 300585

SEQ ID NO: 300588 - DNA, 33 bp, Homo sapien; identical to SEQ ID NO: 300586

SEQ ID NO: 300589 - DNA, 33 bp, Homo sapien
tgtgggagaaatttgcaatcaatgtctttctaa

SEQ ID NO: 300590 - DNA, 33 bp, Homo sapien
tgtgggagaaatttgcgatcaatgtctttctaa

SEQ ID NO: 300591 - DNA, 33 bp, Homo sapien
gtcttttcacattctacgcacatttgtaattgg

SEQ ID NO: 300592 - DNA, 33 bp, Homo sapien
gtcttttcacattctatgcacatttgtaattgg

SEQ ID NO: 300593 - DNA, 33 bp, Homo sapien
acatgactccaatataaggggatagacaaaaga

SEQ ID NO: 300594 - DNA, 33 bp, Homo sapien
acatgactccaatatacggggatagacaaaaga

SEQ ID NO: 300595 - DNA, 33 bp, Homo sapien
tgtgattattaaactccctttctgctgcaaatt

SEQ ID NO: 300596 - DNA, 33 bp, Homo sapien
tgtgattattaaactctctttctgctgcaaatt

SEQ ID NO: 300597 - DNA, 33 bp, Homo sapien
atcacaatgtcattgcacaaagagatagaagaa

SEQ ID NO: 300598 - DNA, 33 bp, Homo sapien
atcacaatgtcattgcgcaaagagatagaagaa

SEQ ID NO: 300599 - DNA, 33 bp, Homo sapien
caaggagccgactcacagaagaatgcagttttc

SEQ ID NO: 300600 - DNA, 33 bp, Homo sapien
caaggagccgactcacggaagaatgcagttttc

SEQ ID NO: 300601 - DNA, 33 bp, Homo sapien
gacagggaggtttagaacaggagcacagcagct

SEQ ID NO: 300602 - DNA, 33 bp, Homo sapien
gacagggaggtttagatcaggagcacagcagct

SEQ ID NO: 300603 - DNA, 33 bp, Homo sapien
ccacagcatattgtgacgtgcatttgtttttat

SEQ ID NO: 300604 - DNA, 33 bp, Homo sapien
ccacagcatattgtgatgtgcatttgtttttat

SEQ ID NO: 300605 - DNA, 33 bp, Homo sapien
aagttgattattgctcaagatctgtaacttccc

SEQ ID NO: 300606 - DNA, 33 bp, Homo sapien
aagttgattattgctcgagatctgtaacttccc

SEQ ID NO: 300607 - DNA, 33 bp, Homo sapien
atattgaaacaaggaagataatttgatgtgtaa

SEQ ID NO: 300608 - DNA, 33 bp, Homo sapien
atattgaaacaaggaatataatttgatgtgtaa

SEQ ID NO: 300609 - DNA, 33 bp, Homo sapien
gtagtcctatgagataaggcagaaaacactgaa

SEQ ID NO: 300610 - DNA, 33 bp, Homo sapien
gtagtcctatgagatagggcagaaaacactgaa

SEQ ID NO: 300611 - DNA, 33 bp, Homo sapien
tagaagtgaaatgacacctgattacttaaactt

SEQ ID NO: 300612 - DNA, 33 bp, Homo sapien
tagaagtgaaatgacatctgattacttaaactt

SEQ ID NO: 300613 - DNA, 33 bp, Homo sapien
cagatgtaacactcaactgaagcattctcaggt

SEQ ID NO: 300614 - DNA, 33 bp, Homo sapien
cagatgtaacactcaattgaagcattctcaggt

SEQ ID NO: 300615 - DNA, 33 bp, Homo sapien
acatgaaaccataaaaattctggaggataacat

SEQ ID NO: 300616 - DNA, 33 bp, Homo sapien
acatgaaaccataaaagttctggaggataacat

SEQ ID NO: 300617 - DNA, 33 bp, Homo sapien
tggccttagaaaataccctggctaaggatagtc

SEQ ID NO: 300618 - DNA, 33 bp, Homo sapien
tggccttagaaaatactctggctaaggatagtc

SEQ ID NO: 300619 - DNA, 33 bp, Homo sapien
taacaacagatcttgacgattacttctggaaaa

SEQ ID NO: 300620 - DNA, 33 bp, Homo sapien
taacaacagatcttgatgattacttctggaaaa

SEQ ID NO: 300621 - DNA, 33 bp, Homo sapien
gttcttcaaccgtatggatagtctgttaacata

SEQ ID NO: 300622 - DNA, 33 bp, Homo sapien
gttcttcaaccgtatgtatagtctgttaacata

SEQ ID NO: 300623 - DNA, 33 bp, Homo sapien
gacaactcacaaaatgaaacacaatatttacta

SEQ ID NO: 300624 - DNA, 33 bp, Homo sapien
gacaactcacaaaatggaacacaatatttacta

SEQ ID NO: 300625 - DNA, 33 bp, Homo sapien
tatattcaaaatatgaaggctgtttttgacaaa

SEQ ID NO: 300626 - DNA, 33 bp, Homo sapien
tatattcaaaatatgagggctgtttttgacaaa

SEQ ID NO: 300627 - DNA, 33 bp, Homo sapien
ttatataacttttggacatacagcctgatttga

SEQ ID NO: 300628 - DNA, 33 bp, Homo sapien
ttatataacttttggatatacagcctgatttga

SEQ ID NO: 300629 - DNA, 33 bp, Homo sapien
agtttctgttatgcccacatctaattgaagaga

SEQ ID NO: 300630 - DNA, 33 bp, Homo sapien
agtttctgttatgcccgcatctaattgaagaga

SEQ ID NO: 300631 - DNA, 33 bp, Homo sapien
caaaatgcctcatgcccattgcactgccattta

SEQ ID NO: 300632 - DNA, 33 bp, Homo sapien
caaaatgcctcatgcctattgcactgccattta

SEQ ID NO: 300633 - DNA, 33 bp, Homo sapien
ttattcacctcagagaacatctctcacattcta

SEQ ID NO: 300634 - DNA, 33 bp, Homo sapien
ttattcacctcagagaccatctctcacattcta

SEQ ID NO: 300635 - DNA, 33 bp, Homo sapien
aggcactcaaagctgtcaataaggtaatatctt

SEQ ID NO: 300636 - DNA, 33 bp, Homo sapien
aggcactcaaagctgttaataaggtaatatctt

SEQ ID NO: 300637 - DNA, 33 bp, Homo sapien
atatccagtgttatagaatagatgtagaattct

SEQ ID NO: 300638 - DNA, 33 bp, Homo sapien
atatccagtgttatagtatagatgtagaattct

SEQ ID NO: 300639 - DNA, 33 bp, Homo sapien
aaaaacatatgtatcaaagttatcgaaattgac

SEQ ID NO: 300640 - DNA, 33 bp, Homo sapien
aaaaacatatgtatcagagttatcgaaattgac

SEQ ID NO: 300641 - DNA, 33 bp, Homo sapien
acttcttcacatgggaatagaaaagagcagaat

SEQ ID NO: 300642 - DNA, 33 bp, Homo sapien
acttcttcacatgggagtagaaaagagcagaat

SEQ ID NO: 300643 - DNA, 33 bp, Homo sapien
tatgtttcaagaagaacgtaaatctgataacaa

SEQ ID NO: 300644 - DNA, 33 bp, Homo sapien
tatgtttcaagaagaatgtaaatctgataacaa

SEQ ID NO: 300645 - DNA, 33 bp, Homo sapien
gattgtaatacaggcactagggccaaggaagct

SEQ ID NO: 300646 - DNA, 33 bp, Homo sapien
gattgtaatacaggcattagggccaaggaagct

SEQ ID NO: 300647 - DNA, 33 bp, Homo sapien
tggagcagatcatcaaataacttaactgcaaat

SEQ ID NO: 300648 - DNA, 33 bp, Homo sapien
tggagcagatcatcaagtaacttaactgcaaat

SEQ ID NO: 300649 - DNA, 33 bp, Homo sapien
catgtaagatataaaaatgatgtaagtggctat

SEQ ID NO: 300650 - DNA, 33 bp, Homo sapien
catgtaagatataaaagtgatgtaagtggctat

SEQ ID NO: 300651 - DNA, 33 bp, Homo sapien
tgagatgtgtaaaaaacgattcaggcaaatttt

SEQ ID NO: 300652 - DNA, 33 bp, Homo sapien
tgagatgtgtaaaaaatgattcaggcaaatttt

SEQ ID NO: 300653 - DNA, 33 bp, Homo sapien
agacaactgaaacaaaattcgaaatgaactgac

SEQ ID NO: 300654 - DNA, 33 bp, Homo sapien
agacaactgaaacaaatttcgaaatgaactgac

SEQ ID NO: 300655 - DNA, 33 bp, Homo sapien
atcttgtaggatcacactgactttctgttttgt

SEQ ID NO: 300656 - DNA, 33 bp, Homo sapien
atcttgtaggatcacattgactttctgttttgt

SEQ ID NO: 300657 - DNA, 33 bp, Homo sapien
tccactactcttttcaactactgcaagtcactt

SEQ ID NO: 300658 - DNA, 33 bp, Homo sapien
tccactactcttttcatctactgcaagtcactt

SEQ ID NO: 300659 - DNA, 33 bp, Homo sapien
caagagaaagatacaagaggataggatgagggc

SEQ ID NO: 300660 - DNA, 33 bp, Homo sapien
caagagaaagatacaataggataggatgagggc

SEQ ID NO: 300661 - DNA, 33 bp, Homo sapien
taataatcttatacaaatgcagaattattccat

SEQ ID NO: 300662 - DNA, 33 bp, Homo sapien
taataatcttatacaattgcagaattattccat

SEQ ID NO: 300663 - DNA, 33 bp, Homo sapien
atcacggaagcatctcccagccaattttggtag

SEQ ID NO: 300664 - DNA, 33 bp, Homo sapien
atcacggaagcatctctcagccaattttggtag

SEQ ID NO: 300665 - DNA, 33 bp, Homo sapien
tgttacataaacttgaacaagctgtttagcaga

SEQ ID NO: 300666 - DNA, 33 bp, Homo sapien
tgttacataaacttgagcaagctgtttagcaga

SEQ ID NO: 300667 - DNA, 33 bp, Homo sapien
cctaatgatcaactgaacattgactatatctta

SEQ ID NO: 300668 - DNA, 33 bp, Homo sapien
cctaatgatcaactgagcattgactatatctta

SEQ ID NO: 300669 - DNA, 33 bp, Homo sapien
ttattataaactcaggccagaaacaaattatgt

SEQ ID NO: 300670 - DNA, 33 bp, Homo sapien
ttattataaactcaggtcagaaacaaattatgt

SEQ ID NO: 300671 - DNA, 33 bp, Homo sapien
tgatattgtaatcttgaaatgctgtagtgcaat

SEQ ID NO: 300672 - DNA, 33 bp, Homo sapien
tgatattgtaatcttgtaatgctgtagtgcaat

SEQ ID NO: 300673 - DNA, 33 bp, Homo sapien
gagagaagacaattgacgtatagtacaaaaaag

SEQ ID NO: 300674 - DNA, 33 bp, Homo sapien
gagagaagacaattgatgtatagtacaaaaaag

SEQ ID NO: 300675 - DNA, 33 bp, Homo sapien
gactagatgttgggagcaaacattatttcattg

SEQ ID NO: 300676 - DNA, 33 bp, Homo sapien
gactagatgttgggagtaaacattatttcattg

SEQ ID NO: 300677 - DNA, 33 bp, Homo sapien
agtaatgagcaaagtagccttattcagagttca

SEQ ID NO: 300678 - DNA, 33 bp, Homo sapien
agtaatgagcaaagtatccttattcagagttca

SEQ ID NO: 300679 - DNA, 33 bp, Homo sapien
aagctatcttgttttaggacatggttctcattg

SEQ ID NO: 300680 - DNA, 33 bp, Homo sapien
aagctatcttgttttatgacatggttctcattg

SEQ ID NO: 300681 - DNA, 33 bp, Homo sapien
ctcaaaattctcataaaatctcaaatctacatc

SEQ ID NO: 300682 - DNA, 33 bp, Homo sapien
ctcaaaattctcataatatctcaaatctacatc

SEQ ID NO: 300683 - DNA, 33 bp, Homo sapien
acacacacacaagatacgaaatgaaagtataaa

SEQ ID NO: 300684 - DNA, 33 bp, Homo sapien
acacacacacaagatatgaaatgaaagtataaa

SEQ ID NO: 300685 - DNA, 33 bp, Homo sapien
gattatttttacatcaacagtccgcttctacag

SEQ ID NO: 300686 - DNA, 33 bp, Homo sapien
gattatttttacatcagcagtccgcttctacag

SEQ ID NO: 300687 - DNA, 33 bp, Homo sapien
gtttaaatggtctggactaagtgctgggcattg

SEQ ID NO: 300688 - DNA, 33 bp, Homo sapien
gtttaaatggtctggattaagtgctgggcattg

SEQ ID NO: 300689 - DNA, 33 bp, Homo sapien
aactgaagaacacggagtccaatgttcaaggtg

SEQ ID NO: 300690 - DNA, 33 bp, Homo sapien
aactgaagaacacggattccaatgttcaaggtg

SEQ ID NO: 300691 - DNA, 33 bp, Homo sapien
agttctttacgctctccgaacctcattatgtgt

SEQ ID NO: 300692 - DNA, 33 bp, Homo sapien
agttctttacgctctctgaacctcattatgtgt

SEQ ID NO: 300693 - DNA, 33 bp, Homo sapien
tagttgactgtaaatcaaggataccctgacttt

SEQ ID NO: 300694 - DNA, 33 bp, Homo sapien
tagttgactgtaaatccaggataccctgacttt

SEQ ID NO: 300695 - DNA, 33 bp, Homo sapien
ttaatatcattgtacaatcttttcctcattact

SEQ ID NO: 300696 - DNA, 33 bp, Homo sapien
ttaatatcattgtacagtcttttcctcattact

SEQ ID NO: 300697 - DNA, 33 bp, Homo sapien
tttcctcattacttcacgtatacctcaatccta

SEQ ID NO: 300698 - DNA, 33 bp, Homo sapien
tttcctcattacttcatgtatacctcaatccta

SEQ ID NO: 300699 - DNA, 33 bp, Homo sapien
caaagtcaaactccaaagagataatagacacat

SEQ ID NO: 300700 - DNA, 33 bp, Homo sapien
caaagtcaaactccaaggagataatagacacat

SEQ ID NO: 300701 - DNA, 33 bp, Homo sapien
ttttctcttgagtgtaaaacatccctattaaaa

SEQ ID NO: 300702 - DNA, 33 bp, Homo sapien
ttttctcttgagtgtacaacatccctattaaaa

SEQ ID NO: 300703 - DNA, 33 bp, Homo sapien
tcaggcatacaaatgaagagttggttaaatgaa

SEQ ID NO: 300704 - DNA, 33 bp, Homo sapien
tcaggcatacaaatgaggagttggttaaatgaa

SEQ ID NO: 300705 - DNA, 33 bp, Homo sapien
tttgctgtctgtattacgttactttgcctttat

SEQ ID NO: 300706 - DNA, 33 bp, Homo sapien
tttgctgtctgtattatgttactttgcctttat

SEQ ID NO: 300707 - DNA, 33 bp, Homo sapien
agaggagatggcaaaagttaatgtcttaattgg

SEQ ID NO: 300708 - DNA, 33 bp, Homo sapien
agaggagatggcaaaatttaatgtcttaattgg

SEQ ID NO: 300709 - DNA, 33 bp, Homo sapien
ctgggaaaggaacaaaaggcctagtcactatgc

SEQ ID NO: 300710 - DNA, 33 bp, Homo sapien
ctgggaaaggaacaaagggcctagtcactatgc

SEQ ID NO: 300711 - DNA, 33 bp, Homo sapien
catgtggggattgtggaaactattacacatttc

SEQ ID NO: 300712 - DNA, 33 bp, Homo sapien
catgtggggattgtgggaactattacacatttc

SEQ ID NO: 300713 - DNA, 33 bp, Homo sapien
taaatacagccattctaaatgagatggacaaaa

SEQ ID NO: 300714 - DNA, 33 bp, Homo sapien
taaatacagccattcttaatgagatggacaaaa

SEQ ID NO: 300715 - DNA, 33 bp, Homo sapien
atagcagcactaaccacgtgattatttcaaatt

SEQ ID NO: 300716 - DNA, 33 bp, Homo sapien
atagcagcactaaccatgtgattatttcaaatt

SEQ ID NO: 300717 - DNA, 33 bp, Homo sapien
ttcaaatcaccatacaacaggaatcaatacaaa

SEQ ID NO: 300718 - DNA, 33 bp, Homo sapien
ttcaaatcaccatacaccaggaatcaatacaaa

SEQ ID NO: 300719 - DNA, 33 bp, Homo sapien
aattattctcttggtaggtacaatttgtctgca

SEQ ID NO: 300720 - DNA, 33 bp, Homo sapien
aattattctcttggtatgtacaatttgtctgca

SEQ ID NO: 300721 - DNA, 33 bp, Homo sapien
tacaataaaatagaacacaaaataacatggcgc

SEQ ID NO: 300722 - DNA, 33 bp, Homo sapien
tacaataaaatagaactcaaaataacatggcgc

SEQ ID NO: 300723 - DNA, 33 bp, Homo sapien
gtgctgactgtgacaccgagaagctactatttt

SEQ ID NO: 300724 - DNA, 33 bp, Homo sapien
gtgctgactgtgacactgagaagctactatttt

SEQ ID NO: 300725 - DNA, 33 bp, Homo sapien
cttaaagtcttctcaaacttacatctttttcaa

SEQ ID NO: 300726 - DNA, 33 bp, Homo sapien
cttaaagtcttctcaaccttacatctttttcaa

SEQ ID NO: 300727 - DNA, 33 bp, Homo sapien
tttacctagcttctgacaggtaaattaagtctg

SEQ ID NO: 300728 - DNA, 33 bp, Homo sapien
tttacctagcttctgataggtaaattaagtctg

SEQ ID NO: 300729 - DNA, 33 bp, Homo sapien
tgggggatattcaaaaaaaaggcttcaatggag

SEQ ID NO: 300730 - DNA, 33 bp, Homo sapien
tgggggatattcaaaacaaaggcttcaatggag

SEQ ID NO: 300731 - DNA, 33 bp, Homo sapien
ctattacatgcaggtacgagtattcttcatgga

SEQ ID NO: 300732 - DNA, 33 bp, Homo sapien
ctattacatgcaggtatgagtattcttcatgga

SEQ ID NO: 300733 - DNA, 33 bp, Homo sapien
atattgctttcctctaaaaaacatattgagaag

SEQ ID NO: 300734 - DNA, 33 bp, Homo sapien
atattgctttcctctataaaacatattgagaag

SEQ ID NO: 300735 - DNA, 33 bp, Homo sapien
tgtcttctttaccatagagaaaaggaaattatc

SEQ ID NO: 300736 - DNA, 33 bp, Homo sapien
tgtcttctttaccatatagaaaaggaaattatc

SEQ ID NO: 300737 - DNA, 33 bp, Homo sapien
tgaggaagtacagaacaagaaaggctcaatgac

SEQ ID NO: 300738 - DNA, 33 bp, Homo sapien
tgaggaagtacagaaccagaaaggctcaatgac

SEQ ID NO: 300739 - DNA, 33 bp, Homo sapien
gttacacactctgagcactgacagaattaatat

SEQ ID NO: 300740 - DNA, 33 bp, Homo sapien
gttacacactctgagctctgacagaattaatat

SEQ ID NO: 300741 - DNA, 33 bp, Homo sapien
ttcctgaatgcctgaaatcaaaacaaacaaaaa

SEQ ID NO: 300742 - DNA, 33 bp, Homo sapien
ttcctgaatgcctgaagtcaaaacaaacaaaaa

SEQ ID NO: 300743 - DNA, 33 bp, Homo sapien
cccaatacatacagagaagtagtttacagagag

SEQ ID NO: 300744 - DNA, 33 bp, Homo sapien
cccaatacatacagagtagtagtttacagagag

SEQ ID NO: 300745 - DNA, 33 bp, Homo sapien
taaaatcaacttaaagaaatgtttgctccaatt

SEQ ID NO: 300746 - DNA, 33 bp, Homo sapien
taaaatcaacttaaagtaatgtttgctccaatt

SEQ ID NO: 300747 - DNA, 33 bp, Homo sapien
tttatcactgataataccgcgaaccctacacac

SEQ ID NO: 300748 - DNA, 33 bp, Homo sapien
tttatcactgataatatcgcgaaccctacacac

SEQ ID NO: 300749 - DNA, 33 bp, Homo sapien
gagggcagagtttgtacataatttgttcagcat

SEQ ID NO: 300750 - DNA, 33 bp, Homo sapien
gagggcagagtttgtatataatttgttcagcat

SEQ ID NO: 300751 - DNA, 33 bp, Homo sapien
ctggttctgtctatacaatttccaacactactt

SEQ ID NO: 300752 - DNA, 33 bp, Homo sapien
ctggttctgtctatacgatttccaacactactt

SEQ ID NO: 300753 - DNA, 33 bp, Homo sapien
agaagaagtcattatagatgtcaaggagatgga

SEQ ID NO: 300754 - DNA, 33 bp, Homo sapien
agaagaagtcattatatatgtcaaggagatgga

SEQ ID NO: 300755 - DNA, 33 bp, Homo sapien
acttccattgactacccgagcacattttttctc

SEQ ID NO: 300756 - DNA, 33 bp, Homo sapien
acttccattgactacctgagcacattttttctc

SEQ ID NO: 300757 - DNA, 33 bp, Homo sapien
ataaagggcagctgaaaaaaaaattcaaaaaac

SEQ ID NO: 300758 - DNA, 33 bp, Homo sapien
ataaagggcagctgaacaaaaaattcaaaaaac

SEQ ID NO: 300759 - DNA, 33 bp, Homo sapien
cactgttaacatcctacgctatagtggtacatt

SEQ ID NO: 300760 - DNA, 33 bp, Homo sapien
cactgttaacatcctatgctatagtggtacatt

SEQ ID NO: 300761 - DNA, 33 bp, Homo sapien
aaatgttgttctaaccactgatgtccctctttc

SEQ ID NO: 300762 - DNA, 33 bp, Homo sapien
aaatgttgttctaaccgctgatgtccctctttc

SEQ ID NO: 300763 - DNA, 33 bp, Homo sapien
tttaatacattctgacaaattgttttccaaata

SEQ ID NO: 300764 - DNA, 33 bp, Homo sapien
tttaatacattctgaccaattgttttccaaata

SEQ ID NO: 300765 - DNA, 33 bp, Homo sapien
tttcctgcttaaccaaatcacttcatgcaaaaa

SEQ ID NO: 300766 - DNA, 33 bp, Homo sapien
tttcctgcttaaccaagtcacttcatgcaaaaa

SEQ ID NO: 300767 - DNA, 33 bp, Homo sapien
tgatatacatgtacaaaagtttcagaattgtat

SEQ ID NO: 300768 - DNA, 33 bp, Homo sapien
tgatatacatgtacaatagtttcagaattgtat

SEQ ID NO: 300769 - DNA, 33 bp, Homo sapien
cacctagcaaacaaaacgttctcttaatcctga

SEQ ID NO: 300770 - DNA, 33 bp, Homo sapien
cacctagcaaacaaaatgttctcttaatcctga

SEQ ID NO: 300771 - DNA, 33 bp, Homo sapien
cgtctacgtttgtctacagtagctacgtgatca

SEQ ID NO: 300772 - DNA, 33 bp, Homo sapien
cgtctacgtttgtctatagtagctacgtgatca

SEQ ID NO: 300773 - DNA, 33 bp, Homo sapien
tatgtatgctatatccaatcagaaacttcaaga

SEQ ID NO: 300774 - DNA, 33 bp, Homo sapien
tatgtatgctatatcccatcagaaacttcaaga

SEQ ID NO: 300775 - DNA, 33 bp, Homo sapien
attttttgctaatatcaacctttttttctatct

SEQ ID NO: 300776 - DNA, 33 bp, Homo sapien
attttttgctaatatctacctttttttctatct

SEQ ID NO: 300777 - DNA, 33 bp, Homo sapien
ataccaatgagccatacctttggtctttttata

SEQ ID NO: 300778 - DNA, 33 bp, Homo sapien
ataccaatgagccatagctttggtctttttata

SEQ ID NO: 300779 - DNA, 33 bp, Homo sapien
tagagtggtatacgccaaacagatcttcaaaag

SEQ ID NO: 300780 - DNA, 33 bp, Homo sapien
tagagtggtatacgccgaacagatcttcaaaag

SEQ ID NO: 300781 - DNA, 33 bp, Homo sapien
gaccaccatatcttagaatcaggcacttcactc

SEQ ID NO: 300782 - DNA, 33 bp, Homo sapien
gaccaccatatcttaggatcaggcacttcactc

SEQ ID NO: 300783 - DNA, 33 bp, Homo sapien
ctggggtggaaagatacggttgctgtgccttca

SEQ ID NO: 300784 - DNA, 33 bp, Homo sapien
ctggggtggaaagatatggttgctgtgccttca

SEQ ID NO: 300785 - DNA, 33 bp, Homo sapien
catgatgactgacctaccgtatttccaaagaca

SEQ ID NO: 300786 - DNA, 33 bp, Homo sapien
catgatgactgacctatcgtatttccaaagaca

SEQ ID NO: 300787 - DNA, 33 bp, Homo sapien
acaggtcattgtacaccatcagaaaaattgatt

SEQ ID NO: 300788 - DNA, 33 bp, Homo sapien
acaggtcattgtacactatcagaaaaattgatt

SEQ ID NO: 300789 - DNA, 33 bp, Homo sapien
tttcctaggctacaaaatagattagatattgca

SEQ ID NO: 300790 - DNA, 33 bp, Homo sapien
tttcctaggctacaaattagattagatattgca

SEQ ID NO: 300791 - DNA, 33 bp, Homo sapien
tgtgtttgactcgctcaaccagcccacattctg

SEQ ID NO: 300792 - DNA, 33 bp, Homo sapien
tgtgtttgactcgctccaccagcccacattctg

SEQ ID NO: 300793 - DNA, 33 bp, Homo sapien
tccaaagaagatgtacgaatgttcaacagatac

SEQ ID NO: 300794 - DNA, 33 bp, Homo sapien
tccaaagaagatgtactaatgttcaacagatac

SEQ ID NO: 300795 - DNA, 33 bp, Homo sapien
tgattccctctcttcccacttactggtaaccac

SEQ ID NO: 300796 - DNA, 33 bp, Homo sapien
tgattccctctcttcctacttactggtaaccac

SEQ ID NO: 300797 - DNA, 33 bp, Homo sapien
tgaagatggcgctttaactctgggattttcctc

SEQ ID NO: 300798 - DNA, 33 bp, Homo sapien
tgaagatggcgctttatctctgggattttcctc

SEQ ID NO: 300799 - DNA, 33 bp, Homo sapien
taaagagtactggtcacgtgtattgcaggatgt

SEQ ID NO: 300800 - DNA, 33 bp, Homo sapien
taaagagtactggtcatgtgtattgcaggatgt

SEQ ID NO: 300801 - DNA, 33 bp, Homo sapien
tgaaacagcttccaagcagtgagctaaacaagt

SEQ ID NO: 300802 - DNA, 33 bp, Homo sapien
tgaaacagcttccaagtagtgagctaaacaagt

SEQ ID NO: 300803 - DNA, 33 bp, Homo sapien
aatatcatctgctacaaaattttgcctgaaaca

SEQ ID NO: 300804 - DNA, 33 bp, Homo sapien
aatatcatctgctacataattttgcctgaaaca

SEQ ID NO: 300805 - DNA, 33 bp, Homo sapien
gataggctataattacaaagattgatcatatcg

SEQ ID NO: 300806 - DNA, 33 bp, Homo sapien
gataggctataattacgaagattgatcatatcg

SEQ ID NO: 300807 - DNA, 33 bp, Homo sapien
tgaattgtatttgtaaccctcaatgttagaggc

SEQ ID NO: 300808 - DNA, 33 bp, Homo sapien
tgaattgtatttgtaatcctcaatgttagaggc

SEQ ID NO: 300809 - DNA, 33 bp, Homo sapien
attcaacacttcaaataaacacacattaactaa

SEQ ID NO: 300810 - DNA, 33 bp, Homo sapien
attcaacacttcaaattaacacacattaactaa

SEQ ID NO: 300811 - DNA, 33 bp, Homo sapien
ttgcagtgagtctaaaatagtttatgctaagta

SEQ ID NO: 300812 - DNA, 33 bp, Homo sapien
ttgcagtgagtctaaagtagtttatgctaagta

SEQ ID NO: 300813 - DNA, 33 bp, Homo sapien
ttaagaaattgcttacaaaacatagagtatgga

SEQ ID NO: 300814 - DNA, 33 bp, Homo sapien
ttaagaaattgcttacgaaacatagagtatgga

SEQ ID NO: 300815 - DNA, 33 bp, Homo sapien
aacctagataatcaacagtaaggggctggctaa

SEQ ID NO: 300816 - DNA, 33 bp, Homo sapien
aacctagataatcaacggtaaggggctggctaa

SEQ ID NO: 300817 - DNA, 33 bp, Homo sapien
tctgaatcataactcacgattgcacatatttca

SEQ ID NO: 300818 - DNA, 33 bp, Homo sapien
tctgaatcataactcaggattgcacatatttca

SEQ ID NO: 300819 - DNA, 33 bp, Homo sapien
tccatgaacctatttacccagtcatttgtttat

SEQ ID NO: 300820 - DNA, 33 bp, Homo sapien
tccatgaacctatttatccagtcatttgtttat

SEQ ID NO: 300821 - DNA, 33 bp, Homo sapien
cccacgtgtcatgggaaagacttgtggaaggta

SEQ ID NO: 300822 - DNA, 33 bp, Homo sapien
cccacgtgtcatgggagagacttgtggaaggta

SEQ ID NO: 300823 - DNA, 33 bp, Homo sapien
aaaaagcaaatggctacatgaaagctaatagaa

SEQ ID NO: 300824 - DNA, 33 bp, Homo sapien
aaaaagcaaatggctatatgaaagctaatagaa

SEQ ID NO: 300825 - DNA, 33 bp, Homo sapien
gaaaccttccagaatacacccaatcaataccgc

SEQ ID NO: 300826 - DNA, 33 bp, Homo sapien
gaaaccttccagaatatacccaatcaataccgc

SEQ ID NO: 300827 - DNA, 33 bp, Homo sapien
ttttattattaagccactcatttcaagccatat

SEQ ID NO: 300828 - DNA, 33 bp, Homo sapien
ttttattattaagccagtcatttcaagccatat

SEQ ID NO: 300829 - DNA, 33 bp, Homo sapien
attttaggctaataacaatgattgagctaaatg

SEQ ID NO: 300830 - DNA, 33 bp, Homo sapien
attttaggctaataactatgattgagctaaatg

SEQ ID NO: 300831 - DNA, 33 bp, Homo sapien
agagattggcctcgataaataaatgttcactac

SEQ ID NO: 300832 - DNA, 33 bp, Homo sapien
agagattggcctcgatgaataaatgttcactac

SEQ ID NO: 300833 - DNA, 33 bp, Homo sapien
gttttatctcatagaaaaatagcgactcttatc

SEQ ID NO: 300834 - DNA, 33 bp, Homo sapien
gttttatctcatagaagaatagcgactcttatc

SEQ ID NO: 300835 - DNA, 33 bp, Homo sapien
tccccagaagccattcaaggccggaactagccc

SEQ ID NO: 300836 - DNA, 33 bp, Homo sapien
tccccagaagccattcgaggccggaactagccc

SEQ ID NO: 300837 - DNA, 33 bp, Homo sapien
cttacctcagagtacaacaatgtcaccttgttt

SEQ ID NO: 300838 - DNA, 33 bp, Homo sapien
cttacctcagagtacaccaatgtcaccttgttt

SEQ ID NO: 300839 - DNA, 33 bp, Homo sapien
acattttgttgcagaaatcttcatatatgatat

SEQ ID NO: 300840 - DNA, 33 bp, Homo sapien
acattttgttgcagaagtcttcatatatgatat

SEQ ID NO: 300841 - DNA, 33 bp, Homo sapien
agaaaatagaacagaaagtatgcatgtatacat

SEQ ID NO: 300842 - DNA, 33 bp, Homo sapien
agaaaatagaacagaatgtatgcatgtatacat

SEQ ID NO: 300843 - DNA, 33 bp, Homo sapien
actttactgcctttcacacggtttacaaattaa

SEQ ID NO: 300844 - DNA, 33 bp, Homo sapien
actttactgcctttcatacggtttacaaattaa

SEQ ID NO: 300845 - DNA, 33 bp, Homo sapien
aaatggtgtcaatagacgtgctagaagcagggt

SEQ ID NO: 300846 - DNA, 33 bp, Homo sapien
aaatggtgtcaatagatgtgctagaagcagggt

SEQ ID NO: 300847 - DNA, 33 bp, Homo sapien
tggaacacacagtatgacagaggtatgcctata

SEQ ID NO: 300848 - DNA, 33 bp, Homo sapien
tggaacacacagtatgtcagaggtatgcctata

SEQ ID NO: 300849 - DNA, 33 bp, Homo sapien
gtttagcacttttgtgccaaaataagtctgtgg

SEQ ID NO: 300850 - DNA, 33 bp, Homo sapien
gtttagcacttttgtgtcaaaataagtctgtgg

SEQ ID NO: 300851 - DNA, 33 bp, Homo sapien
ccagaacctggccaccactattccacctattct

SEQ ID NO: 300852 - DNA, 33 bp, Homo sapien
ccagaacctggccaccgctattccacctattct

SEQ ID NO: 300853 - DNA, 33 bp, Homo sapien
taatgatcatagctaaaacttactaagcgcttg

SEQ ID NO: 300854 - DNA, 33 bp, Homo sapien
taatgatcatagctaacacttactaagcgcttg

SEQ ID NO: 300855 - DNA, 33 bp, Homo sapien
gtggatgaaattcacaatgacttataaatatct

SEQ ID NO: 300856 - DNA, 33 bp, Homo sapien
gtggatgaaattcacagtgacttataaatatct

SEQ ID NO: 300857 - DNA, 33 bp, Homo sapien
gacaagtttcctcagaagagtgaaagatgtgaa

SEQ ID NO: 300858 - DNA, 33 bp, Homo sapien
gacaagtttcctcagaggagtgaaagatgtgaa

SEQ ID NO: 300859 - DNA, 33 bp, Homo sapien
atatagaaagaactacaaggtggaaaatcttta

SEQ ID NO: 300860 - DNA, 33 bp, Homo sapien
atatagaaagaactacgaggtggaaaatcttta

SEQ ID NO: 300861 - DNA, 33 bp, Homo sapien
gctgactgggctagcaacctttgattttccatg

SEQ ID NO: 300862 - DNA, 33 bp, Homo sapien
gctgactgggctagcatcctttgattttccatg

SEQ ID NO: 300863 - DNA, 33 bp, Homo sapien
tgtgaagttgatgaaaagtgaagttgatatgtt

SEQ ID NO: 300864 - DNA, 33 bp, Homo sapien
tgtgaagttgatgaaatgtgaagttgatatgtt

SEQ ID NO: 300865 - DNA, 33 bp, Homo sapien
atgcccaacacaggaaagagtgtaagtaaatga

SEQ ID NO: 300866 - DNA, 33 bp, Homo sapien
atgcccaacacaggaacgagtgtaagtaaatga

SEQ ID NO: 300867 - DNA, 33 bp, Homo sapien
aagcttatctattttcaccagggcagaagtact

SEQ ID NO: 300868 - DNA, 33 bp, Homo sapien
aagcttatctattttcgccagggcagaagtact

SEQ ID NO: 300869 - DNA, 33 bp, Homo sapien
aacagctatcccttaacgcgtgttttcttgtaa

SEQ ID NO: 300870 - DNA, 33 bp, Homo sapien
aacagctatcccttaatgcgtgttttcttgtaa

SEQ ID NO: 300871 - DNA, 33 bp, Homo sapien
aggtttttaacaagaactctggcttaacatcac

SEQ ID NO: 300872 - DNA, 33 bp, Homo sapien
aggtttttaacaagaagtctggcttaacatcac

SEQ ID NO: 300873 - DNA, 33 bp, Homo sapien
ttctatatttgctatcccacagttcttacaaag

SEQ ID NO: 300874 - DNA, 33 bp, Homo sapien
ttctatatttgctatctcacagttcttacaaag

SEQ ID NO: 300875 - DNA, 33 bp, Homo sapien
gttagcaataatttcacctctgtatattataga

SEQ ID NO: 300876 - DNA, 33 bp, Homo sapien
gttagcaataatttcagctctgtatattataga

SEQ ID NO: 300877 - DNA, 33 bp, Homo sapien
gaactcaggagtgatacagaagagttgcaaata

SEQ ID NO: 300878 - DNA, 33 bp, Homo sapien
gaactcaggagtgatagagaagagttgcaaata

SEQ ID NO: 300879 - DNA, 33 bp, Homo sapien
gatgggtttctgtatgaaaatctgaatatatta

SEQ ID NO: 300880 - DNA, 33 bp, Homo sapien
gatgggtttctgtatggaaatctgaatatatta

SEQ ID NO: 300881 - DNA, 33 bp, Homo sapien
aatcaccaaagtaaataatcatgaaacagaaga

SEQ ID NO: 300882 - DNA, 33 bp, Homo sapien
aatcaccaaagtaaatgatcatgaaacagaaga

SEQ ID NO: 300883 - DNA, 33 bp, Homo sapien
attgcaaagtcatcgaagcagctggtgaaaatg

SEQ ID NO: 300884 - DNA, 33 bp, Homo sapien
attgcaaagtcatcgaggcagctggtgaaaatg

SEQ ID NO: 300885 - DNA, 33 bp, Homo sapien
aaatgcattagcatcacaaagtaactgtctatg

SEQ ID NO: 300886 - DNA, 33 bp, Homo sapien
aaatgcattagcatcataaagtaactgtctatg

SEQ ID NO: 300887 - DNA, 33 bp, Homo sapien
tcatgtacacacaagcacaaaaaagtcatgctt

SEQ ID NO: 300888 - DNA, 33 bp, Homo sapien
tcatgtacacacaagcgcaaaaaagtcatgctt

SEQ ID NO: 300889 - DNA, 33 bp, Homo sapien
ggcttagattctcagaagtggaattattgggtt

SEQ ID NO: 300890 - DNA, 33 bp, Homo sapien
ggcttagattctcagaggtggaattattgggtt

SEQ ID NO: 300891 - DNA, 33 bp, Homo sapien
tctttatggggtcaccagagtaccatatttcca

SEQ ID NO: 300892 - DNA, 33 bp, Homo sapien
tctttatggggtcaccggagtaccatatttcca

SEQ ID NO: 300893 - DNA, 33 bp, Homo sapien
ttaacttttgccgtgaactgatatcacatgaga

SEQ ID NO: 300894 - DNA, 33 bp, Homo sapien
ttaacttttgccgtgagctgatatcacatgaga

SEQ ID NO: 300895 - DNA, 33 bp, Homo sapien
cccactgttccacagcaatatactgcttggcat

SEQ ID NO: 300896 - DNA, 33 bp, Homo sapien
cccactgttccacagccatatactgcttggcat

SEQ ID NO: 300897 - DNA, 33 bp, Homo sapien
gacagtattgtcctacactattaggaaatttat

SEQ ID NO: 300898 - DNA, 33 bp, Homo sapien
gacagtattgtcctacgctattaggaaatttat

SEQ ID NO: 300899 - DNA, 33 bp, Homo sapien
gtaacggaaaatagaactgagctaagactagca

SEQ ID NO: 300900 - DNA, 33 bp, Homo sapien
gtaacggaaaatagaagtgagctaagactagca

SEQ ID NO: 300901 - DNA, 33 bp, Homo sapien
cataactagtataatccctggctttctgcacca

SEQ ID NO: 300902 - DNA, 33 bp, Homo sapien
cataactagtataatctctggctttctgcacca

SEQ ID NO: 300903 - DNA, 33 bp, Homo sapien
tctagtcttagacaaacaaatgtgttaagtctt

SEQ ID NO: 300904 - DNA, 33 bp, Homo sapien
tctagtcttagacaaataaatgtgttaagtctt

SEQ ID NO: 300905 - DNA, 33 bp, Homo sapien
cacaatcctgacttctaacatggattaatttaa

SEQ ID NO: 300906 - DNA, 33 bp, Homo sapien
cacaatcctgacttctcacatggattaatttaa

SEQ ID NO: 300907 - DNA, 33 bp, Homo sapien
aactctttattctcacggaccttgtgaatgttt

SEQ ID NO: 300908 - DNA, 33 bp, Homo sapien
aactctttattctcactgaccttgtgaatgttt

SEQ ID NO: 300909 - DNA, 33 bp, Homo sapien
caagagcaaccattgacagaatgagcagtgccc

SEQ ID NO: 300910 - DNA, 33 bp, Homo sapien
caagagcaaccattgatagaatgagcagtgccc

SEQ ID NO: 300911 - DNA, 33 bp, Homo sapien
aatggtgccagaacaactggctatccatacaga

SEQ ID NO: 300912 - DNA, 33 bp, Homo sapien
aatggtgccagaacaattggctatccatacaga

SEQ ID NO: 300913 - DNA, 33 bp, Homo sapien
atatagaatcagtaaaaattatcaaggactctg

SEQ ID NO: 300914 - DNA, 33 bp, Homo sapien
atatagaatcagtaaagattatcaaggactctg

SEQ ID NO: 300915 - DNA, 33 bp, Homo sapien
tcacacatagcatttcaagtgtctcatgaacta

SEQ ID NO: 300916 - DNA, 33 bp, Homo sapien
tcacacatagcatttccagtgtctcatgaacta

SEQ ID NO: 300917 - DNA, 33 bp, Homo sapien
actgtaatggtaagaacgaaacatacatacaag

SEQ ID NO: 300918 - DNA, 33 bp, Homo sapien
actgtaatggtaagaatgaaacatacatacaag

SEQ ID NO: 300919 - DNA, 33 bp, Homo sapien
aaattttccaagtgataagaaataataccacac

SEQ ID NO: 300920 - DNA, 33 bp, Homo sapien
aaattttccaagtgatgagaaataataccacac

SEQ ID NO: 300921 - DNA, 33 bp, Homo sapien
tgacatgtgggaaatacgtgacttgatgaggcc

SEQ ID NO: 300922 - DNA, 33 bp, Homo sapien
tgacatgtgggaaatatgtgacttgatgaggcc

SEQ ID NO: 300923 - DNA, 33 bp, Homo sapien
agaacataatctcctaacatttgcgaaaacacc

SEQ ID NO: 300924 - DNA, 33 bp, Homo sapien
agaacataatctcctagcatttgcgaaaacacc

SEQ ID NO: 300925 - DNA, 33 bp, Homo sapien
atcataatataaagtacagtggtaggataccat

SEQ ID NO: 300926 - DNA, 33 bp, Homo sapien
atcataatataaagtagagtggtaggataccat

SEQ ID NO: 300927 - DNA, 33 bp, Homo sapien
gcgcatattttttaggcataatggcattgcatg

SEQ ID NO: 300928 - DNA, 33 bp, Homo sapien
gcgcatattttttaggtataatggcattgcatg

SEQ ID NO: 300929 - DNA, 33 bp, Homo sapien
ccttcaccagcaaagcaattacaacttgctgaa

SEQ ID NO: 300930 - DNA, 33 bp, Homo sapien
ccttcaccagcaaagccattacaacttgctgaa

SEQ ID NO: 300931 - DNA, 33 bp, Homo sapien
ttcatatgcttctctacagccttttccatgatc

SEQ ID NO: 300932 - DNA, 33 bp, Homo sapien
ttcatatgcttctctatagccttttccatgatc

SEQ ID NO: 300933 - DNA, 33 bp, Homo sapien
caactttccgccatgcaaatggtgctacaggaa

SEQ ID NO: 300934 - DNA, 33 bp, Homo sapien
caactttccgccatgcgaatggtgctacaggaa

SEQ ID NO: 300935 - DNA, 33 bp, Homo sapien
gagagattgagagagaaatgttttatacttcat

SEQ ID NO: 300936 - DNA, 33 bp, Homo sapien
gagagattgagagagagatgttttatacttcat

SEQ ID NO: 300937 - DNA, 33 bp, Homo sapien
aaattgagggtgaaaccgacacttaacaatgtg

SEQ ID NO: 300938 - DNA, 33 bp, Homo sapien
aaattgagggtgaaactgacacttaacaatgtg

SEQ ID NO: 300939 - DNA, 33 bp, Homo sapien
tcttagtcttcagtgtaaacagtcataatttat

SEQ ID NO: 300940 - DNA, 33 bp, Homo sapien
tcttagtcttcagtgtgaacagtcataatttat

SEQ ID NO: 300941 - DNA, 33 bp, Homo sapien
tgtgtagccagttaccaattagagcaacactaa

SEQ ID NO: 300942 - DNA, 33 bp, Homo sapien
tgtgtagccagttacctattagagcaacactaa

SEQ ID NO: 300943 - DNA, 33 bp, Homo sapien
ggacttgtgtggaagacataatattgacttaac

SEQ ID NO: 300944 - DNA, 33 bp, Homo sapien
ggacttgtgtggaagatataatattgacttaac

SEQ ID NO: 300945 - DNA, 33 bp, Homo sapien
gaaattttcctcctgacgtttcctatgatacat

SEQ ID NO: 300946 - DNA, 33 bp, Homo sapien
gaaattttcctcctgatgtttcctatgatacat

SEQ ID NO: 300947 - DNA, 33 bp, Homo sapien
ctacaagtttgaagaaaaatttcactggatata

SEQ ID NO: 300948 - DNA, 33 bp, Homo sapien
ctacaagtttgaagaataatttcactggatata

SEQ ID NO: 300949 - DNA, 33 bp, Homo sapien
tcttataagcaggtgccaaactgaggtcactgc

SEQ ID NO: 300950 - DNA, 33 bp, Homo sapien
tcttataagcaggtgctaaactgaggtcactgc

SEQ ID NO: 300951 - DNA, 33 bp, Homo sapien
agagtcttcaattgacacaatttccatcaaata

SEQ ID NO: 300952 - DNA, 33 bp, Homo sapien
agagtcttcaattgacccaatttccatcaaata

SEQ ID NO: 300953 - DNA, 33 bp, Homo sapien
gtcacctgctccatcaacctttttctaaagaca

SEQ ID NO: 300954 - DNA, 33 bp, Homo sapien
gtcacctgctccatcagcctttttctaaagaca

SEQ ID NO: 300955 - DNA, 33 bp, Homo sapien
ttgctaggtatggaccaattacagctcttacct

SEQ ID NO: 300956 - DNA, 33 bp, Homo sapien
ttgctaggtatggacctattacagctcttacct

SEQ ID NO: 300957 - DNA, 33 bp, Homo sapien
ttcactcatttcaacagtagctcaaaagtccaa

SEQ ID NO: 300958 - DNA, 33 bp, Homo sapien
ttcactcatttcaacattagctcaaaagtccaa

SEQ ID NO: 300959 - DNA, 33 bp, Homo sapien
ctcaaccttgcatataccattacaggactttgg

SEQ ID NO: 300960 - DNA, 33 bp, Homo sapien
ctcaaccttgcatatatcattacaggactttgg

SEQ ID NO: 300961 - DNA, 33 bp, Homo sapien
ccctactcaacaatacaaagcagcagactaccg

SEQ ID NO: 300962 - DNA, 33 bp, Homo sapien
ccctactcaacaatacgaagcagcagactaccg

SEQ ID NO: 300963 - DNA, 33 bp, Homo sapien
taattcactttgctgtaaaagattccctttgag

SEQ ID NO: 300964 - DNA, 33 bp, Homo sapien
taattcactttgctgtgaaagattccctttgag

SEQ ID NO: 300965 - DNA, 33 bp, Homo sapien
ttttgtggccgagcgcaatacacatgggacagc

SEQ ID NO: 300966 - DNA, 33 bp, Homo sapien
ttttgtggccgagcgcgatacacatgggacagc

SEQ ID NO: 300967 - DNA, 33 bp, Homo sapien
atacaaatttgagcaagtcatttaattagggct

SEQ ID NO: 300968 - DNA, 33 bp, Homo sapien
atacaaatttgagcaattcatttaattagggct

SEQ ID NO: 300969 - DNA, 33 bp, Homo sapien
gtgtcacaattaaacaactcattatccaacctg

SEQ ID NO: 300970 - DNA, 33 bp, Homo sapien
gtgtcacaattaaacacctcattatccaacctg

SEQ ID NO: 300971 - DNA, 33 bp, Homo sapien
gtaaattttcaacatgaatgatccaaaaagatg

SEQ ID NO: 300972 - DNA, 33 bp, Homo sapien
gtaaattttcaacatggatgatccaaaaagatg

SEQ ID NO: 300973 - DNA, 33 bp, Homo sapien
tcacttaaggtgatatcaagtagaagattaatg

SEQ ID NO: 300974 - DNA, 33 bp, Homo sapien
tcacttaaggtgatattaagtagaagattaatg

SEQ ID NO: 300975 - DNA, 33 bp, Homo sapien
ttcctcataagtcttgaacacaaaagatatgaa

SEQ ID NO: 300976 - DNA, 33 bp, Homo sapien
ttcctcataagtcttgcacacaaaagatatgaa

SEQ ID NO: 300977 - DNA, 33 bp, Homo sapien
aggaatttatcatagacgtaggcttttcatttc

SEQ ID NO: 300978 - DNA, 33 bp, Homo sapien
aggaatttatcatagatgtaggcttttcatttc

SEQ ID NO: 300979 - DNA, 33 bp, Homo sapien
ttcacggccatctgaaatgttaaacagtggctt

SEQ ID NO: 300980 - DNA, 33 bp, Homo sapien
ttcacggccatctgaagtgttaaacagtggctt

SEQ ID NO: 300981 - DNA, 33 bp, Homo sapien
aatatgggaattcacaataactaaatgaagtct

SEQ ID NO: 300982 - DNA, 33 bp, Homo sapien
aatatgggaattcacagtaactaaatgaagtct

SEQ ID NO: 300983 - DNA, 33 bp, Homo sapien
cagcccctcggatatacgaaacccatctgcaac

SEQ ID NO: 300984 - DNA, 33 bp, Homo sapien
cagcccctcggatatatgaaacccatctgcaac

SEQ ID NO: 300985 - DNA, 33 bp, Homo sapien
tttggcactaatggcacacagtgtttcttcagt

SEQ ID NO: 300986 - DNA, 33 bp, Homo sapien
tttggcactaatggcatacagtgtttcttcagt

SEQ ID NO: 300987 - DNA, 33 bp, Homo sapien
ttggtacttagtagacagattatggacatcacc

SEQ ID NO: 300988 - DNA, 33 bp, Homo sapien
ttggtacttagtagacggattatggacatcacc

SEQ ID NO: 300989 - DNA, 33 bp, Homo sapien
ggtgatggtggcaatacaggaagagacagccat

SEQ ID NO: 300990 - DNA, 33 bp, Homo sapien
ggtgatggtggcaatagaggaagagacagccat

SEQ ID NO: 300991 - DNA, 33 bp, Homo sapien
gcagagttgatatcagaaatgtttgagttagct

SEQ ID NO: 300992 - DNA, 33 bp, Homo sapien
gcagagttgatatcaggaatgtttgagttagct

SEQ ID NO: 300993 - DNA, 33 bp, Homo sapien
tgatagccagtaacaaagtaaacagaatggatt

SEQ ID NO: 300994 - DNA, 33 bp, Homo sapien
tgatagccagtaacaaggtaaacagaatggatt

SEQ ID NO: 300995 - DNA, 33 bp, Homo sapien
ggtaccattgtcacaaataacaaataaacttta

SEQ ID NO: 300996 - DNA, 33 bp, Homo sapien
ggtaccattgtcacaactaacaaataaacttta

SEQ ID NO: 300997 - DNA, 33 bp, Homo sapien
atgaaggtgattgcacaaatgtccactttatag

SEQ ID NO: 300998 - DNA, 33 bp, Homo sapien
atgaaggtgattgcacgaatgtccactttatag

SEQ ID NO: 300999 - DNA, 33 bp, Homo sapien
gtaaacttgaaaataacgtatcagcaactttcc

SEQ ID NO: 301000 - DNA, 33 bp, Homo sapien
gtaaacttgaaaataatgtatcagcaactttcc

SEQ ID NO: 301001 - DNA, 33 bp, Homo sapien
tgaagaatatttccagcctcatctaggacaata

SEQ ID NO: 301002 - DNA, 33 bp, Homo sapien
tgaagaatatttccagtctcatctaggacaata

SEQ ID NO: 301003 - DNA, 33 bp, Homo sapien
gcctctaaactggttacgaaggcctgacaattt

SEQ ID NO: 301004 - DNA, 33 bp, Homo sapien
gcctctaaactggttatgaaggcctgacaattt

SEQ ID NO: 301005 - DNA, 33 bp, Homo sapien
gtgcccagcttgcaacaaattacttaaggcaca

SEQ ID NO: 301006 - DNA, 33 bp, Homo sapien
gtgcccagcttgcaacgaattacttaaggcaca

SEQ ID NO: 301007 - DNA, 33 bp, Homo sapien
tgtgagagtgacattacaggtaggtaaccttga

SEQ ID NO: 301008 - DNA, 33 bp, Homo sapien
tgtgagagtgacattataggtaggtaaccttga

SEQ ID NO: 301009 - DNA, 33 bp, Homo sapien
tataacacttgagaaaaggtctataatacctat

SEQ ID NO: 301010 - DNA, 33 bp, Homo sapien
tataacacttgagaaagggtctataatacctat

SEQ ID NO: 301011 - DNA, 33 bp, Homo sapien
tcaaataaattatgaaggattgaggttatgtgt

SEQ ID NO: 301012 - DNA, 33 bp, Homo sapien
tcaaataaattatgaatgattgaggttatgtgt

SEQ ID NO: 301013 - DNA, 33 bp, Homo sapien
atagactattttcaaacgccagcacagtgccag

SEQ ID NO: 301014 - DNA, 33 bp, Homo sapien
atagactattttcaaatgccagcacagtgccag

SEQ ID NO: 301015 - DNA, 33 bp, Homo sapien
cacacaggctctctcacctctaagtatctttct

SEQ ID NO: 301016 - DNA, 33 bp, Homo sapien
cacacaggctctctcatctctaagtatctttct

SEQ ID NO: 301017 - DNA, 33 bp, Homo sapien
aattaagtcctgaatgacagactcagagctaag

SEQ ID NO: 301018 - DNA, 33 bp, Homo sapien
aattaagtcctgaatgtcagactcagagctaag

SEQ ID NO: 301019 - DNA, 33 bp, Homo sapien
tacagaaaataacatcaccgcttacaatgttac

SEQ ID NO: 301020 - DNA, 33 bp, Homo sapien
tacagaaaataacatcgccgcttacaatgttac

SEQ ID NO: 301021 - DNA, 33 bp, Homo sapien
caacaatgaaagcaaactgtggccatttcattt

SEQ ID NO: 301022 - DNA, 33 bp, Homo sapien
caacaatgaaagcaaagtgtggccatttcattt

SEQ ID NO: 301023 - DNA, 33 bp, Homo sapien
gaataatgggaatctacggccttttagcttgct

SEQ ID NO: 301024 - DNA, 33 bp, Homo sapien
gaataatgggaatctatggccttttagcttgct

SEQ ID NO: 301025 - DNA, 33 bp, Homo sapien
ttattgcctgaaaccactgaaagaccgcactat

SEQ ID NO: 301026 - DNA, 33 bp, Homo sapien
ttattgcctgaaaccattgaaagaccgcactat

SEQ ID NO: 301027 - DNA, 33 bp, Homo sapien
gaatcaatgaagatgcgcaaagaggaacgtgta

SEQ ID NO: 301028 - DNA, 33 bp, Homo sapien
gaatcaatgaagatgctcaaagaggaacgtgta

SEQ ID NO: 301029 - DNA, 33 bp, Homo sapien
gctaagctttgcagtacgggtgggaagcagaag

SEQ ID NO: 301030 - DNA, 33 bp, Homo sapien
gctaagctttgcagtatgggtgggaagcagaag

SEQ ID NO: 301031 - DNA, 33 bp, Homo sapien
ctgcatttctgtggaaagcctgagaagttgggc

SEQ ID NO: 301032 - DNA, 33 bp, Homo sapien
ctgcatttctgtggaatgcctgagaagttgggc

SEQ ID NO: 301033 - DNA, 33 bp, Homo sapien
aatactgtgttggtataaagtgaatgaccccat

SEQ ID NO: 301034 - DNA, 33 bp, Homo sapien
aatactgtgttggtatgaagtgaatgaccccat

SEQ ID NO: 301035 - DNA, 33 bp, Homo sapien
taaattccgatttttacatacctgccataattt

SEQ ID NO: 301036 - DNA, 33 bp, Homo sapien
taaattccgatttttatatacctgccataattt

SEQ ID NO: 301037 - DNA, 33 bp, Homo sapien
agttaagtgacaatgcccgatgtcaaatgaaag

SEQ ID NO: 301038 - DNA, 33 bp, Homo sapien
agttaagtgacaatgctcgatgtcaaatgaaag

SEQ ID NO: 301039 - DNA, 33 bp, Homo sapien
cctttatgctgtgataataacatgaattgggta

SEQ ID NO: 301040 - DNA, 33 bp, Homo sapien
cctttatgctgtgatagtaacatgaattgggta

SEQ ID NO: 301041 - DNA, 33 bp, Homo sapien
ttgtatgttaccaaaaagtttgagtaattagat

SEQ ID NO: 301042 - DNA, 33 bp, Homo sapien
ttgtatgttaccaaaaggtttgagtaattagat

SEQ ID NO: 301043 - DNA, 33 bp, Homo sapien
ggttgccattctttcccagcatcacctcattca

SEQ ID NO: 301044 - DNA, 33 bp, Homo sapien
ggttgccattctttcctagcatcacctcattca

SEQ ID NO: 301045 - DNA, 33 bp, Homo sapien
ataaacgttgtgcaccaaaagtaccaaacaact

SEQ ID NO: 301046 - DNA, 33 bp, Homo sapien
ataaacgttgtgcaccgaaagtaccaaacaact

SEQ ID NO: 301047 - DNA, 33 bp, Homo sapien
aggtgtgtgataaaataacttgatctagatgtc

SEQ ID NO: 301048 - DNA, 33 bp, Homo sapien
aggtgtgtgataaaattacttgatctagatgtc

SEQ ID NO: 301049 - DNA, 33 bp, Homo sapien
acaattggccataaaccgctattattttcatac

SEQ ID NO: 301050 - DNA, 33 bp, Homo sapien
acaattggccataaactgctattattttcatac

SEQ ID NO: 301051 - DNA, 33 bp, Homo sapien
gaagcaaatttctagcaccaggtagcattagta

SEQ ID NO: 301052 - DNA, 33 bp, Homo sapien
gaagcaaatttctagcgccaggtagcattagta

SEQ ID NO: 301053 - DNA, 33 bp, Homo sapien
atgaatccagtatatgaagttcaaatcaagcaa

SEQ ID NO: 301054 - DNA, 33 bp, Homo sapien
atgaatccagtatatggagttcaaatcaagcaa

SEQ ID NO: 301055 - DNA, 33 bp, Homo sapien
attacgacattggtaactctgtttgtttatcca

SEQ ID NO: 301056 - DNA, 33 bp, Homo sapien
attacgacattggtaattctgtttgtttatcca

SEQ ID NO: 301057 - DNA, 33 bp, Homo sapien
aacttgtcatagccagaaagagtttatgcttct

SEQ ID NO: 301058 - DNA, 33 bp, Homo sapien
aacttgtcatagccagcaagagtttatgcttct

SEQ ID NO: 301059 - DNA, 33 bp, Homo sapien
ttgtatttcattttgtaaagattccactgctca

SEQ ID NO: 301060 - DNA, 33 bp, Homo sapien
ttgtatttcattttgttaagattccactgctca

SEQ ID NO: 301061 - DNA, 33 bp, Homo sapien
tttctattgctacagccccatatggtaacccta

SEQ ID NO: 301062 - DNA, 33 bp, Homo sapien
tttctattgctacagctccatatggtaacccta

SEQ ID NO: 301063 - DNA, 33 bp, Homo sapien
ttcttctgtatcctaaatagcaaattgttgtca

SEQ ID NO: 301064 - DNA, 33 bp, Homo sapien
ttcttctgtatcctaagtagcaaattgttgtca

SEQ ID NO: 301065 - DNA, 33 bp, Homo sapien
aagtaagccgatttgaaaagtaggagttttagg

SEQ ID NO: 301066 - DNA, 33 bp, Homo sapien
aagtaagccgatttgagaagtaggagttttagg

SEQ ID NO: 301067 - DNA, 33 bp, Homo sapien
gcaggggaaagagacactgaagcagaaatttag

SEQ ID NO: 301068 - DNA, 33 bp, Homo sapien
gcaggggaaagagacattgaagcagaaatttag

SEQ ID NO: 301069 - DNA, 33 bp, Homo sapien
atagaacaaacagaaaattattaagcaaataga

SEQ ID NO: 301070 - DNA, 33 bp, Homo sapien
atagaacaaacagaaagttattaagcaaataga

SEQ ID NO: 301071 - DNA, 33 bp, Homo sapien
acacaccatgcagtaacgtgatccctcagaaaa

SEQ ID NO: 301072 - DNA, 33 bp, Homo sapien
acacaccatgcagtaatgtgatccctcagaaaa

SEQ ID NO: 301073 - DNA, 33 bp, Homo sapien
cagatgtttgcactcacgaccacaaagcctctg

SEQ ID NO: 301074 - DNA, 33 bp, Homo sapien
cagatgtttgcactcaggaccacaaagcctctg

SEQ ID NO: 301075 - DNA, 33 bp, Homo sapien
cttaatatgttctggacatcaacttactcatct

SEQ ID NO: 301076 - DNA, 33 bp, Homo sapien
cttaatatgttctggatatcaacttactcatct

SEQ ID NO: 301077 - DNA, 33 bp, Homo sapien
tctgttctagttaaaaaacgtcagataaggaac

SEQ ID NO: 301078 - DNA, 33 bp, Homo sapien
tctgttctagttaaaacacgtcagataaggaac

SEQ ID NO: 301079 - DNA, 33 bp, Homo sapien
attttttccttcagggcatagagctgctcccat

SEQ ID NO: 301080 - DNA, 33 bp, Homo sapien
attttttccttcagggtatagagctgctcccat

SEQ ID NO: 301081 - DNA, 33 bp, Homo sapien
aaattggcagttcttcaatggttctttaccaag

SEQ ID NO: 301082 - DNA, 33 bp, Homo sapien
aaattggcagttcttccatggttctttaccaag

SEQ ID NO: 301083 - DNA, 33 bp, Homo sapien
gatgaacagtgggcaaaggagagggtttcttga

SEQ ID NO: 301084 - DNA, 33 bp, Homo sapien
gatgaacagtgggcaatggagagggtttcttga

SEQ ID NO: 301085 - DNA, 33 bp, Homo sapien
agtttgttgcacttccccactttggtgcctgac

SEQ ID NO: 301086 - DNA, 33 bp, Homo sapien
agtttgttgcacttcctcactttggtgcctgac

SEQ ID NO: 301087 - DNA, 33 bp, Homo sapien
cagttgataaacagtccaggtcttaaaattcaa

SEQ ID NO: 301088 - DNA, 33 bp, Homo sapien
cagttgataaacagtctaggtcttaaaattcaa

SEQ ID NO: 301089 - DNA, 33 bp, Homo sapien
tataattgcttcagccaatagaatgcagtggaa

SEQ ID NO: 301090 - DNA, 33 bp, Homo sapien
tataattgcttcagccgatagaatgcagtggaa

SEQ ID NO: 301091 - DNA, 33 bp, Homo sapien
cacagttatcccaggccctccacacaatagctc

SEQ ID NO: 301092 - DNA, 33 bp, Homo sapien
cacagttatcccaggcgctccacacaatagctc

SEQ ID NO: 301093 - DNA, 33 bp, Homo sapien
ttccataatgaccatacaacatttctggctaca

SEQ ID NO: 301094 - DNA, 33 bp, Homo sapien
ttccataatgaccatataacatttctggctaca

SEQ ID NO: 301095 - DNA, 33 bp, Homo sapien
taaaagtaaacaatcaatgaaagtgtctcatgg

SEQ ID NO: 301096 - DNA, 33 bp, Homo sapien
taaaagtaaacaatcagtgaaagtgtctcatgg

SEQ ID NO: 301097 - DNA, 33 bp, Homo sapien
ataaagatctgggaaaagctggaaagttggttt

SEQ ID NO: 301098 - DNA, 33 bp, Homo sapien
ataaagatctgggaaaggctggaaagttggttt

SEQ ID NO: 301099 - DNA, 33 bp, Homo sapien
tttaatgtatacaaagaaccttttgcactgaaa

SEQ ID NO: 301100 - DNA, 33 bp, Homo sapien
tttaatgtatacaaaggaccttttgcactgaaa

SEQ ID NO: 301101 - DNA, 33 bp, Homo sapien
tacaagcagggacactcactgtttttgttccag

SEQ ID NO: 301102 - DNA, 33 bp, Homo sapien
tacaagcagggacactgactgtttttgttccag

SEQ ID NO: 301103 - DNA, 33 bp, Homo sapien
ttcttttaaatctaagcctcagaagcagtggtt

SEQ ID NO: 301104 - DNA, 33 bp, Homo sapien
ttcttttaaatctaagtctcagaagcagtggtt

SEQ ID NO: 301105 - DNA, 33 bp, Homo sapien
ctcttggagtacagagcaaagaaaggcagataa

SEQ ID NO: 301106 - DNA, 33 bp, Homo sapien
ctcttggagtacagagtaaagaaaggcagataa

SEQ ID NO: 301107 - DNA, 33 bp, Homo sapien
aagctttattgagcttcaaacttgattttctca

SEQ ID NO: 301108 - DNA, 33 bp, Homo sapien
aagctttattgagcttgaaacttgattttctca

SEQ ID NO: 301109 - DNA, 33 bp, Homo sapien
agatggtattctaggcacatagatgtatctgta

SEQ ID NO: 301110 - DNA, 33 bp, Homo sapien
agatggtattctaggcgcatagatgtatctgta

SEQ ID NO: 301111 - DNA, 33 bp, Homo sapien
tgtcatactttgtcagccaataatattaccttc

SEQ ID NO: 301112 - DNA, 33 bp, Homo sapien
tgtcatactttgtcagtcaataatattaccttc

SEQ ID NO: 301113 - DNA, 33 bp, Homo sapien
cttccagaaccaagcacctaaacacatgatatc

SEQ ID NO: 301114 - DNA, 33 bp, Homo sapien
cttccagaaccaagcatctaaacacatgatatc

SEQ ID NO: 301115 - DNA, 33 bp, Homo sapien
tcagataagccccaaaatggatcatactactca

SEQ ID NO: 301116 - DNA, 33 bp, Homo sapien
tcagataagccccaaagtggatcatactactca

SEQ ID NO: 301117 - DNA, 33 bp, Homo sapien
ctcaagcaacaactgacgccctgtgtccaacta

SEQ ID NO: 301118 - DNA, 33 bp, Homo sapien
ctcaagcaacaactgatgccctgtgtccaacta

SEQ ID NO: 301119 - DNA, 33 bp, Homo sapien
attcacaattcagttcaattctaacggttcctg

SEQ ID NO: 301120 - DNA, 33 bp, Homo sapien
attcacaattcagttcgattctaacggttcctg

SEQ ID NO: 301121 - DNA, 33 bp, Homo sapien
tacaaagggaactcaacgtgagacaggtaattc

SEQ ID NO: 301122 - DNA, 33 bp, Homo sapien
tacaaagggaactcaatgtgagacaggtaattc

SEQ ID NO: 301123 - DNA, 33 bp, Homo sapien
tacaaaagtacaatggacatgaagcacgtaaga

SEQ ID NO: 301124 - DNA, 33 bp, Homo sapien
tacaaaagtacaatggccatgaagcacgtaaga

SEQ ID NO: 301125 - DNA, 33 bp, Homo sapien
tatgtgccttagtgagaaaaaggcaagtaatat

SEQ ID NO: 301126 - DNA, 33 bp, Homo sapien
tatgtgccttagtgaggaaaaggcaagtaatat

SEQ ID NO: 301127 - DNA, 33 bp, Homo sapien
cagttcagccacctacaggtaacactgttcatg

SEQ ID NO: 301128 - DNA, 33 bp, Homo sapien
cagttcagccacctaccggtaacactgttcatg

SEQ ID NO: 301129 - DNA, 33 bp, Homo sapien
agcctctggtgggcataatcttcctttacatgg

SEQ ID NO: 301130 - DNA, 33 bp, Homo sapien
agcctctggtgggcatgatcttcctttacatgg

SEQ ID NO: 301131 - DNA, 33 bp, Homo sapien
aaattatgagtcctcaatatagagatttcaaaa

SEQ ID NO: 301132 - DNA, 33 bp, Homo sapien
aaattatgagtcctcagtatagagatttcaaaa

SEQ ID NO: 301133 - DNA, 33 bp, Homo sapien
catagtgattacactacgtttttctaaccactt

SEQ ID NO: 301134 - DNA, 33 bp, Homo sapien
catagtgattacactatgtttttctaaccactt

SEQ ID NO: 301135 - DNA, 33 bp, Homo sapien
ccagaaaggcccagagacatatatccactttat

SEQ ID NO: 301136 - DNA, 33 bp, Homo sapien
ccagaaaggcccagaggcatatatccactttat

SEQ ID NO: 301137 - DNA, 33 bp, Homo sapien
tgcaccctagctaccactaccatcaccatcatc

SEQ ID NO: 301138 - DNA, 33 bp, Homo sapien
tgcaccctagctaccagtaccatcaccatcatc

SEQ ID NO: 301139 - DNA, 33 bp, Homo sapien
tatttgtactttggaaattcattatattttgaa

SEQ ID NO: 301140 - DNA, 33 bp, Homo sapien
tatttgtactttggaacttcattatattttgaa

SEQ ID NO: 301141 - DNA, 33 bp, Homo sapien
agtatgtgtgggaaaaccatttgaagcagaagg

SEQ ID NO: 301142 - DNA, 33 bp, Homo sapien
agtatgtgtgggaaaagcatttgaagcagaagg

SEQ ID NO: 301143 - DNA, 33 bp, Homo sapien
agtacaaaaatagtgaatacttagacgggatgt

SEQ ID NO: 301144 - DNA, 33 bp, Homo sapien
agtacaaaaatagtgactacttagacgggatgt

SEQ ID NO: 301145 - DNA, 33 bp, Homo sapien
tggagaggatacagtgaaggattcagaggtcgt

SEQ ID NO: 301146 - DNA, 33 bp, Homo sapien
tggagaggatacagtgtaggattcagaggtcgt

SEQ ID NO: 301147 - DNA, 33 bp, Homo sapien
ctcaggtcctaaaagcaccagtctatttagttc

SEQ ID NO: 301148 - DNA, 33 bp, Homo sapien
ctcaggtcctaaaagcgccagtctatttagttc

SEQ ID NO: 301149 - DNA, 33 bp, Homo sapien
ttgacttcctctttacggatttagatggcttta

SEQ ID NO: 301150 - DNA, 33 bp, Homo sapien
ttgacttcctctttactgatttagatggcttta

SEQ ID NO: 301151 - DNA, 33 bp, Homo sapien; identical to SEQ ID NO: 301149

SEQ ID NO: 301152 - DNA, 33 bp, Homo sapien; identical to SEQ ID NO: 301150

SEQ ID NO: 301153 - DNA, 33 bp, Homo sapien
tgggtgctgtgaaacgcattccattttaaaagg

SEQ ID NO: 301154 - DNA, 33 bp, Homo sapien
tgggtgctgtgaaacgtattccattttaaaagg

SEQ ID NO: 301155 - DNA, 33 bp, Homo sapien
tttcttggggaatactcaggtggcaggagcaat

SEQ ID NO: 301156 - DNA, 33 bp, Homo sapien
tttcttggggaatacttaggtggcaggagcaat

SEQ ID NO: 301157 - DNA, 33 bp, Homo sapien
gtaggctcaaccatgacatatgatgaaaatctg

SEQ ID NO: 301158 - DNA, 33 bp, Homo sapien
gtaggctcaaccatgatatatgatgaaaatctg

SEQ ID NO: 301159 - DNA, 33 bp, Homo sapien
tctgcctggtcctcatcaggctatcttccttct

SEQ ID NO: 301160 - DNA, 33 bp, Homo sapien
tctgcctggtcctcattaggctatcttccttct

SEQ ID NO: 301161 - DNA, 33 bp, Homo sapien
tttcaagtagttatcaaatttcagtggaccctt

SEQ ID NO: 301162 - DNA, 33 bp, Homo sapien
tttcaagtagttatcatatttcagtggaccctt

SEQ ID NO: 301163 - DNA, 33 bp, Homo sapien
tctgttgtattgatgaatcacattagtagaatg

SEQ ID NO: 301164 - DNA, 33 bp, Homo sapien
tctgttgtattgatgagtcacattagtagaatg

SEQ ID NO: 301165 - DNA, 33 bp, Homo sapien
atgctaatgaatttcaaagtgttttctgtgttc

SEQ ID NO: 301166 - DNA, 33 bp, Homo sapien
atgctaatgaatttcagagtgttttctgtgttc

SEQ ID NO: 301167 - DNA, 33 bp, Homo sapien
aaaacagcaagggacaaaagctcagttcattag

SEQ ID NO: 301168 - DNA, 33 bp, Homo sapien
aaaacagcaagggacagaagctcagttcattag

SEQ ID NO: 301169 - DNA, 33 bp, Homo sapien
gccccgcaaagtcctgaaagactgttattacgt

SEQ ID NO: 301170 - DNA, 33 bp, Homo sapien
gccccgcaaagtcctgcaagactgttattacgt

SEQ ID NO: 301171 - DNA, 33 bp, Homo sapien
gtgtatgaattcaagaatcttcacttatggtgt

SEQ ID NO: 301172 - DNA, 33 bp, Homo sapien
gtgtatgaattcaagagtcttcacttatggtgt

SEQ ID NO: 301173 - DNA, 33 bp, Homo sapien
gatgtcttcatcctaacgtacctcttatcttta

SEQ ID NO: 301174 - DNA, 33 bp, Homo sapien
gatgtcttcatcctaatgtacctcttatcttta

SEQ ID NO: 301175 - DNA, 33 bp, Homo sapien
ttacctgaaactaaagacttcactacttattgt

SEQ ID NO: 301176 - DNA, 33 bp, Homo sapien
ttacctgaaactaaaggcttcactacttattgt

SEQ ID NO: 301177 - DNA, 33 bp, Homo sapien
ttgtttttggtacacacagtaactctccttgat

SEQ ID NO: 301178 - DNA, 33 bp, Homo sapien
ttgtttttggtacacatagtaactctccttgat

SEQ ID NO: 301179 - DNA, 33 bp, Homo sapien
accacagaaacattccaaggaagaggccatgta

SEQ ID NO: 301180 - DNA, 33 bp, Homo sapien
accacagaaacattccgaggaagaggccatgta

SEQ ID NO: 301181 - DNA, 33 bp, Homo sapien
agaagttagacataaacggtgtgggaaagttcc

SEQ ID NO: 301182 - DNA, 33 bp, Homo sapien
agaagttagacataaatggtgtgggaaagttcc

SEQ ID NO: 301183 - DNA, 33 bp, Homo sapien
taggacagctgggaaacaggaagatgttctctc

SEQ ID NO: 301184 - DNA, 33 bp, Homo sapien
taggacagctgggaaagaggaagatgttctctc

SEQ ID NO: 301185 - DNA, 33 bp, Homo sapien
ttcccagtgaaataaaaaaaatcatcagttgag

SEQ ID NO: 301186 - DNA, 33 bp, Homo sapien
ttcccagtgaaataaacaaaatcatcagttgag

SEQ ID NO: 301187 - DNA, 33 bp, Homo sapien
ataccctacatcaaaactgtcagtaaattatat

SEQ ID NO: 301188 - DNA, 33 bp, Homo sapien
ataccctacatcaaaattgtcagtaaattatat

SEQ ID NO: 301189 - DNA, 33 bp, Homo sapien
tttcagatatttcagaagcaaggtgatcacagg

SEQ ID NO: 301190 - DNA, 33 bp, Homo sapien
tttcagatatttcagaggcaaggtgatcacagg

SEQ ID NO: 301191 - DNA, 33 bp, Homo sapien
gaattcagctggctaaaaaagaagaaagagaag

SEQ ID NO: 301192 - DNA, 33 bp, Homo sapien
gaattcagctggctaacaaagaagaaagagaag

SEQ ID NO: 301193 - DNA, 33 bp, Homo sapien
taagatgtctagacaaatactaggatctggtga

SEQ ID NO: 301194 - DNA, 33 bp, Homo sapien
taagatgtctagacaagtactaggatctggtga

SEQ ID NO: 301195 - DNA, 33 bp, Homo sapien
ttataaagtaagatgcactatttggtgggacaa

SEQ ID NO: 301196 - DNA, 33 bp, Homo sapien
ttataaagtaagatgctctatttggtgggacaa

SEQ ID NO: 301197 - DNA, 33 bp, Homo sapien
ggcagtgaatcctttcagaaacatacctctatt

SEQ ID NO: 301198 - DNA, 33 bp, Homo sapien
ggcagtgaatcctttcggaaacatacctctatt

SEQ ID NO: 301199 - DNA, 33 bp, Homo sapien
cgtgactttgagcaagcattgcaggagctctaa

SEQ ID NO: 301200 - DNA, 33 bp, Homo sapien
cgtgactttgagcaaggattgcaggagctctaa

SEQ ID NO: 301201 - DNA, 33 bp, Homo sapien
agacatagtaacaagacacctattgctatggtt

SEQ ID NO: 301202 - DNA, 33 bp, Homo sapien
agacatagtaacaagatacctattgctatggtt

SEQ ID NO: 301203 - DNA, 33 bp, Homo sapien
gcaagttgttcacttacgttattggcattttca

SEQ ID NO: 301204 - DNA, 33 bp, Homo sapien
gcaagttgttcacttatgttattggcattttca

SEQ ID NO: 301205 - DNA, 33 bp, Homo sapien
aaacagttcaacttcaagcacattgctaaatgc

SEQ ID NO: 301206 - DNA, 33 bp, Homo sapien
aaacagttcaacttcaggcacattgctaaatgc

SEQ ID NO: 301207 - DNA, 33 bp, Homo sapien
tgagaaagaggtgaaacgatcaaaagcacattg

SEQ ID NO: 301208 - DNA, 33 bp, Homo sapien
tgagaaagaggtgaaatgatcaaaagcacattg

SEQ ID NO: 301209 - DNA, 33 bp, Homo sapien
aatggagaaggtattaaaggtagactcgtaagt

SEQ ID NO: 301210 - DNA, 33 bp, Homo sapien
aatggagaaggtattagaggtagactcgtaagt

SEQ ID NO: 301211 - DNA, 33 bp, Homo sapien
catatatgcaataccacgaggccaaagaaaatg

SEQ ID NO: 301212 - DNA, 33 bp, Homo sapien
catatatgcaataccatgaggccaaagaaaatg

SEQ ID NO: 301213 - DNA, 33 bp, Homo sapien
tcactgcaccttcgaaactgatcttcccacctc

SEQ ID NO: 301214 - DNA, 33 bp, Homo sapien
tcactgcaccttcgaagctgatcttcccacctc

SEQ ID NO: 301215 - DNA, 33 bp, Homo sapien
attccattcatcttcacaaggtttgtgtgccta

SEQ ID NO: 301216 - DNA, 33 bp, Homo sapien
attccattcatcttcataaggtttgtgtgccta

SEQ ID NO: 301217 - DNA, 33 bp, Homo sapien
agagcctgtagataacactgtgccaactgcagg

SEQ ID NO: 301218 - DNA, 33 bp, Homo sapien
agagcctgtagataacgctgtgccaactgcagg

SEQ ID NO: 301219 - DNA, 33 bp, Homo sapien
aggcagtgagggtcgaatatttaaaaaagagta

SEQ ID NO: 301220 - DNA, 33 bp, Homo sapien
aggcagtgagggtcgagtatttaaaaaagagta

SEQ ID NO: 301221 - DNA, 33 bp, Homo sapien
atgatgataaatgacaatgggttagacaaacat

SEQ ID NO: 301222 - DNA, 33 bp, Homo sapien
atgatgataaatgacagtgggttagacaaacat

SEQ ID NO: 301223 - DNA, 33 bp, Homo sapien
gagtagaggaaggagcagaaatgttaactttag

SEQ ID NO: 301224 - DNA, 33 bp, Homo sapien
gagtagaggaaggagcggaaatgttaactttag

SEQ ID NO: 301225 - DNA, 33 bp, Homo sapien
gattctcttcttatggacatggatatttcaatc

SEQ ID NO: 301226 - DNA, 33 bp, Homo sapien
gattctcttcttatggtcatggatatttcaatc

SEQ ID NO: 301227 - DNA, 33 bp, Homo sapien
tagctagaaagcctaaaagaaatggataaatta

SEQ ID NO: 301228 - DNA, 33 bp, Homo sapien
tagctagaaagcctaacagaaatggataaatta

SEQ ID NO: 301229 - DNA, 33 bp, Homo sapien
cagcagggctggcttacaggagaataccattca

SEQ ID NO: 301230 - DNA, 33 bp, Homo sapien
cagcagggctggcttataggagaataccattca

SEQ ID NO: 301231 - DNA, 33 bp, Homo sapien
gaagttccaaagacaccgagatgttctgctgcc

SEQ ID NO: 301232 - DNA, 33 bp, Homo sapien
gaagttccaaagacactgagatgttctgctgcc

SEQ ID NO: 301233 - DNA, 33 bp, Homo sapien
atggctgatgaaactgaaattgaatgctgtaaa

SEQ ID NO: 301234 - DNA, 33 bp, Homo sapien
atggctgatgaaactgtaattgaatgctgtaaa

SEQ ID NO: 301235 - DNA, 33 bp, Homo sapien
tgttgtcttctccatcaccctatgtcacagcta

SEQ ID NO: 301236 - DNA, 33 bp, Homo sapien
tgttgtcttctccatcgccctatgtcacagcta

SEQ ID NO: 301237 - DNA, 33 bp, Homo sapien
tagtaatctccagtcacagctttaaatgccagt

SEQ ID NO: 301238 - DNA, 33 bp, Homo sapien
tagtaatctccagtcatagctttaaatgccagt

SEQ ID NO: 301239 - DNA, 33 bp, Homo sapien
gctatggcagtcatcaaatcattcctctattgt

SEQ ID NO: 301240 - DNA, 33 bp, Homo sapien
gctatggcagtcatcagatcattcctctattgt

SEQ ID NO: 301241 - DNA, 33 bp, Homo sapien
atcactttactaagtaactaccccatacaaggc

SEQ ID NO: 301242 - DNA, 33 bp, Homo sapien
atcactttactaagtacctaccccatacaaggc

SEQ ID NO: 301243 - DNA, 33 bp, Homo sapien
ctatggtctatgaagcacataagggttttaagg

SEQ ID NO: 301244 - DNA, 33 bp, Homo sapien
ctatggtctatgaagcgcataagggttttaagg

SEQ ID NO: 301245 - DNA, 33 bp, Homo sapien
caatctctctctgaaaaataccttcagacaaga

SEQ ID NO: 301246 - DNA, 33 bp, Homo sapien
caatctctctctgaaatataccttcagacaaga

SEQ ID NO: 301247 - DNA, 33 bp, Homo sapien
gtcggagaatgattaccgatcatttgccaatta

SEQ ID NO: 301248 - DNA, 33 bp, Homo sapien
gtcggagaatgattactgatcatttgccaatta

SEQ ID NO: 301249 - DNA, 33 bp, Homo sapien
cactaattgtgccttccaataaagtgtattatt

SEQ ID NO: 301250 - DNA, 33 bp, Homo sapien
cactaattgtgccttctaataaagtgtattatt

SEQ ID NO: 301251 - DNA, 33 bp, Homo sapien
tgtgttattgaaatcaaccaagttaaagcctag

SEQ ID NO: 301252 - DNA, 33 bp, Homo sapien
tgtgttattgaaatcagccaagttaaagcctag

SEQ ID NO: 301253 - DNA, 33 bp, Homo sapien
ccagaatcaaatgacaaaaaattagtagattcc

SEQ ID NO: 301254 - DNA, 33 bp, Homo sapien
ccagaatcaaatgacacaaaattagtagattcc

SEQ ID NO: 301255 - DNA, 33 bp, Homo sapien
gtttggaattctgagcagaggagtccaggatta

SEQ ID NO: 301256 - DNA, 33 bp, Homo sapien
gtttggaattctgagcggaggagtccaggatta

SEQ ID NO: 301257 - DNA, 33 bp, Homo sapien
gatatgcttaagttaccgctatcaggtgcatct

SEQ ID NO: 301258 - DNA, 33 bp, Homo sapien
gatatgcttaagttactgctatcaggtgcatct

SEQ ID NO: 301259 - DNA, 33 bp, Homo sapien
ctccccaacctagatacgttctgaaggcaatgt

SEQ ID NO: 301260 - DNA, 33 bp, Homo sapien
ctccccaacctagatatgttctgaaggcaatgt

SEQ ID NO: 301261 - DNA, 33 bp, Homo sapien
gtttggaggtaaaaaacggagaacatgatggaa

SEQ ID NO: 301262 - DNA, 33 bp, Homo sapien
gtttggaggtaaaaaatggagaacatgatggaa

SEQ ID NO: 301263 - DNA, 33 bp, Homo sapien
gtgtctcctcatgctaacctatgtccttttatc

SEQ ID NO: 301264 - DNA, 33 bp, Homo sapien
gtgtctcctcatgctagcctatgtccttttatc

SEQ ID NO: 301265 - DNA, 33 bp, Homo sapien
ttgtgaatattatatcaagttgccatagtttct

SEQ ID NO: 301266 - DNA, 33 bp, Homo sapien
ttgtgaatattatatctagttgccatagtttct

SEQ ID NO: 301267 - DNA, 33 bp, Homo sapien
gtgctagagggcctcacattggtaagcacatat

SEQ ID NO: 301268 - DNA, 33 bp, Homo sapien
gtgctagagggcctcatattggtaagcacatat

SEQ ID NO: 301269 - DNA, 33 bp, Homo sapien
ttcggattataataccaaacttctctaccacat

SEQ ID NO: 301270 - DNA, 33 bp, Homo sapien
ttcggattataataccgaacttctctaccacat

SEQ ID NO: 301271 - DNA, 33 bp, Homo sapien
tcaatagtggattcaaccagaaaattatttcac

SEQ ID NO: 301272 - DNA, 33 bp, Homo sapien
tcaatagtggattcaatcagaaaattatttcac

SEQ ID NO: 301273 - DNA, 33 bp, Homo sapien
gtacaccatatcaccaatgaagtgttcttgtca

SEQ ID NO: 301274 - DNA, 33 bp, Homo sapien
gtacaccatatcaccagtgaagtgttcttgtca

SEQ ID NO: 301275 - DNA, 33 bp, Homo sapien
gcaatttatttgttgacgaaaattgagtcattt

SEQ ID NO: 301276 - DNA, 33 bp, Homo sapien
gcaatttatttgttgatgaaaattgagtcattt

SEQ ID NO: 301277 - DNA, 33 bp, Homo sapien
gaaaatcatacatatacgccaaccttccttgtt

SEQ ID NO: 301278 - DNA, 33 bp, Homo sapien
gaaaatcatacatatatgccaaccttccttgtt

SEQ ID NO: 301279 - DNA, 33 bp, Homo sapien
tacataaacaggctgccattctttgatcacatt

SEQ ID NO: 301280 - DNA, 33 bp, Homo sapien
tacataaacaggctgctattctttgatcacatt

SEQ ID NO: 301281 - DNA, 33 bp, Homo sapien
tatgtctctgtctgcacgagttaggaagcatgt

SEQ ID NO: 301282 - DNA, 33 bp, Homo sapien
tatgtctctgtctgcatgagttaggaagcatgt

SEQ ID NO: 301283 - DNA, 33 bp, Homo sapien
tgcttgacaaattacaactctgaattcttgatc

SEQ ID NO: 301284 - DNA, 33 bp, Homo sapien
tgcttgacaaattacagctctgaattcttgatc

SEQ ID NO: 301285 - DNA, 33 bp, Homo sapien
caataggggcttcatcaacatttagcttaattt

SEQ ID NO: 301286 - DNA, 33 bp, Homo sapien
caataggggcttcatcgacatttagcttaattt

SEQ ID NO: 301287 - DNA, 33 bp, Homo sapien
gtacatgcaaatacagcctaagcccatctccct

SEQ ID NO: 301288 - DNA, 33 bp, Homo sapien
gtacatgcaaatacagtctaagcccatctccct

SEQ ID NO: 301289 - DNA, 33 bp, Homo sapien
ttgcatgtactatacaaaaggtggagcacatgc

SEQ ID NO: 301290 - DNA, 33 bp, Homo sapien
ttgcatgtactatacagaaggtggagcacatgc

SEQ ID NO: 301291 - DNA, 33 bp, Homo sapien
atgatgaacctttctcaatcactgttaagtcct

SEQ ID NO: 301292 - DNA, 33 bp, Homo sapien
atgatgaacctttctcgatcactgttaagtcct

SEQ ID NO: 301293 - DNA, 33 bp, Homo sapien
gtaaacatctgtctccaagggaagagtcacgaa

SEQ ID NO: 301294 - DNA, 33 bp, Homo sapien
gtaaacatctgtctccgagggaagagtcacgaa

SEQ ID NO: 301295 - DNA, 33 bp, Homo sapien
tggaccaaatagatacaatgttcacacactaat

SEQ ID NO: 301296 - DNA, 33 bp, Homo sapien
tggaccaaatagatacgatgttcacacactaat

SEQ ID NO: 301297 - DNA, 33 bp, Homo sapien
gacttgctttggccaacgagatgttagcagaca

SEQ ID NO: 301298 - DNA, 33 bp, Homo sapien
gacttgctttggccaatgagatgttagcagaca

SEQ ID NO: 301299 - DNA, 33 bp, Homo sapien
attaaaattagttgaagcagttttcctgctaat

SEQ ID NO: 301300 - DNA, 33 bp, Homo sapien
attaaaattagttgaatcagttttcctgctaat

SEQ ID NO: 301301 - DNA, 33 bp, Homo sapien
ggctttcttcagatgcaacatcttaaaactggc

SEQ ID NO: 301302 - DNA, 33 bp, Homo sapien
ggctttcttcagatgcgacatcttaaaactggc

SEQ ID NO: 301303 - DNA, 33 bp, Homo sapien
gtagccgaaaatgtccactgcctggcagcaagg

SEQ ID NO: 301304 - DNA, 33 bp, Homo sapien
gtagccgaaaatgtccgctgcctggcagcaagg

SEQ ID NO: 301305 - DNA, 33 bp, Homo sapien
cagagctggtatgtgaaagacaggtggcagcca

SEQ ID NO: 301306 - DNA, 33 bp, Homo sapien
cagagctggtatgtgagagacaggtggcagcca

SEQ ID NO: 301307 - DNA, 33 bp, Homo sapien
aattgtatggtaaatgaaattatgtgggtcaga

SEQ ID NO: 301308 - DNA, 33 bp, Homo sapien
aattgtatggtaaatgtaattatgtgggtcaga

SEQ ID NO: 301309 - DNA, 33 bp, Homo sapien
aatgttcctaagcagaaggaatgagtaaaacca

SEQ ID NO: 301310 - DNA, 33 bp, Homo sapien
aatgttcctaagcagagggaatgagtaaaacca

SEQ ID NO: 301311 - DNA, 33 bp, Homo sapien
agaatagaagggtatgaaaagagggaagtcaga

SEQ ID NO: 301312 - DNA, 33 bp, Homo sapien
agaatagaagggtatggaaagagggaagtcaga

SEQ ID NO: 301313 - DNA, 33 bp, Homo sapien
ctgttgtggtatttgccatctaaagttccttaa

SEQ ID NO: 301314 - DNA, 33 bp, Homo sapien
ctgttgtggtatttgctatctaaagttccttaa

SEQ ID NO: 301315 - DNA, 33 bp, Homo sapien
acctactttggattcacagtggtcaagcagcta

SEQ ID NO: 301316 - DNA, 33 bp, Homo sapien
acctactttggattcatagtggtcaagcagcta

SEQ ID NO: 301317 - DNA, 33 bp, Homo sapien
ttcaggggagaaggacaagaggaagatgagaat

SEQ ID NO: 301318 - DNA, 33 bp, Homo sapien
ttcaggggagaaggacgagaggaagatgagaat

SEQ ID NO: 301319 - DNA, 33 bp, Homo sapien
tggtgccaggaatgcacagaccaaagaaaggta

SEQ ID NO: 301320 - DNA, 33 bp, Homo sapien
tggtgccaggaatgcagagaccaaagaaaggta

SEQ ID NO: 301321 - DNA, 33 bp, Homo sapien
acaaccaggaataccactggggatgaagaaaca

SEQ ID NO: 301322 - DNA, 33 bp, Homo sapien
acaaccaggaataccattggggatgaagaaaca

SEQ ID NO: 301323 - DNA, 33 bp, Homo sapien
tgtaatgctttgcacaatgctgttcacctccat

SEQ ID NO: 301324 - DNA, 33 bp, Homo sapien
tgtaatgctttgcacagtgctgttcacctccat

SEQ ID NO: 301325 - DNA, 33 bp, Homo sapien
atactgactatgtaccaggcaagttccaaatac

SEQ ID NO: 301326 - DNA, 33 bp, Homo sapien
atactgactatgtaccgggcaagttccaaatac

SEQ ID NO: 301327 - DNA, 33 bp, Homo sapien
tccattctggtgtactaaaacaaaccattgata

SEQ ID NO: 301328 - DNA, 33 bp, Homo sapien
tccattctggtgtactgaaacaaaccattgata

SEQ ID NO: 301329 - DNA, 33 bp, Homo sapien
tagacctcaagaaagacacacctaggtagagtc

SEQ ID NO: 301330 - DNA, 33 bp, Homo sapien
tagacctcaagaaagagacacctaggtagagtc

SEQ ID NO: 301331 - DNA, 33 bp, Homo sapien
aaccatatcaatgcagacccttttacgttatta

SEQ ID NO: 301332 - DNA, 33 bp, Homo sapien
aaccatatcaatgcagtcccttttacgttatta

SEQ ID NO: 301333 - DNA, 33 bp, Homo sapien
agctcaagagaaagagaattatgtagaattagc

SEQ ID NO: 301334 - DNA, 33 bp, Homo sapien
agctcaagagaaagaggattatgtagaattagc

SEQ ID NO: 301335 - DNA, 33 bp, Homo sapien
atattggacattctacaccagtaagctccacct

SEQ ID NO: 301336 - DNA, 33 bp, Homo sapien
atattggacattctacgccagtaagctccacct

SEQ ID NO: 301337 - DNA, 33 bp, Homo sapien
accttctcctcccccacatggccagttcttgga

SEQ ID NO: 301338 - DNA, 33 bp, Homo sapien
accttctcctcccccagatggccagttcttgga

SEQ ID NO: 301339 - DNA, 33 bp, Homo sapien
gctgttgagcacttgaaatttcccttttccaaa

SEQ ID NO: 301340 - DNA, 33 bp, Homo sapien
gctgttgagcacttgagatttcccttttccaaa

SEQ ID NO: 301341 - DNA, 33 bp, Homo sapien
tatagatacttcataaacctcaatataaatact

SEQ ID NO: 301342 - DNA, 33 bp, Homo sapien
tatagatacttcataagcctcaatataaatact

SEQ ID NO: 301343 - DNA, 33 bp, Homo sapien
aaaaacactcctggtcccaagcattttggataa

SEQ ID NO: 301344 - DNA, 33 bp, Homo sapien
aaaaacactcctggtcgcaagcattttggataa

SEQ ID NO: 301345 - DNA, 33 bp, Homo sapien
actgttgactttgcacacaatttgaaagcatca

SEQ ID NO: 301346 - DNA, 33 bp, Homo sapien
actgttgactttgcacgcaatttgaaagcatca

SEQ ID NO: 301347 - DNA, 33 bp, Homo sapien
agagtcagtggagacaccaacaaaattgaaaaa

SEQ ID NO: 301348 - DNA, 33 bp, Homo sapien
agagtcagtggagacagcaacaaaattgaaaaa

SEQ ID NO: 301349 - DNA, 33 bp, Homo sapien
tagaagtagttccagaaattcacagtaaggagt

SEQ ID NO: 301350 - DNA, 33 bp, Homo sapien
tagaagtagttccagacattcacagtaaggagt

SEQ ID NO: 301351 - DNA, 33 bp, Homo sapien
tgctgaatttcgaaaccaagaacggggtgtata

SEQ ID NO: 301352 - DNA, 33 bp, Homo sapien
tgctgaatttcgaaactaagaacggggtgtata

SEQ ID NO: 301353 - DNA, 33 bp, Homo sapien
taaactaactttcaggccctctgatccagctaa

SEQ ID NO: 301354 - DNA, 33 bp, Homo sapien
taaactaactttcaggtcctctgatccagctaa

SEQ ID NO: 301355 - DNA, 33 bp, Homo sapien
cctccctctattccatcagtggatgcccttagt

SEQ ID NO: 301356 - DNA, 33 bp, Homo sapien
cctccctctattccatgagtggatgcccttagt

SEQ ID NO: 301357 - DNA, 33 bp, Homo sapien
tagatgattttgtttaaccagcaaagtctcata

SEQ ID NO: 301358 - DNA, 33 bp, Homo sapien
tagatgattttgtttagccagcaaagtctcata

SEQ ID NO: 301359 - DNA, 33 bp, Homo sapien
ttaatggttaaaccaacttgggcagaaacactg

SEQ ID NO: 301360 - DNA, 33 bp, Homo sapien
ttaatggttaaaccaatttgggcagaaacactg

SEQ ID NO: 301361 - DNA, 33 bp, Homo sapien
agttaggagaccatcacattcggcaagaggact

SEQ ID NO: 301362 - DNA, 33 bp, Homo sapien
agttaggagaccatcagattcggcaagaggact

SEQ ID NO: 301363 - DNA, 33 bp, Homo sapien
gtcaggattaatctcaactgggctactgtaccc

SEQ ID NO: 301364 - DNA, 33 bp, Homo sapien
gtcaggattaatctcagctgggctactgtaccc

SEQ ID NO: 301365 - DNA, 33 bp, Homo sapien
gccattcggagcaaccagaactaacaggactca

SEQ ID NO: 301366 - DNA, 33 bp, Homo sapien
gccattcggagcaaccggaactaacaggactca

SEQ ID NO: 301367 - DNA, 33 bp, Homo sapien
cacaaacagttggaaacttaaaaacaatatcat

SEQ ID NO: 301368 - DNA, 33 bp, Homo sapien
cacaaacagttggaaatttaaaaacaatatcat

SEQ ID NO: 301369 - DNA, 33 bp, Homo sapien
tatgctggcaaatgtagcatagaggacgttcct

SEQ ID NO: 301370 - DNA, 33 bp, Homo sapien
tatgctggcaaatgtatcatagaggacgttcct

SEQ ID NO: 301371 - DNA, 33 bp, Homo sapien
tatacagacttcaagaaaaaccactgacccagg

SEQ ID NO: 301372 - DNA, 33 bp, Homo sapien
tatacagacttcaagacaaaccactgacccagg

SEQ ID NO: 301373 - DNA, 33 bp, Homo sapien
aacacttcccggtaacacagagctaaatggtcc

SEQ ID NO: 301374 - DNA, 33 bp, Homo sapien
aacacttcccggtaacgcagagctaaatggtcc

SEQ ID NO: 301375 - DNA, 33 bp, Homo sapien
aaacttggacccaccacagatgtcacatctgac

SEQ ID NO: 301376 - DNA, 33 bp, Homo sapien
aaacttggacccaccagagatgtcacatctgac

SEQ ID NO: 301377 - DNA, 33 bp, Homo sapien
tgtttttcaaaattatgaattcaatacaagctc

SEQ ID NO: 301378 - DNA, 33 bp, Homo sapien
tgtttttcaaaattattaattcaatacaagctc

SEQ ID NO: 301379 - DNA, 33 bp, Homo sapien
aatggagtttatagctcaccattatctttggct

SEQ ID NO: 301380 - DNA, 33 bp, Homo sapien
aatggagtttatagcttaccattatctttggct

SEQ ID NO: 301381 - DNA, 33 bp, Homo sapien
ctttccttcatctttaccctttccttcatcctt

SEQ ID NO: 301382 - DNA, 33 bp, Homo sapien
ctttccttcatctttatcctttccttcatcctt

SEQ ID NO: 301383 - DNA, 33 bp, Homo sapien
tcagtgactctttcccacatagcatatgaacat

SEQ ID NO: 301384 - DNA, 33 bp, Homo sapien
tcagtgactctttcccgcatagcatatgaacat

SEQ ID NO: 301385 - DNA, 33 bp, Homo sapien
ttaagtcaatttagcaaaatctctcaccctcaa

SEQ ID NO: 301386 - DNA, 33 bp, Homo sapien
ttaagtcaatttagcagaatctctcaccctcaa

SEQ ID NO: 301387 - DNA, 33 bp, Homo sapien
gtgctggccaggagtacatggaagttctggtgg

SEQ ID NO: 301388 - DNA, 33 bp, Homo sapien
gtgctggccaggagtatatggaagttctggtgg

SEQ ID NO: 301389 - DNA, 33 bp, Homo sapien
ggacagtggaatgcccaactagttaaagagtat

SEQ ID NO: 301390 - DNA, 33 bp, Homo sapien
ggacagtggaatgcccgactagttaaagagtat

SEQ ID NO: 301391 - DNA, 33 bp, Homo sapien
cagggcctgatgttaccgagttcaacaaatatt

SEQ ID NO: 301392 - DNA, 33 bp, Homo sapien
cagggcctgatgttactgagttcaacaaatatt

SEQ ID NO: 301393 - DNA, 33 bp, Homo sapien
ccaccatgtccagtggaacttcctgcagtaatg

SEQ ID NO: 301394 - DNA, 33 bp, Homo sapien
ccaccatgtccagtgggacttcctgcagtaatg

SEQ ID NO: 301395 - DNA, 33 bp, Homo sapien
tgtgggatgagttggcaccttagagatgttgcc

SEQ ID NO: 301396 - DNA, 33 bp, Homo sapien
tgtgggatgagttggcgccttagagatgttgcc

SEQ ID NO: 301397 - DNA, 33 bp, Homo sapien
tgatttggccattccccaatatatcaaaacatc

SEQ ID NO: 301398 - DNA, 33 bp, Homo sapien
tgatttggccattccctaatatatcaaaacatc

SEQ ID NO: 301399 - DNA, 33 bp, Homo sapien
catctgctggtgcctcaatcttcgacttcccag

SEQ ID NO: 301400 - DNA, 33 bp, Homo sapien
catctgctggtgcctcgatcttcgacttcccag

SEQ ID NO: 301401 - DNA, 33 bp, Homo sapien
gaaatgaaagggttccaacaatttggtagcttc

SEQ ID NO: 301402 - DNA, 33 bp, Homo sapien
gaaatgaaagggttccgacaatttggtagcttc

SEQ ID NO: 301403 - DNA, 33 bp, Homo sapien
tttgcaaaggtgtagacagaatacagatacagc

SEQ ID NO: 301404 - DNA, 33 bp, Homo sapien
tttgcaaaggtgtagatagaatacagatacagc

SEQ ID NO: 301405 - DNA, 33 bp, Homo sapien
tgatagggaacggaaactcactactcagagata

SEQ ID NO: 301406 - DNA, 33 bp, Homo sapien
tgatagggaacggaaattcactactcagagata

SEQ ID NO: 301407 - DNA, 33 bp, Homo sapien
aaagactggtaaatacaagtttcagaagaatta

SEQ ID NO: 301408 - DNA, 33 bp, Homo sapien
aaagactggtaaatacgagtttcagaagaatta

SEQ ID NO: 301409 - DNA, 33 bp, Homo sapien
gtctgtaaccttctcgacatacccagctactat

SEQ ID NO: 301410 - DNA, 33 bp, Homo sapien
gtctgtaaccttctcggcatacccagctactat

SEQ ID NO: 301411 - DNA, 33 bp, Homo sapien
ccaccgaaatcacaatcaaccagagtatagcgg

SEQ ID NO: 301412 - DNA, 33 bp, Homo sapien
ccaccgaaatcacaatgaaccagagtatagcgg

SEQ ID NO: 301413 - DNA, 33 bp, Homo sapien
gcatatggagtggcaacgaactacagacacata

SEQ ID NO: 301414 - DNA, 33 bp, Homo sapien
gcatatggagtggcaaggaactacagacacata

SEQ ID NO: 301415 - DNA, 33 bp, Homo sapien
tttagatgattccacaaatgagttaaatgctcc

SEQ ID NO: 301416 - DNA, 33 bp, Homo sapien
tttagatgattccacagatgagttaaatgctcc

SEQ ID NO: 301417 - DNA, 33 bp, Homo sapien
cactctgtatccttgaaaatataagaaacagaa

SEQ ID NO: 301418 - DNA, 33 bp, Homo sapien
cactctgtatccttgacaatataagaaacagaa

SEQ ID NO: 301419 - DNA, 33 bp, Homo sapien
agaagtacacagaatacacctggcagtgtttcc

SEQ ID NO: 301420 - DNA, 33 bp, Homo sapien
agaagtacacagaatatacctggcagtgtttcc

SEQ ID NO: 301421 - DNA, 33 bp, Homo sapien
aatgagatattggcaacgagaaaggagactatt

SEQ ID NO: 301422 - DNA, 33 bp, Homo sapien
aatgagatattggcaatgagaaaggagactatt

SEQ ID NO: 301423 - DNA, 33 bp, Homo sapien
aaaaaccggtgaattcccactattatttaagcc

SEQ ID NO: 301424 - DNA, 33 bp, Homo sapien
aaaaaccggtgaattctcactattatttaagcc

SEQ ID NO: 301425 - DNA, 33 bp, Homo sapien
aaattcctcatttgcaacctgttttcactcttt

SEQ ID NO: 301426 - DNA, 33 bp, Homo sapien
aaattcctcatttgcagcctgttttcactcttt

SEQ ID NO: 301427 - DNA, 33 bp, Homo sapien
ttacaatgaggcaaaaatggcaacaccaccagc

SEQ ID NO: 301428 - DNA, 33 bp, Homo sapien
ttacaatgaggcaaaagtggcaacaccaccagc

SEQ ID NO: 301429 - DNA, 33 bp, Homo sapien
tcttcctaattatataccatcatgacaatttgt

SEQ ID NO: 301430 - DNA, 33 bp, Homo sapien
tcttcctaattatatagcatcatgacaatttgt

SEQ ID NO: 301431 - DNA, 33 bp, Homo sapien
ctttccccagtggttcaatttgtgctcctgcct

SEQ ID NO: 301432 - DNA, 33 bp, Homo sapien
ctttccccagtggttccatttgtgctcctgcct

SEQ ID NO: 301433 - DNA, 33 bp, Homo sapien
cccagccactataaaactctaatgtgaaagttc

SEQ ID NO: 301434 - DNA, 33 bp, Homo sapien
cccagccactataaaagtctaatgtgaaagttc

SEQ ID NO: 301435 - DNA, 33 bp, Homo sapien
aatggatatattttcacggttctcctggatata

SEQ ID NO: 301436 - DNA, 33 bp, Homo sapien
aatggatatattttcatggttctcctggatata

SEQ ID NO: 301437 - DNA, 33 bp, Homo sapien
ctcctataaagaacaaggaccttacctgcatca

SEQ ID NO: 301438 - DNA, 33 bp, Homo sapien
ctcctataaagaacaatgaccttacctgcatca

SEQ ID NO: 301439 - DNA, 33 bp, Homo sapien
aggacagtaggtattcaataaacttgtgtcttt

SEQ ID NO: 301440 - DNA, 33 bp, Homo sapien
aggacagtaggtattcgataaacttgtgtcttt

SEQ ID NO: 301441 - DNA, 33 bp, Homo sapien
ttatagataggtattaaaactgaatgctgagta

SEQ ID NO: 301442 - DNA, 33 bp, Homo sapien
ttatagataggtattagaactgaatgctgagta

SEQ ID NO: 301443 - DNA, 33 bp, Homo sapien
tagtgtatacttgggactccatgtctttcgaaa

SEQ ID NO: 301444 - DNA, 33 bp, Homo sapien
tagtgtatacttgggattccatgtctttcgaaa

SEQ ID NO: 301445 - DNA, 33 bp, Homo sapien
atgttaataggttgtcaccaagtccttttgctt

SEQ ID NO: 301446 - DNA, 33 bp, Homo sapien
atgttaataggttgtcgccaagtccttttgctt

SEQ ID NO: 301447 - DNA, 33 bp, Homo sapien
attaggaaaattaagacaagtccactcactaag

SEQ ID NO: 301448 - DNA, 33 bp, Homo sapien
attaggaaaattaagataagtccactcactaag

SEQ ID NO: 301449 - DNA, 33 bp, Homo sapien
atggaggctttagttacaatatgagagagcagc

SEQ ID NO: 301450 - DNA, 33 bp, Homo sapien
atggaggctttagttagaatatgagagagcagc

SEQ ID NO: 301451 - DNA, 33 bp, Homo sapien
atatgaaattaatacaatgctttatgtgtttga

SEQ ID NO: 301452 - DNA, 33 bp, Homo sapien
atatgaaattaatacattgctttatgtgtttga

SEQ ID NO: 301453 - DNA, 33 bp, Homo sapien
aaacccagaaacacaaagtagaatagtggttgc

SEQ ID NO: 301454 - DNA, 33 bp, Homo sapien
aaacccagaaacacaaggtagaatagtggttgc

SEQ ID NO: 301455 - DNA, 33 bp, Homo sapien
attgttcagctatcaccgcaatctaagtttaga

SEQ ID NO: 301456 - DNA, 33 bp, Homo sapien
attgttcagctatcactgcaatctaagtttaga

SEQ ID NO: 301457 - DNA, 33 bp, Homo sapien
atacctatatcacactaaagagtaattggcaaa

SEQ ID NO: 301458 - DNA, 33 bp, Homo sapien
atacctatatcacactgaagagtaattggcaaa

SEQ ID NO: 301459 - DNA, 33 bp, Homo sapien
aagctcacttgaacccaatgtggaactctgcag

SEQ ID NO: 301460 - DNA, 33 bp, Homo sapien
aagctcacttgaacccgatgtggaactctgcag

SEQ ID NO: 301461 - DNA, 33 bp, Homo sapien
aggaaaagaacaattacaaggaccatgaaattg

SEQ ID NO: 301462 - DNA, 33 bp, Homo sapien
aggaaaagaacaattataaggaccatgaaattg

SEQ ID NO: 301463 - DNA, 33 bp, Homo sapien
aggcatgcagaaaaacaagtaggacctatacac

SEQ ID NO: 301464 - DNA, 33 bp, Homo sapien
aggcatgcagaaaaaccagtaggacctatacac

SEQ ID NO: 301465 - DNA, 33 bp, Homo sapien
ggatgtgcttttgaccaatatataatgctgttt

SEQ ID NO: 301466 - DNA, 33 bp, Homo sapien
ggatgtgcttttgacctatatataatgctgttt

SEQ ID NO: 301467 - DNA, 33 bp, Homo sapien
acagaaacaaaaagcacagattgaatcagttac

SEQ ID NO: 301468 - DNA, 33 bp, Homo sapien
acagaaacaaaaagcatagattgaatcagttac

SEQ ID NO: 301469 - DNA, 33 bp, Homo sapien
caagtggtgtgggccacgcaatactagatgaag

SEQ ID NO: 301470 - DNA, 33 bp, Homo sapien
caagtggtgtgggccatgcaatactagatgaag

SEQ ID NO: 301471 - DNA, 33 bp, Homo sapien
tgttattttgaatttcacaataaagtgtagcaa

SEQ ID NO: 301472 - DNA, 33 bp, Homo sapien
tgttattttgaatttcgcaataaagtgtagcaa

SEQ ID NO: 301473 - DNA, 33 bp, Homo sapien
aggggagcagaattcaagacttcactctacatc

SEQ ID NO: 301474 - DNA, 33 bp, Homo sapien
aggggagcagaattcaggacttcactctacatc

SEQ ID NO: 301475 - DNA, 33 bp, Homo sapien
ggtggttatcttacagcaattctacacactaag

SEQ ID NO: 301476 - DNA, 33 bp, Homo sapien
ggtggttatcttacaggaattctacacactaag

SEQ ID NO: 301477 - DNA, 33 bp, Homo sapien
cagaacctagaacttacgcatgtcattttaaag

SEQ ID NO: 301478 - DNA, 33 bp, Homo sapien
cagaacctagaacttaggcatgtcattttaaag

SEQ ID NO: 301479 - DNA, 33 bp, Homo sapien
aacacttttccatcataagtattttaacaccat

SEQ ID NO: 301480 - DNA, 33 bp, Homo sapien
aacacttttccatcatgagtattttaacaccat

SEQ ID NO: 301481 - DNA, 33 bp, Homo sapien
gtgaagccactgtggaacgaacgagaaccacaa

SEQ ID NO: 301482 - DNA, 33 bp, Homo sapien
gtgaagccactgtggagcgaacgagaaccacaa

SEQ ID NO: 301483 - DNA, 33 bp, Homo sapien
atgctaaagaattgcaacaaggtaaaccatatc

SEQ ID NO: 301484 - DNA, 33 bp, Homo sapien
atgctaaagaattgcagcaaggtaaaccatatc

SEQ ID NO: 301485 - DNA, 33 bp, Homo sapien
catcattacacacttacgctcttcaaaatacgt

SEQ ID NO: 301486 - DNA, 33 bp, Homo sapien
catcattacacacttatgctcttcaaaatacgt

SEQ ID NO: 301487 - DNA, 33 bp, Homo sapien
acaggctagaaagctacgaacctgttattgaaa

SEQ ID NO: 301488 - DNA, 33 bp, Homo sapien
acaggctagaaagctatgaacctgttattgaaa

SEQ ID NO: 301489 - DNA, 33 bp, Homo sapien
ctagcagagacttagccgaacagtgtgtaaagg

SEQ ID NO: 301490 - DNA, 33 bp, Homo sapien
ctagcagagacttagctgaacagtgtgtaaagg

SEQ ID NO: 301491 - DNA, 33 bp, Homo sapien
tactcaaaattctgccaatgacaaaaactaatg

SEQ ID NO: 301492 - DNA, 33 bp, Homo sapien
tactcaaaattctgccgatgacaaaaactaatg

SEQ ID NO: 301493 - DNA, 33 bp, Homo sapien
cactctaggtaccaacaaaacttagtttcccac

SEQ ID NO: 301494 - DNA, 33 bp, Homo sapien
cactctaggtaccaaccaaacttagtttcccac

SEQ ID NO: 301495 - DNA, 33 bp, Homo sapien
acctaatggactgtgaagaaatttaaaaatgtc

SEQ ID NO: 301496 - DNA, 33 bp, Homo sapien
acctaatggactgtgacgaaatttaaaaatgtc

SEQ ID NO: 301497 - DNA, 33 bp, Homo sapien
gttgaagggtattacacgttacctaatggactg

SEQ ID NO: 301498 - DNA, 33 bp, Homo sapien
gttgaagggtattacatgttacctaatggactg

SEQ ID NO: 301499 - DNA, 33 bp, Homo sapien
agttattcaagggctacagcacaaatcaagttc

SEQ ID NO: 301500 - DNA, 33 bp, Homo sapien
agttattcaagggctatagcacaaatcaagttc

SEQ ID NO: 301501 - DNA, 33 bp, Homo sapien
taacacaagtggttaaacaaacagaaggactgt

SEQ ID NO: 301502 - DNA, 33 bp, Homo sapien
taacacaagtggttaagcaaacagaaggactgt

SEQ ID NO: 301503 - DNA, 33 bp, Homo sapien
agtggcacaatctcaacacactacaacctccac

SEQ ID NO: 301504 - DNA, 33 bp, Homo sapien
agtggcacaatctcaatacactacaacctccac

SEQ ID NO: 301505 - DNA, 33 bp, Homo sapien
aatgagatacgctaaacaggttatcaagaaaaa

SEQ ID NO: 301506 - DNA, 33 bp, Homo sapien
aatgagatacgctaaataggttatcaagaaaaa

SEQ ID NO: 301507 - DNA, 33 bp, Homo sapien
aaatgtttgccacaaaggaaaatgaacaaaatt

SEQ ID NO: 301508 - DNA, 33 bp, Homo sapien
aaatgtttgccacaaatgaaaatgaacaaaatt

SEQ ID NO: 301509 - DNA, 33 bp, Homo sapien
ttcctcgtttgtaacactactgcatctctcagg

SEQ ID NO: 301510 - DNA, 33 bp, Homo sapien
ttcctcgtttgtaacagtactgcatctctcagg

SEQ ID NO: 301511 - DNA, 33 bp, Homo sapien
cccaaaagtggatagaaaggaatgccattcata

SEQ ID NO: 301512 - DNA, 33 bp, Homo sapien
cccaaaagtggatagagaggaatgccattcata

SEQ ID NO: 301513 - DNA, 33 bp, Homo sapien
ctctctctcacctaacaaataggagctcatttt

SEQ ID NO: 301514 - DNA, 33 bp, Homo sapien
ctctctctcacctaacgaataggagctcatttt

SEQ ID NO: 301515 - DNA, 33 bp, Homo sapien
aatatggtaattcagaaggggaaagctaactgg

SEQ ID NO: 301516 - DNA, 33 bp, Homo sapien
aatatggtaattcagagggggaaagctaactgg

SEQ ID NO: 301517 - DNA, 33 bp, Homo sapien
ctgggatcttgccaggccacttctttataaata

SEQ ID NO: 301518 - DNA, 33 bp, Homo sapien
ctgggatcttgccaggtcacttctttataaata

SEQ ID NO: 301519 - DNA, 33 bp, Homo sapien
atactgtaatcaaccacgaaaggcacatttgat

SEQ ID NO: 301520 - DNA, 33 bp, Homo sapien
atactgtaatcaaccatgaaaggcacatttgat

SEQ ID NO: 301521 - DNA, 33 bp, Homo sapien
acaggctgggctctagaatcagctcctccacta

SEQ ID NO: 301522 - DNA, 33 bp, Homo sapien
acaggctgggctctagtatcagctcctccacta

SEQ ID NO: 301523 - DNA, 33 bp, Homo sapien
ttgtagtagtcaccttaaaaagccttttacttt

SEQ ID NO: 301524 - DNA, 33 bp, Homo sapien
ttgtagtagtcacctttaaaagccttttacttt

SEQ ID NO: 301525 - DNA, 33 bp, Homo sapien
acaaatcagtatctcaatctaactcttactggc

SEQ ID NO: 301526 - DNA, 33 bp, Homo sapien
acaaatcagtatctcagtctaactcttactggc

SEQ ID NO: 301527 - DNA, 33 bp, Homo sapien
gttctttgtcatagcaacctcacgtcaaagcat

SEQ ID NO: 301528 - DNA, 33 bp, Homo sapien
gttctttgtcatagcagcctcacgtcaaagcat

SEQ ID NO: 301529 - DNA, 33 bp, Homo sapien
atcctcctccctgacacatacacagcctgctct

SEQ ID NO: 301530 - DNA, 33 bp, Homo sapien
atcctcctccctgacagatacacagcctgctct

SEQ ID NO: 301531 - DNA, 33 bp, Homo sapien
tagctggttctagagacgtgcactaacactcct

SEQ ID NO: 301532 - DNA, 33 bp, Homo sapien
tagctggttctagagatgtgcactaacactcct

SEQ ID NO: 301533 - DNA, 33 bp, Homo sapien
acagctttccactttgcagtctatgaagcatta

SEQ ID NO: 301534 - DNA, 33 bp, Homo sapien
acagctttccactttgtagtctatgaagcatta

SEQ ID NO: 301535 - DNA, 33 bp, Homo sapien
tgctcttacttgccatcataggtcaagatctgc

SEQ ID NO: 301536 - DNA, 33 bp, Homo sapien
tgctcttacttgccatgataggtcaagatctgc

SEQ ID NO: 301537 - DNA, 33 bp, Homo sapien
agatctactgctcaaaatgaaagattcctttca

SEQ ID NO: 301538 - DNA, 33 bp, Homo sapien
agatctactgctcaaagtgaaagattcctttca

SEQ ID NO: 301539 - DNA, 33 bp, Homo sapien
catcaaaataaccacactcttgtatctcttgag

SEQ ID NO: 301540 - DNA, 33 bp, Homo sapien
catcaaaataaccacattcttgtatctcttgag

SEQ ID NO: 301541 - DNA, 33 bp, Homo sapien
ttaaatagactttgataagattgtgttttagtc

SEQ ID NO: 301542 - DNA, 33 bp, Homo sapien
ttaaatagactttgatgagattgtgttttagtc

SEQ ID NO: 301543 - DNA, 33 bp, Homo sapien
gggcacttcattccacccgaaatcactatctag

SEQ ID NO: 301544 - DNA, 33 bp, Homo sapien
gggcacttcattccactcgaaatcactatctag

SEQ ID NO: 301545 - DNA, 33 bp, Homo sapien
ctccctatttcctgcaaccacatacaaatggac

SEQ ID NO: 301546 - DNA, 33 bp, Homo sapien
ctccctatttcctgcagccacatacaaatggac

SEQ ID NO: 301547 - DNA, 33 bp, Homo sapien
tgctgtactccctcccacgctaactgccattag

SEQ ID NO: 301548 - DNA, 33 bp, Homo sapien
tgctgtactccctcccgcgctaactgccattag

SEQ ID NO: 301549 - DNA, 33 bp, Homo sapien
tttatagagaaagtaacagtagtttggtgtcct

SEQ ID NO: 301550 - DNA, 33 bp, Homo sapien
tttatagagaaagtaagagtagtttggtgtcct

SEQ ID NO: 301551 - DNA, 33 bp, Homo sapien
gtacttcacaatcttgcagtggcttacagctcc

SEQ ID NO: 301552 - DNA, 33 bp, Homo sapien
gtacttcacaatcttgtagtggcttacagctcc

SEQ ID NO: 301553 - DNA, 33 bp, Homo sapien
tttgaccttaaataacgagtggccaggtgcagt

SEQ ID NO: 301554 - DNA, 33 bp, Homo sapien
tttgaccttaaataactagtggccaggtgcagt

SEQ ID NO: 301555 - DNA, 33 bp, Homo sapien
aagccaaagctccaaaactattttgtactttgc

SEQ ID NO: 301556 - DNA, 33 bp, Homo sapien
aagccaaagctccaaagctattttgtactttgc

SEQ ID NO: 301557 - DNA, 33 bp, Homo sapien
ggacccgaatacattcccattgctggctccagc

SEQ ID NO: 301558 - DNA, 33 bp, Homo sapien
ggacccgaatacattctcattgctggctccagc

SEQ ID NO: 301559 - DNA, 33 bp, Homo sapien
aattcaagccactaacagcctgtgaacagagct

SEQ ID NO: 301560 - DNA, 33 bp, Homo sapien
aattcaagccactaacggcctgtgaacagagct

SEQ ID NO: 301561 - DNA, 33 bp, Homo sapien
ttctgctcacccctgaagcttaacccagttttt

SEQ ID NO: 301562 - DNA, 33 bp, Homo sapien
ttctgctcacccctgaggcttaacccagttttt

SEQ ID NO: 301563 - DNA, 33 bp, Homo sapien
atttttagagttacaaatatgtactgttgctta

SEQ ID NO: 301564 - DNA, 33 bp, Homo sapien
atttttagagttacaactatgtactgttgctta

SEQ ID NO: 301565 - DNA, 33 bp, Homo sapien
cacttcttggttattaacttttctcccattctc

SEQ ID NO: 301566 - DNA, 33 bp, Homo sapien
cacttcttggttattatcttttctcccattctc

SEQ ID NO: 301567 - DNA, 33 bp, Homo sapien
taatcatgtgcaagaacttctattttatttaac

SEQ ID NO: 301568 - DNA, 33 bp, Homo sapien
taatcatgtgcaagaatttctattttatttaac

SEQ ID NO: 301569 - DNA, 33 bp, Homo sapien
aagtttcagattccctcacagataagaagacta

SEQ ID NO: 301570 - DNA, 33 bp, Homo sapien
aagtttcagattccctgacagataagaagacta

SEQ ID NO: 301571 - DNA, 33 bp, Homo sapien
ttctgataaaaatgggaaaaaatgagctagtag

SEQ ID NO: 301572 - DNA, 33 bp, Homo sapien
ttctgataaaaatggggaaaaatgagctagtag

SEQ ID NO: 301573 - DNA, 33 bp, Homo sapien
atttgtattattattgcactcatgcagccattc

SEQ ID NO: 301574 - DNA, 33 bp, Homo sapien
atttgtattattattgtactcatgcagccattc

SEQ ID NO: 301575 - DNA, 33 bp, Homo sapien
tttaagtacactctacacagttcatacaaaaat

SEQ ID NO: 301576 - DNA, 33 bp, Homo sapien
tttaagtacactctacgcagttcatacaaaaat

SEQ ID NO: 301577 - DNA, 33 bp, Homo sapien
agtaccaaatacactaaaacaagtttgtccatc

SEQ ID NO: 301578 - DNA, 33 bp, Homo sapien
agtaccaaatacactataacaagtttgtccatc

SEQ ID NO: 301579 - DNA, 33 bp, Homo sapien
cttcattctgttgatacactgcatcacattaat

SEQ ID NO: 301580 - DNA, 33 bp, Homo sapien
cttcattctgttgatatactgcatcacattaat

SEQ ID NO: 301581 - DNA, 33 bp, Homo sapien
agcattgtgaaggaaacgtaataggactagatg

SEQ ID NO: 301582 - DNA, 33 bp, Homo sapien
agcattgtgaaggaaatgtaataggactagatg

SEQ ID NO: 301583 - DNA, 33 bp, Homo sapien
attcaacatatcataacctaattcatcatttaa

SEQ ID NO: 301584 - DNA, 33 bp, Homo sapien
attcaacatatcataatctaattcatcatttaa

SEQ ID NO: 301585 - DNA, 33 bp, Homo sapien
gagtgagacttctcacaagtttgtgttcttaag

SEQ ID NO: 301586 - DNA, 33 bp, Homo sapien
gagtgagacttctcaccagtttgtgttcttaag

SEQ ID NO: 301587 - DNA, 33 bp, Homo sapien
tattaattcattaaaagtaggcccataaacttg

SEQ ID NO: 301588 - DNA, 33 bp, Homo sapien
tattaattcattaaaattaggcccataaacttg

SEQ ID NO: 301589 - DNA, 33 bp, Homo sapien
accaccacaataaagcaagtgtctcaataaagt

SEQ ID NO: 301590 - DNA, 33 bp, Homo sapien
accaccacaataaagcgagtgtctcaataaagt

SEQ ID NO: 301591 - DNA, 33 bp, Homo sapien
tccatcacttttcacaacttttcttctaccagc

SEQ ID NO: 301592 - DNA, 33 bp, Homo sapien
tccatcacttttcacaccttttcttctaccagc

SEQ ID NO: 301593 - DNA, 33 bp, Homo sapien
aatgtcatccctgaaacgctaattgacaaaata

SEQ ID NO: 301594 - DNA, 33 bp, Homo sapien
aatgtcatccctgaaatgctaattgacaaaata

SEQ ID NO: 301595 - DNA, 33 bp, Homo sapien
aaacttgtagctgaataagaacttgggaaacaa

SEQ ID NO: 301596 - DNA, 33 bp, Homo sapien
aaacttgtagctgaatgagaacttgggaaacaa

SEQ ID NO: 301597 - DNA, 33 bp, Homo sapien
ctttaggggcaaatcacctcttgttgagttagc

SEQ ID NO: 301598 - DNA, 33 bp, Homo sapien
ctttaggggcaaatcagctcttgttgagttagc

SEQ ID NO: 301599 - DNA, 33 bp, Homo sapien
ctactgtgttttttaactgattaggaatgataa

SEQ ID NO: 301600 - DNA, 33 bp, Homo sapien
ctactgtgttttttaattgattaggaatgataa

SEQ ID NO: 301601 - DNA, 33 bp, Homo sapien
taagtatagttcttccagctttgttatttattt

SEQ ID NO: 301602 - DNA, 33 bp, Homo sapien
taagtatagttcttcctgctttgttatttattt

SEQ ID NO: 301603 - DNA, 33 bp, Homo sapien
aggtgatcaaatcatgaaggtggttttcctcat

SEQ ID NO: 301604 - DNA, 33 bp, Homo sapien
aggtgatcaaatcatgcaggtggttttcctcat

SEQ ID NO: 301605 - DNA, 33 bp, Homo sapien; identical to SEQ ID NO: 301603

SEQ ID NO: 301606 - DNA, 33 bp, Homo sapien; identical to SEQ ID NO: 301604

SEQ ID NO: 301607 - DNA, 33 bp, Homo sapien
caagtatagtactgctcaatcatttgggaagtt

SEQ ID NO: 301608 - DNA, 33 bp, Homo sapien
caagtatagtactgctgaatcatttgggaagtt

SEQ ID NO: 301609 - DNA, 33 bp, Homo sapien
tttctgagtcatgactaaactccataatgatta

SEQ ID NO: 301610 - DNA, 33 bp, Homo sapien
tttctgagtcatgactgaactccataatgatta

SEQ ID NO: 301611 - DNA, 33 bp, Homo sapien
gggcgatttggaactgcattagaccaatctggt

SEQ ID NO: 301612 - DNA, 33 bp, Homo sapien
gggcgatttggaactgtattagaccaatctggt

SEQ ID NO: 301613 - DNA, 33 bp, Homo sapien
tagtgaaactgactgaatagatgggaatttgca

SEQ ID NO: 301614 - DNA, 33 bp, Homo sapien
tagtgaaactgactgagtagatgggaatttgca

SEQ ID NO: 301615 - DNA, 33 bp, Homo sapien
ccaataacaaagacccaagtggcatttagcctg

SEQ ID NO: 301616 - DNA, 33 bp, Homo sapien
ccaataacaaagacccgagtggcatttagcctg

SEQ ID NO: 301617 - DNA, 33 bp, Homo sapien
ttattcaaaatgtttacaaaatttggcctatta

SEQ ID NO: 301618 - DNA, 33 bp, Homo sapien
ttattcaaaatgtttataaaatttggcctatta

SEQ ID NO: 301619 - DNA, 33 bp, Homo sapien
tactggctcttcagtacaatggagtgaacagtt

SEQ ID NO: 301620 - DNA, 33 bp, Homo sapien
tactggctcttcagtataatggagtgaacagtt

SEQ ID NO: 301621 - DNA, 33 bp, Homo sapien
acatttgtgaaaagaaatcatacagtggcaaac

SEQ ID NO: 301622 - DNA, 33 bp, Homo sapien
acatttgtgaaaagaagtcatacagtggcaaac

SEQ ID NO: 301623 - DNA, 33 bp, Homo sapien
tatgtaagcaacataaagctggaagtaatttct

SEQ ID NO: 301624 - DNA, 33 bp, Homo sapien
tatgtaagcaacataatgctggaagtaatttct

SEQ ID NO: 301625 - DNA, 33 bp, Homo sapien
caaaaaacagagacaagcctactgtggcctgga

SEQ ID NO: 301626 - DNA, 33 bp, Homo sapien
caaaaaacagagacaatcctactgtggcctgga

SEQ ID NO: 301627 - DNA, 33 bp, Homo sapien
caatagagagcctagaaatcatatatttacagt

SEQ ID NO: 301628 - DNA, 33 bp, Homo sapien
caatagagagcctagacatcatatatttacagt

SEQ ID NO: 301629 - DNA, 33 bp, Homo sapien
gttgactcataggcacaattataaatcagtaaa

SEQ ID NO: 301630 - DNA, 33 bp, Homo sapien
gttgactcataggcacgattataaatcagtaaa

SEQ ID NO: 301631 - DNA, 33 bp, Homo sapien
aagactccaaatgtgactagtgtaaagcagcca

SEQ ID NO: 301632 - DNA, 33 bp, Homo sapien
aagactccaaatgtgagtagtgtaaagcagcca

SEQ ID NO: 301633 - DNA, 33 bp, Homo sapien
caaaagcaactagaaccaatacatggatttagc

SEQ ID NO: 301634 - DNA, 33 bp, Homo sapien
caaaagcaactagaactaatacatggatttagc

SEQ ID NO: 301635 - DNA, 33 bp, Homo sapien
attgatctatatccaacgtgatttctgtcaaaa

SEQ ID NO: 301636 - DNA, 33 bp, Homo sapien
attgatctatatccaatgtgatttctgtcaaaa

SEQ ID NO: 301637 - DNA, 33 bp, Homo sapien
ctagcttcactgaatgaattagggaggatttcc

SEQ ID NO: 301638 - DNA, 33 bp, Homo sapien
ctagcttcactgaatgcattagggaggatttcc

SEQ ID NO: 301639 - DNA, 33 bp, Homo sapien
ttaatatctcttcagtaaagtacatcatataat

SEQ ID NO: 301640 - DNA, 33 bp, Homo sapien
ttaatatctcttcagtgaagtacatcatataat

SEQ ID NO: 301641 - DNA, 33 bp, Homo sapien
caatagaaacaaacagacatttcacagaagaga

SEQ ID NO: 301642 - DNA, 33 bp, Homo sapien
caatagaaacaaacaggcatttcacagaagaga

SEQ ID NO: 301643 - DNA, 33 bp, Homo sapien
ttgtaaaaattatgaactctgaaaaagtgtgag

SEQ ID NO: 301644 - DNA, 33 bp, Homo sapien
ttgtaaaaattatgaagtctgaaaaagtgtgag

SEQ ID NO: 301645 - DNA, 33 bp, Homo sapien
caggaaatacccagaaatacagtaagttatgtg

SEQ ID NO: 301646 - DNA, 33 bp, Homo sapien
caggaaatacccagaagtacagtaagttatgtg

SEQ ID NO: 301647 - DNA, 33 bp, Homo sapien
ataattcactgtaaaccgttattaatcagaagc

SEQ ID NO: 301648 - DNA, 33 bp, Homo sapien
ataattcactgtaaactgttattaatcagaagc

SEQ ID NO: 301649 - DNA, 33 bp, Homo sapien
taaagctaacaactgcaattccaggagacatag

SEQ ID NO: 301650 - DNA, 33 bp, Homo sapien
taaagctaacaactgccattccaggagacatag

SEQ ID NO: 301651 - DNA, 33 bp, Homo sapien
aatgtatgacttccaactgaaatagaaaaaaaa

SEQ ID NO: 301652 - DNA, 33 bp, Homo sapien
aatgtatgacttccaattgaaatagaaaaaaaa

SEQ ID NO: 301653 - DNA, 33 bp, Homo sapien
attcattgactgaacaacgaatgaagagttagt

SEQ ID NO: 301654 - DNA, 33 bp, Homo sapien
attcattgactgaacagcgaatgaagagttagt

SEQ ID NO: 301655 - DNA, 33 bp, Homo sapien
taataactcttttgtacaagtcgcagactcgtg

SEQ ID NO: 301656 - DNA, 33 bp, Homo sapien
taataactcttttgtataagtcgcagactcgtg

SEQ ID NO: 301657 - DNA, 33 bp, Homo sapien
actgatcttgcatacacgatttaaaaatctatc

SEQ ID NO: 301658 - DNA, 33 bp, Homo sapien
actgatcttgcatacatgatttaaaaatctatc

SEQ ID NO: 301659 - DNA, 33 bp, Homo sapien
gagttaggttataaaacgtgacttccgtctagc

SEQ ID NO: 301660 - DNA, 33 bp, Homo sapien
gagttaggttataaaatgtgacttccgtctagc

SEQ ID NO: 301661 - DNA, 33 bp, Homo sapien
ttgcaagtagaaatgacgcaatgtgctgttaga

SEQ ID NO: 301662 - DNA, 33 bp, Homo sapien
ttgcaagtagaaatgatgcaatgtgctgttaga

SEQ ID NO: 301663 - DNA, 33 bp, Homo sapien
atttcattcctctgtacatggatagccagttat

SEQ ID NO: 301664 - DNA, 33 bp, Homo sapien
atttcattcctctgtatatggatagccagttat

SEQ ID NO: 301665 - DNA, 33 bp, Homo sapien
actgaagaagctacaaagaaactacaccactaa

SEQ ID NO: 301666 - DNA, 33 bp, Homo sapien
actgaagaagctacaaggaaactacaccactaa

SEQ ID NO: 301667 - DNA, 33 bp, Homo sapien
ggagagtgaaccttcacggcaagtcccaggtga

SEQ ID NO: 301668 - DNA, 33 bp, Homo sapien
ggagagtgaaccttcatggcaagtcccaggtga

SEQ ID NO: 301669 - DNA, 33 bp, Homo sapien
aagatgtggctaagatgataggacaatgggtac

SEQ ID NO: 301670 - DNA, 33 bp, Homo sapien
aagatgtggctaagattataggacaatgggtac

SEQ ID NO: 301671 - DNA, 33 bp, Homo sapien
agcaaagactgaaagacgtggaacatgtgtgtg

SEQ ID NO: 301672 - DNA, 33 bp, Homo sapien
agcaaagactgaaagatgtggaacatgtgtgtg

SEQ ID NO: 301673 - DNA, 33 bp, Homo sapien
tgaccagaagacgccaacactgctttggcaaca

SEQ ID NO: 301674 - DNA, 33 bp, Homo sapien
tgaccagaagacgccagcactgctttggcaaca

SEQ ID NO: 301675 - DNA, 33 bp, Homo sapien
tagggcagcacatttacaggaaaatttatagct

SEQ ID NO: 301676 - DNA, 33 bp, Homo sapien
tagggcagcacatttataggaaaatttatagct

SEQ ID NO: 301677 - DNA, 33 bp, Homo sapien
tgacacaatatacttaaaaatgttgaaagaatt

SEQ ID NO: 301678 - DNA, 33 bp, Homo sapien
tgacacaatatacttagaaatgttgaaagaatt

SEQ ID NO: 301679 - DNA, 33 bp, Homo sapien
aggagctggtgttgcaaataattaacagggtga

SEQ ID NO: 301680 - DNA, 33 bp, Homo sapien
aggagctggtgttgcagataattaacagggtga

SEQ ID NO: 301681 - DNA, 33 bp, Homo sapien
catactctaatggcagaaccgcagctgaaacat

SEQ ID NO: 301682 - DNA, 33 bp, Homo sapien
catactctaatggcagcaccgcagctgaaacat

SEQ ID NO: 301683 - DNA, 33 bp, Homo sapien
attttcacacttgcagacatcacaaggactcaa

SEQ ID NO: 301684 - DNA, 33 bp, Homo sapien
attttcacacttgcaggcatcacaaggactcaa

SEQ ID NO: 301685 - DNA, 33 bp, Homo sapien
atttctacctttttcactcagggtgctgtcagc

SEQ ID NO: 301686 - DNA, 33 bp, Homo sapien
atttctacctttttcagtcagggtgctgtcagc

SEQ ID NO: 301687 - DNA, 33 bp, Homo sapien
caatataccagtgcaccatgttagatatgaatg

SEQ ID NO: 301688 - DNA, 33 bp, Homo sapien
caatataccagtgcactatgttagatatgaatg

SEQ ID NO: 301689 - DNA, 33 bp, Homo sapien
tttgattaatttgcacgaatgcctgagttcatt

SEQ ID NO: 301690 - DNA, 33 bp, Homo sapien
tttgattaatttgcactaatgcctgagttcatt

SEQ ID NO: 301691 - DNA, 33 bp, Homo sapien
agggcttgttccctcacgtctgtgcatctgagg

SEQ ID NO: 301692 - DNA, 33 bp, Homo sapien
agggcttgttccctcatgtctgtgcatctgagg

SEQ ID NO: 301693 - DNA, 33 bp, Homo sapien
tggccaggtcagcagtaactaaaagctggtgat

SEQ ID NO: 301694 - DNA, 33 bp, Homo sapien
tggccaggtcagcagtgactaaaagctggtgat

SEQ ID NO: 301695 - DNA, 33 bp, Homo sapien
tatcttttaataaacccgggcaggctgctggaa

SEQ ID NO: 301696 - DNA, 33 bp, Homo sapien
tatcttttaataaacctgggcaggctgctggaa

SEQ ID NO: 301697 - DNA, 33 bp, Homo sapien
caatcttcttcagggaatatgctcttaatgaca

SEQ ID NO: 301698 - DNA, 33 bp, Homo sapien
caatcttcttcagggagtatgctcttaatgaca

SEQ ID NO: 301699 - DNA, 33 bp, Homo sapien
tgaaggtggctacacgaaacaagagattttcaa

SEQ ID NO: 301700 - DNA, 33 bp, Homo sapien
tgaaggtggctacacgcaacaagagattttcaa

SEQ ID NO: 301701 - DNA, 33 bp, Homo sapien
cctctgaagaacaagacactctagaacagagct

SEQ ID NO: 301702 - DNA, 33 bp, Homo sapien
cctctgaagaacaagatactctagaacagagct

SEQ ID NO: 301703 - DNA, 33 bp, Homo sapien
tgggatcagggggggaagtatagagaggtatca

SEQ ID NO: 301704 - DNA, 33 bp, Homo sapien
tgggatcagggggggatgtatagagaggtatca

SEQ ID NO: 301705 - DNA, 33 bp, Homo sapien
ttgttcaccccttcccaatgatgatgactctga

SEQ ID NO: 301706 - DNA, 33 bp, Homo sapien
ttgttcaccccttcccgatgatgatgactctga

SEQ ID NO: 301707 - DNA, 33 bp, Homo sapien
atgtaacaatcgagaaagtggaactaaaatatg

SEQ ID NO: 301708 - DNA, 33 bp, Homo sapien
atgtaacaatcgagaaggtggaactaaaatatg

SEQ ID NO: 301709 - DNA, 33 bp, Homo sapien
agggaatggggaggtacggaaagagtctgctgt

SEQ ID NO: 301710 - DNA, 33 bp, Homo sapien
agggaatggggaggtatggaaagagtctgctgt

SEQ ID NO: 301711 - DNA, 33 bp, Homo sapien
catccttcttttgagcaccagtatgtacacaag

SEQ ID NO: 301712 - DNA, 33 bp, Homo sapien
catccttcttttgagctccagtatgtacacaag

SEQ ID NO: 301713 - DNA, 33 bp, Homo sapien
cagggcaatttcagccacactcaaggaagagcc

SEQ ID NO: 301714 - DNA, 33 bp, Homo sapien
cagggcaatttcagccgcactcaaggaagagcc

SEQ ID NO: 301715 - DNA, 33 bp, Homo sapien
gctagagaggttgatacgcaaattcaagaaatg

SEQ ID NO: 301716 - DNA, 33 bp, Homo sapien
gctagagaggttgatatgcaaattcaagaaatg

SEQ ID NO: 301717 - DNA, 33 bp, Homo sapien
cattaacaatagaatcaactaagctaaggaagg

SEQ ID NO: 301718 - DNA, 33 bp, Homo sapien
cattaacaatagaatcgactaagctaaggaagg

SEQ ID NO: 301719 - DNA, 33 bp, Homo sapien
cagcccacgaacccaaacatctaacctctctca

SEQ ID NO: 301720 - DNA, 33 bp, Homo sapien
cagcccacgaacccaagcatctaacctctctca

SEQ ID NO: 301721 - DNA, 33 bp, Homo sapien
tgcatcctgtcccccactactcctagccaggga

SEQ ID NO: 301722 - DNA, 33 bp, Homo sapien
tgcatcctgtcccccattactcctagccaggga

SEQ ID NO: 301723 - DNA, 33 bp, Homo sapien
gaaaggaagtggcctgaagaatttattgagcaa

SEQ ID NO: 301724 - DNA, 33 bp, Homo sapien
gaaaggaagtggcctggagaatttattgagcaa

SEQ ID NO: 301725 - DNA, 33 bp, Homo sapien
acttcctaattcatcacggcatctaatattctg

SEQ ID NO: 301726 - DNA, 33 bp, Homo sapien
acttcctaattcatcatggcatctaatattctg

SEQ ID NO: 301727 - DNA, 33 bp, Homo sapien
acagttatgaggctagacagtgttagactatgc

SEQ ID NO: 301728 - DNA, 33 bp, Homo sapien
acagttatgaggctagtcagtgttagactatgc

SEQ ID NO: 301729 - DNA, 33 bp, Homo sapien
cagactgttctaaaaaatgttgaagacaatgat

SEQ ID NO: 301730 - DNA, 33 bp, Homo sapien
cagactgttctaaaaactgttgaagacaatgat

SEQ ID NO: 301731 - DNA, 33 bp, Homo sapien
tttgctgtgatcttggcaagaaagcacttggga

SEQ ID NO: 301732 - DNA, 33 bp, Homo sapien
tttgctgtgatcttggtaagaaagcacttggga

SEQ ID NO: 301733 - DNA, 33 bp, Homo sapien
atctgtgcagctgtggacatatcttaggtaagc

SEQ ID NO: 301734 - DNA, 33 bp, Homo sapien
atctgtgcagctgtgggcatatcttaggtaagc

SEQ ID NO: 301735 - DNA, 33 bp, Homo sapien
gggggctaaagaagacagatgtgctcttgagcc

SEQ ID NO: 301736 - DNA, 33 bp, Homo sapien
gggggctaaagaagacggatgtgctcttgagcc

SEQ ID NO: 301737 - DNA, 33 bp, Homo sapien
ttgagtcagatttacacccggaagaaaagtaac

SEQ ID NO: 301738 - DNA, 33 bp, Homo sapien
ttgagtcagatttacatccggaagaaaagtaac

SEQ ID NO: 301739 - DNA, 33 bp, Homo sapien
cttgtttacattttagacaagcactcaatagaa

SEQ ID NO: 301740 - DNA, 33 bp, Homo sapien
cttgtttacattttaggcaagcactcaatagaa

SEQ ID NO: 301741 - DNA, 33 bp, Homo sapien
ttctaagtggtcacaaatagtttcatcggcatt

SEQ ID NO: 301742 - DNA, 33 bp, Homo sapien
ttctaagtggtcacaactagtttcatcggcatt

SEQ ID NO: 301743 - DNA, 33 bp, Homo sapien
ttgaatctgggttccaatccaggctaaccttgc

SEQ ID NO: 301744 - DNA, 33 bp, Homo sapien
ttgaatctgggttccattccaggctaaccttgc

SEQ ID NO: 301745 - DNA, 33 bp, Homo sapien
catccttttattcaaaccatagttttcttggaa

SEQ ID NO: 301746 - DNA, 33 bp, Homo sapien
catccttttattcaaatcatagttttcttggaa

SEQ ID NO: 301747 - DNA, 33 bp, Homo sapien
ttttaacagattttaaagcagagctctggtcta

SEQ ID NO: 301748 - DNA, 33 bp, Homo sapien
ttttaacagattttaaggcagagctctggtcta

SEQ ID NO: 301749 - DNA, 33 bp, Homo sapien
tggttgttaggaaatgaaatttgtggaatactc

SEQ ID NO: 301750 - DNA, 33 bp, Homo sapien
tggttgttaggaaatggaatttgtggaatactc

SEQ ID NO: 301751 - DNA, 33 bp, Homo sapien
taaacatgacaagcataataaaaagaggtgata

SEQ ID NO: 301752 - DNA, 33 bp, Homo sapien
taaacatgacaagcatgataaaaagaggtgata

SEQ ID NO: 301753 - DNA, 33 bp, Homo sapien
tcagttttgattgataagcctaaaaagtcccgc

SEQ ID NO: 301754 - DNA, 33 bp, Homo sapien
tcagttttgattgatatgcctaaaaagtcccgc

SEQ ID NO: 301755 - DNA, 33 bp, Homo sapien
ttgcttagagcaacataatccataattgccaaa

SEQ ID NO: 301756 - DNA, 33 bp, Homo sapien
ttgcttagagcaacattatccataattgccaaa

SEQ ID NO: 301757 - DNA, 33 bp, Homo sapien
ttcttcagctgcttgcaaaaagtttgcctaaga

SEQ ID NO: 301758 - DNA, 33 bp, Homo sapien
ttcttcagctgcttgcgaaaagtttgcctaaga

SEQ ID NO: 301759 - DNA, 33 bp, Homo sapien
gtaaacggaatggctacaaattactcaaactac

SEQ ID NO: 301760 - DNA, 33 bp, Homo sapien
gtaaacggaatggctataaattactcaaactac

SEQ ID NO: 301761 - DNA, 33 bp, Homo sapien
gtagatttattagaagacaaattctattcaaca

SEQ ID NO: 301762 - DNA, 33 bp, Homo sapien
gtagatttattagaagtcaaattctattcaaca

SEQ ID NO: 301763 - DNA, 33 bp, Homo sapien
ggcaatggcttaatcacaaggaactacatgtga

SEQ ID NO: 301764 - DNA, 33 bp, Homo sapien
ggcaatggcttaatcataaggaactacatgtga

SEQ ID NO: 301765 - DNA, 33 bp, Homo sapien
acatacaaattgccaaagagcacatgaaaaaat

SEQ ID NO: 301766 - DNA, 33 bp, Homo sapien
acatacaaattgccaacgagcacatgaaaaaat

SEQ ID NO: 301767 - DNA, 33 bp, Homo sapien
aattactactgattcacccttcttcaccaactg

SEQ ID NO: 301768 - DNA, 33 bp, Homo sapien
aattactactgattcatccttcttcaccaactg

SEQ ID NO: 301769 - DNA, 33 bp, Homo sapien
gaataacatttccaatgaccaagactttaccaa

SEQ ID NO: 301770 - DNA, 33 bp, Homo sapien
gaataacatttccaattaccaagactttaccaa

SEQ ID NO: 301771 - DNA, 33 bp, Homo sapien
gcggtcagagcaccaaacttacgagccttgtga

SEQ ID NO: 301772 - DNA, 33 bp, Homo sapien
gcggtcagagcaccaatcttacgagccttgtga

SEQ ID NO: 301773 - DNA, 33 bp, Homo sapien
tttccttacggtaaccgaatcgagcgctttcct

SEQ ID NO: 301774 - DNA, 33 bp, Homo sapien
tttccttacggtaacctaatcgagcgctttcct

SEQ ID NO: 301775 - DNA, 33 bp, Homo sapien
gcagtgttgaaaaagacagtaggtctcatgtct

SEQ ID NO: 301776 - DNA, 33 bp, Homo sapien
gcagtgttgaaaaagatagtaggtctcatgtct

SEQ ID NO: 301777 - DNA, 33 bp, Homo sapien
cttcacctcagttaaaatagcttgtaaacctct

SEQ ID NO: 301778 - DNA, 33 bp, Homo sapien
cttcacctcagttaaactagcttgtaaacctct

SEQ ID NO: 301779 - DNA, 33 bp, Homo sapien
ccggccagacttcagacgttttatccaactaat

SEQ ID NO: 301780 - DNA, 33 bp, Homo sapien
ccggccagacttcagatgttttatccaactaat

SEQ ID NO: 301781 - DNA, 33 bp, Homo sapien
ctctcagttatgtccacgaggtccgggaggatg

SEQ ID NO: 301782 - DNA, 33 bp, Homo sapien
ctctcagttatgtccatgaggtccgggaggatg

SEQ ID NO: 301783 - DNA, 33 bp, Homo sapien
ttctcagtgcctaatgcagtggcagatgcatct

SEQ ID NO: 301784 - DNA, 33 bp, Homo sapien
ttctcagtgcctaatgtagtggcagatgcatct

SEQ ID NO: 301785 - DNA, 33 bp, Homo sapien
ctcaataaataataaactggattgagttttctg

SEQ ID NO: 301786 - DNA, 33 bp, Homo sapien
ctcaataaataataaattggattgagttttctg

SEQ ID NO: 301787 - DNA, 33 bp, Homo sapien
cctcatgcagtgctcaaaatttctggttttggc

SEQ ID NO: 301788 - DNA, 33 bp, Homo sapien
cctcatgcagtgctcacaatttctggttttggc

SEQ ID NO: 301789 - DNA, 33 bp, Homo sapien
tggggtgagctgtccacatgcaaaatggcctgc

SEQ ID NO: 301790 - DNA, 33 bp, Homo sapien
tggggtgagctgtccatatgcaaaatggcctgc

SEQ ID NO: 301791 - DNA, 33 bp, Homo sapien
ggacctgaaaacaacaactgtctgtctcatacc

SEQ ID NO: 301792 - DNA, 33 bp, Homo sapien
ggacctgaaaacaacacctgtctgtctcatacc

SEQ ID NO: 301793 - DNA, 33 bp, Homo sapien
aaatgatataagggtcaatttaacacgaatata

SEQ ID NO: 301794 - DNA, 33 bp, Homo sapien
aaatgatataagggtcgatttaacacgaatata

SEQ ID NO: 301795 - DNA, 33 bp, Homo sapien
gtggaactcacagaaaagatcacagaaagtgat

SEQ ID NO: 301796 - DNA, 33 bp, Homo sapien
gtggaactcacagaaaggatcacagaaagtgat

SEQ ID NO: 301797 - DNA, 33 bp, Homo sapien
ggaattggaatattgggccaacgaaggaacaga

SEQ ID NO: 301798 - DNA, 33 bp, Homo sapien
ggaattggaatattggtccaacgaaggaacaga

SEQ ID NO: 301799 - DNA, 33 bp, Homo sapien
gttggaaagatcaccaaatgaaaactccaccat

SEQ ID NO: 301800 - DNA, 33 bp, Homo sapien
gttggaaagatcaccagatgaaaactccaccat

SEQ ID NO: 301801 - DNA, 33 bp, Homo sapien
tttgctggttgctcaaaaaacactatagcgtta

SEQ ID NO: 301802 - DNA, 33 bp, Homo sapien
tttgctggttgctcaagaaacactatagcgtta

SEQ ID NO: 301803 - DNA, 33 bp, Homo sapien
gttaacattggaaagcggacacaaagaactgcc

SEQ ID NO: 301804 - DNA, 33 bp, Homo sapien
gttaacattggaaagctgacacaaagaactgcc

SEQ ID NO: 301805 - DNA, 33 bp, Homo sapien
cctcacagtttgctcccattggctttaggtaac

SEQ ID NO: 301806 - DNA, 33 bp, Homo sapien
cctcacagtttgctcctattggctttaggtaac

SEQ ID NO: 301807 - DNA, 33 bp, Homo sapien
gccttcctgccataggaaacagatgcagggagg

SEQ ID NO: 301808 - DNA, 33 bp, Homo sapien
gccttcctgccatagggaacagatgcagggagg

SEQ ID NO: 301809 - DNA, 33 bp, Homo sapien
taagaatctaagcatacgtgctccaaggtccag

SEQ ID NO: 301810 - DNA, 33 bp, Homo sapien
taagaatctaagcatatgtgctccaaggtccag

SEQ ID NO: 301811 - DNA, 33 bp, Homo sapien
gttggaagctaaggaaccttttaaaggataggt

SEQ ID NO: 301812 - DNA, 33 bp, Homo sapien
gttggaagctaaggaagcttttaaaggataggt

SEQ ID NO: 301813 - DNA, 33 bp, Homo sapien
tcaagtgttgatcttaaagcaggtaaatactaa

SEQ ID NO: 301814 - DNA, 33 bp, Homo sapien
tcaagtgttgatcttagagcaggtaaatactaa

SEQ ID NO: 301815 - DNA, 33 bp, Homo sapien
gagtgtgaccaaaataacagtaccataaagagc

SEQ ID NO: 301816 - DNA, 33 bp, Homo sapien
gagtgtgaccaaaatagcagtaccataaagagc

SEQ ID NO: 301817 - DNA, 33 bp, Homo sapien
acctccaagccatacactgccttaagcagaaac

SEQ ID NO: 301818 - DNA, 33 bp, Homo sapien
acctccaagccatacattgccttaagcagaaac

SEQ ID NO: 301819 - DNA, 33 bp, Homo sapien
gccattttgtgggcaaacaatttagctagtcca

SEQ ID NO: 301820 - DNA, 33 bp, Homo sapien
gccattttgtgggcaagcaatttagctagtcca

SEQ ID NO: 301821 - DNA, 33 bp, Homo sapien
cttacagtgaaatcaaccttagtgttgcaaatg

SEQ ID NO: 301822 - DNA, 33 bp, Homo sapien
cttacagtgaaatcaatcttagtgttgcaaatg

SEQ ID NO: 301823 - DNA, 33 bp, Homo sapien
agagtttggtttcagccactgatacattcagca

SEQ ID NO: 301824 - DNA, 33 bp, Homo sapien
agagtttggtttcagctactgatacattcagca

SEQ ID NO: 301825 - DNA, 33 bp, Homo sapien
atgggcttctctaataacacatggaataaaaag

SEQ ID NO: 301826 - DNA, 33 bp, Homo sapien
atgggcttctctaatagcacatggaataaaaag

SEQ ID NO: 301827 - DNA, 33 bp, Homo sapien
tttctgcaatcttccactgaatgttttcagacc

SEQ ID NO: 301828 - DNA, 33 bp, Homo sapien
tttctgcaatcttccattgaatgttttcagacc

SEQ ID NO: 301829 - DNA, 33 bp, Homo sapien
ttggaatcctaacatccagcaatttatacatat

SEQ ID NO: 301830 - DNA, 33 bp, Homo sapien
ttggaatcctaacatctagcaatttatacatat

SEQ ID NO: 301831 - DNA, 33 bp, Homo sapien
aaccaaatacttcacccaactcattaacagcaa

SEQ ID NO: 301832 - DNA, 33 bp, Homo sapien
aaccaaatacttcaccgaactcattaacagcaa

SEQ ID NO: 301833 - DNA, 33 bp, Homo sapien
catagttaaaacacaaggttgtcaagggaaatt

SEQ ID NO: 301834 - DNA, 33 bp, Homo sapien
catagttaaaacacaatgttgtcaagggaaatt

SEQ ID NO: 301835 - DNA, 33 bp, Homo sapien
tttacttctctaataccgattcagttcacacag

SEQ ID NO: 301836 - DNA, 33 bp, Homo sapien
tttacttctctaatactgattcagttcacacag

SEQ ID NO: 301837 - DNA, 33 bp, Homo sapien
agtcaaaagcggttcccagagagaaagtatcct

SEQ ID NO: 301838 - DNA, 33 bp, Homo sapien
agtcaaaagcggttcctagagagaaagtatcct

SEQ ID NO: 301839 - DNA, 33 bp, Homo sapien
gaaggatggaaattgaaaatgtcttgttttatt

SEQ ID NO: 301840 - DNA, 33 bp, Homo sapien
gaaggatggaaattgagaatgtcttgttttatt

SEQ ID NO: 301841 - DNA, 33 bp, Homo sapien
ctgctttgcaaattaacgctagtctaataaata

SEQ ID NO: 301842 - DNA, 33 bp, Homo sapien
ctgctttgcaaattaatgctagtctaataaata

SEQ ID NO: 301843 - DNA, 33 bp, Homo sapien
aaaagggcaagacttcgctgatgcctcaacttt

SEQ ID NO: 301844 - DNA, 33 bp, Homo sapien
aaaagggcaagacttctctgatgcctcaacttt

SEQ ID NO: 301845 - DNA, 33 bp, Homo sapien
cacaggctggcctcagcacacaagaataggaat

SEQ ID NO: 301846 - DNA, 33 bp, Homo sapien
cacaggctggcctcaggacacaagaataggaat

SEQ ID NO: 301847 - DNA, 33 bp, Homo sapien
catgatactcactaacacacatctaaaatgttt

SEQ ID NO: 301848 - DNA, 33 bp, Homo sapien
catgatactcactaacgcacatctaaaatgttt

SEQ ID NO: 301849 - DNA, 33 bp, Homo sapien
gagaggtaagagaagaaccaaaacactgcaaca

SEQ ID NO: 301850 - DNA, 33 bp, Homo sapien
gagaggtaagagaagacccaaaacactgcaaca

SEQ ID NO: 301851 - DNA, 33 bp, Homo sapien
ttaccatgtaacgtaactggacctctttagtgg

SEQ ID NO: 301852 - DNA, 33 bp, Homo sapien
ttaccatgtaacgtaattggacctctttagtgg

SEQ ID NO: 301853 - DNA, 33 bp, Homo sapien
tttcattttccctgcacagcaacagttcctcga

SEQ ID NO: 301854 - DNA, 33 bp, Homo sapien
tttcattttccctgcatagcaacagttcctcga

SEQ ID NO: 301855 - DNA, 33 bp, Homo sapien
aactcttagagaaataaccaaaaaagtcaggaa

SEQ ID NO: 301856 - DNA, 33 bp, Homo sapien
aactcttagagaaatagccaaaaaagtcaggaa

SEQ ID NO: 301857 - DNA, 33 bp, Homo sapien
atgaaagacagaaaagcataagccaaagatgac

SEQ ID NO: 301858 - DNA, 33 bp, Homo sapien
atgaaagacagaaaaggataagccaaagatgac

SEQ ID NO: 301859 - DNA, 33 bp, Homo sapien
gaaaataaattgatgtaaaaaatgaaatggatt

SEQ ID NO: 301860 - DNA, 33 bp, Homo sapien
gaaaataaattgatgtcaaaaatgaaatggatt

SEQ ID NO: 301861 - DNA, 33 bp, Homo sapien
gtatcaatagctagaaaaatcccagaaagtact

SEQ ID NO: 301862 - DNA, 33 bp, Homo sapien
gtatcaatagctagaagaatcccagaaagtact

SEQ ID NO: 301863 - DNA, 33 bp, Homo sapien
cacttcatattcttaaatcatgctttcagtcac

SEQ ID NO: 301864 - DNA, 33 bp, Homo sapien
cacttcatattcttaactcatgctttcagtcac

SEQ ID NO: 301865 - DNA, 33 bp, Homo sapien
ctaagtttgtgaacataagcattatcaaatatt

SEQ ID NO: 301866 - DNA, 33 bp, Homo sapien
ctaagtttgtgaacattagcattatcaaatatt

SEQ ID NO: 301867 - DNA, 33 bp, Homo sapien
ctgcttagctacttcaatcattactacttttct

SEQ ID NO: 301868 - DNA, 33 bp, Homo sapien
ctgcttagctacttcactcattactacttttct

SEQ ID NO: 301869 - DNA, 33 bp, Homo sapien
caacaattagcaatagcacttcaaccactcact

SEQ ID NO: 301870 - DNA, 33 bp, Homo sapien
caacaattagcaatagtacttcaaccactcact

SEQ ID NO: 301871 - DNA, 33 bp, Homo sapien
gcttgttttaggaaaaaatgatgtcagacacaa

SEQ ID NO: 301872 - DNA, 33 bp, Homo sapien
gcttgttttaggaaaagatgatgtcagacacaa

SEQ ID NO: 301873 - DNA, 33 bp, Homo sapien
tctctgattgcttgacgcaaatgctttatgctt

SEQ ID NO: 301874 - DNA, 33 bp, Homo sapien
tctctgattgcttgactcaaatgctttatgctt

SEQ ID NO: 301875 - DNA, 33 bp, Homo sapien
tttggtctatttgtcacgtgcatcggcatcccc

SEQ ID NO: 301876 - DNA, 33 bp, Homo sapien
tttggtctatttgtcatgtgcatcggcatcccc

SEQ ID NO: 301877 - DNA, 33 bp, Homo sapien
tttacttttcatactaaccacaaaataaatctc

SEQ ID NO: 301878 - DNA, 33 bp, Homo sapien
tttacttttcatactatccacaaaataaatctc

SEQ ID NO: 301879 - DNA, 33 bp, Homo sapien
gttctatgtgagaaaaccctcttcttggatgat

SEQ ID NO: 301880 - DNA, 33 bp, Homo sapien
gttctatgtgagaaaatcctcttcttggatgat

SEQ ID NO: 301881 - DNA, 33 bp, Homo sapien
caaatggtaccatgtaaacttagagcagtggag

SEQ ID NO: 301882 - DNA, 33 bp, Homo sapien
caaatggtaccatgtagacttagagcagtggag

SEQ ID NO: 301883 - DNA, 33 bp, Homo sapien
agcagtggagtagtacccatctcttgttgccaa

SEQ ID NO: 301884 - DNA, 33 bp, Homo sapien
agcagtggagtagtactcatctcttgttgccaa

SEQ ID NO: 301885 - DNA, 33 bp, Homo sapien
attattgctaatctgaaacctattcctttcttt

SEQ ID NO: 301886 - DNA, 33 bp, Homo sapien
attattgctaatctgagacctattcctttcttt

SEQ ID NO: 301887 - DNA, 33 bp, Homo sapien
aaacataaggatgagaactcaggtatcagctgt

SEQ ID NO: 301888 - DNA, 33 bp, Homo sapien
aaacataaggatgagagctcaggtatcagctgt

SEQ ID NO: 301889 - DNA, 33 bp, Homo sapien
aaggaaaatgctggtgaaaggcttcatgtgtgg

SEQ ID NO: 301890 - DNA, 33 bp, Homo sapien
aaggaaaatgctggtggaaggcttcatgtgtgg

SEQ ID NO: 301891 - DNA, 33 bp, Homo sapien
aggctagactagtgtacaaaagttataaaagca

SEQ ID NO: 301892 - DNA, 33 bp, Homo sapien
aggctagactagtgtataaaagttataaaagca

SEQ ID NO: 301893 - DNA, 33 bp, Homo sapien
cagacagcagacttcacagagaataggttataa

SEQ ID NO: 301894 - DNA, 33 bp, Homo sapien
cagacagcagacttcagagagaataggttataa

SEQ ID NO: 301895 - DNA, 33 bp, Homo sapien
ctatagtgagtaggaaataatagtgaataggaa

SEQ ID NO: 301896 - DNA, 33 bp, Homo sapien
ctatagtgagtaggaagtaatagtgaataggaa

SEQ ID NO: 301897 - DNA, 33 bp, Homo sapien
tctctagtaaaggttcacacttatctttccttt

SEQ ID NO: 301898 - DNA, 33 bp, Homo sapien
tctctagtaaaggttcgcacttatctttccttt

SEQ ID NO: 301899 - DNA, 33 bp, Homo sapien
tagaatttaaatcaacagacattactgaaaatc

SEQ ID NO: 301900 - DNA, 33 bp, Homo sapien
tagaatttaaatcaacggacattactgaaaatc

SEQ ID NO: 301901 - DNA, 33 bp, Homo sapien
cctttgtcaatgctatcaaggtaaaggaaatga

SEQ ID NO: 301902 - DNA, 33 bp, Homo sapien
cctttgtcaatgctattaaggtaaaggaaatga

SEQ ID NO: 301903 - DNA, 33 bp, Homo sapien
actccatttcattatcaccaacagtcaggcttt

SEQ ID NO: 301904 - DNA, 33 bp, Homo sapien
actccatttcattatcgccaacagtcaggcttt

SEQ ID NO: 301905 - DNA, 33 bp, Homo sapien
atgatagacatcctagaataaaatgaacatagg

SEQ ID NO: 301906 - DNA, 33 bp, Homo sapien
atgatagacatcctaggataaaatgaacatagg

SEQ ID NO: 301907 - DNA, 33 bp, Homo sapien
ctgtgtgttaaagcccaaagcattcaatttata

SEQ ID NO: 301908 - DNA, 33 bp, Homo sapien
ctgtgtgttaaagcccgaagcattcaatttata

SEQ ID NO: 301909 - DNA, 33 bp, Homo sapien
tagtgatctaaagggcaaaaatgaaaataacta

SEQ ID NO: 301910 - DNA, 33 bp, Homo sapien
tagtgatctaaagggcgaaaatgaaaataacta

SEQ ID NO: 301911 - DNA, 33 bp, Homo sapien
tttatagccactcaaacttctcacatctgtaca

SEQ ID NO: 301912 - DNA, 33 bp, Homo sapien
tttatagccactcaaatttctcacatctgtaca

SEQ ID NO: 301913 - DNA, 33 bp, Homo sapien
ctcttttgagatgtaaaattttgaagacagcag

SEQ ID NO: 301914 - DNA, 33 bp, Homo sapien
ctcttttgagatgtaagattttgaagacagcag

SEQ ID NO: 301915 - DNA, 33 bp, Homo sapien
agtttgcatgattcatcaagactaaattttata

SEQ ID NO: 301916 - DNA, 33 bp, Homo sapien
agtttgcatgattcatgaagactaaattttata

SEQ ID NO: 301917 - DNA, 33 bp, Homo sapien
tgagtacggatggcctcaagttatgcaggagat

SEQ ID NO: 301918 - DNA, 33 bp, Homo sapien
tgagtacggatggccttaagttatgcaggagat

SEQ ID NO: 301919 - DNA, 33 bp, Homo sapien
ttctgagaggacttggccatctggtttgttttg

SEQ ID NO: 301920 - DNA, 33 bp, Homo sapien
ttctgagaggacttggtcatctggtttgttttg

SEQ ID NO: 301921 - DNA, 33 bp, Homo sapien
gtgtcttatatgaaaaacaacattcaccatggt

SEQ ID NO: 301922 - DNA, 33 bp, Homo sapien
gtgtcttatatgaaaagcaacattcaccatggt

SEQ ID NO: 301923 - DNA, 33 bp, Homo sapien
gaacaggcacaatagacgtttcttggtgaagac

SEQ ID NO: 301924 - DNA, 33 bp, Homo sapien
gaacaggcacaatagatgtttcttggtgaagac

SEQ ID NO: 301925 - DNA, 33 bp, Homo sapien
aatggaacaattcagaaatttcatgtttatgac

SEQ ID NO: 301926 - DNA, 33 bp, Homo sapien
aatggaacaattcagacatttcatgtttatgac

SEQ ID NO: 301927 - DNA, 33 bp, Homo sapien
aaatcattcttgtataaagatgcatgcacatgt

SEQ ID NO: 301928 - DNA, 33 bp, Homo sapien
aaatcattcttgtatagagatgcatgcacatgt

SEQ ID NO: 301929 - DNA, 33 bp, Homo sapien
tctcagaatgagtcaaatgtcatactctaatga

SEQ ID NO: 301930 - DNA, 33 bp, Homo sapien
tctcagaatgagtcaagtgtcatactctaatga

SEQ ID NO: 301931 - DNA, 33 bp, Homo sapien
gtccagatgggctaagacagattacaaatcttt

SEQ ID NO: 301932 - DNA, 33 bp, Homo sapien
gtccagatgggctaaggcagattacaaatcttt

SEQ ID NO: 301933 - DNA, 33 bp, Homo sapien
tcacactgaaataccacgttttacctatcagat

SEQ ID NO: 301934 - DNA, 33 bp, Homo sapien
tcacactgaaataccatgttttacctatcagat

SEQ ID NO: 301935 - DNA, 33 bp, Homo sapien
gtctaaccagtcccaacgaaatgaggtaggtat

SEQ ID NO: 301936 - DNA, 33 bp, Homo sapien
gtctaaccagtcccaatgaaatgaggtaggtat

SEQ ID NO: 301937 - DNA, 33 bp, Homo sapien
aggcatctctaaataacatagtttgcctgatct

SEQ ID NO: 301938 - DNA, 33 bp, Homo sapien
aggcatctctaaataatatagtttgcctgatct

SEQ ID NO: 301939 - DNA, 33 bp, Homo sapien
accttgaaacgctccaaaatttcaatggagtta

SEQ ID NO: 301940 - DNA, 33 bp, Homo sapien
accttgaaacgctccagaatttcaatggagtta

SEQ ID NO: 301941 - DNA, 33 bp, Homo sapien
atctgttcctcttatacatgatttggctccttt

SEQ ID NO: 301942 - DNA, 33 bp, Homo sapien
atctgttcctcttatagatgatttggctccttt

SEQ ID NO: 301943 - DNA, 33 bp, Homo sapien
tgaaatctaacattcgcaacttagagatgcgga

SEQ ID NO: 301944 - DNA, 33 bp, Homo sapien
tgaaatctaacattcgtaacttagagatgcgga

SEQ ID NO: 301945 - DNA, 33 bp, Homo sapien
caaatcagcctatccacaattatgaatagtaag

SEQ ID NO: 301946 - DNA, 33 bp, Homo sapien
caaatcagcctatccagaattatgaatagtaag

SEQ ID NO: 301947 - DNA, 33 bp, Homo sapien
cagtgcattagcttgaagtgctcctgcctggta

SEQ ID NO: 301948 - DNA, 33 bp, Homo sapien
cagtgcattagcttgatgtgctcctgcctggta

SEQ ID NO: 301949 - DNA, 33 bp, Homo sapien
cattggagatgtggaacgtattctggagtcaga

SEQ ID NO: 301950 - DNA, 33 bp, Homo sapien
cattggagatgtggaatgtattctggagtcaga

SEQ ID NO: 301951 - DNA, 33 bp, Homo sapien
tccattcgttgtcgaacactactctgagaccag

SEQ ID NO: 301952 - DNA, 33 bp, Homo sapien
tccattcgttgtcgaatactactctgagaccag

SEQ ID NO: 301953 - DNA, 33 bp, Homo sapien
cagtcacagttgaaaactactgctagaggtgtg

SEQ ID NO: 301954 - DNA, 33 bp, Homo sapien
cagtcacagttgaaaattactgctagaggtgtg

SEQ ID NO: 301955 - DNA, 33 bp, Homo sapien
gaagaacttccaaaacaaccttgctcatggtac

SEQ ID NO: 301956 - DNA, 33 bp, Homo sapien
gaagaacttccaaaaccaccttgctcatggtac

SEQ ID NO: 301957 - DNA, 33 bp, Homo sapien; identical to SEQ ID NO: 301955

SEQ ID NO: 301958 - DNA, 33 bp, Homo sapien; identical to SEQ ID NO: 301956

SEQ ID NO: 301959 - DNA, 33 bp, Homo sapien
catttactgatttgccaccctgaagctctctgg

SEQ ID NO: 301960 - DNA, 33 bp, Homo sapien
catttactgatttgccgccctgaagctctctgg

SEQ ID NO: 301961 - DNA, 33 bp, Homo sapien
gtgaatgagaagggtaagagacttaggactcag

SEQ ID NO: 301962 - DNA, 33 bp, Homo sapien
gtgaatgagaagggtaggagacttaggactcag

SEQ ID NO: 301963 - DNA, 33 bp, Homo sapien
gatttgtggtgacaacacagcatttacttcctg

SEQ ID NO: 301964 - DNA, 33 bp, Homo sapien
gatttgtggtgacaacgcagcatttacttcctg

SEQ ID NO: 301965 - DNA, 33 bp, Homo sapien
ctgtataaaataggagcatgacaaagaaggaaa

SEQ ID NO: 301966 - DNA, 33 bp, Homo sapien
ctgtataaaataggagtatgacaaagaaggaaa

SEQ ID NO: 301967 - DNA, 33 bp, Homo sapien
atttcacaatatccagaagagtgtcccaactct

SEQ ID NO: 301968 - DNA, 33 bp, Homo sapien
atttcacaatatccaggagagtgtcccaactct

SEQ ID NO: 301969 - DNA, 33 bp, Homo sapien
actgggggacattcgaagaacctcgtggggttt

SEQ ID NO: 301970 - DNA, 33 bp, Homo sapien
actgggggacattcgatgaacctcgtggggttt

SEQ ID NO: 301971 - DNA, 33 bp, Homo sapien
tatcaattattaattcccttgtattgctgagaa

SEQ ID NO: 301972 - DNA, 33 bp, Homo sapien
tatcaattattaattctcttgtattgctgagaa

SEQ ID NO: 301973 - DNA, 33 bp, Homo sapien
aggaggaaactctcaaatggtgttacaataaag

SEQ ID NO: 301974 - DNA, 33 bp, Homo sapien
aggaggaaactctcaattggtgttacaataaag

SEQ ID NO: 301975 - DNA, 33 bp, Homo sapien
gagatggcctgaggcaaatagcaggtgactttt

SEQ ID NO: 301976 - DNA, 33 bp, Homo sapien
gagatggcctgaggcagatagcaggtgactttt

SEQ ID NO: 301977 - DNA, 33 bp, Homo sapien
agaatcctttagcagccagaaatttcattgaca

SEQ ID NO: 301978 - DNA, 33 bp, Homo sapien
agaatcctttagcagcgagaaatttcattgaca

SEQ ID NO: 301979 - DNA, 33 bp, Homo sapien
cccatttgctctgagacatagacatcatgcacc

SEQ ID NO: 301980 - DNA, 33 bp, Homo sapien
cccatttgctctgagatatagacatcatgcacc

SEQ ID NO: 301981 - DNA, 33 bp, Homo sapien
atgcatctccaagcacagcagttatgatcatct

SEQ ID NO: 301982 - DNA, 33 bp, Homo sapien
atgcatctccaagcacggcagttatgatcatct

SEQ ID NO: 301983 - DNA, 33 bp, Homo sapien
ggctaggtcatcctcgcagtagctgtaaagttt

SEQ ID NO: 301984 - DNA, 33 bp, Homo sapien
ggctaggtcatcctcgtagtagctgtaaagttt

SEQ ID NO: 301985 - DNA, 33 bp, Homo sapien
tagatgtaaattctcaaccaatatctaacactt

SEQ ID NO: 301986 - DNA, 33 bp, Homo sapien
tagatgtaaattctcagccaatatctaacactt

SEQ ID NO: 301987 - DNA, 33 bp, Homo sapien
agcacatagtgtaacaacttgtctaatgtattt

SEQ ID NO: 301988 - DNA, 33 bp, Homo sapien
agcacatagtgtaacatcttgtctaatgtattt

SEQ ID NO: 301989 - DNA, 33 bp, Homo sapien
tagaatgaagacaaaccccatgagattagtcag

SEQ ID NO: 301990 - DNA, 33 bp, Homo sapien
tagaatgaagacaaactccatgagattagtcag

SEQ ID NO: 301991 - DNA, 33 bp, Homo sapien
gtttttctgattttcacgctgattatttacttt

SEQ ID NO: 301992 - DNA, 33 bp, Homo sapien
gtttttctgattttcaggctgattatttacttt

SEQ ID NO: 301993 - DNA, 33 bp, Homo sapien
attagaggctcgcataacaggttataatttcac

SEQ ID NO: 301994 - DNA, 33 bp, Homo sapien
attagaggctcgcatatcaggttataatttcac

SEQ ID NO: 301995 - DNA, 33 bp, Homo sapien
ctaatgttctttgaaaattgaggtaaagggtag

SEQ ID NO: 301996 - DNA, 33 bp, Homo sapien
ctaatgttctttgaaatttgaggtaaagggtag

SEQ ID NO: 301997 - DNA, 33 bp, Homo sapien
gatataacgcttatggcagatcttgcgtgcagc

SEQ ID NO: 301998 - DNA, 33 bp, Homo sapien
gatataacgcttatggtagatcttgcgtgcagc

SEQ ID NO: 301999 - DNA, 33 bp, Homo sapien
gacatagggaaaaaggccaagaaaatcactgta

SEQ ID NO: 302000 - DNA, 33 bp, Homo sapien
gacatagggaaaaaggtcaagaaaatcactgta

SEQ ID NO: 302001 - DNA, 33 bp, Homo sapien
tgtctttatcacttacaaagacaagcacatttg

SEQ ID NO: 302002 - DNA, 33 bp, Homo sapien
tgtctttatcacttacgaagacaagcacatttg

SEQ ID NO: 302003 - DNA, 33 bp, Homo sapien
tttataggaggtcctgcagtaatttagaaattt

SEQ ID NO: 302004 - DNA, 33 bp, Homo sapien
tttataggaggtcctgtagtaatttagaaattt

SEQ ID NO: 302005 - DNA, 33 bp, Homo sapien
agtcttggacttaatcaaaactctctgctccca

SEQ ID NO: 302006 - DNA, 33 bp, Homo sapien
agtcttggacttaatcgaaactctctgctccca

SEQ ID NO: 302007 - DNA, 33 bp, Homo sapien
gtgcattcctgaaccacaggtcctgattattag

SEQ ID NO: 302008 - DNA, 33 bp, Homo sapien
gtgcattcctgaaccataggtcctgattattag

SEQ ID NO: 302009 - DNA, 33 bp, Homo sapien
gattatttttctgtaacggtgttgagtctagat

SEQ ID NO: 302010 - DNA, 33 bp, Homo sapien
gattatttttctgtaatggtgttgagtctagat

SEQ ID NO: 302011 - DNA, 33 bp, Homo sapien
ctgcagagtagctggaacttttcctggagcaca

SEQ ID NO: 302012 - DNA, 33 bp, Homo sapien
ctgcagagtagctggagcttttcctggagcaca

SEQ ID NO: 302013 - DNA, 33 bp, Homo sapien
atgtgttaatccacaaattggaaaagacctgag

SEQ ID NO: 302014 - DNA, 33 bp, Homo sapien
atgtgttaatccacaagttggaaaagacctgag

SEQ ID NO: 302015 - DNA, 33 bp, Homo sapien
gtatctaacaaatcaactatcaagtctaaatat

SEQ ID NO: 302016 - DNA, 33 bp, Homo sapien
gtatctaacaaatcaagtatcaagtctaaatat

SEQ ID NO: 302017 - DNA, 33 bp, Homo sapien
catagtccctggtgaacgatgataaatgaatct

SEQ ID NO: 302018 - DNA, 33 bp, Homo sapien
catagtccctggtgaatgatgataaatgaatct

SEQ ID NO: 302019 - DNA, 33 bp, Homo sapien
tactggatgccaatgacggttatagttgatgta

SEQ ID NO: 302020 - DNA, 33 bp, Homo sapien
tactggatgccaatgatggttatagttgatgta

SEQ ID NO: 302021 - DNA, 33 bp, Homo sapien
ggtgcgcaatcacagacgaaaaaaaacagccat

SEQ ID NO: 302022 - DNA, 33 bp, Homo sapien
ggtgcgcaatcacagaggaaaaaaaacagccat

SEQ ID NO: 302023 - DNA, 33 bp, Homo sapien
acagcattgcagaaaaagaagcaaattacagct

SEQ ID NO: 302024 - DNA, 33 bp, Homo sapien
acagcattgcagaaaaggaagcaaattacagct

SEQ ID NO: 302025 - DNA, 33 bp, Homo sapien
agttatatggtttcggaaatatgtcacaaaaca

SEQ ID NO: 302026 - DNA, 33 bp, Homo sapien
agttatatggtttcgggaatatgtcacaaaaca

SEQ ID NO: 302027 - DNA, 33 bp, Homo sapien
gtccattactgctaacaaaaggaaacataattt

SEQ ID NO: 302028 - DNA, 33 bp, Homo sapien
gtccattactgctaacgaaaggaaacataattt

SEQ ID NO: 302029 - DNA, 33 bp, Homo sapien
ataaaacctggtcctacgatgctttgagaagaa

SEQ ID NO: 302030 - DNA, 33 bp, Homo sapien
ataaaacctggtcctatgatgctttgagaagaa

SEQ ID NO: 302031 - DNA, 33 bp, Homo sapien
ggttttcaatgaaagcaaatttacaggtgtgca

SEQ ID NO: 302032 - DNA, 33 bp, Homo sapien
ggttttcaatgaaagctaatttacaggtgtgca

SEQ ID NO: 302033 - DNA, 33 bp, Homo sapien
actgcaatggactcacagtcaaaacccatccca

SEQ ID NO: 302034 - DNA, 33 bp, Homo sapien
actgcaatggactcacggtcaaaacccatccca

SEQ ID NO: 302035 - DNA, 33 bp, Homo sapien
agttagcattccagggacagatggacttttcat

SEQ ID NO: 302036 - DNA, 33 bp, Homo sapien
agttagcattccagggtcagatggacttttcat

SEQ ID NO: 302037 - DNA, 33 bp, Homo sapien
atctcttgctctagaacgactgttgggcaagtc

SEQ ID NO: 302038 - DNA, 33 bp, Homo sapien
atctcttgctctagaatgactgttgggcaagtc

SEQ ID NO: 302039 - DNA, 33 bp, Homo sapien
gcaatattcctcttccaaagcttgattaacaaa

SEQ ID NO: 302040 - DNA, 33 bp, Homo sapien
gcaatattcctcttccgaagcttgattaacaaa

SEQ ID NO: 302041 - DNA, 33 bp, Homo sapien
ctgaaagttgaaaatcactgtcagaaaaggaat

SEQ ID NO: 302042 - DNA, 33 bp, Homo sapien
ctgaaagttgaaaatctctgtcagaaaaggaat

SEQ ID NO: 302043 - DNA, 33 bp, Homo sapien
gcacagagctagaaatcattcccttttccctca

SEQ ID NO: 302044 - DNA, 33 bp, Homo sapien
gcacagagctagaaattattcccttttccctca

SEQ ID NO: 302045 - DNA, 33 bp, Homo sapien
gtttctctagcacattaaaacagaaagtgcttg

SEQ ID NO: 302046 - DNA, 33 bp, Homo sapien
gtttctctagcacattgaaacagaaagtgcttg

SEQ ID NO: 302047 - DNA, 33 bp, Homo sapien
acaaattccataaatgacatgagtttctgtgaa

SEQ ID NO: 302048 - DNA, 33 bp, Homo sapien
acaaattccataaatgtcatgagtttctgtgaa

SEQ ID NO: 302049 - DNA, 33 bp, Homo sapien
ttccaggcagtctccaataaaaagaataacaat

SEQ ID NO: 302050 - DNA, 33 bp, Homo sapien
ttccaggcagtctccagtaaaaagaataacaat

SEQ ID NO: 302051 - DNA, 33 bp, Homo sapien
gtcatgccaaagtcctcagaactgactaatgaa

SEQ ID NO: 302052 - DNA, 33 bp, Homo sapien
gtcatgccaaagtccttagaactgactaatgaa

SEQ ID NO: 302053 - DNA, 33 bp, Homo sapien
actggatttatttccaaatggtgttctctaatt

SEQ ID NO: 302054 - DNA, 33 bp, Homo sapien
actggatttatttccagatggtgttctctaatt

SEQ ID NO: 302055 - DNA, 33 bp, Homo sapien
cacctatcaagtatctaacagttttgtatttag

SEQ ID NO: 302056 - DNA, 33 bp, Homo sapien
cacctatcaagtatcttacagttttgtatttag

SEQ ID NO: 302057 - DNA, 33 bp, Homo sapien
aatctctcaaaattcaatcttaaactcctttaa

SEQ ID NO: 302058 - DNA, 33 bp, Homo sapien
aatctctcaaaattcagtcttaaactcctttaa

SEQ ID NO: 302059 - DNA, 33 bp, Homo sapien
gacacattagctgagcactctaagacaactcct

SEQ ID NO: 302060 - DNA, 33 bp, Homo sapien
gacacattagctgagcgctctaagacaactcct

SEQ ID NO: 302061 - DNA, 33 bp, Homo sapien
atgagatgctatttcccgatggaacttttatgg

SEQ ID NO: 302062 - DNA, 33 bp, Homo sapien
atgagatgctatttcctgatggaacttttatgg

SEQ ID NO: 302063 - DNA, 33 bp, Homo sapien
attcttggcatgatcccgaggtagtcgaaggta

SEQ ID NO: 302064 - DNA, 33 bp, Homo sapien
attcttggcatgatcctgaggtagtcgaaggta

SEQ ID NO: 302065 - DNA, 33 bp, Homo sapien
aaaagaaagttcaagagaaaaataacatcaatg

SEQ ID NO: 302066 - DNA, 33 bp, Homo sapien
aaaagaaagttcaagataaaaataacatcaatg

SEQ ID NO: 302067 - DNA, 33 bp, Homo sapien
tatatgttattttctcccacctctccatcaccc

SEQ ID NO: 302068 - DNA, 33 bp, Homo sapien
tatatgttattttctctcacctctccatcaccc

SEQ ID NO: 302069 - DNA, 33 bp, Homo sapien
agggccaagtgataaacgtggacagagtactag

SEQ ID NO: 302070 - DNA, 33 bp, Homo sapien
agggccaagtgataaatgtggacagagtactag

SEQ ID NO: 302071 - DNA, 33 bp, Homo sapien
gttgtgaagtgtctcaaattaggcgaccaacac

SEQ ID NO: 302072 - DNA, 33 bp, Homo sapien
gttgtgaagtgtctcatattaggcgaccaacac

SEQ ID NO: 302073 - DNA, 33 bp, Homo sapien
actgcacttctagactaaagcagagagccaccc

SEQ ID NO: 302074 - DNA, 33 bp, Homo sapien
actgcacttctagactgaagcagagagccaccc

SEQ ID NO: 302075 - DNA, 33 bp, Homo sapien
tgtaagatctaaggaaacagagaacaaaatgtg

SEQ ID NO: 302076 - DNA, 33 bp, Homo sapien
tgtaagatctaaggaatcagagaacaaaatgtg

SEQ ID NO: 302077 - DNA, 33 bp, Homo sapien
agcaaatcagagtgcaatgagaatttaggccat

SEQ ID NO: 302078 - DNA, 33 bp, Homo sapien
agcaaatcagagtgcagtgagaatttaggccat

SEQ ID NO: 302079 - DNA, 33 bp, Homo sapien
gcacacataagtagagaagtttcattcttcgaa

SEQ ID NO: 302080 - DNA, 33 bp, Homo sapien
gcacacataagtagaggagtttcattcttcgaa

SEQ ID NO: 302081 - DNA, 33 bp, Homo sapien
aagtgataaaatgtcaagttaaatgggaaagaa

SEQ ID NO: 302082 - DNA, 33 bp, Homo sapien
aagtgataaaatgtcaggttaaatgggaaagaa

SEQ ID NO: 302083 - DNA, 33 bp, Homo sapien
gggaaaaaagaaatgaccacatgaatgaatgag

SEQ ID NO: 302084 - DNA, 33 bp, Homo sapien
gggaaaaaagaaatgagcacatgaatgaatgag

SEQ ID NO: 302085 - DNA, 33 bp, Homo sapien
atcaacacaatgcacaaggcagaacattagaaa

SEQ ID NO: 302086 - DNA, 33 bp, Homo sapien
atcaacacaatgcacagggcagaacattagaaa

SEQ ID NO: 302087 - DNA, 33 bp, Homo sapien
agtttggttgagaaacagaagttaggctgaaac

SEQ ID NO: 302088 - DNA, 33 bp, Homo sapien
agtttggttgagaaactgaagttaggctgaaac

SEQ ID NO: 302089 - DNA, 33 bp, Homo sapien
aaaatgattgacctcaaaagaataatcctggat

SEQ ID NO: 302090 - DNA, 33 bp, Homo sapien
aaaatgattgacctcagaagaataatcctggat

SEQ ID NO: 302091 - DNA, 33 bp, Homo sapien
gaaggtcaaaattacaatgagagaaagcaggtc

SEQ ID NO: 302092 - DNA, 33 bp, Homo sapien
gaaggtcaaaattacagtgagagaaagcaggtc

SEQ ID NO: 302093 - DNA, 33 bp, Homo sapien
atgaagttattccacacggtaatgttactgata

SEQ ID NO: 302094 - DNA, 33 bp, Homo sapien
atgaagttattccacatggtaatgttactgata

SEQ ID NO: 302095 - DNA, 33 bp, Homo sapien
catctaggaagacgttcaaccaatttatgctgc

SEQ ID NO: 302096 - DNA, 33 bp, Homo sapien
catctaggaagacgtttaaccaatttatgctgc

SEQ ID NO: 302097 - DNA, 33 bp, Homo sapien
ttaaaccaaaatgtctaaaagtgacgatcttca

SEQ ID NO: 302098 - DNA, 33 bp, Homo sapien
ttaaaccaaaatgtctgaaagtgacgatcttca

SEQ ID NO: 302099 - DNA, 33 bp, Homo sapien
tgactctaagtgatgtaaaggtctagatacagg

SEQ ID NO: 302100 - DNA, 33 bp, Homo sapien
tgactctaagtgatgttaaggtctagatacagg

SEQ ID NO: 302101 - DNA, 33 bp, Homo sapien
ggagtatttctaggtacggaatgtgttgtctac

SEQ ID NO: 302102 - DNA, 33 bp, Homo sapien
ggagtatttctaggtatggaatgtgttgtctac

SEQ ID NO: 302103 - DNA, 33 bp, Homo sapien
tggtgggtgacattgcactcctttgtttcttac

SEQ ID NO: 302104 - DNA, 33 bp, Homo sapien
tggtgggtgacattgcgctcctttgtttcttac

SEQ ID NO: 302105 - DNA, 33 bp, Homo sapien
caaattgcttaacttcaatacttcctttcattg

SEQ ID NO: 302106 - DNA, 33 bp, Homo sapien
caaattgcttaacttccatacttcctttcattg

SEQ ID NO: 302107 - DNA, 33 bp, Homo sapien
aaactatcacaaaataaaaatgcttcaactata

SEQ ID NO: 302108 - DNA, 33 bp, Homo sapien
aaactatcacaaaatataaatgcttcaactata

SEQ ID NO: 302109 - DNA, 33 bp, Homo sapien
taacatcattaggacccatccactactgaatca

SEQ ID NO: 302110 - DNA, 33 bp, Homo sapien
taacatcattaggacctatccactactgaatca

SEQ ID NO: 302111 - DNA, 33 bp, Homo sapien
aaagaggacaaacaccaacagtgataaatagaa

SEQ ID NO: 302112 - DNA, 33 bp, Homo sapien
aaagaggacaaacaccgacagtgataaatagaa

SEQ ID NO: 302113 - DNA, 33 bp, Homo sapien
cccccaaataactgaacgcttccagaagggtta

SEQ ID NO: 302114 - DNA, 33 bp, Homo sapien
cccccaaataactgaatgcttccagaagggtta

SEQ ID NO: 302115 - DNA, 33 bp, Homo sapien
agtgctcactcctttacatcatagtcgtaatta

SEQ ID NO: 302116 - DNA, 33 bp, Homo sapien
agtgctcactcctttatatcatagtcgtaatta

SEQ ID NO: 302117 - DNA, 33 bp, Homo sapien
ttacatattccttacactgattaccaaagttat

SEQ ID NO: 302118 - DNA, 33 bp, Homo sapien
ttacatattccttacagtgattaccaaagttat

SEQ ID NO: 302119 - DNA, 33 bp, Homo sapien
gtttctttgcttttaacgagtattgtaccggca

SEQ ID NO: 302120 - DNA, 33 bp, Homo sapien
gtttctttgcttttaatgagtattgtaccggca

SEQ ID NO: 302121 - DNA, 33 bp, Homo sapien
tttatgaatcttcaaaaatagaacagacatgaa

SEQ ID NO: 302122 - DNA, 33 bp, Homo sapien
tttatgaatcttcaaagatagaacagacatgaa

SEQ ID NO: 302123 - DNA, 33 bp, Homo sapien
ttttatattgagcaaacttgattttatgaatct

SEQ ID NO: 302124 - DNA, 33 bp, Homo sapien
ttttatattgagcaaatttgattttatgaatct

SEQ ID NO: 302125 - DNA, 33 bp, Homo sapien
gtaatttgaagaggaccggcaaagttggactta

SEQ ID NO: 302126 - DNA, 33 bp, Homo sapien
gtaatttgaagaggactggcaaagttggactta

SEQ ID NO: 302127 - DNA, 33 bp, Homo sapien
tggtttctataactgccatgaatttgaatcgag

SEQ ID NO: 302128 - DNA, 33 bp, Homo sapien
tggtttctataactgctatgaatttgaatcgag

SEQ ID NO: 302129 - DNA, 33 bp, Homo sapien
tccccggttgctaataccactcagatggtggag

SEQ ID NO: 302130 - DNA, 33 bp, Homo sapien
tccccggttgctaatatcactcagatggtggag

SEQ ID NO: 302131 - DNA, 33 bp, Homo sapien
aaagtttgaggctacaacagaaatgaagtgtgt

SEQ ID NO: 302132 - DNA, 33 bp, Homo sapien
aaagtttgaggctacagcagaaatgaagtgtgt

SEQ ID NO: 302133 - DNA, 33 bp, Homo sapien
cgaggatggatttacacgatcaaggatataaat

SEQ ID NO: 302134 - DNA, 33 bp, Homo sapien
cgaggatggatttacatgatcaaggatataaat

SEQ ID NO: 302135 - DNA, 33 bp, Homo sapien
ggattaaaaagggctaacactgaaatataatta

SEQ ID NO: 302136 - DNA, 33 bp, Homo sapien
ggattaaaaagggctatcactgaaatataatta

SEQ ID NO: 302137 - DNA, 33 bp, Homo sapien
ctgagataatggaatggaagctcaattatgcta

SEQ ID NO: 302138 - DNA, 33 bp, Homo sapien
ctgagataatggaatgtaagctcaattatgcta

SEQ ID NO: 302139 - DNA, 33 bp, Homo sapien
tgttaataggtgctataaccaggattcaaatca

SEQ ID NO: 302140 - DNA, 33 bp, Homo sapien
tgttaataggtgctatgaccaggattcaaatca

SEQ ID NO: 302141 - DNA, 33 bp, Homo sapien
tctattttccagcacaaattatttcagagtgag

SEQ ID NO: 302142 - DNA, 33 bp, Homo sapien
tctattttccagcacagattatttcagagtgag

SEQ ID NO: 302143 - DNA, 33 bp, Homo sapien
aatccttttctctaccaaagtcttaagtccagg

SEQ ID NO: 302144 - DNA, 33 bp, Homo sapien
aatccttttctctaccgaagtcttaagtccagg

SEQ ID NO: 302145 - DNA, 33 bp, Homo sapien
gagatatggaacaaaaatacagaattaggcaac

SEQ ID NO: 302146 - DNA, 33 bp, Homo sapien
gagatatggaacaaaattacagaattaggcaac

SEQ ID NO: 302147 - DNA, 33 bp, Homo sapien
atacaattccttggtaaacaatatgatacagga

SEQ ID NO: 302148 - DNA, 33 bp, Homo sapien
atacaattccttggtacacaatatgatacagga

SEQ ID NO: 302149 - DNA, 33 bp, Homo sapien
tggagaactggttaaacaaattgtggaaatctg

SEQ ID NO: 302150 - DNA, 33 bp, Homo sapien
tggagaactggttaaataaattgtggaaatctg

SEQ ID NO: 302151 - DNA, 33 bp, Homo sapien
ctaccttctcaagtgaaatctgtgaggatctga

SEQ ID NO: 302152 - DNA, 33 bp, Homo sapien
ctaccttctcaagtgatatctgtgaggatctga

SEQ ID NO: 302153 - DNA, 33 bp, Homo sapien
ttaggctcttcttccaaatagatgcctaaagat

SEQ ID NO: 302154 - DNA, 33 bp, Homo sapien
ttaggctcttcttccagatagatgcctaaagat

SEQ ID NO: 302155 - DNA, 33 bp, Homo sapien
caaacatctattcctcaatttaacccaacacca

SEQ ID NO: 302156 - DNA, 33 bp, Homo sapien
caaacatctattcctcgatttaacccaacacca

SEQ ID NO: 302157 - DNA, 33 bp, Homo sapien
gaactgcatgatggttgaaagtgcctcttacaa

SEQ ID NO: 302158 - DNA, 33 bp, Homo sapien
gaactgcatgatggtttaaagtgcctcttacaa

SEQ ID NO: 302159 - DNA, 33 bp, Homo sapien
taattaaattattttcaaagtgtaagtagcaca

SEQ ID NO: 302160 - DNA, 33 bp, Homo sapien
taattaaattattttcgaagtgtaagtagcaca

SEQ ID NO: 302161 - DNA, 33 bp, Homo sapien
aagtttttagttgctacctacttcaaatattca

SEQ ID NO: 302162 - DNA, 33 bp, Homo sapien
aagtttttagttgctatctacttcaaatattca

SEQ ID NO: 302163 - DNA, 33 bp, Homo sapien
aaatgattgaggaaacaatggaataattgaata

SEQ ID NO: 302164 - DNA, 33 bp, Homo sapien
aaatgattgaggaaacgatggaataattgaata

SEQ ID NO: 302165 - DNA, 33 bp, Homo sapien
actgtgtatagctagaactgtaactgagaattt

SEQ ID NO: 302166 - DNA, 33 bp, Homo sapien
actgtgtatagctagacctgtaactgagaattt

SEQ ID NO: 302167 - DNA, 33 bp, Homo sapien
acatctctgacacaaaaggtttgacaagaagca

SEQ ID NO: 302168 - DNA, 33 bp, Homo sapien
acatctctgacacaaacggtttgacaagaagca

SEQ ID NO: 302169 - DNA, 33 bp, Homo sapien
atgtctaatatgaaaaggatgtattctgaatac

SEQ ID NO: 302170 - DNA, 33 bp, Homo sapien
atgtctaatatgaaaatgatgtattctgaatac

SEQ ID NO: 302171 - DNA, 33 bp, Homo sapien
actgaacggttaagtgaatgccaatgtcatatg

SEQ ID NO: 302172 - DNA, 33 bp, Homo sapien
actgaacggttaagtggatgccaatgtcatatg

SEQ ID NO: 302173 - DNA, 33 bp, Homo sapien
attcttggtccccaaacagtttcagcttgccta

SEQ ID NO: 302174 - DNA, 33 bp, Homo sapien
attcttggtccccaaatagtttcagcttgccta

SEQ ID NO: 302175 - DNA, 33 bp, Homo sapien
atcacctattagaaaaacagtagatcatgcccc

SEQ ID NO: 302176 - DNA, 33 bp, Homo sapien
atcacctattagaaaatcagtagatcatgcccc

SEQ ID NO: 302177 - DNA, 33 bp, Homo sapien
tgctttagatcatttgaaagaattggtgaaata

SEQ ID NO: 302178 - DNA, 33 bp, Homo sapien
tgctttagatcatttggaagaattggtgaaata

SEQ ID NO: 302179 - DNA, 33 bp, Homo sapien
cataattagaagacgaatacaactgcattattt

SEQ ID NO: 302180 - DNA, 33 bp, Homo sapien
cataattagaagacgactacaactgcattattt

SEQ ID NO: 302181 - DNA, 33 bp, Homo sapien
aaatttgaagccgaaaagttgaaattagcctga

SEQ ID NO: 302182 - DNA, 33 bp, Homo sapien
aaatttgaagccgaaaggttgaaattagcctga

SEQ ID NO: 302183 - DNA, 33 bp, Homo sapien
gatcacagtgcaaaacacatttcgaatgaaatc

SEQ ID NO: 302184 - DNA, 33 bp, Homo sapien
gatcacagtgcaaaacgcatttcgaatgaaatc

SEQ ID NO: 302185 - DNA, 33 bp, Homo sapien
taatcccctttgctaccacggtggcaataccta

SEQ ID NO: 302186 - DNA, 33 bp, Homo sapien
taatcccctttgctactacggtggcaataccta

SEQ ID NO: 302187 - DNA, 33 bp, Homo sapien
caattggaatcttcccaaaaaaagatgaaattt

SEQ ID NO: 302188 - DNA, 33 bp, Homo sapien
caattggaatcttccccaaaaaagatgaaattt

SEQ ID NO: 302189 - DNA, 33 bp, Homo sapien
gacaaatgacatatcagccaatcttcaatgagc

SEQ ID NO: 302190 - DNA, 33 bp, Homo sapien
gacaaatgacatatcatccaatcttcaatgagc

SEQ ID NO: 302191 - DNA, 33 bp, Homo sapien
ggaatgaagaggctacactgtttggtctctcat

SEQ ID NO: 302192 - DNA, 33 bp, Homo sapien
ggaatgaagaggctacgctgtttggtctctcat

SEQ ID NO: 302193 - DNA, 33 bp, Homo sapien
accctttaccaaagaaactgatcttaccaatta

SEQ ID NO: 302194 - DNA, 33 bp, Homo sapien
accctttaccaaagaacctgatcttaccaatta

SEQ ID NO: 302195 - DNA, 33 bp, Homo sapien
gcgtggatttggattcacaaccaaaagagggaa

SEQ ID NO: 302196 - DNA, 33 bp, Homo sapien
gcgtggatttggattcgcaaccaaaagagggaa

SEQ ID NO: 302197 - DNA, 33 bp, Homo sapien
ttgtgtccagactttaaaaatactacagcaaac

SEQ ID NO: 302198 - DNA, 33 bp, Homo sapien
ttgtgtccagactttagaaatactacagcaaac

SEQ ID NO: 302199 - DNA, 33 bp, Homo sapien
gaatgtttccttttgacggcagaataaatgtgg

SEQ ID NO: 302200 - DNA, 33 bp, Homo sapien
gaatgtttccttttgatggcagaataaatgtgg

SEQ ID NO: 302201 - DNA, 33 bp, Homo sapien
agaggttaagtgattccaagtatttcacacagc

SEQ ID NO: 302202 - DNA, 33 bp, Homo sapien
agaggttaagtgattcgaagtatttcacacagc

SEQ ID NO: 302203 - DNA, 33 bp, Homo sapien
acagagcacagaactcacgctaagaaatgtctg

SEQ ID NO: 302204 - DNA, 33 bp, Homo sapien
acagagcacagaactcgcgctaagaaatgtctg

SEQ ID NO: 302205 - DNA, 33 bp, Homo sapien
tgaacacattaggaacccttcagcgcctttgta

SEQ ID NO: 302206 - DNA, 33 bp, Homo sapien
tgaacacattaggaactcttcagcgcctttgta

SEQ ID NO: 302207 - DNA, 33 bp, Homo sapien
ggtcccatcataacccggaatggatattttgct

SEQ ID NO: 302208 - DNA, 33 bp, Homo sapien
ggtcccatcataaccctgaatggatattttgct

SEQ ID NO: 302209 - DNA, 33 bp, Homo sapien
tgacttccctgagtctcaaaccccaatttgcct

SEQ ID NO: 302210 - DNA, 33 bp, Homo sapien
tgacttccctgagtcttaaaccccaatttgcct

SEQ ID NO: 302211 - DNA, 33 bp, Homo sapien
tctcagcattttgtccactatatatgcttgggt

SEQ ID NO: 302212 - DNA, 33 bp, Homo sapien
tctcagcattttgtccgctatatatgcttgggt

SEQ ID NO: 302213 - DNA, 33 bp, Homo sapien
actatgaggtgaataactaacacttccaactga

SEQ ID NO: 302214 - DNA, 33 bp, Homo sapien
actatgaggtgaataattaacacttccaactga

SEQ ID NO: 302215 - DNA, 33 bp, Homo sapien
ttctgtgtcttccactcagaataaaggctgctg

SEQ ID NO: 302216 - DNA, 33 bp, Homo sapien
ttctgtgtcttccacttagaataaaggctgctg

SEQ ID NO: 302217 - DNA, 33 bp, Homo sapien
agcacagattaaactgaaatggactttagcatt

SEQ ID NO: 302218 - DNA, 33 bp, Homo sapien
agcacagattaaactggaatggactttagcatt

SEQ ID NO: 302219 - DNA, 33 bp, Homo sapien
ggaccttggagtctcccaaaatatggagttctg

SEQ ID NO: 302220 - DNA, 33 bp, Homo sapien
ggaccttggagtctcctaaaatatggagttctg

SEQ ID NO: 302221 - DNA, 33 bp, Homo sapien
tgaggtaattttatgcactccatctaaaagcac

SEQ ID NO: 302222 - DNA, 33 bp, Homo sapien
tgaggtaattttatgcgctccatctaaaagcac

SEQ ID NO: 302223 - DNA, 33 bp, Homo sapien
agttagagggtcaatagataaaatttgaaatga

SEQ ID NO: 302224 - DNA, 33 bp, Homo sapien
agttagagggtcaatatataaaatttgaaatga

SEQ ID NO: 302225 - DNA, 33 bp, Homo sapien
attttgacaagatgcccggatgattcctatatc

SEQ ID NO: 302226 - DNA, 33 bp, Homo sapien
attttgacaagatgcctggatgattcctatatc

SEQ ID NO: 302227 - DNA, 33 bp, Homo sapien
gattcatggcaaggaaaatgccttaggaagcta

SEQ ID NO: 302228 - DNA, 33 bp, Homo sapien
gattcatggcaaggaagatgccttaggaagcta

SEQ ID NO: 302229 - DNA, 33 bp, Homo sapien
ctttgaaaattatcgcaaattctctttttgcca

SEQ ID NO: 302230 - DNA, 33 bp, Homo sapien
ctttgaaaattatcgcgaattctctttttgcca

SEQ ID NO: 302231 - DNA, 33 bp, Homo sapien
ccttaccaactaagccagagattttgtgttaat

SEQ ID NO: 302232 - DNA, 33 bp, Homo sapien
ccttaccaactaagccggagattttgtgttaat

SEQ ID NO: 302233 - DNA, 33 bp, Homo sapien
gaaggccaagaagtggaagtagacagggaaagc

SEQ ID NO: 302234 - DNA, 33 bp, Homo sapien
gaaggccaagaagtgggagtagacagggaaagc

SEQ ID NO: 302235 - DNA, 33 bp, Homo sapien
cgatgcaggattataactcttagctctcaagtg

SEQ ID NO: 302236 - DNA, 33 bp, Homo sapien
cgatgcaggattataattcttagctctcaagtg

SEQ ID NO: 302237 - DNA, 33 bp, Homo sapien
ctatggccaaacataacggggaaatcctaaagc

SEQ ID NO: 302238 - DNA, 33 bp, Homo sapien
ctatggccaaacataatggggaaatcctaaagc

SEQ ID NO: 302239 - DNA, 33 bp, Homo sapien
gaaacagggaaggaaaaaacttcagctgaagtg

SEQ ID NO: 302240 - DNA, 33 bp, Homo sapien
gaaacagggaaggaaacaacttcagctgaagtg

SEQ ID NO: 302241 - DNA, 33 bp, Homo sapien
aaatgattaatgacaaacttgctttataactat

SEQ ID NO: 302242 - DNA, 33 bp, Homo sapien
aaatgattaatgacaagcttgctttataactat

SEQ ID NO: 302243 - DNA, 33 bp, Homo sapien
ttacaccaaatagcaacaagcagagtcttcaag

SEQ ID NO: 302244 - DNA, 33 bp, Homo sapien
ttacaccaaatagcaagaagcagagtcttcaag

SEQ ID NO: 302245 - DNA, 33 bp, Homo sapien
gctcagggaagaaacaactgtcaggaagatgtg

SEQ ID NO: 302246 - DNA, 33 bp, Homo sapien
gctcagggaagaaacagctgtcaggaagatgtg

SEQ ID NO: 302247 - DNA, 33 bp, Homo sapien
gccattggtgttgggagcatcattacttctcct

SEQ ID NO: 302248 - DNA, 33 bp, Homo sapien
gccattggtgttgggatcatcattacttctcct

SEQ ID NO: 302249 - DNA, 33 bp, Homo sapien
tctgtaggatgactcaaatatggtgtccatatt

SEQ ID NO: 302250 - DNA, 33 bp, Homo sapien
tctgtaggatgactcagatatggtgtccatatt

SEQ ID NO: 302251 - DNA, 33 bp, Homo sapien
tttatctgctaaggaaacttggctctggtttat

SEQ ID NO: 302252 - DNA, 33 bp, Homo sapien
tttatctgctaaggaatcttggctctggtttat

SEQ ID NO: 302253 - DNA, 33 bp, Homo sapien
gctttctaacggactaccactgctcaacgattt

SEQ ID NO: 302254 - DNA, 33 bp, Homo sapien
gctttctaacggactatcactgctcaacgattt

SEQ ID NO: 302255 - DNA, 33 bp, Homo sapien
gtgtaaggagttaacaaagatcaaccacagttc

SEQ ID NO: 302256 - DNA, 33 bp, Homo sapien
gtgtaaggagttaacagagatcaaccacagttc

SEQ ID NO: 302257 - DNA, 33 bp, Homo sapien
tcttctaatcaacaaaagctatatacttaagaa

SEQ ID NO: 302258 - DNA, 33 bp, Homo sapien
tcttctaatcaacaaatgctatatacttaagaa

SEQ ID NO: 302259 - DNA, 33 bp, Homo sapien
gaatagaatttacaacacttggtatctacacag

SEQ ID NO: 302260 - DNA, 33 bp, Homo sapien
gaatagaatttacaacgcttggtatctacacag

SEQ ID NO: 302261 - DNA, 33 bp, Homo sapien
aatgctttttgatgaacggacagaaattagtta

SEQ ID NO: 302262 - DNA, 33 bp, Homo sapien
aatgctttttgatgaatggacagaaattagtta

SEQ ID NO: 302263 - DNA, 33 bp, Homo sapien
tacaactatactttcacgcattttactgctgca

SEQ ID NO: 302264 - DNA, 33 bp, Homo sapien
tacaactatactttcatgcattttactgctgca

SEQ ID NO: 302265 - DNA, 33 bp, Homo sapien
agaaccccatgtggacaatcacaggttgagtat

SEQ ID NO: 302266 - DNA, 33 bp, Homo sapien
agaaccccatgtggacgatcacaggttgagtat

SEQ ID NO: 302267 - DNA, 33 bp, Homo sapien
atgattttattgtagaaatggtctggtcaccaa

SEQ ID NO: 302268 - DNA, 33 bp, Homo sapien
atgattttattgtagagatggtctggtcaccaa

SEQ ID NO: 302269 - DNA, 33 bp, Homo sapien
tggggcttcttactaccattagaataaagagca

SEQ ID NO: 302270 - DNA, 33 bp, Homo sapien
tggggcttcttactactattagaataaagagca

SEQ ID NO: 302271 - DNA, 33 bp, Homo sapien
ttcagagacttgttcacacgctataggtgagag

SEQ ID NO: 302272 - DNA, 33 bp, Homo sapien
ttcagagacttgttcatacgctataggtgagag

SEQ ID NO: 302273 - DNA, 33 bp, Homo sapien
gtgtagcttcagaattcaaataccttagaacac

SEQ ID NO: 302274 - DNA, 33 bp, Homo sapien
gtgtagcttcagaatttaaataccttagaacac

SEQ ID NO: 302275 - DNA, 33 bp, Homo sapien
gtataaaagttgaccacatatgacagaatcctg

SEQ ID NO: 302276 - DNA, 33 bp, Homo sapien
gtataaaagttgaccatatatgacagaatcctg

SEQ ID NO: 302277 - DNA, 33 bp, Homo sapien
ttttggtcattgtcaaatagccaaacccaaaca

SEQ ID NO: 302278 - DNA, 33 bp, Homo sapien
ttttggtcattgtcaagtagccaaacccaaaca

SEQ ID NO: 302279 - DNA, 33 bp, Homo sapien
ttttcttctcacaatcagatgagggatttgcct

SEQ ID NO: 302280 - DNA, 33 bp, Homo sapien
ttttcttctcacaatcggatgagggatttgcct

SEQ ID NO: 302281 - DNA, 33 bp, Homo sapien
gttagctccctcgtgacaaggatgtaagtatcc

SEQ ID NO: 302282 - DNA, 33 bp, Homo sapien
gttagctccctcgtgataaggatgtaagtatcc

SEQ ID NO: 302283 - DNA, 33 bp, Homo sapien
agaagtctttgttaaacgagtcaaatgtgctct

SEQ ID NO: 302284 - DNA, 33 bp, Homo sapien
agaagtctttgttaaatgagtcaaatgtgctct

SEQ ID NO: 302285 - DNA, 33 bp, Homo sapien
ggcttagaaatttgtcaactttaggcccatgct

SEQ ID NO: 302286 - DNA, 33 bp, Homo sapien
ggcttagaaatttgtcgactttaggcccatgct

SEQ ID NO: 302287 - DNA, 33 bp, Homo sapien
agagtggaattgaaggccacaaaataaaaatga

SEQ ID NO: 302288 - DNA, 33 bp, Homo sapien
agagtggaattgaagggcacaaaataaaaatga

SEQ ID NO: 302289 - DNA, 33 bp, Homo sapien
ttgaagacgttcatacagataaacaagcttata

SEQ ID NO: 302290 - DNA, 33 bp, Homo sapien
ttgaagacgttcatacggataaacaagcttata

SEQ ID NO: 302291 - DNA, 33 bp, Homo sapien
taaacaacaacgaacactggcagctcagcctct

SEQ ID NO: 302292 - DNA, 33 bp, Homo sapien
taaacaacaacgaacattggcagctcagcctct

SEQ ID NO: 302293 - DNA, 33 bp, Homo sapien
gactttgaatttatcaatcatttgccttcccaa

SEQ ID NO: 302294 - DNA, 33 bp, Homo sapien
gactttgaatttatcagtcatttgccttcccaa

SEQ ID NO: 302295 - DNA, 33 bp, Homo sapien
taattagttcttttaccaaggcaaatggtctaa

SEQ ID NO: 302296 - DNA, 33 bp, Homo sapien
taattagttcttttacgaaggcaaatggtctaa

SEQ ID NO: 302297 - DNA, 33 bp, Homo sapien
tttcttcggttactgcactgtttaactcaatta

SEQ ID NO: 302298 - DNA, 33 bp, Homo sapien
tttcttcggttactgcgctgtttaactcaatta

SEQ ID NO: 302299 - DNA, 33 bp, Homo sapien
ttccactttactagagaaaatgtgctttacatc

SEQ ID NO: 302300 - DNA, 33 bp, Homo sapien
ttccactttactagagcaaatgtgctttacatc

SEQ ID NO: 302301 - DNA, 33 bp, Homo sapien
cattacttgtaatagcaaaatgtccttcacttt

SEQ ID NO: 302302 - DNA, 33 bp, Homo sapien
cattacttgtaatagcgaaatgtccttcacttt

SEQ ID NO: 302303 - DNA, 33 bp, Homo sapien
acaaattgtcaccaaaatatctgtttttcctcc

SEQ ID NO: 302304 - DNA, 33 bp, Homo sapien
acaaattgtcaccaaagtatctgtttttcctcc

SEQ ID NO: 302305 - DNA, 33 bp, Homo sapien
tgtatgtgtaggctcaatcttgaagacagcaat

SEQ ID NO: 302306 - DNA, 33 bp, Homo sapien
tgtatgtgtaggctcagtcttgaagacagcaat

SEQ ID NO: 302307 - DNA, 33 bp, Homo sapien
gagtcaccctacccaacattggatgagagagct

SEQ ID NO: 302308 - DNA, 33 bp, Homo sapien
gagtcaccctacccaatattggatgagagagct

SEQ ID NO: 302309 - DNA, 33 bp, Homo sapien
gataaacaccttcaaaggcagatttctgaagat

SEQ ID NO: 302310 - DNA, 33 bp, Homo sapien
gataaacaccttcaaatgcagatttctgaagat

SEQ ID NO: 302311 - DNA, 33 bp, Homo sapien
cagaagctaacattgcagaattgttataaaagt

SEQ ID NO: 302312 - DNA, 33 bp, Homo sapien
cagaagctaacattgcggaattgttataaaagt

SEQ ID NO: 302313 - DNA, 33 bp, Homo sapien
tgaatgaatgtccaacaaaaaaactttcaatga

SEQ ID NO: 302314 - DNA, 33 bp, Homo sapien
tgaatgaatgtccaacgaaaaaactttcaatga

SEQ ID NO: 302315 - DNA, 33 bp, Homo sapien
ttggtttggtgaaatactagtgaatcacatcaa

SEQ ID NO: 302316 - DNA, 33 bp, Homo sapien
ttggtttggtgaaatagtagtgaatcacatcaa

SEQ ID NO: 302317 - DNA, 33 bp, Homo sapien
gtctttcttttgttaacggctggtatttttgtg

SEQ ID NO: 302318 - DNA, 33 bp, Homo sapien
gtctttcttttgttaatggctggtatttttgtg

SEQ ID NO: 302319 - DNA, 33 bp, Homo sapien
aggtgactcttcacaaactattggaaagcctca

SEQ ID NO: 302320 - DNA, 33 bp, Homo sapien
aggtgactcttcacaagctattggaaagcctca

SEQ ID NO: 302321 - DNA, 33 bp, Homo sapien
catgagtgctccagaagccccttaattaatctt

SEQ ID NO: 302322 - DNA, 33 bp, Homo sapien
catgagtgctccagaatccccttaattaatctt

SEQ ID NO: 302323 - DNA, 33 bp, Homo sapien
gatgacctggagaatagacagcatactccgtag

SEQ ID NO: 302324 - DNA, 33 bp, Homo sapien
gatgacctggagaatatacagcatactccgtag

SEQ ID NO: 302325 - DNA, 33 bp, Homo sapien
ctcttctggactaacaaccatttcatagaaagt

SEQ ID NO: 302326 - DNA, 33 bp, Homo sapien
ctcttctggactaacatccatttcatagaaagt

SEQ ID NO: 302327 - DNA, 33 bp, Homo sapien
gcagaaattgaaaacaccaactttaggcctacc

SEQ ID NO: 302328 - DNA, 33 bp, Homo sapien
gcagaaattgaaaacatcaactttaggcctacc

SEQ ID NO: 302329 - DNA, 33 bp, Homo sapien
catctgaaaaatcaaggctaattccaaagttct

SEQ ID NO: 302330 - DNA, 33 bp, Homo sapien
catctgaaaaatcaagtctaattccaaagttct

SEQ ID NO: 302331 - DNA, 33 bp, Homo sapien
caggagactgagaaaaaacatgaggagtagtac

SEQ ID NO: 302332 - DNA, 33 bp, Homo sapien
caggagactgagaaaacacatgaggagtagtac

SEQ ID NO: 302333 - DNA, 33 bp, Homo sapien
gctacaaaagcatataaactttttcagaaacta

SEQ ID NO: 302334 - DNA, 33 bp, Homo sapien
gctacaaaagcatatacactttttcagaaacta

SEQ ID NO: 302335 - DNA, 33 bp, Homo sapien
aagtcaaacaagtgtcgattcgggttccagagt

SEQ ID NO: 302336 - DNA, 33 bp, Homo sapien
aagtcaaacaagtgtctattcgggttccagagt

SEQ ID NO: 302337 - DNA, 33 bp, Homo sapien
acaacgcagcagagtcacacagcccacacattt

SEQ ID NO: 302338 - DNA, 33 bp, Homo sapien
acaacgcagcagagtcgcacagcccacacattt

SEQ ID NO: 302339 - DNA, 33 bp, Homo sapien
agagattgctattttcgaaatcccaaagtgaac

SEQ ID NO: 302340 - DNA, 33 bp, Homo sapien
agagattgctattttctaaatcccaaagtgaac

SEQ ID NO: 302341 - DNA, 33 bp, Homo sapien
cctctcactcctattacacactgaagtcaaatc

SEQ ID NO: 302342 - DNA, 33 bp, Homo sapien
cctctcactcctattagacactgaagtcaaatc

SEQ ID NO: 302343 - DNA, 33 bp, Homo sapien
atcagctaacagctaccgtaatatgaaccttaa

SEQ ID NO: 302344 - DNA, 33 bp, Homo sapien
atcagctaacagctactgtaatatgaaccttaa

SEQ ID NO: 302345 - DNA, 33 bp, Homo sapien
caaagaaaagtgaactgagggttggactcctcc

SEQ ID NO: 302346 - DNA, 33 bp, Homo sapien
caaagaaaagtgaacttagggttggactcctcc

SEQ ID NO: 302347 - DNA, 33 bp, Homo sapien
tttcagtaactcctgaaataacctgggtaaggc

SEQ ID NO: 302348 - DNA, 33 bp, Homo sapien
tttcagtaactcctgacataacctgggtaaggc

SEQ ID NO: 302349 - DNA, 33 bp, Homo sapien
ttcccttctcacaaaacccgactggctcattca

SEQ ID NO: 302350 - DNA, 33 bp, Homo sapien
ttcccttctcacaaaatccgactggctcattca

SEQ ID NO: 302351 - DNA, 33 bp, Homo sapien
aacttttagttagaaacgagatgaaaacaggga

SEQ ID NO: 302352 - DNA, 33 bp, Homo sapien
aacttttagttagaaatgagatgaaaacaggga

SEQ ID NO: 302353 - DNA, 33 bp, Homo sapien
cttacattggcagttaaattttcacgttctata

SEQ ID NO: 302354 - DNA, 33 bp, Homo sapien
cttacattggcagttagattttcacgttctata

SEQ ID NO: 302355 - DNA, 33 bp, Homo sapien
tctaaccatacacttacaatcagtgaattgcac

SEQ ID NO: 302356 - DNA, 33 bp, Homo sapien
tctaaccatacacttataatcagtgaattgcac

SEQ ID NO: 302357 - DNA, 33 bp, Homo sapien
attaacccccacaacactacgctaagtaaaagc

SEQ ID NO: 302358 - DNA, 33 bp, Homo sapien
attaacccccacaacattacgctaagtaaaagc

SEQ ID NO: 302359 - DNA, 33 bp, Homo sapien
aggttccccagggacaactttcaccttcagtct

SEQ ID NO: 302360 - DNA, 33 bp, Homo sapien
aggttccccagggacatctttcaccttcagtct

SEQ ID NO: 302361 - DNA, 33 bp, Homo sapien
tgcagtccatcactataagaataaactgcctgg

SEQ ID NO: 302362 - DNA, 33 bp, Homo sapien
tgcagtccatcactatcagaataaactgcctgg

SEQ ID NO: 302363 - DNA, 33 bp, Homo sapien
atcttttttctattgaatagccttgacacctct

SEQ ID NO: 302364 - DNA, 33 bp, Homo sapien
atcttttttctattgagtagccttgacacctct

SEQ ID NO: 302365 - DNA, 33 bp, Homo sapien
caaggtgcttgcgaaagaaatctaaaaatagag

SEQ ID NO: 302366 - DNA, 33 bp, Homo sapien
caaggtgcttgcgaaataaatctaaaaatagag

SEQ ID NO: 302367 - DNA, 33 bp, Homo sapien
ggacgatgagaaaaaaagaaagcaggagggagt

SEQ ID NO: 302368 - DNA, 33 bp, Homo sapien
ggacgatgagaaaaaacgaaagcaggagggagt

SEQ ID NO: 302369 - DNA, 33 bp, Homo sapien
agaccactcgtaaatagctattggcactgtggg

SEQ ID NO: 302370 - DNA, 33 bp, Homo sapien
agaccactcgtaaatatctattggcactgtggg

SEQ ID NO: 302371 - DNA, 33 bp, Homo sapien
gcctgattgtagaacccgaactcttcttgtcat

SEQ ID NO: 302372 - DNA, 33 bp, Homo sapien
gcctgattgtagaacctgaactcttcttgtcat

SEQ ID NO: 302373 - DNA, 33 bp, Homo sapien
acaaattacctatgctcaagaaggttccatcct

SEQ ID NO: 302374 - DNA, 33 bp, Homo sapien
acaaattacctatgcttaagaaggttccatcct

SEQ ID NO: 302375 - DNA, 33 bp, Homo sapien
gggttccatgactagcactctcttcagaaggtt

SEQ ID NO: 302376 - DNA, 33 bp, Homo sapien
gggttccatgactagccctctcttcagaaggtt

SEQ ID NO: 302377 - DNA, 33 bp, Homo sapien
ggtgaaggatcttctacggttttagtgcagcaa

SEQ ID NO: 302378 - DNA, 33 bp, Homo sapien
ggtgaaggatcttctatggttttagtgcagcaa

SEQ ID NO: 302379 - DNA, 33 bp, Homo sapien
gaaaacttggagccaactggaccaggagaaaac

SEQ ID NO: 302380 - DNA, 33 bp, Homo sapien
gaaaacttggagccaattggaccaggagaaaac

SEQ ID NO: 302381 - DNA, 33 bp, Homo sapien
gagaaataagcaacacactattttttttcaata

SEQ ID NO: 302382 - DNA, 33 bp, Homo sapien
gagaaataagcaacacgctattttttttcaata

SEQ ID NO: 302383 - DNA, 33 bp, Homo sapien
actctgtcaaatgtcacgggagagccctgaaga

SEQ ID NO: 302384 - DNA, 33 bp, Homo sapien
actctgtcaaatgtcatgggagagccctgaaga

SEQ ID NO: 302385 - DNA, 33 bp, Homo sapien
ctaggacatggctgccgctttatccaccctctg

SEQ ID NO: 302386 - DNA, 33 bp, Homo sapien
ctaggacatggctgcctctttatccaccctctg

SEQ ID NO: 302387 - DNA, 33 bp, Homo sapien
ttccaggcaaacaagccacggattggtggggat

SEQ ID NO: 302388 - DNA, 33 bp, Homo sapien
ttccaggcaaacaagctacggattggtggggat

SEQ ID NO: 302389 - DNA, 33 bp, Homo sapien
tccatttggcactgtccgaaaaccccaacttta

SEQ ID NO: 302390 - DNA, 33 bp, Homo sapien
tccatttggcactgtctgaaaaccccaacttta

SEQ ID NO: 302391 - DNA, 33 bp, Homo sapien
ccccttgacaatgaaacccttaaggcagtgggt

SEQ ID NO: 302392 - DNA, 33 bp, Homo sapien
ccccttgacaatgaaatccttaaggcagtgggt

SEQ ID NO: 302393 - DNA, 33 bp, Homo sapien
ggcagtacggcatcacaggcaaatgtagtctta

SEQ ID NO: 302394 - DNA, 33 bp, Homo sapien
ggcagtacggcatcacgggcaaatgtagtctta

SEQ ID NO: 302395 - DNA, 33 bp, Homo sapien
gccagcatggttcacaatgggaaggtggaccac

SEQ ID NO: 302396 - DNA, 33 bp, Homo sapien
gccagcatggttcacagtgggaaggtggaccac

SEQ ID NO: 302397 - DNA, 33 bp, Homo sapien
actgcatattcatgtgaaactattcctatagga

SEQ ID NO: 302398 - DNA, 33 bp, Homo sapien
actgcatattcatgtgtaactattcctatagga

SEQ ID NO: 302399 - DNA, 33 bp, Homo sapien
ttgggatatgtaggccacttactgtatttggaa

SEQ ID NO: 302400 - DNA, 33 bp, Homo sapien
ttgggatatgtaggccgcttactgtatttggaa

SEQ ID NO: 302401 - DNA, 33 bp, Homo sapien
actaaatcagagtttagagggtaaagtccagga

SEQ ID NO: 302402 - DNA, 33 bp, Homo sapien
actaaatcagagtttatagggtaaagtccagga

SEQ ID NO: 302403 - DNA, 33 bp, Homo sapien
cataaagcaccaaagaagacttttcaaagttgt

SEQ ID NO: 302404 - DNA, 33 bp, Homo sapien
cataaagcaccaaagacgacttttcaaagttgt

SEQ ID NO: 302405 - DNA, 33 bp, Homo sapien
gagagggcttttatgcagcagtgacaagagaac

SEQ ID NO: 302406 - DNA, 33 bp, Homo sapien
gagagggcttttatgcggcagtgacaagagaac

SEQ ID NO: 302407 - DNA, 33 bp, Homo sapien
tgatgtatccatttgacagttcaggtttagttc

SEQ ID NO: 302408 - DNA, 33 bp, Homo sapien
tgatgtatccatttgatagttcaggtttagttc

SEQ ID NO: 302409 - DNA, 33 bp, Homo sapien
gtagtctccaggtaaagccaggttaaatgatag

SEQ ID NO: 302410 - DNA, 33 bp, Homo sapien
gtagtctccaggtaaatccaggttaaatgatag

SEQ ID NO: 302411 - DNA, 33 bp, Homo sapien
attcaatacagcccaccggctatggaaatggca

SEQ ID NO: 302412 - DNA, 33 bp, Homo sapien
attcaatacagcccactggctatggaaatggca

SEQ ID NO: 302413 - DNA, 33 bp, Homo sapien
aagcagttatttttcaacaggagaaaatgcagc

SEQ ID NO: 302414 - DNA, 33 bp, Homo sapien
aagcagttatttttcagcaggagaaaatgcagc

SEQ ID NO: 302415 - DNA, 33 bp, Homo sapien
ctagtgaatgtcttccgaaaaaaatcccaggag

SEQ ID NO: 302416 - DNA, 33 bp, Homo sapien
ctagtgaatgtcttcctaaaaaaatcccaggag

SEQ ID NO: 302417 - DNA, 33 bp, Homo sapien
catatgacacccttcaaacagtacagtatgtca

SEQ ID NO: 302418 - DNA, 33 bp, Homo sapien
catatgacacccttcagacagtacagtatgtca

SEQ ID NO: 302419 - DNA, 33 bp, Homo sapien
ttcttttctctatcaccgtaggccctgatatag

SEQ ID NO: 302420 - DNA, 33 bp, Homo sapien
ttcttttctctatcactgtaggccctgatatag

SEQ ID NO: 302421 - DNA, 33 bp, Homo sapien
aagaaagtacaggacacagcatgccttattaat

SEQ ID NO: 302422 - DNA, 33 bp, Homo sapien
aagaaagtacaggacagagcatgccttattaat

SEQ ID NO: 302423 - DNA, 33 bp, Homo sapien
ctcatccctgaaaaaaacattgttcacacacac

SEQ ID NO: 302424 - DNA, 33 bp, Homo sapien
ctcatccctgaaaaaatcattgttcacacacac

SEQ ID NO: 302425 - DNA, 33 bp, Homo sapien
ttatgcttttttgaaactagtgcatcattcttt

SEQ ID NO: 302426 - DNA, 33 bp, Homo sapien
ttatgcttttttgaaattagtgcatcattcttt

SEQ ID NO: 302427 - DNA, 33 bp, Homo sapien
tgtctatcagaacaaacacagattttacacatc

SEQ ID NO: 302428 - DNA, 33 bp, Homo sapien
tgtctatcagaacaaatacagattttacacatc

SEQ ID NO: 302429 - DNA, 33 bp, Homo sapien
ttttatgaatgggaagacatgggatagcagagg

SEQ ID NO: 302430 - DNA, 33 bp, Homo sapien
ttttatgaatgggaaggcatgggatagcagagg

SEQ ID NO: 302431 - DNA, 33 bp, Homo sapien
atctgctgagcaactacaggaaataatgtttgc

SEQ ID NO: 302432 - DNA, 33 bp, Homo sapien
atctgctgagcaactataggaaataatgtttgc

SEQ ID NO: 302433 - DNA, 33 bp, Homo sapien
gggtggaattccttacaaacacagttaaaggaa

SEQ ID NO: 302434 - DNA, 33 bp, Homo sapien
gggtggaattccttacgaacacagttaaaggaa

SEQ ID NO: 302435 - DNA, 33 bp, Homo sapien
caggtgccactgattcacatttttatggatggt

SEQ ID NO: 302436 - DNA, 33 bp, Homo sapien
caggtgccactgattcgcatttttatggatggt

SEQ ID NO: 302437 - DNA, 33 bp, Homo sapien
agattggcaaaataaacatccttgttatctatc

SEQ ID NO: 302438 - DNA, 33 bp, Homo sapien
agattggcaaaataaatatccttgttatctatc

SEQ ID NO: 302439 - DNA, 33 bp, Homo sapien
tctaatgatttcagaaacattgctgtaaaaggt

SEQ ID NO: 302440 - DNA, 33 bp, Homo sapien
tctaatgatttcagaagcattgctgtaaaaggt

SEQ ID NO: 302441 - DNA, 33 bp, Homo sapien
agtaagtgctgaacaaatctgtttgaaacatat

SEQ ID NO: 302442 - DNA, 33 bp, Homo sapien
agtaagtgctgaacaagtctgtttgaaacatat

SEQ ID NO: 302443 - DNA, 33 bp, Homo sapien
ttagtagtccttgtcaaaaaaacagtgcctctc

SEQ ID NO: 302444 - DNA, 33 bp, Homo sapien
ttagtagtccttgtcagaaaaacagtgcctctc

SEQ ID NO: 302445 - DNA, 33 bp, Homo sapien
gtatgtcagctcagtgaatgatcaagttccagc

SEQ ID NO: 302446 - DNA, 33 bp, Homo sapien
gtatgtcagctcagtggatgatcaagttccagc

SEQ ID NO: 302447 - DNA, 33 bp, Homo sapien
cagaagtaattcacaaatgggtaattcaagagc

SEQ ID NO: 302448 - DNA, 33 bp, Homo sapien
cagaagtaattcacaagtgggtaattcaagagc

SEQ ID NO: 302449 - DNA, 33 bp, Homo sapien
ttaatactttaaaccaaatcacctgttattata

SEQ ID NO: 302450 - DNA, 33 bp, Homo sapien
ttaatactttaaaccatatcacctgttattata

SEQ ID NO: 302451 - DNA, 33 bp, Homo sapien
tgctgggatggtgtggacaaatagcttttaata

SEQ ID NO: 302452 - DNA, 33 bp, Homo sapien
tgctgggatggtgtgggcaaatagcttttaata

SEQ ID NO: 302453 - DNA, 33 bp, Homo sapien
ggcatatggtgtaatagaatagaaatggagact

SEQ ID NO: 302454 - DNA, 33 bp, Homo sapien
ggcatatggtgtaatataatagaaatggagact

SEQ ID NO: 302455 - DNA, 33 bp, Homo sapien
tgggttcaagaggctacatcattgaaagccaca

SEQ ID NO: 302456 - DNA, 33 bp, Homo sapien
tgggttcaagaggctatatcattgaaagccaca

SEQ ID NO: 302457 - DNA, 33 bp, Homo sapien
taaaagctatactatacggcaccctaacacttt

SEQ ID NO: 302458 - DNA, 33 bp, Homo sapien
taaaagctatactatatggcaccctaacacttt

SEQ ID NO: 302459 - DNA, 33 bp, Homo sapien
ctaacaatgatcttatgaaattggcaagctttc

SEQ ID NO: 302460 - DNA, 33 bp, Homo sapien
ctaacaatgatcttattaaattggcaagctttc

SEQ ID NO: 302461 - DNA, 33 bp, Homo sapien
attttgaaggcaggtcagaattctccgctagca

SEQ ID NO: 302462 - DNA, 33 bp, Homo sapien
attttgaaggcaggtcggaattctccgctagca

SEQ ID NO: 302463 - DNA, 33 bp, Homo sapien
gaagagtgtaacagaagatcatgagcgaggata

SEQ ID NO: 302464 - DNA, 33 bp, Homo sapien
gaagagtgtaacagaatatcatgagcgaggata

SEQ ID NO: 302465 - DNA, 33 bp, Homo sapien
aagaggaagacagaaacgtgactttgggctcat

SEQ ID NO: 302466 - DNA, 33 bp, Homo sapien
aagaggaagacagaaatgtgactttgggctcat

SEQ ID NO: 302467 - DNA, 33 bp, Homo sapien
aatctcaaactttccacgataaagtgagaggag

SEQ ID NO: 302468 - DNA, 33 bp, Homo sapien
aatctcaaactttccatgataaagtgagaggag

SEQ ID NO: 302469 - DNA, 33 bp, Homo sapien
gaatgtagctggttaccggttgagtcaaaaccc

SEQ ID NO: 302470 - DNA, 33 bp, Homo sapien
gaatgtagctggttacgggttgagtcaaaaccc

SEQ ID NO: 302471 - DNA, 33 bp, Homo sapien
tttcctttttgagcaactcttctacaaccctgt

SEQ ID NO: 302472 - DNA, 33 bp, Homo sapien
tttcctttttgagcaattcttctacaaccctgt

SEQ ID NO: 302473 - DNA, 33 bp, Homo sapien
aggatttcgatattagaagtagtgtgaccacta

SEQ ID NO: 302474 - DNA, 33 bp, Homo sapien
aggatttcgatattaggagtagtgtgaccacta

SEQ ID NO: 302475 - DNA, 33 bp, Homo sapien
cacagcacctgaaatcaaagcccatacataccc

SEQ ID NO: 302476 - DNA, 33 bp, Homo sapien
cacagcacctgaaatcgaagcccatacataccc

SEQ ID NO: 302477 - DNA, 33 bp, Homo sapien
gaattatcttaaaatccgaactggtgaaatcag

SEQ ID NO: 302478 - DNA, 33 bp, Homo sapien
gaattatcttaaaatctgaactggtgaaatcag

SEQ ID NO: 302479 - DNA, 33 bp, Homo sapien
ggttaaatctgtgagacatggcttccatctgga

SEQ ID NO: 302480 - DNA, 33 bp, Homo sapien
ggttaaatctgtgagatatggcttccatctgga

SEQ ID NO: 302481 - DNA, 33 bp, Homo sapien
cagggaaagctttataacgactcatatattaga

SEQ ID NO: 302482 - DNA, 33 bp, Homo sapien
cagggaaagctttatagcgactcatatattaga

SEQ ID NO: 302483 - DNA, 33 bp, Homo sapien
tcaggcttacctgtggaactgttcttctaaaag

SEQ ID NO: 302484 - DNA, 33 bp, Homo sapien
tcaggcttacctgtgggactgttcttctaaaag

SEQ ID NO: 302485 - DNA, 33 bp, Homo sapien
ctggatacaagttcagcactaaatggttctcca

SEQ ID NO: 302486 - DNA, 33 bp, Homo sapien
ctggatacaagttcagtactaaatggttctcca

SEQ ID NO: 302487 - DNA, 33 bp, Homo sapien
ctgccagaggagcccaagcctttccatcaggac

SEQ ID NO: 302488 - DNA, 33 bp, Homo sapien
ctgccagaggagcccaggcctttccatcaggac

SEQ ID NO: 302489 - DNA, 33 bp, Homo sapien
aatgaaaatactgcaccgagggttatcaacagc

SEQ ID NO: 302490 - DNA, 33 bp, Homo sapien
aatgaaaatactgcactgagggttatcaacagc

SEQ ID NO: 302491 - DNA, 33 bp, Homo sapien
attttgttctcaggccagatgctcagtaaatag

SEQ ID NO: 302492 - DNA, 33 bp, Homo sapien
attttgttctcaggccggatgctcagtaaatag

SEQ ID NO: 302493 - DNA, 33 bp, Homo sapien
agctacctaatatgcgcagagctctcgtgaaag

SEQ ID NO: 302494 - DNA, 33 bp, Homo sapien
agctacctaatatgcgtagagctctcgtgaaag

SEQ ID NO: 302495 - DNA, 33 bp, Homo sapien
ctttctatgagcatcaaatgtgatactggatgg

SEQ ID NO: 302496 - DNA, 33 bp, Homo sapien
ctttctatgagcatcagatgtgatactggatgg

SEQ ID NO: 302497 - DNA, 33 bp, Homo sapien
gtttgatgagaaactaagtgatttactagtaag

SEQ ID NO: 302498 - DNA, 33 bp, Homo sapien
gtttgatgagaaactacgtgatttactagtaag

SEQ ID NO: 302499 - DNA, 33 bp, Homo sapien
cattgctctcaccgtcaatccctaactctgaac

SEQ ID NO: 302500 - DNA, 33 bp, Homo sapien
cattgctctcaccgtccatccctaactctgaac

SEQ ID NO: 302501 - DNA, 33 bp, Homo sapien
aaaaagaagataacacaagtataatgttttcca

SEQ ID NO: 302502 - DNA, 33 bp, Homo sapien
aaaaagaagataacacgagtataatgttttcca

SEQ ID NO: 302503 - DNA, 33 bp, Homo sapien
ggctgcttgtctccacccgtgggttttgttttg

SEQ ID NO: 302504 - DNA, 33 bp, Homo sapien
ggctgcttgtctccacgcgtgggttttgttttg

SEQ ID NO: 302505 - DNA, 33 bp, Homo sapien
taggatggtcagggaacacctcgtgaaaggtct

SEQ ID NO: 302506 - DNA, 33 bp, Homo sapien
taggatggtcagggaagacctcgtgaaaggtct

SEQ ID NO: 302507 - DNA, 33 bp, Homo sapien
tgcttctggtaagataagtgatttgagtagtta

SEQ ID NO: 302508 - DNA, 33 bp, Homo sapien
tgcttctggtaagatacgtgatttgagtagtta

SEQ ID NO: 302509 - DNA, 33 bp, Homo sapien
cagtggttaaatttgaagaggtgaagaaaagtc

SEQ ID NO: 302510 - DNA, 33 bp, Homo sapien
cagtggttaaatttgacgaggtgaagaaaagtc

SEQ ID NO: 302511 - DNA, 33 bp, Homo sapien
tacctgcccatgaaacaaatacagggtaagtca

SEQ ID NO: 302512 - DNA, 33 bp, Homo sapien
tacctgcccatgaaacgaatacagggtaagtca

SEQ ID NO: 302513 - DNA, 33 bp, Homo sapien
cacagagccttaattacacaccatctctttgct

SEQ ID NO: 302514 - DNA, 33 bp, Homo sapien
cacagagccttaattatacaccatctctttgct

SEQ ID NO: 302515 - DNA, 33 bp, Homo sapien
tccctgacagccagaacaattgccaacacatag

SEQ ID NO: 302516 - DNA, 33 bp, Homo sapien
tccctgacagccagaagaattgccaacacatag

SEQ ID NO: 302517 - DNA, 33 bp, Homo sapien
ttatagccacataataagtccacaattgatggc

SEQ ID NO: 302518 - DNA, 33 bp, Homo sapien
ttatagccacataataggtccacaattgatggc

SEQ ID NO: 302519 - DNA, 33 bp, Homo sapien
agcttttaagttttaaccaggccaaaggagatc

SEQ ID NO: 302520 - DNA, 33 bp, Homo sapien
agcttttaagttttaatcaggccaaaggagatc

SEQ ID NO: 302521 - DNA, 33 bp, Homo sapien
gaatgttttgcaaacacaactcgataatttgaa

SEQ ID NO: 302522 - DNA, 33 bp, Homo sapien
gaatgttttgcaaacagaactcgataatttgaa

SEQ ID NO: 302523 - DNA, 33 bp, Homo sapien
aagtaaaagagaacagcattgtcagagaaaaat

SEQ ID NO: 302524 - DNA, 33 bp, Homo sapien
aagtaaaagagaacagtattgtcagagaaaaat

SEQ ID NO: 302525 - DNA, 33 bp, Homo sapien
ttacgtgacaaatcaccccttccagatgcatta

SEQ ID NO: 302526 - DNA, 33 bp, Homo sapien
ttacgtgacaaatcacgccttccagatgcatta

SEQ ID NO: 302527 - DNA, 33 bp, Homo sapien
ggcaaatcatattacactgatgactcctttgtt

SEQ ID NO: 302528 - DNA, 33 bp, Homo sapien
ggcaaatcatattacattgatgactcctttgtt

SEQ ID NO: 302529 - DNA, 33 bp, Homo sapien
ttctagggcaagaacaaaagagaatctaagcgc

SEQ ID NO: 302530 - DNA, 33 bp, Homo sapien
ttctagggcaagaacagaagagaatctaagcgc

SEQ ID NO: 302531 - DNA, 33 bp, Homo sapien
ctttgaaaaggacatacaattcctcacaagcat

SEQ ID NO: 302532 - DNA, 33 bp, Homo sapien
ctttgaaaaggacatagaattcctcacaagcat

SEQ ID NO: 302533 - DNA, 33 bp, Homo sapien
tgattgaattacatggaaagataatgcatttgg

SEQ ID NO: 302534 - DNA, 33 bp, Homo sapien
tgattgaattacatgggaagataatgcatttgg

SEQ ID NO: 302535 - DNA, 33 bp, Homo sapien
tgtgctttggtagcaacactacttgtccttgta

SEQ ID NO: 302536 - DNA, 33 bp, Homo sapien
tgtgctttggtagcaagactacttgtccttgta

SEQ ID NO: 302537 - DNA, 33 bp, Homo sapien
ataagatattttgatccgacaaatctggaagta

SEQ ID NO: 302538 - DNA, 33 bp, Homo sapien
ataagatattttgatctgacaaatctggaagta

SEQ ID NO: 302539 - DNA, 33 bp, Homo sapien
gaatctgataatagaaatggagctgcttgtgta

SEQ ID NO: 302540 - DNA, 33 bp, Homo sapien
gaatctgataatagaattggagctgcttgtgta

SEQ ID NO: 302541 - DNA, 33 bp, Homo sapien
ctctttaggatgcccactactttaacaacacaa

SEQ ID NO: 302542 - DNA, 33 bp, Homo sapien
ctctttaggatgcccattactttaacaacacaa

SEQ ID NO: 302543 - DNA, 33 bp, Homo sapien
atcatattttattcccaagtgaaacggtgcctt

SEQ ID NO: 302544 - DNA, 33 bp, Homo sapien
atcatattttattccccagtgaaacggtgcctt

SEQ ID NO: 302545 - DNA, 33 bp, Homo sapien
aagattaaaaacagaacgctgacaatcctaagt

SEQ ID NO: 302546 - DNA, 33 bp, Homo sapien
aagattaaaaacagaaggctgacaatcctaagt

SEQ ID NO: 302547 - DNA, 33 bp, Homo sapien
ctatgcattctcatcaatagcaaacaggaatgt

SEQ ID NO: 302548 - DNA, 33 bp, Homo sapien
ctatgcattctcatcagtagcaaacaggaatgt

SEQ ID NO: 302549 - DNA, 33 bp, Homo sapien
gaggcaattagaagcaatgccacaatggattca

SEQ ID NO: 302550 - DNA, 33 bp, Homo sapien
gaggcaattagaagcagtgccacaatggattca

SEQ ID NO: 302551 - DNA, 33 bp, Homo sapien
tcattttattcagttaactagacatcatgacaa

SEQ ID NO: 302552 - DNA, 33 bp, Homo sapien
tcattttattcagttagctagacatcatgacaa

SEQ ID NO: 302553 - DNA, 33 bp, Homo sapien
tacaattccaactaaaacataggtccaaaggtt

SEQ ID NO: 302554 - DNA, 33 bp, Homo sapien
tacaattccaactaaaccataggtccaaaggtt

SEQ ID NO: 302555 - DNA, 33 bp, Homo sapien
ttctgctctattttaactgttgtgtatttaact

SEQ ID NO: 302556 - DNA, 33 bp, Homo sapien
ttctgctctattttaattgttgtgtatttaact

SEQ ID NO: 302557 - DNA, 33 bp, Homo sapien
tttggttggccaaaataacacaaaagggactca

SEQ ID NO: 302558 - DNA, 33 bp, Homo sapien
tttggttggccaaaatgacacaaaagggactca

SEQ ID NO: 302559 - DNA, 33 bp, Homo sapien
cttgacagtcagctaaatgtggtttaagccaaa

SEQ ID NO: 302560 - DNA, 33 bp, Homo sapien
cttgacagtcagctaagtgtggtttaagccaaa

SEQ ID NO: 302561 - DNA, 33 bp, Homo sapien
tcctctctgattgagacgaagccaacctagagg

SEQ ID NO: 302562 - DNA, 33 bp, Homo sapien
tcctctctgattgagatgaagccaacctagagg

SEQ ID NO: 302563 - DNA, 33 bp, Homo sapien
tggatatattccaccactcactacatttgatga

SEQ ID NO: 302564 - DNA, 33 bp, Homo sapien
tggatatattccaccattcactacatttgatga

SEQ ID NO: 302565 - DNA, 33 bp, Homo sapien
aagggatttgctgtaccaataatctaggttatg

SEQ ID NO: 302566 - DNA, 33 bp, Homo sapien
aagggatttgctgtacgaataatctaggttatg

SEQ ID NO: 302567 - DNA, 33 bp, Homo sapien
ctaagttataccttccaagcaggctaacactct

SEQ ID NO: 302568 - DNA, 33 bp, Homo sapien
ctaagttataccttcccagcaggctaacactct

SEQ ID NO: 302569 - DNA, 33 bp, Homo sapien
ttgtgcagttgactcactgaaaggcaaaggaag

SEQ ID NO: 302570 - DNA, 33 bp, Homo sapien
ttgtgcagttgactcattgaaaggcaaaggaag

SEQ ID NO: 302571 - DNA, 33 bp, Homo sapien
atatggctcaagggcagacccacttcttcccaa

SEQ ID NO: 302572 - DNA, 33 bp, Homo sapien
atatggctcaagggcatacccacttcttcccaa

SEQ ID NO: 302573 - DNA, 33 bp, Homo sapien
aagcagatgggaaacgaaatcttagaagaaaca

SEQ ID NO: 302574 - DNA, 33 bp, Homo sapien
aagcagatgggaaacgcaatcttagaagaaaca

SEQ ID NO: 302575 - DNA, 33 bp, Homo sapien
atccagtcaattcaatgaaaaataacggccaat

SEQ ID NO: 302576 - DNA, 33 bp, Homo sapien
atccagtcaattcaattaaaaataacggccaat

SEQ ID NO: 302577 - DNA, 33 bp, Homo sapien
ctttgtgtcatgtagacgtagactcattttaat

SEQ ID NO: 302578 - DNA, 33 bp, Homo sapien
ctttgtgtcatgtagatgtagactcattttaat

SEQ ID NO: 302579 - DNA, 33 bp, Homo sapien
tgtatgggcgcaaatacccagatgttcagcatt

SEQ ID NO: 302580 - DNA, 33 bp, Homo sapien
tgtatgggcgcaaatagccagatgttcagcatt

SEQ ID NO: 302581 - DNA, 33 bp, Homo sapien
atgccaaactaccagacgaaaggggtcaaactc

SEQ ID NO: 302582 - DNA, 33 bp, Homo sapien
atgccaaactaccagatgaaaggggtcaaactc

SEQ ID NO: 302583 - DNA, 33 bp, Homo sapien
gttttcctcttccagacgaccaagttgcaagca

SEQ ID NO: 302584 - DNA, 33 bp, Homo sapien
gttttcctcttccagatgaccaagttgcaagca

SEQ ID NO: 302585 - DNA, 33 bp, Homo sapien
agagaaaattaaaacagtgttggccaagaatgc

SEQ ID NO: 302586 - DNA, 33 bp, Homo sapien
agagaaaattaaaacattgttggccaagaatgc

SEQ ID NO: 302587 - DNA, 33 bp, Homo sapien
ggctgtgctctaacaccattgtgatgacatggg

SEQ ID NO: 302588 - DNA, 33 bp, Homo sapien
ggctgtgctctaacactattgtgatgacatggg

SEQ ID NO: 302589 - DNA, 33 bp, Homo sapien
tgtgcatgttaataggcagtcataaatgtcctc

SEQ ID NO: 302590 - DNA, 33 bp, Homo sapien
tgtgcatgttaataggtagtcataaatgtcctc

SEQ ID NO: 302591 - DNA, 33 bp, Homo sapien
gtcttaaatgcgaagcaaaggaatattgttttg

SEQ ID NO: 302592 - DNA, 33 bp, Homo sapien
gtcttaaatgcgaagcgaaggaatattgttttg

SEQ ID NO: 302593 - DNA, 33 bp, Homo sapien
agctaggagaggttgaaaacaatactgaatttt

SEQ ID NO: 302594 - DNA, 33 bp, Homo sapien
agctaggagaggttgagaacaatactgaatttt

SEQ ID NO: 302595 - DNA, 33 bp, Homo sapien
gaaaataggagtaccacgaacagaaatatgagc

SEQ ID NO: 302596 - DNA, 33 bp, Homo sapien
gaaaataggagtaccatgaacagaaatatgagc

SEQ ID NO: 302597 - DNA, 33 bp, Homo sapien
gttcctgatgagcccaatagaaagtccatttgc

SEQ ID NO: 302598 - DNA, 33 bp, Homo sapien
gttcctgatgagcccactagaaagtccatttgc

SEQ ID NO: 302599 - DNA, 33 bp, Homo sapien
ttgctttatgcccatcagaagtaatgtacactc

SEQ ID NO: 302600 - DNA, 33 bp, Homo sapien
ttgctttatgcccatcggaagtaatgtacactc

SEQ ID NO: 302601 - DNA, 33 bp, Homo sapien
ccagttagtcaacatacaggaaattctgctgca

SEQ ID NO: 302602 - DNA, 33 bp, Homo sapien
ccagttagtcaacatataggaaattctgctgca

SEQ ID NO: 302603 - DNA, 33 bp, Homo sapien
tagttccgtttcctcaacaatgctgtgacccag

SEQ ID NO: 302604 - DNA, 33 bp, Homo sapien
tagttccgtttcctcaccaatgctgtgacccag

SEQ ID NO: 302605 - DNA, 33 bp, Homo sapien
catttagaccattaccaagtcaattttgagttt

SEQ ID NO: 302606 - DNA, 33 bp, Homo sapien
catttagaccattaccgagtcaattttgagttt

SEQ ID NO: 302607 - DNA, 33 bp, Homo sapien
atccatttatgaaaaactgtttgcccagtgtca

SEQ ID NO: 302608 - DNA, 33 bp, Homo sapien
atccatttatgaaaaagtgtttgcccagtgtca

SEQ ID NO: 302609 - DNA, 33 bp, Homo sapien
caaagaaattatagcaaaaagtattggacattt

SEQ ID NO: 302610 - DNA, 33 bp, Homo sapien
caaagaaattatagcagaaagtattggacattt

SEQ ID NO: 302611 - DNA, 33 bp, Homo sapien
agcagctctaggaaaacgattcactgaagccct

SEQ ID NO: 302612 - DNA, 33 bp, Homo sapien
agcagctctaggaaaaggattcactgaagccct

SEQ ID NO: 302613 - DNA, 33 bp, Homo sapien
tgtcatcctgtgtgccaaatgataatcacacat

SEQ ID NO: 302614 - DNA, 33 bp, Homo sapien
tgtcatcctgtgtgcctaatgataatcacacat

SEQ ID NO: 302615 - DNA, 33 bp, Homo sapien
accaactaactgatgcagagtggcacgtccccg

SEQ ID NO: 302616 - DNA, 33 bp, Homo sapien
accaactaactgatgcggagtggcacgtccccg

SEQ ID NO: 302617 - DNA, 33 bp, Homo sapien
atacacaggataaagacgcaccatgctgacaac

SEQ ID NO: 302618 - DNA, 33 bp, Homo sapien
atacacaggataaagatgcaccatgctgacaac

SEQ ID NO: 302619 - DNA, 33 bp, Homo sapien
cgttattgtgtagaaacagatgtgcctaaaggt

SEQ ID NO: 302620 - DNA, 33 bp, Homo sapien
cgttattgtgtagaaatagatgtgcctaaaggt

SEQ ID NO: 302621 - DNA, 33 bp, Homo sapien
agatgctggataaaggcagtcttataagacagc

SEQ ID NO: 302622 - DNA, 33 bp, Homo sapien
agatgctggataaaggtagtcttataagacagc

SEQ ID NO: 302623 - DNA, 33 bp, Homo sapien
aaaggaaggggctgaactgaaaagatctatcta

SEQ ID NO: 302624 - DNA, 33 bp, Homo sapien
aaaggaaggggctgaattgaaaagatctatcta

SEQ ID NO: 302625 - DNA, 33 bp, Homo sapien
cagtgtttacattaccagaaattttacaaatgc

SEQ ID NO: 302626 - DNA, 33 bp, Homo sapien
cagtgtttacattaccggaaattttacaaatgc

SEQ ID NO: 302627 - DNA, 33 bp, Homo sapien
acttttcaaatagtcacctactctgttcatgaa

SEQ ID NO: 302628 - DNA, 33 bp, Homo sapien
acttttcaaatagtcatctactctgttcatgaa

SEQ ID NO: 302629 - DNA, 33 bp, Homo sapien
tagaactggcaagtagaaaaaaatgggtcaaaa

SEQ ID NO: 302630 - DNA, 33 bp, Homo sapien
tagaactggcaagtaggaaaaaatgggtcaaaa

SEQ ID NO: 302631 - DNA, 33 bp, Homo sapien
tcatggtgacacggagaaggagagccagttgtt

SEQ ID NO: 302632 - DNA, 33 bp, Homo sapien
tcatggtgacacggaggaggagagccagttgtt

SEQ ID NO: 302633 - DNA, 33 bp, Homo sapien
ctgttttgtaatacaccaagcaacgtgagagag

SEQ ID NO: 302634 - DNA, 33 bp, Homo sapien
ctgttttgtaatacactaagcaacgtgagagag

SEQ ID NO: 302635 - DNA, 33 bp, Homo sapien
gttcaaaagattgttacgaggattaatcaaagc

SEQ ID NO: 302636 - DNA, 33 bp, Homo sapien
gttcaaaagattgttatgaggattaatcaaagc

SEQ ID NO: 302637 - DNA, 33 bp, Homo sapien
tatggaaaatccctcacacgattacagagctaa

SEQ ID NO: 302638 - DNA, 33 bp, Homo sapien
tatggaaaatccctcatacgattacagagctaa

SEQ ID NO: 302639 - DNA, 33 bp, Homo sapien
aatttagcaaaatgcacgaggcagtactttgga

SEQ ID NO: 302640 - DNA, 33 bp, Homo sapien
aatttagcaaaatgcatgaggcagtactttgga

SEQ ID NO: 302641 - DNA, 33 bp, Homo sapien
gggtagttaccaaaaacgtctctgctctcccag

SEQ ID NO: 302642 - DNA, 33 bp, Homo sapien
gggtagttaccaaaaatgtctctgctctcccag

SEQ ID NO: 302643 - DNA, 33 bp, Homo sapien
cataaaccacctcccaataggagtcaaaaaatt

SEQ ID NO: 302644 - DNA, 33 bp, Homo sapien
cataaaccacctcccagtaggagtcaaaaaatt

SEQ ID NO: 302645 - DNA, 33 bp, Homo sapien
gctacgataaagtctacgcaaattaactcaagg

SEQ ID NO: 302646 - DNA, 33 bp, Homo sapien
gctacgataaagtctatgcaaattaactcaagg

SEQ ID NO: 302647 - DNA, 33 bp, Homo sapien
cccaactatagaaagcaaaaacagggattggtc

SEQ ID NO: 302648 - DNA, 33 bp, Homo sapien
cccaactatagaaagcgaaaacagggattggtc

SEQ ID NO: 302649 - DNA, 33 bp, Homo sapien
taacttgtgatcatcccaatcaagaacaaaagt

SEQ ID NO: 302650 - DNA, 33 bp, Homo sapien
taacttgtgatcatcctaatcaagaacaaaagt

SEQ ID NO: 302651 - DNA, 33 bp, Homo sapien
gtgttttagacttccacattaatcatggcgagt

SEQ ID NO: 302652 - DNA, 33 bp, Homo sapien
gtgttttagacttccatattaatcatggcgagt

SEQ ID NO: 302653 - DNA, 33 bp, Homo sapien
ccatttgagagaaagaaacattgaggagaaaaa

SEQ ID NO: 302654 - DNA, 33 bp, Homo sapien
ccatttgagagaaagacacattgaggagaaaaa

SEQ ID NO: 302655 - DNA, 33 bp, Homo sapien
gtgtgattatctgtgacgttagtagcatctaca

SEQ ID NO: 302656 - DNA, 33 bp, Homo sapien
gtgtgattatctgtgaggttagtagcatctaca

SEQ ID NO: 302657 - DNA, 33 bp, Homo sapien
agtctgaaagttgttaaatcaagtcgcattgtg

SEQ ID NO: 302658 - DNA, 33 bp, Homo sapien
agtctgaaagttgttacatcaagtcgcattgtg

SEQ ID NO: 302659 - DNA, 33 bp, Homo sapien
gatttgtttttgtctcaaacttgaatgtcctta

SEQ ID NO: 302660 - DNA, 33 bp, Homo sapien
gatttgtttttgtctcgaacttgaatgtcctta

SEQ ID NO: 302661 - DNA, 33 bp, Homo sapien
atccctgccttaatcacgtaatcactgtttttt

SEQ ID NO: 302662 - DNA, 33 bp, Homo sapien
atccctgccttaatcatgtaatcactgtttttt

SEQ ID NO: 302663 - DNA, 33 bp, Homo sapien
ctttactgggaaattagaggattcattctaatt

SEQ ID NO: 302664 - DNA, 33 bp, Homo sapien
ctttactgggaaattataggattcattctaatt

SEQ ID NO: 302665 - DNA, 33 bp, Homo sapien
tcattctaattacaaaactgccatttataatgt

SEQ ID NO: 302666 - DNA, 33 bp, Homo sapien
tcattctaattacaaacctgccatttataatgt

SEQ ID NO: 302667 - DNA, 33 bp, Homo sapien
ggcttggctttcctgacaaagaacaccttcagt

SEQ ID NO: 302668 - DNA, 33 bp, Homo sapien
ggcttggctttcctgataaagaacaccttcagt

SEQ ID NO: 302669 - DNA, 33 bp, Homo sapien
gtacttgctctcgactcactatatgagaccttg

SEQ ID NO: 302670 - DNA, 33 bp, Homo sapien
gtacttgctctcgacttactatatgagaccttg

SEQ ID NO: 302671 - DNA, 33 bp, Homo sapien
caaactctgctgtgtcaacattggcctccttgc

SEQ ID NO: 302672 - DNA, 33 bp, Homo sapien
caaactctgctgtgtccacattggcctccttgc

SEQ ID NO: 302673 - DNA, 33 bp, Homo sapien
caaccaatatctacaaccttttctctaacagaa

SEQ ID NO: 302674 - DNA, 33 bp, Homo sapien
caaccaatatctacaatcttttctctaacagaa

SEQ ID NO: 302675 - DNA, 33 bp, Homo sapien
ccttcctgtgtaccccccagctcaaggaggcaa

SEQ ID NO: 302676 - DNA, 33 bp, Homo sapien
ccttcctgtgtacccctcagctcaaggaggcaa

SEQ ID NO: 302677 - DNA, 33 bp, Homo sapien
atttattcccctaacaatgtctaataaaagtat

SEQ ID NO: 302678 - DNA, 33 bp, Homo sapien
atttattcccctaacagtgtctaataaaagtat

SEQ ID NO: 302679 - DNA, 33 bp, Homo sapien
tactcagtaactgaacaaataactgaacaaaga

SEQ ID NO: 302680 - DNA, 33 bp, Homo sapien
tactcagtaactgaacgaataactgaacaaaga

SEQ ID NO: 302681 - DNA, 33 bp, Homo sapien
tctcctctgcatcgcaactgctaaaggttaagg

SEQ ID NO: 302682 - DNA, 33 bp, Homo sapien
tctcctctgcatcgcacctgctaaaggttaagg

SEQ ID NO: 302683 - DNA, 33 bp, Homo sapien
agcaagtttggagttcgataagcagaccacaga

SEQ ID NO: 302684 - DNA, 33 bp, Homo sapien
agcaagtttggagttctataagcagaccacaga

SEQ ID NO: 302685 - DNA, 33 bp, Homo sapien
atgagagtctccagccaatgccctactctcttc

SEQ ID NO: 302686 - DNA, 33 bp, Homo sapien
atgagagtctccagccgatgccctactctcttc

SEQ ID NO: 302687 - DNA, 33 bp, Homo sapien
agcaggataaagcagacgatggggtgcagaagg

SEQ ID NO: 302688 - DNA, 33 bp, Homo sapien
agcaggataaagcagatgatggggtgcagaagg

SEQ ID NO: 302689 - DNA, 33 bp, Homo sapien
ggtgtatttgaatccaatctctttaagtacaaa

SEQ ID NO: 302690 - DNA, 33 bp, Homo sapien
ggtgtatttgaatccagtctctttaagtacaaa

SEQ ID NO: 302691 - DNA, 33 bp, Homo sapien
gcaataaatcactgtaccactgggaactcagtg

SEQ ID NO: 302692 - DNA, 33 bp, Homo sapien
gcaataaatcactgtatcactgggaactcagtg

SEQ ID NO: 302693 - DNA, 33 bp, Homo sapien
caaataaaatgaccaacaagttgagcactgagc

SEQ ID NO: 302694 - DNA, 33 bp, Homo sapien
caaataaaatgaccaataagttgagcactgagc

SEQ ID NO: 302695 - DNA, 33 bp, Homo sapien
gtgtaggtcatccaacgggtctggtgcttttga

SEQ ID NO: 302696 - DNA, 33 bp, Homo sapien
gtgtaggtcatccaactggtctggtgcttttga

SEQ ID NO: 302697 - DNA, 33 bp, Homo sapien
actgagaaattcactcaatgggtaatatatttt

SEQ ID NO: 302698 - DNA, 33 bp, Homo sapien
actgagaaattcactcgatgggtaatatatttt

SEQ ID NO: 302699 - DNA, 33 bp, Homo sapien
ccagttaaaagggccaagagtgaaagccgagct

SEQ ID NO: 302700 - DNA, 33 bp, Homo sapien
ccagttaaaagggccaggagtgaaagccgagct

SEQ ID NO: 302701 - DNA, 33 bp, Homo sapien
agaaccaggaattgtgccaatagctctaggaag

SEQ ID NO: 302702 - DNA, 33 bp, Homo sapien
agaaccaggaattgtgtcaatagctctaggaag

SEQ ID NO: 302703 - DNA, 33 bp, Homo sapien
actgcttaatgcgggaataattagtatatcccc

SEQ ID NO: 302704 - DNA, 33 bp, Homo sapien
actgcttaatgcgggactaattagtatatcccc

SEQ ID NO: 302705 - DNA, 33 bp, Homo sapien
catgggccctaacaaacgagtgctggatttatc

SEQ ID NO: 302706 - DNA, 33 bp, Homo sapien
catgggccctaacaaatgagtgctggatttatc

SEQ ID NO: 302707 - DNA, 33 bp, Homo sapien
aggctgacaaggcacagaataagatgctaatcc

SEQ ID NO: 302708 - DNA, 33 bp, Homo sapien
aggctgacaaggcacataataagatgctaatcc

SEQ ID NO: 302709 - DNA, 33 bp, Homo sapien
tgtagatgtaggtagtcaagatcaggtcatgct

SEQ ID NO: 302710 - DNA, 33 bp, Homo sapien
tgtagatgtaggtagttaagatcaggtcatgct

SEQ ID NO: 302711 - DNA, 33 bp, Homo sapien
ccccagtttcttaacacgagagtacccagcatt

SEQ ID NO: 302712 - DNA, 33 bp, Homo sapien
ccccagtttcttaacatgagagtacccagcatt

SEQ ID NO: 302713 - DNA, 33 bp, Homo sapien
cagcataagatggctaccccttccagaaatttg

SEQ ID NO: 302714 - DNA, 33 bp, Homo sapien
cagcataagatggctatcccttccagaaatttg

SEQ ID NO: 302715 - DNA, 33 bp, Homo sapien
catattaaatggctaccgaacaagagggcttgg

SEQ ID NO: 302716 - DNA, 33 bp, Homo sapien
catattaaatggctactgaacaagagggcttgg

SEQ ID NO: 302717 - DNA, 33 bp, Homo sapien
gtccttgaaacaggcacaacatcttacatgcct

SEQ ID NO: 302718 - DNA, 33 bp, Homo sapien
gtccttgaaacaggcagaacatcttacatgcct

SEQ ID NO: 302719 - DNA, 33 bp, Homo sapien
ggttgactacctgatacccttttgttttttctc

SEQ ID NO: 302720 - DNA, 33 bp, Homo sapien
ggttgactacctgatatccttttgttttttctc

SEQ ID NO: 302721 - DNA, 33 bp, Homo sapien
tgaagatgctcccaacaagaatgagctaaaaca

SEQ ID NO: 302722 - DNA, 33 bp, Homo sapien
tgaagatgctcccaacgagaatgagctaaaaca

SEQ ID NO: 302723 - DNA, 33 bp, Homo sapien
gcctcctgctttgctggatagtgttcattttca

SEQ ID NO: 302724 - DNA, 33 bp, Homo sapien
gcctcctgctttgctgtatagtgttcattttca

SEQ ID NO: 302725 - DNA, 33 bp, Homo sapien
aatgggcaagtgtgtacaaatggcctggcacct

SEQ ID NO: 302726 - DNA, 33 bp, Homo sapien
aatgggcaagtgtgtataaatggcctggcacct

SEQ ID NO: 302727 - DNA, 33 bp, Homo sapien
gcaactggatagacacaggactttaaacgcaca

SEQ ID NO: 302728 - DNA, 33 bp, Homo sapien
gcaactggatagacacgggactttaaacgcaca

SEQ ID NO: 302729 - DNA, 33 bp, Homo sapien
gtccaagggaggccaacacttacacagcatcct

SEQ ID NO: 302730 - DNA, 33 bp, Homo sapien
gtccaagggaggccaagacttacacagcatcct

SEQ ID NO: 302731 - DNA, 33 bp, Homo sapien
ctcaaactgtgagctacaggtcaggttctggcc

SEQ ID NO: 302732 - DNA, 33 bp, Homo sapien
ctcaaactgtgagctataggtcaggttctggcc

SEQ ID NO: 302733 - DNA, 33 bp, Homo sapien
gatatacttaactctacggcagataactatttg

SEQ ID NO: 302734 - DNA, 33 bp, Homo sapien
gatatacttaactctatggcagataactatttg

SEQ ID NO: 302735 - DNA, 33 bp, Homo sapien
atggccttgctcttacacactactctttatcta

SEQ ID NO: 302736 - DNA, 33 bp, Homo sapien
atggccttgctcttactcactactctttatcta

SEQ ID NO: 302737 - DNA, 33 bp, Homo sapien
taaaaacccacaggaacgactgaagccaaaagg

SEQ ID NO: 302738 - DNA, 33 bp, Homo sapien
taaaaacccacaggaatgactgaagccaaaagg

SEQ ID NO: 302739 - DNA, 33 bp, Homo sapien
gtccatgttgtttccaatacatgtttctgactc

SEQ ID NO: 302740 - DNA, 33 bp, Homo sapien
gtccatgttgtttccagtacatgtttctgactc

SEQ ID NO: 302741 - DNA, 33 bp, Homo sapien
taacacaaaaaaagcaaggtgatgtattttaaa

SEQ ID NO: 302742 - DNA, 33 bp, Homo sapien
taacacaaaaaaagcagggtgatgtattttaaa

SEQ ID NO: 302743 - DNA, 33 bp, Homo sapien
aatgttaaccagtcaaatgtaacattaaatttt

SEQ ID NO: 302744 - DNA, 33 bp, Homo sapien
aatgttaaccagtcaattgtaacattaaatttt

SEQ ID NO: 302745 - DNA, 33 bp, Homo sapien
tctagacaatcttgacaaaaaatcttcattctc

SEQ ID NO: 302746 - DNA, 33 bp, Homo sapien
tctagacaatcttgaccaaaaatcttcattctc

SEQ ID NO: 302747 - DNA, 33 bp, Homo sapien
gaaaacaacttgttaacagtactttcaaactga

SEQ ID NO: 302748 - DNA, 33 bp, Homo sapien
gaaaacaacttgttaatagtactttcaaactga

SEQ ID NO: 302749 - DNA, 33 bp, Homo sapien
tctttagcatatcaaacctaacctcagtttgaa

SEQ ID NO: 302750 - DNA, 33 bp, Homo sapien
tctttagcatatcaaagctaacctcagtttgaa

SEQ ID NO: 302751 - DNA, 33 bp, Homo sapien
tttttgacttaaaaaaaaatgcccagtgatctc

SEQ ID NO: 302752 - DNA, 33 bp, Homo sapien
tttttgacttaaaaaacaatgcccagtgatctc

SEQ ID NO: 302753 - DNA, 33 bp, Homo sapien
cacttagacaaagagaacttcagattatcacct

SEQ ID NO: 302754 - DNA, 33 bp, Homo sapien
cacttagacaaagagagcttcagattatcacct

SEQ ID NO: 302755 - DNA, 33 bp, Homo sapien
acagagacaaagccaaatccagaggacttacta

SEQ ID NO: 302756 - DNA, 33 bp, Homo sapien
acagagacaaagccaattccagaggacttacta

SEQ ID NO: 302757 - DNA, 33 bp, Homo sapien
tgtgttaaacttgcgtaaacttcaaatattaat

SEQ ID NO: 302758 - DNA, 33 bp, Homo sapien
tgtgttaaacttgcgtcaacttcaaatattaat

SEQ ID NO: 302759 - DNA, 33 bp, Homo sapien
tggacatggctgcatacgtgtctagagcacata

SEQ ID NO: 302760 - DNA, 33 bp, Homo sapien
tggacatggctgcatatgtgtctagagcacata

SEQ ID NO: 302761 - DNA, 33 bp, Homo sapien
ctctggcagtttctggcatcagctttgcagtgt

SEQ ID NO: 302762 - DNA, 33 bp, Homo sapien
ctctggcagtttctgggatcagctttgcagtgt

SEQ ID NO: 302763 - DNA, 33 bp, Homo sapien
gaacagttgtcactagaactcacttagactatt

SEQ ID NO: 302764 - DNA, 33 bp, Homo sapien
gaacagttgtcactaggactcacttagactatt

SEQ ID NO: 302765 - DNA, 33 bp, Homo sapien
aattacagcaacattgccttccagtgtgcatct

SEQ ID NO: 302766 - DNA, 33 bp, Homo sapien
aattacagcaacattgtcttccagtgtgcatct

SEQ ID NO: 302767 - DNA, 33 bp, Homo sapien
tttacctcgttaaagtaaaaatgcatacatata

SEQ ID NO: 302768 - DNA, 33 bp, Homo sapien
tttacctcgttaaagtcaaaatgcatacatata

SEQ ID NO: 302769 - DNA, 33 bp, Homo sapien
taatggaatcatataacctgtgaccttttgtga

SEQ ID NO: 302770 - DNA, 33 bp, Homo sapien
taatggaatcatataatctgtgaccttttgtga

SEQ ID NO: 302771 - DNA, 33 bp, Homo sapien
agccaaattaagtcacagctttcagctactagc

SEQ ID NO: 302772 - DNA, 33 bp, Homo sapien
agccaaattaagtcacggctttcagctactagc

SEQ ID NO: 302773 - DNA, 33 bp, Homo sapien
ggctccaagtgctatggaactcagtaaacagat

SEQ ID NO: 302774 - DNA, 33 bp, Homo sapien
ggctccaagtgctatgtaactcagtaaacagat

SEQ ID NO: 302775 - DNA, 33 bp, Homo sapien
catatttttcttttgtaaactaggagagcaaac

SEQ ID NO: 302776 - DNA, 33 bp, Homo sapien
catatttttcttttgtgaactaggagagcaaac

SEQ ID NO: 302777 - DNA, 33 bp, Homo sapien
ggtagccacaatagcaaatatagaacatttcca

SEQ ID NO: 302778 - DNA, 33 bp, Homo sapien
ggtagccacaatagcagatatagaacatttcca

SEQ ID NO: 302779 - DNA, 33 bp, Homo sapien
caatatcgacacacaaacttgcatctaaattag

SEQ ID NO: 302780 - DNA, 33 bp, Homo sapien
caatatcgacacacaagcttgcatctaaattag

SEQ ID NO: 302781 - DNA, 33 bp, Homo sapien
cctgaatgctcttccacactcttttcatggttc

SEQ ID NO: 302782 - DNA, 33 bp, Homo sapien
cctgaatgctcttccatactcttttcatggttc

SEQ ID NO: 302783 - DNA, 33 bp, Homo sapien
catgggggaagacaacaaagaagcaagaaacaa

SEQ ID NO: 302784 - DNA, 33 bp, Homo sapien
catgggggaagacaacgaagaagcaagaaacaa

SEQ ID NO: 302785 - DNA, 33 bp, Homo sapien
ggatgctacaaaataacgggaggtgaagtgatg

SEQ ID NO: 302786 - DNA, 33 bp, Homo sapien
ggatgctacaaaataatgggaggtgaagtgatg

SEQ ID NO: 302787 - DNA, 33 bp, Homo sapien
aaatgtacaggagacacggcaaaatgttactaa

SEQ ID NO: 302788 - DNA, 33 bp, Homo sapien
aaatgtacaggagacatggcaaaatgttactaa

SEQ ID NO: 302789 - DNA, 33 bp, Homo sapien
ccttctttccacgtctctcagtttctgtgtcaa

SEQ ID NO: 302790 - DNA, 33 bp, Homo sapien
ccttctttccacgtctttcagtttctgtgtcaa

SEQ ID NO: 302791 - DNA, 33 bp, Homo sapien
cacaccaaaagatcaacagcgattactccgggg

SEQ ID NO: 302792 - DNA, 33 bp, Homo sapien
cacaccaaaagatcaatagcgattactccgggg

SEQ ID NO: 302793 - DNA, 33 bp, Homo sapien
tctttattgacacttacggtgtacagatgacct

SEQ ID NO: 302794 - DNA, 33 bp, Homo sapien
tctttattgacacttatggtgtacagatgacct

SEQ ID NO: 302795 - DNA, 33 bp, Homo sapien
tctatctttagccttaccacatacttgagctcc

SEQ ID NO: 302796 - DNA, 33 bp, Homo sapien
tctatctttagccttatcacatacttgagctcc

SEQ ID NO: 302797 - DNA, 33 bp, Homo sapien
gctcatggtttgtttacaccactccccactccc

SEQ ID NO: 302798 - DNA, 33 bp, Homo sapien
gctcatggtttgtttataccactccccactccc

SEQ ID NO: 302799 - DNA, 33 bp, Homo sapien
acgatgcagaagtcaccctttaatttaacaaac

SEQ ID NO: 302800 - DNA, 33 bp, Homo sapien
acgatgcagaagtcactctttaatttaacaaac

SEQ ID NO: 302801 - DNA, 33 bp, Homo sapien
atcatattgctatgaacgtttctaaacaattgc

SEQ ID NO: 302802 - DNA, 33 bp, Homo sapien
atcatattgctatgaaggtttctaaacaattgc

SEQ ID NO: 302803 - DNA, 33 bp, Homo sapien
cttttgccatggtagacgctgagatttaattgc

SEQ ID NO: 302804 - DNA, 33 bp, Homo sapien
cttttgccatggtagatgctgagatttaattgc

SEQ ID NO: 302805 - DNA, 33 bp, Homo sapien
atggctagcagagttacagataaggctgtgggt

SEQ ID NO: 302806 - DNA, 33 bp, Homo sapien
atggctagcagagttagagataaggctgtgggt

SEQ ID NO: 302807 - DNA, 33 bp, Homo sapien
aaggacctggctccatcaacttagctgaatttt

SEQ ID NO: 302808 - DNA, 33 bp, Homo sapien
aaggacctggctccattaacttagctgaatttt

SEQ ID NO: 302809 - DNA, 33 bp, Homo sapien
caagaaagaatagagcaagcactataaacattt

SEQ ID NO: 302810 - DNA, 33 bp, Homo sapien
caagaaagaatagagcgagcactataaacattt

SEQ ID NO: 302811 - DNA, 33 bp, Homo sapien
cgtatttgtctactaactgacagctattgagta

SEQ ID NO: 302812 - DNA, 33 bp, Homo sapien
cgtatttgtctactaattgacagctattgagta

SEQ ID NO: 302813 - DNA, 33 bp, Homo sapien
ctaatgatagtcaaaccgcccaatggtcccatt

SEQ ID NO: 302814 - DNA, 33 bp, Homo sapien
ctaatgatagtcaaactgcccaatggtcccatt

SEQ ID NO: 302815 - DNA, 33 bp, Homo sapien
cctttctaatatccacactctggactgaaagac

SEQ ID NO: 302816 - DNA, 33 bp, Homo sapien
cctttctaatatccactctctggactgaaagac

SEQ ID NO: 302817 - DNA, 33 bp, Homo sapien
gctggccatggcaccaaattgctaatgagccca

SEQ ID NO: 302818 - DNA, 33 bp, Homo sapien
gctggccatggcaccagattgctaatgagccca

SEQ ID NO: 302819 - DNA, 33 bp, Homo sapien
gcaaatgaagagttcaaacaaaatctatctagc

SEQ ID NO: 302820 - DNA, 33 bp, Homo sapien
gcaaatgaagagttcagacaaaatctatctagc

SEQ ID NO: 302821 - DNA, 33 bp, Homo sapien
aaagttctttttgctaagcatatacggtaacat

SEQ ID NO: 302822 - DNA, 33 bp, Homo sapien
aaagttctttttgctatgcatatacggtaacat

SEQ ID NO: 302823 - DNA, 33 bp, Homo sapien
taaaagtacagaataacacattttcaagcatga

SEQ ID NO: 302824 - DNA, 33 bp, Homo sapien
taaaagtacagaataatacattttcaagcatga

SEQ ID NO: 302825 - DNA, 33 bp, Homo sapien
ggcagatctttgggggaaaacctgccttttgag

SEQ ID NO: 302826 - DNA, 33 bp, Homo sapien
ggcagatctttggggggaaacctgccttttgag

SEQ ID NO: 302827 - DNA, 33 bp, Homo sapien
aataaataaaaaataactgtcttagagcattgc

SEQ ID NO: 302828 - DNA, 33 bp, Homo sapien
aataaataaaaaataattgtcttagagcattgc

SEQ ID NO: 302829 - DNA, 33 bp, Homo sapien
tccccaggacctctgcaacggcactcagtaatg

SEQ ID NO: 302830 - DNA, 33 bp, Homo sapien
tccccaggacctctgcgacggcactcagtaatg

SEQ ID NO: 302831 - DNA, 33 bp, Homo sapien
tttctagaaaagacgcaaagtggcccaaacaat

SEQ ID NO: 302832 - DNA, 33 bp, Homo sapien
tttctagaaaagacgcgaagtggcccaaacaat

SEQ ID NO: 302833 - DNA, 33 bp, Homo sapien
ttgaagagtatgaacacgtgacttagtttttgc

SEQ ID NO: 302834 - DNA, 33 bp, Homo sapien
ttgaagagtatgaacatgtgacttagtttttgc

SEQ ID NO: 302835 - DNA, 33 bp, Homo sapien
cttttggtttcctccagatcaagcttgcctcag

SEQ ID NO: 302836 - DNA, 33 bp, Homo sapien
cttttggtttcctccatatcaagcttgcctcag

SEQ ID NO: 302837 - DNA, 33 bp, Homo sapien
tatatacaaacaggaacctgagcacaccttcca

SEQ ID NO: 302838 - DNA, 33 bp, Homo sapien
tatatacaaacaggaatctgagcacaccttcca

SEQ ID NO: 302839 - DNA, 33 bp, Homo sapien
tagctggatggttgaacagttgtagagttaata

SEQ ID NO: 302840 - DNA, 33 bp, Homo sapien
tagctggatggttgaatagttgtagagttaata

SEQ ID NO: 302841 - DNA, 33 bp, Homo sapien
aggaagggcttttatgaacaacagcagcaacac

SEQ ID NO: 302842 - DNA, 33 bp, Homo sapien
aggaagggcttttatgcacaacagcagcaacac

SEQ ID NO: 302843 - DNA, 33 bp, Homo sapien
gatgtctcactgggtcccaaagttcacaaaggg

SEQ ID NO: 302844 - DNA, 33 bp, Homo sapien
gatgtctcactgggtctcaaagttcacaaaggg

SEQ ID NO: 302845 - DNA, 33 bp, Homo sapien
caggccttccttcacaacatactggtgatatat

SEQ ID NO: 302846 - DNA, 33 bp, Homo sapien
caggccttccttcacatcatactggtgatatat

SEQ ID NO: 302847 - DNA, 33 bp, Homo sapien
cagttctttccattcacgttcatagagccattt

SEQ ID NO: 302848 - DNA, 33 bp, Homo sapien
cagttctttccattcatgttcatagagccattt

SEQ ID NO: 302849 - DNA, 33 bp, Homo sapien
ttctttgcttcagacacaactggtgtatttttt

SEQ ID NO: 302850 - DNA, 33 bp, Homo sapien
ttctttgcttcagacataactggtgtatttttt

SEQ ID NO: 302851 - DNA, 33 bp, Homo sapien
gaggagatagaaacaaatgattctaatctgact

SEQ ID NO: 302852 - DNA, 33 bp, Homo sapien
gaggagatagaaacaagtgattctaatctgact

SEQ ID NO: 302853 - DNA, 33 bp, Homo sapien
taactcagatgctgggcaaatgtggagttgtat

SEQ ID NO: 302854 - DNA, 33 bp, Homo sapien
taactcagatgctgggtaaatgtggagttgtat

SEQ ID NO: 302855 - DNA, 33 bp, Homo sapien
agttgtattaaatgaacgctcttacttactcca

SEQ ID NO: 302856 - DNA, 33 bp, Homo sapien
agttgtattaaatgaatgctcttacttactcca

SEQ ID NO: 302857 - DNA, 33 bp, Homo sapien
aattttaaggacttacaattgctgctctaactt

SEQ ID NO: 302858 - DNA, 33 bp, Homo sapien
aattttaaggacttactattgctgctctaactt

SEQ ID NO: 302859 - DNA, 33 bp, Homo sapien
catttctgacttcagactaagctgggttccctt

SEQ ID NO: 302860 - DNA, 33 bp, Homo sapien
catttctgacttcagattaagctgggttccctt

SEQ ID NO: 302861 - DNA, 33 bp, Homo sapien
atggttgattggatgagaaggatgaagagataa

SEQ ID NO: 302862 - DNA, 33 bp, Homo sapien
atggttgattggatgataaggatgaagagataa

SEQ ID NO: 302863 - DNA, 33 bp, Homo sapien
ggatgcttttggagacaaatgtaaggtcctcct

SEQ ID NO: 302864 - DNA, 33 bp, Homo sapien
ggatgcttttggagacgaatgtaaggtcctcct

SEQ ID NO: 302865 - DNA, 33 bp, Homo sapien
acgcgctgcggtgcaccaaagttgcgttgcagt

SEQ ID NO: 302866 - DNA, 33 bp, Homo sapien
acgcgctgcggtgcactaaagttgcgttgcagt

SEQ ID NO: 302867 - DNA, 33 bp, Homo sapien
tgaacttccatctggaactatggattgctaaac

SEQ ID NO: 302868 - DNA, 33 bp, Homo sapien
tgaacttccatctggacctatggattgctaaac

SEQ ID NO: 302869 - DNA, 33 bp, Homo sapien
taagtgagtggttacaccaggagcaaggaagca

SEQ ID NO: 302870 - DNA, 33 bp, Homo sapien
taagtgagtggttacatcaggagcaaggaagca

SEQ ID NO: 302871 - DNA, 33 bp, Homo sapien
gcactaaacagaatggaagtaaggaagaaggaa

SEQ ID NO: 302872 - DNA, 33 bp, Homo sapien
gcactaaacagaatggcagtaaggaagaaggaa

SEQ ID NO: 302873 - DNA, 33 bp, Homo sapien
gcagcatgaagaagtaactccaacccatagaac

SEQ ID NO: 302874 - DNA, 33 bp, Homo sapien
gcagcatgaagaagtatctccaacccatagaac

SEQ ID NO: 302875 - DNA, 33 bp, Homo sapien
tacactaccagccatacacccaacagaagcgaa

SEQ ID NO: 302876 - DNA, 33 bp, Homo sapien
tacactaccagccatatacccaacagaagcgaa

SEQ ID NO: 302877 - DNA, 33 bp, Homo sapien
caagttgttaccaatcaatcatgcactggagac

SEQ ID NO: 302878 - DNA, 33 bp, Homo sapien
caagttgttaccaatccatcatgcactggagac

SEQ ID NO: 302879 - DNA, 33 bp, Homo sapien
aaataatggcacagtgcaatctcctgacctcca

SEQ ID NO: 302880 - DNA, 33 bp, Homo sapien
aaataatggcacagtggaatctcctgacctcca

SEQ ID NO: 302881 - DNA, 33 bp, Homo sapien
ataacagcatgtagtaggacttttcttaatcaa

SEQ ID NO: 302882 - DNA, 33 bp, Homo sapien
ataacagcatgtagtatgacttttcttaatcaa

SEQ ID NO: 302883 - DNA, 33 bp, Homo sapien
taaccaccagtactcaaagcaggaaaatggata

SEQ ID NO: 302884 - DNA, 33 bp, Homo sapien
taaccaccagtactcatagcaggaaaatggata

SEQ ID NO: 302885 - DNA, 33 bp, Homo sapien
gtttgcttcctcttggcatcttatttttccaga

SEQ ID NO: 302886 - DNA, 33 bp, Homo sapien
gtttgcttcctcttggtatcttatttttccaga

SEQ ID NO: 302887 - DNA, 33 bp, Homo sapien
gggcttccagaaacccaattagagcctctgctc

SEQ ID NO: 302888 - DNA, 33 bp, Homo sapien
gggcttccagaaacccgattagagcctctgctc

SEQ ID NO: 302889 - DNA, 33 bp, Homo sapien
ctgaatgagactttaaatgactatattgggtcg

SEQ ID NO: 302890 - DNA, 33 bp, Homo sapien
ctgaatgagactttaagtgactatattgggtcg

SEQ ID NO: 302891 - DNA, 33 bp, Homo sapien
ttacagttactgttgaccaaaaatatcttgtat

SEQ ID NO: 302892 - DNA, 33 bp, Homo sapien
ttacagttactgttgagcaaaaatatcttgtat

SEQ ID NO: 302893 - DNA, 33 bp, Homo sapien
tgactaaagacctcaccgtaatctgagccacac

SEQ ID NO: 302894 - DNA, 33 bp, Homo sapien
tgactaaagacctcactgtaatctgagccacac

SEQ ID NO: 302895 - DNA, 33 bp, Homo sapien
gctgtattaagtaaaactgtgttctgctgtaat

SEQ ID NO: 302896 - DNA, 33 bp, Homo sapien
gctgtattaagtaaaattgtgttctgctgtaat

SEQ ID NO: 302897 - DNA, 33 bp, Homo sapien
cctgttggtaggagtacagatgtgatagcttat

SEQ ID NO: 302898 - DNA, 33 bp, Homo sapien
cctgttggtaggagtatagatgtgatagcttat

SEQ ID NO: 302899 - DNA, 33 bp, Homo sapien
agcacagagatgcccacggtaaagctatggtgg

SEQ ID NO: 302900 - DNA, 33 bp, Homo sapien
agcacagagatgcccatggtaaagctatggtgg

SEQ ID NO: 302901 - DNA, 33 bp, Homo sapien
gctggttattttcaaaacttgggtctctgctgg

SEQ ID NO: 302902 - DNA, 33 bp, Homo sapien
gctggttattttcaaagcttgggtctctgctgg

SEQ ID NO: 302903 - DNA, 33 bp, Homo sapien
acacagcaagaccttacgtggcttcctgcacca

SEQ ID NO: 302904 - DNA, 33 bp, Homo sapien
acacagcaagaccttatgtggcttcctgcacca

SEQ ID NO: 302905 - DNA, 33 bp, Homo sapien
aagcagaaagaggctacagtttgtgtttttaaa

SEQ ID NO: 302906 - DNA, 33 bp, Homo sapien
aagcagaaagaggctagagtttgtgtttttaaa

SEQ ID NO: 302907 - DNA, 33 bp, Homo sapien
tctgaggacctaggaactgatgtttcatgaaaa

SEQ ID NO: 302908 - DNA, 33 bp, Homo sapien
tctgaggacctaggaattgatgtttcatgaaaa

SEQ ID NO: 302909 - DNA, 33 bp, Homo sapien
taggtcctcagaatgactaaatcagaatttcca

SEQ ID NO: 302910 - DNA, 33 bp, Homo sapien
taggtcctcagaatgagtaaatcagaatttcca

SEQ ID NO: 302911 - DNA, 33 bp, Homo sapien
tagatcaccttccatgcactcttccacaatcct

SEQ ID NO: 302912 - DNA, 33 bp, Homo sapien
tagatcaccttccatgtactcttccacaatcct

SEQ ID NO: 302913 - DNA, 33 bp, Homo sapien
atgaatctcattaaagcataaattgagctggcc

SEQ ID NO: 302914 - DNA, 33 bp, Homo sapien
atgaatctcattaaagtataaattgagctggcc

SEQ ID NO: 302915 - DNA, 33 bp, Homo sapien
agatgtgagaccaaaaaaattattctatgtccc

SEQ ID NO: 302916 - DNA, 33 bp, Homo sapien
agatgtgagaccaaaagaattattctatgtccc

SEQ ID NO: 302917 - DNA, 33 bp, Homo sapien
atgtttgtacaatgacaaaattgcctagtgaca

SEQ ID NO: 302918 - DNA, 33 bp, Homo sapien
atgtttgtacaatgaccaaattgcctagtgaca

SEQ ID NO: 302919 - DNA, 33 bp, Homo sapien
agtaggcaacagaaaccctgaaatggtgggaca

SEQ ID NO: 302920 - DNA, 33 bp, Homo sapien
agtaggcaacagaaactctgaaatggtgggaca

SEQ ID NO: 302921 - DNA, 33 bp, Homo sapien
ttttccttcttggtgacgcatagtctaattcta

SEQ ID NO: 302922 - DNA, 33 bp, Homo sapien
ttttccttcttggtgatgcatagtctaattcta

SEQ ID NO: 302923 - DNA, 33 bp, Homo sapien
tgtggaatgggagacactattgggatcatccct

SEQ ID NO: 302924 - DNA, 33 bp, Homo sapien
tgtggaatgggagacagtattgggatcatccct

SEQ ID NO: 302925 - DNA, 33 bp, Homo sapien
ctgaggcagaataaaccggatcctgtcacaaaa

SEQ ID NO: 302926 - DNA, 33 bp, Homo sapien
ctgaggcagaataaactggatcctgtcacaaaa

SEQ ID NO: 302927 - DNA, 33 bp, Homo sapien
tctggagaatcgttcccatcattttagaaagca

SEQ ID NO: 302928 - DNA, 33 bp, Homo sapien
tctggagaatcgttcctatcattttagaaagca

SEQ ID NO: 302929 - DNA, 33 bp, Homo sapien
cctagatctagctgccaagtcacagggaataca

SEQ ID NO: 302930 - DNA, 33 bp, Homo sapien
cctagatctagctgccgagtcacagggaataca

SEQ ID NO: 302931 - DNA, 33 bp, Homo sapien
gctggtctgaggaacaatctcaagtgcctgcag

SEQ ID NO: 302932 - DNA, 33 bp, Homo sapien
gctggtctgaggaacattctcaagtgcctgcag

SEQ ID NO: 302933 - DNA, 33 bp, Homo sapien
aatttttatgtgtctgaatcccatgtcttcatc

SEQ ID NO: 302934 - DNA, 33 bp, Homo sapien
aatttttatgtgtctgtatcccatgtcttcatc

SEQ ID NO: 302935 - DNA, 33 bp, Homo sapien
gggggaagcctataaacgggcgctctgggagtg

SEQ ID NO: 302936 - DNA, 33 bp, Homo sapien
gggggaagcctataaatgggcgctctgggagtg

SEQ ID NO: 302937 - DNA, 33 bp, Homo sapien
cccaaaatgctttcaaagaagtcatagtataga

SEQ ID NO: 302938 - DNA, 33 bp, Homo sapien
cccaaaatgctttcaaggaagtcatagtataga

SEQ ID NO: 302939 - DNA, 33 bp, Homo sapien
agacacatgattgtgaaacaagagagagatggc

SEQ ID NO: 302940 - DNA, 33 bp, Homo sapien
agacacatgattgtgagacaagagagagatggc

SEQ ID NO: 302941 - DNA, 33 bp, Homo sapien
catatcttgagcttacaagcaagaacttcctaa

SEQ ID NO: 302942 - DNA, 33 bp, Homo sapien
catatcttgagcttacgagcaagaacttcctaa

SEQ ID NO: 302943 - DNA, 33 bp, Homo sapien
cagataatggcaaaacactgtgtaggcactgat

SEQ ID NO: 302944 - DNA, 33 bp, Homo sapien
cagataatggcaaaacgctgtgtaggcactgat

SEQ ID NO: 302945 - DNA, 33 bp, Homo sapien
atgtaaaggaaaaaaaatgtgccagtcagctcc

SEQ ID NO: 302946 - DNA, 33 bp, Homo sapien
atgtaaaggaaaaaaagtgtgccagtcagctcc

SEQ ID NO: 302947 - DNA, 33 bp, Homo sapien
tgccagtcagctccaaaatggaaggctcaagtg

SEQ ID NO: 302948 - DNA, 33 bp, Homo sapien
tgccagtcagctccaagatggaaggctcaagtg

SEQ ID NO: 302949 - DNA, 33 bp, Homo sapien
atcaaccacatgtgcaactgatgaaagaggtat

SEQ ID NO: 302950 - DNA, 33 bp, Homo sapien
atcaaccacatgtgcatctgatgaaagaggtat

SEQ ID NO: 302951 - DNA, 33 bp, Homo sapien
catgacccaattggaacgattaaaaggacagac

SEQ ID NO: 302952 - DNA, 33 bp, Homo sapien
catgacccaattggaatgattaaaaggacagac

SEQ ID NO: 302953 - DNA, 33 bp, Homo sapien
accctcacttttctagccctctgactgatagcc

SEQ ID NO: 302954 - DNA, 33 bp, Homo sapien
accctcacttttctaggcctctgactgatagcc

SEQ ID NO: 302955 - DNA, 33 bp, Homo sapien
tggaacaccaagagacgaacagtgctggaacaa

SEQ ID NO: 302956 - DNA, 33 bp, Homo sapien
tggaacaccaagagactaacagtgctggaacaa

SEQ ID NO: 302957 - DNA, 33 bp, Homo sapien
tctgggtaaaacttgaggaattctattaacgaa

SEQ ID NO: 302958 - DNA, 33 bp, Homo sapien
tctgggtaaaacttgatgaattctattaacgaa

SEQ ID NO: 302959 - DNA, 33 bp, Homo sapien
aacatactgatacgtacgacttggatggatctc

SEQ ID NO: 302960 - DNA, 33 bp, Homo sapien
aacatactgatacgtatgacttggatggatctc

SEQ ID NO: 302961 - DNA, 33 bp, Homo sapien
tagggagaaagtgtaactataacgtggtaacac

SEQ ID NO: 302962 - DNA, 33 bp, Homo sapien
tagggagaaagtgtaagtataacgtggtaacac

SEQ ID NO: 302963 - DNA, 33 bp, Homo sapien
atcttttgagactttgaacctcatcatgattca

SEQ ID NO: 302964 - DNA, 33 bp, Homo sapien
atcttttgagactttgtacctcatcatgattca

SEQ ID NO: 302965 - DNA, 33 bp, Homo sapien
tatgagatagacactacacagagtgctttctat

SEQ ID NO: 302966 - DNA, 33 bp, Homo sapien
tatgagatagacactatacagagtgctttctat

SEQ ID NO: 302967 - DNA, 33 bp, Homo sapien
aatatagaatcacaaaactttagtcccaaaagt

SEQ ID NO: 302968 - DNA, 33 bp, Homo sapien
aatatagaatcacaaacctttagtcccaaaagt

SEQ ID NO: 302969 - DNA, 33 bp, Homo sapien
aaaatgatgtttgtgaaataatgcatatgttaa

SEQ ID NO: 302970 - DNA, 33 bp, Homo sapien
aaaatgatgtttgtgagataatgcatatgttaa

SEQ ID NO: 302971 - DNA, 33 bp, Homo sapien
tcatggcacaatacaaaccatatatgaaataca

SEQ ID NO: 302972 - DNA, 33 bp, Homo sapien
tcatggcacaatacaagccatatatgaaataca

SEQ ID NO: 302973 - DNA, 33 bp, Homo sapien
tttacaacatgacaaacggcaaaaggtgaattc

SEQ ID NO: 302974 - DNA, 33 bp, Homo sapien
tttacaacatgacaaatggcaaaaggtgaattc

SEQ ID NO: 302975 - DNA, 33 bp, Homo sapien
tttgaggaatggttccaaaatgaaattcaaaga

SEQ ID NO: 302976 - DNA, 33 bp, Homo sapien
tttgaggaatggttccgaaatgaaattcaaaga

SEQ ID NO: 302977 - DNA, 33 bp, Homo sapien
accggttcttccacaacggcagctagaacattc

SEQ ID NO: 302978 - DNA, 33 bp, Homo sapien
accggttcttccacaatggcagctagaacattc

SEQ ID NO: 302979 - DNA, 33 bp, Homo sapien
cttaaacactggtttaactatcagaattgtagg

SEQ ID NO: 302980 - DNA, 33 bp, Homo sapien
cttaaacactggtttatctatcagaattgtagg

SEQ ID NO: 302981 - DNA, 33 bp, Homo sapien
gacacgtgttctcaaaatggggccatacatcac

SEQ ID NO: 302982 - DNA, 33 bp, Homo sapien
gacacgtgttctcaaattggggccatacatcac

SEQ ID NO: 302983 - DNA, 33 bp, Homo sapien
aaacaagtgagaagtacgctaagtaatgaagtg

SEQ ID NO: 302984 - DNA, 33 bp, Homo sapien
aaacaagtgagaagtatgctaagtaatgaagtg

SEQ ID NO: 302985 - DNA, 33 bp, Homo sapien
tctagcacgggaacaaaggcaattggaaaatag

SEQ ID NO: 302986 - DNA, 33 bp, Homo sapien
tctagcacgggaacaagggcaattggaaaatag

SEQ ID NO: 302987 - DNA, 33 bp, Homo sapien
agaccgggacttctcaaactagattgcatgctt

SEQ ID NO: 302988 - DNA, 33 bp, Homo sapien
agaccgggacttctcagactagattgcatgctt

SEQ ID NO: 302989 - DNA, 33 bp, Homo sapien
cctatactagcaactacggcaggaaagtagggt

SEQ ID NO: 302990 - DNA, 33 bp, Homo sapien
cctatactagcaactatggcaggaaagtagggt

SEQ ID NO: 302991 - DNA, 33 bp, Homo sapien
cactggagcattcaaacatataaagcaaatatt

SEQ ID NO: 302992 - DNA, 33 bp, Homo sapien
cactggagcattcaaatatataaagcaaatatt

SEQ ID NO: 302993 - DNA, 33 bp, Homo sapien
ctggctcctgtcatacaagttgcatccatcaat

SEQ ID NO: 302994 - DNA, 33 bp, Homo sapien
ctggctcctgtcatacgagttgcatccatcaat

SEQ ID NO: 302995 - DNA, 33 bp, Homo sapien
agagggagactgggtaaaaatgcgaatttctga

SEQ ID NO: 302996 - DNA, 33 bp, Homo sapien
agagggagactgggtacaaatgcgaatttctga

SEQ ID NO: 302997 - DNA, 33 bp, Homo sapien
gaaaacttaagctaaagctggaagaacatgata

SEQ ID NO: 302998 - DNA, 33 bp, Homo sapien
gaaaacttaagctaaatctggaagaacatgata

SEQ ID NO: 302999 - DNA, 33 bp, Homo sapien
tagttactacatttccaaagcctccacaactcc

SEQ ID NO: 303000 - DNA, 33 bp, Homo sapien
tagttactacatttccgaagcctccacaactcc

SEQ ID NO: 303001 - DNA, 33 bp, Homo sapien
ttcttttactgagtaacctgctttataaagtaa

SEQ ID NO: 303002 - DNA, 33 bp, Homo sapien
ttcttttactgagtaagctgctttataaagtaa

SEQ ID NO: 303003 - DNA, 33 bp, Homo sapien
gaaactacaactggaacagaggaatcctaaagt

SEQ ID NO: 303004 - DNA, 33 bp, Homo sapien
gaaactacaactggaatagaggaatcctaaagt

SEQ ID NO: 303005 - DNA, 33 bp, Homo sapien
taaagtagctagttcacgcatttgagataagat

SEQ ID NO: 303006 - DNA, 33 bp, Homo sapien
taaagtagctagttcatgcatttgagataagat

SEQ ID NO: 303007 - DNA, 33 bp, Homo sapien
ttttatatcttgtagaccttcataccttttctt

SEQ ID NO: 303008 - DNA, 33 bp, Homo sapien
ttttatatcttgtagatcttcataccttttctt

SEQ ID NO: 303009 - DNA, 33 bp, Homo sapien
gatcatatgataaccacgtgaaaagcttcagca

SEQ ID NO: 303010 - DNA, 33 bp, Homo sapien
gatcatatgataaccatgtgaaaagcttcagca

SEQ ID NO: 303011 - DNA, 33 bp, Homo sapien
gaacatttcttttggaatatcataaccgagtta

SEQ ID NO: 303012 - DNA, 33 bp, Homo sapien
gaacatttcttttggagtatcataaccgagtta

SEQ ID NO: 303013 - DNA, 33 bp, Homo sapien; identical to SEQ ID NO: 303011

SEQ ID NO: 303014 - DNA, 33 bp, Homo sapien; identical to SEQ ID NO: 303012

SEQ ID NO: 303015 - DNA, 33 bp, Homo sapien
attattgccagcagaaatgatcaattcctttta

SEQ ID NO: 303016 - DNA, 33 bp, Homo sapien
attattgccagcagaagtgatcaattcctttta

SEQ ID NO: 303017 - DNA, 33 bp, Homo sapien
ctctcagatagtttggccaggttcctcagtgca

SEQ ID NO: 303018 - DNA, 33 bp, Homo sapien
ctctcagatagtttggtcaggttcctcagtgca

SEQ ID NO: 303019 - DNA, 33 bp, Homo sapien
acatgggaattagatgaattgctcctttatggg

SEQ ID NO: 303020 - DNA, 33 bp, Homo sapien
acatgggaattagatggattgctcctttatggg

SEQ ID NO: 303021 - DNA, 33 bp, Homo sapien
gtaaatgactcacagaactctatcactacctgc

SEQ ID NO: 303022 - DNA, 33 bp, Homo sapien
gtaaatgactcacagatctctatcactacctgc

SEQ ID NO: 303023 - DNA, 33 bp, Homo sapien
catttgttagaattgaaatgggcttgtcctagg

SEQ ID NO: 303024 - DNA, 33 bp, Homo sapien
catttgttagaattgacatgggcttgtcctagg

SEQ ID NO: 303025 - DNA, 33 bp, Homo sapien
tagaacatccctaagaagtcagttgttcatatt

SEQ ID NO: 303026 - DNA, 33 bp, Homo sapien
tagaacatccctaagacgtcagttgttcatatt

SEQ ID NO: 303027 - DNA, 33 bp, Homo sapien
tttcttgtttcccagcacattgtggtgactact

SEQ ID NO: 303028 - DNA, 33 bp, Homo sapien
tttcttgtttcccagcgcattgtggtgactact

SEQ ID NO: 303029 - DNA, 33 bp, Homo sapien
ctgttgttctaggcacagagcaaaattaaactg

SEQ ID NO: 303030 - DNA, 33 bp, Homo sapien
ctgttgttctaggcacggagcaaaattaaactg

SEQ ID NO: 303031 - DNA, 33 bp, Homo sapien
agtgtaatgcttgaagaataatactgttgacta

SEQ ID NO: 303032 - DNA, 33 bp, Homo sapien
agtgtaatgcttgaagcataatactgttgacta

SEQ ID NO: 303033 - DNA, 33 bp, Homo sapien
taaagagacctacaagaccattcacccttgtca

SEQ ID NO: 303034 - DNA, 33 bp, Homo sapien
taaagagacctacaaggccattcacccttgtca

SEQ ID NO: 303035 - DNA, 33 bp, Homo sapien
taatgagaaatagacaatgaatttcatccctga

SEQ ID NO: 303036 - DNA, 33 bp, Homo sapien
taatgagaaatagacagtgaatttcatccctga

SEQ ID NO: 303037 - DNA, 33 bp, Homo sapien
ggcactcagtgggaggaatgtgaaaaagtctgc

SEQ ID NO: 303038 - DNA, 33 bp, Homo sapien
ggcactcagtgggagggatgtgaaaaagtctgc

SEQ ID NO: 303039 - DNA, 33 bp, Homo sapien
ttgaacccctgaatcaccacagtttggatggcc

SEQ ID NO: 303040 - DNA, 33 bp, Homo sapien
ttgaacccctgaatcatcacagtttggatggcc

SEQ ID NO: 303041 - DNA, 33 bp, Homo sapien
tatttcttgtgtggtacagttaagttttatgat

SEQ ID NO: 303042 - DNA, 33 bp, Homo sapien
tatttcttgtgtggtatagttaagttttatgat

SEQ ID NO: 303043 - DNA, 33 bp, Homo sapien
actcttaggtttgccactcagaaaaaacagtct

SEQ ID NO: 303044 - DNA, 33 bp, Homo sapien
actcttaggtttgccagtcagaaaaaacagtct

SEQ ID NO: 303045 - DNA, 33 bp, Homo sapien
ggtttttggtaaggccaaactctgataagcaaa

SEQ ID NO: 303046 - DNA, 33 bp, Homo sapien
ggtttttggtaaggccgaactctgataagcaaa

SEQ ID NO: 303047 - DNA, 33 bp, Homo sapien
tttagtgctgtaaagacaatgaaaaggaagctt

SEQ ID NO: 303048 - DNA, 33 bp, Homo sapien
tttagtgctgtaaagagaatgaaaaggaagctt

SEQ ID NO: 303049 - DNA, 33 bp, Homo sapien
aaaagccacttaagtcaactctgcttccattct

SEQ ID NO: 303050 - DNA, 33 bp, Homo sapien
aaaagccacttaagtcgactctgcttccattct

SEQ ID NO: 303051 - DNA, 33 bp, Homo sapien
catgtgttagaaatcccagaagatcaaagactc

SEQ ID NO: 303052 - DNA, 33 bp, Homo sapien
catgtgttagaaatcctagaagatcaaagactc

SEQ ID NO: 303053 - DNA, 33 bp, Homo sapien
gtggattttcagatgcagatgttcttttgattt

SEQ ID NO: 303054 - DNA, 33 bp, Homo sapien
gtggattttcagatgcggatgttcttttgattt

SEQ ID NO: 303055 - DNA, 33 bp, Homo sapien
taatattgtgatttaaacctttattgtagccat

SEQ ID NO: 303056 - DNA, 33 bp, Homo sapien
taatattgtgatttaagcctttattgtagccat

SEQ ID NO: 303057 - DNA, 33 bp, Homo sapien
cacacttaggagactacagtgtaatgtaaacat

SEQ ID NO: 303058 - DNA, 33 bp, Homo sapien
cacacttaggagactatagtgtaatgtaaacat

SEQ ID NO: 303059 - DNA, 33 bp, Homo sapien
acttgaaatatgatgacgatgaaacattttatt

SEQ ID NO: 303060 - DNA, 33 bp, Homo sapien
acttgaaatatgatgatgatgaaacattttatt

SEQ ID NO: 303061 - DNA, 33 bp, Homo sapien
aaaagaagaaacacaaactgagctagacattta

SEQ ID NO: 303062 - DNA, 33 bp, Homo sapien
aaaagaagaaacacaagctgagctagacattta

SEQ ID NO: 303063 - DNA, 33 bp, Homo sapien
tctaaaagactgcacaaaaaaaccaccataaat

SEQ ID NO: 303064 - DNA, 33 bp, Homo sapien
tctaaaagactgcacacaaaaaccaccataaat

SEQ ID NO: 303065 - DNA, 33 bp, Homo sapien
tgtttcttcaaactaaacctcagtttctttata

SEQ ID NO: 303066 - DNA, 33 bp, Homo sapien
tgtttcttcaaactaagcctcagtttctttata

SEQ ID NO: 303067 - DNA, 33 bp, Homo sapien
aactttttgatcttcaagatgagtttcctgatg

SEQ ID NO: 303068 - DNA, 33 bp, Homo sapien
aactttttgatcttcaggatgagtttcctgatg

SEQ ID NO: 303069 - DNA, 33 bp, Homo sapien
tatacattatacaatccgaaaagtctacatact

SEQ ID NO: 303070 - DNA, 33 bp, Homo sapien
tatacattatacaatctgaaaagtctacatact

SEQ ID NO: 303071 - DNA, 33 bp, Homo sapien
agtacgtattttatgacattgatgtatagtgaa

SEQ ID NO: 303072 - DNA, 33 bp, Homo sapien
agtacgtattttatgatattgatgtatagtgaa

SEQ ID NO: 303073 - DNA, 33 bp, Homo sapien
aagacttccattggtgaatcctacttgtgacat

SEQ ID NO: 303074 - DNA, 33 bp, Homo sapien
aagacttccattggtgcatcctacttgtgacat

SEQ ID NO: 303075 - DNA, 33 bp, Homo sapien
tctagagctgagatgaaacaccaagggaaagta

SEQ ID NO: 303076 - DNA, 33 bp, Homo sapien
tctagagctgagatgagacaccaagggaaagta

SEQ ID NO: 303077 - DNA, 33 bp, Homo sapien
ggaggcaagactatctaacatgtttgtgtcaat

SEQ ID NO: 303078 - DNA, 33 bp, Homo sapien
ggaggcaagactatcttacatgtttgtgtcaat

SEQ ID NO: 303079 - DNA, 33 bp, Homo sapien
cttgcactagaatctaagtcacaagtccctgtc

SEQ ID NO: 303080 - DNA, 33 bp, Homo sapien
cttgcactagaatctaggtcacaagtccctgtc

SEQ ID NO: 303081 - DNA, 33 bp, Homo sapien
tgaagtagaatagtaacggttctgaagttctta

SEQ ID NO: 303082 - DNA, 33 bp, Homo sapien
tgaagtagaatagtaatggttctgaagttctta

SEQ ID NO: 303083 - DNA, 33 bp, Homo sapien
ccacactgtcctatgaagtgtgaaataacaaca

SEQ ID NO: 303084 - DNA, 33 bp, Homo sapien
ccacactgtcctatgatgtgtgaaataacaaca

SEQ ID NO: 303085 - DNA, 33 bp, Homo sapien
gttacagcaagaattcaaactactaatcaagac

SEQ ID NO: 303086 - DNA, 33 bp, Homo sapien
gttacagcaagaattcgaactactaatcaagac

SEQ ID NO: 303087 - DNA, 33 bp, Homo sapien
aatgagtgctggcatcaagctgtgtttttttaa

SEQ ID NO: 303088 - DNA, 33 bp, Homo sapien
aatgagtgctggcatcgagctgtgtttttttaa

SEQ ID NO: 303089 - DNA, 33 bp, Homo sapien
atagtaagatccaactaagaggaagtatactga

SEQ ID NO: 303090 - DNA, 33 bp, Homo sapien
atagtaagatccaactgagaggaagtatactga

SEQ ID NO: 303091 - DNA, 33 bp, Homo sapien
tacatatgatatgtataaatgtaagatatgtat

SEQ ID NO: 303092 - DNA, 33 bp, Homo sapien
tacatatgatatgtatgaatgtaagatatgtat

SEQ ID NO: 303093 - DNA, 33 bp, Homo sapien
aaatggattaacacagacacctttggcttatga

SEQ ID NO: 303094 - DNA, 33 bp, Homo sapien
aaatggattaacacaggcacctttggcttatga

SEQ ID NO: 303095 - DNA, 33 bp, Homo sapien
gaaagtcagattaagacgcagtcagatccctat

SEQ ID NO: 303096 - DNA, 33 bp, Homo sapien
gaaagtcagattaagatgcagtcagatccctat

SEQ ID NO: 303097 - DNA, 33 bp, Homo sapien
gacatcgctacttatgaatctaaaatggcaggg

SEQ ID NO: 303098 - DNA, 33 bp, Homo sapien
gacatcgctacttatgtatctaaaatggcaggg

SEQ ID NO: 303099 - DNA, 33 bp, Homo sapien
gatgatgtttgtcaaaatgtttgttgcagtatt

SEQ ID NO: 303100 - DNA, 33 bp, Homo sapien
gatgatgtttgtcaaagtgtttgttgcagtatt

SEQ ID NO: 303101 - DNA, 33 bp, Homo sapien
ttatgtagtacgtgaccgtatttcagaattgtt

SEQ ID NO: 303102 - DNA, 33 bp, Homo sapien
ttatgtagtacgtgactgtatttcagaattgtt

SEQ ID NO: 303103 - DNA, 33 bp, Homo sapien
gtttctattaaggatcaaggtacagagggtaga

SEQ ID NO: 303104 - DNA, 33 bp, Homo sapien
gtttctattaaggatcgaggtacagagggtaga

SEQ ID NO: 303105 - DNA, 33 bp, Homo sapien
cttttttgctccaaagacgaagcgggctggctt

SEQ ID NO: 303106 - DNA, 33 bp, Homo sapien
cttttttgctccaaaggcgaagcgggctggctt

SEQ ID NO: 303107 - DNA, 33 bp, Homo sapien
ccctcttcttgtataccagggctcgctcttgtt

SEQ ID NO: 303108 - DNA, 33 bp, Homo sapien
ccctcttcttgtatactagggctcgctcttgtt

SEQ ID NO: 303109 - DNA, 33 bp, Homo sapien
ctgagattatataaacagagtctaatgattagc

SEQ ID NO: 303110 - DNA, 33 bp, Homo sapien
ctgagattatataaactgagtctaatgattagc

SEQ ID NO: 303111 - DNA, 33 bp, Homo sapien
aggtgatcttacagtaactaaacactagagtaa

SEQ ID NO: 303112 - DNA, 33 bp, Homo sapien
aggtgatcttacagtatctaaacactagagtaa

SEQ ID NO: 303113 - DNA, 33 bp, Homo sapien
tacttttctatgaagaacctgaattgttaaaag

SEQ ID NO: 303114 - DNA, 33 bp, Homo sapien
tacttttctatgaagagcctgaattgttaaaag

SEQ ID NO: 303115 - DNA, 33 bp, Homo sapien
aatatgaagtattaccaggaaagggcacaagca

SEQ ID NO: 303116 - DNA, 33 bp, Homo sapien
aatatgaagtattaccgggaaagggcacaagca

SEQ ID NO: 303117 - DNA, 33 bp, Homo sapien
gacatggatgtgtgacaaaggaggcaaagatca

SEQ ID NO: 303118 - DNA, 33 bp, Homo sapien
gacatggatgtgtgacgaaggaggcaaagatca

SEQ ID NO: 303119 - DNA, 33 bp, Homo sapien
ggcaagagccatgtaacgtggcccaaaagaaaa

SEQ ID NO: 303120 - DNA, 33 bp, Homo sapien
ggcaagagccatgtaatgtggcccaaaagaaaa

SEQ ID NO: 303121 - DNA, 33 bp, Homo sapien
cactagaaaatttgccaataaatatgcagtagc

SEQ ID NO: 303122 - DNA, 33 bp, Homo sapien
cactagaaaatttgcctataaatatgcagtagc

SEQ ID NO: 303123 - DNA, 33 bp, Homo sapien
tagcaaaattactaaaagtgaacaggctgtttg

SEQ ID NO: 303124 - DNA, 33 bp, Homo sapien
tagcaaaattactaaacgtgaacaggctgtttg

SEQ ID NO: 303125 - DNA, 33 bp, Homo sapien
aaaattaagacagtcagtacagtctatatccta

SEQ ID NO: 303126 - DNA, 33 bp, Homo sapien
aaaattaagacagtcattacagtctatatccta

SEQ ID NO: 303127 - DNA, 33 bp, Homo sapien
ataactgtatgccaccacctcgaattatttctt

SEQ ID NO: 303128 - DNA, 33 bp, Homo sapien
ataactgtatgccaccgcctcgaattatttctt

SEQ ID NO: 303129 - DNA, 33 bp, Homo sapien
tttcatatacatggagacagctaaatgggagac

SEQ ID NO: 303130 - DNA, 33 bp, Homo sapien
tttcatatacatggagccagctaaatgggagac

SEQ ID NO: 303131 - DNA, 33 bp, Homo sapien
tttgttgttaaaattacagatagggtctcactg

SEQ ID NO: 303132 - DNA, 33 bp, Homo sapien
tttgttgttaaaattagagatagggtctcactg

SEQ ID NO: 303133 - DNA, 33 bp, Homo sapien
cttacaatagcccttcaaagtatgtgttaataa

SEQ ID NO: 303134 - DNA, 33 bp, Homo sapien
cttacaatagcccttcgaagtatgtgttaataa

SEQ ID NO: 303135 - DNA, 33 bp, Homo sapien
tttaagccccttcaccaatcaaatcgcttcact

SEQ ID NO: 303136 - DNA, 33 bp, Homo sapien
tttaagccccttcaccgatcaaatcgcttcact

SEQ ID NO: 303137 - DNA, 33 bp, Homo sapien
ggcaggagagttaggcaaatacagcatctttga

SEQ ID NO: 303138 - DNA, 33 bp, Homo sapien
ggcaggagagttaggcgaatacagcatctttga

SEQ ID NO: 303139 - DNA, 33 bp, Homo sapien
acgggggtccttgatacaatgcccttgaaaagg

SEQ ID NO: 303140 - DNA, 33 bp, Homo sapien
acgggggtccttgatataatgcccttgaaaagg

SEQ ID NO: 303141 - DNA, 33 bp, Homo sapien
gtctgatgagaattaaactgtcatttgtatcat

SEQ ID NO: 303142 - DNA, 33 bp, Homo sapien
gtctgatgagaattaagctgtcatttgtatcat

SEQ ID NO: 303143 - DNA, 33 bp, Homo sapien
tttctcactactcctacatccagtagactgaca

SEQ ID NO: 303144 - DNA, 33 bp, Homo sapien
tttctcactactcctatatccagtagactgaca

SEQ ID NO: 303145 - DNA, 33 bp, Homo sapien
ttactataatccacgacgaggaacttggatttt

SEQ ID NO: 303146 - DNA, 33 bp, Homo sapien
ttactataatccacgatgaggaacttggatttt

SEQ ID NO: 303147 - DNA, 33 bp, Homo sapien
tgttatttgttttagaaatcgcaacatccagca

SEQ ID NO: 303148 - DNA, 33 bp, Homo sapien
tgttatttgttttagagatcgcaacatccagca

SEQ ID NO: 303149 - DNA, 33 bp, Homo sapien
atcttacctatagtcacccagtcaataaatagt

SEQ ID NO: 303150 - DNA, 33 bp, Homo sapien
atcttacctatagtcatccagtcaataaatagt

SEQ ID NO: 303151 - DNA, 33 bp, Homo sapien
gcaaactcagtccccaataattacttgtcaaaa

SEQ ID NO: 303152 - DNA, 33 bp, Homo sapien
gcaaactcagtccccagtaattacttgtcaaaa

SEQ ID NO: 303153 - DNA, 33 bp, Homo sapien
ggtttacaaatggctacccataaaaaatacaac

SEQ ID NO: 303154 - DNA, 33 bp, Homo sapien
ggtttacaaatggctatccataaaaaatacaac

SEQ ID NO: 303155 - DNA, 33 bp, Homo sapien
cccagtacattaggtcaattatgtggtcagaag

SEQ ID NO: 303156 - DNA, 33 bp, Homo sapien
cccagtacattaggtccattatgtggtcagaag

SEQ ID NO: 303157 - DNA, 33 bp, Homo sapien
ttctggtattcaagaaccatattctcttcgttt

SEQ ID NO: 303158 - DNA, 33 bp, Homo sapien
ttctggtattcaagaagcatattctcttcgttt

SEQ ID NO: 303159 - DNA, 33 bp, Homo sapien
cagtttttatttttcacgcttctcaactagtat

SEQ ID NO: 303160 - DNA, 33 bp, Homo sapien
cagtttttatttttcatgcttctcaactagtat

SEQ ID NO: 303161 - DNA, 33 bp, Homo sapien
aaggatacttggattcacatctgctttggaaac

SEQ ID NO: 303162 - DNA, 33 bp, Homo sapien
aaggatacttggattcgcatctgctttggaaac

SEQ ID NO: 303163 - DNA, 33 bp, Homo sapien
tagacttcaaatgtgactaactctctcaaatcc

SEQ ID NO: 303164 - DNA, 33 bp, Homo sapien
tagacttcaaatgtgattaactctctcaaatcc

SEQ ID NO: 303165 - DNA, 33 bp, Homo sapien
tgttttaactgtagtccagagtttccatactcc

SEQ ID NO: 303166 - DNA, 33 bp, Homo sapien
tgttttaactgtagtctagagtttccatactcc

SEQ ID NO: 303167 - DNA, 33 bp, Homo sapien
aatggaagtcatgtcactctcctgttttggttt

SEQ ID NO: 303168 - DNA, 33 bp, Homo sapien
aatggaagtcatgtcagtctcctgttttggttt

SEQ ID NO: 303169 - DNA, 33 bp, Homo sapien
gaccagcagtcgcagactccgtttggctagttg

SEQ ID NO: 303170 - DNA, 33 bp, Homo sapien
gaccagcagtcgcagattccgtttggctagttg

SEQ ID NO: 303171 - DNA, 33 bp, Homo sapien
ttaagcccatctaaaaagctaatgcaaattccc

SEQ ID NO: 303172 - DNA, 33 bp, Homo sapien
ttaagcccatctaaaaggctaatgcaaattccc

SEQ ID NO: 303173 - DNA, 33 bp, Homo sapien
ccttgctctagaatccaaagttgcttttttttc

SEQ ID NO: 303174 - DNA, 33 bp, Homo sapien
ccttgctctagaatcccaagttgcttttttttc

SEQ ID NO: 303175 - DNA, 33 bp, Homo sapien
gtatacagctatgcaaatactattttatggtgt

SEQ ID NO: 303176 - DNA, 33 bp, Homo sapien
gtatacagctatgcaagtactattttatggtgt

SEQ ID NO: 303177 - DNA, 33 bp, Homo sapien
cgataggtaagaattagctgctttccaaattaa

SEQ ID NO: 303178 - DNA, 33 bp, Homo sapien
cgataggtaagaattatctgctttccaaattaa

SEQ ID NO: 303179 - DNA, 33 bp, Homo sapien
gcatagaagtccactacggtgaaattaagccac

SEQ ID NO: 303180 - DNA, 33 bp, Homo sapien
gcatagaagtccactatggtgaaattaagccac

SEQ ID NO: 303181 - DNA, 33 bp, Homo sapien
gagaatgaattgactacagcaaggacgaaaagg

SEQ ID NO: 303182 - DNA, 33 bp, Homo sapien
gagaatgaattgactatagcaaggacgaaaagg

SEQ ID NO: 303183 - DNA, 33 bp, Homo sapien
gtgattatctaggttacagctaaatctctggtt

SEQ ID NO: 303184 - DNA, 33 bp, Homo sapien
gtgattatctaggttatagctaaatctctggtt

SEQ ID NO: 303185 - DNA, 33 bp, Homo sapien
ctcactgttctatataccataaaaaaagtcagc

SEQ ID NO: 303186 - DNA, 33 bp, Homo sapien
ctcactgttctatatagcataaaaaaagtcagc

SEQ ID NO: 303187 - DNA, 33 bp, Homo sapien
tactattcactacttacagatcaacgtttttag

SEQ ID NO: 303188 - DNA, 33 bp, Homo sapien
tactattcactacttatagatcaacgtttttag

SEQ ID NO: 303189 - DNA, 33 bp, Homo sapien
aaaagacaaaacataacaagtgttgaggatgca

SEQ ID NO: 303190 - DNA, 33 bp, Homo sapien
aaaagacaaaacataagaagtgttgaggatgca

SEQ ID NO: 303191 - DNA, 33 bp, Homo sapien
gaacagaccagcctgacgcaaaaccctctcagc

SEQ ID NO: 303192 - DNA, 33 bp, Homo sapien
gaacagaccagcctgatgcaaaaccctctcagc

SEQ ID NO: 303193 - DNA, 33 bp, Homo sapien
cacacactgacacatacgcgcacactcatacac

SEQ ID NO: 303194 - DNA, 33 bp, Homo sapien
cacacactgacacatatgcgcacactcatacac

SEQ ID NO: 303195 - DNA, 33 bp, Homo sapien
ttgagaaatgtgtatcaagtgttaagaaattat

SEQ ID NO: 303196 - DNA, 33 bp, Homo sapien
ttgagaaatgtgtatcgagtgttaagaaattat

SEQ ID NO: 303197 - DNA, 33 bp, Homo sapien
atgtacctgcagggtaaaactggaatggcaggg

SEQ ID NO: 303198 - DNA, 33 bp, Homo sapien
atgtacctgcagggtagaactggaatggcaggg

SEQ ID NO: 303199 - DNA, 33 bp, Homo sapien
tgtgacaaaagtccacaagttttcaaagactga

SEQ ID NO: 303200 - DNA, 33 bp, Homo sapien
tgtgacaaaagtccaccagttttcaaagactga

SEQ ID NO: 303201 - DNA, 33 bp, Homo sapien
tcctcggggaagaggacagatgcttgtgtgacc

SEQ ID NO: 303202 - DNA, 33 bp, Homo sapien
tcctcggggaagaggagagatgcttgtgtgacc

SEQ ID NO: 303203 - DNA, 33 bp, Homo sapien
gcaagaacacagggaacgtctacatcgaaagga

SEQ ID NO: 303204 - DNA, 33 bp, Homo sapien
gcaagaacacagggaatgtctacatcgaaagga

SEQ ID NO: 303205 - DNA, 33 bp, Homo sapien
tcatgccttccttaccaatgctgtaattttcct

SEQ ID NO: 303206 - DNA, 33 bp, Homo sapien
tcatgccttccttaccgatgctgtaattttcct

SEQ ID NO: 303207 - DNA, 33 bp, Homo sapien
ttatgtacaccatttacaggagggtaacacaaa

SEQ ID NO: 303208 - DNA, 33 bp, Homo sapien
ttatgtacaccatttataggagggtaacacaaa

SEQ ID NO: 303209 - DNA, 33 bp, Homo sapien
tttctgcgggagcacaatgtaggtcagatagca

SEQ ID NO: 303210 - DNA, 33 bp, Homo sapien
tttctgcgggagcacagtgtaggtcagatagca

SEQ ID NO: 303211 - DNA, 33 bp, Homo sapien
ctctgtaatatgaatcgatctcttagcagctct

SEQ ID NO: 303212 - DNA, 33 bp, Homo sapien
ctctgtaatatgaatctatctcttagcagctct

SEQ ID NO: 303213 - DNA, 33 bp, Homo sapien
ctaaaaggaagtctgacaaaggcattattttag

SEQ ID NO: 303214 - DNA, 33 bp, Homo sapien
ctaaaaggaagtctgagaaaggcattattttag

SEQ ID NO: 303215 - DNA, 33 bp, Homo sapien
tgaaaatgcatattagaagcctcagtgaaaaga

SEQ ID NO: 303216 - DNA, 33 bp, Homo sapien
tgaaaatgcatattaggagcctcagtgaaaaga

SEQ ID NO: 303217 - DNA, 33 bp, Homo sapien
caagaaaaattatgacaggtatgaagcaaaggg

SEQ ID NO: 303218 - DNA, 33 bp, Homo sapien
caagaaaaattatgacgggtatgaagcaaaggg

SEQ ID NO: 303219 - DNA, 33 bp, Homo sapien
aagcccattggtgtacagagaatgatgtatgct

SEQ ID NO: 303220 - DNA, 33 bp, Homo sapien
aagcccattggtgtacggagaatgatgtatgct

SEQ ID NO: 303221 - DNA, 33 bp, Homo sapien
ctccatcctggacacactaatttcaagatcctg

SEQ ID NO: 303222 - DNA, 33 bp, Homo sapien
ctccatcctggacacattaatttcaagatcctg

SEQ ID NO: 303223 - DNA, 33 bp, Homo sapien
ttcctgatctttttccaactttagaggctgcct

SEQ ID NO: 303224 - DNA, 33 bp, Homo sapien
ttcctgatctttttcccactttagaggctgcct

SEQ ID NO: 303225 - DNA, 33 bp, Homo sapien
tacatttggtcatgtcactgtgcttagttgcca

SEQ ID NO: 303226 - DNA, 33 bp, Homo sapien
tacatttggtcatgtcgctgtgcttagttgcca

SEQ ID NO: 303227 - DNA, 33 bp, Homo sapien
agccatagaggtgggcactaatgtttctgaagg

SEQ ID NO: 303228 - DNA, 33 bp, Homo sapien
agccatagaggtgggcgctaatgtttctgaagg

SEQ ID NO: 303229 - DNA, 33 bp, Homo sapien
taggccatgtcagataagttacacttgtgtgat

SEQ ID NO: 303230 - DNA, 33 bp, Homo sapien
taggccatgtcagatatgttacacttgtgtgat

SEQ ID NO: 303231 - DNA, 33 bp, Homo sapien
caagtatgctctcataacacccaatccagtctg

SEQ ID NO: 303232 - DNA, 33 bp, Homo sapien
caagtatgctctcatagcacccaatccagtctg

SEQ ID NO: 303233 - DNA, 33 bp, Homo sapien
caggcatgtgttcatacaaaaacatatcctggt

SEQ ID NO: 303234 - DNA, 33 bp, Homo sapien
caggcatgtgttcatataaaaacatatcctggt

SEQ ID NO: 303235 - DNA, 33 bp, Homo sapien
ttgttcacataatgtaaagaaagtaaagctcaa

SEQ ID NO: 303236 - DNA, 33 bp, Homo sapien
ttgttcacataatgtacagaaagtaaagctcaa

SEQ ID NO: 303237 - DNA, 33 bp, Homo sapien
ggaactaagttcatgacgtctcaaaagtggaat

SEQ ID NO: 303238 - DNA, 33 bp, Homo sapien
ggaactaagttcatgatgtctcaaaagtggaat

SEQ ID NO: 303239 - DNA, 33 bp, Homo sapien
gaggctttttcaactacagtgacttgccaaaaa

SEQ ID NO: 303240 - DNA, 33 bp, Homo sapien
gaggctttttcaactatagtgacttgccaaaaa

SEQ ID NO: 303241 - DNA, 33 bp, Homo sapien
agtcttttgaaatcttaaactcctctctgcttt

SEQ ID NO: 303242 - DNA, 33 bp, Homo sapien
agtcttttgaaatcttgaactcctctctgcttt

SEQ ID NO: 303243 - DNA, 33 bp, Homo sapien
cataacctgtttatcacggaaagtgtgagaaaa

SEQ ID NO: 303244 - DNA, 33 bp, Homo sapien
cataacctgtttatcatggaaagtgtgagaaaa

SEQ ID NO: 303245 - DNA, 33 bp, Homo sapien
caatgcagacgcaagacaacagttaatgccatc

SEQ ID NO: 303246 - DNA, 33 bp, Homo sapien
caatgcagacgcaagataacagttaatgccatc

SEQ ID NO: 303247 - DNA, 33 bp, Homo sapien
catctttcctttgctacgactaaacaaatagct

SEQ ID NO: 303248 - DNA, 33 bp, Homo sapien
catctttcctttgctatgactaaacaaatagct

SEQ ID NO: 303249 - DNA, 33 bp, Homo sapien
agagataaaaccatacaactcttacaagaaaac

SEQ ID NO: 303250 - DNA, 33 bp, Homo sapien
agagataaaaccatacgactcttacaagaaaac

SEQ ID NO: 303251 - DNA, 33 bp, Homo sapien
caaaatcttcacaatacggtcaacttcctttcc

SEQ ID NO: 303252 - DNA, 33 bp, Homo sapien
caaaatcttcacaatatggtcaacttcctttcc

SEQ ID NO: 303253 - DNA, 33 bp, Homo sapien
actgtctagcacagaaccaaacaatgaaatgtt

SEQ ID NO: 303254 - DNA, 33 bp, Homo sapien
actgtctagcacagaagcaaacaatgaaatgtt

SEQ ID NO: 303255 - DNA, 33 bp, Homo sapien
atcattgtgcttcatccaagaaaaatgatagtt

SEQ ID NO: 303256 - DNA, 33 bp, Homo sapien
atcattgtgcttcatctaagaaaaatgatagtt

SEQ ID NO: 303257 - DNA, 33 bp, Homo sapien
ataaatgtgtaaagcacagcaaaattcaatgaa

SEQ ID NO: 303258 - DNA, 33 bp, Homo sapien
ataaatgtgtaaagcatagcaaaattcaatgaa

SEQ ID NO: 303259 - DNA, 33 bp, Homo sapien
gagctggaactctactaaactcaaactgtctaa

SEQ ID NO: 303260 - DNA, 33 bp, Homo sapien
gagctggaactctactgaactcaaactgtctaa

SEQ ID NO: 303261 - DNA, 33 bp, Homo sapien
agttatgtgattggtgccaaacttaaggagatt

SEQ ID NO: 303262 - DNA, 33 bp, Homo sapien
agttatgtgattggtgtcaaacttaaggagatt

SEQ ID NO: 303263 - DNA, 33 bp, Homo sapien
tagttatgagctactcacttaaatgataaatct

SEQ ID NO: 303264 - DNA, 33 bp, Homo sapien
tagttatgagctactcccttaaatgataaatct

SEQ ID NO: 303265 - DNA, 33 bp, Homo sapien
tagagatactatactactagcctttgctgcatg

SEQ ID NO: 303266 - DNA, 33 bp, Homo sapien
tagagatactatactattagcctttgctgcatg

SEQ ID NO: 303267 - DNA, 33 bp, Homo sapien
ccatagccacaaatcaaaagaactatctataga

SEQ ID NO: 303268 - DNA, 33 bp, Homo sapien
ccatagccacaaatcagaagaactatctataga

SEQ ID NO: 303269 - DNA, 33 bp, Homo sapien
aagcattaaaaaagcacaccaaaattcttcctt

SEQ ID NO: 303270 - DNA, 33 bp, Homo sapien
aagcattaaaaaagcataccaaaattcttcctt

SEQ ID NO: 303271 - DNA, 33 bp, Homo sapien
aatggatgtgtgcatacaaacatataagaattt

SEQ ID NO: 303272 - DNA, 33 bp, Homo sapien
aatggatgtgtgcatagaaacatataagaattt

SEQ ID NO: 303273 - DNA, 33 bp, Homo sapien
ataatatactatatttcaaaggctatgagggaa

SEQ ID NO: 303274 - DNA, 33 bp, Homo sapien
ataatatactatatttgaaaggctatgagggaa

SEQ ID NO: 303275 - DNA, 33 bp, Homo sapien
tttcaagaatgttgtacgaattaaaggacatag

SEQ ID NO: 303276 - DNA, 33 bp, Homo sapien
tttcaagaatgttgtatgaattaaaggacatag

SEQ ID NO: 303277 - DNA, 33 bp, Homo sapien
tcagtacacatttatcaaaaccaatagaaagaa

SEQ ID NO: 303278 - DNA, 33 bp, Homo sapien
tcagtacacatttatcgaaaccaatagaaagaa

SEQ ID NO: 303279 - DNA, 33 bp, Homo sapien
gtggtctccacctggagattactttttatatgc

SEQ ID NO: 303280 - DNA, 33 bp, Homo sapien
gtggtctccacctggatattactttttatatgc

SEQ ID NO: 303281 - DNA, 33 bp, Homo sapien
tacatgaatacacataaaatagaataccactca

SEQ ID NO: 303282 - DNA, 33 bp, Homo sapien
tacatgaatacacatacaatagaataccactca

SEQ ID NO: 303283 - DNA, 33 bp, Homo sapien
atccataaatggcagaagtgagctagagaggaa

SEQ ID NO: 303284 - DNA, 33 bp, Homo sapien
atccataaatggcagaggtgagctagagaggaa

SEQ ID NO: 303285 - DNA, 33 bp, Homo sapien
ccaattgtcacgtaacaggtcatgtggattcag

SEQ ID NO: 303286 - DNA, 33 bp, Homo sapien
ccaattgtcacgtaacgggtcatgtggattcag

SEQ ID NO: 303287 - DNA, 33 bp, Homo sapien
cctttgcttaggctgacacctttctttaataat

SEQ ID NO: 303288 - DNA, 33 bp, Homo sapien
cctttgcttaggctgatacctttctttaataat

SEQ ID NO: 303289 - DNA, 33 bp, Homo sapien
gttgtgtgataatctaaggaatttagacttcag

SEQ ID NO: 303290 - DNA, 33 bp, Homo sapien
gttgtgtgataatctatggaatttagacttcag

SEQ ID NO: 303291 - DNA, 33 bp, Homo sapien
gaaaggtagctgcatgaagttataaaaaggggc

SEQ ID NO: 303292 - DNA, 33 bp, Homo sapien
gaaaggtagctgcatggagttataaaaaggggc

SEQ ID NO: 303293 - DNA, 33 bp, Homo sapien
atcgctatgcctggaagggacttgcaaaataac

SEQ ID NO: 303294 - DNA, 33 bp, Homo sapien
atcgctatgcctggaatggacttgcaaaataac

SEQ ID NO: 303295 - DNA, 33 bp, Homo sapien
cctagacaggaacgtaactccatttgtcttttc

SEQ ID NO: 303296 - DNA, 33 bp, Homo sapien
cctagacaggaacgtagctccatttgtcttttc

SEQ ID NO: 303297 - DNA, 33 bp, Homo sapien
gctttcaggagactcaacaaacacagaaggact

SEQ ID NO: 303298 - DNA, 33 bp, Homo sapien
gctttcaggagactcaccaaacacagaaggact

SEQ ID NO: 303299 - DNA, 33 bp, Homo sapien
atgtaacaactagggacgtaggctgcaggataa

SEQ ID NO: 303300 - DNA, 33 bp, Homo sapien
atgtaacaactagggaggtaggctgcaggataa

SEQ ID NO: 303301 - DNA, 33 bp, Homo sapien
agcctgtgtaaaaataccatcctgggcacttcc

SEQ ID NO: 303302 - DNA, 33 bp, Homo sapien
agcctgtgtaaaaatatcatcctgggcacttcc

SEQ ID NO: 303303 - DNA, 33 bp, Homo sapien
tctcatgtgggaccagcatttatctgtgtagaa

SEQ ID NO: 303304 - DNA, 33 bp, Homo sapien
tctcatgtgggaccagtatttatctgtgtagaa

SEQ ID NO: 303305 - DNA, 33 bp, Homo sapien
aattgagtagtccgataataggcgagtaatcaa

SEQ ID NO: 303306 - DNA, 33 bp, Homo sapien
aattgagtagtccgatgataggcgagtaatcaa

SEQ ID NO: 303307 - DNA, 33 bp, Homo sapien
tttttttaattggccacacacggtggtgcatgt

SEQ ID NO: 303308 - DNA, 33 bp, Homo sapien
tttttttaattggccatacacggtggtgcatgt

SEQ ID NO: 303309 - DNA, 33 bp, Homo sapien
atttcctggataaaacaccacaaacaccctttt

SEQ ID NO: 303310 - DNA, 33 bp, Homo sapien
atttcctggataaaacgccacaaacaccctttt

SEQ ID NO: 303311 - DNA, 33 bp, Homo sapien
gttgttgaaaggattaaaatgacagagtaaata

SEQ ID NO: 303312 - DNA, 33 bp, Homo sapien
gttgttgaaaggattacaatgacagagtaaata

SEQ ID NO: 303313 - DNA, 33 bp, Homo sapien
tatcttccttctttccacttcccttgccttgca

SEQ ID NO: 303314 - DNA, 33 bp, Homo sapien
tatcttccttctttccgcttcccttgccttgca

SEQ ID NO: 303315 - DNA, 33 bp, Homo sapien
acagattgaattgctaaaacatacaagactggc

SEQ ID NO: 303316 - DNA, 33 bp, Homo sapien
acagattgaattgctacaacatacaagactggc

SEQ ID NO: 303317 - DNA, 33 bp, Homo sapien
gagcataatgctttggcatcctaaattctgact

SEQ ID NO: 303318 - DNA, 33 bp, Homo sapien
gagcataatgctttgggatcctaaattctgact

SEQ ID NO: 303319 - DNA, 33 bp, Homo sapien
gaatgccctcttctaacctttaatccttattta

SEQ ID NO: 303320 - DNA, 33 bp, Homo sapien
gaatgccctcttctaatctttaatccttattta

SEQ ID NO: 303321 - DNA, 33 bp, Homo sapien
tacacagactcgtataggaatgttctcagcaac

SEQ ID NO: 303322 - DNA, 33 bp, Homo sapien
tacacagactcgtatatgaatgttctcagcaac

SEQ ID NO: 303323 - DNA, 33 bp, Homo sapien
ggcaaccactgatctacgtcgtatcactttagt

SEQ ID NO: 303324 - DNA, 33 bp, Homo sapien
ggcaaccactgatctatgtcgtatcactttagt

SEQ ID NO: 303325 - DNA, 33 bp, Homo sapien
aagtgtttgagaccaacaacaaattgcaaaatc

SEQ ID NO: 303326 - DNA, 33 bp, Homo sapien
aagtgtttgagaccaataacaaattgcaaaatc

SEQ ID NO: 303327 - DNA, 33 bp, Homo sapien
atgtgaaaacatctgaaattgtctcattatcct

SEQ ID NO: 303328 - DNA, 33 bp, Homo sapien
atgtgaaaacatctgagattgtctcattatcct

SEQ ID NO: 303329 - DNA, 33 bp, Homo sapien
gaatactgaggaatcaccctaacacttcccaag

SEQ ID NO: 303330 - DNA, 33 bp, Homo sapien
gaatactgaggaatcatcctaacacttcccaag

SEQ ID NO: 303331 - DNA, 33 bp, Homo sapien
ccccaaatctcataacaccaacattttgaacat

SEQ ID NO: 303332 - DNA, 33 bp, Homo sapien
ccccaaatctcataacgccaacattttgaacat

SEQ ID NO: 303333 - DNA, 33 bp, Homo sapien
agagttcttattattaccagaaagtggtcccaa

SEQ ID NO: 303334 - DNA, 33 bp, Homo sapien
agagttcttattattatcagaaagtggtcccaa

SEQ ID NO: 303335 - DNA, 33 bp, Homo sapien
gacttgattggagcaaaaggagtgataatttag

SEQ ID NO: 303336 - DNA, 33 bp, Homo sapien
gacttgattggagcaacaggagtgataatttag

SEQ ID NO: 303337 - DNA, 33 bp, Homo sapien
tgggaccagaggtcagaatcagtgagcataata

SEQ ID NO: 303338 - DNA, 33 bp, Homo sapien
tgggaccagaggtcaggatcagtgagcataata

SEQ ID NO: 303339 - DNA, 33 bp, Homo sapien
caacattcggttactaaaatgttcagttaccat

SEQ ID NO: 303340 - DNA, 33 bp, Homo sapien
caacattcggttactacaatgttcagttaccat

SEQ ID NO: 303341 - DNA, 33 bp, Homo sapien
gcttttcttccattcaatcatgagtttctgagc

SEQ ID NO: 303342 - DNA, 33 bp, Homo sapien
gcttttcttccattcagtcatgagtttctgagc

SEQ ID NO: 303343 - DNA, 33 bp, Homo sapien
ggtagattttattttccaaagatggcgtaccaa

SEQ ID NO: 303344 - DNA, 33 bp, Homo sapien
ggtagattttattttctaaagatggcgtaccaa

SEQ ID NO: 303345 - DNA, 33 bp, Homo sapien
ccatatgggtctcatcactctctgtctggtctc

SEQ ID NO: 303346 - DNA, 33 bp, Homo sapien
ccatatgggtctcatcgctctctgtctggtctc

SEQ ID NO: 303347 - DNA, 33 bp, Homo sapien
caaagatcgtgcgaggccaaagaagaaaataca

SEQ ID NO: 303348 - DNA, 33 bp, Homo sapien
caaagatcgtgcgaggtcaaagaagaaaataca

SEQ ID NO: 303349 - DNA, 33 bp, Homo sapien
caaaactgaccacataacaattcataacttgta

SEQ ID NO: 303350 - DNA, 33 bp, Homo sapien
caaaactgaccacatagcaattcataacttgta

SEQ ID NO: 303351 - DNA, 33 bp, Homo sapien
aatgaacataatcttcacttccaaaagattctt

SEQ ID NO: 303352 - DNA, 33 bp, Homo sapien
aatgaacataatcttcgcttccaaaagattctt

SEQ ID NO: 303353 - DNA, 33 bp, Homo sapien
cttttgtctctggtcactaccatttaacaatta

SEQ ID NO: 303354 - DNA, 33 bp, Homo sapien
cttttgtctctggtcagtaccatttaacaatta

SEQ ID NO: 303355 - DNA, 33 bp, Homo sapien
aagaaagaaaagtctccattgcttatgtgaaaa

SEQ ID NO: 303356 - DNA, 33 bp, Homo sapien
aagaaagaaaagtctctattgcttatgtgaaaa

SEQ ID NO: 303357 - DNA, 33 bp, Homo sapien
ggcttttgaaatagacgcatgttcatgtgacta

SEQ ID NO: 303358 - DNA, 33 bp, Homo sapien
ggcttttgaaatagactcatgttcatgtgacta

SEQ ID NO: 303359 - DNA, 33 bp, Homo sapien
ccttttttcctcagtcacccaaagttgaagaac

SEQ ID NO: 303360 - DNA, 33 bp, Homo sapien
ccttttttcctcagtcgcccaaagttgaagaac

SEQ ID NO: 303361 - DNA, 33 bp, Homo sapien
ttaactgcactagttaccaatggaaaattcgtc

SEQ ID NO: 303362 - DNA, 33 bp, Homo sapien
ttaactgcactagttagcaatggaaaattcgtc

SEQ ID NO: 303363 - DNA, 33 bp, Homo sapien
tttgacattagcgtaacgcggggcagtgctcat

SEQ ID NO: 303364 - DNA, 33 bp, Homo sapien
tttgacattagcgtaaggcggggcagtgctcat

SEQ ID NO: 303365 - DNA, 33 bp, Homo sapien
gtgaccgtggtctccaaagggacaaaagctctc

SEQ ID NO: 303366 - DNA, 33 bp, Homo sapien
gtgaccgtggtctccacagggacaaaagctctc

SEQ ID NO: 303367 - DNA, 33 bp, Homo sapien
ctctctcatatttctaagactaaaacacaaaac

SEQ ID NO: 303368 - DNA, 33 bp, Homo sapien
ctctctcatatttctatgactaaaacacaaaac

SEQ ID NO: 303369 - DNA, 33 bp, Homo sapien
atttcaggcatcaaaaatagagttttatgtctg

SEQ ID NO: 303370 - DNA, 33 bp, Homo sapien
atttcaggcatcaaaagtagagttttatgtctg

SEQ ID NO: 303371 - DNA, 33 bp, Homo sapien
acaatgactatcctaccaataatcttccctcaa

SEQ ID NO: 303372 - DNA, 33 bp, Homo sapien
acaatgactatcctactaataatcttccctcaa

SEQ ID NO: 303373 - DNA, 33 bp, Homo sapien
gtttgtttacatatagaccttcacagagccacc

SEQ ID NO: 303374 - DNA, 33 bp, Homo sapien
gtttgtttacatataggccttcacagagccacc

SEQ ID NO: 303375 - DNA, 33 bp, Homo sapien
ttttgattttagcgaaagatgccgcctcttcct

SEQ ID NO: 303376 - DNA, 33 bp, Homo sapien
ttttgattttagcgaacgatgccgcctcttcct

SEQ ID NO: 303377 - DNA, 33 bp, Homo sapien
aaagagaattactgtcaattttattccaagctc

SEQ ID NO: 303378 - DNA, 33 bp, Homo sapien
aaagagaattactgtcgattttattccaagctc

SEQ ID NO: 303379 - DNA, 33 bp, Homo sapien
aagaagcaaattttcactaaaaacaaagcagtt

SEQ ID NO: 303380 - DNA, 33 bp, Homo sapien
aagaagcaaattttcattaaaaacaaagcagtt

SEQ ID NO: 303381 - DNA, 33 bp, Homo sapien
atgcaagataaggccacgggacctgaagcaccc

SEQ ID NO: 303382 - DNA, 33 bp, Homo sapien
atgcaagataaggccatgggacctgaagcaccc

SEQ ID NO: 303383 - DNA, 33 bp, Homo sapien
gtgactctcaaaattacggtcccaagcccagca

SEQ ID NO: 303384 - DNA, 33 bp, Homo sapien
gtgactctcaaaattatggtcccaagcccagca

SEQ ID NO: 303385 - DNA, 33 bp, Homo sapien
ccaaagacaccagtaaaagtgtagctttttatg

SEQ ID NO: 303386 - DNA, 33 bp, Homo sapien
ccaaagacaccagtaatagtgtagctttttatg

SEQ ID NO: 303387 - DNA, 33 bp, Homo sapien
catctttaataaagacaattgcactttgaggga

SEQ ID NO: 303388 - DNA, 33 bp, Homo sapien
catctttaataaagacgattgcactttgaggga

SEQ ID NO: 303389 - DNA, 33 bp, Homo sapien
gtaatttatcaataacacaaaactgcttgataa

SEQ ID NO: 303390 - DNA, 33 bp, Homo sapien
gtaatttatcaataacgcaaaactgcttgataa

SEQ ID NO: 303391 - DNA, 33 bp, Homo sapien
attctgagagaaataacggcacaacaaactcga

SEQ ID NO: 303392 - DNA, 33 bp, Homo sapien
attctgagagaaataatggcacaacaaactcga

SEQ ID NO: 303393 - DNA, 33 bp, Homo sapien
atttctgacgtactaaccagatagacaaatctc

SEQ ID NO: 303394 - DNA, 33 bp, Homo sapien
atttctgacgtactaatcagatagacaaatctc

SEQ ID NO: 303395 - DNA, 33 bp, Homo sapien
atacaaaagcaaaagcaaaaacacaataatata

SEQ ID NO: 303396 - DNA, 33 bp, Homo sapien
atacaaaagcaaaagcgaaaacacaataatata

SEQ ID NO: 303397 - DNA, 33 bp, Homo sapien
acattatttttaagcacgaagttagaaaacttg

SEQ ID NO: 303398 - DNA, 33 bp, Homo sapien
acattatttttaagcatgaagttagaaaacttg

SEQ ID NO: 303399 - DNA, 33 bp, Homo sapien
attccagcaaggaatccaaatatagcacacagt

SEQ ID NO: 303400 - DNA, 33 bp, Homo sapien
attccagcaaggaatctaaatatagcacacagt

SEQ ID NO: 303401 - DNA, 33 bp, Homo sapien
gggctattgattggcacctcaaaaggtaagacc

SEQ ID NO: 303402 - DNA, 33 bp, Homo sapien
gggctattgattggcatctcaaaaggtaagacc

SEQ ID NO: 303403 - DNA, 33 bp, Homo sapien
aaatgtatgcttggtaactaaaaggccaatgtt

SEQ ID NO: 303404 - DNA, 33 bp, Homo sapien
aaatgtatgcttggtacctaaaaggccaatgtt

SEQ ID NO: 303405 - DNA, 33 bp, Homo sapien
ggcacttctgaacttaagcaagatttaataatc

SEQ ID NO: 303406 - DNA, 33 bp, Homo sapien
ggcacttctgaacttaggcaagatttaataatc

SEQ ID NO: 303407 - DNA, 33 bp, Homo sapien
agagaccctgagtgagcccaatcatcctgcctc

SEQ ID NO: 303408 - DNA, 33 bp, Homo sapien
agagaccctgagtgaggccaatcatcctgcctc

SEQ ID NO: 303409 - DNA, 33 bp, Homo sapien
agagtgctcatatcacagaggcacgtaagtcat

SEQ ID NO: 303410 - DNA, 33 bp, Homo sapien
agagtgctcatatcacggaggcacgtaagtcat

SEQ ID NO: 303411 - DNA, 33 bp, Homo sapien
tgttttaaattaggacacatatttttactaatg

SEQ ID NO: 303412 - DNA, 33 bp, Homo sapien
tgttttaaattaggacgcatatttttactaatg

SEQ ID NO: 303413 - DNA, 33 bp, Homo sapien
agctttcacccaaatgcagtgtctgtttagtat

SEQ ID NO: 303414 - DNA, 33 bp, Homo sapien
agctttcacccaaatgtagtgtctgtttagtat

SEQ ID NO: 303415 - DNA, 33 bp, Homo sapien
tgtctgcaggttaagtaactagcctaaggtaag

SEQ ID NO: 303416 - DNA, 33 bp, Homo sapien
tgtctgcaggttaagtgactagcctaaggtaag

SEQ ID NO: 303417 - DNA, 33 bp, Homo sapien
tgatttggctgaatggaaaagtgctgtgtccag

SEQ ID NO: 303418 - DNA, 33 bp, Homo sapien
tgatttggctgaatggtaaagtgctgtgtccag

SEQ ID NO: 303419 - DNA, 33 bp, Homo sapien
aggtcttatttccataaggtggcatctgatact

SEQ ID NO: 303420 - DNA, 33 bp, Homo sapien
aggtcttatttccatatggtggcatctgatact

SEQ ID NO: 303421 - DNA, 33 bp, Homo sapien
tttcccattggtcagaagagtacatgtgagaaa

SEQ ID NO: 303422 - DNA, 33 bp, Homo sapien
tttcccattggtcagatgagtacatgtgagaaa

SEQ ID NO: 303423 - DNA, 33 bp, Homo sapien
tgaaactgcagtaagacggcagcaggagctaga

SEQ ID NO: 303424 - DNA, 33 bp, Homo sapien
tgaaactgcagtaagatggcagcaggagctaga

SEQ ID NO: 303425 - DNA, 33 bp, Homo sapien
cagatgccaaaatcaaacttaaaagtcaatgat

SEQ ID NO: 303426 - DNA, 33 bp, Homo sapien
cagatgccaaaatcaatcttaaaagtcaatgat

SEQ ID NO: 303427 - DNA, 33 bp, Homo sapien
gaggctgttaacactcaaaagtattatagatta

SEQ ID NO: 303428 - DNA, 33 bp, Homo sapien
gaggctgttaacactcgaaagtattatagatta

SEQ ID NO: 303429 - DNA, 33 bp, Homo sapien
ctacccctatcaatagaaatcaggtatgctggc

SEQ ID NO: 303430 - DNA, 33 bp, Homo sapien
ctacccctatcaataggaatcaggtatgctggc

SEQ ID NO: 303431 - DNA, 33 bp, Homo sapien
atgctggcgggacgtacagtaatttaaccagag

SEQ ID NO: 303432 - DNA, 33 bp, Homo sapien
atgctggcgggacgtagagtaatttaaccagag

SEQ ID NO: 303433 - DNA, 33 bp, Homo sapien
tggggatcttgttgaactctggattctgatttg

SEQ ID NO: 303434 - DNA, 33 bp, Homo sapien
tggggatcttgttgaattctggattctgatttg

SEQ ID NO: 303435 - DNA, 33 bp, Homo sapien
acatgacaaccactcccatgcagaaggtagaag

SEQ ID NO: 303436 - DNA, 33 bp, Homo sapien
acatgacaaccactcctatgcagaaggtagaag

SEQ ID NO: 303437 - DNA, 33 bp, Homo sapien
cctccagaactcaaagcacatcatccagtcatc

SEQ ID NO: 303438 - DNA, 33 bp, Homo sapien
cctccagaactcaaagtacatcatccagtcatc

SEQ ID NO: 303439 - DNA, 33 bp, Homo sapien
gggttctgcctaatacagaagtaatttagattt

SEQ ID NO: 303440 - DNA, 33 bp, Homo sapien
gggttctgcctaatacggaagtaatttagattt

SEQ ID NO: 303441 - DNA, 33 bp, Homo sapien
actgtaacaggagggcactttgcaactcttgct

SEQ ID NO: 303442 - DNA, 33 bp, Homo sapien
actgtaacaggagggcgctttgcaactcttgct

SEQ ID NO: 303443 - DNA, 33 bp, Homo sapien
aaaaggattacggaaaaatgattatagctagag

SEQ ID NO: 303444 - DNA, 33 bp, Homo sapien
aaaaggattacggaaagatgattatagctagag

SEQ ID NO: 303445 - DNA, 33 bp, Homo sapien
ttatcagtcacatccccatgttgccaatgagaa

SEQ ID NO: 303446 - DNA, 33 bp, Homo sapien
ttatcagtcacatccctatgttgccaatgagaa

SEQ ID NO: 303447 - DNA, 33 bp, Homo sapien
ttgaaaaataaaggcaagtcaagccgtgggcca

SEQ ID NO: 303448 - DNA, 33 bp, Homo sapien
ttgaaaaataaaggcaggtcaagccgtgggcca

SEQ ID NO: 303449 - DNA, 33 bp, Homo sapien
tagctcactcttaccactccttacccatgacag

SEQ ID NO: 303450 - DNA, 33 bp, Homo sapien
tagctcactcttaccattccttacccatgacag

SEQ ID NO: 303451 - DNA, 33 bp, Homo sapien
cttctaagagaacgtcaccttaccgttcaacaa

SEQ ID NO: 303452 - DNA, 33 bp, Homo sapien
cttctaagagaacgtcgccttaccgttcaacaa

SEQ ID NO: 303453 - DNA, 33 bp, Homo sapien
agtctcagccaattaccgcaaccagcttaaaat

SEQ ID NO: 303454 - DNA, 33 bp, Homo sapien
agtctcagccaattactgcaaccagcttaaaat

SEQ ID NO: 303455 - DNA, 33 bp, Homo sapien
gattacaatgattagactagggtagtgtggtta

SEQ ID NO: 303456 - DNA, 33 bp, Homo sapien
gattacaatgattagagtagggtagtgtggtta

SEQ ID NO: 303457 - DNA, 33 bp, Homo sapien
tgagaagcaatttgtcaccagattctcattttt

SEQ ID NO: 303458 - DNA, 33 bp, Homo sapien
tgagaagcaatttgtcgccagattctcattttt

SEQ ID NO: 303459 - DNA, 33 bp, Homo sapien
tatgccaaagtaccaccaaagtattcttcaggc

SEQ ID NO: 303460 - DNA, 33 bp, Homo sapien
tatgccaaagtaccactaaagtattcttcaggc

SEQ ID NO: 303461 - DNA, 33 bp, Homo sapien
gtgtatcgaggccttacgtaatataaatattat

SEQ ID NO: 303462 - DNA, 33 bp, Homo sapien
gtgtatcgaggccttatgtaatataaatattat

SEQ ID NO: 303463 - DNA, 33 bp, Homo sapien
gggctgctgtgtagaactgataatatggacttt

SEQ ID NO: 303464 - DNA, 33 bp, Homo sapien
gggctgctgtgtagaattgataatatggacttt

SEQ ID NO: 303465 - DNA, 33 bp, Homo sapien
tccagacttttcattccctttgaagccaccaaa

SEQ ID NO: 303466 - DNA, 33 bp, Homo sapien
tccagacttttcattctctttgaagccaccaaa

SEQ ID NO: 303467 - DNA, 33 bp, Homo sapien
ccacttatgaagccaaatagttgcttagctttt

SEQ ID NO: 303468 - DNA, 33 bp, Homo sapien
ccacttatgaagccaagtagttgcttagctttt

SEQ ID NO: 303469 - DNA, 33 bp, Homo sapien
tgcttagcttttgtcccgatcacaggttacacc

SEQ ID NO: 303470 - DNA, 33 bp, Homo sapien
tgcttagcttttgtcctgatcacaggttacacc

SEQ ID NO: 303471 - DNA, 33 bp, Homo sapien
ggggaaacattggcaaactattgtcttttgttg

SEQ ID NO: 303472 - DNA, 33 bp, Homo sapien
ggggaaacattggcaagctattgtcttttgttg

SEQ ID NO: 303473 - DNA, 33 bp, Homo sapien
caatctcctgcacggaagcaaataaaaggtatt

SEQ ID NO: 303474 - DNA, 33 bp, Homo sapien
caatctcctgcacggaggcaaataaaaggtatt

SEQ ID NO: 303475 - DNA, 33 bp, Homo sapien
acctacaaggaacatccgagctagaaagaaaat

SEQ ID NO: 303476 - DNA, 33 bp, Homo sapien
acctacaaggaacatctgagctagaaagaaaat

SEQ ID NO: 303477 - DNA, 33 bp, Homo sapien
catccataatagatgcaaggtcctgttggtcca

SEQ ID NO: 303478 - DNA, 33 bp, Homo sapien
catccataatagatgcgaggtcctgttggtcca

SEQ ID NO: 303479 - DNA, 33 bp, Homo sapien
gcccatgtggtcctgacctctggaagttagtcc

SEQ ID NO: 303480 - DNA, 33 bp, Homo sapien
gcccatgtggtcctgatctctggaagttagtcc

SEQ ID NO: 303481 - DNA, 33 bp, Homo sapien
agattctgattgtacccgaatccattttctcca

SEQ ID NO: 303482 - DNA, 33 bp, Homo sapien
agattctgattgtacctgaatccattttctcca

SEQ ID NO: 303483 - DNA, 33 bp, Homo sapien
cgttgaactgtgtctgcaaataaccatgtgtgc

SEQ ID NO: 303484 - DNA, 33 bp, Homo sapien
cgttgaactgtgtctggaaataaccatgtgtgc

SEQ ID NO: 303485 - DNA, 33 bp, Homo sapien
gtaactgaagcaagtaaaaactatggagcctga

SEQ ID NO: 303486 - DNA, 33 bp, Homo sapien
gtaactgaagcaagtagaaactatggagcctga

SEQ ID NO: 303487 - DNA, 33 bp, Homo sapien
caccaaaagcacagacaaaaaatgcaaaaatag

SEQ ID NO: 303488 - DNA, 33 bp, Homo sapien
caccaaaagcacagacgaaaaatgcaaaaatag

SEQ ID NO: 303489 - DNA, 33 bp, Homo sapien
gtgaaaacaatctaaacgtcctttgatggatga

SEQ ID NO: 303490 - DNA, 33 bp, Homo sapien
gtgaaaacaatctaaatgtcctttgatggatga

SEQ ID NO: 303491 - DNA, 33 bp, Homo sapien
agattgatacatttcacggaaaaattgagacta

SEQ ID NO: 303492 - DNA, 33 bp, Homo sapien
agattgatacatttcatggaaaaattgagacta

SEQ ID NO: 303493 - DNA, 33 bp, Homo sapien
atatgaagtgagtatccaaagatttctaaataa

SEQ ID NO: 303494 - DNA, 33 bp, Homo sapien
atatgaagtgagtatcgaaagatttctaaataa

SEQ ID NO: 303495 - DNA, 33 bp, Homo sapien
ttattcagtgaccaaaataagaatctgcatctc

SEQ ID NO: 303496 - DNA, 33 bp, Homo sapien
ttattcagtgaccaaagtaagaatctgcatctc

SEQ ID NO: 303497 - DNA, 33 bp, Homo sapien
gaggtttctgttgatacaatgagttttcctgtg

SEQ ID NO: 303498 - DNA, 33 bp, Homo sapien
gaggtttctgttgatataatgagttttcctgtg

SEQ ID NO: 303499 - DNA, 33 bp, Homo sapien
ccactgctcactataactcaccattgaaacata

SEQ ID NO: 303500 - DNA, 33 bp, Homo sapien
ccactgctcactataagtcaccattgaaacata

SEQ ID NO: 303501 - DNA, 33 bp, Homo sapien
attttgattttctttcacactgtttaatgacat

SEQ ID NO: 303502 - DNA, 33 bp, Homo sapien
attttgattttctttcccactgtttaatgacat

SEQ ID NO: 303503 - DNA, 33 bp, Homo sapien
tgatagcactagataagaggaatttttcagctc

SEQ ID NO: 303504 - DNA, 33 bp, Homo sapien
tgatagcactagataataggaatttttcagctc

SEQ ID NO: 303505 - DNA, 33 bp, Homo sapien
actgctcaaggataaaatctaaatgttaatatt

SEQ ID NO: 303506 - DNA, 33 bp, Homo sapien
actgctcaaggataaagtctaaatgttaatatt

SEQ ID NO: 303507 - DNA, 33 bp, Homo sapien
aatgcttggagttaccagaaaattgatttattc

SEQ ID NO: 303508 - DNA, 33 bp, Homo sapien
aatgcttggagttacctgaaaattgatttattc

SEQ ID NO: 303509 - DNA, 33 bp, Homo sapien
gtaataaattggtacacgataaggaaaatatag

SEQ ID NO: 303510 - DNA, 33 bp, Homo sapien
gtaataaattggtacatgataaggaaaatatag

SEQ ID NO: 303511 - DNA, 33 bp, Homo sapien
cttcatggttatttcaactctgactttagtatc

SEQ ID NO: 303512 - DNA, 33 bp, Homo sapien
cttcatggttatttcagctctgactttagtatc

SEQ ID NO: 303513 - DNA, 33 bp, Homo sapien
caatttgacacttataaatccagctgcctacct

SEQ ID NO: 303514 - DNA, 33 bp, Homo sapien
caatttgacacttatacatccagctgcctacct

SEQ ID NO: 303515 - DNA, 33 bp, Homo sapien
aaaatgtgaatcgaaaatagtagaaattgtggc

SEQ ID NO: 303516 - DNA, 33 bp, Homo sapien
aaaatgtgaatcgaaagtagtagaaattgtggc

SEQ ID NO: 303517 - DNA, 33 bp, Homo sapien
catagtgaagcaatgacagaatttaggtgatgt

SEQ ID NO: 303518 - DNA, 33 bp, Homo sapien
catagtgaagcaatgatagaatttaggtgatgt

SEQ ID NO: 303519 - DNA, 33 bp, Homo sapien
agctgagatgttaaaaaaactctgggtgttaag

SEQ ID NO: 303520 - DNA, 33 bp, Homo sapien
agctgagatgttaaaacaactctgggtgttaag

SEQ ID NO: 303521 - DNA, 33 bp, Homo sapien
caggaagacaaggagaaaaaggcagagaaggca

SEQ ID NO: 303522 - DNA, 33 bp, Homo sapien
caggaagacaaggagagaaaggcagagaaggca

SEQ ID NO: 303523 - DNA, 33 bp, Homo sapien
caaactagaatattatcagctcagggacatgaa

SEQ ID NO: 303524 - DNA, 33 bp, Homo sapien
caaactagaatattatgagctcagggacatgaa

SEQ ID NO: 303525 - DNA, 33 bp, Homo sapien
ttggggatatggaggcaaccctatagctttacc

SEQ ID NO: 303526 - DNA, 33 bp, Homo sapien
ttggggatatggaggcgaccctatagctttacc

SEQ ID NO: 303527 - DNA, 33 bp, Homo sapien
ctggtataatacctccactttcatgaataaagg

SEQ ID NO: 303528 - DNA, 33 bp, Homo sapien
ctggtataatacctccgctttcatgaataaagg

SEQ ID NO: 303529 - DNA, 33 bp, Homo sapien
gcagacagggaatcccagaggaaatgacacaaa

SEQ ID NO: 303530 - DNA, 33 bp, Homo sapien
gcagacagggaatcccggaggaaatgacacaaa

SEQ ID NO: 303531 - DNA, 33 bp, Homo sapien
agtattctttcggtaacggtgtttccttgatga

SEQ ID NO: 303532 - DNA, 33 bp, Homo sapien
agtattctttcggtaatggtgtttccttgatga

SEQ ID NO: 303533 - DNA, 33 bp, Homo sapien
ttccttgatgaaatgaataagagtttaactatt

SEQ ID NO: 303534 - DNA, 33 bp, Homo sapien
ttccttgatgaaatgagtaagagtttaactatt

SEQ ID NO: 303535 - DNA, 33 bp, Homo sapien
ttcccattgtttctaacggccttgtcctcaaga

SEQ ID NO: 303536 - DNA, 33 bp, Homo sapien
ttcccattgtttctaatggccttgtcctcaaga

SEQ ID NO: 303537 - DNA, 33 bp, Homo sapien
aggatatgctcactacaattccctctttccatt

SEQ ID NO: 303538 - DNA, 33 bp, Homo sapien
aggatatgctcactacgattccctctttccatt

SEQ ID NO: 303539 - DNA, 33 bp, Homo sapien
agtaaaatgacaaggacgagaggagtttttcat

SEQ ID NO: 303540 - DNA, 33 bp, Homo sapien
agtaaaatgacaaggatgagaggagtttttcat

SEQ ID NO: 303541 - DNA, 33 bp, Homo sapien
taaatcataattgtgacaaaacaggtttctttc

SEQ ID NO: 303542 - DNA, 33 bp, Homo sapien
taaatcataattgtgagaaaacaggtttctttc

SEQ ID NO: 303543 - DNA, 33 bp, Homo sapien
ggttcctagtcatgcaccgcttaatgatgggga

SEQ ID NO: 303544 - DNA, 33 bp, Homo sapien
ggttcctagtcatgcatcgcttaatgatgggga

SEQ ID NO: 303545 - DNA, 33 bp, Homo sapien
attattggactttgaaggtgtgttaactttgtt

SEQ ID NO: 303546 - DNA, 33 bp, Homo sapien
attattggactttgaatgtgtgttaactttgtt

SEQ ID NO: 303547 - DNA, 33 bp, Homo sapien
gttacagacaggtaagcaaagtgctaagtggca

SEQ ID NO: 303548 - DNA, 33 bp, Homo sapien
gttacagacaggtaagtaaagtgctaagtggca

SEQ ID NO: 303549 - DNA, 33 bp, Homo sapien
tgattctcttaatgaaataatataggctggtat

SEQ ID NO: 303550 - DNA, 33 bp, Homo sapien
tgattctcttaatgaagtaatataggctggtat

SEQ ID NO: 303551 - DNA, 33 bp, Homo sapien
gccatgagatattagaagcaacaagaaacatgt

SEQ ID NO: 303552 - DNA, 33 bp, Homo sapien
gccatgagatattagaggcaacaagaaacatgt

SEQ ID NO: 303553 - DNA, 33 bp, Homo sapien
tattggactccatccaaaggtttgtatatattg

SEQ ID NO: 303554 - DNA, 33 bp, Homo sapien
tattggactccatccagaggtttgtatatattg

SEQ ID NO: 303555 - DNA, 33 bp, Homo sapien
ggtaaaagataaagcacgttgagttttgaggct

SEQ ID NO: 303556 - DNA, 33 bp, Homo sapien
ggtaaaagataaagcatgttgagttttgaggct

SEQ ID NO: 303557 - DNA, 33 bp, Homo sapien
gcttcaacaactaaaactctaccatgccttgtt

SEQ ID NO: 303558 - DNA, 33 bp, Homo sapien
gcttcaacaactaaaattctaccatgccttgtt

SEQ ID NO: 303559 - DNA, 33 bp, Homo sapien
acctttgcaattttaaatgaagctacagattct

SEQ ID NO: 303560 - DNA, 33 bp, Homo sapien
acctttgcaattttaattgaagctacagattct

SEQ ID NO: 303561 - DNA, 33 bp, Homo sapien
tcttaccatgcttcacacaataattaatctaaa

SEQ ID NO: 303562 - DNA, 33 bp, Homo sapien
tcttaccatgcttcacgcaataattaatctaaa

SEQ ID NO: 303563 - DNA, 33 bp, Homo sapien
tttttctgaggctagaaaaataagaaatagaat

SEQ ID NO: 303564 - DNA, 33 bp, Homo sapien
tttttctgaggctagacaaataagaaatagaat

SEQ ID NO: 303565 - DNA, 33 bp, Homo sapien
cttgaccatcgttgcacctttattttatttcaa

SEQ ID NO: 303566 - DNA, 33 bp, Homo sapien
cttgaccatcgttgcatctttattttatttcaa

SEQ ID NO: 303567 - DNA, 33 bp, Homo sapien
ggactttctcttacagacggagactctactttg

SEQ ID NO: 303568 - DNA, 33 bp, Homo sapien
ggactttctcttacaggcggagactctactttg

SEQ ID NO: 303569 - DNA, 33 bp, Homo sapien
tgagaatatcaggagaggagaaaaaagagaaga

SEQ ID NO: 303570 - DNA, 33 bp, Homo sapien
tgagaatatcaggagatgagaaaaaagagaaga

SEQ ID NO: 303571 - DNA, 33 bp, Homo sapien
aaagtaagtgacctcacactgtaatttaaaaca

SEQ ID NO: 303572 - DNA, 33 bp, Homo sapien
aaagtaagtgacctcagactgtaatttaaaaca

SEQ ID NO: 303573 - DNA, 33 bp, Homo sapien
ttttggagttgttatgcaacattattgcagcaa

SEQ ID NO: 303574 - DNA, 33 bp, Homo sapien
ttttggagttgttatgtaacattattgcagcaa

SEQ ID NO: 303575 - DNA, 33 bp, Homo sapien
atttaaaaagtgtaagaactatatcctatacca

SEQ ID NO: 303576 - DNA, 33 bp, Homo sapien
atttaaaaagtgtaagcactatatcctatacca

SEQ ID NO: 303577 - DNA, 33 bp, Homo sapien
acaggcctggattggacgcttactagagttttt

SEQ ID NO: 303578 - DNA, 33 bp, Homo sapien
acaggcctggattggatgcttactagagttttt

SEQ ID NO: 303579 - DNA, 33 bp, Homo sapien
aagttcatttttggctcagaggtatttgttttg

SEQ ID NO: 303580 - DNA, 33 bp, Homo sapien
aagttcatttttggcttagaggtatttgttttg

SEQ ID NO: 303581 - DNA, 33 bp, Homo sapien
actcaacttctaagtccagcagggttatttatc

SEQ ID NO: 303582 - DNA, 33 bp, Homo sapien
actcaacttctaagtctagcagggttatttatc

SEQ ID NO: 303583 - DNA, 33 bp, Homo sapien
ttttattctaagtgcaaactccttttcatggca

SEQ ID NO: 303584 - DNA, 33 bp, Homo sapien
ttttattctaagtgcagactccttttcatggca

SEQ ID NO: 303585 - DNA, 33 bp, Homo sapien
tgaaggcattttgtaaactatgaaccactctac

SEQ ID NO: 303586 - DNA, 33 bp, Homo sapien
tgaaggcattttgtaagctatgaaccactctac

SEQ ID NO: 303587 - DNA, 33 bp, Homo sapien
acaatggtctaaaagcaatcagttggtaatgga

SEQ ID NO: 303588 - DNA, 33 bp, Homo sapien
acaatggtctaaaagctatcagttggtaatgga

SEQ ID NO: 303589 - DNA, 33 bp, Homo sapien
ggaagatggatctaaacgcagaaaaggcctgga

SEQ ID NO: 303590 - DNA, 33 bp, Homo sapien
ggaagatggatctaaatgcagaaaaggcctgga

SEQ ID NO: 303591 - DNA, 33 bp, Homo sapien
aggtactattactgacagcatccctacaataaa

SEQ ID NO: 303592 - DNA, 33 bp, Homo sapien
aggtactattactgacggcatccctacaataaa

SEQ ID NO: 303593 - DNA, 33 bp, Homo sapien
tggtaagcattcattccaccatggcttggatgg

SEQ ID NO: 303594 - DNA, 33 bp, Homo sapien
tggtaagcattcattctaccatggcttggatgg

SEQ ID NO: 303595 - DNA, 33 bp, Homo sapien
gctgtcttttccaccactctagacattggagta

SEQ ID NO: 303596 - DNA, 33 bp, Homo sapien
gctgtcttttccaccattctagacattggagta

SEQ ID NO: 303597 - DNA, 33 bp, Homo sapien
agagggaagaaggtcacgaggacacaccctttg

SEQ ID NO: 303598 - DNA, 33 bp, Homo sapien
agagggaagaaggtcatgaggacacaccctttg

SEQ ID NO: 303599 - DNA, 33 bp, Homo sapien
gactggtgaggcaacacaggagaggaatccagt

SEQ ID NO: 303600 - DNA, 33 bp, Homo sapien
gactggtgaggcaacagaggagaggaatccagt

SEQ ID NO: 303601 - DNA, 33 bp, Homo sapien
tatgttgattactgcaacctctttgtaaagtga

SEQ ID NO: 303602 - DNA, 33 bp, Homo sapien
tatgttgattactgcaccctctttgtaaagtga

SEQ ID NO: 303603 - DNA, 33 bp, Homo sapien
ttgatgaatataatgcgaaccacaccaggggca

SEQ ID NO: 303604 - DNA, 33 bp, Homo sapien
ttgatgaatataatgctaaccacaccaggggca

SEQ ID NO: 303605 - DNA, 33 bp, Homo sapien
gggtgttcttctggtacgtctgtaaccaccttg

SEQ ID NO: 303606 - DNA, 33 bp, Homo sapien
gggtgttcttctggtatgtctgtaaccaccttg

SEQ ID NO: 303607 - DNA, 33 bp, Homo sapien
aggcttcctagtgtcaatcatttgaaatctaaa

SEQ ID NO: 303608 - DNA, 33 bp, Homo sapien
aggcttcctagtgtcagtcatttgaaatctaaa

SEQ ID NO: 303609 - DNA, 33 bp, Homo sapien
tcttacactaaagcaactgtttgctgatttggg

SEQ ID NO: 303610 - DNA, 33 bp, Homo sapien
tcttacactaaagcaagtgtttgctgatttggg

SEQ ID NO: 303611 - DNA, 33 bp, Homo sapien
tggacttgtgaagcacaaatgcagtgaaaagag

SEQ ID NO: 303612 - DNA, 33 bp, Homo sapien
tggacttgtgaagcacgaatgcagtgaaaagag

SEQ ID NO: 303613 - DNA, 33 bp, Homo sapien
tttcataagcttttaaaaactcgccaatcaccc

SEQ ID NO: 303614 - DNA, 33 bp, Homo sapien
tttcataagcttttaagaactcgccaatcaccc

SEQ ID NO: 303615 - DNA, 33 bp, Homo sapien
cttttgggttaccagaacaacttaagattttta

SEQ ID NO: 303616 - DNA, 33 bp, Homo sapien
cttttgggttaccagagcaacttaagattttta

SEQ ID NO: 303617 - DNA, 33 bp, Homo sapien
aagtatatgcaattcacagaactttggaatttg

SEQ ID NO: 303618 - DNA, 33 bp, Homo sapien
aagtatatgcaattcagagaactttggaatttg

SEQ ID NO: 303619 - DNA, 33 bp, Homo sapien
cctaaaagttttcaaaatgagatgtaaaatcaa

SEQ ID NO: 303620 - DNA, 33 bp, Homo sapien
cctaaaagttttcaaagtgagatgtaaaatcaa

SEQ ID NO: 303621 - DNA, 33 bp, Homo sapien
gccatattggaagggacatcgctacaaaatttg

SEQ ID NO: 303622 - DNA, 33 bp, Homo sapien
gccatattggaagggatatcgctacaaaatttg

SEQ ID NO: 303623 - DNA, 33 bp, Homo sapien
gtaagtgccttaaacacgtttctgtctcccaga

SEQ ID NO: 303624 - DNA, 33 bp, Homo sapien
gtaagtgccttaaacatgtttctgtctcccaga

SEQ ID NO: 303625 - DNA, 33 bp, Homo sapien
gagtggaacgaagtgacgaaagcttggcaaaca

SEQ ID NO: 303626 - DNA, 33 bp, Homo sapien
gagtggaacgaagtgatgaaagcttggcaaaca

SEQ ID NO: 303627 - DNA, 33 bp, Homo sapien
tatataaaatgagaaacatgagttcatatatcc

SEQ ID NO: 303628 - DNA, 33 bp, Homo sapien
tatataaaatgagaaagatgagttcatatatcc

SEQ ID NO: 303629 - DNA, 33 bp, Homo sapien
agagcagagccatgctcacttaggcacttaatc

SEQ ID NO: 303630 - DNA, 33 bp, Homo sapien
agagcagagccatgcttacttaggcacttaatc

SEQ ID NO: 303631 - DNA, 33 bp, Homo sapien
ggtcctgcctacacacaagtgaacacaccagga

SEQ ID NO: 303632 - DNA, 33 bp, Homo sapien
ggtcctgcctacacacgagtgaacacaccagga

SEQ ID NO: 303633 - DNA, 33 bp, Homo sapien
aggagaggaggaaatacgtaacagagaccttca

SEQ ID NO: 303634 - DNA, 33 bp, Homo sapien
aggagaggaggaaatatgtaacagagaccttca

SEQ ID NO: 303635 - DNA, 33 bp, Homo sapien
caagcctctgagacttaggcgagccaggcaata

SEQ ID NO: 303636 - DNA, 33 bp, Homo sapien
caagcctctgagactttggcgagccaggcaata

SEQ ID NO: 303637 - DNA, 33 bp, Homo sapien
aactcttccctccagaagtttggaatgctcgtg

SEQ ID NO: 303638 - DNA, 33 bp, Homo sapien
aactcttccctccagaggtttggaatgctcgtg

SEQ ID NO: 303639 - DNA, 33 bp, Homo sapien
tgaactgagtaggtagaaaaaaaattgagagtc

SEQ ID NO: 303640 - DNA, 33 bp, Homo sapien
tgaactgagtaggtaggaaaaaaattgagagtc

SEQ ID NO: 303641 - DNA, 33 bp, Homo sapien
caaaagcatgtccttaaggtttggtgcctaaat

SEQ ID NO: 303642 - DNA, 33 bp, Homo sapien
caaaagcatgtccttacggtttggtgcctaaat

SEQ ID NO: 303643 - DNA, 33 bp, Homo sapien
gcttgctcccttcccacagaacattttgcttat

SEQ ID NO: 303644 - DNA, 33 bp, Homo sapien
gcttgctcccttcccatagaacattttgcttat

SEQ ID NO: 303645 - DNA, 33 bp, Homo sapien
taatagggaatatccaataagagatccagacca

SEQ ID NO: 303646 - DNA, 33 bp, Homo sapien
taatagggaatatccagtaagagatccagacca

SEQ ID NO: 303647 - DNA, 33 bp, Homo sapien
ttatgaatgtggtaagaaaaattcagtggactc

SEQ ID NO: 303648 - DNA, 33 bp, Homo sapien
ttatgaatgtggtaagcaaaattcagtggactc

SEQ ID NO: 303649 - DNA, 33 bp, Homo sapien
attgaataaggagtcaaagtttcaaggatgagg

SEQ ID NO: 303650 - DNA, 33 bp, Homo sapien
attgaataaggagtcagagtttcaaggatgagg

SEQ ID NO: 303651 - DNA, 33 bp, Homo sapien
agacaaactaaatggtaaaatagagaggaagcc

SEQ ID NO: 303652 - DNA, 33 bp, Homo sapien
agacaaactaaatggtgaaatagagaggaagcc

SEQ ID NO: 303653 - DNA, 33 bp, Homo sapien
caggtgactgagaacaacacttccctaaaagcc

SEQ ID NO: 303654 - DNA, 33 bp, Homo sapien
caggtgactgagaacagcacttccctaaaagcc

SEQ ID NO: 303655 - DNA, 33 bp, Homo sapien
attctaatccaagtgcacatttaccttttctcc

SEQ ID NO: 303656 - DNA, 33 bp, Homo sapien
attctaatccaagtgcgcatttaccttttctcc

SEQ ID NO: 303657 - DNA, 33 bp, Homo sapien
ttaaactagtggaactgagatttcagatttagc

SEQ ID NO: 303658 - DNA, 33 bp, Homo sapien
ttaaactagtggaacttagatttcagatttagc

SEQ ID NO: 303659 - DNA, 33 bp, Homo sapien
ctacatgttaggggaagaatatgctggcaaaat

SEQ ID NO: 303660 - DNA, 33 bp, Homo sapien
ctacatgttaggggaataatatgctggcaaaat

SEQ ID NO: 303661 - DNA, 33 bp, Homo sapien
taagcccggagactaacgcaccttgtagggaag

SEQ ID NO: 303662 - DNA, 33 bp, Homo sapien
taagcccggagactaaggcaccttgtagggaag

SEQ ID NO: 303663 - DNA, 33 bp, Homo sapien
agagactagggttgaactcccatcctgcactgt

SEQ ID NO: 303664 - DNA, 33 bp, Homo sapien
agagactagggttgaattcccatcctgcactgt

SEQ ID NO: 303665 - DNA, 33 bp, Homo sapien
taaagtttgacatctacggagctagacaaggga

SEQ ID NO: 303666 - DNA, 33 bp, Homo sapien
taaagtttgacatctatggagctagacaaggga

SEQ ID NO: 303667 - DNA, 33 bp, Homo sapien
ccaaggtcactttggacgtgaataccacactcc

SEQ ID NO: 303668 - DNA, 33 bp, Homo sapien
ccaaggtcactttggatgtgaataccacactcc

SEQ ID NO: 303669 - DNA, 33 bp, Homo sapien
gaagggcaaactaaagaaggtcagagaacgaga

SEQ ID NO: 303670 - DNA, 33 bp, Homo sapien
gaagggcaaactaaagcaggtcagagaacgaga

SEQ ID NO: 303671 - DNA, 33 bp, Homo sapien
tcacagtgttaaaaggacaaagaggcagtatct

SEQ ID NO: 303672 - DNA, 33 bp, Homo sapien
tcacagtgttaaaaggtcaaagaggcagtatct

SEQ ID NO: 303673 - DNA, 33 bp, Homo sapien
gctggttgtgagggaaaaataagctgaatatga

SEQ ID NO: 303674 - DNA, 33 bp, Homo sapien
gctggttgtgagggaagaataagctgaatatga

SEQ ID NO: 303675 - DNA, 33 bp, Homo sapien
tttgtttttggagtgaccacaaaatgagagtaa

SEQ ID NO: 303676 - DNA, 33 bp, Homo sapien
tttgtttttggagtgatcacaaaatgagagtaa

SEQ ID NO: 303677 - DNA, 33 bp, Homo sapien
gtctgtaattcacagaaggctgaatatggggta

SEQ ID NO: 303678 - DNA, 33 bp, Homo sapien
gtctgtaattcacagagggctgaatatggggta

SEQ ID NO: 303679 - DNA, 33 bp, Homo sapien
gaaaattcgtgtcatactacaggccaagagcca

SEQ ID NO: 303680 - DNA, 33 bp, Homo sapien
gaaaattcgtgtcatagtacaggccaagagcca

SEQ ID NO: 303681 - DNA, 33 bp, Homo sapien
agccagagataggaataatagatatcaagttaa

SEQ ID NO: 303682 - DNA, 33 bp, Homo sapien
agccagagataggaatgatagatatcaagttaa

SEQ ID NO: 303683 - DNA, 33 bp, Homo sapien
aacattaaatgacagacgtttttcttcctctag

SEQ ID NO: 303684 - DNA, 33 bp, Homo sapien
aacattaaatgacagatgtttttcttcctctag

SEQ ID NO: 303685 - DNA, 33 bp, Homo sapien
gctgtctaacctaatacgtcctactgtaatttt

SEQ ID NO: 303686 - DNA, 33 bp, Homo sapien
gctgtctaacctaatatgtcctactgtaatttt

SEQ ID NO: 303687 - DNA, 33 bp, Homo sapien
ttagttctttatgcccaaaaaagttaacacacc

SEQ ID NO: 303688 - DNA, 33 bp, Homo sapien
ttagttctttatgccccaaaaagttaacacacc

SEQ ID NO: 303689 - DNA, 33 bp, Homo sapien
ctctgacccacatttcaaaatctatgtgtccct

SEQ ID NO: 303690 - DNA, 33 bp, Homo sapien
ctctgacccacatttcgaaatctatgtgtccct

SEQ ID NO: 303691 - DNA, 33 bp, Homo sapien
gctgaaactctttgcacgaaggccaccaatgat

SEQ ID NO: 303692 - DNA, 33 bp, Homo sapien
gctgaaactctttgcatgaaggccaccaatgat

SEQ ID NO: 303693 - DNA, 33 bp, Homo sapien
tatgctgcctattgtccaacatctgaaaatgat

SEQ ID NO: 303694 - DNA, 33 bp, Homo sapien
tatgctgcctattgtctaacatctgaaaatgat

SEQ ID NO: 303695 - DNA, 33 bp, Homo sapien
aacagagactatatgcgcaggcattaaacaaat

SEQ ID NO: 303696 - DNA, 33 bp, Homo sapien
aacagagactatatgctcaggcattaaacaaat

SEQ ID NO: 303697 - DNA, 33 bp, Homo sapien
ctttcctctctgccacaagacggaaatgtccta

SEQ ID NO: 303698 - DNA, 33 bp, Homo sapien
ctttcctctctgccaccagacggaaatgtccta

SEQ ID NO: 303699 - DNA, 33 bp, Homo sapien
caagatggccgttaaaacttctgaatgcaaagg

SEQ ID NO: 303700 - DNA, 33 bp, Homo sapien
caagatggccgttaaagcttctgaatgcaaagg

SEQ ID NO: 303701 - DNA, 33 bp, Homo sapien
actttcccttctgacaatggtatttagacattt

SEQ ID NO: 303702 - DNA, 33 bp, Homo sapien
actttcccttctgacagtggtatttagacattt

SEQ ID NO: 303703 - DNA, 33 bp, Homo sapien
gtctttccttgagtgactgacctctcttagcct

SEQ ID NO: 303704 - DNA, 33 bp, Homo sapien
gtctttccttgagtgattgacctctcttagcct

SEQ ID NO: 303705 - DNA, 33 bp, Homo sapien
tgtagttgcttctttaagtttggctactttaaa

SEQ ID NO: 303706 - DNA, 33 bp, Homo sapien
tgtagttgcttctttaggtttggctactttaaa

SEQ ID NO: 303707 - DNA, 33 bp, Homo sapien
tttcacacgtgctaacaagagagaacttttact

SEQ ID NO: 303708 - DNA, 33 bp, Homo sapien
tttcacacgtgctaacgagagagaacttttact

SEQ ID NO: 303709 - DNA, 33 bp, Homo sapien
gtcataacctttagacactgttgagccaggatg

SEQ ID NO: 303710 - DNA, 33 bp, Homo sapien
gtcataacctttagacgctgttgagccaggatg

SEQ ID NO: 303711 - DNA, 33 bp, Homo sapien
ctgagacacaattcccacttgacagcaaacaaa

SEQ ID NO: 303712 - DNA, 33 bp, Homo sapien
ctgagacacaattcccgcttgacagcaaacaaa

SEQ ID NO: 303713 - DNA, 33 bp, Homo sapien
ctaaatctaagctcagaaattagtcactaactt

SEQ ID NO: 303714 - DNA, 33 bp, Homo sapien
ctaaatctaagctcaggaattagtcactaactt

SEQ ID NO: 303715 - DNA, 33 bp, Homo sapien
ctgtctgtgcagaaaaaagtggaatttgaaccc

SEQ ID NO: 303716 - DNA, 33 bp, Homo sapien
ctgtctgtgcagaaaagagtggaatttgaaccc

SEQ ID NO: 303717 - DNA, 33 bp, Homo sapien
ggagggctccaacaaaccaaatgatagcagtaa

SEQ ID NO: 303718 - DNA, 33 bp, Homo sapien
ggagggctccaacaaagcaaatgatagcagtaa

SEQ ID NO: 303719 - DNA, 33 bp, Homo sapien
aaaagagttgctttccaattataccctatctcg

SEQ ID NO: 303720 - DNA, 33 bp, Homo sapien
aaaagagttgctttccgattataccctatctcg

SEQ ID NO: 303721 - DNA, 33 bp, Homo sapien
gtggggaagaaaattacggttgattcttcatgt

SEQ ID NO: 303722 - DNA, 33 bp, Homo sapien
gtggggaagaaaattatggttgattcttcatgt

SEQ ID NO: 303723 - DNA, 33 bp, Homo sapien
accttatatgacatcccagaaaaggcaatacta

SEQ ID NO: 303724 - DNA, 33 bp, Homo sapien
accttatatgacatcctagaaaaggcaatacta

SEQ ID NO: 303725 - DNA, 33 bp, Homo sapien
aacataggtgaatttcaaaagcatatgctaagt

SEQ ID NO: 303726 - DNA, 33 bp, Homo sapien
aacataggtgaatttcgaaagcatatgctaagt

SEQ ID NO: 303727 - DNA, 33 bp, Homo sapien
ctcttattccaagatgaattatgacttctcctc

SEQ ID NO: 303728 - DNA, 33 bp, Homo sapien
ctcttattccaagatggattatgacttctcctc

SEQ ID NO: 303729 - DNA, 33 bp, Homo sapien
tctatgttgtgtaaaaaactaccctgaatctta

SEQ ID NO: 303730 - DNA, 33 bp, Homo sapien
tctatgttgtgtaaaagactaccctgaatctta

SEQ ID NO: 303731 - DNA, 33 bp, Homo sapien
gccaggttttaagtgcagaagtctggaagggca

SEQ ID NO: 303732 - DNA, 33 bp, Homo sapien
gccaggttttaagtgcggaagtctggaagggca

SEQ ID NO: 303733 - DNA, 33 bp, Homo sapien
gtctttggaggcctaacgctggtaattggcttc

SEQ ID NO: 303734 - DNA, 33 bp, Homo sapien
gtctttggaggcctaatgctggtaattggcttc

SEQ ID NO: 303735 - DNA, 33 bp, Homo sapien
tgaggaaactaagtccaagtcacatgactaaga

SEQ ID NO: 303736 - DNA, 33 bp, Homo sapien
tgaggaaactaagtccgagtcacatgactaaga

SEQ ID NO: 303737 - DNA, 33 bp, Homo sapien
aatgtttttaaagagacagttgatgagattaaa

SEQ ID NO: 303738 - DNA, 33 bp, Homo sapien
aatgtttttaaagagagagttgatgagattaaa

SEQ ID NO: 303739 - DNA, 33 bp, Homo sapien
caagaaaagaaggtgaaaagcatcactcagtta

SEQ ID NO: 303740 - DNA, 33 bp, Homo sapien
caagaaaagaaggtgagaagcatcactcagtta

SEQ ID NO: 303741 - DNA, 33 bp, Homo sapien
gttgcagttggtgctacgttcaaattaagactt

SEQ ID NO: 303742 - DNA, 33 bp, Homo sapien
gttgcagttggtgctatgttcaaattaagactt

SEQ ID NO: 303743 - DNA, 33 bp, Homo sapien
tcagtcaataagctccacctttccattgggata

SEQ ID NO: 303744 - DNA, 33 bp, Homo sapien
tcagtcaataagctcctcctttccattgggata

SEQ ID NO: 303745 - DNA, 33 bp, Homo sapien
ttgagatgttcagtaaaaagagaatgctattgc

SEQ ID NO: 303746 - DNA, 33 bp, Homo sapien
ttgagatgttcagtaacaagagaatgctattgc

SEQ ID NO: 303747 - DNA, 33 bp, Homo sapien
gctggtacttcacaatcataccctgttgtaaca

SEQ ID NO: 303748 - DNA, 33 bp, Homo sapien
gctggtacttcacaatgataccctgttgtaaca

SEQ ID NO: 303749 - DNA, 33 bp, Homo sapien
taccacatcaggtgaaacatccaaacaagagaa

SEQ ID NO: 303750 - DNA, 33 bp, Homo sapien
taccacatcaggtgaatcatccaaacaagagaa

SEQ ID NO: 303751 - DNA, 33 bp, Homo sapien
ttttgatgcatattatcacttgtgtctgagaac

SEQ ID NO: 303752 - DNA, 33 bp, Homo sapien
ttttgatgcatattatgacttgtgtctgagaac

SEQ ID NO: 303753 - DNA, 33 bp, Homo sapien
tttatgtagtgatatccaagtgtatgttattca

SEQ ID NO: 303754 - DNA, 33 bp, Homo sapien
tttatgtagtgatatctaagtgtatgttattca

SEQ ID NO: 303755 - DNA, 33 bp, Homo sapien
cttgtttttaaatcctaaagtcatgtcagtttt

SEQ ID NO: 303756 - DNA, 33 bp, Homo sapien
cttgtttttaaatcctgaagtcatgtcagtttt

SEQ ID NO: 303757 - DNA, 33 bp, Homo sapien
gagacatttgtgttgcccacatactgtcttaac

SEQ ID NO: 303758 - DNA, 33 bp, Homo sapien
gagacatttgtgttgctcacatactgtcttaac

SEQ ID NO: 303759 - DNA, 33 bp, Homo sapien
gtgatttaacatgacaatatctcatcaacaaaa

SEQ ID NO: 303760 - DNA, 33 bp, Homo sapien
gtgatttaacatgacagtatctcatcaacaaaa

SEQ ID NO: 303761 - DNA, 33 bp, Homo sapien
ccatgaagaagagagactatcgatcggccaggt

SEQ ID NO: 303762 - DNA, 33 bp, Homo sapien
ccatgaagaagagagattatcgatcggccaggt

SEQ ID NO: 303763 - DNA, 33 bp, Homo sapien
atctgatgacaaatgacgaaagttgcaaaaact

SEQ ID NO: 303764 - DNA, 33 bp, Homo sapien
atctgatgacaaatgatgaaagttgcaaaaact

SEQ ID NO: 303765 - DNA, 33 bp, Homo sapien
atttagatgagaaccactaagccctcctaagtg

SEQ ID NO: 303766 - DNA, 33 bp, Homo sapien
atttagatgagaaccagtaagccctcctaagtg

SEQ ID NO: 303767 - DNA, 33 bp, Homo sapien
gcaatagcagcagaccacgagtagccttgattt

SEQ ID NO: 303768 - DNA, 33 bp, Homo sapien
gcaatagcagcagaccgcgagtagccttgattt

SEQ ID NO: 303769 - DNA, 33 bp, Homo sapien
gtagtaagtcactggactaattggctgaagaat

SEQ ID NO: 303770 - DNA, 33 bp, Homo sapien
gtagtaagtcactggagtaattggctgaagaat

SEQ ID NO: 303771 - DNA, 33 bp, Homo sapien
gtttttatttctcagaaaaatgatacaatttag

SEQ ID NO: 303772 - DNA, 33 bp, Homo sapien
gtttttatttctcagataaatgatacaatttag

SEQ ID NO: 303773 - DNA, 33 bp, Homo sapien
agcttggcaatgtcacagggatttcaagaaagc

SEQ ID NO: 303774 - DNA, 33 bp, Homo sapien
agcttggcaatgtcacggggatttcaagaaagc

SEQ ID NO: 303775 - DNA, 33 bp, Homo sapien
acttggtaaaggtaacaggaacttgatctaaag

SEQ ID NO: 303776 - DNA, 33 bp, Homo sapien
acttggtaaaggtaacgggaacttgatctaaag

SEQ ID NO: 303777 - DNA, 33 bp, Homo sapien
tgtactctgcaaaacacgtgacacaaagaggag

SEQ ID NO: 303778 - DNA, 33 bp, Homo sapien
tgtactctgcaaaacaggtgacacaaagaggag

SEQ ID NO: 303779 - DNA, 33 bp, Homo sapien
tccattaagtgaattccatggtcagtcaatatc

SEQ ID NO: 303780 - DNA, 33 bp, Homo sapien
tccattaagtgaattctatggtcagtcaatatc

SEQ ID NO: 303781 - DNA, 33 bp, Homo sapien
tgtacctggaacaagacctctaccccaagcatt

SEQ ID NO: 303782 - DNA, 33 bp, Homo sapien
tgtacctggaacaagatctctaccccaagcatt

SEQ ID NO: 303783 - DNA, 33 bp, Homo sapien
acagtgcctgttgataaggtctttaaactcaga

SEQ ID NO: 303784 - DNA, 33 bp, Homo sapien
acagtgcctgttgatacggtctttaaactcaga

SEQ ID NO: 303785 - DNA, 33 bp, Homo sapien
tacgcatttgtaagatcaccttgcatctagaaa

SEQ ID NO: 303786 - DNA, 33 bp, Homo sapien
tacgcatttgtaagattaccttgcatctagaaa

SEQ ID NO: 303787 - DNA, 33 bp, Homo sapien
tgagtaaaagcacctaaggcttcaatttgatga

SEQ ID NO: 303788 - DNA, 33 bp, Homo sapien
tgagtaaaagcacctatggcttcaatttgatga

SEQ ID NO: 303789 - DNA, 33 bp, Homo sapien
aaccactgaggtgataacattattttgctttaa

SEQ ID NO: 303790 - DNA, 33 bp, Homo sapien
aaccactgaggtgatagcattattttgctttaa

SEQ ID NO: 303791 - DNA, 33 bp, Homo sapien
caaatgtgttagaaaagtgggctttcactggga

SEQ ID NO: 303792 - DNA, 33 bp, Homo sapien
caaatgtgttagaaaattgggctttcactggga

SEQ ID NO: 303793 - DNA, 33 bp, Homo sapien
aaaacaaatgaaatgagccctgtgatgccacag

SEQ ID NO: 303794 - DNA, 33 bp, Homo sapien
aaaacaaatgaaatgatccctgtgatgccacag

SEQ ID NO: 303795 - DNA, 33 bp, Homo sapien
ttatgtccttgaccaccaggctatactgtatag

SEQ ID NO: 303796 - DNA, 33 bp, Homo sapien
ttatgtccttgaccactaggctatactgtatag

SEQ ID NO: 303797 - DNA, 33 bp, Homo sapien
gttgtttcagaatgagaaaaaaatgagccctag

SEQ ID NO: 303798 - DNA, 33 bp, Homo sapien
gttgtttcagaatgaggaaaaaatgagccctag

SEQ ID NO: 303799 - DNA, 33 bp, Homo sapien
atacacgatccatcaaacaatggaagccgtgca

SEQ ID NO: 303800 - DNA, 33 bp, Homo sapien
atacacgatccatcaagcaatggaagccgtgca

SEQ ID NO: 303801 - DNA, 33 bp, Homo sapien
caaaagttttgcctacccaactcatatcaggtc

SEQ ID NO: 303802 - DNA, 33 bp, Homo sapien
caaaagttttgcctactcaactcatatcaggtc

SEQ ID NO: 303803 - DNA, 33 bp, Homo sapien
cacacttttcaaactgaatgtttagtatgattt

SEQ ID NO: 303804 - DNA, 33 bp, Homo sapien
cacacttttcaaactgtatgtttagtatgattt

SEQ ID NO: 303805 - DNA, 33 bp, Homo sapien
acctgacatataagagacactcagtaaatattt

SEQ ID NO: 303806 - DNA, 33 bp, Homo sapien
acctgacatataagaggcactcagtaaatattt

SEQ ID NO: 303807 - DNA, 33 bp, Homo sapien
ataaagtacaaactcactagaaacaatacaaag

SEQ ID NO: 303808 - DNA, 33 bp, Homo sapien
ataaagtacaaactcattagaaacaatacaaag

SEQ ID NO: 303809 - DNA, 33 bp, Homo sapien
ttgtctacacacacaagatttttctgttctgaa

SEQ ID NO: 303810 - DNA, 33 bp, Homo sapien
ttgtctacacacacaatatttttctgttctgaa

SEQ ID NO: 303811 - DNA, 33 bp, Homo sapien
gactctactactctccccgtctgccttttgctc

SEQ ID NO: 303812 - DNA, 33 bp, Homo sapien
gactctactactctccgcgtctgccttttgctc

SEQ ID NO: 303813 - DNA, 33 bp, Homo sapien
tcctcatgcaaaaaaagagaatcaggaaactct

SEQ ID NO: 303814 - DNA, 33 bp, Homo sapien
tcctcatgcaaaaaaatagaatcaggaaactct

SEQ ID NO: 303815 - DNA, 33 bp, Homo sapien
tgagccacaagattaccggccatcttgctttta

SEQ ID NO: 303816 - DNA, 33 bp, Homo sapien
tgagccacaagattacgggccatcttgctttta

SEQ ID NO: 303817 - DNA, 33 bp, Homo sapien
atgactggaaacagagccctgaaggaaaagtac

SEQ ID NO: 303818 - DNA, 33 bp, Homo sapien
atgactggaaacagaggcctgaaggaaaagtac

SEQ ID NO: 303819 - DNA, 33 bp, Homo sapien
agaagggaaagttcaacggctttgatcctttgt

SEQ ID NO: 303820 - DNA, 33 bp, Homo sapien
agaagggaaagttcaagggctttgatcctttgt

SEQ ID NO: 303821 - DNA, 33 bp, Homo sapien
gctctgtgtgggaaaacagtctttgagtttcag

SEQ ID NO: 303822 - DNA, 33 bp, Homo sapien
gctctgtgtgggaaaagagtctttgagtttcag

SEQ ID NO: 303823 - DNA, 33 bp, Homo sapien
ccagatgtccagtcaaaaagggttaaaacttca

SEQ ID NO: 303824 - DNA, 33 bp, Homo sapien
ccagatgtccagtcaagaagggttaaaacttca

SEQ ID NO: 303825 - DNA, 33 bp, Homo sapien
ggaagaacttgttcttaaaagagttgtcaatag

SEQ ID NO: 303826 - DNA, 33 bp, Homo sapien
ggaagaacttgttcttgaaagagttgtcaatag

SEQ ID NO: 303827 - DNA, 33 bp, Homo sapien
gtgtgaagaaggcacaatccacatttcccatca

SEQ ID NO: 303828 - DNA, 33 bp, Homo sapien
gtgtgaagaaggcacagtccacatttcccatca

SEQ ID NO: 303829 - DNA, 33 bp, Homo sapien
actttggtatctttgaaagcggcagccacatat

SEQ ID NO: 303830 - DNA, 33 bp, Homo sapien
actttggtatctttgagagcggcagccacatat

SEQ ID NO: 303831 - DNA, 33 bp, Homo sapien
aatggtagggaaaaacagaattgcaacaagatg

SEQ ID NO: 303832 - DNA, 33 bp, Homo sapien
aatggtagggaaaaacggaattgcaacaagatg

SEQ ID NO: 303833 - DNA, 33 bp, Homo sapien
ggatgctttttgtaatgaatacacatgagttat

SEQ ID NO: 303834 - DNA, 33 bp, Homo sapien
ggatgctttttgtaattaatacacatgagttat

SEQ ID NO: 303835 - DNA, 33 bp, Homo sapien
ctgcaatcatgcagtcagaaggggatggtgcgt

SEQ ID NO: 303836 - DNA, 33 bp, Homo sapien
ctgcaatcatgcagtcggaaggggatggtgcgt

SEQ ID NO: 303837 - DNA, 33 bp, Homo sapien
cagtgcatattcaacacgtattagttcttccca

SEQ ID NO: 303838 - DNA, 33 bp, Homo sapien
cagtgcatattcaacatgtattagttcttccca

SEQ ID NO: 303839 - DNA, 33 bp, Homo sapien
tgagaccagctggaaacagatactgaaatcttg

SEQ ID NO: 303840 - DNA, 33 bp, Homo sapien
tgagaccagctggaaatagatactgaaatcttg

SEQ ID NO: 303841 - DNA, 33 bp, Homo sapien
caaaatgcttcacttaccaaagcaagatttcag

SEQ ID NO: 303842 - DNA, 33 bp, Homo sapien
caaaatgcttcacttatcaaagcaagatttcag

SEQ ID NO: 303843 - DNA, 33 bp, Homo sapien
ttagaaaagatgaaaacagtgaatatatacagc

SEQ ID NO: 303844 - DNA, 33 bp, Homo sapien
ttagaaaagatgaaaagagtgaatatatacagc

SEQ ID NO: 303845 - DNA, 33 bp, Homo sapien
ttttgtttttcaacacacacagatctaggatgc

SEQ ID NO: 303846 - DNA, 33 bp, Homo sapien
ttttgtttttcaacactcacagatctaggatgc

SEQ ID NO: 303847 - DNA, 33 bp, Homo sapien
agagaaaggtgataacaaaatgaaagcataatc

SEQ ID NO: 303848 - DNA, 33 bp, Homo sapien
agagaaaggtgataacgaaatgaaagcataatc

SEQ ID NO: 303849 - DNA, 33 bp, Homo sapien
ttgaggaagattgacaaaattgatttcaggaga

SEQ ID NO: 303850 - DNA, 33 bp, Homo sapien
ttgaggaagattgacagaattgatttcaggaga

SEQ ID NO: 303851 - DNA, 33 bp, Homo sapien
taccaacaaaggtccacacagcttgcagaaagt

SEQ ID NO: 303852 - DNA, 33 bp, Homo sapien
taccaacaaaggtccatacagcttgcagaaagt

SEQ ID NO: 303853 - DNA, 33 bp, Homo sapien
taggactcaggcgctccatcagatcccagggac

SEQ ID NO: 303854 - DNA, 33 bp, Homo sapien
taggactcaggcgctctatcagatcccagggac

SEQ ID NO: 303855 - DNA, 33 bp, Homo sapien
atccaggtctctttgaaccccaaggtaagtgtt

SEQ ID NO: 303856 - DNA, 33 bp, Homo sapien
atccaggtctctttgatccccaaggtaagtgtt

SEQ ID NO: 303857 - DNA, 33 bp, Homo sapien
gcaccatctaacagagaccaattcatccaccca

SEQ ID NO: 303858 - DNA, 33 bp, Homo sapien
gcaccatctaacagaggccaattcatccaccca

SEQ ID NO: 303859 - DNA, 33 bp, Homo sapien
ggaattggcctttttcaatactgtatgtataat

SEQ ID NO: 303860 - DNA, 33 bp, Homo sapien
ggaattggcctttttctatactgtatgtataat

SEQ ID NO: 303861 - DNA, 33 bp, Homo sapien
aacagatgttgacaaacttaccttccaaaaagt

SEQ ID NO: 303862 - DNA, 33 bp, Homo sapien
aacagatgttgacaaatttaccttccaaaaagt

SEQ ID NO: 303863 - DNA, 33 bp, Homo sapien
actatgttgttaaagagaatatactggcatgga

SEQ ID NO: 303864 - DNA, 33 bp, Homo sapien
actatgttgttaaagataatatactggcatgga

SEQ ID NO: 303865 - DNA, 33 bp, Homo sapien
aaactagagtgtgaacagggaatgaatttggac

SEQ ID NO: 303866 - DNA, 33 bp, Homo sapien
aaactagagtgtgaacggggaatgaatttggac

SEQ ID NO: 303867 - DNA, 33 bp, Homo sapien
aacattgccttagcaccgactgagctcaacagg

SEQ ID NO: 303868 - DNA, 33 bp, Homo sapien
aacattgccttagcactgactgagctcaacagg

SEQ ID NO: 303869 - DNA, 33 bp, Homo sapien
aattgcaggtgaaccaagttcctagaatctcta

SEQ ID NO: 303870 - DNA, 33 bp, Homo sapien
aattgcaggtgaaccaggttcctagaatctcta

SEQ ID NO: 303871 - DNA, 33 bp, Homo sapien
gacatatagattttaaacagtcaaagaacatct

SEQ ID NO: 303872 - DNA, 33 bp, Homo sapien
gacatatagattttaaccagtcaaagaacatct

SEQ ID NO: 303873 - DNA, 33 bp, Homo sapien
gatttcactacaataaacatttacttgcatatc

SEQ ID NO: 303874 - DNA, 33 bp, Homo sapien
gatttcactacaataagcatttacttgcatatc

SEQ ID NO: 303875 - DNA, 33 bp, Homo sapien
gctagttaacaagtcaaaggcaaatgatcatga

SEQ ID NO: 303876 - DNA, 33 bp, Homo sapien
gctagttaacaagtcagaggcaaatgatcatga

SEQ ID NO: 303877 - DNA, 33 bp, Homo sapien
aaatgcaggaaaactacgatacttgtcttgatt

SEQ ID NO: 303878 - DNA, 33 bp, Homo sapien
aaatgcaggaaaactatgatacttgtcttgatt

SEQ ID NO: 303879 - DNA, 33 bp, Homo sapien
ctgttctggaaatccactatggaagctagaaac

SEQ ID NO: 303880 - DNA, 33 bp, Homo sapien
ctgttctggaaatccattatggaagctagaaac

SEQ ID NO: 303881 - DNA, 33 bp, Homo sapien
gatttaactacattcaaattccctgttctggaa

SEQ ID NO: 303882 - DNA, 33 bp, Homo sapien
gatttaactacattcagattccctgttctggaa

SEQ ID NO: 303883 - DNA, 33 bp, Homo sapien
cttccttattagccaaacttagtatctccattc

SEQ ID NO: 303884 - DNA, 33 bp, Homo sapien
cttccttattagccaagcttagtatctccattc

SEQ ID NO: 303885 - DNA, 33 bp, Homo sapien
atgaaagagagagaaacagaagctacagagctc

SEQ ID NO: 303886 - DNA, 33 bp, Homo sapien
atgaaagagagagaaagagaagctacagagctc

SEQ ID NO: 303887 - DNA, 33 bp, Homo sapien
ttactaagacaccaaccctctcacagaagtttg

SEQ ID NO: 303888 - DNA, 33 bp, Homo sapien
ttactaagacaccaactctctcacagaagtttg

SEQ ID NO: 303889 - DNA, 33 bp, Homo sapien
taggaagttataattcagaagtgttaagtataa

SEQ ID NO: 303890 - DNA, 33 bp, Homo sapien
taggaagttataattcggaagtgttaagtataa

SEQ ID NO: 303891 - DNA, 33 bp, Homo sapien
ggagaaaatcagatcaaaggaaaaactgaaggg

SEQ ID NO: 303892 - DNA, 33 bp, Homo sapien
ggagaaaatcagatcagaggaaaaactgaaggg

SEQ ID NO: 303893 - DNA, 33 bp, Homo sapien
ctcgtgtgtgtgccgcacttcctctgcactgtt

SEQ ID NO: 303894 - DNA, 33 bp, Homo sapien
ctcgtgtgtgtgccgcgcttcctctgcactgtt

SEQ ID NO: 303895 - DNA, 33 bp, Homo sapien
tacagaagccataagacggaaggagcttgggtc

SEQ ID NO: 303896 - DNA, 33 bp, Homo sapien
tacagaagccataagatggaaggagcttgggtc

SEQ ID NO: 303897 - DNA, 33 bp, Homo sapien
ctcttcctctttctcactctgtatatctatcaa

SEQ ID NO: 303898 - DNA, 33 bp, Homo sapien
ctcttcctctttctcattctgtatatctatcaa

SEQ ID NO: 303899 - DNA, 33 bp, Homo sapien
ttatgatcccagaaagccacttaatcagacctc

SEQ ID NO: 303900 - DNA, 33 bp, Homo sapien
ttatgatcccagaaagtcacttaatcagacctc

SEQ ID NO: 303901 - DNA, 33 bp, Homo sapien
aattttaacactatccagccaagaagagcaggg

SEQ ID NO: 303902 - DNA, 33 bp, Homo sapien
aattttaacactatccggccaagaagagcaggg

SEQ ID NO: 303903 - DNA, 33 bp, Homo sapien
ctctggtgatgaaaagcagtatcagatatttca

SEQ ID NO: 303904 - DNA, 33 bp, Homo sapien
ctctggtgatgaaaaggagtatcagatatttca

SEQ ID NO: 303905 - DNA, 33 bp, Homo sapien
gctctgttcaaaactgaaaacaaaaatgataaa

SEQ ID NO: 303906 - DNA, 33 bp, Homo sapien
gctctgttcaaaactggaaacaaaaatgataaa

SEQ ID NO: 303907 - DNA, 33 bp, Homo sapien
gtgtttgttctgtttcaccctgaatcatttttt

SEQ ID NO: 303908 - DNA, 33 bp, Homo sapien
gtgtttgttctgtttcgccctgaatcatttttt

SEQ ID NO: 303909 - DNA, 33 bp, Homo sapien
ttattcaacatacttaacattatgcaggtcaaa

SEQ ID NO: 303910 - DNA, 33 bp, Homo sapien
ttattcaacatacttatcattatgcaggtcaaa

SEQ ID NO: 303911 - DNA, 33 bp, Homo sapien
tctacccattcctttaaaacctaggtcacagaa

SEQ ID NO: 303912 - DNA, 33 bp, Homo sapien
tctacccattcctttacaacctaggtcacagaa

SEQ ID NO: 303913 - DNA, 33 bp, Homo sapien
gaagggatgtagaagacaagccgggtgacccaa

SEQ ID NO: 303914 - DNA, 33 bp, Homo sapien
gaagggatgtagaagataagccgggtgacccaa

SEQ ID NO: 303915 - DNA, 33 bp, Homo sapien
catgcccagccagataaatgctattcttgatat

SEQ ID NO: 303916 - DNA, 33 bp, Homo sapien
catgcccagccagatatatgctattcttgatat

SEQ ID NO: 303917 - DNA, 33 bp, Homo sapien
atctgtgtagccaaaacaaatgatgaaatcttt

SEQ ID NO: 303918 - DNA, 33 bp, Homo sapien
atctgtgtagccaaaataaatgatgaaatcttt

SEQ ID NO: 303919 - DNA, 33 bp, Homo sapien
gagagttgtgagagagacggaagcatccagaat

SEQ ID NO: 303920 - DNA, 33 bp, Homo sapien
gagagttgtgagagaggcggaagcatccagaat

SEQ ID NO: 303921 - DNA, 33 bp, Homo sapien
tttctcagcagatcaacggtagcaggcccttta

SEQ ID NO: 303922 - DNA, 33 bp, Homo sapien
tttctcagcagatcaatggtagcaggcccttta

SEQ ID NO: 303923 - DNA, 33 bp, Homo sapien
gcttttaccacaatcaacaatgcaacgagaaac

SEQ ID NO: 303924 - DNA, 33 bp, Homo sapien
gcttttaccacaatcagcaatgcaacgagaaac

SEQ ID NO: 303925 - DNA, 33 bp, Homo sapien
ttacaattatagtatacggagggtcatttttaa

SEQ ID NO: 303926 - DNA, 33 bp, Homo sapien
ttacaattatagtatatggagggtcatttttaa

SEQ ID NO: 303927 - DNA, 33 bp, Homo sapien
agttaatattcttaaactactagctcactaaac

SEQ ID NO: 303928 - DNA, 33 bp, Homo sapien
agttaatattcttaaattactagctcactaaac

SEQ ID NO: 303929 - DNA, 33 bp, Homo sapien
atatatttaatgctccaataatgccaaaatgtg

SEQ ID NO: 303930 - DNA, 33 bp, Homo sapien
atatatttaatgctccgataatgccaaaatgtg

SEQ ID NO: 303931 - DNA, 33 bp, Homo sapien
agattagcaaacttggaaaggaaatgaaatggc

SEQ ID NO: 303932 - DNA, 33 bp, Homo sapien
agattagcaaacttgggaaggaaatgaaatggc

SEQ ID NO: 303933 - DNA, 33 bp, Homo sapien
gcattttactacagtgacacagaatctagctta

SEQ ID NO: 303934 - DNA, 33 bp, Homo sapien
gcattttactacagtggcacagaatctagctta

SEQ ID NO: 303935 - DNA, 33 bp, Homo sapien
actcactgctttataacggaaaccctgggtgac

SEQ ID NO: 303936 - DNA, 33 bp, Homo sapien
actcactgctttataatggaaaccctgggtgac

SEQ ID NO: 303937 - DNA, 33 bp, Homo sapien
ctggtaggcaaccaaacgggatgatacgcagtt

SEQ ID NO: 303938 - DNA, 33 bp, Homo sapien
ctggtaggcaaccaaatgggatgatacgcagtt

SEQ ID NO: 303939 - DNA, 33 bp, Homo sapien
cctacatcagtaaaccacctacaagtaatcaca

SEQ ID NO: 303940 - DNA, 33 bp, Homo sapien
cctacatcagtaaaccgcctacaagtaatcaca

SEQ ID NO: 303941 - DNA, 33 bp, Homo sapien
cataaatagattacaactgatcctgcattgggt

SEQ ID NO: 303942 - DNA, 33 bp, Homo sapien
cataaatagattacaagtgatcctgcattgggt

SEQ ID NO: 303943 - DNA, 33 bp, Homo sapien
ccctcatgtaacctaaccagcatctctaaataa

SEQ ID NO: 303944 - DNA, 33 bp, Homo sapien
ccctcatgtaacctaatcagcatctctaaataa

SEQ ID NO: 303945 - DNA, 33 bp, Homo sapien
tttaaatgaagcctcaatcaaaactatgttgga

SEQ ID NO: 303946 - DNA, 33 bp, Homo sapien
tttaaatgaagcctcagtcaaaactatgttgga

SEQ ID NO: 303947 - DNA, 33 bp, Homo sapien
aggcacctaacatttacattttatcatcagtag

SEQ ID NO: 303948 - DNA, 33 bp, Homo sapien
aggcacctaacatttatattttatcatcagtag

SEQ ID NO: 303949 - DNA, 33 bp, Homo sapien
tgtacatgtccctaaaaataagaataatgaaat

SEQ ID NO: 303950 - DNA, 33 bp, Homo sapien
tgtacatgtccctaaagataagaataatgaaat

SEQ ID NO: 303951 - DNA, 33 bp, Homo sapien
tgaaaaatcataaataacactcccaacagcgag

SEQ ID NO: 303952 - DNA, 33 bp, Homo sapien
tgaaaaatcataaatatcactcccaacagcgag

SEQ ID NO: 303953 - DNA, 33 bp, Homo sapien
agcaaaattctgagacacctcctagttggctgt

SEQ ID NO: 303954 - DNA, 33 bp, Homo sapien
agcaaaattctgagacgcctcctagttggctgt

SEQ ID NO: 303955 - DNA, 33 bp, Homo sapien
gttttattctgcttcaatacgctgtagcctggt

SEQ ID NO: 303956 - DNA, 33 bp, Homo sapien
gttttattctgcttcagtacgctgtagcctggt

SEQ ID NO: 303957 - DNA, 33 bp, Homo sapien
agaaactcatggcagaaaggaaagagttttttt

SEQ ID NO: 303958 - DNA, 33 bp, Homo sapien
agaaactcatggcagagaggaaagagttttttt

SEQ ID NO: 303959 - DNA, 33 bp, Homo sapien
cccataacaatttctcaaagcccactgggacaa

SEQ ID NO: 303960 - DNA, 33 bp, Homo sapien
cccataacaatttctcgaagcccactgggacaa

SEQ ID NO: 303961 - DNA, 33 bp, Homo sapien
gaccttttcataacaccgctggtacagttgctg

SEQ ID NO: 303962 - DNA, 33 bp, Homo sapien
gaccttttcataacactgctggtacagttgctg

SEQ ID NO: 303963 - DNA, 33 bp, Homo sapien
gtggagaattcctgagaaagaaaactagagctc

SEQ ID NO: 303964 - DNA, 33 bp, Homo sapien
gtggagaattcctgagcaagaaaactagagctc

SEQ ID NO: 303965 - DNA, 33 bp, Homo sapien
ctcaggccctggaaaacgtgggcaaggactggg

SEQ ID NO: 303966 - DNA, 33 bp, Homo sapien
ctcaggccctggaaaatgtgggcaaggactggg

SEQ ID NO: 303967 - DNA, 33 bp, Homo sapien
ctaagataacaatggcaaatatctcaggactga

SEQ ID NO: 303968 - DNA, 33 bp, Homo sapien
ctaagataacaatggcgaatatctcaggactga

SEQ ID NO: 303969 - DNA, 33 bp, Homo sapien
cactgtgtgtttcttacgttccatgtagcattt

SEQ ID NO: 303970 - DNA, 33 bp, Homo sapien
cactgtgtgtttcttatgttccatgtagcattt

SEQ ID NO: 303971 - DNA, 33 bp, Homo sapien
gtaaaataacaagccacgttagggtgaacaaaa

SEQ ID NO: 303972 - DNA, 33 bp, Homo sapien
gtaaaataacaagccaggttagggtgaacaaaa

SEQ ID NO: 303973 - DNA, 33 bp, Homo sapien
cttggagctcctggtactaagagaggtgagagg

SEQ ID NO: 303974 - DNA, 33 bp, Homo sapien
cttggagctcctggtagtaagagaggtgagagg

SEQ ID NO: 303975 - DNA, 33 bp, Homo sapien
aacaacacaggtggtccacactttttaggtata

SEQ ID NO: 303976 - DNA, 33 bp, Homo sapien
aacaacacaggtggtctacactttttaggtata

SEQ ID NO: 303977 - DNA, 33 bp, Homo sapien
gatgtgacaaggcaaactaaatgtatacaaggt

SEQ ID NO: 303978 - DNA, 33 bp, Homo sapien
gatgtgacaaggcaaattaaatgtatacaaggt

SEQ ID NO: 303979 - DNA, 33 bp, Homo sapien
catcgctgcattatacaaggtggttaaaattat

SEQ ID NO: 303980 - DNA, 33 bp, Homo sapien
catcgctgcattataccaggtggttaaaattat

SEQ ID NO: 303981 - DNA, 33 bp, Homo sapien
tacatggttaatggtgcaatccctttcatgtac

SEQ ID NO: 303982 - DNA, 33 bp, Homo sapien
tacatggttaatggtgtaatccctttcatgtac

SEQ ID NO: 303983 - DNA, 33 bp, Homo sapien
ggatctacagtttgaaagttatgtcttgctcca

SEQ ID NO: 303984 - DNA, 33 bp, Homo sapien
ggatctacagtttgaacgttatgtcttgctcca

SEQ ID NO: 303985 - DNA, 33 bp, Homo sapien
cagtttttctttcttcacatcctattcatttcc

SEQ ID NO: 303986 - DNA, 33 bp, Homo sapien
cagtttttctttcttcgcatcctattcatttcc

SEQ ID NO: 303987 - DNA, 33 bp, Homo sapien
agaccagatggtgaagaactaaggaggctttga

SEQ ID NO: 303988 - DNA, 33 bp, Homo sapien
agaccagatggtgaaggactaaggaggctttga

SEQ ID NO: 303989 - DNA, 33 bp, Homo sapien
cactgccaaaccaaacaaatgacaacctcttac

SEQ ID NO: 303990 - DNA, 33 bp, Homo sapien
cactgccaaaccaaaccaatgacaacctcttac

SEQ ID NO: 303991 - DNA, 33 bp, Homo sapien
ctttcagaccagtttacaagttgaaccaaccta

SEQ ID NO: 303992 - DNA, 33 bp, Homo sapien
ctttcagaccagtttataagttgaaccaaccta

SEQ ID NO: 303993 - DNA, 33 bp, Homo sapien
agagtttggtatcagaataagtttcaggaaaag

SEQ ID NO: 303994 - DNA, 33 bp, Homo sapien
agagtttggtatcagagtaagtttcaggaaaag

SEQ ID NO: 303995 - DNA, 33 bp, Homo sapien
caagtttgccctacacgagtgagtaggaagtca

SEQ ID NO: 303996 - DNA, 33 bp, Homo sapien
caagtttgccctacactagtgagtaggaagtca

SEQ ID NO: 303997 - DNA, 33 bp, Homo sapien
tcttgtaattcaataaacacgctgtccctgctc

SEQ ID NO: 303998 - DNA, 33 bp, Homo sapien
tcttgtaattcaataatcacgctgtccctgctc

SEQ ID NO: 303999 - DNA, 33 bp, Homo sapien
tgtatttcagagtaagacaagtgacttccaggg

SEQ ID NO: 304000 - DNA, 33 bp, Homo sapien
tgtatttcagagtaaggcaagtgacttccaggg

SEQ ID NO: 304001 - DNA, 33 bp, Homo sapien
ctccgcttcagaaactaaacactcacacaagaa

SEQ ID NO: 304002 - DNA, 33 bp, Homo sapien
ctccgcttcagaaactgaacactcacacaagaa

SEQ ID NO: 304003 - DNA, 33 bp, Homo sapien
tgataaaacaaatgcaatagtgataccttcaac

SEQ ID NO: 304004 - DNA, 33 bp, Homo sapien
tgataaaacaaatgcagtagtgataccttcaac

SEQ ID NO: 304005 - DNA, 33 bp, Homo sapien
cagcagagttttgaaacgaatcagtaaagaagt

SEQ ID NO: 304006 - DNA, 33 bp, Homo sapien
cagcagagttttgaaatgaatcagtaaagaagt

SEQ ID NO: 304007 - DNA, 33 bp, Homo sapien
gaaatagtattttaaggctacaaattggatgct

SEQ ID NO: 304008 - DNA, 33 bp, Homo sapien
gaaatagtattttaagtctacaaattggatgct

SEQ ID NO: 304009 - DNA, 33 bp, Homo sapien
tccttccccagtcctccgaagtttcatctcatc

SEQ ID NO: 304010 - DNA, 33 bp, Homo sapien
tccttccccagtcctctgaagtttcatctcatc

SEQ ID NO: 304011 - DNA, 33 bp, Homo sapien
tagatacaaagataaacaagacgtgatccttgc

SEQ ID NO: 304012 - DNA, 33 bp, Homo sapien
tagatacaaagataaataagacgtgatccttgc

SEQ ID NO: 304013 - DNA, 33 bp, Homo sapien
aactctgtgctatggaataaatgtaacaaattc

SEQ ID NO: 304014 - DNA, 33 bp, Homo sapien
aactctgtgctatggactaaatgtaacaaattc

SEQ ID NO: 304015 - DNA, 33 bp, Homo sapien
gacacttgagatttgaaagctgaggagtgtgtg

SEQ ID NO: 304016 - DNA, 33 bp, Homo sapien
gacacttgagatttgacagctgaggagtgtgtg

SEQ ID NO: 304017 - DNA, 33 bp, Homo sapien
ggatcactttccttccacttgtagtatatcctt

SEQ ID NO: 304018 - DNA, 33 bp, Homo sapien
ggatcactttccttccgcttgtagtatatcctt

SEQ ID NO: 304019 - DNA, 33 bp, Homo sapien
cctggcaatgctcaaaaaaaccctaacttctac

SEQ ID NO: 304020 - DNA, 33 bp, Homo sapien
cctggcaatgctcaaagaaaccctaacttctac

SEQ ID NO: 304021 - DNA, 33 bp, Homo sapien
tgccctaaattcttccaagataacaggacggtg

SEQ ID NO: 304022 - DNA, 33 bp, Homo sapien
tgccctaaattcttcccagataacaggacggtg

SEQ ID NO: 304023 - DNA, 33 bp, Homo sapien
actgttaagccaataacggttttgggcttaata

SEQ ID NO: 304024 - DNA, 33 bp, Homo sapien
actgttaagccaataatggttttgggcttaata

SEQ ID NO: 304025 - DNA, 33 bp, Homo sapien
aaaaaggctcagcgagaattgttatattcaatt

SEQ ID NO: 304026 - DNA, 33 bp, Homo sapien
aaaaaggctcagcgaggattgttatattcaatt

SEQ ID NO: 304027 - DNA, 33 bp, Homo sapien
aagctgaaatttaaataaagtctgtctaaagtg

SEQ ID NO: 304028 - DNA, 33 bp, Homo sapien
aagctgaaatttaaatgaagtctgtctaaagtg

SEQ ID NO: 304029 - DNA, 33 bp, Homo sapien
agaacctgctgaatcacagttttagggagcggg

SEQ ID NO: 304030 - DNA, 33 bp, Homo sapien
agaacctgctgaatcatagttttagggagcggg

SEQ ID NO: 304031 - DNA, 33 bp, Homo sapien
actaaccatagaattcaaccaaaaagtcaacgg

SEQ ID NO: 304032 - DNA, 33 bp, Homo sapien
actaaccatagaattcgaccaaaaagtcaacgg

SEQ ID NO: 304033 - DNA, 33 bp, Homo sapien
ccttaatggtacctgaggatgaactggtggtag

SEQ ID NO: 304034 - DNA, 33 bp, Homo sapien
ccttaatggtacctgatgatgaactggtggtag

SEQ ID NO: 304035 - DNA, 33 bp, Homo sapien
cccttttgatgactgccagtttcctccacaata

SEQ ID NO: 304036 - DNA, 33 bp, Homo sapien
cccttttgatgactgctagtttcctccacaata

SEQ ID NO: 304037 - DNA, 33 bp, Homo sapien
gaaaaagcctcgcttacggcggaagtcagagac

SEQ ID NO: 304038 - DNA, 33 bp, Homo sapien
gaaaaagcctcgcttatggcggaagtcagagac

SEQ ID NO: 304039 - DNA, 33 bp, Homo sapien
aaatggctccaagaaacctgtttggggatgggc

SEQ ID NO: 304040 - DNA, 33 bp, Homo sapien
aaatggctccaagaaatctgtttggggatgggc

SEQ ID NO: 304041 - DNA, 33 bp, Homo sapien
atatgtactcaataaacagctgaatttgaataa

SEQ ID NO: 304042 - DNA, 33 bp, Homo sapien
atatgtactcaataaatagctgaatttgaataa

SEQ ID NO: 304043 - DNA, 33 bp, Homo sapien
ctagtaaaaatgacaacaggcctcagtttcctt

SEQ ID NO: 304044 - DNA, 33 bp, Homo sapien
ctagtaaaaatgacaataggcctcagtttcctt

SEQ ID NO: 304045 - DNA, 33 bp, Homo sapien
tgtttaactggttctgaatatgtaaagctcttt

SEQ ID NO: 304046 - DNA, 33 bp, Homo sapien
tgtttaactggttctgcatatgtaaagctcttt

SEQ ID NO: 304047 - DNA, 33 bp, Homo sapien
ctgcctgcccctttcacagaaaactcataaatc

SEQ ID NO: 304048 - DNA, 33 bp, Homo sapien
ctgcctgcccctttcatagaaaactcataaatc

SEQ ID NO: 304049 - DNA, 33 bp, Homo sapien
catcctctgcattgtgaagtttggcagctgttt

SEQ ID NO: 304050 - DNA, 33 bp, Homo sapien
catcctctgcattgtggagtttggcagctgttt

SEQ ID NO: 304051 - DNA, 33 bp, Homo sapien
ttagcaagtggtctcacgtttatagcatccaca

SEQ ID NO: 304052 - DNA, 33 bp, Homo sapien
ttagcaagtggtctcaggtttatagcatccaca

SEQ ID NO: 304053 - DNA, 33 bp, Homo sapien
caatgtgaggacagacaaacaatacaggatctg

SEQ ID NO: 304054 - DNA, 33 bp, Homo sapien
caatgtgaggacagactaacaatacaggatctg

SEQ ID NO: 304055 - DNA, 33 bp, Homo sapien
tgacctcggtaaattacaactcagagtgtcggt

SEQ ID NO: 304056 - DNA, 33 bp, Homo sapien
tgacctcggtaaattataactcagagtgtcggt

SEQ ID NO: 304057 - DNA, 33 bp, Homo sapien
ctgccactgtgcataaaaaagtgccaattgttt

SEQ ID NO: 304058 - DNA, 33 bp, Homo sapien
ctgccactgtgcataataaagtgccaattgttt

SEQ ID NO: 304059 - DNA, 33 bp, Homo sapien
atgtgtctcactcaataatatgccttagtgtta

SEQ ID NO: 304060 - DNA, 33 bp, Homo sapien
atgtgtctcactcaatgatatgccttagtgtta

SEQ ID NO: 304061 - DNA, 33 bp, Homo sapien
ttggactaatgccacaacagaatgttcacaaac

SEQ ID NO: 304062 - DNA, 33 bp, Homo sapien
ttggactaatgccacaccagaatgttcacaaac

SEQ ID NO: 304063 - DNA, 33 bp, Homo sapien
gctcccatcttactccgcattccagcagtgata

SEQ ID NO: 304064 - DNA, 33 bp, Homo sapien
gctcccatcttactcctcattccagcagtgata

SEQ ID NO: 304065 - DNA, 33 bp, Homo sapien
tgaggcttggcctactcagcaagatccactcaa

SEQ ID NO: 304066 - DNA, 33 bp, Homo sapien
tgaggcttggcctactgagcaagatccactcaa

SEQ ID NO: 304067 - DNA, 33 bp, Homo sapien
tctatcgtgctttaccacatacattttattatt

SEQ ID NO: 304068 - DNA, 33 bp, Homo sapien
tctatcgtgctttaccgcatacattttattatt

SEQ ID NO: 304069 - DNA, 33 bp, Homo sapien
ttgttatagtagcacaataccaaggagtagggc

SEQ ID NO: 304070 - DNA, 33 bp, Homo sapien
ttgttatagtagcacagtaccaaggagtagggc

SEQ ID NO: 304071 - DNA, 33 bp, Homo sapien
gtatgggtgtgtggtacagttagactctaattc

SEQ ID NO: 304072 - DNA, 33 bp, Homo sapien
gtatgggtgtgtggtatagttagactctaattc

SEQ ID NO: 304073 - DNA, 33 bp, Homo sapien
tgacaatattgccaagccttgctactgaaatgt

SEQ ID NO: 304074 - DNA, 33 bp, Homo sapien
tgacaatattgccaaggcttgctactgaaatgt

SEQ ID NO: 304075 - DNA, 33 bp, Homo sapien
tttaggtgagaagagacacatactcaaagaaca

SEQ ID NO: 304076 - DNA, 33 bp, Homo sapien
tttaggtgagaagagatacatactcaaagaaca

SEQ ID NO: 304077 - DNA, 33 bp, Homo sapien
tttctcctacactgtaagttgtctcattattgt

SEQ ID NO: 304078 - DNA, 33 bp, Homo sapien
tttctcctacactgtaggttgtctcattattgt

SEQ ID NO: 304079 - DNA, 33 bp, Homo sapien
tagggctgaatcagggaaattgttcatcattct

SEQ ID NO: 304080 - DNA, 33 bp, Homo sapien
tagggctgaatcagggcaattgttcatcattct

SEQ ID NO: 304081 - DNA, 33 bp, Homo sapien
catataagtatatctggagtctctaaagtagaa

SEQ ID NO: 304082 - DNA, 33 bp, Homo sapien
catataagtatatctgtagtctctaaagtagaa

SEQ ID NO: 304083 - DNA, 33 bp, Homo sapien
tcaagggaactgactacgctcatcttttagaaa

SEQ ID NO: 304084 - DNA, 33 bp, Homo sapien
tcaagggaactgactatgctcatcttttagaaa

SEQ ID NO: 304085 - DNA, 33 bp, Homo sapien
gaaaatggaaatagagaaagtgcagacagtgaa

SEQ ID NO: 304086 - DNA, 33 bp, Homo sapien
gaaaatggaaatagaggaagtgcagacagtgaa

SEQ ID NO: 304087 - DNA, 33 bp, Homo sapien
atgtgctagaacatcccattaaaaaaagaaagg

SEQ ID NO: 304088 - DNA, 33 bp, Homo sapien
atgtgctagaacatcctattaaaaaaagaaagg

SEQ ID NO: 304089 - DNA, 33 bp, Homo sapien
ttcctggacttacatacacacatccataaaaca

SEQ ID NO: 304090 - DNA, 33 bp, Homo sapien
ttcctggacttacatatacacatccataaaaca

SEQ ID NO: 304091 - DNA, 33 bp, Homo sapien
agttgtcaatctgtggaacatatcaggcaattc

SEQ ID NO: 304092 - DNA, 33 bp, Homo sapien
agttgtcaatctgtggtacatatcaggcaattc

SEQ ID NO: 304093 - DNA, 33 bp, Homo sapien
aaatatcttggtaccccctcttaagccagtctg

SEQ ID NO: 304094 - DNA, 33 bp, Homo sapien
aaatatcttggtacccgctcttaagccagtctg

SEQ ID NO: 304095 - DNA, 33 bp, Homo sapien
atggttaaaatttcagaagttccctgtttaata

SEQ ID NO: 304096 - DNA, 33 bp, Homo sapien
atggttaaaatttcagcagttccctgtttaata

SEQ ID NO: 304097 - DNA, 33 bp, Homo sapien
taatacttaggtctgacacaaggaaatacttaa

SEQ ID NO: 304098 - DNA, 33 bp, Homo sapien
taatacttaggtctgatacaaggaaatacttaa

SEQ ID NO: 304099 - DNA, 33 bp, Homo sapien
tttttaaacttgaaaacgtaacttgtttcttca

SEQ ID NO: 304100 - DNA, 33 bp, Homo sapien
tttttaaacttgaaaaggtaacttgtttcttca

SEQ ID NO: 304101 - DNA, 33 bp, Homo sapien
gtatcatgaatccttacggtattttcagcctgc

SEQ ID NO: 304102 - DNA, 33 bp, Homo sapien
gtatcatgaatccttatggtattttcagcctgc

SEQ ID NO: 304103 - DNA, 33 bp, Homo sapien
gcccactgaaacagacaaaaaacaacaggaaat

SEQ ID NO: 304104 - DNA, 33 bp, Homo sapien
gcccactgaaacagactaaaaacaacaggaaat

SEQ ID NO: 304105 - DNA, 33 bp, Homo sapien
tgtctatagctcttcaggtttcctctcaatttt

SEQ ID NO: 304106 - DNA, 33 bp, Homo sapien
tgtctatagctcttcatgtttcctctcaatttt

SEQ ID NO: 304107 - DNA, 33 bp, Homo sapien
aacaggtagttttatacctcattcgcctttctg

SEQ ID NO: 304108 - DNA, 33 bp, Homo sapien
aacaggtagttttatagctcattcgcctttctg

SEQ ID NO: 304109 - DNA, 33 bp, Homo sapien
ctgtctgaaactgcagcagtcattttatagtca

SEQ ID NO: 304110 - DNA, 33 bp, Homo sapien
ctgtctgaaactgcagtagtcattttatagtca

SEQ ID NO: 304111 - DNA, 33 bp, Homo sapien
ctgatgagatgcagataaaacaactgtgaacta

SEQ ID NO: 304112 - DNA, 33 bp, Homo sapien
ctgatgagatgcagatgaaacaactgtgaacta

SEQ ID NO: 304113 - DNA, 33 bp, Homo sapien
gaacaaagtaagggaacagacgatatagagcgt

SEQ ID NO: 304114 - DNA, 33 bp, Homo sapien
gaacaaagtaagggaatagacgatatagagcgt

SEQ ID NO: 304115 - DNA, 33 bp, Homo sapien
ggaagacctgggaacactgagagtcttacatat

SEQ ID NO: 304116 - DNA, 33 bp, Homo sapien
ggaagacctgggaacattgagagtcttacatat

SEQ ID NO: 304117 - DNA, 33 bp, Homo sapien
gtcaatttgtaattaaagggatttgatgagaga

SEQ ID NO: 304118 - DNA, 33 bp, Homo sapien
gtcaatttgtaattaaggggatttgatgagaga

SEQ ID NO: 304119 - DNA, 33 bp, Homo sapien
agactaaaacagttgaagtgaagaacctgaaag

SEQ ID NO: 304120 - DNA, 33 bp, Homo sapien
agactaaaacagttgacgtgaagaacctgaaag

SEQ ID NO: 304121 - DNA, 33 bp, Homo sapien
caccacagggatccaaagagagggcggccaaag

SEQ ID NO: 304122 - DNA, 33 bp, Homo sapien
caccacagggatccaacgagagggcggccaaag

SEQ ID NO: 304123 - DNA, 33 bp, Homo sapien
atatacgaagatggaacctcatagggcaagtat

SEQ ID NO: 304124 - DNA, 33 bp, Homo sapien
atatacgaagatggaatctcatagggcaagtat

SEQ ID NO: 304125 - DNA, 33 bp, Homo sapien
tttagttggcatatagacattaaaacgagtaaa

SEQ ID NO: 304126 - DNA, 33 bp, Homo sapien
tttagttggcatataggcattaaaacgagtaaa

SEQ ID NO: 304127 - DNA, 33 bp, Homo sapien
tagtataagtcttatacgtcacacatcactata

SEQ ID NO: 304128 - DNA, 33 bp, Homo sapien
tagtataagtcttatatgtcacacatcactata

SEQ ID NO: 304129 - DNA, 33 bp, Homo sapien
aacctccacttcacaggaaggcttggattgctt

SEQ ID NO: 304130 - DNA, 33 bp, Homo sapien
aacctccacttcacagtaaggcttggattgctt

SEQ ID NO: 304131 - DNA, 33 bp, Homo sapien
accagcaattgttggcactccttggcttgtaga

SEQ ID NO: 304132 - DNA, 33 bp, Homo sapien
accagcaattgttggccctccttggcttgtaga

SEQ ID NO: 304133 - DNA, 33 bp, Homo sapien
cactgtcacttcatcaacagagcacctactgtc

SEQ ID NO: 304134 - DNA, 33 bp, Homo sapien
cactgtcacttcatcagcagagcacctactgtc

SEQ ID NO: 304135 - DNA, 33 bp, Homo sapien
gtttgcttgttaggaaataatgtcagttcatgc

SEQ ID NO: 304136 - DNA, 33 bp, Homo sapien
gtttgcttgttaggaagtaatgtcagttcatgc

SEQ ID NO: 304137 - DNA, 33 bp, Homo sapien
ggagtgttctacccccagaatgtcacatgagtc

SEQ ID NO: 304138 - DNA, 33 bp, Homo sapien
ggagtgttctacccccggaatgtcacatgagtc

SEQ ID NO: 304139 - DNA, 33 bp, Homo sapien
attagaaacttaacagcaggttgcctgggaagt

SEQ ID NO: 304140 - DNA, 33 bp, Homo sapien
attagaaacttaacagtaggttgcctgggaagt

SEQ ID NO: 304141 - DNA, 33 bp, Homo sapien
gaattggcagacataaacgaactcatatactat

SEQ ID NO: 304142 - DNA, 33 bp, Homo sapien
gaattggcagacataagcgaactcatatactat

SEQ ID NO: 304143 - DNA, 33 bp, Homo sapien
ttttagtattttagtacggtgaaactctctatg

SEQ ID NO: 304144 - DNA, 33 bp, Homo sapien
ttttagtattttagtatggtgaaactctctatg

SEQ ID NO: 304145 - DNA, 33 bp, Homo sapien
gcaccatactcttttgcaagacatttcacactt

SEQ ID NO: 304146 - DNA, 33 bp, Homo sapien
gcaccatactcttttgtaagacatttcacactt

SEQ ID NO: 304147 - DNA, 33 bp, Homo sapien
aaaaaagaaaatcactaacttgctcacttattt

SEQ ID NO: 304148 - DNA, 33 bp, Homo sapien
aaaaaagaaaatcactgacttgctcacttattt

SEQ ID NO: 304149 - DNA, 33 bp, Homo sapien
aggcacttaagttgtacaggaacatattttaag

SEQ ID NO: 304150 - DNA, 33 bp, Homo sapien
aggcacttaagttgtataggaacatattttaag

SEQ ID NO: 304151 - DNA, 33 bp, Homo sapien
actgtgacaagtagaaaatcaagtagaaaatgc

SEQ ID NO: 304152 - DNA, 33 bp, Homo sapien
actgtgacaagtagaagatcaagtagaaaatgc

SEQ ID NO: 304153 - DNA, 33 bp, Homo sapien
ggttgataacacatccaaagattttttgaaaat

SEQ ID NO: 304154 - DNA, 33 bp, Homo sapien
ggttgataacacatccgaagattttttgaaaat

SEQ ID NO: 304155 - DNA, 33 bp, Homo sapien
aggtctatctgccatcacttacataagcacaga

SEQ ID NO: 304156 - DNA, 33 bp, Homo sapien
aggtctatctgccatcgcttacataagcacaga

SEQ ID NO: 304157 - DNA, 33 bp, Homo sapien
tcatttgtcagtaaaaccacacattaacacttt

SEQ ID NO: 304158 - DNA, 33 bp, Homo sapien
tcatttgtcagtaaaatcacacattaacacttt

SEQ ID NO: 304159 - DNA, 33 bp, Homo sapien
atttgacagttaacagacagaaacggagatctt

SEQ ID NO: 304160 - DNA, 33 bp, Homo sapien
atttgacagttaacaggcagaaacggagatctt

SEQ ID NO: 304161 - DNA, 33 bp, Homo sapien
atttctagtatttaccactcctttgcagttcct

SEQ ID NO: 304162 - DNA, 33 bp, Homo sapien
atttctagtatttaccgctcctttgcagttcct

SEQ ID NO: 304163 - DNA, 33 bp, Homo sapien
tattcctcatgatcaacaaagaaattcagtgtt

SEQ ID NO: 304164 - DNA, 33 bp, Homo sapien
tattcctcatgatcaataaagaaattcagtgtt

SEQ ID NO: 304165 - DNA, 33 bp, Homo sapien
tcaatgtcaacaggaaaaaattcgttgaaaaat

SEQ ID NO: 304166 - DNA, 33 bp, Homo sapien
tcaatgtcaacaggaagaaattcgttgaaaaat

SEQ ID NO: 304167 - DNA, 33 bp, Homo sapien
aaataatttttgaagacagcaactaaagcttcc

SEQ ID NO: 304168 - DNA, 33 bp, Homo sapien
aaataatttttgaagagagcaactaaagcttcc

SEQ ID NO: 304169 - DNA, 33 bp, Homo sapien
tacaaagttagtaagactatgtgcatgggagtg

SEQ ID NO: 304170 - DNA, 33 bp, Homo sapien
tacaaagttagtaagagtatgtgcatgggagtg

SEQ ID NO: 304171 - DNA, 33 bp, Homo sapien
aagcaacacagatgaacgtctcacaaacataat

SEQ ID NO: 304172 - DNA, 33 bp, Homo sapien
aagcaacacagatgaatgtctcacaaacataat

SEQ ID NO: 304173 - DNA, 33 bp, Homo sapien
tcatatctgggaatcaataggctttctttcttt

SEQ ID NO: 304174 - DNA, 33 bp, Homo sapien
tcatatctgggaatcagtaggctttctttcttt

SEQ ID NO: 304175 - DNA, 33 bp, Homo sapien
ctttgactcttaacaacgggaatactttgtgag

SEQ ID NO: 304176 - DNA, 33 bp, Homo sapien
ctttgactcttaacaatgggaatactttgtgag

SEQ ID NO: 304177 - DNA, 33 bp, Homo sapien
tactaaatgccaatagcactttctcattctagc

SEQ ID NO: 304178 - DNA, 33 bp, Homo sapien
tactaaatgccaatagtactttctcattctagc

SEQ ID NO: 304179 - DNA, 33 bp, Homo sapien
ctttcacaaaggggaacgagtatagcagatttt

SEQ ID NO: 304180 - DNA, 33 bp, Homo sapien
ctttcacaaaggggaatgagtatagcagatttt

SEQ ID NO: 304181 - DNA, 33 bp, Homo sapien
cctcacagatctagcagagacaagaagcaggat

SEQ ID NO: 304182 - DNA, 33 bp, Homo sapien
cctcacagatctagcatagacaagaagcaggat

SEQ ID NO: 304183 - DNA, 33 bp, Homo sapien
gattctgttaatccagacagcctttccatacca

SEQ ID NO: 304184 - DNA, 33 bp, Homo sapien
gattctgttaatccaggcagcctttccatacca

SEQ ID NO: 304185 - DNA, 33 bp, Homo sapien
tgttctaatgtataaaactaatgatctgtccac

SEQ ID NO: 304186 - DNA, 33 bp, Homo sapien
tgttctaatgtataaagctaatgatctgtccac

SEQ ID NO: 304187 - DNA, 33 bp, Homo sapien
acacaactaagacagactaaaatgaaaatggaa

SEQ ID NO: 304188 - DNA, 33 bp, Homo sapien
acacaactaagacagagtaaaatgaaaatggaa

SEQ ID NO: 304189 - DNA, 33 bp, Homo sapien
atggtctccaatgtggaagatggcagatgggag

SEQ ID NO: 304190 - DNA, 33 bp, Homo sapien
atggtctccaatgtggcagatggcagatgggag

SEQ ID NO: 304191 - DNA, 33 bp, Homo sapien
ggatgaatgagaactacagtgtccgaatactta

SEQ ID NO: 304192 - DNA, 33 bp, Homo sapien
ggatgaatgagaactatagtgtccgaatactta

SEQ ID NO: 304193 - DNA, 33 bp, Homo sapien
ctgccttcttgtttcaactgtcgtactgtaaag

SEQ ID NO: 304194 - DNA, 33 bp, Homo sapien
ctgccttcttgtttcagctgtcgtactgtaaag

SEQ ID NO: 304195 - DNA, 33 bp, Homo sapien
aagtgggtggaaggaaacaactttcatgcagac

SEQ ID NO: 304196 - DNA, 33 bp, Homo sapien
aagtgggtggaaggaatcaactttcatgcagac

SEQ ID NO: 304197 - DNA, 33 bp, Homo sapien
aatggtcaaaacatcacagagctaacaagatga

SEQ ID NO: 304198 - DNA, 33 bp, Homo sapien
aatggtcaaaacatcagagagctaacaagatga

SEQ ID NO: 304199 - DNA, 33 bp, Homo sapien
tatatacatcaaactaaggcagtgattatttct

SEQ ID NO: 304200 - DNA, 33 bp, Homo sapien
tatatacatcaaactatggcagtgattatttct

SEQ ID NO: 304201 - DNA, 33 bp, Homo sapien
ttcaccagtgtaaaacaaagatagcttgtagaa

SEQ ID NO: 304202 - DNA, 33 bp, Homo sapien
ttcaccagtgtaaaaccaagatagcttgtagaa

SEQ ID NO: 304203 - DNA, 33 bp, Homo sapien
ggtaggtgcattacagcatatgaggcaatgtca

SEQ ID NO: 304204 - DNA, 33 bp, Homo sapien
ggtaggtgcattacagtatatgaggcaatgtca

SEQ ID NO: 304205 - DNA, 33 bp, Homo sapien
tgcataagtttctttcaatgactatactgtgac

SEQ ID NO: 304206 - DNA, 33 bp, Homo sapien
tgcataagtttctttctatgactatactgtgac

SEQ ID NO: 304207 - DNA, 33 bp, Homo sapien
aaactcgaaaggcacactgacctcattttttta

SEQ ID NO: 304208 - DNA, 33 bp, Homo sapien
aaactcgaaaggcacattgacctcattttttta

SEQ ID NO: 304209 - DNA, 33 bp, Homo sapien
caattgaagaagtagacaaccagaatagaccaa

SEQ ID NO: 304210 - DNA, 33 bp, Homo sapien
caattgaagaagtagataaccagaatagaccaa

SEQ ID NO: 304211 - DNA, 33 bp, Homo sapien
tgagctgatgaaggtccgaattactgacgaagt

SEQ ID NO: 304212 - DNA, 33 bp, Homo sapien
tgagctgatgaaggtctgaattactgacgaagt

SEQ ID NO: 304213 - DNA, 33 bp, Homo sapien
aggtattttttaagacaccctgatgacaaattt

SEQ ID NO: 304214 - DNA, 33 bp, Homo sapien
aggtattttttaagacgccctgatgacaaattt

SEQ ID NO: 304215 - DNA, 33 bp, Homo sapien
tcctggagtctcaaggaaatgaaggctgctgac

SEQ ID NO: 304216 - DNA, 33 bp, Homo sapien
tcctggagtctcaagggaatgaaggctgctgac

SEQ ID NO: 304217 - DNA, 33 bp, Homo sapien
agggaccaaaccgacaagagagaagagagtagg

SEQ ID NO: 304218 - DNA, 33 bp, Homo sapien
agggaccaaaccgacaggagagaagagagtagg

SEQ ID NO: 304219 - DNA, 33 bp, Homo sapien
actggagattcagtgccaaccaaataaatacaa

SEQ ID NO: 304220 - DNA, 33 bp, Homo sapien
actggagattcagtgcgaaccaaataaatacaa

SEQ ID NO: 304221 - DNA, 33 bp, Homo sapien
tacttggggtttagagaaattgcatcttggtag

SEQ ID NO: 304222 - DNA, 33 bp, Homo sapien
tacttggggtttagagtaattgcatcttggtag

SEQ ID NO: 304223 - DNA, 33 bp, Homo sapien
ccccagggcagtcggcaagtgacgtgtggcaca

SEQ ID NO: 304224 - DNA, 33 bp, Homo sapien
ccccagggcagtcggccagtgacgtgtggcaca

SEQ ID NO: 304225 - DNA, 33 bp, Homo sapien
ccaggccaggccttctaaagaggagctaatgac

SEQ ID NO: 304226 - DNA, 33 bp, Homo sapien
ccaggccaggccttctgaagaggagctaatgac

SEQ ID NO: 304227 - DNA, 33 bp, Homo sapien
gaagtacaatgtttccaaaaatataatatgact

SEQ ID NO: 304228 - DNA, 33 bp, Homo sapien
gaagtacaatgtttcccaaaatataatatgact

SEQ ID NO: 304229 - DNA, 33 bp, Homo sapien
ctcttctagctatacccatcaaacaataatact

SEQ ID NO: 304230 - DNA, 33 bp, Homo sapien
ctcttctagctatacctatcaaacaataatact

SEQ ID NO: 304231 - DNA, 33 bp, Homo sapien
tctcttcttaatgggaacataaaatccttttca

SEQ ID NO: 304232 - DNA, 33 bp, Homo sapien
tctcttcttaatgggagcataaaatccttttca

SEQ ID NO: 304233 - DNA, 33 bp, Homo sapien
taaataaactcgagaaagataaatgtcaaggac

SEQ ID NO: 304234 - DNA, 33 bp, Homo sapien
taaataaactcgagaatgataaatgtcaaggac

SEQ ID NO: 304235 - DNA, 33 bp, Homo sapien
gatccaatgcaaaacaagtgaaagcaagaataa

SEQ ID NO: 304236 - DNA, 33 bp, Homo sapien
gatccaatgcaaaacaggtgaaagcaagaataa

SEQ ID NO: 304237 - DNA, 33 bp, Homo sapien
gctccaaaatagttcaaatcagagcatgcctaa

SEQ ID NO: 304238 - DNA, 33 bp, Homo sapien
gctccaaaatagttcacatcagagcatgcctaa

SEQ ID NO: 304239 - DNA, 33 bp, Homo sapien
cagtaattatcttggaccactctaatacctgtt

SEQ ID NO: 304240 - DNA, 33 bp, Homo sapien
cagtaattatcttggatcactctaatacctgtt

SEQ ID NO: 304241 - DNA, 33 bp, Homo sapien
aaatactgaaaatacaaaagtagtgaattatct

SEQ ID NO: 304242 - DNA, 33 bp, Homo sapien
aaatactgaaaatacagaagtagtgaattatct

SEQ ID NO: 304243 - DNA, 33 bp, Homo sapien
ggtagcatgacttcccagagtatacctttacat

SEQ ID NO: 304244 - DNA, 33 bp, Homo sapien
ggtagcatgacttccccgagtatacctttacat

SEQ ID NO: 304245 - DNA, 33 bp, Homo sapien
taaagagtctgctacaagaaacttggaagagcc

SEQ ID NO: 304246 - DNA, 33 bp, Homo sapien
taaagagtctgctacaggaaacttggaagagcc

SEQ ID NO: 304247 - DNA, 33 bp, Homo sapien
gatctccattttaaaccggcagtctgcaaactc

SEQ ID NO: 304248 - DNA, 33 bp, Homo sapien
gatctccattttaaactggcagtctgcaaactc

SEQ ID NO: 304249 - DNA, 33 bp, Homo sapien
catgggcctcacctaaatggaacagatgcctaa

SEQ ID NO: 304250 - DNA, 33 bp, Homo sapien
catgggcctcacctaattggaacagatgcctaa

SEQ ID NO: 304251 - DNA, 33 bp, Homo sapien
actgaggttacaaatccctctaaatggtgaagg

SEQ ID NO: 304252 - DNA, 33 bp, Homo sapien
actgaggttacaaatctctctaaatggtgaagg

SEQ ID NO: 304253 - DNA, 33 bp, Homo sapien
agttgcagaatctacccatatgccctgggtttt

SEQ ID NO: 304254 - DNA, 33 bp, Homo sapien
agttgcagaatctacctatatgccctgggtttt

SEQ ID NO: 304255 - DNA, 33 bp, Homo sapien
catatattgttctcataatcagaaggagaaaag

SEQ ID NO: 304256 - DNA, 33 bp, Homo sapien
catatattgttctcatgatcagaaggagaaaag

SEQ ID NO: 304257 - DNA, 33 bp, Homo sapien
gtccttgagtaattcaaaaacaggtcatggtat

SEQ ID NO: 304258 - DNA, 33 bp, Homo sapien
gtccttgagtaattcacaaacaggtcatggtat

SEQ ID NO: 304259 - DNA, 33 bp, Homo sapien
cttttcttggataaaaactgatcaaactgtatg

SEQ ID NO: 304260 - DNA, 33 bp, Homo sapien
cttttcttggataaaagctgatcaaactgtatg

SEQ ID NO: 304261 - DNA, 33 bp, Homo sapien
aagcagccagctatagaaagagggggaaatagt

SEQ ID NO: 304262 - DNA, 33 bp, Homo sapien
aagcagccagctataggaagagggggaaatagt

SEQ ID NO: 304263 - DNA, 33 bp, Homo sapien
ataggggaacagcatacaggggctaattggagg

SEQ ID NO: 304264 - DNA, 33 bp, Homo sapien
ataggggaacagcatagaggggctaattggagg

SEQ ID NO: 304265 - DNA, 33 bp, Homo sapien
aaatagtgattttaaaagactctgtacagaaga

SEQ ID NO: 304266 - DNA, 33 bp, Homo sapien
aaatagtgattttaaatgactctgtacagaaga

SEQ ID NO: 304267 - DNA, 33 bp, Homo sapien
gcaggatgactgcatagaatccacaaagccatt

SEQ ID NO: 304268 - DNA, 33 bp, Homo sapien
gcaggatgactgcatataatccacaaagccatt

SEQ ID NO: 304269 - DNA, 33 bp, Homo sapien
gaaccaaatagaaaacccagaagtaagactaca

SEQ ID NO: 304270 - DNA, 33 bp, Homo sapien
gaaccaaatagaaaactcagaagtaagactaca

SEQ ID NO: 304271 - DNA, 33 bp, Homo sapien
aaggagaattttggagactcaatagtagttgat

SEQ ID NO: 304272 - DNA, 33 bp, Homo sapien
aaggagaattttggaggctcaatagtagttgat

SEQ ID NO: 304273 - DNA, 33 bp, Homo sapien
cctcctggtcactggaacattaagtagtgcgct

SEQ ID NO: 304274 - DNA, 33 bp, Homo sapien
cctcctggtcactggagcattaagtagtgcgct

SEQ ID NO: 304275 - DNA, 33 bp, Homo sapien
tgtgagtgacttcaaaagcgaaaaaaggataaa

SEQ ID NO: 304276 - DNA, 33 bp, Homo sapien
tgtgagtgacttcaaacgcgaaaaaaggataaa

SEQ ID NO: 304277 - DNA, 33 bp, Homo sapien
attataaaacatcacaacattccctttcaggtg

SEQ ID NO: 304278 - DNA, 33 bp, Homo sapien
attataaaacatcacagcattccctttcaggtg

SEQ ID NO: 304279 - DNA, 33 bp, Homo sapien
cttttcaggctcttcccaaaccataaacaacat

SEQ ID NO: 304280 - DNA, 33 bp, Homo sapien
cttttcaggctcttcctaaaccataaacaacat

SEQ ID NO: 304281 - DNA, 33 bp, Homo sapien
ggtgggtaaaagaccacgaagctacaggaacag

SEQ ID NO: 304282 - DNA, 33 bp, Homo sapien
ggtgggtaaaagaccatgaagctacaggaacag

SEQ ID NO: 304283 - DNA, 33 bp, Homo sapien
ccactaaaaaattacacgttgactgggcgcagt

SEQ ID NO: 304284 - DNA, 33 bp, Homo sapien
ccactaaaaaattacatgttgactgggcgcagt

SEQ ID NO: 304285 - DNA, 33 bp, Homo sapien
cttttttgaataaatgaactgaactgaaaaaga

SEQ ID NO: 304286 - DNA, 33 bp, Homo sapien
cttttttgaataaatgtactgaactgaaaaaga

SEQ ID NO: 304287 - DNA, 33 bp, Homo sapien
agcacctcaatagatacaaatgtctttccagac

SEQ ID NO: 304288 - DNA, 33 bp, Homo sapien
agcacctcaatagatataaatgtctttccagac

SEQ ID NO: 304289 - DNA, 33 bp, Homo sapien
aagttctaccaacaaccgtattggttccttgag

SEQ ID NO: 304290 - DNA, 33 bp, Homo sapien
aagttctaccaacaactgtattggttccttgag

SEQ ID NO: 304291 - DNA, 33 bp, Homo sapien
gcccattttccatacaagagccagactgatact

SEQ ID NO: 304292 - DNA, 33 bp, Homo sapien
gcccattttccatacaggagccagactgatact

SEQ ID NO: 304293 - DNA, 33 bp, Homo sapien
gattgcttgaatctagaaggttggtgctgcagt

SEQ ID NO: 304294 - DNA, 33 bp, Homo sapien
gattgcttgaatctaggaggttggtgctgcagt

SEQ ID NO: 304295 - DNA, 33 bp, Homo sapien
tcttttgttatgaaaacctttgactatgttcct

SEQ ID NO: 304296 - DNA, 33 bp, Homo sapien
tcttttgttatgaaaagctttgactatgttcct

SEQ ID NO: 304297 - DNA, 33 bp, Homo sapien
tgcctaaattattctgcatcttgcattccctga

SEQ ID NO: 304298 - DNA, 33 bp, Homo sapien
tgcctaaattattctgtatcttgcattccctga

SEQ ID NO: 304299 - DNA, 33 bp, Homo sapien
ctcctatagaatgataacttactcatctgcagc

SEQ ID NO: 304300 - DNA, 33 bp, Homo sapien
ctcctatagaatgatagcttactcatctgcagc

SEQ ID NO: 304301 - DNA, 33 bp, Homo sapien
aggtgagagtgcaataaatgaggaacctgctcc

SEQ ID NO: 304302 - DNA, 33 bp, Homo sapien
aggtgagagtgcaatacatgaggaacctgctcc

SEQ ID NO: 304303 - DNA, 33 bp, Homo sapien
agtttaaggacagaagccatctccataacataa

SEQ ID NO: 304304 - DNA, 33 bp, Homo sapien
agtttaaggacagaagtcatctccataacataa

SEQ ID NO: 304305 - DNA, 33 bp, Homo sapien
ctttagggctttcagaacttacctgaaccaact

SEQ ID NO: 304306 - DNA, 33 bp, Homo sapien
ctttagggctttcagagcttacctgaaccaact

SEQ ID NO: 304307 - DNA, 33 bp, Homo sapien
gttatgtttggaacaacaggcatctttacaatt

SEQ ID NO: 304308 - DNA, 33 bp, Homo sapien
gttatgtttggaacaataggcatctttacaatt

SEQ ID NO: 304309 - DNA, 33 bp, Homo sapien
ataatttggaacaacactgacatggacagtaga

SEQ ID NO: 304310 - DNA, 33 bp, Homo sapien
ataatttggaacaacattgacatggacagtaga

SEQ ID NO: 304311 - DNA, 33 bp, Homo sapien
ggatagaatggagggaaaagaatacaaattaac

SEQ ID NO: 304312 - DNA, 33 bp, Homo sapien
ggatagaatggagggagaagaatacaaattaac

SEQ ID NO: 304313 - DNA, 33 bp, Homo sapien
ctttcctggatcacggaaaagtcctggaaagga

SEQ ID NO: 304314 - DNA, 33 bp, Homo sapien
ctttcctggatcacgggaaagtcctggaaagga

SEQ ID NO: 304315 - DNA, 33 bp, Homo sapien
aaaactgcacaagataagtatcaatcatgttct

SEQ ID NO: 304316 - DNA, 33 bp, Homo sapien
aaaactgcacaagataggtatcaatcatgttct

SEQ ID NO: 304317 - DNA, 33 bp, Homo sapien
tataacaatgaatgccaaagtataatgtaattc

SEQ ID NO: 304318 - DNA, 33 bp, Homo sapien
tataacaatgaatgccgaagtataatgtaattc

SEQ ID NO: 304319 - DNA, 33 bp, Homo sapien
aaagtgaacataactgaaaaacaatgaactata

SEQ ID NO: 304320 - DNA, 33 bp, Homo sapien
aaagtgaacataactggaaaacaatgaactata

SEQ ID NO: 304321 - DNA, 33 bp, Homo sapien
gtaggttcataactgaagaaatttgtaggtttg

SEQ ID NO: 304322 - DNA, 33 bp, Homo sapien
gtaggttcataactgatgaaatttgtaggtttg

SEQ ID NO: 304323 - DNA, 33 bp, Homo sapien
cacacttatgaaacaccaaatatgtataagaca

SEQ ID NO: 304324 - DNA, 33 bp, Homo sapien
cacacttatgaaacactaaatatgtataagaca

SEQ ID NO: 304325 - DNA, 33 bp, Homo sapien
gatgttgaaggatgagcagaccttggcaattgg

SEQ ID NO: 304326 - DNA, 33 bp, Homo sapien
gatgttgaaggatgagtagaccttggcaattgg

SEQ ID NO: 304327 - DNA, 33 bp, Homo sapien
ctaaggctgttttgaaatgaacttgggctaaca

SEQ ID NO: 304328 - DNA, 33 bp, Homo sapien
ctaaggctgttttgaagtgaacttgggctaaca

SEQ ID NO: 304329 - DNA, 33 bp, Homo sapien
ctgattgaaggtgagcaaagtacaagctatttt

SEQ ID NO: 304330 - DNA, 33 bp, Homo sapien
ctgattgaaggtgagcgaagtacaagctatttt

SEQ ID NO: 304331 - DNA, 33 bp, Homo sapien
acagatggtgaatgagcataaatgtgtaggagt

SEQ ID NO: 304332 - DNA, 33 bp, Homo sapien
acagatggtgaatgaggataaatgtgtaggagt

SEQ ID NO: 304333 - DNA, 33 bp, Homo sapien
tttttcgctttcagtacagtactcaagaaatta

SEQ ID NO: 304334 - DNA, 33 bp, Homo sapien
tttttcgctttcagtatagtactcaagaaatta

SEQ ID NO: 304335 - DNA, 33 bp, Homo sapien
caaaacaacctgtccaacataatttatgattct

SEQ ID NO: 304336 - DNA, 33 bp, Homo sapien
caaaacaacctgtccagcataatttatgattct

SEQ ID NO: 304337 - DNA, 33 bp, Homo sapien
agccacaacattttaaagaatcattttggctgc

SEQ ID NO: 304338 - DNA, 33 bp, Homo sapien
agccacaacattttaaggaatcattttggctgc

SEQ ID NO: 304339 - DNA, 33 bp, Homo sapien
cacccctaaaatctgccatttgtgattgtgttt

SEQ ID NO: 304340 - DNA, 33 bp, Homo sapien
cacccctaaaatctgctatttgtgattgtgttt

SEQ ID NO: 304341 - DNA, 33 bp, Homo sapien
ctctgattacataaaaacagaatgacttcacaa

SEQ ID NO: 304342 - DNA, 33 bp, Homo sapien
ctctgattacataaaagcagaatgacttcacaa

SEQ ID NO: 304343 - DNA, 33 bp, Homo sapien
tcctttatgaacaaaaatttccctttaagcatg

SEQ ID NO: 304344 - DNA, 33 bp, Homo sapien
tcctttatgaacaaaactttccctttaagcatg

SEQ ID NO: 304345 - DNA, 33 bp, Homo sapien
cattaccattgggaagacatcaagccattcttg

SEQ ID NO: 304346 - DNA, 33 bp, Homo sapien
cattaccattgggaaggcatcaagccattcttg

SEQ ID NO: 304347 - DNA, 33 bp, Homo sapien
tcttgaggaacataaacgagtctctcaacttct

SEQ ID NO: 304348 - DNA, 33 bp, Homo sapien
tcttgaggaacataaatgagtctctcaacttct

SEQ ID NO: 304349 - DNA, 33 bp, Homo sapien
gtttactctagtcttacgtgcaagtgtgaatat

SEQ ID NO: 304350 - DNA, 33 bp, Homo sapien
gtttactctagtcttatgtgcaagtgtgaatat

SEQ ID NO: 304351 - DNA, 33 bp, Homo sapien
tgtgtcacttaaggaccatctgccactaagcag

SEQ ID NO: 304352 - DNA, 33 bp, Homo sapien
tgtgtcacttaaggactatctgccactaagcag

SEQ ID NO: 304353 - DNA, 33 bp, Homo sapien
atgctcatttaaggatcaacacaggctctgatt

SEQ ID NO: 304354 - DNA, 33 bp, Homo sapien
atgctcatttaaggattaacacaggctctgatt

SEQ ID NO: 304355 - DNA, 33 bp, Homo sapien
agaaaatcagtctgctcaagaatctgcaacttc

SEQ ID NO: 304356 - DNA, 33 bp, Homo sapien
agaaaatcagtctgcttaagaatctgcaacttc

SEQ ID NO: 304357 - DNA, 33 bp, Homo sapien
ttctgccaacctctatgaaacagcaacagacta

SEQ ID NO: 304358 - DNA, 33 bp, Homo sapien
ttctgccaacctctattaaacagcaacagacta

SEQ ID NO: 304359 - DNA, 33 bp, Homo sapien
gaaggcttctgaaaaacgactagggttaccaag

SEQ ID NO: 304360 - DNA, 33 bp, Homo sapien
gaaggcttctgaaaaatgactagggttaccaag

SEQ ID NO: 304361 - DNA, 33 bp, Homo sapien
tgatgaatacatacaaactaatttgctaaaact

SEQ ID NO: 304362 - DNA, 33 bp, Homo sapien
tgatgaatacatacaagctaatttgctaaaact

SEQ ID NO: 304363 - DNA, 33 bp, Homo sapien
atctcagttcatctcaatcttggtgttttagct

SEQ ID NO: 304364 - DNA, 33 bp, Homo sapien
atctcagttcatctcagtcttggtgttttagct

SEQ ID NO: 304365 - DNA, 33 bp, Homo sapien
catggacataaagtaaacacttgaactggtggt

SEQ ID NO: 304366 - DNA, 33 bp, Homo sapien
catggacataaagtaagcacttgaactggtggt

SEQ ID NO: 304367 - DNA, 33 bp, Homo sapien
attttgattgattcaacgttttgttaatatgaa

SEQ ID NO: 304368 - DNA, 33 bp, Homo sapien
attttgattgattcaaggttttgttaatatgaa

SEQ ID NO: 304369 - DNA, 33 bp, Homo sapien
atcttgttaatccagccagtagtctgtaaatct

SEQ ID NO: 304370 - DNA, 33 bp, Homo sapien
atcttgttaatccagctagtagtctgtaaatct

SEQ ID NO: 304371 - DNA, 33 bp, Homo sapien
agattacatgtttccacgaagttattcatcttc

SEQ ID NO: 304372 - DNA, 33 bp, Homo sapien
agattacatgtttccaggaagttattcatcttc

SEQ ID NO: 304373 - DNA, 33 bp, Homo sapien
gactattattttaagcaaagtagctcaggaatg

SEQ ID NO: 304374 - DNA, 33 bp, Homo sapien
gactattattttaagcgaagtagctcaggaatg

SEQ ID NO: 304375 - DNA, 33 bp, Homo sapien
acagtatagcagttacaaggattgactccagag

SEQ ID NO: 304376 - DNA, 33 bp, Homo sapien
acagtatagcagttacgaggattgactccagag

SEQ ID NO: 304377 - DNA, 33 bp, Homo sapien
aatctgctccaatatacatggattaatctcaga

SEQ ID NO: 304378 - DNA, 33 bp, Homo sapien
aatctgctccaatatagatggattaatctcaga

SEQ ID NO: 304379 - DNA, 33 bp, Homo sapien
ttaaaagactcaataaatagttggaagataaag

SEQ ID NO: 304380 - DNA, 33 bp, Homo sapien
ttaaaagactcaataattagttggaagataaag

SEQ ID NO: 304381 - DNA, 33 bp, Homo sapien
taacttaatgccaatgacaattacaatcttgtg

SEQ ID NO: 304382 - DNA, 33 bp, Homo sapien
taacttaatgccaatgtcaattacaatcttgtg

SEQ ID NO: 304383 - DNA, 33 bp, Homo sapien
aactcagaagaagctgaaccaacaatctgaaat

SEQ ID NO: 304384 - DNA, 33 bp, Homo sapien
aactcagaagaagctggaccaacaatctgaaat

SEQ ID NO: 304385 - DNA, 33 bp, Homo sapien
ttatgcatattgaaagaagtccatgcagggaag

SEQ ID NO: 304386 - DNA, 33 bp, Homo sapien
ttatgcatattgaaagtagtccatgcagggaag

SEQ ID NO: 304387 - DNA, 33 bp, Homo sapien
atgaaagtcaaggtcacgttgggaagaacagat

SEQ ID NO: 304388 - DNA, 33 bp, Homo sapien
atgaaagtcaaggtcatgttgggaagaacagat

SEQ ID NO: 304389 - DNA, 33 bp, Homo sapien
tcagcagactgggaaccagaaatttagaaaata

SEQ ID NO: 304390 - DNA, 33 bp, Homo sapien
tcagcagactgggaacgagaaatttagaaaata

SEQ ID NO: 304391 - DNA, 33 bp, Homo sapien
tttagtactcaactgtaaaaaaggcagatcaag

SEQ ID NO: 304392 - DNA, 33 bp, Homo sapien
tttagtactcaactgtgaaaaaggcagatcaag

SEQ ID NO: 304393 - DNA, 33 bp, Homo sapien
atcttttattcaagtacctggacaatactgtaa

SEQ ID NO: 304394 - DNA, 33 bp, Homo sapien
atcttttattcaagtagctggacaatactgtaa

SEQ ID NO: 304395 - DNA, 33 bp, Homo sapien
taacattctagtaacacgaggcagacaagaaat

SEQ ID NO: 304396 - DNA, 33 bp, Homo sapien
taacattctagtaacatgaggcagacaagaaat

SEQ ID NO: 304397 - DNA, 33 bp, Homo sapien
gatatgtaaatggttacacagcagggaaggtag

SEQ ID NO: 304398 - DNA, 33 bp, Homo sapien
gatatgtaaatggttatacagcagggaaggtag

SEQ ID NO: 304399 - DNA, 33 bp, Homo sapien
aatggtattttcttccgcatagatttgttggga

SEQ ID NO: 304400 - DNA, 33 bp, Homo sapien
aatggtattttcttcctcatagatttgttggga

SEQ ID NO: 304401 - DNA, 33 bp, Homo sapien
ttaccatattcagaacaattactttatctcatt

SEQ ID NO: 304402 - DNA, 33 bp, Homo sapien
ttaccatattcagaaccattactttatctcatt

SEQ ID NO: 304403 - DNA, 33 bp, Homo sapien
ctgtgcctatagtcaacagtgctgtattagaca

SEQ ID NO: 304404 - DNA, 33 bp, Homo sapien
ctgtgcctatagtcaatagtgctgtattagaca

SEQ ID NO: 304405 - DNA, 33 bp, Homo sapien
gagggtagtaaacacaacttgaatcactgatgc

SEQ ID NO: 304406 - DNA, 33 bp, Homo sapien
gagggtagtaaacacagcttgaatcactgatgc

SEQ ID NO: 304407 - DNA, 33 bp, Homo sapien
tagctgcagtagaatagaacaccagatagattt

SEQ ID NO: 304408 - DNA, 33 bp, Homo sapien
tagctgcagtagaatataacaccagatagattt

SEQ ID NO: 304409 - DNA, 33 bp, Homo sapien
gaccagatattggagtaaaaaacctcacaaatc

SEQ ID NO: 304410 - DNA, 33 bp, Homo sapien
gaccagatattggagtcaaaaacctcacaaatc

SEQ ID NO: 304411 - DNA, 33 bp, Homo sapien
ggaaaactaggaaaaactggcatgacatattta

SEQ ID NO: 304412 - DNA, 33 bp, Homo sapien
ggaaaactaggaaaaagtggcatgacatattta

SEQ ID NO: 304413 - DNA, 33 bp, Homo sapien
atcctttgctttcaaaatgaataattcctttta

SEQ ID NO: 304414 - DNA, 33 bp, Homo sapien
atcctttgctttcaaagtgaataattcctttta

SEQ ID NO: 304415 - DNA, 33 bp, Homo sapien
caagcgttacctggaacagatttcatttatctg

SEQ ID NO: 304416 - DNA, 33 bp, Homo sapien
caagcgttacctggaatagatttcatttatctg

SEQ ID NO: 304417 - DNA, 33 bp, Homo sapien
aggctcataggtaaaagactttgtactgtggac

SEQ ID NO: 304418 - DNA, 33 bp, Homo sapien
aggctcataggtaaaatactttgtactgtggac

SEQ ID NO: 304419 - DNA, 33 bp, Homo sapien
caaacagaagcaatgagtaacaatagacatagt

SEQ ID NO: 304420 - DNA, 33 bp, Homo sapien
caaacagaagcaatgattaacaatagacatagt

SEQ ID NO: 304421 - DNA, 33 bp, Homo sapien
gacaatgcaatccaagaaaagtaaaagagcact

SEQ ID NO: 304422 - DNA, 33 bp, Homo sapien
gacaatgcaatccaaggaaagtaaaagagcact

SEQ ID NO: 304423 - DNA, 33 bp, Homo sapien
atcagcggggagcagacggtatagattccagtc

SEQ ID NO: 304424 - DNA, 33 bp, Homo sapien
atcagcggggagcagatggtatagattccagtc

SEQ ID NO: 304425 - DNA, 33 bp, Homo sapien
aaacttctcgttctaaacaggccttcgacagat

SEQ ID NO: 304426 - DNA, 33 bp, Homo sapien
aaacttctcgttctaatcaggccttcgacagat

SEQ ID NO: 304427 - DNA, 33 bp, Homo sapien
aatgagctgaccgtaactacctctataatcttg

SEQ ID NO: 304428 - DNA, 33 bp, Homo sapien
aatgagctgaccgtaagtacctctataatcttg

SEQ ID NO: 304429 - DNA, 33 bp, Homo sapien
tgtgaccagtaattcagtctgctaaaccttcga

SEQ ID NO: 304430 - DNA, 33 bp, Homo sapien
tgtgaccagtaattcattctgctaaaccttcga

SEQ ID NO: 304431 - DNA, 33 bp, Homo sapien
aagagacagaattagagacaagaacagaacaaa

SEQ ID NO: 304432 - DNA, 33 bp, Homo sapien
aagagacagaattagatacaagaacagaacaaa

SEQ ID NO: 304433 - DNA, 33 bp, Homo sapien
ttctttccaaatgtcaatcctcagaactttctc

SEQ ID NO: 304434 - DNA, 33 bp, Homo sapien
ttctttccaaatgtcagtcctcagaactttctc

SEQ ID NO: 304435 - DNA, 33 bp, Homo sapien
tggaacccagcttaccagatacaagtctatgaa

SEQ ID NO: 304436 - DNA, 33 bp, Homo sapien
tggaacccagcttaccggatacaagtctatgaa

SEQ ID NO: 304437 - DNA, 33 bp, Homo sapien
ctgaacatgattcttaccggatccacaaagtta

SEQ ID NO: 304438 - DNA, 33 bp, Homo sapien
ctgaacatgattcttagcggatccacaaagtta

SEQ ID NO: 304439 - DNA, 33 bp, Homo sapien
accaatcagattccatgagaaatttgagtgacg

SEQ ID NO: 304440 - DNA, 33 bp, Homo sapien
accaatcagattccattagaaatttgagtgacg

SEQ ID NO: 304441 - DNA, 33 bp, Homo sapien
tgtcctaaagaggaacactgaaaaaacttcctt

SEQ ID NO: 304442 - DNA, 33 bp, Homo sapien
tgtcctaaagaggaacgctgaaaaaacttcctt

SEQ ID NO: 304443 - DNA, 33 bp, Homo sapien
aacagaacagcttttaagggagacactctatat

SEQ ID NO: 304444 - DNA, 33 bp, Homo sapien
aacagaacagcttttaggggagacactctatat

SEQ ID NO: 304445 - DNA, 33 bp, Homo sapien
gttagtcatcagaaagaaccagaaactgattat

SEQ ID NO: 304446 - DNA, 33 bp, Homo sapien
gttagtcatcagaaaggaccagaaactgattat

SEQ ID NO: 304447 - DNA, 33 bp, Homo sapien
taatgattaattgttacggttattgaggcataa

SEQ ID NO: 304448 - DNA, 33 bp, Homo sapien
taatgattaattgttagggttattgaggcataa

SEQ ID NO: 304449 - DNA, 33 bp, Homo sapien
aaaattagtgagagaaagtttatggagcaacaa

SEQ ID NO: 304450 - DNA, 33 bp, Homo sapien
aaaattagtgagagaatgtttatggagcaacaa

SEQ ID NO: 304451 - DNA, 33 bp, Homo sapien
attatgtctcagttcaccttttaaacatctcct

SEQ ID NO: 304452 - DNA, 33 bp, Homo sapien
attatgtctcagttcatcttttaaacatctcct

SEQ ID NO: 304453 - DNA, 33 bp, Homo sapien
ctcgtgtaattttcacaagaatctccctcattt

SEQ ID NO: 304454 - DNA, 33 bp, Homo sapien
ctcgtgtaattttcaccagaatctccctcattt

SEQ ID NO: 304455 - DNA, 33 bp, Homo sapien
tatctgaaatggaataggtatcacttaaataaa

SEQ ID NO: 304456 - DNA, 33 bp, Homo sapien
tatctgaaatggaatatgtatcacttaaataaa

SEQ ID NO: 304457 - DNA, 33 bp, Homo sapien
tcacacacctataacacgtctctagtcttattt

SEQ ID NO: 304458 - DNA, 33 bp, Homo sapien
tcacacacctataacatgtctctagtcttattt

SEQ ID NO: 304459 - DNA, 33 bp, Homo sapien
ttagacattcacttacgattttcattacttgta

SEQ ID NO: 304460 - DNA, 33 bp, Homo sapien
ttagacattcacttactattttcattacttgta

SEQ ID NO: 304461 - DNA, 33 bp, Homo sapien
acggattatccttatgaatatcagttctcattc

SEQ ID NO: 304462 - DNA, 33 bp, Homo sapien
acggattatccttatgtatatcagttctcattc

SEQ ID NO: 304463 - DNA, 33 bp, Homo sapien
ttgtagttgccctgaaaagaatgagatcgacct

SEQ ID NO: 304464 - DNA, 33 bp, Homo sapien
ttgtagttgccctgaagagaatgagatcgacct

SEQ ID NO: 304465 - DNA, 33 bp, Homo sapien
aagggaatgcttatacaccattggaaggagtgt

SEQ ID NO: 304466 - DNA, 33 bp, Homo sapien
aagggaatgcttatacgccattggaaggagtgt

SEQ ID NO: 304467 - DNA, 33 bp, Homo sapien
aatcagagacgatacacaaaaaaatggaaaagc

SEQ ID NO: 304468 - DNA, 33 bp, Homo sapien
aatcagagacgatacataaaaaaatggaaaagc

SEQ ID NO: 304469 - DNA, 33 bp, Homo sapien
aaaacaggaatcaaaaaaatcaaagcaaaatta

SEQ ID NO: 304470 - DNA, 33 bp, Homo sapien
aaaacaggaatcaaaacaatcaaagcaaaatta

SEQ ID NO: 304471 - DNA, 33 bp, Homo sapien
ttattttaacatacagaataccacattttgttt

SEQ ID NO: 304472 - DNA, 33 bp, Homo sapien
ttattttaacatacagcataccacattttgttt

SEQ ID NO: 304473 - DNA, 33 bp, Homo sapien
gggggtggcaacatcgcatggagagagaatctg

SEQ ID NO: 304474 - DNA, 33 bp, Homo sapien
gggggtggcaacatcgtatggagagagaatctg

SEQ ID NO: 304475 - DNA, 33 bp, Homo sapien
tacctcaagacaatcacgaaattcccaaagatc

SEQ ID NO: 304476 - DNA, 33 bp, Homo sapien
tacctcaagacaatcatgaaattcccaaagatc

SEQ ID NO: 304477 - DNA, 33 bp, Homo sapien
tgttctcactcatcagaaggggctaaaaattaa

SEQ ID NO: 304478 - DNA, 33 bp, Homo sapien
tgttctcactcatcagtaggggctaaaaattaa

SEQ ID NO: 304479 - DNA, 33 bp, Homo sapien
tagagaaaatgaaggaaaatagttcagataaga

SEQ ID NO: 304480 - DNA, 33 bp, Homo sapien
tagagaaaatgaaggagaatagttcagataaga

SEQ ID NO: 304481 - DNA, 33 bp, Homo sapien
tccacctaaagccgtcaatcaatctattttctc

SEQ ID NO: 304482 - DNA, 33 bp, Homo sapien
tccacctaaagccgtcgatcaatctattttctc

SEQ ID NO: 304483 - DNA, 33 bp, Homo sapien
ccctaacatgaacacacaaggactaaaaagaaa

SEQ ID NO: 304484 - DNA, 33 bp, Homo sapien
ccctaacatgaacacataaggactaaaaagaaa

SEQ ID NO: 304485 - DNA, 33 bp, Homo sapien
ttgtagtttatgcaaactggatctgattcacca

SEQ ID NO: 304486 - DNA, 33 bp, Homo sapien
ttgtagtttatgcaaattggatctgattcacca

SEQ ID NO: 304487 - DNA, 33 bp, Homo sapien
taatcaaggtattaagaaaaatgtccaattgtt

SEQ ID NO: 304488 - DNA, 33 bp, Homo sapien
taatcaaggtattaaggaaaatgtccaattgtt

SEQ ID NO: 304489 - DNA, 33 bp, Homo sapien
aggcaataaagagcaagggccaaagggaattat

SEQ ID NO: 304490 - DNA, 33 bp, Homo sapien
aggcaataaagagcaatggccaaagggaattat

SEQ ID NO: 304491 - DNA, 33 bp, Homo sapien
aatggctgaatgagataagattaggaggagtga

SEQ ID NO: 304492 - DNA, 33 bp, Homo sapien
aatggctgaatgagatgagattaggaggagtga

SEQ ID NO: 304493 - DNA, 33 bp, Homo sapien
gagctctcagaacttaccacagtgaatgtcata

SEQ ID NO: 304494 - DNA, 33 bp, Homo sapien
gagctctcagaacttatcacagtgaatgtcata

SEQ ID NO: 304495 - DNA, 33 bp, Homo sapien
gacctaatgaaagcgacagctagtaatacaata

SEQ ID NO: 304496 - DNA, 33 bp, Homo sapien
gacctaatgaaagcgatagctagtaatacaata

SEQ ID NO: 304497 - DNA, 33 bp, Homo sapien
tctgtggtatcagttgcaatatatcccattttg

SEQ ID NO: 304498 - DNA, 33 bp, Homo sapien
tctgtggtatcagttgtaatatatcccattttg

SEQ ID NO: 304499 - DNA, 33 bp, Homo sapien
ggtttatctcactaaaggtctatcaattttatt

SEQ ID NO: 304500 - DNA, 33 bp, Homo sapien
ggtttatctcactaaatgtctatcaattttatt

SEQ ID NO: 304501 - DNA, 33 bp, Homo sapien
tgttttattcttgaaccagtgcaggacttcctc

SEQ ID NO: 304502 - DNA, 33 bp, Homo sapien
tgttttattcttgaacgagtgcaggacttcctc

SEQ ID NO: 304503 - DNA, 33 bp, Homo sapien
aatgcaaagaccatcacgcaaagaccttcatgc

SEQ ID NO: 304504 - DNA, 33 bp, Homo sapien
aatgcaaagaccatcatgcaaagaccttcatgc

SEQ ID NO: 304505 - DNA, 33 bp, Homo sapien
ccaggaagtataaacaactagatctcgactgct

SEQ ID NO: 304506 - DNA, 33 bp, Homo sapien
ccaggaagtataaacagctagatctcgactgct

SEQ ID NO: 304507 - DNA, 33 bp, Homo sapien
gcttaaaccaaagcacaataggaataagtgtta

SEQ ID NO: 304508 - DNA, 33 bp, Homo sapien
gcttaaaccaaagcacgataggaataagtgtta

SEQ ID NO: 304509 - DNA, 33 bp, Homo sapien
gctgctcctctataaacatgtcgaataattatc

SEQ ID NO: 304510 - DNA, 33 bp, Homo sapien
gctgctcctctataaatatgtcgaataattatc

SEQ ID NO: 304511 - DNA, 33 bp, Homo sapien
ggcattctgtttttaccctgaactatcttttga

SEQ ID NO: 304512 - DNA, 33 bp, Homo sapien
ggcattctgtttttactctgaactatcttttga

SEQ ID NO: 304513 - DNA, 33 bp, Homo sapien
atatgccttttgaaacaacacattatattttct

SEQ ID NO: 304514 - DNA, 33 bp, Homo sapien
atatgccttttgaaacgacacattatattttct

SEQ ID NO: 304515 - DNA, 33 bp, Homo sapien
agactcagggtagctacattcaacaagtagagc

SEQ ID NO: 304516 - DNA, 33 bp, Homo sapien
agactcagggtagctatattcaacaagtagagc

SEQ ID NO: 304517 - DNA, 33 bp, Homo sapien
ttaagagatgcaaagacaagacatagattggaa

SEQ ID NO: 304518 - DNA, 33 bp, Homo sapien
ttaagagatgcaaagataagacatagattggaa

SEQ ID NO: 304519 - DNA, 33 bp, Homo sapien
ctactttacgatttcaccatcctaagataacta

SEQ ID NO: 304520 - DNA, 33 bp, Homo sapien
ctactttacgatttcatcatcctaagataacta

SEQ ID NO: 304521 - DNA, 33 bp, Homo sapien
gtttcctaagacaaagcccatgaaactagaaac

SEQ ID NO: 304522 - DNA, 33 bp, Homo sapien
gtttcctaagacaaaggccatgaaactagaaac

SEQ ID NO: 304523 - DNA, 33 bp, Homo sapien
ctcgttctctgctaccagcttgatatatgatct

SEQ ID NO: 304524 - DNA, 33 bp, Homo sapien
ctcgttctctgctacccgcttgatatatgatct

SEQ ID NO: 304525 - DNA, 33 bp, Homo sapien
cttaaaaaaatgatagaaatactgcatgttgag

SEQ ID NO: 304526 - DNA, 33 bp, Homo sapien
cttaaaaaaatgatagcaatactgcatgttgag

SEQ ID NO: 304527 - DNA, 33 bp, Homo sapien
aacaggaagagagaaactgtacagagcaagtct

SEQ ID NO: 304528 - DNA, 33 bp, Homo sapien
aacaggaagagagaaattgtacagagcaagtct

SEQ ID NO: 304529 - DNA, 33 bp, Homo sapien
gatatttgactttcaacacagttactggttcac

SEQ ID NO: 304530 - DNA, 33 bp, Homo sapien
gatatttgactttcaatacagttactggttcac

SEQ ID NO: 304531 - DNA, 33 bp, Homo sapien
gcctcagtcctgctgcacttggctagctcctcg

SEQ ID NO: 304532 - DNA, 33 bp, Homo sapien
gcctcagtcctgctgcgcttggctagctcctcg

SEQ ID NO: 304533 - DNA, 33 bp, Homo sapien; identical to SEQ ID NO: 304531

SEQ ID NO: 304534 - DNA, 33 bp, Homo sapien; identical to SEQ ID NO: 304532

SEQ ID NO: 304535 - DNA, 33 bp, Homo sapien
gtttacatggcacttacgtatctttcaacttgg

SEQ ID NO: 304536 - DNA, 33 bp, Homo sapien
gtttacatggcacttatgtatctttcaacttgg

SEQ ID NO: 304537 - DNA, 33 bp, Homo sapien
ttgaagatcagaagtgaaccgagagaagtttcc

SEQ ID NO: 304538 - DNA, 33 bp, Homo sapien
ttgaagatcagaagtggaccgagagaagtttcc

SEQ ID NO: 304539 - DNA, 33 bp, Homo sapien
gttattgggcatgacaacaactgctacttccga

SEQ ID NO: 304540 - DNA, 33 bp, Homo sapien
gttattgggcatgacagcaactgctacttccga

SEQ ID NO: 304541 - DNA, 33 bp, Homo sapien
tcctcatctgtaacataaaaaaggcttaactgg

SEQ ID NO: 304542 - DNA, 33 bp, Homo sapien
tcctcatctgtaacattaaaaaggcttaactgg

SEQ ID NO: 304543 - DNA, 33 bp, Homo sapien
tacccaaagcctctaacatggtacactccctac

SEQ ID NO: 304544 - DNA, 33 bp, Homo sapien
tacccaaagcctctaatatggtacactccctac

SEQ ID NO: 304545 - DNA, 33 bp, Homo sapien
taacttattttagttgcacaggaactctatcct

SEQ ID NO: 304546 - DNA, 33 bp, Homo sapien
taacttattttagttgtacaggaactctatcct

SEQ ID NO: 304547 - DNA, 33 bp, Homo sapien
aactcttcaatctgaccataatcaatatgtttt

SEQ ID NO: 304548 - DNA, 33 bp, Homo sapien
aactcttcaatctgactataatcaatatgtttt

SEQ ID NO: 304549 - DNA, 33 bp, Homo sapien
cccaaatgatcctcacaagaggagtgtgcataa

SEQ ID NO: 304550 - DNA, 33 bp, Homo sapien
cccaaatgatcctcacgagaggagtgtgcataa

SEQ ID NO: 304551 - DNA, 33 bp, Homo sapien
agcacaatgtagtcgaaaaagcagattcacaaa

SEQ ID NO: 304552 - DNA, 33 bp, Homo sapien
agcacaatgtagtcgacaaagcagattcacaaa

SEQ ID NO: 304553 - DNA, 33 bp, Homo sapien
atccacaaacataaaaattacctgttttcacaa

SEQ ID NO: 304554 - DNA, 33 bp, Homo sapien
atccacaaacataaaacttacctgttttcacaa

SEQ ID NO: 304555 - DNA, 33 bp, Homo sapien
tgggctagagatcttacgaagtgcagaaacgtc

SEQ ID NO: 304556 - DNA, 33 bp, Homo sapien
tgggctagagatcttaggaagtgcagaaacgtc

SEQ ID NO: 304557 - DNA, 33 bp, Homo sapien
gccattttgctagggacagatgtctaaggccca

SEQ ID NO: 304558 - DNA, 33 bp, Homo sapien
gccattttgctagggatagatgtctaaggccca

SEQ ID NO: 304559 - DNA, 33 bp, Homo sapien
ctcttggagatccttccagtctctaactccaga

SEQ ID NO: 304560 - DNA, 33 bp, Homo sapien
ctcttggagatccttctagtctctaactccaga

SEQ ID NO: 304561 - DNA, 33 bp, Homo sapien
gatgaggtctgggaaagctcttcgcccaattca

SEQ ID NO: 304562 - DNA, 33 bp, Homo sapien
gatgaggtctgggaaatctcttcgcccaattca

SEQ ID NO: 304563 - DNA, 33 bp, Homo sapien
agtttacttaaaaatacgcagcaggtgattatc

SEQ ID NO: 304564 - DNA, 33 bp, Homo sapien
agtttacttaaaaatatgcagcaggtgattatc

SEQ ID NO: 304565 - DNA, 33 bp, Homo sapien
aggaggacgacggagacgatgtggagaggctat

SEQ ID NO: 304566 - DNA, 33 bp, Homo sapien
aggaggacgacggagatgatgtggagaggctat

SEQ ID NO: 304567 - DNA, 33 bp, Homo sapien
atctcccctttcctgtaaaatcagcatatatgt

SEQ ID NO: 304568 - DNA, 33 bp, Homo sapien
atctcccctttcctgtgaaatcagcatatatgt

SEQ ID NO: 304569 - DNA, 33 bp, Homo sapien
ttttcagctgctatgaaccttttgggattttat

SEQ ID NO: 304570 - DNA, 33 bp, Homo sapien
ttttcagctgctatgacccttttgggattttat

SEQ ID NO: 304571 - DNA, 33 bp, Homo sapien
gaaatgaggacatcaaagactactgtacgagag

SEQ ID NO: 304572 - DNA, 33 bp, Homo sapien
gaaatgaggacatcaaggactactgtacgagag

SEQ ID NO: 304573 - DNA, 33 bp, Homo sapien
aagacagtttccagagcacagtaaatttcaaat

SEQ ID NO: 304574 - DNA, 33 bp, Homo sapien
aagacagtttccagaggacagtaaatttcaaat

SEQ ID NO: 304575 - DNA, 33 bp, Homo sapien
tcaaatattgttcagacgactggcatttcttca

SEQ ID NO: 304576 - DNA, 33 bp, Homo sapien
tcaaatattgttcagatgactggcatttcttca

SEQ ID NO: 304577 - DNA, 33 bp, Homo sapien
cagatgaagtctacaccgaaaaaccacaataga

SEQ ID NO: 304578 - DNA, 33 bp, Homo sapien
cagatgaagtctacactgaaaaaccacaataga

SEQ ID NO: 304579 - DNA, 33 bp, Homo sapien
tagtacagaaaaaaaaaggtgatactcatatga

SEQ ID NO: 304580 - DNA, 33 bp, Homo sapien
tagtacagaaaaaaaacggtgatactcatatga

SEQ ID NO: 304581 - DNA, 33 bp, Homo sapien
aatccaggaatattagaagagagtttttcaaat

SEQ ID NO: 304582 - DNA, 33 bp, Homo sapien
aatccaggaatattaggagagagtttttcaaat

SEQ ID NO: 304583 - DNA, 33 bp, Homo sapien
tcaggaatgcatcaggacctcagaaaaggagct

SEQ ID NO: 304584 - DNA, 33 bp, Homo sapien
tcaggaatgcatcagggcctcagaaaaggagct

SEQ ID NO: 304585 - DNA, 33 bp, Homo sapien
atctgtttctacatcactcctttactcaagaat

SEQ ID NO: 304586 - DNA, 33 bp, Homo sapien
atctgtttctacatcagtcctttactcaagaat

SEQ ID NO: 304587 - DNA, 33 bp, Homo sapien
tttaaactttatccatgagttattggtctcacc

SEQ ID NO: 304588 - DNA, 33 bp, Homo sapien
tttaaactttatccattagttattggtctcacc

SEQ ID NO: 304589 - DNA, 33 bp, Homo sapien
atactaagatgcctaactatgatttgtgccacc

SEQ ID NO: 304590 - DNA, 33 bp, Homo sapien
atactaagatgcctaattatgatttgtgccacc

SEQ ID NO: 304591 - DNA, 33 bp, Homo sapien
attcgaaacagaataacgtgatctcatctttgt

SEQ ID NO: 304592 - DNA, 33 bp, Homo sapien
attcgaaacagaataaggtgatctcatctttgt

SEQ ID NO: 304593 - DNA, 33 bp, Homo sapien
cttctctaaaagtctcaacttgggctgtgtggc

SEQ ID NO: 304594 - DNA, 33 bp, Homo sapien
cttctctaaaagtctcgacttgggctgtgtggc

SEQ ID NO: 304595 - DNA, 33 bp, Homo sapien
caaggaatttgggggaataagagacaaagtcta

SEQ ID NO: 304596 - DNA, 33 bp, Homo sapien
caaggaatttgggggagtaagagacaaagtcta

SEQ ID NO: 304597 - DNA, 33 bp, Homo sapien
cttttaaactgtcttgcagaaagctcatgagat

SEQ ID NO: 304598 - DNA, 33 bp, Homo sapien
cttttaaactgtcttgtagaaagctcatgagat

SEQ ID NO: 304599 - DNA, 33 bp, Homo sapien
cacatttagccaaagagatcattatcaaacatt

SEQ ID NO: 304600 - DNA, 33 bp, Homo sapien
cacatttagccaaagatatcattatcaaacatt

SEQ ID NO: 304601 - DNA, 33 bp, Homo sapien
tcataattgcacataaattagccctacagcatt

SEQ ID NO: 304602 - DNA, 33 bp, Homo sapien
tcataattgcacataacttagccctacagcatt

SEQ ID NO: 304603 - DNA, 33 bp, Homo sapien
aggcagcatctgccgaaaggatgagaagtattt

SEQ ID NO: 304604 - DNA, 33 bp, Homo sapien
aggcagcatctgccgagaggatgagaagtattt

SEQ ID NO: 304605 - DNA, 33 bp, Homo sapien
ctggaagattctgaagcaatagcatgtcctatt

SEQ ID NO: 304606 - DNA, 33 bp, Homo sapien
ctggaagattctgaaggaatagcatgtcctatt

SEQ ID NO: 304607 - DNA, 33 bp, Homo sapien
aggagagaatcttgaaatgacagactatttatt

SEQ ID NO: 304608 - DNA, 33 bp, Homo sapien
aggagagaatcttgaattgacagactatttatt

SEQ ID NO: 304609 - DNA, 33 bp, Homo sapien
cttagtgaagctgcccaggcttattcgtcattt

SEQ ID NO: 304610 - DNA, 33 bp, Homo sapien
cttagtgaagctgcccgggcttattcgtcattt

SEQ ID NO: 304611 - DNA, 33 bp, Homo sapien
gagaggataaacctgcagaaatagaagcagaat

SEQ ID NO: 304612 - DNA, 33 bp, Homo sapien
gagaggataaacctgcggaaatagaagcagaat

SEQ ID NO: 304613 - DNA, 33 bp, Homo sapien
aaagctgaaaaataaaaatcaggctgttggaag

SEQ ID NO: 304614 - DNA, 33 bp, Homo sapien
aaagctgaaaaataaatatcaggctgttggaag

SEQ ID NO: 304615 - DNA, 33 bp, Homo sapien
ttagaatagtgtttggaaagaaaaatgagctaa

SEQ ID NO: 304616 - DNA, 33 bp, Homo sapien
ttagaatagtgtttggtaagaaaaatgagctaa

SEQ ID NO: 304617 - DNA, 33 bp, Homo sapien
gaatccagttcttatacgttttggctgtttgac

SEQ ID NO: 304618 - DNA, 33 bp, Homo sapien
gaatccagttcttatatgttttggctgtttgac

SEQ ID NO: 304619 - DNA, 33 bp, Homo sapien
agggtatgtgatctgccgaacaatcagtaattt

SEQ ID NO: 304620 - DNA, 33 bp, Homo sapien
agggtatgtgatctgctgaacaatcagtaattt

SEQ ID NO: 304621 - DNA, 33 bp, Homo sapien
gataaacagtttattcccatgatttctcaaggt

SEQ ID NO: 304622 - DNA, 33 bp, Homo sapien
gataaacagtttattctcatgatttctcaaggt

SEQ ID NO: 304623 - DNA, 33 bp, Homo sapien
aacagggttttgtctacggcttatagtgacctt

SEQ ID NO: 304624 - DNA, 33 bp, Homo sapien
aacagggttttgtctatggcttatagtgacctt

SEQ ID NO: 304625 - DNA, 33 bp, Homo sapien
tgacagttattgcctcaagtaattaataatcta

SEQ ID NO: 304626 - DNA, 33 bp, Homo sapien
tgacagttattgcctcgagtaattaataatcta

SEQ ID NO: 304627 - DNA, 33 bp, Homo sapien
agaggaagcacttaacaattggctgaatgagta

SEQ ID NO: 304628 - DNA, 33 bp, Homo sapien
agaggaagcacttaaccattggctgaatgagta

SEQ ID NO: 304629 - DNA, 33 bp, Homo sapien
ttttaagcgaatacataaataggttgagatgtc

SEQ ID NO: 304630 - DNA, 33 bp, Homo sapien
ttttaagcgaatacattaataggttgagatgtc

SEQ ID NO: 304631 - DNA, 33 bp, Homo sapien
tgtttttaatcttcacacgtctgaccatatctt

SEQ ID NO: 304632 - DNA, 33 bp, Homo sapien
tgtttttaatcttcacccgtctgaccatatctt

SEQ ID NO: 304633 - DNA, 33 bp, Homo sapien
tcacatgaaagaaatcaaaaagagggagagtta

SEQ ID NO: 304634 - DNA, 33 bp, Homo sapien
tcacatgaaagaaatcgaaaagagggagagtta

SEQ ID NO: 304635 - DNA, 33 bp, Homo sapien
gtatatccaagacccaatatttgagttattcag

SEQ ID NO: 304636 - DNA, 33 bp, Homo sapien
gtatatccaagacccactatttgagttattcag

SEQ ID NO: 304637 - DNA, 33 bp, Homo sapien
tgccaccaaaatgtaaactatcacaataccttc

SEQ ID NO: 304638 - DNA, 33 bp, Homo sapien
tgccaccaaaatgtaagctatcacaataccttc

SEQ ID NO: 304639 - DNA, 33 bp, Homo sapien
acagccagctcccacaaatttaagctatttcct

SEQ ID NO: 304640 - DNA, 33 bp, Homo sapien
acagccagctcccacagatttaagctatttcct

SEQ ID NO: 304641 - DNA, 33 bp, Homo sapien
cctctaacatctttaaaaaaacaactgtggcca

SEQ ID NO: 304642 - DNA, 33 bp, Homo sapien
cctctaacatctttaagaaaacaactgtggcca

SEQ ID NO: 304643 - DNA, 33 bp, Homo sapien
aataagaatcaattagaattagaagcacttagc

SEQ ID NO: 304644 - DNA, 33 bp, Homo sapien
aataagaatcaattaggattagaagcacttagc

SEQ ID NO: 304645 - DNA, 33 bp, Homo sapien
tgtatcctagaaatcaatctgtagcagtgtatt

SEQ ID NO: 304646 - DNA, 33 bp, Homo sapien
tgtatcctagaaatcagtctgtagcagtgtatt

SEQ ID NO: 304647 - DNA, 33 bp, Homo sapien
ttctaatggtagaagactaaacagggctggaca

SEQ ID NO: 304648 - DNA, 33 bp, Homo sapien
ttctaatggtagaagattaaacagggctggaca

SEQ ID NO: 304649 - DNA, 33 bp, Homo sapien
gccaatatctaattcacacttttaacatataca

SEQ ID NO: 304650 - DNA, 33 bp, Homo sapien
gccaatatctaattcatacttttaacatataca

SEQ ID NO: 304651 - DNA, 33 bp, Homo sapien
ggttctgaagtaggaacattactggctgttacg

SEQ ID NO: 304652 - DNA, 33 bp, Homo sapien
ggttctgaagtaggaagattactggctgttacg

SEQ ID NO: 304653 - DNA, 33 bp, Homo sapien
ctcatgttcatcgtgaagttttattttatttta

SEQ ID NO: 304654 - DNA, 33 bp, Homo sapien
ctcatgttcatcgtgaggttttattttatttta

SEQ ID NO: 304655 - DNA, 33 bp, Homo sapien
ttgactccggagctaaacttttaactatgctga

SEQ ID NO: 304656 - DNA, 33 bp, Homo sapien
ttgactccggagctaagcttttaactatgctga

SEQ ID NO: 304657 - DNA, 33 bp, Homo sapien
aacactataactaaataacagtgaaatgtagat

SEQ ID NO: 304658 - DNA, 33 bp, Homo sapien
aacactataactaaatgacagtgaaatgtagat

SEQ ID NO: 304659 - DNA, 33 bp, Homo sapien
aaaaatccaaagtcaacgtacctagcagtcctt

SEQ ID NO: 304660 - DNA, 33 bp, Homo sapien
aaaaatccaaagtcaatgtacctagcagtcctt

SEQ ID NO: 304661 - DNA, 33 bp, Homo sapien
aacaggaggccaagaaagtggtgaatcctggtt

SEQ ID NO: 304662 - DNA, 33 bp, Homo sapien
aacaggaggccaagaaggtggtgaatcctggtt

SEQ ID NO: 304663 - DNA, 33 bp, Homo sapien
gtggcagacagaactacacattttctaactgat

SEQ ID NO: 304664 - DNA, 33 bp, Homo sapien
gtggcagacagaactagacattttctaactgat

SEQ ID NO: 304665 - DNA, 33 bp, Homo sapien
acagtgttaaactcaaagaaggatgcaatttaa

SEQ ID NO: 304666 - DNA, 33 bp, Homo sapien
acagtgttaaactcaaggaaggatgcaatttaa

SEQ ID NO: 304667 - DNA, 33 bp, Homo sapien
ggtactagtggtggaactggctcatggatacag

SEQ ID NO: 304668 - DNA, 33 bp, Homo sapien
ggtactagtggtggaattggctcatggatacag

SEQ ID NO: 304669 - DNA, 33 bp, Homo sapien
gtggcttatccagcaaaatgtttcatttcctgt

SEQ ID NO: 304670 - DNA, 33 bp, Homo sapien
gtggcttatccagcaagatgtttcatttcctgt

SEQ ID NO: 304671 - DNA, 33 bp, Homo sapien
acttaatttgtataaacgattttagtgcataca

SEQ ID NO: 304672 - DNA, 33 bp, Homo sapien
acttaatttgtataaaggattttagtgcataca

SEQ ID NO: 304673 - DNA, 33 bp, Homo sapien
tttgtctcagctagcaggacttttttttttttt

SEQ ID NO: 304674 - DNA, 33 bp, Homo sapien
tttgtctcagctagcatgacttttttttttttt

SEQ ID NO: 304675 - DNA, 33 bp, Homo sapien
caggactaagttctgacactctattgcacagta

SEQ ID NO: 304676 - DNA, 33 bp, Homo sapien
caggactaagttctgatactctattgcacagta

SEQ ID NO: 304677 - DNA, 33 bp, Homo sapien
taattttatgacaaacaaaaactgagataatat

SEQ ID NO: 304678 - DNA, 33 bp, Homo sapien
taattttatgacaaacgaaaactgagataatat

SEQ ID NO: 304679 - DNA, 33 bp, Homo sapien
tttatttctctgtgcaaacgcaaactgatgaca

SEQ ID NO: 304680 - DNA, 33 bp, Homo sapien
tttatttctctgtgcagacgcaaactgatgaca

SEQ ID NO: 304681 - DNA, 33 bp, Homo sapien
tgctaaatgcagagggaaaacttgtgtagaaga

SEQ ID NO: 304682 - DNA, 33 bp, Homo sapien
tgctaaatgcagaggggaaacttgtgtagaaga

SEQ ID NO: 304683 - DNA, 33 bp, Homo sapien
agatgaagaagcaaagcataatcccacaggacc

SEQ ID NO: 304684 - DNA, 33 bp, Homo sapien
agatgaagaagcaaagtataatcccacaggacc

SEQ ID NO: 304685 - DNA, 33 bp, Homo sapien
ttcacaggcacaaaaagaggagatgacagaaca

SEQ ID NO: 304686 - DNA, 33 bp, Homo sapien
ttcacaggcacaaaaataggagatgacagaaca

SEQ ID NO: 304687 - DNA, 33 bp, Homo sapien
atgtctaggtactgaacatgtgtggctttgagg

SEQ ID NO: 304688 - DNA, 33 bp, Homo sapien
atgtctaggtactgaatatgtgtggctttgagg

SEQ ID NO: 304689 - DNA, 33 bp, Homo sapien
agaaaataaataccaacggaaatcacactgtat

SEQ ID NO: 304690 - DNA, 33 bp, Homo sapien
agaaaataaataccaatggaaatcacactgtat

SEQ ID NO: 304691 - DNA, 33 bp, Homo sapien
agaaatattggaaccaacactgaacatgatcat

SEQ ID NO: 304692 - DNA, 33 bp, Homo sapien
agaaatattggaaccaccactgaacatgatcat

SEQ ID NO: 304693 - DNA, 33 bp, Homo sapien
aacaagcccgctcatgcagtaatggcattaatc

SEQ ID NO: 304694 - DNA, 33 bp, Homo sapien
aacaagcccgctcatgtagtaatggcattaatc

SEQ ID NO: 304695 - DNA, 33 bp, Homo sapien
agctaaatcttgggtacgtacagacataaagat

SEQ ID NO: 304696 - DNA, 33 bp, Homo sapien
agctaaatcttgggtaggtacagacataaagat

SEQ ID NO: 304697 - DNA, 33 bp, Homo sapien
ttggcttattctagtacgatttgtttgaaagaa

SEQ ID NO: 304698 - DNA, 33 bp, Homo sapien
ttggcttattctagtatgatttgtttgaaagaa

SEQ ID NO: 304699 - DNA, 33 bp, Homo sapien
aggcagaaagggcctaaaaggaagatttgctgt

SEQ ID NO: 304700 - DNA, 33 bp, Homo sapien
aggcagaaagggcctacaaggaagatttgctgt

SEQ ID NO: 304701 - DNA, 33 bp, Homo sapien
tcttatatggagtctaccaacatttcttggctc

SEQ ID NO: 304702 - DNA, 33 bp, Homo sapien
tcttatatggagtctatcaacatttcttggctc

SEQ ID NO: 304703 - DNA, 33 bp, Homo sapien
aaagaatgatataagacagaagcagaaactggg

SEQ ID NO: 304704 - DNA, 33 bp, Homo sapien
aaagaatgatataagatagaagcagaaactggg

SEQ ID NO: 304705 - DNA, 33 bp, Homo sapien
agacagcctaattccaaactccatgtattcacc

SEQ ID NO: 304706 - DNA, 33 bp, Homo sapien
agacagcctaattccagactccatgtattcacc

SEQ ID NO: 304707 - DNA, 33 bp, Homo sapien
agggaatatgctgaggcccagaggtaacaattc

SEQ ID NO: 304708 - DNA, 33 bp, Homo sapien
agggaatatgctgaggtccagaggtaacaattc

SEQ ID NO: 304709 - DNA, 33 bp, Homo sapien
atttagagtgtctccaatatctcaccattacta

SEQ ID NO: 304710 - DNA, 33 bp, Homo sapien
atttagagtgtctccagtatctcaccattacta

SEQ ID NO: 304711 - DNA, 33 bp, Homo sapien
aatgaattgcttttgcaagtggagggcaacata

SEQ ID NO: 304712 - DNA, 33 bp, Homo sapien
aatgaattgcttttgccagtggagggcaacata

SEQ ID NO: 304713 - DNA, 33 bp, Homo sapien
tagttatatctaagcaagaaatgtttaatataa

SEQ ID NO: 304714 - DNA, 33 bp, Homo sapien
tagttatatctaagcatgaaatgtttaatataa

SEQ ID NO: 304715 - DNA, 33 bp, Homo sapien
gctgttcttgtggccgcaatataggatattggt

SEQ ID NO: 304716 - DNA, 33 bp, Homo sapien
gctgttcttgtggccgtaatataggatattggt

SEQ ID NO: 304717 - DNA, 33 bp, Homo sapien
ataacacaatacttcaaatattccatacactta

SEQ ID NO: 304718 - DNA, 33 bp, Homo sapien
ataacacaatacttcagatattccatacactta

SEQ ID NO: 304719 - DNA, 33 bp, Homo sapien
ctggcatggttacctgcaagctgatgactccca

SEQ ID NO: 304720 - DNA, 33 bp, Homo sapien
ctggcatggttacctgtaagctgatgactccca

SEQ ID NO: 304721 - DNA, 33 bp, Homo sapien
actggatataaagccaccacaaataggtatgaa

SEQ ID NO: 304722 - DNA, 33 bp, Homo sapien
actggatataaagccatcacaaataggtatgaa

SEQ ID NO: 304723 - DNA, 33 bp, Homo sapien
actggatgttaggtgacatttgatgatggtagg

SEQ ID NO: 304724 - DNA, 33 bp, Homo sapien
actggatgttaggtgatatttgatgatggtagg

SEQ ID NO: 304725 - DNA, 33 bp, Homo sapien
gggctaaatgaatgtgcaatgtaattgatgaat

SEQ ID NO: 304726 - DNA, 33 bp, Homo sapien
gggctaaatgaatgtgtaatgtaattgatgaat

SEQ ID NO: 304727 - DNA, 33 bp, Homo sapien
atagtaggcaactgaaatggctgtcctgtgggt

SEQ ID NO: 304728 - DNA, 33 bp, Homo sapien
atagtaggcaactgaagtggctgtcctgtgggt

SEQ ID NO: 304729 - DNA, 33 bp, Homo sapien
gaaaaattataactcacgtatttcagagcagta

SEQ ID NO: 304730 - DNA, 33 bp, Homo sapien
gaaaaattataactcaggtatttcagagcagta

SEQ ID NO: 304731 - DNA, 33 bp, Homo sapien
atgtctcattttgaggccaggagactacaccag

SEQ ID NO: 304732 - DNA, 33 bp, Homo sapien
atgtctcattttgagggcaggagactacaccag

SEQ ID NO: 304733 - DNA, 33 bp, Homo sapien
ctaacagcattccacccaagaaaagcttatgta

SEQ ID NO: 304734 - DNA, 33 bp, Homo sapien
ctaacagcattccaccgaagaaaagcttatgta

SEQ ID NO: 304735 - DNA, 33 bp, Homo sapien
tccttcacgtttcagaaattccttctctacagg

SEQ ID NO: 304736 - DNA, 33 bp, Homo sapien
tccttcacgtttcagagattccttctctacagg

SEQ ID NO: 304737 - DNA, 33 bp, Homo sapien
gatacaggtatggcaactataatcactatgaga

SEQ ID NO: 304738 - DNA, 33 bp, Homo sapien
gatacaggtatggcaagtataatcactatgaga

SEQ ID NO: 304739 - DNA, 33 bp, Homo sapien
tagagctgctgtaacaatgtagcacttccaccc

SEQ ID NO: 304740 - DNA, 33 bp, Homo sapien
tagagctgctgtaacactgtagcacttccaccc

SEQ ID NO: 304741 - DNA, 33 bp, Homo sapien
ttttctatccatgatggactgaggataaataaa

SEQ ID NO: 304742 - DNA, 33 bp, Homo sapien
ttttctatccatgatgtactgaggataaataaa

SEQ ID NO: 304743 - DNA, 33 bp, Homo sapien
ttttacatatcctccagaaccccctatttattt

SEQ ID NO: 304744 - DNA, 33 bp, Homo sapien
ttttacatatcctccataaccccctatttattt

SEQ ID NO: 304745 - DNA, 33 bp, Homo sapien
aatagccaatctctaccaactgtttctgtctat

SEQ ID NO: 304746 - DNA, 33 bp, Homo sapien
aatagccaatctctactaactgtttctgtctat

SEQ ID NO: 304747 - DNA, 33 bp, Homo sapien
taaagtttgaagaaggacaatagagtagcagaa

SEQ ID NO: 304748 - DNA, 33 bp, Homo sapien
taaagtttgaagaagggcaatagagtagcagaa

SEQ ID NO: 304749 - DNA, 33 bp, Homo sapien
agaagtcattggtccactaaaagcttgaaatca

SEQ ID NO: 304750 - DNA, 33 bp, Homo sapien
agaagtcattggtccattaaaagcttgaaatca

SEQ ID NO: 304751 - DNA, 33 bp, Homo sapien
gagtgaatgagttgatcaatgaacagttgtaat

SEQ ID NO: 304752 - DNA, 33 bp, Homo sapien
gagtgaatgagttgatgaatgaacagttgtaat

SEQ ID NO: 304753 - DNA, 33 bp, Homo sapien
accacattccagtctcaagaagtgcacacagga

SEQ ID NO: 304754 - DNA, 33 bp, Homo sapien
accacattccagtctctagaagtgcacacagga

SEQ ID NO: 304755 - DNA, 33 bp, Homo sapien
caaaagggcttgaacaatgactctaggatatga

SEQ ID NO: 304756 - DNA, 33 bp, Homo sapien
caaaagggcttgaacagtgactctaggatatga

SEQ ID NO: 304757 - DNA, 33 bp, Homo sapien
ggcatcagaggaccgaaaattccaccctcagat

SEQ ID NO: 304758 - DNA, 33 bp, Homo sapien
ggcatcagaggaccgacaattccaccctcagat

SEQ ID NO: 304759 - DNA, 33 bp, Homo sapien
tgcttgttcactgttcactcctggttaagttac

SEQ ID NO: 304760 - DNA, 33 bp, Homo sapien
tgcttgttcactgttcgctcctggttaagttac

SEQ ID NO: 304761 - DNA, 33 bp, Homo sapien
gagctacagaggagacgcaatctcaaaatatat

SEQ ID NO: 304762 - DNA, 33 bp, Homo sapien
gagctacagaggagactcaatctcaaaatatat

SEQ ID NO: 304763 - DNA, 33 bp, Homo sapien
ttaccagaaagtggaacgtggaaaaaacagagt

SEQ ID NO: 304764 - DNA, 33 bp, Homo sapien
ttaccagaaagtggaatgtggaaaaaacagagt

SEQ ID NO: 304765 - DNA, 33 bp, Homo sapien
aactgtaaacaaaaaacgtcattcatcaagaga

SEQ ID NO: 304766 - DNA, 33 bp, Homo sapien
aactgtaaacaaaaaatgtcattcatcaagaga

SEQ ID NO: 304767 - DNA, 33 bp, Homo sapien
tctcaactcttcctgaatatctccaactactta

SEQ ID NO: 304768 - DNA, 33 bp, Homo sapien
tctcaactcttcctgagtatctccaactactta

SEQ ID NO: 304769 - DNA, 33 bp, Homo sapien
tgggaagaaggaagaggagaattgctaatatcc

SEQ ID NO: 304770 - DNA, 33 bp, Homo sapien
tgggaagaaggaagagtagaattgctaatatcc

SEQ ID NO: 304771 - DNA, 33 bp, Homo sapien
cagaaataatgctgtacatctacaactatctga

SEQ ID NO: 304772 - DNA, 33 bp, Homo sapien
cagaaataatgctgtatatctacaactatctga

SEQ ID NO: 304773 - DNA, 33 bp, Homo sapien
tagacctacttttatacgcactgttatctatat

SEQ ID NO: 304774 - DNA, 33 bp, Homo sapien
tagacctacttttatatgcactgttatctatat

SEQ ID NO: 304775 - DNA, 33 bp, Homo sapien
tgtcaagtaggtcaaacgtgaattgttttattc

SEQ ID NO: 304776 - DNA, 33 bp, Homo sapien
tgtcaagtaggtcaaatgtgaattgttttattc

SEQ ID NO: 304777 - DNA, 33 bp, Homo sapien
agaagtcctagaaaacagaaggcagatggagga

SEQ ID NO: 304778 - DNA, 33 bp, Homo sapien
agaagtcctagaaaacggaaggcagatggagga

SEQ ID NO: 304779 - DNA, 33 bp, Homo sapien
gccaaatctggtctccactgctttcaactatga

SEQ ID NO: 304780 - DNA, 33 bp, Homo sapien
gccaaatctggtctccgctgctttcaactatga

SEQ ID NO: 304781 - DNA, 33 bp, Homo sapien
gttgtgtgacagggataagagtctccttagaaa

SEQ ID NO: 304782 - DNA, 33 bp, Homo sapien
gttgtgtgacagggatcagagtctccttagaaa

SEQ ID NO: 304783 - DNA, 33 bp, Homo sapien
ccatatctcacagttacaaatatgcttaagccc

SEQ ID NO: 304784 - DNA, 33 bp, Homo sapien
ccatatctcacagttataaatatgcttaagccc

SEQ ID NO: 304785 - DNA, 33 bp, Homo sapien
aatttttacaaagtgaacaaacccatgtaacaa

SEQ ID NO: 304786 - DNA, 33 bp, Homo sapien
aatttttacaaagtgatcaaacccatgtaacaa

SEQ ID NO: 304787 - DNA, 33 bp, Homo sapien
agtctgtggaaaacagagattgtatcttatgta

SEQ ID NO: 304788 - DNA, 33 bp, Homo sapien
agtctgtggaaaacagggattgtatcttatgta

SEQ ID NO: 304789 - DNA, 33 bp, Homo sapien
taatgctggtagcatcccctaacacactatttc

SEQ ID NO: 304790 - DNA, 33 bp, Homo sapien
taatgctggtagcatcgcctaacacactatttc

SEQ ID NO: 304791 - DNA, 33 bp, Homo sapien
ttcattcattccaggaacttctactgagcagtt

SEQ ID NO: 304792 - DNA, 33 bp, Homo sapien
ttcattcattccaggagcttctactgagcagtt

SEQ ID NO: 304793 - DNA, 33 bp, Homo sapien
tttataagtaagaaaaattatgacatctagatg

SEQ ID NO: 304794 - DNA, 33 bp, Homo sapien
tttataagtaagaaaagttatgacatctagatg

SEQ ID NO: 304795 - DNA, 33 bp, Homo sapien
acttcaacactgaggaagtccgtgaacattttg

SEQ ID NO: 304796 - DNA, 33 bp, Homo sapien
acttcaacactgaggatgtccgtgaacattttg

SEQ ID NO: 304797 - DNA, 33 bp, Homo sapien
ttagccctttgtcagactagtagtttccaaaaa

SEQ ID NO: 304798 - DNA, 33 bp, Homo sapien
ttagccctttgtcagattagtagtttccaaaaa

SEQ ID NO: 304799 - DNA, 33 bp, Homo sapien
cttttcttttacatacacttagacttctctcta

SEQ ID NO: 304800 - DNA, 33 bp, Homo sapien
cttttcttttacatacccttagacttctctcta

SEQ ID NO: 304801 - DNA, 33 bp, Homo sapien
ctcacactaagacatccaaacacaccccacact

SEQ ID NO: 304802 - DNA, 33 bp, Homo sapien
ctcacactaagacatcgaaacacaccccacact

SEQ ID NO: 304803 - DNA, 33 bp, Homo sapien
tcagtcttttacagaaacttttgggagctagta

SEQ ID NO: 304804 - DNA, 33 bp, Homo sapien
tcagtcttttacagaaccttttgggagctagta

SEQ ID NO: 304805 - DNA, 33 bp, Homo sapien
tgacacaagatgctaacggtaaaaattaatatt

SEQ ID NO: 304806 - DNA, 33 bp, Homo sapien
tgacacaagatgctaatggtaaaaattaatatt

SEQ ID NO: 304807 - DNA, 33 bp, Homo sapien
gactggtaataagagcaagaatcagatgctact

SEQ ID NO: 304808 - DNA, 33 bp, Homo sapien
gactggtaataagagcgagaatcagatgctact

SEQ ID NO: 304809 - DNA, 33 bp, Homo sapien
gctgatggttggaaggccactcctctcttctga

SEQ ID NO: 304810 - DNA, 33 bp, Homo sapien
gctgatggttggaaggtcactcctctcttctga

SEQ ID NO: 304811 - DNA, 33 bp, Homo sapien
ggatttattctgcttaactatttctctccttat

SEQ ID NO: 304812 - DNA, 33 bp, Homo sapien
ggatttattctgcttagctatttctctccttat

SEQ ID NO: 304813 - DNA, 33 bp, Homo sapien
tgtctatcacattttcccattcactaaagatgc

SEQ ID NO: 304814 - DNA, 33 bp, Homo sapien
tgtctatcacattttcgcattcactaaagatgc

SEQ ID NO: 304815 - DNA, 33 bp, Homo sapien
tggcagtagtattttacacaggtggaaaagctt

SEQ ID NO: 304816 - DNA, 33 bp, Homo sapien
tggcagtagtattttatacaggtggaaaagctt

SEQ ID NO: 304817 - DNA, 33 bp, Homo sapien
gagagatgtatgaagacagctaaaagataatat

SEQ ID NO: 304818 - DNA, 33 bp, Homo sapien
gagagatgtatgaagagagctaaaagataatat

SEQ ID NO: 304819 - DNA, 33 bp, Homo sapien
ggagaatgaatgaaagaaggacaagggtgaaaa

SEQ ID NO: 304820 - DNA, 33 bp, Homo sapien
ggagaatgaatgaaagtaggacaagggtgaaaa

SEQ ID NO: 304821 - DNA, 33 bp, Homo sapien
aaaacaaaagaacttaggagcatcaaacaaatt

SEQ ID NO: 304822 - DNA, 33 bp, Homo sapien
aaaacaaaagaacttatgagcatcaaacaaatt

SEQ ID NO: 304823 - DNA, 33 bp, Homo sapien
agaagggtctttaagaagcaatgagggataaat

SEQ ID NO: 304824 - DNA, 33 bp, Homo sapien
agaagggtctttaagaggcaatgagggataaat

SEQ ID NO: 304825 - DNA, 33 bp, Homo sapien
ttgcccatacatgtcgccaataaatacatgaaa

SEQ ID NO: 304826 - DNA, 33 bp, Homo sapien
ttgcccatacatgtcgtcaataaatacatgaaa

SEQ ID NO: 304827 - DNA, 33 bp, Homo sapien
caaacatacaagtgcacgtttcttttggtagaa

SEQ ID NO: 304828 - DNA, 33 bp, Homo sapien
caaacatacaagtgcatgtttcttttggtagaa

SEQ ID NO: 304829 - DNA, 33 bp, Homo sapien
tggaaacagctggggccattatcccaagtgaat

SEQ ID NO: 304830 - DNA, 33 bp, Homo sapien
tggaaacagctggggctattatcccaagtgaat

SEQ ID NO: 304831 - DNA, 33 bp, Homo sapien
tctacaacctaagagacaggcactaccctccca

SEQ ID NO: 304832 - DNA, 33 bp, Homo sapien
tctacaacctaagagataggcactaccctccca

SEQ ID NO: 304833 - DNA, 33 bp, Homo sapien
cttgttaaatgaaacccaaagaacaggtatgca

SEQ ID NO: 304834 - DNA, 33 bp, Homo sapien
cttgttaaatgaaaccgaaagaacaggtatgca

SEQ ID NO: 304835 - DNA, 33 bp, Homo sapien
ctccaacttaaaaaccagatctttgtcttactc

SEQ ID NO: 304836 - DNA, 33 bp, Homo sapien
ctccaacttaaaaacccgatctttgtcttactc

SEQ ID NO: 304837 - DNA, 33 bp, Homo sapien
catgggggtgagatcaaagacttctgaaaaagg

SEQ ID NO: 304838 - DNA, 33 bp, Homo sapien
catgggggtgagatcatagacttctgaaaaagg

SEQ ID NO: 304839 - DNA, 33 bp, Homo sapien
ctgggattttcaggggcatgtagttacagggct

SEQ ID NO: 304840 - DNA, 33 bp, Homo sapien
ctgggattttcaggggtatgtagttacagggct

SEQ ID NO: 304841 - DNA, 33 bp, Homo sapien
acaagcttgccatgacaggggagagctgataac

SEQ ID NO: 304842 - DNA, 33 bp, Homo sapien
acaagcttgccatgactggggagagctgataac

SEQ ID NO: 304843 - DNA, 33 bp, Homo sapien
tcagaacaattctcacacacataatgtcagggc

SEQ ID NO: 304844 - DNA, 33 bp, Homo sapien
tcagaacaattctcactcacataatgtcagggc

SEQ ID NO: 304845 - DNA, 33 bp, Homo sapien
atccattgaattcagaactgtactatgatataa

SEQ ID NO: 304846 - DNA, 33 bp, Homo sapien
atccattgaattcagacctgtactatgatataa

SEQ ID NO: 304847 - DNA, 33 bp, Homo sapien
ttgtggagtgcttaaacggctttagaaatctct

SEQ ID NO: 304848 - DNA, 33 bp, Homo sapien
ttgtggagtgcttaaatggctttagaaatctct

SEQ ID NO: 304849 - DNA, 33 bp, Homo sapien
tatccatctcaaagaccaagagagggattatct

SEQ ID NO: 304850 - DNA, 33 bp, Homo sapien
tatccatctcaaagacgaagagagggattatct

SEQ ID NO: 304851 - DNA, 33 bp, Homo sapien
tgaatgatttgctagaacactgaaaaaaaagca

SEQ ID NO: 304852 - DNA, 33 bp, Homo sapien
tgaatgatttgctagagcactgaaaaaaaagca

SEQ ID NO: 304853 - DNA, 33 bp, Homo sapien
tggcatattcacactaccatacctatttctctg

SEQ ID NO: 304854 - DNA, 33 bp, Homo sapien
tggcatattcacactagcatacctatttctctg

SEQ ID NO: 304855 - DNA, 33 bp, Homo sapien
atagttccccaaaagaatcaagtcaatcattta

SEQ ID NO: 304856 - DNA, 33 bp, Homo sapien
atagttccccaaaagagtcaagtcaatcattta

SEQ ID NO: 304857 - DNA, 33 bp, Homo sapien
ttaattcttgatgatacaactcaagccttgtgg

SEQ ID NO: 304858 - DNA, 33 bp, Homo sapien
ttaattcttgatgatataactcaagccttgtgg

SEQ ID NO: 304859 - DNA, 33 bp, Homo sapien
ttatttgcatttttgtcaaagcttaagaagatg

SEQ ID NO: 304860 - DNA, 33 bp, Homo sapien
ttatttgcatttttgttaaagcttaagaagatg

SEQ ID NO: 304861 - DNA, 33 bp, Homo sapien
atgacacctggctgtaaaacttaacaagatatg

SEQ ID NO: 304862 - DNA, 33 bp, Homo sapien
atgacacctggctgtagaacttaacaagatatg

SEQ ID NO: 304863 - DNA, 33 bp, Homo sapien
tcaattaaagcattcaagcattttagccttgtg

SEQ ID NO: 304864 - DNA, 33 bp, Homo sapien
tcaattaaagcattcaggcattttagccttgtg

SEQ ID NO: 304865 - DNA, 33 bp, Homo sapien
atgtatagtcatatgacagattactacttagca

SEQ ID NO: 304866 - DNA, 33 bp, Homo sapien
atgtatagtcatatgatagattactacttagca

SEQ ID NO: 304867 - DNA, 33 bp, Homo sapien
atcagttgttgctgacgctcctttgtgtaggat

SEQ ID NO: 304868 - DNA, 33 bp, Homo sapien
atcagttgttgctgactctcctttgtgtaggat

SEQ ID NO: 304869 - DNA, 33 bp, Homo sapien
atttctgatattttacaagagggtgcattttat

SEQ ID NO: 304870 - DNA, 33 bp, Homo sapien
atttctgatattttacgagagggtgcattttat

SEQ ID NO: 304871 - DNA, 33 bp, Homo sapien
gaggagagctgttcccaggacttttaaccaata

SEQ ID NO: 304872 - DNA, 33 bp, Homo sapien
gaggagagctgttcccgggacttttaaccaata

SEQ ID NO: 304873 - DNA, 33 bp, Homo sapien
ttagctccattcttaaactgtgtcttcaatgag

SEQ ID NO: 304874 - DNA, 33 bp, Homo sapien
ttagctccattcttaagctgtgtcttcaatgag

SEQ ID NO: 304875 - DNA, 33 bp, Homo sapien
atcaaggacatcactcaacaatggggtccccag

SEQ ID NO: 304876 - DNA, 33 bp, Homo sapien
atcaaggacatcactcgacaatggggtccccag

SEQ ID NO: 304877 - DNA, 33 bp, Homo sapien
gggttggaattagctgaaatgtgtgagttggca

SEQ ID NO: 304878 - DNA, 33 bp, Homo sapien
gggttggaattagctggaatgtgtgagttggca

SEQ ID NO: 304879 - DNA, 33 bp, Homo sapien
agaactggaaactggggatactatcaagagccc

SEQ ID NO: 304880 - DNA, 33 bp, Homo sapien
agaactggaaactgggtatactatcaagagccc

SEQ ID NO: 304881 - DNA, 33 bp, Homo sapien
gtaagtattattgaccagcatattggcctgatg

SEQ ID NO: 304882 - DNA, 33 bp, Homo sapien
gtaagtattattgaccggcatattggcctgatg

SEQ ID NO: 304883 - DNA, 33 bp, Homo sapien
ttgcctttaaataacaatgaccatgattccttg

SEQ ID NO: 304884 - DNA, 33 bp, Homo sapien
ttgcctttaaataacagtgaccatgattccttg

SEQ ID NO: 304885 - DNA, 33 bp, Homo sapien
aaagatttgcccactcaatttttctatttcaaa

SEQ ID NO: 304886 - DNA, 33 bp, Homo sapien
aaagatttgcccactctatttttctatttcaaa

SEQ ID NO: 304887 - DNA, 33 bp, Homo sapien
gggcacatagaggcaaatagcttttgatctatg

SEQ ID NO: 304888 - DNA, 33 bp, Homo sapien
gggcacatagaggcaagtagcttttgatctatg

SEQ ID NO: 304889 - DNA, 33 bp, Homo sapien
gccatcatttcactaacgtacttgtcttttggc

SEQ ID NO: 304890 - DNA, 33 bp, Homo sapien
gccatcatttcactaatgtacttgtcttttggc

SEQ ID NO: 304891 - DNA, 33 bp, Homo sapien
gcatcacagtgactgaaaggctactaggtccta

SEQ ID NO: 304892 - DNA, 33 bp, Homo sapien
gcatcacagtgactgagaggctactaggtccta

SEQ ID NO: 304893 - DNA, 33 bp, Homo sapien
atgaatatagcatctaacaaagcacccctttgg

SEQ ID NO: 304894 - DNA, 33 bp, Homo sapien
atgaatatagcatctagcaaagcacccctttgg

SEQ ID NO: 304895 - DNA, 33 bp, Homo sapien
agcctctagaaagaacacaggccagccaacacc

SEQ ID NO: 304896 - DNA, 33 bp, Homo sapien
agcctctagaaagaacgcaggccagccaacacc

SEQ ID NO: 304897 - DNA, 33 bp, Homo sapien
ctgatagatccatttcacaagcagaagggcttc

SEQ ID NO: 304898 - DNA, 33 bp, Homo sapien
ctgatagatccatttcgcaagcagaagggcttc

SEQ ID NO: 304899 - DNA, 33 bp, Homo sapien
aggctatgtcatgcagcagtaacaaagagcccc

SEQ ID NO: 304900 - DNA, 33 bp, Homo sapien
aggctatgtcatgcagtagtaacaaagagcccc

SEQ ID NO: 304901 - DNA, 33 bp, Homo sapien
tgaggaatatgataaacctagaagtttggaaaa

SEQ ID NO: 304902 - DNA, 33 bp, Homo sapien
tgaggaatatgataaatctagaagtttggaaaa

SEQ ID NO: 304903 - DNA, 33 bp, Homo sapien; identical to SEQ ID NO: 304901

SEQ ID NO: 304904 - DNA, 33 bp, Homo sapien; identical to SEQ ID NO: 304902

SEQ ID NO: 304905 - DNA, 33 bp, Homo sapien
tcttcctgaggctcaaatgtctaggcagctgat

SEQ ID NO: 304906 - DNA, 33 bp, Homo sapien
tcttcctgaggctcaagtgtctaggcagctgat

SEQ ID NO: 304907 - DNA, 33 bp, Homo sapien
tactcataataggcacacaagagagaaggagaa

SEQ ID NO: 304908 - DNA, 33 bp, Homo sapien
tactcataataggcacgcaagagagaaggagaa

SEQ ID NO: 304909 - DNA, 33 bp, Homo sapien
tccttctgagctcttaacagaaacatttttgct

SEQ ID NO: 304910 - DNA, 33 bp, Homo sapien
tccttctgagctcttatcagaaacatttttgct

SEQ ID NO: 304911 - DNA, 33 bp, Homo sapien
acccatacctgatttaaatgaagagatttggga

SEQ ID NO: 304912 - DNA, 33 bp, Homo sapien
acccatacctgatttagatgaagagatttggga

SEQ ID NO: 304913 - DNA, 33 bp, Homo sapien
aaagcacaccaagtaaatacagcacccatccaa

SEQ ID NO: 304914 - DNA, 33 bp, Homo sapien
aaagcacaccaagtaagtacagcacccatccaa

SEQ ID NO: 304915 - DNA, 33 bp, Homo sapien
tactgctccatgaaaaaacggcttcccttaggc

SEQ ID NO: 304916 - DNA, 33 bp, Homo sapien
tactgctccatgaaaagacggcttcccttaggc

SEQ ID NO: 304917 - DNA, 33 bp, Homo sapien
atctacatattcaaagactgctcaacaacttcc

SEQ ID NO: 304918 - DNA, 33 bp, Homo sapien
atctacatattcaaagtctgctcaacaacttcc

SEQ ID NO: 304919 - DNA, 33 bp, Homo sapien
ctggtgtgtggcaaacagcaggagagaggtcca

SEQ ID NO: 304920 - DNA, 33 bp, Homo sapien
ctggtgtgtggcaaacggcaggagagaggtcca

SEQ ID NO: 304921 - DNA, 33 bp, Homo sapien
agaataacatttgaaccagtggattgggagagg

SEQ ID NO: 304922 - DNA, 33 bp, Homo sapien
agaataacatttgaacgagtggattgggagagg

SEQ ID NO: 304923 - DNA, 33 bp, Homo sapien
agccagagactatttaaagtggttcagcattca

SEQ ID NO: 304924 - DNA, 33 bp, Homo sapien
agccagagactatttacagtggttcagcattca

SEQ ID NO: 304925 - DNA, 33 bp, Homo sapien
gtgtagttctgctagacatgagttgacagacct

SEQ ID NO: 304926 - DNA, 33 bp, Homo sapien
gtgtagttctgctagatatgagttgacagacct

SEQ ID NO: 304927 - DNA, 33 bp, Homo sapien
aaatactgtccaaataccagatgacaggtgtca

SEQ ID NO: 304928 - DNA, 33 bp, Homo sapien
aaatactgtccaaatagcagatgacaggtgtca

SEQ ID NO: 304929 - DNA, 33 bp, Homo sapien
aggtatcaggtaataacatctgtgctatcatca

SEQ ID NO: 304930 - DNA, 33 bp, Homo sapien
aggtatcaggtaataatatctgtgctatcatca

SEQ ID NO: 304931 - DNA, 33 bp, Homo sapien
aatgaggtgcctccatcaaggttgaatcagaca

SEQ ID NO: 304932 - DNA, 33 bp, Homo sapien
aatgaggtgcctccattaaggttgaatcagaca

SEQ ID NO: 304933 - DNA, 33 bp, Homo sapien
ttggaatcaaagggctcaaagacttcaaatatc

SEQ ID NO: 304934 - DNA, 33 bp, Homo sapien
ttggaatcaaagggctgaaagacttcaaatatc

SEQ ID NO: 304935 - DNA, 33 bp, Homo sapien
tgcctctgttcatttcaaagcagtaggatattg

SEQ ID NO: 304936 - DNA, 33 bp, Homo sapien
tgcctctgttcatttcgaagcagtaggatattg

SEQ ID NO: 304937 - DNA, 33 bp, Homo sapien
agacaggtagctaatactaaacttgggggtcca

SEQ ID NO: 304938 - DNA, 33 bp, Homo sapien
agacaggtagctaatattaaacttgggggtcca

SEQ ID NO: 304939 - DNA, 33 bp, Homo sapien
agaataaaggaatatgaaagtatggatggacaa

SEQ ID NO: 304940 - DNA, 33 bp, Homo sapien
agaataaaggaatatggaagtatggatggacaa

SEQ ID NO: 304941 - DNA, 33 bp, Homo sapien
taagttcatactttacactacaggatctctaaa

SEQ ID NO: 304942 - DNA, 33 bp, Homo sapien
taagttcatactttacgctacaggatctctaaa

SEQ ID NO: 304943 - DNA, 33 bp, Homo sapien
ggtacaattcacaagcaatggcatttggttatg

SEQ ID NO: 304944 - DNA, 33 bp, Homo sapien
ggtacaattcacaagcgatggcatttggttatg

SEQ ID NO: 304945 - DNA, 33 bp, Homo sapien
ctggcaacagctctcaacatttaaggactcaat

SEQ ID NO: 304946 - DNA, 33 bp, Homo sapien
ctggcaacagctctcagcatttaaggactcaat

SEQ ID NO: 304947 - DNA, 33 bp, Homo sapien
gccaaatttttaattgcaaaattcatctctgaa

SEQ ID NO: 304948 - DNA, 33 bp, Homo sapien
gccaaatttttaattggaaaattcatctctgaa

SEQ ID NO: 304949 - DNA, 33 bp, Homo sapien
tgtctttattacatgcgctaggattctcaaaca

SEQ ID NO: 304950 - DNA, 33 bp, Homo sapien
tgtctttattacatgctctaggattctcaaaca

SEQ ID NO: 304951 - DNA, 33 bp, Homo sapien
acttggcatcaatccacgaagaacagtacctac

SEQ ID NO: 304952 - DNA, 33 bp, Homo sapien
acttggcatcaatccatgaagaacagtacctac

SEQ ID NO: 304953 - DNA, 33 bp, Homo sapien
tatcattctgatcaaacagattaaggcaagagg

SEQ ID NO: 304954 - DNA, 33 bp, Homo sapien
tatcattctgatcaaatagattaaggcaagagg

SEQ ID NO: 304955 - DNA, 33 bp, Homo sapien
tgtacatctctttacaaccttctattttttttt

SEQ ID NO: 304956 - DNA, 33 bp, Homo sapien
tgtacatctctttacacccttctattttttttt

SEQ ID NO: 304957 - DNA, 33 bp, Homo sapien
aattaccacaggaatcagaaaatgtagcacaga

SEQ ID NO: 304958 - DNA, 33 bp, Homo sapien
aattaccacaggaatctgaaaatgtagcacaga

SEQ ID NO: 304959 - DNA, 33 bp, Homo sapien
acacctttcagaagaaaaacattggcaaagatt

SEQ ID NO: 304960 - DNA, 33 bp, Homo sapien
acacctttcagaagaagaacattggcaaagatt

SEQ ID NO: 304961 - DNA, 33 bp, Homo sapien
aaattgtacttacaacagttcaatgtataatat

SEQ ID NO: 304962 - DNA, 33 bp, Homo sapien
aaattgtacttacaacggttcaatgtataatat

SEQ ID NO: 304963 - DNA, 33 bp, Homo sapien
aagagaggagtgataaaagctccaaacaatttt

SEQ ID NO: 304964 - DNA, 33 bp, Homo sapien
aagagaggagtgataagagctccaaacaatttt

SEQ ID NO: 304965 - DNA, 33 bp, Homo sapien
tagagagaagttatgcaccaattttttttcaaa

SEQ ID NO: 304966 - DNA, 33 bp, Homo sapien
tagagagaagttatgcgccaattttttttcaaa

SEQ ID NO: 304967 - DNA, 33 bp, Homo sapien
tatatccttttgagacagacttgctttctcaat

SEQ ID NO: 304968 - DNA, 33 bp, Homo sapien
tatatccttttgagactgacttgctttctcaat

SEQ ID NO: 304969 - DNA, 33 bp, Homo sapien
cgaaacataaattggcaaaaggacatcctactt

SEQ ID NO: 304970 - DNA, 33 bp, Homo sapien
cgaaacataaattggcgaaaggacatcctactt

SEQ ID NO: 304971 - DNA, 33 bp, Homo sapien
ggaaattctccctaatgaactgaagccagtatc

SEQ ID NO: 304972 - DNA, 33 bp, Homo sapien
ggaaattctccctaattaactgaagccagtatc

SEQ ID NO: 304973 - DNA, 33 bp, Homo sapien
ttttatgccctttggaacattctttgcttcttt

SEQ ID NO: 304974 - DNA, 33 bp, Homo sapien
ttttatgccctttggagcattctttgcttcttt

SEQ ID NO: 304975 - DNA, 33 bp, Homo sapien
gtcaatacaaaaggaaaatcagaagattgagga

SEQ ID NO: 304976 - DNA, 33 bp, Homo sapien
gtcaatacaaaaggaagatcagaagattgagga

SEQ ID NO: 304977 - DNA, 33 bp, Homo sapien
taaaaaaagcagagtgcacaaggaggtcaagtt

SEQ ID NO: 304978 - DNA, 33 bp, Homo sapien
taaaaaaagcagagtgtacaaggaggtcaagtt

SEQ ID NO: 304979 - DNA, 33 bp, Homo sapien
ttcaactgtagcataacgtataaaattgtgata

SEQ ID NO: 304980 - DNA, 33 bp, Homo sapien
ttcaactgtagcataatgtataaaattgtgata

SEQ ID NO: 304981 - DNA, 33 bp, Homo sapien
ccatgcaagggcttaccatgtatcctttcccaa

SEQ ID NO: 304982 - DNA, 33 bp, Homo sapien
ccatgcaagggcttactatgtatcctttcccaa

SEQ ID NO: 304983 - DNA, 33 bp, Homo sapien
taaaacaatgtcatgggaaactgaaatacattg

SEQ ID NO: 304984 - DNA, 33 bp, Homo sapien
taaaacaatgtcatggtaaactgaaatacattg

SEQ ID NO: 304985 - DNA, 33 bp, Homo sapien
ctcagccacagtaagaaaaggcagtggtcagag

SEQ ID NO: 304986 - DNA, 33 bp, Homo sapien
ctcagccacagtaagataaggcagtggtcagag

SEQ ID NO: 304987 - DNA, 33 bp, Homo sapien
aagtgattttgtcttacaccttgggtaccacct

SEQ ID NO: 304988 - DNA, 33 bp, Homo sapien
aagtgattttgtcttataccttgggtaccacct

SEQ ID NO: 304989 - DNA, 33 bp, Homo sapien
ctcttcctggcacaccacataattcttttaaat

SEQ ID NO: 304990 - DNA, 33 bp, Homo sapien
ctcttcctggcacaccgcataattcttttaaat

SEQ ID NO: 304991 - DNA, 33 bp, Homo sapien
agtaacacaccatctccctggagaagcctttct

SEQ ID NO: 304992 - DNA, 33 bp, Homo sapien
agtaacacaccatctctctggagaagcctttct

SEQ ID NO: 304993 - DNA, 33 bp, Homo sapien
catgttgtgggagacacctggtgggaggtaaat

SEQ ID NO: 304994 - DNA, 33 bp, Homo sapien
catgttgtgggagacatctggtgggaggtaaat

SEQ ID NO: 304995 - DNA, 33 bp, Homo sapien
ttttatgtgttctttcaagaaatgtctactgaa

SEQ ID NO: 304996 - DNA, 33 bp, Homo sapien
ttttatgtgttctttcgagaaatgtctactgaa

SEQ ID NO: 304997 - DNA, 33 bp, Homo sapien
atttgacatttgctaaaagggtagatcttgagt

SEQ ID NO: 304998 - DNA, 33 bp, Homo sapien
atttgacatttgctaagagggtagatcttgagt

SEQ ID NO: 304999 - DNA, 33 bp, Homo sapien
ctgcacagctagtaaaagtgactcaaagctcag

SEQ ID NO: 305000 - DNA, 33 bp, Homo sapien
ctgcacagctagtaaaggtgactcaaagctcag

SEQ ID NO: 305001 - DNA, 33 bp, Homo sapien
acaccattcaggttaaacccttgagaatccaat

SEQ ID NO: 305002 - DNA, 33 bp, Homo sapien
acaccattcaggttaaccccttgagaatccaat

SEQ ID NO: 305003 - DNA, 33 bp, Homo sapien
tccagtacctaagctacgggctataaatctgtt

SEQ ID NO: 305004 - DNA, 33 bp, Homo sapien
tccagtacctaagctatgggctataaatctgtt

SEQ ID NO: 305005 - DNA, 33 bp, Homo sapien
atttcaattacttgcaaacaataacataagcta

SEQ ID NO: 305006 - DNA, 33 bp, Homo sapien
atttcaattacttgcacacaataacataagcta

SEQ ID NO: 305007 - DNA, 33 bp, Homo sapien
agggaaaaattcagaagaatgttaaatcctttg

SEQ ID NO: 305008 - DNA, 33 bp, Homo sapien
agggaaaaattcagaataatgttaaatcctttg

SEQ ID NO: 305009 - DNA, 33 bp, Homo sapien
ggtaaatatgctattaacaaaggccagggaaaa

SEQ ID NO: 305010 - DNA, 33 bp, Homo sapien
ggtaaatatgctattaccaaaggccagggaaaa

SEQ ID NO: 305011 - DNA, 33 bp, Homo sapien
agtataattgaaataaatgagactcttcccaac

SEQ ID NO: 305012 - DNA, 33 bp, Homo sapien
agtataattgaaataattgagactcttcccaac

SEQ ID NO: 305013 - DNA, 33 bp, Homo sapien
taacacttccattcaccaccaactgatcagagt

SEQ ID NO: 305014 - DNA, 33 bp, Homo sapien
taacacttccattcactaccaactgatcagagt

SEQ ID NO: 305015 - DNA, 33 bp, Homo sapien
ataatcttcaagtagacaccttgtccaaatgag

SEQ ID NO: 305016 - DNA, 33 bp, Homo sapien
ataatcttcaagtagataccttgtccaaatgag

SEQ ID NO: 305017 - DNA, 33 bp, Homo sapien
ttgtttatcttatgcccatatcacagacttggt

SEQ ID NO: 305018 - DNA, 33 bp, Homo sapien
ttgtttatcttatgcctatatcacagacttggt

SEQ ID NO: 305019 - DNA, 33 bp, Homo sapien
ttaatgggaagaaataaagttaaggcatcctgg

SEQ ID NO: 305020 - DNA, 33 bp, Homo sapien
ttaatgggaagaaatagagttaaggcatcctgg

SEQ ID NO: 305021 - DNA, 33 bp, Homo sapien
aaaggagatggcaataaagtggtcttgaatctc

SEQ ID NO: 305022 - DNA, 33 bp, Homo sapien
aaaggagatggcaatatagtggtcttgaatctc

SEQ ID NO: 305023 - DNA, 33 bp, Homo sapien
aattttttgatgaaagaagaaactaatgtgcaa

SEQ ID NO: 305024 - DNA, 33 bp, Homo sapien
aattttttgatgaaagcagaaactaatgtgcaa

SEQ ID NO: 305025 - DNA, 33 bp, Homo sapien
gagatttcctcatgatcatacaggtagtataga

SEQ ID NO: 305026 - DNA, 33 bp, Homo sapien
gagatttcctcatgatgatacaggtagtataga

SEQ ID NO: 305027 - DNA, 33 bp, Homo sapien
aaattgatccttagtaaaagttttaactacata

SEQ ID NO: 305028 - DNA, 33 bp, Homo sapien
aaattgatccttagtagaagttttaactacata

SEQ ID NO: 305029 - DNA, 33 bp, Homo sapien
gttcggtagcagtatacaaagaagtcctaaagt

SEQ ID NO: 305030 - DNA, 33 bp, Homo sapien
gttcggtagcagtatataaagaagtcctaaagt

SEQ ID NO: 305031 - DNA, 33 bp, Homo sapien
ggaggccacagatatgaagataatgtgatatga

SEQ ID NO: 305032 - DNA, 33 bp, Homo sapien
ggaggccacagatatggagataatgtgatatga

SEQ ID NO: 305033 - DNA, 33 bp, Homo sapien
tcatcattatggcatcaaatctacaagggcagg

SEQ ID NO: 305034 - DNA, 33 bp, Homo sapien
tcatcattatggcatcgaatctacaagggcagg

SEQ ID NO: 305035 - DNA, 33 bp, Homo sapien
cagaattgctgtggatgagtgactatcagcctc

SEQ ID NO: 305036 - DNA, 33 bp, Homo sapien
cagaattgctgtggattagtgactatcagcctc

SEQ ID NO: 305037 - DNA, 33 bp, Homo sapien
tcactaatgatatatgcaaaaatcctcaacaaa

SEQ ID NO: 305038 - DNA, 33 bp, Homo sapien
tcactaatgatatatggaaaaatcctcaacaaa

SEQ ID NO: 305039 - DNA, 33 bp, Homo sapien
atctttgactttagacaatcataaaattaaaaa

SEQ ID NO: 305040 - DNA, 33 bp, Homo sapien
atctttgactttagacgatcataaaattaaaaa

SEQ ID NO: 305041 - DNA, 33 bp, Homo sapien
atgctgctaagttttacagatgatatgttttct

SEQ ID NO: 305042 - DNA, 33 bp, Homo sapien
atgctgctaagttttagagatgatatgttttct

SEQ ID NO: 305043 - DNA, 33 bp, Homo sapien
aacaacagatactggaaacgatttggagaaata

SEQ ID NO: 305044 - DNA, 33 bp, Homo sapien
aacaacagatactggagacgatttggagaaata

SEQ ID NO: 305045 - DNA, 33 bp, Homo sapien; identical to SEQ ID NO: 305043

SEQ ID NO: 305046 - DNA, 33 bp, Homo sapien; identical to SEQ ID NO: 305044

SEQ ID NO: 305047 - DNA, 33 bp, Homo sapien
caggttattaacagaactcagttcattgtaggt

SEQ ID NO: 305048 - DNA, 33 bp, Homo sapien
caggttattaacagaattcagttcattgtaggt

SEQ ID NO: 305049 - DNA, 33 bp, Homo sapien
tgtacttgcggtctcacgggtattataacacat

SEQ ID NO: 305050 - DNA, 33 bp, Homo sapien
tgtacttgcggtctcatgggtattataacacat

SEQ ID NO: 305051 - DNA, 33 bp, Homo sapien
tagggattcagtgccccacaacctctgcattgt

SEQ ID NO: 305052 - DNA, 33 bp, Homo sapien
tagggattcagtgcccgacaacctctgcattgt

SEQ ID NO: 305053 - DNA, 33 bp, Homo sapien
actaagtatagataaacgctggcagatcctaaa

SEQ ID NO: 305054 - DNA, 33 bp, Homo sapien
actaagtatagataaaggctggcagatcctaaa

SEQ ID NO: 305055 - DNA, 33 bp, Homo sapien
cttgcagctgttcaagacttatctctctcactt

SEQ ID NO: 305056 - DNA, 33 bp, Homo sapien
cttgcagctgttcaaggcttatctctctcactt

SEQ ID NO: 305057 - DNA, 33 bp, Homo sapien
ccaggtaaatgagtacaagtcatgctcaaagca

SEQ ID NO: 305058 - DNA, 33 bp, Homo sapien
ccaggtaaatgagtacgagtcatgctcaaagca

SEQ ID NO: 305059 - DNA, 33 bp, Homo sapien
ttaaaaattgcatttcactgatcaaactaggtg

SEQ ID NO: 305060 - DNA, 33 bp, Homo sapien
ttaaaaattgcatttcgctgatcaaactaggtg

SEQ ID NO: 305061 - DNA, 33 bp, Homo sapien
ttacactcaactgaagcctgattgtaaataact

SEQ ID NO: 305062 - DNA, 33 bp, Homo sapien
ttacactcaactgaagtctgattgtaaataact

SEQ ID NO: 305063 - DNA, 33 bp, Homo sapien
ttacaagttgctcaaacttagtcctcaattttg

SEQ ID NO: 305064 - DNA, 33 bp, Homo sapien
ttacaagttgctcaaatttagtcctcaattttg

SEQ ID NO: 305065 - DNA, 33 bp, Homo sapien
aggcttactcaacacacgggtttgttcacagga

SEQ ID NO: 305066 - DNA, 33 bp, Homo sapien
aggcttactcaacacatgggtttgttcacagga

SEQ ID NO: 305067 - DNA, 33 bp, Homo sapien
agttatataaagagaaatgaaagacagattctc

SEQ ID NO: 305068 - DNA, 33 bp, Homo sapien
agttatataaagagaactgaaagacagattctc

SEQ ID NO: 305069 - DNA, 33 bp, Homo sapien
gatctgtgtctgaggaaggatttatttggataa

SEQ ID NO: 305070 - DNA, 33 bp, Homo sapien
gatctgtgtctgaggagggatttatttggataa

SEQ ID NO: 305071 - DNA, 33 bp, Homo sapien
accactgtaactgttcgacatttaaaacaaaca

SEQ ID NO: 305072 - DNA, 33 bp, Homo sapien
accactgtaactgttctacatttaaaacaaaca

SEQ ID NO: 305073 - DNA, 33 bp, Homo sapien
acgtataataccgtaacgttaatttgctataag

SEQ ID NO: 305074 - DNA, 33 bp, Homo sapien
acgtataataccgtaatgttaatttgctataag

SEQ ID NO: 305075 - DNA, 33 bp, Homo sapien
acacaatccttaggcccactgtggtttagtaga

SEQ ID NO: 305076 - DNA, 33 bp, Homo sapien
acacaatccttaggcctactgtggtttagtaga

SEQ ID NO: 305077 - DNA, 33 bp, Homo sapien
ctaatgagactgctaaaacaatgggaatagaaa

SEQ ID NO: 305078 - DNA, 33 bp, Homo sapien
ctaatgagactgctaagacaatgggaatagaaa

SEQ ID NO: 305079 - DNA, 33 bp, Homo sapien
tgtattttctgattgacatttaccatctatgtt

SEQ ID NO: 305080 - DNA, 33 bp, Homo sapien
tgtattttctgattgatatttaccatctatgtt

SEQ ID NO: 305081 - DNA, 33 bp, Homo sapien
gatgataccatttagaatatcccatgagaagtg

SEQ ID NO: 305082 - DNA, 33 bp, Homo sapien
gatgataccatttagagtatcccatgagaagtg

SEQ ID NO: 305083 - DNA, 33 bp, Homo sapien
gatgcctcagcaaaaagatgtacagatggaaaa

SEQ ID NO: 305084 - DNA, 33 bp, Homo sapien
gatgcctcagcaaaaatatgtacagatggaaaa

SEQ ID NO: 305085 - DNA, 33 bp, Homo sapien
agtttttggattttagacattccaataggtaca

SEQ ID NO: 305086 - DNA, 33 bp, Homo sapien
agtttttggattttaggcattccaataggtaca

SEQ ID NO: 305087 - DNA, 33 bp, Homo sapien
tctccagtgctacttaagtcagcagatatcctc

SEQ ID NO: 305088 - DNA, 33 bp, Homo sapien
tctccagtgctacttaggtcagcagatatcctc

SEQ ID NO: 305089 - DNA, 33 bp, Homo sapien
aatagcttgtagactcactttcctcaaaacata

SEQ ID NO: 305090 - DNA, 33 bp, Homo sapien
aatagcttgtagactcgctttcctcaaaacata

SEQ ID NO: 305091 - DNA, 33 bp, Homo sapien
attttaccaatttaacaaagaccacaacacaca

SEQ ID NO: 305092 - DNA, 33 bp, Homo sapien
attttaccaatttaactaagaccacaacacaca

SEQ ID NO: 305093 - DNA, 33 bp, Homo sapien
tactgatttaaatgctaaccgtatctaaaatat

SEQ ID NO: 305094 - DNA, 33 bp, Homo sapien
tactgatttaaatgctgaccgtatctaaaatat

SEQ ID NO: 305095 - DNA, 33 bp, Homo sapien
gagtgattaatactacactgacttggatgagtg

SEQ ID NO: 305096 - DNA, 33 bp, Homo sapien
gagtgattaatactacgctgacttggatgagtg

SEQ ID NO: 305097 - DNA, 33 bp, Homo sapien
tttaatacagtttctacgtggtattaaagcaat

SEQ ID NO: 305098 - DNA, 33 bp, Homo sapien
tttaatacagtttctatgtggtattaaagcaat

SEQ ID NO: 305099 - DNA, 33 bp, Homo sapien
tttgcagagattaaaaaggcatattagcattct

SEQ ID NO: 305100 - DNA, 33 bp, Homo sapien
tttgcagagattaaaacggcatattagcattct

SEQ ID NO: 305101 - DNA, 33 bp, Homo sapien
tggttcatttcctttagcaattacgttaacatt

SEQ ID NO: 305102 - DNA, 33 bp, Homo sapien
tggttcatttcctttatcaattacgttaacatt

SEQ ID NO: 305103 - DNA, 33 bp, Homo sapien
gcagaacagcaattcacggaaaaattcagatcc

SEQ ID NO: 305104 - DNA, 33 bp, Homo sapien
gcagaacagcaattcatggaaaaattcagatcc

SEQ ID NO: 305105 - DNA, 33 bp, Homo sapien
ctccatttggccttgcaactcttcatgcatgca

SEQ ID NO: 305106 - DNA, 33 bp, Homo sapien
ctccatttggccttgccactcttcatgcatgca

SEQ ID NO: 305107 - DNA, 33 bp, Homo sapien
tggtcatgcaactagaaccttaaacaatgggct

SEQ ID NO: 305108 - DNA, 33 bp, Homo sapien
tggtcatgcaactagatccttaaacaatgggct

SEQ ID NO: 305109 - DNA, 33 bp, Homo sapien
tctaacttccattagcacagggatgaagaccta

SEQ ID NO: 305110 - DNA, 33 bp, Homo sapien
tctaacttccattagcgcagggatgaagaccta

SEQ ID NO: 305111 - DNA, 33 bp, Homo sapien
tgaaatactactttacacctgcaagtataatca

SEQ ID NO: 305112 - DNA, 33 bp, Homo sapien
tgaaatactactttactcctgcaagtataatca

SEQ ID NO: 305113 - DNA, 33 bp, Homo sapien
tttttggtaacttctacaatgcataatattgtg

SEQ ID NO: 305114 - DNA, 33 bp, Homo sapien
tttttggtaacttctagaatgcataatattgtg

SEQ ID NO: 305115 - DNA, 33 bp, Homo sapien
gttttgttaaagaaccaacaatggagaggatcc

SEQ ID NO: 305116 - DNA, 33 bp, Homo sapien
gttttgttaaagaaccgacaatggagaggatcc

SEQ ID NO: 305117 - DNA, 33 bp, Homo sapien
gaaagaacatgaaatacgcaggtttataaggaa

SEQ ID NO: 305118 - DNA, 33 bp, Homo sapien
gaaagaacatgaaatatgcaggtttataaggaa

SEQ ID NO: 305119 - DNA, 33 bp, Homo sapien
agagtggttaaatgaaatagcagactgttagat

SEQ ID NO: 305120 - DNA, 33 bp, Homo sapien
agagtggttaaatgaattagcagactgttagat

SEQ ID NO: 305121 - DNA, 33 bp, Homo sapien
aataaaatgaagtcaaagttttatttgcataca

SEQ ID NO: 305122 - DNA, 33 bp, Homo sapien
aataaaatgaagtcaacgttttatttgcataca

SEQ ID NO: 305123 - DNA, 33 bp, Homo sapien
ttctgcacaagccttaagaaggcagcactcaaa

SEQ ID NO: 305124 - DNA, 33 bp, Homo sapien
ttctgcacaagccttacgaaggcagcactcaaa

SEQ ID NO: 305125 - DNA, 33 bp, Homo sapien
tattgaattctgtagaactttcatgctgcttag

SEQ ID NO: 305126 - DNA, 33 bp, Homo sapien
tattgaattctgtagacctttcatgctgcttag

SEQ ID NO: 305127 - DNA, 33 bp, Homo sapien
gcttaggggccaaggacgatcttgaagggatgt

SEQ ID NO: 305128 - DNA, 33 bp, Homo sapien
gcttaggggccaaggatgatcttgaagggatgt

SEQ ID NO: 305129 - DNA, 33 bp, Homo sapien
gtgacttctcaagtggcacatagctccttagtg

SEQ ID NO: 305130 - DNA, 33 bp, Homo sapien
gtgacttctcaagtggtacatagctccttagtg

SEQ ID NO: 305131 - DNA, 33 bp, Homo sapien
tttttttcttacatacaaacagtcaggtcatga

SEQ ID NO: 305132 - DNA, 33 bp, Homo sapien
tttttttcttacataccaacagtcaggtcatga

SEQ ID NO: 305133 - DNA, 33 bp, Homo sapien
tgattgtcacttgtaaaagttatattcctgact

SEQ ID NO: 305134 - DNA, 33 bp, Homo sapien
tgattgtcacttgtaacagttatattcctgact

SEQ ID NO: 305135 - DNA, 33 bp, Homo sapien
ggtcctatagtcaggaagaaacttatctaaagt

SEQ ID NO: 305136 - DNA, 33 bp, Homo sapien
ggtcctatagtcaggacgaaacttatctaaagt

SEQ ID NO: 305137 - DNA, 33 bp, Homo sapien
gtgaagaggaaagatcaattatttttgttttgt

SEQ ID NO: 305138 - DNA, 33 bp, Homo sapien
gtgaagaggaaagatcgattatttttgttttgt

SEQ ID NO: 305139 - DNA, 33 bp, Homo sapien
cttacattagggcagaagcagtggaattaaata

SEQ ID NO: 305140 - DNA, 33 bp, Homo sapien
cttacattagggcagaggcagtggaattaaata

SEQ ID NO: 305141 - DNA, 33 bp, Homo sapien
aggagccatgttaaaccgtcattcaaaatgtta

SEQ ID NO: 305142 - DNA, 33 bp, Homo sapien
aggagccatgttaaactgtcattcaaaatgtta

SEQ ID NO: 305143 - DNA, 33 bp, Homo sapien
ccttagacatctctcaaacttttcattcagtgc

SEQ ID NO: 305144 - DNA, 33 bp, Homo sapien
ccttagacatctctcagacttttcattcagtgc

SEQ ID NO: 305145 - DNA, 33 bp, Homo sapien
ttttttgtctgccattaaaagatgttgttaagt

SEQ ID NO: 305146 - DNA, 33 bp, Homo sapien
ttttttgtctgccattgaaagatgttgttaagt

SEQ ID NO: 305147 - DNA, 33 bp, Homo sapien
attattttatcatgcaagtattaaggttagtac

SEQ ID NO: 305148 - DNA, 33 bp, Homo sapien
attattttatcatgcaggtattaaggttagtac

SEQ ID NO: 305149 - DNA, 33 bp, Homo sapien
ttgtcctattggtacaggaagattctgttcatt

SEQ ID NO: 305150 - DNA, 33 bp, Homo sapien
ttgtcctattggtacatgaagattctgttcatt

SEQ ID NO: 305151 - DNA, 33 bp, Homo sapien
ggaaaggagtgagtgccgaaaataaacatagga

SEQ ID NO: 305152 - DNA, 33 bp, Homo sapien
ggaaaggagtgagtgctgaaaataaacatagga

SEQ ID NO: 305153 - DNA, 33 bp, Homo sapien
acaaacctctgaaaatgagagacaaatatgtgt

SEQ ID NO: 305154 - DNA, 33 bp, Homo sapien
acaaacctctgaaaattagagacaaatatgtgt

SEQ ID NO: 305155 - DNA, 33 bp, Homo sapien
gcacaatcaaccaacaacttataattggcatat

SEQ ID NO: 305156 - DNA, 33 bp, Homo sapien
gcacaatcaaccaacagcttataattggcatat

SEQ ID NO: 305157 - DNA, 33 bp, Homo sapien
tctttgtttatggtagcattggtattccatggt

SEQ ID NO: 305158 - DNA, 33 bp, Homo sapien
tctttgtttatggtagtattggtattccatggt

SEQ ID NO: 305159 - DNA, 33 bp, Homo sapien
cacacagccatcatacaacagcaaggcaggttt

SEQ ID NO: 305160 - DNA, 33 bp, Homo sapien
cacacagccatcatacgacagcaaggcaggttt

SEQ ID NO: 305161 - DNA, 33 bp, Homo sapien
ttccatattctacctacgtaacagtagcatcat

SEQ ID NO: 305162 - DNA, 33 bp, Homo sapien
ttccatattctacctatgtaacagtagcatcat

SEQ ID NO: 305163 - DNA, 33 bp, Homo sapien
gcactagctacagaaaatcctaagagtaaaatt

SEQ ID NO: 305164 - DNA, 33 bp, Homo sapien
gcactagctacagaaattcctaagagtaaaatt

SEQ ID NO: 305165 - DNA, 33 bp, Homo sapien
gagaactaaaatgtagccaatggaagcttaagc

SEQ ID NO: 305166 - DNA, 33 bp, Homo sapien
gagaactaaaatgtagtcaatggaagcttaagc

SEQ ID NO: 305167 - DNA, 33 bp, Homo sapien
agagtccaacaaaagaagcaaaaccattcttat

SEQ ID NO: 305168 - DNA, 33 bp, Homo sapien
agagtccaacaaaagaggcaaaaccattcttat

SEQ ID NO: 305169 - DNA, 33 bp, Homo sapien
tgatgaaggtgattaacggtagtccatgacatg

SEQ ID NO: 305170 - DNA, 33 bp, Homo sapien
tgatgaaggtgattaatggtagtccatgacatg

SEQ ID NO: 305171 - DNA, 33 bp, Homo sapien
cactaaataaagagtgaacggaattaggataat

SEQ ID NO: 305172 - DNA, 33 bp, Homo sapien
cactaaataaagagtggacggaattaggataat

SEQ ID NO: 305173 - DNA, 33 bp, Homo sapien
cttttaccttatcatacacatggaccaataacc

SEQ ID NO: 305174 - DNA, 33 bp, Homo sapien
cttttaccttatcatagacatggaccaataacc

SEQ ID NO: 305175 - DNA, 33 bp, Homo sapien; identical to SEQ ID NO: 305173

SEQ ID NO: 305176 - DNA, 33 bp, Homo sapien; identical to SEQ ID NO: 305174

SEQ ID NO: 305177 - DNA, 33 bp, Homo sapien
accagtaaatgtcgtagaatgtattaatattca

SEQ ID NO: 305178 - DNA, 33 bp, Homo sapien
accagtaaatgtcgtataatgtattaatattca

SEQ ID NO: 305179 - DNA, 33 bp, Homo sapien
aagagtaaatcacatacgtaaagatggcatcat

SEQ ID NO: 305180 - DNA, 33 bp, Homo sapien
aagagtaaatcacatatgtaaagatggcatcat

SEQ ID NO: 305181 - DNA, 33 bp, Homo sapien
aacctctattcatacaatagtcacaaagagtaa

SEQ ID NO: 305182 - DNA, 33 bp, Homo sapien
aacctctattcatacagtagtcacaaagagtaa

SEQ ID NO: 305183 - DNA, 33 bp, Homo sapien
atgcatgagaaagacaaggcagaacctaatcag

SEQ ID NO: 305184 - DNA, 33 bp, Homo sapien
atgcatgagaaagacagggcagaacctaatcag

SEQ ID NO: 305185 - DNA, 33 bp, Homo sapien
aagaattgtgttgccactgagtttctatttcaa

SEQ ID NO: 305186 - DNA, 33 bp, Homo sapien
aagaattgtgttgccattgagtttctatttcaa

SEQ ID NO: 305187 - DNA, 33 bp, Homo sapien
ttattaattgcttatcagaatcctcttactcta

SEQ ID NO: 305188 - DNA, 33 bp, Homo sapien
ttattaattgcttatctgaatcctcttactcta

SEQ ID NO: 305189 - DNA, 33 bp, Homo sapien
tgaattgtctctgatacgctatttcatttacct

SEQ ID NO: 305190 - DNA, 33 bp, Homo sapien
tgaattgtctctgatatgctatttcatttacct

SEQ ID NO: 305191 - DNA, 33 bp, Homo sapien
gggtggttcctgaaaagcaatgcagaattatat

SEQ ID NO: 305192 - DNA, 33 bp, Homo sapien
gggtggttcctgaaaatcaatgcagaattatat

SEQ ID NO: 305193 - DNA, 33 bp, Homo sapien
tggaatagttcttgcaacagtctacagagctgt

SEQ ID NO: 305194 - DNA, 33 bp, Homo sapien
tggaatagttcttgcagcagtctacagagctgt

SEQ ID NO: 305195 - DNA, 33 bp, Homo sapien
catccaatgaatctgacgtctaggttgacctta

SEQ ID NO: 305196 - DNA, 33 bp, Homo sapien
catccaatgaatctgatgtctaggttgacctta

SEQ ID NO: 305197 - DNA, 33 bp, Homo sapien
taggccacaatattcacgtccagtctgagctgt

SEQ ID NO: 305198 - DNA, 33 bp, Homo sapien
taggccacaatattcaggtccagtctgagctgt

SEQ ID NO: 305199 - DNA, 33 bp, Homo sapien
ccaatcctttacctagaactcaatagcatcctt

SEQ ID NO: 305200 - DNA, 33 bp, Homo sapien
ccaatcctttacctagcactcaatagcatcctt

SEQ ID NO: 305201 - DNA, 33 bp, Homo sapien
gtagttttaatacaagcccaagagagatccctc

SEQ ID NO: 305202 - DNA, 33 bp, Homo sapien
gtagttttaatacaagtccaagagagatccctc

SEQ ID NO: 305203 - DNA, 33 bp, Homo sapien
gggcccacttcttcatgaactgccagcttatca

SEQ ID NO: 305204 - DNA, 33 bp, Homo sapien
gggcccacttcttcattaactgccagcttatca

SEQ ID NO: 305205 - DNA, 33 bp, Homo sapien
gttggttggccaacaacgaggtggtggtggttt

SEQ ID NO: 305206 - DNA, 33 bp, Homo sapien
gttggttggccaacaatgaggtggtggtggttt

SEQ ID NO: 305207 - DNA, 33 bp, Homo sapien
cactggccaacttagcacaagcttagatccccc

SEQ ID NO: 305208 - DNA, 33 bp, Homo sapien
cactggccaacttagctcaagcttagatccccc

SEQ ID NO: 305209 - DNA, 33 bp, Homo sapien
cagtcctggtgatctaaagtgcctcgcaagtgt

SEQ ID NO: 305210 - DNA, 33 bp, Homo sapien
cagtcctggtgatctagagtgcctcgcaagtgt

SEQ ID NO: 305211 - DNA, 33 bp, Homo sapien
ttttatcagttgaaagacggaaaaataatgtct

SEQ ID NO: 305212 - DNA, 33 bp, Homo sapien
ttttatcagttgaaaggcggaaaaataatgtct

SEQ ID NO: 305213 - DNA, 33 bp, Homo sapien
ggggtgaggacttccaatgcttttacaagtcag

SEQ ID NO: 305214 - DNA, 33 bp, Homo sapien
ggggtgaggacttccagtgcttttacaagtcag

SEQ ID NO: 305215 - DNA, 33 bp, Homo sapien
ctgcgtggggattggcactcctaattcttgcat

SEQ ID NO: 305216 - DNA, 33 bp, Homo sapien
ctgcgtggggattggcgctcctaattcttgcat

SEQ ID NO: 305217 - DNA, 33 bp, Homo sapien
tcacaatatgtaatcactaaatcagggtagtta

SEQ ID NO: 305218 - DNA, 33 bp, Homo sapien
tcacaatatgtaatcattaaatcagggtagtta

SEQ ID NO: 305219 - DNA, 33 bp, Homo sapien
gaatgagtttgttgaaatcaggagttttaggaa

SEQ ID NO: 305220 - DNA, 33 bp, Homo sapien
gaatgagtttgttgaagtcaggagttttaggaa

SEQ ID NO: 305221 - DNA, 33 bp, Homo sapien
aatagtttttgtgtaactgattgctgatgacac

SEQ ID NO: 305222 - DNA, 33 bp, Homo sapien
aatagtttttgtgtaattgattgctgatgacac

SEQ ID NO: 305223 - DNA, 33 bp, Homo sapien
aaataagctctccaggaaagaatcctttgtgca

SEQ ID NO: 305224 - DNA, 33 bp, Homo sapien
aaataagctctccagggaagaatcctttgtgca

SEQ ID NO: 305225 - DNA, 33 bp, Homo sapien
agaaattttgaagcaactgtggtctatcgatct

SEQ ID NO: 305226 - DNA, 33 bp, Homo sapien
agaaattttgaagcaattgtggtctatcgatct

SEQ ID NO: 305227 - DNA, 33 bp, Homo sapien
attgcaaggccagtgaaatttctgagaagagtg

SEQ ID NO: 305228 - DNA, 33 bp, Homo sapien
attgcaaggccagtgagatttctgagaagagtg

SEQ ID NO: 305229 - DNA, 33 bp, Homo sapien
cattcagtacacatgaacacaatgaagggtaca

SEQ ID NO: 305230 - DNA, 33 bp, Homo sapien
cattcagtacacatgagcacaatgaagggtaca

SEQ ID NO: 305231 - DNA, 33 bp, Homo sapien
ccaagcttctcaattacaccaagcaatccatga

SEQ ID NO: 305232 - DNA, 33 bp, Homo sapien
ccaagcttctcaattataccaagcaatccatga

SEQ ID NO: 305233 - DNA, 33 bp, Homo sapien
cccagttcagacctagaaggaccctttggcatt

SEQ ID NO: 305234 - DNA, 33 bp, Homo sapien
cccagttcagacctaggaggaccctttggcatt

SEQ ID NO: 305235 - DNA, 33 bp, Homo sapien
gtatctcactgctagccgattacaagtagataa

SEQ ID NO: 305236 - DNA, 33 bp, Homo sapien
gtatctcactgctagcggattacaagtagataa

SEQ ID NO: 305237 - DNA, 33 bp, Homo sapien
aaatgttgggggatcacaaaggtctcctaccag

SEQ ID NO: 305238 - DNA, 33 bp, Homo sapien
aaatgttgggggatcagaaaggtctcctaccag

SEQ ID NO: 305239 - DNA, 33 bp, Homo sapien
tgacattgggtcctaaaattatccagcattatt

SEQ ID NO: 305240 - DNA, 33 bp, Homo sapien
tgacattgggtcctaacattatccagcattatt

SEQ ID NO: 305241 - DNA, 33 bp, Homo sapien
tttaaaaatctgagacggaaacattttgtgtct

SEQ ID NO: 305242 - DNA, 33 bp, Homo sapien
tttaaaaatctgagactgaaacattttgtgtct

SEQ ID NO: 305243 - DNA, 33 bp, Homo sapien
tcttgaaacagtaagcaagctcttatgagatct

SEQ ID NO: 305244 - DNA, 33 bp, Homo sapien
tcttgaaacagtaagcgagctcttatgagatct

SEQ ID NO: 305245 - DNA, 33 bp, Homo sapien
agtccctaagctgtacagagaacggtggggtct

SEQ ID NO: 305246 - DNA, 33 bp, Homo sapien
agtccctaagctgtacggagaacggtggggtct

SEQ ID NO: 305247 - DNA, 33 bp, Homo sapien
actcttaagggaacaccgagagctgatcatatt

SEQ ID NO: 305248 - DNA, 33 bp, Homo sapien
actcttaagggaacactgagagctgatcatatt

SEQ ID NO: 305249 - DNA, 33 bp, Homo sapien
atcagtagtgtacacacacttttcagacacata

SEQ ID NO: 305250 - DNA, 33 bp, Homo sapien
atcagtagtgtacacatacttttcagacacata

SEQ ID NO: 305251 - DNA, 33 bp, Homo sapien
ttgaagtgagtttggaaggatgtgtgggcactg

SEQ ID NO: 305252 - DNA, 33 bp, Homo sapien
ttgaagtgagtttggacggatgtgtgggcactg

SEQ ID NO: 305253 - DNA, 33 bp, Homo sapien
atctgcttgaaggatacagtggaaatcactgtg

SEQ ID NO: 305254 - DNA, 33 bp, Homo sapien
atctgcttgaaggatatagtggaaatcactgtg

SEQ ID NO: 305255 - DNA, 33 bp, Homo sapien
acaaaccaggattttacagagaaatgactcatt

SEQ ID NO: 305256 - DNA, 33 bp, Homo sapien
acaaaccaggattttatagagaaatgactcatt

SEQ ID NO: 305257 - DNA, 33 bp, Homo sapien
acatatgcatacaccacgtgttcgctttaatta

SEQ ID NO: 305258 - DNA, 33 bp, Homo sapien
acatatgcatacaccatgtgttcgctttaatta

SEQ ID NO: 305259 - DNA, 33 bp, Homo sapien
aggagagcttgaatagccaaagcaattttatgc

SEQ ID NO: 305260 - DNA, 33 bp, Homo sapien
aggagagcttgaatagtcaaagcaattttatgc

SEQ ID NO: 305261 - DNA, 33 bp, Homo sapien
ttatttgccacattaaatatgatgctgatcttt

SEQ ID NO: 305262 - DNA, 33 bp, Homo sapien
ttatttgccacattaattatgatgctgatcttt

SEQ ID NO: 305263 - DNA, 33 bp, Homo sapien
gtactctggtagccaacagttcatttcattact

SEQ ID NO: 305264 - DNA, 33 bp, Homo sapien
gtactctggtagccaatagttcatttcattact

SEQ ID NO: 305265 - DNA, 33 bp, Homo sapien
tatagtaggttaagtcaaacaaggacagagaat

SEQ ID NO: 305266 - DNA, 33 bp, Homo sapien
tatagtaggttaagtcgaacaaggacagagaat

SEQ ID NO: 305267 - DNA, 33 bp, Homo sapien
acatcaaaatatgctcccaggacataatgactt

SEQ ID NO: 305268 - DNA, 33 bp, Homo sapien
acatcaaaatatgctctcaggacataatgactt

SEQ ID NO: 305269 - DNA, 33 bp, Homo sapien
agcccctagctatcaaatccagagctattaagg

SEQ ID NO: 305270 - DNA, 33 bp, Homo sapien
agcccctagctatcaagtccagagctattaagg

SEQ ID NO: 305271 - DNA, 33 bp, Homo sapien
aatattgatcgaattacgttgttctctattgta

SEQ ID NO: 305272 - DNA, 33 bp, Homo sapien
aatattgatcgaattatgttgttctctattgta

SEQ ID NO: 305273 - DNA, 33 bp, Homo sapien
aatacagactcaataagtgtttgttgaagtgtt

SEQ ID NO: 305274 - DNA, 33 bp, Homo sapien
aatacagactcaataattgtttgttgaagtgtt

SEQ ID NO: 305275 - DNA, 33 bp, Homo sapien
cccgattttgccataaacctaaaattgttctaa

SEQ ID NO: 305276 - DNA, 33 bp, Homo sapien
cccgattttgccataagcctaaaattgttctaa

SEQ ID NO: 305277 - DNA, 33 bp, Homo sapien
ttgagcttaggagtgcaatagcatgtgatatga

SEQ ID NO: 305278 - DNA, 33 bp, Homo sapien
ttgagcttaggagtgccatagcatgtgatatga

SEQ ID NO: 305279 - DNA, 33 bp, Homo sapien
tttgttaggtgatctacgttcaaaaagcagaaa

SEQ ID NO: 305280 - DNA, 33 bp, Homo sapien
tttgttaggtgatctatgttcaaaaagcagaaa

SEQ ID NO: 305281 - DNA, 33 bp, Homo sapien
atatttaatttaatcaacagcacatcagactaa

SEQ ID NO: 305282 - DNA, 33 bp, Homo sapien
atatttaatttaatcaccagcacatcagactaa

SEQ ID NO: 305283 - DNA, 33 bp, Homo sapien
tttatattggtatttagaagaggccaaaacaaa

SEQ ID NO: 305284 - DNA, 33 bp, Homo sapien
tttatattggtatttataagaggccaaaacaaa

SEQ ID NO: 305285 - DNA, 33 bp, Homo sapien
ctcctgaggtgggtacaacgacattgaatcaat

SEQ ID NO: 305286 - DNA, 33 bp, Homo sapien
ctcctgaggtgggtactacgacattgaatcaat

SEQ ID NO: 305287 - DNA, 33 bp, Homo sapien
caattttgactgaaaacgctcaaaacacttaac

SEQ ID NO: 305288 - DNA, 33 bp, Homo sapien
caattttgactgaaaaggctcaaaacacttaac

SEQ ID NO: 305289 - DNA, 33 bp, Homo sapien
catgtttagctacacaagattgttgaaataagg

SEQ ID NO: 305290 - DNA, 33 bp, Homo sapien
catgtttagctacacaggattgttgaaataagg

SEQ ID NO: 305291 - DNA, 33 bp, Homo sapien
ttattgattaatatgcagactacaacatgaaac

SEQ ID NO: 305292 - DNA, 33 bp, Homo sapien
ttattgattaatatgcggactacaacatgaaac

SEQ ID NO: 305293 - DNA, 33 bp, Homo sapien
aaaaagatttcagctacattaaatgtgtcaact

SEQ ID NO: 305294 - DNA, 33 bp, Homo sapien
aaaaagatttcagctatattaaatgtgtcaact

SEQ ID NO: 305295 - DNA, 33 bp, Homo sapien
ggaacagctatatttacctaatgtctgtacccc

SEQ ID NO: 305296 - DNA, 33 bp, Homo sapien
ggaacagctatatttatctaatgtctgtacccc

SEQ ID NO: 305297 - DNA, 33 bp, Homo sapien
atgaatgataacctgacagaagacactgctttg

SEQ ID NO: 305298 - DNA, 33 bp, Homo sapien
atgaatgataacctgatagaagacactgctttg

SEQ ID NO: 305299 - DNA, 33 bp, Homo sapien
aaaaatgatcaaattcaattatttaagctgctt

SEQ ID NO: 305300 - DNA, 33 bp, Homo sapien
aaaaatgatcaaattccattatttaagctgctt

SEQ ID NO: 305301 - DNA, 33 bp, Homo sapien
ggtaggtagtcaataaccaatgccagaagctga

SEQ ID NO: 305302 - DNA, 33 bp, Homo sapien
ggtaggtagtcaataatcaatgccagaagctga

SEQ ID NO: 305303 - DNA, 33 bp, Homo sapien
tgtaaattgcttcagaataggtaaattgtctat

SEQ ID NO: 305304 - DNA, 33 bp, Homo sapien
tgtaaattgcttcagagtaggtaaattgtctat

SEQ ID NO: 305305 - DNA, 33 bp, Homo sapien
tataataaaacatccactcagtcacatttgaaa

SEQ ID NO: 305306 - DNA, 33 bp, Homo sapien
tataataaaacatccattcagtcacatttgaaa

SEQ ID NO: 305307 - DNA, 33 bp, Homo sapien
gcaacctccctttctgaactgaagtgattctcc

SEQ ID NO: 305308 - DNA, 33 bp, Homo sapien
gcaacctccctttctggactgaagtgattctcc

SEQ ID NO: 305309 - DNA, 33 bp, Homo sapien
tctgtataccaaagccacatgatatgcaattta

SEQ ID NO: 305310 - DNA, 33 bp, Homo sapien
tctgtataccaaagccgcatgatatgcaattta

SEQ ID NO: 305311 - DNA, 33 bp, Homo sapien
aatggagatttcaaaacggtaagaaagtgagag

SEQ ID NO: 305312 - DNA, 33 bp, Homo sapien
aatggagatttcaaaagggtaagaaagtgagag

SEQ ID NO: 305313 - DNA, 33 bp, Homo sapien
taacacaaatcctagccgacgttcttcattaca

SEQ ID NO: 305314 - DNA, 33 bp, Homo sapien
taacacaaatcctagctgacgttcttcattaca

SEQ ID NO: 305315 - DNA, 33 bp, Homo sapien
taactgttccatataactctgccatggtcagga

SEQ ID NO: 305316 - DNA, 33 bp, Homo sapien
taactgttccatataattctgccatggtcagga

SEQ ID NO: 305317 - DNA, 33 bp, Homo sapien
tgattttctcacataactcctctaaacctacag

SEQ ID NO: 305318 - DNA, 33 bp, Homo sapien
tgattttctcacataagtcctctaaacctacag

SEQ ID NO: 305319 - DNA, 33 bp, Homo sapien
aattttaaggagcaaaactagaagcagataaac

SEQ ID NO: 305320 - DNA, 33 bp, Homo sapien
aattttaaggagcaaagctagaagcagataaac

SEQ ID NO: 305321 - DNA, 33 bp, Homo sapien
aattctatacaaaaaaatttaatgtttccaata

SEQ ID NO: 305322 - DNA, 33 bp, Homo sapien
aattctatacaaaaaagtttaatgtttccaata

SEQ ID NO: 305323 - DNA, 33 bp, Homo sapien
gcaggttgtagcaagaaaagtgactccttcttt

SEQ ID NO: 305324 - DNA, 33 bp, Homo sapien
gcaggttgtagcaagagaagtgactccttcttt

SEQ ID NO: 305325 - DNA, 33 bp, Homo sapien
atgaaaaggtttttataagatcctgtgtataat

SEQ ID NO: 305326 - DNA, 33 bp, Homo sapien
atgaaaaggtttttatgagatcctgtgtataat

SEQ ID NO: 305327 - DNA, 33 bp, Homo sapien
caaaatgttgtcacgccctttaatgcaaaatat

SEQ ID NO: 305328 - DNA, 33 bp, Homo sapien
caaaatgttgtcacgctctttaatgcaaaatat

SEQ ID NO: 305329 - DNA, 33 bp, Homo sapien
tactcactgtttagtaagtggacacttcatagg

SEQ ID NO: 305330 - DNA, 33 bp, Homo sapien
tactcactgtttagtatgtggacacttcatagg

SEQ ID NO: 305331 - DNA, 33 bp, Homo sapien
tatgctaagtactaaaaatgtttcatcctcacc

SEQ ID NO: 305332 - DNA, 33 bp, Homo sapien
tatgctaagtactaaagatgtttcatcctcacc

SEQ ID NO: 305333 - DNA, 33 bp, Homo sapien
atttgactccatgcataaagaagtcactgaaat

SEQ ID NO: 305334 - DNA, 33 bp, Homo sapien
atttgactccatgcattaagaagtcactgaaat

SEQ ID NO: 305335 - DNA, 33 bp, Homo sapien
gaagacctttttgacaaggcaatatttaaggta

SEQ ID NO: 305336 - DNA, 33 bp, Homo sapien
gaagacctttttgacagggcaatatttaaggta

SEQ ID NO: 305337 - DNA, 33 bp, Homo sapien
gacccagccccaaccaactaatctacctcatct

SEQ ID NO: 305338 - DNA, 33 bp, Homo sapien
gacccagccccaaccagctaatctacctcatct

SEQ ID NO: 305339 - DNA, 33 bp, Homo sapien
tctgttttgctggataataccgaggggatgtgg

SEQ ID NO: 305340 - DNA, 33 bp, Homo sapien
tctgttttgctggatattaccgaggggatgtgg

SEQ ID NO: 305341 - DNA, 33 bp, Homo sapien
attttttgaaatggttcaaattcactgaccttg

SEQ ID NO: 305342 - DNA, 33 bp, Homo sapien
attttttgaaatggttgaaattcactgaccttg

SEQ ID NO: 305343 - DNA, 33 bp, Homo sapien
agggtgatggagtggaacataagacattactaa

SEQ ID NO: 305344 - DNA, 33 bp, Homo sapien
agggtgatggagtggagcataagacattactaa

SEQ ID NO: 305345 - DNA, 33 bp, Homo sapien
taggtgttcatcaatgcataataggttaaagaa

SEQ ID NO: 305346 - DNA, 33 bp, Homo sapien
taggtgttcatcaatggataataggttaaagaa

SEQ ID NO: 305347 - DNA, 33 bp, Homo sapien
acagcaataaacacaccggtataggtatctatt

SEQ ID NO: 305348 - DNA, 33 bp, Homo sapien
acagcaataaacacactggtataggtatctatt

SEQ ID NO: 305349 - DNA, 33 bp, Homo sapien
gctacactggtatatcaaacagactaaaacata

SEQ ID NO: 305350 - DNA, 33 bp, Homo sapien
gctacactggtatatccaacagactaaaacata

SEQ ID NO: 305351 - DNA, 33 bp, Homo sapien
ctagtcatagggagaacatactcaaaatagtaa

SEQ ID NO: 305352 - DNA, 33 bp, Homo sapien
ctagtcatagggagaagatactcaaaatagtaa

SEQ ID NO: 305353 - DNA, 33 bp, Homo sapien
cataaatgaggagatacgttagaatcctgggaa

SEQ ID NO: 305354 - DNA, 33 bp, Homo sapien
cataaatgaggagatatgttagaatcctgggaa

SEQ ID NO: 305355 - DNA, 33 bp, Homo sapien
catatacctatttataagctaaatctgactcac

SEQ ID NO: 305356 - DNA, 33 bp, Homo sapien
catatacctatttatacgctaaatctgactcac

SEQ ID NO: 305357 - DNA, 33 bp, Homo sapien
tctttgtctcctcttacatgggtacaagccatg

SEQ ID NO: 305358 - DNA, 33 bp, Homo sapien
tctttgtctcctcttatatgggtacaagccatg

SEQ ID NO: 305359 - DNA, 33 bp, Homo sapien
tcattggaggagtgacagaaattatctattttc

SEQ ID NO: 305360 - DNA, 33 bp, Homo sapien
tcattggaggagtgacggaaattatctattttc

SEQ ID NO: 305361 - DNA, 33 bp, Homo sapien
attatgacaaatatgaacactttttgcatactc

SEQ ID NO: 305362 - DNA, 33 bp, Homo sapien
attatgacaaatatgatcactttttgcatactc

SEQ ID NO: 305363 - DNA, 33 bp, Homo sapien
ccttttgaattttcacacagccaaatacttagc

SEQ ID NO: 305364 - DNA, 33 bp, Homo sapien
ccttttgaattttcacgcagccaaatacttagc

SEQ ID NO: 305365 - DNA, 33 bp, Homo sapien
actattttatgtaaaccggcagcttttaaggca

SEQ ID NO: 305366 - DNA, 33 bp, Homo sapien
actattttatgtaaactggcagcttttaaggca

SEQ ID NO: 305367 - DNA, 33 bp, Homo sapien
aatttccattatactactaagatttccagcttg

SEQ ID NO: 305368 - DNA, 33 bp, Homo sapien
aatttccattatactattaagatttccagcttg

SEQ ID NO: 305369 - DNA, 33 bp, Homo sapien
ttcttgagtgataggaacattatgtaaaatgat

SEQ ID NO: 305370 - DNA, 33 bp, Homo sapien
ttcttgagtgataggagcattatgtaaaatgat

SEQ ID NO: 305371 - DNA, 33 bp, Homo sapien
atatagagtacagaaacggccagggatagtagc

SEQ ID NO: 305372 - DNA, 33 bp, Homo sapien
atatagagtacagaaatggccagggatagtagc

SEQ ID NO: 305373 - DNA, 33 bp, Homo sapien
ttggggtcttgttaaaatacctatcataacaaa

SEQ ID NO: 305374 - DNA, 33 bp, Homo sapien
ttggggtcttgttaaattacctatcataacaaa

SEQ ID NO: 305375 - DNA, 33 bp, Homo sapien
tacatgagaacaggagaaattcaatttagtgat

SEQ ID NO: 305376 - DNA, 33 bp, Homo sapien
tacatgagaacaggaggaattcaatttagtgat

SEQ ID NO: 305377 - DNA, 33 bp, Homo sapien
tttcacgtagataaggcagagcagtagattatt

SEQ ID NO: 305378 - DNA, 33 bp, Homo sapien
tttcacgtagataaggtagagcagtagattatt

SEQ ID NO: 305379 - DNA, 33 bp, Homo sapien
tatctttcagagaagacagaatagcaacctggc

SEQ ID NO: 305380 - DNA, 33 bp, Homo sapien
tatctttcagagaagagagaatagcaacctggc

SEQ ID NO: 305381 - DNA, 33 bp, Homo sapien
ataatattctgcttcaatatagattttatttgc

SEQ ID NO: 305382 - DNA, 33 bp, Homo sapien
ataatattctgcttcagtatagattttatttgc

SEQ ID NO: 305383 - DNA, 33 bp, Homo sapien
gtcttatttataacacagagtagaacataaatc

SEQ ID NO: 305384 - DNA, 33 bp, Homo sapien
gtcttatttataacactgagtagaacataaatc

SEQ ID NO: 305385 - DNA, 33 bp, Homo sapien
ggacttattatgagaactaaaccttacaattgt

SEQ ID NO: 305386 - DNA, 33 bp, Homo sapien
ggacttattatgagaattaaaccttacaattgt

SEQ ID NO: 305387 - DNA, 33 bp, Homo sapien
acaattgtaggagaaaatgagaaatgaagatct

SEQ ID NO: 305388 - DNA, 33 bp, Homo sapien
acaattgtaggagaaactgagaaatgaagatct

SEQ ID NO: 305389 - DNA, 33 bp, Homo sapien
aacaacacaattaacaatagtgattctactctc

SEQ ID NO: 305390 - DNA, 33 bp, Homo sapien
aacaacacaattaacagtagtgattctactctc

SEQ ID NO: 305391 - DNA, 33 bp, Homo sapien
tttctctgaaaataccaaatcctctaacaataa

SEQ ID NO: 305392 - DNA, 33 bp, Homo sapien
tttctctgaaaataccgaatcctctaacaataa

SEQ ID NO: 305393 - DNA, 33 bp, Homo sapien
agatgtcaacaatctcccactgacatttcttat

SEQ ID NO: 305394 - DNA, 33 bp, Homo sapien
agatgtcaacaatctctcactgacatttcttat

SEQ ID NO: 305395 - DNA, 33 bp, Homo sapien
atcatctaaatgttaaactcagcatgcattagc

SEQ ID NO: 305396 - DNA, 33 bp, Homo sapien
atcatctaaatgttaagctcagcatgcattagc

SEQ ID NO: 305397 - DNA, 33 bp, Homo sapien
atttttgaaatacaccaggaggagttctctctt

SEQ ID NO: 305398 - DNA, 33 bp, Homo sapien
atttttgaaatacaccgggaggagttctctctt

SEQ ID NO: 305399 - DNA, 33 bp, Homo sapien
gattctggatattagaccttcactggatgtatt

SEQ ID NO: 305400 - DNA, 33 bp, Homo sapien
gattctggatattagatcttcactggatgtatt

SEQ ID NO: 305401 - DNA, 33 bp, Homo sapien
ttggattcttcataataaaatcgttgtcagggc

SEQ ID NO: 305402 - DNA, 33 bp, Homo sapien
ttggattcttcataatgaaatcgttgtcagggc

SEQ ID NO: 305403 - DNA, 33 bp, Homo sapien
gaagatctccacaataagaactctaaaacaata

SEQ ID NO: 305404 - DNA, 33 bp, Homo sapien
gaagatctccacaataggaactctaaaacaata

SEQ ID NO: 305405 - DNA, 33 bp, Homo sapien
tctgactgatgtaagacgatatgtcactgagga

SEQ ID NO: 305406 - DNA, 33 bp, Homo sapien
tctgactgatgtaagatgatatgtcactgagga

SEQ ID NO: 305407 - DNA, 33 bp, Homo sapien
gagagcatttctctggaatgaagaaaggaagat

SEQ ID NO: 305408 - DNA, 33 bp, Homo sapien
gagagcatttctctgggatgaagaaaggaagat

SEQ ID NO: 305409 - DNA, 33 bp, Homo sapien
atagcattgcatctgcacaagtgtaaccagata

SEQ ID NO: 305410 - DNA, 33 bp, Homo sapien
atagcattgcatctgcccaagtgtaaccagata

SEQ ID NO: 305411 - DNA, 33 bp, Homo sapien
gggtatttaattcaagacaggtccggtttataa

SEQ ID NO: 305412 - DNA, 33 bp, Homo sapien
gggtatttaattcaaggcaggtccggtttataa

SEQ ID NO: 305413 - DNA, 33 bp, Homo sapien
agaactgttctgccacacattgaagctcctctc

SEQ ID NO: 305414 - DNA, 33 bp, Homo sapien
agaactgttctgccactcattgaagctcctctc

SEQ ID NO: 305415 - DNA, 33 bp, Homo sapien
agaacagttctcagaagatccaaagaggtagct

SEQ ID NO: 305416 - DNA, 33 bp, Homo sapien
agaacagttctcagaatatccaaagaggtagct

SEQ ID NO: 305417 - DNA, 33 bp, Homo sapien
aggctgaacgcaggtaccatcatgacctggcca

SEQ ID NO: 305418 - DNA, 33 bp, Homo sapien
aggctgaacgcaggtatcatcatgacctggcca

SEQ ID NO: 305419 - DNA, 33 bp, Homo sapien
ttaaggtcgctaataccgatgtttatttaaaaa

SEQ ID NO: 305420 - DNA, 33 bp, Homo sapien
ttaaggtcgctaatacggatgtttatttaaaaa

SEQ ID NO: 305421 - DNA, 33 bp, Homo sapien
ctggtttacctgaagagagcttgtggtcccttt

SEQ ID NO: 305422 - DNA, 33 bp, Homo sapien
ctggtttacctgaagatagcttgtggtcccttt

SEQ ID NO: 305423 - DNA, 33 bp, Homo sapien
aattatgctctcctaacggactatgtgggtaag

SEQ ID NO: 305424 - DNA, 33 bp, Homo sapien
aattatgctctcctaatggactatgtgggtaag

SEQ ID NO: 305425 - DNA, 33 bp, Homo sapien
tatatcagcattactaacccaggtgcctctatg

SEQ ID NO: 305426 - DNA, 33 bp, Homo sapien
tatatcagcattactagcccaggtgcctctatg

SEQ ID NO: 305427 - DNA, 33 bp, Homo sapien
gatactttgcagttataaaaagaatgatgagtc

SEQ ID NO: 305428 - DNA, 33 bp, Homo sapien
gatactttgcagttatgaaaagaatgatgagtc

SEQ ID NO: 305429 - DNA, 33 bp, Homo sapien
atttaattagttctaacgttgatatcagaatgt

SEQ ID NO: 305430 - DNA, 33 bp, Homo sapien
atttaattagttctaatgttgatatcagaatgt

SEQ ID NO: 305431 - DNA, 33 bp, Homo sapien
tgaaactgctctacgacatcaggacaaataagt

SEQ ID NO: 305432 - DNA, 33 bp, Homo sapien
tgaaactgctctacgatatcaggacaaataagt

SEQ ID NO: 305433 - DNA, 33 bp, Homo sapien
ccctccaagcttttggcatctccaatgtctact

SEQ ID NO: 305434 - DNA, 33 bp, Homo sapien
ccctccaagcttttggtatctccaatgtctact

SEQ ID NO: 305435 - DNA, 33 bp, Homo sapien
cccactgttgattccactagaaagtaattccct

SEQ ID NO: 305436 - DNA, 33 bp, Homo sapien
cccactgttgattccattagaaagtaattccct

SEQ ID NO: 305437 - DNA, 33 bp, Homo sapien
tttcctgctgggtttgcaacactctgtttgtcc

SEQ ID NO: 305438 - DNA, 33 bp, Homo sapien
tttcctgctgggtttgtaacactctgtttgtcc

SEQ ID NO: 305439 - DNA, 33 bp, Homo sapien
aatctccactcaagataatctaaggctatgtgt

SEQ ID NO: 305440 - DNA, 33 bp, Homo sapien
aatctccactcaagatgatctaaggctatgtgt

SEQ ID NO: 305441 - DNA, 33 bp, Homo sapien
acctggatcactcttcacttctgcaagatatca

SEQ ID NO: 305442 - DNA, 33 bp, Homo sapien
acctggatcactcttctcttctgcaagatatca

SEQ ID NO: 305443 - DNA, 33 bp, Homo sapien
ggacattggatttgagactatgttgattccaag

SEQ ID NO: 305444 - DNA, 33 bp, Homo sapien
ggacattggatttgagcctatgttgattccaag

SEQ ID NO: 305445 - DNA, 33 bp, Homo sapien
aagggatcccaggtccacttgagaaaggaccca

SEQ ID NO: 305446 - DNA, 33 bp, Homo sapien
aagggatcccaggtccgcttgagaaaggaccca

SEQ ID NO: 305447 - DNA, 33 bp, Homo sapien
acattcacataactgaaaggagaaatagacaat

SEQ ID NO: 305448 - DNA, 33 bp, Homo sapien
acattcacataactgacaggagaaatagacaat

SEQ ID NO: 305449 - DNA, 33 bp, Homo sapien
tgtgagatagtagaaactgaagtaaactggaaa

SEQ ID NO: 305450 - DNA, 33 bp, Homo sapien
tgtgagatagtagaaattgaagtaaactggaaa

SEQ ID NO: 305451 - DNA, 33 bp, Homo sapien
aagtcacatagctaagaagatggcatttctttt

SEQ ID NO: 305452 - DNA, 33 bp, Homo sapien
aagtcacatagctaaggagatggcatttctttt

SEQ ID NO: 305453 - DNA, 33 bp, Homo sapien
gttaccaaatttagcactactcagtaagtggtt

SEQ ID NO: 305454 - DNA, 33 bp, Homo sapien
gttaccaaatttagcattactcagtaagtggtt

SEQ ID NO: 305455 - DNA, 33 bp, Homo sapien
ggggccaaaaccattacaaaaggagagtcagat

SEQ ID NO: 305456 - DNA, 33 bp, Homo sapien
ggggccaaaaccattagaaaaggagagtcagat

SEQ ID NO: 305457 - DNA, 33 bp, Homo sapien
catgaggccattgaaccgcccagctaggtggtg

SEQ ID NO: 305458 - DNA, 33 bp, Homo sapien
catgaggccattgaactgcccagctaggtggtg

SEQ ID NO: 305459 - DNA, 33 bp, Homo sapien
agaaggagatcgcttacgtgtggtttccttgtg

SEQ ID NO: 305460 - DNA, 33 bp, Homo sapien
agaaggagatcgcttaggtgtggtttccttgtg

SEQ ID NO: 305461 - DNA, 33 bp, Homo sapien
aaactagacacaaaacacataacgtaaatgaag

SEQ ID NO: 305462 - DNA, 33 bp, Homo sapien
aaactagacacaaaacgcataacgtaaatgaag

SEQ ID NO: 305463 - DNA, 33 bp, Homo sapien
tattattatgccaaaacagtatggagtgagagg

SEQ ID NO: 305464 - DNA, 33 bp, Homo sapien
tattattatgccaaaatagtatggagtgagagg

SEQ ID NO: 305465 - DNA, 33 bp, Homo sapien
cttattaattctaatacgtttgtgaatggtgtt

SEQ ID NO: 305466 - DNA, 33 bp, Homo sapien
cttattaattctaatatgtttgtgaatggtgtt

SEQ ID NO: 305467 - DNA, 33 bp, Homo sapien
aatcagcataaagaaactccttactctcataaa

SEQ ID NO: 305468 - DNA, 33 bp, Homo sapien
aatcagcataaagaaattccttactctcataaa

SEQ ID NO: 305469 - DNA, 33 bp, Homo sapien
cataaatactcatcaaatcttttataactgtgc

SEQ ID NO: 305470 - DNA, 33 bp, Homo sapien
cataaatactcatcaattcttttataactgtgc

SEQ ID NO: 305471 - DNA, 33 bp, Homo sapien
cacacttgtatctgccacaaaagcctcacattg

SEQ ID NO: 305472 - DNA, 33 bp, Homo sapien
cacacttgtatctgccgcaaaagcctcacattg

SEQ ID NO: 305473 - DNA, 33 bp, Homo sapien
tagccacttggataaacgcttggataacaataa

SEQ ID NO: 305474 - DNA, 33 bp, Homo sapien
tagccacttggataaatgcttggataacaataa

SEQ ID NO: 305475 - DNA, 33 bp, Homo sapien
aatacaagcactccaaacaaacaattaaatcct

SEQ ID NO: 305476 - DNA, 33 bp, Homo sapien
aatacaagcactccaagcaaacaattaaatcct

SEQ ID NO: 305477 - DNA, 33 bp, Homo sapien
taccactatttccctgaatacctagtgcaattt

SEQ ID NO: 305478 - DNA, 33 bp, Homo sapien
taccactatttccctgcatacctagtgcaattt

SEQ ID NO: 305479 - DNA, 33 bp, Homo sapien
caataaaatatagtgacaaaatagaaacatggg

SEQ ID NO: 305480 - DNA, 33 bp, Homo sapien
caataaaatatagtgagaaaatagaaacatggg

SEQ ID NO: 305481 - DNA, 33 bp, Homo sapien
ttttagtttgatccaaattggacttgcaaagac

SEQ ID NO: 305482 - DNA, 33 bp, Homo sapien
ttttagtttgatccaagttggacttgcaaagac

SEQ ID NO: 305483 - DNA, 33 bp, Homo sapien
ggaaaacgtcacaatacgagactcagaggcatg

SEQ ID NO: 305484 - DNA, 33 bp, Homo sapien
ggaaaacgtcacaatatgagactcagaggcatg

SEQ ID NO: 305485 - DNA, 33 bp, Homo sapien
ctgtgtgccagtccaaaatcatttatttattta

SEQ ID NO: 305486 - DNA, 33 bp, Homo sapien
ctgtgtgccagtccaagatcatttatttattta

SEQ ID NO: 305487 - DNA, 33 bp, Homo sapien
cttgtttagctgcaaaatcttcatgagtgggca

SEQ ID NO: 305488 - DNA, 33 bp, Homo sapien
cttgtttagctgcaaagtcttcatgagtgggca

SEQ ID NO: 305489 - DNA, 33 bp, Homo sapien
atgtaattaaagttgacgatgtctaaaattctg

SEQ ID NO: 305490 - DNA, 33 bp, Homo sapien
atgtaattaaagttgatgatgtctaaaattctg

SEQ ID NO: 305491 - DNA, 33 bp, Homo sapien
caattttctggaatgacattaagttcttattaa

SEQ ID NO: 305492 - DNA, 33 bp, Homo sapien
caattttctggaatgatattaagttcttattaa

SEQ ID NO: 305493 - DNA, 33 bp, Homo sapien
ggatagccatcagatcactacgcaaatctaaca

SEQ ID NO: 305494 - DNA, 33 bp, Homo sapien
ggatagccatcagatcgctacgcaaatctaaca

SEQ ID NO: 305495 - DNA, 33 bp, Homo sapien
atgatgaccatgtaaaatcttgctccctggagg

SEQ ID NO: 305496 - DNA, 33 bp, Homo sapien
atgatgaccatgtaaagtcttgctccctggagg

SEQ ID NO: 305497 - DNA, 33 bp, Homo sapien
accaagtttgctgctaactcagaaagtactggg

SEQ ID NO: 305498 - DNA, 33 bp, Homo sapien
accaagtttgctgctagctcagaaagtactggg

SEQ ID NO: 305499 - DNA, 33 bp, Homo sapien
cacttggatacttaaccgagataggcaaaatgc

SEQ ID NO: 305500 - DNA, 33 bp, Homo sapien
cacttggatacttaactgagataggcaaaatgc

SEQ ID NO: 305501 - DNA, 33 bp, Homo sapien
taaatacagagtttgcacttagccaataacaca

SEQ ID NO: 305502 - DNA, 33 bp, Homo sapien
taaatacagagtttgcgcttagccaataacaca

SEQ ID NO: 305503 - DNA, 33 bp, Homo sapien
ttttagcatctttataactgcaaggggattaaa

SEQ ID NO: 305504 - DNA, 33 bp, Homo sapien
ttttagcatctttatacctgcaaggggattaaa

SEQ ID NO: 305505 - DNA, 33 bp, Homo sapien
atcataggatcatgtagattttcctacagtcaa

SEQ ID NO: 305506 - DNA, 33 bp, Homo sapien
atcataggatcatgtatattttcctacagtcaa

SEQ ID NO: 305507 - DNA, 33 bp, Homo sapien
cacagtgcccttttgaacttgaaaagaagagga

SEQ ID NO: 305508 - DNA, 33 bp, Homo sapien
cacagtgcccttttgagcttgaaaagaagagga

SEQ ID NO: 305509 - DNA, 33 bp, Homo sapien
tccctgattccctgacacatattttaccatgct

SEQ ID NO: 305510 - DNA, 33 bp, Homo sapien
tccctgattccctgacgcatattttaccatgct

SEQ ID NO: 305511 - DNA, 33 bp, Homo sapien
cttcttaagtggagcacggttgtattctatgac

SEQ ID NO: 305512 - DNA, 33 bp, Homo sapien
cttcttaagtggagcatggttgtattctatgac

SEQ ID NO: 305513 - DNA, 33 bp, Homo sapien
agaggaaactcattgactatacaggagaccaca

SEQ ID NO: 305514 - DNA, 33 bp, Homo sapien
agaggaaactcattgattatacaggagaccaca

SEQ ID NO: 305515 - DNA, 33 bp, Homo sapien
cccacgcacatttctcacatggaacagataccc

SEQ ID NO: 305516 - DNA, 33 bp, Homo sapien
cccacgcacatttctcgcatggaacagataccc

SEQ ID NO: 305517 - DNA, 33 bp, Homo sapien
aaagaatcactttcacagaaaatccttcttggc

SEQ ID NO: 305518 - DNA, 33 bp, Homo sapien
aaagaatcactttcacggaaaatccttcttggc

SEQ ID NO: 305519 - DNA, 33 bp, Homo sapien
atgaccatgaaaaatcaataaggaagaacttcc

SEQ ID NO: 305520 - DNA, 33 bp, Homo sapien
atgaccatgaaaaatcgataaggaagaacttcc

SEQ ID NO: 305521 - DNA, 33 bp, Homo sapien
tttttttcctatcagaataatttgagcaaggaa

SEQ ID NO: 305522 - DNA, 33 bp, Homo sapien
tttttttcctatcagattaatttgagcaaggaa

SEQ ID NO: 305523 - DNA, 33 bp, Homo sapien
atacataacatacataccgttttgacctttagc

SEQ ID NO: 305524 - DNA, 33 bp, Homo sapien
atacataacatacatatcgttttgacctttagc

SEQ ID NO: 305525 - DNA, 33 bp, Homo sapien
aaagtaatcagagctcagacttaatgtggaaac

SEQ ID NO: 305526 - DNA, 33 bp, Homo sapien
aaagtaatcagagctcggacttaatgtggaaac

SEQ ID NO: 305527 - DNA, 33 bp, Homo sapien
tcttgcaaaaatgataaaaataaggcactaaca

SEQ ID NO: 305528 - DNA, 33 bp, Homo sapien
tcttgcaaaaatgatacaaataaggcactaaca

SEQ ID NO: 305529 - DNA, 33 bp, Homo sapien
accagagacatgcagacaagttgctcctacatt

SEQ ID NO: 305530 - DNA, 33 bp, Homo sapien
accagagacatgcagataagttgctcctacatt

SEQ ID NO: 305531 - DNA, 33 bp, Homo sapien
tgcacaattgagcaaacatatcctaatgcagaa

SEQ ID NO: 305532 - DNA, 33 bp, Homo sapien
tgcacaattgagcaaatatatcctaatgcagaa

SEQ ID NO: 305533 - DNA, 33 bp, Homo sapien
atgagtgaaggtggccaaggagatggagacatg

SEQ ID NO: 305534 - DNA, 33 bp, Homo sapien
atgagtgaaggtggccgaggagatggagacatg

SEQ ID NO: 305535 - DNA, 33 bp, Homo sapien
gacttgtttggtaaagaattggcagagtatcat

SEQ ID NO: 305536 - DNA, 33 bp, Homo sapien
gacttgtttggtaaagtattggcagagtatcat

SEQ ID NO: 305537 - DNA, 33 bp, Homo sapien
aagtggtctggttaagaaaataagattgtggag

SEQ ID NO: 305538 - DNA, 33 bp, Homo sapien
aagtggtctggttaagtaaataagattgtggag

SEQ ID NO: 305539 - DNA, 33 bp, Homo sapien
aattacggtgaagacaagaaaaatgggaaagag

SEQ ID NO: 305540 - DNA, 33 bp, Homo sapien
aattacggtgaagacaggaaaaatgggaaagag

SEQ ID NO: 305541 - DNA, 33 bp, Homo sapien
gcattttccaaacagacgctgattgtttatact

SEQ ID NO: 305542 - DNA, 33 bp, Homo sapien
gcattttccaaacagaggctgattgtttatact

SEQ ID NO: 305543 - DNA, 33 bp, Homo sapien
tatattacagcatctacgagtcgataaatttat

SEQ ID NO: 305544 - DNA, 33 bp, Homo sapien
tatattacagcatctatgagtcgataaatttat

SEQ ID NO: 305545 - DNA, 33 bp, Homo sapien
aagttttctccacacacgtatgaacacaaaaaa

SEQ ID NO: 305546 - DNA, 33 bp, Homo sapien
aagttttctccacacaggtatgaacacaaaaaa

SEQ ID NO: 305547 - DNA, 33 bp, Homo sapien
caagtagagtccctataaattttattgttcaaa

SEQ ID NO: 305548 - DNA, 33 bp, Homo sapien
caagtagagtccctatgaattttattgttcaaa

SEQ ID NO: 305549 - DNA, 33 bp, Homo sapien
acatattgaacccgtaagaatgcttaaggagaa

SEQ ID NO: 305550 - DNA, 33 bp, Homo sapien
acatattgaacccgtaggaatgcttaaggagaa

SEQ ID NO: 305551 - DNA, 33 bp, Homo sapien
ttcttggatcatttggaaatgtgaaagatctac

SEQ ID NO: 305552 - DNA, 33 bp, Homo sapien
ttcttggatcatttggcaatgtgaaagatctac

SEQ ID NO: 305553 - DNA, 33 bp, Homo sapien
tgctgagataggtcaccatgaagcagaagaatg

SEQ ID NO: 305554 - DNA, 33 bp, Homo sapien
tgctgagataggtcactatgaagcagaagaatg

SEQ ID NO: 305555 - DNA, 33 bp, Homo sapien
gaggatcgtaaaaataactatcaagtactatgc

SEQ ID NO: 305556 - DNA, 33 bp, Homo sapien
gaggatcgtaaaaatacctatcaagtactatgc

SEQ ID NO: 305557 - DNA, 33 bp, Homo sapien
tcaagcaaaaactgaccaacaacttaacaagac

SEQ ID NO: 305558 - DNA, 33 bp, Homo sapien
tcaagcaaaaactgactaacaacttaacaagac

SEQ ID NO: 305559 - DNA, 33 bp, Homo sapien
tggcatccttcaatcactgaggactatttagaa

SEQ ID NO: 305560 - DNA, 33 bp, Homo sapien
tggcatccttcaatcattgaggactatttagaa

SEQ ID NO: 305561 - DNA, 33 bp, Homo sapien
tttgcctatgtatgtaaccttccagaaaatgta

SEQ ID NO: 305562 - DNA, 33 bp, Homo sapien
tttgcctatgtatgtatccttccagaaaatgta

SEQ ID NO: 305563 - DNA, 33 bp, Homo sapien
gagagcttttggtatgaattagtccaactgggc

SEQ ID NO: 305564 - DNA, 33 bp, Homo sapien
gagagcttttggtatggattagtccaactgggc

SEQ ID NO: 305565 - DNA, 33 bp, Homo sapien
tttattgagacctgatcagctttattgagccac

SEQ ID NO: 305566 - DNA, 33 bp, Homo sapien
tttattgagacctgattagctttattgagccac

SEQ ID NO: 305567 - DNA, 33 bp, Homo sapien
actctcggggtctggacaatgttgttcatatgt

SEQ ID NO: 305568 - DNA, 33 bp, Homo sapien
actctcggggtctggagaatgttgttcatatgt

SEQ ID NO: 305569 - DNA, 33 bp, Homo sapien
aaagagtttgttttctcacaactgtaaagttga

SEQ ID NO: 305570 - DNA, 33 bp, Homo sapien
aaagagtttgttttctgacaactgtaaagttga

SEQ ID NO: 305571 - DNA, 33 bp, Homo sapien
gtaacaatctcttccacggagtgttagtgtcac

SEQ ID NO: 305572 - DNA, 33 bp, Homo sapien
gtaacaatctcttccatggagtgttagtgtcac

SEQ ID NO: 305573 - DNA, 33 bp, Homo sapien
aggaagccactggcacaatacattgtatacttt

SEQ ID NO: 305574 - DNA, 33 bp, Homo sapien
aggaagccactggcaccatacattgtatacttt

SEQ ID NO: 305575 - DNA, 33 bp, Homo sapien
aagaaagcaactgaggacatagcactgcgcaga

SEQ ID NO: 305576 - DNA, 33 bp, Homo sapien
aagaaagcaactgaggccatagcactgcgcaga

SEQ ID NO: 305577 - DNA, 33 bp, Homo sapien
aaggtacttggagaaccggcagctgtggtgaca

SEQ ID NO: 305578 - DNA, 33 bp, Homo sapien
aaggtacttggagaactggcagctgtggtgaca

SEQ ID NO: 305579 - DNA, 33 bp, Homo sapien
ctaaattgaaatatgaaccttgccacttacttt

SEQ ID NO: 305580 - DNA, 33 bp, Homo sapien
ctaaattgaaatatgacccttgccacttacttt

SEQ ID NO: 305581 - DNA, 33 bp, Homo sapien
gttgtattttaaaaggcaatgtcatgcagcagt

SEQ ID NO: 305582 - DNA, 33 bp, Homo sapien
gttgtattttaaaagggaatgtcatgcagcagt

SEQ ID NO: 305583 - DNA, 33 bp, Homo sapien
ttattgaaattagccaactataccattaagtgt

SEQ ID NO: 305584 - DNA, 33 bp, Homo sapien
ttattgaaattagccagctataccattaagtgt

SEQ ID NO: 305585 - DNA, 33 bp, Homo sapien
ccagacccaggaccaaaaacaggacataatttt

SEQ ID NO: 305586 - DNA, 33 bp, Homo sapien
ccagacccaggaccaagaacaggacataatttt

SEQ ID NO: 305587 - DNA, 33 bp, Homo sapien
aaccttatgctctaaacgtaaatggttctttca

SEQ ID NO: 305588 - DNA, 33 bp, Homo sapien
aaccttatgctctaaatgtaaatggttctttca

SEQ ID NO: 305589 - DNA, 33 bp, Homo sapien
taagaaaaatttattaacattgcatcattaaac

SEQ ID NO: 305590 - DNA, 33 bp, Homo sapien
taagaaaaatttattatcattgcatcattaaac

SEQ ID NO: 305591 - DNA, 33 bp, Homo sapien
cattagcatcagacagaatccttaggaccaatc

SEQ ID NO: 305592 - DNA, 33 bp, Homo sapien
cattagcatcagacaggatccttaggaccaatc

SEQ ID NO: 305593 - DNA, 33 bp, Homo sapien
gattgcaaaatacaatcatcgcttgccaatagg

SEQ ID NO: 305594 - DNA, 33 bp, Homo sapien
gattgcaaaatacaattatcgcttgccaatagg

SEQ ID NO: 305595 - DNA, 33 bp, Homo sapien
tctttactgaggtcacaacatctcaattttgtg

SEQ ID NO: 305596 - DNA, 33 bp, Homo sapien
tctttactgaggtcacgacatctcaattttgtg

SEQ ID NO: 305597 - DNA, 33 bp, Homo sapien
agtaaatctgaccgaaaattttgatcacctgct

SEQ ID NO: 305598 - DNA, 33 bp, Homo sapien
agtaaatctgaccgaatattttgatcacctgct

SEQ ID NO: 305599 - DNA, 33 bp, Homo sapien
gaatttgaaacaacataactcttcttttataac

SEQ ID NO: 305600 - DNA, 33 bp, Homo sapien
gaatttgaaacaacatgactcttcttttataac

SEQ ID NO: 305601 - DNA, 33 bp, Homo sapien
gcatatacacaggaagcagaaatagtcaaatgg

SEQ ID NO: 305602 - DNA, 33 bp, Homo sapien
gcatatacacaggaaggagaaatagtcaaatgg

SEQ ID NO: 305603 - DNA, 33 bp, Homo sapien
actaaaagttctacataactctcgaatactaat

SEQ ID NO: 305604 - DNA, 33 bp, Homo sapien
actaaaagttctacattactctcgaatactaat

SEQ ID NO: 305605 - DNA, 33 bp, Homo sapien
actgggagggacctcaatgaagaagcagaaagg

SEQ ID NO: 305606 - DNA, 33 bp, Homo sapien
actgggagggacctcagtgaagaagcagaaagg

SEQ ID NO: 305607 - DNA, 33 bp, Homo sapien
atctggaaattgaggaagtcttatggtggagaa

SEQ ID NO: 305608 - DNA, 33 bp, Homo sapien
atctggaaattgaggatgtcttatggtggagaa

SEQ ID NO: 305609 - DNA, 33 bp, Homo sapien
gagaaattagatgagaagaaacagggttaaggt

SEQ ID NO: 305610 - DNA, 33 bp, Homo sapien
gagaaattagatgagatgaaacagggttaaggt

SEQ ID NO: 305611 - DNA, 33 bp, Homo sapien
aattgaaacaagagaagtagccacaacaaactt

SEQ ID NO: 305612 - DNA, 33 bp, Homo sapien
aattgaaacaagagaattagccacaacaaactt

SEQ ID NO: 305613 - DNA, 33 bp, Homo sapien
ataacccaataaaaaacctgctaacaaaagtgc

SEQ ID NO: 305614 - DNA, 33 bp, Homo sapien
ataacccaataaaaaatctgctaacaaaagtgc

SEQ ID NO: 305615 - DNA, 33 bp, Homo sapien
tgagtttctttcaaaacctcaaggagaacaggg

SEQ ID NO: 305616 - DNA, 33 bp, Homo sapien
tgagtttctttcaaaatctcaaggagaacaggg

SEQ ID NO: 305617 - DNA, 33 bp, Homo sapien
ctagaaaatagatagcactaaaattattggtgg

SEQ ID NO: 305618 - DNA, 33 bp, Homo sapien
ctagaaaatagatagcgctaaaattattggtgg

SEQ ID NO: 305619 - DNA, 33 bp, Homo sapien
atttagatcaggaagaaaaagctgatcattttc

SEQ ID NO: 305620 - DNA, 33 bp, Homo sapien
atttagatcaggaagagaaagctgatcattttc

SEQ ID NO: 305621 - DNA, 33 bp, Homo sapien
ggaaggataatttggacgtgtgcaataactgtg

SEQ ID NO: 305622 - DNA, 33 bp, Homo sapien
ggaaggataatttggatgtgtgcaataactgtg

SEQ ID NO: 305623 - DNA, 33 bp, Homo sapien
ttattttcaaagcagcaattcctgaaggctatt

SEQ ID NO: 305624 - DNA, 33 bp, Homo sapien
ttattttcaaagcagctattcctgaaggctatt

SEQ ID NO: 305625 - DNA, 33 bp, Homo sapien
atatgaataacacaataaatgcagatatagtct

SEQ ID NO: 305626 - DNA, 33 bp, Homo sapien
atatgaataacacaatcaatgcagatatagtct

SEQ ID NO: 305627 - DNA, 33 bp, Homo sapien
tagactactgagagaacagagaaaaacaagaac

SEQ ID NO: 305628 - DNA, 33 bp, Homo sapien
tagactactgagagaatagagaaaaacaagaac

SEQ ID NO: 305629 - DNA, 33 bp, Homo sapien
tgttataaaactaaaaaactgtacagatgacca

SEQ ID NO: 305630 - DNA, 33 bp, Homo sapien
tgttataaaactaaaacactgtacagatgacca

SEQ ID NO: 305631 - DNA, 33 bp, Homo sapien
tattctacgataccaacacaggttttcaatgtt

SEQ ID NO: 305632 - DNA, 33 bp, Homo sapien
tattctacgataccaagacaggttttcaatgtt

SEQ ID NO: 305633 - DNA, 33 bp, Homo sapien; identical to SEQ ID NO: 305631

SEQ ID NO: 305634 - DNA, 33 bp, Homo sapien; identical to SEQ ID NO: 305632

SEQ ID NO: 305635 - DNA, 33 bp, Homo sapien
gcttttcaagggttagaatagaaacaatgacct

SEQ ID NO: 305636 - DNA, 33 bp, Homo sapien
gcttttcaagggttaggatagaaacaatgacct

SEQ ID NO: 305637 - DNA, 33 bp, Homo sapien
ttgtccttattctaccgcaatcacttttattaa

SEQ ID NO: 305638 - DNA, 33 bp, Homo sapien
ttgtccttattctacctcaatcacttttattaa

SEQ ID NO: 305639 - DNA, 33 bp, Homo sapien
taaatctgcttcaaaaatgaatgaattgtttga

SEQ ID NO: 305640 - DNA, 33 bp, Homo sapien
taaatctgcttcaaaagtgaatgaattgtttga

SEQ ID NO: 305641 - DNA, 33 bp, Homo sapien
agatgtaactttcaggaaatagtctctagcatg

SEQ ID NO: 305642 - DNA, 33 bp, Homo sapien
agatgtaactttcagggaatagtctctagcatg

SEQ ID NO: 305643 - DNA, 33 bp, Homo sapien
aaagcttgatcattaaaaaaacggcctaatttc

SEQ ID NO: 305644 - DNA, 33 bp, Homo sapien
aaagcttgatcattaataaaacggcctaatttc

SEQ ID NO: 305645 - DNA, 33 bp, Homo sapien
cacagggcttcaaaaacgtctatgctatccttc

SEQ ID NO: 305646 - DNA, 33 bp, Homo sapien
cacagggcttcaaaaatgtctatgctatccttc

SEQ ID NO: 305647 - DNA, 33 bp, Homo sapien
ctatctgctaaatgcacgaattaattaggttaa

SEQ ID NO: 305648 - DNA, 33 bp, Homo sapien
ctatctgctaaatgcatgaattaattaggttaa

SEQ ID NO: 305649 - DNA, 33 bp, Homo sapien
ctccaccagggctttaactccttgacggaaacg

SEQ ID NO: 305650 - DNA, 33 bp, Homo sapien
ctccaccagggctttacctccttgacggaaacg

SEQ ID NO: 305651 - DNA, 33 bp, Homo sapien
ctttaaaattaacgtaactcacatgagagctat

SEQ ID NO: 305652 - DNA, 33 bp, Homo sapien
ctttaaaattaacgtatctcacatgagagctat

SEQ ID NO: 305653 - DNA, 33 bp, Homo sapien
ccatcagatctcgtgaaaacagcatggaacaaa

SEQ ID NO: 305654 - DNA, 33 bp, Homo sapien
ccatcagatctcgtgagaacagcatggaacaaa

SEQ ID NO: 305655 - DNA, 33 bp, Homo sapien
aatacaaatgaatgtcacaagagtaacactagg

SEQ ID NO: 305656 - DNA, 33 bp, Homo sapien
aatacaaatgaatgtcgcaagagtaacactagg

SEQ ID NO: 305657 - DNA, 33 bp, Homo sapien
cttacatagtgagatacacagtctacaaatcac

SEQ ID NO: 305658 - DNA, 33 bp, Homo sapien
cttacatagtgagatatacagtctacaaatcac

SEQ ID NO: 305659 - DNA, 33 bp, Homo sapien
ctcttttcataagccagagatttggattaaaac

SEQ ID NO: 305660 - DNA, 33 bp, Homo sapien
ctcttttcataagccatagatttggattaaaac

SEQ ID NO: 305661 - DNA, 33 bp, Homo sapien
actcatttttccagacagccaattaagttttgt

SEQ ID NO: 305662 - DNA, 33 bp, Homo sapien
actcatttttccagactgccaattaagttttgt

SEQ ID NO: 305663 - DNA, 33 bp, Homo sapien
tccatgggacatataggatttgaaggtactggc

SEQ ID NO: 305664 - DNA, 33 bp, Homo sapien
tccatgggacatatagtatttgaaggtactggc

SEQ ID NO: 305665 - DNA, 33 bp, Homo sapien
atacacttaaaagaaaacttagcattctgcatt

SEQ ID NO: 305666 - DNA, 33 bp, Homo sapien
atacacttaaaagaaaccttagcattctgcatt

SEQ ID NO: 305667 - DNA, 33 bp, Homo sapien
tgcacggcctacatgtaaaagagtagtatttgt

SEQ ID NO: 305668 - DNA, 33 bp, Homo sapien
tgcacggcctacatgtgaaagagtagtatttgt

SEQ ID NO: 305669 - DNA, 33 bp, Homo sapien
aatatcctgaatgaacaaaaaagtagatgacag

SEQ ID NO: 305670 - DNA, 33 bp, Homo sapien
aatatcctgaatgaacgaaaaagtagatgacag

SEQ ID NO: 305671 - DNA, 33 bp, Homo sapien
aactctaagtggataccaaattgctagatttaa

SEQ ID NO: 305672 - DNA, 33 bp, Homo sapien
aactctaagtggatacgaaattgctagatttaa

SEQ ID NO: 305673 - DNA, 33 bp, Homo sapien
cttgaggtatcctctggaatatcttaactgagc

SEQ ID NO: 305674 - DNA, 33 bp, Homo sapien
cttgaggtatcctctgtaatatcttaactgagc

SEQ ID NO: 305675 - DNA, 33 bp, Homo sapien
ggtcagtttccttgaagtgagctgtcgaaaggc

SEQ ID NO: 305676 - DNA, 33 bp, Homo sapien
ggtcagtttccttgaattgagctgtcgaaaggc

SEQ ID NO: 305677 - DNA, 33 bp, Homo sapien
gtatcattcaaccaaagatccactaagctatgt

SEQ ID NO: 305678 - DNA, 33 bp, Homo sapien
gtatcattcaaccaaatatccactaagctatgt

SEQ ID NO: 305679 - DNA, 33 bp, Homo sapien
aagatatggacccaagaaagctcatagtgatct

SEQ ID NO: 305680 - DNA, 33 bp, Homo sapien
aagatatggacccaaggaagctcatagtgatct

SEQ ID NO: 305681 - DNA, 33 bp, Homo sapien
gacattaatcacacaggatgcatagaggaataa

SEQ ID NO: 305682 - DNA, 33 bp, Homo sapien
gacattaatcacacagtatgcatagaggaataa

SEQ ID NO: 305683 - DNA, 33 bp, Homo sapien
tgggaatgtagaattacgtaaactctttggaaa

SEQ ID NO: 305684 - DNA, 33 bp, Homo sapien
tgggaatgtagaattatgtaaactctttggaaa

SEQ ID NO: 305685 - DNA, 33 bp, Homo sapien
gccaataactacatgaaactttactcaacatca

SEQ ID NO: 305686 - DNA, 33 bp, Homo sapien
gccaataactacatgatactttactcaacatca

SEQ ID NO: 305687 - DNA, 33 bp, Homo sapien
gttagcaccttcatgaaaagtaaattgacaata

SEQ ID NO: 305688 - DNA, 33 bp, Homo sapien
gttagcaccttcatgagaagtaaattgacaata

SEQ ID NO: 305689 - DNA, 33 bp, Homo sapien
aaatgtgttctctggacggaaaaatttaggctc

SEQ ID NO: 305690 - DNA, 33 bp, Homo sapien
aaatgtgttctctggatggaaaaatttaggctc

SEQ ID NO: 305691 - DNA, 33 bp, Homo sapien
accacccatttctagacgatgcatacctaaggt

SEQ ID NO: 305692 - DNA, 33 bp, Homo sapien
accacccatttctagatgatgcatacctaaggt

SEQ ID NO: 305693 - DNA, 33 bp, Homo sapien
tgtacaaacctagagtaaaacctgatgtaaatt

SEQ ID NO: 305694 - DNA, 33 bp, Homo sapien
tgtacaaacctagagtgaaacctgatgtaaatt

SEQ ID NO: 305695 - DNA, 33 bp, Homo sapien
agatcttgctatgaaaaaataagtttgacaaaa

SEQ ID NO: 305696 - DNA, 33 bp, Homo sapien
agatcttgctatgaaagaataagtttgacaaaa

SEQ ID NO: 305697 - DNA, 33 bp, Homo sapien
gtgggaaataatcaccaaaaagtatgcttgtaa

SEQ ID NO: 305698 - DNA, 33 bp, Homo sapien
gtgggaaataatcaccgaaaagtatgcttgtaa

SEQ ID NO: 305699 - DNA, 33 bp, Homo sapien
atgatctgcaagcctacataattttgatttcag

SEQ ID NO: 305700 - DNA, 33 bp, Homo sapien
atgatctgcaagcctatataattttgatttcag

SEQ ID NO: 305701 - DNA, 33 bp, Homo sapien
tacattttgccaaaaaatcattcatagagttat

SEQ ID NO: 305702 - DNA, 33 bp, Homo sapien
tacattttgccaaaaagtcattcatagagttat

SEQ ID NO: 305703 - DNA, 33 bp, Homo sapien
cttttcacttacaacagtcattaactgcaaata

SEQ ID NO: 305704 - DNA, 33 bp, Homo sapien
cttttcacttacaacattcattaactgcaaata

SEQ ID NO: 305705 - DNA, 33 bp, Homo sapien
ccatctgtaagctcaactcattcttctatataa

SEQ ID NO: 305706 - DNA, 33 bp, Homo sapien
ccatctgtaagctcaattcattcttctatataa

SEQ ID NO: 305707 - DNA, 33 bp, Homo sapien
gtatgtaaatactctcaatatgatctcaacatc

SEQ ID NO: 305708 - DNA, 33 bp, Homo sapien
gtatgtaaatactctccatatgatctcaacatc

SEQ ID NO: 305709 - DNA, 33 bp, Homo sapien
attgcttggcatttagccgttccaggatgtcaa

SEQ ID NO: 305710 - DNA, 33 bp, Homo sapien
attgcttggcatttagtcgttccaggatgtcaa

SEQ ID NO: 305711 - DNA, 33 bp, Homo sapien
catatactctatgagcaaatctcagctggacat

SEQ ID NO: 305712 - DNA, 33 bp, Homo sapien
catatactctatgagcgaatctcagctggacat

SEQ ID NO: 305713 - DNA, 33 bp, Homo sapien
acacatttgcaatcctaaaatcgttccctttgg

SEQ ID NO: 305714 - DNA, 33 bp, Homo sapien
acacatttgcaatcctcaaatcgttccctttgg

SEQ ID NO: 305715 - DNA, 33 bp, Homo sapien
aaataaccactatatacattaacgctgttggag

SEQ ID NO: 305716 - DNA, 33 bp, Homo sapien
aaataaccactatatatattaacgctgttggag

SEQ ID NO: 305717 - DNA, 33 bp, Homo sapien
gtataggtaactggaccctctatgcattaaatg

SEQ ID NO: 305718 - DNA, 33 bp, Homo sapien
gtataggtaactggactctctatgcattaaatg

SEQ ID NO: 305719 - DNA, 33 bp, Homo sapien
ttttcagtaactgtgacaattatgtaccttgct

SEQ ID NO: 305720 - DNA, 33 bp, Homo sapien
ttttcagtaactgtgataattatgtaccttgct

SEQ ID NO: 305721 - DNA, 33 bp, Homo sapien
tatagaaaaaaaagaacatcaagcaatctgata

SEQ ID NO: 305722 - DNA, 33 bp, Homo sapien
tatagaaaaaaaagaatatcaagcaatctgata

SEQ ID NO: 305723 - DNA, 33 bp, Homo sapien
ttccattattcaccaacctgcttgatgggaagt

SEQ ID NO: 305724 - DNA, 33 bp, Homo sapien
ttccattattcaccaatctgcttgatgggaagt

SEQ ID NO: 305725 - DNA, 33 bp, Homo sapien
tggatactgtaattaacgggcttggtgatataa

SEQ ID NO: 305726 - DNA, 33 bp, Homo sapien
tggatactgtaattaatgggcttggtgatataa

SEQ ID NO: 305727 - DNA, 33 bp, Homo sapien
tcattgagctgagaaaagtttacaagaatctca

SEQ ID NO: 305728 - DNA, 33 bp, Homo sapien
tcattgagctgagaaaggtttacaagaatctca

SEQ ID NO: 305729 - DNA, 33 bp, Homo sapien
gaatagataacacttaaaattcccacatcaggt

SEQ ID NO: 305730 - DNA, 33 bp, Homo sapien
gaatagataacacttacaattcccacatcaggt

SEQ ID NO: 305731 - DNA, 33 bp, Homo sapien
ccttttataacatcaaatatggtccagaattca

SEQ ID NO: 305732 - DNA, 33 bp, Homo sapien
ccttttataacatcaagtatggtccagaattca

SEQ ID NO: 305733 - DNA, 33 bp, Homo sapien
attgaaattgagacaacaaatagtatcaacagg

SEQ ID NO: 305734 - DNA, 33 bp, Homo sapien
attgaaattgagacaagaaatagtatcaacagg

SEQ ID NO: 305735 - DNA, 33 bp, Homo sapien
ggaacatataggtgaactagccctgtgggagga

SEQ ID NO: 305736 - DNA, 33 bp, Homo sapien
ggaacatataggtgaattagccctgtgggagga

SEQ ID NO: 305737 - DNA, 33 bp, Homo sapien
ttccccgactactgcccccagtcatgtgcatca

SEQ ID NO: 305738 - DNA, 33 bp, Homo sapien
ttccccgactactgcctccagtcatgtgcatca

SEQ ID NO: 305739 - DNA, 33 bp, Homo sapien
tggcccacttaggatcaacttttcaggtgttct

SEQ ID NO: 305740 - DNA, 33 bp, Homo sapien
tggcccacttaggatcgacttttcaggtgttct

SEQ ID NO: 305741 - DNA, 33 bp, Homo sapien
gggacacctagattcacaaagttcttagagaat

SEQ ID NO: 305742 - DNA, 33 bp, Homo sapien
gggacacctagattcataaagttcttagagaat

SEQ ID NO: 305743 - DNA, 33 bp, Homo sapien
caagggatatagttagaaggtcagtcagaataa

SEQ ID NO: 305744 - DNA, 33 bp, Homo sapien
caagggatatagttaggaggtcagtcagaataa

SEQ ID NO: 305745 - DNA, 33 bp, Homo sapien
ttttttcaccctagctaacaacctctaaccaaa

SEQ ID NO: 305746 - DNA, 33 bp, Homo sapien
ttttttcaccctagctgacaacctctaaccaaa

SEQ ID NO: 305747 - DNA, 33 bp, Homo sapien
aatacactgcaaactgaatctaggcaataaact

SEQ ID NO: 305748 - DNA, 33 bp, Homo sapien
aatacactgcaaactgtatctaggcaataaact

SEQ ID NO: 305749 - DNA, 33 bp, Homo sapien
acccagaaataaaaatcaggtcactgcatatat

SEQ ID NO: 305750 - DNA, 33 bp, Homo sapien
acccagaaataaaaatgaggtcactgcatatat

SEQ ID NO: 305751 - DNA, 33 bp, Homo sapien
tcttttcacttgtcaaccatacctggaaaaaat

SEQ ID NO: 305752 - DNA, 33 bp, Homo sapien
tcttttcacttgtcaatcatacctggaaaaaat

SEQ ID NO: 305753 - DNA, 33 bp, Homo sapien
ttttacttttctttcaatcacactccagtgatc

SEQ ID NO: 305754 - DNA, 33 bp, Homo sapien
ttttacttttctttcagtcacactccagtgatc

SEQ ID NO: 305755 - DNA, 33 bp, Homo sapien
attaagctagattaagaactgcaatcaataaaa

SEQ ID NO: 305756 - DNA, 33 bp, Homo sapien
attaagctagattaaggactgcaatcaataaaa

SEQ ID NO: 305757 - DNA, 33 bp, Homo sapien
aaccattttgcccccacactttctagccacata

SEQ ID NO: 305758 - DNA, 33 bp, Homo sapien
aaccattttgcccccatactttctagccacata

SEQ ID NO: 305759 - DNA, 33 bp, Homo sapien
ggagtcagtactatcaaagaagtttgttcgaaa

SEQ ID NO: 305760 - DNA, 33 bp, Homo sapien
ggagtcagtactatcagagaagtttgttcgaaa

SEQ ID NO: 305761 - DNA, 33 bp, Homo sapien
catgcatgttactgccccttaggatcttcaagt

SEQ ID NO: 305762 - DNA, 33 bp, Homo sapien
catgcatgttactgccgcttaggatcttcaagt

SEQ ID NO: 305763 - DNA, 33 bp, Homo sapien
tctggttagccctgaccgatacagcagttacag

SEQ ID NO: 305764 - DNA, 33 bp, Homo sapien
tctggttagccctgactgatacagcagttacag

SEQ ID NO: 305765 - DNA, 33 bp, Homo sapien
ggtggctccaattacacggttaagtaaaaatgg

SEQ ID NO: 305766 - DNA, 33 bp, Homo sapien
ggtggctccaattacatggttaagtaaaaatgg

SEQ ID NO: 305767 - DNA, 33 bp, Homo sapien
atagccaaatatcttcaaagtgtgttccaacaa

SEQ ID NO: 305768 - DNA, 33 bp, Homo sapien
atagccaaatatcttccaagtgtgttccaacaa

SEQ ID NO: 305769 - DNA, 33 bp, Homo sapien
gtggtcttgaatctcactctaaaaatacttgat

SEQ ID NO: 305770 - DNA, 33 bp, Homo sapien
gtggtcttgaatctcattctaaaaatacttgat

SEQ ID NO: 305771 - DNA, 33 bp, Homo sapien
ttgttcgtatttcctagcttcctatctttctat

SEQ ID NO: 305772 - DNA, 33 bp, Homo sapien
ttgttcgtatttcctatcttcctatctttctat

SEQ ID NO: 305773 - DNA, 33 bp, Homo sapien
gaaccctgactaatacagaagacattgaagtaa

SEQ ID NO: 305774 - DNA, 33 bp, Homo sapien
gaaccctgactaataccgaagacattgaagtaa

SEQ ID NO: 305775 - DNA, 33 bp, Homo sapien
attttctaaaccttcacgccttctgtttgtaca

SEQ ID NO: 305776 - DNA, 33 bp, Homo sapien
attttctaaaccttcatgccttctgtttgtaca

SEQ ID NO: 305777 - DNA, 33 bp, Homo sapien
tttaccttaactcttccaacaactccactaatc

SEQ ID NO: 305778 - DNA, 33 bp, Homo sapien
tttaccttaactcttctaacaactccactaatc

SEQ ID NO: 305779 - DNA, 33 bp, Homo sapien
acatattttactgtgccacgttttcctcaaact

SEQ ID NO: 305780 - DNA, 33 bp, Homo sapien
acatattttactgtgctacgttttcctcaaact

SEQ ID NO: 305781 - DNA, 33 bp, Homo sapien
atgctactagtgccaaaacatgctgtttaaaat

SEQ ID NO: 305782 - DNA, 33 bp, Homo sapien
atgctactagtgccaatacatgctgtttaaaat

SEQ ID NO: 305783 - DNA, 33 bp, Homo sapien
tgaagtcctgctaaccacttttctactctctgg

SEQ ID NO: 305784 - DNA, 33 bp, Homo sapien
tgaagtcctgctaacctcttttctactctctgg

SEQ ID NO: 305785 - DNA, 33 bp, Homo sapien
aatgaagagaggcataagtaatttaaaggattc

SEQ ID NO: 305786 - DNA, 33 bp, Homo sapien
aatgaagagaggcataggtaatttaaaggattc

SEQ ID NO: 305787 - DNA, 33 bp, Homo sapien
tatttcatgtagttccaaaaaggagaagagata

SEQ ID NO: 305788 - DNA, 33 bp, Homo sapien
tatttcatgtagttccgaaaaggagaagagata

SEQ ID NO: 305789 - DNA, 33 bp, Homo sapien
ttctttgtggtcttcaaagtgaatcttatttca

SEQ ID NO: 305790 - DNA, 33 bp, Homo sapien
ttctttgtggtcttcatagtgaatcttatttca

SEQ ID NO: 305791 - DNA, 33 bp, Homo sapien
tattatctcagtaatgaatgtttttgtgcatac

SEQ ID NO: 305792 - DNA, 33 bp, Homo sapien
tattatctcagtaatgtatgtttttgtgcatac

SEQ ID NO: 305793 - DNA, 33 bp, Homo sapien
atttcatttgattttgaaatagcccaggaaagt

SEQ ID NO: 305794 - DNA, 33 bp, Homo sapien
atttcatttgattttggaatagcccaggaaagt

SEQ ID NO: 305795 - DNA, 33 bp, Homo sapien
tcaagctgaaagaagaagaccatgggccaagga

SEQ ID NO: 305796 - DNA, 33 bp, Homo sapien
tcaagctgaaagaagaggaccatgggccaagga

SEQ ID NO: 305797 - DNA, 33 bp, Homo sapien
tgagtaggaaagtaaacaagttcagcaatctac

SEQ ID NO: 305798 - DNA, 33 bp, Homo sapien
tgagtaggaaagtaaagaagttcagcaatctac

SEQ ID NO: 305799 - DNA, 33 bp, Homo sapien
gctacttctcactcaccgggtcccagtaagcat

SEQ ID NO: 305800 - DNA, 33 bp, Homo sapien
gctacttctcactcacggggtcccagtaagcat

SEQ ID NO: 305801 - DNA, 33 bp, Homo sapien
tgacaaatctggaaaccgaaattattactttca

SEQ ID NO: 305802 - DNA, 33 bp, Homo sapien
tgacaaatctggaaactgaaattattactttca

SEQ ID NO: 305803 - DNA, 33 bp, Homo sapien
ttatcctcaaattgttcaacaataaatcaatca

SEQ ID NO: 305804 - DNA, 33 bp, Homo sapien
ttatcctcaaattgttgaacaataaatcaatca

SEQ ID NO: 305805 - DNA, 33 bp, Homo sapien
atgtttggtacatgataatagtttcacagatgg

SEQ ID NO: 305806 - DNA, 33 bp, Homo sapien
atgtttggtacatgatgatagtttcacagatgg

SEQ ID NO: 305807 - DNA, 33 bp, Homo sapien
ttattgtgtagaattacgcaaattaaagagagg

SEQ ID NO: 305808 - DNA, 33 bp, Homo sapien
ttattgtgtagaattatgcaaattaaagagagg

SEQ ID NO: 305809 - DNA, 33 bp, Homo sapien
cagctttaccacttagcatttatcataggcaat

SEQ ID NO: 305810 - DNA, 33 bp, Homo sapien
cagctttaccacttagtatttatcataggcaat

SEQ ID NO: 305811 - DNA, 33 bp, Homo sapien
aagcttatacctgccgcagtggaacaacttcat

SEQ ID NO: 305812 - DNA, 33 bp, Homo sapien
aagcttatacctgccggagtggaacaacttcat

SEQ ID NO: 305813 - DNA, 33 bp, Homo sapien
ttataagctgaagaaagccaaatttaaatagat

SEQ ID NO: 305814 - DNA, 33 bp, Homo sapien
ttataagctgaagaaatccaaatttaaatagat

SEQ ID NO: 305815 - DNA, 33 bp, Homo sapien
gaaagagggcaaagccagagttgtataaattaa

SEQ ID NO: 305816 - DNA, 33 bp, Homo sapien
gaaagagggcaaagccggagttgtataaattaa

SEQ ID NO: 305817 - DNA, 33 bp, Homo sapien
gagttgctggatgcacactacaactgtgatctg

SEQ ID NO: 305818 - DNA, 33 bp, Homo sapien
gagttgctggatgcacgctacaactgtgatctg

SEQ ID NO: 305819 - DNA, 33 bp, Homo sapien
attgccaagagttttaaatgccaagagtcacaa

SEQ ID NO: 305820 - DNA, 33 bp, Homo sapien
attgccaagagttttatatgccaagagtcacaa

SEQ ID NO: 305821 - DNA, 33 bp, Homo sapien
tgactgcctctatcaaatcaaagtcaagttaag

SEQ ID NO: 305822 - DNA, 33 bp, Homo sapien
tgactgcctctatcaagtcaaagtcaagttaag

SEQ ID NO: 305823 - DNA, 33 bp, Homo sapien
atacacacaaagcttaactaacaaaataaacag

SEQ ID NO: 305824 - DNA, 33 bp, Homo sapien
atacacacaaagcttacctaacaaaataaacag

SEQ ID NO: 305825 - DNA, 33 bp, Homo sapien
ttgactattttaacacaacagctttacatcatt

SEQ ID NO: 305826 - DNA, 33 bp, Homo sapien
ttgactattttaacaccacagctttacatcatt

SEQ ID NO: 305827 - DNA, 33 bp, Homo sapien
tacgtgccaatcaaaactctttttcttataaat

SEQ ID NO: 305828 - DNA, 33 bp, Homo sapien
tacgtgccaatcaaaattctttttcttataaat

SEQ ID NO: 305829 - DNA, 33 bp, Homo sapien
gagatcctgtaacaccaacttcaggcgtaactc

SEQ ID NO: 305830 - DNA, 33 bp, Homo sapien
gagatcctgtaacaccgacttcaggcgtaactc

SEQ ID NO: 305831 - DNA, 33 bp, Homo sapien
agtaccaaatgcaaaacggccatagttttatgc

SEQ ID NO: 305832 - DNA, 33 bp, Homo sapien
agtaccaaatgcaaaatggccatagttttatgc

SEQ ID NO: 305833 - DNA, 33 bp, Homo sapien
tcctctatcctttatgcattactcctcaggcaa

SEQ ID NO: 305834 - DNA, 33 bp, Homo sapien
tcctctatcctttatgtattactcctcaggcaa

SEQ ID NO: 305835 - DNA, 33 bp, Homo sapien
actgacacaccccaaaataatgcttaaatgaat

SEQ ID NO: 305836 - DNA, 33 bp, Homo sapien
actgacacaccccaaagtaatgcttaaatgaat

SEQ ID NO: 305837 - DNA, 33 bp, Homo sapien
tcttatgtgtgaataacgtgcacccacaggaaa

SEQ ID NO: 305838 - DNA, 33 bp, Homo sapien
tcttatgtgtgaataatgtgcacccacaggaaa

SEQ ID NO: 305839 - DNA, 33 bp, Homo sapien
gacaacaacatatgtagctacaacataatatag

SEQ ID NO: 305840 - DNA, 33 bp, Homo sapien
gacaacaacatatgtatctacaacataatatag

SEQ ID NO: 305841 - DNA, 33 bp, Homo sapien
taggctctcaccccaaaggaagagtgggataaa

SEQ ID NO: 305842 - DNA, 33 bp, Homo sapien
taggctctcaccccaacggaagagtgggataaa

SEQ ID NO: 305843 - DNA, 33 bp, Homo sapien
aacaaatacctctgcaaaccttactgatttgtt

SEQ ID NO: 305844 - DNA, 33 bp, Homo sapien
aacaaatacctctgcagaccttactgatttgtt

SEQ ID NO: 305845 - DNA, 33 bp, Homo sapien
gtcaggaatgttaccaaatcatagcagaagctg

SEQ ID NO: 305846 - DNA, 33 bp, Homo sapien
gtcaggaatgttaccagatcatagcagaagctg

SEQ ID NO: 305847 - DNA, 33 bp, Homo sapien
tgtttgatagtaataacctagcaatgatcagaa

SEQ ID NO: 305848 - DNA, 33 bp, Homo sapien
tgtttgatagtaataagctagcaatgatcagaa

SEQ ID NO: 305849 - DNA, 33 bp, Homo sapien
agctagatgcaaaaaaactagatactgaaaggt

SEQ ID NO: 305850 - DNA, 33 bp, Homo sapien
agctagatgcaaaaaagctagatactgaaaggt

SEQ ID NO: 305851 - DNA, 33 bp, Homo sapien
gctggctcatatcagacgaagtagcaccaagac

SEQ ID NO: 305852 - DNA, 33 bp, Homo sapien
gctggctcatatcagatgaagtagcaccaagac

SEQ ID NO: 305853 - DNA, 33 bp, Homo sapien
tcgtagtttctcatcactatgcctttagattcg

SEQ ID NO: 305854 - DNA, 33 bp, Homo sapien
tcgtagtttctcatcattatgcctttagattcg

SEQ ID NO: 305855 - DNA, 33 bp, Homo sapien
tatgttcagccgagtaagtaatgccctctcaat

SEQ ID NO: 305856 - DNA, 33 bp, Homo sapien
tatgttcagccgagtacgtaatgccctctcaat

SEQ ID NO: 305857 - DNA, 33 bp, Homo sapien
gtcttagcaagaattaacctgtctgttaaggag

SEQ ID NO: 305858 - DNA, 33 bp, Homo sapien
gtcttagcaagaattaccctgtctgttaaggag

SEQ ID NO: 305859 - DNA, 33 bp, Homo sapien
tcaacagatttgtcaaacctacatgttatgaac

SEQ ID NO: 305860 - DNA, 33 bp, Homo sapien
tcaacagatttgtcaagcctacatgttatgaac

SEQ ID NO: 305861 - DNA, 33 bp, Homo sapien
ccttaaagtctcccaacagaaagtcatcaggag

SEQ ID NO: 305862 - DNA, 33 bp, Homo sapien
ccttaaagtctcccaatagaaagtcatcaggag

SEQ ID NO: 305863 - DNA, 33 bp, Homo sapien
tggacttataaggcagccaatatttagagatgc

SEQ ID NO: 305864 - DNA, 33 bp, Homo sapien
tggacttataaggcagtcaatatttagagatgc

SEQ ID NO: 305865 - DNA, 33 bp, Homo sapien
accactttcctagagacgctacaagaggcccta

SEQ ID NO: 305866 - DNA, 33 bp, Homo sapien
accactttcctagagatgctacaagaggcccta

SEQ ID NO: 305867 - DNA, 33 bp, Homo sapien
gagataaaatgttaacaacaaatgaccattgta

SEQ ID NO: 305868 - DNA, 33 bp, Homo sapien
gagataaaatgttaaccacaaatgaccattgta

SEQ ID NO: 305869 - DNA, 33 bp, Homo sapien
ccttttgaagaagcacgattaatcttagtccat

SEQ ID NO: 305870 - DNA, 33 bp, Homo sapien
ccttttgaagaagcactattaatcttagtccat

SEQ ID NO: 305871 - DNA, 33 bp, Homo sapien
tgatttgggatggttcacactctaccttgtaga

SEQ ID NO: 305872 - DNA, 33 bp, Homo sapien
tgatttgggatggttctcactctaccttgtaga

SEQ ID NO: 305873 - DNA, 33 bp, Homo sapien
aaaatacataatccaacaaatttgtccacaaaa

SEQ ID NO: 305874 - DNA, 33 bp, Homo sapien
aaaatacataatccaagaaatttgtccacaaaa

SEQ ID NO: 305875 - DNA, 33 bp, Homo sapien
tgatattaaaggtaagcccatatcttaagaact

SEQ ID NO: 305876 - DNA, 33 bp, Homo sapien
tgatattaaaggtaaggccatatcttaagaact

SEQ ID NO: 305877 - DNA, 33 bp, Homo sapien
atggatcaaaaataaacgaggtgtatcagagaa

SEQ ID NO: 305878 - DNA, 33 bp, Homo sapien
atggatcaaaaataaatgaggtgtatcagagaa

SEQ ID NO: 305879 - DNA, 33 bp, Homo sapien
tgttttctggtcaagtcaccctcaggaacaatt

SEQ ID NO: 305880 - DNA, 33 bp, Homo sapien
tgttttctggtcaagttaccctcaggaacaatt

SEQ ID NO: 305881 - DNA, 33 bp, Homo sapien
atgtcagaaataccaaataaatgttgcttagct

SEQ ID NO: 305882 - DNA, 33 bp, Homo sapien
atgtcagaaataccaagtaaatgttgcttagct

SEQ ID NO: 305883 - DNA, 33 bp, Homo sapien
tttttctaaaatcccaatcatagtagttcaaat

SEQ ID NO: 305884 - DNA, 33 bp, Homo sapien
tttttctaaaatcccagtcatagtagttcaaat

SEQ ID NO: 305885 - DNA, 33 bp, Homo sapien
agctttatataaaaaccgttgtggagctaagaa

SEQ ID NO: 305886 - DNA, 33 bp, Homo sapien
agctttatataaaaactgttgtggagctaagaa

SEQ ID NO: 305887 - DNA, 33 bp, Homo sapien
tgccttttgaagtgtacagaaatgccttttgta

SEQ ID NO: 305888 - DNA, 33 bp, Homo sapien
tgccttttgaagtgtatagaaatgccttttgta

SEQ ID NO: 305889 - DNA, 33 bp, Homo sapien
caaacacatagaagcacagaatggaatggcaat

SEQ ID NO: 305890 - DNA, 33 bp, Homo sapien
caaacacatagaagcatagaatggaatggcaat

SEQ ID NO: 305891 - DNA, 33 bp, Homo sapien
ggttcgtattagaatcacctgaggagtttaaaa

SEQ ID NO: 305892 - DNA, 33 bp, Homo sapien
ggttcgtattagaatcgcctgaggagtttaaaa

SEQ ID NO: 305893 - DNA, 33 bp, Homo sapien
acgaacactctttaaaaagctgatcaatgttag

SEQ ID NO: 305894 - DNA, 33 bp, Homo sapien
acgaacactctttaaacagctgatcaatgttag

SEQ ID NO: 305895 - DNA, 33 bp, Homo sapien
gaggagactgaaaagcaagtgtttagctggcaa

SEQ ID NO: 305896 - DNA, 33 bp, Homo sapien
gaggagactgaaaagcgagtgtttagctggcaa

SEQ ID NO: 305897 - DNA, 33 bp, Homo sapien
ctgactgctaagcaggaaattctgccagtctaa

SEQ ID NO: 305898 - DNA, 33 bp, Homo sapien
ctgactgctaagcagggaattctgccagtctaa

SEQ ID NO: 305899 - DNA, 33 bp, Homo sapien
ccatctgcccacttatcagttgatcttcaacat

SEQ ID NO: 305900 - DNA, 33 bp, Homo sapien
ccatctgcccacttatgagttgatcttcaacat

SEQ ID NO: 305901 - DNA, 33 bp, Homo sapien
aaccaatcactgcaaaacaaaaacaaaataata

SEQ ID NO: 305902 - DNA, 33 bp, Homo sapien
aaccaatcactgcaaagcaaaaacaaaataata

SEQ ID NO: 305903 - DNA, 33 bp, Homo sapien
aattttgctagactgcactcttaatctagtcat

SEQ ID NO: 305904 - DNA, 33 bp, Homo sapien
aattttgctagactgcgctcttaatctagtcat

SEQ ID NO: 305905 - DNA, 33 bp, Homo sapien
gagagtaatattcattaaaagatcacattcttg

SEQ ID NO: 305906 - DNA, 33 bp, Homo sapien
gagagtaatattcattgaaagatcacattcttg

SEQ ID NO: 305907 - DNA, 33 bp, Homo sapien
ccttatgaaacccagaacagagaagccaatcaa

SEQ ID NO: 305908 - DNA, 33 bp, Homo sapien
ccttatgaaacccagaccagagaagccaatcaa

SEQ ID NO: 305909 - DNA, 33 bp, Homo sapien
attttcctaactctccactttgtgataggttta

SEQ ID NO: 305910 - DNA, 33 bp, Homo sapien
attttcctaactctcctctttgtgataggttta

SEQ ID NO: 305911 - DNA, 33 bp, Homo sapien
ttatggctgactactaacccatttcaagaaatt

SEQ ID NO: 305912 - DNA, 33 bp, Homo sapien
ttatggctgactactatcccatttcaagaaatt

SEQ ID NO: 305913 - DNA, 33 bp, Homo sapien
taaattggaataaggacgtggtaaggaccctca

SEQ ID NO: 305914 - DNA, 33 bp, Homo sapien
taaattggaataaggatgtggtaaggaccctca

SEQ ID NO: 305915 - DNA, 33 bp, Homo sapien
attaactcacaggatcacaatgtcccaccatag

SEQ ID NO: 305916 - DNA, 33 bp, Homo sapien
attaactcacaggatcgcaatgtcccaccatag

SEQ ID NO: 305917 - DNA, 33 bp, Homo sapien
aagaaggtcaataatcacatcaaaaaggtagtc

SEQ ID NO: 305918 - DNA, 33 bp, Homo sapien
aagaaggtcaataatctcatcaaaaaggtagtc

SEQ ID NO: 305919 - DNA, 33 bp, Homo sapien
ttcttcgtcacaagttaaaacaatgcaaataag

SEQ ID NO: 305920 - DNA, 33 bp, Homo sapien
ttcttcgtcacaagtttaaacaatgcaaataag

SEQ ID NO: 305921 - DNA, 33 bp, Homo sapien
ttttttctgcaaagaacggttaatagtaaacga

SEQ ID NO: 305922 - DNA, 33 bp, Homo sapien
ttttttctgcaaagaatggttaatagtaaacga

SEQ ID NO: 305923 - DNA, 33 bp, Homo sapien
gctgactacagatgcacgatagcccggttgaaa

SEQ ID NO: 305924 - DNA, 33 bp, Homo sapien
gctgactacagatgcatgatagcccggttgaaa

SEQ ID NO: 305925 - DNA, 33 bp, Homo sapien
caatatcagtataccactgaaaaactttaaaaa

SEQ ID NO: 305926 - DNA, 33 bp, Homo sapien
caatatcagtataccattgaaaaactttaaaaa

SEQ ID NO: 305927 - DNA, 33 bp, Homo sapien
cagactcctctaaacaacaagttcttgcccaaa

SEQ ID NO: 305928 - DNA, 33 bp, Homo sapien
cagactcctctaaacatcaagttcttgcccaaa

SEQ ID NO: 305929 - DNA, 33 bp, Homo sapien
accaatacctccaacaaaaatttgcagctgatg

SEQ ID NO: 305930 - DNA, 33 bp, Homo sapien
accaatacctccaacagaaatttgcagctgatg

SEQ ID NO: 305931 - DNA, 33 bp, Homo sapien
tgtcattgaaatgttacacttcttccaactgcc

SEQ ID NO: 305932 - DNA, 33 bp, Homo sapien
tgtcattgaaatgttatacttcttccaactgcc

SEQ ID NO: 305933 - DNA, 33 bp, Homo sapien
attagctatagtcacaatgctgcaatgtatcaa

SEQ ID NO: 305934 - DNA, 33 bp, Homo sapien
attagctatagtcacagtgctgcaatgtatcaa

SEQ ID NO: 305935 - DNA, 33 bp, Homo sapien
ctctacaagggtgttacgttatattccaataaa

SEQ ID NO: 305936 - DNA, 33 bp, Homo sapien
ctctacaagggtgttatgttatattccaataaa

SEQ ID NO: 305937 - DNA, 33 bp, Homo sapien
gaacagaagaataagacaggctactcattatgt

SEQ ID NO: 305938 - DNA, 33 bp, Homo sapien
gaacagaagaataagataggctactcattatgt

SEQ ID NO: 305939 - DNA, 33 bp, Homo sapien
tatgttctccaatttgcatttcaggtgcggtca

SEQ ID NO: 305940 - DNA, 33 bp, Homo sapien
tatgttctccaatttgtatttcaggtgcggtca

SEQ ID NO: 305941 - DNA, 33 bp, Homo sapien
agacagtttattttcacagcagtagtagtagcc

SEQ ID NO: 305942 - DNA, 33 bp, Homo sapien
agacagtttattttcatagcagtagtagtagcc

SEQ ID NO: 305943 - DNA, 33 bp, Homo sapien
agcccgggcttgcgcagtaagggaaaaaatggt

SEQ ID NO: 305944 - DNA, 33 bp, Homo sapien
agcccgggcttgcgcattaagggaaaaaatggt

SEQ ID NO: 305945 - DNA, 33 bp, Homo sapien
attatttgttgggtacaatgttcaacagtagtg

SEQ ID NO: 305946 - DNA, 33 bp, Homo sapien
attatttgttgggtacgatgttcaacagtagtg

SEQ ID NO: 305947 - DNA, 33 bp, Homo sapien
cgcatatctgaatggggcagaaaaggaacaggt

SEQ ID NO: 305948 - DNA, 33 bp, Homo sapien
cgcatatctgaatgggtcagaaaaggaacaggt

SEQ ID NO: 305949 - DNA, 33 bp, Homo sapien
attaccttatgtgggacggaagtaataagaatg

SEQ ID NO: 305950 - DNA, 33 bp, Homo sapien
attaccttatgtgggatggaagtaataagaatg

SEQ ID NO: 305951 - DNA, 33 bp, Homo sapien
gcttcagcattgttgagagttgatgagataatg

SEQ ID NO: 305952 - DNA, 33 bp, Homo sapien
gcttcagcattgttgatagttgatgagataatg

SEQ ID NO: 305953 - DNA, 33 bp, Homo sapien
attatccccaaactgaatagctgctgttaaaat

SEQ ID NO: 305954 - DNA, 33 bp, Homo sapien
attatccccaaactgagtagctgctgttaaaat

SEQ ID NO: 305955 - DNA, 33 bp, Homo sapien
caggagttcccttcacgcataattaaccaaagc

SEQ ID NO: 305956 - DNA, 33 bp, Homo sapien
caggagttcccttcactcataattaaccaaagc

SEQ ID NO: 305957 - DNA, 33 bp, Homo sapien
gtttatagattcaccaataaggagaactttagt

SEQ ID NO: 305958 - DNA, 33 bp, Homo sapien
gtttatagattcaccagtaaggagaactttagt

SEQ ID NO: 305959 - DNA, 33 bp, Homo sapien
agtctctggtgttacagtgaattgaagcacttg

SEQ ID NO: 305960 - DNA, 33 bp, Homo sapien
agtctctggtgttacattgaattgaagcacttg

SEQ ID NO: 305961 - DNA, 33 bp, Homo sapien
attctgtaaagaatcacgttgttggtttcatag

SEQ ID NO: 305962 - DNA, 33 bp, Homo sapien
attctgtaaagaatcatgttgttggtttcatag

SEQ ID NO: 305963 - DNA, 33 bp, Homo sapien
aaatcaatgtgatttgaatttgctcttaaaatg

SEQ ID NO: 305964 - DNA, 33 bp, Homo sapien
aaatcaatgtgatttggatttgctcttaaaatg

SEQ ID NO: 305965 - DNA, 33 bp, Homo sapien
aattagatactgataaatggtaagtgtcagaaa

SEQ ID NO: 305966 - DNA, 33 bp, Homo sapien
aattagatactgataagtggtaagtgtcagaaa

SEQ ID NO: 305967 - DNA, 33 bp, Homo sapien
attctggatctagacccggtcagtgtgtgtgaa

SEQ ID NO: 305968 - DNA, 33 bp, Homo sapien
attctggatctagacctggtcagtgtgtgtgaa

SEQ ID NO: 305969 - DNA, 33 bp, Homo sapien
cagtggaaatttggcaactgaggttatgttaga

SEQ ID NO: 305970 - DNA, 33 bp, Homo sapien
cagtggaaatttggcatctgaggttatgttaga

SEQ ID NO: 305971 - DNA, 33 bp, Homo sapien
acgaagatgaaaagtaacattatctgctgtctg

SEQ ID NO: 305972 - DNA, 33 bp, Homo sapien
acgaagatgaaaagtagcattatctgctgtctg

SEQ ID NO: 305973 - DNA, 33 bp, Homo sapien
tgatggagaaggactacactttagttgctgtac

SEQ ID NO: 305974 - DNA, 33 bp, Homo sapien
tgatggagaaggactatactttagttgctgtac

SEQ ID NO: 305975 - DNA, 33 bp, Homo sapien
tcagatttctgcttcacagttttgaaagcaaat

SEQ ID NO: 305976 - DNA, 33 bp, Homo sapien
tcagatttctgcttcatagttttgaaagcaaat

SEQ ID NO: 305977 - DNA, 33 bp, Homo sapien
atttcaaaccctctaaactatgattaagtagat

SEQ ID NO: 305978 - DNA, 33 bp, Homo sapien
atttcaaaccctctaagctatgattaagtagat

SEQ ID NO: 305979 - DNA, 33 bp, Homo sapien
catttgagtctacttcaagaagccagaagagag

SEQ ID NO: 305980 - DNA, 33 bp, Homo sapien
catttgagtctacttcgagaagccagaagagag

SEQ ID NO: 305981 - DNA, 33 bp, Homo sapien
ttactccccaaccccacatctaacattttaaca

SEQ ID NO: 305982 - DNA, 33 bp, Homo sapien
ttactccccaaccccatatctaacattttaaca

SEQ ID NO: 305983 - DNA, 33 bp, Homo sapien
ttagggactatcttaaaaacatgtagagaactt

SEQ ID NO: 305984 - DNA, 33 bp, Homo sapien
ttagggactatcttaagaacatgtagagaactt

SEQ ID NO: 305985 - DNA, 33 bp, Homo sapien
cacacctacaaacacaaattctaaagtctcagt

SEQ ID NO: 305986 - DNA, 33 bp, Homo sapien
cacacctacaaacacatattctaaagtctcagt

SEQ ID NO: 305987 - DNA, 33 bp, Homo sapien
ttagtctaaggctttgaatacactgattataga

SEQ ID NO: 305988 - DNA, 33 bp, Homo sapien
ttagtctaaggctttgcatacactgattataga

SEQ ID NO: 305989 - DNA, 33 bp, Homo sapien
aatgtttttgtcattcaaagatgtgtgtgattt

SEQ ID NO: 305990 - DNA, 33 bp, Homo sapien
aatgtttttgtcattcgaagatgtgtgtgattt

SEQ ID NO: 305991 - DNA, 33 bp, Homo sapien
aattttgtagcttcccagagacttgcagggctc

SEQ ID NO: 305992 - DNA, 33 bp, Homo sapien
aattttgtagcttcccggagacttgcagggctc

SEQ ID NO: 305993 - DNA, 33 bp, Homo sapien; identical to SEQ ID NO: 305991

SEQ ID NO: 305994 - DNA, 33 bp, Homo sapien; identical to SEQ ID NO: 305992

SEQ ID NO: 305995 - DNA, 33 bp, Homo sapien
ttatacctccttttgcaaaatacatctcttggt

SEQ ID NO: 305996 - DNA, 33 bp, Homo sapien
ttatacctccttttgccaaatacatctcttggt

SEQ ID NO: 305997 - DNA, 33 bp, Homo sapien
ataagtatggaactcacaggactcattgggtat

SEQ ID NO: 305998 - DNA, 33 bp, Homo sapien
ataagtatggaactcataggactcattgggtat

SEQ ID NO: 305999 - DNA, 33 bp, Homo sapien
agatcatccatgaaagaaaattggattggaaca

SEQ ID NO: 306000 - DNA, 33 bp, Homo sapien
agatcatccatgaaaggaaattggattggaaca

SEQ ID NO: 306001 - DNA, 33 bp, Homo sapien
gacattgattgaaggaggctaagtaaacatgac

SEQ ID NO: 306002 - DNA, 33 bp, Homo sapien
gacattgattgaaggatgctaagtaaacatgac

SEQ ID NO: 306003 - DNA, 33 bp, Homo sapien
agagaaattgcagaacgagagggcttggacaaa

SEQ ID NO: 306004 - DNA, 33 bp, Homo sapien
agagaaattgcagaactagagggcttggacaaa

SEQ ID NO: 306005 - DNA, 33 bp, Homo sapien; identical to SEQ ID NO: 306003

SEQ ID NO: 306006 - DNA, 33 bp, Homo sapien; identical to SEQ ID NO: 306004

SEQ ID NO: 306007 - DNA, 33 bp, Homo sapien
cagtaactctagtgaacgggaaacagatgttta

SEQ ID NO: 306008 - DNA, 33 bp, Homo sapien
cagtaactctagtgaatgggaaacagatgttta

SEQ ID NO: 306009 - DNA, 33 bp, Homo sapien
attgtcatttagtagcaaaaggtgtggtaagta

SEQ ID NO: 306010 - DNA, 33 bp, Homo sapien
attgtcatttagtagcgaaaggtgtggtaagta

SEQ ID NO: 306011 - DNA, 33 bp, Homo sapien
ttgttaatatggcaagcaactcccctgactagc

SEQ ID NO: 306012 - DNA, 33 bp, Homo sapien
ttgttaatatggcaaggaactcccctgactagc

SEQ ID NO: 306013 - DNA, 33 bp, Homo sapien
caagccattgatttgacgttcttgacaaatttg

SEQ ID NO: 306014 - DNA, 33 bp, Homo sapien
caagccattgatttgatgttcttgacaaatttg

SEQ ID NO: 306015 - DNA, 33 bp, Homo sapien
taatgagagatatggacctgtaatttttctttc

SEQ ID NO: 306016 - DNA, 33 bp, Homo sapien
taatgagagatatggatctgtaatttttctttc

SEQ ID NO: 306017 - DNA, 33 bp, Homo sapien
acttagaaattagaagacctcagtgaagtattc

SEQ ID NO: 306018 - DNA, 33 bp, Homo sapien
acttagaaattagaagtcctcagtgaagtattc

SEQ ID NO: 306019 - DNA, 33 bp, Homo sapien
atggtgctggaaaggaataactaagcatggcct

SEQ ID NO: 306020 - DNA, 33 bp, Homo sapien
atggtgctggaaaggagtaactaagcatggcct

SEQ ID NO: 306021 - DNA, 33 bp, Homo sapien
caaaattggtttaaaacacagtacagatataca

SEQ ID NO: 306022 - DNA, 33 bp, Homo sapien
caaaattggtttaaaagacagtacagatataca

SEQ ID NO: 306023 - DNA, 33 bp, Homo sapien
tccatttatgtgtgagcaaatgtagaaacaggg

SEQ ID NO: 306024 - DNA, 33 bp, Homo sapien
tccatttatgtgtgaggaaatgtagaaacaggg

SEQ ID NO: 306025 - DNA, 33 bp, Homo sapien
taataatccagatagacaatccttagaagttat

SEQ ID NO: 306026 - DNA, 33 bp, Homo sapien
taataatccagatagataatccttagaagttat

SEQ ID NO: 306027 - DNA, 33 bp, Homo sapien
tctcccctgcctgagagtccctgcttctgagca

SEQ ID NO: 306028 - DNA, 33 bp, Homo sapien
tctcccctgcctgagattccctgcttctgagca

SEQ ID NO: 306029 - DNA, 33 bp, Homo sapien
gatgttacatttagaaaattcacccagtgttta

SEQ ID NO: 306030 - DNA, 33 bp, Homo sapien
gatgttacatttagaagattcacccagtgttta

SEQ ID NO: 306031 - DNA, 33 bp, Homo sapien
gtggagtacaccaaacacatttttgctaatccc

SEQ ID NO: 306032 - DNA, 33 bp, Homo sapien
gtggagtacaccaaactcatttttgctaatccc

SEQ ID NO: 306033 - DNA, 33 bp, Homo sapien
atttgccagacttttaacttgagagagataatt

SEQ ID NO: 306034 - DNA, 33 bp, Homo sapien
atttgccagacttttagcttgagagagataatt

SEQ ID NO: 306035 - DNA, 33 bp, Homo sapien
agaattattacagcaggcatagagtagcactca

SEQ ID NO: 306036 - DNA, 33 bp, Homo sapien
agaattattacagcagtcatagagtagcactca

SEQ ID NO: 306037 - DNA, 33 bp, Homo sapien
gggagcactgtctttcaatacactaataaacaa

SEQ ID NO: 306038 - DNA, 33 bp, Homo sapien
gggagcactgtctttccatacactaataaacaa

SEQ ID NO: 306039 - DNA, 33 bp, Homo sapien
gataaaagctgtactccaaacgtctgcatcact

SEQ ID NO: 306040 - DNA, 33 bp, Homo sapien
gataaaagctgtactctaaacgtctgcatcact

SEQ ID NO: 306041 - DNA, 33 bp, Homo sapien
tgagttatcaagctacggaatgacatgatgaat

SEQ ID NO: 306042 - DNA, 33 bp, Homo sapien
tgagttatcaagctactgaatgacatgatgaat

SEQ ID NO: 306043 - DNA, 33 bp, Homo sapien
attattgaaacatatcacttctcattctcctta

SEQ ID NO: 306044 - DNA, 33 bp, Homo sapien
attattgaaacatatcgcttctcattctcctta

SEQ ID NO: 306045 - DNA, 33 bp, Homo sapien
ttctcacctcatgttaccaagtttccaagaaca

SEQ ID NO: 306046 - DNA, 33 bp, Homo sapien
ttctcacctcatgttatcaagtttccaagaaca

SEQ ID NO: 306047 - DNA, 33 bp, Homo sapien
ctttctagataggctcaattaattaaccttaaa

SEQ ID NO: 306048 - DNA, 33 bp, Homo sapien
ctttctagataggctcgattaattaaccttaaa

SEQ ID NO: 306049 - DNA, 33 bp, Homo sapien
tccctaagacatatcacagctttcttgtgctga

SEQ ID NO: 306050 - DNA, 33 bp, Homo sapien
tccctaagacatatcatagctttcttgtgctga

SEQ ID NO: 306051 - DNA, 33 bp, Homo sapien
aagaaaagaactgtgtcacaatttaagaggttc

SEQ ID NO: 306052 - DNA, 33 bp, Homo sapien
aagaaaagaactgtgttacaatttaagaggttc

SEQ ID NO: 306053 - DNA, 33 bp, Homo sapien
gtattctcttttttaaaacactctaatggctta

SEQ ID NO: 306054 - DNA, 33 bp, Homo sapien
gtattctcttttttaagacactctaatggctta

SEQ ID NO: 306055 - DNA, 33 bp, Homo sapien
atgttagatgcataggacaatgcgaatgtttgg

SEQ ID NO: 306056 - DNA, 33 bp, Homo sapien
atgttagatgcatagggcaatgcgaatgtttgg

SEQ ID NO: 306057 - DNA, 33 bp, Homo sapien
gaatgtttaactgaaaggtcttatgcaactaat

SEQ ID NO: 306058 - DNA, 33 bp, Homo sapien
gaatgtttaactgaaatgtcttatgcaactaat

SEQ ID NO: 306059 - DNA, 33 bp, Homo sapien
actgtttctgctaccaataatgcttttataaac

SEQ ID NO: 306060 - DNA, 33 bp, Homo sapien
actgtttctgctaccagtaatgcttttataaac

SEQ ID NO: 306061 - DNA, 33 bp, Homo sapien
gctatctttgttaaaaatacctgaatgcaacta

SEQ ID NO: 306062 - DNA, 33 bp, Homo sapien
gctatctttgttaaaagtacctgaatgcaacta

SEQ ID NO: 306063 - DNA, 33 bp, Homo sapien
tatttcaacttacgcactaccagaggttacctc

SEQ ID NO: 306064 - DNA, 33 bp, Homo sapien
tatttcaacttacgcagtaccagaggttacctc

SEQ ID NO: 306065 - DNA, 33 bp, Homo sapien
caacacctaaattcaacgcactactgggttgaa

SEQ ID NO: 306066 - DNA, 33 bp, Homo sapien
caacacctaaattcaatgcactactgggttgaa

SEQ ID NO: 306067 - DNA, 33 bp, Homo sapien
aacccagcccatacacaaagtgaaagttaacat

SEQ ID NO: 306068 - DNA, 33 bp, Homo sapien
aacccagcccatacacgaagtgaaagttaacat

SEQ ID NO: 306069 - DNA, 33 bp, Homo sapien
ttaaaaagcctgctgagaagctttcaagccctt

SEQ ID NO: 306070 - DNA, 33 bp, Homo sapien
ttaaaaagcctgctgataagctttcaagccctt

SEQ ID NO: 306071 - DNA, 33 bp, Homo sapien
cacagtggcactaggaagtataggatgcagact

SEQ ID NO: 306072 - DNA, 33 bp, Homo sapien
cacagtggcactaggaggtataggatgcagact

SEQ ID NO: 306073 - DNA, 33 bp, Homo sapien
cgatgctaagttaagacctagcaagaccctacg

SEQ ID NO: 306074 - DNA, 33 bp, Homo sapien
cgatgctaagttaagatctagcaagaccctacg

SEQ ID NO: 306075 - DNA, 33 bp, Homo sapien
gccaaaggtccctgtcaagtgtaacgtagggtc

SEQ ID NO: 306076 - DNA, 33 bp, Homo sapien
gccaaaggtccctgtcgagtgtaacgtagggtc

SEQ ID NO: 306077 - DNA, 33 bp, Homo sapien
tactaaatagtagaaaagagcaagatcagcaga

SEQ ID NO: 306078 - DNA, 33 bp, Homo sapien
tactaaatagtagaaaggagcaagatcagcaga

SEQ ID NO: 306079 - DNA, 33 bp, Homo sapien
atacagcatttggcatcatcaaaagattatctg

SEQ ID NO: 306080 - DNA, 33 bp, Homo sapien
atacagcatttggcattatcaaaagattatctg

SEQ ID NO: 306081 - DNA, 33 bp, Homo sapien
ctgacacctcaatcatgactggatctgctgggt

SEQ ID NO: 306082 - DNA, 33 bp, Homo sapien
ctgacacctcaatcattactggatctgctgggt

SEQ ID NO: 306083 - DNA, 33 bp, Homo sapien
gtttaagatatgccgtaaaccgttagtgacata

SEQ ID NO: 306084 - DNA, 33 bp, Homo sapien
gtttaagatatgccgtgaaccgttagtgacata

SEQ ID NO: 306085 - DNA, 33 bp, Homo sapien
gtataaataatgtacaatggaggattgaagagc

SEQ ID NO: 306086 - DNA, 33 bp, Homo sapien
gtataaataatgtacagtggaggattgaagagc

SEQ ID NO: 306087 - DNA, 33 bp, Homo sapien
atttagtgacatagctgaactttaacacacaac

SEQ ID NO: 306088 - DNA, 33 bp, Homo sapien
atttagtgacatagcttaactttaacacacaac

SEQ ID NO: 306089 - DNA, 33 bp, Homo sapien
ttgctttgtgccactacgtttttgcttgtttca

SEQ ID NO: 306090 - DNA, 33 bp, Homo sapien
ttgctttgtgccactatgtttttgcttgtttca

SEQ ID NO: 306091 - DNA, 33 bp, Homo sapien
cctaaggagactatgacgaaaactagcataata

SEQ ID NO: 306092 - DNA, 33 bp, Homo sapien
cctaaggagactatgatgaaaactagcataata

SEQ ID NO: 306093 - DNA, 33 bp, Homo sapien
actactgcattatcccaagaaattctctatatc

SEQ ID NO: 306094 - DNA, 33 bp, Homo sapien
actactgcattatccccagaaattctctatatc

SEQ ID NO: 306095 - DNA, 33 bp, Homo sapien
taagcagaaatactagaagcagtgttattgagt

SEQ ID NO: 306096 - DNA, 33 bp, Homo sapien
taagcagaaatactaggagcagtgttattgagt

SEQ ID NO: 306097 - DNA, 33 bp, Homo sapien
cctgcagctatttcacgctcaaatatatacaat

SEQ ID NO: 306098 - DNA, 33 bp, Homo sapien
cctgcagctatttcactctcaaatatatacaat

SEQ ID NO: 306099 - DNA, 33 bp, Homo sapien
aaatacatttggcctactaaaatgcatattcca

SEQ ID NO: 306100 - DNA, 33 bp, Homo sapien
aaatacatttggcctattaaaatgcatattcca

SEQ ID NO: 306101 - DNA, 33 bp, Homo sapien
tctctcttctcctctcaaatcaattacatgaat

SEQ ID NO: 306102 - DNA, 33 bp, Homo sapien
tctctcttctcctctcgaatcaattacatgaat

SEQ ID NO: 306103 - DNA, 33 bp, Homo sapien
caaggaaatcataacaccaatattttgtaatag

SEQ ID NO: 306104 - DNA, 33 bp, Homo sapien
caaggaaatcataacagcaatattttgtaatag

SEQ ID NO: 306105 - DNA, 33 bp, Homo sapien
catggttgaaggcccaaatatctgtttgtcatc

SEQ ID NO: 306106 - DNA, 33 bp, Homo sapien
catggttgaaggcccagatatctgtttgtcatc

SEQ ID NO: 306107 - DNA, 33 bp, Homo sapien
tagtaaaataaaaaaaagtccatgcttagagca

SEQ ID NO: 306108 - DNA, 33 bp, Homo sapien
tagtaaaataaaaaaatgtccatgcttagagca

SEQ ID NO: 306109 - DNA, 33 bp, Homo sapien
gtccacaacattatgaaggggagtgggagcagg

SEQ ID NO: 306110 - DNA, 33 bp, Homo sapien
gtccacaacattatgagggggagtgggagcagg

SEQ ID NO: 306111 - DNA, 33 bp, Homo sapien
tcacctctagataaaactatttaattgccgcta

SEQ ID NO: 306112 - DNA, 33 bp, Homo sapien
tcacctctagataaaagtatttaattgccgcta

SEQ ID NO: 306113 - DNA, 33 bp, Homo sapien
tattggcaatgggatcaaagataccttgtgtca

SEQ ID NO: 306114 - DNA, 33 bp, Homo sapien
tattggcaatgggatcgaagataccttgtgtca

SEQ ID NO: 306115 - DNA, 33 bp, Homo sapien
ttaattaacatgtgtccagtattttttgagaaa

SEQ ID NO: 306116 - DNA, 33 bp, Homo sapien
ttaattaacatgtgtctagtattttttgagaaa

SEQ ID NO: 306117 - DNA, 33 bp, Homo sapien
aagacagcaatgtgtaaaggaacatggccaatt

SEQ ID NO: 306118 - DNA, 33 bp, Homo sapien
aagacagcaatgtgtataggaacatggccaatt

SEQ ID NO: 306119 - DNA, 33 bp, Homo sapien
aaactatcattctgaaataagacaggcggacaa

SEQ ID NO: 306120 - DNA, 33 bp, Homo sapien
aaactatcattctgaattaagacaggcggacaa

SEQ ID NO: 306121 - DNA, 33 bp, Homo sapien
gtcttagggagggtccacactgttgctggtagc

SEQ ID NO: 306122 - DNA, 33 bp, Homo sapien
gtcttagggagggtccgcactgttgctggtagc

SEQ ID NO: 306123 - DNA, 33 bp, Homo sapien
ctgtggtgtcacaagacgttttcatgcttttgc

SEQ ID NO: 306124 - DNA, 33 bp, Homo sapien
ctgtggtgtcacaagatgttttcatgcttttgc

SEQ ID NO: 306125 - DNA, 33 bp, Homo sapien
aactctaactataatgaaaaacttttgtttatt

SEQ ID NO: 306126 - DNA, 33 bp, Homo sapien
aactctaactataatggaaaacttttgtttatt

SEQ ID NO: 306127 - DNA, 33 bp, Homo sapien
gtatatgatgtttctaagtgtggtaattttatg

SEQ ID NO: 306128 - DNA, 33 bp, Homo sapien
gtatatgatgtttctaggtgtggtaattttatg

SEQ ID NO: 306129 - DNA, 33 bp, Homo sapien
gattcttagatcagcactcttagcaatagagaa

SEQ ID NO: 306130 - DNA, 33 bp, Homo sapien
gattcttagatcagcattcttagcaatagagaa

SEQ ID NO: 306131 - DNA, 33 bp, Homo sapien
ctcaaactatttgaaacggtccacttaaaaaca

SEQ ID NO: 306132 - DNA, 33 bp, Homo sapien
ctcaaactatttgaaatggtccacttaaaaaca

SEQ ID NO: 306133 - DNA, 33 bp, Homo sapien
tacagatagttctgcacgataagctgacaccag

SEQ ID NO: 306134 - DNA, 33 bp, Homo sapien
tacagatagttctgcatgataagctgacaccag

SEQ ID NO: 306135 - DNA, 33 bp, Homo sapien
gatagccttcttgttccataaaatgacacttta

SEQ ID NO: 306136 - DNA, 33 bp, Homo sapien
gatagccttcttgttctataaaatgacacttta

SEQ ID NO: 306137 - DNA, 33 bp, Homo sapien
aaaaggtgagggatgacgatactgagcttttaa

SEQ ID NO: 306138 - DNA, 33 bp, Homo sapien
aaaaggtgagggatgatgatactgagcttttaa

SEQ ID NO: 306139 - DNA, 33 bp, Homo sapien
gtacatatgtctttcaatattcaaatgcataca

SEQ ID NO: 306140 - DNA, 33 bp, Homo sapien
gtacatatgtctttcagtattcaaatgcataca

SEQ ID NO: 306141 - DNA, 33 bp, Homo sapien
attaagcaatctctggaatgtttcttctttttt

SEQ ID NO: 306142 - DNA, 33 bp, Homo sapien
attaagcaatctctgggatgtttcttctttttt

SEQ ID NO: 306143 - DNA, 33 bp, Homo sapien
agctgtgactttttagcaaaggaatgcttcaat

SEQ ID NO: 306144 - DNA, 33 bp, Homo sapien
agctgtgactttttagtaaaggaatgcttcaat

SEQ ID NO: 306145 - DNA, 33 bp, Homo sapien
gaaaatggtcgacttcactctatggggcaaatt

SEQ ID NO: 306146 - DNA, 33 bp, Homo sapien
gaaaatggtcgacttcgctctatggggcaaatt

SEQ ID NO: 306147 - DNA, 33 bp, Homo sapien
ttcttttcactcactaaatcatactattttgta

SEQ ID NO: 306148 - DNA, 33 bp, Homo sapien
ttcttttcactcactatatcatactattttgta

SEQ ID NO: 306149 - DNA, 33 bp, Homo sapien
tggttcttctagctccaattgccacaaggtgat

SEQ ID NO: 306150 - DNA, 33 bp, Homo sapien
tggttcttctagctcctattgccacaaggtgat

SEQ ID NO: 306151 - DNA, 33 bp, Homo sapien
tgtagaacaggaatggcatatacggatcagtca

SEQ ID NO: 306152 - DNA, 33 bp, Homo sapien
tgtagaacaggaatggtatatacggatcagtca

SEQ ID NO: 306153 - DNA, 33 bp, Homo sapien
gaatgtcagaaatcataaagtaaaatatttcca

SEQ ID NO: 306154 - DNA, 33 bp, Homo sapien
gaatgtcagaaatcatgaagtaaaatatttcca

SEQ ID NO: 306155 - DNA, 33 bp, Homo sapien
catatttctgcattagccggtttctaaaaatta

SEQ ID NO: 306156 - DNA, 33 bp, Homo sapien
catatttctgcattagtcggtttctaaaaatta

SEQ ID NO: 306157 - DNA, 33 bp, Homo sapien
aagacttgatgccagagatacaaagataaataa

SEQ ID NO: 306158 - DNA, 33 bp, Homo sapien
aagacttgatgccagatatacaaagataaataa

SEQ ID NO: 306159 - DNA, 33 bp, Homo sapien
ggaagaggagaagaaacggacataacactctct

SEQ ID NO: 306160 - DNA, 33 bp, Homo sapien
ggaagaggagaagaaatggacataacactctct

SEQ ID NO: 306161 - DNA, 33 bp, Homo sapien
atctcttgccccggcccatgcatgaaaaccaaa

SEQ ID NO: 306162 - DNA, 33 bp, Homo sapien
atctcttgccccggcctatgcatgaaaaccaaa

SEQ ID NO: 306163 - DNA, 33 bp, Homo sapien
ggctgtgattaatagacgtgagaaatgccacct

SEQ ID NO: 306164 - DNA, 33 bp, Homo sapien
ggctgtgattaatagatgtgagaaatgccacct

SEQ ID NO: 306165 - DNA, 33 bp, Homo sapien
ggttgcacaataatgcactaaaaagttgtttcc

SEQ ID NO: 306166 - DNA, 33 bp, Homo sapien
ggttgcacaataatgcgctaaaaagttgtttcc

SEQ ID NO: 306167 - DNA, 33 bp, Homo sapien
atagaaatagaagctaaaaaaacgagcagcaaa

SEQ ID NO: 306168 - DNA, 33 bp, Homo sapien
atagaaatagaagctataaaaacgagcagcaaa

SEQ ID NO: 306169 - DNA, 33 bp, Homo sapien
actctgcataccctcacagcctggctgaaagta

SEQ ID NO: 306170 - DNA, 33 bp, Homo sapien
actctgcataccctcatagcctggctgaaagta

SEQ ID NO: 306171 - DNA, 33 bp, Homo sapien
tattggttgaagagcacgttgacaggcaccagc

SEQ ID NO: 306172 - DNA, 33 bp, Homo sapien
tattggttgaagagcatgttgacaggcaccagc

SEQ ID NO: 306173 - DNA, 33 bp, Homo sapien
agatagtgaagaagaccagaaaattcaaggact

SEQ ID NO: 306174 - DNA, 33 bp, Homo sapien
agatagtgaagaagactagaaaattcaaggact

SEQ ID NO: 306175 - DNA, 33 bp, Homo sapien
atacaccaacaacgtccaggctgagagtaaaat

SEQ ID NO: 306176 - DNA, 33 bp, Homo sapien
atacaccaacaacgtcgaggctgagagtaaaat

SEQ ID NO: 306177 - DNA, 33 bp, Homo sapien
aattaaccatttcctccaagcatattgctttcc

SEQ ID NO: 306178 - DNA, 33 bp, Homo sapien
aattaaccatttcctcgaagcatattgctttcc

SEQ ID NO: 306179 - DNA, 33 bp, Homo sapien
caaatccaatatgtcactacagggttcaaactc

SEQ ID NO: 306180 - DNA, 33 bp, Homo sapien
caaatccaatatgtcattacagggttcaaactc

SEQ ID NO: 306181 - DNA, 33 bp, Homo sapien
caaaatgtatgtaacaaagattatagatacaaa

SEQ ID NO: 306182 - DNA, 33 bp, Homo sapien
caaaatgtatgtaacagagattatagatacaaa

SEQ ID NO: 306183 - DNA, 33 bp, Homo sapien
ggagtgctctagagatcaattccatgcaagact

SEQ ID NO: 306184 - DNA, 33 bp, Homo sapien
ggagtgctctagagatgaattccatgcaagact

SEQ ID NO: 306185 - DNA, 33 bp, Homo sapien
gtaagggcttctcatgacaagttgttgaaaatg

SEQ ID NO: 306186 - DNA, 33 bp, Homo sapien
gtaagggcttctcatgccaagttgttgaaaatg

SEQ ID NO: 306187 - DNA, 33 bp, Homo sapien
ctgtgtttgggtgcaaagtgccagatatacaaa

SEQ ID NO: 306188 - DNA, 33 bp, Homo sapien
ctgtgtttgggtgcaaggtgccagatatacaaa

SEQ ID NO: 306189 - DNA, 33 bp, Homo sapien
ctttcctatatatttcaaacacaactttagaaa

SEQ ID NO: 306190 - DNA, 33 bp, Homo sapien
ctttcctatatatttccaacacaactttagaaa

SEQ ID NO: 306191 - DNA, 33 bp, Homo sapien
tataacaacgtagtgaaatagaagttatgtgaa

SEQ ID NO: 306192 - DNA, 33 bp, Homo sapien
tataacaacgtagtgagatagaagttatgtgaa

SEQ ID NO: 306193 - DNA, 33 bp, Homo sapien
aatttatatcactgtcaaaaagatttataataa

SEQ ID NO: 306194 - DNA, 33 bp, Homo sapien
aatttatatcactgtcgaaaagatttataataa

SEQ ID NO: 306195 - DNA, 33 bp, Homo sapien
tttccaactatcaaggacccaattggtgtctat

SEQ ID NO: 306196 - DNA, 33 bp, Homo sapien
tttccaactatcaagggcccaattggtgtctat

SEQ ID NO: 306197 - DNA, 33 bp, Homo sapien
aaaccggaattgttaacaaactagaaactacaa

SEQ ID NO: 306198 - DNA, 33 bp, Homo sapien
aaaccggaattgttaagaaactagaaactacaa

SEQ ID NO: 306199 - DNA, 33 bp, Homo sapien
cccccaatttgcaatcacattaatatttacaac

SEQ ID NO: 306200 - DNA, 33 bp, Homo sapien
cccccaatttgcaatcgcattaatatttacaac

SEQ ID NO: 306201 - DNA, 33 bp, Homo sapien
aaaaaattgaatgttactaaactcagtgaatga

SEQ ID NO: 306202 - DNA, 33 bp, Homo sapien
aaaaaattgaatgttattaaactcagtgaatga

SEQ ID NO: 306203 - DNA, 33 bp, Homo sapien
ctaataagaaacaaaactgcaatgctttcatag

SEQ ID NO: 306204 - DNA, 33 bp, Homo sapien
ctaataagaaacaaaattgcaatgctttcatag

SEQ ID NO: 306205 - DNA, 33 bp, Homo sapien
tatatgtacacccagactatacaacatttgtca

SEQ ID NO: 306206 - DNA, 33 bp, Homo sapien
tatatgtacacccagattatacaacatttgtca

SEQ ID NO: 306207 - DNA, 33 bp, Homo sapien
cacctttttctccaccacaattgtaatcagtag

SEQ ID NO: 306208 - DNA, 33 bp, Homo sapien
cacctttttctccaccgcaattgtaatcagtag

SEQ ID NO: 306209 - DNA, 33 bp, Homo sapien
gctttagtgcatgacaagagtttataattttcc

SEQ ID NO: 306210 - DNA, 33 bp, Homo sapien
gctttagtgcatgacaggagtttataattttcc

SEQ ID NO: 306211 - DNA, 33 bp, Homo sapien
aatactacccaactccccctctccaagaggaca

SEQ ID NO: 306212 - DNA, 33 bp, Homo sapien
aatactacccaactcctcctctccaagaggaca

SEQ ID NO: 306213 - DNA, 33 bp, Homo sapien
tgtatttgtaagagtaagtagcataaataattc

SEQ ID NO: 306214 - DNA, 33 bp, Homo sapien
tgtatttgtaagagtaggtagcataaataattc

SEQ ID NO: 306215 - DNA, 33 bp, Homo sapien
acaaaatcgatttgcacaaattactagcattcc

SEQ ID NO: 306216 - DNA, 33 bp, Homo sapien
acaaaatcgatttgcataaattactagcattcc

SEQ ID NO: 306217 - DNA, 33 bp, Homo sapien
gccattctgactagtacgaaatggcctcacatt

SEQ ID NO: 306218 - DNA, 33 bp, Homo sapien
gccattctgactagtatgaaatggcctcacatt

SEQ ID NO: 306219 - DNA, 33 bp, Homo sapien
aaaaaataatagatgagagtgaggttgtggaga

SEQ ID NO: 306220 - DNA, 33 bp, Homo sapien
aaaaaataatagatgatagtgaggttgtggaga

SEQ ID NO: 306221 - DNA, 33 bp, Homo sapien
gtggagaaagactactaactcattatcaaaagg

SEQ ID NO: 306222 - DNA, 33 bp, Homo sapien
gtggagaaagactactcactcattatcaaaagg

SEQ ID NO: 306223 - DNA, 33 bp, Homo sapien
accatcttctagcaagaatctatctccttctct

SEQ ID NO: 306224 - DNA, 33 bp, Homo sapien
accatcttctagcaaggatctatctccttctct

SEQ ID NO: 306225 - DNA, 33 bp, Homo sapien
caaattctctgtgatcaaccttcctgtacttct

SEQ ID NO: 306226 - DNA, 33 bp, Homo sapien
caaattctctgtgatcgaccttcctgtacttct

SEQ ID NO: 306227 - DNA, 33 bp, Homo sapien
agctgagtaagtggaaacttggtagagatggga

SEQ ID NO: 306228 - DNA, 33 bp, Homo sapien
agctgagtaagtggaaccttggtagagatggga

SEQ ID NO: 306229 - DNA, 33 bp, Homo sapien
gaagttatgtttccagaaatgttactggagata

SEQ ID NO: 306230 - DNA, 33 bp, Homo sapien
gaagttatgtttccaggaatgttactggagata

SEQ ID NO: 306231 - DNA, 33 bp, Homo sapien
aacataacttctcctacggacaggtggaaatct

SEQ ID NO: 306232 - DNA, 33 bp, Homo sapien
aacataacttctcctatggacaggtggaaatct

SEQ ID NO: 306233 - DNA, 33 bp, Homo sapien
aacattaccggcagaagcagaaacttttgaagt

SEQ ID NO: 306234 - DNA, 33 bp, Homo sapien
aacattaccggcagaatcagaaacttttgaagt

SEQ ID NO: 306235 - DNA, 33 bp, Homo sapien
gtagaaataggagtaacgagtcccacatataaa

SEQ ID NO: 306236 - DNA, 33 bp, Homo sapien
gtagaaataggagtaatgagtcccacatataaa

SEQ ID NO: 306237 - DNA, 33 bp, Homo sapien
tggaattacctcaaagactaggaaacaggtaaa

SEQ ID NO: 306238 - DNA, 33 bp, Homo sapien
tggaattacctcaaagcctaggaaacaggtaaa

SEQ ID NO: 306239 - DNA, 33 bp, Homo sapien
attttagtgctatctcaccgggattattttaat

SEQ ID NO: 306240 - DNA, 33 bp, Homo sapien
attttagtgctatctcgccgggattattttaat

SEQ ID NO: 306241 - DNA, 33 bp, Homo sapien
attggcatcaagcataacaacaactaaagccca

SEQ ID NO: 306242 - DNA, 33 bp, Homo sapien
attggcatcaagcataccaacaactaaagccca

SEQ ID NO: 306243 - DNA, 33 bp, Homo sapien
tttcagtttctgagagcaaaaaatgtagcaata

SEQ ID NO: 306244 - DNA, 33 bp, Homo sapien
tttcagtttctgagaggaaaaaatgtagcaata

SEQ ID NO: 306245 - DNA, 33 bp, Homo sapien
tcctatagctgagataggccatctgaaaatgct

SEQ ID NO: 306246 - DNA, 33 bp, Homo sapien
tcctatagctgagatatgccatctgaaaatgct

SEQ ID NO: 306247 - DNA, 33 bp, Homo sapien
aactacttgtcagaaaagataacctgtataata

SEQ ID NO: 306248 - DNA, 33 bp, Homo sapien
aactacttgtcagaaacgataacctgtataata

SEQ ID NO: 306249 - DNA, 33 bp, Homo sapien
ctatcttgtctctcgagatttggatggctgtcc

SEQ ID NO: 306250 - DNA, 33 bp, Homo sapien
ctatcttgtctctcgatatttggatggctgtcc

SEQ ID NO: 306251 - DNA, 33 bp, Homo sapien
aacttgatattttatacgtgtccaatttggcta

SEQ ID NO: 306252 - DNA, 33 bp, Homo sapien
aacttgatattttatatgtgtccaatttggcta

SEQ ID NO: 306253 - DNA, 33 bp, Homo sapien
aaccaaaagcttaaacggcaacagaatgaattt

SEQ ID NO: 306254 - DNA, 33 bp, Homo sapien
aaccaaaagcttaaactgcaacagaatgaattt

SEQ ID NO: 306255 - DNA, 33 bp, Homo sapien
gcttgttattgagacacagaaaatcatcatcct

SEQ ID NO: 306256 - DNA, 33 bp, Homo sapien
gcttgttattgagacagagaaaatcatcatcct

SEQ ID NO: 306257 - DNA, 33 bp, Homo sapien
tcgtaagtccaatttcaatagtcaattgtaaaa

SEQ ID NO: 306258 - DNA, 33 bp, Homo sapien
tcgtaagtccaatttcgatagtcaattgtaaaa

SEQ ID NO: 306259 - DNA, 33 bp, Homo sapien
tacaattgacataataaatcttttcaagtagca

SEQ ID NO: 306260 - DNA, 33 bp, Homo sapien
tacaattgacataatacatcttttcaagtagca

SEQ ID NO: 306261 - DNA, 33 bp, Homo sapien
tttaatgaaaaggtggaaaccaactaaaatgtg

SEQ ID NO: 306262 - DNA, 33 bp, Homo sapien
tttaatgaaaaggtgggaaccaactaaaatgtg

SEQ ID NO: 306263 - DNA, 33 bp, Homo sapien
attaattagatcgtgacgatatttgctaaagga

SEQ ID NO: 306264 - DNA, 33 bp, Homo sapien
attaattagatcgtgatgatatttgctaaagga

SEQ ID NO: 306265 - DNA, 33 bp, Homo sapien
tttaatctggaagtaacggattgtctataaaac

SEQ ID NO: 306266 - DNA, 33 bp, Homo sapien
tttaatctggaagtaagggattgtctataaaac

SEQ ID NO: 306267 - DNA, 33 bp, Homo sapien
gaaaaaaaataactacaatgtgtatatgcttgc

SEQ ID NO: 306268 - DNA, 33 bp, Homo sapien
gaaaaaaaataactaccatgtgtatatgcttgc

SEQ ID NO: 306269 - DNA, 33 bp, Homo sapien
atgaagggtaggccaccgctgcagatagtgatg

SEQ ID NO: 306270 - DNA, 33 bp, Homo sapien
atgaagggtaggccactgctgcagatagtgatg

SEQ ID NO: 306271 - DNA, 33 bp, Homo sapien
caataaatatgtaaaagctgtgctggaactttg

SEQ ID NO: 306272 - DNA, 33 bp, Homo sapien
caataaatatgtaaaatctgtgctggaactttg

SEQ ID NO: 306273 - DNA, 33 bp, Homo sapien
ttcagtataaacaatgaatgaagaacctgaaaa

SEQ ID NO: 306274 - DNA, 33 bp, Homo sapien
ttcagtataaacaatgtatgaagaacctgaaaa

SEQ ID NO: 306275 - DNA, 33 bp, Homo sapien
taatgtattatctcaacgtactgtggtaaattc

SEQ ID NO: 306276 - DNA, 33 bp, Homo sapien
taatgtattatctcaatgtactgtggtaaattc

SEQ ID NO: 306277 - DNA, 33 bp, Homo sapien
ttttgtgctccaaaccccattctggtgagctag

SEQ ID NO: 306278 - DNA, 33 bp, Homo sapien
ttttgtgctccaaaccgcattctggtgagctag

SEQ ID NO: 306279 - DNA, 33 bp, Homo sapien
ttagaacatagctacccgaggtttctttgcaag

SEQ ID NO: 306280 - DNA, 33 bp, Homo sapien
ttagaacatagctacctgaggtttctttgcaag

SEQ ID NO: 306281 - DNA, 33 bp, Homo sapien
tataggctgaattatgccacatcttccaattca

SEQ ID NO: 306282 - DNA, 33 bp, Homo sapien
tataggctgaattatgtcacatcttccaattca

SEQ ID NO: 306283 - DNA, 33 bp, Homo sapien
cttattttgcaggacacagagaaagcctatagt

SEQ ID NO: 306284 - DNA, 33 bp, Homo sapien
cttattttgcaggacagagagaaagcctatagt

SEQ ID NO: 306285 - DNA, 33 bp, Homo sapien
ttgccaagaccaatgtgaagttttccttatgtt

SEQ ID NO: 306286 - DNA, 33 bp, Homo sapien
ttgccaagaccaatgttaagttttccttatgtt

SEQ ID NO: 306287 - DNA, 33 bp, Homo sapien
aaaatagccatgggtaaaaatcacagcaaaaat

SEQ ID NO: 306288 - DNA, 33 bp, Homo sapien
aaaatagccatgggtagaaatcacagcaaaaat

SEQ ID NO: 306289 - DNA, 33 bp, Homo sapien
atcacagcaaaaatacgattcatggtacgaata

SEQ ID NO: 306290 - DNA, 33 bp, Homo sapien
atcacagcaaaaatactattcatggtacgaata

SEQ ID NO: 306291 - DNA, 33 bp, Homo sapien
atattgcaaacttatgacaattaaaaatgaaaa

SEQ ID NO: 306292 - DNA, 33 bp, Homo sapien
atattgcaaacttatggcaattaaaaatgaaaa

SEQ ID NO: 306293 - DNA, 33 bp, Homo sapien
tactccaaatttaaccaaaggaaggaagcaaaa

SEQ ID NO: 306294 - DNA, 33 bp, Homo sapien
tactccaaatttaaccgaaggaaggaagcaaaa

SEQ ID NO: 306295 - DNA, 33 bp, Homo sapien
ctgttctaaacttgagaccagaaactgaatttt

SEQ ID NO: 306296 - DNA, 33 bp, Homo sapien
ctgttctaaacttgaggccagaaactgaatttt

SEQ ID NO: 306297 - DNA, 33 bp, Homo sapien
gtatgtggggatattaaatgagcacaggtttga

SEQ ID NO: 306298 - DNA, 33 bp, Homo sapien
gtatgtggggatattacatgagcacaggtttga

SEQ ID NO: 306299 - DNA, 33 bp, Homo sapien
gtctcctggataataacagatagtgattggctc

SEQ ID NO: 306300 - DNA, 33 bp, Homo sapien
gtctcctggataataagagatagtgattggctc

SEQ ID NO: 306301 - DNA, 33 bp, Homo sapien
tattttatctgtaaacactgagctgatggcttt

SEQ ID NO: 306302 - DNA, 33 bp, Homo sapien
tattttatctgtaaactctgagctgatggcttt

SEQ ID NO: 306303 - DNA, 33 bp, Homo sapien
gtcagatgtctagtcaatagtctttctcatttt

SEQ ID NO: 306304 - DNA, 33 bp, Homo sapien
gtcagatgtctagtcagtagtctttctcatttt

SEQ ID NO: 306305 - DNA, 33 bp, Homo sapien
ttttacattcattctacagttattcatccccat

SEQ ID NO: 306306 - DNA, 33 bp, Homo sapien
ttttacattcattctatagttattcatccccat

SEQ ID NO: 306307 - DNA, 33 bp, Homo sapien
gttggcattacctactaaagtgtgaatatgaca

SEQ ID NO: 306308 - DNA, 33 bp, Homo sapien
gttggcattacctactgaagtgtgaatatgaca

SEQ ID NO: 306309 - DNA, 33 bp, Homo sapien
cctgacaagtaagatcccatttcacttttcaca

SEQ ID NO: 306310 - DNA, 33 bp, Homo sapien
cctgacaagtaagatctcatttcacttttcaca

SEQ ID NO: 306311 - DNA, 33 bp, Homo sapien
tttctggtagatgcaaaatacacttctaaaaga

SEQ ID NO: 306312 - DNA, 33 bp, Homo sapien
tttctggtagatgcaagatacacttctaaaaga

SEQ ID NO: 306313 - DNA, 33 bp, Homo sapien
tagaagacaatggacacgattttattgtctata

SEQ ID NO: 306314 - DNA, 33 bp, Homo sapien
tagaagacaatggacatgattttattgtctata

SEQ ID NO: 306315 - DNA, 33 bp, Homo sapien
ttgtaatttaccttagccatttgttgcaactta

SEQ ID NO: 306316 - DNA, 33 bp, Homo sapien
ttgtaatttaccttagtcatttgttgcaactta

SEQ ID NO: 306317 - DNA, 33 bp, Homo sapien
ttttataaatttgaaaatcagacttttccttgc

SEQ ID NO: 306318 - DNA, 33 bp, Homo sapien
ttttataaatttgaaagtcagacttttccttgc

SEQ ID NO: 306319 - DNA, 33 bp, Homo sapien
aaatgtagactctaaaatgaaaagagcaagcca

SEQ ID NO: 306320 - DNA, 33 bp, Homo sapien
aaatgtagactctaaagtgaaaagagcaagcca

SEQ ID NO: 306321 - DNA, 33 bp, Homo sapien
tcttacccagctggaaatgagcattcctcatgc

SEQ ID NO: 306322 - DNA, 33 bp, Homo sapien
tcttacccagctggaagtgagcattcctcatgc

SEQ ID NO: 306323 - DNA, 33 bp, Homo sapien
agtttctggattggaaaaaaggttaaactagaa

SEQ ID NO: 306324 - DNA, 33 bp, Homo sapien
agtttctggattggaagaaaggttaaactagaa

SEQ ID NO: 306325 - DNA, 33 bp, Homo sapien
tacaaatcaataacacaaagacaaatacccaat

SEQ ID NO: 306326 - DNA, 33 bp, Homo sapien
tacaaatcaataacaccaagacaaatacccaat

SEQ ID NO: 306327 - DNA, 33 bp, Homo sapien
aaatacaaaggtctgcaaaacctcaacctggtg

SEQ ID NO: 306328 - DNA, 33 bp, Homo sapien
aaatacaaaggtctgcgaaacctcaacctggtg

SEQ ID NO: 306329 - DNA, 33 bp, Homo sapien
tgttaacatcgttctccaatgggaggtgctact

SEQ ID NO: 306330 - DNA, 33 bp, Homo sapien
tgttaacatcgttctctaatgggaggtgctact

SEQ ID NO: 306331 - DNA, 33 bp, Homo sapien
gtcagtcatgatcaaacggcactatttccaaat

SEQ ID NO: 306332 - DNA, 33 bp, Homo sapien
gtcagtcatgatcaaatggcactatttccaaat

SEQ ID NO: 306333 - DNA, 33 bp, Homo sapien
atgacagcaattctgaaaggtataagacagtag

SEQ ID NO: 306334 - DNA, 33 bp, Homo sapien
atgacagcaattctgataggtataagacagtag

SEQ ID NO: 306335 - DNA, 33 bp, Homo sapien
ttccatctactaattaacctatcaaagacattc

SEQ ID NO: 306336 - DNA, 33 bp, Homo sapien
ttccatctactaattagcctatcaaagacattc

SEQ ID NO: 306337 - DNA, 33 bp, Homo sapien
ccatgacttctcctcaggtaagagttttataat

SEQ ID NO: 306338 - DNA, 33 bp, Homo sapien
ccatgacttctcctcatgtaagagttttataat

SEQ ID NO: 306339 - DNA, 33 bp, Homo sapien
tggaatcacagctgtagctcgcactaatccatt

SEQ ID NO: 306340 - DNA, 33 bp, Homo sapien
tggaatcacagctgtatctcgcactaatccatt

SEQ ID NO: 306341 - DNA, 33 bp, Homo sapien
tggcctttaagaaacaagaatgatgcctggaat

SEQ ID NO: 306342 - DNA, 33 bp, Homo sapien
tggcctttaagaaacaggaatgatgcctggaat

SEQ ID NO: 306343 - DNA, 33 bp, Homo sapien
ccaccaaatataattcccagtagtggttgaaac

SEQ ID NO: 306344 - DNA, 33 bp, Homo sapien
ccaccaaatataattctcagtagtggttgaaac

SEQ ID NO: 306345 - DNA, 33 bp, Homo sapien
tctcactcataagtgaacaaaaatgaaattgcc

SEQ ID NO: 306346 - DNA, 33 bp, Homo sapien
tctcactcataagtgagcaaaaatgaaattgcc

SEQ ID NO: 306347 - DNA, 33 bp, Homo sapien
aacagtaatttggaagccaaaaattcttagaag

SEQ ID NO: 306348 - DNA, 33 bp, Homo sapien
aacagtaatttggaagtcaaaaattcttagaag

SEQ ID NO: 306349 - DNA, 33 bp, Homo sapien
tccctactgctctctggattttctgctaatgtc

SEQ ID NO: 306350 - DNA, 33 bp, Homo sapien
tccctactgctctctgtattttctgctaatgtc

SEQ ID NO: 306351 - DNA, 33 bp, Homo sapien
gctgactctgtggaaccagtctattcctcattg

SEQ ID NO: 306352 - DNA, 33 bp, Homo sapien
gctgactctgtggaactagtctattcctcattg

SEQ ID NO: 306353 - DNA, 33 bp, Homo sapien
tatgattcctgctgaaacttgattaatacaata

SEQ ID NO: 306354 - DNA, 33 bp, Homo sapien
tatgattcctgctgaaccttgattaatacaata

SEQ ID NO: 306355 - DNA, 33 bp, Homo sapien
tgttaaccatatgatacgctttaaaatgaggat

SEQ ID NO: 306356 - DNA, 33 bp, Homo sapien
tgttaaccatatgatatgctttaaaatgaggat

SEQ ID NO: 306357 - DNA, 33 bp, Homo sapien
tcttggcatgctgaaccgaaaaaaggggctcag

SEQ ID NO: 306358 - DNA, 33 bp, Homo sapien
tcttggcatgctgaactgaaaaaaggggctcag

SEQ ID NO: 306359 - DNA, 33 bp, Homo sapien
gcaaataatggacacaagaaagatgtaggagtg

SEQ ID NO: 306360 - DNA, 33 bp, Homo sapien
gcaaataatggacacaggaaagatgtaggagtg

SEQ ID NO: 306361 - DNA, 33 bp, Homo sapien
tctaaagtggagctcacgtaagaagcagaattt

SEQ ID NO: 306362 - DNA, 33 bp, Homo sapien
tctaaagtggagctcatgtaagaagcagaattt

SEQ ID NO: 306363 - DNA, 33 bp, Homo sapien
cagcttgctgtgttagcataattttgtgagtac

SEQ ID NO: 306364 - DNA, 33 bp, Homo sapien
cagcttgctgtgttaggataattttgtgagtac

SEQ ID NO: 306365 - DNA, 33 bp, Homo sapien
ctagtaacaacagtcaactcaagactcacccag

SEQ ID NO: 306366 - DNA, 33 bp, Homo sapien
ctagtaacaacagtcacctcaagactcacccag

SEQ ID NO: 306367 - DNA, 33 bp, Homo sapien
tggtactccagaatacacaaatgataagcaaaa

SEQ ID NO: 306368 - DNA, 33 bp, Homo sapien
tggtactccagaatacgcaaatgataagcaaaa

SEQ ID NO: 306369 - DNA, 33 bp, Homo sapien
gtgtagttatgctcaacatgattcagcttcttg

SEQ ID NO: 306370 - DNA, 33 bp, Homo sapien
gtgtagttatgctcaatatgattcagcttcttg

SEQ ID NO: 306371 - DNA, 33 bp, Homo sapien
ggtaattagaaatggactcaacgtagcttggtt

SEQ ID NO: 306372 - DNA, 33 bp, Homo sapien
ggtaattagaaatggagtcaacgtagcttggtt

SEQ ID NO: 306373 - DNA, 33 bp, Homo sapien
cactatggacaagaaaatgtgaatatggttatt

SEQ ID NO: 306374 - DNA, 33 bp, Homo sapien
cactatggacaagaaagtgtgaatatggttatt

SEQ ID NO: 306375 - DNA, 33 bp, Homo sapien
ttgactgggaacttaagatattggctggtactt

SEQ ID NO: 306376 - DNA, 33 bp, Homo sapien
ttgactgggaacttaatatattggctggtactt

SEQ ID NO: 306377 - DNA, 33 bp, Homo sapien
atgaggtaactgactaaaactgatctatcactg

SEQ ID NO: 306378 - DNA, 33 bp, Homo sapien
atgaggtaactgactacaactgatctatcactg

SEQ ID NO: 306379 - DNA, 33 bp, Homo sapien
tacttcctagacacaacggaggatgcaggaatt

SEQ ID NO: 306380 - DNA, 33 bp, Homo sapien
tacttcctagacacaatggaggatgcaggaatt

SEQ ID NO: 306381 - DNA, 33 bp, Homo sapien
aaaagaccgagaatagccaaagctgtaaggata

SEQ ID NO: 306382 - DNA, 33 bp, Homo sapien
aaaagaccgagaataggcaaagctgtaaggata

SEQ ID NO: 306383 - DNA, 33 bp, Homo sapien
agtggctggggttaaacgcattgctcatgttca

SEQ ID NO: 306384 - DNA, 33 bp, Homo sapien
agtggctggggttaaatgcattgctcatgttca

SEQ ID NO: 306385 - DNA, 33 bp, Homo sapien
taaatgacttggttaacagcatggctcagaggt

SEQ ID NO: 306386 - DNA, 33 bp, Homo sapien
taaatgacttggttaatagcatggctcagaggt

SEQ ID NO: 306387 - DNA, 33 bp, Homo sapien
ttgctgtatatcagaactgttcaaaagaggaat

SEQ ID NO: 306388 - DNA, 33 bp, Homo sapien
ttgctgtatatcagaattgttcaaaagaggaat

SEQ ID NO: 306389 - DNA, 33 bp, Homo sapien
actgttcgccctatcacaagttttctttaatca

SEQ ID NO: 306390 - DNA, 33 bp, Homo sapien
actgttcgccctatcataagttttctttaatca

SEQ ID NO: 306391 - DNA, 33 bp, Homo sapien
agactgacagagaataataactaagcagataag

SEQ ID NO: 306392 - DNA, 33 bp, Homo sapien
agactgacagagaatagtaactaagcagataag

SEQ ID NO: 306393 - DNA, 33 bp, Homo sapien
acatgtctgctcttacaggagtaatcatctttg

SEQ ID NO: 306394 - DNA, 33 bp, Homo sapien
acatgtctgctcttacgggagtaatcatctttg

SEQ ID NO: 306395 - DNA, 33 bp, Homo sapien
tgtttgtttttaagaacgaggtgagtctcttgt

SEQ ID NO: 306396 - DNA, 33 bp, Homo sapien
tgtttgtttttaagaatgaggtgagtctcttgt

SEQ ID NO: 306397 - DNA, 33 bp, Homo sapien
aaatagagtggattttaaaaaattgcacagtaa

SEQ ID NO: 306398 - DNA, 33 bp, Homo sapien
aaatagagtggatttttaaaaattgcacagtaa

SEQ ID NO: 306399 - DNA, 33 bp, Homo sapien
catctgtttcatgaccaacattggtgtttgata

SEQ ID NO: 306400 - DNA, 33 bp, Homo sapien
catctgtttcatgaccgacattggtgtttgata

SEQ ID NO: 306401 - DNA, 33 bp, Homo sapien
taagccctgtatcttacataaatgctttggaag

SEQ ID NO: 306402 - DNA, 33 bp, Homo sapien
taagccctgtatcttatataaatgctttggaag

SEQ ID NO: 306403 - DNA, 33 bp, Homo sapien
ccttccaacttcctgaccaacagtcctgtctgt

SEQ ID NO: 306404 - DNA, 33 bp, Homo sapien
ccttccaacttcctgatcaacagtcctgtctgt

SEQ ID NO: 306405 - DNA, 33 bp, Homo sapien
ctcctctctaagactacgaccaaagtgagtcat

SEQ ID NO: 306406 - DNA, 33 bp, Homo sapien
ctcctctctaagactatgaccaaagtgagtcat

SEQ ID NO: 306407 - DNA, 33 bp, Homo sapien
tcctcatagtttaaacccttagagcatctttga

SEQ ID NO: 306408 - DNA, 33 bp, Homo sapien
tcctcatagtttaaactcttagagcatctttga

SEQ ID NO: 306409 - DNA, 33 bp, Homo sapien
cacacacccacataggaccaactacatacacac

SEQ ID NO: 306410 - DNA, 33 bp, Homo sapien
cacacacccacatagggccaactacatacacac

SEQ ID NO: 306411 - DNA, 33 bp, Homo sapien; identical to SEQ ID NO: 306409

SEQ ID NO: 306412 - DNA, 33 bp, Homo sapien; identical to SEQ ID NO: 306410

SEQ ID NO: 306413 - DNA, 33 bp, Homo sapien
atctttagcagttaagcagtcagtaagattgtg

SEQ ID NO: 306414 - DNA, 33 bp, Homo sapien
atctttagcagttaagtagtcagtaagattgtg

SEQ ID NO: 306415 - DNA, 33 bp, Homo sapien
acatgaccagcctttgaaaaatattgccagtga

SEQ ID NO: 306416 - DNA, 33 bp, Homo sapien
acatgaccagcctttggaaaatattgccagtga

SEQ ID NO: 306417 - DNA, 33 bp, Homo sapien
cattggtagatgttcaatcacctgaggcctgtt

SEQ ID NO: 306418 - DNA, 33 bp, Homo sapien
cattggtagatgttcagtcacctgaggcctgtt

SEQ ID NO: 306419 - DNA, 33 bp, Homo sapien
ttttttgtttccctaaaacctagcagcagtcat

SEQ ID NO: 306420 - DNA, 33 bp, Homo sapien
ttttttgtttccctaatacctagcagcagtcat

SEQ ID NO: 306421 - DNA, 33 bp, Homo sapien
tgtgaccagaattcaactgcttacagagtaatt

SEQ ID NO: 306422 - DNA, 33 bp, Homo sapien
tgtgaccagaattcaagtgcttacagagtaatt

SEQ ID NO: 306423 - DNA, 33 bp, Homo sapien
ccaacataaggacttacgttgttcagctgagct

SEQ ID NO: 306424 - DNA, 33 bp, Homo sapien
ccaacataaggacttatgttgttcagctgagct

SEQ ID NO: 306425 - DNA, 33 bp, Homo sapien
taaggctttagggaaaatatgttgtagacacta

SEQ ID NO: 306426 - DNA, 33 bp, Homo sapien
taaggctttagggaaagtatgttgtagacacta

SEQ ID NO: 306427 - DNA, 33 bp, Homo sapien
ttatgatatctcaaacaaaatttggcaagacat

SEQ ID NO: 306428 - DNA, 33 bp, Homo sapien
ttatgatatctcaaacgaaatttggcaagacat

SEQ ID NO: 306429 - DNA, 33 bp, Homo sapien
cctagtctaacatcacaacaattgaacttttgt

SEQ ID NO: 306430 - DNA, 33 bp, Homo sapien
cctagtctaacatcaccacaattgaacttttgt

SEQ ID NO: 306431 - DNA, 33 bp, Homo sapien
tgtcctaaagtcttgcactttttaactaggaga

SEQ ID NO: 306432 - DNA, 33 bp, Homo sapien
tgtcctaaagtcttgctctttttaactaggaga

SEQ ID NO: 306433 - DNA, 33 bp, Homo sapien
atatcttgtttttccaactcagttaacatggta

SEQ ID NO: 306434 - DNA, 33 bp, Homo sapien
atatcttgtttttccatctcagttaacatggta

SEQ ID NO: 306435 - DNA, 33 bp, Homo sapien
cgttttcatgcactacagattctaaccttgtct

SEQ ID NO: 306436 - DNA, 33 bp, Homo sapien
cgttttcatgcactacggattctaaccttgtct

SEQ ID NO: 306437 - DNA, 33 bp, Homo sapien
cttcccaaagataaggaattgttgttcatatcc

SEQ ID NO: 306438 - DNA, 33 bp, Homo sapien
cttcccaaagataagggattgttgttcatatcc

SEQ ID NO: 306439 - DNA, 33 bp, Homo sapien
agagtggaaattcaataacagttgaatgaaggt

SEQ ID NO: 306440 - DNA, 33 bp, Homo sapien
agagtggaaattcaatgacagttgaatgaaggt

SEQ ID NO: 306441 - DNA, 33 bp, Homo sapien
aaaaaagatagtttcacgtagatctgagagata

SEQ ID NO: 306442 - DNA, 33 bp, Homo sapien
aaaaaagatagtttcaggtagatctgagagata

SEQ ID NO: 306443 - DNA, 33 bp, Homo sapien
gctgtttaccatcttacgcaatttactatctct

SEQ ID NO: 306444 - DNA, 33 bp, Homo sapien
gctgtttaccatcttatgcaatttactatctct

SEQ ID NO: 306445 - DNA, 33 bp, Homo sapien
ctttgaaggtgttaaaagaaacagtcctataag

SEQ ID NO: 306446 - DNA, 33 bp, Homo sapien
ctttgaaggtgttaaaggaaacagtcctataag

SEQ ID NO: 306447 - DNA, 33 bp, Homo sapien
attgcacaatactgaaaacttggttgagagaaa

SEQ ID NO: 306448 - DNA, 33 bp, Homo sapien
attgcacaatactgaacacttggttgagagaaa

SEQ ID NO: 306449 - DNA, 33 bp, Homo sapien
tagctactcctttggccgcatctgttcagaagt

SEQ ID NO: 306450 - DNA, 33 bp, Homo sapien
tagctactcctttggctgcatctgttcagaagt

SEQ ID NO: 306451 - DNA, 33 bp, Homo sapien
gcagggacctagtgacaacgaaggaaatgccca

SEQ ID NO: 306452 - DNA, 33 bp, Homo sapien
gcagggacctagtgactacgaaggaaatgccca

SEQ ID NO: 306453 - DNA, 33 bp, Homo sapien
cttcatattccaattcgacatcactgcttccat

SEQ ID NO: 306454 - DNA, 33 bp, Homo sapien
cttcatattccaattctacatcactgcttccat

SEQ ID NO: 306455 - DNA, 33 bp, Homo sapien
cagtgtgatttcaatacgtggaaatgatgcagg

SEQ ID NO: 306456 - DNA, 33 bp, Homo sapien
cagtgtgatttcaatatgtggaaatgatgcagg

SEQ ID NO: 306457 - DNA, 33 bp, Homo sapien
agttaaagtaagaaaaggcaccaccaattataa

SEQ ID NO: 306458 - DNA, 33 bp, Homo sapien
agttaaagtaagaaaatgcaccaccaattataa

SEQ ID NO: 306459 - DNA, 33 bp, Homo sapien
gtattttggttactagacaaacaaatcatgttt

SEQ ID NO: 306460 - DNA, 33 bp, Homo sapien
gtattttggttactaggcaaacaaatcatgttt

SEQ ID NO: 306461 - DNA, 33 bp, Homo sapien
ctggcttatacctttaccttatagagactacat

SEQ ID NO: 306462 - DNA, 33 bp, Homo sapien
ctggcttatacctttagcttatagagactacat

SEQ ID NO: 306463 - DNA, 33 bp, Homo sapien
agtattcccaataaacagactcccatttggtca

SEQ ID NO: 306464 - DNA, 33 bp, Homo sapien
agtattcccaataaaccgactcccatttggtca

SEQ ID NO: 306465 - DNA, 33 bp, Homo sapien
tctttgaatccaaaataaacttctcttgtttga

SEQ ID NO: 306466 - DNA, 33 bp, Homo sapien
tctttgaatccaaaatgaacttctcttgtttga

SEQ ID NO: 306467 - DNA, 33 bp, Homo sapien
tgataatgaatggataataatgtctgtccaatt

SEQ ID NO: 306468 - DNA, 33 bp, Homo sapien
tgataatgaatggatattaatgtctgtccaatt

SEQ ID NO: 306469 - DNA, 33 bp, Homo sapien
taatcacatagcattaaattttgttagggagac

SEQ ID NO: 306470 - DNA, 33 bp, Homo sapien
taatcacatagcattacattttgttagggagac

SEQ ID NO: 306471 - DNA, 33 bp, Homo sapien
caaaggaaaaatttcacgtggcatgtccagaaa

SEQ ID NO: 306472 - DNA, 33 bp, Homo sapien
caaaggaaaaatttcatgtggcatgtccagaaa

SEQ ID NO: 306473 - DNA, 33 bp, Homo sapien
tagaaatcacctaagacggcagagattgagctg

SEQ ID NO: 306474 - DNA, 33 bp, Homo sapien
tagaaatcacctaagatggcagagattgagctg

SEQ ID NO: 306475 - DNA, 33 bp, Homo sapien
tggaagaactaacatagtagatgtgtgagataa

SEQ ID NO: 306476 - DNA, 33 bp, Homo sapien
tggaagaactaacatattagatgtgtgagataa

SEQ ID NO: 306477 - DNA, 33 bp, Homo sapien
tagtcagcctctaatacggcttccattcatcca

SEQ ID NO: 306478 - DNA, 33 bp, Homo sapien
tagtcagcctctaatatggcttccattcatcca

SEQ ID NO: 306479 - DNA, 33 bp, Homo sapien
tcttggtcttctataaagctgagggtaaatata

SEQ ID NO: 306480 - DNA, 33 bp, Homo sapien
tcttggtcttctataaggctgagggtaaatata

SEQ ID NO: 306481 - DNA, 33 bp, Homo sapien
ggctctggatgtcttaaaaggttgtagtcaaac

SEQ ID NO: 306482 - DNA, 33 bp, Homo sapien
ggctctggatgtcttataaggttgtagtcaaac

SEQ ID NO: 306483 - DNA, 33 bp, Homo sapien
ggtgatactttgaggaataaggaaattgaatct

SEQ ID NO: 306484 - DNA, 33 bp, Homo sapien
ggtgatactttgaggattaaggaaattgaatct

SEQ ID NO: 306485 - DNA, 33 bp, Homo sapien
tctctttgactgcaagacagaagtcaagttggt

SEQ ID NO: 306486 - DNA, 33 bp, Homo sapien
tctctttgactgcaaggcagaagtcaagttggt

SEQ ID NO: 306487 - DNA, 33 bp, Homo sapien
aaggataaacacaataaggtttctgttgtaata

SEQ ID NO: 306488 - DNA, 33 bp, Homo sapien
aaggataaacacaatacggtttctgttgtaata

SEQ ID NO: 306489 - DNA, 33 bp, Homo sapien
acacatttcagcagccacatcagtatttttaaa

SEQ ID NO: 306490 - DNA, 33 bp, Homo sapien
acacatttcagcagccgcatcagtatttttaaa

SEQ ID NO: 306491 - DNA, 33 bp, Homo sapien
tgaaatgtgttttgcaggtagaaatatgagtca

SEQ ID NO: 306492 - DNA, 33 bp, Homo sapien
tgaaatgtgttttgcatgtagaaatatgagtca

SEQ ID NO: 306493 - DNA, 33 bp, Homo sapien
tcctcactctggcagaagagccttacctcatgg

SEQ ID NO: 306494 - DNA, 33 bp, Homo sapien
tcctcactctggcagaggagccttacctcatgg

SEQ ID NO: 306495 - DNA, 33 bp, Homo sapien
gttgcttctttagggaactgatttctttcattc

SEQ ID NO: 306496 - DNA, 33 bp, Homo sapien
gttgcttctttagggacctgatttctttcattc

SEQ ID NO: 306497 - DNA, 33 bp, Homo sapien
ctacacacagaattcgcaagtcaaacagtcctg

SEQ ID NO: 306498 - DNA, 33 bp, Homo sapien
ctacacacagaattcggaagtcaaacagtcctg

SEQ ID NO: 306499 - DNA, 33 bp, Homo sapien
atgtcttttcaaatacaaaagaatctcggaatt

SEQ ID NO: 306500 - DNA, 33 bp, Homo sapien
atgtcttttcaaatacgaaagaatctcggaatt

SEQ ID NO: 306501 - DNA, 33 bp, Homo sapien
ttgatggaaacacatactatgaaaaaacttcac

SEQ ID NO: 306502 - DNA, 33 bp, Homo sapien
ttgatggaaacacatattatgaaaaaacttcac

SEQ ID NO: 306503 - DNA, 33 bp, Homo sapien
tagagcggcctagaacaactagaaattaaggaa

SEQ ID NO: 306504 - DNA, 33 bp, Homo sapien
tagagcggcctagaaccactagaaattaaggaa

SEQ ID NO: 306505 - DNA, 33 bp, Homo sapien
aaacacagaatccaataaatcataacccataat

SEQ ID NO: 306506 - DNA, 33 bp, Homo sapien
aaacacagaatccaatgaatcataacccataat

SEQ ID NO: 306507 - DNA, 33 bp, Homo sapien
ttctctctctcctgcaaccttatgaagaaggcg

SEQ ID NO: 306508 - DNA, 33 bp, Homo sapien
ttctctctctcctgcagccttatgaagaaggcg

SEQ ID NO: 306509 - DNA, 33 bp, Homo sapien
caatagaatcagtggcaaagatctggacaatag

SEQ ID NO: 306510 - DNA, 33 bp, Homo sapien
caatagaatcagtggcgaagatctggacaatag

SEQ ID NO: 306511 - DNA, 33 bp, Homo sapien
ctcagagtcgaaattaggcctctgcaaatgagc

SEQ ID NO: 306512 - DNA, 33 bp, Homo sapien
ctcagagtcgaaattatgcctctgcaaatgagc

SEQ ID NO: 306513 - DNA, 33 bp, Homo sapien
ggtatgtagaagtattcaagactattgataata

SEQ ID NO: 306514 - DNA, 33 bp, Homo sapien
ggtatgtagaagtatttaagactattgataata

SEQ ID NO: 306515 - DNA, 33 bp, Homo sapien
gttcaaatatcatgaacgaatggaataagtcat

SEQ ID NO: 306516 - DNA, 33 bp, Homo sapien
gttcaaatatcatgaatgaatggaataagtcat

SEQ ID NO: 306517 - DNA, 33 bp, Homo sapien
ctgaggcaggaccaaacggtttacagtccattc

SEQ ID NO: 306518 - DNA, 33 bp, Homo sapien
ctgaggcaggaccaaatggtttacagtccattc

SEQ ID NO: 306519 - DNA, 33 bp, Homo sapien
atgactgtcaaagccaaaatgattccaaaagga

SEQ ID NO: 306520 - DNA, 33 bp, Homo sapien
atgactgtcaaagccagaatgattccaaaagga

SEQ ID NO: 306521 - DNA, 33 bp, Homo sapien
tgtggcaagtaaataacggagagacatctgagg

SEQ ID NO: 306522 - DNA, 33 bp, Homo sapien
tgtggcaagtaaataatggagagacatctgagg

SEQ ID NO: 306523 - DNA, 33 bp, Homo sapien
aaaattctgtaactataagctctcaggatattt

SEQ ID NO: 306524 - DNA, 33 bp, Homo sapien
aaaattctgtaactattagctctcaggatattt

SEQ ID NO: 306525 - DNA, 33 bp, Homo sapien
gattgaaaagagatagaaagaatgtgtggcaag

SEQ ID NO: 306526 - DNA, 33 bp, Homo sapien
gattgaaaagagatagcaagaatgtgtggcaag

SEQ ID NO: 306527 - DNA, 33 bp, Homo sapien
ccaaattaacagttcaaattctctggataccac

SEQ ID NO: 306528 - DNA, 33 bp, Homo sapien
ccaaattaacagttcacattctctggataccac

SEQ ID NO: 306529 - DNA, 33 bp, Homo sapien
cacttcattggactacaatagcacattgaaaaa

SEQ ID NO: 306530 - DNA, 33 bp, Homo sapien
cacttcattggactaccatagcacattgaaaaa

SEQ ID NO: 306531 - DNA, 33 bp, Homo sapien
ggaagctcaattttaacctcatcatagaactct

SEQ ID NO: 306532 - DNA, 33 bp, Homo sapien
ggaagctcaattttaatctcatcatagaactct

SEQ ID NO: 306533 - DNA, 33 bp, Homo sapien
aggaaggtccatctgcagcaacataggaaggag

SEQ ID NO: 306534 - DNA, 33 bp, Homo sapien
aggaaggtccatctgcggcaacataggaaggag

SEQ ID NO: 306535 - DNA, 33 bp, Homo sapien
gatggagtcatatctcacatagagtatagtctt

SEQ ID NO: 306536 - DNA, 33 bp, Homo sapien
gatggagtcatatctcgcatagagtatagtctt

SEQ ID NO: 306537 - DNA, 33 bp, Homo sapien
acaaggttataagacacgaagcagatttaaccc

SEQ ID NO: 306538 - DNA, 33 bp, Homo sapien
acaaggttataagacatgaagcagatttaaccc

SEQ ID NO: 306539 - DNA, 33 bp, Homo sapien
caaattagctgcgtagacaagttagccatagta

SEQ ID NO: 306540 - DNA, 33 bp, Homo sapien
caaattagctgcgtaggcaagttagccatagta

SEQ ID NO: 306541 - DNA, 33 bp, Homo sapien
gcatttcttttcacccagacacttgctttcaaa

SEQ ID NO: 306542 - DNA, 33 bp, Homo sapien
gcatttcttttcacccggacacttgctttcaaa

SEQ ID NO: 306543 - DNA, 33 bp, Homo sapien
atgataattgtgaactaaaccaagctaactttg

SEQ ID NO: 306544 - DNA, 33 bp, Homo sapien
atgataattgtgaactgaaccaagctaactttg

SEQ ID NO: 306545 - DNA, 33 bp, Homo sapien
aaaatgttagtgattacgccaatgttaacatcc

SEQ ID NO: 306546 - DNA, 33 bp, Homo sapien
aaaatgttagtgattatgccaatgttaacatcc

SEQ ID NO: 306547 - DNA, 33 bp, Homo sapien
gtaaagagacatatgaaccattttaaaatatag

SEQ ID NO: 306548 - DNA, 33 bp, Homo sapien
gtaaagagacatatgagccattttaaaatatag

SEQ ID NO: 306549 - DNA, 33 bp, Homo sapien
catcctttgtagttctcaaactgtatgattaaa

SEQ ID NO: 306550 - DNA, 33 bp, Homo sapien
catcctttgtagttctgaaactgtatgattaaa

SEQ ID NO: 306551 - DNA, 33 bp, Homo sapien
tatgtggggattccaacactaacttatatgata

SEQ ID NO: 306552 - DNA, 33 bp, Homo sapien
tatgtggggattccaatactaacttatatgata

SEQ ID NO: 306553 - DNA, 33 bp, Homo sapien
agccaaattgcctagacgattttgtgtggcaga

SEQ ID NO: 306554 - DNA, 33 bp, Homo sapien
agccaaattgcctagatgattttgtgtggcaga

SEQ ID NO: 306555 - DNA, 33 bp, Homo sapien
gccagatgattctgtccaagcgtaggctaatgt

SEQ ID NO: 306556 - DNA, 33 bp, Homo sapien
gccagatgattctgtctaagcgtaggctaatgt

SEQ ID NO: 306557 - DNA, 33 bp, Homo sapien
atgcatctaaggtcagaaactgagcttattaat

SEQ ID NO: 306558 - DNA, 33 bp, Homo sapien
atgcatctaaggtcagcaactgagcttattaat

SEQ ID NO: 306559 - DNA, 33 bp, Homo sapien
ctatagaatagtgcaaatgagcaggacttttct

SEQ ID NO: 306560 - DNA, 33 bp, Homo sapien
ctatagaatagtgcaagtgagcaggacttttct

SEQ ID NO: 306561 - DNA, 33 bp, Homo sapien
tccttcattgtaaaagccgaaagttgaggatgg

SEQ ID NO: 306562 - DNA, 33 bp, Homo sapien
tccttcattgtaaaagtcgaaagttgaggatgg

SEQ ID NO: 306563 - DNA, 33 bp, Homo sapien
aacatacatatgttgacattgctatgcttaaca

SEQ ID NO: 306564 - DNA, 33 bp, Homo sapien
aacatacatatgttgagattgctatgcttaaca

SEQ ID NO: 306565 - DNA, 33 bp, Homo sapien
ggcgtaagatgcacatattgtagcttgggaact

SEQ ID NO: 306566 - DNA, 33 bp, Homo sapien
ggcgtaagatgcacatgttgtagcttgggaact

SEQ ID NO: 306567 - DNA, 33 bp, Homo sapien
catgaataatctcgtacagcctttccaaagaga

SEQ ID NO: 306568 - DNA, 33 bp, Homo sapien
catgaataatctcgtatagcctttccaaagaga

SEQ ID NO: 306569 - DNA, 33 bp, Homo sapien
acatttaagtgtattacagcagttatgcaaatg

SEQ ID NO: 306570 - DNA, 33 bp, Homo sapien
acatttaagtgtattatagcagttatgcaaatg

SEQ ID NO: 306571 - DNA, 33 bp, Homo sapien
tgctatttcctactccggatctgatttaaagtt

SEQ ID NO: 306572 - DNA, 33 bp, Homo sapien
tgctatttcctactcctgatctgatttaaagtt

SEQ ID NO: 306573 - DNA, 33 bp, Homo sapien
ttgaaaatgactgatcgactggagtatattcag

SEQ ID NO: 306574 - DNA, 33 bp, Homo sapien
ttgaaaatgactgatctactggagtatattcag

SEQ ID NO: 306575 - DNA, 33 bp, Homo sapien
catttatggtgacaaaagcaatttgctggatta

SEQ ID NO: 306576 - DNA, 33 bp, Homo sapien
catttatggtgacaaaggcaatttgctggatta

SEQ ID NO: 306577 - DNA, 33 bp, Homo sapien
gctggattaatattcaaggctgtttggcaccag

SEQ ID NO: 306578 - DNA, 33 bp, Homo sapien
gctggattaatattcagggctgtttggcaccag

SEQ ID NO: 306579 - DNA, 33 bp, Homo sapien
tgaagaaaacttcacacatacgttttgggttca

SEQ ID NO: 306580 - DNA, 33 bp, Homo sapien
tgaagaaaacttcacatatacgttttgggttca

SEQ ID NO: 306581 - DNA, 33 bp, Homo sapien
gcaggctctatttccaactcaaggcaagtcctt

SEQ ID NO: 306582 - DNA, 33 bp, Homo sapien
gcaggctctatttccagctcaaggcaagtcctt

SEQ ID NO: 306583 - DNA, 33 bp, Homo sapien
ccaatatatggagtcaatctaggtgtccaataa

SEQ ID NO: 306584 - DNA, 33 bp, Homo sapien
ccaatatatggagtcattctaggtgtccaataa

SEQ ID NO: 306585 - DNA, 33 bp, Homo sapien
tcactggttgtcattaagtctacagttatgcag

SEQ ID NO: 306586 - DNA, 33 bp, Homo sapien
tcactggttgtcattaggtctacagttatgcag

SEQ ID NO: 306587 - DNA, 33 bp, Homo sapien
tggctctaaccattacaaaaccttgcagaagca

SEQ ID NO: 306588 - DNA, 33 bp, Homo sapien
tggctctaaccattacgaaaccttgcagaagca

SEQ ID NO: 306589 - DNA, 33 bp, Homo sapien
gctctctatggtggcaaattatttcagcactaa

SEQ ID NO: 306590 - DNA, 33 bp, Homo sapien
gctctctatggtggcacattatttcagcactaa

SEQ ID NO: 306591 - DNA, 33 bp, Homo sapien
tgaaatagttgttgtcagaactagaaatgatct

SEQ ID NO: 306592 - DNA, 33 bp, Homo sapien
tgaaatagttgttgtcggaactagaaatgatct

SEQ ID NO: 306593 - DNA, 33 bp, Homo sapien
tctcaagaagctctcaacagccaaggtataaga

SEQ ID NO: 306594 - DNA, 33 bp, Homo sapien
tctcaagaagctctcagcagccaaggtataaga

SEQ ID NO: 306595 - DNA, 33 bp, Homo sapien
tttgtttgtttgactaccctactcttccaaagt

SEQ ID NO: 306596 - DNA, 33 bp, Homo sapien
tttgtttgtttgactatcctactcttccaaagt

SEQ ID NO: 306597 - DNA, 33 bp, Homo sapien
aaactcctattgtctccgaagttggatatttta

SEQ ID NO: 306598 - DNA, 33 bp, Homo sapien
aaactcctattgtctctgaagttggatatttta

SEQ ID NO: 306599 - DNA, 33 bp, Homo sapien
cccctctgtgtttttacactttgtcatctcttt

SEQ ID NO: 306600 - DNA, 33 bp, Homo sapien
cccctctgtgtttttagactttgtcatctcttt

SEQ ID NO: 306601 - DNA, 33 bp, Homo sapien
acaggcaatcatctcacaattttactgctggaa

SEQ ID NO: 306602 - DNA, 33 bp, Homo sapien
acaggcaatcatctcagaattttactgctggaa

SEQ ID NO: 306603 - DNA, 33 bp, Homo sapien
gcagccagccttaatacatggataaccttatac

SEQ ID NO: 306604 - DNA, 33 bp, Homo sapien
gcagccagccttaatatatggataaccttatac

SEQ ID NO: 306605 - DNA, 33 bp, Homo sapien
taaggtcatcttaatacaggtggtcacagttct

SEQ ID NO: 306606 - DNA, 33 bp, Homo sapien
taaggtcatcttaatataggtggtcacagttct

SEQ ID NO: 306607 - DNA, 33 bp, Homo sapien
ttatgaaagaaacagcagagatacaacaatgtg

SEQ ID NO: 306608 - DNA, 33 bp, Homo sapien
ttatgaaagaaacagcggagatacaacaatgtg

SEQ ID NO: 306609 - DNA, 33 bp, Homo sapien
aagactgcccttaccaacatacaaatgagtgat

SEQ ID NO: 306610 - DNA, 33 bp, Homo sapien
aagactgcccttaccagcatacaaatgagtgat

SEQ ID NO: 306611 - DNA, 33 bp, Homo sapien
ttatctgaaacacatacgggacacagtgactgc

SEQ ID NO: 306612 - DNA, 33 bp, Homo sapien
ttatctgaaacacatatgggacacagtgactgc

SEQ ID NO: 306613 - DNA, 33 bp, Homo sapien
tggtcatcaaaagaagactccctaaatgctctt

SEQ ID NO: 306614 - DNA, 33 bp, Homo sapien
tggtcatcaaaagaaggctccctaaatgctctt

SEQ ID NO: 306615 - DNA, 33 bp, Homo sapien
atgtctacttcatatacggacaacttaatttgt

SEQ ID NO: 306616 - DNA, 33 bp, Homo sapien
atgtctacttcatatatggacaacttaatttgt

SEQ ID NO: 306617 - DNA, 33 bp, Homo sapien
agaaaggtgttcctgacagatagagcggaaagc

SEQ ID NO: 306618 - DNA, 33 bp, Homo sapien
agaaaggtgttcctgatagatagagcggaaagc

SEQ ID NO: 306619 - DNA, 33 bp, Homo sapien
tctgtacaaaatcagacccaaatgtttaaagcc

SEQ ID NO: 306620 - DNA, 33 bp, Homo sapien
tctgtacaaaatcagatccaaatgtttaaagcc

SEQ ID NO: 306621 - DNA, 33 bp, Homo sapien
atttttatatgtgtggcataagagacaatgtga

SEQ ID NO: 306622 - DNA, 33 bp, Homo sapien
atttttatatgtgtggtataagagacaatgtga

SEQ ID NO: 306623 - DNA, 33 bp, Homo sapien
ttgtttctttcatccaataagcaattgctgaac

SEQ ID NO: 306624 - DNA, 33 bp, Homo sapien
ttgtttctttcatccagtaagcaattgctgaac

SEQ ID NO: 306625 - DNA, 33 bp, Homo sapien
aataactaagtaataaagtacagccctcaatat

SEQ ID NO: 306626 - DNA, 33 bp, Homo sapien
aataactaagtaataaggtacagccctcaatat

SEQ ID NO: 306627 - DNA, 33 bp, Homo sapien
ctttctttgttcttaaagtttgagagtttgatt

SEQ ID NO: 306628 - DNA, 33 bp, Homo sapien
ctttctttgttcttaacgtttgagagtttgatt

SEQ ID NO: 306629 - DNA, 33 bp, Homo sapien; identical to SEQ ID NO: 306627

SEQ ID NO: 306630 - DNA, 33 bp, Homo sapien; identical to SEQ ID NO: 306628

SEQ ID NO: 306631 - DNA, 33 bp, Homo sapien
gaaggaatgagaaaaactcattattcaagcaac

SEQ ID NO: 306632 - DNA, 33 bp, Homo sapien
gaaggaatgagaaaaattcattattcaagcaac

SEQ ID NO: 306633 - DNA, 33 bp, Homo sapien
aaaattttggttgatacatgaaacattcagaat

SEQ ID NO: 306634 - DNA, 33 bp, Homo sapien
aaaattttggttgatatatgaaacattcagaat

SEQ ID NO: 306635 - DNA, 33 bp, Homo sapien
cacaattctttgtatgaatgctaagcaaaactc

SEQ ID NO: 306636 - DNA, 33 bp, Homo sapien
cacaattctttgtatgcatgctaagcaaaactc

SEQ ID NO: 306637 - DNA, 33 bp, Homo sapien
aacatacttcctagagcccttttcttgagattg

SEQ ID NO: 306638 - DNA, 33 bp, Homo sapien
aacatacttcctagagtccttttcttgagattg

SEQ ID NO: 306639 - DNA, 33 bp, Homo sapien
tataaatattgcagggacaactggctagctatg

SEQ ID NO: 306640 - DNA, 33 bp, Homo sapien
tataaatattgcagggccaactggctagctatg

SEQ ID NO: 306641 - DNA, 33 bp, Homo sapien
cctgttgcagttagaacggaccccagtcctata

SEQ ID NO: 306642 - DNA, 33 bp, Homo sapien
cctgttgcagttagaatggaccccagtcctata

SEQ ID NO: 306643 - DNA, 33 bp, Homo sapien
ttttacaagaatgctaaataattttcataaagc

SEQ ID NO: 306644 - DNA, 33 bp, Homo sapien
ttttacaagaatgctagataattttcataaagc

SEQ ID NO: 306645 - DNA, 33 bp, Homo sapien
ctacccactctactcacggtcaaatacaagctg

SEQ ID NO: 306646 - DNA, 33 bp, Homo sapien
ctacccactctactcatggtcaaatacaagctg

SEQ ID NO: 306647 - DNA, 33 bp, Homo sapien
tgactagccatttgccaaacgttgaagctggac

SEQ ID NO: 306648 - DNA, 33 bp, Homo sapien
tgactagccatttgccgaacgttgaagctggac

SEQ ID NO: 306649 - DNA, 33 bp, Homo sapien
taaacacaacaaaactcagtcatggtcccacac

SEQ ID NO: 306650 - DNA, 33 bp, Homo sapien
taaacacaacaaaacttagtcatggtcccacac

SEQ ID NO: 306651 - DNA, 33 bp, Homo sapien
cttgttagcaataataggaacctctgatcaatt

SEQ ID NO: 306652 - DNA, 33 bp, Homo sapien
cttgttagcaataatatgaacctctgatcaatt

SEQ ID NO: 306653 - DNA, 33 bp, Homo sapien
tcatgttggcactttccaaccactttcttagtt

SEQ ID NO: 306654 - DNA, 33 bp, Homo sapien
tcatgttggcactttctaaccactttcttagtt

SEQ ID NO: 306655 - DNA, 33 bp, Homo sapien
gagaacggtgtctggccaaatggactgaaaaag

SEQ ID NO: 306656 - DNA, 33 bp, Homo sapien
gagaacggtgtctggctaaatggactgaaaaag

SEQ ID NO: 306657 - DNA, 33 bp, Homo sapien
taaaaaataataaaacaagctacaggaaacttt

SEQ ID NO: 306658 - DNA, 33 bp, Homo sapien
taaaaaataataaaacgagctacaggaaacttt

SEQ ID NO: 306659 - DNA, 33 bp, Homo sapien
ttgttgttgtttttgacagacagcttgtaggga

SEQ ID NO: 306660 - DNA, 33 bp, Homo sapien
ttgttgttgtttttgagagacagcttgtaggga

SEQ ID NO: 306661 - DNA, 33 bp, Homo sapien
aatagggtatgtttcacgatgatttttaagata

SEQ ID NO: 306662 - DNA, 33 bp, Homo sapien
aatagggtatgtttcatgatgatttttaagata

SEQ ID NO: 306663 - DNA, 33 bp, Homo sapien
ttgccctaattgtgaacatctgactttggaaac

SEQ ID NO: 306664 - DNA, 33 bp, Homo sapien
ttgccctaattgtgaatatctgactttggaaac

SEQ ID NO: 306665 - DNA, 33 bp, Homo sapien
cccagctctctttggaccttttatagtatgtac

SEQ ID NO: 306666 - DNA, 33 bp, Homo sapien
cccagctctctttggatcttttatagtatgtac

SEQ ID NO: 306667 - DNA, 33 bp, Homo sapien
tcctgcaaaatggaatcaatagctctgtcctgt

SEQ ID NO: 306668 - DNA, 33 bp, Homo sapien
tcctgcaaaatggaatgaatagctctgtcctgt

SEQ ID NO: 306669 - DNA, 33 bp, Homo sapien
attaaacttctcaaaacgatcctaaagttctgc

SEQ ID NO: 306670 - DNA, 33 bp, Homo sapien
attaaacttctcaaaatgatcctaaagttctgc

SEQ ID NO: 306671 - DNA, 33 bp, Homo sapien; identical to SEQ ID NO: 306669

SEQ ID NO: 306672 - DNA, 33 bp, Homo sapien; identical to SEQ ID NO: 306670

SEQ ID NO: 306673 - DNA, 33 bp, Homo sapien
gctgcaaggtcacaagccagagaagcatactct

SEQ ID NO: 306674 - DNA, 33 bp, Homo sapien
gctgcaaggtcacaaggcagagaagcatactct

SEQ ID NO: 306675 - DNA, 33 bp, Homo sapien
aaacgattactgaaaaacattcaggattctgat

SEQ ID NO: 306676 - DNA, 33 bp, Homo sapien
aaacgattactgaaaaccattcaggattctgat

SEQ ID NO: 306677 - DNA, 33 bp, Homo sapien
gcatagagtgggagaccgaattttgtttccaga

SEQ ID NO: 306678 - DNA, 33 bp, Homo sapien
gcatagagtgggagactgaattttgtttccaga

SEQ ID NO: 306679 - DNA, 33 bp, Homo sapien
tataactaaaataaatcagtagaatctctggaa

SEQ ID NO: 306680 - DNA, 33 bp, Homo sapien
tataactaaaataaatgagtagaatctctggaa

SEQ ID NO: 306681 - DNA, 33 bp, Homo sapien
atgatatcctcacataccttttctacgttgcta

SEQ ID NO: 306682 - DNA, 33 bp, Homo sapien
atgatatcctcacatatcttttctacgttgcta

SEQ ID NO: 306683 - DNA, 33 bp, Homo sapien
atcttcataggtagccactactaaaaatttttt

SEQ ID NO: 306684 - DNA, 33 bp, Homo sapien
atcttcataggtagccgctactaaaaatttttt

SEQ ID NO: 306685 - DNA, 33 bp, Homo sapien
gctatccaaagaaagacaggatgatagtactcc

SEQ ID NO: 306686 - DNA, 33 bp, Homo sapien
gctatccaaagaaagagaggatgatagtactcc

SEQ ID NO: 306687 - DNA, 33 bp, Homo sapien
ctggttcaagattcaaaccaaatcctagttttg

SEQ ID NO: 306688 - DNA, 33 bp, Homo sapien
ctggttcaagattcaatccaaatcctagttttg

SEQ ID NO: 306689 - DNA, 33 bp, Homo sapien
tttcattccatcccagaactgttccattccccc

SEQ ID NO: 306690 - DNA, 33 bp, Homo sapien
tttcattccatcccagcactgttccattccccc

SEQ ID NO: 306691 - DNA, 33 bp, Homo sapien
aactatttggtactaaatgcttctaagtgaaga

SEQ ID NO: 306692 - DNA, 33 bp, Homo sapien
aactatttggtactaagtgcttctaagtgaaga

SEQ ID NO: 306693 - DNA, 33 bp, Homo sapien
caggaattgtggtataacagcataaaatgaacc

SEQ ID NO: 306694 - DNA, 33 bp, Homo sapien
caggaattgtggtatagcagcataaaatgaacc

SEQ ID NO: 306695 - DNA, 33 bp, Homo sapien
acaaaagatgctgccaatattaaaagaacaata

SEQ ID NO: 306696 - DNA, 33 bp, Homo sapien
acaaaagatgctgccagtattaaaagaacaata

SEQ ID NO: 306697 - DNA, 33 bp, Homo sapien
aaaatttgtatggaaccagaaagaccttaaata

SEQ ID NO: 306698 - DNA, 33 bp, Homo sapien
aaaatttgtatggaacgagaaagaccttaaata

SEQ ID NO: 306699 - DNA, 33 bp, Homo sapien
aattgtcaaatattccaatgttcacttgtcgcc

SEQ ID NO: 306700 - DNA, 33 bp, Homo sapien
aattgtcaaatattccgatgttcacttgtcgcc

SEQ ID NO: 306701 - DNA, 33 bp, Homo sapien
agttgaatatgtgacacaggtaagcaagttttg

SEQ ID NO: 306702 - DNA, 33 bp, Homo sapien
agttgaatatgtgacagaggtaagcaagttttg

SEQ ID NO: 306703 - DNA, 33 bp, Homo sapien
gctatggtgctagataaaagaggaacatgtgcc

SEQ ID NO: 306704 - DNA, 33 bp, Homo sapien
gctatggtgctagatagaagaggaacatgtgcc

SEQ ID NO: 306705 - DNA, 33 bp, Homo sapien
ggttcccacaagctaactctggccaaaatgagt

SEQ ID NO: 306706 - DNA, 33 bp, Homo sapien
ggttcccacaagctaagtctggccaaaatgagt

SEQ ID NO: 306707 - DNA, 33 bp, Homo sapien
tcttacaaccactgccaatcactttcattacca

SEQ ID NO: 306708 - DNA, 33 bp, Homo sapien
tcttacaaccactgcccatcactttcattacca

SEQ ID NO: 306709 - DNA, 33 bp, Homo sapien
tctaatggagtctttacaactgacttttgagct

SEQ ID NO: 306710 - DNA, 33 bp, Homo sapien
tctaatggagtctttagaactgacttttgagct

SEQ ID NO: 306711 - DNA, 33 bp, Homo sapien
agataacaaaaataaagtcgatagagtaaatga

SEQ ID NO: 306712 - DNA, 33 bp, Homo sapien
agataacaaaaataaattcgatagagtaaatga

SEQ ID NO: 306713 - DNA, 33 bp, Homo sapien
gtatgtggtattttacagattgagtaaatggta

SEQ ID NO: 306714 - DNA, 33 bp, Homo sapien
gtatgtggtattttaccgattgagtaaatggta

SEQ ID NO: 306715 - DNA, 33 bp, Homo sapien
ttaacctggtttccataaacaattacagaggtt

SEQ ID NO: 306716 - DNA, 33 bp, Homo sapien
ttaacctggtttccatgaacaattacagaggtt

SEQ ID NO: 306717 - DNA, 33 bp, Homo sapien
cacacaatattttacacagaatttaggaagttc

SEQ ID NO: 306718 - DNA, 33 bp, Homo sapien
cacacaatattttacagagaatttaggaagttc

SEQ ID NO: 306719 - DNA, 33 bp, Homo sapien
ctctctctccaatttaagttccaagatagcagg

SEQ ID NO: 306720 - DNA, 33 bp, Homo sapien
ctctctctccaatttaggttccaagatagcagg

SEQ ID NO: 306721 - DNA, 33 bp, Homo sapien
ataaagacaatataaaacagggtaatgtggtta

SEQ ID NO: 306722 - DNA, 33 bp, Homo sapien
ataaagacaatataaagcagggtaatgtggtta

SEQ ID NO: 306723 - DNA, 33 bp, Homo sapien
aggcaagagattagacagataataatgaaaatg

SEQ ID NO: 306724 - DNA, 33 bp, Homo sapien
aggcaagagattagacggataataatgaaaatg

SEQ ID NO: 306725 - DNA, 33 bp, Homo sapien
gagagagaaagtatcccgatagccaaataaagg

SEQ ID NO: 306726 - DNA, 33 bp, Homo sapien
gagagagaaagtatcctgatagccaaataaagg

SEQ ID NO: 306727 - DNA, 33 bp, Homo sapien
actttgaaaactgttccaatatatgatcatggg

SEQ ID NO: 306728 - DNA, 33 bp, Homo sapien
actttgaaaactgttctaatatatgatcatggg

SEQ ID NO: 306729 - DNA, 33 bp, Homo sapien
cttggtgtgacgttaccctacccgacttttaca

SEQ ID NO: 306730 - DNA, 33 bp, Homo sapien
cttggtgtgacgttactctacccgacttttaca

SEQ ID NO: 306731 - DNA, 33 bp, Homo sapien
gttttcttatgagaatcaggtttcagagcaaac

SEQ ID NO: 306732 - DNA, 33 bp, Homo sapien
gttttcttatgagaattaggtttcagagcaaac

SEQ ID NO: 306733 - DNA, 33 bp, Homo sapien
caatcccttgtctgacacattttcccactcctc

SEQ ID NO: 306734 - DNA, 33 bp, Homo sapien
caatcccttgtctgacgcattttcccactcctc

SEQ ID NO: 306735 - DNA, 33 bp, Homo sapien
aagttcttaaggtgcactcagagcaatgtatat

SEQ ID NO: 306736 - DNA, 33 bp, Homo sapien
aagttcttaaggtgcattcagagcaatgtatat

SEQ ID NO: 306737 - DNA, 33 bp, Homo sapien
ttttgcactctcattaagccatgatgaccaatc

SEQ ID NO: 306738 - DNA, 33 bp, Homo sapien
ttttgcactctcattaggccatgatgaccaatc

SEQ ID NO: 306739 - DNA, 33 bp, Homo sapien
tgggctctaccctaaaccaattcaatcattaac

SEQ ID NO: 306740 - DNA, 33 bp, Homo sapien
tgggctctaccctaaatcaattcaatcattaac

SEQ ID NO: 306741 - DNA, 33 bp, Homo sapien
tattttaagtccaagtaaacctcctggaaaaga

SEQ ID NO: 306742 - DNA, 33 bp, Homo sapien
tattttaagtccaagtgaacctcctggaaaaga

SEQ ID NO: 306743 - DNA, 33 bp, Homo sapien
tttccaacctcatgaactaggacaggcctagta

SEQ ID NO: 306744 - DNA, 33 bp, Homo sapien
tttccaacctcatgaattaggacaggcctagta

SEQ ID NO: 306745 - DNA, 33 bp, Homo sapien
caacattgcaactgaaaaagcactattatgcat

SEQ ID NO: 306746 - DNA, 33 bp, Homo sapien
caacattgcaactgaagaagcactattatgcat

SEQ ID NO: 306747 - DNA, 33 bp, Homo sapien
gatcatatccataacaacgactgttgctgagtt

SEQ ID NO: 306748 - DNA, 33 bp, Homo sapien
gatcatatccataacagcgactgttgctgagtt

SEQ ID NO: 306749 - DNA, 33 bp, Homo sapien
atacatatatatttaacgtatgcactatgatga

SEQ ID NO: 306750 - DNA, 33 bp, Homo sapien
atacatatatatttaaggtatgcactatgatga

SEQ ID NO: 306751 - DNA, 33 bp, Homo sapien
tagacatttttagagaagacttaagtgcttgta

SEQ ID NO: 306752 - DNA, 33 bp, Homo sapien
tagacatttttagagatgacttaagtgcttgta

SEQ ID NO: 306753 - DNA, 33 bp, Homo sapien
ttgggttgtggacttacctgggggcagttactt

SEQ ID NO: 306754 - DNA, 33 bp, Homo sapien
ttgggttgtggacttatctgggggcagttactt

SEQ ID NO: 306755 - DNA, 33 bp, Homo sapien
agcaattgcactcacaataacatcaaaaattta

SEQ ID NO: 306756 - DNA, 33 bp, Homo sapien
agcaattgcactcacagtaacatcaaaaattta

SEQ ID NO: 306757 - DNA, 33 bp, Homo sapien
taaactgaaaccaaaaactatgattctaatgat

SEQ ID NO: 306758 - DNA, 33 bp, Homo sapien
taaactgaaaccaaaagctatgattctaatgat

SEQ ID NO: 306759 - DNA, 33 bp, Homo sapien
tcaacaaatacgccagaaaagctactatctcat

SEQ ID NO: 306760 - DNA, 33 bp, Homo sapien
tcaacaaatacgccaggaaagctactatctcat

SEQ ID NO: 306761 - DNA, 33 bp, Homo sapien
gacataaaatattcaaatgatccaaaagaaggc

SEQ ID NO: 306762 - DNA, 33 bp, Homo sapien
gacataaaatattcaagtgatccaaaagaaggc

SEQ ID NO: 306763 - DNA, 33 bp, Homo sapien
attgggtgagaaacaacgtactgaggcagaact

SEQ ID NO: 306764 - DNA, 33 bp, Homo sapien
attgggtgagaaacaatgtactgaggcagaact

SEQ ID NO: 306765 - DNA, 33 bp, Homo sapien
taaaagcattaaaggcaaacaatatttaagtta

SEQ ID NO: 306766 - DNA, 33 bp, Homo sapien
taaaagcattaaaggcgaacaatatttaagtta

SEQ ID NO: 306767 - DNA, 33 bp, Homo sapien
acctttttttattcaactctctatctaccaaga

SEQ ID NO: 306768 - DNA, 33 bp, Homo sapien
acctttttttattcaagtctctatctaccaaga

SEQ ID NO: 306769 - DNA, 33 bp, Homo sapien
cacaatgatctgtatgcaggccgtgtgtcaacc

SEQ ID NO: 306770 - DNA, 33 bp, Homo sapien
cacaatgatctgtatgtaggccgtgtgtcaacc

SEQ ID NO: 306771 - DNA, 33 bp, Homo sapien
cactacaacctctttcgaggaaaactttcaaag

SEQ ID NO: 306772 - DNA, 33 bp, Homo sapien
cactacaacctctttctaggaaaactttcaaag

SEQ ID NO: 306773 - DNA, 33 bp, Homo sapien
tttagtacaaggttgacgggaatgtgagttagc

SEQ ID NO: 306774 - DNA, 33 bp, Homo sapien
tttagtacaaggttgatgggaatgtgagttagc

SEQ ID NO: 306775 - DNA, 33 bp, Homo sapien
tcaatatggctatcagcaaattcataagcagaa

SEQ ID NO: 306776 - DNA, 33 bp, Homo sapien
tcaatatggctatcagtaaattcataagcagaa

SEQ ID NO: 306777 - DNA, 33 bp, Homo sapien
aatataggtagagatacattgaattcgtatcca

SEQ ID NO: 306778 - DNA, 33 bp, Homo sapien
aatataggtagagatatattgaattcgtatcca

SEQ ID NO: 306779 - DNA, 33 bp, Homo sapien
tcctaccttttttaaaaccttagcaagagaagg

SEQ ID NO: 306780 - DNA, 33 bp, Homo sapien
tcctaccttttttaaagccttagcaagagaagg

SEQ ID NO: 306781 - DNA, 33 bp, Homo sapien
cacgtgactgattaaaagtgaactagaatttaa

SEQ ID NO: 306782 - DNA, 33 bp, Homo sapien
cacgtgactgattaaaggtgaactagaatttaa

SEQ ID NO: 306783 - DNA, 33 bp, Homo sapien
aactgtttcttcagtaagctaagtatgaacgtt

SEQ ID NO: 306784 - DNA, 33 bp, Homo sapien
aactgtttcttcagtaggctaagtatgaacgtt

SEQ ID NO: 306785 - DNA, 33 bp, Homo sapien
tctgtaaaataaccaaataattcaccacatttg

SEQ ID NO: 306786 - DNA, 33 bp, Homo sapien
tctgtaaaataaccaagtaattcaccacatttg

SEQ ID NO: 306787 - DNA, 33 bp, Homo sapien
atttggctgcttttccagagtgattaaaaactt

SEQ ID NO: 306788 - DNA, 33 bp, Homo sapien
atttggctgcttttccggagtgattaaaaactt

SEQ ID NO: 306789 - DNA, 33 bp, Homo sapien
cattggtttgcatgataatagaaaatgtccttt

SEQ ID NO: 306790 - DNA, 33 bp, Homo sapien
cattggtttgcatgatgatagaaaatgtccttt

SEQ ID NO: 306791 - DNA, 33 bp, Homo sapien
gactgctaatcgtacaatatttcttcttgaagt

SEQ ID NO: 306792 - DNA, 33 bp, Homo sapien
gactgctaatcgtacagtatttcttcttgaagt

SEQ ID NO: 306793 - DNA, 33 bp, Homo sapien
tatttagtcttttgtaaaacacttcaagaagaa

SEQ ID NO: 306794 - DNA, 33 bp, Homo sapien
tatttagtcttttgtagaacacttcaagaagaa

SEQ ID NO: 306795 - DNA, 33 bp, Homo sapien
tggcagggggagctaaaaagataggaggccaag

SEQ ID NO: 306796 - DNA, 33 bp, Homo sapien
tggcagggggagctaacaagataggaggccaag

SEQ ID NO: 306797 - DNA, 33 bp, Homo sapien
atactgttgagaagaacgtgtatcctgaagttg

SEQ ID NO: 306798 - DNA, 33 bp, Homo sapien
atactgttgagaagaatgtgtatcctgaagttg

SEQ ID NO: 306799 - DNA, 33 bp, Homo sapien
caatgcaataatcacaagtgagcacatatagcc

SEQ ID NO: 306800 - DNA, 33 bp, Homo sapien
caatgcaataatcacaggtgagcacatatagcc

SEQ ID NO: 306801 - DNA, 33 bp, Homo sapien
aaatacagattctgcaactcattgatttgtagt

SEQ ID NO: 306802 - DNA, 33 bp, Homo sapien
aaatacagattctgcatctcattgatttgtagt

SEQ ID NO: 306803 - DNA, 33 bp, Homo sapien
tggatgctagaaatacaaagtaggaatggaatt

SEQ ID NO: 306804 - DNA, 33 bp, Homo sapien
tggatgctagaaatacgaagtaggaatggaatt

SEQ ID NO: 306805 - DNA, 33 bp, Homo sapien
ataatgactttatgacagaagaagatttgagga

SEQ ID NO: 306806 - DNA, 33 bp, Homo sapien
ataatgactttatgactgaagaagatttgagga

SEQ ID NO: 306807 - DNA, 33 bp, Homo sapien
ctcattttatctttgcagaaactccttgcagta

SEQ ID NO: 306808 - DNA, 33 bp, Homo sapien
ctcattttatctttgcggaaactccttgcagta

SEQ ID NO: 306809 - DNA, 33 bp, Homo sapien
caaaagtggtaaaggaaaataacgtcactaatg

SEQ ID NO: 306810 - DNA, 33 bp, Homo sapien
caaaagtggtaaaggagaataacgtcactaatg

SEQ ID NO: 306811 - DNA, 33 bp, Homo sapien
tagttatacagtttggaattctaatcccaagtt

SEQ ID NO: 306812 - DNA, 33 bp, Homo sapien
tagttatacagtttggcattctaatcccaagtt

SEQ ID NO: 306813 - DNA, 33 bp, Homo sapien
cttggtcccctctggacatttggtgccaataag

SEQ ID NO: 306814 - DNA, 33 bp, Homo sapien
cttggtcccctctggatatttggtgccaataag

SEQ ID NO: 306815 - DNA, 33 bp, Homo sapien
cctattgtaccatctacgtcttcaaaagttgtg

SEQ ID NO: 306816 - DNA, 33 bp, Homo sapien
cctattgtaccatctatgtcttcaaaagttgtg

SEQ ID NO: 306817 - DNA, 33 bp, Homo sapien
gacatacaagtggcaaatagatatattacaaga

SEQ ID NO: 306818 - DNA, 33 bp, Homo sapien
gacatacaagtggcaagtagatatattacaaga

SEQ ID NO: 306819 - DNA, 33 bp, Homo sapien
gtcacaaataggacctaactaaatgtcccgtta

SEQ ID NO: 306820 - DNA, 33 bp, Homo sapien
gtcacaaataggacctcactaaatgtcccgtta

SEQ ID NO: 306821 - DNA, 33 bp, Homo sapien
atgaacctcttcgtaaatcatttacttgtatag

SEQ ID NO: 306822 - DNA, 33 bp, Homo sapien
atgaacctcttcgtaagtcatttacttgtatag

SEQ ID NO: 306823 - DNA, 33 bp, Homo sapien
gaagacattaggaaacaggttcttcaaaagaaa

SEQ ID NO: 306824 - DNA, 33 bp, Homo sapien
gaagacattaggaaacgggttcttcaaaagaaa

SEQ ID NO: 306825 - DNA, 33 bp, Homo sapien
aaggtgatgtgaagatcaaagtggggttagagt

SEQ ID NO: 306826 - DNA, 33 bp, Homo sapien
aaggtgatgtgaagatgaaagtggggttagagt

SEQ ID NO: 306827 - DNA, 33 bp, Homo sapien
acagatcatcccataaggtaggtgttaaatcca

SEQ ID NO: 306828 - DNA, 33 bp, Homo sapien
acagatcatcccataatgtaggtgttaaatcca

SEQ ID NO: 306829 - DNA, 33 bp, Homo sapien
cacaaatttagtttggacaacctgttcttcacc

SEQ ID NO: 306830 - DNA, 33 bp, Homo sapien
cacaaatttagtttggtcaacctgttcttcacc

SEQ ID NO: 306831 - DNA, 33 bp, Homo sapien
ttgaccactgtttccaagatgatcagtcagagt

SEQ ID NO: 306832 - DNA, 33 bp, Homo sapien
ttgaccactgtttccacgatgatcagtcagagt

SEQ ID NO: 306833 - DNA, 33 bp, Homo sapien
tggaacagaatacagaacacaggaacaaattca

SEQ ID NO: 306834 - DNA, 33 bp, Homo sapien
tggaacagaatacagaccacaggaacaaattca

SEQ ID NO: 306835 - DNA, 33 bp, Homo sapien
cacagaaaaaggataaagcctagggtggataaa

SEQ ID NO: 306836 - DNA, 33 bp, Homo sapien
cacagaaaaaggataacgcctagggtggataaa

SEQ ID NO: 306837 - DNA, 33 bp, Homo sapien
cttggaagtttaggagcaagagggatgaagaga

SEQ ID NO: 306838 - DNA, 33 bp, Homo sapien
cttggaagtttaggaggaagagggatgaagaga

SEQ ID NO: 306839 - DNA, 33 bp, Homo sapien
aaatttgtaaagaggaagcacgggcgcagtggc

SEQ ID NO: 306840 - DNA, 33 bp, Homo sapien
aaatttgtaaagaggaggcacgggcgcagtggc

SEQ ID NO: 306841 - DNA, 33 bp, Homo sapien
aatcttatttgtatcaacagagagtaattttac

SEQ ID NO: 306842 - DNA, 33 bp, Homo sapien
aatcttatttgtatcaccagagagtaattttac

SEQ ID NO: 306843 - DNA, 33 bp, Homo sapien
aatcgctcaagctaaaaacttacgtgacatgat

SEQ ID NO: 306844 - DNA, 33 bp, Homo sapien
aatcgctcaagctaaacacttacgtgacatgat

SEQ ID NO: 306845 - DNA, 33 bp, Homo sapien
gtacttaaatcacataagcataagaaaggatat

SEQ ID NO: 306846 - DNA, 33 bp, Homo sapien
gtacttaaatcacataggcataagaaaggatat

SEQ ID NO: 306847 - DNA, 33 bp, Homo sapien
agcagactctctctcaaaaaacatcagggaaca

SEQ ID NO: 306848 - DNA, 33 bp, Homo sapien
agcagactctctctcagaaaacatcagggaaca

SEQ ID NO: 306849 - DNA, 33 bp, Homo sapien
catatcaaaaccacacaccagttagattggtga

SEQ ID NO: 306850 - DNA, 33 bp, Homo sapien
catatcaaaaccacacgccagttagattggtga

SEQ ID NO: 306851 - DNA, 33 bp, Homo sapien
tgttgaggaagggaaaccatccaagagttggta

SEQ ID NO: 306852 - DNA, 33 bp, Homo sapien
tgttgaggaagggaaagcatccaagagttggta

SEQ ID NO: 306853 - DNA, 33 bp, Homo sapien
cagtccatttatagacaatcccaactcaaaaat

SEQ ID NO: 306854 - DNA, 33 bp, Homo sapien
cagtccatttatagacgatcccaactcaaaaat

SEQ ID NO: 306855 - DNA, 33 bp, Homo sapien
agcaaacaacaatatacagcctagcaacattat

SEQ ID NO: 306856 - DNA, 33 bp, Homo sapien
agcaaacaacaatatagagcctagcaacattat

SEQ ID NO: 306857 - DNA, 33 bp, Homo sapien
tccggtgtatatcacacgagaaaacagttacag

SEQ ID NO: 306858 - DNA, 33 bp, Homo sapien
tccggtgtatatcacatgagaaaacagttacag

SEQ ID NO: 306859 - DNA, 33 bp, Homo sapien
catcattaagttaaccacactattggaaatgct

SEQ ID NO: 306860 - DNA, 33 bp, Homo sapien
catcattaagttaaccgcactattggaaatgct

SEQ ID NO: 306861 - DNA, 33 bp, Homo sapien
aatgccatattcactccctttcaaatactgttt

SEQ ID NO: 306862 - DNA, 33 bp, Homo sapien
aatgccatattcactctctttcaaatactgttt

SEQ ID NO: 306863 - DNA, 33 bp, Homo sapien
aaatgcttgagcaacccctgataagccaggtaa

SEQ ID NO: 306864 - DNA, 33 bp, Homo sapien
aaatgcttgagcaaccgctgataagccaggtaa

SEQ ID NO: 306865 - DNA, 33 bp, Homo sapien
tacaaggaacttgagcacttaagaggagtgttt

SEQ ID NO: 306866 - DNA, 33 bp, Homo sapien
tacaaggaacttgagcgcttaagaggagtgttt

SEQ ID NO: 306867 - DNA, 33 bp, Homo sapien
ttcattgtttcaaccacaggtgaggttttgtat

SEQ ID NO: 306868 - DNA, 33 bp, Homo sapien
ttcattgtttcaaccataggtgaggttttgtat

SEQ ID NO: 306869 - DNA, 33 bp, Homo sapien
tatgcttcccacttcaagctaacattccaggaa

SEQ ID NO: 306870 - DNA, 33 bp, Homo sapien
tatgcttcccacttcaggctaacattccaggaa

SEQ ID NO: 306871 - DNA, 33 bp, Homo sapien
gtactggatactgagaagtttaaaatcatggca

SEQ ID NO: 306872 - DNA, 33 bp, Homo sapien
gtactggatactgagaggtttaaaatcatggca

SEQ ID NO: 306873 - DNA, 33 bp, Homo sapien
gtgcttgttctcataaaaggcacatccttgtgg

SEQ ID NO: 306874 - DNA, 33 bp, Homo sapien
gtgcttgttctcataagaggcacatccttgtgg

SEQ ID NO: 306875 - DNA, 33 bp, Homo sapien
tacagaggcttctgtcaccgctcctgccaagtc

SEQ ID NO: 306876 - DNA, 33 bp, Homo sapien
tacagaggcttctgtcgccgctcctgccaagtc

SEQ ID NO: 306877 - DNA, 33 bp, Homo sapien
agtttgacaaagaccaaatgattgtaaatgtgt

SEQ ID NO: 306878 - DNA, 33 bp, Homo sapien
agtttgacaaagaccagatgattgtaaatgtgt

SEQ ID NO: 306879 - DNA, 33 bp, Homo sapien; identical to SEQ ID NO: 306877

SEQ ID NO: 306880 - DNA, 33 bp, Homo sapien; identical to SEQ ID NO: 306878

SEQ ID NO: 306881 - DNA, 33 bp, Homo sapien
ttcaatggattttctacaacatacctacaacca

SEQ ID NO: 306882 - DNA, 33 bp, Homo sapien
ttcaatggattttctataacatacctacaacca

SEQ ID NO: 306883 - DNA, 33 bp, Homo sapien
atgagagatatcgaacgaaggtaatcctaaaat

SEQ ID NO: 306884 - DNA, 33 bp, Homo sapien
atgagagatatcgaactaaggtaatcctaaaat

SEQ ID NO: 306885 - DNA, 33 bp, Homo sapien
tataaaagagggctgaaaattaaggatgttatt

SEQ ID NO: 306886 - DNA, 33 bp, Homo sapien
tataaaagagggctgagaattaaggatgttatt

SEQ ID NO: 306887 - DNA, 33 bp, Homo sapien
ggaagaaaaagtgaaagaataaggtgttcatgt

SEQ ID NO: 306888 - DNA, 33 bp, Homo sapien
ggaagaaaaagtgaaataataaggtgttcatgt

SEQ ID NO: 306889 - DNA, 33 bp, Homo sapien
gccataaccttatcccaaaacttctccaaaaac

SEQ ID NO: 306890 - DNA, 33 bp, Homo sapien
gccataaccttatcccgaaacttctccaaaaac

SEQ ID NO: 306891 - DNA, 33 bp, Homo sapien
agagccatcatgtacccgcaagtgatcaaaggt

SEQ ID NO: 306892 - DNA, 33 bp, Homo sapien
agagccatcatgtacctgcaagtgatcaaaggt

SEQ ID NO: 306893 - DNA, 33 bp, Homo sapien
acagtaatcaccagaaaaggatttaatatgttg

SEQ ID NO: 306894 - DNA, 33 bp, Homo sapien
acagtaatcaccagaagaggatttaatatgttg

SEQ ID NO: 306895 - DNA, 33 bp, Homo sapien
ttcagaatcaaaactacgcagtgtggtgccaag

SEQ ID NO: 306896 - DNA, 33 bp, Homo sapien
ttcagaatcaaaactaggcagtgtggtgccaag

SEQ ID NO: 306897 - DNA, 33 bp, Homo sapien
caaaaggcatacacaagaatagtcaacattaat

SEQ ID NO: 306898 - DNA, 33 bp, Homo sapien
caaaaggcatacacaataatagtcaacattaat

SEQ ID NO: 306899 - DNA, 33 bp, Homo sapien
agaatcaaatttatgacccaatattacaaagca

SEQ ID NO: 306900 - DNA, 33 bp, Homo sapien
agaatcaaatttatgatccaatattacaaagca

SEQ ID NO: 306901 - DNA, 33 bp, Homo sapien
gcaaaatcctggagaaatcaaatcttaaggctc

SEQ ID NO: 306902 - DNA, 33 bp, Homo sapien
gcaaaatcctggagaagtcaaatcttaaggctc

SEQ ID NO: 306903 - DNA, 33 bp, Homo sapien
aggaaatgtaaaaggacacagtgcaatacagtc

SEQ ID NO: 306904 - DNA, 33 bp, Homo sapien
aggaaatgtaaaaggagacagtgcaatacagtc

SEQ ID NO: 306905 - DNA, 33 bp, Homo sapien
ataaggagtgcactgcacatacagggagcccat

SEQ ID NO: 306906 - DNA, 33 bp, Homo sapien
ataaggagtgcactgcgcatacagggagcccat

SEQ ID NO: 306907 - DNA, 33 bp, Homo sapien
ctgaatcttaccttacggaaaacagagcttttg

SEQ ID NO: 306908 - DNA, 33 bp, Homo sapien
ctgaatcttaccttactgaaaacagagcttttg

SEQ ID NO: 306909 - DNA, 33 bp, Homo sapien
aagtatggttattcacactgtatgctatttatt

SEQ ID NO: 306910 - DNA, 33 bp, Homo sapien
aagtatggttattcactctgtatgctatttatt

SEQ ID NO: 306911 - DNA, 33 bp, Homo sapien
caaacttcaaacaccactgaatcccaatgttat

SEQ ID NO: 306912 - DNA, 33 bp, Homo sapien
caaacttcaaacaccagtgaatcccaatgttat

SEQ ID NO: 306913 - DNA, 33 bp, Homo sapien
tttgagtggaggctaaactaatctgttgtgata

SEQ ID NO: 306914 - DNA, 33 bp, Homo sapien
tttgagtggaggctaacctaatctgttgtgata

SEQ ID NO: 306915 - DNA, 33 bp, Homo sapien
tagggtaattagcataactgtcacctcaaaact

SEQ ID NO: 306916 - DNA, 33 bp, Homo sapien
tagggtaattagcatacctgtcacctcaaaact

SEQ ID NO: 306917 - DNA, 33 bp, Homo sapien
accaacagaactgataagatacatagacaatct

SEQ ID NO: 306918 - DNA, 33 bp, Homo sapien
accaacagaactgatacgatacatagacaatct

SEQ ID NO: 306919 - DNA, 33 bp, Homo sapien
tatatatactgtctggaaagggtaaggggatag

SEQ ID NO: 306920 - DNA, 33 bp, Homo sapien
tatatatactgtctgggaagggtaaggggatag

SEQ ID NO: 306921 - DNA, 33 bp, Homo sapien
gctaattaagtctatgacagatagccagatagc

SEQ ID NO: 306922 - DNA, 33 bp, Homo sapien
gctaattaagtctatgccagatagccagatagc

SEQ ID NO: 306923 - DNA, 33 bp, Homo sapien
gaacataaccaaagaccgatgtttgaattcata

SEQ ID NO: 306924 - DNA, 33 bp, Homo sapien
gaacataaccaaagactgatgtttgaattcata

SEQ ID NO: 306925 - DNA, 33 bp, Homo sapien
agaatctgtttttacagagctgactttgtaaat

SEQ ID NO: 306926 - DNA, 33 bp, Homo sapien
agaatctgtttttacatagctgactttgtaaat

SEQ ID NO: 306927 - DNA, 33 bp, Homo sapien
aaaacaagctctctcacatcaagtgttaggcct

SEQ ID NO: 306928 - DNA, 33 bp, Homo sapien
aaaacaagctctctcatatcaagtgttaggcct

SEQ ID NO: 306929 - DNA, 33 bp, Homo sapien
tctctgacccccaaccaagagttataattgttc

SEQ ID NO: 306930 - DNA, 33 bp, Homo sapien
tctctgacccccaaccgagagttataattgttc

SEQ ID NO: 306931 - DNA, 33 bp, Homo sapien
tgagtgagaaaagtccaacatttaatccacgtt

SEQ ID NO: 306932 - DNA, 33 bp, Homo sapien
tgagtgagaaaagtccgacatttaatccacgtt

SEQ ID NO: 306933 - DNA, 33 bp, Homo sapien
tagttcaatcgagtaacataaaaatgtagattt

SEQ ID NO: 306934 - DNA, 33 bp, Homo sapien
tagttcaatcgagtaatataaaaatgtagattt

SEQ ID NO: 306935 - DNA, 33 bp, Homo sapien
tagaaaagatgatgcacccatttacgagttttg

SEQ ID NO: 306936 - DNA, 33 bp, Homo sapien
tagaaaagatgatgcatccatttacgagttttg

SEQ ID NO: 306937 - DNA, 33 bp, Homo sapien
agccattaaaaatcacacataagagctggcagg

SEQ ID NO: 306938 - DNA, 33 bp, Homo sapien
agccattaaaaatcacgcataagagctggcagg

SEQ ID NO: 306939 - DNA, 33 bp, Homo sapien
tagctttctgactgtaggtagcactatcaatag

SEQ ID NO: 306940 - DNA, 33 bp, Homo sapien
tagctttctgactgtatgtagcactatcaatag

SEQ ID NO: 306941 - DNA, 33 bp, Homo sapien
gtctagttgtaaataaaaactcatagtaaatta

SEQ ID NO: 306942 - DNA, 33 bp, Homo sapien
gtctagttgtaaataagaactcatagtaaatta

SEQ ID NO: 306943 - DNA, 33 bp, Homo sapien
tgtcatttttaattcacgtaactggaggattaa

SEQ ID NO: 306944 - DNA, 33 bp, Homo sapien
tgtcatttttaattcatgtaactggaggattaa

SEQ ID NO: 306945 - DNA, 33 bp, Homo sapien
caggatttcagggtgactcaagaccagtctacc

SEQ ID NO: 306946 - DNA, 33 bp, Homo sapien
caggatttcagggtgattcaagaccagtctacc

SEQ ID NO: 306947 - DNA, 33 bp, Homo sapien
atgcaaggatgtaacaaggatccaatgcaaatg

SEQ ID NO: 306948 - DNA, 33 bp, Homo sapien
atgcaaggatgtaacagggatccaatgcaaatg

SEQ ID NO: 306949 - DNA, 33 bp, Homo sapien
gcctcacccacaactacgatctcttgatataca

SEQ ID NO: 306950 - DNA, 33 bp, Homo sapien
gcctcacccacaactatgatctcttgatataca

SEQ ID NO: 306951 - DNA, 33 bp, Homo sapien
tgtggctgtggtagaacttaggacaggtgcaaa

SEQ ID NO: 306952 - DNA, 33 bp, Homo sapien
tgtggctgtggtagaatttaggacaggtgcaaa

SEQ ID NO: 306953 - DNA, 33 bp, Homo sapien
atatagttatcacctcacttaatgtctggcata

SEQ ID NO: 306954 - DNA, 33 bp, Homo sapien
atatagttatcacctcgcttaatgtctggcata

SEQ ID NO: 306955 - DNA, 33 bp, Homo sapien
tccaaaatggtgctgccgattttttccaagttt

SEQ ID NO: 306956 - DNA, 33 bp, Homo sapien
tccaaaatggtgctgctgattttttccaagttt

SEQ ID NO: 306957 - DNA, 33 bp, Homo sapien
acgtgtgtgtgttaaacaagacctgcaaatatt

SEQ ID NO: 306958 - DNA, 33 bp, Homo sapien
acgtgtgtgtgttaaataagacctgcaaatatt

SEQ ID NO: 306959 - DNA, 33 bp, Homo sapien
atttttcactttaaacaacctgaagcttgacaa

SEQ ID NO: 306960 - DNA, 33 bp, Homo sapien
atttttcactttaaactacctgaagcttgacaa

SEQ ID NO: 306961 - DNA, 33 bp, Homo sapien
acagaagcatcacaagcattggaagggatcagt

SEQ ID NO: 306962 - DNA, 33 bp, Homo sapien
acagaagcatcacaagtattggaagggatcagt

SEQ ID NO: 306963 - DNA, 33 bp, Homo sapien
aattcctaccctcataactaccaaacaactagc

SEQ ID NO: 306964 - DNA, 33 bp, Homo sapien
aattcctaccctcatagctaccaaacaactagc

SEQ ID NO: 306965 - DNA, 33 bp, Homo sapien
gaagtcttcatctgccaacttgggaaaagctat

SEQ ID NO: 306966 - DNA, 33 bp, Homo sapien
gaagtcttcatctgccgacttgggaaaagctat

SEQ ID NO: 306967 - DNA, 33 bp, Homo sapien
gtagaccgtaaactccagattcaaaacaatatt

SEQ ID NO: 306968 - DNA, 33 bp, Homo sapien
gtagaccgtaaactccggattcaaaacaatatt

SEQ ID NO: 306969 - DNA, 33 bp, Homo sapien
ccaagcatattttcccaaaaatccccacagttc

SEQ ID NO: 306970 - DNA, 33 bp, Homo sapien
ccaagcatattttccccaaaatccccacagttc

SEQ ID NO: 306971 - DNA, 33 bp, Homo sapien
actggtgcaagtcctaaggtctaaaggccagag

SEQ ID NO: 306972 - DNA, 33 bp, Homo sapien
actggtgcaagtcctacggtctaaaggccagag

SEQ ID NO: 306973 - DNA, 33 bp, Homo sapien
tgtgtacaaagggataagaaagaactggcaaag

SEQ ID NO: 306974 - DNA, 33 bp, Homo sapien
tgtgtacaaagggatacgaaagaactggcaaag

SEQ ID NO: 306975 - DNA, 33 bp, Homo sapien
agatatataatttccactaatcaatttttaaca

SEQ ID NO: 306976 - DNA, 33 bp, Homo sapien
agatatataatttccagtaatcaatttttaaca

SEQ ID NO: 306977 - DNA, 33 bp, Homo sapien
tccagtatgtagtgatcagcaatgtcagaacaa

SEQ ID NO: 306978 - DNA, 33 bp, Homo sapien
tccagtatgtagtgattagcaatgtcagaacaa

SEQ ID NO: 306979 - DNA, 33 bp, Homo sapien
ttagatgaccacacaaaagtaaggagagactct

SEQ ID NO: 306980 - DNA, 33 bp, Homo sapien
ttagatgaccacacaatagtaaggagagactct

SEQ ID NO: 306981 - DNA, 33 bp, Homo sapien
ttatttcagacaaagcagacttcaaacctggaa

SEQ ID NO: 306982 - DNA, 33 bp, Homo sapien
ttatttcagacaaagcggacttcaaacctggaa

SEQ ID NO: 306983 - DNA, 33 bp, Homo sapien
aacctcattcaacacaaagaaaacttctatacc

SEQ ID NO: 306984 - DNA, 33 bp, Homo sapien
aacctcattcaacacacagaaaacttctatacc

SEQ ID NO: 306985 - DNA, 33 bp, Homo sapien
ctaaaacagcatgaaaacattgaaatttcacca

SEQ ID NO: 306986 - DNA, 33 bp, Homo sapien
ctaaaacagcatgaaaccattgaaatttcacca

SEQ ID NO: 306987 - DNA, 33 bp, Homo sapien
tttgatgaaaaatttccactaagcgtgctggca

SEQ ID NO: 306988 - DNA, 33 bp, Homo sapien
tttgatgaaaaatttcgactaagcgtgctggca

SEQ ID NO: 306989 - DNA, 33 bp, Homo sapien
ttctgttgaaatattacaagcattcctcttaat

SEQ ID NO: 306990 - DNA, 33 bp, Homo sapien
ttctgttgaaatattagaagcattcctcttaat

SEQ ID NO: 306991 - DNA, 33 bp, Homo sapien
gcttatccaagtagcaataattctgcaggtcac

SEQ ID NO: 306992 - DNA, 33 bp, Homo sapien
gcttatccaagtagcagtaattctgcaggtcac

SEQ ID NO: 306993 - DNA, 33 bp, Homo sapien
gagcagtatcttttaaacggtacacacaacagg

SEQ ID NO: 306994 - DNA, 33 bp, Homo sapien
gagcagtatcttttaaccggtacacacaacagg

SEQ ID NO: 306995 - DNA, 33 bp, Homo sapien
agagtgttagactttaaaatttttgacgtggat

SEQ ID NO: 306996 - DNA, 33 bp, Homo sapien
agagtgttagactttacaatttttgacgtggat

SEQ ID NO: 306997 - DNA, 33 bp, Homo sapien
aggatgctaaatgggtgaaaaagcagaatgaat

SEQ ID NO: 306998 - DNA, 33 bp, Homo sapien
aggatgctaaatgggttaaaaagcagaatgaat

SEQ ID NO: 306999 - DNA, 33 bp, Homo sapien
agcgattaaacacccacggtagaacaaaggtta

SEQ ID NO: 307000 - DNA, 33 bp, Homo sapien
agcgattaaacacccatggtagaacaaaggtta

SEQ ID NO: 307001 - DNA, 33 bp, Homo sapien
gttttatctgtggaatcaagggctgtggaatgc

SEQ ID NO: 307002 - DNA, 33 bp, Homo sapien
gttttatctgtggaattaagggctgtggaatgc

SEQ ID NO: 307003 - DNA, 33 bp, Homo sapien
ttgtggagtcctcatacgtaaatgtagtaatac

SEQ ID NO: 307004 - DNA, 33 bp, Homo sapien
ttgtggagtcctcatatgtaaatgtagtaatac

SEQ ID NO: 307005 - DNA, 33 bp, Homo sapien
ttagcttgaattcttaactaaagctgtatgaat

SEQ ID NO: 307006 - DNA, 33 bp, Homo sapien
ttagcttgaattcttacctaaagctgtatgaat

SEQ ID NO: 307007 - DNA, 33 bp, Homo sapien
ttgtcctcttccagaacgtacagaattatatac

SEQ ID NO: 307008 - DNA, 33 bp, Homo sapien
ttgtcctcttccagaatgtacagaattatatac

SEQ ID NO: 307009 - DNA, 33 bp, Homo sapien
tacttcagttagaaaacacgtgctctgtaattt

SEQ ID NO: 307010 - DNA, 33 bp, Homo sapien
tacttcagttagaaaatacgtgctctgtaattt

SEQ ID NO: 307011 - DNA, 33 bp, Homo sapien
aattctattatatccacaggtgttttagcctgt

SEQ ID NO: 307012 - DNA, 33 bp, Homo sapien
aattctattatatccataggtgttttagcctgt

SEQ ID NO: 307013 - DNA, 33 bp, Homo sapien
gaaagatggttgtctacgaactgggaagagggc

SEQ ID NO: 307014 - DNA, 33 bp, Homo sapien
gaaagatggttgtctatgaactgggaagagggc

SEQ ID NO: 307015 - DNA, 33 bp, Homo sapien
aagttctcacaggaaacatttgtatcaaacatt

SEQ ID NO: 307016 - DNA, 33 bp, Homo sapien
aagttctcacaggaaagatttgtatcaaacatt

SEQ ID NO: 307017 - DNA, 33 bp, Homo sapien
gtcctctaagccactacatgaatggtatttggg

SEQ ID NO: 307018 - DNA, 33 bp, Homo sapien
gtcctctaagccactatatgaatggtatttggg

SEQ ID NO: 307019 - DNA, 33 bp, Homo sapien
acccttttgagaacaccagccttgccctgtata

SEQ ID NO: 307020 - DNA, 33 bp, Homo sapien
acccttttgagaacactagccttgccctgtata

SEQ ID NO: 307021 - DNA, 33 bp, Homo sapien
ctccatccagggtatgaaaagggtcgagaattg

SEQ ID NO: 307022 - DNA, 33 bp, Homo sapien
ctccatccagggtatggaaagggtcgagaattg

SEQ ID NO: 307023 - DNA, 33 bp, Homo sapien
ctgataatctgaacaaaagctcaagtcttatct

SEQ ID NO: 307024 - DNA, 33 bp, Homo sapien
ctgataatctgaacaacagctcaagtcttatct

SEQ ID NO: 307025 - DNA, 33 bp, Homo sapien
gactgcctgtaggacaatgcatctcagaaatcc

SEQ ID NO: 307026 - DNA, 33 bp, Homo sapien
gactgcctgtaggacagtgcatctcagaaatcc

SEQ ID NO: 307027 - DNA, 33 bp, Homo sapien
ttcctcagcttttcagcccagaaatgacagtat

SEQ ID NO: 307028 - DNA, 33 bp, Homo sapien
ttcctcagcttttcagtccagaaatgacagtat

SEQ ID NO: 307029 - DNA, 33 bp, Homo sapien; identical to SEQ ID NO: 307027

SEQ ID NO: 307030 - DNA, 33 bp, Homo sapien; identical to SEQ ID NO: 307028

SEQ ID NO: 307031 - DNA, 33 bp, Homo sapien
agtgctaatacaagttaaaacccaagtagacct

SEQ ID NO: 307032 - DNA, 33 bp, Homo sapien
agtgctaatacaagttgaaacccaagtagacct

SEQ ID NO: 307033 - DNA, 33 bp, Homo sapien; identical to SEQ ID NO: 307031

SEQ ID NO: 307034 - DNA, 33 bp, Homo sapien; identical to SEQ ID NO: 307032

SEQ ID NO: 307035 - DNA, 33 bp, Homo sapien
atagaacaaggacctaactctcttcaattctat

SEQ ID NO: 307036 - DNA, 33 bp, Homo sapien
atagaacaaggacctagctctcttcaattctat

SEQ ID NO: 307037 - DNA, 33 bp, Homo sapien
agccaattataaatgaagttgatgatttaatta

SEQ ID NO: 307038 - DNA, 33 bp, Homo sapien
agccaattataaatgaggttgatgatttaatta

SEQ ID NO: 307039 - DNA, 33 bp, Homo sapien
tgtaagaaaaagtttcaatcctactactaagca

SEQ ID NO: 307040 - DNA, 33 bp, Homo sapien
tgtaagaaaaagtttcgatcctactactaagca

SEQ ID NO: 307041 - DNA, 33 bp, Homo sapien
acagttttgctattacaaagatgtagattattt

SEQ ID NO: 307042 - DNA, 33 bp, Homo sapien
acagttttgctattacgaagatgtagattattt

SEQ ID NO: 307043 - DNA, 33 bp, Homo sapien
gagttgtcttcttcaaggaacttaattctgaga

SEQ ID NO: 307044 - DNA, 33 bp, Homo sapien
gagttgtcttcttcaatgaacttaattctgaga

SEQ ID NO: 307045 - DNA, 33 bp, Homo sapien
cctcacaatgaatcaacgaaatggaaattaaaa

SEQ ID NO: 307046 - DNA, 33 bp, Homo sapien
cctcacaatgaatcaaggaaatggaaattaaaa

SEQ ID NO: 307047 - DNA, 33 bp, Homo sapien
taggaataaatacggacatcacattagggcttt

SEQ ID NO: 307048 - DNA, 33 bp, Homo sapien
taggaataaatacggatatcacattagggcttt

SEQ ID NO: 307049 - DNA, 33 bp, Homo sapien
ttccattagcggctgcaattttccccttaggtt

SEQ ID NO: 307050 - DNA, 33 bp, Homo sapien
ttccattagcggctgcgattttccccttaggtt

SEQ ID NO: 307051 - DNA, 33 bp, Homo sapien
caagaaaattgtgtaagtcaatactgaaatctg

SEQ ID NO: 307052 - DNA, 33 bp, Homo sapien
caagaaaattgtgtaattcaatactgaaatctg

SEQ ID NO: 307053 - DNA, 33 bp, Homo sapien
tcagaattacttgggaaacttgctataaacaca

SEQ ID NO: 307054 - DNA, 33 bp, Homo sapien
tcagaattacttgggacacttgctataaacaca

SEQ ID NO: 307055 - DNA, 33 bp, Homo sapien
atgaggactggttaaaatcatttcagaataact

SEQ ID NO: 307056 - DNA, 33 bp, Homo sapien
atgaggactggttaaagtcatttcagaataact

SEQ ID NO: 307057 - DNA, 33 bp, Homo sapien
ccctatggaggaatgaaagagagctgcgtatat

SEQ ID NO: 307058 - DNA, 33 bp, Homo sapien
ccctatggaggaatgacagagagctgcgtatat

SEQ ID NO: 307059 - DNA, 33 bp, Homo sapien
ataactccttgactctaaaatcctggatacact

SEQ ID NO: 307060 - DNA, 33 bp, Homo sapien
ataactccttgactctgaaatcctggatacact

SEQ ID NO: 307061 - DNA, 33 bp, Homo sapien
tcttggcttgaactgcaaatcttaaaagttaat

SEQ ID NO: 307062 - DNA, 33 bp, Homo sapien
tcttggcttgaactgccaatcttaaaagttaat

SEQ ID NO: 307063 - DNA, 33 bp, Homo sapien
ttgaagcagtagtttgcagagtattatgtacaa

SEQ ID NO: 307064 - DNA, 33 bp, Homo sapien
ttgaagcagtagtttggagagtattatgtacaa

SEQ ID NO: 307065 - DNA, 33 bp, Homo sapien
ttccctgctgaagactcaatccctaaagtatct

SEQ ID NO: 307066 - DNA, 33 bp, Homo sapien
ttccctgctgaagactgaatccctaaagtatct

SEQ ID NO: 307067 - DNA, 33 bp, Homo sapien
attgactttctcaactcagagccctgtcacaaa

SEQ ID NO: 307068 - DNA, 33 bp, Homo sapien
attgactttctcaacttagagccctgtcacaaa

SEQ ID NO: 307069 - DNA, 33 bp, Homo sapien
cctgaagcactccttccctttacctaaggaaca

SEQ ID NO: 307070 - DNA, 33 bp, Homo sapien
cctgaagcactccttctctttacctaaggaaca

SEQ ID NO: 307071 - DNA, 33 bp, Homo sapien
gcttgtctgagagataactttgcattttaggtg

SEQ ID NO: 307072 - DNA, 33 bp, Homo sapien
gcttgtctgagagatagctttgcattttaggtg

SEQ ID NO: 307073 - DNA, 33 bp, Homo sapien
agaatattaggctggaaccaatgaggccagtga

SEQ ID NO: 307074 - DNA, 33 bp, Homo sapien
agaatattaggctggagccaatgaggccagtga

SEQ ID NO: 307075 - DNA, 33 bp, Homo sapien
cttactttatctctgaaatcagtcatcctctcc

SEQ ID NO: 307076 - DNA, 33 bp, Homo sapien
cttactttatctctgacatcagtcatcctctcc

SEQ ID NO: 307077 - DNA, 33 bp, Homo sapien
catctctgcctttttgaaggggcattttcaatg

SEQ ID NO: 307078 - DNA, 33 bp, Homo sapien
catctctgcctttttggaggggcattttcaatg

SEQ ID NO: 307079 - DNA, 33 bp, Homo sapien
ttaaaacactttcaaactgattagcttatttga

SEQ ID NO: 307080 - DNA, 33 bp, Homo sapien
ttaaaacactttcaaattgattagcttatttga

SEQ ID NO: 307081 - DNA, 33 bp, Homo sapien
taaacctcatatcatcaatcttttgaaattatt

SEQ ID NO: 307082 - DNA, 33 bp, Homo sapien
taaacctcatatcatctatcttttgaaattatt

SEQ ID NO: 307083 - DNA, 33 bp, Homo sapien
tccagaatgtataggaaatggtcaggtgagtaa

SEQ ID NO: 307084 - DNA, 33 bp, Homo sapien
tccagaatgtataggagatggtcaggtgagtaa

SEQ ID NO: 307085 - DNA, 33 bp, Homo sapien
gtgtgttgaatgtgtcaatttcatgcacctgtc

SEQ ID NO: 307086 - DNA, 33 bp, Homo sapien
gtgtgttgaatgtgtccatttcatgcacctgtc

SEQ ID NO: 307087 - DNA, 33 bp, Homo sapien
taagtgctctgggttaaaaaaagattgacagac

SEQ ID NO: 307088 - DNA, 33 bp, Homo sapien
taagtgctctgggttataaaaagattgacagac

SEQ ID NO: 307089 - DNA, 33 bp, Homo sapien
gtgactttgaaatgaacaggatgggatgatgtg

SEQ ID NO: 307090 - DNA, 33 bp, Homo sapien
gtgactttgaaatgaataggatgggatgatgtg

SEQ ID NO: 307091 - DNA, 33 bp, Homo sapien
caactcactaatgctcaactttatcagctccac

SEQ ID NO: 307092 - DNA, 33 bp, Homo sapien
caactcactaatgctcgactttatcagctccac

SEQ ID NO: 307093 - DNA, 33 bp, Homo sapien
caaagaacacttttacagaccttacataatttc

SEQ ID NO: 307094 - DNA, 33 bp, Homo sapien
caaagaacacttttacggaccttacataatttc

SEQ ID NO: 307095 - DNA, 33 bp, Homo sapien
agtaactagtatactacagtgctcacagaccac

SEQ ID NO: 307096 - DNA, 33 bp, Homo sapien
agtaactagtatactatagtgctcacagaccac

SEQ ID NO: 307097 - DNA, 33 bp, Homo sapien
tgcttattgattttcacgaccattctgagagat

SEQ ID NO: 307098 - DNA, 33 bp, Homo sapien
tgcttattgattttcatgaccattctgagagat

SEQ ID NO: 307099 - DNA, 33 bp, Homo sapien
agaagtgcttggatgaaaaattaactaaaaggc

SEQ ID NO: 307100 - DNA, 33 bp, Homo sapien
agaagtgcttggatgacaaattaactaaaaggc

SEQ ID NO: 307101 - DNA, 33 bp, Homo sapien
ggtgggaatagcttcaagccaggaaatagcttt

SEQ ID NO: 307102 - DNA, 33 bp, Homo sapien
ggtgggaatagcttcatgccaggaaatagcttt

SEQ ID NO: 307103 - DNA, 33 bp, Homo sapien
acaatcaaaacttctgcagacactttaagttta

SEQ ID NO: 307104 - DNA, 33 bp, Homo sapien
acaatcaaaacttctgtagacactttaagttta

SEQ ID NO: 307105 - DNA, 33 bp, Homo sapien
ggcctttgtaatccataagttcaaatattaggt

SEQ ID NO: 307106 - DNA, 33 bp, Homo sapien
ggcctttgtaatccattagttcaaatattaggt

SEQ ID NO: 307107 - DNA, 33 bp, Homo sapien
ttaacctgggtgtagaagcaggaggtcatattt

SEQ ID NO: 307108 - DNA, 33 bp, Homo sapien
ttaacctgggtgtagaggcaggaggtcatattt

SEQ ID NO: 307109 - DNA, 33 bp, Homo sapien
gtacagatatcttgacagagttggcatgtacaa

SEQ ID NO: 307110 - DNA, 33 bp, Homo sapien
gtacagatatcttgacggagttggcatgtacaa

SEQ ID NO: 307111 - DNA, 33 bp, Homo sapien
atcatctaagccttcaccgagttgtactctttt

SEQ ID NO: 307112 - DNA, 33 bp, Homo sapien
atcatctaagccttcatcgagttgtactctttt

SEQ ID NO: 307113 - DNA, 33 bp, Homo sapien
gctgcaatggagagtacgtgtggaaaagtcatg

SEQ ID NO: 307114 - DNA, 33 bp, Homo sapien
gctgcaatggagagtaggtgtggaaaagtcatg

SEQ ID NO: 307115 - DNA, 33 bp, Homo sapien
cttctgtttagaatgaagatggttgctaggtac

SEQ ID NO: 307116 - DNA, 33 bp, Homo sapien
cttctgtttagaatgaggatggttgctaggtac

SEQ ID NO: 307117 - DNA, 33 bp, Homo sapien
gtatcaaaaaactgtacgtgtagagttataact

SEQ ID NO: 307118 - DNA, 33 bp, Homo sapien
gtatcaaaaaactgtatgtgtagagttataact

SEQ ID NO: 307119 - DNA, 33 bp, Homo sapien
aatttgataccaaatacgcctctagtagtcccg

SEQ ID NO: 307120 - DNA, 33 bp, Homo sapien
aatttgataccaaatatgcctctagtagtcccg

SEQ ID NO: 307121 - DNA, 33 bp, Homo sapien
atcacagtggataaggacaacatctatatttct

SEQ ID NO: 307122 - DNA, 33 bp, Homo sapien
atcacagtggataaggccaacatctatatttct

SEQ ID NO: 307123 - DNA, 33 bp, Homo sapien
gcctcatgaacagataagtgaatgggacttcag

SEQ ID NO: 307124 - DNA, 33 bp, Homo sapien
gcctcatgaacagatacgtgaatgggacttcag

SEQ ID NO: 307125 - DNA, 33 bp, Homo sapien
atcctcagtactcgagacatcataagtatgaat

SEQ ID NO: 307126 - DNA, 33 bp, Homo sapien
atcctcagtactcgaggcatcataagtatgaat

SEQ ID NO: 307127 - DNA, 33 bp, Homo sapien
gacatttgagttaaaacttgacaaaagtagcat

SEQ ID NO: 307128 - DNA, 33 bp, Homo sapien
gacatttgagttaaaagttgacaaaagtagcat

SEQ ID NO: 307129 - DNA, 33 bp, Homo sapien
agtgttttggaagaagacaatatatttctttta

SEQ ID NO: 307130 - DNA, 33 bp, Homo sapien
agtgttttggaagaagtcaatatatttctttta

SEQ ID NO: 307131 - DNA, 33 bp, Homo sapien
agttgtgctgtcctaacgtctaaattggattta

SEQ ID NO: 307132 - DNA, 33 bp, Homo sapien
agttgtgctgtcctaatgtctaaattggattta

SEQ ID NO: 307133 - DNA, 33 bp, Homo sapien
gttaaagtaacccacaagaagtcaagacaaaga

SEQ ID NO: 307134 - DNA, 33 bp, Homo sapien
gttaaagtaacccacaggaagtcaagacaaaga

SEQ ID NO: 307135 - DNA, 33 bp, Homo sapien
ccaggagtgatacatcaatgatttggacatgtg

SEQ ID NO: 307136 - DNA, 33 bp, Homo sapien
ccaggagtgatacatcgatgatttggacatgtg

SEQ ID NO: 307137 - DNA, 33 bp, Homo sapien
ccactttggctggagacctgaagtaagaaaggg

SEQ ID NO: 307138 - DNA, 33 bp, Homo sapien
ccactttggctggagagctgaagtaagaaaggg

SEQ ID NO: 307139 - DNA, 33 bp, Homo sapien
gaatgtccatgcacagaataagagtgtagagtg

SEQ ID NO: 307140 - DNA, 33 bp, Homo sapien
gaatgtccatgcacagcataagagtgtagagtg

SEQ ID NO: 307141 - DNA, 33 bp, Homo sapien
aaatgtacacatcagacaaattaaaggcataaa

SEQ ID NO: 307142 - DNA, 33 bp, Homo sapien
aaatgtacacatcagataaattaaaggcataaa

SEQ ID NO: 307143 - DNA, 33 bp, Homo sapien
tttccaactttgacataaaagacctgaaataaa

SEQ ID NO: 307144 - DNA, 33 bp, Homo sapien
tttccaactttgacatgaaagacctgaaataaa

SEQ ID NO: 307145 - DNA, 33 bp, Homo sapien
tttaaagccatgattgcaataggggctcaataa

SEQ ID NO: 307146 - DNA, 33 bp, Homo sapien
tttaaagccatgattgtaataggggctcaataa

SEQ ID NO: 307147 - DNA, 33 bp, Homo sapien
tgataatagctagtacaaaggatgcacaaagtg

SEQ ID NO: 307148 - DNA, 33 bp, Homo sapien
tgataatagctagtacgaaggatgcacaaagtg

SEQ ID NO: 307149 - DNA, 33 bp, Homo sapien
ttattttgagttttcacatcaacttctaatata

SEQ ID NO: 307150 - DNA, 33 bp, Homo sapien
ttattttgagttttcatatcaacttctaatata

SEQ ID NO: 307151 - DNA, 33 bp, Homo sapien
aagtcatatgcatttaccaggcttgactgggat

SEQ ID NO: 307152 - DNA, 33 bp, Homo sapien
aagtcatatgcatttatcaggcttgactgggat

SEQ ID NO: 307153 - DNA, 33 bp, Homo sapien
taatatgaacaacaaaggggctaagttgaaagg

SEQ ID NO: 307154 - DNA, 33 bp, Homo sapien
taatatgaacaacaaatgggctaagttgaaagg

SEQ ID NO: 307155 - DNA, 33 bp, Homo sapien
aatgtagctccttgaacagttaggcttgaattg

SEQ ID NO: 307156 - DNA, 33 bp, Homo sapien
aatgtagctccttgaatagttaggcttgaattg

SEQ ID NO: 307157 - DNA, 33 bp, Homo sapien
tatctcaccaaagaacacttataggatacatct

SEQ ID NO: 307158 - DNA, 33 bp, Homo sapien
tatctcaccaaagaacgcttataggatacatct

SEQ ID NO: 307159 - DNA, 33 bp, Homo sapien
atattaaatcatagcgaaattccaaaattttgt

SEQ ID NO: 307160 - DNA, 33 bp, Homo sapien
atattaaatcatagcgtaattccaaaattttgt

SEQ ID NO: 307161 - DNA, 33 bp, Homo sapien
gtctggctgagtctggaattttaatcggcttcc

SEQ ID NO: 307162 - DNA, 33 bp, Homo sapien
gtctggctgagtctgggattttaatcggcttcc

SEQ ID NO: 307163 - DNA, 33 bp, Homo sapien
atttatataagcagctcagagtggaacctagaa

SEQ ID NO: 307164 - DNA, 33 bp, Homo sapien
atttatataagcagctgagagtggaacctagaa

SEQ ID NO: 307165 - DNA, 33 bp, Homo sapien
gttatgctcttagtaccatcaggctacaactgg

SEQ ID NO: 307166 - DNA, 33 bp, Homo sapien
gttatgctcttagtactatcaggctacaactgg

SEQ ID NO: 307167 - DNA, 33 bp, Homo sapien
actcttaaatcagcaaagtggccatgtccagga

SEQ ID NO: 307168 - DNA, 33 bp, Homo sapien
actcttaaatcagcaacgtggccatgtccagga

SEQ ID NO: 307169 - DNA, 33 bp, Homo sapien
aagagggtgtgcattgaaaggctacctattagg

SEQ ID NO: 307170 - DNA, 33 bp, Homo sapien
aagagggtgtgcattggaaggctacctattagg

SEQ ID NO: 307171 - DNA, 33 bp, Homo sapien
taatatgttatactaacctcccagttgaaaatg

SEQ ID NO: 307172 - DNA, 33 bp, Homo sapien
taatatgttatactaatctcccagttgaaaatg

SEQ ID NO: 307173 - DNA, 33 bp, Homo sapien
ttcacttattcttagccatgactgtgtggttca

SEQ ID NO: 307174 - DNA, 33 bp, Homo sapien
ttcacttattcttagctatgactgtgtggttca

SEQ ID NO: 307175 - DNA, 33 bp, Homo sapien
aggaaatgtagtttcacgaaaggaatttgacac

SEQ ID NO: 307176 - DNA, 33 bp, Homo sapien
aggaaatgtagtttcaggaaaggaatttgacac

SEQ ID NO: 307177 - DNA, 33 bp, Homo sapien
gtagaaacttgtagaacgtgggatttgctgaga

SEQ ID NO: 307178 - DNA, 33 bp, Homo sapien
gtagaaacttgtagaatgtgggatttgctgaga

SEQ ID NO: 307179 - DNA, 33 bp, Homo sapien
tagctgagaatgaaaactgtgtaaaataatgat

SEQ ID NO: 307180 - DNA, 33 bp, Homo sapien
tagctgagaatgaaaagtgtgtaaaataatgat

SEQ ID NO: 307181 - DNA, 33 bp, Homo sapien
attaactgcccaccacaatatgcttttctatat

SEQ ID NO: 307182 - DNA, 33 bp, Homo sapien
attaactgcccaccacgatatgcttttctatat

SEQ ID NO: 307183 - DNA, 33 bp, Homo sapien
tatcaaacgtaaattaacttccacaaatttgag

SEQ ID NO: 307184 - DNA, 33 bp, Homo sapien
tatcaaacgtaaattatcttccacaaatttgag

SEQ ID NO: 307185 - DNA, 33 bp, Homo sapien
agagtattctagtatacgtggccaaaaaaatat

SEQ ID NO: 307186 - DNA, 33 bp, Homo sapien
agagtattctagtatatgtggccaaaaaaatat

SEQ ID NO: 307187 - DNA, 33 bp, Homo sapien
catgtaatgttaaggcaatacttcaggctgtat

SEQ ID NO: 307188 - DNA, 33 bp, Homo sapien
catgtaatgttaaggctatacttcaggctgtat

SEQ ID NO: 307189 - DNA, 33 bp, Homo sapien
cattttggccacaaggaaaatttaaaccttgca

SEQ ID NO: 307190 - DNA, 33 bp, Homo sapien
cattttggccacaaggcaaatttaaaccttgca

SEQ ID NO: 307191 - DNA, 33 bp, Homo sapien
gtaaaatcaaatgcaacttaattacttcctaga

SEQ ID NO: 307192 - DNA, 33 bp, Homo sapien
gtaaaatcaaatgcaagttaattacttcctaga

SEQ ID NO: 307193 - DNA, 33 bp, Homo sapien
atacagaggaaaataactgaagtttggcaacct

SEQ ID NO: 307194 - DNA, 33 bp, Homo sapien
atacagaggaaaataattgaagtttggcaacct

SEQ ID NO: 307195 - DNA, 33 bp, Homo sapien
taagaatacccgaaaactggaactggataacag

SEQ ID NO: 307196 - DNA, 33 bp, Homo sapien
taagaatacccgaaaattggaactggataacag

SEQ ID NO: 307197 - DNA, 33 bp, Homo sapien
agcttttattctgtcaactgcttgtcatagtac

SEQ ID NO: 307198 - DNA, 33 bp, Homo sapien
agcttttattctgtcatctgcttgtcatagtac

SEQ ID NO: 307199 - DNA, 33 bp, Homo sapien
ggcttgaataaaatagccatcagagtgagatat

SEQ ID NO: 307200 - DNA, 33 bp, Homo sapien
ggcttgaataaaatagtcatcagagtgagatat

SEQ ID NO: 307201 - DNA, 33 bp, Homo sapien
ggcatcattttgttcacaagtggtttgcctaga

SEQ ID NO: 307202 - DNA, 33 bp, Homo sapien
ggcatcattttgttcataagtggtttgcctaga

SEQ ID NO: 307203 - DNA, 33 bp, Homo sapien
ttcatgggttcgagaaatggtaatggggtaaat

SEQ ID NO: 307204 - DNA, 33 bp, Homo sapien
ttcatgggttcgagaagtggtaatggggtaaat

SEQ ID NO: 307205 - DNA, 33 bp, Homo sapien
attcaagtaattgcaaactatagaacataaata

SEQ ID NO: 307206 - DNA, 33 bp, Homo sapien
attcaagtaattgcaagctatagaacataaata

SEQ ID NO: 307207 - DNA, 33 bp, Homo sapien
tcaatctacaaagctgaaaagtatgcaaatcct

SEQ ID NO: 307208 - DNA, 33 bp, Homo sapien
tcaatctacaaagctggaaagtatgcaaatcct

SEQ ID NO: 307209 - DNA, 33 bp, Homo sapien
tagaatgtatgacttacggatcacccatgcatc

SEQ ID NO: 307210 - DNA, 33 bp, Homo sapien
tagaatgtatgacttatggatcacccatgcatc

SEQ ID NO: 307211 - DNA, 33 bp, Homo sapien
gtatcaacacaaaaaaatcacgtcaatttgata

SEQ ID NO: 307212 - DNA, 33 bp, Homo sapien
gtatcaacacaaaaaattcacgtcaatttgata

SEQ ID NO: 307213 - DNA, 33 bp, Homo sapien
tatgatcacttaaatcaatagaaagctgggaag

SEQ ID NO: 307214 - DNA, 33 bp, Homo sapien
tatgatcacttaaatcgatagaaagctgggaag

SEQ ID NO: 307215 - DNA, 33 bp, Homo sapien
gctttagaagttacataagtagacagccgagca

SEQ ID NO: 307216 - DNA, 33 bp, Homo sapien
gctttagaagttacatgagtagacagccgagca

SEQ ID NO: 307217 - DNA, 33 bp, Homo sapien
aagcaaatagtaaaaccgctatttaggcttact

SEQ ID NO: 307218 - DNA, 33 bp, Homo sapien
aagcaaatagtaaaactgctatttaggcttact

SEQ ID NO: 307219 - DNA, 33 bp, Homo sapien
tagtggaaaggacttcaaaactagggagaacaa

SEQ ID NO: 307220 - DNA, 33 bp, Homo sapien
tagtggaaaggacttcgaaactagggagaacaa

SEQ ID NO: 307221 - DNA, 33 bp, Homo sapien
cctaactctaaataaactcacattttgaattaa

SEQ ID NO: 307222 - DNA, 33 bp, Homo sapien
cctaactctaaataaagtcacattttgaattaa

SEQ ID NO: 307223 - DNA, 33 bp, Homo sapien
tctgggcatcttccgcaataactgtcttaattt

SEQ ID NO: 307224 - DNA, 33 bp, Homo sapien
tctgggcatcttccgctataactgtcttaattt

SEQ ID NO: 307225 - DNA, 33 bp, Homo sapien
tgcatagacatatcctaaatcattctgcaagtt

SEQ ID NO: 307226 - DNA, 33 bp, Homo sapien
tgcatagacatatcctgaatcattctgcaagtt

SEQ ID NO: 307227 - DNA, 33 bp, Homo sapien
gaaagacagtcatttaagaagtttccctcaagc

SEQ ID NO: 307228 - DNA, 33 bp, Homo sapien
gaaagacagtcatttatgaagtttccctcaagc

SEQ ID NO: 307229 - DNA, 33 bp, Homo sapien
agggaactttggtcataatcaagtcctattgaa

SEQ ID NO: 307230 - DNA, 33 bp, Homo sapien
agggaactttggtcatcatcaagtcctattgaa

SEQ ID NO: 307231 - DNA, 33 bp, Homo sapien
cttttaacgtaaccatcaccaaaatcgtgcaca

SEQ ID NO: 307232 - DNA, 33 bp, Homo sapien
cttttaacgtaaccattaccaaaatcgtgcaca

SEQ ID NO: 307233 - DNA, 33 bp, Homo sapien
caccaacttgccttaccggctattcttctttct

SEQ ID NO: 307234 - DNA, 33 bp, Homo sapien
caccaacttgccttactggctattcttctttct

SEQ ID NO: 307235 - DNA, 33 bp, Homo sapien
gcaaaacatttgtcctaacaatacagcattgtg

SEQ ID NO: 307236 - DNA, 33 bp, Homo sapien
gcaaaacatttgtcctgacaatacagcattgtg

SEQ ID NO: 307237 - DNA, 33 bp, Homo sapien
aaaccacagaaatctgacaatttccacagcatg

SEQ ID NO: 307238 - DNA, 33 bp, Homo sapien
aaaccacagaaatctggcaatttccacagcatg

SEQ ID NO: 307239 - DNA, 33 bp, Homo sapien
tatacagagtgggaacagttcagtgtgtctttt

SEQ ID NO: 307240 - DNA, 33 bp, Homo sapien
tatacagagtgggaacggttcagtgtgtctttt

SEQ ID NO: 307241 - DNA, 33 bp, Homo sapien
aaagcagtgcctccccaaagagaggtgaaaaga

SEQ ID NO: 307242 - DNA, 33 bp, Homo sapien
aaagcagtgcctccccgaagagaggtgaaaaga

SEQ ID NO: 307243 - DNA, 33 bp, Homo sapien
cttcacagttaatttcactgtttgttagccaga

SEQ ID NO: 307244 - DNA, 33 bp, Homo sapien
cttcacagttaatttcgctgtttgttagccaga

SEQ ID NO: 307245 - DNA, 33 bp, Homo sapien
atcttccagcgttagcaaatgcaccctaatggg

SEQ ID NO: 307246 - DNA, 33 bp, Homo sapien
atcttccagcgttagcgaatgcaccctaatggg

SEQ ID NO: 307247 - DNA, 33 bp, Homo sapien
aggaaggacattaatacgcagtcttagccttct

SEQ ID NO: 307248 - DNA, 33 bp, Homo sapien
aggaaggacattaataggcagtcttagccttct

SEQ ID NO: 307249 - DNA, 33 bp, Homo sapien
cagtatgttatgcaagaaagagaaggctaagac

SEQ ID NO: 307250 - DNA, 33 bp, Homo sapien
cagtatgttatgcaaggaagagaaggctaagac

SEQ ID NO: 307251 - DNA, 33 bp, Homo sapien
gtttttagatacacaaagaagacaggaaaatgg

SEQ ID NO: 307252 - DNA, 33 bp, Homo sapien
gtttttagatacacaatgaagacaggaaaatgg

SEQ ID NO: 307253 - DNA, 33 bp, Homo sapien
gagaaagacaaagcaacgccactttggcctgag

SEQ ID NO: 307254 - DNA, 33 bp, Homo sapien
gagaaagacaaagcaatgccactttggcctgag

SEQ ID NO: 307255 - DNA, 33 bp, Homo sapien
acactgactgtcattcaaactaaaggtcgtatt

SEQ ID NO: 307256 - DNA, 33 bp, Homo sapien
acactgactgtcattccaactaaaggtcgtatt

SEQ ID NO: 307257 - DNA, 33 bp, Homo sapien
cctctaagaaacgggaggatccattcagagtta

SEQ ID NO: 307258 - DNA, 33 bp, Homo sapien
cctctaagaaacgggatgatccattcagagtta

SEQ ID NO: 307259 - DNA, 33 bp, Homo sapien
tcggagattcttttcccaggtagccaccatagc

SEQ ID NO: 307260 - DNA, 33 bp, Homo sapien
tcggagattcttttcctaggtagccaccatagc

SEQ ID NO: 307261 - DNA, 33 bp, Homo sapien
ctggtctgtcaaattcacaaattctgcttatca

SEQ ID NO: 307262 - DNA, 33 bp, Homo sapien
ctggtctgtcaaattcgcaaattctgcttatca

SEQ ID NO: 307263 - DNA, 33 bp, Homo sapien
taaacctggcctatcactattaaatatctataa

SEQ ID NO: 307264 - DNA, 33 bp, Homo sapien
taaacctggcctatcattattaaatatctataa

SEQ ID NO: 307265 - DNA, 33 bp, Homo sapien
ggagtccttataaaaaattagtgtctgatttta

SEQ ID NO: 307266 - DNA, 33 bp, Homo sapien
ggagtccttataaaaacttagtgtctgatttta

SEQ ID NO: 307267 - DNA, 33 bp, Homo sapien
aaaatgttacattttacctggtcaatcaataac

SEQ ID NO: 307268 - DNA, 33 bp, Homo sapien
aaaatgttacattttatctggtcaatcaataac

SEQ ID NO: 307269 - DNA, 33 bp, Homo sapien
agagaccccagagtgaaattctccagatacgtt

SEQ ID NO: 307270 - DNA, 33 bp, Homo sapien
agagaccccagagtgatattctccagatacgtt

SEQ ID NO: 307271 - DNA, 33 bp, Homo sapien
caactctatttatgcaacattatacaaaataaa

SEQ ID NO: 307272 - DNA, 33 bp, Homo sapien
caactctatttatgcaccattatacaaaataaa

SEQ ID NO: 307273 - DNA, 33 bp, Homo sapien
atgaaaacaagaagagaaagcaaggattgtaca

SEQ ID NO: 307274 - DNA, 33 bp, Homo sapien
atgaaaacaagaagaggaagcaaggattgtaca

SEQ ID NO: 307275 - DNA, 33 bp, Homo sapien
aggcagtgttgtgatccgagacatatttgtgaa

SEQ ID NO: 307276 - DNA, 33 bp, Homo sapien
aggcagtgttgtgatctgagacatatttgtgaa

SEQ ID NO: 307277 - DNA, 33 bp, Homo sapien
tatatttagttgaaaacaggataggatctcagt

SEQ ID NO: 307278 - DNA, 33 bp, Homo sapien
tatatttagttgaaaataggataggatctcagt

SEQ ID NO: 307279 - DNA, 33 bp, Homo sapien
gggacatctcagggaaaactcatccataaatac

SEQ ID NO: 307280 - DNA, 33 bp, Homo sapien
gggacatctcagggaagactcatccataaatac

SEQ ID NO: 307281 - DNA, 33 bp, Homo sapien
aataggtttcaagttaagttatacagaatcatc

SEQ ID NO: 307282 - DNA, 33 bp, Homo sapien
aataggtttcaagttatgttatacagaatcatc

SEQ ID NO: 307283 - DNA, 33 bp, Homo sapien
tgtgcaaagcaactataaagcaaggaaggaaat

SEQ ID NO: 307284 - DNA, 33 bp, Homo sapien
tgtgcaaagcaactatgaagcaaggaaggaaat

SEQ ID NO: 307285 - DNA, 33 bp, Homo sapien
aaaatatttcatccacaggttaaggaagaatga

SEQ ID NO: 307286 - DNA, 33 bp, Homo sapien
aaaatatttcatccacgggttaaggaagaatga

SEQ ID NO: 307287 - DNA, 33 bp, Homo sapien
caggctcttatctcacacctatcccaatgcctc

SEQ ID NO: 307288 - DNA, 33 bp, Homo sapien
caggctcttatctcacgcctatcccaatgcctc

SEQ ID NO: 307289 - DNA, 33 bp, Homo sapien
aaatttagagacaataagctttgactggagctg

SEQ ID NO: 307290 - DNA, 33 bp, Homo sapien
aaatttagagacaatacgctttgactggagctg

SEQ ID NO: 307291 - DNA, 33 bp, Homo sapien
tcagtgaaagataaccaaaataagtatcataat

SEQ ID NO: 307292 - DNA, 33 bp, Homo sapien
tcagtgaaagataaccgaaataagtatcataat

SEQ ID NO: 307293 - DNA, 33 bp, Homo sapien
gtaagaaattaccaagaagagtgagaaatgagt

SEQ ID NO: 307294 - DNA, 33 bp, Homo sapien
gtaagaaattaccaagtagagtgagaaatgagt

SEQ ID NO: 307295 - DNA, 33 bp, Homo sapien
tggaagcagttggaaacgtctgatgagatctga

SEQ ID NO: 307296 - DNA, 33 bp, Homo sapien
tggaagcagttggaaatgtctgatgagatctga

SEQ ID NO: 307297 - DNA, 33 bp, Homo sapien
ataaataaatgcacacaattaaatggaataaac

SEQ ID NO: 307298 - DNA, 33 bp, Homo sapien
ataaataaatgcacacgattaaatggaataaac

SEQ ID NO: 307299 - DNA, 33 bp, Homo sapien
tgaaatccgagggaataaattttgtacaagtgt

SEQ ID NO: 307300 - DNA, 33 bp, Homo sapien
tgaaatccgagggaattaattttgtacaagtgt

SEQ ID NO: 307301 - DNA, 33 bp, Homo sapien
gatgtgaacctatacaatggcaaggaaagtaga

SEQ ID NO: 307302 - DNA, 33 bp, Homo sapien
gatgtgaacctatacagtggcaaggaaagtaga

SEQ ID NO: 307303 - DNA, 33 bp, Homo sapien
aatacattgtgtaacacatgaaattgagtttta

SEQ ID NO: 307304 - DNA, 33 bp, Homo sapien
aatacattgtgtaacatatgaaattgagtttta

SEQ ID NO: 307305 - DNA, 33 bp, Homo sapien
ttgacatacaagcagactcagtaaattatccag

SEQ ID NO: 307306 - DNA, 33 bp, Homo sapien
ttgacatacaagcagattcagtaaattatccag

SEQ ID NO: 307307 - DNA, 33 bp, Homo sapien
aacaaggcaggcatagaagatcttgatttttgc

SEQ ID NO: 307308 - DNA, 33 bp, Homo sapien
aacaaggcaggcatagcagatcttgatttttgc

SEQ ID NO: 307309 - DNA, 33 bp, Homo sapien
agagagagaaacatacaaagtccggggcaagca

SEQ ID NO: 307310 - DNA, 33 bp, Homo sapien
agagagagaaacatacgaagtccggggcaagca

SEQ ID NO: 307311 - DNA, 33 bp, Homo sapien
atgctcaactgccaacaagtgcttcttatcaaa

SEQ ID NO: 307312 - DNA, 33 bp, Homo sapien
atgctcaactgccaacgagtgcttcttatcaaa

SEQ ID NO: 307313 - DNA, 33 bp, Homo sapien
acactaatgaatgaaacatagtttttgccttca

SEQ ID NO: 307314 - DNA, 33 bp, Homo sapien
acactaatgaatgaaatatagtttttgccttca

SEQ ID NO: 307315 - DNA, 33 bp, Homo sapien
ttccttcagatcttggaacagtacctatcagga

SEQ ID NO: 307316 - DNA, 33 bp, Homo sapien
ttccttcagatcttgggacagtacctatcagga

SEQ ID NO: 307317 - DNA, 33 bp, Homo sapien
tttaatgctgaacttacgacacagtctttcaaa

SEQ ID NO: 307318 - DNA, 33 bp, Homo sapien
tttaatgctgaacttatgacacagtctttcaaa

SEQ ID NO: 307319 - DNA, 33 bp, Homo sapien
ggactttgtgcctaagaaaatgtactaagtctt

SEQ ID NO: 307320 - DNA, 33 bp, Homo sapien
ggactttgtgcctaaggaaatgtactaagtctt

SEQ ID NO: 307321 - DNA, 33 bp, Homo sapien
ggaatggtgtcattcagaattaaggaacaataa

SEQ ID NO: 307322 - DNA, 33 bp, Homo sapien
ggaatggtgtcattcataattaaggaacaataa

SEQ ID NO: 307323 - DNA, 33 bp, Homo sapien
aataatttgtcaaacaatatcagtacaggatga

SEQ ID NO: 307324 - DNA, 33 bp, Homo sapien
aataatttgtcaaacagtatcagtacaggatga

SEQ ID NO: 307325 - DNA, 33 bp, Homo sapien
cttatcacagtatcagcatgctcactgagtatt

SEQ ID NO: 307326 - DNA, 33 bp, Homo sapien
cttatcacagtatcagtatgctcactgagtatt

SEQ ID NO: 307327 - DNA, 33 bp, Homo sapien
tgtacctaaacacggcactgctaacagtcacac

SEQ ID NO: 307328 - DNA, 33 bp, Homo sapien
tgtacctaaacacggcgctgctaacagtcacac

SEQ ID NO: 307329 - DNA, 33 bp, Homo sapien
acttccattccatttaaactgtttgcatttgac

SEQ ID NO: 307330 - DNA, 33 bp, Homo sapien
acttccattccatttatactgtttgcatttgac

SEQ ID NO: 307331 - DNA, 33 bp, Homo sapien
tctcaaagtctttcacaaaagcagcccctttgc

SEQ ID NO: 307332 - DNA, 33 bp, Homo sapien
tctcaaagtctttcaccaaagcagcccctttgc

SEQ ID NO: 307333 - DNA, 33 bp, Homo sapien
agtaataattgtcctacgttctgtctattctga

SEQ ID NO: 307334 - DNA, 33 bp, Homo sapien
agtaataattgtcctatgttctgtctattctga

SEQ ID NO: 307335 - DNA, 33 bp, Homo sapien
tttaagcagaatgatacagcttaacaggcatga

SEQ ID NO: 307336 - DNA, 33 bp, Homo sapien
tttaagcagaatgatatagcttaacaggcatga

SEQ ID NO: 307337 - DNA, 33 bp, Homo sapien
gagagaccaagaaacagtctcaaggttttaaat

SEQ ID NO: 307338 - DNA, 33 bp, Homo sapien
gagagaccaagaaacattctcaaggttttaaat

SEQ ID NO: 307339 - DNA, 33 bp, Homo sapien
gagggccagggcaacaataaaaggtaatgggca

SEQ ID NO: 307340 - DNA, 33 bp, Homo sapien
gagggccagggcaacagtaaaaggtaatgggca

SEQ ID NO: 307341 - DNA, 33 bp, Homo sapien
cagggtttggtctgaacggaatacaaagttggg

SEQ ID NO: 307342 - DNA, 33 bp, Homo sapien
cagggtttggtctgaatggaatacaaagttggg

SEQ ID NO: 307343 - DNA, 33 bp, Homo sapien
ctatgtttttttacctcacgtagagctcattca

SEQ ID NO: 307344 - DNA, 33 bp, Homo sapien
ctatgtttttttaccttacgtagagctcattca

SEQ ID NO: 307345 - DNA, 33 bp, Homo sapien
atttctgagctggtcagcagaaatcaccctaat

SEQ ID NO: 307346 - DNA, 33 bp, Homo sapien
atttctgagctggtcatcagaaatcaccctaat

SEQ ID NO: 307347 - DNA, 33 bp, Homo sapien
taatagctaagtcacaagtgaaatgaaatgaag

SEQ ID NO: 307348 - DNA, 33 bp, Homo sapien
taatagctaagtcacaggtgaaatgaaatgaag

SEQ ID NO: 307349 - DNA, 33 bp, Homo sapien
acgacagagtgcatgcgcattggatggggtgag

SEQ ID NO: 307350 - DNA, 33 bp, Homo sapien
acgacagagtgcatgctcattggatggggtgag

SEQ ID NO: 307351 - DNA, 33 bp, Homo sapien
catagtcactgtacacacacataccttgtattt

SEQ ID NO: 307352 - DNA, 33 bp, Homo sapien
catagtcactgtacacgcacataccttgtattt

SEQ ID NO: 307353 - DNA, 33 bp, Homo sapien
ttcaaacataagaatcaatcatcaaaaatgttt

SEQ ID NO: 307354 - DNA, 33 bp, Homo sapien
ttcaaacataagaatcgatcatcaaaaatgttt

SEQ ID NO: 307355 - DNA, 33 bp, Homo sapien
gttggtgttcaggttaaataattagtatatgta

SEQ ID NO: 307356 - DNA, 33 bp, Homo sapien
gttggtgttcaggttacataattagtatatgta

SEQ ID NO: 307357 - DNA, 33 bp, Homo sapien
atttttttagttttggccacgcagctgaattta

SEQ ID NO: 307358 - DNA, 33 bp, Homo sapien
atttttttagttttggtcacgcagctgaattta

SEQ ID NO: 307359 - DNA, 33 bp, Homo sapien
tagagtgaagcaatagacctcgtacaaagtata

SEQ ID NO: 307360 - DNA, 33 bp, Homo sapien
tagagtgaagcaatagtcctcgtacaaagtata

SEQ ID NO: 307361 - DNA, 33 bp, Homo sapien
tcatttaaattttcaacgagacagatgaaggca

SEQ ID NO: 307362 - DNA, 33 bp, Homo sapien
tcatttaaattttcaatgagacagatgaaggca

SEQ ID NO: 307363 - DNA, 33 bp, Homo sapien
atgctccactcataaaatgtatcacagtcagtc

SEQ ID NO: 307364 - DNA, 33 bp, Homo sapien
atgctccactcataaattgtatcacagtcagtc

SEQ ID NO: 307365 - DNA, 33 bp, Homo sapien
agagatgagcccataacaacaccagttaaacct

SEQ ID NO: 307366 - DNA, 33 bp, Homo sapien
agagatgagcccataagaacaccagttaaacct

SEQ ID NO: 307367 - DNA, 33 bp, Homo sapien
caacattcattaaatgcataccatgtgcaggct

SEQ ID NO: 307368 - DNA, 33 bp, Homo sapien
caacattcattaaatgtataccatgtgcaggct

SEQ ID NO: 307369 - DNA, 33 bp, Homo sapien
tatatatcttacagtaggcgtatagatgctcta

SEQ ID NO: 307370 - DNA, 33 bp, Homo sapien
tatatatcttacagtatgcgtatagatgctcta

SEQ ID NO: 307371 - DNA, 33 bp, Homo sapien
tagatgttcatgtaaactatggtgcagtagaat

SEQ ID NO: 307372 - DNA, 33 bp, Homo sapien
tagatgttcatgtaaattatggtgcagtagaat

SEQ ID NO: 307373 - DNA, 33 bp, Homo sapien
ggaagttacatgcatcaattccgtgacgctcta

SEQ ID NO: 307374 - DNA, 33 bp, Homo sapien
ggaagttacatgcatcgattccgtgacgctcta

SEQ ID NO: 307375 - DNA, 33 bp, Homo sapien
tctattaatcctcatgacatgaaatcctatcac

SEQ ID NO: 307376 - DNA, 33 bp, Homo sapien
tctattaatcctcatgccatgaaatcctatcac

SEQ ID NO: 307377 - DNA, 33 bp, Homo sapien
tgttaattgtctaaaccctggcactctcactga

SEQ ID NO: 307378 - DNA, 33 bp, Homo sapien
tgttaattgtctaaactctggcactctcactga

SEQ ID NO: 307379 - DNA, 33 bp, Homo sapien
taggctggatcgttgacgtcagtatgaccttga

SEQ ID NO: 307380 - DNA, 33 bp, Homo sapien
taggctggatcgttgatgtcagtatgaccttga

SEQ ID NO: 307381 - DNA, 33 bp, Homo sapien
taggggtaataacttgaataatttccatttggg

SEQ ID NO: 307382 - DNA, 33 bp, Homo sapien
taggggtaataacttggataatttccatttggg

SEQ ID NO: 307383 - DNA, 33 bp, Homo sapien
aatttgccatcacaacagatatttatagaaatg

SEQ ID NO: 307384 - DNA, 33 bp, Homo sapien
aatttgccatcacaactgatatttatagaaatg

SEQ ID NO: 307385 - DNA, 33 bp, Homo sapien
cctactctctggtttaaaaaagactgccatggt

SEQ ID NO: 307386 - DNA, 33 bp, Homo sapien
cctactctctggtttacaaaagactgccatggt

SEQ ID NO: 307387 - DNA, 33 bp, Homo sapien
agggctggagtaggagaatttcagaggaatcaa

SEQ ID NO: 307388 - DNA, 33 bp, Homo sapien
agggctggagtaggaggatttcagaggaatcaa

SEQ ID NO: 307389 - DNA, 33 bp, Homo sapien
ctgatgtaggccaacaagcaagaacatgacaag

SEQ ID NO: 307390 - DNA, 33 bp, Homo sapien
ctgatgtaggccaacaggcaagaacatgacaag

SEQ ID NO: 307391 - DNA, 33 bp, Homo sapien
aagccattatcctaagaacaggatgaacacaga

SEQ ID NO: 307392 - DNA, 33 bp, Homo sapien
aagccattatcctaagcacaggatgaacacaga

SEQ ID NO: 307393 - DNA, 33 bp, Homo sapien
tataagtgagaactaaacatcgagtgttcatgg

SEQ ID NO: 307394 - DNA, 33 bp, Homo sapien
tataagtgagaactaagcatcgagtgttcatgg

SEQ ID NO: 307395 - DNA, 33 bp, Homo sapien
gttgtctcctgctcaacagagaccctttctttc

SEQ ID NO: 307396 - DNA, 33 bp, Homo sapien
gttgtctcctgctcaatagagaccctttctttc

SEQ ID NO: 307397 - DNA, 33 bp, Homo sapien
tcctggaaattatgaaatgtctgtagaatgtta

SEQ ID NO: 307398 - DNA, 33 bp, Homo sapien
tcctggaaattatgaattgtctgtagaatgtta

SEQ ID NO: 307399 - DNA, 33 bp, Homo sapien
tatatatacactttcactatctcccacaaaaaa

SEQ ID NO: 307400 - DNA, 33 bp, Homo sapien
tatatatacactttcattatctcccacaaaaaa

SEQ ID NO: 307401 - DNA, 33 bp, Homo sapien
gtacttgggcaactaaatccttttatactgaga

SEQ ID NO: 307402 - DNA, 33 bp, Homo sapien
gtacttgggcaactaagtccttttatactgaga

SEQ ID NO: 307403 - DNA, 33 bp, Homo sapien
atatgcccaatggacccaagactcatcaggacc

SEQ ID NO: 307404 - DNA, 33 bp, Homo sapien
atatgcccaatggacctaagactcatcaggacc

SEQ ID NO: 307405 - DNA, 33 bp, Homo sapien
ctcaatcttttgaacactcctgtaggtgactaa

SEQ ID NO: 307406 - DNA, 33 bp, Homo sapien
ctcaatcttttgaacattcctgtaggtgactaa

SEQ ID NO: 307407 - DNA, 33 bp, Homo sapien
acacgtgtataaaaacaggaaactgatcattat

SEQ ID NO: 307408 - DNA, 33 bp, Homo sapien
acacgtgtataaaaacgggaaactgatcattat

SEQ ID NO: 307409 - DNA, 33 bp, Homo sapien
aatcatttcaactataataatttttgaacatat

SEQ ID NO: 307410 - DNA, 33 bp, Homo sapien
aatcatttcaactatagtaatttttgaacatat

SEQ ID NO: 307411 - DNA, 33 bp, Homo sapien
aactgaacttccctagaactgtctctgcacaat

SEQ ID NO: 307412 - DNA, 33 bp, Homo sapien
aactgaacttccctagcactgtctctgcacaat

SEQ ID NO: 307413 - DNA, 33 bp, Homo sapien
tacctcatttacataacagagtgtgaccataaa

SEQ ID NO: 307414 - DNA, 33 bp, Homo sapien
tacctcatttacataatagagtgtgaccataaa

SEQ ID NO: 307415 - DNA, 33 bp, Homo sapien
tattcctagaaaaaaacagttaccatggaaaat

SEQ ID NO: 307416 - DNA, 33 bp, Homo sapien
tattcctagaaaaaaagagttaccatggaaaat

SEQ ID NO: 307417 - DNA, 33 bp, Homo sapien
cacgcttgctaccttggatgataaatctaagtt

SEQ ID NO: 307418 - DNA, 33 bp, Homo sapien
cacgcttgctaccttgtatgataaatctaagtt

SEQ ID NO: 307419 - DNA, 33 bp, Homo sapien
tggaaaacaggatatcaaatctgttcccataga

SEQ ID NO: 307420 - DNA, 33 bp, Homo sapien
tggaaaacaggatatcgaatctgttcccataga

SEQ ID NO: 307421 - DNA, 33 bp, Homo sapien
ctcccgaaatgagaaacgtttgaagtctgcata

SEQ ID NO: 307422 - DNA, 33 bp, Homo sapien
ctcccgaaatgagaaaggtttgaagtctgcata

SEQ ID NO: 307423 - DNA, 33 bp, Homo sapien
cacatgggtcagagaaatgtacagacagaaagc

SEQ ID NO: 307424 - DNA, 33 bp, Homo sapien
cacatgggtcagagaagtgtacagacagaaagc

SEQ ID NO: 307425 - DNA, 33 bp, Homo sapien
tggcaagcttgtatccacgctatactactgcag

SEQ ID NO: 307426 - DNA, 33 bp, Homo sapien
tggcaagcttgtatccgcgctatactactgcag

SEQ ID NO: 307427 - DNA, 33 bp, Homo sapien
aattcaattttcagtaccactgaccacatttta

SEQ ID NO: 307428 - DNA, 33 bp, Homo sapien
aattcaattttcagtagcactgaccacatttta

SEQ ID NO: 307429 - DNA, 33 bp, Homo sapien
gtttgccttcttcaacactggtgattcaccatg

SEQ ID NO: 307430 - DNA, 33 bp, Homo sapien
gtttgccttcttcaaccctggtgattcaccatg

SEQ ID NO: 307431 - DNA, 33 bp, Homo sapien
taaccagttatttaatcaaatcaaacctactag

SEQ ID NO: 307432 - DNA, 33 bp, Homo sapien
taaccagttatttaatgaaatcaaacctactag

SEQ ID NO: 307433 - DNA, 33 bp, Homo sapien
ccctatttactaggtaagtcagtgcctccttaa

SEQ ID NO: 307434 - DNA, 33 bp, Homo sapien
ccctatttactaggtaggtcagtgcctccttaa

SEQ ID NO: 307435 - DNA, 33 bp, Homo sapien
attatgaacttttggcaaagaagaaagtcattg

SEQ ID NO: 307436 - DNA, 33 bp, Homo sapien
attatgaacttttggcgaagaagaaagtcattg

SEQ ID NO: 307437 - DNA, 33 bp, Homo sapien
ctccaaggcagtcctacatatacaatataaata

SEQ ID NO: 307438 - DNA, 33 bp, Homo sapien
ctccaaggcagtcctagatatacaatataaata

SEQ ID NO: 307439 - DNA, 33 bp, Homo sapien
tgatataaattttctcaccaactactaatttat

SEQ ID NO: 307440 - DNA, 33 bp, Homo sapien
tgatataaattttctcgccaactactaatttat

SEQ ID NO: 307441 - DNA, 33 bp, Homo sapien
acaaccctgctgagtaaccactatcattatact

SEQ ID NO: 307442 - DNA, 33 bp, Homo sapien
acaaccctgctgagtagccactatcattatact

SEQ ID NO: 307443 - DNA, 33 bp, Homo sapien
actttttccaactccacgaaggatattttaaca

SEQ ID NO: 307444 - DNA, 33 bp, Homo sapien
actttttccaactccatgaaggatattttaaca

SEQ ID NO: 307445 - DNA, 33 bp, Homo sapien
cttccaccatttcttaaatctcctagatcctgt

SEQ ID NO: 307446 - DNA, 33 bp, Homo sapien
cttccaccatttcttatatctcctagatcctgt

SEQ ID NO: 307447 - DNA, 33 bp, Homo sapien
ccacgaatcactttcacaggaatttgatttctg

SEQ ID NO: 307448 - DNA, 33 bp, Homo sapien
ccacgaatcactttcataggaatttgatttctg

SEQ ID NO: 307449 - DNA, 33 bp, Homo sapien
atctaagtagcttaaaatatcaaccatttaatt

SEQ ID NO: 307450 - DNA, 33 bp, Homo sapien
atctaagtagcttaaagtatcaaccatttaatt

SEQ ID NO: 307451 - DNA, 33 bp, Homo sapien
ctagtaacaaatgccaacttgattgtttgctca

SEQ ID NO: 307452 - DNA, 33 bp, Homo sapien
ctagtaacaaatgccagcttgattgtttgctca

SEQ ID NO: 307453 - DNA, 33 bp, Homo sapien
ctatctgacttctagacgcttgcttccctccca

SEQ ID NO: 307454 - DNA, 33 bp, Homo sapien
ctatctgacttctagatgcttgcttccctccca

SEQ ID NO: 307455 - DNA, 33 bp, Homo sapien
tccttgtaattaagaacgaaatgcagtttgctt

SEQ ID NO: 307456 - DNA, 33 bp, Homo sapien
tccttgtaattaagaatgaaatgcagtttgctt

SEQ ID NO: 307457 - DNA, 33 bp, Homo sapien
cccttgctaaataatacatggtcagtaccaaac

SEQ ID NO: 307458 - DNA, 33 bp, Homo sapien
cccttgctaaataatagatggtcagtaccaaac

SEQ ID NO: 307459 - DNA, 33 bp, Homo sapien
ccggtacagtgtagaagccaagcaatgtaagca

SEQ ID NO: 307460 - DNA, 33 bp, Homo sapien
ccggtacagtgtagaatccaagcaatgtaagca

SEQ ID NO: 307461 - DNA, 33 bp, Homo sapien
aacttgtgcctttcaagaaatttctccaagtca

SEQ ID NO: 307462 - DNA, 33 bp, Homo sapien
aacttgtgcctttcaataaatttctccaagtca

SEQ ID NO: 307463 - DNA, 33 bp, Homo sapien
tgtttttggcttctgaactgaggctatgctttc

SEQ ID NO: 307464 - DNA, 33 bp, Homo sapien
tgtttttggcttctgacctgaggctatgctttc

SEQ ID NO: 307465 - DNA, 33 bp, Homo sapien
tgctcagtaaaagtcccaagaaaaccattataa

SEQ ID NO: 307466 - DNA, 33 bp, Homo sapien
tgctcagtaaaagtcctaagaaaaccattataa

SEQ ID NO: 307467 - DNA, 33 bp, Homo sapien
aggaagggggctggtacgaaatttattaagtaa

SEQ ID NO: 307468 - DNA, 33 bp, Homo sapien
aggaagggggctggtatgaaatttattaagtaa

SEQ ID NO: 307469 - DNA, 33 bp, Homo sapien
tattgcattccaacacaaccatttacaacaaat

SEQ ID NO: 307470 - DNA, 33 bp, Homo sapien
tattgcattccaacacgaccatttacaacaaat

SEQ ID NO: 307471 - DNA, 33 bp, Homo sapien
aacttcttccctgacaactgactacatcccaag

SEQ ID NO: 307472 - DNA, 33 bp, Homo sapien
aacttcttccctgacatctgactacatcccaag

SEQ ID NO: 307473 - DNA, 33 bp, Homo sapien
ttttgagagttacttgaaggatttgagcagctg

SEQ ID NO: 307474 - DNA, 33 bp, Homo sapien
ttttgagagttacttgcaggatttgagcagctg

SEQ ID NO: 307475 - DNA, 33 bp, Homo sapien
gccaggtggaaatagcacatccctttcaagtga

SEQ ID NO: 307476 - DNA, 33 bp, Homo sapien
gccaggtggaaatagcgcatccctttcaagtga

SEQ ID NO: 307477 - DNA, 33 bp, Homo sapien
cattgtaagaacaagtaacactcttttgtgaac

SEQ ID NO: 307478 - DNA, 33 bp, Homo sapien
cattgtaagaacaagtgacactcttttgtgaac

SEQ ID NO: 307479 - DNA, 33 bp, Homo sapien
ttctttcagaagatgcaagagtttattcatact

SEQ ID NO: 307480 - DNA, 33 bp, Homo sapien
ttctttcagaagatgcgagagtttattcatact

SEQ ID NO: 307481 - DNA, 33 bp, Homo sapien
catggaatcaacataaatactcattataaactg

SEQ ID NO: 307482 - DNA, 33 bp, Homo sapien
catggaatcaacataactactcattataaactg

SEQ ID NO: 307483 - DNA, 33 bp, Homo sapien
taacatagtataagccactatcatctctcaatg

SEQ ID NO: 307484 - DNA, 33 bp, Homo sapien
taacatagtataagccgctatcatctctcaatg

SEQ ID NO: 307485 - DNA, 33 bp, Homo sapien
tagaaatacaaatggacgcagggagaccagcga

SEQ ID NO: 307486 - DNA, 33 bp, Homo sapien
tagaaatacaaatggatgcagggagaccagcga

SEQ ID NO: 307487 - DNA, 33 bp, Homo sapien
ggcaaagcaggctcccaagagtataagaaaaca

SEQ ID NO: 307488 - DNA, 33 bp, Homo sapien
ggcaaagcaggctcccgagagtataagaaaaca

SEQ ID NO: 307489 - DNA, 33 bp, Homo sapien
gagggaagtaaggcaaagattctgaaaatttag

SEQ ID NO: 307490 - DNA, 33 bp, Homo sapien
gagggaagtaaggcaatgattctgaaaatttag

SEQ ID NO: 307491 - DNA, 33 bp, Homo sapien
tcctctcattggtaaactctaatctggatccat

SEQ ID NO: 307492 - DNA, 33 bp, Homo sapien
tcctctcattggtaaagtctaatctggatccat

SEQ ID NO: 307493 - DNA, 33 bp, Homo sapien
aaaaaagaatgaaacaagactccaagaaaatag

SEQ ID NO: 307494 - DNA, 33 bp, Homo sapien
aaaaaagaatgaaacatgactccaagaaaatag

SEQ ID NO: 307495 - DNA, 33 bp, Homo sapien
cccttttgagaataacccagatggaaaatacac

SEQ ID NO: 307496 - DNA, 33 bp, Homo sapien
cccttttgagaataactcagatggaaaatacac

SEQ ID NO: 307497 - DNA, 33 bp, Homo sapien
tctatgtattgtcttcacttaactctgaaacca

SEQ ID NO: 307498 - DNA, 33 bp, Homo sapien
tctatgtattgtcttcgcttaactctgaaacca

SEQ ID NO: 307499 - DNA, 33 bp, Homo sapien
cctttctcatggaaaacggttttaaagcacaga

SEQ ID NO: 307500 - DNA, 33 bp, Homo sapien
cctttctcatggaaaatggttttaaagcacaga

SEQ ID NO: 307501 - DNA, 33 bp, Homo sapien
aaaaagacctaactcaatagcatgaacttgtaa

SEQ ID NO: 307502 - DNA, 33 bp, Homo sapien
aaaaagacctaactcagtagcatgaacttgtaa

SEQ ID NO: 307503 - DNA, 33 bp, Homo sapien
aaagtattgagagacactaaggaagaatcaaaa

SEQ ID NO: 307504 - DNA, 33 bp, Homo sapien
aaagtattgagagacattaaggaagaatcaaaa

SEQ ID NO: 307505 - DNA, 33 bp, Homo sapien
ggagtatgccggcatgaaagttcctcttagtga

SEQ ID NO: 307506 - DNA, 33 bp, Homo sapien
ggagtatgccggcatggaagttcctcttagtga

SEQ ID NO: 307507 - DNA, 33 bp, Homo sapien
cactaattacaccattcaacattttgcctattt

SEQ ID NO: 307508 - DNA, 33 bp, Homo sapien
cactaattacaccatttaacattttgcctattt

SEQ ID NO: 307509 - DNA, 33 bp, Homo sapien
tagaatcatttccaaaaacatagtgcttgctat

SEQ ID NO: 307510 - DNA, 33 bp, Homo sapien
tagaatcatttccaaacacatagtgcttgctat

SEQ ID NO: 307511 - DNA, 33 bp, Homo sapien
gggtagaaaacaacctaaagaatcaagaaagag

SEQ ID NO: 307512 - DNA, 33 bp, Homo sapien
gggtagaaaacaacctgaagaatcaagaaagag

SEQ ID NO: 307513 - DNA, 33 bp, Homo sapien
agaggtatgagagcagcatagttcattcctgat

SEQ ID NO: 307514 - DNA, 33 bp, Homo sapien
agaggtatgagagcaggatagttcattcctgat

SEQ ID NO: 307515 - DNA, 33 bp, Homo sapien
tcaaactagacttacacagaataacacttataa

SEQ ID NO: 307516 - DNA, 33 bp, Homo sapien
tcaaactagacttacatagaataacacttataa

SEQ ID NO: 307517 - DNA, 33 bp, Homo sapien
catgtttgtggaatcaagagttccaatttttct

SEQ ID NO: 307518 - DNA, 33 bp, Homo sapien
catgtttgtggaatcaggagttccaatttttct

SEQ ID NO: 307519 - DNA, 33 bp, Homo sapien
tttgcagcagttggcaaaaggtacacaaatgtg

SEQ ID NO: 307520 - DNA, 33 bp, Homo sapien
tttgcagcagttggcacaaggtacacaaatgtg

SEQ ID NO: 307521 - DNA, 33 bp, Homo sapien
attttaagaagaaaaaattattcgtcttgcaac

SEQ ID NO: 307522 - DNA, 33 bp, Homo sapien
attttaagaagaaaaagttattcgtcttgcaac

SEQ ID NO: 307523 - DNA, 33 bp, Homo sapien
atttactgagtctagacaggatgtacacagttg

SEQ ID NO: 307524 - DNA, 33 bp, Homo sapien
atttactgagtctagataggatgtacacagttg

SEQ ID NO: 307525 - DNA, 33 bp, Homo sapien
gttcagcttctttcccacatcagaacactagct

SEQ ID NO: 307526 - DNA, 33 bp, Homo sapien
gttcagcttctttcccgcatcagaacactagct

SEQ ID NO: 307527 - DNA, 33 bp, Homo sapien
attctagcagcactggcaactatgattagattg

SEQ ID NO: 307528 - DNA, 33 bp, Homo sapien
attctagcagcactggtaactatgattagattg

SEQ ID NO: 307529 - DNA, 33 bp, Homo sapien
catagctcggagagaaggaatctaaaatagtac

SEQ ID NO: 307530 - DNA, 33 bp, Homo sapien
catagctcggagagaatgaatctaaaatagtac

SEQ ID NO: 307531 - DNA, 33 bp, Homo sapien
tacctctgtttcctcacagattctaagcttctt

SEQ ID NO: 307532 - DNA, 33 bp, Homo sapien
tacctctgtttcctcatagattctaagcttctt

SEQ ID NO: 307533 - DNA, 33 bp, Homo sapien
aaggcattaataaggaaagtgatatcctgagag

SEQ ID NO: 307534 - DNA, 33 bp, Homo sapien
aaggcattaataaggacagtgatatcctgagag

SEQ ID NO: 307535 - DNA, 33 bp, Homo sapien
gtactaagctatttcaataataatactgcaagg

SEQ ID NO: 307536 - DNA, 33 bp, Homo sapien
gtactaagctatttcagtaataatactgcaagg

SEQ ID NO: 307537 - DNA, 33 bp, Homo sapien
tgacaagtctttacacacttatcacatttttca

SEQ ID NO: 307538 - DNA, 33 bp, Homo sapien
tgacaagtctttacacccttatcacatttttca

SEQ ID NO: 307539 - DNA, 33 bp, Homo sapien
gggtcttggccccacaagaggaatggtgagaaa

SEQ ID NO: 307540 - DNA, 33 bp, Homo sapien
gggtcttggccccacatgaggaatggtgagaaa

SEQ ID NO: 307541 - DNA, 33 bp, Homo sapien
gcttctgatttaacacgaatctctttgtttctc

SEQ ID NO: 307542 - DNA, 33 bp, Homo sapien
gcttctgatttaacactaatctctttgtttctc

SEQ ID NO: 307543 - DNA, 33 bp, Homo sapien
ggaggggctattagcaaccttgcttcaaagtta

SEQ ID NO: 307544 - DNA, 33 bp, Homo sapien
ggaggggctattagcatccttgcttcaaagtta

SEQ ID NO: 307545 - DNA, 33 bp, Homo sapien
actaggcatgttcaagacggtagctccttgttc

SEQ ID NO: 307546 - DNA, 33 bp, Homo sapien
actaggcatgttcaaggcggtagctccttgttc

SEQ ID NO: 307547 - DNA, 33 bp, Homo sapien; identical to SEQ ID NO: 307545

SEQ ID NO: 307548 - DNA, 33 bp, Homo sapien; identical to SEQ ID NO: 307546

SEQ ID NO: 307549 - DNA, 33 bp, Homo sapien
gaaccacttgacttcaagaagaatgagatttta

SEQ ID NO: 307550 - DNA, 33 bp, Homo sapien
gaaccacttgacttcaggaagaatgagatttta

SEQ ID NO: 307551 - DNA, 33 bp, Homo sapien
ttctacctatctttcgacaaatgctttatcagg

SEQ ID NO: 307552 - DNA, 33 bp, Homo sapien
ttctacctatctttcggcaaatgctttatcagg

SEQ ID NO: 307553 - DNA, 33 bp, Homo sapien
taggtaaagaaggcgaggtaatccagaaactca

SEQ ID NO: 307554 - DNA, 33 bp, Homo sapien
taggtaaagaaggcgatgtaatccagaaactca

SEQ ID NO: 307555 - DNA, 33 bp, Homo sapien
ttaaaacttcaaaatacgtcaactgaaaacaaa

SEQ ID NO: 307556 - DNA, 33 bp, Homo sapien
ttaaaacttcaaaatatgtcaactgaaaacaaa

SEQ ID NO: 307557 - DNA, 33 bp, Homo sapien
ccacacagctctctaacactgtttgtttttatt

SEQ ID NO: 307558 - DNA, 33 bp, Homo sapien
ccacacagctctctaatactgtttgtttttatt

SEQ ID NO: 307559 - DNA, 33 bp, Homo sapien
accttcaaatacaaaacggacctatgtggaggc

SEQ ID NO: 307560 - DNA, 33 bp, Homo sapien
accttcaaatacaaaatggacctatgtggaggc

SEQ ID NO: 307561 - DNA, 33 bp, Homo sapien
aaatctatgagggaaaaaggatgattaaaaggg

SEQ ID NO: 307562 - DNA, 33 bp, Homo sapien
aaatctatgagggaaacaggatgattaaaaggg

SEQ ID NO: 307563 - DNA, 33 bp, Homo sapien
aatatctggattaaaacagcttcgattcattta

SEQ ID NO: 307564 - DNA, 33 bp, Homo sapien
aatatctggattaaaatagcttcgattcattta

SEQ ID NO: 307565 - DNA, 33 bp, Homo sapien
cactcctctatagtcaaccttgcaattggtagt

SEQ ID NO: 307566 - DNA, 33 bp, Homo sapien
cactcctctatagtcagccttgcaattggtagt

SEQ ID NO: 307567 - DNA, 33 bp, Homo sapien
atttggatgccctcaaatagtgctttaattaac

SEQ ID NO: 307568 - DNA, 33 bp, Homo sapien
atttggatgccctcaagtagtgctttaattaac

SEQ ID NO: 307569 - DNA, 33 bp, Homo sapien
gagaactcaagtaacaaagaagagggcagtaat

SEQ ID NO: 307570 - DNA, 33 bp, Homo sapien
gagaactcaagtaacagagaagagggcagtaat

SEQ ID NO: 307571 - DNA, 33 bp, Homo sapien
aatttagggctgctagaataatcatctactctt

SEQ ID NO: 307572 - DNA, 33 bp, Homo sapien
aatttagggctgctaggataatcatctactctt

SEQ ID NO: 307573 - DNA, 33 bp, Homo sapien
atcacttctttggaaaactgtactccatttctt

SEQ ID NO: 307574 - DNA, 33 bp, Homo sapien
atcacttctttggaaagctgtactccatttctt

SEQ ID NO: 307575 - DNA, 33 bp, Homo sapien
aaactatggaacagtaccactaatgaatatcat

SEQ ID NO: 307576 - DNA, 33 bp, Homo sapien
aaactatggaacagtatcactaatgaatatcat

SEQ ID NO: 307577 - DNA, 33 bp, Homo sapien
cctctgcactgacctactagagtttctctatga

SEQ ID NO: 307578 - DNA, 33 bp, Homo sapien
cctctgcactgacctagtagagtttctctatga

SEQ ID NO: 307579 - DNA, 33 bp, Homo sapien
cctttatgcattcatcacagcctgttatcaggc

SEQ ID NO: 307580 - DNA, 33 bp, Homo sapien
cctttatgcattcatcgcagcctgttatcaggc

SEQ ID NO: 307581 - DNA, 33 bp, Homo sapien
ataagacgattcagtcaaaatgatctccaatat

SEQ ID NO: 307582 - DNA, 33 bp, Homo sapien
ataagacgattcagtcgaaatgatctccaatat

SEQ ID NO: 307583 - DNA, 33 bp, Homo sapien
cccaaaagtgaatcagaagagatgatgaggggc

SEQ ID NO: 307584 - DNA, 33 bp, Homo sapien
cccaaaagtgaatcaggagagatgatgaggggc

SEQ ID NO: 307585 - DNA, 33 bp, Homo sapien
acgattcatgaaacatcaacaggccatcaaatc

SEQ ID NO: 307586 - DNA, 33 bp, Homo sapien
acgattcatgaaacattaacaggccatcaaatc

SEQ ID NO: 307587 - DNA, 33 bp, Homo sapien
gagaatcaaagcacacaaacatcaagctgtgga

SEQ ID NO: 307588 - DNA, 33 bp, Homo sapien
gagaatcaaagcacacgaacatcaagctgtgga

SEQ ID NO: 307589 - DNA, 33 bp, Homo sapien
atgccattgatgagtacgctaataatttaagac

SEQ ID NO: 307590 - DNA, 33 bp, Homo sapien
atgccattgatgagtatgctaataatttaagac

SEQ ID NO: 307591 - DNA, 33 bp, Homo sapien
acatggctgttagtacaaattttgttgattttg

SEQ ID NO: 307592 - DNA, 33 bp, Homo sapien
acatggctgttagtaccaattttgttgattttg

SEQ ID NO: 307593 - DNA, 33 bp, Homo sapien
agtgctcaactaaaccagcaactaaatcaaaat

SEQ ID NO: 307594 - DNA, 33 bp, Homo sapien
agtgctcaactaaaccggcaactaaatcaaaat

SEQ ID NO: 307595 - DNA, 33 bp, Homo sapien
gccacagtgacacttacctcctctttttaaata

SEQ ID NO: 307596 - DNA, 33 bp, Homo sapien
gccacagtgacacttatctcctctttttaaata

SEQ ID NO: 307597 - DNA, 33 bp, Homo sapien
tcatcatcataaccaactgacttcatagtttgt

SEQ ID NO: 307598 - DNA, 33 bp, Homo sapien
tcatcatcataaccaattgacttcatagtttgt

SEQ ID NO: 307599 - DNA, 33 bp, Homo sapien
ccttcccccttattccggaggctcctaccatgc

SEQ ID NO: 307600 - DNA, 33 bp, Homo sapien
ccttcccccttattcctgaggctcctaccatgc

SEQ ID NO: 307601 - DNA, 33 bp, Homo sapien
tttcagtcagagagaacaggacaccgaaagtaa

SEQ ID NO: 307602 - DNA, 33 bp, Homo sapien
tttcagtcagagagaataggacaccgaaagtaa

SEQ ID NO: 307603 - DNA, 33 bp, Homo sapien
aatcccaataggcaaaaggcactcataaaacca

SEQ ID NO: 307604 - DNA, 33 bp, Homo sapien
aatcccaataggcaaagggcactcataaaacca

SEQ ID NO: 307605 - DNA, 33 bp, Homo sapien
ttaatcatatgtaagaaatcctaagtggcccaa

SEQ ID NO: 307606 - DNA, 33 bp, Homo sapien
ttaatcatatgtaagagatcctaagtggcccaa

SEQ ID NO: 307607 - DNA, 33 bp, Homo sapien
tagatagttacttaacacattgttctctttaaa

SEQ ID NO: 307608 - DNA, 33 bp, Homo sapien
tagatagttacttaacgcattgttctctttaaa

SEQ ID NO: 307609 - DNA, 33 bp, Homo sapien
tctgtttggtcttcaacgtatttactacgatgt

SEQ ID NO: 307610 - DNA, 33 bp, Homo sapien
tctgtttggtcttcaatgtatttactacgatgt

SEQ ID NO: 307611 - DNA, 33 bp, Homo sapien
ggtgtattgaacacaagtagatgatacaacatg

SEQ ID NO: 307612 - DNA, 33 bp, Homo sapien
ggtgtattgaacacaattagatgatacaacatg

SEQ ID NO: 307613 - DNA, 33 bp, Homo sapien
tggtgacttgaatccacgaaaagaagtgaagag

SEQ ID NO: 307614 - DNA, 33 bp, Homo sapien
tggtgacttgaatccatgaaaagaagtgaagag

SEQ ID NO: 307615 - DNA, 33 bp, Homo sapien
gtcatggctgatggaagagtgtttataaagtag

SEQ ID NO: 307616 - DNA, 33 bp, Homo sapien
gtcatggctgatggaatagtgtttataaagtag

SEQ ID NO: 307617 - DNA, 33 bp, Homo sapien
tccatccaaccacaaccgattgatgcaggcagc

SEQ ID NO: 307618 - DNA, 33 bp, Homo sapien
tccatccaaccacaactgattgatgcaggcagc

SEQ ID NO: 307619 - DNA, 33 bp, Homo sapien
tatcactctacccaaactttcagtattcatttc

SEQ ID NO: 307620 - DNA, 33 bp, Homo sapien
tatcactctacccaaattttcagtattcatttc

SEQ ID NO: 307621 - DNA, 33 bp, Homo sapien
agtgcaatgaagtaaactagtaattatgtatta

SEQ ID NO: 307622 - DNA, 33 bp, Homo sapien
agtgcaatgaagtaaattagtaattatgtatta

SEQ ID NO: 307623 - DNA, 33 bp, Homo sapien
atcataatccccttaacctagctgtctgaccat

SEQ ID NO: 307624 - DNA, 33 bp, Homo sapien
atcataatccccttaatctagctgtctgaccat

SEQ ID NO: 307625 - DNA, 33 bp, Homo sapien
ttactgcccaataaagacataacacaaacattt

SEQ ID NO: 307626 - DNA, 33 bp, Homo sapien
ttactgcccaataaagccataacacaaacattt

SEQ ID NO: 307627 - DNA, 33 bp, Homo sapien
agtaataaaatggttacgaaagactatgctatt

SEQ ID NO: 307628 - DNA, 33 bp, Homo sapien
agtaataaaatggttatgaaagactatgctatt

SEQ ID NO: 307629 - DNA, 33 bp, Homo sapien
ttttataaaatgcccacgaaaggctcaatttta

SEQ ID NO: 307630 - DNA, 33 bp, Homo sapien
ttttataaaatgcccatgaaaggctcaatttta

SEQ ID NO: 307631 - DNA, 33 bp, Homo sapien
ggacaattccaccaccgggtgaacaaatggctt

SEQ ID NO: 307632 - DNA, 33 bp, Homo sapien
ggacaattccaccacctggtgaacaaatggctt

SEQ ID NO: 307633 - DNA, 33 bp, Homo sapien
acaaccccaaatatcaagtgcaaagactaaggg

SEQ ID NO: 307634 - DNA, 33 bp, Homo sapien
acaaccccaaatatcacgtgcaaagactaaggg

SEQ ID NO: 307635 - DNA, 33 bp, Homo sapien
ctgaatagtgtaactcccttcatgtcaataata

SEQ ID NO: 307636 - DNA, 33 bp, Homo sapien
ctgaatagtgtaactctcttcatgtcaataata

SEQ ID NO: 307637 - DNA, 33 bp, Homo sapien
tgctaactgacttcacactccctgttgtatggc

SEQ ID NO: 307638 - DNA, 33 bp, Homo sapien
tgctaactgacttcacgctccctgttgtatggc

SEQ ID NO: 307639 - DNA, 33 bp, Homo sapien
gctgaggtaggcagatcacttgacgtcatgagt

SEQ ID NO: 307640 - DNA, 33 bp, Homo sapien
gctgaggtaggcagattacttgacgtcatgagt

SEQ ID NO: 307641 - DNA, 33 bp, Homo sapien
gttcaaaatggtgttacgggttcttggaatcat

SEQ ID NO: 307642 - DNA, 33 bp, Homo sapien
gttcaaaatggtgttatgggttcttggaatcat

SEQ ID NO: 307643 - DNA, 33 bp, Homo sapien
gatgacagataaaatcagattagggcatgtcca

SEQ ID NO: 307644 - DNA, 33 bp, Homo sapien
gatgacagataaaatcggattagggcatgtcca

SEQ ID NO: 307645 - DNA, 33 bp, Homo sapien
taaagaaagtagaacacatcaattgaaccaata

SEQ ID NO: 307646 - DNA, 33 bp, Homo sapien
taaagaaagtagaacatatcaattgaaccaata

SEQ ID NO: 307647 - DNA, 33 bp, Homo sapien
gttttcaatggagtcaataaaattaatgatagg

SEQ ID NO: 307648 - DNA, 33 bp, Homo sapien
gttttcaatggagtcagtaaaattaatgatagg

SEQ ID NO: 307649 - DNA, 33 bp, Homo sapien
ttgtaattacagcaaaatttacactatactcaa

SEQ ID NO: 307650 - DNA, 33 bp, Homo sapien
ttgtaattacagcaaagtttacactatactcaa

SEQ ID NO: 307651 - DNA, 33 bp, Homo sapien
gctgttgaaatattggcatgactaagactttca

SEQ ID NO: 307652 - DNA, 33 bp, Homo sapien
gctgttgaaatattgggatgactaagactttca

SEQ ID NO: 307653 - DNA, 33 bp, Homo sapien
caaatgacaacacagcgcaatcttacctcagca

SEQ ID NO: 307654 - DNA, 33 bp, Homo sapien
caaatgacaacacagctcaatcttacctcagca

SEQ ID NO: 307655 - DNA, 33 bp, Homo sapien
caagtaaaacccaagaggctagtgcgtctctga

SEQ ID NO: 307656 - DNA, 33 bp, Homo sapien
caagtaaaacccaagatgctagtgcgtctctga

SEQ ID NO: 307657 - DNA, 33 bp, Homo sapien
ataaattgtatctgcactccaattattagacta

SEQ ID NO: 307658 - DNA, 33 bp, Homo sapien
ataaattgtatctgcattccaattattagacta

SEQ ID NO: 307659 - DNA, 33 bp, Homo sapien
gtttgagtccccttacactatgcttctatgttt

SEQ ID NO: 307660 - DNA, 33 bp, Homo sapien
gtttgagtccccttacgctatgcttctatgttt

SEQ ID NO: 307661 - DNA, 33 bp, Homo sapien
gaccagtggaacaaaacagatgatatggtttcg

SEQ ID NO: 307662 - DNA, 33 bp, Homo sapien
gaccagtggaacaaaatagatgatatggtttcg

SEQ ID NO: 307663 - DNA, 33 bp, Homo sapien
ccaactattacttttccaactctgctggaagcc

SEQ ID NO: 307664 - DNA, 33 bp, Homo sapien
ccaactattacttttctaactctgctggaagcc

SEQ ID NO: 307665 - DNA, 33 bp, Homo sapien
ctgaggctcaaaaacaatacaagtttacttttc

SEQ ID NO: 307666 - DNA, 33 bp, Homo sapien
ctgaggctcaaaaacagtacaagtttacttttc

SEQ ID NO: 307667 - DNA, 33 bp, Homo sapien
gaataaataacagcaaatgcaagagtaaattca

SEQ ID NO: 307668 - DNA, 33 bp, Homo sapien
gaataaataacagcaagtgcaagagtaaattca

SEQ ID NO: 307669 - DNA, 33 bp, Homo sapien
aggttttcaaaatcagcctattgatggcttaaa

SEQ ID NO: 307670 - DNA, 33 bp, Homo sapien
aggttttcaaaatcaggctattgatggcttaaa

SEQ ID NO: 307671 - DNA, 33 bp, Homo sapien
tgtagaaaatctggcacaggataggtgatctag

SEQ ID NO: 307672 - DNA, 33 bp, Homo sapien
tgtagaaaatctggcataggataggtgatctag

SEQ ID NO: 307673 - DNA, 33 bp, Homo sapien
aaaaaagaatcaaaacaaatagcatgaaagccc

SEQ ID NO: 307674 - DNA, 33 bp, Homo sapien
aaaaaagaatcaaaacgaatagcatgaaagccc

SEQ ID NO: 307675 - DNA, 33 bp, Homo sapien
acaaatgagttatcaagatttgaaaagtcatgg

SEQ ID NO: 307676 - DNA, 33 bp, Homo sapien
acaaatgagttatcaatatttgaaaagtcatgg

SEQ ID NO: 307677 - DNA, 33 bp, Homo sapien
ttttgttattcagtaactggtgattaattttga

SEQ ID NO: 307678 - DNA, 33 bp, Homo sapien
ttttgttattcagtaattggtgattaattttga

SEQ ID NO: 307679 - DNA, 33 bp, Homo sapien
gaggctaaaaagtaaaatatggtgggatagaca

SEQ ID NO: 307680 - DNA, 33 bp, Homo sapien
gaggctaaaaagtaaagtatggtgggatagaca

SEQ ID NO: 307681 - DNA, 33 bp, Homo sapien
aagatcttccatataacgctcaagaaagcaata

SEQ ID NO: 307682 - DNA, 33 bp, Homo sapien
aagatcttccatataatgctcaagaaagcaata

SEQ ID NO: 307683 - DNA, 33 bp, Homo sapien
gacccattacctggtacaaaatatgctttaaaa

SEQ ID NO: 307684 - DNA, 33 bp, Homo sapien
gacccattacctggtataaaatatgctttaaaa

SEQ ID NO: 307685 - DNA, 33 bp, Homo sapien
ggtaccagcttgttaaacaacacactgtattat

SEQ ID NO: 307686 - DNA, 33 bp, Homo sapien
ggtaccagcttgttaagcaacacactgtattat

SEQ ID NO: 307687 - DNA, 33 bp, Homo sapien
attctaagttcagaagcatttgaaaaaacaatg

SEQ ID NO: 307688 - DNA, 33 bp, Homo sapien
attctaagttcagaaggatttgaaaaaacaatg

SEQ ID NO: 307689 - DNA, 33 bp, Homo sapien
atttatgcatttcccagagattcctggagcaga

SEQ ID NO: 307690 - DNA, 33 bp, Homo sapien
atttatgcatttcccatagattcctggagcaga

SEQ ID NO: 307691 - DNA, 33 bp, Homo sapien
taacaaacaataaaacgatcacactctgggttt

SEQ ID NO: 307692 - DNA, 33 bp, Homo sapien
taacaaacaataaaactatcacactctgggttt

SEQ ID NO: 307693 - DNA, 33 bp, Homo sapien
ctataaaaatctagacaaaaacatggaagaaat

SEQ ID NO: 307694 - DNA, 33 bp, Homo sapien
ctataaaaatctagacgaaaacatggaagaaat

SEQ ID NO: 307695 - DNA, 33 bp, Homo sapien
tacacctgatactggaggactcagatttataaa

SEQ ID NO: 307696 - DNA, 33 bp, Homo sapien
tacacctgatactggatgactcagatttataaa

SEQ ID NO: 307697 - DNA, 33 bp, Homo sapien
cacttgaacaattggacgtaatagaaatctaca

SEQ ID NO: 307698 - DNA, 33 bp, Homo sapien
cacttgaacaattggatgtaatagaaatctaca

SEQ ID NO: 307699 - DNA, 33 bp, Homo sapien
ccacatgtcgagggaaagacctggtgggatgtg

SEQ ID NO: 307700 - DNA, 33 bp, Homo sapien
ccacatgtcgagggaaggacctggtgggatgtg

SEQ ID NO: 307701 - DNA, 33 bp, Homo sapien
tcatttctgtatctggaagaaaatagatgcatt

SEQ ID NO: 307702 - DNA, 33 bp, Homo sapien
tcatttctgtatctgggagaaaatagatgcatt

SEQ ID NO: 307703 - DNA, 33 bp, Homo sapien
ttctcatcttttgggaaagctatgatggatatc

SEQ ID NO: 307704 - DNA, 33 bp, Homo sapien
ttctcatcttttgggagagctatgatggatatc

SEQ ID NO: 307705 - DNA, 33 bp, Homo sapien
aagaagaaaagagatgaaaggaaggagaaaaga

SEQ ID NO: 307706 - DNA, 33 bp, Homo sapien
aagaagaaaagagatggaaggaaggagaaaaga

SEQ ID NO: 307707 - DNA, 33 bp, Homo sapien
tatttggatagtaaaagtaatgcataacaaata

SEQ ID NO: 307708 - DNA, 33 bp, Homo sapien
tatttggatagtaaaattaatgcataacaaata

SEQ ID NO: 307709 - DNA, 33 bp, Homo sapien
actcttacttgcttaaatagaacttttgctgga

SEQ ID NO: 307710 - DNA, 33 bp, Homo sapien
actcttacttgcttaagtagaacttttgctgga

SEQ ID NO: 307711 - DNA, 33 bp, Homo sapien
gcgtagctaacaaaaacgcctcaattctggact

SEQ ID NO: 307712 - DNA, 33 bp, Homo sapien
gcgtagctaacaaaaatgcctcaattctggact

SEQ ID NO: 307713 - DNA, 33 bp, Homo sapien
tataaccacttgataactgttgtctaaagttac

SEQ ID NO: 307714 - DNA, 33 bp, Homo sapien
tataaccacttgataattgttgtctaaagttac

SEQ ID NO: 307715 - DNA, 33 bp, Homo sapien
atagcaatccctctaccacttcacaataattct

SEQ ID NO: 307716 - DNA, 33 bp, Homo sapien
atagcaatccctctacgacttcacaataattct

SEQ ID NO: 307717 - DNA, 33 bp, Homo sapien
tggaagcttgaaaaaaacaaaatgtgttcagag

SEQ ID NO: 307718 - DNA, 33 bp, Homo sapien
tggaagcttgaaaaaagcaaaatgtgttcagag

SEQ ID NO: 307719 - DNA, 33 bp, Homo sapien
cacacacacaacacacaaaaaagaattgggtag

SEQ ID NO: 307720 - DNA, 33 bp, Homo sapien
cacacacacaacacactaaaaagaattgggtag

SEQ ID NO: 307721 - DNA, 33 bp, Homo sapien
atcacctttccaataaacccaggaacagagtct

SEQ ID NO: 307722 - DNA, 33 bp, Homo sapien
atcacctttccaataatcccaggaacagagtct

SEQ ID NO: 307723 - DNA, 33 bp, Homo sapien
ttcagttagcactctgcagggatagaataagga

SEQ ID NO: 307724 - DNA, 33 bp, Homo sapien
ttcagttagcactctggagggatagaataagga

SEQ ID NO: 307725 - DNA, 33 bp, Homo sapien
atacctacaactagaactgctgagtaagagtag

SEQ ID NO: 307726 - DNA, 33 bp, Homo sapien
atacctacaactagaattgctgagtaagagtag

SEQ ID NO: 307727 - DNA, 33 bp, Homo sapien
agtaagaaggtaaccaatgcaggaaagtacaaa

SEQ ID NO: 307728 - DNA, 33 bp, Homo sapien
agtaagaaggtaaccagtgcaggaaagtacaaa

SEQ ID NO: 307729 - DNA, 33 bp, Homo sapien
ttctcaagaatggaacaaacagtgagaagcaga

SEQ ID NO: 307730 - DNA, 33 bp, Homo sapien
ttctcaagaatggaacgaacagtgagaagcaga

SEQ ID NO: 307731 - DNA, 33 bp, Homo sapien
gaggcccttcttcccactgagttctagcaaaac

SEQ ID NO: 307732 - DNA, 33 bp, Homo sapien
gaggcccttcttcccattgagttctagcaaaac

SEQ ID NO: 307733 - DNA, 33 bp, Homo sapien
tgctggtcttggaatacagaaaactttagagtt

SEQ ID NO: 307734 - DNA, 33 bp, Homo sapien
tgctggtcttggaatagagaaaactttagagtt

SEQ ID NO: 307735 - DNA, 33 bp, Homo sapien
gtgtgaattcagggtagggatagtagtagttgt

SEQ ID NO: 307736 - DNA, 33 bp, Homo sapien
gtgtgaattcagggtatggatagtagtagttgt

SEQ ID NO: 307737 - DNA, 33 bp, Homo sapien
aatccctaaactcaaaacagtcataatttattg

SEQ ID NO: 307738 - DNA, 33 bp, Homo sapien
aatccctaaactcaaagcagtcataatttattg

SEQ ID NO: 307739 - DNA, 33 bp, Homo sapien
tggaaataccatttgaagctgagaatggtcatt

SEQ ID NO: 307740 - DNA, 33 bp, Homo sapien
tggaaataccatttgaggctgagaatggtcatt

SEQ ID NO: 307741 - DNA, 33 bp, Homo sapien
acatccaagactaaagacattcttaaggaaaaa

SEQ ID NO: 307742 - DNA, 33 bp, Homo sapien
acatccaagactaaaggcattcttaaggaaaaa

SEQ ID NO: 307743 - DNA, 33 bp, Homo sapien
ctaaaagaagtacttacgccaaatggataatag

SEQ ID NO: 307744 - DNA, 33 bp, Homo sapien
ctaaaagaagtacttatgccaaatggataatag

SEQ ID NO: 307745 - DNA, 33 bp, Homo sapien
taggcttccaaaccagacgcactagatttatac

SEQ ID NO: 307746 - DNA, 33 bp, Homo sapien
taggcttccaaaccagtcgcactagatttatac

SEQ ID NO: 307747 - DNA, 33 bp, Homo sapien
gtctgtagtaatcaagaaggacaaacttttttt

SEQ ID NO: 307748 - DNA, 33 bp, Homo sapien
gtctgtagtaatcaaggaggacaaacttttttt

SEQ ID NO: 307749 - DNA, 33 bp, Homo sapien
aataatttttaaaacaactgactggttcaactg

SEQ ID NO: 307750 - DNA, 33 bp, Homo sapien
aataatttttaaaacatctgactggttcaactg

SEQ ID NO: 307751 - DNA, 33 bp, Homo sapien
ttgttcctattctcacggctttacaagctattc

SEQ ID NO: 307752 - DNA, 33 bp, Homo sapien
ttgttcctattctcactgctttacaagctattc

SEQ ID NO: 307753 - DNA, 33 bp, Homo sapien
cttgataactgtattgaaatgtgtcataatatt

SEQ ID NO: 307754 - DNA, 33 bp, Homo sapien
cttgataactgtattgcaatgtgtcataatatt

SEQ ID NO: 307755 - DNA, 33 bp, Homo sapien
aatagaaaagacgaaagaatagcaaatgctggc

SEQ ID NO: 307756 - DNA, 33 bp, Homo sapien
aatagaaaagacgaaataatagcaaatgctggc

SEQ ID NO: 307757 - DNA, 33 bp, Homo sapien
taatgatatttactaaagcctgcattaaaagaa

SEQ ID NO: 307758 - DNA, 33 bp, Homo sapien
taatgatatttactaaggcctgcattaaaagaa

SEQ ID NO: 307759 - DNA, 33 bp, Homo sapien
atttattccagttttaagttgcctaaatgttcc

SEQ ID NO: 307760 - DNA, 33 bp, Homo sapien
atttattccagttttaggttgcctaaatgttcc

SEQ ID NO: 307761 - DNA, 33 bp, Homo sapien
tgcacctgtaattcaccctgagaaagagcagac

SEQ ID NO: 307762 - DNA, 33 bp, Homo sapien
tgcacctgtaattcactctgagaaagagcagac

SEQ ID NO: 307763 - DNA, 33 bp, Homo sapien
gcagcagtttactcccgcttatgtctaagtagt

SEQ ID NO: 307764 - DNA, 33 bp, Homo sapien
gcagcagtttactccctcttatgtctaagtagt

SEQ ID NO: 307765 - DNA, 33 bp, Homo sapien
ttatatgcataaaaataaggtcactacaactct

SEQ ID NO: 307766 - DNA, 33 bp, Homo sapien
ttatatgcataaaaattaggtcactacaactct

SEQ ID NO: 307767 - DNA, 33 bp, Homo sapien
atcacaaaaagaaaagccataataatgcaagta

SEQ ID NO: 307768 - DNA, 33 bp, Homo sapien
atcacaaaaagaaaagtcataataatgcaagta

SEQ ID NO: 307769 - DNA, 33 bp, Homo sapien
ggctgccttcaggagcaaattcctggaatcctt

SEQ ID NO: 307770 - DNA, 33 bp, Homo sapien
ggctgccttcaggagcgaattcctggaatcctt

SEQ ID NO: 307771 - DNA, 33 bp, Homo sapien
aggcctcttagaagtacctgttcctgaaatgct

SEQ ID NO: 307772 - DNA, 33 bp, Homo sapien
aggcctcttagaagtatctgttcctgaaatgct

SEQ ID NO: 307773 - DNA, 33 bp, Homo sapien
gaaagatctctctcacaggaagacatttgagat

SEQ ID NO: 307774 - DNA, 33 bp, Homo sapien
gaaagatctctctcacgggaagacatttgagat

SEQ ID NO: 307775 - DNA, 33 bp, Homo sapien
agctctttttcatcacgcaggtcttatctcaaa

SEQ ID NO: 307776 - DNA, 33 bp, Homo sapien
agctctttttcatcactcaggtcttatctcaaa

SEQ ID NO: 307777 - DNA, 33 bp, Homo sapien
accatttacatttttgaatcttcacacctcact

SEQ ID NO: 307778 - DNA, 33 bp, Homo sapien
accatttacatttttggatcttcacacctcact

SEQ ID NO: 307779 - DNA, 33 bp, Homo sapien
gggcatacggtctgaaaaatgagtcattaggca

SEQ ID NO: 307780 - DNA, 33 bp, Homo sapien
gggcatacggtctgaacaatgagtcattaggca

SEQ ID NO: 307781 - DNA, 33 bp, Homo sapien
ttagcattatctaaacaggaatatttgggtagc

SEQ ID NO: 307782 - DNA, 33 bp, Homo sapien
ttagcattatctaaacgggaatatttgggtagc

SEQ ID NO: 307783 - DNA, 33 bp, Homo sapien
tgtaagcatcaggtaactcattcgaaagctaga

SEQ ID NO: 307784 - DNA, 33 bp, Homo sapien
tgtaagcatcaggtaattcattcgaaagctaga

SEQ ID NO: 307785 - DNA, 33 bp, Homo sapien
ttttgaagttgggtcacagagtcaaaaattatt

SEQ ID NO: 307786 - DNA, 33 bp, Homo sapien
ttttgaagttgggtcatagagtcaaaaattatt

SEQ ID NO: 307787 - DNA, 33 bp, Homo sapien
ttattctcaaggctcaatatttaatgttgctta

SEQ ID NO: 307788 - DNA, 33 bp, Homo sapien
ttattctcaaggctcagtatttaatgttgctta

SEQ ID NO: 307789 - DNA, 33 bp, Homo sapien
tctctgttgcgggatacggatcctgctcaggta

SEQ ID NO: 307790 - DNA, 33 bp, Homo sapien
tctctgttgcgggatatggatcctgctcaggta

SEQ ID NO: 307791 - DNA, 33 bp, Homo sapien
tgagtcctaaagagcactatttcacgatttggc

SEQ ID NO: 307792 - DNA, 33 bp, Homo sapien
tgagtcctaaagagcagtatttcacgatttggc

SEQ ID NO: 307793 - DNA, 33 bp, Homo sapien
ttcatgtgtagacacaaccttggacaggggcat

SEQ ID NO: 307794 - DNA, 33 bp, Homo sapien
ttcatgtgtagacacagccttggacaggggcat

SEQ ID NO: 307795 - DNA, 33 bp, Homo sapien
gctgcagtgtaagaagcaggagtctaagcacag

SEQ ID NO: 307796 - DNA, 33 bp, Homo sapien
gctgcagtgtaagaagtaggagtctaagcacag

SEQ ID NO: 307797 - DNA, 33 bp, Homo sapien
ttttatctacaaccaacagtctggtatttcaag

SEQ ID NO: 307798 - DNA, 33 bp, Homo sapien
ttttatctacaaccaatagtctggtatttcaag

SEQ ID NO: 307799 - DNA, 33 bp, Homo sapien
tttattggtagcttagcaagaacaaggtcacca

SEQ ID NO: 307800 - DNA, 33 bp, Homo sapien
tttattggtagcttagtaagaacaaggtcacca

SEQ ID NO: 307801 - DNA, 33 bp, Homo sapien
ttctccctcccaacttaaaaaaagagcattaag

SEQ ID NO: 307802 - DNA, 33 bp, Homo sapien
ttctccctcccaactttaaaaaagagcattaag

SEQ ID NO: 307803 - DNA, 33 bp, Homo sapien
acatgctgctttaaaaagaggacggtaggcctc

SEQ ID NO: 307804 - DNA, 33 bp, Homo sapien
acatgctgctttaaaacgaggacggtaggcctc

SEQ ID NO: 307805 - DNA, 33 bp, Homo sapien
aagatcgtggcaaacaagatagaattatttctg

SEQ ID NO: 307806 - DNA, 33 bp, Homo sapien
aagatcgtggcaaacaggatagaattatttctg

SEQ ID NO: 307807 - DNA, 33 bp, Homo sapien
tacaactgtttctccactagccatatcaaacct

SEQ ID NO: 307808 - DNA, 33 bp, Homo sapien
tacaactgtttctccagtagccatatcaaacct

SEQ ID NO: 307809 - DNA, 33 bp, Homo sapien
ggtgattctgacaaaactaattatcagatcata

SEQ ID NO: 307810 - DNA, 33 bp, Homo sapien
ggtgattctgacaaaagtaattatcagatcata

SEQ ID NO: 307811 - DNA, 33 bp, Homo sapien
cccaactggaacaccaaattttaatggttatct

SEQ ID NO: 307812 - DNA, 33 bp, Homo sapien
cccaactggaacaccagattttaatggttatct

SEQ ID NO: 307813 - DNA, 33 bp, Homo sapien
caatgagtttttggacccagcttgtaggtccct

SEQ ID NO: 307814 - DNA, 33 bp, Homo sapien
caatgagtttttggactcagcttgtaggtccct

SEQ ID NO: 307815 - DNA, 33 bp, Homo sapien
tgcccagttatcatcacatcactcaagtctagt

SEQ ID NO: 307816 - DNA, 33 bp, Homo sapien
tgcccagttatcatcatatcactcaagtctagt

SEQ ID NO: 307817 - DNA, 33 bp, Homo sapien
tcttcctatcgtgttccaggattaaattgtata

SEQ ID NO: 307818 - DNA, 33 bp, Homo sapien
tcttcctatcgtgttctaggattaaattgtata

SEQ ID NO: 307819 - DNA, 33 bp, Homo sapien
cctttgagagagggaacatacaaataaagccct

SEQ ID NO: 307820 - DNA, 33 bp, Homo sapien
cctttgagagagggaagatacaaataaagccct

SEQ ID NO: 307821 - DNA, 33 bp, Homo sapien
acattccaaagaaaagcctgtcttcaggagaac

SEQ ID NO: 307822 - DNA, 33 bp, Homo sapien
acattccaaagaaaagtctgtcttcaggagaac

SEQ ID NO: 307823 - DNA, 33 bp, Homo sapien
cctcttgttaatcacaaaagttcttaagatggt

SEQ ID NO: 307824 - DNA, 33 bp, Homo sapien
cctcttgttaatcacagaagttcttaagatggt

SEQ ID NO: 307825 - DNA, 33 bp, Homo sapien
tttatgttagcctacacatcacaattcaccaag

SEQ ID NO: 307826 - DNA, 33 bp, Homo sapien
tttatgttagcctacatatcacaattcaccaag

SEQ ID NO: 307827 - DNA, 33 bp, Homo sapien
ctaatgtttatgctcacatttgcttgtgtgtct

SEQ ID NO: 307828 - DNA, 33 bp, Homo sapien
ctaatgtttatgctcatatttgcttgtgtgtct

SEQ ID NO: 307829 - DNA, 33 bp, Homo sapien
tgaaatataaggagaagagatcaaactaagttc

SEQ ID NO: 307830 - DNA, 33 bp, Homo sapien
tgaaatataaggagaatagatcaaactaagttc

SEQ ID NO: 307831 - DNA, 33 bp, Homo sapien
aagatgctttttagagaaggtcaaaactgtttt

SEQ ID NO: 307832 - DNA, 33 bp, Homo sapien
aagatgctttttagaggaggtcaaaactgtttt

SEQ ID NO: 307833 - DNA, 33 bp, Homo sapien
ctttagtaactaagcaagcataagtcagagtta

SEQ ID NO: 307834 - DNA, 33 bp, Homo sapien
ctttagtaactaagcaggcataagtcagagtta

SEQ ID NO: 307835 - DNA, 33 bp, Homo sapien
accttgtggcttttaccgaaagacatttagagt

SEQ ID NO: 307836 - DNA, 33 bp, Homo sapien
accttgtggcttttactgaaagacatttagagt

SEQ ID NO: 307837 - DNA, 33 bp, Homo sapien
aaatgaacattaaaaaataagtattacaggcac

SEQ ID NO: 307838 - DNA, 33 bp, Homo sapien
aaatgaacattaaaaactaagtattacaggcac

SEQ ID NO: 307839 - DNA, 33 bp, Homo sapien
gggattgttagcaacaatgaggagctaaaaacc

SEQ ID NO: 307840 - DNA, 33 bp, Homo sapien
gggattgttagcaacattgaggagctaaaaacc

SEQ ID NO: 307841 - DNA, 33 bp, Homo sapien
gagaggcagtctttaaataaataatcaaaagat

SEQ ID NO: 307842 - DNA, 33 bp, Homo sapien
gagaggcagtctttaagtaaataatcaaaagat

SEQ ID NO: 307843 - DNA, 33 bp, Homo sapien
ggcaatgactgaatatgaacttccatagcctga

SEQ ID NO: 307844 - DNA, 33 bp, Homo sapien
ggcaatgactgaatattaacttccatagcctga

SEQ ID NO: 307845 - DNA, 33 bp, Homo sapien
gaatcttcacactgggaaaggaactgttataac

SEQ ID NO: 307846 - DNA, 33 bp, Homo sapien
gaatcttcacactggggaaggaactgttataac

SEQ ID NO: 307847 - DNA, 33 bp, Homo sapien
gaagccaacaggtatacgaaaaagtgctcagca

SEQ ID NO: 307848 - DNA, 33 bp, Homo sapien
gaagccaacaggtatatgaaaaagtgctcagca

SEQ ID NO: 307849 - DNA, 33 bp, Homo sapien
gtcagtgaagaatacacggcactgtggtgtgaa

SEQ ID NO: 307850 - DNA, 33 bp, Homo sapien
gtcagtgaagaatacatggcactgtggtgtgaa

SEQ ID NO: 307851 - DNA, 33 bp, Homo sapien
ccctgttcaaaaaccacggccatattacatttt

SEQ ID NO: 307852 - DNA, 33 bp, Homo sapien
ccctgttcaaaaaccatggccatattacatttt

SEQ ID NO: 307853 - DNA, 33 bp, Homo sapien
aaatttgtaagctatacgaagaatggcttgtgt

SEQ ID NO: 307854 - DNA, 33 bp, Homo sapien
aaatttgtaagctatatgaagaatggcttgtgt

SEQ ID NO: 307855 - DNA, 33 bp, Homo sapien
tccatgtaatgatactcaaaaccatcttttcta

SEQ ID NO: 307856 - DNA, 33 bp, Homo sapien
tccatgtaatgatactgaaaaccatcttttcta

SEQ ID NO: 307857 - DNA, 33 bp, Homo sapien
tgttatcttactatcaactcttaagctcattaa

SEQ ID NO: 307858 - DNA, 33 bp, Homo sapien
tgttatcttactatcacctcttaagctcattaa

SEQ ID NO: 307859 - DNA, 33 bp, Homo sapien
aaattaagtccttaaccctgtgaaaatatatac

SEQ ID NO: 307860 - DNA, 33 bp, Homo sapien
aaattaagtccttaactctgtgaaaatatatac

SEQ ID NO: 307861 - DNA, 33 bp, Homo sapien
aatgtaatgccttacaataaaattaagtcctta

SEQ ID NO: 307862 - DNA, 33 bp, Homo sapien
aatgtaatgccttacagtaaaattaagtcctta

SEQ ID NO: 307863 - DNA, 33 bp, Homo sapien
ctctctcttatgaaaaaaaatgctctttacatt

SEQ ID NO: 307864 - DNA, 33 bp, Homo sapien
ctctctcttatgaaaacaaatgctctttacatt

SEQ ID NO: 307865 - DNA, 33 bp, Homo sapien
ccccttctggaaaatcacatgttgtcctgaagc

SEQ ID NO: 307866 - DNA, 33 bp, Homo sapien
ccccttctggaaaatcgcatgttgtcctgaagc

SEQ ID NO: 307867 - DNA, 33 bp, Homo sapien
aaccttcttaggttgaacataaagaacatggca

SEQ ID NO: 307868 - DNA, 33 bp, Homo sapien
aaccttcttaggttgatcataaagaacatggca

SEQ ID NO: 307869 - DNA, 33 bp, Homo sapien
cgctgctgctggaacacacaaaccatcatggat

SEQ ID NO: 307870 - DNA, 33 bp, Homo sapien
cgctgctgctggaacatacaaaccatcatggat

SEQ ID NO: 307871 - DNA, 33 bp, Homo sapien
tctagattacaatctacagatccacccaatcag

SEQ ID NO: 307872 - DNA, 33 bp, Homo sapien
tctagattacaatctatagatccacccaatcag

SEQ ID NO: 307873 - DNA, 33 bp, Homo sapien
tgttgaataaatttgaagtgtcccaatagggat

SEQ ID NO: 307874 - DNA, 33 bp, Homo sapien
tgttgaataaatttgaggtgtcccaatagggat

SEQ ID NO: 307875 - DNA, 33 bp, Homo sapien
aaagctatgtaattgaaatgtaagtgagataca

SEQ ID NO: 307876 - DNA, 33 bp, Homo sapien
aaagctatgtaattgatatgtaagtgagataca

SEQ ID NO: 307877 - DNA, 33 bp, Homo sapien
aaatagggaataataaagatcgccacaggccag

SEQ ID NO: 307878 - DNA, 33 bp, Homo sapien
aaatagggaataataaggatcgccacaggccag

SEQ ID NO: 307879 - DNA, 33 bp, Homo sapien
catcagataataaccactggtgtaatttcagga

SEQ ID NO: 307880 - DNA, 33 bp, Homo sapien
catcagataataaccattggtgtaatttcagga

SEQ ID NO: 307881 - DNA, 33 bp, Homo sapien
acgacaacactcaagaacaaattcttacacact

SEQ ID NO: 307882 - DNA, 33 bp, Homo sapien
acgacaacactcaagagcaaattcttacacact

SEQ ID NO: 307883 - DNA, 33 bp, Homo sapien
gtcttcacttatggagaaagatttttatgttgt

SEQ ID NO: 307884 - DNA, 33 bp, Homo sapien
gtcttcacttatggaggaagatttttatgttgt

SEQ ID NO: 307885 - DNA, 33 bp, Homo sapien
ttgtgttctttgagaccgaaagaatttgttttg

SEQ ID NO: 307886 - DNA, 33 bp, Homo sapien
ttgtgttctttgagactgaaagaatttgttttg

SEQ ID NO: 307887 - DNA, 33 bp, Homo sapien
tgctgaccttttctcacgcctgtttattactga

SEQ ID NO: 307888 - DNA, 33 bp, Homo sapien
tgctgaccttttctcatgcctgtttattactga

SEQ ID NO: 307889 - DNA, 33 bp, Homo sapien
aaataagaccattaccacaataatgactaataa

SEQ ID NO: 307890 - DNA, 33 bp, Homo sapien
aaataagaccattaccgcaataatgactaataa

SEQ ID NO: 307891 - DNA, 33 bp, Homo sapien
tacaatggggaccgtaataactgtcactatcat

SEQ ID NO: 307892 - DNA, 33 bp, Homo sapien
tacaatggggaccgtagtaactgtcactatcat

SEQ ID NO: 307893 - DNA, 33 bp, Homo sapien
acctgcataagttaacagtaaaatcaactcttt

SEQ ID NO: 307894 - DNA, 33 bp, Homo sapien
acctgcataagttaacggtaaaatcaactcttt

SEQ ID NO: 307895 - DNA, 33 bp, Homo sapien
actagtactcagcagacgaagaaaggggagcag

SEQ ID NO: 307896 - DNA, 33 bp, Homo sapien
actagtactcagcagatgaagaaaggggagcag

SEQ ID NO: 307897 - DNA, 33 bp, Homo sapien
tatatttatggtatacaacgtgatgtttagata

SEQ ID NO: 307898 - DNA, 33 bp, Homo sapien
tatatttatggtatacgacgtgatgtttagata

SEQ ID NO: 307899 - DNA, 33 bp, Homo sapien
tagcaagctccattaacgactgaagttgactct

SEQ ID NO: 307900 - DNA, 33 bp, Homo sapien
tagcaagctccattaatgactgaagttgactct

SEQ ID NO: 307901 - DNA, 33 bp, Homo sapien
tcacaaataagaatgccaaccactgagatgaat

SEQ ID NO: 307902 - DNA, 33 bp, Homo sapien
tcacaaataagaatgctaaccactgagatgaat

SEQ ID NO: 307903 - DNA, 33 bp, Homo sapien
agcagatgccccaataggccttagacctttagc

SEQ ID NO: 307904 - DNA, 33 bp, Homo sapien
agcagatgccccaatatgccttagacctttagc

SEQ ID NO: 307905 - DNA, 33 bp, Homo sapien
gttcttgtgtaagaacagagaagtagacctaat

SEQ ID NO: 307906 - DNA, 33 bp, Homo sapien
gttcttgtgtaagaacggagaagtagacctaat

SEQ ID NO: 307907 - DNA, 33 bp, Homo sapien
aaatttgctgtaaaagcagtaaatgcaactaac

SEQ ID NO: 307908 - DNA, 33 bp, Homo sapien
aaatttgctgtaaaagtagtaaatgcaactaac

SEQ ID NO: 307909 - DNA, 33 bp, Homo sapien
cttaaggtaatttgcacaggtttctttatcaga

SEQ ID NO: 307910 - DNA, 33 bp, Homo sapien
cttaaggtaatttgcataggtttctttatcaga

SEQ ID NO: 307911 - DNA, 33 bp, Homo sapien
gggaaaatacactggaagaagtgatgtctaagc

SEQ ID NO: 307912 - DNA, 33 bp, Homo sapien
gggaaaatacactggaggaagtgatgtctaagc

SEQ ID NO: 307913 - DNA, 33 bp, Homo sapien
tgtattttcagcacccaagaatgtctagacacg

SEQ ID NO: 307914 - DNA, 33 bp, Homo sapien
tgtattttcagcacccgagaatgtctagacacg

SEQ ID NO: 307915 - DNA, 33 bp, Homo sapien
ttttacattgcacttaaaaaaaaatcgaaactc

SEQ ID NO: 307916 - DNA, 33 bp, Homo sapien
ttttacattgcacttagaaaaaaatcgaaactc

SEQ ID NO: 307917 - DNA, 33 bp, Homo sapien
agaagtggtggactcaaaacataccttttaagt

SEQ ID NO: 307918 - DNA, 33 bp, Homo sapien
agaagtggtggactcagaacataccttttaagt

SEQ ID NO: 307919 - DNA, 33 bp, Homo sapien
atctcatcaaaaaacacgctcacaaaaatatcc

SEQ ID NO: 307920 - DNA, 33 bp, Homo sapien
atctcatcaaaaaacatgctcacaaaaatatcc

SEQ ID NO: 307921 - DNA, 33 bp, Homo sapien
caagttaacatagaaaattcaccatcatgccct

SEQ ID NO: 307922 - DNA, 33 bp, Homo sapien
caagttaacatagaaagttcaccatcatgccct

SEQ ID NO: 307923 - DNA, 33 bp, Homo sapien
tcaggtttcttgtgccaaaagactagcaggtaa

SEQ ID NO: 307924 - DNA, 33 bp, Homo sapien
tcaggtttcttgtgccgaaagactagcaggtaa

SEQ ID NO: 307925 - DNA, 33 bp, Homo sapien
aataaatattcgatacacactggcatgactggc

SEQ ID NO: 307926 - DNA, 33 bp, Homo sapien
aataaatattcgatacgcactggcatgactggc

SEQ ID NO: 307927 - DNA, 33 bp, Homo sapien
gtattaggtatgaagcaagagatgatccgaagt

SEQ ID NO: 307928 - DNA, 33 bp, Homo sapien
gtattaggtatgaagctagagatgatccgaagt

SEQ ID NO: 307929 - DNA, 33 bp, Homo sapien
gagtgtgaatattggaagtttgtttatctctaa

SEQ ID NO: 307930 - DNA, 33 bp, Homo sapien
gagtgtgaatattggaggtttgtttatctctaa

SEQ ID NO: 307931 - DNA, 33 bp, Homo sapien
agaattcagaatatgaataggaacaaaggtcat

SEQ ID NO: 307932 - DNA, 33 bp, Homo sapien
agaattcagaatatgagtaggaacaaaggtcat

SEQ ID NO: 307933 - DNA, 33 bp, Homo sapien
agacttacccttttagaagatagttctatttcc

SEQ ID NO: 307934 - DNA, 33 bp, Homo sapien
agacttacccttttaggagatagttctatttcc

SEQ ID NO: 307935 - DNA, 33 bp, Homo sapien
agcttagagggaacagaaaactttcactttttg

SEQ ID NO: 307936 - DNA, 33 bp, Homo sapien
agcttagagggaacaggaaactttcactttttg

SEQ ID NO: 307937 - DNA, 33 bp, Homo sapien
gagcaacagtagtatcactcaagtaagtgtgct

SEQ ID NO: 307938 - DNA, 33 bp, Homo sapien
gagcaacagtagtatccctcaagtaagtgtgct

SEQ ID NO: 307939 - DNA, 33 bp, Homo sapien
tagtacatcactgcacaacaaccatagtacctt

SEQ ID NO: 307940 - DNA, 33 bp, Homo sapien
tagtacatcactgcacgacaaccatagtacctt

SEQ ID NO: 307941 - DNA, 33 bp, Homo sapien
ccccattagctgaaaaatcagtccacagtgatg

SEQ ID NO: 307942 - DNA, 33 bp, Homo sapien
ccccattagctgaaaagtcagtccacagtgatg

SEQ ID NO: 307943 - DNA, 33 bp, Homo sapien
ttgcttctgaaagacaacaaagtggaagactct

SEQ ID NO: 307944 - DNA, 33 bp, Homo sapien
ttgcttctgaaagacagcaaagtggaagactct

SEQ ID NO: 307945 - DNA, 33 bp, Homo sapien
ggctcagctacaaagaacagtaagtcttgcttt

SEQ ID NO: 307946 - DNA, 33 bp, Homo sapien
ggctcagctacaaagatcagtaagtcttgcttt

SEQ ID NO: 307947 - DNA, 33 bp, Homo sapien
ctgcactgcagtcttacgtgcttccttcttatc

SEQ ID NO: 307948 - DNA, 33 bp, Homo sapien
ctgcactgcagtcttaggtgcttccttcttatc

SEQ ID NO: 307949 - DNA, 33 bp, Homo sapien
acaacaattctgtaaaataacattatcatccca

SEQ ID NO: 307950 - DNA, 33 bp, Homo sapien
acaacaattctgtaaagtaacattatcatccca

SEQ ID NO: 307951 - DNA, 33 bp, Homo sapien
ttagattgattctagaaactcacagatgtaata

SEQ ID NO: 307952 - DNA, 33 bp, Homo sapien
ttagattgattctagatactcacagatgtaata

SEQ ID NO: 307953 - DNA, 33 bp, Homo sapien
taggtcctcttgaagacaacagtgatggtacat

SEQ ID NO: 307954 - DNA, 33 bp, Homo sapien
taggtcctcttgaagagaacagtgatggtacat

SEQ ID NO: 307955 - DNA, 33 bp, Homo sapien
ggatcactgatagtcaactgatttctactgaaa

SEQ ID NO: 307956 - DNA, 33 bp, Homo sapien
ggatcactgatagtcagctgatttctactgaaa

SEQ ID NO: 307957 - DNA, 33 bp, Homo sapien
tagttatcacaggagcaagggtgtggcctggat

SEQ ID NO: 307958 - DNA, 33 bp, Homo sapien
tagttatcacaggagcgagggtgtggcctggat

SEQ ID NO: 307959 - DNA, 33 bp, Homo sapien
gcagtttccaccatgacgggatttgaggggcaa

SEQ ID NO: 307960 - DNA, 33 bp, Homo sapien
gcagtttccaccatgatgggatttgaggggcaa

SEQ ID NO: 307961 - DNA, 33 bp, Homo sapien
gttgcatggagaaatacaacaagaacagattct

SEQ ID NO: 307962 - DNA, 33 bp, Homo sapien
gttgcatggagaaatataacaagaacagattct

SEQ ID NO: 307963 - DNA, 33 bp, Homo sapien
tttctctttgatttcacgtgtatatcatttcct

SEQ ID NO: 307964 - DNA, 33 bp, Homo sapien
tttctctttgatttcatgtgtatatcatttcct

SEQ ID NO: 307965 - DNA, 33 bp, Homo sapien
tctgttttactattcccaaagccaataaaatgt

SEQ ID NO: 307966 - DNA, 33 bp, Homo sapien
tctgttttactattcctaaagccaataaaatgt

SEQ ID NO: 307967 - DNA, 33 bp, Homo sapien
ggagtgtgaatcaacacaatagacagaaaggtg

SEQ ID NO: 307968 - DNA, 33 bp, Homo sapien
ggagtgtgaatcaacataatagacagaaaggtg

SEQ ID NO: 307969 - DNA, 33 bp, Homo sapien
tgctgggtttcagcaaaaacttacttgtcagtt

SEQ ID NO: 307970 - DNA, 33 bp, Homo sapien
tgctgggtttcagcaagaacttacttgtcagtt

SEQ ID NO: 307971 - DNA, 33 bp, Homo sapien
caattctgttacccaaatgaaagatcccataat

SEQ ID NO: 307972 - DNA, 33 bp, Homo sapien
caattctgttacccaagtgaaagatcccataat

SEQ ID NO: 307973 - DNA, 33 bp, Homo sapien
ggccaaacatttgtaagagttgcaatttgtatg

SEQ ID NO: 307974 - DNA, 33 bp, Homo sapien
ggccaaacatttgtaatagttgcaatttgtatg

SEQ ID NO: 307975 - DNA, 33 bp, Homo sapien
cgcaatagggtccctcactatctctccagtgtc

SEQ ID NO: 307976 - DNA, 33 bp, Homo sapien
cgcaatagggtccctcgctatctctccagtgtc

SEQ ID NO: 307977 - DNA, 33 bp, Homo sapien
ctaaaattgtatgggaacagaatgagatagtag

SEQ ID NO: 307978 - DNA, 33 bp, Homo sapien
ctaaaattgtatgggaccagaatgagatagtag

SEQ ID NO: 307979 - DNA, 33 bp, Homo sapien
ctttgaatctgagaggaaaaacttcacatttag

SEQ ID NO: 307980 - DNA, 33 bp, Homo sapien
ctttgaatctgagagggaaaacttcacatttag

SEQ ID NO: 307981 - DNA, 33 bp, Homo sapien
ggtatgtttaatgacaactttcaacctttccct

SEQ ID NO: 307982 - DNA, 33 bp, Homo sapien
ggtatgtttaatgacagctttcaacctttccct

SEQ ID NO: 307983 - DNA, 33 bp, Homo sapien
gaagcagtgcggaggacaaagaatggggtcagt

SEQ ID NO: 307984 - DNA, 33 bp, Homo sapien
gaagcagtgcggaggataaagaatggggtcagt

SEQ ID NO: 307985 - DNA, 33 bp, Homo sapien
ttattttttgggtctaggttctgttttagggat

SEQ ID NO: 307986 - DNA, 33 bp, Homo sapien
ttattttttgggtctatgttctgttttagggat

SEQ ID NO: 307987 - DNA, 33 bp, Homo sapien
caattctgctgccacagtgagtctgctctggtc

SEQ ID NO: 307988 - DNA, 33 bp, Homo sapien
caattctgctgccacattgagtctgctctggtc

SEQ ID NO: 307989 - DNA, 33 bp, Homo sapien
aaatgtggggacccccccaatgactggatcccc

SEQ ID NO: 307990 - DNA, 33 bp, Homo sapien
aaatgtggggaccccctcaatgactggatcccc

SEQ ID NO: 307991 - DNA, 33 bp, Homo sapien
actcattctattctcaagcccatgttctttttc

SEQ ID NO: 307992 - DNA, 33 bp, Homo sapien
actcattctattctcaggcccatgttctttttc

SEQ ID NO: 307993 - DNA, 33 bp, Homo sapien
atccaaatgacttgaaagtacctaagataattg

SEQ ID NO: 307994 - DNA, 33 bp, Homo sapien
atccaaatgacttgaatgtacctaagataattg

SEQ ID NO: 307995 - DNA, 33 bp, Homo sapien
gctgctgccaagtccacgcctctaaatgcactc

SEQ ID NO: 307996 - DNA, 33 bp, Homo sapien
gctgctgccaagtccatgcctctaaatgcactc

SEQ ID NO: 307997 - DNA, 33 bp, Homo sapien
ggtgaaagattagggcacaatgtaaatggcaca

SEQ ID NO: 307998 - DNA, 33 bp, Homo sapien
ggtgaaagattagggcgcaatgtaaatggcaca

SEQ ID NO: 307999 - DNA, 33 bp, Homo sapien
aagtctttggcaggaacagatgcatagtaaatc

SEQ ID NO: 308000 - DNA, 33 bp, Homo sapien
aagtctttggcaggaatagatgcatagtaaatc

SEQ ID NO: 308001 - DNA, 33 bp, Homo sapien
tacagttgatcactcacgtcactgcttaaaaca

SEQ ID NO: 308002 - DNA, 33 bp, Homo sapien
tacagttgatcactcatgtcactgcttaaaaca

SEQ ID NO: 308003 - DNA, 33 bp, Homo sapien
acttatgaatgtgataaaatgatttactgaaat

SEQ ID NO: 308004 - DNA, 33 bp, Homo sapien
acttatgaatgtgatacaatgatttactgaaat

SEQ ID NO: 308005 - DNA, 33 bp, Homo sapien
ttttaaactgctggaaatggcctgaataaataa

SEQ ID NO: 308006 - DNA, 33 bp, Homo sapien
ttttaaactgctggaattggcctgaataaataa

SEQ ID NO: 308007 - DNA, 33 bp, Homo sapien
tccctcaccaacctacaagtttagaaaatccta

SEQ ID NO: 308008 - DNA, 33 bp, Homo sapien
tccctcaccaacctacgagtttagaaaatccta

SEQ ID NO: 308009 - DNA, 33 bp, Homo sapien
gatgaattttgacaggaaagcctggatgtatac

SEQ ID NO: 308010 - DNA, 33 bp, Homo sapien
gatgaattttgacagggaagcctggatgtatac

SEQ ID NO: 308011 - DNA, 33 bp, Homo sapien
tacagttgtggaagagcccccttgcgcaaaaca

SEQ ID NO: 308012 - DNA, 33 bp, Homo sapien
tacagttgtggaagagtccccttgcgcaaaaca

SEQ ID NO: 308013 - DNA, 33 bp, Homo sapien
gactacatttctgtgactaattccacaatatga

SEQ ID NO: 308014 - DNA, 33 bp, Homo sapien
gactacatttctgtgattaattccacaatatga

SEQ ID NO: 308015 - DNA, 33 bp, Homo sapien
aaaagacattctaacagtggataagactgtatg

SEQ ID NO: 308016 - DNA, 33 bp, Homo sapien
aaaagacattctaacattggataagactgtatg

SEQ ID NO: 308017 - DNA, 33 bp, Homo sapien
aggtaagttttgttcaaatttttgcaacagtgt

SEQ ID NO: 308018 - DNA, 33 bp, Homo sapien
aggtaagttttgttcagatttttgcaacagtgt

SEQ ID NO: 308019 - DNA, 33 bp, Homo sapien
tactaaggtctagttggactgttccagtaggat

SEQ ID NO: 308020 - DNA, 33 bp, Homo sapien
tactaaggtctagttgtactgttccagtaggat

SEQ ID NO: 308021 - DNA, 33 bp, Homo sapien
atggagggtcttcctccatgtagttggctactg

SEQ ID NO: 308022 - DNA, 33 bp, Homo sapien
atggagggtcttcctctatgtagttggctactg

SEQ ID NO: 308023 - DNA, 33 bp, Homo sapien
ttagttctaattttcccctactggtactgaacc

SEQ ID NO: 308024 - DNA, 33 bp, Homo sapien
ttagttctaattttcctctactggtactgaacc

SEQ ID NO: 308025 - DNA, 33 bp, Homo sapien
cttgcatgaattatgacctccttgcttttgtac

SEQ ID NO: 308026 - DNA, 33 bp, Homo sapien
cttgcatgaattatgatctccttgcttttgtac

SEQ ID NO: 308027 - DNA, 33 bp, Homo sapien
tcattgaatgtgtacacgattgtttgaggaaag

SEQ ID NO: 308028 - DNA, 33 bp, Homo sapien
tcattgaatgtgtacatgattgtttgaggaaag

SEQ ID NO: 308029 - DNA, 33 bp, Homo sapien
ctatttaaaagagacacgattgaacttgaacct

SEQ ID NO: 308030 - DNA, 33 bp, Homo sapien
ctatttaaaagagacatgattgaacttgaacct

SEQ ID NO: 308031 - DNA, 33 bp, Homo sapien
taaatacatctttttacaatcagaacaatatag

SEQ ID NO: 308032 - DNA, 33 bp, Homo sapien
taaatacatctttttataatcagaacaatatag

SEQ ID NO: 308033 - DNA, 33 bp, Homo sapien
agatattacaaaacagactgcataatttgatcc

SEQ ID NO: 308034 - DNA, 33 bp, Homo sapien
agatattacaaaacagcctgcataatttgatcc

SEQ ID NO: 308035 - DNA, 33 bp, Homo sapien
tagaatcctggctccaccattacttcataaata

SEQ ID NO: 308036 - DNA, 33 bp, Homo sapien
tagaatcctggctccatcattacttcataaata

SEQ ID NO: 308037 - DNA, 33 bp, Homo sapien
catctcattcatgacacaagagccctcgtgact

SEQ ID NO: 308038 - DNA, 33 bp, Homo sapien
catctcattcatgacagaagagccctcgtgact

SEQ ID NO: 308039 - DNA, 33 bp, Homo sapien
ctcttcctctcttatgaaattagaaagcattca

SEQ ID NO: 308040 - DNA, 33 bp, Homo sapien
ctcttcctctcttatggaattagaaagcattca

SEQ ID NO: 308041 - DNA, 33 bp, Homo sapien
ccagtattttttcgaccaaggcatattgtcagc

SEQ ID NO: 308042 - DNA, 33 bp, Homo sapien
ccagtattttttcgactaaggcatattgtcagc

SEQ ID NO: 308043 - DNA, 33 bp, Homo sapien
atctaacaacttttaacaatgctgtacatcaat

SEQ ID NO: 308044 - DNA, 33 bp, Homo sapien
atctaacaacttttaagaatgctgtacatcaat

SEQ ID NO: 308045 - DNA, 33 bp, Homo sapien
aatattaatagttacacggcaagagcaatatag

SEQ ID NO: 308046 - DNA, 33 bp, Homo sapien
aatattaatagttacatggcaagagcaatatag

SEQ ID NO: 308047 - DNA, 33 bp, Homo sapien
agtctgttttggattacaaattaggtaagtgtt

SEQ ID NO: 308048 - DNA, 33 bp, Homo sapien
agtctgttttggattagaaattaggtaagtgtt

SEQ ID NO: 308049 - DNA, 33 bp, Homo sapien
tctctactttttgactcaaagcctgtaaatgaa

SEQ ID NO: 308050 - DNA, 33 bp, Homo sapien
tctctactttttgactgaaagcctgtaaatgaa

SEQ ID NO: 308051 - DNA, 33 bp, Homo sapien
ctacaggatgagaaaacggagtatagagttaaa

SEQ ID NO: 308052 - DNA, 33 bp, Homo sapien
ctacaggatgagaaaatggagtatagagttaaa

SEQ ID NO: 308053 - DNA, 33 bp, Homo sapien
ttttactggacaaatagctagttacagccacca

SEQ ID NO: 308054 - DNA, 33 bp, Homo sapien
ttttactggacaaatatctagttacagccacca

SEQ ID NO: 308055 - DNA, 33 bp, Homo sapien
ataggagtgttccagaaagctggtgacaaagac

SEQ ID NO: 308056 - DNA, 33 bp, Homo sapien
ataggagtgttccagagagctggtgacaaagac

SEQ ID NO: 308057 - DNA, 33 bp, Homo sapien
cctcaggtgctattgaataaataaagaagaatg

SEQ ID NO: 308058 - DNA, 33 bp, Homo sapien
cctcaggtgctattgagtaaataaagaagaatg

SEQ ID NO: 308059 - DNA, 33 bp, Homo sapien
cccaggcatggcttcagaaggtgtaagcctcaa

SEQ ID NO: 308060 - DNA, 33 bp, Homo sapien
cccaggcatggcttcataaggtgtaagcctcaa

SEQ ID NO: 308061 - DNA, 33 bp, Homo sapien
acacatataacctttaaaagatgcattctgggc

SEQ ID NO: 308062 - DNA, 33 bp, Homo sapien
acacatataacctttacaagatgcattctgggc

SEQ ID NO: 308063 - DNA, 33 bp, Homo sapien
aaccataggatgcaagaaccaaacttctttaga

SEQ ID NO: 308064 - DNA, 33 bp, Homo sapien
aaccataggatgcaaggaccaaacttctttaga

SEQ ID NO: 308065 - DNA, 33 bp, Homo sapien
tcctggctctaatgtacgtattattcactgatc

SEQ ID NO: 308066 - DNA, 33 bp, Homo sapien
tcctggctctaatgtatgtattattcactgatc

SEQ ID NO: 308067 - DNA, 33 bp, Homo sapien
tttcttggtacctctaacgcttgcttactgtgg

SEQ ID NO: 308068 - DNA, 33 bp, Homo sapien
tttcttggtacctctagcgcttgcttactgtgg

SEQ ID NO: 308069 - DNA, 33 bp, Homo sapien
agatgctctggaaagggaaatactaggtgagat

SEQ ID NO: 308070 - DNA, 33 bp, Homo sapien
agatgctctggaaaggtaaatactaggtgagat

SEQ ID NO: 308071 - DNA, 33 bp, Homo sapien
gatcctgaaaaacctccagaagaaaggagatgc

SEQ ID NO: 308072 - DNA, 33 bp, Homo sapien
gatcctgaaaaacctctagaagaaaggagatgc

SEQ ID NO: 308073 - DNA, 33 bp, Homo sapien
gtcgtgagaagccacacagaaggttgcagagag

SEQ ID NO: 308074 - DNA, 33 bp, Homo sapien
gtcgtgagaagccacagagaaggttgcagagag

SEQ ID NO: 308075 - DNA, 33 bp, Homo sapien
tagatgaccatttggaagagatgatgagtttcc

SEQ ID NO: 308076 - DNA, 33 bp, Homo sapien
tagatgaccatttggaggagatgatgagtttcc

SEQ ID NO: 308077 - DNA, 33 bp, Homo sapien
ataaaaggttcaaccccgctttaagatggaagg

SEQ ID NO: 308078 - DNA, 33 bp, Homo sapien
ataaaaggttcaaccctgctttaagatggaagg

SEQ ID NO: 308079 - DNA, 33 bp, Homo sapien
gactcaccaagagagaagatattcggtttgcat

SEQ ID NO: 308080 - DNA, 33 bp, Homo sapien
gactcaccaagagagaggatattcggtttgcat

SEQ ID NO: 308081 - DNA, 33 bp, Homo sapien
ctgatcaatgcattaacacaaagtgaactcttc

SEQ ID NO: 308082 - DNA, 33 bp, Homo sapien
ctgatcaatgcattaagacaaagtgaactcttc

SEQ ID NO: 308083 - DNA, 33 bp, Homo sapien
aacaggaaacattcacaggaaatctgcaggtgt

SEQ ID NO: 308084 - DNA, 33 bp, Homo sapien
aacaggaaacattcacgggaaatctgcaggtgt

SEQ ID NO: 308085 - DNA, 33 bp, Homo sapien
tatgtgtgaatgaagccgaaaagagattcaaac

SEQ ID NO: 308086 - DNA, 33 bp, Homo sapien
tatgtgtgaatgaagctgaaaagagattcaaac

SEQ ID NO: 308087 - DNA, 33 bp, Homo sapien
agatctgtgagccccaatgccaagtttaggtct

SEQ ID NO: 308088 - DNA, 33 bp, Homo sapien
agatctgtgagccccagtgccaagtttaggtct

SEQ ID NO: 308089 - DNA, 33 bp, Homo sapien
tagaatctgaattagacagaggctgctctgagc

SEQ ID NO: 308090 - DNA, 33 bp, Homo sapien
tagaatctgaattagagagaggctgctctgagc

SEQ ID NO: 308091 - DNA, 33 bp, Homo sapien
gcactgcgcaagcacacggaaaagagaaacgag

SEQ ID NO: 308092 - DNA, 33 bp, Homo sapien
gcactgcgcaagcacatggaaaagagaaacgag

SEQ ID NO: 308093 - DNA, 33 bp, Homo sapien
tttttcaggaaatcccacgccttaccccaaatc

SEQ ID NO: 308094 - DNA, 33 bp, Homo sapien
tttttcaggaaatcccgcgccttaccccaaatc

SEQ ID NO: 308095 - DNA, 33 bp, Homo sapien
tgcaaggataagagaacaagagcttcataaccc

SEQ ID NO: 308096 - DNA, 33 bp, Homo sapien
tgcaaggataagagaataagagcttcataaccc

SEQ ID NO: 308097 - DNA, 33 bp, Homo sapien
aaacatttccaaagtacagattccagccaggcg

SEQ ID NO: 308098 - DNA, 33 bp, Homo sapien
aaacatttccaaagtatagattccagccaggcg

SEQ ID NO: 308099 - DNA, 33 bp, Homo sapien
acatatactgtgtacaactcatgtcatcaggaa

SEQ ID NO: 308100 - DNA, 33 bp, Homo sapien
acatatactgtgtacatctcatgtcatcaggaa

SEQ ID NO: 308101 - DNA, 33 bp, Homo sapien
tctttaagcaatgacactaatccaacaacaatc

SEQ ID NO: 308102 - DNA, 33 bp, Homo sapien
tctttaagcaatgacattaatccaacaacaatc

SEQ ID NO: 308103 - DNA, 33 bp, Homo sapien
atttcagagttaagaaagtttggactctatttt

SEQ ID NO: 308104 - DNA, 33 bp, Homo sapien
atttcagagttaagaacgtttggactctatttt

SEQ ID NO: 308105 - DNA, 33 bp, Homo sapien
acgtgctgagtttgtacacttttgacaattaaa

SEQ ID NO: 308106 - DNA, 33 bp, Homo sapien
acgtgctgagtttgtatacttttgacaattaaa

SEQ ID NO: 308107 - DNA, 33 bp, Homo sapien
gatgccattcacgaaccgagaggtctttcaaga

SEQ ID NO: 308108 - DNA, 33 bp, Homo sapien
gatgccattcacgaactgagaggtctttcaaga

SEQ ID NO: 308109 - DNA, 33 bp, Homo sapien
tgttgctttggcattacgatgtcttcaatattt

SEQ ID NO: 308110 - DNA, 33 bp, Homo sapien
tgttgctttggcattatgatgtcttcaatattt

SEQ ID NO: 308111 - DNA, 33 bp, Homo sapien
gaaggtttatgccaaacgccgaggatggggaga

SEQ ID NO: 308112 - DNA, 33 bp, Homo sapien
gaaggtttatgccaaatgccgaggatggggaga

SEQ ID NO: 308113 - DNA, 33 bp, Homo sapien
gtcttaatccatcacacagagcctggtatcagt

SEQ ID NO: 308114 - DNA, 33 bp, Homo sapien
gtcttaatccatcacatagagcctggtatcagt

SEQ ID NO: 308115 - DNA, 33 bp, Homo sapien
tatctatacttctgcaatgagtgatctcatatt

SEQ ID NO: 308116 - DNA, 33 bp, Homo sapien
tatctatacttctgcagtgagtgatctcatatt

SEQ ID NO: 308117 - DNA, 33 bp, Homo sapien
cttcctttcagccttgcatgacctctgaaaata

SEQ ID NO: 308118 - DNA, 33 bp, Homo sapien
cttcctttcagccttgtatgacctctgaaaata

SEQ ID NO: 308119 - DNA, 33 bp, Homo sapien
taacagacatagccaacatctcagtggcttaac

SEQ ID NO: 308120 - DNA, 33 bp, Homo sapien
taacagacatagccaagatctcagtggcttaac

SEQ ID NO: 308121 - DNA, 33 bp, Homo sapien
ctggtcttgttgcttccacacttacacttcctg

SEQ ID NO: 308122 - DNA, 33 bp, Homo sapien
ctggtcttgttgcttcgacacttacacttcctg

SEQ ID NO: 308123 - DNA, 33 bp, Homo sapien
tgttcctccctcaaaacctaacaggtgtcacct

SEQ ID NO: 308124 - DNA, 33 bp, Homo sapien
tgttcctccctcaaaatctaacaggtgtcacct

SEQ ID NO: 308125 - DNA, 33 bp, Homo sapien
cctagaacccggcacaaggctccataagctgat

SEQ ID NO: 308126 - DNA, 33 bp, Homo sapien
cctagaacccggcacagggctccataagctgat

SEQ ID NO: 308127 - DNA, 33 bp, Homo sapien
ccgagcccttttttcactccgataactcaataa

SEQ ID NO: 308128 - DNA, 33 bp, Homo sapien
ccgagcccttttttcattccgataactcaataa

SEQ ID NO: 308129 - DNA, 33 bp, Homo sapien
cagtgcacaagtaacactcgggatggcggtgac

SEQ ID NO: 308130 - DNA, 33 bp, Homo sapien
cagtgcacaagtaacattcgggatggcggtgac

SEQ ID NO: 308131 - DNA, 33 bp, Homo sapien
cagagaactttcaagagaggagagggccaggac

SEQ ID NO: 308132 - DNA, 33 bp, Homo sapien
cagagaactttcaagataggagagggccaggac

SEQ ID NO: 308133 - DNA, 33 bp, Homo sapien
aaggtgtaaggccgaccgggcaagtattatccc

SEQ ID NO: 308134 - DNA, 33 bp, Homo sapien
aaggtgtaaggccgactgggcaagtattatccc

SEQ ID NO: 308135 - DNA, 33 bp, Homo sapien
aagtctcatttatgcccgagagatctttgtaac

SEQ ID NO: 308136 - DNA, 33 bp, Homo sapien
aagtctcatttatgcctgagagatctttgtaac

SEQ ID NO: 308137 - DNA, 33 bp, Homo sapien
cagcactttatgtgccccttggtttcaggatgc

SEQ ID NO: 308138 - DNA, 33 bp, Homo sapien
cagcactttatgtgcctcttggtttcaggatgc

SEQ ID NO: 308139 - DNA, 33 bp, Homo sapien
atctacctttgagaaacgctcacacgcatgctc

SEQ ID NO: 308140 - DNA, 33 bp, Homo sapien
atctacctttgagaaatgctcacacgcatgctc

SEQ ID NO: 308141 - DNA, 33 bp, Homo sapien
gctgtatatttttaacagagataacactggatt

SEQ ID NO: 308142 - DNA, 33 bp, Homo sapien
gctgtatatttttaacggagataacactggatt

SEQ ID NO: 308143 - DNA, 33 bp, Homo sapien
ctaaattctctggtaacgggggtgagagagaga

SEQ ID NO: 308144 - DNA, 33 bp, Homo sapien
ctaaattctctggtaatgggggtgagagagaga

SEQ ID NO: 308145 - DNA, 33 bp, Homo sapien
ctgtgtctaggggccaagctagtattatacaaa

SEQ ID NO: 308146 - DNA, 33 bp, Homo sapien
ctgtgtctaggggccatgctagtattatacaaa

SEQ ID NO: 308147 - DNA, 33 bp, Homo sapien
acactcaaaaccagaaagagtctcaaactttat

SEQ ID NO: 308148 - DNA, 33 bp, Homo sapien
acactcaaaaccagaaggagtctcaaactttat

SEQ ID NO: 308149 - DNA, 33 bp, Homo sapien
tcttaaatgtaccccacgcagtatgtgggacat

SEQ ID NO: 308150 - DNA, 33 bp, Homo sapien
tcttaaatgtaccccatgcagtatgtgggacat

SEQ ID NO: 308151 - DNA, 33 bp, Homo sapien
aattgctccattaacaacattcttcttctgaaa

SEQ ID NO: 308152 - DNA, 33 bp, Homo sapien
aattgctccattaacagcattcttcttctgaaa

SEQ ID NO: 308153 - DNA, 33 bp, Homo sapien
atcaaagctgcctttaagatcaacctaggactc

SEQ ID NO: 308154 - DNA, 33 bp, Homo sapien
atcaaagctgcctttaggatcaacctaggactc

SEQ ID NO: 308155 - DNA, 33 bp, Homo sapien
tcctctatcttgacttctactcttgagcagctc

SEQ ID NO: 308156 - DNA, 33 bp, Homo sapien
tcctctatcttgacttttactcttgagcagctc

SEQ ID NO: 308157 - DNA, 33 bp, Homo sapien
gcattctgctgggaagcatcaaaccagtgatgc

SEQ ID NO: 308158 - DNA, 33 bp, Homo sapien
gcattctgctgggaagtatcaaaccagtgatgc

SEQ ID NO: 308159 - DNA, 33 bp, Homo sapien
ctgttgtttaccgttacgttccaaccagacatc

SEQ ID NO: 308160 - DNA, 33 bp, Homo sapien
ctgttgtttaccgttatgttccaaccagacatc

SEQ ID NO: 308161 - DNA, 33 bp, Homo sapien
ttcagttctaaatccaatcgccttccctttatg

SEQ ID NO: 308162 - DNA, 33 bp, Homo sapien
ttcagttctaaatccagtcgccttccctttatg

SEQ ID NO: 308163 - DNA, 33 bp, Homo sapien
ttgagtctcttctgtacaccagttataacttta

SEQ ID NO: 308164 - DNA, 33 bp, Homo sapien
ttgagtctcttctgtataccagttataacttta

SEQ ID NO: 308165 - DNA, 33 bp, Homo sapien
ggcctgaggaagtaacgagagattcaagatgtt

SEQ ID NO: 308166 - DNA, 33 bp, Homo sapien
ggcctgaggaagtaactagagattcaagatgtt

SEQ ID NO: 308167 - DNA, 33 bp, Homo sapien
attctgaatactaaacacttacagatgcattat

SEQ ID NO: 308168 - DNA, 33 bp, Homo sapien
attctgaatactaaacgcttacagatgcattat

SEQ ID NO: 308169 - DNA, 33 bp, Homo sapien
aaacttttaagagtaaagttgattccatttgtt

SEQ ID NO: 308170 - DNA, 33 bp, Homo sapien
aaacttttaagagtaaggttgattccatttgtt

SEQ ID NO: 308171 - DNA, 33 bp, Homo sapien
acactattgctcaaaacagaacatcaatcgaca

SEQ ID NO: 308172 - DNA, 33 bp, Homo sapien
acactattgctcaaaatagaacatcaatcgaca

SEQ ID NO: 308173 - DNA, 33 bp, Homo sapien
aatcgacaggatgttaaaaaaatcatcttctgc

SEQ ID NO: 308174 - DNA, 33 bp, Homo sapien
aatcgacaggatgttagaaaaatcatcttctgc

SEQ ID NO: 308175 - DNA, 33 bp, Homo sapien
tatcgtatcctgctacaaaacaccttggcaaaa

SEQ ID NO: 308176 - DNA, 33 bp, Homo sapien
tatcgtatcctgctacgaaacaccttggcaaaa

SEQ ID NO: 308177 - DNA, 33 bp, Homo sapien
agcaagctcaggcaaacggagtaagccataata

SEQ ID NO: 308178 - DNA, 33 bp, Homo sapien
agcaagctcaggcaaatggagtaagccataata

SEQ ID NO: 308179 - DNA, 33 bp, Homo sapien
cctagatattcagtgaaattggaagagttagat

SEQ ID NO: 308180 - DNA, 33 bp, Homo sapien
cctagatattcagtgatattggaagagttagat

SEQ ID NO: 308181 - DNA, 33 bp, Homo sapien
tcaaaaagtcactcaaccactgtatgaattaat

SEQ ID NO: 308182 - DNA, 33 bp, Homo sapien
tcaaaaagtcactcaagcactgtatgaattaat

SEQ ID NO: 308183 - DNA, 33 bp, Homo sapien
cataacagagtccacaaacaagtccacatatat

SEQ ID NO: 308184 - DNA, 33 bp, Homo sapien
cataacagagtccacagacaagtccacatatat

SEQ ID NO: 308185 - DNA, 33 bp, Homo sapien
ccattagtgtcatatcaaggaaatctttgccta

SEQ ID NO: 308186 - DNA, 33 bp, Homo sapien
ccattagtgtcatatctaggaaatctttgccta

SEQ ID NO: 308187 - DNA, 33 bp, Homo sapien
ccattctgattttgcccaaatgaaaaagtggtg

SEQ ID NO: 308188 - DNA, 33 bp, Homo sapien
ccattctgattttgccgaaatgaaaaagtggtg

SEQ ID NO: 308189 - DNA, 33 bp, Homo sapien
aaatacaagcattttaccatcccaccttttatc

SEQ ID NO: 308190 - DNA, 33 bp, Homo sapien
aaatacaagcattttatcatcccaccttttatc

SEQ ID NO: 308191 - DNA, 33 bp, Homo sapien
gctattgactggtagcacttgtagctttaaata

SEQ ID NO: 308192 - DNA, 33 bp, Homo sapien
gctattgactggtagcgcttgtagctttaaata

SEQ ID NO: 308193 - DNA, 33 bp, Homo sapien
acaatagtgtaacaaacgcttatcaaagaaata

SEQ ID NO: 308194 - DNA, 33 bp, Homo sapien
acaatagtgtaacaaatgcttatcaaagaaata

SEQ ID NO: 308195 - DNA, 33 bp, Homo sapien
agatgtatccatagaaattaaaagacatggggt

SEQ ID NO: 308196 - DNA, 33 bp, Homo sapien
agatgtatccatagaagttaaaagacatggggt

SEQ ID NO: 308197 - DNA, 33 bp, Homo sapien
gtagaaagttggaactcagactctaatgtaagg

SEQ ID NO: 308198 - DNA, 33 bp, Homo sapien
gtagaaagttggaactgagactctaatgtaagg

SEQ ID NO: 308199 - DNA, 33 bp, Homo sapien
caaaccatatccaccactcagaacaagatatag

SEQ ID NO: 308200 - DNA, 33 bp, Homo sapien
caaaccatatccaccagtcagaacaagatatag

SEQ ID NO: 308201 - DNA, 33 bp, Homo sapien
agctaatttgaattcactatggagaagttgcat

SEQ ID NO: 308202 - DNA, 33 bp, Homo sapien
agctaatttgaattcattatggagaagttgcat

SEQ ID NO: 308203 - DNA, 33 bp, Homo sapien
ccctgtctttacctgacggcatcatgaactaca

SEQ ID NO: 308204 - DNA, 33 bp, Homo sapien
ccctgtctttacctgatggcatcatgaactaca

SEQ ID NO: 308205 - DNA, 33 bp, Homo sapien
ttataccggtaagctggacatctgagtcccata

SEQ ID NO: 308206 - DNA, 33 bp, Homo sapien
ttataccggtaagctgtacatctgagtcccata

SEQ ID NO: 308207 - DNA, 33 bp, Homo sapien
aataggtggcttgctgaagacgaagatgctata

SEQ ID NO: 308208 - DNA, 33 bp, Homo sapien
aataggtggcttgctggagacgaagatgctata

SEQ ID NO: 308209 - DNA, 33 bp, Homo sapien
agagtcggataccagtcaacagtgattgtgatt

SEQ ID NO: 308210 - DNA, 33 bp, Homo sapien
agagtcggataccagttaacagtgattgtgatt

SEQ ID NO: 308211 - DNA, 33 bp, Homo sapien
aggagacctctagtgggaagttagtgaatctag

SEQ ID NO: 308212 - DNA, 33 bp, Homo sapien
aggagacctctagtggtaagttagtgaatctag

SEQ ID NO: 308213 - DNA, 33 bp, Homo sapien
gaagacggctgtagtgaaaaagggatgaaaggg

SEQ ID NO: 308214 - DNA, 33 bp, Homo sapien
gaagacggctgtagtggaaaagggatgaaaggg

SEQ ID NO: 308215 - DNA, 33 bp, Homo sapien
atttgaaaataaatatcaaacacaggaagaaac

SEQ ID NO: 308216 - DNA, 33 bp, Homo sapien
atttgaaaataaatatgaaacacaggaagaaac

SEQ ID NO: 308217 - DNA, 33 bp, Homo sapien
tagatacttggctgaaaacaaatagttttgcag

SEQ ID NO: 308218 - DNA, 33 bp, Homo sapien
tagatacttggctgaatacaaatagttttgcag

SEQ ID NO: 308219 - DNA, 33 bp, Homo sapien
taaataatgaaaaaaaggcatggcacagttttg

SEQ ID NO: 308220 - DNA, 33 bp, Homo sapien
taaataatgaaaaaaatgcatggcacagttttg

SEQ ID NO: 308221 - DNA, 33 bp, Homo sapien
gataccgaaggacatacagtgcaatacaaaaaa

SEQ ID NO: 308222 - DNA, 33 bp, Homo sapien
gataccgaaggacatatagtgcaatacaaaaaa

SEQ ID NO: 308223 - DNA, 33 bp, Homo sapien
tttgctctcgaatacaaactaatactgagataa

SEQ ID NO: 308224 - DNA, 33 bp, Homo sapien
tttgctctcgaatacagactaatactgagataa

SEQ ID NO: 308225 - DNA, 33 bp, Homo sapien
tattcagctgataccaccaaaagcactcatcac

SEQ ID NO: 308226 - DNA, 33 bp, Homo sapien
tattcagctgataccatcaaaagcactcatcac

SEQ ID NO: 308227 - DNA, 33 bp, Homo sapien
ccacatggaccctactcaaaggctgacatgtga

SEQ ID NO: 308228 - DNA, 33 bp, Homo sapien
ccacatggaccctactgaaaggctgacatgtga

SEQ ID NO: 308229 - DNA, 33 bp, Homo sapien
ggaaagaggaaaactcaaagcctcatttaaatg

SEQ ID NO: 308230 - DNA, 33 bp, Homo sapien
ggaaagaggaaaactcgaagcctcatttaaatg

SEQ ID NO: 308231 - DNA, 33 bp, Homo sapien
tcctttgttgtatcaagaactttttcatttttt

SEQ ID NO: 308232 - DNA, 33 bp, Homo sapien
tcctttgttgtatcaataactttttcatttttt

SEQ ID NO: 308233 - DNA, 33 bp, Homo sapien
tgtctgtttggggcaacttgagaaaataaacag

SEQ ID NO: 308234 - DNA, 33 bp, Homo sapien
tgtctgtttggggcaagttgagaaaataaacag

SEQ ID NO: 308235 - DNA, 33 bp, Homo sapien
aggagtcttccaggtacaatagagaaagtaagg

SEQ ID NO: 308236 - DNA, 33 bp, Homo sapien
aggagtcttccaggtagaatagagaaagtaagg

SEQ ID NO: 308237 - DNA, 33 bp, Homo sapien
gctcagctcaggtgacacaactatccctggggc

SEQ ID NO: 308238 - DNA, 33 bp, Homo sapien
gctcagctcaggtgacgcaactatccctggggc

SEQ ID NO: 308239 - DNA, 33 bp, Homo sapien
accaagtcttcttccaatgcacacaaagatgtt

SEQ ID NO: 308240 - DNA, 33 bp, Homo sapien
accaagtcttcttccagtgcacacaaagatgtt

SEQ ID NO: 308241 - DNA, 33 bp, Homo sapien
aattgtttttcacctacgcttgcttcagttggg

SEQ ID NO: 308242 - DNA, 33 bp, Homo sapien
aattgtttttcacctatgcttgcttcagttggg

SEQ ID NO: 308243 - DNA, 33 bp, Homo sapien
ttcgtttgtacgtcccaaaagaactccattcag

SEQ ID NO: 308244 - DNA, 33 bp, Homo sapien
ttcgtttgtacgtcccgaaagaactccattcag

SEQ ID NO: 308245 - DNA, 33 bp, Homo sapien
atgcatagaactttacaacacaatgtgtgaacc

SEQ ID NO: 308246 - DNA, 33 bp, Homo sapien
atgcatagaactttacgacacaatgtgtgaacc

SEQ ID NO: 308247 - DNA, 33 bp, Homo sapien
gaaataactctagatacatgtatgtacacaggt

SEQ ID NO: 308248 - DNA, 33 bp, Homo sapien
gaaataactctagatatatgtatgtacacaggt

SEQ ID NO: 308249 - DNA, 33 bp, Homo sapien
atgccccaggccattgaactcctagaataccac

SEQ ID NO: 308250 - DNA, 33 bp, Homo sapien
atgccccaggccattggactcctagaataccac

SEQ ID NO: 308251 - DNA, 33 bp, Homo sapien
aatctagcgaagggtacgcaggtattcattgca

SEQ ID NO: 308252 - DNA, 33 bp, Homo sapien
aatctagcgaagggtatgcaggtattcattgca

SEQ ID NO: 308253 - DNA, 33 bp, Homo sapien
aacggctgttcagctacaatctgcactcaggcc

SEQ ID NO: 308254 - DNA, 33 bp, Homo sapien
aacggctgttcagctagaatctgcactcaggcc

SEQ ID NO: 308255 - DNA, 33 bp, Homo sapien
ggtcagtaagctggaacgcagacacagttctgt

SEQ ID NO: 308256 - DNA, 33 bp, Homo sapien
ggtcagtaagctggaatgcagacacagttctgt

SEQ ID NO: 308257 - DNA, 33 bp, Homo sapien
agttcaagtgcatccaactgctttatgcagacc

SEQ ID NO: 308258 - DNA, 33 bp, Homo sapien
agttcaagtgcatccacctgctttatgcagacc

SEQ ID NO: 308259 - DNA, 33 bp, Homo sapien
gaacttctgtgaaggtaaaatccaaatcgcaat

SEQ ID NO: 308260 - DNA, 33 bp, Homo sapien
gaacttctgtgaaggtgaaatccaaatcgcaat

SEQ ID NO: 308261 - DNA, 33 bp, Homo sapien
tttcatttttttgataataacagtgtgaggtga

SEQ ID NO: 308262 - DNA, 33 bp, Homo sapien
tttcatttttttgatagtaacagtgtgaggtga

SEQ ID NO: 308263 - DNA, 33 bp, Homo sapien
catggagcagaaatgacggaagactttaccaca

SEQ ID NO: 308264 - DNA, 33 bp, Homo sapien
catggagcagaaatgatggaagactttaccaca

SEQ ID NO: 308265 - DNA, 33 bp, Homo sapien
atacattcttataagagtcatctccaatgtgca

SEQ ID NO: 308266 - DNA, 33 bp, Homo sapien
atacattcttataagattcatctccaatgtgca

SEQ ID NO: 308267 - DNA, 33 bp, Homo sapien
tttagtaggctatgtggatataccatccatgtt

SEQ ID NO: 308268 - DNA, 33 bp, Homo sapien
tttagtaggctatgtgtatataccatccatgtt

SEQ ID NO: 308269 - DNA, 33 bp, Homo sapien
ctacaatatcagtacactaatgtgctgtgcagg

SEQ ID NO: 308270 - DNA, 33 bp, Homo sapien
ctacaatatcagtacagtaatgtgctgtgcagg

SEQ ID NO: 308271 - DNA, 33 bp, Homo sapien
agttctgtatctgagacagtagacactggaact

SEQ ID NO: 308272 - DNA, 33 bp, Homo sapien
agttctgtatctgagagagtagacactggaact

SEQ ID NO: 308273 - DNA, 33 bp, Homo sapien
aatgtaagaccccaaactatcaaactcctagaa

SEQ ID NO: 308274 - DNA, 33 bp, Homo sapien
aatgtaagaccccaaattatcaaactcctagaa

SEQ ID NO: 308275 - DNA, 33 bp, Homo sapien
ttccagtgttattaacccatttatgctggagtt

SEQ ID NO: 308276 - DNA, 33 bp, Homo sapien
ttccagtgttattaactcatttatgctggagtt

SEQ ID NO: 308277 - DNA, 33 bp, Homo sapien
agaaataccataaatacgaagacgtggcaaaaa

SEQ ID NO: 308278 - DNA, 33 bp, Homo sapien
agaaataccataaatatgaagacgtggcaaaaa

SEQ ID NO: 308279 - DNA, 33 bp, Homo sapien
agtgttgaagtaggaacagaaaaaagaaagtca

SEQ ID NO: 308280 - DNA, 33 bp, Homo sapien
agtgttgaagtaggaatagaaaaaagaaagtca

SEQ ID NO: 308281 - DNA, 33 bp, Homo sapien
aacatttcagtgtacacgcatctctttcctggt

SEQ ID NO: 308282 - DNA, 33 bp, Homo sapien
aacatttcagtgtacatgcatctctttcctggt

SEQ ID NO: 308283 - DNA, 33 bp, Homo sapien
cttccttcatccccaacaaaggcagagtttggc

SEQ ID NO: 308284 - DNA, 33 bp, Homo sapien
cttccttcatccccaataaaggcagagtttggc

SEQ ID NO: 308285 - DNA, 33 bp, Homo sapien
acttaacaatgcacagcatatatggaacaggag

SEQ ID NO: 308286 - DNA, 33 bp, Homo sapien
acttaacaatgcacagtatatatggaacaggag

SEQ ID NO: 308287 - DNA, 33 bp, Homo sapien
gagattttgagtcatcaaagccaaaagtatgtg

SEQ ID NO: 308288 - DNA, 33 bp, Homo sapien
gagattttgagtcatcgaagccaaaagtatgtg

SEQ ID NO: 308289 - DNA, 33 bp, Homo sapien
tcaacatgtaactctacgattcagttgactgct

SEQ ID NO: 308290 - DNA, 33 bp, Homo sapien
tcaacatgtaactctatgattcagttgactgct

SEQ ID NO: 308291 - DNA, 33 bp, Homo sapien
aaatttgcataagtaacgaaaagctgaatatta

SEQ ID NO: 308292 - DNA, 33 bp, Homo sapien
aaatttgcataagtaatgaaaagctgaatatta

SEQ ID NO: 308293 - DNA, 33 bp, Homo sapien
ggagaggtggatctgaacgagagaccacaggaa

SEQ ID NO: 308294 - DNA, 33 bp, Homo sapien
ggagaggtggatctgagcgagagaccacaggaa

SEQ ID NO: 308295 - DNA, 33 bp, Homo sapien
aaaacaattccactctcacagaaatcacgagaa

SEQ ID NO: 308296 - DNA, 33 bp, Homo sapien
aaaacaattccactcttacagaaatcacgagaa

SEQ ID NO: 308297 - DNA, 33 bp, Homo sapien
ttttgaaagtctgctacctacattatttttctg

SEQ ID NO: 308298 - DNA, 33 bp, Homo sapien
ttttgaaagtctgctatctacattatttttctg

SEQ ID NO: 308299 - DNA, 33 bp, Homo sapien
tattcagtaagcacccaataaaagctggttgaa

SEQ ID NO: 308300 - DNA, 33 bp, Homo sapien
tattcagtaagcacccgataaaagctggttgaa

SEQ ID NO: 308301 - DNA, 33 bp, Homo sapien
tgtttccaatcacttaccagaatcaggaaatcc

SEQ ID NO: 308302 - DNA, 33 bp, Homo sapien
tgtttccaatcacttatcagaatcaggaaatcc

SEQ ID NO: 308303 - DNA, 33 bp, Homo sapien
cttatccgttaagagaatacaaaattgagtcac

SEQ ID NO: 308304 - DNA, 33 bp, Homo sapien
cttatccgttaagagattacaaaattgagtcac

SEQ ID NO: 308305 - DNA, 33 bp, Homo sapien
tcttgatggaaaaaaacgcagcggaaatgtcat

SEQ ID NO: 308306 - DNA, 33 bp, Homo sapien
tcttgatggaaaaaaatgcagcggaaatgtcat

SEQ ID NO: 308307 - DNA, 33 bp, Homo sapien
agtgtatggataaatacgggttattggcatgtg

SEQ ID NO: 308308 - DNA, 33 bp, Homo sapien
agtgtatggataaatatgggttattggcatgtg

SEQ ID NO: 308309 - DNA, 33 bp, Homo sapien
tatatagctgtaaacacgaatgaagatgatttc

SEQ ID NO: 308310 - DNA, 33 bp, Homo sapien
tatatagctgtaaacatgaatgaagatgatttc

SEQ ID NO: 308311 - DNA, 33 bp, Homo sapien
gattacatggttagtaacaggtttgcatttgac

SEQ ID NO: 308312 - DNA, 33 bp, Homo sapien
gattacatggttagtagcaggtttgcatttgac

SEQ ID NO: 308313 - DNA, 33 bp, Homo sapien
tcacacactaaacatacgacttagtcgaagaca

SEQ ID NO: 308314 - DNA, 33 bp, Homo sapien
tcacacactaaacatatgacttagtcgaagaca

SEQ ID NO: 308315 - DNA, 33 bp, Homo sapien
ttcagaagcctctgagcaatacatgaatcataa

SEQ ID NO: 308316 - DNA, 33 bp, Homo sapien
ttcagaagcctctgagtaatacatgaatcataa

SEQ ID NO: 308317 - DNA, 33 bp, Homo sapien
tggaagctctgacatcaatttatctgaagacat

SEQ ID NO: 308318 - DNA, 33 bp, Homo sapien
tggaagctctgacatctatttatctgaagacat

SEQ ID NO: 308319 - DNA, 33 bp, Homo sapien
tagcctggggttttgacagggcgtgatgccagc

SEQ ID NO: 308320 - DNA, 33 bp, Homo sapien
tagcctggggttttgagagggcgtgatgccagc

SEQ ID NO: 308321 - DNA, 33 bp, Homo sapien
ttggaatatcattatcaagttctgaagctgcac

SEQ ID NO: 308322 - DNA, 33 bp, Homo sapien
ttggaatatcattatccagttctgaagctgcac

SEQ ID NO: 308323 - DNA, 33 bp, Homo sapien
agggtttcctaacataaccaatcagcttgcaat

SEQ ID NO: 308324 - DNA, 33 bp, Homo sapien
agggtttcctaacatatccaatcagcttgcaat

SEQ ID NO: 308325 - DNA, 33 bp, Homo sapien
tgtccggccacaaatacattttcatagtgatca

SEQ ID NO: 308326 - DNA, 33 bp, Homo sapien
tgtccggccacaaatatattttcatagtgatca

SEQ ID NO: 308327 - DNA, 33 bp, Homo sapien
tgctctcaaatttcccacatggatttcccaact

SEQ ID NO: 308328 - DNA, 33 bp, Homo sapien
tgctctcaaatttcccgcatggatttcccaact

SEQ ID NO: 308329 - DNA, 33 bp, Homo sapien
agtaatatgaactcaacgacactgttttatgac

SEQ ID NO: 308330 - DNA, 33 bp, Homo sapien
agtaatatgaactcaatgacactgttttatgac

SEQ ID NO: 308331 - DNA, 33 bp, Homo sapien
gaagggacgaggaagaacaatgacacttctctg

SEQ ID NO: 308332 - DNA, 33 bp, Homo sapien
gaagggacgaggaagaccaatgacacttctctg

SEQ ID NO: 308333 - DNA, 33 bp, Homo sapien
aaagggatggaacagaagaatgagaatgcgcta

SEQ ID NO: 308334 - DNA, 33 bp, Homo sapien
aaagggatggaacagaggaatgagaatgcgcta

SEQ ID NO: 308335 - DNA, 33 bp, Homo sapien
tcctatagccagtaaaaagtagtatgtggtggt

SEQ ID NO: 308336 - DNA, 33 bp, Homo sapien
tcctatagccagtaaatagtagtatgtggtggt

SEQ ID NO: 308337 - DNA, 33 bp, Homo sapien
aacctagtagtcttcaagaagagagcagtactc

SEQ ID NO: 308338 - DNA, 33 bp, Homo sapien
aacctagtagtcttcacgaagagagcagtactc

SEQ ID NO: 308339 - DNA, 33 bp, Homo sapien
ctctgaccacctgatcaactcgttccctaggat

SEQ ID NO: 308340 - DNA, 33 bp, Homo sapien
ctctgaccacctgatcgactcgttccctaggat

SEQ ID NO: 308341 - DNA, 33 bp, Homo sapien
atgaactactgcgttcaagtaatcctcctgcct

SEQ ID NO: 308342 - DNA, 33 bp, Homo sapien
atgaactactgcgttccagtaatcctcctgcct

SEQ ID NO: 308343 - DNA, 33 bp, Homo sapien
aataacaaatgctcagccaccctgtgcttttct

SEQ ID NO: 308344 - DNA, 33 bp, Homo sapien
aataacaaatgctcagtcaccctgtgcttttct

SEQ ID NO: 308345 - DNA, 33 bp, Homo sapien
tccagagtagggagaaactgaagtcccacagga

SEQ ID NO: 308346 - DNA, 33 bp, Homo sapien
tccagagtagggagaatctgaagtcccacagga

SEQ ID NO: 308347 - DNA, 33 bp, Homo sapien
cctcagtaccttacaacgtgaggaggacactcc

SEQ ID NO: 308348 - DNA, 33 bp, Homo sapien
cctcagtaccttacaatgtgaggaggacactcc

SEQ ID NO: 308349 - DNA, 33 bp, Homo sapien
cacaccatcagaggtacgtgttgttattcatgt

SEQ ID NO: 308350 - DNA, 33 bp, Homo sapien
cacaccatcagaggtatgtgttgttattcatgt

SEQ ID NO: 308351 - DNA, 33 bp, Homo sapien
atatggatacattgtgaaataactaaatcaagc

SEQ ID NO: 308352 - DNA, 33 bp, Homo sapien
atatggatacattgtgcaataactaaatcaagc

SEQ ID NO: 308353 - DNA, 33 bp, Homo sapien
acttaagacaataaagaaaaagactggaattct

SEQ ID NO: 308354 - DNA, 33 bp, Homo sapien
acttaagacaataaaggaaaagactggaattct

SEQ ID NO: 308355 - DNA, 33 bp, Homo sapien
ttcttttcatacattccacccaggagaggaggc

SEQ ID NO: 308356 - DNA, 33 bp, Homo sapien
ttcttttcatacattctacccaggagaggaggc

SEQ ID NO: 308357 - DNA, 33 bp, Homo sapien
tccctgctggctcacaatctgttaccttttatt

SEQ ID NO: 308358 - DNA, 33 bp, Homo sapien
tccctgctggctcacagtctgttaccttttatt

SEQ ID NO: 308359 - DNA, 33 bp, Homo sapien
gcaagtgaccaataacaaagtggactaatcaca

SEQ ID NO: 308360 - DNA, 33 bp, Homo sapien
gcaagtgaccaataacgaagtggactaatcaca

SEQ ID NO: 308361 - DNA, 33 bp, Homo sapien
agcgctgaaaacactacgattctcctcatcaat

SEQ ID NO: 308362 - DNA, 33 bp, Homo sapien
agcgctgaaaacactatgattctcctcatcaat

SEQ ID NO: 308363 - DNA, 33 bp, Homo sapien
ttggccaggcatttcacgtcccttcttggagct

SEQ ID NO: 308364 - DNA, 33 bp, Homo sapien
ttggccaggcatttcatgtcccttcttggagct

SEQ ID NO: 308365 - DNA, 33 bp, Homo sapien
gaatgaccactcagagaagataagccagctgca

SEQ ID NO: 308366 - DNA, 33 bp, Homo sapien
gaatgaccactcagagtagataagccagctgca

SEQ ID NO: 308367 - DNA, 33 bp, Homo sapien
ttagaatcaggagatacggactagattattttc

SEQ ID NO: 308368 - DNA, 33 bp, Homo sapien
ttagaatcaggagatatggactagattattttc

SEQ ID NO: 308369 - DNA, 33 bp, Homo sapien
attctaaaaataaagaaactgtacctcagagga

SEQ ID NO: 308370 - DNA, 33 bp, Homo sapien
attctaaaaataaagagactgtacctcagagga

SEQ ID NO: 308371 - DNA, 33 bp, Homo sapien
tatacagttagagcacaggctttgaaggcagtc

SEQ ID NO: 308372 - DNA, 33 bp, Homo sapien
tatacagttagagcacgggctttgaaggcagtc

SEQ ID NO: 308373 - DNA, 33 bp, Homo sapien
tgctacatgagtgacacgctgtttgactattct

SEQ ID NO: 308374 - DNA, 33 bp, Homo sapien
tgctacatgagtgacaggctgtttgactattct

SEQ ID NO: 308375 - DNA, 33 bp, Homo sapien
atcaagtctgggaaaactctgaggtgtaatata

SEQ ID NO: 308376 - DNA, 33 bp, Homo sapien
atcaagtctgggaaaattctgaggtgtaatata

SEQ ID NO: 308377 - DNA, 33 bp, Homo sapien
gacagactcatctctacccacgccatacacttc

SEQ ID NO: 308378 - DNA, 33 bp, Homo sapien
gacagactcatctctatccacgccatacacttc

SEQ ID NO: 308379 - DNA, 33 bp, Homo sapien
ctaagttttttgaaaaattcaatggtacagagt

SEQ ID NO: 308380 - DNA, 33 bp, Homo sapien
ctaagttttttgaaaatttcaatggtacagagt

SEQ ID NO: 308381 - DNA, 33 bp, Homo sapien
caaaataattcatttccatcctggcatggtggc

SEQ ID NO: 308382 - DNA, 33 bp, Homo sapien
caaaataattcatttctatcctggcatggtggc

SEQ ID NO: 308383 - DNA, 33 bp, Homo sapien
gtcaaactgcacagccactcctgaacctcaggc

SEQ ID NO: 308384 - DNA, 33 bp, Homo sapien
gtcaaactgcacagccgctcctgaacctcaggc

SEQ ID NO: 308385 - DNA, 33 bp, Homo sapien
acctgttgagtagccaatgagaaagctcagagc

SEQ ID NO: 308386 - DNA, 33 bp, Homo sapien
acctgttgagtagccagtgagaaagctcagagc

SEQ ID NO: 308387 - DNA, 33 bp, Homo sapien
ctttcctcccacaaataataacggggcctcagc

SEQ ID NO: 308388 - DNA, 33 bp, Homo sapien
ctttcctcccacaaatgataacggggcctcagc

SEQ ID NO: 308389 - DNA, 33 bp, Homo sapien
actgcgggaagagaacagagtgaccagatcctc

SEQ ID NO: 308390 - DNA, 33 bp, Homo sapien
actgcgggaagagaaccgagtgaccagatcctc

SEQ ID NO: 308391 - DNA, 33 bp, Homo sapien
gaaagactatataacaaatggcatagctatggg

SEQ ID NO: 308392 - DNA, 33 bp, Homo sapien
gaaagactatataacagatggcatagctatggg

SEQ ID NO: 308393 - DNA, 33 bp, Homo sapien
cagtgagctttataataaacatcagccaagcac

SEQ ID NO: 308394 - DNA, 33 bp, Homo sapien
cagtgagctttataatgaacatcagccaagcac

SEQ ID NO: 308395 - DNA, 33 bp, Homo sapien
acttccaaatgcatccaagtgatgacattctca

SEQ ID NO: 308396 - DNA, 33 bp, Homo sapien
acttccaaatgcatcccagtgatgacattctca

SEQ ID NO: 308397 - DNA, 33 bp, Homo sapien
taagatatcaaagaaacgcactaaaatgtgata

SEQ ID NO: 308398 - DNA, 33 bp, Homo sapien
taagatatcaaagaaatgcactaaaatgtgata

SEQ ID NO: 308399 - DNA, 33 bp, Homo sapien
cttaataaatgcttcaatacaatacaagcagat

SEQ ID NO: 308400 - DNA, 33 bp, Homo sapien
cttaataaatgcttcagtacaatacaagcagat

SEQ ID NO: 308401 - DNA, 33 bp, Homo sapien
tcaaagtttatagctcaagaaagaaatacaagc

SEQ ID NO: 308402 - DNA, 33 bp, Homo sapien
tcaaagtttatagctcgagaaagaaatacaagc

SEQ ID NO: 308403 - DNA, 33 bp, Homo sapien
cttgtgacccaaataaccaaaggtcccagtgga

SEQ ID NO: 308404 - DNA, 33 bp, Homo sapien
cttgtgacccaaataatcaaaggtcccagtgga

SEQ ID NO: 308405 - DNA, 33 bp, Homo sapien
tccaagaggtaatgaacttattttattgacaat

SEQ ID NO: 308406 - DNA, 33 bp, Homo sapien
tccaagaggtaatgaatttattttattgacaat

SEQ ID NO: 308407 - DNA, 33 bp, Homo sapien
ttcttagaattcagtcaacagagtcccctgggc

SEQ ID NO: 308408 - DNA, 33 bp, Homo sapien
ttcttagaattcagtcgacagagtcccctgggc

SEQ ID NO: 308409 - DNA, 33 bp, Homo sapien
aaccagtgaacagtcaccaggagagcccatgaa

SEQ ID NO: 308410 - DNA, 33 bp, Homo sapien
aaccagtgaacagtcatcaggagagcccatgaa

SEQ ID NO: 308411 - DNA, 33 bp, Homo sapien
tcacattacccagcaaacttctaattatcactg

SEQ ID NO: 308412 - DNA, 33 bp, Homo sapien
tcacattacccagcaagcttctaattatcactg

SEQ ID NO: 308413 - DNA, 33 bp, Homo sapien
aaagccctgggtggaaaggcactcacagtatgt

SEQ ID NO: 308414 - DNA, 33 bp, Homo sapien
aaagccctgggtggaagggcactcacagtatgt

SEQ ID NO: 308415 - DNA, 33 bp, Homo sapien
ctgattttgcatacacccaagttactagaaagc

SEQ ID NO: 308416 - DNA, 33 bp, Homo sapien
ctgattttgcatacactcaagttactagaaagc

SEQ ID NO: 308417 - DNA, 33 bp, Homo sapien
aaaaaaaagtatgatacaaattttgagcaagta

SEQ ID NO: 308418 - DNA, 33 bp, Homo sapien
aaaaaaaagtatgatataaattttgagcaagta

SEQ ID NO: 308419 - DNA, 33 bp, Homo sapien
tcctgccctcataaagaagagcaagtaggtgtg

SEQ ID NO: 308420 - DNA, 33 bp, Homo sapien
tcctgccctcataaagtagagcaagtaggtgtg

SEQ ID NO: 308421 - DNA, 33 bp, Homo sapien
gcaggtgccggttgaaactcttcttcagctctg

SEQ ID NO: 308422 - DNA, 33 bp, Homo sapien
gcaggtgccggttgaagctcttcttcagctctg

SEQ ID NO: 308423 - DNA, 33 bp, Homo sapien
ttaggcttcttcgaatgacgttttaactgcagt

SEQ ID NO: 308424 - DNA, 33 bp, Homo sapien
ttaggcttcttcgaattacgttttaactgcagt

SEQ ID NO: 308425 - DNA, 33 bp, Homo sapien
aaggagactggactgcaaaacagaactgtgtgc

SEQ ID NO: 308426 - DNA, 33 bp, Homo sapien
aaggagactggactgcgaaacagaactgtgtgc

SEQ ID NO: 308427 - DNA, 33 bp, Homo sapien
cattaaatattaatcgaatgaatgagtgtgttg

SEQ ID NO: 308428 - DNA, 33 bp, Homo sapien
cattaaatattaatcgtatgaatgagtgtgttg

SEQ ID NO: 308429 - DNA, 33 bp, Homo sapien
agtttttattgcctacacatttggaaaaacaat

SEQ ID NO: 308430 - DNA, 33 bp, Homo sapien
agtttttattgcctacgcatttggaaaaacaat

SEQ ID NO: 308431 - DNA, 33 bp, Homo sapien
ctaggagtgcaccccacgtattataaagcttcc

SEQ ID NO: 308432 - DNA, 33 bp, Homo sapien
ctaggagtgcaccccatgtattataaagcttcc

SEQ ID NO: 308433 - DNA, 33 bp, Homo sapien
atagtaatgacatacaatcccatgtttttccaa

SEQ ID NO: 308434 - DNA, 33 bp, Homo sapien
atagtaatgacatacagtcccatgtttttccaa

SEQ ID NO: 308435 - DNA, 33 bp, Homo sapien
ttggactactccagaaaattaggctgtgaatgg

SEQ ID NO: 308436 - DNA, 33 bp, Homo sapien
ttggactactccagaagattaggctgtgaatgg

SEQ ID NO: 308437 - DNA, 33 bp, Homo sapien
aggtttggggatacacagaaattggtaaaatag

SEQ ID NO: 308438 - DNA, 33 bp, Homo sapien
aggtttggggatacacggaaattggtaaaatag

SEQ ID NO: 308439 - DNA, 33 bp, Homo sapien
ttactgcacatactgaaacacaacaatgaattt

SEQ ID NO: 308440 - DNA, 33 bp, Homo sapien
ttactgcacatactgagacacaacaatgaattt

SEQ ID NO: 308441 - DNA, 33 bp, Homo sapien
gatagggcaaaagtcacctgtaattctcaagcc

SEQ ID NO: 308442 - DNA, 33 bp, Homo sapien
gatagggcaaaagtcatctgtaattctcaagcc

SEQ ID NO: 308443 - DNA, 33 bp, Homo sapien
gtggtttaggtgcaacaaaagtgcttcttattt

SEQ ID NO: 308444 - DNA, 33 bp, Homo sapien
gtggtttaggtgcaaccaaagtgcttcttattt

SEQ ID NO: 308445 - DNA, 33 bp, Homo sapien
aaccagatcaaagggaaagcaagtcagacattg

SEQ ID NO: 308446 - DNA, 33 bp, Homo sapien
aaccagatcaaagggagagcaagtcagacattg

SEQ ID NO: 308447 - DNA, 33 bp, Homo sapien
acattcaggaaatcaaacaggtggtctacatta

SEQ ID NO: 308448 - DNA, 33 bp, Homo sapien
acattcaggaaatcaagcaggtggtctacatta

SEQ ID NO: 308449 - DNA, 33 bp, Homo sapien
ttacaaagactgtaacaatatttcagtacatta

SEQ ID NO: 308450 - DNA, 33 bp, Homo sapien
ttacaaagactgtaacgatatttcagtacatta

SEQ ID NO: 308451 - DNA, 33 bp, Homo sapien
taaggctgatttcagcaaagctagacttgtgtt

SEQ ID NO: 308452 - DNA, 33 bp, Homo sapien
taaggctgatttcagctaagctagacttgtgtt

SEQ ID NO: 308453 - DNA, 33 bp, Homo sapien
gattagtaacttggcactaagatggttatggct

SEQ ID NO: 308454 - DNA, 33 bp, Homo sapien
gattagtaacttggcattaagatggttatggct

SEQ ID NO: 308455 - DNA, 33 bp, Homo sapien
ctgatcccagcttaaccaaacaagcaattctcc

SEQ ID NO: 308456 - DNA, 33 bp, Homo sapien
ctgatcccagcttaactaaacaagcaattctcc

SEQ ID NO: 308457 - DNA, 33 bp, Homo sapien
ggagtcttagagggaaaaaacttaatatcatca

SEQ ID NO: 308458 - DNA, 33 bp, Homo sapien
ggagtcttagagggaagaaacttaatatcatca

SEQ ID NO: 308459 - DNA, 33 bp, Homo sapien
ttaatgccacacttaacaaagcttaaaatacca

SEQ ID NO: 308460 - DNA, 33 bp, Homo sapien
ttaatgccacacttaagaaagcttaaaatacca

SEQ ID NO: 308461 - DNA, 33 bp, Homo sapien
ttacactgacttaagacgaaatataactgtaag

SEQ ID NO: 308462 - DNA, 33 bp, Homo sapien
ttacactgacttaagatgaaatataactgtaag

SEQ ID NO: 308463 - DNA, 33 bp, Homo sapien
gacattagaagctgtgaattgcagaaataaatc

SEQ ID NO: 308464 - DNA, 33 bp, Homo sapien
gacattagaagctgtggattgcagaaataaatc

SEQ ID NO: 308465 - DNA, 33 bp, Homo sapien
atcggctgtttgtgtaccctcgctgctaatcag

SEQ ID NO: 308466 - DNA, 33 bp, Homo sapien
atcggctgtttgtgtagcctcgctgctaatcag

SEQ ID NO: 308467 - DNA, 33 bp, Homo sapien
gataaagacaactagacagaaagtatttatact

SEQ ID NO: 308468 - DNA, 33 bp, Homo sapien
gataaagacaactagagagaaagtatttatact

SEQ ID NO: 308469 - DNA, 33 bp, Homo sapien
atgtggtatgagtaacccaagttgaagaagata

SEQ ID NO: 308470 - DNA, 33 bp, Homo sapien
atgtggtatgagtaacgcaagttgaagaagata

SEQ ID NO: 308471 - DNA, 33 bp, Homo sapien
gaaggactgttgtgtccctttgaattctcagac

SEQ ID NO: 308472 - DNA, 33 bp, Homo sapien
gaaggactgttgtgtctctttgaattctcagac

SEQ ID NO: 308473 - DNA, 33 bp, Homo sapien
tcaatggaacaacatcaaattcttttggcagcc

SEQ ID NO: 308474 - DNA, 33 bp, Homo sapien
tcaatggaacaacatcgaattcttttggcagcc

SEQ ID NO: 308475 - DNA, 33 bp, Homo sapien
ttggtagatccacctggaagtgaggaagccagg

SEQ ID NO: 308476 - DNA, 33 bp, Homo sapien
ttggtagatccacctgtaagtgaggaagccagg

SEQ ID NO: 308477 - DNA, 33 bp, Homo sapien
atagacttcttattcacccctcaagtttccact

SEQ ID NO: 308478 - DNA, 33 bp, Homo sapien
atagacttcttattcatccctcaagtttccact

SEQ ID NO: 308479 - DNA, 33 bp, Homo sapien
gagaacgctataccacccggaagaacatggtgg

SEQ ID NO: 308480 - DNA, 33 bp, Homo sapien
gagaacgctataccacgcggaagaacatggtgg

SEQ ID NO: 308481 - DNA, 33 bp, Homo sapien
acttctcagagtgggtaaaagtatgagcagagg

SEQ ID NO: 308482 - DNA, 33 bp, Homo sapien
acttctcagagtgggtgaaagtatgagcagagg

SEQ ID NO: 308483 - DNA, 33 bp, Homo sapien
acagtcatctgaattcaaaaagaaagaaacacc

SEQ ID NO: 308484 - DNA, 33 bp, Homo sapien
acagtcatctgaattcgaaaagaaagaaacacc

SEQ ID NO: 308485 - DNA, 33 bp, Homo sapien
tattggcctttatgtcactagtaattaaccaat

SEQ ID NO: 308486 - DNA, 33 bp, Homo sapien
tattggcctttatgtccctagtaattaaccaat

SEQ ID NO: 308487 - DNA, 33 bp, Homo sapien
tgagtcacaccatatgcagctgaattgaagggg

SEQ ID NO: 308488 - DNA, 33 bp, Homo sapien
tgagtcacaccatatgtagctgaattgaagggg

SEQ ID NO: 308489 - DNA, 33 bp, Homo sapien
gtcagcccaagattccacaacccttctttcctt

SEQ ID NO: 308490 - DNA, 33 bp, Homo sapien
gtcagcccaagattccgcaacccttctttcctt

SEQ ID NO: 308491 - DNA, 33 bp, Homo sapien
aatgaaagatgccgcaactacatggttcatctc

SEQ ID NO: 308492 - DNA, 33 bp, Homo sapien
aatgaaagatgccgcagctacatggttcatctc

SEQ ID NO: 308493 - DNA, 33 bp, Homo sapien
ccctagtaccttactccatgcgtctctgccatt

SEQ ID NO: 308494 - DNA, 33 bp, Homo sapien
ccctagtaccttactctatgcgtctctgccatt

SEQ ID NO: 308495 - DNA, 33 bp, Homo sapien
agatatctacctgccaaaaaagaatgttaaaac

SEQ ID NO: 308496 - DNA, 33 bp, Homo sapien
agatatctacctgccacaaaagaatgttaaaac

SEQ ID NO: 308497 - DNA, 33 bp, Homo sapien
tgtgaaactctatgacaacgatttttaaaacat

SEQ ID NO: 308498 - DNA, 33 bp, Homo sapien
tgtgaaactctatgacgacgatttttaaaacat

SEQ ID NO: 308499 - DNA, 33 bp, Homo sapien
gaaaattcaatccaacaaaatgtgtgccaagaa

SEQ ID NO: 308500 - DNA, 33 bp, Homo sapien
gaaaattcaatccaactaaatgtgtgccaagaa

SEQ ID NO: 308501 - DNA, 33 bp, Homo sapien
ctgtctgttctttgtcgctcccaactctggcaa

SEQ ID NO: 308502 - DNA, 33 bp, Homo sapien
ctgtctgttctttgtctctcccaactctggcaa

SEQ ID NO: 308503 - DNA, 33 bp, Homo sapien
tttactcctaaggggcacttagttcctatacag

SEQ ID NO: 308504 - DNA, 33 bp, Homo sapien
tttactcctaaggggcgcttagttcctatacag

SEQ ID NO: 308505 - DNA, 33 bp, Homo sapien
gcctcagaaaaaacccagcctgctgatactttg

SEQ ID NO: 308506 - DNA, 33 bp, Homo sapien
gcctcagaaaaaacccggcctgctgatactttg

SEQ ID NO: 308507 - DNA, 33 bp, Homo sapien
gctcagcaacacatgaaaaatccaatttgcaat

SEQ ID NO: 308508 - DNA, 33 bp, Homo sapien
gctcagcaacacatgagaaatccaatttgcaat

SEQ ID NO: 308509 - DNA, 33 bp, Homo sapien
gaatcctttattcttcaaagggatacatatatg

SEQ ID NO: 308510 - DNA, 33 bp, Homo sapien
gaatcctttattcttcgaagggatacatatatg

SEQ ID NO: 308511 - DNA, 33 bp, Homo sapien
tgccttctgctgttcacgattggagcagctggg

SEQ ID NO: 308512 - DNA, 33 bp, Homo sapien
tgccttctgctgttcatgattggagcagctggg

SEQ ID NO: 308513 - DNA, 33 bp, Homo sapien
agcaaaagcaggctggaacaatcctctaacaaa

SEQ ID NO: 308514 - DNA, 33 bp, Homo sapien
agcaaaagcaggctggtacaatcctctaacaaa

SEQ ID NO: 308515 - DNA, 33 bp, Homo sapien
catgtgtgaagaacaacaatatacctggaaaat

SEQ ID NO: 308516 - DNA, 33 bp, Homo sapien
catgtgtgaagaacaataatatacctggaaaat

SEQ ID NO: 308517 - DNA, 33 bp, Homo sapien
cttgtatttttgttacaatgcccgttctcaaat

SEQ ID NO: 308518 - DNA, 33 bp, Homo sapien
cttgtatttttgttacgatgcccgttctcaaat

SEQ ID NO: 308519 - DNA, 33 bp, Homo sapien
ctttggtgctggaatacatcagtcccagtttgt

SEQ ID NO: 308520 - DNA, 33 bp, Homo sapien
ctttggtgctggaatatatcagtcccagtttgt

SEQ ID NO: 308521 - DNA, 33 bp, Homo sapien
tagtggtttttagccacgaacctcggcttaaag

SEQ ID NO: 308522 - DNA, 33 bp, Homo sapien
tagtggtttttagccatgaacctcggcttaaag

SEQ ID NO: 308523 - DNA, 33 bp, Homo sapien
tgaaagaggataggggaaaagcattctaaatga

SEQ ID NO: 308524 - DNA, 33 bp, Homo sapien
tgaaagaggatagggggaaagcattctaaatga

SEQ ID NO: 308525 - DNA, 33 bp, Homo sapien
ttgggctggacaaagaagtaaaataagagttgt

SEQ ID NO: 308526 - DNA, 33 bp, Homo sapien
ttgggctggacaaagaggtaaaataagagttgt

SEQ ID NO: 308527 - DNA, 33 bp, Homo sapien
ctctagtgaattttctcaagtcttgcaacctga

SEQ ID NO: 308528 - DNA, 33 bp, Homo sapien
ctctagtgaattttctgaagtcttgcaacctga

SEQ ID NO: 308529 - DNA, 33 bp, Homo sapien
ggtattctgtggcataataacacgtgtcacaca

SEQ ID NO: 308530 - DNA, 33 bp, Homo sapien
ggtattctgtggcatattaacacgtgtcacaca

SEQ ID NO: 308531 - DNA, 33 bp, Homo sapien
atgaaagctgataaaacctgggtgagacaaaac

SEQ ID NO: 308532 - DNA, 33 bp, Homo sapien
atgaaagctgataaaatctgggtgagacaaaac

SEQ ID NO: 308533 - DNA, 33 bp, Homo sapien
ggagaggctgtaaatacaaacaaagccttgctt

SEQ ID NO: 308534 - DNA, 33 bp, Homo sapien
ggagaggctgtaaatagaaacaaagccttgctt

SEQ ID NO: 308535 - DNA, 33 bp, Homo sapien
cacagaaagagttaaacatgccctgaacacaga

SEQ ID NO: 308536 - DNA, 33 bp, Homo sapien
cacagaaagagttaaatatgccctgaacacaga

SEQ ID NO: 308537 - DNA, 33 bp, Homo sapien
aaccttctaggctagaccagattacaaattgac

SEQ ID NO: 308538 - DNA, 33 bp, Homo sapien
aaccttctaggctagagcagattacaaattgac

SEQ ID NO: 308539 - DNA, 33 bp, Homo sapien
cttttacttagaactcaaactcttataaaatcc

SEQ ID NO: 308540 - DNA, 33 bp, Homo sapien
cttttacttagaactcgaactcttataaaatcc

SEQ ID NO: 308541 - DNA, 33 bp, Homo sapien
gtctccttgccaattcgaatgtctgtggggttc

SEQ ID NO: 308542 - DNA, 33 bp, Homo sapien
gtctccttgccaattctaatgtctgtggggttc

SEQ ID NO: 308543 - DNA, 33 bp, Homo sapien
tcctgttgtctaactgaaactcagtactgtttg

SEQ ID NO: 308544 - DNA, 33 bp, Homo sapien
tcctgttgtctaactggaactcagtactgtttg

SEQ ID NO: 308545 - DNA, 33 bp, Homo sapien
tgttgtttgtgcttgaaggaaatctgatgccat

SEQ ID NO: 308546 - DNA, 33 bp, Homo sapien
tgttgtttgtgcttgagggaaatctgatgccat

SEQ ID NO: 308547 - DNA, 33 bp, Homo sapien
tgccagaataccgcaacatctcaatggctctat

SEQ ID NO: 308548 - DNA, 33 bp, Homo sapien
tgccagaataccgcaatatctcaatggctctat

SEQ ID NO: 308549 - DNA, 33 bp, Homo sapien
tcttatttagataaaactgtaagttgtgcagca

SEQ ID NO: 308550 - DNA, 33 bp, Homo sapien
tcttatttagataaaagtgtaagttgtgcagca

SEQ ID NO: 308551 - DNA, 33 bp, Homo sapien
aaaaatagtcaccttacagtgcagaaacctgac

SEQ ID NO: 308552 - DNA, 33 bp, Homo sapien
aaaaatagtcaccttatagtgcagaaacctgac

SEQ ID NO: 308553 - DNA, 33 bp, Homo sapien
ccataacattgagccacgaaactcacacagatg

SEQ ID NO: 308554 - DNA, 33 bp, Homo sapien
ccataacattgagccatgaaactcacacagatg

SEQ ID NO: 308555 - DNA, 33 bp, Homo sapien
ttgaatttcccagtatcacttagaattcacaga

SEQ ID NO: 308556 - DNA, 33 bp, Homo sapien
ttgaatttcccagtatgacttagaattcacaga

SEQ ID NO: 308557 - DNA, 33 bp, Homo sapien
ctcagataaaggaacaagaattctgacgcgggg

SEQ ID NO: 308558 - DNA, 33 bp, Homo sapien
ctcagataaaggaacatgaattctgacgcgggg

SEQ ID NO: 308559 - DNA, 33 bp, Homo sapien
aatcatctggtattccacttgacctagtcaaca

SEQ ID NO: 308560 - DNA, 33 bp, Homo sapien
aatcatctggtattccgcttgacctagtcaaca

SEQ ID NO: 308561 - DNA, 33 bp, Homo sapien
gacctacatttccaacagtgaggaaatatctga

SEQ ID NO: 308562 - DNA, 33 bp, Homo sapien
gacctacatttccaactgtgaggaaatatctga

SEQ ID NO: 308563 - DNA, 33 bp, Homo sapien
agccttatcaggaaacaaaatagaagttgagat

SEQ ID NO: 308564 - DNA, 33 bp, Homo sapien
agccttatcaggaaacgaaatagaagttgagat

SEQ ID NO: 308565 - DNA, 33 bp, Homo sapien
ttgtcccattaagatacggagattgttgcaaaa

SEQ ID NO: 308566 - DNA, 33 bp, Homo sapien
ttgtcccattaagatatggagattgttgcaaaa

SEQ ID NO: 308567 - DNA, 33 bp, Homo sapien
cactacttttacagaactgaagatgcacaaatt

SEQ ID NO: 308568 - DNA, 33 bp, Homo sapien
cactacttttacagaattgaagatgcacaaatt

SEQ ID NO: 308569 - DNA, 33 bp, Homo sapien
attaatgacatactaaacttactgtgtcttaag

SEQ ID NO: 308570 - DNA, 33 bp, Homo sapien
attaatgacatactaagcttactgtgtcttaag

SEQ ID NO: 308571 - DNA, 33 bp, Homo sapien
aggaggcattattgatcagcggtgtaggtattc

SEQ ID NO: 308572 - DNA, 33 bp, Homo sapien
aggaggcattattgattagcggtgtaggtattc

SEQ ID NO: 308573 - DNA, 33 bp, Homo sapien
taaggcccaatgaacacaaatggaatcacattg

SEQ ID NO: 308574 - DNA, 33 bp, Homo sapien
taaggcccaatgaacataaatggaatcacattg

SEQ ID NO: 308575 - DNA, 33 bp, Homo sapien
tttggggcttagaaagcatgttgtcattagaaa

SEQ ID NO: 308576 - DNA, 33 bp, Homo sapien
tttggggcttagaaagtatgttgtcattagaaa

SEQ ID NO: 308577 - DNA, 33 bp, Homo sapien
accttttgacagcgaacgctttccatcttatca

SEQ ID NO: 308578 - DNA, 33 bp, Homo sapien
accttttgacagcgaatgctttccatcttatca

SEQ ID NO: 308579 - DNA, 33 bp, Homo sapien
gtatttacacaagtgacgccatgggttagtgtt

SEQ ID NO: 308580 - DNA, 33 bp, Homo sapien
gtatttacacaagtgatgccatgggttagtgtt

SEQ ID NO: 308581 - DNA, 33 bp, Homo sapien
gccgcagcatcctgagaaaagaggatcagccag

SEQ ID NO: 308582 - DNA, 33 bp, Homo sapien
gccgcagcatcctgagcaaagaggatcagccag

SEQ ID NO: 308583 - DNA, 33 bp, Homo sapien
gatgggacaaaatgatcaagtagctgtaaagta

SEQ ID NO: 308584 - DNA, 33 bp, Homo sapien
gatgggacaaaatgatgaagtagctgtaaagta

SEQ ID NO: 308585 - DNA, 33 bp, Homo sapien
aagccttcaaaatactaaggtgggttgcatacc

SEQ ID NO: 308586 - DNA, 33 bp, Homo sapien
aagccttcaaaatactgaggtgggttgcatacc

SEQ ID NO: 308587 - DNA, 33 bp, Homo sapien
aggtgaacaccttagaaaccactgtccaggtca

SEQ ID NO: 308588 - DNA, 33 bp, Homo sapien
aggtgaacaccttagagaccactgtccaggtca

SEQ ID NO: 308589 - DNA, 33 bp, Homo sapien
atgaatgggagagaaaagcaagaagtaagaagg

SEQ ID NO: 308590 - DNA, 33 bp, Homo sapien
atgaatgggagagaaaggcaagaagtaagaagg

SEQ ID NO: 308591 - DNA, 33 bp, Homo sapien
gggagggagttacgtacgggaacaatgacagga

SEQ ID NO: 308592 - DNA, 33 bp, Homo sapien
gggagggagttacgtatgggaacaatgacagga

SEQ ID NO: 308593 - DNA, 33 bp, Homo sapien
aatcagcatcttaaagactgtccactgggcaca

SEQ ID NO: 308594 - DNA, 33 bp, Homo sapien
aatcagcatcttaaagtctgtccactgggcaca

SEQ ID NO: 308595 - DNA, 33 bp, Homo sapien
gtcacttaccgtgttaccctgagcaagttttta

SEQ ID NO: 308596 - DNA, 33 bp, Homo sapien
gtcacttaccgtgttatcctgagcaagttttta

SEQ ID NO: 308597 - DNA, 33 bp, Homo sapien
ctatcctttcagttgcccaggaaaaaatgaaaa

SEQ ID NO: 308598 - DNA, 33 bp, Homo sapien
ctatcctttcagttgctcaggaaaaaatgaaaa

SEQ ID NO: 308599 - DNA, 33 bp, Homo sapien
aagttagagaaccctcaaggggctaggtatgag

SEQ ID NO: 308600 - DNA, 33 bp, Homo sapien
aagttagagaaccctcgaggggctaggtatgag

SEQ ID NO: 308601 - DNA, 33 bp, Homo sapien
tttcaaggaggtggtcaatgatgccaaactttt

SEQ ID NO: 308602 - DNA, 33 bp, Homo sapien
tttcaaggaggtggtcgatgatgccaaactttt

SEQ ID NO: 308603 - DNA, 33 bp, Homo sapien
tatctgaacaaagagaacttccctgaccaccct

SEQ ID NO: 308604 - DNA, 33 bp, Homo sapien
tatctgaacaaagagaccttccctgaccaccct

SEQ ID NO: 308605 - DNA, 33 bp, Homo sapien
caaagtgattgccagacagtgcaaatgtttcat

SEQ ID NO: 308606 - DNA, 33 bp, Homo sapien
caaagtgattgccagatagtgcaaatgtttcat

SEQ ID NO: 308607 - DNA, 33 bp, Homo sapien
ttaattatttccatgacggtttatatcaatatt

SEQ ID NO: 308608 - DNA, 33 bp, Homo sapien
ttaattatttccatgatggtttatatcaatatt

SEQ ID NO: 308609 - DNA, 33 bp, Homo sapien
catgttcaagtgtaaacagcctgtgaattattt

SEQ ID NO: 308610 - DNA, 33 bp, Homo sapien
catgttcaagtgtaaatagcctgtgaattattt

SEQ ID NO: 308611 - DNA, 33 bp, Homo sapien
taggaaatacaaacaccgtagctttctgcacca

SEQ ID NO: 308612 - DNA, 33 bp, Homo sapien
taggaaatacaaacactgtagctttctgcacca

SEQ ID NO: 308613 - DNA, 33 bp, Homo sapien
atgaaaagtacactaaaaagaagtctctaacaa

SEQ ID NO: 308614 - DNA, 33 bp, Homo sapien
atgaaaagtacactaataagaagtctctaacaa

SEQ ID NO: 308615 - DNA, 33 bp, Homo sapien
gtgatggtggataggaaaatttggagtcgggaa

SEQ ID NO: 308616 - DNA, 33 bp, Homo sapien
gtgatggtggataggataatttggagtcgggaa

SEQ ID NO: 308617 - DNA, 33 bp, Homo sapien
ttccttccccatctaccgctctactcccagcct

SEQ ID NO: 308618 - DNA, 33 bp, Homo sapien
ttccttccccatctactgctctactcccagcct

SEQ ID NO: 308619 - DNA, 33 bp, Homo sapien
aagatgttcaacctagaaaattggctaaataaa

SEQ ID NO: 308620 - DNA, 33 bp, Homo sapien
aagatgttcaacctaggaaattggctaaataaa

SEQ ID NO: 308621 - DNA, 33 bp, Homo sapien
ggagagaagatgtgaaattacaggacttgtgaa

SEQ ID NO: 308622 - DNA, 33 bp, Homo sapien
ggagagaagatgtgaacttacaggacttgtgaa

SEQ ID NO: 308623 - DNA, 33 bp, Homo sapien
tcactacttccatatgcatttgtaaaccaagct

SEQ ID NO: 308624 - DNA, 33 bp, Homo sapien
tcactacttccatatgtatttgtaaaccaagct

SEQ ID NO: 308625 - DNA, 33 bp, Homo sapien
aaatcaacttttcagacaggcttagtcattttt

SEQ ID NO: 308626 - DNA, 33 bp, Homo sapien
aaatcaacttttcagataggcttagtcattttt

SEQ ID NO: 308627 - DNA, 33 bp, Homo sapien
taagtgctcgacttacccttcaagactcttgtt

SEQ ID NO: 308628 - DNA, 33 bp, Homo sapien
taagtgctcgacttactcttcaagactcttgtt

SEQ ID NO: 308629 - DNA, 33 bp, Homo sapien
gcccacacatcaggaacagtcccacagcatgag

SEQ ID NO: 308630 - DNA, 33 bp, Homo sapien
gcccacacatcaggaagagtcccacagcatgag

SEQ ID NO: 308631 - DNA, 33 bp, Homo sapien
tacatttttacaaagaagtacatccagtggatg

SEQ ID NO: 308632 - DNA, 33 bp, Homo sapien
tacatttttacaaagaggtacatccagtggatg

SEQ ID NO: 308633 - DNA, 33 bp, Homo sapien
tttcaaaatcctgtaaggtgtattgttaacagc

SEQ ID NO: 308634 - DNA, 33 bp, Homo sapien
tttcaaaatcctgtaatgtgtattgttaacagc

SEQ ID NO: 308635 - DNA, 33 bp, Homo sapien
aaagtagtagctccacacaaattggagttgttt

SEQ ID NO: 308636 - DNA, 33 bp, Homo sapien
aaagtagtagctccacgcaaattggagttgttt

SEQ ID NO: 308637 - DNA, 33 bp, Homo sapien
taaaataaattctctccgaatgatgacttgagc

SEQ ID NO: 308638 - DNA, 33 bp, Homo sapien
taaaataaattctctctgaatgatgacttgagc

SEQ ID NO: 308639 - DNA, 33 bp, Homo sapien
actgtataggaatcagcaatcttgctccagtga

SEQ ID NO: 308640 - DNA, 33 bp, Homo sapien
actgtataggaatcaggaatcttgctccagtga

SEQ ID NO: 308641 - DNA, 33 bp, Homo sapien
ctgcatcagactattaggaaggcaggtccacag

SEQ ID NO: 308642 - DNA, 33 bp, Homo sapien
ctgcatcagactattatgaaggcaggtccacag

SEQ ID NO: 308643 - DNA, 33 bp, Homo sapien
tgttcactaggtcacacggttttgtaaaatttc

SEQ ID NO: 308644 - DNA, 33 bp, Homo sapien
tgttcactaggtcacatggttttgtaaaatttc

SEQ ID NO: 308645 - DNA, 33 bp, Homo sapien
aagtattggcttatgacggagtgagaggaaaaa

SEQ ID NO: 308646 - DNA, 33 bp, Homo sapien
aagtattggcttatgatggagtgagaggaaaaa

SEQ ID NO: 308647 - DNA, 33 bp, Homo sapien
aaactgttgtgggtaactactcaatacatcttc

SEQ ID NO: 308648 - DNA, 33 bp, Homo sapien
aaactgttgtgggtaagtactcaatacatcttc

SEQ ID NO: 308649 - DNA, 33 bp, Homo sapien
ggagtaacttttgctacgagctgatttcaccca

SEQ ID NO: 308650 - DNA, 33 bp, Homo sapien
ggagtaacttttgctatgagctgatttcaccca

SEQ ID NO: 308651 - DNA, 33 bp, Homo sapien
tgtggtctgggagccagagtctccgaatggatg

SEQ ID NO: 308652 - DNA, 33 bp, Homo sapien
tgtggtctgggagccatagtctccgaatggatg

SEQ ID NO: 308653 - DNA, 33 bp, Homo sapien
tttttctaagttactcccactacttccatcttc

SEQ ID NO: 308654 - DNA, 33 bp, Homo sapien
tttttctaagttactctcactacttccatcttc

SEQ ID NO: 308655 - DNA, 33 bp, Homo sapien
tagggaaagtttaataatagaactgagacttga

SEQ ID NO: 308656 - DNA, 33 bp, Homo sapien
tagggaaagtttaatagtagaactgagacttga

SEQ ID NO: 308657 - DNA, 33 bp, Homo sapien
aagagttacatgaaacaaacaatacactctaca

SEQ ID NO: 308658 - DNA, 33 bp, Homo sapien
aagagttacatgaaaccaacaatacactctaca

SEQ ID NO: 308659 - DNA, 33 bp, Homo sapien
tatttaaacccttcgacgattctactgtgccca

SEQ ID NO: 308660 - DNA, 33 bp, Homo sapien
tatttaaacccttcgatgattctactgtgccca

SEQ ID NO: 308661 - DNA, 33 bp, Homo sapien
aatttgatttgtctgcaaaccagcccaaactgc

SEQ ID NO: 308662 - DNA, 33 bp, Homo sapien
aatttgatttgtctgcgaaccagcccaaactgc

SEQ ID NO: 308663 - DNA, 33 bp, Homo sapien
atcacaggctgtggtcaaatgctttggagtcgg

SEQ ID NO: 308664 - DNA, 33 bp, Homo sapien
atcacaggctgtggtcgaatgctttggagtcgg

SEQ ID NO: 308665 - DNA, 33 bp, Homo sapien
ttctgcctaagtgtccacctcacagagctgtac

SEQ ID NO: 308666 - DNA, 33 bp, Homo sapien
ttctgcctaagtgtccgcctcacagagctgtac

SEQ ID NO: 308667 - DNA, 33 bp, Homo sapien
aatatattagctgaaactcaaggaaaggaaaag

SEQ ID NO: 308668 - DNA, 33 bp, Homo sapien
aatatattagctgaaagtcaaggaaaggaaaag

SEQ ID NO: 308669 - DNA, 33 bp, Homo sapien
gcaccaaaatcaatgcagagtgcagccatgggg

SEQ ID NO: 308670 - DNA, 33 bp, Homo sapien
gcaccaaaatcaatgcggagtgcagccatgggg

SEQ ID NO: 308671 - DNA, 33 bp, Homo sapien
gagaagagagaaatgacgtaaagatgaaattgt

SEQ ID NO: 308672 - DNA, 33 bp, Homo sapien
gagaagagagaaatgatgtaaagatgaaattgt

SEQ ID NO: 308673 - DNA, 33 bp, Homo sapien
aattcctttaggccacagaacatggcatttaac

SEQ ID NO: 308674 - DNA, 33 bp, Homo sapien
aattcctttaggccacggaacatggcatttaac

SEQ ID NO: 308675 - DNA, 33 bp, Homo sapien
taaagcactttttagcacagtcctactgcactg

SEQ ID NO: 308676 - DNA, 33 bp, Homo sapien
taaagcactttttagcgcagtcctactgcactg

SEQ ID NO: 308677 - DNA, 33 bp, Homo sapien
acaagctcagttcagacataagaatcaaatgag

SEQ ID NO: 308678 - DNA, 33 bp, Homo sapien
acaagctcagttcagatataagaatcaaatgag

SEQ ID NO: 308679 - DNA, 33 bp, Homo sapien
acagggttaaaagaaaaggagcaatttctagtc

SEQ ID NO: 308680 - DNA, 33 bp, Homo sapien
acagggttaaaagaaagggagcaatttctagtc

SEQ ID NO: 308681 - DNA, 33 bp, Homo sapien
aaatgtgcatatactacgatctcacttaaaaat

SEQ ID NO: 308682 - DNA, 33 bp, Homo sapien
aaatgtgcatatactatgatctcacttaaaaat

SEQ ID NO: 308683 - DNA, 33 bp, Homo sapien
aactgagaaacatctacaagtgaagtcacgggt

SEQ ID NO: 308684 - DNA, 33 bp, Homo sapien
aactgagaaacatctataagtgaagtcacgggt

SEQ ID NO: 308685 - DNA, 33 bp, Homo sapien
caatctattttgcatcgcatattgcttcctttc

SEQ ID NO: 308686 - DNA, 33 bp, Homo sapien
caatctattttgcatctcatattgcttcctttc

SEQ ID NO: 308687 - DNA, 33 bp, Homo sapien
aatagagctgaaagaacatcttcaggagacagg

SEQ ID NO: 308688 - DNA, 33 bp, Homo sapien
aatagagctgaaagaatatcttcaggagacagg

SEQ ID NO: 308689 - DNA, 33 bp, Homo sapien
atgatggtcaatttaaacttaacctttgcaaat

SEQ ID NO: 308690 - DNA, 33 bp, Homo sapien
atgatggtcaatttaagcttaacctttgcaaat

SEQ ID NO: 308691 - DNA, 33 bp, Homo sapien
gttggaaatgtcttcaacagctacagcaaatta

SEQ ID NO: 308692 - DNA, 33 bp, Homo sapien
gttggaaatgtcttcagcagctacagcaaatta

SEQ ID NO: 308693 - DNA, 33 bp, Homo sapien
atccacatagttcaaacggctgtagatctcaat

SEQ ID NO: 308694 - DNA, 33 bp, Homo sapien
atccacatagttcaaatggctgtagatctcaat

SEQ ID NO: 308695 - DNA, 33 bp, Homo sapien
aaacataaccagttagcagactttagaatgaat

SEQ ID NO: 308696 - DNA, 33 bp, Homo sapien
aaacataaccagttagtagactttagaatgaat

SEQ ID NO: 308697 - DNA, 33 bp, Homo sapien
ctgctttttcattttaagatcatcttgtctatt

SEQ ID NO: 308698 - DNA, 33 bp, Homo sapien
ctgctttttcattttaggatcatcttgtctatt

SEQ ID NO: 308699 - DNA, 33 bp, Homo sapien
tcattctctcctacccacagtctgacaactacc

SEQ ID NO: 308700 - DNA, 33 bp, Homo sapien
tcattctctcctacccgcagtctgacaactacc

SEQ ID NO: 308701 - DNA, 33 bp, Homo sapien
attatactacacaggacatttctataggagaat

SEQ ID NO: 308702 - DNA, 33 bp, Homo sapien
attatactacacaggagatttctataggagaat

SEQ ID NO: 308703 - DNA, 33 bp, Homo sapien
atataacaaagtagaaacttccctattatacac

SEQ ID NO: 308704 - DNA, 33 bp, Homo sapien
atataacaaagtagaagcttccctattatacac

SEQ ID NO: 308705 - DNA, 33 bp, Homo sapien
gagtcacaggctgtaacgcatgagtcacagagg

SEQ ID NO: 308706 - DNA, 33 bp, Homo sapien
gagtcacaggctgtaatgcatgagtcacagagg

SEQ ID NO: 308707 - DNA, 33 bp, Homo sapien
ctggtctggtgatgtacattgagagccctacga

SEQ ID NO: 308708 - DNA, 33 bp, Homo sapien
ctggtctggtgatgtatattgagagccctacga

SEQ ID NO: 308709 - DNA, 33 bp, Homo sapien
gttggatcttcttaaactgttctattggatgac

SEQ ID NO: 308710 - DNA, 33 bp, Homo sapien
gttggatcttcttaaagtgttctattggatgac

SEQ ID NO: 308711 - DNA, 33 bp, Homo sapien
ggacatctgtacaacacggttactagaattagt

SEQ ID NO: 308712 - DNA, 33 bp, Homo sapien
ggacatctgtacaacatggttactagaattagt

SEQ ID NO: 308713 - DNA, 33 bp, Homo sapien
ttttcatgaagataccaaaagatacaaagatga

SEQ ID NO: 308714 - DNA, 33 bp, Homo sapien
ttttcatgaagataccgaaagatacaaagatga

SEQ ID NO: 308715 - DNA, 33 bp, Homo sapien
tcctactccttgttcaatattacttcacacccc

SEQ ID NO: 308716 - DNA, 33 bp, Homo sapien
tcctactccttgttcagtattacttcacacccc

SEQ ID NO: 308717 - DNA, 33 bp, Homo sapien
cagtttcctgtctacaataatgaatttgggcag

SEQ ID NO: 308718 - DNA, 33 bp, Homo sapien
cagtttcctgtctacagtaatgaatttgggcag

SEQ ID NO: 308719 - DNA, 33 bp, Homo sapien
gatttttagcaaatgcaagctcctacatgtaag

SEQ ID NO: 308720 - DNA, 33 bp, Homo sapien
gatttttagcaaatgcgagctcctacatgtaag

SEQ ID NO: 308721 - DNA, 33 bp, Homo sapien
tgaatgcaaaacaggaacttgacattctttagc

SEQ ID NO: 308722 - DNA, 33 bp, Homo sapien
tgaatgcaaaacaggagcttgacattctttagc

SEQ ID NO: 308723 - DNA, 33 bp, Homo sapien
tgtgtgtttatttgtacgcgagtttcgtatgga

SEQ ID NO: 308724 - DNA, 33 bp, Homo sapien
tgtgtgtttatttgtatgcgagtttcgtatgga

SEQ ID NO: 308725 - DNA, 33 bp, Homo sapien
gcaattatcaaattgacgttgtttatttttatg

SEQ ID NO: 308726 - DNA, 33 bp, Homo sapien
gcaattatcaaattgatgttgtttatttttatg

SEQ ID NO: 308727 - DNA, 33 bp, Homo sapien
acaataataacagcaacgatggcttctgcttat

SEQ ID NO: 308728 - DNA, 33 bp, Homo sapien
acaataataacagcaatgatggcttctgcttat

SEQ ID NO: 308729 - DNA, 33 bp, Homo sapien
tagtgcctggcatcaacggtagctttcctgtta

SEQ ID NO: 308730 - DNA, 33 bp, Homo sapien
tagtgcctggcatcaatggtagctttcctgtta

SEQ ID NO: 308731 - DNA, 33 bp, Homo sapien
tgtcaaccctgagatgaaatttaactcagtttt

SEQ ID NO: 308732 - DNA, 33 bp, Homo sapien
tgtcaaccctgagatggaatttaactcagtttt

SEQ ID NO: 308733 - DNA, 33 bp, Homo sapien
aggatggagcctaatgcatattaaagcaaaact

SEQ ID NO: 308734 - DNA, 33 bp, Homo sapien
aggatggagcctaatggatattaaagcaaaact

SEQ ID NO: 308735 - DNA, 33 bp, Homo sapien
gtgtattgagtgttcactacgtgcaaggaccat

SEQ ID NO: 308736 - DNA, 33 bp, Homo sapien
gtgtattgagtgttcattacgtgcaaggaccat

SEQ ID NO: 308737 - DNA, 33 bp, Homo sapien
atttaagtcgtatgtgcatatgtatgaaggtga

SEQ ID NO: 308738 - DNA, 33 bp, Homo sapien
atttaagtcgtatgtgtatatgtatgaaggtga

SEQ ID NO: 308739 - DNA, 33 bp, Homo sapien
agtatatatttttgataactttgccaaagatca

SEQ ID NO: 308740 - DNA, 33 bp, Homo sapien
agtatatatttttgatgactttgccaaagatca

SEQ ID NO: 308741 - DNA, 33 bp, Homo sapien
cagatgatggagagctaaaaaatgacaaatatt

SEQ ID NO: 308742 - DNA, 33 bp, Homo sapien
cagatgatggagagctgaaaaatgacaaatatt

SEQ ID NO: 308743 - DNA, 33 bp, Homo sapien
agctgtgcataaccaactgtgtccatgaccatg

SEQ ID NO: 308744 - DNA, 33 bp, Homo sapien
agctgtgcataaccaattgtgtccatgaccatg

SEQ ID NO: 308745 - DNA, 33 bp, Homo sapien
gagttctaagccacacagtctgtactcttactt

SEQ ID NO: 308746 - DNA, 33 bp, Homo sapien
gagttctaagccacacggtctgtactcttactt

SEQ ID NO: 308747 - DNA, 33 bp, Homo sapien
tatgcacatcataggtaacattgcttcatgagc

SEQ ID NO: 308748 - DNA, 33 bp, Homo sapien
tatgcacatcataggttacattgcttcatgagc

SEQ ID NO: 308749 - DNA, 33 bp, Homo sapien
atactttgtggccttacgtttaaatctttaatc

SEQ ID NO: 308750 - DNA, 33 bp, Homo sapien
atactttgtggccttatgtttaaatctttaatc

SEQ ID NO: 308751 - DNA, 33 bp, Homo sapien
gaaacagacgtagaatcacaattaccaaaggga

SEQ ID NO: 308752 - DNA, 33 bp, Homo sapien
gaaacagacgtagaattacaattaccaaaggga

SEQ ID NO: 308753 - DNA, 33 bp, Homo sapien
atgagaggaagaaggcaaggtcctatgtctacc

SEQ ID NO: 308754 - DNA, 33 bp, Homo sapien
atgagaggaagaaggcgaggtcctatgtctacc

SEQ ID NO: 308755 - DNA, 33 bp, Homo sapien
cttccctaaggtaaaaatgttctcctgggagac

SEQ ID NO: 308756 - DNA, 33 bp, Homo sapien
cttccctaaggtaaaagtgttctcctgggagac

SEQ ID NO: 308757 - DNA, 33 bp, Homo sapien
tggtactgcactacatcaatcatcttaaaactt

SEQ ID NO: 308758 - DNA, 33 bp, Homo sapien
tggtactgcactacatgaatcatcttaaaactt

SEQ ID NO: 308759 - DNA, 33 bp, Homo sapien
ctctttttctgtttgcaagtcaccaaagattgc

SEQ ID NO: 308760 - DNA, 33 bp, Homo sapien
ctctttttctgtttgcgagtcaccaaagattgc

SEQ ID NO: 308761 - DNA, 33 bp, Homo sapien
atgttgcaaggcttaaatattctagtcacatgg

SEQ ID NO: 308762 - DNA, 33 bp, Homo sapien
atgttgcaaggcttaagtattctagtcacatgg

SEQ ID NO: 308763 - DNA, 33 bp, Homo sapien
ttcaactataacatgacgctgcttctaaaaata

SEQ ID NO: 308764 - DNA, 33 bp, Homo sapien
ttcaactataacatgatgctgcttctaaaaata

SEQ ID NO: 308765 - DNA, 33 bp, Homo sapien
acccttgatttagaggcattggaagtatgctga

SEQ ID NO: 308766 - DNA, 33 bp, Homo sapien
acccttgatttagagggattggaagtatgctga

SEQ ID NO: 308767 - DNA, 33 bp, Homo sapien
aattcatcctaagcaactaaacatgacattatt

SEQ ID NO: 308768 - DNA, 33 bp, Homo sapien
aattcatcctaagcaagtaaacatgacattatt

SEQ ID NO: 308769 - DNA, 33 bp, Homo sapien
tacagtcactccaggacctgttaaaaatcccag

SEQ ID NO: 308770 - DNA, 33 bp, Homo sapien
tacagtcactccaggatctgttaaaaatcccag

SEQ ID NO: 308771 - DNA, 33 bp, Homo sapien
tgcttgtcagtgagataacgaacatgaatgtgg

SEQ ID NO: 308772 - DNA, 33 bp, Homo sapien
tgcttgtcagtgagatgacgaacatgaatgtgg

SEQ ID NO: 308773 - DNA, 33 bp, Homo sapien
cagataaggaaatggaagtacaaactagttagg

SEQ ID NO: 308774 - DNA, 33 bp, Homo sapien
cagataaggaaatggaggtacaaactagttagg

SEQ ID NO: 308775 - DNA, 33 bp, Homo sapien
gaaaagatgaacttgacaataacagacaaggcc

SEQ ID NO: 308776 - DNA, 33 bp, Homo sapien
gaaaagatgaacttgagaataacagacaaggcc

SEQ ID NO: 308777 - DNA, 33 bp, Homo sapien
tctgcgacaccttgaacacagctgtcataagga

SEQ ID NO: 308778 - DNA, 33 bp, Homo sapien
tctgcgacaccttgaatacagctgtcataagga

SEQ ID NO: 308779 - DNA, 33 bp, Homo sapien
ctttgaaggatgatgaagagccatccaggttga

SEQ ID NO: 308780 - DNA, 33 bp, Homo sapien
ctttgaaggatgatgaggagccatccaggttga

SEQ ID NO: 308781 - DNA, 33 bp, Homo sapien
agactgcacagttaacactctgtttcctattat

SEQ ID NO: 308782 - DNA, 33 bp, Homo sapien
agactgcacagttaaccctctgtttcctattat

SEQ ID NO: 308783 - DNA, 33 bp, Homo sapien
caaaccccatcattctaaccaggtcctcattga

SEQ ID NO: 308784 - DNA, 33 bp, Homo sapien
caaaccccatcattctgaccaggtcctcattga

SEQ ID NO: 308785 - DNA, 33 bp, Homo sapien
tggatgagattagaaacgcattttataagtgac

SEQ ID NO: 308786 - DNA, 33 bp, Homo sapien
tggatgagattagaaaggcattttataagtgac

SEQ ID NO: 308787 - DNA, 33 bp, Homo sapien
tggtgggatttcagtgaaagtacaactagtcag

SEQ ID NO: 308788 - DNA, 33 bp, Homo sapien
tggtgggatttcagtgcaagtacaactagtcag

SEQ ID NO: 308789 - DNA, 33 bp, Homo sapien
agtcaagccaaaaaacagctaataaactgaaag

SEQ ID NO: 308790 - DNA, 33 bp, Homo sapien
agtcaagccaaaaaacggctaataaactgaaag

SEQ ID NO: 308791 - DNA, 33 bp, Homo sapien
ggaacatcctatgtgaccatccttgattttgga

SEQ ID NO: 308792 - DNA, 33 bp, Homo sapien
ggaacatcctatgtgatcatccttgattttgga

SEQ ID NO: 308793 - DNA, 33 bp, Homo sapien
gcaaccagtgattctactaaaatgcaaatcaaa

SEQ ID NO: 308794 - DNA, 33 bp, Homo sapien
gcaaccagtgattctattaaaatgcaaatcaaa

SEQ ID NO: 308795 - DNA, 33 bp, Homo sapien
agaaacatgaggtagacgaagtgtgtacgcatt

SEQ ID NO: 308796 - DNA, 33 bp, Homo sapien
agaaacatgaggtagatgaagtgtgtacgcatt

SEQ ID NO: 308797 - DNA, 33 bp, Homo sapien
tctctgaagatctttggacctctatctgggttc

SEQ ID NO: 308798 - DNA, 33 bp, Homo sapien
tctctgaagatctttgtacctctatctgggttc

SEQ ID NO: 308799 - DNA, 33 bp, Homo sapien
gagacttttgcagaaactattttgtggacagtg

SEQ ID NO: 308800 - DNA, 33 bp, Homo sapien
gagacttttgcagaaattattttgtggacagtg

SEQ ID NO: 308801 - DNA, 33 bp, Homo sapien
gccagggtggggacaacacactgtgatcaatag

SEQ ID NO: 308802 - DNA, 33 bp, Homo sapien
gccagggtggggacaatacactgtgatcaatag

SEQ ID NO: 308803 - DNA, 33 bp, Homo sapien
ttttccatttacaaccaacaatacgcttaactt

SEQ ID NO: 308804 - DNA, 33 bp, Homo sapien
ttttccatttacaaccgacaatacgcttaactt

SEQ ID NO: 308805 - DNA, 33 bp, Homo sapien
taaagttatgaggattaaaaaaaacacatataa

SEQ ID NO: 308806 - DNA, 33 bp, Homo sapien
taaagttatgaggatttaaaaaaacacatataa

SEQ ID NO: 308807 - DNA, 33 bp, Homo sapien
atttggtttgagaatacacctttgaatacttaa

SEQ ID NO: 308808 - DNA, 33 bp, Homo sapien
atttggtttgagaatatacctttgaatacttaa

SEQ ID NO: 308809 - DNA, 33 bp, Homo sapien
gttctgttgggttagcaaacagaattctgaaat

SEQ ID NO: 308810 - DNA, 33 bp, Homo sapien
gttctgttgggttagcgaacagaattctgaaat

SEQ ID NO: 308811 - DNA, 33 bp, Homo sapien
gcatctctctttacaaagcaaatattctaacct

SEQ ID NO: 308812 - DNA, 33 bp, Homo sapien
gcatctctctttacaaggcaaatattctaacct

SEQ ID NO: 308813 - DNA, 33 bp, Homo sapien
ctttggcttgctacaaccttatgattttgacca

SEQ ID NO: 308814 - DNA, 33 bp, Homo sapien
ctttggcttgctacaatcttatgattttgacca

SEQ ID NO: 308815 - DNA, 33 bp, Homo sapien
aatgtcagcaaaacctcaaagatctgattttgg

SEQ ID NO: 308816 - DNA, 33 bp, Homo sapien
aatgtcagcaaaaccttaaagatctgattttgg

SEQ ID NO: 308817 - DNA, 33 bp, Homo sapien
agatcataccagttcaagagcagatagcctgcc

SEQ ID NO: 308818 - DNA, 33 bp, Homo sapien
agatcataccagttcaggagcagatagcctgcc

SEQ ID NO: 308819 - DNA, 33 bp, Homo sapien
ggggataatgtgagtacggtaaaatatttaaaa

SEQ ID NO: 308820 - DNA, 33 bp, Homo sapien
ggggataatgtgagtatggtaaaatatttaaaa

SEQ ID NO: 308821 - DNA, 33 bp, Homo sapien
ctaggggaaagttaaacctcatgtcacaggact

SEQ ID NO: 308822 - DNA, 33 bp, Homo sapien
ctaggggaaagttaaatctcatgtcacaggact

SEQ ID NO: 308823 - DNA, 33 bp, Homo sapien
tacttcctcagctttacatccaaccagttgatg

SEQ ID NO: 308824 - DNA, 33 bp, Homo sapien
tacttcctcagctttatatccaaccagttgatg

SEQ ID NO: 308825 - DNA, 33 bp, Homo sapien
ataattatgccaataaagctagacaaaaaagca

SEQ ID NO: 308826 - DNA, 33 bp, Homo sapien
ataattatgccaataacgctagacaaaaaagca

SEQ ID NO: 308827 - DNA, 33 bp, Homo sapien
cagaataaatcatagacctaaaagcaaaaccaa

SEQ ID NO: 308828 - DNA, 33 bp, Homo sapien
cagaataaatcatagatctaaaagcaaaaccaa

SEQ ID NO: 308829 - DNA, 33 bp, Homo sapien
aatcgcactgactctacagattgtaaggctcac

SEQ ID NO: 308830 - DNA, 33 bp, Homo sapien
aatcgcactgactctatagattgtaaggctcac

SEQ ID NO: 308831 - DNA, 33 bp, Homo sapien
ggaatgcacgcaaagaacataactttgagttcc

SEQ ID NO: 308832 - DNA, 33 bp, Homo sapien
ggaatgcacgcaaagagcataactttgagttcc

SEQ ID NO: 308833 - DNA, 33 bp, Homo sapien
cgaatggggaattatacgtgaggtattgtaact

SEQ ID NO: 308834 - DNA, 33 bp, Homo sapien
cgaatggggaattatatgtgaggtattgtaact

SEQ ID NO: 308835 - DNA, 33 bp, Homo sapien
acactctcctgtgaaaattctacctaatgggta

SEQ ID NO: 308836 - DNA, 33 bp, Homo sapien
acactctcctgtgaaagttctacctaatgggta

SEQ ID NO: 308837 - DNA, 33 bp, Homo sapien
agtcagtacttagcccggagaacatctcaaaac

SEQ ID NO: 308838 - DNA, 33 bp, Homo sapien
agtcagtacttagccctgagaacatctcaaaac

SEQ ID NO: 308839 - DNA, 33 bp, Homo sapien
atttctctactgttgaaataaggggaaagaaga

SEQ ID NO: 308840 - DNA, 33 bp, Homo sapien
atttctctactgttgagataaggggaaagaaga

SEQ ID NO: 308841 - DNA, 33 bp, Homo sapien
ctctcagcctttgagtcaatttaaatcatgctt

SEQ ID NO: 308842 - DNA, 33 bp, Homo sapien
ctctcagcctttgagtgaatttaaatcatgctt

SEQ ID NO: 308843 - DNA, 33 bp, Homo sapien
gagtgagatgcctcacaaagcgagatgcctcgt

SEQ ID NO: 308844 - DNA, 33 bp, Homo sapien
gagtgagatgcctcacgaagcgagatgcctcgt

SEQ ID NO: 308845 - DNA, 33 bp, Homo sapien
cagctagaattccatccaatagaagacagaggg

SEQ ID NO: 308846 - DNA, 33 bp, Homo sapien
cagctagaattccatcgaatagaagacagaggg

SEQ ID NO: 308847 - DNA, 33 bp, Homo sapien
atgatttcagctgcaaaccatagaaaaaccaag

SEQ ID NO: 308848 - DNA, 33 bp, Homo sapien
atgatttcagctgcaagccatagaaaaaccaag

SEQ ID NO: 308849 - DNA, 33 bp, Homo sapien
tgcaggggctacacagacatcaaggctggctga

SEQ ID NO: 308850 - DNA, 33 bp, Homo sapien
tgcaggggctacacaggcatcaaggctggctga

SEQ ID NO: 308851 - DNA, 33 bp, Homo sapien
ggggacaaggttcccacgatacagcagcaataa

SEQ ID NO: 308852 - DNA, 33 bp, Homo sapien
ggggacaaggttcccatgatacagcagcaataa

SEQ ID NO: 308853 - DNA, 33 bp, Homo sapien
cagagcatctgttaaacctatgtgaggagaaaa

SEQ ID NO: 308854 - DNA, 33 bp, Homo sapien
cagagcatctgttaaatctatgtgaggagaaaa

SEQ ID NO: 308855 - DNA, 33 bp, Homo sapien
ctttttataaatggaaagcaagtttgtctgcaa

SEQ ID NO: 308856 - DNA, 33 bp, Homo sapien
ctttttataaatggaatgcaagtttgtctgcaa

SEQ ID NO: 308857 - DNA, 33 bp, Homo sapien
gagttgcactacaatacggtttgagttgctacc

SEQ ID NO: 308858 - DNA, 33 bp, Homo sapien
gagttgcactacaatatggtttgagttgctacc

SEQ ID NO: 308859 - DNA, 33 bp, Homo sapien
gtaaatgataagaaaacgttgtaaaatcaagtt

SEQ ID NO: 308860 - DNA, 33 bp, Homo sapien
gtaaatgataagaaaatgttgtaaaatcaagtt

SEQ ID NO: 308861 - DNA, 33 bp, Homo sapien
agaacagatgtagtgacaaagctaggagtggta

SEQ ID NO: 308862 - DNA, 33 bp, Homo sapien
agaacagatgtagtgagaaagctaggagtggta

SEQ ID NO: 308863 - DNA, 33 bp, Homo sapien
cggtgctgcttttccactgcgtgtaattctggg

SEQ ID NO: 308864 - DNA, 33 bp, Homo sapien
cggtgctgcttttccattgcgtgtaattctggg

SEQ ID NO: 308865 - DNA, 33 bp, Homo sapien
ggtgtaccttcaggcaaaggtaggcttcaacaa

SEQ ID NO: 308866 - DNA, 33 bp, Homo sapien
ggtgtaccttcaggcacaggtaggcttcaacaa

SEQ ID NO: 308867 - DNA, 33 bp, Homo sapien
cattctacccaggtataaagtaggcatcctaac

SEQ ID NO: 308868 - DNA, 33 bp, Homo sapien
cattctacccaggtatgaagtaggcatcctaac

SEQ ID NO: 308869 - DNA, 33 bp, Homo sapien
gctaaccacttctcatcaccacttcgactgtgg

SEQ ID NO: 308870 - DNA, 33 bp, Homo sapien
gctaaccacttctcattaccacttcgactgtgg

SEQ ID NO: 308871 - DNA, 33 bp, Homo sapien
ctcctttgctcatgccacatgatggcctccttg

SEQ ID NO: 308872 - DNA, 33 bp, Homo sapien
ctcctttgctcatgccgcatgatggcctccttg

SEQ ID NO: 308873 - DNA, 33 bp, Homo sapien
acattttttgccaacacctaattattatctaac

SEQ ID NO: 308874 - DNA, 33 bp, Homo sapien
acattttttgccaacatctaattattatctaac

SEQ ID NO: 308875 - DNA, 33 bp, Homo sapien
atatcactagagaagccctactataactgaatt

SEQ ID NO: 308876 - DNA, 33 bp, Homo sapien
atatcactagagaagctctactataactgaatt

SEQ ID NO: 308877 - DNA, 33 bp, Homo sapien
accaaagtgaaatacactataaaatatgcagca

SEQ ID NO: 308878 - DNA, 33 bp, Homo sapien
accaaagtgaaatacattataaaatatgcagca

SEQ ID NO: 308879 - DNA, 33 bp, Homo sapien
agtgaactaattgaatcacagaagaggcataaa

SEQ ID NO: 308880 - DNA, 33 bp, Homo sapien
agtgaactaattgaattacagaagaggcataaa

SEQ ID NO: 308881 - DNA, 33 bp, Homo sapien
gatcaataggtggcacacagggtaaaaagtgca

SEQ ID NO: 308882 - DNA, 33 bp, Homo sapien
gatcaataggtggcacgcagggtaaaaagtgca

SEQ ID NO: 308883 - DNA, 33 bp, Homo sapien
aaaacatgggacactccagttcattgcagcttc

SEQ ID NO: 308884 - DNA, 33 bp, Homo sapien
aaaacatgggacactctagttcattgcagcttc

SEQ ID NO: 308885 - DNA, 33 bp, Homo sapien
ttagtaatatgtatgacgagaacttgtgtgtga

SEQ ID NO: 308886 - DNA, 33 bp, Homo sapien
ttagtaatatgtatgatgagaacttgtgtgtga

SEQ ID NO: 308887 - DNA, 33 bp, Homo sapien
agaaaacaaagcaaaaaacaggtcgcacacaca

SEQ ID NO: 308888 - DNA, 33 bp, Homo sapien
agaaaacaaagcaaaatacaggtcgcacacaca

SEQ ID NO: 308889 - DNA, 33 bp, Homo sapien
ctcagaaggccttagcgcctggatttatttagt

SEQ ID NO: 308890 - DNA, 33 bp, Homo sapien
ctcagaaggccttagctcctggatttatttagt

SEQ ID NO: 308891 - DNA, 33 bp, Homo sapien
ttagaccagcgggtagaaagtgaggtcagtgtg

SEQ ID NO: 308892 - DNA, 33 bp, Homo sapien
ttagaccagcgggtagcaagtgaggtcagtgtg

SEQ ID NO: 308893 - DNA, 33 bp, Homo sapien
tctcacggcccagcacaaaagctagtgggacaa

SEQ ID NO: 308894 - DNA, 33 bp, Homo sapien
tctcacggcccagcacgaaagctagtgggacaa

SEQ ID NO: 308895 - DNA, 33 bp, Homo sapien
tccatttcagcactaaagccattattttcaggt

SEQ ID NO: 308896 - DNA, 33 bp, Homo sapien
tccatttcagcactaaggccattattttcaggt

SEQ ID NO: 308897 - DNA, 33 bp, Homo sapien
tcatactcacagaaaacgaagcacctgcctagt

SEQ ID NO: 308898 - DNA, 33 bp, Homo sapien
tcatactcacagaaaaggaagcacctgcctagt

SEQ ID NO: 308899 - DNA, 33 bp, Homo sapien
aaacttgttcaggtgtaaaagatgccactgtgg

SEQ ID NO: 308900 - DNA, 33 bp, Homo sapien
aaacttgttcaggtgtgaaagatgccactgtgg

SEQ ID NO: 308901 - DNA, 33 bp, Homo sapien
cctgcggagatgcagtcaatctagagtagaacc

SEQ ID NO: 308902 - DNA, 33 bp, Homo sapien
cctgcggagatgcagtgaatctagagtagaacc

SEQ ID NO: 308903 - DNA, 33 bp, Homo sapien
tgattgttatggcccaacattaatcataggtgc

SEQ ID NO: 308904 - DNA, 33 bp, Homo sapien
tgattgttatggcccagcattaatcataggtgc

SEQ ID NO: 308905 - DNA, 33 bp, Homo sapien
cctaagagaagataacacgctgagccatgccca

SEQ ID NO: 308906 - DNA, 33 bp, Homo sapien
cctaagagaagataacgcgctgagccatgccca

SEQ ID NO: 308907 - DNA, 33 bp, Homo sapien
aaaagaacagtccagaagtaataactttaatga

SEQ ID NO: 308908 - DNA, 33 bp, Homo sapien
aaaagaacagtccagatgtaataactttaatga

SEQ ID NO: 308909 - DNA, 33 bp, Homo sapien
cattttcaggttgatacgtcatgcttcttcatg

SEQ ID NO: 308910 - DNA, 33 bp, Homo sapien
cattttcaggttgatatgtcatgcttcttcatg

SEQ ID NO: 308911 - DNA, 33 bp, Homo sapien
ctttcctcacattttaaaatctgtgtaatgtat

SEQ ID NO: 308912 - DNA, 33 bp, Homo sapien
ctttcctcacattttataatctgtgtaatgtat

SEQ ID NO: 308913 - DNA, 33 bp, Homo sapien
gtctctttcaccaagacggttaaaaatgagttg

SEQ ID NO: 308914 - DNA, 33 bp, Homo sapien
gtctctttcaccaagatggttaaaaatgagttg

SEQ ID NO: 308915 - DNA, 33 bp, Homo sapien
agatttgattaactcactgaaggaaacactgag

SEQ ID NO: 308916 - DNA, 33 bp, Homo sapien
agatttgattaactcattgaaggaaacactgag

SEQ ID NO: 308917 - DNA, 33 bp, Homo sapien
caggatgaatttgaggccattaagagagttgct

SEQ ID NO: 308918 - DNA, 33 bp, Homo sapien
caggatgaatttgaggtcattaagagagttgct

SEQ ID NO: 308919 - DNA, 33 bp, Homo sapien
cacgtcagttttgagccattatttaacaaagag

SEQ ID NO: 308920 - DNA, 33 bp, Homo sapien
cacgtcagttttgagctattatttaacaaagag

SEQ ID NO: 308921 - DNA, 33 bp, Homo sapien
gcaaaacaaagtgtaaagtggcttggtgccatg

SEQ ID NO: 308922 - DNA, 33 bp, Homo sapien
gcaaaacaaagtgtaatgtggcttggtgccatg

SEQ ID NO: 308923 - DNA, 33 bp, Homo sapien
gaatgctgttttggcaagaggtttggtaaatca

SEQ ID NO: 308924 - DNA, 33 bp, Homo sapien
gaatgctgttttggcacgaggtttggtaaatca

SEQ ID NO: 308925 - DNA, 33 bp, Homo sapien
atagatacaaaactgccgacacctcattactat

SEQ ID NO: 308926 - DNA, 33 bp, Homo sapien
atagatacaaaactgctgacacctcattactat

SEQ ID NO: 308927 - DNA, 33 bp, Homo sapien
ttgtttcttccctatccctcttcgtggcagcgg

SEQ ID NO: 308928 - DNA, 33 bp, Homo sapien
ttgtttcttccctatctctcttcgtggcagcgg

SEQ ID NO: 308929 - DNA, 33 bp, Homo sapien
tgtcgttgctgtctgacaaatgggatgcgattt

SEQ ID NO: 308930 - DNA, 33 bp, Homo sapien
tgtcgttgctgtctgagaaatgggatgcgattt

SEQ ID NO: 308931 - DNA, 33 bp, Homo sapien
tcttcggtttcttctccctctccaaagactttt

SEQ ID NO: 308932 - DNA, 33 bp, Homo sapien
tcttcggtttcttctctctctccaaagactttt

SEQ ID NO: 308933 - DNA, 33 bp, Homo sapien
ttctaactttcatgaacaacctattaaagagat

SEQ ID NO: 308934 - DNA, 33 bp, Homo sapien
ttctaactttcatgaagaacctattaaagagat

SEQ ID NO: 308935 - DNA, 33 bp, Homo sapien
ttgacaaggtggcttaaagaataagcatttctc

SEQ ID NO: 308936 - DNA, 33 bp, Homo sapien
ttgacaaggtggcttagagaataagcatttctc

SEQ ID NO: 308937 - DNA, 33 bp, Homo sapien
gtaaacagcaaaaaaacagccgtttccaaatta

SEQ ID NO: 308938 - DNA, 33 bp, Homo sapien
gtaaacagcaaaaaaatagccgtttccaaatta

SEQ ID NO: 308939 - DNA, 33 bp, Homo sapien
ttttgaggtggtccaactatgataaaagtctgt

SEQ ID NO: 308940 - DNA, 33 bp, Homo sapien
ttttgaggtggtccaattatgataaaagtctgt

SEQ ID NO: 308941 - DNA, 33 bp, Homo sapien
ctatgcttcttggataccttgtttgcgtcaata

SEQ ID NO: 308942 - DNA, 33 bp, Homo sapien
ctatgcttcttggatatcttgtttgcgtcaata

SEQ ID NO: 308943 - DNA, 33 bp, Homo sapien
ttggcttctttctgatcacatttggtaactatg

SEQ ID NO: 308944 - DNA, 33 bp, Homo sapien
ttggcttctttctgatgacatttggtaactatg

SEQ ID NO: 308945 - DNA, 33 bp, Homo sapien
taattggttcacttagcccaaatctcccagggt

SEQ ID NO: 308946 - DNA, 33 bp, Homo sapien
taattggttcacttaggccaaatctcccagggt

SEQ ID NO: 308947 - DNA, 33 bp, Homo sapien
ggagaacatctacgcaaggtccaacctggtaag

SEQ ID NO: 308948 - DNA, 33 bp, Homo sapien
ggagaacatctacgcagggtccaacctggtaag

SEQ ID NO: 308949 - DNA, 33 bp, Homo sapien
gcaagttaggattttacattagctcagggactc

SEQ ID NO: 308950 - DNA, 33 bp, Homo sapien
gcaagttaggattttatattagctcagggactc

SEQ ID NO: 308951 - DNA, 33 bp, Homo sapien
tgatcttgatgagagaagcttcagtggaatggt

SEQ ID NO: 308952 - DNA, 33 bp, Homo sapien
tgatcttgatgagagacgcttcagtggaatggt

SEQ ID NO: 308953 - DNA, 33 bp, Homo sapien
aaggagttctcaaacacaatcttcttcgacaga

SEQ ID NO: 308954 - DNA, 33 bp, Homo sapien
aaggagttctcaaacataatcttcttcgacaga

SEQ ID NO: 308955 - DNA, 33 bp, Homo sapien
taattataaactgtgaaagcaatttataatttc

SEQ ID NO: 308956 - DNA, 33 bp, Homo sapien
taattataaactgtgacagcaatttataatttc

SEQ ID NO: 308957 - DNA, 33 bp, Homo sapien
gacttctgaaggaagacgataagccaacccatt

SEQ ID NO: 308958 - DNA, 33 bp, Homo sapien
gacttctgaaggaagatgataagccaacccatt

SEQ ID NO: 308959 - DNA, 33 bp, Homo sapien
gttatgaacacaggaaatcatttaaaactgaga

SEQ ID NO: 308960 - DNA, 33 bp, Homo sapien
gttatgaacacaggaagtcatttaaaactgaga

SEQ ID NO: 308961 - DNA, 33 bp, Homo sapien
aaaacatgattctaagaaggagaccataggctt

SEQ ID NO: 308962 - DNA, 33 bp, Homo sapien
aaaacatgattctaagtaggagaccataggctt

SEQ ID NO: 308963 - DNA, 33 bp, Homo sapien
tgcagacacctcaacactgcatttctgttcatc

SEQ ID NO: 308964 - DNA, 33 bp, Homo sapien
tgcagacacctcaacattgcatttctgttcatc

SEQ ID NO: 308965 - DNA, 33 bp, Homo sapien
acactggagtctggtacagtcagtcaaggccca

SEQ ID NO: 308966 - DNA, 33 bp, Homo sapien
acactggagtctggtatagtcagtcaaggccca

SEQ ID NO: 308967 - DNA, 33 bp, Homo sapien
gtcacatgaaaacacgcatgaatgaataaaaca

SEQ ID NO: 308968 - DNA, 33 bp, Homo sapien
gtcacatgaaaacacggatgaatgaataaaaca

SEQ ID NO: 308969 - DNA, 33 bp, Homo sapien
gatcctgagctacccacgaactcagaatccctg

SEQ ID NO: 308970 - DNA, 33 bp, Homo sapien
gatcctgagctacccatgaactcagaatccctg

SEQ ID NO: 308971 - DNA, 33 bp, Homo sapien
gtatgatgatttaccaggaccaatggccaattg

SEQ ID NO: 308972 - DNA, 33 bp, Homo sapien
gtatgatgatttaccatgaccaatggccaattg

SEQ ID NO: 308973 - DNA, 33 bp, Homo sapien
agaactagtctttctccaagatgctaggaatta

SEQ ID NO: 308974 - DNA, 33 bp, Homo sapien
agaactagtctttctcgaagatgctaggaatta

SEQ ID NO: 308975 - DNA, 33 bp, Homo sapien
gcaaagtttaaaatcacggccataccagaagaa

SEQ ID NO: 308976 - DNA, 33 bp, Homo sapien
gcaaagtttaaaatcatggccataccagaagaa

SEQ ID NO: 308977 - DNA, 33 bp, Homo sapien
aaggatgttgaagcacaaaagcatgaactcgaa

SEQ ID NO: 308978 - DNA, 33 bp, Homo sapien
aaggatgttgaagcacgaaagcatgaactcgaa

SEQ ID NO: 308979 - DNA, 33 bp, Homo sapien
tatggaatgcctttaaatatgcacacatacaca

SEQ ID NO: 308980 - DNA, 33 bp, Homo sapien
tatggaatgcctttaattatgcacacatacaca

SEQ ID NO: 308981 - DNA, 33 bp, Homo sapien
gtattttctggaaatacagaagaggtaatttgt

SEQ ID NO: 308982 - DNA, 33 bp, Homo sapien
gtattttctggaaatatagaagaggtaatttgt

SEQ ID NO: 308983 - DNA, 33 bp, Homo sapien
ataaatccatctcttccaatttgaaaaatactt

SEQ ID NO: 308984 - DNA, 33 bp, Homo sapien
ataaatccatctcttctaatttgaaaaatactt

SEQ ID NO: 308985 - DNA, 33 bp, Homo sapien
gaagtcaaaacactgacagattaaagagcaaga

SEQ ID NO: 308986 - DNA, 33 bp, Homo sapien
gaagtcaaaacactgatagattaaagagcaaga

SEQ ID NO: 308987 - DNA, 33 bp, Homo sapien
aaagcatagctgtttaggtttgaaaagatggtt

SEQ ID NO: 308988 - DNA, 33 bp, Homo sapien
aaagcatagctgtttatgtttgaaaagatggtt

SEQ ID NO: 308989 - DNA, 33 bp, Homo sapien
ctacaagaaggagacacgagaacatggctctta

SEQ ID NO: 308990 - DNA, 33 bp, Homo sapien
ctacaagaaggagacaggagaacatggctctta

SEQ ID NO: 308991 - DNA, 33 bp, Homo sapien
tgcagacatccttggacgtccgttcctctggat

SEQ ID NO: 308992 - DNA, 33 bp, Homo sapien
tgcagacatccttggaggtccgttcctctggat

SEQ ID NO: 308993 - DNA, 33 bp, Homo sapien
gattgtaaggtagcaaatgaacacatgaaaatg

SEQ ID NO: 308994 - DNA, 33 bp, Homo sapien
gattgtaaggtagcaagtgaacacatgaaaatg

SEQ ID NO: 308995 - DNA, 33 bp, Homo sapien
gcattaggtgcccagagattggattgtaaggta

SEQ ID NO: 308996 - DNA, 33 bp, Homo sapien
gcattaggtgcccagatattggattgtaaggta

SEQ ID NO: 308997 - DNA, 33 bp, Homo sapien
gaggctaatggtcattaaaatttgagaaccact

SEQ ID NO: 308998 - DNA, 33 bp, Homo sapien
gaggctaatggtcattgaaatttgagaaccact

SEQ ID NO: 308999 - DNA, 33 bp, Homo sapien
ctaaaagatgggcaaaagctctgcaaggacctc

SEQ ID NO: 309000 - DNA, 33 bp, Homo sapien
ctaaaagatgggcaaaggctctgcaaggacctc

SEQ ID NO: 309001 - DNA, 33 bp, Homo sapien
tgtagttttctggccacaggttgttgggaatgg

SEQ ID NO: 309002 - DNA, 33 bp, Homo sapien
tgtagttttctggccagaggttgttgggaatgg

SEQ ID NO: 309003 - DNA, 33 bp, Homo sapien
tctctagccaggatgacgtccaagcctaactgg

SEQ ID NO: 309004 - DNA, 33 bp, Homo sapien
tctctagccaggatgatgtccaagcctaactgg

SEQ ID NO: 309005 - DNA, 33 bp, Homo sapien
agcactgtctgcctgaaggtaattgactggggc

SEQ ID NO: 309006 - DNA, 33 bp, Homo sapien
agcactgtctgcctgagggtaattgactggggc

SEQ ID NO: 309007 - DNA, 33 bp, Homo sapien
attcccttgggttgaacgttatgccggtctctt

SEQ ID NO: 309008 - DNA, 33 bp, Homo sapien
attcccttgggttgaatgttatgccggtctctt

SEQ ID NO: 309009 - DNA, 33 bp, Homo sapien
tagggtgacagagagtcaaaggcactgtccagg

SEQ ID NO: 309010 - DNA, 33 bp, Homo sapien
tagggtgacagagagtgaaaggcactgtccagg

SEQ ID NO: 309011 - DNA, 33 bp, Homo sapien
atttaaatacgaattcacacgtgtatattttga

SEQ ID NO: 309012 - DNA, 33 bp, Homo sapien
atttaaatacgaattcgcacgtgtatattttga

SEQ ID NO: 309013 - DNA, 33 bp, Homo sapien
tagcacaacagggtgactataacctgtgataac

SEQ ID NO: 309014 - DNA, 33 bp, Homo sapien
tagcacaacagggtgattataacctgtgataac

SEQ ID NO: 309015 - DNA, 33 bp, Homo sapien
atacgtaataatcacaacttggagaatggggta

SEQ ID NO: 309016 - DNA, 33 bp, Homo sapien
atacgtaataatcacatcttggagaatggggta

SEQ ID NO: 309017 - DNA, 33 bp, Homo sapien
ccttctatagtgaagaagcatttccgtaagtta

SEQ ID NO: 309018 - DNA, 33 bp, Homo sapien
ccttctatagtgaagaggcatttccgtaagtta

SEQ ID NO: 309019 - DNA, 33 bp, Homo sapien
gttatcaagaactttaccaaaagtgcatcctct

SEQ ID NO: 309020 - DNA, 33 bp, Homo sapien
gttatcaagaactttatcaaaagtgcatcctct

SEQ ID NO: 309021 - DNA, 33 bp, Homo sapien
caacgccgctgccccaaaccttgcgggccattt

SEQ ID NO: 309022 - DNA, 33 bp, Homo sapien
caacgccgctgccccagaccttgcgggccattt

SEQ ID NO: 309023 - DNA, 33 bp, Homo sapien
aggaaagaccatgaaacactactgtgtgtgatc

SEQ ID NO: 309024 - DNA, 33 bp, Homo sapien
aggaaagaccatgaaatactactgtgtgtgatc

SEQ ID NO: 309025 - DNA, 33 bp, Homo sapien
gacgtcctctataacccccagcctgaaaggggc

SEQ ID NO: 309026 - DNA, 33 bp, Homo sapien
gacgtcctctataacctccagcctgaaaggggc

SEQ ID NO: 309027 - DNA, 33 bp, Homo sapien
acctgagataggccaacggtaatcgagaaaggg

SEQ ID NO: 309028 - DNA, 33 bp, Homo sapien
acctgagataggccaatggtaatcgagaaaggg

SEQ ID NO: 309029 - DNA, 33 bp, Homo sapien
gagaaggaggttggaaataagggttgaagaaat

SEQ ID NO: 309030 - DNA, 33 bp, Homo sapien
gagaaggaggttggaagtaagggttgaagaaat

SEQ ID NO: 309031 - DNA, 33 bp, Homo sapien
atgtctggaagttagaacaggactataccaaat

SEQ ID NO: 309032 - DNA, 33 bp, Homo sapien
atgtctggaagttagatcaggactataccaaat

SEQ ID NO: 309033 - DNA, 33 bp, Homo sapien
atcttagcaatgatgaactacttcaaggtcacc

SEQ ID NO: 309034 - DNA, 33 bp, Homo sapien
atcttagcaatgatgagctacttcaaggtcacc

SEQ ID NO: 309035 - DNA, 33 bp, Homo sapien
ggctgttccttgcctggaacacctttcccatct

SEQ ID NO: 309036 - DNA, 33 bp, Homo sapien
ggctgttccttgcctgtaacacctttcccatct

SEQ ID NO: 309037 - DNA, 33 bp, Homo sapien
tgaactgagtactgaaaggaatgagagatcatc

SEQ ID NO: 309038 - DNA, 33 bp, Homo sapien
tgaactgagtactgaagggaatgagagatcatc

SEQ ID NO: 309039 - DNA, 33 bp, Homo sapien
cttttttccttatgcccgcttatctactcagtt

SEQ ID NO: 309040 - DNA, 33 bp, Homo sapien
cttttttccttatgcctgcttatctactcagtt

SEQ ID NO: 309041 - DNA, 33 bp, Homo sapien
tgaatggctaatgaaccgggtttctgtaccaga

SEQ ID NO: 309042 - DNA, 33 bp, Homo sapien
tgaatggctaatgaactgggtttctgtaccaga

SEQ ID NO: 309043 - DNA, 33 bp, Homo sapien
agctcaataaagtgaaatgtaatagaatgaggt

SEQ ID NO: 309044 - DNA, 33 bp, Homo sapien
agctcaataaagtgaagtgtaatagaatgaggt

SEQ ID NO: 309045 - DNA, 33 bp, Homo sapien
gttgtaccacttaagcgcttttgcgagtctcag

SEQ ID NO: 309046 - DNA, 33 bp, Homo sapien
gttgtaccacttaagctcttttgcgagtctcag

SEQ ID NO: 309047 - DNA, 33 bp, Homo sapien
tgcttcagtagggttaccttctaatacagaatg

SEQ ID NO: 309048 - DNA, 33 bp, Homo sapien
tgcttcagtagggttatcttctaatacagaatg

SEQ ID NO: 309049 - DNA, 33 bp, Homo sapien
tctgtctaaactgggaaatccatcttctgctcc

SEQ ID NO: 309050 - DNA, 33 bp, Homo sapien
tctgtctaaactgggacatccatcttctgctcc

SEQ ID NO: 309051 - DNA, 33 bp, Homo sapien
aagttttaagaccaacggtgctcttggcctaac

SEQ ID NO: 309052 - DNA, 33 bp, Homo sapien
aagttttaagaccaactgtgctcttggcctaac

SEQ ID NO: 309053 - DNA, 33 bp, Homo sapien
ccttgtacttttttcacgcctcctgactcttcc

SEQ ID NO: 309054 - DNA, 33 bp, Homo sapien
ccttgtacttttttcatgcctcctgactcttcc

SEQ ID NO: 309055 - DNA, 33 bp, Homo sapien
attcattcaccgtaccacctcattccataataa

SEQ ID NO: 309056 - DNA, 33 bp, Homo sapien
attcattcaccgtaccgcctcattccataataa

SEQ ID NO: 309057 - DNA, 33 bp, Homo sapien
taaacattaacttagaactgtcttaattgtagc

SEQ ID NO: 309058 - DNA, 33 bp, Homo sapien
taaacattaacttagacctgtcttaattgtagc

SEQ ID NO: 309059 - DNA, 33 bp, Homo sapien
tgaccagaagactcaccgataatataaacataa

SEQ ID NO: 309060 - DNA, 33 bp, Homo sapien
tgaccagaagactcactgataatataaacataa

SEQ ID NO: 309061 - DNA, 33 bp, Homo sapien
tgacattaggtgtagacagtttcctttcaatat

SEQ ID NO: 309062 - DNA, 33 bp, Homo sapien
tgacattaggtgtagatagtttcctttcaatat

SEQ ID NO: 309063 - DNA, 33 bp, Homo sapien
tgtgtcaaaggacttaggattggacttaggttg

SEQ ID NO: 309064 - DNA, 33 bp, Homo sapien
tgtgtcaaaggacttatgattggacttaggttg

SEQ ID NO: 309065 - DNA, 33 bp, Homo sapien
taatagatgtattagaataatagatgtactgat

SEQ ID NO: 309066 - DNA, 33 bp, Homo sapien
taatagatgtattagattaatagatgtactgat

SEQ ID NO: 309067 - DNA, 33 bp, Homo sapien
aaactcactaattcaaaaggatggcctcagcaa

SEQ ID NO: 309068 - DNA, 33 bp, Homo sapien
aaactcactaattcaagaggatggcctcagcaa

SEQ ID NO: 309069 - DNA, 33 bp, Homo sapien
cgagttatagaatttacggtaacacaggaaaag

SEQ ID NO: 309070 - DNA, 33 bp, Homo sapien
cgagttatagaatttatggtaacacaggaaaag

SEQ ID NO: 309071 - DNA, 33 bp, Homo sapien
aaggaccaccagctaccggagcatgagttccca

SEQ ID NO: 309072 - DNA, 33 bp, Homo sapien
aaggaccaccagctactggagcatgagttccca

SEQ ID NO: 309073 - DNA, 33 bp, Homo sapien
ccaagttatcattacacggtttggtactcagta

SEQ ID NO: 309074 - DNA, 33 bp, Homo sapien
ccaagttatcattacatggtttggtactcagta

SEQ ID NO: 309075 - DNA, 33 bp, Homo sapien
atgtaaaaacacattccaagtatcatgtcatct

SEQ ID NO: 309076 - DNA, 33 bp, Homo sapien
atgtaaaaacacattcgaagtatcatgtcatct

SEQ ID NO: 309077 - DNA, 33 bp, Homo sapien
aacgagtcacatcatcgctagtccccaaaatgg

SEQ ID NO: 309078 - DNA, 33 bp, Homo sapien
aacgagtcacatcatctctagtccccaaaatgg

SEQ ID NO: 309079 - DNA, 33 bp, Homo sapien
cgacaagagtttgcaacgtagagggatgagggt

SEQ ID NO: 309080 - DNA, 33 bp, Homo sapien
cgacaagagtttgcaatgtagagggatgagggt

SEQ ID NO: 309081 - DNA, 33 bp, Homo sapien
aaaaaagaacaattaaatcacagttcagagacc

SEQ ID NO: 309082 - DNA, 33 bp, Homo sapien
aaaaaagaacaattaactcacagttcagagacc

SEQ ID NO: 309083 - DNA, 33 bp, Homo sapien
tcaccacaggagataccgatattcctatagcac

SEQ ID NO: 309084 - DNA, 33 bp, Homo sapien
tcaccacaggagatactgatattcctatagcac

SEQ ID NO: 309085 - DNA, 33 bp, Homo sapien
aaaggaccaatatatcaaggacaacgtcatcat

SEQ ID NO: 309086 - DNA, 33 bp, Homo sapien
aaaggaccaatatatcgaggacaacgtcatcat

SEQ ID NO: 309087 - DNA, 33 bp, Homo sapien
tgctttttctctcctccactttactatatctgt

SEQ ID NO: 309088 - DNA, 33 bp, Homo sapien
tgctttttctctcctctactttactatatctgt

SEQ ID NO: 309089 - DNA, 33 bp, Homo sapien
acaatgagatatcatcacatgcctgctagaatg

SEQ ID NO: 309090 - DNA, 33 bp, Homo sapien
acaatgagatatcatcgcatgcctgctagaatg

SEQ ID NO: 309091 - DNA, 33 bp, Homo sapien
tagaattgtttggtacacagacattggtaacat

SEQ ID NO: 309092 - DNA, 33 bp, Homo sapien
tagaattgtttggtacgcagacattggtaacat

SEQ ID NO: 309093 - DNA, 33 bp, Homo sapien
aaaggaattgagaaatcaaagtccatgaagaca

SEQ ID NO: 309094 - DNA, 33 bp, Homo sapien
aaaggaattgagaaattaaagtccatgaagaca

SEQ ID NO: 309095 - DNA, 33 bp, Homo sapien
ctcatttaccagttcacgttgtcactggctccc

SEQ ID NO: 309096 - DNA, 33 bp, Homo sapien
ctcatttaccagttcatgttgtcactggctccc

SEQ ID NO: 309097 - DNA, 33 bp, Homo sapien
aaatatgttttctcaacgaaggacacaaagtta

SEQ ID NO: 309098 - DNA, 33 bp, Homo sapien
aaatatgttttctcaatgaaggacacaaagtta

SEQ ID NO: 309099 - DNA, 33 bp, Homo sapien
actgaaacagttgttacggtggcttgcattaat

SEQ ID NO: 309100 - DNA, 33 bp, Homo sapien
actgaaacagttgttatggtggcttgcattaat

SEQ ID NO: 309101 - DNA, 33 bp, Homo sapien
agctgcagacacttaacatgggaaagcagccag

SEQ ID NO: 309102 - DNA, 33 bp, Homo sapien
agctgcagacacttaatatgggaaagcagccag

SEQ ID NO: 309103 - DNA, 33 bp, Homo sapien
taaaaagctgatcataatacataatacatagaa

SEQ ID NO: 309104 - DNA, 33 bp, Homo sapien
taaaaagctgatcatagtacataatacatagaa

SEQ ID NO: 309105 - DNA, 33 bp, Homo sapien
ctttattttatattgaaccagcacattttttct

SEQ ID NO: 309106 - DNA, 33 bp, Homo sapien
ctttattttatattgacccagcacattttttct

SEQ ID NO: 309107 - DNA, 33 bp, Homo sapien
taacattgatttaataaccagtttcagttcctg

SEQ ID NO: 309108 - DNA, 33 bp, Homo sapien
taacattgatttaatatccagtttcagttcctg

SEQ ID NO: 309109 - DNA, 33 bp, Homo sapien
ggaaagacagaataaacgcttgcttctatcctt

SEQ ID NO: 309110 - DNA, 33 bp, Homo sapien
ggaaagacagaataaatgcttgcttctatcctt

SEQ ID NO: 309111 - DNA, 33 bp, Homo sapien
acaagtctggatggtacatcttgctacacccta

SEQ ID NO: 309112 - DNA, 33 bp, Homo sapien
acaagtctggatggtatatcttgctacacccta

SEQ ID NO: 309113 - DNA, 33 bp, Homo sapien
tacactaaattggtaccgagggagtgaggcact

SEQ ID NO: 309114 - DNA, 33 bp, Homo sapien
tacactaaattggtactgagggagtgaggcact

SEQ ID NO: 309115 - DNA, 33 bp, Homo sapien
gtaacaaatgtatcacagtaatgcaagatgtta

SEQ ID NO: 309116 - DNA, 33 bp, Homo sapien
gtaacaaatgtatcactgtaatgcaagatgtta

SEQ ID NO: 309117 - DNA, 33 bp, Homo sapien
cagttgagaaaataaactactgtgatgttaatg

SEQ ID NO: 309118 - DNA, 33 bp, Homo sapien
cagttgagaaaataaattactgtgatgttaatg

SEQ ID NO: 309119 - DNA, 33 bp, Homo sapien
gccactacattatttcccttgcatctgaccata

SEQ ID NO: 309120 - DNA, 33 bp, Homo sapien
gccactacattatttctcttgcatctgaccata

SEQ ID NO: 309121 - DNA, 33 bp, Homo sapien
aaaagctcttaaataaagtcccatttatcaact

SEQ ID NO: 309122 - DNA, 33 bp, Homo sapien
aaaagctcttaaataaggtcccatttatcaact

SEQ ID NO: 309123 - DNA, 33 bp, Homo sapien
ctgatcattagagaaacgtgaatcaaaactaca

SEQ ID NO: 309124 - DNA, 33 bp, Homo sapien
ctgatcattagagaaatgtgaatcaaaactaca

SEQ ID NO: 309125 - DNA, 33 bp, Homo sapien
cagccacaactggggccacaactggggtctagt

SEQ ID NO: 309126 - DNA, 33 bp, Homo sapien
cagccacaactggggctacaactggggtctagt

SEQ ID NO: 309127 - DNA, 33 bp, Homo sapien
atgagagtctgagccacaacaaaaattagaatg

SEQ ID NO: 309128 - DNA, 33 bp, Homo sapien
atgagagtctgagccataacaaaaattagaatg

SEQ ID NO: 309129 - DNA, 33 bp, Homo sapien
agccctacaagacatacaggcaaactagtgcta

SEQ ID NO: 309130 - DNA, 33 bp, Homo sapien
agccctacaagacatataggcaaactagtgcta

SEQ ID NO: 309131 - DNA, 33 bp, Homo sapien
cagggaattgaaactcaagagcttagcttcaaa

SEQ ID NO: 309132 - DNA, 33 bp, Homo sapien
cagggaattgaaactcgagagcttagcttcaaa

SEQ ID NO: 309133 - DNA, 33 bp, Homo sapien
ttacaaggtgaagccgaaaacgtacagtaaaaa

SEQ ID NO: 309134 - DNA, 33 bp, Homo sapien
ttacaaggtgaagccgcaaacgtacagtaaaaa

SEQ ID NO: 309135 - DNA, 33 bp, Homo sapien
ctgaccatgcagaggggagtagaaccaagcact

SEQ ID NO: 309136 - DNA, 33 bp, Homo sapien
ctgaccatgcagagggtagtagaaccaagcact

SEQ ID NO: 309137 - DNA, 33 bp, Homo sapien
aatacacttcaagaagcctcctcctttgtttgt

SEQ ID NO: 309138 - DNA, 33 bp, Homo sapien
aatacacttcaagaaggctcctcctttgtttgt

SEQ ID NO: 309139 - DNA, 33 bp, Homo sapien
tcatcattttcaaaaccaaggtgtagctgggct

SEQ ID NO: 309140 - DNA, 33 bp, Homo sapien
tcatcattttcaaaactaaggtgtagctgggct

SEQ ID NO: 309141 - DNA, 33 bp, Homo sapien
aagaattcttcactgacctttcattattacatt

SEQ ID NO: 309142 - DNA, 33 bp, Homo sapien
aagaattcttcactgagctttcattattacatt

SEQ ID NO: 309143 - DNA, 33 bp, Homo sapien
tggatcattattccaaaatctactacatgtagc

SEQ ID NO: 309144 - DNA, 33 bp, Homo sapien
tggatcattattccaacatctactacatgtagc

SEQ ID NO: 309145 - DNA, 33 bp, Homo sapien
ttacaccaaaattacaatgctccctccagtgac

SEQ ID NO: 309146 - DNA, 33 bp, Homo sapien
ttacaccaaaattacattgctccctccagtgac

SEQ ID NO: 309147 - DNA, 33 bp, Homo sapien
cagaatgaccacgtggaatgtttactggtgacc

SEQ ID NO: 309148 - DNA, 33 bp, Homo sapien
cagaatgaccacgtggtatgtttactggtgacc

SEQ ID NO: 309149 - DNA, 33 bp, Homo sapien
ctaacggattctagcccggccagatctgcaggc

SEQ ID NO: 309150 - DNA, 33 bp, Homo sapien
ctaacggattctagcctggccagatctgcaggc

SEQ ID NO: 309151 - DNA, 33 bp, Homo sapien
acacacaatgtcataccgcaaatgtccggggca

SEQ ID NO: 309152 - DNA, 33 bp, Homo sapien
acacacaatgtcatactgcaaatgtccggggca

SEQ ID NO: 309153 - DNA, 33 bp, Homo sapien
ttagctagtcaaggaaaggtaaagataactcac

SEQ ID NO: 309154 - DNA, 33 bp, Homo sapien
ttagctagtcaaggaagggtaaagataactcac

SEQ ID NO: 309155 - DNA, 33 bp, Homo sapien
ggtgattctgaagaccactgctatatgtcatct

SEQ ID NO: 309156 - DNA, 33 bp, Homo sapien
ggtgattctgaagaccgctgctatatgtcatct

SEQ ID NO: 309157 - DNA, 33 bp, Homo sapien
taaaacaggagttagcaaaccacagctcacagg

SEQ ID NO: 309158 - DNA, 33 bp, Homo sapien
taaaacaggagttagcgaaccacagctcacagg

SEQ ID NO: 309159 - DNA, 33 bp, Homo sapien
tgtacagtgaattttacggaggctagataacaa

SEQ ID NO: 309160 - DNA, 33 bp, Homo sapien
tgtacagtgaattttatggaggctagataacaa

SEQ ID NO: 309161 - DNA, 33 bp, Homo sapien
ggtccattacttagaagagtgtaaaatctccaa

SEQ ID NO: 309162 - DNA, 33 bp, Homo sapien
ggtccattacttagaatagtgtaaaatctccaa

SEQ ID NO: 309163 - DNA, 33 bp, Homo sapien
ttccaatctcttcacactgattaaaagcttcca

SEQ ID NO: 309164 - DNA, 33 bp, Homo sapien
ttccaatctcttcacattgattaaaagcttcca

SEQ ID NO: 309165 - DNA, 33 bp, Homo sapien
cacctgtgaaatgtcacatgtatggagacacca

SEQ ID NO: 309166 - DNA, 33 bp, Homo sapien
cacctgtgaaatgtcatatgtatggagacacca

SEQ ID NO: 309167 - DNA, 33 bp, Homo sapien
tagtggaattgctgcaccggctcctgtacctaa

SEQ ID NO: 309168 - DNA, 33 bp, Homo sapien
tagtggaattgctgcatcggctcctgtacctaa

SEQ ID NO: 309169 - DNA, 33 bp, Homo sapien
ctaaggaatagctggacaaagtacagtggtcag

SEQ ID NO: 309170 - DNA, 33 bp, Homo sapien
ctaaggaatagctggagaaagtacagtggtcag

SEQ ID NO: 309171 - DNA, 33 bp, Homo sapien
cagtgataaaagtaaccatgacactgttgtgtg

SEQ ID NO: 309172 - DNA, 33 bp, Homo sapien
cagtgataaaagtaactatgacactgttgtgtg

SEQ ID NO: 309173 - DNA, 33 bp, Homo sapien
tttttctggctgtacccctaatactttgtctgg

SEQ ID NO: 309174 - DNA, 33 bp, Homo sapien
tttttctggctgtacctctaatactttgtctgg

SEQ ID NO: 309175 - DNA, 33 bp, Homo sapien
tgttgtattcactaagccccagagatcctgtat

SEQ ID NO: 309176 - DNA, 33 bp, Homo sapien
tgttgtattcactaagtcccagagatcctgtat

SEQ ID NO: 309177 - DNA, 33 bp, Homo sapien
agaggtggtgctagataagtccgcgtgtgttgg

SEQ ID NO: 309178 - DNA, 33 bp, Homo sapien
agaggtggtgctagatgagtccgcgtgtgttgg

SEQ ID NO: 309179 - DNA, 33 bp, Homo sapien
tggagatgttcagcccaccatgaatgccattgc

SEQ ID NO: 309180 - DNA, 33 bp, Homo sapien
tggagatgttcagcccgccatgaatgccattgc

SEQ ID NO: 309181 - DNA, 33 bp, Homo sapien
aaaatcatccacgacaatagtgacattttgatt

SEQ ID NO: 309182 - DNA, 33 bp, Homo sapien
aaaatcatccacgacagtagtgacattttgatt

SEQ ID NO: 309183 - DNA, 33 bp, Homo sapien
acacaatacgaagccaactactgtcccacgggt

SEQ ID NO: 309184 - DNA, 33 bp, Homo sapien
acacaatacgaagccagctactgtcccacgggt

SEQ ID NO: 309185 - DNA, 33 bp, Homo sapien
gaaagtaacatcaataaaactatgaacaagaat

SEQ ID NO: 309186 - DNA, 33 bp, Homo sapien
gaaagtaacatcaatagaactatgaacaagaat

SEQ ID NO: 309187 - DNA, 33 bp, Homo sapien
gcattgtcacctcttaataagaaaatttatatt

SEQ ID NO: 309188 - DNA, 33 bp, Homo sapien
gcattgtcacctcttagtaagaaaatttatatt

SEQ ID NO: 309189 - DNA, 33 bp, Homo sapien
tgggcatcaaggtttgcaaagtgctccaagtaa

SEQ ID NO: 309190 - DNA, 33 bp, Homo sapien
tgggcatcaaggtttgtaaagtgctccaagtaa

SEQ ID NO: 309191 - DNA, 33 bp, Homo sapien
tttctttgtaaatttccctgtagcaaacatggg

SEQ ID NO: 309192 - DNA, 33 bp, Homo sapien
tttctttgtaaatttctctgtagcaaacatggg

SEQ ID NO: 309193 - DNA, 33 bp, Homo sapien
gcattctttcagaggcaataggagaaattctat

SEQ ID NO: 309194 - DNA, 33 bp, Homo sapien
gcattctttcagaggcgataggagaaattctat

SEQ ID NO: 309195 - DNA, 33 bp, Homo sapien
tgtactgaacttttcacgtgtgtttgcctcctt

SEQ ID NO: 309196 - DNA, 33 bp, Homo sapien
tgtactgaacttttcatgtgtgtttgcctcctt

SEQ ID NO: 309197 - DNA, 33 bp, Homo sapien
agaggtatgggaaaagccagtaccagccctgcc

SEQ ID NO: 309198 - DNA, 33 bp, Homo sapien
agaggtatgggaaaaggcagtaccagccctgcc

SEQ ID NO: 309199 - DNA, 33 bp, Homo sapien
ctcagtcttcatgaacacaaggcagtgggtggg

SEQ ID NO: 309200 - DNA, 33 bp, Homo sapien
ctcagtcttcatgaacgcaaggcagtgggtggg

SEQ ID NO: 309201 - DNA, 33 bp, Homo sapien
aaatgagactggaaaacgctactgccagtggtt

SEQ ID NO: 309202 - DNA, 33 bp, Homo sapien
aaatgagactggaaaatgctactgccagtggtt

SEQ ID NO: 309203 - DNA, 33 bp, Homo sapien
tactgccagtggtttagcagagagaggctatgt

SEQ ID NO: 309204 - DNA, 33 bp, Homo sapien
tactgccagtggtttatcagagagaggctatgt

SEQ ID NO: 309205 - DNA, 33 bp, Homo sapien
tcacatataatgtaacacgcaagtttctggatg

SEQ ID NO: 309206 - DNA, 33 bp, Homo sapien
tcacatataatgtaacgcgcaagtttctggatg

SEQ ID NO: 309207 - DNA, 33 bp, Homo sapien
aaatattccaaattgccgaactgattttttttt

SEQ ID NO: 309208 - DNA, 33 bp, Homo sapien
aaatattccaaattgctgaactgattttttttt

SEQ ID NO: 309209 - DNA, 33 bp, Homo sapien
cagtgaagattagagcaagttttcctgggctag

SEQ ID NO: 309210 - DNA, 33 bp, Homo sapien
cagtgaagattagagcgagttttcctgggctag

SEQ ID NO: 309211 - DNA, 33 bp, Homo sapien
ggcacattagtttccaataggatgtaataagtt

SEQ ID NO: 309212 - DNA, 33 bp, Homo sapien
ggcacattagtttccagtaggatgtaataagtt

SEQ ID NO: 309213 - DNA, 33 bp, Homo sapien
aagaaatgtgtgattacgtaagaacaattccta

SEQ ID NO: 309214 - DNA, 33 bp, Homo sapien
aagaaatgtgtgattatgtaagaacaattccta

SEQ ID NO: 309215 - DNA, 33 bp, Homo sapien
ttccttgatttggggacagttatttaacattta

SEQ ID NO: 309216 - DNA, 33 bp, Homo sapien
ttccttgatttggggagagttatttaacattta

SEQ ID NO: 309217 - DNA, 33 bp, Homo sapien
acagtcttctccagaacctaacattttatctca

SEQ ID NO: 309218 - DNA, 33 bp, Homo sapien
acagtcttctccagaatctaacattttatctca

SEQ ID NO: 309219 - DNA, 33 bp, Homo sapien
gtcacttcttccaggacgtagtctaattttttc

SEQ ID NO: 309220 - DNA, 33 bp, Homo sapien
gtcacttcttccaggatgtagtctaattttttc

SEQ ID NO: 309221 - DNA, 33 bp, Homo sapien
gggagatctggaaaacagaaggttgaaagatgt

SEQ ID NO: 309222 - DNA, 33 bp, Homo sapien
gggagatctggaaaacggaaggttgaaagatgt

SEQ ID NO: 309223 - DNA, 33 bp, Homo sapien
ttctgatcagtaggtccaggataaggcataaga

SEQ ID NO: 309224 - DNA, 33 bp, Homo sapien
ttctgatcagtaggtctaggataaggcataaga

SEQ ID NO: 309225 - DNA, 33 bp, Homo sapien
ctgagctaaaggtcaccgggttggctttgctat

SEQ ID NO: 309226 - DNA, 33 bp, Homo sapien
ctgagctaaaggtcactgggttggctttgctat

SEQ ID NO: 309227 - DNA, 33 bp, Homo sapien
tggaaatggccttccacaaatggctgataagct

SEQ ID NO: 309228 - DNA, 33 bp, Homo sapien
tggaaatggccttccagaaatggctgataagct

SEQ ID NO: 309229 - DNA, 33 bp, Homo sapien
ctagacaactatggccgagtgactgggatacat

SEQ ID NO: 309230 - DNA, 33 bp, Homo sapien
ctagacaactatggcctagtgactgggatacat

SEQ ID NO: 309231 - DNA, 33 bp, Homo sapien
tttgcagtactacttacaacagcatcacctaaa

SEQ ID NO: 309232 - DNA, 33 bp, Homo sapien
tttgcagtactacttataacagcatcacctaaa

SEQ ID NO: 309233 - DNA, 33 bp, Homo sapien
acctctataccggaaaacagcaatggaaaatgc

SEQ ID NO: 309234 - DNA, 33 bp, Homo sapien
acctctataccggaaagcagcaatggaaaatgc

SEQ ID NO: 309235 - DNA, 33 bp, Homo sapien
accaattcacaaattcagaagcttataaattcg

SEQ ID NO: 309236 - DNA, 33 bp, Homo sapien
accaattcacaaattcggaagcttataaattcg

SEQ ID NO: 309237 - DNA, 33 bp, Homo sapien
ttatgccattaaaaaaattgttacagtgggagc

SEQ ID NO: 309238 - DNA, 33 bp, Homo sapien
ttatgccattaaaaaagttgttacagtgggagc

SEQ ID NO: 309239 - DNA, 33 bp, Homo sapien
ggatcaaaatatgcccgcaagattcctctcccc

SEQ ID NO: 309240 - DNA, 33 bp, Homo sapien
ggatcaaaatatgccctcaagattcctctcccc

SEQ ID NO: 309241 - DNA, 33 bp, Homo sapien
cagtgcctctttgagcaatataaagttaaaacc

SEQ ID NO: 309242 - DNA, 33 bp, Homo sapien
cagtgcctctttgagcgatataaagttaaaacc

SEQ ID NO: 309243 - DNA, 33 bp, Homo sapien
gaaaggcagtattaaaattcacgatcaaaatct

SEQ ID NO: 309244 - DNA, 33 bp, Homo sapien
gaaaggcagtattaaagttcacgatcaaaatct

SEQ ID NO: 309245 - DNA, 33 bp, Homo sapien
gtaatttttagtgtcacggaatttggtgcttaa

SEQ ID NO: 309246 - DNA, 33 bp, Homo sapien
gtaatttttagtgtcatggaatttggtgcttaa

SEQ ID NO: 309247 - DNA, 33 bp, Homo sapien
taaaaaaatgaagatacgtgatagcaaagaaca

SEQ ID NO: 309248 - DNA, 33 bp, Homo sapien
taaaaaaatgaagatatgtgatagcaaagaaca

SEQ ID NO: 309249 - DNA, 33 bp, Homo sapien
agtcagggggcagaaacgtcaagggcagcttac

SEQ ID NO: 309250 - DNA, 33 bp, Homo sapien
agtcagggggcagaaatgtcaagggcagcttac

SEQ ID NO: 309251 - DNA, 33 bp, Homo sapien
tggttattcagtgggcgctttcaatctgacaac

SEQ ID NO: 309252 - DNA, 33 bp, Homo sapien
tggttattcagtgggctctttcaatctgacaac

SEQ ID NO: 309253 - DNA, 33 bp, Homo sapien
gaccgcagtccttgacaccaccagtctactttc

SEQ ID NO: 309254 - DNA, 33 bp, Homo sapien
gaccgcagtccttgacgccaccagtctactttc

SEQ ID NO: 309255 - DNA, 33 bp, Homo sapien
ttaacattttattagacatttgcacttgagaat

SEQ ID NO: 309256 - DNA, 33 bp, Homo sapien
ttaacattttattagatatttgcacttgagaat

SEQ ID NO: 309257 - DNA, 33 bp, Homo sapien
ttaacttctgagtagacggattaagtgacttct

SEQ ID NO: 309258 - DNA, 33 bp, Homo sapien
ttaacttctgagtagagggattaagtgacttct

SEQ ID NO: 309259 - DNA, 33 bp, Homo sapien
ttctggctttataacaacagttaaggctagtat

SEQ ID NO: 309260 - DNA, 33 bp, Homo sapien
ttctggctttataacatcagttaaggctagtat

SEQ ID NO: 309261 - DNA, 33 bp, Homo sapien
catcaccatcttgttaaccatgaagaaatgata

SEQ ID NO: 309262 - DNA, 33 bp, Homo sapien
catcaccatcttgttacccatgaagaaatgata

SEQ ID NO: 309263 - DNA, 33 bp, Homo sapien
tgaagcaggggcaggcaataccaagaacaagga

SEQ ID NO: 309264 - DNA, 33 bp, Homo sapien
tgaagcaggggcaggcgataccaagaacaagga

SEQ ID NO: 309265 - DNA, 33 bp, Homo sapien
gacagcatgtctctgaacaaatgcattttattt

SEQ ID NO: 309266 - DNA, 33 bp, Homo sapien
gacagcatgtctctgagcaaatgcattttattt

SEQ ID NO: 309267 - DNA, 33 bp, Homo sapien
agaagaggctggaagacagattagtactgtgtg

SEQ ID NO: 309268 - DNA, 33 bp, Homo sapien
agaagaggctggaagatagattagtactgtgtg

SEQ ID NO: 309269 - DNA, 33 bp, Homo sapien
agattgtagcaatctacggttgaaatctctcta

SEQ ID NO: 309270 - DNA, 33 bp, Homo sapien
agattgtagcaatctatggttgaaatctctcta

SEQ ID NO: 309271 - DNA, 33 bp, Homo sapien
tcccagcactgccttacgtgttcaacagggggt

SEQ ID NO: 309272 - DNA, 33 bp, Homo sapien
tcccagcactgccttatgtgttcaacagggggt

SEQ ID NO: 309273 - DNA, 33 bp, Homo sapien
cactcctaagaccaaactgaaagtaagaacttc

SEQ ID NO: 309274 - DNA, 33 bp, Homo sapien
cactcctaagaccaaattgaaagtaagaacttc

SEQ ID NO: 309275 - DNA, 33 bp, Homo sapien
agcaccagattcaccaaaggaaatagatctaat

SEQ ID NO: 309276 - DNA, 33 bp, Homo sapien
agcaccagattcaccagaggaaatagatctaat

SEQ ID NO: 309277 - DNA, 33 bp, Homo sapien
aaggatcatgtgaagaaaagaatcggtacaggg

SEQ ID NO: 309278 - DNA, 33 bp, Homo sapien
aaggatcatgtgaagacaagaatcggtacaggg

SEQ ID NO: 309279 - DNA, 33 bp, Homo sapien
aagtcaaaagtcaaaaatgagtctagtgattat

SEQ ID NO: 309280 - DNA, 33 bp, Homo sapien
aagtcaaaagtcaaaagtgagtctagtgattat

SEQ ID NO: 309281 - DNA, 33 bp, Homo sapien
ttataaatcaggcatactaagaaattaacaaaa

SEQ ID NO: 309282 - DNA, 33 bp, Homo sapien
ttataaatcaggcatagtaagaaattaacaaaa

SEQ ID NO: 309283 - DNA, 33 bp, Homo sapien
cagatacttttagaacacagatatgcagacacc

SEQ ID NO: 309284 - DNA, 33 bp, Homo sapien
cagatacttttagaacgcagatatgcagacacc

SEQ ID NO: 309285 - DNA, 33 bp, Homo sapien
tcaaatttctgtattacgcagttagaatcaaga

SEQ ID NO: 309286 - DNA, 33 bp, Homo sapien
tcaaatttctgtattatgcagttagaatcaaga

SEQ ID NO: 309287 - DNA, 33 bp, Homo sapien
tctcatgagaaaaaaaccatcattgaaatttat

SEQ ID NO: 309288 - DNA, 33 bp, Homo sapien
tctcatgagaaaaaaatcatcattgaaatttat

SEQ ID NO: 309289 - DNA, 33 bp, Homo sapien
ggaggactaaaaaaaagtatagctgcatactat

SEQ ID NO: 309290 - DNA, 33 bp, Homo sapien
ggaggactaaaaaaaattatagctgcatactat

SEQ ID NO: 309291 - DNA, 33 bp, Homo sapien
agcagagaaatgccacaattagatcagagttag

SEQ ID NO: 309292 - DNA, 33 bp, Homo sapien
agcagagaaatgccacgattagatcagagttag

SEQ ID NO: 309293 - DNA, 33 bp, Homo sapien
aaaagtttttaaaagacacacaaagcttgattg

SEQ ID NO: 309294 - DNA, 33 bp, Homo sapien
aaaagtttttaaaagatacacaaagcttgattg

SEQ ID NO: 309295 - DNA, 33 bp, Homo sapien
taggagatagagtataagctacttgggtatctg

SEQ ID NO: 309296 - DNA, 33 bp, Homo sapien
taggagatagagtatatgctacttgggtatctg

SEQ ID NO: 309297 - DNA, 33 bp, Homo sapien
ttgttactaatgataaatggtttctaagcacca

SEQ ID NO: 309298 - DNA, 33 bp, Homo sapien
ttgttactaatgataagtggtttctaagcacca

SEQ ID NO: 309299 - DNA, 33 bp, Homo sapien
agacattagctttaaacatttgaagagcaggat

SEQ ID NO: 309300 - DNA, 33 bp, Homo sapien
agacattagctttaaatatttgaagagcaggat

SEQ ID NO: 309301 - DNA, 33 bp, Homo sapien
aaagctaatgtcttaacggtatgtactaaatca

SEQ ID NO: 309302 - DNA, 33 bp, Homo sapien
aaagctaatgtcttaatggtatgtactaaatca

SEQ ID NO: 309303 - DNA, 33 bp, Homo sapien
cagtaaaggaaagacaagaagattctcggaaat

SEQ ID NO: 309304 - DNA, 33 bp, Homo sapien
cagtaaaggaaagacaggaagattctcggaaat

SEQ ID NO: 309305 - DNA, 33 bp, Homo sapien
ccaccatgctggaacaaaaggctggaattttga

SEQ ID NO: 309306 - DNA, 33 bp, Homo sapien
ccaccatgctggaacagaaggctggaattttga

SEQ ID NO: 309307 - DNA, 33 bp, Homo sapien
tatatgtaacctcatgcaagaattgtatataca

SEQ ID NO: 309308 - DNA, 33 bp, Homo sapien
tatatgtaacctcatgtaagaattgtatataca

SEQ ID NO: 309309 - DNA, 33 bp, Homo sapien
ctgtttctcctgttaagaatcctaaaactagta

SEQ ID NO: 309310 - DNA, 33 bp, Homo sapien
ctgtttctcctgttaataatcctaaaactagta

SEQ ID NO: 309311 - DNA, 33 bp, Homo sapien
aatgaagatagtgaaagtcaacaatcagctatt

SEQ ID NO: 309312 - DNA, 33 bp, Homo sapien
aatgaagatagtgaaattcaacaatcagctatt

SEQ ID NO: 309313 - DNA, 33 bp, Homo sapien
tatgcaatttcccagacagaatctattcccaaa

SEQ ID NO: 309314 - DNA, 33 bp, Homo sapien
tatgcaatttcccagagagaatctattcccaaa

SEQ ID NO: 309315 - DNA, 33 bp, Homo sapien
tttcattcaaaataaacccttgtagacaaagct

SEQ ID NO: 309316 - DNA, 33 bp, Homo sapien
tttcattcaaaataaatccttgtagacaaagct

SEQ ID NO: 309317 - DNA, 33 bp, Homo sapien
ccagctgggcagctcacattctccactttgcac

SEQ ID NO: 309318 - DNA, 33 bp, Homo sapien
ccagctgggcagctcatattctccactttgcac

SEQ ID NO: 309319 - DNA, 33 bp, Homo sapien
gcaaaccagaggtgtgacaatcagcacagaggc

SEQ ID NO: 309320 - DNA, 33 bp, Homo sapien
gcaaaccagaggtgtggcaatcagcacagaggc

SEQ ID NO: 309321 - DNA, 33 bp, Homo sapien
actaatgccataaagccgaaattcctcatgtag

SEQ ID NO: 309322 - DNA, 33 bp, Homo sapien
actaatgccataaagctgaaattcctcatgtag

SEQ ID NO: 309323 - DNA, 33 bp, Homo sapien
ctcaggctgcttagcactgcaagatgggaagaa

SEQ ID NO: 309324 - DNA, 33 bp, Homo sapien
ctcaggctgcttagcagtgcaagatgggaagaa

SEQ ID NO: 309325 - DNA, 33 bp, Homo sapien
ttgctcggatggtaatgaactcagcccacttgg

SEQ ID NO: 309326 - DNA, 33 bp, Homo sapien
ttgctcggatggtaattaactcagcccacttgg

SEQ ID NO: 309327 - DNA, 33 bp, Homo sapien
agatgggagagactcaaggaaattaaatgctgg

SEQ ID NO: 309328 - DNA, 33 bp, Homo sapien
agatgggagagactcagggaaattaaatgctgg

SEQ ID NO: 309329 - DNA, 33 bp, Homo sapien
atatttataccagttacggtgcagaggagtcat

SEQ ID NO: 309330 - DNA, 33 bp, Homo sapien
atatttataccagttatggtgcagaggagtcat

SEQ ID NO: 309331 - DNA, 33 bp, Homo sapien
gctgccagttcaaaaaacaatctccttaccatt

SEQ ID NO: 309332 - DNA, 33 bp, Homo sapien
gctgccagttcaaaaagcaatctccttaccatt

SEQ ID NO: 309333 - DNA, 33 bp, Homo sapien
tgctgttgtccacatcggaatacttcgagttag

SEQ ID NO: 309334 - DNA, 33 bp, Homo sapien
tgctgttgtccacatctgaatacttcgagttag

SEQ ID NO: 309335 - DNA, 33 bp, Homo sapien
gaatcaatcagctttacgagcaggccaaatggg

SEQ ID NO: 309336 - DNA, 33 bp, Homo sapien
gaatcaatcagctttatgagcaggccaaatggg

SEQ ID NO: 309337 - DNA, 33 bp, Homo sapien
ggtgcacgctattcggaaggcgaaggctgcagt

SEQ ID NO: 309338 - DNA, 33 bp, Homo sapien
ggtgcacgctattcgggaggcgaaggctgcagt

SEQ ID NO: 309339 - DNA, 33 bp, Homo sapien
tccttatctaaaatgacaacagtgcctcaggag

SEQ ID NO: 309340 - DNA, 33 bp, Homo sapien
tccttatctaaaatgagaacagtgcctcaggag

SEQ ID NO: 309341 - DNA, 33 bp, Homo sapien
cttaagacagacaaaaaagctacttaacaatat

SEQ ID NO: 309342 - DNA, 33 bp, Homo sapien
cttaagacagacaaaagagctacttaacaatat

SEQ ID NO: 309343 - DNA, 33 bp, Homo sapien
cttgaaatatcaccccaagataacctctgtcaa

SEQ ID NO: 309344 - DNA, 33 bp, Homo sapien
cttgaaatatcaccccgagataacctctgtcaa

SEQ ID NO: 309345 - DNA, 33 bp, Homo sapien
ttccaaacacagagccagaagttcaatgccatg

SEQ ID NO: 309346 - DNA, 33 bp, Homo sapien
ttccaaacacagagcctgaagttcaatgccatg

SEQ ID NO: 309347 - DNA, 33 bp, Homo sapien
caggttgttacgctaacactgctccaccttcct

SEQ ID NO: 309348 - DNA, 33 bp, Homo sapien
caggttgttacgctaatactgctccaccttcct

SEQ ID NO: 309349 - DNA, 33 bp, Homo sapien
aacagctgagaaaacacgctctgtcctgaaaag

SEQ ID NO: 309350 - DNA, 33 bp, Homo sapien
aacagctgagaaaacaggctctgtcctgaaaag

SEQ ID NO: 309351 - DNA, 33 bp, Homo sapien
aatgtaatttacacaacatttagctacccccag

SEQ ID NO: 309352 - DNA, 33 bp, Homo sapien
aatgtaatttacacaagatttagctacccccag

SEQ ID NO: 309353 - DNA, 33 bp, Homo sapien
ataactacttgcttaacagtgatacttaattgt

SEQ ID NO: 309354 - DNA, 33 bp, Homo sapien
ataactacttgcttaatagtgatacttaattgt

SEQ ID NO: 309355 - DNA, 33 bp, Homo sapien
tcagatttttggattacgaatgctcaaccggtt

SEQ ID NO: 309356 - DNA, 33 bp, Homo sapien
tcagatttttggattatgaatgctcaaccggtt

SEQ ID NO: 309357 - DNA, 33 bp, Homo sapien
ccccacggggagtatacgatggagcttccttag

SEQ ID NO: 309358 - DNA, 33 bp, Homo sapien
ccccacggggagtatatgatggagcttccttag

SEQ ID NO: 309359 - DNA, 33 bp, Homo sapien
aaaaagggaaagctataacagcattattttaaa

SEQ ID NO: 309360 - DNA, 33 bp, Homo sapien
aaaaagggaaagctattacagcattattttaaa

SEQ ID NO: 309361 - DNA, 33 bp, Homo sapien
tatcttattttgaaacgaacagtatctccatat

SEQ ID NO: 309362 - DNA, 33 bp, Homo sapien
tatcttattttgaaactaacagtatctccatat

SEQ ID NO: 309363 - DNA, 33 bp, Homo sapien
gctggtgtttcagatccccttgataggcacctt

SEQ ID NO: 309364 - DNA, 33 bp, Homo sapien
gctggtgtttcagatctccttgataggcacctt

SEQ ID NO: 309365 - DNA, 33 bp, Homo sapien
ggtagggtagacctgacagcaactggaactctc

SEQ ID NO: 309366 - DNA, 33 bp, Homo sapien
ggtagggtagacctgatagcaactggaactctc

SEQ ID NO: 309367 - DNA, 33 bp, Homo sapien
tgtgagatgcaatgaacgtataccatacttaat

SEQ ID NO: 309368 - DNA, 33 bp, Homo sapien
tgtgagatgcaatgaatgtataccatacttaat

SEQ ID NO: 309369 - DNA, 33 bp, Homo sapien
aaaaatgcaaattggaagactcaggagtaacta

SEQ ID NO: 309370 - DNA, 33 bp, Homo sapien
aaaaatgcaaattggaggactcaggagtaacta

SEQ ID NO: 309371 - DNA, 33 bp, Homo sapien
gactgtttgggtcagacctaaagcctgcaatgc

SEQ ID NO: 309372 - DNA, 33 bp, Homo sapien
gactgtttgggtcagatctaaagcctgcaatgc

SEQ ID NO: 309373 - DNA, 33 bp, Homo sapien
tttaaaattgctatacaagacaaaatgaacatt

SEQ ID NO: 309374 - DNA, 33 bp, Homo sapien
tttaaaattgctatacgagacaaaatgaacatt

SEQ ID NO: 309375 - DNA, 33 bp, Homo sapien
caactgcggacactcaatgaggtcatgctaccc

SEQ ID NO: 309376 - DNA, 33 bp, Homo sapien
caactgcggacactcagtgaggtcatgctaccc

SEQ ID NO: 309377 - DNA, 33 bp, Homo sapien
gtctattacttagtacaaactgatcttgctgaa

SEQ ID NO: 309378 - DNA, 33 bp, Homo sapien
gtctattacttagtacgaactgatcttgctgaa

SEQ ID NO: 309379 - DNA, 33 bp, Homo sapien
ggtgggaaactgctctcaagacagcgacgaacc

SEQ ID NO: 309380 - DNA, 33 bp, Homo sapien
ggtgggaaactgctctgaagacagcgacgaacc

SEQ ID NO: 309381 - DNA, 33 bp, Homo sapien
gctttctggaagtgacaaagatgggactccatt

SEQ ID NO: 309382 - DNA, 33 bp, Homo sapien
gctttctggaagtgacgaagatgggactccatt

SEQ ID NO: 309383 - DNA, 33 bp, Homo sapien
gaagaagagtactaagaaccactcagactttta

SEQ ID NO: 309384 - DNA, 33 bp, Homo sapien
gaagaagagtactaaggaccactcagactttta

SEQ ID NO: 309385 - DNA, 33 bp, Homo sapien
ggcatgttcaaacaaacagaatgctacctgtca

SEQ ID NO: 309386 - DNA, 33 bp, Homo sapien
ggcatgttcaaacaaagagaatgctacctgtca

SEQ ID NO: 309387 - DNA, 33 bp, Homo sapien
agcaggagatcttttaaattacaaagccctttg

SEQ ID NO: 309388 - DNA, 33 bp, Homo sapien
agcaggagatcttttatattacaaagccctttg

SEQ ID NO: 309389 - DNA, 33 bp, Homo sapien
aatcctctgggtgttacggtagaagaagtcaaa

SEQ ID NO: 309390 - DNA, 33 bp, Homo sapien
aatcctctgggtgttatggtagaagaagtcaaa

SEQ ID NO: 309391 - DNA, 33 bp, Homo sapien
gagcccatagcggagaatcagagtgaaaacagg

SEQ ID NO: 309392 - DNA, 33 bp, Homo sapien
gagcccatagcggagagtcagagtgaaaacagg

SEQ ID NO: 309393 - DNA, 33 bp, Homo sapien
ctgcaccaatctaatacataaactggttctaca

SEQ ID NO: 309394 - DNA, 33 bp, Homo sapien
ctgcaccaatctaatatataaactggttctaca

SEQ ID NO: 309395 - DNA, 33 bp, Homo sapien
ttcctgttttgtgacacgtatttctgtaggctg

SEQ ID NO: 309396 - DNA, 33 bp, Homo sapien
ttcctgttttgtgacatgtatttctgtaggctg

SEQ ID NO: 309397 - DNA, 33 bp, Homo sapien
gctgattgagctgcaccaatagaacaggctgtg

SEQ ID NO: 309398 - DNA, 33 bp, Homo sapien
gctgattgagctgcactaatagaacaggctgtg

SEQ ID NO: 309399 - DNA, 33 bp, Homo sapien
gcaggagaatgattaagaacccaatgaggtcca

SEQ ID NO: 309400 - DNA, 33 bp, Homo sapien
gcaggagaatgattaataacccaatgaggtcca

SEQ ID NO: 309401 - DNA, 33 bp, Homo sapien
cagggagagaaactggaaatgtgtttttccttg

SEQ ID NO: 309402 - DNA, 33 bp, Homo sapien
cagggagagaaactgggaatgtgtttttccttg

SEQ ID NO: 309403 - DNA, 33 bp, Homo sapien
ttcttcttttccagaccggccctgtcctatccc

SEQ ID NO: 309404 - DNA, 33 bp, Homo sapien
ttcttcttttccagactggccctgtcctatccc

SEQ ID NO: 309405 - DNA, 33 bp, Homo sapien
gtaattagttacagaactgttactgacagcaaa

SEQ ID NO: 309406 - DNA, 33 bp, Homo sapien
gtaattagttacagaattgttactgacagcaaa

SEQ ID NO: 309407 - DNA, 33 bp, Homo sapien
gggaatttgtggaatacggcacttggatcagtg

SEQ ID NO: 309408 - DNA, 33 bp, Homo sapien
gggaatttgtggaatatggcacttggatcagtg

SEQ ID NO: 309409 - DNA, 33 bp, Homo sapien
cccaataccatttacaatagccataaaaaaact

SEQ ID NO: 309410 - DNA, 33 bp, Homo sapien
cccaataccatttacagtagccataaaaaaact

SEQ ID NO: 309411 - DNA, 33 bp, Homo sapien
tacacaagaaatgagcaaagagttcctggagaa

SEQ ID NO: 309412 - DNA, 33 bp, Homo sapien
tacacaagaaatgagccaagagttcctggagaa

SEQ ID NO: 309413 - DNA, 33 bp, Homo sapien
gttgtgattgcagtcactgacaacatttagtag

SEQ ID NO: 309414 - DNA, 33 bp, Homo sapien
gttgtgattgcagtcattgacaacatttagtag

SEQ ID NO: 309415 - DNA, 33 bp, Homo sapien
ttccagcaagtactaaatcggccaaaaaaagtt

SEQ ID NO: 309416 - DNA, 33 bp, Homo sapien
ttccagcaagtactaagtcggccaaaaaaagtt

SEQ ID NO: 309417 - DNA, 33 bp, Homo sapien
atgaactctatataacaaaacgacggtaaaata

SEQ ID NO: 309418 - DNA, 33 bp, Homo sapien
atgaactctatataactaaacgacggtaaaata

SEQ ID NO: 309419 - DNA, 33 bp, Homo sapien
tgctaatgaagggtaacagtctgcagtaaagtg

SEQ ID NO: 309420 - DNA, 33 bp, Homo sapien
tgctaatgaagggtaatagtctgcagtaaagtg

SEQ ID NO: 309421 - DNA, 33 bp, Homo sapien
aatatcatttggaccactacatagatttcatag

SEQ ID NO: 309422 - DNA, 33 bp, Homo sapien
aatatcatttggaccattacatagatttcatag

SEQ ID NO: 309423 - DNA, 33 bp, Homo sapien
actgtttgctttataaagactcaagcctttata

SEQ ID NO: 309424 - DNA, 33 bp, Homo sapien
actgtttgctttataaggactcaagcctttata

SEQ ID NO: 309425 - DNA, 33 bp, Homo sapien
ctagtaatctactcaactgtcagtgattcaaca

SEQ ID NO: 309426 - DNA, 33 bp, Homo sapien
ctagtaatctactcaattgtcagtgattcaaca

SEQ ID NO: 309427 - DNA, 33 bp, Homo sapien
aattccactacactcacgaaaaaacaaaggtct

SEQ ID NO: 309428 - DNA, 33 bp, Homo sapien
aattccactacactcatgaaaaaacaaaggtct

SEQ ID NO: 309429 - DNA, 33 bp, Homo sapien
cagcttcctttctgtaggttaggaccttaccat

SEQ ID NO: 309430 - DNA, 33 bp, Homo sapien
cagcttcctttctgtatgttaggaccttaccat

SEQ ID NO: 309431 - DNA, 33 bp, Homo sapien
tccctaatgttacaaacgtgaagacaggttaaa

SEQ ID NO: 309432 - DNA, 33 bp, Homo sapien
tccctaatgttacaaaggtgaagacaggttaaa

SEQ ID NO: 309433 - DNA, 33 bp, Homo sapien
gaaaaaatcctagagcacagaagtcattaaata

SEQ ID NO: 309434 - DNA, 33 bp, Homo sapien
gaaaaaatcctagagcgcagaagtcattaaata

SEQ ID NO: 309435 - DNA, 33 bp, Homo sapien
atctagtatggttcaaataacccaatgggagac

SEQ ID NO: 309436 - DNA, 33 bp, Homo sapien
atctagtatggttcaagtaacccaatgggagac

SEQ ID NO: 309437 - DNA, 33 bp, Homo sapien
gcattgtaggcctaccccattttttatctgtgg

SEQ ID NO: 309438 - DNA, 33 bp, Homo sapien
gcattgtaggcctaccgcattttttatctgtgg

SEQ ID NO: 309439 - DNA, 33 bp, Homo sapien
aaaaacacattagtcaccttataaaccggagct

SEQ ID NO: 309440 - DNA, 33 bp, Homo sapien
aaaaacacattagtcagcttataaaccggagct

SEQ ID NO: 309441 - DNA, 33 bp, Homo sapien
atttctatactcaacacataaaactcatgactg

SEQ ID NO: 309442 - DNA, 33 bp, Homo sapien
atttctatactcaacatataaaactcatgactg

SEQ ID NO: 309443 - DNA, 33 bp, Homo sapien
gccacttggttgaatagaaattccatgtagata

SEQ ID NO: 309444 - DNA, 33 bp, Homo sapien
gccacttggttgaatataaattccatgtagata

SEQ ID NO: 309445 - DNA, 33 bp, Homo sapien
gtaagttgcagatatcaatatacttttttccaa

SEQ ID NO: 309446 - DNA, 33 bp, Homo sapien
gtaagttgcagatatcgatatacttttttccaa

SEQ ID NO: 309447 - DNA, 33 bp, Homo sapien
tacccattgtgaaaaacagaaacaatcaagatg

SEQ ID NO: 309448 - DNA, 33 bp, Homo sapien
tacccattgtgaaaaagagaaacaatcaagatg

SEQ ID NO: 309449 - DNA, 33 bp, Homo sapien
ctgtcatttcttgctccctcgttacatagcttc

SEQ ID NO: 309450 - DNA, 33 bp, Homo sapien
ctgtcatttcttgctctctcgttacatagcttc

SEQ ID NO: 309451 - DNA, 33 bp, Homo sapien
cctcttaactaaaacacaaggagtcagaacact

SEQ ID NO: 309452 - DNA, 33 bp, Homo sapien
cctcttaactaaaacagaaggagtcagaacact

SEQ ID NO: 309453 - DNA, 33 bp, Homo sapien
ccttgctagtctatgtcaagatgattcccttat

SEQ ID NO: 309454 - DNA, 33 bp, Homo sapien
ccttgctagtctatgttaagatgattcccttat

SEQ ID NO: 309455 - DNA, 33 bp, Homo sapien
tggttcacagatggcacattcttactatgtcct

SEQ ID NO: 309456 - DNA, 33 bp, Homo sapien
tggttcacagatggcatattcttactatgtcct

SEQ ID NO: 309457 - DNA, 33 bp, Homo sapien
atatctttcctactgactataaaatccttgagg

SEQ ID NO: 309458 - DNA, 33 bp, Homo sapien
atatctttcctactgagtataaaatccttgagg

SEQ ID NO: 309459 - DNA, 33 bp, Homo sapien
ttaacatagatatcaaaaatacacccgattctg

SEQ ID NO: 309460 - DNA, 33 bp, Homo sapien
ttaacatagatatcaacaatacacccgattctg

SEQ ID NO: 309461 - DNA, 33 bp, Homo sapien
cagtcaaatagagctacgaatcttttcccagtg

SEQ ID NO: 309462 - DNA, 33 bp, Homo sapien
cagtcaaatagagctatgaatcttttcccagtg

SEQ ID NO: 309463 - DNA, 33 bp, Homo sapien
attaatttatagagaaactgaacttattttatc

SEQ ID NO: 309464 - DNA, 33 bp, Homo sapien
attaatttatagagaagctgaacttattttatc

SEQ ID NO: 309465 - DNA, 33 bp, Homo sapien
agaaaagtaagtttacaaatggcctactgtgtc

SEQ ID NO: 309466 - DNA, 33 bp, Homo sapien
agaaaagtaagtttacgaatggcctactgtgtc

SEQ ID NO: 309467 - DNA, 33 bp, Homo sapien
acacgtttcctgctccacctccaagatgaaaaa

SEQ ID NO: 309468 - DNA, 33 bp, Homo sapien
acacgtttcctgctccgcctccaagatgaaaaa

SEQ ID NO: 309469 - DNA, 33 bp, Homo sapien
aagagacactggtgaacatcccatcacataact

SEQ ID NO: 309470 - DNA, 33 bp, Homo sapien
aagagacactggtgaatatcccatcacataact

SEQ ID NO: 309471 - DNA, 33 bp, Homo sapien
gcaagttgtgccataaatacttcaaaggatact

SEQ ID NO: 309472 - DNA, 33 bp, Homo sapien
gcaagttgtgccataagtacttcaaaggatact

SEQ ID NO: 309473 - DNA, 33 bp, Homo sapien
ccagacatagataccaagacttgctctagtgga

SEQ ID NO: 309474 - DNA, 33 bp, Homo sapien
ccagacatagataccaggacttgctctagtgga

SEQ ID NO: 309475 - DNA, 33 bp, Homo sapien
tactagggaggcaaccacaatcctcaaatcctt

SEQ ID NO: 309476 - DNA, 33 bp, Homo sapien
tactagggaggcaaccgcaatcctcaaatcctt

SEQ ID NO: 309477 - DNA, 33 bp, Homo sapien
cctccctttaattgggccatctttgttcacctg

SEQ ID NO: 309478 - DNA, 33 bp, Homo sapien
cctccctttaattgggtcatctttgttcacctg

SEQ ID NO: 309479 - DNA, 33 bp, Homo sapien
ggaagcccatttcaatgactccacaggtcaggc

SEQ ID NO: 309480 - DNA, 33 bp, Homo sapien
ggaagcccatttcaattactccacaggtcaggc

SEQ ID NO: 309481 - DNA, 33 bp, Homo sapien
tttgaaagtcaaaaccaagcagtatttccatta

SEQ ID NO: 309482 - DNA, 33 bp, Homo sapien
tttgaaagtcaaaaccgagcagtatttccatta

SEQ ID NO: 309483 - DNA, 33 bp, Homo sapien
agtgttaccttaataacgcaaatagcatcatcg

SEQ ID NO: 309484 - DNA, 33 bp, Homo sapien
agtgttaccttaataatgcaaatagcatcatcg

SEQ ID NO: 309485 - DNA, 33 bp, Homo sapien
ttctttgaagaactcacccaagctctatgtttc

SEQ ID NO: 309486 - DNA, 33 bp, Homo sapien
ttctttgaagaactcatccaagctctatgtttc

SEQ ID NO: 309487 - DNA, 33 bp, Homo sapien
tgcatagagaactcccagatcctcgatacccaa

SEQ ID NO: 309488 - DNA, 33 bp, Homo sapien
tgcatagagaactcccggatcctcgatacccaa

SEQ ID NO: 309489 - DNA, 33 bp, Homo sapien
ttatattggaagtcaacggttgaatacggactt

SEQ ID NO: 309490 - DNA, 33 bp, Homo sapien
ttatattggaagtcaatggttgaatacggactt

SEQ ID NO: 309491 - DNA, 33 bp, Homo sapien
gtcacctcagctgccacgataggaggcctgtac

SEQ ID NO: 309492 - DNA, 33 bp, Homo sapien
gtcacctcagctgccatgataggaggcctgtac

SEQ ID NO: 309493 - DNA, 33 bp, Homo sapien
ggtgatttctaaagaacgctatccttaccatga

SEQ ID NO: 309494 - DNA, 33 bp, Homo sapien
ggtgatttctaaagaatgctatccttaccatga

SEQ ID NO: 309495 - DNA, 33 bp, Homo sapien
ctgcctgttagttttcactctcaaatgctacca

SEQ ID NO: 309496 - DNA, 33 bp, Homo sapien
ctgcctgttagttttccctctcaaatgctacca

SEQ ID NO: 309497 - DNA, 33 bp, Homo sapien
ttagcactttcatccacaagtggcgacgatgcc

SEQ ID NO: 309498 - DNA, 33 bp, Homo sapien
ttagcactttcatccataagtggcgacgatgcc

SEQ ID NO: 309499 - DNA, 33 bp, Homo sapien
ggtgtgtataattaacaaagagcaacatagcct

SEQ ID NO: 309500 - DNA, 33 bp, Homo sapien
ggtgtgtataattaacgaagagcaacatagcct

SEQ ID NO: 309501 - DNA, 33 bp, Homo sapien
gacactggtgaaaatacgactagacaattcaca

SEQ ID NO: 309502 - DNA, 33 bp, Homo sapien
gacactggtgaaaataggactagacaattcaca

SEQ ID NO: 309503 - DNA, 33 bp, Homo sapien
tgataatgtagcacaacgaaggaaagggcttca

SEQ ID NO: 309504 - DNA, 33 bp, Homo sapien
tgataatgtagcacaatgaaggaaagggcttca

SEQ ID NO: 309505 - DNA, 33 bp, Homo sapien
cctactaatagcttcaatctttccatattcaaa

SEQ ID NO: 309506 - DNA, 33 bp, Homo sapien
cctactaatagcttcagtctttccatattcaaa

SEQ ID NO: 309507 - DNA, 33 bp, Homo sapien
caaaatcttgagaggaaaattggctcatctttg

SEQ ID NO: 309508 - DNA, 33 bp, Homo sapien
caaaatcttgagaggagaattggctcatctttg

SEQ ID NO: 309509 - DNA, 33 bp, Homo sapien
aggctaggtcagaaaacgctaactccctcaggg

SEQ ID NO: 309510 - DNA, 33 bp, Homo sapien
aggctaggtcagaaaatgctaactccctcaggg

SEQ ID NO: 309511 - DNA, 33 bp, Homo sapien
tttcaaaatttcaggacgtttgatcccacaatg

SEQ ID NO: 309512 - DNA, 33 bp, Homo sapien
tttcaaaatttcaggatgtttgatcccacaatg

SEQ ID NO: 309513 - DNA, 33 bp, Homo sapien
aattaatctcctggcccatatacaagttgggga

SEQ ID NO: 309514 - DNA, 33 bp, Homo sapien
aattaatctcctggcctatatacaagttgggga

SEQ ID NO: 309515 - DNA, 33 bp, Homo sapien
ggggacaaggatctttcaaagaggcatagtaca

SEQ ID NO: 309516 - DNA, 33 bp, Homo sapien
ggggacaaggatctttgaaagaggcatagtaca

SEQ ID NO: 309517 - DNA, 33 bp, Homo sapien
tgaaaatcattgatagaactctaacttcatctt

SEQ ID NO: 309518 - DNA, 33 bp, Homo sapien
tgaaaatcattgataggactctaacttcatctt

SEQ ID NO: 309519 - DNA, 33 bp, Homo sapien
aaacggtcacacggtgcacttgatctcccaagt

SEQ ID NO: 309520 - DNA, 33 bp, Homo sapien
aaacggtcacacggtgtacttgatctcccaagt

SEQ ID NO: 309521 - DNA, 33 bp, Homo sapien
ggccacagaagggacacaccaagagagttctga

SEQ ID NO: 309522 - DNA, 33 bp, Homo sapien
ggccacagaagggacagaccaagagagttctga

SEQ ID NO: 309523 - DNA, 33 bp, Homo sapien
gggagctgcctggagaagttccactaatagggg

SEQ ID NO: 309524 - DNA, 33 bp, Homo sapien
gggagctgcctggagaggttccactaatagggg

SEQ ID NO: 309525 - DNA, 33 bp, Homo sapien
tttttccttaatggcacgttgtttcccaagagt

SEQ ID NO: 309526 - DNA, 33 bp, Homo sapien
tttttccttaatggcatgttgtttcccaagagt

SEQ ID NO: 309527 - DNA, 33 bp, Homo sapien
acacataaaatcatcactctagcttttaactta

SEQ ID NO: 309528 - DNA, 33 bp, Homo sapien
acacataaaatcatcagtctagcttttaactta

SEQ ID NO: 309529 - DNA, 33 bp, Homo sapien
ggtagaaggaaaataacctgcttttgcataaaa

SEQ ID NO: 309530 - DNA, 33 bp, Homo sapien
ggtagaaggaaaataatctgcttttgcataaaa

SEQ ID NO: 309531 - DNA, 33 bp, Homo sapien
aatacactgaggttcacaggtttgcctaaacaa

SEQ ID NO: 309532 - DNA, 33 bp, Homo sapien
aatacactgaggttcataggtttgcctaaacaa

SEQ ID NO: 309533 - DNA, 33 bp, Homo sapien
agcataccagtatgccaaagaatacctttaagg

SEQ ID NO: 309534 - DNA, 33 bp, Homo sapien
agcataccagtatgccgaagaatacctttaagg

SEQ ID NO: 309535 - DNA, 33 bp, Homo sapien
gacatgaccactacccaatctatgcatataaca

SEQ ID NO: 309536 - DNA, 33 bp, Homo sapien
gacatgaccactacccgatctatgcatataaca

SEQ ID NO: 309537 - DNA, 33 bp, Homo sapien
cacaacccaatctttaaaattattctggagatg

SEQ ID NO: 309538 - DNA, 33 bp, Homo sapien
cacaacccaatctttacaattattctggagatg

SEQ ID NO: 309539 - DNA, 33 bp, Homo sapien
ctcagagtaggaagaactagagtgcaagttggg

SEQ ID NO: 309540 - DNA, 33 bp, Homo sapien
ctcagagtaggaagaattagagtgcaagttggg

SEQ ID NO: 309541 - DNA, 33 bp, Homo sapien
aacactttgatggacaaaatatccaataaagca

SEQ ID NO: 309542 - DNA, 33 bp, Homo sapien
aacactttgatggacagaatatccaataaagca

SEQ ID NO: 309543 - DNA, 33 bp, Homo sapien
attttggtgggcacaaaattaacctctagtgct

SEQ ID NO: 309544 - DNA, 33 bp, Homo sapien
attttggtgggcacaatattaacctctagtgct

SEQ ID NO: 309545 - DNA, 33 bp, Homo sapien
gctcccattgttcccacagcaaggcacagatat

SEQ ID NO: 309546 - DNA, 33 bp, Homo sapien
gctcccattgttcccatagcaaggcacagatat

SEQ ID NO: 309547 - DNA, 33 bp, Homo sapien
atctgcctttgcaatgacacttggccagtagac

SEQ ID NO: 309548 - DNA, 33 bp, Homo sapien
atctgcctttgcaatgccacttggccagtagac

SEQ ID NO: 309549 - DNA, 33 bp, Homo sapien
atacctggtatttacacctctgagtccagataa

SEQ ID NO: 309550 - DNA, 33 bp, Homo sapien
atacctggtatttacatctctgagtccagataa

SEQ ID NO: 309551 - DNA, 33 bp, Homo sapien
tggccactccttctaaaatggtctaagttctca

SEQ ID NO: 309552 - DNA, 33 bp, Homo sapien
tggccactccttctaatatggtctaagttctca

SEQ ID NO: 309553 - DNA, 33 bp, Homo sapien
ccagacactagagataaagcagagaataaaaaa

SEQ ID NO: 309554 - DNA, 33 bp, Homo sapien
ccagacactagagatatagcagagaataaaaaa

SEQ ID NO: 309555 - DNA, 33 bp, Homo sapien
tttttagttctcttaactggctgtagtgtgaag

SEQ ID NO: 309556 - DNA, 33 bp, Homo sapien
tttttagttctcttaattggctgtagtgtgaag

SEQ ID NO: 309557 - DNA, 33 bp, Homo sapien
ctcatgtgttcactggaataacatttttaattt

SEQ ID NO: 309558 - DNA, 33 bp, Homo sapien
ctcatgtgttcactgggataacatttttaattt

SEQ ID NO: 309559 - DNA, 33 bp, Homo sapien
ctatgctgcataaacacgacaacacacataaaa

SEQ ID NO: 309560 - DNA, 33 bp, Homo sapien
ctatgctgcataaacaggacaacacacataaaa

SEQ ID NO: 309561 - DNA, 33 bp, Homo sapien
ataacaacttaatttacatcacgtagaaaaact

SEQ ID NO: 309562 - DNA, 33 bp, Homo sapien
ataacaacttaatttagatcacgtagaaaaact

SEQ ID NO: 309563 - DNA, 33 bp, Homo sapien
ctcatgacgtcggaataatagacacacggtaga

SEQ ID NO: 309564 - DNA, 33 bp, Homo sapien
ctcatgacgtcggaatcatagacacacggtaga

SEQ ID NO: 309565 - DNA, 33 bp, Homo sapien
gtgtttctctattgcccatgccatccaatctac

SEQ ID NO: 309566 - DNA, 33 bp, Homo sapien
gtgtttctctattgcctatgccatccaatctac

SEQ ID NO: 309567 - DNA, 33 bp, Homo sapien
caccagcgaaatccagcccctgtcttgtttttg

SEQ ID NO: 309568 - DNA, 33 bp, Homo sapien
caccagcgaaatccaggccctgtcttgtttttg

SEQ ID NO: 309569 - DNA, 33 bp, Homo sapien
gtgaagaataagaaaactgccccacgcagtctg

SEQ ID NO: 309570 - DNA, 33 bp, Homo sapien
gtgaagaataagaaaattgccccacgcagtctg

SEQ ID NO: 309571 - DNA, 33 bp, Homo sapien
tacagggatcaaaataccatatgtacctccaaa

SEQ ID NO: 309572 - DNA, 33 bp, Homo sapien
tacagggatcaaaatatcatatgtacctccaaa

SEQ ID NO: 309573 - DNA, 33 bp, Homo sapien
aagtttcccaattccacaaaagtttgctgtatc

SEQ ID NO: 309574 - DNA, 33 bp, Homo sapien
aagtttcccaattccataaaagtttgctgtatc

SEQ ID NO: 309575 - DNA, 33 bp, Homo sapien
aaatgtaggtaaaagcacaggttgtccacagtt

SEQ ID NO: 309576 - DNA, 33 bp, Homo sapien
aaatgtaggtaaaagcgcaggttgtccacagtt

SEQ ID NO: 309577 - DNA, 33 bp, Homo sapien
caagctttccgaagccacattttcagcaggagc

SEQ ID NO: 309578 - DNA, 33 bp, Homo sapien
caagctttccgaagcctcattttcagcaggagc

SEQ ID NO: 309579 - DNA, 33 bp, Homo sapien
ttaacattttcaattacatctcatccaagaagc

SEQ ID NO: 309580 - DNA, 33 bp, Homo sapien
ttaacattttcaattagatctcatccaagaagc

SEQ ID NO: 309581 - DNA, 33 bp, Homo sapien
gctctgaggatgttcacctaatggccagatggc

SEQ ID NO: 309582 - DNA, 33 bp, Homo sapien
gctctgaggatgttcatctaatggccagatggc

SEQ ID NO: 309583 - DNA, 33 bp, Homo sapien
caggtaggtgtttggacagtcagataacatggc

SEQ ID NO: 309584 - DNA, 33 bp, Homo sapien
caggtaggtgtttggatagtcagataacatggc

SEQ ID NO: 309585 - DNA, 33 bp, Homo sapien
tgcatctgtggacaagaccctcattcttcaatc

SEQ ID NO: 309586 - DNA, 33 bp, Homo sapien
tgcatctgtggacaaggccctcattcttcaatc

SEQ ID NO: 309587 - DNA, 33 bp, Homo sapien
aatcacaattgggaaacagtctttaacaccaga

SEQ ID NO: 309588 - DNA, 33 bp, Homo sapien
aatcacaattgggaaagagtctttaacaccaga

SEQ ID NO: 309589 - DNA, 33 bp, Homo sapien
ccttaatagaaggacccatgctgatctttgaat

SEQ ID NO: 309590 - DNA, 33 bp, Homo sapien
ccttaatagaaggacctatgctgatctttgaat

SEQ ID NO: 309591 - DNA, 33 bp, Homo sapien
ataatcaaagaaaagaacaagtcttgatccagt

SEQ ID NO: 309592 - DNA, 33 bp, Homo sapien
ataatcaaagaaaagagcaagtcttgatccagt

SEQ ID NO: 309593 - DNA, 33 bp, Homo sapien
tgtgtcacacgttcaaagtctaatttgttcatt

SEQ ID NO: 309594 - DNA, 33 bp, Homo sapien
tgtgtcacacgttcaatgtctaatttgttcatt

SEQ ID NO: 309595 - DNA, 33 bp, Homo sapien
atcacaaaggttgccaaagtgatgtttgcagat

SEQ ID NO: 309596 - DNA, 33 bp, Homo sapien
atcacaaaggttgccagagtgatgtttgcagat

SEQ ID NO: 309597 - DNA, 33 bp, Homo sapien
actatttgcaaagacaagatagatcaccaagtt

SEQ ID NO: 309598 - DNA, 33 bp, Homo sapien
actatttgcaaagacatgatagatcaccaagtt

SEQ ID NO: 309599 - DNA, 33 bp, Homo sapien
caatgagagaaatccacgtgagatttgagagca

SEQ ID NO: 309600 - DNA, 33 bp, Homo sapien
caatgagagaaatccatgtgagatttgagagca

SEQ ID NO: 309601 - DNA, 33 bp, Homo sapien
catgtctgatacagggaaagcgctcaataaatg

SEQ ID NO: 309602 - DNA, 33 bp, Homo sapien
catgtctgatacaggggaagcgctcaataaatg

SEQ ID NO: 309603 - DNA, 33 bp, Homo sapien
agggtcctttcagccacctgggtgcattcttag

SEQ ID NO: 309604 - DNA, 33 bp, Homo sapien
agggtcctttcagccatctgggtgcattcttag

SEQ ID NO: 309605 - DNA, 33 bp, Homo sapien
ccatcttatacaatcacctttgcaggttggatg

SEQ ID NO: 309606 - DNA, 33 bp, Homo sapien
ccatcttatacaatcatctttgcaggttggatg

SEQ ID NO: 309607 - DNA, 33 bp, Homo sapien
tcgaggaagcctattccctcaaaaagaattcta

SEQ ID NO: 309608 - DNA, 33 bp, Homo sapien
tcgaggaagcctattctctcaaaaagaattcta

SEQ ID NO: 309609 - DNA, 33 bp, Homo sapien
gagcactgtccaactccatgccttaattacgag

SEQ ID NO: 309610 - DNA, 33 bp, Homo sapien
gagcactgtccaactctatgccttaattacgag

SEQ ID NO: 309611 - DNA, 33 bp, Homo sapien
ccgccttccttacaaccggagaaagttatctct

SEQ ID NO: 309612 - DNA, 33 bp, Homo sapien
ccgccttccttacaactggagaaagttatctct

SEQ ID NO: 309613 - DNA, 33 bp, Homo sapien
aatgtgtggctatgaccgaaaacacctcatgcc

SEQ ID NO: 309614 - DNA, 33 bp, Homo sapien
aatgtgtggctatgactgaaaacacctcatgcc

SEQ ID NO: 309615 - DNA, 33 bp, Homo sapien
agtgtgaaataaggacacgttggccttttgctt

SEQ ID NO: 309616 - DNA, 33 bp, Homo sapien
agtgtgaaataaggacgcgttggccttttgctt

SEQ ID NO: 309617 - DNA, 33 bp, Homo sapien
cacaaagtagacttggaactaggacagcaatga

SEQ ID NO: 309618 - DNA, 33 bp, Homo sapien
cacaaagtagacttgggactaggacagcaatga

SEQ ID NO: 309619 - DNA, 33 bp, Homo sapien
aaccgaaattggaagcaaaagcagtcaggaact

SEQ ID NO: 309620 - DNA, 33 bp, Homo sapien
aaccgaaattggaagcgaaagcagtcaggaact

SEQ ID NO: 309621 - DNA, 33 bp, Homo sapien
agctctactcacaacacgaagtctgtaactcaa

SEQ ID NO: 309622 - DNA, 33 bp, Homo sapien
agctctactcacaacaggaagtctgtaactcaa

SEQ ID NO: 309623 - DNA, 33 bp, Homo sapien
tctattattcatcccaatgaaccaaaggaatgg

SEQ ID NO: 309624 - DNA, 33 bp, Homo sapien
tctattattcatcccagtgaaccaaaggaatgg

SEQ ID NO: 309625 - DNA, 33 bp, Homo sapien
aaggatatgcaggtggaaaataagtacatgaaa

SEQ ID NO: 309626 - DNA, 33 bp, Homo sapien
aaggatatgcaggtgggaaataagtacatgaaa

SEQ ID NO: 309627 - DNA, 33 bp, Homo sapien
actgatatggtggatacggaagagtctgagtgt

SEQ ID NO: 309628 - DNA, 33 bp, Homo sapien
actgatatggtggatatggaagagtctgagtgt

SEQ ID NO: 309629 - DNA, 33 bp, Homo sapien
ccatgcaccagacacactaaccttgcagtcctt

SEQ ID NO: 309630 - DNA, 33 bp, Homo sapien
ccatgcaccagacacattaaccttgcagtcctt

SEQ ID NO: 309631 - DNA, 33 bp, Homo sapien
gagccgtttattaatccacagagggaggaggaa

SEQ ID NO: 309632 - DNA, 33 bp, Homo sapien
gagccgtttattaatctacagagggaggaggaa

SEQ ID NO: 309633 - DNA, 33 bp, Homo sapien
gctggaaataatcgaaatatgcacacaaaaatt

SEQ ID NO: 309634 - DNA, 33 bp, Homo sapien
gctggaaataatcgaagtatgcacacaaaaatt

SEQ ID NO: 309635 - DNA, 33 bp, Homo sapien
agtggattttatcagtcacctgttgctatcata

SEQ ID NO: 309636 - DNA, 33 bp, Homo sapien
agtggattttatcagttacctgttgctatcata

SEQ ID NO: 309637 - DNA, 33 bp, Homo sapien
tcatgagttcggctgccagaagccagtggtgga

SEQ ID NO: 309638 - DNA, 33 bp, Homo sapien
tcatgagttcggctgctagaagccagtggtgga

SEQ ID NO: 309639 - DNA, 33 bp, Homo sapien
atgacatcctgataaccgtgtcatggtttgtct

SEQ ID NO: 309640 - DNA, 33 bp, Homo sapien
atgacatcctgataactgtgtcatggtttgtct

SEQ ID NO: 309641 - DNA, 33 bp, Homo sapien
ggtctagaaaatagaaaccaggcctaggagtca

SEQ ID NO: 309642 - DNA, 33 bp, Homo sapien
ggtctagaaaatagaagccaggcctaggagtca

SEQ ID NO: 309643 - DNA, 33 bp, Homo sapien
agtcatcacttcacaccgggatggctggcatgg

SEQ ID NO: 309644 - DNA, 33 bp, Homo sapien
agtcatcacttcacactgggatggctggcatgg

SEQ ID NO: 309645 - DNA, 33 bp, Homo sapien
tgctggtgagagtagaataaagatagatctatc

SEQ ID NO: 309646 - DNA, 33 bp, Homo sapien
tgctggtgagagtagactaaagatagatctatc

SEQ ID NO: 309647 - DNA, 33 bp, Homo sapien
gcccaggagcagcatcaagtacacagaggactg

SEQ ID NO: 309648 - DNA, 33 bp, Homo sapien
gcccaggagcagcatcgagtacacagaggactg

SEQ ID NO: 309649 - DNA, 33 bp, Homo sapien
caatattaattccaacacctgtggtctacagaa

SEQ ID NO: 309650 - DNA, 33 bp, Homo sapien
caatattaattccaacccctgtggtctacagaa

SEQ ID NO: 309651 - DNA, 33 bp, Homo sapien
gaaaatctgagttaaacgaactttgtgggggtt

SEQ ID NO: 309652 - DNA, 33 bp, Homo sapien
gaaaatctgagttaaatgaactttgtgggggtt

SEQ ID NO: 309653 - DNA, 33 bp, Homo sapien
ttggtgctgtcatgaacggtcccagggtaattt

SEQ ID NO: 309654 - DNA, 33 bp, Homo sapien
ttggtgctgtcatgaatggtcccagggtaattt

SEQ ID NO: 309655 - DNA, 33 bp, Homo sapien
tcaagattagatggctcaacatgcgaattaccc

SEQ ID NO: 309656 - DNA, 33 bp, Homo sapien
tcaagattagatggcttaacatgcgaattaccc

SEQ ID NO: 309657 - DNA, 33 bp, Homo sapien
tgtggagccttgcagaactaaccattttagtct

SEQ ID NO: 309658 - DNA, 33 bp, Homo sapien
tgtggagccttgcagagctaaccattttagtct

SEQ ID NO: 309659 - DNA, 33 bp, Homo sapien
ttttaatctcacctaacaatatgcctgattaag

SEQ ID NO: 309660 - DNA, 33 bp, Homo sapien
ttttaatctcacctaataatatgcctgattaag

SEQ ID NO: 309661 - DNA, 33 bp, Homo sapien
atttcttcacaacacacggaaataagagtatct

SEQ ID NO: 309662 - DNA, 33 bp, Homo sapien
atttcttcacaacacatggaaataagagtatct

SEQ ID NO: 309663 - DNA, 33 bp, Homo sapien
tattaacgttggtgtaccagtaccctgttctta

SEQ ID NO: 309664 - DNA, 33 bp, Homo sapien
tattaacgttggtgtatcagtaccctgttctta

SEQ ID NO: 309665 - DNA, 33 bp, Homo sapien
tgcagttcctgacatacagtagtttttcagtgt

SEQ ID NO: 309666 - DNA, 33 bp, Homo sapien
tgcagttcctgacatatagtagtttttcagtgt

SEQ ID NO: 309667 - DNA, 33 bp, Homo sapien
cccaatacattcaataacgaaaatccagcatgt

SEQ ID NO: 309668 - DNA, 33 bp, Homo sapien
cccaatacattcaatagcgaaaatccagcatgt

SEQ ID NO: 309669 - DNA, 33 bp, Homo sapien
tgtctttaaaaggaaactgtctctccaattatt

SEQ ID NO: 309670 - DNA, 33 bp, Homo sapien
tgtctttaaaaggaaattgtctctccaattatt

SEQ ID NO: 309671 - DNA, 33 bp, Homo sapien
ctcaatatcttcagaactgttgtcagaagccac

SEQ ID NO: 309672 - DNA, 33 bp, Homo sapien
ctcaatatcttcagaattgttgtcagaagccac

SEQ ID NO: 309673 - DNA, 33 bp, Homo sapien
ttaaatataattacaccatgagtaagcaagtat

SEQ ID NO: 309674 - DNA, 33 bp, Homo sapien
ttaaatataattacactatgagtaagcaagtat

SEQ ID NO: 309675 - DNA, 33 bp, Homo sapien
ctggtgtgagggagaaagaatcggtgtaatatt

SEQ ID NO: 309676 - DNA, 33 bp, Homo sapien
ctggtgtgagggagaaggaatcggtgtaatatt

SEQ ID NO: 309677 - DNA, 33 bp, Homo sapien
agagtggaaactgccaatcataccatagatatg

SEQ ID NO: 309678 - DNA, 33 bp, Homo sapien
agagtggaaactgccagtcataccatagatatg

SEQ ID NO: 309679 - DNA, 33 bp, Homo sapien
agggtaggtcatatagacaatgggttccaatgg

SEQ ID NO: 309680 - DNA, 33 bp, Homo sapien
agggtaggtcatatagccaatgggttccaatgg

SEQ ID NO: 309681 - DNA, 33 bp, Homo sapien
gtgttttaaatgtgtacgtggatgagtaagcta

SEQ ID NO: 309682 - DNA, 33 bp, Homo sapien
gtgttttaaatgtgtatgtggatgagtaagcta

SEQ ID NO: 309683 - DNA, 33 bp, Homo sapien
tgccataagcatttacaagggactatgatttga

SEQ ID NO: 309684 - DNA, 33 bp, Homo sapien
tgccataagcatttacgagggactatgatttga

SEQ ID NO: 309685 - DNA, 33 bp, Homo sapien
aaatctaaatgaatacaataccactgtctctca

SEQ ID NO: 309686 - DNA, 33 bp, Homo sapien
aaatctaaatgaatacgataccactgtctctca

SEQ ID NO: 309687 - DNA, 33 bp, Homo sapien
gctcacaatgatccaaataagtccaagaaactt

SEQ ID NO: 309688 - DNA, 33 bp, Homo sapien
gctcacaatgatccaactaagtccaagaaactt

SEQ ID NO: 309689 - DNA, 33 bp, Homo sapien
gtaagaaagcaataacccagaggaagctgtaat

SEQ ID NO: 309690 - DNA, 33 bp, Homo sapien
gtaagaaagcaataactcagaggaagctgtaat

SEQ ID NO: 309691 - DNA, 33 bp, Homo sapien
ttctggttattctacacgagacattaacccaaa

SEQ ID NO: 309692 - DNA, 33 bp, Homo sapien
ttctggttattctacatgagacattaacccaaa

SEQ ID NO: 309693 - DNA, 33 bp, Homo sapien
gtagcacatgacagtacatgaaatgattagaaa

SEQ ID NO: 309694 - DNA, 33 bp, Homo sapien
gtagcacatgacagtatatgaaatgattagaaa

SEQ ID NO: 309695 - DNA, 33 bp, Homo sapien
tattctaacctattcaacttctcatggtttgtc

SEQ ID NO: 309696 - DNA, 33 bp, Homo sapien
tattctaacctattcagcttctcatggtttgtc

SEQ ID NO: 309697 - DNA, 33 bp, Homo sapien
ttatattacttgtataaaaacattgcatttgag

SEQ ID NO: 309698 - DNA, 33 bp, Homo sapien
ttatattacttgtatacaaacattgcatttgag

SEQ ID NO: 309699 - DNA, 33 bp, Homo sapien
agacctgaagatactacatttacattgggatga

SEQ ID NO: 309700 - DNA, 33 bp, Homo sapien
agacctgaagatactagatttacattgggatga

SEQ ID NO: 309701 - DNA, 33 bp, Homo sapien
gtcaaatgtctggacacatgagagcttacataa

SEQ ID NO: 309702 - DNA, 33 bp, Homo sapien
gtcaaatgtctggacagatgagagcttacataa

SEQ ID NO: 309703 - DNA, 33 bp, Homo sapien
taatatatttttcatgcagaaaaggatactctt

SEQ ID NO: 309704 - DNA, 33 bp, Homo sapien
taatatatttttcatggagaaaaggatactctt

SEQ ID NO: 309705 - DNA, 33 bp, Homo sapien
aatgatggaagtctccaaacaactgcaaaaggg

SEQ ID NO: 309706 - DNA, 33 bp, Homo sapien
aatgatggaagtctcctaacaactgcaaaaggg

SEQ ID NO: 309707 - DNA, 33 bp, Homo sapien
actgcccccatgcaaccggaaaaaatcgtcatc

SEQ ID NO: 309708 - DNA, 33 bp, Homo sapien
actgcccccatgcaactggaaaaaatcgtcatc

SEQ ID NO: 309709 - DNA, 33 bp, Homo sapien
cagctgaggacagtcacagttgtttggtggagc

SEQ ID NO: 309710 - DNA, 33 bp, Homo sapien
cagctgaggacagtcatagttgtttggtggagc

SEQ ID NO: 309711 - DNA, 33 bp, Homo sapien
catgcaccatttgaaaacaggaatcgtaagtct

SEQ ID NO: 309712 - DNA, 33 bp, Homo sapien
catgcaccatttgaaatcaggaatcgtaagtct

SEQ ID NO: 309713 - DNA, 33 bp, Homo sapien
ctgacgatttattttacggctgctttctcttat

SEQ ID NO: 309714 - DNA, 33 bp, Homo sapien
ctgacgatttattttatggctgctttctcttat

SEQ ID NO: 309715 - DNA, 33 bp, Homo sapien
aatttgactactcatccgaggaggtgagctttg

SEQ ID NO: 309716 - DNA, 33 bp, Homo sapien
aatttgactactcatctgaggaggtgagctttg

SEQ ID NO: 309717 - DNA, 33 bp, Homo sapien
tacaatttttgccccaggtctgcatactaactt

SEQ ID NO: 309718 - DNA, 33 bp, Homo sapien
tacaatttttgccccatgtctgcatactaactt

SEQ ID NO: 309719 - DNA, 33 bp, Homo sapien
atgccatttacagaaacgcttgatagcgaggga

SEQ ID NO: 309720 - DNA, 33 bp, Homo sapien
atgccatttacagaaatgcttgatagcgaggga

SEQ ID NO: 309721 - DNA, 33 bp, Homo sapien
ttgaagctctagacaaggaggtggagagcattg

SEQ ID NO: 309722 - DNA, 33 bp, Homo sapien
ttgaagctctagacaatgaggtggagagcattg

SEQ ID NO: 309723 - DNA, 33 bp, Homo sapien
ataaaaatgatcttgtcaaatgtgaactcaaaa

SEQ ID NO: 309724 - DNA, 33 bp, Homo sapien
ataaaaatgatcttgttaaatgtgaactcaaaa

SEQ ID NO: 309725 - DNA, 33 bp, Homo sapien
gcttctttggggattagatcatgagaaaaatgg

SEQ ID NO: 309726 - DNA, 33 bp, Homo sapien
gcttctttggggattatatcatgagaaaaatgg

SEQ ID NO: 309727 - DNA, 33 bp, Homo sapien
ggaagaatgttcatggcaaaaatttgggccact

SEQ ID NO: 309728 - DNA, 33 bp, Homo sapien
ggaagaatgttcatggtaaaaatttgggccact

SEQ ID NO: 309729 - DNA, 33 bp, Homo sapien
accagaagattgtgacagtaaacagaaacaaaa

SEQ ID NO: 309730 - DNA, 33 bp, Homo sapien
accagaagattgtgacggtaaacagaaacaaaa

SEQ ID NO: 309731 - DNA, 33 bp, Homo sapien
catgtgtgtccttgcaacatgatatttatgatg

SEQ ID NO: 309732 - DNA, 33 bp, Homo sapien
catgtgtgtccttgcagcatgatatttatgatg

SEQ ID NO: 309733 - DNA, 33 bp, Homo sapien
attagaattttttgacacatgatcacagcattc

SEQ ID NO: 309734 - DNA, 33 bp, Homo sapien
attagaattttttgacgcatgatcacagcattc

SEQ ID NO: 309735 - DNA, 33 bp, Homo sapien
cttaccttttttgcaacaggaatgctttatttg

SEQ ID NO: 309736 - DNA, 33 bp, Homo sapien
cttaccttttttgcaataggaatgctttatttg

SEQ ID NO: 309737 - DNA, 33 bp, Homo sapien
tggtttctctgttttacgcattctgaccacctc

SEQ ID NO: 309738 - DNA, 33 bp, Homo sapien
tggtttctctgttttatgcattctgaccacctc

SEQ ID NO: 309739 - DNA, 33 bp, Homo sapien
tctggtgatgaacaggaccataatgctccaaag

SEQ ID NO: 309740 - DNA, 33 bp, Homo sapien
tctggtgatgaacagggccataatgctccaaag

SEQ ID NO: 309741 - DNA, 33 bp, Homo sapien
ccaactctttccataggacacaaaagtgatttc

SEQ ID NO: 309742 - DNA, 33 bp, Homo sapien
ccaactctttccatagtacacaaaagtgatttc

SEQ ID NO: 309743 - DNA, 33 bp, Homo sapien
aaatgccacatttcacagtatttttgatacagg

SEQ ID NO: 309744 - DNA, 33 bp, Homo sapien
aaatgccacatttcacggtatttttgatacagg

SEQ ID NO: 309745 - DNA, 33 bp, Homo sapien
ctgcctaggaaggagactataatggacacttgt

SEQ ID NO: 309746 - DNA, 33 bp, Homo sapien
ctgcctaggaaggagattataatggacacttgt

SEQ ID NO: 309747 - DNA, 33 bp, Homo sapien
gtgtgaatatagtgcacgggtaggaagagaatg

SEQ ID NO: 309748 - DNA, 33 bp, Homo sapien
gtgtgaatatagtgcatgggtaggaagagaatg

SEQ ID NO: 309749 - DNA, 33 bp, Homo sapien
aaacaaaatgaagctacaagcaacatgagtgag

SEQ ID NO: 309750 - DNA, 33 bp, Homo sapien
aaacaaaatgaagctataagcaacatgagtgag

SEQ ID NO: 309751 - DNA, 33 bp, Homo sapien
taagacaaggacaaagcatttctatgtggggca

SEQ ID NO: 309752 - DNA, 33 bp, Homo sapien
taagacaaggacaaagtatttctatgtggggca

SEQ ID NO: 309753 - DNA, 33 bp, Homo sapien
ggattgatcttacaaaaacaatgacatatgaag

SEQ ID NO: 309754 - DNA, 33 bp, Homo sapien
ggattgatcttacaaacacaatgacatatgaag

SEQ ID NO: 309755 - DNA, 33 bp, Homo sapien
acctctaagataaaaacgaggcagatgttctgc

SEQ ID NO: 309756 - DNA, 33 bp, Homo sapien
acctctaagataaaaatgaggcagatgttctgc

SEQ ID NO: 309757 - DNA, 33 bp, Homo sapien
aaaacagtaattctcacagtctgtgcattctta

SEQ ID NO: 309758 - DNA, 33 bp, Homo sapien
aaaacagtaattctcatagtctgtgcattctta

SEQ ID NO: 309759 - DNA, 33 bp, Homo sapien
gctttagatcatatcactcggttgtaatctctt

SEQ ID NO: 309760 - DNA, 33 bp, Homo sapien
gctttagatcatatcattcggttgtaatctctt

SEQ ID NO: 309761 - DNA, 33 bp, Homo sapien
ggcattagcaattgcactgaaacacattgccca

SEQ ID NO: 309762 - DNA, 33 bp, Homo sapien
ggcattagcaattgcattgaaacacattgccca

SEQ ID NO: 309763 - DNA, 33 bp, Homo sapien
ctccctcccagacacacccagaaagactgttta

SEQ ID NO: 309764 - DNA, 33 bp, Homo sapien
ctccctcccagacacatccagaaagactgttta

SEQ ID NO: 309765 - DNA, 33 bp, Homo sapien
ataaatcagagctggtcaaacacacaagaaaca

SEQ ID NO: 309766 - DNA, 33 bp, Homo sapien
ataaatcagagctggttaaacacacaagaaaca

SEQ ID NO: 309767 - DNA, 33 bp, Homo sapien
tctttgctatattttgaataactcagactccat

SEQ ID NO: 309768 - DNA, 33 bp, Homo sapien
tctttgctatattttgtataactcagactccat

SEQ ID NO: 309769 - DNA, 33 bp, Homo sapien
ctatgtggatatttaactggactggtttgcagg

SEQ ID NO: 309770 - DNA, 33 bp, Homo sapien
ctatgtggatatttaattggactggtttgcagg

SEQ ID NO: 309771 - DNA, 33 bp, Homo sapien
ggtgtccatttcaagaagataaactcgccacta

SEQ ID NO: 309772 - DNA, 33 bp, Homo sapien
ggtgtccatttcaagatgataaactcgccacta

SEQ ID NO: 309773 - DNA, 33 bp, Homo sapien
atataaggttgtgtgcagatacaaggttatttt

SEQ ID NO: 309774 - DNA, 33 bp, Homo sapien
atataaggttgtgtgcggatacaaggttatttt

SEQ ID NO: 309775 - DNA, 33 bp, Homo sapien
ttctaatttataccaaagaactaaagtgccagg

SEQ ID NO: 309776 - DNA, 33 bp, Homo sapien
ttctaatttataccaaggaactaaagtgccagg

SEQ ID NO: 309777 - DNA, 33 bp, Homo sapien
aaacaggactgctgaaatgaacaggggaggaaa

SEQ ID NO: 309778 - DNA, 33 bp, Homo sapien
aaacaggactgctgaagtgaacaggggaggaaa

SEQ ID NO: 309779 - DNA, 33 bp, Homo sapien
tattttgctagaaaccaagaatctcagtatgaa

SEQ ID NO: 309780 - DNA, 33 bp, Homo sapien
tattttgctagaaaccgagaatctcagtatgaa

SEQ ID NO: 309781 - DNA, 33 bp, Homo sapien
ctgattttatggctccaagaatttctattcaca

SEQ ID NO: 309782 - DNA, 33 bp, Homo sapien
ctgattttatggctccgagaatttctattcaca

SEQ ID NO: 309783 - DNA, 33 bp, Homo sapien
tgttatattgtcttgcagattataaagcacttt

SEQ ID NO: 309784 - DNA, 33 bp, Homo sapien
tgttatattgtcttgcggattataaagcacttt

SEQ ID NO: 309785 - DNA, 33 bp, Homo sapien
taagcaaagccaggataatcattcttattccat

SEQ ID NO: 309786 - DNA, 33 bp, Homo sapien
taagcaaagccaggatcatcattcttattccat

SEQ ID NO: 309787 - DNA, 33 bp, Homo sapien
atgcacagcacggttgcagatttttaacattag

SEQ ID NO: 309788 - DNA, 33 bp, Homo sapien
atgcacagcacggttgtagatttttaacattag

SEQ ID NO: 309789 - DNA, 33 bp, Homo sapien
tgatgttgtatactgactatgtgcaaagtgtct

SEQ ID NO: 309790 - DNA, 33 bp, Homo sapien
tgatgttgtatactgattatgtgcaaagtgtct

SEQ ID NO: 309791 - DNA, 33 bp, Homo sapien
agagctcctaccacaccacgggtactgagacac

SEQ ID NO: 309792 - DNA, 33 bp, Homo sapien
agagctcctaccacactacgggtactgagacac

SEQ ID NO: 309793 - DNA, 33 bp, Homo sapien
tctctgtgtaaatcttaaaaggtggtttatatt

SEQ ID NO: 309794 - DNA, 33 bp, Homo sapien
tctctgtgtaaatctttaaaggtggtttatatt

SEQ ID NO: 309795 - DNA, 33 bp, Homo sapien
ctaactcttctgtccacatttttgtgctctgga

SEQ ID NO: 309796 - DNA, 33 bp, Homo sapien
ctaactcttctgtccatatttttgtgctctgga

SEQ ID NO: 309797 - DNA, 33 bp, Homo sapien
ttgaggtgatttgtaacctaagctgaattttag

SEQ ID NO: 309798 - DNA, 33 bp, Homo sapien
ttgaggtgatttgtaagctaagctgaattttag

SEQ ID NO: 309799 - DNA, 33 bp, Homo sapien
cagagactttgtacagacaatttccttggcctg

SEQ ID NO: 309800 - DNA, 33 bp, Homo sapien
cagagactttgtacaggcaatttccttggcctg

SEQ ID NO: 309801 - DNA, 33 bp, Homo sapien
aagcaatttcggatgactcaacctaatacttat

SEQ ID NO: 309802 - DNA, 33 bp, Homo sapien
aagcaatttcggatgattcaacctaatacttat

SEQ ID NO: 309803 - DNA, 33 bp, Homo sapien
aacatgaagtattccaatagtggccaattaaat

SEQ ID NO: 309804 - DNA, 33 bp, Homo sapien
aacatgaagtattccagtagtggccaattaaat

SEQ ID NO: 309805 - DNA, 33 bp, Homo sapien
gagctagtttgtagtacataacaggctatttgt

SEQ ID NO: 309806 - DNA, 33 bp, Homo sapien
gagctagtttgtagtagataacaggctatttgt

SEQ ID NO: 309807 - DNA, 33 bp, Homo sapien
aagtttacattgcaacacaaaggttattctaag

SEQ ID NO: 309808 - DNA, 33 bp, Homo sapien
aagtttacattgcaactcaaaggttattctaag

SEQ ID NO: 309809 - DNA, 33 bp, Homo sapien
tacattccagccataccggccttctttctgttc

SEQ ID NO: 309810 - DNA, 33 bp, Homo sapien
tacattccagccatactggccttctttctgttc

SEQ ID NO: 309811 - DNA, 33 bp, Homo sapien
tggtgaaagccaggcacgtttcttactatggga

SEQ ID NO: 309812 - DNA, 33 bp, Homo sapien
tggtgaaagccaggcaggtttcttactatggga

SEQ ID NO: 309813 - DNA, 33 bp, Homo sapien
tcaatgggctgaataacgcagaatagaccacag

SEQ ID NO: 309814 - DNA, 33 bp, Homo sapien
tcaatgggctgaataatgcagaatagaccacag

SEQ ID NO: 309815 - DNA, 33 bp, Homo sapien
tcaggtactgaactgaatattaggcaaaaatag

SEQ ID NO: 309816 - DNA, 33 bp, Homo sapien
tcaggtactgaactgagtattaggcaaaaatag

SEQ ID NO: 309817 - DNA, 33 bp, Homo sapien
ctctgcagaggagatcacctcgttctcagggat

SEQ ID NO: 309818 - DNA, 33 bp, Homo sapien
ctctgcagaggagatcgcctcgttctcagggat

SEQ ID NO: 309819 - DNA, 33 bp, Homo sapien
tttgcagagctgccgccgaacttattttttgga

SEQ ID NO: 309820 - DNA, 33 bp, Homo sapien
tttgcagagctgccgctgaacttattttttgga

SEQ ID NO: 309821 - DNA, 33 bp, Homo sapien
cctaatagatggaaaagatggcaggatgtcttg

SEQ ID NO: 309822 - DNA, 33 bp, Homo sapien
cctaatagatggaaaatatggcaggatgtcttg

SEQ ID NO: 309823 - DNA, 33 bp, Homo sapien
gaggtgttaggaatccacaaaacagacggagaa

SEQ ID NO: 309824 - DNA, 33 bp, Homo sapien
gaggtgttaggaatccgcaaaacagacggagaa

SEQ ID NO: 309825 - DNA, 33 bp, Homo sapien
acgaaattcagatagaaaaaatggggacaaaaa

SEQ ID NO: 309826 - DNA, 33 bp, Homo sapien
acgaaattcagatagagaaaatggggacaaaaa

SEQ ID NO: 309827 - DNA, 33 bp, Homo sapien
aatgttactaagaagaagcttttgtctgttatt

SEQ ID NO: 309828 - DNA, 33 bp, Homo sapien
aatgttactaagaagatgcttttgtctgttatt

SEQ ID NO: 309829 - DNA, 33 bp, Homo sapien
acttggtgagaagaataactacacattttctaa

SEQ ID NO: 309830 - DNA, 33 bp, Homo sapien
acttggtgagaagaatgactacacattttctaa

SEQ ID NO: 309831 - DNA, 33 bp, Homo sapien
catgaagaagttggcacgtcctagcactgaagt

SEQ ID NO: 309832 - DNA, 33 bp, Homo sapien
catgaagaagttggcatgtcctagcactgaagt

SEQ ID NO: 309833 - DNA, 33 bp, Homo sapien
tcatcgctctttgaaacaatcagaatgtcagga

SEQ ID NO: 309834 - DNA, 33 bp, Homo sapien
tcatcgctctttgaaataatcagaatgtcagga

SEQ ID NO: 309835 - DNA, 33 bp, Homo sapien
tgatgagcagctctacaatatcacaaaataagt

SEQ ID NO: 309836 - DNA, 33 bp, Homo sapien
tgatgagcagctctacgatatcacaaaataagt

SEQ ID NO: 309837 - DNA, 33 bp, Homo sapien
atggacatctctaggaactctgagctcttaatc

SEQ ID NO: 309838 - DNA, 33 bp, Homo sapien
atggacatctctaggatctctgagctcttaatc

SEQ ID NO: 309839 - DNA, 33 bp, Homo sapien
gtagtttggcctataaccttctagtgcttcact

SEQ ID NO: 309840 - DNA, 33 bp, Homo sapien
gtagtttggcctataagcttctagtgcttcact

SEQ ID NO: 309841 - DNA, 33 bp, Homo sapien
gagagaccacaaattacggaaatgaaagaaggg

SEQ ID NO: 309842 - DNA, 33 bp, Homo sapien
gagagaccacaaattatggaaatgaaagaaggg

SEQ ID NO: 309843 - DNA, 33 bp, Homo sapien
tgtccatgtgagaaagcctgattcctattgagg

SEQ ID NO: 309844 - DNA, 33 bp, Homo sapien
tgtccatgtgagaaagtctgattcctattgagg

SEQ ID NO: 309845 - DNA, 33 bp, Homo sapien
gcctctggagacgtccgcttttacctcaatagg

SEQ ID NO: 309846 - DNA, 33 bp, Homo sapien
gcctctggagacgtcctcttttacctcaatagg

SEQ ID NO: 309847 - DNA, 33 bp, Homo sapien
actaaaaaaacagacaatgctggagctcaggaa

SEQ ID NO: 309848 - DNA, 33 bp, Homo sapien
actaaaaaaacagacagtgctggagctcaggaa

SEQ ID NO: 309849 - DNA, 33 bp, Homo sapien
aagtcattggagtggactcaaaaggaacaagag

SEQ ID NO: 309850 - DNA, 33 bp, Homo sapien
aagtcattggagtggattcaaaaggaacaagag

SEQ ID NO: 309851 - DNA, 33 bp, Homo sapien
attcctatcagaataccgacgacaatcttcaca

SEQ ID NO: 309852 - DNA, 33 bp, Homo sapien
attcctatcagaatactgacgacaatcttcaca

SEQ ID NO: 309853 - DNA, 33 bp, Homo sapien
ctcagtgcacacattacacaccagtgctagagg

SEQ ID NO: 309854 - DNA, 33 bp, Homo sapien
ctcagtgcacacattatacaccagtgctagagg

SEQ ID NO: 309855 - DNA, 33 bp, Homo sapien
atgaacttttactgtaggaagccattgagattc

SEQ ID NO: 309856 - DNA, 33 bp, Homo sapien
atgaacttttactgtatgaagccattgagattc

SEQ ID NO: 309857 - DNA, 33 bp, Homo sapien
ttccatgaggtaatagacataggatctcagatt

SEQ ID NO: 309858 - DNA, 33 bp, Homo sapien
ttccatgaggtaatagtcataggatctcagatt

SEQ ID NO: 309859 - DNA, 33 bp, Homo sapien
ttttaataacttagggaaattgataagtgggac

SEQ ID NO: 309860 - DNA, 33 bp, Homo sapien
ttttaataacttaggggaattgataagtgggac

SEQ ID NO: 309861 - DNA, 33 bp, Homo sapien
aacagactgggaaaacactgattctgctgagta

SEQ ID NO: 309862 - DNA, 33 bp, Homo sapien
aacagactgggaaaacgctgattctgctgagta

SEQ ID NO: 309863 - DNA, 33 bp, Homo sapien
tcatctcttatcatcagctaggcatcatatcat

SEQ ID NO: 309864 - DNA, 33 bp, Homo sapien
tcatctcttatcatcatctaggcatcatatcat

SEQ ID NO: 309865 - DNA, 33 bp, Homo sapien
ttaaaaattctggagacgaactgaaaagtattc

SEQ ID NO: 309866 - DNA, 33 bp, Homo sapien
ttaaaaattctggagatgaactgaaaagtattc

SEQ ID NO: 309867 - DNA, 33 bp, Homo sapien
ccctttagctggttcacatatacaactgaagtc

SEQ ID NO: 309868 - DNA, 33 bp, Homo sapien
ccctttagctggttcatatatacaactgaagtc

SEQ ID NO: 309869 - DNA, 33 bp, Homo sapien
catgggataaagttaccattattctcatgttac

SEQ ID NO: 309870 - DNA, 33 bp, Homo sapien
catgggataaagttactattattctcatgttac

SEQ ID NO: 309871 - DNA, 33 bp, Homo sapien
tacttcaaaggattgagatgttgcaacagattc

SEQ ID NO: 309872 - DNA, 33 bp, Homo sapien
tacttcaaaggattgatatgttgcaacagattc

SEQ ID NO: 309873 - DNA, 33 bp, Homo sapien
ttcatttgaaactggaagaactatgatgtcaag

SEQ ID NO: 309874 - DNA, 33 bp, Homo sapien
ttcatttgaaactggaggaactatgatgtcaag

SEQ ID NO: 309875 - DNA, 33 bp, Homo sapien
gagcaagaagtaaaaagagtgtaagcatttcat

SEQ ID NO: 309876 - DNA, 33 bp, Homo sapien
gagcaagaagtaaaaatagtgtaagcatttcat

SEQ ID NO: 309877 - DNA, 33 bp, Homo sapien
cttatcacctttatcccatcaccaatttatctc

SEQ ID NO: 309878 - DNA, 33 bp, Homo sapien
cttatcacctttatcctatcaccaatttatctc

SEQ ID NO: 309879 - DNA, 33 bp, Homo sapien
aatgcctcctctactgcagtttgcatgtgctga

SEQ ID NO: 309880 - DNA, 33 bp, Homo sapien
aatgcctcctctactgtagtttgcatgtgctga

SEQ ID NO: 309881 - DNA, 33 bp, Homo sapien
catgatttggaattccggatttttcccacgaat

SEQ ID NO: 309882 - DNA, 33 bp, Homo sapien
catgatttggaattcctgatttttcccacgaat

SEQ ID NO: 309883 - DNA, 33 bp, Homo sapien
aagtaactggcctaaactttaagttactgaaac

SEQ ID NO: 309884 - DNA, 33 bp, Homo sapien
aagtaactggcctaaattttaagttactgaaac

SEQ ID NO: 309885 - DNA, 33 bp, Homo sapien
ggatactttattataacaatcaggagtatcaca

SEQ ID NO: 309886 - DNA, 33 bp, Homo sapien
ggatactttattataagaatcaggagtatcaca

SEQ ID NO: 309887 - DNA, 33 bp, Homo sapien
caactgggtatgcagcaccacttttgcattatt

SEQ ID NO: 309888 - DNA, 33 bp, Homo sapien
caactgggtatgcagcgccacttttgcattatt

SEQ ID NO: 309889 - DNA, 33 bp, Homo sapien
atatgcagttgtggtcacagacaccagaaagaa

SEQ ID NO: 309890 - DNA, 33 bp, Homo sapien
atatgcagttgtggtctcagacaccagaaagaa

SEQ ID NO: 309891 - DNA, 33 bp, Homo sapien
ttttcaggaatgttcacatgactgtttctttct

SEQ ID NO: 309892 - DNA, 33 bp, Homo sapien
ttttcaggaatgttcatatgactgtttctttct

SEQ ID NO: 309893 - DNA, 33 bp, Homo sapien
tggccttgaggttagtaaattttctatcaagaa

SEQ ID NO: 309894 - DNA, 33 bp, Homo sapien
tggccttgaggttagtgaattttctatcaagaa

SEQ ID NO: 309895 - DNA, 33 bp, Homo sapien
aaaatctaatggcaaagaatgaattgaaagatg

SEQ ID NO: 309896 - DNA, 33 bp, Homo sapien
aaaatctaatggcaaataatgaattgaaagatg

SEQ ID NO: 309897 - DNA, 33 bp, Homo sapien
tctattcctcactcatcagctcttgagcaccac

SEQ ID NO: 309898 - DNA, 33 bp, Homo sapien
tctattcctcactcattagctcttgagcaccac

SEQ ID NO: 309899 - DNA, 33 bp, Homo sapien
tgctatttattatttccaaccatcttatttcag

SEQ ID NO: 309900 - DNA, 33 bp, Homo sapien
tgctatttattatttcgaaccatcttatttcag

SEQ ID NO: 309901 - DNA, 33 bp, Homo sapien
gtacacaccagtggaacgttttacaaagaagtt

SEQ ID NO: 309902 - DNA, 33 bp, Homo sapien
gtacacaccagtggaatgttttacaaagaagtt

SEQ ID NO: 309903 - DNA, 33 bp, Homo sapien
gaccagatgttttaaaatggacaatatcacata

SEQ ID NO: 309904 - DNA, 33 bp, Homo sapien
gaccagatgttttaaagtggacaatatcacata

SEQ ID NO: 309905 - DNA, 33 bp, Homo sapien
tatatactttaaccaccaaaatgttctcaaggt

SEQ ID NO: 309906 - DNA, 33 bp, Homo sapien
tatatactttaaccactaaaatgttctcaaggt

SEQ ID NO: 309907 - DNA, 33 bp, Homo sapien
gtctataattaaggtacggaaatgtatgagtat

SEQ ID NO: 309908 - DNA, 33 bp, Homo sapien
gtctataattaaggtagggaaatgtatgagtat

SEQ ID NO: 309909 - DNA, 33 bp, Homo sapien
tccttgtggtcctttcacaattccactggcagc

SEQ ID NO: 309910 - DNA, 33 bp, Homo sapien
tccttgtggtcctttcgcaattccactggcagc

SEQ ID NO: 309911 - DNA, 33 bp, Homo sapien
attttttcctgtgaataatagagtggaggtgtc

SEQ ID NO: 309912 - DNA, 33 bp, Homo sapien
attttttcctgtgaatgatagagtggaggtgtc

SEQ ID NO: 309913 - DNA, 33 bp, Homo sapien
caagactggctgtctaaagtgctttctggagaa

SEQ ID NO: 309914 - DNA, 33 bp, Homo sapien
caagactggctgtctagagtgctttctggagaa

SEQ ID NO: 309915 - DNA, 33 bp, Homo sapien
atagccagcaaacaaactgaaccacatttgaca

SEQ ID NO: 309916 - DNA, 33 bp, Homo sapien
atagccagcaaacaaattgaaccacatttgaca

SEQ ID NO: 309917 - DNA, 33 bp, Homo sapien
gtttacacaaatttacacaagaagttggaacta

SEQ ID NO: 309918 - DNA, 33 bp, Homo sapien
gtttacacaaatttacgcaagaagttggaacta

SEQ ID NO: 309919 - DNA, 33 bp, Homo sapien
agcagaccgattgtcacgatgggcccttaattt

SEQ ID NO: 309920 - DNA, 33 bp, Homo sapien
agcagaccgattgtcaggatgggcccttaattt

SEQ ID NO: 309921 - DNA, 33 bp, Homo sapien
atcaacactggtttcaactactgcagcaattgc

SEQ ID NO: 309922 - DNA, 33 bp, Homo sapien
atcaacactggtttcagctactgcagcaattgc

SEQ ID NO: 309923 - DNA, 33 bp, Homo sapien
tccccctttggaattacggcaaaaaggtgaact

SEQ ID NO: 309924 - DNA, 33 bp, Homo sapien
tccccctttggaattatggcaaaaaggtgaact

SEQ ID NO: 309925 - DNA, 33 bp, Homo sapien
tttgtgtgatgattaccggtaacattctcattt

SEQ ID NO: 309926 - DNA, 33 bp, Homo sapien
tttgtgtgatgattactggtaacattctcattt

SEQ ID NO: 309927 - DNA, 33 bp, Homo sapien
accattatgttagggacgcttactcatcaattc

SEQ ID NO: 309928 - DNA, 33 bp, Homo sapien
accattatgttagggatgcttactcatcaattc

SEQ ID NO: 309929 - DNA, 33 bp, Homo sapien
atttttcagttaatgacggtggcatttgctaag

SEQ ID NO: 309930 - DNA, 33 bp, Homo sapien
atttttcagttaatgatggtggcatttgctaag

SEQ ID NO: 309931 - DNA, 33 bp, Homo sapien
aactgaggcctcagccaaacatgtgaggagctt

SEQ ID NO: 309932 - DNA, 33 bp, Homo sapien
aactgaggcctcagccgaacatgtgaggagctt

SEQ ID NO: 309933 - DNA, 33 bp, Homo sapien
ttcaggtctcaacttacaggtcccttcctctag

SEQ ID NO: 309934 - DNA, 33 bp, Homo sapien
ttcaggtctcaacttagaggtcccttcctctag

SEQ ID NO: 309935 - DNA, 33 bp, Homo sapien
tttttttttttttagcaactcatgagcagatat

SEQ ID NO: 309936 - DNA, 33 bp, Homo sapien
tttttttttttttagcgactcatgagcagatat

SEQ ID NO: 309937 - DNA, 33 bp, Homo sapien
cttattcttgtcctagacattccaacactgtag

SEQ ID NO: 309938 - DNA, 33 bp, Homo sapien
cttattcttgtcctagccattccaacactgtag

SEQ ID NO: 309939 - DNA, 33 bp, Homo sapien
ggaagttcctgcaaaggaataggtcagtagttt

SEQ ID NO: 309940 - DNA, 33 bp, Homo sapien
ggaagttcctgcaaagtaataggtcagtagttt

SEQ ID NO: 309941 - DNA, 33 bp, Homo sapien
agggaagtttcaaggcagaaatggcatgtggtc

SEQ ID NO: 309942 - DNA, 33 bp, Homo sapien
agggaagtttcaaggcggaaatggcatgtggtc

SEQ ID NO: 309943 - DNA, 33 bp, Homo sapien
tttagcttctcctagccatcttgcatcttcaga

SEQ ID NO: 309944 - DNA, 33 bp, Homo sapien
tttagcttctcctagctatcttgcatcttcaga

SEQ ID NO: 309945 - DNA, 33 bp, Homo sapien
gttggggagaagtgcaacaagaagagccacaga

SEQ ID NO: 309946 - DNA, 33 bp, Homo sapien
gttggggagaagtgcatcaagaagagccacaga

SEQ ID NO: 309947 - DNA, 33 bp, Homo sapien
cttttgtgtatcaatacgcaagtcccgaaaaat

SEQ ID NO: 309948 - DNA, 33 bp, Homo sapien
cttttgtgtatcaataggcaagtcccgaaaaat

SEQ ID NO: 309949 - DNA, 33 bp, Homo sapien
tgtaatccctattgaacctgtttggaacaactc

SEQ ID NO: 309950 - DNA, 33 bp, Homo sapien
tgtaatccctattgaagctgtttggaacaactc

SEQ ID NO: 309951 - DNA, 33 bp, Homo sapien
ctcaatggtacatttaaaacagctaaaatggca

SEQ ID NO: 309952 - DNA, 33 bp, Homo sapien
ctcaatggtacatttacaacagctaaaatggca

SEQ ID NO: 309953 - DNA, 33 bp, Homo sapien
tttgtgaacagcctacacccataactgatgatg

SEQ ID NO: 309954 - DNA, 33 bp, Homo sapien
tttgtgaacagcctacgcccataactgatgatg

SEQ ID NO: 309955 - DNA, 33 bp, Homo sapien
aatgactaattaacaaaaacctaattcagatat

SEQ ID NO: 309956 - DNA, 33 bp, Homo sapien
aatgactaattaacaagaacctaattcagatat

SEQ ID NO: 309957 - DNA, 33 bp, Homo sapien
aagtatctaagtaaagaacccagtatatagctt

SEQ ID NO: 309958 - DNA, 33 bp, Homo sapien
aagtatctaagtaaaggacccagtatatagctt

SEQ ID NO: 309959 - DNA, 33 bp, Homo sapien
atttttaaatttttcaactgattagtagtcaac

SEQ ID NO: 309960 - DNA, 33 bp, Homo sapien
atttttaaatttttcagctgattagtagtcaac

SEQ ID NO: 309961 - DNA, 33 bp, Homo sapien
actttttccacctctacatattgagcaaatcaa

SEQ ID NO: 309962 - DNA, 33 bp, Homo sapien
actttttccacctctatatattgagcaaatcaa

SEQ ID NO: 309963 - DNA, 33 bp, Homo sapien
ttccagaatttattctcaatctgtgactctatt

SEQ ID NO: 309964 - DNA, 33 bp, Homo sapien
ttccagaatttattctgaatctgtgactctatt

SEQ ID NO: 309965 - DNA, 33 bp, Homo sapien
cttattatcacttgtgaaattcgatttacctcc

SEQ ID NO: 309966 - DNA, 33 bp, Homo sapien
cttattatcacttgtggaattcgatttacctcc

SEQ ID NO: 309967 - DNA, 33 bp, Homo sapien
acttgagattgttccaggttgcaaatatcagta

SEQ ID NO: 309968 - DNA, 33 bp, Homo sapien
acttgagattgttccatgttgcaaatatcagta

SEQ ID NO: 309969 - DNA, 33 bp, Homo sapien
tattttcatgtggaaaaaaaatccatgctcttt

SEQ ID NO: 309970 - DNA, 33 bp, Homo sapien
tattttcatgtggaaacaaaatccatgctcttt

SEQ ID NO: 309971 - DNA, 33 bp, Homo sapien
tggtgagaaacgggggaaaagatggtaattgat

SEQ ID NO: 309972 - DNA, 33 bp, Homo sapien
tggtgagaaacggggggaaagatggtaattgat

SEQ ID NO: 309973 - DNA, 33 bp, Homo sapien
ttagagttcatcagatcagtactctcagagcct

SEQ ID NO: 309974 - DNA, 33 bp, Homo sapien
ttagagttcatcagattagtactctcagagcct

SEQ ID NO: 309975 - DNA, 33 bp, Homo sapien
aaccttttacataaaacagtggtcagagcaccc

SEQ ID NO: 309976 - DNA, 33 bp, Homo sapien
aaccttttacataaaatagtggtcagagcaccc

SEQ ID NO: 309977 - DNA, 33 bp, Homo sapien
tttgggccagacgtaaaaaaatgctgagtatta

SEQ ID NO: 309978 - DNA, 33 bp, Homo sapien
tttgggccagacgtaagaaaatgctgagtatta

SEQ ID NO: 309979 - DNA, 33 bp, Homo sapien
taatcacacaacagaacgttatgcagcaacgag

SEQ ID NO: 309980 - DNA, 33 bp, Homo sapien
taatcacacaacagaatgttatgcagcaacgag

SEQ ID NO: 309981 - DNA, 33 bp, Homo sapien
tgctttactttctaagacagcccctgggcctgc

SEQ ID NO: 309982 - DNA, 33 bp, Homo sapien
tgctttactttctaagtcagcccctgggcctgc

SEQ ID NO: 309983 - DNA, 33 bp, Homo sapien
tctgggtttatgtttacgtcgatccttttctgg

SEQ ID NO: 309984 - DNA, 33 bp, Homo sapien
tctgggtttatgtttatgtcgatccttttctgg

SEQ ID NO: 309985 - DNA, 33 bp, Homo sapien
caaaaatagaaagagaagcatgaaagtgtcttg

SEQ ID NO: 309986 - DNA, 33 bp, Homo sapien
caaaaatagaaagagaggcatgaaagtgtcttg

SEQ ID NO: 309987 - DNA, 33 bp, Homo sapien
ggaaaagtaagtaacgccatataaaatcctcat

SEQ ID NO: 309988 - DNA, 33 bp, Homo sapien
ggaaaagtaagtaacgtcatataaaatcctcat

SEQ ID NO: 309989 - DNA, 33 bp, Homo sapien
catcttgtcctccaaaacttgagctccaccgaa

SEQ ID NO: 309990 - DNA, 33 bp, Homo sapien
catcttgtcctccaaagcttgagctccaccgaa

SEQ ID NO: 309991 - DNA, 33 bp, Homo sapien
tattctgcacaaaactcagagaccgcccaccac

SEQ ID NO: 309992 - DNA, 33 bp, Homo sapien
tattctgcacaaaacttagagaccgcccaccac

SEQ ID NO: 309993 - DNA, 33 bp, Homo sapien
agcccatacactcttacgtgatctgatataaaa

SEQ ID NO: 309994 - DNA, 33 bp, Homo sapien
agcccatacactcttatgtgatctgatataaaa

SEQ ID NO: 309995 - DNA, 33 bp, Homo sapien
tctgtcctccattcctaaaattttgtcacttca

SEQ ID NO: 309996 - DNA, 33 bp, Homo sapien
tctgtcctccattcctcaaattttgtcacttca

SEQ ID NO: 309997 - DNA, 33 bp, Homo sapien
aggccacaagttgttgcatttggtgtaaaccag

SEQ ID NO: 309998 - DNA, 33 bp, Homo sapien
aggccacaagttgttggatttggtgtaaaccag

SEQ ID NO: 309999 - DNA, 33 bp, Homo sapien
gcagactgaattgtgaagaaactctgcgactta

SEQ ID NO: 310000 - DNA, 33 bp, Homo sapien
gcagactgaattgtgacgaaactctgcgactta

SEQ ID NO: 310001 - DNA, 33 bp, Homo sapien
aggaaagagttggtggaactagcttatcatgga

SEQ ID NO: 310002 - DNA, 33 bp, Homo sapien
aggaaagagttggtgggactagcttatcatgga

SEQ ID NO: 310003 - DNA, 33 bp, Homo sapien
gaaagaaagggcatgcaagttcagaacctgtct

SEQ ID NO: 310004 - DNA, 33 bp, Homo sapien
gaaagaaagggcatgcgagttcagaacctgtct

SEQ ID NO: 310005 - DNA, 33 bp, Homo sapien
ttgtctttacttgtataaggcatcccaccagtg

SEQ ID NO: 310006 - DNA, 33 bp, Homo sapien
ttgtctttacttgtatgaggcatcccaccagtg

SEQ ID NO: 310007 - DNA, 33 bp, Homo sapien
cactgggacattgagagccacatgggcacacaa

SEQ ID NO: 310008 - DNA, 33 bp, Homo sapien
cactgggacattgagatccacatgggcacacaa

SEQ ID NO: 310009 - DNA, 33 bp, Homo sapien
ctaaagtggagtaaagcaatgttaggaaatgct

SEQ ID NO: 310010 - DNA, 33 bp, Homo sapien
ctaaagtggagtaaaggaatgttaggaaatgct

SEQ ID NO: 310011 - DNA, 33 bp, Homo sapien
gccatcactcagttggaatttcaccaggcttcc

SEQ ID NO: 310012 - DNA, 33 bp, Homo sapien
gccatcactcagttggcatttcaccaggcttcc

SEQ ID NO: 310013 - DNA, 33 bp, Homo sapien
taagccatggcatcaggagagaaaagagatgtt

SEQ ID NO: 310014 - DNA, 33 bp, Homo sapien
taagccatggcatcagtagagaaaagagatgtt

SEQ ID NO: 310015 - DNA, 33 bp, Homo sapien
cagcacaaaggacaatcaataataggatcgata

SEQ ID NO: 310016 - DNA, 33 bp, Homo sapien
cagcacaaaggacaattaataataggatcgata

SEQ ID NO: 310017 - DNA, 33 bp, Homo sapien
tcactcgtaaatgtaccctatttctaccctatt

SEQ ID NO: 310018 - DNA, 33 bp, Homo sapien
tcactcgtaaatgtacgctatttctaccctatt

SEQ ID NO: 310019 - DNA, 33 bp, Homo sapien
cacatgaaataagagaagggcaattctccaaag

SEQ ID NO: 310020 - DNA, 33 bp, Homo sapien
cacatgaaataagagaggggcaattctccaaag

SEQ ID NO: 310021 - DNA, 33 bp, Homo sapien
ccaagttgtgaaaggaaagttattgagggactt

SEQ ID NO: 310022 - DNA, 33 bp, Homo sapien
ccaagttgtgaaaggagagttattgagggactt

SEQ ID NO: 310023 - DNA, 33 bp, Homo sapien
ggctgaaaagaaggaacaataaatgaggtgagg

SEQ ID NO: 310024 - DNA, 33 bp, Homo sapien
ggctgaaaagaaggaagaataaatgaggtgagg

SEQ ID NO: 310025 - DNA, 33 bp, Homo sapien
cagtatagacccaaacagctagcaacaacagga

SEQ ID NO: 310026 - DNA, 33 bp, Homo sapien
cagtatagacccaaacggctagcaacaacagga

SEQ ID NO: 310027 - DNA, 33 bp, Homo sapien
tggttgcccagagataaagaatgaataggatgt

SEQ ID NO: 310028 - DNA, 33 bp, Homo sapien
tggttgcccagagatagagaatgaataggatgt

SEQ ID NO: 310029 - DNA, 33 bp, Homo sapien
ggattagcaattgtaaccacctaatgctctttc

SEQ ID NO: 310030 - DNA, 33 bp, Homo sapien
ggattagcaattgtaagcacctaatgctctttc

SEQ ID NO: 310031 - DNA, 33 bp, Homo sapien
taccagattctttacaatgagcaatcaaatgct

SEQ ID NO: 310032 - DNA, 33 bp, Homo sapien
taccagattctttacagtgagcaatcaaatgct

SEQ ID NO: 310033 - DNA, 33 bp, Homo sapien
atgatttaaaggaaaacaggaggcatcatctaa

SEQ ID NO: 310034 - DNA, 33 bp, Homo sapien
atgatttaaaggaaaagaggaggcatcatctaa

SEQ ID NO: 310035 - DNA, 33 bp, Homo sapien
tattaaacttctgtgacctagctattctcatta

SEQ ID NO: 310036 - DNA, 33 bp, Homo sapien
tattaaacttctgtgagctagctattctcatta

SEQ ID NO: 310037 - DNA, 33 bp, Homo sapien
tgagaggccctctttcaatctgttagcagtcat

SEQ ID NO: 310038 - DNA, 33 bp, Homo sapien
tgagaggccctctttcgatctgttagcagtcat

SEQ ID NO: 310039 - DNA, 33 bp, Homo sapien
ctggaacactttgtggaaagcaagttcacgagt

SEQ ID NO: 310040 - DNA, 33 bp, Homo sapien
ctggaacactttgtgggaagcaagttcacgagt

SEQ ID NO: 310041 - DNA, 33 bp, Homo sapien
gtagaggcttaaatagcacttgccgtgggaatt

SEQ ID NO: 310042 - DNA, 33 bp, Homo sapien
gtagaggcttaaatagtacttgccgtgggaatt

SEQ ID NO: 310043 - DNA, 33 bp, Homo sapien
cccccattacccagaacagttaacagctactct

SEQ ID NO: 310044 - DNA, 33 bp, Homo sapien
cccccattacccagaatagttaacagctactct

SEQ ID NO: 310045 - DNA, 33 bp, Homo sapien
acaacttcaggaaatcaaatgtgcaaaactacc

SEQ ID NO: 310046 - DNA, 33 bp, Homo sapien
acaacttcaggaaatcgaatgtgcaaaactacc

SEQ ID NO: 310047 - DNA, 33 bp, Homo sapien
catgtccgttgctctcacttctcatgtcacatc

SEQ ID NO: 310048 - DNA, 33 bp, Homo sapien
catgtccgttgctctcgcttctcatgtcacatc

SEQ ID NO: 310049 - DNA, 33 bp, Homo sapien
gagtaatgggccacccaatggtctggtttgcgg

SEQ ID NO: 310050 - DNA, 33 bp, Homo sapien
gagtaatgggccacccgatggtctggtttgcgg

SEQ ID NO: 310051 - DNA, 33 bp, Homo sapien
tcttcattcaaacctacactaaatgacgttgga

SEQ ID NO: 310052 - DNA, 33 bp, Homo sapien
tcttcattcaaacctagactaaatgacgttgga

SEQ ID NO: 310053 - DNA, 33 bp, Homo sapien
aggcagaggctttctcgaagcatcctccaatct

SEQ ID NO: 310054 - DNA, 33 bp, Homo sapien
aggcagaggctttctctaagcatcctccaatct

SEQ ID NO: 310055 - DNA, 33 bp, Homo sapien
aattttgctgaataaaggttgtcttgttataca

SEQ ID NO: 310056 - DNA, 33 bp, Homo sapien
aattttgctgaataaatgttgtcttgttataca

SEQ ID NO: 310057 - DNA, 33 bp, Homo sapien
ttctctaagacttgaccgatctaacgctttgaa

SEQ ID NO: 310058 - DNA, 33 bp, Homo sapien
ttctctaagacttgactgatctaacgctttgaa

SEQ ID NO: 310059 - DNA, 33 bp, Homo sapien
acccaagaatctcaataagctccaagcacaaga

SEQ ID NO: 310060 - DNA, 33 bp, Homo sapien
acccaagaatctcaatgagctccaagcacaaga

SEQ ID NO: 310061 - DNA, 33 bp, Homo sapien
accaagccttcatgtactaaggagaccagcata

SEQ ID NO: 310062 - DNA, 33 bp, Homo sapien
accaagccttcatgtattaaggagaccagcata

SEQ ID NO: 310063 - DNA, 33 bp, Homo sapien
taataggaatcaactaccagactgaaaaaataa

SEQ ID NO: 310064 - DNA, 33 bp, Homo sapien
taataggaatcaactatcagactgaaaaaataa

SEQ ID NO: 310065 - DNA, 33 bp, Homo sapien
atatgcaattaagagtaaaatctacacttttgg

SEQ ID NO: 310066 - DNA, 33 bp, Homo sapien
atatgcaattaagagtgaaatctacacttttgg

SEQ ID NO: 310067 - DNA, 33 bp, Homo sapien
gcatctgctagtttgaaaaccttcctgaactaa

SEQ ID NO: 310068 - DNA, 33 bp, Homo sapien
gcatctgctagtttgagaaccttcctgaactaa

SEQ ID NO: 310069 - DNA, 33 bp, Homo sapien
agatgttattgctcaacgctagttagagtcaaa

SEQ ID NO: 310070 - DNA, 33 bp, Homo sapien
agatgttattgctcaatgctagttagagtcaaa

SEQ ID NO: 310071 - DNA, 33 bp, Homo sapien
cagtcactgaaaccacgctaaagccacacaact

SEQ ID NO: 310072 - DNA, 33 bp, Homo sapien
cagtcactgaaaccactctaaagccacacaact

SEQ ID NO: 310073 - DNA, 33 bp, Homo sapien
aactacacggagagaacaaaaaagatatggagg

SEQ ID NO: 310074 - DNA, 33 bp, Homo sapien
aactacacggagagaagaaaaaagatatggagg

SEQ ID NO: 310075 - DNA, 33 bp, Homo sapien
tctgcataaaccaagaagacattgctggaacag

SEQ ID NO: 310076 - DNA, 33 bp, Homo sapien
tctgcataaaccaagaggacattgctggaacag

SEQ ID NO: 310077 - DNA, 33 bp, Homo sapien
accccttgtggattacagatgtcagttaaattt

SEQ ID NO: 310078 - DNA, 33 bp, Homo sapien
accccttgtggattacggatgtcagttaaattt

SEQ ID NO: 310079 - DNA, 33 bp, Homo sapien
ctgtatcgtattatacaaaagcagagcgacatt

SEQ ID NO: 310080 - DNA, 33 bp, Homo sapien
ctgtatcgtattataccaaagcagagcgacatt

SEQ ID NO: 310081 - DNA, 33 bp, Homo sapien
aggtgtccatgctaaagaatttcttttggagaa

SEQ ID NO: 310082 - DNA, 33 bp, Homo sapien
aggtgtccatgctaaataatttcttttggagaa

SEQ ID NO: 310083 - DNA, 33 bp, Homo sapien
ttctaaattagcatgactcatctgtccttcctt

SEQ ID NO: 310084 - DNA, 33 bp, Homo sapien
ttctaaattagcatgattcatctgtccttcctt

SEQ ID NO: 310085 - DNA, 33 bp, Homo sapien; identical to SEQ ID NO: 310083

SEQ ID NO: 310086 - DNA, 33 bp, Homo sapien; identical to SEQ ID NO: 310084

SEQ ID NO: 310087 - DNA, 33 bp, Homo sapien
aagagcaacactattccgaagtttttgtggtgt

SEQ ID NO: 310088 - DNA, 33 bp, Homo sapien
aagagcaacactattctgaagtttttgtggtgt

SEQ ID NO: 310089 - DNA, 33 bp, Homo sapien
atgaagaataatcagaaggaactacaccacaaa

SEQ ID NO: 310090 - DNA, 33 bp, Homo sapien
atgaagaataatcagagggaactacaccacaaa

SEQ ID NO: 310091 - DNA, 33 bp, Homo sapien
gaaaattgagggcaaaagttatctggtggctaa

SEQ ID NO: 310092 - DNA, 33 bp, Homo sapien
gaaaattgagggcaaaggttatctggtggctaa

SEQ ID NO: 310093 - DNA, 33 bp, Homo sapien
aaattttcagaactacaaaagattgaagatcat

SEQ ID NO: 310094 - DNA, 33 bp, Homo sapien
aaattttcagaactacgaaagattgaagatcat

SEQ ID NO: 310095 - DNA, 33 bp, Homo sapien
ccacaaaggacgtgtcagaagcaggcacatgcc

SEQ ID NO: 310096 - DNA, 33 bp, Homo sapien
ccacaaaggacgtgtcggaagcaggcacatgcc

SEQ ID NO: 310097 - DNA, 33 bp, Homo sapien
aattcaagtccaaaaaacttcagtaactcagct

SEQ ID NO: 310098 - DNA, 33 bp, Homo sapien
aattcaagtccaaaaagcttcagtaactcagct

SEQ ID NO: 310099 - DNA, 33 bp, Homo sapien
ctggagttttggaatacaggttgcaccataatg

SEQ ID NO: 310100 - DNA, 33 bp, Homo sapien
ctggagttttggaatagaggttgcaccataatg

SEQ ID NO: 310101 - DNA, 33 bp, Homo sapien
cttccagttcccaggacgtgaagttagaagatg

SEQ ID NO: 310102 - DNA, 33 bp, Homo sapien
cttccagttcccaggatgtgaagttagaagatg

SEQ ID NO: 310103 - DNA, 33 bp, Homo sapien
ggattataactgagatgaaccatattacaaaac

SEQ ID NO: 310104 - DNA, 33 bp, Homo sapien
ggattataactgagattaaccatattacaaaac

SEQ ID NO: 310105 - DNA, 33 bp, Homo sapien
ggctgaaaccagaaatcagtgatgtcaaagctc

SEQ ID NO: 310106 - DNA, 33 bp, Homo sapien
ggctgaaaccagaaattagtgatgtcaaagctc

SEQ ID NO: 310107 - DNA, 33 bp, Homo sapien
ctgacctcctggaagccagagtctaaaaaaaaa

SEQ ID NO: 310108 - DNA, 33 bp, Homo sapien
ctgacctcctggaagctagagtctaaaaaaaaa

SEQ ID NO: 310109 - DNA, 33 bp, Homo sapien
acagtcatcctaggaaactaatacaaatatgtt

SEQ ID NO: 310110 - DNA, 33 bp, Homo sapien
acagtcatcctaggaagctaatacaaatatgtt

SEQ ID NO: 310111 - DNA, 33 bp, Homo sapien
taaactgtattttaccacaattgaaaaaaaaat

SEQ ID NO: 310112 - DNA, 33 bp, Homo sapien
taaactgtattttaccgcaattgaaaaaaaaat

SEQ ID NO: 310113 - DNA, 33 bp, Homo sapien
caactttactgagctacgaggtgcccagatatt

SEQ ID NO: 310114 - DNA, 33 bp, Homo sapien
caactttactgagctatgaggtgcccagatatt

SEQ ID NO: 310115 - DNA, 33 bp, Homo sapien
ctccttctttgaggccacatcattctaagggaa

SEQ ID NO: 310116 - DNA, 33 bp, Homo sapien
ctccttctttgaggccgcatcattctaagggaa

SEQ ID NO: 310117 - DNA, 33 bp, Homo sapien
taatttatttaaggagaccctattgaaggatag

SEQ ID NO: 310118 - DNA, 33 bp, Homo sapien
taatttatttaaggaggccctattgaaggatag

SEQ ID NO: 310119 - DNA, 33 bp, Homo sapien
cacataaaagtgctgacagattccgaagggagg

SEQ ID NO: 310120 - DNA, 33 bp, Homo sapien
cacataaaagtgctgatagattccgaagggagg

SEQ ID NO: 310121 - DNA, 33 bp, Homo sapien
ggttggtagatggatcaatttaatgtttgcaga

SEQ ID NO: 310122 - DNA, 33 bp, Homo sapien
ggttggtagatggatcgatttaatgtttgcaga

SEQ ID NO: 310123 - DNA, 33 bp, Homo sapien
tgtgttcgtttttccacgtccaccacaaaacta

SEQ ID NO: 310124 - DNA, 33 bp, Homo sapien
tgtgttcgtttttccatgtccaccacaaaacta

SEQ ID NO: 310125 - DNA, 33 bp, Homo sapien
taacaaatggaaaccacaggttagtggagagtg

SEQ ID NO: 310126 - DNA, 33 bp, Homo sapien
taacaaatggaaaccataggttagtggagagtg

SEQ ID NO: 310127 - DNA, 33 bp, Homo sapien
ttaatgattacatttagagttgactattccttg

SEQ ID NO: 310128 - DNA, 33 bp, Homo sapien
ttaatgattacatttatagttgactattccttg

SEQ ID NO: 310129 - DNA, 33 bp, Homo sapien
tggctgaggccctgcaagagaatatagcacagc

SEQ ID NO: 310130 - DNA, 33 bp, Homo sapien
tggctgaggccctgcaggagaatatagcacagc

SEQ ID NO: 310131 - DNA, 33 bp, Homo sapien
cctggcctctctgagactcagtttgcacacctg

SEQ ID NO: 310132 - DNA, 33 bp, Homo sapien
cctggcctctctgagattcagtttgcacacctg

SEQ ID NO: 310133 - DNA, 33 bp, Homo sapien
gtaaccctagtgtcttcaacaaatgttagcctg

SEQ ID NO: 310134 - DNA, 33 bp, Homo sapien
gtaaccctagtgtcttgaacaaatgttagcctg

SEQ ID NO: 310135 - DNA, 33 bp, Homo sapien
actgactattggataaatcccctcctaaggtgc

SEQ ID NO: 310136 - DNA, 33 bp, Homo sapien
actgactattggataagtcccctcctaaggtgc

SEQ ID NO: 310137 - DNA, 33 bp, Homo sapien
ggattaaattaaaacaataagtgccacataggt

SEQ ID NO: 310138 - DNA, 33 bp, Homo sapien
ggattaaattaaaacagtaagtgccacataggt

SEQ ID NO: 310139 - DNA, 33 bp, Homo sapien
cttagttgggccacaacaaacactcagtgcgtt

SEQ ID NO: 310140 - DNA, 33 bp, Homo sapien
cttagttgggccacaagaaacactcagtgcgtt

SEQ ID NO: 310141 - DNA, 33 bp, Homo sapien
ctcctaactgttaacacggtgatatttcactct

SEQ ID NO: 310142 - DNA, 33 bp, Homo sapien
ctcctaactgttaacatggtgatatttcactct

SEQ ID NO: 310143 - DNA, 33 bp, Homo sapien
cattggtaagaagcaaatccactgcagatgtgt

SEQ ID NO: 310144 - DNA, 33 bp, Homo sapien
cattggtaagaagcaactccactgcagatgtgt

SEQ ID NO: 310145 - DNA, 33 bp, Homo sapien
attttcactcctctgaagcctttctatcttccc

SEQ ID NO: 310146 - DNA, 33 bp, Homo sapien
attttcactcctctgaggcctttctatcttccc

SEQ ID NO: 310147 - DNA, 33 bp, Homo sapien
ggctgcctcctacacaagcatggctcagggaag

SEQ ID NO: 310148 - DNA, 33 bp, Homo sapien
ggctgcctcctacacaggcatggctcagggaag

SEQ ID NO: 310149 - DNA, 33 bp, Homo sapien
gtgtaggaatttggccgctatttccttttacgc

SEQ ID NO: 310150 - DNA, 33 bp, Homo sapien
gtgtaggaatttggcctctatttccttttacgc

SEQ ID NO: 310151 - DNA, 33 bp, Homo sapien
tcaagtcacctggacaatcggagcccaagatgc

SEQ ID NO: 310152 - DNA, 33 bp, Homo sapien
tcaagtcacctggacactcggagcccaagatgc

SEQ ID NO: 310153 - DNA, 33 bp, Homo sapien
gcctcagtgtcccctcaccattctgcgctggtc

SEQ ID NO: 310154 - DNA, 33 bp, Homo sapien
gcctcagtgtcccctcgccattctgcgctggtc

SEQ ID NO: 310155 - DNA, 33 bp, Homo sapien
ccagccaggactcaacacattatttggcagaaa

SEQ ID NO: 310156 - DNA, 33 bp, Homo sapien
ccagccaggactcaacccattatttggcagaaa

SEQ ID NO: 310157 - DNA, 33 bp, Homo sapien
gagctagaggtgaccaaagaagaatccccataa

SEQ ID NO: 310158 - DNA, 33 bp, Homo sapien
gagctagaggtgaccagagaagaatccccataa

SEQ ID NO: 310159 - DNA, 33 bp, Homo sapien
catgctaactagaaagcagggaggtagacactg

SEQ ID NO: 310160 - DNA, 33 bp, Homo sapien
catgctaactagaaaggagggaggtagacactg

SEQ ID NO: 310161 - DNA, 33 bp, Homo sapien
gagaatgaactgatcacagagacttgaggtatt

SEQ ID NO: 310162 - DNA, 33 bp, Homo sapien
gagaatgaactgatcatagagacttgaggtatt

SEQ ID NO: 310163 - DNA, 33 bp, Homo sapien
agtgacaaacacaccactggtgtctgtataaag

SEQ ID NO: 310164 - DNA, 33 bp, Homo sapien
agtgacaaacacaccattggtgtctgtataaag

SEQ ID NO: 310165 - DNA, 33 bp, Homo sapien
aactggaacattcacaatatctacctttgaggg

SEQ ID NO: 310166 - DNA, 33 bp, Homo sapien
aactggaacattcacagtatctacctttgaggg

SEQ ID NO: 310167 - DNA, 33 bp, Homo sapien
ggaaagtgagctaagagggaaagaggaaggaga

SEQ ID NO: 310168 - DNA, 33 bp, Homo sapien
ggaaagtgagctaagatggaaagaggaaggaga

SEQ ID NO: 310169 - DNA, 33 bp, Homo sapien
cgggagttcagtgtcacatacgatgagtttggc

SEQ ID NO: 310170 - DNA, 33 bp, Homo sapien
cgggagttcagtgtcatatacgatgagtttggc

SEQ ID NO: 310171 - DNA, 33 bp, Homo sapien
agtgctctcagttttacctctgttatccctctt

SEQ ID NO: 310172 - DNA, 33 bp, Homo sapien
agtgctctcagttttagctctgttatccctctt

SEQ ID NO: 310173 - DNA, 33 bp, Homo sapien
caaagaaagcaaaccaactctttcattagttac

SEQ ID NO: 310174 - DNA, 33 bp, Homo sapien
caaagaaagcaaaccatctctttcattagttac

SEQ ID NO: 310175 - DNA, 33 bp, Homo sapien
gtcctctgagatatcactgagtcatgtttacaa

SEQ ID NO: 310176 - DNA, 33 bp, Homo sapien
gtcctctgagatatcattgagtcatgtttacaa

SEQ ID NO: 310177 - DNA, 33 bp, Homo sapien
aacagacactaggcatcatgaggaaaaacacag

SEQ ID NO: 310178 - DNA, 33 bp, Homo sapien
aacagacactaggcatgatgaggaaaaacacag

SEQ ID NO: 310179 - DNA, 33 bp, Homo sapien
ggctggctgtgaaacaaatctctaaagcaaacc

SEQ ID NO: 310180 - DNA, 33 bp, Homo sapien
ggctggctgtgaaacacatctctaaagcaaacc

SEQ ID NO: 310181 - DNA, 33 bp, Homo sapien
cgaggcctctcaagaaactggagctgaggaata

SEQ ID NO: 310182 - DNA, 33 bp, Homo sapien
cgaggcctctcaagaacctggagctgaggaata

SEQ ID NO: 310183 - DNA, 33 bp, Homo sapien
ggcaaatgaagactaacgagcaactaagaaaat

SEQ ID NO: 310184 - DNA, 33 bp, Homo sapien
ggcaaatgaagactaatgagcaactaagaaaat

SEQ ID NO: 310185 - DNA, 33 bp, Homo sapien
ggttgttccagaaccaaagctgtcacatcttca

SEQ ID NO: 310186 - DNA, 33 bp, Homo sapien
ggttgttccagaaccagagctgtcacatcttca

SEQ ID NO: 310187 - DNA, 33 bp, Homo sapien
acacagcaggaagtagaacatcaaataaacaac

SEQ ID NO: 310188 - DNA, 33 bp, Homo sapien
acacagcaggaagtaggacatcaaataaacaac

SEQ ID NO: 310189 - DNA, 33 bp, Homo sapien
taacagcatcacaggcaattggctctaggaggg

SEQ ID NO: 310190 - DNA, 33 bp, Homo sapien
taacagcatcacaggcgattggctctaggaggg

SEQ ID NO: 310191 - DNA, 33 bp, Homo sapien
tgaatttccagactaaaagaaaatgtgcctgga

SEQ ID NO: 310192 - DNA, 33 bp, Homo sapien
tgaatttccagactaagagaaaatgtgcctgga

SEQ ID NO: 310193 - DNA, 33 bp, Homo sapien
tgcccgactgctgtagcaagattacttttaact

SEQ ID NO: 310194 - DNA, 33 bp, Homo sapien
tgcccgactgctgtaggaagattacttttaact

SEQ ID NO: 310195 - DNA, 33 bp, Homo sapien
tttaacaaaaaccaacactgaaggagccgatgt

SEQ ID NO: 310196 - DNA, 33 bp, Homo sapien
tttaacaaaaaccaacgctgaaggagccgatgt

SEQ ID NO: 310197 - DNA, 33 bp, Homo sapien
agccttgcctgatttacggaccccgtcctatga

SEQ ID NO: 310198 - DNA, 33 bp, Homo sapien
agccttgcctgatttatggaccccgtcctatga

SEQ ID NO: 310199 - DNA, 33 bp, Homo sapien
acttacctgaagccaaattcatctgagggactt

SEQ ID NO: 310200 - DNA, 33 bp, Homo sapien
acttacctgaagccaagttcatctgagggactt

SEQ ID NO: 310201 - DNA, 33 bp, Homo sapien
ctgaagtgggatggaaaatgttcctttcaaaaa

SEQ ID NO: 310202 - DNA, 33 bp, Homo sapien
ctgaagtgggatggaagatgttcctttcaaaaa

SEQ ID NO: 310203 - DNA, 33 bp, Homo sapien
accctatgtatactcaccgcttgtcctattgct

SEQ ID NO: 310204 - DNA, 33 bp, Homo sapien
accctatgtatactcagcgcttgtcctattgct

SEQ ID NO: 310205 - DNA, 33 bp, Homo sapien
ctaattttccttttccaccacgtatcttgagaa

SEQ ID NO: 310206 - DNA, 33 bp, Homo sapien
ctaattttccttttccgccacgtatcttgagaa

SEQ ID NO: 310207 - DNA, 33 bp, Homo sapien
aatgggataacttgggaattaagtaagctctat

SEQ ID NO: 310208 - DNA, 33 bp, Homo sapien
aatgggataacttggggattaagtaagctctat

SEQ ID NO: 310209 - DNA, 33 bp, Homo sapien
ttggattttgtcacctaacagcggagagaacca

SEQ ID NO: 310210 - DNA, 33 bp, Homo sapien
ttggattttgtcacctcacagcggagagaacca

SEQ ID NO: 310211 - DNA, 33 bp, Homo sapien
ttacagtagtgagagaaggggtgagacagaaag

SEQ ID NO: 310212 - DNA, 33 bp, Homo sapien
ttacagtagtgagagacggggtgagacagaaag

SEQ ID NO: 310213 - DNA, 33 bp, Homo sapien
gcctctgataaaagcaaaccggaactctgcttc

SEQ ID NO: 310214 - DNA, 33 bp, Homo sapien
gcctctgataaaagcacaccggaactctgcttc

SEQ ID NO: 310215 - DNA, 33 bp, Homo sapien
gtagctggaggactcacgatttctgtctcatgg

SEQ ID NO: 310216 - DNA, 33 bp, Homo sapien
gtagctggaggactcatgatttctgtctcatgg

SEQ ID NO: 310217 - DNA, 33 bp, Homo sapien
aggaagcgtcaggccaaagtttcggggctgccg

SEQ ID NO: 310218 - DNA, 33 bp, Homo sapien
aggaagcgtcaggccagagtttcggggctgccg

SEQ ID NO: 310219 - DNA, 33 bp, Homo sapien
ttcacagtaacaaggagggagagaagtttccga

SEQ ID NO: 310220 - DNA, 33 bp, Homo sapien
ttcacagtaacaaggatggagagaagtttccga

SEQ ID NO: 310221 - DNA, 33 bp, Homo sapien
aagttccatgtgatacagcctctcagatgttag

SEQ ID NO: 310222 - DNA, 33 bp, Homo sapien
aagttccatgtgataccgcctctcagatgttag

SEQ ID NO: 310223 - DNA, 33 bp, Homo sapien
gagggctagaacccacaaagttgcggatcaatt

SEQ ID NO: 310224 - DNA, 33 bp, Homo sapien
gagggctagaacccaccaagttgcggatcaatt

SEQ ID NO: 310225 - DNA, 33 bp, Homo sapien
cccatgttccggcatcaatgggtttggaagaca

SEQ ID NO: 310226 - DNA, 33 bp, Homo sapien
cccatgttccggcatcgatgggtttggaagaca

SEQ ID NO: 310227 - DNA, 33 bp, Homo sapien
cccagccttggatgccaccaccaggtttttgaa

SEQ ID NO: 310228 - DNA, 33 bp, Homo sapien
cccagccttggatgccgccaccaggtttttgaa

SEQ ID NO: 310229 - DNA, 33 bp, Homo sapien
ctcatctgggttacaaggattcaactttatgag

SEQ ID NO: 310230 - DNA, 33 bp, Homo sapien
ctcatctgggttacaatgattcaactttatgag

SEQ ID NO: 310231 - DNA, 33 bp, Homo sapien
gtggtcttgtggaagaaaggggcataagtgaac

SEQ ID NO: 310232 - DNA, 33 bp, Homo sapien
gtggtcttgtggaagagaggggcataagtgaac

SEQ ID NO: 310233 - DNA, 33 bp, Homo sapien
agaactcctttaaccacctctttactgatggac

SEQ ID NO: 310234 - DNA, 33 bp, Homo sapien
agaactcctttaaccagctctttactgatggac

SEQ ID NO: 310235 - DNA, 33 bp, Homo sapien
tttgaaatttgtgcaacaggctggaaactcagc

SEQ ID NO: 310236 - DNA, 33 bp, Homo sapien
tttgaaatttgtgcaataggctggaaactcagc

SEQ ID NO: 310237 - DNA, 33 bp, Homo sapien
tctgaaagaagttctacctcaaggctgaaacat

SEQ ID NO: 310238 - DNA, 33 bp, Homo sapien
tctgaaagaagttctatctcaaggctgaaacat

SEQ ID NO: 310239 - DNA, 33 bp, Homo sapien
cataaaaaggcctggacgacaagattctagata

SEQ ID NO: 310240 - DNA, 33 bp, Homo sapien
cataaaaaggcctggatgacaagattctagata

SEQ ID NO: 310241 - DNA, 33 bp, Homo sapien
cccagtcatagtcccaagtgagaccacagtaga

SEQ ID NO: 310242 - DNA, 33 bp, Homo sapien
cccagtcatagtcccacgtgagaccacagtaga

SEQ ID NO: 310243 - DNA, 33 bp, Homo sapien
gccccttgcatagaaccggactacacctctgaa

SEQ ID NO: 310244 - DNA, 33 bp, Homo sapien
gccccttgcatagaactggactacacctctgaa

SEQ ID NO: 310245 - DNA, 33 bp, Homo sapien
gaaaagctggtggaaagatgtcaagcaggggat

SEQ ID NO: 310246 - DNA, 33 bp, Homo sapien
gaaaagctggtggaaatatgtcaagcaggggat

SEQ ID NO: 310247 - DNA, 33 bp, Homo sapien
atgggatcaacctataatagagcttttattcag

SEQ ID NO: 310248 - DNA, 33 bp, Homo sapien
atgggatcaacctatattagagcttttattcag

SEQ ID NO: 310249 - DNA, 33 bp, Homo sapien
tgagcccaagagataaaagtggacagtggatca

SEQ ID NO: 310250 - DNA, 33 bp, Homo sapien
tgagcccaagagataacagtggacagtggatca

SEQ ID NO: 310251 - DNA, 33 bp, Homo sapien
gcttttcttttgctaaagtggtcaaagttctgt

SEQ ID NO: 310252 - DNA, 33 bp, Homo sapien
gcttttcttttgctaaggtggtcaaagttctgt

SEQ ID NO: 310253 - DNA, 33 bp, Homo sapien
ggtcaaagttctgtaaagaggacacatttttct

SEQ ID NO: 310254 - DNA, 33 bp, Homo sapien
ggtcaaagttctgtaaggaggacacatttttct

SEQ ID NO: 310255 - DNA, 33 bp, Homo sapien
aatcaatagcctgagacgaagttgtacatacac

SEQ ID NO: 310256 - DNA, 33 bp, Homo sapien
aatcaatagcctgagaggaagttgtacatacac

SEQ ID NO: 310257 - DNA, 33 bp, Homo sapien
cggtgacaaaactcagaagcagcaactcgggct

SEQ ID NO: 310258 - DNA, 33 bp, Homo sapien
cggtgacaaaactcaggagcagcaactcgggct

SEQ ID NO: 310259 - DNA, 33 bp, Homo sapien
agaacctagacatgaacggactggcctgcagga

SEQ ID NO: 310260 - DNA, 33 bp, Homo sapien
agaacctagacatgaatggactggcctgcagga

SEQ ID NO: 310261 - DNA, 33 bp, Homo sapien
gagaggtaggagagagaacttcactgcaaaagg

SEQ ID NO: 310262 - DNA, 33 bp, Homo sapien
gagaggtaggagagaggacttcactgcaaaagg

SEQ ID NO: 310263 - DNA, 33 bp, Homo sapien
tatctaaaagctaccacctgtaggtaataagaa

SEQ ID NO: 310264 - DNA, 33 bp, Homo sapien
tatctaaaagctaccatctgtaggtaataagaa

SEQ ID NO: 310265 - DNA, 33 bp, Homo sapien
gtcacaccatctgctgaagtgcacagagctgcc

SEQ ID NO: 310266 - DNA, 33 bp, Homo sapien
gtcacaccatctgctggagtgcacagagctgcc

SEQ ID NO: 310267 - DNA, 33 bp, Homo sapien
ttaatctgagaaaccactctgtctcatttcctt

SEQ ID NO: 310268 - DNA, 33 bp, Homo sapien
ttaatctgagaaaccagtctgtctcatttcctt

SEQ ID NO: 310269 - DNA, 33 bp, Homo sapien
tgattgctacatttcaatatgaagtgtctaaga

SEQ ID NO: 310270 - DNA, 33 bp, Homo sapien
tgattgctacatttcagtatgaagtgtctaaga

SEQ ID NO: 310271 - DNA, 33 bp, Homo sapien
atggtaagtgccctacacagacataccatctta

SEQ ID NO: 310272 - DNA, 33 bp, Homo sapien
atggtaagtgccctacccagacataccatctta

SEQ ID NO: 310273 - DNA, 33 bp, Homo sapien
gagggatgctaatagaaagtgcacctcagcgct

SEQ ID NO: 310274 - DNA, 33 bp, Homo sapien
gagggatgctaatagagagtgcacctcagcgct

SEQ ID NO: 310275 - DNA, 33 bp, Homo sapien
ggaagctgttggcccactcgtaagcagtgctat

SEQ ID NO: 310276 - DNA, 33 bp, Homo sapien
ggaagctgttggcccagtcgtaagcagtgctat

SEQ ID NO: 310277 - DNA, 33 bp, Homo sapien
tattcacttgttctccaaaataaatctgtaaag

SEQ ID NO: 310278 - DNA, 33 bp, Homo sapien
tattcacttgttctccgaaataaatctgtaaag

SEQ ID NO: 310279 - DNA, 33 bp, Homo sapien
tggttttctaagcagacactaatacaaatgcag

SEQ ID NO: 310280 - DNA, 33 bp, Homo sapien
tggttttctaagcagagactaatacaaatgcag

SEQ ID NO: 310281 - DNA, 33 bp, Homo sapien
tgagttgaagctccaaacaatttgaatttgttt

SEQ ID NO: 310282 - DNA, 33 bp, Homo sapien
tgagttgaagctccaaccaatttgaatttgttt

SEQ ID NO: 310283 - DNA, 33 bp, Homo sapien
aaaaagttgaaagtacagagttcatggttgctg

SEQ ID NO: 310284 - DNA, 33 bp, Homo sapien
aaaaagttgaaagtacggagttcatggttgctg

SEQ ID NO: 310285 - DNA, 33 bp, Homo sapien
gtctccaaaaacaatcactgcaacaagtttctt

SEQ ID NO: 310286 - DNA, 33 bp, Homo sapien
gtctccaaaaacaatccctgcaacaagtttctt

SEQ ID NO: 310287 - DNA, 33 bp, Homo sapien
ttttttgttggctctaccttttagctggagtgt

SEQ ID NO: 310288 - DNA, 33 bp, Homo sapien
ttttttgttggctctatcttttagctggagtgt

SEQ ID NO: 310289 - DNA, 33 bp, Homo sapien
gtcttatcaaggtaaccgataatctctgtgctt

SEQ ID NO: 310290 - DNA, 33 bp, Homo sapien
gtcttatcaaggtaactgataatctctgtgctt

SEQ ID NO: 310291 - DNA, 33 bp, Homo sapien
caaaaatgtagattaacagttggccaaggctca

SEQ ID NO: 310292 - DNA, 33 bp, Homo sapien
caaaaatgtagattaatagttggccaaggctca

SEQ ID NO: 310293 - DNA, 33 bp, Homo sapien
gtctagatttttgtcactacgtctttatcaccc

SEQ ID NO: 310294 - DNA, 33 bp, Homo sapien
gtctagatttttgtcagtacgtctttatcaccc

SEQ ID NO: 310295 - DNA, 33 bp, Homo sapien
caaaaatctagactaacagttggccaaggctag

SEQ ID NO: 310296 - DNA, 33 bp, Homo sapien
caaaaatctagactaatagttggccaaggctag

SEQ ID NO: 310297 - DNA, 33 bp, Homo sapien
aatatgataaagtccccataaagtctgtcatat

SEQ ID NO: 310298 - DNA, 33 bp, Homo sapien
aatatgataaagtccctataaagtctgtcatat

SEQ ID NO: 310299 - DNA, 33 bp, Homo sapien
gacagctataaatgcaggtattaagtctgcaat

SEQ ID NO: 310300 - DNA, 33 bp, Homo sapien
gacagctataaatgcatgtattaagtctgcaat

SEQ ID NO: 310301 - DNA, 33 bp, Homo sapien
ggttctttgagaaacaacgttttaggtgcaaat

SEQ ID NO: 310302 - DNA, 33 bp, Homo sapien
ggttctttgagaaacagcgttttaggtgcaaat

SEQ ID NO: 310303 - DNA, 33 bp, Homo sapien
tcagtaattgttaagacgttacctatgccgaaa

SEQ ID NO: 310304 - DNA, 33 bp, Homo sapien
tcagtaattgttaagatgttacctatgccgaaa

SEQ ID NO: 310305 - DNA, 33 bp, Homo sapien
gtttgaaatgcttggcacttttatttactaaat

SEQ ID NO: 310306 - DNA, 33 bp, Homo sapien
gtttgaaatgcttggcgcttttatttactaaat

SEQ ID NO: 310307 - DNA, 33 bp, Homo sapien
tctccccagttttggacggaagattaagaaggc

SEQ ID NO: 310308 - DNA, 33 bp, Homo sapien
tctccccagttttggatggaagattaagaaggc

SEQ ID NO: 310309 - DNA, 33 bp, Homo sapien
cagttgcaaagtccttcaaaacaaagggagtac

SEQ ID NO: 310310 - DNA, 33 bp, Homo sapien
cagttgcaaagtccttgaaaacaaagggagtac

SEQ ID NO: 310311 - DNA, 33 bp, Homo sapien
tgtgacctgcattcacgaaggatatctggaaac

SEQ ID NO: 310312 - DNA, 33 bp, Homo sapien
tgtgacctgcattcactaaggatatctggaaac

SEQ ID NO: 310313 - DNA, 33 bp, Homo sapien
aagtccagtgtcacaactgtacctctgagtagc

SEQ ID NO: 310314 - DNA, 33 bp, Homo sapien
aagtccagtgtcacaattgtacctctgagtagc

SEQ ID NO: 310315 - DNA, 33 bp, Homo sapien
tatacatagaatcacactatatgcagccttttg

SEQ ID NO: 310316 - DNA, 33 bp, Homo sapien
tatacatagaatcacagtatatgcagccttttg

SEQ ID NO: 310317 - DNA, 33 bp, Homo sapien
agctgaggaatcttgtaacaaaatagagaggac

SEQ ID NO: 310318 - DNA, 33 bp, Homo sapien
agctgaggaatcttgtgacaaaatagagaggac

SEQ ID NO: 310319 - DNA, 33 bp, Homo sapien
ctggtcctgcaaaaagcagtaagagctaatgag

SEQ ID NO: 310320 - DNA, 33 bp, Homo sapien
ctggtcctgcaaaaaggagtaagagctaatgag

SEQ ID NO: 310321 - DNA, 33 bp, Homo sapien
tgttttctacccagacgcctccttagaattgcc

SEQ ID NO: 310322 - DNA, 33 bp, Homo sapien
tgttttctacccagactcctccttagaattgcc

SEQ ID NO: 310323 - DNA, 33 bp, Homo sapien
ggccctcagaggctaaccacagtaggaagctct

SEQ ID NO: 310324 - DNA, 33 bp, Homo sapien
ggccctcagaggctaatcacagtaggaagctct

SEQ ID NO: 310325 - DNA, 33 bp, Homo sapien
atggattctgaataaccgatgctcatggagaga

SEQ ID NO: 310326 - DNA, 33 bp, Homo sapien
atggattctgaataactgatgctcatggagaga

SEQ ID NO: 310327 - DNA, 33 bp, Homo sapien
attagtctaagacacacgtaataaaccacagtt

SEQ ID NO: 310328 - DNA, 33 bp, Homo sapien
attagtctaagacacatgtaataaaccacagtt

SEQ ID NO: 310329 - DNA, 33 bp, Homo sapien
acttggaagtttctgccatgggtccctgaatgg

SEQ ID NO: 310330 - DNA, 33 bp, Homo sapien
acttggaagtttctgctatgggtccctgaatgg

SEQ ID NO: 310331 - DNA, 33 bp, Homo sapien
taaatctcattactacagccatcccaatttgta

SEQ ID NO: 310332 - DNA, 33 bp, Homo sapien
taaatctcattactacggccatcccaatttgta

SEQ ID NO: 310333 - DNA, 33 bp, Homo sapien
gttacttgttaatccaagtacctgctaagaaac

SEQ ID NO: 310334 - DNA, 33 bp, Homo sapien
gttacttgttaatccaggtacctgctaagaaac

SEQ ID NO: 310335 - DNA, 33 bp, Homo sapien
ttctgctattaagaaactctgatgcattcttca

SEQ ID NO: 310336 - DNA, 33 bp, Homo sapien
ttctgctattaagaaagtctgatgcattcttca

SEQ ID NO: 310337 - DNA, 33 bp, Homo sapien
atcttggtgtcttgacgacttggctcctaattt

SEQ ID NO: 310338 - DNA, 33 bp, Homo sapien
atcttggtgtcttgactacttggctcctaattt

SEQ ID NO: 310339 - DNA, 33 bp, Homo sapien
ctgtacctggcctgataaagcaatagtaacgag

SEQ ID NO: 310340 - DNA, 33 bp, Homo sapien
ctgtacctggcctgatgaagcaatagtaacgag

SEQ ID NO: 310341 - DNA, 33 bp, Homo sapien
ataccacggactttccagactacaaaatacctg

SEQ ID NO: 310342 - DNA, 33 bp, Homo sapien
ataccacggactttccggactacaaaatacctg

SEQ ID NO: 310343 - DNA, 33 bp, Homo sapien
gcaaattcatttacacaattattcagataggaa

SEQ ID NO: 310344 - DNA, 33 bp, Homo sapien
gcaaattcatttacaccattattcagataggaa

SEQ ID NO: 310345 - DNA, 33 bp, Homo sapien
tcactaccattgatgaagattgattcaagaatg

SEQ ID NO: 310346 - DNA, 33 bp, Homo sapien
tcactaccattgatgatgattgattcaagaatg

SEQ ID NO: 310347 - DNA, 33 bp, Homo sapien
ggttgtgattggccaactcaaaatatcagtggc

SEQ ID NO: 310348 - DNA, 33 bp, Homo sapien
ggttgtgattggccaagtcaaaatatcagtggc

SEQ ID NO: 310349 - DNA, 33 bp, Homo sapien
gaataaagcaatgggaaaaactgtgtgaaaaag

SEQ ID NO: 310350 - DNA, 33 bp, Homo sapien
gaataaagcaatgggacaaactgtgtgaaaaag

SEQ ID NO: 310351 - DNA, 33 bp, Homo sapien
aataataattgaaaaacagataagattaaacat

SEQ ID NO: 310352 - DNA, 33 bp, Homo sapien
aataataattgaaaaagagataagattaaacat

SEQ ID NO: 310353 - DNA, 33 bp, Homo sapien
gttacgaaacctgctacggtgtcactacatttg

SEQ ID NO: 310354 - DNA, 33 bp, Homo sapien
gttacgaaacctgctatggtgtcactacatttg

SEQ ID NO: 310355 - DNA, 33 bp, Homo sapien
attgattattcatgcactcactgattcaataaa

SEQ ID NO: 310356 - DNA, 33 bp, Homo sapien
attgattattcatgcagtcactgattcaataaa

SEQ ID NO: 310357 - DNA, 33 bp, Homo sapien
accatgttaggcaagaacttcccttgattttgt

SEQ ID NO: 310358 - DNA, 33 bp, Homo sapien
accatgttaggcaagaccttcccttgattttgt

SEQ ID NO: 310359 - DNA, 33 bp, Homo sapien
ttgcctaacatggttacgctctctcctagttct

SEQ ID NO: 310360 - DNA, 33 bp, Homo sapien
ttgcctaacatggttatgctctctcctagttct

SEQ ID NO: 310361 - DNA, 33 bp, Homo sapien
tatttggaggtatctgcaacgaaagatcatgtg

SEQ ID NO: 310362 - DNA, 33 bp, Homo sapien
tatttggaggtatctgtaacgaaagatcatgtg

SEQ ID NO: 310363 - DNA, 33 bp, Homo sapien
taatatttggagaaatcaaaggagaaagcaagg

SEQ ID NO: 310364 - DNA, 33 bp, Homo sapien
taatatttggagaaatgaaaggagaaagcaagg

SEQ ID NO: 310365 - DNA, 33 bp, Homo sapien
tttcgttaggggcttacaatcattaaccctatc

SEQ ID NO: 310366 - DNA, 33 bp, Homo sapien
tttcgttaggggcttagaatcattaaccctatc

SEQ ID NO: 310367 - DNA, 33 bp, Homo sapien
gacaaaataagaacaaatgctgtttgattgcat

SEQ ID NO: 310368 - DNA, 33 bp, Homo sapien
gacaaaataagaacaattgctgtttgattgcat

SEQ ID NO: 310369 - DNA, 33 bp, Homo sapien
caacttaagtggaaacagtcttaacagtgcttt

SEQ ID NO: 310370 - DNA, 33 bp, Homo sapien
caacttaagtggaaacggtcttaacagtgcttt

SEQ ID NO: 310371 - DNA, 33 bp, Homo sapien
acattctcttacaaaacgttcagaaattaaaag

SEQ ID NO: 310372 - DNA, 33 bp, Homo sapien
acattctcttacaaaaggttcagaaattaaaag

SEQ ID NO: 310373 - DNA, 33 bp, Homo sapien
cttggtactgagctaaacactgggaccagtcag

SEQ ID NO: 310374 - DNA, 33 bp, Homo sapien
cttggtactgagctaagcactgggaccagtcag

SEQ ID NO: 310375 - DNA, 33 bp, Homo sapien
aatggagaaagtgaatcaatacctatttgcctc

SEQ ID NO: 310376 - DNA, 33 bp, Homo sapien
aatggagaaagtgaattaatacctatttgcctc

SEQ ID NO: 310377 - DNA, 33 bp, Homo sapien
aatcagttactgaagccaatggtgggggaggag

SEQ ID NO: 310378 - DNA, 33 bp, Homo sapien
aatcagttactgaagctaatggtgggggaggag

SEQ ID NO: 310379 - DNA, 33 bp, Homo sapien
ctcttgtttatggatacgatgatcaaaaagagc

SEQ ID NO: 310380 - DNA, 33 bp, Homo sapien
ctcttgtttatggatatgatgatcaaaaagagc

SEQ ID NO: 310381 - DNA, 33 bp, Homo sapien
tacccttaaatgcataagagacagtattcatga

SEQ ID NO: 310382 - DNA, 33 bp, Homo sapien
tacccttaaatgcataggagacagtattcatga

SEQ ID NO: 310383 - DNA, 33 bp, Homo sapien
tttgtcatatggaaaaatgattggtttcaaagt

SEQ ID NO: 310384 - DNA, 33 bp, Homo sapien
tttgtcatatggaaaagtgattggtttcaaagt

SEQ ID NO: 310385 - DNA, 33 bp, Homo sapien
ttaataagtgccacataaaactactacacagag

SEQ ID NO: 310386 - DNA, 33 bp, Homo sapien
ttaataagtgccacatgaaactactacacagag

SEQ ID NO: 310387 - DNA, 33 bp, Homo sapien
acatatcaagaataacaaacagctaccagttta

SEQ ID NO: 310388 - DNA, 33 bp, Homo sapien
acatatcaagaataaccaacagctaccagttta

SEQ ID NO: 310389 - DNA, 33 bp, Homo sapien
actaaggatctattcaagcctgtagctgcttag

SEQ ID NO: 310390 - DNA, 33 bp, Homo sapien
actaaggatctattcaggcctgtagctgcttag

SEQ ID NO: 310391 - DNA, 33 bp, Homo sapien
agagtgtttttccttacgactcacccaggtgag

SEQ ID NO: 310392 - DNA, 33 bp, Homo sapien
agagtgtttttccttatgactcacccaggtgag

SEQ ID NO: 310393 - DNA, 33 bp, Homo sapien
tactctaggtcctttacgttgatctcctttaaa

SEQ ID NO: 310394 - DNA, 33 bp, Homo sapien
tactctaggtcctttatgttgatctcctttaaa

SEQ ID NO: 310395 - DNA, 33 bp, Homo sapien
agtactccagggttcaatctcattcttgctacc

SEQ ID NO: 310396 - DNA, 33 bp, Homo sapien
agtactccagggttcagtctcattcttgctacc

SEQ ID NO: 310397 - DNA, 33 bp, Homo sapien
attattgcttaatccagctgggaagcacaggtg

SEQ ID NO: 310398 - DNA, 33 bp, Homo sapien
attattgcttaatccatctgggaagcacaggtg

SEQ ID NO: 310399 - DNA, 33 bp, Homo sapien
agcaatttacattttcaaagagcccctcaggcc

SEQ ID NO: 310400 - DNA, 33 bp, Homo sapien
agcaatttacattttccaagagcccctcaggcc

SEQ ID NO: 310401 - DNA, 33 bp, Homo sapien
acatcttcctgtgtcaaaactctgagtgtgtct

SEQ ID NO: 310402 - DNA, 33 bp, Homo sapien
acatcttcctgtgtcagaactctgagtgtgtct

SEQ ID NO: 310403 - DNA, 33 bp, Homo sapien
ggtattcatatgggggaaaagttgagttcatac

SEQ ID NO: 310404 - DNA, 33 bp, Homo sapien
ggtattcatatggggggaaagttgagttcatac

SEQ ID NO: 310405 - DNA, 33 bp, Homo sapien
acccaactggcccaacactattgaaccattatc

SEQ ID NO: 310406 - DNA, 33 bp, Homo sapien
acccaactggcccaacgctattgaaccattatc

SEQ ID NO: 310407 - DNA, 33 bp, Homo sapien
tgaccactgtatgactcagaatcatggctggat

SEQ ID NO: 310408 - DNA, 33 bp, Homo sapien
tgaccactgtatgacttagaatcatggctggat

SEQ ID NO: 310409 - DNA, 33 bp, Homo sapien
agtttacagatgggccaagatctagacgccaca

SEQ ID NO: 310410 - DNA, 33 bp, Homo sapien
agtttacagatgggcccagatctagacgccaca

SEQ ID NO: 310411 - DNA, 33 bp, Homo sapien
ggacattctctaaacccgctctagctatatagc

SEQ ID NO: 310412 - DNA, 33 bp, Homo sapien
ggacattctctaaacctgctctagctatatagc

SEQ ID NO: 310413 - DNA, 33 bp, Homo sapien
atgatgactgaggacaaaggctaagactgttag

SEQ ID NO: 310414 - DNA, 33 bp, Homo sapien
atgatgactgaggacagaggctaagactgttag

SEQ ID NO: 310415 - DNA, 33 bp, Homo sapien
ctgtcctggacccacaaatcaattatcagtgcc

SEQ ID NO: 310416 - DNA, 33 bp, Homo sapien
ctgtcctggacccacacatcaattatcagtgcc

SEQ ID NO: 310417 - DNA, 33 bp, Homo sapien
tgaccttccaaagatacagcgcaatctgtataa

SEQ ID NO: 310418 - DNA, 33 bp, Homo sapien
tgaccttccaaagatatagcgcaatctgtataa

SEQ ID NO: 310419 - DNA, 33 bp, Homo sapien
cagctggattcttctacgtttaattgtagatgt

SEQ ID NO: 310420 - DNA, 33 bp, Homo sapien
cagctggattcttctatgtttaattgtagatgt

SEQ ID NO: 310421 - DNA, 33 bp, Homo sapien
aaagaaaagcaaactacacaactcagagttata

SEQ ID NO: 310422 - DNA, 33 bp, Homo sapien
aaagaaaagcaaactatacaactcagagttata

SEQ ID NO: 310423 - DNA, 33 bp, Homo sapien
agagcaaaggcagaaccgaagaacagccacata

SEQ ID NO: 310424 - DNA, 33 bp, Homo sapien
agagcaaaggcagaactgaagaacagccacata

SEQ ID NO: 310425 - DNA, 33 bp, Homo sapien
ttggagaatttggaaacccagaaaaacatgatt

SEQ ID NO: 310426 - DNA, 33 bp, Homo sapien
ttggagaatttggaaatccagaaaaacatgatt

SEQ ID NO: 310427 - DNA, 33 bp, Homo sapien
attttgtatgcttttacgaactgctgaagttaa

SEQ ID NO: 310428 - DNA, 33 bp, Homo sapien
attttgtatgcttttatgaactgctgaagttaa

SEQ ID NO: 310429 - DNA, 33 bp, Homo sapien
cacacattgagatccactaatctacagatttgt

SEQ ID NO: 310430 - DNA, 33 bp, Homo sapien
cacacattgagatccagtaatctacagatttgt

SEQ ID NO: 310431 - DNA, 33 bp, Homo sapien
ttgctaaggacatttcaagagtgagaagtgggt

SEQ ID NO: 310432 - DNA, 33 bp, Homo sapien
ttgctaaggacatttcgagagtgagaagtgggt

SEQ ID NO: 310433 - DNA, 33 bp, Homo sapien
tccccaggttagcagtaaaataaactgtttcca

SEQ ID NO: 310434 - DNA, 33 bp, Homo sapien
tccccaggttagcagtgaaataaactgtttcca

SEQ ID NO: 310435 - DNA, 33 bp, Homo sapien
ccctggactgaaaataaattgatttacactatt

SEQ ID NO: 310436 - DNA, 33 bp, Homo sapien
ccctggactgaaaatacattgatttacactatt

SEQ ID NO: 310437 - DNA, 33 bp, Homo sapien
aatcaatcaatcaaaaaccagaacaacctggga

SEQ ID NO: 310438 - DNA, 33 bp, Homo sapien
aatcaatcaatcaaaacccagaacaacctggga

SEQ ID NO: 310439 - DNA, 33 bp, Homo sapien
tatgtggctttagacgcaacgctcagtgactgg

SEQ ID NO: 310440 - DNA, 33 bp, Homo sapien
tatgtggctttagacggaacgctcagtgactgg

SEQ ID NO: 310441 - DNA, 33 bp, Homo sapien
cacagttaagctcttaggcaggcactgaaaatt

SEQ ID NO: 310442 - DNA, 33 bp, Homo sapien
cacagttaagctcttatgcaggcactgaaaatt

SEQ ID NO: 310443 - DNA, 33 bp, Homo sapien
aatcataagcaattcaactcttaaattgttaca

SEQ ID NO: 310444 - DNA, 33 bp, Homo sapien
aatcataagcaattcatctcttaaattgttaca

SEQ ID NO: 310445 - DNA, 33 bp, Homo sapien
aaatgtttggagtcaacagactttcttagctct

SEQ ID NO: 310446 - DNA, 33 bp, Homo sapien
aaatgtttggagtcaatagactttcttagctct

SEQ ID NO: 310447 - DNA, 33 bp, Homo sapien
ctcctaagccctgggcactgaacctcaacctct

SEQ ID NO: 310448 - DNA, 33 bp, Homo sapien
ctcctaagccctgggcgctgaacctcaacctct

SEQ ID NO: 310449 - DNA, 33 bp, Homo sapien
tctccctgatatgttcactcgtccatgattctg

SEQ ID NO: 310450 - DNA, 33 bp, Homo sapien
tctccctgatatgttcgctcgtccatgattctg

SEQ ID NO: 310451 - DNA, 33 bp, Homo sapien
gctagacatcaaggcacatttcataaaggaggc

SEQ ID NO: 310452 - DNA, 33 bp, Homo sapien
gctagacatcaaggcatatttcataaaggaggc

SEQ ID NO: 310453 - DNA, 33 bp, Homo sapien
taaattgtggcctcccaaaagacatatccactc

SEQ ID NO: 310454 - DNA, 33 bp, Homo sapien
taaattgtggcctcccgaaagacatatccactc

SEQ ID NO: 310455 - DNA, 33 bp, Homo sapien
gtgctgttatcatttacagacagacagcccttc

SEQ ID NO: 310456 - DNA, 33 bp, Homo sapien
gtgctgttatcatttagagacagacagcccttc

SEQ ID NO: 310457 - DNA, 33 bp, Homo sapien
tgcttttgtacggaaacaggcagcgagccattt

SEQ ID NO: 310458 - DNA, 33 bp, Homo sapien
tgcttttgtacggaaagaggcagcgagccattt

SEQ ID NO: 310459 - DNA, 33 bp, Homo sapien
aatttgataagcaagacggtaacagtagcttaa

SEQ ID NO: 310460 - DNA, 33 bp, Homo sapien
aatttgataagcaagatggtaacagtagcttaa

SEQ ID NO: 310461 - DNA, 33 bp, Homo sapien
tcagtggaaactggacagcgataggctcagatc

SEQ ID NO: 310462 - DNA, 33 bp, Homo sapien
tcagtggaaactggaccgcgataggctcagatc

SEQ ID NO: 310463 - DNA, 33 bp, Homo sapien
ttgttgggattctaccggatgaagtgaactaca

SEQ ID NO: 310464 - DNA, 33 bp, Homo sapien
ttgttgggattctacctgatgaagtgaactaca

SEQ ID NO: 310465 - DNA, 33 bp, Homo sapien
atgtgtacaatatgataagtttgcatttatgaa

SEQ ID NO: 310466 - DNA, 33 bp, Homo sapien
atgtgtacaatatgatgagtttgcatttatgaa

SEQ ID NO: 310467 - DNA, 33 bp, Homo sapien
gggcttctagaagggcaacggctcttttctccc

SEQ ID NO: 310468 - DNA, 33 bp, Homo sapien
gggcttctagaagggcgacggctcttttctccc

SEQ ID NO: 310469 - DNA, 33 bp, Homo sapien
atcacaggagtaataccaggtgccagagatcat

SEQ ID NO: 310470 - DNA, 33 bp, Homo sapien
atcacaggagtaatacgaggtgccagagatcat

SEQ ID NO: 310471 - DNA, 33 bp, Homo sapien
catgacagactaaaaccagcaaggaaatggttc

SEQ ID NO: 310472 - DNA, 33 bp, Homo sapien
catgacagactaaaactagcaaggaaatggttc

SEQ ID NO: 310473 - DNA, 33 bp, Homo sapien
tactcaggctgatttaagcaggagaggaaatct

SEQ ID NO: 310474 - DNA, 33 bp, Homo sapien
tactcaggctgatttacgcaggagaggaaatct

SEQ ID NO: 310475 - DNA, 33 bp, Homo sapien
ataaaatgttgaactcaataagttagaaattag

SEQ ID NO: 310476 - DNA, 33 bp, Homo sapien
ataaaatgttgaactccataagttagaaattag

SEQ ID NO: 310477 - DNA, 33 bp, Homo sapien
ctgtaatgcacaaataagagtgcaagtggggca

SEQ ID NO: 310478 - DNA, 33 bp, Homo sapien
ctgtaatgcacaaatacgagtgcaagtggggca

SEQ ID NO: 310479 - DNA, 33 bp, Homo sapien
tttagaattcaaaagcaaaagtgaagaccttct

SEQ ID NO: 310480 - DNA, 33 bp, Homo sapien
tttagaattcaaaagcgaaagtgaagaccttct

SEQ ID NO: 310481 - DNA, 33 bp, Homo sapien
ttggtaatcatcctccagcattcaacttgcttc

SEQ ID NO: 310482 - DNA, 33 bp, Homo sapien
ttggtaatcatcctccggcattcaacttgcttc

SEQ ID NO: 310483 - DNA, 33 bp, Homo sapien
tccgggaaattggaagcatgagaaagacttgat

SEQ ID NO: 310484 - DNA, 33 bp, Homo sapien
tccgggaaattggaaggatgagaaagacttgat

SEQ ID NO: 310485 - DNA, 33 bp, Homo sapien
ggccatttcacaaaacaagtgagctcgctttca

SEQ ID NO: 310486 - DNA, 33 bp, Homo sapien
ggccatttcacaaaacgagtgagctcgctttca

SEQ ID NO: 310487 - DNA, 33 bp, Homo sapien
ttgaaaaatgaaaagcagaagacagctaactga

SEQ ID NO: 310488 - DNA, 33 bp, Homo sapien
ttgaaaaatgaaaagcggaagacagctaactga

SEQ ID NO: 310489 - DNA, 33 bp, Homo sapien
gtaatactccgtcacaaaataggtttattaaaa

SEQ ID NO: 310490 - DNA, 33 bp, Homo sapien
gtaatactccgtcacagaataggtttattaaaa

SEQ ID NO: 310491 - DNA, 33 bp, Homo sapien
gactcttggaggtatgaaacagagcagagctaa

SEQ ID NO: 310492 - DNA, 33 bp, Homo sapien
gactcttggaggtatgcaacagagcagagctaa

SEQ ID NO: 310493 - DNA, 33 bp, Homo sapien
gatgcaagccttcccaaaacaacaggtgagtac

SEQ ID NO: 310494 - DNA, 33 bp, Homo sapien
gatgcaagccttcccagaacaacaggtgagtac

SEQ ID NO: 310495 - DNA, 33 bp, Homo sapien
cgctgggtgcactagacgtgggcagccccggac

SEQ ID NO: 310496 - DNA, 33 bp, Homo sapien
cgctgggtgcactagatgtgggcagccccggac

SEQ ID NO: 310497 - DNA, 33 bp, Homo sapien
agctgcccttaggaaaaccattggagccagaga

SEQ ID NO: 310498 - DNA, 33 bp, Homo sapien
agctgcccttaggaaagccattggagccagaga

SEQ ID NO: 310499 - DNA, 33 bp, Homo sapien
atgtgcagctgtctaacgttaggcattacaaag

SEQ ID NO: 310500 - DNA, 33 bp, Homo sapien
atgtgcagctgtctaatgttaggcattacaaag

SEQ ID NO: 310501 - DNA, 33 bp, Homo sapien
cactatctgcttgatgaagcgattcaatgctca

SEQ ID NO: 310502 - DNA, 33 bp, Homo sapien
cactatctgcttgatgcagcgattcaatgctca

SEQ ID NO: 310503 - DNA, 33 bp, Homo sapien
aaggaacagatttttacgaagaactacaggaat

SEQ ID NO: 310504 - DNA, 33 bp, Homo sapien
aaggaacagatttttatgaagaactacaggaat

SEQ ID NO: 310505 - DNA, 33 bp, Homo sapien
attggatttagcattcaatacattttacagatt

SEQ ID NO: 310506 - DNA, 33 bp, Homo sapien
attggatttagcattccatacattttacagatt

SEQ ID NO: 310507 - DNA, 33 bp, Homo sapien
ccttggagcattttcacagaatttgaaatcctc

SEQ ID NO: 310508 - DNA, 33 bp, Homo sapien
ccttggagcattttcatagaatttgaaatcctc

SEQ ID NO: 310509 - DNA, 33 bp, Homo sapien
aagtaattaagcctcagctcaaatcttttatcc

SEQ ID NO: 310510 - DNA, 33 bp, Homo sapien
aagtaattaagcctcatctcaaatcttttatcc

SEQ ID NO: 310511 - DNA, 33 bp, Homo sapien
tcaatctgttgtgatacgttgttttagttgaag

SEQ ID NO: 310512 - DNA, 33 bp, Homo sapien
tcaatctgttgtgatatgttgttttagttgaag

SEQ ID NO: 310513 - DNA, 33 bp, Homo sapien
aaagttaactcctagaccattgtgagagtgaac

SEQ ID NO: 310514 - DNA, 33 bp, Homo sapien
aaagttaactcctagatcattgtgagagtgaac

SEQ ID NO: 310515 - DNA, 33 bp, Homo sapien
tccactttggtgaccccaaatctactactatgc

SEQ ID NO: 310516 - DNA, 33 bp, Homo sapien
tccactttggtgaccctaaatctactactatgc

SEQ ID NO: 310517 - DNA, 33 bp, Homo sapien
agagaaagtaaaatggcattcaggaactacaga

SEQ ID NO: 310518 - DNA, 33 bp, Homo sapien
agagaaagtaaaatggtattcaggaactacaga

SEQ ID NO: 310519 - DNA, 33 bp, Homo sapien
cttttcgctatccccaagcagatctcataagcc

SEQ ID NO: 310520 - DNA, 33 bp, Homo sapien
cttttcgctatccccaggcagatctcataagcc

SEQ ID NO: 310521 - DNA, 33 bp, Homo sapien
ctgcggcactgctggacgtgaatgagcatcatg

SEQ ID NO: 310522 - DNA, 33 bp, Homo sapien
ctgcggcactgctggatgtgaatgagcatcatg

SEQ ID NO: 310523 - DNA, 33 bp, Homo sapien
tatgaattttgattgaactctgcctcccccaca

SEQ ID NO: 310524 - DNA, 33 bp, Homo sapien
tatgaattttgattgacctctgcctcccccaca

SEQ ID NO: 310525 - DNA, 33 bp, Homo sapien
taactcagataaaaaaacaggtaaccctgagca

SEQ ID NO: 310526 - DNA, 33 bp, Homo sapien
taactcagataaaaaaccaggtaaccctgagca

SEQ ID NO: 310527 - DNA, 33 bp, Homo sapien
tcagcaagaacttcccaaaagatatatttcaca

SEQ ID NO: 310528 - DNA, 33 bp, Homo sapien
tcagcaagaacttcccgaaagatatatttcaca

SEQ ID NO: 310529 - DNA, 33 bp, Homo sapien
agatacaaagctaaacagatacagaaaacagtg

SEQ ID NO: 310530 - DNA, 33 bp, Homo sapien
agatacaaagctaaacggatacagaaaacagtg

SEQ ID NO: 310531 - DNA, 33 bp, Homo sapien
gctctaaattcccccacgtgattgtttcggaga

SEQ ID NO: 310532 - DNA, 33 bp, Homo sapien
gctctaaattcccccatgtgattgtttcggaga

SEQ ID NO: 310533 - DNA, 33 bp, Homo sapien
ctgggggctttggctcaatttcatgtccctgca

SEQ ID NO: 310534 - DNA, 33 bp, Homo sapien
ctgggggctttggctccatttcatgtccctgca

SEQ ID NO: 310535 - DNA, 33 bp, Homo sapien
tgctagaagtacctggaaaatccctctgagccc

SEQ ID NO: 310536 - DNA, 33 bp, Homo sapien
tgctagaagtacctgggaaatccctctgagccc

SEQ ID NO: 310537 - DNA, 33 bp, Homo sapien
tactgctaatcacaagaaaacaaaataacaaag

SEQ ID NO: 310538 - DNA, 33 bp, Homo sapien
tactgctaatcacaaggaaacaaaataacaaag

SEQ ID NO: 310539 - DNA, 33 bp, Homo sapien
tggggaattttagagccgaaattttattcttat

SEQ ID NO: 310540 - DNA, 33 bp, Homo sapien
tggggaattttagagctgaaattttattcttat

SEQ ID NO: 310541 - DNA, 33 bp, Homo sapien
gttcaatgatacctacaagtacctagacctgag

SEQ ID NO: 310542 - DNA, 33 bp, Homo sapien
gttcaatgatacctacgagtacctagacctgag

SEQ ID NO: 310543 - DNA, 33 bp, Homo sapien
caccaactggcagccacgtgagtgacaaaggac

SEQ ID NO: 310544 - DNA, 33 bp, Homo sapien
caccaactggcagccatgtgagtgacaaaggac

SEQ ID NO: 310545 - DNA, 33 bp, Homo sapien
gatacacatgatgtcaaggtcaacacaatattt

SEQ ID NO: 310546 - DNA, 33 bp, Homo sapien
gatacacatgatgtcagggtcaacacaatattt

SEQ ID NO: 310547 - DNA, 33 bp, Homo sapien
tgcccaatagtgaaccaaatgatacatttcctt

SEQ ID NO: 310548 - DNA, 33 bp, Homo sapien
tgcccaatagtgaaccgaatgatacatttcctt

SEQ ID NO: 310549 - DNA, 33 bp, Homo sapien
taattacatctgccatgaccttatttccaaata

SEQ ID NO: 310550 - DNA, 33 bp, Homo sapien
taattacatctgccattaccttatttccaaata

SEQ ID NO: 310551 - DNA, 33 bp, Homo sapien
acttcatctggcccaacttcaacatatgagttt

SEQ ID NO: 310552 - DNA, 33 bp, Homo sapien
acttcatctggcccaatttcaacatatgagttt

SEQ ID NO: 310553 - DNA, 33 bp, Homo sapien
taaagagcacaagttacctttagactgaattaa

SEQ ID NO: 310554 - DNA, 33 bp, Homo sapien
taaagagcacaagttatctttagactgaattaa

SEQ ID NO: 310555 - DNA, 33 bp, Homo sapien
agttacttaacaattcccatgagtgtggagttt

SEQ ID NO: 310556 - DNA, 33 bp, Homo sapien
agttacttaacaattctcatgagtgtggagttt

SEQ ID NO: 310557 - DNA, 33 bp, Homo sapien
gtggggcctatggaaaagttaagttgccttgca

SEQ ID NO: 310558 - DNA, 33 bp, Homo sapien
gtggggcctatggaaatgttaagttgccttgca

SEQ ID NO: 310559 - DNA, 33 bp, Homo sapien
ctgccctcctgcaccacgtcttaaccttagcgc

SEQ ID NO: 310560 - DNA, 33 bp, Homo sapien
ctgccctcctgcaccatgtcttaaccttagcgc

SEQ ID NO: 310561 - DNA, 33 bp, Homo sapien
gaaccaagtgtgcaaactggctttagtctgttt

SEQ ID NO: 310562 - DNA, 33 bp, Homo sapien
gaaccaagtgtgcaaattggctttagtctgttt

SEQ ID NO: 310563 - DNA, 33 bp, Homo sapien
tctagtgttatggtagcaaagatgccactaaac

SEQ ID NO: 310564 - DNA, 33 bp, Homo sapien
tctagtgttatggtagtaaagatgccactaaac

SEQ ID NO: 310565 - DNA, 33 bp, Homo sapien
aatccctgtcctcataaaacttatatcaaggtg

SEQ ID NO: 310566 - DNA, 33 bp, Homo sapien
aatccctgtcctcatagaacttatatcaaggtg

SEQ ID NO: 310567 - DNA, 33 bp, Homo sapien
ggtttgtcatctgaggaccatactccctaccaa

SEQ ID NO: 310568 - DNA, 33 bp, Homo sapien
ggtttgtcatctgagggccatactccctaccaa

SEQ ID NO: 310569 - DNA, 33 bp, Homo sapien
atgtctgaattccaggaaattttccctgatatg

SEQ ID NO: 310570 - DNA, 33 bp, Homo sapien
atgtctgaattccaggtaattttccctgatatg

SEQ ID NO: 310571 - DNA, 33 bp, Homo sapien
ccatcttgtttttgaaaaccttcacagaacctg

SEQ ID NO: 310572 - DNA, 33 bp, Homo sapien
ccatcttgtttttgaagaccttcacagaacctg

SEQ ID NO: 310573 - DNA, 33 bp, Homo sapien
aatcttgagctcttataaatcagtaagtaaaag

SEQ ID NO: 310574 - DNA, 33 bp, Homo sapien
aatcttgagctcttatgaatcagtaagtaaaag

SEQ ID NO: 310575 - DNA, 33 bp, Homo sapien
gagtaatgtgtagaaacctagcctatttttttt

SEQ ID NO: 310576 - DNA, 33 bp, Homo sapien
gagtaatgtgtagaaatctagcctatttttttt

SEQ ID NO: 310577 - DNA, 33 bp, Homo sapien
gacctaactctggggaacatcaaagagtgaaag

SEQ ID NO: 310578 - DNA, 33 bp, Homo sapien
gacctaactctggggaccatcaaagagtgaaag

SEQ ID NO: 310579 - DNA, 33 bp, Homo sapien
tcgttggtaagaggaccgtataatttatggtca

SEQ ID NO: 310580 - DNA, 33 bp, Homo sapien
tcgttggtaagaggactgtataatttatggtca

SEQ ID NO: 310581 - DNA, 33 bp, Homo sapien
aggtatccagctctaaagacaggatggctgagt

SEQ ID NO: 310582 - DNA, 33 bp, Homo sapien
aggtatccagctctaacgacaggatggctgagt

SEQ ID NO: 310583 - DNA, 33 bp, Homo sapien
tttaaagtttacacatcatagccagattatgag

SEQ ID NO: 310584 - DNA, 33 bp, Homo sapien
tttaaagtttacacattatagccagattatgag

SEQ ID NO: 310585 - DNA, 33 bp, Homo sapien
gcagtcaggtagatacacttcagccactgtctt

SEQ ID NO: 310586 - DNA, 33 bp, Homo sapien
gcagtcaggtagatacgcttcagccactgtctt

SEQ ID NO: 310587 - DNA, 33 bp, Homo sapien
aggtgccaggtagagaaagctcagaaatggcat

SEQ ID NO: 310588 - DNA, 33 bp, Homo sapien
aggtgccaggtagagacagctcagaaatggcat

SEQ ID NO: 310589 - DNA, 33 bp, Homo sapien
catctcaccaaccaaacaagttctaagtgtgat

SEQ ID NO: 310590 - DNA, 33 bp, Homo sapien
catctcaccaaccaaagaagttctaagtgtgat

SEQ ID NO: 310591 - DNA, 33 bp, Homo sapien
aaatgcctatgattcactagtaaatgtttaaca

SEQ ID NO: 310592 - DNA, 33 bp, Homo sapien
aaatgcctatgattcattagtaaatgtttaaca

SEQ ID NO: 310593 - DNA, 33 bp, Homo sapien
taaggttctacagcgccgcctgaggtgtatctg

SEQ ID NO: 310594 - DNA, 33 bp, Homo sapien
taaggttctacagcgctgcctgaggtgtatctg

SEQ ID NO: 310595 - DNA, 33 bp, Homo sapien
atgcttattagaagataactgcacactcaggag

SEQ ID NO: 310596 - DNA, 33 bp, Homo sapien
atgcttattagaagatgactgcacactcaggag

SEQ ID NO: 310597 - DNA, 33 bp, Homo sapien
tatcttttatgacctaactatgccttcagacta

SEQ ID NO: 310598 - DNA, 33 bp, Homo sapien
tatcttttatgacctagctatgccttcagacta

SEQ ID NO: 310599 - DNA, 33 bp, Homo sapien
ttcagtttataacaaaacgggctggttgacaac

SEQ ID NO: 310600 - DNA, 33 bp, Homo sapien
ttcagtttataacaaaccgggctggttgacaac

SEQ ID NO: 310601 - DNA, 33 bp, Homo sapien
ccataggacccacataaagcctgcttctgccag

SEQ ID NO: 310602 - DNA, 33 bp, Homo sapien
ccataggacccacatagagcctgcttctgccag

SEQ ID NO: 310603 - DNA, 33 bp, Homo sapien
ctctgaattactagagaaatcttgtgcaatgag

SEQ ID NO: 310604 - DNA, 33 bp, Homo sapien
ctctgaattactagagcaatcttgtgcaatgag

SEQ ID NO: 310605 - DNA, 33 bp, Homo sapien
attgtacatcccttagaaataagcctgccaatg

SEQ ID NO: 310606 - DNA, 33 bp, Homo sapien
attgtacatcccttagcaataagcctgccaatg

SEQ ID NO: 310607 - DNA, 33 bp, Homo sapien
atccaggcatcacccacggtggacattcacact

SEQ ID NO: 310608 - DNA, 33 bp, Homo sapien
atccaggcatcacccatggtggacattcacact

SEQ ID NO: 310609 - DNA, 33 bp, Homo sapien
gcattcctatacactaacaacatccaagccaag

SEQ ID NO: 310610 - DNA, 33 bp, Homo sapien
gcattcctatacactaccaacatccaagccaag

SEQ ID NO: 310611 - DNA, 33 bp, Homo sapien
ttgtttatcagcttaaatagctcttgggcagaa

SEQ ID NO: 310612 - DNA, 33 bp, Homo sapien
ttgtttatcagcttaagtagctcttgggcagaa

SEQ ID NO: 310613 - DNA, 33 bp, Homo sapien
tgaagcccaagaaacactgggatacaccatctg

SEQ ID NO: 310614 - DNA, 33 bp, Homo sapien
tgaagcccaagaaacattgggatacaccatctg

SEQ ID NO: 310615 - DNA, 33 bp, Homo sapien
ggcaacacaagaataacgcacataataaataca

SEQ ID NO: 310616 - DNA, 33 bp, Homo sapien
ggcaacacaagaataatgcacataataaataca

SEQ ID NO: 310617 - DNA, 33 bp, Homo sapien
ttgtcctggaagatcgcacgcacttaatcaaat

SEQ ID NO: 310618 - DNA, 33 bp, Homo sapien
ttgtcctggaagatcgtacgcacttaatcaaat

SEQ ID NO: 310619 - DNA, 33 bp, Homo sapien
catctcatgccagccagaatggtgcttattaaa

SEQ ID NO: 310620 - DNA, 33 bp, Homo sapien
catctcatgccagccataatggtgcttattaaa

SEQ ID NO: 310621 - DNA, 33 bp, Homo sapien
gaatgctgcaagagaacgggatcatcaagggag

SEQ ID NO: 310622 - DNA, 33 bp, Homo sapien
gaatgctgcaagagaatgggatcatcaagggag

SEQ ID NO: 310623 - DNA, 33 bp, Homo sapien
ccatatgtcatgtaccagccacggggatcctca

SEQ ID NO: 310624 - DNA, 33 bp, Homo sapien
ccatatgtcatgtaccggccacggggatcctca

SEQ ID NO: 310625 - DNA, 33 bp, Homo sapien
taaaagagtgatataacagttgtaccctaaaat

SEQ ID NO: 310626 - DNA, 33 bp, Homo sapien
taaaagagtgatataagagttgtaccctaaaat

SEQ ID NO: 310627 - DNA, 33 bp, Homo sapien
ctgggaggaaaatcccacagatataaggagact

SEQ ID NO: 310628 - DNA, 33 bp, Homo sapien
ctgggaggaaaatcccgcagatataaggagact

SEQ ID NO: 310629 - DNA, 33 bp, Homo sapien
ttcatcaagttgtgtacactccagaaatatttt

SEQ ID NO: 310630 - DNA, 33 bp, Homo sapien
ttcatcaagttgtgtatactccagaaatatttt

SEQ ID NO: 310631 - DNA, 33 bp, Homo sapien
atttagaacttgaaaacgtactacctatgcaaa

SEQ ID NO: 310632 - DNA, 33 bp, Homo sapien
atttagaacttgaaaatgtactacctatgcaaa

SEQ ID NO: 310633 - DNA, 33 bp, Homo sapien
gtgatgagagtgaaagcctgggtttgctacatg

SEQ ID NO: 310634 - DNA, 33 bp, Homo sapien
gtgatgagagtgaaaggctgggtttgctacatg

SEQ ID NO: 310635 - DNA, 33 bp, Homo sapien
tgatgtgggtaacttccaagctgtggaggctca

SEQ ID NO: 310636 - DNA, 33 bp, Homo sapien
tgatgtgggtaacttctaagctgtggaggctca

SEQ ID NO: 310637 - DNA, 33 bp, Homo sapien
cagaagatcaggaccaagatagaaattagtttc

SEQ ID NO: 310638 - DNA, 33 bp, Homo sapien
cagaagatcaggaccacgatagaaattagtttc

SEQ ID NO: 310639 - DNA, 33 bp, Homo sapien
gaatttagacaaatgacgacattcaattaagaa

SEQ ID NO: 310640 - DNA, 33 bp, Homo sapien
gaatttagacaaatgaggacattcaattaagaa

SEQ ID NO: 310641 - DNA, 33 bp, Homo sapien
ggcagcatgtgaaatgaatctgagagatctgtc

SEQ ID NO: 310642 - DNA, 33 bp, Homo sapien
ggcagcatgtgaaatggatctgagagatctgtc

SEQ ID NO: 310643 - DNA, 33 bp, Homo sapien
atatcatgaaaggaaacatagctgagacatttt

SEQ ID NO: 310644 - DNA, 33 bp, Homo sapien
atatcatgaaaggaaatatagctgagacatttt

SEQ ID NO: 310645 - DNA, 33 bp, Homo sapien
atatttccttcttatcactaagcagtattccat

SEQ ID NO: 310646 - DNA, 33 bp, Homo sapien
atatttccttcttatcgctaagcagtattccat

SEQ ID NO: 310647 - DNA, 33 bp, Homo sapien
gtaaagtggctctgaaacatactaattatcatc

SEQ ID NO: 310648 - DNA, 33 bp, Homo sapien
gtaaagtggctctgaagcatactaattatcatc

SEQ ID NO: 310649 - DNA, 33 bp, Homo sapien
catggatggaggtcacagatggcagagcagctt

SEQ ID NO: 310650 - DNA, 33 bp, Homo sapien
catggatggaggtcaccgatggcagagcagctt

SEQ ID NO: 310651 - DNA, 33 bp, Homo sapien
ctcggcagaaccaataataacagaagaggatag

SEQ ID NO: 310652 - DNA, 33 bp, Homo sapien
ctcggcagaaccaatagtaacagaagaggatag

SEQ ID NO: 310653 - DNA, 33 bp, Homo sapien
taggctcagcagtagaaagttgatgatcaactg

SEQ ID NO: 310654 - DNA, 33 bp, Homo sapien
taggctcagcagtagagagttgatgatcaactg

SEQ ID NO: 310655 - DNA, 33 bp, Homo sapien
gttataaatggtggcaatcaagtgaagtcccca

SEQ ID NO: 310656 - DNA, 33 bp, Homo sapien
gttataaatggtggcagtcaagtgaagtcccca

SEQ ID NO: 310657 - DNA, 33 bp, Homo sapien
agtgtttttcctattcacacacattagtcacct

SEQ ID NO: 310658 - DNA, 33 bp, Homo sapien
agtgtttttcctattcgcacacattagtcacct

SEQ ID NO: 310659 - DNA, 33 bp, Homo sapien
ccacaggttaagggctcaatcccacatgactgc

SEQ ID NO: 310660 - DNA, 33 bp, Homo sapien
ccacaggttaagggctgaatcccacatgactgc

SEQ ID NO: 310661 - DNA, 33 bp, Homo sapien
attttctccagccaacagtcgtgacactgattc

SEQ ID NO: 310662 - DNA, 33 bp, Homo sapien
attttctccagccaaccgtcgtgacactgattc

SEQ ID NO: 310663 - DNA, 33 bp, Homo sapien
attgccagatttctcaaggaaagttggaccaat

SEQ ID NO: 310664 - DNA, 33 bp, Homo sapien
attgccagatttctcagggaaagttggaccaat

SEQ ID NO: 310665 - DNA, 33 bp, Homo sapien
gaacaaagtgggatggaagtcttcaagcatcaa

SEQ ID NO: 310666 - DNA, 33 bp, Homo sapien
gaacaaagtgggatgggagtcttcaagcatcaa

SEQ ID NO: 310667 - DNA, 33 bp, Homo sapien
gggggacttctcctgaagcacagccaaaatgta

SEQ ID NO: 310668 - DNA, 33 bp, Homo sapien
gggggacttctcctgatgcacagccaaaatgta

SEQ ID NO: 310669 - DNA, 33 bp, Homo sapien
tgtgtaccattagacaaaagtgatgggatcaat

SEQ ID NO: 310670 - DNA, 33 bp, Homo sapien
tgtgtaccattagacagaagtgatgggatcaat

SEQ ID NO: 310671 - DNA, 33 bp, Homo sapien
accggagtgctacccaatggactctgttattac

SEQ ID NO: 310672 - DNA, 33 bp, Homo sapien
accggagtgctacccagtggactctgttattac

SEQ ID NO: 310673 - DNA, 33 bp, Homo sapien
atattattatccagaccacaagagcattattga

SEQ ID NO: 310674 - DNA, 33 bp, Homo sapien
atattattatccagactacaagagcattattga

SEQ ID NO: 310675 - DNA, 33 bp, Homo sapien
tgtgctctgcctgttacagctgttattgtcatg

SEQ ID NO: 310676 - DNA, 33 bp, Homo sapien
tgtgctctgcctgttatagctgttattgtcatg

SEQ ID NO: 310677 - DNA, 33 bp, Homo sapien
gcatgagcttcaccgaatccccacagaaataca

SEQ ID NO: 310678 - DNA, 33 bp, Homo sapien
gcatgagcttcaccgagtccccacagaaataca

SEQ ID NO: 310679 - DNA, 33 bp, Homo sapien
cccagagaagattcagaaattgctggcagtaac

SEQ ID NO: 310680 - DNA, 33 bp, Homo sapien
cccagagaagattcaggaattgctggcagtaac

SEQ ID NO: 310681 - DNA, 33 bp, Homo sapien
cttgagattgagaagaaagttactgccagcaat

SEQ ID NO: 310682 - DNA, 33 bp, Homo sapien
cttgagattgagaagatagttactgccagcaat

SEQ ID NO: 310683 - DNA, 33 bp, Homo sapien
gtgatctaggcaaagtaaattcctgagtgcctc

SEQ ID NO: 310684 - DNA, 33 bp, Homo sapien
gtgatctaggcaaagtgaattcctgagtgcctc

SEQ ID NO: 310685 - DNA, 33 bp, Homo sapien
ccattatattaactgacggtatgagtgagccac

SEQ ID NO: 310686 - DNA, 33 bp, Homo sapien
ccattatattaactgatggtatgagtgagccac

SEQ ID NO: 310687 - DNA, 33 bp, Homo sapien
atggactctcattcccactagtcatttaattta

SEQ ID NO: 310688 - DNA, 33 bp, Homo sapien
atggactctcattcccgctagtcatttaattta

SEQ ID NO: 310689 - DNA, 33 bp, Homo sapien
gcctgaaattattagaagtaatcatcaggttga

SEQ ID NO: 310690 - DNA, 33 bp, Homo sapien
gcctgaaattattagatgtaatcatcaggttga

SEQ ID NO: 310691 - DNA, 33 bp, Homo sapien
gctaggtaggaggagaaagtcccatgtgtctaa

SEQ ID NO: 310692 - DNA, 33 bp, Homo sapien
gctaggtaggaggagagagtcccatgtgtctaa

SEQ ID NO: 310693 - DNA, 33 bp, Homo sapien
atttaaagtgacagacagggactcttcctttca

SEQ ID NO: 310694 - DNA, 33 bp, Homo sapien
atttaaagtgacagacggggactcttcctttca

SEQ ID NO: 310695 - DNA, 33 bp, Homo sapien
aaaatcttgtgtctgacctgtgaggataaaaat

SEQ ID NO: 310696 - DNA, 33 bp, Homo sapien
aaaatcttgtgtctgatctgtgaggataaaaat

SEQ ID NO: 310697 - DNA, 33 bp, Homo sapien
atccatgaaaagtataaagcgcaatacctggtg

SEQ ID NO: 310698 - DNA, 33 bp, Homo sapien
atccatgaaaagtatagagcgcaatacctggtg

SEQ ID NO: 310699 - DNA, 33 bp, Homo sapien
ttgatagaaaaagttcacaggccctggcttaag

SEQ ID NO: 310700 - DNA, 33 bp, Homo sapien
ttgatagaaaaagttcgcaggccctggcttaag

SEQ ID NO: 310701 - DNA, 33 bp, Homo sapien
ggcagagagggcttggaatcattatttaaatcg

SEQ ID NO: 310702 - DNA, 33 bp, Homo sapien
ggcagagagggcttgggatcattatttaaatcg

SEQ ID NO: 310703 - DNA, 33 bp, Homo sapien
acttctcaaaagaagacagtcatgtggccaata

SEQ ID NO: 310704 - DNA, 33 bp, Homo sapien
acttctcaaaagaagatagtcatgtggccaata

SEQ ID NO: 310705 - DNA, 33 bp, Homo sapien
cctgaccttgaggagaacaaaagggctttttag

SEQ ID NO: 310706 - DNA, 33 bp, Homo sapien
cctgaccttgaggagagcaaaagggctttttag

SEQ ID NO: 310707 - DNA, 33 bp, Homo sapien
aagatgctcaggcttcacaaggtaactcaccac

SEQ ID NO: 310708 - DNA, 33 bp, Homo sapien
aagatgctcaggcttcgcaaggtaactcaccac

SEQ ID NO: 310709 - DNA, 33 bp, Homo sapien
agtttttatactggggaagtctggtgcaatact

SEQ ID NO: 310710 - DNA, 33 bp, Homo sapien
agtttttatactgggggagtctggtgcaatact

SEQ ID NO: 310711 - DNA, 33 bp, Homo sapien
caagaaagcatagaccaagagctcacattgttt

SEQ ID NO: 310712 - DNA, 33 bp, Homo sapien
caagaaagcatagaccgagagctcacattgttt

SEQ ID NO: 310713 - DNA, 33 bp, Homo sapien
caggacatggtaagaccgaaggtggatcatgag

SEQ ID NO: 310714 - DNA, 33 bp, Homo sapien
caggacatggtaagactgaaggtggatcatgag

SEQ ID NO: 310715 - DNA, 33 bp, Homo sapien
gtgagtcagttagagacaggaagccaggacatg

SEQ ID NO: 310716 - DNA, 33 bp, Homo sapien
gtgagtcagttagagataggaagccaggacatg

SEQ ID NO: 310717 - DNA, 33 bp, Homo sapien
aagatgaaaagggtgcaaccgagaaagcatcca

SEQ ID NO: 310718 - DNA, 33 bp, Homo sapien
aagatgaaaagggtgcgaccgagaaagcatcca

SEQ ID NO: 310719 - DNA, 33 bp, Homo sapien
tctctctttacattaccagactggaccatatga

SEQ ID NO: 310720 - DNA, 33 bp, Homo sapien
tctctctttacattactagactggaccatatga

SEQ ID NO: 310721 - DNA, 33 bp, Homo sapien
aaacctgtccctggcacataataactttctcca

SEQ ID NO: 310722 - DNA, 33 bp, Homo sapien
aaacctgtccctggcatataataactttctcca

SEQ ID NO: 310723 - DNA, 33 bp, Homo sapien
ggattatttgtctgaaagcaaggtaacaagatc

SEQ ID NO: 310724 - DNA, 33 bp, Homo sapien
ggattatttgtctgaaggcaaggtaacaagatc

SEQ ID NO: 310725 - DNA, 33 bp, Homo sapien
tgagagcagtcccaatcaggtgatatttcattg

SEQ ID NO: 310726 - DNA, 33 bp, Homo sapien
tgagagcagtcccaatgaggtgatatttcattg

SEQ ID NO: 310727 - DNA, 33 bp, Homo sapien
taagatgtgcacagggaatcatttaatttgttg

SEQ ID NO: 310728 - DNA, 33 bp, Homo sapien
taagatgtgcacagggtatcatttaatttgttg

SEQ ID NO: 310729 - DNA, 33 bp, Homo sapien
tgtgggaactctgatacatagcttgttggtcag

SEQ ID NO: 310730 - DNA, 33 bp, Homo sapien
tgtgggaactctgatatatagcttgttggtcag

SEQ ID NO: 310731 - DNA, 33 bp, Homo sapien
agaagctcctatgctcaagacccttccagactt

SEQ ID NO: 310732 - DNA, 33 bp, Homo sapien
agaagctcctatgctcgagacccttccagactt

SEQ ID NO: 310733 - DNA, 33 bp, Homo sapien
cagaattatgcaaatcaaggaaagggtctgagc

SEQ ID NO: 310734 - DNA, 33 bp, Homo sapien
cagaattatgcaaatcgaggaaagggtctgagc

SEQ ID NO: 310735 - DNA, 33 bp, Homo sapien
gggagttacctcacccaatgttatgtcctctcc

SEQ ID NO: 310736 - DNA, 33 bp, Homo sapien
gggagttacctcacccgatgttatgtcctctcc

SEQ ID NO: 310737 - DNA, 33 bp, Homo sapien
gtttgctatatctcaaccaagtgctataggttc

SEQ ID NO: 310738 - DNA, 33 bp, Homo sapien
gtttgctatatctcaagcaagtgctataggttc

SEQ ID NO: 310739 - DNA, 33 bp, Homo sapien
ttgcccaacaggctaacggatgattcatacttg

SEQ ID NO: 310740 - DNA, 33 bp, Homo sapien
ttgcccaacaggctaatggatgattcatacttg

SEQ ID NO: 310741 - DNA, 33 bp, Homo sapien
tctcccctgaacttcaaattaatatatccaact

SEQ ID NO: 310742 - DNA, 33 bp, Homo sapien
tctcccctgaacttcacattaatatatccaact

SEQ ID NO: 310743 - DNA, 33 bp, Homo sapien
ggctaaagtatcccaccctttaacatcatatgg

SEQ ID NO: 310744 - DNA, 33 bp, Homo sapien
ggctaaagtatcccacgctttaacatcatatgg

SEQ ID NO: 310745 - DNA, 33 bp, Homo sapien
ttgtaggttttaatcacgcaaaggtaatcctgg

SEQ ID NO: 310746 - DNA, 33 bp, Homo sapien
ttgtaggttttaatcatgcaaaggtaatcctgg

SEQ ID NO: 310747 - DNA, 33 bp, Homo sapien
cagtgagataccattacgtgtctgctagaacat

SEQ ID NO: 310748 - DNA, 33 bp, Homo sapien
cagtgagataccattatgtgtctgctagaacat

SEQ ID NO: 310749 - DNA, 33 bp, Homo sapien
ataggaagctagaggccgagcaggatttaatcc

SEQ ID NO: 310750 - DNA, 33 bp, Homo sapien
ataggaagctagaggctgagcaggatttaatcc

SEQ ID NO: 310751 - DNA, 33 bp, Homo sapien
attcttgctgtcttgaacataaaaggaattttt

SEQ ID NO: 310752 - DNA, 33 bp, Homo sapien
attcttgctgtcttgagcataaaaggaattttt

SEQ ID NO: 310753 - DNA, 33 bp, Homo sapien
ggagaaatgtgaatgacgagggagcaggaagtg

SEQ ID NO: 310754 - DNA, 33 bp, Homo sapien
ggagaaatgtgaatgatgagggagcaggaagtg

SEQ ID NO: 310755 - DNA, 33 bp, Homo sapien
atctcaaaagacagaaatgcagaaggttgagtg

SEQ ID NO: 310756 - DNA, 33 bp, Homo sapien
atctcaaaagacagaagtgcagaaggttgagtg

SEQ ID NO: 310757 - DNA, 33 bp, Homo sapien
aaatatacggcctcaaagtctttcttgctgagt

SEQ ID NO: 310758 - DNA, 33 bp, Homo sapien
aaatatacggcctcaatgtctttcttgctgagt

SEQ ID NO: 310759 - DNA, 33 bp, Homo sapien
agagaattctgaaccacgcttaatttaaagaat

SEQ ID NO: 310760 - DNA, 33 bp, Homo sapien
agagaattctgaaccaggcttaatttaaagaat

SEQ ID NO: 310761 - DNA, 33 bp, Homo sapien
tagggcactcttaaaacgaacatcattcagcag

SEQ ID NO: 310762 - DNA, 33 bp, Homo sapien
tagggcactcttaaaatgaacatcattcagcag

SEQ ID NO: 310763 - DNA, 33 bp, Homo sapien
aagtaagtgtgccgacagggccagggtattgga

SEQ ID NO: 310764 - DNA, 33 bp, Homo sapien
aagtaagtgtgccgaccgggccagggtattgga

SEQ ID NO: 310765 - DNA, 33 bp, Homo sapien
gaacacataggttatacggaattttctatgggt

SEQ ID NO: 310766 - DNA, 33 bp, Homo sapien
gaacacataggttatatggaattttctatgggt

SEQ ID NO: 310767 - DNA, 33 bp, Homo sapien
tccctccctccttgccaagagccaggttaccgg

SEQ ID NO: 310768 - DNA, 33 bp, Homo sapien
tccctccctccttgccgagagccaggttaccgg

SEQ ID NO: 310769 - DNA, 33 bp, Homo sapien
ccgaatttaaacctgcactgtcttgcaccttga

SEQ ID NO: 310770 - DNA, 33 bp, Homo sapien
ccgaatttaaacctgcgctgtcttgcaccttga

SEQ ID NO: 310771 - DNA, 33 bp, Homo sapien
gaaattcagatcctaacccagcacaccaggcct

SEQ ID NO: 310772 - DNA, 33 bp, Homo sapien
gaaattcagatcctaatccagcacaccaggcct

SEQ ID NO: 310773 - DNA, 33 bp, Homo sapien
ttactggtgaccgccacggataatgttgtattg

SEQ ID NO: 310774 - DNA, 33 bp, Homo sapien
ttactggtgaccgccatggataatgttgtattg

SEQ ID NO: 310775 - DNA, 33 bp, Homo sapien
tatcttggaaagataaaggacacagcttcctgc

SEQ ID NO: 310776 - DNA, 33 bp, Homo sapien
tatcttggaaagataagggacacagcttcctgc

SEQ ID NO: 310777 - DNA, 33 bp, Homo sapien
ccctcttctcactaaacattgctaatgaaagga

SEQ ID NO: 310778 - DNA, 33 bp, Homo sapien
ccctcttctcactaaagattgctaatgaaagga

SEQ ID NO: 310779 - DNA, 33 bp, Homo sapien
atatagtaagtaggggacccagacttgaactct

SEQ ID NO: 310780 - DNA, 33 bp, Homo sapien
atatagtaagtaggggtcccagacttgaactct

SEQ ID NO: 310781 - DNA, 33 bp, Homo sapien
tagtgtgcttttcatgcaaagaggttgctttca

SEQ ID NO: 310782 - DNA, 33 bp, Homo sapien
tagtgtgcttttcatgtaaagaggttgctttca

SEQ ID NO: 310783 - DNA, 33 bp, Homo sapien
ctctaccttcccctatcactgtgatgacctagc

SEQ ID NO: 310784 - DNA, 33 bp, Homo sapien
ctctaccttcccctattactgtgatgacctagc

SEQ ID NO: 310785 - DNA, 33 bp, Homo sapien
cagtcctatcaacttacaaacatgctgttcttt

SEQ ID NO: 310786 - DNA, 33 bp, Homo sapien
cagtcctatcaacttataaacatgctgttcttt

SEQ ID NO: 310787 - DNA, 33 bp, Homo sapien
agttacattagagttaacagtgttcttgaccat

SEQ ID NO: 310788 - DNA, 33 bp, Homo sapien
agttacattagagttagcagtgttcttgaccat

SEQ ID NO: 310789 - DNA, 33 bp, Homo sapien
caccacattttccaggacacctcagtgaggcat

SEQ ID NO: 310790 - DNA, 33 bp, Homo sapien
caccacattttccagggcacctcagtgaggcat

SEQ ID NO: 310791 - DNA, 33 bp, Homo sapien
tgaataaaataagagaactgatcctttatgcaa

SEQ ID NO: 310792 - DNA, 33 bp, Homo sapien
tgaataaaataagagagctgatcctttatgcaa

SEQ ID NO: 310793 - DNA, 33 bp, Homo sapien
agttacactgtttacacggtttgtagtggcacc

SEQ ID NO: 310794 - DNA, 33 bp, Homo sapien
agttacactgtttacagggtttgtagtggcacc

SEQ ID NO: 310795 - DNA, 33 bp, Homo sapien
cattaagtagggaaaacaggtggtgagacaaaa

SEQ ID NO: 310796 - DNA, 33 bp, Homo sapien
cattaagtagggaaaataggtggtgagacaaaa

SEQ ID NO: 310797 - DNA, 33 bp, Homo sapien
tgggccatagagtagacggatatacaggcaaag

SEQ ID NO: 310798 - DNA, 33 bp, Homo sapien
tgggccatagagtagatggatatacaggcaaag

SEQ ID NO: 310799 - DNA, 33 bp, Homo sapien
tttaaaatggactctacagaccactagtaatga

SEQ ID NO: 310800 - DNA, 33 bp, Homo sapien
tttaaaatggactctatagaccactagtaatga

SEQ ID NO: 310801 - DNA, 33 bp, Homo sapien
aaacatactaccttccactaatttgcagtttct

SEQ ID NO: 310802 - DNA, 33 bp, Homo sapien
aaacatactaccttccgctaatttgcagtttct

SEQ ID NO: 310803 - DNA, 33 bp, Homo sapien
gcctaaagctgcctacacatttcatgtctgggt

SEQ ID NO: 310804 - DNA, 33 bp, Homo sapien
gcctaaagctgcctacgcatttcatgtctgggt

SEQ ID NO: 310805 - DNA, 33 bp, Homo sapien
tttctgaagaactgaagtagtaacagaagagtg

SEQ ID NO: 310806 - DNA, 33 bp, Homo sapien
tttctgaagaactgaattagtaacagaagagtg

SEQ ID NO: 310807 - DNA, 33 bp, Homo sapien
tatgtagaagtagtaacgacggtagcaacaata

SEQ ID NO: 310808 - DNA, 33 bp, Homo sapien
tatgtagaagtagtaatgacggtagcaacaata

SEQ ID NO: 310809 - DNA, 33 bp, Homo sapien
cactggtctccctgaagaacaagcgtacatttg

SEQ ID NO: 310810 - DNA, 33 bp, Homo sapien
cactggtctccctgaataacaagcgtacatttg

SEQ ID NO: 310811 - DNA, 33 bp, Homo sapien
ctatgagttacaacacaacattcagcttctatc

SEQ ID NO: 310812 - DNA, 33 bp, Homo sapien
ctatgagttacaacacgacattcagcttctatc

SEQ ID NO: 310813 - DNA, 33 bp, Homo sapien
tgttgatggagaagcgacaggtcacactgtaaa

SEQ ID NO: 310814 - DNA, 33 bp, Homo sapien
tgttgatggagaagcggcaggtcacactgtaaa

SEQ ID NO: 310815 - DNA, 33 bp, Homo sapien
ttattgcttcaggtgacacatatatattttacc

SEQ ID NO: 310816 - DNA, 33 bp, Homo sapien
ttattgcttcaggtgatacatatatattttacc

SEQ ID NO: 310817 - DNA, 33 bp, Homo sapien
cttcctgtacttcgtaggttcagccctgtaata

SEQ ID NO: 310818 - DNA, 33 bp, Homo sapien
cttcctgtacttcgtatgttcagccctgtaata

SEQ ID NO: 310819 - DNA, 33 bp, Homo sapien
gcttttagaaaaattaaatctagcaagagtgaa

SEQ ID NO: 310820 - DNA, 33 bp, Homo sapien
gcttttagaaaaattacatctagcaagagtgaa

SEQ ID NO: 310821 - DNA, 33 bp, Homo sapien
atataagggctaaacacataccatgaccattag

SEQ ID NO: 310822 - DNA, 33 bp, Homo sapien
atataagggctaaacatataccatgaccattag

SEQ ID NO: 310823 - DNA, 33 bp, Homo sapien
attttctttctatggcaaagtgttcaatctgga

SEQ ID NO: 310824 - DNA, 33 bp, Homo sapien
attttctttctatggcgaagtgttcaatctgga

SEQ ID NO: 310825 - DNA, 33 bp, Homo sapien
atgggtatattaaaaacgggattcattgatcct

SEQ ID NO: 310826 - DNA, 33 bp, Homo sapien
atgggtatattaaaaatgggattcattgatcct

SEQ ID NO: 310827 - DNA, 33 bp, Homo sapien
ggaagttgcccacatacgcgctttgcccacata

SEQ ID NO: 310828 - DNA, 33 bp, Homo sapien
ggaagttgcccacatatgcgctttgcccacata

SEQ ID NO: 310829 - DNA, 33 bp, Homo sapien
tttgatggatgaggctcacctcgttgatctttc

SEQ ID NO: 310830 - DNA, 33 bp, Homo sapien
tttgatggatgaggcttacctcgttgatctttc

SEQ ID NO: 310831 - DNA, 33 bp, Homo sapien
caggatccaatgacccactaagctctaggtagc

SEQ ID NO: 310832 - DNA, 33 bp, Homo sapien
caggatccaatgacccgctaagctctaggtagc

SEQ ID NO: 310833 - DNA, 33 bp, Homo sapien
cacatcgcggagtatcaagcacacaaagcaccc

SEQ ID NO: 310834 - DNA, 33 bp, Homo sapien
cacatcgcggagtatcgagcacacaaagcaccc

SEQ ID NO: 310835 - DNA, 33 bp, Homo sapien
cctgttaaatctccgaacagtaccaaaaaagga

SEQ ID NO: 310836 - DNA, 33 bp, Homo sapien
cctgttaaatctccgaccagtaccaaaaaagga

SEQ ID NO: 310837 - DNA, 33 bp, Homo sapien
cgcagttgaatgtataacccatgattctttctc

SEQ ID NO: 310838 - DNA, 33 bp, Homo sapien
cgcagttgaatgtatatcccatgattctttctc

SEQ ID NO: 310839 - DNA, 33 bp, Homo sapien
gttactgttgtttttgaaaaatggaataaagtt

SEQ ID NO: 310840 - DNA, 33 bp, Homo sapien
gttactgttgtttttggaaaatggaataaagtt

SEQ ID NO: 310841 - DNA, 33 bp, Homo sapien
cttgaatttaacccatcatctgatttgacaaga

SEQ ID NO: 310842 - DNA, 33 bp, Homo sapien
cttgaatttaacccattatctgatttgacaaga

SEQ ID NO: 310843 - DNA, 33 bp, Homo sapien
atcatggccacaatcacggttttagcaaaataa

SEQ ID NO: 310844 - DNA, 33 bp, Homo sapien
atcatggccacaatcagggttttagcaaaataa

SEQ ID NO: 310845 - DNA, 33 bp, Homo sapien
gtggtagttatgaaagcaagctccggcattaga

SEQ ID NO: 310846 - DNA, 33 bp, Homo sapien
gtggtagttatgaaaggaagctccggcattaga

SEQ ID NO: 310847 - DNA, 33 bp, Homo sapien
tcatggagcattttgcaagatacctgtcctggt

SEQ ID NO: 310848 - DNA, 33 bp, Homo sapien
tcatggagcattttgccagatacctgtcctggt

SEQ ID NO: 310849 - DNA, 33 bp, Homo sapien
tctcttttaataaaggacaacttccctgccttt

SEQ ID NO: 310850 - DNA, 33 bp, Homo sapien
tctcttttaataaagggcaacttccctgccttt

SEQ ID NO: 310851 - DNA, 33 bp, Homo sapien
attttcctttagcaaactgtatttacatagaaa

SEQ ID NO: 310852 - DNA, 33 bp, Homo sapien
attttcctttagcaaattgtatttacatagaaa

SEQ ID NO: 310853 - DNA, 33 bp, Homo sapien
actgtgatcaaacatcccaaagtcagaatcctc

SEQ ID NO: 310854 - DNA, 33 bp, Homo sapien
actgtgatcaaacatctcaaagtcagaatcctc

SEQ ID NO: 310855 - DNA, 33 bp, Homo sapien
tttaaaagcagagtccaagttagcaggcgagag

SEQ ID NO: 310856 - DNA, 33 bp, Homo sapien
tttaaaagcagagtccgagttagcaggcgagag

SEQ ID NO: 310857 - DNA, 33 bp, Homo sapien
tgagtgacatatgccaacatcttagagctaagc

SEQ ID NO: 310858 - DNA, 33 bp, Homo sapien
tgagtgacatatgccagcatcttagagctaagc

SEQ ID NO: 310859 - DNA, 33 bp, Homo sapien
tttaatgtgtcttggaagctacacccttttcat

SEQ ID NO: 310860 - DNA, 33 bp, Homo sapien
tttaatgtgtcttggaggctacacccttttcat

SEQ ID NO: 310861 - DNA, 33 bp, Homo sapien
gttccattgctttcagaattcatgtcatcaggg

SEQ ID NO: 310862 - DNA, 33 bp, Homo sapien
gttccattgctttcaggattcatgtcatcaggg

SEQ ID NO: 310863 - DNA, 33 bp, Homo sapien
atgcaactataatgtaacaaaagaatgcaagga

SEQ ID NO: 310864 - DNA, 33 bp, Homo sapien
atgcaactataatgtagcaaaagaatgcaagga

SEQ ID NO: 310865 - DNA, 33 bp, Homo sapien
ggggagacacagctaacattttggcctcacagg

SEQ ID NO: 310866 - DNA, 33 bp, Homo sapien
ggggagacacagctaatattttggcctcacagg

SEQ ID NO: 310867 - DNA, 33 bp, Homo sapien
attatagtgtctaaccaaccatcatcaggtgtg

SEQ ID NO: 310868 - DNA, 33 bp, Homo sapien
attatagtgtctaacccaccatcatcaggtgtg

SEQ ID NO: 310869 - DNA, 33 bp, Homo sapien
catagccagtggtctaacaaagaagagactgat

SEQ ID NO: 310870 - DNA, 33 bp, Homo sapien
catagccagtggtctaccaaagaagagactgat

SEQ ID NO: 310871 - DNA, 33 bp, Homo sapien
tcttaaggcattacccacaacaataaagaagaa

SEQ ID NO: 310872 - DNA, 33 bp, Homo sapien
tcttaaggcattacccgcaacaataaagaagaa

SEQ ID NO: 310873 - DNA, 33 bp, Homo sapien
gtgcacagcattacataaccaaccccttcatag

SEQ ID NO: 310874 - DNA, 33 bp, Homo sapien
gtgcacagcattacatgaccaaccccttcatag

SEQ ID NO: 310875 - DNA, 33 bp, Homo sapien
agctacagagagttaaaccatcaatcctgcagt

SEQ ID NO: 310876 - DNA, 33 bp, Homo sapien
agctacagagagttaagccatcaatcctgcagt

SEQ ID NO: 310877 - DNA, 33 bp, Homo sapien
tcacgatgagagactaagccaaaacacacaccc

SEQ ID NO: 310878 - DNA, 33 bp, Homo sapien
tcacgatgagagactaggccaaaacacacaccc

SEQ ID NO: 310879 - DNA, 33 bp, Homo sapien
tgttttaatggaaataaatgaagggtttcagac

SEQ ID NO: 310880 - DNA, 33 bp, Homo sapien
tgttttaatggaaatacatgaagggtttcagac

SEQ ID NO: 310881 - DNA, 33 bp, Homo sapien
cttttctaatatgtacaaactagagctggctct

SEQ ID NO: 310882 - DNA, 33 bp, Homo sapien
cttttctaatatgtacgaactagagctggctct

SEQ ID NO: 310883 - DNA, 33 bp, Homo sapien
ctagcgtcagagaatcagaggcacaagaggacc

SEQ ID NO: 310884 - DNA, 33 bp, Homo sapien
ctagcgtcagagaatcggaggcacaagaggacc

SEQ ID NO: 310885 - DNA, 33 bp, Homo sapien
gcaaaggatgaacgaaagagaagggaacacgta

SEQ ID NO: 310886 - DNA, 33 bp, Homo sapien
gcaaaggatgaacgaaggagaagggaacacgta

SEQ ID NO: 310887 - DNA, 33 bp, Homo sapien
tctgccccttaagaagaagcattattaagctct

SEQ ID NO: 310888 - DNA, 33 bp, Homo sapien
tctgccccttaagaagcagcattattaagctct

SEQ ID NO: 310889 - DNA, 33 bp, Homo sapien
aggggaaggtaaactacgacttcataaagtaat

SEQ ID NO: 310890 - DNA, 33 bp, Homo sapien
aggggaaggtaaactaggacttcataaagtaat

SEQ ID NO: 310891 - DNA, 33 bp, Homo sapien
attgcttctaggcatcaaaaataatgtatcact

SEQ ID NO: 310892 - DNA, 33 bp, Homo sapien
attgcttctaggcatcgaaaataatgtatcact

SEQ ID NO: 310893 - DNA, 33 bp, Homo sapien
agtgaatgactttcacgagttgacagaagtggg

SEQ ID NO: 310894 - DNA, 33 bp, Homo sapien
agtgaatgactttcactagttgacagaagtggg

SEQ ID NO: 310895 - DNA, 33 bp, Homo sapien
gaatatgtgtaacacacgagggagaaatgttca

SEQ ID NO: 310896 - DNA, 33 bp, Homo sapien
gaatatgtgtaacacatgagggagaaatgttca

SEQ ID NO: 310897 - DNA, 33 bp, Homo sapien
taagttatcctttaaggctgggagatgcaatgt

SEQ ID NO: 310898 - DNA, 33 bp, Homo sapien
taagttatcctttaagtctgggagatgcaatgt

SEQ ID NO: 310899 - DNA, 33 bp, Homo sapien
aagtaatgcataaccacgtcaagcccatacttc

SEQ ID NO: 310900 - DNA, 33 bp, Homo sapien
aagtaatgcataaccatgtcaagcccatacttc

SEQ ID NO: 310901 - DNA, 33 bp, Homo sapien
tttcaagatgttaacgaaagtaggttgatcaca

SEQ ID NO: 310902 - DNA, 33 bp, Homo sapien
tttcaagatgttaacggaagtaggttgatcaca

SEQ ID NO: 310903 - DNA, 33 bp, Homo sapien
tggcaattttttagcaagatcagattgaatata

SEQ ID NO: 310904 - DNA, 33 bp, Homo sapien
tggcaattttttagcacgatcagattgaatata

SEQ ID NO: 310905 - DNA, 33 bp, Homo sapien
aggctgcagggtatgacgagactgaaacagggt

SEQ ID NO: 310906 - DNA, 33 bp, Homo sapien
aggctgcagggtatgatgagactgaaacagggt

SEQ ID NO: 310907 - DNA, 33 bp, Homo sapien
agaatcaaggcatttaacatcagagtgtagaaa

SEQ ID NO: 310908 - DNA, 33 bp, Homo sapien
agaatcaaggcatttagcatcagagtgtagaaa

SEQ ID NO: 310909 - DNA, 33 bp, Homo sapien
tgcacatccttgagcaaaagaatcaaggcattt

SEQ ID NO: 310910 - DNA, 33 bp, Homo sapien
tgcacatccttgagcagaagaatcaaggcattt

SEQ ID NO: 310911 - DNA, 33 bp, Homo sapien
tgaattcatgagatgacagccaatttaaaaaag

SEQ ID NO: 310912 - DNA, 33 bp, Homo sapien
tgaattcatgagatgagagccaatttaaaaaag

SEQ ID NO: 310913 - DNA, 33 bp, Homo sapien
gcatgtgaatgtcaccggcccaactctctggct

SEQ ID NO: 310914 - DNA, 33 bp, Homo sapien
gcatgtgaatgtcacctgcccaactctctggct

SEQ ID NO: 310915 - DNA, 33 bp, Homo sapien
aagaaacatttatatcaaactggctttctcaat

SEQ ID NO: 310916 - DNA, 33 bp, Homo sapien
aagaaacatttatatcgaactggctttctcaat

SEQ ID NO: 310917 - DNA, 33 bp, Homo sapien
gaacctagaagacaaacaggtcactagctgtcc

SEQ ID NO: 310918 - DNA, 33 bp, Homo sapien
gaacctagaagacaaagaggtcactagctgtcc

SEQ ID NO: 310919 - DNA, 33 bp, Homo sapien
agttagttagcctggtaaatctcatggttattt

SEQ ID NO: 310920 - DNA, 33 bp, Homo sapien
agttagttagcctggttaatctcatggttattt

SEQ ID NO: 310921 - DNA, 33 bp, Homo sapien
tctacatctcacttaaatcttgtataagcaact

SEQ ID NO: 310922 - DNA, 33 bp, Homo sapien
tctacatctcacttaagtcttgtataagcaact

SEQ ID NO: 310923 - DNA, 33 bp, Homo sapien
tatgctgatggtgctacaacaatggtgggtaaa

SEQ ID NO: 310924 - DNA, 33 bp, Homo sapien
tatgctgatggtgctagaacaatggtgggtaaa

SEQ ID NO: 310925 - DNA, 33 bp, Homo sapien
ggtccaattgactgacacccttgacagccatct

SEQ ID NO: 310926 - DNA, 33 bp, Homo sapien
ggtccaattgactgacgcccttgacagccatct

SEQ ID NO: 310927 - DNA, 33 bp, Homo sapien
gtgatttttgacataccaaacgtaaaaacacaa

SEQ ID NO: 310928 - DNA, 33 bp, Homo sapien
gtgatttttgacatacgaaacgtaaaaacacaa

SEQ ID NO: 310929 - DNA, 33 bp, Homo sapien
atcagcctctgtagacacagctaaggagtctgc

SEQ ID NO: 310930 - DNA, 33 bp, Homo sapien
atcagcctctgtagacgcagctaaggagtctgc

SEQ ID NO: 310931 - DNA, 33 bp, Homo sapien
taggttgtctgtccaaagtgaaaattcatggag

SEQ ID NO: 310932 - DNA, 33 bp, Homo sapien
taggttgtctgtccaaggtgaaaattcatggag

SEQ ID NO: 310933 - DNA, 33 bp, Homo sapien
acattaactttctgagcagagaagaccttttta

SEQ ID NO: 310934 - DNA, 33 bp, Homo sapien
acattaactttctgagtagagaagaccttttta

SEQ ID NO: 310935 - DNA, 33 bp, Homo sapien
aatacattaaagcataacatttagtgattccat

SEQ ID NO: 310936 - DNA, 33 bp, Homo sapien
aatacattaaagcatagcatttagtgattccat

SEQ ID NO: 310937 - DNA, 33 bp, Homo sapien
aaccatcttcaagttaaattacagatatatctc

SEQ ID NO: 310938 - DNA, 33 bp, Homo sapien
aaccatcttcaagttacattacagatatatctc

SEQ ID NO: 310939 - DNA, 33 bp, Homo sapien
gtgccaactttacaaaagataatgccaagtccg

SEQ ID NO: 310940 - DNA, 33 bp, Homo sapien
gtgccaactttacaaaggataatgccaagtccg

SEQ ID NO: 310941 - DNA, 33 bp, Homo sapien
cccagtgctcctaataactcttggaaagaaaat

SEQ ID NO: 310942 - DNA, 33 bp, Homo sapien
cccagtgctcctaatatctcttggaaagaaaat

SEQ ID NO: 310943 - DNA, 33 bp, Homo sapien
cttatgccttgcttcaatgaaaaaaaaaaaggt

SEQ ID NO: 310944 - DNA, 33 bp, Homo sapien
cttatgccttgcttcagtgaaaaaaaaaaaggt

SEQ ID NO: 310945 - DNA, 33 bp, Homo sapien
aaatctataccactgaaagactgctgcacactt

SEQ ID NO: 310946 - DNA, 33 bp, Homo sapien
aaatctataccactgagagactgctgcacactt

SEQ ID NO: 310947 - DNA, 33 bp, Homo sapien
aagtgggtaaagagtgaacagaggagttgaggt

SEQ ID NO: 310948 - DNA, 33 bp, Homo sapien
aagtgggtaaagagtggacagaggagttgaggt

SEQ ID NO: 310949 - DNA, 33 bp, Homo sapien
ctgaattataaaaaatcaatttcactccagcaa

SEQ ID NO: 310950 - DNA, 33 bp, Homo sapien
ctgaattataaaaaatgaatttcactccagcaa

SEQ ID NO: 310951 - DNA, 33 bp, Homo sapien
aacctcgagtgcccaaagccgacaacaaatgac

SEQ ID NO: 310952 - DNA, 33 bp, Homo sapien
aacctcgagtgcccaaggccgacaacaaatgac

SEQ ID NO: 310953 - DNA, 33 bp, Homo sapien
aaaatagtaacgggacactcggatgcattctcc

SEQ ID NO: 310954 - DNA, 33 bp, Homo sapien
aaaatagtaacgggacgctcggatgcattctcc

SEQ ID NO: 310955 - DNA, 33 bp, Homo sapien
agggttgcagttaggaaggctggaaagtctgtg

SEQ ID NO: 310956 - DNA, 33 bp, Homo sapien
agggttgcagttaggagggctggaaagtctgtg

SEQ ID NO: 310957 - DNA, 33 bp, Homo sapien
tgggccctacctctcaagtgtctggttcggcag

SEQ ID NO: 310958 - DNA, 33 bp, Homo sapien
tgggccctacctctcaggtgtctggttcggcag

SEQ ID NO: 310959 - DNA, 33 bp, Homo sapien
aggtcacacagacagcaaaagtatctccagtgg

SEQ ID NO: 310960 - DNA, 33 bp, Homo sapien
aggtcacacagacagcgaaagtatctccagtgg

SEQ ID NO: 310961 - DNA, 33 bp, Homo sapien
gggcatgagaaggacaatgatcatttacacaat

SEQ ID NO: 310962 - DNA, 33 bp, Homo sapien
gggcatgagaaggacagtgatcatttacacaat

SEQ ID NO: 310963 - DNA, 33 bp, Homo sapien
tctctactagatgagcaaaatacttttccctgg

SEQ ID NO: 310964 - DNA, 33 bp, Homo sapien
tctctactagatgagcgaaatacttttccctgg

SEQ ID NO: 310965 - DNA, 33 bp, Homo sapien
aggacaggtttgtgcacatagtactaatttttt

SEQ ID NO: 310966 - DNA, 33 bp, Homo sapien
aggacaggtttgtgcatatagtactaatttttt

SEQ ID NO: 310967 - DNA, 33 bp, Homo sapien
tgtcctctgtgacctgcaatcataactttaggg

SEQ ID NO: 310968 - DNA, 33 bp, Homo sapien
tgtcctctgtgacctggaatcataactttaggg

SEQ ID NO: 310969 - DNA, 33 bp, Homo sapien
gttctctggcttctcacgcaagtcactgggctg

SEQ ID NO: 310970 - DNA, 33 bp, Homo sapien
gttctctggcttctcatgcaagtcactgggctg

SEQ ID NO: 310971 - DNA, 33 bp, Homo sapien
cctgaggagaaagaaaacaggaatcgggtagat

SEQ ID NO: 310972 - DNA, 33 bp, Homo sapien
cctgaggagaaagaaatcaggaatcgggtagat

SEQ ID NO: 310973 - DNA, 33 bp, Homo sapien
tttattaaaatgtgaacaaaagcagagtatctc

SEQ ID NO: 310974 - DNA, 33 bp, Homo sapien
tttattaaaatgtgaataaaagcagagtatctc

SEQ ID NO: 310975 - DNA, 33 bp, Homo sapien
tacctttatctcagcccatgaagctttcactgt

SEQ ID NO: 310976 - DNA, 33 bp, Homo sapien
tacctttatctcagcctatgaagctttcactgt

SEQ ID NO: 310977 - DNA, 33 bp, Homo sapien
acatctttccagaggcccttacaatgctccttc

SEQ ID NO: 310978 - DNA, 33 bp, Homo sapien
acatctttccagaggctcttacaatgctccttc

SEQ ID NO: 310979 - DNA, 33 bp, Homo sapien
acatttacctagtaaacgtcacagttcatctca

SEQ ID NO: 310980 - DNA, 33 bp, Homo sapien
acatttacctagtaaatgtcacagttcatctca

SEQ ID NO: 310981 - DNA, 33 bp, Homo sapien
acatagaggaaaaaaaatagatcatgtgtgttt

SEQ ID NO: 310982 - DNA, 33 bp, Homo sapien
acatagaggaaaaaaattagatcatgtgtgttt

SEQ ID NO: 310983 - DNA, 33 bp, Homo sapien
gatgtttgttggaggacagtaatatctcagttc

SEQ ID NO: 310984 - DNA, 33 bp, Homo sapien
gatgtttgttggaggagagtaatatctcagttc

SEQ ID NO: 310985 - DNA, 33 bp, Homo sapien
aaataaactaaataagccatcaggaggtcaatc

SEQ ID NO: 310986 - DNA, 33 bp, Homo sapien
aaataaactaaataaggcatcaggaggtcaatc

SEQ ID NO: 310987 - DNA, 33 bp, Homo sapien
aactggagtgtttacaatagatgtgggagaagt

SEQ ID NO: 310988 - DNA, 33 bp, Homo sapien
aactggagtgtttacagtagatgtgggagaagt

SEQ ID NO: 310989 - DNA, 33 bp, Homo sapien
actctgctgcctttcacgctcttagaagtctga

SEQ ID NO: 310990 - DNA, 33 bp, Homo sapien
actctgctgcctttcatgctcttagaagtctga

SEQ ID NO: 310991 - DNA, 33 bp, Homo sapien
cccaacttacacagaacctcctccactaccggc

SEQ ID NO: 310992 - DNA, 33 bp, Homo sapien
cccaacttacacagaatctcctccactaccggc

SEQ ID NO: 310993 - DNA, 33 bp, Homo sapien
agaaagtatagggttcccacatagctcctatcc

SEQ ID NO: 310994 - DNA, 33 bp, Homo sapien
agaaagtatagggttctcacatagctcctatcc

SEQ ID NO: 310995 - DNA, 33 bp, Homo sapien
tttttttttaaatcaagacagggcttcactctg

SEQ ID NO: 310996 - DNA, 33 bp, Homo sapien
tttttttttaaatcaatacagggcttcactctg

SEQ ID NO: 310997 - DNA, 33 bp, Homo sapien
agtgtgtggtaaaggacgacatgaaacagagag

SEQ ID NO: 310998 - DNA, 33 bp, Homo sapien
agtgtgtggtaaaggatgacatgaaacagagag

SEQ ID NO: 310999 - DNA, 33 bp, Homo sapien
tcctgcagcccctttccagtgcagcctttttct

SEQ ID NO: 311000 - DNA, 33 bp, Homo sapien
tcctgcagcccctttctagtgcagcctttttct

SEQ ID NO: 311001 - DNA, 33 bp, Homo sapien
tcatcccaattcaggagagctctgcagggtcac

SEQ ID NO: 311002 - DNA, 33 bp, Homo sapien
tcatcccaattcaggatagctctgcagggtcac

SEQ ID NO: 311003 - DNA, 33 bp, Homo sapien
accatctaaaccattaaggcactagctagagaa

SEQ ID NO: 311004 - DNA, 33 bp, Homo sapien
accatctaaaccattacggcactagctagagaa

SEQ ID NO: 311005 - DNA, 33 bp, Homo sapien
gatccctgaacagtgacggttcatcggctcttc

SEQ ID NO: 311006 - DNA, 33 bp, Homo sapien
gatccctgaacagtgatggttcatcggctcttc

SEQ ID NO: 311007 - DNA, 33 bp, Homo sapien
gcatgtaaggcacaaaattaagaaaggtccaga

SEQ ID NO: 311008 - DNA, 33 bp, Homo sapien
gcatgtaaggcacaaagttaagaaaggtccaga

SEQ ID NO: 311009 - DNA, 33 bp, Homo sapien
caaaatctctctgctacatggattacacactaa

SEQ ID NO: 311010 - DNA, 33 bp, Homo sapien
caaaatctctctgctatatggattacacactaa

SEQ ID NO: 311011 - DNA, 33 bp, Homo sapien
gccacaacgctgtccaacttttctaggagagga

SEQ ID NO: 311012 - DNA, 33 bp, Homo sapien
gccacaacgctgtccaccttttctaggagagga

SEQ ID NO: 311013 - DNA, 33 bp, Homo sapien
agagtcaaaagaacaccggctttggagtcagac

SEQ ID NO: 311014 - DNA, 33 bp, Homo sapien
agagtcaaaagaacactggctttggagtcagac

SEQ ID NO: 311015 - DNA, 33 bp, Homo sapien
tgggtttcactgcctgcattaggctgcagccag

SEQ ID NO: 311016 - DNA, 33 bp, Homo sapien
tgggtttcactgcctgtattaggctgcagccag

SEQ ID NO: 311017 - DNA, 33 bp, Homo sapien
tttgccatgttgtgcccgctcttttgtactctt

SEQ ID NO: 311018 - DNA, 33 bp, Homo sapien
tttgccatgttgtgcctgctcttttgtactctt

SEQ ID NO: 311019 - DNA, 33 bp, Homo sapien
gaagtgacaggacacacctaaggcaaggaagga

SEQ ID NO: 311020 - DNA, 33 bp, Homo sapien
gaagtgacaggacacatctaaggcaaggaagga

SEQ ID NO: 311021 - DNA, 33 bp, Homo sapien
ccattgcactcacacactctttcctggctctcc

SEQ ID NO: 311022 - DNA, 33 bp, Homo sapien
ccattgcactcacacattctttcctggctctcc

SEQ ID NO: 311023 - DNA, 33 bp, Homo sapien
ggaagatcctaagttccatctgaaacattctga

SEQ ID NO: 311024 - DNA, 33 bp, Homo sapien
ggaagatcctaagttctatctgaaacattctga

SEQ ID NO: 311025 - DNA, 33 bp, Homo sapien
aagttaatactgcagaaataaaagctacattcc

SEQ ID NO: 311026 - DNA, 33 bp, Homo sapien
aagttaatactgcagagataaaagctacattcc

SEQ ID NO: 311027 - DNA, 33 bp, Homo sapien
aagaggaaatacatggccacactcggtgcctac

SEQ ID NO: 311028 - DNA, 33 bp, Homo sapien
aagaggaaatacatggtcacactcggtgcctac

SEQ ID NO: 311029 - DNA, 33 bp, Homo sapien
atattgacagggactcaatgaatccaatacaaa

SEQ ID NO: 311030 - DNA, 33 bp, Homo sapien
atattgacagggactcgatgaatccaatacaaa

SEQ ID NO: 311031 - DNA, 33 bp, Homo sapien
gaaacaaagcgacaacaaataaagggtttcaaa

SEQ ID NO: 311032 - DNA, 33 bp, Homo sapien
gaaacaaagcgacaaccaataaagggtttcaaa

SEQ ID NO: 311033 - DNA, 33 bp, Homo sapien
taagaagtaatctgaccatgataactgctatgg

SEQ ID NO: 311034 - DNA, 33 bp, Homo sapien
taagaagtaatctgactatgataactgctatgg

SEQ ID NO: 311035 - DNA, 33 bp, Homo sapien
ttattttcaccagagcaataaacaatagccaag

SEQ ID NO: 311036 - DNA, 33 bp, Homo sapien
ttattttcaccagagccataaacaatagccaag

SEQ ID NO: 311037 - DNA, 33 bp, Homo sapien
cagttccctagtttagaagtgaaatgagacagt

SEQ ID NO: 311038 - DNA, 33 bp, Homo sapien
cagttccctagtttaggagtgaaatgagacagt

SEQ ID NO: 311039 - DNA, 33 bp, Homo sapien
aaaattcctctatcaacagcttttctcagtttg

SEQ ID NO: 311040 - DNA, 33 bp, Homo sapien
aaaattcctctatcaatagcttttctcagtttg

SEQ ID NO: 311041 - DNA, 33 bp, Homo sapien
tattgtcatatttcaccaatgagcaaactgaag

SEQ ID NO: 311042 - DNA, 33 bp, Homo sapien
tattgtcatatttcacgaatgagcaaactgaag

SEQ ID NO: 311043 - DNA, 33 bp, Homo sapien
gaaccaaaatgaaccacgttacacaaatgaagt

SEQ ID NO: 311044 - DNA, 33 bp, Homo sapien
gaaccaaaatgaaccatgttacacaaatgaagt

SEQ ID NO: 311045 - DNA, 33 bp, Homo sapien
catatgtgttctataacgtatttgaaagatttc

SEQ ID NO: 311046 - DNA, 33 bp, Homo sapien
catatgtgttctataatgtatttgaaagatttc

SEQ ID NO: 311047 - DNA, 33 bp, Homo sapien
tagcaataatggtcacacaagccagaatatatt

SEQ ID NO: 311048 - DNA, 33 bp, Homo sapien
tagcaataatggtcacgcaagccagaatatatt

SEQ ID NO: 311049 - DNA, 33 bp, Homo sapien
ttcaaaccaaatgcaaataccaggatgaagcat

SEQ ID NO: 311050 - DNA, 33 bp, Homo sapien
ttcaaaccaaatgcaagtaccaggatgaagcat

SEQ ID NO: 311051 - DNA, 33 bp, Homo sapien
atatacattgtatcacagtattaacaataaaac

SEQ ID NO: 311052 - DNA, 33 bp, Homo sapien
atatacattgtatcacggtattaacaataaaac

SEQ ID NO: 311053 - DNA, 33 bp, Homo sapien
attgaattaccgtttacaacatgaatatggtgc

SEQ ID NO: 311054 - DNA, 33 bp, Homo sapien
attgaattaccgtttataacatgaatatggtgc

SEQ ID NO: 311055 - DNA, 33 bp, Homo sapien
cacaattcctctcgaacctctgcttgcattctc

SEQ ID NO: 311056 - DNA, 33 bp, Homo sapien
cacaattcctctcgaatctctgcttgcattctc

SEQ ID NO: 311057 - DNA, 33 bp, Homo sapien
tttagatagcaaagaaacatttattgatgtgat

SEQ ID NO: 311058 - DNA, 33 bp, Homo sapien
tttagatagcaaagaaccatttattgatgtgat

SEQ ID NO: 311059 - DNA, 33 bp, Homo sapien
gtctgatatcaagaggaaaagttcttggttgtt

SEQ ID NO: 311060 - DNA, 33 bp, Homo sapien
gtctgatatcaagagggaaagttcttggttgtt

SEQ ID NO: 311061 - DNA, 33 bp, Homo sapien
catgaggaatagcaagaatctaagcaactaata

SEQ ID NO: 311062 - DNA, 33 bp, Homo sapien
catgaggaatagcaaggatctaagcaactaata

SEQ ID NO: 311063 - DNA, 33 bp, Homo sapien
agctaaatgagatggaaaaggtaagttgaaatt

SEQ ID NO: 311064 - DNA, 33 bp, Homo sapien
agctaaatgagatggacaaggtaagttgaaatt

SEQ ID NO: 311065 - DNA, 33 bp, Homo sapien
ctaggaaaatggacagaccttcctggtggcttt

SEQ ID NO: 311066 - DNA, 33 bp, Homo sapien
ctaggaaaatggacagcccttcctggtggcttt

SEQ ID NO: 311067 - DNA, 33 bp, Homo sapien
ttgattcagagaagaaaaggtataagctgggac

SEQ ID NO: 311068 - DNA, 33 bp, Homo sapien
ttgattcagagaagaagaggtataagctgggac

SEQ ID NO: 311069 - DNA, 33 bp, Homo sapien
ttttaacttcctgctgcatctaagcccaagtct

SEQ ID NO: 311070 - DNA, 33 bp, Homo sapien
ttttaacttcctgctggatctaagcccaagtct

SEQ ID NO: 311071 - DNA, 33 bp, Homo sapien
ttgtaaatctcaaatacgcactataacatttat

SEQ ID NO: 311072 - DNA, 33 bp, Homo sapien
ttgtaaatctcaaatatgcactataacatttat

SEQ ID NO: 311073 - DNA, 33 bp, Homo sapien
gcagcaagctagcataactagtccctgatgacc

SEQ ID NO: 311074 - DNA, 33 bp, Homo sapien
gcagcaagctagcatatctagtccctgatgacc

SEQ ID NO: 311075 - DNA, 33 bp, Homo sapien
aggatccatccaccccaatatgtatgtagtctc

SEQ ID NO: 311076 - DNA, 33 bp, Homo sapien
aggatccatccaccccgatatgtatgtagtctc

SEQ ID NO: 311077 - DNA, 33 bp, Homo sapien
gaggccagtttttaaaattgggaagctgctcgg

SEQ ID NO: 311078 - DNA, 33 bp, Homo sapien
gaggccagtttttaaatttgggaagctgctcgg

SEQ ID NO: 311079 - DNA, 33 bp, Homo sapien
ttaaagtctctgcttagggatactgagaaaaaa

SEQ ID NO: 311080 - DNA, 33 bp, Homo sapien
ttaaagtctctgcttatggatactgagaaaaaa

SEQ ID NO: 311081 - DNA, 33 bp, Homo sapien
gaaggtgtttacataggaggatactcaaacttc

SEQ ID NO: 311082 - DNA, 33 bp, Homo sapien
gaaggtgtttacatagtaggatactcaaacttc

SEQ ID NO: 311083 - DNA, 33 bp, Homo sapien
gttttgggagtccccaggaatctgaatgatgtc

SEQ ID NO: 311084 - DNA, 33 bp, Homo sapien
gttttgggagtccccatgaatctgaatgatgtc

SEQ ID NO: 311085 - DNA, 33 bp, Homo sapien
tttggtgaagagagccacagtccgaacaatggg

SEQ ID NO: 311086 - DNA, 33 bp, Homo sapien
tttggtgaagagagccgcagtccgaacaatggg

SEQ ID NO: 311087 - DNA, 33 bp, Homo sapien
ccactaggattccatgaagagaattcattagct

SEQ ID NO: 311088 - DNA, 33 bp, Homo sapien
ccactaggattccatggagagaattcattagct

SEQ ID NO: 311089 - DNA, 33 bp, Homo sapien
agacacttgagcttctaaagggtctgatacttc

SEQ ID NO: 311090 - DNA, 33 bp, Homo sapien
agacacttgagcttctgaagggtctgatacttc

SEQ ID NO: 311091 - DNA, 33 bp, Homo sapien
ccatgtatacttagaaattaacaatgcattgct

SEQ ID NO: 311092 - DNA, 33 bp, Homo sapien
ccatgtatacttagaacttaacaatgcattgct

SEQ ID NO: 311093 - DNA, 33 bp, Homo sapien
ttactgtgggggattaacgcctatttgcgggtt

SEQ ID NO: 311094 - DNA, 33 bp, Homo sapien
ttactgtgggggattagcgcctatttgcgggtt

SEQ ID NO: 311095 - DNA, 33 bp, Homo sapien
gtaatttggttcattccacttgctgacagtgtc

SEQ ID NO: 311096 - DNA, 33 bp, Homo sapien
gtaatttggttcattcgacttgctgacagtgtc

SEQ ID NO: 311097 - DNA, 33 bp, Homo sapien
tagaaactccccaagacgaagcagtattggggg

SEQ ID NO: 311098 - DNA, 33 bp, Homo sapien
tagaaactccccaagatgaagcagtattggggg

SEQ ID NO: 311099 - DNA, 33 bp, Homo sapien
acacacctaggagctgaaaagacagtttgtcaa

SEQ ID NO: 311100 - DNA, 33 bp, Homo sapien
acacacctaggagctgtaaagacagtttgtcaa

SEQ ID NO: 311101 - DNA, 33 bp, Homo sapien
caccacaaaacctcaacggcatgcaataataag

SEQ ID NO: 311102 - DNA, 33 bp, Homo sapien
caccacaaaacctcaatggcatgcaataataag

SEQ ID NO: 311103 - DNA, 33 bp, Homo sapien
aagattagataatcacaaacaaactgacacttc

SEQ ID NO: 311104 - DNA, 33 bp, Homo sapien
aagattagataatcacgaacaaactgacacttc

SEQ ID NO: 311105 - DNA, 33 bp, Homo sapien
ctccttctccttgacccgaaattcttatgattc

SEQ ID NO: 311106 - DNA, 33 bp, Homo sapien
ctccttctccttgacctgaaattcttatgattc

SEQ ID NO: 311107 - DNA, 33 bp, Homo sapien
acctcatattgttgaaataaactggcccatctg

SEQ ID NO: 311108 - DNA, 33 bp, Homo sapien
acctcatattgttgaattaaactggcccatctg

SEQ ID NO: 311109 - DNA, 33 bp, Homo sapien
aatgaaatgaaagctaaagtcataccagggagt

SEQ ID NO: 311110 - DNA, 33 bp, Homo sapien
aatgaaatgaaagctagagtcataccagggagt

SEQ ID NO: 311111 - DNA, 33 bp, Homo sapien
ttaattgctacctacaaagccttgtgtgtatcc

SEQ ID NO: 311112 - DNA, 33 bp, Homo sapien
ttaattgctacctacagagccttgtgtgtatcc

SEQ ID NO: 311113 - DNA, 33 bp, Homo sapien
agtacatggattgcaaaatcatcttgaccttag

SEQ ID NO: 311114 - DNA, 33 bp, Homo sapien
agtacatggattgcaacatcatcttgaccttag

SEQ ID NO: 311115 - DNA, 33 bp, Homo sapien
ttagtggggagatggaaagagaaaattcagatt

SEQ ID NO: 311116 - DNA, 33 bp, Homo sapien
ttagtggggagatggagagagaaaattcagatt

SEQ ID NO: 311117 - DNA, 33 bp, Homo sapien
tacctaactttgtgtaacaatctaaggtaacca

SEQ ID NO: 311118 - DNA, 33 bp, Homo sapien
tacctaactttgtgtagcaatctaaggtaacca

SEQ ID NO: 311119 - DNA, 33 bp, Homo sapien
atgaatcctcaggaagaaaactcaacattcact

SEQ ID NO: 311120 - DNA, 33 bp, Homo sapien
atgaatcctcaggaaggaaactcaacattcact

SEQ ID NO: 311121 - DNA, 33 bp, Homo sapien
atacacaaacaaatgacggtgaattaagcaaca

SEQ ID NO: 311122 - DNA, 33 bp, Homo sapien
atacacaaacaaatgatggtgaattaagcaaca

SEQ ID NO: 311123 - DNA, 33 bp, Homo sapien
tgggtacctaaatctcacattgcctaatgaagt

SEQ ID NO: 311124 - DNA, 33 bp, Homo sapien
tgggtacctaaatctcgcattgcctaatgaagt

SEQ ID NO: 311125 - DNA, 33 bp, Homo sapien
aaccattcatcgcccacgctttaacttttaggt

SEQ ID NO: 311126 - DNA, 33 bp, Homo sapien
aaccattcatcgcccatgctttaacttttaggt

SEQ ID NO: 311127 - DNA, 33 bp, Homo sapien
tcctcaaagagcatacaatacttccatcatatt

SEQ ID NO: 311128 - DNA, 33 bp, Homo sapien
tcctcaaagagcatacgatacttccatcatatt

SEQ ID NO: 311129 - DNA, 33 bp, Homo sapien
tttaaagagtggtcaaaaaatacagctgcaaaa

SEQ ID NO: 311130 - DNA, 33 bp, Homo sapien
tttaaagagtggtcaagaaatacagctgcaaaa

SEQ ID NO: 311131 - DNA, 33 bp, Homo sapien
tggctagtgtacagacaccataaaatctgataa

SEQ ID NO: 311132 - DNA, 33 bp, Homo sapien
tggctagtgtacagactccataaaatctgataa

SEQ ID NO: 311133 - DNA, 33 bp, Homo sapien
cctgtagtctgacccccgacattgaggagactg

SEQ ID NO: 311134 - DNA, 33 bp, Homo sapien
cctgtagtctgacccctgacattgaggagactg

SEQ ID NO: 311135 - DNA, 33 bp, Homo sapien
attatacttatcctcacctaatggcaactatgt

SEQ ID NO: 311136 - DNA, 33 bp, Homo sapien
attatacttatcctcatctaatggcaactatgt

SEQ ID NO: 311137 - DNA, 33 bp, Homo sapien
gtgaatcacccattaccctggatccttgagtat

SEQ ID NO: 311138 - DNA, 33 bp, Homo sapien
gtgaatcacccattactctggatccttgagtat

SEQ ID NO: 311139 - DNA, 33 bp, Homo sapien
tttagccattaacctacgcagtcgcctgtatcc

SEQ ID NO: 311140 - DNA, 33 bp, Homo sapien
tttagccattaacctatgcagtcgcctgtatcc

SEQ ID NO: 311141 - DNA, 33 bp, Homo sapien
ttttatattgactctacacacatttatcaattt

SEQ ID NO: 311142 - DNA, 33 bp, Homo sapien
ttttatattgactctatacacatttatcaattt

SEQ ID NO: 311143 - DNA, 33 bp, Homo sapien
tcctagtagctgtctacgtggacctgggtgaga

SEQ ID NO: 311144 - DNA, 33 bp, Homo sapien
tcctagtagctgtctaggtggacctgggtgaga

SEQ ID NO: 311145 - DNA, 33 bp, Homo sapien
tctacacctcctattcagaaccacattcctaaa

SEQ ID NO: 311146 - DNA, 33 bp, Homo sapien
tctacacctcctattccgaaccacattcctaaa

SEQ ID NO: 311147 - DNA, 33 bp, Homo sapien
ccccctgtctctgttgaaatcagtgatctctgt

SEQ ID NO: 311148 - DNA, 33 bp, Homo sapien
ccccctgtctctgttgtaatcagtgatctctgt

SEQ ID NO: 311149 - DNA, 33 bp, Homo sapien
aactgctacattgtggcacattggtgagactgt

SEQ ID NO: 311150 - DNA, 33 bp, Homo sapien
aactgctacattgtggtacattggtgagactgt

SEQ ID NO: 311151 - DNA, 33 bp, Homo sapien
ttcgaactttataagagagtggaagcaacatga

SEQ ID NO: 311152 - DNA, 33 bp, Homo sapien
ttcgaactttataagatagtggaagcaacatga

SEQ ID NO: 311153 - DNA, 33 bp, Homo sapien
caggcttagtgaggaacgtctgaaagctcagtg

SEQ ID NO: 311154 - DNA, 33 bp, Homo sapien
caggcttagtgaggaatgtctgaaagctcagtg

SEQ ID NO: 311155 - DNA, 33 bp, Homo sapien
agaaagggagataaatcataccaagagttgcct

SEQ ID NO: 311156 - DNA, 33 bp, Homo sapien
agaaagggagataaatgataccaagagttgcct

SEQ ID NO: 311157 - DNA, 33 bp, Homo sapien
agtcagtgaataaagaaagcagtattctaagca

SEQ ID NO: 311158 - DNA, 33 bp, Homo sapien
agtcagtgaataaagacagcagtattctaagca

SEQ ID NO: 311159 - DNA, 33 bp, Homo sapien
tatagaaaaattggtcagaaaatacagtttcca

SEQ ID NO: 311160 - DNA, 33 bp, Homo sapien
tatagaaaaattggtcggaaaatacagtttcca

SEQ ID NO: 311161 - DNA, 33 bp, Homo sapien
ctgtgacatgttaccgaatgatctttttagggc

SEQ ID NO: 311162 - DNA, 33 bp, Homo sapien
ctgtgacatgttaccggatgatctttttagggc

SEQ ID NO: 311163 - DNA, 33 bp, Homo sapien
ggctttcagacttctcaaaaacttgtcagtctc

SEQ ID NO: 311164 - DNA, 33 bp, Homo sapien
ggctttcagacttctcgaaaacttgtcagtctc

SEQ ID NO: 311165 - DNA, 33 bp, Homo sapien
gacaggcaaattccgaaaagtcagtgggagaag

SEQ ID NO: 311166 - DNA, 33 bp, Homo sapien
gacaggcaaattccgataagtcagtgggagaag

SEQ ID NO: 311167 - DNA, 33 bp, Homo sapien
gatccatcaagattgccgaatgtatcgatagtt

SEQ ID NO: 311168 - DNA, 33 bp, Homo sapien
gatccatcaagattgctgaatgtatcgatagtt

SEQ ID NO: 311169 - DNA, 33 bp, Homo sapien
agataatatccatggcagattcatagtagacgt

SEQ ID NO: 311170 - DNA, 33 bp, Homo sapien
agataatatccatggcggattcatagtagacgt

SEQ ID NO: 311171 - DNA, 33 bp, Homo sapien
ctgttaagtgctatagaaacacgaacatattga

SEQ ID NO: 311172 - DNA, 33 bp, Homo sapien
ctgttaagtgctataggaacacgaacatattga

SEQ ID NO: 311173 - DNA, 33 bp, Homo sapien
ttaagcttcagccaccagagagactcactgaca

SEQ ID NO: 311174 - DNA, 33 bp, Homo sapien
ttaagcttcagccaccggagagactcactgaca

SEQ ID NO: 311175 - DNA, 33 bp, Homo sapien
tgaaacatggctgtaccgaatagagacatcctg

SEQ ID NO: 311176 - DNA, 33 bp, Homo sapien
tgaaacatggctgtactgaatagagacatcctg

SEQ ID NO: 311177 - DNA, 33 bp, Homo sapien
tctgctttgcaaattcaacttggtcctcttgtt

SEQ ID NO: 311178 - DNA, 33 bp, Homo sapien
tctgctttgcaaattcgacttggtcctcttgtt

SEQ ID NO: 311179 - DNA, 33 bp, Homo sapien
agcaagttcaagccacaatggctctatgatacc

SEQ ID NO: 311180 - DNA, 33 bp, Homo sapien
agcaagttcaagccacgatggctctatgatacc

SEQ ID NO: 311181 - DNA, 33 bp, Homo sapien
taggcctgagagggacaccattataggacttaa

SEQ ID NO: 311182 - DNA, 33 bp, Homo sapien
taggcctgagagggacgccattataggacttaa

SEQ ID NO: 311183 - DNA, 33 bp, Homo sapien
tgagcgtttctccacaaatgatctcgggagtgg

SEQ ID NO: 311184 - DNA, 33 bp, Homo sapien
tgagcgtttctccacagatgatctcgggagtgg

SEQ ID NO: 311185 - DNA, 33 bp, Homo sapien
tttaaccatttttaatcaactacttacatccaa

SEQ ID NO: 311186 - DNA, 33 bp, Homo sapien
tttaaccatttttaatgaactacttacatccaa

SEQ ID NO: 311187 - DNA, 33 bp, Homo sapien
atatgttattggtgctcaagtatccggccaagt

SEQ ID NO: 311188 - DNA, 33 bp, Homo sapien
atatgttattggtgctgaagtatccggccaagt

SEQ ID NO: 311189 - DNA, 33 bp, Homo sapien
tttggctttagatgtccaggtaactaaggcaag

SEQ ID NO: 311190 - DNA, 33 bp, Homo sapien
tttggctttagatgtctaggtaactaaggcaag

SEQ ID NO: 311191 - DNA, 33 bp, Homo sapien
cagagatttttagagggatagctaaagaacatt

SEQ ID NO: 311192 - DNA, 33 bp, Homo sapien
cagagatttttagaggtatagctaaagaacatt

SEQ ID NO: 311193 - DNA, 33 bp, Homo sapien
tgtgtttccaaagaacaggctcatagtttttgt

SEQ ID NO: 311194 - DNA, 33 bp, Homo sapien
tgtgtttccaaagaaccggctcatagtttttgt

SEQ ID NO: 311195 - DNA, 33 bp, Homo sapien
acttgcaaatcaaatgcagtcttccgtctctca

SEQ ID NO: 311196 - DNA, 33 bp, Homo sapien
acttgcaaatcaaatgtagtcttccgtctctca

SEQ ID NO: 311197 - DNA, 33 bp, Homo sapien
agccatcaattcttaaatgtaaaaatctctaac

SEQ ID NO: 311198 - DNA, 33 bp, Homo sapien
agccatcaattcttaagtgtaaaaatctctaac

SEQ ID NO: 311199 - DNA, 33 bp, Homo sapien
caggatcactttaaagacggcagtgaatcccaa

SEQ ID NO: 311200 - DNA, 33 bp, Homo sapien
caggatcactttaaagtcggcagtgaatcccaa

SEQ ID NO: 311201 - DNA, 33 bp, Homo sapien
ctaaatcgttatcctcaagaaacctgtgatata

SEQ ID NO: 311202 - DNA, 33 bp, Homo sapien
ctaaatcgttatcctccagaaacctgtgatata

SEQ ID NO: 311203 - DNA, 33 bp, Homo sapien
ctccgctgatagagaacgcgggcagcctctgtc

SEQ ID NO: 311204 - DNA, 33 bp, Homo sapien
ctccgctgatagagaatgcgggcagcctctgtc

SEQ ID NO: 311205 - DNA, 33 bp, Homo sapien
atttgccagcctttaaacaaaagctcaatggac

SEQ ID NO: 311206 - DNA, 33 bp, Homo sapien
atttgccagcctttaagcaaaagctcaatggac

SEQ ID NO: 311207 - DNA, 33 bp, Homo sapien
caaatgaacagctttcaaaatgatcttggttaa

SEQ ID NO: 311208 - DNA, 33 bp, Homo sapien
caaatgaacagctttcgaaatgatcttggttaa

SEQ ID NO: 311209 - DNA, 33 bp, Homo sapien
tctgagtcctatctaacgcccccagtcatcgaa

SEQ ID NO: 311210 - DNA, 33 bp, Homo sapien
tctgagtcctatctaatgcccccagtcatcgaa

SEQ ID NO: 311211 - DNA, 33 bp, Homo sapien
aaagaaacttgccctcacccatctcaggaactt

SEQ ID NO: 311212 - DNA, 33 bp, Homo sapien
aaagaaacttgccctcgcccatctcaggaactt

SEQ ID NO: 311213 - DNA, 33 bp, Homo sapien
caaaatgtcctcctcacgtgtacaacaggttag

SEQ ID NO: 311214 - DNA, 33 bp, Homo sapien
caaaatgtcctcctcatgtgtacaacaggttag

SEQ ID NO: 311215 - DNA, 33 bp, Homo sapien
cctcacatcagcaggacataggaggggtactct

SEQ ID NO: 311216 - DNA, 33 bp, Homo sapien
cctcacatcagcaggagataggaggggtactct

SEQ ID NO: 311217 - DNA, 33 bp, Homo sapien
acaacctagcaacaaaacagttaaagcctgcag

SEQ ID NO: 311218 - DNA, 33 bp, Homo sapien
acaacctagcaacaaagcagttaaagcctgcag

SEQ ID NO: 311219 - DNA, 33 bp, Homo sapien
cactccatagctacagccctaaagcagtcttca

SEQ ID NO: 311220 - DNA, 33 bp, Homo sapien
cactccatagctacagtcctaaagcagtcttca

SEQ ID NO: 311221 - DNA, 33 bp, Homo sapien
gcccagagaaaaaagcacagaagacttagccct

SEQ ID NO: 311222 - DNA, 33 bp, Homo sapien
gcccagagaaaaaagcgcagaagacttagccct

SEQ ID NO: 311223 - DNA, 33 bp, Homo sapien
caattttttggatccacgctggacttcatgaca

SEQ ID NO: 311224 - DNA, 33 bp, Homo sapien
caattttttggatccatgctggacttcatgaca

SEQ ID NO: 311225 - DNA, 33 bp, Homo sapien
gagaaagcaacatgtacgaaccccatctgtgtg

SEQ ID NO: 311226 - DNA, 33 bp, Homo sapien
gagaaagcaacatgtatgaaccccatctgtgtg

SEQ ID NO: 311227 - DNA, 33 bp, Homo sapien
ggtcaagtatggaaataacctagatttttatgc

SEQ ID NO: 311228 - DNA, 33 bp, Homo sapien
ggtcaagtatggaaatgacctagatttttatgc

SEQ ID NO: 311229 - DNA, 33 bp, Homo sapien
aatggtgtttatttcaaagcacttcacatattt

SEQ ID NO: 311230 - DNA, 33 bp, Homo sapien
aatggtgtttatttcagagcacttcacatattt

SEQ ID NO: 311231 - DNA, 33 bp, Homo sapien
agtctttcctgataggcacagccggcagcttca

SEQ ID NO: 311232 - DNA, 33 bp, Homo sapien
agtctttcctgataggtacagccggcagcttca

SEQ ID NO: 311233 - DNA, 33 bp, Homo sapien
tataaacagtgtgcaaataatatcaaaggataa

SEQ ID NO: 311234 - DNA, 33 bp, Homo sapien
tataaacagtgtgcaagtaatatcaaaggataa

SEQ ID NO: 311235 - DNA, 33 bp, Homo sapien
gattgtgatcatttgacgctgaacggctcagaa

SEQ ID NO: 311236 - DNA, 33 bp, Homo sapien
gattgtgatcatttgatgctgaacggctcagaa

SEQ ID NO: 311237 - DNA, 33 bp, Homo sapien
gagatgatttgagtgcaactgctataaaatttt

SEQ ID NO: 311238 - DNA, 33 bp, Homo sapien
gagatgatttgagtgcgactgctataaaatttt

SEQ ID NO: 311239 - DNA, 33 bp, Homo sapien
tgtgtttactgacttaccacttcaaccccctgc

SEQ ID NO: 311240 - DNA, 33 bp, Homo sapien
tgtgtttactgacttatcacttcaaccccctgc

SEQ ID NO: 311241 - DNA, 33 bp, Homo sapien
aaggttaccctggacaatggaccctacggcaga

SEQ ID NO: 311242 - DNA, 33 bp, Homo sapien
aaggttaccctggacactggaccctacggcaga

SEQ ID NO: 311243 - DNA, 33 bp, Homo sapien
attaacaaggcagtgaagttaaagctacctatt

SEQ ID NO: 311244 - DNA, 33 bp, Homo sapien
attaacaaggcagtgaggttaaagctacctatt

SEQ ID NO: 311245 - DNA, 33 bp, Homo sapien
tcttttcatgttcttcaagtctaagaaccattt

SEQ ID NO: 311246 - DNA, 33 bp, Homo sapien
tcttttcatgttcttcgagtctaagaaccattt

SEQ ID NO: 311247 - DNA, 33 bp, Homo sapien
gcagcgtggccagcagcaggagttggctgaaat

SEQ ID NO: 311248 - DNA, 33 bp, Homo sapien
gcagcgtggccagcaggaggagttggctgaaat

SEQ ID NO: 311249 - DNA, 33 bp, Homo sapien
gaacataccctcagaaataatggctattaaatc

SEQ ID NO: 311250 - DNA, 33 bp, Homo sapien
gaacataccctcagaattaatggctattaaatc

SEQ ID NO: 311251 - DNA, 33 bp, Homo sapien
ttttctattcattaaagccccaaagcactatgt

SEQ ID NO: 311252 - DNA, 33 bp, Homo sapien
ttttctattcattaaatccccaaagcactatgt

SEQ ID NO: 311253 - DNA, 33 bp, Homo sapien
gtcagagaatcaaaagaccaatacattgattaa

SEQ ID NO: 311254 - DNA, 33 bp, Homo sapien
gtcagagaatcaaaaggccaatacattgattaa

SEQ ID NO: 311255 - DNA, 33 bp, Homo sapien
gtagagtatctattcaacagtcaattaaccgtt

SEQ ID NO: 311256 - DNA, 33 bp, Homo sapien
gtagagtatctattcagcagtcaattaaccgtt

SEQ ID NO: 311257 - DNA, 33 bp, Homo sapien
tgttgtttaaactgacactggaaggatgataag

SEQ ID NO: 311258 - DNA, 33 bp, Homo sapien
tgttgtttaaactgacgctggaaggatgataag

SEQ ID NO: 311259 - DNA, 33 bp, Homo sapien
tgtattattaagcttcacaactctctaacaggt

SEQ ID NO: 311260 - DNA, 33 bp, Homo sapien
tgtattattaagcttcgcaactctctaacaggt

SEQ ID NO: 311261 - DNA, 33 bp, Homo sapien
aaatagcccttctcacaatccaaaagattacag

SEQ ID NO: 311262 - DNA, 33 bp, Homo sapien
aaatagcccttctcaccatccaaaagattacag

SEQ ID NO: 311263 - DNA, 33 bp, Homo sapien
aggctgaagttcatagcaagtgataggttacat

SEQ ID NO: 311264 - DNA, 33 bp, Homo sapien
aggctgaagttcatagtaagtgataggttacat

SEQ ID NO: 311265 - DNA, 33 bp, Homo sapien
ctcacctatctcaaaacaaatcgttagcaagtt

SEQ ID NO: 311266 - DNA, 33 bp, Homo sapien
ctcacctatctcaaaataaatcgttagcaagtt

SEQ ID NO: 311267 - DNA, 33 bp, Homo sapien
tcagtaatgcctacaacgaagtcagggtttgga

SEQ ID NO: 311268 - DNA, 33 bp, Homo sapien
tcagtaatgcctacaatgaagtcagggtttgga

SEQ ID NO: 311269 - DNA, 33 bp, Homo sapien
ggaatttaaccatcacacttccctttagaggct

SEQ ID NO: 311270 - DNA, 33 bp, Homo sapien
ggaatttaaccatcacgcttccctttagaggct

SEQ ID NO: 311271 - DNA, 33 bp, Homo sapien
gagaagctacagcctacgtgggtgcagtagggt

SEQ ID NO: 311272 - DNA, 33 bp, Homo sapien
gagaagctacagcctatgtgggtgcagtagggt

SEQ ID NO: 311273 - DNA, 33 bp, Homo sapien
atcagagtcaggggaaagatgagggtatttatt

SEQ ID NO: 311274 - DNA, 33 bp, Homo sapien
atcagagtcaggggaaggatgagggtatttatt

SEQ ID NO: 311275 - DNA, 33 bp, Homo sapien
ctttgtgcctccatgaaagagataggatatgat

SEQ ID NO: 311276 - DNA, 33 bp, Homo sapien
ctttgtgcctccatgagagagataggatatgat

SEQ ID NO: 311277 - DNA, 33 bp, Homo sapien
aagtcttcttattagcaacatcaaccgtggtga

SEQ ID NO: 311278 - DNA, 33 bp, Homo sapien
aagtcttcttattagccacatcaaccgtggtga

SEQ ID NO: 311279 - DNA, 33 bp, Homo sapien
aagtctcctgtgcctacgtttgagttgtatcag

SEQ ID NO: 311280 - DNA, 33 bp, Homo sapien
aagtctcctgtgcctatgtttgagttgtatcag

SEQ ID NO: 311281 - DNA, 33 bp, Homo sapien
ttgactcatgtaattaagggagctggcaaggta

SEQ ID NO: 311282 - DNA, 33 bp, Homo sapien
ttgactcatgtaattatgggagctggcaaggta

SEQ ID NO: 311283 - DNA, 33 bp, Homo sapien
tgagcatcttttcacacggctgttggccactca

SEQ ID NO: 311284 - DNA, 33 bp, Homo sapien
tgagcatcttttcacatggctgttggccactca

SEQ ID NO: 311285 - DNA, 33 bp, Homo sapien
ctcattagctatctctaaaggaaatcacatcat

SEQ ID NO: 311286 - DNA, 33 bp, Homo sapien
ctcattagctatctcttaaggaaatcacatcat

SEQ ID NO: 311287 - DNA, 33 bp, Homo sapien
tagacgtgctgaatgtaaatataatgagcacgc

SEQ ID NO: 311288 - DNA, 33 bp, Homo sapien
tagacgtgctgaatgttaatataatgagcacgc

SEQ ID NO: 311289 - DNA, 33 bp, Homo sapien
tgtcctaaataaatgtaaacacactgaatgaag

SEQ ID NO: 311290 - DNA, 33 bp, Homo sapien
tgtcctaaataaatgtgaacacactgaatgaag

SEQ ID NO: 311291 - DNA, 33 bp, Homo sapien
aagcttttccatctccaagttaattttgaatta

SEQ ID NO: 311292 - DNA, 33 bp, Homo sapien
aagcttttccatctccgagttaattttgaatta

SEQ ID NO: 311293 - DNA, 33 bp, Homo sapien
tggctacgactgaggccacgttgcaagaacaga

SEQ ID NO: 311294 - DNA, 33 bp, Homo sapien
tggctacgactgaggctacgttgcaagaacaga

SEQ ID NO: 311295 - DNA, 33 bp, Homo sapien
gcatgaagaagtactgccaagtcatccatgtca

SEQ ID NO: 311296 - DNA, 33 bp, Homo sapien
gcatgaagaagtactggcaagtcatccatgtca

SEQ ID NO: 311297 - DNA, 33 bp, Homo sapien
aggtgccatagtgtggaaaaaagtaaagggtta

SEQ ID NO: 311298 - DNA, 33 bp, Homo sapien
aggtgccatagtgtgggaaaaagtaaagggtta

SEQ ID NO: 311299 - DNA, 33 bp, Homo sapien
cttccccctgcagaacaacttcaatctcacaga

SEQ ID NO: 311300 - DNA, 33 bp, Homo sapien
cttccccctgcagaaccacttcaatctcacaga

SEQ ID NO: 311301 - DNA, 33 bp, Homo sapien
gcctagactgacttcaaacgacccagttctagt

SEQ ID NO: 311302 - DNA, 33 bp, Homo sapien
gcctagactgacttcagacgacccagttctagt

SEQ ID NO: 311303 - DNA, 33 bp, Homo sapien
gttatgaatgtgttcacaaataactgtgattat

SEQ ID NO: 311304 - DNA, 33 bp, Homo sapien
gttatgaatgtgttcagaaataactgtgattat

SEQ ID NO: 311305 - DNA, 33 bp, Homo sapien
ttgagttaaacgtctccactgaagtacaggctg

SEQ ID NO: 311306 - DNA, 33 bp, Homo sapien
ttgagttaaacgtctctactgaagtacaggctg

SEQ ID NO: 311307 - DNA, 33 bp, Homo sapien
attgtctgtctccccaagctagaaaggaagctc

SEQ ID NO: 311308 - DNA, 33 bp, Homo sapien
attgtctgtctccccacgctagaaaggaagctc

SEQ ID NO: 311309 - DNA, 33 bp, Homo sapien
aattgtctcctcaagccccgtcaagatttgaag

SEQ ID NO: 311310 - DNA, 33 bp, Homo sapien
aattgtctcctcaagctccgtcaagatttgaag

SEQ ID NO: 311311 - DNA, 33 bp, Homo sapien
aaattctgagagacaaaagtggtcgtgtttccc

SEQ ID NO: 311312 - DNA, 33 bp, Homo sapien
aaattctgagagacaagagtggtcgtgtttccc

SEQ ID NO: 311313 - DNA, 33 bp, Homo sapien
atatgactctagcctaataaacctcatgactcc

SEQ ID NO: 311314 - DNA, 33 bp, Homo sapien
atatgactctagcctagtaaacctcatgactcc

SEQ ID NO: 311315 - DNA, 33 bp, Homo sapien
acatcttctgccagggaactgcctgtagttgtc

SEQ ID NO: 311316 - DNA, 33 bp, Homo sapien
acatcttctgccagggtactgcctgtagttgtc

SEQ ID NO: 311317 - DNA, 33 bp, Homo sapien
actctgaagtggaaaacggaaaaactacagtaa

SEQ ID NO: 311318 - DNA, 33 bp, Homo sapien
actctgaagtggaaaatggaaaaactacagtaa

SEQ ID NO: 311319 - DNA, 33 bp, Homo sapien
gatgccattaacatttaaaagagagagaaagtt

SEQ ID NO: 311320 - DNA, 33 bp, Homo sapien
gatgccattaacatttgaaagagagagaaagtt

SEQ ID NO: 311321 - DNA, 33 bp, Homo sapien
aagttgtggagtaacaaaaacaatatttccgaa

SEQ ID NO: 311322 - DNA, 33 bp, Homo sapien
aagttgtggagtaacagaaacaatatttccgaa

SEQ ID NO: 311323 - DNA, 33 bp, Homo sapien
ccctggaatctggaacgaagatcaagccttttg

SEQ ID NO: 311324 - DNA, 33 bp, Homo sapien
ccctggaatctggaactaagatcaagccttttg

SEQ ID NO: 311325 - DNA, 33 bp, Homo sapien
aaccgaatatgtaaaaagagcttgtagaaatgc

SEQ ID NO: 311326 - DNA, 33 bp, Homo sapien
aaccgaatatgtaaaacgagcttgtagaaatgc

SEQ ID NO: 311327 - DNA, 33 bp, Homo sapien
tcttcctgtcctattacaccttctaaagattct

SEQ ID NO: 311328 - DNA, 33 bp, Homo sapien
tcttcctgtcctattataccttctaaagattct

SEQ ID NO: 311329 - DNA, 33 bp, Homo sapien
tttcaactctatagccaaatttattatgcccaa

SEQ ID NO: 311330 - DNA, 33 bp, Homo sapien
tttcaactctatagccgaatttattatgcccaa

SEQ ID NO: 311331 - DNA, 33 bp, Homo sapien
ctcctgggttacgtcaagcctcaaagttaaaag

SEQ ID NO: 311332 - DNA, 33 bp, Homo sapien
ctcctgggttacgtcaggcctcaaagttaaaag

SEQ ID NO: 311333 - DNA, 33 bp, Homo sapien
caagccatgtaacctccctggtcttcagtttcc

SEQ ID NO: 311334 - DNA, 33 bp, Homo sapien
caagccatgtaacctctctggtcttcagtttcc

SEQ ID NO: 311335 - DNA, 33 bp, Homo sapien
ccatcgcctggatcccggaatgacttcgatggg

SEQ ID NO: 311336 - DNA, 33 bp, Homo sapien
ccatcgcctggatccctgaatgacttcgatggg

SEQ ID NO: 311337 - DNA, 33 bp, Homo sapien
tctgctagatgcaagaacattttaaaagggtag

SEQ ID NO: 311338 - DNA, 33 bp, Homo sapien
tctgctagatgcaagaccattttaaaagggtag

SEQ ID NO: 311339 - DNA, 33 bp, Homo sapien
cagctatctgtgttgacctagagttaagtgctt

SEQ ID NO: 311340 - DNA, 33 bp, Homo sapien
cagctatctgtgttgagctagagttaagtgctt

SEQ ID NO: 311341 - DNA, 33 bp, Homo sapien
caggctgtcacttcggccatcatgtttacagct

SEQ ID NO: 311342 - DNA, 33 bp, Homo sapien
caggctgtcacttcggtcatcatgtttacagct

SEQ ID NO: 311343 - DNA, 33 bp, Homo sapien
ctggggaacattgaaggcgtcatcaaagtccta

SEQ ID NO: 311344 - DNA, 33 bp, Homo sapien
ctggggaacattgaagtcgtcatcaaagtccta

SEQ ID NO: 311345 - DNA, 33 bp, Homo sapien
ttctatcttttaaacaacagactatttctcatc

SEQ ID NO: 311346 - DNA, 33 bp, Homo sapien
ttctatcttttaaacagcagactatttctcatc

SEQ ID NO: 311347 - DNA, 33 bp, Homo sapien
agatacattcattaacaaacaagacgaaaaccc

SEQ ID NO: 311348 - DNA, 33 bp, Homo sapien
agatacattcattaacgaacaagacgaaaaccc

SEQ ID NO: 311349 - DNA, 33 bp, Homo sapien
acttccatatggcaagaaaaagagtgaatcgtt

SEQ ID NO: 311350 - DNA, 33 bp, Homo sapien
acttccatatggcaaggaaaagagtgaatcgtt

SEQ ID NO: 311351 - DNA, 33 bp, Homo sapien
accttttcaaaactgacattaaagcactttgaa

SEQ ID NO: 311352 - DNA, 33 bp, Homo sapien
accttttcaaaactgatattaaagcactttgaa

SEQ ID NO: 311353 - DNA, 33 bp, Homo sapien
ctcttaacagaacgcagtcaccattaaagttta

SEQ ID NO: 311354 - DNA, 33 bp, Homo sapien
ctcttaacagaacgcattcaccattaaagttta

SEQ ID NO: 311355 - DNA, 33 bp, Homo sapien
tgctggacaaaattgcagagcaggtgtttctgt

SEQ ID NO: 311356 - DNA, 33 bp, Homo sapien
tgctggacaaaattgcggagcaggtgtttctgt

SEQ ID NO: 311357 - DNA, 33 bp, Homo sapien
atataatatgcttgaaacatcctcaaatcatcc

SEQ ID NO: 311358 - DNA, 33 bp, Homo sapien
atataatatgcttgaatcatcctcaaatcatcc

SEQ ID NO: 311359 - DNA, 33 bp, Homo sapien
caacctttgtgccttacatttttcatccattaa

SEQ ID NO: 311360 - DNA, 33 bp, Homo sapien
caacctttgtgccttagatttttcatccattaa

SEQ ID NO: 311361 - DNA, 33 bp, Homo sapien
ttcccttattctgcgacatgaccattagtacag

SEQ ID NO: 311362 - DNA, 33 bp, Homo sapien
ttcccttattctgcgatatgaccattagtacag

SEQ ID NO: 311363 - DNA, 33 bp, Homo sapien
atcaccgaaaatgtcacgttgtaaactctttct

SEQ ID NO: 311364 - DNA, 33 bp, Homo sapien
atcaccgaaaatgtcaggttgtaaactctttct

SEQ ID NO: 311365 - DNA, 33 bp, Homo sapien
cccagcatctgaaatcactgttgttgctagacc

SEQ ID NO: 311366 - DNA, 33 bp, Homo sapien
cccagcatctgaaatcgctgttgttgctagacc

SEQ ID NO: 311367 - DNA, 33 bp, Homo sapien
acctgtggagtacttaaaatcacactcactaca

SEQ ID NO: 311368 - DNA, 33 bp, Homo sapien
acctgtggagtacttagaatcacactcactaca

SEQ ID NO: 311369 - DNA, 33 bp, Homo sapien
agtgggtaaaagagatcaacgtttactgcatgt

SEQ ID NO: 311370 - DNA, 33 bp, Homo sapien
agtgggtaaaagagatgaacgtttactgcatgt

SEQ ID NO: 311371 - DNA, 33 bp, Homo sapien
tacccaaagctagacaatggtatccaggacata

SEQ ID NO: 311372 - DNA, 33 bp, Homo sapien
tacccaaagctagacagtggtatccaggacata

SEQ ID NO: 311373 - DNA, 33 bp, Homo sapien
gaattgtttcttcacaatgcaacagtgtggtcc

SEQ ID NO: 311374 - DNA, 33 bp, Homo sapien
gaattgtttcttcacattgcaacagtgtggtcc

SEQ ID NO: 311375 - DNA, 33 bp, Homo sapien
agtacatcaagtaaaacgtttgaccttgataga

SEQ ID NO: 311376 - DNA, 33 bp, Homo sapien
agtacatcaagtaaaaggtttgaccttgataga

SEQ ID NO: 311377 - DNA, 33 bp, Homo sapien
acagaacttgagtgtgaaaaccacagaatggtt

SEQ ID NO: 311378 - DNA, 33 bp, Homo sapien
acagaacttgagtgtgcaaaccacagaatggtt

SEQ ID NO: 311379 - DNA, 33 bp, Homo sapien
tggaaaagcacttccccgaggcctacagagtgg

SEQ ID NO: 311380 - DNA, 33 bp, Homo sapien
tggaaaagcacttccctgaggcctacagagtgg

SEQ ID NO: 311381 - DNA, 33 bp, Homo sapien
ggacgggtggattcaaactgccctctccaactt

SEQ ID NO: 311382 - DNA, 33 bp, Homo sapien
ggacgggtggattcaagctgccctctccaactt

SEQ ID NO: 311383 - DNA, 33 bp, Homo sapien
aaggaaatgctttccacgtgtataacattctga

SEQ ID NO: 311384 - DNA, 33 bp, Homo sapien
aaggaaatgctttccatgtgtataacattctga

SEQ ID NO: 311385 - DNA, 33 bp, Homo sapien
aagaattgaatgagaacacatatgaaaattact

SEQ ID NO: 311386 - DNA, 33 bp, Homo sapien
aagaattgaatgagaatacatatgaaaattact

SEQ ID NO: 311387 - DNA, 33 bp, Homo sapien
agagtttcagttttaaatatggtggccagaatg

SEQ ID NO: 311388 - DNA, 33 bp, Homo sapien
agagtttcagttttaagtatggtggccagaatg

SEQ ID NO: 311389 - DNA, 33 bp, Homo sapien
agagtttagggagtaagcctttccttacttaga

SEQ ID NO: 311390 - DNA, 33 bp, Homo sapien
agagtttagggagtaatcctttccttacttaga

SEQ ID NO: 311391 - DNA, 33 bp, Homo sapien
tgactggaacaaaacaacagccatacttacctt

SEQ ID NO: 311392 - DNA, 33 bp, Homo sapien
tgactggaacaaaacagcagccatacttacctt

SEQ ID NO: 311393 - DNA, 33 bp, Homo sapien
aatgaatgccttgtaaatgccaacagtggaatt

SEQ ID NO: 311394 - DNA, 33 bp, Homo sapien
aatgaatgccttgtaattgccaacagtggaatt

SEQ ID NO: 311395 - DNA, 33 bp, Homo sapien
actggctttctctgctaacacatgaccttacag

SEQ ID NO: 311396 - DNA, 33 bp, Homo sapien
actggctttctctgcttacacatgaccttacag

SEQ ID NO: 311397 - DNA, 33 bp, Homo sapien
ggattagacaaaagacaaaaaacagttccatat

SEQ ID NO: 311398 - DNA, 33 bp, Homo sapien
ggattagacaaaagacgaaaaacagttccatat

SEQ ID NO: 311399 - DNA, 33 bp, Homo sapien
tctagatatgacactaatacctacaacactggt

SEQ ID NO: 311400 - DNA, 33 bp, Homo sapien
tctagatatgacactagtacctacaacactggt

SEQ ID NO: 311401 - DNA, 33 bp, Homo sapien
attgacaatagtgaggcatgcatatttaagtat

SEQ ID NO: 311402 - DNA, 33 bp, Homo sapien
attgacaatagtgaggtatgcatatttaagtat

SEQ ID NO: 311403 - DNA, 33 bp, Homo sapien
ttgaagtctggagatcaaatgttattcctgttt

SEQ ID NO: 311404 - DNA, 33 bp, Homo sapien
ttgaagtctggagatcgaatgttattcctgttt

SEQ ID NO: 311405 - DNA, 33 bp, Homo sapien
tctacagacctcaaaagttattgcccatgctgt

SEQ ID NO: 311406 - DNA, 33 bp, Homo sapien
tctacagacctcaaaatttattgcccatgctgt

SEQ ID NO: 311407 - DNA, 33 bp, Homo sapien
tttaatcactgtgcctcaaggatattactctat

SEQ ID NO: 311408 - DNA, 33 bp, Homo sapien
tttaatcactgtgccttaaggatattactctat

SEQ ID NO: 311409 - DNA, 33 bp, Homo sapien
cctgcaattttgcaacaatccttctttccctta

SEQ ID NO: 311410 - DNA, 33 bp, Homo sapien
cctgcaattttgcaactatccttctttccctta

SEQ ID NO: 311411 - DNA, 33 bp, Homo sapien
tatcataagaactaaaggagctattatttataa

SEQ ID NO: 311412 - DNA, 33 bp, Homo sapien
tatcataagaactaaatgagctattatttataa

SEQ ID NO: 311413 - DNA, 33 bp, Homo sapien
tgaagccaacccaccaatgaagagtgaacctgc

SEQ ID NO: 311414 - DNA, 33 bp, Homo sapien
tgaagccaacccaccattgaagagtgaacctgc

SEQ ID NO: 311415 - DNA, 33 bp, Homo sapien
gtggactttgctaaagcagtttcatcccaatgt

SEQ ID NO: 311416 - DNA, 33 bp, Homo sapien
gtggactttgctaaagtagtttcatcccaatgt

SEQ ID NO: 311417 - DNA, 33 bp, Homo sapien
aatgcagtactctgtgaaagcacttagcgtagc

SEQ ID NO: 311418 - DNA, 33 bp, Homo sapien
aatgcagtactctgtgcaagcacttagcgtagc

SEQ ID NO: 311419 - DNA, 33 bp, Homo sapien
catttgcccttatggaaatatcttcttttactt

SEQ ID NO: 311420 - DNA, 33 bp, Homo sapien
catttgcccttatggagatatcttcttttactt

SEQ ID NO: 311421 - DNA, 33 bp, Homo sapien
taagaatttgttgaaaaaatatataatgataag

SEQ ID NO: 311422 - DNA, 33 bp, Homo sapien
taagaatttgttgaaataatatataatgataag

SEQ ID NO: 311423 - DNA, 33 bp, Homo sapien
ctgagaacttctctccacagatagacctgagga

SEQ ID NO: 311424 - DNA, 33 bp, Homo sapien
ctgagaacttctctccgcagatagacctgagga

SEQ ID NO: 311425 - DNA, 33 bp, Homo sapien
gatggctgccagagcacgagggaagaagaatta

SEQ ID NO: 311426 - DNA, 33 bp, Homo sapien
gatggctgccagagcatgagggaagaagaatta

SEQ ID NO: 311427 - DNA, 33 bp, Homo sapien
ccttgtgatcggtgaaatcactatttacccttg

SEQ ID NO: 311428 - DNA, 33 bp, Homo sapien
ccttgtgatcggtgaactcactatttacccttg

SEQ ID NO: 311429 - DNA, 33 bp, Homo sapien
tcctgctaggaagcagaaataccatacaaagaa

SEQ ID NO: 311430 - DNA, 33 bp, Homo sapien
tcctgctaggaagcaggaataccatacaaagaa

SEQ ID NO: 311431 - DNA, 33 bp, Homo sapien
tagccccattttcctacgtccagaatgtcatag

SEQ ID NO: 311432 - DNA, 33 bp, Homo sapien
tagccccattttcctatgtccagaatgtcatag

SEQ ID NO: 311433 - DNA, 33 bp, Homo sapien
ccttcaacctcaatgacgaaatttaaaatgcta

SEQ ID NO: 311434 - DNA, 33 bp, Homo sapien
ccttcaacctcaatgatgaaatttaaaatgcta

SEQ ID NO: 311435 - DNA, 33 bp, Homo sapien
cttttctagtacctgccatgaaagacaacacac

SEQ ID NO: 311436 - DNA, 33 bp, Homo sapien
cttttctagtacctgctatgaaagacaacacac

SEQ ID NO: 311437 - DNA, 33 bp, Homo sapien
ctttcaaggtgaccagaataaaaagagagagtg

SEQ ID NO: 311438 - DNA, 33 bp, Homo sapien
ctttcaaggtgaccaggataaaaagagagagtg

SEQ ID NO: 311439 - DNA, 33 bp, Homo sapien
tccagaagtctttagacaaatgatacttacatt

SEQ ID NO: 311440 - DNA, 33 bp, Homo sapien
tccagaagtctttagataaatgatacttacatt

SEQ ID NO: 311441 - DNA, 33 bp, Homo sapien
ttaaagaccccaaaaccacttccctcgcagctt

SEQ ID NO: 311442 - DNA, 33 bp, Homo sapien
ttaaagaccccaaaactacttccctcgcagctt

SEQ ID NO: 311443 - DNA, 33 bp, Homo sapien
tcatagtcattcttgaactagggagtggtcatt

SEQ ID NO: 311444 - DNA, 33 bp, Homo sapien
tcatagtcattcttgagctagggagtggtcatt

SEQ ID NO: 311445 - DNA, 33 bp, Homo sapien
ttattgtgtgtaaaaacgataaaacatgctgtt

SEQ ID NO: 311446 - DNA, 33 bp, Homo sapien
ttattgtgtgtaaaaatgataaaacatgctgtt

SEQ ID NO: 311447 - DNA, 33 bp, Homo sapien
gcaggaactcacagccaagtgtactatttctgc

SEQ ID NO: 311448 - DNA, 33 bp, Homo sapien
gcaggaactcacagcctagtgtactatttctgc

SEQ ID NO: 311449 - DNA, 33 bp, Homo sapien
catgggcatggcttccaaagagagacagagggc

SEQ ID NO: 311450 - DNA, 33 bp, Homo sapien
catgggcatggcttccgaagagagacagagggc

SEQ ID NO: 311451 - DNA, 33 bp, Homo sapien
ttgcctttccatcatcagagctcaattttgaat

SEQ ID NO: 311452 - DNA, 33 bp, Homo sapien
ttgcctttccatcatcggagctcaattttgaat

SEQ ID NO: 311453 - DNA, 33 bp, Homo sapien
cccataataaaactcacgagaagcttaatgaga

SEQ ID NO: 311454 - DNA, 33 bp, Homo sapien
cccataataaaactcatgagaagcttaatgaga

SEQ ID NO: 311455 - DNA, 33 bp, Homo sapien
aacaaggtgaccaatacagcataatgtaaagga

SEQ ID NO: 311456 - DNA, 33 bp, Homo sapien
aacaaggtgaccaatagagcataatgtaaagga

SEQ ID NO: 311457 - DNA, 33 bp, Homo sapien
acattactaaatacacagccaaaaatccatgcc

SEQ ID NO: 311458 - DNA, 33 bp, Homo sapien
acattactaaatacacggccaaaaatccatgcc

SEQ ID NO: 311459 - DNA, 33 bp, Homo sapien
agagactgaaagcttaagccaagaacacatcgc

SEQ ID NO: 311460 - DNA, 33 bp, Homo sapien
agagactgaaagcttaggccaagaacacatcgc

SEQ ID NO: 311461 - DNA, 33 bp, Homo sapien
tctcctcctcctgctactagaccccatctgcct

SEQ ID NO: 311462 - DNA, 33 bp, Homo sapien
tctcctcctcctgctattagaccccatctgcct

SEQ ID NO: 311463 - DNA, 33 bp, Homo sapien
acctggccttcatttacatcttaaagcaactta

SEQ ID NO: 311464 - DNA, 33 bp, Homo sapien
acctggccttcatttatatcttaaagcaactta

SEQ ID NO: 311465 - DNA, 33 bp, Homo sapien
caaggatgtctcttacaaaccactgcttcatct

SEQ ID NO: 311466 - DNA, 33 bp, Homo sapien
caaggatgtctcttacgaaccactgcttcatct

SEQ ID NO: 311467 - DNA, 33 bp, Homo sapien
aaattgatgaaaagataacaagatataccaaga

SEQ ID NO: 311468 - DNA, 33 bp, Homo sapien
aaattgatgaaaagatgacaagatataccaaga

SEQ ID NO: 311469 - DNA, 33 bp, Homo sapien
attgattcatgcattcactcactcagcagagtt

SEQ ID NO: 311470 - DNA, 33 bp, Homo sapien
attgattcatgcattcgctcactcagcagagtt

SEQ ID NO: 311471 - DNA, 33 bp, Homo sapien
gatttaccttacatacaggaaaacatgtctcct

SEQ ID NO: 311472 - DNA, 33 bp, Homo sapien
gatttaccttacatacgggaaaacatgtctcct

SEQ ID NO: 311473 - DNA, 33 bp, Homo sapien
agaagtaaagacatccggaacgttctctaggag

SEQ ID NO: 311474 - DNA, 33 bp, Homo sapien
agaagtaaagacatcctgaacgttctctaggag

SEQ ID NO: 311475 - DNA, 33 bp, Homo sapien
taacacacaagagaaaaaaaatgcaacagctca

SEQ ID NO: 311476 - DNA, 33 bp, Homo sapien
taacacacaagagaaacaaaatgcaacagctca

SEQ ID NO: 311477 - DNA, 33 bp, Homo sapien
ctgttcagcagctccaagctataggagattcac

SEQ ID NO: 311478 - DNA, 33 bp, Homo sapien
ctgttcagcagctccatgctataggagattcac

SEQ ID NO: 311479 - DNA, 33 bp, Homo sapien
gagagagaaaggagaaatgagactaccatttcc

SEQ ID NO: 311480 - DNA, 33 bp, Homo sapien
gagagagaaaggagaagtgagactaccatttcc

SEQ ID NO: 311481 - DNA, 33 bp, Homo sapien
ccacagaaagccaaaaacactgagatcagcacc

SEQ ID NO: 311482 - DNA, 33 bp, Homo sapien
ccacagaaagccaaaagcactgagatcagcacc

SEQ ID NO: 311483 - DNA, 33 bp, Homo sapien
ccagaaaaatagcaataaataatgtcatgaagc

SEQ ID NO: 311484 - DNA, 33 bp, Homo sapien
ccagaaaaatagcaatgaataatgtcatgaagc

SEQ ID NO: 311485 - DNA, 33 bp, Homo sapien
catagagatttcaggaagccacaaagggtagtg

SEQ ID NO: 311486 - DNA, 33 bp, Homo sapien
catagagatttcaggaggccacaaagggtagtg

SEQ ID NO: 311487 - DNA, 33 bp, Homo sapien
gccaagttatccaggcaacaggacaagaccgta

SEQ ID NO: 311488 - DNA, 33 bp, Homo sapien
gccaagttatccaggcgacaggacaagaccgta

SEQ ID NO: 311489 - DNA, 33 bp, Homo sapien
tcatctctctatcccccgaaacaaacatttgag

SEQ ID NO: 311490 - DNA, 33 bp, Homo sapien
tcatctctctatcccctgaaacaaacatttgag

SEQ ID NO: 311491 - DNA, 33 bp, Homo sapien
atcttctaggattgacaggccattaatccttaa

SEQ ID NO: 311492 - DNA, 33 bp, Homo sapien
atcttctaggattgactggccattaatccttaa

SEQ ID NO: 311493 - DNA, 33 bp, Homo sapien
ctcttggctatattcacaagtcattgtcctgcc

SEQ ID NO: 311494 - DNA, 33 bp, Homo sapien
ctcttggctatattcataagtcattgtcctgcc

SEQ ID NO: 311495 - DNA, 33 bp, Homo sapien
tatctgttttacaccaatgaaaagtagatgcca

SEQ ID NO: 311496 - DNA, 33 bp, Homo sapien
tatctgttttacaccagtgaaaagtagatgcca

SEQ ID NO: 311497 - DNA, 33 bp, Homo sapien
tttttctgccttaaaaatgctggcaggaaaaaa

SEQ ID NO: 311498 - DNA, 33 bp, Homo sapien
tttttctgccttaaaagtgctggcaggaaaaaa

SEQ ID NO: 311499 - DNA, 33 bp, Homo sapien
taacctgctttcctcaaatttgtattcctttcc

SEQ ID NO: 311500 - DNA, 33 bp, Homo sapien
taacctgctttcctcacatttgtattcctttcc

SEQ ID NO: 311501 - DNA, 33 bp, Homo sapien
taagcatctgagtccccatccagtccatgaggt

SEQ ID NO: 311502 - DNA, 33 bp, Homo sapien
taagcatctgagtcccgatccagtccatgaggt

SEQ ID NO: 311503 - DNA, 33 bp, Homo sapien
agtgtagcagtcagtagataatgcttctgttaa

SEQ ID NO: 311504 - DNA, 33 bp, Homo sapien
agtgtagcagtcagtatataatgcttctgttaa

SEQ ID NO: 311505 - DNA, 33 bp, Homo sapien
tcaagttcgataaaaacggactgtctgaaattc

SEQ ID NO: 311506 - DNA, 33 bp, Homo sapien
tcaagttcgataaaaatggactgtctgaaattc

SEQ ID NO: 311507 - DNA, 33 bp, Homo sapien
gtgaccggagtgatacagaagagaagtgatgtt

SEQ ID NO: 311508 - DNA, 33 bp, Homo sapien
gtgaccggagtgatacggaagagaagtgatgtt

SEQ ID NO: 311509 - DNA, 33 bp, Homo sapien
atatgagtaaaaccaactgatcacatgacaaga

SEQ ID NO: 311510 - DNA, 33 bp, Homo sapien
atatgagtaaaaccaattgatcacatgacaaga

SEQ ID NO: 311511 - DNA, 33 bp, Homo sapien
actgcatgactgtagacgagaagtgggagtgga

SEQ ID NO: 311512 - DNA, 33 bp, Homo sapien
actgcatgactgtagatgagaagtgggagtgga

SEQ ID NO: 311513 - DNA, 33 bp, Homo sapien
ggtgtcatcggccacactcctgaagaagagaga

SEQ ID NO: 311514 - DNA, 33 bp, Homo sapien
ggtgtcatcggccacattcctgaagaagagaga

SEQ ID NO: 311515 - DNA, 33 bp, Homo sapien
gatcagtggttctgaacgagggatgatcagtgt

SEQ ID NO: 311516 - DNA, 33 bp, Homo sapien
gatcagtggttctgaatgagggatgatcagtgt

SEQ ID NO: 311517 - DNA, 33 bp, Homo sapien
agcttatttaaaggtacgctgacgaagcccgca

SEQ ID NO: 311518 - DNA, 33 bp, Homo sapien
agcttatttaaaggtatgctgacgaagcccgca

SEQ ID NO: 311519 - DNA, 33 bp, Homo sapien
aagggatgctaagcagaaaggatagtaataata

SEQ ID NO: 311520 - DNA, 33 bp, Homo sapien
aagggatgctaagcaggaaggatagtaataata

SEQ ID NO: 311521 - DNA, 33 bp, Homo sapien
accacctcacagtaaacgttgctagaaagactg

SEQ ID NO: 311522 - DNA, 33 bp, Homo sapien
accacctcacagtaaaggttgctagaaagactg

SEQ ID NO: 311523 - DNA, 33 bp, Homo sapien
ctgcagtctgtgtagaaaataaccatctgcctc

SEQ ID NO: 311524 - DNA, 33 bp, Homo sapien
ctgcagtctgtgtagagaataaccatctgcctc

SEQ ID NO: 311525 - DNA, 33 bp, Homo sapien
cttggcttccctagacaatgatatctgagagcc

SEQ ID NO: 311526 - DNA, 33 bp, Homo sapien
cttggcttccctagacgatgatatctgagagcc

SEQ ID NO: 311527 - DNA, 33 bp, Homo sapien
gcctgccaaagaagcacgaagttatgagctagt

SEQ ID NO: 311528 - DNA, 33 bp, Homo sapien
gcctgccaaagaagcatgaagttatgagctagt

SEQ ID NO: 311529 - DNA, 33 bp, Homo sapien
cagggacatttactaacctgctgatggccatgc

SEQ ID NO: 311530 - DNA, 33 bp, Homo sapien
cagggacatttactaatctgctgatggccatgc

SEQ ID NO: 311531 - DNA, 33 bp, Homo sapien
tggggctacaatttgaactatgaattattctgt

SEQ ID NO: 311532 - DNA, 33 bp, Homo sapien
tggggctacaatttgagctatgaattattctgt

SEQ ID NO: 311533 - DNA, 33 bp, Homo sapien
ttcacttagaataacaaagttgagttaggacag

SEQ ID NO: 311534 - DNA, 33 bp, Homo sapien
ttcacttagaataacatagttgagttaggacag

SEQ ID NO: 311535 - DNA, 33 bp, Homo sapien
ctgatgtcaagcaagactattgaagagtgtagt

SEQ ID NO: 311536 - DNA, 33 bp, Homo sapien
ctgatgtcaagcaagagtattgaagagtgtagt

SEQ ID NO: 311537 - DNA, 33 bp, Homo sapien
tctgctcattattgtacaccactagcaaaatta

SEQ ID NO: 311538 - DNA, 33 bp, Homo sapien
tctgctcattattgtataccactagcaaaatta

SEQ ID NO: 311539 - DNA, 33 bp, Homo sapien
aaattctagaggcagcaaattcatttatggtag

SEQ ID NO: 311540 - DNA, 33 bp, Homo sapien
aaattctagaggcagcgaattcatttatggtag

SEQ ID NO: 311541 - DNA, 33 bp, Homo sapien
ctaaagagtttctgtacgacaaaagtatcatca

SEQ ID NO: 311542 - DNA, 33 bp, Homo sapien
ctaaagagtttctgtaggacaaaagtatcatca

SEQ ID NO: 311543 - DNA, 33 bp, Homo sapien
ctatggttaaacattacgtatttggaactcagg

SEQ ID NO: 311544 - DNA, 33 bp, Homo sapien
ctatggttaaacattatgtatttggaactcagg

SEQ ID NO: 311545 - DNA, 33 bp, Homo sapien
aaggcattttcaaagaagcaccaactattttca

SEQ ID NO: 311546 - DNA, 33 bp, Homo sapien
aaggcattttcaaagacgcaccaactattttca

SEQ ID NO: 311547 - DNA, 33 bp, Homo sapien
gtataagtacactctacgatgttgacacaatga

SEQ ID NO: 311548 - DNA, 33 bp, Homo sapien
gtataagtacactctatgatgttgacacaatga

SEQ ID NO: 311549 - DNA, 33 bp, Homo sapien
gcaattctagtgcatacacagttattattacaa

SEQ ID NO: 311550 - DNA, 33 bp, Homo sapien
gcaattctagtgcatatacagttattattacaa

SEQ ID NO: 311551 - DNA, 33 bp, Homo sapien
tctgtgtccatctatgcaaaaaatttaaggcag

SEQ ID NO: 311552 - DNA, 33 bp, Homo sapien
tctgtgtccatctatgtaaaaaatttaaggcag

SEQ ID NO: 311553 - DNA, 33 bp, Homo sapien
ttcttacttaaaattaaaaacagacacagtaca

SEQ ID NO: 311554 - DNA, 33 bp, Homo sapien
ttcttacttaaaattagaaacagacacagtaca

SEQ ID NO: 311555 - DNA, 33 bp, Homo sapien
ccttcagtgccagaacaaaactgggtaagtact

SEQ ID NO: 311556 - DNA, 33 bp, Homo sapien
ccttcagtgccagaaccaaactgggtaagtact

SEQ ID NO: 311557 - DNA, 33 bp, Homo sapien
taatagccattttaaccggactgagatgatgtc

SEQ ID NO: 311558 - DNA, 33 bp, Homo sapien
taatagccattttaactggactgagatgatgtc

SEQ ID NO: 311559 - DNA, 33 bp, Homo sapien
ggaataccataatggcagataaggcattccatg

SEQ ID NO: 311560 - DNA, 33 bp, Homo sapien
ggaataccataatggcggataaggcattccatg

SEQ ID NO: 311561 - DNA, 33 bp, Homo sapien
tagaatgaaagaaaaaggctctggcaaaagaaa

SEQ ID NO: 311562 - DNA, 33 bp, Homo sapien
tagaatgaaagaaaaatgctctggcaaaagaaa

SEQ ID NO: 311563 - DNA, 33 bp, Homo sapien
attgagcttgctgtccacattcctaggctataa

SEQ ID NO: 311564 - DNA, 33 bp, Homo sapien
attgagcttgctgtccgcattcctaggctataa

SEQ ID NO: 311565 - DNA, 33 bp, Homo sapien
ggtttgaattgagggacgacatggctgaataga

SEQ ID NO: 311566 - DNA, 33 bp, Homo sapien
ggtttgaattgagggatgacatggctgaataga

SEQ ID NO: 311567 - DNA, 33 bp, Homo sapien
cacaggagggcctgtagagtaaaatcttcaagg

SEQ ID NO: 311568 - DNA, 33 bp, Homo sapien
cacaggagggcctgtatagtaaaatcttcaagg

SEQ ID NO: 311569 - DNA, 33 bp, Homo sapien
caattagttgcatttggaaaggattaattcaac

SEQ ID NO: 311570 - DNA, 33 bp, Homo sapien
caattagttgcatttgtaaaggattaattcaac

SEQ ID NO: 311571 - DNA, 33 bp, Homo sapien
tcagtaatctaggaagcaaaatgcccactccag

SEQ ID NO: 311572 - DNA, 33 bp, Homo sapien
tcagtaatctaggaagtaaaatgcccactccag

SEQ ID NO: 311573 - DNA, 33 bp, Homo sapien
gagtaggaggaccaacagcatatcaatgtttag

SEQ ID NO: 311574 - DNA, 33 bp, Homo sapien
gagtaggaggaccaacggcatatcaatgtttag

SEQ ID NO: 311575 - DNA, 33 bp, Homo sapien
acactggggaaagtaaatgctcctaaaagtgaa

SEQ ID NO: 311576 - DNA, 33 bp, Homo sapien
acactggggaaagtaagtgctcctaaaagtgaa

SEQ ID NO: 311577 - DNA, 33 bp, Homo sapien
atattcaactccgtgacgccaagaattatatat

SEQ ID NO: 311578 - DNA, 33 bp, Homo sapien
atattcaactccgtgatgccaagaattatatat

SEQ ID NO: 311579 - DNA, 33 bp, Homo sapien
atctcgaactcctgagcccaaatgatccttgaa

SEQ ID NO: 311580 - DNA, 33 bp, Homo sapien
atctcgaactcctgagtccaaatgatccttgaa

SEQ ID NO: 311581 - DNA, 33 bp, Homo sapien
caattacacagaaataaaccatagacagatatc

SEQ ID NO: 311582 - DNA, 33 bp, Homo sapien
caattacacagaaatagaccatagacagatatc

SEQ ID NO: 311583 - DNA, 33 bp, Homo sapien
aagttattactgaacccatcttatgaatgaggc

SEQ ID NO: 311584 - DNA, 33 bp, Homo sapien
aagttattactgaacctatcttatgaatgaggc

SEQ ID NO: 311585 - DNA, 33 bp, Homo sapien
gatctacactggaaaaattgtagccaaatatag

SEQ ID NO: 311586 - DNA, 33 bp, Homo sapien
gatctacactggaaaagttgtagccaaatatag

SEQ ID NO: 311587 - DNA, 33 bp, Homo sapien
aaattttgtaatctcaaaaatagttagcatgct

SEQ ID NO: 311588 - DNA, 33 bp, Homo sapien
aaattttgtaatctcagaaatagttagcatgct

SEQ ID NO: 311589 - DNA, 33 bp, Homo sapien
aaaaccattttctccacacaacccagtggtaac

SEQ ID NO: 311590 - DNA, 33 bp, Homo sapien
aaaaccattttctccatacaacccagtggtaac

SEQ ID NO: 311591 - DNA, 33 bp, Homo sapien
agaccttccttgataaccccaaagaaaaactaa

SEQ ID NO: 311592 - DNA, 33 bp, Homo sapien
agaccttccttgataatcccaaagaaaaactaa

SEQ ID NO: 311593 - DNA, 33 bp, Homo sapien
gtcagtacttgctgcaaaattctatgtcctctt

SEQ ID NO: 311594 - DNA, 33 bp, Homo sapien
gtcagtacttgctgcagaattctatgtcctctt

SEQ ID NO: 311595 - DNA, 33 bp, Homo sapien
tggcttctattgtgccccactgtggagatttca

SEQ ID NO: 311596 - DNA, 33 bp, Homo sapien
tggcttctattgtgcctcactgtggagatttca

SEQ ID NO: 311597 - DNA, 33 bp, Homo sapien
tgtaacatggctaaaaagtgtcccgtgggtgag

SEQ ID NO: 311598 - DNA, 33 bp, Homo sapien
tgtaacatggctaaaaggtgtcccgtgggtgag

SEQ ID NO: 311599 - DNA, 33 bp, Homo sapien
ggtggtctgaaactgaaatctgagcagagccat

SEQ ID NO: 311600 - DNA, 33 bp, Homo sapien
ggtggtctgaaactgagatctgagcagagccat

SEQ ID NO: 311601 - DNA, 33 bp, Homo sapien
taagatgagagcaacccgacatttcaagaagaa

SEQ ID NO: 311602 - DNA, 33 bp, Homo sapien
taagatgagagcaacctgacatttcaagaagaa

SEQ ID NO: 311603 - DNA, 33 bp, Homo sapien
tcctgcaagattttgcacttcactgaataacta

SEQ ID NO: 311604 - DNA, 33 bp, Homo sapien
tcctgcaagattttgcgcttcactgaataacta

SEQ ID NO: 311605 - DNA, 33 bp, Homo sapien
gattagaaaatgttacactggtcttccacttat

SEQ ID NO: 311606 - DNA, 33 bp, Homo sapien
gattagaaaatgttactctggtcttccacttat

SEQ ID NO: 311607 - DNA, 33 bp, Homo sapien
ttaggaattccatcaaaccctaaattctttgat

SEQ ID NO: 311608 - DNA, 33 bp, Homo sapien
ttaggaattccatcaagccctaaattctttgat

SEQ ID NO: 311609 - DNA, 33 bp, Homo sapien
cccttcctctcctatacgcacgtgtggtcccta

SEQ ID NO: 311610 - DNA, 33 bp, Homo sapien
cccttcctctcctatatgcacgtgtggtcccta

SEQ ID NO: 311611 - DNA, 33 bp, Homo sapien
ccatcatttcttgaaccatcactgtcacccaag

SEQ ID NO: 311612 - DNA, 33 bp, Homo sapien
ccatcatttcttgaacgatcactgtcacccaag

SEQ ID NO: 311613 - DNA, 33 bp, Homo sapien
ggttcattattcaccaatatttctctgttcctg

SEQ ID NO: 311614 - DNA, 33 bp, Homo sapien
ggttcattattcaccagtatttctctgttcctg

SEQ ID NO: 311615 - DNA, 33 bp, Homo sapien
gtagtagagaccaggcaaaaggggtttggattc

SEQ ID NO: 311616 - DNA, 33 bp, Homo sapien
gtagtagagaccaggccaaaggggtttggattc

SEQ ID NO: 311617 - DNA, 33 bp, Homo sapien
tgggctaacagggtacggaatctggtatccact

SEQ ID NO: 311618 - DNA, 33 bp, Homo sapien
tgggctaacagggtactgaatctggtatccact

SEQ ID NO: 311619 - DNA, 33 bp, Homo sapien
accctggtgttgctaaagttctcttcagaaaca

SEQ ID NO: 311620 - DNA, 33 bp, Homo sapien
accctggtgttgctaatgttctcttcagaaaca

SEQ ID NO: 311621 - DNA, 33 bp, Homo sapien
ttaacggtagagtcataatagacaagctctttt

SEQ ID NO: 311622 - DNA, 33 bp, Homo sapien
ttaacggtagagtcatcatagacaagctctttt

SEQ ID NO: 311623 - DNA, 33 bp, Homo sapien
acatgaaaagttgcaacgtcaagcaaaactgta

SEQ ID NO: 311624 - DNA, 33 bp, Homo sapien
acatgaaaagttgcaatgtcaagcaaaactgta

SEQ ID NO: 311625 - DNA, 33 bp, Homo sapien
aagtaagaaaagctatcaatcagtttctcctta

SEQ ID NO: 311626 - DNA, 33 bp, Homo sapien
aagtaagaaaagctatgaatcagtttctcctta

SEQ ID NO: 311627 - DNA, 33 bp, Homo sapien
tggcaagctggttctacgccatttgagactatg

SEQ ID NO: 311628 - DNA, 33 bp, Homo sapien
tggcaagctggttctatgccatttgagactatg

SEQ ID NO: 311629 - DNA, 33 bp, Homo sapien
agaggtagcagggaaaggtggaatctcagctga

SEQ ID NO: 311630 - DNA, 33 bp, Homo sapien
agaggtagcagggaaatgtggaatctcagctga

SEQ ID NO: 311631 - DNA, 33 bp, Homo sapien
tcaatcttaagctcgacagtgatgtttttgttt

SEQ ID NO: 311632 - DNA, 33 bp, Homo sapien
tcaatcttaagctcgatagtgatgtttttgttt

SEQ ID NO: 311633 - DNA, 33 bp, Homo sapien
caattggtactctttaaaaaagtcatgaaacca

SEQ ID NO: 311634 - DNA, 33 bp, Homo sapien
caattggtactctttacaaaagtcatgaaacca

SEQ ID NO: 311635 - DNA, 33 bp, Homo sapien
ctttctagaagctctacggaaggccaacaggga

SEQ ID NO: 311636 - DNA, 33 bp, Homo sapien
ctttctagaagctctatggaaggccaacaggga

SEQ ID NO: 311637 - DNA, 33 bp, Homo sapien
cagtactgctggttatgagccagtttaacactc

SEQ ID NO: 311638 - DNA, 33 bp, Homo sapien
cagtactgctggttattagccagtttaacactc

SEQ ID NO: 311639 - DNA, 33 bp, Homo sapien
aattacctagagaaaacttgcagaacgaggaag

SEQ ID NO: 311640 - DNA, 33 bp, Homo sapien
aattacctagagaaaatttgcagaacgaggaag

SEQ ID NO: 311641 - DNA, 33 bp, Homo sapien
tggaccagtaactaagaccaccagatcaaggag

SEQ ID NO: 311642 - DNA, 33 bp, Homo sapien
tggaccagtaactaaggccaccagatcaaggag

SEQ ID NO: 311643 - DNA, 33 bp, Homo sapien
accatgtctaaaagaaccaccacgtctaaaaga

SEQ ID NO: 311644 - DNA, 33 bp, Homo sapien
accatgtctaaaagaatcaccacgtctaaaaga

SEQ ID NO: 311645 - DNA, 33 bp, Homo sapien
ctgccagtgggtttacgctgcgttgcctttggt

SEQ ID NO: 311646 - DNA, 33 bp, Homo sapien
ctgccagtgggtttactctgcgttgcctttggt

SEQ ID NO: 311647 - DNA, 33 bp, Homo sapien
atggcaatgatagcacagaaaccagacaaaatc

SEQ ID NO: 311648 - DNA, 33 bp, Homo sapien
atggcaatgatagcacggaaaccagacaaaatc

SEQ ID NO: 311649 - DNA, 33 bp, Homo sapien
tagctcctggaaatacagaattctatccaacca

SEQ ID NO: 311650 - DNA, 33 bp, Homo sapien
tagctcctggaaatactgaattctatccaacca

SEQ ID NO: 311651 - DNA, 33 bp, Homo sapien
tgttacaaatgctttgaactagtttgtggaaga

SEQ ID NO: 311652 - DNA, 33 bp, Homo sapien
tgttacaaatgctttgcactagtttgtggaaga

SEQ ID NO: 311653 - DNA, 33 bp, Homo sapien
ttacccacttttgaaacgtagctgccttgatct

SEQ ID NO: 311654 - DNA, 33 bp, Homo sapien
ttacccacttttgaaatgtagctgccttgatct

SEQ ID NO: 311655 - DNA, 33 bp, Homo sapien
cttctgacattcaaaactaggatttttggaata

SEQ ID NO: 311656 - DNA, 33 bp, Homo sapien
cttctgacattcaaaagtaggatttttggaata

SEQ ID NO: 311657 - DNA, 33 bp, Homo sapien
ccacaaacagacaatgaatttgtgaattaccaa

SEQ ID NO: 311658 - DNA, 33 bp, Homo sapien
ccacaaacagacaatggatttgtgaattaccaa

SEQ ID NO: 311659 - DNA, 33 bp, Homo sapien
tgccagcctttctgcaagaccctgaacacatgt

SEQ ID NO: 311660 - DNA, 33 bp, Homo sapien
tgccagcctttctgcaggaccctgaacacatgt

SEQ ID NO: 311661 - DNA, 33 bp, Homo sapien
tcctctctcctcaggacgtgtttactctgtggc

SEQ ID NO: 311662 - DNA, 33 bp, Homo sapien
tcctctctcctcaggatgtgtttactctgtggc

SEQ ID NO: 311663 - DNA, 33 bp, Homo sapien
ataagagggcttaaagacgtcagttgaggcagg

SEQ ID NO: 311664 - DNA, 33 bp, Homo sapien
ataagagggcttaaagtcgtcagttgaggcagg

SEQ ID NO: 311665 - DNA, 33 bp, Homo sapien
ggagcaagattccagcaacaatcaaagtacatc

SEQ ID NO: 311666 - DNA, 33 bp, Homo sapien
ggagcaagattccagccacaatcaaagtacatc

SEQ ID NO: 311667 - DNA, 33 bp, Homo sapien
cccacaatttgcctaaccaatgttctatcccta

SEQ ID NO: 311668 - DNA, 33 bp, Homo sapien
cccacaatttgcctaatcaatgttctatcccta

SEQ ID NO: 311669 - DNA, 33 bp, Homo sapien
ctctccccagaggtaaacgctgattgcagtttg

SEQ ID NO: 311670 - DNA, 33 bp, Homo sapien
ctctccccagaggtaagcgctgattgcagtttg

SEQ ID NO: 311671 - DNA, 33 bp, Homo sapien
tggttaaatttcatgccagttgataagtcagga

SEQ ID NO: 311672 - DNA, 33 bp, Homo sapien
tggttaaatttcatgctagttgataagtcagga

SEQ ID NO: 311673 - DNA, 33 bp, Homo sapien
tgagacttctgaagctaaatcaaaagaaggctt

SEQ ID NO: 311674 - DNA, 33 bp, Homo sapien
tgagacttctgaagctgaatcaaaagaaggctt

SEQ ID NO: 311675 - DNA, 33 bp, Homo sapien
gtcattgtaacaggaaaagttaggtggatgccc

SEQ ID NO: 311676 - DNA, 33 bp, Homo sapien
gtcattgtaacaggaagagttaggtggatgccc

SEQ ID NO: 311677 - DNA, 33 bp, Homo sapien
aagaaaggagggaagacaagccaatatgagtaa

SEQ ID NO: 311678 - DNA, 33 bp, Homo sapien
aagaaaggagggaagagaagccaatatgagtaa

SEQ ID NO: 311679 - DNA, 33 bp, Homo sapien
ttagctacgtgggcatgaagttccctgcactcc

SEQ ID NO: 311680 - DNA, 33 bp, Homo sapien
ttagctacgtgggcattaagttccctgcactcc

SEQ ID NO: 311681 - DNA, 33 bp, Homo sapien
aatgtggagttggggaaagatacgcacaatcag

SEQ ID NO: 311682 - DNA, 33 bp, Homo sapien
aatgtggagttggggagagatacgcacaatcag

SEQ ID NO: 311683 - DNA, 33 bp, Homo sapien
ataaactacctggacaaaagctattgtatcaga

SEQ ID NO: 311684 - DNA, 33 bp, Homo sapien
ataaactacctggacataagctattgtatcaga

SEQ ID NO: 311685 - DNA, 33 bp, Homo sapien
cagggttcctgacagcgaaaattccaagtacct

SEQ ID NO: 311686 - DNA, 33 bp, Homo sapien
cagggttcctgacagctaaaattccaagtacct

SEQ ID NO: 311687 - DNA, 33 bp, Homo sapien
catcaatggagaagaaagattcgcctctattcc

SEQ ID NO: 311688 - DNA, 33 bp, Homo sapien
catcaatggagaagaaggattcgcctctattcc

SEQ ID NO: 311689 - DNA, 33 bp, Homo sapien
cagtaggagtgatgtacggggcacctacttggg

SEQ ID NO: 311690 - DNA, 33 bp, Homo sapien
cagtaggagtgatgtatggggcacctacttggg

SEQ ID NO: 311691 - DNA, 33 bp, Homo sapien
ccctcgtacttctgaactgtgcatgccttagta

SEQ ID NO: 311692 - DNA, 33 bp, Homo sapien
ccctcgtacttctgaattgtgcatgccttagta

SEQ ID NO: 311693 - DNA, 33 bp, Homo sapien
gagtgtttacatggccacaggtaattcattcag

SEQ ID NO: 311694 - DNA, 33 bp, Homo sapien
gagtgtttacatggccgcaggtaattcattcag

SEQ ID NO: 311695 - DNA, 33 bp, Homo sapien
gctcctctttttaacaatgacagagaaaggaaa

SEQ ID NO: 311696 - DNA, 33 bp, Homo sapien
gctcctctttttaacagtgacagagaaaggaaa

SEQ ID NO: 311697 - DNA, 33 bp, Homo sapien
ataaccataagcgcaaataatatgtagtattat

SEQ ID NO: 311698 - DNA, 33 bp, Homo sapien
ataaccataagcgcaattaatatgtagtattat

SEQ ID NO: 311699 - DNA, 33 bp, Homo sapien
gtgatttgtaatttcacgagtagagacatcctg

SEQ ID NO: 311700 - DNA, 33 bp, Homo sapien
gtgatttgtaatttcatgagtagagacatcctg

SEQ ID NO: 311701 - DNA, 33 bp, Homo sapien
ctatttaagacagcaaacgtacattaagactaa

SEQ ID NO: 311702 - DNA, 33 bp, Homo sapien
ctatttaagacagcaagcgtacattaagactaa

SEQ ID NO: 311703 - DNA, 33 bp, Homo sapien
ttgtactgagcagaaacggcatgttgtatacta

SEQ ID NO: 311704 - DNA, 33 bp, Homo sapien
ttgtactgagcagaaatggcatgttgtatacta

SEQ ID NO: 311705 - DNA, 33 bp, Homo sapien
tatcccaattaaaacccagtccaattcaaaatt

SEQ ID NO: 311706 - DNA, 33 bp, Homo sapien
tatcccaattaaaaccgagtccaattcaaaatt

SEQ ID NO: 311707 - DNA, 33 bp, Homo sapien
agaggagcttattttcccttagtcagttttgaa

SEQ ID NO: 311708 - DNA, 33 bp, Homo sapien
agaggagcttattttctcttagtcagttttgaa

SEQ ID NO: 311709 - DNA, 33 bp, Homo sapien
tgatgaaagtcacagaatcccttagaactaaaa

SEQ ID NO: 311710 - DNA, 33 bp, Homo sapien
tgatgaaagtcacagagtcccttagaactaaaa

SEQ ID NO: 311711 - DNA, 33 bp, Homo sapien
taagaagaaaattttgaattccaatagtgactg

SEQ ID NO: 311712 - DNA, 33 bp, Homo sapien
taagaagaaaattttggattccaatagtgactg

SEQ ID NO: 311713 - DNA, 33 bp, Homo sapien
aaataagccagaaaaccagcggtcacatacaaa

SEQ ID NO: 311714 - DNA, 33 bp, Homo sapien
aaataagccagaaaactagcggtcacatacaaa

SEQ ID NO: 311715 - DNA, 33 bp, Homo sapien
gggtcagcagaagttacaagacctaattccagt

SEQ ID NO: 311716 - DNA, 33 bp, Homo sapien
gggtcagcagaagttataagacctaattccagt

SEQ ID NO: 311717 - DNA, 33 bp, Homo sapien
ttgtgtactgtaggaaactcatcgccaagagaa

SEQ ID NO: 311718 - DNA, 33 bp, Homo sapien
ttgtgtactgtaggaagctcatcgccaagagaa

SEQ ID NO: 311719 - DNA, 33 bp, Homo sapien
tcatttatttccagtgacaaagttttatggact

SEQ ID NO: 311720 - DNA, 33 bp, Homo sapien
tcatttatttccagtggcaaagttttatggact

SEQ ID NO: 311721 - DNA, 33 bp, Homo sapien
ggaactcagacctttacggctctaaagcctgtt

SEQ ID NO: 311722 - DNA, 33 bp, Homo sapien
ggaactcagacctttatggctctaaagcctgtt

SEQ ID NO: 311723 - DNA, 33 bp, Homo sapien
tttcctgagttctggagatgggggatactcaag

SEQ ID NO: 311724 - DNA, 33 bp, Homo sapien
tttcctgagttctggatatgggggatactcaag

SEQ ID NO: 311725 - DNA, 33 bp, Homo sapien
cagagaaaataaactgcatctcttagttccatg

SEQ ID NO: 311726 - DNA, 33 bp, Homo sapien
cagagaaaataaactggatctcttagttccatg

SEQ ID NO: 311727 - DNA, 33 bp, Homo sapien
tagcactcccatatagcattgtgtgagatatac

SEQ ID NO: 311728 - DNA, 33 bp, Homo sapien
tagcactcccatataggattgtgtgagatatac

SEQ ID NO: 311729 - DNA, 33 bp, Homo sapien
ggcttgaacatagggcaaaggtaaatagaagat

SEQ ID NO: 311730 - DNA, 33 bp, Homo sapien
ggcttgaacatagggccaaggtaaatagaagat

SEQ ID NO: 311731 - DNA, 33 bp, Homo sapien
actttcaagacatcacaaagagtcacaccaacc

SEQ ID NO: 311732 - DNA, 33 bp, Homo sapien
actttcaagacatcacgaagagtcacaccaacc

SEQ ID NO: 311733 - DNA, 33 bp, Homo sapien
ctagatcatctcagcacgcaaattgtcccctca

SEQ ID NO: 311734 - DNA, 33 bp, Homo sapien
ctagatcatctcagcaggcaaattgtcccctca

SEQ ID NO: 311735 - DNA, 33 bp, Homo sapien
ctatgaaaagttgtccaaataatccaaaaatat

SEQ ID NO: 311736 - DNA, 33 bp, Homo sapien
ctatgaaaagttgtccgaataatccaaaaatat

SEQ ID NO: 311737 - DNA, 33 bp, Homo sapien
tatttttagaatgttcccatgaaacccgctctt

SEQ ID NO: 311738 - DNA, 33 bp, Homo sapien
tatttttagaatgttcgcatgaaacccgctctt

SEQ ID NO: 311739 - DNA, 33 bp, Homo sapien
gaaaaagtgaaaactagatttgaacaggaaaaa

SEQ ID NO: 311740 - DNA, 33 bp, Homo sapien
gaaaaagtgaaaactatatttgaacaggaaaaa

SEQ ID NO: 311741 - DNA, 33 bp, Homo sapien
tttgctgtacatacaccgtgaaaagccctgtgc

SEQ ID NO: 311742 - DNA, 33 bp, Homo sapien
tttgctgtacatacactgtgaaaagccctgtgc

SEQ ID NO: 311743 - DNA, 33 bp, Homo sapien
ctagtgctattagattacaacacgtgggctcta

SEQ ID NO: 311744 - DNA, 33 bp, Homo sapien
ctagtgctattagattccaacacgtgggctcta

SEQ ID NO: 311745 - DNA, 33 bp, Homo sapien
aagacatggagacacactgacagagtgaggagg

SEQ ID NO: 311746 - DNA, 33 bp, Homo sapien
aagacatggagacacattgacagagtgaggagg

SEQ ID NO: 311747 - DNA, 33 bp, Homo sapien
gcagatcctcttcagtcaatcttaggaggagcc

SEQ ID NO: 311748 - DNA, 33 bp, Homo sapien
gcagatcctcttcagtgaatcttaggaggagcc

SEQ ID NO: 311749 - DNA, 33 bp, Homo sapien
aatagtttgggcaagacatgatgctggctgaag

SEQ ID NO: 311750 - DNA, 33 bp, Homo sapien
aatagtttgggcaagatatgatgctggctgaag

SEQ ID NO: 311751 - DNA, 33 bp, Homo sapien
cacctaccatcagcaaattaaaagatggctctt

SEQ ID NO: 311752 - DNA, 33 bp, Homo sapien
cacctaccatcagcaagttaaaagatggctctt

SEQ ID NO: 311753 - DNA, 33 bp, Homo sapien
ccaccataccatgcaacagacgtaaatagcctc

SEQ ID NO: 311754 - DNA, 33 bp, Homo sapien
ccaccataccatgcaatagacgtaaatagcctc

SEQ ID NO: 311755 - DNA, 33 bp, Homo sapien
atgggatcatttgtgcaccattgaagtttcagg

SEQ ID NO: 311756 - DNA, 33 bp, Homo sapien
atgggatcatttgtgccccattgaagtttcagg

SEQ ID NO: 311757 - DNA, 33 bp, Homo sapien
agcttcaatttccttaacttgaaaaagagcata

SEQ ID NO: 311758 - DNA, 33 bp, Homo sapien
agcttcaatttccttagcttgaaaaagagcata

SEQ ID NO: 311759 - DNA, 33 bp, Homo sapien
ctcccaggcgtctggcagatacctacttgaaga

SEQ ID NO: 311760 - DNA, 33 bp, Homo sapien
ctcccaggcgtctggctgatacctacttgaaga

SEQ ID NO: 311761 - DNA, 33 bp, Homo sapien
gctgtgcacaacccgaagagtcactttacgtgt

SEQ ID NO: 311762 - DNA, 33 bp, Homo sapien
gctgtgcacaacccgaggagtcactttacgtgt

SEQ ID NO: 311763 - DNA, 33 bp, Homo sapien
tttttgcctagagggacaagaagatgaggatga

SEQ ID NO: 311764 - DNA, 33 bp, Homo sapien
tttttgcctagagggagaagaagatgaggatga

SEQ ID NO: 311765 - DNA, 33 bp, Homo sapien
actaagaaacattaaacagaaatgtcagagaac

SEQ ID NO: 311766 - DNA, 33 bp, Homo sapien
actaagaaacattaaagagaaatgtcagagaac

SEQ ID NO: 311767 - DNA, 33 bp, Homo sapien
gagaatggaagagatacggagataacagaggga

SEQ ID NO: 311768 - DNA, 33 bp, Homo sapien
gagaatggaagagatatggagataacagaggga

SEQ ID NO: 311769 - DNA, 33 bp, Homo sapien
tgcaaggaagaggtaacggtgctctaggacaag

SEQ ID NO: 311770 - DNA, 33 bp, Homo sapien
tgcaaggaagaggtaatggtgctctaggacaag

SEQ ID NO: 311771 - DNA, 33 bp, Homo sapien
aaatagaggcctccaacacatccaggagtctag

SEQ ID NO: 311772 - DNA, 33 bp, Homo sapien
aaatagaggcctccaatacatccaggagtctag

SEQ ID NO: 311773 - DNA, 33 bp, Homo sapien
atatgatagctgtgaaacaagagaattgacagt

SEQ ID NO: 311774 - DNA, 33 bp, Homo sapien
atatgatagctgtgaaccaagagaattgacagt

SEQ ID NO: 311775 - DNA, 33 bp, Homo sapien
gctaaatataagtgtagaatcaaaatgaggaaa

SEQ ID NO: 311776 - DNA, 33 bp, Homo sapien
gctaaatataagtgtataatcaaaatgaggaaa

SEQ ID NO: 311777 - DNA, 33 bp, Homo sapien
tccccagactctgcatcaccgtttgccgagggc

SEQ ID NO: 311778 - DNA, 33 bp, Homo sapien
tccccagactctgcattaccgtttgccgagggc

SEQ ID NO: 311779 - DNA, 33 bp, Homo sapien
cagaccagaaaatccacaagtggcacctttttt

SEQ ID NO: 311780 - DNA, 33 bp, Homo sapien
cagaccagaaaatccataagtggcacctttttt

SEQ ID NO: 311781 - DNA, 33 bp, Homo sapien
ctgtgtgccattagacaacctagttaacttctg

SEQ ID NO: 311782 - DNA, 33 bp, Homo sapien
ctgtgtgccattagaccacctagttaacttctg

SEQ ID NO: 311783 - DNA, 33 bp, Homo sapien
agcataatttgtataaaggagctatgggaaata

SEQ ID NO: 311784 - DNA, 33 bp, Homo sapien
agcataatttgtataagggagctatgggaaata

SEQ ID NO: 311785 - DNA, 33 bp, Homo sapien
atgctgcagtcacattcaactatcatggttctc

SEQ ID NO: 311786 - DNA, 33 bp, Homo sapien
atgctgcagtcacattgaactatcatggttctc

SEQ ID NO: 311787 - DNA, 33 bp, Homo sapien
tgtacttggtcctggcaacactggacaaagcaa

SEQ ID NO: 311788 - DNA, 33 bp, Homo sapien
tgtacttggtcctggcgacactggacaaagcaa

SEQ ID NO: 311789 - DNA, 33 bp, Homo sapien
gtaagtgcaatatgtacctgatccagggctaac

SEQ ID NO: 311790 - DNA, 33 bp, Homo sapien
gtaagtgcaatatgtatctgatccagggctaac

SEQ ID NO: 311791 - DNA, 33 bp, Homo sapien
tcttgatgtgtcatagcagtatccctaatctga

SEQ ID NO: 311792 - DNA, 33 bp, Homo sapien
tcttgatgtgtcatagtagtatccctaatctga

SEQ ID NO: 311793 - DNA, 33 bp, Homo sapien
tttacttaatggtaacagtagtaataatggcta

SEQ ID NO: 311794 - DNA, 33 bp, Homo sapien
tttacttaatggtaaccgtagtaataatggcta

SEQ ID NO: 311795 - DNA, 33 bp, Homo sapien
atgacattgtgaagagccatctttgatattgta

SEQ ID NO: 311796 - DNA, 33 bp, Homo sapien
atgacattgtgaagagtcatctttgatattgta

SEQ ID NO: 311797 - DNA, 33 bp, Homo sapien
atcaccattttctatacgaatgatgtgtgtaga

SEQ ID NO: 311798 - DNA, 33 bp, Homo sapien
atcaccattttctatatgaatgatgtgtgtaga

SEQ ID NO: 311799 - DNA, 33 bp, Homo sapien
gtaaagacaacacagtaactgatcatgcttcta

SEQ ID NO: 311800 - DNA, 33 bp, Homo sapien
gtaaagacaacacagtcactgatcatgcttcta

SEQ ID NO: 311801 - DNA, 33 bp, Homo sapien
gatgcattctgagaaacgtgttgttaggaaatt

SEQ ID NO: 311802 - DNA, 33 bp, Homo sapien
gatgcattctgagaaatgtgttgttaggaaatt

SEQ ID NO: 311803 - DNA, 33 bp, Homo sapien
ttgaaatggaatgaaaaggtaggggaaagaatt

SEQ ID NO: 311804 - DNA, 33 bp, Homo sapien
ttgaaatggaatgaaagggtaggggaaagaatt

SEQ ID NO: 311805 - DNA, 33 bp, Homo sapien
gtagatttacagtaaacggcaaaaccactatgt

SEQ ID NO: 311806 - DNA, 33 bp, Homo sapien
gtagatttacagtaaatggcaaaaccactatgt

SEQ ID NO: 311807 - DNA, 33 bp, Homo sapien
accaaactccttgacaataagtgctttttaaaa

SEQ ID NO: 311808 - DNA, 33 bp, Homo sapien
accaaactccttgacagtaagtgctttttaaaa

SEQ ID NO: 311809 - DNA, 33 bp, Homo sapien
tgagttattaacaaataaagtccttgcgtgggt

SEQ ID NO: 311810 - DNA, 33 bp, Homo sapien
tgagttattaacaaatgaagtccttgcgtgggt

SEQ ID NO: 311811 - DNA, 33 bp, Homo sapien
ttttaaggtccctatcaaggctgctatctctgg

SEQ ID NO: 311812 - DNA, 33 bp, Homo sapien
ttttaaggtccctatcgaggctgctatctctgg

SEQ ID NO: 311813 - DNA, 33 bp, Homo sapien
catttccaattttaccactgagactgagactga

SEQ ID NO: 311814 - DNA, 33 bp, Homo sapien
catttccaattttaccgctgagactgagactga

SEQ ID NO: 311815 - DNA, 33 bp, Homo sapien
cttcagggctactcaacaatcaactgagaaaat

SEQ ID NO: 311816 - DNA, 33 bp, Homo sapien
cttcagggctactcaataatcaactgagaaaat

SEQ ID NO: 311817 - DNA, 33 bp, Homo sapien
ttttggaagcagagaaactttgaccagagcctc

SEQ ID NO: 311818 - DNA, 33 bp, Homo sapien
ttttggaagcagagaacctttgaccagagcctc

SEQ ID NO: 311819 - DNA, 33 bp, Homo sapien
taaaaaaagaagccggacataggtggaaatata

SEQ ID NO: 311820 - DNA, 33 bp, Homo sapien
taaaaaaagaagccgggcataggtggaaatata

SEQ ID NO: 311821 - DNA, 33 bp, Homo sapien
aaaaattagccacgtacggtgatgttcactgta

SEQ ID NO: 311822 - DNA, 33 bp, Homo sapien
aaaaattagccacgtatggtgatgttcactgta

SEQ ID NO: 311823 - DNA, 33 bp, Homo sapien
cgaacgaattcgctaccgctaacaattccagtg

SEQ ID NO: 311824 - DNA, 33 bp, Homo sapien
cgaacgaattcgctacggctaacaattccagtg

SEQ ID NO: 311825 - DNA, 33 bp, Homo sapien
ctcctgagtaacttcaacttgccaattctcggt

SEQ ID NO: 311826 - DNA, 33 bp, Homo sapien
ctcctgagtaacttcagcttgccaattctcggt

SEQ ID NO: 311827 - DNA, 33 bp, Homo sapien
atcctcagagggaaagaccagtgaatgccagat

SEQ ID NO: 311828 - DNA, 33 bp, Homo sapien
atcctcagagggaaaggccagtgaatgccagat

SEQ ID NO: 311829 - DNA, 33 bp, Homo sapien
cagctgttccatcaccaattgccaggattggtt

SEQ ID NO: 311830 - DNA, 33 bp, Homo sapien
cagctgttccatcaccgattgccaggattggtt

SEQ ID NO: 311831 - DNA, 33 bp, Homo sapien
gcaatctaatcttggaagagcaagcaaccttga

SEQ ID NO: 311832 - DNA, 33 bp, Homo sapien
gcaatctaatcttggatgagcaagcaaccttga

SEQ ID NO: 311833 - DNA, 33 bp, Homo sapien
gtcagccagagacacaatggttgcccctgcccc

SEQ ID NO: 311834 - DNA, 33 bp, Homo sapien
gtcagccagagacacagtggttgcccctgcccc

SEQ ID NO: 311835 - DNA, 33 bp, Homo sapien
cagcctggagttgggccaatgtctgaaacagca

SEQ ID NO: 311836 - DNA, 33 bp, Homo sapien
cagcctggagttgggcgaatgtctgaaacagca

SEQ ID NO: 311837 - DNA, 33 bp, Homo sapien
aaagtgtgctgtgatacattaaccacttccctg

SEQ ID NO: 311838 - DNA, 33 bp, Homo sapien
aaagtgtgctgtgatagattaaccacttccctg

SEQ ID NO: 311839 - DNA, 33 bp, Homo sapien
caattttgtcactcaccaagtgttaaaggaggc

SEQ ID NO: 311840 - DNA, 33 bp, Homo sapien
caattttgtcactcactaagtgttaaaggaggc

SEQ ID NO: 311841 - DNA, 33 bp, Homo sapien
gatccaagtatgcaaaacttgtgggtcccaggc

SEQ ID NO: 311842 - DNA, 33 bp, Homo sapien
gatccaagtatgcaaagcttgtgggtcccaggc

SEQ ID NO: 311843 - DNA, 33 bp, Homo sapien
tattgaacaacccaaacgctgagagcccactga

SEQ ID NO: 311844 - DNA, 33 bp, Homo sapien
tattgaacaacccaaatgctgagagcccactga

SEQ ID NO: 311845 - DNA, 33 bp, Homo sapien
cacactaccccactaaatgttttgagagcttct

SEQ ID NO: 311846 - DNA, 33 bp, Homo sapien
cacactaccccactaagtgttttgagagcttct

SEQ ID NO: 311847 - DNA, 33 bp, Homo sapien
tgaggaagccatcagaaaaaattccttaatgtc

SEQ ID NO: 311848 - DNA, 33 bp, Homo sapien
tgaggaagccatcagataaaattccttaatgtc

SEQ ID NO: 311849 - DNA, 33 bp, Homo sapien
agagaaagatgtcaaaagtgaaagcaaagttct

SEQ ID NO: 311850 - DNA, 33 bp, Homo sapien
agagaaagatgtcaaacgtgaaagcaaagttct

SEQ ID NO: 311851 - DNA, 33 bp, Homo sapien
ctgatagcttgtaaaacgcaaagaatcagctga

SEQ ID NO: 311852 - DNA, 33 bp, Homo sapien
ctgatagcttgtaaaatgcaaagaatcagctga

SEQ ID NO: 311853 - DNA, 33 bp, Homo sapien
ctgatgactgactgaaatgggggagagaggcag

SEQ ID NO: 311854 - DNA, 33 bp, Homo sapien
ctgatgactgactgaactgggggagagaggcag

SEQ ID NO: 311855 - DNA, 33 bp, Homo sapien
aaagtataaaatatggaactctggaggtcagaa

SEQ ID NO: 311856 - DNA, 33 bp, Homo sapien
aaagtataaaatatggcactctggaggtcagaa

SEQ ID NO: 311857 - DNA, 33 bp, Homo sapien
gacaaatatttcaccaataataatgtcaaaatg

SEQ ID NO: 311858 - DNA, 33 bp, Homo sapien
gacaaatatttcaccactaataatgtcaaaatg

SEQ ID NO: 311859 - DNA, 33 bp, Homo sapien
aatttttttaatgcaacaggatctgaggatgca

SEQ ID NO: 311860 - DNA, 33 bp, Homo sapien
aatttttttaatgcaagaggatctgaggatgca

SEQ ID NO: 311861 - DNA, 33 bp, Homo sapien
ggtaagtatgtttagtcacaaaattctcactaa

SEQ ID NO: 311862 - DNA, 33 bp, Homo sapien
ggtaagtatgtttagttacaaaattctcactaa

SEQ ID NO: 311863 - DNA, 33 bp, Homo sapien
acttcttatcctgtgcaccggcataaccaaaga

SEQ ID NO: 311864 - DNA, 33 bp, Homo sapien
acttcttatcctgtgcgccggcataaccaaaga

SEQ ID NO: 311865 - DNA, 33 bp, Homo sapien
atttcagacagaggaaacatgagtacaaactca

SEQ ID NO: 311866 - DNA, 33 bp, Homo sapien
atttcagacagaggaaccatgagtacaaactca

SEQ ID NO: 311867 - DNA, 33 bp, Homo sapien
caccagtttcttgaaagaggagtctttgcttct

SEQ ID NO: 311868 - DNA, 33 bp, Homo sapien
caccagtttcttgaaataggagtctttgcttct

SEQ ID NO: 311869 - DNA, 33 bp, Homo sapien
ttgaaagtggtcatgaacatttaatgagaagac

SEQ ID NO: 311870 - DNA, 33 bp, Homo sapien
ttgaaagtggtcatgagcatttaatgagaagac

SEQ ID NO: 311871 - DNA, 33 bp, Homo sapien
ataaaaatgagccacgccaaaagttaaaatttg

SEQ ID NO: 311872 - DNA, 33 bp, Homo sapien
ataaaaatgagccacgtcaaaagttaaaatttg

SEQ ID NO: 311873 - DNA, 33 bp, Homo sapien
ctgattatattccagacgcttttctaattctaa

SEQ ID NO: 311874 - DNA, 33 bp, Homo sapien
ctgattatattccagatgcttttctaattctaa

SEQ ID NO: 311875 - DNA, 33 bp, Homo sapien
tttttgggttcatcaactggtgtaatatcaaaa

SEQ ID NO: 311876 - DNA, 33 bp, Homo sapien
tttttgggttcatcaattggtgtaatatcaaaa

SEQ ID NO: 311877 - DNA, 33 bp, Homo sapien
aggagaagtgatgaacggagagacaatggttgt

SEQ ID NO: 311878 - DNA, 33 bp, Homo sapien
aggagaagtgatgaactgagagacaatggttgt

SEQ ID NO: 311879 - DNA, 33 bp, Homo sapien
cctacctacatcaggaaaaacaagagacctcca

SEQ ID NO: 311880 - DNA, 33 bp, Homo sapien
cctacctacatcaggacaaacaagagacctcca

SEQ ID NO: 311881 - DNA, 33 bp, Homo sapien
caaccacaggccaaaacggaaatccagaccctg

SEQ ID NO: 311882 - DNA, 33 bp, Homo sapien
caaccacaggccaaaatggaaatccagaccctg

SEQ ID NO: 311883 - DNA, 33 bp, Homo sapien
aaaagcttgattttaacagactgttgagaaaga

SEQ ID NO: 311884 - DNA, 33 bp, Homo sapien
aaaagcttgattttaatagactgttgagaaaga

SEQ ID NO: 311885 - DNA, 33 bp, Homo sapien
cgatgaggcctcaccaatgggcttaggcaaggc

SEQ ID NO: 311886 - DNA, 33 bp, Homo sapien
cgatgaggcctcaccagtgggcttaggcaaggc

SEQ ID NO: 311887 - DNA, 33 bp, Homo sapien
tctaagtgttaaagaacgcatagtctagtttac

SEQ ID NO: 311888 - DNA, 33 bp, Homo sapien
tctaagtgttaaagaatgcatagtctagtttac

SEQ ID NO: 311889 - DNA, 33 bp, Homo sapien
tattctatttcatttacgtcctgagtatgttca

SEQ ID NO: 311890 - DNA, 33 bp, Homo sapien
tattctatttcatttatgtcctgagtatgttca

SEQ ID NO: 311891 - DNA, 33 bp, Homo sapien
tttgaggcagtccaaacgctcagctgtcccaag

SEQ ID NO: 311892 - DNA, 33 bp, Homo sapien
tttgaggcagtccaaatgctcagctgtcccaag

SEQ ID NO: 311893 - DNA, 33 bp, Homo sapien
catggagctagagtcaaatgtaatcaaataatt

SEQ ID NO: 311894 - DNA, 33 bp, Homo sapien
catggagctagagtcagatgtaatcaaataatt

SEQ ID NO: 311895 - DNA, 33 bp, Homo sapien
ccgtgactattggagggagatgaagcctcgtgg

SEQ ID NO: 311896 - DNA, 33 bp, Homo sapien
ccgtgactattggaggtagatgaagcctcgtgg

SEQ ID NO: 311897 - DNA, 33 bp, Homo sapien
gatcacctctttggccgcgagaaaagatgttcc

SEQ ID NO: 311898 - DNA, 33 bp, Homo sapien
gatcacctctttggcctcgagaaaagatgttcc

SEQ ID NO: 311899 - DNA, 33 bp, Homo sapien
ctttaatatgcattaccgtaagtcttataaata

SEQ ID NO: 311900 - DNA, 33 bp, Homo sapien
ctttaatatgcattactgtaagtcttataaata

SEQ ID NO: 311901 - DNA, 33 bp, Homo sapien
gaagatactctctacactggaagttcctgacct

SEQ ID NO: 311902 - DNA, 33 bp, Homo sapien
gaagatactctctacattggaagttcctgacct

SEQ ID NO: 311903 - DNA, 33 bp, Homo sapien
atctgttttattgtgcccattttacagatgagg

SEQ ID NO: 311904 - DNA, 33 bp, Homo sapien
atctgttttattgtgctcattttacagatgagg

SEQ ID NO: 311905 - DNA, 33 bp, Homo sapien
aacctctgacccagctaagatgaaacagccaca

SEQ ID NO: 311906 - DNA, 33 bp, Homo sapien
aacctctgacccagctgagatgaaacagccaca

SEQ ID NO: 311907 - DNA, 33 bp, Homo sapien
aagatcctgactcaaccgcaacaacacactggg

SEQ ID NO: 311908 - DNA, 33 bp, Homo sapien
aagatcctgactcaacggcaacaacacactggg

SEQ ID NO: 311909 - DNA, 33 bp, Homo sapien
gagcggaaggctagagaaccgtgtcagtcattg

SEQ ID NO: 311910 - DNA, 33 bp, Homo sapien
gagcggaaggctagaggaccgtgtcagtcattg

SEQ ID NO: 311911 - DNA, 33 bp, Homo sapien
gtgtctgggatgcacaagggaatggtagtgaca

SEQ ID NO: 311912 - DNA, 33 bp, Homo sapien
gtgtctgggatgcacaggggaatggtagtgaca

SEQ ID NO: 311913 - DNA, 33 bp, Homo sapien
acaaggtcccgcctcacgtaacttgcaggccaa

SEQ ID NO: 311914 - DNA, 33 bp, Homo sapien
acaaggtcccgcctcatgtaacttgcaggccaa

SEQ ID NO: 311915 - DNA, 33 bp, Homo sapien
tgtttagtcaacaaacacttaagttgagtgctt

SEQ ID NO: 311916 - DNA, 33 bp, Homo sapien
tgtttagtcaacaaacgcttaagttgagtgctt

SEQ ID NO: 311917 - DNA, 33 bp, Homo sapien
tcccattcactttggacaaatttcagagatttc

SEQ ID NO: 311918 - DNA, 33 bp, Homo sapien
tcccattcactttggataaatttcagagatttc

SEQ ID NO: 311919 - DNA, 33 bp, Homo sapien
ccttgtataagcttatcaaacagtagctgcatt

SEQ ID NO: 311920 - DNA, 33 bp, Homo sapien
ccttgtataagcttatgaaacagtagctgcatt

SEQ ID NO: 311921 - DNA, 33 bp, Homo sapien
cttttgtagggagcaacgatctgaaggagaaaa

SEQ ID NO: 311922 - DNA, 33 bp, Homo sapien
cttttgtagggagcaatgatctgaaggagaaaa

SEQ ID NO: 311923 - DNA, 33 bp, Homo sapien
gaatacagagtcgacaataagagctctgaacag

SEQ ID NO: 311924 - DNA, 33 bp, Homo sapien
gaatacagagtcgacagtaagagctctgaacag

SEQ ID NO: 311925 - DNA, 33 bp, Homo sapien
tcactaaatggatcaagaaccccattggtaaaa

SEQ ID NO: 311926 - DNA, 33 bp, Homo sapien
tcactaaatggatcaataaccccattggtaaaa

SEQ ID NO: 311927 - DNA, 33 bp, Homo sapien
tgaagttactccgttacgcaagggattcagcag

SEQ ID NO: 311928 - DNA, 33 bp, Homo sapien
tgaagttactccgttatgcaagggattcagcag

SEQ ID NO: 311929 - DNA, 33 bp, Homo sapien
aaagctaaataaaatgcagttttgccacaaact

SEQ ID NO: 311930 - DNA, 33 bp, Homo sapien
aaagctaaataaaatggagttttgccacaaact

SEQ ID NO: 311931 - DNA, 33 bp, Homo sapien
taagtgattattatgaccttagcttaaggcagg

SEQ ID NO: 311932 - DNA, 33 bp, Homo sapien
taagtgattattatgatcttagcttaaggcagg

SEQ ID NO: 311933 - DNA, 33 bp, Homo sapien
ccagagaagttgcatgaagatgaatatgtgata

SEQ ID NO: 311934 - DNA, 33 bp, Homo sapien
ccagagaagttgcatgcagatgaatatgtgata

SEQ ID NO: 311935 - DNA, 33 bp, Homo sapien
gtgaggggagtagaaaatactgtaaatgagggc

SEQ ID NO: 311936 - DNA, 33 bp, Homo sapien
gtgaggggagtagaaagtactgtaaatgagggc

SEQ ID NO: 311937 - DNA, 33 bp, Homo sapien
cattaggcaatttaccaaaaggggcagagggga

SEQ ID NO: 311938 - DNA, 33 bp, Homo sapien
cattaggcaatttaccgaaaggggcagagggga

SEQ ID NO: 311939 - DNA, 33 bp, Homo sapien
gggctaattttaagaacctgaaggcaaggccag

SEQ ID NO: 311940 - DNA, 33 bp, Homo sapien
gggctaattttaagaatctgaaggcaaggccag

SEQ ID NO: 311941 - DNA, 33 bp, Homo sapien
agaacccattttgatacgttaaaggcaaaaaac

SEQ ID NO: 311942 - DNA, 33 bp, Homo sapien
agaacccattttgatatgttaaaggcaaaaaac

SEQ ID NO: 311943 - DNA, 33 bp, Homo sapien
ttatctctaatgtttcccttctattcaaacact

SEQ ID NO: 311944 - DNA, 33 bp, Homo sapien
ttatctctaatgtttctcttctattcaaacact

SEQ ID NO: 311945 - DNA, 33 bp, Homo sapien
gacaccactgtgaccaaagagatgacacatggg

SEQ ID NO: 311946 - DNA, 33 bp, Homo sapien
gacaccactgtgaccagagagatgacacatggg

SEQ ID NO: 311947 - DNA, 33 bp, Homo sapien
gggattaaaataggcaaagcgaaaaaccaggga

SEQ ID NO: 311948 - DNA, 33 bp, Homo sapien
gggattaaaataggcagagcgaaaaaccaggga

SEQ ID NO: 311949 - DNA, 33 bp, Homo sapien
ccagacttgattcaaacaggcaccaaatctcca

SEQ ID NO: 311950 - DNA, 33 bp, Homo sapien
ccagacttgattcaaataggcaccaaatctcca

SEQ ID NO: 311951 - DNA, 33 bp, Homo sapien
gaatccagagcccaaactttgacccactgtgca

SEQ ID NO: 311952 - DNA, 33 bp, Homo sapien
gaatccagagcccaaattttgacccactgtgca

SEQ ID NO: 311953 - DNA, 33 bp, Homo sapien
cacagtagactaaagacgcttctcaacttccag

SEQ ID NO: 311954 - DNA, 33 bp, Homo sapien
cacagtagactaaagatgcttctcaacttccag

SEQ ID NO: 311955 - DNA, 33 bp, Homo sapien
aatattttccaagtccaagaaaaatacattgct

SEQ ID NO: 311956 - DNA, 33 bp, Homo sapien
aatattttccaagtccgagaaaaatacattgct

SEQ ID NO: 311957 - DNA, 33 bp, Homo sapien
caaacaaatggaagaacgaacttgatacaaact

SEQ ID NO: 311958 - DNA, 33 bp, Homo sapien
caaacaaatggaagaatgaacttgatacaaact

SEQ ID NO: 311959 - DNA, 33 bp, Homo sapien
tgcaacctcaaactcccggacctaagttatcct

SEQ ID NO: 311960 - DNA, 33 bp, Homo sapien
tgcaacctcaaactcctggacctaagttatcct

SEQ ID NO: 311961 - DNA, 33 bp, Homo sapien
aaaagaaaaaattatgaaagagaagtgtaggat

SEQ ID NO: 311962 - DNA, 33 bp, Homo sapien
aaaagaaaaaattatgtaagagaagtgtaggat

SEQ ID NO: 311963 - DNA, 33 bp, Homo sapien
tataaacactttttcaagtcaataatattcaac

SEQ ID NO: 311964 - DNA, 33 bp, Homo sapien
tataaacactttttcatgtcaataatattcaac

SEQ ID NO: 311965 - DNA, 33 bp, Homo sapien
gagagctctgtatcaacaacacagcgagtcaca

SEQ ID NO: 311966 - DNA, 33 bp, Homo sapien
gagagctctgtatcaataacacagcgagtcaca

SEQ ID NO: 311967 - DNA, 33 bp, Homo sapien
gttctgtatccaaaataaaaatatgatcttgta

SEQ ID NO: 311968 - DNA, 33 bp, Homo sapien
gttctgtatccaaaatgaaaatatgatcttgta

SEQ ID NO: 311969 - DNA, 33 bp, Homo sapien
cgtggcatctgaggaccgtataattttgaaaat

SEQ ID NO: 311970 - DNA, 33 bp, Homo sapien
cgtggcatctgaggactgtataattttgaaaat

SEQ ID NO: 311971 - DNA, 33 bp, Homo sapien
tttttgaattcagacaaatagaaaagtagtcct

SEQ ID NO: 311972 - DNA, 33 bp, Homo sapien
tttttgaattcagacacatagaaaagtagtcct

SEQ ID NO: 311973 - DNA, 33 bp, Homo sapien
ttctcacatttggcagccagtcttcggtctgag

SEQ ID NO: 311974 - DNA, 33 bp, Homo sapien
ttctcacatttggcagtcagtcttcggtctgag

SEQ ID NO: 311975 - DNA, 33 bp, Homo sapien
catgggaagtagtactaagcacagtgtctggca

SEQ ID NO: 311976 - DNA, 33 bp, Homo sapien
catgggaagtagtacttagcacagtgtctggca

SEQ ID NO: 311977 - DNA, 33 bp, Homo sapien
gttatcatgttagagaaaataacctgagttact

SEQ ID NO: 311978 - DNA, 33 bp, Homo sapien
gttatcatgttagagataataacctgagttact

SEQ ID NO: 311979 - DNA, 33 bp, Homo sapien
agagatactggctgcaaagaaagaactaggcat

SEQ ID NO: 311980 - DNA, 33 bp, Homo sapien
agagatactggctgcagagaaagaactaggcat

SEQ ID NO: 311981 - DNA, 33 bp, Homo sapien
gaagtttcttgagtgaagatagtctccactttc

SEQ ID NO: 311982 - DNA, 33 bp, Homo sapien
gaagtttcttgagtgatgatagtctccactttc

SEQ ID NO: 311983 - DNA, 33 bp, Homo sapien
aactggaaggtcaccactgatgtcctaaccata

SEQ ID NO: 311984 - DNA, 33 bp, Homo sapien
aactggaaggtcaccattgatgtcctaaccata

SEQ ID NO: 311985 - DNA, 33 bp, Homo sapien
attctcattgctcccacatgcttacttccaatg

SEQ ID NO: 311986 - DNA, 33 bp, Homo sapien
attctcattgctcccatatgcttacttccaatg

SEQ ID NO: 311987 - DNA, 33 bp, Homo sapien
tgaccagtggtggtaaaggtgagaaggggaggc

SEQ ID NO: 311988 - DNA, 33 bp, Homo sapien
tgaccagtggtggtaacggtgagaaggggaggc

SEQ ID NO: 311989 - DNA, 33 bp, Homo sapien
accttgtccccatccaggctctactccaactcc

SEQ ID NO: 311990 - DNA, 33 bp, Homo sapien
accttgtccccatccatgctctactccaactcc

SEQ ID NO: 311991 - DNA, 33 bp, Homo sapien
aaattaaataagccaccgcttttaagtcctctt

SEQ ID NO: 311992 - DNA, 33 bp, Homo sapien
aaattaaataagccactgcttttaagtcctctt

SEQ ID NO: 311993 - DNA, 33 bp, Homo sapien
tgaaaattagacagaagaactcatttagcatag

SEQ ID NO: 311994 - DNA, 33 bp, Homo sapien
tgaaaattagacagaataactcatttagcatag

SEQ ID NO: 311995 - DNA, 33 bp, Homo sapien
aaatttttcttttctacacactccctcccagct

SEQ ID NO: 311996 - DNA, 33 bp, Homo sapien
aaatttttcttttctatacactccctcccagct

SEQ ID NO: 311997 - DNA, 33 bp, Homo sapien
caaattgcctaattagcacctctcatgaagaat

SEQ ID NO: 311998 - DNA, 33 bp, Homo sapien
caaattgcctaattagtacctctcatgaagaat

SEQ ID NO: 311999 - DNA, 33 bp, Homo sapien
ttcatagaagtccatgccatcctcttataattg

SEQ ID NO: 312000 - DNA, 33 bp, Homo sapien
ttcatagaagtccatgtcatcctcttataattg

SEQ ID NO: 312001 - DNA, 33 bp, Homo sapien
attatagcatggaactcaggctgcaaaacaaaa

SEQ ID NO: 312002 - DNA, 33 bp, Homo sapien
attatagcatggaacttaggctgcaaaacaaaa

SEQ ID NO: 312003 - DNA, 33 bp, Homo sapien
tctttaagtattaacaatctctgaggttctttt

SEQ ID NO: 312004 - DNA, 33 bp, Homo sapien
tctttaagtattaacagtctctgaggttctttt

SEQ ID NO: 312005 - DNA, 33 bp, Homo sapien
tcatcagaaggaaggaagattatgcagatgcag

SEQ ID NO: 312006 - DNA, 33 bp, Homo sapien
tcatcagaaggaaggacgattatgcagatgcag

SEQ ID NO: 312007 - DNA, 33 bp, Homo sapien
agttaccctgagttcacggagccaggataccta

SEQ ID NO: 312008 - DNA, 33 bp, Homo sapien
agttaccctgagttcatggagccaggataccta

SEQ ID NO: 312009 - DNA, 33 bp, Homo sapien
acttggcatcagtcagcatccccctttatcctt

SEQ ID NO: 312010 - DNA, 33 bp, Homo sapien
acttggcatcagtcagtatccccctttatcctt

SEQ ID NO: 312011 - DNA, 33 bp, Homo sapien
gcttccgatgcaacaactcagaacctcctgttt

SEQ ID NO: 312012 - DNA, 33 bp, Homo sapien
gcttccgatgcaacaattcagaacctcctgttt

SEQ ID NO: 312013 - DNA, 33 bp, Homo sapien
gcacaatatcctgaaggaaatgatagagagggc

SEQ ID NO: 312014 - DNA, 33 bp, Homo sapien
gcacaatatcctgaagtaaatgatagagagggc

SEQ ID NO: 312015 - DNA, 33 bp, Homo sapien
actgcagcatgtttaacaagccccttccaattc

SEQ ID NO: 312016 - DNA, 33 bp, Homo sapien
actgcagcatgtttaataagccccttccaattc

SEQ ID NO: 312017 - DNA, 33 bp, Homo sapien
ttcaggctccttacgccgacatagtctgtcctg

SEQ ID NO: 312018 - DNA, 33 bp, Homo sapien
ttcaggctccttacgctgacatagtctgtcctg

SEQ ID NO: 312019 - DNA, 33 bp, Homo sapien
aggaaaggtatgcttacgatgagctgacacatg

SEQ ID NO: 312020 - DNA, 33 bp, Homo sapien
aggaaaggtatgcttatgatgagctgacacatg

SEQ ID NO: 312021 - DNA, 33 bp, Homo sapien
atctggggatttgacaatgacaaaaggccaata

SEQ ID NO: 312022 - DNA, 33 bp, Homo sapien
atctggggatttgacagtgacaaaaggccaata

SEQ ID NO: 312023 - DNA, 33 bp, Homo sapien
tttgagacaaatgacactgaaaacacaacatac

SEQ ID NO: 312024 - DNA, 33 bp, Homo sapien
tttgagacaaatgacattgaaaacacaacatac

SEQ ID NO: 312025 - DNA, 33 bp, Homo sapien
atccagaaccttgactcaactgtgccaccccac

SEQ ID NO: 312026 - DNA, 33 bp, Homo sapien
atccagaaccttgactgaactgtgccaccccac

SEQ ID NO: 312027 - DNA, 33 bp, Homo sapien
tgctcaggaagaaaaaggtcgggctgcatctcc

SEQ ID NO: 312028 - DNA, 33 bp, Homo sapien
tgctcaggaagaaaaatgtcgggctgcatctcc

SEQ ID NO: 312029 - DNA, 33 bp, Homo sapien
ctaattcacctcatcacgtaaaagcaactctct

SEQ ID NO: 312030 - DNA, 33 bp, Homo sapien
ctaattcacctcatcatgtaaaagcaactctct

SEQ ID NO: 312031 - DNA, 33 bp, Homo sapien
ctctgtcttcatctggaactaatttccacccct

SEQ ID NO: 312032 - DNA, 33 bp, Homo sapien
ctctgtcttcatctgggactaatttccacccct

SEQ ID NO: 312033 - DNA, 33 bp, Homo sapien
ttatatttgtaggtaccatatgatctgccagga

SEQ ID NO: 312034 - DNA, 33 bp, Homo sapien
ttatatttgtaggtactatatgatctgccagga

SEQ ID NO: 312035 - DNA, 33 bp, Homo sapien
taagttctagtcgctccacatcttcatacacat

SEQ ID NO: 312036 - DNA, 33 bp, Homo sapien
taagttctagtcgctctacatcttcatacacat

SEQ ID NO: 312037 - DNA, 33 bp, Homo sapien
gaatatcattagctgacagggatgtgagtgaac

SEQ ID NO: 312038 - DNA, 33 bp, Homo sapien
gaatatcattagctgatagggatgtgagtgaac

SEQ ID NO: 312039 - DNA, 33 bp, Homo sapien
ttctcctacttttccaactgtccctgatttctt

SEQ ID NO: 312040 - DNA, 33 bp, Homo sapien
ttctcctacttttccatctgtccctgatttctt

SEQ ID NO: 312041 - DNA, 33 bp, Homo sapien
gtatcgatgctgcaaaaaagtcccaacacaata

SEQ ID NO: 312042 - DNA, 33 bp, Homo sapien
gtatcgatgctgcaaagaagtcccaacacaata

SEQ ID NO: 312043 - DNA, 33 bp, Homo sapien
tgattctacccaagataaagttgagccagtctg

SEQ ID NO: 312044 - DNA, 33 bp, Homo sapien
tgattctacccaagatgaagttgagccagtctg

SEQ ID NO: 312045 - DNA, 33 bp, Homo sapien
taagtatacacgaggaaatttataccaatttga

SEQ ID NO: 312046 - DNA, 33 bp, Homo sapien
taagtatacacgaggatatttataccaatttga

SEQ ID NO: 312047 - DNA, 33 bp, Homo sapien
taaggtgggaccgcaaccttcttcgcaccctat

SEQ ID NO: 312048 - DNA, 33 bp, Homo sapien
taaggtgggaccgcaagcttcttcgcaccctat

SEQ ID NO: 312049 - DNA, 33 bp, Homo sapien
ctggaagccagttcaacgtgaattaagttgcaa

SEQ ID NO: 312050 - DNA, 33 bp, Homo sapien
ctggaagccagttcaatgtgaattaagttgcaa

SEQ ID NO: 312051 - DNA, 33 bp, Homo sapien
gaagaaggaaaggaaaagtgcttttattctagt

SEQ ID NO: 312052 - DNA, 33 bp, Homo sapien
gaagaaggaaaggaaaggtgcttttattctagt

SEQ ID NO: 312053 - DNA, 33 bp, Homo sapien
ctcacctatggtatcaacaatctctatagttga

SEQ ID NO: 312054 - DNA, 33 bp, Homo sapien
ctcacctatggtatcatcaatctctatagttga

SEQ ID NO: 312055 - DNA, 33 bp, Homo sapien
acatgggttcacatagccaaagggttctggaac

SEQ ID NO: 312056 - DNA, 33 bp, Homo sapien
acatgggttcacataggcaaagggttctggaac

SEQ ID NO: 312057 - DNA, 33 bp, Homo sapien
ctgtaatttttcagagaagaaccctcataaatg

SEQ ID NO: 312058 - DNA, 33 bp, Homo sapien
ctgtaatttttcagaggagaaccctcataaatg

SEQ ID NO: 312059 - DNA, 33 bp, Homo sapien
ccctcataaatgttcaatacaacctttatatac

SEQ ID NO: 312060 - DNA, 33 bp, Homo sapien
ccctcataaatgttcagtacaacctttatatac

SEQ ID NO: 312061 - DNA, 33 bp, Homo sapien
gcataaagtgcagtcaatatacacatagcattt

SEQ ID NO: 312062 - DNA, 33 bp, Homo sapien
gcataaagtgcagtcattatacacatagcattt

SEQ ID NO: 312063 - DNA, 33 bp, Homo sapien
cattatgcgcttgcgtcaagctatatttttata

SEQ ID NO: 312064 - DNA, 33 bp, Homo sapien
cattatgcgcttgcgttaagctatatttttata

SEQ ID NO: 312065 - DNA, 33 bp, Homo sapien
tttccatagtcaaaaaatttttcctagtagtaa

SEQ ID NO: 312066 - DNA, 33 bp, Homo sapien
tttccatagtcaaaaattttttcctagtagtaa

SEQ ID NO: 312067 - DNA, 33 bp, Homo sapien
aagcagctgtactaccgcaagagtctttttctc

SEQ ID NO: 312068 - DNA, 33 bp, Homo sapien
aagcagctgtactacctcaagagtctttttctc

SEQ ID NO: 312069 - DNA, 33 bp, Homo sapien
ataggctggttcaaaactgtggcaattgtgtga

SEQ ID NO: 312070 - DNA, 33 bp, Homo sapien
ataggctggttcaaaagtgtggcaattgtgtga

SEQ ID NO: 312071 - DNA, 33 bp, Homo sapien
tactctttgagttttgaaatgaatcgatttttc

SEQ ID NO: 312072 - DNA, 33 bp, Homo sapien
tactctttgagttttggaatgaatcgatttttc

SEQ ID NO: 312073 - DNA, 33 bp, Homo sapien
ggaaatccaagaccaaggtgccagaaaattgga

SEQ ID NO: 312074 - DNA, 33 bp, Homo sapien
ggaaatccaagaccaatgtgccagaaaattgga

SEQ ID NO: 312075 - DNA, 33 bp, Homo sapien
agagatgagatgagaaaaacaaaatatagaggc

SEQ ID NO: 312076 - DNA, 33 bp, Homo sapien
agagatgagatgagaagaacaaaatatagaggc

SEQ ID NO: 312077 - DNA, 33 bp, Homo sapien
cttaggcctagatttcgctttgaagtatctctc

SEQ ID NO: 312078 - DNA, 33 bp, Homo sapien
cttaggcctagatttctctttgaagtatctctc

SEQ ID NO: 312079 - DNA, 33 bp, Homo sapien
tttggtgtagtgagaaaagcccacactcatcag

SEQ ID NO: 312080 - DNA, 33 bp, Homo sapien
tttggtgtagtgagaagagcccacactcatcag

SEQ ID NO: 312081 - DNA, 33 bp, Homo sapien
cccaaaactcgaagtccaaagtcatatccaaga

SEQ ID NO: 312082 - DNA, 33 bp, Homo sapien
cccaaaactcgaagtctaaagtcatatccaaga

SEQ ID NO: 312083 - DNA, 33 bp, Homo sapien
atattgatatttgtacaggtagtgtaacagtca

SEQ ID NO: 312084 - DNA, 33 bp, Homo sapien
atattgatatttgtacgggtagtgtaacagtca

SEQ ID NO: 312085 - DNA, 33 bp, Homo sapien
ccactagggcacctgaagataggcccactcagc

SEQ ID NO: 312086 - DNA, 33 bp, Homo sapien
ccactagggcacctgaggataggcccactcagc

SEQ ID NO: 312087 - DNA, 33 bp, Homo sapien
atagttgaagttgaccgctaacctgtgaagctt

SEQ ID NO: 312088 - DNA, 33 bp, Homo sapien
atagttgaagttgacctctaacctgtgaagctt

SEQ ID NO: 312089 - DNA, 33 bp, Homo sapien
ggctgttctaccatcacctgaattaatagtgta

SEQ ID NO: 312090 - DNA, 33 bp, Homo sapien
ggctgttctaccatcatctgaattaatagtgta

SEQ ID NO: 312091 - DNA, 33 bp, Homo sapien
catggacaccattcccagaaaaatgactccgta

SEQ ID NO: 312092 - DNA, 33 bp, Homo sapien
catggacaccattcccggaaaaatgactccgta

SEQ ID NO: 312093 - DNA, 33 bp, Homo sapien
aagtggcatattataaacgaggattgagaatat

SEQ ID NO: 312094 - DNA, 33 bp, Homo sapien
aagtggcatattataagcgaggattgagaatat

SEQ ID NO: 312095 - DNA, 33 bp, Homo sapien
tactctcttgctagtacataatcctacctgata

SEQ ID NO: 312096 - DNA, 33 bp, Homo sapien
tactctcttgctagtatataatcctacctgata

SEQ ID NO: 312097 - DNA, 33 bp, Homo sapien
ggaataaggcagtgaccacatttccactggggc

SEQ ID NO: 312098 - DNA, 33 bp, Homo sapien
ggaataaggcagtgactacatttccactggggc

SEQ ID NO: 312099 - DNA, 33 bp, Homo sapien
aactatacaaaagagaccaattcctagtcatgg

SEQ ID NO: 312100 - DNA, 33 bp, Homo sapien
aactatacaaaagagatcaattcctagtcatgg

SEQ ID NO: 312101 - DNA, 33 bp, Homo sapien
agataaatccacaaagccatactaataattgcc

SEQ ID NO: 312102 - DNA, 33 bp, Homo sapien
agataaatccacaaaggcatactaataattgcc

SEQ ID NO: 312103 - DNA, 33 bp, Homo sapien
taatttgtctctggtcactacaaaaaatcaact

SEQ ID NO: 312104 - DNA, 33 bp, Homo sapien
taatttgtctctggtcgctacaaaaaatcaact

SEQ ID NO: 312105 - DNA, 33 bp, Homo sapien
acctggaacaaaagaccataggcagagaaatac

SEQ ID NO: 312106 - DNA, 33 bp, Homo sapien
acctggaacaaaagactataggcagagaaatac

SEQ ID NO: 312107 - DNA, 33 bp, Homo sapien
gatagcatcaactgtacagaccaggatgacatg

SEQ ID NO: 312108 - DNA, 33 bp, Homo sapien
gatagcatcaactgtatagaccaggatgacatg

SEQ ID NO: 312109 - DNA, 33 bp, Homo sapien
acttgtatacacattaacagttgaggatcactg

SEQ ID NO: 312110 - DNA, 33 bp, Homo sapien
acttgtatacacattagcagttgaggatcactg

SEQ ID NO: 312111 - DNA, 33 bp, Homo sapien
gaagaggtacgaacgcaaaaatgaaagtgagaa

SEQ ID NO: 312112 - DNA, 33 bp, Homo sapien
gaagaggtacgaacgcgaaaatgaaagtgagaa

SEQ ID NO: 312113 - DNA, 33 bp, Homo sapien
tcttctgctacaggtacatcaagcagtacttga

SEQ ID NO: 312114 - DNA, 33 bp, Homo sapien
tcttctgctacaggtatatcaagcagtacttga

SEQ ID NO: 312115 - DNA, 33 bp, Homo sapien
ctggtatccaggacacaggcctatatgtaaaac

SEQ ID NO: 312116 - DNA, 33 bp, Homo sapien
ctggtatccaggacacgggcctatatgtaaaac

SEQ ID NO: 312117 - DNA, 33 bp, Homo sapien
agggttctacaacaccactcagatgctgatggg

SEQ ID NO: 312118 - DNA, 33 bp, Homo sapien
agggttctacaacaccgctcagatgctgatggg

SEQ ID NO: 312119 - DNA, 33 bp, Homo sapien
aaggttccagaaagaacagtgaggttgacatga

SEQ ID NO: 312120 - DNA, 33 bp, Homo sapien
aaggttccagaaagaatagtgaggttgacatga

SEQ ID NO: 312121 - DNA, 33 bp, Homo sapien
ctttggatcactgagaccattttgaatttatga

SEQ ID NO: 312122 - DNA, 33 bp, Homo sapien
ctttggatcactgagagcattttgaatttatga

SEQ ID NO: 312123 - DNA, 33 bp, Homo sapien
ggggaggcaaataatcaatttaattgtggtgtc

SEQ ID NO: 312124 - DNA, 33 bp, Homo sapien
ggggaggcaaataatcgatttaattgtggtgtc

SEQ ID NO: 312125 - DNA, 33 bp, Homo sapien
taaaacacaaccattccgaagggaaacataccc

SEQ ID NO: 312126 - DNA, 33 bp, Homo sapien
taaaacacaaccattctgaagggaaacataccc

SEQ ID NO: 312127 - DNA, 33 bp, Homo sapien
taaaacgattaggtgacatctcctgtcttctgc

SEQ ID NO: 312128 - DNA, 33 bp, Homo sapien
taaaacgattaggtgagatctcctgtcttctgc

SEQ ID NO: 312129 - DNA, 33 bp, Homo sapien
gcttccagagagatagaaaagaaaaagttctcg

SEQ ID NO: 312130 - DNA, 33 bp, Homo sapien
gcttccagagagatagtaaagaaaaagttctcg

SEQ ID NO: 312131 - DNA, 33 bp, Homo sapien
agataatctttttgcactaggctttgtcagaaa

SEQ ID NO: 312132 - DNA, 33 bp, Homo sapien
agataatctttttgcattaggctttgtcagaaa

SEQ ID NO: 312133 - DNA, 33 bp, Homo sapien
acaagcactgacctcaagataagcaatattgaa

SEQ ID NO: 312134 - DNA, 33 bp, Homo sapien
acaagcactgacctcaggataagcaatattgaa

SEQ ID NO: 312135 - DNA, 33 bp, Homo sapien
agagtcttcagatttgcagcattgtgtgaattt

SEQ ID NO: 312136 - DNA, 33 bp, Homo sapien
agagtcttcagatttgtagcattgtgtgaattt

SEQ ID NO: 312137 - DNA, 33 bp, Homo sapien
gagaccatattgttaactgtaaatggtatgtgt

SEQ ID NO: 312138 - DNA, 33 bp, Homo sapien
gagaccatattgttaattgtaaatggtatgtgt

SEQ ID NO: 312139 - DNA, 33 bp, Homo sapien
cctttctcttctgcaacttgatattttagttcg

SEQ ID NO: 312140 - DNA, 33 bp, Homo sapien
cctttctcttctgcaagttgatattttagttcg

SEQ ID NO: 312141 - DNA, 33 bp, Homo sapien
ttgttcactggccagcaagctttaagcgtggga

SEQ ID NO: 312142 - DNA, 33 bp, Homo sapien
ttgttcactggccagccagctttaagcgtggga

SEQ ID NO: 312143 - DNA, 33 bp, Homo sapien
ggacagacgagctcaacaaggacagagtaaact

SEQ ID NO: 312144 - DNA, 33 bp, Homo sapien
ggacagacgagctcaagaaggacagagtaaact

SEQ ID NO: 312145 - DNA, 33 bp, Homo sapien
cactgaaatttccgcaaattgattaggtcatag

SEQ ID NO: 312146 - DNA, 33 bp, Homo sapien
cactgaaatttccgcagattgattaggtcatag

SEQ ID NO: 312147 - DNA, 33 bp, Homo sapien
aacgagcttcatcctgaagataaacaattcaat

SEQ ID NO: 312148 - DNA, 33 bp, Homo sapien
aacgagcttcatcctgtagataaacaattcaat

SEQ ID NO: 312149 - DNA, 33 bp, Homo sapien
atctcctcaaccttaacagagaagcaaaaagca

SEQ ID NO: 312150 - DNA, 33 bp, Homo sapien
atctcctcaaccttaatagagaagcaaaaagca

SEQ ID NO: 312151 - DNA, 33 bp, Homo sapien
ggtagtggttttgaaccaggaagaaaaggaagt

SEQ ID NO: 312152 - DNA, 33 bp, Homo sapien
ggtagtggttttgaacgaggaagaaaaggaagt

SEQ ID NO: 312153 - DNA, 33 bp, Homo sapien
caccccaaaacagcaccatggcttccacataac

SEQ ID NO: 312154 - DNA, 33 bp, Homo sapien
caccccaaaacagcacgatggcttccacataac

SEQ ID NO: 312155 - DNA, 33 bp, Homo sapien
ttgccacgattacccaaactgaacctaaaatca

SEQ ID NO: 312156 - DNA, 33 bp, Homo sapien
ttgccacgattacccacactgaacctaaaatca

SEQ ID NO: 312157 - DNA, 33 bp, Homo sapien
cgtgcagggctgatcaccactttaaactggagt

SEQ ID NO: 312158 - DNA, 33 bp, Homo sapien
cgtgcagggctgatcatcactttaaactggagt

SEQ ID NO: 312159 - DNA, 33 bp, Homo sapien
gctgtgcattaggcaccagagtgtggtaaggtc

SEQ ID NO: 312160 - DNA, 33 bp, Homo sapien
gctgtgcattaggcactagagtgtggtaaggtc

SEQ ID NO: 312161 - DNA, 33 bp, Homo sapien
ttcagggtacaaaatgaaaatgttataaggttt

SEQ ID NO: 312162 - DNA, 33 bp, Homo sapien
ttcagggtacaaaatggaaatgttataaggttt

SEQ ID NO: 312163 - DNA, 33 bp, Homo sapien
cagacgatcatgaatcaaaatttgagaaacctt

SEQ ID NO: 312164 - DNA, 33 bp, Homo sapien
cagacgatcatgaatccaaatttgagaaacctt

SEQ ID NO: 312165 - DNA, 33 bp, Homo sapien
caaatcaagtattgcacgtttatatgatgttta

SEQ ID NO: 312166 - DNA, 33 bp, Homo sapien
caaatcaagtattgcatgtttatatgatgttta

SEQ ID NO: 312167 - DNA, 33 bp, Homo sapien
aactcagggaaaagacagaaacagagtatccat

SEQ ID NO: 312168 - DNA, 33 bp, Homo sapien
aactcagggaaaagacggaaacagagtatccat

SEQ ID NO: 312169 - DNA, 33 bp, Homo sapien
tacagtttaggactaaagaggtaacaactcaca

SEQ ID NO: 312170 - DNA, 33 bp, Homo sapien
tacagtttaggactaacgaggtaacaactcaca

SEQ ID NO: 312171 - DNA, 33 bp, Homo sapien
atgtagacactaagacagatcaaattcagatat

SEQ ID NO: 312172 - DNA, 33 bp, Homo sapien
atgtagacactaagacggatcaaattcagatat

SEQ ID NO: 312173 - DNA, 33 bp, Homo sapien
acctccagagaatatcaaaactactggttcttc

SEQ ID NO: 312174 - DNA, 33 bp, Homo sapien
acctccagagaatatcgaaactactggttcttc

SEQ ID NO: 312175 - DNA, 33 bp, Homo sapien
ggatgagaatcttcaaagtctcttccagtttta

SEQ ID NO: 312176 - DNA, 33 bp, Homo sapien
ggatgagaatcttcaaggtctcttccagtttta

SEQ ID NO: 312177 - DNA, 33 bp, Homo sapien
ctcaagaaatgtttgacggcttttgagtggaca

SEQ ID NO: 312178 - DNA, 33 bp, Homo sapien
ctcaagaaatgtttgatggcttttgagtggaca

SEQ ID NO: 312179 - DNA, 33 bp, Homo sapien
cttcagtttcccaggacagttacacatttcttt

SEQ ID NO: 312180 - DNA, 33 bp, Homo sapien
cttcagtttcccaggatagttacacatttcttt

SEQ ID NO: 312181 - DNA, 33 bp, Homo sapien
aatcaagttgttaaggaccagtgcagagacctc

SEQ ID NO: 312182 - DNA, 33 bp, Homo sapien
aatcaagttgttaagggccagtgcagagacctc

SEQ ID NO: 312183 - DNA, 33 bp, Homo sapien
aggagccagcataaaaacttggcctttgggttt

SEQ ID NO: 312184 - DNA, 33 bp, Homo sapien
aggagccagcataaaatcttggcctttgggttt

SEQ ID NO: 312185 - DNA, 33 bp, Homo sapien
ttaagtgaaacttgtaacatgcaaaaggaaaac

SEQ ID NO: 312186 - DNA, 33 bp, Homo sapien
ttaagtgaaacttgtagcatgcaaaaggaaaac

SEQ ID NO: 312187 - DNA, 33 bp, Homo sapien
tccagttgatactgtccattgaaaaaaccaagt

SEQ ID NO: 312188 - DNA, 33 bp, Homo sapien
tccagttgatactgtctattgaaaaaaccaagt

SEQ ID NO: 312189 - DNA, 33 bp, Homo sapien
gtttttaaaagtgataacaagtagatttctttc

SEQ ID NO: 312190 - DNA, 33 bp, Homo sapien
gtttttaaaagtgataccaagtagatttctttc

SEQ ID NO: 312191 - DNA, 33 bp, Homo sapien
tctccagtgcagcttacgtgagtaaaatgaagg

SEQ ID NO: 312192 - DNA, 33 bp, Homo sapien
tctccagtgcagcttatgtgagtaaaatgaagg

SEQ ID NO: 312193 - DNA, 33 bp, Homo sapien
gactgttgaaaagatgccaaaagattctgactt

SEQ ID NO: 312194 - DNA, 33 bp, Homo sapien
gactgttgaaaagatggcaaaagattctgactt

SEQ ID NO: 312195 - DNA, 33 bp, Homo sapien
ttggtgcctttctgagcagaaataagttgtaaa

SEQ ID NO: 312196 - DNA, 33 bp, Homo sapien
ttggtgcctttctgagtagaaataagttgtaaa

SEQ ID NO: 312197 - DNA, 33 bp, Homo sapien
ttaacacccacacctccagtgcctagtcatggc

SEQ ID NO: 312198 - DNA, 33 bp, Homo sapien
ttaacacccacacctctagtgcctagtcatggc

SEQ ID NO: 312199 - DNA, 33 bp, Homo sapien
taaaatctttggtgaaacaatgctaccatccat

SEQ ID NO: 312200 - DNA, 33 bp, Homo sapien
taaaatctttggtgaagcaatgctaccatccat

SEQ ID NO: 312201 - DNA, 33 bp, Homo sapien
atgtcccagtggtcccacttctctggctaaaac

SEQ ID NO: 312202 - DNA, 33 bp, Homo sapien
atgtcccagtggtcccgcttctctggctaaaac

SEQ ID NO: 312203 - DNA, 33 bp, Homo sapien
atctttaattcagctggaagttaagtgtaggta

SEQ ID NO: 312204 - DNA, 33 bp, Homo sapien
atctttaattcagctgtaagttaagtgtaggta

SEQ ID NO: 312205 - DNA, 33 bp, Homo sapien
aagaaaaaaagacatcacctgagcgaaacagat

SEQ ID NO: 312206 - DNA, 33 bp, Homo sapien
aagaaaaaaagacatcccctgagcgaaacagat

SEQ ID NO: 312207 - DNA, 33 bp, Homo sapien
gcacccaatgtaatcaacactgtgcaggagcca

SEQ ID NO: 312208 - DNA, 33 bp, Homo sapien
gcacccaatgtaatcagcactgtgcaggagcca

SEQ ID NO: 312209 - DNA, 33 bp, Homo sapien
actcaagctgatcagggatgctgaaatgtttct

SEQ ID NO: 312210 - DNA, 33 bp, Homo sapien
actcaagctgatcaggtatgctgaaatgtttct

SEQ ID NO: 312211 - DNA, 33 bp, Homo sapien
agagtagaggctttgaaaagttttacaatgtga

SEQ ID NO: 312212 - DNA, 33 bp, Homo sapien
agagtagaggctttgagaagttttacaatgtga

SEQ ID NO: 312213 - DNA, 33 bp, Homo sapien
tcaaggaaacaagtgacgtagggtaagagatga

SEQ ID NO: 312214 - DNA, 33 bp, Homo sapien
tcaaggaaacaagtgatgtagggtaagagatga

SEQ ID NO: 312215 - DNA, 33 bp, Homo sapien
gccaagtgatttgtccaaggtcagacataaaaa

SEQ ID NO: 312216 - DNA, 33 bp, Homo sapien
gccaagtgatttgtccgaggtcagacataaaaa

SEQ ID NO: 312217 - DNA, 33 bp, Homo sapien
ttaggaaacttaatgaacttattctctcattgc

SEQ ID NO: 312218 - DNA, 33 bp, Homo sapien
ttaggaaacttaatgaccttattctctcattgc

SEQ ID NO: 312219 - DNA, 33 bp, Homo sapien
atgctaagctacttggaagtatgagacactatc

SEQ ID NO: 312220 - DNA, 33 bp, Homo sapien
atgctaagctacttggcagtatgagacactatc

SEQ ID NO: 312221 - DNA, 33 bp, Homo sapien
ccaagtcaaaaacaacagagaagttctacagag

SEQ ID NO: 312222 - DNA, 33 bp, Homo sapien
ccaagtcaaaaacaactgagaagttctacagag

SEQ ID NO: 312223 - DNA, 33 bp, Homo sapien
aacaactcctcagtgaagacagaaatggtaaaa

SEQ ID NO: 312224 - DNA, 33 bp, Homo sapien
aacaactcctcagtgacgacagaaatggtaaaa

SEQ ID NO: 312225 - DNA, 33 bp, Homo sapien
atcttgttttttatcaactcactgcatggcttc

SEQ ID NO: 312226 - DNA, 33 bp, Homo sapien
atcttgttttttatcacctcactgcatggcttc

SEQ ID NO: 312227 - DNA, 33 bp, Homo sapien
atggcttcatagtaacaacgttctgtggagctg

SEQ ID NO: 312228 - DNA, 33 bp, Homo sapien
atggcttcatagtaaccacgttctgtggagctg

SEQ ID NO: 312229 - DNA, 33 bp, Homo sapien
tgactgtaattgtgtcaaaagcacagtatttta

SEQ ID NO: 312230 - DNA, 33 bp, Homo sapien
tgactgtaattgtgtcgaaagcacagtatttta

SEQ ID NO: 312231 - DNA, 33 bp, Homo sapien
aggaggaggaagagataagtatgaagagcacag

SEQ ID NO: 312232 - DNA, 33 bp, Homo sapien
aggaggaggaagagatgagtatgaagagcacag

SEQ ID NO: 312233 - DNA, 33 bp, Homo sapien
acatacaactttgcaacgagcaactttgtgcat

SEQ ID NO: 312234 - DNA, 33 bp, Homo sapien
acatacaactttgcaatgagcaactttgtgcat

SEQ ID NO: 312235 - DNA, 33 bp, Homo sapien
gtcatttcctgagccacgttcttatcagcagtg

SEQ ID NO: 312236 - DNA, 33 bp, Homo sapien
gtcatttcctgagccatgttcttatcagcagtg

SEQ ID NO: 312237 - DNA, 33 bp, Homo sapien
ttttttcaccttgtaacgctcttttgaattgaa

SEQ ID NO: 312238 - DNA, 33 bp, Homo sapien
ttttttcaccttgtaaggctcttttgaattgaa

SEQ ID NO: 312239 - DNA, 33 bp, Homo sapien
tcataattgagctaccagagactgagggtgctt

SEQ ID NO: 312240 - DNA, 33 bp, Homo sapien
tcataattgagctaccggagactgagggtgctt

SEQ ID NO: 312241 - DNA, 33 bp, Homo sapien
cccttctactaaccacaccatcatcaatgttga

SEQ ID NO: 312242 - DNA, 33 bp, Homo sapien
cccttctactaaccacgccatcatcaatgttga

SEQ ID NO: 312243 - DNA, 33 bp, Homo sapien
ctggctgaattgaagcccccctccaaaatttgt

SEQ ID NO: 312244 - DNA, 33 bp, Homo sapien
ctggctgaattgaagctcccctccaaaatttgt

SEQ ID NO: 312245 - DNA, 33 bp, Homo sapien
catcttatttgttaaaatctctattgcttagca

SEQ ID NO: 312246 - DNA, 33 bp, Homo sapien
catcttatttgttaaactctctattgcttagca

SEQ ID NO: 312247 - DNA, 33 bp, Homo sapien
gaaccaggaactgagacgtgcatgagaccagtc

SEQ ID NO: 312248 - DNA, 33 bp, Homo sapien
gaaccaggaactgagatgtgcatgagaccagtc

SEQ ID NO: 312249 - DNA, 33 bp, Homo sapien
ttgatctcagccctaacaaaatttgaagtagta

SEQ ID NO: 312250 - DNA, 33 bp, Homo sapien
ttgatctcagccctaagaaaatttgaagtagta

SEQ ID NO: 312251 - DNA, 33 bp, Homo sapien
ttgattaggacatagcagccctttgtgggatgt

SEQ ID NO: 312252 - DNA, 33 bp, Homo sapien
ttgattaggacatagcggccctttgtgggatgt

SEQ ID NO: 312253 - DNA, 33 bp, Homo sapien
tcctttcctttcattccaggggacaaggctact

SEQ ID NO: 312254 - DNA, 33 bp, Homo sapien
tcctttcctttcattctaggggacaaggctact

SEQ ID NO: 312255 - DNA, 33 bp, Homo sapien
aagagagcttcaaaaacagcctgggaccaccta

SEQ ID NO: 312256 - DNA, 33 bp, Homo sapien
aagagagcttcaaaaatagcctgggaccaccta

SEQ ID NO: 312257 - DNA, 33 bp, Homo sapien
tctgagcataccgcaccacctagctttcttcag

SEQ ID NO: 312258 - DNA, 33 bp, Homo sapien
tctgagcataccgcactacctagctttcttcag

SEQ ID NO: 312259 - DNA, 33 bp, Homo sapien
tggatttgtcattctaaaagccatcaggaaacc

SEQ ID NO: 312260 - DNA, 33 bp, Homo sapien
tggatttgtcattctagaagccatcaggaaacc

SEQ ID NO: 312261 - DNA, 33 bp, Homo sapien
gtatatgccacatcccacaggctccaactggca

SEQ ID NO: 312262 - DNA, 33 bp, Homo sapien
gtatatgccacatcccgcaggctccaactggca

SEQ ID NO: 312263 - DNA, 33 bp, Homo sapien
ggatgggagaggctccccacacatgaaggtaaa

SEQ ID NO: 312264 - DNA, 33 bp, Homo sapien
ggatgggagaggctcctcacacatgaaggtaaa

SEQ ID NO: 312265 - DNA, 33 bp, Homo sapien
ggaggctctccataaaactttggtatagagctg

SEQ ID NO: 312266 - DNA, 33 bp, Homo sapien
ggaggctctccataaatctttggtatagagctg

SEQ ID NO: 312267 - DNA, 33 bp, Homo sapien
ctaaagactagataaagatgttttcaggttgga

SEQ ID NO: 312268 - DNA, 33 bp, Homo sapien
ctaaagactagataaatatgttttcaggttgga

SEQ ID NO: 312269 - DNA, 33 bp, Homo sapien
caaggaagataaagacaactatcaaaggaatgg

SEQ ID NO: 312270 - DNA, 33 bp, Homo sapien
caaggaagataaagaccactatcaaaggaatgg

SEQ ID NO: 312271 - DNA, 33 bp, Homo sapien
tgaggattaaatgagcgaatgcacctactatac

SEQ ID NO: 312272 - DNA, 33 bp, Homo sapien
tgaggattaaatgagctaatgcacctactatac

SEQ ID NO: 312273 - DNA, 33 bp, Homo sapien
aatgcttagataatcacgcaaaaaattatagac

SEQ ID NO: 312274 - DNA, 33 bp, Homo sapien
aatgcttagataatcatgcaaaaaattatagac

SEQ ID NO: 312275 - DNA, 33 bp, Homo sapien
tacagcaagctttataatagaagatgacgaccc

SEQ ID NO: 312276 - DNA, 33 bp, Homo sapien
tacagcaagctttatagtagaagatgacgaccc

SEQ ID NO: 312277 - DNA, 33 bp, Homo sapien
aaaatcaccacatttcacttcctgaaaaaagat

SEQ ID NO: 312278 - DNA, 33 bp, Homo sapien
aaaatcaccacatttcgcttcctgaaaaaagat

SEQ ID NO: 312279 - DNA, 33 bp, Homo sapien
agatggactctttggacgttaagaacccaaagc

SEQ ID NO: 312280 - DNA, 33 bp, Homo sapien
agatggactctttggatgttaagaacccaaagc

SEQ ID NO: 312281 - DNA, 33 bp, Homo sapien
gagagatggtttaaaacagtgagggtcttggat

SEQ ID NO: 312282 - DNA, 33 bp, Homo sapien
gagagatggtttaaaatagtgagggtcttggat

SEQ ID NO: 312283 - DNA, 33 bp, Homo sapien
ttttagagcaaccttacgcagctgaaatccacg

SEQ ID NO: 312284 - DNA, 33 bp, Homo sapien
ttttagagcaaccttaggcagctgaaatccacg

SEQ ID NO: 312285 - DNA, 33 bp, Homo sapien
tgattatgaatgataactgatagaacaggcact

SEQ ID NO: 312286 - DNA, 33 bp, Homo sapien
tgattatgaatgataagtgatagaacaggcact

SEQ ID NO: 312287 - DNA, 33 bp, Homo sapien
gataaaagctaggacaatgtaggaaacttttta

SEQ ID NO: 312288 - DNA, 33 bp, Homo sapien
gataaaagctaggacagtgtaggaaacttttta

SEQ ID NO: 312289 - DNA, 33 bp, Homo sapien
catacctctgttatgaaattatgttctctctgc

SEQ ID NO: 312290 - DNA, 33 bp, Homo sapien
catacctctgttatgagattatgttctctctgc

SEQ ID NO: 312291 - DNA, 33 bp, Homo sapien
gaggtctcacatggaaataaggaagttatcagg

SEQ ID NO: 312292 - DNA, 33 bp, Homo sapien
gaggtctcacatggaattaaggaagttatcagg

SEQ ID NO: 312293 - DNA, 33 bp, Homo sapien
tactgtacatggaatacaggaaatagtttcata

SEQ ID NO: 312294 - DNA, 33 bp, Homo sapien
tactgtacatggaatataggaaatagtttcata

SEQ ID NO: 312295 - DNA, 33 bp, Homo sapien
tggggaggaacaaagaagtagttacaaattgtt

SEQ ID NO: 312296 - DNA, 33 bp, Homo sapien
tggggaggaacaaagatgtagttacaaattgtt

SEQ ID NO: 312297 - DNA, 33 bp, Homo sapien
attgcttatctagtgactatgctctttaaaatt

SEQ ID NO: 312298 - DNA, 33 bp, Homo sapien
attgcttatctagtgattatgctctttaaaatt

SEQ ID NO: 312299 - DNA, 33 bp, Homo sapien
ttaatctttacaaaaacgctctgcagtaggcaa

SEQ ID NO: 312300 - DNA, 33 bp, Homo sapien
ttaatctttacaaaaatgctctgcagtaggcaa

SEQ ID NO: 312301 - DNA, 33 bp, Homo sapien
ggtatcttctgtgaacacgctgggaaaacggga

SEQ ID NO: 312302 - DNA, 33 bp, Homo sapien
ggtatcttctgtgaacgcgctgggaaaacggga

SEQ ID NO: 312303 - DNA, 33 bp, Homo sapien
gtttaagagatttcacagctcagatattaaatg

SEQ ID NO: 312304 - DNA, 33 bp, Homo sapien
gtttaagagatttcacggctcagatattaaatg

SEQ ID NO: 312305 - DNA, 33 bp, Homo sapien
ctatttgcttgttaaaatctccagtttgccacg

SEQ ID NO: 312306 - DNA, 33 bp, Homo sapien
ctatttgcttgttaaattctccagtttgccacg

SEQ ID NO: 312307 - DNA, 33 bp, Homo sapien
gaactgaaatcgaaggcataatctaaatgcagg

SEQ ID NO: 312308 - DNA, 33 bp, Homo sapien
gaactgaaatcgaaggtataatctaaatgcagg

SEQ ID NO: 312309 - DNA, 33 bp, Homo sapien
aggttctcctgcagtacccggcacaaagatgcg

SEQ ID NO: 312310 - DNA, 33 bp, Homo sapien
aggttctcctgcagtatccggcacaaagatgcg

SEQ ID NO: 312311 - DNA, 33 bp, Homo sapien
gatttctcagccttcactacttacagctggtgt

SEQ ID NO: 312312 - DNA, 33 bp, Homo sapien
gatttctcagccttcagtacttacagctggtgt

SEQ ID NO: 312313 - DNA, 33 bp, Homo sapien
tggctctaacagcagcaagggctaaacagaaac

SEQ ID NO: 312314 - DNA, 33 bp, Homo sapien
tggctctaacagcagcgagggctaaacagaaac

SEQ ID NO: 312315 - DNA, 33 bp, Homo sapien
ggccaaactccaaggaacagttgggttctttcc

SEQ ID NO: 312316 - DNA, 33 bp, Homo sapien
ggccaaactccaaggatcagttgggttctttcc

SEQ ID NO: 312317 - DNA, 33 bp, Homo sapien
tattatttatgaaccccgacatcagtcccttgt

SEQ ID NO: 312318 - DNA, 33 bp, Homo sapien
tattatttatgaaccctgacatcagtcccttgt

SEQ ID NO: 312319 - DNA, 33 bp, Homo sapien
gcagtagttacggtaccgcacttctcataggga

SEQ ID NO: 312320 - DNA, 33 bp, Homo sapien
gcagtagttacggtactgcacttctcataggga

SEQ ID NO: 312321 - DNA, 33 bp, Homo sapien
cttcccttcattgccaaacttcttaaaagtgtg

SEQ ID NO: 312322 - DNA, 33 bp, Homo sapien
cttcccttcattgccagacttcttaaaagtgtg

SEQ ID NO: 312323 - DNA, 33 bp, Homo sapien
gcccagctccctcaacccttctttagaaactca

SEQ ID NO: 312324 - DNA, 33 bp, Homo sapien
gcccagctccctcaacgcttctttagaaactca

SEQ ID NO: 312325 - DNA, 33 bp, Homo sapien
aaatgaacagggaagaacatacgaaatggggta

SEQ ID NO: 312326 - DNA, 33 bp, Homo sapien
aaatgaacagggaagagcatacgaaatggggta

SEQ ID NO: 312327 - DNA, 33 bp, Homo sapien
tctaacggataaagcacgatagtttctatgtcc

SEQ ID NO: 312328 - DNA, 33 bp, Homo sapien
tctaacggataaagcatgatagtttctatgtcc

SEQ ID NO: 312329 - DNA, 33 bp, Homo sapien
ccatgttccatttgtgaaaaatctacatccata

SEQ ID NO: 312330 - DNA, 33 bp, Homo sapien
ccatgttccatttgtggaaaatctacatccata

SEQ ID NO: 312331 - DNA, 33 bp, Homo sapien
aaatcaggtttccccactataaaaatgtagagg

SEQ ID NO: 312332 - DNA, 33 bp, Homo sapien
aaatcaggtttccccagtataaaaatgtagagg

SEQ ID NO: 312333 - DNA, 33 bp, Homo sapien
ggctggctggagagtaaatcaggtctaaaagag

SEQ ID NO: 312334 - DNA, 33 bp, Homo sapien
ggctggctggagagtatatcaggtctaaaagag

SEQ ID NO: 312335 - DNA, 33 bp, Homo sapien
gctgttatcatcttggcccaaattttaaacgta

SEQ ID NO: 312336 - DNA, 33 bp, Homo sapien
gctgttatcatcttggtccaaattttaaacgta

SEQ ID NO: 312337 - DNA, 33 bp, Homo sapien
ctcaataaatttaacaacaaagcctggataaca

SEQ ID NO: 312338 - DNA, 33 bp, Homo sapien
ctcaataaatttaacatcaaagcctggataaca

SEQ ID NO: 312339 - DNA, 33 bp, Homo sapien
ccactcgccgagcaacaagagagaaaaagcttc

SEQ ID NO: 312340 - DNA, 33 bp, Homo sapien
ccactcgccgagcaaccagagagaaaaagcttc

SEQ ID NO: 312341 - DNA, 33 bp, Homo sapien
tggtcatctttgtatcccccagcttctggcgaa

SEQ ID NO: 312342 - DNA, 33 bp, Homo sapien
tggtcatctttgtatctcccagcttctggcgaa

SEQ ID NO: 312343 - DNA, 33 bp, Homo sapien
caatacacatttattaagcatctactttcgcca

SEQ ID NO: 312344 - DNA, 33 bp, Homo sapien
caatacacatttattaggcatctactttcgcca

SEQ ID NO: 312345 - DNA, 33 bp, Homo sapien
cttggttccaggcctcagaaaatgtctgcagct

SEQ ID NO: 312346 - DNA, 33 bp, Homo sapien
cttggttccaggcctcggaaaatgtctgcagct

SEQ ID NO: 312347 - DNA, 33 bp, Homo sapien
ggatgtgcaatcaaaacgatacggtgtcttgag

SEQ ID NO: 312348 - DNA, 33 bp, Homo sapien
ggatgtgcaatcaaaaggatacggtgtcttgag

SEQ ID NO: 312349 - DNA, 33 bp, Homo sapien
ttcctgtggttccctgaaagctgcagcgtcttt

SEQ ID NO: 312350 - DNA, 33 bp, Homo sapien
ttcctgtggttccctgcaagctgcagcgtcttt

SEQ ID NO: 312351 - DNA, 33 bp, Homo sapien
tgaaatcatatcaaacaactatgtgtacaactt

SEQ ID NO: 312352 - DNA, 33 bp, Homo sapien
tgaaatcatatcaaaccactatgtgtacaactt

SEQ ID NO: 312353 - DNA, 33 bp, Homo sapien
ttcagagaataccataaagaaagtgaaagcaca

SEQ ID NO: 312354 - DNA, 33 bp, Homo sapien
ttcagagaataccatagagaaagtgaaagcaca

SEQ ID NO: 312355 - DNA, 33 bp, Homo sapien
ttgaccaggagcaccacgttgtttctgacacaa

SEQ ID NO: 312356 - DNA, 33 bp, Homo sapien
ttgaccaggagcaccatgttgtttctgacacaa

SEQ ID NO: 312357 - DNA, 33 bp, Homo sapien
gatattggagttttacaatgttgggttgcccac

SEQ ID NO: 312358 - DNA, 33 bp, Homo sapien
gatattggagttttacgatgttgggttgcccac

SEQ ID NO: 312359 - DNA, 33 bp, Homo sapien
taatgaggagtgctcaaaacacaaaagtaaatt

SEQ ID NO: 312360 - DNA, 33 bp, Homo sapien
taatgaggagtgctcagaacacaaaagtaaatt

SEQ ID NO: 312361 - DNA, 33 bp, Homo sapien
gtaagattttataaaacgtaagcagaaaccaaa

SEQ ID NO: 312362 - DNA, 33 bp, Homo sapien
gtaagattttataaaatgtaagcagaaaccaaa

SEQ ID NO: 312363 - DNA, 33 bp, Homo sapien
caaagcacaatctttaagagtcatgattagagg

SEQ ID NO: 312364 - DNA, 33 bp, Homo sapien
caaagcacaatctttaggagtcatgattagagg

SEQ ID NO: 312365 - DNA, 33 bp, Homo sapien
gggatgggtggagttaaataactaaacactgaa

SEQ ID NO: 312366 - DNA, 33 bp, Homo sapien
gggatgggtggagttacataactaaacactgaa

SEQ ID NO: 312367 - DNA, 33 bp, Homo sapien
ttctgagccaatccagacagattgaaacctaca

SEQ ID NO: 312368 - DNA, 33 bp, Homo sapien
ttctgagccaatccagtcagattgaaacctaca

SEQ ID NO: 312369 - DNA, 33 bp, Homo sapien
aggcaagcgttcattacggagtgacatgtccct

SEQ ID NO: 312370 - DNA, 33 bp, Homo sapien
aggcaagcgttcattatggagtgacatgtccct

SEQ ID NO: 312371 - DNA, 33 bp, Homo sapien
ccagcagtaggtaccactcatgatcagcacaca

SEQ ID NO: 312372 - DNA, 33 bp, Homo sapien
ccagcagtaggtaccagtcatgatcagcacaca

SEQ ID NO: 312373 - DNA, 33 bp, Homo sapien
atgacagcagggaccacgtatgctttttctcat

SEQ ID NO: 312374 - DNA, 33 bp, Homo sapien
atgacagcagggaccatgtatgctttttctcat

SEQ ID NO: 312375 - DNA, 33 bp, Homo sapien
aaatggttttcttttccctagcatcctctcaat

SEQ ID NO: 312376 - DNA, 33 bp, Homo sapien
aaatggttttcttttctctagcatcctctcaat

SEQ ID NO: 312377 - DNA, 33 bp, Homo sapien
aatcattttaagtgaactaagaagctacagaaa

SEQ ID NO: 312378 - DNA, 33 bp, Homo sapien
aatcattttaagtgaattaagaagctacagaaa

SEQ ID NO: 312379 - DNA, 33 bp, Homo sapien
gaacagggaccatcacactcgtaaccccagtgt

SEQ ID NO: 312380 - DNA, 33 bp, Homo sapien
gaacagggaccatcacgctcgtaaccccagtgt

SEQ ID NO: 312381 - DNA, 33 bp, Homo sapien
catgcccctgtaattaaggtatgcattaaaaaa

SEQ ID NO: 312382 - DNA, 33 bp, Homo sapien
catgcccctgtaattacggtatgcattaaaaaa

SEQ ID NO: 312383 - DNA, 33 bp, Homo sapien
gaaagccaaaacctctgaaaagcatgacttaca

SEQ ID NO: 312384 - DNA, 33 bp, Homo sapien
gaaagccaaaacctcttaaaagcatgacttaca

SEQ ID NO: 312385 - DNA, 33 bp, Homo sapien
gctgagcggggtgacacatcgcaggggtgctta

SEQ ID NO: 312386 - DNA, 33 bp, Homo sapien
gctgagcggggtgacatatcgcaggggtgctta

SEQ ID NO: 312387 - DNA, 33 bp, Homo sapien
aggcatgggaggttaaagagacttccacattga

SEQ ID NO: 312388 - DNA, 33 bp, Homo sapien
aggcatgggaggttaaggagacttccacattga

SEQ ID NO: 312389 - DNA, 33 bp, Homo sapien
aggtaggagtagaatacggtgaggcatgggagg

SEQ ID NO: 312390 - DNA, 33 bp, Homo sapien
aggtaggagtagaatatggtgaggcatgggagg

SEQ ID NO: 312391 - DNA, 33 bp, Homo sapien
cttggtgcaaaacaatgatctgctttctatcat

SEQ ID NO: 312392 - DNA, 33 bp, Homo sapien
cttggtgcaaaacaattatctgctttctatcat

SEQ ID NO: 312393 - DNA, 33 bp, Homo sapien
ctcatccccctcatcaacttagcaggaagttgc

SEQ ID NO: 312394 - DNA, 33 bp, Homo sapien
ctcatccccctcatcaccttagcaggaagttgc

SEQ ID NO: 312395 - DNA, 33 bp, Homo sapien
accaaatcatagttcaataccctgctatatatt

SEQ ID NO: 312396 - DNA, 33 bp, Homo sapien
accaaatcatagttcagtaccctgctatatatt

SEQ ID NO: 312397 - DNA, 33 bp, Homo sapien
taaagctgtaagaagcactgatttattggcttt

SEQ ID NO: 312398 - DNA, 33 bp, Homo sapien
taaagctgtaagaagcgctgatttattggcttt

SEQ ID NO: 312399 - DNA, 33 bp, Homo sapien
tcgtatgggcacaacacatgataaggcaagtca

SEQ ID NO: 312400 - DNA, 33 bp, Homo sapien
tcgtatgggcacaacatatgataaggcaagtca

SEQ ID NO: 312401 - DNA, 33 bp, Homo sapien
agattacaacgcctaagtccctctgaatacctg

SEQ ID NO: 312402 - DNA, 33 bp, Homo sapien
agattacaacgcctaattccctctgaatacctg

SEQ ID NO: 312403 - DNA, 33 bp, Homo sapien
aagattctctctctacaccgtgtggccactccc

SEQ ID NO: 312404 - DNA, 33 bp, Homo sapien
aagattctctctctacgccgtgtggccactccc

SEQ ID NO: 312405 - DNA, 33 bp, Homo sapien
ttcagtcatgagttgacggacatttaggttttt

SEQ ID NO: 312406 - DNA, 33 bp, Homo sapien
ttcagtcatgagttgatggacatttaggttttt

SEQ ID NO: 312407 - DNA, 33 bp, Homo sapien
gaagtggaataattagaaccttcatacactaac

SEQ ID NO: 312408 - DNA, 33 bp, Homo sapien
gaagtggaataattagtaccttcatacactaac

SEQ ID NO: 312409 - DNA, 33 bp, Homo sapien
gagaagaatgtgatagacatcagttttcaaaat

SEQ ID NO: 312410 - DNA, 33 bp, Homo sapien
gagaagaatgtgataggcatcagttttcaaaat

SEQ ID NO: 312411 - DNA, 33 bp, Homo sapien
actcagcaataacatacataataacggcaatag

SEQ ID NO: 312412 - DNA, 33 bp, Homo sapien
actcagcaataacatatataataacggcaatag

SEQ ID NO: 312413 - DNA, 33 bp, Homo sapien
cttagggaccatcttcaattgatatgcttattt

SEQ ID NO: 312414 - DNA, 33 bp, Homo sapien
cttagggaccatcttccattgatatgcttattt

SEQ ID NO: 312415 - DNA, 33 bp, Homo sapien
actgtagggcgatagagacatgttctggtggct

SEQ ID NO: 312416 - DNA, 33 bp, Homo sapien
actgtagggcgatagatacatgttctggtggct

SEQ ID NO: 312417 - DNA, 33 bp, Homo sapien
gggggtttatttggaccatcagtggtaactgat

SEQ ID NO: 312418 - DNA, 33 bp, Homo sapien
gggggtttatttggactatcagtggtaactgat

SEQ ID NO: 312419 - DNA, 33 bp, Homo sapien
aatgtctatacattcaaactaggcaattctaaa

SEQ ID NO: 312420 - DNA, 33 bp, Homo sapien
aatgtctatacattcatactaggcaattctaaa

SEQ ID NO: 312421 - DNA, 33 bp, Homo sapien
ttccaagatattggcaagagcaattcaaagagt

SEQ ID NO: 312422 - DNA, 33 bp, Homo sapien
ttccaagatattggcaggagcaattcaaagagt

SEQ ID NO: 312423 - DNA, 33 bp, Homo sapien
ttgttctgatctgaaacggagagaatcagaatg

SEQ ID NO: 312424 - DNA, 33 bp, Homo sapien
ttgttctgatctgaaatggagagaatcagaatg

SEQ ID NO: 312425 - DNA, 33 bp, Homo sapien
aagatcctagaaatggaagaaacatcagtgtgt

SEQ ID NO: 312426 - DNA, 33 bp, Homo sapien
aagatcctagaaatgggagaaacatcagtgtgt

SEQ ID NO: 312427 - DNA, 33 bp, Homo sapien
aaatatttatcctgacccattatgtacacatca

SEQ ID NO: 312428 - DNA, 33 bp, Homo sapien
aaatatttatcctgactcattatgtacacatca

SEQ ID NO: 312429 - DNA, 33 bp, Homo sapien
acatacttcattaggggcacttggcatatttgg

SEQ ID NO: 312430 - DNA, 33 bp, Homo sapien
acatacttcattagggtcacttggcatatttgg

SEQ ID NO: 312431 - DNA, 33 bp, Homo sapien
atatgaaacatggttacggctgatacaagaaag

SEQ ID NO: 312432 - DNA, 33 bp, Homo sapien
atatgaaacatggttatggctgatacaagaaag

SEQ ID NO: 312433 - DNA, 33 bp, Homo sapien
aacctgggtttaagttaaaatcagctaaagaca

SEQ ID NO: 312434 - DNA, 33 bp, Homo sapien
aacctgggtttaagttgaaatcagctaaagaca

SEQ ID NO: 312435 - DNA, 33 bp, Homo sapien
agaaggaaagaacacactaattcggcaaggttt

SEQ ID NO: 312436 - DNA, 33 bp, Homo sapien
agaaggaaagaacacattaattcggcaaggttt

SEQ ID NO: 312437 - DNA, 33 bp, Homo sapien
gtagtggtgatgtaacagtgcagctggttttct

SEQ ID NO: 312438 - DNA, 33 bp, Homo sapien
gtagtggtgatgtaacggtgcagctggttttct

SEQ ID NO: 312439 - DNA, 33 bp, Homo sapien
tgtttattttgcaagccatacataaatacagtc

SEQ ID NO: 312440 - DNA, 33 bp, Homo sapien
tgtttattttgcaagctatacataaatacagtc

SEQ ID NO: 312441 - DNA, 33 bp, Homo sapien
aaacaggataaggacaagagaggtgaataaaaa

SEQ ID NO: 312442 - DNA, 33 bp, Homo sapien
aaacaggataaggacacgagaggtgaataaaaa

SEQ ID NO: 312443 - DNA, 33 bp, Homo sapien
gtcaacaaatattcaccggaatgtgtggagacc

SEQ ID NO: 312444 - DNA, 33 bp, Homo sapien
gtcaacaaatattcactggaatgtgtggagacc

SEQ ID NO: 312445 - DNA, 33 bp, Homo sapien
tttacccttgtaacacagagtggcaatgtctgt

SEQ ID NO: 312446 - DNA, 33 bp, Homo sapien
tttacccttgtaacaccgagtggcaatgtctgt

SEQ ID NO: 312447 - DNA, 33 bp, Homo sapien
agtgtattagtctgaaatctgctactaataaag

SEQ ID NO: 312448 - DNA, 33 bp, Homo sapien
agtgtattagtctgaactctgctactaataaag

SEQ ID NO: 312449 - DNA, 33 bp, Homo sapien
attggatcttgaaccaaaaaaagggcattagtg

SEQ ID NO: 312450 - DNA, 33 bp, Homo sapien
attggatcttgaaccagaaaaagggcattagtg

SEQ ID NO: 312451 - DNA, 33 bp, Homo sapien
gaattttacaaaatgacagttgtattcgcatgg

SEQ ID NO: 312452 - DNA, 33 bp, Homo sapien
gaattttacaaaatgatagttgtattcgcatgg

SEQ ID NO: 312453 - DNA, 33 bp, Homo sapien
gaagacatacagatacagactcaactccagatg

SEQ ID NO: 312454 - DNA, 33 bp, Homo sapien
gaagacatacagatacggactcaactccagatg

SEQ ID NO: 312455 - DNA, 33 bp, Homo sapien
tgacccgacctctggtaaattaatgcgcaaaat

SEQ ID NO: 312456 - DNA, 33 bp, Homo sapien
tgacccgacctctggtgaattaatgcgcaaaat

SEQ ID NO: 312457 - DNA, 33 bp, Homo sapien
gactgaaaaggaacaaccacgttaacatctctt

SEQ ID NO: 312458 - DNA, 33 bp, Homo sapien
gactgaaaaggaacaagcacgttaacatctctt

SEQ ID NO: 312459 - DNA, 33 bp, Homo sapien
acagataaaatacacacagcttagttaatattc

SEQ ID NO: 312460 - DNA, 33 bp, Homo sapien
acagataaaatacacatagcttagttaatattc

SEQ ID NO: 312461 - DNA, 33 bp, Homo sapien
ggatgcctaactggtacaaaagtgttccgactc

SEQ ID NO: 312462 - DNA, 33 bp, Homo sapien
ggatgcctaactggtataaaagtgttccgactc

SEQ ID NO: 312463 - DNA, 33 bp, Homo sapien
acgtaaggagagttcaaagcagtgttgaaagga

SEQ ID NO: 312464 - DNA, 33 bp, Homo sapien
acgtaaggagagttcatagcagtgttgaaagga

SEQ ID NO: 312465 - DNA, 33 bp, Homo sapien
acttcttggatttgacaggatgtaatgatagaa

SEQ ID NO: 312466 - DNA, 33 bp, Homo sapien
acttcttggatttgacgggatgtaatgatagaa

SEQ ID NO: 312467 - DNA, 33 bp, Homo sapien
aattcttcacctaatcaaaaacgtaaggggagg

SEQ ID NO: 312468 - DNA, 33 bp, Homo sapien
aattcttcacctaatcgaaaacgtaaggggagg

SEQ ID NO: 312469 - DNA, 33 bp, Homo sapien
gacagaatgaaacttacagacctgagctcagca

SEQ ID NO: 312470 - DNA, 33 bp, Homo sapien
gacagaatgaaacttagagacctgagctcagca

SEQ ID NO: 312471 - DNA, 33 bp, Homo sapien
atagcaaaataagcccaaagcaggcaaaagaaa

SEQ ID NO: 312472 - DNA, 33 bp, Homo sapien
atagcaaaataagcccgaagcaggcaaaagaaa

SEQ ID NO: 312473 - DNA, 33 bp, Homo sapien
gatgatctaatatacactgtaaaatgattacca

SEQ ID NO: 312474 - DNA, 33 bp, Homo sapien
gatgatctaatatacagtgtaaaatgattacca

SEQ ID NO: 312475 - DNA, 33 bp, Homo sapien
tcattctttatagcaactagtcagggaatacta

SEQ ID NO: 312476 - DNA, 33 bp, Homo sapien
tcattctttatagcaattagtcagggaatacta

SEQ ID NO: 312477 - DNA, 33 bp, Homo sapien
gtcatcagagtgctaaagatctgggcactatgt

SEQ ID NO: 312478 - DNA, 33 bp, Homo sapien
gtcatcagagtgctaacgatctgggcactatgt

SEQ ID NO: 312479 - DNA, 33 bp, Homo sapien
tcatcaggattcctcaccaatcacagggttccc

SEQ ID NO: 312480 - DNA, 33 bp, Homo sapien
tcatcaggattcctcatcaatcacagggttccc

SEQ ID NO: 312481 - DNA, 33 bp, Homo sapien
ttgatatttgtgtcaacaacttctttccttttt

SEQ ID NO: 312482 - DNA, 33 bp, Homo sapien
ttgatatttgtgtcaataacttctttccttttt

SEQ ID NO: 312483 - DNA, 33 bp, Homo sapien
gccaacctcatgcctccccagtgtctggaacta

SEQ ID NO: 312484 - DNA, 33 bp, Homo sapien
gccaacctcatgcctcgccagtgtctggaacta

SEQ ID NO: 312485 - DNA, 33 bp, Homo sapien
gagatgaaatacagcacagtgagaaaaagcaca

SEQ ID NO: 312486 - DNA, 33 bp, Homo sapien
gagatgaaatacagcatagtgagaaaaagcaca

SEQ ID NO: 312487 - DNA, 33 bp, Homo sapien
gtaaagcatcttgccaacgtaaacctaattctg

SEQ ID NO: 312488 - DNA, 33 bp, Homo sapien
gtaaagcatcttgccagcgtaaacctaattctg

SEQ ID NO: 312489 - DNA, 33 bp, Homo sapien
ctacgtgttctgtaagcccagtaatgcatttta

SEQ ID NO: 312490 - DNA, 33 bp, Homo sapien
ctacgtgttctgtaagtccagtaatgcatttta

SEQ ID NO: 312491 - DNA, 33 bp, Homo sapien; identical to SEQ ID NO: 312489

SEQ ID NO: 312492 - DNA, 33 bp, Homo sapien; identical to SEQ ID NO: 312490

SEQ ID NO: 312493 - DNA, 33 bp, Homo sapien
gaaagaaggaatggatgagaaatgcaatcattt

SEQ ID NO: 312494 - DNA, 33 bp, Homo sapien
gaaagaaggaatggattagaaatgcaatcattt

SEQ ID NO: 312495 - DNA, 33 bp, Homo sapien
ggaacccagcatgaacaaatcaatcccttaagt

SEQ ID NO: 312496 - DNA, 33 bp, Homo sapien
ggaacccagcatgaaccaatcaatcccttaagt

SEQ ID NO: 312497 - DNA, 33 bp, Homo sapien
aatccctacgtgaagtcaaaggtcaaattgggg

SEQ ID NO: 312498 - DNA, 33 bp, Homo sapien
aatccctacgtgaagttaaaggtcaaattgggg

SEQ ID NO: 312499 - DNA, 33 bp, Homo sapien
aaggtcaaattggggaaaagatgaaacatatgt

SEQ ID NO: 312500 - DNA, 33 bp, Homo sapien
aaggtcaaattggggacaagatgaaacatatgt

SEQ ID NO: 312501 - DNA, 33 bp, Homo sapien
taacagtaaggctagaaacactttgaccgatac

SEQ ID NO: 312502 - DNA, 33 bp, Homo sapien
taacagtaaggctagagacactttgaccgatac

SEQ ID NO: 312503 - DNA, 33 bp, Homo sapien
aaagaagaattaacaccagtcattcacaaactc

SEQ ID NO: 312504 - DNA, 33 bp, Homo sapien
aaagaagaattaacacgagtcattcacaaactc

SEQ ID NO: 312505 - DNA, 33 bp, Homo sapien
atgcagagtaatgacacgatccgatctatgtat

SEQ ID NO: 312506 - DNA, 33 bp, Homo sapien
atgcagagtaatgacaggatccgatctatgtat

SEQ ID NO: 312507 - DNA, 33 bp, Homo sapien
catgctgagggaaggacagtatgatataggcag

SEQ ID NO: 312508 - DNA, 33 bp, Homo sapien
catgctgagggaaggagagtatgatataggcag

SEQ ID NO: 312509 - DNA, 33 bp, Homo sapien
ccccttgaccactgcacgaattggagttcaaag

SEQ ID NO: 312510 - DNA, 33 bp, Homo sapien
ccccttgaccactgcatgaattggagttcaaag

SEQ ID NO: 312511 - DNA, 33 bp, Homo sapien
tgttgcaatcaaagagaataccccttgaccact

SEQ ID NO: 312512 - DNA, 33 bp, Homo sapien
tgttgcaatcaaagaggataccccttgaccact

SEQ ID NO: 312513 - DNA, 33 bp, Homo sapien
acccagcctgatctaaaatttatattaccagcc

SEQ ID NO: 312514 - DNA, 33 bp, Homo sapien
acccagcctgatctaacatttatattaccagcc

SEQ ID NO: 312515 - DNA, 33 bp, Homo sapien
gcttccaaatcagtaaagccagttgggcagatt

SEQ ID NO: 312516 - DNA, 33 bp, Homo sapien
gcttccaaatcagtaaggccagttgggcagatt

SEQ ID NO: 312517 - DNA, 33 bp, Homo sapien
agttttctctacacaagaagccaagtataaagt

SEQ ID NO: 312518 - DNA, 33 bp, Homo sapien
agttttctctacacaataagccaagtataaagt

SEQ ID NO: 312519 - DNA, 33 bp, Homo sapien
tttttcatgagctctgaagttttttgagggata

SEQ ID NO: 312520 - DNA, 33 bp, Homo sapien
tttttcatgagctctggagttttttgagggata

SEQ ID NO: 312521 - DNA, 33 bp, Homo sapien
ctagggagaggaaatacgtgaaggtcaaattca

SEQ ID NO: 312522 - DNA, 33 bp, Homo sapien
ctagggagaggaaatatgtgaaggtcaaattca

SEQ ID NO: 312523 - DNA, 33 bp, Homo sapien
actgcagcctaagtaaatctttcaaaatacaaa

SEQ ID NO: 312524 - DNA, 33 bp, Homo sapien
actgcagcctaagtaactctttcaaaatacaaa

SEQ ID NO: 312525 - DNA, 33 bp, Homo sapien
atataacaaaagaacactgctaaacaggcattc

SEQ ID NO: 312526 - DNA, 33 bp, Homo sapien
atataacaaaagaacattgctaaacaggcattc

SEQ ID NO: 312527 - DNA, 33 bp, Homo sapien
tatccttttaagtctaccttacattctaccttt

SEQ ID NO: 312528 - DNA, 33 bp, Homo sapien
tatccttttaagtctatcttacattctaccttt

SEQ ID NO: 312529 - DNA, 33 bp, Homo sapien
ggccatcaacttaaaccaaccaggctaaatgtt

SEQ ID NO: 312530 - DNA, 33 bp, Homo sapien
ggccatcaacttaaacgaaccaggctaaatgtt

SEQ ID NO: 312531 - DNA, 33 bp, Homo sapien
ggccactgcctgtgggcattgtctccaggtgct

SEQ ID NO: 312532 - DNA, 33 bp, Homo sapien
ggccactgcctgtggggattgtctccaggtgct

SEQ ID NO: 312533 - DNA, 33 bp, Homo sapien
ccagcctttcattttgcacactggaagaaggtg

SEQ ID NO: 312534 - DNA, 33 bp, Homo sapien
ccagcctttcattttgtacactggaagaaggtg

SEQ ID NO: 312535 - DNA, 33 bp, Homo sapien
tgaacttcggtagaggaacaacagaaggctttg

SEQ ID NO: 312536 - DNA, 33 bp, Homo sapien
tgaacttcggtagaggtacaacagaaggctttg

SEQ ID NO: 312537 - DNA, 33 bp, Homo sapien
acatgaacagcctgtacaaaattttccttttcc

SEQ ID NO: 312538 - DNA, 33 bp, Homo sapien
acatgaacagcctgtataaaattttccttttcc

SEQ ID NO: 312539 - DNA, 33 bp, Homo sapien
gaagcgttggcaaatgacacagccagtctgtag

SEQ ID NO: 312540 - DNA, 33 bp, Homo sapien
gaagcgttggcaaatggcacagccagtctgtag

SEQ ID NO: 312541 - DNA, 33 bp, Homo sapien
gtctgtagtgattcaaatgcttttgtaaagtta

SEQ ID NO: 312542 - DNA, 33 bp, Homo sapien
gtctgtagtgattcaactgcttttgtaaagtta

SEQ ID NO: 312543 - DNA, 33 bp, Homo sapien
ttacacaccacatagacgaatgtcaggaacaca

SEQ ID NO: 312544 - DNA, 33 bp, Homo sapien
ttacacaccacatagatgaatgtcaggaacaca

SEQ ID NO: 312545 - DNA, 33 bp, Homo sapien
gaacttagaactaaacagacttgatcattccta

SEQ ID NO: 312546 - DNA, 33 bp, Homo sapien
gaacttagaactaaacggacttgatcattccta

SEQ ID NO: 312547 - DNA, 33 bp, Homo sapien
cctcttagctttctcaaagaagattatgtgaca

SEQ ID NO: 312548 - DNA, 33 bp, Homo sapien
cctcttagctttctcagagaagattatgtgaca

SEQ ID NO: 312549 - DNA, 33 bp, Homo sapien
tgactaggttgatcccaaaaaatgccacaaaac

SEQ ID NO: 312550 - DNA, 33 bp, Homo sapien
tgactaggttgatcccgaaaaatgccacaaaac

SEQ ID NO: 312551 - DNA, 33 bp, Homo sapien
tgggtagagagagtagcaggcactggggagcac

SEQ ID NO: 312552 - DNA, 33 bp, Homo sapien
tgggtagagagagtagtaggcactggggagcac

SEQ ID NO: 312553 - DNA, 33 bp, Homo sapien
ccacttcccagtttgacatttcttttgtctgtt

SEQ ID NO: 312554 - DNA, 33 bp, Homo sapien
ccacttcccagtttgatatttcttttgtctgtt

SEQ ID NO: 312555 - DNA, 33 bp, Homo sapien
ccatgcaaatggttacaaaaacagagcatggta

SEQ ID NO: 312556 - DNA, 33 bp, Homo sapien
ccatgcaaatggttacgaaaacagagcatggta

SEQ ID NO: 312557 - DNA, 33 bp, Homo sapien
aattccaaaattctcaaatccagtttaaatgtg

SEQ ID NO: 312558 - DNA, 33 bp, Homo sapien
aattccaaaattctcatatccagtttaaatgtg

SEQ ID NO: 312559 - DNA, 33 bp, Homo sapien
ttaacattatacttcacggtaaaagactgaatg

SEQ ID NO: 312560 - DNA, 33 bp, Homo sapien
ttaacattatacttcatggtaaaagactgaatg

SEQ ID NO: 312561 - DNA, 33 bp, Homo sapien
gagccaaagccgcgacacttctgtttcttcgct

SEQ ID NO: 312562 - DNA, 33 bp, Homo sapien
gagccaaagccgcgacccttctgtttcttcgct

SEQ ID NO: 312563 - DNA, 33 bp, Homo sapien
tcagttgctctccagaccctaatatttccctgc

SEQ ID NO: 312564 - DNA, 33 bp, Homo sapien
tcagttgctctccagatcctaatatttccctgc

SEQ ID NO: 312565 - DNA, 33 bp, Homo sapien
gttttgacaaatagaaccatgtatctaccatca

SEQ ID NO: 312566 - DNA, 33 bp, Homo sapien
gttttgacaaatagaatcatgtatctaccatca

SEQ ID NO: 312567 - DNA, 33 bp, Homo sapien
cttatgtaatagactgaaaatggccccccagaa

SEQ ID NO: 312568 - DNA, 33 bp, Homo sapien
cttatgtaatagactggaaatggccccccagaa

SEQ ID NO: 312569 - DNA, 33 bp, Homo sapien
ccttctggcttctcaaataagtttcctaaggaa

SEQ ID NO: 312570 - DNA, 33 bp, Homo sapien
ccttctggcttctcaagtaagtttcctaaggaa

SEQ ID NO: 312571 - DNA, 33 bp, Homo sapien
caaaagtcagttatcaaacaaaaagagatgtag

SEQ ID NO: 312572 - DNA, 33 bp, Homo sapien
caaaagtcagttatcagacaaaaagagatgtag

SEQ ID NO: 312573 - DNA, 33 bp, Homo sapien
agacagttaattcttgaaaaaggacattaacct

SEQ ID NO: 312574 - DNA, 33 bp, Homo sapien
agacagttaattcttgcaaaaggacattaacct

SEQ ID NO: 312575 - DNA, 33 bp, Homo sapien
actggcaagaaataagaatatcaactcgcatac

SEQ ID NO: 312576 - DNA, 33 bp, Homo sapien
actggcaagaaataagcatatcaactcgcatac

SEQ ID NO: 312577 - DNA, 33 bp, Homo sapien
gtctcttagttattgcacctgactttaggataa

SEQ ID NO: 312578 - DNA, 33 bp, Homo sapien
gtctcttagttattgcgcctgactttaggataa

SEQ ID NO: 312579 - DNA, 33 bp, Homo sapien
tgacaatagctgcaccaagatggaaggtcggag

SEQ ID NO: 312580 - DNA, 33 bp, Homo sapien
tgacaatagctgcaccgagatggaaggtcggag

SEQ ID NO: 312581 - DNA, 33 bp, Homo sapien
tagtataatatgaagacggagagataggtaggg

SEQ ID NO: 312582 - DNA, 33 bp, Homo sapien
tagtataatatgaagatggagagataggtaggg

SEQ ID NO: 312583 - DNA, 33 bp, Homo sapien
accactgtgatgaataatacctataagcaataa

SEQ ID NO: 312584 - DNA, 33 bp, Homo sapien
accactgtgatgaatagtacctataagcaataa

SEQ ID NO: 312585 - DNA, 33 bp, Homo sapien
aatgaaggtacaaggaaaggattatcagctatt

SEQ ID NO: 312586 - DNA, 33 bp, Homo sapien
aatgaaggtacaaggagaggattatcagctatt

SEQ ID NO: 312587 - DNA, 33 bp, Homo sapien
acaaaggggaaaagagaagctttacagtgtaga

SEQ ID NO: 312588 - DNA, 33 bp, Homo sapien
acaaaggggaaaagagtagctttacagtgtaga

SEQ ID NO: 312589 - DNA, 33 bp, Homo sapien
gcttaggtttagaagcacagtagtcaaacttta

SEQ ID NO: 312590 - DNA, 33 bp, Homo sapien
gcttaggtttagaagcgcagtagtcaaacttta

SEQ ID NO: 312591 - DNA, 33 bp, Homo sapien
aaaacaggatacatcacacagatacaaaagaaa

SEQ ID NO: 312592 - DNA, 33 bp, Homo sapien
aaaacaggatacatcatacagatacaaaagaaa

SEQ ID NO: 312593 - DNA, 33 bp, Homo sapien
aaaatttgctccttcccattttatggagtgagt

SEQ ID NO: 312594 - DNA, 33 bp, Homo sapien
aaaatttgctccttccgattttatggagtgagt

SEQ ID NO: 312595 - DNA, 33 bp, Homo sapien
gcagggtggatgttgggcaattaatgattattt

SEQ ID NO: 312596 - DNA, 33 bp, Homo sapien
gcagggtggatgttggtcaattaatgattattt

SEQ ID NO: 312597 - DNA, 33 bp, Homo sapien
tttggcagccactcacggtaaaactcttcccta

SEQ ID NO: 312598 - DNA, 33 bp, Homo sapien
tttggcagccactcactgtaaaactcttcccta

SEQ ID NO: 312599 - DNA, 33 bp, Homo sapien
aggaagcagataagaaaagagccctccactaac

SEQ ID NO: 312600 - DNA, 33 bp, Homo sapien
aggaagcagataagaagagagccctccactaac

SEQ ID NO: 312601 - DNA, 33 bp, Homo sapien
gactgcatccagctaacaccccatgtgagaaac

SEQ ID NO: 312602 - DNA, 33 bp, Homo sapien
gactgcatccagctaataccccatgtgagaaac

SEQ ID NO: 312603 - DNA, 33 bp, Homo sapien
tctcgaggaaacaaaacaaaacgcttttgcaca

SEQ ID NO: 312604 - DNA, 33 bp, Homo sapien
tctcgaggaaacaaaagaaaacgcttttgcaca

SEQ ID NO: 312605 - DNA, 33 bp, Homo sapien
gactgattgtccagatcaaacagcacaactgaa

SEQ ID NO: 312606 - DNA, 33 bp, Homo sapien
gactgattgtccagatgaaacagcacaactgaa

SEQ ID NO: 312607 - DNA, 33 bp, Homo sapien
ctcccggtaccagcatcatcaagatcacctggg

SEQ ID NO: 312608 - DNA, 33 bp, Homo sapien
ctcccggtaccagcattatcaagatcacctggg

SEQ ID NO: 312609 - DNA, 33 bp, Homo sapien
gcaggatacatattcaaatcccggagtttagta

SEQ ID NO: 312610 - DNA, 33 bp, Homo sapien
gcaggatacatattcagatcccggagtttagta

SEQ ID NO: 312611 - DNA, 33 bp, Homo sapien
atgatgagttgtgataaaggatttgaaaaatac

SEQ ID NO: 312612 - DNA, 33 bp, Homo sapien
atgatgagttgtgatataggatttgaaaaatac

SEQ ID NO: 312613 - DNA, 33 bp, Homo sapien
gctgacagacaaaaaaatactagttgcagtaga

SEQ ID NO: 312614 - DNA, 33 bp, Homo sapien
gctgacagacaaaaaagtactagttgcagtaga

SEQ ID NO: 312615 - DNA, 33 bp, Homo sapien
atcttagtagactggaactagagattctccttg

SEQ ID NO: 312616 - DNA, 33 bp, Homo sapien
atcttagtagactggagctagagattctccttg

SEQ ID NO: 312617 - DNA, 33 bp, Homo sapien
gcttaaaacaatcacaatcttatcttgctcatg

SEQ ID NO: 312618 - DNA, 33 bp, Homo sapien
gcttaaaacaatcacagtcttatcttgctcatg

SEQ ID NO: 312619 - DNA, 33 bp, Homo sapien
aagtgttcttccttgccgagccaagacacagat

SEQ ID NO: 312620 - DNA, 33 bp, Homo sapien
aagtgttcttccttgctgagccaagacacagat

SEQ ID NO: 312621 - DNA, 33 bp, Homo sapien
gacgtacgtatatgcactcagtgatgttcacac

SEQ ID NO: 312622 - DNA, 33 bp, Homo sapien
gacgtacgtatatgcagtcagtgatgttcacac

SEQ ID NO: 312623 - DNA, 33 bp, Homo sapien
aaaactggaaaatgggacagtctcacaagtgtc

SEQ ID NO: 312624 - DNA, 33 bp, Homo sapien
aaaactggaaaatgggtcagtctcacaagtgtc

SEQ ID NO: 312625 - DNA, 33 bp, Homo sapien
tgctacaaattagtaaagaccttagttgtgctt

SEQ ID NO: 312626 - DNA, 33 bp, Homo sapien
tgctacaaattagtaatgaccttagttgtgctt

SEQ ID NO: 312627 - DNA, 33 bp, Homo sapien
gttttgccttttgaatcacgcagccatcaagtg

SEQ ID NO: 312628 - DNA, 33 bp, Homo sapien
gttttgccttttgaattacgcagccatcaagtg

SEQ ID NO: 312629 - DNA, 33 bp, Homo sapien
cacaataaaaccaaaccgacgagacaggagcat

SEQ ID NO: 312630 - DNA, 33 bp, Homo sapien
cacaataaaaccaaactgacgagacaggagcat

SEQ ID NO: 312631 - DNA, 33 bp, Homo sapien
gagcatcaacaatgtcaaagagagacaaacccc

SEQ ID NO: 312632 - DNA, 33 bp, Homo sapien
gagcatcaacaatgtcgaagagagacaaacccc

SEQ ID NO: 312633 - DNA, 33 bp, Homo sapien
ttcacatcacgaaaaacaaactgtaataatagg

SEQ ID NO: 312634 - DNA, 33 bp, Homo sapien
ttcacatcacgaaaaataaactgtaataatagg

SEQ ID NO: 312635 - DNA, 33 bp, Homo sapien
tgccagaaatcccccacgtctgcagtaaaagat

SEQ ID NO: 312636 - DNA, 33 bp, Homo sapien
tgccagaaatcccccaggtctgcagtaaaagat

SEQ ID NO: 312637 - DNA, 33 bp, Homo sapien
caacactcaaagctacacctaccaaaaagctgc

SEQ ID NO: 312638 - DNA, 33 bp, Homo sapien
caacactcaaagctacgcctaccaaaaagctgc

SEQ ID NO: 312639 - DNA, 33 bp, Homo sapien
ataaacacttcagatacccttctaggtctgaaa

SEQ ID NO: 312640 - DNA, 33 bp, Homo sapien
ataaacacttcagatatccttctaggtctgaaa

SEQ ID NO: 312641 - DNA, 33 bp, Homo sapien
gttatgaggtacctgacctgaatataactaaaa

SEQ ID NO: 312642 - DNA, 33 bp, Homo sapien
gttatgaggtacctgagctgaatataactaaaa

SEQ ID NO: 312643 - DNA, 33 bp, Homo sapien
tgtgaattatgtatgacgtttttcggtgatagt

SEQ ID NO: 312644 - DNA, 33 bp, Homo sapien
tgtgaattatgtatgatgtttttcggtgatagt

SEQ ID NO: 312645 - DNA, 33 bp, Homo sapien
tactcttggcactggcaaacttataaacaatag

SEQ ID NO: 312646 - DNA, 33 bp, Homo sapien
tactcttggcactggcgaacttataaacaatag

SEQ ID NO: 312647 - DNA, 33 bp, Homo sapien
gaggcttgtatcccgcacttctctagcggcaga

SEQ ID NO: 312648 - DNA, 33 bp, Homo sapien
gaggcttgtatcccgcgcttctctagcggcaga

SEQ ID NO: 312649 - DNA, 33 bp, Homo sapien
cttcaaaccctatgcaaaagtttttttcttttt

SEQ ID NO: 312650 - DNA, 33 bp, Homo sapien
cttcaaaccctatgcagaagtttttttcttttt

SEQ ID NO: 312651 - DNA, 33 bp, Homo sapien
tatgtacaaaattgtgccaattaaaaaagacta

SEQ ID NO: 312652 - DNA, 33 bp, Homo sapien
tatgtacaaaattgtgtcaattaaaaaagacta

SEQ ID NO: 312653 - DNA, 33 bp, Homo sapien
tagcaaatggtttcatcagccaataaatattag

SEQ ID NO: 312654 - DNA, 33 bp, Homo sapien
tagcaaatggtttcatgagccaataaatattag

SEQ ID NO: 312655 - DNA, 33 bp, Homo sapien
ttggtctctgtgccccgcaacattgattttcac

SEQ ID NO: 312656 - DNA, 33 bp, Homo sapien
ttggtctctgtgcccctcaacattgattttcac

SEQ ID NO: 312657 - DNA, 33 bp, Homo sapien
gactgcccaaaggtgactagcctaggttgacaa

SEQ ID NO: 312658 - DNA, 33 bp, Homo sapien
gactgcccaaaggtgagtagcctaggttgacaa

SEQ ID NO: 312659 - DNA, 33 bp, Homo sapien
atcagaccttactccacccagaatggccattat

SEQ ID NO: 312660 - DNA, 33 bp, Homo sapien
atcagaccttactccatccagaatggccattat

SEQ ID NO: 312661 - DNA, 33 bp, Homo sapien
gttcaacaccagtgggacaacatagtaagaccc

SEQ ID NO: 312662 - DNA, 33 bp, Homo sapien
gttcaacaccagtgggtcaacatagtaagaccc

SEQ ID NO: 312663 - DNA, 33 bp, Homo sapien
tttgaacttaactctgcaggggtaaatgaattt

SEQ ID NO: 312664 - DNA, 33 bp, Homo sapien
tttgaacttaactctgtaggggtaaatgaattt

SEQ ID NO: 312665 - DNA, 33 bp, Homo sapien
tggattttgatgcccaagtgaagaatgtaattt

SEQ ID NO: 312666 - DNA, 33 bp, Homo sapien
tggattttgatgcccaggtgaagaatgtaattt

SEQ ID NO: 312667 - DNA, 33 bp, Homo sapien
atgacttaccacaccactgaagatactacatga

SEQ ID NO: 312668 - DNA, 33 bp, Homo sapien
atgacttaccacaccattgaagatactacatga

SEQ ID NO: 312669 - DNA, 33 bp, Homo sapien
ttagcagtacttcaaggaataagtgatagtggc

SEQ ID NO: 312670 - DNA, 33 bp, Homo sapien
ttagcagtacttcaagtaataagtgatagtggc

SEQ ID NO: 312671 - DNA, 33 bp, Homo sapien
ttatggcctcccctaaaagtatctgctcctccc

SEQ ID NO: 312672 - DNA, 33 bp, Homo sapien
ttatggcctcccctaacagtatctgctcctccc

SEQ ID NO: 312673 - DNA, 33 bp, Homo sapien
tatccgcagtgcctaacgctaagtactcactaa

SEQ ID NO: 312674 - DNA, 33 bp, Homo sapien
tatccgcagtgcctaatgctaagtactcactaa

SEQ ID NO: 312675 - DNA, 33 bp, Homo sapien
gcaaatgacaattacaagaaagaggtgctagct

SEQ ID NO: 312676 - DNA, 33 bp, Homo sapien
gcaaatgacaattacaggaaagaggtgctagct

SEQ ID NO: 312677 - DNA, 33 bp, Homo sapien
aagcaaaactctaaaaactagaatttgctctat

SEQ ID NO: 312678 - DNA, 33 bp, Homo sapien
aagcaaaactctaaaatctagaatttgctctat

SEQ ID NO: 312679 - DNA, 33 bp, Homo sapien
gatatcattatcacacaaagtctgtagtttaca

SEQ ID NO: 312680 - DNA, 33 bp, Homo sapien
gatatcattatcacacgaagtctgtagtttaca

SEQ ID NO: 312681 - DNA, 33 bp, Homo sapien
ctttaccaaccactcaaaatctacctcttgtat

SEQ ID NO: 312682 - DNA, 33 bp, Homo sapien
ctttaccaaccactcacaatctacctcttgtat

SEQ ID NO: 312683 - DNA, 33 bp, Homo sapien
tcaacagtgattatgacaaattgatgttctgaa

SEQ ID NO: 312684 - DNA, 33 bp, Homo sapien
tcaacagtgattatgataaattgatgttctgaa

SEQ ID NO: 312685 - DNA, 33 bp, Homo sapien
tttgttcatgtcaagcagctggataaatgggtt

SEQ ID NO: 312686 - DNA, 33 bp, Homo sapien
tttgttcatgtcaagccgctggataaatgggtt

SEQ ID NO: 312687 - DNA, 33 bp, Homo sapien
ttcttagctctagccaccattaggaatggaggc

SEQ ID NO: 312688 - DNA, 33 bp, Homo sapien
ttcttagctctagccatcattaggaatggaggc

SEQ ID NO: 312689 - DNA, 33 bp, Homo sapien
atcagtcaatagaagcagactcagaaaggacag

SEQ ID NO: 312690 - DNA, 33 bp, Homo sapien
atcagtcaatagaagccgactcagaaaggacag

SEQ ID NO: 312691 - DNA, 33 bp, Homo sapien
tgaaggtttctggcaaccctgtatggggcaagt

SEQ ID NO: 312692 - DNA, 33 bp, Homo sapien
tgaaggtttctggcaatcctgtatggggcaagt

SEQ ID NO: 312693 - DNA, 33 bp, Homo sapien
atgtacgaggagatgaaggttgttttcaaaatg

SEQ ID NO: 312694 - DNA, 33 bp, Homo sapien
atgtacgaggagatgagggttgttttcaaaatg

SEQ ID NO: 312695 - DNA, 33 bp, Homo sapien
tttatgaatgaggaaacgggggttagatattgt

SEQ ID NO: 312696 - DNA, 33 bp, Homo sapien
tttatgaatgaggaaatgggggttagatattgt

SEQ ID NO: 312697 - DNA, 33 bp, Homo sapien
gcaacaattcaaaaaactcacaattcaaaatac

SEQ ID NO: 312698 - DNA, 33 bp, Homo sapien
gcaacaattcaaaaaattcacaattcaaaatac

SEQ ID NO: 312699 - DNA, 33 bp, Homo sapien
gttggcttcatgcttgcaggctgtaggacttta

SEQ ID NO: 312700 - DNA, 33 bp, Homo sapien
gttggcttcatgcttgtaggctgtaggacttta

SEQ ID NO: 312701 - DNA, 33 bp, Homo sapien
acttcaccttcttatacgggtacagtttgtggc

SEQ ID NO: 312702 - DNA, 33 bp, Homo sapien
acttcaccttcttatatgggtacagtttgtggc

SEQ ID NO: 312703 - DNA, 33 bp, Homo sapien
ttctttactcatccctaagagtcagtttctcat

SEQ ID NO: 312704 - DNA, 33 bp, Homo sapien
ttctttactcatccctgagagtcagtttctcat

SEQ ID NO: 312705 - DNA, 33 bp, Homo sapien
atgcgaagtcataggagaattttgaacagaagt

SEQ ID NO: 312706 - DNA, 33 bp, Homo sapien
atgcgaagtcataggataattttgaacagaagt

SEQ ID NO: 312707 - DNA, 33 bp, Homo sapien
ggtaatatatggaagaacctagaatactgactg

SEQ ID NO: 312708 - DNA, 33 bp, Homo sapien
ggtaatatatggaagagcctagaatactgactg

SEQ ID NO: 312709 - DNA, 33 bp, Homo sapien
gtgctctgaaattttaggagtgttcatattagc

SEQ ID NO: 312710 - DNA, 33 bp, Homo sapien
gtgctctgaaattttatgagtgttcatattagc

SEQ ID NO: 312711 - DNA, 33 bp, Homo sapien
gtgctaatgcaatcaacggtaccaaaaatgaag

SEQ ID NO: 312712 - DNA, 33 bp, Homo sapien
gtgctaatgcaatcaatggtaccaaaaatgaag

SEQ ID NO: 312713 - DNA, 33 bp, Homo sapien
taatattttctccataaactgtatcttacatat

SEQ ID NO: 312714 - DNA, 33 bp, Homo sapien
taatattttctccatatactgtatcttacatat

SEQ ID NO: 312715 - DNA, 33 bp, Homo sapien
aaacaggcctaaaaaaaattggacaatctagcc

SEQ ID NO: 312716 - DNA, 33 bp, Homo sapien
aaacaggcctaaaaaacattggacaatctagcc

SEQ ID NO: 312717 - DNA, 33 bp, Homo sapien
ctaccaaaaatcagccactataaaacccaatga

SEQ ID NO: 312718 - DNA, 33 bp, Homo sapien
ctaccaaaaatcagccgctataaaacccaatga

SEQ ID NO: 312719 - DNA, 33 bp, Homo sapien; identical to SEQ ID NO: 312717

SEQ ID NO: 312720 - DNA, 33 bp, Homo sapien; identical to SEQ ID NO: 312718

SEQ ID NO: 312721 - DNA, 33 bp, Homo sapien
cttggtggtgtccttaagataatgagttatgag

SEQ ID NO: 312722 - DNA, 33 bp, Homo sapien
cttggtggtgtccttacgataatgagttatgag

SEQ ID NO: 312723 - DNA, 33 bp, Homo sapien
actgcttcagcaaaaaatacaaattccttggga

SEQ ID NO: 312724 - DNA, 33 bp, Homo sapien
actgcttcagcaaaaactacaaattccttggga

SEQ ID NO: 312725 - DNA, 33 bp, Homo sapien
gagagaatccaccaaactgttttaatttcagag

SEQ ID NO: 312726 - DNA, 33 bp, Homo sapien
gagagaatccaccaaagtgttttaatttcagag

SEQ ID NO: 312727 - DNA, 33 bp, Homo sapien
aaaaaggatggcttaacggtcctaacgacacaa

SEQ ID NO: 312728 - DNA, 33 bp, Homo sapien
aaaaaggatggcttaatggtcctaacgacacaa

SEQ ID NO: 312729 - DNA, 33 bp, Homo sapien
ctggatccactacagccgcatgaaacccacagc

SEQ ID NO: 312730 - DNA, 33 bp, Homo sapien
ctggatccactacagctgcatgaaacccacagc

SEQ ID NO: 312731 - DNA, 33 bp, Homo sapien
tttagagtatcggatgaacatttacaaatagaa

SEQ ID NO: 312732 - DNA, 33 bp, Homo sapien
tttagagtatcggatggacatttacaaatagaa

SEQ ID NO: 312733 - DNA, 33 bp, Homo sapien
tgggtttctcctacccagactgggaaatgggat

SEQ ID NO: 312734 - DNA, 33 bp, Homo sapien
tgggtttctcctacccggactgggaaatgggat

SEQ ID NO: 312735 - DNA, 33 bp, Homo sapien
tccccacctgaggggaacataaactgagctaat

SEQ ID NO: 312736 - DNA, 33 bp, Homo sapien
tccccacctgaggggagcataaactgagctaat

SEQ ID NO: 312737 - DNA, 33 bp, Homo sapien
tggcaggagggcttccaatgagttagttctgag

SEQ ID NO: 312738 - DNA, 33 bp, Homo sapien
tggcaggagggcttccgatgagttagttctgag

SEQ ID NO: 312739 - DNA, 33 bp, Homo sapien
tgatttccagaatcacagtcaataaccctaagc

SEQ ID NO: 312740 - DNA, 33 bp, Homo sapien
tgatttccagaatcacggtcaataaccctaagc

SEQ ID NO: 312741 - DNA, 33 bp, Homo sapien
gggcagtgttggttcaaagccagctcccaccag

SEQ ID NO: 312742 - DNA, 33 bp, Homo sapien
gggcagtgttggttcagagccagctcccaccag

SEQ ID NO: 312743 - DNA, 33 bp, Homo sapien
gtttaattaacttaccaggccctctgttagtcg

SEQ ID NO: 312744 - DNA, 33 bp, Homo sapien
gtttaattaacttaccgggccctctgttagtcg

SEQ ID NO: 312745 - DNA, 33 bp, Homo sapien
catattgatgatcacaactactatgtacataca

SEQ ID NO: 312746 - DNA, 33 bp, Homo sapien
catattgatgatcacacctactatgtacataca

SEQ ID NO: 312747 - DNA, 33 bp, Homo sapien
gctgacaagaagccaaaagttacagcagctgct

SEQ ID NO: 312748 - DNA, 33 bp, Homo sapien
gctgacaagaagccaagagttacagcagctgct

SEQ ID NO: 312749 - DNA, 33 bp, Homo sapien
atccattccttcacgcacattggcctcaatgaa

SEQ ID NO: 312750 - DNA, 33 bp, Homo sapien
atccattccttcacgcgcattggcctcaatgaa

SEQ ID NO: 312751 - DNA, 33 bp, Homo sapien
acaggacctcagtcaaatgacttaacgtttctg

SEQ ID NO: 312752 - DNA, 33 bp, Homo sapien
acaggacctcagtcaagtgacttaacgtttctg

SEQ ID NO: 312753 - DNA, 33 bp, Homo sapien
agaggggctagctcagcctatcaatggcttcag

SEQ ID NO: 312754 - DNA, 33 bp, Homo sapien
agaggggctagctcagtctatcaatggcttcag

SEQ ID NO: 312755 - DNA, 33 bp, Homo sapien
attcacacagcaagagcccacaagcttcagagg

SEQ ID NO: 312756 - DNA, 33 bp, Homo sapien
attcacacagcaagagtccacaagcttcagagg

SEQ ID NO: 312757 - DNA, 33 bp, Homo sapien
ttcagagtgaaggagacgcttcatggagggcag

SEQ ID NO: 312758 - DNA, 33 bp, Homo sapien
ttcagagtgaaggagatgcttcatggagggcag

SEQ ID NO: 312759 - DNA, 33 bp, Homo sapien
ccatcgtgtgcctgtaccatagtttattcaact

SEQ ID NO: 312760 - DNA, 33 bp, Homo sapien
ccatcgtgtgcctgtatcatagtttattcaact

SEQ ID NO: 312761 - DNA, 33 bp, Homo sapien
tgagatcatacccaaacccccattatttgcttc

SEQ ID NO: 312762 - DNA, 33 bp, Homo sapien
tgagatcatacccaaatccccattatttgcttc

SEQ ID NO: 312763 - DNA, 33 bp, Homo sapien
atagggagtaaccaaacagttcacaaaccaaaa

SEQ ID NO: 312764 - DNA, 33 bp, Homo sapien
atagggagtaaccaaagagttcacaaaccaaaa

SEQ ID NO: 312765 - DNA, 33 bp, Homo sapien
agggtctggttaaaagccatgttggttcctttg

SEQ ID NO: 312766 - DNA, 33 bp, Homo sapien
agggtctggttaaaaggcatgttggttcctttg

SEQ ID NO: 312767 - DNA, 33 bp, Homo sapien
aacaaaatgtatcaaaacttgtgaaatcaacca

SEQ ID NO: 312768 - DNA, 33 bp, Homo sapien
aacaaaatgtatcaaatcttgtgaaatcaacca

SEQ ID NO: 312769 - DNA, 33 bp, Homo sapien
aatcactaggtaaagcagaaagattaatgacca

SEQ ID NO: 312770 - DNA, 33 bp, Homo sapien
aatcactaggtaaagcggaaagattaatgacca

SEQ ID NO: 312771 - DNA, 33 bp, Homo sapien
gtgatctttcttctaccacttcatcctaacaca

SEQ ID NO: 312772 - DNA, 33 bp, Homo sapien
gtgatctttcttctactacttcatcctaacaca

SEQ ID NO: 312773 - DNA, 33 bp, Homo sapien
aagctttgtgtattgaggggggaaattgaagta

SEQ ID NO: 312774 - DNA, 33 bp, Homo sapien
aagctttgtgtattgatgggggaaattgaagta

SEQ ID NO: 312775 - DNA, 33 bp, Homo sapien
gcaatattgaggagtacaatgcgccaagcatca

SEQ ID NO: 312776 - DNA, 33 bp, Homo sapien
gcaatattgaggagtagaatgcgccaagcatca

SEQ ID NO: 312777 - DNA, 33 bp, Homo sapien
gtggtagtggtggtaacggtagtaatggtagta

SEQ ID NO: 312778 - DNA, 33 bp, Homo sapien
gtggtagtggtggtaatggtagtaatggtagta

SEQ ID NO: 312779 - DNA, 33 bp, Homo sapien
cccgatggactaagcgaccttcatattctgact

SEQ ID NO: 312780 - DNA, 33 bp, Homo sapien
cccgatggactaagcggccttcatattctgact

SEQ ID NO: 312781 - DNA, 33 bp, Homo sapien
cctcttaacagaaaaaacataacctgtggtctg

SEQ ID NO: 312782 - DNA, 33 bp, Homo sapien
cctcttaacagaaaaagcataacctgtggtctg

SEQ ID NO: 312783 - DNA, 33 bp, Homo sapien
gaaataaatagaggtacagggcattctatctag

SEQ ID NO: 312784 - DNA, 33 bp, Homo sapien
gaaataaatagaggtatagggcattctatctag

SEQ ID NO: 312785 - DNA, 33 bp, Homo sapien
ccgactgccctccttccaaatacagtcccctcc

SEQ ID NO: 312786 - DNA, 33 bp, Homo sapien
ccgactgccctccttcgaaatacagtcccctcc

SEQ ID NO: 312787 - DNA, 33 bp, Homo sapien
tttttcatgctctttaagatgaataactaacac

SEQ ID NO: 312788 - DNA, 33 bp, Homo sapien
tttttcatgctctttaggatgaataactaacac

SEQ ID NO: 312789 - DNA, 33 bp, Homo sapien
tacatcttcaagccaacgattatattattcctt

SEQ ID NO: 312790 - DNA, 33 bp, Homo sapien
tacatcttcaagccaatgattatattattcctt

SEQ ID NO: 312791 - DNA, 33 bp, Homo sapien
ttaaaagaatgtgacaacttgatgtgggtttgt

SEQ ID NO: 312792 - DNA, 33 bp, Homo sapien
ttaaaagaatgtgacagcttgatgtgggtttgt

SEQ ID NO: 312793 - DNA, 33 bp, Homo sapien
tttgtgattaaggaaaccaaaaggagcaggaca

SEQ ID NO: 312794 - DNA, 33 bp, Homo sapien
tttgtgattaaggaaagcaaaaggagcaggaca

SEQ ID NO: 312795 - DNA, 33 bp, Homo sapien
cctggaaaatgcactccaggcttgctttggaga

SEQ ID NO: 312796 - DNA, 33 bp, Homo sapien
cctggaaaatgcactctaggcttgctttggaga

SEQ ID NO: 312797 - DNA, 33 bp, Homo sapien
caccttttcagagaataagacacgacctaagtt

SEQ ID NO: 312798 - DNA, 33 bp, Homo sapien
caccttttcagagaatgagacacgacctaagtt

SEQ ID NO: 312799 - DNA, 33 bp, Homo sapien
ctgtggttaagaaagcacagactctggaacaga

SEQ ID NO: 312800 - DNA, 33 bp, Homo sapien
ctgtggttaagaaagcgcagactctggaacaga

SEQ ID NO: 312801 - DNA, 33 bp, Homo sapien
gccaaatccagagtcaatatctatttctgtcaa

SEQ ID NO: 312802 - DNA, 33 bp, Homo sapien
gccaaatccagagtcagtatctatttctgtcaa

SEQ ID NO: 312803 - DNA, 33 bp, Homo sapien
tttgctgacaaacagaacagtttttattggcat

SEQ ID NO: 312804 - DNA, 33 bp, Homo sapien
tttgctgacaaacagagcagtttttattggcat

SEQ ID NO: 312805 - DNA, 33 bp, Homo sapien
ataacatgagtggatacgggggtcatgcagcag

SEQ ID NO: 312806 - DNA, 33 bp, Homo sapien
ataacatgagtggatatgggggtcatgcagcag

SEQ ID NO: 312807 - DNA, 33 bp, Homo sapien
accctagcttttaatacgcaaatgcgagttgcc

SEQ ID NO: 312808 - DNA, 33 bp, Homo sapien
accctagcttttaatatgcaaatgcgagttgcc

SEQ ID NO: 312809 - DNA, 33 bp, Homo sapien
agagcctgaggcatacagtatatttaagaaacc

SEQ ID NO: 312810 - DNA, 33 bp, Homo sapien
agagcctgaggcatacggtatatttaagaaacc

SEQ ID NO: 312811 - DNA, 33 bp, Homo sapien
ggagaggaattgtctcacgagaatatgtaacta

SEQ ID NO: 312812 - DNA, 33 bp, Homo sapien
ggagaggaattgtctcgcgagaatatgtaacta

SEQ ID NO: 312813 - DNA, 33 bp, Homo sapien
agataggcatacatcaaggctccgagcattaca

SEQ ID NO: 312814 - DNA, 33 bp, Homo sapien
agataggcatacatcacggctccgagcattaca

SEQ ID NO: 312815 - DNA, 33 bp, Homo sapien
ttgggtctaatgcaaacgacagcaaaaaaaatc

SEQ ID NO: 312816 - DNA, 33 bp, Homo sapien
ttgggtctaatgcaaatgacagcaaaaaaaatc

SEQ ID NO: 312817 - DNA, 33 bp, Homo sapien
tatagacactgtatgaaggaggaaaaatcctgg

SEQ ID NO: 312818 - DNA, 33 bp, Homo sapien
tatagacactgtatgagggaggaaaaatcctgg

SEQ ID NO: 312819 - DNA, 33 bp, Homo sapien
catagaagccaagatacggaggtgcaaaaacca

SEQ ID NO: 312820 - DNA, 33 bp, Homo sapien
catagaagccaagatatggaggtgcaaaaacca

SEQ ID NO: 312821 - DNA, 33 bp, Homo sapien
aaatgtttattcaaaacgctggacaagtaaagt

SEQ ID NO: 312822 - DNA, 33 bp, Homo sapien
aaatgtttattcaaaatgctggacaagtaaagt

SEQ ID NO: 312823 - DNA, 33 bp, Homo sapien
ttcctacctatcactcgcgtgctgaaagttgga

SEQ ID NO: 312824 - DNA, 33 bp, Homo sapien
ttcctacctatcactctcgtgctgaaagttgga

SEQ ID NO: 312825 - DNA, 33 bp, Homo sapien
tccatgtaactacaaaaacatccataaacaggc

SEQ ID NO: 312826 - DNA, 33 bp, Homo sapien
tccatgtaactacaaagacatccataaacaggc

SEQ ID NO: 312827 - DNA, 33 bp, Homo sapien
tttctaggaacatacaaccaataaaagggaaag

SEQ ID NO: 312828 - DNA, 33 bp, Homo sapien
tttctaggaacatacagccaataaaagggaaag

SEQ ID NO: 312829 - DNA, 33 bp, Homo sapien
catgcatccaaatcctaaaattccggagagggg

SEQ ID NO: 312830 - DNA, 33 bp, Homo sapien
catgcatccaaatcctgaaattccggagagggg

SEQ ID NO: 312831 - DNA, 33 bp, Homo sapien
taataaaaagtccccaataactttgctgttata

SEQ ID NO: 312832 - DNA, 33 bp, Homo sapien
taataaaaagtccccagtaactttgctgttata

SEQ ID NO: 312833 - DNA, 33 bp, Homo sapien
atgcaaatcaaaggccaatctccttagcatggt

SEQ ID NO: 312834 - DNA, 33 bp, Homo sapien
atgcaaatcaaaggccgatctccttagcatggt

SEQ ID NO: 312835 - DNA, 33 bp, Homo sapien
atttagttccaggatacgttttagcctcttcga

SEQ ID NO: 312836 - DNA, 33 bp, Homo sapien
atttagttccaggatatgttttagcctcttcga

SEQ ID NO: 312837 - DNA, 33 bp, Homo sapien
gattcacactgaattacagcattggatgtgtag

SEQ ID NO: 312838 - DNA, 33 bp, Homo sapien
gattcacactgaattatagcattggatgtgtag

SEQ ID NO: 312839 - DNA, 33 bp, Homo sapien
tggtgtttgagaacacagtagataggtgtgtgt

SEQ ID NO: 312840 - DNA, 33 bp, Homo sapien
tggtgtttgagaacacggtagataggtgtgtgt

SEQ ID NO: 312841 - DNA, 33 bp, Homo sapien
acatacacatacattcaacctcacaacataaac

SEQ ID NO: 312842 - DNA, 33 bp, Homo sapien
acatacacatacattcgacctcacaacataaac

SEQ ID NO: 312843 - DNA, 33 bp, Homo sapien
gcatcatgactactgtgaacaatatcctcttaa

SEQ ID NO: 312844 - DNA, 33 bp, Homo sapien
gcatcatgactactgttaacaatatcctcttaa

SEQ ID NO: 312845 - DNA, 33 bp, Homo sapien
gcccattaattttatggcactcaagcttctaac

SEQ ID NO: 312846 - DNA, 33 bp, Homo sapien
gcccattaattttatgtcactcaagcttctaac

SEQ ID NO: 312847 - DNA, 33 bp, Homo sapien
agttctatttacccaaccctgcacaacctgggg

SEQ ID NO: 312848 - DNA, 33 bp, Homo sapien
agttctatttacccaatcctgcacaacctgggg

SEQ ID NO: 312849 - DNA, 33 bp, Homo sapien
tacaaatgtgggtctcacctaatgcggtttccc

SEQ ID NO: 312850 - DNA, 33 bp, Homo sapien
tacaaatgtgggtctcgcctaatgcggtttccc

SEQ ID NO: 312851 - DNA, 33 bp, Homo sapien
cactcagccagagtgtaaaaggaacagcttcag

SEQ ID NO: 312852 - DNA, 33 bp, Homo sapien
cactcagccagagtgtgaaaggaacagcttcag

SEQ ID NO: 312853 - DNA, 33 bp, Homo sapien
ttgaaggtcacacttaagtacagcctttataga

SEQ ID NO: 312854 - DNA, 33 bp, Homo sapien
ttgaaggtcacacttaggtacagcctttataga

SEQ ID NO: 312855 - DNA, 33 bp, Homo sapien
tattttctcttccagccgctacttaagctctct

SEQ ID NO: 312856 - DNA, 33 bp, Homo sapien
tattttctcttccagctgctacttaagctctct

SEQ ID NO: 312857 - DNA, 33 bp, Homo sapien
acttaaccctctaggacagtgcatctgtgtagc

SEQ ID NO: 312858 - DNA, 33 bp, Homo sapien
acttaaccctctaggatagtgcatctgtgtagc

SEQ ID NO: 312859 - DNA, 33 bp, Homo sapien
gccttgcctcggaatcacctatgaattttaact

SEQ ID NO: 312860 - DNA, 33 bp, Homo sapien
gccttgcctcggaatcgcctatgaattttaact

SEQ ID NO: 312861 - DNA, 33 bp, Homo sapien
ctcttagctctttcacaagtatggacaaaattc

SEQ ID NO: 312862 - DNA, 33 bp, Homo sapien
ctcttagctctttcaccagtatggacaaaattc

SEQ ID NO: 312863 - DNA, 33 bp, Homo sapien
actggttatatggtgaagacttaaaagaggaaa

SEQ ID NO: 312864 - DNA, 33 bp, Homo sapien
actggttatatggtgaggacttaaaagaggaaa

SEQ ID NO: 312865 - DNA, 33 bp, Homo sapien
gggcaaatactagccaaaagacatgcaatgcag

SEQ ID NO: 312866 - DNA, 33 bp, Homo sapien
gggcaaatactagccacaagacatgcaatgcag

SEQ ID NO: 312867 - DNA, 33 bp, Homo sapien
aacatgtctgtgtaacgaagtctaaagttagct

SEQ ID NO: 312868 - DNA, 33 bp, Homo sapien
aacatgtctgtgtaactaagtctaaagttagct

SEQ ID NO: 312869 - DNA, 33 bp, Homo sapien
atacatgacttccagaatccctcgctatattgt

SEQ ID NO: 312870 - DNA, 33 bp, Homo sapien
atacatgacttccagagtccctcgctatattgt

SEQ ID NO: 312871 - DNA, 33 bp, Homo sapien
gtggggttggagtctgcaggcaagtgaagagcg

SEQ ID NO: 312872 - DNA, 33 bp, Homo sapien
gtggggttggagtctgtaggcaagtgaagagcg

SEQ ID NO: 312873 - DNA, 33 bp, Homo sapien
gagaaatgcttatagcccatagatagacgcgag

SEQ ID NO: 312874 - DNA, 33 bp, Homo sapien
gagaaatgcttatagctcatagatagacgcgag

SEQ ID NO: 312875 - DNA, 33 bp, Homo sapien
atgccacaaagtgacagcgattctggcttgtga

SEQ ID NO: 312876 - DNA, 33 bp, Homo sapien
atgccacaaagtgacatcgattctggcttgtga

SEQ ID NO: 312877 - DNA, 33 bp, Homo sapien
cctactccttgtcatgcatggatctgttgttat

SEQ ID NO: 312878 - DNA, 33 bp, Homo sapien
cctactccttgtcatgtatggatctgttgttat

SEQ ID NO: 312879 - DNA, 33 bp, Homo sapien
acatggctatttcccacctctagacgctgacca

SEQ ID NO: 312880 - DNA, 33 bp, Homo sapien
acatggctatttcccatctctagacgctgacca

SEQ ID NO: 312881 - DNA, 33 bp, Homo sapien
tcttaagaaactgaataatgataatgacaatac

SEQ ID NO: 312882 - DNA, 33 bp, Homo sapien
tcttaagaaactgaatgatgataatgacaatac

SEQ ID NO: 312883 - DNA, 33 bp, Homo sapien
ggacacacaaccctcacggtgctccttccccag

SEQ ID NO: 312884 - DNA, 33 bp, Homo sapien
ggacacacaaccctcatggtgctccttccccag

SEQ ID NO: 312885 - DNA, 33 bp, Homo sapien
aattcatcaagacaatcagcccatggcattttc

SEQ ID NO: 312886 - DNA, 33 bp, Homo sapien
aattcatcaagacaatgagcccatggcattttc

SEQ ID NO: 312887 - DNA, 33 bp, Homo sapien
gtcatattttaaaaagccattgcctatgcctgt

SEQ ID NO: 312888 - DNA, 33 bp, Homo sapien
gtcatattttaaaaagtcattgcctatgcctgt

SEQ ID NO: 312889 - DNA, 33 bp, Homo sapien
gagaagtggtttcttacggaaagctatggtcct

SEQ ID NO: 312890 - DNA, 33 bp, Homo sapien
gagaagtggtttcttatggaaagctatggtcct

SEQ ID NO: 312891 - DNA, 33 bp, Homo sapien
gccaacaggtccagaaataaggaacacacattt

SEQ ID NO: 312892 - DNA, 33 bp, Homo sapien
gccaacaggtccagaagtaaggaacacacattt

SEQ ID NO: 312893 - DNA, 33 bp, Homo sapien
gaatactgtcattagacgggaatagaggcagtt

SEQ ID NO: 312894 - DNA, 33 bp, Homo sapien
gaatactgtcattagatgggaatagaggcagtt

SEQ ID NO: 312895 - DNA, 33 bp, Homo sapien
aggggctgcttaaagcaatcagttggctttagt

SEQ ID NO: 312896 - DNA, 33 bp, Homo sapien
aggggctgcttaaagctatcagttggctttagt

SEQ ID NO: 312897 - DNA, 33 bp, Homo sapien
cacagcgacggaaaaacgtgtatggagaggagg

SEQ ID NO: 312898 - DNA, 33 bp, Homo sapien
cacagcgacggaaaaatgtgtatggagaggagg

SEQ ID NO: 312899 - DNA, 33 bp, Homo sapien
gatgagttggacacaaccaagaaaaatagggaa

SEQ ID NO: 312900 - DNA, 33 bp, Homo sapien
gatgagttggacacaatcaagaaaaatagggaa

SEQ ID NO: 312901 - DNA, 33 bp, Homo sapien
ggtattagtgtacttaccttgcattttaaattc

SEQ ID NO: 312902 - DNA, 33 bp, Homo sapien
ggtattagtgtacttatcttgcattttaaattc

SEQ ID NO: 312903 - DNA, 33 bp, Homo sapien
tttcccccagccgtcaatagcactctgcagctt

SEQ ID NO: 312904 - DNA, 33 bp, Homo sapien
tttcccccagccgtcagtagcactctgcagctt

SEQ ID NO: 312905 - DNA, 33 bp, Homo sapien
atccccattttgcagaagtgagttttgtgagag

SEQ ID NO: 312906 - DNA, 33 bp, Homo sapien
atccccattttgcagatgtgagttttgtgagag

SEQ ID NO: 312907 - DNA, 33 bp, Homo sapien
gtccatgctcgctctccagtcactttccttagt

SEQ ID NO: 312908 - DNA, 33 bp, Homo sapien
gtccatgctcgctctctagtcactttccttagt

SEQ ID NO: 312909 - DNA, 33 bp, Homo sapien
gtgcgcaggctttacgacatctactacagcttg

SEQ ID NO: 312910 - DNA, 33 bp, Homo sapien
gtgcgcaggctttacggcatctactacagcttg

SEQ ID NO: 312911 - DNA, 33 bp, Homo sapien
cagctacaaaaagaaactgttgcatccttgttg

SEQ ID NO: 312912 - DNA, 33 bp, Homo sapien
cagctacaaaaagaaattgttgcatccttgttg

SEQ ID NO: 312913 - DNA, 33 bp, Homo sapien
cataaaataggcccgacagtctcagaagagact

SEQ ID NO: 312914 - DNA, 33 bp, Homo sapien
cataaaataggcccgagagtctcagaagagact

SEQ ID NO: 312915 - DNA, 33 bp, Homo sapien
cttagcaaactggggcggaaccaattcatgaat

SEQ ID NO: 312916 - DNA, 33 bp, Homo sapien
cttagcaaactggggctgaaccaattcatgaat

SEQ ID NO: 312917 - DNA, 33 bp, Homo sapien
tcattttaacatttgaagtgaatcccttaacca

SEQ ID NO: 312918 - DNA, 33 bp, Homo sapien
tcattttaacatttgaggtgaatcccttaacca

SEQ ID NO: 312919 - DNA, 33 bp, Homo sapien
cattttgtgacacacaatcttttgatcataata

SEQ ID NO: 312920 - DNA, 33 bp, Homo sapien
cattttgtgacacacagtcttttgatcataata

SEQ ID NO: 312921 - DNA, 33 bp, Homo sapien
gtaatagtgaatgttacataatttttattctca

SEQ ID NO: 312922 - DNA, 33 bp, Homo sapien
gtaatagtgaatgttagataatttttattctca

SEQ ID NO: 312923 - DNA, 33 bp, Homo sapien
accttattttcaggaactgaagtggtcctatca

SEQ ID NO: 312924 - DNA, 33 bp, Homo sapien
accttattttcaggaattgaagtggtcctatca

SEQ ID NO: 312925 - DNA, 33 bp, Homo sapien
tgattacgtggcacatgaacttttcaactttga

SEQ ID NO: 312926 - DNA, 33 bp, Homo sapien
tgattacgtggcacattaacttttcaactttga

SEQ ID NO: 312927 - DNA, 33 bp, Homo sapien
gtgaatataccgatcaccaacatcatctagctc

SEQ ID NO: 312928 - DNA, 33 bp, Homo sapien
gtgaatataccgatcatcaacatcatctagctc

SEQ ID NO: 312929 - DNA, 33 bp, Homo sapien
agtgactgctcttcaactctcaccagaaagtga

SEQ ID NO: 312930 - DNA, 33 bp, Homo sapien
agtgactgctcttcaattctcaccagaaagtga

SEQ ID NO: 312931 - DNA, 33 bp, Homo sapien
tagagtatgtgtgtgacgctacatatattcttc

SEQ ID NO: 312932 - DNA, 33 bp, Homo sapien
tagagtatgtgtgtgatgctacatatattcttc

SEQ ID NO: 312933 - DNA, 33 bp, Homo sapien
ccaagaaaacccaaatcaggtgacagcacatat

SEQ ID NO: 312934 - DNA, 33 bp, Homo sapien
ccaagaaaacccaaatgaggtgacagcacatat

SEQ ID NO: 312935 - DNA, 33 bp, Homo sapien
tagagactggtcttcaaaaggttgatttttaca

SEQ ID NO: 312936 - DNA, 33 bp, Homo sapien
tagagactggtcttcagaaggttgatttttaca

SEQ ID NO: 312937 - DNA, 33 bp, Homo sapien
ttttcacaatattttgaaattgcaagtgattga

SEQ ID NO: 312938 - DNA, 33 bp, Homo sapien
ttttcacaatattttggaattgcaagtgattga

SEQ ID NO: 312939 - DNA, 33 bp, Homo sapien
tcacttcccagagcctcaaatataggataatgt

SEQ ID NO: 312940 - DNA, 33 bp, Homo sapien
tcacttcccagagccttaaatataggataatgt

SEQ ID NO: 312941 - DNA, 33 bp, Homo sapien
ttgttataaggtcacaaattccatcatgagacc

SEQ ID NO: 312942 - DNA, 33 bp, Homo sapien
ttgttataaggtcacacattccatcatgagacc

SEQ ID NO: 312943 - DNA, 33 bp, Homo sapien
tgtaactgaaaaccccaaacacgtgtatgaatg

SEQ ID NO: 312944 - DNA, 33 bp, Homo sapien
tgtaactgaaaaccccgaacacgtgtatgaatg

SEQ ID NO: 312945 - DNA, 33 bp, Homo sapien
cacactgaagtaccgccgcaatatggagaaatt

SEQ ID NO: 312946 - DNA, 33 bp, Homo sapien
cacactgaagtaccgctgcaatatggagaaatt

SEQ ID NO: 312947 - DNA, 33 bp, Homo sapien
tcttactgttccacacgatttcattacatgcct

SEQ ID NO: 312948 - DNA, 33 bp, Homo sapien
tcttactgttccacactatttcattacatgcct

SEQ ID NO: 312949 - DNA, 33 bp, Homo sapien
cattcaccttcaaagaaaacagtctgtggtcat

SEQ ID NO: 312950 - DNA, 33 bp, Homo sapien
cattcaccttcaaagagaacagtctgtggtcat

SEQ ID NO: 312951 - DNA, 33 bp, Homo sapien
ttgaattttatttgatgacgttgtgaagtacag

SEQ ID NO: 312952 - DNA, 33 bp, Homo sapien
ttgaattttatttgattacgttgtgaagtacag

SEQ ID NO: 312953 - DNA, 33 bp, Homo sapien
gactggctatcagaaaaccttcatttccttgtt

SEQ ID NO: 312954 - DNA, 33 bp, Homo sapien
gactggctatcagaaagccttcatttccttgtt

SEQ ID NO: 312955 - DNA, 33 bp, Homo sapien
gagagtcggtgagagaagttttcttggcaacca

SEQ ID NO: 312956 - DNA, 33 bp, Homo sapien
gagagtcggtgagagaggttttcttggcaacca

SEQ ID NO: 312957 - DNA, 33 bp, Homo sapien
atatcagaggagttgacaatgaacatgaggaga

SEQ ID NO: 312958 - DNA, 33 bp, Homo sapien
atatcagaggagttgagaatgaacatgaggaga

SEQ ID NO: 312959 - DNA, 33 bp, Homo sapien
tgcttagatcactagaatcagttactcttccaa

SEQ ID NO: 312960 - DNA, 33 bp, Homo sapien
tgcttagatcactagagtcagttactcttccaa

SEQ ID NO: 312961 - DNA, 33 bp, Homo sapien
cccatctctacccatcagagtcagaatgaacac

SEQ ID NO: 312962 - DNA, 33 bp, Homo sapien
cccatctctacccatcggagtcagaatgaacac

SEQ ID NO: 312963 - DNA, 33 bp, Homo sapien
taccaaagtgaatcataacacatagctcaatcc

SEQ ID NO: 312964 - DNA, 33 bp, Homo sapien
taccaaagtgaatcattacacatagctcaatcc

SEQ ID NO: 312965 - DNA, 33 bp, Homo sapien
caaatccacgaagacaagcccttctctgtgact

SEQ ID NO: 312966 - DNA, 33 bp, Homo sapien
caaatccacgaagacaggcccttctctgtgact

SEQ ID NO: 312967 - DNA, 33 bp, Homo sapien
gtgcctaaggagaatcacatccagtggagactg

SEQ ID NO: 312968 - DNA, 33 bp, Homo sapien
gtgcctaaggagaatcgcatccagtggagactg

SEQ ID NO: 312969 - DNA, 33 bp, Homo sapien
ggaagatacccagagacagcgtcgagtgttatt

SEQ ID NO: 312970 - DNA, 33 bp, Homo sapien
ggaagatacccagagagagcgtcgagtgttatt

SEQ ID NO: 312971 - DNA, 33 bp, Homo sapien
caggagttgtggggagaaacagatgaaacaata

SEQ ID NO: 312972 - DNA, 33 bp, Homo sapien
caggagttgtggggaggaacagatgaaacaata

SEQ ID NO: 312973 - DNA, 33 bp, Homo sapien
aatatacagaaagagcaaatgatgtgagccaca

SEQ ID NO: 312974 - DNA, 33 bp, Homo sapien
aatatacagaaagagctaatgatgtgagccaca

SEQ ID NO: 312975 - DNA, 33 bp, Homo sapien
aactaagtgtgctcaaactacccccgcacccac

SEQ ID NO: 312976 - DNA, 33 bp, Homo sapien
aactaagtgtgctcaagctacccccgcacccac

SEQ ID NO: 312977 - DNA, 33 bp, Homo sapien
acacgttaagtattgaacagaaacatttgaagc

SEQ ID NO: 312978 - DNA, 33 bp, Homo sapien
acacgttaagtattgagcagaaacatttgaagc

SEQ ID NO: 312979 - DNA, 33 bp, Homo sapien
tagactttcttttgtcccatcattatcagcatt

SEQ ID NO: 312980 - DNA, 33 bp, Homo sapien
tagactttcttttgtctcatcattatcagcatt

SEQ ID NO: 312981 - DNA, 33 bp, Homo sapien
agctcaggaagctgaagccttgtctcagaggtt

SEQ ID NO: 312982 - DNA, 33 bp, Homo sapien
agctcaggaagctgaatccttgtctcagaggtt

SEQ ID NO: 312983 - DNA, 33 bp, Homo sapien
aagagaagtgagtgctaaacaaagattctctag

SEQ ID NO: 312984 - DNA, 33 bp, Homo sapien
aagagaagtgagtgctgaacaaagattctctag

SEQ ID NO: 312985 - DNA, 33 bp, Homo sapien
attgtgctcctcggggccatcactttcatccac

SEQ ID NO: 312986 - DNA, 33 bp, Homo sapien
attgtgctcctcgggggcatcactttcatccac

SEQ ID NO: 312987 - DNA, 33 bp, Homo sapien
gaggccagaggaggataaataccatgaaacaga

SEQ ID NO: 312988 - DNA, 33 bp, Homo sapien
gaggccagaggaggatgaataccatgaaacaga

SEQ ID NO: 312989 - DNA, 33 bp, Homo sapien
gatatcttcgctgcataaagaaaagtggccaac

SEQ ID NO: 312990 - DNA, 33 bp, Homo sapien
gatatcttcgctgcatgaagaaaagtggccaac

SEQ ID NO: 312991 - DNA, 33 bp, Homo sapien
tatgaatcatgccttaaaggcgcgattgcctgt

SEQ ID NO: 312992 - DNA, 33 bp, Homo sapien
tatgaatcatgccttataggcgcgattgcctgt

SEQ ID NO: 312993 - DNA, 33 bp, Homo sapien
ctaagctcagcacttgcaagaaatcttttggga

SEQ ID NO: 312994 - DNA, 33 bp, Homo sapien
ctaagctcagcacttggaagaaatcttttggga

SEQ ID NO: 312995 - DNA, 33 bp, Homo sapien
tacttttgaatgaataaagtagctaggaacttc

SEQ ID NO: 312996 - DNA, 33 bp, Homo sapien
tacttttgaatgaatagagtagctaggaacttc

SEQ ID NO: 312997 - DNA, 33 bp, Homo sapien
tggttacaattcaacaaaggaacaaaaggagac

SEQ ID NO: 312998 - DNA, 33 bp, Homo sapien
tggttacaattcaacacaggaacaaaaggagac

SEQ ID NO: 312999 - DNA, 33 bp, Homo sapien
gcctttcttatgccaccaaggcagttcttaccc

SEQ ID NO: 313000 - DNA, 33 bp, Homo sapien
gcctttcttatgccacgaaggcagttcttaccc

SEQ ID NO: 313001 - DNA, 33 bp, Homo sapien
gctggattcaagacacaatggtactgaaaatgt

SEQ ID NO: 313002 - DNA, 33 bp, Homo sapien
gctggattcaagacaccatggtactgaaaatgt

SEQ ID NO: 313003 - DNA, 33 bp, Homo sapien
tagtcataatgttgacagtatgaaatctcaaat

SEQ ID NO: 313004 - DNA, 33 bp, Homo sapien
tagtcataatgttgacggtatgaaatctcaaat

SEQ ID NO: 313005 - DNA, 33 bp, Homo sapien
gggaacatgaaggagaacccacctctgctgctt

SEQ ID NO: 313006 - DNA, 33 bp, Homo sapien
gggaacatgaaggagagcccacctctgctgctt

SEQ ID NO: 313007 - DNA, 33 bp, Homo sapien
cataactgctgtgtccactagcccaaagctgtt

SEQ ID NO: 313008 - DNA, 33 bp, Homo sapien
cataactgctgtgtccgctagcccaaagctgtt

SEQ ID NO: 313009 - DNA, 33 bp, Homo sapien
aagagtcaagctttcaatcatgtcctgcaatgg

SEQ ID NO: 313010 - DNA, 33 bp, Homo sapien
aagagtcaagctttcagtcatgtcctgcaatgg

SEQ ID NO: 313011 - DNA, 33 bp, Homo sapien
gatggttttgtgggtagctgaagttctatatcc

SEQ ID NO: 313012 - DNA, 33 bp, Homo sapien
gatggttttgtgggtatctgaagttctatatcc

SEQ ID NO: 313013 - DNA, 33 bp, Homo sapien
catgatccaacagaaccgctgctttttagagta

SEQ ID NO: 313014 - DNA, 33 bp, Homo sapien
catgatccaacagaactgctgctttttagagta

SEQ ID NO: 313015 - DNA, 33 bp, Homo sapien
cacattacattttctacaagcttgctaagcatc

SEQ ID NO: 313016 - DNA, 33 bp, Homo sapien
cacattacattttctataagcttgctaagcatc

SEQ ID NO: 313017 - DNA, 33 bp, Homo sapien
aattcactgttctggaatagtctaccataccat

SEQ ID NO: 313018 - DNA, 33 bp, Homo sapien
aattcactgttctggagtagtctaccataccat

SEQ ID NO: 313019 - DNA, 33 bp, Homo sapien
gattcaaatgcctgaacggtgagttttaccagg

SEQ ID NO: 313020 - DNA, 33 bp, Homo sapien
gattcaaatgcctgaatggtgagttttaccagg

SEQ ID NO: 313021 - DNA, 33 bp, Homo sapien
aaaattggcagccaggacaaaatgtttggtgga

SEQ ID NO: 313022 - DNA, 33 bp, Homo sapien
aaaattggcagccaggccaaaatgtttggtgga

SEQ ID NO: 313023 - DNA, 33 bp, Homo sapien
gagatcttgtgaacacactgggactagtagatt

SEQ ID NO: 313024 - DNA, 33 bp, Homo sapien
gagatcttgtgaacaccctgggactagtagatt

SEQ ID NO: 313025 - DNA, 33 bp, Homo sapien
tgagcgcctggaaacaatctcttagtaatgtgt

SEQ ID NO: 313026 - DNA, 33 bp, Homo sapien
tgagcgcctggaaacagtctcttagtaatgtgt

SEQ ID NO: 313027 - DNA, 33 bp, Homo sapien
tggcattggtctgatacgtaccaccccgttact

SEQ ID NO: 313028 - DNA, 33 bp, Homo sapien
tggcattggtctgataggtaccaccccgttact

SEQ ID NO: 313029 - DNA, 33 bp, Homo sapien
aatgccaactggtttgcaatctccactgtatac

SEQ ID NO: 313030 - DNA, 33 bp, Homo sapien
aatgccaactggtttggaatctccactgtatac

SEQ ID NO: 313031 - DNA, 33 bp, Homo sapien
aatgataagattcttccaggagcattaaaatca

SEQ ID NO: 313032 - DNA, 33 bp, Homo sapien
aatgataagattcttctaggagcattaaaatca

SEQ ID NO: 313033 - DNA, 33 bp, Homo sapien
ccattcccttgatctgaaactgcctggtcacta

SEQ ID NO: 313034 - DNA, 33 bp, Homo sapien
ccattcccttgatctgcaactgcctggtcacta

SEQ ID NO: 313035 - DNA, 33 bp, Homo sapien
acccaggaccatttgaagcactggaaagctact

SEQ ID NO: 313036 - DNA, 33 bp, Homo sapien
acccaggaccatttgaggcactggaaagctact

SEQ ID NO: 313037 - DNA, 33 bp, Homo sapien
gaatgaagcgtcaaaacagtaatctagttgggt

SEQ ID NO: 313038 - DNA, 33 bp, Homo sapien
gaatgaagcgtcaaaatagtaatctagttgggt

SEQ ID NO: 313039 - DNA, 33 bp, Homo sapien
gagtgtgagaatgaagaatcggtcaggaaatgc

SEQ ID NO: 313040 - DNA, 33 bp, Homo sapien
gagtgtgagaatgaagcatcggtcaggaaatgc

SEQ ID NO: 313041 - DNA, 33 bp, Homo sapien
ttgagggtcatattaaagaagagtacatagagc

SEQ ID NO: 313042 - DNA, 33 bp, Homo sapien
ttgagggtcatattaaggaagagtacatagagc

SEQ ID NO: 313043 - DNA, 33 bp, Homo sapien
acccagtcaccgaagacaaaaatgcaggcatca

SEQ ID NO: 313044 - DNA, 33 bp, Homo sapien
acccagtcaccgaagataaaaatgcaggcatca

SEQ ID NO: 313045 - DNA, 33 bp, Homo sapien
tactacaatttacttaccaaaaatcacagacca

SEQ ID NO: 313046 - DNA, 33 bp, Homo sapien
tactacaatttacttagcaaaaatcacagacca

SEQ ID NO: 313047 - DNA, 33 bp, Homo sapien
tcatttctatgaaacccagtgtggctgcctaat

SEQ ID NO: 313048 - DNA, 33 bp, Homo sapien
tcatttctatgaaacctagtgtggctgcctaat

SEQ ID NO: 313049 - DNA, 33 bp, Homo sapien
atgttggtcagattcacgtttagcaagatcccc

SEQ ID NO: 313050 - DNA, 33 bp, Homo sapien
atgttggtcagattcatgtttagcaagatcccc

SEQ ID NO: 313051 - DNA, 33 bp, Homo sapien
aggagacttagggagcacaacagttctctttgt

SEQ ID NO: 313052 - DNA, 33 bp, Homo sapien
aggagacttagggagcccaacagttctctttgt

SEQ ID NO: 313053 - DNA, 33 bp, Homo sapien
aggagaacaactagaactgtgatgcatttctaa

SEQ ID NO: 313054 - DNA, 33 bp, Homo sapien
aggagaacaactagaattgtgatgcatttctaa

SEQ ID NO: 313055 - DNA, 33 bp, Homo sapien
tcccatccaactaccactatctctcctcttccc

SEQ ID NO: 313056 - DNA, 33 bp, Homo sapien
tcccatccaactaccagtatctctcctcttccc

SEQ ID NO: 313057 - DNA, 33 bp, Homo sapien
tgggaagaattctcaacgtaggatttgctgccc

SEQ ID NO: 313058 - DNA, 33 bp, Homo sapien
tgggaagaattctcaatgtaggatttgctgccc

SEQ ID NO: 313059 - DNA, 33 bp, Homo sapien
aatatacacagggctaggtatggttcaatatct

SEQ ID NO: 313060 - DNA, 33 bp, Homo sapien
aatatacacagggctatgtatggttcaatatct

SEQ ID NO: 313061 - DNA, 33 bp, Homo sapien
ccttttctcccttgaaatgtatcaaatactaaa

SEQ ID NO: 313062 - DNA, 33 bp, Homo sapien
ccttttctcccttgaagtgtatcaaatactaaa

SEQ ID NO: 313063 - DNA, 33 bp, Homo sapien
cagccttctccagcaacacctagccttgtgctc

SEQ ID NO: 313064 - DNA, 33 bp, Homo sapien
cagccttctccagcaatacctagccttgtgctc

SEQ ID NO: 313065 - DNA, 33 bp, Homo sapien
caagaaagtgctgtcacgaagttttcattaagt

SEQ ID NO: 313066 - DNA, 33 bp, Homo sapien
caagaaagtgctgtcatgaagttttcattaagt

SEQ ID NO: 313067 - DNA, 33 bp, Homo sapien
atttgtcttttgccaccattcttttccctcata

SEQ ID NO: 313068 - DNA, 33 bp, Homo sapien
atttgtcttttgccactattcttttccctcata

SEQ ID NO: 313069 - DNA, 33 bp, Homo sapien
ttacatttggaccttcacctttgaaattcaaaa

SEQ ID NO: 313070 - DNA, 33 bp, Homo sapien
ttacatttggaccttcgcctttgaaattcaaaa

SEQ ID NO: 313071 - DNA, 33 bp, Homo sapien
atagtcatcgctcttcacaacatttccgtgtgc

SEQ ID NO: 313072 - DNA, 33 bp, Homo sapien
atagtcatcgctcttcccaacatttccgtgtgc

SEQ ID NO: 313073 - DNA, 33 bp, Homo sapien
taaaacaagtgctttgaaaacaaatattcccaa

SEQ ID NO: 313074 - DNA, 33 bp, Homo sapien
taaaacaagtgctttggaaacaaatattcccaa

SEQ ID NO: 313075 - DNA, 33 bp, Homo sapien
aatgtgattttcatccaaccagttgtctaaact

SEQ ID NO: 313076 - DNA, 33 bp, Homo sapien
aatgtgattttcatcccaccagttgtctaaact

SEQ ID NO: 313077 - DNA, 33 bp, Homo sapien
tcttcctgggttttgcccccaactctggctatt

SEQ ID NO: 313078 - DNA, 33 bp, Homo sapien
tcttcctgggttttgctcccaactctggctatt

SEQ ID NO: 313079 - DNA, 33 bp, Homo sapien
aaagtgtagggagtgaacaaatctttaaaacag

SEQ ID NO: 313080 - DNA, 33 bp, Homo sapien
aaagtgtagggagtgagcaaatctttaaaacag

SEQ ID NO: 313081 - DNA, 33 bp, Homo sapien
cccaacattgattgccgccctagaaacatacgc

SEQ ID NO: 313082 - DNA, 33 bp, Homo sapien
cccaacattgattgcctccctagaaacatacgc

SEQ ID NO: 313083 - DNA, 33 bp, Homo sapien
ctttgcagacattggaaataacatttgaatggg

SEQ ID NO: 313084 - DNA, 33 bp, Homo sapien
ctttgcagacattggagataacatttgaatggg

SEQ ID NO: 313085 - DNA, 33 bp, Homo sapien
tttagtactgtctatacgctctttccagcccct

SEQ ID NO: 313086 - DNA, 33 bp, Homo sapien
tttagtactgtctatatgctctttccagcccct

SEQ ID NO: 313087 - DNA, 33 bp, Homo sapien
catcggtaccatagcactgatgttaagaataaa

SEQ ID NO: 313088 - DNA, 33 bp, Homo sapien
catcggtaccatagcattgatgttaagaataaa

SEQ ID NO: 313089 - DNA, 33 bp, Homo sapien
gcttactgcctggcaaccaaagtcactacctgt

SEQ ID NO: 313090 - DNA, 33 bp, Homo sapien
gcttactgcctggcaatcaaagtcactacctgt

SEQ ID NO: 313091 - DNA, 33 bp, Homo sapien
gaagtgaagcaaacaaagcaaattttgacttcc

SEQ ID NO: 313092 - DNA, 33 bp, Homo sapien
gaagtgaagcaaacaaggcaaattttgacttcc

SEQ ID NO: 313093 - DNA, 33 bp, Homo sapien
ggctttgagaatgcccactgacatactgcattc

SEQ ID NO: 313094 - DNA, 33 bp, Homo sapien
ggctttgagaatgcccgctgacatactgcattc

SEQ ID NO: 313095 - DNA, 33 bp, Homo sapien
tctcaaagatgtgttcacagaaatcatgatttt

SEQ ID NO: 313096 - DNA, 33 bp, Homo sapien
tctcaaagatgtgttcgcagaaatcatgatttt

SEQ ID NO: 313097 - DNA, 33 bp, Homo sapien
tctagcccttaaaaaactatgtgacacagatcc

SEQ ID NO: 313098 - DNA, 33 bp, Homo sapien
tctagcccttaaaaaattatgtgacacagatcc

SEQ ID NO: 313099 - DNA, 33 bp, Homo sapien
tttgttacatggcaaaaagataattaatgcaga

SEQ ID NO: 313100 - DNA, 33 bp, Homo sapien
tttgttacatggcaaagagataattaatgcaga

SEQ ID NO: 313101 - DNA, 33 bp, Homo sapien
acactggattatatcacgtcgggaataggaatt

SEQ ID NO: 313102 - DNA, 33 bp, Homo sapien
acactggattatatcatgtcgggaataggaatt

SEQ ID NO: 313103 - DNA, 33 bp, Homo sapien
ctcaaattgtgcaacaacctctgtattaaaaag

SEQ ID NO: 313104 - DNA, 33 bp, Homo sapien
ctcaaattgtgcaacagcctctgtattaaaaag

SEQ ID NO: 313105 - DNA, 33 bp, Homo sapien
gcaagtcagtcaatagccaagaaattgttcaat

SEQ ID NO: 313106 - DNA, 33 bp, Homo sapien
gcaagtcagtcaataggcaagaaattgttcaat

SEQ ID NO: 313107 - DNA, 33 bp, Homo sapien
gcaaaaagcgcagttacggggaaacaaatgtat

SEQ ID NO: 313108 - DNA, 33 bp, Homo sapien
gcaaaaagcgcagttagggggaaacaaatgtat

SEQ ID NO: 313109 - DNA, 33 bp, Homo sapien
tcaggccttgttacaccctggcttaaaaccctc

SEQ ID NO: 313110 - DNA, 33 bp, Homo sapien
tcaggccttgttacactctggcttaaaaccctc

SEQ ID NO: 313111 - DNA, 33 bp, Homo sapien
ttcaatcttcttcaaacgttaagtatcttgaga

SEQ ID NO: 313112 - DNA, 33 bp, Homo sapien
ttcaatcttcttcaaatgttaagtatcttgaga

SEQ ID NO: 313113 - DNA, 33 bp, Homo sapien
gtccaggtgggaccaacataattacgagtctat

SEQ ID NO: 313114 - DNA, 33 bp, Homo sapien
gtccaggtgggaccaatataattacgagtctat

SEQ ID NO: 313115 - DNA, 33 bp, Homo sapien
cttctgatttctgataagagtctgtgttagtct

SEQ ID NO: 313116 - DNA, 33 bp, Homo sapien
cttctgatttctgataggagtctgtgttagtct

SEQ ID NO: 313117 - DNA, 33 bp, Homo sapien
tcaatttctagaactgcaatagtgtccatggaa

SEQ ID NO: 313118 - DNA, 33 bp, Homo sapien
tcaatttctagaactgtaatagtgtccatggaa

SEQ ID NO: 313119 - DNA, 33 bp, Homo sapien
ctttcacttaaatactcagaggccattggaggg

SEQ ID NO: 313120 - DNA, 33 bp, Homo sapien
ctttcacttaaatacttagaggccattggaggg

SEQ ID NO: 313121 - DNA, 33 bp, Homo sapien
ccaattagtggcaaaactaagctctgtctgtct

SEQ ID NO: 313122 - DNA, 33 bp, Homo sapien
ccaattagtggcaaaagtaagctctgtctgtct

SEQ ID NO: 313123 - DNA, 33 bp, Homo sapien
accttcttatcacaaccggcctgactgggtccc

SEQ ID NO: 313124 - DNA, 33 bp, Homo sapien
accttcttatcacaactggcctgactgggtccc

SEQ ID NO: 313125 - DNA, 33 bp, Homo sapien
gtaatccccagagctacaggagaagttgttatg

SEQ ID NO: 313126 - DNA, 33 bp, Homo sapien
gtaatccccagagctagaggagaagttgttatg

SEQ ID NO: 313127 - DNA, 33 bp, Homo sapien
caaattacaaggaaaacgatagaagaaatgtgc

SEQ ID NO: 313128 - DNA, 33 bp, Homo sapien
caaattacaaggaaaatgatagaagaaatgtgc

SEQ ID NO: 313129 - DNA, 33 bp, Homo sapien
tctcatagctttcagtgaactttcttgtgtcac

SEQ ID NO: 313130 - DNA, 33 bp, Homo sapien
tctcatagctttcagttaactttcttgtgtcac

SEQ ID NO: 313131 - DNA, 33 bp, Homo sapien
aaaagggatcatcaggaaaatcttaaaatagtt

SEQ ID NO: 313132 - DNA, 33 bp, Homo sapien
aaaagggatcatcagggaaatcttaaaatagtt

SEQ ID NO: 313133 - DNA, 33 bp, Homo sapien
gaagaagagggaaaagaatgctccctttagctt

SEQ ID NO: 313134 - DNA, 33 bp, Homo sapien
gaagaagagggaaaagtatgctccctttagctt

SEQ ID NO: 313135 - DNA, 33 bp, Homo sapien
cagcttctttaccatacagtgacactgaacaag

SEQ ID NO: 313136 - DNA, 33 bp, Homo sapien
cagcttctttaccatatagtgacactgaacaag

SEQ ID NO: 313137 - DNA, 33 bp, Homo sapien
ctgagagtggacttacacattcctaggtcgagt

SEQ ID NO: 313138 - DNA, 33 bp, Homo sapien
ctgagagtggacttacgcattcctaggtcgagt

SEQ ID NO: 313139 - DNA, 33 bp, Homo sapien
cagattcagtgtcccaagaaggccaacttctga

SEQ ID NO: 313140 - DNA, 33 bp, Homo sapien
cagattcagtgtcccatgaaggccaacttctga

SEQ ID NO: 313141 - DNA, 33 bp, Homo sapien
attcacagctgttcacagtaacggtgataccat

SEQ ID NO: 313142 - DNA, 33 bp, Homo sapien
attcacagctgttcacggtaacggtgataccat

SEQ ID NO: 313143 - DNA, 33 bp, Homo sapien
atcatcccctcaaaatgatcaactcacactcta

SEQ ID NO: 313144 - DNA, 33 bp, Homo sapien
atcatcccctcaaaattatcaactcacactcta

SEQ ID NO: 313145 - DNA, 33 bp, Homo sapien
tgatccatgctatactcaaggaaaagggcaggt

SEQ ID NO: 313146 - DNA, 33 bp, Homo sapien
tgatccatgctatacttaaggaaaagggcaggt

SEQ ID NO: 313147 - DNA, 33 bp, Homo sapien
tgctgtcttttataaccaacaatgctagcctga

SEQ ID NO: 313148 - DNA, 33 bp, Homo sapien
tgctgtcttttataacgaacaatgctagcctga

SEQ ID NO: 313149 - DNA, 33 bp, Homo sapien
atattgtataatgcaacgtgtaaattttgtaaa

SEQ ID NO: 313150 - DNA, 33 bp, Homo sapien
atattgtataatgcaatgtgtaaattttgtaaa

SEQ ID NO: 313151 - DNA, 33 bp, Homo sapien
gactttgacaggcagaaaggtatccaaaaatga

SEQ ID NO: 313152 - DNA, 33 bp, Homo sapien
gactttgacaggcagagaggtatccaaaaatga

SEQ ID NO: 313153 - DNA, 33 bp, Homo sapien
ctgcctgtcaaagtcactaactgcctgccagtg

SEQ ID NO: 313154 - DNA, 33 bp, Homo sapien
ctgcctgtcaaagtcattaactgcctgccagtg

SEQ ID NO: 313155 - DNA, 33 bp, Homo sapien
ctgccaccaaagagaaagctgactctcccgcaa

SEQ ID NO: 313156 - DNA, 33 bp, Homo sapien
ctgccaccaaagagaaggctgactctcccgcaa

SEQ ID NO: 313157 - DNA, 33 bp, Homo sapien
atgtgacagaaaaaaaattacacaattatcgta

SEQ ID NO: 313158 - DNA, 33 bp, Homo sapien
atgtgacagaaaaaaagttacacaattatcgta

SEQ ID NO: 313159 - DNA, 33 bp, Homo sapien
aggctggtgtttaaaaatattttctctcacttg

SEQ ID NO: 313160 - DNA, 33 bp, Homo sapien
aggctggtgtttaaaagtattttctctcacttg

SEQ ID NO: 313161 - DNA, 33 bp, Homo sapien
agtttctccaacaggccgagattgttcctcctg

SEQ ID NO: 313162 - DNA, 33 bp, Homo sapien
agtttctccaacaggctgagattgttcctcctg

SEQ ID NO: 313163 - DNA, 33 bp, Homo sapien
gcatgtcaaagtatacaaagcggatatgcagga

SEQ ID NO: 313164 - DNA, 33 bp, Homo sapien
gcatgtcaaagtatacgaagcggatatgcagga

SEQ ID NO: 313165 - DNA, 33 bp, Homo sapien
cacattctggagacaactgagctggttttgagg

SEQ ID NO: 313166 - DNA, 33 bp, Homo sapien
cacattctggagacaattgagctggttttgagg

SEQ ID NO: 313167 - DNA, 33 bp, Homo sapien
tcccaacaacctgtaccgcaaatatgggggctg

SEQ ID NO: 313168 - DNA, 33 bp, Homo sapien
tcccaacaacctgtactgcaaatatgggggctg

SEQ ID NO: 313169 - DNA, 33 bp, Homo sapien
gtctagccaagttgacacataaaacttgccatc

SEQ ID NO: 313170 - DNA, 33 bp, Homo sapien
gtctagccaagttgacgcataaaacttgccatc

SEQ ID NO: 313171 - DNA, 33 bp, Homo sapien
gtctgaactgaataatgaaggataacgaggaag

SEQ ID NO: 313172 - DNA, 33 bp, Homo sapien
gtctgaactgaataattaaggataacgaggaag

SEQ ID NO: 313173 - DNA, 33 bp, Homo sapien
caaagttctttttcaagtaaagcttagtccaga

SEQ ID NO: 313174 - DNA, 33 bp, Homo sapien
caaagttctttttcaattaaagcttagtccaga

SEQ ID NO: 313175 - DNA, 33 bp, Homo sapien
gaaacaatttggtaaaatccttatcacagtgcc

SEQ ID NO: 313176 - DNA, 33 bp, Homo sapien
gaaacaatttggtaaagtccttatcacagtgcc

SEQ ID NO: 313177 - DNA, 33 bp, Homo sapien
tagatactacctacacacgccaacatgttagca

SEQ ID NO: 313178 - DNA, 33 bp, Homo sapien
tagatactacctacacgcgccaacatgttagca

SEQ ID NO: 313179 - DNA, 33 bp, Homo sapien
gaggaaactgagattcagaacagtttcataaca

SEQ ID NO: 313180 - DNA, 33 bp, Homo sapien
gaggaaactgagattctgaacagtttcataaca

SEQ ID NO: 313181 - DNA, 33 bp, Homo sapien
aaatgttgaggccatgaagcagttggatagcag

SEQ ID NO: 313182 - DNA, 33 bp, Homo sapien
aaatgttgaggccatgcagcagttggatagcag

SEQ ID NO: 313183 - DNA, 33 bp, Homo sapien
gggaacatcttaatgagagtttttgacaatgac

SEQ ID NO: 313184 - DNA, 33 bp, Homo sapien
gggaacatcttaatgatagtttttgacaatgac

SEQ ID NO: 313185 - DNA, 33 bp, Homo sapien
caattgctttctttctcaattgcatcatttagt

SEQ ID NO: 313186 - DNA, 33 bp, Homo sapien
caattgctttctttctgaattgcatcatttagt

SEQ ID NO: 313187 - DNA, 33 bp, Homo sapien
tttctgagacagagaaatgttttcacacctgaa

SEQ ID NO: 313188 - DNA, 33 bp, Homo sapien
tttctgagacagagaagtgttttcacacctgaa

SEQ ID NO: 313189 - DNA, 33 bp, Homo sapien
ataacacatcaaactgaaatagaaaaagatcaa

SEQ ID NO: 313190 - DNA, 33 bp, Homo sapien
ataacacatcaaactggaatagaaaaagatcaa

SEQ ID NO: 313191 - DNA, 33 bp, Homo sapien
aatatcttcactacaccagccgaaaaccttaaa

SEQ ID NO: 313192 - DNA, 33 bp, Homo sapien
aatatcttcactacactagccgaaaaccttaaa

SEQ ID NO: 313193 - DNA, 33 bp, Homo sapien
cttgagaacaagtggacgcgctattatatcaac

SEQ ID NO: 313194 - DNA, 33 bp, Homo sapien
cttgagaacaagtggatgcgctattatatcaac

SEQ ID NO: 313195 - DNA, 33 bp, Homo sapien
tatttaggtgtaacgtgaaaaaagaatcaacaa

SEQ ID NO: 313196 - DNA, 33 bp, Homo sapien
tatttaggtgtaacgttaaaaaagaatcaacaa

SEQ ID NO: 313197 - DNA, 33 bp, Homo sapien
caactgacttgtgttaaagataaatcaggcacc

SEQ ID NO: 313198 - DNA, 33 bp, Homo sapien
caactgacttgtgttatagataaatcaggcacc

SEQ ID NO: 313199 - DNA, 33 bp, Homo sapien
tatttgagtgcattcccacagaaataaatttct

SEQ ID NO: 313200 - DNA, 33 bp, Homo sapien
tatttgagtgcattcctacagaaataaatttct

SEQ ID NO: 313201 - DNA, 33 bp, Homo sapien
ttatgagagacattacagagacacactaaacgc

SEQ ID NO: 313202 - DNA, 33 bp, Homo sapien
ttatgagagacattacggagacacactaaacgc

SEQ ID NO: 313203 - DNA, 33 bp, Homo sapien
ttagatttcggacaaacggaacaacggtcggcc

SEQ ID NO: 313204 - DNA, 33 bp, Homo sapien
ttagatttcggacaaatggaacaacggtcggcc

SEQ ID NO: 313205 - DNA, 33 bp, Homo sapien
ttcatattttagcttgcagtgaaacattcaagt

SEQ ID NO: 313206 - DNA, 33 bp, Homo sapien
ttcatattttagcttggagtgaaacattcaagt

SEQ ID NO: 313207 - DNA, 33 bp, Homo sapien
ggaaaataaacagtgaaaatgtcctggcaatgc

SEQ ID NO: 313208 - DNA, 33 bp, Homo sapien
ggaaaataaacagtgagaatgtcctggcaatgc

SEQ ID NO: 313209 - DNA, 33 bp, Homo sapien
attattggtaactataccacattcctgtgaatc

SEQ ID NO: 313210 - DNA, 33 bp, Homo sapien
attattggtaactatatcacattcctgtgaatc

SEQ ID NO: 313211 - DNA, 33 bp, Homo sapien
actatctaaaactaataacgtctacattttctg

SEQ ID NO: 313212 - DNA, 33 bp, Homo sapien
actatctaaaactaatgacgtctacattttctg

SEQ ID NO: 313213 - DNA, 33 bp, Homo sapien
tttgcatatgtcataaatgtaggcacaggagtt

SEQ ID NO: 313214 - DNA, 33 bp, Homo sapien
tttgcatatgtcataagtgtaggcacaggagtt

SEQ ID NO: 313215 - DNA, 33 bp, Homo sapien
cctgcctgaattcagtcaccaaaagctcgaatt

SEQ ID NO: 313216 - DNA, 33 bp, Homo sapien
cctgcctgaattcagtgaccaaaagctcgaatt

SEQ ID NO: 313217 - DNA, 33 bp, Homo sapien
cccgagtccttatctggatattcaatgtggtca

SEQ ID NO: 313218 - DNA, 33 bp, Homo sapien
cccgagtccttatctgtatattcaatgtggtca

SEQ ID NO: 313219 - DNA, 33 bp, Homo sapien
acatttgctttgtctacggatgttgcatgttgg

SEQ ID NO: 313220 - DNA, 33 bp, Homo sapien
acatttgctttgtctatggatgttgcatgttgg

SEQ ID NO: 313221 - DNA, 33 bp, Homo sapien
gcaacagcattactaaagttgtttgtggtggct

SEQ ID NO: 313222 - DNA, 33 bp, Homo sapien
gcaacagcattactaaggttgtttgtggtggct

SEQ ID NO: 313223 - DNA, 33 bp, Homo sapien
cgaatatgtcaaaatacactatgaaaggccaga

SEQ ID NO: 313224 - DNA, 33 bp, Homo sapien
cgaatatgtcaaaatatactatgaaaggccaga

SEQ ID NO: 313225 - DNA, 33 bp, Homo sapien
acccaaggaagatgcacgttctagtaatttttc

SEQ ID NO: 313226 - DNA, 33 bp, Homo sapien
acccaaggaagatgcaggttctagtaatttttc

SEQ ID NO: 313227 - DNA, 33 bp, Homo sapien
aaatgaggaccctgagaaattgagtgtttaccc

SEQ ID NO: 313228 - DNA, 33 bp, Homo sapien
aaatgaggaccctgaggaattgagtgtttaccc

SEQ ID NO: 313229 - DNA, 33 bp, Homo sapien
caaaggttttccgctccatgttgtggaatgcag

SEQ ID NO: 313230 - DNA, 33 bp, Homo sapien
caaaggttttccgctctatgttgtggaatgcag

SEQ ID NO: 313231 - DNA, 33 bp, Homo sapien
tcacagctgaaatgaacagtagcaactcatttc

SEQ ID NO: 313232 - DNA, 33 bp, Homo sapien
tcacagctgaaatgaatagtagcaactcatttc

SEQ ID NO: 313233 - DNA, 33 bp, Homo sapien
gaacaaagggttatacagcaagtggttggggag

SEQ ID NO: 313234 - DNA, 33 bp, Homo sapien
gaacaaagggttatactgcaagtggttggggag

SEQ ID NO: 313235 - DNA, 33 bp, Homo sapien
gttatggcttccacaactcaggatcagattcat

SEQ ID NO: 313236 - DNA, 33 bp, Homo sapien
gttatggcttccacaattcaggatcagattcat

SEQ ID NO: 313237 - DNA, 33 bp, Homo sapien
catcttttcttatatgacaatgctttacatgaa

SEQ ID NO: 313238 - DNA, 33 bp, Homo sapien
catcttttcttatatggcaatgctttacatgaa

SEQ ID NO: 313239 - DNA, 33 bp, Homo sapien
ctaatgttttgtgaaaggtgaaatttgggaata

SEQ ID NO: 313240 - DNA, 33 bp, Homo sapien
ctaatgttttgtgaaatgtgaaatttgggaata

SEQ ID NO: 313241 - DNA, 33 bp, Homo sapien
gtcccagttgtgagtacggcccgcaattggaag

SEQ ID NO: 313242 - DNA, 33 bp, Homo sapien
gtcccagttgtgagtatggcccgcaattggaag

SEQ ID NO: 313243 - DNA, 33 bp, Homo sapien
agatgttggctgaatacgacaaattttataatt

SEQ ID NO: 313244 - DNA, 33 bp, Homo sapien
agatgttggctgaataggacaaattttataatt

SEQ ID NO: 313245 - DNA, 33 bp, Homo sapien
tcttcatcaaggtctacgttatagtcacctttc

SEQ ID NO: 313246 - DNA, 33 bp, Homo sapien
tcttcatcaaggtctatgttatagtcacctttc

SEQ ID NO: 313247 - DNA, 33 bp, Homo sapien
gaagttattaattcacccgtacaatataaggct

SEQ ID NO: 313248 - DNA, 33 bp, Homo sapien
gaagttattaattcactcgtacaatataaggct

SEQ ID NO: 313249 - DNA, 33 bp, Homo sapien
ataaacactcactgaaacattaactacctggtt

SEQ ID NO: 313250 - DNA, 33 bp, Homo sapien
ataaacactcactgaatcattaactacctggtt

SEQ ID NO: 313251 - DNA, 33 bp, Homo sapien
ccagttattcccctgacggtaagccctatatac

SEQ ID NO: 313252 - DNA, 33 bp, Homo sapien
ccagttattcccctgatggtaagccctatatac

SEQ ID NO: 313253 - DNA, 33 bp, Homo sapien
tgttactacttgacacacaacatatttgctgta

SEQ ID NO: 313254 - DNA, 33 bp, Homo sapien
tgttactacttgacacgcaacatatttgctgta

SEQ ID NO: 313255 - DNA, 33 bp, Homo sapien
gttgagggccgggacacgtagagataattgaat

SEQ ID NO: 313256 - DNA, 33 bp, Homo sapien
gttgagggccgggacaggtagagataattgaat

SEQ ID NO: 313257 - DNA, 33 bp, Homo sapien
atctggaaggaggtaacgtacaggatggtatga

SEQ ID NO: 313258 - DNA, 33 bp, Homo sapien
atctggaaggaggtaatgtacaggatggtatga

SEQ ID NO: 313259 - DNA, 33 bp, Homo sapien
acaacaaaaatgccaaattgctgaatagctgat

SEQ ID NO: 313260 - DNA, 33 bp, Homo sapien
acaacaaaaatgccaagttgctgaatagctgat

SEQ ID NO: 313261 - DNA, 33 bp, Homo sapien
ctcttggctagactctaaagaattgctatggca

SEQ ID NO: 313262 - DNA, 33 bp, Homo sapien
ctcttggctagactctgaagaattgctatggca

SEQ ID NO: 313263 - DNA, 33 bp, Homo sapien
tccaaaaccaagttgccaacaagcttggtttat

SEQ ID NO: 313264 - DNA, 33 bp, Homo sapien
tccaaaaccaagttgcgaacaagcttggtttat

SEQ ID NO: 313265 - DNA, 33 bp, Homo sapien
agattttcctttaggaactggtaactctgttag

SEQ ID NO: 313266 - DNA, 33 bp, Homo sapien
agattttcctttaggacctggtaactctgttag

SEQ ID NO: 313267 - DNA, 33 bp, Homo sapien
gttttgtatttatgcacagagtgagatccaaag

SEQ ID NO: 313268 - DNA, 33 bp, Homo sapien
gttttgtatttatgcatagagtgagatccaaag

SEQ ID NO: 313269 - DNA, 33 bp, Homo sapien
cactgactttgagaggaaataatcaagcattca

SEQ ID NO: 313270 - DNA, 33 bp, Homo sapien
cactgactttgagagggaataatcaagcattca

SEQ ID NO: 313271 - DNA, 33 bp, Homo sapien
aaactgatcatgaatacaaaagtgtgtgagggt

SEQ ID NO: 313272 - DNA, 33 bp, Homo sapien
aaactgatcatgaatataaaagtgtgtgagggt

SEQ ID NO: 313273 - DNA, 33 bp, Homo sapien
gaagtatagtcagctcccattatttaccataga

SEQ ID NO: 313274 - DNA, 33 bp, Homo sapien
gaagtatagtcagctctcattatttaccataga

SEQ ID NO: 313275 - DNA, 33 bp, Homo sapien
tggacgaactttataccatttctgttaaagcct

SEQ ID NO: 313276 - DNA, 33 bp, Homo sapien
tggacgaactttatacgatttctgttaaagcct

SEQ ID NO: 313277 - DNA, 33 bp, Homo sapien
gtgaaatgttttccaagaatatctttcacctgt

SEQ ID NO: 313278 - DNA, 33 bp, Homo sapien
gtgaaatgttttccaataatatctttcacctgt

SEQ ID NO: 313279 - DNA, 33 bp, Homo sapien
aaaatattgattagagcatctggcaaactttga

SEQ ID NO: 313280 - DNA, 33 bp, Homo sapien
aaaatattgattagagtatctggcaaactttga

SEQ ID NO: 313281 - DNA, 33 bp, Homo sapien
tcaggaagagtcaagacagaaaaggcccttaaa

SEQ ID NO: 313282 - DNA, 33 bp, Homo sapien
tcaggaagagtcaagatagaaaaggcccttaaa

SEQ ID NO: 313283 - DNA, 33 bp, Homo sapien
atgtcctgcagaaatcacctccatttcccttct

SEQ ID NO: 313284 - DNA, 33 bp, Homo sapien
atgtcctgcagaaatcgcctccatttcccttct

SEQ ID NO: 313285 - DNA, 33 bp, Homo sapien
gtgtaatagatcacaagagcttatcccttttgc

SEQ ID NO: 313286 - DNA, 33 bp, Homo sapien
gtgtaatagatcacaatagcttatcccttttgc

SEQ ID NO: 313287 - DNA, 33 bp, Homo sapien
ttataaatttagtgtacgcctatatgtacagta

SEQ ID NO: 313288 - DNA, 33 bp, Homo sapien
ttataaatttagtgtatgcctatatgtacagta

SEQ ID NO: 313289 - DNA, 33 bp, Homo sapien
acagagacatggcaaaaaattgtgagagacaca

SEQ ID NO: 313290 - DNA, 33 bp, Homo sapien
acagagacatggcaaagaattgtgagagacaca

SEQ ID NO: 313291 - DNA, 33 bp, Homo sapien
gttgttggatcgtgccccaaaaattaaatgaga

SEQ ID NO: 313292 - DNA, 33 bp, Homo sapien
gttgttggatcgtgcctcaaaaattaaatgaga

SEQ ID NO: 313293 - DNA, 33 bp, Homo sapien
cagggaacctcttaatcatcttgcttcagctaa

SEQ ID NO: 313294 - DNA, 33 bp, Homo sapien
cagggaacctcttaattatcttgcttcagctaa

SEQ ID NO: 313295 - DNA, 33 bp, Homo sapien
aacagctactcagtagaacccaggttaccatgg

SEQ ID NO: 313296 - DNA, 33 bp, Homo sapien
aacagctactcagtaggacccaggttaccatgg

SEQ ID NO: 313297 - DNA, 33 bp, Homo sapien
atgcctggctcagaaacggcaatactgtggctc

SEQ ID NO: 313298 - DNA, 33 bp, Homo sapien
atgcctggctcagaaatggcaatactgtggctc

SEQ ID NO: 313299 - DNA, 33 bp, Homo sapien
ggcaatactgtggctcaacactgtgagagactc

SEQ ID NO: 313300 - DNA, 33 bp, Homo sapien
ggcaatactgtggctctacactgtgagagactc

SEQ ID NO: 313301 - DNA, 33 bp, Homo sapien
gataaaatgattaccactggcatatcccaacca

SEQ ID NO: 313302 - DNA, 33 bp, Homo sapien
gataaaatgattaccattggcatatcccaacca

SEQ ID NO: 313303 - DNA, 33 bp, Homo sapien
gacttaatctcagggaagtgtgtaacagtcatg

SEQ ID NO: 313304 - DNA, 33 bp, Homo sapien
gacttaatctcagggaggtgtgtaacagtcatg

SEQ ID NO: 313305 - DNA, 33 bp, Homo sapien
ccttgaaaaggtcagacattgagtgttcccact

SEQ ID NO: 313306 - DNA, 33 bp, Homo sapien
ccttgaaaaggtcagagattgagtgttcccact

SEQ ID NO: 313307 - DNA, 33 bp, Homo sapien
caagagcagtctaacaaggaagagggacaaaag

SEQ ID NO: 313308 - DNA, 33 bp, Homo sapien
caagagcagtctaacatggaagagggacaaaag

SEQ ID NO: 313309 - DNA, 33 bp, Homo sapien
ctcctgttttctttagccgtcaaactctgcccc

SEQ ID NO: 313310 - DNA, 33 bp, Homo sapien
ctcctgttttctttaggcgtcaaactctgcccc

SEQ ID NO: 313311 - DNA, 33 bp, Homo sapien
agctgaaagaatgtcaaaagtgatacaggataa

SEQ ID NO: 313312 - DNA, 33 bp, Homo sapien
agctgaaagaatgtcagaagtgatacaggataa

SEQ ID NO: 313313 - DNA, 33 bp, Homo sapien
tgtatagctttcagtacatgagcgcaaacctct

SEQ ID NO: 313314 - DNA, 33 bp, Homo sapien
tgtatagctttcagtatatgagcgcaaacctct

SEQ ID NO: 313315 - DNA, 33 bp, Homo sapien
gtttaaatcatgaaacaaataggtaatataatc

SEQ ID NO: 313316 - DNA, 33 bp, Homo sapien
gtttaaatcatgaaaccaataggtaatataatc

SEQ ID NO: 313317 - DNA, 33 bp, Homo sapien
attgtctgcccactaaatgaaatttctcttgtt

SEQ ID NO: 313318 - DNA, 33 bp, Homo sapien
attgtctgcccactaagtgaaatttctcttgtt

SEQ ID NO: 313319 - DNA, 33 bp, Homo sapien
ctaatgtacataaaatcactgccatatggaaat

SEQ ID NO: 313320 - DNA, 33 bp, Homo sapien
ctaatgtacataaaattactgccatatggaaat

SEQ ID NO: 313321 - DNA, 33 bp, Homo sapien
ctggattagacacttccagtacctataataaaa

SEQ ID NO: 313322 - DNA, 33 bp, Homo sapien
ctggattagacacttctagtacctataataaaa

SEQ ID NO: 313323 - DNA, 33 bp, Homo sapien
gctctgaggaatcccacggtaggatcaaaaaga

SEQ ID NO: 313324 - DNA, 33 bp, Homo sapien
gctctgaggaatcccatggtaggatcaaaaaga

SEQ ID NO: 313325 - DNA, 33 bp, Homo sapien
gcccccatcacccatgcaaatcttgtcttatgg

SEQ ID NO: 313326 - DNA, 33 bp, Homo sapien
gcccccatcacccatggaaatcttgtcttatgg

SEQ ID NO: 313327 - DNA, 33 bp, Homo sapien
ggagaatgaagagccccagttctgctaagatgt

SEQ ID NO: 313328 - DNA, 33 bp, Homo sapien
ggagaatgaagagcccgagttctgctaagatgt

SEQ ID NO: 313329 - DNA, 33 bp, Homo sapien
gacttgcaactccccaatcactcctgcagataa

SEQ ID NO: 313330 - DNA, 33 bp, Homo sapien
gacttgcaactccccagtcactcctgcagataa

SEQ ID NO: 313331 - DNA, 33 bp, Homo sapien
tccacaaatcatgtcaatcaccgatctgtcctc

SEQ ID NO: 313332 - DNA, 33 bp, Homo sapien
tccacaaatcatgtcactcaccgatctgtcctc

SEQ ID NO: 313333 - DNA, 33 bp, Homo sapien
catacattcaggtagaactgtgcacatcattat

SEQ ID NO: 313334 - DNA, 33 bp, Homo sapien
catacattcaggtagatctgtgcacatcattat

SEQ ID NO: 313335 - DNA, 33 bp, Homo sapien
ttcttgagtattgatcacaattgatttttgtct

SEQ ID NO: 313336 - DNA, 33 bp, Homo sapien
ttcttgagtattgatcgcaattgatttttgtct

SEQ ID NO: 313337 - DNA, 33 bp, Homo sapien
aataaataggaacataccaaaaattcaggactg

SEQ ID NO: 313338 - DNA, 33 bp, Homo sapien
aataaataggaacatagcaaaaattcaggactg

SEQ ID NO: 313339 - DNA, 33 bp, Homo sapien
aaacatcgaagtggctaaactcagcttccaagg

SEQ ID NO: 313340 - DNA, 33 bp, Homo sapien
aaacatcgaagtggctgaactcagcttccaagg

SEQ ID NO: 313341 - DNA, 33 bp, Homo sapien
taagagccagagttggcacagtattttaatgga

SEQ ID NO: 313342 - DNA, 33 bp, Homo sapien
taagagccagagttgggacagtattttaatgga

SEQ ID NO: 313343 - DNA, 33 bp, Homo sapien
ctctggttttgtcatccaagaagtgctgtgtca

SEQ ID NO: 313344 - DNA, 33 bp, Homo sapien
ctctggttttgtcatctaagaagtgctgtgtca

SEQ ID NO: 313345 - DNA, 33 bp, Homo sapien
tgcaaagaaataatacggatgctagaaatagca

SEQ ID NO: 313346 - DNA, 33 bp, Homo sapien
tgcaaagaaataatactgatgctagaaatagca

SEQ ID NO: 313347 - DNA, 33 bp, Homo sapien
tcggaaaaataatgcaaactagcactgttgctc

SEQ ID NO: 313348 - DNA, 33 bp, Homo sapien
tcggaaaaataatgcagactagcactgttgctc

SEQ ID NO: 313349 - DNA, 33 bp, Homo sapien
ttcaagatagatgagaagagagtagttaaacaa

SEQ ID NO: 313350 - DNA, 33 bp, Homo sapien
ttcaagatagatgagaggagagtagttaaacaa

SEQ ID NO: 313351 - DNA, 33 bp, Homo sapien
gctaaaaatcgaaaatcaaggtgttggcaggcc

SEQ ID NO: 313352 - DNA, 33 bp, Homo sapien
gctaaaaatcgaaaatgaaggtgttggcaggcc

SEQ ID NO: 313353 - DNA, 33 bp, Homo sapien
ccatcactgagtgccactgcaagcaggcttctg

SEQ ID NO: 313354 - DNA, 33 bp, Homo sapien
ccatcactgagtgccattgcaagcaggcttctg

SEQ ID NO: 313355 - DNA, 33 bp, Homo sapien
gcctttgtcacaggaaatctcaatatgcctgaa

SEQ ID NO: 313356 - DNA, 33 bp, Homo sapien
gcctttgtcacaggaactctcaatatgcctgaa

SEQ ID NO: 313357 - DNA, 33 bp, Homo sapien
ttagttgtcaacatttaaaaaatttacataaaa

SEQ ID NO: 313358 - DNA, 33 bp, Homo sapien
ttagttgtcaacattttaaaaatttacataaaa

SEQ ID NO: 313359 - DNA, 33 bp, Homo sapien
acaaaactggctatgcaaaagaaccccaaatta

SEQ ID NO: 313360 - DNA, 33 bp, Homo sapien
acaaaactggctatgctaaagaaccccaaatta

SEQ ID NO: 313361 - DNA, 33 bp, Homo sapien
ttggacataactgagccaatttttccaacaaaa

SEQ ID NO: 313362 - DNA, 33 bp, Homo sapien
ttggacataactgagcgaatttttccaacaaaa

SEQ ID NO: 313363 - DNA, 33 bp, Homo sapien
tttttaccactttgcaacaaaacgatttcctca

SEQ ID NO: 313364 - DNA, 33 bp, Homo sapien
tttttaccactttgcagcaaaacgatttcctca

SEQ ID NO: 313365 - DNA, 33 bp, Homo sapien
ccccggcatagagaacacagcatagaataggtg

SEQ ID NO: 313366 - DNA, 33 bp, Homo sapien
ccccggcatagagaacgcagcatagaataggtg

SEQ ID NO: 313367 - DNA, 33 bp, Homo sapien
ctcttttgaaaagtgtcaaatccttattgtcca

SEQ ID NO: 313368 - DNA, 33 bp, Homo sapien
ctcttttgaaaagtgtgaaatccttattgtcca

SEQ ID NO: 313369 - DNA, 33 bp, Homo sapien
tagatacccttggaaactgcaagtgtaagaatg

SEQ ID NO: 313370 - DNA, 33 bp, Homo sapien
tagatacccttggaaattgcaagtgtaagaatg

SEQ ID NO: 313371 - DNA, 33 bp, Homo sapien
gataatgacccattaacgagcttgtaagaatga

SEQ ID NO: 313372 - DNA, 33 bp, Homo sapien
gataatgacccattaatgagcttgtaagaatga

SEQ ID NO: 313373 - DNA, 33 bp, Homo sapien
agatagatgccttaaacgtaagtcctgaaactg

SEQ ID NO: 313374 - DNA, 33 bp, Homo sapien
agatagatgccttaaatgtaagtcctgaaactg

SEQ ID NO: 313375 - DNA, 33 bp, Homo sapien
agaatttggtattttcaatgttctggatttcgg

SEQ ID NO: 313376 - DNA, 33 bp, Homo sapien
agaatttggtattttctatgttctggatttcgg

SEQ ID NO: 313377 - DNA, 33 bp, Homo sapien
agtagctcccaaaatcacatacagttgaaacta

SEQ ID NO: 313378 - DNA, 33 bp, Homo sapien
agtagctcccaaaatcgcatacagttgaaacta

SEQ ID NO: 313379 - DNA, 33 bp, Homo sapien
aacaaatctaagtcatgaggaaacagtgcatta

SEQ ID NO: 313380 - DNA, 33 bp, Homo sapien
aacaaatctaagtcattaggaaacagtgcatta

SEQ ID NO: 313381 - DNA, 33 bp, Homo sapien
tactgtaaggttttaacaactcaatgttagtat

SEQ ID NO: 313382 - DNA, 33 bp, Homo sapien
tactgtaaggttttaagaactcaatgttagtat

SEQ ID NO: 313383 - DNA, 33 bp, Homo sapien
tgctttagaaagtgcccgaggctgtgaaagaaa

SEQ ID NO: 313384 - DNA, 33 bp, Homo sapien
tgctttagaaagtgcctgaggctgtgaaagaaa

SEQ ID NO: 313385 - DNA, 33 bp, Homo sapien
gctagtgaacttgggacatacattacctagtaa

SEQ ID NO: 313386 - DNA, 33 bp, Homo sapien
gctagtgaacttgggatatacattacctagtaa

SEQ ID NO: 313387 - DNA, 33 bp, Homo sapien
acgtagcaggacttcaatattcattcacttaat

SEQ ID NO: 313388 - DNA, 33 bp, Homo sapien
acgtagcaggacttcactattcattcacttaat

SEQ ID NO: 313389 - DNA, 33 bp, Homo sapien
acatttcagtaaatgacagatcacatatacagt

SEQ ID NO: 313390 - DNA, 33 bp, Homo sapien
acatttcagtaaatgagagatcacatatacagt

SEQ ID NO: 313391 - DNA, 33 bp, Homo sapien
taatgtagaaactcaaaaggtattactctacta

SEQ ID NO: 313392 - DNA, 33 bp, Homo sapien
taatgtagaaactcaacaggtattactctacta

SEQ ID NO: 313393 - DNA, 33 bp, Homo sapien
gccccactggatgactcaaaaggatacttgtgc

SEQ ID NO: 313394 - DNA, 33 bp, Homo sapien
gccccactggatgactgaaaaggatacttgtgc

SEQ ID NO: 313395 - DNA, 33 bp, Homo sapien
tcaccaactggaaaatcatctcttaactcgttg

SEQ ID NO: 313396 - DNA, 33 bp, Homo sapien
tcaccaactggaaaatgatctcttaactcgttg

SEQ ID NO: 313397 - DNA, 33 bp, Homo sapien
ccatccttagggaacacatttttctcgaacaaa

SEQ ID NO: 313398 - DNA, 33 bp, Homo sapien
ccatccttagggaacatatttttctcgaacaaa

SEQ ID NO: 313399 - DNA, 33 bp, Homo sapien
atttccaaagtacgttcaaagcctctgaatcac

SEQ ID NO: 313400 - DNA, 33 bp, Homo sapien
atttccaaagtacgttgaaagcctctgaatcac

SEQ ID NO: 313401 - DNA, 33 bp, Homo sapien
caattctagtctttccagaacttaagagtggta

SEQ ID NO: 313402 - DNA, 33 bp, Homo sapien
caattctagtctttccggaacttaagagtggta

SEQ ID NO: 313403 - DNA, 33 bp, Homo sapien
ttttctaaggaacagaagtagtggtcaagtcaa

SEQ ID NO: 313404 - DNA, 33 bp, Homo sapien
ttttctaaggaacagaggtagtggtcaagtcaa

SEQ ID NO: 313405 - DNA, 33 bp, Homo sapien
tacttaggcaaatcaacgcagcccttgacagcc

SEQ ID NO: 313406 - DNA, 33 bp, Homo sapien
tacttaggcaaatcaatgcagcccttgacagcc

SEQ ID NO: 313407 - DNA, 33 bp, Homo sapien
agagaatgactgtggactatcgtaaattcaatt

SEQ ID NO: 313408 - DNA, 33 bp, Homo sapien
agagaatgactgtggagtatcgtaaattcaatt

SEQ ID NO: 313409 - DNA, 33 bp, Homo sapien
agattgagtgttctacaaaggggttcttagact

SEQ ID NO: 313410 - DNA, 33 bp, Homo sapien
agattgagtgttctaccaaggggttcttagact

SEQ ID NO: 313411 - DNA, 33 bp, Homo sapien
agtcaccagacatttcaccttgctcctctgtta

SEQ ID NO: 313412 - DNA, 33 bp, Homo sapien
agtcaccagacatttctccttgctcctctgtta

SEQ ID NO: 313413 - DNA, 33 bp, Homo sapien
acatctggcaattgtccatatctctgtcctcac

SEQ ID NO: 313414 - DNA, 33 bp, Homo sapien
acatctggcaattgtctatatctctgtcctcac

SEQ ID NO: 313415 - DNA, 33 bp, Homo sapien
ctgcctagcctgaagaaaaaaacagaatctatg

SEQ ID NO: 313416 - DNA, 33 bp, Homo sapien
ctgcctagcctgaagagaaaaacagaatctatg

SEQ ID NO: 313417 - DNA, 33 bp, Homo sapien
tatgtgcttctaaaaggctagtctattcctctt

SEQ ID NO: 313418 - DNA, 33 bp, Homo sapien
tatgtgcttctaaaagtctagtctattcctctt

SEQ ID NO: 313419 - DNA, 33 bp, Homo sapien
atgatcccttatcctagaactatgtactgtcca

SEQ ID NO: 313420 - DNA, 33 bp, Homo sapien
atgatcccttatcctataactatgtactgtcca

SEQ ID NO: 313421 - DNA, 33 bp, Homo sapien
agcctttcctcattccccattcctgaactagaa

SEQ ID NO: 313422 - DNA, 33 bp, Homo sapien
agcctttcctcattcctcattcctgaactagaa

SEQ ID NO: 313423 - DNA, 33 bp, Homo sapien
agtcaaaaagctaacgaattatgtttgtacttg

SEQ ID NO: 313424 - DNA, 33 bp, Homo sapien
agtcaaaaagctaacgtattatgtttgtacttg

SEQ ID NO: 313425 - DNA, 33 bp, Homo sapien
attccttgtctccccaaatatttttgatctgca

SEQ ID NO: 313426 - DNA, 33 bp, Homo sapien
attccttgtctccccagatatttttgatctgca

SEQ ID NO: 313427 - DNA, 33 bp, Homo sapien
aacacgtccttgatcaaccttaggataggagca

SEQ ID NO: 313428 - DNA, 33 bp, Homo sapien
aacacgtccttgatcagccttaggataggagca

SEQ ID NO: 313429 - DNA, 33 bp, Homo sapien
acaatctatgcttttcaaaatgagtacaagaag

SEQ ID NO: 313430 - DNA, 33 bp, Homo sapien
acaatctatgcttttccaaatgagtacaagaag

SEQ ID NO: 313431 - DNA, 33 bp, Homo sapien
tcatttttaactaatcaaacaaatcaataggag

SEQ ID NO: 313432 - DNA, 33 bp, Homo sapien
tcatttttaactaatcgaacaaatcaataggag

SEQ ID NO: 313433 - DNA, 33 bp, Homo sapien
gtcaaggattcttcaactctactgaagcaaaac

SEQ ID NO: 313434 - DNA, 33 bp, Homo sapien
gtcaaggattcttcaagtctactgaagcaaaac

SEQ ID NO: 313435 - DNA, 33 bp, Homo sapien
tctttcaacttgaaaagaaatgtaacagctcat

SEQ ID NO: 313436 - DNA, 33 bp, Homo sapien
tctttcaacttgaaaataaatgtaacagctcat

SEQ ID NO: 313437 - DNA, 33 bp, Homo sapien
gctattccaaaagttcacaagtattgcagatga

SEQ ID NO: 313438 - DNA, 33 bp, Homo sapien
gctattccaaaagttcccaagtattgcagatga

SEQ ID NO: 313439 - DNA, 33 bp, Homo sapien
gtagttcaccaatgtagctatgtaacaaaactg

SEQ ID NO: 313440 - DNA, 33 bp, Homo sapien
gtagttcaccaatgtatctatgtaacaaaactg

SEQ ID NO: 313441 - DNA, 33 bp, Homo sapien
aagtccagcagtagaactgtgtgcaaaaagctt

SEQ ID NO: 313442 - DNA, 33 bp, Homo sapien
aagtccagcagtagaagtgtgtgcaaaaagctt

SEQ ID NO: 313443 - DNA, 33 bp, Homo sapien
gttgacacaattcttacgcttcccaagtaaaca

SEQ ID NO: 313444 - DNA, 33 bp, Homo sapien
gttgacacaattcttatgcttcccaagtaaaca

SEQ ID NO: 313445 - DNA, 33 bp, Homo sapien
tctgtcatctaatgtaccagagctcgattcttt

SEQ ID NO: 313446 - DNA, 33 bp, Homo sapien
tctgtcatctaatgtagcagagctcgattcttt

SEQ ID NO: 313447 - DNA, 33 bp, Homo sapien
gaaaatacgtgtgtggaagtgaccactttgcta

SEQ ID NO: 313448 - DNA, 33 bp, Homo sapien
gaaaatacgtgtgtgggagtgaccactttgcta

SEQ ID NO: 313449 - DNA, 33 bp, Homo sapien
ctatccgagttttcacagagtccaggagaaagt

SEQ ID NO: 313450 - DNA, 33 bp, Homo sapien
ctatccgagttttcacggagtccaggagaaagt

SEQ ID NO: 313451 - DNA, 33 bp, Homo sapien
ataattttcagagcccaatgcaagattaaaaag

SEQ ID NO: 313452 - DNA, 33 bp, Homo sapien
ataattttcagagcccgatgcaagattaaaaag

SEQ ID NO: 313453 - DNA, 33 bp, Homo sapien
ggttcattggacttaaagactaggctactctga

SEQ ID NO: 313454 - DNA, 33 bp, Homo sapien
ggttcattggacttaaggactaggctactctga

SEQ ID NO: 313455 - DNA, 33 bp, Homo sapien
tcaacactacagcaacaaagttattagctagta

SEQ ID NO: 313456 - DNA, 33 bp, Homo sapien
tcaacactacagcaaccaagttattagctagta

SEQ ID NO: 313457 - DNA, 33 bp, Homo sapien
gatttctaaactgtaaaagcttcagaagtgtca

SEQ ID NO: 313458 - DNA, 33 bp, Homo sapien
gatttctaaactgtaagagcttcagaagtgtca

SEQ ID NO: 313459 - DNA, 33 bp, Homo sapien
atcataataggtgctcaatgtttttacatttga

SEQ ID NO: 313460 - DNA, 33 bp, Homo sapien
atcataataggtgctccatgtttttacatttga

SEQ ID NO: 313461 - DNA, 33 bp, Homo sapien
tcttgagcatgaattacgaagagaagtataacc

SEQ ID NO: 313462 - DNA, 33 bp, Homo sapien
tcttgagcatgaattatgaagagaagtataacc

SEQ ID NO: 313463 - DNA, 33 bp, Homo sapien
tgtaatccattgcagaagacgtcaaaaaggaga

SEQ ID NO: 313464 - DNA, 33 bp, Homo sapien
tgtaatccattgcagaggacgtcaaaaaggaga

SEQ ID NO: 313465 - DNA, 33 bp, Homo sapien; identical to SEQ ID NO: 313463

SEQ ID NO: 313466 - DNA, 33 bp, Homo sapien; identical to SEQ ID NO: 313464

SEQ ID NO: 313467 - DNA, 33 bp, Homo sapien
ttaccccatatatccaactgctctttctacgcc

SEQ ID NO: 313468 - DNA, 33 bp, Homo sapien
ttaccccatatatccagctgctctttctacgcc

SEQ ID NO: 313469 - DNA, 33 bp, Homo sapien
attggtgttaaatcacaattagagttaactccc

SEQ ID NO: 313470 - DNA, 33 bp, Homo sapien
attggtgttaaatcacgattagagttaactccc

SEQ ID NO: 313471 - DNA, 33 bp, Homo sapien
tattttacactgctgccgcacatttaaccttca

SEQ ID NO: 313472 - DNA, 33 bp, Homo sapien
tattttacactgctgctgcacatttaaccttca

SEQ ID NO: 313473 - DNA, 33 bp, Homo sapien
caaaaattaattagccacattgacacatcctac

SEQ ID NO: 313474 - DNA, 33 bp, Homo sapien
caaaaattaattagccgcattgacacatcctac

SEQ ID NO: 313475 - DNA, 33 bp, Homo sapien
taaagaaggtgagagacgaataagtgaaaagga

SEQ ID NO: 313476 - DNA, 33 bp, Homo sapien
taaagaaggtgagagatgaataagtgaaaagga

SEQ ID NO: 313477 - DNA, 33 bp, Homo sapien
gatgttccgtagtgataataagagctagtattt

SEQ ID NO: 313478 - DNA, 33 bp, Homo sapien
gatgttccgtagtgatgataagagctagtattt

SEQ ID NO: 313479 - DNA, 33 bp, Homo sapien
gcagatatatatgcaacagaaatgtctgtatat

SEQ ID NO: 313480 - DNA, 33 bp, Homo sapien
gcagatatatatgcaagagaaatgtctgtatat

SEQ ID NO: 313481 - DNA, 33 bp, Homo sapien
taagtaaagtttgcctcaggaatttagtcctct

SEQ ID NO: 313482 - DNA, 33 bp, Homo sapien
taagtaaagtttgccttaggaatttagtcctct

SEQ ID NO: 313483 - DNA, 33 bp, Homo sapien
ggttacttgcttatctaactaggaagacaagac

SEQ ID NO: 313484 - DNA, 33 bp, Homo sapien
ggttacttgcttatctcactaggaagacaagac

SEQ ID NO: 313485 - DNA, 33 bp, Homo sapien
atagcattgatacaaaattagttaagataatgt

SEQ ID NO: 313486 - DNA, 33 bp, Homo sapien
atagcattgatacaaagttagttaagataatgt

SEQ ID NO: 313487 - DNA, 33 bp, Homo sapien
aaacccagaaatataccaacacagatatgctca

SEQ ID NO: 313488 - DNA, 33 bp, Homo sapien
aaacccagaaatatacgaacacagatatgctca

SEQ ID NO: 313489 - DNA, 33 bp, Homo sapien
agtgtgagtatgaatcagaggtagtgcagttgg

SEQ ID NO: 313490 - DNA, 33 bp, Homo sapien
agtgtgagtatgaatcggaggtagtgcagttgg

SEQ ID NO: 313491 - DNA, 33 bp, Homo sapien
gagaaacaattagagaccttggacctagattat

SEQ ID NO: 313492 - DNA, 33 bp, Homo sapien
gagaaacaattagagatcttggacctagattat

SEQ ID NO: 313493 - DNA, 33 bp, Homo sapien
ataattaaggtgtgataaggagacacttgtcta

SEQ ID NO: 313494 - DNA, 33 bp, Homo sapien
ataattaaggtgtgatgaggagacacttgtcta

SEQ ID NO: 313495 - DNA, 33 bp, Homo sapien
atacatgtgttggaaaaagtaaacattaaacat

SEQ ID NO: 313496 - DNA, 33 bp, Homo sapien
atacatgtgttggaaagagtaaacattaaacat

SEQ ID NO: 313497 - DNA, 33 bp, Homo sapien
taatagtttcttaatagcgtctcttgctcaaca

SEQ ID NO: 313498 - DNA, 33 bp, Homo sapien
taatagtttcttaatatcgtctcttgctcaaca

SEQ ID NO: 313499 - DNA, 33 bp, Homo sapien
agaagggagaaagcaaactacatttctatggaa

SEQ ID NO: 313500 - DNA, 33 bp, Homo sapien
agaagggagaaagcaagctacatttctatggaa

SEQ ID NO: 313501 - DNA, 33 bp, Homo sapien
ttgctacatagctgaactcttatcattgtagtt

SEQ ID NO: 313502 - DNA, 33 bp, Homo sapien
ttgctacatagctgaagtcttatcattgtagtt

SEQ ID NO: 313503 - DNA, 33 bp, Homo sapien
tccaacttgtctaaaactgcaagaataagcttt

SEQ ID NO: 313504 - DNA, 33 bp, Homo sapien
tccaacttgtctaaaattgcaagaataagcttt

SEQ ID NO: 313505 - DNA, 33 bp, Homo sapien
gttggttactgttaaaatactgagttgcaggag

SEQ ID NO: 313506 - DNA, 33 bp, Homo sapien
gttggttactgttaaactactgagttgcaggag

SEQ ID NO: 313507 - DNA, 33 bp, Homo sapien
tgtctgtataacctgacgctctctccaaaatgt

SEQ ID NO: 313508 - DNA, 33 bp, Homo sapien
tgtctgtataacctgatgctctctccaaaatgt

SEQ ID NO: 313509 - DNA, 33 bp, Homo sapien
actttatctgatgtcacgtggtagctagtctat

SEQ ID NO: 313510 - DNA, 33 bp, Homo sapien
actttatctgatgtcatgtggtagctagtctat

SEQ ID NO: 313511 - DNA, 33 bp, Homo sapien
atttttaattatgatcccaggcttgcaacatga

SEQ ID NO: 313512 - DNA, 33 bp, Homo sapien
atttttaattatgatctcaggcttgcaacatga

SEQ ID NO: 313513 - DNA, 33 bp, Homo sapien
ggaaaatatttatagccccaaatcccatagcac

SEQ ID NO: 313514 - DNA, 33 bp, Homo sapien
ggaaaatatttatagctccaaatcccatagcac

SEQ ID NO: 313515 - DNA, 33 bp, Homo sapien
tcgagagagcagccgacgagcacattaactgac

SEQ ID NO: 313516 - DNA, 33 bp, Homo sapien
tcgagagagcagccgatgagcacattaactgac

SEQ ID NO: 313517 - DNA, 33 bp, Homo sapien
agacgaagttcataaaaatgttctgattcaacc

SEQ ID NO: 313518 - DNA, 33 bp, Homo sapien
agacgaagttcataaacatgttctgattcaacc

SEQ ID NO: 313519 - DNA, 33 bp, Homo sapien
atgggactgatttaacagaagtttcaattacca

SEQ ID NO: 313520 - DNA, 33 bp, Homo sapien
atgggactgatttaacggaagtttcaattacca

SEQ ID NO: 313521 - DNA, 33 bp, Homo sapien
attctgtgggcaataccgaagaaatacactgat

SEQ ID NO: 313522 - DNA, 33 bp, Homo sapien
attctgtgggcaatactgaagaaatacactgat

SEQ ID NO: 313523 - DNA, 33 bp, Homo sapien
gggatcaaagccctgaaaactagacattgttgg

SEQ ID NO: 313524 - DNA, 33 bp, Homo sapien
gggatcaaagccctgagaactagacattgttgg

SEQ ID NO: 313525 - DNA, 33 bp, Homo sapien
taatatctagaccacaatcactgtttattggct

SEQ ID NO: 313526 - DNA, 33 bp, Homo sapien
taatatctagaccacattcactgtttattggct

SEQ ID NO: 313527 - DNA, 33 bp, Homo sapien
tttaatattttgaagacgtcattgtggtagaag

SEQ ID NO: 313528 - DNA, 33 bp, Homo sapien
tttaatattttgaagatgtcattgtggtagaag

SEQ ID NO: 313529 - DNA, 33 bp, Homo sapien
aagcatctgtagggcactaatacacccctgaag

SEQ ID NO: 313530 - DNA, 33 bp, Homo sapien
aagcatctgtagggcagtaatacacccctgaag

SEQ ID NO: 313531 - DNA, 33 bp, Homo sapien
ttgatctctctcttctcacatttacatatattt

SEQ ID NO: 313532 - DNA, 33 bp, Homo sapien
ttgatctctctcttctgacatttacatatattt

SEQ ID NO: 313533 - DNA, 33 bp, Homo sapien
tctgcaccaaaatccaacataataccaagaata

SEQ ID NO: 313534 - DNA, 33 bp, Homo sapien
tctgcaccaaaatccagcataataccaagaata

SEQ ID NO: 313535 - DNA, 33 bp, Homo sapien
ttatgacctgatttcacaatggacaaagaagga

SEQ ID NO: 313536 - DNA, 33 bp, Homo sapien
ttatgacctgatttcagaatggacaaagaagga

SEQ ID NO: 313537 - DNA, 33 bp, Homo sapien
aagcactgctgagagacgatataaacccaataa

SEQ ID NO: 313538 - DNA, 33 bp, Homo sapien
aagcactgctgagagatgatataaacccaataa

SEQ ID NO: 313539 - DNA, 33 bp, Homo sapien
ctggaattgttgatacagagctgatatttaaag

SEQ ID NO: 313540 - DNA, 33 bp, Homo sapien
ctggaattgttgatacggagctgatatttaaag

SEQ ID NO: 313541 - DNA, 33 bp, Homo sapien
ggagctaaggtaatgacgccaagaggaagaaga

SEQ ID NO: 313542 - DNA, 33 bp, Homo sapien
ggagctaaggtaatgatgccaagaggaagaaga

SEQ ID NO: 313543 - DNA, 33 bp, Homo sapien
atacagacttgtcatacccagttgcatgatttt

SEQ ID NO: 313544 - DNA, 33 bp, Homo sapien
atacagacttgtcatatccagttgcatgatttt

SEQ ID NO: 313545 - DNA, 33 bp, Homo sapien
gctgtgtttatttttccccctgtatccataccc

SEQ ID NO: 313546 - DNA, 33 bp, Homo sapien
gctgtgtttatttttctccctgtatccataccc

SEQ ID NO: 313547 - DNA, 33 bp, Homo sapien
aggtcccatcttaataaaacattatcccaaata

SEQ ID NO: 313548 - DNA, 33 bp, Homo sapien
aggtcccatcttaatacaacattatcccaaata

SEQ ID NO: 313549 - DNA, 33 bp, Homo sapien
taaatcttactttacacacccatatctttccta

SEQ ID NO: 313550 - DNA, 33 bp, Homo sapien
taaatcttactttacatacccatatctttccta

SEQ ID NO: 313551 - DNA, 33 bp, Homo sapien
tgcaaagcataatagcaacatatttctgaatat

SEQ ID NO: 313552 - DNA, 33 bp, Homo sapien
tgcaaagcataatagcgacatatttctgaatat

SEQ ID NO: 313553 - DNA, 33 bp, Homo sapien
gtagtaccatatcaggaaactggatagaaacca

SEQ ID NO: 313554 - DNA, 33 bp, Homo sapien
gtagtaccatatcaggcaactggatagaaacca

SEQ ID NO: 313555 - DNA, 33 bp, Homo sapien
tctcgtcttgcttttgaactggaatttacacca

SEQ ID NO: 313556 - DNA, 33 bp, Homo sapien
tctcgtcttgcttttggactggaatttacacca

SEQ ID NO: 313557 - DNA, 33 bp, Homo sapien
atgaaagactgtgagacacatgaagaaggagtt

SEQ ID NO: 313558 - DNA, 33 bp, Homo sapien
atgaaagactgtgagatacatgaagaaggagtt

SEQ ID NO: 313559 - DNA, 33 bp, Homo sapien
tgcaaagtaaatccacactaaatacaattttct

SEQ ID NO: 313560 - DNA, 33 bp, Homo sapien
tgcaaagtaaatccacgctaaatacaattttct

SEQ ID NO: 313561 - DNA, 33 bp, Homo sapien
ctttactgtagttgaactcatatggggaaggag

SEQ ID NO: 313562 - DNA, 33 bp, Homo sapien
ctttactgtagttgaattcatatggggaaggag

SEQ ID NO: 313563 - DNA, 33 bp, Homo sapien
ttctttgcacaccctacgctgttttgtgtttcc

SEQ ID NO: 313564 - DNA, 33 bp, Homo sapien
ttctttgcacaccctatgctgttttgtgtttcc

SEQ ID NO: 313565 - DNA, 33 bp, Homo sapien
ataactttaagatatacaccattgttagctgta

SEQ ID NO: 313566 - DNA, 33 bp, Homo sapien
ataactttaagatatagaccattgttagctgta

SEQ ID NO: 313567 - DNA, 33 bp, Homo sapien
gatatctggaagatcccgaaatatttggaaatg

SEQ ID NO: 313568 - DNA, 33 bp, Homo sapien
gatatctggaagatcctgaaatatttggaaatg

SEQ ID NO: 313569 - DNA, 33 bp, Homo sapien
aagtgcaagctttgccacttgatcttcagtcta

SEQ ID NO: 313570 - DNA, 33 bp, Homo sapien
aagtgcaagctttgccgcttgatcttcagtcta

SEQ ID NO: 313571 - DNA, 33 bp, Homo sapien
cagcagtccaagaataagaaatgcgagtgtgag

SEQ ID NO: 313572 - DNA, 33 bp, Homo sapien
cagcagtccaagaatacgaaatgcgagtgtgag

SEQ ID NO: 313573 - DNA, 33 bp, Homo sapien
taatatggcccaacgacatcagtgctagcaaag

SEQ ID NO: 313574 - DNA, 33 bp, Homo sapien
taatatggcccaacgatatcagtgctagcaaag

SEQ ID NO: 313575 - DNA, 33 bp, Homo sapien
ctcaagcctggataggcaccagaatcatctaag

SEQ ID NO: 313576 - DNA, 33 bp, Homo sapien
ctcaagcctggataggtaccagaatcatctaag

SEQ ID NO: 313577 - DNA, 33 bp, Homo sapien
gggctttgttagcctcagaaaggatttgagatt

SEQ ID NO: 313578 - DNA, 33 bp, Homo sapien
gggctttgttagcctcggaaaggatttgagatt

SEQ ID NO: 313579 - DNA, 33 bp, Homo sapien
agactcacaaagccgcaattcccaaggtcagaa

SEQ ID NO: 313580 - DNA, 33 bp, Homo sapien
agactcacaaagccgcgattcccaaggtcagaa

SEQ ID NO: 313581 - DNA, 33 bp, Homo sapien
acagtcagagggaaaacgcagctgactttcttc

SEQ ID NO: 313582 - DNA, 33 bp, Homo sapien
acagtcagagggaaaatgcagctgactttcttc

SEQ ID NO: 313583 - DNA, 33 bp, Homo sapien
tatgttttgttggtagaattattaggatctagt

SEQ ID NO: 313584 - DNA, 33 bp, Homo sapien
tatgttttgttggtagcattattaggatctagt

SEQ ID NO: 313585 - DNA, 33 bp, Homo sapien
ttggaattagatcccaatgcacacgatcatcaa

SEQ ID NO: 313586 - DNA, 33 bp, Homo sapien
ttggaattagatcccattgcacacgatcatcaa

SEQ ID NO: 313587 - DNA, 33 bp, Homo sapien
aatgaacaaatagacacggcccctgacctcatg

SEQ ID NO: 313588 - DNA, 33 bp, Homo sapien
aatgaacaaatagacatggcccctgacctcatg

SEQ ID NO: 313589 - DNA, 33 bp, Homo sapien
aacactttggcatgcacaatttgaagaatgcct

SEQ ID NO: 313590 - DNA, 33 bp, Homo sapien
aacactttggcatgcataatttgaagaatgcct

SEQ ID NO: 313591 - DNA, 33 bp, Homo sapien
tcagcaaacgaatacaatcttctataactgtgt

SEQ ID NO: 313592 - DNA, 33 bp, Homo sapien
tcagcaaacgaatacagtcttctataactgtgt

SEQ ID NO: 313593 - DNA, 33 bp, Homo sapien
ttgtgggccatcatcaatccctgtaacatttcc

SEQ ID NO: 313594 - DNA, 33 bp, Homo sapien
ttgtgggccatcatcattccctgtaacatttcc

SEQ ID NO: 313595 - DNA, 33 bp, Homo sapien
agatgtaaaaaactacaccttggccaccttctt

SEQ ID NO: 313596 - DNA, 33 bp, Homo sapien
agatgtaaaaaactacgccttggccaccttctt

SEQ ID NO: 313597 - DNA, 33 bp, Homo sapien
tcactccaggggcacaagcctttcttttctttc

SEQ ID NO: 313598 - DNA, 33 bp, Homo sapien
tcactccaggggcacaggcctttcttttctttc

SEQ ID NO: 313599 - DNA, 33 bp, Homo sapien
aaacactctttggaaaatgataattgccaaacc

SEQ ID NO: 313600 - DNA, 33 bp, Homo sapien
aaacactctttggaaagtgataattgccaaacc

SEQ ID NO: 313601 - DNA, 33 bp, Homo sapien
acatggacacagtggaaagaacaatgcacactg

SEQ ID NO: 313602 - DNA, 33 bp, Homo sapien
acatggacacagtggagagaacaatgcacactg

SEQ ID NO: 313603 - DNA, 33 bp, Homo sapien
cacatgactggagcaaaaaatctgagaatagat

SEQ ID NO: 313604 - DNA, 33 bp, Homo sapien
cacatgactggagcaacaaatctgagaatagat

SEQ ID NO: 313605 - DNA, 33 bp, Homo sapien
cagattatccaaaaatcatgcaaaactaataat

SEQ ID NO: 313606 - DNA, 33 bp, Homo sapien
cagattatccaaaaatgatgcaaaactaataat

SEQ ID NO: 313607 - DNA, 33 bp, Homo sapien
ccagtgggtgtattaacaattaggttggcttgc

SEQ ID NO: 313608 - DNA, 33 bp, Homo sapien
ccagtgggtgtattaataattaggttggcttgc

SEQ ID NO: 313609 - DNA, 33 bp, Homo sapien
tggatttttacctccccggattcacttagtaac

SEQ ID NO: 313610 - DNA, 33 bp, Homo sapien
tggatttttacctccctggattcacttagtaac

SEQ ID NO: 313611 - DNA, 33 bp, Homo sapien
tgaagtaaggactacacggaaaatatctgatga

SEQ ID NO: 313612 - DNA, 33 bp, Homo sapien
tgaagtaaggactacatggaaaatatctgatga

SEQ ID NO: 313613 - DNA, 33 bp, Homo sapien
tgggttaaaatttttacgaagcaatcctaatgc

SEQ ID NO: 313614 - DNA, 33 bp, Homo sapien
tgggttaaaatttttatgaagcaatcctaatgc

SEQ ID NO: 313615 - DNA, 33 bp, Homo sapien
tgttgtattcaaggagacattttggttactgga

SEQ ID NO: 313616 - DNA, 33 bp, Homo sapien
tgttgtattcaaggaggcattttggttactgga

SEQ ID NO: 313617 - DNA, 33 bp, Homo sapien
gctcatcttcaggatgaagtcttgtcactgcca

SEQ ID NO: 313618 - DNA, 33 bp, Homo sapien
gctcatcttcaggatgtagtcttgtcactgcca

SEQ ID NO: 313619 - DNA, 33 bp, Homo sapien
tttgaccaacaaatataagcacaagtgtcactt

SEQ ID NO: 313620 - DNA, 33 bp, Homo sapien
tttgaccaacaaatatgagcacaagtgtcactt

SEQ ID NO: 313621 - DNA, 33 bp, Homo sapien
cttctgttttggattacagtaacatttatcaca

SEQ ID NO: 313622 - DNA, 33 bp, Homo sapien
cttctgttttggattatagtaacatttatcaca

SEQ ID NO: 313623 - DNA, 33 bp, Homo sapien
agctgaaacctctttacgatgttcaccatttcc

SEQ ID NO: 313624 - DNA, 33 bp, Homo sapien
agctgaaacctctttatgatgttcaccatttcc

SEQ ID NO: 313625 - DNA, 33 bp, Homo sapien
caaatgagcagaactacgtcacaaccttttata

SEQ ID NO: 313626 - DNA, 33 bp, Homo sapien
caaatgagcagaactatgtcacaaccttttata

SEQ ID NO: 313627 - DNA, 33 bp, Homo sapien
gcagtgtgattgaaaacgatgtttgtcacttcc

SEQ ID NO: 313628 - DNA, 33 bp, Homo sapien
gcagtgtgattgaaaatgatgtttgtcacttcc

SEQ ID NO: 313629 - DNA, 33 bp, Homo sapien
ttttgtcaccatctgcaacctaacagctaagcc

SEQ ID NO: 313630 - DNA, 33 bp, Homo sapien
ttttgtcaccatctgccacctaacagctaagcc

SEQ ID NO: 313631 - DNA, 33 bp, Homo sapien
acatccttcccagctccgaactaatgagatagg

SEQ ID NO: 313632 - DNA, 33 bp, Homo sapien
acatccttcccagctctgaactaatgagatagg

SEQ ID NO: 313633 - DNA, 33 bp, Homo sapien
acacggtatggtggaaatagttctaaaataacc

SEQ ID NO: 313634 - DNA, 33 bp, Homo sapien
acacggtatggtggaagtagttctaaaataacc

SEQ ID NO: 313635 - DNA, 33 bp, Homo sapien
ctttacctccttcttgaaagcttctctatttcc

SEQ ID NO: 313636 - DNA, 33 bp, Homo sapien
ctttacctccttcttgcaagcttctctatttcc

SEQ ID NO: 313637 - DNA, 33 bp, Homo sapien
aacttgaatagacaaaagaagatgtttcatgat

SEQ ID NO: 313638 - DNA, 33 bp, Homo sapien
aacttgaatagacaaacgaagatgtttcatgat

SEQ ID NO: 313639 - DNA, 33 bp, Homo sapien
ttttcttgccgcttacacctggttgttctccca

SEQ ID NO: 313640 - DNA, 33 bp, Homo sapien
ttttcttgccgcttacgcctggttgttctccca

SEQ ID NO: 313641 - DNA, 33 bp, Homo sapien
atataaaacaggactcaaggggaatgtaaaaca

SEQ ID NO: 313642 - DNA, 33 bp, Homo sapien
atataaaacaggactcgaggggaatgtaaaaca

SEQ ID NO: 313643 - DNA, 33 bp, Homo sapien
ggctgccttatgtcacacaggaccggatcagca

SEQ ID NO: 313644 - DNA, 33 bp, Homo sapien
ggctgccttatgtcacgcaggaccggatcagca

SEQ ID NO: 313645 - DNA, 33 bp, Homo sapien
tcattgtgtgggggaaaaaagaaaattggatag

SEQ ID NO: 313646 - DNA, 33 bp, Homo sapien
tcattgtgtgggggaagaaagaaaattggatag

SEQ ID NO: 313647 - DNA, 33 bp, Homo sapien
gggaaagcggagctcaaccagagaagataaaca

SEQ ID NO: 313648 - DNA, 33 bp, Homo sapien
gggaaagcggagctcacccagagaagataaaca

SEQ ID NO: 313649 - DNA, 33 bp, Homo sapien
tgtctgaaaagttgaaatcaacagaaataaatg

SEQ ID NO: 313650 - DNA, 33 bp, Homo sapien
tgtctgaaaagttgaagtcaacagaaataaatg

SEQ ID NO: 313651 - DNA, 33 bp, Homo sapien
gtattttaaaatggtaaacccagctccgtccac

SEQ ID NO: 313652 - DNA, 33 bp, Homo sapien
gtattttaaaatggtacacccagctccgtccac

SEQ ID NO: 313653 - DNA, 33 bp, Homo sapien
cattttctttccccaactgaattgccaattctt

SEQ ID NO: 313654 - DNA, 33 bp, Homo sapien
cattttctttccccaattgaattgccaattctt

SEQ ID NO: 313655 - DNA, 33 bp, Homo sapien
actgggttaaaaaatcagacaagcatactcctt

SEQ ID NO: 313656 - DNA, 33 bp, Homo sapien
actgggttaaaaaatctgacaagcatactcctt

SEQ ID NO: 313657 - DNA, 33 bp, Homo sapien
gagacttcttggctcacgggccttacagctgct

SEQ ID NO: 313658 - DNA, 33 bp, Homo sapien
gagacttcttggctcatgggccttacagctgct

SEQ ID NO: 313659 - DNA, 33 bp, Homo sapien
ctttctccactgcctcaccagctacacaaacac

SEQ ID NO: 313660 - DNA, 33 bp, Homo sapien
ctttctccactgcctcgccagctacacaaacac

SEQ ID NO: 313661 - DNA, 33 bp, Homo sapien
ttaaatagctctattaacttttccactatgggc

SEQ ID NO: 313662 - DNA, 33 bp, Homo sapien
ttaaatagctctattatcttttccactatgggc

SEQ ID NO: 313663 - DNA, 33 bp, Homo sapien
gagactaatacattcacggaaggaggtttcaga

SEQ ID NO: 313664 - DNA, 33 bp, Homo sapien
gagactaatacattcatggaaggaggtttcaga

SEQ ID NO: 313665 - DNA, 33 bp, Homo sapien
atagtaaaggtgatgacagaagggaagaagaag

SEQ ID NO: 313666 - DNA, 33 bp, Homo sapien
atagtaaaggtgatgagagaagggaagaagaag

SEQ ID NO: 313667 - DNA, 33 bp, Homo sapien
atcttctgtacatcgccgataaatgtccctgct

SEQ ID NO: 313668 - DNA, 33 bp, Homo sapien
atcttctgtacatcgctgataaatgtccctgct

SEQ ID NO: 313669 - DNA, 33 bp, Homo sapien
tcacatgtgtttgaatcaagcattgaacacagt

SEQ ID NO: 313670 - DNA, 33 bp, Homo sapien
tcacatgtgtttgaattaagcattgaacacagt

SEQ ID NO: 313671 - DNA, 33 bp, Homo sapien
atggttttctttcaatcaggttcaaaaatcatg

SEQ ID NO: 313672 - DNA, 33 bp, Homo sapien
atggttttctttcaattaggttcaaaaatcatg

SEQ ID NO: 313673 - DNA, 33 bp, Homo sapien
gtttgtcgtggcaatacatggaaaaaaatcagg

SEQ ID NO: 313674 - DNA, 33 bp, Homo sapien
gtttgtcgtggcaatatatggaaaaaaatcagg

SEQ ID NO: 313675 - DNA, 33 bp, Homo sapien
catgttctatttaaccactgatctccaaccgga

SEQ ID NO: 313676 - DNA, 33 bp, Homo sapien
catgttctatttaacctctgatctccaaccgga

SEQ ID NO: 313677 - DNA, 33 bp, Homo sapien
tatcctaattacatccaatgtgtttaaatcatt

SEQ ID NO: 313678 - DNA, 33 bp, Homo sapien
tatcctaattacatcccatgtgtttaaatcatt

SEQ ID NO: 313679 - DNA, 33 bp, Homo sapien
gcaaataccttctaaccggtctcccctcttcca

SEQ ID NO: 313680 - DNA, 33 bp, Homo sapien
gcaaataccttctaactggtctcccctcttcca

SEQ ID NO: 313681 - DNA, 33 bp, Homo sapien
gagctgaatttgtcctcaactgttttctcctac

SEQ ID NO: 313682 - DNA, 33 bp, Homo sapien
gagctgaatttgtcctgaactgttttctcctac

SEQ ID NO: 313683 - DNA, 33 bp, Homo sapien
tcatagtaaataatgacgtaggcagagacattg

SEQ ID NO: 313684 - DNA, 33 bp, Homo sapien
tcatagtaaataatgatgtaggcagagacattg

SEQ ID NO: 313685 - DNA, 33 bp, Homo sapien
gttatctgttttgaaaatgaaatctacaatgag

SEQ ID NO: 313686 - DNA, 33 bp, Homo sapien
gttatctgttttgaaagtgaaatctacaatgag

SEQ ID NO: 313687 - DNA, 33 bp, Homo sapien
actcaatttcagttctcaccaaatatggagtca

SEQ ID NO: 313688 - DNA, 33 bp, Homo sapien
actcaatttcagttctgaccaaatatggagtca

SEQ ID NO: 313689 - DNA, 33 bp, Homo sapien
cagtagttgcttaatacctgttagttaaatgat

SEQ ID NO: 313690 - DNA, 33 bp, Homo sapien
cagtagttgcttaatagctgttagttaaatgat

SEQ ID NO: 313691 - DNA, 33 bp, Homo sapien
agggccaagaatggtaacagaaggtcggatgca

SEQ ID NO: 313692 - DNA, 33 bp, Homo sapien
agggccaagaatggtagcagaaggtcggatgca

SEQ ID NO: 313693 - DNA, 33 bp, Homo sapien
gattatcttccattctcacttctccgtggcagg

SEQ ID NO: 313694 - DNA, 33 bp, Homo sapien
gattatcttccattcttacttctccgtggcagg

SEQ ID NO: 313695 - DNA, 33 bp, Homo sapien
gattgtaggtgcaagacgcccagcccagggatc

SEQ ID NO: 313696 - DNA, 33 bp, Homo sapien
gattgtaggtgcaagatgcccagcccagggatc

SEQ ID NO: 313697 - DNA, 33 bp, Homo sapien
ctccaggcttgatggcaagacataatgtgacac

SEQ ID NO: 313698 - DNA, 33 bp, Homo sapien
ctccaggcttgatggcgagacataatgtgacac

SEQ ID NO: 313699 - DNA, 33 bp, Homo sapien
aatgcatgctatcttccactttaaaaaaggatg

SEQ ID NO: 313700 - DNA, 33 bp, Homo sapien
aatgcatgctatcttctactttaaaaaaggatg

SEQ ID NO: 313701 - DNA, 33 bp, Homo sapien
cctcacaggaagtcgcacctgaggaaatcatca

SEQ ID NO: 313702 - DNA, 33 bp, Homo sapien
cctcacaggaagtcgcgcctgaggaaatcatca

SEQ ID NO: 313703 - DNA, 33 bp, Homo sapien
agagggagaaaaaaagaagtaagaatgaggctg

SEQ ID NO: 313704 - DNA, 33 bp, Homo sapien
agagggagaaaaaaaggagtaagaatgaggctg

SEQ ID NO: 313705 - DNA, 33 bp, Homo sapien
gccagaagtttgagatcaggatgacagcatggt

SEQ ID NO: 313706 - DNA, 33 bp, Homo sapien
gccagaagtttgagatgaggatgacagcatggt

SEQ ID NO: 313707 - DNA, 33 bp, Homo sapien
tctaagcttctgagtaacgcttaggcctttctg

SEQ ID NO: 313708 - DNA, 33 bp, Homo sapien
tctaagcttctgagtatcgcttaggcctttctg

SEQ ID NO: 313709 - DNA, 33 bp, Homo sapien
ttccaatcaataggcacagtctaggtttatgaa

SEQ ID NO: 313710 - DNA, 33 bp, Homo sapien
ttccaatcaataggcagagtctaggtttatgaa

SEQ ID NO: 313711 - DNA, 33 bp, Homo sapien
atcattgcaataaagcaaaattcagttctagtg

SEQ ID NO: 313712 - DNA, 33 bp, Homo sapien
atcattgcaataaagcgaaattcagttctagtg

SEQ ID NO: 313713 - DNA, 33 bp, Homo sapien
ttgtcttttattcaaagtaaaacaccgaacaaa

SEQ ID NO: 313714 - DNA, 33 bp, Homo sapien
ttgtcttttattcaaattaaaacaccgaacaaa

SEQ ID NO: 313715 - DNA, 33 bp, Homo sapien
gttgttttgctcgaaaccttttgctcttaatga

SEQ ID NO: 313716 - DNA, 33 bp, Homo sapien
gttgttttgctcgaaatcttttgctcttaatga

SEQ ID NO: 313717 - DNA, 33 bp, Homo sapien
gtaaggcgtacaaatacgaacaactccaccaag

SEQ ID NO: 313718 - DNA, 33 bp, Homo sapien
gtaaggcgtacaaatatgaacaactccaccaag

SEQ ID NO: 313719 - DNA, 33 bp, Homo sapien
ctacgtcatagtaaaacagctcaattcctattt

SEQ ID NO: 313720 - DNA, 33 bp, Homo sapien
ctacgtcatagtaaaatagctcaattcctattt

SEQ ID NO: 313721 - DNA, 33 bp, Homo sapien
taagaggatcagatagcaattctctattagagc

SEQ ID NO: 313722 - DNA, 33 bp, Homo sapien
taagaggatcagatagtaattctctattagagc

SEQ ID NO: 313723 - DNA, 33 bp, Homo sapien
gtttaaagcaaaaccacaatacccagctttatt

SEQ ID NO: 313724 - DNA, 33 bp, Homo sapien
gtttaaagcaaaaccataatacccagctttatt

SEQ ID NO: 313725 - DNA, 33 bp, Homo sapien
tgttaatggtctcaataataaagaacctctcaa

SEQ ID NO: 313726 - DNA, 33 bp, Homo sapien
tgttaatggtctcaatcataaagaacctctcaa

SEQ ID NO: 313727 - DNA, 33 bp, Homo sapien
ttaggcaataaagctaaacctgcagtggatggc

SEQ ID NO: 313728 - DNA, 33 bp, Homo sapien
ttaggcaataaagctagacctgcagtggatggc

SEQ ID NO: 313729 - DNA, 33 bp, Homo sapien
gacagttgtttcagcaataaaataatcagaagg

SEQ ID NO: 313730 - DNA, 33 bp, Homo sapien
gacagttgtttcagcagtaaaataatcagaagg

SEQ ID NO: 313731 - DNA, 33 bp, Homo sapien
tgttctaaaacttttacaaatattgtcgctagt

SEQ ID NO: 313732 - DNA, 33 bp, Homo sapien
tgttctaaaacttttataaatattgtcgctagt

SEQ ID NO: 313733 - DNA, 33 bp, Homo sapien
tgttagctactaattacatacggtacttagaca

SEQ ID NO: 313734 - DNA, 33 bp, Homo sapien
tgttagctactaattatatacggtacttagaca

SEQ ID NO: 313735 - DNA, 33 bp, Homo sapien
gtggtcactgcaatagaactcaagagattcata

SEQ ID NO: 313736 - DNA, 33 bp, Homo sapien
gtggtcactgcaatagtactcaagagattcata

SEQ ID NO: 313737 - DNA, 33 bp, Homo sapien
cttaagaagccataaaaagaatctcataaaaaa

SEQ ID NO: 313738 - DNA, 33 bp, Homo sapien
cttaagaagccataaagagaatctcataaaaaa

SEQ ID NO: 313739 - DNA, 33 bp, Homo sapien
tcttttgaggatgttacgtgccagtaaaattac

SEQ ID NO: 313740 - DNA, 33 bp, Homo sapien
tcttttgaggatgttatgtgccagtaaaattac

SEQ ID NO: 313741 - DNA, 33 bp, Homo sapien
tgtaccattaatgcaccctgatattacaaaggt

SEQ ID NO: 313742 - DNA, 33 bp, Homo sapien
tgtaccattaatgcactctgatattacaaaggt

SEQ ID NO: 313743 - DNA, 33 bp, Homo sapien
aaaagactcgaaatagaactggaaacaaggggc

SEQ ID NO: 313744 - DNA, 33 bp, Homo sapien
aaaagactcgaaataggactggaaacaaggggc

SEQ ID NO: 313745 - DNA, 33 bp, Homo sapien
ttgtatagataagagaaccttaaccttatggct

SEQ ID NO: 313746 - DNA, 33 bp, Homo sapien
ttgtatagataagagacccttaaccttatggct

SEQ ID NO: 313747 - DNA, 33 bp, Homo sapien
tacttggtcacctgctgaaactacatataagaa

SEQ ID NO: 313748 - DNA, 33 bp, Homo sapien
tacttggtcacctgcttaaactacatataagaa

SEQ ID NO: 313749 - DNA, 33 bp, Homo sapien
aaagtgaaaaacagaagaaattgattaattaat

SEQ ID NO: 313750 - DNA, 33 bp, Homo sapien
aaagtgaaaaacagaataaattgattaattaat

SEQ ID NO: 313751 - DNA, 33 bp, Homo sapien
aaaactaacagcttgaatacagtttgtcacact

SEQ ID NO: 313752 - DNA, 33 bp, Homo sapien
aaaactaacagcttgagtacagtttgtcacact

SEQ ID NO: 313753 - DNA, 33 bp, Homo sapien
aatatgtaaaatgaacagtgcaaattgttttta

SEQ ID NO: 313754 - DNA, 33 bp, Homo sapien
aatatgtaaaatgaacggtgcaaattgttttta

SEQ ID NO: 313755 - DNA, 33 bp, Homo sapien
aatgaccactttaaaactgaagaaatcccataa

SEQ ID NO: 313756 - DNA, 33 bp, Homo sapien
aatgaccactttaaaattgaagaaatcccataa

SEQ ID NO: 313757 - DNA, 33 bp, Homo sapien
aatgctttcctctctaaaccacgcggctcactt

SEQ ID NO: 313758 - DNA, 33 bp, Homo sapien
aatgctttcctctctagaccacgcggctcactt

SEQ ID NO: 313759 - DNA, 33 bp, Homo sapien
gccaaccactattcagacagtttacccacaatg

SEQ ID NO: 313760 - DNA, 33 bp, Homo sapien
gccaaccactattcaggcagtttacccacaatg

SEQ ID NO: 313761 - DNA, 33 bp, Homo sapien
aaatccacgtaatccacgtaactttttattctc

SEQ ID NO: 313762 - DNA, 33 bp, Homo sapien
aaatccacgtaatccaggtaactttttattctc

SEQ ID NO: 313763 - DNA, 33 bp, Homo sapien
ggccttggtgtattaaaagactcagtaaaaata

SEQ ID NO: 313764 - DNA, 33 bp, Homo sapien
ggccttggtgtattaagagactcagtaaaaata

SEQ ID NO: 313765 - DNA, 33 bp, Homo sapien
actttctaagacatacaagaggagttgaaatta

SEQ ID NO: 313766 - DNA, 33 bp, Homo sapien
actttctaagacatacgagaggagttgaaatta

SEQ ID NO: 313767 - DNA, 33 bp, Homo sapien
gtctcacagataagaaaggttacccaggtgact

SEQ ID NO: 313768 - DNA, 33 bp, Homo sapien
gtctcacagataagaagggttacccaggtgact

SEQ ID NO: 313769 - DNA, 33 bp, Homo sapien; identical to SEQ ID NO: 313767

SEQ ID NO: 313770 - DNA, 33 bp, Homo sapien; identical to SEQ ID NO: 313768

SEQ ID NO: 313771 - DNA, 33 bp, Homo sapien
gacatcataaattacactgggagctaaggtgag

SEQ ID NO: 313772 - DNA, 33 bp, Homo sapien
gacatcataaattacattgggagctaaggtgag

SEQ ID NO: 313773 - DNA, 33 bp, Homo sapien
gcagcttgctataaaactatgcaaaagattaag

SEQ ID NO: 313774 - DNA, 33 bp, Homo sapien
gcagcttgctataaaagtatgcaaaagattaag

SEQ ID NO: 313775 - DNA, 33 bp, Homo sapien
catttgcatggccagagtaatgtcaaggttcag

SEQ ID NO: 313776 - DNA, 33 bp, Homo sapien
catttgcatggccagattaatgtcaaggttcag

SEQ ID NO: 313777 - DNA, 33 bp, Homo sapien
gctcaacattatgtaaaggccttctagcccatt

SEQ ID NO: 313778 - DNA, 33 bp, Homo sapien
gctcaacattatgtaagggccttctagcccatt

SEQ ID NO: 313779 - DNA, 33 bp, Homo sapien
tgaaatacttaggagcagagcttgagtcatgcc

SEQ ID NO: 313780 - DNA, 33 bp, Homo sapien
tgaaatacttaggagcggagcttgagtcatgcc

SEQ ID NO: 313781 - DNA, 33 bp, Homo sapien
agtaagcatgaacatacagtatacagctaggca

SEQ ID NO: 313782 - DNA, 33 bp, Homo sapien
agtaagcatgaacatatagtatacagctaggca

SEQ ID NO: 313783 - DNA, 33 bp, Homo sapien
tatctcttttagaacaatggcttcaagcactgc

SEQ ID NO: 313784 - DNA, 33 bp, Homo sapien
tatctcttttagaacagtggcttcaagcactgc

SEQ ID NO: 313785 - DNA, 33 bp, Homo sapien
acaggatcaatagacgcccaaatcttggcatca

SEQ ID NO: 313786 - DNA, 33 bp, Homo sapien
acaggatcaatagacgtccaaatcttggcatca

SEQ ID NO: 313787 - DNA, 33 bp, Homo sapien
aaacattctcaatctacggttttgacctatttg

SEQ ID NO: 313788 - DNA, 33 bp, Homo sapien
aaacattctcaatctatggttttgacctatttg

SEQ ID NO: 313789 - DNA, 33 bp, Homo sapien
acctgattatttgacactgctctttcccaggac

SEQ ID NO: 313790 - DNA, 33 bp, Homo sapien
acctgattatttgacattgctctttcccaggac

SEQ ID NO: 313791 - DNA, 33 bp, Homo sapien
ctccagcctggggcacaagaatgaaactccatc

SEQ ID NO: 313792 - DNA, 33 bp, Homo sapien
ctccagcctggggcacgagaatgaaactccatc

SEQ ID NO: 313793 - DNA, 33 bp, Homo sapien
aaaatgaacaaacaaacgagaaagtggagaggc

SEQ ID NO: 313794 - DNA, 33 bp, Homo sapien
aaaatgaacaaacaaatgagaaagtggagaggc

SEQ ID NO: 313795 - DNA, 33 bp, Homo sapien
gagaggcccggaggtcacactgaacttggctgc

SEQ ID NO: 313796 - DNA, 33 bp, Homo sapien
gagaggcccggaggtcgcactgaacttggctgc

SEQ ID NO: 313797 - DNA, 33 bp, Homo sapien
gttcacaaatgtgtaagcttctgtatttgcctt

SEQ ID NO: 313798 - DNA, 33 bp, Homo sapien
gttcacaaatgtgtaatcttctgtatttgcctt

SEQ ID NO: 313799 - DNA, 33 bp, Homo sapien
aaatgatatgatgtataaaatttgcttcaaaat

SEQ ID NO: 313800 - DNA, 33 bp, Homo sapien
aaatgatatgatgtatgaaatttgcttcaaaat

SEQ ID NO: 313801 - DNA, 33 bp, Homo sapien
cgaatcttaagaggtacatttgagggacaacag

SEQ ID NO: 313802 - DNA, 33 bp, Homo sapien
cgaatcttaagaggtatatttgagggacaacag

SEQ ID NO: 313803 - DNA, 33 bp, Homo sapien
agagccagaaatagaccaattgagactaaatca

SEQ ID NO: 313804 - DNA, 33 bp, Homo sapien
agagccagaaatagactaattgagactaaatca

SEQ ID NO: 313805 - DNA, 33 bp, Homo sapien
caggcgtgacccacgacgctcggcctatttatt

SEQ ID NO: 313806 - DNA, 33 bp, Homo sapien
caggcgtgacccacgatgctcggcctatttatt

SEQ ID NO: 313807 - DNA, 33 bp, Homo sapien
gaagggaaatggacaacgtgagccccatgattg

SEQ ID NO: 313808 - DNA, 33 bp, Homo sapien
gaagggaaatggacaaggtgagccccatgattg

SEQ ID NO: 313809 - DNA, 33 bp, Homo sapien
gtccaatcatctcaccaatattaaagcatattt

SEQ ID NO: 313810 - DNA, 33 bp, Homo sapien
gtccaatcatctcaccgatattaaagcatattt

SEQ ID NO: 313811 - DNA, 33 bp, Homo sapien
ccctcactacgttctcactctccattactctgt

SEQ ID NO: 313812 - DNA, 33 bp, Homo sapien
ccctcactacgttctctctctccattactctgt

SEQ ID NO: 313813 - DNA, 33 bp, Homo sapien
ggcttgtgggatcacactgaaatacattttaat

SEQ ID NO: 313814 - DNA, 33 bp, Homo sapien
ggcttgtgggatcacagtgaaatacattttaat

SEQ ID NO: 313815 - DNA, 33 bp, Homo sapien
tgttcatcttcggtggaaagctcaggactagat

SEQ ID NO: 313816 - DNA, 33 bp, Homo sapien
tgttcatcttcggtgggaagctcaggactagat

SEQ ID NO: 313817 - DNA, 33 bp, Homo sapien
atgtgatagggagccactgaacagaaatgttaa

SEQ ID NO: 313818 - DNA, 33 bp, Homo sapien
atgtgatagggagccattgaacagaaatgttaa

SEQ ID NO: 313819 - DNA, 33 bp, Homo sapien
gctacaagggaaacaacctgaatgaaagcacac

SEQ ID NO: 313820 - DNA, 33 bp, Homo sapien
gctacaagggaaacaatctgaatgaaagcacac

SEQ ID NO: 313821 - DNA, 33 bp, Homo sapien
atactaccaagtgctcaaagagatactacggga

SEQ ID NO: 313822 - DNA, 33 bp, Homo sapien
atactaccaagtgctccaagagatactacggga

SEQ ID NO: 313823 - DNA, 33 bp, Homo sapien
ttgtgtaaacacctgacagtcttatactgaggc

SEQ ID NO: 313824 - DNA, 33 bp, Homo sapien
ttgtgtaaacacctgagagtcttatactgaggc

SEQ ID NO: 313825 - DNA, 33 bp, Homo sapien
cactctacatactctacggaatggccactcttc

SEQ ID NO: 313826 - DNA, 33 bp, Homo sapien
cactctacatactctatggaatggccactcttc

SEQ ID NO: 313827 - DNA, 33 bp, Homo sapien
cacccttttctgcatcaccactctacatactct

SEQ ID NO: 313828 - DNA, 33 bp, Homo sapien
cacccttttctgcatcgccactctacatactct

SEQ ID NO: 313829 - DNA, 33 bp, Homo sapien
ctaaactgaaagcaaagtgagttaagctaatta

SEQ ID NO: 313830 - DNA, 33 bp, Homo sapien
ctaaactgaaagcaaattgagttaagctaatta

SEQ ID NO: 313831 - DNA, 33 bp, Homo sapien
tgtaatctgctttccacatgggtcactagcgac

SEQ ID NO: 313832 - DNA, 33 bp, Homo sapien
tgtaatctgctttccagatgggtcactagcgac

SEQ ID NO: 313833 - DNA, 33 bp, Homo sapien
agcgactgattctaaaagtctttaatgccactt

SEQ ID NO: 313834 - DNA, 33 bp, Homo sapien
agcgactgattctaaacgtctttaatgccactt

SEQ ID NO: 313835 - DNA, 33 bp, Homo sapien
ataaataggacctctgaaaatcttgaagaggta

SEQ ID NO: 313836 - DNA, 33 bp, Homo sapien
ataaataggacctctggaaatcttgaagaggta

SEQ ID NO: 313837 - DNA, 33 bp, Homo sapien
aacagaaatggcaaaaagtctgctattattttc

SEQ ID NO: 313838 - DNA, 33 bp, Homo sapien
aacagaaatggcaaaaggtctgctattattttc

SEQ ID NO: 313839 - DNA, 33 bp, Homo sapien
gaacctgccatggtaaatgtttgcttcttattg

SEQ ID NO: 313840 - DNA, 33 bp, Homo sapien
gaacctgccatggtaattgtttgcttcttattg

SEQ ID NO: 313841 - DNA, 33 bp, Homo sapien
ctttcaagaatgaatcaattttgtatgttatgt

SEQ ID NO: 313842 - DNA, 33 bp, Homo sapien
ctttcaagaatgaatcgattttgtatgttatgt

SEQ ID NO: 313843 - DNA, 33 bp, Homo sapien
aggtgacactacagcacagtaggaacatggtga

SEQ ID NO: 313844 - DNA, 33 bp, Homo sapien
aggtgacactacagcagagtaggaacatggtga

SEQ ID NO: 313845 - DNA, 33 bp, Homo sapien
agtaagtcttgatatccgacagtgtaagttgtc

SEQ ID NO: 313846 - DNA, 33 bp, Homo sapien
agtaagtcttgatatctgacagtgtaagttgtc

SEQ ID NO: 313847 - DNA, 33 bp, Homo sapien
ccagagcctgtgaaccaaatggcagaggctatg

SEQ ID NO: 313848 - DNA, 33 bp, Homo sapien
ccagagcctgtgaaccgaatggcagaggctatg

SEQ ID NO: 313849 - DNA, 33 bp, Homo sapien
tgtttattgtgatctcacttcaatttgttttaa

SEQ ID NO: 313850 - DNA, 33 bp, Homo sapien
tgtttattgtgatctcgcttcaatttgttttaa

SEQ ID NO: 313851 - DNA, 33 bp, Homo sapien
acgtttctccagtgaccgaataatgagttggtt

SEQ ID NO: 313852 - DNA, 33 bp, Homo sapien
acgtttctccagtgactgaataatgagttggtt

SEQ ID NO: 313853 - DNA, 33 bp, Homo sapien
aacagtgccaaaatacagtagtcttgtgggaga

SEQ ID NO: 313854 - DNA, 33 bp, Homo sapien
aacagtgccaaaatacggtagtcttgtgggaga

SEQ ID NO: 313855 - DNA, 33 bp, Homo sapien
tccacctgtgtggacaaacatttattgtgttcc

SEQ ID NO: 313856 - DNA, 33 bp, Homo sapien
tccacctgtgtggacagacatttattgtgttcc

SEQ ID NO: 313857 - DNA, 33 bp, Homo sapien
gagaaatggaaaggaacggaagaaccaggggag

SEQ ID NO: 313858 - DNA, 33 bp, Homo sapien
gagaaatggaaaggaatggaagaaccaggggag

SEQ ID NO: 313859 - DNA, 33 bp, Homo sapien
aaaatatgtaaaacaacgtgaaatgcctatgga

SEQ ID NO: 313860 - DNA, 33 bp, Homo sapien
aaaatatgtaaaacaatgtgaaatgcctatgga

SEQ ID NO: 313861 - DNA, 33 bp, Homo sapien
tagagatttgcggaaccgaacttgagagagatg

SEQ ID NO: 313862 - DNA, 33 bp, Homo sapien
tagagatttgcggaactgaacttgagagagatg

SEQ ID NO: 313863 - DNA, 33 bp, Homo sapien; identical to SEQ ID NO: 313861

SEQ ID NO: 313864 - DNA, 33 bp, Homo sapien; identical to SEQ ID NO: 313862

SEQ ID NO: 313865 - DNA, 33 bp, Homo sapien
cctctctttcttcttacagccttcctggatctt

SEQ ID NO: 313866 - DNA, 33 bp, Homo sapien
cctctctttcttcttagagccttcctggatctt

SEQ ID NO: 313867 - DNA, 33 bp, Homo sapien
tgtctgcaaaactttaccttgtgttccacttca

SEQ ID NO: 313868 - DNA, 33 bp, Homo sapien
tgtctgcaaaactttatcttgtgttccacttca

SEQ ID NO: 313869 - DNA, 33 bp, Homo sapien
ctgaatgcagaagaaaatgataagttatacaaa

SEQ ID NO: 313870 - DNA, 33 bp, Homo sapien
ctgaatgcagaagaaagtgataagttatacaaa

SEQ ID NO: 313871 - DNA, 33 bp, Homo sapien
gctcaacagagactacaaggaaaacagaaataa

SEQ ID NO: 313872 - DNA, 33 bp, Homo sapien
gctcaacagagactacgaggaaaacagaaataa

SEQ ID NO: 313873 - DNA, 33 bp, Homo sapien
accataattcttccatcatatcttactacctct

SEQ ID NO: 313874 - DNA, 33 bp, Homo sapien
accataattcttccattatatcttactacctct

SEQ ID NO: 313875 - DNA, 33 bp, Homo sapien
cacttaaaaattttcccaagtagcactgtttct

SEQ ID NO: 313876 - DNA, 33 bp, Homo sapien
cacttaaaaattttcctaagtagcactgtttct

SEQ ID NO: 313877 - DNA, 33 bp, Homo sapien
attctcatctggtctaaattgacttctaaaagg

SEQ ID NO: 313878 - DNA, 33 bp, Homo sapien
attctcatctggtctatattgacttctaaaagg

SEQ ID NO: 313879 - DNA, 33 bp, Homo sapien
gagggacatactattacggttttcctgaaactt

SEQ ID NO: 313880 - DNA, 33 bp, Homo sapien
gagggacatactattatggttttcctgaaactt

SEQ ID NO: 313881 - DNA, 33 bp, Homo sapien
taatacaagcagcagcaagaatttcaagtgcat

SEQ ID NO: 313882 - DNA, 33 bp, Homo sapien
taatacaagcagcagccagaatttcaagtgcat

SEQ ID NO: 313883 - DNA, 33 bp, Homo sapien
cagaataagagaagggaaacacacctgcgcaat

SEQ ID NO: 313884 - DNA, 33 bp, Homo sapien
cagaataagagaaggggaacacacctgcgcaat

SEQ ID NO: 313885 - DNA, 33 bp, Homo sapien
agttctgttcaagtcaataagcacttttgaggg

SEQ ID NO: 313886 - DNA, 33 bp, Homo sapien
agttctgttcaagtcagtaagcacttttgaggg

SEQ ID NO: 313887 - DNA, 33 bp, Homo sapien
acacctacagagagaaaaaagatctagcactca

SEQ ID NO: 313888 - DNA, 33 bp, Homo sapien
acacctacagagagaagaaagatctagcactca

SEQ ID NO: 313889 - DNA, 33 bp, Homo sapien
gtcttattttctacaacgagggtacttacaata

SEQ ID NO: 313890 - DNA, 33 bp, Homo sapien
gtcttattttctacaatgagggtacttacaata

SEQ ID NO: 313891 - DNA, 33 bp, Homo sapien
agctgtgagacctgggacaagtgatttgacatc

SEQ ID NO: 313892 - DNA, 33 bp, Homo sapien
agctgtgagacctggggcaagtgatttgacatc

SEQ ID NO: 313893 - DNA, 33 bp, Homo sapien
tggaaaggagctataccgtaccagagactagct

SEQ ID NO: 313894 - DNA, 33 bp, Homo sapien
tggaaaggagctatactgtaccagagactagct

SEQ ID NO: 313895 - DNA, 33 bp, Homo sapien
gtttgttagaaccagacctctaaaagaagtcaa

SEQ ID NO: 313896 - DNA, 33 bp, Homo sapien
gtttgttagaaccagatctctaaaagaagtcaa

SEQ ID NO: 313897 - DNA, 33 bp, Homo sapien
atatatgtgaaaatccaaactgaccaaacagat

SEQ ID NO: 313898 - DNA, 33 bp, Homo sapien
atatatgtgaaaatcccaactgaccaaacagat

SEQ ID NO: 313899 - DNA, 33 bp, Homo sapien
actagaatccttgtatcacccctaacaataaat

SEQ ID NO: 313900 - DNA, 33 bp, Homo sapien
actagaatccttgtattacccctaacaataaat

SEQ ID NO: 313901 - DNA, 33 bp, Homo sapien
agccagtaagtctacaaagttgaatctgtgctc

SEQ ID NO: 313902 - DNA, 33 bp, Homo sapien
agccagtaagtctacagagttgaatctgtgctc

SEQ ID NO: 313903 - DNA, 33 bp, Homo sapien
gtctgtgagctgtcctaaattagagggccagat

SEQ ID NO: 313904 - DNA, 33 bp, Homo sapien
gtctgtgagctgtcctgaattagagggccagat

SEQ ID NO: 313905 - DNA, 33 bp, Homo sapien
actcagtctttgcacactgatcctgctttagca

SEQ ID NO: 313906 - DNA, 33 bp, Homo sapien
actcagtctttgcacattgatcctgctttagca

SEQ ID NO: 313907 - DNA, 33 bp, Homo sapien
cccacaatctggtagacgacagacccgtggaca

SEQ ID NO: 313908 - DNA, 33 bp, Homo sapien
cccacaatctggtagatgacagacccgtggaca

SEQ ID NO: 313909 - DNA, 33 bp, Homo sapien
aatgacagacgatataactgttggtagttcagt

SEQ ID NO: 313910 - DNA, 33 bp, Homo sapien
aatgacagacgatatatctgttggtagttcagt

SEQ ID NO: 313911 - DNA, 33 bp, Homo sapien
ggtatagattataccactgatagattataccaa

SEQ ID NO: 313912 - DNA, 33 bp, Homo sapien
ggtatagattataccattgatagattataccaa

SEQ ID NO: 313913 - DNA, 33 bp, Homo sapien
acagccttctctgataagttcttatgcattgac

SEQ ID NO: 313914 - DNA, 33 bp, Homo sapien
acagccttctctgatatgttcttatgcattgac

SEQ ID NO: 313915 - DNA, 33 bp, Homo sapien
gctctgtacatctgataaacttctacctgagct

SEQ ID NO: 313916 - DNA, 33 bp, Homo sapien
gctctgtacatctgattaacttctacctgagct

SEQ ID NO: 313917 - DNA, 33 bp, Homo sapien
gacttctggtttggtagaggctgaagcgctcct

SEQ ID NO: 313918 - DNA, 33 bp, Homo sapien
gacttctggtttggtataggctgaagcgctcct

SEQ ID NO: 313919 - DNA, 33 bp, Homo sapien
ttgacaccccactatacggaccaggaaaccaag

SEQ ID NO: 313920 - DNA, 33 bp, Homo sapien
ttgacaccccactatatggaccaggaaaccaag

SEQ ID NO: 313921 - DNA, 33 bp, Homo sapien
taatcagtagctctccacactcaaccttgtctg

SEQ ID NO: 313922 - DNA, 33 bp, Homo sapien
taatcagtagctctccgcactcaaccttgtctg

SEQ ID NO: 313923 - DNA, 33 bp, Homo sapien
gtgggattatgtgagaagatgggtagtgcttaa

SEQ ID NO: 313924 - DNA, 33 bp, Homo sapien
gtgggattatgtgagaggatgggtagtgcttaa

SEQ ID NO: 313925 - DNA, 33 bp, Homo sapien
agcagctttgcgggtgcacttgaaataaggggg

SEQ ID NO: 313926 - DNA, 33 bp, Homo sapien
agcagctttgcgggtgtacttgaaataaggggg

SEQ ID NO: 313927 - DNA, 33 bp, Homo sapien
tcttcagcaggaactcccaatcttttatcagct

SEQ ID NO: 313928 - DNA, 33 bp, Homo sapien
tcttcagcaggaactctcaatcttttatcagct

SEQ ID NO: 313929 - DNA, 33 bp, Homo sapien
caataatcttaacaacaactaggtgaaatagct

SEQ ID NO: 313930 - DNA, 33 bp, Homo sapien
caataatcttaacaactactaggtgaaatagct

SEQ ID NO: 313931 - DNA, 33 bp, Homo sapien
acatctctcatttgcacaactacagcaggctgt

SEQ ID NO: 313932 - DNA, 33 bp, Homo sapien
acatctctcatttgcagaactacagcaggctgt

SEQ ID NO: 313933 - DNA, 33 bp, Homo sapien
acatttcactcctcaccatatcctggattctat

SEQ ID NO: 313934 - DNA, 33 bp, Homo sapien
acatttcactcctcactatatcctggattctat

SEQ ID NO: 313935 - DNA, 33 bp, Homo sapien
actcacccattgataactctaagaggatgtttt

SEQ ID NO: 313936 - DNA, 33 bp, Homo sapien
actcacccattgataagtctaagaggatgtttt

SEQ ID NO: 313937 - DNA, 33 bp, Homo sapien
ctgatttgctgaagtcactttcttgcttactct

SEQ ID NO: 313938 - DNA, 33 bp, Homo sapien
ctgatttgctgaagtcgctttcttgcttactct

SEQ ID NO: 313939 - DNA, 33 bp, Homo sapien
gtctcagttcacaatccccttgttttctgggct

SEQ ID NO: 313940 - DNA, 33 bp, Homo sapien
gtctcagttcacaatctccttgttttctgggct

SEQ ID NO: 313941 - DNA, 33 bp, Homo sapien
atttcttaagcaacaaacatccttgatgtgcat

SEQ ID NO: 313942 - DNA, 33 bp, Homo sapien
atttcttaagcaacaagcatccttgatgtgcat

SEQ ID NO: 313943 - DNA, 33 bp, Homo sapien
actagacaccgagttacgaaacttagagcaaaa

SEQ ID NO: 313944 - DNA, 33 bp, Homo sapien
actagacaccgagttatgaaacttagagcaaaa

SEQ ID NO: 313945 - DNA, 33 bp, Homo sapien
agaattggaataatcaccctctccactctgcat

SEQ ID NO: 313946 - DNA, 33 bp, Homo sapien
agaattggaataatcatcctctccactctgcat

SEQ ID NO: 313947 - DNA, 33 bp, Homo sapien
actgcctgtctccaaaatatcctacaatgggga

SEQ ID NO: 313948 - DNA, 33 bp, Homo sapien
actgcctgtctccaaagtatcctacaatgggga

SEQ ID NO: 313949 - DNA, 33 bp, Homo sapien
gctcaaggaataaaagaaaactaggcagggaaa

SEQ ID NO: 313950 - DNA, 33 bp, Homo sapien
gctcaaggaataaaaggaaactaggcagggaaa

SEQ ID NO: 313951 - DNA, 33 bp, Homo sapien
tatttttagtagagacagtatatccaaagtgct

SEQ ID NO: 313952 - DNA, 33 bp, Homo sapien
tatttttagtagagaccgtatatccaaagtgct

SEQ ID NO: 313953 - DNA, 33 bp, Homo sapien
ttaatgtcaatattcacgctgttacattagact

SEQ ID NO: 313954 - DNA, 33 bp, Homo sapien
ttaatgtcaatattcatgctgttacattagact

SEQ ID NO: 313955 - DNA, 33 bp, Homo sapien
tagtaatggggatgtaaatggagaggtaacttt

SEQ ID NO: 313956 - DNA, 33 bp, Homo sapien
tagtaatggggatgtagatggagaggtaacttt

SEQ ID NO: 313957 - DNA, 33 bp, Homo sapien
tcgaaaaaccctgatcaagaagcttaatgtgag

SEQ ID NO: 313958 - DNA, 33 bp, Homo sapien
tcgaaaaaccctgatcgagaagcttaatgtgag

SEQ ID NO: 313959 - DNA, 33 bp, Homo sapien
aggaacaatctttaacagagcaactactgtgta

SEQ ID NO: 313960 - DNA, 33 bp, Homo sapien
aggaacaatctttaacggagcaactactgtgta

SEQ ID NO: 313961 - DNA, 33 bp, Homo sapien
agctataactcccttcaacaattcaatagatat

SEQ ID NO: 313962 - DNA, 33 bp, Homo sapien
agctataactcccttcgacaattcaatagatat

SEQ ID NO: 313963 - DNA, 33 bp, Homo sapien
gtgatcaattatgagccactgtcttaaaagcac

SEQ ID NO: 313964 - DNA, 33 bp, Homo sapien
gtgatcaattatgagctactgtcttaaaagcac

SEQ ID NO: 313965 - DNA, 33 bp, Homo sapien
gcgcatgattataagcagccttcatagggataa

SEQ ID NO: 313966 - DNA, 33 bp, Homo sapien
gcgcatgattataagcggccttcatagggataa

SEQ ID NO: 313967 - DNA, 33 bp, Homo sapien
ctgtgcagagtagagtcaatttgtattatcata

SEQ ID NO: 313968 - DNA, 33 bp, Homo sapien
ctgtgcagagtagagttaatttgtattatcata

SEQ ID NO: 313969 - DNA, 33 bp, Homo sapien
aagtatgagagaagaaagtcagttgttgaacca

SEQ ID NO: 313970 - DNA, 33 bp, Homo sapien
aagtatgagagaagaaggtcagttgttgaacca

SEQ ID NO: 313971 - DNA, 33 bp, Homo sapien
tttttttttgagacaacttatcaggctagttta

SEQ ID NO: 313972 - DNA, 33 bp, Homo sapien
tttttttttgagacaatttatcaggctagttta

SEQ ID NO: 313973 - DNA, 33 bp, Homo sapien
cctttacatatgaaagaaacctggagtaataaa

SEQ ID NO: 313974 - DNA, 33 bp, Homo sapien
cctttacatatgaaagcaacctggagtaataaa

SEQ ID NO: 313975 - DNA, 33 bp, Homo sapien
ggagaactgtttgaaccgggacctgggaggaag

SEQ ID NO: 313976 - DNA, 33 bp, Homo sapien
ggagaactgtttgaactgggacctgggaggaag

SEQ ID NO: 313977 - DNA, 33 bp, Homo sapien; identical to SEQ ID NO: 313975

SEQ ID NO: 313978 - DNA, 33 bp, Homo sapien; identical to SEQ ID NO: 313976

SEQ ID NO: 313979 - DNA, 33 bp, Homo sapien
tctggattagttcaaactaagtaagatagaaca

SEQ ID NO: 313980 - DNA, 33 bp, Homo sapien
tctggattagttcaaattaagtaagatagaaca

SEQ ID NO: 313981 - DNA, 33 bp, Homo sapien
cctgacttctccataaactgaatcaagccaagt

SEQ ID NO: 313982 - DNA, 33 bp, Homo sapien
cctgacttctccataacctgaatcaagccaagt

SEQ ID NO: 313983 - DNA, 33 bp, Homo sapien
gatgctctgttaccacacttaaggcagatattg

SEQ ID NO: 313984 - DNA, 33 bp, Homo sapien
gatgctctgttaccacgcttaaggcagatattg

SEQ ID NO: 313985 - DNA, 33 bp, Homo sapien
aaaaagaagtcccaaacagagtgagctagacat

SEQ ID NO: 313986 - DNA, 33 bp, Homo sapien
aaaaagaagtcccaaagagagtgagctagacat

SEQ ID NO: 313987 - DNA, 33 bp, Homo sapien
acttgggagctacctagaacttctccctcataa

SEQ ID NO: 313988 - DNA, 33 bp, Homo sapien
acttgggagctacctataacttctccctcataa

SEQ ID NO: 313989 - DNA, 33 bp, Homo sapien
acctctaagacataaaattccatagccagagat

SEQ ID NO: 313990 - DNA, 33 bp, Homo sapien
acctctaagacataaagttccatagccagagat

SEQ ID NO: 313991 - DNA, 33 bp, Homo sapien
actgaaaggcgagcgaagttaggacgggaaaac

SEQ ID NO: 313992 - DNA, 33 bp, Homo sapien
actgaaaggcgagcgacgttaggacgggaaaac

SEQ ID NO: 313993 - DNA, 33 bp, Homo sapien
ctcacatccgtatgtcacaactgttaagggaat

SEQ ID NO: 313994 - DNA, 33 bp, Homo sapien
ctcacatccgtatgtctcaactgttaagggaat

SEQ ID NO: 313995 - DNA, 33 bp, Homo sapien
gtgatatctaagctacaacctgaggaaaaatag

SEQ ID NO: 313996 - DNA, 33 bp, Homo sapien
gtgatatctaagctacgacctgaggaaaaatag

SEQ ID NO: 313997 - DNA, 33 bp, Homo sapien
aaattgtagccagagacaggggaggaaaataga

SEQ ID NO: 313998 - DNA, 33 bp, Homo sapien
aaattgtagccagagagaggggaggaaaataga

SEQ ID NO: 313999 - DNA, 33 bp, Homo sapien
tgaagtaaacaggaaacaaattcatattttctc

SEQ ID NO: 314000 - DNA, 33 bp, Homo sapien
tgaagtaaacaggaaagaaattcatattttctc

SEQ ID NO: 314001 - DNA, 33 bp, Homo sapien
aggttcaattcacagcacaattttcaattattg

SEQ ID NO: 314002 - DNA, 33 bp, Homo sapien
aggttcaattcacagcgcaattttcaattattg

SEQ ID NO: 314003 - DNA, 33 bp, Homo sapien
gttcactttgcagaaactgatggtccagcttca

SEQ ID NO: 314004 - DNA, 33 bp, Homo sapien
gttcactttgcagaaattgatggtccagcttca

SEQ ID NO: 314005 - DNA, 33 bp, Homo sapien
gtagattaacttcccaatcatgccagagttgct

SEQ ID NO: 314006 - DNA, 33 bp, Homo sapien
gtagattaacttcccagtcatgccagagttgct

SEQ ID NO: 314007 - DNA, 33 bp, Homo sapien
agagtcacacaagatacgtttatgtatggatgt

SEQ ID NO: 314008 - DNA, 33 bp, Homo sapien
agagtcacacaagatatgtttatgtatggatgt

SEQ ID NO: 314009 - DNA, 33 bp, Homo sapien
attagacatttttggcactttggcttattacat

SEQ ID NO: 314010 - DNA, 33 bp, Homo sapien
attagacatttttggcgctttggcttattacat

SEQ ID NO: 314011 - DNA, 33 bp, Homo sapien
gcaacggtacacttaaatgatgtcaggtgatta

SEQ ID NO: 314012 - DNA, 33 bp, Homo sapien
gcaacggtacacttaattgatgtcaggtgatta

SEQ ID NO: 314013 - DNA, 33 bp, Homo sapien
caaaaatacaccataaacttgagatgctgattc

SEQ ID NO: 314014 - DNA, 33 bp, Homo sapien
caaaaatacaccataagcttgagatgctgattc

SEQ ID NO: 314015 - DNA, 33 bp, Homo sapien
tctcctttgagagaccaaagtgcatgtggaaga

SEQ ID NO: 314016 - DNA, 33 bp, Homo sapien
tctcctttgagagaccgaagtgcatgtggaaga

SEQ ID NO: 314017 - DNA, 33 bp, Homo sapien
cctctggttagcactaactcatttccagatggt

SEQ ID NO: 314018 - DNA, 33 bp, Homo sapien
cctctggttagcactagctcatttccagatggt

SEQ ID NO: 314019 - DNA, 33 bp, Homo sapien
caatatccagggcagaagaacatcaattccagc

SEQ ID NO: 314020 - DNA, 33 bp, Homo sapien
caatatccagggcagaggaacatcaattccagc

SEQ ID NO: 314021 - DNA, 33 bp, Homo sapien
gggtcttactgcttaaccttttgccagtggctg

SEQ ID NO: 314022 - DNA, 33 bp, Homo sapien
gggtcttactgcttaatcttttgccagtggctg

SEQ ID NO: 314023 - DNA, 33 bp, Homo sapien
aaacttctttctgcaacctgaaacttgttcaga

SEQ ID NO: 314024 - DNA, 33 bp, Homo sapien
aaacttctttctgcaatctgaaacttgttcaga

SEQ ID NO: 314025 - DNA, 33 bp, Homo sapien
ttcccactacttctcacagcaaaccagaaatca

SEQ ID NO: 314026 - DNA, 33 bp, Homo sapien
ttcccactacttctcatagcaaaccagaaatca

SEQ ID NO: 314027 - DNA, 33 bp, Homo sapien
atttatcacaggattcacttattatttatgaaa

SEQ ID NO: 314028 - DNA, 33 bp, Homo sapien
atttatcacaggattcgcttattatttatgaaa

SEQ ID NO: 314029 - DNA, 33 bp, Homo sapien
gtcaagtttcaaatacaggtttcgttggctcca

SEQ ID NO: 314030 - DNA, 33 bp, Homo sapien
gtcaagtttcaaatacgggtttcgttggctcca

SEQ ID NO: 314031 - DNA, 33 bp, Homo sapien
ggcacccacttgctgcaatgcattactcagcat

SEQ ID NO: 314032 - DNA, 33 bp, Homo sapien
ggcacccacttgctgcgatgcattactcagcat

SEQ ID NO: 314033 - DNA, 33 bp, Homo sapien
aagtcacatggtagaaatctgtcataaattcag

SEQ ID NO: 314034 - DNA, 33 bp, Homo sapien
aagtcacatggtagaagtctgtcataaattcag

SEQ ID NO: 314035 - DNA, 33 bp, Homo sapien
gtatagaagtcttacacatcttttgttgtttat

SEQ ID NO: 314036 - DNA, 33 bp, Homo sapien
gtatagaagtcttacatatcttttgttgtttat

SEQ ID NO: 314037 - DNA, 33 bp, Homo sapien
tgataatagcttaaaacggaaaacaacctaatg

SEQ ID NO: 314038 - DNA, 33 bp, Homo sapien
tgataatagcttaaaatggaaaacaacctaatg

SEQ ID NO: 314039 - DNA, 33 bp, Homo sapien
ctgtaacagatgatccaaattctcagtcgatta

SEQ ID NO: 314040 - DNA, 33 bp, Homo sapien
ctgtaacagatgatcccaattctcagtcgatta

SEQ ID NO: 314041 - DNA, 33 bp, Homo sapien
cacttatctaagctcaacgttccatctgagttc

SEQ ID NO: 314042 - DNA, 33 bp, Homo sapien
cacttatctaagctcagcgttccatctgagttc

SEQ ID NO: 314043 - DNA, 33 bp, Homo sapien
taaagaagccggctaaatctcaccagaaccaag

SEQ ID NO: 314044 - DNA, 33 bp, Homo sapien
taaagaagccggctaagtctcaccagaaccaag

SEQ ID NO: 314045 - DNA, 33 bp, Homo sapien
gaattaatggatagagacatttaacaaattcta

SEQ ID NO: 314046 - DNA, 33 bp, Homo sapien
gaattaatggatagaggcatttaacaaattcta

SEQ ID NO: 314047 - DNA, 33 bp, Homo sapien
gtttccgtttggatctcaatgtgaacacagctg

SEQ ID NO: 314048 - DNA, 33 bp, Homo sapien
gtttccgtttggatcttaatgtgaacacagctg

SEQ ID NO: 314049 - DNA, 33 bp, Homo sapien
taacagagctaggattgaaaggctggttcatct

SEQ ID NO: 314050 - DNA, 33 bp, Homo sapien
taacagagctaggatttaaaggctggttcatct

SEQ ID NO: 314051 - DNA, 33 bp, Homo sapien
gtgttcagaatcgcaacagatccagccctgcaa

SEQ ID NO: 314052 - DNA, 33 bp, Homo sapien
gtgttcagaatcgcaatagatccagccctgcaa

SEQ ID NO: 314053 - DNA, 33 bp, Homo sapien
aggtcatggttaaaataagtgttcagaatcgca

SEQ ID NO: 314054 - DNA, 33 bp, Homo sapien
aggtcatggttaaaatgagtgttcagaatcgca

SEQ ID NO: 314055 - DNA, 33 bp, Homo sapien
ctgcttttccgtcatacctcatatcatgtctgc

SEQ ID NO: 314056 - DNA, 33 bp, Homo sapien
ctgcttttccgtcatagctcatatcatgtctgc

SEQ ID NO: 314057 - DNA, 33 bp, Homo sapien
gatggttacttccattaaactcagatcccagct

SEQ ID NO: 314058 - DNA, 33 bp, Homo sapien
gatggttacttccattgaactcagatcccagct

SEQ ID NO: 314059 - DNA, 33 bp, Homo sapien
ctgtgcctgaggacccaaagtcacacgtccatg

SEQ ID NO: 314060 - DNA, 33 bp, Homo sapien
ctgtgcctgaggacccgaagtcacacgtccatg

SEQ ID NO: 314061 - DNA, 33 bp, Homo sapien
aaatccatttaaggcaccttctcggctgtgagc

SEQ ID NO: 314062 - DNA, 33 bp, Homo sapien
aaatccatttaaggcatcttctcggctgtgagc

SEQ ID NO: 314063 - DNA, 33 bp, Homo sapien
tttgtgctttcactcgaacagtgactgagctca

SEQ ID NO: 314064 - DNA, 33 bp, Homo sapien
tttgtgctttcactcggacagtgactgagctca

SEQ ID NO: 314065 - DNA, 33 bp, Homo sapien
tttgagctgtgtttctcacccaacgtggagtta

SEQ ID NO: 314066 - DNA, 33 bp, Homo sapien
tttgagctgtgtttcttacccaacgtggagtta

SEQ ID NO: 314067 - DNA, 33 bp, Homo sapien
ctaagcattcaacatacgttatctcactgtaca

SEQ ID NO: 314068 - DNA, 33 bp, Homo sapien
ctaagcattcaacatatgttatctcactgtaca

SEQ ID NO: 314069 - DNA, 33 bp, Homo sapien
caaatacttattggaaccctactgtacaacagg

SEQ ID NO: 314070 - DNA, 33 bp, Homo sapien
caaatacttattggaatcctactgtacaacagg

SEQ ID NO: 314071 - DNA, 33 bp, Homo sapien
agtgggagcacagatactaagtttgggaaggga

SEQ ID NO: 314072 - DNA, 33 bp, Homo sapien
agtgggagcacagatattaagtttgggaaggga

SEQ ID NO: 314073 - DNA, 33 bp, Homo sapien
aagggggaagaaatgaaacccaatatgaacgtc

SEQ ID NO: 314074 - DNA, 33 bp, Homo sapien
aagggggaagaaatgagacccaatatgaacgtc

SEQ ID NO: 314075 - DNA, 33 bp, Homo sapien
attcagagacagcttcaaggaggagcgagagat

SEQ ID NO: 314076 - DNA, 33 bp, Homo sapien
attcagagacagcttcgaggaggagcgagagat

SEQ ID NO: 314077 - DNA, 33 bp, Homo sapien
tgcattcttcttgaacactccctggctctaggg

SEQ ID NO: 314078 - DNA, 33 bp, Homo sapien
tgcattcttcttgaacgctccctggctctaggg

SEQ ID NO: 314079 - DNA, 33 bp, Homo sapien
cctgcaactgaagtccagaaagttccctcggcc

SEQ ID NO: 314080 - DNA, 33 bp, Homo sapien
cctgcaactgaagtcccgaaagttccctcggcc

SEQ ID NO: 314081 - DNA, 33 bp, Homo sapien
caggaatgcattttcccaccacctaagagcagc

SEQ ID NO: 314082 - DNA, 33 bp, Homo sapien
caggaatgcattttcctaccacctaagagcagc

SEQ ID NO: 314083 - DNA, 33 bp, Homo sapien
gcacagcctctgcaggcagtcacgttgctcaca

SEQ ID NO: 314084 - DNA, 33 bp, Homo sapien
gcacagcctctgcaggtagtcacgttgctcaca

SEQ ID NO: 314085 - DNA, 33 bp, Homo sapien
ttgggaacatagaaaacatctacgcgctgaaca

SEQ ID NO: 314086 - DNA, 33 bp, Homo sapien
ttgggaacatagaaaatatctacgcgctgaaca

SEQ ID NO: 314087 - DNA, 33 bp, Homo sapien
cagacaagcatacttacaccaatgaaaacaaat

SEQ ID NO: 314088 - DNA, 33 bp, Homo sapien
cagacaagcatacttagaccaatgaaaacaaat

SEQ ID NO: 314089 - DNA, 33 bp, Homo sapien
actgctctggaaagccacgtatgtcatcagttc

SEQ ID NO: 314090 - DNA, 33 bp, Homo sapien
actgctctggaaagccgcgtatgtcatcagttc

SEQ ID NO: 314091 - DNA, 33 bp, Homo sapien
atgtttcctggggaccagagagaaacgcaaaag

SEQ ID NO: 314092 - DNA, 33 bp, Homo sapien
atgtttcctggggaccggagagaaacgcaaaag

SEQ ID NO: 314093 - DNA, 33 bp, Homo sapien
tattctgtagggcaccaacaccagaccacacac

SEQ ID NO: 314094 - DNA, 33 bp, Homo sapien
tattctgtagggcaccgacaccagaccacacac

SEQ ID NO: 314095 - DNA, 33 bp, Homo sapien
cagccactgggcttgcaaggagccttctagagc

SEQ ID NO: 314096 - DNA, 33 bp, Homo sapien
cagccactgggcttgcgaggagccttctagagc

SEQ ID NO: 314097 - DNA, 33 bp, Homo sapien
ggtttgttggaaagacaaagagagttcatcagt

SEQ ID NO: 314098 - DNA, 33 bp, Homo sapien
ggtttgttggaaagacgaagagagttcatcagt

SEQ ID NO: 314099 - DNA, 33 bp, Homo sapien
ctttccaacaaacccaggaaggaggtactatta

SEQ ID NO: 314100 - DNA, 33 bp, Homo sapien
ctttccaacaaacccatgaaggaggtactatta

SEQ ID NO: 314101 - DNA, 33 bp, Homo sapien
ggctggctgcgtctaccgcattagagaaagaca

SEQ ID NO: 314102 - DNA, 33 bp, Homo sapien
ggctggctgcgtctactgcattagagaaagaca

SEQ ID NO: 314103 - DNA, 33 bp, Homo sapien
ccagacagaaccatgaggtaggagtgcaggtgg

SEQ ID NO: 314104 - DNA, 33 bp, Homo sapien
ccagacagaaccatgatgtaggagtgcaggtgg

SEQ ID NO: 314105 - DNA, 33 bp, Homo sapien
atccatcaccagtcccacagcaattttctccag

SEQ ID NO: 314106 - DNA, 33 bp, Homo sapien
atccatcaccagtcccgcagcaattttctccag

SEQ ID NO: 314107 - DNA, 33 bp, Homo sapien
gtcgcttcagcatcacaatggcgccctcttcat

SEQ ID NO: 314108 - DNA, 33 bp, Homo sapien
gtcgcttcagcatcacgatggcgccctcttcat

SEQ ID NO: 314109 - DNA, 33 bp, Homo sapien
agtgccaaaaagcagaaggatgtttgctccaag

SEQ ID NO: 314110 - DNA, 33 bp, Homo sapien
agtgccaaaaagcagagggatgtttgctccaag

SEQ ID NO: 314111 - DNA, 33 bp, Homo sapien
aggccccatttctctcaacatatgaggatactt

SEQ ID NO: 314112 - DNA, 33 bp, Homo sapien
aggccccatttctctcgacatatgaggatactt

SEQ ID NO: 314113 - DNA, 33 bp, Homo sapien
gacagtgggaaggtaacgtagctggatctcgaa

SEQ ID NO: 314114 - DNA, 33 bp, Homo sapien
gacagtgggaaggtaatgtagctggatctcgaa

SEQ ID NO: 314115 - DNA, 33 bp, Homo sapien
gagcaatttttggcagcagatgactggtcacct

SEQ ID NO: 314116 - DNA, 33 bp, Homo sapien
gagcaatttttggcagtagatgactggtcacct

SEQ ID NO: 314117 - DNA, 33 bp, Homo sapien
accaagtgaatgtgcgaaaagaggagctggggg

SEQ ID NO: 314118 - DNA, 33 bp, Homo sapien
accaagtgaatgtgcggaaagaggagctggggg

SEQ ID NO: 314119 - DNA, 33 bp, Homo sapien
cttgagtaaaattggagaagtgaattttgctca

SEQ ID NO: 314120 - DNA, 33 bp, Homo sapien
cttgagtaaaattggataagtgaattttgctca

SEQ ID NO: 314121 - DNA, 33 bp, Homo sapien
actagcataatcttaaccttcgagtgcagtgtt

SEQ ID NO: 314122 - DNA, 33 bp, Homo sapien
actagcataatcttaatcttcgagtgcagtgtt

SEQ ID NO: 314123 - DNA, 33 bp, Homo sapien
ggagcacctggctggaaagggtatcttttgggt

SEQ ID NO: 314124 - DNA, 33 bp, Homo sapien
ggagcacctggctggagagggtatcttttgggt

SEQ ID NO: 314125 - DNA, 33 bp, Homo sapien
aagagacagacattaaccaggaacctggagaat

SEQ ID NO: 314126 - DNA, 33 bp, Homo sapien
aagagacagacattaatcaggaacctggagaat

SEQ ID NO: 314127 - DNA, 33 bp, Homo sapien
caatttaacatcaactcaaaccccagctgtagt

SEQ ID NO: 314128 - DNA, 33 bp, Homo sapien
caatttaacatcaactgaaaccccagctgtagt

SEQ ID NO: 314129 - DNA, 33 bp, Homo sapien
agagagacctggctcaatgaaaaccagcgcctc

SEQ ID NO: 314130 - DNA, 33 bp, Homo sapien
agagagacctggctcagtgaaaaccagcgcctc

SEQ ID NO: 314131 - DNA, 33 bp, Homo sapien
agtagttaatattccaccttcaaagacaaactc

SEQ ID NO: 314132 - DNA, 33 bp, Homo sapien
agtagttaatattccatcttcaaagacaaactc

SEQ ID NO: 314133 - DNA, 33 bp, Homo sapien
aggaattaccagaatacctcagcttcccatgta

SEQ ID NO: 314134 - DNA, 33 bp, Homo sapien
aggaattaccagaatatctcagcttcccatgta

SEQ ID NO: 314135 - DNA, 33 bp, Homo sapien
tacacacggggcattccagcttatctgccatta

SEQ ID NO: 314136 - DNA, 33 bp, Homo sapien
tacacacggggcattctagcttatctgccatta

SEQ ID NO: 314137 - DNA, 33 bp, Homo sapien
cgtgtcggcaaggtacaagctgttttggaacca

SEQ ID NO: 314138 - DNA, 33 bp, Homo sapien
cgtgtcggcaaggtacgagctgttttggaacca

SEQ ID NO: 314139 - DNA, 33 bp, Homo sapien
atgctgggatttaaggaaagtgaaggtgctatg

SEQ ID NO: 314140 - DNA, 33 bp, Homo sapien
atgctgggatttaaggtaagtgaaggtgctatg

SEQ ID NO: 314141 - DNA, 33 bp, Homo sapien
attttttgtagtcccaaacaagtgtacaaattg

SEQ ID NO: 314142 - DNA, 33 bp, Homo sapien
attttttgtagtcccagacaagtgtacaaattg

SEQ ID NO: 314143 - DNA, 33 bp, Homo sapien
ggtgcataacattgaaaaacaatagcagcagag

SEQ ID NO: 314144 - DNA, 33 bp, Homo sapien
ggtgcataacattgaacaacaatagcagcagag

SEQ ID NO: 314145 - DNA, 33 bp, Homo sapien
ctgagtgggcaataaacggcatttgcttacggt

SEQ ID NO: 314146 - DNA, 33 bp, Homo sapien
ctgagtgggcaataaatggcatttgcttacggt

SEQ ID NO: 314147 - DNA, 33 bp, Homo sapien
gtaaaatggcttccacactttcctcttggttcc

SEQ ID NO: 314148 - DNA, 33 bp, Homo sapien
gtaaaatggcttccacgctttcctcttggttcc

SEQ ID NO: 314149 - DNA, 33 bp, Homo sapien
tcacccatttcgtgaaagtctttttctgaacaa

SEQ ID NO: 314150 - DNA, 33 bp, Homo sapien
tcacccatttcgtgaaggtctttttctgaacaa

SEQ ID NO: 314151 - DNA, 33 bp, Homo sapien
caaatgctgcttcagcaaaatgtaactaaaggg

SEQ ID NO: 314152 - DNA, 33 bp, Homo sapien
caaatgctgcttcagcgaaatgtaactaaaggg

SEQ ID NO: 314153 - DNA, 33 bp, Homo sapien
gtcccacagttttttccctagaaaccagatcta

SEQ ID NO: 314154 - DNA, 33 bp, Homo sapien
gtcccacagttttttcgctagaaaccagatcta

SEQ ID NO: 314155 - DNA, 33 bp, Homo sapien
ctgccatcaaaccccgacatctcattcctctct

SEQ ID NO: 314156 - DNA, 33 bp, Homo sapien
ctgccatcaaaccccggcatctcattcctctct

SEQ ID NO: 314157 - DNA, 33 bp, Homo sapien
gcaggaagcagagaaaaactcaaaaggggtggc

SEQ ID NO: 314158 - DNA, 33 bp, Homo sapien
gcaggaagcagagaaacactcaaaaggggtggc

SEQ ID NO: 314159 - DNA, 33 bp, Homo sapien
cagtctgagtgaaccacgttaatagcctcctcc

SEQ ID NO: 314160 - DNA, 33 bp, Homo sapien
cagtctgagtgaaccatgttaatagcctcctcc

SEQ ID NO: 314161 - DNA, 33 bp, Homo sapien
tcccagagaaagctgccgatccaatttttttcc

SEQ ID NO: 314162 - DNA, 33 bp, Homo sapien
tcccagagaaagctgctgatccaatttttttcc

SEQ ID NO: 314163 - DNA, 33 bp, Homo sapien
agacccatcatccttacgtttcttgggcctccc

SEQ ID NO: 314164 - DNA, 33 bp, Homo sapien
agacccatcatccttaggtttcttgggcctccc

SEQ ID NO: 314165 - DNA, 33 bp, Homo sapien
cttcagtttcagaagaagacgccaggccagtct

SEQ ID NO: 314166 - DNA, 33 bp, Homo sapien
cttcagtttcagaagaggacgccaggccagtct

SEQ ID NO: 314167 - DNA, 33 bp, Homo sapien
ctaaggtggccccaacaacagtactgaagggaa

SEQ ID NO: 314168 - DNA, 33 bp, Homo sapien
ctaaggtggccccaacgacagtactgaagggaa

SEQ ID NO: 314169 - DNA, 33 bp, Homo sapien
tgggactttaagcaccccaaaccatagtccatc

SEQ ID NO: 314170 - DNA, 33 bp, Homo sapien
tgggactttaagcacctcaaaccatagtccatc

SEQ ID NO: 314171 - DNA, 33 bp, Homo sapien
gggatcatagctccaacagttcttacaggattt

SEQ ID NO: 314172 - DNA, 33 bp, Homo sapien
gggatcatagctccaatagttcttacaggattt

SEQ ID NO: 314173 - DNA, 33 bp, Homo sapien
tagtgaggtctcaacactgaaaatagtcaagaa

SEQ ID NO: 314174 - DNA, 33 bp, Homo sapien
tagtgaggtctcaacattgaaaatagtcaagaa

SEQ ID NO: 314175 - DNA, 33 bp, Homo sapien
gcgacatctgagaagagatctgaggaatgagaa

SEQ ID NO: 314176 - DNA, 33 bp, Homo sapien
gcgacatctgagaagatatctgaggaatgagaa

SEQ ID NO: 314177 - DNA, 33 bp, Homo sapien
atattccctgacccacacactcagttatcccat

SEQ ID NO: 314178 - DNA, 33 bp, Homo sapien
atattccctgacccacgcactcagttatcccat

SEQ ID NO: 314179 - DNA, 33 bp, Homo sapien
aggaagtgagactgagaagggggagttggtgca

SEQ ID NO: 314180 - DNA, 33 bp, Homo sapien
aggaagtgagactgaggagggggagttggtgca

SEQ ID NO: 314181 - DNA, 33 bp, Homo sapien
ctcgctcctttacagaataacttcttctctgtc

SEQ ID NO: 314182 - DNA, 33 bp, Homo sapien
ctcgctcctttacagagtaacttcttctctgtc

SEQ ID NO: 314183 - DNA, 33 bp, Homo sapien
agtccttgtgggcccaagcaacttttaaaagat

SEQ ID NO: 314184 - DNA, 33 bp, Homo sapien
agtccttgtgggcccaggcaacttttaaaagat

SEQ ID NO: 314185 - DNA, 33 bp, Homo sapien
aaaagatttgtacagacgctttaccaaaaaaag

SEQ ID NO: 314186 - DNA, 33 bp, Homo sapien
aaaagatttgtacagatgctttaccaaaaaaag

SEQ ID NO: 314187 - DNA, 33 bp, Homo sapien
gaaatgtgtttcataaataacacacacacacat

SEQ ID NO: 314188 - DNA, 33 bp, Homo sapien
gaaatgtgtttcataagtaacacacacacacat

SEQ ID NO: 314189 - DNA, 33 bp, Homo sapien
gagaacactacagacccagtgagcaacacaaag

SEQ ID NO: 314190 - DNA, 33 bp, Homo sapien
gagaacactacagacctagtgagcaacacaaag

SEQ ID NO: 314191 - DNA, 33 bp, Homo sapien
tggaaaatacccagaacaatgcctagcacccag

SEQ ID NO: 314192 - DNA, 33 bp, Homo sapien
tggaaaatacccagaataatgcctagcacccag

SEQ ID NO: 314193 - DNA, 33 bp, Homo sapien
caggcatatggagtgacggattcaaaggggaag

SEQ ID NO: 314194 - DNA, 33 bp, Homo sapien
caggcatatggagtgatggattcaaaggggaag

SEQ ID NO: 314195 - DNA, 33 bp, Homo sapien
caccaaatattcatcaacccttgtgttctaaca

SEQ ID NO: 314196 - DNA, 33 bp, Homo sapien
caccaaatattcatcatcccttgtgttctaaca

SEQ ID NO: 314197 - DNA, 33 bp, Homo sapien
atgttcccaaggtttacggagctcagaaactct

SEQ ID NO: 314198 - DNA, 33 bp, Homo sapien
atgttcccaaggtttatggagctcagaaactct

SEQ ID NO: 314199 - DNA, 33 bp, Homo sapien
tgagatctgctaaaaagcaacaaatttgcaaaa

SEQ ID NO: 314200 - DNA, 33 bp, Homo sapien
tgagatctgctaaaaatcaacaaatttgcaaaa

SEQ ID NO: 314201 - DNA, 33 bp, Homo sapien
aaactcatcatgaagaaatagaaggagcataag

SEQ ID NO: 314202 - DNA, 33 bp, Homo sapien
aaactcatcatgaagagatagaaggagcataag

SEQ ID NO: 314203 - DNA, 33 bp, Homo sapien
aatacactgctcaccaaactctgctgctcacaa

SEQ ID NO: 314204 - DNA, 33 bp, Homo sapien
aatacactgctcaccagactctgctgctcacaa

SEQ ID NO: 314205 - DNA, 33 bp, Homo sapien
aagaaaaaaagcaaccacggtctcaaccagaag

SEQ ID NO: 314206 - DNA, 33 bp, Homo sapien
aagaaaaaaagcaaccgcggtctcaaccagaag

SEQ ID NO: 314207 - DNA, 33 bp, Homo sapien
tcccagaactcaagatcaataggactggctcat

SEQ ID NO: 314208 - DNA, 33 bp, Homo sapien
tcccagaactcaagattaataggactggctcat

SEQ ID NO: 314209 - DNA, 33 bp, Homo sapien
ttcaagacttgctgataaaaattaaattattta

SEQ ID NO: 314210 - DNA, 33 bp, Homo sapien
ttcaagacttgctgattaaaattaaattattta

SEQ ID NO: 314211 - DNA, 33 bp, Homo sapien
tactatgctaagtgccaggaatcttaaaactat

SEQ ID NO: 314212 - DNA, 33 bp, Homo sapien
tactatgctaagtgccgggaatcttaaaactat

SEQ ID NO: 314213 - DNA, 33 bp, Homo sapien
ttactcaaataaacatcaaaaaatgcagaacaa

SEQ ID NO: 314214 - DNA, 33 bp, Homo sapien
ttactcaaataaacatgaaaaaatgcagaacaa

SEQ ID NO: 314215 - DNA, 33 bp, Homo sapien
aaaaaatcttgtgggaaatcataaagacaggtc

SEQ ID NO: 314216 - DNA, 33 bp, Homo sapien
aaaaaatcttgtgggagatcataaagacaggtc

SEQ ID NO: 314217 - DNA, 33 bp, Homo sapien
tttaagtcagcaacagaaagattcctcaagtag

SEQ ID NO: 314218 - DNA, 33 bp, Homo sapien
tttaagtcagcaacaggaagattcctcaagtag

SEQ ID NO: 314219 - DNA, 33 bp, Homo sapien
tttccttcactgttaaagcaaaattactttttg

SEQ ID NO: 314220 - DNA, 33 bp, Homo sapien
tttccttcactgttaaggcaaaattactttttg

SEQ ID NO: 314221 - DNA, 33 bp, Homo sapien
cctgggtgtagtctcaccattttgtgttcttat

SEQ ID NO: 314222 - DNA, 33 bp, Homo sapien
cctgggtgtagtctcatcattttgtgttcttat

SEQ ID NO: 314223 - DNA, 33 bp, Homo sapien
tatctctcagactaaactgtagctggggagtag

SEQ ID NO: 314224 - DNA, 33 bp, Homo sapien
tatctctcagactaaattgtagctggggagtag

SEQ ID NO: 314225 - DNA, 33 bp, Homo sapien
tgtacttcatcaaatccagcttgaggatgagac

SEQ ID NO: 314226 - DNA, 33 bp, Homo sapien
tgtacttcatcaaatcgagcttgaggatgagac

SEQ ID NO: 314227 - DNA, 33 bp, Homo sapien
cctgttaccgccttctaaatctcagttactttc

SEQ ID NO: 314228 - DNA, 33 bp, Homo sapien
cctgttaccgccttctgaatctcagttactttc

SEQ ID NO: 314229 - DNA, 33 bp, Homo sapien
ctcatttatattaactaaagtccacactgtatt

SEQ ID NO: 314230 - DNA, 33 bp, Homo sapien
ctcatttatattaactgaagtccacactgtatt

SEQ ID NO: 314231 - DNA, 33 bp, Homo sapien
tacctttccaatttaacagacagataccttcct

SEQ ID NO: 314232 - DNA, 33 bp, Homo sapien
tacctttccaatttaagagacagataccttcct

SEQ ID NO: 314233 - DNA, 33 bp, Homo sapien
ctgaagatctataacaacttgacccattaatca

SEQ ID NO: 314234 - DNA, 33 bp, Homo sapien
ctgaagatctataacagcttgacccattaatca

SEQ ID NO: 314235 - DNA, 33 bp, Homo sapien
ttttggtggcctggggcatgtcttgaggcccag

SEQ ID NO: 314236 - DNA, 33 bp, Homo sapien
ttttggtggcctggggtatgtcttgaggcccag

SEQ ID NO: 314237 - DNA, 33 bp, Homo sapien
atgagctatgagtggccagagggaggagataag

SEQ ID NO: 314238 - DNA, 33 bp, Homo sapien
atgagctatgagtggctagagggaggagataag

SEQ ID NO: 314239 - DNA, 33 bp, Homo sapien
cataggaagttcccataaatgtttgtgggataa

SEQ ID NO: 314240 - DNA, 33 bp, Homo sapien
cataggaagttcccatgaatgtttgtgggataa

SEQ ID NO: 314241 - DNA, 33 bp, Homo sapien
agagttagggcttccaggcctagccaactacac

SEQ ID NO: 314242 - DNA, 33 bp, Homo sapien
agagttagggcttccatgcctagccaactacac

SEQ ID NO: 314243 - DNA, 33 bp, Homo sapien
cagcagtgcgacctgaacttttcattagtaatg

SEQ ID NO: 314244 - DNA, 33 bp, Homo sapien
cagcagtgcgacctgagcttttcattagtaatg

SEQ ID NO: 314245 - DNA, 33 bp, Homo sapien
tttagactaaggtccacgttgcctattattcag

SEQ ID NO: 314246 - DNA, 33 bp, Homo sapien
tttagactaaggtccatgttgcctattattcag

SEQ ID NO: 314247 - DNA, 33 bp, Homo sapien
gcacatgtgagggtccacacaagacctgagaga

SEQ ID NO: 314248 - DNA, 33 bp, Homo sapien
gcacatgtgagggtccgcacaagacctgagaga

SEQ ID NO: 314249 - DNA, 33 bp, Homo sapien
aagactaggacatagaaactcaggagcaaacat

SEQ ID NO: 314250 - DNA, 33 bp, Homo sapien
aagactaggacatagagactcaggagcaaacat

SEQ ID NO: 314251 - DNA, 33 bp, Homo sapien
tagagcctagcgcatacaaagcacttggcagag

SEQ ID NO: 314252 - DNA, 33 bp, Homo sapien
tagagcctagcgcatataaagcacttggcagag

SEQ ID NO: 314253 - DNA, 33 bp, Homo sapien
ctcaaattgtgcattacctaaaacacattacat

SEQ ID NO: 314254 - DNA, 33 bp, Homo sapien
ctcaaattgtgcattatctaaaacacattacat

SEQ ID NO: 314255 - DNA, 33 bp, Homo sapien
cttgcttctgtctgagaaaacaggaaagaaaat

SEQ ID NO: 314256 - DNA, 33 bp, Homo sapien
cttgcttctgtctgaggaaacaggaaagaaaat

SEQ ID NO: 314257 - DNA, 33 bp, Homo sapien
gaactgaaatgcagtacaaggaacaaggataag

SEQ ID NO: 314258 - DNA, 33 bp, Homo sapien
gaactgaaatgcagtagaaggaacaaggataag

SEQ ID NO: 314259 - DNA, 33 bp, Homo sapien
agattgatctacctcacgtagttacaagattta

SEQ ID NO: 314260 - DNA, 33 bp, Homo sapien
agattgatctacctcatgtagttacaagattta

SEQ ID NO: 314261 - DNA, 33 bp, Homo sapien
cctacaggtaaccacacacattctatatcccaa

SEQ ID NO: 314262 - DNA, 33 bp, Homo sapien
cctacaggtaaccacatacattctatatcccaa

SEQ ID NO: 314263 - DNA, 33 bp, Homo sapien
gatacctggctgaacactggaatcacgtgggga

SEQ ID NO: 314264 - DNA, 33 bp, Homo sapien
gatacctggctgaacattggaatcacgtgggga

SEQ ID NO: 314265 - DNA, 33 bp, Homo sapien
gggaaactatcttctacatcatggatcttcaaa

SEQ ID NO: 314266 - DNA, 33 bp, Homo sapien
gggaaactatcttctatatcatggatcttcaaa

SEQ ID NO: 314267 - DNA, 33 bp, Homo sapien
tccaaaagtgtccaaacctgagagatgccactg

SEQ ID NO: 314268 - DNA, 33 bp, Homo sapien
tccaaaagtgtccaaagctgagagatgccactg

SEQ ID NO: 314269 - DNA, 33 bp, Homo sapien
aaagaccagatccttaaagaagtttgtggtata

SEQ ID NO: 314270 - DNA, 33 bp, Homo sapien
aaagaccagatccttagagaagtttgtggtata

SEQ ID NO: 314271 - DNA, 33 bp, Homo sapien
cccattgggcttgtaacacagaattgtcaagca

SEQ ID NO: 314272 - DNA, 33 bp, Homo sapien
cccattgggcttgtaatacagaattgtcaagca

SEQ ID NO: 314273 - DNA, 33 bp, Homo sapien
aagacttggattctaaatagaaccgtttaaggc

SEQ ID NO: 314274 - DNA, 33 bp, Homo sapien
aagacttggattctaagtagaaccgtttaaggc

SEQ ID NO: 314275 - DNA, 33 bp, Homo sapien
attctccctgccttcacggtacttattgtagtg

SEQ ID NO: 314276 - DNA, 33 bp, Homo sapien
attctccctgccttcatggtacttattgtagtg

SEQ ID NO: 314277 - DNA, 33 bp, Homo sapien
aggttcaattctgtcgcactatttcatgctact

SEQ ID NO: 314278 - DNA, 33 bp, Homo sapien
aggttcaattctgtcggactatttcatgctact

SEQ ID NO: 314279 - DNA, 33 bp, Homo sapien
ctccttaggtatagtcccagcccaacttatctt

SEQ ID NO: 314280 - DNA, 33 bp, Homo sapien
ctccttaggtatagtcgcagcccaacttatctt

SEQ ID NO: 314281 - DNA, 33 bp, Homo sapien
cggataagaccaaaacaatccctgccttcatgc

SEQ ID NO: 314282 - DNA, 33 bp, Homo sapien
cggataagaccaaaaccatccctgccttcatgc

SEQ ID NO: 314283 - DNA, 33 bp, Homo sapien
taacagacactttccaacctgagacaaagtacc

SEQ ID NO: 314284 - DNA, 33 bp, Homo sapien
taacagacactttccaccctgagacaaagtacc

SEQ ID NO: 314285 - DNA, 33 bp, Homo sapien
attcatccgggaatcactaactcatgggaaaag

SEQ ID NO: 314286 - DNA, 33 bp, Homo sapien
attcatccgggaatcagtaactcatgggaaaag

SEQ ID NO: 314287 - DNA, 33 bp, Homo sapien
ctaaaggctaacattacaagtctttgagcttcc

SEQ ID NO: 314288 - DNA, 33 bp, Homo sapien
ctaaaggctaacattagaagtctttgagcttcc

SEQ ID NO: 314289 - DNA, 33 bp, Homo sapien
atgctttcttcaaggaataagctcaagtttatt

SEQ ID NO: 314290 - DNA, 33 bp, Homo sapien
atgctttcttcaaggagtaagctcaagtttatt

SEQ ID NO: 314291 - DNA, 33 bp, Homo sapien
gtttggatggctattagattcactcattcaagg

SEQ ID NO: 314292 - DNA, 33 bp, Homo sapien
gtttggatggctattatattcactcattcaagg

SEQ ID NO: 314293 - DNA, 33 bp, Homo sapien
agatggcaaaagaaaagaaggtatatgttgccc

SEQ ID NO: 314294 - DNA, 33 bp, Homo sapien
agatggcaaaagaaaataaggtatatgttgccc

SEQ ID NO: 314295 - DNA, 33 bp, Homo sapien
gataacactgttccataacatatattggaaata

SEQ ID NO: 314296 - DNA, 33 bp, Homo sapien
gataacactgttccatgacatatattggaaata

SEQ ID NO: 314297 - DNA, 33 bp, Homo sapien
tttggtgtcttattgccacagtcttaagatctc

SEQ ID NO: 314298 - DNA, 33 bp, Homo sapien
tttggtgtcttattgctacagtcttaagatctc

SEQ ID NO: 314299 - DNA, 33 bp, Homo sapien
gtgagctataaactgaacgcttccagaagccta

SEQ ID NO: 314300 - DNA, 33 bp, Homo sapien
gtgagctataaactgagcgcttccagaagccta

SEQ ID NO: 314301 - DNA, 33 bp, Homo sapien
aggtgattggaaggaacgtgtcctggtctccat

SEQ ID NO: 314302 - DNA, 33 bp, Homo sapien
aggtgattggaaggaatgtgtcctggtctccat

SEQ ID NO: 314303 - DNA, 33 bp, Homo sapien
tgtatgttgaacaatgaattttataatgcacac

SEQ ID NO: 314304 - DNA, 33 bp, Homo sapien
tgtatgttgaacaatggattttataatgcacac

SEQ ID NO: 314305 - DNA, 33 bp, Homo sapien
taatatagaaaaattgaaaacaatccaaatgcc

SEQ ID NO: 314306 - DNA, 33 bp, Homo sapien
taatatagaaaaattggaaacaatccaaatgcc

SEQ ID NO: 314307 - DNA, 33 bp, Homo sapien
actttgtcatttcacactatacacaaacattaa

SEQ ID NO: 314308 - DNA, 33 bp, Homo sapien
actttgtcatttcacattatacacaaacattaa

SEQ ID NO: 314309 - DNA, 33 bp, Homo sapien
ggatggtgtggaacacagtaagatcagtgaatt

SEQ ID NO: 314310 - DNA, 33 bp, Homo sapien
ggatggtgtggaacacggtaagatcagtgaatt

SEQ ID NO: 314311 - DNA, 33 bp, Homo sapien
tggatggcttccattacggaaagggcagcattt

SEQ ID NO: 314312 - DNA, 33 bp, Homo sapien
tggatggcttccattatggaaagggcagcattt

SEQ ID NO: 314313 - DNA, 33 bp, Homo sapien
ggggcatgtcaagatagctcttctaaggtgaag

SEQ ID NO: 314314 - DNA, 33 bp, Homo sapien
ggggcatgtcaagatatctcttctaaggtgaag

SEQ ID NO: 314315 - DNA, 33 bp, Homo sapien
taaatgaaaccacatccgaaataaaaccacaac

SEQ ID NO: 314316 - DNA, 33 bp, Homo sapien
taaatgaaaccacatctgaaataaaaccacaac

SEQ ID NO: 314317 - DNA, 33 bp, Homo sapien
gacagtggattactataaacttaaccaggtgat

SEQ ID NO: 314318 - DNA, 33 bp, Homo sapien
gacagtggattactatgaacttaaccaggtgat

SEQ ID NO: 314319 - DNA, 33 bp, Homo sapien
ccagcctgtgaagataccagttacacctcctta

SEQ ID NO: 314320 - DNA, 33 bp, Homo sapien
ccagcctgtgaagatatcagttacacctcctta

SEQ ID NO: 314321 - DNA, 33 bp, Homo sapien
acctaatgactaatgccgagtgtgctgcaagct

SEQ ID NO: 314322 - DNA, 33 bp, Homo sapien
acctaatgactaatgctgagtgtgctgcaagct

SEQ ID NO: 314323 - DNA, 33 bp, Homo sapien
aagacaataggcaaacaactgtgtggaagcagg

SEQ ID NO: 314324 - DNA, 33 bp, Homo sapien
aagacaataggcaaaccactgtgtggaagcagg

SEQ ID NO: 314325 - DNA, 33 bp, Homo sapien
gtgctgatacctgtggcaaaaaggtgccagcaa

SEQ ID NO: 314326 - DNA, 33 bp, Homo sapien
gtgctgatacctgtggtaaaaaggtgccagcaa

SEQ ID NO: 314327 - DNA, 33 bp, Homo sapien
atactaaggcataaaccatttgaagctgggaag

SEQ ID NO: 314328 - DNA, 33 bp, Homo sapien
atactaaggcataaactatttgaagctgggaag

SEQ ID NO: 314329 - DNA, 33 bp, Homo sapien
atcctatgctgacttaaagaattttgaaggtcc

SEQ ID NO: 314330 - DNA, 33 bp, Homo sapien
atcctatgctgacttagagaattttgaaggtcc

SEQ ID NO: 314331 - DNA, 33 bp, Homo sapien
tctcaagcaggtacaactgatatgcattcttca

SEQ ID NO: 314332 - DNA, 33 bp, Homo sapien
tctcaagcaggtacaagtgatatgcattcttca

SEQ ID NO: 314333 - DNA, 33 bp, Homo sapien
tcttccctgtatttccacatttgtcaatgccac

SEQ ID NO: 314334 - DNA, 33 bp, Homo sapien
tcttccctgtatttccgcatttgtcaatgccac

SEQ ID NO: 314335 - DNA, 33 bp, Homo sapien
tgaggtgagatcacttcaacctaggaattccag

SEQ ID NO: 314336 - DNA, 33 bp, Homo sapien
tgaggtgagatcacttgaacctaggaattccag

SEQ ID NO: 314337 - DNA, 33 bp, Homo sapien
aactaagcccatgacaaaggaggtagaacatag

SEQ ID NO: 314338 - DNA, 33 bp, Homo sapien
aactaagcccatgacagaggaggtagaacatag

SEQ ID NO: 314339 - DNA, 33 bp, Homo sapien
aggaagaggtcagagaaggtacataactaatga

SEQ ID NO: 314340 - DNA, 33 bp, Homo sapien
aggaagaggtcagagagggtacataactaatga

SEQ ID NO: 314341 - DNA, 33 bp, Homo sapien
aaatcaaagatgccaactctgtggaaaagaaga

SEQ ID NO: 314342 - DNA, 33 bp, Homo sapien
aaatcaaagatgccaagtctgtggaaaagaaga

SEQ ID NO: 314343 - DNA, 33 bp, Homo sapien
tccacagaaatggtgaaataataaatgtgtgtt

SEQ ID NO: 314344 - DNA, 33 bp, Homo sapien
tccacagaaatggtgacataataaatgtgtgtt

SEQ ID NO: 314345 - DNA, 33 bp, Homo sapien
agacaaggggtcctgacaactgtatctgtagtg

SEQ ID NO: 314346 - DNA, 33 bp, Homo sapien
agacaaggggtcctgagaactgtatctgtagtg

SEQ ID NO: 314347 - DNA, 33 bp, Homo sapien
gatcttgctggtcccgaacaactaggctggaaa

SEQ ID NO: 314348 - DNA, 33 bp, Homo sapien
gatcttgctggtcccgcacaactaggctggaaa

SEQ ID NO: 314349 - DNA, 33 bp, Homo sapien
tgtactaatgttagccaacaaaacgtcttatgt

SEQ ID NO: 314350 - DNA, 33 bp, Homo sapien
tgtactaatgttagcccacaaaacgtcttatgt

SEQ ID NO: 314351 - DNA, 33 bp, Homo sapien
atgataaatgtttgatcagccaggttgtggtga

SEQ ID NO: 314352 - DNA, 33 bp, Homo sapien
atgataaatgtttgattagccaggttgtggtga

SEQ ID NO: 314353 - DNA, 33 bp, Homo sapien
ggcagctgaccccacacatttgcttatgctaca

SEQ ID NO: 314354 - DNA, 33 bp, Homo sapien
ggcagctgaccccacagatttgcttatgctaca

SEQ ID NO: 314355 - DNA, 33 bp, Homo sapien
ttgttgtaaatataacacctggtatgttgtttg

SEQ ID NO: 314356 - DNA, 33 bp, Homo sapien
ttgttgtaaatataactcctggtatgttgtttg

SEQ ID NO: 314357 - DNA, 33 bp, Homo sapien
gagtctggagccttgcaccttttctgtaaaggg

SEQ ID NO: 314358 - DNA, 33 bp, Homo sapien
gagtctggagccttgcgccttttctgtaaaggg

SEQ ID NO: 314359 - DNA, 33 bp, Homo sapien
ggaacaattgttgacaaggactatttcaagctt

SEQ ID NO: 314360 - DNA, 33 bp, Homo sapien
ggaacaattgttgacagggactatttcaagctt

SEQ ID NO: 314361 - DNA, 33 bp, Homo sapien
acttatctgaatgaaacgtatctcaataacact

SEQ ID NO: 314362 - DNA, 33 bp, Homo sapien
acttatctgaatgaaatgtatctcaataacact

SEQ ID NO: 314363 - DNA, 33 bp, Homo sapien
ccagcaagaagtggaagtagaaccaagaaacaa

SEQ ID NO: 314364 - DNA, 33 bp, Homo sapien
ccagcaagaagtggaattagaaccaagaaacaa

SEQ ID NO: 314365 - DNA, 33 bp, Homo sapien
agctttttccatatccaaagtgttgcatataaa

SEQ ID NO: 314366 - DNA, 33 bp, Homo sapien
agctttttccatatccgaagtgttgcatataaa

SEQ ID NO: 314367 - DNA, 33 bp, Homo sapien
agacattgaaacagcaatcataactatgttcca

SEQ ID NO: 314368 - DNA, 33 bp, Homo sapien
agacattgaaacagcagtcataactatgttcca

SEQ ID NO: 314369 - DNA, 33 bp, Homo sapien
attaccagataggagacagctgcacaaaaagag

SEQ ID NO: 314370 - DNA, 33 bp, Homo sapien
attaccagataggagagagctgcacaaaaagag

SEQ ID NO: 314371 - DNA, 33 bp, Homo sapien
gtctacagaatctctaccaatcacttactccac

SEQ ID NO: 314372 - DNA, 33 bp, Homo sapien
gtctacagaatctctatcaatcacttactccac

SEQ ID NO: 314373 - DNA, 33 bp, Homo sapien
agggttgctctcctcaaagtggataattaggga

SEQ ID NO: 314374 - DNA, 33 bp, Homo sapien
agggttgctctcctcatagtggataattaggga

SEQ ID NO: 314375 - DNA, 33 bp, Homo sapien
aattagggatctaggccacctctatcttatagt

SEQ ID NO: 314376 - DNA, 33 bp, Homo sapien
aattagggatctaggctacctctatcttatagt

SEQ ID NO: 314377 - DNA, 33 bp, Homo sapien
taagctgtgattgggagacagtcaaggaaggat

SEQ ID NO: 314378 - DNA, 33 bp, Homo sapien
taagctgtgattgggatacagtcaaggaaggat

SEQ ID NO: 314379 - DNA, 33 bp, Homo sapien
tcttccaatcctaaacacaatgttctattcact

SEQ ID NO: 314380 - DNA, 33 bp, Homo sapien
tcttccaatcctaaacccaatgttctattcact

SEQ ID NO: 314381 - DNA, 33 bp, Homo sapien
tctgagagtaatataccggctcaatacttctct

SEQ ID NO: 314382 - DNA, 33 bp, Homo sapien
tctgagagtaatatactggctcaatacttctct

SEQ ID NO: 314383 - DNA, 33 bp, Homo sapien
cttgccttcagaaaaaaaagtattatctgtatt

SEQ ID NO: 314384 - DNA, 33 bp, Homo sapien
cttgccttcagaaaaacaagtattatctgtatt

SEQ ID NO: 314385 - DNA, 33 bp, Homo sapien
caatccccactgtgaagaaagaacaggtgctgc

SEQ ID NO: 314386 - DNA, 33 bp, Homo sapien
caatccccactgtgaataaagaacaggtgctgc

SEQ ID NO: 314387 - DNA, 33 bp, Homo sapien
atctactttcttagcacatttagtgtgtacaat

SEQ ID NO: 314388 - DNA, 33 bp, Homo sapien
atctactttcttagcagatttagtgtgtacaat

SEQ ID NO: 314389 - DNA, 33 bp, Homo sapien
aagtctttctttaacacaagcatgacatggaga

SEQ ID NO: 314390 - DNA, 33 bp, Homo sapien
aagtctttctttaacataagcatgacatggaga

SEQ ID NO: 314391 - DNA, 33 bp, Homo sapien
tattatagctcctggaagatgttttttgtctga

SEQ ID NO: 314392 - DNA, 33 bp, Homo sapien
tattatagctcctggaggatgttttttgtctga

SEQ ID NO: 314393 - DNA, 33 bp, Homo sapien
aaatctgtataaactaaaaccacttcagctgag

SEQ ID NO: 314394 - DNA, 33 bp, Homo sapien
aaatctgtataaactacaaccacttcagctgag

SEQ ID NO: 314395 - DNA, 33 bp, Homo sapien
ttatacagatttttgacagaagaaagtacacct

SEQ ID NO: 314396 - DNA, 33 bp, Homo sapien
ttatacagatttttgagagaagaaagtacacct

SEQ ID NO: 314397 - DNA, 33 bp, Homo sapien
gaattcacgaatgaataatcttgagtgtggtgc

SEQ ID NO: 314398 - DNA, 33 bp, Homo sapien
gaattcacgaatgaattatcttgagtgtggtgc

SEQ ID NO: 314399 - DNA, 33 bp, Homo sapien
cacatgaattcaatatcatagttggagcttcaa

SEQ ID NO: 314400 - DNA, 33 bp, Homo sapien
cacatgaattcaatattatagttggagcttcaa

SEQ ID NO: 314401 - DNA, 33 bp, Homo sapien
ctaggtgatcaaacaactaaaaggcacccatta

SEQ ID NO: 314402 - DNA, 33 bp, Homo sapien
ctaggtgatcaaacaagtaaaaggcacccatta

SEQ ID NO: 314403 - DNA, 33 bp, Homo sapien
gtgggggtgaaagagacgcaaaaggagagtaaa

SEQ ID NO: 314404 - DNA, 33 bp, Homo sapien
gtgggggtgaaagagatgcaaaaggagagtaaa

SEQ ID NO: 314405 - DNA, 33 bp, Homo sapien
ttgttacatacagaggcagaataagccatctac

SEQ ID NO: 314406 - DNA, 33 bp, Homo sapien
ttgttacatacagagggagaataagccatctac

SEQ ID NO: 314407 - DNA, 33 bp, Homo sapien
caagacagagtcctcaatgaatccttgggacat

SEQ ID NO: 314408 - DNA, 33 bp, Homo sapien
caagacagagtcctcagtgaatccttgggacat

SEQ ID NO: 314409 - DNA, 33 bp, Homo sapien
catatgacagaatattaaaaagatgagacggag

SEQ ID NO: 314410 - DNA, 33 bp, Homo sapien
catatgacagaatatttaaaagatgagacggag

SEQ ID NO: 314411 - DNA, 33 bp, Homo sapien
atgtggtatatattgacgttgttacattatttt

SEQ ID NO: 314412 - DNA, 33 bp, Homo sapien
atgtggtatatattgatgttgttacattatttt

SEQ ID NO: 314413 - DNA, 33 bp, Homo sapien
ttgaacgcttaaaacaacagaatgaagacttga

SEQ ID NO: 314414 - DNA, 33 bp, Homo sapien
ttgaacgcttaaaacagcagaatgaagacttga

SEQ ID NO: 314415 - DNA, 33 bp, Homo sapien
gtcctaaaatactgaacgaagaatgatgaaata

SEQ ID NO: 314416 - DNA, 33 bp, Homo sapien
gtcctaaaatactgaatgaagaatgatgaaata

SEQ ID NO: 314417 - DNA, 33 bp, Homo sapien
taatattttttgcataaatgaagtaacacaaac

SEQ ID NO: 314418 - DNA, 33 bp, Homo sapien
taatattttttgcatacatgaagtaacacaaac

SEQ ID NO: 314419 - DNA, 33 bp, Homo sapien
cctttaatgtatgttacgggcttaattgcttcc

SEQ ID NO: 314420 - DNA, 33 bp, Homo sapien
cctttaatgtatgttatgggcttaattgcttcc

SEQ ID NO: 314421 - DNA, 33 bp, Homo sapien
tccatgtgaatttaccaactagaatttatttgt

SEQ ID NO: 314422 - DNA, 33 bp, Homo sapien
tccatgtgaatttacctactagaatttatttgt

SEQ ID NO: 314423 - DNA, 33 bp, Homo sapien
gtgctgcaggctctaaagagagatggaaagtga

SEQ ID NO: 314424 - DNA, 33 bp, Homo sapien
gtgctgcaggctctaaggagagatggaaagtga

SEQ ID NO: 314425 - DNA, 33 bp, Homo sapien
ggtataacacagcagaacccaattctaaaacct

SEQ ID NO: 314426 - DNA, 33 bp, Homo sapien
ggtataacacagcagagcccaattctaaaacct

SEQ ID NO: 314427 - DNA, 33 bp, Homo sapien
ggatgaaagaaaactcagagacttcattgccag

SEQ ID NO: 314428 - DNA, 33 bp, Homo sapien
ggatgaaagaaaactcggagacttcattgccag

SEQ ID NO: 314429 - DNA, 33 bp, Homo sapien
aaaggttcagagtatgcatagacaaggagaaat

SEQ ID NO: 314430 - DNA, 33 bp, Homo sapien
aaaggttcagagtatgtatagacaaggagaaat

SEQ ID NO: 314431 - DNA, 33 bp, Homo sapien
taactcaacttctgtacccttggaggtagtttt

SEQ ID NO: 314432 - DNA, 33 bp, Homo sapien
taactcaacttctgtatccttggaggtagtttt

SEQ ID NO: 314433 - DNA, 33 bp, Homo sapien
aggttgttactcagtaagaaagttctatagtgg

SEQ ID NO: 314434 - DNA, 33 bp, Homo sapien
aggttgttactcagtaggaaagttctatagtgg

SEQ ID NO: 314435 - DNA, 33 bp, Homo sapien
gaaccaataggatatacagtgagatagagcctg

SEQ ID NO: 314436 - DNA, 33 bp, Homo sapien
gaaccaataggatatatagtgagatagagcctg

SEQ ID NO: 314437 - DNA, 33 bp, Homo sapien
atttaaagtgtaaggacagacacaaatagagca

SEQ ID NO: 314438 - DNA, 33 bp, Homo sapien
atttaaagtgtaaggatagacacaaatagagca

SEQ ID NO: 314439 - DNA, 33 bp, Homo sapien
aatttgatgaaattaaaccttgccttcctactg

SEQ ID NO: 314440 - DNA, 33 bp, Homo sapien
aatttgatgaaattaagccttgccttcctactg

SEQ ID NO: 314441 - DNA, 33 bp, Homo sapien
gtatgcagaactcaaaatatctaatcaaagaat

SEQ ID NO: 314442 - DNA, 33 bp, Homo sapien
gtatgcagaactcaaagtatctaatcaaagaat

SEQ ID NO: 314443 - DNA, 33 bp, Homo sapien
ttataagaatgaaacactggaaataagctgact

SEQ ID NO: 314444 - DNA, 33 bp, Homo sapien
ttataagaatgaaacattggaaataagctgact

SEQ ID NO: 314445 - DNA, 33 bp, Homo sapien
cacacagtcagaggtacagtgttgacacagtca

SEQ ID NO: 314446 - DNA, 33 bp, Homo sapien
cacacagtcagaggtatagtgttgacacagtca

SEQ ID NO: 314447 - DNA, 33 bp, Homo sapien
accttgaggtttcagacactgggaataataatt

SEQ ID NO: 314448 - DNA, 33 bp, Homo sapien
accttgaggtttcagatactgggaataataatt

SEQ ID NO: 314449 - DNA, 33 bp, Homo sapien
gtttgtcttccaaacactattccaaaaaaggtt

SEQ ID NO: 314450 - DNA, 33 bp, Homo sapien
gtttgtcttccaaacagtattccaaaaaaggtt

SEQ ID NO: 314451 - DNA, 33 bp, Homo sapien
tggccctttatttttcccataagaatgaccatt

SEQ ID NO: 314452 - DNA, 33 bp, Homo sapien
tggccctttatttttctcataagaatgaccatt

SEQ ID NO: 314453 - DNA, 33 bp, Homo sapien
tccctctgagttgtgacgcaaggccaattctta

SEQ ID NO: 314454 - DNA, 33 bp, Homo sapien
tccctctgagttgtgatgcaaggccaattctta

SEQ ID NO: 314455 - DNA, 33 bp, Homo sapien
ctatccttatattaagcctgtaaagaaagactc

SEQ ID NO: 314456 - DNA, 33 bp, Homo sapien
ctatccttatattaaggctgtaaagaaagactc

SEQ ID NO: 314457 - DNA, 33 bp, Homo sapien
acagggaaagacccaaaggacaatgatgcttcc

SEQ ID NO: 314458 - DNA, 33 bp, Homo sapien
acagggaaagacccaagggacaatgatgcttcc

SEQ ID NO: 314459 - DNA, 33 bp, Homo sapien
caaccagggttctcccagaaacagcaggcatgt

SEQ ID NO: 314460 - DNA, 33 bp, Homo sapien
caaccagggttctcccggaaacagcaggcatgt

SEQ ID NO: 314461 - DNA, 33 bp, Homo sapien
atatctccagctggaaaaagcttggatgcctaa

SEQ ID NO: 314462 - DNA, 33 bp, Homo sapien
atatctccagctggaagaagcttggatgcctaa

SEQ ID NO: 314463 - DNA, 33 bp, Homo sapien
ttcatattgtcataagcatcctgatgaatgaat

SEQ ID NO: 314464 - DNA, 33 bp, Homo sapien
ttcatattgtcataagtatcctgatgaatgaat

SEQ ID NO: 314465 - DNA, 33 bp, Homo sapien
gattcaagtgctttgactatccttcacccacaa

SEQ ID NO: 314466 - DNA, 33 bp, Homo sapien
gattcaagtgctttgagtatccttcacccacaa

SEQ ID NO: 314467 - DNA, 33 bp, Homo sapien
tcccataggctccccacgacgatcccataagtc

SEQ ID NO: 314468 - DNA, 33 bp, Homo sapien
tcccataggctccccatgacgatcccataagtc

SEQ ID NO: 314469 - DNA, 33 bp, Homo sapien
agatccagtacatactcaaacggatacccagac

SEQ ID NO: 314470 - DNA, 33 bp, Homo sapien
agatccagtacatactgaaacggatacccagac

SEQ ID NO: 314471 - DNA, 33 bp, Homo sapien
agcggataccagatacacctagtcaaacagccg

SEQ ID NO: 314472 - DNA, 33 bp, Homo sapien
agcggataccagatacgcctagtcaaacagccg

SEQ ID NO: 314473 - DNA, 33 bp, Homo sapien
agaggttgattatctgccaacaacatggcctag

SEQ ID NO: 314474 - DNA, 33 bp, Homo sapien
agaggttgattatctggcaacaacatggcctag

SEQ ID NO: 314475 - DNA, 33 bp, Homo sapien
catctagctcttaaccaacaaaccacaatttct

SEQ ID NO: 314476 - DNA, 33 bp, Homo sapien
catctagctcttaaccgacaaaccacaatttct

SEQ ID NO: 314477 - DNA, 33 bp, Homo sapien
ttatgccaaatttcacagcaaggtctcaacaaa

SEQ ID NO: 314478 - DNA, 33 bp, Homo sapien
ttatgccaaatttcacggcaaggtctcaacaaa

SEQ ID NO: 314479 - DNA, 33 bp, Homo sapien
tctcttactaaatgctaaaagactgttctcttg

SEQ ID NO: 314480 - DNA, 33 bp, Homo sapien
tctcttactaaatgctgaaagactgttctcttg

SEQ ID NO: 314481 - DNA, 33 bp, Homo sapien
tccattcataaacagtcaaaaggcaacatatat

SEQ ID NO: 314482 - DNA, 33 bp, Homo sapien
tccattcataaacagttaaaaggcaacatatat

SEQ ID NO: 314483 - DNA, 33 bp, Homo sapien
agcctgggtgtgttcacattagaatgcaggaaa

SEQ ID NO: 314484 - DNA, 33 bp, Homo sapien
agcctgggtgtgttcatattagaatgcaggaaa

SEQ ID NO: 314485 - DNA, 33 bp, Homo sapien
accctcataatctaataactccaaaggccccac

SEQ ID NO: 314486 - DNA, 33 bp, Homo sapien
accctcataatctaatcactccaaaggccccac

SEQ ID NO: 314487 - DNA, 33 bp, Homo sapien
taattagtggaaatgacgtcatagtagagttgg

SEQ ID NO: 314488 - DNA, 33 bp, Homo sapien
taattagtggaaatgaggtcatagtagagttgg

SEQ ID NO: 314489 - DNA, 33 bp, Homo sapien
tatgtctatcccccaccaaaatcatttgagcat

SEQ ID NO: 314490 - DNA, 33 bp, Homo sapien
tatgtctatcccccacgaaaatcatttgagcat

SEQ ID NO: 314491 - DNA, 33 bp, Homo sapien
cagatcctttgtggaaaaaacaaatctgtgccc

SEQ ID NO: 314492 - DNA, 33 bp, Homo sapien
cagatcctttgtggaagaaacaaatctgtgccc

SEQ ID NO: 314493 - DNA, 33 bp, Homo sapien
aagcatgaaagaagtacatagcaaagccctggt

SEQ ID NO: 314494 - DNA, 33 bp, Homo sapien
aagcatgaaagaagtatatagcaaagccctggt

SEQ ID NO: 314495 - DNA, 33 bp, Homo sapien
taaggacagagctctgcagcactgagtgttcaa

SEQ ID NO: 314496 - DNA, 33 bp, Homo sapien
taaggacagagctctggagcactgagtgttcaa

SEQ ID NO: 314497 - DNA, 33 bp, Homo sapien
gaaatatggaagaaagacttcccagcatgaaac

SEQ ID NO: 314498 - DNA, 33 bp, Homo sapien
gaaatatggaagaaaggcttcccagcatgaaac

SEQ ID NO: 314499 - DNA, 33 bp, Homo sapien
taaatgtcatcctagcaatcattaatcacagtg

SEQ ID NO: 314500 - DNA, 33 bp, Homo sapien
taaatgtcatcctagctatcattaatcacagtg

SEQ ID NO: 314501 - DNA, 33 bp, Homo sapien
caaggccccaatgttaagaaaaatgttctacaa

SEQ ID NO: 314502 - DNA, 33 bp, Homo sapien
caaggccccaatgttaggaaaaatgttctacaa

SEQ ID NO: 314503 - DNA, 33 bp, Homo sapien
gtcatacacatctaaaattcattttcctcaata

SEQ ID NO: 314504 - DNA, 33 bp, Homo sapien
gtcatacacatctaaatttcattttcctcaata

SEQ ID NO: 314505 - DNA, 33 bp, Homo sapien
gagagagaaagagagaagttcctgacatttatc

SEQ ID NO: 314506 - DNA, 33 bp, Homo sapien
gagagagaaagagagaggttcctgacatttatc

SEQ ID NO: 314507 - DNA, 33 bp, Homo sapien
tggacctggattctaaaagcaatataaaaccac

SEQ ID NO: 314508 - DNA, 33 bp, Homo sapien
tggacctggattctaagagcaatataaaaccac

SEQ ID NO: 314509 - DNA, 33 bp, Homo sapien
tcaacttaaatatttcaaaagcagaacagtgta

SEQ ID NO: 314510 - DNA, 33 bp, Homo sapien
tcaacttaaatatttcgaaagcagaacagtgta

SEQ ID NO: 314511 - DNA, 33 bp, Homo sapien
actgtgcttgcagtgacaggacaactttatccc

SEQ ID NO: 314512 - DNA, 33 bp, Homo sapien
actgtgcttgcagtgagaggacaactttatccc

SEQ ID NO: 314513 - DNA, 33 bp, Homo sapien
gcagttttctgccgataatcacacatcatgagc

SEQ ID NO: 314514 - DNA, 33 bp, Homo sapien
gcagttttctgccgatcatcacacatcatgagc

SEQ ID NO: 314515 - DNA, 33 bp, Homo sapien
gaagcatcatgacccacgtaaggtagaggagat

SEQ ID NO: 314516 - DNA, 33 bp, Homo sapien
gaagcatcatgacccatgtaaggtagaggagat

SEQ ID NO: 314517 - DNA, 33 bp, Homo sapien; identical to SEQ ID NO: 314515

SEQ ID NO: 314518 - DNA, 33 bp, Homo sapien; identical to SEQ ID NO: 314516

SEQ ID NO: 314519 - DNA, 33 bp, Homo sapien
atgcaatttgttcatcactgctattctcaaatt

SEQ ID NO: 314520 - DNA, 33 bp, Homo sapien
atgcaatttgttcatcgctgctattctcaaatt

SEQ ID NO: 314521 - DNA, 33 bp, Homo sapien
gtcaaaatcctagaaacacacacttgacctgga

SEQ ID NO: 314522 - DNA, 33 bp, Homo sapien
gtcaaaatcctagaaatacacacttgacctgga

SEQ ID NO: 314523 - DNA, 33 bp, Homo sapien
agtggctttgggaaaaaagagtgaatcaattaa

SEQ ID NO: 314524 - DNA, 33 bp, Homo sapien
agtggctttgggaaaatagagtgaatcaattaa

SEQ ID NO: 314525 - DNA, 33 bp, Homo sapien
ttaacaatcatgttaccgagaaaaacttagtaa

SEQ ID NO: 314526 - DNA, 33 bp, Homo sapien
ttaacaatcatgttactgagaaaaacttagtaa

SEQ ID NO: 314527 - DNA, 33 bp, Homo sapien
ccatgttatgcatgtagcagtattgctttttaa

SEQ ID NO: 314528 - DNA, 33 bp, Homo sapien
ccatgttatgcatgtatcagtattgctttttaa

SEQ ID NO: 314529 - DNA, 33 bp, Homo sapien
cttaatgagactgtgcaaataagaccagtgtta

SEQ ID NO: 314530 - DNA, 33 bp, Homo sapien
cttaatgagactgtgccaataagaccagtgtta

SEQ ID NO: 314531 - DNA, 33 bp, Homo sapien
aggtgaacgctatccaagggctttagcattggg

SEQ ID NO: 314532 - DNA, 33 bp, Homo sapien
aggtgaacgctatccaggggctttagcattggg

SEQ ID NO: 314533 - DNA, 33 bp, Homo sapien
ttctgctgataatacaagagtactctgtgcatc

SEQ ID NO: 314534 - DNA, 33 bp, Homo sapien
ttctgctgataatacatgagtactctgtgcatc

SEQ ID NO: 314535 - DNA, 33 bp, Homo sapien
tcaaaaggcttatgtaaaggagattctacggct

SEQ ID NO: 314536 - DNA, 33 bp, Homo sapien
tcaaaaggcttatgtataggagattctacggct

SEQ ID NO: 314537 - DNA, 33 bp, Homo sapien
tagaggagcctcaatacgttgatctagtatagt

SEQ ID NO: 314538 - DNA, 33 bp, Homo sapien
tagaggagcctcaatatgttgatctagtatagt

SEQ ID NO: 314539 - DNA, 33 bp, Homo sapien
aactatggataacaaacggacttagtaattccc

SEQ ID NO: 314540 - DNA, 33 bp, Homo sapien
aactatggataacaaatggacttagtaattccc

SEQ ID NO: 314541 - DNA, 33 bp, Homo sapien
gtggcacctgccaaaacgaagaagtcccaggta

SEQ ID NO: 314542 - DNA, 33 bp, Homo sapien
gtggcacctgccaaaatgaagaagtcccaggta

SEQ ID NO: 314543 - DNA, 33 bp, Homo sapien
gactggcacctctctgcatatatagcattatta

SEQ ID NO: 314544 - DNA, 33 bp, Homo sapien
gactggcacctctctggatatatagcattatta

SEQ ID NO: 314545 - DNA, 33 bp, Homo sapien
tgtttggataacctcactcaataaatatcgtca

SEQ ID NO: 314546 - DNA, 33 bp, Homo sapien
tgtttggataacctcagtcaataaatatcgtca

SEQ ID NO: 314547 - DNA, 33 bp, Homo sapien
caagagtgatgaacagaaaagtgctaaagccag

SEQ ID NO: 314548 - DNA, 33 bp, Homo sapien
caagagtgatgaacaggaaagtgctaaagccag

SEQ ID NO: 314549 - DNA, 33 bp, Homo sapien
caggatgatcccaagaagcatgtacttataaat

SEQ ID NO: 314550 - DNA, 33 bp, Homo sapien
caggatgatcccaagacgcatgtacttataaat

SEQ ID NO: 314551 - DNA, 33 bp, Homo sapien
ttcctccacatatatccgaacctcattttattt

SEQ ID NO: 314552 - DNA, 33 bp, Homo sapien
ttcctccacatatatctgaacctcattttattt

SEQ ID NO: 314553 - DNA, 33 bp, Homo sapien
caagccttgtgaaaacacactgttcctacccat

SEQ ID NO: 314554 - DNA, 33 bp, Homo sapien
caagccttgtgaaaacccactgttcctacccat

SEQ ID NO: 314555 - DNA, 33 bp, Homo sapien
agcagggatctgacataataaaagtggtcttct

SEQ ID NO: 314556 - DNA, 33 bp, Homo sapien
agcagggatctgacatgataaaagtggtcttct

SEQ ID NO: 314557 - DNA, 33 bp, Homo sapien
atcagtgtgatcatcacaatttatgtcctgctt

SEQ ID NO: 314558 - DNA, 33 bp, Homo sapien
atcagtgtgatcatcataatttatgtcctgctt

SEQ ID NO: 314559 - DNA, 33 bp, Homo sapien
tggagcatggatgttacattttttttctgctag

SEQ ID NO: 314560 - DNA, 33 bp, Homo sapien
tggagcatggatgttatattttttttctgctag

SEQ ID NO: 314561 - DNA, 33 bp, Homo sapien
tcaggctaatagagacaggaaggtcacagtgct

SEQ ID NO: 314562 - DNA, 33 bp, Homo sapien
tcaggctaatagagacgggaaggtcacagtgct

SEQ ID NO: 314563 - DNA, 33 bp, Homo sapien
tcatccctgttcaaacacggtgccttccagaag

SEQ ID NO: 314564 - DNA, 33 bp, Homo sapien
tcatccctgttcaaacgcggtgccttccagaag

SEQ ID NO: 314565 - DNA, 33 bp, Homo sapien
gaaatcagtcatcttacaatggaatccttacaa

SEQ ID NO: 314566 - DNA, 33 bp, Homo sapien
gaaatcagtcatcttataatggaatccttacaa

SEQ ID NO: 314567 - DNA, 33 bp, Homo sapien
taaaactctgtggcacccttttcagcggtggat

SEQ ID NO: 314568 - DNA, 33 bp, Homo sapien
taaaactctgtggcactcttttcagcggtggat

SEQ ID NO: 314569 - DNA, 33 bp, Homo sapien
acactgatgtagcaatgaagcaaaacagtaaag

SEQ ID NO: 314570 - DNA, 33 bp, Homo sapien
acactgatgtagcaattaagcaaaacagtaaag

SEQ ID NO: 314571 - DNA, 33 bp, Homo sapien
catgctcatgatttgaggacttgctgtcgatat

SEQ ID NO: 314572 - DNA, 33 bp, Homo sapien
catgctcatgatttgatgacttgctgtcgatat

SEQ ID NO: 314573 - DNA, 33 bp, Homo sapien
agaaaaggccaattaaagccctgaatgagagag

SEQ ID NO: 314574 - DNA, 33 bp, Homo sapien
agaaaaggccaattaacgccctgaatgagagag

SEQ ID NO: 314575 - DNA, 33 bp, Homo sapien
gccagattccagggcactgatttggcatttctt

SEQ ID NO: 314576 - DNA, 33 bp, Homo sapien
gccagattccagggcattgatttggcatttctt

SEQ ID NO: 314577 - DNA, 33 bp, Homo sapien
gtaacaccaggtcttcaagatgtctcttttctg

SEQ ID NO: 314578 - DNA, 33 bp, Homo sapien
gtaacaccaggtcttccagatgtctcttttctg

SEQ ID NO: 314579 - DNA, 33 bp, Homo sapien
ctgtatttggtgaataagagggcttgagtagat

SEQ ID NO: 314580 - DNA, 33 bp, Homo sapien
ctgtatttggtgaataggagggcttgagtagat

SEQ ID NO: 314581 - DNA, 33 bp, Homo sapien
gtcataattgtgaccccgagtctctaaaaaaag

SEQ ID NO: 314582 - DNA, 33 bp, Homo sapien
gtcataattgtgaccctgagtctctaaaaaaag

SEQ ID NO: 314583 - DNA, 33 bp, Homo sapien
gaagttttaaggcaagaaactaatatactaaac

SEQ ID NO: 314584 - DNA, 33 bp, Homo sapien
gaagttttaaggcaaggaactaatatactaaac

SEQ ID NO: 314585 - DNA, 33 bp, Homo sapien
cagccaaacctaaatgcaaaccatgctgccaac

SEQ ID NO: 314586 - DNA, 33 bp, Homo sapien
cagccaaacctaaatgtaaaccatgctgccaac

SEQ ID NO: 314587 - DNA, 33 bp, Homo sapien
tctgtaagctttgttcacacaatgtcctttctg

SEQ ID NO: 314588 - DNA, 33 bp, Homo sapien
tctgtaagctttgttcgcacaatgtcctttctg

SEQ ID NO: 314589 - DNA, 33 bp, Homo sapien
gaattccaggcactaaggagctgactcaacact

SEQ ID NO: 314590 - DNA, 33 bp, Homo sapien
gaattccaggcactaatgagctgactcaacact

SEQ ID NO: 314591 - DNA, 33 bp, Homo sapien
caggaaacttttaaagccatgtgttaattttct

SEQ ID NO: 314592 - DNA, 33 bp, Homo sapien
caggaaacttttaaaggcatgtgttaattttct

SEQ ID NO: 314593 - DNA, 33 bp, Homo sapien
tttcagtcttatgatcccccttttaatgttagt

SEQ ID NO: 314594 - DNA, 33 bp, Homo sapien
tttcagtcttatgatctcccttttaatgttagt

SEQ ID NO: 314595 - DNA, 33 bp, Homo sapien
tagcgtaacttccaaactgaaaataacaggtct

SEQ ID NO: 314596 - DNA, 33 bp, Homo sapien
tagcgtaacttccaaattgaaaataacaggtct

SEQ ID NO: 314597 - DNA, 33 bp, Homo sapien
gttcctagacaaagtacagctgttgagcctttc

SEQ ID NO: 314598 - DNA, 33 bp, Homo sapien
gttcctagacaaagtatagctgttgagcctttc

SEQ ID NO: 314599 - DNA, 33 bp, Homo sapien
taatagggcccctccacgtagtgtacttctact

SEQ ID NO: 314600 - DNA, 33 bp, Homo sapien
taatagggcccctccatgtagtgtacttctact

SEQ ID NO: 314601 - DNA, 33 bp, Homo sapien
cctgtcatttgcagcacatgacttggctttcta

SEQ ID NO: 314602 - DNA, 33 bp, Homo sapien
cctgtcatttgcagcagatgacttggctttcta

SEQ ID NO: 314603 - DNA, 33 bp, Homo sapien
ttccgtatacagcacaatctgccccttaagtag

SEQ ID NO: 314604 - DNA, 33 bp, Homo sapien
ttccgtatacagcacagtctgccccttaagtag

SEQ ID NO: 314605 - DNA, 33 bp, Homo sapien
accagaactataggcaagtagccagataagtgg

SEQ ID NO: 314606 - DNA, 33 bp, Homo sapien
accagaactataggcacgtagccagataagtgg

SEQ ID NO: 314607 - DNA, 33 bp, Homo sapien
aagcccccatatgcaacagcaacgttctgtaga

SEQ ID NO: 314608 - DNA, 33 bp, Homo sapien
aagcccccatatgcaagagcaacgttctgtaga

SEQ ID NO: 314609 - DNA, 33 bp, Homo sapien
tgtttcctctgtatacaaacaagaatgccatct

SEQ ID NO: 314610 - DNA, 33 bp, Homo sapien
tgtttcctctgtatacgaacaagaatgccatct

SEQ ID NO: 314611 - DNA, 33 bp, Homo sapien
aaagggagagtgaagaaagaaaaccacagaggt

SEQ ID NO: 314612 - DNA, 33 bp, Homo sapien
aaagggagagtgaagagagaaaaccacagaggt

SEQ ID NO: 314613 - DNA, 33 bp, Homo sapien
caattacaattcatacgagatccattaagcttc

SEQ ID NO: 314614 - DNA, 33 bp, Homo sapien
caattacaattcatactagatccattaagcttc

SEQ ID NO: 314615 - DNA, 33 bp, Homo sapien
tacttgatagaaaagaccatgacctgaaaggcc

SEQ ID NO: 314616 - DNA, 33 bp, Homo sapien
tacttgatagaaaagagcatgacctgaaaggcc

SEQ ID NO: 314617 - DNA, 33 bp, Homo sapien
gaaccttctgatcaaacggcccaggaagggatt

SEQ ID NO: 314618 - DNA, 33 bp, Homo sapien
gaaccttctgatcaaatggcccaggaagggatt

SEQ ID NO: 314619 - DNA, 33 bp, Homo sapien
tggccccagctagcaacaggttcattctcaatc

SEQ ID NO: 314620 - DNA, 33 bp, Homo sapien
tggccccagctagcaagaggttcattctcaatc

SEQ ID NO: 314621 - DNA, 33 bp, Homo sapien
atccaggcccaataagcagaatgtgcaaaggcc

SEQ ID NO: 314622 - DNA, 33 bp, Homo sapien
atccaggcccaataagtagaatgtgcaaaggcc

SEQ ID NO: 314623 - DNA, 33 bp, Homo sapien
gcagccttatatcccacgtgtggttaggaagaa

SEQ ID NO: 314624 - DNA, 33 bp, Homo sapien
gcagccttatatcccatgtgtggttaggaagaa

SEQ ID NO: 314625 - DNA, 33 bp, Homo sapien
tgtgagaggacagataggttgggggtcagatca

SEQ ID NO: 314626 - DNA, 33 bp, Homo sapien
tgtgagaggacagatatgttgggggtcagatca

SEQ ID NO: 314627 - DNA, 33 bp, Homo sapien
atagacaatggggagtaacacagtaagatttgc

SEQ ID NO: 314628 - DNA, 33 bp, Homo sapien
atagacaatggggagtgacacagtaagatttgc

SEQ ID NO: 314629 - DNA, 33 bp, Homo sapien
ttgccacaccatcctaaaagtccatgagaagct

SEQ ID NO: 314630 - DNA, 33 bp, Homo sapien
ttgccacaccatcctacaagtccatgagaagct

SEQ ID NO: 314631 - DNA, 33 bp, Homo sapien
catgggtgggccaagaaactggttcagatttgc

SEQ ID NO: 314632 - DNA, 33 bp, Homo sapien
catgggtgggccaagagactggttcagatttgc

SEQ ID NO: 314633 - DNA, 33 bp, Homo sapien
tgagcagataaagttgaataactaggcaggagc

SEQ ID NO: 314634 - DNA, 33 bp, Homo sapien
tgagcagataaagttggataactaggcaggagc

SEQ ID NO: 314635 - DNA, 33 bp, Homo sapien
gatcaatgactaaagcacgatagtcctaaaatc

SEQ ID NO: 314636 - DNA, 33 bp, Homo sapien
gatcaatgactaaagcgcgatagtcctaaaatc

SEQ ID NO: 314637 - DNA, 33 bp, Homo sapien
atgaagcctccagacaaatatgaatagacaatg

SEQ ID NO: 314638 - DNA, 33 bp, Homo sapien
atgaagcctccagacagatatgaatagacaatg

SEQ ID NO: 314639 - DNA, 33 bp, Homo sapien
agaaagtgacaaatcaatatgcaatgcatggga

SEQ ID NO: 314640 - DNA, 33 bp, Homo sapien
agaaagtgacaaatcagtatgcaatgcatggga

SEQ ID NO: 314641 - DNA, 33 bp, Homo sapien
ctcttgaggattaaaaatatgttgttatgggat

SEQ ID NO: 314642 - DNA, 33 bp, Homo sapien
ctcttgaggattaaaagtatgttgttatgggat

SEQ ID NO: 314643 - DNA, 33 bp, Homo sapien
acatcaactatcggagcaaaaagtctgacagca

SEQ ID NO: 314644 - DNA, 33 bp, Homo sapien
acatcaactatcggagtaaaaagtctgacagca

SEQ ID NO: 314645 - DNA, 33 bp, Homo sapien
ttttagggttggataaatcagaattggcttctg

SEQ ID NO: 314646 - DNA, 33 bp, Homo sapien
ttttagggttggataattcagaattggcttctg

SEQ ID NO: 314647 - DNA, 33 bp, Homo sapien
cttagaattttctgcaataaagatcgttcttca

SEQ ID NO: 314648 - DNA, 33 bp, Homo sapien
cttagaattttctgcagtaaagatcgttcttca

SEQ ID NO: 314649 - DNA, 33 bp, Homo sapien
cctcatccaacctagaaaggagagagaaccctg

SEQ ID NO: 314650 - DNA, 33 bp, Homo sapien
cctcatccaacctagagaggagagagaaccctg

SEQ ID NO: 314651 - DNA, 33 bp, Homo sapien
gatctcagaattaaccactcatggggacagaga

SEQ ID NO: 314652 - DNA, 33 bp, Homo sapien
gatctcagaattaaccgctcatggggacagaga

SEQ ID NO: 314653 - DNA, 33 bp, Homo sapien
gtgcctcacttctatagcttaaacaaatcagac

SEQ ID NO: 314654 - DNA, 33 bp, Homo sapien
gtgcctcacttctatatcttaaacaaatcagac

SEQ ID NO: 314655 - DNA, 33 bp, Homo sapien
ataatttacatccttgaaacaattattctgtac

SEQ ID NO: 314656 - DNA, 33 bp, Homo sapien
ataatttacatccttgcaacaattattctgtac

SEQ ID NO: 314657 - DNA, 33 bp, Homo sapien
catctcagttcccgaacgggagcattgttggaa

SEQ ID NO: 314658 - DNA, 33 bp, Homo sapien
catctcagttcccgaatgggagcattgttggaa

SEQ ID NO: 314659 - DNA, 33 bp, Homo sapien
gacatctccagcataaacttacataaaacttcc

SEQ ID NO: 314660 - DNA, 33 bp, Homo sapien
gacatctccagcataaccttacataaaacttcc

SEQ ID NO: 314661 - DNA, 33 bp, Homo sapien
aatagcataaaggaataaaggcttgaggctttc

SEQ ID NO: 314662 - DNA, 33 bp, Homo sapien
aatagcataaaggaattaaggcttgaggctttc

SEQ ID NO: 314663 - DNA, 33 bp, Homo sapien
gcttttgtcctcatgggcatccctctatctggt

SEQ ID NO: 314664 - DNA, 33 bp, Homo sapien
gcttttgtcctcatggtcatccctctatctggt

SEQ ID NO: 314665 - DNA, 33 bp, Homo sapien
tggcaaagagttaccacgagatcattatcttcc

SEQ ID NO: 314666 - DNA, 33 bp, Homo sapien
tggcaaagagttaccatgagatcattatcttcc

SEQ ID NO: 314667 - DNA, 33 bp, Homo sapien
tttcatctttcaagaactattagtacaaagaca

SEQ ID NO: 314668 - DNA, 33 bp, Homo sapien
tttcatctttcaagaagtattagtacaaagaca

SEQ ID NO: 314669 - DNA, 33 bp, Homo sapien
tgcctctgttgagctaccctgtctcaccatgca

SEQ ID NO: 314670 - DNA, 33 bp, Homo sapien
tgcctctgttgagctatcctgtctcaccatgca

SEQ ID NO: 314671 - DNA, 33 bp, Homo sapien
ggtcacaaggccctggcaggaagctgtgtgatt

SEQ ID NO: 314672 - DNA, 33 bp, Homo sapien
ggtcacaaggccctggtaggaagctgtgtgatt

SEQ ID NO: 314673 - DNA, 33 bp, Homo sapien
atacatctcttgtaaccataacgtgagtgcaac

SEQ ID NO: 314674 - DNA, 33 bp, Homo sapien
atacatctcttgtaactataacgtgagtgcaac

SEQ ID NO: 314675 - DNA, 33 bp, Homo sapien
gtcaaacgtttttaaccgaccttcatctcagac

SEQ ID NO: 314676 - DNA, 33 bp, Homo sapien
gtcaaacgtttttaactgaccttcatctcagac

SEQ ID NO: 314677 - DNA, 33 bp, Homo sapien
tggctactaggaacaacgttttctcattattaa

SEQ ID NO: 314678 - DNA, 33 bp, Homo sapien
tggctactaggaacaatgttttctcattattaa

SEQ ID NO: 314679 - DNA, 33 bp, Homo sapien
ccaaaatggcgctcctaaaagtaaaagccacta

SEQ ID NO: 314680 - DNA, 33 bp, Homo sapien
ccaaaatggcgctcctgaaagtaaaagccacta

SEQ ID NO: 314681 - DNA, 33 bp, Homo sapien
gctttgagaagaaaaaagattcacccaatgagc

SEQ ID NO: 314682 - DNA, 33 bp, Homo sapien
gctttgagaagaaaaaggattcacccaatgagc

SEQ ID NO: 314683 - DNA, 33 bp, Homo sapien
ttgagtaaatgagtaccaactaagtgagatttc

SEQ ID NO: 314684 - DNA, 33 bp, Homo sapien
ttgagtaaatgagtactaactaagtgagatttc

SEQ ID NO: 314685 - DNA, 33 bp, Homo sapien
ctatccagagtatgctactttccgaggcaatgg

SEQ ID NO: 314686 - DNA, 33 bp, Homo sapien
ctatccagagtatgcttctttccgaggcaatgg

SEQ ID NO: 314687 - DNA, 33 bp, Homo sapien
atcatattctaggccactaaaaaaatgccattc

SEQ ID NO: 314688 - DNA, 33 bp, Homo sapien
atcatattctaggccagtaaaaaaatgccattc

SEQ ID NO: 314689 - DNA, 33 bp, Homo sapien
ctccctcccaaacctgaagtcctgatgatggta

SEQ ID NO: 314690 - DNA, 33 bp, Homo sapien
ctccctcccaaacctgtagtcctgatgatggta

SEQ ID NO: 314691 - DNA, 33 bp, Homo sapien
catcctgctcttcataacacatctctcaattca

SEQ ID NO: 314692 - DNA, 33 bp, Homo sapien
catcctgctcttcatagcacatctctcaattca

SEQ ID NO: 314693 - DNA, 33 bp, Homo sapien
ctctagcttgtgccacagtacatgaaaagtaca

SEQ ID NO: 314694 - DNA, 33 bp, Homo sapien
ctctagcttgtgccacggtacatgaaaagtaca

SEQ ID NO: 314695 - DNA, 33 bp, Homo sapien
atgtgaccttatttagacaggattttacagagg

SEQ ID NO: 314696 - DNA, 33 bp, Homo sapien
atgtgaccttatttaggcaggattttacagagg

SEQ ID NO: 314697 - DNA, 33 bp, Homo sapien
gggaagctgccctggaaagttatccagattgct

SEQ ID NO: 314698 - DNA, 33 bp, Homo sapien
gggaagctgccctggagagttatccagattgct

SEQ ID NO: 314699 - DNA, 33 bp, Homo sapien
gtaatcagcaaattcccagatcatttaccatta

SEQ ID NO: 314700 - DNA, 33 bp, Homo sapien
gtaatcagcaaattcctagatcatttaccatta

SEQ ID NO: 314701 - DNA, 33 bp, Homo sapien
cttatttcattgagtcaatcttcaatgtctgat

SEQ ID NO: 314702 - DNA, 33 bp, Homo sapien
cttatttcattgagtcgatcttcaatgtctgat

SEQ ID NO: 314703 - DNA, 33 bp, Homo sapien
tctctactgaaactgagtaatgagattagacat

SEQ ID NO: 314704 - DNA, 33 bp, Homo sapien
tctctactgaaactgattaatgagattagacat

SEQ ID NO: 314705 - DNA, 33 bp, Homo sapien
cctgcaacatcaacacaaggtagtttttggagg

SEQ ID NO: 314706 - DNA, 33 bp, Homo sapien
cctgcaacatcaacacgaggtagtttttggagg

SEQ ID NO: 314707 - DNA, 33 bp, Homo sapien
gggccttagtagaaacagaatgcttgactatga

SEQ ID NO: 314708 - DNA, 33 bp, Homo sapien
gggccttagtagaaacggaatgcttgactatga

SEQ ID NO: 314709 - DNA, 33 bp, Homo sapien
taggaaaatagtacacaccctttctgcttccta

SEQ ID NO: 314710 - DNA, 33 bp, Homo sapien
taggaaaatagtacacgccctttctgcttccta

SEQ ID NO: 314711 - DNA, 33 bp, Homo sapien
gaaaagaggggacaacaagaactacatcaacta

SEQ ID NO: 314712 - DNA, 33 bp, Homo sapien
gaaaagaggggacaacgagaactacatcaacta

SEQ ID NO: 314713 - DNA, 33 bp, Homo sapien
cagattgtttgagttacagataattgataggaa

SEQ ID NO: 314714 - DNA, 33 bp, Homo sapien
cagattgtttgagttatagataattgataggaa

SEQ ID NO: 314715 - DNA, 33 bp, Homo sapien
ttctcacggacttccacgaccatttgtgggtat

SEQ ID NO: 314716 - DNA, 33 bp, Homo sapien
ttctcacggacttccatgaccatttgtgggtat

SEQ ID NO: 314717 - DNA, 33 bp, Homo sapien
cacatagaattggaacacaaatgtgccttgctc

SEQ ID NO: 314718 - DNA, 33 bp, Homo sapien
cacatagaattggaacccaaatgtgccttgctc

SEQ ID NO: 314719 - DNA, 33 bp, Homo sapien
atgccttgactgtagcaaagagtcaaatattca

SEQ ID NO: 314720 - DNA, 33 bp, Homo sapien
atgccttgactgtagcgaagagtcaaatattca

SEQ ID NO: 314721 - DNA, 33 bp, Homo sapien
ggctgcagagaagaaacatggtgctttacatgg

SEQ ID NO: 314722 - DNA, 33 bp, Homo sapien
ggctgcagagaagaaagatggtgctttacatgg

SEQ ID NO: 314723 - DNA, 33 bp, Homo sapien
agatagctaataacagaaagaaacaagaattag

SEQ ID NO: 314724 - DNA, 33 bp, Homo sapien
agatagctaataacagtaagaaacaagaattag

SEQ ID NO: 314725 - DNA, 33 bp, Homo sapien
cttgttgacgggagaagggaagtcttgaggcac

SEQ ID NO: 314726 - DNA, 33 bp, Homo sapien
cttgttgacgggagaatggaagtcttgaggcac

SEQ ID NO: 314727 - DNA, 33 bp, Homo sapien
gaattacaaagtagtgcagctgtacatcaaggc

SEQ ID NO: 314728 - DNA, 33 bp, Homo sapien
gaattacaaagtagtgtagctgtacatcaaggc

SEQ ID NO: 314729 - DNA, 33 bp, Homo sapien
ccctttctgtgtacaaagtggagtttcaataag

SEQ ID NO: 314730 - DNA, 33 bp, Homo sapien
ccctttctgtgtacaatgtggagtttcaataag

SEQ ID NO: 314731 - DNA, 33 bp, Homo sapien
agaaagtgggtatgaacagtaaatatctgctat

SEQ ID NO: 314732 - DNA, 33 bp, Homo sapien
agaaagtgggtatgaatagtaaatatctgctat

SEQ ID NO: 314733 - DNA, 33 bp, Homo sapien
atgtggagagaagcagaaaaaaggggctcatga

SEQ ID NO: 314734 - DNA, 33 bp, Homo sapien
atgtggagagaagcaggaaaaaggggctcatga

SEQ ID NO: 314735 - DNA, 33 bp, Homo sapien
caggatcgtcacacttaaagatttcttgtaccc

SEQ ID NO: 314736 - DNA, 33 bp, Homo sapien
caggatcgtcacacttgaagatttcttgtaccc

SEQ ID NO: 314737 - DNA, 33 bp, Homo sapien
gcacttcagagttgaaatataccaggaagaggc

SEQ ID NO: 314738 - DNA, 33 bp, Homo sapien
gcacttcagagttgaagtataccaggaagaggc

SEQ ID NO: 314739 - DNA, 33 bp, Homo sapien
ttaagggataatgagaacaccactcaatacctc

SEQ ID NO: 314740 - DNA, 33 bp, Homo sapien
ttaagggataatgagaccaccactcaatacctc

SEQ ID NO: 314741 - DNA, 33 bp, Homo sapien
acttggaatccaaaagcaaagtgcattagtcaa

SEQ ID NO: 314742 - DNA, 33 bp, Homo sapien
acttggaatccaaaagtaaagtgcattagtcaa

SEQ ID NO: 314743 - DNA, 33 bp, Homo sapien
actgagcatgatggaagtactttttaacttctg

SEQ ID NO: 314744 - DNA, 33 bp, Homo sapien
actgagcatgatggaattactttttaacttctg

SEQ ID NO: 314745 - DNA, 33 bp, Homo sapien
gacagacatctgacaaaggttgtgaattttgtc

SEQ ID NO: 314746 - DNA, 33 bp, Homo sapien
gacagacatctgacaatggttgtgaattttgtc

SEQ ID NO: 314747 - DNA, 33 bp, Homo sapien
cccttttaagaaatcaaatagcttctggggcaa

SEQ ID NO: 314748 - DNA, 33 bp, Homo sapien
cccttttaagaaatcatatagcttctggggcaa

SEQ ID NO: 314749 - DNA, 33 bp, Homo sapien
tctttcctctccatcacagtagacaatatctgt

SEQ ID NO: 314750 - DNA, 33 bp, Homo sapien
tctttcctctccatcatagtagacaatatctgt

SEQ ID NO: 314751 - DNA, 33 bp, Homo sapien
gccctgtgctaagtgaaggatacaatagtgatt

SEQ ID NO: 314752 - DNA, 33 bp, Homo sapien
gccctgtgctaagtgagggatacaatagtgatt

SEQ ID NO: 314753 - DNA, 33 bp, Homo sapien
aacagcagattaatggacaaagaaattatggta

SEQ ID NO: 314754 - DNA, 33 bp, Homo sapien
aacagcagattaatgggcaaagaaattatggta

SEQ ID NO: 314755 - DNA, 33 bp, Homo sapien
cagaaaggtaaaatgcaaaattaagcctcatca

SEQ ID NO: 314756 - DNA, 33 bp, Homo sapien
cagaaaggtaaaatgcgaaattaagcctcatca

SEQ ID NO: 314757 - DNA, 33 bp, Homo sapien
cttaatctctctctgcgacaatttcttcagctg

SEQ ID NO: 314758 - DNA, 33 bp, Homo sapien
cttaatctctctctgctacaatttcttcagctg

SEQ ID NO: 314759 - DNA, 33 bp, Homo sapien
cttaagctaattttgagctcagtaactctcatt

SEQ ID NO: 314760 - DNA, 33 bp, Homo sapien
cttaagctaattttgatctcagtaactctcatt

SEQ ID NO: 314761 - DNA, 33 bp, Homo sapien
gtatatctcttggaaacgtcatatagtcaggtc

SEQ ID NO: 314762 - DNA, 33 bp, Homo sapien
gtatatctcttggaaatgtcatatagtcaggtc

SEQ ID NO: 314763 - DNA, 33 bp, Homo sapien
tccaaaaatctaagaaccaccagggtagataag

SEQ ID NO: 314764 - DNA, 33 bp, Homo sapien
tccaaaaatctaagaatcaccagggtagataag

SEQ ID NO: 314765 - DNA, 33 bp, Homo sapien
aaacaggcacatagacaaatagaatagaagaga

SEQ ID NO: 314766 - DNA, 33 bp, Homo sapien
aaacaggcacatagaccaatagaatagaagaga

SEQ ID NO: 314767 - DNA, 33 bp, Homo sapien
gcctacccacactgacagcagaccttgcccact

SEQ ID NO: 314768 - DNA, 33 bp, Homo sapien
gcctacccacactgacggcagaccttgcccact

SEQ ID NO: 314769 - DNA, 33 bp, Homo sapien
ggaaacaccaagagttcaaaggcaacatagaca

SEQ ID NO: 314770 - DNA, 33 bp, Homo sapien
ggaaacaccaagagttgaaaggcaacatagaca

SEQ ID NO: 314771 - DNA, 33 bp, Homo sapien
cttgcttttgcttttacagtagttccataacaa

SEQ ID NO: 314772 - DNA, 33 bp, Homo sapien
cttgcttttgcttttatagtagttccataacaa

SEQ ID NO: 314773 - DNA, 33 bp, Homo sapien
aacagaggaagaataacctttactacagataca

SEQ ID NO: 314774 - DNA, 33 bp, Homo sapien
aacagaggaagaataagctttactacagataca

SEQ ID NO: 314775 - DNA, 33 bp, Homo sapien
aacccagagattgagggataactgttctgattc

SEQ ID NO: 314776 - DNA, 33 bp, Homo sapien
aacccagagattgaggtataactgttctgattc

SEQ ID NO: 314777 - DNA, 33 bp, Homo sapien
aaactttacaatgaaaatatgtttggtaataca

SEQ ID NO: 314778 - DNA, 33 bp, Homo sapien
aaactttacaatgaaagtatgtttggtaataca

SEQ ID NO: 314779 - DNA, 33 bp, Homo sapien
ctgaaagttgatagaaaggtactactgacactg

SEQ ID NO: 314780 - DNA, 33 bp, Homo sapien
ctgaaagttgatagaagggtactactgacactg

SEQ ID NO: 314781 - DNA, 33 bp, Homo sapien
cttttgagttagaaaaagaaagatggagaaaag

SEQ ID NO: 314782 - DNA, 33 bp, Homo sapien
cttttgagttagaaaaggaaagatggagaaaag

SEQ ID NO: 314783 - DNA, 33 bp, Homo sapien
tgtatacaattttaataaccatcagactagtct

SEQ ID NO: 314784 - DNA, 33 bp, Homo sapien
tgtatacaattttaattaccatcagactagtct

SEQ ID NO: 314785 - DNA, 33 bp, Homo sapien
agcaaaaattaccaacaacatactagcaaacag

SEQ ID NO: 314786 - DNA, 33 bp, Homo sapien
agcaaaaattaccaaccacatactagcaaacag

SEQ ID NO: 314787 - DNA, 33 bp, Homo sapien
taatgaccagagcatacgacaatgaagtgtgtc

SEQ ID NO: 314788 - DNA, 33 bp, Homo sapien
taatgaccagagcatatgacaatgaagtgtgtc

SEQ ID NO: 314789 - DNA, 33 bp, Homo sapien
ataaaactgccagacaataatataggagaaagc

SEQ ID NO: 314790 - DNA, 33 bp, Homo sapien
ataaaactgccagacagtaatataggagaaagc

SEQ ID NO: 314791 - DNA, 33 bp, Homo sapien
ccttagttatgtagtacgttgtgtgacttcaca

SEQ ID NO: 314792 - DNA, 33 bp, Homo sapien
ccttagttatgtagtatgttgtgtgacttcaca

SEQ ID NO: 314793 - DNA, 33 bp, Homo sapien
tttgtgaacttctgtaagcatcctttctgagaa

SEQ ID NO: 314794 - DNA, 33 bp, Homo sapien
tttgtgaacttctgtacgcatcctttctgagaa

SEQ ID NO: 314795 - DNA, 33 bp, Homo sapien
attgaaaaatatgacccattcgaaagcactttg

SEQ ID NO: 314796 - DNA, 33 bp, Homo sapien
attgaaaaatatgacctattcgaaagcactttg

SEQ ID NO: 314797 - DNA, 33 bp, Homo sapien
cagtatgttcatttaacaattgagaaaactaag

SEQ ID NO: 314798 - DNA, 33 bp, Homo sapien
cagtatgttcatttaagaattgagaaaactaag

SEQ ID NO: 314799 - DNA, 33 bp, Homo sapien
ttttagaagtatgccaaagtgtgaatattttat

SEQ ID NO: 314800 - DNA, 33 bp, Homo sapien
ttttagaagtatgccacagtgtgaatattttat

SEQ ID NO: 314801 - DNA, 33 bp, Homo sapien
actctaagaaaggtccacatataccttactaga

SEQ ID NO: 314802 - DNA, 33 bp, Homo sapien
actctaagaaaggtccgcatataccttactaga

SEQ ID NO: 314803 - DNA, 33 bp, Homo sapien
atgcttctacttttgccattatgctactgctga

SEQ ID NO: 314804 - DNA, 33 bp, Homo sapien
atgcttctacttttgctattatgctactgctga

SEQ ID NO: 314805 - DNA, 33 bp, Homo sapien
tagcagtacctcactcaccactttaccagttta

SEQ ID NO: 314806 - DNA, 33 bp, Homo sapien
tagcagtacctcactctccactttaccagttta

SEQ ID NO: 314807 - DNA, 33 bp, Homo sapien
ggcaaggagaaaggacagtaaggtggaagttta

SEQ ID NO: 314808 - DNA, 33 bp, Homo sapien
ggcaaggagaaaggacggtaaggtggaagttta

SEQ ID NO: 314809 - DNA, 33 bp, Homo sapien
aggccttagctaagaacagatctacaagctggt

SEQ ID NO: 314810 - DNA, 33 bp, Homo sapien
aggccttagctaagaatagatctacaagctggt

SEQ ID NO: 314811 - DNA, 33 bp, Homo sapien
tgtggatatggaggaacgacagcaatatcatca

SEQ ID NO: 314812 - DNA, 33 bp, Homo sapien
tgtggatatggaggaatgacagcaatatcatca

SEQ ID NO: 314813 - DNA, 33 bp, Homo sapien
caactgaaggaactagcaaatgaatgagttgag

SEQ ID NO: 314814 - DNA, 33 bp, Homo sapien
caactgaaggaactaggaaatgaatgagttgag

SEQ ID NO: 314815 - DNA, 33 bp, Homo sapien
attccttgaaaatcacaaacttctaaaactaac

SEQ ID NO: 314816 - DNA, 33 bp, Homo sapien
attccttgaaaatcacgaacttctaaaactaac

SEQ ID NO: 314817 - DNA, 33 bp, Homo sapien
attgctggttcctctaaacatgacctggttccc

SEQ ID NO: 314818 - DNA, 33 bp, Homo sapien
attgctggttcctctagacatgacctggttccc

SEQ ID NO: 314819 - DNA, 33 bp, Homo sapien
acttcatgttgctgaaagagacactgaaaggga

SEQ ID NO: 314820 - DNA, 33 bp, Homo sapien
acttcatgttgctgaaggagacactgaaaggga

SEQ ID NO: 314821 - DNA, 33 bp, Homo sapien
aaaaactaaaaaacacagtcagacaataggcaa

SEQ ID NO: 314822 - DNA, 33 bp, Homo sapien
aaaaactaaaaaacacggtcagacaataggcaa

SEQ ID NO: 314823 - DNA, 33 bp, Homo sapien
gaaaatgttctaaaatggattaccaggatgatt

SEQ ID NO: 314824 - DNA, 33 bp, Homo sapien
gaaaatgttctaaaattgattaccaggatgatt

SEQ ID NO: 314825 - DNA, 33 bp, Homo sapien
ctttacctctgtaacaactaccagttcttcagg

SEQ ID NO: 314826 - DNA, 33 bp, Homo sapien
ctttacctctgtaacacctaccagttcttcagg

SEQ ID NO: 314827 - DNA, 33 bp, Homo sapien
agaacctaaaaatcagaatataaggccagctat

SEQ ID NO: 314828 - DNA, 33 bp, Homo sapien
agaacctaaaaatcagcatataaggccagctat

SEQ ID NO: 314829 - DNA, 33 bp, Homo sapien
ccagttattttggctacgagcattgtgaggttt

SEQ ID NO: 314830 - DNA, 33 bp, Homo sapien
ccagttattttggctatgagcattgtgaggttt

SEQ ID NO: 314831 - DNA, 33 bp, Homo sapien
agctctaaatcatgccaatatctaacaaatttt

SEQ ID NO: 314832 - DNA, 33 bp, Homo sapien
agctctaaatcatgcctatatctaacaaatttt

SEQ ID NO: 314833 - DNA, 33 bp, Homo sapien
taaaaacctctaatcaaaggtgaacttccatac

SEQ ID NO: 314834 - DNA, 33 bp, Homo sapien
taaaaacctctaatcataggtgaacttccatac

SEQ ID NO: 314835 - DNA, 33 bp, Homo sapien
aaccaatgggaaaagcacaactgaagcagaatt

SEQ ID NO: 314836 - DNA, 33 bp, Homo sapien
aaccaatgggaaaagcgcaactgaagcagaatt

SEQ ID NO: 314837 - DNA, 33 bp, Homo sapien
ctacaaatcatgctagaaatcagtgacaaataa

SEQ ID NO: 314838 - DNA, 33 bp, Homo sapien
ctacaaatcatgctaggaatcagtgacaaataa

SEQ ID NO: 314839 - DNA, 33 bp, Homo sapien
taacgttaggccaaaaactgttttattttgctt

SEQ ID NO: 314840 - DNA, 33 bp, Homo sapien
taacgttaggccaaaatctgttttattttgctt

SEQ ID NO: 314841 - DNA, 33 bp, Homo sapien
cctattcatgctataaaccctaaattactgagt

SEQ ID NO: 314842 - DNA, 33 bp, Homo sapien
cctattcatgctataagccctaaattactgagt

SEQ ID NO: 314843 - DNA, 33 bp, Homo sapien
atcaggaagaagatggaatgatgtcattaagct

SEQ ID NO: 314844 - DNA, 33 bp, Homo sapien
atcaggaagaagatgggatgatgtcattaagct

SEQ ID NO: 314845 - DNA, 33 bp, Homo sapien
ctgacagtaaaatataccctgccatgaagaatg

SEQ ID NO: 314846 - DNA, 33 bp, Homo sapien
ctgacagtaaaatatatcctgccatgaagaatg

SEQ ID NO: 314847 - DNA, 33 bp, Homo sapien
gcattttatgaaccagaaacagttagggacttg

SEQ ID NO: 314848 - DNA, 33 bp, Homo sapien
gcattttatgaaccaggaacagttagggacttg

SEQ ID NO: 314849 - DNA, 33 bp, Homo sapien
tttgattgttgtacttcaaagtgatagggagaa

SEQ ID NO: 314850 - DNA, 33 bp, Homo sapien
tttgattgttgtacttgaaagtgatagggagaa

SEQ ID NO: 314851 - DNA, 33 bp, Homo sapien
aaatttatagaaacagaaagtagactagtggtt

SEQ ID NO: 314852 - DNA, 33 bp, Homo sapien
aaatttatagaaacaggaagtagactagtggtt

SEQ ID NO: 314853 - DNA, 33 bp, Homo sapien
tgaacctgaagctatacagtccctagcagtggg

SEQ ID NO: 314854 - DNA, 33 bp, Homo sapien
tgaacctgaagctatatagtccctagcagtggg

SEQ ID NO: 314855 - DNA, 33 bp, Homo sapien
gaatctcaaagttgtaaatgttatcttgtccat

SEQ ID NO: 314856 - DNA, 33 bp, Homo sapien
gaatctcaaagttgtatatgttatcttgtccat

SEQ ID NO: 314857 - DNA, 33 bp, Homo sapien
ttttttcctattttgtaaaacctcagagacatc

SEQ ID NO: 314858 - DNA, 33 bp, Homo sapien
ttttttcctattttgtgaaacctcagagacatc

SEQ ID NO: 314859 - DNA, 33 bp, Homo sapien
gcaaagacttgagatccaatggtactataagaa

SEQ ID NO: 314860 - DNA, 33 bp, Homo sapien
gcaaagacttgagatctaatggtactataagaa

SEQ ID NO: 314861 - DNA, 33 bp, Homo sapien
agcaggttcagttcacaatgattttcaaattca

SEQ ID NO: 314862 - DNA, 33 bp, Homo sapien
agcaggttcagttcacgatgattttcaaattca

SEQ ID NO: 314863 - DNA, 33 bp, Homo sapien
taataataggctaaacggaccattgccttttga

SEQ ID NO: 314864 - DNA, 33 bp, Homo sapien
taataataggctaaactgaccattgccttttga

SEQ ID NO: 314865 - DNA, 33 bp, Homo sapien
gtttctgttactccaccgatacactctgctgct

SEQ ID NO: 314866 - DNA, 33 bp, Homo sapien
gtttctgttactccacggatacactctgctgct

SEQ ID NO: 314867 - DNA, 33 bp, Homo sapien
agatgtgaacacacttgaagtgaaaacaaggaa

SEQ ID NO: 314868 - DNA, 33 bp, Homo sapien
agatgtgaacacactttaagtgaaaacaaggaa

SEQ ID NO: 314869 - DNA, 33 bp, Homo sapien
atacaatgatgaatgaaagtctcagatatctaa

SEQ ID NO: 314870 - DNA, 33 bp, Homo sapien
atacaatgatgaatgagagtctcagatatctaa

SEQ ID NO: 314871 - DNA, 33 bp, Homo sapien
tgccttttgctaggcccattcaatgtcctattc

SEQ ID NO: 314872 - DNA, 33 bp, Homo sapien
tgccttttgctaggcctattcaatgtcctattc

SEQ ID NO: 314873 - DNA, 33 bp, Homo sapien
ctcttcctttttgaacaaagttgaggttagctg

SEQ ID NO: 314874 - DNA, 33 bp, Homo sapien
ctcttcctttttgaacgaagttgaggttagctg

SEQ ID NO: 314875 - DNA, 33 bp, Homo sapien
taactaacttggaaacagcacaggatgaaaggt

SEQ ID NO: 314876 - DNA, 33 bp, Homo sapien
taactaacttggaaacggcacaggatgaaaggt

SEQ ID NO: 314877 - DNA, 33 bp, Homo sapien
tgaaggaaggcagagacgagctacactgtagtt

SEQ ID NO: 314878 - DNA, 33 bp, Homo sapien
tgaaggaaggcagagaggagctacactgtagtt

SEQ ID NO: 314879 - DNA, 33 bp, Homo sapien
ctctttctgtgcatgacgcggagaacatgagcc

SEQ ID NO: 314880 - DNA, 33 bp, Homo sapien
ctctttctgtgcatgatgcggagaacatgagcc

SEQ ID NO: 314881 - DNA, 33 bp, Homo sapien
acattttttgtcagaggagccattttaaagaag

SEQ ID NO: 314882 - DNA, 33 bp, Homo sapien
acattttttgtcagagtagccattttaaagaag

SEQ ID NO: 314883 - DNA, 33 bp, Homo sapien
atcaggagcacagaaaataagcttctttatcca

SEQ ID NO: 314884 - DNA, 33 bp, Homo sapien
atcaggagcacagaaagtaagcttctttatcca

SEQ ID NO: 314885 - DNA, 33 bp, Homo sapien
tcaggaagccagaagcagcttaactgggtggct

SEQ ID NO: 314886 - DNA, 33 bp, Homo sapien
tcaggaagccagaagccgcttaactgggtggct

SEQ ID NO: 314887 - DNA, 33 bp, Homo sapien
gcaccttgaaatattcaccaacccagaatctct

SEQ ID NO: 314888 - DNA, 33 bp, Homo sapien
gcaccttgaaatattcgccaacccagaatctct

SEQ ID NO: 314889 - DNA, 33 bp, Homo sapien
aactgccagactctacaattttacattctcatc

SEQ ID NO: 314890 - DNA, 33 bp, Homo sapien
aactgccagactctaccattttacattctcatc

SEQ ID NO: 314891 - DNA, 33 bp, Homo sapien
gtcctagttgaggaccccatttctaataggtgc

SEQ ID NO: 314892 - DNA, 33 bp, Homo sapien
gtcctagttgaggaccgcatttctaataggtgc

SEQ ID NO: 314893 - DNA, 33 bp, Homo sapien
tgtgtgtgtgtaaatacatgacaaaaacttgtc

SEQ ID NO: 314894 - DNA, 33 bp, Homo sapien
tgtgtgtgtgtaaatatatgacaaaaacttgtc

SEQ ID NO: 314895 - DNA, 33 bp, Homo sapien
ccccatttcatcattacgacttcaaatgtgaac

SEQ ID NO: 314896 - DNA, 33 bp, Homo sapien
ccccatttcatcattaggacttcaaatgtgaac

SEQ ID NO: 314897 - DNA, 33 bp, Homo sapien
aatctccattttgataaagcgtgtcagtttgag

SEQ ID NO: 314898 - DNA, 33 bp, Homo sapien
aatctccattttgatagagcgtgtcagtttgag

SEQ ID NO: 314899 - DNA, 33 bp, Homo sapien
ctgcaggtaagtagcaaaagacctggagaactc

SEQ ID NO: 314900 - DNA, 33 bp, Homo sapien
ctgcaggtaagtagcagaagacctggagaactc

SEQ ID NO: 314901 - DNA, 33 bp, Homo sapien
ttctttgtatatgggactaccggtgtgccctac

SEQ ID NO: 314902 - DNA, 33 bp, Homo sapien
ttctttgtatatgggattaccggtgtgccctac

SEQ ID NO: 314903 - DNA, 33 bp, Homo sapien
ggtgtaagtgcaaagcgaagatttgaattctaa

SEQ ID NO: 314904 - DNA, 33 bp, Homo sapien
ggtgtaagtgcaaagctaagatttgaattctaa

SEQ ID NO: 314905 - DNA, 33 bp, Homo sapien
ccaatatgctacccggaaaaacattcactggct

SEQ ID NO: 314906 - DNA, 33 bp, Homo sapien
ccaatatgctacccgggaaaacattcactggct

SEQ ID NO: 314907 - DNA, 33 bp, Homo sapien
aactccacacaaccagaaagactgagccccagt

SEQ ID NO: 314908 - DNA, 33 bp, Homo sapien
aactccacacaaccaggaagactgagccccagt

SEQ ID NO: 314909 - DNA, 33 bp, Homo sapien
gtatgagtaaagaaaaaatatgcgtagaagaaa

SEQ ID NO: 314910 - DNA, 33 bp, Homo sapien
gtatgagtaaagaaaacatatgcgtagaagaaa

SEQ ID NO: 314911 - DNA, 33 bp, Homo sapien
ataggccggtttctcgaagcatgtggaggtggc

SEQ ID NO: 314912 - DNA, 33 bp, Homo sapien
ataggccggtttctcgcagcatgtggaggtggc

SEQ ID NO: 314913 - DNA, 33 bp, Homo sapien
cctccttttcctacaaatgatgcgctactctgg

SEQ ID NO: 314914 - DNA, 33 bp, Homo sapien
cctccttttcctacaagtgatgcgctactctgg

SEQ ID NO: 314915 - DNA, 33 bp, Homo sapien
tgcacagtaggaccacgcaatgttcacagctca

SEQ ID NO: 314916 - DNA, 33 bp, Homo sapien
tgcacagtaggaccactcaatgttcacagctca

SEQ ID NO: 314917 - DNA, 33 bp, Homo sapien
aggttcagggattttcaagggtcctggttccca

SEQ ID NO: 314918 - DNA, 33 bp, Homo sapien
aggttcagggattttccagggtcctggttccca

SEQ ID NO: 314919 - DNA, 33 bp, Homo sapien
acagtcagtgtgtgccccttaaaacacaagtgg

SEQ ID NO: 314920 - DNA, 33 bp, Homo sapien
acagtcagtgtgtgccgcttaaaacacaagtgg

SEQ ID NO: 314921 - DNA, 33 bp, Homo sapien
gtgtcaatggcatcacagggataagatctggag

SEQ ID NO: 314922 - DNA, 33 bp, Homo sapien
gtgtcaatggcatcacggggataagatctggag

SEQ ID NO: 314923 - DNA, 33 bp, Homo sapien
ctttgtgtttacatacaatcctataggtgcccc

SEQ ID NO: 314924 - DNA, 33 bp, Homo sapien
ctttgtgtttacatacgatcctataggtgcccc

SEQ ID NO: 314925 - DNA, 33 bp, Homo sapien
ccccaacaacctggcaagagagtccctattctc

SEQ ID NO: 314926 - DNA, 33 bp, Homo sapien
ccccaacaacctggcaggagagtccctattctc

SEQ ID NO: 314927 - DNA, 33 bp, Homo sapien
ggtctggaatatacaaactctcccagctctcat

SEQ ID NO: 314928 - DNA, 33 bp, Homo sapien
ggtctggaatatacaagctctcccagctctcat

SEQ ID NO: 314929 - DNA, 33 bp, Homo sapien
gtaaggattcttccagaaagagacactttcaca

SEQ ID NO: 314930 - DNA, 33 bp, Homo sapien
gtaaggattcttccaggaagagacactttcaca

SEQ ID NO: 314931 - DNA, 33 bp, Homo sapien
ctcctgcacttgggaaagtataggacccagaga

SEQ ID NO: 314932 - DNA, 33 bp, Homo sapien
ctcctgcacttgggaacgtataggacccagaga

SEQ ID NO: 314933 - DNA, 33 bp, Homo sapien; identical to SEQ ID NO: 314931

SEQ ID NO: 314934 - DNA, 33 bp, Homo sapien; identical to SEQ ID NO: 314932

SEQ ID NO: 314935 - DNA, 33 bp, Homo sapien
ctgtctcactgcaaaaaaatgggagtaaaattt

SEQ ID NO: 314936 - DNA, 33 bp, Homo sapien
ctgtctcactgcaaaagaatgggagtaaaattt

SEQ ID NO: 314937 - DNA, 33 bp, Homo sapien
cacccgactccctatacccttaggctccttcca

SEQ ID NO: 314938 - DNA, 33 bp, Homo sapien
cacccgactccctatatccttaggctccttcca

SEQ ID NO: 314939 - DNA, 33 bp, Homo sapien
ccttaggctccttccactagctccttgctcagc

SEQ ID NO: 314940 - DNA, 33 bp, Homo sapien
ccttaggctccttccattagctccttgctcagc

SEQ ID NO: 314941 - DNA, 33 bp, Homo sapien
atttgaatgttgttcaatgaaaccctgcttgtg

SEQ ID NO: 314942 - DNA, 33 bp, Homo sapien
atttgaatgttgttcagtgaaaccctgcttgtg

SEQ ID NO: 314943 - DNA, 33 bp, Homo sapien
agcgcaggccgagaacacaggtatcccagtcct

SEQ ID NO: 314944 - DNA, 33 bp, Homo sapien
agcgcaggccgagaacgcaggtatcccagtcct

SEQ ID NO: 314945 - DNA, 33 bp, Homo sapien
tacacccttatactcaacattcctatgtcatgg

SEQ ID NO: 314946 - DNA, 33 bp, Homo sapien
tacacccttatactcaccattcctatgtcatgg

SEQ ID NO: 314947 - DNA, 33 bp, Homo sapien
aaactggaagctaaggaacaaagtcagagctgg

SEQ ID NO: 314948 - DNA, 33 bp, Homo sapien
aaactggaagctaagggacaaagtcagagctgg

SEQ ID NO: 314949 - DNA, 33 bp, Homo sapien
acagccagatctgatacagttgccgataagacc

SEQ ID NO: 314950 - DNA, 33 bp, Homo sapien
acagccagatctgatatagttgccgataagacc

SEQ ID NO: 314951 - DNA, 33 bp, Homo sapien
taaatctgatacaaccaaaataaacacagtata

SEQ ID NO: 314952 - DNA, 33 bp, Homo sapien
taaatctgatacaaccgaaataaacacagtata

SEQ ID NO: 314953 - DNA, 33 bp, Homo sapien
accttaagatgggaaactgatactctcctaact

SEQ ID NO: 314954 - DNA, 33 bp, Homo sapien
accttaagatgggaaattgatactctcctaact

SEQ ID NO: 314955 - DNA, 33 bp, Homo sapien
tctatggaccttcccactctaacaggcaggcag

SEQ ID NO: 314956 - DNA, 33 bp, Homo sapien
tctatggaccttcccattctaacaggcaggcag

SEQ ID NO: 314957 - DNA, 33 bp, Homo sapien
aacaaaaagaagtgtggatttacaaatgctggt

SEQ ID NO: 314958 - DNA, 33 bp, Homo sapien
aacaaaaagaagtgtgtatttacaaatgctggt

SEQ ID NO: 314959 - DNA, 33 bp, Homo sapien
tgtgtcactattcttccctccctgtcctcatat

SEQ ID NO: 314960 - DNA, 33 bp, Homo sapien
tgtgtcactattcttctctccctgtcctcatat

SEQ ID NO: 314961 - DNA, 33 bp, Homo sapien
gatttggagtggggaaagtcctagtaacatttt

SEQ ID NO: 314962 - DNA, 33 bp, Homo sapien
gatttggagtggggaaggtcctagtaacatttt

SEQ ID NO: 314963 - DNA, 33 bp, Homo sapien
ttatttcaacattaacaattttgcctcccaaaa

SEQ ID NO: 314964 - DNA, 33 bp, Homo sapien
ttatttcaacattaacgattttgcctcccaaaa

SEQ ID NO: 314965 - DNA, 33 bp, Homo sapien
gtgggcagtgattccaaatctaacctcatgtct

SEQ ID NO: 314966 - DNA, 33 bp, Homo sapien
gtgggcagtgattccagatctaacctcatgtct

SEQ ID NO: 314967 - DNA, 33 bp, Homo sapien
cccaaactcattgaaactaacaactgagctgaa

SEQ ID NO: 314968 - DNA, 33 bp, Homo sapien
cccaaactcattgaaagtaacaactgagctgaa

SEQ ID NO: 314969 - DNA, 33 bp, Homo sapien
tgaaagttgactttccccaactctccctctctc

SEQ ID NO: 314970 - DNA, 33 bp, Homo sapien
tgaaagttgactttccgcaactctccctctctc

SEQ ID NO: 314971 - DNA, 33 bp, Homo sapien
tttaagaccaaagtccaagcagtttactaagct

SEQ ID NO: 314972 - DNA, 33 bp, Homo sapien
tttaagaccaaagtccgagcagtttactaagct

SEQ ID NO: 314973 - DNA, 33 bp, Homo sapien
tttttgtagcttaaaaacttctaactgaagcag

SEQ ID NO: 314974 - DNA, 33 bp, Homo sapien
tttttgtagcttaaaaccttctaactgaagcag

SEQ ID NO: 314975 - DNA, 33 bp, Homo sapien
cttgcttaaggggagtaaacagaaccatttatc

SEQ ID NO: 314976 - DNA, 33 bp, Homo sapien
cttgcttaaggggagtgaacagaaccatttatc

SEQ ID NO: 314977 - DNA, 33 bp, Homo sapien
gatgttgctccttccacctcatatggattatac

SEQ ID NO: 314978 - DNA, 33 bp, Homo sapien
gatgttgctccttccatctcatatggattatac

SEQ ID NO: 314979 - DNA, 33 bp, Homo sapien
cagctgcacataagacacataagctgccctaga

SEQ ID NO: 314980 - DNA, 33 bp, Homo sapien
cagctgcacataagactcataagctgccctaga

SEQ ID NO: 314981 - DNA, 33 bp, Homo sapien
ggtgccttccaaccataatgggcagattcatgt

SEQ ID NO: 314982 - DNA, 33 bp, Homo sapien
ggtgccttccaaccatcatgggcagattcatgt

SEQ ID NO: 314983 - DNA, 33 bp, Homo sapien
gcctggctctcagaccaggtaaggtggctctta

SEQ ID NO: 314984 - DNA, 33 bp, Homo sapien
gcctggctctcagaccgggtaaggtggctctta

SEQ ID NO: 314985 - DNA, 33 bp, Homo sapien
tcgggaggcacacagccctagacttttgggcta

SEQ ID NO: 314986 - DNA, 33 bp, Homo sapien
tcgggaggcacacagctctagacttttgggcta

SEQ ID NO: 314987 - DNA, 33 bp, Homo sapien
atgtagatataagttcacaaagatatatgtgca

SEQ ID NO: 314988 - DNA, 33 bp, Homo sapien
atgtagatataagttcccaaagatatatgtgca

SEQ ID NO: 314989 - DNA, 33 bp, Homo sapien
gactttcatcaggacacagagtggcagtcatgt

SEQ ID NO: 314990 - DNA, 33 bp, Homo sapien
gactttcatcaggacatagagtggcagtcatgt

SEQ ID NO: 314991 - DNA, 33 bp, Homo sapien
cctgtgcgggatgcgcacatagaggaagtagat

SEQ ID NO: 314992 - DNA, 33 bp, Homo sapien
cctgtgcgggatgcgcgcatagaggaagtagat

SEQ ID NO: 314993 - DNA, 33 bp, Homo sapien
ggtacattttaggatgacacagaaatgctgact

SEQ ID NO: 314994 - DNA, 33 bp, Homo sapien
ggtacattttaggatggcacagaaatgctgact

SEQ ID NO: 314995 - DNA, 33 bp, Homo sapien
tgagcctctgagtgggcacgtgtaggcagtggc

SEQ ID NO: 314996 - DNA, 33 bp, Homo sapien
tgagcctctgagtgggtacgtgtaggcagtggc

SEQ ID NO: 314997 - DNA, 33 bp, Homo sapien
gatgaaaaaagaagcacatccaagtttctgcct

SEQ ID NO: 314998 - DNA, 33 bp, Homo sapien
gatgaaaaaagaagcagatccaagtttctgcct

SEQ ID NO: 314999 - DNA, 33 bp, Homo sapien
agaaaagtaggagtccaaaggaagagtaaacaa

SEQ ID NO: 315000 - DNA, 33 bp, Homo sapien
agaaaagtaggagtccgaaggaagagtaaacaa

SEQ ID NO: 315001 - DNA, 33 bp, Homo sapien
taagggaaggctcaacactttttcacaaatgtt

SEQ ID NO: 315002 - DNA, 33 bp, Homo sapien
taagggaaggctcaacgctttttcacaaatgtt

SEQ ID NO: 315003 - DNA, 33 bp, Homo sapien
tttcctcagttccgaagatagcatggacaagtg

SEQ ID NO: 315004 - DNA, 33 bp, Homo sapien
tttcctcagttccgaatatagcatggacaagtg

SEQ ID NO: 315005 - DNA, 33 bp, Homo sapien
actttaatagaactgtcaactcaaaaacaagaa

SEQ ID NO: 315006 - DNA, 33 bp, Homo sapien
actttaatagaactgtgaactcaaaaacaagaa

SEQ ID NO: 315007 - DNA, 33 bp, Homo sapien
accggcatgagagagacaagtacagaagggacc

SEQ ID NO: 315008 - DNA, 33 bp, Homo sapien
accggcatgagagagataagtacagaagggacc

SEQ ID NO: 315009 - DNA, 33 bp, Homo sapien
gagtgtggaaatagaccgagaaatttgtggtca

SEQ ID NO: 315010 - DNA, 33 bp, Homo sapien
gagtgtggaaatagacggagaaatttgtggtca

SEQ ID NO: 315011 - DNA, 33 bp, Homo sapien
cgctgacgccagaaggccaatatccgggtctgg

SEQ ID NO: 315012 - DNA, 33 bp, Homo sapien
cgctgacgccagaagggcaatatccgggtctgg

SEQ ID NO: 315013 - DNA, 33 bp, Homo sapien
ttaaaataacaatgcaccatctgtctaaagtaa

SEQ ID NO: 315014 - DNA, 33 bp, Homo sapien
ttaaaataacaatgcagcatctgtctaaagtaa

SEQ ID NO: 315015 - DNA, 33 bp, Homo sapien
tatacatggaataaacaaaaatattgaattcta

SEQ ID NO: 315016 - DNA, 33 bp, Homo sapien
tatacatggaataaacgaaaatattgaattcta

SEQ ID NO: 315017 - DNA, 33 bp, Homo sapien
ataaattccttgtggactagggagaaacctaga

SEQ ID NO: 315018 - DNA, 33 bp, Homo sapien
ataaattccttgtggattagggagaaacctaga

SEQ ID NO: 315019 - DNA, 33 bp, Homo sapien
aaaggacatttaatcacagctgatgttctttag

SEQ ID NO: 315020 - DNA, 33 bp, Homo sapien
aaaggacatttaatcatagctgatgttctttag

SEQ ID NO: 315021 - DNA, 33 bp, Homo sapien
tgtcttgcctgaggtaccaactccagctcctat

SEQ ID NO: 315022 - DNA, 33 bp, Homo sapien
tgtcttgcctgaggtatcaactccagctcctat

SEQ ID NO: 315023 - DNA, 33 bp, Homo sapien
agttgggagtattccacgttttactcctgtgtt

SEQ ID NO: 315024 - DNA, 33 bp, Homo sapien
agttgggagtattccatgttttactcctgtgtt

SEQ ID NO: 315025 - DNA, 33 bp, Homo sapien
atgtatgactgctcagaagaaaatgctttgcta

SEQ ID NO: 315026 - DNA, 33 bp, Homo sapien
atgtatgactgctcaggagaaaatgctttgcta

SEQ ID NO: 315027 - DNA, 33 bp, Homo sapien
ttcaaaagtcaatccaatagtaagttatggatt

SEQ ID NO: 315028 - DNA, 33 bp, Homo sapien
ttcaaaagtcaatccagtagtaagttatggatt

SEQ ID NO: 315029 - DNA, 33 bp, Homo sapien
gcagaatagcccaaaacagaaaaggatgtaaat

SEQ ID NO: 315030 - DNA, 33 bp, Homo sapien
gcagaatagcccaaaagagaaaaggatgtaaat

SEQ ID NO: 315031 - DNA, 33 bp, Homo sapien
cataacttgtcctcacacaaagctaaaatggga

SEQ ID NO: 315032 - DNA, 33 bp, Homo sapien
cataacttgtcctcacgcaaagctaaaatggga

SEQ ID NO: 315033 - DNA, 33 bp, Homo sapien
atggcatagctgacaggatttcagagtgacctc

SEQ ID NO: 315034 - DNA, 33 bp, Homo sapien
atggcatagctgacagtatttcagagtgacctc

SEQ ID NO: 315035 - DNA, 33 bp, Homo sapien
cttgcgactgatcagcacctgtattttgacttg

SEQ ID NO: 315036 - DNA, 33 bp, Homo sapien
cttgcgactgatcagcgcctgtattttgacttg

SEQ ID NO: 315037 - DNA, 33 bp, Homo sapien
ccacctttttgctagccgccaactgaaagcaat

SEQ ID NO: 315038 - DNA, 33 bp, Homo sapien
ccacctttttgctagctgccaactgaaagcaat

SEQ ID NO: 315039 - DNA, 33 bp, Homo sapien
gcaacttcttatctcaccagctcagggacagaa

SEQ ID NO: 315040 - DNA, 33 bp, Homo sapien
gcaacttcttatctcatcagctcagggacagaa

SEQ ID NO: 315041 - DNA, 33 bp, Homo sapien
ggacctgaccaacagaacaaggagtgatcagat

SEQ ID NO: 315042 - DNA, 33 bp, Homo sapien
ggacctgaccaacagagcaaggagtgatcagat

SEQ ID NO: 315043 - DNA, 33 bp, Homo sapien
catgatgcttaaaatacgagtggattaaaatag

SEQ ID NO: 315044 - DNA, 33 bp, Homo sapien
catgatgcttaaaatatgagtggattaaaatag

SEQ ID NO: 315045 - DNA, 33 bp, Homo sapien
aggaataaaatgaaaaagcaaggactcccacct

SEQ ID NO: 315046 - DNA, 33 bp, Homo sapien
aggaataaaatgaaaacgcaaggactcccacct

SEQ ID NO: 315047 - DNA, 33 bp, Homo sapien
agaggtgtcaaataaaagtgtgttctgagtgga

SEQ ID NO: 315048 - DNA, 33 bp, Homo sapien
agaggtgtcaaataaatgtgtgttctgagtgga

SEQ ID NO: 315049 - DNA, 33 bp, Homo sapien
gtctttgttggggtaacattttgataggagtca

SEQ ID NO: 315050 - DNA, 33 bp, Homo sapien
gtctttgttggggtaagattttgataggagtca

SEQ ID NO: 315051 - DNA, 33 bp, Homo sapien
gttcagcgttcaaggcaaagactttagggagga

SEQ ID NO: 315052 - DNA, 33 bp, Homo sapien
gttcagcgttcaaggcgaagactttagggagga

SEQ ID NO: 315053 - DNA, 33 bp, Homo sapien
actgaaaaatagtgaccgcaccagggatatctt

SEQ ID NO: 315054 - DNA, 33 bp, Homo sapien
actgaaaaatagtgacggcaccagggatatctt

SEQ ID NO: 315055 - DNA, 33 bp, Homo sapien
cctgagtgacaagagtcaaaatccatctcaaaa

SEQ ID NO: 315056 - DNA, 33 bp, Homo sapien
cctgagtgacaagagtgaaaatccatctcaaaa

SEQ ID NO: 315057 - DNA, 33 bp, Homo sapien
taggagtatccactcccagccctgtaccactgt

SEQ ID NO: 315058 - DNA, 33 bp, Homo sapien
taggagtatccactcctagccctgtaccactgt

SEQ ID NO: 315059 - DNA, 33 bp, Homo sapien
aatttgatagttcaatgagttagaggaaaatgt

SEQ ID NO: 315060 - DNA, 33 bp, Homo sapien
aatttgatagttcaattagttagaggaaaatgt

SEQ ID NO: 315061 - DNA, 33 bp, Homo sapien
tcctgggagatggatacgttctatgactcaagg

SEQ ID NO: 315062 - DNA, 33 bp, Homo sapien
tcctgggagatggatatgttctatgactcaagg

SEQ ID NO: 315063 - DNA, 33 bp, Homo sapien
ctaggcaagcctgagacacaattcattggcatc

SEQ ID NO: 315064 - DNA, 33 bp, Homo sapien
ctaggcaagcctgagatacaattcattggcatc

SEQ ID NO: 315065 - DNA, 33 bp, Homo sapien
tagaagtcatgttatacggagttgagttgctaa

SEQ ID NO: 315066 - DNA, 33 bp, Homo sapien
tagaagtcatgttatatggagttgagttgctaa

SEQ ID NO: 315067 - DNA, 33 bp, Homo sapien
ttgggatctaggctaagacttttcacactcact

SEQ ID NO: 315068 - DNA, 33 bp, Homo sapien
ttgggatctaggctaatacttttcacactcact

SEQ ID NO: 315069 - DNA, 33 bp, Homo sapien
gtatggagggctttcactcttggagctgtctag

SEQ ID NO: 315070 - DNA, 33 bp, Homo sapien
gtatggagggctttcattcttggagctgtctag

SEQ ID NO: 315071 - DNA, 33 bp, Homo sapien
tagatcagagttgatacaagcgatgcccaacca

SEQ ID NO: 315072 - DNA, 33 bp, Homo sapien
tagatcagagttgatataagcgatgcccaacca

SEQ ID NO: 315073 - DNA, 33 bp, Homo sapien
tgagcctgagtttacaatcaccgcctgtcccca

SEQ ID NO: 315074 - DNA, 33 bp, Homo sapien
tgagcctgagtttacagtcaccgcctgtcccca

SEQ ID NO: 315075 - DNA, 33 bp, Homo sapien
tgtttcaacctctatacaacagtgacctggctg

SEQ ID NO: 315076 - DNA, 33 bp, Homo sapien
tgtttcaacctctatataacagtgacctggctg

SEQ ID NO: 315077 - DNA, 33 bp, Homo sapien
catcaccctctctccaaaatgtgagccactcca

SEQ ID NO: 315078 - DNA, 33 bp, Homo sapien
catcaccctctctccagaatgtgagccactcca

SEQ ID NO: 315079 - DNA, 33 bp, Homo sapien
actcttctggtcccacacttgctgcctctgagc

SEQ ID NO: 315080 - DNA, 33 bp, Homo sapien
actcttctggtcccacgcttgctgcctctgagc

SEQ ID NO: 315081 - DNA, 33 bp, Homo sapien
attgatgaaatcatccaaaggcccatggctgac

SEQ ID NO: 315082 - DNA, 33 bp, Homo sapien
attgatgaaatcatccgaaggcccatggctgac

SEQ ID NO: 315083 - DNA, 33 bp, Homo sapien
aattttcttggaattaacgactcaaaaatatct

SEQ ID NO: 315084 - DNA, 33 bp, Homo sapien
aattttcttggaattagcgactcaaaaatatct

SEQ ID NO: 315085 - DNA, 33 bp, Homo sapien
tctttaattgctttaactggtatcttgacactc

SEQ ID NO: 315086 - DNA, 33 bp, Homo sapien
tctttaattgctttaagtggtatcttgacactc

SEQ ID NO: 315087 - DNA, 33 bp, Homo sapien
tatccctgagtaattacatgggaaggaaataaa

SEQ ID NO: 315088 - DNA, 33 bp, Homo sapien
tatccctgagtaattagatgggaaggaaataaa

SEQ ID NO: 315089 - DNA, 33 bp, Homo sapien
ctgtgttttgatggccactgtctctggcttcag

SEQ ID NO: 315090 - DNA, 33 bp, Homo sapien
ctgtgttttgatggcccctgtctctggcttcag

SEQ ID NO: 315091 - DNA, 33 bp, Homo sapien
tcagataccaccactcaacctactgcataaagc

SEQ ID NO: 315092 - DNA, 33 bp, Homo sapien
tcagataccaccactcgacctactgcataaagc

SEQ ID NO: 315093 - DNA, 33 bp, Homo sapien
tcaggttgaacgtgaacagcacctgtcatagga

SEQ ID NO: 315094 - DNA, 33 bp, Homo sapien
tcaggttgaacgtgaatagcacctgtcatagga

SEQ ID NO: 315095 - DNA, 33 bp, Homo sapien
tcttggtttcctgataaccgtcttgtttgatgt

SEQ ID NO: 315096 - DNA, 33 bp, Homo sapien
tcttggtttcctgatacccgtcttgtttgatgt

SEQ ID NO: 315097 - DNA, 33 bp, Homo sapien
tatcaggaaaccaagaactcttcttttctaagc

SEQ ID NO: 315098 - DNA, 33 bp, Homo sapien
tatcaggaaaccaagagctcttcttttctaagc

SEQ ID NO: 315099 - DNA, 33 bp, Homo sapien
gaaaagacactaggcaatattatagcaggtatc

SEQ ID NO: 315100 - DNA, 33 bp, Homo sapien
gaaaagacactaggcagtattatagcaggtatc

SEQ ID NO: 315101 - DNA, 33 bp, Homo sapien
gtgcatttccaactgcgatttcatttacccaaa

SEQ ID NO: 315102 - DNA, 33 bp, Homo sapien
gtgcatttccaactgctatttcatttacccaaa

SEQ ID NO: 315103 - DNA, 33 bp, Homo sapien
tccattgctcttggaagaaagtccaaatcaaag

SEQ ID NO: 315104 - DNA, 33 bp, Homo sapien
tccattgctcttggaataaagtccaaatcaaag

SEQ ID NO: 315105 - DNA, 33 bp, Homo sapien
aggttaaatatgtgatcaactttgataaatgtt

SEQ ID NO: 315106 - DNA, 33 bp, Homo sapien
aggttaaatatgtgatgaactttgataaatgtt

SEQ ID NO: 315107 - DNA, 33 bp, Homo sapien
aacaccaccaccagtaagaatatgcacacagag

SEQ ID NO: 315108 - DNA, 33 bp, Homo sapien
aacaccaccaccagtatgaatatgcacacagag

SEQ ID NO: 315109 - DNA, 33 bp, Homo sapien
atatgagaaggctaccaaactgatttgatctcc

SEQ ID NO: 315110 - DNA, 33 bp, Homo sapien
atatgagaaggctaccgaactgatttgatctcc

SEQ ID NO: 315111 - DNA, 33 bp, Homo sapien
aacaatatggcaacaacttaaatgaattttttt

SEQ ID NO: 315112 - DNA, 33 bp, Homo sapien
aacaatatggcaacaagttaaatgaattttttt

SEQ ID NO: 315113 - DNA, 33 bp, Homo sapien
agcacagaatgaatccaatgtctgaaaatgtgc

SEQ ID NO: 315114 - DNA, 33 bp, Homo sapien
agcacagaatgaatccgatgtctgaaaatgtgc

SEQ ID NO: 315115 - DNA, 33 bp, Homo sapien
caacccagtaaactaacctaaagatcatacaga

SEQ ID NO: 315116 - DNA, 33 bp, Homo sapien
caacccagtaaactaagctaaagatcatacaga

SEQ ID NO: 315117 - DNA, 33 bp, Homo sapien
ggtgagcaagttctcaggtccctgggaatttgg

SEQ ID NO: 315118 - DNA, 33 bp, Homo sapien
ggtgagcaagttctcatgtccctgggaatttgg

SEQ ID NO: 315119 - DNA, 33 bp, Homo sapien
caaccccagtgttgacccaaatggctacagcag

SEQ ID NO: 315120 - DNA, 33 bp, Homo sapien
caaccccagtgttgactcaaatggctacagcag

SEQ ID NO: 315121 - DNA, 33 bp, Homo sapien
ttgactcagatgtcatcataactccgtgttatt

SEQ ID NO: 315122 - DNA, 33 bp, Homo sapien
ttgactcagatgtcattataactccgtgttatt

SEQ ID NO: 315123 - DNA, 33 bp, Homo sapien
taccttggtgaccactaacagctcggcacaaaa

SEQ ID NO: 315124 - DNA, 33 bp, Homo sapien
taccttggtgaccactgacagctcggcacaaaa

SEQ ID NO: 315125 - DNA, 33 bp, Homo sapien
tcagagtggagtaccacggagcatcctttgctc

SEQ ID NO: 315126 - DNA, 33 bp, Homo sapien
tcagagtggagtaccatggagcatcctttgctc

SEQ ID NO: 315127 - DNA, 33 bp, Homo sapien
gcaaccctttaagctaagtagtttagtatgtgt

SEQ ID NO: 315128 - DNA, 33 bp, Homo sapien
gcaaccctttaagctatgtagtttagtatgtgt

SEQ ID NO: 315129 - DNA, 33 bp, Homo sapien
acataacatcttataacggaatgtctttgttct

SEQ ID NO: 315130 - DNA, 33 bp, Homo sapien
acataacatcttataatggaatgtctttgttct

SEQ ID NO: 315131 - DNA, 33 bp, Homo sapien
cttgggtcaccacaaccacctcccaggttcaag

SEQ ID NO: 315132 - DNA, 33 bp, Homo sapien
cttgggtcaccacaactacctcccaggttcaag

SEQ ID NO: 315133 - DNA, 33 bp, Homo sapien
cccccacaggccacaactgtagagagaactttc

SEQ ID NO: 315134 - DNA, 33 bp, Homo sapien
cccccacaggccacaattgtagagagaactttc

SEQ ID NO: 315135 - DNA, 33 bp, Homo sapien
ttcaaagaaagactcacaccctcaaggctaagg

SEQ ID NO: 315136 - DNA, 33 bp, Homo sapien
ttcaaagaaagactcataccctcaaggctaagg

SEQ ID NO: 315137 - DNA, 33 bp, Homo sapien
aaaaatgtttcttggacgattagaagaaatgga

SEQ ID NO: 315138 - DNA, 33 bp, Homo sapien
aaaaatgtttcttggatgattagaagaaatgga

SEQ ID NO: 315139 - DNA, 33 bp, Homo sapien
gtgtaagaagcaccacaaaaagttatgatttaa

SEQ ID NO: 315140 - DNA, 33 bp, Homo sapien
gtgtaagaagcaccaccaaaagttatgatttaa

SEQ ID NO: 315141 - DNA, 33 bp, Homo sapien
ccaaatgtgtctgtatcactttctctacaaaag

SEQ ID NO: 315142 - DNA, 33 bp, Homo sapien
ccaaatgtgtctgtattactttctctacaaaag

SEQ ID NO: 315143 - DNA, 33 bp, Homo sapien
ttttccagttgttccaataatggcctttataac

SEQ ID NO: 315144 - DNA, 33 bp, Homo sapien
ttttccagttgttccagtaatggcctttataac

SEQ ID NO: 315145 - DNA, 33 bp, Homo sapien
ctgtgtacaagaaaaacagatatgcctacacat

SEQ ID NO: 315146 - DNA, 33 bp, Homo sapien
ctgtgtacaagaaaaatagatatgcctacacat

SEQ ID NO: 315147 - DNA, 33 bp, Homo sapien
agctgttcaggatccacatttaaactccagttg

SEQ ID NO: 315148 - DNA, 33 bp, Homo sapien
agctgttcaggatccatatttaaactccagttg

SEQ ID NO: 315149 - DNA, 33 bp, Homo sapien
gtagagttctccaggtaaagcttcagtgagatg

SEQ ID NO: 315150 - DNA, 33 bp, Homo sapien
gtagagttctccaggtgaagcttcagtgagatg

SEQ ID NO: 315151 - DNA, 33 bp, Homo sapien
tctctgaattcttaagcactcaactgaggaaat

SEQ ID NO: 315152 - DNA, 33 bp, Homo sapien
tctctgaattcttaaggactcaactgaggaaat

SEQ ID NO: 315153 - DNA, 33 bp, Homo sapien
cacagagtgcctcaaaaaacaagcctactgtcc

SEQ ID NO: 315154 - DNA, 33 bp, Homo sapien
cacagagtgcctcaaagaacaagcctactgtcc

SEQ ID NO: 315155 - DNA, 33 bp, Homo sapien
tacttacaaattcctcaaatgtgctcattatat

SEQ ID NO: 315156 - DNA, 33 bp, Homo sapien
tacttacaaattcctcgaatgtgctcattatat

SEQ ID NO: 315157 - DNA, 33 bp, Homo sapien
attttatagatgaggaaatcggctctgagatgt

SEQ ID NO: 315158 - DNA, 33 bp, Homo sapien
attttatagatgaggagatcggctctgagatgt

SEQ ID NO: 315159 - DNA, 33 bp, Homo sapien
tttcacataatgtgcaggagagagtaagtctgc

SEQ ID NO: 315160 - DNA, 33 bp, Homo sapien
tttcacataatgtgcatgagagagtaagtctgc

SEQ ID NO: 315161 - DNA, 33 bp, Homo sapien
tacatctcccaacaatcaagagaaactctctct

SEQ ID NO: 315162 - DNA, 33 bp, Homo sapien
tacatctcccaacaatgaagagaaactctctct

SEQ ID NO: 315163 - DNA, 33 bp, Homo sapien
cacaccagctgagttgcaggaaaaggaaaagca

SEQ ID NO: 315164 - DNA, 33 bp, Homo sapien
cacaccagctgagttggaggaaaaggaaaagca

SEQ ID NO: 315165 - DNA, 33 bp, Homo sapien
acttgctgttttgtaaatcaacatgacaggata

SEQ ID NO: 315166 - DNA, 33 bp, Homo sapien
acttgctgttttgtaagtcaacatgacaggata

SEQ ID NO: 315167 - DNA, 33 bp, Homo sapien
gtgtggaaggaaatgagacatggcagagtcctg

SEQ ID NO: 315168 - DNA, 33 bp, Homo sapien
gtgtggaaggaaatgatacatggcagagtcctg

SEQ ID NO: 315169 - DNA, 33 bp, Homo sapien
ttttaaacaactcttacggaaggagattacaac

SEQ ID NO: 315170 - DNA, 33 bp, Homo sapien
ttttaaacaactcttatggaaggagattacaac

SEQ ID NO: 315171 - DNA, 33 bp, Homo sapien
agagtccagtagttgaagacatatatgagttca

SEQ ID NO: 315172 - DNA, 33 bp, Homo sapien
agagtccagtagttgaggacatatatgagttca

SEQ ID NO: 315173 - DNA, 33 bp, Homo sapien
ttaagtgaattttcacaaggctgcatagctaat

SEQ ID NO: 315174 - DNA, 33 bp, Homo sapien
ttaagtgaattttcacgaggctgcatagctaat

SEQ ID NO: 315175 - DNA, 33 bp, Homo sapien
gagtgtggtgctactgcatagaggctaggatgc

SEQ ID NO: 315176 - DNA, 33 bp, Homo sapien
gagtgtggtgctactgtatagaggctaggatgc

SEQ ID NO: 315177 - DNA, 33 bp, Homo sapien
tgctatttatatggcactgagttcaactccaaa

SEQ ID NO: 315178 - DNA, 33 bp, Homo sapien
tgctatttatatggcattgagttcaactccaaa

SEQ ID NO: 315179 - DNA, 33 bp, Homo sapien
aatctccatacagaagaacatctgaaagtactt

SEQ ID NO: 315180 - DNA, 33 bp, Homo sapien
aatctccatacagaaggacatctgaaagtactt

SEQ ID NO: 315181 - DNA, 33 bp, Homo sapien
tgcctattatagcacacgtctggccatttattt

SEQ ID NO: 315182 - DNA, 33 bp, Homo sapien
tgcctattatagcacatgtctggccatttattt

SEQ ID NO: 315183 - DNA, 33 bp, Homo sapien
acaagtcttagtccaacattacctttcttggcc

SEQ ID NO: 315184 - DNA, 33 bp, Homo sapien
acaagtcttagtccaatattacctttcttggcc

SEQ ID NO: 315185 - DNA, 33 bp, Homo sapien
acttccttttcatacagattgggggaactggca

SEQ ID NO: 315186 - DNA, 33 bp, Homo sapien
acttccttttcatacatattgggggaactggca

SEQ ID NO: 315187 - DNA, 33 bp, Homo sapien
tcacctgctatgtggaagtgatgataacttgtc

SEQ ID NO: 315188 - DNA, 33 bp, Homo sapien
tcacctgctatgtggaggtgatgataacttgtc

SEQ ID NO: 315189 - DNA, 33 bp, Homo sapien
agaacacaagatgatacacctaatctcattcac

SEQ ID NO: 315190 - DNA, 33 bp, Homo sapien
agaacacaagatgatatacctaatctcattcac

SEQ ID NO: 315191 - DNA, 33 bp, Homo sapien
atgtattttttaattgcaggtcatcctcaaaaa

SEQ ID NO: 315192 - DNA, 33 bp, Homo sapien
atgtattttttaattgtaggtcatcctcaaaaa

SEQ ID NO: 315193 - DNA, 33 bp, Homo sapien
tactgggagtatcatgaatgtattttttaattg

SEQ ID NO: 315194 - DNA, 33 bp, Homo sapien
tactgggagtatcatggatgtattttttaattg

SEQ ID NO: 315195 - DNA, 33 bp, Homo sapien
atcagtgggaaacaaacagcttgctcttcatca

SEQ ID NO: 315196 - DNA, 33 bp, Homo sapien
atcagtgggaaacaaatagcttgctcttcatca

SEQ ID NO: 315197 - DNA, 33 bp, Homo sapien
aagacttgaagacttgcaactcaaaatggtata

SEQ ID NO: 315198 - DNA, 33 bp, Homo sapien
aagacttgaagacttgtaactcaaaatggtata

SEQ ID NO: 315199 - DNA, 33 bp, Homo sapien
ggaggaagaaaatcaccattacaataaaagaat

SEQ ID NO: 315200 - DNA, 33 bp, Homo sapien
ggaggaagaaaatcacgattacaataaaagaat

SEQ ID NO: 315201 - DNA, 33 bp, Homo sapien
ggtaggggaagtgtaacaaatggccattctgga

SEQ ID NO: 315202 - DNA, 33 bp, Homo sapien
ggtaggggaagtgtaagaaatggccattctgga

SEQ ID NO: 315203 - DNA, 33 bp, Homo sapien
tcctaccttatgaaatcatcttggccttgatga

SEQ ID NO: 315204 - DNA, 33 bp, Homo sapien
tcctaccttatgaaattatcttggccttgatga

SEQ ID NO: 315205 - DNA, 33 bp, Homo sapien
cattattttgtctggccaatacactttatcatg

SEQ ID NO: 315206 - DNA, 33 bp, Homo sapien
cattattttgtctggctaatacactttatcatg

SEQ ID NO: 315207 - DNA, 33 bp, Homo sapien
tgtctgcaaatctatacagaggagccaacagtc

SEQ ID NO: 315208 - DNA, 33 bp, Homo sapien
tgtctgcaaatctatatagaggagccaacagtc

SEQ ID NO: 315209 - DNA, 33 bp, Homo sapien
gttgtttctgcctaaaagtgtgcataatataaa

SEQ ID NO: 315210 - DNA, 33 bp, Homo sapien
gttgtttctgcctaaaggtgtgcataatataaa

SEQ ID NO: 315211 - DNA, 33 bp, Homo sapien
ttaattagagaagtgtaaaaataaagacaggac

SEQ ID NO: 315212 - DNA, 33 bp, Homo sapien
ttaattagagaagtgtgaaaataaagacaggac

SEQ ID NO: 315213 - DNA, 33 bp, Homo sapien
gctaggaccatatttaaatgtcaattcaaaaat

SEQ ID NO: 315214 - DNA, 33 bp, Homo sapien
gctaggaccatatttagatgtcaattcaaaaat

SEQ ID NO: 315215 - DNA, 33 bp, Homo sapien
agtcccagttctgctcactttgggataagcagg

SEQ ID NO: 315216 - DNA, 33 bp, Homo sapien
agtcccagttctgctcgctttgggataagcagg

SEQ ID NO: 315217 - DNA, 33 bp, Homo sapien
aaaacactagctactcagaaaactttctcttct

SEQ ID NO: 315218 - DNA, 33 bp, Homo sapien
aaaacactagctactccgaaaactttctcttct

SEQ ID NO: 315219 - DNA, 33 bp, Homo sapien
tttatcacaaatatcaacacaccaattatttat

SEQ ID NO: 315220 - DNA, 33 bp, Homo sapien
tttatcacaaatatcagcacaccaattatttat

SEQ ID NO: 315221 - DNA, 33 bp, Homo sapien
cacctagagagagctcaaggtttggtctccgac

SEQ ID NO: 315222 - DNA, 33 bp, Homo sapien
cacctagagagagctcgaggtttggtctccgac

SEQ ID NO: 315223 - DNA, 33 bp, Homo sapien
aaatatcgggtgtagacactgataggacagtca

SEQ ID NO: 315224 - DNA, 33 bp, Homo sapien
aaatatcgggtgtagatactgataggacagtca

SEQ ID NO: 315225 - DNA, 33 bp, Homo sapien
tgtttactgagcaaccactggggaacaggcgtt

SEQ ID NO: 315226 - DNA, 33 bp, Homo sapien
tgtttactgagcaaccgctggggaacaggcgtt

SEQ ID NO: 315227 - DNA, 33 bp, Homo sapien
cctaccttttccatgaaatctttgctaactatt

SEQ ID NO: 315228 - DNA, 33 bp, Homo sapien
cctaccttttccatgatatctttgctaactatt

SEQ ID NO: 315229 - DNA, 33 bp, Homo sapien
ttccgcttctatgaaaatcaagtatgtgaggca

SEQ ID NO: 315230 - DNA, 33 bp, Homo sapien
ttccgcttctatgaaagtcaagtatgtgaggca

SEQ ID NO: 315231 - DNA, 33 bp, Homo sapien
ctttctagattccttccctgatggcacaaccca

SEQ ID NO: 315232 - DNA, 33 bp, Homo sapien
ctttctagattccttcgctgatggcacaaccca

SEQ ID NO: 315233 - DNA, 33 bp, Homo sapien
gccaatcttcacaatcagaaacagcttctctgt

SEQ ID NO: 315234 - DNA, 33 bp, Homo sapien
gccaatcttcacaatccgaaacagcttctctgt

SEQ ID NO: 315235 - DNA, 33 bp, Homo sapien
ttggttttctgtgaaaaggcagctagtgacact

SEQ ID NO: 315236 - DNA, 33 bp, Homo sapien
ttggttttctgtgaaacggcagctagtgacact

SEQ ID NO: 315237 - DNA, 33 bp, Homo sapien
ttgcatcctaattagaaacatgtggaagagggc

SEQ ID NO: 315238 - DNA, 33 bp, Homo sapien
ttgcatcctaattagagacatgtggaagagggc

SEQ ID NO: 315239 - DNA, 33 bp, Homo sapien
tagtcactgcacctgaatagccttaggaaatga

SEQ ID NO: 315240 - DNA, 33 bp, Homo sapien
tagtcactgcacctgagtagccttaggaaatga

SEQ ID NO: 315241 - DNA, 33 bp, Homo sapien
cacacggtaggtagaccgtccatgcaaacaaat

SEQ ID NO: 315242 - DNA, 33 bp, Homo sapien
cacacggtaggtagactgtccatgcaaacaaat

SEQ ID NO: 315243 - DNA, 33 bp, Homo sapien
ccttcaaatctcctaccggtgcaccccagtggc

SEQ ID NO: 315244 - DNA, 33 bp, Homo sapien
ccttcaaatctcctactggtgcaccccagtggc

SEQ ID NO: 315245 - DNA, 33 bp, Homo sapien
acatgatgctaggctacgttaacaagagcctgg

SEQ ID NO: 315246 - DNA, 33 bp, Homo sapien
acatgatgctaggctatgttaacaagagcctgg

SEQ ID NO: 315247 - DNA, 33 bp, Homo sapien
tagtccaatgtcacacccagtacaagaatccta

SEQ ID NO: 315248 - DNA, 33 bp, Homo sapien
tagtccaatgtcacacgcagtacaagaatccta

SEQ ID NO: 315249 - DNA, 33 bp, Homo sapien
gctaaatagcctccaaacttaacctacacatgg

SEQ ID NO: 315250 - DNA, 33 bp, Homo sapien
gctaaatagcctccaatcttaacctacacatgg

SEQ ID NO: 315251 - DNA, 33 bp, Homo sapien
cagtgtacatttaacccagttcagtggcaaagt

SEQ ID NO: 315252 - DNA, 33 bp, Homo sapien
cagtgtacatttaaccgagttcagtggcaaagt

SEQ ID NO: 315253 - DNA, 33 bp, Homo sapien
tgtcaaactctcagtccctctctcccaggagcc

SEQ ID NO: 315254 - DNA, 33 bp, Homo sapien
tgtcaaactctcagtctctctctcccaggagcc

SEQ ID NO: 315255 - DNA, 33 bp, Homo sapien
gcctctattccttctgcaacctcaggatgaaaa

SEQ ID NO: 315256 - DNA, 33 bp, Homo sapien
gcctctattccttctgtaacctcaggatgaaaa

SEQ ID NO: 315257 - DNA, 33 bp, Homo sapien
agaaggaagataaacacgtgatagagtcaaggg

SEQ ID NO: 315258 - DNA, 33 bp, Homo sapien
agaaggaagataaacatgtgatagagtcaaggg

SEQ ID NO: 315259 - DNA, 33 bp, Homo sapien
ttcagttttaggtgaaaaccaatgagtacccag

SEQ ID NO: 315260 - DNA, 33 bp, Homo sapien
ttcagttttaggtgaataccaatgagtacccag

SEQ ID NO: 315261 - DNA, 33 bp, Homo sapien
ctgtgaggtttgagggaactattaaattataca

SEQ ID NO: 315262 - DNA, 33 bp, Homo sapien
ctgtgaggtttgaggggactattaaattataca

SEQ ID NO: 315263 - DNA, 33 bp, Homo sapien
aaatacagcaccacaaagttgtttaagccctcg

SEQ ID NO: 315264 - DNA, 33 bp, Homo sapien
aaatacagcaccacaacgttgtttaagccctcg

SEQ ID NO: 315265 - DNA, 33 bp, Homo sapien
tggctcatatcctctcactaaaatgcagatcga

SEQ ID NO: 315266 - DNA, 33 bp, Homo sapien
tggctcatatcctctcgctaaaatgcagatcga

SEQ ID NO: 315267 - DNA, 33 bp, Homo sapien
acattcctaagattaactcttcccttaacaact

SEQ ID NO: 315268 - DNA, 33 bp, Homo sapien
acattcctaagattaattcttcccttaacaact

SEQ ID NO: 315269 - DNA, 33 bp, Homo sapien
actgttcatcagcttcaagtaacaaacatacca

SEQ ID NO: 315270 - DNA, 33 bp, Homo sapien
actgttcatcagcttcgagtaacaaacatacca

SEQ ID NO: 315271 - DNA, 33 bp, Homo sapien
tcttgtgtaatccttcgccaatagcatcatctt

SEQ ID NO: 315272 - DNA, 33 bp, Homo sapien
tcttgtgtaatccttctccaatagcatcatctt

SEQ ID NO: 315273 - DNA, 33 bp, Homo sapien
ctaattagacataactcaagggtcataatgctt

SEQ ID NO: 315274 - DNA, 33 bp, Homo sapien
ctaattagacataactgaagggtcataatgctt

SEQ ID NO: 315275 - DNA, 33 bp, Homo sapien
actggagtgatatgtgcagtccttttaaagggg

SEQ ID NO: 315276 - DNA, 33 bp, Homo sapien
actggagtgatatgtggagtccttttaaagggg

SEQ ID NO: 315277 - DNA, 33 bp, Homo sapien
gtctgaggagtctcagcctataaattcaaacct

SEQ ID NO: 315278 - DNA, 33 bp, Homo sapien
gtctgaggagtctcaggctataaattcaaacct

SEQ ID NO: 315279 - DNA, 33 bp, Homo sapien
aatactacaggttttccaaaggctcaggtttat

SEQ ID NO: 315280 - DNA, 33 bp, Homo sapien
aatactacaggttttctaaaggctcaggtttat

SEQ ID NO: 315281 - DNA, 33 bp, Homo sapien
ctgcgaattcctgtcacaaatggagttttcctc

SEQ ID NO: 315282 - DNA, 33 bp, Homo sapien
ctgcgaattcctgtcataaatggagttttcctc

SEQ ID NO: 315283 - DNA, 33 bp, Homo sapien
ctgtgtctgcagtgtcaatcatcaaggtctcaa

SEQ ID NO: 315284 - DNA, 33 bp, Homo sapien
ctgtgtctgcagtgtcgatcatcaaggtctcaa

SEQ ID NO: 315285 - DNA, 33 bp, Homo sapien
ctccctactaaagccaccctctgttttactacc

SEQ ID NO: 315286 - DNA, 33 bp, Homo sapien
ctccctactaaagccatcctctgttttactacc

SEQ ID NO: 315287 - DNA, 33 bp, Homo sapien
gtaggagaaatgaatgcatggatataggtagga

SEQ ID NO: 315288 - DNA, 33 bp, Homo sapien
gtaggagaaatgaatggatggatataggtagga

SEQ ID NO: 315289 - DNA, 33 bp, Homo sapien
gaacagagatggagtacatttatatgggaaaat

SEQ ID NO: 315290 - DNA, 33 bp, Homo sapien
gaacagagatggagtagatttatatgggaaaat

SEQ ID NO: 315291 - DNA, 33 bp, Homo sapien
tgtctgctctacatggaatggctccactttgaa

SEQ ID NO: 315292 - DNA, 33 bp, Homo sapien
tgtctgctctacatggcatggctccactttgaa

SEQ ID NO: 315293 - DNA, 33 bp, Homo sapien
aatgaactgagcctccaagtactctctggacta

SEQ ID NO: 315294 - DNA, 33 bp, Homo sapien
aatgaactgagcctccgagtactctctggacta

SEQ ID NO: 315295 - DNA, 33 bp, Homo sapien
aatgctggtttctttaggccctaatagctgctg

SEQ ID NO: 315296 - DNA, 33 bp, Homo sapien
aatgctggtttctttatgccctaatagctgctg

SEQ ID NO: 315297 - DNA, 33 bp, Homo sapien
gatatatatttagcaaagtgggcaaatctggct

SEQ ID NO: 315298 - DNA, 33 bp, Homo sapien
gatatatatttagcaaggtgggcaaatctggct

SEQ ID NO: 315299 - DNA, 33 bp, Homo sapien
atgatttcatctattacatatggtatcatgggt

SEQ ID NO: 315300 - DNA, 33 bp, Homo sapien
atgatttcatctattatatatggtatcatgggt

SEQ ID NO: 315301 - DNA, 33 bp, Homo sapien
cagctggcaatttccaacggaaccctcttaaga

SEQ ID NO: 315302 - DNA, 33 bp, Homo sapien
cagctggcaatttccagcggaaccctcttaaga

SEQ ID NO: 315303 - DNA, 33 bp, Homo sapien
cttagcaaaggtacacagtctatcgtggtcaaa

SEQ ID NO: 315304 - DNA, 33 bp, Homo sapien
cttagcaaaggtacacggtctatcgtggtcaaa

SEQ ID NO: 315305 - DNA, 33 bp, Homo sapien
agcttgttttcaagacagagtcactctggttca

SEQ ID NO: 315306 - DNA, 33 bp, Homo sapien
agcttgttttcaagacggagtcactctggttca

SEQ ID NO: 315307 - DNA, 33 bp, Homo sapien
ttcattgcaacccagcagaatcatcaccaagtc

SEQ ID NO: 315308 - DNA, 33 bp, Homo sapien
ttcattgcaacccagcggaatcatcaccaagtc

SEQ ID NO: 315309 - DNA, 33 bp, Homo sapien
ttagcagaataactggcacaaagtagactctca

SEQ ID NO: 315310 - DNA, 33 bp, Homo sapien
ttagcagaataactggtacaaagtagactctca

SEQ ID NO: 315311 - DNA, 33 bp, Homo sapien
cagctgaagcagcaagactaacccgtaagagct

SEQ ID NO: 315312 - DNA, 33 bp, Homo sapien
cagctgaagcagcaaggctaacccgtaagagct

SEQ ID NO: 315313 - DNA, 33 bp, Homo sapien
tgtttttaccccttaacaatgagacagcaaccc

SEQ ID NO: 315314 - DNA, 33 bp, Homo sapien
tgtttttaccccttaataatgagacagcaaccc

SEQ ID NO: 315315 - DNA, 33 bp, Homo sapien
acaatcagccctcagccctaactagacaacata

SEQ ID NO: 315316 - DNA, 33 bp, Homo sapien
acaatcagccctcagctctaactagacaacata

SEQ ID NO: 315317 - DNA, 33 bp, Homo sapien
tagtctgctttcagtgacacccagctagaattt

SEQ ID NO: 315318 - DNA, 33 bp, Homo sapien
tagtctgctttcagtggcacccagctagaattt

SEQ ID NO: 315319 - DNA, 33 bp, Homo sapien
ctctcttatacatggaaagtcaagctaaagata

SEQ ID NO: 315320 - DNA, 33 bp, Homo sapien
ctctcttatacatggagagtcaagctaaagata

SEQ ID NO: 315321 - DNA, 33 bp, Homo sapien
tgtagtatttgatggcaatgagcttactgacaa

SEQ ID NO: 315322 - DNA, 33 bp, Homo sapien
tgtagtatttgatggcgatgagcttactgacaa

SEQ ID NO: 315323 - DNA, 33 bp, Homo sapien
taggactccagttgaagtgagataatagggtcc

SEQ ID NO: 315324 - DNA, 33 bp, Homo sapien
taggactccagttgaattgagataatagggtcc

SEQ ID NO: 315325 - DNA, 33 bp, Homo sapien
accttaaaaggctgtacgcttattccaactatt

SEQ ID NO: 315326 - DNA, 33 bp, Homo sapien
accttaaaaggctgtatgcttattccaactatt

SEQ ID NO: 315327 - DNA, 33 bp, Homo sapien
cgctctcttgctctcactagggtaaatatcact

SEQ ID NO: 315328 - DNA, 33 bp, Homo sapien
cgctctcttgctctcattagggtaaatatcact

SEQ ID NO: 315329 - DNA, 33 bp, Homo sapien
tcatgagaaaagaaaacgaatattcggtgacac

SEQ ID NO: 315330 - DNA, 33 bp, Homo sapien
tcatgagaaaagaaaatgaatattcggtgacac

SEQ ID NO: 315331 - DNA, 33 bp, Homo sapien
ggaggagaggaaaccaataaatcactagacata

SEQ ID NO: 315332 - DNA, 33 bp, Homo sapien
ggaggagaggaaaccattaaatcactagacata

SEQ ID NO: 315333 - DNA, 33 bp, Homo sapien
cagcaagcagagtatgcgataagagatagaaac

SEQ ID NO: 315334 - DNA, 33 bp, Homo sapien
cagcaagcagagtatgtgataagagatagaaac

SEQ ID NO: 315335 - DNA, 33 bp, Homo sapien
taaatagtgacttaccgcttaaccacagtgaaa

SEQ ID NO: 315336 - DNA, 33 bp, Homo sapien
taaatagtgacttacctcttaaccacagtgaaa

SEQ ID NO: 315337 - DNA, 33 bp, Homo sapien
agcgaacattctgcacacctcaatatgagaaga

SEQ ID NO: 315338 - DNA, 33 bp, Homo sapien
agcgaacattctgcacgcctcaatatgagaaga

SEQ ID NO: 315339 - DNA, 33 bp, Homo sapien
atcctgtgaagctcagaacaaaacccaaagtca

SEQ ID NO: 315340 - DNA, 33 bp, Homo sapien
atcctgtgaagctcaggacaaaacccaaagtca

SEQ ID NO: 315341 - DNA, 33 bp, Homo sapien
ggctcatggaacaacaatgggccagcttgggtt

SEQ ID NO: 315342 - DNA, 33 bp, Homo sapien
ggctcatggaacaacagtgggccagcttgggtt

SEQ ID NO: 315343 - DNA, 33 bp, Homo sapien
caagagtcagatgcacacccactcttttctcct

SEQ ID NO: 315344 - DNA, 33 bp, Homo sapien
caagagtcagatgcacgcccactcttttctcct

SEQ ID NO: 315345 - DNA, 33 bp, Homo sapien
catgaacttagcaaacagctacaagcttaactg

SEQ ID NO: 315346 - DNA, 33 bp, Homo sapien
catgaacttagcaaactgctacaagcttaactg

SEQ ID NO: 315347 - DNA, 33 bp, Homo sapien
ggtttcttcctcctcccatttgatgaagttata

SEQ ID NO: 315348 - DNA, 33 bp, Homo sapien
ggtttcttcctcctcctatttgatgaagttata

SEQ ID NO: 315349 - DNA, 33 bp, Homo sapien
acatgactatatgtggaaaagcacgaacaagct

SEQ ID NO: 315350 - DNA, 33 bp, Homo sapien
acatgactatatgtggcaaagcacgaacaagct

SEQ ID NO: 315351 - DNA, 33 bp, Homo sapien
agtcacagattcaggccgcactgttgtcagggc

SEQ ID NO: 315352 - DNA, 33 bp, Homo sapien
agtcacagattcaggctgcactgttgtcagggc

SEQ ID NO: 315353 - DNA, 33 bp, Homo sapien
ctcctcagcctccagaatagtcaccacatctgg

SEQ ID NO: 315354 - DNA, 33 bp, Homo sapien
ctcctcagcctccagagtagtcaccacatctgg

SEQ ID NO: 315355 - DNA, 33 bp, Homo sapien
acaatagattaagcctaaaaaaagcagagcaaa

SEQ ID NO: 315356 - DNA, 33 bp, Homo sapien
acaatagattaagcctgaaaaaagcagagcaaa

SEQ ID NO: 315357 - DNA, 33 bp, Homo sapien
tgaagcctctcctaaccctcagtgagatacatg

SEQ ID NO: 315358 - DNA, 33 bp, Homo sapien
tgaagcctctcctaactctcagtgagatacatg

SEQ ID NO: 315359 - DNA, 33 bp, Homo sapien
agtagtacatgttacccagagaaatgagggaac

SEQ ID NO: 315360 - DNA, 33 bp, Homo sapien
agtagtacatgttacctagagaaatgagggaac

SEQ ID NO: 315361 - DNA, 33 bp, Homo sapien
atctttctcaaaacaaacctcatctcatctcct

SEQ ID NO: 315362 - DNA, 33 bp, Homo sapien
atctttctcaaaacaagcctcatctcatctcct

SEQ ID NO: 315363 - DNA, 33 bp, Homo sapien
atctgacgcagcaagcagattgtatttcctttg

SEQ ID NO: 315364 - DNA, 33 bp, Homo sapien
atctgacgcagcaagctgattgtatttcctttg

SEQ ID NO: 315365 - DNA, 33 bp, Homo sapien
tttaggggccatttcaaatttttcttgacagtc

SEQ ID NO: 315366 - DNA, 33 bp, Homo sapien
tttaggggccatttcagatttttcttgacagtc

SEQ ID NO: 315367 - DNA, 33 bp, Homo sapien
acagttaaggcattaaagacaagggcaatattg

SEQ ID NO: 315368 - DNA, 33 bp, Homo sapien
acagttaaggcattaaggacaagggcaatattg

SEQ ID NO: 315369 - DNA, 33 bp, Homo sapien
cttgggattcacagataaataggacatggaata

SEQ ID NO: 315370 - DNA, 33 bp, Homo sapien
cttgggattcacagatgaataggacatggaata

SEQ ID NO: 315371 - DNA, 33 bp, Homo sapien
caaagttcagacccaaattggcaagcaaaagtc

SEQ ID NO: 315372 - DNA, 33 bp, Homo sapien
caaagttcagacccaacttggcaagcaaaagtc

SEQ ID NO: 315373 - DNA, 33 bp, Homo sapien
tggctgttctctccccagaaggaaaaacgccca

SEQ ID NO: 315374 - DNA, 33 bp, Homo sapien
tggctgttctctccccggaaggaaaaacgccca

SEQ ID NO: 315375 - DNA, 33 bp, Homo sapien
gagctgtcgtttcttacggaaaatcaggttacg

SEQ ID NO: 315376 - DNA, 33 bp, Homo sapien
gagctgtcgtttcttatggaaaatcaggttacg

SEQ ID NO: 315377 - DNA, 33 bp, Homo sapien
gttggatcaaggtcacaatttgaatgaagctgg

SEQ ID NO: 315378 - DNA, 33 bp, Homo sapien
gttggatcaaggtcaccatttgaatgaagctgg

SEQ ID NO: 315379 - DNA, 33 bp, Homo sapien
ttactgaaacacaaaacgagcctctttcaaggc

SEQ ID NO: 315380 - DNA, 33 bp, Homo sapien
ttactgaaacacaaaatgagcctctttcaaggc

SEQ ID NO: 315381 - DNA, 33 bp, Homo sapien
gctgggtacaaccatgccagttcaaaccagatt

SEQ ID NO: 315382 - DNA, 33 bp, Homo sapien
gctgggtacaaccatgtcagttcaaaccagatt

SEQ ID NO: 315383 - DNA, 33 bp, Homo sapien
tttgagatgtaatctcaaatccagatatactag

SEQ ID NO: 315384 - DNA, 33 bp, Homo sapien
tttgagatgtaatctcgaatccagatatactag

SEQ ID NO: 315385 - DNA, 33 bp, Homo sapien
tgtctctcaaacccacagtgggcttcagtctct

SEQ ID NO: 315386 - DNA, 33 bp, Homo sapien
tgtctctcaaacccacggtgggcttcagtctct

SEQ ID NO: 315387 - DNA, 33 bp, Homo sapien
cctccactttgaatccaccaggcccactctaat

SEQ ID NO: 315388 - DNA, 33 bp, Homo sapien
cctccactttgaatccgccaggcccactctaat

SEQ ID NO: 315389 - DNA, 33 bp, Homo sapien
gtccatgaactcagaacgtgcaaacctagtatt

SEQ ID NO: 315390 - DNA, 33 bp, Homo sapien
gtccatgaactcagaatgtgcaaacctagtatt

SEQ ID NO: 315391 - DNA, 33 bp, Homo sapien
gtcctcagggcgaatcaactgtcctcggaacag

SEQ ID NO: 315392 - DNA, 33 bp, Homo sapien
gtcctcagggcgaatctactgtcctcggaacag

SEQ ID NO: 315393 - DNA, 33 bp, Homo sapien
ctcccccagctataaacggagcagaaccaggaa

SEQ ID NO: 315394 - DNA, 33 bp, Homo sapien
ctcccccagctataaatggagcagaaccaggaa

SEQ ID NO: 315395 - DNA, 33 bp, Homo sapien
aaatcttactcttcccgatgacttggctgagtg

SEQ ID NO: 315396 - DNA, 33 bp, Homo sapien
aaatcttactcttccctatgacttggctgagtg

SEQ ID NO: 315397 - DNA, 33 bp, Homo sapien
ttggtgtgttctgtcactacagtcccctactgc

SEQ ID NO: 315398 - DNA, 33 bp, Homo sapien
ttggtgtgttctgtcattacagtcccctactgc

SEQ ID NO: 315399 - DNA, 33 bp, Homo sapien
atgataatgctaatacaagaatctccttgaaga

SEQ ID NO: 315400 - DNA, 33 bp, Homo sapien
atgataatgctaatacgagaatctccttgaaga

SEQ ID NO: 315401 - DNA, 33 bp, Homo sapien
gaggcgagccttgaacgactagcctctgttgaa

SEQ ID NO: 315402 - DNA, 33 bp, Homo sapien
gaggcgagccttgaactactagcctctgttgaa

SEQ ID NO: 315403 - DNA, 33 bp, Homo sapien
tgtctcaactcctgcacctaaagaaaaaaaagt

SEQ ID NO: 315404 - DNA, 33 bp, Homo sapien
tgtctcaactcctgcagctaaagaaaaaaaagt

SEQ ID NO: 315405 - DNA, 33 bp, Homo sapien
aatacacactcaaaacagctatcacatcactgc

SEQ ID NO: 315406 - DNA, 33 bp, Homo sapien
aatacacactcaaaacggctatcacatcactgc

SEQ ID NO: 315407 - DNA, 33 bp, Homo sapien
tctgaaataatgcatccatgaacaaatgaattg

SEQ ID NO: 315408 - DNA, 33 bp, Homo sapien
tctgaaataatgcatctatgaacaaatgaattg

SEQ ID NO: 315409 - DNA, 33 bp, Homo sapien
gacagctggaacattcacagtgctgtttcctta

SEQ ID NO: 315410 - DNA, 33 bp, Homo sapien
gacagctggaacattcgcagtgctgtttcctta

SEQ ID NO: 315411 - DNA, 33 bp, Homo sapien
ttgaccctgatggagaaaactctactctatcct

SEQ ID NO: 315412 - DNA, 33 bp, Homo sapien
ttgaccctgatggagagaactctactctatcct

SEQ ID NO: 315413 - DNA, 33 bp, Homo sapien
ttcctcctttcggaaccacttcacataatcctc

SEQ ID NO: 315414 - DNA, 33 bp, Homo sapien
ttcctcctttcggaacgacttcacataatcctc

SEQ ID NO: 315415 - DNA, 33 bp, Homo sapien
aaggaaatacctcaatccttatgcttcaggctg

SEQ ID NO: 315416 - DNA, 33 bp, Homo sapien
aaggaaatacctcaattcttatgcttcaggctg

SEQ ID NO: 315417 - DNA, 33 bp, Homo sapien
tcattttcatgtcggccatagtttccatgccta

SEQ ID NO: 315418 - DNA, 33 bp, Homo sapien
tcattttcatgtcggctatagtttccatgccta

SEQ ID NO: 315419 - DNA, 33 bp, Homo sapien
ggcctgatcccattaactacttcctctgagagt

SEQ ID NO: 315420 - DNA, 33 bp, Homo sapien
ggcctgatcccattaagtacttcctctgagagt

SEQ ID NO: 315421 - DNA, 33 bp, Homo sapien
aagaacagaagaataccacatgaatggcggcag

SEQ ID NO: 315422 - DNA, 33 bp, Homo sapien
aagaacagaagaatactacatgaatggcggcag

SEQ ID NO: 315423 - DNA, 33 bp, Homo sapien
gagggccagaggtcaaatacagtgcagagaggt

SEQ ID NO: 315424 - DNA, 33 bp, Homo sapien
gagggccagaggtcaagtacagtgcagagaggt

SEQ ID NO: 315425 - DNA, 33 bp, Homo sapien
gcagtgctcgtataaacctcctgaaacattgct

SEQ ID NO: 315426 - DNA, 33 bp, Homo sapien
gcagtgctcgtataaatctcctgaaacattgct

SEQ ID NO: 315427 - DNA, 33 bp, Homo sapien
ggcacagtgattgcagcaagagtgacttttcca

SEQ ID NO: 315428 - DNA, 33 bp, Homo sapien
ggcacagtgattgcagtaagagtgacttttcca

SEQ ID NO: 315429 - DNA, 33 bp, Homo sapien
ccctgcctaagggcctcacctagaatggggctt

SEQ ID NO: 315430 - DNA, 33 bp, Homo sapien
ccctgcctaagggcctgacctagaatggggctt

SEQ ID NO: 315431 - DNA, 33 bp, Homo sapien
gctcatatgggtttctaaaagggagacaggcca

SEQ ID NO: 315432 - DNA, 33 bp, Homo sapien
gctcatatgggtttctgaaagggagacaggcca

SEQ ID NO: 315433 - DNA, 33 bp, Homo sapien
gttggtctgagttgaaacatattgctgagaaga

SEQ ID NO: 315434 - DNA, 33 bp, Homo sapien
gttggtctgagttgaaccatattgctgagaaga

SEQ ID NO: 315435 - DNA, 33 bp, Homo sapien
aggtcagaaggggtcacgcagaggctgtaggga

SEQ ID NO: 315436 - DNA, 33 bp, Homo sapien
aggtcagaaggggtcatgcagaggctgtaggga

SEQ ID NO: 315437 - DNA, 33 bp, Homo sapien
ctgtgcacagtgacaaggagtgtaattgaaccc

SEQ ID NO: 315438 - DNA, 33 bp, Homo sapien
ctgtgcacagtgacaatgagtgtaattgaaccc

SEQ ID NO: 315439 - DNA, 33 bp, Homo sapien
tgaggattctgctcctaagacagccaggaccag

SEQ ID NO: 315440 - DNA, 33 bp, Homo sapien
tgaggattctgctcctgagacagccaggaccag

SEQ ID NO: 315441 - DNA, 33 bp, Homo sapien
agccaggtgttcctcaagtgatcagatatgcta

SEQ ID NO: 315442 - DNA, 33 bp, Homo sapien
agccaggtgttcctcatgtgatcagatatgcta

SEQ ID NO: 315443 - DNA, 33 bp, Homo sapien
gggggcctctgaaagacgaggggaagtcggcat

SEQ ID NO: 315444 - DNA, 33 bp, Homo sapien
gggggcctctgaaagatgaggggaagtcggcat

SEQ ID NO: 315445 - DNA, 33 bp, Homo sapien
tttccagggctgccccccaagaagcaaatctaa

SEQ ID NO: 315446 - DNA, 33 bp, Homo sapien
tttccagggctgccccgcaagaagcaaatctaa

SEQ ID NO: 315447 - DNA, 33 bp, Homo sapien
gcaatgttcccagctacggtaagaagcaaagag

SEQ ID NO: 315448 - DNA, 33 bp, Homo sapien
gcaatgttcccagctatggtaagaagcaaagag

SEQ ID NO: 315449 - DNA, 33 bp, Homo sapien
actagccaggagaaaacctgtgactgaagaaac

SEQ ID NO: 315450 - DNA, 33 bp, Homo sapien
actagccaggagaaaagctgtgactgaagaaac

SEQ ID NO: 315451 - DNA, 33 bp, Homo sapien
tatgcacctaacaacacagtgtccaaatgtgtg

SEQ ID NO: 315452 - DNA, 33 bp, Homo sapien
tatgcacctaacaacagagtgtccaaatgtgtg

SEQ ID NO: 315453 - DNA, 33 bp, Homo sapien
tcaaacactacaacatcagatcccagcttcccc

SEQ ID NO: 315454 - DNA, 33 bp, Homo sapien
tcaaacactacaacattagatcccagcttcccc

SEQ ID NO: 315455 - DNA, 33 bp, Homo sapien
gaagtggaaacagagactacaaagtggggagta

SEQ ID NO: 315456 - DNA, 33 bp, Homo sapien
gaagtggaaacagagagtacaaagtggggagta

SEQ ID NO: 315457 - DNA, 33 bp, Homo sapien
gagaaaccagatatgcaaatgtgccaaaattct

SEQ ID NO: 315458 - DNA, 33 bp, Homo sapien
gagaaaccagatatgcgaatgtgccaaaattct

SEQ ID NO: 315459 - DNA, 33 bp, Homo sapien
caaggatagaataaaaaatgcgtgtgaatcaaa

SEQ ID NO: 315460 - DNA, 33 bp, Homo sapien
caaggatagaataaaacatgcgtgtgaatcaaa

SEQ ID NO: 315461 - DNA, 33 bp, Homo sapien
cttatttgtatatccacggctaggtctaaagag

SEQ ID NO: 315462 - DNA, 33 bp, Homo sapien
cttatttgtatatccatggctaggtctaaagag

SEQ ID NO: 315463 - DNA, 33 bp, Homo sapien
tcagcattccccccaccgcgagacctacaatgt

SEQ ID NO: 315464 - DNA, 33 bp, Homo sapien
tcagcattccccccactgcgagacctacaatgt

SEQ ID NO: 315465 - DNA, 33 bp, Homo sapien
acggaaagggaaccaactctgagattcccacat

SEQ ID NO: 315466 - DNA, 33 bp, Homo sapien
acggaaagggaaccaattctgagattcccacat

SEQ ID NO: 315467 - DNA, 33 bp, Homo sapien
gggaagacactggtatcagagctggtgtcagga

SEQ ID NO: 315468 - DNA, 33 bp, Homo sapien
gggaagacactggtattagagctggtgtcagga

SEQ ID NO: 315469 - DNA, 33 bp, Homo sapien
cgatatctttgctagaatccagaaagagtctta

SEQ ID NO: 315470 - DNA, 33 bp, Homo sapien
cgatatctttgctagagtccagaaagagtctta

SEQ ID NO: 315471 - DNA, 33 bp, Homo sapien
ttctggacttaattcccatgcatgaggtactgt

SEQ ID NO: 315472 - DNA, 33 bp, Homo sapien
ttctggacttaattcctatgcatgaggtactgt

SEQ ID NO: 315473 - DNA, 33 bp, Homo sapien
gaactgtggatgaacacctagagttgtttacaa

SEQ ID NO: 315474 - DNA, 33 bp, Homo sapien
gaactgtggatgaacatctagagttgtttacaa

SEQ ID NO: 315475 - DNA, 33 bp, Homo sapien
tatgttccataagtagaccaggggtatcaccaa

SEQ ID NO: 315476 - DNA, 33 bp, Homo sapien
tatgttccataagtaggccaggggtatcaccaa

SEQ ID NO: 315477 - DNA, 33 bp, Homo sapien
gatggtttaggaatgacagagggaagtgactca

SEQ ID NO: 315478 - DNA, 33 bp, Homo sapien
gatggtttaggaatgatagagggaagtgactca

SEQ ID NO: 315479 - DNA, 33 bp, Homo sapien
gctgcaagaagagcacagcttctctggttaatc

SEQ ID NO: 315480 - DNA, 33 bp, Homo sapien
gctgcaagaagagcacggcttctctggttaatc

SEQ ID NO: 315481 - DNA, 33 bp, Homo sapien
ttccctacccaggaaactctcttgtcaaaccca

SEQ ID NO: 315482 - DNA, 33 bp, Homo sapien
ttccctacccaggaaattctcttgtcaaaccca

SEQ ID NO: 315483 - DNA, 33 bp, Homo sapien
ggagccattgggactaaacaattccagaaaaat

SEQ ID NO: 315484 - DNA, 33 bp, Homo sapien
ggagccattgggactagacaattccagaaaaat

SEQ ID NO: 315485 - DNA, 33 bp, Homo sapien
aagcaagtgagggtcaaacttaggttgtgtgag

SEQ ID NO: 315486 - DNA, 33 bp, Homo sapien
aagcaagtgagggtcagacttaggttgtgtgag

SEQ ID NO: 315487 - DNA, 33 bp, Homo sapien
aaggaaagtcacatccaacttcaacttggcagg

SEQ ID NO: 315488 - DNA, 33 bp, Homo sapien
aaggaaagtcacatccgacttcaacttggcagg

SEQ ID NO: 315489 - DNA, 33 bp, Homo sapien
gagtggtagtccaacagaacttctgaaggggag

SEQ ID NO: 315490 - DNA, 33 bp, Homo sapien
gagtggtagtccaacataacttctgaaggggag

SEQ ID NO: 315491 - DNA, 33 bp, Homo sapien
tggtttcaagagttaccataaagctagagtgaa

SEQ ID NO: 315492 - DNA, 33 bp, Homo sapien
tggtttcaagagttactataaagctagagtgaa

SEQ ID NO: 315493 - DNA, 33 bp, Homo sapien
cagccaccactggagaagtaggcacctgtgtct

SEQ ID NO: 315494 - DNA, 33 bp, Homo sapien
cagccaccactggagatgtaggcacctgtgtct

SEQ ID NO: 315495 - DNA, 33 bp, Homo sapien
gcttaacttttaaggaagtaccaaaatgttttc

SEQ ID NO: 315496 - DNA, 33 bp, Homo sapien
gcttaacttttaaggaggtaccaaaatgttttc

SEQ ID NO: 315497 - DNA, 33 bp, Homo sapien
cagaaacaatgtgaggaaagatttggagttccc

SEQ ID NO: 315498 - DNA, 33 bp, Homo sapien
cagaaacaatgtgaggcaagatttggagttccc

SEQ ID NO: 315499 - DNA, 33 bp, Homo sapien
cacacatgtatagacacacatacaaccttccca

SEQ ID NO: 315500 - DNA, 33 bp, Homo sapien
cacacatgtatagacagacatacaaccttccca

SEQ ID NO: 315501 - DNA, 33 bp, Homo sapien
aggcgcaatgattttacggtagaggtgcttttg

SEQ ID NO: 315502 - DNA, 33 bp, Homo sapien
aggcgcaatgattttatggtagaggtgcttttg

SEQ ID NO: 315503 - DNA, 33 bp, Homo sapien
tgggtactgattaacactgcctggcccactgaa

SEQ ID NO: 315504 - DNA, 33 bp, Homo sapien
tgggtactgattaacattgcctggcccactgaa

SEQ ID NO: 315505 - DNA, 33 bp, Homo sapien
aggcctcacaattaaaactgactacaaaaagaa

SEQ ID NO: 315506 - DNA, 33 bp, Homo sapien
aggcctcacaattaaagctgactacaaaaagaa

SEQ ID NO: 315507 - DNA, 33 bp, Homo sapien
aagtaagttgcattaaaacttcagccttgttaa

SEQ ID NO: 315508 - DNA, 33 bp, Homo sapien
aagtaagttgcattaagacttcagccttgttaa

SEQ ID NO: 315509 - DNA, 33 bp, Homo sapien
cagcaggatttactaccgggtgagctggggctg

SEQ ID NO: 315510 - DNA, 33 bp, Homo sapien
cagcaggatttactactgggtgagctggggctg

SEQ ID NO: 315511 - DNA, 33 bp, Homo sapien
tcccaccaggctcagacgtggtagccccaggaa

SEQ ID NO: 315512 - DNA, 33 bp, Homo sapien
tcccaccaggctcagatgtggtagccccaggaa

SEQ ID NO: 315513 - DNA, 33 bp, Homo sapien
aaccagttcagaggaaactaatccttgcactta

SEQ ID NO: 315514 - DNA, 33 bp, Homo sapien
aaccagttcagaggaacctaatccttgcactta

SEQ ID NO: 315515 - DNA, 33 bp, Homo sapien
gaatgtcagaagcctcacagcactgcttattct

SEQ ID NO: 315516 - DNA, 33 bp, Homo sapien
gaatgtcagaagcctcgcagcactgcttattct

SEQ ID NO: 315517 - DNA, 33 bp, Homo sapien
caaccctcgcattcgaaagatgtggaaactgtt

SEQ ID NO: 315518 - DNA, 33 bp, Homo sapien
caaccctcgcattcgagagatgtggaaactgtt

SEQ ID NO: 315519 - DNA, 33 bp, Homo sapien
aatgaagaagttggatgagaccacatcaaagca

SEQ ID NO: 315520 - DNA, 33 bp, Homo sapien
aatgaagaagttggattagaccacatcaaagca

SEQ ID NO: 315521 - DNA, 33 bp, Homo sapien
gactggaattcttccacaggtaatgaaaatggc

SEQ ID NO: 315522 - DNA, 33 bp, Homo sapien
gactggaattcttccataggtaatgaaaatggc

SEQ ID NO: 315523 - DNA, 33 bp, Homo sapien
acgtgtaatttatgacaggacaaaaggtaaaag

SEQ ID NO: 315524 - DNA, 33 bp, Homo sapien
acgtgtaatttatgaccggacaaaaggtaaaag

SEQ ID NO: 315525 - DNA, 33 bp, Homo sapien
gcaggtcttctgaacacggaaacaaagccccat

SEQ ID NO: 315526 - DNA, 33 bp, Homo sapien
gcaggtcttctgaacatggaaacaaagccccat

SEQ ID NO: 315527 - DNA, 33 bp, Homo sapien
cacaagacttcagggacgaacaggaatccaaat

SEQ ID NO: 315528 - DNA, 33 bp, Homo sapien
cacaagacttcagggatgaacaggaatccaaat

SEQ ID NO: 315529 - DNA, 33 bp, Homo sapien
acaacctgtctaatcaactttattggacacaac

SEQ ID NO: 315530 - DNA, 33 bp, Homo sapien
acaacctgtctaatcacctttattggacacaac

SEQ ID NO: 315531 - DNA, 33 bp, Homo sapien
ttgctctcccctaacaatgcttctagtgaaatt

SEQ ID NO: 315532 - DNA, 33 bp, Homo sapien
ttgctctcccctaacagtgcttctagtgaaatt

SEQ ID NO: 315533 - DNA, 33 bp, Homo sapien
gtctggttttctatgacggtaactcagctgtaa

SEQ ID NO: 315534 - DNA, 33 bp, Homo sapien
gtctggttttctatgatggtaactcagctgtaa

SEQ ID NO: 315535 - DNA, 33 bp, Homo sapien
ttcagctgagtcaccaagattccaccaggcctc

SEQ ID NO: 315536 - DNA, 33 bp, Homo sapien
ttcagctgagtcaccatgattccaccaggcctc

SEQ ID NO: 315537 - DNA, 33 bp, Homo sapien
aatcagtgagccagtacattgaagttaggcaat

SEQ ID NO: 315538 - DNA, 33 bp, Homo sapien
aatcagtgagccagtatattgaagttaggcaat

SEQ ID NO: 315539 - DNA, 33 bp, Homo sapien
ttcacttggcaaaggactattcagtgtagactt

SEQ ID NO: 315540 - DNA, 33 bp, Homo sapien
ttcacttggcaaaggattattcagtgtagactt

SEQ ID NO: 315541 - DNA, 33 bp, Homo sapien
catcttgcagagacccgggcaatcagacccccc

SEQ ID NO: 315542 - DNA, 33 bp, Homo sapien
catcttgcagagaccctggcaatcagacccccc

SEQ ID NO: 315543 - DNA, 33 bp, Homo sapien
cggctgtccacatggcaaccctccaagagctgt

SEQ ID NO: 315544 - DNA, 33 bp, Homo sapien
cggctgtccacatggcgaccctccaagagctgt

SEQ ID NO: 315545 - DNA, 33 bp, Homo sapien
ttgtctcaagcctttaaataaccaacagcactt

SEQ ID NO: 315546 - DNA, 33 bp, Homo sapien
ttgtctcaagcctttatataaccaacagcactt

SEQ ID NO: 315547 - DNA, 33 bp, Homo sapien
acccactgaggactgacgccccaggatgggaag

SEQ ID NO: 315548 - DNA, 33 bp, Homo sapien
acccactgaggactgatgccccaggatgggaag

SEQ ID NO: 315549 - DNA, 33 bp, Homo sapien
agttgtggccttacacactcagcttcttgccat

SEQ ID NO: 315550 - DNA, 33 bp, Homo sapien
agttgtggccttacacgctcagcttcttgccat

SEQ ID NO: 315551 - DNA, 33 bp, Homo sapien
aaagtcccaaatacccacttctggctgaagctt

SEQ ID NO: 315552 - DNA, 33 bp, Homo sapien
aaagtcccaaatacccgcttctggctgaagctt

SEQ ID NO: 315553 - DNA, 33 bp, Homo sapien
acagatatggcaatacacaggaccctagaatgc

SEQ ID NO: 315554 - DNA, 33 bp, Homo sapien
acagatatggcaatacgcaggaccctagaatgc

SEQ ID NO: 315555 - DNA, 33 bp, Homo sapien
aaaataagatatagtacgcaactggaaaccaaa

SEQ ID NO: 315556 - DNA, 33 bp, Homo sapien
aaaataagatatagtatgcaactggaaaccaaa

SEQ ID NO: 315557 - DNA, 33 bp, Homo sapien
aataatgctataaacacggtgtacaaatatctg

SEQ ID NO: 315558 - DNA, 33 bp, Homo sapien
aataatgctataaacatggtgtacaaatatctg

SEQ ID NO: 315559 - DNA, 33 bp, Homo sapien
caccaatcagaagaaaaagaactactgcatttc

SEQ ID NO: 315560 - DNA, 33 bp, Homo sapien
caccaatcagaagaaacagaactactgcatttc

SEQ ID NO: 315561 - DNA, 33 bp, Homo sapien
gcagccctcgcaacccggagtacccaatattct

SEQ ID NO: 315562 - DNA, 33 bp, Homo sapien
gcagccctcgcaaccctgagtacccaatattct

SEQ ID NO: 315563 - DNA, 33 bp, Homo sapien
aggtgccagtatgctacaaaaatgctttgcctt

SEQ ID NO: 315564 - DNA, 33 bp, Homo sapien
aggtgccagtatgctataaaaatgctttgcctt

SEQ ID NO: 315565 - DNA, 33 bp, Homo sapien
ccccatctgctgtgaacaggcttgagcgatgag

SEQ ID NO: 315566 - DNA, 33 bp, Homo sapien
ccccatctgctgtgaagaggcttgagcgatgag

SEQ ID NO: 315567 - DNA, 33 bp, Homo sapien
tgaaaacccagacaaccgagagaccctttctta

SEQ ID NO: 315568 - DNA, 33 bp, Homo sapien
tgaaaacccagacaactgagagaccctttctta

SEQ ID NO: 315569 - DNA, 33 bp, Homo sapien
cttagatatgccaacaatagcaattacaaaaat

SEQ ID NO: 315570 - DNA, 33 bp, Homo sapien
cttagatatgccaacagtagcaattacaaaaat

SEQ ID NO: 315571 - DNA, 33 bp, Homo sapien
ggggcttactggacacggggttagttcttttat

SEQ ID NO: 315572 - DNA, 33 bp, Homo sapien
ggggcttactggacactgggttagttcttttat

SEQ ID NO: 315573 - DNA, 33 bp, Homo sapien
ccccaggtaggtcccaaagagtgggctgtgtcc

SEQ ID NO: 315574 - DNA, 33 bp, Homo sapien
ccccaggtaggtcccagagagtgggctgtgtcc

SEQ ID NO: 315575 - DNA, 33 bp, Homo sapien
aaccactggtgctagaaccctcatctagtgcgt

SEQ ID NO: 315576 - DNA, 33 bp, Homo sapien
aaccactggtgctagagccctcatctagtgcgt

SEQ ID NO: 315577 - DNA, 33 bp, Homo sapien
cagtcaatatattggacgcatgctacaggtact

SEQ ID NO: 315578 - DNA, 33 bp, Homo sapien
cagtcaatatattggaggcatgctacaggtact

SEQ ID NO: 315579 - DNA, 33 bp, Homo sapien
ttaatgccaacgtttcccagaagatgagaattt

SEQ ID NO: 315580 - DNA, 33 bp, Homo sapien
ttaatgccaacgtttcgcagaagatgagaattt

SEQ ID NO: 315581 - DNA, 33 bp, Homo sapien; identical to SEQ ID NO: 315579

SEQ ID NO: 315582 - DNA, 33 bp, Homo sapien; identical to SEQ ID NO: 315580

SEQ ID NO: 315583 - DNA, 33 bp, Homo sapien
cgtctgtactgatcttcaaccaataaaatctca

SEQ ID NO: 315584 - DNA, 33 bp, Homo sapien
cgtctgtactgatctttaaccaataaaatctca

SEQ ID NO: 315585 - DNA, 33 bp, Homo sapien
tatgggactttgagaacagagccctgtggggaa

SEQ ID NO: 315586 - DNA, 33 bp, Homo sapien
tatgggactttgagaatagagccctgtggggaa

SEQ ID NO: 315587 - DNA, 33 bp, Homo sapien
cacttgagtacagaaaccgggaaaaaatgttca

SEQ ID NO: 315588 - DNA, 33 bp, Homo sapien
cacttgagtacagaaatcgggaaaaaatgttca

SEQ ID NO: 315589 - DNA, 33 bp, Homo sapien
ataatagcgcagcttaaagtaggtcataaaaaa

SEQ ID NO: 315590 - DNA, 33 bp, Homo sapien
ataatagcgcagcttacagtaggtcataaaaaa

SEQ ID NO: 315591 - DNA, 33 bp, Homo sapien
tccaaagctcaaagaacgatggaagaatcccca

SEQ ID NO: 315592 - DNA, 33 bp, Homo sapien
tccaaagctcaaagaatgatggaagaatcccca

SEQ ID NO: 315593 - DNA, 33 bp, Homo sapien
ttgtaaagaggagacaatattttcatcattgaa

SEQ ID NO: 315594 - DNA, 33 bp, Homo sapien
ttgtaaagaggagacactattttcatcattgaa

SEQ ID NO: 315595 - DNA, 33 bp, Homo sapien
caggggcctcctagacaccagagagatgaacac

SEQ ID NO: 315596 - DNA, 33 bp, Homo sapien
caggggcctcctagactccagagagatgaacac

SEQ ID NO: 315597 - DNA, 33 bp, Homo sapien
caagttcagataaacccgccatatccagcccta

SEQ ID NO: 315598 - DNA, 33 bp, Homo sapien
caagttcagataaacctgccatatccagcccta

SEQ ID NO: 315599 - DNA, 33 bp, Homo sapien
ggggtttgtgggatgcaaatcctagtagggtca

SEQ ID NO: 315600 - DNA, 33 bp, Homo sapien
ggggtttgtgggatgcgaatcctagtagggtca

SEQ ID NO: 315601 - DNA, 33 bp, Homo sapien
cattaaatggcttgtccaatgagggtgacaaca

SEQ ID NO: 315602 - DNA, 33 bp, Homo sapien
cattaaatggcttgtctaatgagggtgacaaca

SEQ ID NO: 315603 - DNA, 33 bp, Homo sapien
gaattctgttctcagcaaaacttactactcctt

SEQ ID NO: 315604 - DNA, 33 bp, Homo sapien
gaattctgttctcagcgaaacttactactcctt

SEQ ID NO: 315605 - DNA, 33 bp, Homo sapien
gggaatgtaaggaggtcaaatcaaagaccatca

SEQ ID NO: 315606 - DNA, 33 bp, Homo sapien
gggaatgtaaggaggttaaatcaaagaccatca

SEQ ID NO: 315607 - DNA, 33 bp, Homo sapien
aaggaccacactgggacgttcccgcagagcagc

SEQ ID NO: 315608 - DNA, 33 bp, Homo sapien
aaggaccacactgggatgttcccgcagagcagc

SEQ ID NO: 315609 - DNA, 33 bp, Homo sapien
tctttgcaaccctgaactacagggctggacagt

SEQ ID NO: 315610 - DNA, 33 bp, Homo sapien
tctttgcaaccctgaagtacagggctggacagt

SEQ ID NO: 315611 - DNA, 33 bp, Homo sapien
gccttgctctcacagactccgctaacctctttt

SEQ ID NO: 315612 - DNA, 33 bp, Homo sapien
gccttgctctcacagattccgctaacctctttt

SEQ ID NO: 315613 - DNA, 33 bp, Homo sapien
gcccagtgttctggcacggtaaataggagtatc

SEQ ID NO: 315614 - DNA, 33 bp, Homo sapien
gcccagtgttctggcatggtaaataggagtatc

SEQ ID NO: 315615 - DNA, 33 bp, Homo sapien
ttagaccctatgtcctcaaagacttagcctggt

SEQ ID NO: 315616 - DNA, 33 bp, Homo sapien
ttagaccctatgtcctgaaagacttagcctggt

SEQ ID NO: 315617 - DNA, 33 bp, Homo sapien
agccagcaagataccccggacacatcaggagcc

SEQ ID NO: 315618 - DNA, 33 bp, Homo sapien
agccagcaagataccctggacacatcaggagcc

SEQ ID NO: 315619 - DNA, 33 bp, Homo sapien
ccctgttccaagaccacgtccagtcttctccag

SEQ ID NO: 315620 - DNA, 33 bp, Homo sapien
ccctgttccaagaccatgtccagtcttctccag

SEQ ID NO: 315621 - DNA, 33 bp, Homo sapien
tccagcctgggttacaaaacgatgaagaccctg

SEQ ID NO: 315622 - DNA, 33 bp, Homo sapien
tccagcctgggttacagaacgatgaagaccctg

SEQ ID NO: 315623 - DNA, 33 bp, Homo sapien
ctttatctaaaaattaagtagggcgcttgctgg

SEQ ID NO: 315624 - DNA, 33 bp, Homo sapien
ctttatctaaaaattaggtagggcgcttgctgg

SEQ ID NO: 315625 - DNA, 33 bp, Homo sapien
cttaactgttgtagcccagtgttgactataagc

SEQ ID NO: 315626 - DNA, 33 bp, Homo sapien
cttaactgttgtagcctagtgttgactataagc

SEQ ID NO: 315627 - DNA, 33 bp, Homo sapien
ttgggcgagagtttcacggtcttaaatgtgttg

SEQ ID NO: 315628 - DNA, 33 bp, Homo sapien
ttgggcgagagtttcatggtcttaaatgtgttg

SEQ ID NO: 315629 - DNA, 33 bp, Homo sapien
gtgagagttgtgtggacatggaatctggctcag

SEQ ID NO: 315630 - DNA, 33 bp, Homo sapien
gtgagagttgtgtggagatggaatctggctcag

SEQ ID NO: 315631 - DNA, 33 bp, Homo sapien
gttgtgtgttaggtaccggggcctcaggagacc

SEQ ID NO: 315632 - DNA, 33 bp, Homo sapien
gttgtgtgttaggtactggggcctcaggagacc

SEQ ID NO: 315633 - DNA, 33 bp, Homo sapien
agtatttgctgaatgacctaataaaagctcgat

SEQ ID NO: 315634 - DNA, 33 bp, Homo sapien
agtatttgctgaatgatctaataaaagctcgat

SEQ ID NO: 315635 - DNA, 33 bp, Homo sapien
cccatggtgtaaaagcgcatctcagcatctttt

SEQ ID NO: 315636 - DNA, 33 bp, Homo sapien
cccatggtgtaaaagctcatctcagcatctttt

SEQ ID NO: 315637 - DNA, 33 bp, Homo sapien
gcatccattgtcatagcagttattacagacaca

SEQ ID NO: 315638 - DNA, 33 bp, Homo sapien
gcatccattgtcatagtagttattacagacaca

SEQ ID NO: 315639 - DNA, 33 bp, Homo sapien
aaaaaagctgcatataaaaacccttaggatttt

SEQ ID NO: 315640 - DNA, 33 bp, Homo sapien
aaaaaagctgcatatagaaacccttaggatttt

SEQ ID NO: 315641 - DNA, 33 bp, Homo sapien
acaacctttacattcaaatgggaacgcctgcct

SEQ ID NO: 315642 - DNA, 33 bp, Homo sapien
acaacctttacattcagatgggaacgcctgcct

SEQ ID NO: 315643 - DNA, 33 bp, Homo sapien
aataatttaatttatcaagtttgccacataagc

SEQ ID NO: 315644 - DNA, 33 bp, Homo sapien
aataatttaatttatcgagtttgccacataagc

SEQ ID NO: 315645 - DNA, 33 bp, Homo sapien
gagaacgactacctgaagccataaagatgttta

SEQ ID NO: 315646 - DNA, 33 bp, Homo sapien
gagaacgactacctgaggccataaagatgttta

SEQ ID NO: 315647 - DNA, 33 bp, Homo sapien
tctcccgattttccaccgagcttccattaaaat

SEQ ID NO: 315648 - DNA, 33 bp, Homo sapien
tctcccgattttccactgagcttccattaaaat

SEQ ID NO: 315649 - DNA, 33 bp, Homo sapien
acttagccattccaaacgttactgaacacgaaa

SEQ ID NO: 315650 - DNA, 33 bp, Homo sapien
acttagccattccaaatgttactgaacacgaaa

SEQ ID NO: 315651 - DNA, 33 bp, Homo sapien
aaggcatgagtccagcacccttcctttctctgt

SEQ ID NO: 315652 - DNA, 33 bp, Homo sapien
aaggcatgagtccagcgcccttcctttctctgt

SEQ ID NO: 315653 - DNA, 33 bp, Homo sapien
ggtaaacgttattaaccaaaatctgtggattag

SEQ ID NO: 315654 - DNA, 33 bp, Homo sapien
ggtaaacgttattaacgaaaatctgtggattag

SEQ ID NO: 315655 - DNA, 33 bp, Homo sapien
accacatccagacctcggacaaatgaggacacc

SEQ ID NO: 315656 - DNA, 33 bp, Homo sapien
accacatccagacctctgacaaatgaggacacc

SEQ ID NO: 315657 - DNA, 33 bp, Homo sapien
tgaagcagcagaaacagtgtagtgtgtagcaga

SEQ ID NO: 315658 - DNA, 33 bp, Homo sapien
tgaagcagcagaaacattgtagtgtgtagcaga

SEQ ID NO: 315659 - DNA, 33 bp, Homo sapien
gccaactctcgcccccacagtcagccagacctg

SEQ ID NO: 315660 - DNA, 33 bp, Homo sapien
gccaactctcgcccccgcagtcagccagacctg

SEQ ID NO: 315661 - DNA, 33 bp, Homo sapien
cctgtaatttaactagaacttgctaaccaactt

SEQ ID NO: 315662 - DNA, 33 bp, Homo sapien
cctgtaatttaactaggacttgctaaccaactt

SEQ ID NO: 315663 - DNA, 33 bp, Homo sapien
aagctgtcactgcaaacgagaacgattagctcc

SEQ ID NO: 315664 - DNA, 33 bp, Homo sapien
aagctgtcactgcaaaggagaacgattagctcc

SEQ ID NO: 315665 - DNA, 33 bp, Homo sapien
accaagataataggaacggtcagtacttataat

SEQ ID NO: 315666 - DNA, 33 bp, Homo sapien
accaagataataggaatggtcagtacttataat

SEQ ID NO: 315667 - DNA, 33 bp, Homo sapien
gttaactttccagtgtaaagagattaccaattt

SEQ ID NO: 315668 - DNA, 33 bp, Homo sapien
gttaactttccagtgtgaagagattaccaattt

SEQ ID NO: 315669 - DNA, 33 bp, Homo sapien
cggcctttcaggataacgtaagtgcagggtgag

SEQ ID NO: 315670 - DNA, 33 bp, Homo sapien
cggcctttcaggataatgtaagtgcagggtgag

SEQ ID NO: 315671 - DNA, 33 bp, Homo sapien
tccctagtttgcatggaatctgaaccctcttcc

SEQ ID NO: 315672 - DNA, 33 bp, Homo sapien
tccctagtttgcatgggatctgaaccctcttcc

SEQ ID NO: 315673 - DNA, 33 bp, Homo sapien
tcaaaaaatgattgtacgtaaactgttcagtag

SEQ ID NO: 315674 - DNA, 33 bp, Homo sapien
tcaaaaaatgattgtatgtaaactgttcagtag

SEQ ID NO: 315675 - DNA, 33 bp, Homo sapien
tatgtaagaaactgacactcagacaaatactat

SEQ ID NO: 315676 - DNA, 33 bp, Homo sapien
tatgtaagaaactgacgctcagacaaatactat

SEQ ID NO: 315677 - DNA, 33 bp, Homo sapien
atttcatttagtataacgtcacggtttatccat

SEQ ID NO: 315678 - DNA, 33 bp, Homo sapien
atttcatttagtataatgtcacggtttatccat

SEQ ID NO: 315679 - DNA, 33 bp, Homo sapien
aatagtggatatgaaaatgctttacaagttaaa

SEQ ID NO: 315680 - DNA, 33 bp, Homo sapien
aatagtggatatgaaagtgctttacaagttaaa

SEQ ID NO: 315681 - DNA, 33 bp, Homo sapien
tcctgatttacagttacagaagacttaggccca

SEQ ID NO: 315682 - DNA, 33 bp, Homo sapien
tcctgatttacagttagagaagacttaggccca

SEQ ID NO: 315683 - DNA, 33 bp, Homo sapien
agtacaaaggaatctcactcctagaatgcttag

SEQ ID NO: 315684 - DNA, 33 bp, Homo sapien
agtacaaaggaatctcgctcctagaatgcttag

SEQ ID NO: 315685 - DNA, 33 bp, Homo sapien
agattgaatttcagagacctttgaaaatttttg

SEQ ID NO: 315686 - DNA, 33 bp, Homo sapien
agattgaatttcagagtcctttgaaaatttttg

SEQ ID NO: 315687 - DNA, 33 bp, Homo sapien
ctgtcctctcttggcacatcttccccttattac

SEQ ID NO: 315688 - DNA, 33 bp, Homo sapien
ctgtcctctcttggcagatcttccccttattac

SEQ ID NO: 315689 - DNA, 33 bp, Homo sapien
tgatggtttagtgtagaaagtataggctctgaa

SEQ ID NO: 315690 - DNA, 33 bp, Homo sapien
tgatggtttagtgtaggaagtataggctctgaa

SEQ ID NO: 315691 - DNA, 33 bp, Homo sapien
cctgaaataagctgatgagagggctggctggca

SEQ ID NO: 315692 - DNA, 33 bp, Homo sapien
cctgaaataagctgattagagggctggctggca

SEQ ID NO: 315693 - DNA, 33 bp, Homo sapien
atttggttccaataaccgcttttcaagtttttg

SEQ ID NO: 315694 - DNA, 33 bp, Homo sapien
atttggttccaataactgcttttcaagtttttg

SEQ ID NO: 315695 - DNA, 33 bp, Homo sapien
cttttctcattcttacacctaataaccaacttg

SEQ ID NO: 315696 - DNA, 33 bp, Homo sapien
cttttctcattcttacccctaataaccaacttg

SEQ ID NO: 315697 - DNA, 33 bp, Homo sapien
ttctttataaccagcaaagttaggcaatcattg

SEQ ID NO: 315698 - DNA, 33 bp, Homo sapien
ttctttataaccagcacagttaggcaatcattg

SEQ ID NO: 315699 - DNA, 33 bp, Homo sapien
ccttgagaaatgctctcacatgggctctcacag

SEQ ID NO: 315700 - DNA, 33 bp, Homo sapien
ccttgagaaatgctcttacatgggctctcacag

SEQ ID NO: 315701 - DNA, 33 bp, Homo sapien
gagagaatggaggaaagtattatccaccgtggg

SEQ ID NO: 315702 - DNA, 33 bp, Homo sapien
gagagaatggaggaaattattatccaccgtggg

SEQ ID NO: 315703 - DNA, 33 bp, Homo sapien
ccacagccctacaaaacaaatataccacaggat

SEQ ID NO: 315704 - DNA, 33 bp, Homo sapien
ccacagccctacaaaataaatataccacaggat

SEQ ID NO: 315705 - DNA, 33 bp, Homo sapien
ataaaatacagtataggccgggcgtggtggcta

SEQ ID NO: 315706 - DNA, 33 bp, Homo sapien
ataaaatacagtatagtccgggcgtggtggcta

SEQ ID NO: 315707 - DNA, 33 bp, Homo sapien
agagcctgcctactcagcgaaaggaggagctgc

SEQ ID NO: 315708 - DNA, 33 bp, Homo sapien
agagcctgcctactcatcgaaaggaggagctgc

SEQ ID NO: 315709 - DNA, 33 bp, Homo sapien
caggtacaaagcacagaaattgtggaatgtacc

SEQ ID NO: 315710 - DNA, 33 bp, Homo sapien
caggtacaaagcacaggaattgtggaatgtacc

SEQ ID NO: 315711 - DNA, 33 bp, Homo sapien
gggagctgaacattataaagtggccttcctgtc

SEQ ID NO: 315712 - DNA, 33 bp, Homo sapien
gggagctgaacattatgaagtggccttcctgtc

SEQ ID NO: 315713 - DNA, 33 bp, Homo sapien
ctgcctctgggatcaactctgctgaggagtggt

SEQ ID NO: 315714 - DNA, 33 bp, Homo sapien
ctgcctctgggatcaattctgctgaggagtggt

SEQ ID NO: 315715 - DNA, 33 bp, Homo sapien
gtctgaaatgttcacaaaagttccctgggtgac

SEQ ID NO: 315716 - DNA, 33 bp, Homo sapien
gtctgaaatgttcacagaagttccctgggtgac

SEQ ID NO: 315717 - DNA, 33 bp, Homo sapien
tgagtcagtcccactccctggaccttagtttcc

SEQ ID NO: 315718 - DNA, 33 bp, Homo sapien
tgagtcagtcccactcgctggaccttagtttcc

SEQ ID NO: 315719 - DNA, 33 bp, Homo sapien
aagagaagacactgcaaaaaatattgaccttgt

SEQ ID NO: 315720 - DNA, 33 bp, Homo sapien
aagagaagacactgcacaaaatattgaccttgt

SEQ ID NO: 315721 - DNA, 33 bp, Homo sapien
atgttagggaggaaaagaactgcattgcagaat

SEQ ID NO: 315722 - DNA, 33 bp, Homo sapien
atgttagggaggaaaataactgcattgcagaat

SEQ ID NO: 315723 - DNA, 33 bp, Homo sapien
gaacagtagacaacaacgaaatcctagacagac

SEQ ID NO: 315724 - DNA, 33 bp, Homo sapien
gaacagtagacaacaatgaaatcctagacagac

SEQ ID NO: 315725 - DNA, 33 bp, Homo sapien
cttgggaacagaataaataccagcttcagggtg

SEQ ID NO: 315726 - DNA, 33 bp, Homo sapien
cttgggaacagaataagtaccagcttcagggtg

SEQ ID NO: 315727 - DNA, 33 bp, Homo sapien
ccaaactcaaagtctacgcccattaaacactaa

SEQ ID NO: 315728 - DNA, 33 bp, Homo sapien
ccaaactcaaagtctatgcccattaaacactaa

SEQ ID NO: 315729 - DNA, 33 bp, Homo sapien
cagcgtcttgcacagacacttgtacaccatgtt

SEQ ID NO: 315730 - DNA, 33 bp, Homo sapien
cagcgtcttgcacagatacttgtacaccatgtt

SEQ ID NO: 315731 - DNA, 33 bp, Homo sapien
tgatctcagaaaaccacgcttgcttttgcctat

SEQ ID NO: 315732 - DNA, 33 bp, Homo sapien
tgatctcagaaaaccatgcttgcttttgcctat

SEQ ID NO: 315733 - DNA, 33 bp, Homo sapien
agtgagaaaatgtaggccttttaattccatatg

SEQ ID NO: 315734 - DNA, 33 bp, Homo sapien
agtgagaaaatgtagggcttttaattccatatg

SEQ ID NO: 315735 - DNA, 33 bp, Homo sapien
atggattttacacttcaaaatttgctaagaagg

SEQ ID NO: 315736 - DNA, 33 bp, Homo sapien
atggattttacacttccaaatttgctaagaagg

SEQ ID NO: 315737 - DNA, 33 bp, Homo sapien
tcagggtaccagtcccccaaacaacctggtcct

SEQ ID NO: 315738 - DNA, 33 bp, Homo sapien
tcagggtaccagtccctcaaacaacctggtcct

SEQ ID NO: 315739 - DNA, 33 bp, Homo sapien
tgagctcagagatgtcaaattatgtgcttagct

SEQ ID NO: 315740 - DNA, 33 bp, Homo sapien
tgagctcagagatgtcgaattatgtgcttagct

SEQ ID NO: 315741 - DNA, 33 bp, Homo sapien
ccatttcaggaaagacagaagatggaaggaagg

SEQ ID NO: 315742 - DNA, 33 bp, Homo sapien
ccatttcaggaaagacggaagatggaaggaagg

SEQ ID NO: 315743 - DNA, 33 bp, Homo sapien
ggatcgctgtgtggaacgacactgggactgtca

SEQ ID NO: 315744 - DNA, 33 bp, Homo sapien
ggatcgctgtgtggaatgacactgggactgtca

SEQ ID NO: 315745 - DNA, 33 bp, Homo sapien
actgaaagtagcaaaccggatgcccgcagggga

SEQ ID NO: 315746 - DNA, 33 bp, Homo sapien
actgaaagtagcaaactggatgcccgcagggga

SEQ ID NO: 315747 - DNA, 33 bp, Homo sapien
aacccaaaggccagccgcctactcatactcata

SEQ ID NO: 315748 - DNA, 33 bp, Homo sapien
aacccaaaggccagcctcctactcatactcata

SEQ ID NO: 315749 - DNA, 33 bp, Homo sapien
ggcagctgctgctccaaacgctgtacgaataag

SEQ ID NO: 315750 - DNA, 33 bp, Homo sapien
ggcagctgctgctccagacgctgtacgaataag

SEQ ID NO: 315751 - DNA, 33 bp, Homo sapien
atcgactttgtaggtaagcagctagacttgggc

SEQ ID NO: 315752 - DNA, 33 bp, Homo sapien
atcgactttgtaggtatgcagctagacttgggc

SEQ ID NO: 315753 - DNA, 33 bp, Homo sapien
tagagatgattaacccagataattataatccca

SEQ ID NO: 315754 - DNA, 33 bp, Homo sapien
tagagatgattaaccctgataattataatccca

SEQ ID NO: 315755 - DNA, 33 bp, Homo sapien
gtgggacactttaagcacttttggatggtgggg

SEQ ID NO: 315756 - DNA, 33 bp, Homo sapien
gtgggacactttaagcgcttttggatggtgggg

SEQ ID NO: 315757 - DNA, 33 bp, Homo sapien
gaattagtacactgcacatagaaagcacgcaat

SEQ ID NO: 315758 - DNA, 33 bp, Homo sapien
gaattagtacactgcatatagaaagcacgcaat

SEQ ID NO: 315759 - DNA, 33 bp, Homo sapien
ggtggagttgtggcaacatcaaacttgtaagaa

SEQ ID NO: 315760 - DNA, 33 bp, Homo sapien
ggtggagttgtggcaatatcaaacttgtaagaa

SEQ ID NO: 315761 - DNA, 33 bp, Homo sapien
ataggtgttatgtacaaataaaacgggacaacg

SEQ ID NO: 315762 - DNA, 33 bp, Homo sapien
ataggtgttatgtacagataaaacgggacaacg

SEQ ID NO: 315763 - DNA, 33 bp, Homo sapien
gttaacttttcttcaagaggaacatccatgttg

SEQ ID NO: 315764 - DNA, 33 bp, Homo sapien
gttaacttttcttcaataggaacatccatgttg

SEQ ID NO: 315765 - DNA, 33 bp, Homo sapien
ggcaactcctccaaccacaggtttccacattat

SEQ ID NO: 315766 - DNA, 33 bp, Homo sapien
ggcaactcctccaaccgcaggtttccacattat

SEQ ID NO: 315767 - DNA, 33 bp, Homo sapien
atctacaaaccaaaaacggacccagtctctggt

SEQ ID NO: 315768 - DNA, 33 bp, Homo sapien
atctacaaaccaaaaatggacccagtctctggt

SEQ ID NO: 315769 - DNA, 33 bp, Homo sapien
gaaattaggaaattgaagtagttggaaatgaca

SEQ ID NO: 315770 - DNA, 33 bp, Homo sapien
gaaattaggaaattgacgtagttggaaatgaca

SEQ ID NO: 315771 - DNA, 33 bp, Homo sapien
attgagtattgtatcacaaggtgcttccatttt

SEQ ID NO: 315772 - DNA, 33 bp, Homo sapien
attgagtattgtatcataaggtgcttccatttt

SEQ ID NO: 315773 - DNA, 33 bp, Homo sapien
atctgtttcagttagcactcccatccatattgg

SEQ ID NO: 315774 - DNA, 33 bp, Homo sapien
atctgtttcagttagcgctcccatccatattgg

SEQ ID NO: 315775 - DNA, 33 bp, Homo sapien
cagttcccctggttcaatagctggaacagtgat

SEQ ID NO: 315776 - DNA, 33 bp, Homo sapien
cagttcccctggttcagtagctggaacagtgat

SEQ ID NO: 315777 - DNA, 33 bp, Homo sapien
ccgagagatgtcaacccatacacaggaagctcc

SEQ ID NO: 315778 - DNA, 33 bp, Homo sapien
ccgagagatgtcaacctatacacaggaagctcc

SEQ ID NO: 315779 - DNA, 33 bp, Homo sapien
gacaattttttcatgcactggagtttgggggga

SEQ ID NO: 315780 - DNA, 33 bp, Homo sapien
gacaattttttcatgcgctggagtttgggggga

SEQ ID NO: 315781 - DNA, 33 bp, Homo sapien
gctgcaactgacctgactcagcagaaaagaaat

SEQ ID NO: 315782 - DNA, 33 bp, Homo sapien
gctgcaactgacctgattcagcagaaaagaaat

SEQ ID NO: 315783 - DNA, 33 bp, Homo sapien
ggaaccatatctaagaagtgctgcagaagctgt

SEQ ID NO: 315784 - DNA, 33 bp, Homo sapien
ggaaccatatctaagacgtgctgcagaagctgt

SEQ ID NO: 315785 - DNA, 33 bp, Homo sapien
agtgggtgtcggatgacgaataaatgagacata

SEQ ID NO: 315786 - DNA, 33 bp, Homo sapien
agtgggtgtcggatgatgaataaatgagacata

SEQ ID NO: 315787 - DNA, 33 bp, Homo sapien
gtcatgttggccaaaaggatgcgtagtgtacca

SEQ ID NO: 315788 - DNA, 33 bp, Homo sapien
gtcatgttggccaaaatgatgcgtagtgtacca

SEQ ID NO: 315789 - DNA, 33 bp, Homo sapien
tcaagggggataagccagacccattgaaggatt

SEQ ID NO: 315790 - DNA, 33 bp, Homo sapien
tcaagggggataagccggacccattgaaggatt

SEQ ID NO: 315791 - DNA, 33 bp, Homo sapien
ggagtcacttgctccacgtacacatgcatctgt

SEQ ID NO: 315792 - DNA, 33 bp, Homo sapien
ggagtcacttgctccaggtacacatgcatctgt

SEQ ID NO: 315793 - DNA, 33 bp, Homo sapien
agacatagtgggcttacgtgaaaaacacccaac

SEQ ID NO: 315794 - DNA, 33 bp, Homo sapien
agacatagtgggcttatgtgaaaaacacccaac

SEQ ID NO: 315795 - DNA, 33 bp, Homo sapien
ctactagaacggggtcacatgatcttctggggt

SEQ ID NO: 315796 - DNA, 33 bp, Homo sapien
ctactagaacggggtcgcatgatcttctggggt

SEQ ID NO: 315797 - DNA, 33 bp, Homo sapien
caacagccacaagaaaacagtggtgctgagatg

SEQ ID NO: 315798 - DNA, 33 bp, Homo sapien
caacagccacaagaaagcagtggtgctgagatg

SEQ ID NO: 315799 - DNA, 33 bp, Homo sapien
caaatgcatttattccaaactgactcagccctc

SEQ ID NO: 315800 - DNA, 33 bp, Homo sapien
caaatgcatttattcccaactgactcagccctc

SEQ ID NO: 315801 - DNA, 33 bp, Homo sapien
agagtcttcatggccaaatcacctcttaaatgt

SEQ ID NO: 315802 - DNA, 33 bp, Homo sapien
agagtcttcatggccatatcacctcttaaatgt

SEQ ID NO: 315803 - DNA, 33 bp, Homo sapien
cagcctgggtgactcacggctaaaagttacaaa

SEQ ID NO: 315804 - DNA, 33 bp, Homo sapien
cagcctgggtgactcatggctaaaagttacaaa

SEQ ID NO: 315805 - DNA, 33 bp, Homo sapien
ggatctggccagaaaccgtatcctccactcctg

SEQ ID NO: 315806 - DNA, 33 bp, Homo sapien
ggatctggccagaaactgtatcctccactcctg

SEQ ID NO: 315807 - DNA, 33 bp, Homo sapien
tgcttagggtccagtaagtggtagccctcctgc

SEQ ID NO: 315808 - DNA, 33 bp, Homo sapien
tgcttagggtccagtatgtggtagccctcctgc

SEQ ID NO: 315809 - DNA, 33 bp, Homo sapien
ctgatctggatttcaaacttgattccactaatt

SEQ ID NO: 315810 - DNA, 33 bp, Homo sapien
ctgatctggatttcaatcttgattccactaatt

SEQ ID NO: 315811 - DNA, 33 bp, Homo sapien
aatcttggggtcttaactggctgttggcccagc

SEQ ID NO: 315812 - DNA, 33 bp, Homo sapien
aatcttggggtcttaattggctgttggcccagc

SEQ ID NO: 315813 - DNA, 33 bp, Homo sapien
cgagctttaaagttcccaggtctaacaccagcc

SEQ ID NO: 315814 - DNA, 33 bp, Homo sapien
cgagctttaaagttccgaggtctaacaccagcc

SEQ ID NO: 315815 - DNA, 33 bp, Homo sapien
tgaaagaagtcagacacgaaaaaagcatgcatg

SEQ ID NO: 315816 - DNA, 33 bp, Homo sapien
tgaaagaagtcagacatgaaaaaagcatgcatg

SEQ ID NO: 315817 - DNA, 33 bp, Homo sapien
taggagaatgttaaccacaaagtagagatatgg

SEQ ID NO: 315818 - DNA, 33 bp, Homo sapien
taggagaatgttaaccgcaaagtagagatatgg

SEQ ID NO: 315819 - DNA, 33 bp, Homo sapien
tacccacctaaatgcaacgtgaacacacatcta

SEQ ID NO: 315820 - DNA, 33 bp, Homo sapien
tacccacctaaatgcagcgtgaacacacatcta

SEQ ID NO: 315821 - DNA, 33 bp, Homo sapien
tccatctgcctccagggagaaactctgccatgg

SEQ ID NO: 315822 - DNA, 33 bp, Homo sapien
tccatctgcctccaggtagaaactctgccatgg

SEQ ID NO: 315823 - DNA, 33 bp, Homo sapien
gctgactgaacatcacgactacatacaagtaca

SEQ ID NO: 315824 - DNA, 33 bp, Homo sapien
gctgactgaacatcactactacatacaagtaca

SEQ ID NO: 315825 - DNA, 33 bp, Homo sapien
ccttgggtttaaattacgcaagtcctgactagc

SEQ ID NO: 315826 - DNA, 33 bp, Homo sapien
ccttgggtttaaattatgcaagtcctgactagc

SEQ ID NO: 315827 - DNA, 33 bp, Homo sapien
ccacttggaggcaaaaaccttctgaagattcca

SEQ ID NO: 315828 - DNA, 33 bp, Homo sapien
ccacttggaggcaaaacccttctgaagattcca

SEQ ID NO: 315829 - DNA, 33 bp, Homo sapien
gtgcagcattagaatacgggtaaagttacagat

SEQ ID NO: 315830 - DNA, 33 bp, Homo sapien
gtgcagcattagaatatgggtaaagttacagat

SEQ ID NO: 315831 - DNA, 33 bp, Homo sapien
cagtgtttccaaaccagctgaaacagtgccctt

SEQ ID NO: 315832 - DNA, 33 bp, Homo sapien
cagtgtttccaaaccatctgaaacagtgccctt

SEQ ID NO: 315833 - DNA, 33 bp, Homo sapien
gtaagaagtggtgagacgtgttcatctggaaac

SEQ ID NO: 315834 - DNA, 33 bp, Homo sapien
gtaagaagtggtgagaggtgttcatctggaaac

SEQ ID NO: 315835 - DNA, 33 bp, Homo sapien
atattaaatatgagaaggccaaggatctgttct

SEQ ID NO: 315836 - DNA, 33 bp, Homo sapien
atattaaatatgagaatgccaaggatctgttct

SEQ ID NO: 315837 - DNA, 33 bp, Homo sapien
ttgaagcccaaacctacggaatcgaaatctaaa

SEQ ID NO: 315838 - DNA, 33 bp, Homo sapien
ttgaagcccaaacctatggaatcgaaatctaaa

SEQ ID NO: 315839 - DNA, 33 bp, Homo sapien
aagtcagggtctcacaatctaatggggggaaaa

SEQ ID NO: 315840 - DNA, 33 bp, Homo sapien
aagtcagggtctcacagtctaatggggggaaaa

SEQ ID NO: 315841 - DNA, 33 bp, Homo sapien
acaaacacaaccaggaataagggcactgatgcc

SEQ ID NO: 315842 - DNA, 33 bp, Homo sapien
acaaacacaaccaggagtaagggcactgatgcc

SEQ ID NO: 315843 - DNA, 33 bp, Homo sapien
gtgtcacttggacctgcacagtatctcctggcc

SEQ ID NO: 315844 - DNA, 33 bp, Homo sapien
gtgtcacttggacctggacagtatctcctggcc

SEQ ID NO: 315845 - DNA, 33 bp, Homo sapien
tggtttttcaagtgaaaggctgcaagtacaaat

SEQ ID NO: 315846 - DNA, 33 bp, Homo sapien
tggtttttcaagtgaagggctgcaagtacaaat

SEQ ID NO: 315847 - DNA, 33 bp, Homo sapien
aaggttggggtgcacacggactgtttctcagcc

SEQ ID NO: 315848 - DNA, 33 bp, Homo sapien
aaggttggggtgcacatggactgtttctcagcc

SEQ ID NO: 315849 - DNA, 33 bp, Homo sapien; identical to SEQ ID NO: 315847

SEQ ID NO: 315850 - DNA, 33 bp, Homo sapien; identical to SEQ ID NO: 315848

SEQ ID NO: 315851 - DNA, 33 bp, Homo sapien
ggaatataatccaaagccttccttttgtgagct

SEQ ID NO: 315852 - DNA, 33 bp, Homo sapien
ggaatataatccaaaggcttccttttgtgagct

SEQ ID NO: 315853 - DNA, 33 bp, Homo sapien
tgtgggcagatccagactacagtgaggtgctct

SEQ ID NO: 315854 - DNA, 33 bp, Homo sapien
tgtgggcagatccagattacagtgaggtgctct

SEQ ID NO: 315855 - DNA, 33 bp, Homo sapien
acctgtctgacaaagacgggtttttcatcagac

SEQ ID NO: 315856 - DNA, 33 bp, Homo sapien
acctgtctgacaaagatgggtttttcatcagac

SEQ ID NO: 315857 - DNA, 33 bp, Homo sapien
cttccctggccaaggcactcaactccactctgt

SEQ ID NO: 315858 - DNA, 33 bp, Homo sapien
cttccctggccaaggcgctcaactccactctgt

SEQ ID NO: 315859 - DNA, 33 bp, Homo sapien
tatgagccattgtgccgagctctcccttcaaat

SEQ ID NO: 315860 - DNA, 33 bp, Homo sapien
tatgagccattgtgcctagctctcccttcaaat

SEQ ID NO: 315861 - DNA, 33 bp, Homo sapien
acctcgtctctaaaaaacaataaacaaaattcg

SEQ ID NO: 315862 - DNA, 33 bp, Homo sapien
acctcgtctctaaaaagcaataaacaaaattcg

SEQ ID NO: 315863 - DNA, 33 bp, Homo sapien
cccactgggtagagtacaagctcattaacatgg

SEQ ID NO: 315864 - DNA, 33 bp, Homo sapien
cccactgggtagagtataagctcattaacatgg

SEQ ID NO: 315865 - DNA, 33 bp, Homo sapien
gattcatcaagaacaactggctaacgtgggaat

SEQ ID NO: 315866 - DNA, 33 bp, Homo sapien
gattcatcaagaacaattggctaacgtgggaat

SEQ ID NO: 315867 - DNA, 33 bp, Homo sapien
acataaatactgggaaccagtgaataacatcta

SEQ ID NO: 315868 - DNA, 33 bp, Homo sapien
acataaatactgggaatcagtgaataacatcta

SEQ ID NO: 315869 - DNA, 33 bp, Homo sapien
gcaaaaatctttacgtcaacagtgacagtgtgg

SEQ ID NO: 315870 - DNA, 33 bp, Homo sapien
gcaaaaatctttacgtgaacagtgacagtgtgg

SEQ ID NO: 315871 - DNA, 33 bp, Homo sapien
taccagaaagacctgaagtgacctcaaaggaca

SEQ ID NO: 315872 - DNA, 33 bp, Homo sapien
taccagaaagacctgacgtgacctcaaaggaca

SEQ ID NO: 315873 - DNA, 33 bp, Homo sapien
tttcattgactcaacactctactcatgcatttc

SEQ ID NO: 315874 - DNA, 33 bp, Homo sapien
tttcattgactcaacattctactcatgcatttc

SEQ ID NO: 315875 - DNA, 33 bp, Homo sapien
gacaccttccataggcccttctgttccttgttt

SEQ ID NO: 315876 - DNA, 33 bp, Homo sapien
gacaccttccataggctcttctgttccttgttt

SEQ ID NO: 315877 - DNA, 33 bp, Homo sapien
cagacaggagtcaaaccaacaaaggcatatgga

SEQ ID NO: 315878 - DNA, 33 bp, Homo sapien
cagacaggagtcaaactaacaaaggcatatgga

SEQ ID NO: 315879 - DNA, 33 bp, Homo sapien
acagtttgattagtacgggtcaggtatttcaat

SEQ ID NO: 315880 - DNA, 33 bp, Homo sapien
acagtttgattagtactggtcaggtatttcaat

SEQ ID NO: 315881 - DNA, 33 bp, Homo sapien
ctcttcttcactgttccatatgacccatcttag

SEQ ID NO: 315882 - DNA, 33 bp, Homo sapien
ctcttcttcactgttctatatgacccatcttag

SEQ ID NO: 315883 - DNA, 33 bp, Homo sapien
catgtggcaagtacataataggataattcagaa

SEQ ID NO: 315884 - DNA, 33 bp, Homo sapien
catgtggcaagtacatgataggataattcagaa

SEQ ID NO: 315885 - DNA, 33 bp, Homo sapien
aaaatattaaaacaacaatgatggctgagttac

SEQ ID NO: 315886 - DNA, 33 bp, Homo sapien
aaaatattaaaacaacgatgatggctgagttac

SEQ ID NO: 315887 - DNA, 33 bp, Homo sapien
tccagttgttctaacacagggtggcagcaaaga

SEQ ID NO: 315888 - DNA, 33 bp, Homo sapien
tccagttgttctaacagagggtggcagcaaaga

SEQ ID NO: 315889 - DNA, 33 bp, Homo sapien
tagactctttcctagagcctatggaagtaatgc

SEQ ID NO: 315890 - DNA, 33 bp, Homo sapien
tagactctttcctagatcctatggaagtaatgc

SEQ ID NO: 315891 - DNA, 33 bp, Homo sapien
gaatttgatccctggaaaggaagaaggaccctg

SEQ ID NO: 315892 - DNA, 33 bp, Homo sapien
gaatttgatccctggagaggaagaaggaccctg

SEQ ID NO: 315893 - DNA, 33 bp, Homo sapien
agactcagatccctcagaccaagagttctctag

SEQ ID NO: 315894 - DNA, 33 bp, Homo sapien
agactcagatccctcataccaagagttctctag

SEQ ID NO: 315895 - DNA, 33 bp, Homo sapien
cttatatgttcttaaaaacaatgtaacatttta

SEQ ID NO: 315896 - DNA, 33 bp, Homo sapien
cttatatgttcttaaagacaatgtaacatttta

SEQ ID NO: 315897 - DNA, 33 bp, Homo sapien
ccagcctcaggtatacgatcttcaaaagtagga

SEQ ID NO: 315898 - DNA, 33 bp, Homo sapien
ccagcctcaggtatactatcttcaaaagtagga

SEQ ID NO: 315899 - DNA, 33 bp, Homo sapien
tgaaacatgtactattaaacgacctagtggttc

SEQ ID NO: 315900 - DNA, 33 bp, Homo sapien
tgaaacatgtactattgaacgacctagtggttc

SEQ ID NO: 315901 - DNA, 33 bp, Homo sapien
cctggagaaattctaacgtatatggagagataa

SEQ ID NO: 315902 - DNA, 33 bp, Homo sapien
cctggagaaattctaatgtatatggagagataa

SEQ ID NO: 315903 - DNA, 33 bp, Homo sapien
cagcaaaatctagtgcagaaactccagaagacc

SEQ ID NO: 315904 - DNA, 33 bp, Homo sapien
cagcaaaatctagtgcggaaactccagaagacc

SEQ ID NO: 315905 - DNA, 33 bp, Homo sapien
ggcagcaagagggtagccatcttcaagctaagg

SEQ ID NO: 315906 - DNA, 33 bp, Homo sapien
ggcagcaagagggtagtcatcttcaagctaagg

SEQ ID NO: 315907 - DNA, 33 bp, Homo sapien
gcgattctgtttgaagaagtaaaggtagatctt

SEQ ID NO: 315908 - DNA, 33 bp, Homo sapien
gcgattctgtttgaaggagtaaaggtagatctt

SEQ ID NO: 315909 - DNA, 33 bp, Homo sapien
ataaatttttgtagaacgtgttgatttgaatag

SEQ ID NO: 315910 - DNA, 33 bp, Homo sapien
ataaatttttgtagaatgtgttgatttgaatag

SEQ ID NO: 315911 - DNA, 33 bp, Homo sapien
tgtgtgtgtgagacaaatctatttggaagaact

SEQ ID NO: 315912 - DNA, 33 bp, Homo sapien
tgtgtgtgtgagacaagtctatttggaagaact

SEQ ID NO: 315913 - DNA, 33 bp, Homo sapien
tttggcatggccaggaaacagctttaagctcag

SEQ ID NO: 315914 - DNA, 33 bp, Homo sapien
tttggcatggccaggagacagctttaagctcag

SEQ ID NO: 315915 - DNA, 33 bp, Homo sapien
ctaaggttgttctccaatggaaaatagctcttt

SEQ ID NO: 315916 - DNA, 33 bp, Homo sapien
ctaaggttgttctccagtggaaaatagctcttt

SEQ ID NO: 315917 - DNA, 33 bp, Homo sapien
tgattcttcggccaaaaataattctaactgggt

SEQ ID NO: 315918 - DNA, 33 bp, Homo sapien
tgattcttcggccaaagataattctaactgggt

SEQ ID NO: 315919 - DNA, 33 bp, Homo sapien
aaactggaagcttcaaattagaaagtgggagga

SEQ ID NO: 315920 - DNA, 33 bp, Homo sapien
aaactggaagcttcaagttagaaagtgggagga

SEQ ID NO: 315921 - DNA, 33 bp, Homo sapien
gcagattttgttcatacagaaacctgaaaaaca

SEQ ID NO: 315922 - DNA, 33 bp, Homo sapien
gcagattttgttcatatagaaacctgaaaaaca

SEQ ID NO: 315923 - DNA, 33 bp, Homo sapien
caatgggaaccagaaacagcaggttaggaatca

SEQ ID NO: 315924 - DNA, 33 bp, Homo sapien
caatgggaaccagaaagagcaggttaggaatca

SEQ ID NO: 315925 - DNA, 33 bp, Homo sapien
ggggatctcagtggaacgtcaacagcatccgct

SEQ ID NO: 315926 - DNA, 33 bp, Homo sapien
ggggatctcagtggaatgtcaacagcatccgct

SEQ ID NO: 315927 - DNA, 33 bp, Homo sapien
aggaatgggaagtatagaccagtgatttccagg

SEQ ID NO: 315928 - DNA, 33 bp, Homo sapien
aggaatgggaagtatataccagtgatttccagg

SEQ ID NO: 315929 - DNA, 33 bp, Homo sapien
tgtgtgcttgtcccgacccccttaaatgtagag

SEQ ID NO: 315930 - DNA, 33 bp, Homo sapien
tgtgtgcttgtcccgatccccttaaatgtagag

SEQ ID NO: 315931 - DNA, 33 bp, Homo sapien
tagcaggacgaaaataggagggacaaaattcag

SEQ ID NO: 315932 - DNA, 33 bp, Homo sapien
tagcaggacgaaaatatgagggacaaaattcag

SEQ ID NO: 315933 - DNA, 33 bp, Homo sapien
ctctgaatggtaggaacacagatgggttataga

SEQ ID NO: 315934 - DNA, 33 bp, Homo sapien
ctctgaatggtaggaatacagatgggttataga

SEQ ID NO: 315935 - DNA, 33 bp, Homo sapien
cacacaaaatgctttcaaagtcacaggcaaaag

SEQ ID NO: 315936 - DNA, 33 bp, Homo sapien
cacacaaaatgctttcgaagtcacaggcaaaag

SEQ ID NO: 315937 - DNA, 33 bp, Homo sapien
caggtacacctaagtacacaagcaaagtaattt

SEQ ID NO: 315938 - DNA, 33 bp, Homo sapien
caggtacacctaagtagacaagcaaagtaattt

SEQ ID NO: 315939 - DNA, 33 bp, Homo sapien
ggtcaattgtactccacgcaaattacaactcag

SEQ ID NO: 315940 - DNA, 33 bp, Homo sapien
ggtcaattgtactccatgcaaattacaactcag

SEQ ID NO: 315941 - DNA, 33 bp, Homo sapien
cctagagactctggaaagctccgaagccacaca

SEQ ID NO: 315942 - DNA, 33 bp, Homo sapien
cctagagactctggaacgctccgaagccacaca

SEQ ID NO: 315943 - DNA, 33 bp, Homo sapien
gttacttatcttttcactattgagttacaagag

SEQ ID NO: 315944 - DNA, 33 bp, Homo sapien
gttacttatcttttcattattgagttacaagag

SEQ ID NO: 315945 - DNA, 33 bp, Homo sapien
tctccttggttttcacaacagcgggtgagttct

SEQ ID NO: 315946 - DNA, 33 bp, Homo sapien
tctccttggttttcacgacagcgggtgagttct

SEQ ID NO: 315947 - DNA, 33 bp, Homo sapien
gctctctcctccttggccaataatcacctctgg

SEQ ID NO: 315948 - DNA, 33 bp, Homo sapien
gctctctcctccttggtcaataatcacctctgg

SEQ ID NO: 315949 - DNA, 33 bp, Homo sapien
caatatcttggggtcacgtcaacactactttct

SEQ ID NO: 315950 - DNA, 33 bp, Homo sapien
caatatcttggggtcaggtcaacactactttct

SEQ ID NO: 315951 - DNA, 33 bp, Homo sapien
tgtgctgggacaattacgaaggagcatcagcga

SEQ ID NO: 315952 - DNA, 33 bp, Homo sapien
tgtgctgggacaattatgaaggagcatcagcga

SEQ ID NO: 315953 - DNA, 33 bp, Homo sapien
caggtgataccaccacccaccagaaaacaggga

SEQ ID NO: 315954 - DNA, 33 bp, Homo sapien
caggtgataccaccactcaccagaaaacaggga

SEQ ID NO: 315955 - DNA, 33 bp, Homo sapien
acttcttatgggaaaaatgcaaaccgcagaaaa

SEQ ID NO: 315956 - DNA, 33 bp, Homo sapien
acttcttatgggaaaagtgcaaaccgcagaaaa

SEQ ID NO: 315957 - DNA, 33 bp, Homo sapien
ttggtggaggcggctcagagaaccagaaagcaa

SEQ ID NO: 315958 - DNA, 33 bp, Homo sapien
ttggtggaggcggctcggagaaccagaaagcaa

SEQ ID NO: 315959 - DNA, 33 bp, Homo sapien
aaccattgatattttacgcttggtgcttttact

SEQ ID NO: 315960 - DNA, 33 bp, Homo sapien
aaccattgatattttatgcttggtgcttttact

SEQ ID NO: 315961 - DNA, 33 bp, Homo sapien
gacatgactgtaagcacctatttagagccttca

SEQ ID NO: 315962 - DNA, 33 bp, Homo sapien
gacatgactgtaagcagctatttagagccttca

SEQ ID NO: 315963 - DNA, 33 bp, Homo sapien
aagcagaagaacttcagcggaagcaaagattat

SEQ ID NO: 315964 - DNA, 33 bp, Homo sapien
aagcagaagaacttcatcggaagcaaagattat

SEQ ID NO: 315965 - DNA, 33 bp, Homo sapien
attcaatgatgtagagaagggagcgctgtgggt

SEQ ID NO: 315966 - DNA, 33 bp, Homo sapien
attcaatgatgtagagtagggagcgctgtgggt

SEQ ID NO: 315967 - DNA, 33 bp, Homo sapien
catcttcagcacaaaagtaacaccgtccacccc

SEQ ID NO: 315968 - DNA, 33 bp, Homo sapien
catcttcagcacaaaattaacaccgtccacccc

SEQ ID NO: 315969 - DNA, 33 bp, Homo sapien
gttttctcatttaaaactaagcggcaatgctag

SEQ ID NO: 315970 - DNA, 33 bp, Homo sapien
gttttctcatttaaaattaagcggcaatgctag

SEQ ID NO: 315971 - DNA, 33 bp, Homo sapien
gaaactcttctactcactgaaaacatggctctc

SEQ ID NO: 315972 - DNA, 33 bp, Homo sapien
gaaactcttctactcattgaaaacatggctctc

SEQ ID NO: 315973 - DNA, 33 bp, Homo sapien
gccactagcttccatgaatcaaaaaagatactg

SEQ ID NO: 315974 - DNA, 33 bp, Homo sapien
gccactagcttccatggatcaaaaaagatactg

SEQ ID NO: 315975 - DNA, 33 bp, Homo sapien
gttactacactggtaaccctgacagctaccttc

SEQ ID NO: 315976 - DNA, 33 bp, Homo sapien
gttactacactggtaatcctgacagctaccttc

SEQ ID NO: 315977 - DNA, 33 bp, Homo sapien
gataatatatcaacaaaccagcaaaatatcaga

SEQ ID NO: 315978 - DNA, 33 bp, Homo sapien
gataatatatcaacaagccagcaaaatatcaga

SEQ ID NO: 315979 - DNA, 33 bp, Homo sapien
ttcatctgtgacttaaagctgttgccaggccag

SEQ ID NO: 315980 - DNA, 33 bp, Homo sapien
ttcatctgtgacttaaggctgttgccaggccag

SEQ ID NO: 315981 - DNA, 33 bp, Homo sapien
agtgcagggcagccacaacttctgattgctgcc

SEQ ID NO: 315982 - DNA, 33 bp, Homo sapien
agtgcagggcagccacgacttctgattgctgcc

SEQ ID NO: 315983 - DNA, 33 bp, Homo sapien
gcaaataattgatgaacagatgagtatctggaa

SEQ ID NO: 315984 - DNA, 33 bp, Homo sapien
gcaaataattgatgaatagatgagtatctggaa

SEQ ID NO: 315985 - DNA, 33 bp, Homo sapien
acacaaacatccttcacctcattgaaaactgtt

SEQ ID NO: 315986 - DNA, 33 bp, Homo sapien
acacaaacatccttcagctcattgaaaactgtt

SEQ ID NO: 315987 - DNA, 33 bp, Homo sapien
ggggtggtgacaagagacaaggtgaagttggag

SEQ ID NO: 315988 - DNA, 33 bp, Homo sapien
ggggtggtgacaagaggcaaggtgaagttggag

SEQ ID NO: 315989 - DNA, 33 bp, Homo sapien
tttctcagaactatccactcttcttttgccttg

SEQ ID NO: 315990 - DNA, 33 bp, Homo sapien
tttctcagaactatccgctcttcttttgccttg

SEQ ID NO: 315991 - DNA, 33 bp, Homo sapien
gaaaggtcagcacatccaaaaaggaggtgcaca

SEQ ID NO: 315992 - DNA, 33 bp, Homo sapien
gaaaggtcagcacatctaaaaaggaggtgcaca

SEQ ID NO: 315993 - DNA, 33 bp, Homo sapien
gcttgtgagaaatccaactatgtccatcaattt

SEQ ID NO: 315994 - DNA, 33 bp, Homo sapien
gcttgtgagaaatccagctatgtccatcaattt

SEQ ID NO: 315995 - DNA, 33 bp, Homo sapien
acagggtctaagccccagaatttgatcacgcag

SEQ ID NO: 315996 - DNA, 33 bp, Homo sapien
acagggtctaagccccggaatttgatcacgcag

SEQ ID NO: 315997 - DNA, 33 bp, Homo sapien
tattctaatggttatacgtgaaaaatctaaaat

SEQ ID NO: 315998 - DNA, 33 bp, Homo sapien
tattctaatggttatatgtgaaaaatctaaaat

SEQ ID NO: 315999 - DNA, 33 bp, Homo sapien
aacatctcagtagacacacttctttccatcatt

SEQ ID NO: 316000 - DNA, 33 bp, Homo sapien
aacatctcagtagacatacttctttccatcatt

SEQ ID NO: 316001 - DNA, 33 bp, Homo sapien
agatccatgattcaggcccaagtggacagttca

SEQ ID NO: 316002 - DNA, 33 bp, Homo sapien
agatccatgattcaggtccaagtggacagttca

SEQ ID NO: 316003 - DNA, 33 bp, Homo sapien
gaatgtctacatgcaaattctactctgttgtgc

SEQ ID NO: 316004 - DNA, 33 bp, Homo sapien
gaatgtctacatgcaacttctactctgttgtgc

SEQ ID NO: 316005 - DNA, 33 bp, Homo sapien
gtgaagataatggtcaatctagatattaagccc

SEQ ID NO: 316006 - DNA, 33 bp, Homo sapien
gtgaagataatggtcactctagatattaagccc

SEQ ID NO: 316007 - DNA, 33 bp, Homo sapien
taaacttgagtattaccatttggagagatggtc

SEQ ID NO: 316008 - DNA, 33 bp, Homo sapien
taaacttgagtattacgatttggagagatggtc

SEQ ID NO: 316009 - DNA, 33 bp, Homo sapien
agggtttagcaccttccatacaccctagaaatg

SEQ ID NO: 316010 - DNA, 33 bp, Homo sapien
agggtttagcaccttctatacaccctagaaatg

SEQ ID NO: 316011 - DNA, 33 bp, Homo sapien
gctagaaagaacttgaaaaacagcagaaaggac

SEQ ID NO: 316012 - DNA, 33 bp, Homo sapien
gctagaaagaacttgagaaacagcagaaaggac

SEQ ID NO: 316013 - DNA, 33 bp, Homo sapien
taggatgttagcaagacacttgaccctaaagtc

SEQ ID NO: 316014 - DNA, 33 bp, Homo sapien
taggatgttagcaagagacttgaccctaaagtc

SEQ ID NO: 316015 - DNA, 33 bp, Homo sapien
cctctacttggaaggacactgtgagtacaaagt

SEQ ID NO: 316016 - DNA, 33 bp, Homo sapien
cctctacttggaaggatactgtgagtacaaagt

SEQ ID NO: 316017 - DNA, 33 bp, Homo sapien
tctgagaggttaaagagtagccagctcaaagat

SEQ ID NO: 316018 - DNA, 33 bp, Homo sapien
tctgagaggttaaagattagccagctcaaagat

SEQ ID NO: 316019 - DNA, 33 bp, Homo sapien
cccctcaagacaataaacggaatgtaggccaca

SEQ ID NO: 316020 - DNA, 33 bp, Homo sapien
cccctcaagacaataagcggaatgtaggccaca

SEQ ID NO: 316021 - DNA, 33 bp, Homo sapien
aggtgactttgaatataaatgaactctgtaaga

SEQ ID NO: 316022 - DNA, 33 bp, Homo sapien
aggtgactttgaatatcaatgaactctgtaaga

SEQ ID NO: 316023 - DNA, 33 bp, Homo sapien
gacctttatctgagagccaaggagtgaggggct

SEQ ID NO: 316024 - DNA, 33 bp, Homo sapien
gacctttatctgagaggcaaggagtgaggggct

SEQ ID NO: 316025 - DNA, 33 bp, Homo sapien
tgcatgatacataaacaaggcagttcacttttt

SEQ ID NO: 316026 - DNA, 33 bp, Homo sapien
tgcatgatacataaacgaggcagttcacttttt

SEQ ID NO: 316027 - DNA, 33 bp, Homo sapien
ctcagcggacaaaagacaaagctcattgattgt

SEQ ID NO: 316028 - DNA, 33 bp, Homo sapien
ctcagcggacaaaagagaaagctcattgattgt

SEQ ID NO: 316029 - DNA, 33 bp, Homo sapien
gctgcagcttgggaataacatccagagcttacc

SEQ ID NO: 316030 - DNA, 33 bp, Homo sapien
gctgcagcttgggaatgacatccagagcttacc

SEQ ID NO: 316031 - DNA, 33 bp, Homo sapien
acagtgaggaggcacacaatttccacactgaaa

SEQ ID NO: 316032 - DNA, 33 bp, Homo sapien
acagtgaggaggcacagaatttccacactgaaa

SEQ ID NO: 316033 - DNA, 33 bp, Homo sapien
ttgatttcagtctcacaagaacttggacagaga

SEQ ID NO: 316034 - DNA, 33 bp, Homo sapien
ttgatttcagtctcacgagaacttggacagaga

SEQ ID NO: 316035 - DNA, 33 bp, Homo sapien
gcccatatttctggtgcataatttctagagatc

SEQ ID NO: 316036 - DNA, 33 bp, Homo sapien
gcccatatttctggtggataatttctagagatc

SEQ ID NO: 316037 - DNA, 33 bp, Homo sapien
cttgctttgaccataaaaataacttcagacctt

SEQ ID NO: 316038 - DNA, 33 bp, Homo sapien
cttgctttgaccataagaataacttcagacctt

SEQ ID NO: 316039 - DNA, 33 bp, Homo sapien
aaaaataagaaggatacgcggcctatggcaaac

SEQ ID NO: 316040 - DNA, 33 bp, Homo sapien
aaaaataagaaggatatgcggcctatggcaaac

SEQ ID NO: 316041 - DNA, 33 bp, Homo sapien
aaagcggatacaagccaagacactcaagttgaa

SEQ ID NO: 316042 - DNA, 33 bp, Homo sapien
aaagcggatacaagccgagacactcaagttgaa

SEQ ID NO: 316043 - DNA, 33 bp, Homo sapien
gtagtggttgaagtacccatattagaaacatct

SEQ ID NO: 316044 - DNA, 33 bp, Homo sapien
gtagtggttgaagtactcatattagaaacatct

SEQ ID NO: 316045 - DNA, 33 bp, Homo sapien
atggattcttggaaaaacaatcactctacgtat

SEQ ID NO: 316046 - DNA, 33 bp, Homo sapien
atggattcttggaaaagcaatcactctacgtat

SEQ ID NO: 316047 - DNA, 33 bp, Homo sapien
cacctccatcttggaaaataaccaaggtgatac

SEQ ID NO: 316048 - DNA, 33 bp, Homo sapien
cacctccatcttggaacataaccaaggtgatac

SEQ ID NO: 316049 - DNA, 33 bp, Homo sapien
ttctatcctcaagccccagaaggttgacaacag

SEQ ID NO: 316050 - DNA, 33 bp, Homo sapien
ttctatcctcaagccctagaaggttgacaacag

SEQ ID NO: 316051 - DNA, 33 bp, Homo sapien
agataagataaccacccgctcacaggatttcta

SEQ ID NO: 316052 - DNA, 33 bp, Homo sapien
agataagataaccacctgctcacaggatttcta

SEQ ID NO: 316053 - DNA, 33 bp, Homo sapien
ttcccttctcttaatgccatgctccaaaacacc

SEQ ID NO: 316054 - DNA, 33 bp, Homo sapien
ttcccttctcttaatgtcatgctccaaaacacc

SEQ ID NO: 316055 - DNA, 33 bp, Homo sapien
tattactattcctatacaattttgtgtgttggt

SEQ ID NO: 316056 - DNA, 33 bp, Homo sapien
tattactattcctatataattttgtgtgttggt

SEQ ID NO: 316057 - DNA, 33 bp, Homo sapien
gaccaagatttgtatacgcaggaaattttacca

SEQ ID NO: 316058 - DNA, 33 bp, Homo sapien
gaccaagatttgtatatgcaggaaattttacca

SEQ ID NO: 316059 - DNA, 33 bp, Homo sapien
gggtgagccttcccaactctgatgtctgctttc

SEQ ID NO: 316060 - DNA, 33 bp, Homo sapien
gggtgagccttcccaattctgatgtctgctttc

SEQ ID NO: 316061 - DNA, 33 bp, Homo sapien
cattttcatgaccaaagactgagcagagaggct

SEQ ID NO: 316062 - DNA, 33 bp, Homo sapien
cattttcatgaccaaatactgagcagagaggct

SEQ ID NO: 316063 - DNA, 33 bp, Homo sapien
tgaacctcaatgaacccgacaggctgttccctc

SEQ ID NO: 316064 - DNA, 33 bp, Homo sapien
tgaacctcaatgaacctgacaggctgttccctc

SEQ ID NO: 316065 - DNA, 33 bp, Homo sapien
gacaggctgttccctcacaggctcccactagtt

SEQ ID NO: 316066 - DNA, 33 bp, Homo sapien
gacaggctgttccctcccaggctcccactagtt

SEQ ID NO: 316067 - DNA, 33 bp, Homo sapien
ggcccagccagggtgacacttatgctagggagt

SEQ ID NO: 316068 - DNA, 33 bp, Homo sapien
ggcccagccagggtgatacttatgctagggagt

SEQ ID NO: 316069 - DNA, 33 bp, Homo sapien
acaaatccctttactgcaactgcagctctagct

SEQ ID NO: 316070 - DNA, 33 bp, Homo sapien
acaaatccctttactgtaactgcagctctagct

SEQ ID NO: 316071 - DNA, 33 bp, Homo sapien
agcatatggcatttgccaagtgtattagagctg

SEQ ID NO: 316072 - DNA, 33 bp, Homo sapien
agcatatggcatttgctaagtgtattagagctg

SEQ ID NO: 316073 - DNA, 33 bp, Homo sapien
tatgatttctggccccacgatggtcatagtcta

SEQ ID NO: 316074 - DNA, 33 bp, Homo sapien
tatgatttctggcccctcgatggtcatagtcta

SEQ ID NO: 316075 - DNA, 33 bp, Homo sapien
attccttgcttcaaaaacctctggatttctttt

SEQ ID NO: 316076 - DNA, 33 bp, Homo sapien
attccttgcttcaaaaccctctggatttctttt

SEQ ID NO: 316077 - DNA, 33 bp, Homo sapien
gactggggaaaaagacaaggtcatggcctaggt

SEQ ID NO: 316078 - DNA, 33 bp, Homo sapien
gactggggaaaaagacgaggtcatggcctaggt

SEQ ID NO: 316079 - DNA, 33 bp, Homo sapien
ggtctgaagctcctacagataatctttcagatc

SEQ ID NO: 316080 - DNA, 33 bp, Homo sapien
ggtctgaagctcctaccgataatctttcagatc

SEQ ID NO: 316081 - DNA, 33 bp, Homo sapien
tgaggagagccatgaacactcataatacaaagg

SEQ ID NO: 316082 - DNA, 33 bp, Homo sapien
tgaggagagccatgaatactcataatacaaagg

SEQ ID NO: 316083 - DNA, 33 bp, Homo sapien
agccagggcgccaagacggactgttgttatttt

SEQ ID NO: 316084 - DNA, 33 bp, Homo sapien
agccagggcgccaagatggactgttgttatttt

SEQ ID NO: 316085 - DNA, 33 bp, Homo sapien
agtgaagaaactgaaacgatgtagaagagggag

SEQ ID NO: 316086 - DNA, 33 bp, Homo sapien
agtgaagaaactgaaatgatgtagaagagggag

SEQ ID NO: 316087 - DNA, 33 bp, Homo sapien
agcttttattatgttcacctcaatgatgaagaa

SEQ ID NO: 316088 - DNA, 33 bp, Homo sapien
agcttttattatgttcgcctcaatgatgaagaa

SEQ ID NO: 316089 - DNA, 33 bp, Homo sapien
atgggctaggccctcaaaacttaacgcatctac

SEQ ID NO: 316090 - DNA, 33 bp, Homo sapien
atgggctaggccctcagaacttaacgcatctac

SEQ ID NO: 316091 - DNA, 33 bp, Homo sapien
ttttgtgggaacccacaagagggaatgactaac

SEQ ID NO: 316092 - DNA, 33 bp, Homo sapien
ttttgtgggaacccacgagagggaatgactaac

SEQ ID NO: 316093 - DNA, 33 bp, Homo sapien
ccctgcctgtggtgaaagattgtaaccagccct

SEQ ID NO: 316094 - DNA, 33 bp, Homo sapien
ccctgcctgtggtgaaggattgtaaccagccct

SEQ ID NO: 316095 - DNA, 33 bp, Homo sapien
ggaaatgaaggaaaagacatcttgttcagccca

SEQ ID NO: 316096 - DNA, 33 bp, Homo sapien
ggaaatgaaggaaaaggcatcttgttcagccca

SEQ ID NO: 316097 - DNA, 33 bp, Homo sapien
gattcctgactcaggaaggttcgaccgacaatt

SEQ ID NO: 316098 - DNA, 33 bp, Homo sapien
gattcctgactcaggatggttcgaccgacaatt

SEQ ID NO: 316099 - DNA, 33 bp, Homo sapien
aaaaggctggctcacacccccatgtttttactg

SEQ ID NO: 316100 - DNA, 33 bp, Homo sapien
aaaaggctggctcacatccccatgtttttactg

SEQ ID NO: 316101 - DNA, 33 bp, Homo sapien
actgacaactcctcccagctctacacacctact

SEQ ID NO: 316102 - DNA, 33 bp, Homo sapien
actgacaactcctcccggctctacacacctact

SEQ ID NO: 316103 - DNA, 33 bp, Homo sapien
tgactcctctgcatcccgatgtggacgttatgg

SEQ ID NO: 316104 - DNA, 33 bp, Homo sapien
tgactcctctgcatcctgatgtggacgttatgg

SEQ ID NO: 316105 - DNA, 33 bp, Homo sapien
ctcctcttgtcacagacagccatagcttggctg

SEQ ID NO: 316106 - DNA, 33 bp, Homo sapien
ctcctcttgtcacagatagccatagcttggctg

SEQ ID NO: 316107 - DNA, 33 bp, Homo sapien
ccccttacggagttaccatcatcaaaaacaact

SEQ ID NO: 316108 - DNA, 33 bp, Homo sapien
ccccttacggagttacgatcatcaaaaacaact

SEQ ID NO: 316109 - DNA, 33 bp, Homo sapien
aagagattgattccagaactactccgaggatac

SEQ ID NO: 316110 - DNA, 33 bp, Homo sapien
aagagattgattccaggactactccgaggatac

SEQ ID NO: 316111 - DNA, 33 bp, Homo sapien
tccatattacaatgaaaccttaacatttaagag

SEQ ID NO: 316112 - DNA, 33 bp, Homo sapien
tccatattacaatgaacccttaacatttaagag

SEQ ID NO: 316113 - DNA, 33 bp, Homo sapien
tatggtaaggcattaaatgacattaagaccaca

SEQ ID NO: 316114 - DNA, 33 bp, Homo sapien
tatggtaaggcattaagtgacattaagaccaca

SEQ ID NO: 316115 - DNA, 33 bp, Homo sapien
agagtgtttatacataaaaatgaaggacagggc

SEQ ID NO: 316116 - DNA, 33 bp, Homo sapien
agagtgtttatacatacaaatgaaggacagggc

SEQ ID NO: 316117 - DNA, 33 bp, Homo sapien
caaaaatggatcagggaatattgtctcctgaag

SEQ ID NO: 316118 - DNA, 33 bp, Homo sapien
caaaaatggatcaggggatattgtctcctgaag

SEQ ID NO: 316119 - DNA, 33 bp, Homo sapien
acagaactgagtgacccgggggatcctgcatct

SEQ ID NO: 316120 - DNA, 33 bp, Homo sapien
acagaactgagtgacctgggggatcctgcatct

SEQ ID NO: 316121 - DNA, 33 bp, Homo sapien
agactcgcaagatcaaacatctacgagtcttct

SEQ ID NO: 316122 - DNA, 33 bp, Homo sapien
agactcgcaagatcaagcatctacgagtcttct

SEQ ID NO: 316123 - DNA, 33 bp, Homo sapien
aagagagggaggtgacaattaagaaacccaatg

SEQ ID NO: 316124 - DNA, 33 bp, Homo sapien
aagagagggaggtgacgattaagaaacccaatg

SEQ ID NO: 316125 - DNA, 33 bp, Homo sapien
taaccacgccatacacaagacttagccactggc

SEQ ID NO: 316126 - DNA, 33 bp, Homo sapien
taaccacgccatacacgagacttagccactggc

SEQ ID NO: 316127 - DNA, 33 bp, Homo sapien
caccactccaactctcactagttctcaattcca

SEQ ID NO: 316128 - DNA, 33 bp, Homo sapien
caccactccaactctcgctagttctcaattcca

SEQ ID NO: 316129 - DNA, 33 bp, Homo sapien
cagacttaagcatatcactcccctgtttgaagc

SEQ ID NO: 316130 - DNA, 33 bp, Homo sapien
cagacttaagcatatcgctcccctgtttgaagc

SEQ ID NO: 316131 - DNA, 33 bp, Homo sapien
tttctattggtctccaacttacatggattctcc

SEQ ID NO: 316132 - DNA, 33 bp, Homo sapien
tttctattggtctccagcttacatggattctcc

SEQ ID NO: 316133 - DNA, 33 bp, Homo sapien
tatgaacactgcctaaaggttatggagtcagac

SEQ ID NO: 316134 - DNA, 33 bp, Homo sapien
tatgaacactgcctaatggttatggagtcagac

SEQ ID NO: 316135 - DNA, 33 bp, Homo sapien
ctcacgacttctgtccaaacactatgtggtccc

SEQ ID NO: 316136 - DNA, 33 bp, Homo sapien
ctcacgacttctgtcccaacactatgtggtccc

SEQ ID NO: 316137 - DNA, 33 bp, Homo sapien
ttctgccctgttgcaaagccatcaagggatgct

SEQ ID NO: 316138 - DNA, 33 bp, Homo sapien
ttctgccctgttgcaaggccatcaagggatgct

SEQ ID NO: 316139 - DNA, 33 bp, Homo sapien
aaggaagaatgctgacaaagctcacactgtttg

SEQ ID NO: 316140 - DNA, 33 bp, Homo sapien
aaggaagaatgctgacgaagctcacactgtttg

SEQ ID NO: 316141 - DNA, 33 bp, Homo sapien
gtgataatttccaaataactagacaggagagga

SEQ ID NO: 316142 - DNA, 33 bp, Homo sapien
gtgataatttccaaatcactagacaggagagga

SEQ ID NO: 316143 - DNA, 33 bp, Homo sapien
catatttcctggccaactgaactgcagagcaaa

SEQ ID NO: 316144 - DNA, 33 bp, Homo sapien
catatttcctggccaattgaactgcagagcaaa

SEQ ID NO: 316145 - DNA, 33 bp, Homo sapien
gttaggtctttacatacgaatcccttcactcat

SEQ ID NO: 316146 - DNA, 33 bp, Homo sapien
gttaggtctttacatatgaatcccttcactcat

SEQ ID NO: 316147 - DNA, 33 bp, Homo sapien
actatctcagtagtgacgaacatgaatctgcaa

SEQ ID NO: 316148 - DNA, 33 bp, Homo sapien
actatctcagtagtgaggaacatgaatctgcaa

SEQ ID NO: 316149 - DNA, 33 bp, Homo sapien
tcataggccacgtgaaagttggctgtagaactt

SEQ ID NO: 316150 - DNA, 33 bp, Homo sapien
tcataggccacgtgaaggttggctgtagaactt

SEQ ID NO: 316151 - DNA, 33 bp, Homo sapien
gagaatgtccagagttaaaagcagtctgagact

SEQ ID NO: 316152 - DNA, 33 bp, Homo sapien
gagaatgtccagagttgaaagcagtctgagact

SEQ ID NO: 316153 - DNA, 33 bp, Homo sapien
ccttatcatctcagtccgaaactccttaagctg

SEQ ID NO: 316154 - DNA, 33 bp, Homo sapien
ccttatcatctcagtctgaaactccttaagctg

SEQ ID NO: 316155 - DNA, 33 bp, Homo sapien
ttcttcttgctcctcaaaaacactggctgctca

SEQ ID NO: 316156 - DNA, 33 bp, Homo sapien
ttcttcttgctcctcagaaacactggctgctca

SEQ ID NO: 316157 - DNA, 33 bp, Homo sapien
accagctgttgtgacagcatcttccatgacact

SEQ ID NO: 316158 - DNA, 33 bp, Homo sapien
accagctgttgtgacatcatcttccatgacact

SEQ ID NO: 316159 - DNA, 33 bp, Homo sapien
gtctgtgaaattaaaacgcagtgtcaatgggaa

SEQ ID NO: 316160 - DNA, 33 bp, Homo sapien
gtctgtgaaattaaaaggcagtgtcaatgggaa

SEQ ID NO: 316161 - DNA, 33 bp, Homo sapien
atgctgtaataatggaaaaaacaactcacatta

SEQ ID NO: 316162 - DNA, 33 bp, Homo sapien
atgctgtaataatggataaaacaactcacatta

SEQ ID NO: 316163 - DNA, 33 bp, Homo sapien
atgcatttccggggccaaagacacgtgattcac

SEQ ID NO: 316164 - DNA, 33 bp, Homo sapien
atgcatttccggggccgaagacacgtgattcac

SEQ ID NO: 316165 - DNA, 33 bp, Homo sapien
cctgtaggctttctgacaagtcatgtgaaacac

SEQ ID NO: 316166 - DNA, 33 bp, Homo sapien
cctgtaggctttctgagaagtcatgtgaaacac

SEQ ID NO: 316167 - DNA, 33 bp, Homo sapien
tattttctgttttataggtgagctttagatgct

SEQ ID NO: 316168 - DNA, 33 bp, Homo sapien
tattttctgttttatatgtgagctttagatgct

SEQ ID NO: 316169 - DNA, 33 bp, Homo sapien
catgctgtcacctctcaatattggcctatcata

SEQ ID NO: 316170 - DNA, 33 bp, Homo sapien
catgctgtcacctctctatattggcctatcata

SEQ ID NO: 316171 - DNA, 33 bp, Homo sapien
ctcttgcttcctatcgcccccatgtggtaggat

SEQ ID NO: 316172 - DNA, 33 bp, Homo sapien
ctcttgcttcctatcgtccccatgtggtaggat

SEQ ID NO: 316173 - DNA, 33 bp, Homo sapien
aaaagcaaagaaaagaagctcgcaggaaaggaa

SEQ ID NO: 316174 - DNA, 33 bp, Homo sapien
aaaagcaaagaaaagaggctcgcaggaaaggaa

SEQ ID NO: 316175 - DNA, 33 bp, Homo sapien
atatgaaatatcgtgacggacaacctaagtctt

SEQ ID NO: 316176 - DNA, 33 bp, Homo sapien
atatgaaatatcgtgatggacaacctaagtctt

SEQ ID NO: 316177 - DNA, 33 bp, Homo sapien
atagtgaagaaattccacacctgtatatctact

SEQ ID NO: 316178 - DNA, 33 bp, Homo sapien
atagtgaagaaattccgcacctgtatatctact

SEQ ID NO: 316179 - DNA, 33 bp, Homo sapien
ttcacaaagattagaaatgtggaatgcaggagg

SEQ ID NO: 316180 - DNA, 33 bp, Homo sapien
ttcacaaagattagaactgtggaatgcaggagg

SEQ ID NO: 316181 - DNA, 33 bp, Homo sapien
tgcacagaaagcaaccaatgtgagagggagatc

SEQ ID NO: 316182 - DNA, 33 bp, Homo sapien
tgcacagaaagcaaccgatgtgagagggagatc

SEQ ID NO: 316183 - DNA, 33 bp, Homo sapien
atgttgcttttcaccactggataaacattgctt

SEQ ID NO: 316184 - DNA, 33 bp, Homo sapien
atgttgcttttcaccattggataaacattgctt

SEQ ID NO: 316185 - DNA, 33 bp, Homo sapien
attaatggttcaatgacagcaagacattatgtt

SEQ ID NO: 316186 - DNA, 33 bp, Homo sapien
attaatggttcaatgatagcaagacattatgtt

SEQ ID NO: 316187 - DNA, 33 bp, Homo sapien
gtgattctcaagtctaactttgacactgctgaa

SEQ ID NO: 316188 - DNA, 33 bp, Homo sapien
gtgattctcaagtctacctttgacactgctgaa

SEQ ID NO: 316189 - DNA, 33 bp, Homo sapien
taggaaaaaaagcaacggtaatgagccaaaaaa

SEQ ID NO: 316190 - DNA, 33 bp, Homo sapien
taggaaaaaaagcaactgtaatgagccaaaaaa

SEQ ID NO: 316191 - DNA, 33 bp, Homo sapien
ggattaattaatgtgacagctattaactgagtg

SEQ ID NO: 316192 - DNA, 33 bp, Homo sapien
ggattaattaatgtgagagctattaactgagtg

SEQ ID NO: 316193 - DNA, 33 bp, Homo sapien
atcctcttatcagcaactgacaaatcaagtagg

SEQ ID NO: 316194 - DNA, 33 bp, Homo sapien
atcctcttatcagcaattgacaaatcaagtagg

SEQ ID NO: 316195 - DNA, 33 bp, Homo sapien
gtgttttctctgtctacatttttcatcctttta

SEQ ID NO: 316196 - DNA, 33 bp, Homo sapien
gtgttttctctgtctatatttttcatcctttta

SEQ ID NO: 316197 - DNA, 33 bp, Homo sapien
atttaaattcacctcaaaattggatagcaattc

SEQ ID NO: 316198 - DNA, 33 bp, Homo sapien
atttaaattcacctcataattggatagcaattc

SEQ ID NO: 316199 - DNA, 33 bp, Homo sapien
caagagactgcagtaacagcattttttggttga

SEQ ID NO: 316200 - DNA, 33 bp, Homo sapien
caagagactgcagtaatagcattttttggttga

SEQ ID NO: 316201 - DNA, 33 bp, Homo sapien
aatttaacagtatacacaggaggtcaacaaacc

SEQ ID NO: 316202 - DNA, 33 bp, Homo sapien
aatttaacagtatacataggaggtcaacaaacc

SEQ ID NO: 316203 - DNA, 33 bp, Homo sapien
agttaaataaccaaaacggagcatactgcacaa

SEQ ID NO: 316204 - DNA, 33 bp, Homo sapien
agttaaataaccaaaatggagcatactgcacaa

SEQ ID NO: 316205 - DNA, 33 bp, Homo sapien
taatataattagtgtaactgcttaaaactgtat

SEQ ID NO: 316206 - DNA, 33 bp, Homo sapien
taatataattagtgtacctgcttaaaactgtat

SEQ ID NO: 316207 - DNA, 33 bp, Homo sapien
atgccagctaagaaaaaaggtattgcctatggt

SEQ ID NO: 316208 - DNA, 33 bp, Homo sapien
atgccagctaagaaaacaggtattgcctatggt

SEQ ID NO: 316209 - DNA, 33 bp, Homo sapien
gctgtcaactttcatacacaatagattgccaaa

SEQ ID NO: 316210 - DNA, 33 bp, Homo sapien
gctgtcaactttcatatacaatagattgccaaa

SEQ ID NO: 316211 - DNA, 33 bp, Homo sapien
gagagaagtgatcacaatagttcaactaagagt

SEQ ID NO: 316212 - DNA, 33 bp, Homo sapien
gagagaagtgatcacagtagttcaactaagagt

SEQ ID NO: 316213 - DNA, 33 bp, Homo sapien
tcctaacttacagaaccattgtgaagactaaat

SEQ ID NO: 316214 - DNA, 33 bp, Homo sapien
tcctaacttacagaactattgtgaagactaaat

SEQ ID NO: 316215 - DNA, 33 bp, Homo sapien
aggtattgtagagttacaatgatcagctgagat

SEQ ID NO: 316216 - DNA, 33 bp, Homo sapien
aggtattgtagagttataatgatcagctgagat

SEQ ID NO: 316217 - DNA, 33 bp, Homo sapien
ttacttaaatcagctagctaaaataggtatgtg

SEQ ID NO: 316218 - DNA, 33 bp, Homo sapien
ttacttaaatcagctatctaaaataggtatgtg

SEQ ID NO: 316219 - DNA, 33 bp, Homo sapien
gatagtgaaaagtttacaagcagattatttcct

SEQ ID NO: 316220 - DNA, 33 bp, Homo sapien
gatagtgaaaagtttagaagcagattatttcct

SEQ ID NO: 316221 - DNA, 33 bp, Homo sapien
tatatgttctttgactcagaagagctcaaagtg

SEQ ID NO: 316222 - DNA, 33 bp, Homo sapien
tatatgttctttgacttagaagagctcaaagtg

SEQ ID NO: 316223 - DNA, 33 bp, Homo sapien
gtagccactgcctttgaaattcttcagctcata

SEQ ID NO: 316224 - DNA, 33 bp, Homo sapien
gtagccactgcctttgtaattcttcagctcata

SEQ ID NO: 316225 - DNA, 33 bp, Homo sapien
gggggaaaatcaagaaatcatcaatgaggagat

SEQ ID NO: 316226 - DNA, 33 bp, Homo sapien
gggggaaaatcaagaagtcatcaatgaggagat

SEQ ID NO: 316227 - DNA, 33 bp, Homo sapien
gttgcctagaaattgacgacaatggaaaagtca

SEQ ID NO: 316228 - DNA, 33 bp, Homo sapien
gttgcctagaaattgatgacaatggaaaagtca

SEQ ID NO: 316229 - DNA, 33 bp, Homo sapien
aaactcgtagatggagactattcgtatttcctt

SEQ ID NO: 316230 - DNA, 33 bp, Homo sapien
aaactcgtagatggaggctattcgtatttcctt

SEQ ID NO: 316231 - DNA, 33 bp, Homo sapien
tcaggcaccttagtcactccagccttcaggctt

SEQ ID NO: 316232 - DNA, 33 bp, Homo sapien
tcaggcaccttagtcattccagccttcaggctt

SEQ ID NO: 316233 - DNA, 33 bp, Homo sapien
aggaactaaagacttacgtacttctatcagctt

SEQ ID NO: 316234 - DNA, 33 bp, Homo sapien
aggaactaaagacttatgtacttctatcagctt

SEQ ID NO: 316235 - DNA, 33 bp, Homo sapien
ctcctcaaagttgataggtaactgaagctgata

SEQ ID NO: 316236 - DNA, 33 bp, Homo sapien
ctcctcaaagttgatatgtaactgaagctgata

SEQ ID NO: 316237 - DNA, 33 bp, Homo sapien
gagactctgacacacaggatgggaacatctgac

SEQ ID NO: 316238 - DNA, 33 bp, Homo sapien
gagactctgacacacatgatgggaacatctgac

SEQ ID NO: 316239 - DNA, 33 bp, Homo sapien
agggtaaaatagatagacagccaacaaggatac

SEQ ID NO: 316240 - DNA, 33 bp, Homo sapien
agggtaaaatagataggcagccaacaaggatac

SEQ ID NO: 316241 - DNA, 33 bp, Homo sapien
gatatcttcaagagcccgattttgataatttgg

SEQ ID NO: 316242 - DNA, 33 bp, Homo sapien
gatatcttcaagagcctgattttgataatttgg

SEQ ID NO: 316243 - DNA, 33 bp, Homo sapien
ctacttgttggtataaaacgcttcattcagtaa

SEQ ID NO: 316244 - DNA, 33 bp, Homo sapien
ctacttgttggtataacacgcttcattcagtaa

SEQ ID NO: 316245 - DNA, 33 bp, Homo sapien
tagttataaaaaggacaagggatggcgtgttct

SEQ ID NO: 316246 - DNA, 33 bp, Homo sapien
tagttataaaaaggacgagggatggcgtgttct

SEQ ID NO: 316247 - DNA, 33 bp, Homo sapien; identical to SEQ ID NO: 316245

SEQ ID NO: 316248 - DNA, 33 bp, Homo sapien; identical to SEQ ID NO: 316246

SEQ ID NO: 316249 - DNA, 33 bp, Homo sapien
atgtgtaataatgaaactggtgtaattagcata

SEQ ID NO: 316250 - DNA, 33 bp, Homo sapien
atgtgtaataatgaaattggtgtaattagcata

SEQ ID NO: 316251 - DNA, 33 bp, Homo sapien
atgcactttgaagacacaaaggatgttaaagta

SEQ ID NO: 316252 - DNA, 33 bp, Homo sapien
atgcactttgaagacataaaggatgttaaagta

SEQ ID NO: 316253 - DNA, 33 bp, Homo sapien
tactggtagatatgttcaaaagcaaaataaagg

SEQ ID NO: 316254 - DNA, 33 bp, Homo sapien
tactggtagatatgtttaaaagcaaaataaagg

SEQ ID NO: 316255 - DNA, 33 bp, Homo sapien
gtcctccaagtttccacgtaatctgctactgtc

SEQ ID NO: 316256 - DNA, 33 bp, Homo sapien
gtcctccaagtttccatgtaatctgctactgtc

SEQ ID NO: 316257 - DNA, 33 bp, Homo sapien
agacatttatggacaacctttaacttggcattg

SEQ ID NO: 316258 - DNA, 33 bp, Homo sapien
agacatttatggacaatctttaacttggcattg

SEQ ID NO: 316259 - DNA, 33 bp, Homo sapien
gcccacattgttctgcagatcgacaatgcccat

SEQ ID NO: 316260 - DNA, 33 bp, Homo sapien
gcccacattgttctgccgatcgacaatgcccat

SEQ ID NO: 316261 - DNA, 33 bp, Homo sapien
tccttgaggacaacgcaattgagttagaagtta

SEQ ID NO: 316262 - DNA, 33 bp, Homo sapien
tccttgaggacaacgcgattgagttagaagtta

SEQ ID NO: 316263 - DNA, 33 bp, Homo sapien
aagaaaatttcctatcaagtcaacacagaattg

SEQ ID NO: 316264 - DNA, 33 bp, Homo sapien
aagaaaatttcctatcgagtcaacacagaattg

SEQ ID NO: 316265 - DNA, 33 bp, Homo sapien
ttgtcagatctcaaaaacaagattggaaatcat

SEQ ID NO: 316266 - DNA, 33 bp, Homo sapien
ttgtcagatctcaaaagcaagattggaaatcat

SEQ ID NO: 316267 - DNA, 33 bp, Homo sapien
ctgggggcttgaggtacggagatctacctatct

SEQ ID NO: 316268 - DNA, 33 bp, Homo sapien
ctgggggcttgaggtatggagatctacctatct

SEQ ID NO: 316269 - DNA, 33 bp, Homo sapien
tctagggcatagtaaaaacttcacacaagttag

SEQ ID NO: 316270 - DNA, 33 bp, Homo sapien
tctagggcatagtaaatacttcacacaagttag

SEQ ID NO: 316271 - DNA, 33 bp, Homo sapien
acagagtggtactttacagactcagaatgggga

SEQ ID NO: 316272 - DNA, 33 bp, Homo sapien
acagagtggtactttagagactcagaatgggga

SEQ ID NO: 316273 - DNA, 33 bp, Homo sapien
accagacttaaaaaaaacaaagataatgctgca

SEQ ID NO: 316274 - DNA, 33 bp, Homo sapien
accagacttaaaaaaaccaaagataatgctgca

SEQ ID NO: 316275 - DNA, 33 bp, Homo sapien
ggaatctaaattgatgacaccaaatagtactca

SEQ ID NO: 316276 - DNA, 33 bp, Homo sapien
ggaatctaaattgatggcaccaaatagtactca

SEQ ID NO: 316277 - DNA, 33 bp, Homo sapien
cattatgccacattacccctcaggttttctgag

SEQ ID NO: 316278 - DNA, 33 bp, Homo sapien
cattatgccacattacgcctcaggttttctgag

SEQ ID NO: 316279 - DNA, 33 bp, Homo sapien
caagagtggatttggacgatgaagtgatggtga

SEQ ID NO: 316280 - DNA, 33 bp, Homo sapien
caagagtggatttggatgatgaagtgatggtga

SEQ ID NO: 316281 - DNA, 33 bp, Homo sapien
ggaggctggcctcagcactacctgcaggtgatt

SEQ ID NO: 316282 - DNA, 33 bp, Homo sapien
ggaggctggcctcagcgctacctgcaggtgatt

SEQ ID NO: 316283 - DNA, 33 bp, Homo sapien
tttttgtactccctccaaagtatgcaacatact

SEQ ID NO: 316284 - DNA, 33 bp, Homo sapien
tttttgtactccctccgaagtatgcaacatact

SEQ ID NO: 316285 - DNA, 33 bp, Homo sapien
ttgtttttatttacacggaatcagtccacagtt

SEQ ID NO: 316286 - DNA, 33 bp, Homo sapien
ttgtttttatttacactgaatcagtccacagtt

SEQ ID NO: 316287 - DNA, 33 bp, Homo sapien
gcatcatataaattaaaggtgtcattggtaata

SEQ ID NO: 316288 - DNA, 33 bp, Homo sapien
gcatcatataaattaacggtgtcattggtaata

SEQ ID NO: 316289 - DNA, 33 bp, Homo sapien
cccaatattatacttacagagaggcaactaagt

SEQ ID NO: 316290 - DNA, 33 bp, Homo sapien
cccaatattatacttatagagaggcaactaagt

SEQ ID NO: 316291 - DNA, 33 bp, Homo sapien
tttggactttatcctaaaagtgacgaggcgcta

SEQ ID NO: 316292 - DNA, 33 bp, Homo sapien
tttggactttatcctagaagtgacgaggcgcta

SEQ ID NO: 316293 - DNA, 33 bp, Homo sapien
gtggaggcttcttccccgctaggactctatctc

SEQ ID NO: 316294 - DNA, 33 bp, Homo sapien
gtggaggcttcttccctgctaggactctatctc

SEQ ID NO: 316295 - DNA, 33 bp, Homo sapien
cattggttttgtcttacgttggataaaggacag

SEQ ID NO: 316296 - DNA, 33 bp, Homo sapien
cattggttttgtcttatgttggataaaggacag

SEQ ID NO: 316297 - DNA, 33 bp, Homo sapien
tcaagaaggttaaatacgtcaaaggcacattgg

SEQ ID NO: 316298 - DNA, 33 bp, Homo sapien
tcaagaaggttaaatatgtcaaaggcacattgg

SEQ ID NO: 316299 - DNA, 33 bp, Homo sapien
gcttttacctaggcaaatgtgggataagagtat

SEQ ID NO: 316300 - DNA, 33 bp, Homo sapien
gcttttacctaggcaagtgtgggataagagtat

SEQ ID NO: 316301 - DNA, 33 bp, Homo sapien
aactaaaaagggaaagaagatgtgactttcgga

SEQ ID NO: 316302 - DNA, 33 bp, Homo sapien
aactaaaaagggaaagtagatgtgactttcgga

SEQ ID NO: 316303 - DNA, 33 bp, Homo sapien
aggaaccataatgccaaatgacacagtcacatg

SEQ ID NO: 316304 - DNA, 33 bp, Homo sapien
aggaaccataatgccagatgacacagtcacatg

SEQ ID NO: 316305 - DNA, 33 bp, Homo sapien
tctaaatttttctgaaagcatgagaagccactg

SEQ ID NO: 316306 - DNA, 33 bp, Homo sapien
tctaaatttttctgaaggcatgagaagccactg

SEQ ID NO: 316307 - DNA, 33 bp, Homo sapien
catcttctaggggatgaaatctgatctctattc

SEQ ID NO: 316308 - DNA, 33 bp, Homo sapien
catcttctaggggatggaatctgatctctattc

SEQ ID NO: 316309 - DNA, 33 bp, Homo sapien
gatattttgtggccatcagattattcatgaaca

SEQ ID NO: 316310 - DNA, 33 bp, Homo sapien
gatattttgtggccattagattattcatgaaca

SEQ ID NO: 316311 - DNA, 33 bp, Homo sapien
agtaggagacagcacacattcacaagtggctct

SEQ ID NO: 316312 - DNA, 33 bp, Homo sapien
agtaggagacagcacatattcacaagtggctct

SEQ ID NO: 316313 - DNA, 33 bp, Homo sapien
ggagacacaagctacaataaggcttccaagctc

SEQ ID NO: 316314 - DNA, 33 bp, Homo sapien
ggagacacaagctacagtaaggcttccaagctc

SEQ ID NO: 316315 - DNA, 33 bp, Homo sapien
agcatcagacaagttaagtgggggaattaggaa

SEQ ID NO: 316316 - DNA, 33 bp, Homo sapien
agcatcagacaagttaggtgggggaattaggaa

SEQ ID NO: 316317 - DNA, 33 bp, Homo sapien
aaccacctccaaatcactcctcttccagaagcc

SEQ ID NO: 316318 - DNA, 33 bp, Homo sapien
aaccacctccaaatcattcctcttccagaagcc

SEQ ID NO: 316319 - DNA, 33 bp, Homo sapien
tgagacctgctactaccatacagatccttagcc

SEQ ID NO: 316320 - DNA, 33 bp, Homo sapien
tgagacctgctactactatacagatccttagcc

SEQ ID NO: 316321 - DNA, 33 bp, Homo sapien
tcaggctaaaccatgaacacatctgtatatcct

SEQ ID NO: 316322 - DNA, 33 bp, Homo sapien
tcaggctaaaccatgagcacatctgtatatcct

SEQ ID NO: 316323 - DNA, 33 bp, Homo sapien
aataccggccccttaacacaagtgtagtatgag

SEQ ID NO: 316324 - DNA, 33 bp, Homo sapien
aataccggccccttaatacaagtgtagtatgag

SEQ ID NO: 316325 - DNA, 33 bp, Homo sapien
ctgtgggacagacctacgtgggtagtgcacagt

SEQ ID NO: 316326 - DNA, 33 bp, Homo sapien
ctgtgggacagacctatgtgggtagtgcacagt

SEQ ID NO: 316327 - DNA, 33 bp, Homo sapien
cttcaccctttcaccaactgtcctggtaacaat

SEQ ID NO: 316328 - DNA, 33 bp, Homo sapien
cttcaccctttcaccagctgtcctggtaacaat

SEQ ID NO: 316329 - DNA, 33 bp, Homo sapien
agtcatttgtgtagaacaaaaatgacacttgat

SEQ ID NO: 316330 - DNA, 33 bp, Homo sapien
agtcatttgtgtagaataaaaatgacacttgat

SEQ ID NO: 316331 - DNA, 33 bp, Homo sapien
agtatccctatatcaaattaaccttcttctaga

SEQ ID NO: 316332 - DNA, 33 bp, Homo sapien
agtatccctatatcaagttaaccttcttctaga

SEQ ID NO: 316333 - DNA, 33 bp, Homo sapien
cccaactgcattcttcgctggtttggacaatta

SEQ ID NO: 316334 - DNA, 33 bp, Homo sapien
cccaactgcattcttctctggtttggacaatta

SEQ ID NO: 316335 - DNA, 33 bp, Homo sapien
cactattacacttcctaacaaacctttcatgtg

SEQ ID NO: 316336 - DNA, 33 bp, Homo sapien
cactattacacttcctgacaaacctttcatgtg

SEQ ID NO: 316337 - DNA, 33 bp, Homo sapien
ataattaaccacctcccgaggcttggtaatccc

SEQ ID NO: 316338 - DNA, 33 bp, Homo sapien
ataattaaccacctcctgaggcttggtaatccc

SEQ ID NO: 316339 - DNA, 33 bp, Homo sapien
atactaggcaaggaaaagaatacagaagaaacc

SEQ ID NO: 316340 - DNA, 33 bp, Homo sapien
atactaggcaaggaaacgaatacagaagaaacc

SEQ ID NO: 316341 - DNA, 33 bp, Homo sapien
aatttacctagtctgaatacttcatgtaaatac

SEQ ID NO: 316342 - DNA, 33 bp, Homo sapien
aatttacctagtctgactacttcatgtaaatac

SEQ ID NO: 316343 - DNA, 33 bp, Homo sapien
tttggagaaatgtccactcaatcctttgcccat

SEQ ID NO: 316344 - DNA, 33 bp, Homo sapien
tttggagaaatgtccagtcaatcctttgcccat

SEQ ID NO: 316345 - DNA, 33 bp, Homo sapien
acactctgatgttcgcacgatgatgaaattgcc

SEQ ID NO: 316346 - DNA, 33 bp, Homo sapien
acactctgatgttcgcgcgatgatgaaattgcc

SEQ ID NO: 316347 - DNA, 33 bp, Homo sapien
tctaggttcactgtaacaagagtcagtatggaa

SEQ ID NO: 316348 - DNA, 33 bp, Homo sapien
tctaggttcactgtaataagagtcagtatggaa

SEQ ID NO: 316349 - DNA, 33 bp, Homo sapien
gaacttctaaagggaccggatgggattatgtgg

SEQ ID NO: 316350 - DNA, 33 bp, Homo sapien
gaacttctaaagggactggatgggattatgtgg

SEQ ID NO: 316351 - DNA, 33 bp, Homo sapien
tctcagacccaacacagagcaggctccctgttg

SEQ ID NO: 316352 - DNA, 33 bp, Homo sapien
tctcagacccaacacatagcaggctccctgttg

SEQ ID NO: 316353 - DNA, 33 bp, Homo sapien
gcacattatgaggaagcctggtgctttgggttg

SEQ ID NO: 316354 - DNA, 33 bp, Homo sapien
gcacattatgaggaaggctggtgctttgggttg

SEQ ID NO: 316355 - DNA, 33 bp, Homo sapien
aaggaagtcccaaccacaaaggctcgaaacact

SEQ ID NO: 316356 - DNA, 33 bp, Homo sapien
aaggaagtcccaaccataaaggctcgaaacact

SEQ ID NO: 316357 - DNA, 33 bp, Homo sapien
ggataatgaccttccaagaagagtaaaagtgac

SEQ ID NO: 316358 - DNA, 33 bp, Homo sapien
ggataatgaccttccaggaagagtaaaagtgac

SEQ ID NO: 316359 - DNA, 33 bp, Homo sapien
taggaatccccgctgaaagatagatgggaatcc

SEQ ID NO: 316360 - DNA, 33 bp, Homo sapien
taggaatccccgctgagagatagatgggaatcc

SEQ ID NO: 316361 - DNA, 33 bp, Homo sapien
ctaatggaagaaacaccgccttgggagttagat

SEQ ID NO: 316362 - DNA, 33 bp, Homo sapien
ctaatggaagaaacactgccttgggagttagat

SEQ ID NO: 316363 - DNA, 33 bp, Homo sapien
ttcttcaccttgtttccatgatgtagctcaggg

SEQ ID NO: 316364 - DNA, 33 bp, Homo sapien
ttcttcaccttgtttcgatgatgtagctcaggg

SEQ ID NO: 316365 - DNA, 33 bp, Homo sapien
tgtttgctaactatcacgtaactggttttcccc

SEQ ID NO: 316366 - DNA, 33 bp, Homo sapien
tgtttgctaactatcatgtaactggttttcccc

SEQ ID NO: 316367 - DNA, 33 bp, Homo sapien
ggcacaagttagtaataagtctggattcattct

SEQ ID NO: 316368 - DNA, 33 bp, Homo sapien
ggcacaagttagtaatcagtctggattcattct

SEQ ID NO: 316369 - DNA, 33 bp, Homo sapien
tatagggtatgaaataaggggctcctggaaaat

SEQ ID NO: 316370 - DNA, 33 bp, Homo sapien
tatagggtatgaaatatggggctcctggaaaat

SEQ ID NO: 316371 - DNA, 33 bp, Homo sapien
tttgaccagttccaaagataggcaaggatctag

SEQ ID NO: 316372 - DNA, 33 bp, Homo sapien
tttgaccagttccaaatataggcaaggatctag

SEQ ID NO: 316373 - DNA, 33 bp, Homo sapien
atagtatacaacatgacgttttgacatatgtat

SEQ ID NO: 316374 - DNA, 33 bp, Homo sapien
atagtatacaacatgatgttttgacatatgtat

SEQ ID NO: 316375 - DNA, 33 bp, Homo sapien
atggcagggtgactacaaggacatggaattata

SEQ ID NO: 316376 - DNA, 33 bp, Homo sapien
atggcagggtgactacgaggacatggaattata

SEQ ID NO: 316377 - DNA, 33 bp, Homo sapien
accactgggagagaaaaaggcgaacagggacgg

SEQ ID NO: 316378 - DNA, 33 bp, Homo sapien
accactgggagagaaacaggcgaacagggacgg

SEQ ID NO: 316379 - DNA, 33 bp, Homo sapien
tgcacctattggctaacgttgttggtcatcgtt

SEQ ID NO: 316380 - DNA, 33 bp, Homo sapien
tgcacctattggctaatgttgttggtcatcgtt

SEQ ID NO: 316381 - DNA, 33 bp, Homo sapien
atgcttacacttattccaatgtacatttaatta

SEQ ID NO: 316382 - DNA, 33 bp, Homo sapien
atgcttacacttattcgaatgtacatttaatta

SEQ ID NO: 316383 - DNA, 33 bp, Homo sapien
ttgtctaagtttagcccgaggcccccctaacag

SEQ ID NO: 316384 - DNA, 33 bp, Homo sapien
ttgtctaagtttagcctgaggcccccctaacag

SEQ ID NO: 316385 - DNA, 33 bp, Homo sapien
actgaattccagcccccagatgctctgagagcc

SEQ ID NO: 316386 - DNA, 33 bp, Homo sapien
actgaattccagcccctagatgctctgagagcc

SEQ ID NO: 316387 - DNA, 33 bp, Homo sapien
atcatttttttgtatacgttggaagcgctcgtg

SEQ ID NO: 316388 - DNA, 33 bp, Homo sapien
atcatttttttgtatatgttggaagcgctcgtg

SEQ ID NO: 316389 - DNA, 33 bp, Homo sapien
aattactgtatgttaaagtaggagcttacgcct

SEQ ID NO: 316390 - DNA, 33 bp, Homo sapien
aattactgtatgttaaggtaggagcttacgcct

SEQ ID NO: 316391 - DNA, 33 bp, Homo sapien
ttttcaaaataaaaacccattagcagatctttt

SEQ ID NO: 316392 - DNA, 33 bp, Homo sapien
ttttcaaaataaaaactcattagcagatctttt

SEQ ID NO: 316393 - DNA, 33 bp, Homo sapien
gtgtctgaagtgagggaagtattatagaggact

SEQ ID NO: 316394 - DNA, 33 bp, Homo sapien
gtgtctgaagtgaggggagtattatagaggact

SEQ ID NO: 316395 - DNA, 33 bp, Homo sapien
tgtttatttagccataagggttcaaattggatc

SEQ ID NO: 316396 - DNA, 33 bp, Homo sapien
tgtttatttagccataggggttcaaattggatc

SEQ ID NO: 316397 - DNA, 33 bp, Homo sapien
aagagaggaagcaaaacgactgacttcccggcc

SEQ ID NO: 316398 - DNA, 33 bp, Homo sapien
aagagaggaagcaaaatgactgacttcccggcc

SEQ ID NO: 316399 - DNA, 33 bp, Homo sapien
ggtggatccagtaataaatgaatgagagactca

SEQ ID NO: 316400 - DNA, 33 bp, Homo sapien
ggtggatccagtaatagatgaatgagagactca

SEQ ID NO: 316401 - DNA, 33 bp, Homo sapien
ttggtaaaaaaggaaaatctcattggctcacct

SEQ ID NO: 316402 - DNA, 33 bp, Homo sapien
ttggtaaaaaaggaaactctcattggctcacct

SEQ ID NO: 316403 - DNA, 33 bp, Homo sapien
taactttattccactccctgagatgtttctcca

SEQ ID NO: 316404 - DNA, 33 bp, Homo sapien
taactttattccactctctgagatgtttctcca

SEQ ID NO: 316405 - DNA, 33 bp, Homo sapien
aaaagacacaagttggccactctggtaaagatg

SEQ ID NO: 316406 - DNA, 33 bp, Homo sapien
aaaagacacaagttggtcactctggtaaagatg

SEQ ID NO: 316407 - DNA, 33 bp, Homo sapien
aagttatgagaatagacatggtatttaatgcca

SEQ ID NO: 316408 - DNA, 33 bp, Homo sapien
aagttatgagaatagagatggtatttaatgcca

SEQ ID NO: 316409 - DNA, 33 bp, Homo sapien
aaaaatcgtttcaaatcacacaatctatagaat

SEQ ID NO: 316410 - DNA, 33 bp, Homo sapien
aaaaatcgtttcaaatgacacaatctatagaat

SEQ ID NO: 316411 - DNA, 33 bp, Homo sapien
tagattagatgacctaaacagcaaaaatgtatt

SEQ ID NO: 316412 - DNA, 33 bp, Homo sapien
tagattagatgacctacacagcaaaaatgtatt

SEQ ID NO: 316413 - DNA, 33 bp, Homo sapien
catgtcttttgactaacgggcttcgtgtggcaa

SEQ ID NO: 316414 - DNA, 33 bp, Homo sapien
catgtcttttgactaatgggcttcgtgtggcaa

SEQ ID NO: 316415 - DNA, 33 bp, Homo sapien
tattaacaaagcgaaaacgaattaaaagaggtt

SEQ ID NO: 316416 - DNA, 33 bp, Homo sapien
tattaacaaagcgaaaccgaattaaaagaggtt

SEQ ID NO: 316417 - DNA, 33 bp, Homo sapien
gtaaacagggtaaatactattctcatggcaatt

SEQ ID NO: 316418 - DNA, 33 bp, Homo sapien
gtaaacagggtaaatattattctcatggcaatt

SEQ ID NO: 316419 - DNA, 33 bp, Homo sapien
aatatgtactactgataaaggcaggagacaaat

SEQ ID NO: 316420 - DNA, 33 bp, Homo sapien
aatatgtactactgatgaaggcaggagacaaat

SEQ ID NO: 316421 - DNA, 33 bp, Homo sapien
ccattgaaggcagaacaacatgacaccaagagg

SEQ ID NO: 316422 - DNA, 33 bp, Homo sapien
ccattgaaggcagaacgacatgacaccaagagg

SEQ ID NO: 316423 - DNA, 33 bp, Homo sapien
aattacatctgtgaaagaaatctctatttgtaa

SEQ ID NO: 316424 - DNA, 33 bp, Homo sapien
aattacatctgtgaaataaatctctatttgtaa

SEQ ID NO: 316425 - DNA, 33 bp, Homo sapien
ccatcattatgtgacaaaaaaggagcatagtaa

SEQ ID NO: 316426 - DNA, 33 bp, Homo sapien
ccatcattatgtgacataaaaggagcatagtaa

SEQ ID NO: 316427 - DNA, 33 bp, Homo sapien
gtatgatgtttgtacacgaagaaggcatagacc

SEQ ID NO: 316428 - DNA, 33 bp, Homo sapien
gtatgatgtttgtacatgaagaaggcatagacc

SEQ ID NO: 316429 - DNA, 33 bp, Homo sapien
gagatggttgtcagcaactcggggcaggtggta

SEQ ID NO: 316430 - DNA, 33 bp, Homo sapien
gagatggttgtcagcatctcggggcaggtggta

SEQ ID NO: 316431 - DNA, 33 bp, Homo sapien
atcatctactttataactgctcactagtggctc

SEQ ID NO: 316432 - DNA, 33 bp, Homo sapien
atcatctactttataagtgctcactagtggctc

SEQ ID NO: 316433 - DNA, 33 bp, Homo sapien
catgttcttctcttatcaagcaaactccacttc

SEQ ID NO: 316434 - DNA, 33 bp, Homo sapien
catgttcttctcttatgaagcaaactccacttc

SEQ ID NO: 316435 - DNA, 33 bp, Homo sapien
agcaagagtccattagaagtttcattataagtg

SEQ ID NO: 316436 - DNA, 33 bp, Homo sapien
agcaagagtccattaggagtttcattataagtg

SEQ ID NO: 316437 - DNA, 33 bp, Homo sapien
tttagtactcactgtcaagcagccaccatgtgt

SEQ ID NO: 316438 - DNA, 33 bp, Homo sapien
tttagtactcactgtcgagcagccaccatgtgt

SEQ ID NO: 316439 - DNA, 33 bp, Homo sapien
tttctgcatagaaaaaaccataaacatagccaa

SEQ ID NO: 316440 - DNA, 33 bp, Homo sapien
tttctgcatagaaaaagccataaacatagccaa

SEQ ID NO: 316441 - DNA, 33 bp, Homo sapien
ctctctgattcctgacacagtccagttttatgt

SEQ ID NO: 316442 - DNA, 33 bp, Homo sapien
ctctctgattcctgacgcagtccagttttatgt

SEQ ID NO: 316443 - DNA, 33 bp, Homo sapien
agatgtggtgaaaacaaaaagagaactagaatt

SEQ ID NO: 316444 - DNA, 33 bp, Homo sapien
agatgtggtgaaaacagaaagagaactagaatt

SEQ ID NO: 316445 - DNA, 33 bp, Homo sapien
ctctgagttttggatcccggaatacactgaaaa

SEQ ID NO: 316446 - DNA, 33 bp, Homo sapien
ctctgagttttggatctcggaatacactgaaaa

SEQ ID NO: 316447 - DNA, 33 bp, Homo sapien
tagtttagtgcttaaaaatgcaggctgtggagt

SEQ ID NO: 316448 - DNA, 33 bp, Homo sapien
tagtttagtgcttaaagatgcaggctgtggagt

SEQ ID NO: 316449 - DNA, 33 bp, Homo sapien
tagaatgctgttcttaaggaggtaacagtcaaa

SEQ ID NO: 316450 - DNA, 33 bp, Homo sapien
tagaatgctgttcttagggaggtaacagtcaaa

SEQ ID NO: 316451 - DNA, 33 bp, Homo sapien
tcactgggaaggcaagacctagagtcactactg

SEQ ID NO: 316452 - DNA, 33 bp, Homo sapien
tcactgggaaggcaaggcctagagtcactactg

SEQ ID NO: 316453 - DNA, 33 bp, Homo sapien
ctggtgttaactcatacaagctatgtaggacag

SEQ ID NO: 316454 - DNA, 33 bp, Homo sapien
ctggtgttaactcatataagctatgtaggacag

SEQ ID NO: 316455 - DNA, 33 bp, Homo sapien
attcagttgccatccaaatcaagaaaggccttc

SEQ ID NO: 316456 - DNA, 33 bp, Homo sapien
attcagttgccatccagatcaagaaaggccttc

SEQ ID NO: 316457 - DNA, 33 bp, Homo sapien
ccatgaaaacgagttacaggaagagttgctaag

SEQ ID NO: 316458 - DNA, 33 bp, Homo sapien
ccatgaaaacgagttataggaagagttgctaag

SEQ ID NO: 316459 - DNA, 33 bp, Homo sapien
agatacatttttcatcaaatcaaacttttttta

SEQ ID NO: 316460 - DNA, 33 bp, Homo sapien
agatacatttttcatcgaatcaaacttttttta

SEQ ID NO: 316461 - DNA, 33 bp, Homo sapien
tgaaatgtattttttcaaacgtacaaatctcaa

SEQ ID NO: 316462 - DNA, 33 bp, Homo sapien
tgaaatgtattttttctaacgtacaaatctcaa

SEQ ID NO: 316463 - DNA, 33 bp, Homo sapien
tcaatttggcaccattcaaatacgatagagcga

SEQ ID NO: 316464 - DNA, 33 bp, Homo sapien
tcaatttggcaccattgaaatacgatagagcga

SEQ ID NO: 316465 - DNA, 33 bp, Homo sapien
aattctcagcagtaagaaagaacaaactactca

SEQ ID NO: 316466 - DNA, 33 bp, Homo sapien
aattctcagcagtaaggaagaacaaactactca

SEQ ID NO: 316467 - DNA, 33 bp, Homo sapien
gcagggtgtgcggagcaagcatttctgcctgag

SEQ ID NO: 316468 - DNA, 33 bp, Homo sapien
gcagggtgtgcggagcgagcatttctgcctgag

SEQ ID NO: 316469 - DNA, 33 bp, Homo sapien
cctgaatttacaactccgaatgattctatccaa

SEQ ID NO: 316470 - DNA, 33 bp, Homo sapien
cctgaatttacaactctgaatgattctatccaa

SEQ ID NO: 316471 - DNA, 33 bp, Homo sapien
acaacattattaaagaatagtaacagttcagaa

SEQ ID NO: 316472 - DNA, 33 bp, Homo sapien
acaacattattaaagagtagtaacagttcagaa

SEQ ID NO: 316473 - DNA, 33 bp, Homo sapien
tttttcttagccagaaccccttccaccaaaact

SEQ ID NO: 316474 - DNA, 33 bp, Homo sapien
tttttcttagccagaagcccttccaccaaaact

SEQ ID NO: 316475 - DNA, 33 bp, Homo sapien
ccacaggcggaactccccaaaggcaaacttcat

SEQ ID NO: 316476 - DNA, 33 bp, Homo sapien
ccacaggcggaactcctcaaaggcaaacttcat

SEQ ID NO: 316477 - DNA, 33 bp, Homo sapien
aaatgtctttgtcccaaatagaaagtctagacc

SEQ ID NO: 316478 - DNA, 33 bp, Homo sapien
aaatgtctttgtcccagatagaaagtctagacc

SEQ ID NO: 316479 - DNA, 33 bp, Homo sapien
aatctgatgctcctcagacaggtcaaaattctc

SEQ ID NO: 316480 - DNA, 33 bp, Homo sapien
aatctgatgctcctcatacaggtcaaaattctc

SEQ ID NO: 316481 - DNA, 33 bp, Homo sapien
aagctcaggaaaaatacaaagttcactcacttc

SEQ ID NO: 316482 - DNA, 33 bp, Homo sapien
aagctcaggaaaaatataaagttcactcacttc

SEQ ID NO: 316483 - DNA, 33 bp, Homo sapien
aggtctcgtaaagtggcatcctttgaactgtaa

SEQ ID NO: 316484 - DNA, 33 bp, Homo sapien
aggtctcgtaaagtggtatcctttgaactgtaa

SEQ ID NO: 316485 - DNA, 33 bp, Homo sapien
tggttcaaatacctctcacaactttagccgtga

SEQ ID NO: 316486 - DNA, 33 bp, Homo sapien
tggttcaaatacctctgacaactttagccgtga

SEQ ID NO: 316487 - DNA, 33 bp, Homo sapien
ccctcctggtgaagaaaaaaaaaggttgctcat

SEQ ID NO: 316488 - DNA, 33 bp, Homo sapien
ccctcctggtgaagaagaaaaaaggttgctcat

SEQ ID NO: 316489 - DNA, 33 bp, Homo sapien
agagaactatatgctacggtttatatatttgca

SEQ ID NO: 316490 - DNA, 33 bp, Homo sapien
agagaactatatgctatggtttatatatttgca

SEQ ID NO: 316491 - DNA, 33 bp, Homo sapien
tccatattccaactgaatcactagtcatccaac

SEQ ID NO: 316492 - DNA, 33 bp, Homo sapien
tccatattccaactgattcactagtcatccaac

SEQ ID NO: 316493 - DNA, 33 bp, Homo sapien
tccacttggccttcctcaatgtggttgactaac

SEQ ID NO: 316494 - DNA, 33 bp, Homo sapien
tccacttggccttccttaatgtggttgactaac

SEQ ID NO: 316495 - DNA, 33 bp, Homo sapien
ttcaagcagaggggtacgggtcacatctgcagg

SEQ ID NO: 316496 - DNA, 33 bp, Homo sapien
ttcaagcagaggggtatgggtcacatctgcagg

SEQ ID NO: 316497 - DNA, 33 bp, Homo sapien
ctttggcatatggcttccaatttgagctccctg

SEQ ID NO: 316498 - DNA, 33 bp, Homo sapien
ctttggcatatggctttcaatttgagctccctg

SEQ ID NO: 316499 - DNA, 33 bp, Homo sapien
ctgtgattattggtaaagggaaggtacaagaag

SEQ ID NO: 316500 - DNA, 33 bp, Homo sapien
ctgtgattattggtaaggggaaggtacaagaag

SEQ ID NO: 316501 - DNA, 33 bp, Homo sapien
actccctacgatgggactctctcaactgtccct

SEQ ID NO: 316502 - DNA, 33 bp, Homo sapien
actccctacgatgggattctctcaactgtccct

SEQ ID NO: 316503 - DNA, 33 bp, Homo sapien
ttgtattatgtctaaaaccagtagagaaaattg

SEQ ID NO: 316504 - DNA, 33 bp, Homo sapien
ttgtattatgtctaaatccagtagagaaaattg

SEQ ID NO: 316505 - DNA, 33 bp, Homo sapien
ccttgccatggcctaactataggcaaaaatttg

SEQ ID NO: 316506 - DNA, 33 bp, Homo sapien
ccttgccatggcctaattataggcaaaaatttg

SEQ ID NO: 316507 - DNA, 33 bp, Homo sapien
cagttttgctatgtaacaaataatcccacatta

SEQ ID NO: 316508 - DNA, 33 bp, Homo sapien
cagttttgctatgtaagaaataatcccacatta

SEQ ID NO: 316509 - DNA, 33 bp, Homo sapien
ctgtaggcaagcatgaataaacaaccaacccca

SEQ ID NO: 316510 - DNA, 33 bp, Homo sapien
ctgtaggcaagcatgagtaaacaaccaacccca

SEQ ID NO: 316511 - DNA, 33 bp, Homo sapien
ataggggcaccaaggcaactgccctttaagtgt

SEQ ID NO: 316512 - DNA, 33 bp, Homo sapien
ataggggcaccaaggcgactgccctttaagtgt

SEQ ID NO: 316513 - DNA, 33 bp, Homo sapien
gattctattgatgtgaagtgtcatgtttggtga

SEQ ID NO: 316514 - DNA, 33 bp, Homo sapien
gattctattgatgtgatgtgtcatgtttggtga

SEQ ID NO: 316515 - DNA, 33 bp, Homo sapien
aggcagactatctgatcaaccaggaactggtct

SEQ ID NO: 316516 - DNA, 33 bp, Homo sapien
aggcagactatctgattaaccaggaactggtct

SEQ ID NO: 316517 - DNA, 33 bp, Homo sapien
ctcaacatcccccttccacatttcctcccacat

SEQ ID NO: 316518 - DNA, 33 bp, Homo sapien
ctcaacatcccccttctacatttcctcccacat

SEQ ID NO: 316519 - DNA, 33 bp, Homo sapien
tgtccttatctactcacgtgtccctaaacactt

SEQ ID NO: 316520 - DNA, 33 bp, Homo sapien
tgtccttatctactcatgtgtccctaaacactt

SEQ ID NO: 316521 - DNA, 33 bp, Homo sapien
acaaagaaataaatcaatcaaagatgagcctgg

SEQ ID NO: 316522 - DNA, 33 bp, Homo sapien
acaaagaaataaatcagtcaaagatgagcctgg

SEQ ID NO: 316523 - DNA, 33 bp, Homo sapien
ccgtaatgaaaaaagacaggagacctgagaaat

SEQ ID NO: 316524 - DNA, 33 bp, Homo sapien
ccgtaatgaaaaaagataggagacctgagaaat

SEQ ID NO: 316525 - DNA, 33 bp, Homo sapien
gtctgcctttacaggacgaacaaactagctaca

SEQ ID NO: 316526 - DNA, 33 bp, Homo sapien
gtctgcctttacaggatgaacaaactagctaca

SEQ ID NO: 316527 - DNA, 33 bp, Homo sapien
agttggaagttgacccaacatgagctatggcac

SEQ ID NO: 316528 - DNA, 33 bp, Homo sapien
agttggaagttgaccctacatgagctatggcac

SEQ ID NO: 316529 - DNA, 33 bp, Homo sapien
agagatagccacagggaccctggagtgtattct

SEQ ID NO: 316530 - DNA, 33 bp, Homo sapien
agagatagccacaggggccctggagtgtattct

SEQ ID NO: 316531 - DNA, 33 bp, Homo sapien
tgtgtagttggtggtaaatcagggctgcaatcc

SEQ ID NO: 316532 - DNA, 33 bp, Homo sapien
tgtgtagttggtggtagatcagggctgcaatcc

SEQ ID NO: 316533 - DNA, 33 bp, Homo sapien
ctcttttgagtctccaactgggaacagtgacta

SEQ ID NO: 316534 - DNA, 33 bp, Homo sapien
ctcttttgagtctccagctgggaacagtgacta

SEQ ID NO: 316535 - DNA, 33 bp, Homo sapien
tgggtattactgagaccatttgcatttgagaaa

SEQ ID NO: 316536 - DNA, 33 bp, Homo sapien
tgggtattactgagacgatttgcatttgagaaa

SEQ ID NO: 316537 - DNA, 33 bp, Homo sapien
tgcaatgctcttcatcccagacactgatgacct

SEQ ID NO: 316538 - DNA, 33 bp, Homo sapien
tgcaatgctcttcatctcagacactgatgacct

SEQ ID NO: 316539 - DNA, 33 bp, Homo sapien
tctcaacactggggccacagaagattcctcact

SEQ ID NO: 316540 - DNA, 33 bp, Homo sapien
tctcaacactggggccgcagaagattcctcact

SEQ ID NO: 316541 - DNA, 33 bp, Homo sapien
ggcaccttccgcatgacgtttttatttgatgtt

SEQ ID NO: 316542 - DNA, 33 bp, Homo sapien
ggcaccttccgcatgatgtttttatttgatgtt

SEQ ID NO: 316543 - DNA, 33 bp, Homo sapien
agagcctcatcatttcccactggacactgcacc

SEQ ID NO: 316544 - DNA, 33 bp, Homo sapien
agagcctcatcatttctcactggacactgcacc

SEQ ID NO: 316545 - DNA, 33 bp, Homo sapien
agccagcaggtgtatgccaaaagagagaaacat

SEQ ID NO: 316546 - DNA, 33 bp, Homo sapien
agccagcaggtgtatgtcaaaagagagaaacat

SEQ ID NO: 316547 - DNA, 33 bp, Homo sapien
agatccaacaggacacaagtagagacggaataa

SEQ ID NO: 316548 - DNA, 33 bp, Homo sapien
agatccaacaggacacgagtagagacggaataa

SEQ ID NO: 316549 - DNA, 33 bp, Homo sapien
atataacaataagacacaagccaaaacaacttg

SEQ ID NO: 316550 - DNA, 33 bp, Homo sapien
atataacaataagacataagccaaaacaacttg

SEQ ID NO: 316551 - DNA, 33 bp, Homo sapien
gtttctggtgtttagacatggatttctgatgta

SEQ ID NO: 316552 - DNA, 33 bp, Homo sapien
gtttctggtgtttagagatggatttctgatgta

SEQ ID NO: 316553 - DNA, 33 bp, Homo sapien
acaaacagcttcatccacaccctgagggaagac

SEQ ID NO: 316554 - DNA, 33 bp, Homo sapien
acaaacagcttcatccgcaccctgagggaagac

SEQ ID NO: 316555 - DNA, 33 bp, Homo sapien
ccaggccagccctatcacaactccttgcaccct

SEQ ID NO: 316556 - DNA, 33 bp, Homo sapien
ccaggccagccctatcgcaactccttgcaccct

SEQ ID NO: 316557 - DNA, 33 bp, Homo sapien
cttacctgagaaatcagctcttcttccaaattg

SEQ ID NO: 316558 - DNA, 33 bp, Homo sapien
cttacctgagaaatcatctcttcttccaaattg

SEQ ID NO: 316559 - DNA, 33 bp, Homo sapien
tcatctcctacacaaaactttggtgacaacttt

SEQ ID NO: 316560 - DNA, 33 bp, Homo sapien
tcatctcctacacaaacctttggtgacaacttt

SEQ ID NO: 316561 - DNA, 33 bp, Homo sapien
ctaagacagaacctaacacataaagatttcaca

SEQ ID NO: 316562 - DNA, 33 bp, Homo sapien
ctaagacagaacctaagacataaagatttcaca

SEQ ID NO: 316563 - DNA, 33 bp, Homo sapien
cctggcggatcatcaaagttaactcattcggca

SEQ ID NO: 316564 - DNA, 33 bp, Homo sapien
cctggcggatcatcaaggttaactcattcggca

SEQ ID NO: 316565 - DNA, 33 bp, Homo sapien
tgggtcattcttgtcacgtggctgtttcttctc

SEQ ID NO: 316566 - DNA, 33 bp, Homo sapien
tgggtcattcttgtcatgtggctgtttcttctc

SEQ ID NO: 316567 - DNA, 33 bp, Homo sapien
tgtgttggaatgattaagtggctcaatggaagc

SEQ ID NO: 316568 - DNA, 33 bp, Homo sapien
tgtgttggaatgattaggtggctcaatggaagc

SEQ ID NO: 316569 - DNA, 33 bp, Homo sapien
ttgcgtaacttcttaaaagcaaggaatcccttc

SEQ ID NO: 316570 - DNA, 33 bp, Homo sapien
ttgcgtaacttcttaagagcaaggaatcccttc

SEQ ID NO: 316571 - DNA, 33 bp, Homo sapien
cattttgacaaacagaagtcaactgcttcagag

SEQ ID NO: 316572 - DNA, 33 bp, Homo sapien
cattttgacaaacagacgtcaactgcttcagag

SEQ ID NO: 316573 - DNA, 33 bp, Homo sapien
ctaaggtcgttaattcgctgagactttgggctt

SEQ ID NO: 316574 - DNA, 33 bp, Homo sapien
ctaaggtcgttaattctctgagactttgggctt

SEQ ID NO: 316575 - DNA, 33 bp, Homo sapien
aatcagtgtattggacaaacttgatcaataaaa

SEQ ID NO: 316576 - DNA, 33 bp, Homo sapien
aatcagtgtattggaccaacttgatcaataaaa

SEQ ID NO: 316577 - DNA, 33 bp, Homo sapien
ggctggtgcaggcaataacaaagaggctggcaa

SEQ ID NO: 316578 - DNA, 33 bp, Homo sapien
ggctggtgcaggcaatgacaaagaggctggcaa

SEQ ID NO: 316579 - DNA, 33 bp, Homo sapien
tttggggatggtcttaacagttttgcatctatt

SEQ ID NO: 316580 - DNA, 33 bp, Homo sapien
tttggggatggtcttagcagttttgcatctatt

SEQ ID NO: 316581 - DNA, 33 bp, Homo sapien
gcaactgaggaaccaactaagacagaaattaga

SEQ ID NO: 316582 - DNA, 33 bp, Homo sapien
gcaactgaggaaccaattaagacagaaattaga

SEQ ID NO: 316583 - DNA, 33 bp, Homo sapien
taggaataataccatgcaggaagctggatttaa

SEQ ID NO: 316584 - DNA, 33 bp, Homo sapien
taggaataataccatggaggaagctggatttaa

SEQ ID NO: 316585 - DNA, 33 bp, Homo sapien
tcccaatgttgctaaccgtatctcctaacattc

SEQ ID NO: 316586 - DNA, 33 bp, Homo sapien
tcccaatgttgctaactgtatctcctaacattc

SEQ ID NO: 316587 - DNA, 33 bp, Homo sapien
ttctccccccacttaacagttcagtatttatta

SEQ ID NO: 316588 - DNA, 33 bp, Homo sapien
ttctccccccacttaagagttcagtatttatta

SEQ ID NO: 316589 - DNA, 33 bp, Homo sapien
gagactctttgaagaaccacaggcatttctcaa

SEQ ID NO: 316590 - DNA, 33 bp, Homo sapien
gagactctttgaagaatcacaggcatttctcaa

SEQ ID NO: 316591 - DNA, 33 bp, Homo sapien
atccttcagcttcacactgaaaacctaccaaca

SEQ ID NO: 316592 - DNA, 33 bp, Homo sapien
atccttcagcttcacattgaaaacctaccaaca

SEQ ID NO: 316593 - DNA, 33 bp, Homo sapien
cacaaatcagtgattcccaaagctggtttgcaa

SEQ ID NO: 316594 - DNA, 33 bp, Homo sapien
cacaaatcagtgattctcaaagctggtttgcaa

SEQ ID NO: 316595 - DNA, 33 bp, Homo sapien
caagttatttgcagcaagaggatgacagtgggt

SEQ ID NO: 316596 - DNA, 33 bp, Homo sapien
caagttatttgcagcatgaggatgacagtgggt

SEQ ID NO: 316597 - DNA, 33 bp, Homo sapien
ctcttctgtaataataagccaacactataagga

SEQ ID NO: 316598 - DNA, 33 bp, Homo sapien
ctcttctgtaataataggccaacactataagga

SEQ ID NO: 316599 - DNA, 33 bp, Homo sapien
ttagatatcttcgctacgatgagcagagagagc

SEQ ID NO: 316600 - DNA, 33 bp, Homo sapien
ttagatatcttcgctatgatgagcagagagagc

SEQ ID NO: 316601 - DNA, 33 bp, Homo sapien
attacttgcaaaggacggtatctcccagtgggc

SEQ ID NO: 316602 - DNA, 33 bp, Homo sapien
attacttgcaaaggactgtatctcccagtgggc

SEQ ID NO: 316603 - DNA, 33 bp, Homo sapien
tctttcatgtatttgccatctttgtacctcttt

SEQ ID NO: 316604 - DNA, 33 bp, Homo sapien
tctttcatgtatttgctatctttgtacctcttt

SEQ ID NO: 316605 - DNA, 33 bp, Homo sapien
gaaggaggagtaagtgcaatgacacaattagag

SEQ ID NO: 316606 - DNA, 33 bp, Homo sapien
gaaggaggagtaagtggaatgacacaattagag

SEQ ID NO: 316607 - DNA, 33 bp, Homo sapien
taggcattctaagtcacaagatgagatgggagg

SEQ ID NO: 316608 - DNA, 33 bp, Homo sapien
taggcattctaagtcataagatgagatgggagg

SEQ ID NO: 316609 - DNA, 33 bp, Homo sapien
cttgggagcacttttaccatcactagtggcact

SEQ ID NO: 316610 - DNA, 33 bp, Homo sapien
cttgggagcacttttagcatcactagtggcact

SEQ ID NO: 316611 - DNA, 33 bp, Homo sapien
aattatcgtggaagtaagtgcttgttaccattg

SEQ ID NO: 316612 - DNA, 33 bp, Homo sapien
aattatcgtggaagtaggtgcttgttaccattg

SEQ ID NO: 316613 - DNA, 33 bp, Homo sapien
atttacgaaaaatagaggagtctccagtttcag

SEQ ID NO: 316614 - DNA, 33 bp, Homo sapien
atttacgaaaaatagatgagtctccagtttcag

SEQ ID NO: 316615 - DNA, 33 bp, Homo sapien
cattgtcatttgccaaaattgaggagaaggtag

SEQ ID NO: 316616 - DNA, 33 bp, Homo sapien
cattgtcatttgccaagattgaggagaaggtag

SEQ ID NO: 316617 - DNA, 33 bp, Homo sapien
cgtgacaagatgaaaaatacctggatgaacaga

SEQ ID NO: 316618 - DNA, 33 bp, Homo sapien
cgtgacaagatgaaaagtacctggatgaacaga

SEQ ID NO: 316619 - DNA, 33 bp, Homo sapien
gaaacaaacctccacaatataccatttggaaga

SEQ ID NO: 316620 - DNA, 33 bp, Homo sapien
gaaacaaacctccacagtataccatttggaaga

SEQ ID NO: 316621 - DNA, 33 bp, Homo sapien
aaaaataatcaatcccacttactttattggtgt

SEQ ID NO: 316622 - DNA, 33 bp, Homo sapien
aaaaataatcaatcccgcttactttattggtgt

SEQ ID NO: 316623 - DNA, 33 bp, Homo sapien
gaggcctggggagaccactgtgaattcctgcat

SEQ ID NO: 316624 - DNA, 33 bp, Homo sapien
gaggcctggggagaccgctgtgaattcctgcat

SEQ ID NO: 316625 - DNA, 33 bp, Homo sapien
tctacagtgaccacaaactaagatcacaacagt

SEQ ID NO: 316626 - DNA, 33 bp, Homo sapien
tctacagtgaccacaagctaagatcacaacagt

SEQ ID NO: 316627 - DNA, 33 bp, Homo sapien
ctatcagtgctccctacgtgattcaggtatgtg

SEQ ID NO: 316628 - DNA, 33 bp, Homo sapien
ctatcagtgctccctatgtgattcaggtatgtg

SEQ ID NO: 316629 - DNA, 33 bp, Homo sapien
tccctgttttcagcaacttaaagacaaataaga

SEQ ID NO: 316630 - DNA, 33 bp, Homo sapien
tccctgttttcagcaatttaaagacaaataaga

SEQ ID NO: 316631 - DNA, 33 bp, Homo sapien
ctcagaggcgtatgacccacatttaggtccaac

SEQ ID NO: 316632 - DNA, 33 bp, Homo sapien
ctcagaggcgtatgactcacatttaggtccaac

SEQ ID NO: 316633 - DNA, 33 bp, Homo sapien
ctgttcacaacggtgccattctaagggacttct

SEQ ID NO: 316634 - DNA, 33 bp, Homo sapien
ctgttcacaacggtgctattctaagggacttct

SEQ ID NO: 316635 - DNA, 33 bp, Homo sapien
tcatttccagtatggaagccatttacatctttt

SEQ ID NO: 316636 - DNA, 33 bp, Homo sapien
tcatttccagtatggatgccatttacatctttt

SEQ ID NO: 316637 - DNA, 33 bp, Homo sapien
gtccatttgtctgaaacgtaagaatttaaatgt

SEQ ID NO: 316638 - DNA, 33 bp, Homo sapien
gtccatttgtctgaaaggtaagaatttaaatgt

SEQ ID NO: 316639 - DNA, 33 bp, Homo sapien
ttggcagttatcctagcaccgtttgttgaatag

SEQ ID NO: 316640 - DNA, 33 bp, Homo sapien
ttggcagttatcctagtaccgtttgttgaatag

SEQ ID NO: 316641 - DNA, 33 bp, Homo sapien
aaaaattagctccaaacggaacaaagtttcagg

SEQ ID NO: 316642 - DNA, 33 bp, Homo sapien
aaaaattagctccaaatggaacaaagtttcagg

SEQ ID NO: 316643 - DNA, 33 bp, Homo sapien
aaatgtgctgatttgccaacttcttttggtcga

SEQ ID NO: 316644 - DNA, 33 bp, Homo sapien
aaatgtgctgatttgcgaacttcttttggtcga

SEQ ID NO: 316645 - DNA, 33 bp, Homo sapien
ttttaaattgctcatagatttttacactgattc

SEQ ID NO: 316646 - DNA, 33 bp, Homo sapien
ttttaaattgctcatatatttttacactgattc

SEQ ID NO: 316647 - DNA, 33 bp, Homo sapien
gaccttgatgataaaaagtgactcactaagttg

SEQ ID NO: 316648 - DNA, 33 bp, Homo sapien
gaccttgatgataaaatgtgactcactaagttg

SEQ ID NO: 316649 - DNA, 33 bp, Homo sapien
atgatggttaccagagccaaggggtgtatggat

SEQ ID NO: 316650 - DNA, 33 bp, Homo sapien
atgatggttaccagaggcaaggggtgtatggat

SEQ ID NO: 316651 - DNA, 33 bp, Homo sapien
atgcagctggaataaaaacccgtgaaatggagg

SEQ ID NO: 316652 - DNA, 33 bp, Homo sapien
atgcagctggaataaacacccgtgaaatggagg

SEQ ID NO: 316653 - DNA, 33 bp, Homo sapien
gtgaatgagattcatacgtaaatggctgaaatc

SEQ ID NO: 316654 - DNA, 33 bp, Homo sapien
gtgaatgagattcatatgtaaatggctgaaatc

SEQ ID NO: 316655 - DNA, 33 bp, Homo sapien
gctcttcaagaccatcaagggtttaattttttt

SEQ ID NO: 316656 - DNA, 33 bp, Homo sapien
gctcttcaagaccatcgagggtttaattttttt

SEQ ID NO: 316657 - DNA, 33 bp, Homo sapien
ttctatttggcccagaaaatctacttgcttatg

SEQ ID NO: 316658 - DNA, 33 bp, Homo sapien
ttctatttggcccagagaatctacttgcttatg

SEQ ID NO: 316659 - DNA, 33 bp, Homo sapien
agggatcaattcatcaagaggacataacaataa

SEQ ID NO: 316660 - DNA, 33 bp, Homo sapien
agggatcaattcatcaggaggacataacaataa

SEQ ID NO: 316661 - DNA, 33 bp, Homo sapien
agtgcctacagtggctcaagactgagcaaggtg

SEQ ID NO: 316662 - DNA, 33 bp, Homo sapien
agtgcctacagtggcttaagactgagcaaggtg

SEQ ID NO: 316663 - DNA, 33 bp, Homo sapien
cttaagtacaggtcacgctttggactcttcgaa

SEQ ID NO: 316664 - DNA, 33 bp, Homo sapien
cttaagtacaggtcactctttggactcttcgaa

SEQ ID NO: 316665 - DNA, 33 bp, Homo sapien
atgagcaacttttcaactgttaaagtgtgctag

SEQ ID NO: 316666 - DNA, 33 bp, Homo sapien
atgagcaacttttcaattgttaaagtgtgctag

SEQ ID NO: 316667 - DNA, 33 bp, Homo sapien
ccccgcttcccccgtactaaaggcgcagctagg

SEQ ID NO: 316668 - DNA, 33 bp, Homo sapien
ccccgcttcccccgtagtaaaggcgcagctagg

SEQ ID NO: 316669 - DNA, 33 bp, Homo sapien
aagaatggtttgggaacacagaaagtaacatct

SEQ ID NO: 316670 - DNA, 33 bp, Homo sapien
aagaatggtttgggaatacagaaagtaacatct

SEQ ID NO: 316671 - DNA, 33 bp, Homo sapien
tatccagattcccttaaggactaggttctgcag

SEQ ID NO: 316672 - DNA, 33 bp, Homo sapien
tatccagattcccttagggactaggttctgcag

SEQ ID NO: 316673 - DNA, 33 bp, Homo sapien
gaatccgcagtcatgaatacaaaaggtggcaat

SEQ ID NO: 316674 - DNA, 33 bp, Homo sapien
gaatccgcagtcatgagtacaaaaggtggcaat

SEQ ID NO: 316675 - DNA, 33 bp, Homo sapien
tgctcaaataggattccaaaaagtttggagcac

SEQ ID NO: 316676 - DNA, 33 bp, Homo sapien
tgctcaaataggattctaaaaagtttggagcac

SEQ ID NO: 316677 - DNA, 33 bp, Homo sapien
accaaaattatctcaccggccaacttatgtttg

SEQ ID NO: 316678 - DNA, 33 bp, Homo sapien
accaaaattatctcactggccaacttatgtttg

SEQ ID NO: 316679 - DNA, 33 bp, Homo sapien
ctagactggagcattacgggacacagtcaactc

SEQ ID NO: 316680 - DNA, 33 bp, Homo sapien
ctagactggagcattatgggacacagtcaactc

SEQ ID NO: 316681 - DNA, 33 bp, Homo sapien
tatttcttttcaaaaaattgtccagttgaccat

SEQ ID NO: 316682 - DNA, 33 bp, Homo sapien
tatttcttttcaaaaagttgtccagttgaccat

SEQ ID NO: 316683 - DNA, 33 bp, Homo sapien
gaacttaacaagcttccccaacaaaggaaaatg

SEQ ID NO: 316684 - DNA, 33 bp, Homo sapien
gaacttaacaagcttctccaacaaaggaaaatg

SEQ ID NO: 316685 - DNA, 33 bp, Homo sapien
ttaaggagtttccacacgaaagggatgacaaga

SEQ ID NO: 316686 - DNA, 33 bp, Homo sapien
ttaaggagtttccacatgaaagggatgacaaga

SEQ ID NO: 316687 - DNA, 33 bp, Homo sapien
cggtgtgaaatgctcaccaaggttatactgtga

SEQ ID NO: 316688 - DNA, 33 bp, Homo sapien
cggtgtgaaatgctcatcaaggttatactgtga

SEQ ID NO: 316689 - DNA, 33 bp, Homo sapien
aactgcctctaaagtacagataaaaaccaacta

SEQ ID NO: 316690 - DNA, 33 bp, Homo sapien
aactgcctctaaagtagagataaaaaccaacta

SEQ ID NO: 316691 - DNA, 33 bp, Homo sapien
tccacacatttaaagaacctcatttcatcagtg

SEQ ID NO: 316692 - DNA, 33 bp, Homo sapien
tccacacatttaaagaccctcatttcatcagtg

SEQ ID NO: 316693 - DNA, 33 bp, Homo sapien
cgcctctcgatgtttacgattaaaggaacaaat

SEQ ID NO: 316694 - DNA, 33 bp, Homo sapien
cgcctctcgatgtttatgattaaaggaacaaat

SEQ ID NO: 316695 - DNA, 33 bp, Homo sapien
gacaaatgcctctgacaaaaggactcttgaact

SEQ ID NO: 316696 - DNA, 33 bp, Homo sapien
gacaaatgcctctgacgaaaggactcttgaact

SEQ ID NO: 316697 - DNA, 33 bp, Homo sapien
ctggtagaaatatatacagcctagttgaagcct

SEQ ID NO: 316698 - DNA, 33 bp, Homo sapien
ctggtagaaatatatagagcctagttgaagcct

SEQ ID NO: 316699 - DNA, 33 bp, Homo sapien
atgtggctatgtacaacagagatgttcctaaaa

SEQ ID NO: 316700 - DNA, 33 bp, Homo sapien
atgtggctatgtacaatagagatgttcctaaaa

SEQ ID NO: 316701 - DNA, 33 bp, Homo sapien
ggtgtgggaaaaaccaataggctggtgatatcc

SEQ ID NO: 316702 - DNA, 33 bp, Homo sapien
ggtgtgggaaaaaccagtaggctggtgatatcc

SEQ ID NO: 316703 - DNA, 33 bp, Homo sapien
atgactcctctgtagcagagtttatgacctttc

SEQ ID NO: 316704 - DNA, 33 bp, Homo sapien
atgactcctctgtagcggagtttatgacctttc

SEQ ID NO: 316705 - DNA, 33 bp, Homo sapien
ataggcacagaagccaactttgagctataagac

SEQ ID NO: 316706 - DNA, 33 bp, Homo sapien
ataggcacagaagccagctttgagctataagac

SEQ ID NO: 316707 - DNA, 33 bp, Homo sapien
tgttaatgagtgttaacgagttaattactgtta

SEQ ID NO: 316708 - DNA, 33 bp, Homo sapien
tgttaatgagtgttaatgagttaattactgtta

SEQ ID NO: 316709 - DNA, 33 bp, Homo sapien
aagaaattttggtaaacaggtctctgtgcttta

SEQ ID NO: 316710 - DNA, 33 bp, Homo sapien
aagaaattttggtaaataggtctctgtgcttta

SEQ ID NO: 316711 - DNA, 33 bp, Homo sapien
tgtgataaccactagcacagattaatcagtacc

SEQ ID NO: 316712 - DNA, 33 bp, Homo sapien
tgtgataaccactagcgcagattaatcagtacc

SEQ ID NO: 316713 - DNA, 33 bp, Homo sapien
cacatattgactctataaaggatccttcttatt

SEQ ID NO: 316714 - DNA, 33 bp, Homo sapien
cacatattgactctatgaaggatccttcttatt

SEQ ID NO: 316715 - DNA, 33 bp, Homo sapien
ttgaaagaaaaatcaaataactggcctgtattc

SEQ ID NO: 316716 - DNA, 33 bp, Homo sapien
ttgaaagaaaaatcaagtaactggcctgtattc

SEQ ID NO: 316717 - DNA, 33 bp, Homo sapien
atgtcaccagagggaaatggtaaagaacaacac

SEQ ID NO: 316718 - DNA, 33 bp, Homo sapien
atgtcaccagagggaagtggtaaagaacaacac

SEQ ID NO: 316719 - DNA, 33 bp, Homo sapien
ctagggtggtctgagacggctttaactataagg

SEQ ID NO: 316720 - DNA, 33 bp, Homo sapien
ctagggtggtctgagatggctttaactataagg

SEQ ID NO: 316721 - DNA, 33 bp, Homo sapien
cagattctgattcatactaattgtttaagaact

SEQ ID NO: 316722 - DNA, 33 bp, Homo sapien
cagattctgattcatattaattgtttaagaact

SEQ ID NO: 316723 - DNA, 33 bp, Homo sapien
aattacaacttgttaccattgtggaagaaacct

SEQ ID NO: 316724 - DNA, 33 bp, Homo sapien
aattacaacttgttactattgtggaagaaacct

SEQ ID NO: 316725 - DNA, 33 bp, Homo sapien
ctcctcctgccagaaacgtttttaaggacctca

SEQ ID NO: 316726 - DNA, 33 bp, Homo sapien
ctcctcctgccagaaaggtttttaaggacctca

SEQ ID NO: 316727 - DNA, 33 bp, Homo sapien
aatgttcaatgacagacagagtgtccgtttcag

SEQ ID NO: 316728 - DNA, 33 bp, Homo sapien
aatgttcaatgacagatagagtgtccgtttcag

SEQ ID NO: 316729 - DNA, 33 bp, Homo sapien
ctttgcttgttccagacgggctggcattataaa

SEQ ID NO: 316730 - DNA, 33 bp, Homo sapien
ctttgcttgttccagaggggctggcattataaa

SEQ ID NO: 316731 - DNA, 33 bp, Homo sapien
catttaaaagtcacaaaaacattatggacataa

SEQ ID NO: 316732 - DNA, 33 bp, Homo sapien
catttaaaagtcacaacaacattatggacataa

SEQ ID NO: 316733 - DNA, 33 bp, Homo sapien
atgtcattaactgtgacaagttgtactttccca

SEQ ID NO: 316734 - DNA, 33 bp, Homo sapien
atgtcattaactgtgagaagttgtactttccca

SEQ ID NO: 316735 - DNA, 33 bp, Homo sapien
tgaattccaaaccacactctatccctagcttcc

SEQ ID NO: 316736 - DNA, 33 bp, Homo sapien
tgaattccaaaccacattctatccctagcttcc

SEQ ID NO: 316737 - DNA, 33 bp, Homo sapien
tgggcctccacacccaagttcaactcctttgca

SEQ ID NO: 316738 - DNA, 33 bp, Homo sapien
tgggcctccacacccatgttcaactcctttgca

SEQ ID NO: 316739 - DNA, 33 bp, Homo sapien
tgtgctggagaactcacggaatctgcacttgga

SEQ ID NO: 316740 - DNA, 33 bp, Homo sapien
tgtgctggagaactcatggaatctgcacttgga

SEQ ID NO: 316741 - DNA, 33 bp, Homo sapien
gcttttggcagtgtcacagagtttaaaggacaa

SEQ ID NO: 316742 - DNA, 33 bp, Homo sapien
gcttttggcagtgtcatagagtttaaaggacaa

SEQ ID NO: 316743 - DNA, 33 bp, Homo sapien
ggtcatggcctcacaaactcttactgtcttggt

SEQ ID NO: 316744 - DNA, 33 bp, Homo sapien
ggtcatggcctcacaagctcttactgtcttggt

SEQ ID NO: 316745 - DNA, 33 bp, Homo sapien
tcaggtccatttcatacgtagaggtatttgcct

SEQ ID NO: 316746 - DNA, 33 bp, Homo sapien
tcaggtccatttcatatgtagaggtatttgcct

SEQ ID NO: 316747 - DNA, 33 bp, Homo sapien
atcaacaaagctctcacgataaggatggtgttg

SEQ ID NO: 316748 - DNA, 33 bp, Homo sapien
atcaacaaagctctcaggataaggatggtgttg

SEQ ID NO: 316749 - DNA, 33 bp, Homo sapien
cagaaagaaaatgctcaccccctgctcgctcac

SEQ ID NO: 316750 - DNA, 33 bp, Homo sapien
cagaaagaaaatgctctccccctgctcgctcac

SEQ ID NO: 316751 - DNA, 33 bp, Homo sapien
aagtcgatattatcaccgaacaccataactcag

SEQ ID NO: 316752 - DNA, 33 bp, Homo sapien
aagtcgatattatcactgaacaccataactcag

SEQ ID NO: 316753 - DNA, 33 bp, Homo sapien
cttatgtttttcacagaccttttacaaatataa

SEQ ID NO: 316754 - DNA, 33 bp, Homo sapien
cttatgtttttcacaggccttttacaaatataa

SEQ ID NO: 316755 - DNA, 33 bp, Homo sapien
actgacctccagagacaaatttcacgttgtaga

SEQ ID NO: 316756 - DNA, 33 bp, Homo sapien
actgacctccagagacgaatttcacgttgtaga

SEQ ID NO: 316757 - DNA, 33 bp, Homo sapien
cacctgttctttatccaagttccctcatctgtt

SEQ ID NO: 316758 - DNA, 33 bp, Homo sapien
cacctgttctttatccgagttccctcatctgtt

SEQ ID NO: 316759 - DNA, 33 bp, Homo sapien
tattactctcaagtcaatcataaccttcttatt

SEQ ID NO: 316760 - DNA, 33 bp, Homo sapien
tattactctcaagtcagtcataaccttcttatt

SEQ ID NO: 316761 - DNA, 33 bp, Homo sapien
gttcaaagacatgggcagataggatgtcaacat

SEQ ID NO: 316762 - DNA, 33 bp, Homo sapien
gttcaaagacatgggcggataggatgtcaacat

SEQ ID NO: 316763 - DNA, 33 bp, Homo sapien
gaaagtaccacaagcccgaggttttcaccgtcc

SEQ ID NO: 316764 - DNA, 33 bp, Homo sapien
gaaagtaccacaagcctgaggttttcaccgtcc

SEQ ID NO: 316765 - DNA, 33 bp, Homo sapien
gccaattatagccatgcagtaacaaaggcctgg

SEQ ID NO: 316766 - DNA, 33 bp, Homo sapien
gccaattatagccatgtagtaacaaaggcctgg

SEQ ID NO: 316767 - DNA, 33 bp, Homo sapien
tcaggtgcacctgctacgtgtcaggttccaatc

SEQ ID NO: 316768 - DNA, 33 bp, Homo sapien
tcaggtgcacctgctatgtgtcaggttccaatc

SEQ ID NO: 316769 - DNA, 33 bp, Homo sapien
atctatgtgtataaaccatggccacattttctg

SEQ ID NO: 316770 - DNA, 33 bp, Homo sapien
atctatgtgtataaactatggccacattttctg

SEQ ID NO: 316771 - DNA, 33 bp, Homo sapien
ccaagtgagatcccggaagctttgtccaaactc

SEQ ID NO: 316772 - DNA, 33 bp, Homo sapien
ccaagtgagatcccgggagctttgtccaaactc

SEQ ID NO: 316773 - DNA, 33 bp, Homo sapien
tctcaagattgctgcaatagccatcgaatggcc

SEQ ID NO: 316774 - DNA, 33 bp, Homo sapien
tctcaagattgctgcagtagccatcgaatggcc

SEQ ID NO: 316775 - DNA, 33 bp, Homo sapien
gatcagatttgagatacaggtttgaacactcat

SEQ ID NO: 316776 - DNA, 33 bp, Homo sapien
gatcagatttgagatataggtttgaacactcat

SEQ ID NO: 316777 - DNA, 33 bp, Homo sapien
cttctaggctatgaagccctgaccctctatgcc

SEQ ID NO: 316778 - DNA, 33 bp, Homo sapien
cttctaggctatgaagtcctgaccctctatgcc

SEQ ID NO: 316779 - DNA, 33 bp, Homo sapien
tatcaacttttcaaaacgtctgtgtcctcaaaa

SEQ ID NO: 316780 - DNA, 33 bp, Homo sapien
tatcaacttttcaaaatgtctgtgtcctcaaaa

SEQ ID NO: 316781 - DNA, 33 bp, Homo sapien
aaactactttcaccatcatacttctgatttctc

SEQ ID NO: 316782 - DNA, 33 bp, Homo sapien
aaactactttcaccatgatacttctgatttctc

SEQ ID NO: 316783 - DNA, 33 bp, Homo sapien
gtgtcaaatcataaccccaatgttggaggtggg

SEQ ID NO: 316784 - DNA, 33 bp, Homo sapien
gtgtcaaatcataacctcaatgttggaggtggg

SEQ ID NO: 316785 - DNA, 33 bp, Homo sapien
gtatcttctgacttacacaaaattctgtagaac

SEQ ID NO: 316786 - DNA, 33 bp, Homo sapien
gtatcttctgacttacgcaaaattctgtagaac

SEQ ID NO: 316787 - DNA, 33 bp, Homo sapien
tttccagaaaaagaaacagccaggaatgttgca

SEQ ID NO: 316788 - DNA, 33 bp, Homo sapien
tttccagaaaaagaaagagccaggaatgttgca

SEQ ID NO: 316789 - DNA, 33 bp, Homo sapien
cactgaagaattaatcaactttaaaacaagcca

SEQ ID NO: 316790 - DNA, 33 bp, Homo sapien
cactgaagaattaatccactttaaaacaagcca

SEQ ID NO: 316791 - DNA, 33 bp, Homo sapien
tctagcatccatttcacaaaccatacaagactc

SEQ ID NO: 316792 - DNA, 33 bp, Homo sapien
tctagcatccatttcagaaaccatacaagactc

SEQ ID NO: 316793 - DNA, 33 bp, Homo sapien
actcattcaagttatcgcttctagcatccattt

SEQ ID NO: 316794 - DNA, 33 bp, Homo sapien
actcattcaagttatctcttctagcatccattt

SEQ ID NO: 316795 - DNA, 33 bp, Homo sapien
aacttagggccctttaagtgcaaaacaactgtt

SEQ ID NO: 316796 - DNA, 33 bp, Homo sapien
aacttagggccctttaggtgcaaaacaactgtt

SEQ ID NO: 316797 - DNA, 33 bp, Homo sapien
caacatacaacttgccactttaatcattcttaa

SEQ ID NO: 316798 - DNA, 33 bp, Homo sapien
caacatacaacttgccgctttaatcattcttaa

SEQ ID NO: 316799 - DNA, 33 bp, Homo sapien
aaggggcagttccatacagtaggtgacacaggt

SEQ ID NO: 316800 - DNA, 33 bp, Homo sapien
aaggggcagttccatatagtaggtgacacaggt

SEQ ID NO: 316801 - DNA, 33 bp, Homo sapien
atgctatccaaaggacccttcaaatgaaataga

SEQ ID NO: 316802 - DNA, 33 bp, Homo sapien
atgctatccaaaggactcttcaaatgaaataga

SEQ ID NO: 316803 - DNA, 33 bp, Homo sapien
aggcctttggaccaccaagtgtcaacaagtaaa

SEQ ID NO: 316804 - DNA, 33 bp, Homo sapien
aggcctttggaccacccagtgtcaacaagtaaa

SEQ ID NO: 316805 - DNA, 33 bp, Homo sapien
tggcagaacctgacaacgttaaggcaggctgct

SEQ ID NO: 316806 - DNA, 33 bp, Homo sapien
tggcagaacctgacaatgttaaggcaggctgct

SEQ ID NO: 316807 - DNA, 33 bp, Homo sapien
ctacattgttcacaaacgaaatggcaagtttct

SEQ ID NO: 316808 - DNA, 33 bp, Homo sapien
ctacattgttcacaaatgaaatggcaagtttct

SEQ ID NO: 316809 - DNA, 33 bp, Homo sapien
aagaacacgaccagcacggagtaagggattcac

SEQ ID NO: 316810 - DNA, 33 bp, Homo sapien
aagaacacgaccagcatggagtaagggattcac

SEQ ID NO: 316811 - DNA, 33 bp, Homo sapien
ctgagaaattcacataaaaattggtcctggact

SEQ ID NO: 316812 - DNA, 33 bp, Homo sapien
ctgagaaattcacatacaaattggtcctggact

SEQ ID NO: 316813 - DNA, 33 bp, Homo sapien
tgtgaaataaaccacacaaagaccatccctctt

SEQ ID NO: 316814 - DNA, 33 bp, Homo sapien
tgtgaaataaaccacagaaagaccatccctctt

SEQ ID NO: 316815 - DNA, 33 bp, Homo sapien
tgggctctgggagaaaatggctccatcagcaga

SEQ ID NO: 316816 - DNA, 33 bp, Homo sapien
tgggctctgggagaaagtggctccatcagcaga

SEQ ID NO: 316817 - DNA, 33 bp, Homo sapien
tctggccattagaaaaaaaaagtgaagagaagg

SEQ ID NO: 316818 - DNA, 33 bp, Homo sapien
tctggccattagaaaagaaaagtgaagagaagg

SEQ ID NO: 316819 - DNA, 33 bp, Homo sapien
ggagtaagcactcaaacgatggcttacgtgttc

SEQ ID NO: 316820 - DNA, 33 bp, Homo sapien
ggagtaagcactcaaatgatggcttacgtgttc

SEQ ID NO: 316821 - DNA, 33 bp, Homo sapien
gactcagaaccttgcccctgtgcacaccgtcta

SEQ ID NO: 316822 - DNA, 33 bp, Homo sapien
gactcagaaccttgcctctgtgcacaccgtcta

SEQ ID NO: 316823 - DNA, 33 bp, Homo sapien
ttcaacgttaggaacaagaaattgtgatgtact

SEQ ID NO: 316824 - DNA, 33 bp, Homo sapien
ttcaacgttaggaacaggaaattgtgatgtact

SEQ ID NO: 316825 - DNA, 33 bp, Homo sapien
gtgttactgatagtgaaagcttttattttgagg

SEQ ID NO: 316826 - DNA, 33 bp, Homo sapien
gtgttactgatagtgagagcttttattttgagg

SEQ ID NO: 316827 - DNA, 33 bp, Homo sapien
agcctacctgcccacaaaaaactgcaaggttgg

SEQ ID NO: 316828 - DNA, 33 bp, Homo sapien
agcctacctgcccacacaaaactgcaaggttgg

SEQ ID NO: 316829 - DNA, 33 bp, Homo sapien
aagtgcacaccatgtacattacagcattattca

SEQ ID NO: 316830 - DNA, 33 bp, Homo sapien
aagtgcacaccatgtatattacagcattattca

SEQ ID NO: 316831 - DNA, 33 bp, Homo sapien
tcatctcatactcagtcaatctacattttacta

SEQ ID NO: 316832 - DNA, 33 bp, Homo sapien
tcatctcatactcagtgaatctacattttacta

SEQ ID NO: 316833 - DNA, 33 bp, Homo sapien
ctctagagacttgaaaaatgtatttggagttac

SEQ ID NO: 316834 - DNA, 33 bp, Homo sapien
ctctagagacttgaaagatgtatttggagttac

SEQ ID NO: 316835 - DNA, 33 bp, Homo sapien
aaattgctgaccttacacttatgtattcaaatg

SEQ ID NO: 316836 - DNA, 33 bp, Homo sapien
aaattgctgaccttacccttatgtattcaaatg

SEQ ID NO: 316837 - DNA, 33 bp, Homo sapien
gaaattgagataagaccgaatggttgagattaa

SEQ ID NO: 316838 - DNA, 33 bp, Homo sapien
gaaattgagataagactgaatggttgagattaa

SEQ ID NO: 316839 - DNA, 33 bp, Homo sapien
ctgtgatattttgttacggtagctgggcttgaa

SEQ ID NO: 316840 - DNA, 33 bp, Homo sapien
ctgtgatattttgttatggtagctgggcttgaa

SEQ ID NO: 316841 - DNA, 33 bp, Homo sapien
atgggtacttagtctaccgtatacaaatttctg

SEQ ID NO: 316842 - DNA, 33 bp, Homo sapien
atgggtacttagtctatcgtatacaaatttctg

SEQ ID NO: 316843 - DNA, 33 bp, Homo sapien
cagccagcaaatcagacacactaacaaaaaaca

SEQ ID NO: 316844 - DNA, 33 bp, Homo sapien
cagccagcaaatcagatacactaacaaaaaaca

SEQ ID NO: 316845 - DNA, 33 bp, Homo sapien
ggccaagatttgagacaggcaagtttccttgca

SEQ ID NO: 316846 - DNA, 33 bp, Homo sapien
ggccaagatttgagacgggcaagtttccttgca

SEQ ID NO: 316847 - DNA, 33 bp, Homo sapien
ctttgtttcaccctgaactctgaaccctgaatc

SEQ ID NO: 316848 - DNA, 33 bp, Homo sapien
ctttgtttcaccctgagctctgaaccctgaatc

SEQ ID NO: 316849 - DNA, 33 bp, Homo sapien
tactaggtaattacaaatggctttccaaagtag

SEQ ID NO: 316850 - DNA, 33 bp, Homo sapien
tactaggtaattacaagtggctttccaaagtag

SEQ ID NO: 316851 - DNA, 33 bp, Homo sapien
tgataaatacatacacaccataaaattgtcaaa

SEQ ID NO: 316852 - DNA, 33 bp, Homo sapien
tgataaatacatacacgccataaaattgtcaaa

SEQ ID NO: 316853 - DNA, 33 bp, Homo sapien
ttgttttccagacaataaaaccctcccaaactc

SEQ ID NO: 316854 - DNA, 33 bp, Homo sapien
ttgttttccagacaatgaaaccctcccaaactc

SEQ ID NO: 316855 - DNA, 33 bp, Homo sapien
gtaatttttggactaaatcatggattcgcaatt

SEQ ID NO: 316856 - DNA, 33 bp, Homo sapien
gtaatttttggactaagtcatggattcgcaatt

SEQ ID NO: 316857 - DNA, 33 bp, Homo sapien
attgcttccattgttcaataaagaaagcacata

SEQ ID NO: 316858 - DNA, 33 bp, Homo sapien
attgcttccattgttcgataaagaaagcacata

SEQ ID NO: 316859 - DNA, 33 bp, Homo sapien
agtaccattttacaggaaatgagggaagggagg

SEQ ID NO: 316860 - DNA, 33 bp, Homo sapien
agtaccattttacagggaatgagggaagggagg

SEQ ID NO: 316861 - DNA, 33 bp, Homo sapien
agggttcgtgatttaacggtggaacaaaacaga

SEQ ID NO: 316862 - DNA, 33 bp, Homo sapien
agggttcgtgatttaatggtggaacaaaacaga

SEQ ID NO: 316863 - DNA, 33 bp, Homo sapien
acagcaggcatacagacatttgtggaattgaat

SEQ ID NO: 316864 - DNA, 33 bp, Homo sapien
acagcaggcatacagatatttgtggaattgaat

SEQ ID NO: 316865 - DNA, 33 bp, Homo sapien
gaagaaactgaaccacacctacatctttgtcta

SEQ ID NO: 316866 - DNA, 33 bp, Homo sapien
gaagaaactgaaccacgcctacatctttgtcta

SEQ ID NO: 316867 - DNA, 33 bp, Homo sapien
ttgcactgtagccaagaagaaaagtaaaaccga

SEQ ID NO: 316868 - DNA, 33 bp, Homo sapien
ttgcactgtagccaaggagaaaagtaaaaccga

SEQ ID NO: 316869 - DNA, 33 bp, Homo sapien
aaacgtacaaggtacactaatataaggcaccat

SEQ ID NO: 316870 - DNA, 33 bp, Homo sapien
aaacgtacaaggtacagtaatataaggcaccat

SEQ ID NO: 316871 - DNA, 33 bp, Homo sapien
gttccaaaggaagtagacaatcctcattttgta

SEQ ID NO: 316872 - DNA, 33 bp, Homo sapien
gttccaaaggaagtaggcaatcctcattttgta

SEQ ID NO: 316873 - DNA, 33 bp, Homo sapien
cctcttcttccagagacgggcaacacattcaga

SEQ ID NO: 316874 - DNA, 33 bp, Homo sapien
cctcttcttccagagatgggcaacacattcaga

SEQ ID NO: 316875 - DNA, 33 bp, Homo sapien
gaccattctttcttctaaagtctgcacatattc

SEQ ID NO: 316876 - DNA, 33 bp, Homo sapien
gaccattctttcttctgaagtctgcacatattc

SEQ ID NO: 316877 - DNA, 33 bp, Homo sapien
agcttctcagtttgtgaacaaaaacacatgcat

SEQ ID NO: 316878 - DNA, 33 bp, Homo sapien
agcttctcagtttgtgtacaaaaacacatgcat

SEQ ID NO: 316879 - DNA, 33 bp, Homo sapien
ccaaaacaccattgcaaatgttaacagaggcct

SEQ ID NO: 316880 - DNA, 33 bp, Homo sapien
ccaaaacaccattgcagatgttaacagaggcct

SEQ ID NO: 316881 - DNA, 33 bp, Homo sapien
cctctcaacactcttgcattgggggttaagttt

SEQ ID NO: 316882 - DNA, 33 bp, Homo sapien
cctctcaacactcttggattgggggttaagttt

SEQ ID NO: 316883 - DNA, 33 bp, Homo sapien
ttggaatttagtaatacgtagaggctggaagaa

SEQ ID NO: 316884 - DNA, 33 bp, Homo sapien
ttggaatttagtaataggtagaggctggaagaa

SEQ ID NO: 316885 - DNA, 33 bp, Homo sapien
agacctcaaaggtgaacgtatgaacatgtatca

SEQ ID NO: 316886 - DNA, 33 bp, Homo sapien
agacctcaaaggtgaatgtatgaacatgtatca

SEQ ID NO: 316887 - DNA, 33 bp, Homo sapien
tgcaccaaggcattcaaggctcacctcaaagtg

SEQ ID NO: 316888 - DNA, 33 bp, Homo sapien
tgcaccaaggcattcagggctcacctcaaagtg

SEQ ID NO: 316889 - DNA, 33 bp, Homo sapien
tggccagacatctaacactctccacggaatcat

SEQ ID NO: 316890 - DNA, 33 bp, Homo sapien
tggccagacatctaaccctctccacggaatcat

SEQ ID NO: 316891 - DNA, 33 bp, Homo sapien
ctccaggaaaatgttccaatttcttccaagtgg

SEQ ID NO: 316892 - DNA, 33 bp, Homo sapien
ctccaggaaaatgttcgaatttcttccaagtgg

SEQ ID NO: 316893 - DNA, 33 bp, Homo sapien
aagtgcttggattctacaaattctaaaaagtag

SEQ ID NO: 316894 - DNA, 33 bp, Homo sapien
aagtgcttggattctataaattctaaaaagtag

SEQ ID NO: 316895 - DNA, 33 bp, Homo sapien
atttctgtggaacagcactgctctagaagggag

SEQ ID NO: 316896 - DNA, 33 bp, Homo sapien
atttctgtggaacagcgctgctctagaagggag

SEQ ID NO: 316897 - DNA, 33 bp, Homo sapien
ttctttgaatctccccagaatatatcatgtaat

SEQ ID NO: 316898 - DNA, 33 bp, Homo sapien
ttctttgaatctccccggaatatatcatgtaat

SEQ ID NO: 316899 - DNA, 33 bp, Homo sapien
gacttattttgcttcccctctcttatgctagaa

SEQ ID NO: 316900 - DNA, 33 bp, Homo sapien
gacttattttgcttcctctctcttatgctagaa

SEQ ID NO: 316901 - DNA, 33 bp, Homo sapien
agaaaatcgcatggaaattactgagaaaagccc

SEQ ID NO: 316902 - DNA, 33 bp, Homo sapien
agaaaatcgcatggaatttactgagaaaagccc

SEQ ID NO: 316903 - DNA, 33 bp, Homo sapien
gagtctatgataacccaagactgagattttctc

SEQ ID NO: 316904 - DNA, 33 bp, Homo sapien
gagtctatgataacccgagactgagattttctc

SEQ ID NO: 316905 - DNA, 33 bp, Homo sapien
tactctctgttgttcaggttatatgtgactgaa

SEQ ID NO: 316906 - DNA, 33 bp, Homo sapien
tactctctgttgttcatgttatatgtgactgaa

SEQ ID NO: 316907 - DNA, 33 bp, Homo sapien
aggtcaggatagcagacagattttgtctacatt

SEQ ID NO: 316908 - DNA, 33 bp, Homo sapien
aggtcaggatagcagatagattttgtctacatt

SEQ ID NO: 316909 - DNA, 33 bp, Homo sapien
ctatttaaacagatgccgatgccgaatacatgt

SEQ ID NO: 316910 - DNA, 33 bp, Homo sapien
ctatttaaacagatgctgatgccgaatacatgt

SEQ ID NO: 316911 - DNA, 33 bp, Homo sapien
gagcactgccttatagaatattgctgaatatgt

SEQ ID NO: 316912 - DNA, 33 bp, Homo sapien
gagcactgccttataggatattgctgaatatgt

SEQ ID NO: 316913 - DNA, 33 bp, Homo sapien
tcttgaataagttgagaaagcacttggctgtgt

SEQ ID NO: 316914 - DNA, 33 bp, Homo sapien
tcttgaataagttgaggaagcacttggctgtgt

SEQ ID NO: 316915 - DNA, 33 bp, Homo sapien
accaactctgaatgcaactaacctaaggaacca

SEQ ID NO: 316916 - DNA, 33 bp, Homo sapien
accaactctgaatgcatctaacctaaggaacca

SEQ ID NO: 316917 - DNA, 33 bp, Homo sapien
tggaaaagaggtacaaccaggaatttctgcatg

SEQ ID NO: 316918 - DNA, 33 bp, Homo sapien
tggaaaagaggtacaatcaggaatttctgcatg

SEQ ID NO: 316919 - DNA, 33 bp, Homo sapien
atattgctagtgatgaaagggaactctatttct

SEQ ID NO: 316920 - DNA, 33 bp, Homo sapien
atattgctagtgatgagagggaactctatttct

SEQ ID NO: 316921 - DNA, 33 bp, Homo sapien
acctaatctacttgccagaagacaggaaagaac

SEQ ID NO: 316922 - DNA, 33 bp, Homo sapien
acctaatctacttgcccgaagacaggaaagaac

SEQ ID NO: 316923 - DNA, 33 bp, Homo sapien
tataccttgcctgataaacttttctcccagaac

SEQ ID NO: 316924 - DNA, 33 bp, Homo sapien
tataccttgcctgatatacttttctcccagaac

SEQ ID NO: 316925 - DNA, 33 bp, Homo sapien
atatggctggtagaaaactctgagtccaaggca

SEQ ID NO: 316926 - DNA, 33 bp, Homo sapien
atatggctggtagaaagctctgagtccaaggca

SEQ ID NO: 316927 - DNA, 33 bp, Homo sapien
atattctccaaatcgccgagaccatgcatcaac

SEQ ID NO: 316928 - DNA, 33 bp, Homo sapien
atattctccaaatcgctgagaccatgcatcaac

SEQ ID NO: 316929 - DNA, 33 bp, Homo sapien
gacgatattcttttagcccagtcaaaacttctc

SEQ ID NO: 316930 - DNA, 33 bp, Homo sapien
gacgatattcttttaggccagtcaaaacttctc

SEQ ID NO: 316931 - DNA, 33 bp, Homo sapien
aactggcatcctcttaaaagctaggcaaggtct

SEQ ID NO: 316932 - DNA, 33 bp, Homo sapien
aactggcatcctcttagaagctaggcaaggtct

SEQ ID NO: 316933 - DNA, 33 bp, Homo sapien
ttattacctctacttacctatttgaagtcagat

SEQ ID NO: 316934 - DNA, 33 bp, Homo sapien
ttattacctctacttatctatttgaagtcagat

SEQ ID NO: 316935 - DNA, 33 bp, Homo sapien
ttgaatggtttctcaacactttactacaaaatg

SEQ ID NO: 316936 - DNA, 33 bp, Homo sapien
ttgaatggtttctcaatactttactacaaaatg

SEQ ID NO: 316937 - DNA, 33 bp, Homo sapien
tataaaggctaagcccaacccaggagcctaatg

SEQ ID NO: 316938 - DNA, 33 bp, Homo sapien
tataaaggctaagcccgacccaggagcctaatg

SEQ ID NO: 316939 - DNA, 33 bp, Homo sapien
cactgcaaatgaagataatattctctggcatat

SEQ ID NO: 316940 - DNA, 33 bp, Homo sapien
cactgcaaatgaagatgatattctctggcatat

SEQ ID NO: 316941 - DNA, 33 bp, Homo sapien
ttggaagtggtgtcctcaatggagaggcggatc

SEQ ID NO: 316942 - DNA, 33 bp, Homo sapien
ttggaagtggtgtccttaatggagaggcggatc

SEQ ID NO: 316943 - DNA, 33 bp, Homo sapien
ccctctggtcctctcactacttcatccccattg

SEQ ID NO: 316944 - DNA, 33 bp, Homo sapien
ccctctggtcctctcattacttcatccccattg

SEQ ID NO: 316945 - DNA, 33 bp, Homo sapien
tgatacagtccaacaacgtgctagttgataaca

SEQ ID NO: 316946 - DNA, 33 bp, Homo sapien
tgatacagtccaacaatgtgctagttgataaca

SEQ ID NO: 316947 - DNA, 33 bp, Homo sapien
gaaatcagtattttacaggtgaaaccagaaatt

SEQ ID NO: 316948 - DNA, 33 bp, Homo sapien
gaaatcagtattttacgggtgaaaccagaaatt

SEQ ID NO: 316949 - DNA, 33 bp, Homo sapien
ggggcattaccaatcaagtgacctctggctaga

SEQ ID NO: 316950 - DNA, 33 bp, Homo sapien
ggggcattaccaatcatgtgacctctggctaga

SEQ ID NO: 316951 - DNA, 33 bp, Homo sapien
ctaactcttctggatacaggccaacctaactat

SEQ ID NO: 316952 - DNA, 33 bp, Homo sapien
ctaactcttctggatataggccaacctaactat

SEQ ID NO: 316953 - DNA, 33 bp, Homo sapien
tcaaaaacacagtggccccttatcttggttttc

SEQ ID NO: 316954 - DNA, 33 bp, Homo sapien
tcaaaaacacagtggctccttatcttggttttc

SEQ ID NO: 316955 - DNA, 33 bp, Homo sapien
tagagtttcccatgaacatttggatcacattaa

SEQ ID NO: 316956 - DNA, 33 bp, Homo sapien
tagagtttcccatgaatatttggatcacattaa

SEQ ID NO: 316957 - DNA, 33 bp, Homo sapien
caccagaacgtggtaccgagaggttcctgaaag

SEQ ID NO: 316958 - DNA, 33 bp, Homo sapien
caccagaacgtggtacggagaggttcctgaaag

SEQ ID NO: 316959 - DNA, 33 bp, Homo sapien
atccttgcatacatgacggatcagaaaaccagc

SEQ ID NO: 316960 - DNA, 33 bp, Homo sapien
atccttgcatacatgagggatcagaaaaccagc

SEQ ID NO: 316961 - DNA, 33 bp, Homo sapien
cattgggtagccgtcactagttagcggcaggtg

SEQ ID NO: 316962 - DNA, 33 bp, Homo sapien
cattgggtagccgtcagtagttagcggcaggtg

SEQ ID NO: 316963 - DNA, 33 bp, Homo sapien
gacaagggagagagacaaaaaccattaggagca

SEQ ID NO: 316964 - DNA, 33 bp, Homo sapien
gacaagggagagagacgaaaaccattaggagca

SEQ ID NO: 316965 - DNA, 33 bp, Homo sapien
ggagctcatctttctgcagcatggcgggtccct

SEQ ID NO: 316966 - DNA, 33 bp, Homo sapien
ggagctcatctttctggagcatggcgggtccct

SEQ ID NO: 316967 - DNA, 33 bp, Homo sapien
cagccatggactaaaacgaggttcatgcccaca

SEQ ID NO: 316968 - DNA, 33 bp, Homo sapien
cagccatggactaaaatgaggttcatgcccaca

SEQ ID NO: 316969 - DNA, 33 bp, Homo sapien
actgccaataggaaaggatgggagaaaggacaa

SEQ ID NO: 316970 - DNA, 33 bp, Homo sapien
actgccaataggaaagtatgggagaaaggacaa

SEQ ID NO: 316971 - DNA, 33 bp, Homo sapien
gcaagctttgaaagccagaatcaactttctcaa

SEQ ID NO: 316972 - DNA, 33 bp, Homo sapien
gcaagctttgaaagccggaatcaactttctcaa

SEQ ID NO: 316973 - DNA, 33 bp, Homo sapien
atatgcaagtaactgaatcacctcttctttcat

SEQ ID NO: 316974 - DNA, 33 bp, Homo sapien
atatgcaagtaactgattcacctcttctttcat

SEQ ID NO: 316975 - DNA, 33 bp, Homo sapien
gcctggaggaaatagactatctaatgtacccct

SEQ ID NO: 316976 - DNA, 33 bp, Homo sapien
gcctggaggaaatagagtatctaatgtacccct

SEQ ID NO: 316977 - DNA, 33 bp, Homo sapien
acagtgaccaggaccacgtactaggataggaga

SEQ ID NO: 316978 - DNA, 33 bp, Homo sapien
acagtgaccaggaccatgtactaggataggaga

SEQ ID NO: 316979 - DNA, 33 bp, Homo sapien
gcttacaacctggcaacttatgtagcataggga

SEQ ID NO: 316980 - DNA, 33 bp, Homo sapien
gcttacaacctggcaatttatgtagcataggga

SEQ ID NO: 316981 - DNA, 33 bp, Homo sapien
tgataaggtagcatgaacttttctacataaaaa

SEQ ID NO: 316982 - DNA, 33 bp, Homo sapien
tgataaggtagcatgagcttttctacataaaaa

SEQ ID NO: 316983 - DNA, 33 bp, Homo sapien
aggaaagcaagcccaaagcaaagtgaggtcagc

SEQ ID NO: 316984 - DNA, 33 bp, Homo sapien
aggaaagcaagcccaaggcaaagtgaggtcagc

SEQ ID NO: 316985 - DNA, 33 bp, Homo sapien
ttgatgcctgttttcaaggaacttcactaggaa

SEQ ID NO: 316986 - DNA, 33 bp, Homo sapien
ttgatgcctgttttcagggaacttcactaggaa

SEQ ID NO: 316987 - DNA, 33 bp, Homo sapien
taaggtagggtctcaaccggataggatgagtgt

SEQ ID NO: 316988 - DNA, 33 bp, Homo sapien
taaggtagggtctcaatcggataggatgagtgt

SEQ ID NO: 316989 - DNA, 33 bp, Homo sapien
tgcaaaattcttatgtgaaagccccaatcccaa

SEQ ID NO: 316990 - DNA, 33 bp, Homo sapien
tgcaaaattcttatgttaaagccccaatcccaa

SEQ ID NO: 316991 - DNA, 33 bp, Homo sapien
aaaaagctggaacctaaaagcagaagtgggaac

SEQ ID NO: 316992 - DNA, 33 bp, Homo sapien
aaaaagctggaacctacaagcagaagtgggaac

SEQ ID NO: 316993 - DNA, 33 bp, Homo sapien
gctcacatacctcgtcacttatctgctgctcac

SEQ ID NO: 316994 - DNA, 33 bp, Homo sapien
gctcacatacctcgtcgcttatctgctgctcac

SEQ ID NO: 316995 - DNA, 33 bp, Homo sapien
aaaggacaagggtggcaattgagatagatgcct

SEQ ID NO: 316996 - DNA, 33 bp, Homo sapien
aaaggacaagggtggcgattgagatagatgcct

SEQ ID NO: 316997 - DNA, 33 bp, Homo sapien
gtgtgcactaaccttacgctaggcactattccc

SEQ ID NO: 316998 - DNA, 33 bp, Homo sapien
gtgtgcactaaccttatgctaggcactattccc

SEQ ID NO: 316999 - DNA, 33 bp, Homo sapien
tctattttctgtgggacgaggcatttggccgtt

SEQ ID NO: 317000 - DNA, 33 bp, Homo sapien
tctattttctgtgggatgaggcatttggccgtt

SEQ ID NO: 317001 - DNA, 33 bp, Homo sapien
gatgtggagagtgtgaactggagcacaggcagg

SEQ ID NO: 317002 - DNA, 33 bp, Homo sapien
gatgtggagagtgtgagctggagcacaggcagg

SEQ ID NO: 317003 - DNA, 33 bp, Homo sapien
agaaatcccatagactgagaattactcatatct

SEQ ID NO: 317004 - DNA, 33 bp, Homo sapien
agaaatcccatagacttagaattactcatatct

SEQ ID NO: 317005 - DNA, 33 bp, Homo sapien
tgttggatattattaccaaagccatagtccctt

SEQ ID NO: 317006 - DNA, 33 bp, Homo sapien
tgttggatattattactaaagccatagtccctt

SEQ ID NO: 317007 - DNA, 33 bp, Homo sapien
ttgttataattgactacgactctataacatagg

SEQ ID NO: 317008 - DNA, 33 bp, Homo sapien
ttgttataattgactatgactctataacatagg

SEQ ID NO: 317009 - DNA, 33 bp, Homo sapien
atcaaaaactccagaagaaattctcatgcagtt

SEQ ID NO: 317010 - DNA, 33 bp, Homo sapien
atcaaaaactccagaataaattctcatgcagtt

SEQ ID NO: 317011 - DNA, 33 bp, Homo sapien
atgaggggctccaaaaaagcaaagtctccaaag

SEQ ID NO: 317012 - DNA, 33 bp, Homo sapien
atgaggggctccaaaagagcaaagtctccaaag

SEQ ID NO: 317013 - DNA, 33 bp, Homo sapien
aacgttagtgagggaccgagattgtagaagcaa

SEQ ID NO: 317014 - DNA, 33 bp, Homo sapien
aacgttagtgagggactgagattgtagaagcaa

SEQ ID NO: 317015 - DNA, 33 bp, Homo sapien
gcctcactaggatctaccattgggatcccaacc

SEQ ID NO: 317016 - DNA, 33 bp, Homo sapien
gcctcactaggatctatcattgggatcccaacc

SEQ ID NO: 317017 - DNA, 33 bp, Homo sapien
atctgtgttagtgacacgatatttcatttcaga

SEQ ID NO: 317018 - DNA, 33 bp, Homo sapien
atctgtgttagtgacaggatatttcatttcaga

SEQ ID NO: 317019 - DNA, 33 bp, Homo sapien
aaaaaagagcgttggcaatcttccaggccaggc

SEQ ID NO: 317020 - DNA, 33 bp, Homo sapien
aaaaaagagcgttggccatcttccaggccaggc

SEQ ID NO: 317021 - DNA, 33 bp, Homo sapien
tatatgtctcgtttgacgcctacaaaaacctgg

SEQ ID NO: 317022 - DNA, 33 bp, Homo sapien
tatatgtctcgtttgatgcctacaaaaacctgg

SEQ ID NO: 317023 - DNA, 33 bp, Homo sapien
tcctaagtctagtgccagaagggaactcggtat

SEQ ID NO: 317024 - DNA, 33 bp, Homo sapien
tcctaagtctagtgccggaagggaactcggtat

SEQ ID NO: 317025 - DNA, 33 bp, Homo sapien
cctctcactcaggtcaccatgtttctgttaatg

SEQ ID NO: 317026 - DNA, 33 bp, Homo sapien
cctctcactcaggtcatcatgtttctgttaatg

SEQ ID NO: 317027 - DNA, 33 bp, Homo sapien
ggcaggctccctgctccagatagtgccattatc

SEQ ID NO: 317028 - DNA, 33 bp, Homo sapien
ggcaggctccctgctctagatagtgccattatc

SEQ ID NO: 317029 - DNA, 33 bp, Homo sapien
gggccatctgggggcaccactttgacctgtaga

SEQ ID NO: 317030 - DNA, 33 bp, Homo sapien
gggccatctgggggcatcactttgacctgtaga

SEQ ID NO: 317031 - DNA, 33 bp, Homo sapien
ggaaacttcattctcacccttcttgttccatct

SEQ ID NO: 317032 - DNA, 33 bp, Homo sapien
ggaaacttcattctcatccttcttgttccatct

SEQ ID NO: 317033 - DNA, 33 bp, Homo sapien
gcatgggacagaagtacagaatagaaaagatca

SEQ ID NO: 317034 - DNA, 33 bp, Homo sapien
gcatgggacagaagtagagaatagaaaagatca

SEQ ID NO: 317035 - DNA, 33 bp, Homo sapien
ctcatctctgaatcacccctggtcctctacatc

SEQ ID NO: 317036 - DNA, 33 bp, Homo sapien
ctcatctctgaatcactcctggtcctctacatc

SEQ ID NO: 317037 - DNA, 33 bp, Homo sapien
ccagagggaaagaagcagaacttcagtaacaga

SEQ ID NO: 317038 - DNA, 33 bp, Homo sapien
ccagagggaaagaagcggaacttcagtaacaga

SEQ ID NO: 317039 - DNA, 33 bp, Homo sapien
acgagagccacatacccctacttaggaccaatt

SEQ ID NO: 317040 - DNA, 33 bp, Homo sapien
acgagagccacatacctctacttaggaccaatt

SEQ ID NO: 317041 - DNA, 33 bp, Homo sapien
ttctccctctgctccaatcacgagagccacata

SEQ ID NO: 317042 - DNA, 33 bp, Homo sapien
ttctccctctgctccagtcacgagagccacata

SEQ ID NO: 317043 - DNA, 33 bp, Homo sapien
gcagataagtgtgtccagaagcaaaacaggctg

SEQ ID NO: 317044 - DNA, 33 bp, Homo sapien
gcagataagtgtgtccggaagcaaaacaggctg

SEQ ID NO: 317045 - DNA, 33 bp, Homo sapien
aactgctatggcttcccacagctacaaaataaa

SEQ ID NO: 317046 - DNA, 33 bp, Homo sapien
aactgctatggcttcctacagctacaaaataaa

SEQ ID NO: 317047 - DNA, 33 bp, Homo sapien
ttggtcccagagagataaaaaaaaatgcagcat

SEQ ID NO: 317048 - DNA, 33 bp, Homo sapien
ttggtcccagagagatcaaaaaaaatgcagcat

SEQ ID NO: 317049 - DNA, 33 bp, Homo sapien
gtatgctcagtgaatcacatgggtccttgaaag

SEQ ID NO: 317050 - DNA, 33 bp, Homo sapien
gtatgctcagtgaatcgcatgggtccttgaaag

SEQ ID NO: 317051 - DNA, 33 bp, Homo sapien
cttgagctgaacatggaaaataaagcttttagt

SEQ ID NO: 317052 - DNA, 33 bp, Homo sapien
cttgagctgaacatggcaaataaagcttttagt

SEQ ID NO: 317053 - DNA, 33 bp, Homo sapien
ggcaaacataaggaaaaaggacctctttagtaa

SEQ ID NO: 317054 - DNA, 33 bp, Homo sapien
ggcaaacataaggaaataggacctctttagtaa

SEQ ID NO: 317055 - DNA, 33 bp, Homo sapien
aaaccatcaatgtaaccgatacttctggtttca

SEQ ID NO: 317056 - DNA, 33 bp, Homo sapien
aaaccatcaatgtaactgatacttctggtttca

SEQ ID NO: 317057 - DNA, 33 bp, Homo sapien
tagtatgttagaataaatgagctgtaagactaa

SEQ ID NO: 317058 - DNA, 33 bp, Homo sapien
tagtatgttagaataagtgagctgtaagactaa

SEQ ID NO: 317059 - DNA, 33 bp, Homo sapien
taagtcctttggttcccgaattttgaaaagcat

SEQ ID NO: 317060 - DNA, 33 bp, Homo sapien
taagtcctttggttcctgaattttgaaaagcat

SEQ ID NO: 317061 - DNA, 33 bp, Homo sapien
ggatttttgctcccaaggtttcacagaatgtgc

SEQ ID NO: 317062 - DNA, 33 bp, Homo sapien
ggatttttgctcccaatgtttcacagaatgtgc

SEQ ID NO: 317063 - DNA, 33 bp, Homo sapien
gtttgttatacagaaacagataactgatatacc

SEQ ID NO: 317064 - DNA, 33 bp, Homo sapien
gtttgttatacagaaatagataactgatatacc

SEQ ID NO: 317065 - DNA, 33 bp, Homo sapien
ggaagtttaagcaggaagaaatgaggagtgtgg

SEQ ID NO: 317066 - DNA, 33 bp, Homo sapien
ggaagtttaagcaggaggaaatgaggagtgtgg

SEQ ID NO: 317067 - DNA, 33 bp, Homo sapien
gattctcatgttcaggaagaacgcatcaaacac

SEQ ID NO: 317068 - DNA, 33 bp, Homo sapien
gattctcatgttcagggagaacgcatcaaacac

SEQ ID NO: 317069 - DNA, 33 bp, Homo sapien
agcctagactccaaaccgtattgccaagaaact

SEQ ID NO: 317070 - DNA, 33 bp, Homo sapien
agcctagactccaaactgtattgccaagaaact

SEQ ID NO: 317071 - DNA, 33 bp, Homo sapien
tcttaaaatcctgtcaacttataactgtgaaag

SEQ ID NO: 317072 - DNA, 33 bp, Homo sapien
tcttaaaatcctgtcagcttataactgtgaaag

SEQ ID NO: 317073 - DNA, 33 bp, Homo sapien
aatccctccaaatgtgaacactgtctgataaca

SEQ ID NO: 317074 - DNA, 33 bp, Homo sapien
aatccctccaaatgtgcacactgtctgataaca

SEQ ID NO: 317075 - DNA, 33 bp, Homo sapien
aaagtgtaccagattgaaactagatttgggcta

SEQ ID NO: 317076 - DNA, 33 bp, Homo sapien
aaagtgtaccagattgcaactagatttgggcta

SEQ ID NO: 317077 - DNA, 33 bp, Homo sapien
caacctttgctgcccacgacactgggtttcttc

SEQ ID NO: 317078 - DNA, 33 bp, Homo sapien
caacctttgctgcccatgacactgggtttcttc

SEQ ID NO: 317079 - DNA, 33 bp, Homo sapien
cctgtcccggatgttccatcaactgtgtggtcc

SEQ ID NO: 317080 - DNA, 33 bp, Homo sapien
cctgtcccggatgttctatcaactgtgtggtcc

SEQ ID NO: 317081 - DNA, 33 bp, Homo sapien
gtcgctgtgctaagaacgtaaagggggagctgg

SEQ ID NO: 317082 - DNA, 33 bp, Homo sapien
gtcgctgtgctaagaatgtaaagggggagctgg

SEQ ID NO: 317083 - DNA, 33 bp, Homo sapien
gctgccttccgaatccactcctttgtgatcctg

SEQ ID NO: 317084 - DNA, 33 bp, Homo sapien
gctgccttccgaatcctctcctttgtgatcctg

SEQ ID NO: 317085 - DNA, 33 bp, Homo sapien
aaggccacatgggttacaggcagtcaaaattta

SEQ ID NO: 317086 - DNA, 33 bp, Homo sapien
aaggccacatgggttagaggcagtcaaaattta

SEQ ID NO: 317087 - DNA, 33 bp, Homo sapien
tgcattacacaatttcaaggaacattgatctga

SEQ ID NO: 317088 - DNA, 33 bp, Homo sapien
tgcattacacaatttcgaggaacattgatctga

SEQ ID NO: 317089 - DNA, 33 bp, Homo sapien
gttaatcagtatacaaatattagtacccaaata

SEQ ID NO: 317090 - DNA, 33 bp, Homo sapien
gttaatcagtatacaattattagtacccaaata

SEQ ID NO: 317091 - DNA, 33 bp, Homo sapien
gttgttacatggagtcaaaccagaggctacagg

SEQ ID NO: 317092 - DNA, 33 bp, Homo sapien
gttgttacatggagtcgaaccagaggctacagg

SEQ ID NO: 317093 - DNA, 33 bp, Homo sapien
tacaggttgtacccaccgggccttctattctca

SEQ ID NO: 317094 - DNA, 33 bp, Homo sapien
tacaggttgtacccactgggccttctattctca

SEQ ID NO: 317095 - DNA, 33 bp, Homo sapien
tttctgagttatgaaacccttctctcctagagc

SEQ ID NO: 317096 - DNA, 33 bp, Homo sapien
tttctgagttatgaaagccttctctcctagagc

SEQ ID NO: 317097 - DNA, 33 bp, Homo sapien
cctggggaattgtgaaaaaaatgcagacttcaa

SEQ ID NO: 317098 - DNA, 33 bp, Homo sapien
cctggggaattgtgaataaaatgcagacttcaa

SEQ ID NO: 317099 - DNA, 33 bp, Homo sapien
agacggagctacaacacggacctatgactgatt

SEQ ID NO: 317100 - DNA, 33 bp, Homo sapien
agacggagctacaacagggacctatgactgatt

SEQ ID NO: 317101 - DNA, 33 bp, Homo sapien
taatacccactgctcaatcaatctcttttcact

SEQ ID NO: 317102 - DNA, 33 bp, Homo sapien
taatacccactgctcagtcaatctcttttcact

SEQ ID NO: 317103 - DNA, 33 bp, Homo sapien
tcttgaggcaaaatatcacgagaagcctgagat

SEQ ID NO: 317104 - DNA, 33 bp, Homo sapien
tcttgaggcaaaatatgacgagaagcctgagat

SEQ ID NO: 317105 - DNA, 33 bp, Homo sapien
ctctattgtctcaggaaaagaatatattgccct

SEQ ID NO: 317106 - DNA, 33 bp, Homo sapien
ctctattgtctcaggataagaatatattgccct

SEQ ID NO: 317107 - DNA, 33 bp, Homo sapien
tagtgctcagtaaataaccactgacagttctgg

SEQ ID NO: 317108 - DNA, 33 bp, Homo sapien
tagtgctcagtaaatatccactgacagttctgg

SEQ ID NO: 317109 - DNA, 33 bp, Homo sapien
cttacttaatcttccacagtccacttaatcctc

SEQ ID NO: 317110 - DNA, 33 bp, Homo sapien
cttacttaatcttccatagtccacttaatcctc

SEQ ID NO: 317111 - DNA, 33 bp, Homo sapien
cattgattatgaagacaaaacttatccatcctg

SEQ ID NO: 317112 - DNA, 33 bp, Homo sapien
cattgattatgaagacgaaacttatccatcctg

SEQ ID NO: 317113 - DNA, 33 bp, Homo sapien
gggagatccagatccaatcattctgtttcccag

SEQ ID NO: 317114 - DNA, 33 bp, Homo sapien
gggagatccagatccagtcattctgtttcccag

SEQ ID NO: 317115 - DNA, 33 bp, Homo sapien
tttctgtataaagacaccttatgtaatatatat

SEQ ID NO: 317116 - DNA, 33 bp, Homo sapien
tttctgtataaagacagcttatgtaatatatat

SEQ ID NO: 317117 - DNA, 33 bp, Homo sapien
gaccccatggtttctgaaatcccataaaagcaa

SEQ ID NO: 317118 - DNA, 33 bp, Homo sapien
gaccccatggtttctggaatcccataaaagcaa

SEQ ID NO: 317119 - DNA, 33 bp, Homo sapien
catgctacagattccagatcttggtctagatac

SEQ ID NO: 317120 - DNA, 33 bp, Homo sapien
catgctacagattccatatcttggtctagatac

SEQ ID NO: 317121 - DNA, 33 bp, Homo sapien
ccccctttaatattccaattccaggtcttctca

SEQ ID NO: 317122 - DNA, 33 bp, Homo sapien
ccccctttaatattccgattccaggtcttctca

SEQ ID NO: 317123 - DNA, 33 bp, Homo sapien
gcaccccgctgactaggagtgcctcttatagcc

SEQ ID NO: 317124 - DNA, 33 bp, Homo sapien
gcaccccgctgactagtagtgcctcttatagcc

SEQ ID NO: 317125 - DNA, 33 bp, Homo sapien
ggaaacagtaaaattacatgggcatacatattt

SEQ ID NO: 317126 - DNA, 33 bp, Homo sapien
ggaaacagtaaaattagatgggcatacatattt

SEQ ID NO: 317127 - DNA, 33 bp, Homo sapien
aagttacataaataaactcagaggctttgtaaa

SEQ ID NO: 317128 - DNA, 33 bp, Homo sapien
aagttacataaataaagtcagaggctttgtaaa

SEQ ID NO: 317129 - DNA, 33 bp, Homo sapien
ggtactggtcggaaggcaaatttattgtattag

SEQ ID NO: 317130 - DNA, 33 bp, Homo sapien
ggtactggtcggaagggaaatttattgtattag

SEQ ID NO: 317131 - DNA, 33 bp, Homo sapien
gtgttcctctatagcaggtcttgacgcctcttg

SEQ ID NO: 317132 - DNA, 33 bp, Homo sapien
gtgttcctctatagcatgtcttgacgcctcttg

SEQ ID NO: 317133 - DNA, 33 bp, Homo sapien
gccatgtcatgccttcgctaaaaaaggtctagg

SEQ ID NO: 317134 - DNA, 33 bp, Homo sapien
gccatgtcatgccttctctaaaaaaggtctagg

SEQ ID NO: 317135 - DNA, 33 bp, Homo sapien
gatcattctttttgtacgcccagctatttggaa

SEQ ID NO: 317136 - DNA, 33 bp, Homo sapien
gatcattctttttgtatgcccagctatttggaa

SEQ ID NO: 317137 - DNA, 33 bp, Homo sapien
taagtggacagaacaccgtagctatcctagatt

SEQ ID NO: 317138 - DNA, 33 bp, Homo sapien
taagtggacagaacactgtagctatcctagatt

SEQ ID NO: 317139 - DNA, 33 bp, Homo sapien
gaagccctggcaatcactattttctttaattaa

SEQ ID NO: 317140 - DNA, 33 bp, Homo sapien
gaagccctggcaatcagtattttctttaattaa

SEQ ID NO: 317141 - DNA, 33 bp, Homo sapien
aaaagttgccagatgacgtaattctttatgtca

SEQ ID NO: 317142 - DNA, 33 bp, Homo sapien
aaaagttgccagatgatgtaattctttatgtca

SEQ ID NO: 317143 - DNA, 33 bp, Homo sapien
aaggtgtggtctgtgaaccagaagaagaaccat

SEQ ID NO: 317144 - DNA, 33 bp, Homo sapien
aaggtgtggtctgtgatccagaagaagaaccat

SEQ ID NO: 317145 - DNA, 33 bp, Homo sapien
ccatgccattgattaaactccctggaccattcc

SEQ ID NO: 317146 - DNA, 33 bp, Homo sapien
ccatgccattgattaagctccctggaccattcc

SEQ ID NO: 317147 - DNA, 33 bp, Homo sapien
tttactttgctctttgaaattctgaaatgagcc

SEQ ID NO: 317148 - DNA, 33 bp, Homo sapien
tttactttgctctttggaattctgaaatgagcc

SEQ ID NO: 317149 - DNA, 33 bp, Homo sapien
tatctagtgatcttagaaaactggtgacttttt

SEQ ID NO: 317150 - DNA, 33 bp, Homo sapien
tatctagtgatcttagcaaactggtgacttttt

SEQ ID NO: 317151 - DNA, 33 bp, Homo sapien
tgtattactttaaaaactcagagcatgtgctgc

SEQ ID NO: 317152 - DNA, 33 bp, Homo sapien
tgtattactttaaaaattcagagcatgtgctgc

SEQ ID NO: 317153 - DNA, 33 bp, Homo sapien
tggccaggcatggctacacagatgcacctccac

SEQ ID NO: 317154 - DNA, 33 bp, Homo sapien
tggccaggcatggctatacagatgcacctccac

SEQ ID NO: 317155 - DNA, 33 bp, Homo sapien
taaaccaagtttaagccctgctgcctacgtctc

SEQ ID NO: 317156 - DNA, 33 bp, Homo sapien
taaaccaagtttaagctctgctgcctacgtctc

SEQ ID NO: 317157 - DNA, 33 bp, Homo sapien
atcaaaggtgttcctacggtgcagaacagaaaa

SEQ ID NO: 317158 - DNA, 33 bp, Homo sapien
atcaaaggtgttcctatggtgcagaacagaaaa

SEQ ID NO: 317159 - DNA, 33 bp, Homo sapien
ggaaagaacacagttcaataactggatcatcaa

SEQ ID NO: 317160 - DNA, 33 bp, Homo sapien
ggaaagaacacagttccataactggatcatcaa

SEQ ID NO: 317161 - DNA, 33 bp, Homo sapien
ttcgactaatatctgaccctgtgctagacagta

SEQ ID NO: 317162 - DNA, 33 bp, Homo sapien
ttcgactaatatctgagcctgtgctagacagta

SEQ ID NO: 317163 - DNA, 33 bp, Homo sapien
gagtgtgtgcactctccgaacttctcagcctcg

SEQ ID NO: 317164 - DNA, 33 bp, Homo sapien
gagtgtgtgcactctctgaacttctcagcctcg

SEQ ID NO: 317165 - DNA, 33 bp, Homo sapien
cctcatgagaaatcagaatgtgcagaacacaag

SEQ ID NO: 317166 - DNA, 33 bp, Homo sapien
cctcatgagaaatcagtatgtgcagaacacaag

SEQ ID NO: 317167 - DNA, 33 bp, Homo sapien
atagcactgaagttagaagaaaatggcagcccc

SEQ ID NO: 317168 - DNA, 33 bp, Homo sapien
atagcactgaagttaggagaaaatggcagcccc

SEQ ID NO: 317169 - DNA, 33 bp, Homo sapien
gtgaaccctgaacaaccgagcagggcctgtggt

SEQ ID NO: 317170 - DNA, 33 bp, Homo sapien
gtgaaccctgaacaactgagcagggcctgtggt

SEQ ID NO: 317171 - DNA, 33 bp, Homo sapien
ctttttttgtttgcaccaagcaccaagtacatc

SEQ ID NO: 317172 - DNA, 33 bp, Homo sapien
ctttttttgtttgcactaagcaccaagtacatc

SEQ ID NO: 317173 - DNA, 33 bp, Homo sapien
gatgcttctaaatccaataacagcatccttagg

SEQ ID NO: 317174 - DNA, 33 bp, Homo sapien
gatgcttctaaatccagtaacagcatccttagg

SEQ ID NO: 317175 - DNA, 33 bp, Homo sapien
tggattcctaaccggaagaagtacaccagggaa

SEQ ID NO: 317176 - DNA, 33 bp, Homo sapien
tggattcctaaccggaggaagtacaccagggaa

SEQ ID NO: 317177 - DNA, 33 bp, Homo sapien
tcataaaggatgtatacgtgtggaattagaggc

SEQ ID NO: 317178 - DNA, 33 bp, Homo sapien
tcataaaggatgtatatgtgtggaattagaggc

SEQ ID NO: 317179 - DNA, 33 bp, Homo sapien
gtctggccactattcaacttatcccatggtctt

SEQ ID NO: 317180 - DNA, 33 bp, Homo sapien
gtctggccactattcagcttatcccatggtctt

SEQ ID NO: 317181 - DNA, 33 bp, Homo sapien
acggtgcttcttacacagagtctcggtttcctg

SEQ ID NO: 317182 - DNA, 33 bp, Homo sapien
acggtgcttcttacacggagtctcggtttcctg

SEQ ID NO: 317183 - DNA, 33 bp, Homo sapien
cttcccactaacgccaaagcagctggactctga

SEQ ID NO: 317184 - DNA, 33 bp, Homo sapien
cttcccactaacgccagagcagctggactctga

SEQ ID NO: 317185 - DNA, 33 bp, Homo sapien
cagctaaccacagtcagaactattcacttacct

SEQ ID NO: 317186 - DNA, 33 bp, Homo sapien
cagctaaccacagtcataactattcacttacct

SEQ ID NO: 317187 - DNA, 33 bp, Homo sapien
atgagcttcagtggaaacaaaccatacgcaaag

SEQ ID NO: 317188 - DNA, 33 bp, Homo sapien
atgagcttcagtggaagcaaaccatacgcaaag

SEQ ID NO: 317189 - DNA, 33 bp, Homo sapien
tgcaatgctggcaaaaagtcatacaggtggcca

SEQ ID NO: 317190 - DNA, 33 bp, Homo sapien
tgcaatgctggcaaaatgtcatacaggtggcca

SEQ ID NO: 317191 - DNA, 33 bp, Homo sapien
aaggaagagttttaaacggtagagtactatgtt

SEQ ID NO: 317192 - DNA, 33 bp, Homo sapien
aaggaagagttttaaatggtagagtactatgtt

SEQ ID NO: 317193 - DNA, 33 bp, Homo sapien
ttgttaccattcccacaggtttgagttagctct

SEQ ID NO: 317194 - DNA, 33 bp, Homo sapien
ttgttaccattcccacgggtttgagttagctct

SEQ ID NO: 317195 - DNA, 33 bp, Homo sapien
cctttcttcacccaggacaacgagtttgtggaa

SEQ ID NO: 317196 - DNA, 33 bp, Homo sapien
cctttcttcacccaggccaacgagtttgtggaa

SEQ ID NO: 317197 - DNA, 33 bp, Homo sapien
ccttaatcttgaaaagccagaccattttatacc

SEQ ID NO: 317198 - DNA, 33 bp, Homo sapien
ccttaatcttgaaaagtcagaccattttatacc

SEQ ID NO: 317199 - DNA, 33 bp, Homo sapien
catcccgtgcagaaaaagttgctttctcgggtg

SEQ ID NO: 317200 - DNA, 33 bp, Homo sapien
catcccgtgcagaaaacgttgctttctcgggtg

SEQ ID NO: 317201 - DNA, 33 bp, Homo sapien
tttctcgggtgagggacgcctcgcagtatggac

SEQ ID NO: 317202 - DNA, 33 bp, Homo sapien
tttctcgggtgagggatgcctcgcagtatggac

SEQ ID NO: 317203 - DNA, 33 bp, Homo sapien
aagactctgagcccccaacattggctcttagct

SEQ ID NO: 317204 - DNA, 33 bp, Homo sapien
aagactctgagcccccgacattggctcttagct

SEQ ID NO: 317205 - DNA, 33 bp, Homo sapien
aaatggcttggatgaccgctctgaacatgcacc

SEQ ID NO: 317206 - DNA, 33 bp, Homo sapien
aaatggcttggatgactgctctgaacatgcacc

SEQ ID NO: 317207 - DNA, 33 bp, Homo sapien
gagtggaatggctgccgctggtccttgctcact

SEQ ID NO: 317208 - DNA, 33 bp, Homo sapien
gagtggaatggctgcctctggtccttgctcact

SEQ ID NO: 317209 - DNA, 33 bp, Homo sapien
ccgcctgccatctccaagcctctgtgctgaagc

SEQ ID NO: 317210 - DNA, 33 bp, Homo sapien
ccgcctgccatctccaggcctctgtgctgaagc

SEQ ID NO: 317211 - DNA, 33 bp, Homo sapien
gtatacatgcaccaaaagatcatgcctgtcttc

SEQ ID NO: 317212 - DNA, 33 bp, Homo sapien
gtatacatgcaccaaatgatcatgcctgtcttc

SEQ ID NO: 317213 - DNA, 33 bp, Homo sapien
ttcttttcatgaaagacatttggcaatagttgg

SEQ ID NO: 317214 - DNA, 33 bp, Homo sapien
ttcttttcatgaaagatatttggcaatagttgg

SEQ ID NO: 317215 - DNA, 33 bp, Homo sapien
gtctgggaagaactccagatgttttccatgtcc

SEQ ID NO: 317216 - DNA, 33 bp, Homo sapien
gtctgggaagaactccggatgttttccatgtcc

SEQ ID NO: 317217 - DNA, 33 bp, Homo sapien
gtcttggaggaggtacaagttgagcagaaccct

SEQ ID NO: 317218 - DNA, 33 bp, Homo sapien
gtcttggaggaggtacgagttgagcagaaccct

SEQ ID NO: 317219 - DNA, 33 bp, Homo sapien
tttgaagagttatcaacaggggagtgatacgat

SEQ ID NO: 317220 - DNA, 33 bp, Homo sapien
tttgaagagttatcaataggggagtgatacgat

SEQ ID NO: 317221 - DNA, 33 bp, Homo sapien
ccaaagccaatttcacaccacacctccattaca

SEQ ID NO: 317222 - DNA, 33 bp, Homo sapien
ccaaagccaatttcacgccacacctccattaca

SEQ ID NO: 317223 - DNA, 33 bp, Homo sapien
cagaaaagtatttgccacatcccacaccctcaa

SEQ ID NO: 317224 - DNA, 33 bp, Homo sapien
cagaaaagtatttgccgcatcccacaccctcaa

SEQ ID NO: 317225 - DNA, 33 bp, Homo sapien
ttttctggctctaaagccttctccactgtgtaa

SEQ ID NO: 317226 - DNA, 33 bp, Homo sapien
ttttctggctctaaaggcttctccactgtgtaa

SEQ ID NO: 317227 - DNA, 33 bp, Homo sapien
tagaaaagaagggtaaaaggaatgtgatgtaat

SEQ ID NO: 317228 - DNA, 33 bp, Homo sapien
tagaaaagaagggtaagaggaatgtgatgtaat

SEQ ID NO: 317229 - DNA, 33 bp, Homo sapien
agtaaaatgaagtttcacatatttattacacat

SEQ ID NO: 317230 - DNA, 33 bp, Homo sapien
agtaaaatgaagtttcccatatttattacacat

SEQ ID NO: 317231 - DNA, 33 bp, Homo sapien
gcatttagcttatccacgtatcttttgatgaac

SEQ ID NO: 317232 - DNA, 33 bp, Homo sapien
gcatttagcttatccatgtatcttttgatgaac

SEQ ID NO: 317233 - DNA, 33 bp, Homo sapien
cacacgaatagtctaacgctgggtattctggtc

SEQ ID NO: 317234 - DNA, 33 bp, Homo sapien
cacacgaatagtctaaggctgggtattctggtc

SEQ ID NO: 317235 - DNA, 33 bp, Homo sapien
cagccagaaagggccacgttagaacacccgccg

SEQ ID NO: 317236 - DNA, 33 bp, Homo sapien
cagccagaaagggccatgttagaacacccgccg

SEQ ID NO: 317237 - DNA, 33 bp, Homo sapien
ttggaaagtaaatgaactgacagaattgcacaa

SEQ ID NO: 317238 - DNA, 33 bp, Homo sapien
ttggaaagtaaatgaattgacagaattgcacaa

SEQ ID NO: 317239 - DNA, 33 bp, Homo sapien
ttgggttgtattcaaacgtgatgaaagtgttga

SEQ ID NO: 317240 - DNA, 33 bp, Homo sapien
ttgggttgtattcaaatgtgatgaaagtgttga

SEQ ID NO: 317241 - DNA, 33 bp, Homo sapien
ccaagctgatgctctcacgcctttgtttctccc

SEQ ID NO: 317242 - DNA, 33 bp, Homo sapien
ccaagctgatgctctcgcgcctttgtttctccc

SEQ ID NO: 317243 - DNA, 33 bp, Homo sapien
tattgtacaattgaaaagagaattcagtttcac

SEQ ID NO: 317244 - DNA, 33 bp, Homo sapien
tattgtacaattgaaaggagaattcagtttcac

SEQ ID NO: 317245 - DNA, 33 bp, Homo sapien
gggcacagagttagaccagggttgctgggaaca

SEQ ID NO: 317246 - DNA, 33 bp, Homo sapien
gggcacagagttagacgagggttgctgggaaca

SEQ ID NO: 317247 - DNA, 33 bp, Homo sapien
ttgagggcattaaggcacatattctttaaggct

SEQ ID NO: 317248 - DNA, 33 bp, Homo sapien
ttgagggcattaaggcgcatattctttaaggct

SEQ ID NO: 317249 - DNA, 33 bp, Homo sapien
gttagcagctacaataatattcaagccacccat

SEQ ID NO: 317250 - DNA, 33 bp, Homo sapien
gttagcagctacaatagtattcaagccacccat

SEQ ID NO: 317251 - DNA, 33 bp, Homo sapien
gtttctaatggtatcaagggtattagcatcttc

SEQ ID NO: 317252 - DNA, 33 bp, Homo sapien
gtttctaatggtatcatgggtattagcatcttc

SEQ ID NO: 317253 - DNA, 33 bp, Homo sapien
accccaaccaaactgacgcaagtgtgggaaatg

SEQ ID NO: 317254 - DNA, 33 bp, Homo sapien
accccaaccaaactgatgcaagtgtgggaaatg

SEQ ID NO: 317255 - DNA, 33 bp, Homo sapien
tgaactctcagctccactaccctaaagcacaca

SEQ ID NO: 317256 - DNA, 33 bp, Homo sapien
tgaactctcagctccattaccctaaagcacaca

SEQ ID NO: 317257 - DNA, 33 bp, Homo sapien
gaggatggaaacaaacagaatctgaggcaggta

SEQ ID NO: 317258 - DNA, 33 bp, Homo sapien
gaggatggaaacaaacggaatctgaggcaggta

SEQ ID NO: 317259 - DNA, 33 bp, Homo sapien
cctttcccttcccctcacatgttacggcaggcc

SEQ ID NO: 317260 - DNA, 33 bp, Homo sapien
cctttcccttcccctcgcatgttacggcaggcc

SEQ ID NO: 317261 - DNA, 33 bp, Homo sapien
atacatgagcagcacaacaaattcttcttggct

SEQ ID NO: 317262 - DNA, 33 bp, Homo sapien
atacatgagcagcacagcaaattcttcttggct

SEQ ID NO: 317263 - DNA, 33 bp, Homo sapien
gagaaatcagactgtggacagagccaagaagaa

SEQ ID NO: 317264 - DNA, 33 bp, Homo sapien
gagaaatcagactgtgtacagagccaagaagaa

SEQ ID NO: 317265 - DNA, 33 bp, Homo sapien
gaaaaagtattgaacaaggaaatcaggcaacct

SEQ ID NO: 317266 - DNA, 33 bp, Homo sapien
gaaaaagtattgaacagggaaatcaggcaacct

SEQ ID NO: 317267 - DNA, 33 bp, Homo sapien
gcaatctgcatcacacaggtaaattgtaatctc

SEQ ID NO: 317268 - DNA, 33 bp, Homo sapien
gcaatctgcatcacacgggtaaattgtaatctc

SEQ ID NO: 317269 - DNA, 33 bp, Homo sapien
acccgaaagagctgcaaatccttcagttctgtt

SEQ ID NO: 317270 - DNA, 33 bp, Homo sapien
acccgaaagagctgcacatccttcagttctgtt

SEQ ID NO: 317271 - DNA, 33 bp, Homo sapien
tctccttgtgaatgacagggttagtcagggtag

SEQ ID NO: 317272 - DNA, 33 bp, Homo sapien
tctccttgtgaatgacggggttagtcagggtag

SEQ ID NO: 317273 - DNA, 33 bp, Homo sapien
ccttaaaagttaagaaaggaaactggcttcatt

SEQ ID NO: 317274 - DNA, 33 bp, Homo sapien
ccttaaaagttaagaagggaaactggcttcatt

SEQ ID NO: 317275 - DNA, 33 bp, Homo sapien
caacctggacttgaaactggcatatgaagttga

SEQ ID NO: 317276 - DNA, 33 bp, Homo sapien
caacctggacttgaaattggcatatgaagttga

SEQ ID NO: 317277 - DNA, 33 bp, Homo sapien
aactaccaattcacaggaataacaccatgggaa

SEQ ID NO: 317278 - DNA, 33 bp, Homo sapien
aactaccaattcacagtaataacaccatgggaa

SEQ ID NO: 317279 - DNA, 33 bp, Homo sapien
ccatcatctccagggaagtccttttaaacagac

SEQ ID NO: 317280 - DNA, 33 bp, Homo sapien
ccatcatctccagggaggtccttttaaacagac

SEQ ID NO: 317281 - DNA, 33 bp, Homo sapien
caggtgttggcagagactcggaaccaaaattta

SEQ ID NO: 317282 - DNA, 33 bp, Homo sapien
caggtgttggcagagattcggaaccaaaattta

SEQ ID NO: 317283 - DNA, 33 bp, Homo sapien
gatgggatcacagaaggacctccatcactcaca

SEQ ID NO: 317284 - DNA, 33 bp, Homo sapien
gatgggatcacagaagtacctccatcactcaca

SEQ ID NO: 317285 - DNA, 33 bp, Homo sapien
agatcagctagtctcaaatttctcaggatcact

SEQ ID NO: 317286 - DNA, 33 bp, Homo sapien
agatcagctagtctcatatttctcaggatcact

SEQ ID NO: 317287 - DNA, 33 bp, Homo sapien
tcacactaagtcattaccaggaacatagaaagg

SEQ ID NO: 317288 - DNA, 33 bp, Homo sapien
tcacactaagtcattagcaggaacatagaaagg

SEQ ID NO: 317289 - DNA, 33 bp, Homo sapien
ggacagggtatgatccaagcccttcacagtgcc

SEQ ID NO: 317290 - DNA, 33 bp, Homo sapien
ggacagggtatgatcccagcccttcacagtgcc

SEQ ID NO: 317291 - DNA, 33 bp, Homo sapien
gtttgttctctgtctccaagacctataaataaa

SEQ ID NO: 317292 - DNA, 33 bp, Homo sapien
gtttgttctctgtctctaagacctataaataaa

SEQ ID NO: 317293 - DNA, 33 bp, Homo sapien
aaagacgagaaaaacaagttcacagaggttaag

SEQ ID NO: 317294 - DNA, 33 bp, Homo sapien
aaagacgagaaaaacaggttcacagaggttaag

SEQ ID NO: 317295 - DNA, 33 bp, Homo sapien
ggtccaatgaaaatcacgttgaatttgccagca

SEQ ID NO: 317296 - DNA, 33 bp, Homo sapien
ggtccaatgaaaatcatgttgaatttgccagca

SEQ ID NO: 317297 - DNA, 33 bp, Homo sapien
ctagttttcgatcaccacatcctacgttgtatg

SEQ ID NO: 317298 - DNA, 33 bp, Homo sapien
ctagttttcgatcaccgcatcctacgttgtatg

SEQ ID NO: 317299 - DNA, 33 bp, Homo sapien
atttttagatacaagacacaagcccaacgtgtc

SEQ ID NO: 317300 - DNA, 33 bp, Homo sapien
atttttagatacaagagacaagcccaacgtgtc

SEQ ID NO: 317301 - DNA, 33 bp, Homo sapien
caaagcagcagggaaccggaaagagagaggggt

SEQ ID NO: 317302 - DNA, 33 bp, Homo sapien
caaagcagcagggaactggaaagagagaggggt

SEQ ID NO: 317303 - DNA, 33 bp, Homo sapien
tagcctagaaattccaaccccattcagctatca

SEQ ID NO: 317304 - DNA, 33 bp, Homo sapien
tagcctagaaattccagccccattcagctatca

SEQ ID NO: 317305 - DNA, 33 bp, Homo sapien
aatgtactcattcaaaatatatagttctatgaa

SEQ ID NO: 317306 - DNA, 33 bp, Homo sapien
aatgtactcattcaaagtatatagttctatgaa

SEQ ID NO: 317307 - DNA, 33 bp, Homo sapien
tttatgcctgtactccaagcatctcaggaggct

SEQ ID NO: 317308 - DNA, 33 bp, Homo sapien
tttatgcctgtactccgagcatctcaggaggct

SEQ ID NO: 317309 - DNA, 33 bp, Homo sapien
tcccaaaatagaattcacaggactgggtgtccc

SEQ ID NO: 317310 - DNA, 33 bp, Homo sapien
tcccaaaatagaattcgcaggactgggtgtccc

SEQ ID NO: 317311 - DNA, 33 bp, Homo sapien
atgaacaccaatatcccctttgcttagattcac

SEQ ID NO: 317312 - DNA, 33 bp, Homo sapien
atgaacaccaatatcctctttgcttagattcac

SEQ ID NO: 317313 - DNA, 33 bp, Homo sapien
atgaagaatgctaacacaaactttcatgtacaa

SEQ ID NO: 317314 - DNA, 33 bp, Homo sapien
atgaagaatgctaacataaactttcatgtacaa

SEQ ID NO: 317315 - DNA, 33 bp, Homo sapien
agagccctttactggaaacacacccaagaagat

SEQ ID NO: 317316 - DNA, 33 bp, Homo sapien
agagccctttactggagacacacccaagaagat

SEQ ID NO: 317317 - DNA, 33 bp, Homo sapien
ctgtgcccagcctaaaactagctaactcagttt

SEQ ID NO: 317318 - DNA, 33 bp, Homo sapien
ctgtgcccagcctaaacctagctaactcagttt

SEQ ID NO: 317319 - DNA, 33 bp, Homo sapien
aatacatttcaatgcaataaacagaccaatgct

SEQ ID NO: 317320 - DNA, 33 bp, Homo sapien
aatacatttcaatgcactaaacagaccaatgct

SEQ ID NO: 317321 - DNA, 33 bp, Homo sapien
atgcaaaagccaaagaaccttaggtgtcccttc

SEQ ID NO: 317322 - DNA, 33 bp, Homo sapien
atgcaaaagccaaagagccttaggtgtcccttc

SEQ ID NO: 317323 - DNA, 33 bp, Homo sapien
gctcagtggcacacgacctgagttagttccctg

SEQ ID NO: 317324 - DNA, 33 bp, Homo sapien
gctcagtggcacacgatctgagttagttccctg

SEQ ID NO: 317325 - DNA, 33 bp, Homo sapien
gcctcctacagcttcacactggaaaatacgagc

SEQ ID NO: 317326 - DNA, 33 bp, Homo sapien
gcctcctacagcttcatactggaaaatacgagc

SEQ ID NO: 317327 - DNA, 33 bp, Homo sapien
tggcaaccaagacatgcatgtaactctgagatc

SEQ ID NO: 317328 - DNA, 33 bp, Homo sapien
tggcaaccaagacatgtatgtaactctgagatc

SEQ ID NO: 317329 - DNA, 33 bp, Homo sapien
agaaactttgtatgcactaaacaatacttttcc

SEQ ID NO: 317330 - DNA, 33 bp, Homo sapien
agaaactttgtatgcattaaacaatacttttcc

SEQ ID NO: 317331 - DNA, 33 bp, Homo sapien
taaaatatacataacacacagtgtaccatttta

SEQ ID NO: 317332 - DNA, 33 bp, Homo sapien
taaaatatacataacatacagtgtaccatttta

SEQ ID NO: 317333 - DNA, 33 bp, Homo sapien
gtttcccaggtatgcacaaatcaaccagaacgt

SEQ ID NO: 317334 - DNA, 33 bp, Homo sapien
gtttcccaggtatgcagaaatcaaccagaacgt

SEQ ID NO: 317335 - DNA, 33 bp, Homo sapien
cagcagacaacacaaaactataagaaacccatc

SEQ ID NO: 317336 - DNA, 33 bp, Homo sapien
cagcagacaacacaaagctataagaaacccatc

SEQ ID NO: 317337 - DNA, 33 bp, Homo sapien
ggttggcacttgctacagaaatgccattctttc

SEQ ID NO: 317338 - DNA, 33 bp, Homo sapien
ggttggcacttgctacggaaatgccattctttc

SEQ ID NO: 317339 - DNA, 33 bp, Homo sapien
ttcatttgaaagaggaagtgtgccacaaaagcc

SEQ ID NO: 317340 - DNA, 33 bp, Homo sapien
ttcatttgaaagaggaggtgtgccacaaaagcc

SEQ ID NO: 317341 - DNA, 33 bp, Homo sapien
aggagaagaaggagaactgatacatatcaaaga

SEQ ID NO: 317342 - DNA, 33 bp, Homo sapien
aggagaagaaggagaagtgatacatatcaaaga

SEQ ID NO: 317343 - DNA, 33 bp, Homo sapien
ccatcctttcctttacaacatgctctgaattga

SEQ ID NO: 317344 - DNA, 33 bp, Homo sapien
ccatcctttcctttacgacatgctctgaattga

SEQ ID NO: 317345 - DNA, 33 bp, Homo sapien
taacaattgttattaaaaacagagaaatggaga

SEQ ID NO: 317346 - DNA, 33 bp, Homo sapien
taacaattgttattaagaacagagaaatggaga

SEQ ID NO: 317347 - DNA, 33 bp, Homo sapien
gggaaagaacagatgacaaggaatggtggagtt

SEQ ID NO: 317348 - DNA, 33 bp, Homo sapien
gggaaagaacagatgagaaggaatggtggagtt

SEQ ID NO: 317349 - DNA, 33 bp, Homo sapien
taagtcctctttataagtcctcttttccttgct

SEQ ID NO: 317350 - DNA, 33 bp, Homo sapien
taagtcctctttataattcctcttttccttgct

SEQ ID NO: 317351 - DNA, 33 bp, Homo sapien
ctccccttgaatttgcagatggactcaccaaag

SEQ ID NO: 317352 - DNA, 33 bp, Homo sapien
ctccccttgaatttgccgatggactcaccaaag

SEQ ID NO: 317353 - DNA, 33 bp, Homo sapien
cagatggggggaaaaaaatgcccacttccatag

SEQ ID NO: 317354 - DNA, 33 bp, Homo sapien
cagatggggggaaaaagatgcccacttccatag

SEQ ID NO: 317355 - DNA, 33 bp, Homo sapien
agtttctggcaacaaacgaactagatgggcaaa

SEQ ID NO: 317356 - DNA, 33 bp, Homo sapien
agtttctggcaacaaatgaactagatgggcaaa

SEQ ID NO: 317357 - DNA, 33 bp, Homo sapien
tgctattggatttgaactattgtttcatgttac

SEQ ID NO: 317358 - DNA, 33 bp, Homo sapien
tgctattggatttgaagtattgtttcatgttac

SEQ ID NO: 317359 - DNA, 33 bp, Homo sapien
atagaaagtttagctccatggatgtctagcagg

SEQ ID NO: 317360 - DNA, 33 bp, Homo sapien
atagaaagtttagctcgatggatgtctagcagg

SEQ ID NO: 317361 - DNA, 33 bp, Homo sapien
aatcaatggttacttacagtcaacttataatga

SEQ ID NO: 317362 - DNA, 33 bp, Homo sapien
aatcaatggttacttatagtcaacttataatga

SEQ ID NO: 317363 - DNA, 33 bp, Homo sapien
aggattctggggtcaaaggaaatatgtattttt

SEQ ID NO: 317364 - DNA, 33 bp, Homo sapien
aggattctggggtcaagggaaatatgtattttt

SEQ ID NO: 317365 - DNA, 33 bp, Homo sapien
tcaggtaagccaagaaagtaagcagcctcttca

SEQ ID NO: 317366 - DNA, 33 bp, Homo sapien
tcaggtaagccaagaatgtaagcagcctcttca

SEQ ID NO: 317367 - DNA, 33 bp, Homo sapien
tctcatccgattttcaagaagtctcctgaggca

SEQ ID NO: 317368 - DNA, 33 bp, Homo sapien
tctcatccgattttcaggaagtctcctgaggca

SEQ ID NO: 317369 - DNA, 33 bp, Homo sapien
tcaacagaaattcaaacgcagaagaaaccaggg

SEQ ID NO: 317370 - DNA, 33 bp, Homo sapien
tcaacagaaattcaaatgcagaagaaaccaggg

SEQ ID NO: 317371 - DNA, 33 bp, Homo sapien
ctgtaccctttacgcacgaggaagccttcccta

SEQ ID NO: 317372 - DNA, 33 bp, Homo sapien
ctgtaccctttacgcatgaggaagccttcccta

SEQ ID NO: 317373 - DNA, 33 bp, Homo sapien
gtttaaaggctaggacaaagacagtacctttct

SEQ ID NO: 317374 - DNA, 33 bp, Homo sapien
gtttaaaggctaggacgaagacagtacctttct

SEQ ID NO: 317375 - DNA, 33 bp, Homo sapien
cagttgtttcagataacgtctacctctagcttt

SEQ ID NO: 317376 - DNA, 33 bp, Homo sapien
cagttgtttcagataatgtctacctctagcttt

SEQ ID NO: 317377 - DNA, 33 bp, Homo sapien
aataactttccatctcactgtgtgcttcctcac

SEQ ID NO: 317378 - DNA, 33 bp, Homo sapien
aataactttccatctcgctgtgtgcttcctcac

SEQ ID NO: 317379 - DNA, 33 bp, Homo sapien
catgtcatgaagcccacagatacccaggtccaa

SEQ ID NO: 317380 - DNA, 33 bp, Homo sapien
catgtcatgaagcccagagatacccaggtccaa

SEQ ID NO: 317381 - DNA, 33 bp, Homo sapien
tctatgaccctttgaaatgtaagctgggtgtgg

SEQ ID NO: 317382 - DNA, 33 bp, Homo sapien
tctatgaccctttgaagtgtaagctgggtgtgg

SEQ ID NO: 317383 - DNA, 33 bp, Homo sapien
gcttggcctctttagccctctggttagatcatc

SEQ ID NO: 317384 - DNA, 33 bp, Homo sapien
gcttggcctctttagctctctggttagatcatc

SEQ ID NO: 317385 - DNA, 33 bp, Homo sapien
ttaatttggagcttaccacccagagcggtatgt

SEQ ID NO: 317386 - DNA, 33 bp, Homo sapien
ttaatttggagcttactacccagagcggtatgt

SEQ ID NO: 317387 - DNA, 33 bp, Homo sapien
cttggaggatccgcacagaggtcactgctgaat

SEQ ID NO: 317388 - DNA, 33 bp, Homo sapien
cttggaggatccgcaccgaggtcactgctgaat

SEQ ID NO: 317389 - DNA, 33 bp, Homo sapien
cttgaacgttccgtgacatcaagagcagcagaa

SEQ ID NO: 317390 - DNA, 33 bp, Homo sapien
cttgaacgttccgtgatatcaagagcagcagaa

SEQ ID NO: 317391 - DNA, 33 bp, Homo sapien
agtcctggcccactagaaaagaggagagacaca

SEQ ID NO: 317392 - DNA, 33 bp, Homo sapien
agtcctggcccactaggaaagaggagagacaca

SEQ ID NO: 317393 - DNA, 33 bp, Homo sapien
tgaataaacatctcacaaactgtcgctcctaga

SEQ ID NO: 317394 - DNA, 33 bp, Homo sapien
tgaataaacatctcacgaactgtcgctcctaga

SEQ ID NO: 317395 - DNA, 33 bp, Homo sapien
ctattcatgatgagaaaaattacagactacgat

SEQ ID NO: 317396 - DNA, 33 bp, Homo sapien
ctattcatgatgagaagaattacagactacgat

SEQ ID NO: 317397 - DNA, 33 bp, Homo sapien
tgatttatttgggaaccggaaaagcaaagagaa

SEQ ID NO: 317398 - DNA, 33 bp, Homo sapien
tgatttatttgggaactggaaaagcaaagagaa

SEQ ID NO: 317399 - DNA, 33 bp, Homo sapien; identical to SEQ ID NO: 317397

SEQ ID NO: 317400 - DNA, 33 bp, Homo sapien; identical to SEQ ID NO: 317398

SEQ ID NO: 317401 - DNA, 33 bp, Homo sapien
gctgactgggaccagaactttgagctggtcatg

SEQ ID NO: 317402 - DNA, 33 bp, Homo sapien
gctgactgggaccagagctttgagctggtcatg

SEQ ID NO: 317403 - DNA, 33 bp, Homo sapien
caacccaccttcaagaactgtgatgaggatgag

SEQ ID NO: 317404 - DNA, 33 bp, Homo sapien
caacccaccttcaagagctgtgatgaggatgag

SEQ ID NO: 317405 - DNA, 33 bp, Homo sapien; identical to SEQ ID NO: 317403

SEQ ID NO: 317406 - DNA, 33 bp, Homo sapien; identical to SEQ ID NO: 317404

SEQ ID NO: 317407 - DNA, 33 bp, Homo sapien
atggtctgacaaataacgcataagtcctatact

SEQ ID NO: 317408 - DNA, 33 bp, Homo sapien
atggtctgacaaataatgcataagtcctatact

SEQ ID NO: 317409 - DNA, 33 bp, Homo sapien
tgcattttcgtcatgtcaaaggaggctaggcca

SEQ ID NO: 317410 - DNA, 33 bp, Homo sapien
tgcattttcgtcatgtgaaaggaggctaggcca

SEQ ID NO: 317411 - DNA, 33 bp, Homo sapien
tacttaactactcaacacctcagggaaatgaga

SEQ ID NO: 317412 - DNA, 33 bp, Homo sapien
tacttaactactcaacgcctcagggaaatgaga

SEQ ID NO: 317413 - DNA, 33 bp, Homo sapien
ccagtggtgcttctgacactatgcttcacagag

SEQ ID NO: 317414 - DNA, 33 bp, Homo sapien
ccagtggtgcttctgatactatgcttcacagag

SEQ ID NO: 317415 - DNA, 33 bp, Homo sapien
ctgtgttgttcactaccgtaaccttagcacagt

SEQ ID NO: 317416 - DNA, 33 bp, Homo sapien
ctgtgttgttcactactgtaaccttagcacagt

SEQ ID NO: 317417 - DNA, 33 bp, Homo sapien
cttcatgcagtatccacgtaacacacagtaagc

SEQ ID NO: 317418 - DNA, 33 bp, Homo sapien
cttcatgcagtatccatgtaacacacagtaagc

SEQ ID NO: 317419 - DNA, 33 bp, Homo sapien
ctcctactttacctacaaactttgtccaaaatt

SEQ ID NO: 317420 - DNA, 33 bp, Homo sapien
ctcctactttacctacgaactttgtccaaaatt

SEQ ID NO: 317421 - DNA, 33 bp, Homo sapien
ttttgtagcattgatacgtgttccttagttgag

SEQ ID NO: 317422 - DNA, 33 bp, Homo sapien
ttttgtagcattgatatgtgttccttagttgag

SEQ ID NO: 317423 - DNA, 33 bp, Homo sapien
ctatcaacaatcctgtaaagtaccagtgaaact

SEQ ID NO: 317424 - DNA, 33 bp, Homo sapien
ctatcaacaatcctgtgaagtaccagtgaaact

SEQ ID NO: 317425 - DNA, 33 bp, Homo sapien
gatcttatttactacaatctaacctcagacatg

SEQ ID NO: 317426 - DNA, 33 bp, Homo sapien
gatcttatttactacactctaacctcagacatg

SEQ ID NO: 317427 - DNA, 33 bp, Homo sapien
tatgtcaaggtcccataagaagactgaaaaaaa

SEQ ID NO: 317428 - DNA, 33 bp, Homo sapien
tatgtcaaggtcccatgagaagactgaaaaaaa

SEQ ID NO: 317429 - DNA, 33 bp, Homo sapien
ggaggggtgactaaatcatcaggttttgattag

SEQ ID NO: 317430 - DNA, 33 bp, Homo sapien
ggaggggtgactaaattatcaggttttgattag

SEQ ID NO: 317431 - DNA, 33 bp, Homo sapien
atcttaacatcttgctaaaacagtctgtatttt

SEQ ID NO: 317432 - DNA, 33 bp, Homo sapien
atcttaacatcttgctgaaacagtctgtatttt

SEQ ID NO: 317433 - DNA, 33 bp, Homo sapien
atatgaagagtctagagagtaacaggaaaatca

SEQ ID NO: 317434 - DNA, 33 bp, Homo sapien
atatgaagagtctagatagtaacaggaaaatca

SEQ ID NO: 317435 - DNA, 33 bp, Homo sapien
gaaaacattagcagtaataacatagcaaaacag

SEQ ID NO: 317436 - DNA, 33 bp, Homo sapien
gaaaacattagcagtagtaacatagcaaaacag

SEQ ID NO: 317437 - DNA, 33 bp, Homo sapien
tcttttaaaaatactggaagaagccagaagtgg

SEQ ID NO: 317438 - DNA, 33 bp, Homo sapien
tcttttaaaaatactgtaagaagccagaagtgg

SEQ ID NO: 317439 - DNA, 33 bp, Homo sapien
aattaaatgcaacgggaatttgatgtttactgt

SEQ ID NO: 317440 - DNA, 33 bp, Homo sapien
aattaaatgcaacggggatttgatgtttactgt

SEQ ID NO: 317441 - DNA, 33 bp, Homo sapien
tagactagaaaagctgcatcagtcactactaaa

SEQ ID NO: 317442 - DNA, 33 bp, Homo sapien
tagactagaaaagctggatcagtcactactaaa

SEQ ID NO: 317443 - DNA, 33 bp, Homo sapien
agttctaagatccatacatccaatcacagcaac

SEQ ID NO: 317444 - DNA, 33 bp, Homo sapien
agttctaagatccatatatccaatcacagcaac

SEQ ID NO: 317445 - DNA, 33 bp, Homo sapien
cagtttcatctggacaataccctaagaggagat

SEQ ID NO: 317446 - DNA, 33 bp, Homo sapien
cagtttcatctggacagtaccctaagaggagat

SEQ ID NO: 317447 - DNA, 33 bp, Homo sapien
agggttaggtttggcaacgtattatagaacaaa

SEQ ID NO: 317448 - DNA, 33 bp, Homo sapien
agggttaggtttggcagcgtattatagaacaaa

SEQ ID NO: 317449 - DNA, 33 bp, Homo sapien
tttaaaagttggagaccaagaggaggaggacac

SEQ ID NO: 317450 - DNA, 33 bp, Homo sapien
tttaaaagttggagacgaagaggaggaggacac

SEQ ID NO: 317451 - DNA, 33 bp, Homo sapien
aatgcaaagtaataacagacgtgcttcatcatc

SEQ ID NO: 317452 - DNA, 33 bp, Homo sapien
aatgcaaagtaataacggacgtgcttcatcatc

SEQ ID NO: 317453 - DNA, 33 bp, Homo sapien
tcataaaactggaagacatgattcaatgattgt

SEQ ID NO: 317454 - DNA, 33 bp, Homo sapien
tcataaaactggaagagatgattcaatgattgt

SEQ ID NO: 317455 - DNA, 33 bp, Homo sapien
cccatcagcagcttgaagcgtggtcacaggacg

SEQ ID NO: 317456 - DNA, 33 bp, Homo sapien
cccatcagcagcttgacgcgtggtcacaggacg

SEQ ID NO: 317457 - DNA, 33 bp, Homo sapien
ttctttaaatcattcacctcaggcagagaactt

SEQ ID NO: 317458 - DNA, 33 bp, Homo sapien
ttctttaaatcattcatctcaggcagagaactt

SEQ ID NO: 317459 - DNA, 33 bp, Homo sapien
caaagatgaataagataaattctcagaatgtag

SEQ ID NO: 317460 - DNA, 33 bp, Homo sapien
caaagatgaataagatgaattctcagaatgtag

SEQ ID NO: 317461 - DNA, 33 bp, Homo sapien
aacattgaatttggaaagagacgtgaaaattgg

SEQ ID NO: 317462 - DNA, 33 bp, Homo sapien
aacattgaatttggaaggagacgtgaaaattgg

SEQ ID NO: 317463 - DNA, 33 bp, Homo sapien
agtcctctcctctaacaggaaacacctcagatt

SEQ ID NO: 317464 - DNA, 33 bp, Homo sapien
agtcctctcctctaacgggaaacacctcagatt

SEQ ID NO: 317465 - DNA, 33 bp, Homo sapien
caaggcccactcagacaaagattcggttcatca

SEQ ID NO: 317466 - DNA, 33 bp, Homo sapien
caaggcccactcagacgaagattcggttcatca

SEQ ID NO: 317467 - DNA, 33 bp, Homo sapien
ttttgagggctgactacgggtttgagaggtaga

SEQ ID NO: 317468 - DNA, 33 bp, Homo sapien
ttttgagggctgactaggggtttgagaggtaga

SEQ ID NO: 317469 - DNA, 33 bp, Homo sapien
ttccggcttcacgccacgtcgggcagttcacgg

SEQ ID NO: 317470 - DNA, 33 bp, Homo sapien
ttccggcttcacgccatgtcgggcagttcacgg

SEQ ID NO: 317471 - DNA, 33 bp, Homo sapien
tgcttgcggcaaatgacctctggagaccctgtg

SEQ ID NO: 317472 - DNA, 33 bp, Homo sapien
tgcttgcggcaaatgagctctggagaccctgtg

SEQ ID NO: 317473 - DNA, 33 bp, Homo sapien
cgcaggcacctttgacactaatgacctcagccg

SEQ ID NO: 317474 - DNA, 33 bp, Homo sapien
cgcaggcacctttgacgctaatgacctcagccg

SEQ ID NO: 317475 - DNA, 33 bp, Homo sapien
cgggcacgagtcctaaccaaaggccacaggggg

SEQ ID NO: 317476 - DNA, 33 bp, Homo sapien
cgggcacgagtcctaatcaaaggccacaggggg

SEQ ID NO: 317477 - DNA, 33 bp, Homo sapien
tgaccggcgttcctgcaatcttcacccttgccc

SEQ ID NO: 317478 - DNA, 33 bp, Homo sapien
tgaccggcgttcctgccatcttcacccttgccc

SEQ ID NO: 317479 - DNA, 33 bp, Homo sapien
gggccgctagctgtccaaactggcgtggctcct

SEQ ID NO: 317480 - DNA, 33 bp, Homo sapien
gggccgctagctgtccgaactggcgtggctcct

SEQ ID NO: 317481 - DNA, 33 bp, Homo sapien
acgctccgcttccggacgccaacgccacaactg

SEQ ID NO: 317482 - DNA, 33 bp, Homo sapien
acgctccgcttccggatgccaacgccacaactg

SEQ ID NO: 317483 - DNA, 33 bp, Homo sapien
tctgacctctctcccactcgctacaaacccagc

SEQ ID NO: 317484 - DNA, 33 bp, Homo sapien
tctgacctctctcccattcgctacaaacccagc

SEQ ID NO: 317485 - DNA, 33 bp, Homo sapien
acacagaaaatgctcaccttttttgagacaggg

SEQ ID NO: 317486 - DNA, 33 bp, Homo sapien
acacagaaaatgctcatcttttttgagacaggg

SEQ ID NO: 317487 - DNA, 33 bp, Homo sapien
tagacatgctttataaatggggaagggcctgct

SEQ ID NO: 317488 - DNA, 33 bp, Homo sapien
tagacatgctttataagtggggaagggcctgct

SEQ ID NO: 317489 - DNA, 33 bp, Homo sapien
gtttgtaaggttgttcactgctaggtacagtct

SEQ ID NO: 317490 - DNA, 33 bp, Homo sapien
gtttgtaaggttgttcgctgctaggtacagtct

SEQ ID NO: 317491 - DNA, 33 bp, Homo sapien
caaggtccaacatctccacgtaaggagcgtttc

SEQ ID NO: 317492 - DNA, 33 bp, Homo sapien
caaggtccaacatctcgacgtaaggagcgtttc

SEQ ID NO: 317493 - DNA, 33 bp, Homo sapien
gggctgcattagaaaacaagtccaagcagcgta

SEQ ID NO: 317494 - DNA, 33 bp, Homo sapien
gggctgcattagaaaataagtccaagcagcgta

SEQ ID NO: 317495 - DNA, 33 bp, Homo sapien
aatggtgtagatgatgacaggttggcctcagca

SEQ ID NO: 317496 - DNA, 33 bp, Homo sapien
aatggtgtagatgatggcaggttggcctcagca

SEQ ID NO: 317497 - DNA, 33 bp, Homo sapien
tgatttctccattcgacgatgtctttgtgccct

SEQ ID NO: 317498 - DNA, 33 bp, Homo sapien
tgatttctccattcgatgatgtctttgtgccct

SEQ ID NO: 317499 - DNA, 33 bp, Homo sapien
cattctcatcacttcccatgaagacactaatcc

SEQ ID NO: 317500 - DNA, 33 bp, Homo sapien
cattctcatcacttcctatgaagacactaatcc

SEQ ID NO: 317501 - DNA, 33 bp, Homo sapien
gatagcaaaatataccaagtttgtggtttactt

SEQ ID NO: 317502 - DNA, 33 bp, Homo sapien
gatagcaaaatatacccagtttgtggtttactt

SEQ ID NO: 317503 - DNA, 33 bp, Homo sapien
atgttgaatgaagagacagaaatcttggcagag

SEQ ID NO: 317504 - DNA, 33 bp, Homo sapien
atgttgaatgaagagatagaaatcttggcagag

SEQ ID NO: 317505 - DNA, 33 bp, Homo sapien
atgtcatgtagaacaaaatgttgagagaatact

SEQ ID NO: 317506 - DNA, 33 bp, Homo sapien
atgtcatgtagaacaatatgttgagagaatact

SEQ ID NO: 317507 - DNA, 33 bp, Homo sapien
cagctctgcgggcatacgctaggtaagagcaaa

SEQ ID NO: 317508 - DNA, 33 bp, Homo sapien
cagctctgcgggcatatgctaggtaagagcaaa

SEQ ID NO: 317509 - DNA, 33 bp, Homo sapien
ttggtcatccatgaacaaaatctgggtctcatc

SEQ ID NO: 317510 - DNA, 33 bp, Homo sapien
ttggtcatccatgaacgaaatctgggtctcatc

SEQ ID NO: 317511 - DNA, 33 bp, Homo sapien
ggtactgaagattcagcagtaaacaaaacaggt

SEQ ID NO: 317512 - DNA, 33 bp, Homo sapien
ggtactgaagattcaggagtaaacaaaacaggt

SEQ ID NO: 317513 - DNA, 33 bp, Homo sapien
tcaggccttcagcctcagagagttgtattgtca

SEQ ID NO: 317514 - DNA, 33 bp, Homo sapien
tcaggccttcagcctccgagagttgtattgtca

SEQ ID NO: 317515 - DNA, 33 bp, Homo sapien
acagaatttttaataccagaacaggttggtgtg

SEQ ID NO: 317516 - DNA, 33 bp, Homo sapien
acagaatttttaatactagaacaggttggtgtg

SEQ ID NO: 317517 - DNA, 33 bp, Homo sapien
gtactgtatttactcactcaactctcagaacac

SEQ ID NO: 317518 - DNA, 33 bp, Homo sapien
gtactgtatttactcattcaactctcagaacac

SEQ ID NO: 317519 - DNA, 33 bp, Homo sapien
aaaatcaatagttctcaaaatttttggtctcag

SEQ ID NO: 317520 - DNA, 33 bp, Homo sapien
aaaatcaatagttctcgaaatttttggtctcag

SEQ ID NO: 317521 - DNA, 33 bp, Homo sapien
cacatgcagatcctcactgaccaagaaaacacc

SEQ ID NO: 317522 - DNA, 33 bp, Homo sapien
cacatgcagatcctcagtgaccaagaaaacacc

SEQ ID NO: 317523 - DNA, 33 bp, Homo sapien
actttaggtagtctcacagaaaaattaagagtc

SEQ ID NO: 317524 - DNA, 33 bp, Homo sapien
actttaggtagtctcatagaaaaattaagagtc

SEQ ID NO: 317525 - DNA, 33 bp, Homo sapien
ctctggcatattttcaatccatagctggttgaa

SEQ ID NO: 317526 - DNA, 33 bp, Homo sapien
ctctggcatattttcagtccatagctggttgaa

SEQ ID NO: 317527 - DNA, 33 bp, Homo sapien
cacattgaagtcaaacaaacacaattttgatat

SEQ ID NO: 317528 - DNA, 33 bp, Homo sapien
cacattgaagtcaaacgaacacaattttgatat

SEQ ID NO: 317529 - DNA, 33 bp, Homo sapien
cagagtcggttcagcactatttccctagtactt

SEQ ID NO: 317530 - DNA, 33 bp, Homo sapien
cagagtcggttcagcattatttccctagtactt

SEQ ID NO: 317531 - DNA, 33 bp, Homo sapien
gagcaacaaaatgcggaaaaaaaatctatcttt

SEQ ID NO: 317532 - DNA, 33 bp, Homo sapien
gagcaacaaaatgcgggaaaaaaatctatcttt

SEQ ID NO: 317533 - DNA, 33 bp, Homo sapien
ttctattagctgtgaaacaaagaagtcagttta

SEQ ID NO: 317534 - DNA, 33 bp, Homo sapien
ttctattagctgtgaatcaaagaagtcagttta

SEQ ID NO: 317535 - DNA, 33 bp, Homo sapien
agttgaagaatgcagcaaaattactatcacaaa

SEQ ID NO: 317536 - DNA, 33 bp, Homo sapien
agttgaagaatgcagcgaaattactatcacaaa

SEQ ID NO: 317537 - DNA, 33 bp, Homo sapien
tagtaccttgttttaaatgcctccgctgattca

SEQ ID NO: 317538 - DNA, 33 bp, Homo sapien
tagtaccttgttttaagtgcctccgctgattca

SEQ ID NO: 317539 - DNA, 33 bp, Homo sapien
attctcactaaattaaccatattgtctttgaaa

SEQ ID NO: 317540 - DNA, 33 bp, Homo sapien
attctcactaaattaagcatattgtctttgaaa

SEQ ID NO: 317541 - DNA, 33 bp, Homo sapien
gctgatttttcatagcaacagcgtctcaccatg

SEQ ID NO: 317542 - DNA, 33 bp, Homo sapien
gctgatttttcatagcgacagcgtctcaccatg

SEQ ID NO: 317543 - DNA, 33 bp, Homo sapien
attcatgtgaaagagtaaaaattctcttgagat

SEQ ID NO: 317544 - DNA, 33 bp, Homo sapien
attcatgtgaaagagtcaaaattctcttgagat

SEQ ID NO: 317545 - DNA, 33 bp, Homo sapien
catctcctctccaaaggcgctaccatctccttc

SEQ ID NO: 317546 - DNA, 33 bp, Homo sapien
catctcctctccaaagtcgctaccatctccttc

SEQ ID NO: 317547 - DNA, 33 bp, Homo sapien
aaatgcctattgggacaacaagttttagagtca

SEQ ID NO: 317548 - DNA, 33 bp, Homo sapien
aaatgcctattgggacgacaagttttagagtca

SEQ ID NO: 317549 - DNA, 33 bp, Homo sapien
tggcgggggggaaatacgtcattgactgataaa

SEQ ID NO: 317550 - DNA, 33 bp, Homo sapien
tggcgggggggaaatatgtcattgactgataaa

SEQ ID NO: 317551 - DNA, 33 bp, Homo sapien
atcctacaaagagtcacgggaaatagagtcttg

SEQ ID NO: 317552 - DNA, 33 bp, Homo sapien
atcctacaaagagtcatgggaaatagagtcttg

SEQ ID NO: 317553 - DNA, 33 bp, Homo sapien
ggcttccaggatactcaatctaggtcttcgtgt

SEQ ID NO: 317554 - DNA, 33 bp, Homo sapien
ggcttccaggatactcgatctaggtcttcgtgt

SEQ ID NO: 317555 - DNA, 33 bp, Homo sapien
gcatttgctgggacgcagtatgaccaggaccca

SEQ ID NO: 317556 - DNA, 33 bp, Homo sapien
gcatttgctgggacgcggtatgaccaggaccca

SEQ ID NO: 317557 - DNA, 33 bp, Homo sapien
ataataacaattcctcacacatatattttagtt

SEQ ID NO: 317558 - DNA, 33 bp, Homo sapien
ataataacaattcctcgcacatatattttagtt

SEQ ID NO: 317559 - DNA, 33 bp, Homo sapien
agggagctaggcagcacgaacgaacaggccctg

SEQ ID NO: 317560 - DNA, 33 bp, Homo sapien
agggagctaggcagcaggaacgaacaggccctg

SEQ ID NO: 317561 - DNA, 33 bp, Homo sapien
ccaagctggtatcgaaatcctcctgggctcaag

SEQ ID NO: 317562 - DNA, 33 bp, Homo sapien
ccaagctggtatcgaactcctcctgggctcaag

SEQ ID NO: 317563 - DNA, 33 bp, Homo sapien
ggctccaaactcctgacggcgaagaggaatgca

SEQ ID NO: 317564 - DNA, 33 bp, Homo sapien
ggctccaaactcctgatggcgaagaggaatgca

SEQ ID NO: 317565 - DNA, 33 bp, Homo sapien
tcttatacttctcccaacattgtattatggaca

SEQ ID NO: 317566 - DNA, 33 bp, Homo sapien
tcttatacttctcccaccattgtattatggaca

SEQ ID NO: 317567 - DNA, 33 bp, Homo sapien
tacaaaactgccaatacgtctggcttttgagcc

SEQ ID NO: 317568 - DNA, 33 bp, Homo sapien
tacaaaactgccaatatgtctggcttttgagcc

SEQ ID NO: 317569 - DNA, 33 bp, Homo sapien
catcattttattcagcaacccagtcatggctat

SEQ ID NO: 317570 - DNA, 33 bp, Homo sapien
catcattttattcagcgacccagtcatggctat

SEQ ID NO: 317571 - DNA, 33 bp, Homo sapien
agcgacacttgactgaaacaatctcggtgcaac

SEQ ID NO: 317572 - DNA, 33 bp, Homo sapien
agcgacacttgactgacacaatctcggtgcaac

SEQ ID NO: 317573 - DNA, 33 bp, Homo sapien
ctaggtatatatacaccgacgaacccagaaaag

SEQ ID NO: 317574 - DNA, 33 bp, Homo sapien
ctaggtatatatacactgacgaacccagaaaag

SEQ ID NO: 317575 - DNA, 33 bp, Homo sapien
gagtcataacagaccacagcagagagtcttcct

SEQ ID NO: 317576 - DNA, 33 bp, Homo sapien
gagtcataacagaccagagcagagagtcttcct

SEQ ID NO: 317577 - DNA, 33 bp, Homo sapien
gatggtggctaggatccaaatttcatctgctta

SEQ ID NO: 317578 - DNA, 33 bp, Homo sapien
gatggtggctaggatctaaatttcatctgctta

SEQ ID NO: 317579 - DNA, 33 bp, Homo sapien
acctctgccaacaagacgcctcgcaaaccactt

SEQ ID NO: 317580 - DNA, 33 bp, Homo sapien
acctctgccaacaagatgcctcgcaaaccactt

SEQ ID NO: 317581 - DNA, 33 bp, Homo sapien
taaaattatccacaaaatcaaaactgtattttc

SEQ ID NO: 317582 - DNA, 33 bp, Homo sapien
taaaattatccacaaagtcaaaactgtattttc

SEQ ID NO: 317583 - DNA, 33 bp, Homo sapien
agcatttattaatgcaataattttcactgagaa

SEQ ID NO: 317584 - DNA, 33 bp, Homo sapien
agcatttattaatgcagtaattttcactgagaa

SEQ ID NO: 317585 - DNA, 33 bp, Homo sapien
aatagtccgagagggaaaagatgcaaaacgaga

SEQ ID NO: 317586 - DNA, 33 bp, Homo sapien
aatagtccgagagggagaagatgcaaaacgaga

SEQ ID NO: 317587 - DNA, 33 bp, Homo sapien
ctcttggaaggcatcactgaggaagagaggtac

SEQ ID NO: 317588 - DNA, 33 bp, Homo sapien
ctcttggaaggcatcattgaggaagagaggtac

SEQ ID NO: 317589 - DNA, 33 bp, Homo sapien
ttttgagaagttctaaattaaacagctcttaaa

SEQ ID NO: 317590 - DNA, 33 bp, Homo sapien
ttttgagaagttctaagttaaacagctcttaaa

SEQ ID NO: 317591 - DNA, 33 bp, Homo sapien
ggaagaaaccttattccactctagctggtttat

SEQ ID NO: 317592 - DNA, 33 bp, Homo sapien
ggaagaaaccttattctactctagctggtttat

SEQ ID NO: 317593 - DNA, 33 bp, Homo sapien
gccacttgaattgttacatgagagaaggtgatg

SEQ ID NO: 317594 - DNA, 33 bp, Homo sapien
gccacttgaattgttatatgagagaaggtgatg

SEQ ID NO: 317595 - DNA, 33 bp, Homo sapien
tggcagtcatgattacaagcatcattccagaat

SEQ ID NO: 317596 - DNA, 33 bp, Homo sapien
tggcagtcatgattacgagcatcattccagaat

SEQ ID NO: 317597 - DNA, 33 bp, Homo sapien
ctctgcgtactcagtacaacaggtaaggttggc

SEQ ID NO: 317598 - DNA, 33 bp, Homo sapien
ctctgcgtactcagtataacaggtaaggttggc

SEQ ID NO: 317599 - DNA, 33 bp, Homo sapien
tccaagcacatctcagactcgggaagtggagag

SEQ ID NO: 317600 - DNA, 33 bp, Homo sapien
tccaagcacatctcaggctcgggaagtggagag

SEQ ID NO: 317601 - DNA, 33 bp, Homo sapien
cttccacagcacactccacaccacctccaagca

SEQ ID NO: 317602 - DNA, 33 bp, Homo sapien
cttccacagcacactctacaccacctccaagca

SEQ ID NO: 317603 - DNA, 33 bp, Homo sapien
tttggggagaatgggaaagagtacctgccaaag

SEQ ID NO: 317604 - DNA, 33 bp, Homo sapien
tttggggagaatgggagagagtacctgccaaag

SEQ ID NO: 317605 - DNA, 33 bp, Homo sapien
aacactctctacaataaatcatcattaggccat

SEQ ID NO: 317606 - DNA, 33 bp, Homo sapien
aacactctctacaatagatcatcattaggccat

SEQ ID NO: 317607 - DNA, 33 bp, Homo sapien
ttcattgcatgaacaacgaaaggatgcccacct

SEQ ID NO: 317608 - DNA, 33 bp, Homo sapien
ttcattgcatgaacaatgaaaggatgcccacct

SEQ ID NO: 317609 - DNA, 33 bp, Homo sapien
catatgatgatttcctaacttacagcacccatg

SEQ ID NO: 317610 - DNA, 33 bp, Homo sapien
catatgatgatttcctcacttacagcacccatg

SEQ ID NO: 317611 - DNA, 33 bp, Homo sapien
gaatgctcccagttcccaagacacaggcaggag

SEQ ID NO: 317612 - DNA, 33 bp, Homo sapien
gaatgctcccagttccgaagacacaggcaggag

SEQ ID NO: 317613 - DNA, 33 bp, Homo sapien
cttattttttgatgtacacagccctcaattcac

SEQ ID NO: 317614 - DNA, 33 bp, Homo sapien
cttattttttgatgtatacagccctcaattcac

SEQ ID NO: 317615 - DNA, 33 bp, Homo sapien
ctgcaagagaaaacagaaagcaagctgggcttt

SEQ ID NO: 317616 - DNA, 33 bp, Homo sapien
ctgcaagagaaaacaggaagcaagctgggcttt

SEQ ID NO: 317617 - DNA, 33 bp, Homo sapien
cccttaaaagataccaatgaggtgttattgatc

SEQ ID NO: 317618 - DNA, 33 bp, Homo sapien
cccttaaaagataccagtgaggtgttattgatc

SEQ ID NO: 317619 - DNA, 33 bp, Homo sapien
ctgcatgtaccgagaaagggcacagagtgctag

SEQ ID NO: 317620 - DNA, 33 bp, Homo sapien
ctgcatgtaccgagaaggggcacagagtgctag

SEQ ID NO: 317621 - DNA, 33 bp, Homo sapien
agagtcaaaatcattgcataagctagatgtgct

SEQ ID NO: 317622 - DNA, 33 bp, Homo sapien
agagtcaaaatcattgtataagctagatgtgct

SEQ ID NO: 317623 - DNA, 33 bp, Homo sapien
acatatctactggcaaaaggaaaagtgcaaaat

SEQ ID NO: 317624 - DNA, 33 bp, Homo sapien
acatatctactggcaagaggaaaagtgcaaaat

SEQ ID NO: 317625 - DNA, 33 bp, Homo sapien
aagtgactacagaaatgatcagtacaatcgacc

SEQ ID NO: 317626 - DNA, 33 bp, Homo sapien
aagtgactacagaaattatcagtacaatcgacc

SEQ ID NO: 317627 - DNA, 33 bp, Homo sapien
gaaatagtgggcaagaacttgtggtttagatga

SEQ ID NO: 317628 - DNA, 33 bp, Homo sapien
gaaatagtgggcaagagcttgtggtttagatga

SEQ ID NO: 317629 - DNA, 33 bp, Homo sapien
gttgcactaagtgtcacataccatgcaggttgg

SEQ ID NO: 317630 - DNA, 33 bp, Homo sapien
gttgcactaagtgtcatataccatgcaggttgg

SEQ ID NO: 317631 - DNA, 33 bp, Homo sapien
gtaactaataagtaaaagagcaagttatcctgc

SEQ ID NO: 317632 - DNA, 33 bp, Homo sapien
gtaactaataagtaaaggagcaagttatcctgc

SEQ ID NO: 317633 - DNA, 33 bp, Homo sapien
tatccaactcaaactacgcattatgtaaatgat

SEQ ID NO: 317634 - DNA, 33 bp, Homo sapien
tatccaactcaaactatgcattatgtaaatgat

SEQ ID NO: 317635 - DNA, 33 bp, Homo sapien
cacagctagtaggaaaaatggaaataagctctc

SEQ ID NO: 317636 - DNA, 33 bp, Homo sapien
cacagctagtaggaaatatggaaataagctctc

SEQ ID NO: 317637 - DNA, 33 bp, Homo sapien
cagaaaaatacttggcaacaatggaagatcttt

SEQ ID NO: 317638 - DNA, 33 bp, Homo sapien
cagaaaaatacttggcgacaatggaagatcttt

SEQ ID NO: 317639 - DNA, 33 bp, Homo sapien
aaacctgcaaatgataagcaaagttgtaccttt

SEQ ID NO: 317640 - DNA, 33 bp, Homo sapien
aaacctgcaaatgataggcaaagttgtaccttt

SEQ ID NO: 317641 - DNA, 33 bp, Homo sapien
gagaaaatgctcgtgtcaatttttaaagattat

SEQ ID NO: 317642 - DNA, 33 bp, Homo sapien
gagaaaatgctcgtgttaatttttaaagattat

SEQ ID NO: 317643 - DNA, 33 bp, Homo sapien
cctcagctgtaaaatacgccttaagtttgggtg

SEQ ID NO: 317644 - DNA, 33 bp, Homo sapien
cctcagctgtaaaatatgccttaagtttgggtg

SEQ ID NO: 317645 - DNA, 33 bp, Homo sapien
gaaggtattggaggacccaaactagtgaagaaa

SEQ ID NO: 317646 - DNA, 33 bp, Homo sapien
gaaggtattggaggactcaaactagtgaagaaa

SEQ ID NO: 317647 - DNA, 33 bp, Homo sapien
tgaaaatttctgataacagatttggttgttctc

SEQ ID NO: 317648 - DNA, 33 bp, Homo sapien
tgaaaatttctgataatagatttggttgttctc

SEQ ID NO: 317649 - DNA, 33 bp, Homo sapien
tttgtggaaaaattcaaaagtatctgtttttat

SEQ ID NO: 317650 - DNA, 33 bp, Homo sapien
tttgtggaaaaattcagaagtatctgtttttat

SEQ ID NO: 317651 - DNA, 33 bp, Homo sapien
ggcactcttgctatcaatcatcctgtctccaca

SEQ ID NO: 317652 - DNA, 33 bp, Homo sapien
ggcactcttgctatcagtcatcctgtctccaca

SEQ ID NO: 317653 - DNA, 33 bp, Homo sapien
tatatccttacttaaacagtccaacattcaata

SEQ ID NO: 317654 - DNA, 33 bp, Homo sapien
tatatccttacttaaatagtccaacattcaata

SEQ ID NO: 317655 - DNA, 33 bp, Homo sapien
cttgaccactctgctggaaacagtgggctggaa

SEQ ID NO: 317656 - DNA, 33 bp, Homo sapien
cttgaccactctgctgtaaacagtgggctggaa

SEQ ID NO: 317657 - DNA, 33 bp, Homo sapien
ctgaagttgccgcaaagatgagacatccattgc

SEQ ID NO: 317658 - DNA, 33 bp, Homo sapien
ctgaagttgccgcaaatatgagacatccattgc

SEQ ID NO: 317659 - DNA, 33 bp, Homo sapien
tttcctgggaataaggcaaggataaagagatct

SEQ ID NO: 317660 - DNA, 33 bp, Homo sapien
tttcctgggaataaggtaaggataaagagatct

SEQ ID NO: 317661 - DNA, 33 bp, Homo sapien
tggcttggttgtgaaacttgagatctctttatc

SEQ ID NO: 317662 - DNA, 33 bp, Homo sapien
tggcttggttgtgaaatttgagatctctttatc

SEQ ID NO: 317663 - DNA, 33 bp, Homo sapien
cactacctcaccaggacgaaggagccatggggg

SEQ ID NO: 317664 - DNA, 33 bp, Homo sapien
cactacctcaccaggatgaaggagccatggggg

SEQ ID NO: 317665 - DNA, 33 bp, Homo sapien
tgccctggaagccaaccagacgccaaagctaga

SEQ ID NO: 317666 - DNA, 33 bp, Homo sapien
tgccctggaagccaactagacgccaaagctaga

SEQ ID NO: 317667 - DNA, 33 bp, Homo sapien
agttgaagatgtggacacctgcagttgctactg

SEQ ID NO: 317668 - DNA, 33 bp, Homo sapien
agttgaagatgtggacccctgcagttgctactg

SEQ ID NO: 317669 - DNA, 33 bp, Homo sapien
ctgaacctttcaagcccgattcattgaaagtat

SEQ ID NO: 317670 - DNA, 33 bp, Homo sapien
ctgaacctttcaagcctgattcattgaaagtat

SEQ ID NO: 317671 - DNA, 33 bp, Homo sapien
atagatgtgggttcaaaatgtaaatagtatcac

SEQ ID NO: 317672 - DNA, 33 bp, Homo sapien
atagatgtgggttcaacatgtaaatagtatcac

SEQ ID NO: 317673 - DNA, 33 bp, Homo sapien
gatgctaccaccaccaaaaaagtctataaacca

SEQ ID NO: 317674 - DNA, 33 bp, Homo sapien
gatgctaccaccaccagaaaagtctataaacca

SEQ ID NO: 317675 - DNA, 33 bp, Homo sapien
tagctacttgcttacaaatgctatggaatgtaa

SEQ ID NO: 317676 - DNA, 33 bp, Homo sapien
tagctacttgcttacagatgctatggaatgtaa

SEQ ID NO: 317677 - DNA, 33 bp, Homo sapien
tgatagccattctatgaaggaaaagattatgtt

SEQ ID NO: 317678 - DNA, 33 bp, Homo sapien
tgatagccattctatggaggaaaagattatgtt

SEQ ID NO: 317679 - DNA, 33 bp, Homo sapien
ttcaatccaaatcccaagtaactgtaaaataca

SEQ ID NO: 317680 - DNA, 33 bp, Homo sapien
ttcaatccaaatcccaggtaactgtaaaataca

SEQ ID NO: 317681 - DNA, 33 bp, Homo sapien
ctaggcttgaggaaacaaagggattctgaacag

SEQ ID NO: 317682 - DNA, 33 bp, Homo sapien
ctaggcttgaggaaacgaagggattctgaacag

SEQ ID NO: 317683 - DNA, 33 bp, Homo sapien
ttttcttagttcagtaacacatggatagcaaat

SEQ ID NO: 317684 - DNA, 33 bp, Homo sapien
ttttcttagttcagtagcacatggatagcaaat

SEQ ID NO: 317685 - DNA, 33 bp, Homo sapien
tccagttttcctttacagatgagatcataggac

SEQ ID NO: 317686 - DNA, 33 bp, Homo sapien
tccagttttcctttacggatgagatcataggac

SEQ ID NO: 317687 - DNA, 33 bp, Homo sapien
ctaacggatggttccaactctgctttggtagta

SEQ ID NO: 317688 - DNA, 33 bp, Homo sapien
ctaacggatggttccagctctgctttggtagta

SEQ ID NO: 317689 - DNA, 33 bp, Homo sapien
acaggatagaagttcaaccttgaatagtgttct

SEQ ID NO: 317690 - DNA, 33 bp, Homo sapien
acaggatagaagttcagccttgaatagtgttct

SEQ ID NO: 317691 - DNA, 33 bp, Homo sapien
aactaaaagtcagatacagttaagaaagagtag

SEQ ID NO: 317692 - DNA, 33 bp, Homo sapien
aactaaaagtcagatatagttaagaaagagtag

SEQ ID NO: 317693 - DNA, 33 bp, Homo sapien
ttttatttatagttcaaagtcatgattatgatt

SEQ ID NO: 317694 - DNA, 33 bp, Homo sapien
ttttatttatagttcagagtcatgattatgatt

SEQ ID NO: 317695 - DNA, 33 bp, Homo sapien
ctgatcagtgaaaatagatagcatgatgtcaga

SEQ ID NO: 317696 - DNA, 33 bp, Homo sapien
ctgatcagtgaaaatatatagcatgatgtcaga

SEQ ID NO: 317697 - DNA, 33 bp, Homo sapien
aaaattttgagaagcaaagtgatgagatttatg

SEQ ID NO: 317698 - DNA, 33 bp, Homo sapien
aaaattttgagaagcagagtgatgagatttatg

SEQ ID NO: 317699 - DNA, 33 bp, Homo sapien
tgataagctgcagaaaagagagtagggcatctt

SEQ ID NO: 317700 - DNA, 33 bp, Homo sapien
tgataagctgcagaaaggagagtagggcatctt

SEQ ID NO: 317701 - DNA, 33 bp, Homo sapien
tttccttagtcaagccaagctaaagatgttaat

SEQ ID NO: 317702 - DNA, 33 bp, Homo sapien
tttccttagtcaagccgagctaaagatgttaat

SEQ ID NO: 317703 - DNA, 33 bp, Homo sapien
aatgctcaaaacatgacaattattgcttattgt

SEQ ID NO: 317704 - DNA, 33 bp, Homo sapien
aatgctcaaaacatgataattattgcttattgt

SEQ ID NO: 317705 - DNA, 33 bp, Homo sapien
gctattccagaatttccacttctaatctaacct

SEQ ID NO: 317706 - DNA, 33 bp, Homo sapien
gctattccagaatttctacttctaatctaacct

SEQ ID NO: 317707 - DNA, 33 bp, Homo sapien
agtcagtgtaccctgcaccccttcattggcctg

SEQ ID NO: 317708 - DNA, 33 bp, Homo sapien
agtcagtgtaccctgcgccccttcattggcctg

SEQ ID NO: 317709 - DNA, 33 bp, Homo sapien
tgaatgggaaaaatacagcgatatgtatatacc

SEQ ID NO: 317710 - DNA, 33 bp, Homo sapien
tgaatgggaaaaatacggcgatatgtatatacc

SEQ ID NO: 317711 - DNA, 33 bp, Homo sapien
aggaacattcttgcatcaatttctatttgtgtg

SEQ ID NO: 317712 - DNA, 33 bp, Homo sapien
aggaacattcttgcattaatttctatttgtgtg

SEQ ID NO: 317713 - DNA, 33 bp, Homo sapien
agagttaaagattaaacctgatcaggactgtcc

SEQ ID NO: 317714 - DNA, 33 bp, Homo sapien
agagttaaagattaaagctgatcaggactgtcc

SEQ ID NO: 317715 - DNA, 33 bp, Homo sapien
tcttcatttcctaagaaacacccattagcattg

SEQ ID NO: 317716 - DNA, 33 bp, Homo sapien
tcttcatttcctaagagacacccattagcattg

SEQ ID NO: 317717 - DNA, 33 bp, Homo sapien
gatactagaacagaacaaggatcgcagcaagaa

SEQ ID NO: 317718 - DNA, 33 bp, Homo sapien
gatactagaacagaacgaggatcgcagcaagaa

SEQ ID NO: 317719 - DNA, 33 bp, Homo sapien
tgccctatctatgtaaactgtaacttagctgag

SEQ ID NO: 317720 - DNA, 33 bp, Homo sapien
tgccctatctatgtaatctgtaacttagctgag

SEQ ID NO: 317721 - DNA, 33 bp, Homo sapien
cactgaataagtagaaaatggatccgtaactcc

SEQ ID NO: 317722 - DNA, 33 bp, Homo sapien
cactgaataagtagaagatggatccgtaactcc

SEQ ID NO: 317723 - DNA, 33 bp, Homo sapien
atatgaaccttatttacatccagactcaaaaaa

SEQ ID NO: 317724 - DNA, 33 bp, Homo sapien
atatgaaccttatttagatccagactcaaaaaa

SEQ ID NO: 317725 - DNA, 33 bp, Homo sapien
aacccttttggtgtgcaaattttggaatgcagt

SEQ ID NO: 317726 - DNA, 33 bp, Homo sapien
aacccttttggtgtgccaattttggaatgcagt

SEQ ID NO: 317727 - DNA, 33 bp, Homo sapien
aaagctgatagaaggacagcttaccgagaaaaa

SEQ ID NO: 317728 - DNA, 33 bp, Homo sapien
aaagctgatagaaggatagcttaccgagaaaaa

SEQ ID NO: 317729 - DNA, 33 bp, Homo sapien
aagattaagatgtctccattcaaaacttaatac

SEQ ID NO: 317730 - DNA, 33 bp, Homo sapien
aagattaagatgtctctattcaaaacttaatac

SEQ ID NO: 317731 - DNA, 33 bp, Homo sapien
caaataaagtaccaaacagtaaagttgtataga

SEQ ID NO: 317732 - DNA, 33 bp, Homo sapien
caaataaagtaccaaatagtaaagttgtataga

SEQ ID NO: 317733 - DNA, 33 bp, Homo sapien
ttcatacaaggctatgcaggggataggaagata

SEQ ID NO: 317734 - DNA, 33 bp, Homo sapien
ttcatacaaggctatgtaggggataggaagata

SEQ ID NO: 317735 - DNA, 33 bp, Homo sapien
cttctgaagttatgtacatcctatttcacatat

SEQ ID NO: 317736 - DNA, 33 bp, Homo sapien
cttctgaagttatgtatatcctatttcacatat

SEQ ID NO: 317737 - DNA, 33 bp, Homo sapien
gccagagaacttgattcaaaagcaccccaaaga

SEQ ID NO: 317738 - DNA, 33 bp, Homo sapien
gccagagaacttgattgaaaagcaccccaaaga

SEQ ID NO: 317739 - DNA, 33 bp, Homo sapien
aaataacttgactaacagataaaagatttgaat

SEQ ID NO: 317740 - DNA, 33 bp, Homo sapien
aaataacttgactaacggataaaagatttgaat

SEQ ID NO: 317741 - DNA, 33 bp, Homo sapien
tctaagacggtccccaatgatccctgctactag

SEQ ID NO: 317742 - DNA, 33 bp, Homo sapien
tctaagacggtccccagtgatccctgctactag

SEQ ID NO: 317743 - DNA, 33 bp, Homo sapien
ctggttatttgttgcacgatagcctagaaggca

SEQ ID NO: 317744 - DNA, 33 bp, Homo sapien
ctggttatttgttgcatgatagcctagaaggca

SEQ ID NO: 317745 - DNA, 33 bp, Homo sapien
ttttggtaaacatacacaaatcagaaatccaag

SEQ ID NO: 317746 - DNA, 33 bp, Homo sapien
ttttggtaaacatacagaaatcagaaatccaag

SEQ ID NO: 317747 - DNA, 33 bp, Homo sapien
tgtaacattcctgaagaaaggaaaatcacttca

SEQ ID NO: 317748 - DNA, 33 bp, Homo sapien
tgtaacattcctgaagtaaggaaaatcacttca

SEQ ID NO: 317749 - DNA, 33 bp, Homo sapien
cgagaccagcgtggacaacatagaaagaccctg

SEQ ID NO: 317750 - DNA, 33 bp, Homo sapien
cgagaccagcgtggacgacatagaaagaccctg

SEQ ID NO: 317751 - DNA, 33 bp, Homo sapien
tggagggcacacataaaagtaatatggaagaac

SEQ ID NO: 317752 - DNA, 33 bp, Homo sapien
tggagggcacacataagagtaatatggaagaac

SEQ ID NO: 317753 - DNA, 33 bp, Homo sapien
atgaatagttccataaggtatccagccgtgtgt

SEQ ID NO: 317754 - DNA, 33 bp, Homo sapien
atgaatagttccataatgtatccagccgtgtgt

SEQ ID NO: 317755 - DNA, 33 bp, Homo sapien
aggcatatttttcttacggttggcacagatata

SEQ ID NO: 317756 - DNA, 33 bp, Homo sapien
aggcatatttttcttatggttggcacagatata

SEQ ID NO: 317757 - DNA, 33 bp, Homo sapien
ccttcttgctgtaagagtccatgtaaaatgtag

SEQ ID NO: 317758 - DNA, 33 bp, Homo sapien
ccttcttgctgtaagattccatgtaaaatgtag

SEQ ID NO: 317759 - DNA, 33 bp, Homo sapien
agctgcccatgacaaaaatatcttcgaaaacaa

SEQ ID NO: 317760 - DNA, 33 bp, Homo sapien
agctgcccatgacaaatatatcttcgaaaacaa

SEQ ID NO: 317761 - DNA, 33 bp, Homo sapien
caatagtaataccacaaatggaaaaaaataata

SEQ ID NO: 317762 - DNA, 33 bp, Homo sapien
caatagtaataccacatatggaaaaaaataata

SEQ ID NO: 317763 - DNA, 33 bp, Homo sapien
tttgaatgctattactcaaagccaaataacaca

SEQ ID NO: 317764 - DNA, 33 bp, Homo sapien
tttgaatgctattacttaaagccaaataacaca

SEQ ID NO: 317765 - DNA, 33 bp, Homo sapien
ctctaatctctgcttccaactgtattgctgggc

SEQ ID NO: 317766 - DNA, 33 bp, Homo sapien
ctctaatctctgcttctaactgtattgctgggc

SEQ ID NO: 317767 - DNA, 33 bp, Homo sapien
acagtttaggccataccggttttcagaaatccc

SEQ ID NO: 317768 - DNA, 33 bp, Homo sapien
acagtttaggccatactggttttcagaaatccc

SEQ ID NO: 317769 - DNA, 33 bp, Homo sapien
agtggctgacgagaacacaaaagatgaaataac

SEQ ID NO: 317770 - DNA, 33 bp, Homo sapien
agtggctgacgagaacgcaaaagatgaaataac

SEQ ID NO: 317771 - DNA, 33 bp, Homo sapien
gtactgaaaaacatgaagagtaaagaacaaact

SEQ ID NO: 317772 - DNA, 33 bp, Homo sapien
gtactgaaaaacatgatgagtaaagaacaaact

SEQ ID NO: 317773 - DNA, 33 bp, Homo sapien
aatctgtgtgcccaaaaaatccaaaatatataa

SEQ ID NO: 317774 - DNA, 33 bp, Homo sapien
aatctgtgtgcccaaacaatccaaaatatataa

SEQ ID NO: 317775 - DNA, 33 bp, Homo sapien
aatgacatttgctgcacgttgataattagtttt

SEQ ID NO: 317776 - DNA, 33 bp, Homo sapien
aatgacatttgctgcaggttgataattagtttt

SEQ ID NO: 317777 - DNA, 33 bp, Homo sapien
agatataaactgtccaaaattaagtactgagag

SEQ ID NO: 317778 - DNA, 33 bp, Homo sapien
agatataaactgtccagaattaagtactgagag

SEQ ID NO: 317779 - DNA, 33 bp, Homo sapien
gtcatataaaagttcagcacacacaattatgta

SEQ ID NO: 317780 - DNA, 33 bp, Homo sapien
gtcatataaaagttcatcacacacaattatgta

SEQ ID NO: 317781 - DNA, 33 bp, Homo sapien
accatgcccggcccaaagaattagaatttttac

SEQ ID NO: 317782 - DNA, 33 bp, Homo sapien
accatgcccggcccaacgaattagaatttttac

SEQ ID NO: 317783 - DNA, 33 bp, Homo sapien
tcatgctaaagtctgaaaaccattagcctatat

SEQ ID NO: 317784 - DNA, 33 bp, Homo sapien
tcatgctaaagtctgagaaccattagcctatat

SEQ ID NO: 317785 - DNA, 33 bp, Homo sapien
tgaggccagtggtctaacatataaaaatgctgc

SEQ ID NO: 317786 - DNA, 33 bp, Homo sapien
tgaggccagtggtctagcatataaaaatgctgc

SEQ ID NO: 317787 - DNA, 33 bp, Homo sapien
atttattgaaaccacaatgcaaacaattaaaaa

SEQ ID NO: 317788 - DNA, 33 bp, Homo sapien
atttattgaaaccacagtgcaaacaattaaaaa

SEQ ID NO: 317789 - DNA, 33 bp, Homo sapien
tgtaaatgatgacctcactaatccaattttact

SEQ ID NO: 317790 - DNA, 33 bp, Homo sapien
tgtaaatgatgacctcgctaatccaattttact

SEQ ID NO: 317791 - DNA, 33 bp, Homo sapien
attctgaaaattgacaaatgaaaagaggaaaaa

SEQ ID NO: 317792 - DNA, 33 bp, Homo sapien
attctgaaaattgacagatgaaaagaggaaaaa

SEQ ID NO: 317793 - DNA, 33 bp, Homo sapien
cctaccccgtgcctaccgcatggttccagaagg

SEQ ID NO: 317794 - DNA, 33 bp, Homo sapien
cctaccccgtgcctactgcatggttccagaagg

SEQ ID NO: 317795 - DNA, 33 bp, Homo sapien
tgattccagccagagaaatgacacgggggaaat

SEQ ID NO: 317796 - DNA, 33 bp, Homo sapien
tgattccagccagagagatgacacgggggaaat

SEQ ID NO: 317797 - DNA, 33 bp, Homo sapien
gacaatcccaccatcccatagcatgttacttta

SEQ ID NO: 317798 - DNA, 33 bp, Homo sapien
gacaatcccaccatcctatagcatgttacttta

SEQ ID NO: 317799 - DNA, 33 bp, Homo sapien
acgcacacacacgaaaaagaatcttctgactta

SEQ ID NO: 317800 - DNA, 33 bp, Homo sapien
acgcacacacacgaaagagaatcttctgactta

SEQ ID NO: 317801 - DNA, 33 bp, Homo sapien
tcctaaactttgcacaaaagaatatcctggggc

SEQ ID NO: 317802 - DNA, 33 bp, Homo sapien
tcctaaactttgcacagaagaatatcctggggc

SEQ ID NO: 317803 - DNA, 33 bp, Homo sapien
tcatctgtaaaatggacgcaatcgcccccaatt

SEQ ID NO: 317804 - DNA, 33 bp, Homo sapien
tcatctgtaaaatggatgcaatcgcccccaatt

SEQ ID NO: 317805 - DNA, 33 bp, Homo sapien
aggcagatgttagagaagaagattctgaaagat

SEQ ID NO: 317806 - DNA, 33 bp, Homo sapien
aggcagatgttagagaggaagattctgaaagat

SEQ ID NO: 317807 - DNA, 33 bp, Homo sapien
actaaggttaggaaacagcacacagtggtggag

SEQ ID NO: 317808 - DNA, 33 bp, Homo sapien
actaaggttaggaaacggcacacagtggtggag

SEQ ID NO: 317809 - DNA, 33 bp, Homo sapien
gccttagtggctggacacttctcaaaggagatg

SEQ ID NO: 317810 - DNA, 33 bp, Homo sapien
gccttagtggctggacgcttctcaaaggagatg

SEQ ID NO: 317811 - DNA, 33 bp, Homo sapien
tgtacattgtaatataccccaaatgtcttctac

SEQ ID NO: 317812 - DNA, 33 bp, Homo sapien
tgtacattgtaatatatcccaaatgtcttctac

SEQ ID NO: 317813 - DNA, 33 bp, Homo sapien
gacacgccatgcacaaaaagtgccctgtgggaa

SEQ ID NO: 317814 - DNA, 33 bp, Homo sapien
gacacgccatgcacaagaagtgccctgtgggaa

SEQ ID NO: 317815 - DNA, 33 bp, Homo sapien
tgaggctgtagtttcacctttaagaaaaccaga

SEQ ID NO: 317816 - DNA, 33 bp, Homo sapien
tgaggctgtagtttcatctttaagaaaaccaga

SEQ ID NO: 317817 - DNA, 33 bp, Homo sapien
ggtagccaggggttccacagtaaatcagacaag

SEQ ID NO: 317818 - DNA, 33 bp, Homo sapien
ggtagccaggggttccgcagtaaatcagacaag

SEQ ID NO: 317819 - DNA, 33 bp, Homo sapien
ttgggggttgcctataaggtggtatctgagggc

SEQ ID NO: 317820 - DNA, 33 bp, Homo sapien
ttgggggttgcctatacggtggtatctgagggc

SEQ ID NO: 317821 - DNA, 33 bp, Homo sapien
gctaacttaataaaaacagtgttgttactggca

SEQ ID NO: 317822 - DNA, 33 bp, Homo sapien
gctaacttaataaaaatagtgttgttactggca

SEQ ID NO: 317823 - DNA, 33 bp, Homo sapien
aaataaataaataaaacgctggtgcctgtgatc

SEQ ID NO: 317824 - DNA, 33 bp, Homo sapien
aaataaataaataaaatgctggtgcctgtgatc

SEQ ID NO: 317825 - DNA, 33 bp, Homo sapien
tcagaaggttgactagcacttgcattttattta

SEQ ID NO: 317826 - DNA, 33 bp, Homo sapien
tcagaaggttgactaggacttgcattttattta

SEQ ID NO: 317827 - DNA, 33 bp, Homo sapien
ccaaaaagataactgacgtcaggaccgggggaa

SEQ ID NO: 317828 - DNA, 33 bp, Homo sapien
ccaaaaagataactgatgtcaggaccgggggaa

SEQ ID NO: 317829 - DNA, 33 bp, Homo sapien
aggctctagcttcaaaactgccattggagctga

SEQ ID NO: 317830 - DNA, 33 bp, Homo sapien
aggctctagcttcaaagctgccattggagctga

SEQ ID NO: 317831 - DNA, 33 bp, Homo sapien
tcgtggacaggtcgatgagctgggtgaagcagc

SEQ ID NO: 317832 - DNA, 33 bp, Homo sapien
tcgtggacaggtcgattagctgggtgaagcagc

SEQ ID NO: 317833 - DNA, 33 bp, Homo sapien
tggagacctgagtcccacagagcttagcaccct

SEQ ID NO: 317834 - DNA, 33 bp, Homo sapien
tggagacctgagtcccgcagagcttagcaccct

SEQ ID NO: 317835 - DNA, 33 bp, Homo sapien
ttctggcagtagataacagtagcagtcttcaca

SEQ ID NO: 317836 - DNA, 33 bp, Homo sapien
ttctggcagtagataagagtagcagtcttcaca

SEQ ID NO: 317837 - DNA, 33 bp, Homo sapien
agccaattccgagctaggcacatgacatggcaa

SEQ ID NO: 317838 - DNA, 33 bp, Homo sapien
agccaattccgagctatgcacatgacatggcaa

SEQ ID NO: 317839 - DNA, 33 bp, Homo sapien
gctctgggtaaaataacgcggtcagccccacca

SEQ ID NO: 317840 - DNA, 33 bp, Homo sapien
gctctgggtaaaataatgcggtcagccccacca

SEQ ID NO: 317841 - DNA, 33 bp, Homo sapien
gaatgaccaggttcccacatcatgcacagcagg

SEQ ID NO: 317842 - DNA, 33 bp, Homo sapien
gaatgaccaggttcccccatcatgcacagcagg

SEQ ID NO: 317843 - DNA, 33 bp, Homo sapien
tctccatacttccaaacgggatgtgcaggtcca

SEQ ID NO: 317844 - DNA, 33 bp, Homo sapien
tctccatacttccaaatgggatgtgcaggtcca

SEQ ID NO: 317845 - DNA, 33 bp, Homo sapien
tttctcacgtcattacgctttgtaaacctgttt

SEQ ID NO: 317846 - DNA, 33 bp, Homo sapien
tttctcacgtcattactctttgtaaacctgttt

SEQ ID NO: 317847 - DNA, 33 bp, Homo sapien
ctgttcactggagtaaaggaccggcactcagag

SEQ ID NO: 317848 - DNA, 33 bp, Homo sapien
ctgttcactggagtaagggaccggcactcagag

SEQ ID NO: 317849 - DNA, 33 bp, Homo sapien
acatttgacagataaacgaaccaatgtcacact

SEQ ID NO: 317850 - DNA, 33 bp, Homo sapien
acatttgacagataaatgaaccaatgtcacact

SEQ ID NO: 317851 - DNA, 33 bp, Homo sapien
gaatcataaaccgttaaggtaaaatccagcaat

SEQ ID NO: 317852 - DNA, 33 bp, Homo sapien
gaatcataaaccgttagggtaaaatccagcaat

SEQ ID NO: 317853 - DNA, 33 bp, Homo sapien
tgatctgattagaagacggtctagcgcctgttc

SEQ ID NO: 317854 - DNA, 33 bp, Homo sapien
tgatctgattagaagatggtctagcgcctgttc

SEQ ID NO: 317855 - DNA, 33 bp, Homo sapien
cataatagaaaacaggacccaggttccctgact

SEQ ID NO: 317856 - DNA, 33 bp, Homo sapien
cataatagaaaacagggcccaggttccctgact

SEQ ID NO: 317857 - DNA, 33 bp, Homo sapien
tgcttgtgacagagaacagtgggtaatgcagtg

SEQ ID NO: 317858 - DNA, 33 bp, Homo sapien
tgcttgtgacagagaatagtgggtaatgcagtg

SEQ ID NO: 317859 - DNA, 33 bp, Homo sapien
aggagagatggatggacggtagacttttttgag

SEQ ID NO: 317860 - DNA, 33 bp, Homo sapien
aggagagatggatggatggtagacttttttgag

SEQ ID NO: 317861 - DNA, 33 bp, Homo sapien
actactcagcaacaaaatagaatgaggtattga

SEQ ID NO: 317862 - DNA, 33 bp, Homo sapien
actactcagcaacaaagtagaatgaggtattga

SEQ ID NO: 317863 - DNA, 33 bp, Homo sapien
catcccagcctcatccaccataggcaaagaagg

SEQ ID NO: 317864 - DNA, 33 bp, Homo sapien
catcccagcctcatccgccataggcaaagaagg

SEQ ID NO: 317865 - DNA, 33 bp, Homo sapien
gaagggggagctaagccgagttaggagaccgcc

SEQ ID NO: 317866 - DNA, 33 bp, Homo sapien
gaagggggagctaagctgagttaggagaccgcc

SEQ ID NO: 317867 - DNA, 33 bp, Homo sapien
acttaatcatgtactacgtctttatttatccat

SEQ ID NO: 317868 - DNA, 33 bp, Homo sapien
acttaatcatgtactaggtctttatttatccat

SEQ ID NO: 317869 - DNA, 33 bp, Homo sapien
gcttggaaatacaaagcctattcatactgggaa

SEQ ID NO: 317870 - DNA, 33 bp, Homo sapien
gcttggaaatacaaaggctattcatactgggaa

SEQ ID NO: 317871 - DNA, 33 bp, Homo sapien
ctttaaggcccacttacgagtcatgaaatattt

SEQ ID NO: 317872 - DNA, 33 bp, Homo sapien
ctttaaggcccacttatgagtcatgaaatattt

SEQ ID NO: 317873 - DNA, 33 bp, Homo sapien
ttttatgactcatagcagatccacgagcatgag

SEQ ID NO: 317874 - DNA, 33 bp, Homo sapien
ttttatgactcatagcggatccacgagcatgag

SEQ ID NO: 317875 - DNA, 33 bp, Homo sapien
ctgtgatagtttatgacggagttgttagggtcg

SEQ ID NO: 317876 - DNA, 33 bp, Homo sapien
ctgtgatagtttatgatggagttgttagggtcg

SEQ ID NO: 317877 - DNA, 33 bp, Homo sapien
gcaggggttcgctgcacacatcattggtgactt

SEQ ID NO: 317878 - DNA, 33 bp, Homo sapien
gcaggggttcgctgcatacatcattggtgactt

SEQ ID NO: 317879 - DNA, 33 bp, Homo sapien
ttctattaccagctaccctgaggctgtcccacc

SEQ ID NO: 317880 - DNA, 33 bp, Homo sapien
ttctattaccagctactctgaggctgtcccacc

SEQ ID NO: 317881 - DNA, 33 bp, Homo sapien
gggtttggcttttgacacgatgtctggaaattg

SEQ ID NO: 317882 - DNA, 33 bp, Homo sapien
gggtttggcttttgacgcgatgtctggaaattg

SEQ ID NO: 317883 - DNA, 33 bp, Homo sapien
aagtgaccccctccaccgatgtgctggtgaccc

SEQ ID NO: 317884 - DNA, 33 bp, Homo sapien
aagtgaccccctccactgatgtgctggtgaccc

SEQ ID NO: 317885 - DNA, 33 bp, Homo sapien
ggttcagacattggaaagctgagctcatgcttc

SEQ ID NO: 317886 - DNA, 33 bp, Homo sapien
ggttcagacattggaaggctgagctcatgcttc

SEQ ID NO: 317887 - DNA, 33 bp, Homo sapien
ggtggcacatcacagggacggcagaggagccaa

SEQ ID NO: 317888 - DNA, 33 bp, Homo sapien
ggtggcacatcacaggtacggcagaggagccaa

SEQ ID NO: 317889 - DNA, 33 bp, Homo sapien
gccaggcactttacacacactcacttcattaac

SEQ ID NO: 317890 - DNA, 33 bp, Homo sapien
gccaggcactttacacccactcacttcattaac

SEQ ID NO: 317891 - DNA, 33 bp, Homo sapien
tatgtgattggtcaaactgctccaggaatctgg

SEQ ID NO: 317892 - DNA, 33 bp, Homo sapien
tatgtgattggtcaaattgctccaggaatctgg

SEQ ID NO: 317893 - DNA, 33 bp, Homo sapien
gattctaagaggaggaaagtgggctgaagagga

SEQ ID NO: 317894 - DNA, 33 bp, Homo sapien
gattctaagaggaggagagtgggctgaagagga

SEQ ID NO: 317895 - DNA, 33 bp, Homo sapien
aagaaatagaaaagacaaattccaaactgcaaa

SEQ ID NO: 317896 - DNA, 33 bp, Homo sapien
aagaaatagaaaagacgaattccaaactgcaaa

SEQ ID NO: 317897 - DNA, 33 bp, Homo sapien
tggcctgtgtacacaccggagatgccacatgtc

SEQ ID NO: 317898 - DNA, 33 bp, Homo sapien
tggcctgtgtacacacgggagatgccacatgtc

SEQ ID NO: 317899 - DNA, 33 bp, Homo sapien
cagaccttattccataaaaagttccataaatat

SEQ ID NO: 317900 - DNA, 33 bp, Homo sapien
cagaccttattccatacaaagttccataaatat

SEQ ID NO: 317901 - DNA, 33 bp, Homo sapien
ccaattgtacagcaaaatttgagtgtcttggtg

SEQ ID NO: 317902 - DNA, 33 bp, Homo sapien
ccaattgtacagcaaagtttgagtgtcttggtg

SEQ ID NO: 317903 - DNA, 33 bp, Homo sapien
acaaatagaaggaggcaccacattttcttggaa

SEQ ID NO: 317904 - DNA, 33 bp, Homo sapien
acaaatagaaggaggcgccacattttcttggaa

SEQ ID NO: 317905 - DNA, 33 bp, Homo sapien
ggaaccttcctggtaaagacatcgggacatatg

SEQ ID NO: 317906 - DNA, 33 bp, Homo sapien
ggaaccttcctggtaaggacatcgggacatatg

SEQ ID NO: 317907 - DNA, 33 bp, Homo sapien
ccccttctctatacaacgcccaactgcactttc

SEQ ID NO: 317908 - DNA, 33 bp, Homo sapien
ccccttctctatacaatgcccaactgcactttc

SEQ ID NO: 317909 - DNA, 33 bp, Homo sapien
tcctctccaagcttacaatttagtgggtagtca

SEQ ID NO: 317910 - DNA, 33 bp, Homo sapien
tcctctccaagcttacgatttagtgggtagtca

SEQ ID NO: 317911 - DNA, 33 bp, Homo sapien
tgtggagcagtgactacattttccaaactaaaa

SEQ ID NO: 317912 - DNA, 33 bp, Homo sapien
tgtggagcagtgactatattttccaaactaaaa

SEQ ID NO: 317913 - DNA, 33 bp, Homo sapien
caagtctcaatgagaaagtgaccacagccccca

SEQ ID NO: 317914 - DNA, 33 bp, Homo sapien
caagtctcaatgagaaggtgaccacagccccca

SEQ ID NO: 317915 - DNA, 33 bp, Homo sapien
ccgctgcaatttcatcaaaggacagaggttccc

SEQ ID NO: 317916 - DNA, 33 bp, Homo sapien
ccgctgcaatttcatcgaaggacagaggttccc

SEQ ID NO: 317917 - DNA, 33 bp, Homo sapien
ggtttctgcaactactcagcggtgccattggag

SEQ ID NO: 317918 - DNA, 33 bp, Homo sapien
ggtttctgcaactacttagcggtgccattggag

SEQ ID NO: 317919 - DNA, 33 bp, Homo sapien
ggcctcatcctatgaaactcatgcttgaaaagg

SEQ ID NO: 317920 - DNA, 33 bp, Homo sapien
ggcctcatcctatgaacctcatgcttgaaaagg

SEQ ID NO: 317921 - DNA, 33 bp, Homo sapien
gtgagtagctgcgacaagcattctgtgggtttt

SEQ ID NO: 317922 - DNA, 33 bp, Homo sapien
gtgagtagctgcgacaggcattctgtgggtttt

SEQ ID NO: 317923 - DNA, 33 bp, Homo sapien
agttacgtaggcaagcccttaccctccaggtct

SEQ ID NO: 317924 - DNA, 33 bp, Homo sapien
agttacgtaggcaagctcttaccctccaggtct

SEQ ID NO: 317925 - DNA, 33 bp, Homo sapien
tgtattattagcaagcaaggcagaaccagagct

SEQ ID NO: 317926 - DNA, 33 bp, Homo sapien
tgtattattagcaagcgaggcagaaccagagct

SEQ ID NO: 317927 - DNA, 33 bp, Homo sapien
cgattgctcccattcccgcgagtctggagatat

SEQ ID NO: 317928 - DNA, 33 bp, Homo sapien
cgattgctcccattcctgcgagtctggagatat

SEQ ID NO: 317929 - DNA, 33 bp, Homo sapien
gcacctcttaaccaggaattctagagccctgtt

SEQ ID NO: 317930 - DNA, 33 bp, Homo sapien
gcacctcttaaccagggattctagagccctgtt

SEQ ID NO: 317931 - DNA, 33 bp, Homo sapien
tataaagagaagataactgtaggaaaattgaaa

SEQ ID NO: 317932 - DNA, 33 bp, Homo sapien
tataaagagaagataattgtaggaaaattgaaa

SEQ ID NO: 317933 - DNA, 33 bp, Homo sapien
gttaatataattagcccaagtttattcatttta

SEQ ID NO: 317934 - DNA, 33 bp, Homo sapien
gttaatataattagcctaagtttattcatttta

SEQ ID NO: 317935 - DNA, 33 bp, Homo sapien
gaaggctgggggcccaatcaaactttccttcag

SEQ ID NO: 317936 - DNA, 33 bp, Homo sapien
gaaggctgggggcccagtcaaactttccttcag

SEQ ID NO: 317937 - DNA, 33 bp, Homo sapien
atttcttgagcactcaaaaggtaccaggcactg

SEQ ID NO: 317938 - DNA, 33 bp, Homo sapien
atttcttgagcactcagaaggtaccaggcactg

SEQ ID NO: 317939 - DNA, 33 bp, Homo sapien
tctgatggtgagtgtaagtggcaaagctgctgg

SEQ ID NO: 317940 - DNA, 33 bp, Homo sapien
tctgatggtgagtgtacgtggcaaagctgctgg

SEQ ID NO: 317941 - DNA, 33 bp, Homo sapien
cagagtgggcagacaactacctggaattctgaa

SEQ ID NO: 317942 - DNA, 33 bp, Homo sapien
cagagtgggcagacaattacctggaattctgaa

SEQ ID NO: 317943 - DNA, 33 bp, Homo sapien
gtgagggttgatgagaataagatcatgctgctt

SEQ ID NO: 317944 - DNA, 33 bp, Homo sapien
gtgagggttgatgagattaagatcatgctgctt

SEQ ID NO: 317945 - DNA, 33 bp, Homo sapien
aggttcttctctgatcccataagctcaagttga

SEQ ID NO: 317946 - DNA, 33 bp, Homo sapien
aggttcttctctgatcgcataagctcaagttga

SEQ ID NO: 317947 - DNA, 33 bp, Homo sapien
gttcttgacagctccacagaattgtctccttag

SEQ ID NO: 317948 - DNA, 33 bp, Homo sapien
gttcttgacagctccatagaattgtctccttag

SEQ ID NO: 317949 - DNA, 33 bp, Homo sapien
gttacaaacctttccaggaagcagagttaaact

SEQ ID NO: 317950 - DNA, 33 bp, Homo sapien
gttacaaacctttccatgaagcagagttaaact

SEQ ID NO: 317951 - DNA, 33 bp, Homo sapien
cctcagcctggttctccaaagcgttggccagtt

SEQ ID NO: 317952 - DNA, 33 bp, Homo sapien
cctcagcctggttctcgaaagcgttggccagtt

SEQ ID NO: 317953 - DNA, 33 bp, Homo sapien
tgcacacacgtggccacgataaaagaaagtgag

SEQ ID NO: 317954 - DNA, 33 bp, Homo sapien
tgcacacacgtggccatgataaaagaaagtgag

SEQ ID NO: 317955 - DNA, 33 bp, Homo sapien
ctcacagaacagtggaagtgagtgattctgttg

SEQ ID NO: 317956 - DNA, 33 bp, Homo sapien
ctcacagaacagtggaggtgagtgattctgttg

SEQ ID NO: 317957 - DNA, 33 bp, Homo sapien
gagaacatcttcaggaactgagaccaaagattt

SEQ ID NO: 317958 - DNA, 33 bp, Homo sapien
gagaacatcttcaggatctgagaccaaagattt

SEQ ID NO: 317959 - DNA, 33 bp, Homo sapien
gattgcatcttacaaaacaaacgtctttctttt

SEQ ID NO: 317960 - DNA, 33 bp, Homo sapien
gattgcatcttacaaagcaaacgtctttctttt

SEQ ID NO: 317961 - DNA, 33 bp, Homo sapien
ctactgaatgatcttaaacaagttacagcaggt

SEQ ID NO: 317962 - DNA, 33 bp, Homo sapien
ctactgaatgatcttagacaagttacagcaggt

SEQ ID NO: 317963 - DNA, 33 bp, Homo sapien
gaggacttgctgtaaacttctcttcagttgcct

SEQ ID NO: 317964 - DNA, 33 bp, Homo sapien
gaggacttgctgtaaatttctcttcagttgcct

SEQ ID NO: 317965 - DNA, 33 bp, Homo sapien
aatggagtagctatacactggccacaatataga

SEQ ID NO: 317966 - DNA, 33 bp, Homo sapien
aatggagtagctatacgctggccacaatataga

SEQ ID NO: 317967 - DNA, 33 bp, Homo sapien
tccctttcatttatgaacagaaaacagtttgca

SEQ ID NO: 317968 - DNA, 33 bp, Homo sapien
tccctttcatttatgagcagaaaacagtttgca

SEQ ID NO: 317969 - DNA, 33 bp, Homo sapien
tggcacaacgactgaccagtctgagaatcgttc

SEQ ID NO: 317970 - DNA, 33 bp, Homo sapien
tggcacaacgactgactagtctgagaatcgttc

SEQ ID NO: 317971 - DNA, 33 bp, Homo sapien
gacttgaacacaccaaaaaaacattgtttggga

SEQ ID NO: 317972 - DNA, 33 bp, Homo sapien
gacttgaacacaccaacaaaacattgtttggga

SEQ ID NO: 317973 - DNA, 33 bp, Homo sapien
aatttcccatggttacaaggttgcataaagaaa

SEQ ID NO: 317974 - DNA, 33 bp, Homo sapien
aatttcccatggttacgaggttgcataaagaaa

SEQ ID NO: 317975 - DNA, 33 bp, Homo sapien
ggcttcagtttgttcccatttattgacaggggt

SEQ ID NO: 317976 - DNA, 33 bp, Homo sapien
ggcttcagtttgttccgatttattgacaggggt

SEQ ID NO: 317977 - DNA, 33 bp, Homo sapien
ctggagttccacaagggatacctcctcagttaa

SEQ ID NO: 317978 - DNA, 33 bp, Homo sapien
ctggagttccacaaggtatacctcctcagttaa

SEQ ID NO: 317979 - DNA, 33 bp, Homo sapien
tgctgtagaagaggcacaggataattcattctg

SEQ ID NO: 317980 - DNA, 33 bp, Homo sapien
tgctgtagaagaggcataggataattcattctg

SEQ ID NO: 317981 - DNA, 33 bp, Homo sapien
tgatatacacagtgtcaaaacagctcccctaga

SEQ ID NO: 317982 - DNA, 33 bp, Homo sapien
tgatatacacagtgtcgaaacagctcccctaga

SEQ ID NO: 317983 - DNA, 33 bp, Homo sapien
aagaggatgccattggaaaaaacatttggaggg

SEQ ID NO: 317984 - DNA, 33 bp, Homo sapien
aagaggatgccattggcaaaaacatttggaggg

SEQ ID NO: 317985 - DNA, 33 bp, Homo sapien
gatgaaagaccagatacggcaggtttgtatggt

SEQ ID NO: 317986 - DNA, 33 bp, Homo sapien
gatgaaagaccagatatggcaggtttgtatggt

SEQ ID NO: 317987 - DNA, 33 bp, Homo sapien
ggataatgtcatagccaaatacaagtcgtttat

SEQ ID NO: 317988 - DNA, 33 bp, Homo sapien
ggataatgtcatagccgaatacaagtcgtttat

SEQ ID NO: 317989 - DNA, 33 bp, Homo sapien
aatgtggctttcacatcagtttttaaaatttga

SEQ ID NO: 317990 - DNA, 33 bp, Homo sapien
aatgtggctttcacattagtttttaaaatttga

SEQ ID NO: 317991 - DNA, 33 bp, Homo sapien
acgaccctggaggctacagaacagaataaatag

SEQ ID NO: 317992 - DNA, 33 bp, Homo sapien
acgaccctggaggctagagaacagaataaatag

SEQ ID NO: 317993 - DNA, 33 bp, Homo sapien
atctagcagccatttacctgttccaaacttact

SEQ ID NO: 317994 - DNA, 33 bp, Homo sapien
atctagcagccatttatctgttccaaacttact

SEQ ID NO: 317995 - DNA, 33 bp, Homo sapien
accaacttccttaaaccctcatgtataaggtag

SEQ ID NO: 317996 - DNA, 33 bp, Homo sapien
accaacttccttaaactctcatgtataaggtag

SEQ ID NO: 317997 - DNA, 33 bp, Homo sapien
tctgtcttcattgagccaagtggcaatacatat

SEQ ID NO: 317998 - DNA, 33 bp, Homo sapien
tctgtcttcattgagcgaagtggcaatacatat

SEQ ID NO: 317999 - DNA, 33 bp, Homo sapien
ctaatacctttcccaaatcgagtagtttgttag

SEQ ID NO: 318000 - DNA, 33 bp, Homo sapien
ctaatacctttcccaagtcgagtagtttgttag

SEQ ID NO: 318001 - DNA, 33 bp, Homo sapien
gtaaatctgtggctcaaagagacttcggtattc

SEQ ID NO: 318002 - DNA, 33 bp, Homo sapien
gtaaatctgtggctcagagagacttcggtattc

SEQ ID NO: 318003 - DNA, 33 bp, Homo sapien
ctgttgcccaagtgaaaatgttgaggctgtaat

SEQ ID NO: 318004 - DNA, 33 bp, Homo sapien
ctgttgcccaagtgaagatgttgaggctgtaat

SEQ ID NO: 318005 - DNA, 33 bp, Homo sapien
gagtgcctatttcccgaaccagagaatgcaagg

SEQ ID NO: 318006 - DNA, 33 bp, Homo sapien
gagtgcctatttcccgcaccagagaatgcaagg

SEQ ID NO: 318007 - DNA, 33 bp, Homo sapien
ggcttttctaaagaccactttggaaatggcaag

SEQ ID NO: 318008 - DNA, 33 bp, Homo sapien
ggcttttctaaagaccgctttggaaatggcaag

SEQ ID NO: 318009 - DNA, 33 bp, Homo sapien
atgcagcatgggagacagacaggtaaacaggac

SEQ ID NO: 318010 - DNA, 33 bp, Homo sapien
atgcagcatgggagacggacaggtaaacaggac

SEQ ID NO: 318011 - DNA, 33 bp, Homo sapien
cactactctctgaaccaaactgtctttaaatat

SEQ ID NO: 318012 - DNA, 33 bp, Homo sapien
cactactctctgaaccgaactgtctttaaatat

SEQ ID NO: 318013 - DNA, 33 bp, Homo sapien
attatcagatttatctcaaaatggcaaagagca

SEQ ID NO: 318014 - DNA, 33 bp, Homo sapien
attatcagatttatcttaaaatggcaaagagca

SEQ ID NO: 318015 - DNA, 33 bp, Homo sapien
tagctccaatcaagtaacgaatgtctactgggt

SEQ ID NO: 318016 - DNA, 33 bp, Homo sapien
tagctccaatcaagtagcgaatgtctactgggt

SEQ ID NO: 318017 - DNA, 33 bp, Homo sapien
agatggccaaggactacagtatctaagtacacg

SEQ ID NO: 318018 - DNA, 33 bp, Homo sapien
agatggccaaggactatagtatctaagtacacg

SEQ ID NO: 318019 - DNA, 33 bp, Homo sapien
acacgaacttgccccactccttatctagtgctg

SEQ ID NO: 318020 - DNA, 33 bp, Homo sapien
acacgaacttgccccagtccttatctagtgctg

SEQ ID NO: 318021 - DNA, 33 bp, Homo sapien
gacccaaagggcactcaatctaaaccaaattag

SEQ ID NO: 318022 - DNA, 33 bp, Homo sapien
gacccaaagggcactcgatctaaaccaaattag

SEQ ID NO: 318023 - DNA, 33 bp, Homo sapien
gatgttactgtgaaaacattacaaaacaaactg

SEQ ID NO: 318024 - DNA, 33 bp, Homo sapien
gatgttactgtgaaaatattacaaaacaaactg

SEQ ID NO: 318025 - DNA, 33 bp, Homo sapien
gttttcctgttgacacacttctctgttccttgg

SEQ ID NO: 318026 - DNA, 33 bp, Homo sapien
gttttcctgttgacacgcttctctgttccttgg

SEQ ID NO: 318027 - DNA, 33 bp, Homo sapien
gccactgctgtcaagggaaggatgaagcaacag

SEQ ID NO: 318028 - DNA, 33 bp, Homo sapien
gccactgctgtcaaggtaaggatgaagcaacag

SEQ ID NO: 318029 - DNA, 33 bp, Homo sapien
cgtgaggcctgagtaccgacggttttaaagaaa

SEQ ID NO: 318030 - DNA, 33 bp, Homo sapien
cgtgaggcctgagtactgacggttttaaagaaa

SEQ ID NO: 318031 - DNA, 33 bp, Homo sapien
agaaggtacctggagaaggaagaagataggccc

SEQ ID NO: 318032 - DNA, 33 bp, Homo sapien
agaaggtacctggagagggaagaagataggccc

SEQ ID NO: 318033 - DNA, 33 bp, Homo sapien
cttgcgggctgcgggacccaggacctcgcatga

SEQ ID NO: 318034 - DNA, 33 bp, Homo sapien
cttgcgggctgcgggatccaggacctcgcatga

SEQ ID NO: 318035 - DNA, 33 bp, Homo sapien
tttaactacctgagaacgtctctttcaaggact

SEQ ID NO: 318036 - DNA, 33 bp, Homo sapien
tttaactacctgagaatgtctctttcaaggact

SEQ ID NO: 318037 - DNA, 33 bp, Homo sapien
tatctttccttgaacccagcagctcgccatctt

SEQ ID NO: 318038 - DNA, 33 bp, Homo sapien
tatctttccttgaacctagcagctcgccatctt

SEQ ID NO: 318039 - DNA, 33 bp, Homo sapien
taaaataatgagccagaagctatcttgtcagca

SEQ ID NO: 318040 - DNA, 33 bp, Homo sapien
taaaataatgagccaggagctatcttgtcagca

SEQ ID NO: 318041 - DNA, 33 bp, Homo sapien
tccccagatccagttacatttgagagcactttt

SEQ ID NO: 318042 - DNA, 33 bp, Homo sapien
tccccagatccagttagatttgagagcactttt

SEQ ID NO: 318043 - DNA, 33 bp, Homo sapien
tgttttatatctggccgactttgctttgaatta

SEQ ID NO: 318044 - DNA, 33 bp, Homo sapien
tgttttatatctggcctactttgctttgaatta

SEQ ID NO: 318045 - DNA, 33 bp, Homo sapien
tgtttcttcagcactaagtagcttattttctag

SEQ ID NO: 318046 - DNA, 33 bp, Homo sapien
tgtttcttcagcactatgtagcttattttctag

SEQ ID NO: 318047 - DNA, 33 bp, Homo sapien
taacaggaaaagaaaacggaacaacgaagcctt

SEQ ID NO: 318048 - DNA, 33 bp, Homo sapien
taacaggaaaagaaaatggaacaacgaagcctt

SEQ ID NO: 318049 - DNA, 33 bp, Homo sapien
gatgtaaggaaggggcaaatcatatagtgagtc

SEQ ID NO: 318050 - DNA, 33 bp, Homo sapien
gatgtaaggaaggggcgaatcatatagtgagtc

SEQ ID NO: 318051 - DNA, 33 bp, Homo sapien
agccaactgctggaaaaaattatcagggaaact

SEQ ID NO: 318052 - DNA, 33 bp, Homo sapien
agccaactgctggaaagaattatcagggaaact

SEQ ID NO: 318053 - DNA, 33 bp, Homo sapien
taatttctaaaagggcactgttgcacacttaag

SEQ ID NO: 318054 - DNA, 33 bp, Homo sapien
taatttctaaaagggctctgttgcacacttaag

SEQ ID NO: 318055 - DNA, 33 bp, Homo sapien
agagaactggaatggaactgaattttgttgaga

SEQ ID NO: 318056 - DNA, 33 bp, Homo sapien
agagaactggaatggacctgaattttgttgaga

SEQ ID NO: 318057 - DNA, 33 bp, Homo sapien
gttcttgatggtcttacacttgggaatgtgttg

SEQ ID NO: 318058 - DNA, 33 bp, Homo sapien
gttcttgatggtcttatacttgggaatgtgttg

SEQ ID NO: 318059 - DNA, 33 bp, Homo sapien
ggtctccctggtgcataagcctggccaaaaccc

SEQ ID NO: 318060 - DNA, 33 bp, Homo sapien
ggtctccctggtgcatgagcctggccaaaaccc

SEQ ID NO: 318061 - DNA, 33 bp, Homo sapien
tatgttaagaaagaaaactccattttagctgtt

SEQ ID NO: 318062 - DNA, 33 bp, Homo sapien
tatgttaagaaagaaacctccattttagctgtt

SEQ ID NO: 318063 - DNA, 33 bp, Homo sapien
gttaatgtctgcgagaatattatcagttcagat

SEQ ID NO: 318064 - DNA, 33 bp, Homo sapien
gttaatgtctgcgagagtattatcagttcagat

SEQ ID NO: 318065 - DNA, 33 bp, Homo sapien
tctctctggagggcccagatctatgaccttact

SEQ ID NO: 318066 - DNA, 33 bp, Homo sapien
tctctctggagggcccggatctatgaccttact

SEQ ID NO: 318067 - DNA, 33 bp, Homo sapien
gtgtgtcactccaacacgcttattctacacagg

SEQ ID NO: 318068 - DNA, 33 bp, Homo sapien
gtgtgtcactccaacatgcttattctacacagg

SEQ ID NO: 318069 - DNA, 33 bp, Homo sapien
tttctacagttgaccaccagatgaaatattaat

SEQ ID NO: 318070 - DNA, 33 bp, Homo sapien
tttctacagttgaccatcagatgaaatattaat

SEQ ID NO: 318071 - DNA, 33 bp, Homo sapien
tgtcatccctgagtaagatgtgacttcacaatg

SEQ ID NO: 318072 - DNA, 33 bp, Homo sapien
tgtcatccctgagtaatatgtgacttcacaatg

SEQ ID NO: 318073 - DNA, 33 bp, Homo sapien
accacatgacacctgacggatagctttgccttg

SEQ ID NO: 318074 - DNA, 33 bp, Homo sapien
accacatgacacctgatggatagctttgccttg

SEQ ID NO: 318075 - DNA, 33 bp, Homo sapien
atggttcactttttcaagcagtaggaattggaa

SEQ ID NO: 318076 - DNA, 33 bp, Homo sapien
atggttcactttttcaggcagtaggaattggaa

SEQ ID NO: 318077 - DNA, 33 bp, Homo sapien
cagaagcctgggaataaagttgatctgcttagt

SEQ ID NO: 318078 - DNA, 33 bp, Homo sapien
cagaagcctgggaatagagttgatctgcttagt

SEQ ID NO: 318079 - DNA, 33 bp, Homo sapien
cccataagataccacaactcttcaactatcact

SEQ ID NO: 318080 - DNA, 33 bp, Homo sapien
cccataagataccacacctcttcaactatcact

SEQ ID NO: 318081 - DNA, 33 bp, Homo sapien
gctaaagtgtaagttacagttgcaggtgggatg

SEQ ID NO: 318082 - DNA, 33 bp, Homo sapien
gctaaagtgtaagttatagttgcaggtgggatg

SEQ ID NO: 318083 - DNA, 33 bp, Homo sapien
cagaatgtaatcttacaaggctgatcttttttc

SEQ ID NO: 318084 - DNA, 33 bp, Homo sapien
cagaatgtaatcttacgaggctgatcttttttc

SEQ ID NO: 318085 - DNA, 33 bp, Homo sapien
tgcccagccaggataacgaacttaaaaagaaaa

SEQ ID NO: 318086 - DNA, 33 bp, Homo sapien
tgcccagccaggataatgaacttaaaaagaaaa

SEQ ID NO: 318087 - DNA, 33 bp, Homo sapien
gctttatatcacagtacaaaaagctaaaaaatc

SEQ ID NO: 318088 - DNA, 33 bp, Homo sapien
gctttatatcacagtagaaaaagctaaaaaatc

SEQ ID NO: 318089 - DNA, 33 bp, Homo sapien
aaaaagttaatctagcgaatgctccaagttaca

SEQ ID NO: 318090 - DNA, 33 bp, Homo sapien
aaaaagttaatctagctaatgctccaagttaca

SEQ ID NO: 318091 - DNA, 33 bp, Homo sapien
aaacaaatcaatgcccaaaccaatctgaattgg

SEQ ID NO: 318092 - DNA, 33 bp, Homo sapien
aaacaaatcaatgcccgaaccaatctgaattgg

SEQ ID NO: 318093 - DNA, 33 bp, Homo sapien
gttagtagcaaaagaacagagcagacacaggag

SEQ ID NO: 318094 - DNA, 33 bp, Homo sapien
gttagtagcaaaagaagagagcagacacaggag

SEQ ID NO: 318095 - DNA, 33 bp, Homo sapien
agatggtgaatcagaaactcttactaaaaattt

SEQ ID NO: 318096 - DNA, 33 bp, Homo sapien
agatggtgaatcagaagctcttactaaaaattt

SEQ ID NO: 318097 - DNA, 33 bp, Homo sapien
tgatgctgctggttcaggagtcacacctggagt

SEQ ID NO: 318098 - DNA, 33 bp, Homo sapien
tgatgctgctggttcatgagtcacacctggagt

SEQ ID NO: 318099 - DNA, 33 bp, Homo sapien
accttacctaagcagactctcttttggaagctc

SEQ ID NO: 318100 - DNA, 33 bp, Homo sapien
accttacctaagcagattctcttttggaagctc

SEQ ID NO: 318101 - DNA, 33 bp, Homo sapien
tacctgcatgatacaactgtgggcaggacaggc

SEQ ID NO: 318102 - DNA, 33 bp, Homo sapien
tacctgcatgatacaagtgtgggcaggacaggc

SEQ ID NO: 318103 - DNA, 33 bp, Homo sapien
ctagccaagagctccacgttcttaacgggaaag

SEQ ID NO: 318104 - DNA, 33 bp, Homo sapien
ctagccaagagctccatgttcttaacgggaaag

SEQ ID NO: 318105 - DNA, 33 bp, Homo sapien
tgtgagctaggataaactcactgcatttcagtg

SEQ ID NO: 318106 - DNA, 33 bp, Homo sapien
tgtgagctaggataaagtcactgcatttcagtg

SEQ ID NO: 318107 - DNA, 33 bp, Homo sapien
atctccctacttgaaacgcagagttaagttcga

SEQ ID NO: 318108 - DNA, 33 bp, Homo sapien
atctccctacttgaaatgcagagttaagttcga

SEQ ID NO: 318109 - DNA, 33 bp, Homo sapien
caaactagatgtgtgaaataaatgcctcagggc

SEQ ID NO: 318110 - DNA, 33 bp, Homo sapien
caaactagatgtgtgatataaatgcctcagggc

SEQ ID NO: 318111 - DNA, 33 bp, Homo sapien
gcaatctttttgctcacggtctgagccatcgaa

SEQ ID NO: 318112 - DNA, 33 bp, Homo sapien
gcaatctttttgctcatggtctgagccatcgaa

SEQ ID NO: 318113 - DNA, 33 bp, Homo sapien
ggctgctgtctgtaccacctacgtaaatgctgc

SEQ ID NO: 318114 - DNA, 33 bp, Homo sapien
ggctgctgtctgtaccgcctacgtaaatgctgc

SEQ ID NO: 318115 - DNA, 33 bp, Homo sapien
ttagagaaaccagaaaccacaatgcatttatta

SEQ ID NO: 318116 - DNA, 33 bp, Homo sapien
ttagagaaaccagaaatcacaatgcatttatta

SEQ ID NO: 318117 - DNA, 33 bp, Homo sapien
attaccagagacgtcccggacaaaggtcacgtt

SEQ ID NO: 318118 - DNA, 33 bp, Homo sapien
attaccagagacgtcctggacaaaggtcacgtt

SEQ ID NO: 318119 - DNA, 33 bp, Homo sapien
atattgtagaatcctcaaaggcaatttttttaa

SEQ ID NO: 318120 - DNA, 33 bp, Homo sapien
atattgtagaatcctcgaaggcaatttttttaa

SEQ ID NO: 318121 - DNA, 33 bp, Homo sapien
ttcatcaagcctgcgacaagaacctctccagtg

SEQ ID NO: 318122 - DNA, 33 bp, Homo sapien
ttcatcaagcctgcgagaagaacctctccagtg

SEQ ID NO: 318123 - DNA, 33 bp, Homo sapien
acctgcttaaaaaacacatggtcctcatagcat

SEQ ID NO: 318124 - DNA, 33 bp, Homo sapien
acctgcttaaaaaacagatggtcctcatagcat

SEQ ID NO: 318125 - DNA, 33 bp, Homo sapien
aagaaccagaaagaccaaatcagtaatcgtgag

SEQ ID NO: 318126 - DNA, 33 bp, Homo sapien
aagaaccagaaagaccgaatcagtaatcgtgag

SEQ ID NO: 318127 - DNA, 33 bp, Homo sapien
caattttctttcataaacttcttagcaataatg

SEQ ID NO: 318128 - DNA, 33 bp, Homo sapien
caattttctttcataagcttcttagcaataatg

SEQ ID NO: 318129 - DNA, 33 bp, Homo sapien
tggctgtgggactgtacggccttcagtattgaa

SEQ ID NO: 318130 - DNA, 33 bp, Homo sapien
tggctgtgggactgtatggccttcagtattgaa

SEQ ID NO: 318131 - DNA, 33 bp, Homo sapien
tctctattatttagaaggcttttggatgatgat

SEQ ID NO: 318132 - DNA, 33 bp, Homo sapien
tctctattatttagaatgcttttggatgatgat

SEQ ID NO: 318133 - DNA, 33 bp, Homo sapien
gccacccagtggtgacactcttaaagtcccaga

SEQ ID NO: 318134 - DNA, 33 bp, Homo sapien
gccacccagtggtgaccctcttaaagtcccaga

SEQ ID NO: 318135 - DNA, 33 bp, Homo sapien
agaataaatttgccacactgatggtatcagtgt

SEQ ID NO: 318136 - DNA, 33 bp, Homo sapien
agaataaatttgccacgctgatggtatcagtgt

SEQ ID NO: 318137 - DNA, 33 bp, Homo sapien
aggcagggttacctgaactctaagtcatgctgg

SEQ ID NO: 318138 - DNA, 33 bp, Homo sapien
aggcagggttacctgatctctaagtcatgctgg

SEQ ID NO: 318139 - DNA, 33 bp, Homo sapien
aggcaggagatttacacgagcctaggagcagaa

SEQ ID NO: 318140 - DNA, 33 bp, Homo sapien
aggcaggagatttacaggagcctaggagcagaa

SEQ ID NO: 318141 - DNA, 33 bp, Homo sapien
tccactccttctgtaacggggagttttcttcct

SEQ ID NO: 318142 - DNA, 33 bp, Homo sapien
tccactccttctgtaagggggagttttcttcct

SEQ ID NO: 318143 - DNA, 33 bp, Homo sapien
taaggaaatattaaccaggatgaggaaggcagg

SEQ ID NO: 318144 - DNA, 33 bp, Homo sapien
taaggaaatattaaccgggatgaggaaggcagg

SEQ ID NO: 318145 - DNA, 33 bp, Homo sapien
aaaagacagaaactaaacaagcgcctgatccca

SEQ ID NO: 318146 - DNA, 33 bp, Homo sapien
aaaagacagaaactaatcaagcgcctgatccca

SEQ ID NO: 318147 - DNA, 33 bp, Homo sapien
cagaacagaaagaatccctgctctgactgaatt

SEQ ID NO: 318148 - DNA, 33 bp, Homo sapien
cagaacagaaagaatcgctgctctgactgaatt

SEQ ID NO: 318149 - DNA, 33 bp, Homo sapien
cttaaattgttccagaccctggggatagagtga

SEQ ID NO: 318150 - DNA, 33 bp, Homo sapien
cttaaattgttccagatcctggggatagagtga

SEQ ID NO: 318151 - DNA, 33 bp, Homo sapien
agatgtcagtgggaagaaagcttagagatctca

SEQ ID NO: 318152 - DNA, 33 bp, Homo sapien
agatgtcagtgggaaggaagcttagagatctca

SEQ ID NO: 318153 - DNA, 33 bp, Homo sapien
ccatttcttcatgaccagccagaaatgtatcac

SEQ ID NO: 318154 - DNA, 33 bp, Homo sapien
ccatttcttcatgaccggccagaaatgtatcac

SEQ ID NO: 318155 - DNA, 33 bp, Homo sapien
aaatgcttgtgttctaagttcttcaatcaacca

SEQ ID NO: 318156 - DNA, 33 bp, Homo sapien
aaatgcttgtgttctaggttcttcaatcaacca

SEQ ID NO: 318157 - DNA, 33 bp, Homo sapien
ggtttcatacttgcatgaagtctaaatgggcag

SEQ ID NO: 318158 - DNA, 33 bp, Homo sapien
ggtttcatacttgcattaagtctaaatgggcag

SEQ ID NO: 318159 - DNA, 33 bp, Homo sapien
cacttctaataaaagccgctcacccctaccacc

SEQ ID NO: 318160 - DNA, 33 bp, Homo sapien
cacttctaataaaagctgctcacccctaccacc

SEQ ID NO: 318161 - DNA, 33 bp, Homo sapien
ccaggaaaaccctggagtacgtcctatgctcca

SEQ ID NO: 318162 - DNA, 33 bp, Homo sapien
ccaggaaaaccctggattacgtcctatgctcca

SEQ ID NO: 318163 - DNA, 33 bp, Homo sapien
ccaagctagtggtcaaaaaaaagaaacaataga

SEQ ID NO: 318164 - DNA, 33 bp, Homo sapien
ccaagctagtggtcaagaaaaagaaacaataga

SEQ ID NO: 318165 - DNA, 33 bp, Homo sapien
tttctcagctggaccacgatcctatttttatgt

SEQ ID NO: 318166 - DNA, 33 bp, Homo sapien
tttctcagctggaccatgatcctatttttatgt

SEQ ID NO: 318167 - DNA, 33 bp, Homo sapien
ttggacttctctggcactcagtaacttcatttg

SEQ ID NO: 318168 - DNA, 33 bp, Homo sapien
ttggacttctctggcattcagtaacttcatttg

SEQ ID NO: 318169 - DNA, 33 bp, Homo sapien
ctggaaagacagaaacaaagattcctctaggct

SEQ ID NO: 318170 - DNA, 33 bp, Homo sapien
ctggaaagacagaaacgaagattcctctaggct

SEQ ID NO: 318171 - DNA, 33 bp, Homo sapien
ttttatcctctccgaaactatcccttcatctgt

SEQ ID NO: 318172 - DNA, 33 bp, Homo sapien
ttttatcctctccgaacctatcccttcatctgt

SEQ ID NO: 318173 - DNA, 33 bp, Homo sapien
tgggctggttgtccaccgatatccatttccccc

SEQ ID NO: 318174 - DNA, 33 bp, Homo sapien
tgggctggttgtccactgatatccatttccccc

SEQ ID NO: 318175 - DNA, 33 bp, Homo sapien
ccaagaatagggattcacttttgactttctggg

SEQ ID NO: 318176 - DNA, 33 bp, Homo sapien
ccaagaatagggattcgcttttgactttctggg

SEQ ID NO: 318177 - DNA, 33 bp, Homo sapien
ctttgttttaagctgcaccatcatcagttggct

SEQ ID NO: 318178 - DNA, 33 bp, Homo sapien
ctttgttttaagctgcgccatcatcagttggct

SEQ ID NO: 318179 - DNA, 33 bp, Homo sapien
gtctcgggtatagccacacaaaatatattaaga

SEQ ID NO: 318180 - DNA, 33 bp, Homo sapien
gtctcgggtatagccatacaaaatatattaaga

SEQ ID NO: 318181 - DNA, 33 bp, Homo sapien
tttgttttcagactgcgatctgggtacttcagg

SEQ ID NO: 318182 - DNA, 33 bp, Homo sapien
tttgttttcagactgctatctgggtacttcagg

SEQ ID NO: 318183 - DNA, 33 bp, Homo sapien
ttctctgctgctgataaaagtgatcatgtacct

SEQ ID NO: 318184 - DNA, 33 bp, Homo sapien
ttctctgctgctgatagaagtgatcatgtacct

SEQ ID NO: 318185 - DNA, 33 bp, Homo sapien
agggtttggcagtggacatgatttcccaggggg

SEQ ID NO: 318186 - DNA, 33 bp, Homo sapien
agggtttggcagtggagatgatttcccaggggg

SEQ ID NO: 318187 - DNA, 33 bp, Homo sapien
ggctcatatacatttacgagaggcgtgtgtgtg

SEQ ID NO: 318188 - DNA, 33 bp, Homo sapien
ggctcatatacatttatgagaggcgtgtgtgtg

SEQ ID NO: 318189 - DNA, 33 bp, Homo sapien
aaagcccagaggaggccgagataaaaagaacaa

SEQ ID NO: 318190 - DNA, 33 bp, Homo sapien
aaagcccagaggaggcggagataaaaagaacaa

SEQ ID NO: 318191 - DNA, 33 bp, Homo sapien
ccataacgaaactgacaagaggaaaaccttgaa

SEQ ID NO: 318192 - DNA, 33 bp, Homo sapien
ccataacgaaactgaccagaggaaaaccttgaa

SEQ ID NO: 318193 - DNA, 33 bp, Homo sapien
tggcatccagtttttaacaaggtccataggtga

SEQ ID NO: 318194 - DNA, 33 bp, Homo sapien
tggcatccagtttttatcaaggtccataggtga

SEQ ID NO: 318195 - DNA, 33 bp, Homo sapien
tctcactttccactgaaaatggtagccctttct

SEQ ID NO: 318196 - DNA, 33 bp, Homo sapien
tctcactttccactgataatggtagccctttct

SEQ ID NO: 318197 - DNA, 33 bp, Homo sapien
ctgaagaatacgtgaacaaaatgacccaaagtc

SEQ ID NO: 318198 - DNA, 33 bp, Homo sapien
ctgaagaatacgtgaataaaatgacccaaagtc

SEQ ID NO: 318199 - DNA, 33 bp, Homo sapien
ggaagggctttgccacactgaggcagatagagt

SEQ ID NO: 318200 - DNA, 33 bp, Homo sapien
ggaagggctttgccacgctgaggcagatagagt

SEQ ID NO: 318201 - DNA, 33 bp, Homo sapien
aacagacaaatctcccagcaaaggcaacctccc

SEQ ID NO: 318202 - DNA, 33 bp, Homo sapien
aacagacaaatctcccggcaaaggcaacctccc

SEQ ID NO: 318203 - DNA, 33 bp, Homo sapien
cctagcaatcatcatcgctttttctcttcagtg

SEQ ID NO: 318204 - DNA, 33 bp, Homo sapien
cctagcaatcatcatctctttttctcttcagtg

SEQ ID NO: 318205 - DNA, 33 bp, Homo sapien
cctccctgattttcacaccctgtaggctgagga

SEQ ID NO: 318206 - DNA, 33 bp, Homo sapien
cctccctgattttcacgccctgtaggctgagga

SEQ ID NO: 318207 - DNA, 33 bp, Homo sapien
atgaggaaactaagaacatcaaggctgcgtaga

SEQ ID NO: 318208 - DNA, 33 bp, Homo sapien
atgaggaaactaagaatatcaaggctgcgtaga

SEQ ID NO: 318209 - DNA, 33 bp, Homo sapien
aagggcccttaagcagccgccaataaaaggcag

SEQ ID NO: 318210 - DNA, 33 bp, Homo sapien
aagggcccttaagcagtcgccaataaaaggcag

SEQ ID NO: 318211 - DNA, 33 bp, Homo sapien
agagactcctggcctgcactgattagctttctg

SEQ ID NO: 318212 - DNA, 33 bp, Homo sapien
agagactcctggcctggactgattagctttctg

SEQ ID NO: 318213 - DNA, 33 bp, Homo sapien
tattattattcagcaaagaaccaatgattaggg

SEQ ID NO: 318214 - DNA, 33 bp, Homo sapien
tattattattcagcaatgaaccaatgattaggg

SEQ ID NO: 318215 - DNA, 33 bp, Homo sapien
atatggtcatggagagccactgaagggctgcag

SEQ ID NO: 318216 - DNA, 33 bp, Homo sapien
atatggtcatggagagtcactgaagggctgcag

SEQ ID NO: 318217 - DNA, 33 bp, Homo sapien
tcaaagagtcagtttacgagctaaacaaaaaaa

SEQ ID NO: 318218 - DNA, 33 bp, Homo sapien
tcaaagagtcagtttatgagctaaacaaaaaaa

SEQ ID NO: 318219 - DNA, 33 bp, Homo sapien
cacccttctatttgcacaacaccacctgagaag

SEQ ID NO: 318220 - DNA, 33 bp, Homo sapien
cacccttctatttgcataacaccacctgagaag

SEQ ID NO: 318221 - DNA, 33 bp, Homo sapien
catccagcttccttcaatctatactaacctgtt

SEQ ID NO: 318222 - DNA, 33 bp, Homo sapien
catccagcttccttcagtctatactaacctgtt

SEQ ID NO: 318223 - DNA, 33 bp, Homo sapien
tgttttggaaacttaagtcccaatccaacagta

SEQ ID NO: 318224 - DNA, 33 bp, Homo sapien
tgttttggaaacttaattcccaatccaacagta

SEQ ID NO: 318225 - DNA, 33 bp, Homo sapien
agaggcttaggatatacgccctgttcaatattt

SEQ ID NO: 318226 - DNA, 33 bp, Homo sapien
agaggcttaggatatatgccctgttcaatattt

SEQ ID NO: 318227 - DNA, 33 bp, Homo sapien
tgcagcatctgggagacaactggagctaacctc

SEQ ID NO: 318228 - DNA, 33 bp, Homo sapien
tgcagcatctgggagagaactggagctaacctc

SEQ ID NO: 318229 - DNA, 33 bp, Homo sapien
caagtgttctttcagaagtgctcttgtttaatt

SEQ ID NO: 318230 - DNA, 33 bp, Homo sapien
caagtgttctttcagaggtgctcttgtttaatt

SEQ ID NO: 318231 - DNA, 33 bp, Homo sapien
gtctgattctgattcactattctttagggcaag

SEQ ID NO: 318232 - DNA, 33 bp, Homo sapien
gtctgattctgattcagtattctttagggcaag

SEQ ID NO: 318233 - DNA, 33 bp, Homo sapien
ttttagtaccagcataaatttttttattgtatg

SEQ ID NO: 318234 - DNA, 33 bp, Homo sapien
ttttagtaccagcatacatttttttattgtatg

SEQ ID NO: 318235 - DNA, 33 bp, Homo sapien
agatgtgacaaagttacgacagaaagcaaaata

SEQ ID NO: 318236 - DNA, 33 bp, Homo sapien
agatgtgacaaagttatgacagaaagcaaaata

SEQ ID NO: 318237 - DNA, 33 bp, Homo sapien
tgtaaaaataagtatgaatgtttgttcaaaagg

SEQ ID NO: 318238 - DNA, 33 bp, Homo sapien
tgtaaaaataagtatgcatgtttgttcaaaagg

SEQ ID NO: 318239 - DNA, 33 bp, Homo sapien
cttgtaaatattacacaaggaaaacaggtgtcc

SEQ ID NO: 318240 - DNA, 33 bp, Homo sapien
cttgtaaatattacaccaggaaaacaggtgtcc

SEQ ID NO: 318241 - DNA, 33 bp, Homo sapien
atctattcgtgtttcagtaattataactttaac

SEQ ID NO: 318242 - DNA, 33 bp, Homo sapien
atctattcgtgtttcattaattataactttaac

SEQ ID NO: 318243 - DNA, 33 bp, Homo sapien
ctagaaagactgggaaaagaattgctaaaaaaa

SEQ ID NO: 318244 - DNA, 33 bp, Homo sapien
ctagaaagactgggaacagaattgctaaaaaaa

SEQ ID NO: 318245 - DNA, 33 bp, Homo sapien
acaggacatgtaatcacgtattggcagggtgac

SEQ ID NO: 318246 - DNA, 33 bp, Homo sapien
acaggacatgtaatcatgtattggcagggtgac

SEQ ID NO: 318247 - DNA, 33 bp, Homo sapien
taggattcacctcaagacacttgttttctcaga

SEQ ID NO: 318248 - DNA, 33 bp, Homo sapien
taggattcacctcaaggcacttgttttctcaga

SEQ ID NO: 318249 - DNA, 33 bp, Homo sapien
aagactacatctctccccccggcaaaaaagcaa

SEQ ID NO: 318250 - DNA, 33 bp, Homo sapien
aagactacatctctcctcccggcaaaaaagcaa

SEQ ID NO: 318251 - DNA, 33 bp, Homo sapien
agatcaagcagctcacagaggaactgaagtact

SEQ ID NO: 318252 - DNA, 33 bp, Homo sapien
agatcaagcagctcacggaggaactgaagtact

SEQ ID NO: 318253 - DNA, 33 bp, Homo sapien
ttagaagccgtctagaagtgggccagctggagc

SEQ ID NO: 318254 - DNA, 33 bp, Homo sapien
ttagaagccgtctagaggtgggccagctggagc

SEQ ID NO: 318255 - DNA, 33 bp, Homo sapien
gtatggctgcaagttgaaagatgattggcaaag

SEQ ID NO: 318256 - DNA, 33 bp, Homo sapien
gtatggctgcaagttgcaagatgattggcaaag

SEQ ID NO: 318257 - DNA, 33 bp, Homo sapien
ctgttcacggctacccagagtttcacagtaaaa

SEQ ID NO: 318258 - DNA, 33 bp, Homo sapien
ctgttcacggctacccggagtttcacagtaaaa

SEQ ID NO: 318259 - DNA, 33 bp, Homo sapien
tctagaacatactataccttcgctgtgtcgttc

SEQ ID NO: 318260 - DNA, 33 bp, Homo sapien
tctagaacatactatatcttcgctgtgtcgttc

SEQ ID NO: 318261 - DNA, 33 bp, Homo sapien
acaatgtgtgcatatcacttaaaaccccacaca

SEQ ID NO: 318262 - DNA, 33 bp, Homo sapien
acaatgtgtgcatatctcttaaaaccccacaca

SEQ ID NO: 318263 - DNA, 33 bp, Homo sapien
ctatctcatccagtaccaccaaggaaacaaggt

SEQ ID NO: 318264 - DNA, 33 bp, Homo sapien
ctatctcatccagtactaccaaggaaacaaggt

SEQ ID NO: 318265 - DNA, 33 bp, Homo sapien
actcttacaatgcagcaaactgctactgtgccc

SEQ ID NO: 318266 - DNA, 33 bp, Homo sapien
actcttacaatgcagcgaactgctactgtgccc

SEQ ID NO: 318267 - DNA, 33 bp, Homo sapien
cgtgtccttcctcaataatcttagtcatctttg

SEQ ID NO: 318268 - DNA, 33 bp, Homo sapien
cgtgtccttcctcaattatcttagtcatctttg

SEQ ID NO: 318269 - DNA, 33 bp, Homo sapien
tgcatgagctagaatcacaagtgagacatcatt

SEQ ID NO: 318270 - DNA, 33 bp, Homo sapien
tgcatgagctagaatcccaagtgagacatcatt

SEQ ID NO: 318271 - DNA, 33 bp, Homo sapien
atagtcactcgaggcccgacactgctgaggaac

SEQ ID NO: 318272 - DNA, 33 bp, Homo sapien
atagtcactcgaggcctgacactgctgaggaac

SEQ ID NO: 318273 - DNA, 33 bp, Homo sapien
cctcttggactgagaactggggacctgtttttt

SEQ ID NO: 318274 - DNA, 33 bp, Homo sapien
cctcttggactgagaattggggacctgtttttt

SEQ ID NO: 318275 - DNA, 33 bp, Homo sapien
agaaaacaaaatatacacaagcatgtccataga

SEQ ID NO: 318276 - DNA, 33 bp, Homo sapien
agaaaacaaaatatacgcaagcatgtccataga

SEQ ID NO: 318277 - DNA, 33 bp, Homo sapien
actatattcctaaacactgctcaacctctagaa

SEQ ID NO: 318278 - DNA, 33 bp, Homo sapien
actatattcctaaacagtgctcaacctctagaa

SEQ ID NO: 318279 - DNA, 33 bp, Homo sapien
aatagtaagcagtgacaagccacttctaatcca

SEQ ID NO: 318280 - DNA, 33 bp, Homo sapien
aatagtaagcagtgacgagccacttctaatcca

SEQ ID NO: 318281 - DNA, 33 bp, Homo sapien
ggggaggatgtgaaaaaccttgaatccatgtgt

SEQ ID NO: 318282 - DNA, 33 bp, Homo sapien
ggggaggatgtgaaaagccttgaatccatgtgt

SEQ ID NO: 318283 - DNA, 33 bp, Homo sapien
tccacctaaagtaaagcctgagagtcaacatgt

SEQ ID NO: 318284 - DNA, 33 bp, Homo sapien
tccacctaaagtaaagtctgagagtcaacatgt

SEQ ID NO: 318285 - DNA, 33 bp, Homo sapien
atgtttggagaacttacagatccacaatggatc

SEQ ID NO: 318286 - DNA, 33 bp, Homo sapien
atgtttggagaacttagagatccacaatggatc

SEQ ID NO: 318287 - DNA, 33 bp, Homo sapien
gaaaaaaacatcaccaaagaagtgacacttgac

SEQ ID NO: 318288 - DNA, 33 bp, Homo sapien
gaaaaaaacatcaccacagaagtgacacttgac

SEQ ID NO: 318289 - DNA, 33 bp, Homo sapien
tctagttaagcatacccagtcctaaatactcct

SEQ ID NO: 318290 - DNA, 33 bp, Homo sapien
tctagttaagcatacctagtcctaaatactcct

SEQ ID NO: 318291 - DNA, 33 bp, Homo sapien
tcaggtcacagaattagagacctttctcagagc

SEQ ID NO: 318292 - DNA, 33 bp, Homo sapien
tcaggtcacagaattatagacctttctcagagc

SEQ ID NO: 318293 - DNA, 33 bp, Homo sapien
tcctggcttctagaaagtgagataatgatgtgg

SEQ ID NO: 318294 - DNA, 33 bp, Homo sapien
tcctggcttctagaaattgagataatgatgtgg

SEQ ID NO: 318295 - DNA, 33 bp, Homo sapien
tgcatcttaacagttaacacttatggaacactc

SEQ ID NO: 318296 - DNA, 33 bp, Homo sapien
tgcatcttaacagttaccacttatggaacactc

SEQ ID NO: 318297 - DNA, 33 bp, Homo sapien
attttcatctttcacaactgaaactctataccc

SEQ ID NO: 318298 - DNA, 33 bp, Homo sapien
attttcatctttcacagctgaaactctataccc

SEQ ID NO: 318299 - DNA, 33 bp, Homo sapien
cttttcacttaagggcaagtcatagtttgcacc

SEQ ID NO: 318300 - DNA, 33 bp, Homo sapien
cttttcacttaagggcgagtcatagtttgcacc

SEQ ID NO: 318301 - DNA, 33 bp, Homo sapien
agagagggttctgttacaagcagccaaacggaa

SEQ ID NO: 318302 - DNA, 33 bp, Homo sapien
agagagggttctgttataagcagccaaacggaa

SEQ ID NO: 318303 - DNA, 33 bp, Homo sapien
tctacttgaaggaagaatacttttacatcctaa

SEQ ID NO: 318304 - DNA, 33 bp, Homo sapien
tctacttgaaggaagagtacttttacatcctaa

SEQ ID NO: 318305 - DNA, 33 bp, Homo sapien
agtatttcattttcagcatttcctggtcattta

SEQ ID NO: 318306 - DNA, 33 bp, Homo sapien
agtatttcattttcagtatttcctggtcattta

SEQ ID NO: 318307 - DNA, 33 bp, Homo sapien
aatttaaattaaaatccgacttctcatgcctgc

SEQ ID NO: 318308 - DNA, 33 bp, Homo sapien
aatttaaattaaaatctgacttctcatgcctgc

SEQ ID NO: 318309 - DNA, 33 bp, Homo sapien
gccagatacagttggaagcactgttctctaatg

SEQ ID NO: 318310 - DNA, 33 bp, Homo sapien
gccagatacagttggaggcactgttctctaatg

SEQ ID NO: 318311 - DNA, 33 bp, Homo sapien
ggggcttggaatgtcccaggaacctttaaagac

SEQ ID NO: 318312 - DNA, 33 bp, Homo sapien
ggggcttggaatgtcctaggaacctttaaagac

SEQ ID NO: 318313 - DNA, 33 bp, Homo sapien
agttaggagaggtaggcattagccaggaggagg

SEQ ID NO: 318314 - DNA, 33 bp, Homo sapien
agttaggagaggtaggtattagccaggaggagg

SEQ ID NO: 318315 - DNA, 33 bp, Homo sapien
actatttttccagtcagtcattcacacaagaaa

SEQ ID NO: 318316 - DNA, 33 bp, Homo sapien
actatttttccagtcattcattcacacaagaaa

SEQ ID NO: 318317 - DNA, 33 bp, Homo sapien
gcactgagatacacacagggtgaacaagacagt

SEQ ID NO: 318318 - DNA, 33 bp, Homo sapien
gcactgagatacacaccgggtgaacaagacagt

SEQ ID NO: 318319 - DNA, 33 bp, Homo sapien
ccgggtgtagttacaggagttatagcgccttcc

SEQ ID NO: 318320 - DNA, 33 bp, Homo sapien
ccgggtgtagttacagtagttatagcgccttcc

SEQ ID NO: 318321 - DNA, 33 bp, Homo sapien
tggaggagtgaggtgaatagatacccatcaagt

SEQ ID NO: 318322 - DNA, 33 bp, Homo sapien
tggaggagtgaggtgagtagatacccatcaagt

SEQ ID NO: 318323 - DNA, 33 bp, Homo sapien
aggtcagtatttccctcaggagactggcagcca

SEQ ID NO: 318324 - DNA, 33 bp, Homo sapien
aggtcagtatttcccttaggagactggcagcca

SEQ ID NO: 318325 - DNA, 33 bp, Homo sapien
attttggaatttgacaagagagttttttaactt

SEQ ID NO: 318326 - DNA, 33 bp, Homo sapien
attttggaatttgacaggagagttttttaactt

SEQ ID NO: 318327 - DNA, 33 bp, Homo sapien
gggcactttgctggagaaatgaatgagaagtat

SEQ ID NO: 318328 - DNA, 33 bp, Homo sapien
gggcactttgctggaggaatgaatgagaagtat

SEQ ID NO: 318329 - DNA, 33 bp, Homo sapien
aatttcaagcttagtacagggagcagttaagta

SEQ ID NO: 318330 - DNA, 33 bp, Homo sapien
aatttcaagcttagtagagggagcagttaagta

SEQ ID NO: 318331 - DNA, 33 bp, Homo sapien
ctgtggcctaatccaacgacatgaagatttatt

SEQ ID NO: 318332 - DNA, 33 bp, Homo sapien
ctgtggcctaatccaaggacatgaagatttatt

SEQ ID NO: 318333 - DNA, 33 bp, Homo sapien
tgcctaagaccttagaacacacttcacacacgg

SEQ ID NO: 318334 - DNA, 33 bp, Homo sapien
tgcctaagaccttagagcacacttcacacacgg

SEQ ID NO: 318335 - DNA, 33 bp, Homo sapien
acaaccacaacttggaagcagatcccaccagtt

SEQ ID NO: 318336 - DNA, 33 bp, Homo sapien
acaaccacaacttggaggcagatcccaccagtt

SEQ ID NO: 318337 - DNA, 33 bp, Homo sapien
atcagtggaacaaacaaaggcacaatcttgccc

SEQ ID NO: 318338 - DNA, 33 bp, Homo sapien
atcagtggaacaaacagaggcacaatcttgccc

SEQ ID NO: 318339 - DNA, 33 bp, Homo sapien
tttccatgttttaagcacttgtagagtgtatgt

SEQ ID NO: 318340 - DNA, 33 bp, Homo sapien
tttccatgttttaagcgcttgtagagtgtatgt

SEQ ID NO: 318341 - DNA, 33 bp, Homo sapien
ttctgttttcctgggaatcccactgtttttcca

SEQ ID NO: 318342 - DNA, 33 bp, Homo sapien
ttctgttttcctgggagtcccactgtttttcca

SEQ ID NO: 318343 - DNA, 33 bp, Homo sapien
agatgtttgtgaatagcatcagggaccctctgt

SEQ ID NO: 318344 - DNA, 33 bp, Homo sapien
agatgtttgtgaatagtatcagggaccctctgt

SEQ ID NO: 318345 - DNA, 33 bp, Homo sapien
ggcatacatagaggagcaaccattgcctgattt

SEQ ID NO: 318346 - DNA, 33 bp, Homo sapien
ggcatacatagaggaggaaccattgcctgattt

SEQ ID NO: 318347 - DNA, 33 bp, Homo sapien
gctaaaggtgggggcaatacaggacacacttgt

SEQ ID NO: 318348 - DNA, 33 bp, Homo sapien
gctaaaggtgggggcagtacaggacacacttgt

SEQ ID NO: 318349 - DNA, 33 bp, Homo sapien
tctgattgtctccataaccacttaggacgtggt

SEQ ID NO: 318350 - DNA, 33 bp, Homo sapien
tctgattgtctccatacccacttaggacgtggt

SEQ ID NO: 318351 - DNA, 33 bp, Homo sapien
agaaaaaattagtacaatgaacaacatatatcc

SEQ ID NO: 318352 - DNA, 33 bp, Homo sapien
agaaaaaattagtacagtgaacaacatatatcc

SEQ ID NO: 318353 - DNA, 33 bp, Homo sapien
gacttgggcccttagaggtacagcaattggaca

SEQ ID NO: 318354 - DNA, 33 bp, Homo sapien
gacttgggcccttagatgtacagcaattggaca

SEQ ID NO: 318355 - DNA, 33 bp, Homo sapien
gcagcatgggtcaaaaagtaaaatcactgaccg

SEQ ID NO: 318356 - DNA, 33 bp, Homo sapien
gcagcatgggtcaaaaggtaaaatcactgaccg

SEQ ID NO: 318357 - DNA, 33 bp, Homo sapien
ttatatgttttatttacaacgcaacagtgtgca

SEQ ID NO: 318358 - DNA, 33 bp, Homo sapien
ttatatgttttatttataacgcaacagtgtgca

SEQ ID NO: 318359 - DNA, 33 bp, Homo sapien
cagcttctctctgacccacgcttagcctctcct

SEQ ID NO: 318360 - DNA, 33 bp, Homo sapien
cagcttctctctgacctacgcttagcctctcct

SEQ ID NO: 318361 - DNA, 33 bp, Homo sapien
ctgggctttaaatgcaagtcacgacagcaagac

SEQ ID NO: 318362 - DNA, 33 bp, Homo sapien
ctgggctttaaatgcaggtcacgacagcaagac

SEQ ID NO: 318363 - DNA, 33 bp, Homo sapien
gaacttcactttcttaacatgacaaaggacagg

SEQ ID NO: 318364 - DNA, 33 bp, Homo sapien
gaacttcactttcttagcatgacaaaggacagg

SEQ ID NO: 318365 - DNA, 33 bp, Homo sapien
gaagccaggcagatgacgtaaacccgtgaaaca

SEQ ID NO: 318366 - DNA, 33 bp, Homo sapien
gaagccaggcagatgatgtaaacccgtgaaaca

SEQ ID NO: 318367 - DNA, 33 bp, Homo sapien
ccgatatgcaacaggaggctggaaaacaggtgg

SEQ ID NO: 318368 - DNA, 33 bp, Homo sapien
ccgatatgcaacaggatgctggaaaacaggtgg

SEQ ID NO: 318369 - DNA, 33 bp, Homo sapien
gttaggaggattgtgactaatagcaaatcatcc

SEQ ID NO: 318370 - DNA, 33 bp, Homo sapien
gttaggaggattgtgattaatagcaaatcatcc

SEQ ID NO: 318371 - DNA, 33 bp, Homo sapien
ctcttcaataaggcccaagatgagtgatctggt

SEQ ID NO: 318372 - DNA, 33 bp, Homo sapien
ctcttcaataaggcccgagatgagtgatctggt

SEQ ID NO: 318373 - DNA, 33 bp, Homo sapien
tcagagctctcaagtgcaagaaaacaatgcccg

SEQ ID NO: 318374 - DNA, 33 bp, Homo sapien
tcagagctctcaagtggaagaaaacaatgcccg

SEQ ID NO: 318375 - DNA, 33 bp, Homo sapien
gagcgaatgatacaaacggttggcttagctttc

SEQ ID NO: 318376 - DNA, 33 bp, Homo sapien
gagcgaatgatacaaatggttggcttagctttc

SEQ ID NO: 318377 - DNA, 33 bp, Homo sapien
aaaaaatcgttcagcagatgataccacagaaat

SEQ ID NO: 318378 - DNA, 33 bp, Homo sapien
aaaaaatcgttcagcatatgataccacagaaat

SEQ ID NO: 318379 - DNA, 33 bp, Homo sapien
gtaggattcatttcacaagaacaaataagagta

SEQ ID NO: 318380 - DNA, 33 bp, Homo sapien
gtaggattcatttcacgagaacaaataagagta

SEQ ID NO: 318381 - DNA, 33 bp, Homo sapien
caaaagtcgaaatcacaaattgcctgaaagtgg

SEQ ID NO: 318382 - DNA, 33 bp, Homo sapien
caaaagtcgaaatcacgaattgcctgaaagtgg

SEQ ID NO: 318383 - DNA, 33 bp, Homo sapien
gaaaggccttttccctcaactgtagctgacttc

SEQ ID NO: 318384 - DNA, 33 bp, Homo sapien
gaaaggccttttcccttaactgtagctgacttc

SEQ ID NO: 318385 - DNA, 33 bp, Homo sapien
ttcccttattgtccctcagcgcagaagtttcag

SEQ ID NO: 318386 - DNA, 33 bp, Homo sapien
ttcccttattgtcccttagcgcagaagtttcag

SEQ ID NO: 318387 - DNA, 33 bp, Homo sapien
gcagaggctgttctccagaatgttagcagctcg

SEQ ID NO: 318388 - DNA, 33 bp, Homo sapien
gcagaggctgttctccggaatgttagcagctcg

SEQ ID NO: 318389 - DNA, 33 bp, Homo sapien
cacataacttgagagacggaagagatcttaggc

SEQ ID NO: 318390 - DNA, 33 bp, Homo sapien
cacataacttgagagatggaagagatcttaggc

SEQ ID NO: 318391 - DNA, 33 bp, Homo sapien
tgtgaagtaggtatgaccgtcagccccatttta

SEQ ID NO: 318392 - DNA, 33 bp, Homo sapien
tgtgaagtaggtatgatcgtcagccccatttta

SEQ ID NO: 318393 - DNA, 33 bp, Homo sapien
cttaagctaccgttcactcatgcaacaaatttg

SEQ ID NO: 318394 - DNA, 33 bp, Homo sapien
cttaagctaccgttcattcatgcaacaaatttg

SEQ ID NO: 318395 - DNA, 33 bp, Homo sapien
ctctggttctgatttgcagggtcttctagagtg

SEQ ID NO: 318396 - DNA, 33 bp, Homo sapien
ctctggttctgatttgtagggtcttctagagtg

SEQ ID NO: 318397 - DNA, 33 bp, Homo sapien
ctagtggctggggaccaatggacactccctttt

SEQ ID NO: 318398 - DNA, 33 bp, Homo sapien
ctagtggctggggaccgatggacactccctttt

SEQ ID NO: 318399 - DNA, 33 bp, Homo sapien
catgcgaatcaacaggaatcttgtttaaaatgc

SEQ ID NO: 318400 - DNA, 33 bp, Homo sapien
catgcgaatcaacagggatcttgtttaaaatgc

SEQ ID NO: 318401 - DNA, 33 bp, Homo sapien
tggctgctaggtggccaacatgcaaggcccact

SEQ ID NO: 318402 - DNA, 33 bp, Homo sapien
tggctgctaggtggcccacatgcaaggcccact

SEQ ID NO: 318403 - DNA, 33 bp, Homo sapien
atagtcacaagccaacggctgcaggtctaagcc

SEQ ID NO: 318404 - DNA, 33 bp, Homo sapien
atagtcacaagccaactgctgcaggtctaagcc

SEQ ID NO: 318405 - DNA, 33 bp, Homo sapien
agctgcttaggatggcaaaacagaaacaagcac

SEQ ID NO: 318406 - DNA, 33 bp, Homo sapien
agctgcttaggatggcgaaacagaaacaagcac

SEQ ID NO: 318407 - DNA, 33 bp, Homo sapien
tctggggatacacaaggacaagtctcatcctgt

SEQ ID NO: 318408 - DNA, 33 bp, Homo sapien
tctggggatacacaagtacaagtctcatcctgt

SEQ ID NO: 318409 - DNA, 33 bp, Homo sapien
cccagctacaaacttacagttgaatcatcatat

SEQ ID NO: 318410 - DNA, 33 bp, Homo sapien
cccagctacaaacttatagttgaatcatcatat

SEQ ID NO: 318411 - DNA, 33 bp, Homo sapien
taatctgataaaaccaatgcagatcaaatattg

SEQ ID NO: 318412 - DNA, 33 bp, Homo sapien
taatctgataaaaccactgcagatcaaatattg

SEQ ID NO: 318413 - DNA, 33 bp, Homo sapien
ccgtgggaggaaaccacacgagagtgtaaattc

SEQ ID NO: 318414 - DNA, 33 bp, Homo sapien
ccgtgggaggaaaccatacgagagtgtaaattc

SEQ ID NO: 318415 - DNA, 33 bp, Homo sapien
caaccgccattttatcacatatgattctgtggg

SEQ ID NO: 318416 - DNA, 33 bp, Homo sapien
caaccgccattttatcgcatatgattctgtggg

SEQ ID NO: 318417 - DNA, 33 bp, Homo sapien
gctagtcttggagtccagagtccaaaagccttg

SEQ ID NO: 318418 - DNA, 33 bp, Homo sapien
gctagtcttggagtccggagtccaaaagccttg

SEQ ID NO: 318419 - DNA, 33 bp, Homo sapien
gttgttaaaggggaaaagagggagccagatttc

SEQ ID NO: 318420 - DNA, 33 bp, Homo sapien
gttgttaaaggggaaaggagggagccagatttc

SEQ ID NO: 318421 - DNA, 33 bp, Homo sapien
tctgttgagaaggtgacagctttattcccagca

SEQ ID NO: 318422 - DNA, 33 bp, Homo sapien
tctgttgagaaggtgagagctttattcccagca

SEQ ID NO: 318423 - DNA, 33 bp, Homo sapien
tggggaaagtgaggccaatacagttgccagtga

SEQ ID NO: 318424 - DNA, 33 bp, Homo sapien
tggggaaagtgaggccgatacagttgccagtga

SEQ ID NO: 318425 - DNA, 33 bp, Homo sapien
cttgctgcatggcacacactgttctaagcactt

SEQ ID NO: 318426 - DNA, 33 bp, Homo sapien
cttgctgcatggcacatactgttctaagcactt

SEQ ID NO: 318427 - DNA, 33 bp, Homo sapien
atgaacaacttaaagcaacctaatatatgtgta

SEQ ID NO: 318428 - DNA, 33 bp, Homo sapien
atgaacaacttaaagcgacctaatatatgtgta

SEQ ID NO: 318429 - DNA, 33 bp, Homo sapien
gcatttagtacacagcccaacacaaattaactg

SEQ ID NO: 318430 - DNA, 33 bp, Homo sapien
gcatttagtacacagcgcaacacaaattaactg

SEQ ID NO: 318431 - DNA, 33 bp, Homo sapien
gctccaaaaagactgaaagcatctgaagagaac

SEQ ID NO: 318432 - DNA, 33 bp, Homo sapien
gctccaaaaagactgagagcatctgaagagaac

SEQ ID NO: 318433 - DNA, 33 bp, Homo sapien
taactaaatgatggtaaacctacggacagaaca

SEQ ID NO: 318434 - DNA, 33 bp, Homo sapien
taactaaatgatggtacacctacggacagaaca

SEQ ID NO: 318435 - DNA, 33 bp, Homo sapien
gccattctcagatctacagctggccaagagaat

SEQ ID NO: 318436 - DNA, 33 bp, Homo sapien
gccattctcagatctatagctggccaagagaat

SEQ ID NO: 318437 - DNA, 33 bp, Homo sapien
acttaaaatatatacaaacaagcaagaatagtg

SEQ ID NO: 318438 - DNA, 33 bp, Homo sapien
acttaaaatatatacagacaagcaagaatagtg

SEQ ID NO: 318439 - DNA, 33 bp, Homo sapien
ctgttttgaagacccaatgaaatagcaagcaga

SEQ ID NO: 318440 - DNA, 33 bp, Homo sapien
ctgttttgaagacccagtgaaatagcaagcaga

SEQ ID NO: 318441 - DNA, 33 bp, Homo sapien
tacatttattattctccagtgatccaaaagtct

SEQ ID NO: 318442 - DNA, 33 bp, Homo sapien
tacatttattattctctagtgatccaaaagtct

SEQ ID NO: 318443 - DNA, 33 bp, Homo sapien
tcctaaacctgtggcaatgattttcttttcctt

SEQ ID NO: 318444 - DNA, 33 bp, Homo sapien
tcctaaacctgtggcagtgattttcttttcctt

SEQ ID NO: 318445 - DNA, 33 bp, Homo sapien
atctagcacacctcggaaaaaaaaagctattcc

SEQ ID NO: 318446 - DNA, 33 bp, Homo sapien
atctagcacacctcgggaaaaaaaagctattcc

SEQ ID NO: 318447 - DNA, 33 bp, Homo sapien
ctttcctgccgctgaaactttgcacttcttccc

SEQ ID NO: 318448 - DNA, 33 bp, Homo sapien
ctttcctgccgctgaacctttgcacttcttccc

SEQ ID NO: 318449 - DNA, 33 bp, Homo sapien
caattcctaaagaaagaattaatactccgagac

SEQ ID NO: 318450 - DNA, 33 bp, Homo sapien
caattcctaaagaaaggattaatactccgagac

SEQ ID NO: 318451 - DNA, 33 bp, Homo sapien
agtaacaacaaggataaagagtctgaacttccc

SEQ ID NO: 318452 - DNA, 33 bp, Homo sapien
agtaacaacaaggatagagagtctgaacttccc

SEQ ID NO: 318453 - DNA, 33 bp, Homo sapien
tcaataggaagccgaaactgtagcagttgcctt

SEQ ID NO: 318454 - DNA, 33 bp, Homo sapien
tcaataggaagccgaagctgtagcagttgcctt

SEQ ID NO: 318455 - DNA, 33 bp, Homo sapien
agtcaacaagtgaggaaaggagctgggctcagg

SEQ ID NO: 318456 - DNA, 33 bp, Homo sapien
agtcaacaagtgaggagaggagctgggctcagg

SEQ ID NO: 318457 - DNA, 33 bp, Homo sapien
tctactgactgatggcacagactcaggctatgt

SEQ ID NO: 318458 - DNA, 33 bp, Homo sapien
tctactgactgatggctcagactcaggctatgt

SEQ ID NO: 318459 - DNA, 33 bp, Homo sapien
gtcatattttatgttgcagctttcaccgggttc

SEQ ID NO: 318460 - DNA, 33 bp, Homo sapien
gtcatattttatgttgtagctttcaccgggttc

SEQ ID NO: 318461 - DNA, 33 bp, Homo sapien
agagaaacagcccaccaggacaaacaagtcaat

SEQ ID NO: 318462 - DNA, 33 bp, Homo sapien
agagaaacagcccaccgggacaaacaagtcaat

SEQ ID NO: 318463 - DNA, 33 bp, Homo sapien
tcacagaaaccggctacctcctttcaatcatgt

SEQ ID NO: 318464 - DNA, 33 bp, Homo sapien
tcacagaaaccggctatctcctttcaatcatgt

SEQ ID NO: 318465 - DNA, 33 bp, Homo sapien
aacacatatccccctcacttaggaatcagttgt

SEQ ID NO: 318466 - DNA, 33 bp, Homo sapien
aacacatatccccctcgcttaggaatcagttgt

SEQ ID NO: 318467 - DNA, 33 bp, Homo sapien
gcaaatcagaaaatccacatgaaatggaatttc

SEQ ID NO: 318468 - DNA, 33 bp, Homo sapien
gcaaatcagaaaatcctcatgaaatggaatttc

SEQ ID NO: 318469 - DNA, 33 bp, Homo sapien
cgttctgtgggttgcacctgtaataagtcagac

SEQ ID NO: 318470 - DNA, 33 bp, Homo sapien
cgttctgtgggttgcatctgtaataagtcagac

SEQ ID NO: 318471 - DNA, 33 bp, Homo sapien
taggagccagcagtgacgttcagacaatcattg

SEQ ID NO: 318472 - DNA, 33 bp, Homo sapien
taggagccagcagtgatgttcagacaatcattg

SEQ ID NO: 318473 - DNA, 33 bp, Homo sapien
ttgtcagggcactctcactggaatacaggcctc

SEQ ID NO: 318474 - DNA, 33 bp, Homo sapien
ttgtcagggcactctcgctggaatacaggcctc

SEQ ID NO: 318475 - DNA, 33 bp, Homo sapien
gtggaattattggagcaaaggatataaatattt

SEQ ID NO: 318476 - DNA, 33 bp, Homo sapien
gtggaattattggagcgaaggatataaatattt

SEQ ID NO: 318477 - DNA, 33 bp, Homo sapien
cttccttagcattctccctttgagactaatcag

SEQ ID NO: 318478 - DNA, 33 bp, Homo sapien
cttccttagcattctcgctttgagactaatcag

SEQ ID NO: 318479 - DNA, 33 bp, Homo sapien
tggtattatgcagctacgaaatcttgttccctg

SEQ ID NO: 318480 - DNA, 33 bp, Homo sapien
tggtattatgcagctatgaaatcttgttccctg

SEQ ID NO: 318481 - DNA, 33 bp, Homo sapien
taagctgacagcagaaaatcagtatccacttgt

SEQ ID NO: 318482 - DNA, 33 bp, Homo sapien
taagctgacagcagaacatcagtatccacttgt

SEQ ID NO: 318483 - DNA, 33 bp, Homo sapien
aatcacatttctatgaagtgtccctctaactgt

SEQ ID NO: 318484 - DNA, 33 bp, Homo sapien
aatcacatttctatgaggtgtccctctaactgt

SEQ ID NO: 318485 - DNA, 33 bp, Homo sapien
ttcttgtgtcactcacaggaaaaactcactgtg

SEQ ID NO: 318486 - DNA, 33 bp, Homo sapien
ttcttgtgtcactcacgggaaaaactcactgtg

SEQ ID NO: 318487 - DNA, 33 bp, Homo sapien
aactatttgtaaagacagccaactgctaccatt

SEQ ID NO: 318488 - DNA, 33 bp, Homo sapien
aactatttgtaaagaccgccaactgctaccatt

SEQ ID NO: 318489 - DNA, 33 bp, Homo sapien
aatagtacctactttacaaggatgtgtgtagat

SEQ ID NO: 318490 - DNA, 33 bp, Homo sapien
aatagtacctactttataaggatgtgtgtagat

SEQ ID NO: 318491 - DNA, 33 bp, Homo sapien
ggggcaactgtacacaaaattccacgtgctttt

SEQ ID NO: 318492 - DNA, 33 bp, Homo sapien
ggggcaactgtacacacaattccacgtgctttt

SEQ ID NO: 318493 - DNA, 33 bp, Homo sapien
caggatgtcagtggaacaggctgtacaactctc

SEQ ID NO: 318494 - DNA, 33 bp, Homo sapien
caggatgtcagtggaataggctgtacaactctc

SEQ ID NO: 318495 - DNA, 33 bp, Homo sapien
catgcattttatcacaacaaaaaaaattggaaa

SEQ ID NO: 318496 - DNA, 33 bp, Homo sapien
catgcattttatcacagcaaaaaaaattggaaa

SEQ ID NO: 318497 - DNA, 33 bp, Homo sapien
cactttgggaagctgaagtgggtacttaaggtc

SEQ ID NO: 318498 - DNA, 33 bp, Homo sapien
cactttgggaagctgaggtgggtacttaaggtc

SEQ ID NO: 318499 - DNA, 33 bp, Homo sapien
tcctccaactcttaccaagccctcgctgatctc

SEQ ID NO: 318500 - DNA, 33 bp, Homo sapien
tcctccaactcttaccgagccctcgctgatctc

SEQ ID NO: 318501 - DNA, 33 bp, Homo sapien
cttcatttcttttaaaaattggggatcaggaag

SEQ ID NO: 318502 - DNA, 33 bp, Homo sapien
cttcatttcttttaaagattggggatcaggaag

SEQ ID NO: 318503 - DNA, 33 bp, Homo sapien
ttttcctggggctttcaaggtcctcgcctggtc

SEQ ID NO: 318504 - DNA, 33 bp, Homo sapien
ttttcctggggctttcgaggtcctcgcctggtc

SEQ ID NO: 318505 - DNA, 33 bp, Homo sapien
atgagacttgagttaccaaacccctcagggtct

SEQ ID NO: 318506 - DNA, 33 bp, Homo sapien
atgagacttgagttacgaaacccctcagggtct

SEQ ID NO: 318507 - DNA, 33 bp, Homo sapien
cctcccaaacctcaaccgtgctcctcgcttcca

SEQ ID NO: 318508 - DNA, 33 bp, Homo sapien
cctcccaaacctcaactgtgctcctcgcttcca

SEQ ID NO: 318509 - DNA, 33 bp, Homo sapien
gtcacaactgttacaacgtggataaggctctag

SEQ ID NO: 318510 - DNA, 33 bp, Homo sapien
gtcacaactgttacaatgtggataaggctctag

SEQ ID NO: 318511 - DNA, 33 bp, Homo sapien
tggccctgtgcagagacgacactccagtggttc

SEQ ID NO: 318512 - DNA, 33 bp, Homo sapien
tggccctgtgcagagatgacactccagtggttc

SEQ ID NO: 318513 - DNA, 33 bp, Homo sapien
gattttaaaacttgcaatatatgccatatatag

SEQ ID NO: 318514 - DNA, 33 bp, Homo sapien
gattttaaaacttgcattatatgccatatatag

SEQ ID NO: 318515 - DNA, 33 bp, Homo sapien
cacgtctcactccctcaatgagaaagcctggca

SEQ ID NO: 318516 - DNA, 33 bp, Homo sapien
cacgtctcactccctcgatgagaaagcctggca

SEQ ID NO: 318517 - DNA, 33 bp, Homo sapien
gacagatcccacgcaaatcaccctaatatgctg

SEQ ID NO: 318518 - DNA, 33 bp, Homo sapien
gacagatcccacgcaattcaccctaatatgctg

SEQ ID NO: 318519 - DNA, 33 bp, Homo sapien
tttctcttctaaggacagcagcttccctccagg

SEQ ID NO: 318520 - DNA, 33 bp, Homo sapien
tttctcttctaaggacggcagcttccctccagg

SEQ ID NO: 318521 - DNA, 33 bp, Homo sapien
gctcctaattccatcaaaaggacctggagggaa

SEQ ID NO: 318522 - DNA, 33 bp, Homo sapien
gctcctaattccatcagaaggacctggagggaa

SEQ ID NO: 318523 - DNA, 33 bp, Homo sapien
tgtacagttaggtgaaaaggaaacaaaccagca

SEQ ID NO: 318524 - DNA, 33 bp, Homo sapien
tgtacagttaggtgaagaggaaacaaaccagca

SEQ ID NO: 318525 - DNA, 33 bp, Homo sapien
catagtcagagaattcaccaacttagaacccac

SEQ ID NO: 318526 - DNA, 33 bp, Homo sapien
catagtcagagaattcgccaacttagaacccac

SEQ ID NO: 318527 - DNA, 33 bp, Homo sapien
agtcctctcctgcacccctttcatgtttcagcc

SEQ ID NO: 318528 - DNA, 33 bp, Homo sapien
agtcctctcctgcacctctttcatgtttcagcc

SEQ ID NO: 318529 - DNA, 33 bp, Homo sapien
gtaagatacactgaaacagagacttttgtctgt

SEQ ID NO: 318530 - DNA, 33 bp, Homo sapien
gtaagatacactgaaatagagacttttgtctgt

SEQ ID NO: 318531 - DNA, 33 bp, Homo sapien
atatgtccttttgtgcaatgtgacggggcacgc

SEQ ID NO: 318532 - DNA, 33 bp, Homo sapien
atatgtccttttgtgcgatgtgacggggcacgc

SEQ ID NO: 318533 - DNA, 33 bp, Homo sapien
ctggaggccaggagcactaaaggctttcaggcc

SEQ ID NO: 318534 - DNA, 33 bp, Homo sapien
ctggaggccaggagcattaaaggctttcaggcc

SEQ ID NO: 318535 - DNA, 33 bp, Homo sapien
gcaaaatgaaagaacaacagtccaattacagaa

SEQ ID NO: 318536 - DNA, 33 bp, Homo sapien
gcaaaatgaaagaacagcagtccaattacagaa

SEQ ID NO: 318537 - DNA, 33 bp, Homo sapien
gtgtctataatccacacactacggcgtggcaaa

SEQ ID NO: 318538 - DNA, 33 bp, Homo sapien
gtgtctataatccacagactacggcgtggcaaa

SEQ ID NO: 318539 - DNA, 33 bp, Homo sapien
agctcaggattgcataagtactaagagacctgg

SEQ ID NO: 318540 - DNA, 33 bp, Homo sapien
agctcaggattgcataggtactaagagacctgg

SEQ ID NO: 318541 - DNA, 33 bp, Homo sapien
gaaatctgcttggccaactcctctgtgagccct

SEQ ID NO: 318542 - DNA, 33 bp, Homo sapien
gaaatctgcttggccagctcctctgtgagccct

SEQ ID NO: 318543 - DNA, 33 bp, Homo sapien
gagaataaaacaaacacggatttcaaattctct

SEQ ID NO: 318544 - DNA, 33 bp, Homo sapien
gagaataaaacaaacatggatttcaaattctct

SEQ ID NO: 318545 - DNA, 33 bp, Homo sapien
ttgggacccgaaataccgagtttgtgtgtgtta

SEQ ID NO: 318546 - DNA, 33 bp, Homo sapien
ttgggacccgaaatactgagtttgtgtgtgtta

SEQ ID NO: 318547 - DNA, 33 bp, Homo sapien
tatcctttgatggtgacagcaagaagtgcatct

SEQ ID NO: 318548 - DNA, 33 bp, Homo sapien
tatcctttgatggtgagagcaagaagtgcatct

SEQ ID NO: 318549 - DNA, 33 bp, Homo sapien
cattcattcagcaaaaccttcatcaagcaactg

SEQ ID NO: 318550 - DNA, 33 bp, Homo sapien
cattcattcagcaaaatcttcatcaagcaactg

SEQ ID NO: 318551 - DNA, 33 bp, Homo sapien
ccaccttattctcctacattctgcagaagacaa

SEQ ID NO: 318552 - DNA, 33 bp, Homo sapien
ccaccttattctcctatattctgcagaagacaa

SEQ ID NO: 318553 - DNA, 33 bp, Homo sapien
tgttccccaacacctaccggccatcatcgagtc

SEQ ID NO: 318554 - DNA, 33 bp, Homo sapien
tgttccccaacacctatcggccatcatcgagtc

SEQ ID NO: 318555 - DNA, 33 bp, Homo sapien
gcccttgaaggctttcaccgatttctagagata

SEQ ID NO: 318556 - DNA, 33 bp, Homo sapien
gcccttgaaggctttcgccgatttctagagata

SEQ ID NO: 318557 - DNA, 33 bp, Homo sapien
gagagaggaaataacaaaagcattgatggattc

SEQ ID NO: 318558 - DNA, 33 bp, Homo sapien
gagagaggaaataacagaagcattgatggattc

SEQ ID NO: 318559 - DNA, 33 bp, Homo sapien
aagtaatctatcctcacggtccccattcatcat

SEQ ID NO: 318560 - DNA, 33 bp, Homo sapien
aagtaatctatcctcatggtccccattcatcat

SEQ ID NO: 318561 - DNA, 33 bp, Homo sapien
attttaactttcacccactggaggcccaaaaag

SEQ ID NO: 318562 - DNA, 33 bp, Homo sapien
attttaactttcacccgctggaggcccaaaaag

SEQ ID NO: 318563 - DNA, 33 bp, Homo sapien
tttcagggtatcaacaagagatcatcatcggtg

SEQ ID NO: 318564 - DNA, 33 bp, Homo sapien
tttcagggtatcaacaggagatcatcatcggtg

SEQ ID NO: 318565 - DNA, 33 bp, Homo sapien
tttcctaatgcagagaccaggggaatctcaaaa

SEQ ID NO: 318566 - DNA, 33 bp, Homo sapien
tttcctaatgcagagagcaggggaatctcaaaa

SEQ ID NO: 318567 - DNA, 33 bp, Homo sapien
ggacattgctctgctgaattacaaagcaggttg

SEQ ID NO: 318568 - DNA, 33 bp, Homo sapien
ggacattgctctgctggattacaaagcaggttg

SEQ ID NO: 318569 - DNA, 33 bp, Homo sapien
cccataagctttttatcaatacatttgcatatc

SEQ ID NO: 318570 - DNA, 33 bp, Homo sapien
cccataagctttttattaatacatttgcatatc

SEQ ID NO: 318571 - DNA, 33 bp, Homo sapien
gagtccattaaacccacaaaatgttagctatct

SEQ ID NO: 318572 - DNA, 33 bp, Homo sapien
gagtccattaaacccataaaatgttagctatct

SEQ ID NO: 318573 - DNA, 33 bp, Homo sapien
agaatctcagcttcacaatttcttagttgtatc

SEQ ID NO: 318574 - DNA, 33 bp, Homo sapien
agaatctcagcttcacgatttcttagttgtatc

SEQ ID NO: 318575 - DNA, 33 bp, Homo sapien
cagacacattaagtccaggaatgataaataatg

SEQ ID NO: 318576 - DNA, 33 bp, Homo sapien
cagacacattaagtccgggaatgataaataatg

SEQ ID NO: 318577 - DNA, 33 bp, Homo sapien
atcatttcattagcacacaagtacacttctgtt

SEQ ID NO: 318578 - DNA, 33 bp, Homo sapien
atcatttcattagcactcaagtacacttctgtt

SEQ ID NO: 318579 - DNA, 33 bp, Homo sapien
aataagataatgtcagactgaaagaagttcaat

SEQ ID NO: 318580 - DNA, 33 bp, Homo sapien
aataagataatgtcagcctgaaagaagttcaat

SEQ ID NO: 318581 - DNA, 33 bp, Homo sapien
atgaggtggcctgtgacgtatcagatgaatgtt

SEQ ID NO: 318582 - DNA, 33 bp, Homo sapien
atgaggtggcctgtgaggtatcagatgaatgtt

SEQ ID NO: 318583 - DNA, 33 bp, Homo sapien
acaggtagttagaagacccagtgaggcttatac

SEQ ID NO: 318584 - DNA, 33 bp, Homo sapien
acaggtagttagaagatccagtgaggcttatac

SEQ ID NO: 318585 - DNA, 33 bp, Homo sapien
gttgttgttgttggcacaccattggcatcactc

SEQ ID NO: 318586 - DNA, 33 bp, Homo sapien
gttgttgttgttggcataccattggcatcactc

SEQ ID NO: 318587 - DNA, 33 bp, Homo sapien
cctttcttcagattatcacactgatggactgcc

SEQ ID NO: 318588 - DNA, 33 bp, Homo sapien
cctttcttcagattatgacactgatggactgcc

SEQ ID NO: 318589 - DNA, 33 bp, Homo sapien
aagccttttccaaaagcaaggcactgtctgggg

SEQ ID NO: 318590 - DNA, 33 bp, Homo sapien
aagccttttccaaaagtaaggcactgtctgggg

SEQ ID NO: 318591 - DNA, 33 bp, Homo sapien
tattttcaaatgtccaatgaacatatgtcaaga

SEQ ID NO: 318592 - DNA, 33 bp, Homo sapien
tattttcaaatgtccagtgaacatatgtcaaga

SEQ ID NO: 318593 - DNA, 33 bp, Homo sapien
ccccagtgggtcaccggcctagtgaacactaga

SEQ ID NO: 318594 - DNA, 33 bp, Homo sapien
ccccagtgggtcaccgtcctagtgaacactaga

SEQ ID NO: 318595 - DNA, 33 bp, Homo sapien
aaaaaaagtgtctttgcagctgtattaaggatt

SEQ ID NO: 318596 - DNA, 33 bp, Homo sapien
aaaaaaagtgtctttgtagctgtattaaggatt

SEQ ID NO: 318597 - DNA, 33 bp, Homo sapien
ctgccctggaaattaccggggacttctggaagt

SEQ ID NO: 318598 - DNA, 33 bp, Homo sapien
ctgccctggaaattactggggacttctggaagt

SEQ ID NO: 318599 - DNA, 33 bp, Homo sapien
caacacccagtgatgaccaggatatggagactt

SEQ ID NO: 318600 - DNA, 33 bp, Homo sapien
caacacccagtgatgatcaggatatggagactt

SEQ ID NO: 318601 - DNA, 33 bp, Homo sapien
acccctctgcaatgtacagtgagatatttacag

SEQ ID NO: 318602 - DNA, 33 bp, Homo sapien
acccctctgcaatgtagagtgagatatttacag

SEQ ID NO: 318603 - DNA, 33 bp, Homo sapien
attactgctctaacaaaacaaattaccaagaat

SEQ ID NO: 318604 - DNA, 33 bp, Homo sapien
attactgctctaacaagacaaattaccaagaat

SEQ ID NO: 318605 - DNA, 33 bp, Homo sapien
ataagcattatctggcccagtggttgctttttt

SEQ ID NO: 318606 - DNA, 33 bp, Homo sapien
ataagcattatctggctcagtggttgctttttt

SEQ ID NO: 318607 - DNA, 33 bp, Homo sapien
tactccctgggttatacaccttggggtcatgtc

SEQ ID NO: 318608 - DNA, 33 bp, Homo sapien
tactccctgggttatataccttggggtcatgtc

SEQ ID NO: 318609 - DNA, 33 bp, Homo sapien
caataaatcaatcagccattcaacaaatattta

SEQ ID NO: 318610 - DNA, 33 bp, Homo sapien
caataaatcaatcagctattcaacaaatattta

SEQ ID NO: 318611 - DNA, 33 bp, Homo sapien
atgcaggacaccactaacagctggaaaaggaaa

SEQ ID NO: 318612 - DNA, 33 bp, Homo sapien
atgcaggacaccactagcagctggaaaaggaaa

SEQ ID NO: 318613 - DNA, 33 bp, Homo sapien
cacaagggtccccaaacgtacaagagggaggca

SEQ ID NO: 318614 - DNA, 33 bp, Homo sapien
cacaagggtccccaaatgtacaagagggaggca

SEQ ID NO: 318615 - DNA, 33 bp, Homo sapien
ctgagcacttagctgacgttggatactctaagc

SEQ ID NO: 318616 - DNA, 33 bp, Homo sapien
ctgagcacttagctgatgttggatactctaagc

SEQ ID NO: 318617 - DNA, 33 bp, Homo sapien
attgctgccaaactaaatatagctgacacaaat

SEQ ID NO: 318618 - DNA, 33 bp, Homo sapien
attgctgccaaactaagtatagctgacacaaat

SEQ ID NO: 318619 - DNA, 33 bp, Homo sapien
gggctaccagcagcacacagtcacgtgggtgga

SEQ ID NO: 318620 - DNA, 33 bp, Homo sapien
gggctaccagcagcacgcagtcacgtgggtgga

SEQ ID NO: 318621 - DNA, 33 bp, Homo sapien
tatttattatgtgcataacacaacaatgaaatt

SEQ ID NO: 318622 - DNA, 33 bp, Homo sapien
tatttattatgtgcatgacacaacaatgaaatt

SEQ ID NO: 318623 - DNA, 33 bp, Homo sapien
tgtgttaaatgaatgaaggttcttaaccacata

SEQ ID NO: 318624 - DNA, 33 bp, Homo sapien
tgtgttaaatgaatgacggttcttaaccacata

SEQ ID NO: 318625 - DNA, 33 bp, Homo sapien
ccctgcccttctggagcagcacgtttgctttga

SEQ ID NO: 318626 - DNA, 33 bp, Homo sapien
ccctgcccttctggagtagcacgtttgctttga

SEQ ID NO: 318627 - DNA, 33 bp, Homo sapien
caactatacatccaaacaaacaatagctacata

SEQ ID NO: 318628 - DNA, 33 bp, Homo sapien
caactatacatccaaagaaacaatagctacata

SEQ ID NO: 318629 - DNA, 33 bp, Homo sapien
tatcatgagaatggtacgaaggagaaaatctgt

SEQ ID NO: 318630 - DNA, 33 bp, Homo sapien
tatcatgagaatggtaggaaggagaaaatctgt

SEQ ID NO: 318631 - DNA, 33 bp, Homo sapien
ctcaaagttgatccaaacttgtagctcagtttg

SEQ ID NO: 318632 - DNA, 33 bp, Homo sapien
ctcaaagttgatccaagcttgtagctcagtttg

SEQ ID NO: 318633 - DNA, 33 bp, Homo sapien
gggaccacctgacaccactatggaatgattttc

SEQ ID NO: 318634 - DNA, 33 bp, Homo sapien
gggaccacctgacaccgctatggaatgattttc

SEQ ID NO: 318635 - DNA, 33 bp, Homo sapien
ctgatcatcatactaccccgcttgcatttctcc

SEQ ID NO: 318636 - DNA, 33 bp, Homo sapien
ctgatcatcatactactccgcttgcatttctcc

SEQ ID NO: 318637 - DNA, 33 bp, Homo sapien
tgctgcccttttataaaccaaactcttctcctt

SEQ ID NO: 318638 - DNA, 33 bp, Homo sapien
tgctgcccttttataagccaaactcttctcctt

SEQ ID NO: 318639 - DNA, 33 bp, Homo sapien
taggttaaaattggtaacactcctgtggtgtgt

SEQ ID NO: 318640 - DNA, 33 bp, Homo sapien
taggttaaaattggtagcactcctgtggtgtgt

SEQ ID NO: 318641 - DNA, 33 bp, Homo sapien
ctatgctctagagaacaatgctctagtcaagaa

SEQ ID NO: 318642 - DNA, 33 bp, Homo sapien
ctatgctctagagaacgatgctctagtcaagaa

SEQ ID NO: 318643 - DNA, 33 bp, Homo sapien
ctgggaacctctgagcccttgttgcctatgatg

SEQ ID NO: 318644 - DNA, 33 bp, Homo sapien
ctgggaacctctgagcgcttgttgcctatgatg

SEQ ID NO: 318645 - DNA, 33 bp, Homo sapien
tcacatgatcttttaaatcactccccggcttct

SEQ ID NO: 318646 - DNA, 33 bp, Homo sapien
tcacatgatcttttaattcactccccggcttct

SEQ ID NO: 318647 - DNA, 33 bp, Homo sapien
tctctctcatgcattaaagagaaacaaccagat

SEQ ID NO: 318648 - DNA, 33 bp, Homo sapien
tctctctcatgcattacagagaaacaaccagat

SEQ ID NO: 318649 - DNA, 33 bp, Homo sapien
caagtgtctttacccaaagaagttagtaacatg

SEQ ID NO: 318650 - DNA, 33 bp, Homo sapien
caagtgtctttacccagagaagttagtaacatg

SEQ ID NO: 318651 - DNA, 33 bp, Homo sapien
gttgttgacactgctcactaaaaatgatcatca

SEQ ID NO: 318652 - DNA, 33 bp, Homo sapien
gttgttgacactgctcgctaaaaatgatcatca

SEQ ID NO: 318653 - DNA, 33 bp, Homo sapien
tccaaactacaccacaaccatacgcagcagcag

SEQ ID NO: 318654 - DNA, 33 bp, Homo sapien
tccaaactacaccacagccatacgcagcagcag

SEQ ID NO: 318655 - DNA, 33 bp, Homo sapien
ggagatggggcctaacaggagccattttagtca

SEQ ID NO: 318656 - DNA, 33 bp, Homo sapien
ggagatggggcctaacgggagccattttagtca

SEQ ID NO: 318657 - DNA, 33 bp, Homo sapien
aatgccttcagtccgaccagtcttaaacagcaa

SEQ ID NO: 318658 - DNA, 33 bp, Homo sapien
aatgccttcagtccgagcagtcttaaacagcaa

SEQ ID NO: 318659 - DNA, 33 bp, Homo sapien
ctggagtactctgttacgtctgcatttctgtca

SEQ ID NO: 318660 - DNA, 33 bp, Homo sapien
ctggagtactctgttatgtctgcatttctgtca

SEQ ID NO: 318661 - DNA, 33 bp, Homo sapien
aagatgggcacagtgaagccatagcatcctatc

SEQ ID NO: 318662 - DNA, 33 bp, Homo sapien
aagatgggcacagtgaggccatagcatcctatc

SEQ ID NO: 318663 - DNA, 33 bp, Homo sapien
acattacctacacccccgctttgctaagactgg

SEQ ID NO: 318664 - DNA, 33 bp, Homo sapien
acattacctacaccccggctttgctaagactgg

SEQ ID NO: 318665 - DNA, 33 bp, Homo sapien
tcaaaacccacggctaacaaggtcaagaacggt

SEQ ID NO: 318666 - DNA, 33 bp, Homo sapien
tcaaaacccacggctagcaaggtcaagaacggt

SEQ ID NO: 318667 - DNA, 33 bp, Homo sapien
taactttccctaaggccgcacagctagtaagct

SEQ ID NO: 318668 - DNA, 33 bp, Homo sapien
taactttccctaaggctgcacagctagtaagct

SEQ ID NO: 318669 - DNA, 33 bp, Homo sapien
ccatgatgagggggaaagatgaagaggtgtcta

SEQ ID NO: 318670 - DNA, 33 bp, Homo sapien
ccatgatgagggggaaggatgaagaggtgtcta

SEQ ID NO: 318671 - DNA, 33 bp, Homo sapien
taccaaaaagcaaatgaacaacgatagtgacag

SEQ ID NO: 318672 - DNA, 33 bp, Homo sapien
taccaaaaagcaaatgtacaacgatagtgacag

SEQ ID NO: 318673 - DNA, 33 bp, Homo sapien
tggggccgacgaacaactgggcttttgatctaa

SEQ ID NO: 318674 - DNA, 33 bp, Homo sapien
tggggccgacgaacaattgggcttttgatctaa

SEQ ID NO: 318675 - DNA, 33 bp, Homo sapien
ccatgacgggacagaaaatcagacacctcgtta

SEQ ID NO: 318676 - DNA, 33 bp, Homo sapien
ccatgacgggacagaagatcagacacctcgtta

SEQ ID NO: 318677 - DNA, 33 bp, Homo sapien
ctttattataactgcaacaattccaacaacatg

SEQ ID NO: 318678 - DNA, 33 bp, Homo sapien
ctttattataactgcatcaattccaacaacatg

SEQ ID NO: 318679 - DNA, 33 bp, Homo sapien
atattacctccaacaaagtccaaactagcctat

SEQ ID NO: 318680 - DNA, 33 bp, Homo sapien
atattacctccaacaaggtccaaactagcctat

SEQ ID NO: 318681 - DNA, 33 bp, Homo sapien
taaagcagatgctagaaggaaagcaacgaaaaa

SEQ ID NO: 318682 - DNA, 33 bp, Homo sapien
taaagcagatgctagagggaaagcaacgaaaaa

SEQ ID NO: 318683 - DNA, 33 bp, Homo sapien
ggacaaaaattaagcacatatgtcaaaatctaa

SEQ ID NO: 318684 - DNA, 33 bp, Homo sapien
ggacaaaaattaagcatatatgtcaaaatctaa

SEQ ID NO: 318685 - DNA, 33 bp, Homo sapien
aagtaatacaagagaagtgtcctgtagagcacg

SEQ ID NO: 318686 - DNA, 33 bp, Homo sapien
aagtaatacaagagaattgtcctgtagagcacg

SEQ ID NO: 318687 - DNA, 33 bp, Homo sapien
catgtttgctcccagccgaaagatgacttaagc

SEQ ID NO: 318688 - DNA, 33 bp, Homo sapien
catgtttgctcccagctgaaagatgacttaagc

SEQ ID NO: 318689 - DNA, 33 bp, Homo sapien
tgtgctctgggaaatcactaccaccctctaatt

SEQ ID NO: 318690 - DNA, 33 bp, Homo sapien
tgtgctctgggaaatcgctaccaccctctaatt

SEQ ID NO: 318691 - DNA, 33 bp, Homo sapien
tgtcacctaataatgcaaaaaaggagcaccttc

SEQ ID NO: 318692 - DNA, 33 bp, Homo sapien
tgtcacctaataatgccaaaaaggagcaccttc

SEQ ID NO: 318693 - DNA, 33 bp, Homo sapien
agcagctggaagtcaaaaggagtgctctgtgga

SEQ ID NO: 318694 - DNA, 33 bp, Homo sapien
agcagctggaagtcaagaggagtgctctgtgga

SEQ ID NO: 318695 - DNA, 33 bp, Homo sapien
caagttttccatggcacgggggccttcataaag

SEQ ID NO: 318696 - DNA, 33 bp, Homo sapien
caagttttccatggcatgggggccttcataaag

SEQ ID NO: 318697 - DNA, 33 bp, Homo sapien
aatcttagcactcagaaatcagggctgacctac

SEQ ID NO: 318698 - DNA, 33 bp, Homo sapien
aatcttagcactcagatatcagggctgacctac

SEQ ID NO: 318699 - DNA, 33 bp, Homo sapien
gccgcactgtgtccaaagggatgtttaaagtcg

SEQ ID NO: 318700 - DNA, 33 bp, Homo sapien
gccgcactgtgtccaatgggatgtttaaagtcg

SEQ ID NO: 318701 - DNA, 33 bp, Homo sapien
cactggtttacagaacaaagtagctctctggct

SEQ ID NO: 318702 - DNA, 33 bp, Homo sapien
cactggtttacagaaccaagtagctctctggct

SEQ ID NO: 318703 - DNA, 33 bp, Homo sapien
aaaacctactggtagagcaaacataccaataaa

SEQ ID NO: 318704 - DNA, 33 bp, Homo sapien
aaaacctactggtagatcaaacataccaataaa

SEQ ID NO: 318705 - DNA, 33 bp, Homo sapien
agttatccttcataaaccaagcagaaataaagt

SEQ ID NO: 318706 - DNA, 33 bp, Homo sapien
agttatccttcataaatcaagcagaaataaagt

SEQ ID NO: 318707 - DNA, 33 bp, Homo sapien
atacattagaaaccttcaacaatccattagatt

SEQ ID NO: 318708 - DNA, 33 bp, Homo sapien
atacattagaaaccttgaacaatccattagatt

SEQ ID NO: 318709 - DNA, 33 bp, Homo sapien
gccagcagggaaataacgctctattactgcagg

SEQ ID NO: 318710 - DNA, 33 bp, Homo sapien
gccagcagggaaataatgctctattactgcagg

SEQ ID NO: 318711 - DNA, 33 bp, Homo sapien
tcatgatgacaaggataacgataatgacgccta

SEQ ID NO: 318712 - DNA, 33 bp, Homo sapien
tcatgatgacaaggatgacgataatgacgccta

SEQ ID NO: 318713 - DNA, 33 bp, Homo sapien
atctgagaccaattcaaaagttgtgccatacca

SEQ ID NO: 318714 - DNA, 33 bp, Homo sapien
atctgagaccaattcacaagttgtgccatacca

SEQ ID NO: 318715 - DNA, 33 bp, Homo sapien
aagctgtgcagcgctacatcagagagctgcagt

SEQ ID NO: 318716 - DNA, 33 bp, Homo sapien
aagctgtgcagcgctatatcagagagctgcagt

SEQ ID NO: 318717 - DNA, 33 bp, Homo sapien
ctcagtgaaagttctcaaacaaatgggtagaag

SEQ ID NO: 318718 - DNA, 33 bp, Homo sapien
ctcagtgaaagttctcgaacaaatgggtagaag

SEQ ID NO: 318719 - DNA, 33 bp, Homo sapien
acaatagcaaactgagcagcaagagccagggtg

SEQ ID NO: 318720 - DNA, 33 bp, Homo sapien
acaatagcaaactgaggagcaagagccagggtg

SEQ ID NO: 318721 - DNA, 33 bp, Homo sapien
ggggcagaacactgggaagccaggtatagagag

SEQ ID NO: 318722 - DNA, 33 bp, Homo sapien
ggggcagaacactggggagccaggtatagagag

SEQ ID NO: 318723 - DNA, 33 bp, Homo sapien
tgctgtggactgagaccggaagagcagggtcct

SEQ ID NO: 318724 - DNA, 33 bp, Homo sapien
tgctgtggactgagactggaagagcagggtcct

SEQ ID NO: 318725 - DNA, 33 bp, Homo sapien
tgattcctggtccggcactcttatcacactgca

SEQ ID NO: 318726 - DNA, 33 bp, Homo sapien
tgattcctggtccggcgctcttatcacactgca

SEQ ID NO: 318727 - DNA, 33 bp, Homo sapien
tgggtacaagctattcaacataacaagaaaaag

SEQ ID NO: 318728 - DNA, 33 bp, Homo sapien
tgggtacaagctattccacataacaagaaaaag

SEQ ID NO: 318729 - DNA, 33 bp, Homo sapien
attcttcaaattttaacggactctcaatataca

SEQ ID NO: 318730 - DNA, 33 bp, Homo sapien
attcttcaaattttaatggactctcaatataca

SEQ ID NO: 318731 - DNA, 33 bp, Homo sapien
gtcactgacctgaccactgatgtcctgaaaact

SEQ ID NO: 318732 - DNA, 33 bp, Homo sapien
gtcactgacctgaccattgatgtcctgaaaact

SEQ ID NO: 318733 - DNA, 33 bp, Homo sapien
tcacatggtggacctgacaacagcaggcttccc

SEQ ID NO: 318734 - DNA, 33 bp, Homo sapien
tcacatggtggacctggcaacagcaggcttccc

SEQ ID NO: 318735 - DNA, 33 bp, Homo sapien
gagtgcccttagaaaaatgatgaatttctgagt

SEQ ID NO: 318736 - DNA, 33 bp, Homo sapien
gagtgcccttagaaaagtgatgaatttctgagt

SEQ ID NO: 318737 - DNA, 33 bp, Homo sapien
acacgggatcagccaacgtgctgggcaaactcc

SEQ ID NO: 318738 - DNA, 33 bp, Homo sapien
acacgggatcagccaatgtgctgggcaaactcc

SEQ ID NO: 318739 - DNA, 33 bp, Homo sapien
aaaagtgaaatgaagactccatcaaccatcaaa

SEQ ID NO: 318740 - DNA, 33 bp, Homo sapien
aaaagtgaaatgaagattccatcaaccatcaaa

SEQ ID NO: 318741 - DNA, 33 bp, Homo sapien
ccatcaaaagtcatccacgtttggcctttcaga

SEQ ID NO: 318742 - DNA, 33 bp, Homo sapien
ccatcaaaagtcatccgcgtttggcctttcaga

SEQ ID NO: 318743 - DNA, 33 bp, Homo sapien
agaacactttttcagaagctcacttccacttct

SEQ ID NO: 318744 - DNA, 33 bp, Homo sapien
agaacactttttcagatgctcacttccacttct

SEQ ID NO: 318745 - DNA, 33 bp, Homo sapien
gggagacatagagtccaaggagagttcttaagg

SEQ ID NO: 318746 - DNA, 33 bp, Homo sapien
gggagacatagagtccgaggagagttcttaagg

SEQ ID NO: 318747 - DNA, 33 bp, Homo sapien
aatccaataccaccacacagaggtaacatcttg

SEQ ID NO: 318748 - DNA, 33 bp, Homo sapien
aatccaataccaccacccagaggtaacatcttg

SEQ ID NO: 318749 - DNA, 33 bp, Homo sapien
attcgtagagccaaaccgtcacattatacagct

SEQ ID NO: 318750 - DNA, 33 bp, Homo sapien
attcgtagagccaaactgtcacattatacagct

SEQ ID NO: 318751 - DNA, 33 bp, Homo sapien
ggcctaacaaggctaaaaagggcagaaggccaa

SEQ ID NO: 318752 - DNA, 33 bp, Homo sapien
ggcctaacaaggctaagaagggcagaaggccaa

SEQ ID NO: 318753 - DNA, 33 bp, Homo sapien
tcaagagcttgaaccccactgggacaatgaaga

SEQ ID NO: 318754 - DNA, 33 bp, Homo sapien
tcaagagcttgaaccctactgggacaatgaaga

SEQ ID NO: 318755 - DNA, 33 bp, Homo sapien
gcacacctctatcatcactttctggaactcatc

SEQ ID NO: 318756 - DNA, 33 bp, Homo sapien
gcacacctctatcatcgctttctggaactcatc

SEQ ID NO: 318757 - DNA, 33 bp, Homo sapien
tgatgtgagctcctccagctttcctgtctacac

SEQ ID NO: 318758 - DNA, 33 bp, Homo sapien
tgatgtgagctcctccggctttcctgtctacac

SEQ ID NO: 318759 - DNA, 33 bp, Homo sapien
gggctcaagtttcgctaaacaagtgaattgggg

SEQ ID NO: 318760 - DNA, 33 bp, Homo sapien
gggctcaagtttcgctgaacaagtgaattgggg

SEQ ID NO: 318761 - DNA, 33 bp, Homo sapien
gcggcaatgtttcagcagagtctggcaagacgg

SEQ ID NO: 318762 - DNA, 33 bp, Homo sapien
gcggcaatgtttcagccgagtctggcaagacgg

SEQ ID NO: 318763 - DNA, 33 bp, Homo sapien
gggcaggggcctttaaaaagcaaagaaatgctg

SEQ ID NO: 318764 - DNA, 33 bp, Homo sapien
gggcaggggcctttaagaagcaaagaaatgctg

SEQ ID NO: 318765 - DNA, 33 bp, Homo sapien
tgagggcacctaataacaatttgatttccctga

SEQ ID NO: 318766 - DNA, 33 bp, Homo sapien
tgagggcacctaataagaatttgatttccctga

SEQ ID NO: 318767 - DNA, 33 bp, Homo sapien
gtgatgccacaataccaagcattatatccgctt

SEQ ID NO: 318768 - DNA, 33 bp, Homo sapien
gtgatgccacaataccgagcattatatccgctt

SEQ ID NO: 318769 - DNA, 33 bp, Homo sapien
ccttcaccagccttccagaagtttgtcaagaga

SEQ ID NO: 318770 - DNA, 33 bp, Homo sapien
ccttcaccagccttccggaagtttgtcaagaga

SEQ ID NO: 318771 - DNA, 33 bp, Homo sapien
acacaagtagcccccaaacattcccactgtgac

SEQ ID NO: 318772 - DNA, 33 bp, Homo sapien
acacaagtagcccccatacattcccactgtgac

SEQ ID NO: 318773 - DNA, 33 bp, Homo sapien
gttgaaattgcctatcaattgttcttctagaga

SEQ ID NO: 318774 - DNA, 33 bp, Homo sapien
gttgaaattgcctatcgattgttcttctagaga

SEQ ID NO: 318775 - DNA, 33 bp, Homo sapien
aggaagtaacagatcccgaaggctctaacagaa

SEQ ID NO: 318776 - DNA, 33 bp, Homo sapien
aggaagtaacagatcctgaaggctctaacagaa

SEQ ID NO: 318777 - DNA, 33 bp, Homo sapien
actagcctgatagagcacagatataatcatgcc

SEQ ID NO: 318778 - DNA, 33 bp, Homo sapien
actagcctgatagagcgcagatataatcatgcc

SEQ ID NO: 318779 - DNA, 33 bp, Homo sapien
acagtccaggattgaaaggggaagggacacaga

SEQ ID NO: 318780 - DNA, 33 bp, Homo sapien
acagtccaggattgaagggggaagggacacaga

SEQ ID NO: 318781 - DNA, 33 bp, Homo sapien
agttttgagataatacactatgtagcaatagat

SEQ ID NO: 318782 - DNA, 33 bp, Homo sapien
agttttgagataatacgctatgtagcaatagat

SEQ ID NO: 318783 - DNA, 33 bp, Homo sapien
gaagtaggtagcattacaatctttatacaggtg

SEQ ID NO: 318784 - DNA, 33 bp, Homo sapien
gaagtaggtagcattataatctttatacaggtg

SEQ ID NO: 318785 - DNA, 33 bp, Homo sapien
cacccagttacagaagaaaatagcagtccagag

SEQ ID NO: 318786 - DNA, 33 bp, Homo sapien
cacccagttacagaagcaaatagcagtccagag

SEQ ID NO: 318787 - DNA, 33 bp, Homo sapien
ccattccccactttgacgaaacagtaaccattt

SEQ ID NO: 318788 - DNA, 33 bp, Homo sapien
ccattccccactttgatgaaacagtaaccattt

SEQ ID NO: 318789 - DNA, 33 bp, Homo sapien
ctgccatctactcttaccttccaacctataaca

SEQ ID NO: 318790 - DNA, 33 bp, Homo sapien
ctgccatctactcttatcttccaacctataaca

SEQ ID NO: 318791 - DNA, 33 bp, Homo sapien
gagtgatttcagatcagagtgatttaagaggta

SEQ ID NO: 318792 - DNA, 33 bp, Homo sapien
gagtgatttcagatcatagtgatttaagaggta

SEQ ID NO: 318793 - DNA, 33 bp, Homo sapien
tctctctgtgtgtccaatatcatgctgtggttg

SEQ ID NO: 318794 - DNA, 33 bp, Homo sapien
tctctctgtgtgtccagtatcatgctgtggttg

SEQ ID NO: 318795 - DNA, 33 bp, Homo sapien
acagggtctctctcagccacataggctcgacta

SEQ ID NO: 318796 - DNA, 33 bp, Homo sapien
acagggtctctctcagtcacataggctcgacta

SEQ ID NO: 318797 - DNA, 33 bp, Homo sapien
agccccaaaagatcacaaggttcctatctgttc

SEQ ID NO: 318798 - DNA, 33 bp, Homo sapien
agccccaaaagatcacgaggttcctatctgttc

SEQ ID NO: 318799 - DNA, 33 bp, Homo sapien
ctctcccatggctataaactaccttcaatcagg

SEQ ID NO: 318800 - DNA, 33 bp, Homo sapien
ctctcccatggctatatactaccttcaatcagg

SEQ ID NO: 318801 - DNA, 33 bp, Homo sapien
cacgaactctagagcacaagagaacctgagatt

SEQ ID NO: 318802 - DNA, 33 bp, Homo sapien
cacgaactctagagcagaagagaacctgagatt

SEQ ID NO: 318803 - DNA, 33 bp, Homo sapien
cggccaagaccatagacctagtgattgtcagat

SEQ ID NO: 318804 - DNA, 33 bp, Homo sapien
cggccaagaccatagagctagtgattgtcagat

SEQ ID NO: 318805 - DNA, 33 bp, Homo sapien
tggagtttcaaggctcagaaactgtgcaagtcc

SEQ ID NO: 318806 - DNA, 33 bp, Homo sapien
tggagtttcaaggctcggaaactgtgcaagtcc

SEQ ID NO: 318807 - DNA, 33 bp, Homo sapien
gagggctgagtagatgcaggcgagctcggagat

SEQ ID NO: 318808 - DNA, 33 bp, Homo sapien
gagggctgagtagatggaggcgagctcggagat

SEQ ID NO: 318809 - DNA, 33 bp, Homo sapien
cgccatgcctcagccacacatcaagagccttca

SEQ ID NO: 318810 - DNA, 33 bp, Homo sapien
cgccatgcctcagccagacatcaagagccttca

SEQ ID NO: 318811 - DNA, 33 bp, Homo sapien
cacctccaggccagaacaaggtgtcggaattct

SEQ ID NO: 318812 - DNA, 33 bp, Homo sapien
cacctccaggccagaataaggtgtcggaattct

SEQ ID NO: 318813 - DNA, 33 bp, Homo sapien
tttgaggcttggaaatcacgtagggggagtacc

SEQ ID NO: 318814 - DNA, 33 bp, Homo sapien
tttgaggcttggaaatgacgtagggggagtacc

SEQ ID NO: 318815 - DNA, 33 bp, Homo sapien
ccactcccagaccccccagcttggaacacacgt

SEQ ID NO: 318816 - DNA, 33 bp, Homo sapien
ccactcccagaccccctagcttggaacacacgt

SEQ ID NO: 318817 - DNA, 33 bp, Homo sapien
ggcgtggagcttggatgagtcttgaaggaggag

SEQ ID NO: 318818 - DNA, 33 bp, Homo sapien
ggcgtggagcttggattagtcttgaaggaggag

SEQ ID NO: 318819 - DNA, 33 bp, Homo sapien
atggccctacattccacagccgcctctcccagg

SEQ ID NO: 318820 - DNA, 33 bp, Homo sapien
atggccctacattccagagccgcctctcccagg

SEQ ID NO: 318821 - DNA, 33 bp, Homo sapien
ttaggacaagccaggaaaagcggaaaggtccag

SEQ ID NO: 318822 - DNA, 33 bp, Homo sapien
ttaggacaagccaggacaagcggaaaggtccag

SEQ ID NO: 318823 - DNA, 33 bp, Homo sapien
gctgaatgggtcccagcaaaggaaaagttcaca

SEQ ID NO: 318824 - DNA, 33 bp, Homo sapien
gctgaatgggtcccaggaaaggaaaagttcaca

SEQ ID NO: 318825 - DNA, 33 bp, Homo sapien
catcactatggtattaagctcaggaacttttag

SEQ ID NO: 318826 - DNA, 33 bp, Homo sapien
catcactatggtattatgctcaggaacttttag

SEQ ID NO: 318827 - DNA, 33 bp, Homo sapien
ggcgacagttgctgacgaagcgatttcggttta

SEQ ID NO: 318828 - DNA, 33 bp, Homo sapien
ggcgacagttgctgactaagcgatttcggttta

SEQ ID NO: 318829 - DNA, 33 bp, Homo sapien
atagtttcacaccaggaacctatcaagcttact

SEQ ID NO: 318830 - DNA, 33 bp, Homo sapien
atagtttcacaccagggacctatcaagcttact

SEQ ID NO: 318831 - DNA, 33 bp, Homo sapien
tttcagacctttatgcacttttaacaccttgag

SEQ ID NO: 318832 - DNA, 33 bp, Homo sapien
tttcagacctttatgcccttttaacaccttgag

SEQ ID NO: 318833 - DNA, 33 bp, Homo sapien
atgctgctaataataacgtacaaaattcagaaa

SEQ ID NO: 318834 - DNA, 33 bp, Homo sapien
atgctgctaataataatgtacaaaattcagaaa

SEQ ID NO: 318835 - DNA, 33 bp, Homo sapien
ctggcaggcgggctagcacgttggtgagcaagg

SEQ ID NO: 318836 - DNA, 33 bp, Homo sapien
ctggcaggcgggctaggacgttggtgagcaagg

SEQ ID NO: 318837 - DNA, 33 bp, Homo sapien
gagtcatagctgtacccgaaatggaggtgcaga

SEQ ID NO: 318838 - DNA, 33 bp, Homo sapien
gagtcatagctgtacctgaaatggaggtgcaga

SEQ ID NO: 318839 - DNA, 33 bp, Homo sapien
ggagcagagtatcctgacaatctgcaatgaata

SEQ ID NO: 318840 - DNA, 33 bp, Homo sapien
ggagcagagtatcctgccaatctgcaatgaata

SEQ ID NO: 318841 - DNA, 33 bp, Homo sapien
acatccccatcatcctcaggaggtttgctgaaa

SEQ ID NO: 318842 - DNA, 33 bp, Homo sapien
acatccccatcatccttaggaggtttgctgaaa

SEQ ID NO: 318843 - DNA, 33 bp, Homo sapien
ggctcacatatcactgaaaggactccagagaag

SEQ ID NO: 318844 - DNA, 33 bp, Homo sapien
ggctcacatatcactggaaggactccagagaag

SEQ ID NO: 318845 - DNA, 33 bp, Homo sapien
aaaggtgaaaatagagccaaactggtctaaaac

SEQ ID NO: 318846 - DNA, 33 bp, Homo sapien
aaaggtgaaaatagagtcaaactggtctaaaac

SEQ ID NO: 318847 - DNA, 33 bp, Homo sapien
gggaacagacaggcaacaccttggaatccatgt

SEQ ID NO: 318848 - DNA, 33 bp, Homo sapien
gggaacagacaggcaataccttggaatccatgt

SEQ ID NO: 318849 - DNA, 33 bp, Homo sapien
ggcccaagagtggctcgaagcattccagtggca

SEQ ID NO: 318850 - DNA, 33 bp, Homo sapien
ggcccaagagtggctctaagcattccagtggca

SEQ ID NO: 318851 - DNA, 33 bp, Homo sapien
agtctaatggttcttaactagaggtgtacattt

SEQ ID NO: 318852 - DNA, 33 bp, Homo sapien
agtctaatggttcttagctagaggtgtacattt

SEQ ID NO: 318853 - DNA, 33 bp, Homo sapien
catgcaaaggctggaacgatctagagtcctctt

SEQ ID NO: 318854 - DNA, 33 bp, Homo sapien
catgcaaaggctggaatgatctagagtcctctt

SEQ ID NO: 318855 - DNA, 33 bp, Homo sapien
aatttcagaaatcagaacaaatgtgtctttagg

SEQ ID NO: 318856 - DNA, 33 bp, Homo sapien
aatttcagaaatcagagcaaatgtgtctttagg

SEQ ID NO: 318857 - DNA, 33 bp, Homo sapien
ttttagcgatgaataacgtaattggctatgaag

SEQ ID NO: 318858 - DNA, 33 bp, Homo sapien
ttttagcgatgaataatgtaattggctatgaag

SEQ ID NO: 318859 - DNA, 33 bp, Homo sapien
tctgtgttttgctgaagtgaaactcatttgcat

SEQ ID NO: 318860 - DNA, 33 bp, Homo sapien
tctgtgttttgctgaattgaaactcatttgcat

SEQ ID NO: 318861 - DNA, 33 bp, Homo sapien
gtattccaaaacccgaacatttctccttcttct

SEQ ID NO: 318862 - DNA, 33 bp, Homo sapien
gtattccaaaacccgatcatttctccttcttct

SEQ ID NO: 318863 - DNA, 33 bp, Homo sapien
tccatctttccaggccccgtatcatggaaaggc

SEQ ID NO: 318864 - DNA, 33 bp, Homo sapien
tccatctttccaggcctcgtatcatggaaaggc

SEQ ID NO: 318865 - DNA, 33 bp, Homo sapien
tgttttctagccccacaatgtgcaaagtgcagt

SEQ ID NO: 318866 - DNA, 33 bp, Homo sapien
tgttttctagccccacgatgtgcaaagtgcagt

SEQ ID NO: 318867 - DNA, 33 bp, Homo sapien
gtctcaccccttcatcaattgcctcagagtctc

SEQ ID NO: 318868 - DNA, 33 bp, Homo sapien
gtctcaccccttcatcgattgcctcagagtctc

SEQ ID NO: 318869 - DNA, 33 bp, Homo sapien
tgggattacaagcgtgaacattcttctttcttt

SEQ ID NO: 318870 - DNA, 33 bp, Homo sapien
tgggattacaagcgtggacattcttctttcttt

SEQ ID NO: 318871 - DNA, 33 bp, Homo sapien
accaggcactacggtaagacttcattcatcctc

SEQ ID NO: 318872 - DNA, 33 bp, Homo sapien
accaggcactacggtaggacttcattcatcctc

SEQ ID NO: 318873 - DNA, 33 bp, Homo sapien
ggtacacgggaacccccatcagtgttagctggg

SEQ ID NO: 318874 - DNA, 33 bp, Homo sapien
ggtacacgggaacccctatcagtgttagctggg

SEQ ID NO: 318875 - DNA, 33 bp, Homo sapien
atgtgcaattataggacgactgccgccgcccca

SEQ ID NO: 318876 - DNA, 33 bp, Homo sapien
atgtgcaattataggatgactgccgccgcccca

SEQ ID NO: 318877 - DNA, 33 bp, Homo sapien
gctaggctagtaaggaagttgctggggcaaggg

SEQ ID NO: 318878 - DNA, 33 bp, Homo sapien
gctaggctagtaaggacgttgctggggcaaggg

SEQ ID NO: 318879 - DNA, 33 bp, Homo sapien
tcagtacccttttggccgagcaatgcttaatat

SEQ ID NO: 318880 - DNA, 33 bp, Homo sapien
tcagtacccttttggctgagcaatgcttaatat

SEQ ID NO: 318881 - DNA, 33 bp, Homo sapien
agttgatattgtcaccaatcatgtaggctctgt

SEQ ID NO: 318882 - DNA, 33 bp, Homo sapien
agttgatattgtcaccgatcatgtaggctctgt

SEQ ID NO: 318883 - DNA, 33 bp, Homo sapien
gggaaatgtattggaacggaaaaccatttttcc

SEQ ID NO: 318884 - DNA, 33 bp, Homo sapien
gggaaatgtattggaatggaaaaccatttttcc

SEQ ID NO: 318885 - DNA, 33 bp, Homo sapien
aaggcagattagagcacgtgataggagctgagc

SEQ ID NO: 318886 - DNA, 33 bp, Homo sapien
aaggcagattagagcatgtgataggagctgagc

SEQ ID NO: 318887 - DNA, 33 bp, Homo sapien
gcattactaatgactacaaggaggcaggaggtg

SEQ ID NO: 318888 - DNA, 33 bp, Homo sapien
gcattactaatgactagaaggaggcaggaggtg

SEQ ID NO: 318889 - DNA, 33 bp, Homo sapien
tttggccatagggtagaaacactacagagggca

SEQ ID NO: 318890 - DNA, 33 bp, Homo sapien
tttggccatagggtaggaacactacagagggca

SEQ ID NO: 318891 - DNA, 33 bp, Homo sapien
cattgtttggtgtcataaaaaaagcatggtctg

SEQ ID NO: 318892 - DNA, 33 bp, Homo sapien
cattgtttggtgtcatcaaaaaagcatggtctg

SEQ ID NO: 318893 - DNA, 33 bp, Homo sapien
tagttaatgactgtgccctaacttcactttaag

SEQ ID NO: 318894 - DNA, 33 bp, Homo sapien
tagttaatgactgtgctctaacttcactttaag

SEQ ID NO: 318895 - DNA, 33 bp, Homo sapien
ctggggccctgcatccacacacaaggctagggt

SEQ ID NO: 318896 - DNA, 33 bp, Homo sapien
ctggggccctgcatccgcacacaaggctagggt

SEQ ID NO: 318897 - DNA, 33 bp, Homo sapien
aagtgcaaatcattcaaccgagattcagggcct

SEQ ID NO: 318898 - DNA, 33 bp, Homo sapien
aagtgcaaatcattcagccgagattcagggcct

SEQ ID NO: 318899 - DNA, 33 bp, Homo sapien
tctttagcaacccctacccagtagagaactcag

SEQ ID NO: 318900 - DNA, 33 bp, Homo sapien
tctttagcaacccctatccagtagagaactcag

SEQ ID NO: 318901 - DNA, 33 bp, Homo sapien
agaactcaggaaagaagaagtgagaacagtagg

SEQ ID NO: 318902 - DNA, 33 bp, Homo sapien
agaactcaggaaagaataagtgagaacagtagg

SEQ ID NO: 318903 - DNA, 33 bp, Homo sapien
aaggagttcttgatgacccaaaaagttttgtca

SEQ ID NO: 318904 - DNA, 33 bp, Homo sapien
aaggagttcttgatgatccaaaaagttttgtca

SEQ ID NO: 318905 - DNA, 33 bp, Homo sapien
ttttatccactgctgccctaactaacaaggcca

SEQ ID NO: 318906 - DNA, 33 bp, Homo sapien
ttttatccactgctgctctaactaacaaggcca

SEQ ID NO: 318907 - DNA, 33 bp, Homo sapien
gtcatgtcctagacccaatcaccaccgatagcc

SEQ ID NO: 318908 - DNA, 33 bp, Homo sapien
gtcatgtcctagacccgatcaccaccgatagcc

SEQ ID NO: 318909 - DNA, 33 bp, Homo sapien
agcctcagacagggtcaaactttcacaggtgat

SEQ ID NO: 318910 - DNA, 33 bp, Homo sapien
agcctcagacagggtcgaactttcacaggtgat

SEQ ID NO: 318911 - DNA, 33 bp, Homo sapien
ggaaggaggccaggtgaacctctggacaatgat

SEQ ID NO: 318912 - DNA, 33 bp, Homo sapien
ggaaggaggccaggtggacctctggacaatgat

SEQ ID NO: 318913 - DNA, 33 bp, Homo sapien
gggcaggcagctgagaacttttctctcctttct

SEQ ID NO: 318914 - DNA, 33 bp, Homo sapien
gggcaggcagctgagaccttttctctcctttct

SEQ ID NO: 318915 - DNA, 33 bp, Homo sapien
taaccctgtctgtaacaatccctcatctgcaag

SEQ ID NO: 318916 - DNA, 33 bp, Homo sapien
taaccctgtctgtaacgatccctcatctgcaag

SEQ ID NO: 318917 - DNA, 33 bp, Homo sapien
tcatgagggaccatcaagaaagctacttgttcc

SEQ ID NO: 318918 - DNA, 33 bp, Homo sapien
tcatgagggaccatcaggaaagctacttgttcc

SEQ ID NO: 318919 - DNA, 33 bp, Homo sapien
tttctcacagtttctcccctttccccgcaggga

SEQ ID NO: 318920 - DNA, 33 bp, Homo sapien
tttctcacagtttctctcctttccccgcaggga

SEQ ID NO: 318921 - DNA, 33 bp, Homo sapien
gcagtgtcatagaagacagcttaatgcgtttac

SEQ ID NO: 318922 - DNA, 33 bp, Homo sapien
gcagtgtcatagaagagagcttaatgcgtttac

SEQ ID NO: 318923 - DNA, 33 bp, Homo sapien
tcacctttgtttctccaaccagaccgcatgggt

SEQ ID NO: 318924 - DNA, 33 bp, Homo sapien
tcacctttgtttctcctaccagaccgcatgggt

SEQ ID NO: 318925 - DNA, 33 bp, Homo sapien
gggcaagtatgcaagccgacaaaggagctgttg

SEQ ID NO: 318926 - DNA, 33 bp, Homo sapien
gggcaagtatgcaagctgacaaaggagctgttg

SEQ ID NO: 318927 - DNA, 33 bp, Homo sapien
ccatttcagtagataacaccaactgttctccag

SEQ ID NO: 318928 - DNA, 33 bp, Homo sapien
ccatttcagtagataataccaactgttctccag

SEQ ID NO: 318929 - DNA, 33 bp, Homo sapien
tgcctctcagtaccacaagtgctttatctggtg

SEQ ID NO: 318930 - DNA, 33 bp, Homo sapien
tgcctctcagtaccacgagtgctttatctggtg

SEQ ID NO: 318931 - DNA, 33 bp, Homo sapien
agccagagtggggccacgaatgaacactcagtt

SEQ ID NO: 318932 - DNA, 33 bp, Homo sapien
agccagagtggggccatgaatgaacactcagtt

SEQ ID NO: 318933 - DNA, 33 bp, Homo sapien
gactcagatattactccagtagtggcatttggt

SEQ ID NO: 318934 - DNA, 33 bp, Homo sapien
gactcagatattactctagtagtggcatttggt

SEQ ID NO: 318935 - DNA, 33 bp, Homo sapien
gccatccagccacgagaagaatgatgaaattag

SEQ ID NO: 318936 - DNA, 33 bp, Homo sapien
gccatccagccacgagcagaatgatgaaattag

SEQ ID NO: 318937 - DNA, 33 bp, Homo sapien
ttcttatcagcaaaacactgcccatgttgcaaa

SEQ ID NO: 318938 - DNA, 33 bp, Homo sapien
ttcttatcagcaaaacgctgcccatgttgcaaa

SEQ ID NO: 318939 - DNA, 33 bp, Homo sapien
ctctgagccagatccaagtgggacttagtgcat

SEQ ID NO: 318940 - DNA, 33 bp, Homo sapien
ctctgagccagatccaggtgggacttagtgcat

SEQ ID NO: 318941 - DNA, 33 bp, Homo sapien
cagggagatcaaggaagaattcaggcgaggatg

SEQ ID NO: 318942 - DNA, 33 bp, Homo sapien
cagggagatcaaggaataattcaggcgaggatg

SEQ ID NO: 318943 - DNA, 33 bp, Homo sapien
gtttcagtcatcaatacaagtcttgttcttggc

SEQ ID NO: 318944 - DNA, 33 bp, Homo sapien
gtttcagtcatcaatataagtcttgttcttggc

SEQ ID NO: 318945 - DNA, 33 bp, Homo sapien
gctgcatctgggagcagcaggaaagaacagcat

SEQ ID NO: 318946 - DNA, 33 bp, Homo sapien
gctgcatctgggagcatcaggaaagaacagcat

SEQ ID NO: 318947 - DNA, 33 bp, Homo sapien
ggctaatacagacatacgcagagtagaggtctg

SEQ ID NO: 318948 - DNA, 33 bp, Homo sapien
ggctaatacagacatatgcagagtagaggtctg

SEQ ID NO: 318949 - DNA, 33 bp, Homo sapien
agactttcatgcaaccactgaaaggcacctacg

SEQ ID NO: 318950 - DNA, 33 bp, Homo sapien
agactttcatgcaaccgctgaaaggcacctacg

SEQ ID NO: 318951 - DNA, 33 bp, Homo sapien
gatacttctggaacaactaaggcaatttgaata

SEQ ID NO: 318952 - DNA, 33 bp, Homo sapien
gatacttctggaacaattaaggcaatttgaata

SEQ ID NO: 318953 - DNA, 33 bp, Homo sapien
cgtggtgccaaagtaaaccatctagatgacctt

SEQ ID NO: 318954 - DNA, 33 bp, Homo sapien
cgtggtgccaaagtaagccatctagatgacctt

SEQ ID NO: 318955 - DNA, 33 bp, Homo sapien
caggatgtactaggaaaaagagcaattgtcatc

SEQ ID NO: 318956 - DNA, 33 bp, Homo sapien
caggatgtactaggaagaagagcaattgtcatc

SEQ ID NO: 318957 - DNA, 33 bp, Homo sapien
gcccatttccgtgcaacagaacgtgacaagtgc

SEQ ID NO: 318958 - DNA, 33 bp, Homo sapien
gcccatttccgtgcaatagaacgtgacaagtgc

SEQ ID NO: 318959 - DNA, 33 bp, Homo sapien
ctggcaagaagcgtgagctgggtagagtggggt

SEQ ID NO: 318960 - DNA, 33 bp, Homo sapien
ctggcaagaagcgtgatctgggtagagtggggt

SEQ ID NO: 318961 - DNA, 33 bp, Homo sapien
agcccgaggtccctgacgcagcaccttcccgtg

SEQ ID NO: 318962 - DNA, 33 bp, Homo sapien
agcccgaggtccctgatgcagcaccttcccgtg

SEQ ID NO: 318963 - DNA, 33 bp, Homo sapien
cagcttcctcatggccagatggtccagtactgc

SEQ ID NO: 318964 - DNA, 33 bp, Homo sapien
cagcttcctcatggccggatggtccagtactgc

SEQ ID NO: 318965 - DNA, 33 bp, Homo sapien
ttgttttcctgtgttcacctgctgtctgcttgt

SEQ ID NO: 318966 - DNA, 33 bp, Homo sapien
ttgttttcctgtgttcgcctgctgtctgcttgt

SEQ ID NO: 318967 - DNA, 33 bp, Homo sapien
taagtgaaatgaggaacccagagaaataagtga

SEQ ID NO: 318968 - DNA, 33 bp, Homo sapien
taagtgaaatgaggaatccagagaaataagtga

SEQ ID NO: 318969 - DNA, 33 bp, Homo sapien
ttcctcatttcacttaagctttggcctggtaac

SEQ ID NO: 318970 - DNA, 33 bp, Homo sapien
ttcctcatttcacttaggctttggcctggtaac

SEQ ID NO: 318971 - DNA, 33 bp, Homo sapien
taccacacatctacacagagtacacacacgagc

SEQ ID NO: 318972 - DNA, 33 bp, Homo sapien
taccacacatctacacggagtacacacacgagc

SEQ ID NO: 318973 - DNA, 33 bp, Homo sapien
cattatcaaagcactacgtgtaacagcaaaaga

SEQ ID NO: 318974 - DNA, 33 bp, Homo sapien
cattatcaaagcactatgtgtaacagcaaaaga

SEQ ID NO: 318975 - DNA, 33 bp, Homo sapien
aatcagacaagtaaaacggtaattgatgctgtg

SEQ ID NO: 318976 - DNA, 33 bp, Homo sapien
aatcagacaagtaaaatggtaattgatgctgtg

SEQ ID NO: 318977 - DNA, 33 bp, Homo sapien
tcctttgaaagcatcagccccaaatcccactgg

SEQ ID NO: 318978 - DNA, 33 bp, Homo sapien
tcctttgaaagcatcatccccaaatcccactgg

SEQ ID NO: 318979 - DNA, 33 bp, Homo sapien
atctgtcatagatgaacgaatgcaacactcaga

SEQ ID NO: 318980 - DNA, 33 bp, Homo sapien
atctgtcatagatgaatgaatgcaacactcaga

SEQ ID NO: 318981 - DNA, 33 bp, Homo sapien
ctgtgggaaggtcactcagagagaatatggtga

SEQ ID NO: 318982 - DNA, 33 bp, Homo sapien
ctgtgggaaggtcacttagagagaatatggtga

SEQ ID NO: 318983 - DNA, 33 bp, Homo sapien
tcaaatgaggaaatcaaaacctacagaggtaat

SEQ ID NO: 318984 - DNA, 33 bp, Homo sapien
tcaaatgaggaaatcagaacctacagaggtaat

SEQ ID NO: 318985 - DNA, 33 bp, Homo sapien
tgctccctgatgttgccgagtaggagctggtgg

SEQ ID NO: 318986 - DNA, 33 bp, Homo sapien
tgctccctgatgttgctgagtaggagctggtgg

SEQ ID NO: 318987 - DNA, 33 bp, Homo sapien
ttccttccccagatgccaggattgtttctttcc

SEQ ID NO: 318988 - DNA, 33 bp, Homo sapien
ttccttccccagatgctaggattgtttctttcc

SEQ ID NO: 318989 - DNA, 33 bp, Homo sapien
gaccggacagcgactccaccctgctacgcactc

SEQ ID NO: 318990 - DNA, 33 bp, Homo sapien
gaccggacagcgactctaccctgctacgcactc

SEQ ID NO: 318991 - DNA, 33 bp, Homo sapien
catatttgaattggaaacacaggtcttctagga

SEQ ID NO: 318992 - DNA, 33 bp, Homo sapien
catatttgaattggaagcacaggtcttctagga

SEQ ID NO: 318993 - DNA, 33 bp, Homo sapien
ctgaagaaatgccttacctaatggctaaatgcc

SEQ ID NO: 318994 - DNA, 33 bp, Homo sapien
ctgaagaaatgccttatctaatggctaaatgcc

SEQ ID NO: 318995 - DNA, 33 bp, Homo sapien
cagcaattgatgggaaaagactaatggccccca

SEQ ID NO: 318996 - DNA, 33 bp, Homo sapien
cagcaattgatgggaacagactaatggccccca

SEQ ID NO: 318997 - DNA, 33 bp, Homo sapien
gaaaggcatcgactacaagacggtgcccatcaa

SEQ ID NO: 318998 - DNA, 33 bp, Homo sapien
gaaaggcatcgactacgagacggtgcccatcaa

SEQ ID NO: 318999 - DNA, 33 bp, Homo sapien
agagggagttactcaaagtagaagactggctgt

SEQ ID NO: 319000 - DNA, 33 bp, Homo sapien
agagggagttactcaaggtagaagactggctgt

SEQ ID NO: 319001 - DNA, 33 bp, Homo sapien
atgtctgcgcagtcaaagcaatccatcttctct

SEQ ID NO: 319002 - DNA, 33 bp, Homo sapien
atgtctgcgcagtcaaggcaatccatcttctct

SEQ ID NO: 319003 - DNA, 33 bp, Homo sapien
gaagagggtaatatgaagcaccctgtaatctga

SEQ ID NO: 319004 - DNA, 33 bp, Homo sapien
gaagagggtaatatgaggcaccctgtaatctga

SEQ ID NO: 319005 - DNA, 33 bp, Homo sapien
tcagtgattccagtgacgatgaggatgaagaag

SEQ ID NO: 319006 - DNA, 33 bp, Homo sapien
tcagtgattccagtgatgatgaggatgaagaag

SEQ ID NO: 319007 - DNA, 33 bp, Homo sapien
aaaatgacttgtgaaaagaagtcaagccagtag

SEQ ID NO: 319008 - DNA, 33 bp, Homo sapien
aaaatgacttgtgaaaggaagtcaagccagtag

SEQ ID NO: 319009 - DNA, 33 bp, Homo sapien
aactctggttaaaggactattcgagtggcagat

SEQ ID NO: 319010 - DNA, 33 bp, Homo sapien
aactctggttaaaggagtattcgagtggcagat

SEQ ID NO: 319011 - DNA, 33 bp, Homo sapien
ataatcattctccaaaaaataatgaagaccaag

SEQ ID NO: 319012 - DNA, 33 bp, Homo sapien
ataatcattctccaaataataatgaagaccaag

SEQ ID NO: 319013 - DNA, 33 bp, Homo sapien
tacacacgaatgtgtacggaacacttttaattt

SEQ ID NO: 319014 - DNA, 33 bp, Homo sapien
tacacacgaatgtgtagggaacacttttaattt

SEQ ID NO: 319015 - DNA, 33 bp, Homo sapien
tacctcctgggaatacaatctgtgaaccttagg

SEQ ID NO: 319016 - DNA, 33 bp, Homo sapien
tacctcctgggaatacgatctgtgaaccttagg

SEQ ID NO: 319017 - DNA, 33 bp, Homo sapien
ttcggggcattggaaaagagaatcagggtactt

SEQ ID NO: 319018 - DNA, 33 bp, Homo sapien
ttcggggcattggaaaggagaatcagggtactt

SEQ ID NO: 319019 - DNA, 33 bp, Homo sapien
tgtttttgctgagcaaactgaccaagcataaga

SEQ ID NO: 319020 - DNA, 33 bp, Homo sapien
tgtttttgctgagcaatctgaccaagcataaga

SEQ ID NO: 319021 - DNA, 33 bp, Homo sapien
tgattgattggaatacaaaagatgaggaagaag

SEQ ID NO: 319022 - DNA, 33 bp, Homo sapien
tgattgattggaatacgaaagatgaggaagaag

SEQ ID NO: 319023 - DNA, 33 bp, Homo sapien
ctgctgaaagcctgcgaatctccactcggaggc

SEQ ID NO: 319024 - DNA, 33 bp, Homo sapien
ctgctgaaagcctgcggatctccactcggaggc

SEQ ID NO: 319025 - DNA, 33 bp, Homo sapien
aagcaacataagtcacactctatttaagccttc

SEQ ID NO: 319026 - DNA, 33 bp, Homo sapien
aagcaacataagtcactctctatttaagccttc

SEQ ID NO: 319027 - DNA, 33 bp, Homo sapien
aggaagatggacaagaatctcactgctgagaat

SEQ ID NO: 319028 - DNA, 33 bp, Homo sapien
aggaagatggacaagagtctcactgctgagaat

SEQ ID NO: 319029 - DNA, 33 bp, Homo sapien
ttgctcaggatcttaggatcattacaagtcttc

SEQ ID NO: 319030 - DNA, 33 bp, Homo sapien
ttgctcaggatcttagtatcattacaagtcttc

SEQ ID NO: 319031 - DNA, 33 bp, Homo sapien
gtagtttaaaatccataaaatgatcatgaatcc

SEQ ID NO: 319032 - DNA, 33 bp, Homo sapien
gtagtttaaaatccatcaaatgatcatgaatcc

SEQ ID NO: 319033 - DNA, 33 bp, Homo sapien
aaattcacgccattcacgcgatgtctttcttta

SEQ ID NO: 319034 - DNA, 33 bp, Homo sapien
aaattcacgccattcatgcgatgtctttcttta

SEQ ID NO: 319035 - DNA, 33 bp, Homo sapien
tacgaagattggattacgatatgtaatttctgt

SEQ ID NO: 319036 - DNA, 33 bp, Homo sapien
tacgaagattggattatgatatgtaatttctgt

SEQ ID NO: 319037 - DNA, 33 bp, Homo sapien
aaaatttaatcttaacacctggccattgaattc

SEQ ID NO: 319038 - DNA, 33 bp, Homo sapien
aaaatttaatcttaacgcctggccattgaattc

SEQ ID NO: 319039 - DNA, 33 bp, Homo sapien
cattgccaattctaccaaaattgatctgtacat

SEQ ID NO: 319040 - DNA, 33 bp, Homo sapien
cattgccaattctacccaaattgatctgtacat

SEQ ID NO: 319041 - DNA, 33 bp, Homo sapien
gaatgaaatagccagccaagagtcaacccctga

SEQ ID NO: 319042 - DNA, 33 bp, Homo sapien
gaatgaaatagccagctaagagtcaacccctga

SEQ ID NO: 319043 - DNA, 33 bp, Homo sapien
ttgatagattcttataacatttgcctgccttgc

SEQ ID NO: 319044 - DNA, 33 bp, Homo sapien
ttgatagattcttatagcatttgcctgccttgc

SEQ ID NO: 319045 - DNA, 33 bp, Homo sapien
gctatcaaaagcctcaacaggactaccatgaca

SEQ ID NO: 319046 - DNA, 33 bp, Homo sapien
gctatcaaaagcctcagcaggactaccatgaca

SEQ ID NO: 319047 - DNA, 33 bp, Homo sapien
taagtgtaggtaattaagaggcacagagcctgc

SEQ ID NO: 319048 - DNA, 33 bp, Homo sapien
taagtgtaggtaattacgaggcacagagcctgc

SEQ ID NO: 319049 - DNA, 33 bp, Homo sapien
ctcctgcagctacagcgatttccttcgtctgtt

SEQ ID NO: 319050 - DNA, 33 bp, Homo sapien
ctcctgcagctacagctatttccttcgtctgtt

SEQ ID NO: 319051 - DNA, 33 bp, Homo sapien
tttggtaagccatctgaacctaaaaagcaaatg

SEQ ID NO: 319052 - DNA, 33 bp, Homo sapien
tttggtaagccatctggacctaaaaagcaaatg

SEQ ID NO: 319053 - DNA, 33 bp, Homo sapien
atgtatcatctcgaacactctcacaagacacct

SEQ ID NO: 319054 - DNA, 33 bp, Homo sapien
atgtatcatctcgaacgctctcacaagacacct

SEQ ID NO: 319055 - DNA, 33 bp, Homo sapien
gcattgctcgaataaacgtaatttcatagccga

SEQ ID NO: 319056 - DNA, 33 bp, Homo sapien
gcattgctcgaataaatgtaatttcatagccga

SEQ ID NO: 319057 - DNA, 33 bp, Homo sapien
acagttgagacttcaacatttcaaccccataga

SEQ ID NO: 319058 - DNA, 33 bp, Homo sapien
acagttgagacttcaatatttcaaccccataga

SEQ ID NO: 319059 - DNA, 33 bp, Homo sapien
ctgtgagcctacaggacgagcaccagggccgca

SEQ ID NO: 319060 - DNA, 33 bp, Homo sapien
ctgtgagcctacaggatgagcaccagggccgca

SEQ ID NO: 319061 - DNA, 33 bp, Homo sapien
ctctgtgtcaacacagcataaagaggaaatgat

SEQ ID NO: 319062 - DNA, 33 bp, Homo sapien
ctctgtgtcaacacagtataaagaggaaatgat

SEQ ID NO: 319063 - DNA, 33 bp, Homo sapien
agtgagttaagacatacacagtgccagcatgga

SEQ ID NO: 319064 - DNA, 33 bp, Homo sapien
agtgagttaagacatatacagtgccagcatgga

SEQ ID NO: 319065 - DNA, 33 bp, Homo sapien
gtttgtgtagcagctacagtttacaaaacactt

SEQ ID NO: 319066 - DNA, 33 bp, Homo sapien
gtttgtgtagcagctatagtttacaaaacactt

SEQ ID NO: 319067 - DNA, 33 bp, Homo sapien
tttgtttctggttatgaatagtgactgtattca

SEQ ID NO: 319068 - DNA, 33 bp, Homo sapien
tttgtttctggttatgcatagtgactgtattca

SEQ ID NO: 319069 - DNA, 33 bp, Homo sapien
tgagtctcctcgtgcacagaagcattcactcat

SEQ ID NO: 319070 - DNA, 33 bp, Homo sapien
tgagtctcctcgtgcatagaagcattcactcat

SEQ ID NO: 319071 - DNA, 33 bp, Homo sapien
gtaagttcattgcttacaagtttgtgactttta

SEQ ID NO: 319072 - DNA, 33 bp, Homo sapien
gtaagttcattgcttataagtttgtgactttta

SEQ ID NO: 319073 - DNA, 33 bp, Homo sapien
ctacatggtaagcagacaataaacggccactgt

SEQ ID NO: 319074 - DNA, 33 bp, Homo sapien
ctacatggtaagcagataataaacggccactgt

SEQ ID NO: 319075 - DNA, 33 bp, Homo sapien
tagagtacctctaccaacacatcacccagtaat

SEQ ID NO: 319076 - DNA, 33 bp, Homo sapien
tagagtacctctaccatcacatcacccagtaat

SEQ ID NO: 319077 - DNA, 33 bp, Homo sapien
atatggacttatgccagaattaaatgttagcaa

SEQ ID NO: 319078 - DNA, 33 bp, Homo sapien
atatggacttatgccataattaaatgttagcaa

SEQ ID NO: 319079 - DNA, 33 bp, Homo sapien
tccggcaagctcttagaagggtatcgggcactt

SEQ ID NO: 319080 - DNA, 33 bp, Homo sapien
tccggcaagctcttagtagggtatcgggcactt

SEQ ID NO: 319081 - DNA, 33 bp, Homo sapien
tttccattagtggacacggattagtgatgtgta

SEQ ID NO: 319082 - DNA, 33 bp, Homo sapien
tttccattagtggacatggattagtgatgtgta

SEQ ID NO: 319083 - DNA, 33 bp, Homo sapien
tttaggtgactaagaaatggctaagagctatca

SEQ ID NO: 319084 - DNA, 33 bp, Homo sapien
tttaggtgactaagaagtggctaagagctatca

SEQ ID NO: 319085 - DNA, 33 bp, Homo sapien
atatttgtgtccaaggccaaggtgacctgctat

SEQ ID NO: 319086 - DNA, 33 bp, Homo sapien
atatttgtgtccaagggcaaggtgacctgctat

SEQ ID NO: 319087 - DNA, 33 bp, Homo sapien
cttaatagataagccaatccttacaatatagtg

SEQ ID NO: 319088 - DNA, 33 bp, Homo sapien
cttaatagataagccagtccttacaatatagtg

SEQ ID NO: 319089 - DNA, 33 bp, Homo sapien
atctctgactggttaaagaagagacttaataga

SEQ ID NO: 319090 - DNA, 33 bp, Homo sapien
atctctgactggttaacgaagagacttaataga

SEQ ID NO: 319091 - DNA, 33 bp, Homo sapien
gtggtggcaggcgcctcaaatctctgctacaca

SEQ ID NO: 319092 - DNA, 33 bp, Homo sapien
gtggtggcaggcgcctgaaatctctgctacaca

SEQ ID NO: 319093 - DNA, 33 bp, Homo sapien
actggtaaatttgtaccgcaattttatattggt

SEQ ID NO: 319094 - DNA, 33 bp, Homo sapien
actggtaaatttgtactgcaattttatattggt

SEQ ID NO: 319095 - DNA, 33 bp, Homo sapien
tagcttggtcaaatatcagtgacaccccttctc

SEQ ID NO: 319096 - DNA, 33 bp, Homo sapien
tagcttggtcaaatattagtgacaccccttctc

SEQ ID NO: 319097 - DNA, 33 bp, Homo sapien
tctcatttctttataacctttctaaacactgca

SEQ ID NO: 319098 - DNA, 33 bp, Homo sapien
tctcatttctttataatctttctaaacactgca

SEQ ID NO: 319099 - DNA, 33 bp, Homo sapien
aggttaactttaaacactctaagaccacagtta

SEQ ID NO: 319100 - DNA, 33 bp, Homo sapien
aggttaactttaaacattctaagaccacagtta

SEQ ID NO: 319101 - DNA, 33 bp, Homo sapien
caagacagttctctccacaaagagtgatagccc

SEQ ID NO: 319102 - DNA, 33 bp, Homo sapien
caagacagttctctccgcaaagagtgatagccc

SEQ ID NO: 319103 - DNA, 33 bp, Homo sapien
ttgattttcaaaacacaatttctcttctgtcta

SEQ ID NO: 319104 - DNA, 33 bp, Homo sapien
ttgattttcaaaacacgatttctcttctgtcta

SEQ ID NO: 319105 - DNA, 33 bp, Homo sapien
tatgcatctacactagaagaggtccctgcagat

SEQ ID NO: 319106 - DNA, 33 bp, Homo sapien
tatgcatctacactaggagaggtccctgcagat

SEQ ID NO: 319107 - DNA, 33 bp, Homo sapien
aaaacttcagctaccagcggtcataactgccat

SEQ ID NO: 319108 - DNA, 33 bp, Homo sapien
aaaacttcagctaccatcggtcataactgccat

SEQ ID NO: 319109 - DNA, 33 bp, Homo sapien
catcttgtactccatccgagccccagcacaagt

SEQ ID NO: 319110 - DNA, 33 bp, Homo sapien
catcttgtactccatctgagccccagcacaagt

SEQ ID NO: 319111 - DNA, 33 bp, Homo sapien
gcctggaccacacttacataaacatcttagttt

SEQ ID NO: 319112 - DNA, 33 bp, Homo sapien
gcctggaccacacttatataaacatcttagttt

SEQ ID NO: 319113 - DNA, 33 bp, Homo sapien
gaacctgtgaaaagaaatgactttggaatgtgg

SEQ ID NO: 319114 - DNA, 33 bp, Homo sapien
gaacctgtgaaaagaagtgactttggaatgtgg

SEQ ID NO: 319115 - DNA, 33 bp, Homo sapien
gaaatttttttccgacaagactataagcacacc

SEQ ID NO: 319116 - DNA, 33 bp, Homo sapien
gaaatttttttccgacgagactataagcacacc

SEQ ID NO: 319117 - DNA, 33 bp, Homo sapien
taaaattctctcgtgcaccacaggaagctcttg

SEQ ID NO: 319118 - DNA, 33 bp, Homo sapien
taaaattctctcgtgccccacaggaagctcttg

SEQ ID NO: 319119 - DNA, 33 bp, Homo sapien
tgtttaatggtccagaccgaggaggaggcggag

SEQ ID NO: 319120 - DNA, 33 bp, Homo sapien
tgtttaatggtccagatcgaggaggaggcggag

SEQ ID NO: 319121 - DNA, 33 bp, Homo sapien
tttgttaattctccaactctatgaggtatatcc

SEQ ID NO: 319122 - DNA, 33 bp, Homo sapien
tttgttaattctccaagtctatgaggtatatcc

SEQ ID NO: 319123 - DNA, 33 bp, Homo sapien
gaactcccattgcaaacgctttgttgggtacag

SEQ ID NO: 319124 - DNA, 33 bp, Homo sapien
gaactcccattgcaaatgctttgttgggtacag

SEQ ID NO: 319125 - DNA, 33 bp, Homo sapien
cacaatggatgtgttacagtctgtatgaattaa

SEQ ID NO: 319126 - DNA, 33 bp, Homo sapien
cacaatggatgtgttatagtctgtatgaattaa

SEQ ID NO: 319127 - DNA, 33 bp, Homo sapien
gagcgctgcggcctgaaccacccaggagctcga

SEQ ID NO: 319128 - DNA, 33 bp, Homo sapien
gagcgctgcggcctgatccacccaggagctcga

SEQ ID NO: 319129 - DNA, 33 bp, Homo sapien
agaaatgtaatttaacccattgtgagtgcttgg

SEQ ID NO: 319130 - DNA, 33 bp, Homo sapien
agaaatgtaatttaactcattgtgagtgcttgg

SEQ ID NO: 319131 - DNA, 33 bp, Homo sapien
actaagaccttgtagcagcattgtgatttcaac

SEQ ID NO: 319132 - DNA, 33 bp, Homo sapien
actaagaccttgtagcggcattgtgatttcaac

SEQ ID NO: 319133 - DNA, 33 bp, Homo sapien
tgctttgacgaaacccaatgcgtggccttctgg

SEQ ID NO: 319134 - DNA, 33 bp, Homo sapien
tgctttgacgaaacccgatgcgtggccttctgg

SEQ ID NO: 319135 - DNA, 33 bp, Homo sapien
ttcaaagtggaaatacaaggtctctttgttctt

SEQ ID NO: 319136 - DNA, 33 bp, Homo sapien
ttcaaagtggaaatacgaggtctctttgttctt

SEQ ID NO: 319137 - DNA, 33 bp, Homo sapien
tgcaagaatgttgtataagtgtgaaatcttcac

SEQ ID NO: 319138 - DNA, 33 bp, Homo sapien
tgcaagaatgttgtatgagtgtgaaatcttcac

SEQ ID NO: 319139 - DNA, 33 bp, Homo sapien
agggtggagatgcaacaacattgactagtgatt

SEQ ID NO: 319140 - DNA, 33 bp, Homo sapien
agggtggagatgcaacgacattgactagtgatt

SEQ ID NO: 319141 - DNA, 33 bp, Homo sapien
ttacattcacctaacacagtgactcacttcaca

SEQ ID NO: 319142 - DNA, 33 bp, Homo sapien
ttacattcacctaacatagtgactcacttcaca

SEQ ID NO: 319143 - DNA, 33 bp, Homo sapien
actctttttgcctttgaaaggtcacgtagtgta

SEQ ID NO: 319144 - DNA, 33 bp, Homo sapien
actctttttgcctttggaaggtcacgtagtgta

SEQ ID NO: 319145 - DNA, 33 bp, Homo sapien
cttcctgaaacgtgtactaaaatgatcagaaaa

SEQ ID NO: 319146 - DNA, 33 bp, Homo sapien
cttcctgaaacgtgtagtaaaatgatcagaaaa

SEQ ID NO: 319147 - DNA, 33 bp, Homo sapien; identical to SEQ ID NO: 319145

SEQ ID NO: 319148 - DNA, 33 bp, Homo sapien; identical to SEQ ID NO: 319146

SEQ ID NO: 319149 - DNA, 33 bp, Homo sapien
tcttccagtaatttgcaaaaatgacgaagacaa

SEQ ID NO: 319150 - DNA, 33 bp, Homo sapien
tcttccagtaatttgcgaaaatgacgaagacaa

SEQ ID NO: 319151 - DNA, 33 bp, Homo sapien
tttggtcatgcttcaacttaatgaacaggtagg

SEQ ID NO: 319152 - DNA, 33 bp, Homo sapien
tttggtcatgcttcaagttaatgaacaggtagg

SEQ ID NO: 319153 - DNA, 33 bp, Homo sapien
gaggtgtacttttaccacttccaattctaaagt

SEQ ID NO: 319154 - DNA, 33 bp, Homo sapien
gaggtgtacttttaccgcttccaattctaaagt

SEQ ID NO: 319155 - DNA, 33 bp, Homo sapien
agaccaaatacgctgacagatgagcaaagatat

SEQ ID NO: 319156 - DNA, 33 bp, Homo sapien
agaccaaatacgctgatagatgagcaaagatat

SEQ ID NO: 319157 - DNA, 33 bp, Homo sapien
agctgctgaattgcaaaccagtacaagctttgc

SEQ ID NO: 319158 - DNA, 33 bp, Homo sapien
agctgctgaattgcaagccagtacaagctttgc

SEQ ID NO: 319159 - DNA, 33 bp, Homo sapien
tcagctggagcaatgacgggcaatggagctgca

SEQ ID NO: 319160 - DNA, 33 bp, Homo sapien
tcagctggagcaatgatgggcaatggagctgca

SEQ ID NO: 319161 - DNA, 33 bp, Homo sapien
gcttttacttttagcaaacaggattcccagtgt

SEQ ID NO: 319162 - DNA, 33 bp, Homo sapien
gcttttacttttagcagacaggattcccagtgt

SEQ ID NO: 319163 - DNA, 33 bp, Homo sapien
taagccactgtgcgtaaaactagtccctgtctt

SEQ ID NO: 319164 - DNA, 33 bp, Homo sapien
taagccactgtgcgtagaactagtccctgtctt

SEQ ID NO: 319165 - DNA, 33 bp, Homo sapien
tgtttttgagccattacgcttgtggtattttgt

SEQ ID NO: 319166 - DNA, 33 bp, Homo sapien
tgtttttgagccattatgcttgtggtattttgt

SEQ ID NO: 319167 - DNA, 33 bp, Homo sapien
cataattcatctttaactgtaggactgaggtct

SEQ ID NO: 319168 - DNA, 33 bp, Homo sapien
cataattcatctttaattgtaggactgaggtct

SEQ ID NO: 319169 - DNA, 33 bp, Homo sapien
acactggtgaaagcaaagtagttcatagttttt

SEQ ID NO: 319170 - DNA, 33 bp, Homo sapien
acactggtgaaagcaacgtagttcatagttttt

SEQ ID NO: 319171 - DNA, 33 bp, Homo sapien
gctcttgttacttttaaaatccattcttggtta

SEQ ID NO: 319172 - DNA, 33 bp, Homo sapien
gctcttgttacttttagaatccattcttggtta

SEQ ID NO: 319173 - DNA, 33 bp, Homo sapien
aacagatcattaagacagtacagcagatttaac

SEQ ID NO: 319174 - DNA, 33 bp, Homo sapien
aacagatcattaagacggtacagcagatttaac

SEQ ID NO: 319175 - DNA, 33 bp, Homo sapien
ctcatcctatttataacgcttctcttttctgcc

SEQ ID NO: 319176 - DNA, 33 bp, Homo sapien
ctcatcctatttataatgcttctcttttctgcc

SEQ ID NO: 319177 - DNA, 33 bp, Homo sapien
tggatttcagtattcccatcaggagagttgaag

SEQ ID NO: 319178 - DNA, 33 bp, Homo sapien
tggatttcagtattccgatcaggagagttgaag

SEQ ID NO: 319179 - DNA, 33 bp, Homo sapien
aagaaatatggaaatacggaagcatggccaggt

SEQ ID NO: 319180 - DNA, 33 bp, Homo sapien
aagaaatatggaaatatggaagcatggccaggt

SEQ ID NO: 319181 - DNA, 33 bp, Homo sapien
tttaacatttttaccactatgctccttacttta

SEQ ID NO: 319182 - DNA, 33 bp, Homo sapien
tttaacatttttaccattatgctccttacttta

SEQ ID NO: 319183 - DNA, 33 bp, Homo sapien
ccagtttgaggttacaaatgcgtaatgctgctt

SEQ ID NO: 319184 - DNA, 33 bp, Homo sapien
ccagtttgaggttacagatgcgtaatgctgctt

SEQ ID NO: 319185 - DNA, 33 bp, Homo sapien
ttatctcttttacttacaggctccccctccatc

SEQ ID NO: 319186 - DNA, 33 bp, Homo sapien
ttatctcttttacttataggctccccctccatc

SEQ ID NO: 319187 - DNA, 33 bp, Homo sapien
gccagaccctatgagactacagaaaaattaaaa

SEQ ID NO: 319188 - DNA, 33 bp, Homo sapien
gccagaccctatgagattacagaaaaattaaaa

SEQ ID NO: 319189 - DNA, 33 bp, Homo sapien
agaaaatgactgcatagcagaaagtaagaatat

SEQ ID NO: 319190 - DNA, 33 bp, Homo sapien
agaaaatgactgcatatcagaaagtaagaatat

SEQ ID NO: 319191 - DNA, 33 bp, Homo sapien
cacttgaggatgaccaagataacttgagtggca

SEQ ID NO: 319192 - DNA, 33 bp, Homo sapien
cacttgaggatgaccatgataacttgagtggca

SEQ ID NO: 319193 - DNA, 33 bp, Homo sapien
agcttcacgccctttccctgttaactgaccctg

SEQ ID NO: 319194 - DNA, 33 bp, Homo sapien
agcttcacgccctttcgctgttaactgaccctg

SEQ ID NO: 319195 - DNA, 33 bp, Homo sapien
cagggacctgtactgcaaggtttgggcagagta

SEQ ID NO: 319196 - DNA, 33 bp, Homo sapien
cagggacctgtactgcgaggtttgggcagagta

SEQ ID NO: 319197 - DNA, 33 bp, Homo sapien
tccacataggaaaactcagaagaaaagcatcac

SEQ ID NO: 319198 - DNA, 33 bp, Homo sapien
tccacataggaaaactgagaagaaaagcatcac

SEQ ID NO: 319199 - DNA, 33 bp, Homo sapien
caaagcttctcatttccattcttataaacggaa

SEQ ID NO: 319200 - DNA, 33 bp, Homo sapien
caaagcttctcatttcgattcttataaacggaa

SEQ ID NO: 319201 - DNA, 33 bp, Homo sapien
aatttaatgatgcaataactttaagcattctca

SEQ ID NO: 319202 - DNA, 33 bp, Homo sapien
aatttaatgatgcaatgactttaagcattctca

SEQ ID NO: 319203 - DNA, 33 bp, Homo sapien
atatggaaaaataaaacgctggtattggccatg

SEQ ID NO: 319204 - DNA, 33 bp, Homo sapien
atatggaaaaataaaatgctggtattggccatg

SEQ ID NO: 319205 - DNA, 33 bp, Homo sapien
attttatgtctgtcatcaaggtgggaatgggac

SEQ ID NO: 319206 - DNA, 33 bp, Homo sapien
attttatgtctgtcattaaggtgggaatgggac

SEQ ID NO: 319207 - DNA, 33 bp, Homo sapien
gctattccagcaattcccattttggagctgtgg

SEQ ID NO: 319208 - DNA, 33 bp, Homo sapien
gctattccagcaattcgcattttggagctgtgg

SEQ ID NO: 319209 - DNA, 33 bp, Homo sapien
tttacttagacccacagtgatttcctgaaaagt

SEQ ID NO: 319210 - DNA, 33 bp, Homo sapien
tttacttagacccacattgatttcctgaaaagt

SEQ ID NO: 319211 - DNA, 33 bp, Homo sapien
ggaattacaagcatcaataatgatttagggaag

SEQ ID NO: 319212 - DNA, 33 bp, Homo sapien
ggaattacaagcatcagtaatgatttagggaag

SEQ ID NO: 319213 - DNA, 33 bp, Homo sapien
tataaatcaataaccaagaaatctctggaaaat

SEQ ID NO: 319214 - DNA, 33 bp, Homo sapien
tataaatcaataaccatgaaatctctggaaaat

SEQ ID NO: 319215 - DNA, 33 bp, Homo sapien
caggcccacactgtccgcaaggtctcttttcta

SEQ ID NO: 319216 - DNA, 33 bp, Homo sapien
caggcccacactgtcctcaaggtctcttttcta

SEQ ID NO: 319217 - DNA, 33 bp, Homo sapien
gcactctccttgcataacattggctcaggcagg

SEQ ID NO: 319218 - DNA, 33 bp, Homo sapien
gcactctccttgcatagcattggctcaggcagg

SEQ ID NO: 319219 - DNA, 33 bp, Homo sapien
tcttcctcttcctgatcagtacccagcactcta

SEQ ID NO: 319220 - DNA, 33 bp, Homo sapien
tcttcctcttcctgatgagtacccagcactcta

SEQ ID NO: 319221 - DNA, 33 bp, Homo sapien
attgcaattttatggccgaaatctctctcataa

SEQ ID NO: 319222 - DNA, 33 bp, Homo sapien
attgcaattttatggctgaaatctctctcataa

SEQ ID NO: 319223 - DNA, 33 bp, Homo sapien
tcgcaacaactcgacacgtaacaagcacagctg

SEQ ID NO: 319224 - DNA, 33 bp, Homo sapien
tcgcaacaactcgacatgtaacaagcacagctg

SEQ ID NO: 319225 - DNA, 33 bp, Homo sapien
aagtcaaatcagctaacagcctgtgtgttcttg

SEQ ID NO: 319226 - DNA, 33 bp, Homo sapien
aagtcaaatcagctaatagcctgtgtgttcttg

SEQ ID NO: 319227 - DNA, 33 bp, Homo sapien
cctctcccaggactgccacgaggaagaacagac

SEQ ID NO: 319228 - DNA, 33 bp, Homo sapien
cctctcccaggactgcgacgaggaagaacagac

SEQ ID NO: 319229 - DNA, 33 bp, Homo sapien
gtgcctgcatgtaaccaggcagtgtagcctgac

SEQ ID NO: 319230 - DNA, 33 bp, Homo sapien
gtgcctgcatgtaaccgggcagtgtagcctgac

SEQ ID NO: 319231 - DNA, 33 bp, Homo sapien
aatggaattcaggttacatttcccctgtcctca

SEQ ID NO: 319232 - DNA, 33 bp, Homo sapien
aatggaattcaggttagatttcccctgtcctca

SEQ ID NO: 319233 - DNA, 33 bp, Homo sapien
ctggtgtagtgacttacgcagcgagaagtgaca

SEQ ID NO: 319234 - DNA, 33 bp, Homo sapien
ctggtgtagtgacttatgcagcgagaagtgaca

SEQ ID NO: 319235 - DNA, 33 bp, Homo sapien
cgtcgtgtggtttctccagaagatcctgacttc

SEQ ID NO: 319236 - DNA, 33 bp, Homo sapien
cgtcgtgtggtttctctagaagatcctgacttc

SEQ ID NO: 319237 - DNA, 33 bp, Homo sapien
ggggctctgatggatacagtgttctcaggcccc

SEQ ID NO: 319238 - DNA, 33 bp, Homo sapien
ggggctctgatggatatagtgttctcaggcccc

SEQ ID NO: 319239 - DNA, 33 bp, Homo sapien
ctctcctgacagagaaacgtaggcctttcctca

SEQ ID NO: 319240 - DNA, 33 bp, Homo sapien
ctctcctgacagagaagcgtaggcctttcctca

SEQ ID NO: 319241 - DNA, 33 bp, Homo sapien
taggaatgacaatccaagaaaggtattaagcat

SEQ ID NO: 319242 - DNA, 33 bp, Homo sapien
taggaatgacaatccaggaaaggtattaagcat

SEQ ID NO: 319243 - DNA, 33 bp, Homo sapien
tgtcccctagaaatcactcttcaagccaaaaat

SEQ ID NO: 319244 - DNA, 33 bp, Homo sapien
tgtcccctagaaatcattcttcaagccaaaaat

SEQ ID NO: 319245 - DNA, 33 bp, Homo sapien
ggcgagccaggaagctcagatagcagagtgaaa

SEQ ID NO: 319246 - DNA, 33 bp, Homo sapien
ggcgagccaggaagctgagatagcagagtgaaa

SEQ ID NO: 319247 - DNA, 33 bp, Homo sapien
ttgaaggtaggtgggacgatgcaatgcagggta

SEQ ID NO: 319248 - DNA, 33 bp, Homo sapien
ttgaaggtaggtgggatgatgcaatgcagggta

SEQ ID NO: 319249 - DNA, 33 bp, Homo sapien
aaaagaaatgggacagaaagttgtaaggccaga

SEQ ID NO: 319250 - DNA, 33 bp, Homo sapien
aaaagaaatgggacaggaagttgtaaggccaga

SEQ ID NO: 319251 - DNA, 33 bp, Homo sapien
ttcacagtgtttctcgaagatgatagtacacat

SEQ ID NO: 319252 - DNA, 33 bp, Homo sapien
ttcacagtgtttctcgcagatgatagtacacat

SEQ ID NO: 319253 - DNA, 33 bp, Homo sapien
gctctagacggttcaccggaattcacaacttcc

SEQ ID NO: 319254 - DNA, 33 bp, Homo sapien
gctctagacggttcactggaattcacaacttcc

SEQ ID NO: 319255 - DNA, 33 bp, Homo sapien
aggaggcctcttcaaaacggagtgaggctgata

SEQ ID NO: 319256 - DNA, 33 bp, Homo sapien
aggaggcctcttcaaagcggagtgaggctgata

SEQ ID NO: 319257 - DNA, 33 bp, Homo sapien
atcttggactaacaaacgctgaggtggagtctg

SEQ ID NO: 319258 - DNA, 33 bp, Homo sapien
atcttggactaacaaatgctgaggtggagtctg

SEQ ID NO: 319259 - DNA, 33 bp, Homo sapien
gatcttaggcaagtaacccaacctctctgggcc

SEQ ID NO: 319260 - DNA, 33 bp, Homo sapien
gatcttaggcaagtaatccaacctctctgggcc

SEQ ID NO: 319261 - DNA, 33 bp, Homo sapien
tggattctcatgtacaatagagtctgactccat

SEQ ID NO: 319262 - DNA, 33 bp, Homo sapien
tggattctcatgtacagtagagtctgactccat

SEQ ID NO: 319263 - DNA, 33 bp, Homo sapien
tgtgtctactcttgcacgtaacccatgcccaca

SEQ ID NO: 319264 - DNA, 33 bp, Homo sapien
tgtgtctactcttgcaggtaacccatgcccaca

SEQ ID NO: 319265 - DNA, 33 bp, Homo sapien
cagaaggaagctcctcacatctaaaagcatccc

SEQ ID NO: 319266 - DNA, 33 bp, Homo sapien
cagaaggaagctcctcgcatctaaaagcatccc

SEQ ID NO: 319267 - DNA, 33 bp, Homo sapien
ggctctgcatgttaagcctgttcttgcattacc

SEQ ID NO: 319268 - DNA, 33 bp, Homo sapien
ggctctgcatgttaagtctgttcttgcattacc

SEQ ID NO: 319269 - DNA, 33 bp, Homo sapien
gggcctgtatagcccaaagctcacccagccagc

SEQ ID NO: 319270 - DNA, 33 bp, Homo sapien
gggcctgtatagcccagagctcacccagccagc

SEQ ID NO: 319271 - DNA, 33 bp, Homo sapien
cagattattctggatacaaactactacaaatca

SEQ ID NO: 319272 - DNA, 33 bp, Homo sapien
cagattattctggatataaactactacaaatca

SEQ ID NO: 319273 - DNA, 33 bp, Homo sapien
tatatttttgtcaaatcatgcctgtgttcaaat

SEQ ID NO: 319274 - DNA, 33 bp, Homo sapien
tatatttttgtcaaatgatgcctgtgttcaaat

SEQ ID NO: 319275 - DNA, 33 bp, Homo sapien
ttcagtatggctcctaagaaccagccagcctcg

SEQ ID NO: 319276 - DNA, 33 bp, Homo sapien
ttcagtatggctcctacgaaccagccagcctcg

SEQ ID NO: 319277 - DNA, 33 bp, Homo sapien
aaatgatggcataaccagggacagagagagaga

SEQ ID NO: 319278 - DNA, 33 bp, Homo sapien
aaatgatggcataaccggggacagagagagaga

SEQ ID NO: 319279 - DNA, 33 bp, Homo sapien
tctcactcactcatacactcagtacgcacaagt

SEQ ID NO: 319280 - DNA, 33 bp, Homo sapien
tctcactcactcatacgctcagtacgcacaagt

SEQ ID NO: 319281 - DNA, 33 bp, Homo sapien
ggttattaaacactgaaggtcttagtctgctca

SEQ ID NO: 319282 - DNA, 33 bp, Homo sapien
ggttattaaacactgagggtcttagtctgctca

SEQ ID NO: 319283 - DNA, 33 bp, Homo sapien
ttaaacagactaaagccagcatttggggatatg

SEQ ID NO: 319284 - DNA, 33 bp, Homo sapien
ttaaacagactaaagcgagcatttggggatatg

SEQ ID NO: 319285 - DNA, 33 bp, Homo sapien
gaacaaagaaataaacagaggagaaaggacagc

SEQ ID NO: 319286 - DNA, 33 bp, Homo sapien
gaacaaagaaataaacggaggagaaaggacagc

SEQ ID NO: 319287 - DNA, 33 bp, Homo sapien
taatggaaaaaggtgacgtgggcagagtatgca

SEQ ID NO: 319288 - DNA, 33 bp, Homo sapien
taatggaaaaaggtgatgtgggcagagtatgca

SEQ ID NO: 319289 - DNA, 33 bp, Homo sapien
tcccgacctcatgtaacccgacctcatgtgatc

SEQ ID NO: 319290 - DNA, 33 bp, Homo sapien
tcccgacctcatgtaatccgacctcatgtgatc

SEQ ID NO: 319291 - DNA, 33 bp, Homo sapien
cctccctcattgacaccgtacaaggttctgccc

SEQ ID NO: 319292 - DNA, 33 bp, Homo sapien
cctccctcattgacactgtacaaggttctgccc

SEQ ID NO: 319293 - DNA, 33 bp, Homo sapien
taacagcttatgtgtagcaattcatccaattac

SEQ ID NO: 319294 - DNA, 33 bp, Homo sapien
taacagcttatgtgtatcaattcatccaattac

SEQ ID NO: 319295 - DNA, 33 bp, Homo sapien
attgtttgcattttggaattttgctctgtctgg

SEQ ID NO: 319296 - DNA, 33 bp, Homo sapien
attgtttgcattttgggattttgctctgtctgg

SEQ ID NO: 319297 - DNA, 33 bp, Homo sapien
tggcaatttcagggggaccaatcaggagccatg

SEQ ID NO: 319298 - DNA, 33 bp, Homo sapien
tggcaatttcaggggggccaatcaggagccatg

SEQ ID NO: 319299 - DNA, 33 bp, Homo sapien
tgagctagcatgtggaaaagatctgaatcaccc

SEQ ID NO: 319300 - DNA, 33 bp, Homo sapien
tgagctagcatgtggagaagatctgaatcaccc

SEQ ID NO: 319301 - DNA, 33 bp, Homo sapien
aagaagcactgtcacacagagattcagagtgca

SEQ ID NO: 319302 - DNA, 33 bp, Homo sapien
aagaagcactgtcacatagagattcagagtgca

SEQ ID NO: 319303 - DNA, 33 bp, Homo sapien
taaaatccagttattacctacaggatgtattca

SEQ ID NO: 319304 - DNA, 33 bp, Homo sapien
taaaatccagttattatctacaggatgtattca

SEQ ID NO: 319305 - DNA, 33 bp, Homo sapien
gtacacaggttggaagactcaatacataaagat

SEQ ID NO: 319306 - DNA, 33 bp, Homo sapien
gtacacaggttggaaggctcaatacataaagat

SEQ ID NO: 319307 - DNA, 33 bp, Homo sapien
aggccctgataatcagacaaaccgggtccaaat

SEQ ID NO: 319308 - DNA, 33 bp, Homo sapien
aggccctgataatcaggcaaaccgggtccaaat

SEQ ID NO: 319309 - DNA, 33 bp, Homo sapien
tgctgtgacaaagatcccccctggtgactgtat

SEQ ID NO: 319310 - DNA, 33 bp, Homo sapien
tgctgtgacaaagatctcccctggtgactgtat

SEQ ID NO: 319311 - DNA, 33 bp, Homo sapien
aatgaagagccacaacaaactgggcagagaaag

SEQ ID NO: 319312 - DNA, 33 bp, Homo sapien
aatgaagagccacaaccaactgggcagagaaag

SEQ ID NO: 319313 - DNA, 33 bp, Homo sapien
tttgcttttcatctcacctgcatcaagctctgt

SEQ ID NO: 319314 - DNA, 33 bp, Homo sapien
tttgcttttcatctcatctgcatcaagctctgt

SEQ ID NO: 319315 - DNA, 33 bp, Homo sapien
tgttaactattatatagctacaaaataccttca

SEQ ID NO: 319316 - DNA, 33 bp, Homo sapien
tgttaactattatatatctacaaaataccttca

SEQ ID NO: 319317 - DNA, 33 bp, Homo sapien
aaaaaaattcaatcccaagagcgattagatttg

SEQ ID NO: 319318 - DNA, 33 bp, Homo sapien
aaaaaaattcaatccccagagcgattagatttg

SEQ ID NO: 319319 - DNA, 33 bp, Homo sapien
cctccgtcatttcttaactggacacttagctct

SEQ ID NO: 319320 - DNA, 33 bp, Homo sapien
cctccgtcatttcttagctggacacttagctct

SEQ ID NO: 319321 - DNA, 33 bp, Homo sapien
caaactgccagggtgacaatctggctccagtcc

SEQ ID NO: 319322 - DNA, 33 bp, Homo sapien
caaactgccagggtgagaatctggctccagtcc

SEQ ID NO: 319323 - DNA, 33 bp, Homo sapien
cacacagtaaaaattccgaacagcataaaagga

SEQ ID NO: 319324 - DNA, 33 bp, Homo sapien
cacacagtaaaaattctgaacagcataaaagga

SEQ ID NO: 319325 - DNA, 33 bp, Homo sapien
ttttcttatattgccacgtgcctttctccttcc

SEQ ID NO: 319326 - DNA, 33 bp, Homo sapien
ttttcttatattgccatgtgcctttctccttcc

SEQ ID NO: 319327 - DNA, 33 bp, Homo sapien
aatacttattcagatacagtgaactaatgttac

SEQ ID NO: 319328 - DNA, 33 bp, Homo sapien
aatacttattcagatatagtgaactaatgttac

SEQ ID NO: 319329 - DNA, 33 bp, Homo sapien
atgaaagtctttccgaccaaactgaaatcatcc

SEQ ID NO: 319330 - DNA, 33 bp, Homo sapien
atgaaagtctttccgatcaaactgaaatcatcc

SEQ ID NO: 319331 - DNA, 33 bp, Homo sapien
agtggtgtcttaactactaaactgggtggagat

SEQ ID NO: 319332 - DNA, 33 bp, Homo sapien
agtggtgtcttaactattaaactgggtggagat

SEQ ID NO: 319333 - DNA, 33 bp, Homo sapien
ctgagagtacacatcactatttccttcaccatt

SEQ ID NO: 319334 - DNA, 33 bp, Homo sapien
ctgagagtacacatcattatttccttcaccatt

SEQ ID NO: 319335 - DNA, 33 bp, Homo sapien
ggcagattagattccacgtgagggagaagagga

SEQ ID NO: 319336 - DNA, 33 bp, Homo sapien
ggcagattagattccatgtgagggagaagagga

SEQ ID NO: 319337 - DNA, 33 bp, Homo sapien
tgtgtctaggaaagaggaggagaaaggcaaata

SEQ ID NO: 319338 - DNA, 33 bp, Homo sapien
tgtgtctaggaaagagtaggagaaaggcaaata

SEQ ID NO: 319339 - DNA, 33 bp, Homo sapien
atgaaagagttgacatcactatggatcctaaga

SEQ ID NO: 319340 - DNA, 33 bp, Homo sapien
atgaaagagttgacattactatggatcctaaga

SEQ ID NO: 319341 - DNA, 33 bp, Homo sapien
tgagtaaagaggtgaaggaatgaatgcccagca

SEQ ID NO: 319342 - DNA, 33 bp, Homo sapien
tgagtaaagaggtgaatgaatgaatgcccagca

SEQ ID NO: 319343 - DNA, 33 bp, Homo sapien
cccaggcctgcagcaaatggttcccctgcccag

SEQ ID NO: 319344 - DNA, 33 bp, Homo sapien
cccaggcctgcagcaagtggttcccctgcccag

SEQ ID NO: 319345 - DNA, 33 bp, Homo sapien
gctgataaatgactgcgaaagcctaaccagaat

SEQ ID NO: 319346 - DNA, 33 bp, Homo sapien
gctgataaatgactgctaaagcctaaccagaat

SEQ ID NO: 319347 - DNA, 33 bp, Homo sapien
agaataccctgcaaaacggtgatacagagcaga

SEQ ID NO: 319348 - DNA, 33 bp, Homo sapien
agaataccctgcaaaatggtgatacagagcaga

SEQ ID NO: 319349 - DNA, 33 bp, Homo sapien
cagtcttaaatgaggcacaatctagatgctcaa

SEQ ID NO: 319350 - DNA, 33 bp, Homo sapien
cagtcttaaatgaggcgcaatctagatgctcaa

SEQ ID NO: 319351 - DNA, 33 bp, Homo sapien
cagtccatgactccatgagtgtccacgcctctc

SEQ ID NO: 319352 - DNA, 33 bp, Homo sapien
cagtccatgactccattagtgtccacgcctctc

SEQ ID NO: 319353 - DNA, 33 bp, Homo sapien
tatgaagcgctttgcacggttggctacttttct

SEQ ID NO: 319354 - DNA, 33 bp, Homo sapien
tatgaagcgctttgcatggttggctacttttct

SEQ ID NO: 319355 - DNA, 33 bp, Homo sapien
cctcagctaatcactacgtctcttggagatact

SEQ ID NO: 319356 - DNA, 33 bp, Homo sapien
cctcagctaatcactatgtctcttggagatact

SEQ ID NO: 319357 - DNA, 33 bp, Homo sapien
cttttggctacaccaaaatagattaaggaaaaa

SEQ ID NO: 319358 - DNA, 33 bp, Homo sapien
cttttggctacaccaagatagattaaggaaaaa

SEQ ID NO: 319359 - DNA, 33 bp, Homo sapien
agatgtagaaattcaaaatatatcagagcattt

SEQ ID NO: 319360 - DNA, 33 bp, Homo sapien
agatgtagaaattcaacatatatcagagcattt

SEQ ID NO: 319361 - DNA, 33 bp, Homo sapien
gtctctcttactcccaatgctcttctagtacct

SEQ ID NO: 319362 - DNA, 33 bp, Homo sapien
gtctctcttactcccagtgctcttctagtacct

SEQ ID NO: 319363 - DNA, 33 bp, Homo sapien
gctctttccttaattccaatggtttccaagtct

SEQ ID NO: 319364 - DNA, 33 bp, Homo sapien
gctctttccttaattctaatggtttccaagtct

SEQ ID NO: 319365 - DNA, 33 bp, Homo sapien
attattaaaatttccgaagcctgcctatctggt

SEQ ID NO: 319366 - DNA, 33 bp, Homo sapien
attattaaaatttccggagcctgcctatctggt

SEQ ID NO: 319367 - DNA, 33 bp, Homo sapien
gaatggagttgccacaaaagtagtattcctgca

SEQ ID NO: 319368 - DNA, 33 bp, Homo sapien
gaatggagttgccacagaagtagtattcctgca

SEQ ID NO: 319369 - DNA, 33 bp, Homo sapien
aacaaatacatctccactgactgtagttactat

SEQ ID NO: 319370 - DNA, 33 bp, Homo sapien
aacaaatacatctccattgactgtagttactat

SEQ ID NO: 319371 - DNA, 33 bp, Homo sapien
tggtagcaaaacgatacgaatgtactaaaaaat

SEQ ID NO: 319372 - DNA, 33 bp, Homo sapien
tggtagcaaaacgatatgaatgtactaaaaaat

SEQ ID NO: 319373 - DNA, 33 bp, Homo sapien
tccaccctctgcagagacaccaagatatctact

SEQ ID NO: 319374 - DNA, 33 bp, Homo sapien
tccaccctctgcagaggcaccaagatatctact

SEQ ID NO: 319375 - DNA, 33 bp, Homo sapien
ctacctgtaacttacacccattgcacctcattg

SEQ ID NO: 319376 - DNA, 33 bp, Homo sapien
ctacctgtaacttacatccattgcacctcattg

SEQ ID NO: 319377 - DNA, 33 bp, Homo sapien
gtagttaagttaaaacaaggtcattagagtgtg

SEQ ID NO: 319378 - DNA, 33 bp, Homo sapien
gtagttaagttaaaacgaggtcattagagtgtg

SEQ ID NO: 319379 - DNA, 33 bp, Homo sapien
ttctttcacactgaacagccacttcagaacaac

SEQ ID NO: 319380 - DNA, 33 bp, Homo sapien
ttctttcacactgaacggccacttcagaacaac

SEQ ID NO: 319381 - DNA, 33 bp, Homo sapien
ctgaagttctgctaaactatgacttagaaatga

SEQ ID NO: 319382 - DNA, 33 bp, Homo sapien
ctgaagttctgctaaattatgacttagaaatga

SEQ ID NO: 319383 - DNA, 33 bp, Homo sapien
ctttgcccaggtccataagaggaattaacagac

SEQ ID NO: 319384 - DNA, 33 bp, Homo sapien
ctttgcccaggtccatgagaggaattaacagac

SEQ ID NO: 319385 - DNA, 33 bp, Homo sapien
gaggaattaacagacaagaaaacattaatttcc

SEQ ID NO: 319386 - DNA, 33 bp, Homo sapien
gaggaattaacagacatgaaaacattaatttcc

SEQ ID NO: 319387 - DNA, 33 bp, Homo sapien
cacttactgtaaggaaaggaaacaaaattgaag

SEQ ID NO: 319388 - DNA, 33 bp, Homo sapien
cacttactgtaaggaacggaaacaaaattgaag

SEQ ID NO: 319389 - DNA, 33 bp, Homo sapien
ccaggcaagtgacaacaaaccaggctttccata

SEQ ID NO: 319390 - DNA, 33 bp, Homo sapien
ccaggcaagtgacaacgaaccaggctttccata

SEQ ID NO: 319391 - DNA, 33 bp, Homo sapien
cagacactgacttcacggcttcaagtacgagca

SEQ ID NO: 319392 - DNA, 33 bp, Homo sapien
cagacactgacttcactgcttcaagtacgagca

SEQ ID NO: 319393 - DNA, 33 bp, Homo sapien
atttcttaaggtgaaagtgacttgactttgccc

SEQ ID NO: 319394 - DNA, 33 bp, Homo sapien
atttcttaaggtgaaattgacttgactttgccc

SEQ ID NO: 319395 - DNA, 33 bp, Homo sapien
tggaatccgtagacaccgatggagaagctgtca

SEQ ID NO: 319396 - DNA, 33 bp, Homo sapien
tggaatccgtagacactgatggagaagctgtca

SEQ ID NO: 319397 - DNA, 33 bp, Homo sapien
tcctgtatccctagtaactgccagcacatacct

SEQ ID NO: 319398 - DNA, 33 bp, Homo sapien
tcctgtatccctagtacctgccagcacatacct

SEQ ID NO: 319399 - DNA, 33 bp, Homo sapien
ggatgttatgaggacactatctggcatacagtt

SEQ ID NO: 319400 - DNA, 33 bp, Homo sapien
ggatgttatgaggacagtatctggcatacagtt

SEQ ID NO: 319401 - DNA, 33 bp, Homo sapien
accaatatctcttgcccggagtcctgtaacaga

SEQ ID NO: 319402 - DNA, 33 bp, Homo sapien
accaatatctcttgcctggagtcctgtaacaga

SEQ ID NO: 319403 - DNA, 33 bp, Homo sapien
acaccattttctgcaacaagaagttgataatca

SEQ ID NO: 319404 - DNA, 33 bp, Homo sapien
acaccattttctgcaagaagaagttgataatca

SEQ ID NO: 319405 - DNA, 33 bp, Homo sapien
aacgcaagttaatagcaataggtacattaaaag

SEQ ID NO: 319406 - DNA, 33 bp, Homo sapien
aacgcaagttaatagcgataggtacattaaaag

SEQ ID NO: 319407 - DNA, 33 bp, Homo sapien
tttacaggaagccacactggtttagaagtgaag

SEQ ID NO: 319408 - DNA, 33 bp, Homo sapien
tttacaggaagccacattggtttagaagtgaag

SEQ ID NO: 319409 - DNA, 33 bp, Homo sapien
cactgtctacaagagaatccttatgttttggaa

SEQ ID NO: 319410 - DNA, 33 bp, Homo sapien
cactgtctacaagagagtccttatgttttggaa

SEQ ID NO: 319411 - DNA, 33 bp, Homo sapien
ataatagcaatttctacgatgccccgaggccag

SEQ ID NO: 319412 - DNA, 33 bp, Homo sapien
ataatagcaatttctatgatgccccgaggccag

SEQ ID NO: 319413 - DNA, 33 bp, Homo sapien
caggagcagacatatcaaggtgagtgggatcct

SEQ ID NO: 319414 - DNA, 33 bp, Homo sapien
caggagcagacatatcgaggtgagtgggatcct

SEQ ID NO: 319415 - DNA, 33 bp, Homo sapien
cactgggatcctacgaaagaggctggtgctggg

SEQ ID NO: 319416 - DNA, 33 bp, Homo sapien
cactgggatcctacgagagaggctggtgctggg

SEQ ID NO: 319417 - DNA, 33 bp, Homo sapien
agaatacaagatttcaagtgaaaggtgacagag

SEQ ID NO: 319418 - DNA, 33 bp, Homo sapien
agaatacaagatttcaggtgaaaggtgacagag

SEQ ID NO: 319419 - DNA, 33 bp, Homo sapien
ttgtccacttgaagcaaaaacataatgaaagag

SEQ ID NO: 319420 - DNA, 33 bp, Homo sapien
ttgtccacttgaagcacaaacataatgaaagag

SEQ ID NO: 319421 - DNA, 33 bp, Homo sapien
agtgcttcccaaattcgaaaagccaggcaccta

SEQ ID NO: 319422 - DNA, 33 bp, Homo sapien
agtgcttcccaaattctaaaagccaggcaccta

SEQ ID NO: 319423 - DNA, 33 bp, Homo sapien
gtaagtaaaagaaggaacctatgtaatgaggct

SEQ ID NO: 319424 - DNA, 33 bp, Homo sapien
gtaagtaaaagaaggagcctatgtaatgaggct

SEQ ID NO: 319425 - DNA, 33 bp, Homo sapien
gtataccttggtcaggacaaaccagttgctctt

SEQ ID NO: 319426 - DNA, 33 bp, Homo sapien
gtataccttggtcaggccaaaccagttgctctt

SEQ ID NO: 319427 - DNA, 33 bp, Homo sapien
ggaagtccacaatggaaagtattggtcattatt

SEQ ID NO: 319428 - DNA, 33 bp, Homo sapien
ggaagtccacaatggagagtattggtcattatt

SEQ ID NO: 319429 - DNA, 33 bp, Homo sapien
tccactagatgctcaaagattgccctgattttg

SEQ ID NO: 319430 - DNA, 33 bp, Homo sapien
tccactagatgctcaaggattgccctgattttg

SEQ ID NO: 319431 - DNA, 33 bp, Homo sapien
atctctcagatttacacctcacatacttgctaa

SEQ ID NO: 319432 - DNA, 33 bp, Homo sapien
atctctcagatttacatctcacatacttgctaa

SEQ ID NO: 319433 - DNA, 33 bp, Homo sapien
gctaaaagcagtgacaccctcctgtattgatta

SEQ ID NO: 319434 - DNA, 33 bp, Homo sapien
gctaaaagcagtgacagcctcctgtattgatta

SEQ ID NO: 319435 - DNA, 33 bp, Homo sapien
gaagcaagggagcttacacccactcttgccagc

SEQ ID NO: 319436 - DNA, 33 bp, Homo sapien
gaagcaagggagcttatacccactcttgccagc

SEQ ID NO: 319437 - DNA, 33 bp, Homo sapien
gaagtttctgcccaatcaagacaactcactcat

SEQ ID NO: 319438 - DNA, 33 bp, Homo sapien
gaagtttctgcccaattaagacaactcactcat

SEQ ID NO: 319439 - DNA, 33 bp, Homo sapien
cagtggtgtgaggaaaaaatatgtttgccacct

SEQ ID NO: 319440 - DNA, 33 bp, Homo sapien
cagtggtgtgaggaaagaatatgtttgccacct

SEQ ID NO: 319441 - DNA, 33 bp, Homo sapien
gggggcacaggtagtgaaggagaaatctattta

SEQ ID NO: 319442 - DNA, 33 bp, Homo sapien
gggggcacaggtagtgcaggagaaatctattta

SEQ ID NO: 319443 - DNA, 33 bp, Homo sapien
gagtttgcatgaaagaccattatttaactcttt

SEQ ID NO: 319444 - DNA, 33 bp, Homo sapien
gagtttgcatgaaagagcattatttaactcttt

SEQ ID NO: 319445 - DNA, 33 bp, Homo sapien
tgctgtctcctttcaccggagtcaggtgtgcat

SEQ ID NO: 319446 - DNA, 33 bp, Homo sapien
tgctgtctcctttcactggagtcaggtgtgcat

SEQ ID NO: 319447 - DNA, 33 bp, Homo sapien
ctctccctcccctctcactgtgtttcagcaaat

SEQ ID NO: 319448 - DNA, 33 bp, Homo sapien
ctctccctcccctctcgctgtgtttcagcaaat

SEQ ID NO: 319449 - DNA, 33 bp, Homo sapien
gtattgtgaggagtcaaatatgaacagtgggaa

SEQ ID NO: 319450 - DNA, 33 bp, Homo sapien
gtattgtgaggagtcagatatgaacagtgggaa

SEQ ID NO: 319451 - DNA, 33 bp, Homo sapien
ttaacaccgaagcagacgaggctgaagtacatc

SEQ ID NO: 319452 - DNA, 33 bp, Homo sapien
ttaacaccgaagcagatgaggctgaagtacatc

SEQ ID NO: 319453 - DNA, 33 bp, Homo sapien
tgattgtattaatgtcccaaattcttcactctc

SEQ ID NO: 319454 - DNA, 33 bp, Homo sapien
tgattgtattaatgtctcaaattcttcactctc

SEQ ID NO: 319455 - DNA, 33 bp, Homo sapien
acaacattatgggagaaatcgctgaattttctt

SEQ ID NO: 319456 - DNA, 33 bp, Homo sapien
acaacattatgggagagatcgctgaattttctt

SEQ ID NO: 319457 - DNA, 33 bp, Homo sapien
agagctctggaataagaatccagttttatctga

SEQ ID NO: 319458 - DNA, 33 bp, Homo sapien
agagctctggaataaggatccagttttatctga

SEQ ID NO: 319459 - DNA, 33 bp, Homo sapien
catcatccaaaatacaacagagactgcagccat

SEQ ID NO: 319460 - DNA, 33 bp, Homo sapien
catcatccaaaatacagcagagactgcagccat

SEQ ID NO: 319461 - DNA, 33 bp, Homo sapien
agagaaaagaccctgtaaagttcaggagtgtga

SEQ ID NO: 319462 - DNA, 33 bp, Homo sapien
agagaaaagaccctgtgaagttcaggagtgtga

SEQ ID NO: 319463 - DNA, 33 bp, Homo sapien
gtcaagcttatcaaaacaatcaattgtatataa

SEQ ID NO: 319464 - DNA, 33 bp, Homo sapien
gtcaagcttatcaaaagaatcaattgtatataa

SEQ ID NO: 319465 - DNA, 33 bp, Homo sapien
cttctcttcttcctgccattcatccctaaatct

SEQ ID NO: 319466 - DNA, 33 bp, Homo sapien
cttctcttcttcctgctattcatccctaaatct

SEQ ID NO: 319467 - DNA, 33 bp, Homo sapien
acagataggcaggtacaagaagggtggaatata

SEQ ID NO: 319468 - DNA, 33 bp, Homo sapien
acagataggcaggtacgagaagggtggaatata

SEQ ID NO: 319469 - DNA, 33 bp, Homo sapien
gtgtcagtgaatgacacctcaaaggaaaagggg

SEQ ID NO: 319470 - DNA, 33 bp, Homo sapien
gtgtcagtgaatgacatctcaaaggaaaagggg

SEQ ID NO: 319471 - DNA, 33 bp, Homo sapien
tcctacctattgcacaaaacaacggtaaaagga

SEQ ID NO: 319472 - DNA, 33 bp, Homo sapien
tcctacctattgcacagaacaacggtaaaagga

SEQ ID NO: 319473 - DNA, 33 bp, Homo sapien
tcagataacataagccaatgactactaagtgag

SEQ ID NO: 319474 - DNA, 33 bp, Homo sapien
tcagataacataagccgatgactactaagtgag

SEQ ID NO: 319475 - DNA, 33 bp, Homo sapien
acaagggtgacctccacgtttaagccttctagc

SEQ ID NO: 319476 - DNA, 33 bp, Homo sapien
acaagggtgacctccatgtttaagccttctagc

SEQ ID NO: 319477 - DNA, 33 bp, Homo sapien
ttgtaagcattcattaagtacgactctggccct

SEQ ID NO: 319478 - DNA, 33 bp, Homo sapien
ttgtaagcattcattaggtacgactctggccct

SEQ ID NO: 319479 - DNA, 33 bp, Homo sapien
tttatgacatatatacacagacataaaatctat

SEQ ID NO: 319480 - DNA, 33 bp, Homo sapien
tttatgacatatatacgcagacataaaatctat

SEQ ID NO: 319481 - DNA, 33 bp, Homo sapien
ttcctcaagtaaaaagccttaaatgcattgttt

SEQ ID NO: 319482 - DNA, 33 bp, Homo sapien
ttcctcaagtaaaaagtcttaaatgcattgttt

SEQ ID NO: 319483 - DNA, 33 bp, Homo sapien
accataacgagagctacacatctttttaggcat

SEQ ID NO: 319484 - DNA, 33 bp, Homo sapien
accataacgagagctagacatctttttaggcat

SEQ ID NO: 319485 - DNA, 33 bp, Homo sapien
catctgcactcaggtaacattcagaaggtaatt

SEQ ID NO: 319486 - DNA, 33 bp, Homo sapien
catctgcactcaggtaccattcagaaggtaatt

SEQ ID NO: 319487 - DNA, 33 bp, Homo sapien
tactccatgaaaatgcactctggagtccaagac

SEQ ID NO: 319488 - DNA, 33 bp, Homo sapien
tactccatgaaaatgcgctctggagtccaagac

SEQ ID NO: 319489 - DNA, 33 bp, Homo sapien
agaaggtggtatatcacggcaagcaacatgaca

SEQ ID NO: 319490 - DNA, 33 bp, Homo sapien
agaaggtggtatatcatggcaagcaacatgaca

SEQ ID NO: 319491 - DNA, 33 bp, Homo sapien
caaactgtgaagtaccaaatgccaggctaagga

SEQ ID NO: 319492 - DNA, 33 bp, Homo sapien
caaactgtgaagtaccgaatgccaggctaagga

SEQ ID NO: 319493 - DNA, 33 bp, Homo sapien
ttgtgaataaagataaagtgcataggtcctaac

SEQ ID NO: 319494 - DNA, 33 bp, Homo sapien
ttgtgaataaagataaggtgcataggtcctaac

SEQ ID NO: 319495 - DNA, 33 bp, Homo sapien
tacaaaaagccaataaatcaaagtcaggagcct

SEQ ID NO: 319496 - DNA, 33 bp, Homo sapien
tacaaaaagccaataattcaaagtcaggagcct

SEQ ID NO: 319497 - DNA, 33 bp, Homo sapien
aggataagtcttgtccaccagctgcttaaattc

SEQ ID NO: 319498 - DNA, 33 bp, Homo sapien
aggataagtcttgtccgccagctgcttaaattc

SEQ ID NO: 319499 - DNA, 33 bp, Homo sapien
cctggatgtaaccaggaagaagagaggaaatct

SEQ ID NO: 319500 - DNA, 33 bp, Homo sapien
cctggatgtaaccagggagaagagaggaaatct

SEQ ID NO: 319501 - DNA, 33 bp, Homo sapien
acaataccgagggaaactgagacttgaaagaac

SEQ ID NO: 319502 - DNA, 33 bp, Homo sapien
acaataccgagggaaattgagacttgaaagaac

SEQ ID NO: 319503 - DNA, 33 bp, Homo sapien
ggagaatccctgattgcagcttctgtagcaggc

SEQ ID NO: 319504 - DNA, 33 bp, Homo sapien
ggagaatccctgattgtagcttctgtagcaggc

SEQ ID NO: 319505 - DNA, 33 bp, Homo sapien
taatactggtaacaacagctatcctatattgag

SEQ ID NO: 319506 - DNA, 33 bp, Homo sapien
taatactggtaacaacggctatcctatattgag

SEQ ID NO: 319507 - DNA, 33 bp, Homo sapien
tttgagagggtaccccaaatgaaagaggagcaa

SEQ ID NO: 319508 - DNA, 33 bp, Homo sapien
tttgagagggtaccccgaatgaaagaggagcaa

SEQ ID NO: 319509 - DNA, 33 bp, Homo sapien
ctccagtaatactgatcatatgcttacaattca

SEQ ID NO: 319510 - DNA, 33 bp, Homo sapien
ctccagtaatactgattatatgcttacaattca

SEQ ID NO: 319511 - DNA, 33 bp, Homo sapien
taacatttaattaagccctgcagcaaagtgaga

SEQ ID NO: 319512 - DNA, 33 bp, Homo sapien
taacatttaattaagctctgcagcaaagtgaga

SEQ ID NO: 319513 - DNA, 33 bp, Homo sapien
gttcttgagggtggaaagagagaaccctgctca

SEQ ID NO: 319514 - DNA, 33 bp, Homo sapien
gttcttgagggtggaaggagagaaccctgctca

SEQ ID NO: 319515 - DNA, 33 bp, Homo sapien
atcagacagaatttagaaggctcaaaggagaag

SEQ ID NO: 319516 - DNA, 33 bp, Homo sapien
atcagacagaatttaggaggctcaaaggagaag

SEQ ID NO: 319517 - DNA, 33 bp, Homo sapien
cattctatgtgctttacgtgctgaagtcattgc

SEQ ID NO: 319518 - DNA, 33 bp, Homo sapien
cattctatgtgctttatgtgctgaagtcattgc

SEQ ID NO: 319519 - DNA, 33 bp, Homo sapien
aaatagctaaattgaacgagagagagataataa

SEQ ID NO: 319520 - DNA, 33 bp, Homo sapien
aaatagctaaattgaatgagagagagataataa

SEQ ID NO: 319521 - DNA, 33 bp, Homo sapien
aggcagaaagtgttcactataatttgggtctgc

SEQ ID NO: 319522 - DNA, 33 bp, Homo sapien
aggcagaaagtgttcagtataatttgggtctgc

SEQ ID NO: 319523 - DNA, 33 bp, Homo sapien
taggaataccttgatacaagatctcatgtaata

SEQ ID NO: 319524 - DNA, 33 bp, Homo sapien
taggaataccttgatagaagatctcatgtaata

SEQ ID NO: 319525 - DNA, 33 bp, Homo sapien
agaataaggaaacatacgtattatagatgctgt

SEQ ID NO: 319526 - DNA, 33 bp, Homo sapien
agaataaggaaacataggtattatagatgctgt

SEQ ID NO: 319527 - DNA, 33 bp, Homo sapien
taataaaacccatacaataatgacaagttaatt

SEQ ID NO: 319528 - DNA, 33 bp, Homo sapien
taataaaacccatacattaatgacaagttaatt

SEQ ID NO: 319529 - DNA, 33 bp, Homo sapien
catcagcattcaatacccacagcaggccactct

SEQ ID NO: 319530 - DNA, 33 bp, Homo sapien
catcagcattcaatactcacagcaggccactct

SEQ ID NO: 319531 - DNA, 33 bp, Homo sapien
ctagttcacattgacccaaatgccactggagta

SEQ ID NO: 319532 - DNA, 33 bp, Homo sapien
ctagttcacattgacctaaatgccactggagta

SEQ ID NO: 319533 - DNA, 33 bp, Homo sapien
gtcccagagccatacaaatttcaccttcatgga

SEQ ID NO: 319534 - DNA, 33 bp, Homo sapien
gtcccagagccatacagatttcaccttcatgga

SEQ ID NO: 319535 - DNA, 33 bp, Homo sapien
aatgatttagtaacaaccctccagctcctacaa

SEQ ID NO: 319536 - DNA, 33 bp, Homo sapien
aatgatttagtaacaatcctccagctcctacaa

SEQ ID NO: 319537 - DNA, 33 bp, Homo sapien
tgctggagtttgaatcactgggttgactcagta

SEQ ID NO: 319538 - DNA, 33 bp, Homo sapien
tgctggagtttgaatctctgggttgactcagta

SEQ ID NO: 319539 - DNA, 33 bp, Homo sapien
ttaagggtcttcatgacattctgcaatgtaaaa

SEQ ID NO: 319540 - DNA, 33 bp, Homo sapien
ttaagggtcttcatgatattctgcaatgtaaaa

SEQ ID NO: 319541 - DNA, 33 bp, Homo sapien
gaagaacttaaacccaaagactccattttcaaa

SEQ ID NO: 319542 - DNA, 33 bp, Homo sapien
gaagaacttaaacccacagactccattttcaaa

SEQ ID NO: 319543 - DNA, 33 bp, Homo sapien
ttttctttcttcatccagctttctcttaccttc

SEQ ID NO: 319544 - DNA, 33 bp, Homo sapien
ttttctttcttcatccggctttctcttaccttc

SEQ ID NO: 319545 - DNA, 33 bp, Homo sapien
ttcagagaactaatgcaagagatcaccttgatt

SEQ ID NO: 319546 - DNA, 33 bp, Homo sapien
ttcagagaactaatgcgagagatcaccttgatt

SEQ ID NO: 319547 - DNA, 33 bp, Homo sapien
gagaattgtcttccaaaagggactcttaggtgt

SEQ ID NO: 319548 - DNA, 33 bp, Homo sapien
gagaattgtcttccaacagggactcttaggtgt

SEQ ID NO: 319549 - DNA, 33 bp, Homo sapien
caggcctgttggcataagtctaaatactcttta

SEQ ID NO: 319550 - DNA, 33 bp, Homo sapien
caggcctgttggcatatgtctaaatactcttta

SEQ ID NO: 319551 - DNA, 33 bp, Homo sapien
tggatgctttgctgaagaattagaatttaattg

SEQ ID NO: 319552 - DNA, 33 bp, Homo sapien
tggatgctttgctgaataattagaatttaattg

SEQ ID NO: 319553 - DNA, 33 bp, Homo sapien
agtattaatttaatagacccatttgtaatcaat

SEQ ID NO: 319554 - DNA, 33 bp, Homo sapien
agtattaatttaataggcccatttgtaatcaat

SEQ ID NO: 319555 - DNA, 33 bp, Homo sapien
ttttttctctatgccactggaaagaggaacaaa

SEQ ID NO: 319556 - DNA, 33 bp, Homo sapien
ttttttctctatgccattggaaagaggaacaaa

SEQ ID NO: 319557 - DNA, 33 bp, Homo sapien
ctctgtttattctacaatgcttggacacaggaa

SEQ ID NO: 319558 - DNA, 33 bp, Homo sapien
ctctgtttattctacagtgcttggacacaggaa

SEQ ID NO: 319559 - DNA, 33 bp, Homo sapien
aggtatagtcgtaacaacctagaaattaattta

SEQ ID NO: 319560 - DNA, 33 bp, Homo sapien
aggtatagtcgtaacatcctagaaattaattta

SEQ ID NO: 319561 - DNA, 33 bp, Homo sapien
ctcagtacattccaaaacaggataaaataaata

SEQ ID NO: 319562 - DNA, 33 bp, Homo sapien
ctcagtacattccaaagcaggataaaataaata

SEQ ID NO: 319563 - DNA, 33 bp, Homo sapien
gtgccagcatggactgaagtaaacacgctgcaa

SEQ ID NO: 319564 - DNA, 33 bp, Homo sapien
gtgccagcatggactggagtaaacacgctgcaa

SEQ ID NO: 319565 - DNA, 33 bp, Homo sapien
ttctttaagaggatcacggaaagatggcaaggc

SEQ ID NO: 319566 - DNA, 33 bp, Homo sapien
ttctttaagaggatcatggaaagatggcaaggc

SEQ ID NO: 319567 - DNA, 33 bp, Homo sapien
actacactcctctaacacaaaatttatccttag

SEQ ID NO: 319568 - DNA, 33 bp, Homo sapien
actacactcctctaacgcaaaatttatccttag

SEQ ID NO: 319569 - DNA, 33 bp, Homo sapien
taagcctgaaggtggacattatgtgacaaccaa

SEQ ID NO: 319570 - DNA, 33 bp, Homo sapien
taagcctgaaggtggatattatgtgacaaccaa

SEQ ID NO: 319571 - DNA, 33 bp, Homo sapien
agcttaaaaacacttcaaaaagtgagatgggaa

SEQ ID NO: 319572 - DNA, 33 bp, Homo sapien
agcttaaaaacacttcgaaaagtgagatgggaa

SEQ ID NO: 319573 - DNA, 33 bp, Homo sapien
cgatttggcccttcaccgcctgttaggtttata

SEQ ID NO: 319574 - DNA, 33 bp, Homo sapien
cgatttggcccttcactgcctgttaggtttata

SEQ ID NO: 319575 - DNA, 33 bp, Homo sapien
aaaggaaataactcacacatgtaaattaatcaa

SEQ ID NO: 319576 - DNA, 33 bp, Homo sapien
aaaggaaataactcacgcatgtaaattaatcaa

SEQ ID NO: 319577 - DNA, 33 bp, Homo sapien
ggatgctcatcttcgaactggtaatcaatggaa

SEQ ID NO: 319578 - DNA, 33 bp, Homo sapien
ggatgctcatcttcgacctggtaatcaatggaa

SEQ ID NO: 319579 - DNA, 33 bp, Homo sapien
actggggccgagatgacgagtttcgtgaaaaac

SEQ ID NO: 319580 - DNA, 33 bp, Homo sapien
actggggccgagatgatgagtttcgtgaaaaac

SEQ ID NO: 319581 - DNA, 33 bp, Homo sapien
aaatatcaaaggacccacatgtatgaagacaca

SEQ ID NO: 319582 - DNA, 33 bp, Homo sapien
aaatatcaaaggacccgcatgtatgaagacaca

SEQ ID NO: 319583 - DNA, 33 bp, Homo sapien
accctacactaaaagaacctgattcaatcggtc

SEQ ID NO: 319584 - DNA, 33 bp, Homo sapien
accctacactaaaagatcctgattcaatcggtc

SEQ ID NO: 319585 - DNA, 33 bp, Homo sapien
acctgagatggtgggcaaggatcatgaaaaagg

SEQ ID NO: 319586 - DNA, 33 bp, Homo sapien
acctgagatggtgggcgaggatcatgaaaaagg

SEQ ID NO: 319587 - DNA, 33 bp, Homo sapien
agctaagtgacctacacagggatcaaatccagc

SEQ ID NO: 319588 - DNA, 33 bp, Homo sapien
agctaagtgacctacatagggatcaaatccagc

SEQ ID NO: 319589 - DNA, 33 bp, Homo sapien
gatcaagattcacacacgttgttgtggcagttt

SEQ ID NO: 319590 - DNA, 33 bp, Homo sapien
gatcaagattcacacaggttgttgtggcagttt

SEQ ID NO: 319591 - DNA, 33 bp, Homo sapien
cacccaaataccaacaataagaacttgagtagt

SEQ ID NO: 319592 - DNA, 33 bp, Homo sapien
cacccaaataccaacagtaagaacttgagtagt

SEQ ID NO: 319593 - DNA, 33 bp, Homo sapien
ctcaactcatggttccaaataatcccctgtgtt

SEQ ID NO: 319594 - DNA, 33 bp, Homo sapien
ctcaactcatggttccgaataatcccctgtgtt

SEQ ID NO: 319595 - DNA, 33 bp, Homo sapien
ctagaggaacagatgcaaagatgtggtggatgc

SEQ ID NO: 319596 - DNA, 33 bp, Homo sapien
ctagaggaacagatgcgaagatgtggtggatgc

SEQ ID NO: 319597 - DNA, 33 bp, Homo sapien
gtcaggcaggaccttccagagatcagacaattt

SEQ ID NO: 319598 - DNA, 33 bp, Homo sapien
gtcaggcaggaccttcgagagatcagacaattt

SEQ ID NO: 319599 - DNA, 33 bp, Homo sapien
tcctagatcctaccaccctttcatagccaatgg

SEQ ID NO: 319600 - DNA, 33 bp, Homo sapien
tcctagatcctaccacgctttcatagccaatgg

SEQ ID NO: 319601 - DNA, 33 bp, Homo sapien
gcagtgagttagctctcacctagatccatcccc

SEQ ID NO: 319602 - DNA, 33 bp, Homo sapien
gcagtgagttagctcttacctagatccatcccc

SEQ ID NO: 319603 - DNA, 33 bp, Homo sapien
gttttatgccactgtcacagaaacatagtaaaa

SEQ ID NO: 319604 - DNA, 33 bp, Homo sapien
gttttatgccactgtcgcagaaacatagtaaaa

SEQ ID NO: 319605 - DNA, 33 bp, Homo sapien
ctggtgcattctgagacggagggaatgccaagt

SEQ ID NO: 319606 - DNA, 33 bp, Homo sapien
ctggtgcattctgagatggagggaatgccaagt

SEQ ID NO: 319607 - DNA, 33 bp, Homo sapien
tgacaactggggactcaataactaaacaatatc

SEQ ID NO: 319608 - DNA, 33 bp, Homo sapien
tgacaactggggactcgataactaaacaatatc

SEQ ID NO: 319609 - DNA, 33 bp, Homo sapien
gaaatactaatgaggaacaaaatcagatgattc

SEQ ID NO: 319610 - DNA, 33 bp, Homo sapien
gaaatactaatgaggagcaaaatcagatgattc

SEQ ID NO: 319611 - DNA, 33 bp, Homo sapien
tcagaactgccgtaaagagtccagaatatttat

SEQ ID NO: 319612 - DNA, 33 bp, Homo sapien
tcagaactgccgtaaatagtccagaatatttat

SEQ ID NO: 319613 - DNA, 33 bp, Homo sapien
tcaaattgaaggctacagtaattatccatgaaa

SEQ ID NO: 319614 - DNA, 33 bp, Homo sapien
tcaaattgaaggctacggtaattatccatgaaa

SEQ ID NO: 319615 - DNA, 33 bp, Homo sapien
ccagtttatctgagaactcacttaaagactaca

SEQ ID NO: 319616 - DNA, 33 bp, Homo sapien
ccagtttatctgagaattcacttaaagactaca

SEQ ID NO: 319617 - DNA, 33 bp, Homo sapien
gtgtttgtcaacaacacgctggcaggtactaaa

SEQ ID NO: 319618 - DNA, 33 bp, Homo sapien
gtgtttgtcaacaacatgctggcaggtactaaa

SEQ ID NO: 319619 - DNA, 33 bp, Homo sapien
ggccaaaaaatgtcaccgaggggctctgtgaat

SEQ ID NO: 319620 - DNA, 33 bp, Homo sapien
ggccaaaaaatgtcactgaggggctctgtgaat

SEQ ID NO: 319621 - DNA, 33 bp, Homo sapien
tgattctgtgaaaaaaacaaataccttctagag

SEQ ID NO: 319622 - DNA, 33 bp, Homo sapien
tgattctgtgaaaaaaccaaataccttctagag

SEQ ID NO: 319623 - DNA, 33 bp, Homo sapien
ttttgaactagtctgggactcagttgagatttg

SEQ ID NO: 319624 - DNA, 33 bp, Homo sapien
ttttgaactagtctggtactcagttgagatttg

SEQ ID NO: 319625 - DNA, 33 bp, Homo sapien
gtggaaactcaagtagacctctaacaaaatgtt

SEQ ID NO: 319626 - DNA, 33 bp, Homo sapien
gtggaaactcaagtaggcctctaacaaaatgtt

SEQ ID NO: 319627 - DNA, 33 bp, Homo sapien
ccactaaagatctagaaaagagagagcttcatc

SEQ ID NO: 319628 - DNA, 33 bp, Homo sapien
ccactaaagatctagagaagagagagcttcatc

SEQ ID NO: 319629 - DNA, 33 bp, Homo sapien
tatatacagtagcacacatatcaacactaattg

SEQ ID NO: 319630 - DNA, 33 bp, Homo sapien
tatatacagtagcacagatatcaacactaattg

SEQ ID NO: 319631 - DNA, 33 bp, Homo sapien
aaggcgattatactggaatagcaaatgccatgc

SEQ ID NO: 319632 - DNA, 33 bp, Homo sapien
aaggcgattatactgggatagcaaatgccatgc

SEQ ID NO: 319633 - DNA, 33 bp, Homo sapien
cagaattgacttcctacaaataagtttcacata

SEQ ID NO: 319634 - DNA, 33 bp, Homo sapien
cagaattgacttcctataaataagtttcacata

SEQ ID NO: 319635 - DNA, 33 bp, Homo sapien
gatacttaagatccaaatgcaatcattggaaag

SEQ ID NO: 319636 - DNA, 33 bp, Homo sapien
gatacttaagatccaagtgcaatcattggaaag

SEQ ID NO: 319637 - DNA, 33 bp, Homo sapien
tttaaatacagatctaagggctgaaagggaaac

SEQ ID NO: 319638 - DNA, 33 bp, Homo sapien
tttaaatacagatctaggggctgaaagggaaac

SEQ ID NO: 319639 - DNA, 33 bp, Homo sapien
atcactcattcaccaaaagaaatgtttcccttt

SEQ ID NO: 319640 - DNA, 33 bp, Homo sapien
atcactcattcaccaacagaaatgtttcccttt

SEQ ID NO: 319641 - DNA, 33 bp, Homo sapien
cttggctttggttaataagcctggagtgtagtt

SEQ ID NO: 319642 - DNA, 33 bp, Homo sapien
cttggctttggttaattagcctggagtgtagtt

SEQ ID NO: 319643 - DNA, 33 bp, Homo sapien
catgcaaaatgatcaaatgaggctcgagttgct

SEQ ID NO: 319644 - DNA, 33 bp, Homo sapien
catgcaaaatgatcaagtgaggctcgagttgct

SEQ ID NO: 319645 - DNA, 33 bp, Homo sapien
tgtctctcagattaaactctgctcacttgaggt

SEQ ID NO: 319646 - DNA, 33 bp, Homo sapien
tgtctctcagattaaattctgctcacttgaggt

SEQ ID NO: 319647 - DNA, 33 bp, Homo sapien
ctccttcttccgtttaacttgtccatcaccatc

SEQ ID NO: 319648 - DNA, 33 bp, Homo sapien
ctccttcttccgtttagcttgtccatcaccatc

SEQ ID NO: 319649 - DNA, 33 bp, Homo sapien
ttaattctgggacaatgaagagagaaggttcag

SEQ ID NO: 319650 - DNA, 33 bp, Homo sapien
ttaattctgggacaattaagagagaaggttcag

SEQ ID NO: 319651 - DNA, 33 bp, Homo sapien
tgccactctggggtgcagaactttccatataga

SEQ ID NO: 319652 - DNA, 33 bp, Homo sapien
tgccactctggggtgcggaactttccatataga

SEQ ID NO: 319653 - DNA, 33 bp, Homo sapien
actattcgccacttgaagcacagtttaggcatc

SEQ ID NO: 319654 - DNA, 33 bp, Homo sapien
actattcgccacttgaggcacagtttaggcatc

SEQ ID NO: 319655 - DNA, 33 bp, Homo sapien
tgactcatgcttaggaaaccagacagtaaaaca

SEQ ID NO: 319656 - DNA, 33 bp, Homo sapien
tgactcatgcttaggagaccagacagtaaaaca

SEQ ID NO: 319657 - DNA, 33 bp, Homo sapien
agagatgtggcatcaaatgacagaaagcagcct

SEQ ID NO: 319658 - DNA, 33 bp, Homo sapien
agagatgtggcatcaagtgacagaaagcagcct

SEQ ID NO: 319659 - DNA, 33 bp, Homo sapien
gtctgattttacagagaacattgtaccagacaa

SEQ ID NO: 319660 - DNA, 33 bp, Homo sapien
gtctgattttacagagtacattgtaccagacaa

SEQ ID NO: 319661 - DNA, 33 bp, Homo sapien
tggctgtggttctgcacagagcaggtggggaag

SEQ ID NO: 319662 - DNA, 33 bp, Homo sapien
tggctgtggttctgcatagagcaggtggggaag

SEQ ID NO: 319663 - DNA, 33 bp, Homo sapien
gcctcgatatctgttccacaaactgtccctctt

SEQ ID NO: 319664 - DNA, 33 bp, Homo sapien
gcctcgatatctgttctacaaactgtccctctt

SEQ ID NO: 319665 - DNA, 33 bp, Homo sapien
tggtgatgagagatgggaactaattctacattt

SEQ ID NO: 319666 - DNA, 33 bp, Homo sapien
tggtgatgagagatggtaactaattctacattt

SEQ ID NO: 319667 - DNA, 33 bp, Homo sapien
taggccaatccctgaaacactttatggctcaat

SEQ ID NO: 319668 - DNA, 33 bp, Homo sapien
taggccaatccctgaaccactttatggctcaat

SEQ ID NO: 319669 - DNA, 33 bp, Homo sapien
ggactttgcatggctgaatccttctcaacattc

SEQ ID NO: 319670 - DNA, 33 bp, Homo sapien
ggactttgcatggctggatccttctcaacattc

SEQ ID NO: 319671 - DNA, 33 bp, Homo sapien
tgtcacagggaatgctcaaaatattcactggca

SEQ ID NO: 319672 - DNA, 33 bp, Homo sapien
tgtcacagggaatgctgaaaatattcactggca

SEQ ID NO: 319673 - DNA, 33 bp, Homo sapien
gttgcttaaccaaatgaaagaaacctaacaggt

SEQ ID NO: 319674 - DNA, 33 bp, Homo sapien
gttgcttaaccaaatgtaagaaacctaacaggt

SEQ ID NO: 319675 - DNA, 33 bp, Homo sapien
ggatcaaagtcatcagccaagtataagagagtc

SEQ ID NO: 319676 - DNA, 33 bp, Homo sapien
ggatcaaagtcatcaggcaagtataagagagtc

SEQ ID NO: 319677 - DNA, 33 bp, Homo sapien
tcttattctttgccacaatattaaaggtcatct

SEQ ID NO: 319678 - DNA, 33 bp, Homo sapien
tcttattctttgccacgatattaaaggtcatct

SEQ ID NO: 319679 - DNA, 33 bp, Homo sapien
gggcctgagagagcgtaaaacccaactgcctca

SEQ ID NO: 319680 - DNA, 33 bp, Homo sapien
gggcctgagagagcgtgaaacccaactgcctca

SEQ ID NO: 319681 - DNA, 33 bp, Homo sapien
ttgtaaggaacaaggactcacattgctgccctt

SEQ ID NO: 319682 - DNA, 33 bp, Homo sapien
ttgtaaggaacaaggattcacattgctgccctt

SEQ ID NO: 319683 - DNA, 33 bp, Homo sapien
cggcatgactactgccgagaagatcatgagaca

SEQ ID NO: 319684 - DNA, 33 bp, Homo sapien
cggcatgactactgcctagaagatcatgagaca

SEQ ID NO: 319685 - DNA, 33 bp, Homo sapien
tggggtaagatgggataagtgatgaaacagaaa

SEQ ID NO: 319686 - DNA, 33 bp, Homo sapien
tggggtaagatgggatgagtgatgaaacagaaa

SEQ ID NO: 319687 - DNA, 33 bp, Homo sapien
tcacatgaatatcagagatagtgacacatatgg

SEQ ID NO: 319688 - DNA, 33 bp, Homo sapien
tcacatgaatatcagatatagtgacacatatgg

SEQ ID NO: 319689 - DNA, 33 bp, Homo sapien
cataagcctgcttctcactctattccagattca

SEQ ID NO: 319690 - DNA, 33 bp, Homo sapien
cataagcctgcttctcgctctattccagattca

SEQ ID NO: 319691 - DNA, 33 bp, Homo sapien
aatagctgcaagtttcaagttagattcattaac

SEQ ID NO: 319692 - DNA, 33 bp, Homo sapien
aatagctgcaagtttcgagttagattcattaac

SEQ ID NO: 319693 - DNA, 33 bp, Homo sapien
ttctcagataggaaacagccatataaaggagga

SEQ ID NO: 319694 - DNA, 33 bp, Homo sapien
ttctcagataggaaacggccatataaaggagga

SEQ ID NO: 319695 - DNA, 33 bp, Homo sapien
cagaacattgcagtagcaaagtgaaagctctgt

SEQ ID NO: 319696 - DNA, 33 bp, Homo sapien
cagaacattgcagtagtaaagtgaaagctctgt

SEQ ID NO: 319697 - DNA, 33 bp, Homo sapien
cccaacaatgccgctagggaatatagtccatat

SEQ ID NO: 319698 - DNA, 33 bp, Homo sapien
cccaacaatgccgctatggaatatagtccatat

SEQ ID NO: 319699 - DNA, 33 bp, Homo sapien
aaagaaccttgtatgccgagtaggaaatgttca

SEQ ID NO: 319700 - DNA, 33 bp, Homo sapien
aaagaaccttgtatgctgagtaggaaatgttca

SEQ ID NO: 319701 - DNA, 33 bp, Homo sapien
ctggaaaagaggcaaacgcaaaggaccactaga

SEQ ID NO: 319702 - DNA, 33 bp, Homo sapien
ctggaaaagaggcaaatgcaaaggaccactaga

SEQ ID NO: 319703 - DNA, 33 bp, Homo sapien
ttagttaagagaggccaattgtgtgagaagagt

SEQ ID NO: 319704 - DNA, 33 bp, Homo sapien
ttagttaagagaggccgattgtgtgagaagagt

SEQ ID NO: 319705 - DNA, 33 bp, Homo sapien
gcagtgtgaggcataacgacccaactcagaaat

SEQ ID NO: 319706 - DNA, 33 bp, Homo sapien
gcagtgtgaggcataatgacccaactcagaaat

SEQ ID NO: 319707 - DNA, 33 bp, Homo sapien
attgtagtccctgccacccttactccaacacat

SEQ ID NO: 319708 - DNA, 33 bp, Homo sapien
attgtagtccctgccatccttactccaacacat

SEQ ID NO: 319709 - DNA, 33 bp, Homo sapien
gtaacaattagtaaccaacacagacaagagggc

SEQ ID NO: 319710 - DNA, 33 bp, Homo sapien
gtaacaattagtaacccacacagacaagagggc

SEQ ID NO: 319711 - DNA, 33 bp, Homo sapien
ttatttttgtctacaccagtaagggatggggaa

SEQ ID NO: 319712 - DNA, 33 bp, Homo sapien
ttatttttgtctacacgagtaagggatggggaa

SEQ ID NO: 319713 - DNA, 33 bp, Homo sapien
aaattttatatgtgggaatttctactaattaat

SEQ ID NO: 319714 - DNA, 33 bp, Homo sapien
aaattttatatgtggggatttctactaattaat

SEQ ID NO: 319715 - DNA, 33 bp, Homo sapien
ctatatcccccaatacaattatctgctcgggtt

SEQ ID NO: 319716 - DNA, 33 bp, Homo sapien
ctatatcccccaatactattatctgctcgggtt

SEQ ID NO: 319717 - DNA, 33 bp, Homo sapien
gtcctgtaggcaccgccgataataaatgtatgt

SEQ ID NO: 319718 - DNA, 33 bp, Homo sapien
gtcctgtaggcaccgctgataataaatgtatgt

SEQ ID NO: 319719 - DNA, 33 bp, Homo sapien
agacaaactctttagaagaaaatctatatgtac

SEQ ID NO: 319720 - DNA, 33 bp, Homo sapien
agacaaactctttagaggaaaatctatatgtac

SEQ ID NO: 319721 - DNA, 33 bp, Homo sapien
aggtccctgttctaaaaggagacacagaatgca

SEQ ID NO: 319722 - DNA, 33 bp, Homo sapien
aggtccctgttctaaagggagacacagaatgca

SEQ ID NO: 319723 - DNA, 33 bp, Homo sapien
ggctgctggtggctacaacctccagggactctg

SEQ ID NO: 319724 - DNA, 33 bp, Homo sapien
ggctgctggtggctacgacctccagggactctg

SEQ ID NO: 319725 - DNA, 33 bp, Homo sapien
ggaggcaaaatgttgacggtggggttgtaggaa

SEQ ID NO: 319726 - DNA, 33 bp, Homo sapien
ggaggcaaaatgttgatggtggggttgtaggaa

SEQ ID NO: 319727 - DNA, 33 bp, Homo sapien
gtaggaggatggataaacaaagtcatggataag

SEQ ID NO: 319728 - DNA, 33 bp, Homo sapien
gtaggaggatggataatcaaagtcatggataag

SEQ ID NO: 319729 - DNA, 33 bp, Homo sapien
tgtcaaatgtttattgcaaatatccttgtgcat

SEQ ID NO: 319730 - DNA, 33 bp, Homo sapien
tgtcaaatgtttattgtaaatatccttgtgcat

SEQ ID NO: 319731 - DNA, 33 bp, Homo sapien
aggcagcaattcatgaaaaacagctgtaattac

SEQ ID NO: 319732 - DNA, 33 bp, Homo sapien
aggcagcaattcatgagaaacagctgtaattac

SEQ ID NO: 319733 - DNA, 33 bp, Homo sapien
ccccagaattgcaatacggctagagagaggatt

SEQ ID NO: 319734 - DNA, 33 bp, Homo sapien
ccccagaattgcaatatggctagagagaggatt

SEQ ID NO: 319735 - DNA, 33 bp, Homo sapien
gaaggaaatctacacaatcggatgtcttaaaaa

SEQ ID NO: 319736 - DNA, 33 bp, Homo sapien
gaaggaaatctacacattcggatgtcttaaaaa

SEQ ID NO: 319737 - DNA, 33 bp, Homo sapien
atggttaaaggtaaaactgacaattgattgaca

SEQ ID NO: 319738 - DNA, 33 bp, Homo sapien
atggttaaaggtaaaattgacaattgattgaca

SEQ ID NO: 319739 - DNA, 33 bp, Homo sapien
ttgtgctccttttccacaggactgagttagtgc

SEQ ID NO: 319740 - DNA, 33 bp, Homo sapien
ttgtgctccttttccataggactgagttagtgc

SEQ ID NO: 319741 - DNA, 33 bp, Homo sapien
ggaggaagagaagaagacagagaatatgtgttt

SEQ ID NO: 319742 - DNA, 33 bp, Homo sapien
ggaggaagagaagaaggcagagaatatgtgttt

SEQ ID NO: 319743 - DNA, 33 bp, Homo sapien
ctaggttattaacagcagaaacagtagctaaca

SEQ ID NO: 319744 - DNA, 33 bp, Homo sapien
ctaggttattaacagcggaaacagtagctaaca

SEQ ID NO: 319745 - DNA, 33 bp, Homo sapien
aaatttaagttgagcaaactttctagttgatgg

SEQ ID NO: 319746 - DNA, 33 bp, Homo sapien
aaatttaagttgagcacactttctagttgatgg

SEQ ID NO: 319747 - DNA, 33 bp, Homo sapien
tgacctggagcacccaagaatgactgtcctttg

SEQ ID NO: 319748 - DNA, 33 bp, Homo sapien
tgacctggagcacccaggaatgactgtcctttg

SEQ ID NO: 319749 - DNA, 33 bp, Homo sapien
tattcgttttattatgaaatgaccagaatttag

SEQ ID NO: 319750 - DNA, 33 bp, Homo sapien
tattcgttttattatggaatgaccagaatttag

SEQ ID NO: 319751 - DNA, 33 bp, Homo sapien
gaatattatgactaaacagcgtaaaatgaactg

SEQ ID NO: 319752 - DNA, 33 bp, Homo sapien
gaatattatgactaaagagcgtaaaatgaactg

SEQ ID NO: 319753 - DNA, 33 bp, Homo sapien
tggagaagtcaaggagaatgagataaaccagaa

SEQ ID NO: 319754 - DNA, 33 bp, Homo sapien
tggagaagtcaaggaggatgagataaaccagaa

SEQ ID NO: 319755 - DNA, 33 bp, Homo sapien
ttcctatatgcctcagcagatggtctgataagg

SEQ ID NO: 319756 - DNA, 33 bp, Homo sapien
ttcctatatgcctcagtagatggtctgataagg

SEQ ID NO: 319757 - DNA, 33 bp, Homo sapien
ttgaagtgtcaataacaaaatggttagatctag

SEQ ID NO: 319758 - DNA, 33 bp, Homo sapien
ttgaagtgtcaataacgaaatggttagatctag

SEQ ID NO: 319759 - DNA, 33 bp, Homo sapien
tgcctaggagccataaacgtaggcccagggaag

SEQ ID NO: 319760 - DNA, 33 bp, Homo sapien
tgcctaggagccataaccgtaggcccagggaag

SEQ ID NO: 319761 - DNA, 33 bp, Homo sapien
agttggatggaacttacagaatggattaaagcg

SEQ ID NO: 319762 - DNA, 33 bp, Homo sapien
agttggatggaacttatagaatggattaaagcg

SEQ ID NO: 319763 - DNA, 33 bp, Homo sapien
ttttgttgcttgctataacaaaatcgaataatc

SEQ ID NO: 319764 - DNA, 33 bp, Homo sapien
ttttgttgcttgctatgacaaaatcgaataatc

SEQ ID NO: 319765 - DNA, 33 bp, Homo sapien
aatgtccagtgtgttacaaataagcagtaaata

SEQ ID NO: 319766 - DNA, 33 bp, Homo sapien
aatgtccagtgtgttataaataagcagtaaata

SEQ ID NO: 319767 - DNA, 33 bp, Homo sapien
cctgaaccatcatataactccaatttaattttt

SEQ ID NO: 319768 - DNA, 33 bp, Homo sapien
cctgaaccatcatatagctccaatttaattttt

SEQ ID NO: 319769 - DNA, 33 bp, Homo sapien
aaatttgatgtctacccggaacctcagcattgt

SEQ ID NO: 319770 - DNA, 33 bp, Homo sapien
aaatttgatgtctacctggaacctcagcattgt

SEQ ID NO: 319771 - DNA, 33 bp, Homo sapien
acttagtagctttcaacgaaaatatgttatctt

SEQ ID NO: 319772 - DNA, 33 bp, Homo sapien
acttagtagctttcaatgaaaatatgttatctt

SEQ ID NO: 319773 - DNA, 33 bp, Homo sapien
ttcagagctgttaaggcatcatttaggccagtg

SEQ ID NO: 319774 - DNA, 33 bp, Homo sapien
ttcagagctgttaaggtatcatttaggccagtg

SEQ ID NO: 319775 - DNA, 33 bp, Homo sapien
ttaacttacttaatacgcacgtcaatcccataa

SEQ ID NO: 319776 - DNA, 33 bp, Homo sapien
ttaacttacttaatactcacgtcaatcccataa

SEQ ID NO: 319777 - DNA, 33 bp, Homo sapien
tgcatttaggaaggagccaatcatgcaaagctg

SEQ ID NO: 319778 - DNA, 33 bp, Homo sapien
tgcatttaggaaggagtcaatcatgcaaagctg

SEQ ID NO: 319779 - DNA, 33 bp, Homo sapien
accctatctaaaataaagcagggtaatacgatg

SEQ ID NO: 319780 - DNA, 33 bp, Homo sapien
accctatctaaaataaggcagggtaatacgatg

SEQ ID NO: 319781 - DNA, 33 bp, Homo sapien
taggactctggtatttcaaaacaggaccaaaat

SEQ ID NO: 319782 - DNA, 33 bp, Homo sapien
taggactctggtatttgaaaacaggaccaaaat

SEQ ID NO: 319783 - DNA, 33 bp, Homo sapien
gtgttaaaaatcagacaggctgtgaaaatacaa

SEQ ID NO: 319784 - DNA, 33 bp, Homo sapien
gtgttaaaaatcagaccggctgtgaaaatacaa

SEQ ID NO: 319785 - DNA, 33 bp, Homo sapien
tgcaatgaggatggaaagcaaatatcattttaa

SEQ ID NO: 319786 - DNA, 33 bp, Homo sapien
tgcaatgaggatggaaggcaaatatcattttaa

SEQ ID NO: 319787 - DNA, 33 bp, Homo sapien
cgtggctgtgaaggtaaaacctatttttttctt

SEQ ID NO: 319788 - DNA, 33 bp, Homo sapien
cgtggctgtgaaggtacaacctatttttttctt

SEQ ID NO: 319789 - DNA, 33 bp, Homo sapien
aagtgccaggcggaccaaaagagtttaatggca

SEQ ID NO: 319790 - DNA, 33 bp, Homo sapien
aagtgccaggcggaccgaaagagtttaatggca

SEQ ID NO: 319791 - DNA, 33 bp, Homo sapien
aaattcctggagtcagaccttgattctacaatc

SEQ ID NO: 319792 - DNA, 33 bp, Homo sapien
aaattcctggagtcaggccttgattctacaatc

SEQ ID NO: 319793 - DNA, 33 bp, Homo sapien
aagaggtaagtagtagccaaccttgtacctacc

SEQ ID NO: 319794 - DNA, 33 bp, Homo sapien
aagaggtaagtagtagtcaaccttgtacctacc

SEQ ID NO: 319795 - DNA, 33 bp, Homo sapien
gaagaacattaagtggacatttaagatggaaca

SEQ ID NO: 319796 - DNA, 33 bp, Homo sapien
gaagaacattaagtgggcatttaagatggaaca

SEQ ID NO: 319797 - DNA, 33 bp, Homo sapien
acaaaagaagagattcaagatgctacaggtaca

SEQ ID NO: 319798 - DNA, 33 bp, Homo sapien
acaaaagaagagattccagatgctacaggtaca

SEQ ID NO: 319799 - DNA, 33 bp, Homo sapien
aacaaagaactgagaaaatcaggagtccttatc

SEQ ID NO: 319800 - DNA, 33 bp, Homo sapien
aacaaagaactgagaatatcaggagtccttatc

SEQ ID NO: 319801 - DNA, 33 bp, Homo sapien
cctattcttccttctaaaatgcatacactttga

SEQ ID NO: 319802 - DNA, 33 bp, Homo sapien
cctattcttccttctacaatgcatacactttga

SEQ ID NO: 319803 - DNA, 33 bp, Homo sapien
atcttccagatgttcacaggtatatctggaacg

SEQ ID NO: 319804 - DNA, 33 bp, Homo sapien
atcttccagatgttcataggtatatctggaacg

SEQ ID NO: 319805 - DNA, 33 bp, Homo sapien
tagtatacatcttgagaaatgcaatttacttca

SEQ ID NO: 319806 - DNA, 33 bp, Homo sapien
tagtatacatcttgagtaatgcaatttacttca

SEQ ID NO: 319807 - DNA, 33 bp, Homo sapien
aagcacatagcccaaaatcaacagctattaaaa

SEQ ID NO: 319808 - DNA, 33 bp, Homo sapien
aagcacatagcccaaagtcaacagctattaaaa

SEQ ID NO: 319809 - DNA, 33 bp, Homo sapien
acattatttcacaaaaatttctgaactatggat

SEQ ID NO: 319810 - DNA, 33 bp, Homo sapien
acattatttcacaaaagtttctgaactatggat

SEQ ID NO: 319811 - DNA, 33 bp, Homo sapien
taggcccagcactttacgaacaaaattacattt

SEQ ID NO: 319812 - DNA, 33 bp, Homo sapien
taggcccagcactttatgaacaaaattacattt

SEQ ID NO: 319813 - DNA, 33 bp, Homo sapien
ttaatcttttagtgaccgattgtccccaaatgt

SEQ ID NO: 319814 - DNA, 33 bp, Homo sapien
ttaatcttttagtgactgattgtccccaaatgt

SEQ ID NO: 319815 - DNA, 33 bp, Homo sapien
attggtagcaaactcagggaactttaactcaaa

SEQ ID NO: 319816 - DNA, 33 bp, Homo sapien
attggtagcaaactcatggaactttaactcaaa

SEQ ID NO: 319817 - DNA, 33 bp, Homo sapien
aaactctggccaagagaaagttgtttttgtttt

SEQ ID NO: 319818 - DNA, 33 bp, Homo sapien
aaactctggccaagaggaagttgtttttgtttt

SEQ ID NO: 319819 - DNA, 33 bp, Homo sapien
tttgattcctgccaaaacaaagtgaccttgagg

SEQ ID NO: 319820 - DNA, 33 bp, Homo sapien
tttgattcctgccaaagcaaagtgaccttgagg

SEQ ID NO: 319821 - DNA, 33 bp, Homo sapien
aggaggggtgtgggtaacgccagaaaaagcaaa

SEQ ID NO: 319822 - DNA, 33 bp, Homo sapien
aggaggggtgtgggtagcgccagaaaaagcaaa

SEQ ID NO: 319823 - DNA, 33 bp, Homo sapien
tggcttatacgtagaactggctctcctttcaga

SEQ ID NO: 319824 - DNA, 33 bp, Homo sapien
tggcttatacgtagaagtggctctcctttcaga

SEQ ID NO: 319825 - DNA, 33 bp, Homo sapien
ggaaggggcttatagaacatctagtataacttc

SEQ ID NO: 319826 - DNA, 33 bp, Homo sapien
ggaaggggcttatagatcatctagtataacttc

SEQ ID NO: 319827 - DNA, 33 bp, Homo sapien
actggtgacagaaaataagttaggttctctctt

SEQ ID NO: 319828 - DNA, 33 bp, Homo sapien
actggtgacagaaaatgagttaggttctctctt

SEQ ID NO: 319829 - DNA, 33 bp, Homo sapien
aatcatagcaccaaaaagttgtgagtttgcaat

SEQ ID NO: 319830 - DNA, 33 bp, Homo sapien
aatcatagcaccaaaacgttgtgagtttgcaat

SEQ ID NO: 319831 - DNA, 33 bp, Homo sapien
tcccgtgttgtgaatgcaaatggcaatggtgta

SEQ ID NO: 319832 - DNA, 33 bp, Homo sapien
tcccgtgttgtgaatggaaatggcaatggtgta

SEQ ID NO: 319833 - DNA, 33 bp, Homo sapien
ttggaacattacaaacactcaatataagtttcc

SEQ ID NO: 319834 - DNA, 33 bp, Homo sapien
ttggaacattacaaacgctcaatataagtttcc

SEQ ID NO: 319835 - DNA, 33 bp, Homo sapien
caactagcattctcgggagctcaaagcagtttt

SEQ ID NO: 319836 - DNA, 33 bp, Homo sapien
caactagcattctcggtagctcaaagcagtttt

SEQ ID NO: 319837 - DNA, 33 bp, Homo sapien
attcctactttatttacgcttcagattgagaga

SEQ ID NO: 319838 - DNA, 33 bp, Homo sapien
attcctactttatttatgcttcagattgagaga

SEQ ID NO: 319839 - DNA, 33 bp, Homo sapien
cttatcacctgcaacaggctcaactgagatagg

SEQ ID NO: 319840 - DNA, 33 bp, Homo sapien
cttatcacctgcaacatgctcaactgagatagg

SEQ ID NO: 319841 - DNA, 33 bp, Homo sapien
aaatatgctgagtacacaaacatgactaaaata

SEQ ID NO: 319842 - DNA, 33 bp, Homo sapien
aaatatgctgagtacataaacatgactaaaata

SEQ ID NO: 319843 - DNA, 33 bp, Homo sapien
gatggaaattggttgacaacaggtaatggtaca

SEQ ID NO: 319844 - DNA, 33 bp, Homo sapien
gatggaaattggttgagaacaggtaatggtaca

SEQ ID NO: 319845 - DNA, 33 bp, Homo sapien
ggccaagatggcaaagcctttctaccccatcat

SEQ ID NO: 319846 - DNA, 33 bp, Homo sapien
ggccaagatggcaaagtctttctaccccatcat

SEQ ID NO: 319847 - DNA, 33 bp, Homo sapien
gattaaaaactgaaaaagacaataatcaatatc

SEQ ID NO: 319848 - DNA, 33 bp, Homo sapien
gattaaaaactgaaaacgacaataatcaatatc

SEQ ID NO: 319849 - DNA, 33 bp, Homo sapien
gaaacaggagaaactacggattatttctagttt

SEQ ID NO: 319850 - DNA, 33 bp, Homo sapien
gaaacaggagaaactatggattatttctagttt

SEQ ID NO: 319851 - DNA, 33 bp, Homo sapien
ataagattgactctaaagtttgtatttatgaag

SEQ ID NO: 319852 - DNA, 33 bp, Homo sapien
ataagattgactctaacgtttgtatttatgaag

SEQ ID NO: 319853 - DNA, 33 bp, Homo sapien
ttttctgaaatgccagaaattgggatatggaaa

SEQ ID NO: 319854 - DNA, 33 bp, Homo sapien
ttttctgaaatgccaggaattgggatatggaaa

SEQ ID NO: 319855 - DNA, 33 bp, Homo sapien
tcccctatcttcaagaatcattgcacttcacag

SEQ ID NO: 319856 - DNA, 33 bp, Homo sapien
tcccctatcttcaagagtcattgcacttcacag

SEQ ID NO: 319857 - DNA, 33 bp, Homo sapien
gacatagtgtcatttgaactttttatgatgcag

SEQ ID NO: 319858 - DNA, 33 bp, Homo sapien
gacatagtgtcatttggactttttatgatgcag

SEQ ID NO: 319859 - DNA, 33 bp, Homo sapien
ggaagtcagtcctagtaaataacaccatccata

SEQ ID NO: 319860 - DNA, 33 bp, Homo sapien
ggaagtcagtcctagttaataacaccatccata

SEQ ID NO: 319861 - DNA, 33 bp, Homo sapien
tttagtaccagagaccaaaagtcatatctcact

SEQ ID NO: 319862 - DNA, 33 bp, Homo sapien
tttagtaccagagaccgaaagtcatatctcact

SEQ ID NO: 319863 - DNA, 33 bp, Homo sapien
aagcttctatacttgacgaacctagtttcttgt

SEQ ID NO: 319864 - DNA, 33 bp, Homo sapien
aagcttctatacttgaggaacctagtttcttgt

SEQ ID NO: 319865 - DNA, 33 bp, Homo sapien
gcctgcctcctgaatacggacaatgagaagcat

SEQ ID NO: 319866 - DNA, 33 bp, Homo sapien
gcctgcctcctgaatatggacaatgagaagcat

SEQ ID NO: 319867 - DNA, 33 bp, Homo sapien
ctggatggtgaaaaaaaatatgcagggcccctc

SEQ ID NO: 319868 - DNA, 33 bp, Homo sapien
ctggatggtgaaaaaagatatgcagggcccctc

SEQ ID NO: 319869 - DNA, 33 bp, Homo sapien
tcttttcaatcattcacaacactgtttaactct

SEQ ID NO: 319870 - DNA, 33 bp, Homo sapien
tcttttcaatcattcagaacactgtttaactct

SEQ ID NO: 319871 - DNA, 33 bp, Homo sapien
agcagaaagaagatgagggacaagggactgggt

SEQ ID NO: 319872 - DNA, 33 bp, Homo sapien
agcagaaagaagatgatggacaagggactgggt

SEQ ID NO: 319873 - DNA, 33 bp, Homo sapien
ttctgctgacttcataagaacatggttcacttt

SEQ ID NO: 319874 - DNA, 33 bp, Homo sapien
ttctgctgacttcataggaacatggttcacttt

SEQ ID NO: 319875 - DNA, 33 bp, Homo sapien
gatcaggctctgaaagaattttaggtcttgata

SEQ ID NO: 319876 - DNA, 33 bp, Homo sapien
gatcaggctctgaaagcattttaggtcttgata

SEQ ID NO: 319877 - DNA, 33 bp, Homo sapien
tgtacaattacagaaaacagcaaatacttatct

SEQ ID NO: 319878 - DNA, 33 bp, Homo sapien
tgtacaattacagaaagcagcaaatacttatct

SEQ ID NO: 319879 - DNA, 33 bp, Homo sapien
agagaatgtagtgaaaatcatcacaggcttcaa

SEQ ID NO: 319880 - DNA, 33 bp, Homo sapien
agagaatgtagtgaaagtcatcacaggcttcaa

SEQ ID NO: 319881 - DNA, 33 bp, Homo sapien
ctggaattgagttctgcagattttgtcctgtat

SEQ ID NO: 319882 - DNA, 33 bp, Homo sapien
ctggaattgagttctgtagattttgtcctgtat

SEQ ID NO: 319883 - DNA, 33 bp, Homo sapien
ttttgtcctgtatgcccataatccactaaatag

SEQ ID NO: 319884 - DNA, 33 bp, Homo sapien
ttttgtcctgtatgcctataatccactaaatag

SEQ ID NO: 319885 - DNA, 33 bp, Homo sapien
acattattttcttctaaatggatggttggttat

SEQ ID NO: 319886 - DNA, 33 bp, Homo sapien
acattattttcttctatatggatggttggttat

SEQ ID NO: 319887 - DNA, 33 bp, Homo sapien
aacgcaaaatgtgttgcagcatcgattctggca

SEQ ID NO: 319888 - DNA, 33 bp, Homo sapien
aacgcaaaatgtgttgtagcatcgattctggca

SEQ ID NO: 319889 - DNA, 33 bp, Homo sapien
aagtactcttgtctcaccgaggaaccatcagga

SEQ ID NO: 319890 - DNA, 33 bp, Homo sapien
aagtactcttgtctcatcgaggaaccatcagga

SEQ ID NO: 319891 - DNA, 33 bp, Homo sapien
tcccaattccttaaggccatcctctccactagg

SEQ ID NO: 319892 - DNA, 33 bp, Homo sapien
tcccaattccttaaggtcatcctctccactagg

SEQ ID NO: 319893 - DNA, 33 bp, Homo sapien
cagactgggtaactcaaaatgaacagaaattta

SEQ ID NO: 319894 - DNA, 33 bp, Homo sapien
cagactgggtaactcacaatgaacagaaattta

SEQ ID NO: 319895 - DNA, 33 bp, Homo sapien
cactgctacaatgaagaaagttcctgccccaat

SEQ ID NO: 319896 - DNA, 33 bp, Homo sapien
cactgctacaatgaagcaagttcctgccccaat

SEQ ID NO: 319897 - DNA, 33 bp, Homo sapien
ccctctagagtgaaacaatgaataaaatctact

SEQ ID NO: 319898 - DNA, 33 bp, Homo sapien
ccctctagagtgaaacgatgaataaaatctact

SEQ ID NO: 319899 - DNA, 33 bp, Homo sapien
ctcttgacagttacatcatgcttttaattgtag

SEQ ID NO: 319900 - DNA, 33 bp, Homo sapien
ctcttgacagttacattatgcttttaattgtag

SEQ ID NO: 319901 - DNA, 33 bp, Homo sapien
ggtcagttttctaactcaggtgaaacaagaaaa

SEQ ID NO: 319902 - DNA, 33 bp, Homo sapien
ggtcagttttctaactgaggtgaaacaagaaaa

SEQ ID NO: 319903 - DNA, 33 bp, Homo sapien
ctgacttcctctttcacaataattccagtgaaa

SEQ ID NO: 319904 - DNA, 33 bp, Homo sapien
ctgacttcctctttcataataattccagtgaaa

SEQ ID NO: 319905 - DNA, 33 bp, Homo sapien
ttccagtgtctagaacaacgccaggtacctacg

SEQ ID NO: 319906 - DNA, 33 bp, Homo sapien
ttccagtgtctagaacgacgccaggtacctacg

SEQ ID NO: 319907 - DNA, 33 bp, Homo sapien
ctttgttttaatctcgaatatctatatagtacc

SEQ ID NO: 319908 - DNA, 33 bp, Homo sapien
ctttgttttaatctcgcatatctatatagtacc

SEQ ID NO: 319909 - DNA, 33 bp, Homo sapien
gtgcatcatttactaccggcagcttgaagcttt

SEQ ID NO: 319910 - DNA, 33 bp, Homo sapien
gtgcatcatttactacgggcagcttgaagcttt

SEQ ID NO: 319911 - DNA, 33 bp, Homo sapien
atttcagaatttatggcagtgaactggtattct

SEQ ID NO: 319912 - DNA, 33 bp, Homo sapien
atttcagaatttatggtagtgaactggtattct

SEQ ID NO: 319913 - DNA, 33 bp, Homo sapien
ctgtgctcatttgttacccaagtggtgctggag

SEQ ID NO: 319914 - DNA, 33 bp, Homo sapien
ctgtgctcatttgttatccaagtggtgctggag

SEQ ID NO: 319915 - DNA, 33 bp, Homo sapien
aattgattccttaagactaaaacacaccatatt

SEQ ID NO: 319916 - DNA, 33 bp, Homo sapien
aattgattccttaagattaaaacacaccatatt

SEQ ID NO: 319917 - DNA, 33 bp, Homo sapien
taaaggctatctatcgcccacagtgacctgagc

SEQ ID NO: 319918 - DNA, 33 bp, Homo sapien
taaaggctatctatcgtccacagtgacctgagc

SEQ ID NO: 319919 - DNA, 33 bp, Homo sapien
agagaggcctgggtaagggatatgatgaactgg

SEQ ID NO: 319920 - DNA, 33 bp, Homo sapien
agagaggcctgggtaatggatatgatgaactgg

SEQ ID NO: 319921 - DNA, 33 bp, Homo sapien
tcatgacaacagaacaggaattcccatctccat

SEQ ID NO: 319922 - DNA, 33 bp, Homo sapien
tcatgacaacagaacatgaattcccatctccat

SEQ ID NO: 319923 - DNA, 33 bp, Homo sapien
gagtttgttggttatcaaggaatggatctgcta

SEQ ID NO: 319924 - DNA, 33 bp, Homo sapien
gagtttgttggttatccaggaatggatctgcta

SEQ ID NO: 319925 - DNA, 33 bp, Homo sapien
attacaggcatcagccactacttctggcctgtg

SEQ ID NO: 319926 - DNA, 33 bp, Homo sapien
attacaggcatcagccgctacttctggcctgtg

SEQ ID NO: 319927 - DNA, 33 bp, Homo sapien
tactagctgcaaatcccgaattatattcctagt

SEQ ID NO: 319928 - DNA, 33 bp, Homo sapien
tactagctgcaaatcctgaattatattcctagt

SEQ ID NO: 319929 - DNA, 33 bp, Homo sapien
caaggtactgatttcacattttttggatacata

SEQ ID NO: 319930 - DNA, 33 bp, Homo sapien
caaggtactgatttcatattttttggatacata

SEQ ID NO: 319931 - DNA, 33 bp, Homo sapien
gcagctacagcagtaaaagcagcaataggagaa

SEQ ID NO: 319932 - DNA, 33 bp, Homo sapien
gcagctacagcagtaagagcagcaataggagaa

SEQ ID NO: 319933 - DNA, 33 bp, Homo sapien
gtcttatctttaaaccaagttcatcctgtatat

SEQ ID NO: 319934 - DNA, 33 bp, Homo sapien
gtcttatctttaaaccgagttcatcctgtatat

SEQ ID NO: 319935 - DNA, 33 bp, Homo sapien
tgaaagaggttggatccattgtgcttcataatt

SEQ ID NO: 319936 - DNA, 33 bp, Homo sapien
tgaaagaggttggatctattgtgcttcataatt

SEQ ID NO: 319937 - DNA, 33 bp, Homo sapien
actgcagcaaagacaaggcaaattcgattttta

SEQ ID NO: 319938 - DNA, 33 bp, Homo sapien
actgcagcaaagacaatgcaaattcgattttta

SEQ ID NO: 319939 - DNA, 33 bp, Homo sapien
ttagtaatgagaagtaactgatgttgagaacta

SEQ ID NO: 319940 - DNA, 33 bp, Homo sapien
ttagtaatgagaagtagctgatgttgagaacta

SEQ ID NO: 319941 - DNA, 33 bp, Homo sapien
ctctgtcacttaaggacgctgtttgggaagtaa

SEQ ID NO: 319942 - DNA, 33 bp, Homo sapien
ctctgtcacttaaggatgctgtttgggaagtaa

SEQ ID NO: 319943 - DNA, 33 bp, Homo sapien
atcgctgactgaaagacaggtcatttttaaaat

SEQ ID NO: 319944 - DNA, 33 bp, Homo sapien
atcgctgactgaaagataggtcatttttaaaat

SEQ ID NO: 319945 - DNA, 33 bp, Homo sapien
tgatgggaacattatgaatttttcaaggaccag

SEQ ID NO: 319946 - DNA, 33 bp, Homo sapien
tgatgggaacattatgtatttttcaaggaccag

SEQ ID NO: 319947 - DNA, 33 bp, Homo sapien
aaaccatgtgtggaataaaagtaaacagattta

SEQ ID NO: 319948 - DNA, 33 bp, Homo sapien
aaaccatgtgtggaatcaaagtaaacagattta

SEQ ID NO: 319949 - DNA, 33 bp, Homo sapien
catgtactatggaaaaaacccatcttattacat

SEQ ID NO: 319950 - DNA, 33 bp, Homo sapien
catgtactatggaaaacacccatcttattacat

SEQ ID NO: 319951 - DNA, 33 bp, Homo sapien
cccagtattattccctgaagttcccatgaacca

SEQ ID NO: 319952 - DNA, 33 bp, Homo sapien
cccagtattattcccttaagttcccatgaacca

SEQ ID NO: 319953 - DNA, 33 bp, Homo sapien
gaaatgcagtttgatacgagacactgaattggg

SEQ ID NO: 319954 - DNA, 33 bp, Homo sapien
gaaatgcagtttgatatgagacactgaattggg

SEQ ID NO: 319955 - DNA, 33 bp, Homo sapien
ataacatcatgtttggcacatagtagcctgtca

SEQ ID NO: 319956 - DNA, 33 bp, Homo sapien
ataacatcatgtttggtacatagtagcctgtca

SEQ ID NO: 319957 - DNA, 33 bp, Homo sapien
tggtgatgaagccagaacgtaaacagaatgatt

SEQ ID NO: 319958 - DNA, 33 bp, Homo sapien
tggtgatgaagccagagcgtaaacagaatgatt

SEQ ID NO: 319959 - DNA, 33 bp, Homo sapien
attttaaacactttggaatatgttcttcctggt

SEQ ID NO: 319960 - DNA, 33 bp, Homo sapien
attttaaacactttggcatatgttcttcctggt

SEQ ID NO: 319961 - DNA, 33 bp, Homo sapien
ggaggaaagtggtagacgaggaggatgttctgg

SEQ ID NO: 319962 - DNA, 33 bp, Homo sapien
ggaggaaagtggtagatgaggaggatgttctgg

SEQ ID NO: 319963 - DNA, 33 bp, Homo sapien
tttttcagtatccctcactcaagatgaaggaga

SEQ ID NO: 319964 - DNA, 33 bp, Homo sapien
tttttcagtatccctcgctcaagatgaaggaga

SEQ ID NO: 319965 - DNA, 33 bp, Homo sapien
gttggtgacagcttaactgatgatgcatagtgg

SEQ ID NO: 319966 - DNA, 33 bp, Homo sapien
gttggtgacagcttaattgatgatgcatagtgg

SEQ ID NO: 319967 - DNA, 33 bp, Homo sapien
catgggtagaggatgacatagaaaattaagcac

SEQ ID NO: 319968 - DNA, 33 bp, Homo sapien
catgggtagaggatgatatagaaaattaagcac

SEQ ID NO: 319969 - DNA, 33 bp, Homo sapien
gatacattggcagaaacctgtttgaagagattc

SEQ ID NO: 319970 - DNA, 33 bp, Homo sapien
gatacattggcagaaagctgtttgaagagattc

SEQ ID NO: 319971 - DNA, 33 bp, Homo sapien
ttgtcgagactgagagaagaagacaagattgtt

SEQ ID NO: 319972 - DNA, 33 bp, Homo sapien
ttgtcgagactgagaggagaagacaagattgtt

SEQ ID NO: 319973 - DNA, 33 bp, Homo sapien
atttctaagacaaccaatgaagcttgaggcctt

SEQ ID NO: 319974 - DNA, 33 bp, Homo sapien
atttctaagacaaccagtgaagcttgaggcctt

SEQ ID NO: 319975 - DNA, 33 bp, Homo sapien
aatgtacagctagaaacgctgggaaagaaacga

SEQ ID NO: 319976 - DNA, 33 bp, Homo sapien
aatgtacagctagaaatgctgggaaagaaacga

SEQ ID NO: 319977 - DNA, 33 bp, Homo sapien
aagataaaaaatattacgctgttatgaacaatc

SEQ ID NO: 319978 - DNA, 33 bp, Homo sapien
aagataaaaaatattatgctgttatgaacaatc

SEQ ID NO: 319979 - DNA, 33 bp, Homo sapien
aactgctgactctgtaaaagaggaagtggcaat

SEQ ID NO: 319980 - DNA, 33 bp, Homo sapien
aactgctgactctgtacaagaggaagtggcaat

SEQ ID NO: 319981 - DNA, 33 bp, Homo sapien
atagcattagctaaacagaagcaatgggacttt

SEQ ID NO: 319982 - DNA, 33 bp, Homo sapien
atagcattagctaaacggaagcaatgggacttt

SEQ ID NO: 319983 - DNA, 33 bp, Homo sapien
ttattacaaaaaggtagaatgcctgctactgga

SEQ ID NO: 319984 - DNA, 33 bp, Homo sapien
ttattacaaaaaggtataatgcctgctactgga

SEQ ID NO: 319985 - DNA, 33 bp, Homo sapien
cagtttcctcaagtgacactgatggataccttt

SEQ ID NO: 319986 - DNA, 33 bp, Homo sapien
cagtttcctcaagtgatactgatggataccttt

SEQ ID NO: 319987 - DNA, 33 bp, Homo sapien
aacagctactaagtgacgatgccaaggatttaa

SEQ ID NO: 319988 - DNA, 33 bp, Homo sapien
aacagctactaagtgatgatgccaaggatttaa

SEQ ID NO: 319989 - DNA, 33 bp, Homo sapien
gctcatttggagagcacaagggtcaccatatgc

SEQ ID NO: 319990 - DNA, 33 bp, Homo sapien
gctcatttggagagcagaagggtcaccatatgc

SEQ ID NO: 319991 - DNA, 33 bp, Homo sapien
tatagagtccaacatacggcatgattctaggag

SEQ ID NO: 319992 - DNA, 33 bp, Homo sapien
tatagagtccaacatatggcatgattctaggag

SEQ ID NO: 319993 - DNA, 33 bp, Homo sapien
ttttcaaataatgacacattcatacattccata

SEQ ID NO: 319994 - DNA, 33 bp, Homo sapien
ttttcaaataatgacatattcatacattccata

SEQ ID NO: 319995 - DNA, 33 bp, Homo sapien
gtctcccagacactcacgtacctgacaaggtga

SEQ ID NO: 319996 - DNA, 33 bp, Homo sapien
gtctcccagacactcatgtacctgacaaggtga

SEQ ID NO: 319997 - DNA, 33 bp, Homo sapien
taaacaagccctccaaatgatttaatgcatgcc

SEQ ID NO: 319998 - DNA, 33 bp, Homo sapien
taaacaagccctccaagtgatttaatgcatgcc

SEQ ID NO: 319999 - DNA, 33 bp, Homo sapien
tgagtttagggccctgaaataagcaatcctggg

SEQ ID NO: 320000 - DNA, 33 bp, Homo sapien
tgagtttagggccctggaataagcaatcctggg

SEQ ID NO: 320001 - DNA, 33 bp, Homo sapien
cccagagaatgaaatgcaactcctggaagaaca

SEQ ID NO: 320002 - DNA, 33 bp, Homo sapien
cccagagaatgaaatggaactcctggaagaaca

SEQ ID NO: 320003 - DNA, 33 bp, Homo sapien
aaaaagaggaatctcaagggcagacaacaatct

SEQ ID NO: 320004 - DNA, 33 bp, Homo sapien
aaaaagaggaatctcaggggcagacaacaatct

SEQ ID NO: 320005 - DNA, 33 bp, Homo sapien
tacatttttttgtatcagaggaggtaaaaataa

SEQ ID NO: 320006 - DNA, 33 bp, Homo sapien
tacatttttttgtatcggaggaggtaaaaataa

SEQ ID NO: 320007 - DNA, 33 bp, Homo sapien
tcactagaattatcacaaatggcaatttattaa

SEQ ID NO: 320008 - DNA, 33 bp, Homo sapien
tcactagaattatcacgaatggcaatttattaa

SEQ ID NO: 320009 - DNA, 33 bp, Homo sapien
tccctatgctggtgtggaaatttgccacccaat

SEQ ID NO: 320010 - DNA, 33 bp, Homo sapien
tccctatgctggtgtgtaaatttgccacccaat

SEQ ID NO: 320011 - DNA, 33 bp, Homo sapien
tccaatgccaaaatgaaaatagacccgtcttcc

SEQ ID NO: 320012 - DNA, 33 bp, Homo sapien
tccaatgccaaaatgagaatagacccgtcttcc

SEQ ID NO: 320013 - DNA, 33 bp, Homo sapien
gaagttattaatttgaagcttacatatgaatct

SEQ ID NO: 320014 - DNA, 33 bp, Homo sapien
gaagttattaatttgaggcttacatatgaatct

SEQ ID NO: 320015 - DNA, 33 bp, Homo sapien
ggtacttgcctttctcaaaaactgatagtaaac

SEQ ID NO: 320016 - DNA, 33 bp, Homo sapien
ggtacttgcctttctcgaaaactgatagtaaac

SEQ ID NO: 320017 - DNA, 33 bp, Homo sapien
gttaagctctgcatacaacataccatttgtcac

SEQ ID NO: 320018 - DNA, 33 bp, Homo sapien
gttaagctctgcataccacataccatttgtcac

SEQ ID NO: 320019 - DNA, 33 bp, Homo sapien
tttcacgagctcccaccgtatctgtttgcttca

SEQ ID NO: 320020 - DNA, 33 bp, Homo sapien
tttcacgagctcccactgtatctgtttgcttca

SEQ ID NO: 320021 - DNA, 33 bp, Homo sapien
ggcttacagcctaagaagaaagtccagaattta

SEQ ID NO: 320022 - DNA, 33 bp, Homo sapien
ggcttacagcctaagaggaaagtccagaattta

SEQ ID NO: 320023 - DNA, 33 bp, Homo sapien
gaaccatcaggaaaaccggctgtctttagattt

SEQ ID NO: 320024 - DNA, 33 bp, Homo sapien
gaaccatcaggaaaactggctgtctttagattt

SEQ ID NO: 320025 - DNA, 33 bp, Homo sapien
ttcaaggaactcagtcaataattacaagctaat

SEQ ID NO: 320026 - DNA, 33 bp, Homo sapien
ttcaaggaactcagtcgataattacaagctaat

SEQ ID NO: 320027 - DNA, 33 bp, Homo sapien
agtgatttgtaggccaaaagaaaggttctgttt

SEQ ID NO: 320028 - DNA, 33 bp, Homo sapien
agtgatttgtaggccagaagaaaggttctgttt

SEQ ID NO: 320029 - DNA, 33 bp, Homo sapien
ctttcagagaaaacccagatacagggcatgaga

SEQ ID NO: 320030 - DNA, 33 bp, Homo sapien
ctttcagagaaaacccggatacagggcatgaga

SEQ ID NO: 320031 - DNA, 33 bp, Homo sapien
agtgtcattttcactaggcagctcttcataagc

SEQ ID NO: 320032 - DNA, 33 bp, Homo sapien
agtgtcattttcactatgcagctcttcataagc

SEQ ID NO: 320033 - DNA, 33 bp, Homo sapien
ctaggtaaaagaaaagactagccaaaagcatct

SEQ ID NO: 320034 - DNA, 33 bp, Homo sapien
ctaggtaaaagaaaaggctagccaaaagcatct

SEQ ID NO: 320035 - DNA, 33 bp, Homo sapien
tgagctaaaccataacccaaaatcctttcacgt

SEQ ID NO: 320036 - DNA, 33 bp, Homo sapien
tgagctaaaccataactcaaaatcctttcacgt

SEQ ID NO: 320037 - DNA, 33 bp, Homo sapien
aattaggttgtaagaacggaagctaaaccagat

SEQ ID NO: 320038 - DNA, 33 bp, Homo sapien
aattaggttgtaagaatggaagctaaaccagat

SEQ ID NO: 320039 - DNA, 33 bp, Homo sapien
aaccctgagttcttaactgctacacttcggtgt

SEQ ID NO: 320040 - DNA, 33 bp, Homo sapien
aaccctgagttcttaattgctacacttcggtgt

SEQ ID NO: 320041 - DNA, 33 bp, Homo sapien
tttatggcagttctggcaaatatcctctagatc

SEQ ID NO: 320042 - DNA, 33 bp, Homo sapien
tttatggcagttctggtaaatatcctctagatc

SEQ ID NO: 320043 - DNA, 33 bp, Homo sapien
aataatgagttgcctactaagaaccaggggaat

SEQ ID NO: 320044 - DNA, 33 bp, Homo sapien
aataatgagttgcctattaagaaccaggggaat

SEQ ID NO: 320045 - DNA, 33 bp, Homo sapien
ttattaaactgataccaagaagaatgaaagaag

SEQ ID NO: 320046 - DNA, 33 bp, Homo sapien
ttattaaactgataccgagaagaatgaaagaag

SEQ ID NO: 320047 - DNA, 33 bp, Homo sapien
tcatctttaaagttcaaatgatggtaactaact

SEQ ID NO: 320048 - DNA, 33 bp, Homo sapien
tcatctttaaagttcagatgatggtaactaact

SEQ ID NO: 320049 - DNA, 33 bp, Homo sapien
acggatctagtttgaaaaatcactgaataaaat

SEQ ID NO: 320050 - DNA, 33 bp, Homo sapien
acggatctagtttgaacaatcactgaataaaat

SEQ ID NO: 320051 - DNA, 33 bp, Homo sapien
gagcagaaggctctaacgtggaaacaagaaggc

SEQ ID NO: 320052 - DNA, 33 bp, Homo sapien
gagcagaaggctctaatgtggaaacaagaaggc

SEQ ID NO: 320053 - DNA, 33 bp, Homo sapien
tgtgtaaaatacccaacttaatgacggacacat

SEQ ID NO: 320054 - DNA, 33 bp, Homo sapien
tgtgtaaaatacccaatttaatgacggacacat

SEQ ID NO: 320055 - DNA, 33 bp, Homo sapien
ctttgagtactgcataaaggactttgcaaagac

SEQ ID NO: 320056 - DNA, 33 bp, Homo sapien
ctttgagtactgcatacaggactttgcaaagac

SEQ ID NO: 320057 - DNA, 33 bp, Homo sapien
tcatgtctcattgtgaatactagttccaacttt

SEQ ID NO: 320058 - DNA, 33 bp, Homo sapien
tcatgtctcattgtgactactagttccaacttt

SEQ ID NO: 320059 - DNA, 33 bp, Homo sapien
ctgctttgccttgatcacatgaaaatatgctga

SEQ ID NO: 320060 - DNA, 33 bp, Homo sapien
ctgctttgccttgatcgcatgaaaatatgctga

SEQ ID NO: 320061 - DNA, 33 bp, Homo sapien
atcatgagctagtgtcaataatcataagatgct

SEQ ID NO: 320062 - DNA, 33 bp, Homo sapien
atcatgagctagtgtcgataatcataagatgct

SEQ ID NO: 320063 - DNA, 33 bp, Homo sapien
tctttgaaattcctaacagaaacacaacaaacc

SEQ ID NO: 320064 - DNA, 33 bp, Homo sapien
tctttgaaattcctaatagaaacacaacaaacc

SEQ ID NO: 320065 - DNA, 33 bp, Homo sapien
ttgaacctgaaaatagaaaagctaagaaacagg

SEQ ID NO: 320066 - DNA, 33 bp, Homo sapien
ttgaacctgaaaataggaaagctaagaaacagg

SEQ ID NO: 320067 - DNA, 33 bp, Homo sapien
atatatgcattttctcacattaaaaccaagtga

SEQ ID NO: 320068 - DNA, 33 bp, Homo sapien
atatatgcattttctcgcattaaaaccaagtga

SEQ ID NO: 320069 - DNA, 33 bp, Homo sapien
tggaagacattggaaaagtggagtgggcaacct

SEQ ID NO: 320070 - DNA, 33 bp, Homo sapien
tggaagacattggaaaggtggagtgggcaacct

SEQ ID NO: 320071 - DNA, 33 bp, Homo sapien
ttgggatatggcagaaagaatcaagattaattt

SEQ ID NO: 320072 - DNA, 33 bp, Homo sapien
ttgggatatggcagaaggaatcaagattaattt

SEQ ID NO: 320073 - DNA, 33 bp, Homo sapien
actgaaaaaggttttgaaaggctctcaaggcaa

SEQ ID NO: 320074 - DNA, 33 bp, Homo sapien
actgaaaaaggttttggaaggctctcaaggcaa

SEQ ID NO: 320075 - DNA, 33 bp, Homo sapien
ttataatatagtggtacaacatttgtagacttt

SEQ ID NO: 320076 - DNA, 33 bp, Homo sapien
ttataatatagtggtataacatttgtagacttt

SEQ ID NO: 320077 - DNA, 33 bp, Homo sapien
ctgaactctttccgcaaattaagaaagtcagaa

SEQ ID NO: 320078 - DNA, 33 bp, Homo sapien
ctgaactctttccgcagattaagaaagtcagaa

SEQ ID NO: 320079 - DNA, 33 bp, Homo sapien
atatcacatggttctacgatgacacacagattt

SEQ ID NO: 320080 - DNA, 33 bp, Homo sapien
atatcacatggttctatgatgacacacagattt

SEQ ID NO: 320081 - DNA, 33 bp, Homo sapien
tacttccattgaaggacagctaagtggaaacta

SEQ ID NO: 320082 - DNA, 33 bp, Homo sapien
tacttccattgaaggagagctaagtggaaacta

SEQ ID NO: 320083 - DNA, 33 bp, Homo sapien
tggttattagtgttcaatgaaagacacaagcaa

SEQ ID NO: 320084 - DNA, 33 bp, Homo sapien
tggttattagtgttcagtgaaagacacaagcaa

SEQ ID NO: 320085 - DNA, 33 bp, Homo sapien
gaggggctaattagaccgcaggaaaacttccac

SEQ ID NO: 320086 - DNA, 33 bp, Homo sapien
gaggggctaattagactgcaggaaaacttccac

SEQ ID NO: 320087 - DNA, 33 bp, Homo sapien
ctttgtgtgtgtcataagagattcttgtcttta

SEQ ID NO: 320088 - DNA, 33 bp, Homo sapien
ctttgtgtgtgtcataggagattcttgtcttta

SEQ ID NO: 320089 - DNA, 33 bp, Homo sapien
gacaacttatctttgaggatggagtaaggacca

SEQ ID NO: 320090 - DNA, 33 bp, Homo sapien
gacaacttatctttgatgatggagtaaggacca

SEQ ID NO: 320091 - DNA, 33 bp, Homo sapien
gatgatggagtgaaatcagacacattttgggaa

SEQ ID NO: 320092 - DNA, 33 bp, Homo sapien
gatgatggagtgaaattagacacattttgggaa

SEQ ID NO: 320093 - DNA, 33 bp, Homo sapien
ttaagactcaaaagaaaatgttcagatttatat

SEQ ID NO: 320094 - DNA, 33 bp, Homo sapien
ttaagactcaaaagaagatgttcagatttatat

SEQ ID NO: 320095 - DNA, 33 bp, Homo sapien
agattgcaaatttctacagggtgaagcttatgt

SEQ ID NO: 320096 - DNA, 33 bp, Homo sapien
agattgcaaatttctagagggtgaagcttatgt

SEQ ID NO: 320097 - DNA, 33 bp, Homo sapien
gacctagctccatttcaagccccactcttacct

SEQ ID NO: 320098 - DNA, 33 bp, Homo sapien
gacctagctccatttccagccccactcttacct

SEQ ID NO: 320099 - DNA, 33 bp, Homo sapien
agttcatatgtccatcacttattaactccattt

SEQ ID NO: 320100 - DNA, 33 bp, Homo sapien
agttcatatgtccatcgcttattaactccattt

SEQ ID NO: 320101 - DNA, 33 bp, Homo sapien
tgaagtagaaaggctacgtttgaagattctgtc

SEQ ID NO: 320102 - DNA, 33 bp, Homo sapien
tgaagtagaaaggctatgtttgaagattctgtc

SEQ ID NO: 320103 - DNA, 33 bp, Homo sapien
tgatccttaccaactaccaagtacagcctggaa

SEQ ID NO: 320104 - DNA, 33 bp, Homo sapien
tgatccttaccaactatcaagtacagcctggaa

SEQ ID NO: 320105 - DNA, 33 bp, Homo sapien
attttttcccctcacaatgattgtctaaagctc

SEQ ID NO: 320106 - DNA, 33 bp, Homo sapien
attttttcccctcacagtgattgtctaaagctc

SEQ ID NO: 320107 - DNA, 33 bp, Homo sapien
acgctcctccaggaaacagtgttgctttaggaa

SEQ ID NO: 320108 - DNA, 33 bp, Homo sapien
acgctcctccaggaaatagtgttgctttaggaa

SEQ ID NO: 320109 - DNA, 33 bp, Homo sapien
agagtttcaatccttacggtgtgtggtctcaag

SEQ ID NO: 320110 - DNA, 33 bp, Homo sapien
agagtttcaatccttatggtgtgtggtctcaag

SEQ ID NO: 320111 - DNA, 33 bp, Homo sapien
tgttatgagacttgaacagcgtaaacctgaatg

SEQ ID NO: 320112 - DNA, 33 bp, Homo sapien
tgttatgagacttgaatagcgtaaacctgaatg

SEQ ID NO: 320113 - DNA, 33 bp, Homo sapien
tagaagagatttatcaaactttcagatagaagt

SEQ ID NO: 320114 - DNA, 33 bp, Homo sapien
tagaagagatttatcagactttcagatagaagt

SEQ ID NO: 320115 - DNA, 33 bp, Homo sapien
gagacctcctcttactaaaagatcatgaaaact

SEQ ID NO: 320116 - DNA, 33 bp, Homo sapien
gagacctcctcttactgaaagatcatgaaaact

SEQ ID NO: 320117 - DNA, 33 bp, Homo sapien
taagctcctacccaaagatgtagtgtacaagct

SEQ ID NO: 320118 - DNA, 33 bp, Homo sapien
taagctcctacccaaatatgtagtgtacaagct

SEQ ID NO: 320119 - DNA, 33 bp, Homo sapien
ggggccagctgcataacatgaatagatgaaata

SEQ ID NO: 320120 - DNA, 33 bp, Homo sapien
ggggccagctgcataatatgaatagatgaaata

SEQ ID NO: 320121 - DNA, 33 bp, Homo sapien
ggtttatggggcctttaaaaaagtgtgtataga

SEQ ID NO: 320122 - DNA, 33 bp, Homo sapien
ggtttatggggccttttaaaaagtgtgtataga

SEQ ID NO: 320123 - DNA, 33 bp, Homo sapien
tcttacaataaaactcaccatttcttgcaaaca

SEQ ID NO: 320124 - DNA, 33 bp, Homo sapien
tcttacaataaaactcgccatttcttgcaaaca

SEQ ID NO: 320125 - DNA, 33 bp, Homo sapien
tgaactgataccattacgctttatgattgtgtt

SEQ ID NO: 320126 - DNA, 33 bp, Homo sapien
tgaactgataccattatgctttatgattgtgtt

SEQ ID NO: 320127 - DNA, 33 bp, Homo sapien
agctcctttctcccaaagtgttgatactggtta

SEQ ID NO: 320128 - DNA, 33 bp, Homo sapien
agctcctttctcccaacgtgttgatactggtta

SEQ ID NO: 320129 - DNA, 33 bp, Homo sapien
agcaccaaataagcataaagatttagcctgtgc

SEQ ID NO: 320130 - DNA, 33 bp, Homo sapien
agcaccaaataagcatcaagatttagcctgtgc

SEQ ID NO: 320131 - DNA, 33 bp, Homo sapien
caatagcttatgagaccaaaaaacattgcaaaa

SEQ ID NO: 320132 - DNA, 33 bp, Homo sapien
caatagcttatgagacgaaaaaacattgcaaaa

SEQ ID NO: 320133 - DNA, 33 bp, Homo sapien
ccagggctggagaaataaagtcaggagaatctt

SEQ ID NO: 320134 - DNA, 33 bp, Homo sapien
ccagggctggagaaatgaagtcaggagaatctt

SEQ ID NO: 320135 - DNA, 33 bp, Homo sapien
ctgatgtatctttttcaaaatgcctctcattat

SEQ ID NO: 320136 - DNA, 33 bp, Homo sapien
ctgatgtatctttttcgaaatgcctctcattat

SEQ ID NO: 320137 - DNA, 33 bp, Homo sapien
tatgtgctctaaacctaagcctctattctggtg

SEQ ID NO: 320138 - DNA, 33 bp, Homo sapien
tatgtgctctaaacctgagcctctattctggtg

SEQ ID NO: 320139 - DNA, 33 bp, Homo sapien
atttataacagtatcactgactgaatgtcatca

SEQ ID NO: 320140 - DNA, 33 bp, Homo sapien
atttataacagtatcattgactgaatgtcatca

SEQ ID NO: 320141 - DNA, 33 bp, Homo sapien
tctctagagaagcaagccattttctactttttc

SEQ ID NO: 320142 - DNA, 33 bp, Homo sapien
tctctagagaagcaagtcattttctactttttc

SEQ ID NO: 320143 - DNA, 33 bp, Homo sapien
aatcattaacttgttgaaactaattattctatg

SEQ ID NO: 320144 - DNA, 33 bp, Homo sapien
aatcattaacttgttggaactaattattctatg

SEQ ID NO: 320145 - DNA, 33 bp, Homo sapien
tgtacccatctctccaatcattagacactctcc

SEQ ID NO: 320146 - DNA, 33 bp, Homo sapien
tgtacccatctctccagtcattagacactctcc

SEQ ID NO: 320147 - DNA, 33 bp, Homo sapien
gatcagctatattcaactgttccttccactaaa

SEQ ID NO: 320148 - DNA, 33 bp, Homo sapien
gatcagctatattcaattgttccttccactaaa

SEQ ID NO: 320149 - DNA, 33 bp, Homo sapien
tttggtgagttaagaacgttggaagagtggtaa

SEQ ID NO: 320150 - DNA, 33 bp, Homo sapien
tttggtgagttaagaatgttggaagagtggtaa

SEQ ID NO: 320151 - DNA, 33 bp, Homo sapien
ttttcaagaataacaacgtggctggattctagt

SEQ ID NO: 320152 - DNA, 33 bp, Homo sapien
ttttcaagaataacaaggtggctggattctagt

SEQ ID NO: 320153 - DNA, 33 bp, Homo sapien
ccaataaactataccaatagcatttctcttctt

SEQ ID NO: 320154 - DNA, 33 bp, Homo sapien
ccaataaactataccagtagcatttctcttctt

SEQ ID NO: 320155 - DNA, 33 bp, Homo sapien
caaaaaggcagttctccctttcgtgatgctttg

SEQ ID NO: 320156 - DNA, 33 bp, Homo sapien
caaaaaggcagttctctctttcgtgatgctttg

SEQ ID NO: 320157 - DNA, 33 bp, Homo sapien
tttcaggtcttattaaatgctgtgcttcaaaaa

SEQ ID NO: 320158 - DNA, 33 bp, Homo sapien
tttcaggtcttattaactgctgtgcttcaaaaa

SEQ ID NO: 320159 - DNA, 33 bp, Homo sapien
cttccagaaaaaaggacgaaaacaaggcagcac

SEQ ID NO: 320160 - DNA, 33 bp, Homo sapien
cttccagaaaaaaggatgaaaacaaggcagcac

SEQ ID NO: 320161 - DNA, 33 bp, Homo sapien
aaataaaataaagcataaggaacagtgtagaag

SEQ ID NO: 320162 - DNA, 33 bp, Homo sapien
aaataaaataaagcatcaggaacagtgtagaag

SEQ ID NO: 320163 - DNA, 33 bp, Homo sapien
aacactccactctgggaccagaatacaccagca

SEQ ID NO: 320164 - DNA, 33 bp, Homo sapien
aacactccactctggggccagaatacaccagca

SEQ ID NO: 320165 - DNA, 33 bp, Homo sapien
ggtgggagagctactagcatcacctgaaatgtt

SEQ ID NO: 320166 - DNA, 33 bp, Homo sapien
ggtgggagagctactatcatcacctgaaatgtt

SEQ ID NO: 320167 - DNA, 33 bp, Homo sapien
tgccataactaatagcaagacagattggcaaac

SEQ ID NO: 320168 - DNA, 33 bp, Homo sapien
tgccataactaatagcgagacagattggcaaac

SEQ ID NO: 320169 - DNA, 33 bp, Homo sapien
catcatccttataacaactgttcagtgtggttg

SEQ ID NO: 320170 - DNA, 33 bp, Homo sapien
catcatccttataacacctgttcagtgtggttg

SEQ ID NO: 320171 - DNA, 33 bp, Homo sapien
attgctgatattttcacgttttgctaaatctat

SEQ ID NO: 320172 - DNA, 33 bp, Homo sapien
attgctgatattttcatgttttgctaaatctat

SEQ ID NO: 320173 - DNA, 33 bp, Homo sapien
ttttatgaagtcaaaacgtaactgaaagaaagt

SEQ ID NO: 320174 - DNA, 33 bp, Homo sapien
ttttatgaagtcaaaaggtaactgaaagaaagt

SEQ ID NO: 320175 - DNA, 33 bp, Homo sapien
agtaaacacatggttaataaacaggttcggcca

SEQ ID NO: 320176 - DNA, 33 bp, Homo sapien
agtaaacacatggttagtaaacaggttcggcca

SEQ ID NO: 320177 - DNA, 33 bp, Homo sapien
gatccaaagcagtttaccgtcaccagtgcagtg

SEQ ID NO: 320178 - DNA, 33 bp, Homo sapien
gatccaaagcagtttatcgtcaccagtgcagtg

SEQ ID NO: 320179 - DNA, 33 bp, Homo sapien
tgctttttggactatgcaggtaggatatgtaga

SEQ ID NO: 320180 - DNA, 33 bp, Homo sapien
tgctttttggactatgtaggtaggatatgtaga

SEQ ID NO: 320181 - DNA, 33 bp, Homo sapien
tctatgatgtgtgaccaaatctgttggtaaagt

SEQ ID NO: 320182 - DNA, 33 bp, Homo sapien
tctatgatgtgtgaccgaatctgttggtaaagt

SEQ ID NO: 320183 - DNA, 33 bp, Homo sapien
tacattaacacaaagccgaaacgggtaaccaaa

SEQ ID NO: 320184 - DNA, 33 bp, Homo sapien
tacattaacacaaagctgaaacgggtaaccaaa

SEQ ID NO: 320185 - DNA, 33 bp, Homo sapien
gatcacaaaaggctaaacaggatatgaaatgca

SEQ ID NO: 320186 - DNA, 33 bp, Homo sapien
gatcacaaaaggctaagcaggatatgaaatgca

SEQ ID NO: 320187 - DNA, 33 bp, Homo sapien
cagcatccaaattcaaatggtggtgtaatcaac

SEQ ID NO: 320188 - DNA, 33 bp, Homo sapien
cagcatccaaattcaagtggtggtgtaatcaac

SEQ ID NO: 320189 - DNA, 33 bp, Homo sapien
acaaagctgtcaattacaaagcaatctggcttt

SEQ ID NO: 320190 - DNA, 33 bp, Homo sapien
acaaagctgtcaattataaagcaatctggcttt

SEQ ID NO: 320191 - DNA, 33 bp, Homo sapien
tttgtactgttttcaaaccttaaagcctctgtt

SEQ ID NO: 320192 - DNA, 33 bp, Homo sapien
tttgtactgttttcaatccttaaagcctctgtt

SEQ ID NO: 320193 - DNA, 33 bp, Homo sapien
agatgggataaaagataagattgttgaaagagg

SEQ ID NO: 320194 - DNA, 33 bp, Homo sapien
agatgggataaaagatgagattgttgaaagagg

SEQ ID NO: 320195 - DNA, 33 bp, Homo sapien
atatctagtgcagctacggtaaagattttgaaa

SEQ ID NO: 320196 - DNA, 33 bp, Homo sapien
atatctagtgcagctagggtaaagattttgaaa

SEQ ID NO: 320197 - DNA, 33 bp, Homo sapien
atagtccaagaatgtaacagtgtatcaggtctt

SEQ ID NO: 320198 - DNA, 33 bp, Homo sapien
atagtccaagaatgtaccagtgtatcaggtctt

SEQ ID NO: 320199 - DNA, 33 bp, Homo sapien
gaaaatattctcatcgacaaggaagatgtgagg

SEQ ID NO: 320200 - DNA, 33 bp, Homo sapien
gaaaatattctcatcgtcaaggaagatgtgagg

SEQ ID NO: 320201 - DNA, 33 bp, Homo sapien
ttgaaattgattctatcaaagctgtctcagtta

SEQ ID NO: 320202 - DNA, 33 bp, Homo sapien
ttgaaattgattctattaaagctgtctcagtta

SEQ ID NO: 320203 - DNA, 33 bp, Homo sapien
gcaaagtgttttcaaaatgcaaactcgttacaa

SEQ ID NO: 320204 - DNA, 33 bp, Homo sapien
gcaaagtgttttcaaagtgcaaactcgttacaa

SEQ ID NO: 320205 - DNA, 33 bp, Homo sapien
cccaatagtttaccaacacctagtccagatgca

SEQ ID NO: 320206 - DNA, 33 bp, Homo sapien
cccaatagtttaccaatacctagtccagatgca

SEQ ID NO: 320207 - DNA, 33 bp, Homo sapien
ttagcagtctcagcaaccttagtcctaggctgt

SEQ ID NO: 320208 - DNA, 33 bp, Homo sapien
ttagcagtctcagcaatcttagtcctaggctgt

SEQ ID NO: 320209 - DNA, 33 bp, Homo sapien
aagagacagggataacagagccaaattggaaaa

SEQ ID NO: 320210 - DNA, 33 bp, Homo sapien
aagagacagggataacggagccaaattggaaaa

SEQ ID NO: 320211 - DNA, 33 bp, Homo sapien
tgaggtttgggatacaatcaatctcatcactca

SEQ ID NO: 320212 - DNA, 33 bp, Homo sapien
tgaggtttgggatacagtcaatctcatcactca

SEQ ID NO: 320213 - DNA, 33 bp, Homo sapien
ttaaaatgttagttagcaaaaggatgttcatct

SEQ ID NO: 320214 - DNA, 33 bp, Homo sapien
ttaaaatgttagttaggaaaaggatgttcatct

SEQ ID NO: 320215 - DNA, 33 bp, Homo sapien
ttttcaaacactaaacagagtagaacaaatttt

SEQ ID NO: 320216 - DNA, 33 bp, Homo sapien
ttttcaaacactaaacggagtagaacaaatttt

SEQ ID NO: 320217 - DNA, 33 bp, Homo sapien
gttgtggtcatatgtacgtttactgcaaaattt

SEQ ID NO: 320218 - DNA, 33 bp, Homo sapien
gttgtggtcatatgtatgtttactgcaaaattt

SEQ ID NO: 320219 - DNA, 33 bp, Homo sapien
aggcctttcctggttacagcaaaaccaattgtg

SEQ ID NO: 320220 - DNA, 33 bp, Homo sapien
aggcctttcctggttatagcaaaaccaattgtg

SEQ ID NO: 320221 - DNA, 33 bp, Homo sapien
accgtgacttctgaaacaagacttaagtgatga

SEQ ID NO: 320222 - DNA, 33 bp, Homo sapien
accgtgacttctgaaataagacttaagtgatga

SEQ ID NO: 320223 - DNA, 33 bp, Homo sapien
gaagggaacttagagaacatctacaatccacag

SEQ ID NO: 320224 - DNA, 33 bp, Homo sapien
gaagggaacttagagagcatctacaatccacag

SEQ ID NO: 320225 - DNA, 33 bp, Homo sapien
taatgaaaaggtgtgacggaaaactgggagaaa

SEQ ID NO: 320226 - DNA, 33 bp, Homo sapien
taatgaaaaggtgtgatggaaaactgggagaaa

SEQ ID NO: 320227 - DNA, 33 bp, Homo sapien
acacatttatagtaagaacagtaaagccaatcc

SEQ ID NO: 320228 - DNA, 33 bp, Homo sapien
acacatttatagtaaggacagtaaagccaatcc

SEQ ID NO: 320229 - DNA, 33 bp, Homo sapien
ctaagactatgaagaaataaaccgatggctgga

SEQ ID NO: 320230 - DNA, 33 bp, Homo sapien
ctaagactatgaagaagtaaaccgatggctgga

SEQ ID NO: 320231 - DNA, 33 bp, Homo sapien
catttgtccataagaacattgatttgtttatgc

SEQ ID NO: 320232 - DNA, 33 bp, Homo sapien
catttgtccataagaatattgatttgtttatgc

SEQ ID NO: 320233 - DNA, 33 bp, Homo sapien
gtcctggacaaactgaaaacaattggttaccac

SEQ ID NO: 320234 - DNA, 33 bp, Homo sapien
gtcctggacaaactgagaacaattggttaccac

SEQ ID NO: 320235 - DNA, 33 bp, Homo sapien
ttggagtgatgtagtgaaaacttccactactgt

SEQ ID NO: 320236 - DNA, 33 bp, Homo sapien
ttggagtgatgtagtgcaaacttccactactgt

SEQ ID NO: 320237 - DNA, 33 bp, Homo sapien
tctccagatagcataccaaaacctctgctttgt

SEQ ID NO: 320238 - DNA, 33 bp, Homo sapien
tctccagatagcatactaaaacctctgctttgt

SEQ ID NO: 320239 - DNA, 33 bp, Homo sapien
agtgcatgtagaaaagaacactgatacgttgta

SEQ ID NO: 320240 - DNA, 33 bp, Homo sapien
agtgcatgtagaaaagtacactgatacgttgta

SEQ ID NO: 320241 - DNA, 33 bp, Homo sapien
taaaagaatacaccaacttgagaggtgagtgtt

SEQ ID NO: 320242 - DNA, 33 bp, Homo sapien
taaaagaatacaccaagttgagaggtgagtgtt

SEQ ID NO: 320243 - DNA, 33 bp, Homo sapien
aagaaccaggcagatactagacactgaataaat

SEQ ID NO: 320244 - DNA, 33 bp, Homo sapien
aagaaccaggcagatagtagacactgaataaat

SEQ ID NO: 320245 - DNA, 33 bp, Homo sapien
aaggaataagagtcaaaatggtttaattcaggg

SEQ ID NO: 320246 - DNA, 33 bp, Homo sapien
aaggaataagagtcaagatggtttaattcaggg

SEQ ID NO: 320247 - DNA, 33 bp, Homo sapien
ccaaggaaagtctcacagccagatccagaggca

SEQ ID NO: 320248 - DNA, 33 bp, Homo sapien
ccaaggaaagtctcacggccagatccagaggca

SEQ ID NO: 320249 - DNA, 33 bp, Homo sapien
atcttttaatccatcaacctctgagccattgtc

SEQ ID NO: 320250 - DNA, 33 bp, Homo sapien
atcttttaatccatcagcctctgagccattgtc

SEQ ID NO: 320251 - DNA, 33 bp, Homo sapien
aattgataggtgacccggactccagaactggag

SEQ ID NO: 320252 - DNA, 33 bp, Homo sapien
aattgataggtgaccctgactccagaactggag

SEQ ID NO: 320253 - DNA, 33 bp, Homo sapien
ctggtgtttctatcagccaaaatttgtattttt

SEQ ID NO: 320254 - DNA, 33 bp, Homo sapien
ctggtgtttctatcaggcaaaatttgtattttt

SEQ ID NO: 320255 - DNA, 33 bp, Homo sapien
acttcacagagttctacggaagatgaaatgtga

SEQ ID NO: 320256 - DNA, 33 bp, Homo sapien
acttcacagagttctatggaagatgaaatgtga

SEQ ID NO: 320257 - DNA, 33 bp, Homo sapien
gctcctccttgagaaacggttctctttttgact

SEQ ID NO: 320258 - DNA, 33 bp, Homo sapien
gctcctccttgagaaatggttctctttttgact

SEQ ID NO: 320259 - DNA, 33 bp, Homo sapien
tgcttaaaggtgcccaagtagaatataaacatt

SEQ ID NO: 320260 - DNA, 33 bp, Homo sapien
tgcttaaaggtgcccatgtagaatataaacatt

SEQ ID NO: 320261 - DNA, 33 bp, Homo sapien
ttcaagataatgttccaaaagaggattcattta

SEQ ID NO: 320262 - DNA, 33 bp, Homo sapien
ttcaagataatgttccgaaagaggattcattta

SEQ ID NO: 320263 - DNA, 33 bp, Homo sapien
aggagatcgagaccaccctagagatggcaaaac

SEQ ID NO: 320264 - DNA, 33 bp, Homo sapien
aggagatcgagaccacgctagagatggcaaaac

SEQ ID NO: 320265 - DNA, 33 bp, Homo sapien
agcaataaattcttgacgcagatgacctttttt

SEQ ID NO: 320266 - DNA, 33 bp, Homo sapien
agcaataaattcttgatgcagatgacctttttt

SEQ ID NO: 320267 - DNA, 33 bp, Homo sapien
ggtaataacttaactacggcatttatctttgga

SEQ ID NO: 320268 - DNA, 33 bp, Homo sapien
ggtaataacttaactatggcatttatctttgga

SEQ ID NO: 320269 - DNA, 33 bp, Homo sapien
agtgtggccatagttacagaagctcagattatt

SEQ ID NO: 320270 - DNA, 33 bp, Homo sapien
agtgtggccatagttatagaagctcagattatt

SEQ ID NO: 320271 - DNA, 33 bp, Homo sapien
ctaaggtactcccctacctgtatcaacaaatat

SEQ ID NO: 320272 - DNA, 33 bp, Homo sapien
ctaaggtactcccctatctgtatcaacaaatat

SEQ ID NO: 320273 - DNA, 33 bp, Homo sapien
gtcccatcattccattgaaactgctcatgtcaa

SEQ ID NO: 320274 - DNA, 33 bp, Homo sapien
gtcccatcattccatttaaactgctcatgtcaa

SEQ ID NO: 320275 - DNA, 33 bp, Homo sapien
catgttgccaaatacaaagaacaatttatgtct

SEQ ID NO: 320276 - DNA, 33 bp, Homo sapien
catgttgccaaatacatagaacaatttatgtct

SEQ ID NO: 320277 - DNA, 33 bp, Homo sapien
agactgtttcgtagaaaagtgaagacataaatt

SEQ ID NO: 320278 - DNA, 33 bp, Homo sapien
agactgtttcgtagaagagtgaagacataaatt

SEQ ID NO: 320279 - DNA, 33 bp, Homo sapien
gaattgtgctgtattacaaatgaaccacattgc

SEQ ID NO: 320280 - DNA, 33 bp, Homo sapien
gaattgtgctgtattataaatgaaccacattgc

SEQ ID NO: 320281 - DNA, 33 bp, Homo sapien
aggatagtaaagaataacagccttggcttaatt

SEQ ID NO: 320282 - DNA, 33 bp, Homo sapien
aggatagtaaagaataccagccttggcttaatt

SEQ ID NO: 320283 - DNA, 33 bp, Homo sapien
aatcatatttgggtgacggataagctcactgag

SEQ ID NO: 320284 - DNA, 33 bp, Homo sapien
aatcatatttgggtgatggataagctcactgag

SEQ ID NO: 320285 - DNA, 33 bp, Homo sapien
ttctgttatgagattacgtgatatattgtccac

SEQ ID NO: 320286 - DNA, 33 bp, Homo sapien
ttctgttatgagattatgtgatatattgtccac

SEQ ID NO: 320287 - DNA, 33 bp, Homo sapien
cgccagcacaaggatacactgttcagatgcaat

SEQ ID NO: 320288 - DNA, 33 bp, Homo sapien
cgccagcacaaggatatactgttcagatgcaat

SEQ ID NO: 320289 - DNA, 33 bp, Homo sapien
gttcagatgcaatgacactgactaaagaaactt

SEQ ID NO: 320290 - DNA, 33 bp, Homo sapien
gttcagatgcaatgacgctgactaaagaaactt

SEQ ID NO: 320291 - DNA, 33 bp, Homo sapien
cctcataatttagaaaacaatcttactctgagt

SEQ ID NO: 320292 - DNA, 33 bp, Homo sapien
cctcataatttagaaagcaatcttactctgagt

SEQ ID NO: 320293 - DNA, 33 bp, Homo sapien
tgttagaaaaaaccatcaatgtgcaacaacaaa

SEQ ID NO: 320294 - DNA, 33 bp, Homo sapien
tgttagaaaaaaccatgaatgtgcaacaacaaa

SEQ ID NO: 320295 - DNA, 33 bp, Homo sapien
ttagtgtctaggtatcaataagaaaaagataat

SEQ ID NO: 320296 - DNA, 33 bp, Homo sapien
ttagtgtctaggtatcgataagaaaaagataat

SEQ ID NO: 320297 - DNA, 33 bp, Homo sapien
tgtgtgtgttgtgtcactagctatatctggatg

SEQ ID NO: 320298 - DNA, 33 bp, Homo sapien
tgtgtgtgttgtgtcattagctatatctggatg

SEQ ID NO: 320299 - DNA, 33 bp, Homo sapien
tttcaagggctaaaaccgagctatttgtccttt

SEQ ID NO: 320300 - DNA, 33 bp, Homo sapien
tttcaagggctaaaactgagctatttgtccttt

SEQ ID NO: 320301 - DNA, 33 bp, Homo sapien
tcccaggagcttggcacaggtgagaaaagaatc

SEQ ID NO: 320302 - DNA, 33 bp, Homo sapien
tcccaggagcttggcataggtgagaaaagaatc

SEQ ID NO: 320303 - DNA, 33 bp, Homo sapien
gcatggcgaaaaaaacggaattaggagtgcatg

SEQ ID NO: 320304 - DNA, 33 bp, Homo sapien
gcatggcgaaaaaaactgaattaggagtgcatg

SEQ ID NO: 320305 - DNA, 33 bp, Homo sapien
tggtaggcatactcaacgtttgtggaattacac

SEQ ID NO: 320306 - DNA, 33 bp, Homo sapien
tggtaggcatactcaatgtttgtggaattacac

SEQ ID NO: 320307 - DNA, 33 bp, Homo sapien
cataattgcataaagcagatgtgtaatagaagc

SEQ ID NO: 320308 - DNA, 33 bp, Homo sapien
cataattgcataaagcggatgtgtaatagaagc

SEQ ID NO: 320309 - DNA, 33 bp, Homo sapien
ttcctactgccaccaaaaaacattgcccatata

SEQ ID NO: 320310 - DNA, 33 bp, Homo sapien
ttcctactgccaccaacaaacattgcccatata

SEQ ID NO: 320311 - DNA, 33 bp, Homo sapien
attttctgcttcttctgaagttgtataagaata

SEQ ID NO: 320312 - DNA, 33 bp, Homo sapien
attttctgcttcttcttaagttgtataagaata

SEQ ID NO: 320313 - DNA, 33 bp, Homo sapien
agtacttactgtgcacactctcttgagcaacat

SEQ ID NO: 320314 - DNA, 33 bp, Homo sapien
agtacttactgtgcacgctctcttgagcaacat

SEQ ID NO: 320315 - DNA, 33 bp, Homo sapien
aggaagagggtataacagaaagtctatagcttg

SEQ ID NO: 320316 - DNA, 33 bp, Homo sapien
aggaagagggtataacggaaagtctatagcttg

SEQ ID NO: 320317 - DNA, 33 bp, Homo sapien
catagccatacagagaagaaggttagagggtaa

SEQ ID NO: 320318 - DNA, 33 bp, Homo sapien
catagccatacagagaggaaggttagagggtaa

SEQ ID NO: 320319 - DNA, 33 bp, Homo sapien
gggtaaaaattgaccacgtcctcaagcttaaag

SEQ ID NO: 320320 - DNA, 33 bp, Homo sapien
gggtaaaaattgaccatgtcctcaagcttaaag

SEQ ID NO: 320321 - DNA, 33 bp, Homo sapien
gtctattcagtgctgtcaaacacctattgtcct

SEQ ID NO: 320322 - DNA, 33 bp, Homo sapien
gtctattcagtgctgttaaacacctattgtcct

SEQ ID NO: 320323 - DNA, 33 bp, Homo sapien
agggacagcgtagagaggaaaggcgcaatacaa

SEQ ID NO: 320324 - DNA, 33 bp, Homo sapien
agggacagcgtagagatgaaaggcgcaatacaa

SEQ ID NO: 320325 - DNA, 33 bp, Homo sapien
aaatatactttaagcactgagcatactgaatct

SEQ ID NO: 320326 - DNA, 33 bp, Homo sapien
aaatatactttaagcattgagcatactgaatct

SEQ ID NO: 320327 - DNA, 33 bp, Homo sapien
ccctggcacagtaagcgccccatgtcagagcca

SEQ ID NO: 320328 - DNA, 33 bp, Homo sapien
ccctggcacagtaagctccccatgtcagagcca

SEQ ID NO: 320329 - DNA, 33 bp, Homo sapien
tacattgctttggaaagaattgtgcagaaaaac

SEQ ID NO: 320330 - DNA, 33 bp, Homo sapien
tacattgctttggaaataattgtgcagaaaaac

SEQ ID NO: 320331 - DNA, 33 bp, Homo sapien
cttcagagccatcataccaatttagttccagca

SEQ ID NO: 320332 - DNA, 33 bp, Homo sapien
cttcagagccatcatatcaatttagttccagca

SEQ ID NO: 320333 - DNA, 33 bp, Homo sapien
ctttcaaaatggttataaggagacgatgcgtag

SEQ ID NO: 320334 - DNA, 33 bp, Homo sapien
ctttcaaaatggttatgaggagacgatgcgtag

SEQ ID NO: 320335 - DNA, 33 bp, Homo sapien
acgctgtttgacttcaaagttgtgtttcaagga

SEQ ID NO: 320336 - DNA, 33 bp, Homo sapien
acgctgtttgacttcagagttgtgtttcaagga

SEQ ID NO: 320337 - DNA, 33 bp, Homo sapien
tacttaggttcatatcggagaagtagcatatct

SEQ ID NO: 320338 - DNA, 33 bp, Homo sapien
tacttaggttcatatctgagaagtagcatatct

SEQ ID NO: 320339 - DNA, 33 bp, Homo sapien
atagacagattgatggccaccacccctagagtt

SEQ ID NO: 320340 - DNA, 33 bp, Homo sapien
atagacagattgatggtcaccacccctagagtt

SEQ ID NO: 320341 - DNA, 33 bp, Homo sapien
cagccatccttccttcaaaataaaaaagtgaag

SEQ ID NO: 320342 - DNA, 33 bp, Homo sapien
cagccatccttccttccaaataaaaaagtgaag

SEQ ID NO: 320343 - DNA, 33 bp, Homo sapien
acaaagcaaaaaaccacgctttaagatagtctt

SEQ ID NO: 320344 - DNA, 33 bp, Homo sapien
acaaagcaaaaaaccatgctttaagatagtctt

SEQ ID NO: 320345 - DNA, 33 bp, Homo sapien
cagaaagggaccagagacgtgaggctacacttt

SEQ ID NO: 320346 - DNA, 33 bp, Homo sapien
cagaaagggaccagaggcgtgaggctacacttt

SEQ ID NO: 320347 - DNA, 33 bp, Homo sapien
ttattattacaatgcccaagcagtaatgccttc

SEQ ID NO: 320348 - DNA, 33 bp, Homo sapien
ttattattacaatgccgaagcagtaatgccttc

SEQ ID NO: 320349 - DNA, 33 bp, Homo sapien
ttgagcacacttcttacgatgaatggaaaacaa

SEQ ID NO: 320350 - DNA, 33 bp, Homo sapien
ttgagcacacttcttatgatgaatggaaaacaa

SEQ ID NO: 320351 - DNA, 33 bp, Homo sapien
tccatttttaattacgacatcaaggcttctttt

SEQ ID NO: 320352 - DNA, 33 bp, Homo sapien
tccatttttaattacgtcatcaaggcttctttt

SEQ ID NO: 320353 - DNA, 33 bp, Homo sapien
accaagttgaaactgcccaataaactggactat

SEQ ID NO: 320354 - DNA, 33 bp, Homo sapien
accaagttgaaactgctcaataaactggactat

SEQ ID NO: 320355 - DNA, 33 bp, Homo sapien
tgccagtcgtgtgtcaaattgactgataggaat

SEQ ID NO: 320356 - DNA, 33 bp, Homo sapien
tgccagtcgtgtgtcacattgactgataggaat

SEQ ID NO: 320357 - DNA, 33 bp, Homo sapien
gcaccagaagcttagaatcaatagcactcttat

SEQ ID NO: 320358 - DNA, 33 bp, Homo sapien
gcaccagaagcttagactcaatagcactcttat

SEQ ID NO: 320359 - DNA, 33 bp, Homo sapien
gatttttatagcagacacttagcccaagtaaga

SEQ ID NO: 320360 - DNA, 33 bp, Homo sapien
gatttttatagcagacgcttagcccaagtaaga

SEQ ID NO: 320361 - DNA, 33 bp, Homo sapien
tgtggtaaatgctcctaaacaattgtctttttc

SEQ ID NO: 320362 - DNA, 33 bp, Homo sapien
tgtggtaaatgctcctcaacaattgtctttttc

SEQ ID NO: 320363 - DNA, 33 bp, Homo sapien
gcatttaccacacttaccacctcctgaccaggg

SEQ ID NO: 320364 - DNA, 33 bp, Homo sapien
gcatttaccacacttatcacctcctgaccaggg

SEQ ID NO: 320365 - DNA, 33 bp, Homo sapien
cagagtaacatttccagattttgacattgtcat

SEQ ID NO: 320366 - DNA, 33 bp, Homo sapien
cagagtaacatttccatattttgacattgtcat

SEQ ID NO: 320367 - DNA, 33 bp, Homo sapien
tgtgatcaatggtcaaattcaagaaccctgcct

SEQ ID NO: 320368 - DNA, 33 bp, Homo sapien
tgtgatcaatggtcaagttcaagaaccctgcct

SEQ ID NO: 320369 - DNA, 33 bp, Homo sapien
tatccccagacctatccattcagaaactttggt

SEQ ID NO: 320370 - DNA, 33 bp, Homo sapien
tatccccagacctatcgattcagaaactttggt

SEQ ID NO: 320371 - DNA, 33 bp, Homo sapien
gccttgcaatatttatcacctgtacttacaagg

SEQ ID NO: 320372 - DNA, 33 bp, Homo sapien
gccttgcaatatttattacctgtacttacaagg

SEQ ID NO: 320373 - DNA, 33 bp, Homo sapien
tacctgagagtaaaaaatgtgtgcttcgtcagg

SEQ ID NO: 320374 - DNA, 33 bp, Homo sapien
tacctgagagtaaaaagtgtgtgcttcgtcagg

SEQ ID NO: 320375 - DNA, 33 bp, Homo sapien
tcatcaatatcaacaaggtatgagtccattggc

SEQ ID NO: 320376 - DNA, 33 bp, Homo sapien
tcatcaatatcaacaatgtatgagtccattggc

SEQ ID NO: 320377 - DNA, 33 bp, Homo sapien
ggtaggcgcattttgaagccaccattacaccat

SEQ ID NO: 320378 - DNA, 33 bp, Homo sapien
ggtaggcgcattttgaggccaccattacaccat

SEQ ID NO: 320379 - DNA, 33 bp, Homo sapien
tgactctggcataacactacaacacaaggaaga

SEQ ID NO: 320380 - DNA, 33 bp, Homo sapien
tgactctggcataacagtacaacacaaggaaga

SEQ ID NO: 320381 - DNA, 33 bp, Homo sapien; identical to SEQ ID NO: 320379

SEQ ID NO: 320382 - DNA, 33 bp, Homo sapien; identical to SEQ ID NO: 320380

SEQ ID NO: 320383 - DNA, 33 bp, Homo sapien
gttgcaagattcaatacagtgaaaacagaactc

SEQ ID NO: 320384 - DNA, 33 bp, Homo sapien
gttgcaagattcaatagagtgaaaacagaactc

SEQ ID NO: 320385 - DNA, 33 bp, Homo sapien
tccattacgattttcacattttataacaaagaa

SEQ ID NO: 320386 - DNA, 33 bp, Homo sapien
tccattacgattttcagattttataacaaagaa

SEQ ID NO: 320387 - DNA, 33 bp, Homo sapien
gaatagcattgagttccaagtccaatctgccac

SEQ ID NO: 320388 - DNA, 33 bp, Homo sapien
gaatagcattgagttctaagtccaatctgccac

SEQ ID NO: 320389 - DNA, 33 bp, Homo sapien
atgaggcacctgaacaatattatctctgggttc

SEQ ID NO: 320390 - DNA, 33 bp, Homo sapien
atgaggcacctgaacagtattatctctgggttc

SEQ ID NO: 320391 - DNA, 33 bp, Homo sapien
ctcttcataaacacacgccaataatatctgtag

SEQ ID NO: 320392 - DNA, 33 bp, Homo sapien
ctcttcataaacacactccaataatatctgtag

SEQ ID NO: 320393 - DNA, 33 bp, Homo sapien
ttaaccttggttcagaagatcacttcaaaatga

SEQ ID NO: 320394 - DNA, 33 bp, Homo sapien
ttaaccttggttcagaggatcacttcaaaatga

SEQ ID NO: 320395 - DNA, 33 bp, Homo sapien
tggatgtatattcaaacggctatgtttttgtga

SEQ ID NO: 320396 - DNA, 33 bp, Homo sapien
tggatgtatattcaaatggctatgtttttgtga

SEQ ID NO: 320397 - DNA, 33 bp, Homo sapien
aagatcaagtggtagaagcaatagtgaaattca

SEQ ID NO: 320398 - DNA, 33 bp, Homo sapien
aagatcaagtggtagaggcaatagtgaaattca

SEQ ID NO: 320399 - DNA, 33 bp, Homo sapien
taggccaccgaagtcacggtgttgatgcacatt

SEQ ID NO: 320400 - DNA, 33 bp, Homo sapien
taggccaccgaagtcatggtgttgatgcacatt

SEQ ID NO: 320401 - DNA, 33 bp, Homo sapien
gagcagactgagtcataagcattgccagaggaa

SEQ ID NO: 320402 - DNA, 33 bp, Homo sapien
gagcagactgagtcatgagcattgccagaggaa

SEQ ID NO: 320403 - DNA, 33 bp, Homo sapien
tttacctcaccaaggcacttttaaataaatcaa

SEQ ID NO: 320404 - DNA, 33 bp, Homo sapien
tttacctcaccaaggcgcttttaaataaatcaa

SEQ ID NO: 320405 - DNA, 33 bp, Homo sapien
agaatttaaccacataacaaagtgttctgaata

SEQ ID NO: 320406 - DNA, 33 bp, Homo sapien
agaatttaaccacatagcaaagtgttctgaata

SEQ ID NO: 320407 - DNA, 33 bp, Homo sapien
tgattcgttggtcaaacaacagactttactttg

SEQ ID NO: 320408 - DNA, 33 bp, Homo sapien
tgattcgttggtcaaataacagactttactttg

SEQ ID NO: 320409 - DNA, 33 bp, Homo sapien
tgtgaccacttaagtacgctcacatttttattt

SEQ ID NO: 320410 - DNA, 33 bp, Homo sapien
tgtgaccacttaagtatgctcacatttttattt

SEQ ID NO: 320411 - DNA, 33 bp, Homo sapien
atatgtctgaatttcaccttgttgtggagacca

SEQ ID NO: 320412 - DNA, 33 bp, Homo sapien
atatgtctgaatttcagcttgttgtggagacca

SEQ ID NO: 320413 - DNA, 33 bp, Homo sapien
tttatatgtgattggacagtcccttttctatta

SEQ ID NO: 320414 - DNA, 33 bp, Homo sapien
tttatatgtgattggatagtcccttttctatta

SEQ ID NO: 320415 - DNA, 33 bp, Homo sapien
gttatccagagatagacgataaaatggattaac

SEQ ID NO: 320416 - DNA, 33 bp, Homo sapien
gttatccagagatagaggataaaatggattaac

SEQ ID NO: 320417 - DNA, 33 bp, Homo sapien
gactttgtgaaaagcaacgcttccagaaaacat

SEQ ID NO: 320418 - DNA, 33 bp, Homo sapien
gactttgtgaaaagcagcgcttccagaaaacat

SEQ ID NO: 320419 - DNA, 33 bp, Homo sapien
tgccgaatcgagaaacacaagaatcattcttaa

SEQ ID NO: 320420 - DNA, 33 bp, Homo sapien
tgccgaatcgagaaacccaagaatcattcttaa

SEQ ID NO: 320421 - DNA, 33 bp, Homo sapien
tcctctatagcatacacaatagaaacaatctct

SEQ ID NO: 320422 - DNA, 33 bp, Homo sapien
tcctctatagcatacagaatagaaacaatctct

SEQ ID NO: 320423 - DNA, 33 bp, Homo sapien
aatgttgatggaagcaaatttcaccacagcaat

SEQ ID NO: 320424 - DNA, 33 bp, Homo sapien
aatgttgatggaagcatatttcaccacagcaat

SEQ ID NO: 320425 - DNA, 33 bp, Homo sapien
cacattacaacccttacgagcctataaatgatg

SEQ ID NO: 320426 - DNA, 33 bp, Homo sapien
cacattacaacccttatgagcctataaatgatg

SEQ ID NO: 320427 - DNA, 33 bp, Homo sapien
ctacataattacactcaagcataggtgcgaagt

SEQ ID NO: 320428 - DNA, 33 bp, Homo sapien
ctacataattacactccagcataggtgcgaagt

SEQ ID NO: 320429 - DNA, 33 bp, Homo sapien
cttatatacatgcagtaaacttcaagatatcta

SEQ ID NO: 320430 - DNA, 33 bp, Homo sapien
cttatatacatgcagtgaacttcaagatatcta

SEQ ID NO: 320431 - DNA, 33 bp, Homo sapien
ttaggaacttacaagccacatgaattcatcatg

SEQ ID NO: 320432 - DNA, 33 bp, Homo sapien
ttaggaacttacaagctacatgaattcatcatg

SEQ ID NO: 320433 - DNA, 33 bp, Homo sapien
agttacgcttagtaggcattttttccaggttgt

SEQ ID NO: 320434 - DNA, 33 bp, Homo sapien
agttacgcttagtaggtattttttccaggttgt

SEQ ID NO: 320435 - DNA, 33 bp, Homo sapien
tcgatgcttgtcttcaaagttttaaaggacagg

SEQ ID NO: 320436 - DNA, 33 bp, Homo sapien
tcgatgcttgtcttcagagttttaaaggacagg

SEQ ID NO: 320437 - DNA, 33 bp, Homo sapien
tgctaaatctcctccgcccatgtctataaatta

SEQ ID NO: 320438 - DNA, 33 bp, Homo sapien
tgctaaatctcctccgtccatgtctataaatta

SEQ ID NO: 320439 - DNA, 33 bp, Homo sapien
ggccacgaagaatacaatcaggaaaaaatggaa

SEQ ID NO: 320440 - DNA, 33 bp, Homo sapien
ggccacgaagaatacagtcaggaaaaaatggaa

SEQ ID NO: 320441 - DNA, 33 bp, Homo sapien
ttaacgctgtcaccgaagtagaatagatattca

SEQ ID NO: 320442 - DNA, 33 bp, Homo sapien
ttaacgctgtcaccgaggtagaatagatattca

SEQ ID NO: 320443 - DNA, 33 bp, Homo sapien
ggaggtcttctgtgtacgcaaaggtattaacat

SEQ ID NO: 320444 - DNA, 33 bp, Homo sapien
ggaggtcttctgtgtaggcaaaggtattaacat

SEQ ID NO: 320445 - DNA, 33 bp, Homo sapien
ttaaaaatagtatcccacccaaagtactgataa

SEQ ID NO: 320446 - DNA, 33 bp, Homo sapien
ttaaaaatagtatcccgcccaaagtactgataa

SEQ ID NO: 320447 - DNA, 33 bp, Homo sapien
tactggagattagaaagagtgtgaggggggtga

SEQ ID NO: 320448 - DNA, 33 bp, Homo sapien
tactggagattagaaatagtgtgaggggggtga

SEQ ID NO: 320449 - DNA, 33 bp, Homo sapien
cattttgctttaattgaacaatcacctcgtcct

SEQ ID NO: 320450 - DNA, 33 bp, Homo sapien
cattttgctttaattgcacaatcacctcgtcct

SEQ ID NO: 320451 - DNA, 33 bp, Homo sapien
tgaaatgtataacttacggaagtgtgtttcagc

SEQ ID NO: 320452 - DNA, 33 bp, Homo sapien
tgaaatgtataacttatggaagtgtgtttcagc

SEQ ID NO: 320453 - DNA, 33 bp, Homo sapien
ctccaattacaattaacgttttttggctttatt

SEQ ID NO: 320454 - DNA, 33 bp, Homo sapien
ctccaattacaattaaggttttttggctttatt

SEQ ID NO: 320455 - DNA, 33 bp, Homo sapien
gtctttaagcctctcaccatgttaactccaggg

SEQ ID NO: 320456 - DNA, 33 bp, Homo sapien
gtctttaagcctctcatcatgttaactccaggg

SEQ ID NO: 320457 - DNA, 33 bp, Homo sapien
gcttctcatactttaacgtgcatttaattccac

SEQ ID NO: 320458 - DNA, 33 bp, Homo sapien
gcttctcatactttaatgtgcatttaattccac

SEQ ID NO: 320459 - DNA, 33 bp, Homo sapien
tgtattctgtgttccaaattctcactgtccttt

SEQ ID NO: 320460 - DNA, 33 bp, Homo sapien
tgtattctgtgttccagattctcactgtccttt

SEQ ID NO: 320461 - DNA, 33 bp, Homo sapien
tacacaccaaagaacacagatgattttgtgtaa

SEQ ID NO: 320462 - DNA, 33 bp, Homo sapien
tacacaccaaagaacagagatgattttgtgtaa

SEQ ID NO: 320463 - DNA, 33 bp, Homo sapien
gcgaagattacatgagaaagtctccaaaagcaa

SEQ ID NO: 320464 - DNA, 33 bp, Homo sapien
gcgaagattacatgaggaagtctccaaaagcaa

SEQ ID NO: 320465 - DNA, 33 bp, Homo sapien
attctgaagtaacttacgggatgatttctaaat

SEQ ID NO: 320466 - DNA, 33 bp, Homo sapien
attctgaagtaacttatgggatgatttctaaat

SEQ ID NO: 320467 - DNA, 33 bp, Homo sapien
taacaaagcctacttcacttctcaatactccct

SEQ ID NO: 320468 - DNA, 33 bp, Homo sapien
taacaaagcctacttcgcttctcaatactccct

SEQ ID NO: 320469 - DNA, 33 bp, Homo sapien
aaacattgtgtgagaaatattaggcccagtgta

SEQ ID NO: 320470 - DNA, 33 bp, Homo sapien
aaacattgtgtgagaagtattaggcccagtgta

SEQ ID NO: 320471 - DNA, 33 bp, Homo sapien
tggttgtgtaatccacacttgaatataaacctt

SEQ ID NO: 320472 - DNA, 33 bp, Homo sapien
tggttgtgtaatccactcttgaatataaacctt

SEQ ID NO: 320473 - DNA, 33 bp, Homo sapien
tggctcattgagaagacaaagtgaggtaagata

SEQ ID NO: 320474 - DNA, 33 bp, Homo sapien
tggctcattgagaagataaagtgaggtaagata

SEQ ID NO: 320475 - DNA, 33 bp, Homo sapien
gtatcattctcacaggacagtttttgataatcc

SEQ ID NO: 320476 - DNA, 33 bp, Homo sapien
gtatcattctcacaggccagtttttgataatcc

SEQ ID NO: 320477 - DNA, 33 bp, Homo sapien
tttaaatccaggacacgagcattacaaggcaaa

SEQ ID NO: 320478 - DNA, 33 bp, Homo sapien
tttaaatccaggacactagcattacaaggcaaa

SEQ ID NO: 320479 - DNA, 33 bp, Homo sapien
atgagaagatatctgcaatggatactataggaa

SEQ ID NO: 320480 - DNA, 33 bp, Homo sapien
atgagaagatatctgcgatggatactataggaa

SEQ ID NO: 320481 - DNA, 33 bp, Homo sapien
atggaatgactgcctacggtcagcctaatgatg

SEQ ID NO: 320482 - DNA, 33 bp, Homo sapien
atggaatgactgcctagggtcagcctaatgatg

SEQ ID NO: 320483 - DNA, 33 bp, Homo sapien
aggtttcagaagatccacagaatgcttataaat

SEQ ID NO: 320484 - DNA, 33 bp, Homo sapien
aggtttcagaagatccgcagaatgcttataaat

SEQ ID NO: 320485 - DNA, 33 bp, Homo sapien
taaagaaaacttactacaggttgaaataataca

SEQ ID NO: 320486 - DNA, 33 bp, Homo sapien
taaagaaaacttactagaggttgaaataataca

SEQ ID NO: 320487 - DNA, 33 bp, Homo sapien
agatcacacagctaataagtgagggcataggga

SEQ ID NO: 320488 - DNA, 33 bp, Homo sapien
agatcacacagctaatcagtgagggcataggga

SEQ ID NO: 320489 - DNA, 33 bp, Homo sapien
caaggaaactgtaaaacgttccaacaagctaga

SEQ ID NO: 320490 - DNA, 33 bp, Homo sapien
caaggaaactgtaaaatgttccaacaagctaga

SEQ ID NO: 320491 - DNA, 33 bp, Homo sapien
gctgtcattcattgagaccataccatttcaaat

SEQ ID NO: 320492 - DNA, 33 bp, Homo sapien
gctgtcattcattgagtccataccatttcaaat

SEQ ID NO: 320493 - DNA, 33 bp, Homo sapien
ttattcctttaaaatacagcctactgtcttctc

SEQ ID NO: 320494 - DNA, 33 bp, Homo sapien
ttattcctttaaaatatagcctactgtcttctc

SEQ ID NO: 320495 - DNA, 33 bp, Homo sapien
tgtctcatctaatagcaatatcagtaaagagat

SEQ ID NO: 320496 - DNA, 33 bp, Homo sapien
tgtctcatctaatagcgatatcagtaaagagat

SEQ ID NO: 320497 - DNA, 33 bp, Homo sapien
ccagtataaggtttacactacagaacactagtc

SEQ ID NO: 320498 - DNA, 33 bp, Homo sapien
ccagtataaggtttactctacagaacactagtc

SEQ ID NO: 320499 - DNA, 33 bp, Homo sapien
ccatagcaagtcctcaaataagtattcccaaag

SEQ ID NO: 320500 - DNA, 33 bp, Homo sapien
ccatagcaagtcctcagataagtattcccaaag

SEQ ID NO: 320501 - DNA, 33 bp, Homo sapien
agggagggaggaccaacgtgtggttatgaacat

SEQ ID NO: 320502 - DNA, 33 bp, Homo sapien
agggagggaggaccaatgtgtggttatgaacat

SEQ ID NO: 320503 - DNA, 33 bp, Homo sapien
gtctaaaatgtcaacaactggaacatatactgt

SEQ ID NO: 320504 - DNA, 33 bp, Homo sapien
gtctaaaatgtcaacatctggaacatatactgt

SEQ ID NO: 320505 - DNA, 33 bp, Homo sapien
ttacctatcagaagtaaggaaagtagggctcat

SEQ ID NO: 320506 - DNA, 33 bp, Homo sapien
ttacctatcagaagtagggaaagtagggctcat

SEQ ID NO: 320507 - DNA, 33 bp, Homo sapien
gaatgcaggctttatgaaggcagggacttacct

SEQ ID NO: 320508 - DNA, 33 bp, Homo sapien
gaatgcaggctttatggaggcagggacttacct

SEQ ID NO: 320509 - DNA, 33 bp, Homo sapien
gtcttgtctgtggcaactgttgtgagactgttc

SEQ ID NO: 320510 - DNA, 33 bp, Homo sapien
gtcttgtctgtggcaagtgttgtgagactgttc

SEQ ID NO: 320511 - DNA, 33 bp, Homo sapien
aaaagaaccaatcataaatcttggagctgaaga

SEQ ID NO: 320512 - DNA, 33 bp, Homo sapien
aaaagaaccaatcatacatcttggagctgaaga

SEQ ID NO: 320513 - DNA, 33 bp, Homo sapien
agatatccagatctacaaagctcaaatgttccc

SEQ ID NO: 320514 - DNA, 33 bp, Homo sapien
agatatccagatctacgaagctcaaatgttccc

SEQ ID NO: 320515 - DNA, 33 bp, Homo sapien
atttcataaaaactacagaaaaatcagagccag

SEQ ID NO: 320516 - DNA, 33 bp, Homo sapien
atttcataaaaactaccgaaaaatcagagccag

SEQ ID NO: 320517 - DNA, 33 bp, Homo sapien
caacaatgggtaatgcaaataacagaagtgatc

SEQ ID NO: 320518 - DNA, 33 bp, Homo sapien
caacaatgggtaatgcgaataacagaagtgatc

SEQ ID NO: 320519 - DNA, 33 bp, Homo sapien
gtaaaataattagaacaatgcctgaggtagatt

SEQ ID NO: 320520 - DNA, 33 bp, Homo sapien
gtaaaataattagaacgatgcctgaggtagatt

SEQ ID NO: 320521 - DNA, 33 bp, Homo sapien
gtatcatttactgaacaaccaaatctacctcag

SEQ ID NO: 320522 - DNA, 33 bp, Homo sapien
gtatcatttactgaacgaccaaatctacctcag

SEQ ID NO: 320523 - DNA, 33 bp, Homo sapien
attagaaatgaaagatcaaagtaaataaataag

SEQ ID NO: 320524 - DNA, 33 bp, Homo sapien
attagaaatgaaagatgaaagtaaataaataag

SEQ ID NO: 320525 - DNA, 33 bp, Homo sapien
tgggcagtagtctacacgataaaccaggaggaa

SEQ ID NO: 320526 - DNA, 33 bp, Homo sapien
tgggcagtagtctacatgataaaccaggaggaa

SEQ ID NO: 320527 - DNA, 33 bp, Homo sapien
ctgatgttctgatttccagctatgtgctccaat

SEQ ID NO: 320528 - DNA, 33 bp, Homo sapien
ctgatgttctgatttctagctatgtgctccaat

SEQ ID NO: 320529 - DNA, 33 bp, Homo sapien
actgccaaagttttaaccttatctctagtgctg

SEQ ID NO: 320530 - DNA, 33 bp, Homo sapien
actgccaaagttttaagcttatctctagtgctg

SEQ ID NO: 320531 - DNA, 33 bp, Homo sapien
tgaactgaaactgtagacataagagtttttgcc

SEQ ID NO: 320532 - DNA, 33 bp, Homo sapien
tgaactgaaactgtaggcataagagtttttgcc

SEQ ID NO: 320533 - DNA, 33 bp, Homo sapien
aaaaacaggcaagatacacgaagcaatgctttt

SEQ ID NO: 320534 - DNA, 33 bp, Homo sapien
aaaaacaggcaagatatacgaagcaatgctttt

SEQ ID NO: 320535 - DNA, 33 bp, Homo sapien
cacacatgtgaaaaaaatgaggctggagaaaaa

SEQ ID NO: 320536 - DNA, 33 bp, Homo sapien
cacacatgtgaaaaaagtgaggctggagaaaaa

SEQ ID NO: 320537 - DNA, 33 bp, Homo sapien
gtaatttacatctgacaacaaatctcaagaata

SEQ ID NO: 320538 - DNA, 33 bp, Homo sapien
gtaatttacatctgacgacaaatctcaagaata

SEQ ID NO: 320539 - DNA, 33 bp, Homo sapien
atgaaattgtgtaagaggactgatttggaagga

SEQ ID NO: 320540 - DNA, 33 bp, Homo sapien
atgaaattgtgtaagatgactgatttggaagga

SEQ ID NO: 320541 - DNA, 33 bp, Homo sapien
tctgatgaatagcccccgaggttatcagtcggt

SEQ ID NO: 320542 - DNA, 33 bp, Homo sapien
tctgatgaatagcccctgaggttatcagtcggt

SEQ ID NO: 320543 - DNA, 33 bp, Homo sapien
tgctagaggacaaataagtaaataaaggagttt

SEQ ID NO: 320544 - DNA, 33 bp, Homo sapien
tgctagaggacaaataggtaaataaaggagttt

SEQ ID NO: 320545 - DNA, 33 bp, Homo sapien
aggattggggatctgacctaagaaaggatatga

SEQ ID NO: 320546 - DNA, 33 bp, Homo sapien
aggattggggatctgatctaagaaaggatatga

SEQ ID NO: 320547 - DNA, 33 bp, Homo sapien
atagataacaatcatgacaattttcataaatcc

SEQ ID NO: 320548 - DNA, 33 bp, Homo sapien
atagataacaatcatggcaattttcataaatcc

SEQ ID NO: 320549 - DNA, 33 bp, Homo sapien
attcaacttaggaaagaatctaaaatgtccttt

SEQ ID NO: 320550 - DNA, 33 bp, Homo sapien
attcaacttaggaaaggatctaaaatgtccttt

SEQ ID NO: 320551 - DNA, 33 bp, Homo sapien
accatcagcttcagcaagtctgcactagggaac

SEQ ID NO: 320552 - DNA, 33 bp, Homo sapien
accatcagcttcagcaggtctgcactagggaac

SEQ ID NO: 320553 - DNA, 33 bp, Homo sapien
tgtccttggttctcaacgtgtcctaggctgatg

SEQ ID NO: 320554 - DNA, 33 bp, Homo sapien
tgtccttggttctcaaggtgtcctaggctgatg

SEQ ID NO: 320555 - DNA, 33 bp, Homo sapien
accttgttcttagacactgccttcatctctgcc

SEQ ID NO: 320556 - DNA, 33 bp, Homo sapien
accttgttcttagacattgccttcatctctgcc

SEQ ID NO: 320557 - DNA, 33 bp, Homo sapien
gtaccataagcaccacgagaaatattttgacat

SEQ ID NO: 320558 - DNA, 33 bp, Homo sapien
gtaccataagcaccactagaaatattttgacat

SEQ ID NO: 320559 - DNA, 33 bp, Homo sapien
aaataaaccatgaataggacttccagtatttct

SEQ ID NO: 320560 - DNA, 33 bp, Homo sapien
aaataaaccatgaatatgacttccagtatttct

SEQ ID NO: 320561 - DNA, 33 bp, Homo sapien
aaacccaactcagtcacgttagttcctagctcc

SEQ ID NO: 320562 - DNA, 33 bp, Homo sapien
aaacccaactcagtcatgttagttcctagctcc

SEQ ID NO: 320563 - DNA, 33 bp, Homo sapien
atgtctggggttcaggaaatttggtcattctgt

SEQ ID NO: 320564 - DNA, 33 bp, Homo sapien
atgtctggggttcaggcaatttggtcattctgt

SEQ ID NO: 320565 - DNA, 33 bp, Homo sapien
aacctgaagtgtcttgaaaggtaggcgattgga

SEQ ID NO: 320566 - DNA, 33 bp, Homo sapien
aacctgaagtgtcttgcaaggtaggcgattgga

SEQ ID NO: 320567 - DNA, 33 bp, Homo sapien
atcatgttaccttgaagtgagagaaccacagag

SEQ ID NO: 320568 - DNA, 33 bp, Homo sapien
atcatgttaccttgaattgagagaaccacagag

SEQ ID NO: 320569 - DNA, 33 bp, Homo sapien
tttttctaatcaatacactttaagagccttgca

SEQ ID NO: 320570 - DNA, 33 bp, Homo sapien
tttttctaatcaatacgctttaagagccttgca

SEQ ID NO: 320571 - DNA, 33 bp, Homo sapien
ttttttccaattaaacaagaaaatcacacacac

SEQ ID NO: 320572 - DNA, 33 bp, Homo sapien
ttttttccaattaaacgagaaaatcacacacac

SEQ ID NO: 320573 - DNA, 33 bp, Homo sapien
atggagggagtagaaccggtaatactcacagtg

SEQ ID NO: 320574 - DNA, 33 bp, Homo sapien
atggagggagtagaactggtaatactcacagtg

SEQ ID NO: 320575 - DNA, 33 bp, Homo sapien
gttcctacagaggttgcatggtctgtaatgcct

SEQ ID NO: 320576 - DNA, 33 bp, Homo sapien
gttcctacagaggttgtatggtctgtaatgcct

SEQ ID NO: 320577 - DNA, 33 bp, Homo sapien
cctgatcaaattactcaccagaaaaatggatcc

SEQ ID NO: 320578 - DNA, 33 bp, Homo sapien
cctgatcaaattactcgccagaaaaatggatcc

SEQ ID NO: 320579 - DNA, 33 bp, Homo sapien
tttcttcttaccatgcagaaaaggcccaggctc

SEQ ID NO: 320580 - DNA, 33 bp, Homo sapien
tttcttcttaccatgcggaaaaggcccaggctc

SEQ ID NO: 320581 - DNA, 33 bp, Homo sapien
actttcttccaagaggcagcctatacagccagg

SEQ ID NO: 320582 - DNA, 33 bp, Homo sapien
actttcttccaagaggtagcctatacagccagg

SEQ ID NO: 320583 - DNA, 33 bp, Homo sapien
gtcaatggatttcctcaaaggtctgctggttct

SEQ ID NO: 320584 - DNA, 33 bp, Homo sapien
gtcaatggatttcctcgaaggtctgctggttct

SEQ ID NO: 320585 - DNA, 33 bp, Homo sapien
acaggtatcagcataaataaacttcaaaaacac

SEQ ID NO: 320586 - DNA, 33 bp, Homo sapien
acaggtatcagcataagtaaacttcaaaaacac

SEQ ID NO: 320587 - DNA, 33 bp, Homo sapien
tactacttccacagggaccatctttacctgctg

SEQ ID NO: 320588 - DNA, 33 bp, Homo sapien
tactacttccacaggggccatctttacctgctg

SEQ ID NO: 320589 - DNA, 33 bp, Homo sapien
ttggggaagcaactgaagtaggtcatccctcct

SEQ ID NO: 320590 - DNA, 33 bp, Homo sapien
ttggggaagcaactgaggtaggtcatccctcct

SEQ ID NO: 320591 - DNA, 33 bp, Homo sapien
atgttgcaatagtaaacgctgaaagatttcata

SEQ ID NO: 320592 - DNA, 33 bp, Homo sapien
atgttgcaatagtaaatgctgaaagatttcata

SEQ ID NO: 320593 - DNA, 33 bp, Homo sapien
taaagatgaagcattaaacctaagattttattt

SEQ ID NO: 320594 - DNA, 33 bp, Homo sapien
taaagatgaagcattacacctaagattttattt

SEQ ID NO: 320595 - DNA, 33 bp, Homo sapien
atgtattaaaatgcaaacacattacttggatga

SEQ ID NO: 320596 - DNA, 33 bp, Homo sapien
atgtattaaaatgcaagcacattacttggatga

SEQ ID NO: 320597 - DNA, 33 bp, Homo sapien
gtagaggttatgtagacatgatgtccggtttcc

SEQ ID NO: 320598 - DNA, 33 bp, Homo sapien
gtagaggttatgtagatatgatgtccggtttcc

SEQ ID NO: 320599 - DNA, 33 bp, Homo sapien
tcctcctcagcttctacgtatttagtgattgac

SEQ ID NO: 320600 - DNA, 33 bp, Homo sapien
tcctcctcagcttctatgtatttagtgattgac

SEQ ID NO: 320601 - DNA, 33 bp, Homo sapien
caagagatcactcaaaatctgctcagcagctga

SEQ ID NO: 320602 - DNA, 33 bp, Homo sapien
caagagatcactcaaactctgctcagcagctga

SEQ ID NO: 320603 - DNA, 33 bp, Homo sapien
gactcatgggagagaaacttttatgcttacttt

SEQ ID NO: 320604 - DNA, 33 bp, Homo sapien
gactcatgggagagaaccttttatgcttacttt

SEQ ID NO: 320605 - DNA, 33 bp, Homo sapien
cctcaaaatcaaaacacggcaaagggatgaacc

SEQ ID NO: 320606 - DNA, 33 bp, Homo sapien
cctcaaaatcaaaacatggcaaagggatgaacc

SEQ ID NO: 320607 - DNA, 33 bp, Homo sapien
gcacttcctggaataacgttgctttggatttaa

SEQ ID NO: 320608 - DNA, 33 bp, Homo sapien
gcacttcctggaataatgttgctttggatttaa

SEQ ID NO: 320609 - DNA, 33 bp, Homo sapien
cattaaattgcttcataaattgtagacaataaa

SEQ ID NO: 320610 - DNA, 33 bp, Homo sapien
cattaaattgcttcatgaattgtagacaataaa

SEQ ID NO: 320611 - DNA, 33 bp, Homo sapien
aaatgctcaacaggtacagatattttctttttc

SEQ ID NO: 320612 - DNA, 33 bp, Homo sapien
aaatgctcaacaggtatagatattttctttttc

SEQ ID NO: 320613 - DNA, 33 bp, Homo sapien
atactgctgataaagacgtaacccgaaactgga

SEQ ID NO: 320614 - DNA, 33 bp, Homo sapien
atactgctgataaagatgtaacccgaaactgga

SEQ ID NO: 320615 - DNA, 33 bp, Homo sapien
ctgggaaacaaatacaccttacttgttatccac

SEQ ID NO: 320616 - DNA, 33 bp, Homo sapien
ctgggaaacaaatacagcttacttgttatccac

SEQ ID NO: 320617 - DNA, 33 bp, Homo sapien
ggcatgaatagaaccaaacattgaaagagtgaa

SEQ ID NO: 320618 - DNA, 33 bp, Homo sapien
ggcatgaatagaaccacacattgaaagagtgaa

SEQ ID NO: 320619 - DNA, 33 bp, Homo sapien
tcactcacgcttagcactctgtcaagatctctg

SEQ ID NO: 320620 - DNA, 33 bp, Homo sapien
tcactcacgcttagcagtctgtcaagatctctg

SEQ ID NO: 320621 - DNA, 33 bp, Homo sapien
aggcttttgagattaactcctcatagaacatct

SEQ ID NO: 320622 - DNA, 33 bp, Homo sapien
aggcttttgagattaattcctcatagaacatct

SEQ ID NO: 320623 - DNA, 33 bp, Homo sapien
attaaatataagatgacgttcagttcaagaggt

SEQ ID NO: 320624 - DNA, 33 bp, Homo sapien
attaaatataagatgatgttcagttcaagaggt

SEQ ID NO: 320625 - DNA, 33 bp, Homo sapien
ggctgtacttatgagccgatcaaagagaactaa

SEQ ID NO: 320626 - DNA, 33 bp, Homo sapien
ggctgtacttatgagctgatcaaagagaactaa

SEQ ID NO: 320627 - DNA, 33 bp, Homo sapien
gtgtttcttaaatctccgagagcaacatattca

SEQ ID NO: 320628 - DNA, 33 bp, Homo sapien
gtgtttcttaaatctctgagagcaacatattca

SEQ ID NO: 320629 - DNA, 33 bp, Homo sapien
gacagcagaccacccaatggacaaaagccttga

SEQ ID NO: 320630 - DNA, 33 bp, Homo sapien
gacagcagaccacccagtggacaaaagccttga

SEQ ID NO: 320631 - DNA, 33 bp, Homo sapien
attaatagattttctcaaggataattaagtgat

SEQ ID NO: 320632 - DNA, 33 bp, Homo sapien
attaatagattttctcgaggataattaagtgat

SEQ ID NO: 320633 - DNA, 33 bp, Homo sapien
tagcaggtcaagagatcatatatgcaggactct

SEQ ID NO: 320634 - DNA, 33 bp, Homo sapien
tagcaggtcaagagattatatatgcaggactct

SEQ ID NO: 320635 - DNA, 33 bp, Homo sapien
ttattgaaacatcataaaaaaaacagtggtccc

SEQ ID NO: 320636 - DNA, 33 bp, Homo sapien
ttattgaaacatcatagaaaaaacagtggtccc

SEQ ID NO: 320637 - DNA, 33 bp, Homo sapien
tcacatctaatggccaactgagattagccacct

SEQ ID NO: 320638 - DNA, 33 bp, Homo sapien
tcacatctaatggccagctgagattagccacct

SEQ ID NO: 320639 - DNA, 33 bp, Homo sapien
agcgtgtctgggatgtcacagcagttattctag

SEQ ID NO: 320640 - DNA, 33 bp, Homo sapien
agcgtgtctgggatgttacagcagttattctag

SEQ ID NO: 320641 - DNA, 33 bp, Homo sapien
agtttggactaggccaagaacagaggcagcaac

SEQ ID NO: 320642 - DNA, 33 bp, Homo sapien
agtttggactaggccaggaacagaggcagcaac

SEQ ID NO: 320643 - DNA, 33 bp, Homo sapien
ccctgagttctggccaataggatgcacacttcc

SEQ ID NO: 320644 - DNA, 33 bp, Homo sapien
ccctgagttctggccagtaggatgcacacttcc

SEQ ID NO: 320645 - DNA, 33 bp, Homo sapien
catgtggctgtgtgtacagtactgcagtgttta

SEQ ID NO: 320646 - DNA, 33 bp, Homo sapien
catgtggctgtgtgtatagtactgcagtgttta

SEQ ID NO: 320647 - DNA, 33 bp, Homo sapien
ttcccagtaagcccacagtcatttcacacctcc

SEQ ID NO: 320648 - DNA, 33 bp, Homo sapien
ttcccagtaagcccacggtcatttcacacctcc

SEQ ID NO: 320649 - DNA, 33 bp, Homo sapien
gtattctcagtaactgacaaatggtaggaactc

SEQ ID NO: 320650 - DNA, 33 bp, Homo sapien
gtattctcagtaactgccaaatggtaggaactc

SEQ ID NO: 320651 - DNA, 33 bp, Homo sapien
agcaaataaataactacggtgactgtttgggaa

SEQ ID NO: 320652 - DNA, 33 bp, Homo sapien
agcaaataaataactatggtgactgtttgggaa

SEQ ID NO: 320653 - DNA, 33 bp, Homo sapien
ctgtgtccagactacaaatcatttggcagttaa

SEQ ID NO: 320654 - DNA, 33 bp, Homo sapien
ctgtgtccagactacacatcatttggcagttaa

SEQ ID NO: 320655 - DNA, 33 bp, Homo sapien
actattggctaaaggactcaacgtgaataagac

SEQ ID NO: 320656 - DNA, 33 bp, Homo sapien
actattggctaaaggattcaacgtgaataagac

SEQ ID NO: 320657 - DNA, 33 bp, Homo sapien
tataggactcaaatccaaacaacctaactcctg

SEQ ID NO: 320658 - DNA, 33 bp, Homo sapien
tataggactcaaatccgaacaacctaactcctg

SEQ ID NO: 320659 - DNA, 33 bp, Homo sapien
ttacagtggcctaaataagcaaggaagaaaaac

SEQ ID NO: 320660 - DNA, 33 bp, Homo sapien
ttacagtggcctaaatgagcaaggaagaaaaac

SEQ ID NO: 320661 - DNA, 33 bp, Homo sapien
tagcatgatgtcctcaagggtcattcatgttgt

SEQ ID NO: 320662 - DNA, 33 bp, Homo sapien
tagcatgatgtcctcacgggtcattcatgttgt

SEQ ID NO: 320663 - DNA, 33 bp, Homo sapien
atctctgaggtagataatactagatgaaactca

SEQ ID NO: 320664 - DNA, 33 bp, Homo sapien
atctctgaggtagatactactagatgaaactca

SEQ ID NO: 320665 - DNA, 33 bp, Homo sapien
gcctagtcaagagagaaaacaagaacttgctga

SEQ ID NO: 320666 - DNA, 33 bp, Homo sapien
gcctagtcaagagagagaacaagaacttgctga

SEQ ID NO: 320667 - DNA, 33 bp, Homo sapien
gaatttcacaagaacaaccctagcaataggaga

SEQ ID NO: 320668 - DNA, 33 bp, Homo sapien
gaatttcacaagaacatccctagcaataggaga

SEQ ID NO: 320669 - DNA, 33 bp, Homo sapien
ggtgtgaccagggcaaagaggagaatgtagcag

SEQ ID NO: 320670 - DNA, 33 bp, Homo sapien
ggtgtgaccagggcaatgaggagaatgtagcag

SEQ ID NO: 320671 - DNA, 33 bp, Homo sapien
accctagaacaacttacctggctcaagttgctt

SEQ ID NO: 320672 - DNA, 33 bp, Homo sapien
accctagaacaacttatctggctcaagttgctt

SEQ ID NO: 320673 - DNA, 33 bp, Homo sapien
tcagtcaacagacatcaactctcgcactgtgcc

SEQ ID NO: 320674 - DNA, 33 bp, Homo sapien
tcagtcaacagacatcgactctcgcactgtgcc

SEQ ID NO: 320675 - DNA, 33 bp, Homo sapien
ttaactgaggtagtcacgtaagcttcgtctaac

SEQ ID NO: 320676 - DNA, 33 bp, Homo sapien
ttaactgaggtagtcatgtaagcttcgtctaac

SEQ ID NO: 320677 - DNA, 33 bp, Homo sapien
ctggcttggaggactaacgccattttagtcggc

SEQ ID NO: 320678 - DNA, 33 bp, Homo sapien
ctggcttggaggactagcgccattttagtcggc

SEQ ID NO: 320679 - DNA, 33 bp, Homo sapien
gtagtgatatgataaaagctccaaaatatagtt

SEQ ID NO: 320680 - DNA, 33 bp, Homo sapien
gtagtgatatgataaaggctccaaaatatagtt

SEQ ID NO: 320681 - DNA, 33 bp, Homo sapien
gaagagtctttctgcgcagtgatatgataaaag

SEQ ID NO: 320682 - DNA, 33 bp, Homo sapien
gaagagtctttctgcgtagtgatatgataaaag

SEQ ID NO: 320683 - DNA, 33 bp, Homo sapien
agaattgattgggtaaatagttcagagaaatct

SEQ ID NO: 320684 - DNA, 33 bp, Homo sapien
agaattgattgggtaactagttcagagaaatct

SEQ ID NO: 320685 - DNA, 33 bp, Homo sapien
caaggcaatgcataaacaaactttagataaata

SEQ ID NO: 320686 - DNA, 33 bp, Homo sapien
caaggcaatgcataaataaactttagataaata

SEQ ID NO: 320687 - DNA, 33 bp, Homo sapien
aaaagctatcttgaaaatgttttggaactgcga

SEQ ID NO: 320688 - DNA, 33 bp, Homo sapien
aaaagctatcttgaaagtgttttggaactgcga

SEQ ID NO: 320689 - DNA, 33 bp, Homo sapien
gtattgtgcatcgacactaaaaactgatcagtg

SEQ ID NO: 320690 - DNA, 33 bp, Homo sapien
gtattgtgcatcgacagtaaaaactgatcagtg

SEQ ID NO: 320691 - DNA, 33 bp, Homo sapien
aaatatagttcagtcaaggctcaggagcagcaa

SEQ ID NO: 320692 - DNA, 33 bp, Homo sapien
aaatatagttcagtcagggctcaggagcagcaa

SEQ ID NO: 320693 - DNA, 33 bp, Homo sapien
actatttagaattcaaaatgacataaaacaaaa

SEQ ID NO: 320694 - DNA, 33 bp, Homo sapien
actatttagaattcaagatgacataaaacaaaa

SEQ ID NO: 320695 - DNA, 33 bp, Homo sapien
accattgcttctcagacgactgttaacaacctt

SEQ ID NO: 320696 - DNA, 33 bp, Homo sapien
accattgcttctcagatgactgttaacaacctt

SEQ ID NO: 320697 - DNA, 33 bp, Homo sapien
tctgctagcatgtaccaaaactgtagaatccca

SEQ ID NO: 320698 - DNA, 33 bp, Homo sapien
tctgctagcatgtaccgaaactgtagaatccca

SEQ ID NO: 320699 - DNA, 33 bp, Homo sapien
ttcacatgcgttgttaaaatttgccgctggggt

SEQ ID NO: 320700 - DNA, 33 bp, Homo sapien
ttcacatgcgttgttacaatttgccgctggggt

SEQ ID NO: 320701 - DNA, 33 bp, Homo sapien
gtacaactgtgaaaaactgtttggcagtatatc

SEQ ID NO: 320702 - DNA, 33 bp, Homo sapien
gtacaactgtgaaaaattgtttggcagtatatc

SEQ ID NO: 320703 - DNA, 33 bp, Homo sapien
atgctggtctcatttacgggctgcctaagaaat

SEQ ID NO: 320704 - DNA, 33 bp, Homo sapien
atgctggtctcatttatgggctgcctaagaaat

SEQ ID NO: 320705 - DNA, 33 bp, Homo sapien
gtcccagagaaaaccacgacaaggagcaaagcc

SEQ ID NO: 320706 - DNA, 33 bp, Homo sapien
gtcccagagaaaaccatgacaaggagcaaagcc

SEQ ID NO: 320707 - DNA, 33 bp, Homo sapien
gtaacaccaggcttgaagctacatgctaggatt

SEQ ID NO: 320708 - DNA, 33 bp, Homo sapien
gtaacaccaggcttgatgctacatgctaggatt

SEQ ID NO: 320709 - DNA, 33 bp, Homo sapien
taagctgcacacttaagaagtatctactatagg

SEQ ID NO: 320710 - DNA, 33 bp, Homo sapien
taagctgcacacttaataagtatctactatagg

SEQ ID NO: 320711 - DNA, 33 bp, Homo sapien
tttacaatatccctggaaaaaacttgcatacta

SEQ ID NO: 320712 - DNA, 33 bp, Homo sapien
tttacaatatccctggcaaaaacttgcatacta

SEQ ID NO: 320713 - DNA, 33 bp, Homo sapien
gtattcatacctgtcaatatttttgctatacca

SEQ ID NO: 320714 - DNA, 33 bp, Homo sapien
gtattcatacctgtcagtatttttgctatacca

SEQ ID NO: 320715 - DNA, 33 bp, Homo sapien
tcagcttgtgagcttgcaggtaattgactgcag

SEQ ID NO: 320716 - DNA, 33 bp, Homo sapien
tcagcttgtgagcttggaggtaattgactgcag

SEQ ID NO: 320717 - DNA, 33 bp, Homo sapien
cttccgagagacaatgcaggacataccttaaaa

SEQ ID NO: 320718 - DNA, 33 bp, Homo sapien
cttccgagagacaatgtaggacataccttaaaa

SEQ ID NO: 320719 - DNA, 33 bp, Homo sapien
ctgggcacttccaaaccgtcctgtgcaatctcc

SEQ ID NO: 320720 - DNA, 33 bp, Homo sapien
ctgggcacttccaaactgtcctgtgcaatctcc

SEQ ID NO: 320721 - DNA, 33 bp, Homo sapien
gagacatgagacatcaatcgatatatgtaagaa

SEQ ID NO: 320722 - DNA, 33 bp, Homo sapien
gagacatgagacatcagtcgatatatgtaagaa

SEQ ID NO: 320723 - DNA, 33 bp, Homo sapien
tcagagttaaggtgcaaaagctcaaccatcatg

SEQ ID NO: 320724 - DNA, 33 bp, Homo sapien
tcagagttaaggtgcacaagctcaaccatcatg

SEQ ID NO: 320725 - DNA, 33 bp, Homo sapien
ataagacttgacccccactcaccagcagggaga

SEQ ID NO: 320726 - DNA, 33 bp, Homo sapien
ataagacttgacccccgctcaccagcagggaga

SEQ ID NO: 320727 - DNA, 33 bp, Homo sapien
catgttaaaattgatacggtttgtctgtgaccc

SEQ ID NO: 320728 - DNA, 33 bp, Homo sapien
catgttaaaattgatatggtttgtctgtgaccc

SEQ ID NO: 320729 - DNA, 33 bp, Homo sapien
gctcaggcaccatgaaaagggagggtatgatga

SEQ ID NO: 320730 - DNA, 33 bp, Homo sapien
gctcaggcaccatgaagagggagggtatgatga

SEQ ID NO: 320731 - DNA, 33 bp, Homo sapien
aaggcacaggtaagacagggtaaacgatttagg

SEQ ID NO: 320732 - DNA, 33 bp, Homo sapien
aaggcacaggtaagaccgggtaaacgatttagg

SEQ ID NO: 320733 - DNA, 33 bp, Homo sapien
ccaagacgagaggagaacacacagagaagcaca

SEQ ID NO: 320734 - DNA, 33 bp, Homo sapien
ccaagacgagaggagaccacacagagaagcaca

SEQ ID NO: 320735 - DNA, 33 bp, Homo sapien
aacttctaaagatgacaaagcaagtaagtgaaa

SEQ ID NO: 320736 - DNA, 33 bp, Homo sapien
aacttctaaagatgacgaagcaagtaagtgaaa

SEQ ID NO: 320737 - DNA, 33 bp, Homo sapien
ccagtcacattcctcacgctttgatctattatg

SEQ ID NO: 320738 - DNA, 33 bp, Homo sapien
ccagtcacattcctcatgctttgatctattatg

SEQ ID NO: 320739 - DNA, 33 bp, Homo sapien
cagtcttattggatgacagcctgacctttatgg

SEQ ID NO: 320740 - DNA, 33 bp, Homo sapien
cagtcttattggatgagagcctgacctttatgg

SEQ ID NO: 320741 - DNA, 33 bp, Homo sapien
gttcactcttctacaccctaaaaacactaaatc

SEQ ID NO: 320742 - DNA, 33 bp, Homo sapien
gttcactcttctacactctaaaaacactaaatc

SEQ ID NO: 320743 - DNA, 33 bp, Homo sapien
aatcatctaattctaacggagcatttaggagct

SEQ ID NO: 320744 - DNA, 33 bp, Homo sapien
aatcatctaattctaatggagcatttaggagct

SEQ ID NO: 320745 - DNA, 33 bp, Homo sapien
agattaccaaccttcaccacttctgtagttcaa

SEQ ID NO: 320746 - DNA, 33 bp, Homo sapien
agattaccaaccttcagcacttctgtagttcaa

SEQ ID NO: 320747 - DNA, 33 bp, Homo sapien
caatggatgtcgctcagaaacaaaggcaaaact

SEQ ID NO: 320748 - DNA, 33 bp, Homo sapien
caatggatgtcgctcataaacaaaggcaaaact

SEQ ID NO: 320749 - DNA, 33 bp, Homo sapien
tacacattatttccccaagatccctacagccct

SEQ ID NO: 320750 - DNA, 33 bp, Homo sapien
tacacattatttccccgagatccctacagccct

SEQ ID NO: 320751 - DNA, 33 bp, Homo sapien
ggtcgtgtggggtggacgtcatcaaattcaatg

SEQ ID NO: 320752 - DNA, 33 bp, Homo sapien
ggtcgtgtggggtggatgtcatcaaattcaatg

SEQ ID NO: 320753 - DNA, 33 bp, Homo sapien
cataatcataacaacaatgtaaataccagctgc

SEQ ID NO: 320754 - DNA, 33 bp, Homo sapien
cataatcataacaacagtgtaaataccagctgc

SEQ ID NO: 320755 - DNA, 33 bp, Homo sapien
gttcatccttaatacacaaacacaagtgcagct

SEQ ID NO: 320756 - DNA, 33 bp, Homo sapien
gttcatccttaatacataaacacaagtgcagct

SEQ ID NO: 320757 - DNA, 33 bp, Homo sapien
gggagatccctagataatatcacagcaactgcc

SEQ ID NO: 320758 - DNA, 33 bp, Homo sapien
gggagatccctagatagtatcacagcaactgcc

SEQ ID NO: 320759 - DNA, 33 bp, Homo sapien
agtctggtgatgctgccatttttggtatagttc

SEQ ID NO: 320760 - DNA, 33 bp, Homo sapien
agtctggtgatgctgctatttttggtatagttc

SEQ ID NO: 320761 - DNA, 33 bp, Homo sapien
tttagcagttattaaacggatctctattgtgga

SEQ ID NO: 320762 - DNA, 33 bp, Homo sapien
tttagcagttattaaatggatctctattgtgga

SEQ ID NO: 320763 - DNA, 33 bp, Homo sapien
attaatgtgtcacttacgaatttaactcttctt

SEQ ID NO: 320764 - DNA, 33 bp, Homo sapien
attaatgtgtcacttatgaatttaactcttctt

SEQ ID NO: 320765 - DNA, 33 bp, Homo sapien
gcacctcattgcctcactaggtgggaagaataa

SEQ ID NO: 320766 - DNA, 33 bp, Homo sapien
gcacctcattgcctcattaggtgggaagaataa

SEQ ID NO: 320767 - DNA, 33 bp, Homo sapien
cactgaagttgagtgcaatcgggagtgcccata

SEQ ID NO: 320768 - DNA, 33 bp, Homo sapien
cactgaagttgagtgcgatcgggagtgcccata

SEQ ID NO: 320769 - DNA, 33 bp, Homo sapien
aaatgcaagtatgtaactgaaatattctaatcc

SEQ ID NO: 320770 - DNA, 33 bp, Homo sapien
aaatgcaagtatgtaagtgaaatattctaatcc

SEQ ID NO: 320771 - DNA, 33 bp, Homo sapien
gagacaaaatttattaaccaaactggaccagaa

SEQ ID NO: 320772 - DNA, 33 bp, Homo sapien
gagacaaaatttattatccaaactggaccagaa

SEQ ID NO: 320773 - DNA, 33 bp, Homo sapien
gtacagtagttaaaagaagactctagagctgtg

SEQ ID NO: 320774 - DNA, 33 bp, Homo sapien
gtacagtagttaaaagtagactctagagctgtg

SEQ ID NO: 320775 - DNA, 33 bp, Homo sapien
aaacatatgatatcacagatttgcagattatgt

SEQ ID NO: 320776 - DNA, 33 bp, Homo sapien
aaacatatgatatcacggatttgcagattatgt

SEQ ID NO: 320777 - DNA, 33 bp, Homo sapien
acttgcgagacacacacatttgtaagagtgaca

SEQ ID NO: 320778 - DNA, 33 bp, Homo sapien
acttgcgagacacacatatttgtaagagtgaca

SEQ ID NO: 320779 - DNA, 33 bp, Homo sapien
gaaaagcgcattgagaaaggaggatggcactgt

SEQ ID NO: 320780 - DNA, 33 bp, Homo sapien
gaaaagcgcattgagagaggaggatggcactgt

SEQ ID NO: 320781 - DNA, 33 bp, Homo sapien
cagctcactccaattcaatactacaaatattta

SEQ ID NO: 320782 - DNA, 33 bp, Homo sapien
cagctcactccaattcgatactacaaatattta

SEQ ID NO: 320783 - DNA, 33 bp, Homo sapien
atgtaaaatcactttgcagatgacctgagaagg

SEQ ID NO: 320784 - DNA, 33 bp, Homo sapien
atgtaaaatcactttgtagatgacctgagaagg

SEQ ID NO: 320785 - DNA, 33 bp, Homo sapien
atgaagtaaccataaaaacgtagttgagcactt

SEQ ID NO: 320786 - DNA, 33 bp, Homo sapien
atgaagtaaccataaagacgtagttgagcactt

SEQ ID NO: 320787 - DNA, 33 bp, Homo sapien
aagaaagaaaatcccacggcaggactacagttg

SEQ ID NO: 320788 - DNA, 33 bp, Homo sapien
aagaaagaaaatcccatggcaggactacagttg

SEQ ID NO: 320789 - DNA, 33 bp, Homo sapien
gagtctgagtgaaaaacgaaaatccatacttaa

SEQ ID NO: 320790 - DNA, 33 bp, Homo sapien
gagtctgagtgaaaaatgaaaatccatacttaa

SEQ ID NO: 320791 - DNA, 33 bp, Homo sapien
catagcttgagtgtcaatcatgctcccagaact

SEQ ID NO: 320792 - DNA, 33 bp, Homo sapien
catagcttgagtgtcagtcatgctcccagaact

SEQ ID NO: 320793 - DNA, 33 bp, Homo sapien
aaaaagccacatcttaaaagacacctacctctc

SEQ ID NO: 320794 - DNA, 33 bp, Homo sapien
aaaaagccacatcttacaagacacctacctctc

SEQ ID NO: 320795 - DNA, 33 bp, Homo sapien
gtgcaaaatggcaaagcaaagactacgaaagta

SEQ ID NO: 320796 - DNA, 33 bp, Homo sapien
gtgcaaaatggcaaaggaaagactacgaaagta

SEQ ID NO: 320797 - DNA, 33 bp, Homo sapien
ttcccgcactgggtccagctctgacatatgact

SEQ ID NO: 320798 - DNA, 33 bp, Homo sapien
ttcccgcactgggtcccgctctgacatatgact

SEQ ID NO: 320799 - DNA, 33 bp, Homo sapien
ctttccttagctgtaaaagtcctaatccacctc

SEQ ID NO: 320800 - DNA, 33 bp, Homo sapien
ctttccttagctgtaagagtcctaatccacctc

SEQ ID NO: 320801 - DNA, 33 bp, Homo sapien
agattaaatttcggaacaagtaatttgaaaaac

SEQ ID NO: 320802 - DNA, 33 bp, Homo sapien
agattaaatttcggaagaagtaatttgaaaaac

SEQ ID NO: 320803 - DNA, 33 bp, Homo sapien
ttttcaccacaactcaaagtaaaataatacatt

SEQ ID NO: 320804 - DNA, 33 bp, Homo sapien
ttttcaccacaactcagagtaaaataatacatt

SEQ ID NO: 320805 - DNA, 33 bp, Homo sapien
cctaagggtgataaaaagcatctgaggaaagac

SEQ ID NO: 320806 - DNA, 33 bp, Homo sapien
cctaagggtgataaaatgcatctgaggaaagac

SEQ ID NO: 320807 - DNA, 33 bp, Homo sapien
catctctcagaacaccaagtctactcaatataa

SEQ ID NO: 320808 - DNA, 33 bp, Homo sapien
catctctcagaacaccgagtctactcaatataa

SEQ ID NO: 320809 - DNA, 33 bp, Homo sapien
gaatgttaattctaacggttaagcaccagtaat

SEQ ID NO: 320810 - DNA, 33 bp, Homo sapien
gaatgttaattctaactgttaagcaccagtaat

SEQ ID NO: 320811 - DNA, 33 bp, Homo sapien
gttagtttctttccaccgcctaacatacaagta

SEQ ID NO: 320812 - DNA, 33 bp, Homo sapien
gttagtttctttccactgcctaacatacaagta

SEQ ID NO: 320813 - DNA, 33 bp, Homo sapien
tctctgcccccagatacagagtctctgacaggt

SEQ ID NO: 320814 - DNA, 33 bp, Homo sapien
tctctgcccccagatagagagtctctgacaggt

SEQ ID NO: 320815 - DNA, 33 bp, Homo sapien
ggaagatcaactgagcacctctggcaaaacatc

SEQ ID NO: 320816 - DNA, 33 bp, Homo sapien
ggaagatcaactgagcgcctctggcaaaacatc

SEQ ID NO: 320817 - DNA, 33 bp, Homo sapien
taccttcaatgacctcaaagtacagcaaataat

SEQ ID NO: 320818 - DNA, 33 bp, Homo sapien
taccttcaatgacctcgaagtacagcaaataat

SEQ ID NO: 320819 - DNA, 33 bp, Homo sapien
acacagaatatgtatgcataatttgcctttaac

SEQ ID NO: 320820 - DNA, 33 bp, Homo sapien
acacagaatatgtatgtataatttgcctttaac

SEQ ID NO: 320821 - DNA, 33 bp, Homo sapien
tgacttaaatctcagacgtggatatagctccag

SEQ ID NO: 320822 - DNA, 33 bp, Homo sapien
tgacttaaatctcagatgtggatatagctccag

SEQ ID NO: 320823 - DNA, 33 bp, Homo sapien
tctcatttttcaggaaagtcacttctcagcctg

SEQ ID NO: 320824 - DNA, 33 bp, Homo sapien
tctcatttttcaggaaggtcacttctcagcctg

SEQ ID NO: 320825 - DNA, 33 bp, Homo sapien
cagtaatctttgtgtacgtgggctacactaagc

SEQ ID NO: 320826 - DNA, 33 bp, Homo sapien
cagtaatctttgtgtatgtgggctacactaagc

SEQ ID NO: 320827 - DNA, 33 bp, Homo sapien
gtttatgacatgacatcaaatttttggtgaaat

SEQ ID NO: 320828 - DNA, 33 bp, Homo sapien
gtttatgacatgacatgaaatttttggtgaaat

SEQ ID NO: 320829 - DNA, 33 bp, Homo sapien
agcagaattcacattacacttagaggggctctt

SEQ ID NO: 320830 - DNA, 33 bp, Homo sapien
agcagaattcacattatacttagaggggctctt

SEQ ID NO: 320831 - DNA, 33 bp, Homo sapien
tgccctcagaaatcagacagaatggatatggta

SEQ ID NO: 320832 - DNA, 33 bp, Homo sapien
tgccctcagaaatcaggcagaatggatatggta

SEQ ID NO: 320833 - DNA, 33 bp, Homo sapien
tcagccaattatttccaaagtggcagaataagt

SEQ ID NO: 320834 - DNA, 33 bp, Homo sapien
tcagccaattatttcccaagtggcagaataagt

SEQ ID NO: 320835 - DNA, 33 bp, Homo sapien
agttaaatatacgtgagagcataaatgaactag

SEQ ID NO: 320836 - DNA, 33 bp, Homo sapien
agttaaatatacgtgatagcataaatgaactag

SEQ ID NO: 320837 - DNA, 33 bp, Homo sapien
acaagttggaagagtacaggacagagtaagttt

SEQ ID NO: 320838 - DNA, 33 bp, Homo sapien
acaagttggaagagtataggacagagtaagttt

SEQ ID NO: 320839 - DNA, 33 bp, Homo sapien
aaagagaatttggctaacctgaaatgtcatatt

SEQ ID NO: 320840 - DNA, 33 bp, Homo sapien
aaagagaatttggctatcctgaaatgtcatatt

SEQ ID NO: 320841 - DNA, 33 bp, Homo sapien
atgattcagcaatatcaataggtagaggcttat

SEQ ID NO: 320842 - DNA, 33 bp, Homo sapien
atgattcagcaatatcgataggtagaggcttat

SEQ ID NO: 320843 - DNA, 33 bp, Homo sapien
ggttgactacattgacagatgctgcaagctttg

SEQ ID NO: 320844 - DNA, 33 bp, Homo sapien
ggttgactacattgacggatgctgcaagctttg

SEQ ID NO: 320845 - DNA, 33 bp, Homo sapien
ccctgccataaacaaactgctaaacaaaatgga

SEQ ID NO: 320846 - DNA, 33 bp, Homo sapien
ccctgccataaacaaattgctaaacaaaatgga

SEQ ID NO: 320847 - DNA, 33 bp, Homo sapien
aagctttattagaacacggccttacccattagt

SEQ ID NO: 320848 - DNA, 33 bp, Homo sapien
aagctttattagaacatggccttacccattagt

SEQ ID NO: 320849 - DNA, 33 bp, Homo sapien
atactcttaacccaaactggaagatatgttagt

SEQ ID NO: 320850 - DNA, 33 bp, Homo sapien
atactcttaacccaaattggaagatatgttagt

SEQ ID NO: 320851 - DNA, 33 bp, Homo sapien
cccatctatctctgccaagcaaaaggaagagag

SEQ ID NO: 320852 - DNA, 33 bp, Homo sapien
cccatctatctctgccgagcaaaaggaagagag

SEQ ID NO: 320853 - DNA, 33 bp, Homo sapien
aagccaaatttgataacgtaaaaatgaaagcac

SEQ ID NO: 320854 - DNA, 33 bp, Homo sapien
aagccaaatttgataatgtaaaaatgaaagcac

SEQ ID NO: 320855 - DNA, 33 bp, Homo sapien
atgcctgccatttttcccattgttctgctttgt

SEQ ID NO: 320856 - DNA, 33 bp, Homo sapien
atgcctgccatttttctcattgttctgctttgt

SEQ ID NO: 320857 - DNA, 33 bp, Homo sapien
gtaggtcttgtttactcactcaccgttattaac

SEQ ID NO: 320858 - DNA, 33 bp, Homo sapien
gtaggtcttgtttactgactcaccgttattaac

SEQ ID NO: 320859 - DNA, 33 bp, Homo sapien
taattctgaggaaaaaatgggaatgtcagtttc

SEQ ID NO: 320860 - DNA, 33 bp, Homo sapien
taattctgaggaaaaattgggaatgtcagtttc

SEQ ID NO: 320861 - DNA, 33 bp, Homo sapien
agaatttcagaagtcaaaaggctcttagaggtc

SEQ ID NO: 320862 - DNA, 33 bp, Homo sapien
agaatttcagaagtcagaaggctcttagaggtc

SEQ ID NO: 320863 - DNA, 33 bp, Homo sapien
ttcttataattgcgctcaaaatagctgaagctc

SEQ ID NO: 320864 - DNA, 33 bp, Homo sapien
ttcttataattgcgcttaaaatagctgaagctc

SEQ ID NO: 320865 - DNA, 33 bp, Homo sapien
tcttttttcctcaattaaattcagcacaaagca

SEQ ID NO: 320866 - DNA, 33 bp, Homo sapien
tcttttttcctcaattcaattcagcacaaagca

SEQ ID NO: 320867 - DNA, 33 bp, Homo sapien
tgtttcacagttaacaaattgtgggatgactcc

SEQ ID NO: 320868 - DNA, 33 bp, Homo sapien
tgtttcacagttaacatattgtgggatgactcc

SEQ ID NO: 320869 - DNA, 33 bp, Homo sapien
ataggaaagtcacatcagagggagtccagggtg

SEQ ID NO: 320870 - DNA, 33 bp, Homo sapien
ataggaaagtcacatcggagggagtccagggtg

SEQ ID NO: 320871 - DNA, 33 bp, Homo sapien
ttggctcagtacattacgtgtataggttgcaaa

SEQ ID NO: 320872 - DNA, 33 bp, Homo sapien
ttggctcagtacattatgtgtataggttgcaaa

SEQ ID NO: 320873 - DNA, 33 bp, Homo sapien
tgcaagctcaggctgaagatgggccatagttta

SEQ ID NO: 320874 - DNA, 33 bp, Homo sapien
tgcaagctcaggctgaggatgggccatagttta

SEQ ID NO: 320875 - DNA, 33 bp, Homo sapien
acccaaagaatgagtaaacacaggggcatctat

SEQ ID NO: 320876 - DNA, 33 bp, Homo sapien
acccaaagaatgagtagacacaggggcatctat

SEQ ID NO: 320877 - DNA, 33 bp, Homo sapien
agtttttctttatagcacttactacaatggata

SEQ ID NO: 320878 - DNA, 33 bp, Homo sapien
agtttttctttatagcgcttactacaatggata

SEQ ID NO: 320879 - DNA, 33 bp, Homo sapien
aagaactgcctgaaacgaggtcatttataaagg

SEQ ID NO: 320880 - DNA, 33 bp, Homo sapien
aagaactgcctgaaactaggtcatttataaagg

SEQ ID NO: 320881 - DNA, 33 bp, Homo sapien
gggtaatataaaacttcaaaccatcatcattca

SEQ ID NO: 320882 - DNA, 33 bp, Homo sapien
gggtaatataaaactttaaaccatcatcattca

SEQ ID NO: 320883 - DNA, 33 bp, Homo sapien
acttataatcatagcacaaggggaagcaggctc

SEQ ID NO: 320884 - DNA, 33 bp, Homo sapien
acttataatcatagcagaaggggaagcaggctc

SEQ ID NO: 320885 - DNA, 33 bp, Homo sapien
ttcaacaaaaaattacaatgcatgccaaaaggc

SEQ ID NO: 320886 - DNA, 33 bp, Homo sapien
ttcaacaaaaaattacgatgcatgccaaaaggc

SEQ ID NO: 320887 - DNA, 33 bp, Homo sapien
gccataaagcaataaacggctcgctttatgctt

SEQ ID NO: 320888 - DNA, 33 bp, Homo sapien
gccataaagcaataaatggctcgctttatgctt

SEQ ID NO: 320889 - DNA, 33 bp, Homo sapien
aaatatttacaagtccgatatctgctaagggtt

SEQ ID NO: 320890 - DNA, 33 bp, Homo sapien
aaatatttacaagtcctatatctgctaagggtt

SEQ ID NO: 320891 - DNA, 33 bp, Homo sapien
tttggaaactgggaaaacatattgcaaggtgaa

SEQ ID NO: 320892 - DNA, 33 bp, Homo sapien
tttggaaactgggaaagcatattgcaaggtgaa

SEQ ID NO: 320893 - DNA, 33 bp, Homo sapien
tattttctatccagagcccagaatgaaactagt

SEQ ID NO: 320894 - DNA, 33 bp, Homo sapien
tattttctatccagagtccagaatgaaactagt

SEQ ID NO: 320895 - DNA, 33 bp, Homo sapien
ctaccagacagtaagaactttaggcattaaagc

SEQ ID NO: 320896 - DNA, 33 bp, Homo sapien
ctaccagacagtaagagctttaggcattaaagc

SEQ ID NO: 320897 - DNA, 33 bp, Homo sapien
agaacagtgacatgaaaaaaagttagcaaaatg

SEQ ID NO: 320898 - DNA, 33 bp, Homo sapien
agaacagtgacatgaagaaaagttagcaaaatg

SEQ ID NO: 320899 - DNA, 33 bp, Homo sapien
caaccactgagaccgactaaaattcaccatcca

SEQ ID NO: 320900 - DNA, 33 bp, Homo sapien
caaccactgagaccgattaaaattcaccatcca

SEQ ID NO: 320901 - DNA, 33 bp, Homo sapien; identical to SEQ ID NO: 320899

SEQ ID NO: 320902 - DNA, 33 bp, Homo sapien; identical to SEQ ID NO: 320900

SEQ ID NO: 320903 - DNA, 33 bp, Homo sapien
cttgcctggagaagtgccaaggtattaacattt

SEQ ID NO: 320904 - DNA, 33 bp, Homo sapien
cttgcctggagaagtggcaaggtattaacattt

SEQ ID NO: 320905 - DNA, 33 bp, Homo sapien
tcttctcttcctggtacacaagaggataacttg

SEQ ID NO: 320906 - DNA, 33 bp, Homo sapien
tcttctcttcctggtagacaagaggataacttg

SEQ ID NO: 320907 - DNA, 33 bp, Homo sapien
tctctcaggaatagacacaatagtgcgtatgat

SEQ ID NO: 320908 - DNA, 33 bp, Homo sapien
tctctcaggaatagacgcaatagtgcgtatgat

SEQ ID NO: 320909 - DNA, 33 bp, Homo sapien
ccactttcaagcatccagctacagacctttcaa

SEQ ID NO: 320910 - DNA, 33 bp, Homo sapien
ccactttcaagcatccggctacagacctttcaa

SEQ ID NO: 320911 - DNA, 33 bp, Homo sapien
gaaaaacagaaagggcaaaagtaactcaagaga

SEQ ID NO: 320912 - DNA, 33 bp, Homo sapien
gaaaaacagaaagggcgaaagtaactcaagaga

SEQ ID NO: 320913 - DNA, 33 bp, Homo sapien
tcagtcttaagaatacaacaaacattcttattg

SEQ ID NO: 320914 - DNA, 33 bp, Homo sapien
tcagtcttaagaatacgacaaacattcttattg

SEQ ID NO: 320915 - DNA, 33 bp, Homo sapien
gcttgtccatcattgcacagctcttcataaatt

SEQ ID NO: 320916 - DNA, 33 bp, Homo sapien
gcttgtccatcattgcgcagctcttcataaatt

SEQ ID NO: 320917 - DNA, 33 bp, Homo sapien
gaagtaatgaatacaacgaactctacttttatt

SEQ ID NO: 320918 - DNA, 33 bp, Homo sapien
gaagtaatgaatacaatgaactctacttttatt

SEQ ID NO: 320919 - DNA, 33 bp, Homo sapien
tcacagagaaggaaagcacactcaatctgtcat

SEQ ID NO: 320920 - DNA, 33 bp, Homo sapien
tcacagagaaggaaagtacactcaatctgtcat

SEQ ID NO: 320921 - DNA, 33 bp, Homo sapien
ttggttttgtgccaacagtaaaatgtccccact

SEQ ID NO: 320922 - DNA, 33 bp, Homo sapien
ttggttttgtgccaacggtaaaatgtccccact

SEQ ID NO: 320923 - DNA, 33 bp, Homo sapien
atttgttcaaatgaaacaacccatcaaatattg

SEQ ID NO: 320924 - DNA, 33 bp, Homo sapien
atttgttcaaatgaaataacccatcaaatattg

SEQ ID NO: 320925 - DNA, 33 bp, Homo sapien
taactcttgtggttcaaaggtcttgaggaatta

SEQ ID NO: 320926 - DNA, 33 bp, Homo sapien
taactcttgtggttcagaggtcttgaggaatta

SEQ ID NO: 320927 - DNA, 33 bp, Homo sapien
aattctgtgagctacacgataaaataaattcat

SEQ ID NO: 320928 - DNA, 33 bp, Homo sapien
aattctgtgagctacatgataaaataaattcat

SEQ ID NO: 320929 - DNA, 33 bp, Homo sapien
acaagaaatgaatacaaaaacctcagtgggtaa

SEQ ID NO: 320930 - DNA, 33 bp, Homo sapien
acaagaaatgaatacagaaacctcagtgggtaa

SEQ ID NO: 320931 - DNA, 33 bp, Homo sapien
ttaggatctgaaattgaatagatggcttttgta

SEQ ID NO: 320932 - DNA, 33 bp, Homo sapien
ttaggatctgaaattggatagatggcttttgta

SEQ ID NO: 320933 - DNA, 33 bp, Homo sapien
ggtcattatacaatgaaaaagcgttcaattcaa

SEQ ID NO: 320934 - DNA, 33 bp, Homo sapien
ggtcattatacaatgataaagcgttcaattcaa

SEQ ID NO: 320935 - DNA, 33 bp, Homo sapien
tgcagttgtaggattaaaaaaagcttgtttctt

SEQ ID NO: 320936 - DNA, 33 bp, Homo sapien
tgcagttgtaggattagaaaaagcttgtttctt

SEQ ID NO: 320937 - DNA, 33 bp, Homo sapien
gtagtagttggttgttaaaaaatttgactacct

SEQ ID NO: 320938 - DNA, 33 bp, Homo sapien
gtagtagttggttgtttaaaaatttgactacct

SEQ ID NO: 320939 - DNA, 33 bp, Homo sapien
aatagtggtgctcagagactcccatcgaaaaaa

SEQ ID NO: 320940 - DNA, 33 bp, Homo sapien
aatagtggtgctcagatactcccatcgaaaaaa

SEQ ID NO: 320941 - DNA, 33 bp, Homo sapien
taaaagagacaaatcccgattattcatcttgtt

SEQ ID NO: 320942 - DNA, 33 bp, Homo sapien
taaaagagacaaatcctgattattcatcttgtt

SEQ ID NO: 320943 - DNA, 33 bp, Homo sapien
aacagtttgattatgcaatgcttttgttattgt

SEQ ID NO: 320944 - DNA, 33 bp, Homo sapien
aacagtttgattatgctatgcttttgttattgt

SEQ ID NO: 320945 - DNA, 33 bp, Homo sapien
atttatcaactttgtaccagtatttaggtattg

SEQ ID NO: 320946 - DNA, 33 bp, Homo sapien
atttatcaactttgtatcagtatttaggtattg

SEQ ID NO: 320947 - DNA, 33 bp, Homo sapien
ctagtcctagactacacctacatctcatgccac

SEQ ID NO: 320948 - DNA, 33 bp, Homo sapien
ctagtcctagactacagctacatctcatgccac

SEQ ID NO: 320949 - DNA, 33 bp, Homo sapien
aatgggatagcacatgaattaaaataactcata

SEQ ID NO: 320950 - DNA, 33 bp, Homo sapien
aatgggatagcacatggattaaaataactcata

SEQ ID NO: 320951 - DNA, 33 bp, Homo sapien
gaaggttctctttccacagttggtagcttccat

SEQ ID NO: 320952 - DNA, 33 bp, Homo sapien
gaaggttctctttccatagttggtagcttccat

SEQ ID NO: 320953 - DNA, 33 bp, Homo sapien
taatattgcaaatacaacaaatttacacgttga

SEQ ID NO: 320954 - DNA, 33 bp, Homo sapien
taatattgcaaatacatcaaatttacacgttga

SEQ ID NO: 320955 - DNA, 33 bp, Homo sapien
gaggacttcccagccacgaaaaactaagtcaat

SEQ ID NO: 320956 - DNA, 33 bp, Homo sapien
gaggacttcccagccatgaaaaactaagtcaat

SEQ ID NO: 320957 - DNA, 33 bp, Homo sapien
ttcttctgctaaggaacaaacaccaggcaaacc

SEQ ID NO: 320958 - DNA, 33 bp, Homo sapien
ttcttctgctaaggaataaacaccaggcaaacc

SEQ ID NO: 320959 - DNA, 33 bp, Homo sapien
ctgctctgactcattccacctcatcctttctgc

SEQ ID NO: 320960 - DNA, 33 bp, Homo sapien
ctgctctgactcattctacctcatcctttctgc

SEQ ID NO: 320961 - DNA, 33 bp, Homo sapien
attaggacttacctcccagagctataagtatta

SEQ ID NO: 320962 - DNA, 33 bp, Homo sapien
attaggacttacctcctagagctataagtatta

SEQ ID NO: 320963 - DNA, 33 bp, Homo sapien
gtgcaaactcaggctgaactaataaaagacctc

SEQ ID NO: 320964 - DNA, 33 bp, Homo sapien
gtgcaaactcaggctggactaataaaagacctc

SEQ ID NO: 320965 - DNA, 33 bp, Homo sapien
cgcctcatcatgaccaataaagttatccggtga

SEQ ID NO: 320966 - DNA, 33 bp, Homo sapien
cgcctcatcatgaccagtaaagttatccggtga

SEQ ID NO: 320967 - DNA, 33 bp, Homo sapien
ttaatttggatattgcactccacctttgagacc

SEQ ID NO: 320968 - DNA, 33 bp, Homo sapien
ttaatttggatattgcgctccacctttgagacc

SEQ ID NO: 320969 - DNA, 33 bp, Homo sapien
ctttcaaaaaatgagaaccacttatgagatctt

SEQ ID NO: 320970 - DNA, 33 bp, Homo sapien
ctttcaaaaaatgagatccacttatgagatctt

SEQ ID NO: 320971 - DNA, 33 bp, Homo sapien
aactatcttttagttcaacaaaatgttaccact

SEQ ID NO: 320972 - DNA, 33 bp, Homo sapien
aactatcttttagttccacaaaatgttaccact

SEQ ID NO: 320973 - DNA, 33 bp, Homo sapien
tcttaatttctcaccaggtgatgccctccacca

SEQ ID NO: 320974 - DNA, 33 bp, Homo sapien
tcttaatttctcaccatgtgatgccctccacca

SEQ ID NO: 320975 - DNA, 33 bp, Homo sapien
ttttcctagatccatccgaatgcaacatgactg

SEQ ID NO: 320976 - DNA, 33 bp, Homo sapien
ttttcctagatccatctgaatgcaacatgactg

SEQ ID NO: 320977 - DNA, 33 bp, Homo sapien
ctctaaacgaatatgaataactgacagaaaatc

SEQ ID NO: 320978 - DNA, 33 bp, Homo sapien
ctctaaacgaatatgactaactgacagaaaatc

SEQ ID NO: 320979 - DNA, 33 bp, Homo sapien
gagtcacaagtgacagacagtcctaaattaatc

SEQ ID NO: 320980 - DNA, 33 bp, Homo sapien
gagtcacaagtgacaggcagtcctaaattaatc

SEQ ID NO: 320981 - DNA, 33 bp, Homo sapien
taatagacagacctgtgaacacaacaaaagtca

SEQ ID NO: 320982 - DNA, 33 bp, Homo sapien
taatagacagacctgttaacacaacaaaagtca

SEQ ID NO: 320983 - DNA, 33 bp, Homo sapien
agaatttagcctgatacgacatagtagaaaaca

SEQ ID NO: 320984 - DNA, 33 bp, Homo sapien
agaatttagcctgatatgacatagtagaaaaca

SEQ ID NO: 320985 - DNA, 33 bp, Homo sapien
gatgaatctaatcttacctgatacagcaatttg

SEQ ID NO: 320986 - DNA, 33 bp, Homo sapien
gatgaatctaatcttagctgatacagcaatttg

SEQ ID NO: 320987 - DNA, 33 bp, Homo sapien
tagtggcaattatttaacacatcagttgcctaa

SEQ ID NO: 320988 - DNA, 33 bp, Homo sapien
tagtggcaattatttatcacatcagttgcctaa

SEQ ID NO: 320989 - DNA, 33 bp, Homo sapien
tcactaaacaaacaaacagcagcaaacatcaac

SEQ ID NO: 320990 - DNA, 33 bp, Homo sapien
tcactaaacaaacaaagagcagcaaacatcaac

SEQ ID NO: 320991 - DNA, 33 bp, Homo sapien
tctattcaattttatacgaggcacttgcttttt

SEQ ID NO: 320992 - DNA, 33 bp, Homo sapien
tctattcaattttatatgaggcacttgcttttt

SEQ ID NO: 320993 - DNA, 33 bp, Homo sapien
ttggtgctgagtcaaactccagagaaagatggt

SEQ ID NO: 320994 - DNA, 33 bp, Homo sapien
ttggtgctgagtcaaattccagagaaagatggt

SEQ ID NO: 320995 - DNA, 33 bp, Homo sapien
tcactaaaattttcaccggaatcccagctgtct

SEQ ID NO: 320996 - DNA, 33 bp, Homo sapien
tcactaaaattttcactggaatcccagctgtct

SEQ ID NO: 320997 - DNA, 33 bp, Homo sapien
tacattcatgcgctgtcaagaactgtgaagagt

SEQ ID NO: 320998 - DNA, 33 bp, Homo sapien
tacattcatgcgctgttaagaactgtgaagagt

SEQ ID NO: 320999 - DNA, 33 bp, Homo sapien
gaaaaatgccagaaagccaataatacatgcatg

SEQ ID NO: 321000 - DNA, 33 bp, Homo sapien
gaaaaatgccagaaagtcaataatacatgcatg

SEQ ID NO: 321001 - DNA, 33 bp, Homo sapien
tacacaatgaattcaaacatctccgataaattg

SEQ ID NO: 321002 - DNA, 33 bp, Homo sapien
tacacaatgaattcaaccatctccgataaattg

SEQ ID NO: 321003 - DNA, 33 bp, Homo sapien
caatatcaaaggaaagccaggatgcaattaagt

SEQ ID NO: 321004 - DNA, 33 bp, Homo sapien
caatatcaaaggaaaggcaggatgcaattaagt

SEQ ID NO: 321005 - DNA, 33 bp, Homo sapien
gtcaaatgaagaaagacctaatgctattcacca

SEQ ID NO: 321006 - DNA, 33 bp, Homo sapien
gtcaaatgaagaaagatctaatgctattcacca

SEQ ID NO: 321007 - DNA, 33 bp, Homo sapien
aactaatcttctgtatcagtggctccgtatgaa

SEQ ID NO: 321008 - DNA, 33 bp, Homo sapien
aactaatcttctgtatgagtggctccgtatgaa

SEQ ID NO: 321009 - DNA, 33 bp, Homo sapien
gtttgagatgcaaggcaaagaatcagttgcagt

SEQ ID NO: 321010 - DNA, 33 bp, Homo sapien
gtttgagatgcaaggcgaagaatcagttgcagt

SEQ ID NO: 321011 - DNA, 33 bp, Homo sapien
taaattataattgcctcacctttagttagatgt

SEQ ID NO: 321012 - DNA, 33 bp, Homo sapien
taaattataattgcctgacctttagttagatgt

SEQ ID NO: 321013 - DNA, 33 bp, Homo sapien
aaaagccaaataaaacaaagtggcttcatgagg

SEQ ID NO: 321014 - DNA, 33 bp, Homo sapien
aaaagccaaataaaacgaagtggcttcatgagg

SEQ ID NO: 321015 - DNA, 33 bp, Homo sapien
attattagatctaaacaaagaggtacattgcaa

SEQ ID NO: 321016 - DNA, 33 bp, Homo sapien
attattagatctaaacgaagaggtacattgcaa

SEQ ID NO: 321017 - DNA, 33 bp, Homo sapien
cctgcggcgaacaaaaatatcaacaacatcaca

SEQ ID NO: 321018 - DNA, 33 bp, Homo sapien
cctgcggcgaacaaaagtatcaacaacatcaca

SEQ ID NO: 321019 - DNA, 33 bp, Homo sapien
ccaccaccagttgaaaatatctcagatgggtcc

SEQ ID NO: 321020 - DNA, 33 bp, Homo sapien
ccaccaccagttgaaagtatctcagatgggtcc

SEQ ID NO: 321021 - DNA, 33 bp, Homo sapien
gcttattggtatcttaggggcatgaacaaactc

SEQ ID NO: 321022 - DNA, 33 bp, Homo sapien
gcttattggtatcttatgggcatgaacaaactc

SEQ ID NO: 321023 - DNA, 33 bp, Homo sapien
ccaacatgcctagcccaaaggatacttctgata

SEQ ID NO: 321024 - DNA, 33 bp, Homo sapien
ccaacatgcctagcccgaaggatacttctgata

SEQ ID NO: 321025 - DNA, 33 bp, Homo sapien
gaagcatcataaaaaaactaattgtctgtttgg

SEQ ID NO: 321026 - DNA, 33 bp, Homo sapien
gaagcatcataaaaaacctaattgtctgtttgg

SEQ ID NO: 321027 - DNA, 33 bp, Homo sapien
caatctttctttaacccgagaacataagaggtt

SEQ ID NO: 321028 - DNA, 33 bp, Homo sapien
caatctttctttaacctgagaacataagaggtt

SEQ ID NO: 321029 - DNA, 33 bp, Homo sapien
aacataagaaccaaaaatcaagtggtcaatcac

SEQ ID NO: 321030 - DNA, 33 bp, Homo sapien
aacataagaaccaaaagtcaagtggtcaatcac

SEQ ID NO: 321031 - DNA, 33 bp, Homo sapien
ctaacaggaagaaagaatagaaccagaaagaat

SEQ ID NO: 321032 - DNA, 33 bp, Homo sapien
ctaacaggaagaaagactagaaccagaaagaat

SEQ ID NO: 321033 - DNA, 33 bp, Homo sapien
gtataaatctgaagtacgttcatatatacacac

SEQ ID NO: 321034 - DNA, 33 bp, Homo sapien
gtataaatctgaagtatgttcatatatacacac

SEQ ID NO: 321035 - DNA, 33 bp, Homo sapien
ctagtgtgcataaaaactgaataacgtgtatta

SEQ ID NO: 321036 - DNA, 33 bp, Homo sapien
ctagtgtgcataaaaattgaataacgtgtatta

SEQ ID NO: 321037 - DNA, 33 bp, Homo sapien
taagcacccaagagaaagtcatgtatttgctta

SEQ ID NO: 321038 - DNA, 33 bp, Homo sapien
taagcacccaagagaaggtcatgtatttgctta

SEQ ID NO: 321039 - DNA, 33 bp, Homo sapien
acatgaacaaagtgctcaacggcattacttatc

SEQ ID NO: 321040 - DNA, 33 bp, Homo sapien
acatgaacaaagtgcttaacggcattacttatc

SEQ ID NO: 321041 - DNA, 33 bp, Homo sapien
actacaagcaactgacacagggattagaaatca

SEQ ID NO: 321042 - DNA, 33 bp, Homo sapien
actacaagcaactgacgcagggattagaaatca

SEQ ID NO: 321043 - DNA, 33 bp, Homo sapien
ggcatttgctatcatcaacactgggcctgctgt

SEQ ID NO: 321044 - DNA, 33 bp, Homo sapien
ggcatttgctatcatcgacactgggcctgctgt

SEQ ID NO: 321045 - DNA, 33 bp, Homo sapien
acttgctgttagtaacgatccttcttctggatt

SEQ ID NO: 321046 - DNA, 33 bp, Homo sapien
acttgctgttagtaactatccttcttctggatt

SEQ ID NO: 321047 - DNA, 33 bp, Homo sapien
tgttaagcttgccacactgcccaaagctatcta

SEQ ID NO: 321048 - DNA, 33 bp, Homo sapien
tgttaagcttgccacattgcccaaagctatcta

SEQ ID NO: 321049 - DNA, 33 bp, Homo sapien
taattccaatgtttaacgtcgggtctattaata

SEQ ID NO: 321050 - DNA, 33 bp, Homo sapien
taattccaatgtttaatgtcgggtctattaata

SEQ ID NO: 321051 - DNA, 33 bp, Homo sapien
aaagtggaatatctgaaaggctaaatagaaacg

SEQ ID NO: 321052 - DNA, 33 bp, Homo sapien
aaagtggaatatctgagaggctaaatagaaacg

SEQ ID NO: 321053 - DNA, 33 bp, Homo sapien
aataatttctactgtacgacattcaatggttag

SEQ ID NO: 321054 - DNA, 33 bp, Homo sapien
aataatttctactgtatgacattcaatggttag

SEQ ID NO: 321055 - DNA, 33 bp, Homo sapien
atgtataatgttttggacaagtcatttgcatgt

SEQ ID NO: 321056 - DNA, 33 bp, Homo sapien
atgtataatgttttgggcaagtcatttgcatgt

SEQ ID NO: 321057 - DNA, 33 bp, Homo sapien
ttgcctttaattggacaagattcattggagaat

SEQ ID NO: 321058 - DNA, 33 bp, Homo sapien
ttgcctttaattggaccagattcattggagaat

SEQ ID NO: 321059 - DNA, 33 bp, Homo sapien
ttattgaattaagctaactgaattattgtatca

SEQ ID NO: 321060 - DNA, 33 bp, Homo sapien
ttattgaattaagctacctgaattattgtatca

SEQ ID NO: 321061 - DNA, 33 bp, Homo sapien
gtggcctgaactaggacagtggtagtagaaatg

SEQ ID NO: 321062 - DNA, 33 bp, Homo sapien
gtggcctgaactaggagagtggtagtagaaatg

SEQ ID NO: 321063 - DNA, 33 bp, Homo sapien
atttggattgtcataaacaagcatatgcatata

SEQ ID NO: 321064 - DNA, 33 bp, Homo sapien
atttggattgtcataatcaagcatatgcatata

SEQ ID NO: 321065 - DNA, 33 bp, Homo sapien
tgggctttacccttaaagaattcacaatgctgt

SEQ ID NO: 321066 - DNA, 33 bp, Homo sapien
tgggctttacccttaaggaattcacaatgctgt

SEQ ID NO: 321067 - DNA, 33 bp, Homo sapien
tctatttctactgcgtaaatgtccttcactaag

SEQ ID NO: 321068 - DNA, 33 bp, Homo sapien
tctatttctactgcgtcaatgtccttcactaag

SEQ ID NO: 321069 - DNA, 33 bp, Homo sapien
ccacccgcagtcttcaactacacaatagcaatg

SEQ ID NO: 321070 - DNA, 33 bp, Homo sapien
ccacccgcagtcttcacctacacaatagcaatg

SEQ ID NO: 321071 - DNA, 33 bp, Homo sapien
ggtctaaaaaattccacgatatttaattgtttt

SEQ ID NO: 321072 - DNA, 33 bp, Homo sapien
ggtctaaaaaattccatgatatttaattgtttt

SEQ ID NO: 321073 - DNA, 33 bp, Homo sapien
ttcaaccaagtaaccacaggagaataataatct

SEQ ID NO: 321074 - DNA, 33 bp, Homo sapien
ttcaaccaagtaaccataggagaataataatct

SEQ ID NO: 321075 - DNA, 33 bp, Homo sapien
atttttaaaataactacgctgaagtgggaaatg

SEQ ID NO: 321076 - DNA, 33 bp, Homo sapien
atttttaaaataactatgctgaagtgggaaatg

SEQ ID NO: 321077 - DNA, 33 bp, Homo sapien
taactccttgataacacgagctagaatttgatc

SEQ ID NO: 321078 - DNA, 33 bp, Homo sapien
taactccttgataacatgagctagaatttgatc

SEQ ID NO: 321079 - DNA, 33 bp, Homo sapien
tatgcatttatattgaccacattgtatttaaaa

SEQ ID NO: 321080 - DNA, 33 bp, Homo sapien
tatgcatttatattgatcacattgtatttaaaa

SEQ ID NO: 321081 - DNA, 33 bp, Homo sapien
actagaacgtttgtaaatatcagtggtttaccc

SEQ ID NO: 321082 - DNA, 33 bp, Homo sapien
actagaacgtttgtaagtatcagtggtttaccc

SEQ ID NO: 321083 - DNA, 33 bp, Homo sapien
aactaaaaagctgtagaaactcagagttatgct

SEQ ID NO: 321084 - DNA, 33 bp, Homo sapien
aactaaaaagctgtaggaactcagagttatgct

SEQ ID NO: 321085 - DNA, 33 bp, Homo sapien
gagaaggatggagaataatgagaggagaggatg

SEQ ID NO: 321086 - DNA, 33 bp, Homo sapien
gagaaggatggagaatgatgagaggagaggatg

SEQ ID NO: 321087 - DNA, 33 bp, Homo sapien
aatttagccatcaagactatttaactaactctc

SEQ ID NO: 321088 - DNA, 33 bp, Homo sapien
aatttagccatcaagattatttaactaactctc

SEQ ID NO: 321089 - DNA, 33 bp, Homo sapien
tccatgaaggatataaatcaaatgttctggaat

SEQ ID NO: 321090 - DNA, 33 bp, Homo sapien
tccatgaaggatataagtcaaatgttctggaat

SEQ ID NO: 321091 - DNA, 33 bp, Homo sapien
cctttgtgtggacagacggagggccccattcag

SEQ ID NO: 321092 - DNA, 33 bp, Homo sapien
cctttgtgtggacagatggagggccccattcag

SEQ ID NO: 321093 - DNA, 33 bp, Homo sapien
tttctatttctggtgacgtatactcattttgtt

SEQ ID NO: 321094 - DNA, 33 bp, Homo sapien
tttctatttctggtgatgtatactcattttgtt

SEQ ID NO: 321095 - DNA, 33 bp, Homo sapien
aatatcgagtatttaacgatctgtagatagagg

SEQ ID NO: 321096 - DNA, 33 bp, Homo sapien
aatatcgagtatttaatgatctgtagatagagg

SEQ ID NO: 321097 - DNA, 33 bp, Homo sapien
tctgtttattcttttcactggacattcctgtaa

SEQ ID NO: 321098 - DNA, 33 bp, Homo sapien
tctgtttattcttttcgctggacattcctgtaa

SEQ ID NO: 321099 - DNA, 33 bp, Homo sapien
catccctttagaaaagaaatgtgttgaatatta

SEQ ID NO: 321100 - DNA, 33 bp, Homo sapien
catccctttagaaaagtaatgtgttgaatatta

SEQ ID NO: 321101 - DNA, 33 bp, Homo sapien
aatatgacttaacgtacgctggcattttctttg

SEQ ID NO: 321102 - DNA, 33 bp, Homo sapien
aatatgacttaacgtaggctggcattttctttg

SEQ ID NO: 321103 - DNA, 33 bp, Homo sapien
atttcagattttcacacgatgaactaagaagtt

SEQ ID NO: 321104 - DNA, 33 bp, Homo sapien
atttcagattttcacatgatgaactaagaagtt

SEQ ID NO: 321105 - DNA, 33 bp, Homo sapien
gctgtggtaggctaaacaacgtacatccccgct

SEQ ID NO: 321106 - DNA, 33 bp, Homo sapien
gctgtggtaggctaaataacgtacatccccgct

SEQ ID NO: 321107 - DNA, 33 bp, Homo sapien
gttggctgcaggataaccaaatgcttttattat

SEQ ID NO: 321108 - DNA, 33 bp, Homo sapien
gttggctgcaggataatcaaatgcttttattat

SEQ ID NO: 321109 - DNA, 33 bp, Homo sapien
tttgatttctggggaccacaatcttctacttgt

SEQ ID NO: 321110 - DNA, 33 bp, Homo sapien
tttgatttctggggacgacaatcttctacttgt

SEQ ID NO: 321111 - DNA, 33 bp, Homo sapien
actatggtttgattcacattttgtctgaataat

SEQ ID NO: 321112 - DNA, 33 bp, Homo sapien
actatggtttgattcatattttgtctgaataat

SEQ ID NO: 321113 - DNA, 33 bp, Homo sapien
ttaaatacataaggacactaaaggaccagagaa

SEQ ID NO: 321114 - DNA, 33 bp, Homo sapien
ttaaatacataaggacgctaaaggaccagagaa

SEQ ID NO: 321115 - DNA, 33 bp, Homo sapien
tatcatcttcgaagaactgactagaattttcac

SEQ ID NO: 321116 - DNA, 33 bp, Homo sapien
tatcatcttcgaagaattgactagaattttcac

SEQ ID NO: 321117 - DNA, 33 bp, Homo sapien
tatctctaggctttctaaccaacatatcatcca

SEQ ID NO: 321118 - DNA, 33 bp, Homo sapien
tatctctaggctttctgaccaacatatcatcca

SEQ ID NO: 321119 - DNA, 33 bp, Homo sapien
tatgcaataggcgagacattaagggcagaaaat

SEQ ID NO: 321120 - DNA, 33 bp, Homo sapien
tatgcaataggcgagatattaagggcagaaaat

SEQ ID NO: 321121 - DNA, 33 bp, Homo sapien
agggctgcatttatgaaaaatctggatgacaaa

SEQ ID NO: 321122 - DNA, 33 bp, Homo sapien
agggctgcatttatgacaaatctggatgacaaa

SEQ ID NO: 321123 - DNA, 33 bp, Homo sapien
gtggacacaggcccgggagtgaagccagagtca

SEQ ID NO: 321124 - DNA, 33 bp, Homo sapien
gtggacacaggcccggtagtgaagccagagtca

SEQ ID NO: 321125 - DNA, 33 bp, Homo sapien
agagttgcactctcaaaaagtaattgcctctta

SEQ ID NO: 321126 - DNA, 33 bp, Homo sapien
agagttgcactctcaacaagtaattgcctctta

SEQ ID NO: 321127 - DNA, 33 bp, Homo sapien
tcactcataatacctcccacaacatggatgtta

SEQ ID NO: 321128 - DNA, 33 bp, Homo sapien
tcactcataatacctctcacaacatggatgtta

SEQ ID NO: 321129 - DNA, 33 bp, Homo sapien
ttttttaaagtttgcacccctaatatttgtgaa

SEQ ID NO: 321130 - DNA, 33 bp, Homo sapien
ttttttaaagtttgcatccctaatatttgtgaa

SEQ ID NO: 321131 - DNA, 33 bp, Homo sapien
gtttcacagacctctaaaaaggtttgtcccttg

SEQ ID NO: 321132 - DNA, 33 bp, Homo sapien
gtttcacagacctctagaaaggtttgtcccttg

SEQ ID NO: 321133 - DNA, 33 bp, Homo sapien
ttgcattcgtaaaatgcaacatctaatttttta

SEQ ID NO: 321134 - DNA, 33 bp, Homo sapien
ttgcattcgtaaaatggaacatctaatttttta

SEQ ID NO: 321135 - DNA, 33 bp, Homo sapien
ctctgtaaatgtggtacctttgcactgtttaca

SEQ ID NO: 321136 - DNA, 33 bp, Homo sapien
ctctgtaaatgtggtatctttgcactgtttaca

SEQ ID NO: 321137 - DNA, 33 bp, Homo sapien
gaaaaaaagtacagaagtcgagaagatcggaga

SEQ ID NO: 321138 - DNA, 33 bp, Homo sapien
gaaaaaaagtacagaattcgagaagatcggaga

SEQ ID NO: 321139 - DNA, 33 bp, Homo sapien
ttacattacttgaaagccagagcaaactgtaag

SEQ ID NO: 321140 - DNA, 33 bp, Homo sapien
ttacattacttgaaaggcagagcaaactgtaag

SEQ ID NO: 321141 - DNA, 33 bp, Homo sapien
tgttggagatcctacacaagaacaatttggttt

SEQ ID NO: 321142 - DNA, 33 bp, Homo sapien
tgttggagatcctacataagaacaatttggttt

SEQ ID NO: 321143 - DNA, 33 bp, Homo sapien
ggaaattttgtgatgcagacagttcttttggat

SEQ ID NO: 321144 - DNA, 33 bp, Homo sapien
ggaaattttgtgatgcggacagttcttttggat

SEQ ID NO: 321145 - DNA, 33 bp, Homo sapien
gggttagcgctaatcaccatcttcaaagcacac

SEQ ID NO: 321146 - DNA, 33 bp, Homo sapien
gggttagcgctaatcatcatcttcaaagcacac

SEQ ID NO: 321147 - DNA, 33 bp, Homo sapien
taaatgaaagtacagcaagtcgtgtagacagga

SEQ ID NO: 321148 - DNA, 33 bp, Homo sapien
taaatgaaagtacagcgagtcgtgtagacagga

SEQ ID NO: 321149 - DNA, 33 bp, Homo sapien
cttagactttggagagaacaatggtcgacttct

SEQ ID NO: 321150 - DNA, 33 bp, Homo sapien
cttagactttggagaggacaatggtcgacttct

SEQ ID NO: 321151 - DNA, 33 bp, Homo sapien
ggaggaattaaattgacgacagtagtggtaaga

SEQ ID NO: 321152 - DNA, 33 bp, Homo sapien
ggaggaattaaattgatgacagtagtggtaaga

SEQ ID NO: 321153 - DNA, 33 bp, Homo sapien
tgcagaacattcaatgaaacaacaaactcacca

SEQ ID NO: 321154 - DNA, 33 bp, Homo sapien
tgcagaacattcaatgtaacaacaaactcacca

SEQ ID NO: 321155 - DNA, 33 bp, Homo sapien
ttaagttggtcaaagacattgattgagattcct

SEQ ID NO: 321156 - DNA, 33 bp, Homo sapien
ttaagttggtcaaagatattgattgagattcct

SEQ ID NO: 321157 - DNA, 33 bp, Homo sapien
ccttcttcacccgacactctcattcaaccaatt

SEQ ID NO: 321158 - DNA, 33 bp, Homo sapien
ccttcttcacccgacattctcattcaaccaatt

SEQ ID NO: 321159 - DNA, 33 bp, Homo sapien
gctctggctttagaaccgagccgcattcatgac

SEQ ID NO: 321160 - DNA, 33 bp, Homo sapien
gctctggctttagaactgagccgcattcatgac

SEQ ID NO: 321161 - DNA, 33 bp, Homo sapien
gtacattgataaggtcaaggtagaatatatctt

SEQ ID NO: 321162 - DNA, 33 bp, Homo sapien
gtacattgataaggtcgaggtagaatatatctt

SEQ ID NO: 321163 - DNA, 33 bp, Homo sapien
tattattggatttctagcatctctatagcattt

SEQ ID NO: 321164 - DNA, 33 bp, Homo sapien
tattattggatttctatcatctctatagcattt

SEQ ID NO: 321165 - DNA, 33 bp, Homo sapien
ggaatgtaatgtgttacggagacttaatttata

SEQ ID NO: 321166 - DNA, 33 bp, Homo sapien
ggaatgtaatgtgttatggagacttaatttata

SEQ ID NO: 321167 - DNA, 33 bp, Homo sapien
caaagcaagccagaaaggtagcagagttttatt

SEQ ID NO: 321168 - DNA, 33 bp, Homo sapien
caaagcaagccagaaatgtagcagagttttatt

SEQ ID NO: 321169 - DNA, 33 bp, Homo sapien
ttcgaaaactttgcaaactctaaaacgtgagga

SEQ ID NO: 321170 - DNA, 33 bp, Homo sapien
ttcgaaaactttgcaacctctaaaacgtgagga

SEQ ID NO: 321171 - DNA, 33 bp, Homo sapien
tcatttctaaggatgaaaaaatcagagaagttt

SEQ ID NO: 321172 - DNA, 33 bp, Homo sapien
tcatttctaaggatgagaaaatcagagaagttt

SEQ ID NO: 321173 - DNA, 33 bp, Homo sapien
gtatatggttaatcaacatatcaatgaattcag

SEQ ID NO: 321174 - DNA, 33 bp, Homo sapien
gtatatggttaatcaatatatcaatgaattcag

SEQ ID NO: 321175 - DNA, 33 bp, Homo sapien
tggagttttatgtgtcaattgcaaaatgcttac

SEQ ID NO: 321176 - DNA, 33 bp, Homo sapien
tggagttttatgtgtcgattgcaaaatgcttac

SEQ ID NO: 321177 - DNA, 33 bp, Homo sapien
tctttcacaggtcatacagtcagaagtccaaaa

SEQ ID NO: 321178 - DNA, 33 bp, Homo sapien
tctttcacaggtcatagagtcagaagtccaaaa

SEQ ID NO: 321179 - DNA, 33 bp, Homo sapien
taagtcttctaacttactattcacacatgctac

SEQ ID NO: 321180 - DNA, 33 bp, Homo sapien
taagtcttctaacttattattcacacatgctac

SEQ ID NO: 321181 - DNA, 33 bp, Homo sapien
ccaccatatctgcatgcattagataataaactc

SEQ ID NO: 321182 - DNA, 33 bp, Homo sapien
ccaccatatctgcatgtattagataataaactc

SEQ ID NO: 321183 - DNA, 33 bp, Homo sapien
tgtgtgtgtcttggtaacccattacctctttgt

SEQ ID NO: 321184 - DNA, 33 bp, Homo sapien
tgtgtgtgtcttggtatcccattacctctttgt

SEQ ID NO: 321185 - DNA, 33 bp, Homo sapien
gtagaccctgggcagacaagtaaatagcagaac

SEQ ID NO: 321186 - DNA, 33 bp, Homo sapien
gtagaccctgggcagataagtaaatagcagaac

SEQ ID NO: 321187 - DNA, 33 bp, Homo sapien
atatggatttcacttacggctgaagtttatttt

SEQ ID NO: 321188 - DNA, 33 bp, Homo sapien
atatggatttcacttatggctgaagtttatttt

SEQ ID NO: 321189 - DNA, 33 bp, Homo sapien
accacggccttccttgaaaatgtacacaaccta

SEQ ID NO: 321190 - DNA, 33 bp, Homo sapien
accacggccttccttggaaatgtacacaaccta

SEQ ID NO: 321191 - DNA, 33 bp, Homo sapien
cacattgatttctagaagttatagtactctttt

SEQ ID NO: 321192 - DNA, 33 bp, Homo sapien
cacattgatttctagacgttatagtactctttt

SEQ ID NO: 321193 - DNA, 33 bp, Homo sapien
tgatttgagcaacaaaattactttaggaagagc

SEQ ID NO: 321194 - DNA, 33 bp, Homo sapien
tgatttgagcaacaaagttactttaggaagagc

SEQ ID NO: 321195 - DNA, 33 bp, Homo sapien
ttattaagtggcatacaaaaaggagaggcttag

SEQ ID NO: 321196 - DNA, 33 bp, Homo sapien
ttattaagtggcatacgaaaaggagaggcttag

SEQ ID NO: 321197 - DNA, 33 bp, Homo sapien
gctgctgtttagtcaacgttgcgcatacaactc

SEQ ID NO: 321198 - DNA, 33 bp, Homo sapien
gctgctgtttagtcaatgttgcgcatacaactc

SEQ ID NO: 321199 - DNA, 33 bp, Homo sapien
ctaacttcatatgccaaaagtaattccaaaatt

SEQ ID NO: 321200 - DNA, 33 bp, Homo sapien
ctaacttcatatgccacaagtaattccaaaatt

SEQ ID NO: 321201 - DNA, 33 bp, Homo sapien
agtactaaagctattaaagaacgagtcattaaa

SEQ ID NO: 321202 - DNA, 33 bp, Homo sapien
agtactaaagctattatagaacgagtcattaaa

SEQ ID NO: 321203 - DNA, 33 bp, Homo sapien
tgtagttttaatcacaatatccaaacaacaaaa

SEQ ID NO: 321204 - DNA, 33 bp, Homo sapien
tgtagttttaatcacagtatccaaacaacaaaa

SEQ ID NO: 321205 - DNA, 33 bp, Homo sapien
atataagcaatccggacggaactcttcttactc

SEQ ID NO: 321206 - DNA, 33 bp, Homo sapien
atataagcaatccggatggaactcttcttactc

SEQ ID NO: 321207 - DNA, 33 bp, Homo sapien
aataagcctgtttctaagaggtcacctgattat

SEQ ID NO: 321208 - DNA, 33 bp, Homo sapien
aataagcctgtttctaggaggtcacctgattat

SEQ ID NO: 321209 - DNA, 33 bp, Homo sapien
cttccacaactgaaaccggcccctggtgccaaa

SEQ ID NO: 321210 - DNA, 33 bp, Homo sapien
cttccacaactgaaactggcccctggtgccaaa

SEQ ID NO: 321211 - DNA, 33 bp, Homo sapien
ctgtttcccaaccaataatgccaaatccagaat

SEQ ID NO: 321212 - DNA, 33 bp, Homo sapien
ctgtttcccaaccaattatgccaaatccagaat

SEQ ID NO: 321213 - DNA, 33 bp, Homo sapien
agaagcagtgaggatacagaagctgcaaattga

SEQ ID NO: 321214 - DNA, 33 bp, Homo sapien
agaagcagtgaggatagagaagctgcaaattga

SEQ ID NO: 321215 - DNA, 33 bp, Homo sapien
caaattgaattaatgacagaaagtgtagcaaag

SEQ ID NO: 321216 - DNA, 33 bp, Homo sapien
caaattgaattaatgatagaaagtgtagcaaag

SEQ ID NO: 321217 - DNA, 33 bp, Homo sapien
taaagatactttctagaattacacctgtgcttc

SEQ ID NO: 321218 - DNA, 33 bp, Homo sapien
taaagatactttctaggattacacctgtgcttc

SEQ ID NO: 321219 - DNA, 33 bp, Homo sapien
ttctgggttctgtaacaaaagttgaaatgtgtg

SEQ ID NO: 321220 - DNA, 33 bp, Homo sapien
ttctgggttctgtaacgaaagttgaaatgtgtg

SEQ ID NO: 321221 - DNA, 33 bp, Homo sapien
ggggttcaaattattacgctatcacttgccatt

SEQ ID NO: 321222 - DNA, 33 bp, Homo sapien
ggggttcaaattattatgctatcacttgccatt

SEQ ID NO: 321223 - DNA, 33 bp, Homo sapien
aaataaaatgactctccatttaacaggattaat

SEQ ID NO: 321224 - DNA, 33 bp, Homo sapien
aaataaaatgactctctatttaacaggattaat

SEQ ID NO: 321225 - DNA, 33 bp, Homo sapien
actgtaactactgtaaatagtcctctctgatgc

SEQ ID NO: 321226 - DNA, 33 bp, Homo sapien
actgtaactactgtaattagtcctctctgatgc

SEQ ID NO: 321227 - DNA, 33 bp, Homo sapien
tccctgaggactaagacgaaagcatacacatgt

SEQ ID NO: 321228 - DNA, 33 bp, Homo sapien
tccctgaggactaagatgaaagcatacacatgt

SEQ ID NO: 321229 - DNA, 33 bp, Homo sapien
ccagctattgacttaccggatagaaaacacaat

SEQ ID NO: 321230 - DNA, 33 bp, Homo sapien
ccagctattgacttactggatagaaaacacaat

SEQ ID NO: 321231 - DNA, 33 bp, Homo sapien
attaatgatgaattaaacagatttacaagttct

SEQ ID NO: 321232 - DNA, 33 bp, Homo sapien
attaatgatgaattaaccagatttacaagttct

SEQ ID NO: 321233 - DNA, 33 bp, Homo sapien
ctttgtttctaactggcaatagagctgatgtct

SEQ ID NO: 321234 - DNA, 33 bp, Homo sapien
ctttgtttctaactggtaatagagctgatgtct

SEQ ID NO: 321235 - DNA, 33 bp, Homo sapien
acaagaatggctggtaataattcacttatgcaa

SEQ ID NO: 321236 - DNA, 33 bp, Homo sapien
acaagaatggctggtagtaattcacttatgcaa

SEQ ID NO: 321237 - DNA, 33 bp, Homo sapien
gatggaatatacaaacaggtgtagtacttttat

SEQ ID NO: 321238 - DNA, 33 bp, Homo sapien
gatggaatatacaaaccggtgtagtacttttat

SEQ ID NO: 321239 - DNA, 33 bp, Homo sapien
catgatgagttttgtaaatcttatttgcatttt

SEQ ID NO: 321240 - DNA, 33 bp, Homo sapien
catgatgagttttgtagatcttatttgcatttt

SEQ ID NO: 321241 - DNA, 33 bp, Homo sapien
aactcatctgatttagcactgtgaacctgaatt

SEQ ID NO: 321242 - DNA, 33 bp, Homo sapien
aactcatctgatttaggactgtgaacctgaatt

SEQ ID NO: 321243 - DNA, 33 bp, Homo sapien
attacttcaaactagaagtcttgaccttgttct

SEQ ID NO: 321244 - DNA, 33 bp, Homo sapien
attacttcaaactagacgtcttgaccttgttct

SEQ ID NO: 321245 - DNA, 33 bp, Homo sapien
tttgaatatgaaattcaaattaactccttctgg

SEQ ID NO: 321246 - DNA, 33 bp, Homo sapien
tttgaatatgaaattcgaattaactccttctgg

SEQ ID NO: 321247 - DNA, 33 bp, Homo sapien
cattatagagttgttaccagccttctgtaaaaa

SEQ ID NO: 321248 - DNA, 33 bp, Homo sapien
cattatagagttgttatcagccttctgtaaaaa

SEQ ID NO: 321249 - DNA, 33 bp, Homo sapien
ccctccagttgtaagcaagtctttactgttaat

SEQ ID NO: 321250 - DNA, 33 bp, Homo sapien
ccctccagttgtaagcgagtctttactgttaat

SEQ ID NO: 321251 - DNA, 33 bp, Homo sapien
actggccttataccctcacctacacagtacctg

SEQ ID NO: 321252 - DNA, 33 bp, Homo sapien
actggccttatacccttacctacacagtacctg

SEQ ID NO: 321253 - DNA, 33 bp, Homo sapien
ctaaaagaagccatgacgtactttgaatgcttt

SEQ ID NO: 321254 - DNA, 33 bp, Homo sapien
ctaaaagaagccatgatgtactttgaatgcttt

SEQ ID NO: 321255 - DNA, 33 bp, Homo sapien
caggtttaattcatcaagacaatgaaataataa

SEQ ID NO: 321256 - DNA, 33 bp, Homo sapien
caggtttaattcatcaggacaatgaaataataa

SEQ ID NO: 321257 - DNA, 33 bp, Homo sapien
ataaggccccaacccacgagagctgtgcaggct

SEQ ID NO: 321258 - DNA, 33 bp, Homo sapien
ataaggccccaacccatgagagctgtgcaggct

SEQ ID NO: 321259 - DNA, 33 bp, Homo sapien
gaaagagataactggcaccaagtaaatccaaaa

SEQ ID NO: 321260 - DNA, 33 bp, Homo sapien
gaaagagataactggcgccaagtaaatccaaaa

SEQ ID NO: 321261 - DNA, 33 bp, Homo sapien
cccatggtggaaggcacacgatcaagatggcac

SEQ ID NO: 321262 - DNA, 33 bp, Homo sapien
cccatggtggaaggcagacgatcaagatggcac

SEQ ID NO: 321263 - DNA, 33 bp, Homo sapien
acatcagcaaagtacaatgaccaaaatcaataa

SEQ ID NO: 321264 - DNA, 33 bp, Homo sapien
acatcagcaaagtacagtgaccaaaatcaataa

SEQ ID NO: 321265 - DNA, 33 bp, Homo sapien
tcttttgattcctgtaagttcacacaactcaag

SEQ ID NO: 321266 - DNA, 33 bp, Homo sapien
tcttttgattcctgtatgttcacacaactcaag

SEQ ID NO: 321267 - DNA, 33 bp, Homo sapien
aaatgaaagttagggcaatgcaaaaagatgcgg

SEQ ID NO: 321268 - DNA, 33 bp, Homo sapien
aaatgaaagttagggcgatgcaaaaagatgcgg

SEQ ID NO: 321269 - DNA, 33 bp, Homo sapien
taatgcacagttttcacagtcaatgcaagctga

SEQ ID NO: 321270 - DNA, 33 bp, Homo sapien
taatgcacagttttcatagtcaatgcaagctga

SEQ ID NO: 321271 - DNA, 33 bp, Homo sapien
aagtaacaaaataaaccgcatatctgaaaggaa

SEQ ID NO: 321272 - DNA, 33 bp, Homo sapien
aagtaacaaaataaactgcatatctgaaaggaa

SEQ ID NO: 321273 - DNA, 33 bp, Homo sapien
cctattagaatgcaaaattccatgcaagattaa

SEQ ID NO: 321274 - DNA, 33 bp, Homo sapien
cctattagaatgcaaagttccatgcaagattaa

SEQ ID NO: 321275 - DNA, 33 bp, Homo sapien
tagctcaaataattctcacagggagatgcagat

SEQ ID NO: 321276 - DNA, 33 bp, Homo sapien
tagctcaaataattcttacagggagatgcagat

SEQ ID NO: 321277 - DNA, 33 bp, Homo sapien
tcaaaaggatcatcaacatgaggaaggcttcta

SEQ ID NO: 321278 - DNA, 33 bp, Homo sapien
tcaaaaggatcatcaatatgaggaaggcttcta

SEQ ID NO: 321279 - DNA, 33 bp, Homo sapien
actcttgtctgcattacggtaatacttcctgac

SEQ ID NO: 321280 - DNA, 33 bp, Homo sapien
actcttgtctgcattatggtaatacttcctgac

SEQ ID NO: 321281 - DNA, 33 bp, Homo sapien
agtgcaagaaaggaaacggtccaaccaatggca

SEQ ID NO: 321282 - DNA, 33 bp, Homo sapien
agtgcaagaaaggaaatggtccaaccaatggca

SEQ ID NO: 321283 - DNA, 33 bp, Homo sapien
agaggagaatccctcaataaatggcctggtgat

SEQ ID NO: 321284 - DNA, 33 bp, Homo sapien
agaggagaatccctcagtaaatggcctggtgat

SEQ ID NO: 321285 - DNA, 33 bp, Homo sapien
accgttagctgtaatgcaaatacaaacacacat

SEQ ID NO: 321286 - DNA, 33 bp, Homo sapien
accgttagctgtaatggaaatacaaacacacat

SEQ ID NO: 321287 - DNA, 33 bp, Homo sapien
ctgtaaagctcattcaataatttttcacagttc

SEQ ID NO: 321288 - DNA, 33 bp, Homo sapien
ctgtaaagctcattcagtaatttttcacagttc

SEQ ID NO: 321289 - DNA, 33 bp, Homo sapien
tgagctttacagataacgcaacaattaagattt

SEQ ID NO: 321290 - DNA, 33 bp, Homo sapien
tgagctttacagataatgcaacaattaagattt

SEQ ID NO: 321291 - DNA, 33 bp, Homo sapien
aagaagaaatctcttacaggtgaaggagagtta

SEQ ID NO: 321292 - DNA, 33 bp, Homo sapien
aagaagaaatctcttataggtgaaggagagtta

SEQ ID NO: 321293 - DNA, 33 bp, Homo sapien
acatgtctttaatcaaaaaagcatttatttctt

SEQ ID NO: 321294 - DNA, 33 bp, Homo sapien
acatgtctttaatcaagaaagcatttatttctt

SEQ ID NO: 321295 - DNA, 33 bp, Homo sapien
tatattatattgtctaataagtggtttcgctgt

SEQ ID NO: 321296 - DNA, 33 bp, Homo sapien
tatattatattgtctactaagtggtttcgctgt

SEQ ID NO: 321297 - DNA, 33 bp, Homo sapien
tggggcatttgggcagcatagccatgcctgaga

SEQ ID NO: 321298 - DNA, 33 bp, Homo sapien
tggggcatttgggcaggatagccatgcctgaga

SEQ ID NO: 321299 - DNA, 33 bp, Homo sapien
atctccaaagaaaaaactgcccctcttgcctgg

SEQ ID NO: 321300 - DNA, 33 bp, Homo sapien
atctccaaagaaaaaattgcccctcttgcctgg

SEQ ID NO: 321301 - DNA, 33 bp, Homo sapien
tttcaaccagaaacaacgctcattagagacaaa

SEQ ID NO: 321302 - DNA, 33 bp, Homo sapien
tttcaaccagaaacaatgctcattagagacaaa

SEQ ID NO: 321303 - DNA, 33 bp, Homo sapien
ctttcctttgctatacagcttgggttgcctgtt

SEQ ID NO: 321304 - DNA, 33 bp, Homo sapien
ctttcctttgctatacggcttgggttgcctgtt

SEQ ID NO: 321305 - DNA, 33 bp, Homo sapien
gttattggaagacaaacatgcttctagaaccac

SEQ ID NO: 321306 - DNA, 33 bp, Homo sapien
gttattggaagacaaagatgcttctagaaccac

SEQ ID NO: 321307 - DNA, 33 bp, Homo sapien
gggtatagccaggagaccgagtttcaaagatgt

SEQ ID NO: 321308 - DNA, 33 bp, Homo sapien
gggtatagccaggagatcgagtttcaaagatgt

SEQ ID NO: 321309 - DNA, 33 bp, Homo sapien
tttgaatttaaccaataagaagcactggtaggg

SEQ ID NO: 321310 - DNA, 33 bp, Homo sapien
tttgaatttaaccaatgagaagcactggtaggg

SEQ ID NO: 321311 - DNA, 33 bp, Homo sapien
aaacaagagggcaggagaatttatttctgtagt

SEQ ID NO: 321312 - DNA, 33 bp, Homo sapien
aaacaagagggcaggataatttatttctgtagt

SEQ ID NO: 321313 - DNA, 33 bp, Homo sapien
ttttaaaaaagaaaatcagtgtccataaggaat

SEQ ID NO: 321314 - DNA, 33 bp, Homo sapien
ttttaaaaaagaaaattagtgtccataaggaat

SEQ ID NO: 321315 - DNA, 33 bp, Homo sapien
gatccatccattgaacacactcaaggcagaggt

SEQ ID NO: 321316 - DNA, 33 bp, Homo sapien
gatccatccattgaacgcactcaaggcagaggt

SEQ ID NO: 321317 - DNA, 33 bp, Homo sapien
ctacagatatgtaccaatgattttgcgtgtata

SEQ ID NO: 321318 - DNA, 33 bp, Homo sapien
ctacagatatgtaccagtgattttgcgtgtata

SEQ ID NO: 321319 - DNA, 33 bp, Homo sapien
agagtattttgctcaaattcatgttgaaggaag

SEQ ID NO: 321320 - DNA, 33 bp, Homo sapien
agagtattttgctcaagttcatgttgaaggaag

SEQ ID NO: 321321 - DNA, 33 bp, Homo sapien
agttgtgtgcttatccccaaaataaataactca

SEQ ID NO: 321322 - DNA, 33 bp, Homo sapien
agttgtgtgcttatccgcaaaataaataactca

SEQ ID NO: 321323 - DNA, 33 bp, Homo sapien
agatgactgtctcctagctgcttccccagaagg

SEQ ID NO: 321324 - DNA, 33 bp, Homo sapien
agatgactgtctcctatctgcttccccagaagg

SEQ ID NO: 321325 - DNA, 33 bp, Homo sapien
tgaggctctccagatcgaactatgacctgtaat

SEQ ID NO: 321326 - DNA, 33 bp, Homo sapien
tgaggctctccagatctaactatgacctgtaat

SEQ ID NO: 321327 - DNA, 33 bp, Homo sapien
aaaaaatcctttgagaactgagacaaagaggat

SEQ ID NO: 321328 - DNA, 33 bp, Homo sapien
aaaaaatcctttgagacctgagacaaagaggat

SEQ ID NO: 321329 - DNA, 33 bp, Homo sapien
gcagcagtgctagtccacccaatagttcctaat

SEQ ID NO: 321330 - DNA, 33 bp, Homo sapien
gcagcagtgctagtccgcccaatagttcctaat

SEQ ID NO: 321331 - DNA, 33 bp, Homo sapien
cagtgggaaataattaagcattttcacgattct

SEQ ID NO: 321332 - DNA, 33 bp, Homo sapien
cagtgggaaataattaggcattttcacgattct

SEQ ID NO: 321333 - DNA, 33 bp, Homo sapien
aaataagcactattgacacagagcaggttcttg

SEQ ID NO: 321334 - DNA, 33 bp, Homo sapien
aaataagcactattgatacagagcaggttcttg

SEQ ID NO: 321335 - DNA, 33 bp, Homo sapien
gaattttcatactggagaggaataaatgtttcc

SEQ ID NO: 321336 - DNA, 33 bp, Homo sapien
gaattttcatactggataggaataaatgtttcc

SEQ ID NO: 321337 - DNA, 33 bp, Homo sapien
ttaaaaatgtatcttccagttctatagattaga

SEQ ID NO: 321338 - DNA, 33 bp, Homo sapien
ttaaaaatgtatcttcgagttctatagattaga

SEQ ID NO: 321339 - DNA, 33 bp, Homo sapien
tcttaaagaaaccacaatcaatcaaatgatttt

SEQ ID NO: 321340 - DNA, 33 bp, Homo sapien
tcttaaagaaaccacagtcaatcaaatgatttt

SEQ ID NO: 321341 - DNA, 33 bp, Homo sapien
ttatactgtagttggacagcaaatttgttcata

SEQ ID NO: 321342 - DNA, 33 bp, Homo sapien
ttatactgtagttggatagcaaatttgttcata

SEQ ID NO: 321343 - DNA, 33 bp, Homo sapien
atgattttgaccaagaaaaataagctcatatga

SEQ ID NO: 321344 - DNA, 33 bp, Homo sapien
atgattttgaccaagataaataagctcatatga

SEQ ID NO: 321345 - DNA, 33 bp, Homo sapien
agacgtaagcagacatcaaaaaagctgaagagt

SEQ ID NO: 321346 - DNA, 33 bp, Homo sapien
agacgtaagcagacattaaaaaagctgaagagt

SEQ ID NO: 321347 - DNA, 33 bp, Homo sapien
actatcataaccttaagatggcttttgcctaaa

SEQ ID NO: 321348 - DNA, 33 bp, Homo sapien
actatcataaccttaatatggcttttgcctaaa

SEQ ID NO: 321349 - DNA, 33 bp, Homo sapien
aggttcttatactaatcaaatgctgaacatata

SEQ ID NO: 321350 - DNA, 33 bp, Homo sapien
aggttcttatactaattaaatgctgaacatata

SEQ ID NO: 321351 - DNA, 33 bp, Homo sapien
ttcagtaagcagaaacaaacacaaatatttctt

SEQ ID NO: 321352 - DNA, 33 bp, Homo sapien
ttcagtaagcagaaacgaacacaaatatttctt

SEQ ID NO: 321353 - DNA, 33 bp, Homo sapien
cctaattgcaaacttacgatattcacaaagaca

SEQ ID NO: 321354 - DNA, 33 bp, Homo sapien
cctaattgcaaacttatgatattcacaaagaca

SEQ ID NO: 321355 - DNA, 33 bp, Homo sapien
attgactggtgccaaacgggaaacttttggaaa

SEQ ID NO: 321356 - DNA, 33 bp, Homo sapien
attgactggtgccaaaggggaaacttttggaaa

SEQ ID NO: 321357 - DNA, 33 bp, Homo sapien
acttctgttttggtaactggattacagttgatt

SEQ ID NO: 321358 - DNA, 33 bp, Homo sapien
acttctgttttggtaagtggattacagttgatt

SEQ ID NO: 321359 - DNA, 33 bp, Homo sapien
ggtacatagccaaaggacataagatcaccatct

SEQ ID NO: 321360 - DNA, 33 bp, Homo sapien
ggtacatagccaaagggcataagatcaccatct

SEQ ID NO: 321361 - DNA, 33 bp, Homo sapien
tcttaactctgaagacgagctttgaattctgtc

SEQ ID NO: 321362 - DNA, 33 bp, Homo sapien
tcttaactctgaagactagctttgaattctgtc

SEQ ID NO: 321363 - DNA, 33 bp, Homo sapien
tatattaagcaaatcgcagtacttcaaaacaaa

SEQ ID NO: 321364 - DNA, 33 bp, Homo sapien
tatattaagcaaatcgtagtacttcaaaacaaa

SEQ ID NO: 321365 - DNA, 33 bp, Homo sapien
aattctgtgttttggcacttatcacagtcagtc

SEQ ID NO: 321366 - DNA, 33 bp, Homo sapien
aattctgtgttttggcccttatcacagtcagtc

SEQ ID NO: 321367 - DNA, 33 bp, Homo sapien
ggacaattattagtatcaagctgtcttgtcctt

SEQ ID NO: 321368 - DNA, 33 bp, Homo sapien
ggacaattattagtatgaagctgtcttgtcctt

SEQ ID NO: 321369 - DNA, 33 bp, Homo sapien
gtattctaaacaactgcagaaaagtagtgcaag

SEQ ID NO: 321370 - DNA, 33 bp, Homo sapien
gtattctaaacaactgtagaaaagtagtgcaag

SEQ ID NO: 321371 - DNA, 33 bp, Homo sapien
ttttttatgaaaacaaacttgaccactctgcat

SEQ ID NO: 321372 - DNA, 33 bp, Homo sapien
ttttttatgaaaacaagcttgaccactctgcat

SEQ ID NO: 321373 - DNA, 33 bp, Homo sapien
ttagaataacacagaaagcaaaatcatatttct

SEQ ID NO: 321374 - DNA, 33 bp, Homo sapien
ttagaataacacagaaggcaaaatcatatttct

SEQ ID NO: 321375 - DNA, 33 bp, Homo sapien
aaatttagattgaagacaaaaaaatcaagaaac

SEQ ID NO: 321376 - DNA, 33 bp, Homo sapien
aaatttagattgaagagaaaaaaatcaagaaac

SEQ ID NO: 321377 - DNA, 33 bp, Homo sapien
attaataaaaatgctacaaacatccctgtacat

SEQ ID NO: 321378 - DNA, 33 bp, Homo sapien
attaataaaaatgctataaacatccctgtacat

SEQ ID NO: 321379 - DNA, 33 bp, Homo sapien
taggaatatctcaaccaaaggcttacttggaat

SEQ ID NO: 321380 - DNA, 33 bp, Homo sapien
taggaatatctcaaccgaaggcttacttggaat

SEQ ID NO: 321381 - DNA, 33 bp, Homo sapien
gaataaaagaggttacactgattgcaatatttc

SEQ ID NO: 321382 - DNA, 33 bp, Homo sapien
gaataaaagaggttacgctgattgcaatatttc

SEQ ID NO: 321383 - DNA, 33 bp, Homo sapien
gactgaggccaaaccaagtcccagaagcacaaa

SEQ ID NO: 321384 - DNA, 33 bp, Homo sapien
gactgaggccaaaccaggtcccagaagcacaaa

SEQ ID NO: 321385 - DNA, 33 bp, Homo sapien
gtcctgtcccaggcaaatgttatcctagcatcc

SEQ ID NO: 321386 - DNA, 33 bp, Homo sapien
gtcctgtcccaggcaagtgttatcctagcatcc

SEQ ID NO: 321387 - DNA, 33 bp, Homo sapien
gtcagaataacacataggagacccgtcttgtta

SEQ ID NO: 321388 - DNA, 33 bp, Homo sapien
gtcagaataacacatatgagacccgtcttgtta

SEQ ID NO: 321389 - DNA, 33 bp, Homo sapien
agaggtaaccccaccaagaagagctgacaaaat

SEQ ID NO: 321390 - DNA, 33 bp, Homo sapien
agaggtaaccccaccaggaagagctgacaaaat

SEQ ID NO: 321391 - DNA, 33 bp, Homo sapien
ctctgctacttcttaacccaacctgtaattctt

SEQ ID NO: 321392 - DNA, 33 bp, Homo sapien
ctctgctacttcttaatccaacctgtaattctt

SEQ ID NO: 321393 - DNA, 33 bp, Homo sapien
acgtgccaggtagttaacacaaaatcacctaaa

SEQ ID NO: 321394 - DNA, 33 bp, Homo sapien
acgtgccaggtagttatcacaaaatcacctaaa

SEQ ID NO: 321395 - DNA, 33 bp, Homo sapien
tttctggaaaacagctaaaccaaatgtgtcgga

SEQ ID NO: 321396 - DNA, 33 bp, Homo sapien
tttctggaaaacagctgaaccaaatgtgtcgga

SEQ ID NO: 321397 - DNA, 33 bp, Homo sapien
gtacatgcacagtgaagtctgagttatattaca

SEQ ID NO: 321398 - DNA, 33 bp, Homo sapien
gtacatgcacagtgaattctgagttatattaca

SEQ ID NO: 321399 - DNA, 33 bp, Homo sapien
tgaaattctgtctagccgagtacttgaaaatct

SEQ ID NO: 321400 - DNA, 33 bp, Homo sapien
tgaaattctgtctagctgagtacttgaaaatct

SEQ ID NO: 321401 - DNA, 33 bp, Homo sapien
atgaagttcacctttccagaagagttctctggg

SEQ ID NO: 321402 - DNA, 33 bp, Homo sapien
atgaagttcacctttcgagaagagttctctggg

SEQ ID NO: 321403 - DNA, 33 bp, Homo sapien
gtgtaaggccccatcgacagaggcatagcatct

SEQ ID NO: 321404 - DNA, 33 bp, Homo sapien
gtgtaaggccccatcggcagaggcatagcatct

SEQ ID NO: 321405 - DNA, 33 bp, Homo sapien
acattaaatcacttaactgtcacaggaagaact

SEQ ID NO: 321406 - DNA, 33 bp, Homo sapien
acattaaatcacttaattgtcacaggaagaact

SEQ ID NO: 321407 - DNA, 33 bp, Homo sapien
atgatggtaaggtagaaagaagttgccggtgct

SEQ ID NO: 321408 - DNA, 33 bp, Homo sapien
atgatggtaaggtagagagaagttgccggtgct

SEQ ID NO: 321409 - DNA, 33 bp, Homo sapien
ggatataagcaaataacgggcacaggcatagta

SEQ ID NO: 321410 - DNA, 33 bp, Homo sapien
ggatataagcaaataaggggcacaggcatagta

SEQ ID NO: 321411 - DNA, 33 bp, Homo sapien
ttccctagaaacatcacccaggtagaggtagac

SEQ ID NO: 321412 - DNA, 33 bp, Homo sapien
ttccctagaaacatcatccaggtagaggtagac

SEQ ID NO: 321413 - DNA, 33 bp, Homo sapien
aatgaagcaaagttcaactgcttaattattctc

SEQ ID NO: 321414 - DNA, 33 bp, Homo sapien
aatgaagcaaagttcagctgcttaattattctc

SEQ ID NO: 321415 - DNA, 33 bp, Homo sapien
tacctatttatcaagaacatcaataaaattatt

SEQ ID NO: 321416 - DNA, 33 bp, Homo sapien
tacctatttatcaagaccatcaataaaattatt

SEQ ID NO: 321417 - DNA, 33 bp, Homo sapien
agatgtgagtgcaagacaagcaaagaaagcaag

SEQ ID NO: 321418 - DNA, 33 bp, Homo sapien
agatgtgagtgcaagagaagcaaagaaagcaag

SEQ ID NO: 321419 - DNA, 33 bp, Homo sapien
aataaagagaaagtaacgcataggagcagatgt

SEQ ID NO: 321420 - DNA, 33 bp, Homo sapien
aataaagagaaagtaatgcataggagcagatgt

SEQ ID NO: 321421 - DNA, 33 bp, Homo sapien
ttttgcctcttctgagcaaatctgcatattatt

SEQ ID NO: 321422 - DNA, 33 bp, Homo sapien
ttttgcctcttctgagtaaatctgcatattatt

SEQ ID NO: 321423 - DNA, 33 bp, Homo sapien
aattgaggccctcccaaagaaggatcaggacac

SEQ ID NO: 321424 - DNA, 33 bp, Homo sapien
aattgaggccctcccagagaaggatcaggacac

SEQ ID NO: 321425 - DNA, 33 bp, Homo sapien
ttagtaaatcttgtaaatcacctagaaattgcc

SEQ ID NO: 321426 - DNA, 33 bp, Homo sapien
ttagtaaatcttgtaactcacctagaaattgcc

SEQ ID NO: 321427 - DNA, 33 bp, Homo sapien
ggataaagaaggagatcatcatccaaacgtaaa

SEQ ID NO: 321428 - DNA, 33 bp, Homo sapien
ggataaagaaggagattatcatccaaacgtaaa

SEQ ID NO: 321429 - DNA, 33 bp, Homo sapien
ggaatgtcagacttcccagtaatctctttcatt

SEQ ID NO: 321430 - DNA, 33 bp, Homo sapien
ggaatgtcagacttcctagtaatctctttcatt

SEQ ID NO: 321431 - DNA, 33 bp, Homo sapien
agagcagtcaacttacaagaaaaaagtgccttt

SEQ ID NO: 321432 - DNA, 33 bp, Homo sapien
agagcagtcaacttacgagaaaaaagtgccttt

SEQ ID NO: 321433 - DNA, 33 bp, Homo sapien
ggaaaaagagatgataacgaatcacatactggc

SEQ ID NO: 321434 - DNA, 33 bp, Homo sapien
ggaaaaagagatgatagcgaatcacatactggc

SEQ ID NO: 321435 - DNA, 33 bp, Homo sapien
ttattcatctcaagacacatataaatgtttatt

SEQ ID NO: 321436 - DNA, 33 bp, Homo sapien
ttattcatctcaagactcatataaatgtttatt

SEQ ID NO: 321437 - DNA, 33 bp, Homo sapien
ttgctgaaataaaagcccctaatcatatttgcc

SEQ ID NO: 321438 - DNA, 33 bp, Homo sapien
ttgctgaaataaaagctcctaatcatatttgcc

SEQ ID NO: 321439 - DNA, 33 bp, Homo sapien
cctttatgagggtgcacgtttagagagctcacc

SEQ ID NO: 321440 - DNA, 33 bp, Homo sapien
cctttatgagggtgcatgtttagagagctcacc

SEQ ID NO: 321441 - DNA, 33 bp, Homo sapien
acctgtgagatcaaccgggaggttcttcagaaa

SEQ ID NO: 321442 - DNA, 33 bp, Homo sapien
acctgtgagatcaacctggaggttcttcagaaa

SEQ ID NO: 321443 - DNA, 33 bp, Homo sapien
aaatcctgatgggacactaaaaatcactgaaaa

SEQ ID NO: 321444 - DNA, 33 bp, Homo sapien
aaatcctgatgggacagtaaaaatcactgaaaa

SEQ ID NO: 321445 - DNA, 33 bp, Homo sapien
ggcattcaagcataaaacattggttgcaaataa

SEQ ID NO: 321446 - DNA, 33 bp, Homo sapien
ggcattcaagcataaagcattggttgcaaataa

SEQ ID NO: 321447 - DNA, 33 bp, Homo sapien
gaaaacaataagctgtagaacgaacattactca

SEQ ID NO: 321448 - DNA, 33 bp, Homo sapien
gaaaacaataagctgtggaacgaacattactca

SEQ ID NO: 321449 - DNA, 33 bp, Homo sapien
atggaaaaaaatgaccaagaatagccaacacaa

SEQ ID NO: 321450 - DNA, 33 bp, Homo sapien
atggaaaaaaatgaccgagaatagccaacacaa

SEQ ID NO: 321451 - DNA, 33 bp, Homo sapien
gcactgccagactcaacgatttacaaaaaatat

SEQ ID NO: 321452 - DNA, 33 bp, Homo sapien
gcactgccagactcaatgatttacaaaaaatat

SEQ ID NO: 321453 - DNA, 33 bp, Homo sapien
cttctcattttaaagaagtgtcaactagcaatt

SEQ ID NO: 321454 - DNA, 33 bp, Homo sapien
cttctcattttaaagaggtgtcaactagcaatt

SEQ ID NO: 321455 - DNA, 33 bp, Homo sapien
catccaaaaacctagaagagctggattaattac

SEQ ID NO: 321456 - DNA, 33 bp, Homo sapien
catccaaaaacctagaggagctggattaattac

SEQ ID NO: 321457 - DNA, 33 bp, Homo sapien
tacagaaccgatccatcacaaactccaatacgt

SEQ ID NO: 321458 - DNA, 33 bp, Homo sapien
tacagaaccgatccattacaaactccaatacgt

SEQ ID NO: 321459 - DNA, 33 bp, Homo sapien
gtgacttcatggaagaataatgtgaagtattgg

SEQ ID NO: 321460 - DNA, 33 bp, Homo sapien
gtgacttcatggaagagtaatgtgaagtattgg

SEQ ID NO: 321461 - DNA, 33 bp, Homo sapien
ggaacttattggcacaagactgatttattaaat

SEQ ID NO: 321462 - DNA, 33 bp, Homo sapien
ggaacttattggcacatgactgatttattaaat

SEQ ID NO: 321463 - DNA, 33 bp, Homo sapien
aagaactaaatgtacaatgaaatttgggactaa

SEQ ID NO: 321464 - DNA, 33 bp, Homo sapien
aagaactaaatgtacagtgaaatttgggactaa

SEQ ID NO: 321465 - DNA, 33 bp, Homo sapien
acaacatgtagacatcgcagttagagacctcta

SEQ ID NO: 321466 - DNA, 33 bp, Homo sapien
acaacatgtagacatctcagttagagacctcta

SEQ ID NO: 321467 - DNA, 33 bp, Homo sapien
cctgtaagtctcttggcattgaacagcattggc

SEQ ID NO: 321468 - DNA, 33 bp, Homo sapien
cctgtaagtctcttggtattgaacagcattggc

SEQ ID NO: 321469 - DNA, 33 bp, Homo sapien
gtaatttttccaacacaattccagcaaattggg

SEQ ID NO: 321470 - DNA, 33 bp, Homo sapien
gtaatttttccaacacgattccagcaaattggg

SEQ ID NO: 321471 - DNA, 33 bp, Homo sapien
acctcaagcaaagtcacgtcccatttttataat

SEQ ID NO: 321472 - DNA, 33 bp, Homo sapien
acctcaagcaaagtcaggtcccatttttataat

SEQ ID NO: 321473 - DNA, 33 bp, Homo sapien
tttttcttacgctaagaacattaaataaaacag

SEQ ID NO: 321474 - DNA, 33 bp, Homo sapien
tttttcttacgctaaggacattaaataaaacag

SEQ ID NO: 321475 - DNA, 33 bp, Homo sapien
tctattttcgttaaaaattgtgtggaatatctt

SEQ ID NO: 321476 - DNA, 33 bp, Homo sapien
tctattttcgttaaaatttgtgtggaatatctt

SEQ ID NO: 321477 - DNA, 33 bp, Homo sapien
tagaacagctaattcaagtaattcactagcaaa

SEQ ID NO: 321478 - DNA, 33 bp, Homo sapien
tagaacagctaattcaggtaattcactagcaaa

SEQ ID NO: 321479 - DNA, 33 bp, Homo sapien
gtgacaggtataaaaacgatgcattaaaatata

SEQ ID NO: 321480 - DNA, 33 bp, Homo sapien
gtgacaggtataaaaatgatgcattaaaatata

SEQ ID NO: 321481 - DNA, 33 bp, Homo sapien
gagagtgtgtgcaggacaactgtcatacttaca

SEQ ID NO: 321482 - DNA, 33 bp, Homo sapien
gagagtgtgtgcaggagaactgtcatacttaca

SEQ ID NO: 321483 - DNA, 33 bp, Homo sapien
tacaaattttaagacacggattgattgcctctc

SEQ ID NO: 321484 - DNA, 33 bp, Homo sapien
tacaaattttaagacatggattgattgcctctc

SEQ ID NO: 321485 - DNA, 33 bp, Homo sapien
cagtgtcctttgcctacgcttagcacaatgtgt

SEQ ID NO: 321486 - DNA, 33 bp, Homo sapien
cagtgtcctttgcctatgcttagcacaatgtgt

SEQ ID NO: 321487 - DNA, 33 bp, Homo sapien
atagttaaccatgaaacgacgtggtacacattg

SEQ ID NO: 321488 - DNA, 33 bp, Homo sapien
atagttaaccatgaaatgacgtggtacacattg

SEQ ID NO: 321489 - DNA, 33 bp, Homo sapien
tctaaagaaatgatacaccaacattgtaaacaa

SEQ ID NO: 321490 - DNA, 33 bp, Homo sapien
tctaaagaaatgatacgccaacattgtaaacaa

SEQ ID NO: 321491 - DNA, 33 bp, Homo sapien
ttgatcagttatcacaagcctctaagagaaaat

SEQ ID NO: 321492 - DNA, 33 bp, Homo sapien
ttgatcagttatcacaggcctctaagagaaaat

SEQ ID NO: 321493 - DNA, 33 bp, Homo sapien
tttatcctcacatacacgaacataagtcagctt

SEQ ID NO: 321494 - DNA, 33 bp, Homo sapien
tttatcctcacatacatgaacataagtcagctt

SEQ ID NO: 321495 - DNA, 33 bp, Homo sapien
taaaacgaggaatatcaaaacaaggatctctga

SEQ ID NO: 321496 - DNA, 33 bp, Homo sapien
taaaacgaggaatatccaaacaaggatctctga

SEQ ID NO: 321497 - DNA, 33 bp, Homo sapien
gttgtaaccataacaacatctgtctttctagtt

SEQ ID NO: 321498 - DNA, 33 bp, Homo sapien
gttgtaaccataacaatatctgtctttctagtt

SEQ ID NO: 321499 - DNA, 33 bp, Homo sapien
taaatatatacacccacctggccctttcactat

SEQ ID NO: 321500 - DNA, 33 bp, Homo sapien
taaatatatacacccatctggccctttcactat

SEQ ID NO: 321501 - DNA, 33 bp, Homo sapien
atgaaaatgtatgaaacgtgtatctaccacttt

SEQ ID NO: 321502 - DNA, 33 bp, Homo sapien
atgaaaatgtatgaaatgtgtatctaccacttt

SEQ ID NO: 321503 - DNA, 33 bp, Homo sapien
tcagacataggaaaaacatggattacccacaaa

SEQ ID NO: 321504 - DNA, 33 bp, Homo sapien
tcagacataggaaaaagatggattacccacaaa

SEQ ID NO: 321505 - DNA, 33 bp, Homo sapien
ctcgggctttttaatcaatgagaagactgttct

SEQ ID NO: 321506 - DNA, 33 bp, Homo sapien
ctcgggctttttaatccatgagaagactgttct

SEQ ID NO: 321507 - DNA, 33 bp, Homo sapien
tctcctgtcatgtaagaaaatagaagtgagcag

SEQ ID NO: 321508 - DNA, 33 bp, Homo sapien
tctcctgtcatgtaaggaaatagaagtgagcag

SEQ ID NO: 321509 - DNA, 33 bp, Homo sapien
tatttgtacccactaagtatccactcagcattt

SEQ ID NO: 321510 - DNA, 33 bp, Homo sapien
tatttgtacccactaattatccactcagcattt

SEQ ID NO: 321511 - DNA, 33 bp, Homo sapien
tatgtgagatctgtgaactatgtaatgcctttc

SEQ ID NO: 321512 - DNA, 33 bp, Homo sapien
tatgtgagatctgtgagctatgtaatgcctttc

SEQ ID NO: 321513 - DNA, 33 bp, Homo sapien
ttttataaggtgactactacaattcattgcaag

SEQ ID NO: 321514 - DNA, 33 bp, Homo sapien
ttttataaggtgactattacaattcattgcaag

SEQ ID NO: 321515 - DNA, 33 bp, Homo sapien
ttatatgtgactaaacaatttactctagctttt

SEQ ID NO: 321516 - DNA, 33 bp, Homo sapien
ttatatgtgactaaaccatttactctagctttt

SEQ ID NO: 321517 - DNA, 33 bp, Homo sapien
ggttctctttcaatatcactacacattatcaca

SEQ ID NO: 321518 - DNA, 33 bp, Homo sapien
ggttctctttcaatattactacacattatcaca

SEQ ID NO: 321519 - DNA, 33 bp, Homo sapien
gctgtagttaagaaaaagaggtaagcaaatgtt

SEQ ID NO: 321520 - DNA, 33 bp, Homo sapien
gctgtagttaagaaaaggaggtaagcaaatgtt

SEQ ID NO: 321521 - DNA, 33 bp, Homo sapien
atggaaaaaaacaacacagctgggttgaatgca

SEQ ID NO: 321522 - DNA, 33 bp, Homo sapien
atggaaaaaaacaacatagctgggttgaatgca

SEQ ID NO: 321523 - DNA, 33 bp, Homo sapien
aatataatgttttttaaaagaatggtcacaatt

SEQ ID NO: 321524 - DNA, 33 bp, Homo sapien
aatataatgttttttagaagaatggtcacaatt

SEQ ID NO: 321525 - DNA, 33 bp, Homo sapien
tcttaaaccatgtctacgcagtcaaaccacact

SEQ ID NO: 321526 - DNA, 33 bp, Homo sapien
tcttaaaccatgtctatgcagtcaaaccacact

SEQ ID NO: 321527 - DNA, 33 bp, Homo sapien
taaatgttcactgaatcaatatataaagagaaa

SEQ ID NO: 321528 - DNA, 33 bp, Homo sapien
taaatgttcactgaatgaatatataaagagaaa

SEQ ID NO: 321529 - DNA, 33 bp, Homo sapien
ctcgggaagttttcaaatacagcttaaggaaaa

SEQ ID NO: 321530 - DNA, 33 bp, Homo sapien
ctcgggaagttttcaactacagcttaaggaaaa

SEQ ID NO: 321531 - DNA, 33 bp, Homo sapien
tttctgtgagctaatacagagagatctcggtaa

SEQ ID NO: 321532 - DNA, 33 bp, Homo sapien
tttctgtgagctaatatagagagatctcggtaa

SEQ ID NO: 321533 - DNA, 33 bp, Homo sapien
atatagtatgtgaaaccgtaatttcattttatc

SEQ ID NO: 321534 - DNA, 33 bp, Homo sapien
atatagtatgtgaaactgtaatttcattttatc

SEQ ID NO: 321535 - DNA, 33 bp, Homo sapien
aaagaaagtttttgccaagatttgctttacttt

SEQ ID NO: 321536 - DNA, 33 bp, Homo sapien
aaagaaagtttttgccgagatttgctttacttt

SEQ ID NO: 321537 - DNA, 33 bp, Homo sapien
atatgaaactgctaacactccaaagattatatg

SEQ ID NO: 321538 - DNA, 33 bp, Homo sapien
atatgaaactgctaacgctccaaagattatatg

SEQ ID NO: 321539 - DNA, 33 bp, Homo sapien
gcaatagctcaaaaaaatttttaacactatgac

SEQ ID NO: 321540 - DNA, 33 bp, Homo sapien
gcaatagctcaaaaaattttttaacactatgac

SEQ ID NO: 321541 - DNA, 33 bp, Homo sapien
cgctgtctacaactcaaagctttgcaatgggaa

SEQ ID NO: 321542 - DNA, 33 bp, Homo sapien
cgctgtctacaactcagagctttgcaatgggaa

SEQ ID NO: 321543 - DNA, 33 bp, Homo sapien
agatacacctagaaacacatatactagctgtcc

SEQ ID NO: 321544 - DNA, 33 bp, Homo sapien
agatacacctagaaacccatatactagctgtcc

SEQ ID NO: 321545 - DNA, 33 bp, Homo sapien
gttcagtttcaagggacgagaaggcagagtcag

SEQ ID NO: 321546 - DNA, 33 bp, Homo sapien
gttcagtttcaagggatgagaaggcagagtcag

SEQ ID NO: 321547 - DNA, 33 bp, Homo sapien
agaaggcctgacattaagatgcaatattaagag

SEQ ID NO: 321548 - DNA, 33 bp, Homo sapien
agaaggcctgacattaggatgcaatattaagag

SEQ ID NO: 321549 - DNA, 33 bp, Homo sapien
taaattattcagaaacaagaggcaaaaagattg

SEQ ID NO: 321550 - DNA, 33 bp, Homo sapien
taaattattcagaaacgagaggcaaaaagattg

SEQ ID NO: 321551 - DNA, 33 bp, Homo sapien
aaaactactttgagacaaatttcttaggccatc

SEQ ID NO: 321552 - DNA, 33 bp, Homo sapien
aaaactactttgagacgaatttcttaggccatc

SEQ ID NO: 321553 - DNA, 33 bp, Homo sapien
cagttctcatcactacaatgtttcccttaggca

SEQ ID NO: 321554 - DNA, 33 bp, Homo sapien
cagttctcatcactacgatgtttcccttaggca

SEQ ID NO: 321555 - DNA, 33 bp, Homo sapien
gctttggtgggaaatacgatcaggactgagacc

SEQ ID NO: 321556 - DNA, 33 bp, Homo sapien
gctttggtgggaaatatgatcaggactgagacc

SEQ ID NO: 321557 - DNA, 33 bp, Homo sapien
ttaaaagccaacattcagaagaagccaatcaag

SEQ ID NO: 321558 - DNA, 33 bp, Homo sapien
ttaaaagccaacattcggaagaagccaatcaag

SEQ ID NO: 321559 - DNA, 33 bp, Homo sapien
agacaccactaagtacaactgtcaatgtcatgt

SEQ ID NO: 321560 - DNA, 33 bp, Homo sapien
agacaccactaagtaccactgtcaatgtcatgt

SEQ ID NO: 321561 - DNA, 33 bp, Homo sapien
aacaaaaaatacacccaaatatggaaaaacagg

SEQ ID NO: 321562 - DNA, 33 bp, Homo sapien
aacaaaaaatacaccctaatatggaaaaacagg

SEQ ID NO: 321563 - DNA, 33 bp, Homo sapien
gtgttatctcttgttacgtttcatatacgtttt

SEQ ID NO: 321564 - DNA, 33 bp, Homo sapien
gtgttatctcttgttatgtttcatatacgtttt

SEQ ID NO: 321565 - DNA, 33 bp, Homo sapien
agagtaaactaatgtcagaataatcttcagtgt

SEQ ID NO: 321566 - DNA, 33 bp, Homo sapien
agagtaaactaatgtctgaataatcttcagtgt

SEQ ID NO: 321567 - DNA, 33 bp, Homo sapien
tgggataggtgaagcaagttataaaacatttga

SEQ ID NO: 321568 - DNA, 33 bp, Homo sapien
tgggataggtgaagcaggttataaaacatttga

SEQ ID NO: 321569 - DNA, 33 bp, Homo sapien
cctttccagtgtatcacagcttctcttcatatt

SEQ ID NO: 321570 - DNA, 33 bp, Homo sapien
cctttccagtgtatcatagcttctcttcatatt

SEQ ID NO: 321571 - DNA, 33 bp, Homo sapien
aaggcttatagtcgtacggtttggaaaattgat

SEQ ID NO: 321572 - DNA, 33 bp, Homo sapien
aaggcttatagtcgtatggtttggaaaattgat

SEQ ID NO: 321573 - DNA, 33 bp, Homo sapien
accccaactgcatatgaaaatgatctgtaagaa

SEQ ID NO: 321574 - DNA, 33 bp, Homo sapien
accccaactgcatatgtaaatgatctgtaagaa

SEQ ID NO: 321575 - DNA, 33 bp, Homo sapien
tacttcaaaattgctaagagaagattttaggtg

SEQ ID NO: 321576 - DNA, 33 bp, Homo sapien
tacttcaaaattgctaggagaagattttaggtg

SEQ ID NO: 321577 - DNA, 33 bp, Homo sapien
tgaatctttagatcaaactggaagaattaacat

SEQ ID NO: 321578 - DNA, 33 bp, Homo sapien
tgaatctttagatcaagctggaagaattaacat

SEQ ID NO: 321579 - DNA, 33 bp, Homo sapien
ctttagatcacattcacctagcaatcctaagaa

SEQ ID NO: 321580 - DNA, 33 bp, Homo sapien
ctttagatcacattcatctagcaatcctaagaa

SEQ ID NO: 321581 - DNA, 33 bp, Homo sapien
caggatccctttatcacggagacagtgccagtt

SEQ ID NO: 321582 - DNA, 33 bp, Homo sapien
caggatccctttatcatggagacagtgccagtt

SEQ ID NO: 321583 - DNA, 33 bp, Homo sapien
catactactctctaaaaatagcaagtcaaaaat

SEQ ID NO: 321584 - DNA, 33 bp, Homo sapien
catactactctctaaacatagcaagtcaaaaat

SEQ ID NO: 321585 - DNA, 33 bp, Homo sapien
tgaagtaagtgcaaaaatactcataaactcaaa

SEQ ID NO: 321586 - DNA, 33 bp, Homo sapien
tgaagtaagtgcaaaagtactcataaactcaaa

SEQ ID NO: 321587 - DNA, 33 bp, Homo sapien
ttcattcatctttctacacaagtagttttattt

SEQ ID NO: 321588 - DNA, 33 bp, Homo sapien
ttcattcatctttctatacaagtagttttattt

SEQ ID NO: 321589 - DNA, 33 bp, Homo sapien
aaatctgccacatggaatagaagttataaactg

SEQ ID NO: 321590 - DNA, 33 bp, Homo sapien
aaatctgccacatggagtagaagttataaactg

SEQ ID NO: 321591 - DNA, 33 bp, Homo sapien
ctgtccaaattcaggaagtaggtagttgtgggt

SEQ ID NO: 321592 - DNA, 33 bp, Homo sapien
ctgtccaaattcaggaggtaggtagttgtgggt

SEQ ID NO: 321593 - DNA, 33 bp, Homo sapien
cttatgatccaaattaagttttgagttgacttt

SEQ ID NO: 321594 - DNA, 33 bp, Homo sapien
cttatgatccaaattaggttttgagttgacttt

SEQ ID NO: 321595 - DNA, 33 bp, Homo sapien
catgttgaacaaaatgaatgttggtaataattt

SEQ ID NO: 321596 - DNA, 33 bp, Homo sapien
catgttgaacaaaatgcatgttggtaataattt

SEQ ID NO: 321597 - DNA, 33 bp, Homo sapien
gctatgtagagaactaagaaaatgaatcaagta

SEQ ID NO: 321598 - DNA, 33 bp, Homo sapien
gctatgtagagaactaggaaaatgaatcaagta

SEQ ID NO: 321599 - DNA, 33 bp, Homo sapien
atgaaaggaattttgtaaactggacgtcaagtg

SEQ ID NO: 321600 - DNA, 33 bp, Homo sapien
atgaaaggaattttgtgaactggacgtcaagtg

SEQ ID NO: 321601 - DNA, 33 bp, Homo sapien
cctgataggctaagaacgtattccaatgtgatt

SEQ ID NO: 321602 - DNA, 33 bp, Homo sapien
cctgataggctaagaaggtattccaatgtgatt

SEQ ID NO: 321603 - DNA, 33 bp, Homo sapien
gagagtaagttttggacccaatgaaatcaaatg

SEQ ID NO: 321604 - DNA, 33 bp, Homo sapien
gagagtaagttttggagccaatgaaatcaaatg

SEQ ID NO: 321605 - DNA, 33 bp, Homo sapien
accagacagtatccccaagcatagaagcatcac

SEQ ID NO: 321606 - DNA, 33 bp, Homo sapien
accagacagtatccccgagcatagaagcatcac

SEQ ID NO: 321607 - DNA, 33 bp, Homo sapien
agaagatgctccagataaattggaagactatat

SEQ ID NO: 321608 - DNA, 33 bp, Homo sapien
agaagatgctccagatgaattggaagactatat

SEQ ID NO: 321609 - DNA, 33 bp, Homo sapien
aagatatttcagctataaagatgaggtatcgtc

SEQ ID NO: 321610 - DNA, 33 bp, Homo sapien
aagatatttcagctatgaagatgaggtatcgtc

SEQ ID NO: 321611 - DNA, 33 bp, Homo sapien
agaggaaaatccatgcaaagtcacagcaagaag

SEQ ID NO: 321612 - DNA, 33 bp, Homo sapien
agaggaaaatccatgcgaagtcacagcaagaag

SEQ ID NO: 321613 - DNA, 33 bp, Homo sapien
aatatttctacaataggcaccatttaacacgac

SEQ ID NO: 321614 - DNA, 33 bp, Homo sapien
aatatttctacaatagtcaccatttaacacgac

SEQ ID NO: 321615 - DNA, 33 bp, Homo sapien
taagctgagtaaggagccataacattttcaaca

SEQ ID NO: 321616 - DNA, 33 bp, Homo sapien
taagctgagtaaggaggcataacattttcaaca

SEQ ID NO: 321617 - DNA, 33 bp, Homo sapien
caatgagaccctgtcaaccaaaagcctttgtct

SEQ ID NO: 321618 - DNA, 33 bp, Homo sapien
caatgagaccctgtcagccaaaagcctttgtct

SEQ ID NO: 321619 - DNA, 33 bp, Homo sapien
gggtaaacctatctgacgttgatccctcttggc

SEQ ID NO: 321620 - DNA, 33 bp, Homo sapien
gggtaaacctatctgatgttgatccctcttggc

SEQ ID NO: 321621 - DNA, 33 bp, Homo sapien
caaaactatgttgtaacgccattatttctgttt

SEQ ID NO: 321622 - DNA, 33 bp, Homo sapien
caaaactatgttgtaatgccattatttctgttt

SEQ ID NO: 321623 - DNA, 33 bp, Homo sapien
ttctttgaatctaaccaagtgtgctacaaacct

SEQ ID NO: 321624 - DNA, 33 bp, Homo sapien
ttctttgaatctaaccgagtgtgctacaaacct

SEQ ID NO: 321625 - DNA, 33 bp, Homo sapien
gggacacaagctttcaccaaagaagcaaatatc

SEQ ID NO: 321626 - DNA, 33 bp, Homo sapien
gggacacaagctttcatcaaagaagcaaatatc

SEQ ID NO: 321627 - DNA, 33 bp, Homo sapien
gcagagataggacatacagaaagagaatttttt

SEQ ID NO: 321628 - DNA, 33 bp, Homo sapien
gcagagataggacatagagaaagagaatttttt

SEQ ID NO: 321629 - DNA, 33 bp, Homo sapien
atctttgaatacaaacaatcacattacgtgtac

SEQ ID NO: 321630 - DNA, 33 bp, Homo sapien
atctttgaatacaaactatcacattacgtgtac

SEQ ID NO: 321631 - DNA, 33 bp, Homo sapien
tgacaagagcatatgaagatgtcagaaatatgc

SEQ ID NO: 321632 - DNA, 33 bp, Homo sapien
tgacaagagcatatgaggatgtcagaaatatgc

SEQ ID NO: 321633 - DNA, 33 bp, Homo sapien
atcctcatttttcagaaggctgaacatagatac

SEQ ID NO: 321634 - DNA, 33 bp, Homo sapien
atcctcatttttcagacggctgaacatagatac

SEQ ID NO: 321635 - DNA, 33 bp, Homo sapien
aagattattttcagccaattatccacagatagg

SEQ ID NO: 321636 - DNA, 33 bp, Homo sapien
aagattattttcagccgattatccacagatagg

SEQ ID NO: 321637 - DNA, 33 bp, Homo sapien
attggagctggcttcaaatttcttctcagtctg

SEQ ID NO: 321638 - DNA, 33 bp, Homo sapien
attggagctggcttcagatttcttctcagtctg

SEQ ID NO: 321639 - DNA, 33 bp, Homo sapien
cagtaacttcatggaaagtgctctgaaaataat

SEQ ID NO: 321640 - DNA, 33 bp, Homo sapien
cagtaacttcatggaacgtgctctgaaaataat

SEQ ID NO: 321641 - DNA, 33 bp, Homo sapien
ggtaacagtgaaccaaacacttgcaaggaaaat

SEQ ID NO: 321642 - DNA, 33 bp, Homo sapien
ggtaacagtgaaccaagcacttgcaaggaaaat

SEQ ID NO: 321643 - DNA, 33 bp, Homo sapien
atatgttctcataaaaacaatagctgacatatc

SEQ ID NO: 321644 - DNA, 33 bp, Homo sapien
atatgttctcataaaatcaatagctgacatatc

SEQ ID NO: 321645 - DNA, 33 bp, Homo sapien
aattcctgccttggaccagctatggattactta

SEQ ID NO: 321646 - DNA, 33 bp, Homo sapien
aattcctgccttggacgagctatggattactta

SEQ ID NO: 321647 - DNA, 33 bp, Homo sapien
ggttcttcaggaacacactatcactcaatgtgc

SEQ ID NO: 321648 - DNA, 33 bp, Homo sapien
ggttcttcaggaacacgctatcactcaatgtgc

SEQ ID NO: 321649 - DNA, 33 bp, Homo sapien
gtaagagaatctcagcaaagagaaaaaaaggag

SEQ ID NO: 321650 - DNA, 33 bp, Homo sapien
gtaagagaatctcagcgaagagaaaaaaaggag

SEQ ID NO: 321651 - DNA, 33 bp, Homo sapien
tttcttcttatctgaggagatctgcagctccag

SEQ ID NO: 321652 - DNA, 33 bp, Homo sapien
tttcttcttatctgagtagatctgcagctccag

SEQ ID NO: 321653 - DNA, 33 bp, Homo sapien
accccaacggaggataacagtcatcaattaaaa

SEQ ID NO: 321654 - DNA, 33 bp, Homo sapien
accccaacggaggatagcagtcatcaattaaaa

SEQ ID NO: 321655 - DNA, 33 bp, Homo sapien
ccaagcatggctctagcagcagtgtttgctttc

SEQ ID NO: 321656 - DNA, 33 bp, Homo sapien
ccaagcatggctctagtagcagtgtttgctttc

SEQ ID NO: 321657 - DNA, 33 bp, Homo sapien
caaaactcaggtaagaggacagctgtagaaata

SEQ ID NO: 321658 - DNA, 33 bp, Homo sapien
caaaactcaggtaagatgacagctgtagaaata

SEQ ID NO: 321659 - DNA, 33 bp, Homo sapien
cctaaatcatggaataaatcatgtataccaagc

SEQ ID NO: 321660 - DNA, 33 bp, Homo sapien
cctaaatcatggaatagatcatgtataccaagc

SEQ ID NO: 321661 - DNA, 33 bp, Homo sapien
aaacgagatgaggaaactagctgtgaggagaca

SEQ ID NO: 321662 - DNA, 33 bp, Homo sapien
aaacgagatgaggaaagtagctgtgaggagaca

SEQ ID NO: 321663 - DNA, 33 bp, Homo sapien
tctcctttgatccagacagcggaagagctgaaa

SEQ ID NO: 321664 - DNA, 33 bp, Homo sapien
tctcctttgatccagatagcggaagagctgaaa

SEQ ID NO: 321665 - DNA, 33 bp, Homo sapien
aacccataaatcaagggccatgtttatgttctc

SEQ ID NO: 321666 - DNA, 33 bp, Homo sapien
aacccataaatcaaggtccatgtttatgttctc

SEQ ID NO: 321667 - DNA, 33 bp, Homo sapien
taaatctgtaaaatggaactagaatgatagctg

SEQ ID NO: 321668 - DNA, 33 bp, Homo sapien
taaatctgtaaaatggcactagaatgatagctg

SEQ ID NO: 321669 - DNA, 33 bp, Homo sapien
tacacagtctttgagcgacctcctgttttgtct

SEQ ID NO: 321670 - DNA, 33 bp, Homo sapien
tacacagtctttgagctacctcctgttttgtct

SEQ ID NO: 321671 - DNA, 33 bp, Homo sapien
atggaggtagagaagaacactcattctggaaga

SEQ ID NO: 321672 - DNA, 33 bp, Homo sapien
atggaggtagagaagatcactcattctggaaga

SEQ ID NO: 321673 - DNA, 33 bp, Homo sapien
attcggcagaaagagggcaaatcctgagaaaaa

SEQ ID NO: 321674 - DNA, 33 bp, Homo sapien
attcggcagaaagaggtcaaatcctgagaaaaa

SEQ ID NO: 321675 - DNA, 33 bp, Homo sapien
ctgagttggcaaatgagatagtctagttcatca

SEQ ID NO: 321676 - DNA, 33 bp, Homo sapien
ctgagttggcaaatgatatagtctagttcatca

SEQ ID NO: 321677 - DNA, 33 bp, Homo sapien
gaaatggtatatgaaaaccagaaataaaggtaa

SEQ ID NO: 321678 - DNA, 33 bp, Homo sapien
gaaatggtatatgaaagccagaaataaaggtaa

SEQ ID NO: 321679 - DNA, 33 bp, Homo sapien
taccagttcaatttacgcaggttacagacctag

SEQ ID NO: 321680 - DNA, 33 bp, Homo sapien
taccagttcaatttactcaggttacagacctag

SEQ ID NO: 321681 - DNA, 33 bp, Homo sapien
gaaaggactgcattacaaaggtttattcttatt

SEQ ID NO: 321682 - DNA, 33 bp, Homo sapien
gaaaggactgcattacgaaggtttattcttatt

SEQ ID NO: 321683 - DNA, 33 bp, Homo sapien
cagatctaagcagagacgtcagaatcaatcttg

SEQ ID NO: 321684 - DNA, 33 bp, Homo sapien
cagatctaagcagagatgtcagaatcaatcttg

SEQ ID NO: 321685 - DNA, 33 bp, Homo sapien
ggagttgatttttccacagttccttctcttgct

SEQ ID NO: 321686 - DNA, 33 bp, Homo sapien
ggagttgatttttccatagttccttctcttgct

SEQ ID NO: 321687 - DNA, 33 bp, Homo sapien
ctctacctctactgtcacgtggtattttctcta

SEQ ID NO: 321688 - DNA, 33 bp, Homo sapien
ctctacctctactgtcgcgtggtattttctcta

SEQ ID NO: 321689 - DNA, 33 bp, Homo sapien
gaactgattgatccatcatacttgaagaaactt

SEQ ID NO: 321690 - DNA, 33 bp, Homo sapien
gaactgattgatccattatacttgaagaaactt

SEQ ID NO: 321691 - DNA, 33 bp, Homo sapien
ctcatattaccagaacagacaaagaagaaatag

SEQ ID NO: 321692 - DNA, 33 bp, Homo sapien
ctcatattaccagaacggacaaagaagaaatag

SEQ ID NO: 321693 - DNA, 33 bp, Homo sapien
ccatcaagagaaatctaaaattggagtacttat

SEQ ID NO: 321694 - DNA, 33 bp, Homo sapien
ccatcaagagaaatctgaaattggagtacttat

SEQ ID NO: 321695 - DNA, 33 bp, Homo sapien
attgtgcaatctaaaaattgtcagcttgaacaa

SEQ ID NO: 321696 - DNA, 33 bp, Homo sapien
attgtgcaatctaaaagttgtcagcttgaacaa

SEQ ID NO: 321697 - DNA, 33 bp, Homo sapien
aatctaatcaaagtcacactggatcggaaaagg

SEQ ID NO: 321698 - DNA, 33 bp, Homo sapien
aatctaatcaaagtcatactggatcggaaaagg

SEQ ID NO: 321699 - DNA, 33 bp, Homo sapien
aagaattatatcaccaatcttatgcttgaaaca

SEQ ID NO: 321700 - DNA, 33 bp, Homo sapien
aagaattatatcaccagtcttatgcttgaaaca

SEQ ID NO: 321701 - DNA, 33 bp, Homo sapien
aaactgtccgctgaacaagggcggcttacatta

SEQ ID NO: 321702 - DNA, 33 bp, Homo sapien
aaactgtccgctgaaccagggcggcttacatta

SEQ ID NO: 321703 - DNA, 33 bp, Homo sapien
aagattgtattttataaccataagcataacact

SEQ ID NO: 321704 - DNA, 33 bp, Homo sapien
aagattgtattttatagccataagcataacact

SEQ ID NO: 321705 - DNA, 33 bp, Homo sapien
cagtatttatatctccaaaattcattgctagct

SEQ ID NO: 321706 - DNA, 33 bp, Homo sapien
cagtatttatatctccgaaattcattgctagct

SEQ ID NO: 321707 - DNA, 33 bp, Homo sapien
atgaaacagaaggacactggaagaaaataaaag

SEQ ID NO: 321708 - DNA, 33 bp, Homo sapien
atgaaacagaaggacagtggaagaaaataaaag

SEQ ID NO: 321709 - DNA, 33 bp, Homo sapien
tgagcagcaatcttcacattagctctacaatga

SEQ ID NO: 321710 - DNA, 33 bp, Homo sapien
tgagcagcaatcttcatattagctctacaatga

SEQ ID NO: 321711 - DNA, 33 bp, Homo sapien
atgattatgtttttaaatgaacgatctggaata

SEQ ID NO: 321712 - DNA, 33 bp, Homo sapien
atgattatgtttttaagtgaacgatctggaata

SEQ ID NO: 321713 - DNA, 33 bp, Homo sapien
aaaatcagcagaagccagacagtctccataatc

SEQ ID NO: 321714 - DNA, 33 bp, Homo sapien
aaaatcagcagaagccggacagtctccataatc

SEQ ID NO: 321715 - DNA, 33 bp, Homo sapien
tcatcaaaactatgacaatggataaatgacaaa

SEQ ID NO: 321716 - DNA, 33 bp, Homo sapien
tcatcaaaactatgacgatggataaatgacaaa

SEQ ID NO: 321717 - DNA, 33 bp, Homo sapien
gagaattttttaaccaagatcgaagaattcaga

SEQ ID NO: 321718 - DNA, 33 bp, Homo sapien
gagaattttttaaccaggatcgaagaattcaga

SEQ ID NO: 321719 - DNA, 33 bp, Homo sapien
atcctcaagtgaagaacagtgtagaaaaataca

SEQ ID NO: 321720 - DNA, 33 bp, Homo sapien
atcctcaagtgaagaagagtgtagaaaaataca

SEQ ID NO: 321721 - DNA, 33 bp, Homo sapien
ctctattccacaagaaacatctgtctatcacat

SEQ ID NO: 321722 - DNA, 33 bp, Homo sapien
ctctattccacaagaatcatctgtctatcacat

SEQ ID NO: 321723 - DNA, 33 bp, Homo sapien
aagggagatgcagaagcagatgagtcattctag

SEQ ID NO: 321724 - DNA, 33 bp, Homo sapien
aagggagatgcagaaggagatgagtcattctag

SEQ ID NO: 321725 - DNA, 33 bp, Homo sapien
aaatttaagccaaatcacagggaaaagcagcat

SEQ ID NO: 321726 - DNA, 33 bp, Homo sapien
aaatttaagccaaatcccagggaaaagcagcat

SEQ ID NO: 321727 - DNA, 33 bp, Homo sapien
ttctttcattttcacagatttcactgcagaaac

SEQ ID NO: 321728 - DNA, 33 bp, Homo sapien
ttctttcattttcacatatttcactgcagaaac

SEQ ID NO: 321729 - DNA, 33 bp, Homo sapien
ttctgagcttagggacggcaggcactaggtagg

SEQ ID NO: 321730 - DNA, 33 bp, Homo sapien
ttctgagcttagggactgcaggcactaggtagg

SEQ ID NO: 321731 - DNA, 33 bp, Homo sapien
gtatttgcaattaacaaggactccagaaaatga

SEQ ID NO: 321732 - DNA, 33 bp, Homo sapien
gtatttgcaattaacagggactccagaaaatga

SEQ ID NO: 321733 - DNA, 33 bp, Homo sapien
tttaccagacttataaagtaaacatctagctgc

SEQ ID NO: 321734 - DNA, 33 bp, Homo sapien
tttaccagacttataacgtaaacatctagctgc

SEQ ID NO: 321735 - DNA, 33 bp, Homo sapien
aattgtattttaaacaaggaacctgcatcagca

SEQ ID NO: 321736 - DNA, 33 bp, Homo sapien
aattgtattttaaacacggaacctgcatcagca

SEQ ID NO: 321737 - DNA, 33 bp, Homo sapien
tacttgatacataaagaatctgttggttatatc

SEQ ID NO: 321738 - DNA, 33 bp, Homo sapien
tacttgatacataaaggatctgttggttatatc

SEQ ID NO: 321739 - DNA, 33 bp, Homo sapien
gctacagtatgataaacctcaagaaagctatta

SEQ ID NO: 321740 - DNA, 33 bp, Homo sapien
gctacagtatgataaatctcaagaaagctatta

SEQ ID NO: 321741 - DNA, 33 bp, Homo sapien
gtccctccttactgtaccataaacaggtattat

SEQ ID NO: 321742 - DNA, 33 bp, Homo sapien
gtccctccttactgtatcataaacaggtattat

SEQ ID NO: 321743 - DNA, 33 bp, Homo sapien
tattgagttacacatgacactgtataaatttca

SEQ ID NO: 321744 - DNA, 33 bp, Homo sapien
tattgagttacacatggcactgtataaatttca

SEQ ID NO: 321745 - DNA, 33 bp, Homo sapien
tctattcagttaatgcaacattcaaagggatca

SEQ ID NO: 321746 - DNA, 33 bp, Homo sapien
tctattcagttaatgctacattcaaagggatca

SEQ ID NO: 321747 - DNA, 33 bp, Homo sapien
agcacattaattagcacaccaatgatagattag

SEQ ID NO: 321748 - DNA, 33 bp, Homo sapien
agcacattaattagcagaccaatgatagattag

SEQ ID NO: 321749 - DNA, 33 bp, Homo sapien
ttaaaacaccaatataataatgatcaataggca

SEQ ID NO: 321750 - DNA, 33 bp, Homo sapien
ttaaaacaccaatatactaatgatcaataggca

SEQ ID NO: 321751 - DNA, 33 bp, Homo sapien
ccagaagcttgagtgcgcgtggttttgtctcct

SEQ ID NO: 321752 - DNA, 33 bp, Homo sapien
ccagaagcttgagtgctcgtggttttgtctcct

SEQ ID NO: 321753 - DNA, 33 bp, Homo sapien
agaaccaagctcttcacggctccagcccaggta

SEQ ID NO: 321754 - DNA, 33 bp, Homo sapien
agaaccaagctcttcatggctccagcccaggta

SEQ ID NO: 321755 - DNA, 33 bp, Homo sapien
gcaagcagaaaggcacaattgacagcccagggt

SEQ ID NO: 321756 - DNA, 33 bp, Homo sapien
gcaagcagaaaggcaccattgacagcccagggt

SEQ ID NO: 321757 - DNA, 33 bp, Homo sapien
ctctgagatgctgagacaagacaaggtgagact

SEQ ID NO: 321758 - DNA, 33 bp, Homo sapien
ctctgagatgctgagataagacaaggtgagact

SEQ ID NO: 321759 - DNA, 33 bp, Homo sapien
aagacttttaattgaacgtgatgtagaggtgta

SEQ ID NO: 321760 - DNA, 33 bp, Homo sapien
aagacttttaattgaatgtgatgtagaggtgta

SEQ ID NO: 321761 - DNA, 33 bp, Homo sapien
aggactaaacttataacctaagcagacagaaat

SEQ ID NO: 321762 - DNA, 33 bp, Homo sapien
aggactaaacttataatctaagcagacagaaat

SEQ ID NO: 321763 - DNA, 33 bp, Homo sapien
tggcgatatcctctagaactgtttctcagataa

SEQ ID NO: 321764 - DNA, 33 bp, Homo sapien
tggcgatatcctctagtactgtttctcagataa

SEQ ID NO: 321765 - DNA, 33 bp, Homo sapien
gattttaatgtggccaactaaagccttatttat

SEQ ID NO: 321766 - DNA, 33 bp, Homo sapien
gattttaatgtggccagctaaagccttatttat

SEQ ID NO: 321767 - DNA, 33 bp, Homo sapien
acaatgaaatctgggccgaagtggtgggaactg

SEQ ID NO: 321768 - DNA, 33 bp, Homo sapien
acaatgaaatctgggctgaagtggtgggaactg

SEQ ID NO: 321769 - DNA, 33 bp, Homo sapien
cagatggtgactacacagcccaagagaccagtt

SEQ ID NO: 321770 - DNA, 33 bp, Homo sapien
cagatggtgactacacggcccaagagaccagtt

SEQ ID NO: 321771 - DNA, 33 bp, Homo sapien
ggatcataagtacaaacctaagcttttgctgga

SEQ ID NO: 321772 - DNA, 33 bp, Homo sapien
ggatcataagtacaaatctaagcttttgctgga

SEQ ID NO: 321773 - DNA, 33 bp, Homo sapien
gctcaaagaaattgaaataggatcataagtaca

SEQ ID NO: 321774 - DNA, 33 bp, Homo sapien
gctcaaagaaattgaagtaggatcataagtaca

SEQ ID NO: 321775 - DNA, 33 bp, Homo sapien
tagatcattaatccacaagttagagctgatcta

SEQ ID NO: 321776 - DNA, 33 bp, Homo sapien
tagatcattaatccacgagttagagctgatcta

SEQ ID NO: 321777 - DNA, 33 bp, Homo sapien
gaattttataaaaggacagtaaattacagactt

SEQ ID NO: 321778 - DNA, 33 bp, Homo sapien
gaattttataaaaggagagtaaattacagactt

SEQ ID NO: 321779 - DNA, 33 bp, Homo sapien
acaacagcgcttgcaactgtaacaagtttagtt

SEQ ID NO: 321780 - DNA, 33 bp, Homo sapien
acaacagcgcttgcaagtgtaacaagtttagtt

SEQ ID NO: 321781 - DNA, 33 bp, Homo sapien
tagttgtcctttggaacgaacgaaaatatattt

SEQ ID NO: 321782 - DNA, 33 bp, Homo sapien
tagttgtcctttggaatgaacgaaaatatattt

SEQ ID NO: 321783 - DNA, 33 bp, Homo sapien
tggggttttgttgtgaccgtttcatttctgttt

SEQ ID NO: 321784 - DNA, 33 bp, Homo sapien
tggggttttgttgtgatcgtttcatttctgttt

SEQ ID NO: 321785 - DNA, 33 bp, Homo sapien
agcctctagaagctgacaaagtctaagggaaaa

SEQ ID NO: 321786 - DNA, 33 bp, Homo sapien
agcctctagaagctgagaaagtctaagggaaaa

SEQ ID NO: 321787 - DNA, 33 bp, Homo sapien
attttatatcagcaaacgagaaatttaattttg

SEQ ID NO: 321788 - DNA, 33 bp, Homo sapien
attttatatcagcaaaggagaaatttaattttg

SEQ ID NO: 321789 - DNA, 33 bp, Homo sapien
gaaagacaatgaagcacgtaggtactcaggatc

SEQ ID NO: 321790 - DNA, 33 bp, Homo sapien
gaaagacaatgaagcatgtaggtactcaggatc

SEQ ID NO: 321791 - DNA, 33 bp, Homo sapien
tatttatttcactgtcacccatattgatctctc

SEQ ID NO: 321792 - DNA, 33 bp, Homo sapien
tatttatttcactgtcgcccatattgatctctc

SEQ ID NO: 321793 - DNA, 33 bp, Homo sapien
acatctgcccaacaaacggtattgcagttaagt

SEQ ID NO: 321794 - DNA, 33 bp, Homo sapien
acatctgcccaacaaatggtattgcagttaagt

SEQ ID NO: 321795 - DNA, 33 bp, Homo sapien
agcactgtgaaactaaaacaccttaaggactta

SEQ ID NO: 321796 - DNA, 33 bp, Homo sapien
agcactgtgaaactaagacaccttaaggactta

SEQ ID NO: 321797 - DNA, 33 bp, Homo sapien
cagaatacatttgacacctggataagtccatta

SEQ ID NO: 321798 - DNA, 33 bp, Homo sapien
cagaatacatttgacatctggataagtccatta

SEQ ID NO: 321799 - DNA, 33 bp, Homo sapien
agtccatcatttggtcaaaagtattgtaagtca

SEQ ID NO: 321800 - DNA, 33 bp, Homo sapien
agtccatcatttggtccaaagtattgtaagtca

SEQ ID NO: 321801 - DNA, 33 bp, Homo sapien
ttatttttttattagacggctactgagtgtgtt

SEQ ID NO: 321802 - DNA, 33 bp, Homo sapien
ttatttttttattagatggctactgagtgtgtt

SEQ ID NO: 321803 - DNA, 33 bp, Homo sapien
gttcctactgggcagaaatttttatacaacaac

SEQ ID NO: 321804 - DNA, 33 bp, Homo sapien
gttcctactgggcagacatttttatacaacaac

SEQ ID NO: 321805 - DNA, 33 bp, Homo sapien
ataatagtctattcctaaactggatatgttttt

SEQ ID NO: 321806 - DNA, 33 bp, Homo sapien
ataatagtctattcctcaactggatatgttttt

SEQ ID NO: 321807 - DNA, 33 bp, Homo sapien
gaacttctcatatagaaccaggtaggcgtgtat

SEQ ID NO: 321808 - DNA, 33 bp, Homo sapien
gaacttctcatatagacccaggtaggcgtgtat

SEQ ID NO: 321809 - DNA, 33 bp, Homo sapien
attcttaaccttggaaatagagtgtgtttatga

SEQ ID NO: 321810 - DNA, 33 bp, Homo sapien
attcttaaccttggaagtagagtgtgtttatga

SEQ ID NO: 321811 - DNA, 33 bp, Homo sapien
taaaaatcattttgcacagcaagtttagattat

SEQ ID NO: 321812 - DNA, 33 bp, Homo sapien
taaaaatcattttgcagagcaagtttagattat

SEQ ID NO: 321813 - DNA, 33 bp, Homo sapien
tgtactatctttgcaacgtagtcatttattatt

SEQ ID NO: 321814 - DNA, 33 bp, Homo sapien
tgtactatctttgcaatgtagtcatttattatt

SEQ ID NO: 321815 - DNA, 33 bp, Homo sapien
gagatgtatggttatgaaaatttctcataaagc

SEQ ID NO: 321816 - DNA, 33 bp, Homo sapien
gagatgtatggttatggaaatttctcataaagc

SEQ ID NO: 321817 - DNA, 33 bp, Homo sapien
actattctaggaatgacggataatcaaaatgag

SEQ ID NO: 321818 - DNA, 33 bp, Homo sapien
actattctaggaatgatggataatcaaaatgag

SEQ ID NO: 321819 - DNA, 33 bp, Homo sapien
atgcagttgtttacagcagtctttgaaggtgtc

SEQ ID NO: 321820 - DNA, 33 bp, Homo sapien
atgcagttgtttacagtagtctttgaaggtgtc

SEQ ID NO: 321821 - DNA, 33 bp, Homo sapien
gtacagacaaatttccagaagcttaatgtcatg

SEQ ID NO: 321822 - DNA, 33 bp, Homo sapien
gtacagacaaatttccggaagcttaatgtcatg

SEQ ID NO: 321823 - DNA, 33 bp, Homo sapien
acaatgtttctggtgaacttactatatgtgact

SEQ ID NO: 321824 - DNA, 33 bp, Homo sapien
acaatgtttctggtgatcttactatatgtgact

SEQ ID NO: 321825 - DNA, 33 bp, Homo sapien
gggttaatatctagaaatgtttaccaataccaa

SEQ ID NO: 321826 - DNA, 33 bp, Homo sapien
gggttaatatctagaagtgtttaccaataccaa

SEQ ID NO: 321827 - DNA, 33 bp, Homo sapien
taattttgttagattcaataggcattacttgat

SEQ ID NO: 321828 - DNA, 33 bp, Homo sapien
taattttgttagattccataggcattacttgat

SEQ ID NO: 321829 - DNA, 33 bp, Homo sapien
attgcttacatttctacaaatagctccttcatc

SEQ ID NO: 321830 - DNA, 33 bp, Homo sapien
attgcttacatttctataaatagctccttcatc

SEQ ID NO: 321831 - DNA, 33 bp, Homo sapien
atgaggcagacagtaggaatttacagtgtcatt

SEQ ID NO: 321832 - DNA, 33 bp, Homo sapien
atgaggcagacagtagtaatttacagtgtcatt

SEQ ID NO: 321833 - DNA, 33 bp, Homo sapien
taatgatgaggtctgacgtatgtgaaataacaa

SEQ ID NO: 321834 - DNA, 33 bp, Homo sapien
taatgatgaggtctgatgtatgtgaaataacaa

SEQ ID NO: 321835 - DNA, 33 bp, Homo sapien
tttgtgtattcacttccatctttgcctaaattg

SEQ ID NO: 321836 - DNA, 33 bp, Homo sapien
tttgtgtattcacttctatctttgcctaaattg

SEQ ID NO: 321837 - DNA, 33 bp, Homo sapien
gctggaaagtccacgactaaagtaccagctgat

SEQ ID NO: 321838 - DNA, 33 bp, Homo sapien
gctggaaagtccacgattaaagtaccagctgat

SEQ ID NO: 321839 - DNA, 33 bp, Homo sapien
agaagagggaagaggtcacaatggccgtggact

SEQ ID NO: 321840 - DNA, 33 bp, Homo sapien
agaagagggaagaggtgacaatggccgtggact

SEQ ID NO: 321841 - DNA, 33 bp, Homo sapien
tagcatcagtttgaaaatgaaaaatgtaacaat

SEQ ID NO: 321842 - DNA, 33 bp, Homo sapien
tagcatcagtttgaaagtgaaaaatgtaacaat

SEQ ID NO: 321843 - DNA, 33 bp, Homo sapien
tgtgccctgagataaacggcttttctttgtttt

SEQ ID NO: 321844 - DNA, 33 bp, Homo sapien
tgtgccctgagataaatggcttttctttgtttt

SEQ ID NO: 321845 - DNA, 33 bp, Homo sapien
gtcattgtaacagagaaaaagccctctaaatct

SEQ ID NO: 321846 - DNA, 33 bp, Homo sapien
gtcattgtaacagagacaaagccctctaaatct

SEQ ID NO: 321847 - DNA, 33 bp, Homo sapien
aagatatctgcattgaatagaaagacaacatta

SEQ ID NO: 321848 - DNA, 33 bp, Homo sapien
aagatatctgcattgagtagaaagacaacatta

SEQ ID NO: 321849 - DNA, 33 bp, Homo sapien
atacagattattgtccagaagaattatgggcga

SEQ ID NO: 321850 - DNA, 33 bp, Homo sapien
atacagattattgtccggaagaattatgggcga

SEQ ID NO: 321851 - DNA, 33 bp, Homo sapien
ctaagtagatttagccagagtttgcaaataaaa

SEQ ID NO: 321852 - DNA, 33 bp, Homo sapien
ctaagtagatttagccggagtttgcaaataaaa

SEQ ID NO: 321853 - DNA, 33 bp, Homo sapien
tagggaatagattcacagcagggttgggttata

SEQ ID NO: 321854 - DNA, 33 bp, Homo sapien
tagggaatagattcacggcagggttgggttata

SEQ ID NO: 321855 - DNA, 33 bp, Homo sapien
aaattgctgtgtccaaccaaaactcttttacag

SEQ ID NO: 321856 - DNA, 33 bp, Homo sapien
aaattgctgtgtccaatcaaaactcttttacag

SEQ ID NO: 321857 - DNA, 33 bp, Homo sapien
ctgagggcaagattaaggtatgtggtccacagc

SEQ ID NO: 321858 - DNA, 33 bp, Homo sapien
ctgagggcaagattaatgtatgtggtccacagc

SEQ ID NO: 321859 - DNA, 33 bp, Homo sapien
gagaggcgctgtctatcaacctgggaaggggcc

SEQ ID NO: 321860 - DNA, 33 bp, Homo sapien
gagaggcgctgtctatgaacctgggaaggggcc

SEQ ID NO: 321861 - DNA, 33 bp, Homo sapien
ttgtatgtctggcaaacgtctaatagttcctca

SEQ ID NO: 321862 - DNA, 33 bp, Homo sapien
ttgtatgtctggcaaatgtctaatagttcctca

SEQ ID NO: 321863 - DNA, 33 bp, Homo sapien
ttaaacctagactgccaaatgacaatctcaaga

SEQ ID NO: 321864 - DNA, 33 bp, Homo sapien
ttaaacctagactgccgaatgacaatctcaaga

SEQ ID NO: 321865 - DNA, 33 bp, Homo sapien
tttccgattctcagaaacaatgcatatttattt

SEQ ID NO: 321866 - DNA, 33 bp, Homo sapien
tttccgattctcagaagcaatgcatatttattt

SEQ ID NO: 321867 - DNA, 33 bp, Homo sapien
catgaccaatcacacccaataaacatctacaga

SEQ ID NO: 321868 - DNA, 33 bp, Homo sapien
catgaccaatcacacctaataaacatctacaga

SEQ ID NO: 321869 - DNA, 33 bp, Homo sapien
aatgttatgttagatacatgtgcagctttgcta

SEQ ID NO: 321870 - DNA, 33 bp, Homo sapien
aatgttatgttagatatatgtgcagctttgcta

SEQ ID NO: 321871 - DNA, 33 bp, Homo sapien
attacttaaagtcatcaaattaaaagatattgc

SEQ ID NO: 321872 - DNA, 33 bp, Homo sapien
attacttaaagtcatccaattaaaagatattgc

SEQ ID NO: 321873 - DNA, 33 bp, Homo sapien
atattgcaacttcaaactaccactgaaaaatat

SEQ ID NO: 321874 - DNA, 33 bp, Homo sapien
atattgcaacttcaaattaccactgaaaaatat

SEQ ID NO: 321875 - DNA, 33 bp, Homo sapien
aatatctttaatgaaagtatgtggctgattagt

SEQ ID NO: 321876 - DNA, 33 bp, Homo sapien
aatatctttaatgaaattatgtggctgattagt

SEQ ID NO: 321877 - DNA, 33 bp, Homo sapien
ttcctttagctttcagcctccatttcttcttcc

SEQ ID NO: 321878 - DNA, 33 bp, Homo sapien
ttcctttagctttcaggctccatttcttcttcc

SEQ ID NO: 321879 - DNA, 33 bp, Homo sapien
gacaagatggcctcaaccaactggaaagtctat

SEQ ID NO: 321880 - DNA, 33 bp, Homo sapien
gacaagatggcctcaatcaactggaaagtctat

SEQ ID NO: 321881 - DNA, 33 bp, Homo sapien
gataatgtgaagggaaagagtgaggtaagagca

SEQ ID NO: 321882 - DNA, 33 bp, Homo sapien
gataatgtgaagggaacgagtgaggtaagagca

SEQ ID NO: 321883 - DNA, 33 bp, Homo sapien
atgccagggaatgacaactgaactgtaatggat

SEQ ID NO: 321884 - DNA, 33 bp, Homo sapien
atgccagggaatgacagctgaactgtaatggat

SEQ ID NO: 321885 - DNA, 33 bp, Homo sapien
tccaatctgttgaaagcctgaatagaagaagtt

SEQ ID NO: 321886 - DNA, 33 bp, Homo sapien
tccaatctgttgaaaggctgaatagaagaagtt

SEQ ID NO: 321887 - DNA, 33 bp, Homo sapien
ttaatttagtgccacactacacaggaaaagaaa

SEQ ID NO: 321888 - DNA, 33 bp, Homo sapien
ttaatttagtgccacagtacacaggaaaagaaa

SEQ ID NO: 321889 - DNA, 33 bp, Homo sapien
acaacattctatcatcacaactcttacaatctc

SEQ ID NO: 321890 - DNA, 33 bp, Homo sapien
acaacattctatcatcccaactcttacaatctc

SEQ ID NO: 321891 - DNA, 33 bp, Homo sapien
ttgctcaccattctcaataatgtgataaaacct

SEQ ID NO: 321892 - DNA, 33 bp, Homo sapien
ttgctcaccattctcagtaatgtgataaaacct

SEQ ID NO: 321893 - DNA, 33 bp, Homo sapien
atgtttgaaagcttcaacctcaaacttaattaa

SEQ ID NO: 321894 - DNA, 33 bp, Homo sapien
atgtttgaaagcttcatcctcaaacttaattaa

SEQ ID NO: 321895 - DNA, 33 bp, Homo sapien
aatgcttgatatgcaactggttcataaattttc

SEQ ID NO: 321896 - DNA, 33 bp, Homo sapien
aatgcttgatatgcaattggttcataaattttc

SEQ ID NO: 321897 - DNA, 33 bp, Homo sapien
cttagattgaaatacgaaaacagattgaaagtg

SEQ ID NO: 321898 - DNA, 33 bp, Homo sapien
cttagattgaaatacgcaaacagattgaaagtg

SEQ ID NO: 321899 - DNA, 33 bp, Homo sapien
acaactagcaaaatgaaaggagttaagtcctta

SEQ ID NO: 321900 - DNA, 33 bp, Homo sapien
acaactagcaaaatgacaggagttaagtcctta

SEQ ID NO: 321901 - DNA, 33 bp, Homo sapien
aaacaactagccatcaaaataatgttgatcaat

SEQ ID NO: 321902 - DNA, 33 bp, Homo sapien
aaacaactagccatcagaataatgttgatcaat

SEQ ID NO: 321903 - DNA, 33 bp, Homo sapien
cttttcttatcattcaagttttactgattatgc

SEQ ID NO: 321904 - DNA, 33 bp, Homo sapien
cttttcttatcattcaggttttactgattatgc

SEQ ID NO: 321905 - DNA, 33 bp, Homo sapien
tgaagtcaatggatcaataaatgaaattatctt

SEQ ID NO: 321906 - DNA, 33 bp, Homo sapien
tgaagtcaatggatcagtaaatgaaattatctt

SEQ ID NO: 321907 - DNA, 33 bp, Homo sapien
ttggcaggacgtcacaaatcaatttctttcaat

SEQ ID NO: 321908 - DNA, 33 bp, Homo sapien
ttggcaggacgtcacatatcaatttctttcaat

SEQ ID NO: 321909 - DNA, 33 bp, Homo sapien
ttatttatcttttacaagtgtttgtggaccatt

SEQ ID NO: 321910 - DNA, 33 bp, Homo sapien
ttatttatcttttacatgtgtttgtggaccatt

SEQ ID NO: 321911 - DNA, 33 bp, Homo sapien
tgcattacgcatttcaatctattgttttagctt

SEQ ID NO: 321912 - DNA, 33 bp, Homo sapien
tgcattacgcatttcagtctattgttttagctt

SEQ ID NO: 321913 - DNA, 33 bp, Homo sapien
agagcaggtgctctccaaatacttacaagtgct

SEQ ID NO: 321914 - DNA, 33 bp, Homo sapien
agagcaggtgctctccgaatacttacaagtgct

SEQ ID NO: 321915 - DNA, 33 bp, Homo sapien
caaatgaaactcgagaaagcctgctgaaggctt

SEQ ID NO: 321916 - DNA, 33 bp, Homo sapien
caaatgaaactcgagacagcctgctgaaggctt

SEQ ID NO: 321917 - DNA, 33 bp, Homo sapien
gggcttaagcaataacactgaatatatacattt

SEQ ID NO: 321918 - DNA, 33 bp, Homo sapien
gggcttaagcaataacgctgaatatatacattt

SEQ ID NO: 321919 - DNA, 33 bp, Homo sapien
tcctaacaaaaagtaacgttcagagaaggatta

SEQ ID NO: 321920 - DNA, 33 bp, Homo sapien
tcctaacaaaaagtaaggttcagagaaggatta

SEQ ID NO: 321921 - DNA, 33 bp, Homo sapien
tacaattaaagacaaaacaatcttacgctggat

SEQ ID NO: 321922 - DNA, 33 bp, Homo sapien
tacaattaaagacaaagcaatcttacgctggat

SEQ ID NO: 321923 - DNA, 33 bp, Homo sapien
caattcagaaaatgacagacatggctaaagagt

SEQ ID NO: 321924 - DNA, 33 bp, Homo sapien
caattcagaaaatgacggacatggctaaagagt

SEQ ID NO: 321925 - DNA, 33 bp, Homo sapien
cgataaacaacatcaaccaacatgtgttttcat

SEQ ID NO: 321926 - DNA, 33 bp, Homo sapien
cgataaacaacatcaagcaacatgtgttttcat

SEQ ID NO: 321927 - DNA, 33 bp, Homo sapien
aaactagaggagcaaaaaatcaaattaacctga

SEQ ID NO: 321928 - DNA, 33 bp, Homo sapien
aaactagaggagcaaagaatcaaattaacctga

SEQ ID NO: 321929 - DNA, 33 bp, Homo sapien
cttttctccacctgacaaatattgaagtcagaa

SEQ ID NO: 321930 - DNA, 33 bp, Homo sapien
cttttctccacctgaccaatattgaagtcagaa

SEQ ID NO: 321931 - DNA, 33 bp, Homo sapien
gcaagggccttgagcgcacagggtttcttgtct

SEQ ID NO: 321932 - DNA, 33 bp, Homo sapien
gcaagggccttgagcgtacagggtttcttgtct

SEQ ID NO: 321933 - DNA, 33 bp, Homo sapien
tatttaatatggataccaagcatggagataata

SEQ ID NO: 321934 - DNA, 33 bp, Homo sapien
tatttaatatggatacgaagcatggagataata

SEQ ID NO: 321935 - DNA, 33 bp, Homo sapien
ttgctccattatattcacatgaaagctggtggt

SEQ ID NO: 321936 - DNA, 33 bp, Homo sapien
ttgctccattatattcgcatgaaagctggtggt

SEQ ID NO: 321937 - DNA, 33 bp, Homo sapien
ttctaaatgcaaaatagatatgtgaaagaagaa

SEQ ID NO: 321938 - DNA, 33 bp, Homo sapien
ttctaaatgcaaaatatatatgtgaaagaagaa

SEQ ID NO: 321939 - DNA, 33 bp, Homo sapien
aataaggaaattctctaaacagcataaagcact

SEQ ID NO: 321940 - DNA, 33 bp, Homo sapien
aataaggaaattctctcaacagcataaagcact

SEQ ID NO: 321941 - DNA, 33 bp, Homo sapien
atgtctctggtcattaaccaatcatagctacca

SEQ ID NO: 321942 - DNA, 33 bp, Homo sapien
atgtctctggtcattatccaatcatagctacca

SEQ ID NO: 321943 - DNA, 33 bp, Homo sapien
tattctgcgatttaagcctccatgaaaactaag

SEQ ID NO: 321944 - DNA, 33 bp, Homo sapien
tattctgcgatttaagtctccatgaaaactaag

SEQ ID NO: 321945 - DNA, 33 bp, Homo sapien
gggagtggtgctgtaacgcctaacctctcctct

SEQ ID NO: 321946 - DNA, 33 bp, Homo sapien
gggagtggtgctgtaatgcctaacctctcctct

SEQ ID NO: 321947 - DNA, 33 bp, Homo sapien
ccatatactcaagttccacccatgtcttaagat

SEQ ID NO: 321948 - DNA, 33 bp, Homo sapien
ccatatactcaagttctacccatgtcttaagat

SEQ ID NO: 321949 - DNA, 33 bp, Homo sapien
aaatgcaaaaataaataagctagtcaatcaaca

SEQ ID NO: 321950 - DNA, 33 bp, Homo sapien
aaatgcaaaaataaatgagctagtcaatcaaca

SEQ ID NO: 321951 - DNA, 33 bp, Homo sapien
cttccataatcctataaatcgaagaaagaaaga

SEQ ID NO: 321952 - DNA, 33 bp, Homo sapien
cttccataatcctatacatcgaagaaagaaaga

SEQ ID NO: 321953 - DNA, 33 bp, Homo sapien
cttctacccagttaataaaggtatctacccata

SEQ ID NO: 321954 - DNA, 33 bp, Homo sapien
cttctacccagttaatgaaggtatctacccata

SEQ ID NO: 321955 - DNA, 33 bp, Homo sapien
ggtgtcctactgttaccgcactatctactatag

SEQ ID NO: 321956 - DNA, 33 bp, Homo sapien
ggtgtcctactgttactgcactatctactatag

SEQ ID NO: 321957 - DNA, 33 bp, Homo sapien
aatcatcttattctgtcaacctatttaatcagt

SEQ ID NO: 321958 - DNA, 33 bp, Homo sapien
aatcatcttattctgtgaacctatttaatcagt

SEQ ID NO: 321959 - DNA, 33 bp, Homo sapien
ttcatatccgctgaggccaactttacatcctca

SEQ ID NO: 321960 - DNA, 33 bp, Homo sapien
ttcatatccgctgaggtcaactttacatcctca

SEQ ID NO: 321961 - DNA, 33 bp, Homo sapien
agtctcagagtaggagaactcatgaaaggccct

SEQ ID NO: 321962 - DNA, 33 bp, Homo sapien
agtctcagagtaggagcactcatgaaaggccct

SEQ ID NO: 321963 - DNA, 33 bp, Homo sapien
attaatcactcacaaccgattgacaaaggggaa

SEQ ID NO: 321964 - DNA, 33 bp, Homo sapien
attaatcactcacaactgattgacaaaggggaa

SEQ ID NO: 321965 - DNA, 33 bp, Homo sapien
tcttggcacaggtgaaacttttcttcaaggatt

SEQ ID NO: 321966 - DNA, 33 bp, Homo sapien
tcttggcacaggtgaagcttttcttcaaggatt

SEQ ID NO: 321967 - DNA, 33 bp, Homo sapien
tagaacagtattagaacgtcacagtagctctat

SEQ ID NO: 321968 - DNA, 33 bp, Homo sapien
tagaacagtattagaatgtcacagtagctctat

SEQ ID NO: 321969 - DNA, 33 bp, Homo sapien
ttcagagtctgcacaaagggacttttaaagtct

SEQ ID NO: 321970 - DNA, 33 bp, Homo sapien
ttcagagtctgcacaaggggacttttaaagtct

SEQ ID NO: 321971 - DNA, 33 bp, Homo sapien
aattcatgctgttaaaatggctgagtatatacc

SEQ ID NO: 321972 - DNA, 33 bp, Homo sapien
aattcatgctgttaaagtggctgagtatatacc

SEQ ID NO: 321973 - DNA, 33 bp, Homo sapien
ggtaatattatgaaacagcattctttaacaccc

SEQ ID NO: 321974 - DNA, 33 bp, Homo sapien
ggtaatattatgaaacggcattctttaacaccc

SEQ ID NO: 321975 - DNA, 33 bp, Homo sapien
atccataacacttccaatatttaccactttttt

SEQ ID NO: 321976 - DNA, 33 bp, Homo sapien
atccataacacttccagtatttaccactttttt

SEQ ID NO: 321977 - DNA, 33 bp, Homo sapien
ctacaagaaaacactaaaattgagcaaggaaga

SEQ ID NO: 321978 - DNA, 33 bp, Homo sapien
ctacaagaaaacactagaattgagcaaggaaga

SEQ ID NO: 321979 - DNA, 33 bp, Homo sapien
tctaatattcatcccaatgatttaatcccttag

SEQ ID NO: 321980 - DNA, 33 bp, Homo sapien
tctaatattcatcccagtgatttaatcccttag

SEQ ID NO: 321981 - DNA, 33 bp, Homo sapien
gagtttcaaaactccaagaggatttctatgcag

SEQ ID NO: 321982 - DNA, 33 bp, Homo sapien
gagtttcaaaactccaggaggatttctatgcag

SEQ ID NO: 321983 - DNA, 33 bp, Homo sapien
acttattagagccataccattcaaggagtcagg

SEQ ID NO: 321984 - DNA, 33 bp, Homo sapien
acttattagagccatagcattcaaggagtcagg

SEQ ID NO: 321985 - DNA, 33 bp, Homo sapien
ttaatagattgcaaagactggtattctctgtta

SEQ ID NO: 321986 - DNA, 33 bp, Homo sapien
ttaatagattgcaaaggctggtattctctgtta

SEQ ID NO: 321987 - DNA, 33 bp, Homo sapien
tcgctctccttttactcggtgactcttcctctg

SEQ ID NO: 321988 - DNA, 33 bp, Homo sapien
tcgctctccttttacttggtgactcttcctctg

SEQ ID NO: 321989 - DNA, 33 bp, Homo sapien
aatgtgtagtacatcactacagggcttacccat

SEQ ID NO: 321990 - DNA, 33 bp, Homo sapien
aatgtgtagtacatcattacagggcttacccat

SEQ ID NO: 321991 - DNA, 33 bp, Homo sapien
aatttcaacatcttggcatttacaatgtgactc

SEQ ID NO: 321992 - DNA, 33 bp, Homo sapien
aatttcaacatcttggtatttacaatgtgactc

SEQ ID NO: 321993 - DNA, 33 bp, Homo sapien
ctccctctgcaactcacctcttcagtggggatc

SEQ ID NO: 321994 - DNA, 33 bp, Homo sapien
ctccctctgcaactcatctcttcagtggggatc

SEQ ID NO: 321995 - DNA, 33 bp, Homo sapien
cctggggataagcgggaagttcagatcacttgg

SEQ ID NO: 321996 - DNA, 33 bp, Homo sapien
cctggggataagcggggagttcagatcacttgg

SEQ ID NO: 321997 - DNA, 33 bp, Homo sapien
aaatgctaaaaatcagaaaacaacaggaagcat

SEQ ID NO: 321998 - DNA, 33 bp, Homo sapien
aaatgctaaaaatcaggaaacaacaggaagcat

SEQ ID NO: 321999 - DNA, 33 bp, Homo sapien
gatgcatgagaacgacacttatctttagttaat

SEQ ID NO: 322000 - DNA, 33 bp, Homo sapien
gatgcatgagaacgacgcttatctttagttaat

SEQ ID NO: 322001 - DNA, 33 bp, Homo sapien
tggcaatgtctacagacactttggttattgaaa

SEQ ID NO: 322002 - DNA, 33 bp, Homo sapien
tggcaatgtctacagatactttggttattgaaa

SEQ ID NO: 322003 - DNA, 33 bp, Homo sapien
cattaaagtttaaagagcctgtttggcagttga

SEQ ID NO: 322004 - DNA, 33 bp, Homo sapien
cattaaagtttaaagatcctgtttggcagttga

SEQ ID NO: 322005 - DNA, 33 bp, Homo sapien
aactaaaaaatgctgaacctatgaagcaaatgt

SEQ ID NO: 322006 - DNA, 33 bp, Homo sapien
aactaaaaaatgctgaccctatgaagcaaatgt

SEQ ID NO: 322007 - DNA, 33 bp, Homo sapien
agcttccttgcctaaacctgtcattcttcatta

SEQ ID NO: 322008 - DNA, 33 bp, Homo sapien
agcttccttgcctaaatctgtcattcttcatta

SEQ ID NO: 322009 - DNA, 33 bp, Homo sapien
gtttgttgtgttatcactctgattatgggaata

SEQ ID NO: 322010 - DNA, 33 bp, Homo sapien
gtttgttgtgttatcattctgattatgggaata

SEQ ID NO: 322011 - DNA, 33 bp, Homo sapien
aaagcttaaaagaacacgtaacctgagatttaa

SEQ ID NO: 322012 - DNA, 33 bp, Homo sapien
aaagcttaaaagaacatgtaacctgagatttaa

SEQ ID NO: 322013 - DNA, 33 bp, Homo sapien
gagagctccagaaacactaggtgctagcgtagg

SEQ ID NO: 322014 - DNA, 33 bp, Homo sapien
gagagctccagaaacattaggtgctagcgtagg

SEQ ID NO: 322015 - DNA, 33 bp, Homo sapien
ctcaatcatttgaatcagaaatgttagggatag

SEQ ID NO: 322016 - DNA, 33 bp, Homo sapien
ctcaatcatttgaatctgaaatgttagggatag

SEQ ID NO: 322017 - DNA, 33 bp, Homo sapien
caaagtacagtgttaaaagcagttttgggaatt

SEQ ID NO: 322018 - DNA, 33 bp, Homo sapien
caaagtacagtgttaagagcagttttgggaatt

SEQ ID NO: 322019 - DNA, 33 bp, Homo sapien
tttttcatatttgaatcaacagccttctgaaag

SEQ ID NO: 322020 - DNA, 33 bp, Homo sapien
tttttcatatttgaattaacagccttctgaaag

SEQ ID NO: 322021 - DNA, 33 bp, Homo sapien
gtgaagtcccacaatacactgtttggaagctga

SEQ ID NO: 322022 - DNA, 33 bp, Homo sapien
gtgaagtcccacaatagactgtttggaagctga

SEQ ID NO: 322023 - DNA, 33 bp, Homo sapien
cctttattgagccaaaacaaattacattgccaa

SEQ ID NO: 322024 - DNA, 33 bp, Homo sapien
cctttattgagccaaagcaaattacattgccaa

SEQ ID NO: 322025 - DNA, 33 bp, Homo sapien
tttctccataaagtaactcatctccctgctcta

SEQ ID NO: 322026 - DNA, 33 bp, Homo sapien
tttctccataaagtaattcatctccctgctcta

SEQ ID NO: 322027 - DNA, 33 bp, Homo sapien
gaagataacacataagaaccacgtagataaaat

SEQ ID NO: 322028 - DNA, 33 bp, Homo sapien
gaagataacacataaggaccacgtagataaaat

SEQ ID NO: 322029 - DNA, 33 bp, Homo sapien
tcaagatacttgactgaaaaccttattttttaa

SEQ ID NO: 322030 - DNA, 33 bp, Homo sapien
tcaagatacttgactggaaaccttattttttaa

SEQ ID NO: 322031 - DNA, 33 bp, Homo sapien
gagtgaatcatcagagacaaaaggaaagttttc

SEQ ID NO: 322032 - DNA, 33 bp, Homo sapien
gagtgaatcatcagaggcaaaaggaaagttttc

SEQ ID NO: 322033 - DNA, 33 bp, Homo sapien
ttagaggcgtggctataagaaagttaggaatac

SEQ ID NO: 322034 - DNA, 33 bp, Homo sapien
ttagaggcgtggctatgagaaagttaggaatac

SEQ ID NO: 322035 - DNA, 33 bp, Homo sapien
agggaaggaactgaaactattgggtactcaaaa

SEQ ID NO: 322036 - DNA, 33 bp, Homo sapien
agggaaggaactgaaagtattgggtactcaaaa

SEQ ID NO: 322037 - DNA, 33 bp, Homo sapien
gtatctccataattgtaaagacgggatttcatt

SEQ ID NO: 322038 - DNA, 33 bp, Homo sapien
gtatctccataattgtgaagacgggatttcatt

SEQ ID NO: 322039 - DNA, 33 bp, Homo sapien
gacacttttccattagcccagataagagatcct

SEQ ID NO: 322040 - DNA, 33 bp, Homo sapien
gacacttttccattagtccagataagagatcct

SEQ ID NO: 322041 - DNA, 33 bp, Homo sapien
atgaagcaaggaagaaaacagcagatgccatat

SEQ ID NO: 322042 - DNA, 33 bp, Homo sapien
atgaagcaaggaagaagacagcagatgccatat

SEQ ID NO: 322043 - DNA, 33 bp, Homo sapien
tgtgtgtgtatgtccactatttaattggaattt

SEQ ID NO: 322044 - DNA, 33 bp, Homo sapien
tgtgtgtgtatgtccattatttaattggaattt

SEQ ID NO: 322045 - DNA, 33 bp, Homo sapien
agagattgggtgcctacaagaaaagtgcatggc

SEQ ID NO: 322046 - DNA, 33 bp, Homo sapien
agagattgggtgcctataagaaaagtgcatggc

SEQ ID NO: 322047 - DNA, 33 bp, Homo sapien
agagccctgacttacacagcgtggcctctgcat

SEQ ID NO: 322048 - DNA, 33 bp, Homo sapien
agagccctgacttacatagcgtggcctctgcat

SEQ ID NO: 322049 - DNA, 33 bp, Homo sapien
aaagaccatataagcactacagcaagaagtagc

SEQ ID NO: 322050 - DNA, 33 bp, Homo sapien
aaagaccatataagcattacagcaagaagtagc

SEQ ID NO: 322051 - DNA, 33 bp, Homo sapien
cccatcatgttagcctcaccctcaggatctcat

SEQ ID NO: 322052 - DNA, 33 bp, Homo sapien
cccatcatgttagccttaccctcaggatctcat

SEQ ID NO: 322053 - DNA, 33 bp, Homo sapien
cgcagaacacagaataccaactcgtcttgggaa

SEQ ID NO: 322054 - DNA, 33 bp, Homo sapien
cgcagaacacagaatatcaactcgtcttgggaa

SEQ ID NO: 322055 - DNA, 33 bp, Homo sapien
tctgctctgcttgcaaacttcagtagccctgga

SEQ ID NO: 322056 - DNA, 33 bp, Homo sapien
tctgctctgcttgcaaccttcagtagccctgga

SEQ ID NO: 322057 - DNA, 33 bp, Homo sapien
agaaacatatcatatcaagcattctcggagcat

SEQ ID NO: 322058 - DNA, 33 bp, Homo sapien
agaaacatatcatatcgagcattctcggagcat

SEQ ID NO: 322059 - DNA, 33 bp, Homo sapien
atcttcttgaaattaaaagacatgcatgtaaat

SEQ ID NO: 322060 - DNA, 33 bp, Homo sapien
atcttcttgaaattaagagacatgcatgtaaat

SEQ ID NO: 322061 - DNA, 33 bp, Homo sapien
tgccatttggatttaacagtagaatcaacacta

SEQ ID NO: 322062 - DNA, 33 bp, Homo sapien
tgccatttggatttaatagtagaatcaacacta

SEQ ID NO: 322063 - DNA, 33 bp, Homo sapien
cttatctgattgtactcagactcaggtgcacag

SEQ ID NO: 322064 - DNA, 33 bp, Homo sapien
cttatctgattgtacttagactcaggtgcacag

SEQ ID NO: 322065 - DNA, 33 bp, Homo sapien
acacacattaggcttagaatgttgccatctctc

SEQ ID NO: 322066 - DNA, 33 bp, Homo sapien
acacacattaggcttataatgttgccatctctc

SEQ ID NO: 322067 - DNA, 33 bp, Homo sapien
aaaatatgctataacacgtagaagaagttggtg

SEQ ID NO: 322068 - DNA, 33 bp, Homo sapien
aaaatatgctataacaggtagaagaagttggtg

SEQ ID NO: 322069 - DNA, 33 bp, Homo sapien
aaaccatcataagaccaacaaaagccctgacca

SEQ ID NO: 322070 - DNA, 33 bp, Homo sapien
aaaccatcataagacctacaaaagccctgacca

SEQ ID NO: 322071 - DNA, 33 bp, Homo sapien
atattctagagcaaaacgttttctggaggtcct

SEQ ID NO: 322072 - DNA, 33 bp, Homo sapien
atattctagagcaaaatgttttctggaggtcct

SEQ ID NO: 322073 - DNA, 33 bp, Homo sapien
catcctcatgactctgcatagcaaacatttctt

SEQ ID NO: 322074 - DNA, 33 bp, Homo sapien
catcctcatgactctggatagcaaacatttctt

SEQ ID NO: 322075 - DNA, 33 bp, Homo sapien
catgtacgacctctcaaaaataataggagatat

SEQ ID NO: 322076 - DNA, 33 bp, Homo sapien
catgtacgacctctcagaaataataggagatat

SEQ ID NO: 322077 - DNA, 33 bp, Homo sapien
ttgtatgtttgttgcaaggcttgatatatgatc

SEQ ID NO: 322078 - DNA, 33 bp, Homo sapien
ttgtatgtttgttgcagggcttgatatatgatc

SEQ ID NO: 322079 - DNA, 33 bp, Homo sapien
gaggaaggaaagatggaaaatgaaagaggtgtt

SEQ ID NO: 322080 - DNA, 33 bp, Homo sapien
gaggaaggaaagatgggaaatgaaagaggtgtt

SEQ ID NO: 322081 - DNA, 33 bp, Homo sapien
ttacctgttcaacccacgaggaatccgagattg

SEQ ID NO: 322082 - DNA, 33 bp, Homo sapien
ttacctgttcaacccatgaggaatccgagattg

SEQ ID NO: 322083 - DNA, 33 bp, Homo sapien
tatgggctattgttcaatatagttctgcatgca

SEQ ID NO: 322084 - DNA, 33 bp, Homo sapien
tatgggctattgttcagtatagttctgcatgca

SEQ ID NO: 322085 - DNA, 33 bp, Homo sapien
tgtggtccaatgactacagccttcctctgaaat

SEQ ID NO: 322086 - DNA, 33 bp, Homo sapien
tgtggtccaatgactagagccttcctctgaaat

SEQ ID NO: 322087 - DNA, 33 bp, Homo sapien
aacatttcccctcttacgtctcacaggaagaga

SEQ ID NO: 322088 - DNA, 33 bp, Homo sapien
aacatttcccctcttatgtctcacaggaagaga

SEQ ID NO: 322089 - DNA, 33 bp, Homo sapien
cagacctcaacacaccagcattctgatttcgga

SEQ ID NO: 322090 - DNA, 33 bp, Homo sapien
cagacctcaacacaccggcattctgatttcgga

SEQ ID NO: 322091 - DNA, 33 bp, Homo sapien
tccgagccctacttacaattttgtcgtttactt

SEQ ID NO: 322092 - DNA, 33 bp, Homo sapien
tccgagccctacttacgattttgtcgtttactt

SEQ ID NO: 322093 - DNA, 33 bp, Homo sapien
gtcagacccagtcacaatgagggatttcaaaca

SEQ ID NO: 322094 - DNA, 33 bp, Homo sapien
gtcagacccagtcacagtgagggatttcaaaca

SEQ ID NO: 322095 - DNA, 33 bp, Homo sapien
gtaaatgtacacaaaacagtgacaaaatatgaa

SEQ ID NO: 322096 - DNA, 33 bp, Homo sapien
gtaaatgtacacaaaagagtgacaaaatatgaa

SEQ ID NO: 322097 - DNA, 33 bp, Homo sapien
cagcaggtgagatctcaacgattctaatggaag

SEQ ID NO: 322098 - DNA, 33 bp, Homo sapien
cagcaggtgagatctcgacgattctaatggaag

SEQ ID NO: 322099 - DNA, 33 bp, Homo sapien
tttttatgtttattgacggtttaagaagattgc

SEQ ID NO: 322100 - DNA, 33 bp, Homo sapien
tttttatgtttattgatggtttaagaagattgc

SEQ ID NO: 322101 - DNA, 33 bp, Homo sapien
tggggggccaggatatcagaaaggagagagata

SEQ ID NO: 322102 - DNA, 33 bp, Homo sapien
tggggggccaggatattagaaaggagagagata

SEQ ID NO: 322103 - DNA, 33 bp, Homo sapien
aagaattaggaattaacctagataggctgcata

SEQ ID NO: 322104 - DNA, 33 bp, Homo sapien
aagaattaggaattaagctagataggctgcata

SEQ ID NO: 322105 - DNA, 33 bp, Homo sapien
cagcatctttggagccaccctgaagaggtaata

SEQ ID NO: 322106 - DNA, 33 bp, Homo sapien
cagcatctttggagccgccctgaagaggtaata

SEQ ID NO: 322107 - DNA, 33 bp, Homo sapien
tttgctgcggacttaaaccttacaaggtaattg

SEQ ID NO: 322108 - DNA, 33 bp, Homo sapien
tttgctgcggacttaagccttacaaggtaattg

SEQ ID NO: 322109 - DNA, 33 bp, Homo sapien
gatgttcgcacaaagacaaaaatgcctaaagac

SEQ ID NO: 322110 - DNA, 33 bp, Homo sapien
gatgttcgcacaaagagaaaaatgcctaaagac

SEQ ID NO: 322111 - DNA, 33 bp, Homo sapien
ggattgtgtaagtacaatggctcctcagtattt

SEQ ID NO: 322112 - DNA, 33 bp, Homo sapien
ggattgtgtaagtacagtggctcctcagtattt

SEQ ID NO: 322113 - DNA, 33 bp, Homo sapien
ccaattccaaatgtttcaaaagaaattatggga

SEQ ID NO: 322114 - DNA, 33 bp, Homo sapien
ccaattccaaatgtttgaaaagaaattatggga

SEQ ID NO: 322115 - DNA, 33 bp, Homo sapien
tctagcagactaaaaaataagtaggtgattgta

SEQ ID NO: 322116 - DNA, 33 bp, Homo sapien
tctagcagactaaaaagtaagtaggtgattgta

SEQ ID NO: 322117 - DNA, 33 bp, Homo sapien
gcttaaagtgaactggaactgagaatcagagtg

SEQ ID NO: 322118 - DNA, 33 bp, Homo sapien
gcttaaagtgaactgggactgagaatcagagtg

SEQ ID NO: 322119 - DNA, 33 bp, Homo sapien
tccttggactgtgaccactgaaagaaaaatcac

SEQ ID NO: 322120 - DNA, 33 bp, Homo sapien
tccttggactgtgaccgctgaaagaaaaatcac

SEQ ID NO: 322121 - DNA, 33 bp, Homo sapien
attactgtacccactcccttctgaccaccagtt

SEQ ID NO: 322122 - DNA, 33 bp, Homo sapien
attactgtacccactctcttctgaccaccagtt

SEQ ID NO: 322123 - DNA, 33 bp, Homo sapien
accttgtcatgaaataaagatgattacaatgga

SEQ ID NO: 322124 - DNA, 33 bp, Homo sapien
accttgtcatgaaatacagatgattacaatgga

SEQ ID NO: 322125 - DNA, 33 bp, Homo sapien
cctgagccaataaggaacacccctctttgtgtt

SEQ ID NO: 322126 - DNA, 33 bp, Homo sapien
cctgagccaataaggaccacccctctttgtgtt

SEQ ID NO: 322127 - DNA, 33 bp, Homo sapien
actggccaaatctttacacagtatgaagtcaag

SEQ ID NO: 322128 - DNA, 33 bp, Homo sapien
actggccaaatctttatacagtatgaagtcaag

SEQ ID NO: 322129 - DNA, 33 bp, Homo sapien
aacagcctaatacttggcaacgaggtaatgact

SEQ ID NO: 322130 - DNA, 33 bp, Homo sapien
aacagcctaatacttgtcaacgaggtaatgact

SEQ ID NO: 322131 - DNA, 33 bp, Homo sapien
caccacaaaaccagaacaggacaggtcaggttt

SEQ ID NO: 322132 - DNA, 33 bp, Homo sapien
caccacaaaaccagaagaggacaggtcaggttt

SEQ ID NO: 322133 - DNA, 33 bp, Homo sapien
tgctcttttatgtagcaagtggaagtaccatat

SEQ ID NO: 322134 - DNA, 33 bp, Homo sapien
tgctcttttatgtagcgagtggaagtaccatat

SEQ ID NO: 322135 - DNA, 33 bp, Homo sapien
tgaaatatcacacatccattcaatgcaacaaac

SEQ ID NO: 322136 - DNA, 33 bp, Homo sapien
tgaaatatcacacatctattcaatgcaacaaac

SEQ ID NO: 322137 - DNA, 33 bp, Homo sapien
atgtaagctcacttcaataaatttaacttgaat

SEQ ID NO: 322138 - DNA, 33 bp, Homo sapien
atgtaagctcacttcagtaaatttaacttgaat

SEQ ID NO: 322139 - DNA, 33 bp, Homo sapien
agacaacatgtgaaacaaaagctaatctgagaa

SEQ ID NO: 322140 - DNA, 33 bp, Homo sapien
agacaacatgtgaaacgaaagctaatctgagaa

SEQ ID NO: 322141 - DNA, 33 bp, Homo sapien
ttaattttatgaatgaaacaagaggcaaatctg

SEQ ID NO: 322142 - DNA, 33 bp, Homo sapien
ttaattttatgaatgagacaagaggcaaatctg

SEQ ID NO: 322143 - DNA, 33 bp, Homo sapien
gtgctatattctgagacaaaatgatgacaactt

SEQ ID NO: 322144 - DNA, 33 bp, Homo sapien
gtgctatattctgagataaaatgatgacaactt

SEQ ID NO: 322145 - DNA, 33 bp, Homo sapien
ctgcctacttggataccctttctgtaatgaagg

SEQ ID NO: 322146 - DNA, 33 bp, Homo sapien
ctgcctacttggatactctttctgtaatgaagg

SEQ ID NO: 322147 - DNA, 33 bp, Homo sapien
tttacaagcctgcataccttggtaaatgttggc

SEQ ID NO: 322148 - DNA, 33 bp, Homo sapien
tttacaagcctgcatatcttggtaaatgttggc

SEQ ID NO: 322149 - DNA, 33 bp, Homo sapien
tagctgttaagatttcaaatttaagtgattctt

SEQ ID NO: 322150 - DNA, 33 bp, Homo sapien
tagctgttaagatttcgaatttaagtgattctt

SEQ ID NO: 322151 - DNA, 33 bp, Homo sapien
aaaatttagtgcatgactaatatacaggtgtta

SEQ ID NO: 322152 - DNA, 33 bp, Homo sapien
aaaatttagtgcatgattaatatacaggtgtta

SEQ ID NO: 322153 - DNA, 33 bp, Homo sapien
aataaaagcatgaatgaacttgtattcccatgt

SEQ ID NO: 322154 - DNA, 33 bp, Homo sapien
aataaaagcatgaatgcacttgtattcccatgt

SEQ ID NO: 322155 - DNA, 33 bp, Homo sapien
cttaagagtagctcaacaagtctgagttctttc

SEQ ID NO: 322156 - DNA, 33 bp, Homo sapien
cttaagagtagctcaataagtctgagttctttc

SEQ ID NO: 322157 - DNA, 33 bp, Homo sapien
catcttagtctcaaaagagttttgcaaacttgt

SEQ ID NO: 322158 - DNA, 33 bp, Homo sapien
catcttagtctcaaaatagttttgcaaacttgt

SEQ ID NO: 322159 - DNA, 33 bp, Homo sapien
agtcaaatgagttatacggtcaattatctgaga

SEQ ID NO: 322160 - DNA, 33 bp, Homo sapien
agtcaaatgagttatatggtcaattatctgaga

SEQ ID NO: 322161 - DNA, 33 bp, Homo sapien
aaaatttatgttcaagcctgaataccaatcaca

SEQ ID NO: 322162 - DNA, 33 bp, Homo sapien
aaaatttatgttcaaggctgaataccaatcaca

SEQ ID NO: 322163 - DNA, 33 bp, Homo sapien
ctatcattcctcaaaaccccatattccgattgc

SEQ ID NO: 322164 - DNA, 33 bp, Homo sapien
ctatcattcctcaaaatcccatattccgattgc

SEQ ID NO: 322165 - DNA, 33 bp, Homo sapien
ttcttactcatcctctaaccaaaagtgcagagc

SEQ ID NO: 322166 - DNA, 33 bp, Homo sapien
ttcttactcatcctctgaccaaaagtgcagagc

SEQ ID NO: 322167 - DNA, 33 bp, Homo sapien
gtatttgcttttgttcactaataaaggagagac

SEQ ID NO: 322168 - DNA, 33 bp, Homo sapien
gtatttgcttttgttcgctaataaaggagagac

SEQ ID NO: 322169 - DNA, 33 bp, Homo sapien
gcaatgggcatagacacagatcctttcagctta

SEQ ID NO: 322170 - DNA, 33 bp, Homo sapien
gcaatgggcatagacagagatcctttcagctta

SEQ ID NO: 322171 - DNA, 33 bp, Homo sapien
ttatcatccaggaaagaaactgatttgaggaaa

SEQ ID NO: 322172 - DNA, 33 bp, Homo sapien
ttatcatccaggaaaggaactgatttgaggaaa

SEQ ID NO: 322173 - DNA, 33 bp, Homo sapien
gtgttgttttagcccaccaagtttgtggtaatt

SEQ ID NO: 322174 - DNA, 33 bp, Homo sapien
gtgttgttttagcccatcaagtttgtggtaatt

SEQ ID NO: 322175 - DNA, 33 bp, Homo sapien
agacactctggctattcaactcaactcacaaga

SEQ ID NO: 322176 - DNA, 33 bp, Homo sapien
agacactctggctatttaactcaactcacaaga

SEQ ID NO: 322177 - DNA, 33 bp, Homo sapien
ataagaaaattagccaatacttagtgacctttt

SEQ ID NO: 322178 - DNA, 33 bp, Homo sapien
ataagaaaattagccagtacttagtgacctttt

SEQ ID NO: 322179 - DNA, 33 bp, Homo sapien
caaataagttaaacaacttgcttcatgccacaa

SEQ ID NO: 322180 - DNA, 33 bp, Homo sapien
caaataagttaaacaagttgcttcatgccacaa

SEQ ID NO: 322181 - DNA, 33 bp, Homo sapien
atcagaaaaagcacaaaaacacaaaaatgccat

SEQ ID NO: 322182 - DNA, 33 bp, Homo sapien
atcagaaaaagcacaagaacacaaaaatgccat

SEQ ID NO: 322183 - DNA, 33 bp, Homo sapien
gtcgttaagttgtacaaaggacttctcactgtg

SEQ ID NO: 322184 - DNA, 33 bp, Homo sapien
gtcgttaagttgtacagaggacttctcactgtg

SEQ ID NO: 322185 - DNA, 33 bp, Homo sapien
catcaggtatgttcaaaatggtgacaagaagga

SEQ ID NO: 322186 - DNA, 33 bp, Homo sapien
catcaggtatgttcaagatggtgacaagaagga

SEQ ID NO: 322187 - DNA, 33 bp, Homo sapien
tatttcagtgtttcccaatataatttttatcac

SEQ ID NO: 322188 - DNA, 33 bp, Homo sapien
tatttcagtgtttcccgatataatttttatcac

SEQ ID NO: 322189 - DNA, 33 bp, Homo sapien
gctctcaataggcctgcagttgaggagaagttc

SEQ ID NO: 322190 - DNA, 33 bp, Homo sapien
gctctcaataggcctggagttgaggagaagttc

SEQ ID NO: 322191 - DNA, 33 bp, Homo sapien
tctgtttcattatgcaacatctttggagtcctc

SEQ ID NO: 322192 - DNA, 33 bp, Homo sapien
tctgtttcattatgcagcatctttggagtcctc

SEQ ID NO: 322193 - DNA, 33 bp, Homo sapien
gattagccctgttttcacactgtcagctctttt

SEQ ID NO: 322194 - DNA, 33 bp, Homo sapien
gattagccctgttttcgcactgtcagctctttt

SEQ ID NO: 322195 - DNA, 33 bp, Homo sapien
gaggatgttggtaaaacgctattcaatttagtg

SEQ ID NO: 322196 - DNA, 33 bp, Homo sapien
gaggatgttggtaaaatgctattcaatttagtg

SEQ ID NO: 322197 - DNA, 33 bp, Homo sapien
gaccttctcagcttcagtatgcctgacatatgt

SEQ ID NO: 322198 - DNA, 33 bp, Homo sapien
gaccttctcagcttcattatgcctgacatatgt

SEQ ID NO: 322199 - DNA, 33 bp, Homo sapien
tgaataatgatatttaagacgcacctactatgt

SEQ ID NO: 322200 - DNA, 33 bp, Homo sapien
tgaataatgatatttaggacgcacctactatgt

SEQ ID NO: 322201 - DNA, 33 bp, Homo sapien
aatcactatactaagagatacaaatgcattaac

SEQ ID NO: 322202 - DNA, 33 bp, Homo sapien
aatcactatactaagatatacaaatgcattaac

SEQ ID NO: 322203 - DNA, 33 bp, Homo sapien
attgcacaatacagtagaagttactgacgttat

SEQ ID NO: 322204 - DNA, 33 bp, Homo sapien
attgcacaatacagtataagttactgacgttat

SEQ ID NO: 322205 - DNA, 33 bp, Homo sapien
actctaggaatgctgccaactctggcactcctg

SEQ ID NO: 322206 - DNA, 33 bp, Homo sapien
actctaggaatgctgctaactctggcactcctg

SEQ ID NO: 322207 - DNA, 33 bp, Homo sapien
tggtattcccgcaggcaacaaaattctctttta

SEQ ID NO: 322208 - DNA, 33 bp, Homo sapien
tggtattcccgcaggcgacaaaattctctttta

SEQ ID NO: 322209 - DNA, 33 bp, Homo sapien
gagattactatgccaacattttaggctgacatc

SEQ ID NO: 322210 - DNA, 33 bp, Homo sapien
gagattactatgccaatattttaggctgacatc

SEQ ID NO: 322211 - DNA, 33 bp, Homo sapien
taaatttgacagattaataaaagagctcatctg

SEQ ID NO: 322212 - DNA, 33 bp, Homo sapien
taaatttgacagattattaaaagagctcatctg

SEQ ID NO: 322213 - DNA, 33 bp, Homo sapien
tagaagtgcaccaggcaaaaaaacaaaacaaaa

SEQ ID NO: 322214 - DNA, 33 bp, Homo sapien
tagaagtgcaccaggccaaaaaacaaaacaaaa

SEQ ID NO: 322215 - DNA, 33 bp, Homo sapien
caggcaacaaaagatcaagcatactacaggcaa

SEQ ID NO: 322216 - DNA, 33 bp, Homo sapien
caggcaacaaaagatcgagcatactacaggcaa

SEQ ID NO: 322217 - DNA, 33 bp, Homo sapien
taaaatcaaatctctcactttccacaattgaca

SEQ ID NO: 322218 - DNA, 33 bp, Homo sapien
taaaatcaaatctctcgctttccacaattgaca

SEQ ID NO: 322219 - DNA, 33 bp, Homo sapien
aatttgtttaggtacaaaagcagtgctttccca

SEQ ID NO: 322220 - DNA, 33 bp, Homo sapien
aatttgtttaggtacagaagcagtgctttccca

SEQ ID NO: 322221 - DNA, 33 bp, Homo sapien
ctatgcttagattccaccatttttctggctaag

SEQ ID NO: 322222 - DNA, 33 bp, Homo sapien
ctatgcttagattccagcatttttctggctaag

SEQ ID NO: 322223 - DNA, 33 bp, Homo sapien
gatctggataaactaaataatctacaggcctta

SEQ ID NO: 322224 - DNA, 33 bp, Homo sapien
gatctggataaactaagtaatctacaggcctta

SEQ ID NO: 322225 - DNA, 33 bp, Homo sapien
aaagtcaacctatttacgatgaatgctatcgta

SEQ ID NO: 322226 - DNA, 33 bp, Homo sapien
aaagtcaacctatttatgatgaatgctatcgta

SEQ ID NO: 322227 - DNA, 33 bp, Homo sapien
agatgttcaatgggtaagagtctattttctgtg

SEQ ID NO: 322228 - DNA, 33 bp, Homo sapien
agatgttcaatgggtaggagtctattttctgtg

SEQ ID NO: 322229 - DNA, 33 bp, Homo sapien
gtactgaggtggagaaatacttctagtgcccaa

SEQ ID NO: 322230 - DNA, 33 bp, Homo sapien
gtactgaggtggagaattacttctagtgcccaa

SEQ ID NO: 322231 - DNA, 33 bp, Homo sapien
aagctataggtatgtcaaaagagctagaaaggc

SEQ ID NO: 322232 - DNA, 33 bp, Homo sapien
aagctataggtatgtcgaaagagctagaaaggc

SEQ ID NO: 322233 - DNA, 33 bp, Homo sapien
tggtgtttgaagtgaaacttttagcacagttga

SEQ ID NO: 322234 - DNA, 33 bp, Homo sapien
tggtgtttgaagtgaagcttttagcacagttga

SEQ ID NO: 322235 - DNA, 33 bp, Homo sapien
gttaaaatttgaaacacgtggatctagctagca

SEQ ID NO: 322236 - DNA, 33 bp, Homo sapien
gttaaaatttgaaacatgtggatctagctagca

SEQ ID NO: 322237 - DNA, 33 bp, Homo sapien
attcttatctcaaaccaataaacagatgcaaac

SEQ ID NO: 322238 - DNA, 33 bp, Homo sapien
attcttatctcaaaccgataaacagatgcaaac

SEQ ID NO: 322239 - DNA, 33 bp, Homo sapien
tttattggtgttccacagctaaaatcgctgacc

SEQ ID NO: 322240 - DNA, 33 bp, Homo sapien
tttattggtgttccacggctaaaatcgctgacc

SEQ ID NO: 322241 - DNA, 33 bp, Homo sapien
tttctgcaaaacactgacacttggatgtctatc

SEQ ID NO: 322242 - DNA, 33 bp, Homo sapien
tttctgcaaaacactgtcacttggatgtctatc

SEQ ID NO: 322243 - DNA, 33 bp, Homo sapien
ccaacacaccatagtaaatgtctacaggataaa

SEQ ID NO: 322244 - DNA, 33 bp, Homo sapien
ccaacacaccatagtacatgtctacaggataaa

SEQ ID NO: 322245 - DNA, 33 bp, Homo sapien
tttatcccaaaatgtaataagtgtggaggtagg

SEQ ID NO: 322246 - DNA, 33 bp, Homo sapien
tttatcccaaaatgtagtaagtgtggaggtagg

SEQ ID NO: 322247 - DNA, 33 bp, Homo sapien
acctccaactttgaacactgtggtcaagaggtt

SEQ ID NO: 322248 - DNA, 33 bp, Homo sapien
acctccaactttgaactctgtggtcaagaggtt

SEQ ID NO: 322249 - DNA, 33 bp, Homo sapien
acacaatggagcatgaataatgagactcttcaa

SEQ ID NO: 322250 - DNA, 33 bp, Homo sapien
acacaatggagcatgattaatgagactcttcaa

SEQ ID NO: 322251 - DNA, 33 bp, Homo sapien
agaatgaaggaggttaaaattgttactggatct

SEQ ID NO: 322252 - DNA, 33 bp, Homo sapien
agaatgaaggaggttagaattgttactggatct

SEQ ID NO: 322253 - DNA, 33 bp, Homo sapien
agcaaagcaggaagtaccaatgcaattaaaact

SEQ ID NO: 322254 - DNA, 33 bp, Homo sapien
agcaaagcaggaagtagcaatgcaattaaaact

SEQ ID NO: 322255 - DNA, 33 bp, Homo sapien
tgattgtcatctcaaacactttaatcccccacc

SEQ ID NO: 322256 - DNA, 33 bp, Homo sapien
tgattgtcatctcaaatactttaatcccccacc

SEQ ID NO: 322257 - DNA, 33 bp, Homo sapien
gtatcagcagaataaccgaccagtgtttgagaa

SEQ ID NO: 322258 - DNA, 33 bp, Homo sapien
gtatcagcagaataactgaccagtgtttgagaa

SEQ ID NO: 322259 - DNA, 33 bp, Homo sapien
atgggccaaagttcctaaagtctaatgagcgag

SEQ ID NO: 322260 - DNA, 33 bp, Homo sapien
atgggccaaagttcctgaagtctaatgagcgag

SEQ ID NO: 322261 - DNA, 33 bp, Homo sapien
gagcaaatgcacaaaacttcacaagacctttgc

SEQ ID NO: 322262 - DNA, 33 bp, Homo sapien
gagcaaatgcacaaaatttcacaagacctttgc

SEQ ID NO: 322263 - DNA, 33 bp, Homo sapien
ttaagccatggacaaacaaattttgagttgatt

SEQ ID NO: 322264 - DNA, 33 bp, Homo sapien
ttaagccatggacaaataaattttgagttgatt

SEQ ID NO: 322265 - DNA, 33 bp, Homo sapien
tgcactcatctctacacgtatgaaagttgtgtt

SEQ ID NO: 322266 - DNA, 33 bp, Homo sapien
tgcactcatctctacatgtatgaaagttgtgtt

SEQ ID NO: 322267 - DNA, 33 bp, Homo sapien
caccatctgctcattacctgtcaagaggggact

SEQ ID NO: 322268 - DNA, 33 bp, Homo sapien
caccatctgctcattatctgtcaagaggggact

SEQ ID NO: 322269 - DNA, 33 bp, Homo sapien
aacaagcatatccaaactgagatagaacagtga

SEQ ID NO: 322270 - DNA, 33 bp, Homo sapien
aacaagcatatccaaattgagatagaacagtga

SEQ ID NO: 322271 - DNA, 33 bp, Homo sapien
atgctcattcttagaacctcgtacttgagaatt

SEQ ID NO: 322272 - DNA, 33 bp, Homo sapien
atgctcattcttagaatctcgtacttgagaatt

SEQ ID NO: 322273 - DNA, 33 bp, Homo sapien
gaggatagggtaatgaaaagccagctcgtgtgc

SEQ ID NO: 322274 - DNA, 33 bp, Homo sapien
gaggatagggtaatgacaagccagctcgtgtgc

SEQ ID NO: 322275 - DNA, 33 bp, Homo sapien
tccatttagtaaagaacttaggatacaatgata

SEQ ID NO: 322276 - DNA, 33 bp, Homo sapien
tccatttagtaaagaatttaggatacaatgata

SEQ ID NO: 322277 - DNA, 33 bp, Homo sapien
ccctttaagtgaatgaatataaaactgaatcta

SEQ ID NO: 322278 - DNA, 33 bp, Homo sapien
ccctttaagtgaatgagtataaaactgaatcta

SEQ ID NO: 322279 - DNA, 33 bp, Homo sapien
gttttgagggtttacactggaaagaaaaatctc

SEQ ID NO: 322280 - DNA, 33 bp, Homo sapien
gttttgagggtttacattggaaagaaaaatctc

SEQ ID NO: 322281 - DNA, 33 bp, Homo sapien
cttcctaaggtatttaacaaagtcatgtcacaa

SEQ ID NO: 322282 - DNA, 33 bp, Homo sapien
cttcctaaggtatttatcaaagtcatgtcacaa

SEQ ID NO: 322283 - DNA, 33 bp, Homo sapien
aagatgtaattgctcaaatgaagggcagccatc

SEQ ID NO: 322284 - DNA, 33 bp, Homo sapien
aagatgtaattgctcagatgaagggcagccatc

SEQ ID NO: 322285 - DNA, 33 bp, Homo sapien
ctagtggcttcctaaacgtttagtgttctaatc

SEQ ID NO: 322286 - DNA, 33 bp, Homo sapien
ctagtggcttcctaaaggtttagtgttctaatc

SEQ ID NO: 322287 - DNA, 33 bp, Homo sapien
aacacatactttttgaaaatatgctcagcagag

SEQ ID NO: 322288 - DNA, 33 bp, Homo sapien
aacacatactttttgacaatatgctcagcagag

SEQ ID NO: 322289 - DNA, 33 bp, Homo sapien
aacaaaacctcacccaataggatgtaaatccac

SEQ ID NO: 322290 - DNA, 33 bp, Homo sapien
aacaaaacctcacccagtaggatgtaaatccac

SEQ ID NO: 322291 - DNA, 33 bp, Homo sapien
ttctgaaactgcgagacgttaaaaagccatatt

SEQ ID NO: 322292 - DNA, 33 bp, Homo sapien
ttctgaaactgcgagatgttaaaaagccatatt

SEQ ID NO: 322293 - DNA, 33 bp, Homo sapien
ggcagagctaagatataagccaatgcagtctgg

SEQ ID NO: 322294 - DNA, 33 bp, Homo sapien
ggcagagctaagatatgagccaatgcagtctgg

SEQ ID NO: 322295 - DNA, 33 bp, Homo sapien
tgtttctgtagaaaacaatgtcatcttaagaat

SEQ ID NO: 322296 - DNA, 33 bp, Homo sapien
tgtttctgtagaaaacgatgtcatcttaagaat

SEQ ID NO: 322297 - DNA, 33 bp, Homo sapien
acttctcaagcaggtaagcgttatctcctcaac

SEQ ID NO: 322298 - DNA, 33 bp, Homo sapien
acttctcaagcaggtatgcgttatctcctcaac

SEQ ID NO: 322299 - DNA, 33 bp, Homo sapien
ttgtagacacaccttgaaagtattccaaatgta

SEQ ID NO: 322300 - DNA, 33 bp, Homo sapien
ttgtagacacaccttgcaagtattccaaatgta

SEQ ID NO: 322301 - DNA, 33 bp, Homo sapien
aggagaaagaactgcacaatgtctaaggaaaag

SEQ ID NO: 322302 - DNA, 33 bp, Homo sapien
aggagaaagaactgcagaatgtctaaggaaaag

SEQ ID NO: 322303 - DNA, 33 bp, Homo sapien
tagcttcttctcctcacatcttgttaagtgaaa

SEQ ID NO: 322304 - DNA, 33 bp, Homo sapien
tagcttcttctcctcatatcttgttaagtgaaa

SEQ ID NO: 322305 - DNA, 33 bp, Homo sapien
tcatccagttactgaaatgtttattgaattgga

SEQ ID NO: 322306 - DNA, 33 bp, Homo sapien
tcatccagttactgaagtgtttattgaattgga

SEQ ID NO: 322307 - DNA, 33 bp, Homo sapien
ttaaaattcctagtcaccttatatattgtggat

SEQ ID NO: 322308 - DNA, 33 bp, Homo sapien
ttaaaattcctagtcatcttatatattgtggat

SEQ ID NO: 322309 - DNA, 33 bp, Homo sapien
caaactctttttcttacggcttgcctacacttg

SEQ ID NO: 322310 - DNA, 33 bp, Homo sapien
caaactctttttcttatggcttgcctacacttg

SEQ ID NO: 322311 - DNA, 33 bp, Homo sapien
ttcctcttatcgcccaaatgaatcattagtgag

SEQ ID NO: 322312 - DNA, 33 bp, Homo sapien
ttcctcttatcgcccagatgaatcattagtgag

SEQ ID NO: 322313 - DNA, 33 bp, Homo sapien
caggtcttcactattccaaaaactctttcccag

SEQ ID NO: 322314 - DNA, 33 bp, Homo sapien
caggtcttcactattcgaaaaactctttcccag

SEQ ID NO: 322315 - DNA, 33 bp, Homo sapien
tggctttgaacaaacccggaggaagacaaagag

SEQ ID NO: 322316 - DNA, 33 bp, Homo sapien
tggctttgaacaaacctggaggaagacaaagag

SEQ ID NO: 322317 - DNA, 33 bp, Homo sapien
tgtttttccagaaaaaagttccaatcttcaatg

SEQ ID NO: 322318 - DNA, 33 bp, Homo sapien
tgtttttccagaaaaaggttccaatcttcaatg

SEQ ID NO: 322319 - DNA, 33 bp, Homo sapien
taccttttcaaacaaaataatcatctgaaggtc

SEQ ID NO: 322320 - DNA, 33 bp, Homo sapien
taccttttcaaacaaagtaatcatctgaaggtc

SEQ ID NO: 322321 - DNA, 33 bp, Homo sapien
tctcccttgtccctcacaataagcagaaaatat

SEQ ID NO: 322322 - DNA, 33 bp, Homo sapien
tctcccttgtccctcagaataagcagaaaatat

SEQ ID NO: 322323 - DNA, 33 bp, Homo sapien
acacgaggcaatattgcagtccacagggaatgg

SEQ ID NO: 322324 - DNA, 33 bp, Homo sapien
acacgaggcaatattgtagtccacagggaatgg

SEQ ID NO: 322325 - DNA, 33 bp, Homo sapien
cttgcaacaaaatatcgccatcatgaaaagtcc

SEQ ID NO: 322326 - DNA, 33 bp, Homo sapien
cttgcaacaaaatatctccatcatgaaaagtcc

SEQ ID NO: 322327 - DNA, 33 bp, Homo sapien
tctgtcaactactatacatgcctttaattctga

SEQ ID NO: 322328 - DNA, 33 bp, Homo sapien
tctgtcaactactatatatgcctttaattctga

SEQ ID NO: 322329 - DNA, 33 bp, Homo sapien
ctacatgtaattcttaccccaatacacaagaaa

SEQ ID NO: 322330 - DNA, 33 bp, Homo sapien
ctacatgtaattcttatcccaatacacaagaaa

SEQ ID NO: 322331 - DNA, 33 bp, Homo sapien
tacaatgcaggtgcaacagtctaccacctgtca

SEQ ID NO: 322332 - DNA, 33 bp, Homo sapien
tacaatgcaggtgcaatagtctaccacctgtca

SEQ ID NO: 322333 - DNA, 33 bp, Homo sapien
ctcctgctttgaataaatggaataatttctgtt

SEQ ID NO: 322334 - DNA, 33 bp, Homo sapien
ctcctgctttgaataactggaataatttctgtt

SEQ ID NO: 322335 - DNA, 33 bp, Homo sapien
catctatgattatctccgacactattttatttc

SEQ ID NO: 322336 - DNA, 33 bp, Homo sapien
catctatgattatctctgacactattttatttc

SEQ ID NO: 322337 - DNA, 33 bp, Homo sapien
ttgccatacatagtccacagatttctcctgata

SEQ ID NO: 322338 - DNA, 33 bp, Homo sapien
ttgccatacatagtccgcagatttctcctgata

SEQ ID NO: 322339 - DNA, 33 bp, Homo sapien
aagtcttactagtcaaaggaagaatgtttctct

SEQ ID NO: 322340 - DNA, 33 bp, Homo sapien
aagtcttactagtcaatggaagaatgtttctct

SEQ ID NO: 322341 - DNA, 33 bp, Homo sapien
agggaattttacagaaacatctctaagaacttc

SEQ ID NO: 322342 - DNA, 33 bp, Homo sapien
agggaattttacagaagcatctctaagaacttc

SEQ ID NO: 322343 - DNA, 33 bp, Homo sapien
tagcatttaggaatcaggtactgttagtgtcaa

SEQ ID NO: 322344 - DNA, 33 bp, Homo sapien
tagcatttaggaatcatgtactgttagtgtcaa

SEQ ID NO: 322345 - DNA, 33 bp, Homo sapien
gctcacctcaagtcaacgtcactttgtattaat

SEQ ID NO: 322346 - DNA, 33 bp, Homo sapien
gctcacctcaagtcaatgtcactttgtattaat

SEQ ID NO: 322347 - DNA, 33 bp, Homo sapien
ggactattctcatgaaaaagtacacagtactgt

SEQ ID NO: 322348 - DNA, 33 bp, Homo sapien
ggactattctcatgaagaagtacacagtactgt

SEQ ID NO: 322349 - DNA, 33 bp, Homo sapien
caaccacctgttaaaccgcatttgtcaaacctg

SEQ ID NO: 322350 - DNA, 33 bp, Homo sapien
caaccacctgttaaactgcatttgtcaaacctg

SEQ ID NO: 322351 - DNA, 33 bp, Homo sapien
caggatatagataatacgtttttgcagaacaat

SEQ ID NO: 322352 - DNA, 33 bp, Homo sapien
caggatatagataatatgtttttgcagaacaat

SEQ ID NO: 322353 - DNA, 33 bp, Homo sapien
aattttggtgcatccacatatctaacaatggac

SEQ ID NO: 322354 - DNA, 33 bp, Homo sapien
aattttggtgcatccatatatctaacaatggac

SEQ ID NO: 322355 - DNA, 33 bp, Homo sapien
gattaaccattcttacaagtgggatctccttca

SEQ ID NO: 322356 - DNA, 33 bp, Homo sapien
gattaaccattcttacgagtgggatctccttca

SEQ ID NO: 322357 - DNA, 33 bp, Homo sapien
ttttcttgtcatctataagactctcaatttctt

SEQ ID NO: 322358 - DNA, 33 bp, Homo sapien
ttttcttgtcatctatgagactctcaatttctt

SEQ ID NO: 322359 - DNA, 33 bp, Homo sapien
aactttctgtaaagaacggattgtcaaaaattt

SEQ ID NO: 322360 - DNA, 33 bp, Homo sapien
aactttctgtaaagaatggattgtcaaaaattt

SEQ ID NO: 322361 - DNA, 33 bp, Homo sapien
cctacttttctgtataacttgctctaaggtcac

SEQ ID NO: 322362 - DNA, 33 bp, Homo sapien
cctacttttctgtatatcttgctctaaggtcac

SEQ ID NO: 322363 - DNA, 33 bp, Homo sapien
ctgaaaaagctacacactgatgtactcaaatta

SEQ ID NO: 322364 - DNA, 33 bp, Homo sapien
ctgaaaaagctacacattgatgtactcaaatta

SEQ ID NO: 322365 - DNA, 33 bp, Homo sapien
agaaagttagaacagcacagatgaataggtgaa

SEQ ID NO: 322366 - DNA, 33 bp, Homo sapien
agaaagttagaacagcgcagatgaataggtgaa

SEQ ID NO: 322367 - DNA, 33 bp, Homo sapien
gttgaagaggtgaagcagaagggatttttgcca

SEQ ID NO: 322368 - DNA, 33 bp, Homo sapien
gttgaagaggtgaagcggaagggatttttgcca

SEQ ID NO: 322369 - DNA, 33 bp, Homo sapien
taataaaactattcccaatgacactgtgatagt

SEQ ID NO: 322370 - DNA, 33 bp, Homo sapien
taataaaactattccccatgacactgtgatagt

SEQ ID NO: 322371 - DNA, 33 bp, Homo sapien
atatttattgatacacaggtctatactttttaa

SEQ ID NO: 322372 - DNA, 33 bp, Homo sapien
atatttattgatacacgggtctatactttttaa

SEQ ID NO: 322373 - DNA, 33 bp, Homo sapien
tcatgactgacaaccaactaacaccagaggctc

SEQ ID NO: 322374 - DNA, 33 bp, Homo sapien
tcatgactgacaaccatctaacaccagaggctc

SEQ ID NO: 322375 - DNA, 33 bp, Homo sapien
tgactgggctttgaatcacctctaagacttctg

SEQ ID NO: 322376 - DNA, 33 bp, Homo sapien
tgactgggctttgaattacctctaagacttctg

SEQ ID NO: 322377 - DNA, 33 bp, Homo sapien
atattgacaacatatcagaatgggaaagggaga

SEQ ID NO: 322378 - DNA, 33 bp, Homo sapien
atattgacaacatatcggaatgggaaagggaga

SEQ ID NO: 322379 - DNA, 33 bp, Homo sapien
tgagaaaaatgaagaccggctacagaaaacaag

SEQ ID NO: 322380 - DNA, 33 bp, Homo sapien
tgagaaaaatgaagactggctacagaaaacaag

SEQ ID NO: 322381 - DNA, 33 bp, Homo sapien
ttagtacataaaattcaaatctgggaccattat

SEQ ID NO: 322382 - DNA, 33 bp, Homo sapien
ttagtacataaaattcgaatctgggaccattat

SEQ ID NO: 322383 - DNA, 33 bp, Homo sapien
gggtggagtttcaaaagagttttggtcaatgta

SEQ ID NO: 322384 - DNA, 33 bp, Homo sapien
gggtggagtttcaaaatagttttggtcaatgta

SEQ ID NO: 322385 - DNA, 33 bp, Homo sapien
gaaagactgaagacataatgataaaatttacaa

SEQ ID NO: 322386 - DNA, 33 bp, Homo sapien
gaaagactgaagacatgatgataaaatttacaa

SEQ ID NO: 322387 - DNA, 33 bp, Homo sapien
tttccatgttaaaataataggcttcttgggaag

SEQ ID NO: 322388 - DNA, 33 bp, Homo sapien
tttccatgttaaaatagtaggcttcttgggaag

SEQ ID NO: 322389 - DNA, 33 bp, Homo sapien
ctgaccaagaaagatacaatctactggaaatcc

SEQ ID NO: 322390 - DNA, 33 bp, Homo sapien
ctgaccaagaaagatataatctactggaaatcc

SEQ ID NO: 322391 - DNA, 33 bp, Homo sapien
tacccatctcagcaaaattctttctcatagtgt

SEQ ID NO: 322392 - DNA, 33 bp, Homo sapien
tacccatctcagcaaagttctttctcatagtgt

SEQ ID NO: 322393 - DNA, 33 bp, Homo sapien
tgatactctactataagcatttgcctgaggctc

SEQ ID NO: 322394 - DNA, 33 bp, Homo sapien
tgatactctactataatcatttgcctgaggctc

SEQ ID NO: 322395 - DNA, 33 bp, Homo sapien
ttttttaggcttatctcaatgttcataaaaaaa

SEQ ID NO: 322396 - DNA, 33 bp, Homo sapien
ttttttaggcttatcttaatgttcataaaaaaa

SEQ ID NO: 322397 - DNA, 33 bp, Homo sapien
actttgcttgtagctcaaactccatctttttta

SEQ ID NO: 322398 - DNA, 33 bp, Homo sapien
actttgcttgtagctcgaactccatctttttta

SEQ ID NO: 322399 - DNA, 33 bp, Homo sapien
ggaattccacattggcaaaataatcaaatagat

SEQ ID NO: 322400 - DNA, 33 bp, Homo sapien
ggaattccacattggcgaaataatcaaatagat

SEQ ID NO: 322401 - DNA, 33 bp, Homo sapien
gatatgagacatatcaatcaaggtcctggtagg

SEQ ID NO: 322402 - DNA, 33 bp, Homo sapien
gatatgagacatatcagtcaaggtcctggtagg

SEQ ID NO: 322403 - DNA, 33 bp, Homo sapien
ggaaatccatgagaataatagatagggaagatt

SEQ ID NO: 322404 - DNA, 33 bp, Homo sapien
ggaaatccatgagaattatagatagggaagatt

SEQ ID NO: 322405 - DNA, 33 bp, Homo sapien
gtgaaccccaaatgataatagtttcagatttct

SEQ ID NO: 322406 - DNA, 33 bp, Homo sapien
gtgaaccccaaatgatgatagtttcagatttct

SEQ ID NO: 322407 - DNA, 33 bp, Homo sapien
ccctatcagagagcaccgtctatttcctgcatt

SEQ ID NO: 322408 - DNA, 33 bp, Homo sapien
ccctatcagagagcactgtctatttcctgcatt

SEQ ID NO: 322409 - DNA, 33 bp, Homo sapien
taagcaacctcacataccaccccaagttataaa

SEQ ID NO: 322410 - DNA, 33 bp, Homo sapien
taagcaacctcacatatcaccccaagttataaa

SEQ ID NO: 322411 - DNA, 33 bp, Homo sapien
gatcattcagctgcaaactagaccttgtggata

SEQ ID NO: 322412 - DNA, 33 bp, Homo sapien
gatcattcagctgcaacctagaccttgtggata

SEQ ID NO: 322413 - DNA, 33 bp, Homo sapien
tacacactggtaacaacatccaagatcatttga

SEQ ID NO: 322414 - DNA, 33 bp, Homo sapien
tacacactggtaacaatatccaagatcatttga

SEQ ID NO: 322415 - DNA, 33 bp, Homo sapien
taagacaagtagggtcactagaaaatgcagaga

SEQ ID NO: 322416 - DNA, 33 bp, Homo sapien
taagacaagtagggtcgctagaaaatgcagaga

SEQ ID NO: 322417 - DNA, 33 bp, Homo sapien
ttactttaattgagggaaataggagttgttaga

SEQ ID NO: 322418 - DNA, 33 bp, Homo sapien
ttactttaattgagggcaataggagttgttaga

SEQ ID NO: 322419 - DNA, 33 bp, Homo sapien
tagactcaaaaatggaaactatcatattcattt

SEQ ID NO: 322420 - DNA, 33 bp, Homo sapien
tagactcaaaaatggagactatcatattcattt

SEQ ID NO: 322421 - DNA, 33 bp, Homo sapien
aggtcaataagatgaactgctcagtgctttgca

SEQ ID NO: 322422 - DNA, 33 bp, Homo sapien
aggtcaataagatgaattgctcagtgctttgca

SEQ ID NO: 322423 - DNA, 33 bp, Homo sapien
taagacagaactatcacagcagaaaatgtggca

SEQ ID NO: 322424 - DNA, 33 bp, Homo sapien
taagacagaactatcatagcagaaaatgtggca

SEQ ID NO: 322425 - DNA, 33 bp, Homo sapien
ggttagtaaaaatgtacgtaaagcatctaacat

SEQ ID NO: 322426 - DNA, 33 bp, Homo sapien
ggttagtaaaaatgtatgtaaagcatctaacat

SEQ ID NO: 322427 - DNA, 33 bp, Homo sapien
acctagttactagtgaacgagtattattcagaa

SEQ ID NO: 322428 - DNA, 33 bp, Homo sapien
acctagttactagtgaccgagtattattcagaa

SEQ ID NO: 322429 - DNA, 33 bp, Homo sapien
gtagattcccttgacaagttgaggaacttcctt

SEQ ID NO: 322430 - DNA, 33 bp, Homo sapien
gtagattcccttgacaggttgaggaacttcctt

SEQ ID NO: 322431 - DNA, 33 bp, Homo sapien
aagatattgcaaacacaacttttttgggtgctt

SEQ ID NO: 322432 - DNA, 33 bp, Homo sapien
aagatattgcaaacactacttttttgggtgctt

SEQ ID NO: 322433 - DNA, 33 bp, Homo sapien
gtgttgacagtctaaactcttggatttaaaatt

SEQ ID NO: 322434 - DNA, 33 bp, Homo sapien
gtgttgacagtctaaagtcttggatttaaaatt

SEQ ID NO: 322435 - DNA, 33 bp, Homo sapien
tatactcgtaacaccagtagatagctcactttt

SEQ ID NO: 322436 - DNA, 33 bp, Homo sapien
tatactcgtaacaccattagatagctcactttt

SEQ ID NO: 322437 - DNA, 33 bp, Homo sapien
cattttggtgacaatacggtgacaagtctcaca

SEQ ID NO: 322438 - DNA, 33 bp, Homo sapien
cattttggtgacaatatggtgacaagtctcaca

SEQ ID NO: 322439 - DNA, 33 bp, Homo sapien
gttctccaaagggcgcactgaggtaaagactga

SEQ ID NO: 322440 - DNA, 33 bp, Homo sapien
gttctccaaagggcgcgctgaggtaaagactga

SEQ ID NO: 322441 - DNA, 33 bp, Homo sapien
ctaacagaaaagagacaagtctacgttaccata

SEQ ID NO: 322442 - DNA, 33 bp, Homo sapien
ctaacagaaaagagacgagtctacgttaccata

SEQ ID NO: 322443 - DNA, 33 bp, Homo sapien
atgtctccttgctttgcatttctgaaaagctac

SEQ ID NO: 322444 - DNA, 33 bp, Homo sapien
atgtctccttgctttgtatttctgaaaagctac

SEQ ID NO: 322445 - DNA, 33 bp, Homo sapien
tcctctatctctatcccactaccaccagtctgt

SEQ ID NO: 322446 - DNA, 33 bp, Homo sapien
tcctctatctctatcctactaccaccagtctgt

SEQ ID NO: 322447 - DNA, 33 bp, Homo sapien
ttctcacttgtcccccaaccgaactgtgaaccc

SEQ ID NO: 322448 - DNA, 33 bp, Homo sapien
ttctcacttgtcccccgaccgaactgtgaaccc

SEQ ID NO: 322449 - DNA, 33 bp, Homo sapien
agagtacagttgtctgcaggttaatagggtgaa

SEQ ID NO: 322450 - DNA, 33 bp, Homo sapien
agagtacagttgtctgtaggttaatagggtgaa

SEQ ID NO: 322451 - DNA, 33 bp, Homo sapien
ctatttgcaattacacgagatttgaatatgaag

SEQ ID NO: 322452 - DNA, 33 bp, Homo sapien
ctatttgcaattacactagatttgaatatgaag

SEQ ID NO: 322453 - DNA, 33 bp, Homo sapien
atcactgcagtgactcaaacattagcttcttgt

SEQ ID NO: 322454 - DNA, 33 bp, Homo sapien
atcactgcagtgactccaacattagcttcttgt

SEQ ID NO: 322455 - DNA, 33 bp, Homo sapien
atacactatggttacactgactttctctctcct

SEQ ID NO: 322456 - DNA, 33 bp, Homo sapien
atacactatggttacattgactttctctctcct

SEQ ID NO: 322457 - DNA, 33 bp, Homo sapien
aagagatatcttgaccaccactgttctaatatt

SEQ ID NO: 322458 - DNA, 33 bp, Homo sapien
aagagatatcttgaccgccactgttctaatatt

SEQ ID NO: 322459 - DNA, 33 bp, Homo sapien
ctaaacactcaatatacgaaattcacacgtggt

SEQ ID NO: 322460 - DNA, 33 bp, Homo sapien
ctaaacactcaatataggaaattcacacgtggt

SEQ ID NO: 322461 - DNA, 33 bp, Homo sapien
cttataaggtagatgcacttatccccacttatg

SEQ ID NO: 322462 - DNA, 33 bp, Homo sapien
cttataaggtagatgcgcttatccccacttatg

SEQ ID NO: 322463 - DNA, 33 bp, Homo sapien
acaaaggacgctactaaccttaagatgtaataa

SEQ ID NO: 322464 - DNA, 33 bp, Homo sapien
acaaaggacgctactagccttaagatgtaataa

SEQ ID NO: 322465 - DNA, 33 bp, Homo sapien
atcttgcatacatttccctcaagcatacaagga

SEQ ID NO: 322466 - DNA, 33 bp, Homo sapien
atcttgcatacatttctctcaagcatacaagga

SEQ ID NO: 322467 - DNA, 33 bp, Homo sapien
gtttgtatctcaccgaaaaaatgtcctacttcc

SEQ ID NO: 322468 - DNA, 33 bp, Homo sapien
gtttgtatctcaccgagaaaatgtcctacttcc

SEQ ID NO: 322469 - DNA, 33 bp, Homo sapien
gtgatgagacctcacaaacttacaactcatcaa

SEQ ID NO: 322470 - DNA, 33 bp, Homo sapien
gtgatgagacctcacatacttacaactcatcaa

SEQ ID NO: 322471 - DNA, 33 bp, Homo sapien
ttagagcaacagaggacggcaaaatagctgctc

SEQ ID NO: 322472 - DNA, 33 bp, Homo sapien
ttagagcaacagaggatggcaaaatagctgctc

SEQ ID NO: 322473 - DNA, 33 bp, Homo sapien
attgggagaccacagacgattgttcagggcagt

SEQ ID NO: 322474 - DNA, 33 bp, Homo sapien
attgggagaccacagatgattgttcagggcagt

SEQ ID NO: 322475 - DNA, 33 bp, Homo sapien
tcatatttcctaaaaacgggtggttcacatatg

SEQ ID NO: 322476 - DNA, 33 bp, Homo sapien
tcatatttcctaaaaatgggtggttcacatatg

SEQ ID NO: 322477 - DNA, 33 bp, Homo sapien
tcaaaacgaacctaaaattaagcagaagagaat

SEQ ID NO: 322478 - DNA, 33 bp, Homo sapien
tcaaaacgaacctaaatttaagcagaagagaat

SEQ ID NO: 322479 - DNA, 33 bp, Homo sapien
ccaccagtgggagatacatcgaaagatgaagtg

SEQ ID NO: 322480 - DNA, 33 bp, Homo sapien
ccaccagtgggagatatatcgaaagatgaagtg

SEQ ID NO: 322481 - DNA, 33 bp, Homo sapien
catgtggcagccactacgccctctttcatttaa

SEQ ID NO: 322482 - DNA, 33 bp, Homo sapien
catgtggcagccactatgccctctttcatttaa

SEQ ID NO: 322483 - DNA, 33 bp, Homo sapien
atagaaaggagcttccccaaacagataaagcac

SEQ ID NO: 322484 - DNA, 33 bp, Homo sapien
atagaaaggagcttcctcaaacagataaagcac

SEQ ID NO: 322485 - DNA, 33 bp, Homo sapien
tatctcaccaacctcaatagcatctgttaaaaa

SEQ ID NO: 322486 - DNA, 33 bp, Homo sapien
tatctcaccaacctcagtagcatctgttaaaaa

SEQ ID NO: 322487 - DNA, 33 bp, Homo sapien
cgagtaaggaagctaacttaatcaggaagaatg

SEQ ID NO: 322488 - DNA, 33 bp, Homo sapien
cgagtaaggaagctaagttaatcaggaagaatg

SEQ ID NO: 322489 - DNA, 33 bp, Homo sapien
gtgcttaatgtcatgaaaaatgttccatcagag

SEQ ID NO: 322490 - DNA, 33 bp, Homo sapien
gtgcttaatgtcatgataaatgttccatcagag

SEQ ID NO: 322491 - DNA, 33 bp, Homo sapien
aaagctcataacttcccaactcattagctgtgt

SEQ ID NO: 322492 - DNA, 33 bp, Homo sapien
aaagctcataacttcctaactcattagctgtgt

SEQ ID NO: 322493 - DNA, 33 bp, Homo sapien
ggatttattctggttacgcccttatgataaatg

SEQ ID NO: 322494 - DNA, 33 bp, Homo sapien
ggatttattctggttatgcccttatgataaatg

SEQ ID NO: 322495 - DNA, 33 bp, Homo sapien
ttgttttaaaactccactgagcacatgggctac

SEQ ID NO: 322496 - DNA, 33 bp, Homo sapien
ttgttttaaaactccagtgagcacatgggctac

SEQ ID NO: 322497 - DNA, 33 bp, Homo sapien
ccctgtacacagtgtcactaatagctttcctgt

SEQ ID NO: 322498 - DNA, 33 bp, Homo sapien
ccctgtacacagtgtctctaatagctttcctgt

SEQ ID NO: 322499 - DNA, 33 bp, Homo sapien
ttagctgtttcaccatcaagatagcaaataatc

SEQ ID NO: 322500 - DNA, 33 bp, Homo sapien
ttagctgtttcaccatgaagatagcaaataatc

SEQ ID NO: 322501 - DNA, 33 bp, Homo sapien
aaattgattccatttaagtgtattccttgcagc

SEQ ID NO: 322502 - DNA, 33 bp, Homo sapien
aaattgattccatttacgtgtattccttgcagc

SEQ ID NO: 322503 - DNA, 33 bp, Homo sapien
cttgccattgagtctacaatcaagtttcctgaa

SEQ ID NO: 322504 - DNA, 33 bp, Homo sapien
cttgccattgagtctataatcaagtttcctgaa

SEQ ID NO: 322505 - DNA, 33 bp, Homo sapien
tactacttacatcataactcctcttatggacca

SEQ ID NO: 322506 - DNA, 33 bp, Homo sapien
tactacttacatcatatctcctcttatggacca

SEQ ID NO: 322507 - DNA, 33 bp, Homo sapien
ataaacagatttttgaccatcatctcttttttg

SEQ ID NO: 322508 - DNA, 33 bp, Homo sapien
ataaacagatttttgagcatcatctcttttttg

SEQ ID NO: 322509 - DNA, 33 bp, Homo sapien
aggttttattggataacgtgagggcaagaaatg

SEQ ID NO: 322510 - DNA, 33 bp, Homo sapien
aggttttattggataatgtgagggcaagaaatg

SEQ ID NO: 322511 - DNA, 33 bp, Homo sapien
catatcagcacattcaaaagaataaagttaaat

SEQ ID NO: 322512 - DNA, 33 bp, Homo sapien
catatcagcacattcagaagaataaagttaaat

SEQ ID NO: 322513 - DNA, 33 bp, Homo sapien
agaaaattgtttgccaatctaaggaagggataa

SEQ ID NO: 322514 - DNA, 33 bp, Homo sapien
agaaaattgtttgccagtctaaggaagggataa

SEQ ID NO: 322515 - DNA, 33 bp, Homo sapien
agaagcccagtacacaagggaacagttgagcct

SEQ ID NO: 322516 - DNA, 33 bp, Homo sapien
agaagcccagtacacatgggaacagttgagcct

SEQ ID NO: 322517 - DNA, 33 bp, Homo sapien
agtatgttaaaagttacaatcttcgcatcgcac

SEQ ID NO: 322518 - DNA, 33 bp, Homo sapien
agtatgttaaaagttataatcttcgcatcgcac

SEQ ID NO: 322519 - DNA, 33 bp, Homo sapien
aacctttcaagtgctacgtccatttgtgaggac

SEQ ID NO: 322520 - DNA, 33 bp, Homo sapien
aacctttcaagtgctatgtccatttgtgaggac

SEQ ID NO: 322521 - DNA, 33 bp, Homo sapien
aatctcacacaaaaaaattagaattcaggatac

SEQ ID NO: 322522 - DNA, 33 bp, Homo sapien
aatctcacacaaaaaatttagaattcaggatac

SEQ ID NO: 322523 - DNA, 33 bp, Homo sapien
atcaaaaccacagtgcaatgccatttcacacca

SEQ ID NO: 322524 - DNA, 33 bp, Homo sapien
atcaaaaccacagtgcgatgccatttcacacca

SEQ ID NO: 322525 - DNA, 33 bp, Homo sapien
gcaccactggtggaaacacaagtagaagaaagt

SEQ ID NO: 322526 - DNA, 33 bp, Homo sapien
gcaccactggtggaaatacaagtagaagaaagt

SEQ ID NO: 322527 - DNA, 33 bp, Homo sapien
caaaagtgcattaacaaaaggcagcctcttcta

SEQ ID NO: 322528 - DNA, 33 bp, Homo sapien
caaaagtgcattaacagaaggcagcctcttcta

SEQ ID NO: 322529 - DNA, 33 bp, Homo sapien
gtgtcgccctggtggagaccctctgaagcaact

SEQ ID NO: 322530 - DNA, 33 bp, Homo sapien
gtgtcgccctggtggataccctctgaagcaact

SEQ ID NO: 322531 - DNA, 33 bp, Homo sapien
aagccactaggaatttcaaacgcggcagagccc

SEQ ID NO: 322532 - DNA, 33 bp, Homo sapien
aagccactaggaatttgaaacgcggcagagccc

SEQ ID NO: 322533 - DNA, 33 bp, Homo sapien
tgtgaatttttctttacctctgtgatgttcctc

SEQ ID NO: 322534 - DNA, 33 bp, Homo sapien
tgtgaatttttctttatctctgtgatgttcctc

SEQ ID NO: 322535 - DNA, 33 bp, Homo sapien
ttagtgctttgccaaacgatattatctctttta

SEQ ID NO: 322536 - DNA, 33 bp, Homo sapien
ttagtgctttgccaaatgatattatctctttta

SEQ ID NO: 322537 - DNA, 33 bp, Homo sapien
caacaaagtactaaaactcctagccagagtaat

SEQ ID NO: 322538 - DNA, 33 bp, Homo sapien
caacaaagtactaaaagtcctagccagagtaat

SEQ ID NO: 322539 - DNA, 33 bp, Homo sapien
ccaaatgtaaaaagaaaagctggtactattcct

SEQ ID NO: 322540 - DNA, 33 bp, Homo sapien
ccaaatgtaaaaagaagagctggtactattcct

SEQ ID NO: 322541 - DNA, 33 bp, Homo sapien
gggtgtgaacatttacagagactgaagagacag

SEQ ID NO: 322542 - DNA, 33 bp, Homo sapien
gggtgtgaacatttacggagactgaagagacag

SEQ ID NO: 322543 - DNA, 33 bp, Homo sapien
ccactcatcagctcagaatcttctaactgctcc

SEQ ID NO: 322544 - DNA, 33 bp, Homo sapien
ccactcatcagctcaggatcttctaactgctcc

SEQ ID NO: 322545 - DNA, 33 bp, Homo sapien
cctaaattttcatgaccatggaacaaggacccc

SEQ ID NO: 322546 - DNA, 33 bp, Homo sapien
cctaaattttcatgactatggaacaaggacccc

SEQ ID NO: 322547 - DNA, 33 bp, Homo sapien
tacttttgaaaagggcaatatgttgagagtttt

SEQ ID NO: 322548 - DNA, 33 bp, Homo sapien
tacttttgaaaagggccatatgttgagagtttt

SEQ ID NO: 322549 - DNA, 33 bp, Homo sapien
ggtaactgtcctcttacgataacttagcctacc

SEQ ID NO: 322550 - DNA, 33 bp, Homo sapien
ggtaactgtcctcttatgataacttagcctacc

SEQ ID NO: 322551 - DNA, 33 bp, Homo sapien
aattatacctcgtgaaactgagcagagtacaaa

SEQ ID NO: 322552 - DNA, 33 bp, Homo sapien
aattatacctcgtgaagctgagcagagtacaaa

SEQ ID NO: 322553 - DNA, 33 bp, Homo sapien
cataatccatgaacaaatatctttcaaaagctc

SEQ ID NO: 322554 - DNA, 33 bp, Homo sapien
cataatccatgaacaagtatctttcaaaagctc

SEQ ID NO: 322555 - DNA, 33 bp, Homo sapien
ttcaaagttggctaaccctgaaagaaggacacg

SEQ ID NO: 322556 - DNA, 33 bp, Homo sapien
ttcaaagttggctaactctgaaagaaggacacg

SEQ ID NO: 322557 - DNA, 33 bp, Homo sapien
tttactcctactggcagaataatatccaactgg

SEQ ID NO: 322558 - DNA, 33 bp, Homo sapien
tttactcctactggcataataatatccaactgg

SEQ ID NO: 322559 - DNA, 33 bp, Homo sapien
gcttttaaagcattacaactattttggatctta

SEQ ID NO: 322560 - DNA, 33 bp, Homo sapien
gcttttaaagcattaccactattttggatctta

SEQ ID NO: 322561 - DNA, 33 bp, Homo sapien
tgttggtctatattagcatggcttaaaacgact

SEQ ID NO: 322562 - DNA, 33 bp, Homo sapien
tgttggtctatattagtatggcttaaaacgact

SEQ ID NO: 322563 - DNA, 33 bp, Homo sapien
atataagaattcagcaaattgaaatcaaaagat

SEQ ID NO: 322564 - DNA, 33 bp, Homo sapien
atataagaattcagcagattgaaatcaaaagat

SEQ ID NO: 322565 - DNA, 33 bp, Homo sapien
agggaaatatcagaaacaatgtatgaggcagat

SEQ ID NO: 322566 - DNA, 33 bp, Homo sapien
agggaaatatcagaaagaatgtatgaggcagat

SEQ ID NO: 322567 - DNA, 33 bp, Homo sapien
cctgttcttacaactaaaagtgtcacaactcat

SEQ ID NO: 322568 - DNA, 33 bp, Homo sapien
cctgttcttacaactagaagtgtcacaactcat

SEQ ID NO: 322569 - DNA, 33 bp, Homo sapien
tagtggcttaacttaaagtacaacagtaatggt

SEQ ID NO: 322570 - DNA, 33 bp, Homo sapien
tagtggcttaacttaacgtacaacagtaatggt

SEQ ID NO: 322571 - DNA, 33 bp, Homo sapien
aatatttagccttttagcccttactctcctctc

SEQ ID NO: 322572 - DNA, 33 bp, Homo sapien
aatatttagccttttatcccttactctcctctc

SEQ ID NO: 322573 - DNA, 33 bp, Homo sapien
tatttgactatatgtaggtgtatttctagaatc

SEQ ID NO: 322574 - DNA, 33 bp, Homo sapien
tatttgactatatgtatgtgtatttctagaatc

SEQ ID NO: 322575 - DNA, 33 bp, Homo sapien
aaatttattagtacgcacattttaattttaaaa

SEQ ID NO: 322576 - DNA, 33 bp, Homo sapien
aaatttattagtacgcgcattttaattttaaaa

SEQ ID NO: 322577 - DNA, 33 bp, Homo sapien
gccagtgggtatcctacgagtaaatatccccag

SEQ ID NO: 322578 - DNA, 33 bp, Homo sapien
gccagtgggtatcctatgagtaaatatccccag

SEQ ID NO: 322579 - DNA, 33 bp, Homo sapien
tcccataaagtgcaaaaaatcagtaaacactga

SEQ ID NO: 322580 - DNA, 33 bp, Homo sapien
tcccataaagtgcaaagaatcagtaaacactga

SEQ ID NO: 322581 - DNA, 33 bp, Homo sapien
tctgttataaaaaccaacagagtaatcaatatt

SEQ ID NO: 322582 - DNA, 33 bp, Homo sapien
tctgttataaaaaccaccagagtaatcaatatt

SEQ ID NO: 322583 - DNA, 33 bp, Homo sapien
aaataaatacattatcacaagtcatacagtaaa

SEQ ID NO: 322584 - DNA, 33 bp, Homo sapien
aaataaatacattatctcaagtcatacagtaaa

SEQ ID NO: 322585 - DNA, 33 bp, Homo sapien
ccccattaatgccagtcaaatgccaccctcgct

SEQ ID NO: 322586 - DNA, 33 bp, Homo sapien
ccccattaatgccagtgaaatgccaccctcgct

SEQ ID NO: 322587 - DNA, 33 bp, Homo sapien
ctttcttatgactccgacattctactattaggt

SEQ ID NO: 322588 - DNA, 33 bp, Homo sapien
ctttcttatgactccggcattctactattaggt

SEQ ID NO: 322589 - DNA, 33 bp, Homo sapien
aaggacatccttaagaagtataaaagatgagct

SEQ ID NO: 322590 - DNA, 33 bp, Homo sapien
aaggacatccttaagaggtataaaagatgagct

SEQ ID NO: 322591 - DNA, 33 bp, Homo sapien
cttaacatttcaaaaccggtagaatctgtaatg

SEQ ID NO: 322592 - DNA, 33 bp, Homo sapien
cttaacatttcaaaactggtagaatctgtaatg

SEQ ID NO: 322593 - DNA, 33 bp, Homo sapien
taaagcagattactagccataatgtgatgggcc

SEQ ID NO: 322594 - DNA, 33 bp, Homo sapien
taaagcagattactagtcataatgtgatgggcc

SEQ ID NO: 322595 - DNA, 33 bp, Homo sapien
atgacagggatcttcaaaaaagaagaaacatca

SEQ ID NO: 322596 - DNA, 33 bp, Homo sapien
atgacagggatcttcagaaaagaagaaacatca

SEQ ID NO: 322597 - DNA, 33 bp, Homo sapien
tatcaaagatattgcactcatgataactttgcc

SEQ ID NO: 322598 - DNA, 33 bp, Homo sapien
tatcaaagatattgcagtcatgataactttgcc

SEQ ID NO: 322599 - DNA, 33 bp, Homo sapien
aggaacataaacagccggcattagggaaattta

SEQ ID NO: 322600 - DNA, 33 bp, Homo sapien
aggaacataaacagcctgcattagggaaattta

SEQ ID NO: 322601 - DNA, 33 bp, Homo sapien
ttcattctctactcacgcagtgtatttggagaa

SEQ ID NO: 322602 - DNA, 33 bp, Homo sapien
ttcattctctactcactcagtgtatttggagaa

SEQ ID NO: 322603 - DNA, 33 bp, Homo sapien
ttaattctgctgtgatcaactgtcatttacaac

SEQ ID NO: 322604 - DNA, 33 bp, Homo sapien
ttaattctgctgtgattaactgtcatttacaac

SEQ ID NO: 322605 - DNA, 33 bp, Homo sapien
tgaaatctcagtcctagcctagtctcaatcaat

SEQ ID NO: 322606 - DNA, 33 bp, Homo sapien
tgaaatctcagtcctatcctagtctcaatcaat

SEQ ID NO: 322607 - DNA, 33 bp, Homo sapien
aaaatcctgagaaaaaacttagtgagattatta

SEQ ID NO: 322608 - DNA, 33 bp, Homo sapien
aaaatcctgagaaaaaccttagtgagattatta

SEQ ID NO: 322609 - DNA, 33 bp, Homo sapien
taactccacgaggatacattgatcttccaaaaa

SEQ ID NO: 322610 - DNA, 33 bp, Homo sapien
taactccacgaggatatattgatcttccaaaaa

SEQ ID NO: 322611 - DNA, 33 bp, Homo sapien
tcttgaaaagagaagacggttcaactgcattta

SEQ ID NO: 322612 - DNA, 33 bp, Homo sapien
tcttgaaaagagaagatggttcaactgcattta

SEQ ID NO: 322613 - DNA, 33 bp, Homo sapien
aaaattacagggaaaaattgatatgccaaagaa

SEQ ID NO: 322614 - DNA, 33 bp, Homo sapien
aaaattacagggaaaagttgatatgccaaagaa

SEQ ID NO: 322615 - DNA, 33 bp, Homo sapien
ctgattacaaaaggaaagggtgattttcagaat

SEQ ID NO: 322616 - DNA, 33 bp, Homo sapien
ctgattacaaaaggaaggggtgattttcagaat

SEQ ID NO: 322617 - DNA, 33 bp, Homo sapien
tctcccaggtagaacgaaatctcaattgttact

SEQ ID NO: 322618 - DNA, 33 bp, Homo sapien
tctcccaggtagaacggaatctcaattgttact

SEQ ID NO: 322619 - DNA, 33 bp, Homo sapien
acaacattaccttaagacactgtaggattctgc

SEQ ID NO: 322620 - DNA, 33 bp, Homo sapien
acaacattaccttaaggcactgtaggattctgc

SEQ ID NO: 322621 - DNA, 33 bp, Homo sapien
tatatatgctttgagaagatacaacaagaagtc

SEQ ID NO: 322622 - DNA, 33 bp, Homo sapien
tatatatgctttgagaggatacaacaagaagtc

SEQ ID NO: 322623 - DNA, 33 bp, Homo sapien
tctctttgatctcgccacttatcagataggtag

SEQ ID NO: 322624 - DNA, 33 bp, Homo sapien
tctctttgatctcgccgcttatcagataggtag

SEQ ID NO: 322625 - DNA, 33 bp, Homo sapien
ttaaatacattgttgaataatgcacacccaatc

SEQ ID NO: 322626 - DNA, 33 bp, Homo sapien
ttaaatacattgttgagtaatgcacacccaatc

SEQ ID NO: 322627 - DNA, 33 bp, Homo sapien
acacagcttttccagaatacgaatccaggactc

SEQ ID NO: 322628 - DNA, 33 bp, Homo sapien
acacagcttttccagagtacgaatccaggactc

SEQ ID NO: 322629 - DNA, 33 bp, Homo sapien
caaaataggattaaaaatggattgcaaatagtg

SEQ ID NO: 322630 - DNA, 33 bp, Homo sapien
caaaataggattaaaagtggattgcaaatagtg

SEQ ID NO: 322631 - DNA, 33 bp, Homo sapien
cactattcagaaagaacgctgtgttcaaatagc

SEQ ID NO: 322632 - DNA, 33 bp, Homo sapien
cactattcagaaagaatgctgtgttcaaatagc

SEQ ID NO: 322633 - DNA, 33 bp, Homo sapien
tgtatggattcatggacctggaaaatttaaaca

SEQ ID NO: 322634 - DNA, 33 bp, Homo sapien
tgtatggattcatggatctggaaaatttaaaca

SEQ ID NO: 322635 - DNA, 33 bp, Homo sapien
agtatatttatgatggaaaatgatgtaaaatat

SEQ ID NO: 322636 - DNA, 33 bp, Homo sapien
agtatatttatgatgggaaatgatgtaaaatat

SEQ ID NO: 322637 - DNA, 33 bp, Homo sapien
tttttgcttatctcaaaccgttactcaattctt

SEQ ID NO: 322638 - DNA, 33 bp, Homo sapien
tttttgcttatctcaagccgttactcaattctt

SEQ ID NO: 322639 - DNA, 33 bp, Homo sapien
taagataatatctctccaaaggaaagaccttgt

SEQ ID NO: 322640 - DNA, 33 bp, Homo sapien
taagataatatctctctaaaggaaagaccttgt

SEQ ID NO: 322641 - DNA, 33 bp, Homo sapien
gatgagtctggtcttacacaaggtctttccttt

SEQ ID NO: 322642 - DNA, 33 bp, Homo sapien
gatgagtctggtcttatacaaggtctttccttt

SEQ ID NO: 322643 - DNA, 33 bp, Homo sapien
ctagtgctcaacgaataagtttttaaaaaatag

SEQ ID NO: 322644 - DNA, 33 bp, Homo sapien
ctagtgctcaacgaatgagtttttaaaaaatag

SEQ ID NO: 322645 - DNA, 33 bp, Homo sapien
tctagcataaacagacagctcatatttgtattt

SEQ ID NO: 322646 - DNA, 33 bp, Homo sapien
tctagcataaacagaccgctcatatttgtattt

SEQ ID NO: 322647 - DNA, 33 bp, Homo sapien
caaaaatcaatcatctaaagtcacattgtaaca

SEQ ID NO: 322648 - DNA, 33 bp, Homo sapien
caaaaatcaatcatctgaagtcacattgtaaca

SEQ ID NO: 322649 - DNA, 33 bp, Homo sapien
gggaaggaggtaagtacggaccaattagcaggt

SEQ ID NO: 322650 - DNA, 33 bp, Homo sapien
gggaaggaggtaagtatggaccaattagcaggt

SEQ ID NO: 322651 - DNA, 33 bp, Homo sapien
gaataactgtgaatatcaacatggttttatcct

SEQ ID NO: 322652 - DNA, 33 bp, Homo sapien
gaataactgtgaatattaacatggttttatcct

SEQ ID NO: 322653 - DNA, 33 bp, Homo sapien
aagtcatacaatagtaactgacacatagtgaac

SEQ ID NO: 322654 - DNA, 33 bp, Homo sapien
aagtcatacaatagtacctgacacatagtgaac

SEQ ID NO: 322655 - DNA, 33 bp, Homo sapien
tttcataagtcttcccaatgctgtcagatttca

SEQ ID NO: 322656 - DNA, 33 bp, Homo sapien
tttcataagtcttcccgatgctgtcagatttca

SEQ ID NO: 322657 - DNA, 33 bp, Homo sapien
tgctgtttttcagtgacgccagacccaagggca

SEQ ID NO: 322658 - DNA, 33 bp, Homo sapien
tgctgtttttcagtgatgccagacccaagggca

SEQ ID NO: 322659 - DNA, 33 bp, Homo sapien
ttacaactatgaatgaagtgaaaatgaaaactg

SEQ ID NO: 322660 - DNA, 33 bp, Homo sapien
ttacaactatgaatgatgtgaaaatgaaaactg

SEQ ID NO: 322661 - DNA, 33 bp, Homo sapien
agcttatcctattcaccctaggtttgcatgact

SEQ ID NO: 322662 - DNA, 33 bp, Homo sapien
agcttatcctattcactctaggtttgcatgact

SEQ ID NO: 322663 - DNA, 33 bp, Homo sapien
gagaacatgaggaagccattgctgactaagaag

SEQ ID NO: 322664 - DNA, 33 bp, Homo sapien
gagaacatgaggaagctattgctgactaagaag

SEQ ID NO: 322665 - DNA, 33 bp, Homo sapien
tgggtttgactttctaccagcaccatgggagga

SEQ ID NO: 322666 - DNA, 33 bp, Homo sapien
tgggtttgactttctatcagcaccatgggagga

SEQ ID NO: 322667 - DNA, 33 bp, Homo sapien
ttgctttatttagtacacacaagaacctctcaa

SEQ ID NO: 322668 - DNA, 33 bp, Homo sapien
ttgctttatttagtactcacaagaacctctcaa

SEQ ID NO: 322669 - DNA, 33 bp, Homo sapien
aaaatgggaataaatacggtgtctcctacagaa

SEQ ID NO: 322670 - DNA, 33 bp, Homo sapien
aaaatgggaataaatatggtgtctcctacagaa

SEQ ID NO: 322671 - DNA, 33 bp, Homo sapien
ataaaagctatatgaacgtgatctctctccctc

SEQ ID NO: 322672 - DNA, 33 bp, Homo sapien
ataaaagctatatgaatgtgatctctctccctc

SEQ ID NO: 322673 - DNA, 33 bp, Homo sapien
agggatcaaaggtctacgcttagaagtatcaca

SEQ ID NO: 322674 - DNA, 33 bp, Homo sapien
agggatcaaaggtctatgcttagaagtatcaca

SEQ ID NO: 322675 - DNA, 33 bp, Homo sapien
atagaggtaatttgaaccatttagctcaagttg

SEQ ID NO: 322676 - DNA, 33 bp, Homo sapien
atagaggtaatttgaatcatttagctcaagttg

SEQ ID NO: 322677 - DNA, 33 bp, Homo sapien
tcctgcttaacaatacccacaatctctagtact

SEQ ID NO: 322678 - DNA, 33 bp, Homo sapien
tcctgcttaacaatactcacaatctctagtact

SEQ ID NO: 322679 - DNA, 33 bp, Homo sapien
ggatttcttatgctaccatctcatgcctctgct

SEQ ID NO: 322680 - DNA, 33 bp, Homo sapien
ggatttcttatgctactatctcatgcctctgct

SEQ ID NO: 322681 - DNA, 33 bp, Homo sapien
agaccaggaaacgagaatacacaatccaccata

SEQ ID NO: 322682 - DNA, 33 bp, Homo sapien
agaccaggaaacgagagtacacaatccaccata

SEQ ID NO: 322683 - DNA, 33 bp, Homo sapien
catttgaataataggacgctgtttatacaaaca

SEQ ID NO: 322684 - DNA, 33 bp, Homo sapien
catttgaataataggatgctgtttatacaaaca

SEQ ID NO: 322685 - DNA, 33 bp, Homo sapien
aatgtggttaggtcacaattggctacactttca

SEQ ID NO: 322686 - DNA, 33 bp, Homo sapien
aatgtggttaggtcacgattggctacactttca

SEQ ID NO: 322687 - DNA, 33 bp, Homo sapien
tgtgttttcatgagtacgtgtattctaacatgt

SEQ ID NO: 322688 - DNA, 33 bp, Homo sapien
tgtgttttcatgagtatgtgtattctaacatgt

SEQ ID NO: 322689 - DNA, 33 bp, Homo sapien
acacaaatgtgttgacaaagggagggttgccta

SEQ ID NO: 322690 - DNA, 33 bp, Homo sapien
acacaaatgtgttgacgaagggagggttgccta

SEQ ID NO: 322691 - DNA, 33 bp, Homo sapien
cagatgttgggaccaccggctgtggagaggagc

SEQ ID NO: 322692 - DNA, 33 bp, Homo sapien
cagatgttgggaccactggctgtggagaggagc

SEQ ID NO: 322693 - DNA, 33 bp, Homo sapien
ttttagcaatatctagaagttggtcatcattat

SEQ ID NO: 322694 - DNA, 33 bp, Homo sapien
ttttagcaatatctagcagttggtcatcattat

SEQ ID NO: 322695 - DNA, 33 bp, Homo sapien
agaattagcttatcacagtcagctaacttaaac

SEQ ID NO: 322696 - DNA, 33 bp, Homo sapien
agaattagcttatcactgtcagctaacttaaac

SEQ ID NO: 322697 - DNA, 33 bp, Homo sapien
gagcttttcaatgacaatacttcatataacata

SEQ ID NO: 322698 - DNA, 33 bp, Homo sapien
gagcttttcaatgacagtacttcatataacata

SEQ ID NO: 322699 - DNA, 33 bp, Homo sapien
tgattctgttcctgaactggcattgatacagta

SEQ ID NO: 322700 - DNA, 33 bp, Homo sapien
tgattctgttcctgaattggcattgatacagta

SEQ ID NO: 322701 - DNA, 33 bp, Homo sapien
gatgtgctgccactgcaatcagtactactgcgt

SEQ ID NO: 322702 - DNA, 33 bp, Homo sapien
gatgtgctgccactgccatcagtactactgcgt

SEQ ID NO: 322703 - DNA, 33 bp, Homo sapien
cagctgaggccatgcactacacagagctggtgg

SEQ ID NO: 322704 - DNA, 33 bp, Homo sapien
cagctgaggccatgcattacacagagctggtgg

SEQ ID NO: 322705 - DNA, 33 bp, Homo sapien
cttctttctagctataaacctactatacggcat

SEQ ID NO: 322706 - DNA, 33 bp, Homo sapien
cttctttctagctatacacctactatacggcat

SEQ ID NO: 322707 - DNA, 33 bp, Homo sapien
gggccatgtctatcaacaccaacaggttgtgct

SEQ ID NO: 322708 - DNA, 33 bp, Homo sapien
gggccatgtctatcaataccaacaggttgtgct

SEQ ID NO: 322709 - DNA, 33 bp, Homo sapien
acactcacacagatccgcaatcaattggcaaac

SEQ ID NO: 322710 - DNA, 33 bp, Homo sapien
acactcacacagatcctcaatcaattggcaaac

SEQ ID NO: 322711 - DNA, 33 bp, Homo sapien
ggtaagggtgaaataaagaagtcctcctggata

SEQ ID NO: 322712 - DNA, 33 bp, Homo sapien
ggtaagggtgaaataaggaagtcctcctggata

SEQ ID NO: 322713 - DNA, 33 bp, Homo sapien
tttataataaagcttgaagtaagtggaacacag

SEQ ID NO: 322714 - DNA, 33 bp, Homo sapien
tttataataaagcttggagtaagtggaacacag

SEQ ID NO: 322715 - DNA, 33 bp, Homo sapien
gtatttactctttcaaatcagtttattaagtcc

SEQ ID NO: 322716 - DNA, 33 bp, Homo sapien
gtatttactctttcaattcagtttattaagtcc

SEQ ID NO: 322717 - DNA, 33 bp, Homo sapien
agatggtgagtgagaacgctggttcaggttagg

SEQ ID NO: 322718 - DNA, 33 bp, Homo sapien
agatggtgagtgagaaggctggttcaggttagg

SEQ ID NO: 322719 - DNA, 33 bp, Homo sapien
ttaaataaagtcatcaagagaggagaagcaatt

SEQ ID NO: 322720 - DNA, 33 bp, Homo sapien
ttaaataaagtcatcatgagaggagaagcaatt

SEQ ID NO: 322721 - DNA, 33 bp, Homo sapien
gaacatgaatcagatcagaaggaaagggttgat

SEQ ID NO: 322722 - DNA, 33 bp, Homo sapien
gaacatgaatcagatcggaaggaaagggttgat

SEQ ID NO: 322723 - DNA, 33 bp, Homo sapien
taaaccactagcaaaaatttcgtgtcctgttcc

SEQ ID NO: 322724 - DNA, 33 bp, Homo sapien
taaaccactagcaaaattttcgtgtcctgttcc

SEQ ID NO: 322725 - DNA, 33 bp, Homo sapien
atatccatccttacaaatgtcaagtatggccaa

SEQ ID NO: 322726 - DNA, 33 bp, Homo sapien
atatccatccttacaactgtcaagtatggccaa

SEQ ID NO: 322727 - DNA, 33 bp, Homo sapien
aaaggccagaggtaaacatttgtcatgatgtcc

SEQ ID NO: 322728 - DNA, 33 bp, Homo sapien
aaaggccagaggtaaatatttgtcatgatgtcc

SEQ ID NO: 322729 - DNA, 33 bp, Homo sapien
aagatgaagtttccacagcatagagaagtaaaa

SEQ ID NO: 322730 - DNA, 33 bp, Homo sapien
aagatgaagtttccacggcatagagaagtaaaa

SEQ ID NO: 322731 - DNA, 33 bp, Homo sapien
tcccaaattaaacctacgaccaggctgaaggac

SEQ ID NO: 322732 - DNA, 33 bp, Homo sapien
tcccaaattaaacctatgaccaggctgaaggac

SEQ ID NO: 322733 - DNA, 33 bp, Homo sapien
tctttgagatgtaaacacaagacaaaaattata

SEQ ID NO: 322734 - DNA, 33 bp, Homo sapien
tctttgagatgtaaacgcaagacaaaaattata

SEQ ID NO: 322735 - DNA, 33 bp, Homo sapien
ttattattaatgttaaaacctgagtgtgccttt

SEQ ID NO: 322736 - DNA, 33 bp, Homo sapien
ttattattaatgttaatacctgagtgtgccttt

SEQ ID NO: 322737 - DNA, 33 bp, Homo sapien
ttttcaaaattcaaaaatacctgcatgactttc

SEQ ID NO: 322738 - DNA, 33 bp, Homo sapien
ttttcaaaattcaaaattacctgcatgactttc

SEQ ID NO: 322739 - DNA, 33 bp, Homo sapien
agaaaatacctactgacgtgtgactttgacagt

SEQ ID NO: 322740 - DNA, 33 bp, Homo sapien
agaaaatacctactgaggtgtgactttgacagt

SEQ ID NO: 322741 - DNA, 33 bp, Homo sapien
aaagcctatcctggtacctttatggacaataaa

SEQ ID NO: 322742 - DNA, 33 bp, Homo sapien
aaagcctatcctggtatctttatggacaataaa

SEQ ID NO: 322743 - DNA, 33 bp, Homo sapien
aagactaggctgccaacagctaggaaagaagtg

SEQ ID NO: 322744 - DNA, 33 bp, Homo sapien
aagactaggctgccaatagctaggaaagaagtg

SEQ ID NO: 322745 - DNA, 33 bp, Homo sapien
cataatgcatttcctacagtttatctgaatgat

SEQ ID NO: 322746 - DNA, 33 bp, Homo sapien
cataatgcatttcctatagtttatctgaatgat

SEQ ID NO: 322747 - DNA, 33 bp, Homo sapien
gtggatgggaacacaaccggactaggtcagcac

SEQ ID NO: 322748 - DNA, 33 bp, Homo sapien
gtggatgggaacacaatcggactaggtcagcac

SEQ ID NO: 322749 - DNA, 33 bp, Homo sapien
tgatgcctacaattgcacttttgggttatcaca

SEQ ID NO: 322750 - DNA, 33 bp, Homo sapien
tgatgcctacaattgcgcttttgggttatcaca

SEQ ID NO: 322751 - DNA, 33 bp, Homo sapien
tagacagatttaatgaagtaatataatggtgat

SEQ ID NO: 322752 - DNA, 33 bp, Homo sapien
tagacagatttaatgatgtaatataatggtgat

SEQ ID NO: 322753 - DNA, 33 bp, Homo sapien
tcttcttagactctagcaattcattgattattt

SEQ ID NO: 322754 - DNA, 33 bp, Homo sapien
tcttcttagactctaggaattcattgattattt

SEQ ID NO: 322755 - DNA, 33 bp, Homo sapien
taatagtcacataataaaggaagagatgcttca

SEQ ID NO: 322756 - DNA, 33 bp, Homo sapien
taatagtcacataatacaggaagagatgcttca

SEQ ID NO: 322757 - DNA, 33 bp, Homo sapien
tttcatatcaacattaaattttcatatcaacat

SEQ ID NO: 322758 - DNA, 33 bp, Homo sapien
tttcatatcaacattagattttcatatcaacat

SEQ ID NO: 322759 - DNA, 33 bp, Homo sapien
atgtatccctaggtgcgctttctcgactgtctt

SEQ ID NO: 322760 - DNA, 33 bp, Homo sapien
atgtatccctaggtgctctttctcgactgtctt

SEQ ID NO: 322761 - DNA, 33 bp, Homo sapien
ctgggactagaatctaaaagctggctggcaaag

SEQ ID NO: 322762 - DNA, 33 bp, Homo sapien
ctgggactagaatctacaagctggctggcaaag

SEQ ID NO: 322763 - DNA, 33 bp, Homo sapien
agatttaataggctaggactcaaaactactcat

SEQ ID NO: 322764 - DNA, 33 bp, Homo sapien
agatttaataggctagtactcaaaactactcat

SEQ ID NO: 322765 - DNA, 33 bp, Homo sapien
gattatgatgcagctaaaacaaagaaagaggag

SEQ ID NO: 322766 - DNA, 33 bp, Homo sapien
gattatgatgcagctataacaaagaaagaggag

SEQ ID NO: 322767 - DNA, 33 bp, Homo sapien
ctatgttcccgcattaggaagctagcacaaaaa

SEQ ID NO: 322768 - DNA, 33 bp, Homo sapien
ctatgttcccgcattatgaagctagcacaaaaa

SEQ ID NO: 322769 - DNA, 33 bp, Homo sapien
tctttgagaaagttacaaagcctttggtatagt

SEQ ID NO: 322770 - DNA, 33 bp, Homo sapien
tctttgagaaagttactaagcctttggtatagt

SEQ ID NO: 322771 - DNA, 33 bp, Homo sapien
acctttgattcttctgcagattccttgccaaag

SEQ ID NO: 322772 - DNA, 33 bp, Homo sapien
acctttgattcttctgtagattccttgccaaag

SEQ ID NO: 322773 - DNA, 33 bp, Homo sapien
gcaaactgaaatgcccagagaattaaatgataa

SEQ ID NO: 322774 - DNA, 33 bp, Homo sapien
gcaaactgaaatgcccggagaattaaatgataa

SEQ ID NO: 322775 - DNA, 33 bp, Homo sapien
gctaaaggctagcaaaaaatccacacagatttg

SEQ ID NO: 322776 - DNA, 33 bp, Homo sapien
gctaaaggctagcaaacaatccacacagatttg

SEQ ID NO: 322777 - DNA, 33 bp, Homo sapien
atagaaagccaacaaccctatgaatacctagaa

SEQ ID NO: 322778 - DNA, 33 bp, Homo sapien
atagaaagccaacaactctatgaatacctagaa

SEQ ID NO: 322779 - DNA, 33 bp, Homo sapien
tgagagactcaaattaagtaaatgactggaaat

SEQ ID NO: 322780 - DNA, 33 bp, Homo sapien
tgagagactcaaattaggtaaatgactggaaat

SEQ ID NO: 322781 - DNA, 33 bp, Homo sapien
acacacttgaccaacaacaaggatgtatctcgt

SEQ ID NO: 322782 - DNA, 33 bp, Homo sapien
acacacttgaccaacagcaaggatgtatctcgt

SEQ ID NO: 322783 - DNA, 33 bp, Homo sapien
aaagccaacaacgaaagctagctttgcacatct

SEQ ID NO: 322784 - DNA, 33 bp, Homo sapien
aaagccaacaacgaaatctagctttgcacatct

SEQ ID NO: 322785 - DNA, 33 bp, Homo sapien
gattttcctgatcactaaggagtttgacatttc

SEQ ID NO: 322786 - DNA, 33 bp, Homo sapien
gattttcctgatcactgaggagtttgacatttc

SEQ ID NO: 322787 - DNA, 33 bp, Homo sapien
agcaggaacattttgcagaggaattatctgtgg

SEQ ID NO: 322788 - DNA, 33 bp, Homo sapien
agcaggaacattttgccgaggaattatctgtgg

SEQ ID NO: 322789 - DNA, 33 bp, Homo sapien
aagtatgtgaagacgacaggtgcctgcgttatt

SEQ ID NO: 322790 - DNA, 33 bp, Homo sapien
aagtatgtgaagacgataggtgcctgcgttatt

SEQ ID NO: 322791 - DNA, 33 bp, Homo sapien
tactaaatcttggtaacctgcttcctaacttgt

SEQ ID NO: 322792 - DNA, 33 bp, Homo sapien
tactaaatcttggtaatctgcttcctaacttgt

SEQ ID NO: 322793 - DNA, 33 bp, Homo sapien
tccaggtaaggaagcgcatttgcaacaggactg

SEQ ID NO: 322794 - DNA, 33 bp, Homo sapien
tccaggtaaggaagcggatttgcaacaggactg

SEQ ID NO: 322795 - DNA, 33 bp, Homo sapien
ccaagaatatgctctcacagggcagctcctaga

SEQ ID NO: 322796 - DNA, 33 bp, Homo sapien
ccaagaatatgctctcgcagggcagctcctaga

SEQ ID NO: 322797 - DNA, 33 bp, Homo sapien
aactgttttgtcctcaagctcctgacactctgg

SEQ ID NO: 322798 - DNA, 33 bp, Homo sapien
aactgttttgtcctcaggctcctgacactctgg

SEQ ID NO: 322799 - DNA, 33 bp, Homo sapien
ctttcaaccagcctgaagaactactgcccaaac

SEQ ID NO: 322800 - DNA, 33 bp, Homo sapien
ctttcaaccagcctgatgaactactgcccaaac

SEQ ID NO: 322801 - DNA, 33 bp, Homo sapien
tagtgccttctttcaacatgatgctacttttac

SEQ ID NO: 322802 - DNA, 33 bp, Homo sapien
tagtgccttctttcaatatgatgctacttttac

SEQ ID NO: 322803 - DNA, 33 bp, Homo sapien
aataatttttgaaaacagtaatgaatggagcat

SEQ ID NO: 322804 - DNA, 33 bp, Homo sapien
aataatttttgaaaacggtaatgaatggagcat

SEQ ID NO: 322805 - DNA, 33 bp, Homo sapien
gggtgctggaccagaaaactaactccctgtacc

SEQ ID NO: 322806 - DNA, 33 bp, Homo sapien
gggtgctggaccagaagactaactccctgtacc

SEQ ID NO: 322807 - DNA, 33 bp, Homo sapien
taagtccacacctctccaaagtaaatgtcatat

SEQ ID NO: 322808 - DNA, 33 bp, Homo sapien
taagtccacacctctctaaagtaaatgtcatat

SEQ ID NO: 322809 - DNA, 33 bp, Homo sapien
tttctagagcaattggaaaaatctgtagtcata

SEQ ID NO: 322810 - DNA, 33 bp, Homo sapien
tttctagagcaattgggaaaatctgtagtcata

SEQ ID NO: 322811 - DNA, 33 bp, Homo sapien
ttaaagtagaaacatacgctattatcctaatgc

SEQ ID NO: 322812 - DNA, 33 bp, Homo sapien
ttaaagtagaaacatatgctattatcctaatgc

SEQ ID NO: 322813 - DNA, 33 bp, Homo sapien
tagaaaaaaataggtaagattggcaatcagcag

SEQ ID NO: 322814 - DNA, 33 bp, Homo sapien
tagaaaaaaataggtaggattggcaatcagcag

SEQ ID NO: 322815 - DNA, 33 bp, Homo sapien
tggttagataaaatgtcaagataaacgctcata

SEQ ID NO: 322816 - DNA, 33 bp, Homo sapien
tggttagataaaatgtgaagataaacgctcata

SEQ ID NO: 322817 - DNA, 33 bp, Homo sapien
acctaagtagtgataacgtagaaaagtcagtgt

SEQ ID NO: 322818 - DNA, 33 bp, Homo sapien
acctaagtagtgataatgtagaaaagtcagtgt

SEQ ID NO: 322819 - DNA, 33 bp, Homo sapien
atacttttgcagcataaaaatgacctgggaact

SEQ ID NO: 322820 - DNA, 33 bp, Homo sapien
atacttttgcagcatacaaatgacctgggaact

SEQ ID NO: 322821 - DNA, 33 bp, Homo sapien
agctgtgggtaatgaaaacggttgagatgagtc

SEQ ID NO: 322822 - DNA, 33 bp, Homo sapien
agctgtgggtaatgaagacggttgagatgagtc

SEQ ID NO: 322823 - DNA, 33 bp, Homo sapien
ataaaaatgtccaaaaacctgggtgtagaagga

SEQ ID NO: 322824 - DNA, 33 bp, Homo sapien
ataaaaatgtccaaaagcctgggtgtagaagga

SEQ ID NO: 322825 - DNA, 33 bp, Homo sapien
ctttctgcctctaagactcgccttgccatagaa

SEQ ID NO: 322826 - DNA, 33 bp, Homo sapien
ctttctgcctctaagattcgccttgccatagaa

SEQ ID NO: 322827 - DNA, 33 bp, Homo sapien
ttggcttgtaacacaaagactgactctggcaat

SEQ ID NO: 322828 - DNA, 33 bp, Homo sapien
ttggcttgtaacacaaggactgactctggcaat

SEQ ID NO: 322829 - DNA, 33 bp, Homo sapien
tatttattcacctaagacatcagtgagcctctt

SEQ ID NO: 322830 - DNA, 33 bp, Homo sapien
tatttattcacctaaggcatcagtgagcctctt

SEQ ID NO: 322831 - DNA, 33 bp, Homo sapien
gtgtcagagtattatcaagtcctgctgaataga

SEQ ID NO: 322832 - DNA, 33 bp, Homo sapien
gtgtcagagtattatcgagtcctgctgaataga

SEQ ID NO: 322833 - DNA, 33 bp, Homo sapien
gggatataaaaacataaaacatggcctttagct

SEQ ID NO: 322834 - DNA, 33 bp, Homo sapien
gggatataaaaacatacaacatggcctttagct

SEQ ID NO: 322835 - DNA, 33 bp, Homo sapien
gttctgcaaatttcacacttgccagcaattgag

SEQ ID NO: 322836 - DNA, 33 bp, Homo sapien
gttctgcaaatttcacgcttgccagcaattgag

SEQ ID NO: 322837 - DNA, 33 bp, Homo sapien
acatttgatgcttactaaatatcagactgtatg

SEQ ID NO: 322838 - DNA, 33 bp, Homo sapien
acatttgatgcttactgaatatcagactgtatg

SEQ ID NO: 322839 - DNA, 33 bp, Homo sapien
ttcctcagcctgataaatgaatcaagctgcatt

SEQ ID NO: 322840 - DNA, 33 bp, Homo sapien
ttcctcagcctgataagtgaatcaagctgcatt

SEQ ID NO: 322841 - DNA, 33 bp, Homo sapien
ccttgaatgtaacttacgcatatacttgcagaa

SEQ ID NO: 322842 - DNA, 33 bp, Homo sapien
ccttgaatgtaacttatgcatatacttgcagaa

SEQ ID NO: 322843 - DNA, 33 bp, Homo sapien
atcagattgctagatacacaaaagtaccaaatt

SEQ ID NO: 322844 - DNA, 33 bp, Homo sapien
atcagattgctagatagacaaaagtaccaaatt

SEQ ID NO: 322845 - DNA, 33 bp, Homo sapien
ctcaataatattgataaacctctagccaaatta

SEQ ID NO: 322846 - DNA, 33 bp, Homo sapien
ctcaataatattgatatacctctagccaaatta

SEQ ID NO: 322847 - DNA, 33 bp, Homo sapien
tgtgtatctgtaatcccttgtatcacattgagc

SEQ ID NO: 322848 - DNA, 33 bp, Homo sapien
tgtgtatctgtaatcctttgtatcacattgagc

SEQ ID NO: 322849 - DNA, 33 bp, Homo sapien
atcagaaggagatgaaatgtagctcagtgaatt

SEQ ID NO: 322850 - DNA, 33 bp, Homo sapien
atcagaaggagatgaagtgtagctcagtgaatt

SEQ ID NO: 322851 - DNA, 33 bp, Homo sapien
caaatcttatacaacacctggtgacctgtataa

SEQ ID NO: 322852 - DNA, 33 bp, Homo sapien
caaatcttatacaacatctggtgacctgtataa

SEQ ID NO: 322853 - DNA, 33 bp, Homo sapien
atgatgttgcataacaaatgatttccaaaattt

SEQ ID NO: 322854 - DNA, 33 bp, Homo sapien
atgatgttgcataacagatgatttccaaaattt

SEQ ID NO: 322855 - DNA, 33 bp, Homo sapien
attgccatctggttaacaccaatttcttcctga

SEQ ID NO: 322856 - DNA, 33 bp, Homo sapien
attgccatctggttaataccaatttcttcctga

SEQ ID NO: 322857 - DNA, 33 bp, Homo sapien
tctaggaagttataagccacaatattattgcca

SEQ ID NO: 322858 - DNA, 33 bp, Homo sapien
tctaggaagttataaggcacaatattattgcca

SEQ ID NO: 322859 - DNA, 33 bp, Homo sapien
ctcaaactacaaagagcaaataattttagtggt

SEQ ID NO: 322860 - DNA, 33 bp, Homo sapien
ctcaaactacaaagaggaaataattttagtggt

SEQ ID NO: 322861 - DNA, 33 bp, Homo sapien
gtctggactccacatacgagctctctttatggt

SEQ ID NO: 322862 - DNA, 33 bp, Homo sapien
gtctggactccacatatgagctctctttatggt

SEQ ID NO: 322863 - DNA, 33 bp, Homo sapien
catcccaggaaaaggcaataaggaaactcactt

SEQ ID NO: 322864 - DNA, 33 bp, Homo sapien
catcccaggaaaaggcgataaggaaactcactt

SEQ ID NO: 322865 - DNA, 33 bp, Homo sapien
tagaaatgaaaaaatacggtgtgataccaaaat

SEQ ID NO: 322866 - DNA, 33 bp, Homo sapien
tagaaatgaaaaaatatggtgtgataccaaaat

SEQ ID NO: 322867 - DNA, 33 bp, Homo sapien
tccaggtgatacaacaaggcagtttaaatgaag

SEQ ID NO: 322868 - DNA, 33 bp, Homo sapien
tccaggtgatacaacatggcagtttaaatgaag

SEQ ID NO: 322869 - DNA, 33 bp, Homo sapien
tgagaatagattatgacggtttaattgaataaa

SEQ ID NO: 322870 - DNA, 33 bp, Homo sapien
tgagaatagattatgatggtttaattgaataaa

SEQ ID NO: 322871 - DNA, 33 bp, Homo sapien
aaagacgtggaaccagaaaatactaagggccta

SEQ ID NO: 322872 - DNA, 33 bp, Homo sapien
aaagacgtggaaccagcaaatactaagggccta

SEQ ID NO: 322873 - DNA, 33 bp, Homo sapien
gctgaggtccaacaagactacactctgcctttc

SEQ ID NO: 322874 - DNA, 33 bp, Homo sapien
gctgaggtccaacaaggctacactctgcctttc

SEQ ID NO: 322875 - DNA, 33 bp, Homo sapien
ggacccagattttgaacaggggagtgctgagaa

SEQ ID NO: 322876 - DNA, 33 bp, Homo sapien
ggacccagattttgaataggggagtgctgagaa

SEQ ID NO: 322877 - DNA, 33 bp, Homo sapien
gaatagtaccatcttcccagtgtcccaatcatc

SEQ ID NO: 322878 - DNA, 33 bp, Homo sapien
gaatagtaccatcttctcagtgtcccaatcatc

SEQ ID NO: 322879 - DNA, 33 bp, Homo sapien
caaattcataaagaacagcattcaatctttact

SEQ ID NO: 322880 - DNA, 33 bp, Homo sapien
caaattcataaagaacggcattcaatctttact

SEQ ID NO: 322881 - DNA, 33 bp, Homo sapien
taacaacatcagcccaagacttcagagccttct

SEQ ID NO: 322882 - DNA, 33 bp, Homo sapien
taacaacatcagcccaggacttcagagccttct

SEQ ID NO: 322883 - DNA, 33 bp, Homo sapien
aggagagggttagaaaatatggaatgaaaatag

SEQ ID NO: 322884 - DNA, 33 bp, Homo sapien
aggagagggttagaaagtatggaatgaaaatag

SEQ ID NO: 322885 - DNA, 33 bp, Homo sapien
acctgtatcccaaatacgcttctagagaaatta

SEQ ID NO: 322886 - DNA, 33 bp, Homo sapien
acctgtatcccaaatatgcttctagagaaatta

SEQ ID NO: 322887 - DNA, 33 bp, Homo sapien
ttaaactgtggattaccggcttcttctgaaata

SEQ ID NO: 322888 - DNA, 33 bp, Homo sapien
ttaaactgtggattactggcttcttctgaaata

SEQ ID NO: 322889 - DNA, 33 bp, Homo sapien
atatgtagagaaacataagtcaacatttactct

SEQ ID NO: 322890 - DNA, 33 bp, Homo sapien
atatgtagagaaacatcagtcaacatttactct

SEQ ID NO: 322891 - DNA, 33 bp, Homo sapien
ctaagattcttccatcacagcttctcatttaca

SEQ ID NO: 322892 - DNA, 33 bp, Homo sapien
ctaagattcttccatcccagcttctcatttaca

SEQ ID NO: 322893 - DNA, 33 bp, Homo sapien
ttccagtggttttaacagaatccatttatttca

SEQ ID NO: 322894 - DNA, 33 bp, Homo sapien
ttccagtggttttaactgaatccatttatttca

SEQ ID NO: 322895 - DNA, 33 bp, Homo sapien
ttaaccctaaatcagcaattacaatgtgaatat

SEQ ID NO: 322896 - DNA, 33 bp, Homo sapien
ttaaccctaaatcagcgattacaatgtgaatat

SEQ ID NO: 322897 - DNA, 33 bp, Homo sapien
ctaaagcaatttgacacggaaagtacctctaga

SEQ ID NO: 322898 - DNA, 33 bp, Homo sapien
ctaaagcaatttgacatggaaagtacctctaga

SEQ ID NO: 322899 - DNA, 33 bp, Homo sapien
ttttgcctatgagcaacaggctatatgatatag

SEQ ID NO: 322900 - DNA, 33 bp, Homo sapien
ttttgcctatgagcaagaggctatatgatatag

SEQ ID NO: 322901 - DNA, 33 bp, Homo sapien
tagaactgagtcacaacgtcttaaggaggatgc

SEQ ID NO: 322902 - DNA, 33 bp, Homo sapien
tagaactgagtcacaatgtcttaaggaggatgc

SEQ ID NO: 322903 - DNA, 33 bp, Homo sapien
agattattcctgatgccaagagtttatcatgcc

SEQ ID NO: 322904 - DNA, 33 bp, Homo sapien
agattattcctgatgctaagagtttatcatgcc

SEQ ID NO: 322905 - DNA, 33 bp, Homo sapien
aagaaatgagcttcaagctatgaaatgacataa

SEQ ID NO: 322906 - DNA, 33 bp, Homo sapien
aagaaatgagcttcaatctatgaaatgacataa

SEQ ID NO: 322907 - DNA, 33 bp, Homo sapien
tgaggtcagttagtgaataacagaaacctgacc

SEQ ID NO: 322908 - DNA, 33 bp, Homo sapien
tgaggtcagttagtgagtaacagaaacctgacc

SEQ ID NO: 322909 - DNA, 33 bp, Homo sapien
cacagtttgcttcttacatagtagcctttagaa

SEQ ID NO: 322910 - DNA, 33 bp, Homo sapien
cacagtttgcttcttatatagtagcctttagaa

SEQ ID NO: 322911 - DNA, 33 bp, Homo sapien
ctagccagagattaaacttaaacttagttcata

SEQ ID NO: 322912 - DNA, 33 bp, Homo sapien
ctagccagagattaaatttaaacttagttcata

SEQ ID NO: 322913 - DNA, 33 bp, Homo sapien
accgcggtgagatagaagaaaagcccaaaggta

SEQ ID NO: 322914 - DNA, 33 bp, Homo sapien
accgcggtgagatagaggaaaagcccaaaggta

SEQ ID NO: 322915 - DNA, 33 bp, Homo sapien
atcagttttcccattgaaagttatttcgttatt

SEQ ID NO: 322916 - DNA, 33 bp, Homo sapien
atcagttttcccattgcaagttatttcgttatt

SEQ ID NO: 322917 - DNA, 33 bp, Homo sapien
cctgtctctggctaaaggaaatcttgctgaatg

SEQ ID NO: 322918 - DNA, 33 bp, Homo sapien
cctgtctctggctaaatgaaatcttgctgaatg

SEQ ID NO: 322919 - DNA, 33 bp, Homo sapien
ggttttcataaccaccagatcaatagaaaatgc

SEQ ID NO: 322920 - DNA, 33 bp, Homo sapien
ggttttcataaccaccggatcaatagaaaatgc

SEQ ID NO: 322921 - DNA, 33 bp, Homo sapien
tctcattttgaactagaataaacacttcttggt

SEQ ID NO: 322922 - DNA, 33 bp, Homo sapien
tctcattttgaactaggataaacacttcttggt

SEQ ID NO: 322923 - DNA, 33 bp, Homo sapien
atcataaaaaacagaaggtgtctaactctagaa

SEQ ID NO: 322924 - DNA, 33 bp, Homo sapien
atcataaaaaacagaatgtgtctaactctagaa

SEQ ID NO: 322925 - DNA, 33 bp, Homo sapien
tctgtttatgctgtaaaaacaacccgaaacaga

SEQ ID NO: 322926 - DNA, 33 bp, Homo sapien
tctgtttatgctgtaagaacaacccgaaacaga

SEQ ID NO: 322927 - DNA, 33 bp, Homo sapien
tatacacttccctgaaaaaattgccggaacaag

SEQ ID NO: 322928 - DNA, 33 bp, Homo sapien
tatacacttccctgaagaaattgccggaacaag

SEQ ID NO: 322929 - DNA, 33 bp, Homo sapien
tccaaactatagcaaacactcctgtggaatatg

SEQ ID NO: 322930 - DNA, 33 bp, Homo sapien
tccaaactatagcaaatactcctgtggaatatg

SEQ ID NO: 322931 - DNA, 33 bp, Homo sapien
ttgttttagaactttgcaatggaagttattgaa

SEQ ID NO: 322932 - DNA, 33 bp, Homo sapien
ttgttttagaactttgtaatggaagttattgaa

SEQ ID NO: 322933 - DNA, 33 bp, Homo sapien
attctactttcataagaattaagccaatttctt

SEQ ID NO: 322934 - DNA, 33 bp, Homo sapien
attctactttcataaggattaagccaatttctt

SEQ ID NO: 322935 - DNA, 33 bp, Homo sapien
agcaactagcaggttccgaaaatgagtgtagta

SEQ ID NO: 322936 - DNA, 33 bp, Homo sapien
agcaactagcaggttctgaaaatgagtgtagta

SEQ ID NO: 322937 - DNA, 33 bp, Homo sapien
ccaaagacgtatgggacaaagaacacaaatcag

SEQ ID NO: 322938 - DNA, 33 bp, Homo sapien
ccaaagacgtatgggagaaagaacacaaatcag

SEQ ID NO: 322939 - DNA, 33 bp, Homo sapien
gctcaaaagggaacccggatcaagactgatatt

SEQ ID NO: 322940 - DNA, 33 bp, Homo sapien
gctcaaaagggaaccctgatcaagactgatatt

SEQ ID NO: 322941 - DNA, 33 bp, Homo sapien
tcacgcatgatacataaattaagtgcttgctat

SEQ ID NO: 322942 - DNA, 33 bp, Homo sapien
tcacgcatgatacatacattaagtgcttgctat

SEQ ID NO: 322943 - DNA, 33 bp, Homo sapien
aatgcgggtgatcacaacttttctatttcttct

SEQ ID NO: 322944 - DNA, 33 bp, Homo sapien
aatgcgggtgatcacagcttttctatttcttct

SEQ ID NO: 322945 - DNA, 33 bp, Homo sapien
tgagtaactcattagacatgacagggcatcatt

SEQ ID NO: 322946 - DNA, 33 bp, Homo sapien
tgagtaactcattagatatgacagggcatcatt

SEQ ID NO: 322947 - DNA, 33 bp, Homo sapien
agaagttcctcttgaaaatgttgagtttgaggt

SEQ ID NO: 322948 - DNA, 33 bp, Homo sapien
agaagttcctcttgaatatgttgagtttgaggt

SEQ ID NO: 322949 - DNA, 33 bp, Homo sapien
cttctttatactctcaataccctcaaaaatagc

SEQ ID NO: 322950 - DNA, 33 bp, Homo sapien
cttctttatactctcattaccctcaaaaatagc

SEQ ID NO: 322951 - DNA, 33 bp, Homo sapien
tgtttgataacaaatcagacaacaaaagcaaaa

SEQ ID NO: 322952 - DNA, 33 bp, Homo sapien
tgtttgataacaaatcggacaacaaaagcaaaa

SEQ ID NO: 322953 - DNA, 33 bp, Homo sapien
cataaatacggcctaactggttacagcttggtg

SEQ ID NO: 322954 - DNA, 33 bp, Homo sapien
cataaatacggcctaattggttacagcttggtg

SEQ ID NO: 322955 - DNA, 33 bp, Homo sapien
gaaataagcataggcaacttgaattcctcagaa

SEQ ID NO: 322956 - DNA, 33 bp, Homo sapien
gaaataagcataggcagcttgaattcctcagaa

SEQ ID NO: 322957 - DNA, 33 bp, Homo sapien
gtgtccaaaattagcacggaaccaatgaagctg

SEQ ID NO: 322958 - DNA, 33 bp, Homo sapien
gtgtccaaaattagcatggaaccaatgaagctg

SEQ ID NO: 322959 - DNA, 33 bp, Homo sapien
ggattaaaccatttccagacagaggacccgggg

SEQ ID NO: 322960 - DNA, 33 bp, Homo sapien
ggattaaaccatttccggacagaggacccgggg

SEQ ID NO: 322961 - DNA, 33 bp, Homo sapien
aggagggcttgtcaaaacatagattcctgggct

SEQ ID NO: 322962 - DNA, 33 bp, Homo sapien
aggagggcttgtcaaaccatagattcctgggct

SEQ ID NO: 322963 - DNA, 33 bp, Homo sapien
aagcattgcatatgccacaagcactagacacct

SEQ ID NO: 322964 - DNA, 33 bp, Homo sapien
aagcattgcatatgccgcaagcactagacacct

SEQ ID NO: 322965 - DNA, 33 bp, Homo sapien
aatctccagtttagcaatctaatgcctttggca

SEQ ID NO: 322966 - DNA, 33 bp, Homo sapien
aatctccagtttagcagtctaatgcctttggca

SEQ ID NO: 322967 - DNA, 33 bp, Homo sapien
caacttccgtcaataaatcatatgcctcctgag

SEQ ID NO: 322968 - DNA, 33 bp, Homo sapien
caacttccgtcaataagtcatatgcctcctgag

SEQ ID NO: 322969 - DNA, 33 bp, Homo sapien
agcaatttcttagtgcaactccaattctcgcat

SEQ ID NO: 322970 - DNA, 33 bp, Homo sapien
agcaatttcttagtgccactccaattctcgcat

SEQ ID NO: 322971 - DNA, 33 bp, Homo sapien
ataatcaggaaataaccgctgtacatggactat

SEQ ID NO: 322972 - DNA, 33 bp, Homo sapien
ataatcaggaaataactgctgtacatggactat

SEQ ID NO: 322973 - DNA, 33 bp, Homo sapien
tcttctgttgtttacaaagacaggactagagtt

SEQ ID NO: 322974 - DNA, 33 bp, Homo sapien
tcttctgttgtttacagagacaggactagagtt

SEQ ID NO: 322975 - DNA, 33 bp, Homo sapien
aggtttctggttatgactcacaagaactcacaa

SEQ ID NO: 322976 - DNA, 33 bp, Homo sapien
aggtttctggttatgattcacaagaactcacaa

SEQ ID NO: 322977 - DNA, 33 bp, Homo sapien
tacactctattcttcaataagaccaaatgactc

SEQ ID NO: 322978 - DNA, 33 bp, Homo sapien
tacactctattcttcagtaagaccaaatgactc

SEQ ID NO: 322979 - DNA, 33 bp, Homo sapien
tttttaaacaagctccccaggacaaactgatgt

SEQ ID NO: 322980 - DNA, 33 bp, Homo sapien
tttttaaacaagctcctcaggacaaactgatgt

SEQ ID NO: 322981 - DNA, 33 bp, Homo sapien
ttcagcagctgaaacaataacacctgggagagc

SEQ ID NO: 322982 - DNA, 33 bp, Homo sapien
ttcagcagctgaaacagtaacacctgggagagc

SEQ ID NO: 322983 - DNA, 33 bp, Homo sapien
ggatgcctattttcaccatgtcaattcaacata

SEQ ID NO: 322984 - DNA, 33 bp, Homo sapien
ggatgcctattttcactatgtcaattcaacata

SEQ ID NO: 322985 - DNA, 33 bp, Homo sapien
gctatggcctaaagaaaaccactgcaaacaatg

SEQ ID NO: 322986 - DNA, 33 bp, Homo sapien
gctatggcctaaagaagaccactgcaaacaatg

SEQ ID NO: 322987 - DNA, 33 bp, Homo sapien
atactggctacttaacgccttaagattcagtag

SEQ ID NO: 322988 - DNA, 33 bp, Homo sapien
atactggctacttaactccttaagattcagtag

SEQ ID NO: 322989 - DNA, 33 bp, Homo sapien
ccataggtgttttatactactgctcactggtat

SEQ ID NO: 322990 - DNA, 33 bp, Homo sapien
ccataggtgttttatagtactgctcactggtat

SEQ ID NO: 322991 - DNA, 33 bp, Homo sapien
gaagtcaagctgtgcaaagtcaattcaactttg

SEQ ID NO: 322992 - DNA, 33 bp, Homo sapien
gaagtcaagctgtgcagagtcaattcaactttg

SEQ ID NO: 322993 - DNA, 33 bp, Homo sapien
gcaattttattcactcatatcgaattgggcttg

SEQ ID NO: 322994 - DNA, 33 bp, Homo sapien
gcaattttattcactcgtatcgaattgggcttg

SEQ ID NO: 322995 - DNA, 33 bp, Homo sapien
ataaattggtaatccacgttgagttcagttgct

SEQ ID NO: 322996 - DNA, 33 bp, Homo sapien
ataaattggtaatccatgttgagttcagttgct

SEQ ID NO: 322997 - DNA, 33 bp, Homo sapien
aatacttgcattaccaacagttttctactagtt

SEQ ID NO: 322998 - DNA, 33 bp, Homo sapien
aatacttgcattaccatcagttttctactagtt

SEQ ID NO: 322999 - DNA, 33 bp, Homo sapien
tctggatgcattgtggaaaaaataatataaaga

SEQ ID NO: 323000 - DNA, 33 bp, Homo sapien
tctggatgcattgtggcaaaaataatataaaga

SEQ ID NO: 323001 - DNA, 33 bp, Homo sapien
ttgtggagtctaccacaagaaaaattctgaaga

SEQ ID NO: 323002 - DNA, 33 bp, Homo sapien
ttgtggagtctaccacgagaaaaattctgaaga

SEQ ID NO: 323003 - DNA, 33 bp, Homo sapien
gactgggtctcacatgaatatttacaggcggct

SEQ ID NO: 323004 - DNA, 33 bp, Homo sapien
gactgggtctcacatggatatttacaggcggct

SEQ ID NO: 323005 - DNA, 33 bp, Homo sapien
agcaatttatggaaatcatgtggcaagaaggta

SEQ ID NO: 323006 - DNA, 33 bp, Homo sapien
agcaatttatggaaatgatgtggcaagaaggta

SEQ ID NO: 323007 - DNA, 33 bp, Homo sapien
tgtgaggtgtatatcaaatttttaccttttcaa

SEQ ID NO: 323008 - DNA, 33 bp, Homo sapien
tgtgaggtgtatatcacatttttaccttttcaa

SEQ ID NO: 323009 - DNA, 33 bp, Homo sapien
atatcacaacatccaaacaattcatcatctgaa

SEQ ID NO: 323010 - DNA, 33 bp, Homo sapien
atatcacaacatccaaccaattcatcatctgaa

SEQ ID NO: 323011 - DNA, 33 bp, Homo sapien
tatgctgcattgagaaacgaaattaagatgagg

SEQ ID NO: 323012 - DNA, 33 bp, Homo sapien
tatgctgcattgagaagcgaaattaagatgagg

SEQ ID NO: 323013 - DNA, 33 bp, Homo sapien
gcaaatttagctccaaacttcttaaaagccaag

SEQ ID NO: 323014 - DNA, 33 bp, Homo sapien
gcaaatttagctccaagcttcttaaaagccaag

SEQ ID NO: 323015 - DNA, 33 bp, Homo sapien
gaagccacaggcaatacatgaatttgaagacca

SEQ ID NO: 323016 - DNA, 33 bp, Homo sapien
gaagccacaggcaatatatgaatttgaagacca

SEQ ID NO: 323017 - DNA, 33 bp, Homo sapien
caaatcttgactcttacacagatggatgtcttt

SEQ ID NO: 323018 - DNA, 33 bp, Homo sapien
caaatcttgactcttatacagatggatgtcttt

SEQ ID NO: 323019 - DNA, 33 bp, Homo sapien
cctcacacaaaaaaaaatgacttctaatattaa

SEQ ID NO: 323020 - DNA, 33 bp, Homo sapien
cctcacacaaaaaaaagtgacttctaatattaa

SEQ ID NO: 323021 - DNA, 33 bp, Homo sapien
attctttcttctaaaccatgttatctcattatc

SEQ ID NO: 323022 - DNA, 33 bp, Homo sapien
attctttcttctaaacgatgttatctcattatc

SEQ ID NO: 323023 - DNA, 33 bp, Homo sapien
gacattcagacagacccatgttaaattccagat

SEQ ID NO: 323024 - DNA, 33 bp, Homo sapien
gacattcagacagacctatgttaaattccagat

SEQ ID NO: 323025 - DNA, 33 bp, Homo sapien
caaaacagtggccttaccagaatcaagaaatga

SEQ ID NO: 323026 - DNA, 33 bp, Homo sapien
caaaacagtggccttatcagaatcaagaaatga

SEQ ID NO: 323027 - DNA, 33 bp, Homo sapien
tggtcaatgtagatcacggaaatgtccttgttt

SEQ ID NO: 323028 - DNA, 33 bp, Homo sapien
tggtcaatgtagatcatggaaatgtccttgttt

SEQ ID NO: 323029 - DNA, 33 bp, Homo sapien
caggagacgcttgctccattagtttcctagggc

SEQ ID NO: 323030 - DNA, 33 bp, Homo sapien
caggagacgcttgctctattagtttcctagggc

SEQ ID NO: 323031 - DNA, 33 bp, Homo sapien
ttgaccatgacaagtaagggctgttgatacaga

SEQ ID NO: 323032 - DNA, 33 bp, Homo sapien
ttgaccatgacaagtaggggctgttgatacaga

SEQ ID NO: 323033 - DNA, 33 bp, Homo sapien
cacgagaagtcacttaaaatgaagaggaataaa

SEQ ID NO: 323034 - DNA, 33 bp, Homo sapien
cacgagaagtcacttacaatgaagaggaataaa

SEQ ID NO: 323035 - DNA, 33 bp, Homo sapien
cctcaggtactcctgaagactcagttaaaaata

SEQ ID NO: 323036 - DNA, 33 bp, Homo sapien
cctcaggtactcctgatgactcagttaaaaata

SEQ ID NO: 323037 - DNA, 33 bp, Homo sapien
tagtatcatccatccaagttcttgccatgggct

SEQ ID NO: 323038 - DNA, 33 bp, Homo sapien
tagtatcatccatccacgttcttgccatgggct

SEQ ID NO: 323039 - DNA, 33 bp, Homo sapien
ttctattagacattcacgttgcatttttattag

SEQ ID NO: 323040 - DNA, 33 bp, Homo sapien
ttctattagacattcatgttgcatttttattag

SEQ ID NO: 323041 - DNA, 33 bp, Homo sapien
aaggaacttgcccaaactacttataagcagaaa

SEQ ID NO: 323042 - DNA, 33 bp, Homo sapien
aaggaacttgcccaaattacttataagcagaaa

SEQ ID NO: 323043 - DNA, 33 bp, Homo sapien
attggtattgatgaatcacttagtgctttcttt

SEQ ID NO: 323044 - DNA, 33 bp, Homo sapien
attggtattgatgaattacttagtgctttcttt

SEQ ID NO: 323045 - DNA, 33 bp, Homo sapien
cacgtgcaattagcttaaaaatgtccacaaaac

SEQ ID NO: 323046 - DNA, 33 bp, Homo sapien
cacgtgcaattagcttgaaaatgtccacaaaac

SEQ ID NO: 323047 - DNA, 33 bp, Homo sapien
aacttaacaaggttctaaaactgtcataaagtt

SEQ ID NO: 323048 - DNA, 33 bp, Homo sapien
aacttaacaaggttctgaaactgtcataaagtt

SEQ ID NO: 323049 - DNA, 33 bp, Homo sapien
ccctcagctctcataacgggaccaaattcatgg

SEQ ID NO: 323050 - DNA, 33 bp, Homo sapien
ccctcagctctcataatgggaccaaattcatgg

SEQ ID NO: 323051 - DNA, 33 bp, Homo sapien
cagtggaagttaataaagctgaatctttaaata

SEQ ID NO: 323052 - DNA, 33 bp, Homo sapien
cagtggaagttaataatgctgaatctttaaata

SEQ ID NO: 323053 - DNA, 33 bp, Homo sapien
agactaggaattaatgaacgcagacatcatagg

SEQ ID NO: 323054 - DNA, 33 bp, Homo sapien
agactaggaattaatggacgcagacatcatagg

SEQ ID NO: 323055 - DNA, 33 bp, Homo sapien
atggtcgtatcttagaacatgtggtgggagtta

SEQ ID NO: 323056 - DNA, 33 bp, Homo sapien
atggtcgtatcttagagcatgtggtgggagtta

SEQ ID NO: 323057 - DNA, 33 bp, Homo sapien
atgacttgtcatcatcccagttcctgtagaaat

SEQ ID NO: 323058 - DNA, 33 bp, Homo sapien
atgacttgtcatcatcgcagttcctgtagaaat

SEQ ID NO: 323059 - DNA, 33 bp, Homo sapien
tttgtacctcttctgcactgaaactagagagcc

SEQ ID NO: 323060 - DNA, 33 bp, Homo sapien
tttgtacctcttctgcgctgaaactagagagcc

SEQ ID NO: 323061 - DNA, 33 bp, Homo sapien
gacctcttttaagtcaagttgtggctttgaaaa

SEQ ID NO: 323062 - DNA, 33 bp, Homo sapien
gacctcttttaagtcaggttgtggctttgaaaa

SEQ ID NO: 323063 - DNA, 33 bp, Homo sapien
aaatatttgacaaccaagaatttaaaatttgtt

SEQ ID NO: 323064 - DNA, 33 bp, Homo sapien
aaatatttgacaaccacgaatttaaaatttgtt

SEQ ID NO: 323065 - DNA, 33 bp, Homo sapien
tcgtgttaaatagttgaatgatatagaatggaa

SEQ ID NO: 323066 - DNA, 33 bp, Homo sapien
tcgtgttaaatagttgtatgatatagaatggaa

SEQ ID NO: 323067 - DNA, 33 bp, Homo sapien
catgcttaaaccataacttaaatgaggatgaat

SEQ ID NO: 323068 - DNA, 33 bp, Homo sapien
catgcttaaaccataatttaaatgaggatgaat

SEQ ID NO: 323069 - DNA, 33 bp, Homo sapien
gctgttatgagaaatacaatagataatcttgag

SEQ ID NO: 323070 - DNA, 33 bp, Homo sapien
gctgttatgagaaatagaatagataatcttgag

SEQ ID NO: 323071 - DNA, 33 bp, Homo sapien
cagagattggagttcacagaaaagtaaaagaag

SEQ ID NO: 323072 - DNA, 33 bp, Homo sapien
cagagattggagttcatagaaaagtaaaagaag

SEQ ID NO: 323073 - DNA, 33 bp, Homo sapien
accctcaaatgctctcaaatgtacccactgctc

SEQ ID NO: 323074 - DNA, 33 bp, Homo sapien
accctcaaatgctctcgaatgtacccactgctc

SEQ ID NO: 323075 - DNA, 33 bp, Homo sapien
gagggatcttcttacacgctcattcaggctgtt

SEQ ID NO: 323076 - DNA, 33 bp, Homo sapien
gagggatcttcttacaggctcattcaggctgtt

SEQ ID NO: 323077 - DNA, 33 bp, Homo sapien
tgaagggcaaacaccactgagttaatcagagaa

SEQ ID NO: 323078 - DNA, 33 bp, Homo sapien
tgaagggcaaacaccattgagttaatcagagaa

SEQ ID NO: 323079 - DNA, 33 bp, Homo sapien
tggttgaagataagtaaggtaaaggagaagtgt

SEQ ID NO: 323080 - DNA, 33 bp, Homo sapien
tggttgaagataagtagggtaaaggagaagtgt

SEQ ID NO: 323081 - DNA, 33 bp, Homo sapien
atccctggtaataagtcacaggacaacagatat

SEQ ID NO: 323082 - DNA, 33 bp, Homo sapien
atccctggtaataagttacaggacaacagatat

SEQ ID NO: 323083 - DNA, 33 bp, Homo sapien
atgttagtctaatccccaggcaagaaggaagtc

SEQ ID NO: 323084 - DNA, 33 bp, Homo sapien
atgttagtctaatcccgaggcaagaaggaagtc

SEQ ID NO: 323085 - DNA, 33 bp, Homo sapien
agcattctaggcctgacggttataaaggtgtgt

SEQ ID NO: 323086 - DNA, 33 bp, Homo sapien
agcattctaggcctgatggttataaaggtgtgt

SEQ ID NO: 323087 - DNA, 33 bp, Homo sapien
gctttggtgtttaaccagcagcgactttgtgca

SEQ ID NO: 323088 - DNA, 33 bp, Homo sapien
gctttggtgtttaaccggcagcgactttgtgca

SEQ ID NO: 323089 - DNA, 33 bp, Homo sapien
tccagtggaaatccgacctgggcaatttatgac

SEQ ID NO: 323090 - DNA, 33 bp, Homo sapien
tccagtggaaatccgatctgggcaatttatgac

SEQ ID NO: 323091 - DNA, 33 bp, Homo sapien
gtcatagaactatcacccattttcatgcctgca

SEQ ID NO: 323092 - DNA, 33 bp, Homo sapien
gtcatagaactatcactcattttcatgcctgca

SEQ ID NO: 323093 - DNA, 33 bp, Homo sapien
gttaatgataatcaggaaatctgaatacatttt

SEQ ID NO: 323094 - DNA, 33 bp, Homo sapien
gttaatgataatcaggcaatctgaatacatttt

SEQ ID NO: 323095 - DNA, 33 bp, Homo sapien
gacgtgtgttagaaaaaatattctaaaagacaa

SEQ ID NO: 323096 - DNA, 33 bp, Homo sapien
gacgtgtgttagaaaagatattctaaaagacaa

SEQ ID NO: 323097 - DNA, 33 bp, Homo sapien
taagtgcctctatttcgaatcaaattcttcccc

SEQ ID NO: 323098 - DNA, 33 bp, Homo sapien
taagtgcctctatttctaatcaaattcttcccc

SEQ ID NO: 323099 - DNA, 33 bp, Homo sapien
tgggacatttcctaacaccttaaacagctactc

SEQ ID NO: 323100 - DNA, 33 bp, Homo sapien
tgggacatttcctaacgccttaaacagctactc

SEQ ID NO: 323101 - DNA, 33 bp, Homo sapien
gcattttgataaactacgtaggcacacattagc

SEQ ID NO: 323102 - DNA, 33 bp, Homo sapien
gcattttgataaactatgtaggcacacattagc

SEQ ID NO: 323103 - DNA, 33 bp, Homo sapien
gcacaggtaaactatcaaatctatttcaccatg

SEQ ID NO: 323104 - DNA, 33 bp, Homo sapien
gcacaggtaaactatctaatctatttcaccatg

SEQ ID NO: 323105 - DNA, 33 bp, Homo sapien
aaatcaataaatgctaaaaatagatcgtgtttt

SEQ ID NO: 323106 - DNA, 33 bp, Homo sapien
aaatcaataaatgctagaaatagatcgtgtttt

SEQ ID NO: 323107 - DNA, 33 bp, Homo sapien
tgcgtgttaatgaaccgccctgtggatataaca

SEQ ID NO: 323108 - DNA, 33 bp, Homo sapien
tgcgtgttaatgaacctccctgtggatataaca

SEQ ID NO: 323109 - DNA, 33 bp, Homo sapien
gtgtgttataatctccactgtatttctgtctgc

SEQ ID NO: 323110 - DNA, 33 bp, Homo sapien
gtgtgttataatctccgctgtatttctgtctgc

SEQ ID NO: 323111 - DNA, 33 bp, Homo sapien
tcgggtagcatctttacagtagtgtgaaaataa

SEQ ID NO: 323112 - DNA, 33 bp, Homo sapien
tcgggtagcatctttatagtagtgtgaaaataa

SEQ ID NO: 323113 - DNA, 33 bp, Homo sapien
aaattctctctggaagcctcatacatcccccct

SEQ ID NO: 323114 - DNA, 33 bp, Homo sapien
aaattctctctggaagtctcatacatcccccct

SEQ ID NO: 323115 - DNA, 33 bp, Homo sapien
ccagaagtcagaggaaagtccatgaggataaga

SEQ ID NO: 323116 - DNA, 33 bp, Homo sapien
ccagaagtcagaggaaggtccatgaggataaga

SEQ ID NO: 323117 - DNA, 33 bp, Homo sapien
tactatgttttatttacgacaggagcttttgcc

SEQ ID NO: 323118 - DNA, 33 bp, Homo sapien
tactatgttttatttatgacaggagcttttgcc

SEQ ID NO: 323119 - DNA, 33 bp, Homo sapien
ttgcatcttcttacacacccctgccttgcccct

SEQ ID NO: 323120 - DNA, 33 bp, Homo sapien
ttgcatcttcttacacgcccctgccttgcccct

SEQ ID NO: 323121 - DNA, 33 bp, Homo sapien
cttctttcactctctgaaaaccgctgccccctt

SEQ ID NO: 323122 - DNA, 33 bp, Homo sapien
cttctttcactctctgcaaaccgctgccccctt

SEQ ID NO: 323123 - DNA, 33 bp, Homo sapien
tgtttgttaatgctcactgaagtacttttatag

SEQ ID NO: 323124 - DNA, 33 bp, Homo sapien
tgtttgttaatgctcattgaagtacttttatag

SEQ ID NO: 323125 - DNA, 33 bp, Homo sapien
tgttggaagaagccaactaaaatggaatgtcta

SEQ ID NO: 323126 - DNA, 33 bp, Homo sapien
tgttggaagaagccaattaaaatggaatgtcta

SEQ ID NO: 323127 - DNA, 33 bp, Homo sapien
caagtggaagaatgtcactagcaaaggtttgga

SEQ ID NO: 323128 - DNA, 33 bp, Homo sapien
caagtggaagaatgtccctagcaaaggtttgga

SEQ ID NO: 323129 - DNA, 33 bp, Homo sapien
aacccatctggctacaactggctcacacttcac

SEQ ID NO: 323130 - DNA, 33 bp, Homo sapien
aacccatctggctacatctggctcacacttcac

SEQ ID NO: 323131 - DNA, 33 bp, Homo sapien
gtcacatagcagaatgaatcttaagtgtgtctg

SEQ ID NO: 323132 - DNA, 33 bp, Homo sapien
gtcacatagcagaatgcatcttaagtgtgtctg

SEQ ID NO: 323133 - DNA, 33 bp, Homo sapien
tttcgaagccttcagaaaaatgcattgcattgt

SEQ ID NO: 323134 - DNA, 33 bp, Homo sapien
tttcgaagccttcagagaaatgcattgcattgt

SEQ ID NO: 323135 - DNA, 33 bp, Homo sapien
gaatctactccaagccaaacttcggcttgataa

SEQ ID NO: 323136 - DNA, 33 bp, Homo sapien
gaatctactccaagcccaacttcggcttgataa

SEQ ID NO: 323137 - DNA, 33 bp, Homo sapien
acaatgctatgaaccacaaagctgaagttcaac

SEQ ID NO: 323138 - DNA, 33 bp, Homo sapien
acaatgctatgaaccataaagctgaagttcaac

SEQ ID NO: 323139 - DNA, 33 bp, Homo sapien
agtatgtatcacaatccgaaaaatcttctcaat

SEQ ID NO: 323140 - DNA, 33 bp, Homo sapien
agtatgtatcacaatctgaaaaatcttctcaat

SEQ ID NO: 323141 - DNA, 33 bp, Homo sapien
gcatatcctaaaacaaaccttgtcacatcaagg

SEQ ID NO: 323142 - DNA, 33 bp, Homo sapien
gcatatcctaaaacaagccttgtcacatcaagg

SEQ ID NO: 323143 - DNA, 33 bp, Homo sapien
aaacttgttctaatcgaatccagggacaagaaa

SEQ ID NO: 323144 - DNA, 33 bp, Homo sapien
aaacttgttctaatcggatccagggacaagaaa

SEQ ID NO: 323145 - DNA, 33 bp, Homo sapien
gaggagaaaggatgaacgtgcacggtggagaaa

SEQ ID NO: 323146 - DNA, 33 bp, Homo sapien
gaggagaaaggatgaatgtgcacggtggagaaa

SEQ ID NO: 323147 - DNA, 33 bp, Homo sapien
taattgccacttgattaaatagggaaccaaaca

SEQ ID NO: 323148 - DNA, 33 bp, Homo sapien
taattgccacttgattgaatagggaaccaaaca

SEQ ID NO: 323149 - DNA, 33 bp, Homo sapien
ttttaaatccttgtaaatggtggggaaacatat

SEQ ID NO: 323150 - DNA, 33 bp, Homo sapien
ttttaaatccttgtaagtggtggggaaacatat

SEQ ID NO: 323151 - DNA, 33 bp, Homo sapien
atttttgcaatcattcaaactaggaggagattg

SEQ ID NO: 323152 - DNA, 33 bp, Homo sapien
atttttgcaatcattcgaactaggaggagattg

SEQ ID NO: 323153 - DNA, 33 bp, Homo sapien
tggtaaggtcttaaacaaaaccaccattgttac

SEQ ID NO: 323154 - DNA, 33 bp, Homo sapien
tggtaaggtcttaaacgaaaccaccattgttac

SEQ ID NO: 323155 - DNA, 33 bp, Homo sapien
cagtcatttatgactcaaggttttcagatgctt

SEQ ID NO: 323156 - DNA, 33 bp, Homo sapien
cagtcatttatgactcgaggttttcagatgctt

SEQ ID NO: 323157 - DNA, 33 bp, Homo sapien
tactgcctctgatttaaaatcctgcttctgcaa

SEQ ID NO: 323158 - DNA, 33 bp, Homo sapien
tactgcctctgatttagaatcctgcttctgcaa

SEQ ID NO: 323159 - DNA, 33 bp, Homo sapien
taagagatccttggaaagttttgaacagggaaa

SEQ ID NO: 323160 - DNA, 33 bp, Homo sapien
taagagatccttggaaggttttgaacagggaaa

SEQ ID NO: 323161 - DNA, 33 bp, Homo sapien
tctggaccatacaacaaatacataatatggcag

SEQ ID NO: 323162 - DNA, 33 bp, Homo sapien
tctggaccatacaacagatacataatatggcag

SEQ ID NO: 323163 - DNA, 33 bp, Homo sapien
ggcagacagtaaaccacagttacacaaatattt

SEQ ID NO: 323164 - DNA, 33 bp, Homo sapien
ggcagacagtaaaccagagttacacaaatattt

SEQ ID NO: 323165 - DNA, 33 bp, Homo sapien
cagatttgtcgttgccaatttcagttgcagttc

SEQ ID NO: 323166 - DNA, 33 bp, Homo sapien
cagatttgtcgttgccgatttcagttgcagttc

SEQ ID NO: 323167 - DNA, 33 bp, Homo sapien
tgtctttgctattcacaaagcagtattcacaat

SEQ ID NO: 323168 - DNA, 33 bp, Homo sapien
tgtctttgctattcacgaagcagtattcacaat

SEQ ID NO: 323169 - DNA, 33 bp, Homo sapien
aagaatgtaaaaagcccgactagttgatgtgtt

SEQ ID NO: 323170 - DNA, 33 bp, Homo sapien
aagaatgtaaaaagcctgactagttgatgtgtt

SEQ ID NO: 323171 - DNA, 33 bp, Homo sapien
gttccctaaaagcaataatgattcaggtctgcc

SEQ ID NO: 323172 - DNA, 33 bp, Homo sapien
gttccctaaaagcaatgatgattcaggtctgcc

SEQ ID NO: 323173 - DNA, 33 bp, Homo sapien
taaatgaaaggtaaaacctatttggagcactgc

SEQ ID NO: 323174 - DNA, 33 bp, Homo sapien
taaatgaaaggtaaaatctatttggagcactgc

SEQ ID NO: 323175 - DNA, 33 bp, Homo sapien
gatagtggtgggaatacgatcaggaattttgca

SEQ ID NO: 323176 - DNA, 33 bp, Homo sapien
gatagtggtgggaatatgatcaggaattttgca

SEQ ID NO: 323177 - DNA, 33 bp, Homo sapien
atcagagcctctaagtaaaatcactttgtaagt

SEQ ID NO: 323178 - DNA, 33 bp, Homo sapien
atcagagcctctaagtgaaatcactttgtaagt

SEQ ID NO: 323179 - DNA, 33 bp, Homo sapien
tgaaacagggtctaaaacacgatgatgaatatg

SEQ ID NO: 323180 - DNA, 33 bp, Homo sapien
tgaaacagggtctaaagcacgatgatgaatatg

SEQ ID NO: 323181 - DNA, 33 bp, Homo sapien
aaaaacagagaaatcaatgaggtgcattttgtg

SEQ ID NO: 323182 - DNA, 33 bp, Homo sapien
aaaaacagagaaatcagtgaggtgcattttgtg

SEQ ID NO: 323183 - DNA, 33 bp, Homo sapien
cagccacctggaaaaacgttcacagagagttat

SEQ ID NO: 323184 - DNA, 33 bp, Homo sapien
cagccacctggaaaaatgttcacagagagttat

SEQ ID NO: 323185 - DNA, 33 bp, Homo sapien
ctcattacaatagccgaactgggtagccacagc

SEQ ID NO: 323186 - DNA, 33 bp, Homo sapien
ctcattacaatagccgtactgggtagccacagc

SEQ ID NO: 323187 - DNA, 33 bp, Homo sapien
tgttagtgaggaaatacgaatgctggtctgtct

SEQ ID NO: 323188 - DNA, 33 bp, Homo sapien
tgttagtgaggaaatatgaatgctggtctgtct

SEQ ID NO: 323189 - DNA, 33 bp, Homo sapien
ttgaattcttctcagcacttgtcaggtgacttg

SEQ ID NO: 323190 - DNA, 33 bp, Homo sapien
ttgaattcttctcagcgcttgtcaggtgacttg

SEQ ID NO: 323191 - DNA, 33 bp, Homo sapien
tattatccaaaatcacacttttaattggtgttc

SEQ ID NO: 323192 - DNA, 33 bp, Homo sapien
tattatccaaaatcacgcttttaattggtgttc

SEQ ID NO: 323193 - DNA, 33 bp, Homo sapien
acatctataagctccaggtacagtcttggttca

SEQ ID NO: 323194 - DNA, 33 bp, Homo sapien
acatctataagctccatgtacagtcttggttca

SEQ ID NO: 323195 - DNA, 33 bp, Homo sapien
taaatctaaatttgaggaccctgtatttttcag

SEQ ID NO: 323196 - DNA, 33 bp, Homo sapien
taaatctaaatttgagtaccctgtatttttcag

SEQ ID NO: 323197 - DNA, 33 bp, Homo sapien
tcatctcatgtggacaaaatagctttaaaaaaa

SEQ ID NO: 323198 - DNA, 33 bp, Homo sapien
tcatctcatgtggacagaatagctttaaaaaaa

SEQ ID NO: 323199 - DNA, 33 bp, Homo sapien
gtgactagttggttatcagaacattaataataa

SEQ ID NO: 323200 - DNA, 33 bp, Homo sapien
gtgactagttggttatgagaacattaataataa

SEQ ID NO: 323201 - DNA, 33 bp, Homo sapien
gaatggcctctcctcaactttgtcatcttttga

SEQ ID NO: 323202 - DNA, 33 bp, Homo sapien
gaatggcctctcctcatctttgtcatcttttga

SEQ ID NO: 323203 - DNA, 33 bp, Homo sapien
atgagatgcctactcactctaagagcctgcaga

SEQ ID NO: 323204 - DNA, 33 bp, Homo sapien
atgagatgcctactcattctaagagcctgcaga

SEQ ID NO: 323205 - DNA, 33 bp, Homo sapien
gtttaccaactatcgccagctctgacagggagt

SEQ ID NO: 323206 - DNA, 33 bp, Homo sapien
gtttaccaactatcgctagctctgacagggagt

SEQ ID NO: 323207 - DNA, 33 bp, Homo sapien
ggggcttgagtaggaaaggaataggtctgacag

SEQ ID NO: 323208 - DNA, 33 bp, Homo sapien
ggggcttgagtaggaagggaataggtctgacag

SEQ ID NO: 323209 - DNA, 33 bp, Homo sapien
agtctgttgagagcaacgagcttaaaattcaag

SEQ ID NO: 323210 - DNA, 33 bp, Homo sapien
agtctgttgagagcaatgagcttaaaattcaag

SEQ ID NO: 323211 - DNA, 33 bp, Homo sapien
cacgaccttcccttgccctgatatgtatatgga

SEQ ID NO: 323212 - DNA, 33 bp, Homo sapien
cacgaccttcccttgctctgatatgtatatgga

SEQ ID NO: 323213 - DNA, 33 bp, Homo sapien
atttttccaatagtaaagaagtgagttaatcca

SEQ ID NO: 323214 - DNA, 33 bp, Homo sapien
atttttccaatagtaaggaagtgagttaatcca

SEQ ID NO: 323215 - DNA, 33 bp, Homo sapien
gttcatcactatttaacccatcctaaaatagct

SEQ ID NO: 323216 - DNA, 33 bp, Homo sapien
gttcatcactatttaatccatcctaaaatagct

SEQ ID NO: 323217 - DNA, 33 bp, Homo sapien
tagtgcattttcaggacgagcttaggaggtgac

SEQ ID NO: 323218 - DNA, 33 bp, Homo sapien
tagtgcattttcaggatgagcttaggaggtgac

SEQ ID NO: 323219 - DNA, 33 bp, Homo sapien
atttgtatacaattgaacatttcagtttgtaca

SEQ ID NO: 323220 - DNA, 33 bp, Homo sapien
atttgtatacaattgatcatttcagtttgtaca

SEQ ID NO: 323221 - DNA, 33 bp, Homo sapien
ctctggatcataagaccgtaggtgattttgctt

SEQ ID NO: 323222 - DNA, 33 bp, Homo sapien
ctctggatcataagactgtaggtgattttgctt

SEQ ID NO: 323223 - DNA, 33 bp, Homo sapien
tcatgttgaagctctaccattcctgattatttg

SEQ ID NO: 323224 - DNA, 33 bp, Homo sapien
tcatgttgaagctctatcattcctgattatttg

SEQ ID NO: 323225 - DNA, 33 bp, Homo sapien
caattttgggctattgcaattttgttcaggaga

SEQ ID NO: 323226 - DNA, 33 bp, Homo sapien
caattttgggctattggaattttgttcaggaga

SEQ ID NO: 323227 - DNA, 33 bp, Homo sapien
ttttctaaactcaggaagaacacccaagtgtat

SEQ ID NO: 323228 - DNA, 33 bp, Homo sapien
ttttctaaactcaggaggaacacccaagtgtat

SEQ ID NO: 323229 - DNA, 33 bp, Homo sapien
tataactaacagttgcaatcaagaaacacgtcc

SEQ ID NO: 323230 - DNA, 33 bp, Homo sapien
tataactaacagttgccatcaagaaacacgtcc

SEQ ID NO: 323231 - DNA, 33 bp, Homo sapien
acatcaccggaagaaacatgggtaagtataaga

SEQ ID NO: 323232 - DNA, 33 bp, Homo sapien
acatcaccggaagaaatatgggtaagtataaga

SEQ ID NO: 323233 - DNA, 33 bp, Homo sapien
tcacaacaatcttagaaactgggtactaactta

SEQ ID NO: 323234 - DNA, 33 bp, Homo sapien
tcacaacaatcttagagactgggtactaactta

SEQ ID NO: 323235 - DNA, 33 bp, Homo sapien
tcaatcttcctgcatcgcagacattaccctagt

SEQ ID NO: 323236 - DNA, 33 bp, Homo sapien
tcaatcttcctgcatctcagacattaccctagt

SEQ ID NO: 323237 - DNA, 33 bp, Homo sapien
catacacacagagagaataataagcaactacgt

SEQ ID NO: 323238 - DNA, 33 bp, Homo sapien
catacacacagagagagtaataagcaactacgt

SEQ ID NO: 323239 - DNA, 33 bp, Homo sapien
agttgtctttattccaagtataatcaatccata

SEQ ID NO: 323240 - DNA, 33 bp, Homo sapien
agttgtctttattccaggtataatcaatccata

SEQ ID NO: 323241 - DNA, 33 bp, Homo sapien
aagtgtgtcccactcacatcagtgttatcaggg

SEQ ID NO: 323242 - DNA, 33 bp, Homo sapien
aagtgtgtcccactcatatcagtgttatcaggg

SEQ ID NO: 323243 - DNA, 33 bp, Homo sapien
acccccagcagaccacaagatcaccaattatac

SEQ ID NO: 323244 - DNA, 33 bp, Homo sapien
acccccagcagaccaccagatcaccaattatac

SEQ ID NO: 323245 - DNA, 33 bp, Homo sapien
ttctgaactgccatcccatcttcccacttttgc

SEQ ID NO: 323246 - DNA, 33 bp, Homo sapien
ttctgaactgccatcctatcttcccacttttgc

SEQ ID NO: 323247 - DNA, 33 bp, Homo sapien
cataacaacgacatggaaaaatgtaatcagaat

SEQ ID NO: 323248 - DNA, 33 bp, Homo sapien
cataacaacgacatgggaaaatgtaatcagaat

SEQ ID NO: 323249 - DNA, 33 bp, Homo sapien
gcttactctttccacaacttccctccaataagt

SEQ ID NO: 323250 - DNA, 33 bp, Homo sapien
gcttactctttccacatcttccctccaataagt

SEQ ID NO: 323251 - DNA, 33 bp, Homo sapien
tattttacatgtgtagcaataggctcagagagg

SEQ ID NO: 323252 - DNA, 33 bp, Homo sapien
tattttacatgtgtaggaataggctcagagagg

SEQ ID NO: 323253 - DNA, 33 bp, Homo sapien
actctgtttttggagaagtatacatttttgagc

SEQ ID NO: 323254 - DNA, 33 bp, Homo sapien
actctgtttttggagaggtatacatttttgagc

SEQ ID NO: 323255 - DNA, 33 bp, Homo sapien
attcacactcacggtaaaaaattataaacatcc

SEQ ID NO: 323256 - DNA, 33 bp, Homo sapien
attcacactcacggtacaaaattataaacatcc

SEQ ID NO: 323257 - DNA, 33 bp, Homo sapien
tctatacatctacaataaactcatttttgacaa

SEQ ID NO: 323258 - DNA, 33 bp, Homo sapien
tctatacatctacaatgaactcatttttgacaa

SEQ ID NO: 323259 - DNA, 33 bp, Homo sapien
ctcttggttttcagaaagatgagaaacaaaaat

SEQ ID NO: 323260 - DNA, 33 bp, Homo sapien
ctcttggttttcagaaggatgagaaacaaaaat

SEQ ID NO: 323261 - DNA, 33 bp, Homo sapien
cagtggatttctcactaaaaagcatggaggcca

SEQ ID NO: 323262 - DNA, 33 bp, Homo sapien
cagtggatttctcactgaaaagcatggaggcca

SEQ ID NO: 323263 - DNA, 33 bp, Homo sapien
cttaaaaagctgctcaaagatacatactgaaaa

SEQ ID NO: 323264 - DNA, 33 bp, Homo sapien
cttaaaaagctgctcagagatacatactgaaaa

SEQ ID NO: 323265 - DNA, 33 bp, Homo sapien
tggtcattgatgttaccacctctttatttgctc

SEQ ID NO: 323266 - DNA, 33 bp, Homo sapien
tggtcattgatgttactacctctttatttgctc

SEQ ID NO: 323267 - DNA, 33 bp, Homo sapien
cttgttcaggtctggaaggaagtgacccaggat

SEQ ID NO: 323268 - DNA, 33 bp, Homo sapien
cttgttcaggtctggagggaagtgacccaggat

SEQ ID NO: 323269 - DNA, 33 bp, Homo sapien
ctggagtggataaaagccaactatggattcagt

SEQ ID NO: 323270 - DNA, 33 bp, Homo sapien
ctggagtggataaaaggcaactatggattcagt

SEQ ID NO: 323271 - DNA, 33 bp, Homo sapien
tttatctcttggtatacattgatttttacattt

SEQ ID NO: 323272 - DNA, 33 bp, Homo sapien
tttatctcttggtatagattgatttttacattt

SEQ ID NO: 323273 - DNA, 33 bp, Homo sapien
ccaacaccatgatttaagccttgtgacacctgg

SEQ ID NO: 323274 - DNA, 33 bp, Homo sapien
ccaacaccatgatttaggccttgtgacacctgg

SEQ ID NO: 323275 - DNA, 33 bp, Homo sapien
ttcactcaaggtttcacgggttgaatataattt

SEQ ID NO: 323276 - DNA, 33 bp, Homo sapien
ttcactcaaggtttcatgggttgaatataattt

SEQ ID NO: 323277 - DNA, 33 bp, Homo sapien
tacatttgtggccaagacagcttcctagtactg

SEQ ID NO: 323278 - DNA, 33 bp, Homo sapien
tacatttgtggccaaggcagcttcctagtactg

SEQ ID NO: 323279 - DNA, 33 bp, Homo sapien
ttagctgcatttaaatgacaacactttcagatc

SEQ ID NO: 323280 - DNA, 33 bp, Homo sapien
ttagctgcatttaaattacaacactttcagatc

SEQ ID NO: 323281 - DNA, 33 bp, Homo sapien
ttaaccctgcaaggtacatattattatgcgcat

SEQ ID NO: 323282 - DNA, 33 bp, Homo sapien
ttaaccctgcaaggtatatattattatgcgcat

SEQ ID NO: 323283 - DNA, 33 bp, Homo sapien
gacaggtgacaacaaggctatggcacatcctgg

SEQ ID NO: 323284 - DNA, 33 bp, Homo sapien
gacaggtgacaacaagtctatggcacatcctgg

SEQ ID NO: 323285 - DNA, 33 bp, Homo sapien
actcggggaagaaccaatatcacggaagaagaa

SEQ ID NO: 323286 - DNA, 33 bp, Homo sapien
actcggggaagaaccagtatcacggaagaagaa

SEQ ID NO: 323287 - DNA, 33 bp, Homo sapien
agccttcaaattggccggacaaaggtcatatct

SEQ ID NO: 323288 - DNA, 33 bp, Homo sapien
agccttcaaattggcctgacaaaggtcatatct

SEQ ID NO: 323289 - DNA, 33 bp, Homo sapien
aagagacttgaacctaaagtaaagcgctgtttt

SEQ ID NO: 323290 - DNA, 33 bp, Homo sapien
aagagacttgaacctagagtaaagcgctgtttt

SEQ ID NO: 323291 - DNA, 33 bp, Homo sapien
tttgctaacgaggctaagtggtagatttttttt

SEQ ID NO: 323292 - DNA, 33 bp, Homo sapien
tttgctaacgaggctatgtggtagatttttttt

SEQ ID NO: 323293 - DNA, 33 bp, Homo sapien
accctggcctggtctcacttttcagcccactcc

SEQ ID NO: 323294 - DNA, 33 bp, Homo sapien
accctggcctggtctcgcttttcagcccactcc

SEQ ID NO: 323295 - DNA, 33 bp, Homo sapien
gcttaattgtaccccaaagatgcccacaaaatg

SEQ ID NO: 323296 - DNA, 33 bp, Homo sapien
gcttaattgtaccccagagatgcccacaaaatg

SEQ ID NO: 323297 - DNA, 33 bp, Homo sapien
aaataacacataacaacagtattggaaatggtt

SEQ ID NO: 323298 - DNA, 33 bp, Homo sapien
aaataacacataacaagagtattggaaatggtt

SEQ ID NO: 323299 - DNA, 33 bp, Homo sapien
gctacctagtttgacaaggaactctccaatatg

SEQ ID NO: 323300 - DNA, 33 bp, Homo sapien
gctacctagtttgacagggaactctccaatatg

SEQ ID NO: 323301 - DNA, 33 bp, Homo sapien
gacctgtgcctatggacctaagtgtggacagga

SEQ ID NO: 323302 - DNA, 33 bp, Homo sapien
gacctgtgcctatggatctaagtgtggacagga

SEQ ID NO: 323303 - DNA, 33 bp, Homo sapien
ggcaccgggaaaattcaattggcatatgcagaa

SEQ ID NO: 323304 - DNA, 33 bp, Homo sapien
ggcaccgggaaaattcgattggcatatgcagaa

SEQ ID NO: 323305 - DNA, 33 bp, Homo sapien
gttcccagtagctgtcaaatgaaatggattgag

SEQ ID NO: 323306 - DNA, 33 bp, Homo sapien
gttcccagtagctgtctaatgaaatggattgag

SEQ ID NO: 323307 - DNA, 33 bp, Homo sapien
cacccaaagtgaatgcagagaataagagatagt

SEQ ID NO: 323308 - DNA, 33 bp, Homo sapien
cacccaaagtgaatgcggagaataagagatagt

SEQ ID NO: 323309 - DNA, 33 bp, Homo sapien
tatgaatttgagtcaaaatgaatccatacatcc

SEQ ID NO: 323310 - DNA, 33 bp, Homo sapien
tatgaatttgagtcaagatgaatccatacatcc

SEQ ID NO: 323311 - DNA, 33 bp, Homo sapien
gtctatccatgggatacgaccatgagcgcgggg

SEQ ID NO: 323312 - DNA, 33 bp, Homo sapien
gtctatccatgggatatgaccatgagcgcgggg

SEQ ID NO: 323313 - DNA, 33 bp, Homo sapien
gaagttagaaattttgaagatgcaagaaaaaga

SEQ ID NO: 323314 - DNA, 33 bp, Homo sapien
gaagttagaaattttggagatgcaagaaaaaga

SEQ ID NO: 323315 - DNA, 33 bp, Homo sapien
gtgactgcaaagctcacctctaaggctcttttc

SEQ ID NO: 323316 - DNA, 33 bp, Homo sapien
gtgactgcaaagctcatctctaaggctcttttc

SEQ ID NO: 323317 - DNA, 33 bp, Homo sapien
catggactttcccaaaatatgttcctggggccc

SEQ ID NO: 323318 - DNA, 33 bp, Homo sapien
catggactttcccaaattatgttcctggggccc

SEQ ID NO: 323319 - DNA, 33 bp, Homo sapien
ttggctatgggaccaaatggatctctctctcca

SEQ ID NO: 323320 - DNA, 33 bp, Homo sapien
ttggctatgggaccaactggatctctctctcca

SEQ ID NO: 323321 - DNA, 33 bp, Homo sapien
actctggtcaccttctcactagtcctcagaacc

SEQ ID NO: 323322 - DNA, 33 bp, Homo sapien
actctggtcaccttcttactagtcctcagaacc

SEQ ID NO: 323323 - DNA, 33 bp, Homo sapien
acacagagtggaaaccaaataagtgagatccat

SEQ ID NO: 323324 - DNA, 33 bp, Homo sapien
acacagagtggaaaccgaataagtgagatccat

SEQ ID NO: 323325 - DNA, 33 bp, Homo sapien
atgttgagttttactacgggaatcattccagcc

SEQ ID NO: 323326 - DNA, 33 bp, Homo sapien
atgttgagttttactatgggaatcattccagcc

SEQ ID NO: 323327 - DNA, 33 bp, Homo sapien
ctataacaaaagagaacggaacaacatgaatat

SEQ ID NO: 323328 - DNA, 33 bp, Homo sapien
ctataacaaaagagaagggaacaacatgaatat

SEQ ID NO: 323329 - DNA, 33 bp, Homo sapien
ccactgagttttcccacggaccggctacggatg

SEQ ID NO: 323330 - DNA, 33 bp, Homo sapien
ccactgagttttcccatggaccggctacggatg

SEQ ID NO: 323331 - DNA, 33 bp, Homo sapien
gttcctcttacttttcgcagtttctctgtacag

SEQ ID NO: 323332 - DNA, 33 bp, Homo sapien
gttcctcttacttttctcagtttctctgtacag

SEQ ID NO: 323333 - DNA, 33 bp, Homo sapien
agttgttaaaattatacgtgcaattgttccaaa

SEQ ID NO: 323334 - DNA, 33 bp, Homo sapien
agttgttaaaattatatgtgcaattgttccaaa

SEQ ID NO: 323335 - DNA, 33 bp, Homo sapien
ggaatgaacaggagtccgacaagcattaaaaag

SEQ ID NO: 323336 - DNA, 33 bp, Homo sapien
ggaatgaacaggagtctgacaagcattaaaaag

SEQ ID NO: 323337 - DNA, 33 bp, Homo sapien
gtgaagggctgccaacaaactgcactctcctga

SEQ ID NO: 323338 - DNA, 33 bp, Homo sapien
gtgaagggctgccaacgaactgcactctcctga

SEQ ID NO: 323339 - DNA, 33 bp, Homo sapien
gtccaaatcttccacacgagctctggtgcctcc

SEQ ID NO: 323340 - DNA, 33 bp, Homo sapien
gtccaaatcttccacatgagctctggtgcctcc

SEQ ID NO: 323341 - DNA, 33 bp, Homo sapien
gacaatctcaaagtgcgaatacggttaaattag

SEQ ID NO: 323342 - DNA, 33 bp, Homo sapien
gacaatctcaaagtgctaatacggttaaattag

SEQ ID NO: 323343 - DNA, 33 bp, Homo sapien
taatgagtgttgggagcatgaaaattgtcagaa

SEQ ID NO: 323344 - DNA, 33 bp, Homo sapien
taatgagtgttgggagtatgaaaattgtcagaa

SEQ ID NO: 323345 - DNA, 33 bp, Homo sapien
ttttatgatcgcaaggaaacaggccaatatttg

SEQ ID NO: 323346 - DNA, 33 bp, Homo sapien
ttttatgatcgcaagggaacaggccaatatttg

SEQ ID NO: 323347 - DNA, 33 bp, Homo sapien
gtcaccatattctataccctagcgtttcccccc

SEQ ID NO: 323348 - DNA, 33 bp, Homo sapien
gtcaccatattctatatcctagcgtttcccccc

SEQ ID NO: 323349 - DNA, 33 bp, Homo sapien
gtgtgtatatgcacagaaacttgtaacattttg

SEQ ID NO: 323350 - DNA, 33 bp, Homo sapien
gtgtgtatatgcacagcaacttgtaacattttg

SEQ ID NO: 323351 - DNA, 33 bp, Homo sapien
atgacactgagaatggcaaagtgctgtgtgtac

SEQ ID NO: 323352 - DNA, 33 bp, Homo sapien
atgacactgagaatggtaaagtgctgtgtgtac

SEQ ID NO: 323353 - DNA, 33 bp, Homo sapien
atctggtgcgcagcaaagctagcaaacaatgct

SEQ ID NO: 323354 - DNA, 33 bp, Homo sapien
atctggtgcgcagcaaggctagcaaacaatgct

SEQ ID NO: 323355 - DNA, 33 bp, Homo sapien
gaagcattcattctacacttccccgtcagtcag

SEQ ID NO: 323356 - DNA, 33 bp, Homo sapien
gaagcattcattctacgcttccccgtcagtcag

SEQ ID NO: 323357 - DNA, 33 bp, Homo sapien
gtgtcctctatgtgctgaactgctgagccccag

SEQ ID NO: 323358 - DNA, 33 bp, Homo sapien
gtgtcctctatgtgcttaactgctgagccccag

SEQ ID NO: 323359 - DNA, 33 bp, Homo sapien
tggtgcccacatacagacgaggaaatgaggcag

SEQ ID NO: 323360 - DNA, 33 bp, Homo sapien
tggtgcccacatacaggcgaggaaatgaggcag

SEQ ID NO: 323361 - DNA, 33 bp, Homo sapien
ccaaagattatcctcacagaacagctgtgggga

SEQ ID NO: 323362 - DNA, 33 bp, Homo sapien
ccaaagattatcctcatagaacagctgtgggga

SEQ ID NO: 323363 - DNA, 33 bp, Homo sapien
ggcaatacggaaatgccgaattaatcaacaaat

SEQ ID NO: 323364 - DNA, 33 bp, Homo sapien
ggcaatacggaaatgctgaattaatcaacaaat

SEQ ID NO: 323365 - DNA, 33 bp, Homo sapien
tgatgagatttttgtactaatcagtgccagatt

SEQ ID NO: 323366 - DNA, 33 bp, Homo sapien
tgatgagatttttgtattaatcagtgccagatt

SEQ ID NO: 323367 - DNA, 33 bp, Homo sapien
gaattctatgtgcttcaaaaaccaggaaacagt

SEQ ID NO: 323368 - DNA, 33 bp, Homo sapien
gaattctatgtgcttcgaaaaccaggaaacagt

SEQ ID NO: 323369 - DNA, 33 bp, Homo sapien
tcaatcaagattccagacaattttgcgtttgtg

SEQ ID NO: 323370 - DNA, 33 bp, Homo sapien
tcaatcaagattccaggcaattttgcgtttgtg

SEQ ID NO: 323371 - DNA, 33 bp, Homo sapien
cagccactagactctaagtaagtctgacccctg

SEQ ID NO: 323372 - DNA, 33 bp, Homo sapien
cagccactagactctatgtaagtctgacccctg

SEQ ID NO: 323373 - DNA, 33 bp, Homo sapien
tttaatctggcttctcgcttttgggccgcttaa

SEQ ID NO: 323374 - DNA, 33 bp, Homo sapien
tttaatctggcttctctcttttgggccgcttaa

SEQ ID NO: 323375 - DNA, 33 bp, Homo sapien
tccttgaatggaaatacgttcacagtggctgct

SEQ ID NO: 323376 - DNA, 33 bp, Homo sapien
tccttgaatggaaatatgttcacagtggctgct

SEQ ID NO: 323377 - DNA, 33 bp, Homo sapien
aagtgttgatgcaagaacttcgtaaacagcaaa

SEQ ID NO: 323378 - DNA, 33 bp, Homo sapien
aagtgttgatgcaagatcttcgtaaacagcaaa

SEQ ID NO: 323379 - DNA, 33 bp, Homo sapien
gttccaggatattccccaaaaataggtgtcttc

SEQ ID NO: 323380 - DNA, 33 bp, Homo sapien
gttccaggatattccctaaaaataggtgtcttc

SEQ ID NO: 323381 - DNA, 33 bp, Homo sapien
aaaaaagaacttgtggcaatctaattgatgata

SEQ ID NO: 323382 - DNA, 33 bp, Homo sapien
aaaaaagaacttgtggtaatctaattgatgata

SEQ ID NO: 323383 - DNA, 33 bp, Homo sapien
cacattcacatcccaaatctgcctcttctccta

SEQ ID NO: 323384 - DNA, 33 bp, Homo sapien
cacattcacatcccaactctgcctcttctccta

SEQ ID NO: 323385 - DNA, 33 bp, Homo sapien
gagtcaatcatttctccgaaattacgaggagga

SEQ ID NO: 323386 - DNA, 33 bp, Homo sapien
gagtcaatcatttctctgaaattacgaggagga

SEQ ID NO: 323387 - DNA, 33 bp, Homo sapien
tgtaaagcagcttttaaataagccatctgatat

SEQ ID NO: 323388 - DNA, 33 bp, Homo sapien
tgtaaagcagcttttagataagccatctgatat

SEQ ID NO: 323389 - DNA, 33 bp, Homo sapien
gtatctaataaatgtagctggctcctatttatt

SEQ ID NO: 323390 - DNA, 33 bp, Homo sapien
gtatctaataaatgtatctggctcctatttatt

SEQ ID NO: 323391 - DNA, 33 bp, Homo sapien
tcattcaatgagatgacaaactcttgagagaag

SEQ ID NO: 323392 - DNA, 33 bp, Homo sapien
tcattcaatgagatgataaactcttgagagaag

SEQ ID NO: 323393 - DNA, 33 bp, Homo sapien
gcatatagatgatacaaagggactgctgagatc

SEQ ID NO: 323394 - DNA, 33 bp, Homo sapien
gcatatagatgatacagagggactgctgagatc

SEQ ID NO: 323395 - DNA, 33 bp, Homo sapien
ctgatcctacaattacaatttgagcacaagtgg

SEQ ID NO: 323396 - DNA, 33 bp, Homo sapien
ctgatcctacaattacgatttgagcacaagtgg

SEQ ID NO: 323397 - DNA, 33 bp, Homo sapien
taatgtttagctcaccaacttagatgctcatga

SEQ ID NO: 323398 - DNA, 33 bp, Homo sapien
taatgtttagctcaccgacttagatgctcatga

SEQ ID NO: 323399 - DNA, 33 bp, Homo sapien
ttccaaagtgtctaaacttacatgtcttttgag

SEQ ID NO: 323400 - DNA, 33 bp, Homo sapien
ttccaaagtgtctaaatttacatgtcttttgag

SEQ ID NO: 323401 - DNA, 33 bp, Homo sapien
catacactctagcagacagtaactttttgctac

SEQ ID NO: 323402 - DNA, 33 bp, Homo sapien
catacactctagcagatagtaactttttgctac

SEQ ID NO: 323403 - DNA, 33 bp, Homo sapien
aatctgtttcaggcacacatttgacaagtaaag

SEQ ID NO: 323404 - DNA, 33 bp, Homo sapien
aatctgtttcaggcacgcatttgacaagtaaag

SEQ ID NO: 323405 - DNA, 33 bp, Homo sapien
tgtgttctggagctgacgttttaatccatatct

SEQ ID NO: 323406 - DNA, 33 bp, Homo sapien
tgtgttctggagctgatgttttaatccatatct

SEQ ID NO: 323407 - DNA, 33 bp, Homo sapien
taagtgatgagactagaagttattggtaataca

SEQ ID NO: 323408 - DNA, 33 bp, Homo sapien
taagtgatgagactagcagttattggtaataca

SEQ ID NO: 323409 - DNA, 33 bp, Homo sapien
gaggttcccatggctacggcagagtgagtgaag

SEQ ID NO: 323410 - DNA, 33 bp, Homo sapien
gaggttcccatggctatggcagagtgagtgaag

SEQ ID NO: 323411 - DNA, 33 bp, Homo sapien
gcagtctctttccaccagacttaacccgcctga

SEQ ID NO: 323412 - DNA, 33 bp, Homo sapien
gcagtctctttccaccggacttaacccgcctga

SEQ ID NO: 323413 - DNA, 33 bp, Homo sapien
tgggggccggcgagtgaagggagactttgcgcc

SEQ ID NO: 323414 - DNA, 33 bp, Homo sapien
tgggggccggcgagtgcagggagactttgcgcc

SEQ ID NO: 323415 - DNA, 33 bp, Homo sapien
tttgatttctttccaacggagaaaaatagcact

SEQ ID NO: 323416 - DNA, 33 bp, Homo sapien
tttgatttctttccaatggagaaaaatagcact

SEQ ID NO: 323417 - DNA, 33 bp, Homo sapien
gagagcacactaagtaactttacgaaataggct

SEQ ID NO: 323418 - DNA, 33 bp, Homo sapien
gagagcacactaagtagctttacgaaataggct

SEQ ID NO: 323419 - DNA, 33 bp, Homo sapien
ttgaatatggatcaacggactgaatagagcaat

SEQ ID NO: 323420 - DNA, 33 bp, Homo sapien
ttgaatatggatcaactgactgaatagagcaat

SEQ ID NO: 323421 - DNA, 33 bp, Homo sapien
tctgttgctacacagaactacctgagaatgggt

SEQ ID NO: 323422 - DNA, 33 bp, Homo sapien
tctgttgctacacagagctacctgagaatgggt

SEQ ID NO: 323423 - DNA, 33 bp, Homo sapien
ggttttgggcacatgaagattcattatgttact

SEQ ID NO: 323424 - DNA, 33 bp, Homo sapien
ggttttgggcacatgaggattcattatgttact

SEQ ID NO: 323425 - DNA, 33 bp, Homo sapien
tttttgcatggagttacgaagaagacatacact

SEQ ID NO: 323426 - DNA, 33 bp, Homo sapien
tttttgcatggagttatgaagaagacatacact

SEQ ID NO: 323427 - DNA, 33 bp, Homo sapien
ttgggaaccactcttacgaagcacagtgattat

SEQ ID NO: 323428 - DNA, 33 bp, Homo sapien
ttgggaaccactcttatgaagcacagtgattat

SEQ ID NO: 323429 - DNA, 33 bp, Homo sapien
accatagacaagagcacacatttctcttttccc

SEQ ID NO: 323430 - DNA, 33 bp, Homo sapien
accatagacaagagcatacatttctcttttccc

SEQ ID NO: 323431 - DNA, 33 bp, Homo sapien
cctatctccattaaacaaaacctaaccaaacac

SEQ ID NO: 323432 - DNA, 33 bp, Homo sapien
cctatctccattaaacgaaacctaaccaaacac

SEQ ID NO: 323433 - DNA, 33 bp, Homo sapien
ttttggtagccgcacccggtatttttttggaga

SEQ ID NO: 323434 - DNA, 33 bp, Homo sapien
ttttggtagccgcacctggtatttttttggaga

SEQ ID NO: 323435 - DNA, 33 bp, Homo sapien
taaatgatttgtataacggtttgggaaacacat

SEQ ID NO: 323436 - DNA, 33 bp, Homo sapien
taaatgatttgtataatggtttgggaaacacat

SEQ ID NO: 323437 - DNA, 33 bp, Homo sapien
tatgatgtgtccatcaaagagctcttgcagttc

SEQ ID NO: 323438 - DNA, 33 bp, Homo sapien
tatgatgtgtccatcagagagctcttgcagttc

SEQ ID NO: 323439 - DNA, 33 bp, Homo sapien
aacataaccattcaacactaacttcttggtcct

SEQ ID NO: 323440 - DNA, 33 bp, Homo sapien
aacataaccattcaacgctaacttcttggtcct

SEQ ID NO: 323441 - DNA, 33 bp, Homo sapien
gacctattggaccacaagtgaacataaccattc

SEQ ID NO: 323442 - DNA, 33 bp, Homo sapien
gacctattggaccacatgtgaacataaccattc

SEQ ID NO: 323443 - DNA, 33 bp, Homo sapien
accatgccccaccggccgagattcttaacaagc

SEQ ID NO: 323444 - DNA, 33 bp, Homo sapien
accatgccccaccggctgagattcttaacaagc

SEQ ID NO: 323445 - DNA, 33 bp, Homo sapien
ccttttcagtaacaggcataattaaacacaccc

SEQ ID NO: 323446 - DNA, 33 bp, Homo sapien
ccttttcagtaacagggataattaaacacaccc

SEQ ID NO: 323447 - DNA, 33 bp, Homo sapien
acttaacgttacagaacgataggctgttttcat

SEQ ID NO: 323448 - DNA, 33 bp, Homo sapien
acttaacgttacagaatgataggctgttttcat

SEQ ID NO: 323449 - DNA, 33 bp, Homo sapien
ttagcaacggcctggcaacggtttccctgctgc

SEQ ID NO: 323450 - DNA, 33 bp, Homo sapien
ttagcaacggcctggcgacggtttccctgctgc

SEQ ID NO: 323451 - DNA, 33 bp, Homo sapien
ttaatgtacaaaaataccttgataggcattagc

SEQ ID NO: 323452 - DNA, 33 bp, Homo sapien
ttaatgtacaaaaatatcttgataggcattagc

SEQ ID NO: 323453 - DNA, 33 bp, Homo sapien
ccatgttgagtcatgcccttctaaaggtaaagg

SEQ ID NO: 323454 - DNA, 33 bp, Homo sapien
ccatgttgagtcatgctcttctaaaggtaaagg

SEQ ID NO: 323455 - DNA, 33 bp, Homo sapien
gagactgtccatctcccaaccaggtttctgcca

SEQ ID NO: 323456 - DNA, 33 bp, Homo sapien
gagactgtccatctcctaaccaggtttctgcca

SEQ ID NO: 323457 - DNA, 33 bp, Homo sapien
gaccaactccactctcacatcatcataaggaag

SEQ ID NO: 323458 - DNA, 33 bp, Homo sapien
gaccaactccactctcgcatcatcataaggaag

SEQ ID NO: 323459 - DNA, 33 bp, Homo sapien
gacctcagatgatccacgtatatttgggttctt

SEQ ID NO: 323460 - DNA, 33 bp, Homo sapien
gacctcagatgatccaggtatatttgggttctt

SEQ ID NO: 323461 - DNA, 33 bp, Homo sapien
agaacttgctgtgtgaatagttgaaaatctcac

SEQ ID NO: 323462 - DNA, 33 bp, Homo sapien
agaacttgctgtgtgagtagttgaaaatctcac

SEQ ID NO: 323463 - DNA, 33 bp, Homo sapien
aaggaagccaggtagaagcctcaagtttccatg

SEQ ID NO: 323464 - DNA, 33 bp, Homo sapien
aaggaagccaggtagatgcctcaagtttccatg

SEQ ID NO: 323465 - DNA, 33 bp, Homo sapien
aaggaaccaaaaaacaaaagtgatagaatatgt

SEQ ID NO: 323466 - DNA, 33 bp, Homo sapien
aaggaaccaaaaaacagaagtgatagaatatgt

SEQ ID NO: 323467 - DNA, 33 bp, Homo sapien
ataaaactccttcagccataagaaggcatggag

SEQ ID NO: 323468 - DNA, 33 bp, Homo sapien
ataaaactccttcagctataagaaggcatggag

SEQ ID NO: 323469 - DNA, 33 bp, Homo sapien
ttgagaaaggcatcatcagattttgtcactgtg

SEQ ID NO: 323470 - DNA, 33 bp, Homo sapien
ttgagaaaggcatcattagattttgtcactgtg

SEQ ID NO: 323471 - DNA, 33 bp, Homo sapien
cattaattgggtccaaatatgttgctttttcat

SEQ ID NO: 323472 - DNA, 33 bp, Homo sapien
cattaattgggtccaagtatgttgctttttcat

SEQ ID NO: 323473 - DNA, 33 bp, Homo sapien
ctgggtccttgctctcaaccattgtgttttgtg

SEQ ID NO: 323474 - DNA, 33 bp, Homo sapien
ctgggtccttgctctcgaccattgtgttttgtg

SEQ ID NO: 323475 - DNA, 33 bp, Homo sapien
atatagctatacttaacccttaccgatacaact

SEQ ID NO: 323476 - DNA, 33 bp, Homo sapien
atatagctatacttaatccttaccgatacaact

SEQ ID NO: 323477 - DNA, 33 bp, Homo sapien
aggttgtattccaagaactgtagagataccata

SEQ ID NO: 323478 - DNA, 33 bp, Homo sapien
aggttgtattccaagagctgtagagataccata

SEQ ID NO: 323479 - DNA, 33 bp, Homo sapien
cctcagcttactataacgtttttgctttacaaa

SEQ ID NO: 323480 - DNA, 33 bp, Homo sapien
cctcagcttactataatgtttttgctttacaaa

SEQ ID NO: 323481 - DNA, 33 bp, Homo sapien
ttgcttattattaccaccatttaagcagcttat

SEQ ID NO: 323482 - DNA, 33 bp, Homo sapien
ttgcttattattaccatcatttaagcagcttat

SEQ ID NO: 323483 - DNA, 33 bp, Homo sapien
aggttggtaatgtttcaagttgtactgtaatcc

SEQ ID NO: 323484 - DNA, 33 bp, Homo sapien
aggttggtaatgtttcgagttgtactgtaatcc

SEQ ID NO: 323485 - DNA, 33 bp, Homo sapien
ctgaagacacctgggacgactggtgatgtgctt

SEQ ID NO: 323486 - DNA, 33 bp, Homo sapien
ctgaagacacctgggatgactggtgatgtgctt

SEQ ID NO: 323487 - DNA, 33 bp, Homo sapien
agttttccagggtgacaacttttgaagggcaga

SEQ ID NO: 323488 - DNA, 33 bp, Homo sapien
agttttccagggtgactacttttgaagggcaga

SEQ ID NO: 323489 - DNA, 33 bp, Homo sapien
tctttagtaacttcgacaggtcctgaaaatttg

SEQ ID NO: 323490 - DNA, 33 bp, Homo sapien
tctttagtaacttcgagaggtcctgaaaatttg

SEQ ID NO: 323491 - DNA, 33 bp, Homo sapien
ctacagagactaaaggacaaaatacacttggca

SEQ ID NO: 323492 - DNA, 33 bp, Homo sapien
ctacagagactaaagggcaaaatacacttggca

SEQ ID NO: 323493 - DNA, 33 bp, Homo sapien
taccagatggtcctgaacctactaatggccctg

SEQ ID NO: 323494 - DNA, 33 bp, Homo sapien
taccagatggtcctgagcctactaatggccctg

SEQ ID NO: 323495 - DNA, 33 bp, Homo sapien
gagccacagataaacaactttcttagcctttct

SEQ ID NO: 323496 - DNA, 33 bp, Homo sapien
gagccacagataaacagctttcttagcctttct

SEQ ID NO: 323497 - DNA, 33 bp, Homo sapien
ggattatgaaatgcctaaagagccttccttctt

SEQ ID NO: 323498 - DNA, 33 bp, Homo sapien
ggattatgaaatgcctgaagagccttccttctt

SEQ ID NO: 323499 - DNA, 33 bp, Homo sapien
caacaaacttcttaggcatatggattcctaagg

SEQ ID NO: 323500 - DNA, 33 bp, Homo sapien
caacaaacttcttaggtatatggattcctaagg

SEQ ID NO: 323501 - DNA, 33 bp, Homo sapien
tcaaatttcacagagacaataaaggtcaactaa

SEQ ID NO: 323502 - DNA, 33 bp, Homo sapien
tcaaatttcacagagataataaaggtcaactaa

SEQ ID NO: 323503 - DNA, 33 bp, Homo sapien
atatttccctctgaaccctactatggataattt

SEQ ID NO: 323504 - DNA, 33 bp, Homo sapien
atatttccctctgaactctactatggataattt

SEQ ID NO: 323505 - DNA, 33 bp, Homo sapien
gtttcttcgattctaccgggcaaaattaatcat

SEQ ID NO: 323506 - DNA, 33 bp, Homo sapien
gtttcttcgattctactgggcaaaattaatcat

SEQ ID NO: 323507 - DNA, 33 bp, Homo sapien
taaatgcagcatatgacaataatttttgaatta

SEQ ID NO: 323508 - DNA, 33 bp, Homo sapien
taaatgcagcatatgagaataatttttgaatta

SEQ ID NO: 323509 - DNA, 33 bp, Homo sapien
ggctgcgcttggcttacactctggctggatccc

SEQ ID NO: 323510 - DNA, 33 bp, Homo sapien
ggctgcgcttggcttatactctggctggatccc

SEQ ID NO: 323511 - DNA, 33 bp, Homo sapien
aatcttaggaaagctaccgtgtttttcagtttt

SEQ ID NO: 323512 - DNA, 33 bp, Homo sapien
aatcttaggaaagctatcgtgtttttcagtttt

SEQ ID NO: 323513 - DNA, 33 bp, Homo sapien
ggtaaaccaaactaaacagaccctaggctcaaa

SEQ ID NO: 323514 - DNA, 33 bp, Homo sapien
ggtaaaccaaactaaagagaccctaggctcaaa

SEQ ID NO: 323515 - DNA, 33 bp, Homo sapien
tcttctatatatccaacgagaaatcatgcccat

SEQ ID NO: 323516 - DNA, 33 bp, Homo sapien
tcttctatatatccaaggagaaatcatgcccat

SEQ ID NO: 323517 - DNA, 33 bp, Homo sapien
aatagcaaaaatgggacatgaattaagtttgtg

SEQ ID NO: 323518 - DNA, 33 bp, Homo sapien
aatagcaaaaatgggatatgaattaagtttgtg

SEQ ID NO: 323519 - DNA, 33 bp, Homo sapien
aagaaacttacaaagacacgggccatgcgtagt

SEQ ID NO: 323520 - DNA, 33 bp, Homo sapien
aagaaacttacaaagagacgggccatgcgtagt

SEQ ID NO: 323521 - DNA, 33 bp, Homo sapien
taccataaatttagcaccttaaagcaatacaag

SEQ ID NO: 323522 - DNA, 33 bp, Homo sapien
taccataaatttagcatcttaaagcaatacaag

SEQ ID NO: 323523 - DNA, 33 bp, Homo sapien
tgagaaaacatgcagcagaagtcagaaagattc

SEQ ID NO: 323524 - DNA, 33 bp, Homo sapien
tgagaaaacatgcagcggaagtcagaaagattc

SEQ ID NO: 323525 - DNA, 33 bp, Homo sapien
aaaagtattgggaacaatcaattcctgactatg

SEQ ID NO: 323526 - DNA, 33 bp, Homo sapien
aaaagtattgggaacagtcaattcctgactatg

SEQ ID NO: 323527 - DNA, 33 bp, Homo sapien
tacatattgatcataaattagtaggatttccag

SEQ ID NO: 323528 - DNA, 33 bp, Homo sapien
tacatattgatcataacttagtaggatttccag

SEQ ID NO: 323529 - DNA, 33 bp, Homo sapien
acatatccacagtcaacatatgaaaagtagatg

SEQ ID NO: 323530 - DNA, 33 bp, Homo sapien
acatatccacagtcaatatatgaaaagtagatg

SEQ ID NO: 323531 - DNA, 33 bp, Homo sapien
gtaatgtatgcagccaggtagctcctctaattt

SEQ ID NO: 323532 - DNA, 33 bp, Homo sapien
gtaatgtatgcagccatgtagctcctctaattt

SEQ ID NO: 323533 - DNA, 33 bp, Homo sapien
gaacacatttagatcaggcaggtgaaaggacca

SEQ ID NO: 323534 - DNA, 33 bp, Homo sapien
gaacacatttagatcatgcaggtgaaaggacca

SEQ ID NO: 323535 - DNA, 33 bp, Homo sapien
tacaatacaatgtgtcaaatactatactcacat

SEQ ID NO: 323536 - DNA, 33 bp, Homo sapien
tacaatacaatgtgtctaatactatactcacat

SEQ ID NO: 323537 - DNA, 33 bp, Homo sapien
gtctctgtggaactccaattttctaggataagg

SEQ ID NO: 323538 - DNA, 33 bp, Homo sapien
gtctctgtggaactcccattttctaggataagg

SEQ ID NO: 323539 - DNA, 33 bp, Homo sapien
gctggacatatggcaaatgacctgaataaatgc

SEQ ID NO: 323540 - DNA, 33 bp, Homo sapien
gctggacatatggcaagtgacctgaataaatgc

SEQ ID NO: 323541 - DNA, 33 bp, Homo sapien
tttctaaatagatcctaaaactgtctctcacat

SEQ ID NO: 323542 - DNA, 33 bp, Homo sapien
tttctaaatagatcctgaaactgtctctcacat

SEQ ID NO: 323543 - DNA, 33 bp, Homo sapien
gatttgaacgattaaaatagggacaatagtacc

SEQ ID NO: 323544 - DNA, 33 bp, Homo sapien
gatttgaacgattaaagtagggacaatagtacc

SEQ ID NO: 323545 - DNA, 33 bp, Homo sapien
ttaattccaccttgaagatctttgcttacactg

SEQ ID NO: 323546 - DNA, 33 bp, Homo sapien
ttaattccaccttgaatatctttgcttacactg

SEQ ID NO: 323547 - DNA, 33 bp, Homo sapien
agtagtgttgctctccaagaggttgtaagcaaa

SEQ ID NO: 323548 - DNA, 33 bp, Homo sapien
agtagtgttgctctccgagaggttgtaagcaaa

SEQ ID NO: 323549 - DNA, 33 bp, Homo sapien
tgtttgtttttgttaacaggactctagtgtgga

SEQ ID NO: 323550 - DNA, 33 bp, Homo sapien
tgtttgtttttgttaataggactctagtgtgga

SEQ ID NO: 323551 - DNA, 33 bp, Homo sapien
tgatggattggctgtcaaatgtgtgagaaagaa

SEQ ID NO: 323552 - DNA, 33 bp, Homo sapien
tgatggattggctgtcgaatgtgtgagaaagaa

SEQ ID NO: 323553 - DNA, 33 bp, Homo sapien
gctctatatccaatggacaaatttaagttctcc

SEQ ID NO: 323554 - DNA, 33 bp, Homo sapien
gctctatatccaatggtcaaatttaagttctcc

SEQ ID NO: 323555 - DNA, 33 bp, Homo sapien
ctctcttgcttgcatcaccaagtttctcccctg

SEQ ID NO: 323556 - DNA, 33 bp, Homo sapien
ctctcttgcttgcatcgccaagtttctcccctg

SEQ ID NO: 323557 - DNA, 33 bp, Homo sapien
gctttcattcgagatgaagtacacctgccctca

SEQ ID NO: 323558 - DNA, 33 bp, Homo sapien
gctttcattcgagatgcagtacacctgccctca

SEQ ID NO: 323559 - DNA, 33 bp, Homo sapien
ttgtgtgatcctcattaaaaaatctacattgag

SEQ ID NO: 323560 - DNA, 33 bp, Homo sapien
ttgtgtgatcctcatttaaaaatctacattgag

SEQ ID NO: 323561 - DNA, 33 bp, Homo sapien
attattcacagtagccaaaaggtaaaggaaccc

SEQ ID NO: 323562 - DNA, 33 bp, Homo sapien
attattcacagtagcccaaaggtaaaggaaccc

SEQ ID NO: 323563 - DNA, 33 bp, Homo sapien
tatattctataggcccagctttaaatgtaatgc

SEQ ID NO: 323564 - DNA, 33 bp, Homo sapien
tatattctataggcccggctttaaatgtaatgc

SEQ ID NO: 323565 - DNA, 33 bp, Homo sapien
tatcttttccagtcaacagcttgtctttttccc

SEQ ID NO: 323566 - DNA, 33 bp, Homo sapien
tatcttttccagtcaatagcttgtctttttccc

SEQ ID NO: 323567 - DNA, 33 bp, Homo sapien
tgattcaaggctgcaacggccagatatttagca

SEQ ID NO: 323568 - DNA, 33 bp, Homo sapien
tgattcaaggctgcaatggccagatatttagca

SEQ ID NO: 323569 - DNA, 33 bp, Homo sapien
ttctcatcccttggacaggtcatggcttgtttg

SEQ ID NO: 323570 - DNA, 33 bp, Homo sapien
ttctcatcccttggactggtcatggcttgtttg

SEQ ID NO: 323571 - DNA, 33 bp, Homo sapien
gcatcttccatcttcaacagccaggtaagacag

SEQ ID NO: 323572 - DNA, 33 bp, Homo sapien
gcatcttccatcttcagcagccaggtaagacag

SEQ ID NO: 323573 - DNA, 33 bp, Homo sapien
catctattattaaagaactcagactaatgggga

SEQ ID NO: 323574 - DNA, 33 bp, Homo sapien
catctattattaaagagctcagactaatgggga

SEQ ID NO: 323575 - DNA, 33 bp, Homo sapien
tcattcacctgcagagaaaaatcactttttcat

SEQ ID NO: 323576 - DNA, 33 bp, Homo sapien
tcattcacctgcagaggaaaatcactttttcat

SEQ ID NO: 323577 - DNA, 33 bp, Homo sapien
atgctgatgattcccaaacttggatcttcaacc

SEQ ID NO: 323578 - DNA, 33 bp, Homo sapien
atgctgatgattcccacacttggatcttcaacc

SEQ ID NO: 323579 - DNA, 33 bp, Homo sapien
tctgtttgatgtgtagacctataaaccagttaa

SEQ ID NO: 323580 - DNA, 33 bp, Homo sapien
tctgtttgatgtgtagtcctataaaccagttaa

SEQ ID NO: 323581 - DNA, 33 bp, Homo sapien
aaaagaatgcagacagaatcctagagggtggat

SEQ ID NO: 323582 - DNA, 33 bp, Homo sapien
aaaagaatgcagacagtatcctagagggtggat

SEQ ID NO: 323583 - DNA, 33 bp, Homo sapien
tcctgtctatggagggcatcaaggagaacaaaa

SEQ ID NO: 323584 - DNA, 33 bp, Homo sapien
tcctgtctatggagggtatcaaggagaacaaaa

SEQ ID NO: 323585 - DNA, 33 bp, Homo sapien
ttcaaggttagagtcaaggtcagttggatccag

SEQ ID NO: 323586 - DNA, 33 bp, Homo sapien
ttcaaggttagagtcagggtcagttggatccag

SEQ ID NO: 323587 - DNA, 33 bp, Homo sapien
taatactcccctatgcaaactctgctcgaggaa

SEQ ID NO: 323588 - DNA, 33 bp, Homo sapien
taatactcccctatgcgaactctgctcgaggaa

SEQ ID NO: 323589 - DNA, 33 bp, Homo sapien
tagaaacctcatttaaaatcagtcactgagtgg

SEQ ID NO: 323590 - DNA, 33 bp, Homo sapien
tagaaacctcatttaagatcagtcactgagtgg

SEQ ID NO: 323591 - DNA, 33 bp, Homo sapien
gaaaatattgaagtaactcagaaacagtaatgg

SEQ ID NO: 323592 - DNA, 33 bp, Homo sapien
gaaaatattgaagtaattcagaaacagtaatgg

SEQ ID NO: 323593 - DNA, 33 bp, Homo sapien
tctcccatccaaacaactacagcaggttccgcc

SEQ ID NO: 323594 - DNA, 33 bp, Homo sapien
tctcccatccaaacaattacagcaggttccgcc

SEQ ID NO: 323595 - DNA, 33 bp, Homo sapien
ttttctttgaaagtgcaagagattgtgagagcc

SEQ ID NO: 323596 - DNA, 33 bp, Homo sapien
ttttctttgaaagtgcgagagattgtgagagcc

SEQ ID NO: 323597 - DNA, 33 bp, Homo sapien
atttcctcacagaaaaagattctgaaaggtgcc

SEQ ID NO: 323598 - DNA, 33 bp, Homo sapien
atttcctcacagaaaacgattctgaaaggtgcc

SEQ ID NO: 323599 - DNA, 33 bp, Homo sapien
tgactccgtcatcacccattttgcttccaaaat

SEQ ID NO: 323600 - DNA, 33 bp, Homo sapien
tgactccgtcatcacctattttgcttccaaaat

SEQ ID NO: 323601 - DNA, 33 bp, Homo sapien
atctgtaaaatggaaacgataggaccatcatca

SEQ ID NO: 323602 - DNA, 33 bp, Homo sapien
atctgtaaaatggaaatgataggaccatcatca

SEQ ID NO: 323603 - DNA, 33 bp, Homo sapien
gttataggctctgtgacggtttttactgcatga

SEQ ID NO: 323604 - DNA, 33 bp, Homo sapien
gttataggctctgtgatggtttttactgcatga

SEQ ID NO: 323605 - DNA, 33 bp, Homo sapien
gtgcccttctcttcagaagacagtgcagttttg

SEQ ID NO: 323606 - DNA, 33 bp, Homo sapien
gtgcccttctcttcaggagacagtgcagttttg

SEQ ID NO: 323607 - DNA, 33 bp, Homo sapien
cattttgcaacatttcggaaaccatgctgggtc

SEQ ID NO: 323608 - DNA, 33 bp, Homo sapien
cattttgcaacatttctgaaaccatgctgggtc

SEQ ID NO: 323609 - DNA, 33 bp, Homo sapien
tcttttaaaacttcacaagaaagccatattcgc

SEQ ID NO: 323610 - DNA, 33 bp, Homo sapien
tcttttaaaacttcacgagaaagccatattcgc

SEQ ID NO: 323611 - DNA, 33 bp, Homo sapien
atcaaatgagacctgaagtgtgagactaatctg

SEQ ID NO: 323612 - DNA, 33 bp, Homo sapien
atcaaatgagacctgaggtgtgagactaatctg

SEQ ID NO: 323613 - DNA, 33 bp, Homo sapien
tgttgagcgtttgaaacgtggcaagaccaagga

SEQ ID NO: 323614 - DNA, 33 bp, Homo sapien
tgttgagcgtttgaaatgtggcaagaccaagga

SEQ ID NO: 323615 - DNA, 33 bp, Homo sapien
cccatatcagctgtcacgtcagccaagaggctc

SEQ ID NO: 323616 - DNA, 33 bp, Homo sapien
cccatatcagctgtcaggtcagccaagaggctc

SEQ ID NO: 323617 - DNA, 33 bp, Homo sapien
ccattgtgccttttgacgctactgtttgataat

SEQ ID NO: 323618 - DNA, 33 bp, Homo sapien
ccattgtgccttttgatgctactgtttgataat

SEQ ID NO: 323619 - DNA, 33 bp, Homo sapien
gaatagcaaggaagacagagttcaggtaaatgt

SEQ ID NO: 323620 - DNA, 33 bp, Homo sapien
gaatagcaaggaagaccgagttcaggtaaatgt

SEQ ID NO: 323621 - DNA, 33 bp, Homo sapien
tgtggtgtagtcacaaagtgtaatataatgcta

SEQ ID NO: 323622 - DNA, 33 bp, Homo sapien
tgtggtgtagtcacaatgtgtaatataatgcta

SEQ ID NO: 323623 - DNA, 33 bp, Homo sapien
catcttcctttttgtcaccaccctctgtttcca

SEQ ID NO: 323624 - DNA, 33 bp, Homo sapien
catcttcctttttgtcgccaccctctgtttcca

SEQ ID NO: 323625 - DNA, 33 bp, Homo sapien
gtggacattctaattaacagcacagacaaaaaa

SEQ ID NO: 323626 - DNA, 33 bp, Homo sapien
gtggacattctaattaccagcacagacaaaaaa

SEQ ID NO: 323627 - DNA, 33 bp, Homo sapien
aaaagaactcacaatacatcctctgattgcaac

SEQ ID NO: 323628 - DNA, 33 bp, Homo sapien
aaaagaactcacaatatatcctctgattgcaac

SEQ ID NO: 323629 - DNA, 33 bp, Homo sapien
tggctaatttttttgaagacaaaagctccacct

SEQ ID NO: 323630 - DNA, 33 bp, Homo sapien
tggctaatttttttgaggacaaaagctccacct

SEQ ID NO: 323631 - DNA, 33 bp, Homo sapien
aattttgacttgatgagtaattgctttatgaaa

SEQ ID NO: 323632 - DNA, 33 bp, Homo sapien
aattttgacttgatgattaattgctttatgaaa

SEQ ID NO: 323633 - DNA, 33 bp, Homo sapien
ctgggtgacagagagacgccgtgtcaagaaaga

SEQ ID NO: 323634 - DNA, 33 bp, Homo sapien
ctgggtgacagagagatgccgtgtcaagaaaga

SEQ ID NO: 323635 - DNA, 33 bp, Homo sapien
tgacgaagaacaacaacgagatgcacaaaggga

SEQ ID NO: 323636 - DNA, 33 bp, Homo sapien
tgacgaagaacaacaatgagatgcacaaaggga

SEQ ID NO: 323637 - DNA, 33 bp, Homo sapien
cctgggttcagtgtcacccttttataaaatgag

SEQ ID NO: 323638 - DNA, 33 bp, Homo sapien
cctgggttcagtgtcatccttttataaaatgag

SEQ ID NO: 323639 - DNA, 33 bp, Homo sapien
taattacctctttaaagcccctacatccaaata

SEQ ID NO: 323640 - DNA, 33 bp, Homo sapien
taattacctctttaaatcccctacatccaaata

SEQ ID NO: 323641 - DNA, 33 bp, Homo sapien
ggagtatgtgaatttcagaaacagaaagtgggc

SEQ ID NO: 323642 - DNA, 33 bp, Homo sapien
ggagtatgtgaatttcggaaacagaaagtgggc

SEQ ID NO: 323643 - DNA, 33 bp, Homo sapien
tattgttacttttgcaaggatgatgggctgata

SEQ ID NO: 323644 - DNA, 33 bp, Homo sapien
tattgttacttttgcacggatgatgggctgata

SEQ ID NO: 323645 - DNA, 33 bp, Homo sapien
ggctccccactgcctcccaaatcaggctcctcc

SEQ ID NO: 323646 - DNA, 33 bp, Homo sapien
ggctccccactgcctcgcaaatcaggctcctcc

SEQ ID NO: 323647 - DNA, 33 bp, Homo sapien
ggaaaagagaagcaggaccacttgtcagcaccc

SEQ ID NO: 323648 - DNA, 33 bp, Homo sapien
ggaaaagagaagcagggccacttgtcagcaccc

SEQ ID NO: 323649 - DNA, 33 bp, Homo sapien
tgtgtatttttgtaaactgcttcaagtcctctc

SEQ ID NO: 323650 - DNA, 33 bp, Homo sapien
tgtgtatttttgtaaattgcttcaagtcctctc

SEQ ID NO: 323651 - DNA, 33 bp, Homo sapien
taaaaagaggaaaaagaaagttgcagaagagca

SEQ ID NO: 323652 - DNA, 33 bp, Homo sapien
taaaaagaggaaaaaggaagttgcagaagagca

SEQ ID NO: 323653 - DNA, 33 bp, Homo sapien
ataggctgcggttttcacttcaggccaattaca

SEQ ID NO: 323654 - DNA, 33 bp, Homo sapien
ataggctgcggttttcgcttcaggccaattaca

SEQ ID NO: 323655 - DNA, 33 bp, Homo sapien; identical to SEQ ID NO: 323653

SEQ ID NO: 323656 - DNA, 33 bp, Homo sapien; identical to SEQ ID NO: 323654

SEQ ID NO: 323657 - DNA, 33 bp, Homo sapien
cctctgctggcatctaggctacaaaggtatact

SEQ ID NO: 323658 - DNA, 33 bp, Homo sapien
cctctgctggcatctatgctacaaaggtatact

SEQ ID NO: 323659 - DNA, 33 bp, Homo sapien
gatttgatggccaatacgaatgttcttgaaact

SEQ ID NO: 323660 - DNA, 33 bp, Homo sapien
gatttgatggccaatatgaatgttcttgaaact

SEQ ID NO: 323661 - DNA, 33 bp, Homo sapien
tccaactgtttcagaaacttcacccctcatgtt

SEQ ID NO: 323662 - DNA, 33 bp, Homo sapien
tccaactgtttcagaagcttcacccctcatgtt

SEQ ID NO: 323663 - DNA, 33 bp, Homo sapien
tccgcatgaatggaaaaacctctttatgcttct

SEQ ID NO: 323664 - DNA, 33 bp, Homo sapien
tccgcatgaatggaaagacctctttatgcttct

SEQ ID NO: 323665 - DNA, 33 bp, Homo sapien
aacattcaaggaataagtattgagtatgcatta

SEQ ID NO: 323666 - DNA, 33 bp, Homo sapien
aacattcaaggaataattattgagtatgcatta

SEQ ID NO: 323667 - DNA, 33 bp, Homo sapien
aatgacttacctacaaaaccgagagaaaatagc

SEQ ID NO: 323668 - DNA, 33 bp, Homo sapien
aatgacttacctacaataccgagagaaaatagc

SEQ ID NO: 323669 - DNA, 33 bp, Homo sapien
aataacacagactcaaatacagcgaataacttt

SEQ ID NO: 323670 - DNA, 33 bp, Homo sapien
aataacacagactcaagtacagcgaataacttt

SEQ ID NO: 323671 - DNA, 33 bp, Homo sapien
atattttaaaaatgcaaacttattttgtgctcc

SEQ ID NO: 323672 - DNA, 33 bp, Homo sapien
atattttaaaaatgcagacttattttgtgctcc

SEQ ID NO: 323673 - DNA, 33 bp, Homo sapien
ggattattcagcttgcccctttttgttggttct

SEQ ID NO: 323674 - DNA, 33 bp, Homo sapien
ggattattcagcttgctcctttttgttggttct

SEQ ID NO: 323675 - DNA, 33 bp, Homo sapien
ttaacttagaggaagaataatgggattggagct

SEQ ID NO: 323676 - DNA, 33 bp, Homo sapien
ttaacttagaggaagagtaatgggattggagct

SEQ ID NO: 323677 - DNA, 33 bp, Homo sapien
cagcatctataccaagcctactgtgatgtgaca

SEQ ID NO: 323678 - DNA, 33 bp, Homo sapien
cagcatctataccaagtctactgtgatgtgaca

SEQ ID NO: 323679 - DNA, 33 bp, Homo sapien
gacccacaggatctaccatctcccagtccagcc

SEQ ID NO: 323680 - DNA, 33 bp, Homo sapien
gacccacaggatctactatctcccagtccagcc

SEQ ID NO: 323681 - DNA, 33 bp, Homo sapien
tcattcaacagtctaaagattcaacccatcagg

SEQ ID NO: 323682 - DNA, 33 bp, Homo sapien
tcattcaacagtctaaggattcaacccatcagg

SEQ ID NO: 323683 - DNA, 33 bp, Homo sapien
tttcttgttcgcgcacccccttgcagtttatca

SEQ ID NO: 323684 - DNA, 33 bp, Homo sapien
tttcttgttcgcgcactcccttgcagtttatca

SEQ ID NO: 323685 - DNA, 33 bp, Homo sapien
tgataaataagtaacacggaaagcctcatggat

SEQ ID NO: 323686 - DNA, 33 bp, Homo sapien
tgataaataagtaacatggaaagcctcatggat

SEQ ID NO: 323687 - DNA, 33 bp, Homo sapien
gaccaatcgaacagaacagcattcggaaataga

SEQ ID NO: 323688 - DNA, 33 bp, Homo sapien
gaccaatcgaacagaagagcattcggaaataga

SEQ ID NO: 323689 - DNA, 33 bp, Homo sapien
gctatgtaagacatcaaaagggctggacgttga

SEQ ID NO: 323690 - DNA, 33 bp, Homo sapien
gctatgtaagacatcagaagggctggacgttga

SEQ ID NO: 323691 - DNA, 33 bp, Homo sapien
tttgtacaaaaactgacaagtgcgagccccttg

SEQ ID NO: 323692 - DNA, 33 bp, Homo sapien
tttgtacaaaaactgataagtgcgagccccttg

SEQ ID NO: 323693 - DNA, 33 bp, Homo sapien
cttattttggatattacgctagaaaattacttt

SEQ ID NO: 323694 - DNA, 33 bp, Homo sapien
cttattttggatattatgctagaaaattacttt

SEQ ID NO: 323695 - DNA, 33 bp, Homo sapien
gccattattgagaacgaaagtgctacaggtgac

SEQ ID NO: 323696 - DNA, 33 bp, Homo sapien
gccattattgagaacgcaagtgctacaggtgac

SEQ ID NO: 323697 - DNA, 33 bp, Homo sapien
gggtgctttggatctgcagagcatccacctatg

SEQ ID NO: 323698 - DNA, 33 bp, Homo sapien
gggtgctttggatctgtagagcatccacctatg

SEQ ID NO: 323699 - DNA, 33 bp, Homo sapien
cacactgcgatatatacctgctgcaaaaatgta

SEQ ID NO: 323700 - DNA, 33 bp, Homo sapien
cacactgcgatatatagctgctgcaaaaatgta

SEQ ID NO: 323701 - DNA, 33 bp, Homo sapien
ggctgtcgcagtaaatcaaggatgccatccaaa

SEQ ID NO: 323702 - DNA, 33 bp, Homo sapien
ggctgtcgcagtaaatgaaggatgccatccaaa

SEQ ID NO: 323703 - DNA, 33 bp, Homo sapien
gacgcggccatcatctaactacatagtatacat

SEQ ID NO: 323704 - DNA, 33 bp, Homo sapien
gacgcggccatcatctcactacatagtatacat

SEQ ID NO: 323705 - DNA, 33 bp, Homo sapien
ttttcttgatcataccacatgtatctgtgagct

SEQ ID NO: 323706 - DNA, 33 bp, Homo sapien
ttttcttgatcataccccatgtatctgtgagct

SEQ ID NO: 323707 - DNA, 33 bp, Homo sapien
ctaggaaaagctactgcaaggtaagtacagagc

SEQ ID NO: 323708 - DNA, 33 bp, Homo sapien
ctaggaaaagctactggaaggtaagtacagagc

SEQ ID NO: 323709 - DNA, 33 bp, Homo sapien
atcacagattcgggaaagtgacggcaatgtgac

SEQ ID NO: 323710 - DNA, 33 bp, Homo sapien
atcacagattcgggaatgtgacggcaatgtgac

SEQ ID NO: 323711 - DNA, 33 bp, Homo sapien
cacggcatcttcattaactctgtcttcaactgg

SEQ ID NO: 323712 - DNA, 33 bp, Homo sapien
cacggcatcttcattagctctgtcttcaactgg

SEQ ID NO: 323713 - DNA, 33 bp, Homo sapien
ggatcaggtttgacaccgctaaggagcagttac

SEQ ID NO: 323714 - DNA, 33 bp, Homo sapien
ggatcaggtttgacacggctaaggagcagttac

SEQ ID NO: 323715 - DNA, 33 bp, Homo sapien
ccaagtttcctttcaccggcatcgaccctggaa

SEQ ID NO: 323716 - DNA, 33 bp, Homo sapien
ccaagtttcctttcactggcatcgaccctggaa

SEQ ID NO: 323717 - DNA, 33 bp, Homo sapien
attgctgggatgcagcactgaggtatcattggg

SEQ ID NO: 323718 - DNA, 33 bp, Homo sapien
attgctgggatgcagcgctgaggtatcattggg

SEQ ID NO: 323719 - DNA, 33 bp, Homo sapien
tctctgttgttgaagccgctccgtgctgggtac

SEQ ID NO: 323720 - DNA, 33 bp, Homo sapien
tctctgttgttgaagctgctccgtgctgggtac

SEQ ID NO: 323721 - DNA, 33 bp, Homo sapien
tgtgacctctactatccaagaatgtttgtttat

SEQ ID NO: 323722 - DNA, 33 bp, Homo sapien
tgtgacctctactatctaagaatgtttgtttat

SEQ ID NO: 323723 - DNA, 33 bp, Homo sapien
ggagctaacagtaagccagaagggggtttctgc

SEQ ID NO: 323724 - DNA, 33 bp, Homo sapien
ggagctaacagtaagctagaagggggtttctgc

SEQ ID NO: 323725 - DNA, 33 bp, Homo sapien
agccagacactccctaaccaaagtgacacaacg

SEQ ID NO: 323726 - DNA, 33 bp, Homo sapien
agccagacactccctacccaaagtgacacaacg

SEQ ID NO: 323727 - DNA, 33 bp, Homo sapien
acctacctggtcctgacgccttgtccgggggag

SEQ ID NO: 323728 - DNA, 33 bp, Homo sapien
acctacctggtcctgatgccttgtccgggggag

SEQ ID NO: 323729 - DNA, 33 bp, Homo sapien
agtagacagggatgggaagagtattaataatga

SEQ ID NO: 323730 - DNA, 33 bp, Homo sapien
agtagacagggatggggagagtattaataatga

SEQ ID NO: 323731 - DNA, 33 bp, Homo sapien
ggtacattgcaaaaaaagaaagtgtgagagcca

SEQ ID NO: 323732 - DNA, 33 bp, Homo sapien
ggtacattgcaaaaaacgaaagtgtgagagcca

SEQ ID NO: 323733 - DNA, 33 bp, Homo sapien
gctgaaagagtctcaaataggacgatctgcagt

SEQ ID NO: 323734 - DNA, 33 bp, Homo sapien
gctgaaagagtctcaagtaggacgatctgcagt

SEQ ID NO: 323735 - DNA, 33 bp, Homo sapien
gaggctagaagtccgacatcaaagagcaaagag

SEQ ID NO: 323736 - DNA, 33 bp, Homo sapien
gaggctagaagtccgagatcaaagagcaaagag

SEQ ID NO: 323737 - DNA, 33 bp, Homo sapien
taagtataaaggagaactgatgagcccatcaaa

SEQ ID NO: 323738 - DNA, 33 bp, Homo sapien
taagtataaaggagaattgatgagcccatcaaa

SEQ ID NO: 323739 - DNA, 33 bp, Homo sapien
ccgccgtcactgttcacattctggaagtgttcg

SEQ ID NO: 323740 - DNA, 33 bp, Homo sapien
ccgccgtcactgttcatattctggaagtgttcg

SEQ ID NO: 323741 - DNA, 33 bp, Homo sapien
aagcttcacaaaataccactcaccgtttgagaa

SEQ ID NO: 323742 - DNA, 33 bp, Homo sapien
aagcttcacaaaatactactcaccgtttgagaa

SEQ ID NO: 323743 - DNA, 33 bp, Homo sapien
gaaaagtgcagttaccgcatctgtcacaggaat

SEQ ID NO: 323744 - DNA, 33 bp, Homo sapien
gaaaagtgcagttacctcatctgtcacaggaat

SEQ ID NO: 323745 - DNA, 33 bp, Homo sapien
aggagtacgtatttccacccacgcttttaaaag

SEQ ID NO: 323746 - DNA, 33 bp, Homo sapien
aggagtacgtatttccgcccacgcttttaaaag

SEQ ID NO: 323747 - DNA, 33 bp, Homo sapien
ccctttaaatccataacgttcacaagtcaccac

SEQ ID NO: 323748 - DNA, 33 bp, Homo sapien
ccctttaaatccataatgttcacaagtcaccac

SEQ ID NO: 323749 - DNA, 33 bp, Homo sapien
taaaaaagtagcagtaaagaactggaagttgca

SEQ ID NO: 323750 - DNA, 33 bp, Homo sapien
taaaaaagtagcagtagagaactggaagttgca

SEQ ID NO: 323751 - DNA, 33 bp, Homo sapien
ccccacagaagctacactccaagtcccacatct

SEQ ID NO: 323752 - DNA, 33 bp, Homo sapien
ccccacagaagctacattccaagtcccacatct

SEQ ID NO: 323753 - DNA, 33 bp, Homo sapien
ttttaaagaacagtagcatccttgctggtgaca

SEQ ID NO: 323754 - DNA, 33 bp, Homo sapien
ttttaaagaacagtaggatccttgctggtgaca

SEQ ID NO: 323755 - DNA, 33 bp, Homo sapien
atgatttcttatcttaaccatcgccacacataa

SEQ ID NO: 323756 - DNA, 33 bp, Homo sapien
atgatttcttatcttagccatcgccacacataa

SEQ ID NO: 323757 - DNA, 33 bp, Homo sapien
acaaacagactaagaccagcggtcactgccctt

SEQ ID NO: 323758 - DNA, 33 bp, Homo sapien
acaaacagactaagacgagcggtcactgccctt

SEQ ID NO: 323759 - DNA, 33 bp, Homo sapien
tgctcttttcctaggacagtttgtggaaaggtt

SEQ ID NO: 323760 - DNA, 33 bp, Homo sapien
tgctcttttcctaggagagtttgtggaaaggtt

SEQ ID NO: 323761 - DNA, 33 bp, Homo sapien
ttgcatctaaaaggagcagttttcttatcaaca

SEQ ID NO: 323762 - DNA, 33 bp, Homo sapien
ttgcatctaaaaggagtagttttcttatcaaca

SEQ ID NO: 323763 - DNA, 33 bp, Homo sapien
aatttgcttaatctgacacactctcataaactc

SEQ ID NO: 323764 - DNA, 33 bp, Homo sapien
aatttgcttaatctgagacactctcataaactc

SEQ ID NO: 323765 - DNA, 33 bp, Homo sapien
gctgatggactattgacgcctggcttcatcctc

SEQ ID NO: 323766 - DNA, 33 bp, Homo sapien
gctgatggactattgatgcctggcttcatcctc

SEQ ID NO: 323767 - DNA, 33 bp, Homo sapien
tctaactggaggtgtacgctctgatgacaggaa

SEQ ID NO: 323768 - DNA, 33 bp, Homo sapien
tctaactggaggtgtatgctctgatgacaggaa

SEQ ID NO: 323769 - DNA, 33 bp, Homo sapien
ataatgatcttgaaaccgttagcatagtctgtg

SEQ ID NO: 323770 - DNA, 33 bp, Homo sapien
ataatgatcttgaaactgttagcatagtctgtg

SEQ ID NO: 323771 - DNA, 33 bp, Homo sapien
ctgtagaaaatgtaaacgtggctgggcacggtg

SEQ ID NO: 323772 - DNA, 33 bp, Homo sapien
ctgtagaaaatgtaaatgtggctgggcacggtg

SEQ ID NO: 323773 - DNA, 33 bp, Homo sapien
atttaactgtcagacactgagaaaggttagaaa

SEQ ID NO: 323774 - DNA, 33 bp, Homo sapien
atttaactgtcagacattgagaaaggttagaaa

SEQ ID NO: 323775 - DNA, 33 bp, Homo sapien
gggttgcttgcccgtacctcttcggaaaagtcc

SEQ ID NO: 323776 - DNA, 33 bp, Homo sapien
gggttgcttgcccgtatctcttcggaaaagtcc

SEQ ID NO: 323777 - DNA, 33 bp, Homo sapien
atgacagactgtaatacctgctaggaaggaaac

SEQ ID NO: 323778 - DNA, 33 bp, Homo sapien
atgacagactgtaatatctgctaggaaggaaac

SEQ ID NO: 323779 - DNA, 33 bp, Homo sapien
cacgtttatctgtttacattgatggttgctttt

SEQ ID NO: 323780 - DNA, 33 bp, Homo sapien
cacgtttatctgtttatattgatggttgctttt

SEQ ID NO: 323781 - DNA, 33 bp, Homo sapien
taatgaaacttgtaagcacacagaaggcactgt

SEQ ID NO: 323782 - DNA, 33 bp, Homo sapien
taatgaaacttgtaagtacacagaaggcactgt

SEQ ID NO: 323783 - DNA, 33 bp, Homo sapien
ggcttcaacacgtgaactggtttcaacatacga

SEQ ID NO: 323784 - DNA, 33 bp, Homo sapien
ggcttcaacacgtgaattggtttcaacatacga

SEQ ID NO: 323785 - DNA, 33 bp, Homo sapien
agtctgcctgctgtaaatgatctgacattggat

SEQ ID NO: 323786 - DNA, 33 bp, Homo sapien
agtctgcctgctgtaagtgatctgacattggat

SEQ ID NO: 323787 - DNA, 33 bp, Homo sapien
tgagattgagaaaccacggtctagaatccagca

SEQ ID NO: 323788 - DNA, 33 bp, Homo sapien
tgagattgagaaaccagggtctagaatccagca

SEQ ID NO: 323789 - DNA, 33 bp, Homo sapien
tttctcctgtgtttgccgagtttgatttgagtc

SEQ ID NO: 323790 - DNA, 33 bp, Homo sapien
tttctcctgtgtttgctgagtttgatttgagtc

SEQ ID NO: 323791 - DNA, 33 bp, Homo sapien
gtaacagtcatcttcaaatattattgacaaata

SEQ ID NO: 323792 - DNA, 33 bp, Homo sapien
gtaacagtcatcttcagatattattgacaaata

SEQ ID NO: 323793 - DNA, 33 bp, Homo sapien
ccttatccttctctgcccctagctaaggcctgt

SEQ ID NO: 323794 - DNA, 33 bp, Homo sapien
ccttatccttctctgcgcctagctaaggcctgt

SEQ ID NO: 323795 - DNA, 33 bp, Homo sapien
gagagagagattaataagatcaggagtagattc

SEQ ID NO: 323796 - DNA, 33 bp, Homo sapien
gagagagagattaataggatcaggagtagattc

SEQ ID NO: 323797 - DNA, 33 bp, Homo sapien
acttcacagcatttcacgaacaccctttcattc

SEQ ID NO: 323798 - DNA, 33 bp, Homo sapien
acttcacagcatttcatgaacaccctttcattc

SEQ ID NO: 323799 - DNA, 33 bp, Homo sapien
ctttgtctttatagcacggtttatttgtgcaat

SEQ ID NO: 323800 - DNA, 33 bp, Homo sapien
ctttgtctttatagcatggtttatttgtgcaat

SEQ ID NO: 323801 - DNA, 33 bp, Homo sapien
ggctggactcaaggaacaataaggctctttaca

SEQ ID NO: 323802 - DNA, 33 bp, Homo sapien
ggctggactcaaggaataataaggctctttaca

SEQ ID NO: 323803 - DNA, 33 bp, Homo sapien
gattttggtcatacgaatagattcaattacttt

SEQ ID NO: 323804 - DNA, 33 bp, Homo sapien
gattttggtcatacgagtagattcaattacttt

SEQ ID NO: 323805 - DNA, 33 bp, Homo sapien
ccgttaaccttagcaaatggagaaaggagtttc

SEQ ID NO: 323806 - DNA, 33 bp, Homo sapien
ccgttaaccttagcaactggagaaaggagtttc

SEQ ID NO: 323807 - DNA, 33 bp, Homo sapien
aagtagcagtgagttacgagtttctgcctacac

SEQ ID NO: 323808 - DNA, 33 bp, Homo sapien
aagtagcagtgagttatgagtttctgcctacac

SEQ ID NO: 323809 - DNA, 33 bp, Homo sapien
attgttggggccatccagcttgtggcacttggt

SEQ ID NO: 323810 - DNA, 33 bp, Homo sapien
attgttggggccatccggcttgtggcacttggt

SEQ ID NO: 323811 - DNA, 33 bp, Homo sapien
tgagggatacaactcaaccctgaacacctgctt

SEQ ID NO: 323812 - DNA, 33 bp, Homo sapien
tgagggatacaactcacccctgaacacctgctt

SEQ ID NO: 323813 - DNA, 33 bp, Homo sapien
gatgaagggattttccaagcagctatcttgatc

SEQ ID NO: 323814 - DNA, 33 bp, Homo sapien
gatgaagggattttccgagcagctatcttgatc

SEQ ID NO: 323815 - DNA, 33 bp, Homo sapien
tcaaaggagaatgttacagtcaagggtacattt

SEQ ID NO: 323816 - DNA, 33 bp, Homo sapien
tcaaaggagaatgttatagtcaagggtacattt

SEQ ID NO: 323817 - DNA, 33 bp, Homo sapien
tctcagaattatttcaacaataacttacctcta

SEQ ID NO: 323818 - DNA, 33 bp, Homo sapien
tctcagaattatttcagcaataacttacctcta

SEQ ID NO: 323819 - DNA, 33 bp, Homo sapien
tcttccccctctactacagccacgattagagtc

SEQ ID NO: 323820 - DNA, 33 bp, Homo sapien
tcttccccctctactatagccacgattagagtc

SEQ ID NO: 323821 - DNA, 33 bp, Homo sapien
tttcccctaaccgtgacaccagtcaacctacct

SEQ ID NO: 323822 - DNA, 33 bp, Homo sapien
tttcccctaaccgtgataccagtcaacctacct

SEQ ID NO: 323823 - DNA, 33 bp, Homo sapien
acaagcctcgcccgcagcgtaattctttttatt

SEQ ID NO: 323824 - DNA, 33 bp, Homo sapien
acaagcctcgcccgcatcgtaattctttttatt

SEQ ID NO: 323825 - DNA, 33 bp, Homo sapien
gtggctgcaccatttcgctgggtggcttgcgaa

SEQ ID NO: 323826 - DNA, 33 bp, Homo sapien
gtggctgcaccatttctctgggtggcttgcgaa

SEQ ID NO: 323827 - DNA, 33 bp, Homo sapien
tttgaaaccagtcagaatcacgtctttgagtgc

SEQ ID NO: 323828 - DNA, 33 bp, Homo sapien
tttgaaaccagtcagattcacgtctttgagtgc

SEQ ID NO: 323829 - DNA, 33 bp, Homo sapien
tggtttgagttttgcagagcattcttcattttc

SEQ ID NO: 323830 - DNA, 33 bp, Homo sapien
tggtttgagttttgcatagcattcttcattttc

SEQ ID NO: 323831 - DNA, 33 bp, Homo sapien
atacagcttttggaaaatagttctggtgtgagg

SEQ ID NO: 323832 - DNA, 33 bp, Homo sapien
atacagcttttggaaagtagttctggtgtgagg

SEQ ID NO: 323833 - DNA, 33 bp, Homo sapien
ggtgccactactagaaactcatctcgagaccag

SEQ ID NO: 323834 - DNA, 33 bp, Homo sapien
ggtgccactactagaatctcatctcgagaccag

SEQ ID NO: 323835 - DNA, 33 bp, Homo sapien
ctcaggctgtctaaacaacagggggatcttgtt

SEQ ID NO: 323836 - DNA, 33 bp, Homo sapien
ctcaggctgtctaaacgacagggggatcttgtt

SEQ ID NO: 323837 - DNA, 33 bp, Homo sapien
tttctttcatcatttgaaatctatactcactct

SEQ ID NO: 323838 - DNA, 33 bp, Homo sapien
tttctttcatcatttgcaatctatactcactct

SEQ ID NO: 323839 - DNA, 33 bp, Homo sapien
cattagcctacacccaactggagggcctgctca

SEQ ID NO: 323840 - DNA, 33 bp, Homo sapien
cattagcctacacccagctggagggcctgctca

SEQ ID NO: 323841 - DNA, 33 bp, Homo sapien
gctcagtgttcaaaccaaaatggtgaatggtct

SEQ ID NO: 323842 - DNA, 33 bp, Homo sapien
gctcagtgttcaaaccgaaatggtgaatggtct

SEQ ID NO: 323843 - DNA, 33 bp, Homo sapien
gtgctgtttctgccaacggctcagcaaattgca

SEQ ID NO: 323844 - DNA, 33 bp, Homo sapien
gtgctgtttctgccaatggctcagcaaattgca

SEQ ID NO: 323845 - DNA, 33 bp, Homo sapien
tctcctaaccttctgaaccatctgtgatttctt

SEQ ID NO: 323846 - DNA, 33 bp, Homo sapien
tctcctaaccttctgacccatctgtgatttctt

SEQ ID NO: 323847 - DNA, 33 bp, Homo sapien
gtttccggaatcataccgaccccagaggaaggc

SEQ ID NO: 323848 - DNA, 33 bp, Homo sapien
gtttccggaatcatacggaccccagaggaaggc

SEQ ID NO: 323849 - DNA, 33 bp, Homo sapien
aaggacatcctagttacaccattttttcctgag

SEQ ID NO: 323850 - DNA, 33 bp, Homo sapien
aaggacatcctagttataccattttttcctgag

SEQ ID NO: 323851 - DNA, 33 bp, Homo sapien
tatggaatggcacaagactgtttgtaggtagtt

SEQ ID NO: 323852 - DNA, 33 bp, Homo sapien
tatggaatggcacaaggctgtttgtaggtagtt

SEQ ID NO: 323853 - DNA, 33 bp, Homo sapien
attgtcggctaagctaagtccacacacctgggg

SEQ ID NO: 323854 - DNA, 33 bp, Homo sapien
attgtcggctaagctaggtccacacacctgggg

SEQ ID NO: 323855 - DNA, 33 bp, Homo sapien
aactgaggtccaaagaagttggtcaaggtcatg

SEQ ID NO: 323856 - DNA, 33 bp, Homo sapien
aactgaggtccaaagaggttggtcaaggtcatg

SEQ ID NO: 323857 - DNA, 33 bp, Homo sapien
acctaaatggtcttaactgtattgcagtcactt

SEQ ID NO: 323858 - DNA, 33 bp, Homo sapien
acctaaatggtcttaattgtattgcagtcactt

SEQ ID NO: 323859 - DNA, 33 bp, Homo sapien
aagatactctggccaacagtcactgttcttagc

SEQ ID NO: 323860 - DNA, 33 bp, Homo sapien
aagatactctggccaatagtcactgttcttagc

SEQ ID NO: 323861 - DNA, 33 bp, Homo sapien
agcttttgcggatgataagtatcttcattacct

SEQ ID NO: 323862 - DNA, 33 bp, Homo sapien
agcttttgcggatgatgagtatcttcattacct

SEQ ID NO: 323863 - DNA, 33 bp, Homo sapien
cagtatcacttgggaacgtgggagaaatgccag

SEQ ID NO: 323864 - DNA, 33 bp, Homo sapien
cagtatcacttgggaatgtgggagaaatgccag

SEQ ID NO: 323865 - DNA, 33 bp, Homo sapien
actcctctaggttggacagtccatccatgcatc

SEQ ID NO: 323866 - DNA, 33 bp, Homo sapien
actcctctaggttggagagtccatccatgcatc

SEQ ID NO: 323867 - DNA, 33 bp, Homo sapien
catttgaagataaaaacgttatgtagtcaaatg

SEQ ID NO: 323868 - DNA, 33 bp, Homo sapien
catttgaagataaaaaggttatgtagtcaaatg

SEQ ID NO: 323869 - DNA, 33 bp, Homo sapien
ccattatgatgataaactgcaacttgatggaaa

SEQ ID NO: 323870 - DNA, 33 bp, Homo sapien
ccattatgatgataaagtgcaacttgatggaaa

SEQ ID NO: 323871 - DNA, 33 bp, Homo sapien
tttttgcttcctgtaaatagcctagtaaatggt

SEQ ID NO: 323872 - DNA, 33 bp, Homo sapien
tttttgcttcctgtaagtagcctagtaaatggt

SEQ ID NO: 323873 - DNA, 33 bp, Homo sapien
acggcctctttctttcacttttatcttattgga

SEQ ID NO: 323874 - DNA, 33 bp, Homo sapien
acggcctctttctttcgcttttatcttattgga

SEQ ID NO: 323875 - DNA, 33 bp, Homo sapien
aatatttgttatttaacgtgcctttatatactc

SEQ ID NO: 323876 - DNA, 33 bp, Homo sapien
aatatttgttatttaatgtgcctttatatactc

SEQ ID NO: 323877 - DNA, 33 bp, Homo sapien
gagtagttttagggaacgcacctggatgtctgg

SEQ ID NO: 323878 - DNA, 33 bp, Homo sapien
gagtagttttagggaatgcacctggatgtctgg

SEQ ID NO: 323879 - DNA, 33 bp, Homo sapien
tccttgctttagagtcaagctctgaataagctg

SEQ ID NO: 323880 - DNA, 33 bp, Homo sapien
tccttgctttagagtcgagctctgaataagctg

SEQ ID NO: 323881 - DNA, 33 bp, Homo sapien
gatgctcaagaaagaactgttgctgacttgtct

SEQ ID NO: 323882 - DNA, 33 bp, Homo sapien
gatgctcaagaaagaattgttgctgacttgtct

SEQ ID NO: 323883 - DNA, 33 bp, Homo sapien
acttggttttgagggaaaagagcaggtaccggg

SEQ ID NO: 323884 - DNA, 33 bp, Homo sapien
acttggttttgagggagaagagcaggtaccggg

SEQ ID NO: 323885 - DNA, 33 bp, Homo sapien
ggacatgggtctcttccacttcagggattccct

SEQ ID NO: 323886 - DNA, 33 bp, Homo sapien
ggacatgggtctcttctacttcagggattccct

SEQ ID NO: 323887 - DNA, 33 bp, Homo sapien
tggtctcccttgcctcagagagttgttacaact

SEQ ID NO: 323888 - DNA, 33 bp, Homo sapien
tggtctcccttgcctcggagagttgttacaact

SEQ ID NO: 323889 - DNA, 33 bp, Homo sapien
tgctgagaaaagctgcgcaaaattaaaaagaaa

SEQ ID NO: 323890 - DNA, 33 bp, Homo sapien
tgctgagaaaagctgctcaaaattaaaaagaaa

SEQ ID NO: 323891 - DNA, 33 bp, Homo sapien
ttacacttggtctgaacggctcaacaaactcag

SEQ ID NO: 323892 - DNA, 33 bp, Homo sapien
ttacacttggtctgaatggctcaacaaactcag

SEQ ID NO: 323893 - DNA, 33 bp, Homo sapien
tttatactccttcagggcataagaatagtacat

SEQ ID NO: 323894 - DNA, 33 bp, Homo sapien
tttatactccttcaggtcataagaatagtacat

SEQ ID NO: 323895 - DNA, 33 bp, Homo sapien
agaaatcagaagaggaataaaagaacgaagaaa

SEQ ID NO: 323896 - DNA, 33 bp, Homo sapien
agaaatcagaagaggagtaaaagaacgaagaaa

SEQ ID NO: 323897 - DNA, 33 bp, Homo sapien
tttatgatcgcttgagacaccctcatggacagc

SEQ ID NO: 323898 - DNA, 33 bp, Homo sapien
tttatgatcgcttgaggcaccctcatggacagc

SEQ ID NO: 323899 - DNA, 33 bp, Homo sapien
accctaacttacaagcacaattttaatatctct

SEQ ID NO: 323900 - DNA, 33 bp, Homo sapien
accctaacttacaagcccaattttaatatctct

SEQ ID NO: 323901 - DNA, 33 bp, Homo sapien
aagtggataagatgacccattttagttttgttt

SEQ ID NO: 323902 - DNA, 33 bp, Homo sapien
aagtggataagatgactcattttagttttgttt

SEQ ID NO: 323903 - DNA, 33 bp, Homo sapien
tacatagaaagatagacggtgtgatacaaagct

SEQ ID NO: 323904 - DNA, 33 bp, Homo sapien
tacatagaaagatagatggtgtgatacaaagct

SEQ ID NO: 323905 - DNA, 33 bp, Homo sapien
taaggatgggtgaaaacgtagcaaatgtactta

SEQ ID NO: 323906 - DNA, 33 bp, Homo sapien
taaggatgggtgaaaatgtagcaaatgtactta

SEQ ID NO: 323907 - DNA, 33 bp, Homo sapien
tgcgccataacttccaaattcttagtaatgctt

SEQ ID NO: 323908 - DNA, 33 bp, Homo sapien
tgcgccataacttccacattcttagtaatgctt

SEQ ID NO: 323909 - DNA, 33 bp, Homo sapien
tgccaaggaattatgcaaaggacttatgaatcc

SEQ ID NO: 323910 - DNA, 33 bp, Homo sapien
tgccaaggaattatgcgaaggacttatgaatcc

SEQ ID NO: 323911 - DNA, 33 bp, Homo sapien
gaatggagccccatcacgtgcgttttaacagtc

SEQ ID NO: 323912 - DNA, 33 bp, Homo sapien
gaatggagccccatcatgtgcgttttaacagtc

SEQ ID NO: 323913 - DNA, 33 bp, Homo sapien
ttattggagttcttgcatttaagcctgtttcac

SEQ ID NO: 323914 - DNA, 33 bp, Homo sapien
ttattggagttcttgcgtttaagcctgtttcac

SEQ ID NO: 323915 - DNA, 33 bp, Homo sapien
atgtcagccctgaaggcaatttctatttgtgct

SEQ ID NO: 323916 - DNA, 33 bp, Homo sapien
atgtcagccctgaaggtaatttctatttgtgct

SEQ ID NO: 323917 - DNA, 33 bp, Homo sapien
tggccacatcagatcccctcttacgccctgggc

SEQ ID NO: 323918 - DNA, 33 bp, Homo sapien
tggccacatcagatcctctcttacgccctgggc

SEQ ID NO: 323919 - DNA, 33 bp, Homo sapien
gcatacctctttagaacaccagcttcttatctg

SEQ ID NO: 323920 - DNA, 33 bp, Homo sapien
gcatacctctttagaataccagcttcttatctg

SEQ ID NO: 323921 - DNA, 33 bp, Homo sapien
tttttctcatttgtacaataattcctctgtagg

SEQ ID NO: 323922 - DNA, 33 bp, Homo sapien
tttttctcatttgtactataattcctctgtagg

SEQ ID NO: 323923 - DNA, 33 bp, Homo sapien
gacttccatgttgctactagactcactctattg

SEQ ID NO: 323924 - DNA, 33 bp, Homo sapien
gacttccatgttgctagtagactcactctattg

SEQ ID NO: 323925 - DNA, 33 bp, Homo sapien
ggttccctggtccttacaggctctgtgcagtga

SEQ ID NO: 323926 - DNA, 33 bp, Homo sapien
ggttccctggtccttataggctctgtgcagtga

SEQ ID NO: 323927 - DNA, 33 bp, Homo sapien
aagaattctgaaatacaggatagccttcctccc

SEQ ID NO: 323928 - DNA, 33 bp, Homo sapien
aagaattctgaaatacgggatagccttcctccc

SEQ ID NO: 323929 - DNA, 33 bp, Homo sapien
cccaattttggccaaacccagccagattcttaa

SEQ ID NO: 323930 - DNA, 33 bp, Homo sapien
cccaattttggccaaatccagccagattcttaa

SEQ ID NO: 323931 - DNA, 33 bp, Homo sapien
atgtgggggatgctcacgcggtcagtggaaggc

SEQ ID NO: 323932 - DNA, 33 bp, Homo sapien
atgtgggggatgctcatgcggtcagtggaaggc

SEQ ID NO: 323933 - DNA, 33 bp, Homo sapien
gatgtaaggaacagtacgtctggaatacaggag

SEQ ID NO: 323934 - DNA, 33 bp, Homo sapien
gatgtaaggaacagtatgtctggaatacaggag

SEQ ID NO: 323935 - DNA, 33 bp, Homo sapien
tcctagctgactgtcaaataaacagagttttgt

SEQ ID NO: 323936 - DNA, 33 bp, Homo sapien
tcctagctgactgtcagataaacagagttttgt

SEQ ID NO: 323937 - DNA, 33 bp, Homo sapien
acatgatgaaacaaaacagcaagcgactcttga

SEQ ID NO: 323938 - DNA, 33 bp, Homo sapien
acatgatgaaacaaaatagcaagcgactcttga

SEQ ID NO: 323939 - DNA, 33 bp, Homo sapien
gcccgaacaaattaacacaggcagcaaagtatt

SEQ ID NO: 323940 - DNA, 33 bp, Homo sapien
gcccgaacaaattaacgcaggcagcaaagtatt

SEQ ID NO: 323941 - DNA, 33 bp, Homo sapien
tgctaaattgttctcccaaatatctctgttgat

SEQ ID NO: 323942 - DNA, 33 bp, Homo sapien
tgctaaattgttctcctaaatatctctgttgat

SEQ ID NO: 323943 - DNA, 33 bp, Homo sapien
ctgacacttccttcatcatcgccgtttttggag

SEQ ID NO: 323944 - DNA, 33 bp, Homo sapien
ctgacacttccttcatgatcgccgtttttggag

SEQ ID NO: 323945 - DNA, 33 bp, Homo sapien
gtaagaagctagaaaacattcgtgatgtggcaa

SEQ ID NO: 323946 - DNA, 33 bp, Homo sapien
gtaagaagctagaaaatattcgtgatgtggcaa

SEQ ID NO: 323947 - DNA, 33 bp, Homo sapien
ctcagagattaagtatcagaccccggaggtagc

SEQ ID NO: 323948 - DNA, 33 bp, Homo sapien
ctcagagattaagtattagaccccggaggtagc

SEQ ID NO: 323949 - DNA, 33 bp, Homo sapien
ccccagccagtgtctggagagattgagggcatg

SEQ ID NO: 323950 - DNA, 33 bp, Homo sapien
ccccagccagtgtctgtagagattgagggcatg

SEQ ID NO: 323951 - DNA, 33 bp, Homo sapien
cactgagttgctcaaactacacctgaacttgac

SEQ ID NO: 323952 - DNA, 33 bp, Homo sapien
cactgagttgctcaaattacacctgaacttgac

SEQ ID NO: 323953 - DNA, 33 bp, Homo sapien
gtgatctaaactacaaaggtgtacattttctct

SEQ ID NO: 323954 - DNA, 33 bp, Homo sapien
gtgatctaaactacaagggtgtacattttctct

SEQ ID NO: 323955 - DNA, 33 bp, Homo sapien
ccagttgtggaacccaaagctcggagatggtaa

SEQ ID NO: 323956 - DNA, 33 bp, Homo sapien
ccagttgtggaacccagagctcggagatggtaa

SEQ ID NO: 323957 - DNA, 33 bp, Homo sapien
cctgacttgaggcgaaaagaggcacacaattag

SEQ ID NO: 323958 - DNA, 33 bp, Homo sapien
cctgacttgaggcgaatagaggcacacaattag

SEQ ID NO: 323959 - DNA, 33 bp, Homo sapien
ccttttaaggtcaagccagttaccatacacctg

SEQ ID NO: 323960 - DNA, 33 bp, Homo sapien
ccttttaaggtcaagctagttaccatacacctg

SEQ ID NO: 323961 - DNA, 33 bp, Homo sapien
catggaataagggaccaagtctaaggattggct

SEQ ID NO: 323962 - DNA, 33 bp, Homo sapien
catggaataagggaccgagtctaaggattggct

SEQ ID NO: 323963 - DNA, 33 bp, Homo sapien
agttggaaatccatcaactttgaaagaaagaca

SEQ ID NO: 323964 - DNA, 33 bp, Homo sapien
agttggaaatccatcagctttgaaagaaagaca

SEQ ID NO: 323965 - DNA, 33 bp, Homo sapien
atatctgtctaattaacacagcagacaggtggt

SEQ ID NO: 323966 - DNA, 33 bp, Homo sapien
atatctgtctaattaatacagcagacaggtggt

SEQ ID NO: 323967 - DNA, 33 bp, Homo sapien
gcctagtctgaggaaagtgggaagacttccctg

SEQ ID NO: 323968 - DNA, 33 bp, Homo sapien
gcctagtctgaggaaattgggaagacttccctg

SEQ ID NO: 323969 - DNA, 33 bp, Homo sapien
tctgtactcagttatgaaagtcagaattccagg

SEQ ID NO: 323970 - DNA, 33 bp, Homo sapien
tctgtactcagttatggaagtcagaattccagg

SEQ ID NO: 323971 - DNA, 33 bp, Homo sapien
gggcaccaggagacaaaagttggtgacaggtga

SEQ ID NO: 323972 - DNA, 33 bp, Homo sapien
gggcaccaggagacaagagttggtgacaggtga

SEQ ID NO: 323973 - DNA, 33 bp, Homo sapien
ctgatgctctgcgaaacgtcccccagatcccca

SEQ ID NO: 323974 - DNA, 33 bp, Homo sapien
ctgatgctctgcgaaatgtcccccagatcccca

SEQ ID NO: 323975 - DNA, 33 bp, Homo sapien
gagagcaatggaagaccactgaaggtttctaag

SEQ ID NO: 323976 - DNA, 33 bp, Homo sapien
gagagcaatggaagacgactgaaggtttctaag

SEQ ID NO: 323977 - DNA, 33 bp, Homo sapien
actggaaacacctgaaactcctctagatctgtg

SEQ ID NO: 323978 - DNA, 33 bp, Homo sapien
actggaaacacctgaagctcctctagatctgtg

SEQ ID NO: 323979 - DNA, 33 bp, Homo sapien
aaacctagagctcagacctgaaaggccaggggt

SEQ ID NO: 323980 - DNA, 33 bp, Homo sapien
aaacctagagctcagagctgaaaggccaggggt

SEQ ID NO: 323981 - DNA, 33 bp, Homo sapien
ctttcagattagcaccaactttacttctgtatc

SEQ ID NO: 323982 - DNA, 33 bp, Homo sapien
ctttcagattagcaccgactttacttctgtatc

SEQ ID NO: 323983 - DNA, 33 bp, Homo sapien
cagaagaaagtatgacaaccctctaaaggagct

SEQ ID NO: 323984 - DNA, 33 bp, Homo sapien
cagaagaaagtatgaccaccctctaaaggagct

SEQ ID NO: 323985 - DNA, 33 bp, Homo sapien
taaattagaatcgccaagtaaatctgttgatca

SEQ ID NO: 323986 - DNA, 33 bp, Homo sapien
taaattagaatcgccaggtaaatctgttgatca

SEQ ID NO: 323987 - DNA, 33 bp, Homo sapien
aatgatgtcatgctacagacttgtgattaaaca

SEQ ID NO: 323988 - DNA, 33 bp, Homo sapien
aatgatgtcatgctactgacttgtgattaaaca

SEQ ID NO: 323989 - DNA, 33 bp, Homo sapien
taatgtcagcagactcgactctactaatgatgt

SEQ ID NO: 323990 - DNA, 33 bp, Homo sapien
taatgtcagcagactctactctactaatgatgt

SEQ ID NO: 323991 - DNA, 33 bp, Homo sapien
ggatgctttcatttccaagtagcagaaaatcca

SEQ ID NO: 323992 - DNA, 33 bp, Homo sapien
ggatgctttcatttccgagtagcagaaaatcca

SEQ ID NO: 323993 - DNA, 33 bp, Homo sapien
ctgcatagttactcaacgtgttcagtgatacat

SEQ ID NO: 323994 - DNA, 33 bp, Homo sapien
ctgcatagttactcaatgtgttcagtgatacat

SEQ ID NO: 323995 - DNA, 33 bp, Homo sapien
ttatgaattaggtaaaggctagtgcgttaaatc

SEQ ID NO: 323996 - DNA, 33 bp, Homo sapien
ttatgaattaggtaaatgctagtgcgttaaatc

SEQ ID NO: 323997 - DNA, 33 bp, Homo sapien
tgctagccaagcaaaaacatggccagagatcct

SEQ ID NO: 323998 - DNA, 33 bp, Homo sapien
tgctagccaagcaaaaccatggccagagatcct

SEQ ID NO: 323999 - DNA, 33 bp, Homo sapien
cagtggttagtgctgaagaaagttagccatcat

SEQ ID NO: 324000 - DNA, 33 bp, Homo sapien
cagtggttagtgctgacgaaagttagccatcat

SEQ ID NO: 324001 - DNA, 33 bp, Homo sapien
gaataccgtgcacaaccccctgtactcacaact

SEQ ID NO: 324002 - DNA, 33 bp, Homo sapien
gaataccgtgcacaactccctgtactcacaact

SEQ ID NO: 324003 - DNA, 33 bp, Homo sapien
gcagcttatcactgaacgttattccttttcaac

SEQ ID NO: 324004 - DNA, 33 bp, Homo sapien
gcagcttatcactgaatgttattccttttcaac

SEQ ID NO: 324005 - DNA, 33 bp, Homo sapien
gaacatcgtatttagacaggaagttggagctca

SEQ ID NO: 324006 - DNA, 33 bp, Homo sapien
gaacatcgtatttagataggaagttggagctca

SEQ ID NO: 324007 - DNA, 33 bp, Homo sapien
tttcctcatgcctaaaatgctaagtaagggaaa

SEQ ID NO: 324008 - DNA, 33 bp, Homo sapien
tttcctcatgcctaaagtgctaagtaagggaaa

SEQ ID NO: 324009 - DNA, 33 bp, Homo sapien
acacatggaactacaacacataagttgttctta

SEQ ID NO: 324010 - DNA, 33 bp, Homo sapien
acacatggaactacaatacataagttgttctta

SEQ ID NO: 324011 - DNA, 33 bp, Homo sapien
ctggagaaggtaagacaaagttagctctgagtt

SEQ ID NO: 324012 - DNA, 33 bp, Homo sapien
ctggagaaggtaagacgaagttagctctgagtt

SEQ ID NO: 324013 - DNA, 33 bp, Homo sapien
tacattttctgtagccaaataaagacaaatcag

SEQ ID NO: 324014 - DNA, 33 bp, Homo sapien
tacattttctgtagccgaataaagacaaatcag

SEQ ID NO: 324015 - DNA, 33 bp, Homo sapien
gtggaaaaaaatggagacagatatgggtggtag

SEQ ID NO: 324016 - DNA, 33 bp, Homo sapien
gtggaaaaaaatggaggcagatatgggtggtag

SEQ ID NO: 324017 - DNA, 33 bp, Homo sapien
aaccaacactgaatgaagaagctctacaacggc

SEQ ID NO: 324018 - DNA, 33 bp, Homo sapien
aaccaacactgaatgaggaagctctacaacggc

SEQ ID NO: 324019 - DNA, 33 bp, Homo sapien
atatttgtaagtaattcaagtgtttgggagttt

SEQ ID NO: 324020 - DNA, 33 bp, Homo sapien
atatttgtaagtaattgaagtgtttgggagttt

SEQ ID NO: 324021 - DNA, 33 bp, Homo sapien
aaccagtttttggaagcattataaatagaagtc

SEQ ID NO: 324022 - DNA, 33 bp, Homo sapien
aaccagtttttggaaggattataaatagaagtc

SEQ ID NO: 324023 - DNA, 33 bp, Homo sapien
ttaaatgaacagagaaatggtttagaagtgaca

SEQ ID NO: 324024 - DNA, 33 bp, Homo sapien
ttaaatgaacagagaagtggtttagaagtgaca

SEQ ID NO: 324025 - DNA, 33 bp, Homo sapien
ctgcagtacacgtctacaaatcaaacttgcata

SEQ ID NO: 324026 - DNA, 33 bp, Homo sapien
ctgcagtacacgtctataaatcaaacttgcata

SEQ ID NO: 324027 - DNA, 33 bp, Homo sapien
atggagtatcatgtccaccctgttaccaaaatg

SEQ ID NO: 324028 - DNA, 33 bp, Homo sapien
atggagtatcatgtccgccctgttaccaaaatg

SEQ ID NO: 324029 - DNA, 33 bp, Homo sapien
actaggctttcaattgcagatttagacttggag

SEQ ID NO: 324030 - DNA, 33 bp, Homo sapien
actaggctttcaattggagatttagacttggag

SEQ ID NO: 324031 - DNA, 33 bp, Homo sapien
ttgattttagtctatacataaggtggacaatca

SEQ ID NO: 324032 - DNA, 33 bp, Homo sapien
ttgattttagtctatatataaggtggacaatca

SEQ ID NO: 324033 - DNA, 33 bp, Homo sapien
ggaaggtcaaaggacacaggacatctaactctc

SEQ ID NO: 324034 - DNA, 33 bp, Homo sapien
ggaaggtcaaaggacataggacatctaactctc

SEQ ID NO: 324035 - DNA, 33 bp, Homo sapien
caaaaatatcaggatacaactttaaacgtctcc

SEQ ID NO: 324036 - DNA, 33 bp, Homo sapien
caaaaatatcaggatataactttaaacgtctcc

SEQ ID NO: 324037 - DNA, 33 bp, Homo sapien
acaacaaaaacaatccaaagaaagagacttgga

SEQ ID NO: 324038 - DNA, 33 bp, Homo sapien
acaacaaaaacaatccgaagaaagagacttgga

SEQ ID NO: 324039 - DNA, 33 bp, Homo sapien
aagccacagaggaccccggcctaattagaattc

SEQ ID NO: 324040 - DNA, 33 bp, Homo sapien
aagccacagaggaccctggcctaattagaattc

SEQ ID NO: 324041 - DNA, 33 bp, Homo sapien
tgtggttcttatgaacaaatcctgacaaaatgg

SEQ ID NO: 324042 - DNA, 33 bp, Homo sapien
tgtggttcttatgaacgaatcctgacaaaatgg

SEQ ID NO: 324043 - DNA, 33 bp, Homo sapien
catctggaaggagataaaaatattcactaggag

SEQ ID NO: 324044 - DNA, 33 bp, Homo sapien
catctggaaggagatacaaatattcactaggag

SEQ ID NO: 324045 - DNA, 33 bp, Homo sapien
gctaatttgtaaccacagtaaaggatgtttagg

SEQ ID NO: 324046 - DNA, 33 bp, Homo sapien
gctaatttgtaaccacggtaaaggatgtttagg

SEQ ID NO: 324047 - DNA, 33 bp, Homo sapien
tatggaacaaagatcaaggtatagcagggatga

SEQ ID NO: 324048 - DNA, 33 bp, Homo sapien
tatggaacaaagatcagggtatagcagggatga

SEQ ID NO: 324049 - DNA, 33 bp, Homo sapien
gacttgctgatctgaacgagaatcctggacttg

SEQ ID NO: 324050 - DNA, 33 bp, Homo sapien
gacttgctgatctgaatgagaatcctggacttg

SEQ ID NO: 324051 - DNA, 33 bp, Homo sapien
gtaatggtccagacccacaagtaagtggtccaa

SEQ ID NO: 324052 - DNA, 33 bp, Homo sapien
gtaatggtccagacccgcaagtaagtggtccaa

SEQ ID NO: 324053 - DNA, 33 bp, Homo sapien
ttaggaacgcagtacacgggctcaaatcctgcc

SEQ ID NO: 324054 - DNA, 33 bp, Homo sapien
ttaggaacgcagtacatgggctcaaatcctgcc

SEQ ID NO: 324055 - DNA, 33 bp, Homo sapien
tgcggatagtcagggacgagcagaaatgttggt

SEQ ID NO: 324056 - DNA, 33 bp, Homo sapien
tgcggatagtcagggatgagcagaaatgttggt

SEQ ID NO: 324057 - DNA, 33 bp, Homo sapien
gactttaagggaagtgaacatccagtacaaaga

SEQ ID NO: 324058 - DNA, 33 bp, Homo sapien
gactttaagggaagtggacatccagtacaaaga

SEQ ID NO: 324059 - DNA, 33 bp, Homo sapien
gggctttactgactgcaaggcaagcccagccgg

SEQ ID NO: 324060 - DNA, 33 bp, Homo sapien
gggctttactgactgcgaggcaagcccagccgg

SEQ ID NO: 324061 - DNA, 33 bp, Homo sapien
cctaagtttgcaaagaaaggatatacagtcacc

SEQ ID NO: 324062 - DNA, 33 bp, Homo sapien
cctaagtttgcaaagacaggatatacagtcacc

SEQ ID NO: 324063 - DNA, 33 bp, Homo sapien
cacaacgaggaccctaaaggaagaaaaggcaaa

SEQ ID NO: 324064 - DNA, 33 bp, Homo sapien
cacaacgaggaccctagaggaagaaaaggcaaa

SEQ ID NO: 324065 - DNA, 33 bp, Homo sapien
cgcccaggagtccatgcaaacagagacttctgc

SEQ ID NO: 324066 - DNA, 33 bp, Homo sapien
cgcccaggagtccatggaaacagagacttctgc

SEQ ID NO: 324067 - DNA, 33 bp, Homo sapien
cttttttcagaacttgaaatgtcctaaaattga

SEQ ID NO: 324068 - DNA, 33 bp, Homo sapien
cttttttcagaacttgcaatgtcctaaaattga

SEQ ID NO: 324069 - DNA, 33 bp, Homo sapien
cacccaccatttcttagacccttaatttgcgct

SEQ ID NO: 324070 - DNA, 33 bp, Homo sapien
cacccaccatttcttatacccttaatttgcgct

SEQ ID NO: 324071 - DNA, 33 bp, Homo sapien
gcagtgcctggctcaacacatttaattactgga

SEQ ID NO: 324072 - DNA, 33 bp, Homo sapien
gcagtgcctggctcaatacatttaattactgga

SEQ ID NO: 324073 - DNA, 33 bp, Homo sapien
cttgtaatctatgagtcaacttcagagtatgga

SEQ ID NO: 324074 - DNA, 33 bp, Homo sapien
cttgtaatctatgagttaacttcagagtatgga

SEQ ID NO: 324075 - DNA, 33 bp, Homo sapien
agtttggctgtcacaaggatcggcatttagtgt

SEQ ID NO: 324076 - DNA, 33 bp, Homo sapien
agtttggctgtcacaatgatcggcatttagtgt

SEQ ID NO: 324077 - DNA, 33 bp, Homo sapien
gaggttttaaaatcccaaagccgaggtcatgcc

SEQ ID NO: 324078 - DNA, 33 bp, Homo sapien
gaggttttaaaatcccgaagccgaggtcatgcc

SEQ ID NO: 324079 - DNA, 33 bp, Homo sapien
catgtatattgctcccaatcttttttcatgtat

SEQ ID NO: 324080 - DNA, 33 bp, Homo sapien
catgtatattgctccccatcttttttcatgtat

SEQ ID NO: 324081 - DNA, 33 bp, Homo sapien
tgtagtcatttaggtcaattttaagtagccatt

SEQ ID NO: 324082 - DNA, 33 bp, Homo sapien
tgtagtcatttaggtccattttaagtagccatt

SEQ ID NO: 324083 - DNA, 33 bp, Homo sapien
cattttgcaagatggaggaaatgaggtctgcag

SEQ ID NO: 324084 - DNA, 33 bp, Homo sapien
cattttgcaagatggatgaaatgaggtctgcag

SEQ ID NO: 324085 - DNA, 33 bp, Homo sapien
tttcctgccttgcctcactggtatttgtactga

SEQ ID NO: 324086 - DNA, 33 bp, Homo sapien
tttcctgccttgcctcgctggtatttgtactga

SEQ ID NO: 324087 - DNA, 33 bp, Homo sapien
acaacgtgcaatgtaaagtatctattgatgatt

SEQ ID NO: 324088 - DNA, 33 bp, Homo sapien
acaacgtgcaatgtaaggtatctattgatgatt

SEQ ID NO: 324089 - DNA, 33 bp, Homo sapien
gcagatgggacaagcaaaaggctgaacgtcaag

SEQ ID NO: 324090 - DNA, 33 bp, Homo sapien
gcagatgggacaagcagaaggctgaacgtcaag

SEQ ID NO: 324091 - DNA, 33 bp, Homo sapien
tccagtgctaactggacgtctgaaccacactgg

SEQ ID NO: 324092 - DNA, 33 bp, Homo sapien
tccagtgctaactggatgtctgaaccacactgg

SEQ ID NO: 324093 - DNA, 33 bp, Homo sapien
tacatagcaccttaacaaaagatcaatatattt

SEQ ID NO: 324094 - DNA, 33 bp, Homo sapien
tacatagcaccttaacgaaagatcaatatattt

SEQ ID NO: 324095 - DNA, 33 bp, Homo sapien
tgccgtagcaccacaccattaatcctataaaac

SEQ ID NO: 324096 - DNA, 33 bp, Homo sapien
tgccgtagcaccacactattaatcctataaaac

SEQ ID NO: 324097 - DNA, 33 bp, Homo sapien
gggcagggtaggcaaacgatgtacaggggcagt

SEQ ID NO: 324098 - DNA, 33 bp, Homo sapien
gggcagggtaggcaaatgatgtacaggggcagt

SEQ ID NO: 324099 - DNA, 33 bp, Homo sapien
gcagtgaatatgcagtaaatattgtggtatgga

SEQ ID NO: 324100 - DNA, 33 bp, Homo sapien
gcagtgaatatgcagtgaatattgtggtatgga

SEQ ID NO: 324101 - DNA, 33 bp, Homo sapien
tatcatactggtgatacgtgctgtagaaaaatt

SEQ ID NO: 324102 - DNA, 33 bp, Homo sapien
tatcatactggtgatatgtgctgtagaaaaatt

SEQ ID NO: 324103 - DNA, 33 bp, Homo sapien
agagacaaaattcttacatctgtttctggattt

SEQ ID NO: 324104 - DNA, 33 bp, Homo sapien
agagacaaaattcttatatctgtttctggattt

SEQ ID NO: 324105 - DNA, 33 bp, Homo sapien
ccttccacaaaccaacactgtctaccccagtgc

SEQ ID NO: 324106 - DNA, 33 bp, Homo sapien
ccttccacaaaccaacgctgtctaccccagtgc

SEQ ID NO: 324107 - DNA, 33 bp, Homo sapien
tgatccaggaaataaaatactagaaataacaca

SEQ ID NO: 324108 - DNA, 33 bp, Homo sapien
tgatccaggaaataaagtactagaaataacaca

SEQ ID NO: 324109 - DNA, 33 bp, Homo sapien
gaactttatctgcagacgggctctcagtagcct

SEQ ID NO: 324110 - DNA, 33 bp, Homo sapien
gaactttatctgcagatgggctctcagtagcct

SEQ ID NO: 324111 - DNA, 33 bp, Homo sapien
gaacgatgtcaaaggaaagatatccttaccttg

SEQ ID NO: 324112 - DNA, 33 bp, Homo sapien
gaacgatgtcaaaggagagatatccttaccttg

SEQ ID NO: 324113 - DNA, 33 bp, Homo sapien
gaggcagccgttgaccaagctgtagcaacaagg

SEQ ID NO: 324114 - DNA, 33 bp, Homo sapien
gaggcagccgttgaccgagctgtagcaacaagg

SEQ ID NO: 324115 - DNA, 33 bp, Homo sapien
gcaacactggagatcaactttcatctggagatt

SEQ ID NO: 324116 - DNA, 33 bp, Homo sapien
gcaacactggagatcagctttcatctggagatt

SEQ ID NO: 324117 - DNA, 33 bp, Homo sapien
ctttcttttcttatggaacgcctcatgaattgg

SEQ ID NO: 324118 - DNA, 33 bp, Homo sapien
ctttcttttcttatggcacgcctcatgaattgg

SEQ ID NO: 324119 - DNA, 33 bp, Homo sapien
tcaagaaggctttgccaaaatagagaaagctaa

SEQ ID NO: 324120 - DNA, 33 bp, Homo sapien
tcaagaaggctttgccgaaatagagaaagctaa

SEQ ID NO: 324121 - DNA, 33 bp, Homo sapien
actcctcctgggacaaatgaatgccacagaaaa

SEQ ID NO: 324122 - DNA, 33 bp, Homo sapien
actcctcctgggacaagtgaatgccacagaaaa

SEQ ID NO: 324123 - DNA, 33 bp, Homo sapien
taccaaaatgcagagaaggtactgtccacctat

SEQ ID NO: 324124 - DNA, 33 bp, Homo sapien
taccaaaatgcagagacggtactgtccacctat

SEQ ID NO: 324125 - DNA, 33 bp, Homo sapien; identical to SEQ ID NO: 324123

SEQ ID NO: 324126 - DNA, 33 bp, Homo sapien; identical to SEQ ID NO: 324124

SEQ ID NO: 324127 - DNA, 33 bp, Homo sapien
agtgcccaactccaaggagtcaactcagcccag

SEQ ID NO: 324128 - DNA, 33 bp, Homo sapien
agtgcccaactccaagtagtcaactcagcccag

SEQ ID NO: 324129 - DNA, 33 bp, Homo sapien
tagatgcttgttgacactgtaaaagaatgttag

SEQ ID NO: 324130 - DNA, 33 bp, Homo sapien
tagatgcttgttgacattgtaaaagaatgttag

SEQ ID NO: 324131 - DNA, 33 bp, Homo sapien
gccagtcctcatgaaccctaagataactctcat

SEQ ID NO: 324132 - DNA, 33 bp, Homo sapien
gccagtcctcatgaactctaagataactctcat

SEQ ID NO: 324133 - DNA, 33 bp, Homo sapien
aaaagtggtgagaaaaattgatttgtccactgt

SEQ ID NO: 324134 - DNA, 33 bp, Homo sapien
aaaagtggtgagaaaagttgatttgtccactgt

SEQ ID NO: 324135 - DNA, 33 bp, Homo sapien
gtctgtgaaatagggacctttatagttcctcct

SEQ ID NO: 324136 - DNA, 33 bp, Homo sapien
gtctgtgaaatagggatctttatagttcctcct

SEQ ID NO: 324137 - DNA, 33 bp, Homo sapien
aaaagacaggtttagaagactcgttacacacat

SEQ ID NO: 324138 - DNA, 33 bp, Homo sapien
aaaagacaggtttagatgactcgttacacacat

SEQ ID NO: 324139 - DNA, 33 bp, Homo sapien
acgatgacactggtaccatcattaccccctcat

SEQ ID NO: 324140 - DNA, 33 bp, Homo sapien
acgatgacactggtactatcattaccccctcat

SEQ ID NO: 324141 - DNA, 33 bp, Homo sapien
ttaaataacaagtacaccaattactgaacccct

SEQ ID NO: 324142 - DNA, 33 bp, Homo sapien
ttaaataacaagtacatcaattactgaacccct

SEQ ID NO: 324143 - DNA, 33 bp, Homo sapien
gtggcatttcaaatataaagatgagtgaactta

SEQ ID NO: 324144 - DNA, 33 bp, Homo sapien
gtggcatttcaaatatgaagatgagtgaactta

SEQ ID NO: 324145 - DNA, 33 bp, Homo sapien
caggctatgaaagctacgtcattttacacactc

SEQ ID NO: 324146 - DNA, 33 bp, Homo sapien
caggctatgaaagctatgtcattttacacactc

SEQ ID NO: 324147 - DNA, 33 bp, Homo sapien
ccgacggccatcctcaatgaccatatgccctgc

SEQ ID NO: 324148 - DNA, 33 bp, Homo sapien
ccgacggccatcctcagtgaccatatgccctgc

SEQ ID NO: 324149 - DNA, 33 bp, Homo sapien
gggaaggaatgaagacccaactgatcgcctgct

SEQ ID NO: 324150 - DNA, 33 bp, Homo sapien
gggaaggaatgaagactcaactgatcgcctgct

SEQ ID NO: 324151 - DNA, 33 bp, Homo sapien
tttatttctgaaggtaccaaagcagagagagtt

SEQ ID NO: 324152 - DNA, 33 bp, Homo sapien
tttatttctgaaggtatcaaagcagagagagtt

SEQ ID NO: 324153 - DNA, 33 bp, Homo sapien
tatcttaggaaaggacactgaagtatgttagca

SEQ ID NO: 324154 - DNA, 33 bp, Homo sapien
tatcttaggaaaggacgctgaagtatgttagca

SEQ ID NO: 324155 - DNA, 33 bp, Homo sapien
gaaggaagtttccacagatgagaacaggagcag

SEQ ID NO: 324156 - DNA, 33 bp, Homo sapien
gaaggaagtttccacatatgagaacaggagcag

SEQ ID NO: 324157 - DNA, 33 bp, Homo sapien
aagtgcttgtgtcaccggatatgtttgatcttg

SEQ ID NO: 324158 - DNA, 33 bp, Homo sapien
aagtgcttgtgtcacctgatatgtttgatcttg

SEQ ID NO: 324159 - DNA, 33 bp, Homo sapien
ctcaaaaattgctgcacagtccatcagtttgcc

SEQ ID NO: 324160 - DNA, 33 bp, Homo sapien
ctcaaaaattgctgcagagtccatcagtttgcc

SEQ ID NO: 324161 - DNA, 33 bp, Homo sapien
ggttaggatttgaccaacactgtcatgtgagga

SEQ ID NO: 324162 - DNA, 33 bp, Homo sapien
ggttaggatttgaccagcactgtcatgtgagga

SEQ ID NO: 324163 - DNA, 33 bp, Homo sapien
agaacattgaaatgaaagtgaacggttaggatt

SEQ ID NO: 324164 - DNA, 33 bp, Homo sapien
agaacattgaaatgaaggtgaacggttaggatt

SEQ ID NO: 324165 - DNA, 33 bp, Homo sapien
ccaaatgtcagagttacgatttcttgaacaagg

SEQ ID NO: 324166 - DNA, 33 bp, Homo sapien
ccaaatgtcagagttatgatttcttgaacaagg

SEQ ID NO: 324167 - DNA, 33 bp, Homo sapien
tgctcctttgagaatcaatgccgctactgattg

SEQ ID NO: 324168 - DNA, 33 bp, Homo sapien
tgctcctttgagaatcgatgccgctactgattg

SEQ ID NO: 324169 - DNA, 33 bp, Homo sapien
gggccatctgcctacaccagtgaggaaggatga

SEQ ID NO: 324170 - DNA, 33 bp, Homo sapien
gggccatctgcctacatcagtgaggaaggatga

SEQ ID NO: 324171 - DNA, 33 bp, Homo sapien
tttacagctctcaaaaacaaaaacgcattctgt

SEQ ID NO: 324172 - DNA, 33 bp, Homo sapien
tttacagctctcaaaagcaaaaacgcattctgt

SEQ ID NO: 324173 - DNA, 33 bp, Homo sapien
tacaacggtagttaaacccttcctcagaccctg

SEQ ID NO: 324174 - DNA, 33 bp, Homo sapien
tacaacggtagttaaatccttcctcagaccctg

SEQ ID NO: 324175 - DNA, 33 bp, Homo sapien
tctgctgacacggagactctactagaggcattt

SEQ ID NO: 324176 - DNA, 33 bp, Homo sapien
tctgctgacacggagattctactagaggcattt

SEQ ID NO: 324177 - DNA, 33 bp, Homo sapien
agttctctgagtcacaaatctcttgggctgctg

SEQ ID NO: 324178 - DNA, 33 bp, Homo sapien
agttctctgagtcacacatctcttgggctgctg

SEQ ID NO: 324179 - DNA, 33 bp, Homo sapien
acactctgaaatataaaaaggtcaagtgacttg

SEQ ID NO: 324180 - DNA, 33 bp, Homo sapien
acactctgaaatataagaaggtcaagtgacttg

SEQ ID NO: 324181 - DNA, 33 bp, Homo sapien
agttatttgttaaaagcctaccattacaatggc

SEQ ID NO: 324182 - DNA, 33 bp, Homo sapien
agttatttgttaaaaggctaccattacaatggc

SEQ ID NO: 324183 - DNA, 33 bp, Homo sapien
aagtataactggaaaacctatgttgaaatcaac

SEQ ID NO: 324184 - DNA, 33 bp, Homo sapien
aagtataactggaaaatctatgttgaaatcaac

SEQ ID NO: 324185 - DNA, 33 bp, Homo sapien
agatgaagtaggtgacaagcactcttagaagtt

SEQ ID NO: 324186 - DNA, 33 bp, Homo sapien
agatgaagtaggtgacgagcactcttagaagtt

SEQ ID NO: 324187 - DNA, 33 bp, Homo sapien
acattttgttacaacaagatctttagatcctgg

SEQ ID NO: 324188 - DNA, 33 bp, Homo sapien
acattttgttacaacatgatctttagatcctgg

SEQ ID NO: 324189 - DNA, 33 bp, Homo sapien
ggctaaagctgtaggacgtaaagcttagaaatc

SEQ ID NO: 324190 - DNA, 33 bp, Homo sapien
ggctaaagctgtaggatgtaaagcttagaaatc

SEQ ID NO: 324191 - DNA, 33 bp, Homo sapien
gggcagcttagctaaactgtaccagaatccttt

SEQ ID NO: 324192 - DNA, 33 bp, Homo sapien
gggcagcttagctaaattgtaccagaatccttt

SEQ ID NO: 324193 - DNA, 33 bp, Homo sapien
atgaatgagttgggaggctccatagatgtcaga

SEQ ID NO: 324194 - DNA, 33 bp, Homo sapien
atgaatgagttgggagtctccatagatgtcaga

SEQ ID NO: 324195 - DNA, 33 bp, Homo sapien
aggctgttatggccacaatggtatgtatcagac

SEQ ID NO: 324196 - DNA, 33 bp, Homo sapien
aggctgttatggccacgatggtatgtatcagac

SEQ ID NO: 324197 - DNA, 33 bp, Homo sapien
aggcattccataagccacatggccccctaagat

SEQ ID NO: 324198 - DNA, 33 bp, Homo sapien
aggcattccataagccgcatggccccctaagat

SEQ ID NO: 324199 - DNA, 33 bp, Homo sapien
cgctgcctttaatccagcaaaaagcttttacct

SEQ ID NO: 324200 - DNA, 33 bp, Homo sapien
cgctgcctttaatccatcaaaaagcttttacct

SEQ ID NO: 324201 - DNA, 33 bp, Homo sapien
gattcttacacgacaaaggagttcatttcatct

SEQ ID NO: 324202 - DNA, 33 bp, Homo sapien
gattcttacacgacaagggagttcatttcatct

SEQ ID NO: 324203 - DNA, 33 bp, Homo sapien
ttacatcagggaacaaagggaagtgtgggagtt

SEQ ID NO: 324204 - DNA, 33 bp, Homo sapien
ttacatcagggaacaaggggaagtgtgggagtt

SEQ ID NO: 324205 - DNA, 33 bp, Homo sapien
ccagaacagaaaaaggacattggtggaaaaact

SEQ ID NO: 324206 - DNA, 33 bp, Homo sapien
ccagaacagaaaaagggcattggtggaaaaact

SEQ ID NO: 324207 - DNA, 33 bp, Homo sapien
gagtaggtcaagcctcacccacaatactgccgg

SEQ ID NO: 324208 - DNA, 33 bp, Homo sapien
gagtaggtcaagcctcgcccacaatactgccgg

SEQ ID NO: 324209 - DNA, 33 bp, Homo sapien
aaggaacatcatatccagccatgtatcttttta

SEQ ID NO: 324210 - DNA, 33 bp, Homo sapien
aaggaacatcatatccggccatgtatcttttta

SEQ ID NO: 324211 - DNA, 33 bp, Homo sapien
tcattgatttggcacaaaagaatcagctgctcc

SEQ ID NO: 324212 - DNA, 33 bp, Homo sapien
tcattgatttggcacagaagaatcagctgctcc

SEQ ID NO: 324213 - DNA, 33 bp, Homo sapien
ggtaagaaggtgcaggaacaggatcacacttga

SEQ ID NO: 324214 - DNA, 33 bp, Homo sapien
ggtaagaaggtgcagggacaggatcacacttga

SEQ ID NO: 324215 - DNA, 33 bp, Homo sapien
ctactggaattctagcccttggtcattcttctc

SEQ ID NO: 324216 - DNA, 33 bp, Homo sapien
ctactggaattctagctcttggtcattcttctc

SEQ ID NO: 324217 - DNA, 33 bp, Homo sapien
aaaatgtggataatgactatacttacttcatag

SEQ ID NO: 324218 - DNA, 33 bp, Homo sapien
aaaatgtggataatgattatacttacttcatag

SEQ ID NO: 324219 - DNA, 33 bp, Homo sapien
tcctgtgcttaagtaactagtactgtcttcact

SEQ ID NO: 324220 - DNA, 33 bp, Homo sapien
tcctgtgcttaagtaagtagtactgtcttcact

SEQ ID NO: 324221 - DNA, 33 bp, Homo sapien
ttcttttgcactaggcgagcacattttaagcct

SEQ ID NO: 324222 - DNA, 33 bp, Homo sapien
ttcttttgcactaggctagcacattttaagcct

SEQ ID NO: 324223 - DNA, 33 bp, Homo sapien
tgcagggccttaggaactcttgatgtggccctg

SEQ ID NO: 324224 - DNA, 33 bp, Homo sapien
tgcagggccttaggaagtcttgatgtggccctg

SEQ ID NO: 324225 - DNA, 33 bp, Homo sapien
aacaatactataatggaaataccatagtgcaac

SEQ ID NO: 324226 - DNA, 33 bp, Homo sapien
aacaatactataatgggaataccatagtgcaac

SEQ ID NO: 324227 - DNA, 33 bp, Homo sapien
actggcttctgctcaacgtcacagcagggttag

SEQ ID NO: 324228 - DNA, 33 bp, Homo sapien
actggcttctgctcaatgtcacagcagggttag

SEQ ID NO: 324229 - DNA, 33 bp, Homo sapien
ccatcgaagagaggtaaagacttccctgtttgg

SEQ ID NO: 324230 - DNA, 33 bp, Homo sapien
ccatcgaagagaggtagagacttccctgtttgg

SEQ ID NO: 324231 - DNA, 33 bp, Homo sapien
gtcatagaaatctttacggagaactaggcataa

SEQ ID NO: 324232 - DNA, 33 bp, Homo sapien
gtcatagaaatctttatggagaactaggcataa

SEQ ID NO: 324233 - DNA, 33 bp, Homo sapien
cgtgaatgaacataagcctctttgctacgtccc

SEQ ID NO: 324234 - DNA, 33 bp, Homo sapien
cgtgaatgaacataagtctctttgctacgtccc

SEQ ID NO: 324235 - DNA, 33 bp, Homo sapien
acgacaagaaagaccccataagcaatgaagggg

SEQ ID NO: 324236 - DNA, 33 bp, Homo sapien
acgacaagaaagacccgataagcaatgaagggg

SEQ ID NO: 324237 - DNA, 33 bp, Homo sapien
cttcacaaatgctccacgaggcagtcattcccc

SEQ ID NO: 324238 - DNA, 33 bp, Homo sapien
cttcacaaatgctccatgaggcagtcattcccc

SEQ ID NO: 324239 - DNA, 33 bp, Homo sapien
gtggccccaaaacaccgcgtggcctgtggctga

SEQ ID NO: 324240 - DNA, 33 bp, Homo sapien
gtggccccaaaacacctcgtggcctgtggctga

SEQ ID NO: 324241 - DNA, 33 bp, Homo sapien
caaacataaatgataaaacaccttctgatgaag

SEQ ID NO: 324242 - DNA, 33 bp, Homo sapien
caaacataaatgataagacaccttctgatgaag

SEQ ID NO: 324243 - DNA, 33 bp, Homo sapien
acaatgagaaactccccccgtccatcagagtgg

SEQ ID NO: 324244 - DNA, 33 bp, Homo sapien
acaatgagaaactcccgccgtccatcagagtgg

SEQ ID NO: 324245 - DNA, 33 bp, Homo sapien
ggtgagaatcaggtaactggaagttttcttatg

SEQ ID NO: 324246 - DNA, 33 bp, Homo sapien
ggtgagaatcaggtaattggaagttttcttatg

SEQ ID NO: 324247 - DNA, 33 bp, Homo sapien
gactcacactaatcacactcttgacagactgag

SEQ ID NO: 324248 - DNA, 33 bp, Homo sapien
gactcacactaatcacgctcttgacagactgag

SEQ ID NO: 324249 - DNA, 33 bp, Homo sapien
ccttataccagtgccacaggtttcctccagcaa

SEQ ID NO: 324250 - DNA, 33 bp, Homo sapien
ccttataccagtgccataggtttcctccagcaa

SEQ ID NO: 324251 - DNA, 33 bp, Homo sapien
gtggagcgaggcactgaagtcctatggttatga

SEQ ID NO: 324252 - DNA, 33 bp, Homo sapien
gtggagcgaggcactggagtcctatggttatga

SEQ ID NO: 324253 - DNA, 33 bp, Homo sapien
aaataagagacagtcaacactaactccttcgcc

SEQ ID NO: 324254 - DNA, 33 bp, Homo sapien
aaataagagacagtcatcactaactccttcgcc

SEQ ID NO: 324255 - DNA, 33 bp, Homo sapien
ttattttctgacactacctgttctcaatgtgat

SEQ ID NO: 324256 - DNA, 33 bp, Homo sapien
ttattttctgacactatctgttctcaatgtgat

SEQ ID NO: 324257 - DNA, 33 bp, Homo sapien
ttgtttccacattcaacgttttctctctaaaaa

SEQ ID NO: 324258 - DNA, 33 bp, Homo sapien
ttgtttccacattcaatgttttctctctaaaaa

SEQ ID NO: 324259 - DNA, 33 bp, Homo sapien
acatattcaattggaaaaacttgggcaagttat

SEQ ID NO: 324260 - DNA, 33 bp, Homo sapien
acatattcaattggaagaacttgggcaagttat

SEQ ID NO: 324261 - DNA, 33 bp, Homo sapien
aaactgcagaccgagaaaaatagaatccaggct

SEQ ID NO: 324262 - DNA, 33 bp, Homo sapien
aaactgcagaccgagagaaatagaatccaggct

SEQ ID NO: 324263 - DNA, 33 bp, Homo sapien
tgcacgtgctgcacagactggagctctctgggg

SEQ ID NO: 324264 - DNA, 33 bp, Homo sapien
tgcacgtgctgcacaggctggagctctctgggg

SEQ ID NO: 324265 - DNA, 33 bp, Homo sapien
cattgtcccagctgaacctgtgtggcttctgcc

SEQ ID NO: 324266 - DNA, 33 bp, Homo sapien
cattgtcccagctgaatctgtgtggcttctgcc

SEQ ID NO: 324267 - DNA, 33 bp, Homo sapien
gacacttcctgttccaaaggcacttgttcaatt

SEQ ID NO: 324268 - DNA, 33 bp, Homo sapien
gacacttcctgttccagaggcacttgttcaatt

SEQ ID NO: 324269 - DNA, 33 bp, Homo sapien
aagcttagctatgaacaaagagctaccaggcta

SEQ ID NO: 324270 - DNA, 33 bp, Homo sapien
aagcttagctatgaacgaagagctaccaggcta

SEQ ID NO: 324271 - DNA, 33 bp, Homo sapien
acaggcactcttaataacactttacacattttt

SEQ ID NO: 324272 - DNA, 33 bp, Homo sapien
acaggcactcttaatagcactttacacattttt

SEQ ID NO: 324273 - DNA, 33 bp, Homo sapien
cttccatactggactaaccctataacacttcca

SEQ ID NO: 324274 - DNA, 33 bp, Homo sapien
cttccatactggactagccctataacacttcca

SEQ ID NO: 324275 - DNA, 33 bp, Homo sapien
gatacagggatcaaaacgatgtctttaagggat

SEQ ID NO: 324276 - DNA, 33 bp, Homo sapien
gatacagggatcaaaatgatgtctttaagggat

SEQ ID NO: 324277 - DNA, 33 bp, Homo sapien
acctgcatatgagctactacatttgcataaaca

SEQ ID NO: 324278 - DNA, 33 bp, Homo sapien
acctgcatatgagctattacatttgcataaaca

SEQ ID NO: 324279 - DNA, 33 bp, Homo sapien
ccttaaacctggctagaaatgaaaaaggtactt

SEQ ID NO: 324280 - DNA, 33 bp, Homo sapien
ccttaaacctggctaggaatgaaaaaggtactt

SEQ ID NO: 324281 - DNA, 33 bp, Homo sapien
cagagactgttaggaaactcaataagataatgg

SEQ ID NO: 324282 - DNA, 33 bp, Homo sapien
cagagactgttaggaagctcaataagataatgg

SEQ ID NO: 324283 - DNA, 33 bp, Homo sapien
ccccaaccagcattaacacttacacgtcagggc

SEQ ID NO: 324284 - DNA, 33 bp, Homo sapien
ccccaaccagcattaatacttacacgtcagggc

SEQ ID NO: 324285 - DNA, 33 bp, Homo sapien
gtactgatacatacacaatgatactgatgaacc

SEQ ID NO: 324286 - DNA, 33 bp, Homo sapien
gtactgatacatacacgatgatactgatgaacc

SEQ ID NO: 324287 - DNA, 33 bp, Homo sapien
cagttgaaacaagaacaactcaaaacctgcgaa

SEQ ID NO: 324288 - DNA, 33 bp, Homo sapien
cagttgaaacaagaacgactcaaaacctgcgaa

SEQ ID NO: 324289 - DNA, 33 bp, Homo sapien
tctgaaccggtttctacgatgtactacaccaaa

SEQ ID NO: 324290 - DNA, 33 bp, Homo sapien
tctgaaccggtttctatgatgtactacaccaaa

SEQ ID NO: 324291 - DNA, 33 bp, Homo sapien
cccgggagattgatgccgaaagtgttgaatacc

SEQ ID NO: 324292 - DNA, 33 bp, Homo sapien
cccgggagattgatgctgaaagtgttgaatacc

SEQ ID NO: 324293 - DNA, 33 bp, Homo sapien
gaatattcattctcaaagacacaggggatgatg

SEQ ID NO: 324294 - DNA, 33 bp, Homo sapien
gaatattcattctcaaggacacaggggatgatg

SEQ ID NO: 324295 - DNA, 33 bp, Homo sapien
cccaaagaacaggcttaaaagatgcaaataaat

SEQ ID NO: 324296 - DNA, 33 bp, Homo sapien
cccaaagaacaggcttcaaagatgcaaataaat

SEQ ID NO: 324297 - DNA, 33 bp, Homo sapien
caatggccttggcacaaagatgctcttgcattc

SEQ ID NO: 324298 - DNA, 33 bp, Homo sapien
caatggccttggcacagagatgctcttgcattc

SEQ ID NO: 324299 - DNA, 33 bp, Homo sapien
gaataaactttcaaggccaatcataaatgcaga

SEQ ID NO: 324300 - DNA, 33 bp, Homo sapien
gaataaactttcaaggtcaatcataaatgcaga

SEQ ID NO: 324301 - DNA, 33 bp, Homo sapien
cggagactgctccaccaagtgaggtgcccgaat

SEQ ID NO: 324302 - DNA, 33 bp, Homo sapien
cggagactgctccaccgagtgaggtgcccgaat

SEQ ID NO: 324303 - DNA, 33 bp, Homo sapien
ttgatatgatcctggacactcgaaaatttatag

SEQ ID NO: 324304 - DNA, 33 bp, Homo sapien
ttgatatgatcctggagactcgaaaatttatag

SEQ ID NO: 324305 - DNA, 33 bp, Homo sapien
attacacttgctttcaaaccccttccatgtgcc

SEQ ID NO: 324306 - DNA, 33 bp, Homo sapien
attacacttgctttcacaccccttccatgtgcc

SEQ ID NO: 324307 - DNA, 33 bp, Homo sapien
atgtactataactctaagcactgcttcctcatt

SEQ ID NO: 324308 - DNA, 33 bp, Homo sapien
atgtactataactctaggcactgcttcctcatt

SEQ ID NO: 324309 - DNA, 33 bp, Homo sapien
cctgggacaggtacacactgatgctttgccata

SEQ ID NO: 324310 - DNA, 33 bp, Homo sapien
cctgggacaggtacaccctgatgctttgccata

SEQ ID NO: 324311 - DNA, 33 bp, Homo sapien
agctgctgcctgcgaacagccagggcctgtgag

SEQ ID NO: 324312 - DNA, 33 bp, Homo sapien
agctgctgcctgcgaatagccagggcctgtgag

SEQ ID NO: 324313 - DNA, 33 bp, Homo sapien
aatgttaaagaatggccccgtcacaggcacccc

SEQ ID NO: 324314 - DNA, 33 bp, Homo sapien
aatgttaaagaatggctccgtcacaggcacccc

SEQ ID NO: 324315 - DNA, 33 bp, Homo sapien
aattaaagattctagcaaaggagactggttaag

SEQ ID NO: 324316 - DNA, 33 bp, Homo sapien
aattaaagattctagcgaaggagactggttaag

SEQ ID NO: 324317 - DNA, 33 bp, Homo sapien
ataatgaatctactcccaagataatggcattaa

SEQ ID NO: 324318 - DNA, 33 bp, Homo sapien
ataatgaatctactcctaagataatggcattaa

SEQ ID NO: 324319 - DNA, 33 bp, Homo sapien
gcaagtcctgatcttcacatccatttgggaagg

SEQ ID NO: 324320 - DNA, 33 bp, Homo sapien
gcaagtcctgatcttcgcatccatttgggaagg

SEQ ID NO: 324321 - DNA, 33 bp, Homo sapien
tgggtgtaatgagaccggaaaacagaatggaca

SEQ ID NO: 324322 - DNA, 33 bp, Homo sapien
tgggtgtaatgagacctgaaaacagaatggaca

SEQ ID NO: 324323 - DNA, 33 bp, Homo sapien
tcataaagaaacccagaactcaggaacgaagga

SEQ ID NO: 324324 - DNA, 33 bp, Homo sapien
tcataaagaaacccaggactcaggaacgaagga

SEQ ID NO: 324325 - DNA, 33 bp, Homo sapien
gccacaggcaatgaccaccctaaccctggggaa

SEQ ID NO: 324326 - DNA, 33 bp, Homo sapien
gccacaggcaatgaccgccctaaccctggggaa

SEQ ID NO: 324327 - DNA, 33 bp, Homo sapien
attcaatatccaagtacagaaattaagtccaga

SEQ ID NO: 324328 - DNA, 33 bp, Homo sapien
attcaatatccaagtagagaaattaagtccaga

SEQ ID NO: 324329 - DNA, 33 bp, Homo sapien
atgtcacccttaagcaaaaggaaatctttccca

SEQ ID NO: 324330 - DNA, 33 bp, Homo sapien
atgtcacccttaagcacaaggaaatctttccca

SEQ ID NO: 324331 - DNA, 33 bp, Homo sapien
ttacttacacctgttccaactgctcatgaaagc

SEQ ID NO: 324332 - DNA, 33 bp, Homo sapien
ttacttacacctgttctaactgctcatgaaagc

SEQ ID NO: 324333 - DNA, 33 bp, Homo sapien
aaagcagaggcagaaacgagcccagaggccaca

SEQ ID NO: 324334 - DNA, 33 bp, Homo sapien
aaagcagaggcagaaatgagcccagaggccaca

SEQ ID NO: 324335 - DNA, 33 bp, Homo sapien
gacccctgctatacacgatatcgtttggtttca

SEQ ID NO: 324336 - DNA, 33 bp, Homo sapien
gacccctgctatacactatatcgtttggtttca

SEQ ID NO: 324337 - DNA, 33 bp, Homo sapien
gcaaatgaatacccaaatacctctgccagaaga

SEQ ID NO: 324338 - DNA, 33 bp, Homo sapien
gcaaatgaatacccaagtacctctgccagaaga

SEQ ID NO: 324339 - DNA, 33 bp, Homo sapien
cccccacacctctacacggtagcttagtccact

SEQ ID NO: 324340 - DNA, 33 bp, Homo sapien
cccccacacctctacatggtagcttagtccact

SEQ ID NO: 324341 - DNA, 33 bp, Homo sapien
gtcagcattacacccacctgagtttaagctcag

SEQ ID NO: 324342 - DNA, 33 bp, Homo sapien
gtcagcattacacccatctgagtttaagctcag

SEQ ID NO: 324343 - DNA, 33 bp, Homo sapien
cgagtcacactcctaacccttggattcttcttc

SEQ ID NO: 324344 - DNA, 33 bp, Homo sapien
cgagtcacactcctaatccttggattcttcttc

SEQ ID NO: 324345 - DNA, 33 bp, Homo sapien
acacaggtggcagcaaccaaaaatatcattccc

SEQ ID NO: 324346 - DNA, 33 bp, Homo sapien
acacaggtggcagcaagcaaaaatatcattccc

SEQ ID NO: 324347 - DNA, 33 bp, Homo sapien
taggggtcagctaacaataacaagctactacta

SEQ ID NO: 324348 - DNA, 33 bp, Homo sapien
taggggtcagctaacagtaacaagctactacta

SEQ ID NO: 324349 - DNA, 33 bp, Homo sapien
ttacaaagacgtattccagagataacagtttgt

SEQ ID NO: 324350 - DNA, 33 bp, Homo sapien
ttacaaagacgtattctagagataacagtttgt

SEQ ID NO: 324351 - DNA, 33 bp, Homo sapien
tttttgtaggtgccaaatctctgatcatatctt

SEQ ID NO: 324352 - DNA, 33 bp, Homo sapien
tttttgtaggtgccaagtctctgatcatatctt

SEQ ID NO: 324353 - DNA, 33 bp, Homo sapien
ttcttatttctctgaacggaattacaatttata

SEQ ID NO: 324354 - DNA, 33 bp, Homo sapien
ttcttatttctctgaatggaattacaatttata

SEQ ID NO: 324355 - DNA, 33 bp, Homo sapien
gattcatctcctagaaaccttccaggatgccct

SEQ ID NO: 324356 - DNA, 33 bp, Homo sapien
gattcatctcctagaagccttccaggatgccct

SEQ ID NO: 324357 - DNA, 33 bp, Homo sapien
atgtgaaaatagcaaaatgattcatcaatagaa

SEQ ID NO: 324358 - DNA, 33 bp, Homo sapien
atgtgaaaatagcaaagtgattcatcaatagaa

SEQ ID NO: 324359 - DNA, 33 bp, Homo sapien
ctttccttgttttaccaacattttcttgggttc

SEQ ID NO: 324360 - DNA, 33 bp, Homo sapien
ctttccttgttttacctacattttcttgggttc

SEQ ID NO: 324361 - DNA, 33 bp, Homo sapien
attgtctattaatgccgaaaatccagacaagca

SEQ ID NO: 324362 - DNA, 33 bp, Homo sapien
attgtctattaatgcctaaaatccagacaagca

SEQ ID NO: 324363 - DNA, 33 bp, Homo sapien
atttcttataccatacccttgaaatgtactggg

SEQ ID NO: 324364 - DNA, 33 bp, Homo sapien
atttcttataccatactcttgaaatgtactggg

SEQ ID NO: 324365 - DNA, 33 bp, Homo sapien
aggaaacagaagacccaaacaacacaataaacc

SEQ ID NO: 324366 - DNA, 33 bp, Homo sapien
aggaaacagaagacccgaacaacacaataaacc

SEQ ID NO: 324367 - DNA, 33 bp, Homo sapien
ctgtatcttggaaatgcatgtcagattggcaaa

SEQ ID NO: 324368 - DNA, 33 bp, Homo sapien
ctgtatcttggaaatgtatgtcagattggcaaa

SEQ ID NO: 324369 - DNA, 33 bp, Homo sapien
caatactggtactaaaattgtagaaagtgatgg

SEQ ID NO: 324370 - DNA, 33 bp, Homo sapien
caatactggtactaaagttgtagaaagtgatgg

SEQ ID NO: 324371 - DNA, 33 bp, Homo sapien
gatcaggctgtcactaggtaatctaatcttaga

SEQ ID NO: 324372 - DNA, 33 bp, Homo sapien
gatcaggctgtcactatgtaatctaatcttaga

SEQ ID NO: 324373 - DNA, 33 bp, Homo sapien
tttggcctatcactaaccttgatcagttttctg

SEQ ID NO: 324374 - DNA, 33 bp, Homo sapien
tttggcctatcactaatcttgatcagttttctg

SEQ ID NO: 324375 - DNA, 33 bp, Homo sapien
aatgagacatcgtgaccagagctttacacagtc

SEQ ID NO: 324376 - DNA, 33 bp, Homo sapien
aatgagacatcgtgacgagagctttacacagtc

SEQ ID NO: 324377 - DNA, 33 bp, Homo sapien
cttgaattcttgagtcccttctgtcccggatcc

SEQ ID NO: 324378 - DNA, 33 bp, Homo sapien
cttgaattcttgagtctcttctgtcccggatcc

SEQ ID NO: 324379 - DNA, 33 bp, Homo sapien
agctatagtatattaactgaacaaacatcttga

SEQ ID NO: 324380 - DNA, 33 bp, Homo sapien
agctatagtatattaattgaacaaacatcttga

SEQ ID NO: 324381 - DNA, 33 bp, Homo sapien
agtttatcagtcagcactgcaccacagagaaga

SEQ ID NO: 324382 - DNA, 33 bp, Homo sapien
agtttatcagtcagcattgcaccacagagaaga

SEQ ID NO: 324383 - DNA, 33 bp, Homo sapien
caaggaaaagaatttccctactggctcctgccc

SEQ ID NO: 324384 - DNA, 33 bp, Homo sapien
caaggaaaagaatttctctactggctcctgccc

SEQ ID NO: 324385 - DNA, 33 bp, Homo sapien
aagctgtattctgttaactctctcttaagcacc

SEQ ID NO: 324386 - DNA, 33 bp, Homo sapien
aagctgtattctgttagctctctcttaagcacc

SEQ ID NO: 324387 - DNA, 33 bp, Homo sapien
caacttcatgagggtccctgagttagaatcaag

SEQ ID NO: 324388 - DNA, 33 bp, Homo sapien
caacttcatgagggtctctgagttagaatcaag

SEQ ID NO: 324389 - DNA, 33 bp, Homo sapien
ggagctagaggtagaaaaggaaaacctggagag

SEQ ID NO: 324390 - DNA, 33 bp, Homo sapien
ggagctagaggtagaagaggaaaacctggagag

SEQ ID NO: 324391 - DNA, 33 bp, Homo sapien
acttgggtaccactgacgacaatatccagagca

SEQ ID NO: 324392 - DNA, 33 bp, Homo sapien
acttgggtaccactgatgacaatatccagagca

SEQ ID NO: 324393 - DNA, 33 bp, Homo sapien
tagtaagagtgctttacactttaggaaaatctt

SEQ ID NO: 324394 - DNA, 33 bp, Homo sapien
tagtaagagtgctttagactttaggaaaatctt

SEQ ID NO: 324395 - DNA, 33 bp, Homo sapien
agaatctgaacaggtacaaaatacagtcagccc

SEQ ID NO: 324396 - DNA, 33 bp, Homo sapien
agaatctgaacaggtataaaatacagtcagccc

SEQ ID NO: 324397 - DNA, 33 bp, Homo sapien
ttctcagatgcaatccaccaaaaatacccagga

SEQ ID NO: 324398 - DNA, 33 bp, Homo sapien
ttctcagatgcaatccgccaaaaatacccagga

SEQ ID NO: 324399 - DNA, 33 bp, Homo sapien
agtgcacgacttccaacgtcctggtggaaatgt

SEQ ID NO: 324400 - DNA, 33 bp, Homo sapien
agtgcacgacttccaatgtcctggtggaaatgt

SEQ ID NO: 324401 - DNA, 33 bp, Homo sapien
taccacaaaaattccacgatgaacccagtacca

SEQ ID NO: 324402 - DNA, 33 bp, Homo sapien
taccacaaaaattccatgatgaacccagtacca

SEQ ID NO: 324403 - DNA, 33 bp, Homo sapien
acctagcgcgtcagtacgacagttttcccaaac

SEQ ID NO: 324404 - DNA, 33 bp, Homo sapien
acctagcgcgtcagtatgacagttttcccaaac

SEQ ID NO: 324405 - DNA, 33 bp, Homo sapien
ggaaaacgggtctttgcagatgcaattaagtga

SEQ ID NO: 324406 - DNA, 33 bp, Homo sapien
ggaaaacgggtctttgtagatgcaattaagtga

SEQ ID NO: 324407 - DNA, 33 bp, Homo sapien
gctttcagaaaggtcaactgggactaaagtgca

SEQ ID NO: 324408 - DNA, 33 bp, Homo sapien
gctttcagaaaggtcagctgggactaaagtgca

SEQ ID NO: 324409 - DNA, 33 bp, Homo sapien
tgtaaaccttgggtagcaattcagaccacaagt

SEQ ID NO: 324410 - DNA, 33 bp, Homo sapien
tgtaaaccttgggtagtaattcagaccacaagt

SEQ ID NO: 324411 - DNA, 33 bp, Homo sapien
gattaccaaatgttcaaaactcagctcctgccc

SEQ ID NO: 324412 - DNA, 33 bp, Homo sapien
gattaccaaatgttcagaactcagctcctgccc

SEQ ID NO: 324413 - DNA, 33 bp, Homo sapien
gtgtttgcttatttagaacagagtttctgcaac

SEQ ID NO: 324414 - DNA, 33 bp, Homo sapien
gtgtttgcttatttagtacagagtttctgcaac

SEQ ID NO: 324415 - DNA, 33 bp, Homo sapien
agctcattttaccaaacagctgggaaactccag

SEQ ID NO: 324416 - DNA, 33 bp, Homo sapien
agctcattttaccaaagagctgggaaactccag

SEQ ID NO: 324417 - DNA, 33 bp, Homo sapien
atcactcacaataccaatacctagagaccatca

SEQ ID NO: 324418 - DNA, 33 bp, Homo sapien
atcactcacaataccactacctagagaccatca

SEQ ID NO: 324419 - DNA, 33 bp, Homo sapien
agtcatacaatatgaccggcttaatctacttct

SEQ ID NO: 324420 - DNA, 33 bp, Homo sapien
agtcatacaatatgactggcttaatctacttct

SEQ ID NO: 324421 - DNA, 33 bp, Homo sapien
gccacttaaactgggacgcgacatacgtaccta

SEQ ID NO: 324422 - DNA, 33 bp, Homo sapien
gccacttaaactgggatgcgacatacgtaccta

SEQ ID NO: 324423 - DNA, 33 bp, Homo sapien
gctcttcacttagccaacaaagtgtctgcacac

SEQ ID NO: 324424 - DNA, 33 bp, Homo sapien
gctcttcacttagccagcaaagtgtctgcacac

SEQ ID NO: 324425 - DNA, 33 bp, Homo sapien
agtttacagactcctccataaatacctggacac

SEQ ID NO: 324426 - DNA, 33 bp, Homo sapien
agtttacagactcctctataaatacctggacac

SEQ ID NO: 324427 - DNA, 33 bp, Homo sapien
aatctgtgccacgtaacggggagaggacaaaac

SEQ ID NO: 324428 - DNA, 33 bp, Homo sapien
aatctgtgccacgtaagggggagaggacaaaac

SEQ ID NO: 324429 - DNA, 33 bp, Homo sapien
acttctgccctgcaaacgacaatgttaagagaa

SEQ ID NO: 324430 - DNA, 33 bp, Homo sapien
acttctgccctgcaaatgacaatgttaagagaa

SEQ ID NO: 324431 - DNA, 33 bp, Homo sapien
cccagccaaacaaatcacacagcccaacacaca

SEQ ID NO: 324432 - DNA, 33 bp, Homo sapien
cccagccaaacaaatcgcacagcccaacacaca

SEQ ID NO: 324433 - DNA, 33 bp, Homo sapien
tcagggacaaaaatcccaattggaggacatgtg

SEQ ID NO: 324434 - DNA, 33 bp, Homo sapien
tcagggacaaaaatcctaattggaggacatgtg

SEQ ID NO: 324435 - DNA, 33 bp, Homo sapien
ggtagtagttgatggcacgctgccatgcctgga

SEQ ID NO: 324436 - DNA, 33 bp, Homo sapien
ggtagtagttgatggcgcgctgccatgcctgga

SEQ ID NO: 324437 - DNA, 33 bp, Homo sapien
cattaaccaatagtcacacatatttccatgcat

SEQ ID NO: 324438 - DNA, 33 bp, Homo sapien
cattaaccaatagtcatacatatttccatgcat

SEQ ID NO: 324439 - DNA, 33 bp, Homo sapien
aggctctcggaaatcagagaggttgctctccct

SEQ ID NO: 324440 - DNA, 33 bp, Homo sapien
aggctctcggaaatcatagaggttgctctccct

SEQ ID NO: 324441 - DNA, 33 bp, Homo sapien
gacaggaaatgctccacaggtaatggcctagct

SEQ ID NO: 324442 - DNA, 33 bp, Homo sapien
gacaggaaatgctccataggtaatggcctagct

SEQ ID NO: 324443 - DNA, 33 bp, Homo sapien
gagcaccctcatctcaatcctggaaaaatacca

SEQ ID NO: 324444 - DNA, 33 bp, Homo sapien
gagcaccctcatctcagtcctggaaaaatacca

SEQ ID NO: 324445 - DNA, 33 bp, Homo sapien
ctcacactttatctcacgagctgaaattagaaa

SEQ ID NO: 324446 - DNA, 33 bp, Homo sapien
ctcacactttatctcaggagctgaaattagaaa

SEQ ID NO: 324447 - DNA, 33 bp, Homo sapien
agaaaatgtagtcatcacattgtcaggtggcta

SEQ ID NO: 324448 - DNA, 33 bp, Homo sapien
agaaaatgtagtcatcgcattgtcaggtggcta

SEQ ID NO: 324449 - DNA, 33 bp, Homo sapien
tggtttcaggagagaaataagactctgtgtcct

SEQ ID NO: 324450 - DNA, 33 bp, Homo sapien
tggtttcaggagagaagtaagactctgtgtcct

SEQ ID NO: 324451 - DNA, 33 bp, Homo sapien
gtaacttttcaatctgcagaaccaaaagaccca

SEQ ID NO: 324452 - DNA, 33 bp, Homo sapien
gtaacttttcaatctgtagaaccaaaagaccca

SEQ ID NO: 324453 - DNA, 33 bp, Homo sapien
ctcttaactgtagaacaagactggcttgcaaac

SEQ ID NO: 324454 - DNA, 33 bp, Homo sapien
ctcttaactgtagaacgagactggcttgcaaac

SEQ ID NO: 324455 - DNA, 33 bp, Homo sapien
gctcatggactttatcaccccgggcccgagcag

SEQ ID NO: 324456 - DNA, 33 bp, Homo sapien
gctcatggactttatcgccccgggcccgagcag

SEQ ID NO: 324457 - DNA, 33 bp, Homo sapien
cccaccttaaaaggcccagtttggatacaggtg

SEQ ID NO: 324458 - DNA, 33 bp, Homo sapien
cccaccttaaaaggccgagtttggatacaggtg

SEQ ID NO: 324459 - DNA, 33 bp, Homo sapien
tcagagcaccctaagggcacaggattgagaggc

SEQ ID NO: 324460 - DNA, 33 bp, Homo sapien
tcagagcaccctaaggtcacaggattgagaggc

SEQ ID NO: 324461 - DNA, 33 bp, Homo sapien
tggtggactcagcttcaccctcacttgaacagc

SEQ ID NO: 324462 - DNA, 33 bp, Homo sapien
tggtggactcagcttcgccctcacttgaacagc

SEQ ID NO: 324463 - DNA, 33 bp, Homo sapien
aaatgcaatgcaggcaagccaacataagctata

SEQ ID NO: 324464 - DNA, 33 bp, Homo sapien
aaatgcaatgcaggcaggccaacataagctata

SEQ ID NO: 324465 - DNA, 33 bp, Homo sapien
ctgccgaggaatactcaaggtggagagttcccc

SEQ ID NO: 324466 - DNA, 33 bp, Homo sapien
ctgccgaggaatactcgaggtggagagttcccc

SEQ ID NO: 324467 - DNA, 33 bp, Homo sapien
cccataggcgcaagacagatttcacaccataaa

SEQ ID NO: 324468 - DNA, 33 bp, Homo sapien
cccataggcgcaagacggatttcacaccataaa

SEQ ID NO: 324469 - DNA, 33 bp, Homo sapien
acaaaacaacaaaacaagatgatttcacatatt

SEQ ID NO: 324470 - DNA, 33 bp, Homo sapien
acaaaacaacaaaacaggatgatttcacatatt

SEQ ID NO: 324471 - DNA, 33 bp, Homo sapien
gaaactcaaacaccgcagcatgagggcagagcc

SEQ ID NO: 324472 - DNA, 33 bp, Homo sapien
gaaactcaaacaccgccgcatgagggcagagcc

SEQ ID NO: 324473 - DNA, 33 bp, Homo sapien
cgtccagaagaactcaaggaacccggcagggag

SEQ ID NO: 324474 - DNA, 33 bp, Homo sapien
cgtccagaagaactcagggaacccggcagggag

SEQ ID NO: 324475 - DNA, 33 bp, Homo sapien
cccctcctggctaaaacgacagcatcggtgctc

SEQ ID NO: 324476 - DNA, 33 bp, Homo sapien
cccctcctggctaaaatgacagcatcggtgctc

SEQ ID NO: 324477 - DNA, 33 bp, Homo sapien
caaccgacctttgaggacattccaacagtctgg

SEQ ID NO: 324478 - DNA, 33 bp, Homo sapien
caaccgacctttgaggccattccaacagtctgg

SEQ ID NO: 324479 - DNA, 33 bp, Homo sapien
acagaactctaggtaaacactaccagtcatctg

SEQ ID NO: 324480 - DNA, 33 bp, Homo sapien
acagaactctaggtaaccactaccagtcatctg

SEQ ID NO: 324481 - DNA, 33 bp, Homo sapien
ttatgatattgccagaatccacctacatcactg

SEQ ID NO: 324482 - DNA, 33 bp, Homo sapien
ttatgatattgccagagtccacctacatcactg

SEQ ID NO: 324483 - DNA, 33 bp, Homo sapien
caaagtcccaagaacaaagtgctggtgtaggag

SEQ ID NO: 324484 - DNA, 33 bp, Homo sapien
caaagtcccaagaacacagtgctggtgtaggag

SEQ ID NO: 324485 - DNA, 33 bp, Homo sapien
ttctgtgactataaccactaaccaccagccaag

SEQ ID NO: 324486 - DNA, 33 bp, Homo sapien
ttctgtgactataaccgctaaccaccagccaag

SEQ ID NO: 324487 - DNA, 33 bp, Homo sapien
cccggccaaaaggcccagcttgaatggaagaca

SEQ ID NO: 324488 - DNA, 33 bp, Homo sapien
cccggccaaaaggcccggcttgaatggaagaca

SEQ ID NO: 324489 - DNA, 33 bp, Homo sapien
aaagtcaggtccctaacaaagctgttccatctc

SEQ ID NO: 324490 - DNA, 33 bp, Homo sapien
aaagtcaggtccctaagaaagctgttccatctc

SEQ ID NO: 324491 - DNA, 33 bp, Homo sapien
ttgcaaagtaaaccgaaacctcgtggagtatcc

SEQ ID NO: 324492 - DNA, 33 bp, Homo sapien
ttgcaaagtaaaccgatacctcgtggagtatcc

SEQ ID NO: 324493 - DNA, 33 bp, Homo sapien
tttgtttctgcctcacagtgagaaagaagcctc

SEQ ID NO: 324494 - DNA, 33 bp, Homo sapien
tttgtttctgcctcacggtgagaaagaagcctc

SEQ ID NO: 324495 - DNA, 33 bp, Homo sapien
tgttactactataaacacccattctgcaggcag

SEQ ID NO: 324496 - DNA, 33 bp, Homo sapien
tgttactactataaacgcccattctgcaggcag

SEQ ID NO: 324497 - DNA, 33 bp, Homo sapien
aaccctggaatatctaaccccctgttcggcaca

SEQ ID NO: 324498 - DNA, 33 bp, Homo sapien
aaccctggaatatctagccccctgttcggcaca

SEQ ID NO: 324499 - DNA, 33 bp, Homo sapien
ccctcccatttgaacaatcacgtccaacactgg

SEQ ID NO: 324500 - DNA, 33 bp, Homo sapien
ccctcccatttgaacagtcacgtccaacactgg

SEQ ID NO: 324501 - DNA, 33 bp, Homo sapien
ctgataggtgatgggacaccaggtaaaggaagt

SEQ ID NO: 324502 - DNA, 33 bp, Homo sapien
ctgataggtgatgggagaccaggtaaaggaagt

SEQ ID NO: 324503 - DNA, 33 bp, Homo sapien
tttgttgaatgacttacgtaccaagtatgttca

SEQ ID NO: 324504 - DNA, 33 bp, Homo sapien
tttgttgaatgacttatgtaccaagtatgttca

SEQ ID NO: 324505 - DNA, 33 bp, Homo sapien
tgtctcagaattataaaccataccactgtgaac

SEQ ID NO: 324506 - DNA, 33 bp, Homo sapien
tgtctcagaattataatccataccactgtgaac

SEQ ID NO: 324507 - DNA, 33 bp, Homo sapien
ttgatgggcagggacacgattcaagggaactta

SEQ ID NO: 324508 - DNA, 33 bp, Homo sapien
ttgatgggcagggacaggattcaagggaactta

SEQ ID NO: 324509 - DNA, 33 bp, Homo sapien
tttcagcctgactccactatctgcatttaatgt

SEQ ID NO: 324510 - DNA, 33 bp, Homo sapien
tttcagcctgactccattatctgcatttaatgt

SEQ ID NO: 324511 - DNA, 33 bp, Homo sapien
cacatacaccagattcacgtctcaccgccccag

SEQ ID NO: 324512 - DNA, 33 bp, Homo sapien
cacatacaccagattcgcgtctcaccgccccag

SEQ ID NO: 324513 - DNA, 33 bp, Homo sapien
ggacactaatcaaaacaaaagcctcaactacag

SEQ ID NO: 324514 - DNA, 33 bp, Homo sapien
ggacactaatcaaaacgaaagcctcaactacag

SEQ ID NO: 324515 - DNA, 33 bp, Homo sapien
atctatgtaaagcacccggtacagcctaagtgt

SEQ ID NO: 324516 - DNA, 33 bp, Homo sapien
atctatgtaaagcacctggtacagcctaagtgt

SEQ ID NO: 324517 - DNA, 33 bp, Homo sapien
gcatggaaccattcagaatgcctggcttttagt

SEQ ID NO: 324518 - DNA, 33 bp, Homo sapien
gcatggaaccattcaggatgcctggcttttagt

SEQ ID NO: 324519 - DNA, 33 bp, Homo sapien
ttaaaacatcaacaggaaaataaatgactttga

SEQ ID NO: 324520 - DNA, 33 bp, Homo sapien
ttaaaacatcaacagggaaataaatgactttga

SEQ ID NO: 324521 - DNA, 33 bp, Homo sapien
tgtttctctaccccacaactgtaccaccagagg

SEQ ID NO: 324522 - DNA, 33 bp, Homo sapien
tgtttctctaccccaccactgtaccaccagagg

SEQ ID NO: 324523 - DNA, 33 bp, Homo sapien
atattacaatgcaataatagaaataaagtgcac

SEQ ID NO: 324524 - DNA, 33 bp, Homo sapien
atattacaatgcaatagtagaaataaagtgcac

SEQ ID NO: 324525 - DNA, 33 bp, Homo sapien
agcaggactgtaggaactgttgatgcaacaaat

SEQ ID NO: 324526 - DNA, 33 bp, Homo sapien
agcaggactgtaggaattgttgatgcaacaaat

SEQ ID NO: 324527 - DNA, 33 bp, Homo sapien
aattctttcaacattcaaaagtgatcccctgat

SEQ ID NO: 324528 - DNA, 33 bp, Homo sapien
aattctttcaacattcgaaagtgatcccctgat

SEQ ID NO: 324529 - DNA, 33 bp, Homo sapien
ttatactaataaccagcctaatcttcagggaaa

SEQ ID NO: 324530 - DNA, 33 bp, Homo sapien
ttatactaataaccaggctaatcttcagggaaa

SEQ ID NO: 324531 - DNA, 33 bp, Homo sapien
gtgcgtatttgttatacgggtaaactgcgtgtc

SEQ ID NO: 324532 - DNA, 33 bp, Homo sapien
gtgcgtatttgttatatgggtaaactgcgtgtc

SEQ ID NO: 324533 - DNA, 33 bp, Homo sapien
ttcagaagaaccacaaatatcttaaatttcctc

SEQ ID NO: 324534 - DNA, 33 bp, Homo sapien
ttcagaagaaccacaagtatcttaaatttcctc

SEQ ID NO: 324535 - DNA, 33 bp, Homo sapien
gaacaagctttttagaactggctttgtagtatg

SEQ ID NO: 324536 - DNA, 33 bp, Homo sapien
gaacaagctttttagagctggctttgtagtatg

SEQ ID NO: 324537 - DNA, 33 bp, Homo sapien
acattatctctgaaatcaagatgagtcttacaa

SEQ ID NO: 324538 - DNA, 33 bp, Homo sapien
acattatctctgaaattaagatgagtcttacaa

SEQ ID NO: 324539 - DNA, 33 bp, Homo sapien
caaagcacattacaggaaagcaaagatttaaca

SEQ ID NO: 324540 - DNA, 33 bp, Homo sapien
caaagcacattacagggaagcaaagatttaaca

SEQ ID NO: 324541 - DNA, 33 bp, Homo sapien
tgatttagtgctattaaccatattaaactccca

SEQ ID NO: 324542 - DNA, 33 bp, Homo sapien
tgatttagtgctattagccatattaaactccca

SEQ ID NO: 324543 - DNA, 33 bp, Homo sapien
gggtgaactaaggcagaagatcggattaatcag

SEQ ID NO: 324544 - DNA, 33 bp, Homo sapien
gggtgaactaaggcagcagatcggattaatcag

SEQ ID NO: 324545 - DNA, 33 bp, Homo sapien
gaaaagggcataccaccagaagttagaggagtt

SEQ ID NO: 324546 - DNA, 33 bp, Homo sapien
gaaaagggcataccacgagaagttagaggagtt

SEQ ID NO: 324547 - DNA, 33 bp, Homo sapien
ctattcttaggaaaaacttctggctgagtgtag

SEQ ID NO: 324548 - DNA, 33 bp, Homo sapien
ctattcttaggaaaaatttctggctgagtgtag

SEQ ID NO: 324549 - DNA, 33 bp, Homo sapien
ttggggtaagagctggaacacttaatatgttgc

SEQ ID NO: 324550 - DNA, 33 bp, Homo sapien
ttggggtaagagctgggacacttaatatgttgc

SEQ ID NO: 324551 - DNA, 33 bp, Homo sapien
tatgctaggcctgaccaattaaagctgagagca

SEQ ID NO: 324552 - DNA, 33 bp, Homo sapien
tatgctaggcctgaccgattaaagctgagagca

SEQ ID NO: 324553 - DNA, 33 bp, Homo sapien
gataaagtaaaggctacccaagtactattccat

SEQ ID NO: 324554 - DNA, 33 bp, Homo sapien
gataaagtaaaggctatccaagtactattccat

SEQ ID NO: 324555 - DNA, 33 bp, Homo sapien
catgtctatcacttcaactagttatgggtattc

SEQ ID NO: 324556 - DNA, 33 bp, Homo sapien
catgtctatcacttcacctagttatgggtattc

SEQ ID NO: 324557 - DNA, 33 bp, Homo sapien
gtggaagtttcattaccgggcactgcaattttc

SEQ ID NO: 324558 - DNA, 33 bp, Homo sapien
gtggaagtttcattactgggcactgcaattttc

SEQ ID NO: 324559 - DNA, 33 bp, Homo sapien
tctagaattttgccaccgcatataacgttgact

SEQ ID NO: 324560 - DNA, 33 bp, Homo sapien
tctagaattttgccactgcatataacgttgact

SEQ ID NO: 324561 - DNA, 33 bp, Homo sapien
tctaaaatgagtagcacgttcaaaaattagttg

SEQ ID NO: 324562 - DNA, 33 bp, Homo sapien
tctaaaatgagtagcaggttcaaaaattagttg

SEQ ID NO: 324563 - DNA, 33 bp, Homo sapien
tccccacgcccagtaacaaaggatcaaaggcca

SEQ ID NO: 324564 - DNA, 33 bp, Homo sapien
tccccacgcccagtaagaaaggatcaaaggcca

SEQ ID NO: 324565 - DNA, 33 bp, Homo sapien
agcagcatcaattacacccaacacttaacacac

SEQ ID NO: 324566 - DNA, 33 bp, Homo sapien
agcagcatcaattacagccaacacttaacacac

SEQ ID NO: 324567 - DNA, 33 bp, Homo sapien
ccaccatttccagacacagtttgacggtgttgc

SEQ ID NO: 324568 - DNA, 33 bp, Homo sapien
ccaccatttccagacatagtttgacggtgttgc

SEQ ID NO: 324569 - DNA, 33 bp, Homo sapien
cacagttttgacaacaaaaggaaaggaaggcat

SEQ ID NO: 324570 - DNA, 33 bp, Homo sapien
cacagttttgacaacataaggaaaggaaggcat

SEQ ID NO: 324571 - DNA, 33 bp, Homo sapien
tttgagagcacacagagatatagcttttggaat

SEQ ID NO: 324572 - DNA, 33 bp, Homo sapien
tttgagagcacacagatatatagcttttggaat

SEQ ID NO: 324573 - DNA, 33 bp, Homo sapien
attcagaggtgatagacgtttctaatcttagaa

SEQ ID NO: 324574 - DNA, 33 bp, Homo sapien
attcagaggtgatagatgtttctaatcttagaa

SEQ ID NO: 324575 - DNA, 33 bp, Homo sapien
aagaaagagtgtttccaaaagtgaaagggaaga

SEQ ID NO: 324576 - DNA, 33 bp, Homo sapien
aagaaagagtgtttccgaaagtgaaagggaaga

SEQ ID NO: 324577 - DNA, 33 bp, Homo sapien
ttaaggtttacagtatcacacgatgaaaagtac

SEQ ID NO: 324578 - DNA, 33 bp, Homo sapien
ttaaggtttacagtattacacgatgaaaagtac

SEQ ID NO: 324579 - DNA, 33 bp, Homo sapien
aatactggcaacattacagttcacccaagtagc

SEQ ID NO: 324580 - DNA, 33 bp, Homo sapien
aatactggcaacattagagttcacccaagtagc

SEQ ID NO: 324581 - DNA, 33 bp, Homo sapien
ttctcagaaatgcttacagtaagagtcaataac

SEQ ID NO: 324582 - DNA, 33 bp, Homo sapien
ttctcagaaatgcttatagtaagagtcaataac

SEQ ID NO: 324583 - DNA, 33 bp, Homo sapien
agttggtgaaaaatgacgtaaatgctttttttt

SEQ ID NO: 324584 - DNA, 33 bp, Homo sapien
agttggtgaaaaatgaggtaaatgctttttttt

SEQ ID NO: 324585 - DNA, 33 bp, Homo sapien
tgatgtaacagaagtcaaaaaactttaatatca

SEQ ID NO: 324586 - DNA, 33 bp, Homo sapien
tgatgtaacagaagtcgaaaaactttaatatca

SEQ ID NO: 324587 - DNA, 33 bp, Homo sapien
aactcttgactatacacacttcctcctatttca

SEQ ID NO: 324588 - DNA, 33 bp, Homo sapien
aactcttgactatacatacttcctcctatttca

SEQ ID NO: 324589 - DNA, 33 bp, Homo sapien
gagcaaatagaagatccgaccagtgctgcacct

SEQ ID NO: 324590 - DNA, 33 bp, Homo sapien
gagcaaatagaagatctgaccagtgctgcacct

SEQ ID NO: 324591 - DNA, 33 bp, Homo sapien
agggaagattagaaaaagagggattatagagag

SEQ ID NO: 324592 - DNA, 33 bp, Homo sapien
agggaagattagaaaaggagggattatagagag

SEQ ID NO: 324593 - DNA, 33 bp, Homo sapien
acttcagtctgtgttacagttaaatcatccacc

SEQ ID NO: 324594 - DNA, 33 bp, Homo sapien
acttcagtctgtgttagagttaaatcatccacc

SEQ ID NO: 324595 - DNA, 33 bp, Homo sapien
gcctgtatcccacttacggttttcaatgttatt

SEQ ID NO: 324596 - DNA, 33 bp, Homo sapien
gcctgtatcccacttatggttttcaatgttatt

SEQ ID NO: 324597 - DNA, 33 bp, Homo sapien
ttgcctctgctagatagattaagctgtctggat

SEQ ID NO: 324598 - DNA, 33 bp, Homo sapien
ttgcctctgctagatatattaagctgtctggat

SEQ ID NO: 324599 - DNA, 33 bp, Homo sapien
gtcagcaaaatgcccacgtgtttaactttaagg

SEQ ID NO: 324600 - DNA, 33 bp, Homo sapien
gtcagcaaaatgcccatgtgtttaactttaagg

SEQ ID NO: 324601 - DNA, 33 bp, Homo sapien
ctctatgaattaaatccacacaacagatttctt

SEQ ID NO: 324602 - DNA, 33 bp, Homo sapien
ctctatgaattaaatcgacacaacagatttctt

SEQ ID NO: 324603 - DNA, 33 bp, Homo sapien
ataactcatgatgaaaatataatcaggtggagg

SEQ ID NO: 324604 - DNA, 33 bp, Homo sapien
ataactcatgatgaaagtataatcaggtggagg

SEQ ID NO: 324605 - DNA, 33 bp, Homo sapien
gtatttggaaagaatacaatgctattggtttta

SEQ ID NO: 324606 - DNA, 33 bp, Homo sapien
gtatttggaaagaatataatgctattggtttta

SEQ ID NO: 324607 - DNA, 33 bp, Homo sapien
agaggtagacaaaaaccagttcttgacacttca

SEQ ID NO: 324608 - DNA, 33 bp, Homo sapien
agaggtagacaaaaacgagttcttgacacttca

SEQ ID NO: 324609 - DNA, 33 bp, Homo sapien
gagaaagagatgggtacgttaatgacacagaca

SEQ ID NO: 324610 - DNA, 33 bp, Homo sapien
gagaaagagatgggtatgttaatgacacagaca

SEQ ID NO: 324611 - DNA, 33 bp, Homo sapien
ctggccaatagtttaaatctttgaacagttttt

SEQ ID NO: 324612 - DNA, 33 bp, Homo sapien
ctggccaatagtttaactctttgaacagttttt

SEQ ID NO: 324613 - DNA, 33 bp, Homo sapien
atccagaatacatgagaaacacctacaaatcat

SEQ ID NO: 324614 - DNA, 33 bp, Homo sapien
atccagaatacatgaggaacacctacaaatcat

SEQ ID NO: 324615 - DNA, 33 bp, Homo sapien
ttacttcctagatacaataggagtatagacatt

SEQ ID NO: 324616 - DNA, 33 bp, Homo sapien
ttacttcctagatacagtaggagtatagacatt

SEQ ID NO: 324617 - DNA, 33 bp, Homo sapien
tgcctaattctttatagtacaaaatgccacaaa

SEQ ID NO: 324618 - DNA, 33 bp, Homo sapien
tgcctaattctttatattacaaaatgccacaaa

SEQ ID NO: 324619 - DNA, 33 bp, Homo sapien
aattcagctacaaatcaatatcaataagatagc

SEQ ID NO: 324620 - DNA, 33 bp, Homo sapien
aattcagctacaaatcgatatcaataagatagc

SEQ ID NO: 324621 - DNA, 33 bp, Homo sapien
aaaagaaaactccaacgatgactgtggatatat

SEQ ID NO: 324622 - DNA, 33 bp, Homo sapien
aaaagaaaactccaactatgactgtggatatat

SEQ ID NO: 324623 - DNA, 33 bp, Homo sapien
cacaatgaaattatgcacggcaataaaaagtga

SEQ ID NO: 324624 - DNA, 33 bp, Homo sapien
cacaatgaaattatgcgcggcaataaaaagtga

SEQ ID NO: 324625 - DNA, 33 bp, Homo sapien
gatggtagctatcataactcaacgctaacgctc

SEQ ID NO: 324626 - DNA, 33 bp, Homo sapien
gatggtagctatcatatctcaacgctaacgctc

SEQ ID NO: 324627 - DNA, 33 bp, Homo sapien
gcatggatacagtgcacgatgaagtcctggggc

SEQ ID NO: 324628 - DNA, 33 bp, Homo sapien
gcatggatacagtgcatgatgaagtcctggggc

SEQ ID NO: 324629 - DNA, 33 bp, Homo sapien
tgaccaaagcaaatcacgtggctgaacccaaaa

SEQ ID NO: 324630 - DNA, 33 bp, Homo sapien
tgaccaaagcaaatcatgtggctgaacccaaaa

SEQ ID NO: 324631 - DNA, 33 bp, Homo sapien
ctgtcaactctcagggcaatgggataactcttt

SEQ ID NO: 324632 - DNA, 33 bp, Homo sapien
ctgtcaactctcaggggaatgggataactcttt

SEQ ID NO: 324633 - DNA, 33 bp, Homo sapien
gaagtaaaactctatacgtggtggagtctagct

SEQ ID NO: 324634 - DNA, 33 bp, Homo sapien
gaagtaaaactctatatgtggtggagtctagct

SEQ ID NO: 324635 - DNA, 33 bp, Homo sapien
acttgaaaactaaggccatcttgaatagttaga

SEQ ID NO: 324636 - DNA, 33 bp, Homo sapien
acttgaaaactaaggctatcttgaatagttaga

SEQ ID NO: 324637 - DNA, 33 bp, Homo sapien
cttggggttcagaatgccattatcgcagtgaac

SEQ ID NO: 324638 - DNA, 33 bp, Homo sapien
cttggggttcagaatgtcattatcgcagtgaac

SEQ ID NO: 324639 - DNA, 33 bp, Homo sapien
catatcccttctactcgccagcatagtttctga

SEQ ID NO: 324640 - DNA, 33 bp, Homo sapien
catatcccttctactctccagcatagtttctga

SEQ ID NO: 324641 - DNA, 33 bp, Homo sapien
atctttggagttttaacgtatgaaccattcata

SEQ ID NO: 324642 - DNA, 33 bp, Homo sapien
atctttggagttttaatgtatgaaccattcata

SEQ ID NO: 324643 - DNA, 33 bp, Homo sapien
agaagcaattatttagaatgaacgttttcaccc

SEQ ID NO: 324644 - DNA, 33 bp, Homo sapien
agaagcaattatttaggatgaacgttttcaccc

SEQ ID NO: 324645 - DNA, 33 bp, Homo sapien
tggtcctaataatttcacgtgaactctctcctc

SEQ ID NO: 324646 - DNA, 33 bp, Homo sapien
tggtcctaataatttcgcgtgaactctctcctc

SEQ ID NO: 324647 - DNA, 33 bp, Homo sapien
gtgtgaggcactcttccaaccatgtttatgtac

SEQ ID NO: 324648 - DNA, 33 bp, Homo sapien
gtgtgaggcactcttctaaccatgtttatgtac

SEQ ID NO: 324649 - DNA, 33 bp, Homo sapien
ggggattgtgttaagccacagattctggctcag

SEQ ID NO: 324650 - DNA, 33 bp, Homo sapien
ggggattgtgttaagctacagattctggctcag

SEQ ID NO: 324651 - DNA, 33 bp, Homo sapien
ctctgccctaaaagccaaatgtggaggtggctg

SEQ ID NO: 324652 - DNA, 33 bp, Homo sapien
ctctgccctaaaagccgaatgtggaggtggctg

SEQ ID NO: 324653 - DNA, 33 bp, Homo sapien
tctaaccactacactcactgataaggtctctgt

SEQ ID NO: 324654 - DNA, 33 bp, Homo sapien
tctaaccactacactctctgataaggtctctgt

SEQ ID NO: 324655 - DNA, 33 bp, Homo sapien
gtgatgtgacctaacacctctggacctctagat

SEQ ID NO: 324656 - DNA, 33 bp, Homo sapien
gtgatgtgacctaacatctctggacctctagat

SEQ ID NO: 324657 - DNA, 33 bp, Homo sapien
aagacagaaatcttcccgataaggctggctttc

SEQ ID NO: 324658 - DNA, 33 bp, Homo sapien
aagacagaaatcttccggataaggctggctttc

SEQ ID NO: 324659 - DNA, 33 bp, Homo sapien
gttttcagaacattagaacattctccaagatac

SEQ ID NO: 324660 - DNA, 33 bp, Homo sapien
gttttcagaacattaggacattctccaagatac

SEQ ID NO: 324661 - DNA, 33 bp, Homo sapien
gaaataaaataggacactcagttatgatgggct

SEQ ID NO: 324662 - DNA, 33 bp, Homo sapien
gaaataaaataggacagtcagttatgatgggct

SEQ ID NO: 324663 - DNA, 33 bp, Homo sapien
gtgtgcatcatggagaacatggaggacaagttg

SEQ ID NO: 324664 - DNA, 33 bp, Homo sapien
gtgtgcatcatggagaccatggaggacaagttg

SEQ ID NO: 324665 - DNA, 33 bp, Homo sapien
cttggccaaatcggcaaggatgtaagcttctca

SEQ ID NO: 324666 - DNA, 33 bp, Homo sapien
cttggccaaatcggcatggatgtaagcttctca

SEQ ID NO: 324667 - DNA, 33 bp, Homo sapien
aatcctccgttaatccacagacgtttattgccc

SEQ ID NO: 324668 - DNA, 33 bp, Homo sapien
aatcctccgttaatccgcagacgtttattgccc

SEQ ID NO: 324669 - DNA, 33 bp, Homo sapien
ggtttttccacaaaaaacaagattcattctgca

SEQ ID NO: 324670 - DNA, 33 bp, Homo sapien
ggtttttccacaaaaaccaagattcattctgca

SEQ ID NO: 324671 - DNA, 33 bp, Homo sapien
ctgcctgctgacctcaagaggctatttattatt

SEQ ID NO: 324672 - DNA, 33 bp, Homo sapien
ctgcctgctgacctcacgaggctatttattatt

SEQ ID NO: 324673 - DNA, 33 bp, Homo sapien
taggctacaggacatgcaaccaaatttctgatt

SEQ ID NO: 324674 - DNA, 33 bp, Homo sapien
taggctacaggacatggaaccaaatttctgatt

SEQ ID NO: 324675 - DNA, 33 bp, Homo sapien
gtgctgggaacaacaccgccttaggaatttctg

SEQ ID NO: 324676 - DNA, 33 bp, Homo sapien
gtgctgggaacaacactgccttaggaatttctg

SEQ ID NO: 324677 - DNA, 33 bp, Homo sapien
atgcttttctggtgtacggacagagcctttctt

SEQ ID NO: 324678 - DNA, 33 bp, Homo sapien
atgcttttctggtgtatggacagagcctttctt

SEQ ID NO: 324679 - DNA, 33 bp, Homo sapien
ccagattgaccaacaaagtagagatgtaagcga

SEQ ID NO: 324680 - DNA, 33 bp, Homo sapien
ccagattgaccaacaaggtagagatgtaagcga

SEQ ID NO: 324681 - DNA, 33 bp, Homo sapien
tcaatgcctcaaatgaaaagataccatctccga

SEQ ID NO: 324682 - DNA, 33 bp, Homo sapien
tcaatgcctcaaatgagaagataccatctccga

SEQ ID NO: 324683 - DNA, 33 bp, Homo sapien
gttgtgtgtgaaaagcaagtggtgttgcagagg

SEQ ID NO: 324684 - DNA, 33 bp, Homo sapien
gttgtgtgtgaaaagcgagtggtgttgcagagg

SEQ ID NO: 324685 - DNA, 33 bp, Homo sapien
tagacactggggaagtaacctactacacaaagg

SEQ ID NO: 324686 - DNA, 33 bp, Homo sapien
tagacactggggaagtgacctactacacaaagg

SEQ ID NO: 324687 - DNA, 33 bp, Homo sapien
acaagcttgctggggccaattcacaaagacatc

SEQ ID NO: 324688 - DNA, 33 bp, Homo sapien
acaagcttgctggggcgaattcacaaagacatc

SEQ ID NO: 324689 - DNA, 33 bp, Homo sapien
cggtttcatggtttcacgcattttcctccagat

SEQ ID NO: 324690 - DNA, 33 bp, Homo sapien
cggtttcatggtttcaggcattttcctccagat

SEQ ID NO: 324691 - DNA, 33 bp, Homo sapien
gcccatccatttccaaaaagttcagcattatgc

SEQ ID NO: 324692 - DNA, 33 bp, Homo sapien
gcccatccatttccaagaagttcagcattatgc

SEQ ID NO: 324693 - DNA, 33 bp, Homo sapien
gagacactttggagaaagccgcagcagttccca

SEQ ID NO: 324694 - DNA, 33 bp, Homo sapien
gagacactttggagaaggccgcagcagttccca

SEQ ID NO: 324695 - DNA, 33 bp, Homo sapien
ttgtgaaatgggatcacaatactagtctcacag

SEQ ID NO: 324696 - DNA, 33 bp, Homo sapien
ttgtgaaatgggatcataatactagtctcacag

SEQ ID NO: 324697 - DNA, 33 bp, Homo sapien
tgttattctttttaggacaatgtagatgatcaa

SEQ ID NO: 324698 - DNA, 33 bp, Homo sapien
tgttattctttttagggcaatgtagatgatcaa

SEQ ID NO: 324699 - DNA, 33 bp, Homo sapien
caaacaacatgtgtaaatcatttctaaagaaaa

SEQ ID NO: 324700 - DNA, 33 bp, Homo sapien
caaacaacatgtgtaagtcatttctaaagaaaa

SEQ ID NO: 324701 - DNA, 33 bp, Homo sapien
atgtcttgaatacttcaatatgtggaaaacttc

SEQ ID NO: 324702 - DNA, 33 bp, Homo sapien
atgtcttgaatacttcgatatgtggaaaacttc

SEQ ID NO: 324703 - DNA, 33 bp, Homo sapien
tctaatatagaacttgcatgacaacttccttta

SEQ ID NO: 324704 - DNA, 33 bp, Homo sapien
tctaatatagaacttgtatgacaacttccttta

SEQ ID NO: 324705 - DNA, 33 bp, Homo sapien
agttattttggagttgaacagagccaattaaaa

SEQ ID NO: 324706 - DNA, 33 bp, Homo sapien
agttattttggagttggacagagccaattaaaa

SEQ ID NO: 324707 - DNA, 33 bp, Homo sapien
ctagggtgatggtcaaaacacagacagtttgaa

SEQ ID NO: 324708 - DNA, 33 bp, Homo sapien
ctagggtgatggtcaagacacagacagtttgaa

SEQ ID NO: 324709 - DNA, 33 bp, Homo sapien
gtgtgtgcttttaagacctacctaaagaaaatg

SEQ ID NO: 324710 - DNA, 33 bp, Homo sapien
gtgtgtgcttttaagatctacctaaagaaaatg

SEQ ID NO: 324711 - DNA, 33 bp, Homo sapien
tctccttttcctaatgacactttctgccaatac

SEQ ID NO: 324712 - DNA, 33 bp, Homo sapien
tctccttttcctaatgtcactttctgccaatac

SEQ ID NO: 324713 - DNA, 33 bp, Homo sapien
actgaaaaacatccaaatgatctggacaatata

SEQ ID NO: 324714 - DNA, 33 bp, Homo sapien
actgaaaaacatccaagtgatctggacaatata

SEQ ID NO: 324715 - DNA, 33 bp, Homo sapien
caaaaaaattcagtccccacgctgggcatcagg

SEQ ID NO: 324716 - DNA, 33 bp, Homo sapien
caaaaaaattcagtcctcacgctgggcatcagg

SEQ ID NO: 324717 - DNA, 33 bp, Homo sapien
cactgctgaaaaaggaaggcgctgtgtgtatgt

SEQ ID NO: 324718 - DNA, 33 bp, Homo sapien
cactgctgaaaaaggagggcgctgtgtgtatgt

SEQ ID NO: 324719 - DNA, 33 bp, Homo sapien
aagttaaaagacatacaagtttgatagcatttg

SEQ ID NO: 324720 - DNA, 33 bp, Homo sapien
aagttaaaagacataccagtttgatagcatttg

SEQ ID NO: 324721 - DNA, 33 bp, Homo sapien
acatgatgtgagccaaattacctacaagacaga

SEQ ID NO: 324722 - DNA, 33 bp, Homo sapien
acatgatgtgagccaacttacctacaagacaga

SEQ ID NO: 324723 - DNA, 33 bp, Homo sapien
ttagtcctacaaccgacgcattgttccactttc

SEQ ID NO: 324724 - DNA, 33 bp, Homo sapien
ttagtcctacaaccgatgcattgttccactttc

SEQ ID NO: 324725 - DNA, 33 bp, Homo sapien
attttgtttgcaaaccgctaaaagtcttatttc

SEQ ID NO: 324726 - DNA, 33 bp, Homo sapien
attttgtttgcaaacctctaaaagtcttatttc

SEQ ID NO: 324727 - DNA, 33 bp, Homo sapien
cttatttacatcttccaatttagcaagcctcca

SEQ ID NO: 324728 - DNA, 33 bp, Homo sapien
cttatttacatcttccgatttagcaagcctcca

SEQ ID NO: 324729 - DNA, 33 bp, Homo sapien
tcagctgaatctcaaaagcagagagaagacaga

SEQ ID NO: 324730 - DNA, 33 bp, Homo sapien
tcagctgaatctcaaaggcagagagaagacaga

SEQ ID NO: 324731 - DNA, 33 bp, Homo sapien
atttgtacagtctccaaaaattccttagacatc

SEQ ID NO: 324732 - DNA, 33 bp, Homo sapien
atttgtacagtctccagaaattccttagacatc

SEQ ID NO: 324733 - DNA, 33 bp, Homo sapien
caccacttcagtgatacggtataatttatcaaa

SEQ ID NO: 324734 - DNA, 33 bp, Homo sapien
caccacttcagtgatatggtataatttatcaaa

SEQ ID NO: 324735 - DNA, 33 bp, Homo sapien
tttttgtaacagaaagaatctgcatccatttca

SEQ ID NO: 324736 - DNA, 33 bp, Homo sapien
tttttgtaacagaaagcatctgcatccatttca

SEQ ID NO: 324737 - DNA, 33 bp, Homo sapien
cctgccttaactcacagaagcatgaaattaagc

SEQ ID NO: 324738 - DNA, 33 bp, Homo sapien
cctgccttaactcacataagcatgaaattaagc

SEQ ID NO: 324739 - DNA, 33 bp, Homo sapien
aaacctcaaaatagtacgttgaacattttttat

SEQ ID NO: 324740 - DNA, 33 bp, Homo sapien
aaacctcaaaatagtatgttgaacattttttat

SEQ ID NO: 324741 - DNA, 33 bp, Homo sapien
caccaagatgcttgacaaattttctaatttttt

SEQ ID NO: 324742 - DNA, 33 bp, Homo sapien
caccaagatgcttgacgaattttctaatttttt

SEQ ID NO: 324743 - DNA, 33 bp, Homo sapien
cccctccctgaattgacggcagatgagagaaca

SEQ ID NO: 324744 - DNA, 33 bp, Homo sapien
cccctccctgaattgatggcagatgagagaaca

SEQ ID NO: 324745 - DNA, 33 bp, Homo sapien
ggtatatacactgtacacttccagtcacaaaag

SEQ ID NO: 324746 - DNA, 33 bp, Homo sapien
ggtatatacactgtacgcttccagtcacaaaag

SEQ ID NO: 324747 - DNA, 33 bp, Homo sapien
ttatgaaacatgataccatgtgccaaagctgtc

SEQ ID NO: 324748 - DNA, 33 bp, Homo sapien
ttatgaaacatgatactatgtgccaaagctgtc

SEQ ID NO: 324749 - DNA, 33 bp, Homo sapien
acacaaatggctggataatagtatgagagaaac

SEQ ID NO: 324750 - DNA, 33 bp, Homo sapien
acacaaatggctggatgatagtatgagagaaac

SEQ ID NO: 324751 - DNA, 33 bp, Homo sapien
ttaaagatggaaatagcccattttgagagattc

SEQ ID NO: 324752 - DNA, 33 bp, Homo sapien
ttaaagatggaaataggccattttgagagattc

SEQ ID NO: 324753 - DNA, 33 bp, Homo sapien
aatttcgctccagacaaacgaggcgtgcaggcg

SEQ ID NO: 324754 - DNA, 33 bp, Homo sapien
aatttcgctccagacagacgaggcgtgcaggcg

SEQ ID NO: 324755 - DNA, 33 bp, Homo sapien
aggtctctggagtcgaagaactaaaaggacgcc

SEQ ID NO: 324756 - DNA, 33 bp, Homo sapien
aggtctctggagtcgatgaactaaaaggacgcc

SEQ ID NO: 324757 - DNA, 33 bp, Homo sapien
cctggtaactactgaaaaaaatctaaactccct

SEQ ID NO: 324758 - DNA, 33 bp, Homo sapien
cctggtaactactgaataaaatctaaactccct

SEQ ID NO: 324759 - DNA, 33 bp, Homo sapien
gtagtagtctcagaaactgaaagtcaacctact

SEQ ID NO: 324760 - DNA, 33 bp, Homo sapien
gtagtagtctcagaaattgaaagtcaacctact

SEQ ID NO: 324761 - DNA, 33 bp, Homo sapien
agcatatgttctcatcaacacaagaaattaata

SEQ ID NO: 324762 - DNA, 33 bp, Homo sapien
agcatatgttctcatcgacacaagaaattaata

SEQ ID NO: 324763 - DNA, 33 bp, Homo sapien
taccacattttttgtaactatggagagcacagg

SEQ ID NO: 324764 - DNA, 33 bp, Homo sapien
taccacattttttgtagctatggagagcacagg

SEQ ID NO: 324765 - DNA, 33 bp, Homo sapien
cacttttgagaaccacgagattaaataatcaca

SEQ ID NO: 324766 - DNA, 33 bp, Homo sapien
cacttttgagaaccactagattaaataatcaca

SEQ ID NO: 324767 - DNA, 33 bp, Homo sapien
agacataatccattggaaatgcaatcaccagcc

SEQ ID NO: 324768 - DNA, 33 bp, Homo sapien
agacataatccattggtaatgcaatcaccagcc

SEQ ID NO: 324769 - DNA, 33 bp, Homo sapien
aaacactggatatgacactctgatatacttttt

SEQ ID NO: 324770 - DNA, 33 bp, Homo sapien
aaacactggatatgacgctctgatatacttttt

SEQ ID NO: 324771 - DNA, 33 bp, Homo sapien
tctattattccctgaaatcctttgacagatcat

SEQ ID NO: 324772 - DNA, 33 bp, Homo sapien
tctattattccctgaagtcctttgacagatcat

SEQ ID NO: 324773 - DNA, 33 bp, Homo sapien
agcctaagagatgaaaacatttacaccttttaa

SEQ ID NO: 324774 - DNA, 33 bp, Homo sapien
agcctaagagatgaaaccatttacaccttttaa

SEQ ID NO: 324775 - DNA, 33 bp, Homo sapien
tagtactaatgggacaacacaattgcaacttag

SEQ ID NO: 324776 - DNA, 33 bp, Homo sapien
tagtactaatgggacatcacaattgcaacttag

SEQ ID NO: 324777 - DNA, 33 bp, Homo sapien
ctccagacagatgtaaaattttgagatctctgc

SEQ ID NO: 324778 - DNA, 33 bp, Homo sapien
ctccagacagatgtaacattttgagatctctgc

SEQ ID NO: 324779 - DNA, 33 bp, Homo sapien
caaaaacctcaaaaaccgcttgcccttattttc

SEQ ID NO: 324780 - DNA, 33 bp, Homo sapien
caaaaacctcaaaaactgcttgcccttattttc

SEQ ID NO: 324781 - DNA, 33 bp, Homo sapien
gagatgtgttaaactacgagaaactgccctcat

SEQ ID NO: 324782 - DNA, 33 bp, Homo sapien
gagatgtgttaaactatgagaaactgccctcat

SEQ ID NO: 324783 - DNA, 33 bp, Homo sapien
caaatgggaagggaaaagattgagaagaaagga

SEQ ID NO: 324784 - DNA, 33 bp, Homo sapien
caaatgggaagggaaaggattgagaagaaagga

SEQ ID NO: 324785 - DNA, 33 bp, Homo sapien
gatggtactgttcaaactgtagtcaatagatct

SEQ ID NO: 324786 - DNA, 33 bp, Homo sapien
gatggtactgttcaaattgtagtcaatagatct

SEQ ID NO: 324787 - DNA, 33 bp, Homo sapien
cctggcacagtgtctaatacggaggaggcactt

SEQ ID NO: 324788 - DNA, 33 bp, Homo sapien
cctggcacagtgtctagtacggaggaggcactt

SEQ ID NO: 324789 - DNA, 33 bp, Homo sapien
ccatttcatggtggaaacatagaatcagcatca

SEQ ID NO: 324790 - DNA, 33 bp, Homo sapien
ccatttcatggtggaatcatagaatcagcatca

SEQ ID NO: 324791 - DNA, 33 bp, Homo sapien
tgtgtggttgaaaagaataaccaccaaaaggca

SEQ ID NO: 324792 - DNA, 33 bp, Homo sapien
tgtgtggttgaaaagagtaaccaccaaaaggca

SEQ ID NO: 324793 - DNA, 33 bp, Homo sapien
gggataagggcagaaaaaagagaagcagaaaga

SEQ ID NO: 324794 - DNA, 33 bp, Homo sapien
gggataagggcagaaagaagagaagcagaaaga

SEQ ID NO: 324795 - DNA, 33 bp, Homo sapien
aacagatgacttaccaatgaacagtgtttccat

SEQ ID NO: 324796 - DNA, 33 bp, Homo sapien
aacagatgacttaccagtgaacagtgtttccat

SEQ ID NO: 324797 - DNA, 33 bp, Homo sapien
atctcagtcagctgtcccaactttaggaaaata

SEQ ID NO: 324798 - DNA, 33 bp, Homo sapien
atctcagtcagctgtctcaactttaggaaaata

SEQ ID NO: 324799 - DNA, 33 bp, Homo sapien
tcttccttcgaagtcaagagagtcatgcaactt

SEQ ID NO: 324800 - DNA, 33 bp, Homo sapien
tcttccttcgaagtcaggagagtcatgcaactt

SEQ ID NO: 324801 - DNA, 33 bp, Homo sapien
tgactggtgtcctaataagaagaaggaagagag

SEQ ID NO: 324802 - DNA, 33 bp, Homo sapien
tgactggtgtcctaatgagaagaaggaagagag

SEQ ID NO: 324803 - DNA, 33 bp, Homo sapien
tgaagaagagatgaagaacctgaggatgttgat

SEQ ID NO: 324804 - DNA, 33 bp, Homo sapien
tgaagaagagatgaaggacctgaggatgttgat

SEQ ID NO: 324805 - DNA, 33 bp, Homo sapien
ctggcaactctacatactatcatataaggcata

SEQ ID NO: 324806 - DNA, 33 bp, Homo sapien
ctggcaactctacatagtatcatataaggcata

SEQ ID NO: 324807 - DNA, 33 bp, Homo sapien
ctgagctgcctcttcactacctttactggtccc

SEQ ID NO: 324808 - DNA, 33 bp, Homo sapien
ctgagctgcctcttcagtacctttactggtccc

SEQ ID NO: 324809 - DNA, 33 bp, Homo sapien
tagttccatccggttcaccattttacttccaag

SEQ ID NO: 324810 - DNA, 33 bp, Homo sapien
tagttccatccggttcgccattttacttccaag

SEQ ID NO: 324811 - DNA, 33 bp, Homo sapien
tggtgggaggagaaaggatctgacgtgatgctg

SEQ ID NO: 324812 - DNA, 33 bp, Homo sapien
tggtgggaggagaaagtatctgacgtgatgctg

SEQ ID NO: 324813 - DNA, 33 bp, Homo sapien
atggttcgttgcgttaagtacattcacattgtt

SEQ ID NO: 324814 - DNA, 33 bp, Homo sapien
atggttcgttgcgttacgtacattcacattgtt

SEQ ID NO: 324815 - DNA, 33 bp, Homo sapien
tatcaaacccttatgaaagttagcttatacttg

SEQ ID NO: 324816 - DNA, 33 bp, Homo sapien
tatcaaacccttatgagagttagcttatacttg

SEQ ID NO: 324817 - DNA, 33 bp, Homo sapien
atgacttgcagcaaagaaaaaaacatatactat

SEQ ID NO: 324818 - DNA, 33 bp, Homo sapien
atgacttgcagcaaaggaaaaaacatatactat

SEQ ID NO: 324819 - DNA, 33 bp, Homo sapien
atagtggattatactacggatgttctcaccctt

SEQ ID NO: 324820 - DNA, 33 bp, Homo sapien
atagtggattatactatggatgttctcaccctt

SEQ ID NO: 324821 - DNA, 33 bp, Homo sapien
ctccagtccaatccacacttaagtcttgactca

SEQ ID NO: 324822 - DNA, 33 bp, Homo sapien
ctccagtccaatccacgcttaagtcttgactca

SEQ ID NO: 324823 - DNA, 33 bp, Homo sapien
tgctgacttcagaaaaataactttatatcctct

SEQ ID NO: 324824 - DNA, 33 bp, Homo sapien
tgctgacttcagaaaagtaactttatatcctct

SEQ ID NO: 324825 - DNA, 33 bp, Homo sapien
ctatggtctgaggacactgtaggtaaaaagctc

SEQ ID NO: 324826 - DNA, 33 bp, Homo sapien
ctatggtctgaggacattgtaggtaaaaagctc

SEQ ID NO: 324827 - DNA, 33 bp, Homo sapien
ttcttggctgggtcaccatggctaaagttgttc

SEQ ID NO: 324828 - DNA, 33 bp, Homo sapien
ttcttggctgggtcacgatggctaaagttgttc

SEQ ID NO: 324829 - DNA, 33 bp, Homo sapien
cttcactgtttgagaacatagcttccatccaca

SEQ ID NO: 324830 - DNA, 33 bp, Homo sapien
cttcactgtttgagaatatagcttccatccaca

SEQ ID NO: 324831 - DNA, 33 bp, Homo sapien
ttacatggcataagtagggtactatccattagg

SEQ ID NO: 324832 - DNA, 33 bp, Homo sapien
ttacatggcataagtatggtactatccattagg

SEQ ID NO: 324833 - DNA, 33 bp, Homo sapien
aaacaaatggaatgaacggggccaagtcaagag

SEQ ID NO: 324834 - DNA, 33 bp, Homo sapien
aaacaaatggaatgaatggggccaagtcaagag

SEQ ID NO: 324835 - DNA, 33 bp, Homo sapien
ttacactgtagcaaataacttgactacactgtg

SEQ ID NO: 324836 - DNA, 33 bp, Homo sapien
ttacactgtagcaaatgacttgactacactgtg

SEQ ID NO: 324837 - DNA, 33 bp, Homo sapien
agatgccatgatcaacagtcatgggaataacag

SEQ ID NO: 324838 - DNA, 33 bp, Homo sapien
agatgccatgatcaacggtcatgggaataacag

SEQ ID NO: 324839 - DNA, 33 bp, Homo sapien
atacttcatcaaagagaatataagaatggcaaa

SEQ ID NO: 324840 - DNA, 33 bp, Homo sapien
atacttcatcaaagaggatataagaatggcaaa

SEQ ID NO: 324841 - DNA, 33 bp, Homo sapien
gaaaataagcataaaccaaagcaggacagatct

SEQ ID NO: 324842 - DNA, 33 bp, Homo sapien
gaaaataagcataaactaaagcaggacagatct

SEQ ID NO: 324843 - DNA, 33 bp, Homo sapien
aatctttagcttgtgacctacctgcctactgcc

SEQ ID NO: 324844 - DNA, 33 bp, Homo sapien
aatctttagcttgtgagctacctgcctactgcc

SEQ ID NO: 324845 - DNA, 33 bp, Homo sapien
caagacctactgaggcacaaactctaaggtgag

SEQ ID NO: 324846 - DNA, 33 bp, Homo sapien
caagacctactgaggcgcaaactctaaggtgag

SEQ ID NO: 324847 - DNA, 33 bp, Homo sapien
gctgtagaagggaacacagaagcgattccatga

SEQ ID NO: 324848 - DNA, 33 bp, Homo sapien
gctgtagaagggaacatagaagcgattccatga

SEQ ID NO: 324849 - DNA, 33 bp, Homo sapien
ccatcaatcacgatgaacactcttggcgttaat

SEQ ID NO: 324850 - DNA, 33 bp, Homo sapien
ccatcaatcacgatgaccactcttggcgttaat

SEQ ID NO: 324851 - DNA, 33 bp, Homo sapien
aaaagatggtgaagtaaggaccagaaaacaggg

SEQ ID NO: 324852 - DNA, 33 bp, Homo sapien
aaaagatggtgaagtagggaccagaaaacaggg

SEQ ID NO: 324853 - DNA, 33 bp, Homo sapien
tttccttcccatcttcaagcatgcagtgccaag

SEQ ID NO: 324854 - DNA, 33 bp, Homo sapien
tttccttcccatcttcgagcatgcagtgccaag

SEQ ID NO: 324855 - DNA, 33 bp, Homo sapien
ggtgcttgagtcacaaagcaacattgccccgct

SEQ ID NO: 324856 - DNA, 33 bp, Homo sapien
ggtgcttgagtcacaacgcaacattgccccgct

SEQ ID NO: 324857 - DNA, 33 bp, Homo sapien
ctctgtgtccaaatgacctcttataaagacaac

SEQ ID NO: 324858 - DNA, 33 bp, Homo sapien
ctctgtgtccaaatgatctcttataaagacaac

SEQ ID NO: 324859 - DNA, 33 bp, Homo sapien
acattctctcctgccacgttactgtactgcctc

SEQ ID NO: 324860 - DNA, 33 bp, Homo sapien
acattctctcctgccatgttactgtactgcctc

SEQ ID NO: 324861 - DNA, 33 bp, Homo sapien
gaaatccaaagaacttaaaatctagcagaagag

SEQ ID NO: 324862 - DNA, 33 bp, Homo sapien
gaaatccaaagaacttgaaatctagcagaagag

SEQ ID NO: 324863 - DNA, 33 bp, Homo sapien
gcagcagtgggcgatgaatgttagtgaagtgct

SEQ ID NO: 324864 - DNA, 33 bp, Homo sapien
gcagcagtgggcgatgcatgttagtgaagtgct

SEQ ID NO: 324865 - DNA, 33 bp, Homo sapien
atgttggctccttttaccttatgaacaccaaat

SEQ ID NO: 324866 - DNA, 33 bp, Homo sapien
atgttggctccttttagcttatgaacaccaaat

SEQ ID NO: 324867 - DNA, 33 bp, Homo sapien
catggttataagcaaagcaaggagattgttgct

SEQ ID NO: 324868 - DNA, 33 bp, Homo sapien
catggttataagcaaatcaaggagattgttgct

SEQ ID NO: 324869 - DNA, 33 bp, Homo sapien
gtaagatcaccagaaacgtaagagtgtccctga

SEQ ID NO: 324870 - DNA, 33 bp, Homo sapien
gtaagatcaccagaaatgtaagagtgtccctga

SEQ ID NO: 324871 - DNA, 33 bp, Homo sapien
tagccaccattctttacgttcttgacaatgtgc

SEQ ID NO: 324872 - DNA, 33 bp, Homo sapien
tagccaccattctttatgttcttgacaatgtgc

SEQ ID NO: 324873 - DNA, 33 bp, Homo sapien
agagttgattctgctacgtcctaaagcccgtga

SEQ ID NO: 324874 - DNA, 33 bp, Homo sapien
agagttgattctgctatgtcctaaagcccgtga

SEQ ID NO: 324875 - DNA, 33 bp, Homo sapien
tcccaggcaatttcagaatgaagtcagaggtgg

SEQ ID NO: 324876 - DNA, 33 bp, Homo sapien
tcccaggcaatttcaggatgaagtcagaggtgg

SEQ ID NO: 324877 - DNA, 33 bp, Homo sapien
caagcactgaaaatggaaagcaggtctctccat

SEQ ID NO: 324878 - DNA, 33 bp, Homo sapien
caagcactgaaaatgggaagcaggtctctccat

SEQ ID NO: 324879 - DNA, 33 bp, Homo sapien
ctgccactcattcctaaatcatacatgtggcat

SEQ ID NO: 324880 - DNA, 33 bp, Homo sapien
ctgccactcattcctacatcatacatgtggcat

SEQ ID NO: 324881 - DNA, 33 bp, Homo sapien
agactgaatgtttgagacccctgcaaattcaca

SEQ ID NO: 324882 - DNA, 33 bp, Homo sapien
agactgaatgtttgagtcccctgcaaattcaca

SEQ ID NO: 324883 - DNA, 33 bp, Homo sapien
atgatgatggcagctaccacgggctccgtatgg

SEQ ID NO: 324884 - DNA, 33 bp, Homo sapien
atgatgatggcagctatcacgggctccgtatgg

SEQ ID NO: 324885 - DNA, 33 bp, Homo sapien
taagaactggttgtccacctgagaaaggccccg

SEQ ID NO: 324886 - DNA, 33 bp, Homo sapien
taagaactggttgtccgcctgagaaaggccccg

SEQ ID NO: 324887 - DNA, 33 bp, Homo sapien
acccagtctctgaaatcaaatcctctctccact

SEQ ID NO: 324888 - DNA, 33 bp, Homo sapien
acccagtctctgaaatgaaatcctctctccact

SEQ ID NO: 324889 - DNA, 33 bp, Homo sapien
ccagcctgtcctgctaaccacctttaggacgcc

SEQ ID NO: 324890 - DNA, 33 bp, Homo sapien
ccagcctgtcctgctagccacctttaggacgcc

SEQ ID NO: 324891 - DNA, 33 bp, Homo sapien
cctgaccacgacaatcccttttctgacaacaca

SEQ ID NO: 324892 - DNA, 33 bp, Homo sapien
cctgaccacgacaatctcttttctgacaacaca

SEQ ID NO: 324893 - DNA, 33 bp, Homo sapien
taatttaatcagaatgccatgtttcctggctgg

SEQ ID NO: 324894 - DNA, 33 bp, Homo sapien
taatttaatcagaatgtcatgtttcctggctgg

SEQ ID NO: 324895 - DNA, 33 bp, Homo sapien
cttgccacagtcctcacggtggcacgctcattc

SEQ ID NO: 324896 - DNA, 33 bp, Homo sapien
cttgccacagtcctcatggtggcacgctcattc

SEQ ID NO: 324897 - DNA, 33 bp, Homo sapien
gccttagtttctccaactgtaaaatggagatgg

SEQ ID NO: 324898 - DNA, 33 bp, Homo sapien
gccttagtttctccaagtgtaaaatggagatgg

SEQ ID NO: 324899 - DNA, 33 bp, Homo sapien
tggcccctgttatccacgtgctggtcaccctca

SEQ ID NO: 324900 - DNA, 33 bp, Homo sapien
tggcccctgttatccatgtgctggtcaccctca

SEQ ID NO: 324901 - DNA, 33 bp, Homo sapien
ataatccaactgatacacattaaagctagaaat

SEQ ID NO: 324902 - DNA, 33 bp, Homo sapien
ataatccaactgatactcattaaagctagaaat

SEQ ID NO: 324903 - DNA, 33 bp, Homo sapien
aaggataaacgctgtgcagccaaattaggcatt

SEQ ID NO: 324904 - DNA, 33 bp, Homo sapien
aaggataaacgctgtgtagccaaattaggcatt

SEQ ID NO: 324905 - DNA, 33 bp, Homo sapien
tcaacaaatacttctcaagcaccacctgggagc

SEQ ID NO: 324906 - DNA, 33 bp, Homo sapien
tcaacaaatacttctcgagcaccacctgggagc

SEQ ID NO: 324907 - DNA, 33 bp, Homo sapien
ttgttgaaataatgaacgctgatggtggtctgg

SEQ ID NO: 324908 - DNA, 33 bp, Homo sapien
ttgttgaaataatgaatgctgatggtggtctgg

SEQ ID NO: 324909 - DNA, 33 bp, Homo sapien
ttagtgcagccaagcaagaaaggaaaattccag

SEQ ID NO: 324910 - DNA, 33 bp, Homo sapien
ttagtgcagccaagcacgaaaggaaaattccag

SEQ ID NO: 324911 - DNA, 33 bp, Homo sapien
ctctgtgacttggtgcaaaaggctggtcctcga

SEQ ID NO: 324912 - DNA, 33 bp, Homo sapien
ctctgtgacttggtgcgaaaggctggtcctcga

SEQ ID NO: 324913 - DNA, 33 bp, Homo sapien
atcggtcaacttagcaggagttaagtgagttaa

SEQ ID NO: 324914 - DNA, 33 bp, Homo sapien
atcggtcaacttagcatgagttaagtgagttaa

SEQ ID NO: 324915 - DNA, 33 bp, Homo sapien
ctcacgacctcaaatcgcatcttcccaggtagg

SEQ ID NO: 324916 - DNA, 33 bp, Homo sapien
ctcacgacctcaaatctcatcttcccaggtagg

SEQ ID NO: 324917 - DNA, 33 bp, Homo sapien
ttgagaggcttgctaccctctttttccagctct

SEQ ID NO: 324918 - DNA, 33 bp, Homo sapien
ttgagaggcttgctactctctttttccagctct

SEQ ID NO: 324919 - DNA, 33 bp, Homo sapien
gaaaaacagaggaggcaacatcacagcatggag

SEQ ID NO: 324920 - DNA, 33 bp, Homo sapien
gaaaaacagaggaggcgacatcacagcatggag

SEQ ID NO: 324921 - DNA, 33 bp, Homo sapien
ggagatatttttactcaagacttcggggtgagt

SEQ ID NO: 324922 - DNA, 33 bp, Homo sapien
ggagatatttttactcgagacttcggggtgagt

SEQ ID NO: 324923 - DNA, 33 bp, Homo sapien
agccagctgcagcaacaaaaaactcttggatct

SEQ ID NO: 324924 - DNA, 33 bp, Homo sapien
agccagctgcagcaacgaaaaactcttggatct

SEQ ID NO: 324925 - DNA, 33 bp, Homo sapien
ctaattaccagtcagtaaaacagggagaattat

SEQ ID NO: 324926 - DNA, 33 bp, Homo sapien
ctaattaccagtcagttaaacagggagaattat

SEQ ID NO: 324927 - DNA, 33 bp, Homo sapien
tgagagccgtgtggcacggtccttgttcataaa

SEQ ID NO: 324928 - DNA, 33 bp, Homo sapien
tgagagccgtgtggcatggtccttgttcataaa

SEQ ID NO: 324929 - DNA, 33 bp, Homo sapien
ctacatgggtactgcacctcatcttcaacactc

SEQ ID NO: 324930 - DNA, 33 bp, Homo sapien
ctacatgggtactgcatctcatcttcaacactc

SEQ ID NO: 324931 - DNA, 33 bp, Homo sapien
ccaatcccgtgctagacaaaccctcctgcttgt

SEQ ID NO: 324932 - DNA, 33 bp, Homo sapien
ccaatcccgtgctagataaaccctcctgcttgt

SEQ ID NO: 324933 - DNA, 33 bp, Homo sapien
ccattgcctttgcacaatagttttaagttcttc

SEQ ID NO: 324934 - DNA, 33 bp, Homo sapien
ccattgcctttgcacagtagttttaagttcttc

SEQ ID NO: 324935 - DNA, 33 bp, Homo sapien
tagaagcagaagcgaaaggaagaaaggtcactt

SEQ ID NO: 324936 - DNA, 33 bp, Homo sapien
tagaagcagaagcgaagggaagaaaggtcactt

SEQ ID NO: 324937 - DNA, 33 bp, Homo sapien
atgtcaaacatacatacgaatagacacagcaca

SEQ ID NO: 324938 - DNA, 33 bp, Homo sapien
atgtcaaacatacataggaatagacacagcaca

SEQ ID NO: 324939 - DNA, 33 bp, Homo sapien
tacatctttctaatgcacttccctacagattct

SEQ ID NO: 324940 - DNA, 33 bp, Homo sapien
tacatctttctaatgcgcttccctacagattct

SEQ ID NO: 324941 - DNA, 33 bp, Homo sapien
aatagtctgtacaacaaatccctgtgacgcaag

SEQ ID NO: 324942 - DNA, 33 bp, Homo sapien
aatagtctgtacaacatatccctgtgacgcaag

SEQ ID NO: 324943 - DNA, 33 bp, Homo sapien
caaagcttcacacatacccccaaacctaaaata

SEQ ID NO: 324944 - DNA, 33 bp, Homo sapien
caaagcttcacacatatccccaaacctaaaata

SEQ ID NO: 324945 - DNA, 33 bp, Homo sapien
cagaactgaactttccagacttttaatccagtg

SEQ ID NO: 324946 - DNA, 33 bp, Homo sapien
cagaactgaactttccggacttttaatccagtg

SEQ ID NO: 324947 - DNA, 33 bp, Homo sapien
ctgctggcctggcatacagattttggacttgcc

SEQ ID NO: 324948 - DNA, 33 bp, Homo sapien
ctgctggcctggcatagagattttggacttgcc

SEQ ID NO: 324949 - DNA, 33 bp, Homo sapien
agagagacctactgaacgtctgacacactctag

SEQ ID NO: 324950 - DNA, 33 bp, Homo sapien
agagagacctactgaatgtctgacacactctag

SEQ ID NO: 324951 - DNA, 33 bp, Homo sapien
ttgtttgcagctacacacaaatcagcaaatgaa

SEQ ID NO: 324952 - DNA, 33 bp, Homo sapien
ttgtttgcagctacacgcaaatcagcaaatgaa

SEQ ID NO: 324953 - DNA, 33 bp, Homo sapien
tggtacttgtgttgccaactggtgactagctca

SEQ ID NO: 324954 - DNA, 33 bp, Homo sapien
tggtacttgtgttgccgactggtgactagctca

SEQ ID NO: 324955 - DNA, 33 bp, Homo sapien
atgtggagattaaaaaatcaaagccagggaatg

SEQ ID NO: 324956 - DNA, 33 bp, Homo sapien
atgtggagattaaaaagtcaaagccagggaatg

SEQ ID NO: 324957 - DNA, 33 bp, Homo sapien
aataagaaagtgggcacgattgccaggacagcc

SEQ ID NO: 324958 - DNA, 33 bp, Homo sapien
aataagaaagtgggcatgattgccaggacagcc

SEQ ID NO: 324959 - DNA, 33 bp, Homo sapien
cacatacgttcattcacatacaaataggaagca

SEQ ID NO: 324960 - DNA, 33 bp, Homo sapien
cacatacgttcattcatatacaaataggaagca

SEQ ID NO: 324961 - DNA, 33 bp, Homo sapien
acattccttgatcttgaaacatttaatacaagt

SEQ ID NO: 324962 - DNA, 33 bp, Homo sapien
acattccttgatcttggaacatttaatacaagt

SEQ ID NO: 324963 - DNA, 33 bp, Homo sapien
agcaaattgccactgaagagacagaggatcaga

SEQ ID NO: 324964 - DNA, 33 bp, Homo sapien
agcaaattgccactgaggagacagaggatcaga

SEQ ID NO: 324965 - DNA, 33 bp, Homo sapien
aattttcatgacagaaatgtctattgatctgca

SEQ ID NO: 324966 - DNA, 33 bp, Homo sapien
aattttcatgacagaagtgtctattgatctgca

SEQ ID NO: 324967 - DNA, 33 bp, Homo sapien
ctttgtttattcagtcaattactaaggttgatt

SEQ ID NO: 324968 - DNA, 33 bp, Homo sapien
ctttgtttattcagtcgattactaaggttgatt

SEQ ID NO: 324969 - DNA, 33 bp, Homo sapien
tgacactgggtaagtcacctaacacgtttaaga

SEQ ID NO: 324970 - DNA, 33 bp, Homo sapien
tgacactgggtaagtctcctaacacgtttaaga

SEQ ID NO: 324971 - DNA, 33 bp, Homo sapien
tttggaattttatcagcagtcattcattattgt

SEQ ID NO: 324972 - DNA, 33 bp, Homo sapien
tttggaattttatcaggagtcattcattattgt

SEQ ID NO: 324973 - DNA, 33 bp, Homo sapien
acctttctttcccccacgtacagaggctcagat

SEQ ID NO: 324974 - DNA, 33 bp, Homo sapien
acctttctttcccccatgtacagaggctcagat

SEQ ID NO: 324975 - DNA, 33 bp, Homo sapien
aatacacacgggggccgaccacttttcacccat

SEQ ID NO: 324976 - DNA, 33 bp, Homo sapien
aatacacacgggggcctaccacttttcacccat

SEQ ID NO: 324977 - DNA, 33 bp, Homo sapien
cctctcacacacgaacacctggattcatttgac

SEQ ID NO: 324978 - DNA, 33 bp, Homo sapien
cctctcacacacgaacgcctggattcatttgac

SEQ ID NO: 324979 - DNA, 33 bp, Homo sapien
ggatggtggacatcagaaaaaacgcctccaaga

SEQ ID NO: 324980 - DNA, 33 bp, Homo sapien
ggatggtggacatcaggaaaaacgcctccaaga

SEQ ID NO: 324981 - DNA, 33 bp, Homo sapien
cctgcttagtgcctgacatatggcaagtcccca

SEQ ID NO: 324982 - DNA, 33 bp, Homo sapien
cctgcttagtgcctgatatatggcaagtcccca

SEQ ID NO: 324983 - DNA, 33 bp, Homo sapien
taacaggaggtaaaacacactaagtacttactc

SEQ ID NO: 324984 - DNA, 33 bp, Homo sapien
taacaggaggtaaaacgcactaagtacttactc

SEQ ID NO: 324985 - DNA, 33 bp, Homo sapien
ctcattctaaagatgacctgaagttaaggcccg

SEQ ID NO: 324986 - DNA, 33 bp, Homo sapien
ctcattctaaagatgatctgaagttaaggcccg

SEQ ID NO: 324987 - DNA, 33 bp, Homo sapien
agagccctcagcataacgtggaatagaagtggc

SEQ ID NO: 324988 - DNA, 33 bp, Homo sapien
agagccctcagcataatgtggaatagaagtggc

SEQ ID NO: 324989 - DNA, 33 bp, Homo sapien
aagcaggcaggttttaccatatttgaaagttgt

SEQ ID NO: 324990 - DNA, 33 bp, Homo sapien
aagcaggcaggttttagcatatttgaaagttgt

SEQ ID NO: 324991 - DNA, 33 bp, Homo sapien
aggggaaagcaatgctaagagatggatggtgtc

SEQ ID NO: 324992 - DNA, 33 bp, Homo sapien
aggggaaagcaatgctgagagatggatggtgtc

SEQ ID NO: 324993 - DNA, 33 bp, Homo sapien
aactactccagacctgacaagaaggaataaaaa

SEQ ID NO: 324994 - DNA, 33 bp, Homo sapien
aactactccagacctggcaagaaggaataaaaa

SEQ ID NO: 324995 - DNA, 33 bp, Homo sapien
ttaataagccactgaagataggtgtgcacaagc

SEQ ID NO: 324996 - DNA, 33 bp, Homo sapien
ttaataagccactgaatataggtgtgcacaagc

SEQ ID NO: 324997 - DNA, 33 bp, Homo sapien
ctacagcgaaatgtggaagtacagaaactgagg

SEQ ID NO: 324998 - DNA, 33 bp, Homo sapien
ctacagcgaaatgtggcagtacagaaactgagg

SEQ ID NO: 324999 - DNA, 33 bp, Homo sapien
agtggggcataacctcacgtgacagaagatgaa

SEQ ID NO: 325000 - DNA, 33 bp, Homo sapien
agtggggcataacctcgcgtgacagaagatgaa

SEQ ID NO: 325001 - DNA, 33 bp, Homo sapien
ccacgaccatgtggtcacctgtaaacacctgtg

SEQ ID NO: 325002 - DNA, 33 bp, Homo sapien
ccacgaccatgtggtcgcctgtaaacacctgtg

SEQ ID NO: 325003 - DNA, 33 bp, Homo sapien
tcaagtatgcatgaggcatctgttttggaattg

SEQ ID NO: 325004 - DNA, 33 bp, Homo sapien
tcaagtatgcatgaggtatctgttttggaattg

SEQ ID NO: 325005 - DNA, 33 bp, Homo sapien
tcctccttggagttccacccctgcaaggctgga

SEQ ID NO: 325006 - DNA, 33 bp, Homo sapien
tcctccttggagttccgcccctgcaaggctgga

SEQ ID NO: 325007 - DNA, 33 bp, Homo sapien
ccctgagctgccaaccacggagatgtgccaagc

SEQ ID NO: 325008 - DNA, 33 bp, Homo sapien
ccctgagctgccaaccgcggagatgtgccaagc

SEQ ID NO: 325009 - DNA, 33 bp, Homo sapien
caaatagaaatggcttaaaatggctgttattcc

SEQ ID NO: 325010 - DNA, 33 bp, Homo sapien
caaatagaaatggcttcaaatggctgttattcc

SEQ ID NO: 325011 - DNA, 33 bp, Homo sapien
aatgttttgcagaatgaaggaattaaccaaaac

SEQ ID NO: 325012 - DNA, 33 bp, Homo sapien
aatgttttgcagaatggaggaattaaccaaaac

SEQ ID NO: 325013 - DNA, 33 bp, Homo sapien
gggtgaccttggcctacgggaagatgtgctacg

SEQ ID NO: 325014 - DNA, 33 bp, Homo sapien
gggtgaccttggcctatgggaagatgtgctacg

SEQ ID NO: 325015 - DNA, 33 bp, Homo sapien
acccaaacttctccaaacatgcctcttggcacc

SEQ ID NO: 325016 - DNA, 33 bp, Homo sapien
acccaaacttctccaaccatgcctcttggcacc

SEQ ID NO: 325017 - DNA, 33 bp, Homo sapien
tctggaccactgagaaactgggaaaataagggt

SEQ ID NO: 325018 - DNA, 33 bp, Homo sapien
tctggaccactgagaagctgggaaaataagggt

SEQ ID NO: 325019 - DNA, 33 bp, Homo sapien
tttcagtgtcttgcccagaagaacagaactgtg

SEQ ID NO: 325020 - DNA, 33 bp, Homo sapien
tttcagtgtcttgcccggaagaacagaactgtg

SEQ ID NO: 325021 - DNA, 33 bp, Homo sapien
tcacccggtgcaagtacgtgttaccttgtattc

SEQ ID NO: 325022 - DNA, 33 bp, Homo sapien
tcacccggtgcaagtatgtgttaccttgtattc

SEQ ID NO: 325023 - DNA, 33 bp, Homo sapien
tctggtcttttccttaccggtgtgtacactgtg

SEQ ID NO: 325024 - DNA, 33 bp, Homo sapien
tctggtcttttccttatcggtgtgtacactgtg

SEQ ID NO: 325025 - DNA, 33 bp, Homo sapien
acctaaatgtccatcaataagggaccagggaaa

SEQ ID NO: 325026 - DNA, 33 bp, Homo sapien
acctaaatgtccatcagtaagggaccagggaaa

SEQ ID NO: 325027 - DNA, 33 bp, Homo sapien
gctggtggaagcataaattagtacagccttcat

SEQ ID NO: 325028 - DNA, 33 bp, Homo sapien
gctggtggaagcataagttagtacagccttcat

SEQ ID NO: 325029 - DNA, 33 bp, Homo sapien
ttcctgagcatggatcagaccaaggactaaggt

SEQ ID NO: 325030 - DNA, 33 bp, Homo sapien
ttcctgagcatggatcggaccaaggactaaggt

SEQ ID NO: 325031 - DNA, 33 bp, Homo sapien
cctcaagaaagtagaaatgcagtccatagaatg

SEQ ID NO: 325032 - DNA, 33 bp, Homo sapien
cctcaagaaagtagaagtgcagtccatagaatg

SEQ ID NO: 325033 - DNA, 33 bp, Homo sapien
tgaaataagcaaattacggaaggaatgaaaaca

SEQ ID NO: 325034 - DNA, 33 bp, Homo sapien
tgaaataagcaaattatggaaggaatgaaaaca

SEQ ID NO: 325035 - DNA, 33 bp, Homo sapien
aagaaagagtgcaaacaagcaaatgtgacaaaa

SEQ ID NO: 325036 - DNA, 33 bp, Homo sapien
aagaaagagtgcaaacgagcaaatgtgacaaaa

SEQ ID NO: 325037 - DNA, 33 bp, Homo sapien
cacaaacacacacagtaacatagaaatatacat

SEQ ID NO: 325038 - DNA, 33 bp, Homo sapien
cacaaacacacacagtgacatagaaatatacat

SEQ ID NO: 325039 - DNA, 33 bp, Homo sapien
gggcatcataactccagtctctacctctgcctt

SEQ ID NO: 325040 - DNA, 33 bp, Homo sapien
gggcatcataactccattctctacctctgcctt

SEQ ID NO: 325041 - DNA, 33 bp, Homo sapien
agcccaaagccggaaccctgtgaagctgggaaa

SEQ ID NO: 325042 - DNA, 33 bp, Homo sapien
agcccaaagccggaactctgtgaagctgggaaa

SEQ ID NO: 325043 - DNA, 33 bp, Homo sapien
ccaggctccaacatcacgaggactgtacatctc

SEQ ID NO: 325044 - DNA, 33 bp, Homo sapien
ccaggctccaacatcatgaggactgtacatctc

SEQ ID NO: 325045 - DNA, 33 bp, Homo sapien
gatacacacaaatgaaaaaatgggccaatatgt

SEQ ID NO: 325046 - DNA, 33 bp, Homo sapien
gatacacacaaatgaacaaatgggccaatatgt

SEQ ID NO: 325047 - DNA, 33 bp, Homo sapien
tgcctcctggccctgacaacgaatgtcacaaag

SEQ ID NO: 325048 - DNA, 33 bp, Homo sapien
tgcctcctggccctgagaacgaatgtcacaaag

SEQ ID NO: 325049 - DNA, 33 bp, Homo sapien
cacatttggtcagagccgatcttgaccatcctg

SEQ ID NO: 325050 - DNA, 33 bp, Homo sapien
cacatttggtcagagctgatcttgaccatcctg

SEQ ID NO: 325051 - DNA, 33 bp, Homo sapien
tagtccctgcctatgacacttactgagttagct

SEQ ID NO: 325052 - DNA, 33 bp, Homo sapien
tagtccctgcctatgatacttactgagttagct

SEQ ID NO: 325053 - DNA, 33 bp, Homo sapien
tataagtaaaaccttaacttcaccttcaatgct

SEQ ID NO: 325054 - DNA, 33 bp, Homo sapien
tataagtaaaaccttaccttcaccttcaatgct

SEQ ID NO: 325055 - DNA, 33 bp, Homo sapien
tgtttctagaagaaggccctatacaagttacac

SEQ ID NO: 325056 - DNA, 33 bp, Homo sapien
tgtttctagaagaaggtcctatacaagttacac

SEQ ID NO: 325057 - DNA, 33 bp, Homo sapien
aggggacgtcctgttacaatcagagagtacctc

SEQ ID NO: 325058 - DNA, 33 bp, Homo sapien
aggggacgtcctgttataatcagagagtacctc

SEQ ID NO: 325059 - DNA, 33 bp, Homo sapien
tccactcaccctcgtcacagctgggtggctttg

SEQ ID NO: 325060 - DNA, 33 bp, Homo sapien
tccactcaccctcgtcgcagctgggtggctttg

SEQ ID NO: 325061 - DNA, 33 bp, Homo sapien
cattcactataaatacacaggtgtcatccgtaa

SEQ ID NO: 325062 - DNA, 33 bp, Homo sapien
cattcactataaatacgcaggtgtcatccgtaa

SEQ ID NO: 325063 - DNA, 33 bp, Homo sapien
cactgtatttttccacagatgggatgggggatg

SEQ ID NO: 325064 - DNA, 33 bp, Homo sapien
cactgtatttttccacggatgggatgggggatg

SEQ ID NO: 325065 - DNA, 33 bp, Homo sapien
acatagttgaattcagcagcaccataatcaact

SEQ ID NO: 325066 - DNA, 33 bp, Homo sapien
acatagttgaattcaggagcaccataatcaact

SEQ ID NO: 325067 - DNA, 33 bp, Homo sapien
tttactttgggatgcaagaatcactcatgctac

SEQ ID NO: 325068 - DNA, 33 bp, Homo sapien
tttactttgggatgcaggaatcactcatgctac

SEQ ID NO: 325069 - DNA, 33 bp, Homo sapien
ggcaatgtgcatccagaccttgaagctcagcct

SEQ ID NO: 325070 - DNA, 33 bp, Homo sapien
ggcaatgtgcatccaggccttgaagctcagcct

SEQ ID NO: 325071 - DNA, 33 bp, Homo sapien
tcacagctcatctcaagatacttgagccacatc

SEQ ID NO: 325072 - DNA, 33 bp, Homo sapien
tcacagctcatctcaatatacttgagccacatc

SEQ ID NO: 325073 - DNA, 33 bp, Homo sapien
tgagccaacctattccaaatccacctattaccc

SEQ ID NO: 325074 - DNA, 33 bp, Homo sapien
tgagccaacctattccgaatccacctattaccc

SEQ ID NO: 325075 - DNA, 33 bp, Homo sapien
cacataatgggtgttacataaatgattcaatag

SEQ ID NO: 325076 - DNA, 33 bp, Homo sapien
cacataatgggtgttatataaatgattcaatag

SEQ ID NO: 325077 - DNA, 33 bp, Homo sapien
gccatctgtagtttcccatccttttttggggaa

SEQ ID NO: 325078 - DNA, 33 bp, Homo sapien
gccatctgtagtttcctatccttttttggggaa

SEQ ID NO: 325079 - DNA, 33 bp, Homo sapien
ggtgagtgcagattggcacaagacaaacaatcc

SEQ ID NO: 325080 - DNA, 33 bp, Homo sapien
ggtgagtgcagattggtacaagacaaacaatcc

SEQ ID NO: 325081 - DNA, 33 bp, Homo sapien
taaggatactgaattacgtgtcaggattaaaat

SEQ ID NO: 325082 - DNA, 33 bp, Homo sapien
taaggatactgaattatgtgtcaggattaaaat

SEQ ID NO: 325083 - DNA, 33 bp, Homo sapien
gggtcagaccgcacaacctaggctaattccgat

SEQ ID NO: 325084 - DNA, 33 bp, Homo sapien
gggtcagaccgcacaatctaggctaattccgat

SEQ ID NO: 325085 - DNA, 33 bp, Homo sapien
tggccttatcaaattacaaggatgctaaaagtc

SEQ ID NO: 325086 - DNA, 33 bp, Homo sapien
tggccttatcaaattataaggatgctaaaagtc

SEQ ID NO: 325087 - DNA, 33 bp, Homo sapien
tgactggccggctatagatcagagctttccagg

SEQ ID NO: 325088 - DNA, 33 bp, Homo sapien
tgactggccggctatatatcagagctttccagg

SEQ ID NO: 325089 - DNA, 33 bp, Homo sapien
ctccaattctccagacaccaactgggtatacaa

SEQ ID NO: 325090 - DNA, 33 bp, Homo sapien
ctccaattctccagacgccaactgggtatacaa

SEQ ID NO: 325091 - DNA, 33 bp, Homo sapien
ctttagcctggcattccagtctgcaggaactgg

SEQ ID NO: 325092 - DNA, 33 bp, Homo sapien
ctttagcctggcattcgagtctgcaggaactgg

SEQ ID NO: 325093 - DNA, 33 bp, Homo sapien
ctccttgctaggaaaactcccaaggaggcaact

SEQ ID NO: 325094 - DNA, 33 bp, Homo sapien
ctccttgctaggaaaagtcccaaggaggcaact

SEQ ID NO: 325095 - DNA, 33 bp, Homo sapien
gagccctgggtgaaagcctggctgcaccaattc

SEQ ID NO: 325096 - DNA, 33 bp, Homo sapien
gagccctgggtgaaaggctggctgcaccaattc

SEQ ID NO: 325097 - DNA, 33 bp, Homo sapien
gctgccaaagtacgagcccttgtcctgcgccag

SEQ ID NO: 325098 - DNA, 33 bp, Homo sapien
gctgccaaagtacgaggccttgtcctgcgccag

SEQ ID NO: 325099 - DNA, 33 bp, Homo sapien
gttcgcactgccgtagccaaaaagtggttgcta

SEQ ID NO: 325100 - DNA, 33 bp, Homo sapien
gttcgcactgccgtagtcaaaaagtggttgcta

SEQ ID NO: 325101 - DNA, 33 bp, Homo sapien
ggggcatggacaagtacctgatctggatcaggc

SEQ ID NO: 325102 - DNA, 33 bp, Homo sapien
ggggcatggacaagtatctgatctggatcaggc

SEQ ID NO: 325103 - DNA, 33 bp, Homo sapien
acatttgctgctataaacatttgctgctatttg

SEQ ID NO: 325104 - DNA, 33 bp, Homo sapien
acatttgctgctataagcatttgctgctatttg

SEQ ID NO: 325105 - DNA, 33 bp, Homo sapien
ctcctgtctttcataacaattgtgtctagcatt

SEQ ID NO: 325106 - DNA, 33 bp, Homo sapien
ctcctgtctttcataataattgtgtctagcatt

SEQ ID NO: 325107 - DNA, 33 bp, Homo sapien
taaaagcatgaatgaacatcagttatcacactg

SEQ ID NO: 325108 - DNA, 33 bp, Homo sapien
taaaagcatgaatgaatatcagttatcacactg

SEQ ID NO: 325109 - DNA, 33 bp, Homo sapien
gggattagtgcccttacagaagaagtgccagct

SEQ ID NO: 325110 - DNA, 33 bp, Homo sapien
gggattagtgcccttatagaagaagtgccagct

SEQ ID NO: 325111 - DNA, 33 bp, Homo sapien
acacacacaccgtttcacacaggctgggtgggg

SEQ ID NO: 325112 - DNA, 33 bp, Homo sapien
acacacacaccgtttcgcacaggctgggtgggg

SEQ ID NO: 325113 - DNA, 33 bp, Homo sapien
tttcttcagagttgacacggttcaccaagttct

SEQ ID NO: 325114 - DNA, 33 bp, Homo sapien
tttcttcagagttgacgcggttcaccaagttct

SEQ ID NO: 325115 - DNA, 33 bp, Homo sapien
ccctgcacatttgttacggtgtttgcacatccc

SEQ ID NO: 325116 - DNA, 33 bp, Homo sapien
ccctgcacatttgttatggtgtttgcacatccc

SEQ ID NO: 325117 - DNA, 33 bp, Homo sapien
aagggatcactgactcaaaagctgctgctttac

SEQ ID NO: 325118 - DNA, 33 bp, Homo sapien
aagggatcactgactcgaaagctgctgctttac

SEQ ID NO: 325119 - DNA, 33 bp, Homo sapien
cttgtgtattcgattacaataactcatctaaaa

SEQ ID NO: 325120 - DNA, 33 bp, Homo sapien
cttgtgtattcgattataataactcatctaaaa

SEQ ID NO: 325121 - DNA, 33 bp, Homo sapien
tcattacctttatcatcaagggttgctgtgaga

SEQ ID NO: 325122 - DNA, 33 bp, Homo sapien
tcattacctttatcatgaagggttgctgtgaga

SEQ ID NO: 325123 - DNA, 33 bp, Homo sapien
gtgaattaagatgatacgtcttaaactaggcct

SEQ ID NO: 325124 - DNA, 33 bp, Homo sapien
gtgaattaagatgatatgtcttaaactaggcct

SEQ ID NO: 325125 - DNA, 33 bp, Homo sapien
aggggcgtggccagcacatcgggtgccttcaag

SEQ ID NO: 325126 - DNA, 33 bp, Homo sapien
aggggcgtggccagcatatcgggtgccttcaag

SEQ ID NO: 325127 - DNA, 33 bp, Homo sapien
gcattgcattctgaaaatggcaaacacggcaga

SEQ ID NO: 325128 - DNA, 33 bp, Homo sapien
gcattgcattctgaaagtggcaaacacggcaga

SEQ ID NO: 325129 - DNA, 33 bp, Homo sapien
gtgctatttcttataccgcaataggaaactaat

SEQ ID NO: 325130 - DNA, 33 bp, Homo sapien
gtgctatttcttatactgcaataggaaactaat

SEQ ID NO: 325131 - DNA, 33 bp, Homo sapien
tgaattgcacttaccacgtgactaaaaagtgct

SEQ ID NO: 325132 - DNA, 33 bp, Homo sapien
tgaattgcacttaccatgtgactaaaaagtgct

SEQ ID NO: 325133 - DNA, 33 bp, Homo sapien
gtgttgataaatagaaagcttattgcaaaatct

SEQ ID NO: 325134 - DNA, 33 bp, Homo sapien
gtgttgataaatagaaggcttattgcaaaatct

SEQ ID NO: 325135 - DNA, 33 bp, Homo sapien
tgggttgaagaacattaaaaattcaggcaattt

SEQ ID NO: 325136 - DNA, 33 bp, Homo sapien
tgggttgaagaacattcaaaattcaggcaattt

SEQ ID NO: 325137 - DNA, 33 bp, Homo sapien
actggttgagcaaacaactgattagaaagcctg

SEQ ID NO: 325138 - DNA, 33 bp, Homo sapien
actggttgagcaaacagctgattagaaagcctg

SEQ ID NO: 325139 - DNA, 33 bp, Homo sapien
atactcaagtctaagtcaccctagtgccaaacc

SEQ ID NO: 325140 - DNA, 33 bp, Homo sapien
atactcaagtctaagttaccctagtgccaaacc

SEQ ID NO: 325141 - DNA, 33 bp, Homo sapien
tggactttattatagaacccttctgtatctata

SEQ ID NO: 325142 - DNA, 33 bp, Homo sapien
tggactttattatagagcccttctgtatctata

SEQ ID NO: 325143 - DNA, 33 bp, Homo sapien
ctttgacagcctcaggaaagttttaagggattc

SEQ ID NO: 325144 - DNA, 33 bp, Homo sapien
ctttgacagcctcaggcaagttttaagggattc

SEQ ID NO: 325145 - DNA, 33 bp, Homo sapien
gcctccatatcctaaacagaaaaagcttacatg

SEQ ID NO: 325146 - DNA, 33 bp, Homo sapien
gcctccatatcctaaagagaaaaagcttacatg

SEQ ID NO: 325147 - DNA, 33 bp, Homo sapien
atgtctaaaataacaacgtgcatactttaaatc

SEQ ID NO: 325148 - DNA, 33 bp, Homo sapien
atgtctaaaataacaatgtgcatactttaaatc

SEQ ID NO: 325149 - DNA, 33 bp, Homo sapien
ggagtttgagagaaagaagtcaagagttttggc

SEQ ID NO: 325150 - DNA, 33 bp, Homo sapien
ggagtttgagagaaaggagtcaagagttttggc

SEQ ID NO: 325151 - DNA, 33 bp, Homo sapien
ccatttaagtttacgacccatgttgagttaatt

SEQ ID NO: 325152 - DNA, 33 bp, Homo sapien
ccatttaagtttacgatccatgttgagttaatt

SEQ ID NO: 325153 - DNA, 33 bp, Homo sapien
acagtccttcctgtcaaggggaacatcttggaa

SEQ ID NO: 325154 - DNA, 33 bp, Homo sapien
acagtccttcctgtcagggggaacatcttggaa

SEQ ID NO: 325155 - DNA, 33 bp, Homo sapien
ccaacttggcatgggtaaaaaatgcagaaagtt

SEQ ID NO: 325156 - DNA, 33 bp, Homo sapien
ccaacttggcatgggtgaaaaatgcagaaagtt

SEQ ID NO: 325157 - DNA, 33 bp, Homo sapien
gccgggccctcaataacacaagtgcaaggaaag

SEQ ID NO: 325158 - DNA, 33 bp, Homo sapien
gccgggccctcaataatacaagtgcaaggaaag

SEQ ID NO: 325159 - DNA, 33 bp, Homo sapien
tgagtcttcccattataaaataacctgattata

SEQ ID NO: 325160 - DNA, 33 bp, Homo sapien
tgagtcttcccattatgaaataacctgattata

SEQ ID NO: 325161 - DNA, 33 bp, Homo sapien
tccaataaataaaaagaaattcacgcatagaca

SEQ ID NO: 325162 - DNA, 33 bp, Homo sapien
tccaataaataaaaagcaattcacgcatagaca

SEQ ID NO: 325163 - DNA, 33 bp, Homo sapien
aaatagagcttgcaaaaatgtcctcttctcatc

SEQ ID NO: 325164 - DNA, 33 bp, Homo sapien
aaatagagcttgcaaagatgtcctcttctcatc

SEQ ID NO: 325165 - DNA, 33 bp, Homo sapien
aaggggaaaattaagacaacctgcattacacca

SEQ ID NO: 325166 - DNA, 33 bp, Homo sapien
aaggggaaaattaagataacctgcattacacca

SEQ ID NO: 325167 - DNA, 33 bp, Homo sapien
caacaacagaggaagaatcctgccgaggccacc

SEQ ID NO: 325168 - DNA, 33 bp, Homo sapien
caacaacagaggaagagtcctgccgaggccacc

SEQ ID NO: 325169 - DNA, 33 bp, Homo sapien
taatgacctcattaaaaggctggagggaactaa

SEQ ID NO: 325170 - DNA, 33 bp, Homo sapien
taatgacctcattaaagggctggagggaactaa

SEQ ID NO: 325171 - DNA, 33 bp, Homo sapien
tctgttaccgacccaccgtatacgccatttggg

SEQ ID NO: 325172 - DNA, 33 bp, Homo sapien
tctgttaccgacccactgtatacgccatttggg

SEQ ID NO: 325173 - DNA, 33 bp, Homo sapien
tccattgaattggctccattacccgcaacgcac

SEQ ID NO: 325174 - DNA, 33 bp, Homo sapien
tccattgaattggctcgattacccgcaacgcac

SEQ ID NO: 325175 - DNA, 33 bp, Homo sapien
gaatggcaaggaagtccatctctctgagaggca

SEQ ID NO: 325176 - DNA, 33 bp, Homo sapien
gaatggcaaggaagtctatctctctgagaggca

SEQ ID NO: 325177 - DNA, 33 bp, Homo sapien
aaagcatggctggcctcaggactaatgaattaa

SEQ ID NO: 325178 - DNA, 33 bp, Homo sapien
aaagcatggctggcctgaggactaatgaattaa

SEQ ID NO: 325179 - DNA, 33 bp, Homo sapien
gatggatggaaggaagcatgaaaggatggatgg

SEQ ID NO: 325180 - DNA, 33 bp, Homo sapien
gatggatggaaggaaggatgaaaggatggatgg

SEQ ID NO: 325181 - DNA, 33 bp, Homo sapien
aatcagcagttttcaacgtatttactgtttctc

SEQ ID NO: 325182 - DNA, 33 bp, Homo sapien
aatcagcagttttcaatgtatttactgtttctc

SEQ ID NO: 325183 - DNA, 33 bp, Homo sapien
aataagagaaaacaacagaactcggggaccaat

SEQ ID NO: 325184 - DNA, 33 bp, Homo sapien
aataagagaaaacaacggaactcggggaccaat

SEQ ID NO: 325185 - DNA, 33 bp, Homo sapien
gcacaacaagtaaacagtattaggcccagttta

SEQ ID NO: 325186 - DNA, 33 bp, Homo sapien
gcacaacaagtaaacattattaggcccagttta

SEQ ID NO: 325187 - DNA, 33 bp, Homo sapien
gcatttctgagtcccgaccccactagttgagat

SEQ ID NO: 325188 - DNA, 33 bp, Homo sapien
gcatttctgagtcccgtccccactagttgagat

SEQ ID NO: 325189 - DNA, 33 bp, Homo sapien
gtgcacgacaacatccaactaatttttgtgttt

SEQ ID NO: 325190 - DNA, 33 bp, Homo sapien
gtgcacgacaacatccgactaatttttgtgttt

SEQ ID NO: 325191 - DNA, 33 bp, Homo sapien
aaaaggagaaaaaggcagagctcagagaaatta

SEQ ID NO: 325192 - DNA, 33 bp, Homo sapien
aaaaggagaaaaaggcggagctcagagaaatta

SEQ ID NO: 325193 - DNA, 33 bp, Homo sapien
gatccaagatggcaaactggcaagtgctgtata

SEQ ID NO: 325194 - DNA, 33 bp, Homo sapien
gatccaagatggcaaattggcaagtgctgtata

SEQ ID NO: 325195 - DNA, 33 bp, Homo sapien
aataaaaccagggctgaaacagcaagcccccag

SEQ ID NO: 325196 - DNA, 33 bp, Homo sapien
aataaaaccagggctggaacagcaagcccccag

SEQ ID NO: 325197 - DNA, 33 bp, Homo sapien
agagatgtttcaggacacattctcctataatag

SEQ ID NO: 325198 - DNA, 33 bp, Homo sapien
agagatgtttcaggacgcattctcctataatag

SEQ ID NO: 325199 - DNA, 33 bp, Homo sapien
acgtgtgtatcccgtacaagcagtatccaatat

SEQ ID NO: 325200 - DNA, 33 bp, Homo sapien
acgtgtgtatcccgtataagcagtatccaatat

SEQ ID NO: 325201 - DNA, 33 bp, Homo sapien
actcccacctgtgcggaaccatttgagaggaag

SEQ ID NO: 325202 - DNA, 33 bp, Homo sapien
actcccacctgtgcgggaccatttgagaggaag

SEQ ID NO: 325203 - DNA, 33 bp, Homo sapien
acacagctaacccagcacctttctggcttactg

SEQ ID NO: 325204 - DNA, 33 bp, Homo sapien
acacagctaacccagcgcctttctggcttactg

SEQ ID NO: 325205 - DNA, 33 bp, Homo sapien
tcctgcgggtgagaatcagaagaagaccccaac

SEQ ID NO: 325206 - DNA, 33 bp, Homo sapien
tcctgcgggtgagaatgagaagaagaccccaac

SEQ ID NO: 325207 - DNA, 33 bp, Homo sapien
aatgtccactagagacaagggggtggaggccca

SEQ ID NO: 325208 - DNA, 33 bp, Homo sapien
aatgtccactagagacgagggggtggaggccca

SEQ ID NO: 325209 - DNA, 33 bp, Homo sapien
tgatgatgtcgatgccaaagagtgacacgccca

SEQ ID NO: 325210 - DNA, 33 bp, Homo sapien
tgatgatgtcgatgccgaagagtgacacgccca

SEQ ID NO: 325211 - DNA, 33 bp, Homo sapien
acagcgccgcaacaatcatgcatgagggagtga

SEQ ID NO: 325212 - DNA, 33 bp, Homo sapien
acagcgccgcaacaattatgcatgagggagtga

SEQ ID NO: 325213 - DNA, 33 bp, Homo sapien
agccaggattaaaacccagacagcccaggtcct

SEQ ID NO: 325214 - DNA, 33 bp, Homo sapien
agccaggattaaaaccgagacagcccaggtcct

SEQ ID NO: 325215 - DNA, 33 bp, Homo sapien
cttggccagggtcatacggctgatataagatgg

SEQ ID NO: 325216 - DNA, 33 bp, Homo sapien
cttggccagggtcatatggctgatataagatgg

SEQ ID NO: 325217 - DNA, 33 bp, Homo sapien
agacttcaggaacatcaattccaggagctggga

SEQ ID NO: 325218 - DNA, 33 bp, Homo sapien
agacttcaggaacatcgattccaggagctggga

SEQ ID NO: 325219 - DNA, 33 bp, Homo sapien
ggacctagatgcggggaagaaccctccagccgt

SEQ ID NO: 325220 - DNA, 33 bp, Homo sapien
ggacctagatgcggggcagaaccctccagccgt

SEQ ID NO: 325221 - DNA, 33 bp, Homo sapien
ggctaacttaacccgaacgcgtgggtcctgggg

SEQ ID NO: 325222 - DNA, 33 bp, Homo sapien
ggctaacttaacccgagcgcgtgggtcctgggg

SEQ ID NO: 325223 - DNA, 33 bp, Homo sapien
taacatcctttctgccccttaagttctagatta

SEQ ID NO: 325224 - DNA, 33 bp, Homo sapien
taacatcctttctgcctcttaagttctagatta

SEQ ID NO: 325225 - DNA, 33 bp, Homo sapien
actgctgcatgttaaacggcctccctgtccttt

SEQ ID NO: 325226 - DNA, 33 bp, Homo sapien
actgctgcatgttaaatggcctccctgtccttt

SEQ ID NO: 325227 - DNA, 33 bp, Homo sapien
gcggttcacgtttgccacaaatgtgatttcaca

SEQ ID NO: 325228 - DNA, 33 bp, Homo sapien
gcggttcacgtttgccccaaatgtgatttcaca

SEQ ID NO: 325229 - DNA, 33 bp, Homo sapien
ttttcttcaccaggacaaagggaatcttacccg

SEQ ID NO: 325230 - DNA, 33 bp, Homo sapien
ttttcttcaccaggacgaagggaatcttacccg

SEQ ID NO: 325231 - DNA, 33 bp, Homo sapien
ccatcccactaggcacacctgaaaacagctacc

SEQ ID NO: 325232 - DNA, 33 bp, Homo sapien
ccatcccactaggcacgcctgaaaacagctacc

SEQ ID NO: 325233 - DNA, 33 bp, Homo sapien
ccaaacagattgcatgcaggcccaggtatatct

SEQ ID NO: 325234 - DNA, 33 bp, Homo sapien
ccaaacagattgcatggaggcccaggtatatct

SEQ ID NO: 325235 - DNA, 33 bp, Homo sapien
cccaaatgaggacccacgttgcctccgacttcc

SEQ ID NO: 325236 - DNA, 33 bp, Homo sapien
cccaaatgaggacccatgttgcctccgacttcc

SEQ ID NO: 325237 - DNA, 33 bp, Homo sapien
taggaaatactctcaccgccttaaatagaagca

SEQ ID NO: 325238 - DNA, 33 bp, Homo sapien
taggaaatactctcactgccttaaatagaagca

SEQ ID NO: 325239 - DNA, 33 bp, Homo sapien
taagaaaggaaacagacgtgcgagtacacctgg

SEQ ID NO: 325240 - DNA, 33 bp, Homo sapien
taagaaaggaaacagatgtgcgagtacacctgg

SEQ ID NO: 325241 - DNA, 33 bp, Homo sapien
attgtgataaacatccacttttgatactgtttg

SEQ ID NO: 325242 - DNA, 33 bp, Homo sapien
attgtgataaacatccgcttttgatactgtttg

SEQ ID NO: 325243 - DNA, 33 bp, Homo sapien
catagttgtaaacaaaattgtggttctgttgta

SEQ ID NO: 325244 - DNA, 33 bp, Homo sapien
catagttgtaaacaaagttgtggttctgttgta

SEQ ID NO: 325245 - DNA, 33 bp, Homo sapien
ggggtattgattgctacgagccagggacaagca

SEQ ID NO: 325246 - DNA, 33 bp, Homo sapien
ggggtattgattgctatgagccagggacaagca

SEQ ID NO: 325247 - DNA, 33 bp, Homo sapien
ctccacctcattccccactttttacacagaaga

SEQ ID NO: 325248 - DNA, 33 bp, Homo sapien
ctccacctcattccccgctttttacacagaaga

SEQ ID NO: 325249 - DNA, 33 bp, Homo sapien
gccaggtgtggacacacgctcgtcaagtggtga

SEQ ID NO: 325250 - DNA, 33 bp, Homo sapien
gccaggtgtggacacatgctcgtcaagtggtga

SEQ ID NO: 325251 - DNA, 33 bp, Homo sapien
aggagtccttcaacacagactctgggcatgtag

SEQ ID NO: 325252 - DNA, 33 bp, Homo sapien
aggagtccttcaacacggactctgggcatgtag

SEQ ID NO: 325253 - DNA, 33 bp, Homo sapien
tcaactgacacaccaaccacagaagttaagaag

SEQ ID NO: 325254 - DNA, 33 bp, Homo sapien
tcaactgacacaccaatcacagaagttaagaag

SEQ ID NO: 325255 - DNA, 33 bp, Homo sapien
gcagagctgtttacagacatctattggcctccc

SEQ ID NO: 325256 - DNA, 33 bp, Homo sapien
gcagagctgtttacaggcatctattggcctccc

SEQ ID NO: 325257 - DNA, 33 bp, Homo sapien
ctgcaaacccttacacacaaaggcctcttctgg

SEQ ID NO: 325258 - DNA, 33 bp, Homo sapien
ctgcaaacccttacacgcaaaggcctcttctgg

SEQ ID NO: 325259 - DNA, 33 bp, Homo sapien
cggacgcttcctcctacgtgaagttctgtttgc

SEQ ID NO: 325260 - DNA, 33 bp, Homo sapien
cggacgcttcctcctatgtgaagttctgtttgc

SEQ ID NO: 325261 - DNA, 33 bp, Homo sapien
agtgtgtaactggcctcaacagatgtttgctaa

SEQ ID NO: 325262 - DNA, 33 bp, Homo sapien
agtgtgtaactggccttaacagatgtttgctaa

SEQ ID NO: 325263 - DNA, 33 bp, Homo sapien
ccaccctgagggaatcaaaggctaggcacaaag

SEQ ID NO: 325264 - DNA, 33 bp, Homo sapien
ccaccctgagggaatcgaaggctaggcacaaag

SEQ ID NO: 325265 - DNA, 33 bp, Homo sapien
aaagggaaagagaccaaagtcgcaagttaaaat

SEQ ID NO: 325266 - DNA, 33 bp, Homo sapien
aaagggaaagagaccagagtcgcaagttaaaat

SEQ ID NO: 325267 - DNA, 33 bp, Homo sapien
atcccttatggcttataactgtgagcaagtcac

SEQ ID NO: 325268 - DNA, 33 bp, Homo sapien
atcccttatggcttatcactgtgagcaagtcac

SEQ ID NO: 325269 - DNA, 33 bp, Homo sapien
gatcatggactttctcccgcaagaaacacacag

SEQ ID NO: 325270 - DNA, 33 bp, Homo sapien
gatcatggactttctcgcgcaagaaacacacag

SEQ ID NO: 325271 - DNA, 33 bp, Homo sapien
ttggtttcatagggaccaagactagagatgctg

SEQ ID NO: 325272 - DNA, 33 bp, Homo sapien
ttggtttcatagggactaagactagagatgctg

SEQ ID NO: 325273 - DNA, 33 bp, Homo sapien
ttctgtggactggggagcagagaaagtcaatct

SEQ ID NO: 325274 - DNA, 33 bp, Homo sapien
ttctgtggactggggatcagagaaagtcaatct

SEQ ID NO: 325275 - DNA, 33 bp, Homo sapien
aaggaacatcatttgcacttaggaaaaagccgg

SEQ ID NO: 325276 - DNA, 33 bp, Homo sapien
aaggaacatcatttgcgcttaggaaaaagccgg

SEQ ID NO: 325277 - DNA, 33 bp, Homo sapien
ggcagctcaaacaataagtggctacgtccgtgt

SEQ ID NO: 325278 - DNA, 33 bp, Homo sapien
ggcagctcaaacaataggtggctacgtccgtgt

SEQ ID NO: 325279 - DNA, 33 bp, Homo sapien
gttcacctctagtccaatcaacggccagagggc

SEQ ID NO: 325280 - DNA, 33 bp, Homo sapien
gttcacctctagtccattcaacggccagagggc

SEQ ID NO: 325281 - DNA, 33 bp, Homo sapien
cagtggaccaggaagcaatgaaagacacttctg

SEQ ID NO: 325282 - DNA, 33 bp, Homo sapien
cagtggaccaggaagcgatgaaagacacttctg

SEQ ID NO: 325283 - DNA, 33 bp, Homo sapien
ttcccatataatctgggactccaggatacagga

SEQ ID NO: 325284 - DNA, 33 bp, Homo sapien
ttcccatataatctggtactccaggatacagga

SEQ ID NO: 325285 - DNA, 33 bp, Homo sapien
tcccttcatttcaaaactggtggaactctgaat

SEQ ID NO: 325286 - DNA, 33 bp, Homo sapien
tcccttcatttcaaaattggtggaactctgaat

SEQ ID NO: 325287 - DNA, 33 bp, Homo sapien
gctggagtttgacatccgagcaagacctaagct

SEQ ID NO: 325288 - DNA, 33 bp, Homo sapien
gctggagtttgacatctgagcaagacctaagct

SEQ ID NO: 325289 - DNA, 33 bp, Homo sapien
cctttaagaagcctacaataggaaaaggacaga

SEQ ID NO: 325290 - DNA, 33 bp, Homo sapien
cctttaagaagcctacgataggaaaaggacaga

SEQ ID NO: 325291 - DNA, 33 bp, Homo sapien
actgacctaacggacaataaaatcccaacagac

SEQ ID NO: 325292 - DNA, 33 bp, Homo sapien
actgacctaacggacagtaaaatcccaacagac

SEQ ID NO: 325293 - DNA, 33 bp, Homo sapien
ggtaatgtgtgaagtacgagccatcaagaaata

SEQ ID NO: 325294 - DNA, 33 bp, Homo sapien
ggtaatgtgtgaagtatgagccatcaagaaata

SEQ ID NO: 325295 - DNA, 33 bp, Homo sapien
ctgatgctataaaagtcacataaaagtggtggc

SEQ ID NO: 325296 - DNA, 33 bp, Homo sapien
ctgatgctataaaagttacataaaagtggtggc

SEQ ID NO: 325297 - DNA, 33 bp, Homo sapien
tggcgagcgcggagagaacgccatgaaggcctc

SEQ ID NO: 325298 - DNA, 33 bp, Homo sapien
tggcgagcgcggagaggacgccatgaaggcctc

SEQ ID NO: 325299 - DNA, 33 bp, Homo sapien
aacctcaaagacaccccgagcctttgaacggag

SEQ ID NO: 325300 - DNA, 33 bp, Homo sapien
aacctcaaagacaccctgagcctttgaacggag

SEQ ID NO: 325301 - DNA, 33 bp, Homo sapien
tggggtctagatgaacagcagaacaaagcaatg

SEQ ID NO: 325302 - DNA, 33 bp, Homo sapien
tggggtctagatgaacggcagaacaaagcaatg

SEQ ID NO: 325303 - DNA, 33 bp, Homo sapien
gcattattttgtatacagcttctttcacttcat

SEQ ID NO: 325304 - DNA, 33 bp, Homo sapien
gcattattttgtatactgcttctttcacttcat

SEQ ID NO: 325305 - DNA, 33 bp, Homo sapien
aaggcaaattggaaacacgcgccagcggcagtg

SEQ ID NO: 325306 - DNA, 33 bp, Homo sapien
aaggcaaattggaaacgcgcgccagcggcagtg

SEQ ID NO: 325307 - DNA, 33 bp, Homo sapien
acttttttgcattttacctttcatctaccaatc

SEQ ID NO: 325308 - DNA, 33 bp, Homo sapien
acttttttgcattttatctttcatctaccaatc

SEQ ID NO: 325309 - DNA, 33 bp, Homo sapien
gaaaaagcacatacgacgaaaaggaaataagcc

SEQ ID NO: 325310 - DNA, 33 bp, Homo sapien
gaaaaagcacatacgatgaaaaggaaataagcc

SEQ ID NO: 325311 - DNA, 33 bp, Homo sapien
ttagcacatactaagaaagcatgaaagttaaga

SEQ ID NO: 325312 - DNA, 33 bp, Homo sapien
ttagcacatactaagagagcatgaaagttaaga

SEQ ID NO: 325313 - DNA, 33 bp, Homo sapien
tacaggaggattctgcacttacctgtcacatat

SEQ ID NO: 325314 - DNA, 33 bp, Homo sapien
tacaggaggattctgcccttacctgtcacatat

SEQ ID NO: 325315 - DNA, 33 bp, Homo sapien
aatatgaatctggaagccgtttatatatttcct

SEQ ID NO: 325316 - DNA, 33 bp, Homo sapien
aatatgaatctggaagtcgtttatatatttcct

SEQ ID NO: 325317 - DNA, 33 bp, Homo sapien
cagctgacatgagaaaataagactcacaggatg

SEQ ID NO: 325318 - DNA, 33 bp, Homo sapien
cagctgacatgagaaagtaagactcacaggatg

SEQ ID NO: 325319 - DNA, 33 bp, Homo sapien
tgctaaggatttgaacaaaggtggtattctagt

SEQ ID NO: 325320 - DNA, 33 bp, Homo sapien
tgctaaggatttgaactaaggtggtattctagt

SEQ ID NO: 325321 - DNA, 33 bp, Homo sapien
accagtgtcaaaactggagatttttgtatctgc

SEQ ID NO: 325322 - DNA, 33 bp, Homo sapien
accagtgtcaaaactgtagatttttgtatctgc

SEQ ID NO: 325323 - DNA, 33 bp, Homo sapien
atcaatcgtattatctaaagtctgctgaagtgc

SEQ ID NO: 325324 - DNA, 33 bp, Homo sapien
atcaatcgtattatctgaagtctgctgaagtgc

SEQ ID NO: 325325 - DNA, 33 bp, Homo sapien
tttttaggaatgaaaaataggcagagttgtaaa

SEQ ID NO: 325326 - DNA, 33 bp, Homo sapien
tttttaggaatgaaaagtaggcagagttgtaaa

SEQ ID NO: 325327 - DNA, 33 bp, Homo sapien
caaacgtaaatcttaaatctggtttgtatggtt

SEQ ID NO: 325328 - DNA, 33 bp, Homo sapien
caaacgtaaatcttaagtctggtttgtatggtt

SEQ ID NO: 325329 - DNA, 33 bp, Homo sapien
tatactaatacttcacccctgtcaaatctaagg

SEQ ID NO: 325330 - DNA, 33 bp, Homo sapien
tatactaatacttcactcctgtcaaatctaagg

SEQ ID NO: 325331 - DNA, 33 bp, Homo sapien
atgaatgaaatagtaaaaacgtttgcttgctct

SEQ ID NO: 325332 - DNA, 33 bp, Homo sapien
atgaatgaaatagtaataacgtttgcttgctct

SEQ ID NO: 325333 - DNA, 33 bp, Homo sapien
actgagaaaatgcccacgtaacatagacaattg

SEQ ID NO: 325334 - DNA, 33 bp, Homo sapien
actgagaaaatgcccatgtaacatagacaattg

SEQ ID NO: 325335 - DNA, 33 bp, Homo sapien
cttggcaggtctctggaaaattggattttggga

SEQ ID NO: 325336 - DNA, 33 bp, Homo sapien
cttggcaggtctctgggaaattggattttggga

SEQ ID NO: 325337 - DNA, 33 bp, Homo sapien
atttcacaaggattgtaacaagtcaatgcatcc

SEQ ID NO: 325338 - DNA, 33 bp, Homo sapien
atttcacaaggattgtcacaagtcaatgcatcc

SEQ ID NO: 325339 - DNA, 33 bp, Homo sapien
gtgaaaataatagaagaagcgagaagaatgcca

SEQ ID NO: 325340 - DNA, 33 bp, Homo sapien
gtgaaaataatagaaggagcgagaagaatgcca

SEQ ID NO: 325341 - DNA, 33 bp, Homo sapien
taattttacactcataaaggtgtcacattcaag

SEQ ID NO: 325342 - DNA, 33 bp, Homo sapien
taattttacactcatacaggtgtcacattcaag

SEQ ID NO: 325343 - DNA, 33 bp, Homo sapien
ggttcacttgtttacaatatttgctaaggtata

SEQ ID NO: 325344 - DNA, 33 bp, Homo sapien
ggttcacttgtttacagtatttgctaaggtata

SEQ ID NO: 325345 - DNA, 33 bp, Homo sapien
ttgtgtgaaattcttcaacttgattccccttct

SEQ ID NO: 325346 - DNA, 33 bp, Homo sapien
ttgtgtgaaattcttcgacttgattccccttct

SEQ ID NO: 325347 - DNA, 33 bp, Homo sapien
aattacctagtctacaatagttttttatagcag

SEQ ID NO: 325348 - DNA, 33 bp, Homo sapien
aattacctagtctacagtagttttttatagcag

SEQ ID NO: 325349 - DNA, 33 bp, Homo sapien
atgggtggaaaaaaagaatgactgtaagaactg

SEQ ID NO: 325350 - DNA, 33 bp, Homo sapien
atgggtggaaaaaaaggatgactgtaagaactg

SEQ ID NO: 325351 - DNA, 33 bp, Homo sapien
tagcctgtaaatgaaccgaatggatctccttct

SEQ ID NO: 325352 - DNA, 33 bp, Homo sapien
tagcctgtaaatgaactgaatggatctccttct

SEQ ID NO: 325353 - DNA, 33 bp, Homo sapien
aggtgctttttgtggacaaatagttgttaaatt

SEQ ID NO: 325354 - DNA, 33 bp, Homo sapien
aggtgctttttgtggataaatagttgttaaatt

SEQ ID NO: 325355 - DNA, 33 bp, Homo sapien
cagctcatggcttcaaaagaggtcccttccttc

SEQ ID NO: 325356 - DNA, 33 bp, Homo sapien
cagctcatggcttcaacagaggtcccttccttc

SEQ ID NO: 325357 - DNA, 33 bp, Homo sapien
tgaatttccaacataacactactgcaaaacaag

SEQ ID NO: 325358 - DNA, 33 bp, Homo sapien
tgaatttccaacataatactactgcaaaacaag

SEQ ID NO: 325359 - DNA, 33 bp, Homo sapien
tttcattggtctcaggaacttggtcttccaata

SEQ ID NO: 325360 - DNA, 33 bp, Homo sapien
tttcattggtctcagggacttggtcttccaata

SEQ ID NO: 325361 - DNA, 33 bp, Homo sapien
gcatttgactactatcaccatgtcttctaatgt

SEQ ID NO: 325362 - DNA, 33 bp, Homo sapien
gcatttgactactatcgccatgtcttctaatgt

SEQ ID NO: 325363 - DNA, 33 bp, Homo sapien
acatttatgattgttacgttttcctgttgaata

SEQ ID NO: 325364 - DNA, 33 bp, Homo sapien
acatttatgattgttatgttttcctgttgaata

SEQ ID NO: 325365 - DNA, 33 bp, Homo sapien
agtgaatttaagtggaaataatgttagcaacca

SEQ ID NO: 325366 - DNA, 33 bp, Homo sapien
agtgaatttaagtggagataatgttagcaacca

SEQ ID NO: 325367 - DNA, 33 bp, Homo sapien
ctcatagttatgaagcacctataccgaaattat

SEQ ID NO: 325368 - DNA, 33 bp, Homo sapien
ctcatagttatgaagcgcctataccgaaattat

SEQ ID NO: 325369 - DNA, 33 bp, Homo sapien
ccttacatgtttttaacgatggaatattgttag

SEQ ID NO: 325370 - DNA, 33 bp, Homo sapien
ccttacatgtttttaatgatggaatattgttag

SEQ ID NO: 325371 - DNA, 33 bp, Homo sapien
tcttgccaatccttcaataaccacaaagatcct

SEQ ID NO: 325372 - DNA, 33 bp, Homo sapien
tcttgccaatccttcattaaccacaaagatcct

SEQ ID NO: 325373 - DNA, 33 bp, Homo sapien
cccaatgagattcactaaaaatccacaaagttt

SEQ ID NO: 325374 - DNA, 33 bp, Homo sapien
cccaatgagattcactgaaaatccacaaagttt

SEQ ID NO: 325375 - DNA, 33 bp, Homo sapien
gcctcaattagacatcaccttataactttctga

SEQ ID NO: 325376 - DNA, 33 bp, Homo sapien
gcctcaattagacatcgccttataactttctga

SEQ ID NO: 325377 - DNA, 33 bp, Homo sapien
tagaatagaggtctctcaaggaattttataaag

SEQ ID NO: 325378 - DNA, 33 bp, Homo sapien
tagaatagaggtctcttaaggaattttataaag

SEQ ID NO: 325379 - DNA, 33 bp, Homo sapien
agctgttaggaatagacaaggtgagctattttt

SEQ ID NO: 325380 - DNA, 33 bp, Homo sapien
agctgttaggaatagataaggtgagctattttt

SEQ ID NO: 325381 - DNA, 33 bp, Homo sapien
tgggggaaattttgtacagaggcttgacaagga

SEQ ID NO: 325382 - DNA, 33 bp, Homo sapien
tgggggaaattttgtagagaggcttgacaagga

SEQ ID NO: 325383 - DNA, 33 bp, Homo sapien
ctttacaactagaaggccattattgctttggac

SEQ ID NO: 325384 - DNA, 33 bp, Homo sapien
ctttacaactagaagggcattattgctttggac

SEQ ID NO: 325385 - DNA, 33 bp, Homo sapien
tcttgtctctagaaaccccctctctgagctgca

SEQ ID NO: 325386 - DNA, 33 bp, Homo sapien
tcttgtctctagaaactccctctctgagctgca

SEQ ID NO: 325387 - DNA, 33 bp, Homo sapien
ccaggaaaatatgttacgattgtcaggttgaag

SEQ ID NO: 325388 - DNA, 33 bp, Homo sapien
ccaggaaaatatgttatgattgtcaggttgaag

SEQ ID NO: 325389 - DNA, 33 bp, Homo sapien
cgaaatcagtgctcagaaacctttctcctagac

SEQ ID NO: 325390 - DNA, 33 bp, Homo sapien
cgaaatcagtgctcaggaacctttctcctagac

SEQ ID NO: 325391 - DNA, 33 bp, Homo sapien
tgtactggaattcaggaatgtcaaccctaaatg

SEQ ID NO: 325392 - DNA, 33 bp, Homo sapien
tgtactggaattcagggatgtcaaccctaaatg

SEQ ID NO: 325393 - DNA, 33 bp, Homo sapien
tgtaagttttaccaatcagtggcaaaaaccaga

SEQ ID NO: 325394 - DNA, 33 bp, Homo sapien
tgtaagttttaccaattagtggcaaaaaccaga

SEQ ID NO: 325395 - DNA, 33 bp, Homo sapien
tcttgttttgattagcaccagaaaaagtcctcc

SEQ ID NO: 325396 - DNA, 33 bp, Homo sapien
tcttgttttgattagcgccagaaaaagtcctcc

SEQ ID NO: 325397 - DNA, 33 bp, Homo sapien
ggtcagggtttaggcacgttggcacgttacact

SEQ ID NO: 325398 - DNA, 33 bp, Homo sapien
ggtcagggtttaggcatgttggcacgttacact

SEQ ID NO: 325399 - DNA, 33 bp, Homo sapien
actcattgtaatgaccggacagccatgactgaa

SEQ ID NO: 325400 - DNA, 33 bp, Homo sapien
actcattgtaatgacctgacagccatgactgaa

SEQ ID NO: 325401 - DNA, 33 bp, Homo sapien
ttaattgaaaatgaaaccttcggctcagcttac

SEQ ID NO: 325402 - DNA, 33 bp, Homo sapien
ttaattgaaaatgaaatcttcggctcagcttac

SEQ ID NO: 325403 - DNA, 33 bp, Homo sapien
ggaaagatatgcacaagataacattacagaaag

SEQ ID NO: 325404 - DNA, 33 bp, Homo sapien
ggaaagatatgcacaatataacattacagaaag

SEQ ID NO: 325405 - DNA, 33 bp, Homo sapien
cacaaattgaagcaaaccatagctaattcttcc

SEQ ID NO: 325406 - DNA, 33 bp, Homo sapien
cacaaattgaagcaaatcatagctaattcttcc

SEQ ID NO: 325407 - DNA, 33 bp, Homo sapien
gctcaaggtaattaaacgatgctatgtggtaaa

SEQ ID NO: 325408 - DNA, 33 bp, Homo sapien
gctcaaggtaattaaatgatgctatgtggtaaa

SEQ ID NO: 325409 - DNA, 33 bp, Homo sapien
taggattgagctacaaagaacctactgcctcat

SEQ ID NO: 325410 - DNA, 33 bp, Homo sapien
taggattgagctacaaggaacctactgcctcat

SEQ ID NO: 325411 - DNA, 33 bp, Homo sapien
ttcatatctggctaacaaactcttctgaaaggc

SEQ ID NO: 325412 - DNA, 33 bp, Homo sapien
ttcatatctggctaaccaactcttctgaaaggc

SEQ ID NO: 325413 - DNA, 33 bp, Homo sapien
gttgtctttaatgaaacagcctgtgtgatagtg

SEQ ID NO: 325414 - DNA, 33 bp, Homo sapien
gttgtctttaatgaaagagcctgtgtgatagtg

SEQ ID NO: 325415 - DNA, 33 bp, Homo sapien
ggcaaagaaccaggcgccgagggagagaatagc

SEQ ID NO: 325416 - DNA, 33 bp, Homo sapien
ggcaaagaaccaggcgtcgagggagagaatagc

SEQ ID NO: 325417 - DNA, 33 bp, Homo sapien
ggctcagctatgcacaatatgttctttgttaca

SEQ ID NO: 325418 - DNA, 33 bp, Homo sapien
ggctcagctatgcacagtatgttctttgttaca

SEQ ID NO: 325419 - DNA, 33 bp, Homo sapien
gactgcccccaaagaacggtggatcacagtcag

SEQ ID NO: 325420 - DNA, 33 bp, Homo sapien
gactgcccccaaagaatggtggatcacagtcag

SEQ ID NO: 325421 - DNA, 33 bp, Homo sapien
ttggtgggcatacaaacaggtaagacagaggct

SEQ ID NO: 325422 - DNA, 33 bp, Homo sapien
ttggtgggcatacaaagaggtaagacagaggct

SEQ ID NO: 325423 - DNA, 33 bp, Homo sapien
gtgatcccagcagctacggatgttaatgacaat

SEQ ID NO: 325424 - DNA, 33 bp, Homo sapien
gtgatcccagcagctatggatgttaatgacaat

SEQ ID NO: 325425 - DNA, 33 bp, Homo sapien
acaaagcaaccagtctaacctattaagtgtctg

SEQ ID NO: 325426 - DNA, 33 bp, Homo sapien
acaaagcaaccagtctgacctattaagtgtctg

SEQ ID NO: 325427 - DNA, 33 bp, Homo sapien
gaggtgactcacactcagaagggccaaatgact

SEQ ID NO: 325428 - DNA, 33 bp, Homo sapien
gaggtgactcacactcggaagggccaaatgact

SEQ ID NO: 325429 - DNA, 33 bp, Homo sapien
aagtaatgaccaggaacgtttgcagggcgtcct

SEQ ID NO: 325430 - DNA, 33 bp, Homo sapien
aagtaatgaccaggaatgtttgcagggcgtcct

SEQ ID NO: 325431 - DNA, 33 bp, Homo sapien
actgttctcacaaaagaatcatgtctggtccgt

SEQ ID NO: 325432 - DNA, 33 bp, Homo sapien
actgttctcacaaaaggatcatgtctggtccgt

SEQ ID NO: 325433 - DNA, 33 bp, Homo sapien
ctcagccgtcaggcataaggacggaccagacat

SEQ ID NO: 325434 - DNA, 33 bp, Homo sapien
ctcagccgtcaggcattaggacggaccagacat

SEQ ID NO: 325435 - DNA, 33 bp, Homo sapien
ccagctttcagaacaacgtcttagcggcctcct

SEQ ID NO: 325436 - DNA, 33 bp, Homo sapien
ccagctttcagaacaatgtcttagcggcctcct

SEQ ID NO: 325437 - DNA, 33 bp, Homo sapien
attctggctcaggcacaaaggtctctgaactgt

SEQ ID NO: 325438 - DNA, 33 bp, Homo sapien
attctggctcaggcacgaaggtctctgaactgt

SEQ ID NO: 325439 - DNA, 33 bp, Homo sapien
ggacacattttgaccaatgaaggacaagaggtg

SEQ ID NO: 325440 - DNA, 33 bp, Homo sapien
ggacacattttgaccagtgaaggacaagaggtg

SEQ ID NO: 325441 - DNA, 33 bp, Homo sapien
ctttctcagcgcctgacgtagaaggattcactt

SEQ ID NO: 325442 - DNA, 33 bp, Homo sapien
ctttctcagcgcctgatgtagaaggattcactt

SEQ ID NO: 325443 - DNA, 33 bp, Homo sapien
cacttctgtcccacaccatacatattataagca

SEQ ID NO: 325444 - DNA, 33 bp, Homo sapien
cacttctgtcccacactatacatattataagca

SEQ ID NO: 325445 - DNA, 33 bp, Homo sapien
caggaagtacaatcgcaccaggacactgaaagc

SEQ ID NO: 325446 - DNA, 33 bp, Homo sapien
caggaagtacaatcgcgccaggacactgaaagc

SEQ ID NO: 325447 - DNA, 33 bp, Homo sapien
tgaggttgacacaaaaagcacctggaatggaac

SEQ ID NO: 325448 - DNA, 33 bp, Homo sapien
tgaggttgacacaaaaggcacctggaatggaac

SEQ ID NO: 325449 - DNA, 33 bp, Homo sapien
catacggctgaagctacccttctctaaatcaca

SEQ ID NO: 325450 - DNA, 33 bp, Homo sapien
catacggctgaagctatccttctctaaatcaca

SEQ ID NO: 325451 - DNA, 33 bp, Homo sapien
ataacaaggcttacaaaagcttacagccaggaa

SEQ ID NO: 325452 - DNA, 33 bp, Homo sapien
ataacaaggcttacaagagcttacagccaggaa

SEQ ID NO: 325453 - DNA, 33 bp, Homo sapien
ttccccacctaccaaacaagcaatgaattctga

SEQ ID NO: 325454 - DNA, 33 bp, Homo sapien
ttccccacctaccaaataagcaatgaattctga

SEQ ID NO: 325455 - DNA, 33 bp, Homo sapien
attaaatccagagcaacgtcaaatcatggccaa

SEQ ID NO: 325456 - DNA, 33 bp, Homo sapien
attaaatccagagcaatgtcaaatcatggccaa

SEQ ID NO: 325457 - DNA, 33 bp, Homo sapien
cacattatagaaaatacctcaaagagactcaga

SEQ ID NO: 325458 - DNA, 33 bp, Homo sapien
cacattatagaaaatagctcaaagagactcaga

SEQ ID NO: 325459 - DNA, 33 bp, Homo sapien
gagttgtgttcactccagagctaaactggaagg

SEQ ID NO: 325460 - DNA, 33 bp, Homo sapien
gagttgtgttcactccggagctaaactggaagg

SEQ ID NO: 325461 - DNA, 33 bp, Homo sapien
agaacatgatttaaaaatgtatagtcaagaatg

SEQ ID NO: 325462 - DNA, 33 bp, Homo sapien
agaacatgatttaaaactgtatagtcaagaatg

SEQ ID NO: 325463 - DNA, 33 bp, Homo sapien
gtttcttctgaagaaaatgtgcaaatgatgcag

SEQ ID NO: 325464 - DNA, 33 bp, Homo sapien
gtttcttctgaagaaagtgtgcaaatgatgcag

SEQ ID NO: 325465 - DNA, 33 bp, Homo sapien
aaaggaaattcacataagaacaagtccagctgt

SEQ ID NO: 325466 - DNA, 33 bp, Homo sapien
aaaggaaattcacataggaacaagtccagctgt

SEQ ID NO: 325467 - DNA, 33 bp, Homo sapien
ttactcaatgatgaaaaagtatgaaatagtggt

SEQ ID NO: 325468 - DNA, 33 bp, Homo sapien
ttactcaatgatgaaagagtatgaaatagtggt

SEQ ID NO: 325469 - DNA, 33 bp, Homo sapien
tagcccctgcattaccaaacagaaatggtgtgg

SEQ ID NO: 325470 - DNA, 33 bp, Homo sapien
tagcccctgcattaccgaacagaaatggtgtgg

SEQ ID NO: 325471 - DNA, 33 bp, Homo sapien
tccctcttgcttaggggacatcagtcttttgtg

SEQ ID NO: 325472 - DNA, 33 bp, Homo sapien
tccctcttgcttagggtacatcagtcttttgtg

SEQ ID NO: 325473 - DNA, 33 bp, Homo sapien
ttccatgggtaaatcaaggcaaagacaggccct

SEQ ID NO: 325474 - DNA, 33 bp, Homo sapien
ttccatgggtaaatcacggcaaagacaggccct

SEQ ID NO: 325475 - DNA, 33 bp, Homo sapien
gccagcacacctcgacgctgcaccagctctgcc

SEQ ID NO: 325476 - DNA, 33 bp, Homo sapien
gccagcacacctcgactctgcaccagctctgcc

SEQ ID NO: 325477 - DNA, 33 bp, Homo sapien
atacacatgaaattaacgatatggacaacagat

SEQ ID NO: 325478 - DNA, 33 bp, Homo sapien
atacacatgaaattaatgatatggacaacagat

SEQ ID NO: 325479 - DNA, 33 bp, Homo sapien
ttcctttctcatataaatctgtaaatgcaggca

SEQ ID NO: 325480 - DNA, 33 bp, Homo sapien
ttcctttctcatataagtctgtaaatgcaggca

SEQ ID NO: 325481 - DNA, 33 bp, Homo sapien
atgcaggcaggcctggaaaactattggtttatc

SEQ ID NO: 325482 - DNA, 33 bp, Homo sapien
atgcaggcaggcctggcaaactattggtttatc

SEQ ID NO: 325483 - DNA, 33 bp, Homo sapien
atcagagttcaacttcactttctgcccaatcct

SEQ ID NO: 325484 - DNA, 33 bp, Homo sapien
atcagagttcaacttcgctttctgcccaatcct

SEQ ID NO: 325485 - DNA, 33 bp, Homo sapien
ccatttacttccacttgaaggcattcttaacca

SEQ ID NO: 325486 - DNA, 33 bp, Homo sapien
ccatttacttccactttaaggcattcttaacca

SEQ ID NO: 325487 - DNA, 33 bp, Homo sapien
gccctgcagctgccgagaggtgcaaggagatgc

SEQ ID NO: 325488 - DNA, 33 bp, Homo sapien
gccctgcagctgccgataggtgcaaggagatgc

SEQ ID NO: 325489 - DNA, 33 bp, Homo sapien
atcgaacaaacgccagaccttactgtgaaaaca

SEQ ID NO: 325490 - DNA, 33 bp, Homo sapien
atcgaacaaacgccaggccttactgtgaaaaca

SEQ ID NO: 325491 - DNA, 33 bp, Homo sapien
ccaataacctttatacacactgatgtggccaca

SEQ ID NO: 325492 - DNA, 33 bp, Homo sapien
ccaataacctttatacgcactgatgtggccaca

SEQ ID NO: 325493 - DNA, 33 bp, Homo sapien
gccagggcccaggtacaagctccctgtctctgc

SEQ ID NO: 325494 - DNA, 33 bp, Homo sapien
gccagggcccaggtacgagctccctgtctctgc

SEQ ID NO: 325495 - DNA, 33 bp, Homo sapien
acttctcgtttccttacgtaagacaggactgga

SEQ ID NO: 325496 - DNA, 33 bp, Homo sapien
acttctcgtttccttatgtaagacaggactgga

SEQ ID NO: 325497 - DNA, 33 bp, Homo sapien
actgatggcaggtgacagctgaggaatggtttt

SEQ ID NO: 325498 - DNA, 33 bp, Homo sapien
actgatggcaggtgacggctgaggaatggtttt

SEQ ID NO: 325499 - DNA, 33 bp, Homo sapien
ctacatgtggaaatagaaggctttgtgttttgt

SEQ ID NO: 325500 - DNA, 33 bp, Homo sapien
ctacatgtggaaataggaggctttgtgttttgt

SEQ ID NO: 325501 - DNA, 33 bp, Homo sapien
agatccgtgaagacacccagattctagtctgac

SEQ ID NO: 325502 - DNA, 33 bp, Homo sapien
agatccgtgaagacactcagattctagtctgac

SEQ ID NO: 325503 - DNA, 33 bp, Homo sapien
gtggtctgagtgggaccgtcaagcttgagtgtg

SEQ ID NO: 325504 - DNA, 33 bp, Homo sapien
gtggtctgagtgggactgtcaagcttgagtgtg

SEQ ID NO: 325505 - DNA, 33 bp, Homo sapien
tgggcaggagagtaaccggcctacctagtatga

SEQ ID NO: 325506 - DNA, 33 bp, Homo sapien
tgggcaggagagtaactggcctacctagtatga

SEQ ID NO: 325507 - DNA, 33 bp, Homo sapien
taagcagcacagtacaagtggccatcagtggcc

SEQ ID NO: 325508 - DNA, 33 bp, Homo sapien
taagcagcacagtacaggtggccatcagtggcc

SEQ ID NO: 325509 - DNA, 33 bp, Homo sapien
agaagaaaagaggagacatttaaacacataaga

SEQ ID NO: 325510 - DNA, 33 bp, Homo sapien
agaagaaaagaggagatatttaaacacataaga

SEQ ID NO: 325511 - DNA, 33 bp, Homo sapien
tattccaatagtcacaagtttcccccttttttt

SEQ ID NO: 325512 - DNA, 33 bp, Homo sapien
tattccaatagtcacacgtttcccccttttttt

SEQ ID NO: 325513 - DNA, 33 bp, Homo sapien
ctgcagctttgattagacaagagactgatttgt

SEQ ID NO: 325514 - DNA, 33 bp, Homo sapien
ctgcagctttgattaggcaagagactgatttgt

SEQ ID NO: 325515 - DNA, 33 bp, Homo sapien
tcctgggggtacccgaaaagatttccacacaga

SEQ ID NO: 325516 - DNA, 33 bp, Homo sapien
tcctgggggtacccgagaagatttccacacaga

SEQ ID NO: 325517 - DNA, 33 bp, Homo sapien
atccttgccctcaacaagctcagtcacaggcag

SEQ ID NO: 325518 - DNA, 33 bp, Homo sapien
atccttgccctcaacaggctcagtcacaggcag

SEQ ID NO: 325519 - DNA, 33 bp, Homo sapien
ggacactcaggtggaaggcagaagggcaggccc

SEQ ID NO: 325520 - DNA, 33 bp, Homo sapien
ggacactcaggtggaatgcagaagggcaggccc

SEQ ID NO: 325521 - DNA, 33 bp, Homo sapien
ctgcaaaacggacagaactccgggcattaaaga

SEQ ID NO: 325522 - DNA, 33 bp, Homo sapien
ctgcaaaacggacagagctccgggcattaaaga

SEQ ID NO: 325523 - DNA, 33 bp, Homo sapien
tctgagaaggtaggcaacacattcctagaatgt

SEQ ID NO: 325524 - DNA, 33 bp, Homo sapien
tctgagaaggtaggcaccacattcctagaatgt

SEQ ID NO: 325525 - DNA, 33 bp, Homo sapien
ggcagctggaaggctacgtgagataatatatga

SEQ ID NO: 325526 - DNA, 33 bp, Homo sapien
ggcagctggaaggctatgtgagataatatatga

SEQ ID NO: 325527 - DNA, 33 bp, Homo sapien
tatgggtgttaattacgctgaccttaggcaagt

SEQ ID NO: 325528 - DNA, 33 bp, Homo sapien
tatgggtgttaattactctgaccttaggcaagt

SEQ ID NO: 325529 - DNA, 33 bp, Homo sapien
acctgctctttaccccaaaacactcagttcaaa

SEQ ID NO: 325530 - DNA, 33 bp, Homo sapien
acctgctctttaccccgaaacactcagttcaaa

SEQ ID NO: 325531 - DNA, 33 bp, Homo sapien
cctgtgactgccttggaacggtggaaaaggttg

SEQ ID NO: 325532 - DNA, 33 bp, Homo sapien
cctgtgactgccttgggacggtggaaaaggttg

SEQ ID NO: 325533 - DNA, 33 bp, Homo sapien
ccactgatgggttacacgtgacctgaacagggc

SEQ ID NO: 325534 - DNA, 33 bp, Homo sapien
ccactgatgggttacatgtgacctgaacagggc

SEQ ID NO: 325535 - DNA, 33 bp, Homo sapien
cttctgcttgtgtccaactaacactccgagcca

SEQ ID NO: 325536 - DNA, 33 bp, Homo sapien
cttctgcttgtgtccagctaacactccgagcca

SEQ ID NO: 325537 - DNA, 33 bp, Homo sapien
tacagcacacaatgacaggacatggctcggagt

SEQ ID NO: 325538 - DNA, 33 bp, Homo sapien
tacagcacacaatgacgggacatggctcggagt

SEQ ID NO: 325539 - DNA, 33 bp, Homo sapien
acactgtctaaaaacaacaaactaagagggttg

SEQ ID NO: 325540 - DNA, 33 bp, Homo sapien
acactgtctaaaaacagcaaactaagagggttg

SEQ ID NO: 325541 - DNA, 33 bp, Homo sapien
tgggagagtatttatgaaaccaggtaagatagt

SEQ ID NO: 325542 - DNA, 33 bp, Homo sapien
tgggagagtatttatggaaccaggtaagatagt

SEQ ID NO: 325543 - DNA, 33 bp, Homo sapien
gactggagccatctcaaagtcctcctcactcat

SEQ ID NO: 325544 - DNA, 33 bp, Homo sapien
gactggagccatctcagagtcctcctcactcat

SEQ ID NO: 325545 - DNA, 33 bp, Homo sapien
ttgtactcatagcccacagttgtcatggtttta

SEQ ID NO: 325546 - DNA, 33 bp, Homo sapien
ttgtactcatagcccatagttgtcatggtttta

SEQ ID NO: 325547 - DNA, 33 bp, Homo sapien
tgccccagaaactttaacaaaggcttcaattca

SEQ ID NO: 325548 - DNA, 33 bp, Homo sapien
tgccccagaaactttatcaaaggcttcaattca

SEQ ID NO: 325549 - DNA, 33 bp, Homo sapien
ccccactgacatcttcaagcatcttagttccat

SEQ ID NO: 325550 - DNA, 33 bp, Homo sapien
ccccactgacatcttcgagcatcttagttccat

SEQ ID NO: 325551 - DNA, 33 bp, Homo sapien
cgtttgtaaaatgaaaatgttggactagattat

SEQ ID NO: 325552 - DNA, 33 bp, Homo sapien
cgtttgtaaaatgaaagtgttggactagattat

SEQ ID NO: 325553 - DNA, 33 bp, Homo sapien
atggttctatttgaaacagtacacaggcagccc

SEQ ID NO: 325554 - DNA, 33 bp, Homo sapien
atggttctatttgaaagagtacacaggcagccc

SEQ ID NO: 325555 - DNA, 33 bp, Homo sapien
gtaggtcactggatccactgcagacccaccatg

SEQ ID NO: 325556 - DNA, 33 bp, Homo sapien
gtaggtcactggatccgctgcagacccaccatg

SEQ ID NO: 325557 - DNA, 33 bp, Homo sapien
gaaattcatgtaggagaaagatactcagccccg

SEQ ID NO: 325558 - DNA, 33 bp, Homo sapien
gaaattcatgtaggaggaagatactcagccccg

SEQ ID NO: 325559 - DNA, 33 bp, Homo sapien
tggtgtgagttcgaggaaaggacaggagtattc

SEQ ID NO: 325560 - DNA, 33 bp, Homo sapien
tggtgtgagttcgagggaaggacaggagtattc

SEQ ID NO: 325561 - DNA, 33 bp, Homo sapien
aggaagtgctgctcacactggaggaagtggctg

SEQ ID NO: 325562 - DNA, 33 bp, Homo sapien
aggaagtgctgctcacgctggaggaagtggctg

SEQ ID NO: 325563 - DNA, 33 bp, Homo sapien
tgaccccggaagcagccaaaagcaaaagaggga

SEQ ID NO: 325564 - DNA, 33 bp, Homo sapien
tgaccccggaagcagctaaaagcaaaagaggga

SEQ ID NO: 325565 - DNA, 33 bp, Homo sapien
ctggcacttcacaaataagggcaaataaacaaa

SEQ ID NO: 325566 - DNA, 33 bp, Homo sapien
ctggcacttcacaaattagggcaaataaacaaa

SEQ ID NO: 325567 - DNA, 33 bp, Homo sapien
aggcaaaatgatgataaaatgaagagtgagtac

SEQ ID NO: 325568 - DNA, 33 bp, Homo sapien
aggcaaaatgatgatacaatgaagagtgagtac

SEQ ID NO: 325569 - DNA, 33 bp, Homo sapien
ttctgtctcacctcaacgtaaggcacagaattt

SEQ ID NO: 325570 - DNA, 33 bp, Homo sapien
ttctgtctcacctcaatgtaaggcacagaattt

SEQ ID NO: 325571 - DNA, 33 bp, Homo sapien
aaaacagaattctgttaaaaaccatttcccaat

SEQ ID NO: 325572 - DNA, 33 bp, Homo sapien
aaaacagaattctgttgaaaaccatttcccaat

SEQ ID NO: 325573 - DNA, 33 bp, Homo sapien
ctttattcacccattcactcattcacagatagc

SEQ ID NO: 325574 - DNA, 33 bp, Homo sapien
ctttattcacccattcgctcattcacagatagc

SEQ ID NO: 325575 - DNA, 33 bp, Homo sapien
gtccaaataaattcacagcaagtttagcaatag

SEQ ID NO: 325576 - DNA, 33 bp, Homo sapien
gtccaaataaattcactgcaagtttagcaatag

SEQ ID NO: 325577 - DNA, 33 bp, Homo sapien
ccatttctcccaggtcaagcagccctcatctga

SEQ ID NO: 325578 - DNA, 33 bp, Homo sapien
ccatttctcccaggtcgagcagccctcatctga

SEQ ID NO: 325579 - DNA, 33 bp, Homo sapien
tcaaatcatcttaacgaatgtctctcaggcctg

SEQ ID NO: 325580 - DNA, 33 bp, Homo sapien
tcaaatcatcttaacggatgtctctcaggcctg

SEQ ID NO: 325581 - DNA, 33 bp, Homo sapien
cagcctcagagaagcaacaaaggagtgggaagc

SEQ ID NO: 325582 - DNA, 33 bp, Homo sapien
cagcctcagagaagcagcaaaggagtgggaagc

SEQ ID NO: 325583 - DNA, 33 bp, Homo sapien
aaaaggaccctgatgcgcatacgttattggtcc

SEQ ID NO: 325584 - DNA, 33 bp, Homo sapien
aaaaggaccctgatgctcatacgttattggtcc

SEQ ID NO: 325585 - DNA, 33 bp, Homo sapien
gagatgaaggagttgacgtaaaagggctttgga

SEQ ID NO: 325586 - DNA, 33 bp, Homo sapien
gagatgaaggagttgatgtaaaagggctttgga

SEQ ID NO: 325587 - DNA, 33 bp, Homo sapien
cagtggcacgaaacaacccttttatcatagctt

SEQ ID NO: 325588 - DNA, 33 bp, Homo sapien
cagtggcacgaaacaatccttttatcatagctt

SEQ ID NO: 325589 - DNA, 33 bp, Homo sapien
gggtctggctgacacccctgcgatgctcatcac

SEQ ID NO: 325590 - DNA, 33 bp, Homo sapien
gggtctggctgacacctctgcgatgctcatcac

SEQ ID NO: 325591 - DNA, 33 bp, Homo sapien
ggatctggggcagtcacattaccagcaagtctg

SEQ ID NO: 325592 - DNA, 33 bp, Homo sapien
ggatctggggcagtcatattaccagcaagtctg

SEQ ID NO: 325593 - DNA, 33 bp, Homo sapien
cgaaaaccagatctccccatttccctgccaaaa

SEQ ID NO: 325594 - DNA, 33 bp, Homo sapien
cgaaaaccagatctccgcatttccctgccaaaa

SEQ ID NO: 325595 - DNA, 33 bp, Homo sapien
gagtacagatcctgcaaaactgcatacgaccca

SEQ ID NO: 325596 - DNA, 33 bp, Homo sapien
gagtacagatcctgcataactgcatacgaccca

SEQ ID NO: 325597 - DNA, 33 bp, Homo sapien
tcacagggtgagagccaaagctggttcagaaag

SEQ ID NO: 325598 - DNA, 33 bp, Homo sapien
tcacagggtgagagccgaagctggttcagaaag

SEQ ID NO: 325599 - DNA, 33 bp, Homo sapien
cctgcacttttcagaaccatacggatgagagag

SEQ ID NO: 325600 - DNA, 33 bp, Homo sapien
cctgcacttttcagaatcatacggatgagagag

SEQ ID NO: 325601 - DNA, 33 bp, Homo sapien
cttgatctagctcagacattttgtcacactcct

SEQ ID NO: 325602 - DNA, 33 bp, Homo sapien
cttgatctagctcagatattttgtcacactcct

SEQ ID NO: 325603 - DNA, 33 bp, Homo sapien
tttctcctctcaaaaacgaactcactatatatc

SEQ ID NO: 325604 - DNA, 33 bp, Homo sapien
tttctcctctcaaaaatgaactcactatatatc

SEQ ID NO: 325605 - DNA, 33 bp, Homo sapien
tggagcaaattcattccagacagaacacacgga

SEQ ID NO: 325606 - DNA, 33 bp, Homo sapien
tggagcaaattcattctagacagaacacacgga

SEQ ID NO: 325607 - DNA, 33 bp, Homo sapien
cagggtataaaactccaaccatgacgctggaga

SEQ ID NO: 325608 - DNA, 33 bp, Homo sapien
cagggtataaaactcccaccatgacgctggaga

SEQ ID NO: 325609 - DNA, 33 bp, Homo sapien
ttgactttcagcctcacgctcgcaggatggctg

SEQ ID NO: 325610 - DNA, 33 bp, Homo sapien
ttgactttcagcctcatgctcgcaggatggctg

SEQ ID NO: 325611 - DNA, 33 bp, Homo sapien
tggctgcccatagctgaaagggaggctaggaaa

SEQ ID NO: 325612 - DNA, 33 bp, Homo sapien
tggctgcccatagctgcaagggaggctaggaaa

SEQ ID NO: 325613 - DNA, 33 bp, Homo sapien
tgctttgccagcccacactatgatgtcagggca

SEQ ID NO: 325614 - DNA, 33 bp, Homo sapien
tgctttgccagcccacgctatgatgtcagggca

SEQ ID NO: 325615 - DNA, 33 bp, Homo sapien
ccagtctgtcactggcaaaacaatctgaatggt

SEQ ID NO: 325616 - DNA, 33 bp, Homo sapien
ccagtctgtcactggcgaaacaatctgaatggt

SEQ ID NO: 325617 - DNA, 33 bp, Homo sapien
cgagtcaatcacttaacgtccgtgacagggcta

SEQ ID NO: 325618 - DNA, 33 bp, Homo sapien
cgagtcaatcacttaatgtccgtgacagggcta

SEQ ID NO: 325619 - DNA, 33 bp, Homo sapien
agccactgttactaccacatctgatgagcaaac

SEQ ID NO: 325620 - DNA, 33 bp, Homo sapien
agccactgttactaccccatctgatgagcaaac

SEQ ID NO: 325621 - DNA, 33 bp, Homo sapien
ggacttttatcaggaaacaataaatgcatttca

SEQ ID NO: 325622 - DNA, 33 bp, Homo sapien
ggacttttatcaggaagcaataaatgcatttca

SEQ ID NO: 325623 - DNA, 33 bp, Homo sapien
caaactatatcacccacgtagaatgcttataca

SEQ ID NO: 325624 - DNA, 33 bp, Homo sapien
caaactatatcacccatgtagaatgcttataca

SEQ ID NO: 325625 - DNA, 33 bp, Homo sapien
gactacatccttataaactgcctcaggaagcaa

SEQ ID NO: 325626 - DNA, 33 bp, Homo sapien
gactacatccttataatctgcctcaggaagcaa

SEQ ID NO: 325627 - DNA, 33 bp, Homo sapien
tgcttggcagtagaagaagccgaagcacagccc

SEQ ID NO: 325628 - DNA, 33 bp, Homo sapien
tgcttggcagtagaagcagccgaagcacagccc

SEQ ID NO: 325629 - DNA, 33 bp, Homo sapien
gatactaatcgtgcaaaagtattattttgtttg

SEQ ID NO: 325630 - DNA, 33 bp, Homo sapien
gatactaatcgtgcaagagtattattttgtttg

SEQ ID NO: 325631 - DNA, 33 bp, Homo sapien
ttcaggatctggtttgaataaagctgcattaat

SEQ ID NO: 325632 - DNA, 33 bp, Homo sapien
ttcaggatctggtttggataaagctgcattaat

SEQ ID NO: 325633 - DNA, 33 bp, Homo sapien
gatagattgctgtgaaagagagaaaccatgtgg

SEQ ID NO: 325634 - DNA, 33 bp, Homo sapien
gatagattgctgtgaaggagagaaaccatgtgg

SEQ ID NO: 325635 - DNA, 33 bp, Homo sapien
gtgatgcaattcaacccgcaacaaagacgtttt

SEQ ID NO: 325636 - DNA, 33 bp, Homo sapien
gtgatgcaattcaacctgcaacaaagacgtttt

SEQ ID NO: 325637 - DNA, 33 bp, Homo sapien
tcatgcgcagtccagaagaaaattcagttattt

SEQ ID NO: 325638 - DNA, 33 bp, Homo sapien
tcatgcgcagtccagaggaaaattcagttattt

SEQ ID NO: 325639 - DNA, 33 bp, Homo sapien
aatggcagacccaatgaagcccaggatgaactt

SEQ ID NO: 325640 - DNA, 33 bp, Homo sapien
aatggcagacccaatggagcccaggatgaactt

SEQ ID NO: 325641 - DNA, 33 bp, Homo sapien
gagccctttgaaagcaaagaagcaaagagcagc

SEQ ID NO: 325642 - DNA, 33 bp, Homo sapien
gagccctttgaaagcagagaagcaaagagcagc

SEQ ID NO: 325643 - DNA, 33 bp, Homo sapien
agctcttctcaccctgaagttccgtgaccctca

SEQ ID NO: 325644 - DNA, 33 bp, Homo sapien
agctcttctcaccctgcagttccgtgaccctca

SEQ ID NO: 325645 - DNA, 33 bp, Homo sapien
cacaccctgagtagtgccaactggaccttttct

SEQ ID NO: 325646 - DNA, 33 bp, Homo sapien
cacaccctgagtagtgtcaactggaccttttct

SEQ ID NO: 325647 - DNA, 33 bp, Homo sapien
aatggctctgctaatcaatgtttcaaatccacg

SEQ ID NO: 325648 - DNA, 33 bp, Homo sapien
aatggctctgctaatcgatgtttcaaatccacg

SEQ ID NO: 325649 - DNA, 33 bp, Homo sapien
aattggtttcattatacgttgttttgccatttc

SEQ ID NO: 325650 - DNA, 33 bp, Homo sapien
aattggtttcattatatgttgttttgccatttc

SEQ ID NO: 325651 - DNA, 33 bp, Homo sapien
tgtaattatgaccttacggaagtccggcccagc

SEQ ID NO: 325652 - DNA, 33 bp, Homo sapien
tgtaattatgaccttatggaagtccggcccagc

SEQ ID NO: 325653 - DNA, 33 bp, Homo sapien
caactctgcttgttgaagaaactgatgaataaa

SEQ ID NO: 325654 - DNA, 33 bp, Homo sapien
caactctgcttgttgaggaaactgatgaataaa

SEQ ID NO: 325655 - DNA, 33 bp, Homo sapien
tacagtggctctgaaacgcaggtccggtgtatg

SEQ ID NO: 325656 - DNA, 33 bp, Homo sapien
tacagtggctctgaaatgcaggtccggtgtatg

SEQ ID NO: 325657 - DNA, 33 bp, Homo sapien
ctaaccaggagtaccaataagtcataacaaaat

SEQ ID NO: 325658 - DNA, 33 bp, Homo sapien
ctaaccaggagtaccagtaagtcataacaaaat

SEQ ID NO: 325659 - DNA, 33 bp, Homo sapien
tgctacaagtagaaaactccccatctgacctca

SEQ ID NO: 325660 - DNA, 33 bp, Homo sapien
tgctacaagtagaaaattccccatctgacctca

SEQ ID NO: 325661 - DNA, 33 bp, Homo sapien
ataaagtaacttgccaccgctttattgaataaa

SEQ ID NO: 325662 - DNA, 33 bp, Homo sapien
ataaagtaacttgccatcgctttattgaataaa

SEQ ID NO: 325663 - DNA, 33 bp, Homo sapien
agagtaaagctgaagaatattttggttgatggt

SEQ ID NO: 325664 - DNA, 33 bp, Homo sapien
agagtaaagctgaagagtattttggttgatggt

SEQ ID NO: 325665 - DNA, 33 bp, Homo sapien
taaaactttattcaagcccagtgtgttttagaa

SEQ ID NO: 325666 - DNA, 33 bp, Homo sapien
taaaactttattcaagtccagtgtgttttagaa

SEQ ID NO: 325667 - DNA, 33 bp, Homo sapien
gctgaaagagttgacacgattccaagaagaagg

SEQ ID NO: 325668 - DNA, 33 bp, Homo sapien
gctgaaagagttgacatgattccaagaagaagg

SEQ ID NO: 325669 - DNA, 33 bp, Homo sapien
tcctgtcagattatcacagcaactcttccaact

SEQ ID NO: 325670 - DNA, 33 bp, Homo sapien
tcctgtcagattatcatagcaactcttccaact

SEQ ID NO: 325671 - DNA, 33 bp, Homo sapien
aattgtcaaaagataccgaaaagttcaacttaa

SEQ ID NO: 325672 - DNA, 33 bp, Homo sapien
aattgtcaaaagatactgaaaagttcaacttaa

SEQ ID NO: 325673 - DNA, 33 bp, Homo sapien
tagagatgaatcattacgatggcttgggtagct

SEQ ID NO: 325674 - DNA, 33 bp, Homo sapien
tagagatgaatcattatgatggcttgggtagct

SEQ ID NO: 325675 - DNA, 33 bp, Homo sapien
ataaatgctcaaaaacaatgtgtcctgaagttt

SEQ ID NO: 325676 - DNA, 33 bp, Homo sapien
ataaatgctcaaaaacgatgtgtcctgaagttt

SEQ ID NO: 325677 - DNA, 33 bp, Homo sapien
gtgaagccagtctgtcacatggaaattctgtag

SEQ ID NO: 325678 - DNA, 33 bp, Homo sapien
gtgaagccagtctgtcccatggaaattctgtag

SEQ ID NO: 325679 - DNA, 33 bp, Homo sapien
ttgagagccttttaaaaaaactactttgctgaa

SEQ ID NO: 325680 - DNA, 33 bp, Homo sapien
ttgagagccttttaaagaaactactttgctgaa

SEQ ID NO: 325681 - DNA, 33 bp, Homo sapien
ttactctctacataaacgtctgccctgggggtg

SEQ ID NO: 325682 - DNA, 33 bp, Homo sapien
ttactctctacataaatgtctgccctgggggtg

SEQ ID NO: 325683 - DNA, 33 bp, Homo sapien
cattcatagaaaatcacgtagcgttaatcatat

SEQ ID NO: 325684 - DNA, 33 bp, Homo sapien
cattcatagaaaatcatgtagcgttaatcatat

SEQ ID NO: 325685 - DNA, 33 bp, Homo sapien
tataaaggaaggcagcagagtatattgggaaga

SEQ ID NO: 325686 - DNA, 33 bp, Homo sapien
tataaaggaaggcagcggagtatattgggaaga

SEQ ID NO: 325687 - DNA, 33 bp, Homo sapien
tttcttcctctgttaaatggccagaactcagac

SEQ ID NO: 325688 - DNA, 33 bp, Homo sapien
tttcttcctctgttaagtggccagaactcagac

SEQ ID NO: 325689 - DNA, 33 bp, Homo sapien
tttaaagacatctttccattgtgttatggctta

SEQ ID NO: 325690 - DNA, 33 bp, Homo sapien
tttaaagacatctttctattgtgttatggctta

SEQ ID NO: 325691 - DNA, 33 bp, Homo sapien
taatcaataatacataacttaaagccccatcac

SEQ ID NO: 325692 - DNA, 33 bp, Homo sapien
taatcaataatacataccttaaagccccatcac

SEQ ID NO: 325693 - DNA, 33 bp, Homo sapien
acacagtggccttctgaatgcttggaatgtccc

SEQ ID NO: 325694 - DNA, 33 bp, Homo sapien
acacagtggccttctgcatgcttggaatgtccc

SEQ ID NO: 325695 - DNA, 33 bp, Homo sapien
tctatggattgctcagccaaaattcttggttct

SEQ ID NO: 325696 - DNA, 33 bp, Homo sapien
tctatggattgctcagtcaaaattcttggttct

SEQ ID NO: 325697 - DNA, 33 bp, Homo sapien
aaccttttgtaatagccacttatggagacaaca

SEQ ID NO: 325698 - DNA, 33 bp, Homo sapien
aaccttttgtaatagctacttatggagacaaca

SEQ ID NO: 325699 - DNA, 33 bp, Homo sapien
ccatccctgtggatacaaagtggtatctcattg

SEQ ID NO: 325700 - DNA, 33 bp, Homo sapien
ccatccctgtggatacgaagtggtatctcattg

SEQ ID NO: 325701 - DNA, 33 bp, Homo sapien
cgacaaaagaattgtcacgaggacccagaaatc

SEQ ID NO: 325702 - DNA, 33 bp, Homo sapien
cgacaaaagaattgtcgcgaggacccagaaatc

SEQ ID NO: 325703 - DNA, 33 bp, Homo sapien
tgttgtgaataccagacgtggctgttatcagtg

SEQ ID NO: 325704 - DNA, 33 bp, Homo sapien
tgttgtgaataccagatgtggctgttatcagtg

SEQ ID NO: 325705 - DNA, 33 bp, Homo sapien
caccatggctcctcacccagtgacctggggcag

SEQ ID NO: 325706 - DNA, 33 bp, Homo sapien
caccatggctcctcactcagtgacctggggcag

SEQ ID NO: 325707 - DNA, 33 bp, Homo sapien
gctttgtttttttaaacggcacattgaacatta

SEQ ID NO: 325708 - DNA, 33 bp, Homo sapien
gctttgtttttttaaagggcacattgaacatta

SEQ ID NO: 325709 - DNA, 33 bp, Homo sapien
ggaggctttgtcaggagagctgagtaaacacag

SEQ ID NO: 325710 - DNA, 33 bp, Homo sapien
ggaggctttgtcaggatagctgagtaaacacag

SEQ ID NO: 325711 - DNA, 33 bp, Homo sapien
agctggcaagagcacaaggaaaaaggaaaatta

SEQ ID NO: 325712 - DNA, 33 bp, Homo sapien
agctggcaagagcacagggaaaaaggaaaatta

SEQ ID NO: 325713 - DNA, 33 bp, Homo sapien
atgaacctgcaaattaaggaatactcatcaaag

SEQ ID NO: 325714 - DNA, 33 bp, Homo sapien
atgaacctgcaaattagggaatactcatcaaag

SEQ ID NO: 325715 - DNA, 33 bp, Homo sapien
tctgagttaatcaccaatcatgttgactgcatc

SEQ ID NO: 325716 - DNA, 33 bp, Homo sapien
tctgagttaatcaccagtcatgttgactgcatc

SEQ ID NO: 325717 - DNA, 33 bp, Homo sapien
tgaataattgatggaccgaatctacttcttcat

SEQ ID NO: 325718 - DNA, 33 bp, Homo sapien
tgaataattgatggactgaatctacttcttcat

SEQ ID NO: 325719 - DNA, 33 bp, Homo sapien
atggacaaaggatttaagtaggtagtctacaaa

SEQ ID NO: 325720 - DNA, 33 bp, Homo sapien
atggacaaaggatttaggtaggtagtctacaaa

SEQ ID NO: 325721 - DNA, 33 bp, Homo sapien
acctagacacacagacacatatagactcagaca

SEQ ID NO: 325722 - DNA, 33 bp, Homo sapien
acctagacacacagacccatatagactcagaca

SEQ ID NO: 325723 - DNA, 33 bp, Homo sapien
tatgtctgtgtgtctaagtagttctgtctttgt

SEQ ID NO: 325724 - DNA, 33 bp, Homo sapien
tatgtctgtgtgtctaggtagttctgtctttgt

SEQ ID NO: 325725 - DNA, 33 bp, Homo sapien
gaattcaggcagggagactcacggcgctctccc

SEQ ID NO: 325726 - DNA, 33 bp, Homo sapien
gaattcaggcagggaggctcacggcgctctccc

SEQ ID NO: 325727 - DNA, 33 bp, Homo sapien
gctgctcttaaaaatcacatctcacattgagac

SEQ ID NO: 325728 - DNA, 33 bp, Homo sapien
gctgctcttaaaaatcgcatctcacattgagac

SEQ ID NO: 325729 - DNA, 33 bp, Homo sapien
gggagcagtgaataaaggaggcgtacatccatg

SEQ ID NO: 325730 - DNA, 33 bp, Homo sapien
gggagcagtgaataaatgaggcgtacatccatg

SEQ ID NO: 325731 - DNA, 33 bp, Homo sapien
ctcggatttatggagaagatcaagttgctcctg

SEQ ID NO: 325732 - DNA, 33 bp, Homo sapien
ctcggatttatggagaggatcaagttgctcctg

SEQ ID NO: 325733 - DNA, 33 bp, Homo sapien
aaatacagatttcacactgatctccttcccagg

SEQ ID NO: 325734 - DNA, 33 bp, Homo sapien
aaatacagatttcacattgatctccttcccagg

SEQ ID NO: 325735 - DNA, 33 bp, Homo sapien
cgtgaccctcgaagggaagagtgtggtgaggtg

SEQ ID NO: 325736 - DNA, 33 bp, Homo sapien
cgtgaccctcgaaggggagagtgtggtgaggtg

SEQ ID NO: 325737 - DNA, 33 bp, Homo sapien
cacagaaagctcataaatgcaagaaatgtagtt

SEQ ID NO: 325738 - DNA, 33 bp, Homo sapien
cacagaaagctcataagtgcaagaaatgtagtt

SEQ ID NO: 325739 - DNA, 33 bp, Homo sapien
ggggcagtgccttccacaggacaaggccattcc

SEQ ID NO: 325740 - DNA, 33 bp, Homo sapien
ggggcagtgccttccataggacaaggccattcc

SEQ ID NO: 325741 - DNA, 33 bp, Homo sapien
tctcttatccactaaacggttgtcactgggcac

SEQ ID NO: 325742 - DNA, 33 bp, Homo sapien
tctcttatccactaaatggttgtcactgggcac

SEQ ID NO: 325743 - DNA, 33 bp, Homo sapien
tggctggttgagggtacggaggagttcctggaa

SEQ ID NO: 325744 - DNA, 33 bp, Homo sapien
tggctggttgagggtatggaggagttcctggaa

SEQ ID NO: 325745 - DNA, 33 bp, Homo sapien
agggtcattgcagatgaaagtgttgctgtccag

SEQ ID NO: 325746 - DNA, 33 bp, Homo sapien
agggtcattgcagatgtaagtgttgctgtccag

SEQ ID NO: 325747 - DNA, 33 bp, Homo sapien
tagtgttgttagaactaaagacggtgctaaaat

SEQ ID NO: 325748 - DNA, 33 bp, Homo sapien
tagtgttgttagaactgaagacggtgctaaaat

SEQ ID NO: 325749 - DNA, 33 bp, Homo sapien
ccccggatccaagtccacctagctgcagtcacc

SEQ ID NO: 325750 - DNA, 33 bp, Homo sapien
ccccggatccaagtccgcctagctgcagtcacc

SEQ ID NO: 325751 - DNA, 33 bp, Homo sapien
gactggaggaggtgaaaaaatggtgcaaacttc

SEQ ID NO: 325752 - DNA, 33 bp, Homo sapien
gactggaggaggtgaacaaatggtgcaaacttc

SEQ ID NO: 325753 - DNA, 33 bp, Homo sapien
cctaaatacacagctcaatacatttttacatgt

SEQ ID NO: 325754 - DNA, 33 bp, Homo sapien
cctaaatacacagctcgatacatttttacatgt

SEQ ID NO: 325755 - DNA, 33 bp, Homo sapien
gtgcatctgtgtaaccaccattctgagcaagac

SEQ ID NO: 325756 - DNA, 33 bp, Homo sapien
gtgcatctgtgtaaccgccattctgagcaagac

SEQ ID NO: 325757 - DNA, 33 bp, Homo sapien
cagacacaaaaacataagtagtgtattatccca

SEQ ID NO: 325758 - DNA, 33 bp, Homo sapien
cagacacaaaaacataggtagtgtattatccca

SEQ ID NO: 325759 - DNA, 33 bp, Homo sapien
ccattccacagataaaagagatgaagtcgctgg

SEQ ID NO: 325760 - DNA, 33 bp, Homo sapien
ccattccacagataaaggagatgaagtcgctgg

SEQ ID NO: 325761 - DNA, 33 bp, Homo sapien
tttggcattagtaaggaccctagcagaaggcca

SEQ ID NO: 325762 - DNA, 33 bp, Homo sapien
tttggcattagtaaggtccctagcagaaggcca

SEQ ID NO: 325763 - DNA, 33 bp, Homo sapien
ttttggaacttgtttaacaacttttgtgcatct

SEQ ID NO: 325764 - DNA, 33 bp, Homo sapien
ttttggaacttgtttatcaacttttgtgcatct

SEQ ID NO: 325765 - DNA, 33 bp, Homo sapien
gcacacatggagtatacgcacaggaggatttaa

SEQ ID NO: 325766 - DNA, 33 bp, Homo sapien
gcacacatggagtatatgcacaggaggatttaa

SEQ ID NO: 325767 - DNA, 33 bp, Homo sapien
gtatttagggttcttaagtaggtgaatatctga

SEQ ID NO: 325768 - DNA, 33 bp, Homo sapien
gtatttagggttcttatgtaggtgaatatctga

SEQ ID NO: 325769 - DNA, 33 bp, Homo sapien
tccccccacacaaagaacttgtagctttcattt

SEQ ID NO: 325770 - DNA, 33 bp, Homo sapien
tccccccacacaaagagcttgtagctttcattt

SEQ ID NO: 325771 - DNA, 33 bp, Homo sapien
gaaaccattttgataaactcaataacagacaga

SEQ ID NO: 325772 - DNA, 33 bp, Homo sapien
gaaaccattttgataacctcaataacagacaga

SEQ ID NO: 325773 - DNA, 33 bp, Homo sapien
tcccatagctgacaaccaaggggaaacacaggc

SEQ ID NO: 325774 - DNA, 33 bp, Homo sapien
tcccatagctgacaacgaaggggaaacacaggc

SEQ ID NO: 325775 - DNA, 33 bp, Homo sapien
gagattgggctccagaagaacacaaagttttaa

SEQ ID NO: 325776 - DNA, 33 bp, Homo sapien
gagattgggctccagaggaacacaaagttttaa

SEQ ID NO: 325777 - DNA, 33 bp, Homo sapien
tactcttcctaacttccctgttttcatcctccc

SEQ ID NO: 325778 - DNA, 33 bp, Homo sapien
tactcttcctaacttctctgttttcatcctccc

SEQ ID NO: 325779 - DNA, 33 bp, Homo sapien
tacatgtcccaaactgcagagaagctgggagga

SEQ ID NO: 325780 - DNA, 33 bp, Homo sapien
tacatgtcccaaactggagagaagctgggagga

SEQ ID NO: 325781 - DNA, 33 bp, Homo sapien
tggtaaagttttcacaacggtggatgacagagg

SEQ ID NO: 325782 - DNA, 33 bp, Homo sapien
tggtaaagttttcacagcggtggatgacagagg

SEQ ID NO: 325783 - DNA, 33 bp, Homo sapien
ttgatccctgagtcagaatcttgatctgcaaag

SEQ ID NO: 325784 - DNA, 33 bp, Homo sapien
ttgatccctgagtcagcatcttgatctgcaaag

SEQ ID NO: 325785 - DNA, 33 bp, Homo sapien
aaaaggtcaatagaacaaagtccctctttggaa

SEQ ID NO: 325786 - DNA, 33 bp, Homo sapien
aaaaggtcaatagaaccaagtccctctttggaa

SEQ ID NO: 325787 - DNA, 33 bp, Homo sapien
aaagtaattgtatataaatggcttgcattatag

SEQ ID NO: 325788 - DNA, 33 bp, Homo sapien
aaagtaattgtatatagatggcttgcattatag

SEQ ID NO: 325789 - DNA, 33 bp, Homo sapien
ggctgtatgaggaaaacttaaaaactataatga

SEQ ID NO: 325790 - DNA, 33 bp, Homo sapien
ggctgtatgaggaaaatttaaaaactataatga

SEQ ID NO: 325791 - DNA, 33 bp, Homo sapien
agcaaaagtcctagaggaaaaaggcagcagcaa

SEQ ID NO: 325792 - DNA, 33 bp, Homo sapien
agcaaaagtcctagagtaaaaaggcagcagcaa

SEQ ID NO: 325793 - DNA, 33 bp, Homo sapien
ggaggagccctcacaaatagcccaggctcttag

SEQ ID NO: 325794 - DNA, 33 bp, Homo sapien
ggaggagccctcacaagtagcccaggctcttag

SEQ ID NO: 325795 - DNA, 33 bp, Homo sapien
aactgtcatggaggtagggaccaacccttcaag

SEQ ID NO: 325796 - DNA, 33 bp, Homo sapien
aactgtcatggaggtatggaccaacccttcaag

SEQ ID NO: 325797 - DNA, 33 bp, Homo sapien
agtgatggggaagtcaactgtcaattgggcaga

SEQ ID NO: 325798 - DNA, 33 bp, Homo sapien
agtgatggggaagtcatctgtcaattgggcaga

SEQ ID NO: 325799 - DNA, 33 bp, Homo sapien
aggctgcatcgcaattcaatatggccctcaatt

SEQ ID NO: 325800 - DNA, 33 bp, Homo sapien
aggctgcatcgcaattgaatatggccctcaatt

SEQ ID NO: 325801 - DNA, 33 bp, Homo sapien
gaacacttctgcctcagaaaatcgaattcaggt

SEQ ID NO: 325802 - DNA, 33 bp, Homo sapien
gaacacttctgcctcataaaatcgaattcaggt

SEQ ID NO: 325803 - DNA, 33 bp, Homo sapien
tttgtggtatgagcaacagagaatcatgacatt

SEQ ID NO: 325804 - DNA, 33 bp, Homo sapien
tttgtggtatgagcaatagagaatcatgacatt

SEQ ID NO: 325805 - DNA, 33 bp, Homo sapien
gaaaatatttgcaaaaaagtccaagctggaagc

SEQ ID NO: 325806 - DNA, 33 bp, Homo sapien
gaaaatatttgcaaaacagtccaagctggaagc

SEQ ID NO: 325807 - DNA, 33 bp, Homo sapien
tatgtacttagtgactcacagcaacgaaagcac

SEQ ID NO: 325808 - DNA, 33 bp, Homo sapien
tatgtacttagtgacttacagcaacgaaagcac

SEQ ID NO: 325809 - DNA, 33 bp, Homo sapien
aaaaaaggaatgtccaagttttatgttctgtct

SEQ ID NO: 325810 - DNA, 33 bp, Homo sapien
aaaaaaggaatgtccacgttttatgttctgtct

SEQ ID NO: 325811 - DNA, 33 bp, Homo sapien
attagtatggtgagtacaaaaaatatggagaat

SEQ ID NO: 325812 - DNA, 33 bp, Homo sapien
attagtatggtgagtataaaaaatatggagaat

SEQ ID NO: 325813 - DNA, 33 bp, Homo sapien
ttcttatatgtgaccaacaatgcttttgtttgc

SEQ ID NO: 325814 - DNA, 33 bp, Homo sapien
ttcttatatgtgaccaccaatgcttttgtttgc

SEQ ID NO: 325815 - DNA, 33 bp, Homo sapien
gatgcacacattcaaaaatgagggagagattgt

SEQ ID NO: 325816 - DNA, 33 bp, Homo sapien
gatgcacacattcaaagatgagggagagattgt

SEQ ID NO: 325817 - DNA, 33 bp, Homo sapien
tgtatctcagggtcaacgcacagggttggagct

SEQ ID NO: 325818 - DNA, 33 bp, Homo sapien
tgtatctcagggtcaatgcacagggttggagct

SEQ ID NO: 325819 - DNA, 33 bp, Homo sapien
ttataaaatttgtgagaagagaaaagccttcag

SEQ ID NO: 325820 - DNA, 33 bp, Homo sapien
ttataaaatttgtgaggagagaaaagccttcag

SEQ ID NO: 325821 - DNA, 33 bp, Homo sapien
gtaattcttttgcaaaactgttcatttctctcc

SEQ ID NO: 325822 - DNA, 33 bp, Homo sapien
gtaattcttttgcaaacctgttcatttctctcc

SEQ ID NO: 325823 - DNA, 33 bp, Homo sapien
gtggatggatggatgcaaatgtaacttagaaag

SEQ ID NO: 325824 - DNA, 33 bp, Homo sapien
gtggatggatggatgcgaatgtaacttagaaag

SEQ ID NO: 325825 - DNA, 33 bp, Homo sapien
aggtcagttcagaacaggttggcaaagagtcca

SEQ ID NO: 325826 - DNA, 33 bp, Homo sapien
aggtcagttcagaacatgttggcaaagagtcca

SEQ ID NO: 325827 - DNA, 33 bp, Homo sapien
agccccttgcccttgacatccatgttagcccat

SEQ ID NO: 325828 - DNA, 33 bp, Homo sapien
agccccttgcccttgatatccatgttagcccat

SEQ ID NO: 325829 - DNA, 33 bp, Homo sapien
aatttgtgcagtgaagcactagaggagagcttt

SEQ ID NO: 325830 - DNA, 33 bp, Homo sapien
aatttgtgcagtgaagtactagaggagagcttt

SEQ ID NO: 325831 - DNA, 33 bp, Homo sapien
atcccagaaaggcctgaacatagcaggagaggc

SEQ ID NO: 325832 - DNA, 33 bp, Homo sapien
atcccagaaaggcctggacatagcaggagaggc

SEQ ID NO: 325833 - DNA, 33 bp, Homo sapien
ggatgaactgatgggacaaataaaagccacaag

SEQ ID NO: 325834 - DNA, 33 bp, Homo sapien
ggatgaactgatgggataaataaaagccacaag

SEQ ID NO: 325835 - DNA, 33 bp, Homo sapien
ttatttgtgcagtgaacaatacaaatgtggcta

SEQ ID NO: 325836 - DNA, 33 bp, Homo sapien
ttatttgtgcagtgaataatacaaatgtggcta

SEQ ID NO: 325837 - DNA, 33 bp, Homo sapien
gtaggctagcaagaaacgtgccaggatttcaca

SEQ ID NO: 325838 - DNA, 33 bp, Homo sapien
gtaggctagcaagaaatgtgccaggatttcaca

SEQ ID NO: 325839 - DNA, 33 bp, Homo sapien
tagctgctataaaaggaagaaaagaaatgagct

SEQ ID NO: 325840 - DNA, 33 bp, Homo sapien
tagctgctataaaagggagaaaagaaatgagct

SEQ ID NO: 325841 - DNA, 33 bp, Homo sapien
gttgaggtcaaagagccgactggagtggactga

SEQ ID NO: 325842 - DNA, 33 bp, Homo sapien
gttgaggtcaaagagctgactggagtggactga

SEQ ID NO: 325843 - DNA, 33 bp, Homo sapien
tacacttggacttcacaagacgccactgagagc

SEQ ID NO: 325844 - DNA, 33 bp, Homo sapien
tacacttggacttcacgagacgccactgagagc

SEQ ID NO: 325845 - DNA, 33 bp, Homo sapien
ttacacaagagtgaaacagaacctttgagattt

SEQ ID NO: 325846 - DNA, 33 bp, Homo sapien
ttacacaagagtgaaatagaacctttgagattt

SEQ ID NO: 325847 - DNA, 33 bp, Homo sapien
atttgctggaactcaccgtcctgagtgcactcc

SEQ ID NO: 325848 - DNA, 33 bp, Homo sapien
atttgctggaactcactgtcctgagtgcactcc

SEQ ID NO: 325849 - DNA, 33 bp, Homo sapien
cacccatcagtccagacaaaatcactgctggag

SEQ ID NO: 325850 - DNA, 33 bp, Homo sapien
cacccatcagtccagataaaatcactgctggag

SEQ ID NO: 325851 - DNA, 33 bp, Homo sapien
tgggtctccttatgtacgtattatataaattct

SEQ ID NO: 325852 - DNA, 33 bp, Homo sapien
tgggtctccttatgtatgtattatataaattct

SEQ ID NO: 325853 - DNA, 33 bp, Homo sapien
catcattgacagtcaggactggaacacatttct

SEQ ID NO: 325854 - DNA, 33 bp, Homo sapien
catcattgacagtcagtactggaacacatttct

SEQ ID NO: 325855 - DNA, 33 bp, Homo sapien
taagtcagttaatctcactctgatttttttttc

SEQ ID NO: 325856 - DNA, 33 bp, Homo sapien
taagtcagttaatctctctctgatttttttttc

SEQ ID NO: 325857 - DNA, 33 bp, Homo sapien
acagtggccgttggaagatgtcaaagctgagag

SEQ ID NO: 325858 - DNA, 33 bp, Homo sapien
acagtggccgttggaatatgtcaaagctgagag

SEQ ID NO: 325859 - DNA, 33 bp, Homo sapien
atataaatgggtgtgaccatcactgacagtagt

SEQ ID NO: 325860 - DNA, 33 bp, Homo sapien
atataaatgggtgtgatcatcactgacagtagt

SEQ ID NO: 325861 - DNA, 33 bp, Homo sapien
acgttgagttacatggccacttccttgaagcca

SEQ ID NO: 325862 - DNA, 33 bp, Homo sapien
acgttgagttacatggtcacttccttgaagcca

SEQ ID NO: 325863 - DNA, 33 bp, Homo sapien
agaagagaaattagtaaaattcccaagaatgct

SEQ ID NO: 325864 - DNA, 33 bp, Homo sapien
agaagagaaattagtagaattcccaagaatgct

SEQ ID NO: 325865 - DNA, 33 bp, Homo sapien
tgtttcgatcagatacgacctactgtgaaacac

SEQ ID NO: 325866 - DNA, 33 bp, Homo sapien
tgtttcgatcagatactacctactgtgaaacac

SEQ ID NO: 325867 - DNA, 33 bp, Homo sapien
tccctcccaaaccagacgtacagacctggattc

SEQ ID NO: 325868 - DNA, 33 bp, Homo sapien
tccctcccaaaccagatgtacagacctggattc

SEQ ID NO: 325869 - DNA, 33 bp, Homo sapien
tccttcactgctctccacagacgtgcacctcct

SEQ ID NO: 325870 - DNA, 33 bp, Homo sapien
tccttcactgctctccgcagacgtgcacctcct

SEQ ID NO: 325871 - DNA, 33 bp, Homo sapien
cctatctcatggtcacaaagattgtctactatt

SEQ ID NO: 325872 - DNA, 33 bp, Homo sapien
cctatctcatggtcacgaagattgtctactatt

SEQ ID NO: 325873 - DNA, 33 bp, Homo sapien
cacatattagtagatacggttattcatagacat

SEQ ID NO: 325874 - DNA, 33 bp, Homo sapien
cacatattagtagatatggttattcatagacat

SEQ ID NO: 325875 - DNA, 33 bp, Homo sapien
agcaggctgatagaaaccaagtgtgggctggta

SEQ ID NO: 325876 - DNA, 33 bp, Homo sapien
agcaggctgatagaaagcaagtgtgggctggta

SEQ ID NO: 325877 - DNA, 33 bp, Homo sapien
atcccaatgctcataactcaccagcggccgatg

SEQ ID NO: 325878 - DNA, 33 bp, Homo sapien
atcccaatgctcataattcaccagcggccgatg

SEQ ID NO: 325879 - DNA, 33 bp, Homo sapien
ctgagatagagacttgcagagatcacaggaaac

SEQ ID NO: 325880 - DNA, 33 bp, Homo sapien
ctgagatagagacttggagagatcacaggaaac

SEQ ID NO: 325881 - DNA, 33 bp, Homo sapien
tctacacagcaaaataaattaacaacaaagtaa

SEQ ID NO: 325882 - DNA, 33 bp, Homo sapien
tctacacagcaaaatagattaacaacaaagtaa

SEQ ID NO: 325883 - DNA, 33 bp, Homo sapien
attacgaaaacaaaaaagccacatcctgttggt

SEQ ID NO: 325884 - DNA, 33 bp, Homo sapien
attacgaaaacaaaaaggccacatcctgttggt

SEQ ID NO: 325885 - DNA, 33 bp, Homo sapien
aggcaatgacttccaccaggaatacacgtcatt

SEQ ID NO: 325886 - DNA, 33 bp, Homo sapien
aggcaatgacttccacgaggaatacacgtcatt

SEQ ID NO: 325887 - DNA, 33 bp, Homo sapien
cgcacagctgaaatgacgggtttcactgcaggg

SEQ ID NO: 325888 - DNA, 33 bp, Homo sapien
cgcacagctgaaatgatgggtttcactgcaggg

SEQ ID NO: 325889 - DNA, 33 bp, Homo sapien
cccctgctccccgctgaacttcttctggcactt

SEQ ID NO: 325890 - DNA, 33 bp, Homo sapien
cccctgctccccgctggacttcttctggcactt

SEQ ID NO: 325891 - DNA, 33 bp, Homo sapien
acaaaaaggctaagcacaatgacggactaagat

SEQ ID NO: 325892 - DNA, 33 bp, Homo sapien
acaaaaaggctaagcataatgacggactaagat

SEQ ID NO: 325893 - DNA, 33 bp, Homo sapien
tgagtccctgtcctggaaagtgagatttggaag

SEQ ID NO: 325894 - DNA, 33 bp, Homo sapien
tgagtccctgtcctggcaagtgagatttggaag

SEQ ID NO: 325895 - DNA, 33 bp, Homo sapien
tatatcctcgggtgcacgtgtgttgttgttggt

SEQ ID NO: 325896 - DNA, 33 bp, Homo sapien
tatatcctcgggtgcatgtgtgttgttgttggt

SEQ ID NO: 325897 - DNA, 33 bp, Homo sapien
atgttggtcttaggcaaaaagcagctgaattcc

SEQ ID NO: 325898 - DNA, 33 bp, Homo sapien
atgttggtcttaggcagaaagcagctgaattcc

SEQ ID NO: 325899 - DNA, 33 bp, Homo sapien
agagcttggactttggaaccagaaatttctgag

SEQ ID NO: 325900 - DNA, 33 bp, Homo sapien
agagcttggactttgggaccagaaatttctgag

SEQ ID NO: 325901 - DNA, 33 bp, Homo sapien
aggagctgtgcgacctcaaggaagatatttagc

SEQ ID NO: 325902 - DNA, 33 bp, Homo sapien
aggagctgtgcgaccttaaggaagatatttagc

SEQ ID NO: 325903 - DNA, 33 bp, Homo sapien
cgtctccattgtctcaaggggttactcacggca

SEQ ID NO: 325904 - DNA, 33 bp, Homo sapien
cgtctccattgtctcagggggttactcacggca

SEQ ID NO: 325905 - DNA, 33 bp, Homo sapien
taccaattctatccccacaactttgggcaggtc

SEQ ID NO: 325906 - DNA, 33 bp, Homo sapien
taccaattctatccccgcaactttgggcaggtc

SEQ ID NO: 325907 - DNA, 33 bp, Homo sapien
taaagcactccacagaggtttgtggaacagacc

SEQ ID NO: 325908 - DNA, 33 bp, Homo sapien
taaagcactccacagatgtttgtggaacagacc

SEQ ID NO: 325909 - DNA, 33 bp, Homo sapien
accttcactttcccagccgcaattgtgtggggc

SEQ ID NO: 325910 - DNA, 33 bp, Homo sapien
accttcactttcccagtcgcaattgtgtggggc

SEQ ID NO: 325911 - DNA, 33 bp, Homo sapien
tgttctcatcaacataaaagtctttgggagtgg

SEQ ID NO: 325912 - DNA, 33 bp, Homo sapien
tgttctcatcaacatagaagtctttgggagtgg

SEQ ID NO: 325913 - DNA, 33 bp, Homo sapien
caaagtctccctaatacagacgcacccaatgca

SEQ ID NO: 325914 - DNA, 33 bp, Homo sapien
caaagtctccctaatatagacgcacccaatgca

SEQ ID NO: 325915 - DNA, 33 bp, Homo sapien
ccataagaggaagaaccggaattcaagcttgaa

SEQ ID NO: 325916 - DNA, 33 bp, Homo sapien
ccataagaggaagaactggaattcaagcttgaa

SEQ ID NO: 325917 - DNA, 33 bp, Homo sapien
tcttatggttattgaaagagtactagtttctga

SEQ ID NO: 325918 - DNA, 33 bp, Homo sapien
tcttatggttattgaaggagtactagtttctga

SEQ ID NO: 325919 - DNA, 33 bp, Homo sapien
tgcaaccacaggaataggctcactgccaggaaa

SEQ ID NO: 325920 - DNA, 33 bp, Homo sapien
tgcaaccacaggaatatgctcactgccaggaaa

SEQ ID NO: 325921 - DNA, 33 bp, Homo sapien
ggctctgaggatgtgcaaacttggctggcccca

SEQ ID NO: 325922 - DNA, 33 bp, Homo sapien
ggctctgaggatgtgcgaacttggctggcccca

SEQ ID NO: 325923 - DNA, 33 bp, Homo sapien
ctgacactgacagtgacatcccttgtcctccct

SEQ ID NO: 325924 - DNA, 33 bp, Homo sapien
ctgacactgacagtgatatcccttgtcctccct

SEQ ID NO: 325925 - DNA, 33 bp, Homo sapien
ttcctgatttctaaagccccaagactccaggca

SEQ ID NO: 325926 - DNA, 33 bp, Homo sapien
ttcctgatttctaaaggcccaagactccaggca

SEQ ID NO: 325927 - DNA, 33 bp, Homo sapien
ccgcctgtattcttcaagcttcggtttcctgat

SEQ ID NO: 325928 - DNA, 33 bp, Homo sapien
ccgcctgtattcttcatgcttcggtttcctgat

SEQ ID NO: 325929 - DNA, 33 bp, Homo sapien
tcacttctttgcaataccttatcacactggacc

SEQ ID NO: 325930 - DNA, 33 bp, Homo sapien
tcacttctttgcaatatcttatcacactggacc

SEQ ID NO: 325931 - DNA, 33 bp, Homo sapien
agaaactcatggccaaatcctgtgtttcagata

SEQ ID NO: 325932 - DNA, 33 bp, Homo sapien
agaaactcatggccaactcctgtgtttcagata

SEQ ID NO: 325933 - DNA, 33 bp, Homo sapien
cctgcagaatcgaacccggcaccaaacccagca

SEQ ID NO: 325934 - DNA, 33 bp, Homo sapien
cctgcagaatcgaacctggcaccaaacccagca

SEQ ID NO: 325935 - DNA, 33 bp, Homo sapien
catctttgtctctagcgcttctcagggaggcct

SEQ ID NO: 325936 - DNA, 33 bp, Homo sapien
catctttgtctctagctcttctcagggaggcct

SEQ ID NO: 325937 - DNA, 33 bp, Homo sapien
aaggtaaggacttcagcatatgcattttggggg

SEQ ID NO: 325938 - DNA, 33 bp, Homo sapien
aaggtaaggacttcagtatatgcattttggggg

SEQ ID NO: 325939 - DNA, 33 bp, Homo sapien
gtcagctcttgctgagaagtcaggaggaggcat

SEQ ID NO: 325940 - DNA, 33 bp, Homo sapien
gtcagctcttgctgaggagtcaggaggaggcat

SEQ ID NO: 325941 - DNA, 33 bp, Homo sapien
catgatgcaagggaaaacacacaggagtgcatg

SEQ ID NO: 325942 - DNA, 33 bp, Homo sapien
catgatgcaagggaaagcacacaggagtgcatg

SEQ ID NO: 325943 - DNA, 33 bp, Homo sapien
gctctaccattttgtgcacccaggctcatgtga

SEQ ID NO: 325944 - DNA, 33 bp, Homo sapien
gctctaccattttgtgtacccaggctcatgtga

SEQ ID NO: 325945 - DNA, 33 bp, Homo sapien
ggtagtttggtcatccacgccacattccaagtg

SEQ ID NO: 325946 - DNA, 33 bp, Homo sapien
ggtagtttggtcatccgcgccacattccaagtg

SEQ ID NO: 325947 - DNA, 33 bp, Homo sapien
catgtctacataaaaaatcaccatcaggaaggg

SEQ ID NO: 325948 - DNA, 33 bp, Homo sapien
catgtctacataaaaagtcaccatcaggaaggg

SEQ ID NO: 325949 - DNA, 33 bp, Homo sapien
gggcctccaccttccccagctgcgcaacctcag

SEQ ID NO: 325950 - DNA, 33 bp, Homo sapien
gggcctccaccttccctagctgcgcaacctcag

SEQ ID NO: 325951 - DNA, 33 bp, Homo sapien
agcaccattcatacaaagatggcacatgtcatc

SEQ ID NO: 325952 - DNA, 33 bp, Homo sapien
agcaccattcatacaaggatggcacatgtcatc

SEQ ID NO: 325953 - DNA, 33 bp, Homo sapien
tgacagagattctcaaaggcctcaagttcaacc

SEQ ID NO: 325954 - DNA, 33 bp, Homo sapien
tgacagagattctcaagggcctcaagttcaacc

SEQ ID NO: 325955 - DNA, 33 bp, Homo sapien
tcaaggaccttgactcacagacaatgatggtcc

SEQ ID NO: 325956 - DNA, 33 bp, Homo sapien
tcaaggaccttgactcgcagacaatgatggtcc

SEQ ID NO: 325957 - DNA, 33 bp, Homo sapien
ggagctctagctcctacgcgccctggagtggtt

SEQ ID NO: 325958 - DNA, 33 bp, Homo sapien
ggagctctagctcctatgcgccctggagtggtt

SEQ ID NO: 325959 - DNA, 33 bp, Homo sapien
gatctctgcttgactcaactttctctctgctgt

SEQ ID NO: 325960 - DNA, 33 bp, Homo sapien
gatctctgcttgactcgactttctctctgctgt

SEQ ID NO: 325961 - DNA, 33 bp, Homo sapien
gtccctgccagaaagacgggctgcctctgggga

SEQ ID NO: 325962 - DNA, 33 bp, Homo sapien
gtccctgccagaaagatgggctgcctctgggga

SEQ ID NO: 325963 - DNA, 33 bp, Homo sapien
ccagagccatcgaggtaaagaatggagcacctc

SEQ ID NO: 325964 - DNA, 33 bp, Homo sapien
ccagagccatcgaggtgaagaatggagcacctc

SEQ ID NO: 325965 - DNA, 33 bp, Homo sapien
cctcccaactcccctgccaactagttttgcaca

SEQ ID NO: 325966 - DNA, 33 bp, Homo sapien
cctcccaactcccctgtcaactagttttgcaca

SEQ ID NO: 325967 - DNA, 33 bp, Homo sapien
gctcaatgcacattagaccccttagtggcacac

SEQ ID NO: 325968 - DNA, 33 bp, Homo sapien
gctcaatgcacattagtccccttagtggcacac

SEQ ID NO: 325969 - DNA, 33 bp, Homo sapien
gggatcacaagtgcaacgttagcagaattaagg

SEQ ID NO: 325970 - DNA, 33 bp, Homo sapien
gggatcacaagtgcaatgttagcagaattaagg

SEQ ID NO: 325971 - DNA, 33 bp, Homo sapien
cctccctcactaaccaaaagtgaagtccaagcc

SEQ ID NO: 325972 - DNA, 33 bp, Homo sapien
cctccctcactaaccagaagtgaagtccaagcc

SEQ ID NO: 325973 - DNA, 33 bp, Homo sapien
catcgaggtttcctgaagtgtcctcgtctcccc

SEQ ID NO: 325974 - DNA, 33 bp, Homo sapien
catcgaggtttcctgatgtgtcctcgtctcccc

SEQ ID NO: 325975 - DNA, 33 bp, Homo sapien
ctatgtctgaactaccgagtatacctagaacca

SEQ ID NO: 325976 - DNA, 33 bp, Homo sapien
ctatgtctgaactacctagtatacctagaacca

SEQ ID NO: 325977 - DNA, 33 bp, Homo sapien
ttcaacttcaaattaccatcttgtttccagaca

SEQ ID NO: 325978 - DNA, 33 bp, Homo sapien
ttcaacttcaaattactatcttgtttccagaca

SEQ ID NO: 325979 - DNA, 33 bp, Homo sapien
ggtgtggtgagaaacacgggatttctcttagtt

SEQ ID NO: 325980 - DNA, 33 bp, Homo sapien
ggtgtggtgagaaacatgggatttctcttagtt

SEQ ID NO: 325981 - DNA, 33 bp, Homo sapien
ttttttccaagagagcaaacaggctgcatgtcc

SEQ ID NO: 325982 - DNA, 33 bp, Homo sapien
ttttttccaagagagcgaacaggctgcatgtcc

SEQ ID NO: 325983 - DNA, 33 bp, Homo sapien
ttatttaaacacactcaatggtggggacatgca

SEQ ID NO: 325984 - DNA, 33 bp, Homo sapien
ttatttaaacacactcgatggtggggacatgca

SEQ ID NO: 325985 - DNA, 33 bp, Homo sapien
caggatctcctgttccaatgttgccagtgctgc

SEQ ID NO: 325986 - DNA, 33 bp, Homo sapien
caggatctcctgttccgatgttgccagtgctgc

SEQ ID NO: 325987 - DNA, 33 bp, Homo sapien
cagaacacatcactggaaacattgttggtcact

SEQ ID NO: 325988 - DNA, 33 bp, Homo sapien
cagaacacatcactgggaacattgttggtcact

SEQ ID NO: 325989 - DNA, 33 bp, Homo sapien
aatattaaacacaccaaaagagcaaagtgaaga

SEQ ID NO: 325990 - DNA, 33 bp, Homo sapien
aatattaaacacaccagaagagcaaagtgaaga

SEQ ID NO: 325991 - DNA, 33 bp, Homo sapien
ttatcccatgcggtgacggaaaaccacctgcca

SEQ ID NO: 325992 - DNA, 33 bp, Homo sapien
ttatcccatgcggtgatggaaaaccacctgcca

SEQ ID NO: 325993 - DNA, 33 bp, Homo sapien
tcaatggcgttctctcgcacagtggagcagcgg

SEQ ID NO: 325994 - DNA, 33 bp, Homo sapien
tcaatggcgttctctctcacagtggagcagcgg

SEQ ID NO: 325995 - DNA, 33 bp, Homo sapien
ctgcctctgtcttctgcaatacatttgtgtgtg

SEQ ID NO: 325996 - DNA, 33 bp, Homo sapien
ctgcctctgtcttctgtaatacatttgtgtgtg

SEQ ID NO: 325997 - DNA, 33 bp, Homo sapien
tactcaccttggcaacgacagtaaaattgcaaa

SEQ ID NO: 325998 - DNA, 33 bp, Homo sapien
tactcaccttggcaactacagtaaaattgcaaa

SEQ ID NO: 325999 - DNA, 33 bp, Homo sapien
acaaaccatatgtgtaagcatttaagagttgta

SEQ ID NO: 326000 - DNA, 33 bp, Homo sapien
acaaaccatatgtgtaggcatttaagagttgta

SEQ ID NO: 326001 - DNA, 33 bp, Homo sapien
aattcccatctgaggcacttctgcataaagtag

SEQ ID NO: 326002 - DNA, 33 bp, Homo sapien
aattcccatctgaggcgcttctgcataaagtag

SEQ ID NO: 326003 - DNA, 33 bp, Homo sapien
atcaatatcaattaaaagagtgtagtacttgag

SEQ ID NO: 326004 - DNA, 33 bp, Homo sapien
atcaatatcaattaaaggagtgtagtacttgag

SEQ ID NO: 326005 - DNA, 33 bp, Homo sapien
ctcattaaagagctgcagagaaatagacttttg

SEQ ID NO: 326006 - DNA, 33 bp, Homo sapien
ctcattaaagagctgcggagaaatagacttttg

SEQ ID NO: 326007 - DNA, 33 bp, Homo sapien
taagcgtgctaagaaacaagaatgtgagaggag

SEQ ID NO: 326008 - DNA, 33 bp, Homo sapien
taagcgtgctaagaaataagaatgtgagaggag

SEQ ID NO: 326009 - DNA, 33 bp, Homo sapien
tcttcagttaaatagcaatgtttcaaatgatct

SEQ ID NO: 326010 - DNA, 33 bp, Homo sapien
tcttcagttaaatagcgatgtttcaaatgatct

SEQ ID NO: 326011 - DNA, 33 bp, Homo sapien
ccttcccacaaaccaccgtcgacattttagtgg

SEQ ID NO: 326012 - DNA, 33 bp, Homo sapien
ccttcccacaaaccactgtcgacattttagtgg

SEQ ID NO: 326013 - DNA, 33 bp, Homo sapien
agaacacctagaatttaaaaaaagcaatagata

SEQ ID NO: 326014 - DNA, 33 bp, Homo sapien
agaacacctagaattttaaaaaagcaatagata

SEQ ID NO: 326015 - DNA, 33 bp, Homo sapien
cagaaaagcagggtcacccctcaatcgagagac

SEQ ID NO: 326016 - DNA, 33 bp, Homo sapien
cagaaaagcagggtcatccctcaatcgagagac

SEQ ID NO: 326017 - DNA, 33 bp, Homo sapien
aggagggaagaagacccgagattaccaggaaac

SEQ ID NO: 326018 - DNA, 33 bp, Homo sapien
aggagggaagaagacctgagattaccaggaaac

SEQ ID NO: 326019 - DNA, 33 bp, Homo sapien
tgcctctgctgctaaacaggacgggaggctggt

SEQ ID NO: 326020 - DNA, 33 bp, Homo sapien
tgcctctgctgctaaataggacgggaggctggt

SEQ ID NO: 326021 - DNA, 33 bp, Homo sapien
gactaaacccaagagacaccaaatgagaactgc

SEQ ID NO: 326022 - DNA, 33 bp, Homo sapien
gactaaacccaagagagaccaaatgagaactgc

SEQ ID NO: 326023 - DNA, 33 bp, Homo sapien
ccccagggtgcacaccactacgtctgccataag

SEQ ID NO: 326024 - DNA, 33 bp, Homo sapien
ccccagggtgcacaccgctacgtctgccataag

SEQ ID NO: 326025 - DNA, 33 bp, Homo sapien
cgagcggctgccccaggcatcactaacactccc

SEQ ID NO: 326026 - DNA, 33 bp, Homo sapien
cgagcggctgccccagtcatcactaacactccc

SEQ ID NO: 326027 - DNA, 33 bp, Homo sapien
aatcactttgtaaatgaatttttcttcatgata

SEQ ID NO: 326028 - DNA, 33 bp, Homo sapien
aatcactttgtaaatgtatttttcttcatgata

SEQ ID NO: 326029 - DNA, 33 bp, Homo sapien
agtcaagggctagtgaaagaagaggccagactg

SEQ ID NO: 326030 - DNA, 33 bp, Homo sapien
agtcaagggctagtgagagaagaggccagactg

SEQ ID NO: 326031 - DNA, 33 bp, Homo sapien
atgtcatcatggttaaaacaagaactctgggcc

SEQ ID NO: 326032 - DNA, 33 bp, Homo sapien
atgtcatcatggttaagacaagaactctgggcc

SEQ ID NO: 326033 - DNA, 33 bp, Homo sapien
gaatggaaagttcaggaatggaaaaatgagagt

SEQ ID NO: 326034 - DNA, 33 bp, Homo sapien
gaatggaaagttcagggatggaaaaatgagagt

SEQ ID NO: 326035 - DNA, 33 bp, Homo sapien
cctgcccacatttgcaaacggtaaatttgaagt

SEQ ID NO: 326036 - DNA, 33 bp, Homo sapien
cctgcccacatttgcacacggtaaatttgaagt

SEQ ID NO: 326037 - DNA, 33 bp, Homo sapien
tcctgtgtcccttgtacgcatcctatttgcatg

SEQ ID NO: 326038 - DNA, 33 bp, Homo sapien
tcctgtgtcccttgtatgcatcctatttgcatg

SEQ ID NO: 326039 - DNA, 33 bp, Homo sapien
cactctaggtcagaaccgcaacatgaagcactg

SEQ ID NO: 326040 - DNA, 33 bp, Homo sapien
cactctaggtcagaactgcaacatgaagcactg

SEQ ID NO: 326041 - DNA, 33 bp, Homo sapien
aatggacttttttctagaggttatcagaagcat

SEQ ID NO: 326042 - DNA, 33 bp, Homo sapien
aatggacttttttctataggttatcagaagcat

SEQ ID NO: 326043 - DNA, 33 bp, Homo sapien
tgtgcctctttgagcacacattttaggattcag

SEQ ID NO: 326044 - DNA, 33 bp, Homo sapien
tgtgcctctttgagcatacattttaggattcag

SEQ ID NO: 326045 - DNA, 33 bp, Homo sapien
cacacctctagggtgaactttgagtccagctgc

SEQ ID NO: 326046 - DNA, 33 bp, Homo sapien
cacacctctagggtgacctttgagtccagctgc

SEQ ID NO: 326047 - DNA, 33 bp, Homo sapien
gagctttgagtacgccaggccaatgaacccttt

SEQ ID NO: 326048 - DNA, 33 bp, Homo sapien
gagctttgagtacgccgggccaatgaacccttt

SEQ ID NO: 326049 - DNA, 33 bp, Homo sapien
ctaaatcctccaagtgccacttcctccaggcag

SEQ ID NO: 326050 - DNA, 33 bp, Homo sapien
ctaaatcctccaagtgtcacttcctccaggcag

SEQ ID NO: 326051 - DNA, 33 bp, Homo sapien
tgaaaccaatatacggccatatccaggaaaagc

SEQ ID NO: 326052 - DNA, 33 bp, Homo sapien
tgaaaccaatatacggtcatatccaggaaaagc

SEQ ID NO: 326053 - DNA, 33 bp, Homo sapien
ctgggctagcccttcacggttttattccaagtc

SEQ ID NO: 326054 - DNA, 33 bp, Homo sapien
ctgggctagcccttcatggttttattccaagtc

SEQ ID NO: 326055 - DNA, 33 bp, Homo sapien
caggagagtacccactgaatgtaattagactct

SEQ ID NO: 326056 - DNA, 33 bp, Homo sapien
caggagagtacccacttaatgtaattagactct

SEQ ID NO: 326057 - DNA, 33 bp, Homo sapien
gagcaccaaggagtcccatgcagtgcgtctgta

SEQ ID NO: 326058 - DNA, 33 bp, Homo sapien
gagcaccaaggagtcctatgcagtgcgtctgta

SEQ ID NO: 326059 - DNA, 33 bp, Homo sapien
actttgtggtcattgccctacttccttaaagta

SEQ ID NO: 326060 - DNA, 33 bp, Homo sapien
actttgtggtcattgctctacttccttaaagta

SEQ ID NO: 326061 - DNA, 33 bp, Homo sapien
atttatttatcacacccctcaaaactttcctta

SEQ ID NO: 326062 - DNA, 33 bp, Homo sapien
atttatttatcacacctctcaaaactttcctta

SEQ ID NO: 326063 - DNA, 33 bp, Homo sapien
gaggaaaagctgctacaagttggacagagactc

SEQ ID NO: 326064 - DNA, 33 bp, Homo sapien
gaggaaaagctgctaccagttggacagagactc

SEQ ID NO: 326065 - DNA, 33 bp, Homo sapien
tggccaggtctctggacgacaaggaaggttcgg

SEQ ID NO: 326066 - DNA, 33 bp, Homo sapien
tggccaggtctctggatgacaaggaaggttcgg

SEQ ID NO: 326067 - DNA, 33 bp, Homo sapien
cctgcgccatcactgtcaaccttaaaaccctcc

SEQ ID NO: 326068 - DNA, 33 bp, Homo sapien
cctgcgccatcactgttaaccttaaaaccctcc

SEQ ID NO: 326069 - DNA, 33 bp, Homo sapien
cccactctctgctgtaccagaaccaacccagga

SEQ ID NO: 326070 - DNA, 33 bp, Homo sapien
cccactctctgctgtatcagaaccaacccagga

SEQ ID NO: 326071 - DNA, 33 bp, Homo sapien
atacaaatttggcaaaacctgatatgttgattc

SEQ ID NO: 326072 - DNA, 33 bp, Homo sapien
atacaaatttggcaaaccctgatatgttgattc

SEQ ID NO: 326073 - DNA, 33 bp, Homo sapien
ccctgtagtggtctcaacaatggtccatcagtt

SEQ ID NO: 326074 - DNA, 33 bp, Homo sapien
ccctgtagtggtctcaccaatggtccatcagtt

SEQ ID NO: 326075 - DNA, 33 bp, Homo sapien
ttaactgtctgccaccaagtgaaatatgagggt

SEQ ID NO: 326076 - DNA, 33 bp, Homo sapien
ttaactgtctgccaccgagtgaaatatgagggt

SEQ ID NO: 326077 - DNA, 33 bp, Homo sapien
atcacaagcacttactaaatgaagctgtcagca

SEQ ID NO: 326078 - DNA, 33 bp, Homo sapien
atcacaagcacttactgaatgaagctgtcagca

SEQ ID NO: 326079 - DNA, 33 bp, Homo sapien
ggcctgatagatgtaaatgaaaatggtatttaa

SEQ ID NO: 326080 - DNA, 33 bp, Homo sapien
ggcctgatagatgtaagtgaaaatggtatttaa

SEQ ID NO: 326081 - DNA, 33 bp, Homo sapien
cagagtataagtggaaagcattgaaaatttatt

SEQ ID NO: 326082 - DNA, 33 bp, Homo sapien
cagagtataagtggaaggcattgaaaatttatt

SEQ ID NO: 326083 - DNA, 33 bp, Homo sapien
catataggaagagacacgagagttctctttctc

SEQ ID NO: 326084 - DNA, 33 bp, Homo sapien
catataggaagagacatgagagttctctttctc

SEQ ID NO: 326085 - DNA, 33 bp, Homo sapien
gtataacctacagacactaaagtacataaacct

SEQ ID NO: 326086 - DNA, 33 bp, Homo sapien
gtataacctacagacagtaaagtacataaacct

SEQ ID NO: 326087 - DNA, 33 bp, Homo sapien
tcacattcacaggcacagggattaggactttga

SEQ ID NO: 326088 - DNA, 33 bp, Homo sapien
tcacattcacaggcacggggattaggactttga

SEQ ID NO: 326089 - DNA, 33 bp, Homo sapien
atccaatatgatttcaccttaccttgattttat

SEQ ID NO: 326090 - DNA, 33 bp, Homo sapien
atccaatatgatttcatcttaccttgattttat

SEQ ID NO: 326091 - DNA, 33 bp, Homo sapien
gaaatgtgtttgcctacaaataagggaagatcc

SEQ ID NO: 326092 - DNA, 33 bp, Homo sapien
gaaatgtgtttgcctataaataagggaagatcc

SEQ ID NO: 326093 - DNA, 33 bp, Homo sapien
ttgctacccagctggaccttctatatttcagcc

SEQ ID NO: 326094 - DNA, 33 bp, Homo sapien
ttgctacccagctggatcttctatatttcagcc

SEQ ID NO: 326095 - DNA, 33 bp, Homo sapien
agccaccacagccagccagttacttttattcac

SEQ ID NO: 326096 - DNA, 33 bp, Homo sapien
agccaccacagccagctagttacttttattcac

SEQ ID NO: 326097 - DNA, 33 bp, Homo sapien
gcaacataatagacaacagacaaacaagataat

SEQ ID NO: 326098 - DNA, 33 bp, Homo sapien
gcaacataatagacaatagacaaacaagataat

SEQ ID NO: 326099 - DNA, 33 bp, Homo sapien
ccaccacagaccacaccaaacagcagcctcttt

SEQ ID NO: 326100 - DNA, 33 bp, Homo sapien
ccaccacagaccacacgaaacagcagcctcttt

SEQ ID NO: 326101 - DNA, 33 bp, Homo sapien
acaatcttttgggaagccatgctctgttcccca

SEQ ID NO: 326102 - DNA, 33 bp, Homo sapien
acaatcttttgggaagtcatgctctgttcccca

SEQ ID NO: 326103 - DNA, 33 bp, Homo sapien
accttggccttgagtccacccgggcctcagtag

SEQ ID NO: 326104 - DNA, 33 bp, Homo sapien
accttggccttgagtctacccgggcctcagtag

SEQ ID NO: 326105 - DNA, 33 bp, Homo sapien
ccttaaggtgcaataaaaacttaacttttgtga

SEQ ID NO: 326106 - DNA, 33 bp, Homo sapien
ccttaaggtgcaataacaacttaacttttgtga

SEQ ID NO: 326107 - DNA, 33 bp, Homo sapien
aaatctattgtctacccatctggtttcttttat

SEQ ID NO: 326108 - DNA, 33 bp, Homo sapien
aaatctattgtctacctatctggtttcttttat

SEQ ID NO: 326109 - DNA, 33 bp, Homo sapien
acctcgcgccccgaccaacgggactcgcgggct

SEQ ID NO: 326110 - DNA, 33 bp, Homo sapien
acctcgcgccccgaccgacgggactcgcgggct

SEQ ID NO: 326111 - DNA, 33 bp, Homo sapien
atctctcggtgctcaacttctcaaataacataa

SEQ ID NO: 326112 - DNA, 33 bp, Homo sapien
atctctcggtgctcaagttctcaaataacataa

SEQ ID NO: 326113 - DNA, 33 bp, Homo sapien
caaaaccaaataggcacctaatcaaagccaaac

SEQ ID NO: 326114 - DNA, 33 bp, Homo sapien
caaaaccaaataggcagctaatcaaagccaaac

SEQ ID NO: 326115 - DNA, 33 bp, Homo sapien
tcccaagctctctaataaggcagtggtgtatag

SEQ ID NO: 326116 - DNA, 33 bp, Homo sapien
tcccaagctctctaatcaggcagtggtgtatag

SEQ ID NO: 326117 - DNA, 33 bp, Homo sapien
tatatacaaaatatacaaaaagttcttccaaaa

SEQ ID NO: 326118 - DNA, 33 bp, Homo sapien
tatatacaaaatatacgaaaagttcttccaaaa

SEQ ID NO: 326119 - DNA, 33 bp, Homo sapien
catcccgtgatacaaccataattgtgtggccaa

SEQ ID NO: 326120 - DNA, 33 bp, Homo sapien
catcccgtgatacaacgataattgtgtggccaa

SEQ ID NO: 326121 - DNA, 33 bp, Homo sapien
agagcttcatgcgtgaaatcatgcgtgagaaca

SEQ ID NO: 326122 - DNA, 33 bp, Homo sapien
agagcttcatgcgtgagatcatgcgtgagaaca

SEQ ID NO: 326123 - DNA, 33 bp, Homo sapien
ctcttgtattcattgaatggctattactgagca

SEQ ID NO: 326124 - DNA, 33 bp, Homo sapien
ctcttgtattcattgagtggctattactgagca

SEQ ID NO: 326125 - DNA, 33 bp, Homo sapien
ccaggtcctggggatacagaaatggagaagccc

SEQ ID NO: 326126 - DNA, 33 bp, Homo sapien
ccaggtcctggggatagagaaatggagaagccc

SEQ ID NO: 326127 - DNA, 33 bp, Homo sapien
gcagaagctggtttaacaagttgctgagggatg

SEQ ID NO: 326128 - DNA, 33 bp, Homo sapien
gcagaagctggtttaataagttgctgagggatg

SEQ ID NO: 326129 - DNA, 33 bp, Homo sapien
gtttttctctgggtctcacaacttccactcatt

SEQ ID NO: 326130 - DNA, 33 bp, Homo sapien
gtttttctctgggtctgacaacttccactcatt

SEQ ID NO: 326131 - DNA, 33 bp, Homo sapien
ccaggctgggggatcccatcaagacaccaagct

SEQ ID NO: 326132 - DNA, 33 bp, Homo sapien
ccaggctgggggatcctatcaagacaccaagct

SEQ ID NO: 326133 - DNA, 33 bp, Homo sapien
agggaagggctaggacaaaagccctaagcagtg

SEQ ID NO: 326134 - DNA, 33 bp, Homo sapien
agggaagggctaggaccaaagccctaagcagtg

SEQ ID NO: 326135 - DNA, 33 bp, Homo sapien
aaccatgcaggccaacactgtgcttcaggttag

SEQ ID NO: 326136 - DNA, 33 bp, Homo sapien
aaccatgcaggccaacgctgtgcttcaggttag

SEQ ID NO: 326137 - DNA, 33 bp, Homo sapien
ggcagggactgactgactcaggtgagagactgg

SEQ ID NO: 326138 - DNA, 33 bp, Homo sapien
ggcagggactgactgattcaggtgagagactgg

SEQ ID NO: 326139 - DNA, 33 bp, Homo sapien
cctaggggcctctgcaaacgatccttacccctt

SEQ ID NO: 326140 - DNA, 33 bp, Homo sapien
cctaggggcctctgcagacgatccttacccctt

SEQ ID NO: 326141 - DNA, 33 bp, Homo sapien
tctcccacacttatgacgtaggtgctacctttc

SEQ ID NO: 326142 - DNA, 33 bp, Homo sapien
tctcccacacttatgatgtaggtgctacctttc

SEQ ID NO: 326143 - DNA, 33 bp, Homo sapien
ttcaaggcaaggacaacctcaaaacggaatgtt

SEQ ID NO: 326144 - DNA, 33 bp, Homo sapien
ttcaaggcaaggacaatctcaaaacggaatgtt

SEQ ID NO: 326145 - DNA, 33 bp, Homo sapien
ttataaggagtataacaacatccctataagcag

SEQ ID NO: 326146 - DNA, 33 bp, Homo sapien
ttataaggagtataacgacatccctataagcag

SEQ ID NO: 326147 - DNA, 33 bp, Homo sapien
tcagcaggtgcatgaaaggctgtgcttcccaga

SEQ ID NO: 326148 - DNA, 33 bp, Homo sapien
tcagcaggtgcatgaagggctgtgcttcccaga

SEQ ID NO: 326149 - DNA, 33 bp, Homo sapien
ctggggagggagaatccgagatggagatgaagt

SEQ ID NO: 326150 - DNA, 33 bp, Homo sapien
ctggggagggagaatctgagatggagatgaagt

SEQ ID NO: 326151 - DNA, 33 bp, Homo sapien
ttcaaataaaatggaaatgacagcctgcaggag

SEQ ID NO: 326152 - DNA, 33 bp, Homo sapien
ttcaaataaaatggaagtgacagcctgcaggag

SEQ ID NO: 326153 - DNA, 33 bp, Homo sapien
tgtggactggtctttaaagctgctttggtgacc

SEQ ID NO: 326154 - DNA, 33 bp, Homo sapien
tgtggactggtctttacagctgctttggtgacc

SEQ ID NO: 326155 - DNA, 33 bp, Homo sapien
caaaactgcagtgggaagtcctgaagcaaagca

SEQ ID NO: 326156 - DNA, 33 bp, Homo sapien
caaaactgcagtgggacgtcctgaagcaaagca

SEQ ID NO: 326157 - DNA, 33 bp, Homo sapien
tatgtacccagtaatgaatttccctttcttata

SEQ ID NO: 326158 - DNA, 33 bp, Homo sapien
tatgtacccagtaatggatttccctttcttata

SEQ ID NO: 326159 - DNA, 33 bp, Homo sapien
ggagataaggtctttacgatcaagttaaaatga

SEQ ID NO: 326160 - DNA, 33 bp, Homo sapien
ggagataaggtctttatgatcaagttaaaatga

SEQ ID NO: 326161 - DNA, 33 bp, Homo sapien
gggtcagacagatgccaccccttgttagcagag

SEQ ID NO: 326162 - DNA, 33 bp, Homo sapien
gggtcagacagatgccgccccttgttagcagag

SEQ ID NO: 326163 - DNA, 33 bp, Homo sapien
cctctgcttaaacaccacctgtgaaagggacct

SEQ ID NO: 326164 - DNA, 33 bp, Homo sapien
cctctgcttaaacacctcctgtgaaagggacct

SEQ ID NO: 326165 - DNA, 33 bp, Homo sapien
atgtcatggagataaacgccagagtgagaaagc

SEQ ID NO: 326166 - DNA, 33 bp, Homo sapien
atgtcatggagataaatgccagagtgagaaagc

SEQ ID NO: 326167 - DNA, 33 bp, Homo sapien
tctgtggatcctggtaaagagaatgaaaacagc

SEQ ID NO: 326168 - DNA, 33 bp, Homo sapien
tctgtggatcctggtacagagaatgaaaacagc

SEQ ID NO: 326169 - DNA, 33 bp, Homo sapien
ctgtgggtacaatttacgctttcatggcctgtt

SEQ ID NO: 326170 - DNA, 33 bp, Homo sapien
ctgtgggtacaatttatgctttcatggcctgtt

SEQ ID NO: 326171 - DNA, 33 bp, Homo sapien
tacctagcctaaagacagactcagactggtgcc

SEQ ID NO: 326172 - DNA, 33 bp, Homo sapien
tacctagcctaaagacggactcagactggtgcc

SEQ ID NO: 326173 - DNA, 33 bp, Homo sapien
agcctcaggatgcaagaagaacacggaaccagg

SEQ ID NO: 326174 - DNA, 33 bp, Homo sapien
agcctcaggatgcaaggagaacacggaaccagg

SEQ ID NO: 326175 - DNA, 33 bp, Homo sapien
tggggcaaggagtgcaaatagttgggagatggg

SEQ ID NO: 326176 - DNA, 33 bp, Homo sapien
tggggcaaggagtgcagatagttgggagatggg

SEQ ID NO: 326177 - DNA, 33 bp, Homo sapien
ctgagagcaaaatttccagccccatccacacac

SEQ ID NO: 326178 - DNA, 33 bp, Homo sapien
ctgagagcaaaatttcgagccccatccacacac

SEQ ID NO: 326179 - DNA, 33 bp, Homo sapien
ctctgtgccttagaaaaggattagggctgttgc

SEQ ID NO: 326180 - DNA, 33 bp, Homo sapien
ctctgtgccttagaaagggattagggctgttgc

SEQ ID NO: 326181 - DNA, 33 bp, Homo sapien
ttaaaaacattgataacaaattttgccatagta

SEQ ID NO: 326182 - DNA, 33 bp, Homo sapien
ttaaaaacattgataataaattttgccatagta

SEQ ID NO: 326183 - DNA, 33 bp, Homo sapien
agggttcaacaagccccccacatgatcctaata

SEQ ID NO: 326184 - DNA, 33 bp, Homo sapien
agggttcaacaagcccgccacatgatcctaata

SEQ ID NO: 326185 - DNA, 33 bp, Homo sapien
tgaacttggcaactgacctctctgagctcactg

SEQ ID NO: 326186 - DNA, 33 bp, Homo sapien
tgaacttggcaactgatctctctgagctcactg

SEQ ID NO: 326187 - DNA, 33 bp, Homo sapien
ctcaggaaacatttgccgaaagaataaaagaaa

SEQ ID NO: 326188 - DNA, 33 bp, Homo sapien
ctcaggaaacatttgctgaaagaataaaagaaa

SEQ ID NO: 326189 - DNA, 33 bp, Homo sapien
ctaggtttgtagacaccgggcatatattccaga

SEQ ID NO: 326190 - DNA, 33 bp, Homo sapien
ctaggtttgtagacactgggcatatattccaga

SEQ ID NO: 326191 - DNA, 33 bp, Homo sapien
agtcaggatgggatagcctaagctgttgtaaca

SEQ ID NO: 326192 - DNA, 33 bp, Homo sapien
agtcaggatgggataggctaagctgttgtaaca

SEQ ID NO: 326193 - DNA, 33 bp, Homo sapien
tccagcttatctcagaagaagggatagtgaggc

SEQ ID NO: 326194 - DNA, 33 bp, Homo sapien
tccagcttatctcagaggaagggatagtgaggc

SEQ ID NO: 326195 - DNA, 33 bp, Homo sapien
ttgtcatgtcatgggaacgtcttcggcaccatg

SEQ ID NO: 326196 - DNA, 33 bp, Homo sapien
ttgtcatgtcatgggagcgtcttcggcaccatg

SEQ ID NO: 326197 - DNA, 33 bp, Homo sapien
gctcatggccttctgccgaaccacttggcctcc

SEQ ID NO: 326198 - DNA, 33 bp, Homo sapien
gctcatggccttctgctgaaccacttggcctcc

SEQ ID NO: 326199 - DNA, 33 bp, Homo sapien
gaatgaatggatgaacaaatgaatgaatggagg

SEQ ID NO: 326200 - DNA, 33 bp, Homo sapien
gaatgaatggatgaaccaatgaatgaatggagg

SEQ ID NO: 326201 - DNA, 33 bp, Homo sapien
tagaatcctaaaagaacgtggataaatctatgg

SEQ ID NO: 326202 - DNA, 33 bp, Homo sapien
tagaatcctaaaagaatgtggataaatctatgg

SEQ ID NO: 326203 - DNA, 33 bp, Homo sapien
agatcaactttttaaaatcctgcaaataagtga

SEQ ID NO: 326204 - DNA, 33 bp, Homo sapien
agatcaactttttaaagtcctgcaaataagtga

SEQ ID NO: 326205 - DNA, 33 bp, Homo sapien
catcagcaatgtataacgaaggttccgtcctag

SEQ ID NO: 326206 - DNA, 33 bp, Homo sapien
catcagcaatgtataatgaaggttccgtcctag

SEQ ID NO: 326207 - DNA, 33 bp, Homo sapien
ctgacagagggtgttcactggctcacaggtcac

SEQ ID NO: 326208 - DNA, 33 bp, Homo sapien
ctgacagagggtgttcgctggctcacaggtcac

SEQ ID NO: 326209 - DNA, 33 bp, Homo sapien
tgacttgcccatgaaccctgtggaccttcctgc

SEQ ID NO: 326210 - DNA, 33 bp, Homo sapien
tgacttgcccatgaactctgtggaccttcctgc

SEQ ID NO: 326211 - DNA, 33 bp, Homo sapien
tttttggtaatcacaccgtgggatggggagaga

SEQ ID NO: 326212 - DNA, 33 bp, Homo sapien
tttttggtaatcacactgtgggatggggagaga

SEQ ID NO: 326213 - DNA, 33 bp, Homo sapien
cctcaaccactgatcaatcaaaatgcacatctg

SEQ ID NO: 326214 - DNA, 33 bp, Homo sapien
cctcaaccactgatcactcaaaatgcacatctg

SEQ ID NO: 326215 - DNA, 33 bp, Homo sapien
caatgtattaagtaccaggctcatattttcaac

SEQ ID NO: 326216 - DNA, 33 bp, Homo sapien
caatgtattaagtacccggctcatattttcaac

SEQ ID NO: 326217 - DNA, 33 bp, Homo sapien
ttgtgtgaacatcataaagaagacttacactct

SEQ ID NO: 326218 - DNA, 33 bp, Homo sapien
ttgtgtgaacatcatagagaagacttacactct

SEQ ID NO: 326219 - DNA, 33 bp, Homo sapien
tccagtgctgataaagactacagcagtgagcag

SEQ ID NO: 326220 - DNA, 33 bp, Homo sapien
tccagtgctgataaaggctacagcagtgagcag

SEQ ID NO: 326221 - DNA, 33 bp, Homo sapien
gcaatgctggtgtcagccgacctcctgggctcc

SEQ ID NO: 326222 - DNA, 33 bp, Homo sapien
gcaatgctggtgtcaggcgacctcctgggctcc

SEQ ID NO: 326223 - DNA, 33 bp, Homo sapien
tgtcatatattcagtacgttgttaccaaaatgt

SEQ ID NO: 326224 - DNA, 33 bp, Homo sapien
tgtcatatattcagtatgttgttaccaaaatgt

SEQ ID NO: 326225 - DNA, 33 bp, Homo sapien
acctactcaaatcacacggcaagactctgtggg

SEQ ID NO: 326226 - DNA, 33 bp, Homo sapien
acctactcaaatcacatggcaagactctgtggg

SEQ ID NO: 326227 - DNA, 33 bp, Homo sapien
attgcaggcacgaaaacacttagcatatttggg

SEQ ID NO: 326228 - DNA, 33 bp, Homo sapien
attgcaggcacgaaaatacttagcatatttggg

SEQ ID NO: 326229 - DNA, 33 bp, Homo sapien
ggtgtttctaaaggtacggcttttctcataagg

SEQ ID NO: 326230 - DNA, 33 bp, Homo sapien
ggtgtttctaaaggtatggcttttctcataagg

SEQ ID NO: 326231 - DNA, 33 bp, Homo sapien
acctcgttatgaattacggtgaagtgccctggt

SEQ ID NO: 326232 - DNA, 33 bp, Homo sapien
acctcgttatgaattatggtgaagtgccctggt

SEQ ID NO: 326233 - DNA, 33 bp, Homo sapien
ggccttccagctcttaaaaaaacttaaagctca

SEQ ID NO: 326234 - DNA, 33 bp, Homo sapien
ggccttccagctcttagaaaaacttaaagctca

SEQ ID NO: 326235 - DNA, 33 bp, Homo sapien
tcttggctcctcataggaaaggcaaggttatga

SEQ ID NO: 326236 - DNA, 33 bp, Homo sapien
tcttggctcctcatagtaaaggcaaggttatga

SEQ ID NO: 326237 - DNA, 33 bp, Homo sapien
aaaccaagcactaatacgaatcatttggttgta

SEQ ID NO: 326238 - DNA, 33 bp, Homo sapien
aaaccaagcactaatatgaatcatttggttgta

SEQ ID NO: 326239 - DNA, 33 bp, Homo sapien
agtcaataggaagtaaccgactgattctggata

SEQ ID NO: 326240 - DNA, 33 bp, Homo sapien
agtcaataggaagtaagcgactgattctggata

SEQ ID NO: 326241 - DNA, 33 bp, Homo sapien
gagagccctactgatacgaagagttgaataaaa

SEQ ID NO: 326242 - DNA, 33 bp, Homo sapien
gagagccctactgatatgaagagttgaataaaa

SEQ ID NO: 326243 - DNA, 33 bp, Homo sapien
atacacaattatttcaaaacttcattttagggc

SEQ ID NO: 326244 - DNA, 33 bp, Homo sapien
atacacaattatttcagaacttcattttagggc

SEQ ID NO: 326245 - DNA, 33 bp, Homo sapien
ctacatttggggataaattaagacgatgttctt

SEQ ID NO: 326246 - DNA, 33 bp, Homo sapien
ctacatttggggataagttaagacgatgttctt

SEQ ID NO: 326247 - DNA, 33 bp, Homo sapien
tggtcatcagaaagaccaaggcaggatcagagg

SEQ ID NO: 326248 - DNA, 33 bp, Homo sapien
tggtcatcagaaagacgaaggcaggatcagagg

SEQ ID NO: 326249 - DNA, 33 bp, Homo sapien
cccttctcttctccaagaagttggtgataggct

SEQ ID NO: 326250 - DNA, 33 bp, Homo sapien
cccttctcttctccaataagttggtgataggct

SEQ ID NO: 326251 - DNA, 33 bp, Homo sapien
ccctatgacttcaacccgcactgttcaaccaat

SEQ ID NO: 326252 - DNA, 33 bp, Homo sapien
ccctatgacttcaacctgcactgttcaaccaat

SEQ ID NO: 326253 - DNA, 33 bp, Homo sapien
agagttcccagaagaaacctcacaacacatggg

SEQ ID NO: 326254 - DNA, 33 bp, Homo sapien
agagttcccagaagaaccctcacaacacatggg

SEQ ID NO: 326255 - DNA, 33 bp, Homo sapien
tctggagttttgagacacggcctctctctccct

SEQ ID NO: 326256 - DNA, 33 bp, Homo sapien
tctggagttttgagacgcggcctctctctccct

SEQ ID NO: 326257 - DNA, 33 bp, Homo sapien
tgccactgcaggtacaatactcagaagcttact

SEQ ID NO: 326258 - DNA, 33 bp, Homo sapien
tgccactgcaggtacagtactcagaagcttact

SEQ ID NO: 326259 - DNA, 33 bp, Homo sapien
gtttaaatgagtggtacagagtatagggtggtt

SEQ ID NO: 326260 - DNA, 33 bp, Homo sapien
gtttaaatgagtggtatagagtatagggtggtt

SEQ ID NO: 326261 - DNA, 33 bp, Homo sapien
tcactttatttacatcccttattgcccaaaccg

SEQ ID NO: 326262 - DNA, 33 bp, Homo sapien
tcactttatttacatctcttattgcccaaaccg

SEQ ID NO: 326263 - DNA, 33 bp, Homo sapien
caaggagatgggatgaagcatttctctgatacc

SEQ ID NO: 326264 - DNA, 33 bp, Homo sapien
caaggagatgggatgaggcatttctctgatacc

SEQ ID NO: 326265 - DNA, 33 bp, Homo sapien
agggaggatgcaaaccactaattcatcatttta

SEQ ID NO: 326266 - DNA, 33 bp, Homo sapien
agggaggatgcaaaccgctaattcatcatttta

SEQ ID NO: 326267 - DNA, 33 bp, Homo sapien
aattaatataagggataaggttcgtcctaaaag

SEQ ID NO: 326268 - DNA, 33 bp, Homo sapien
aattaatataagggatcaggttcgtcctaaaag

SEQ ID NO: 326269 - DNA, 33 bp, Homo sapien
atttgctgtatgcccccgaaaccatcgtgtaat

SEQ ID NO: 326270 - DNA, 33 bp, Homo sapien
atttgctgtatgcccctgaaaccatcgtgtaat

SEQ ID NO: 326271 - DNA, 33 bp, Homo sapien
ttgctttcccaatggcaaaacacaagataccta

SEQ ID NO: 326272 - DNA, 33 bp, Homo sapien
ttgctttcccaatggcgaaacacaagataccta

SEQ ID NO: 326273 - DNA, 33 bp, Homo sapien
cctgggtctgtccttaactgtaggtctaaagtc

SEQ ID NO: 326274 - DNA, 33 bp, Homo sapien
cctgggtctgtccttatctgtaggtctaaagtc

SEQ ID NO: 326275 - DNA, 33 bp, Homo sapien
caccaactgatccttccgaaatgcattcatttg

SEQ ID NO: 326276 - DNA, 33 bp, Homo sapien
caccaactgatccttctgaaatgcattcatttg

SEQ ID NO: 326277 - DNA, 33 bp, Homo sapien
ttccctactatgtcaaatgctttggaaccaatt

SEQ ID NO: 326278 - DNA, 33 bp, Homo sapien
ttccctactatgtcaattgctttggaaccaatt

SEQ ID NO: 326279 - DNA, 33 bp, Homo sapien
cctttccatatgctgcaagagagatgttcttaa

SEQ ID NO: 326280 - DNA, 33 bp, Homo sapien
cctttccatatgctgccagagagatgttcttaa

SEQ ID NO: 326281 - DNA, 33 bp, Homo sapien
tgcctagactacaaaaacttcctaactggcttc

SEQ ID NO: 326282 - DNA, 33 bp, Homo sapien
tgcctagactacaaaagcttcctaactggcttc

SEQ ID NO: 326283 - DNA, 33 bp, Homo sapien
aggagctggggggcgacataggaagggtcagat

SEQ ID NO: 326284 - DNA, 33 bp, Homo sapien
aggagctggggggcgatataggaagggtcagat

SEQ ID NO: 326285 - DNA, 33 bp, Homo sapien
atatcccagtgatctcacctgttacatacccag

SEQ ID NO: 326286 - DNA, 33 bp, Homo sapien
atatcccagtgatctcgcctgttacatacccag

SEQ ID NO: 326287 - DNA, 33 bp, Homo sapien
accatttaccttttgacgcattttctttttggg

SEQ ID NO: 326288 - DNA, 33 bp, Homo sapien
accatttaccttttgatgcattttctttttggg

SEQ ID NO: 326289 - DNA, 33 bp, Homo sapien
agatcaagcgaagccaagagaaagggtgcacag

SEQ ID NO: 326290 - DNA, 33 bp, Homo sapien
agatcaagcgaagccaggagaaagggtgcacag

SEQ ID NO: 326291 - DNA, 33 bp, Homo sapien
agaacctgatatacaactggatcatacagtatg

SEQ ID NO: 326292 - DNA, 33 bp, Homo sapien
agaacctgatatacaattggatcatacagtatg

SEQ ID NO: 326293 - DNA, 33 bp, Homo sapien
cttgtttacctaagacaaacaattgcctgaaag

SEQ ID NO: 326294 - DNA, 33 bp, Homo sapien
cttgtttacctaagaccaacaattgcctgaaag

SEQ ID NO: 326295 - DNA, 33 bp, Homo sapien
ttatccaagccagcaaaaagtccaaatccatcc

SEQ ID NO: 326296 - DNA, 33 bp, Homo sapien
ttatccaagccagcaataagtccaaatccatcc

SEQ ID NO: 326297 - DNA, 33 bp, Homo sapien
atctgccccagaagaagtgaactctgtatacct

SEQ ID NO: 326298 - DNA, 33 bp, Homo sapien
atctgccccagaagaattgaactctgtatacct

SEQ ID NO: 326299 - DNA, 33 bp, Homo sapien
gatctatgataagctacctgcatgagatggaga

SEQ ID NO: 326300 - DNA, 33 bp, Homo sapien
gatctatgataagctagctgcatgagatggaga

SEQ ID NO: 326301 - DNA, 33 bp, Homo sapien
cctagctgcaaaggtcaccctttctcagaaggt

SEQ ID NO: 326302 - DNA, 33 bp, Homo sapien
cctagctgcaaaggtcgccctttctcagaaggt

SEQ ID NO: 326303 - DNA, 33 bp, Homo sapien
tcagcagtgatggggggattgtttcttaaatgc

SEQ ID NO: 326304 - DNA, 33 bp, Homo sapien
tcagcagtgatgggggtattgtttcttaaatgc

SEQ ID NO: 326305 - DNA, 33 bp, Homo sapien
tctctgatcctctaagaaactcctttgccagga

SEQ ID NO: 326306 - DNA, 33 bp, Homo sapien
tctctgatcctctaagcaactcctttgccagga

SEQ ID NO: 326307 - DNA, 33 bp, Homo sapien
atggcctactttggtacatattccatgtgcgtt

SEQ ID NO: 326308 - DNA, 33 bp, Homo sapien
atggcctactttggtatatattccatgtgcgtt

SEQ ID NO: 326309 - DNA, 33 bp, Homo sapien
ttggaaggcctcacacaggcaactgggcccaac

SEQ ID NO: 326310 - DNA, 33 bp, Homo sapien
ttggaaggcctcacaccggcaactgggcccaac

SEQ ID NO: 326311 - DNA, 33 bp, Homo sapien; identical to SEQ ID NO: 326309

SEQ ID NO: 326312 - DNA, 33 bp, Homo sapien; identical to SEQ ID NO: 326310

SEQ ID NO: 326313 - DNA, 33 bp, Homo sapien
cttattgaatataatccgaaagaaagttgctgg

SEQ ID NO: 326314 - DNA, 33 bp, Homo sapien
cttattgaatataatctgaaagaaagttgctgg

SEQ ID NO: 326315 - DNA, 33 bp, Homo sapien
tggactttattatttaacagttacgtagatctt

SEQ ID NO: 326316 - DNA, 33 bp, Homo sapien
tggactttattatttaccagttacgtagatctt

SEQ ID NO: 326317 - DNA, 33 bp, Homo sapien
ttctttttctcttttcactgcagatgcttggga

SEQ ID NO: 326318 - DNA, 33 bp, Homo sapien
ttctttttctcttttctctgcagatgcttggga

SEQ ID NO: 326319 - DNA, 33 bp, Homo sapien
tcctgctagttgagaacgcagaagtgagacatg

SEQ ID NO: 326320 - DNA, 33 bp, Homo sapien
tcctgctagttgagaatgcagaagtgagacatg

SEQ ID NO: 326321 - DNA, 33 bp, Homo sapien
gtttgaaccttccggacgccagaggaactgaac

SEQ ID NO: 326322 - DNA, 33 bp, Homo sapien
gtttgaaccttccggatgccagaggaactgaac

SEQ ID NO: 326323 - DNA, 33 bp, Homo sapien
agtgtgatcacagagacaccagtgcgtccagct

SEQ ID NO: 326324 - DNA, 33 bp, Homo sapien
agtgtgatcacagagataccagtgcgtccagct

SEQ ID NO: 326325 - DNA, 33 bp, Homo sapien
tatgaccaattatgataactgaaaactgttaag

SEQ ID NO: 326326 - DNA, 33 bp, Homo sapien
tatgaccaattatgatgactgaaaactgttaag

SEQ ID NO: 326327 - DNA, 33 bp, Homo sapien
atatccctacagacaacgaaagcacaccagaga

SEQ ID NO: 326328 - DNA, 33 bp, Homo sapien
atatccctacagacaatgaaagcacaccagaga

SEQ ID NO: 326329 - DNA, 33 bp, Homo sapien
gtgtggtgtattagaaagagcgcaggactgggg

SEQ ID NO: 326330 - DNA, 33 bp, Homo sapien
gtgtggtgtattagaacgagcgcaggactgggg

SEQ ID NO: 326331 - DNA, 33 bp, Homo sapien
gagaggaagagaataccgaacgccagggtgaac

SEQ ID NO: 326332 - DNA, 33 bp, Homo sapien
gagaggaagagaatactgaacgccagggtgaac

SEQ ID NO: 326333 - DNA, 33 bp, Homo sapien
tcaactgaccacagaccggctttcccagcctac

SEQ ID NO: 326334 - DNA, 33 bp, Homo sapien
tcaactgaccacagactggctttcccagcctac

SEQ ID NO: 326335 - DNA, 33 bp, Homo sapien
ctttctatgctatctgcactctctccggctggt

SEQ ID NO: 326336 - DNA, 33 bp, Homo sapien
ctttctatgctatctgtactctctccggctggt

SEQ ID NO: 326337 - DNA, 33 bp, Homo sapien
gggaaatttagaaataagaccctcatattaggg

SEQ ID NO: 326338 - DNA, 33 bp, Homo sapien
gggaaatttagaaataggaccctcatattaggg

SEQ ID NO: 326339 - DNA, 33 bp, Homo sapien
gccagctggctgtccaatgaaatgatggggcaa

SEQ ID NO: 326340 - DNA, 33 bp, Homo sapien
gccagctggctgtccactgaaatgatggggcaa

SEQ ID NO: 326341 - DNA, 33 bp, Homo sapien
ccacatccccaaaatacatcataagagcaccca

SEQ ID NO: 326342 - DNA, 33 bp, Homo sapien
ccacatccccaaaatatatcataagagcaccca

SEQ ID NO: 326343 - DNA, 33 bp, Homo sapien
agctaatatataaaaacgcagttagcaccatgc

SEQ ID NO: 326344 - DNA, 33 bp, Homo sapien
agctaatatataaaaatgcagttagcaccatgc

SEQ ID NO: 326345 - DNA, 33 bp, Homo sapien
cgggatccattgtctaaagtcttagagtggtgc

SEQ ID NO: 326346 - DNA, 33 bp, Homo sapien
cgggatccattgtctacagtcttagagtggtgc

SEQ ID NO: 326347 - DNA, 33 bp, Homo sapien
tttttgacttggtgaaacagttctgcagagaaa

SEQ ID NO: 326348 - DNA, 33 bp, Homo sapien
tttttgacttggtgaagcagttctgcagagaaa

SEQ ID NO: 326349 - DNA, 33 bp, Homo sapien
aactacatgaaaaaaacagccactgggcatgta

SEQ ID NO: 326350 - DNA, 33 bp, Homo sapien
aactacatgaaaaaaatagccactgggcatgta

SEQ ID NO: 326351 - DNA, 33 bp, Homo sapien
gtgacagagtgatatcaagggagaaaaagaaga

SEQ ID NO: 326352 - DNA, 33 bp, Homo sapien
gtgacagagtgatatcgagggagaaaaagaaga

SEQ ID NO: 326353 - DNA, 33 bp, Homo sapien
ttgcctaccaatgtagaaaggataaatgaggcc

SEQ ID NO: 326354 - DNA, 33 bp, Homo sapien
ttgcctaccaatgtaggaaggataaatgaggcc

SEQ ID NO: 326355 - DNA, 33 bp, Homo sapien
ctccgatgtattgaggaagaagctgatggccag

SEQ ID NO: 326356 - DNA, 33 bp, Homo sapien
ctccgatgtattgagggagaagctgatggccag

SEQ ID NO: 326357 - DNA, 33 bp, Homo sapien
caagaaacagcaattaaaacgacaacaaaagtc

SEQ ID NO: 326358 - DNA, 33 bp, Homo sapien
caagaaacagcaattagaacgacaacaaaagtc

SEQ ID NO: 326359 - DNA, 33 bp, Homo sapien
gaagcctatggtcatacatccgctcctggatga

SEQ ID NO: 326360 - DNA, 33 bp, Homo sapien
gaagcctatggtcatatatccgctcctggatga

SEQ ID NO: 326361 - DNA, 33 bp, Homo sapien
acacctcagggctacacggatcacaagtggtgt

SEQ ID NO: 326362 - DNA, 33 bp, Homo sapien
acacctcagggctacatggatcacaagtggtgt

SEQ ID NO: 326363 - DNA, 33 bp, Homo sapien
ccaggtaatggccaaccagataattgggaccaa

SEQ ID NO: 326364 - DNA, 33 bp, Homo sapien
ccaggtaatggccaactagataattgggaccaa

SEQ ID NO: 326365 - DNA, 33 bp, Homo sapien
aaaaaagtttaaaagccattatctatacacaag

SEQ ID NO: 326366 - DNA, 33 bp, Homo sapien
aaaaaagtttaaaagcgattatctatacacaag

SEQ ID NO: 326367 - DNA, 33 bp, Homo sapien
tggatcgttgtgaccacgcaaaagctggaggca

SEQ ID NO: 326368 - DNA, 33 bp, Homo sapien
tggatcgttgtgaccatgcaaaagctggaggca

SEQ ID NO: 326369 - DNA, 33 bp, Homo sapien
ggataacatcaggcaaacccaagctatgttgcg

SEQ ID NO: 326370 - DNA, 33 bp, Homo sapien
ggataacatcaggcaagcccaagctatgttgcg

SEQ ID NO: 326371 - DNA, 33 bp, Homo sapien
aaataaataaaaggcacgagtgttctctgattc

SEQ ID NO: 326372 - DNA, 33 bp, Homo sapien
aaataaataaaaggcatgagtgttctctgattc

SEQ ID NO: 326373 - DNA, 33 bp, Homo sapien
ctcacaacctgaagccactctctgatagtgtca

SEQ ID NO: 326374 - DNA, 33 bp, Homo sapien
ctcacaacctgaagccgctctctgatagtgtca

SEQ ID NO: 326375 - DNA, 33 bp, Homo sapien
tcagaggtcggtatggccaagaaggacagaagc

SEQ ID NO: 326376 - DNA, 33 bp, Homo sapien
tcagaggtcggtatggtcaagaaggacagaagc

SEQ ID NO: 326377 - DNA, 33 bp, Homo sapien
ctatgaaagttttcacagaagaccagacacagt

SEQ ID NO: 326378 - DNA, 33 bp, Homo sapien
ctatgaaagttttcacggaagaccagacacagt

SEQ ID NO: 326379 - DNA, 33 bp, Homo sapien
cagtccctgctctgaaagcttgatgaagacctc

SEQ ID NO: 326380 - DNA, 33 bp, Homo sapien
cagtccctgctctgaacgcttgatgaagacctc

SEQ ID NO: 326381 - DNA, 33 bp, Homo sapien
attctggcccagatgccgaaaggattgcctcca

SEQ ID NO: 326382 - DNA, 33 bp, Homo sapien
attctggcccagatgctgaaaggattgcctcca

SEQ ID NO: 326383 - DNA, 33 bp, Homo sapien
ttgcagaggcagccaactggccctcatccagcc

SEQ ID NO: 326384 - DNA, 33 bp, Homo sapien
ttgcagaggcagccaattggccctcatccagcc

SEQ ID NO: 326385 - DNA, 33 bp, Homo sapien
aaatagtaagtgtccaagtaatgctagctattg

SEQ ID NO: 326386 - DNA, 33 bp, Homo sapien
aaatagtaagtgtccaggtaatgctagctattg

SEQ ID NO: 326387 - DNA, 33 bp, Homo sapien
gactctttcccagacacgtgccggtggggtcac

SEQ ID NO: 326388 - DNA, 33 bp, Homo sapien
gactctttcccagacatgtgccggtggggtcac

SEQ ID NO: 326389 - DNA, 33 bp, Homo sapien
tttaatcctatctccactcaaccagtccagaga

SEQ ID NO: 326390 - DNA, 33 bp, Homo sapien
tttaatcctatctccattcaaccagtccagaga

SEQ ID NO: 326391 - DNA, 33 bp, Homo sapien
ttatgactcaaattaaggtgtcccattttgaga

SEQ ID NO: 326392 - DNA, 33 bp, Homo sapien
ttatgactcaaattaatgtgtcccattttgaga

SEQ ID NO: 326393 - DNA, 33 bp, Homo sapien
agggataggaactcaacggtagcgcccatgcat

SEQ ID NO: 326394 - DNA, 33 bp, Homo sapien
agggataggaactcaatggtagcgcccatgcat

SEQ ID NO: 326395 - DNA, 33 bp, Homo sapien
tactcttttcaacaagaacttgagaaatgacag

SEQ ID NO: 326396 - DNA, 33 bp, Homo sapien
tactcttttcaacaaggacttgagaaatgacag

SEQ ID NO: 326397 - DNA, 33 bp, Homo sapien
caactctctgaggacaaaaccaagcaccatgaa

SEQ ID NO: 326398 - DNA, 33 bp, Homo sapien
caactctctgaggacagaaccaagcaccatgaa

SEQ ID NO: 326399 - DNA, 33 bp, Homo sapien
tctcttgttctggcaacctaaaggctaattata

SEQ ID NO: 326400 - DNA, 33 bp, Homo sapien
tctcttgttctggcaagctaaaggctaattata

SEQ ID NO: 326401 - DNA, 33 bp, Homo sapien
agagtattaagtccagaattcaagttacatgag

SEQ ID NO: 326402 - DNA, 33 bp, Homo sapien
agagtattaagtccagcattcaagttacatgag

SEQ ID NO: 326403 - DNA, 33 bp, Homo sapien
tgcccaagttgactacactacgacccaggggac

SEQ ID NO: 326404 - DNA, 33 bp, Homo sapien
tgcccaagttgactacgctacgacccaggggac

SEQ ID NO: 326405 - DNA, 33 bp, Homo sapien
gaggattccattattcaaaagcagctactcaca

SEQ ID NO: 326406 - DNA, 33 bp, Homo sapien
gaggattccattattccaaagcagctactcaca

SEQ ID NO: 326407 - DNA, 33 bp, Homo sapien
gactgttttctgtgaacgtctttggtggaaact

SEQ ID NO: 326408 - DNA, 33 bp, Homo sapien
gactgttttctgtgaatgtctttggtggaaact

SEQ ID NO: 326409 - DNA, 33 bp, Homo sapien
cacggggatgaagagtcacaagagccctagctc

SEQ ID NO: 326410 - DNA, 33 bp, Homo sapien
cacggggatgaagagttacaagagccctagctc

SEQ ID NO: 326411 - DNA, 33 bp, Homo sapien
gggttttgcagctcacactgttttctagtccaa

SEQ ID NO: 326412 - DNA, 33 bp, Homo sapien
gggttttgcagctcaccctgttttctagtccaa

SEQ ID NO: 326413 - DNA, 33 bp, Homo sapien
tatccagattgtgtcacagtttgctgaaaggac

SEQ ID NO: 326414 - DNA, 33 bp, Homo sapien
tatccagattgtgtcatagtttgctgaaaggac

SEQ ID NO: 326415 - DNA, 33 bp, Homo sapien
caaaagaaaggctcaccggccaactctccagta

SEQ ID NO: 326416 - DNA, 33 bp, Homo sapien
caaaagaaaggctcactggccaactctccagta

SEQ ID NO: 326417 - DNA, 33 bp, Homo sapien
aagaaacagaacataacggatcccactgagagt

SEQ ID NO: 326418 - DNA, 33 bp, Homo sapien
aagaaacagaacataatggatcccactgagagt

SEQ ID NO: 326419 - DNA, 33 bp, Homo sapien
gcacattcctcaggccagacggtgctcggcagg

SEQ ID NO: 326420 - DNA, 33 bp, Homo sapien
gcacattcctcaggccggacggtgctcggcagg

SEQ ID NO: 326421 - DNA, 33 bp, Homo sapien
gaagcagaaacaggcccagagagggggagtgat

SEQ ID NO: 326422 - DNA, 33 bp, Homo sapien
gaagcagaaacaggcctagagagggggagtgat

SEQ ID NO: 326423 - DNA, 33 bp, Homo sapien
gggtggagctggccaccgtaactcaatgtcctg

SEQ ID NO: 326424 - DNA, 33 bp, Homo sapien
gggtggagctggccactgtaactcaatgtcctg

SEQ ID NO: 326425 - DNA, 33 bp, Homo sapien
aacagaagcagaaagaatagaccaggcttccca

SEQ ID NO: 326426 - DNA, 33 bp, Homo sapien
aacagaagcagaaagagtagaccaggcttccca

SEQ ID NO: 326427 - DNA, 33 bp, Homo sapien
tatcattatttgtgtccatcatttgagatatat

SEQ ID NO: 326428 - DNA, 33 bp, Homo sapien
tatcattatttgtgtctatcatttgagatatat

SEQ ID NO: 326429 - DNA, 33 bp, Homo sapien
agacagaatccacagcaatggagtgggtgctgg

SEQ ID NO: 326430 - DNA, 33 bp, Homo sapien
agacagaatccacagcgatggagtgggtgctgg

SEQ ID NO: 326431 - DNA, 33 bp, Homo sapien
tctagttccaaaacctcagaatcttattgccaa

SEQ ID NO: 326432 - DNA, 33 bp, Homo sapien
tctagttccaaaaccttagaatcttattgccaa

SEQ ID NO: 326433 - DNA, 33 bp, Homo sapien
gttggtgatgctatgaatcagcaggaaaacaga

SEQ ID NO: 326434 - DNA, 33 bp, Homo sapien
gttggtgatgctatgattcagcaggaaaacaga

SEQ ID NO: 326435 - DNA, 33 bp, Homo sapien
ggttaatgtatgcttcaaatgaattcatgtata

SEQ ID NO: 326436 - DNA, 33 bp, Homo sapien
ggttaatgtatgcttcgaatgaattcatgtata

SEQ ID NO: 326437 - DNA, 33 bp, Homo sapien
tactcagcgacgtttaagaccagaacccaggac

SEQ ID NO: 326438 - DNA, 33 bp, Homo sapien
tactcagcgacgtttaggaccagaacccaggac

SEQ ID NO: 326439 - DNA, 33 bp, Homo sapien
gtctattttgattccacctttctcattgcccac

SEQ ID NO: 326440 - DNA, 33 bp, Homo sapien
gtctattttgattccatctttctcattgcccac

SEQ ID NO: 326441 - DNA, 33 bp, Homo sapien
ctggcttcgtattagcacttgatggttttcaaa

SEQ ID NO: 326442 - DNA, 33 bp, Homo sapien
ctggcttcgtattagcccttgatggttttcaaa

SEQ ID NO: 326443 - DNA, 33 bp, Homo sapien
atgctcatggaagcaacgtagaaaacactgaaa

SEQ ID NO: 326444 - DNA, 33 bp, Homo sapien
atgctcatggaagcaatgtagaaaacactgaaa

SEQ ID NO: 326445 - DNA, 33 bp, Homo sapien
caaaatactatgtataaacaagcatggtctcaa

SEQ ID NO: 326446 - DNA, 33 bp, Homo sapien
caaaatactatgtatagacaagcatggtctcaa

SEQ ID NO: 326447 - DNA, 33 bp, Homo sapien
gtacccagtcaagctacgggtgaacagagccta

SEQ ID NO: 326448 - DNA, 33 bp, Homo sapien
gtacccagtcaagctatgggtgaacagagccta

SEQ ID NO: 326449 - DNA, 33 bp, Homo sapien
ttttgtactcctggaaacctggatataaatcct

SEQ ID NO: 326450 - DNA, 33 bp, Homo sapien
ttttgtactcctggaagcctggatataaatcct

SEQ ID NO: 326451 - DNA, 33 bp, Homo sapien
cactgggctaaaatcacggcctgtgttctttct

SEQ ID NO: 326452 - DNA, 33 bp, Homo sapien
cactgggctaaaatcatggcctgtgttctttct

SEQ ID NO: 326453 - DNA, 33 bp, Homo sapien
atgacctactaaggaacgttgtctgctgctgcc

SEQ ID NO: 326454 - DNA, 33 bp, Homo sapien
atgacctactaaggaaggttgtctgctgctgcc

SEQ ID NO: 326455 - DNA, 33 bp, Homo sapien
tggagacccagttgcaaagtttcagggatgacc

SEQ ID NO: 326456 - DNA, 33 bp, Homo sapien
tggagacccagttgcatagtttcagggatgacc

SEQ ID NO: 326457 - DNA, 33 bp, Homo sapien
actaaagtaattgaaaaagtgcccagttatgta

SEQ ID NO: 326458 - DNA, 33 bp, Homo sapien
actaaagtaattgaaagagtgcccagttatgta

SEQ ID NO: 326459 - DNA, 33 bp, Homo sapien
tccatatttcctgatacagcaacaccaattaaa

SEQ ID NO: 326460 - DNA, 33 bp, Homo sapien
tccatatttcctgatatagcaacaccaattaaa

SEQ ID NO: 326461 - DNA, 33 bp, Homo sapien
tttcacaccagggacactaatagcagccaaatc

SEQ ID NO: 326462 - DNA, 33 bp, Homo sapien
tttcacaccagggacattaatagcagccaaatc

SEQ ID NO: 326463 - DNA, 33 bp, Homo sapien
ccttgagacaatatgaaccagagtagtgttgga

SEQ ID NO: 326464 - DNA, 33 bp, Homo sapien
ccttgagacaatatgagccagagtagtgttgga

SEQ ID NO: 326465 - DNA, 33 bp, Homo sapien
attatctctccagatactaggtctgccccgatc

SEQ ID NO: 326466 - DNA, 33 bp, Homo sapien
attatctctccagatattaggtctgccccgatc

SEQ ID NO: 326467 - DNA, 33 bp, Homo sapien
ttacacaatgttacgccattttctcatgtcctg

SEQ ID NO: 326468 - DNA, 33 bp, Homo sapien
ttacacaatgttacgctattttctcatgtcctg

SEQ ID NO: 326469 - DNA, 33 bp, Homo sapien
atggaactgttatttcacatctctgaggctcag

SEQ ID NO: 326470 - DNA, 33 bp, Homo sapien
atggaactgttatttcgcatctctgaggctcag

SEQ ID NO: 326471 - DNA, 33 bp, Homo sapien
tgggttttcttagcaaactgaggtaatcacact

SEQ ID NO: 326472 - DNA, 33 bp, Homo sapien
tgggttttcttagcaatctgaggtaatcacact

SEQ ID NO: 326473 - DNA, 33 bp, Homo sapien
ccaatgagaacagcacaatagaggaagggatta

SEQ ID NO: 326474 - DNA, 33 bp, Homo sapien
ccaatgagaacagcacgatagaggaagggatta

SEQ ID NO: 326475 - DNA, 33 bp, Homo sapien
ccctttgggaatccaaccaccacgctgtgagac

SEQ ID NO: 326476 - DNA, 33 bp, Homo sapien
ccctttgggaatccaatcaccacgctgtgagac

SEQ ID NO: 326477 - DNA, 33 bp, Homo sapien
cttgtgagagggcccaagtgagaacttactccc

SEQ ID NO: 326478 - DNA, 33 bp, Homo sapien
cttgtgagagggcccatgtgagaacttactccc

SEQ ID NO: 326479 - DNA, 33 bp, Homo sapien
gaggttgctactgacaagtatggatttactgct

SEQ ID NO: 326480 - DNA, 33 bp, Homo sapien
gaggttgctactgacacgtatggatttactgct

SEQ ID NO: 326481 - DNA, 33 bp, Homo sapien
ctttatctcctatgcccggaaagcctagtcatt

SEQ ID NO: 326482 - DNA, 33 bp, Homo sapien
ctttatctcctatgcctggaaagcctagtcatt

SEQ ID NO: 326483 - DNA, 33 bp, Homo sapien
catcagcacttagaagcagaggaaggtttattt

SEQ ID NO: 326484 - DNA, 33 bp, Homo sapien
catcagcacttagaaggagaggaaggtttattt

SEQ ID NO: 326485 - DNA, 33 bp, Homo sapien
gggtcacttaagcttagggtttcaagagcagca

SEQ ID NO: 326486 - DNA, 33 bp, Homo sapien
gggtcacttaagcttatggtttcaagagcagca

SEQ ID NO: 326487 - DNA, 33 bp, Homo sapien
atgaacatcatgaagacagagaaatgatgactg

SEQ ID NO: 326488 - DNA, 33 bp, Homo sapien
atgaacatcatgaagagagagaaatgatgactg

SEQ ID NO: 326489 - DNA, 33 bp, Homo sapien
gggatgagccaggaaaatgtagaagctgaggag

SEQ ID NO: 326490 - DNA, 33 bp, Homo sapien
gggatgagccaggaaagtgtagaagctgaggag

SEQ ID NO: 326491 - DNA, 33 bp, Homo sapien
cacaagtgcctgacagaacgttccattccagct

SEQ ID NO: 326492 - DNA, 33 bp, Homo sapien
cacaagtgcctgacaggacgttccattccagct

SEQ ID NO: 326493 - DNA, 33 bp, Homo sapien
agaaggagctggtctcaaggtggcagctggaat

SEQ ID NO: 326494 - DNA, 33 bp, Homo sapien
agaaggagctggtctcgaggtggcagctggaat

SEQ ID NO: 326495 - DNA, 33 bp, Homo sapien
atccttccctctggaaccatgaagcccccaaac

SEQ ID NO: 326496 - DNA, 33 bp, Homo sapien
atccttccctctggaatcatgaagcccccaaac

SEQ ID NO: 326497 - DNA, 33 bp, Homo sapien
gtgagggaaagggagaaatcaaggcaaagtcct

SEQ ID NO: 326498 - DNA, 33 bp, Homo sapien
gtgagggaaagggagagatcaaggcaaagtcct

SEQ ID NO: 326499 - DNA, 33 bp, Homo sapien
tgagatggtttgcaacacaggccctgggtctgt

SEQ ID NO: 326500 - DNA, 33 bp, Homo sapien
tgagatggtttgcaacgcaggccctgggtctgt

SEQ ID NO: 326501 - DNA, 33 bp, Homo sapien
acttatttctagatgaactgtgatatggtttgg

SEQ ID NO: 326502 - DNA, 33 bp, Homo sapien
acttatttctagatgatctgtgatatggtttgg

SEQ ID NO: 326503 - DNA, 33 bp, Homo sapien
gtgtcacagaaccaggaccatcactttcccttg

SEQ ID NO: 326504 - DNA, 33 bp, Homo sapien
gtgtcacagaaccagggccatcactttcccttg

SEQ ID NO: 326505 - DNA, 33 bp, Homo sapien
gacttgtataggatgacaatctttaaaaggaga

SEQ ID NO: 326506 - DNA, 33 bp, Homo sapien
gacttgtataggatgagaatctttaaaaggaga

SEQ ID NO: 326507 - DNA, 33 bp, Homo sapien
cactaaatccagttaacgctcagggagagggga

SEQ ID NO: 326508 - DNA, 33 bp, Homo sapien
cactaaatccagttaatgctcagggagagggga

SEQ ID NO: 326509 - DNA, 33 bp, Homo sapien
aaaacatctgcataaacgagcgagtccaccaat

SEQ ID NO: 326510 - DNA, 33 bp, Homo sapien
aaaacatctgcataaatgagcgagtccaccaat

SEQ ID NO: 326511 - DNA, 33 bp, Homo sapien
gagcaggaatccttccaactcacacccttcgcc

SEQ ID NO: 326512 - DNA, 33 bp, Homo sapien
gagcaggaatccttccgactcacacccttcgcc

SEQ ID NO: 326513 - DNA, 33 bp, Homo sapien
cttggcctgagggctgaactaggcgaagggtgt

SEQ ID NO: 326514 - DNA, 33 bp, Homo sapien
cttggcctgagggctggactaggcgaagggtgt

SEQ ID NO: 326515 - DNA, 33 bp, Homo sapien
ccagaatgcttccccccgccacagctaacagga

SEQ ID NO: 326516 - DNA, 33 bp, Homo sapien
ccagaatgcttcccccggccacagctaacagga

SEQ ID NO: 326517 - DNA, 33 bp, Homo sapien
tgggtcctctcttggcgcttcctaatattaggt

SEQ ID NO: 326518 - DNA, 33 bp, Homo sapien
tgggtcctctcttggctcttcctaatattaggt

SEQ ID NO: 326519 - DNA, 33 bp, Homo sapien
catcttttggcacaaacgccgtggagcaatgtt

SEQ ID NO: 326520 - DNA, 33 bp, Homo sapien
catcttttggcacaaaggccgtggagcaatgtt

SEQ ID NO: 326521 - DNA, 33 bp, Homo sapien
tcctcctagcatgagtaacaggcactgtaaatc

SEQ ID NO: 326522 - DNA, 33 bp, Homo sapien
tcctcctagcatgagtgacaggcactgtaaatc

SEQ ID NO: 326523 - DNA, 33 bp, Homo sapien
gggtttacaatgtggactcacctcttaccagct

SEQ ID NO: 326524 - DNA, 33 bp, Homo sapien
gggtttacaatgtggagtcacctcttaccagct
